United States Patent Application Publication US 2005/0244851 A1 - sequence listing, part 87

SEQ ID NO: 3388863 - DNA, 25 bp, Homo sapien
tgaagccaaaatctgcttggttcat

SEQ ID NO: 3388864 - DNA, 25 bp, Homo sapien
gaagccaaaatctgcttggttcatt

SEQ ID NO: 3388865 - DNA, 25 bp, Homo sapien
gccaaaatctgcttggttcattgaa

SEQ ID NO: 3388866 - DNA, 25 bp, Homo sapien
cgccaaggacttactaacaaacaca

SEQ ID NO: 3388867 - DNA, 25 bp, Homo sapien
ggacaaatgtccagccccagataag

SEQ ID NO: 3388868 - DNA, 25 bp, Homo sapien
tcagataacagcaagtcctgtggac

SEQ ID NO: 3388869 - DNA, 25 bp, Homo sapien
acaaagagtcatggtcctttctctc

SEQ ID NO: 3388870 - DNA, 25 bp, Homo sapien
tcgggcgtctcctgtagttgagcac

SEQ ID NO: 3388871 - DNA, 25 bp, Homo sapien
tattctcaaaaagattccctccagc

SEQ ID NO: 3388872 - DNA, 25 bp, Homo sapien
ttagccctggtcaatattacaaagt

SEQ ID NO: 3388873 - DNA, 25 bp, Homo sapien
ccctggtcaatattacaaagtagat

SEQ ID NO: 3388874 - DNA, 25 bp, Homo sapien
caaagtagatataattgtacaaact

SEQ ID NO: 3388875 - DNA, 25 bp, Homo sapien
ccatcactatttaataaccacagaa

SEQ ID NO: 3388876 - DNA, 25 bp, Homo sapien
cagaagagctgacagatggcagaaa

SEQ ID NO: 3388877 - DNA, 25 bp, Homo sapien
ctgtcatgccatcactatttaataa

SEQ ID NO: 3388878 - DNA, 25 bp, Homo sapien
tatttaataaccacagaagagctga

SEQ ID NO: 3388879 - DNA, 25 bp, Homo sapien
agatctattcaattgtgtgaaaagc

SEQ ID NO: 3388880 - DNA, 25 bp, Homo sapien
ggctttgaactagcttccttgggtg

SEQ ID NO: 3388881 - DNA, 25 bp, Homo sapien
gatctattcaattgtgtgaaaagct

SEQ ID NO: 3388882 - DNA, 25 bp, Homo sapien
ttgaactagcttccttgggtggaat

SEQ ID NO: 3388883 - DNA, 25 bp, Homo sapien
tctccaggaatcatagtcactgtgt

SEQ ID NO: 3388884 - DNA, 25 bp, Homo sapien
tgaacataatcttgacaggcagcat

SEQ ID NO: 3388885 - DNA, 25 bp, Homo sapien
cagagccactggctactgtcagcat

SEQ ID NO: 3388886 - DNA, 25 bp, Homo sapien
tggtaggttggaaaattgccttcac

SEQ ID NO: 3388887 - DNA, 25 bp, Homo sapien
gaactgccatgatggcattatgaat

SEQ ID NO: 3388888 - DNA, 25 bp, Homo sapien
catgatggcattatgaatttcctct

SEQ ID NO: 3388889 - DNA, 25 bp, Homo sapien
tgccatgatggcattatgaatttcc

SEQ ID NO: 3388890 - DNA, 25 bp, Homo sapien
tgaactgccatgatggcattatgaa

SEQ ID NO: 3388891 - DNA, 25 bp, Homo sapien
gatggtggcagggtgtcgtcagttt

SEQ ID NO: 3388892 - DNA, 25 bp, Homo sapien
cagggtgtcgtcagttttaacgcta

SEQ ID NO: 3388893 - DNA, 25 bp, Homo sapien
ttgaaggatttgtatgatggtggca

SEQ ID NO: 3388894 - DNA, 25 bp, Homo sapien
gttgttgaaggatttgtatgatggt

SEQ ID NO: 3388895 - DNA, 25 bp, Homo sapien
ccaggtctccacgtttggcaaattt

SEQ ID NO: 3388896 - DNA, 25 bp, Homo sapien
tagtcatgatctttaggctctctgt

SEQ ID NO: 3388897 - DNA, 25 bp, Homo sapien
gctggaaggcatattcagcaatgca

SEQ ID NO: 3388898 - DNA, 25 bp, Homo sapien
gcacaaagacttggccttagtcatg

SEQ ID NO: 3388899 - DNA, 25 bp, Homo sapien
catctcccagtttcgtgatgttgac

SEQ ID NO: 3388900 - DNA, 25 bp, Homo sapien
ttctccacaatcatgtcttctaagg

SEQ ID NO: 3388901 - DNA, 25 bp, Homo sapien
tgcattgtggcattctccacaatca

SEQ ID NO: 3388902 - DNA, 25 bp, Homo sapien
gcattctccacaatcatgtcttcta

SEQ ID NO: 3388903 - DNA, 25 bp, Homo sapien
tgtggcattctccacaatcatgtct

SEQ ID NO: 3388904 - DNA, 25 bp, Homo sapien
gccccaccaatcaaacctgtgcaga

SEQ ID NO: 3388905 - DNA, 25 bp, Homo sapien
gttgataacattgccataaagactg

SEQ ID NO: 3388906 - DNA, 25 bp, Homo sapien
caggcacaaggcctgccccaccaat

SEQ ID NO: 3388907 - DNA, 25 bp, Homo sapien
catatagacatagttggctccaggc

SEQ ID NO: 3388908 - DNA, 25 bp, Homo sapien
tagggtttgccagatttgtattgac

SEQ ID NO: 3388909 - DNA, 25 bp, Homo sapien
tccagcatgatacaaattgccagca

SEQ ID NO: 3388910 - DNA, 25 bp, Homo sapien
aaattgtcacattgccttgaagctg

SEQ ID NO: 3388911 - DNA, 25 bp, Homo sapien
ataggagtggagtttgaggtaatcc

SEQ ID NO: 3388912 - DNA, 25 bp, Homo sapien
gtggacacttttgttgtccaaggat

SEQ ID NO: 3388913 - DNA, 25 bp, Homo sapien
gtgtggacacttttgttgtccaagg

SEQ ID NO: 3388914 - DNA, 25 bp, Homo sapien
tgcagtgtggacacttttgttgtcc

SEQ ID NO: 3388915 - DNA, 25 bp, Homo sapien
cagtgtggacacttttgttgtccaa

SEQ ID NO: 3388916 - DNA, 25 bp, Homo sapien
catttcaaatgtggtctatgatgtt

SEQ ID NO: 3388917 - DNA, 25 bp, Homo sapien
ggtctatgatgttttgaatgatgtc

SEQ ID NO: 3388918 - DNA, 25 bp, Homo sapien
tctatgatgttttgaatgatgtcca

SEQ ID NO: 3388919 - DNA, 25 bp, Homo sapien
gatgttttgaatgatgtccaatgtg

SEQ ID NO: 3388920 - DNA, 25 bp, Homo sapien
cttgtggagtctgcagtagctaagc

SEQ ID NO: 3388921 - DNA, 25 bp, Homo sapien
agtagctaagctggctagggttttt

SEQ ID NO: 3388922 - DNA, 25 bp, Homo sapien
tgtggagtctgcagtagctaagctg

SEQ ID NO: 3388923 - DNA, 25 bp, Homo sapien
ttcttgtggagtctgcagtagctaa

SEQ ID NO: 3388924 - DNA, 25 bp, Homo sapien
gatatgtccagaaaccctggcttct

SEQ ID NO: 3388925 - DNA, 25 bp, Homo sapien
tccataatactatcgatatgtccag

SEQ ID NO: 3388926 - DNA, 25 bp, Homo sapien
catttctttccataatactatcgat

SEQ ID NO: 3388927 - DNA, 25 bp, Homo sapien
tatcgatatgtccagaaaccctggc

SEQ ID NO: 3388928 - DNA, 25 bp, Homo sapien
ctgtttatttacttgaacctgaggg

SEQ ID NO: 3388929 - DNA, 25 bp, Homo sapien
ccagatggtatacatcctgctacta

SEQ ID NO: 3388930 - DNA, 25 bp, Homo sapien
gaacctgaggggcatgcaaatattt

SEQ ID NO: 3388931 - DNA, 25 bp, Homo sapien
tttcctgatggcaccgaatggtcca

SEQ ID NO: 3388932 - DNA, 25 bp, Homo sapien
tcttgggatgatactaggacctgtg

SEQ ID NO: 3388933 - DNA, 25 bp, Homo sapien
tgaagcctcccaagcatgactgctg

SEQ ID NO: 3388934 - DNA, 25 bp, Homo sapien
tttacagcagtcagcgaagtcgtgc

SEQ ID NO: 3388935 - DNA, 25 bp, Homo sapien
tcgtgcagatctcatacataaggct

SEQ ID NO: 3388936 - DNA, 25 bp, Homo sapien
cgtatctgcagccctcttcacagaa

SEQ ID NO: 3388937 - DNA, 25 bp, Homo sapien
ggcttcctgtgaatccagatggaca

SEQ ID NO: 3388938 - DNA, 25 bp, Homo sapien
ctttctcgcagtggcttcctgtgaa

SEQ ID NO: 3388939 - DNA, 25 bp, Homo sapien
ttgttgggagccacacacgttccac

SEQ ID NO: 3388940 - DNA, 25 bp, Homo sapien
taagaccctcagtaccattaaacca

SEQ ID NO: 3388941 - DNA, 25 bp, Homo sapien
gaactggtggacctacaagtaagta

SEQ ID NO: 3388942 - DNA, 25 bp, Homo sapien
tgtttctggtcaagtcccctcaatg

SEQ ID NO: 3388943 - DNA, 25 bp, Homo sapien
tcagcagaaggctcacgactggact

SEQ ID NO: 3388944 - DNA, 25 bp, Homo sapien
ctctctatactccaatgtcataaag

SEQ ID NO: 3388945 - DNA, 25 bp, Homo sapien
aagaaaatccttctctctatactcc

SEQ ID NO: 3388946 - DNA, 25 bp, Homo sapien
tactccaatgtcataaagtccatgg

SEQ ID NO: 3388947 - DNA, 25 bp, Homo sapien
ccaatgtcataaagtccatggccat

SEQ ID NO: 3388948 - DNA, 25 bp, Homo sapien
cagacaatgttctgaacataagaat

SEQ ID NO: 3388949 - DNA, 25 bp, Homo sapien
tgtctatgaggttagataagtgggc

SEQ ID NO: 3388950 - DNA, 25 bp, Homo sapien
gataagtgggcattcagcattaact

SEQ ID NO: 3388951 - DNA, 25 bp, Homo sapien
tcagcattaactgtgcatcagacaa

SEQ ID NO: 3388952 - DNA, 25 bp, Homo sapien
acttctgagctaaagagggctttcg

SEQ ID NO: 3388953 - DNA, 25 bp, Homo sapien
ccacttcccaggtgtaacttctgag

SEQ ID NO: 3388954 - DNA, 25 bp, Homo sapien
ttttatcaatcttgatccctttagg

SEQ ID NO: 3388955 - DNA, 25 bp, Homo sapien
gagggctttcgaattttatcaatct

SEQ ID NO: 3388956 - DNA, 25 bp, Homo sapien
ttcttccctatccactttgaccagg

SEQ ID NO: 3388957 - DNA, 25 bp, Homo sapien
tcttccctatccactttgaccaggt

SEQ ID NO: 3388958 - DNA, 25 bp, Homo sapien
cctgctgctgtaacttctcacttgg

SEQ ID NO: 3388959 - DNA, 25 bp, Homo sapien
gctgctgtaacttctcacttggctg

SEQ ID NO: 3388960 - DNA, 25 bp, Homo sapien
aagcagttctgtcgactatattcat

SEQ ID NO: 3388961 - DNA, 25 bp, Homo sapien
ctggaagcagttctgtcgactatat

SEQ ID NO: 3388962 - DNA, 25 bp, Homo sapien
ggaagcagttctgtcgactatattc

SEQ ID NO: 3388963 - DNA, 25 bp, Homo sapien
gaagcagttctgtcgactatattca

SEQ ID NO: 3388964 - DNA, 25 bp, Homo sapien
taaagaacgagctattcattgattc

SEQ ID NO: 3388965 - DNA, 25 bp, Homo sapien
cccattgtcacgttttaaaggcatt

SEQ ID NO: 3388966 - DNA, 25 bp, Homo sapien
ttttgtgcttggtgtgttcttgctt

SEQ ID NO: 3388967 - DNA, 25 bp, Homo sapien
tcctttttaaagaacgagctattca

SEQ ID NO: 3388968 - DNA, 25 bp, Homo sapien
agaatgggccactgtgatacatcta

SEQ ID NO: 3388969 - DNA, 25 bp, Homo sapien
gatgtgtgtataaccagaatgggcc

SEQ ID NO: 3388970 - DNA, 25 bp, Homo sapien
tacttgccacatgaatcctaaagct

SEQ ID NO: 3388971 - DNA, 25 bp, Homo sapien
caatgatgtgtgtataaccagaatg

SEQ ID NO: 3388972 - DNA, 25 bp, Homo sapien
gatttttgtcctagcgcgtcttaac

SEQ ID NO: 3388973 - DNA, 25 bp, Homo sapien
tactgtgtatgttctgtctttgcga

SEQ ID NO: 3388974 - DNA, 25 bp, Homo sapien
tgtacagtaattagctttccatgga

SEQ ID NO: 3388975 - DNA, 25 bp, Homo sapien
gcgtcttaacattggtctagtcaca

SEQ ID NO: 3388976 - DNA, 25 bp, Homo sapien
acttatgtgccagtctgttgcagta

SEQ ID NO: 3388977 - DNA, 25 bp, Homo sapien
acacttatgtgccagtctgttgcag

SEQ ID NO: 3388978 - DNA, 25 bp, Homo sapien
cttatgtgccagtctgttgcagtaa

SEQ ID NO: 3388979 - DNA, 25 bp, Homo sapien
cacttatgtgccagtctgttgcagt

SEQ ID NO: 3388980 - DNA, 25 bp, Homo sapien
ggccttgctgcttaagaataaactt

SEQ ID NO: 3388981 - DNA, 25 bp, Homo sapien
tgtgcaacttcagtagggctgcctg

SEQ ID NO: 3388982 - DNA, 25 bp, Homo sapien
gaataaacttgatgtccaatcacct

SEQ ID NO: 3388983 - DNA, 25 bp, Homo sapien
caccttgactactggctttgattag

SEQ ID NO: 3388984 - DNA, 25 bp, Homo sapien
atgcagacatgatcaataagataat

SEQ ID NO: 3388985 - DNA, 25 bp, Homo sapien
tatgcagacatgatcaataagataa

SEQ ID NO: 3388986 - DNA, 25 bp, Homo sapien
gcattattcatattagaggtattta

SEQ ID NO: 3388987 - DNA, 25 bp, Homo sapien
attccaatagtctgcattattcata

SEQ ID NO: 3388988 - DNA, 25 bp, Homo sapien
caggactccccggacagtgaatagg

SEQ ID NO: 3388989 - DNA, 25 bp, Homo sapien
tgaataggtcccatcgtcatggaaa

SEQ ID NO: 3388990 - DNA, 25 bp, Homo sapien
cagcgggaatggttgtggcactcaa

SEQ ID NO: 3388991 - DNA, 25 bp, Homo sapien
cctggcaggttaacgcagcgggaat

SEQ ID NO: 3388992 - DNA, 25 bp, Homo sapien
tatgtctctcatagcagcttttaca

SEQ ID NO: 3388993 - DNA, 25 bp, Homo sapien
gtctctcatagcagcttttacagtg

SEQ ID NO: 3388994 - DNA, 25 bp, Homo sapien
ctttatgtctctcatagcagctttt

SEQ ID NO: 3388995 - DNA, 25 bp, Homo sapien
tgtctctcatagcagcttttacagt

SEQ ID NO: 3388996 - DNA, 25 bp, Homo sapien
agaaaaattacacgaagtatttgag

SEQ ID NO: 3388997 - DNA, 25 bp, Homo sapien
tatttcgtactcaaatctattatca

SEQ ID NO: 3388998 - DNA, 25 bp, Homo sapien
taaataatggctggctgtgatctct

SEQ ID NO: 3388999 - DNA, 25 bp, Homo sapien
cacgaagtatttgagtatttcgtac

SEQ ID NO: 3389000 - DNA, 25 bp, Homo sapien
tgttagcaattatggaaaccaacat

SEQ ID NO: 3389001 - DNA, 25 bp, Homo sapien
tggaaagccagatgttagcaattat

SEQ ID NO: 3389002 - DNA, 25 bp, Homo sapien
gaaagccagatgttagcaattatgg

SEQ ID NO: 3389003 - DNA, 25 bp, Homo sapien
cagatgttagcaattatggaaacca

SEQ ID NO: 3389004 - DNA, 25 bp, Homo sapien
aatataggaagcacagaagcttaga

SEQ ID NO: 3389005 - DNA, 25 bp, Homo sapien
gcaatataggaagcacagaagctta

SEQ ID NO: 3389006 - DNA, 25 bp, Homo sapien
ctgcaatataggaagcacagaagct

SEQ ID NO: 3389007 - DNA, 25 bp, Homo sapien
tataggaagcacagaagcttagaat

SEQ ID NO: 3389008 - DNA, 25 bp, Homo sapien
tccaacaggtgtgagttcttaaggc

SEQ ID NO: 3389009 - DNA, 25 bp, Homo sapien
aaagccccctgccaggttgatgcag

SEQ ID NO: 3389010 - DNA, 25 bp, Homo sapien
gtgagttcttaaggcacattcatca

SEQ ID NO: 3389011 - DNA, 25 bp, Homo sapien
aggcagaatcgttccaacaggtgtg

SEQ ID NO: 3389012 - DNA, 25 bp, Homo sapien
ggagcagacagaacacctgtcttct

SEQ ID NO: 3389013 - DNA, 25 bp, Homo sapien
gaacacctgtcttctttcaaggtcc

SEQ ID NO: 3389014 - DNA, 25 bp, Homo sapien
acacctgtcttctttcaaggtccac

SEQ ID NO: 3389015 - DNA, 25 bp, Homo sapien
acagaacacctgtcttctttcaagg

SEQ ID NO: 3389016 - DNA, 25 bp, Homo sapien
aggactatcattggcttttctaccc

SEQ ID NO: 3389017 - DNA, 25 bp, Homo sapien
tttcagtgggaggactatcattggc

SEQ ID NO: 3389018 - DNA, 25 bp, Homo sapien
gtgggaggactatcattggcttttc

SEQ ID NO: 3389019 - DNA, 25 bp, Homo sapien
tgtaggctttcagtgggaggactat

SEQ ID NO: 3389020 - DNA, 25 bp, Homo sapien
tgaactttcataacaatgattttcc

SEQ ID NO: 3389021 - DNA, 25 bp, Homo sapien
gatgcaccttttgtatcgtgaggag

SEQ ID NO: 3389022 - DNA, 25 bp, Homo sapien
ctttcataacaatgattttccactg

SEQ ID NO: 3389023 - DNA, 25 bp, Homo sapien
actgtgatgcaccttttgtatcgtg

SEQ ID NO: 3389024 - DNA, 25 bp, Homo sapien
cagcacttggattctggcaatcaca

SEQ ID NO: 3389025 - DNA, 25 bp, Homo sapien
tgggcaacagaataggtcagcactt

SEQ ID NO: 3389026 - DNA, 25 bp, Homo sapien
ggcaatcacaagctgtccgtcggca

SEQ ID NO: 3389027 - DNA, 25 bp, Homo sapien
tgtctccacttcgatacagcttgtg

SEQ ID NO: 3389028 - DNA, 25 bp, Homo sapien
gtgagtggccagcaatctacctctc

SEQ ID NO: 3389029 - DNA, 25 bp, Homo sapien
ctaggcaggggtcactgacacagcg

SEQ ID NO: 3389030 - DNA, 25 bp, Homo sapien
tatactcacagctcaagttggggca

SEQ ID NO: 3389031 - DNA, 25 bp, Homo sapien
ccccttctaagatagctgtatactc

SEQ ID NO: 3389032 - DNA, 25 bp, Homo sapien
gggagatccagccatcgtccacact

SEQ ID NO: 3389033 - DNA, 25 bp, Homo sapien
tgcatttacaggttgtgcagggaga

SEQ ID NO: 3389034 - DNA, 25 bp, Homo sapien
tccacactgagccactaagccgtga

SEQ ID NO: 3389035 - DNA, 25 bp, Homo sapien
gccgtgaaacaccatagctgtccag

SEQ ID NO: 3389036 - DNA, 25 bp, Homo sapien
aggcttcaatatccgcagaacatcc

SEQ ID NO: 3389037 - DNA, 25 bp, Homo sapien
ttgttcaaggcttcaatatccgcag

SEQ ID NO: 3389038 - DNA, 25 bp, Homo sapien
caatatccgcagaacatccaattac

SEQ ID NO: 3389039 - DNA, 25 bp, Homo sapien
tctctggcaattgttcaaggcttca

SEQ ID NO: 3389040 - DNA, 25 bp, Homo sapien
tgcctttttacagggtgcagctatg

SEQ ID NO: 3389041 - DNA, 25 bp, Homo sapien
gagaagtaaatgtatgccagagttt

SEQ ID NO: 3389042 - DNA, 25 bp, Homo sapien
gtaaatgtatgccagagtttccacc

SEQ ID NO: 3389043 - DNA, 25 bp, Homo sapien
aatgtatgccagagtttccaccatg

SEQ ID NO: 3389044 - DNA, 25 bp, Homo sapien
tgtgttagccagttgagacatggaa

SEQ ID NO: 3389045 - DNA, 25 bp, Homo sapien
gtttgctgtacttattccaagcgag

SEQ ID NO: 3389046 - DNA, 25 bp, Homo sapien
actgctcactgggattctgctagca

SEQ ID NO: 3389047 - DNA, 25 bp, Homo sapien
acctgcactcaatccctgcttggga

SEQ ID NO: 3389048 - DNA, 25 bp, Homo sapien
caaaatccacagaacaacagactct

SEQ ID NO: 3389049 - DNA, 25 bp, Homo sapien
aaatccacagaacaacagactcttc

SEQ ID NO: 3389050 - DNA, 25 bp, Homo sapien
ttttgaagacactcaaaatccacag

SEQ ID NO: 3389051 - DNA, 25 bp, Homo sapien
tcaattattttgaagacactcaaaa

SEQ ID NO: 3389052 - DNA, 25 bp, Homo sapien
cgttggatggtcatttcgtccattc

SEQ ID NO: 3389053 - DNA, 25 bp, Homo sapien
cgtccattcttctgcgttgagtcca

SEQ ID NO: 3389054 - DNA, 25 bp, Homo sapien
ctgcgttgagtccactgtaaatact

SEQ ID NO: 3389055 - DNA, 25 bp, Homo sapien
tcacgttggatggtcatttcgtcca

SEQ ID NO: 3389056 - DNA, 25 bp, Homo sapien
tgcacggcactgtaggtcacctaga

SEQ ID NO: 3389057 - DNA, 25 bp, Homo sapien
catgatttacaacacgggaaacttc

SEQ ID NO: 3389058 - DNA, 25 bp, Homo sapien
tcctcaggtggaaactttggcaatt

SEQ ID NO: 3389059 - DNA, 25 bp, Homo sapien
gcaaagtggtaggtccaaaaggcaa

SEQ ID NO: 3389060 - DNA, 25 bp, Homo sapien
aaatgtatgtataatgcgactggac

SEQ ID NO: 3389061 - DNA, 25 bp, Homo sapien
gcgactggactctacatacatattt

SEQ ID NO: 3389062 - DNA, 25 bp, Homo sapien
gaaggttcagcactatgaaatgtat

SEQ ID NO: 3389063 - DNA, 25 bp, Homo sapien
cactaagtatgcagtagatgggaca

SEQ ID NO: 3389064 - DNA, 25 bp, Homo sapien
gttcaccaatccctgacatattcag

SEQ ID NO: 3389065 - DNA, 25 bp, Homo sapien
gagtgaatgagaatccaaaaaccaa

SEQ ID NO: 3389066 - DNA, 25 bp, Homo sapien
taataatgagatttaacacgaggtc

SEQ ID NO: 3389067 - DNA, 25 bp, Homo sapien
tgggtatcacaaaccactgagatgt

SEQ ID NO: 3389068 - DNA, 25 bp, Homo sapien
tatattcatatgcaacctggctgta

SEQ ID NO: 3389069 - DNA, 25 bp, Homo sapien
tatgcaacctggctgtaacaaatga

SEQ ID NO: 3389070 - DNA, 25 bp, Homo sapien
cacatatattcatatgcaacctggc

SEQ ID NO: 3389071 - DNA, 25 bp, Homo sapien
tcatatgcaacctggctgtaacaaa

SEQ ID NO: 3389072 - DNA, 25 bp, Homo sapien
ctgtctacctggacttccccggtct

SEQ ID NO: 3389073 - DNA, 25 bp, Homo sapien
tctgtctacctggacttccccggtc

SEQ ID NO: 3389074 - DNA, 25 bp, Homo sapien
tgtctacctggacttccccggtctc

SEQ ID NO: 3389075 - DNA, 25 bp, Homo sapien
aaattcagcagtgcccatgtaggcc

SEQ ID NO: 3389076 - DNA, 25 bp, Homo sapien
attcagcagtgcccatgtaggccac

SEQ ID NO: 3389077 - DNA, 25 bp, Homo sapien
ataaattcagcagtgcccatgtagg

SEQ ID NO: 3389078 - DNA, 25 bp, Homo sapien
caataaattcagcagtgcccatgta

SEQ ID NO: 3389079 - DNA, 25 bp, Homo sapien
cttcaccctgtctttatcagccctt

SEQ ID NO: 3389080 - DNA, 25 bp, Homo sapien
ttcaccctgtctttatcagcccttg

SEQ ID NO: 3389081 - DNA, 25 bp, Homo sapien
tcaccctgtctttatcagcccttgc

SEQ ID NO: 3389082 - DNA, 25 bp, Homo sapien
cacgggaagaattggctgctatttt

SEQ ID NO: 3389083 - DNA, 25 bp, Homo sapien
aagaattggctgctattttgtgttg

SEQ ID NO: 3389084 - DNA, 25 bp, Homo sapien
tgtgctcccttccataggcacggga

SEQ ID NO: 3389085 - DNA, 25 bp, Homo sapien
cttccataggcacgggaagaattgg

SEQ ID NO: 3389086 - DNA, 25 bp, Homo sapien
ggaggcacaattgcattctgaatgc

SEQ ID NO: 3389087 - DNA, 25 bp, Homo sapien
ccatgctgctcacaggtaaagtcta

SEQ ID NO: 3389088 - DNA, 25 bp, Homo sapien
tgagctgtggttggagaaacacctg

SEQ ID NO: 3389089 - DNA, 25 bp, Homo sapien
gaaacacctggaccaacaatgcctg

SEQ ID NO: 3389090 - DNA, 25 bp, Homo sapien
tccctgcttttgttgctcccagctt

SEQ ID NO: 3389091 - DNA, 25 bp, Homo sapien
caacctttcctcgtttctccctgct

SEQ ID NO: 3389092 - DNA, 25 bp, Homo sapien
tttctccctgcttttgttgctccca

SEQ ID NO: 3389093 - DNA, 25 bp, Homo sapien
ccccagctgtgcctattgcaagatt

SEQ ID NO: 3389094 - DNA, 25 bp, Homo sapien
gaagatacagacagccacaaggtgc

SEQ ID NO: 3389095 - DNA, 25 bp, Homo sapien
agaagatacagacagccacaaggtg

SEQ ID NO: 3389096 - DNA, 25 bp, Homo sapien
atctgtgtgcaaagattaattctcc

SEQ ID NO: 3389097 - DNA, 25 bp, Homo sapien
gtgtgcaaagattaattctcccttg

SEQ ID NO: 3389098 - DNA, 25 bp, Homo sapien
gattaattctcccttgcatcttcat

SEQ ID NO: 3389099 - DNA, 25 bp, Homo sapien
aaagattaattctcccttgcatctt

SEQ ID NO: 3389100 - DNA, 25 bp, Homo sapien
ctgcagatgaaacagacagcaacat

SEQ ID NO: 3389101 - DNA, 25 bp, Homo sapien
tgtggttcaaatcaccctcacactt

SEQ ID NO: 3389102 - DNA, 25 bp, Homo sapien
tcaccctcacacttcttggtctcaa

SEQ ID NO: 3389103 - DNA, 25 bp, Homo sapien
catatgagaggaatagtctggagcc

SEQ ID NO: 3389104 - DNA, 25 bp, Homo sapien
tgagaggaatagtctggagcctcca

SEQ ID NO: 3389105 - DNA, 25 bp, Homo sapien
agaggaatagtctggagcctccacc

SEQ ID NO: 3389106 - DNA, 25 bp, Homo sapien
ctaaccatatgagaggaatagtctg

SEQ ID NO: 3389107 - DNA, 25 bp, Homo sapien
tcaagggtcattctgtctaacactt

SEQ ID NO: 3389108 - DNA, 25 bp, Homo sapien
ctcttttgcataactgccttgagca

SEQ ID NO: 3389109 - DNA, 25 bp, Homo sapien
ttgcataactgccttgagcatgatc

SEQ ID NO: 3389110 - DNA, 25 bp, Homo sapien
taattctcaggcttatagacttgct

SEQ ID NO: 3389111 - DNA, 25 bp, Homo sapien
taaagccttgtacaaatgatacttc

SEQ ID NO: 3389112 - DNA, 25 bp, Homo sapien
ttgatctaccacatttgatgctgcc

SEQ ID NO: 3389113 - DNA, 25 bp, Homo sapien
ctttgtctatcagaattgatctacc

SEQ ID NO: 3389114 - DNA, 25 bp, Homo sapien
tgctgccattaatctttctcttgtt

SEQ ID NO: 3389115 - DNA, 25 bp, Homo sapien
ttcaggccttagttccctgaatgga

SEQ ID NO: 3389116 - DNA, 25 bp, Homo sapien
ccaagaatttgatgatctgtgtttc

SEQ ID NO: 3389117 - DNA, 25 bp, Homo sapien
gagttgggcgtttccattgccaaga

SEQ ID NO: 3389118 - DNA, 25 bp, Homo sapien
ctaaatgagttgggcgtttccattg

SEQ ID NO: 3389119 - DNA, 25 bp, Homo sapien
tgtcaactcttcgacatattcatgg

SEQ ID NO: 3389120 - DNA, 25 bp, Homo sapien
gatctgtctgctttgagtacatcaa

SEQ ID NO: 3389121 - DNA, 25 bp, Homo sapien
gttacatgctattgatctgtctgct

SEQ ID NO: 3389122 - DNA, 25 bp, Homo sapien
tgatttggacagtgtcccattcttt

SEQ ID NO: 3389123 - DNA, 25 bp, Homo sapien
ttcctctcagtttgttcacatcaat

SEQ ID NO: 3389124 - DNA, 25 bp, Homo sapien
tccttgattgtagggtaaattctcc

SEQ ID NO: 3389125 - DNA, 25 bp, Homo sapien
gaaacatgctttgccaagtgctcac

SEQ ID NO: 3389126 - DNA, 25 bp, Homo sapien
tatgtttagtaacgaagatatccat

SEQ ID NO: 3389127 - DNA, 25 bp, Homo sapien
tgaaaggagagcataataactaacg

SEQ ID NO: 3389128 - DNA, 25 bp, Homo sapien
tgctgtggatccatgcagagtggtc

SEQ ID NO: 3389129 - DNA, 25 bp, Homo sapien
gctgtggatccatgcagagtggtct

SEQ ID NO: 3389130 - DNA, 25 bp, Homo sapien
ctgctgtggatccatgcagagtggt

SEQ ID NO: 3389131 - DNA, 25 bp, Homo sapien
ctgtggatccatgcagagtggtctg

SEQ ID NO: 3389132 - DNA, 25 bp, Homo sapien
aagatctagccttataagacattaa

SEQ ID NO: 3389133 - DNA, 25 bp, Homo sapien
gatctagccttataagacattaagc

SEQ ID NO: 3389134 - DNA, 25 bp, Homo sapien
cttataagacattaagctaactgtc

SEQ ID NO: 3389135 - DNA, 25 bp, Homo sapien
cattaagctaactgtctttttctcg

SEQ ID NO: 3389136 - DNA, 25 bp, Homo sapien
gagatcatgggttgacatttttgca

SEQ ID NO: 3389137 - DNA, 25 bp, Homo sapien
catttttgcattgtctcaagctacg

SEQ ID NO: 3389138 - DNA, 25 bp, Homo sapien
tgcactcctctcagggttcaaaggt

SEQ ID NO: 3389139 - DNA, 25 bp, Homo sapien
tcaagctacgaaattgggcagatag

SEQ ID NO: 3389140 - DNA, 25 bp, Homo sapien
tgtgagttcagggtgtgacagcccc

SEQ ID NO: 3389141 - DNA, 25 bp, Homo sapien
gtgagttcagggtgtgacagcccca

SEQ ID NO: 3389142 - DNA, 25 bp, Homo sapien
tgagttcagggtgtgacagccccat

SEQ ID NO: 3389143 - DNA, 25 bp, Homo sapien
ctgtgagttcagggtgtgacagccc

SEQ ID NO: 3389144 - DNA, 25 bp, Homo sapien
aagccaaacgctagatcaacatcac

SEQ ID NO: 3389145 - DNA, 25 bp, Homo sapien
gccaaacgctagatcaacatcacca

SEQ ID NO: 3389146 - DNA, 25 bp, Homo sapien
gcattaaagcccaaatcttccccag

SEQ ID NO: 3389147 - DNA, 25 bp, Homo sapien
ttgctggcattaaagcccaaatctt

SEQ ID NO: 3389148 - DNA, 25 bp, Homo sapien
ctgcaactagattgtcccaaatggg

SEQ ID NO: 3389149 - DNA, 25 bp, Homo sapien
ggatgcaaccactttatatgcagac

SEQ ID NO: 3389150 - DNA, 25 bp, Homo sapien
gcacagacaaagtcaattcacctgg

SEQ ID NO: 3389151 - DNA, 25 bp, Homo sapien
acttttaaggccacctcgatttgcg

SEQ ID NO: 3389152 - DNA, 25 bp, Homo sapien
tcctgttgatatccactcagaggca

SEQ ID NO: 3389153 - DNA, 25 bp, Homo sapien
tggccttccggtatcctgcgtgtaa

SEQ ID NO: 3389154 - DNA, 25 bp, Homo sapien
gcgtgtaatgtctaccctgccaata

SEQ ID NO: 3389155 - DNA, 25 bp, Homo sapien
gcataagccctcatggtctgactgg

SEQ ID NO: 3389156 - DNA, 25 bp, Homo sapien
tatagctgttagacgaaatgttctg

SEQ ID NO: 3389157 - DNA, 25 bp, Homo sapien
gagtggagagtgcagcccatttaca

SEQ ID NO: 3389158 - DNA, 25 bp, Homo sapien
ttgaaagttgggtgttgaggtctcc

SEQ ID NO: 3389159 - DNA, 25 bp, Homo sapien
gaggtctccagatatcattgtatta

SEQ ID NO: 3389160 - DNA, 25 bp, Homo sapien
gtgttgtgcagaggtacagccagca

SEQ ID NO: 3389161 - DNA, 25 bp, Homo sapien
tgtcatcgcattggtcgtcaaccat

SEQ ID NO: 3389162 - DNA, 25 bp, Homo sapien
gcattgtgtctaacaaccctttgtc

SEQ ID NO: 3389163 - DNA, 25 bp, Homo sapien
gtctaacaaccctttgtcatcgcat

SEQ ID NO: 3389164 - DNA, 25 bp, Homo sapien
taccgttaggatcatcattcgttca

SEQ ID NO: 3389165 - DNA, 25 bp, Homo sapien
cagactgtgataggtcgagatcagt

SEQ ID NO: 3389166 - DNA, 25 bp, Homo sapien
cattcgttcattggagatgcctgca

SEQ ID NO: 3389167 - DNA, 25 bp, Homo sapien
gagatcagtaacaggcttgtgccac

SEQ ID NO: 3389168 - DNA, 25 bp, Homo sapien
tgagtgaggaatccatattcacaaa

SEQ ID NO: 3389169 - DNA, 25 bp, Homo sapien
caaatcaaggatcacaaaagattcc

SEQ ID NO: 3389170 - DNA, 25 bp, Homo sapien
caaaagattccttgtctaccccttg

SEQ ID NO: 3389171 - DNA, 25 bp, Homo sapien
tcacaaatttgaggtggttcaaatc

SEQ ID NO: 3389172 - DNA, 25 bp, Homo sapien
gacaaatgtagtagggtattctccc

SEQ ID NO: 3389173 - DNA, 25 bp, Homo sapien
cacgtctgaacgagcttatctctgt

SEQ ID NO: 3389174 - DNA, 25 bp, Homo sapien
aggtttgggaattgctactgacaaa

SEQ ID NO: 3389175 - DNA, 25 bp, Homo sapien
agtagggtattctcccaggcccttg

SEQ ID NO: 3389176 - DNA, 25 bp, Homo sapien
gagacagccagtactgacgtggcaa

SEQ ID NO: 3389177 - DNA, 25 bp, Homo sapien
ccagtactgacgtggcaacgcgaaa

SEQ ID NO: 3389178 - DNA, 25 bp, Homo sapien
cgtggcaacgcgaaaaagatatcct

SEQ ID NO: 3389179 - DNA, 25 bp, Homo sapien
ctatccattgagagacagccagtac

SEQ ID NO: 3389180 - DNA, 25 bp, Homo sapien
taagtgcagctttcattcctggctc

SEQ ID NO: 3389181 - DNA, 25 bp, Homo sapien
tcctcctgcccaacacttttccatg

SEQ ID NO: 3389182 - DNA, 25 bp, Homo sapien
tctcagctctgacaaccagactgca

SEQ ID NO: 3389183 - DNA, 25 bp, Homo sapien
gcaattctcatcctaagtgcagctt

SEQ ID NO: 3389184 - DNA, 25 bp, Homo sapien
tgtgacatcagttatctgtgccagt

SEQ ID NO: 3389185 - DNA, 25 bp, Homo sapien
tcaatccctacagattgctgctgtg

SEQ ID NO: 3389186 - DNA, 25 bp, Homo sapien
catcagttatctgtgccagtcctgg

SEQ ID NO: 3389187 - DNA, 25 bp, Homo sapien
agtcctgggtcatcaatccctacag

SEQ ID NO: 3389188 - DNA, 25 bp, Homo sapien
ggaccctacaaacttgtaatagtca

SEQ ID NO: 3389189 - DNA, 25 bp, Homo sapien
cagttctggtgcttcaatatagata

SEQ ID NO: 3389190 - DNA, 25 bp, Homo sapien
tatgcttgactttatggaccctaca

SEQ ID NO: 3389191 - DNA, 25 bp, Homo sapien
taagtagtcaactttgctagtaaag

SEQ ID NO: 3389192 - DNA, 25 bp, Homo sapien
agtagacagtactttctgcattcag

SEQ ID NO: 3389193 - DNA, 25 bp, Homo sapien
tctgcattcagtagggcaagttgca

SEQ ID NO: 3389194 - DNA, 25 bp, Homo sapien
tcctcccctacttgacttggtgaag

SEQ ID NO: 3389195 - DNA, 25 bp, Homo sapien
tcccttttagtgtaggctttatcta

SEQ ID NO: 3389196 - DNA, 25 bp, Homo sapien
tcttatttcctaaacattgctgtta

SEQ ID NO: 3389197 - DNA, 25 bp, Homo sapien
ttcctaaacattgctgttatcttgt

SEQ ID NO: 3389198 - DNA, 25 bp, Homo sapien
catctctgcagacttgaccataaga

SEQ ID NO: 3389199 - DNA, 25 bp, Homo sapien
tctgcagacttgaccataagagaca

SEQ ID NO: 3389200 - DNA, 25 bp, Homo sapien
ccggtaagtgtgagtcatggcatag

SEQ ID NO: 3389201 - DNA, 25 bp, Homo sapien
gcaaattctagtgggcaagtgggca

SEQ ID NO: 3389202 - DNA, 25 bp, Homo sapien
tgtgagtcatggcatagcaaatact

SEQ ID NO: 3389203 - DNA, 25 bp, Homo sapien
gtcatggcatagcaaatactagtaa

SEQ ID NO: 3389204 - DNA, 25 bp, Homo sapien
gattggcgtaagttgagggaacgct

SEQ ID NO: 3389205 - DNA, 25 bp, Homo sapien
tggagaggttgtggattggcgtaag

SEQ ID NO: 3389206 - DNA, 25 bp, Homo sapien
taagttgagggaacgctggcacttg

SEQ ID NO: 3389207 - DNA, 25 bp, Homo sapien
ctggcacttggcagctgaacagaag

SEQ ID NO: 3389208 - DNA, 25 bp, Homo sapien
tctgcccttctagagagctttattg

SEQ ID NO: 3389209 - DNA, 25 bp, Homo sapien
aggaccatggatgacccaatactgc

SEQ ID NO: 3389210 - DNA, 25 bp, Homo sapien
tagagagctttattggccaggacca

SEQ ID NO: 3389211 - DNA, 25 bp, Homo sapien
ggccaggaccatggatgacccaata

SEQ ID NO: 3389212 - DNA, 25 bp, Homo sapien
tactcctaacccacatactaactaa

SEQ ID NO: 3389213 - DNA, 25 bp, Homo sapien
tcagggaagggaatgttgaactctt

SEQ ID NO: 3389214 - DNA, 25 bp, Homo sapien
gaatgttgaactcttcatctctgtc

SEQ ID NO: 3389215 - DNA, 25 bp, Homo sapien
cccacatactaactaatgtttctgg

SEQ ID NO: 3389216 - DNA, 25 bp, Homo sapien
ctgtagaggataaaagcagacctgc

SEQ ID NO: 3389217 - DNA, 25 bp, Homo sapien
gaaagagaagggatgccaactgtag

SEQ ID NO: 3389218 - DNA, 25 bp, Homo sapien
tgtagaggataaaagcagacctgct

SEQ ID NO: 3389219 - DNA, 25 bp, Homo sapien
ctgctgaaagagaagggatgccaac

SEQ ID NO: 3389220 - DNA, 25 bp, Homo sapien
gccggaacggaatgaacctctgtat

SEQ ID NO: 3389221 - DNA, 25 bp, Homo sapien
tgatgtacacatccagtcaagctga

SEQ ID NO: 3389222 - DNA, 25 bp, Homo sapien
ttgtgatgatgtacacatccagtca

SEQ ID NO: 3389223 - DNA, 25 bp, Homo sapien
tctctccctcgttgtaatccaacag

SEQ ID NO: 3389224 - DNA, 25 bp, Homo sapien
gcatctaggccctgctgcaacttgc

SEQ ID NO: 3389225 - DNA, 25 bp, Homo sapien
caccctctttgattcctacaatagc

SEQ ID NO: 3389226 - DNA, 25 bp, Homo sapien
ccctctttgattcctacaatagcca

SEQ ID NO: 3389227 - DNA, 25 bp, Homo sapien
cctctttgattcctacaatagccat

SEQ ID NO: 3389228 - DNA, 25 bp, Homo sapien
tccaccctctttgattcctacaata

SEQ ID NO: 3389229 - DNA, 25 bp, Homo sapien
ttattggaaatgacttcatctagct

SEQ ID NO: 3389230 - DNA, 25 bp, Homo sapien
tgaaagccacagtgggtaattttgg

SEQ ID NO: 3389231 - DNA, 25 bp, Homo sapien
atctagctgaaagccacagtgggta

SEQ ID NO: 3389232 - DNA, 25 bp, Homo sapien
ttggaaatgacttcatctagctgaa

SEQ ID NO: 3389233 - DNA, 25 bp, Homo sapien
gcttcgcacgtccttttccactggg

SEQ ID NO: 3389234 - DNA, 25 bp, Homo sapien
gggtcttcatcgatccgctcatgcg

SEQ ID NO: 3389235 - DNA, 25 bp, Homo sapien
cctcagccggttggccgggtcttca

SEQ ID NO: 3389236 - DNA, 25 bp, Homo sapien
gagagaacccctctcccagttggga

SEQ ID NO: 3389237 - DNA, 25 bp, Homo sapien
ccccggccctgttggccggcctgct

SEQ ID NO: 3389238 - DNA, 25 bp, Homo sapien
cccggccctgttggccggcctgctc

SEQ ID NO: 3389239 - DNA, 25 bp, Homo sapien
ctctccgctcaagccgtccccaggt

SEQ ID NO: 3389240 - DNA, 25 bp, Homo sapien
gtgctgaatctgactgtgggccgcc

SEQ ID NO: 3389241 - DNA, 25 bp, Homo sapien
agacagacgtggagatctgaggcag

SEQ ID NO: 3389242 - DNA, 25 bp, Homo sapien
ggcgctctcccagtacttctccagg

SEQ ID NO: 3389243 - DNA, 25 bp, Homo sapien
ccggtgctcgccaggatcctttcca

SEQ ID NO: 3389244 - DNA, 25 bp, Homo sapien
cttccaggagatccgggtcgcccat

SEQ ID NO: 3389245 - DNA, 25 bp, Homo sapien
caacacttccaggagatccgggtcg

SEQ ID NO: 3389246 - DNA, 25 bp, Homo sapien
acacttccaggagatccgggtcgcc

SEQ ID NO: 3389247 - DNA, 25 bp, Homo sapien
ccaacacttccaggagatccgggtc

SEQ ID NO: 3389248 - DNA, 25 bp, Homo sapien
cgcagtcccggtttcgcgctgagca

SEQ ID NO: 3389249 - DNA, 25 bp, Homo sapien
tagcagccctgaattactcggcggt

SEQ ID NO: 3389250 - DNA, 25 bp, Homo sapien
ttgacgcctcttggcgcggtcctac

SEQ ID NO: 3389251 - DNA, 25 bp, Homo sapien
gcaaggagggtgttccggaaccata

SEQ ID NO: 3389252 - DNA, 25 bp, Homo sapien
gaaagagtagtctatatgcttattg

SEQ ID NO: 3389253 - DNA, 25 bp, Homo sapien
ctcactcatttggaaagagtagtct

SEQ ID NO: 3389254 - DNA, 25 bp, Homo sapien
aagagtagtctatatgcttattgac

SEQ ID NO: 3389255 - DNA, 25 bp, Homo sapien
catttggaaagagtagtctatatgc

SEQ ID NO: 3389256 - DNA, 25 bp, Homo sapien
caaggacgtctacctctgtgagagc

SEQ ID NO: 3389257 - DNA, 25 bp, Homo sapien
ttcaggttgaactccagtatagtca

SEQ ID NO: 3389258 - DNA, 25 bp, Homo sapien
gcatgggattctttatcaactagag

SEQ ID NO: 3389259 - DNA, 25 bp, Homo sapien
taagctatcacagactacactaaca

SEQ ID NO: 3389260 - DNA, 25 bp, Homo sapien
gggatccgacatgaattgagaagca

SEQ ID NO: 3389261 - DNA, 25 bp, Homo sapien
tatcaaagttacgtagggatccgac

SEQ ID NO: 3389262 - DNA, 25 bp, Homo sapien
gcttcttgaagaattggtccgtttc

SEQ ID NO: 3389263 - DNA, 25 bp, Homo sapien
aatgagaccatttaagcctgaagag

SEQ ID NO: 3389264 - DNA, 25 bp, Homo sapien
gaatggagccttccatcaatagagt

SEQ ID NO: 3389265 - DNA, 25 bp, Homo sapien
tacatgagggatccaacttttaggt

SEQ ID NO: 3389266 - DNA, 25 bp, Homo sapien
gagtaaaccctacctggccatgttg

SEQ ID NO: 3389267 - DNA, 25 bp, Homo sapien
tgaggacattctgatcttacgaaga

SEQ ID NO: 3389268 - DNA, 25 bp, Homo sapien
tcttcattgatgagaaagctggtct

SEQ ID NO: 3389269 - DNA, 25 bp, Homo sapien
cattgtttcttcattgatgagaaag

SEQ ID NO: 3389270 - DNA, 25 bp, Homo sapien
cattgatgagaaagctggtctctct

SEQ ID NO: 3389271 - DNA, 25 bp, Homo sapien
tttcttcattgatgagaaagctggt

SEQ ID NO: 3389272 - DNA, 25 bp, Homo sapien
atttatactgatatgatgtgtagta

SEQ ID NO: 3389273 - DNA, 25 bp, Homo sapien
tgtgtagtatggaaagtttacccag

SEQ ID NO: 3389274 - DNA, 25 bp, Homo sapien
atactgatatgatgtgtagtatgga

SEQ ID NO: 3389275 - DNA, 25 bp, Homo sapien
ttatactgatatgatgtgtagtatg

SEQ ID NO: 3389276 - DNA, 25 bp, Homo sapien
tcaggaacaaattgaatcgctttgc

SEQ ID NO: 3389277 - DNA, 25 bp, Homo sapien
cgcctcaggaacaaattgaatcgct

SEQ ID NO: 3389278 - DNA, 25 bp, Homo sapien
gccgccgcctcaggaacaaattgaa

SEQ ID NO: 3389279 - DNA, 25 bp, Homo sapien
ggaacaaattgaatcgctttgcagg

SEQ ID NO: 3389280 - DNA, 25 bp, Homo sapien
cacaaaatcaatttgcctaatccca

SEQ ID NO: 3389281 - DNA, 25 bp, Homo sapien
tctcggaagaagatagaatctttgc

SEQ ID NO: 3389282 - DNA, 25 bp, Homo sapien
gcctttaactctgcgtctttcttta

SEQ ID NO: 3389283 - DNA, 25 bp, Homo sapien
ttaactctgcgtctttctttacatc

SEQ ID NO: 3389284 - DNA, 25 bp, Homo sapien
tataaaagctatacctggagcaatg

SEQ ID NO: 3389285 - DNA, 25 bp, Homo sapien
gcaatggattagtcatacatttcca

SEQ ID NO: 3389286 - DNA, 25 bp, Homo sapien
gttggagacagcaaacaagtaaaaa

SEQ ID NO: 3389287 - DNA, 25 bp, Homo sapien
caggaatagagtacaatataaaagc

SEQ ID NO: 3389288 - DNA, 25 bp, Homo sapien
tgcccctcccatggttgtatataaa

SEQ ID NO: 3389289 - DNA, 25 bp, Homo sapien
tccatctgaatgtcaggtactgctt

SEQ ID NO: 3389290 - DNA, 25 bp, Homo sapien
aaatcaacagaattatgcagaatgc

SEQ ID NO: 3389291 - DNA, 25 bp, Homo sapien
tgacagattcaatatacaatggctg

SEQ ID NO: 3389292 - DNA, 25 bp, Homo sapien
ttctgagattagtttcaaactcttt

SEQ ID NO: 3389293 - DNA, 25 bp, Homo sapien
tctgagattagtttcaaactctttt

SEQ ID NO: 3389294 - DNA, 25 bp, Homo sapien
tgtaagaccacaggccctatcatcc

SEQ ID NO: 3389295 - DNA, 25 bp, Homo sapien
ttagggtaccagattataggcagac

SEQ ID NO: 3389296 - DNA, 25 bp, Homo sapien
cacagagtctatccaggcaaaggcc

SEQ ID NO: 3389297 - DNA, 25 bp, Homo sapien
tcatcccggtgcacatatctgtagc

SEQ ID NO: 3389298 - DNA, 25 bp, Homo sapien
ggaatatcactctccttaataggca

SEQ ID NO: 3389299 - DNA, 25 bp, Homo sapien
ggaagagctcctgccgatgtctgct

SEQ ID NO: 3389300 - DNA, 25 bp, Homo sapien
cctgatcttcgatgaggaagagctc

SEQ ID NO: 3389301 - DNA, 25 bp, Homo sapien
cagtgggagtcttacaggtccaagc

SEQ ID NO: 3389302 - DNA, 25 bp, Homo sapien
tgcacatgtataaaagcacacacaa

SEQ ID NO: 3389303 - DNA, 25 bp, Homo sapien
tttgaagggatgtgcccaaaggtct

SEQ ID NO: 3389304 - DNA, 25 bp, Homo sapien
tacatctcgtatttgaagggatgtg

SEQ ID NO: 3389305 - DNA, 25 bp, Homo sapien
cagaaatggtacgacatctgcacat

SEQ ID NO: 3389306 - DNA, 25 bp, Homo sapien
tcccatcttctatgccaaaaggaca

SEQ ID NO: 3389307 - DNA, 25 bp, Homo sapien
gacatcttgagagaatatagtacac

SEQ ID NO: 3389308 - DNA, 25 bp, Homo sapien
tttagcagtctttcaatcccaaacc

SEQ ID NO: 3389309 - DNA, 25 bp, Homo sapien
catggagtggataggcagatgagta

SEQ ID NO: 3389310 - DNA, 25 bp, Homo sapien
aagtgtgtatctttcattggtagga

SEQ ID NO: 3389311 - DNA, 25 bp, Homo sapien
tgaagtgtgtatctttcattggtag

SEQ ID NO: 3389312 - DNA, 25 bp, Homo sapien
agtgtgtatctttcattggtaggat

SEQ ID NO: 3389313 - DNA, 25 bp, Homo sapien
gaagtgtgtatctttcattggtagg

SEQ ID NO: 3389314 - DNA, 25 bp, Homo sapien
aagtctaaaggctgctccttgtaga

SEQ ID NO: 3389315 - DNA, 25 bp, Homo sapien
tagaaataggaaaatcgagcccaat

SEQ ID NO: 3389316 - DNA, 25 bp, Homo sapien
ttaatcaagtctaaaggctgctcct

SEQ ID NO: 3389317 - DNA, 25 bp, Homo sapien
aatcaagtctaaaggctgctccttg

SEQ ID NO: 3389318 - DNA, 25 bp, Homo sapien
ctctttggaggagtgtcagtaaaca

SEQ ID NO: 3389319 - DNA, 25 bp, Homo sapien
gaaaataggagagttagaatctcgt

SEQ ID NO: 3389320 - DNA, 25 bp, Homo sapien
tgccctaatgcagaatatatgtttg

SEQ ID NO: 3389321 - DNA, 25 bp, Homo sapien
tgctacaaacctaagacacaggaga

SEQ ID NO: 3389322 - DNA, 25 bp, Homo sapien
tgttatgttccattgataataagcc

SEQ ID NO: 3389323 - DNA, 25 bp, Homo sapien
ctgcttgtgttatgttccattgata

SEQ ID NO: 3389324 - DNA, 25 bp, Homo sapien
gctaagccaactacagctgcaaaga

SEQ ID NO: 3389325 - DNA, 25 bp, Homo sapien
aataaaacaagctaagccaactaca

SEQ ID NO: 3389326 - DNA, 25 bp, Homo sapien
gtctccaataatcacacacttgatc

SEQ ID NO: 3389327 - DNA, 25 bp, Homo sapien
tagtctccaataatcacacacttga

SEQ ID NO: 3389328 - DNA, 25 bp, Homo sapien
agtctccaataatcacacacttgat

SEQ ID NO: 3389329 - DNA, 25 bp, Homo sapien
caaagaacactgttgactcattatc

SEQ ID NO: 3389330 - DNA, 25 bp, Homo sapien
agaacactgttgactcattatcaaa

SEQ ID NO: 3389331 - DNA, 25 bp, Homo sapien
aacactgttgactcattatcaaaca

SEQ ID NO: 3389332 - DNA, 25 bp, Homo sapien
aaagaacactgttgactcattatca

SEQ ID NO: 3389333 - DNA, 25 bp, Homo sapien
cccagttttgaatggcatatatttg

SEQ ID NO: 3389334 - DNA, 25 bp, Homo sapien
gccgcccttgcccagttttgaatgg

SEQ ID NO: 3389335 - DNA, 25 bp, Homo sapien
cttgcccagttttgaatggcatata

SEQ ID NO: 3389336 - DNA, 25 bp, Homo sapien
tttgaatggcatatatttgtgtttg

SEQ ID NO: 3389337 - DNA, 25 bp, Homo sapien
aagtccaccaggtcccattcatatt

SEQ ID NO: 3389338 - DNA, 25 bp, Homo sapien
catattccagtctggcttgtcgttg

SEQ ID NO: 3389339 - DNA, 25 bp, Homo sapien
atagcttcaaattctggtctcagct

SEQ ID NO: 3389340 - DNA, 25 bp, Homo sapien
tagcttcaaattctggtctcagctg

SEQ ID NO: 3389341 - DNA, 25 bp, Homo sapien
tgtccgtttcacagttttctagtct

SEQ ID NO: 3389342 - DNA, 25 bp, Homo sapien
agtgtgtccattgagatatgctgtc

SEQ ID NO: 3389343 - DNA, 25 bp, Homo sapien
gcagtgtgtccattgagatatgctg

SEQ ID NO: 3389344 - DNA, 25 bp, Homo sapien
cagtgtgtccattgagatatgctgt

SEQ ID NO: 3389345 - DNA, 25 bp, Homo sapien
gaaagaaagtaccatggaatacgcg

SEQ ID NO: 3389346 - DNA, 25 bp, Homo sapien
tacgcgtgtatagaggcatgtaagg

SEQ ID NO: 3389347 - DNA, 25 bp, Homo sapien
catggaatacgcgtgtatagaggca

SEQ ID NO: 3389348 - DNA, 25 bp, Homo sapien
gaaagtaccatggaatacgcgtgta

SEQ ID NO: 3389349 - DNA, 25 bp, Homo sapien
ccatactggtgacgacaagagacat

SEQ ID NO: 3389350 - DNA, 25 bp, Homo sapien
tgaaactagcaaatgtagcaaagac

SEQ ID NO: 3389351 - DNA, 25 bp, Homo sapien
taaggatgcatcactttccatgaaa

SEQ ID NO: 3389352 - DNA, 25 bp, Homo sapien
tagcaaagactgacaggcggtacac

SEQ ID NO: 3389353 - DNA, 25 bp, Homo sapien
gatccaggcagatatcttttcataa

SEQ ID NO: 3389354 - DNA, 25 bp, Homo sapien
ttttgtgatccaggcagatatcttt

SEQ ID NO: 3389355 - DNA, 25 bp, Homo sapien
ccatttttgtgatccaggcagatat

SEQ ID NO: 3389356 - DNA, 25 bp, Homo sapien
tgtgatccaggcagatatcttttca

SEQ ID NO: 3389357 - DNA, 25 bp, Homo sapien
cagccatgatgtctatgtacaacag

SEQ ID NO: 3389358 - DNA, 25 bp, Homo sapien
tccagcgctgactgaataatgtggt

SEQ ID NO: 3389359 - DNA, 25 bp, Homo sapien
gattcaaacgagcttgaaccctgga

SEQ ID NO: 3389360 - DNA, 25 bp, Homo sapien
ctgatgccttgatttgagtttccga

SEQ ID NO: 3389361 - DNA, 25 bp, Homo sapien
tgatccagccaaatcatgacatttt

SEQ ID NO: 3389362 - DNA, 25 bp, Homo sapien
cagcaatactggaagagtatcacaa

SEQ ID NO: 3389363 - DNA, 25 bp, Homo sapien
tgggagagaactccaaatttgaaga

SEQ ID NO: 3389364 - DNA, 25 bp, Homo sapien
ccctgcaatagaggatcatgaagca

SEQ ID NO: 3389365 - DNA, 25 bp, Homo sapien
ttaaagaaagctacgtagaagcagg

SEQ ID NO: 3389366 - DNA, 25 bp, Homo sapien
gctacgtagaagcaggatgagtaaa

SEQ ID NO: 3389367 - DNA, 25 bp, Homo sapien
caggatagcctacgaacttcccttt

SEQ ID NO: 3389368 - DNA, 25 bp, Homo sapien
tactcctggtatgttcgaggaattt

SEQ ID NO: 3389369 - DNA, 25 bp, Homo sapien
taatggtcaattgggttgtcaattc

SEQ ID NO: 3389370 - DNA, 25 bp, Homo sapien
caaaaatctgtttcccggtcattat

SEQ ID NO: 3389371 - DNA, 25 bp, Homo sapien
attataatggtcaattgggttgtca

SEQ ID NO: 3389372 - DNA, 25 bp, Homo sapien
ttgtcaattctataagacagcctcc

SEQ ID NO: 3389373 - DNA, 25 bp, Homo sapien
taagtactcatagaaaagcccaagg

SEQ ID NO: 3389374 - DNA, 25 bp, Homo sapien
tttcggcgtctccaccaattcaaag

SEQ ID NO: 3389375 - DNA, 25 bp, Homo sapien
cagagtttgtccgagcttttcggcg

SEQ ID NO: 3389376 - DNA, 25 bp, Homo sapien
aaaactttcaaggtcatgatcctgc

SEQ ID NO: 3389377 - DNA, 25 bp, Homo sapien
agaaaaaggcatgaactcattattg

SEQ ID NO: 3389378 - DNA, 25 bp, Homo sapien
aaaggcatgaactcattattgtgaa

SEQ ID NO: 3389379 - DNA, 25 bp, Homo sapien
ggcatgaactcattattgtgaagga

SEQ ID NO: 3389380 - DNA, 25 bp, Homo sapien
gaactcattattgtgaaggagaaag

SEQ ID NO: 3389381 - DNA, 25 bp, Homo sapien
tttatgagagcaagaagaggagcca

SEQ ID NO: 3389382 - DNA, 25 bp, Homo sapien
tcttgccaaacacctatgctatgag

SEQ ID NO: 3389383 - DNA, 25 bp, Homo sapien
ggcatccactcgaatctctacaata

SEQ ID NO: 3389384 - DNA, 25 bp, Homo sapien
cctgtattgagtggtaagtttccag

SEQ ID NO: 3389385 - DNA, 25 bp, Homo sapien
ctgacgtaaatgcaacaataaaggc

SEQ ID NO: 3389386 - DNA, 25 bp, Homo sapien
ttattcacatatcctgtcataggct

SEQ ID NO: 3389387 - DNA, 25 bp, Homo sapien
gggaatgatgtctgacgtaaatgca

SEQ ID NO: 3389388 - DNA, 25 bp, Homo sapien
taagcatagtagtaaactagacggg

SEQ ID NO: 3389389 - DNA, 25 bp, Homo sapien
gcaagtgatgaagtctcgtttttcc

SEQ ID NO: 3389390 - DNA, 25 bp, Homo sapien
ctcgtttttccgaaggtgcagtgtg

SEQ ID NO: 3389391 - DNA, 25 bp, Homo sapien
tggtttggaaaatcagctatcagga

SEQ ID NO: 3389392 - DNA, 25 bp, Homo sapien
tggaaaatcagctatcaggaatact

SEQ ID NO: 3389393 - DNA, 25 bp, Homo sapien
cgtcatcaggaggatatctgtaatc

SEQ ID NO: 3389394 - DNA, 25 bp, Homo sapien
tattctcgtcatcaggaggatatct

SEQ ID NO: 3389395 - DNA, 25 bp, Homo sapien
gaaaatatttattctcgtcatcagg

SEQ ID NO: 3389396 - DNA, 25 bp, Homo sapien
ggacatgccagaattgcatattatg

SEQ ID NO: 3389397 - DNA, 25 bp, Homo sapien
aaccaaaaatgggagaaacatagat

SEQ ID NO: 3389398 - DNA, 25 bp, Homo sapien
aatggactgcccataatttttcctc

SEQ ID NO: 3389399 - DNA, 25 bp, Homo sapien
aaatgggagaaacatagattgcaga

SEQ ID NO: 3389400 - DNA, 25 bp, Homo sapien
aaatggactgcccataatttttcct

SEQ ID NO: 3389401 - DNA, 25 bp, Homo sapien
tgattctctccacaacatcttttgg

SEQ ID NO: 3389402 - DNA, 25 bp, Homo sapien
catcttttggaacatcaggtatcat

SEQ ID NO: 3389403 - DNA, 25 bp, Homo sapien
catcaggtatcatccaggccagcaa

SEQ ID NO: 3389404 - DNA, 25 bp, Homo sapien
tctcttgattctctccacaacatct

SEQ ID NO: 3389405 - DNA, 25 bp, Homo sapien
catggagaatcttgatagtcattaa

SEQ ID NO: 3389406 - DNA, 25 bp, Homo sapien
tcatggagaatcttgatagtcatta

SEQ ID NO: 3389407 - DNA, 25 bp, Homo sapien
atcatggagaatcttgatagtcatt

SEQ ID NO: 3389408 - DNA, 25 bp, Homo sapien
atggagaatcttgatagtcattaac

SEQ ID NO: 3389409 - DNA, 25 bp, Homo sapien
agagtgttgatttagccagctgtgc

SEQ ID NO: 3389410 - DNA, 25 bp, Homo sapien
tagagtgttgatttagccagctgtg

SEQ ID NO: 3389411 - DNA, 25 bp, Homo sapien
ttagagtgttgatttagccagctgt

SEQ ID NO: 3389412 - DNA, 25 bp, Homo sapien
gagtgttgatttagccagctgtgct

SEQ ID NO: 3389413 - DNA, 25 bp, Homo sapien
gcactgtacactatagcaatggaga

SEQ ID NO: 3389414 - DNA, 25 bp, Homo sapien
ggatatatagggctcagtcagtctc

SEQ ID NO: 3389415 - DNA, 25 bp, Homo sapien
tgtcagaggtattggaacaaggcac

SEQ ID NO: 3389416 - DNA, 25 bp, Homo sapien
taaaattgacacatggcttctggcg

SEQ ID NO: 3389417 - DNA, 25 bp, Homo sapien
caaaactatgcgcttggtcagcaga

SEQ ID NO: 3389418 - DNA, 25 bp, Homo sapien
tgggtgctcttaatgcagccctccc

SEQ ID NO: 3389419 - DNA, 25 bp, Homo sapien
cacctgccatgctggtaattatcaa

SEQ ID NO: 3389420 - DNA, 25 bp, Homo sapien
gatgagacacatctatctgaattgg

SEQ ID NO: 3389421 - DNA, 25 bp, Homo sapien
gacacataatagtggtcacattgaa

SEQ ID NO: 3389422 - DNA, 25 bp, Homo sapien
gctggaccaaacttcctcggaacag

SEQ ID NO: 3389423 - DNA, 25 bp, Homo sapien
gcaaggatgaaagagggcctttgaa

SEQ ID NO: 3389424 - DNA, 25 bp, Homo sapien
tgtgcaaaggaaagttgacgaaggc

SEQ ID NO: 3389425 - DNA, 25 bp, Homo sapien
gctgacttgtaaggctggccaatgg

SEQ ID NO: 3389426 - DNA, 25 bp, Homo sapien
cacataggagagatacacccagtca

SEQ ID NO: 3389427 - DNA, 25 bp, Homo sapien
ttaacaccaggagacataatgtcac

SEQ ID NO: 3389428 - DNA, 25 bp, Homo sapien
tagttataccgactcattgtggctg

SEQ ID NO: 3389429 - DNA, 25 bp, Homo sapien
tttacatcgttaatatgcaaacatc

SEQ ID NO: 3389430 - DNA, 25 bp, Homo sapien
atttcatgagctaaacacgttatat

SEQ ID NO: 3389431 - DNA, 25 bp, Homo sapien
tatgcaaacatctaaatgtgcaaaa

SEQ ID NO: 3389432 - DNA, 25 bp, Homo sapien
caaggaatttacatcgttaatatgc

SEQ ID NO: 3389433 - DNA, 25 bp, Homo sapien
gtacacagtccattttcataaacca

SEQ ID NO: 3389434 - DNA, 25 bp, Homo sapien
tccattttcataaaccagaggccca

SEQ ID NO: 3389435 - DNA, 25 bp, Homo sapien
ccattttcataaaccagaggcccat

SEQ ID NO: 3389436 - DNA, 25 bp, Homo sapien
ctgcagcttgtacacagtccatttt

SEQ ID NO: 3389437 - DNA, 25 bp, Homo sapien
ttgcccaaataacagtggcggcctg

SEQ ID NO: 3389438 - DNA, 25 bp, Homo sapien
tgcccaaataacagtggcggcctgc

SEQ ID NO: 3389439 - DNA, 25 bp, Homo sapien
gcccaaataacagtggcggcctgca

SEQ ID NO: 3389440 - DNA, 25 bp, Homo sapien
atagttgaagtcaatcttggtttgg

SEQ ID NO: 3389441 - DNA, 25 bp, Homo sapien
aaatcctaagtaagactggatgtag

SEQ ID NO: 3389442 - DNA, 25 bp, Homo sapien
gaagtcaatcttggtttggtattta

SEQ ID NO: 3389443 - DNA, 25 bp, Homo sapien
tcacccatagagttcttccagtgta

SEQ ID NO: 3389444 - DNA, 25 bp, Homo sapien
caaaatgatccaggagaactataaa

SEQ ID NO: 3389445 - DNA, 25 bp, Homo sapien
tcagtttgaactaaacgccctctat

SEQ ID NO: 3389446 - DNA, 25 bp, Homo sapien
tgtcattaacccacctcaaaatgat

SEQ ID NO: 3389447 - DNA, 25 bp, Homo sapien
ctctgcccttctacttcagtttgaa

SEQ ID NO: 3389448 - DNA, 25 bp, Homo sapien
gctatggaaaccattgggaagatgt

SEQ ID NO: 3389449 - DNA, 25 bp, Homo sapien
aaaccattgggaagatgtcatcatc

SEQ ID NO: 3389450 - DNA, 25 bp, Homo sapien
cttcaggaacggatgctatggaaac

SEQ ID NO: 3389451 - DNA, 25 bp, Homo sapien
tcttcaggaacggatgctatggaaa

SEQ ID NO: 3389452 - DNA, 25 bp, Homo sapien
agaatagctgcatgcaacccacggg

SEQ ID NO: 3389453 - DNA, 25 bp, Homo sapien
tctcagcagaatggtagtggctcgc

SEQ ID NO: 3389454 - DNA, 25 bp, Homo sapien
caagcagtgccacggtatttgggta

SEQ ID NO: 3389455 - DNA, 25 bp, Homo sapien
cagcgtaagtctgctctgcggtaga

SEQ ID NO: 3389456 - DNA, 25 bp, Homo sapien
ctgtagatctggccgagtgattttc

SEQ ID NO: 3389457 - DNA, 25 bp, Homo sapien
gatctggccgagtgattttccagca

SEQ ID NO: 3389458 - DNA, 25 bp, Homo sapien
tccagcaaaattctttagcccctct

SEQ ID NO: 3389459 - DNA, 25 bp, Homo sapien
tggccgagtgattttccagcaaaat

SEQ ID NO: 3389460 - DNA, 25 bp, Homo sapien
gcaggccgaagcacgtgcagtcgca

SEQ ID NO: 3389461 - DNA, 25 bp, Homo sapien
ccccgcggtggatggtgctgttgtt

SEQ ID NO: 3389462 - DNA, 25 bp, Homo sapien
gtcagctcgattgtctccccggtgt

SEQ ID NO: 3389463 - DNA, 25 bp, Homo sapien
ttgcagcggataccgaaggagatgc

SEQ ID NO: 3389464 - DNA, 25 bp, Homo sapien
gagatgtggttttgcgaggccgcat

SEQ ID NO: 3389465 - DNA, 25 bp, Homo sapien
cttcctctcagtggcgggggaacgg

SEQ ID NO: 3389466 - DNA, 25 bp, Homo sapien
gggaacggggctcaaacaggagatg

SEQ ID NO: 3389467 - DNA, 25 bp, Homo sapien
ggccgcatggccgaagggcaggagc

SEQ ID NO: 3389468 - DNA, 25 bp, Homo sapien
gcgatgtagcctcccggaatctgag

SEQ ID NO: 3389469 - DNA, 25 bp, Homo sapien
tgttggctgccagccgagacgcgat

SEQ ID NO: 3389470 - DNA, 25 bp, Homo sapien
aagaaggaaccgtggatcatcccca

SEQ ID NO: 3389471 - DNA, 25 bp, Homo sapien
tctgagtgatgatgtagccccaaaa

SEQ ID NO: 3389472 - DNA, 25 bp, Homo sapien
ttatttcgccaaaagcaagttcagc

SEQ ID NO: 3389473 - DNA, 25 bp, Homo sapien
tgtcaggccatacagcacgtcgatt

SEQ ID NO: 3389474 - DNA, 25 bp, Homo sapien
gtgcgctggtcccagagagcctaca

SEQ ID NO: 3389475 - DNA, 25 bp, Homo sapien
gagagagcgcagcatctgccgttct

SEQ ID NO: 3389476 - DNA, 25 bp, Homo sapien
ccaggtcttcgaggcgccttgccag

SEQ ID NO: 3389477 - DNA, 25 bp, Homo sapien
ccagagcaccaactgggcgggggac

SEQ ID NO: 3389478 - DNA, 25 bp, Homo sapien
gggccaggtcttcgaggcgccttgc

SEQ ID NO: 3389479 - DNA, 25 bp, Homo sapien
ggacggggccaggtcttcgaggcgc

SEQ ID NO: 3389480 - DNA, 25 bp, Homo sapien
gaactggcgctaggaccttggttgt

SEQ ID NO: 3389481 - DNA, 25 bp, Homo sapien
gcccctacgcagctcattaacaggt

SEQ ID NO: 3389482 - DNA, 25 bp, Homo sapien
tctccaggtgccgttggtggcgctt

SEQ ID NO: 3389483 - DNA, 25 bp, Homo sapien
ttggttgtggacaccgcagcaaggc

SEQ ID NO: 3389484 - DNA, 25 bp, Homo sapien
gtaaaatctaccagataaattagaa

SEQ ID NO: 3389485 - DNA, 25 bp, Homo sapien
ttttcattgctaaacatgacacaga

SEQ ID NO: 3389486 - DNA, 25 bp, Homo sapien
gagtaaaatctaccagataaattag

SEQ ID NO: 3389487 - DNA, 25 bp, Homo sapien
ttgagtaaaatctaccagataaatt

SEQ ID NO: 3389488 - DNA, 25 bp, Homo sapien
ctgtccccaatatcacatgcaaagg

SEQ ID NO: 3389489 - DNA, 25 bp, Homo sapien
tagtactagttggacattcaccatg

SEQ ID NO: 3389490 - DNA, 25 bp, Homo sapien
tagagaagcttatttgaatgggtac

SEQ ID NO: 3389491 - DNA, 25 bp, Homo sapien
ggtacatgatgctcataagtggaag

SEQ ID NO: 3389492 - DNA, 25 bp, Homo sapien
cagttccaccacaacagtggtggca

SEQ ID NO: 3389493 - DNA, 25 bp, Homo sapien
caccacaacagtggtggcaaaactt

SEQ ID NO: 3389494 - DNA, 25 bp, Homo sapien
ttcctcagttccaccacaacagtgg

SEQ ID NO: 3389495 - DNA, 25 bp, Homo sapien
tccaccacaacagtggtggcaaaac

SEQ ID NO: 3389496 - DNA, 25 bp, Homo sapien
tttgccaagagatgtagccaggagc

SEQ ID NO: 3389497 - DNA, 25 bp, Homo sapien
ccaggagtctgcattgtgaccaaga

SEQ ID NO: 3389498 - DNA, 25 bp, Homo sapien
gagactgggtttactcccctcctga

SEQ ID NO: 3389499 - DNA, 25 bp, Homo sapien
cagggtaaaaccagtgcttaggaat

SEQ ID NO: 3389500 - DNA, 25 bp, Homo sapien
cagttttgtgatacagtgctataca

SEQ ID NO: 3389501 - DNA, 25 bp, Homo sapien
gatacagtgctatacattaaacata

SEQ ID NO: 3389502 - DNA, 25 bp, Homo sapien
ctgtatctgaccttctatggttatg

SEQ ID NO: 3389503 - DNA, 25 bp, Homo sapien
ccttctatggttatgccttttgcaa

SEQ ID NO: 3389504 - DNA, 25 bp, Homo sapien
tgtgaatataagtcagagataggct

SEQ ID NO: 3389505 - DNA, 25 bp, Homo sapien
ttctggtgtgaatataagtcagaga

SEQ ID NO: 3389506 - DNA, 25 bp, Homo sapien
taagtcagagataggctgtcagtaa

SEQ ID NO: 3389507 - DNA, 25 bp, Homo sapien
cagagataggctgtcagtaattggg

SEQ ID NO: 3389508 - DNA, 25 bp, Homo sapien
aaggaagtattgaaaatggctgaac

SEQ ID NO: 3389509 - DNA, 25 bp, Homo sapien
gctgctgatggaattagcatattta

SEQ ID NO: 3389510 - DNA, 25 bp, Homo sapien
gatgacacatccataatgcactctg

SEQ ID NO: 3389511 - DNA, 25 bp, Homo sapien
agcatatttagggtagaggtaagaa

SEQ ID NO: 3389512 - DNA, 25 bp, Homo sapien
taagaagtatggcagctccgaaaac

SEQ ID NO: 3389513 - DNA, 25 bp, Homo sapien
cagtctactcctctctagaggtggg

SEQ ID NO: 3389514 - DNA, 25 bp, Homo sapien
ggaggtggttgccagtctactcctc

SEQ ID NO: 3389515 - DNA, 25 bp, Homo sapien
catatcccatgacatgctgggtagg

SEQ ID NO: 3389516 - DNA, 25 bp, Homo sapien
tttgctccatatcccatgacatgct

SEQ ID NO: 3389517 - DNA, 25 bp, Homo sapien
gcaatcacagctccggcataggaac

SEQ ID NO: 3389518 - DNA, 25 bp, Homo sapien
gaagaccagccagtgtactgcacaa

SEQ ID NO: 3389519 - DNA, 25 bp, Homo sapien
cactgaagaccagccagtgtactgc

SEQ ID NO: 3389520 - DNA, 25 bp, Homo sapien
agaatgccagctaaaggcattgcaa

SEQ ID NO: 3389521 - DNA, 25 bp, Homo sapien
ccaaaacatgtaccagaccattcca

SEQ ID NO: 3389522 - DNA, 25 bp, Homo sapien
gcaggactttcataagacaccaaaa

SEQ ID NO: 3389523 - DNA, 25 bp, Homo sapien
aaaacatgtaccagaccattccaaa

SEQ ID NO: 3389524 - DNA, 25 bp, Homo sapien
catctgtaatagtaggatgctttgc

SEQ ID NO: 3389525 - DNA, 25 bp, Homo sapien
cattgcacctaaaagatttgcactc

SEQ ID NO: 3389526 - DNA, 25 bp, Homo sapien
aaaagatttgcactctctccaatgc

SEQ ID NO: 3389527 - DNA, 25 bp, Homo sapien
ttccattgcacctaaaagatttgca

SEQ ID NO: 3389528 - DNA, 25 bp, Homo sapien
gcacctaaaagatttgcactctctc

SEQ ID NO: 3389529 - DNA, 25 bp, Homo sapien
aaaatataacatcaggtggcttttg

SEQ ID NO: 3389530 - DNA, 25 bp, Homo sapien
aattactatgtacaatgtatcagtg

SEQ ID NO: 3389531 - DNA, 25 bp, Homo sapien
caggtggcttttgtattaattacta

SEQ ID NO: 3389532 - DNA, 25 bp, Homo sapien
caatgtatcagtgttatgtggaata

SEQ ID NO: 3389533 - DNA, 25 bp, Homo sapien
tcaaatccaaagacttcctcaaaat

SEQ ID NO: 3389534 - DNA, 25 bp, Homo sapien
tcctcaaaatatgctggctgactaa

SEQ ID NO: 3389535 - DNA, 25 bp, Homo sapien
caattattgcatagactggcatgga

SEQ ID NO: 3389536 - DNA, 25 bp, Homo sapien
tgcagaagtttgcaacaattattgc

SEQ ID NO: 3389537 - DNA, 25 bp, Homo sapien
tctgcaatttgtcccccaataggca

SEQ ID NO: 3389538 - DNA, 25 bp, Homo sapien
aataattgtcattactaagtgtggc

SEQ ID NO: 3389539 - DNA, 25 bp, Homo sapien
aatttgtcccccaataggcacaata

SEQ ID NO: 3389540 - DNA, 25 bp, Homo sapien
gtgtggcacagcagatagcatacca

SEQ ID NO: 3389541 - DNA, 25 bp, Homo sapien
gaatgagattgctacccctctagta

SEQ ID NO: 3389542 - DNA, 25 bp, Homo sapien
tgaatcccactgcaagtaccaagaa

SEQ ID NO: 3389543 - DNA, 25 bp, Homo sapien
gatatagcaaatccactgaatccca

SEQ ID NO: 3389544 - DNA, 25 bp, Homo sapien
tatgagaatagccaacgaccaggag

SEQ ID NO: 3389545 - DNA, 25 bp, Homo sapien
tgcaccaacaatgataggacaaacc

SEQ ID NO: 3389546 - DNA, 25 bp, Homo sapien
gatactggcatatcttggagcgata

SEQ ID NO: 3389547 - DNA, 25 bp, Homo sapien
tcgaaatgcccattaagatactggc

SEQ ID NO: 3389548 - DNA, 25 bp, Homo sapien
ttcctgacaatgtgccaacaccatt

SEQ ID NO: 3389549 - DNA, 25 bp, Homo sapien
actgtcttctatgactaaacatctg

SEQ ID NO: 3389550 - DNA, 25 bp, Homo sapien
aactgtcttctatgactaaacatct

SEQ ID NO: 3389551 - DNA, 25 bp, Homo sapien
gtgagaaaaagcagcactgtgagaa

SEQ ID NO: 3389552 - DNA, 25 bp, Homo sapien
aaaaagcagcactgtgagaactgac

SEQ ID NO: 3389553 - DNA, 25 bp, Homo sapien
tgcagtgagaaaaagcagcactgtg

SEQ ID NO: 3389554 - DNA, 25 bp, Homo sapien
cagcactgtgagaactgactcccca

SEQ ID NO: 3389555 - DNA, 25 bp, Homo sapien
caactcggtccttatagctatgtga

SEQ ID NO: 3389556 - DNA, 25 bp, Homo sapien
tataactccaccatagtggactagg

SEQ ID NO: 3389557 - DNA, 25 bp, Homo sapien
agggcagcgatcaggaagacatact

SEQ ID NO: 3389558 - DNA, 25 bp, Homo sapien
cctgtgttgtggcaccataagactt

SEQ ID NO: 3389559 - DNA, 25 bp, Homo sapien
cagattgcacttgatggtaacctca

SEQ ID NO: 3389560 - DNA, 25 bp, Homo sapien
tatatttgcagtagcagggcctcca

SEQ ID NO: 3389561 - DNA, 25 bp, Homo sapien
tatgcttgcaagtttacatcacgtg

SEQ ID NO: 3389562 - DNA, 25 bp, Homo sapien
taaatgtcgcctctacttgacgcag

SEQ ID NO: 3389563 - DNA, 25 bp, Homo sapien
caagttctccaagtactcccttgag

SEQ ID NO: 3389564 - DNA, 25 bp, Homo sapien
aaagagcctctacagaaagcctgct

SEQ ID NO: 3389565 - DNA, 25 bp, Homo sapien
gcttttttagtcaaagagcctctac

SEQ ID NO: 3389566 - DNA, 25 bp, Homo sapien
ccttgaggtttccagataaactgct

SEQ ID NO: 3389567 - DNA, 25 bp, Homo sapien
cttttgtgacagcttcaaacttgat

SEQ ID NO: 3389568 - DNA, 25 bp, Homo sapien
ctctgagctccagtgaagcacaaat

SEQ ID NO: 3389569 - DNA, 25 bp, Homo sapien
cagcttcaaacttgatctctgagct

SEQ ID NO: 3389570 - DNA, 25 bp, Homo sapien
tgaagcacaaattactgtgtggcat

SEQ ID NO: 3389571 - DNA, 25 bp, Homo sapien
cctgtccctcacaggtgaagagcct

SEQ ID NO: 3389572 - DNA, 25 bp, Homo sapien
tgaactgtgacaagccccctttcct

SEQ ID NO: 3389573 - DNA, 25 bp, Homo sapien
aaaaggctggcgcaattcagctgag

SEQ ID NO: 3389574 - DNA, 25 bp, Homo sapien
tagatccccggatgaatgccgaatg

SEQ ID NO: 3389575 - DNA, 25 bp, Homo sapien
aacaggagtgtgatgctttgcgcaa

SEQ ID NO: 3389576 - DNA, 25 bp, Homo sapien
tgcacaggcaggcaagcatagatcc

SEQ ID NO: 3389577 - DNA, 25 bp, Homo sapien
ctgtccttgtatacctgacataatg

SEQ ID NO: 3389578 - DNA, 25 bp, Homo sapien
gacataatgatctgggagcctggct

SEQ ID NO: 3389579 - DNA, 25 bp, Homo sapien
cctggctctgttccttctagttgta

SEQ ID NO: 3389580 - DNA, 25 bp, Homo sapien
tctagttgtagacttctttttgcca

SEQ ID NO: 3389581 - DNA, 25 bp, Homo sapien
tccatggtattacattcaaagcctc

SEQ ID NO: 3389582 - DNA, 25 bp, Homo sapien
atttccaccaaatcctgaacttctc

SEQ ID NO: 3389583 - DNA, 25 bp, Homo sapien
cattccttaccactatgttccatgg

SEQ ID NO: 3389584 - DNA, 25 bp, Homo sapien
tacattcaaagcctcagtcacagcc

SEQ ID NO: 3389585 - DNA, 25 bp, Homo sapien
tatagctatatcagaccataacacc

SEQ ID NO: 3389586 - DNA, 25 bp, Homo sapien
ccagtgcccagtttgtgaaatagaa

SEQ ID NO: 3389587 - DNA, 25 bp, Homo sapien
tatatcagaccataacaccagtgcc

SEQ ID NO: 3389588 - DNA, 25 bp, Homo sapien
aaatagaagtaacgcatgcagtagg

SEQ ID NO: 3389589 - DNA, 25 bp, Homo sapien
gactaatgagatttcaaatccaccc

SEQ ID NO: 3389590 - DNA, 25 bp, Homo sapien
taatgagatttcaaatccaccccga

SEQ ID NO: 3389591 - DNA, 25 bp, Homo sapien
gattcactcccgtttacagaaggaa

SEQ ID NO: 3389592 - DNA, 25 bp, Homo sapien
caccccgattcactcccgtttacag

SEQ ID NO: 3389593 - DNA, 25 bp, Homo sapien
taagtgcattcttgtgaatgaggaa

SEQ ID NO: 3389594 - DNA, 25 bp, Homo sapien
cattagccttcacacttggattggc

SEQ ID NO: 3389595 - DNA, 25 bp, Homo sapien
tattcaaagctactctcttgacttc

SEQ ID NO: 3389596 - DNA, 25 bp, Homo sapien
tctttttaactcaggactgtaatac

SEQ ID NO: 3389597 - DNA, 25 bp, Homo sapien
ttggcttgaattctctctggcttga

SEQ ID NO: 3389598 - DNA, 25 bp, Homo sapien
tgatgttttgggaggttcattttgg

SEQ ID NO: 3389599 - DNA, 25 bp, Homo sapien
agaagacagaatttagctacacccc

SEQ ID NO: 3389600 - DNA, 25 bp, Homo sapien
aacatgataatgtattaatgcagac

SEQ ID NO: 3389601 - DNA, 25 bp, Homo sapien
tgacttgatgtgtggcatgacgatg

SEQ ID NO: 3389602 - DNA, 25 bp, Homo sapien
acatttggctgacaagttggccaca

SEQ ID NO: 3389603 - DNA, 25 bp, Homo sapien
gacaagttggccacagtgattctga

SEQ ID NO: 3389604 - DNA, 25 bp, Homo sapien
cagtgattctgaacagaggttgctc

SEQ ID NO: 3389605 - DNA, 25 bp, Homo sapien
acagaggttgctcaaaggaacccat

SEQ ID NO: 3389606 - DNA, 25 bp, Homo sapien
ggtttgctcatttatcattttctcc

SEQ ID NO: 3389607 - DNA, 25 bp, Homo sapien
tctggtttgctcatttatcattttc

SEQ ID NO: 3389608 - DNA, 25 bp, Homo sapien
gctctggtttgctcatttatcattt

SEQ ID NO: 3389609 - DNA, 25 bp, Homo sapien
tgctgtgattcattgctctggtttg

SEQ ID NO: 3389610 - DNA, 25 bp, Homo sapien
tgtatagcttgcaccagaatcagca

SEQ ID NO: 3389611 - DNA, 25 bp, Homo sapien
tagcttgcaccagaatcagcaatgt

SEQ ID NO: 3389612 - DNA, 25 bp, Homo sapien
ccagaatcagcaatgttcacacaac

SEQ ID NO: 3389613 - DNA, 25 bp, Homo sapien
agaatcagcaatgttcacacaacaa

SEQ ID NO: 3389614 - DNA, 25 bp, Homo sapien
atttcctaaaagacatgtggtcact

SEQ ID NO: 3389615 - DNA, 25 bp, Homo sapien
ctgggatccccaatcttaaaactga

SEQ ID NO: 3389616 - DNA, 25 bp, Homo sapien
atggttgggtctgctctaaagaaag

SEQ ID NO: 3389617 - DNA, 25 bp, Homo sapien
agaaagacttagtttatccatacag

SEQ ID NO: 3389618 - DNA, 25 bp, Homo sapien
tgggtctgctctaaagaaagactta

SEQ ID NO: 3389619 - DNA, 25 bp, Homo sapien
ggtctgctctaaagaaagacttagt

SEQ ID NO: 3389620 - DNA, 25 bp, Homo sapien
cttggcttcctgcatttgccatcaa

SEQ ID NO: 3389621 - DNA, 25 bp, Homo sapien
ggcttcctgcatttgccatcaattt

SEQ ID NO: 3389622 - DNA, 25 bp, Homo sapien
tcttggcttcctgcatttgccatca

SEQ ID NO: 3389623 - DNA, 25 bp, Homo sapien
caactcttggcttcctgcatttgcc

SEQ ID NO: 3389624 - DNA, 25 bp, Homo sapien
tgtgactctttttgcgagattgctt

SEQ ID NO: 3389625 - DNA, 25 bp, Homo sapien
cctgtgactctttttgcgagattgc

SEQ ID NO: 3389626 - DNA, 25 bp, Homo sapien
acctgtgactctttttgcgagattg

SEQ ID NO: 3389627 - DNA, 25 bp, Homo sapien
gacctgtgactctttttgcgagatt

SEQ ID NO: 3389628 - DNA, 25 bp, Homo sapien
cctagcacagtgtccagcatatggt

SEQ ID NO: 3389629 - DNA, 25 bp, Homo sapien
atgaaagtggaagccgtatctgtca

SEQ ID NO: 3389630 - DNA, 25 bp, Homo sapien
taatcttcacaccaaaactgtattc

SEQ ID NO: 3389631 - DNA, 25 bp, Homo sapien
taggaatctacgcatacactgagag

SEQ ID NO: 3389632 - DNA, 25 bp, Homo sapien
gataaatcttgagtgaaaaccagca

SEQ ID NO: 3389633 - DNA, 25 bp, Homo sapien
tactagggagatagacctttacagc

SEQ ID NO: 3389634 - DNA, 25 bp, Homo sapien
tctcattctgtggtacaacccaggg

SEQ ID NO: 3389635 - DNA, 25 bp, Homo sapien
tgttccacagctgatagtgattgcc

SEQ ID NO: 3389636 - DNA, 25 bp, Homo sapien
tctctgatgaagacccaggcggagc

SEQ ID NO: 3389637 - DNA, 25 bp, Homo sapien
ggatgcagctcgttaccacctggtg

SEQ ID NO: 3389638 - DNA, 25 bp, Homo sapien
cttcaatggctatagagagaaccca

SEQ ID NO: 3389639 - DNA, 25 bp, Homo sapien
tccgggattagcgaacttccaggcc

SEQ ID NO: 3389640 - DNA, 25 bp, Homo sapien
cgctttggtcggcatggccccattc

SEQ ID NO: 3389641 - DNA, 25 bp, Homo sapien
ccattcgcacggctctggagcggcg

SEQ ID NO: 3389642 - DNA, 25 bp, Homo sapien
tggccccattcgcacggctctggag

SEQ ID NO: 3389643 - DNA, 25 bp, Homo sapien
ccacatccatcggcgctttggtcgg

SEQ ID NO: 3389644 - DNA, 25 bp, Homo sapien
taaagacgctgggagattgacatgc

SEQ ID NO: 3389645 - DNA, 25 bp, Homo sapien
catcatctcgcacgtggttccggaa

SEQ ID NO: 3389646 - DNA, 25 bp, Homo sapien
catcagtgagcgacataggaccttc

SEQ ID NO: 3389647 - DNA, 25 bp, Homo sapien
gatgttccaatcagtacgcagagag

SEQ ID NO: 3389648 - DNA, 25 bp, Homo sapien
tacaaaaattggccgcgcctgggcg

SEQ ID NO: 3389649 - DNA, 25 bp, Homo sapien
taaatctgaattaacagcatgcaca

SEQ ID NO: 3389650 - DNA, 25 bp, Homo sapien
aattggccgcgcctgggcgacagaa

SEQ ID NO: 3389651 - DNA, 25 bp, Homo sapien
aaatctgaattaacagcatgcacat

SEQ ID NO: 3389652 - DNA, 25 bp, Homo sapien
atgcccagctaatttttttgtttgt

SEQ ID NO: 3389653 - DNA, 25 bp, Homo sapien
taggatcacaggtgtgcaccgccat

SEQ ID NO: 3389654 - DNA, 25 bp, Homo sapien
cttaacctcccgattagctaggatc

SEQ ID NO: 3389655 - DNA, 25 bp, Homo sapien
ctgccttaacctcccgattagctag

SEQ ID NO: 3389656 - DNA, 25 bp, Homo sapien
gcaaggttcagtggccctgtcagga

SEQ ID NO: 3389657 - DNA, 25 bp, Homo sapien
gtaagtgattgagccctagcccaga

SEQ ID NO: 3389658 - DNA, 25 bp, Homo sapien
ctctgggaatcagcgtaggcggcaa

SEQ ID NO: 3389659 - DNA, 25 bp, Homo sapien
tagagatgacattccatgggagagc

SEQ ID NO: 3389660 - DNA, 25 bp, Homo sapien
ttataccgttacacctccatgcctt

SEQ ID NO: 3389661 - DNA, 25 bp, Homo sapien
gcctttcctcatgctaaccaaaatg

SEQ ID NO: 3389662 - DNA, 25 bp, Homo sapien
gaggtaaggtctcaattaacagatg

SEQ ID NO: 3389663 - DNA, 25 bp, Homo sapien
tattggtagacttgatgcaatgtaa

SEQ ID NO: 3389664 - DNA, 25 bp, Homo sapien
tcatcagtcctcatagaccgagcgg

SEQ ID NO: 3389665 - DNA, 25 bp, Homo sapien
ctgctggcggctctcagaggcgctt

SEQ ID NO: 3389666 - DNA, 25 bp, Homo sapien
gctccttttagtgctgtttgggaaa

SEQ ID NO: 3389667 - DNA, 25 bp, Homo sapien
gccagaaacagatttcctacatttc

SEQ ID NO: 3389668 - DNA, 25 bp, Homo sapien
aaagagcctgtccaactgtccgcgg

SEQ ID NO: 3389669 - DNA, 25 bp, Homo sapien
ccctgcagtgaatacccactcttag

SEQ ID NO: 3389670 - DNA, 25 bp, Homo sapien
gaatcagaaagtcaccccctgcagt

SEQ ID NO: 3389671 - DNA, 25 bp, Homo sapien
gaacacatggttgtttccagagaat

SEQ ID NO: 3389672 - DNA, 25 bp, Homo sapien
gcagtcaaaacccagacacccatgt

SEQ ID NO: 3389673 - DNA, 25 bp, Homo sapien
caaagacaggctgggcaaatcagac

SEQ ID NO: 3389674 - DNA, 25 bp, Homo sapien
ccttcaccgcagttagaggaaagca

SEQ ID NO: 3389675 - DNA, 25 bp, Homo sapien
gaagcacaggtcttgttctctgcct

SEQ ID NO: 3389676 - DNA, 25 bp, Homo sapien
taagggaccattcaggcagccctgt

SEQ ID NO: 3389677 - DNA, 25 bp, Homo sapien
catgtaagggaccattcaggcagcc

SEQ ID NO: 3389678 - DNA, 25 bp, Homo sapien
ttccatgtaagggaccattcaggca

SEQ ID NO: 3389679 - DNA, 25 bp, Homo sapien
cttttccatgtaagggaccattcag

SEQ ID NO: 3389680 - DNA, 25 bp, Homo sapien
caaaagagcaattgctttttataca

SEQ ID NO: 3389681 - DNA, 25 bp, Homo sapien
caattgctttttatacagacttctc

SEQ ID NO: 3389682 - DNA, 25 bp, Homo sapien
gagcaattgctttttatacagactt

SEQ ID NO: 3389683 - DNA, 25 bp, Homo sapien
gaaacaaaagagcaattgcttttta

SEQ ID NO: 3389684 - DNA, 25 bp, Homo sapien
tgtctgctggctagccattggctat

SEQ ID NO: 3389685 - DNA, 25 bp, Homo sapien
tagattggttaaccacaaggccaga

SEQ ID NO: 3389686 - DNA, 25 bp, Homo sapien
gctggctagccattggctatactga

SEQ ID NO: 3389687 - DNA, 25 bp, Homo sapien
ctaatagattggttaaccacaaggc

SEQ ID NO: 3389688 - DNA, 25 bp, Homo sapien
tataattgcgatatttgatcttcgc

SEQ ID NO: 3389689 - DNA, 25 bp, Homo sapien
ttggtttgaacattaatctagagtg

SEQ ID NO: 3389690 - DNA, 25 bp, Homo sapien
tgctggtccgtaaagacattggttt

SEQ ID NO: 3389691 - DNA, 25 bp, Homo sapien
gagtgtcctagtttagaagtaatag

SEQ ID NO: 3389692 - DNA, 25 bp, Homo sapien
aacccaatatccaaaggtctccctg

SEQ ID NO: 3389693 - DNA, 25 bp, Homo sapien
acccaatatccaaaggtctccctgt

SEQ ID NO: 3389694 - DNA, 25 bp, Homo sapien
cccaatatccaaaggtctccctgta

SEQ ID NO: 3389695 - DNA, 25 bp, Homo sapien
ccaatatccaaaggtctccctgtat

SEQ ID NO: 3389696 - DNA, 25 bp, Homo sapien
tctaaacgtatctttctcaaagccc

SEQ ID NO: 3389697 - DNA, 25 bp, Homo sapien
agtcctacagattcaagcttccttc

SEQ ID NO: 3389698 - DNA, 25 bp, Homo sapien
tgtgtaaattattagtcagaagtcc

SEQ ID NO: 3389699 - DNA, 25 bp, Homo sapien
tctatttctcatgccataaccttaa

SEQ ID NO: 3389700 - DNA, 25 bp, Homo sapien
tgtgggcttgttagcatccatgctc

SEQ ID NO: 3389701 - DNA, 25 bp, Homo sapien
cagagcaaggcaccattgtccaact

SEQ ID NO: 3389702 - DNA, 25 bp, Homo sapien
catagtttctgcaagttgacagagc

SEQ ID NO: 3389703 - DNA, 25 bp, Homo sapien
tccataaaagtttctgctgtaatct

SEQ ID NO: 3389704 - DNA, 25 bp, Homo sapien
gcccgaccccgcttagcttccgaga

SEQ ID NO: 3389705 - DNA, 25 bp, Homo sapien
tctcccttccaaggcctaaccaggc

SEQ ID NO: 3389706 - DNA, 25 bp, Homo sapien
atgttcagggtggtatggccgtaga

SEQ ID NO: 3389707 - DNA, 25 bp, Homo sapien
cgagatcagacgagactgggcatgt

SEQ ID NO: 3389708 - DNA, 25 bp, Homo sapien
agtccaccgttgatgagtatctagg

SEQ ID NO: 3389709 - DNA, 25 bp, Homo sapien
catgggtaaattgcaccttgttgag

SEQ ID NO: 3389710 - DNA, 25 bp, Homo sapien
cacttatatgtgagaccatttggtt

SEQ ID NO: 3389711 - DNA, 25 bp, Homo sapien
tagggaccatattttcttagccagt

SEQ ID NO: 3389712 - DNA, 25 bp, Homo sapien
agagatgccaattccgatcgggtag

SEQ ID NO: 3389713 - DNA, 25 bp, Homo sapien
ttagagatgccaattccgatcgggt

SEQ ID NO: 3389714 - DNA, 25 bp, Homo sapien
tagagatgccaattccgatcgggta

SEQ ID NO: 3389715 - DNA, 25 bp, Homo sapien
cagaggcaaagtggatatggcggac

SEQ ID NO: 3389716 - DNA, 25 bp, Homo sapien
ggcggacagaatacaatctggagag

SEQ ID NO: 3389717 - DNA, 25 bp, Homo sapien
tggagaggccaatcagatctcctag

SEQ ID NO: 3389718 - DNA, 25 bp, Homo sapien
ggccaatcagatctcctagaatgac

SEQ ID NO: 3389719 - DNA, 25 bp, Homo sapien
gaaacaaggaaatgagaataatttg

SEQ ID NO: 3389720 - DNA, 25 bp, Homo sapien
caaggaaatgagaataatttggatt

SEQ ID NO: 3389721 - DNA, 25 bp, Homo sapien
aacaaggaaatgagaataatttgga

SEQ ID NO: 3389722 - DNA, 25 bp, Homo sapien
tgaaacaaggaaatgagaataattt

SEQ ID NO: 3389723 - DNA, 25 bp, Homo sapien
gcacaatatcttagacactggcttc

SEQ ID NO: 3389724 - DNA, 25 bp, Homo sapien
gctagggcctatactcttgtccaaa

SEQ ID NO: 3389725 - DNA, 25 bp, Homo sapien
aaaagtaagctatctcaaacatgag

SEQ ID NO: 3389726 - DNA, 25 bp, Homo sapien
gccatttgcttattagggcataaaa

SEQ ID NO: 3389727 - DNA, 25 bp, Homo sapien
cttgctaaatgacatgaggtacatg

SEQ ID NO: 3389728 - DNA, 25 bp, Homo sapien
gccttgctaaatgacatgaggtaca

SEQ ID NO: 3389729 - DNA, 25 bp, Homo sapien
agccttgctaaatgacatgaggtac

SEQ ID NO: 3389730 - DNA, 25 bp, Homo sapien
tgctaaatgacatgaggtacatgat

SEQ ID NO: 3389731 - DNA, 25 bp, Homo sapien
ctctggcaaaaaaggagcccgaggg

SEQ ID NO: 3389732 - DNA, 25 bp, Homo sapien
tctcggcaccaggataagaaatttg

SEQ ID NO: 3389733 - DNA, 25 bp, Homo sapien
agcccgagggtgcactggttttgca

SEQ ID NO: 3389734 - DNA, 25 bp, Homo sapien
tgcatgggatcttcttcaacggtag

SEQ ID NO: 3389735 - DNA, 25 bp, Homo sapien
ccaaaccttccgattcaaatagaca

SEQ ID NO: 3389736 - DNA, 25 bp, Homo sapien
accttccgattcaaatagacacgtt

SEQ ID NO: 3389737 - DNA, 25 bp, Homo sapien
aaaccttccgattcaaatagacacg

SEQ ID NO: 3389738 - DNA, 25 bp, Homo sapien
aaccttccgattcaaatagacacgt

SEQ ID NO: 3389739 - DNA, 25 bp, Homo sapien
taaatttcctaggttacgcatggga

SEQ ID NO: 3389740 - DNA, 25 bp, Homo sapien
caggtattatctatgtacgcacaca

SEQ ID NO: 3389741 - DNA, 25 bp, Homo sapien
cagagtgtactccttgttactaaga

SEQ ID NO: 3389742 - DNA, 25 bp, Homo sapien
tgttaatcgtccacacatgcagagt

SEQ ID NO: 3389743 - DNA, 25 bp, Homo sapien
tctcagagaaatagatgaagcatag

SEQ ID NO: 3389744 - DNA, 25 bp, Homo sapien
ttttcttgttgagtagattctttct

SEQ ID NO: 3389745 - DNA, 25 bp, Homo sapien
cttttcttgttgagtagattctttc

SEQ ID NO: 3389746 - DNA, 25 bp, Homo sapien
ctgcaatccggccaagctctagcag

SEQ ID NO: 3389747 - DNA, 25 bp, Homo sapien
ccggccaagctctagcagacagaga

SEQ ID NO: 3389748 - DNA, 25 bp, Homo sapien
ctggctgcaatccggccaagctcta

SEQ ID NO: 3389749 - DNA, 25 bp, Homo sapien
aatccggccaagctctagcagacag

SEQ ID NO: 3389750 - DNA, 25 bp, Homo sapien
tgtgtacctagggtgttcataatag

SEQ ID NO: 3389751 - DNA, 25 bp, Homo sapien
tatttcttcgggatcaatcacagtg

SEQ ID NO: 3389752 - DNA, 25 bp, Homo sapien
tagctgtgaactcatctggcccagg

SEQ ID NO: 3389753 - DNA, 25 bp, Homo sapien
tagtctaactagtggtgcatcaatc

SEQ ID NO: 3389754 - DNA, 25 bp, Homo sapien
acctgtgttcagcagaaatattggc

SEQ ID NO: 3389755 - DNA, 25 bp, Homo sapien
gaatttttgcacctgtgttcagcag

SEQ ID NO: 3389756 - DNA, 25 bp, Homo sapien
gtgttcagcagaaatattggcctgt

SEQ ID NO: 3389757 - DNA, 25 bp, Homo sapien
agaatttttgcacctgtgttcagca

SEQ ID NO: 3389758 - DNA, 25 bp, Homo sapien
gcagcttcaccagtaactgatgggt

SEQ ID NO: 3389759 - DNA, 25 bp, Homo sapien
tagaggtggagctcgtctcaaactg

SEQ ID NO: 3389760 - DNA, 25 bp, Homo sapien
gctgctatgaacacatgagtgcctg

SEQ ID NO: 3389761 - DNA, 25 bp, Homo sapien
tatacctagtaacgcgattgatggg

SEQ ID NO: 3389762 - DNA, 25 bp, Homo sapien
ttctctgagttattttgaactaact

SEQ ID NO: 3389763 - DNA, 25 bp, Homo sapien
cttctctgagttattttgaactaac

SEQ ID NO: 3389764 - DNA, 25 bp, Homo sapien
tccagctttatcaaaccaggaggct

SEQ ID NO: 3389765 - DNA, 25 bp, Homo sapien
cagctttatcaaaccaggaggctcc

SEQ ID NO: 3389766 - DNA, 25 bp, Homo sapien
tttccagctttatcaaaccaggagg

SEQ ID NO: 3389767 - DNA, 25 bp, Homo sapien
ttccagctttatcaaaccaggaggc

SEQ ID NO: 3389768 - DNA, 25 bp, Homo sapien
ccactcggtatcttccttgggagag

SEQ ID NO: 3389769 - DNA, 25 bp, Homo sapien
aacttgtttgggcatttgcaaggag

SEQ ID NO: 3389770 - DNA, 25 bp, Homo sapien
gaggatcttcagaaattcgtttcac

SEQ ID NO: 3389771 - DNA, 25 bp, Homo sapien
gagccgctccacacagaacttgttt

SEQ ID NO: 3389772 - DNA, 25 bp, Homo sapien
tgtattgcacaatttaaagccatgg

SEQ ID NO: 3389773 - DNA, 25 bp, Homo sapien
aaaactgcccagatgtattattcgg

SEQ ID NO: 3389774 - DNA, 25 bp, Homo sapien
tcattgctaaatggccaatagtggt

SEQ ID NO: 3389775 - DNA, 25 bp, Homo sapien
ccatggtaaaccttgctaactgagt

SEQ ID NO: 3389776 - DNA, 25 bp, Homo sapien
gtggaccggttcaactctctactat

SEQ ID NO: 3389777 - DNA, 25 bp, Homo sapien
gtaatggcctaatgcagtatatgta

SEQ ID NO: 3389778 - DNA, 25 bp, Homo sapien
attgttgcttttcactatacacaca

SEQ ID NO: 3389779 - DNA, 25 bp, Homo sapien
agaaaaatcaacctgagatccctgt

SEQ ID NO: 3389780 - DNA, 25 bp, Homo sapien
ggagatatagtcacaaccatgaaga

SEQ ID NO: 3389781 - DNA, 25 bp, Homo sapien
ttgctttggctgtggagatatagtc

SEQ ID NO: 3389782 - DNA, 25 bp, Homo sapien
gctgtggagatatagtcacaaccat

SEQ ID NO: 3389783 - DNA, 25 bp, Homo sapien
tggctgtggagatatagtcacaacc

SEQ ID NO: 3389784 - DNA, 25 bp, Homo sapien
tgagtccaggtacatgtcagcatgt

SEQ ID NO: 3389785 - DNA, 25 bp, Homo sapien
tcaacaggcacaatacaaggtaaat

SEQ ID NO: 3389786 - DNA, 25 bp, Homo sapien
tgctctttaatcactcggacactga

SEQ ID NO: 3389787 - DNA, 25 bp, Homo sapien
cagcatgttctatatggttcctacc

SEQ ID NO: 3389788 - DNA, 25 bp, Homo sapien
tcagagagattgagcaacctgtcca

SEQ ID NO: 3389789 - DNA, 25 bp, Homo sapien
tcagcaaattgttcaagacacgtct

SEQ ID NO: 3389790 - DNA, 25 bp, Homo sapien
tacagagcctggatttacgtcatac

SEQ ID NO: 3389791 - DNA, 25 bp, Homo sapien
tatcaggcctcacttcagacaaatg

SEQ ID NO: 3389792 - DNA, 25 bp, Homo sapien
gctctcttttttccgggatgcactg

SEQ ID NO: 3389793 - DNA, 25 bp, Homo sapien
tgctctcttttttccgggatgcact

SEQ ID NO: 3389794 - DNA, 25 bp, Homo sapien
ttgctctcttttttccgggatgcac

SEQ ID NO: 3389795 - DNA, 25 bp, Homo sapien
tttgctctcttttttccgggatgca

SEQ ID NO: 3389796 - DNA, 25 bp, Homo sapien
catctcgttgttatgtaagggctcc

SEQ ID NO: 3389797 - DNA, 25 bp, Homo sapien
taaagtaggctcattgtagagacaa

SEQ ID NO: 3389798 - DNA, 25 bp, Homo sapien
gcagcaagcaagtgacatatgatga

SEQ ID NO: 3389799 - DNA, 25 bp, Homo sapien
tgtgtaggagcacttaacgccaact

SEQ ID NO: 3389800 - DNA, 25 bp, Homo sapien
tatgccagagttatcatgtatgact

SEQ ID NO: 3389801 - DNA, 25 bp, Homo sapien
cataagaacaagtaacctggctcgc

SEQ ID NO: 3389802 - DNA, 25 bp, Homo sapien
gcacaactgtactatactgcatgta

SEQ ID NO: 3389803 - DNA, 25 bp, Homo sapien
aaatttgacagcaattctgatacct

SEQ ID NO: 3389804 - DNA, 25 bp, Homo sapien
tggcgaagatcctgggaaagtagta

SEQ ID NO: 3389805 - DNA, 25 bp, Homo sapien
gcaatgtggcgaagatcctgggaaa

SEQ ID NO: 3389806 - DNA, 25 bp, Homo sapien
gtaaattggcaatgtggcgaagatc

SEQ ID NO: 3389807 - DNA, 25 bp, Homo sapien
ggtaaggggaggacatcagcatccc

SEQ ID NO: 3389808 - DNA, 25 bp, Homo sapien
gagggctctccattgtctagtgttt

SEQ ID NO: 3389809 - DNA, 25 bp, Homo sapien
atgctaccgccttcttaaaaacctg

SEQ ID NO: 3389810 - DNA, 25 bp, Homo sapien
tctcagacattcttagctacagctc

SEQ ID NO: 3389811 - DNA, 25 bp, Homo sapien
cattcttagctacagctcacctgag

SEQ ID NO: 3389812 - DNA, 25 bp, Homo sapien
tgaaatgtgtcaggtgtcatcgccc

SEQ ID NO: 3389813 - DNA, 25 bp, Homo sapien
tctcaggatgacagtgacaaatctg

SEQ ID NO: 3389814 - DNA, 25 bp, Homo sapien
tgtccctgtctgtttgaaatcgtaa

SEQ ID NO: 3389815 - DNA, 25 bp, Homo sapien
tatttaattccccagcatagatctg

SEQ ID NO: 3389816 - DNA, 25 bp, Homo sapien
caggctggaatcacattatatggag

SEQ ID NO: 3389817 - DNA, 25 bp, Homo sapien
taagttgtagaaatgatcagtcagc

SEQ ID NO: 3389818 - DNA, 25 bp, Homo sapien
gggtctagtgctctggcttctatga

SEQ ID NO: 3389819 - DNA, 25 bp, Homo sapien
tatgtagtttagcaagacaggctgg

SEQ ID NO: 3389820 - DNA, 25 bp, Homo sapien
gaatatgtgagctctctgaagagag

SEQ ID NO: 3389821 - DNA, 25 bp, Homo sapien
ctgtatgtcccttttcagaatatgt

SEQ ID NO: 3389822 - DNA, 25 bp, Homo sapien
aagagagggatgatgtagtcttcat

SEQ ID NO: 3389823 - DNA, 25 bp, Homo sapien
gtatgtcccttttcagaatatgtga

SEQ ID NO: 3389824 - DNA, 25 bp, Homo sapien
ctggcgttctatgcagtgagcagca

SEQ ID NO: 3389825 - DNA, 25 bp, Homo sapien
tggctcaagtgtcgcatagaactaa

SEQ ID NO: 3389826 - DNA, 25 bp, Homo sapien
ccttagaacacatcttccagctgga

SEQ ID NO: 3389827 - DNA, 25 bp, Homo sapien
cccagtagtactgaaattggctcaa

SEQ ID NO: 3389828 - DNA, 25 bp, Homo sapien
tggcgtcagcttgagatctagactt

SEQ ID NO: 3389829 - DNA, 25 bp, Homo sapien
catacgggcactgtaatgttgggaa

SEQ ID NO: 3389830 - DNA, 25 bp, Homo sapien
tcaattcttcttacttggcgtcagc

SEQ ID NO: 3389831 - DNA, 25 bp, Homo sapien
tcctgcccaaaatgttatggataca

SEQ ID NO: 3389832 - DNA, 25 bp, Homo sapien
ccgagaattcttacagtaccttgaa

SEQ ID NO: 3389833 - DNA, 25 bp, Homo sapien
tctacttggtgcaaaatgtctgagt

SEQ ID NO: 3389834 - DNA, 25 bp, Homo sapien
gaatcaacccctggttctagtgaaa

SEQ ID NO: 3389835 - DNA, 25 bp, Homo sapien
tggtttgtatttcatgacccattgt

SEQ ID NO: 3389836 - DNA, 25 bp, Homo sapien
tagccttataactggcagagaccac

SEQ ID NO: 3389837 - DNA, 25 bp, Homo sapien
agagaccaccaagtagttatctgga

SEQ ID NO: 3389838 - DNA, 25 bp, Homo sapien
gggatgttttgccatccacacggga

SEQ ID NO: 3389839 - DNA, 25 bp, Homo sapien
tcccacacggaccatgacatgtttg

SEQ ID NO: 3389840 - DNA, 25 bp, Homo sapien
gatacaggccattatgagggtcccc

SEQ ID NO: 3389841 - DNA, 25 bp, Homo sapien
caaagtatcaacgtatgtcagctca

SEQ ID NO: 3389842 - DNA, 25 bp, Homo sapien
tactcatgagtgtaaagcaggcact

SEQ ID NO: 3389843 - DNA, 25 bp, Homo sapien
tatactggagaagtggatacaggcc

SEQ ID NO: 3389844 - DNA, 25 bp, Homo sapien
taactgttggagaaagttgccattt

SEQ ID NO: 3389845 - DNA, 25 bp, Homo sapien
gggagccctaatttgattcttctta

SEQ ID NO: 3389846 - DNA, 25 bp, Homo sapien
ttataataaaacctgaactctctgc

SEQ ID NO: 3389847 - DNA, 25 bp, Homo sapien
gaatgaggcattgatttagagacag

SEQ ID NO: 3389848 - DNA, 25 bp, Homo sapien
ttagaattattcactgcaccaaggt

SEQ ID NO: 3389849 - DNA, 25 bp, Homo sapien
tttttggagcaagaaaggtggattc

SEQ ID NO: 3389850 - DNA, 25 bp, Homo sapien
ccaaggtgactatctcatacaacat

SEQ ID NO: 3389851 - DNA, 25 bp, Homo sapien
tattcactgcaccaaggtgactatc

SEQ ID NO: 3389852 - DNA, 25 bp, Homo sapien
tcttctttagaggattcgtgctgtt

SEQ ID NO: 3389853 - DNA, 25 bp, Homo sapien
gagctagagcatatcatccttgaac

SEQ ID NO: 3389854 - DNA, 25 bp, Homo sapien
taagtgacttacttccagggaatca

SEQ ID NO: 3389855 - DNA, 25 bp, Homo sapien
tctaccagcaggtcatacccaaatg

SEQ ID NO: 3389856 - DNA, 25 bp, Homo sapien
tagtgataccatcagagggcagtga

SEQ ID NO: 3389857 - DNA, 25 bp, Homo sapien
agttaaatcgaccaagttcacttgc

SEQ ID NO: 3389858 - DNA, 25 bp, Homo sapien
cagatgtgaaactgcgaaggcaagt

SEQ ID NO: 3389859 - DNA, 25 bp, Homo sapien
gccacatgttgagccctaaattaaa

SEQ ID NO: 3389860 - DNA, 25 bp, Homo sapien
taccttccactgactttagctgcgc

SEQ ID NO: 3389861 - DNA, 25 bp, Homo sapien
caaaaagttgtcgaaaggcggctgt

SEQ ID NO: 3389862 - DNA, 25 bp, Homo sapien
taggccgtcgcctccgtgtagatct

SEQ ID NO: 3389863 - DNA, 25 bp, Homo sapien
tagctgcgccggatcttcatagggc

SEQ ID NO: 3389864 - DNA, 25 bp, Homo sapien
ggaagagctttggaaccgtagcgaa

SEQ ID NO: 3389865 - DNA, 25 bp, Homo sapien
tggaacctaggctttggccacaagc

SEQ ID NO: 3389866 - DNA, 25 bp, Homo sapien
gaaccgtagcgaagcttttccatcc

SEQ ID NO: 3389867 - DNA, 25 bp, Homo sapien
tgcattgctacccacagcaggtgtt

SEQ ID NO: 3389868 - DNA, 25 bp, Homo sapien
taatgccacatttatgacgctagat

SEQ ID NO: 3389869 - DNA, 25 bp, Homo sapien
tagtggaaatgtcaactaatgccac

SEQ ID NO: 3389870 - DNA, 25 bp, Homo sapien
tctctcggaaggataaatgacttct

SEQ ID NO: 3389871 - DNA, 25 bp, Homo sapien
cttctaaataccagaaactagtgga

SEQ ID NO: 3389872 - DNA, 25 bp, Homo sapien
caagtcctgagaacccgaggtggtt

SEQ ID NO: 3389873 - DNA, 25 bp, Homo sapien
agaacccgaggtggttcagcgcagc

SEQ ID NO: 3389874 - DNA, 25 bp, Homo sapien
agcaagtcctgagaacccgaggtgg

SEQ ID NO: 3389875 - DNA, 25 bp, Homo sapien
acccgaggtggttcagcgcagcttg

SEQ ID NO: 3389876 - DNA, 25 bp, Homo sapien
ccaaactcggtgaggcttcagtggg

SEQ ID NO: 3389877 - DNA, 25 bp, Homo sapien
ttattgtcgacaaaaagagtggaac

SEQ ID NO: 3389878 - DNA, 25 bp, Homo sapien
tttgggcgccatattattgtcgaca

SEQ ID NO: 3389879 - DNA, 25 bp, Homo sapien
tccttccggatccagagtcttctct

SEQ ID NO: 3389880 - DNA, 25 bp, Homo sapien
gttttggcagcagaacattagcagt

SEQ ID NO: 3389881 - DNA, 25 bp, Homo sapien
cagaacattagcagtgaaacaggtc

SEQ ID NO: 3389882 - DNA, 25 bp, Homo sapien
agggagattcatacctctggttttc

SEQ ID NO: 3389883 - DNA, 25 bp, Homo sapien
tgccaaacgagggagattcatacct

SEQ ID NO: 3389884 - DNA, 25 bp, Homo sapien
tagcttagaaggcaactaaacttgt

SEQ ID NO: 3389885 - DNA, 25 bp, Homo sapien
taacagttagccttatataccaaac

SEQ ID NO: 3389886 - DNA, 25 bp, Homo sapien
gaaagccggtccttacaatcttatg

SEQ ID NO: 3389887 - DNA, 25 bp, Homo sapien
tgatttggagggtttgaccttaagc

SEQ ID NO: 3389888 - DNA, 25 bp, Homo sapien
cttgtattacccatcttgtcttgca

SEQ ID NO: 3389889 - DNA, 25 bp, Homo sapien
taattattgtaagttccaagtctga

SEQ ID NO: 3389890 - DNA, 25 bp, Homo sapien
tttccattttgccttgtattaccca

SEQ ID NO: 3389891 - DNA, 25 bp, Homo sapien
cagtgtattaatgagcccatcaatg

SEQ ID NO: 3389892 - DNA, 25 bp, Homo sapien
cagggactagtagccaaattgtgtc

SEQ ID NO: 3389893 - DNA, 25 bp, Homo sapien
ttaagaccacctacataatttgcag

SEQ ID NO: 3389894 - DNA, 25 bp, Homo sapien
tacaatgtgccaggtgataaagaga

SEQ ID NO: 3389895 - DNA, 25 bp, Homo sapien
tgtgctacagagcatgcttctcagt

SEQ ID NO: 3389896 - DNA, 25 bp, Homo sapien
tatgaaagcttaaagttatgaagct

SEQ ID NO: 3389897 - DNA, 25 bp, Homo sapien
tgtcagaaagtgtgtctgcagtttc

SEQ ID NO: 3389898 - DNA, 25 bp, Homo sapien
ttcctgatttgaacatgtcagaaag

SEQ ID NO: 3389899 - DNA, 25 bp, Homo sapien
cattaaaattgaacagtattttaga

SEQ ID NO: 3389900 - DNA, 25 bp, Homo sapien
ggttacgattagttaggattgtgct

SEQ ID NO: 3389901 - DNA, 25 bp, Homo sapien
tcaaggttacgattagttaggattg

SEQ ID NO: 3389902 - DNA, 25 bp, Homo sapien
aggttacgattagttaggattgtgc

SEQ ID NO: 3389903 - DNA, 25 bp, Homo sapien
ttacgattagttaggattgtgctac

SEQ ID NO: 3389904 - DNA, 25 bp, Homo sapien
tagttacttagctagcagaagagcc

SEQ ID NO: 3389905 - DNA, 25 bp, Homo sapien
cagccacaggatgagttcgaataga

SEQ ID NO: 3389906 - DNA, 25 bp, Homo sapien
gctcagcagccatatacgaaagatg

SEQ ID NO: 3389907 - DNA, 25 bp, Homo sapien
tagcagaatagcattccagccaggg

SEQ ID NO: 3389908 - DNA, 25 bp, Homo sapien
gttcagcatatgctccaacacctca

SEQ ID NO: 3389909 - DNA, 25 bp, Homo sapien
agcaatccttcagttaggggttcct

SEQ ID NO: 3389910 - DNA, 25 bp, Homo sapien
ttgttcagcatatgctccaacacct

SEQ ID NO: 3389911 - DNA, 25 bp, Homo sapien
caatccttcagttaggggttcctga

SEQ ID NO: 3389912 - DNA, 25 bp, Homo sapien
tgaagatgagcaatccagcaagagt

SEQ ID NO: 3389913 - DNA, 25 bp, Homo sapien
tctccaaagggcagacgtctttgtt

SEQ ID NO: 3389914 - DNA, 25 bp, Homo sapien
tcacaggtggttgttgactcatgcc

SEQ ID NO: 3389915 - DNA, 25 bp, Homo sapien
gttcatcttcttaactgaaaaatcc

SEQ ID NO: 3389916 - DNA, 25 bp, Homo sapien
tttaacttattggactctattttga

SEQ ID NO: 3389917 - DNA, 25 bp, Homo sapien
tctattttgaaatacccaccgagca

SEQ ID NO: 3389918 - DNA, 25 bp, Homo sapien
gaaatacccaccgagcatccatgtg

SEQ ID NO: 3389919 - DNA, 25 bp, Homo sapien
ccatgtgcaggtagtaagacagtga

SEQ ID NO: 3389920 - DNA, 25 bp, Homo sapien
cttcttccgtggtgctggctcctgt

SEQ ID NO: 3389921 - DNA, 25 bp, Homo sapien
gctccataaactttcactttctctt

SEQ ID NO: 3389922 - DNA, 25 bp, Homo sapien
gccagtccttcttccgtggtgctgg

SEQ ID NO: 3389923 - DNA, 25 bp, Homo sapien
cctgtgtgcacaagctccataaact

SEQ ID NO: 3389924 - DNA, 25 bp, Homo sapien
gtggatgctgtgagtcacggctgaa

SEQ ID NO: 3389925 - DNA, 25 bp, Homo sapien
gaaaggtggatgctgtgagtcacgg

SEQ ID NO: 3389926 - DNA, 25 bp, Homo sapien
gagtcacggctgaaagcacctgcag

SEQ ID NO: 3389927 - DNA, 25 bp, Homo sapien
aaggtggatgctgtgagtcacggct

SEQ ID NO: 3389928 - DNA, 25 bp, Homo sapien
ctttctatagcattgattacagtca

SEQ ID NO: 3389929 - DNA, 25 bp, Homo sapien
tgatatcttactctggattcctact

SEQ ID NO: 3389930 - DNA, 25 bp, Homo sapien
ggatctagactttattaaagttcca

SEQ ID NO: 3389931 - DNA, 25 bp, Homo sapien
cataaattctatttgtggatctaga

SEQ ID NO: 3389932 - DNA, 25 bp, Homo sapien
taggattggaacagggtctccctgc

SEQ ID NO: 3389933 - DNA, 25 bp, Homo sapien
cctctacttagatttcagagaatat

SEQ ID NO: 3389934 - DNA, 25 bp, Homo sapien
ctttgggccctttagaggatggctt

SEQ ID NO: 3389935 - DNA, 25 bp, Homo sapien
tgaagtttggaaacctctacttaga

SEQ ID NO: 3389936 - DNA, 25 bp, Homo sapien
actgctgtggagcacaacttcaaga

SEQ ID NO: 3389937 - DNA, 25 bp, Homo sapien
agcactgctgtggagcacaacttca

SEQ ID NO: 3389938 - DNA, 25 bp, Homo sapien
cactgctgtggagcacaacttcaag

SEQ ID NO: 3389939 - DNA, 25 bp, Homo sapien
gcactgctgtggagcacaacttcaa

SEQ ID NO: 3389940 - DNA, 25 bp, Homo sapien
ggttattaatcactgatcagttgaa

SEQ ID NO: 3389941 - DNA, 25 bp, Homo sapien
taaatatctatcattccccacagca

SEQ ID NO: 3389942 - DNA, 25 bp, Homo sapien
caatgtcttgaagcatttcacctgt

SEQ ID NO: 3389943 - DNA, 25 bp, Homo sapien
aattcagtttgatttggttattgta

SEQ ID NO: 3389944 - DNA, 25 bp, Homo sapien
aatgtccgctctttggacagattaa

SEQ ID NO: 3389945 - DNA, 25 bp, Homo sapien
tccaaatgtccgctctttggacaga

SEQ ID NO: 3389946 - DNA, 25 bp, Homo sapien
tctttggacagattaatttgtccca

SEQ ID NO: 3389947 - DNA, 25 bp, Homo sapien
caaatgtccgctctttggacagatt

SEQ ID NO: 3389948 - DNA, 25 bp, Homo sapien
tattaagaggtaacccagaggacca

SEQ ID NO: 3389949 - DNA, 25 bp, Homo sapien
tgtctactcctttgcgaacaagcag

SEQ ID NO: 3389950 - DNA, 25 bp, Homo sapien
tgaaaactaagacttctaggccagc

SEQ ID NO: 3389951 - DNA, 25 bp, Homo sapien
taggccagcagagtccaaaggtgtt

SEQ ID NO: 3389952 - DNA, 25 bp, Homo sapien
gccactggtcatatggtcatgcata

SEQ ID NO: 3389953 - DNA, 25 bp, Homo sapien
agtggcaggcaagcactaccgcttg

SEQ ID NO: 3389954 - DNA, 25 bp, Homo sapien
gtattacagtgctcatttctgccac

SEQ ID NO: 3389955 - DNA, 25 bp, Homo sapien
caggttgcatactccttgtgacact

SEQ ID NO: 3389956 - DNA, 25 bp, Homo sapien
atcttacaaattaaacgctatcata

SEQ ID NO: 3389957 - DNA, 25 bp, Homo sapien
gcctcttgagtgacttttattaccc

SEQ ID NO: 3389958 - DNA, 25 bp, Homo sapien
tctacctgagtcacattccttcttt

SEQ ID NO: 3389959 - DNA, 25 bp, Homo sapien
ttttattacccttctacctgagtca

SEQ ID NO: 3389960 - DNA, 25 bp, Homo sapien
gacaaagaggcccaccatggctgat

SEQ ID NO: 3389961 - DNA, 25 bp, Homo sapien
tcatggattccagggccttcgctat

SEQ ID NO: 3389962 - DNA, 25 bp, Homo sapien
gcaagtgtcagtatcagtcctccag

SEQ ID NO: 3389963 - DNA, 25 bp, Homo sapien
tgagaaaactgacaatcgatgctgt

SEQ ID NO: 3389964 - DNA, 25 bp, Homo sapien
acaaatctgtggaattagaagggac

SEQ ID NO: 3389965 - DNA, 25 bp, Homo sapien
gggctggtatgtgacaaaatctcaa

SEQ ID NO: 3389966 - DNA, 25 bp, Homo sapien
gagtcatgctctatctcactgagtc

SEQ ID NO: 3389967 - DNA, 25 bp, Homo sapien
tgaaaatgccagataataaggatgc

SEQ ID NO: 3389968 - DNA, 25 bp, Homo sapien
tatagatgtcagttccctcaaatgc

SEQ ID NO: 3389969 - DNA, 25 bp, Homo sapien
cactccctcaatagttgctggtgga

SEQ ID NO: 3389970 - DNA, 25 bp, Homo sapien
gaatgcagagccaacaactttaggg

SEQ ID NO: 3389971 - DNA, 25 bp, Homo sapien
taggacccctatccaatgaaacaga

SEQ ID NO: 3389972 - DNA, 25 bp, Homo sapien
ttcaatggccaacatcagaagctat

SEQ ID NO: 3389973 - DNA, 25 bp, Homo sapien
cccagccagcaaactgtatggtaag

SEQ ID NO: 3389974 - DNA, 25 bp, Homo sapien
aaaataatctagtcgttcaatggcc

SEQ ID NO: 3389975 - DNA, 25 bp, Homo sapien
tgatagtaattgcaacccagccagc

SEQ ID NO: 3389976 - DNA, 25 bp, Homo sapien
taggaaatgttaaagagcagagctc

SEQ ID NO: 3389977 - DNA, 25 bp, Homo sapien
tgtgggttccactaaccatagaaat

SEQ ID NO: 3389978 - DNA, 25 bp, Homo sapien
aagagctagtgcctttaattcatca

SEQ ID NO: 3389979 - DNA, 25 bp, Homo sapien
tttaatcagatacaggaccctgtgg

SEQ ID NO: 3389980 - DNA, 25 bp, Homo sapien
gaaagcaaagtaactattagcattg

SEQ ID NO: 3389981 - DNA, 25 bp, Homo sapien
tttgtttgcattataggctcaacac

SEQ ID NO: 3389982 - DNA, 25 bp, Homo sapien
aatacaactttgctccaattatttc

SEQ ID NO: 3389983 - DNA, 25 bp, Homo sapien
caagttgtatcttagtgtcatttca

SEQ ID NO: 3389984 - DNA, 25 bp, Homo sapien
tcacaaacactatctgtctatctga

SEQ ID NO: 3389985 - DNA, 25 bp, Homo sapien
tccctactagtaagcataatgatta

SEQ ID NO: 3389986 - DNA, 25 bp, Homo sapien
catgtagcagcatgttagtacttta

SEQ ID NO: 3389987 - DNA, 25 bp, Homo sapien
gattatagccattccattgattgtg

SEQ ID NO: 3389988 - DNA, 25 bp, Homo sapien
tcagataaattgctgcctgggcgca

SEQ ID NO: 3389989 - DNA, 25 bp, Homo sapien
tgtgctaagttttgcaaggtcgaaa

SEQ ID NO: 3389990 - DNA, 25 bp, Homo sapien
gatatgatgcataaaatgtgctaag

SEQ ID NO: 3389991 - DNA, 25 bp, Homo sapien
tgtgaagctagctctcttggagtgc

SEQ ID NO: 3389992 - DNA, 25 bp, Homo sapien
taaggaacgtgcatgtaccaagtat

SEQ ID NO: 3389993 - DNA, 25 bp, Homo sapien
ggcaagattttctgggattgcagta

SEQ ID NO: 3389994 - DNA, 25 bp, Homo sapien
aactattggctaggctcttcttatg

SEQ ID NO: 3389995 - DNA, 25 bp, Homo sapien
cttgaggtctcccatgaaatcgcag

SEQ ID NO: 3389996 - DNA, 25 bp, Homo sapien
ggaagcagcaaaaaggtatgccatc

SEQ ID NO: 3389997 - DNA, 25 bp, Homo sapien
tcttaatcatggacttcatagcctc

SEQ ID NO: 3389998 - DNA, 25 bp, Homo sapien
catcttctactatgtgagaacacag

SEQ ID NO: 3389999 - DNA, 25 bp, Homo sapien
gaaagcaaacgtgctggcttcttaa

SEQ ID NO: 3390000 - DNA, 25 bp, Homo sapien
aaatacaattagcattcccaaccag

SEQ ID NO: 3390001 - DNA, 25 bp, Homo sapien
attcccaaccagtggaaagactctt

SEQ ID NO: 3390002 - DNA, 25 bp, Homo sapien
tattctcacattgccatgctcatct

SEQ ID NO: 3390003 - DNA, 25 bp, Homo sapien
gactcttctaacagggatttcaggg

SEQ ID NO: 3390004 - DNA, 25 bp, Homo sapien
tttgagttgctgaaacattgagttg

SEQ ID NO: 3390005 - DNA, 25 bp, Homo sapien
ttttgagttgctgaaacattgagtt

SEQ ID NO: 3390006 - DNA, 25 bp, Homo sapien
attttgagttgctgaaacattgagt

SEQ ID NO: 3390007 - DNA, 25 bp, Homo sapien
gccttctgatatgagtacaaattct

SEQ ID NO: 3390008 - DNA, 25 bp, Homo sapien
ttgattgccttctgatatgagtaca

SEQ ID NO: 3390009 - DNA, 25 bp, Homo sapien
gattgccttctgatatgagtacaaa

SEQ ID NO: 3390010 - DNA, 25 bp, Homo sapien
gtgtatgttctttgattgccttctg

SEQ ID NO: 3390011 - DNA, 25 bp, Homo sapien
taatttgttatctgtcatggtattg

SEQ ID NO: 3390012 - DNA, 25 bp, Homo sapien
ctgataatttgttatctgtcatggt

SEQ ID NO: 3390013 - DNA, 25 bp, Homo sapien
gtattggcagtaagcatttcttctc

SEQ ID NO: 3390014 - DNA, 25 bp, Homo sapien
ctgtcatggtattggcagtaagcat

SEQ ID NO: 3390015 - DNA, 25 bp, Homo sapien
tcagtcccttctctgcatgctaaga

SEQ ID NO: 3390016 - DNA, 25 bp, Homo sapien
tgggcatattcattcagtcccttct

SEQ ID NO: 3390017 - DNA, 25 bp, Homo sapien
ccttctctgcatgctaagatacatg

SEQ ID NO: 3390018 - DNA, 25 bp, Homo sapien
gtgttacacatctttgggcatattc

SEQ ID NO: 3390019 - DNA, 25 bp, Homo sapien
tcttcatcttacttcttccatactt

SEQ ID NO: 3390020 - DNA, 25 bp, Homo sapien
ttcatcttacttcttccatacttct

SEQ ID NO: 3390021 - DNA, 25 bp, Homo sapien
cttcttcatcttacttcttccatac

SEQ ID NO: 3390022 - DNA, 25 bp, Homo sapien
cttacttcttccatacttcttcttc

SEQ ID NO: 3390023 - DNA, 25 bp, Homo sapien
tttgctcccatcattcagcgggtcc

SEQ ID NO: 3390024 - DNA, 25 bp, Homo sapien
catgtcaccatctgcagtttagcca

SEQ ID NO: 3390025 - DNA, 25 bp, Homo sapien
tgcagtttagccagctggccaggaa

SEQ ID NO: 3390026 - DNA, 25 bp, Homo sapien
tggccaggaacatgatacagctcct

SEQ ID NO: 3390027 - DNA, 25 bp, Homo sapien
cccctagaaggaagaagacctggtg

SEQ ID NO: 3390028 - DNA, 25 bp, Homo sapien
ctggcaaggaccaggaagagtttgt

SEQ ID NO: 3390029 - DNA, 25 bp, Homo sapien
agagtttgttcacttgctgccaaga

SEQ ID NO: 3390030 - DNA, 25 bp, Homo sapien
gaagagtttgttcacttgctgccaa

SEQ ID NO: 3390031 - DNA, 25 bp, Homo sapien
taaaagcagggttggtcacctttgc

SEQ ID NO: 3390032 - DNA, 25 bp, Homo sapien
gcttcacctggacttatgaatccaa

SEQ ID NO: 3390033 - DNA, 25 bp, Homo sapien
cacaaagtcaacaaaggtgttaaca

SEQ ID NO: 3390034 - DNA, 25 bp, Homo sapien
aacatactctgtggtgcttcacctg

SEQ ID NO: 3390035 - DNA, 25 bp, Homo sapien
tcgtcccaagtaagtgaatactctt

SEQ ID NO: 3390036 - DNA, 25 bp, Homo sapien
aattaccattgagatcgtcccaagt

SEQ ID NO: 3390037 - DNA, 25 bp, Homo sapien
cattgagatcgtcccaagtaagtga

SEQ ID NO: 3390038 - DNA, 25 bp, Homo sapien
taactaccaaatgcatcttcttcaa

SEQ ID NO: 3390039 - DNA, 25 bp, Homo sapien
tgtaaattctattctagggtgaaag

SEQ ID NO: 3390040 - DNA, 25 bp, Homo sapien
tgctactctctcctagcctctatgg

SEQ ID NO: 3390041 - DNA, 25 bp, Homo sapien
tagatcttataggagtgcttcattg

SEQ ID NO: 3390042 - DNA, 25 bp, Homo sapien
tgctcggtgttctataactatctta

SEQ ID NO: 3390043 - DNA, 25 bp, Homo sapien
ccaaagacatagacaggaccaccca

SEQ ID NO: 3390044 - DNA, 25 bp, Homo sapien
aagacatagacaggaccacccagct

SEQ ID NO: 3390045 - DNA, 25 bp, Homo sapien
gtgccaaagacatagacaggaccac

SEQ ID NO: 3390046 - DNA, 25 bp, Homo sapien
tgccaaagacatagacaggaccacc

SEQ ID NO: 3390047 - DNA, 25 bp, Homo sapien
tagatgatgctaagttgtagttcag

SEQ ID NO: 3390048 - DNA, 25 bp, Homo sapien
tgctaatcttaatagttagtgttac

SEQ ID NO: 3390049 - DNA, 25 bp, Homo sapien
ggcttctagtaaatccagtaactgc

SEQ ID NO: 3390050 - DNA, 25 bp, Homo sapien
gggcttcttgattatgctaatctta

SEQ ID NO: 3390051 - DNA, 25 bp, Homo sapien
gcaggctctgggatctgaggtcctg

SEQ ID NO: 3390052 - DNA, 25 bp, Homo sapien
ctctgggatctgaggtcctgcagct

SEQ ID NO: 3390053 - DNA, 25 bp, Homo sapien
aggaacctctggagccactttgctg

SEQ ID NO: 3390054 - DNA, 25 bp, Homo sapien
gctcctgtttgctgccatgaggaac

SEQ ID NO: 3390055 - DNA, 25 bp, Homo sapien
acttcttagccaggcccgggggcag

SEQ ID NO: 3390056 - DNA, 25 bp, Homo sapien
gcagcccaaggtgggcgtcgggcat

SEQ ID NO: 3390057 - DNA, 25 bp, Homo sapien
cagctggacttcttagccaggcccg

SEQ ID NO: 3390058 - DNA, 25 bp, Homo sapien
ggcagcccaaggtgggcgtcgggca

SEQ ID NO: 3390059 - DNA, 25 bp, Homo sapien
aggatttggccagggtaagcaagcc

SEQ ID NO: 3390060 - DNA, 25 bp, Homo sapien
cagtggtgtcttttcaaggagcgga

SEQ ID NO: 3390061 - DNA, 25 bp, Homo sapien
cccttggtcgagaagccgagaggca

SEQ ID NO: 3390062 - DNA, 25 bp, Homo sapien
ccgagaggcaacttgatggttttgt

SEQ ID NO: 3390063 - DNA, 25 bp, Homo sapien
agcaacagatttcttgtgctggctc

SEQ ID NO: 3390064 - DNA, 25 bp, Homo sapien
tcaagggcctgactgaggccactgt

SEQ ID NO: 3390065 - DNA, 25 bp, Homo sapien
actcacagcaacagatttcttgtgc

SEQ ID NO: 3390066 - DNA, 25 bp, Homo sapien
ctctaggcctgaggtgaggttcaag

SEQ ID NO: 3390067 - DNA, 25 bp, Homo sapien
tcacgcctatttgctgcaggtggga

SEQ ID NO: 3390068 - DNA, 25 bp, Homo sapien
acgcctatttgctgcaggtgggagc

SEQ ID NO: 3390069 - DNA, 25 bp, Homo sapien
cccggtcacgcctatttgctgcagg

SEQ ID NO: 3390070 - DNA, 25 bp, Homo sapien
tgggagcccgtgtggctcgagtggc

SEQ ID NO: 3390071 - DNA, 25 bp, Homo sapien
ccagagcgaaactgggtccgtctct

SEQ ID NO: 3390072 - DNA, 25 bp, Homo sapien
aggtctgccagagcgaaactgggtc

SEQ ID NO: 3390073 - DNA, 25 bp, Homo sapien
ttgggaggtctgccagagcgaaact

SEQ ID NO: 3390074 - DNA, 25 bp, Homo sapien
gccctggcgggttgggaggtctgcc

SEQ ID NO: 3390075 - DNA, 25 bp, Homo sapien
ccaagggtgagatgtgaaggtcaga

SEQ ID NO: 3390076 - DNA, 25 bp, Homo sapien
tgagatgtgaaggtcagaggggctg

SEQ ID NO: 3390077 - DNA, 25 bp, Homo sapien
ggtcagaggggctgcgggtttccag

SEQ ID NO: 3390078 - DNA, 25 bp, Homo sapien
gggctgcgggtttccagtgagctgc

SEQ ID NO: 3390079 - DNA, 25 bp, Homo sapien
aacatcttccgggcacgggaggagg

SEQ ID NO: 3390080 - DNA, 25 bp, Homo sapien
tgggaacatcttccgggcacgggag

SEQ ID NO: 3390081 - DNA, 25 bp, Homo sapien
ggaacatcttccgggcacgggagga

SEQ ID NO: 3390082 - DNA, 25 bp, Homo sapien
ctgggaacatcttccgggcacggga

SEQ ID NO: 3390083 - DNA, 25 bp, Homo sapien
ccgtatttgttcaggcttcagcttc

SEQ ID NO: 3390084 - DNA, 25 bp, Homo sapien
cgcttgatctccacccgtatttgtt

SEQ ID NO: 3390085 - DNA, 25 bp, Homo sapien
atctccacccgtatttgttcaggct

SEQ ID NO: 3390086 - DNA, 25 bp, Homo sapien
cccggcagcatctcccgcttgatct

SEQ ID NO: 3390087 - DNA, 25 bp, Homo sapien
gcgtgcgtgactacacaggcccttg

SEQ ID NO: 3390088 - DNA, 25 bp, Homo sapien
cagcaagtgggagcgtgcgtgacta

SEQ ID NO: 3390089 - DNA, 25 bp, Homo sapien
ccttgcggttctcaaagaacccgct

SEQ ID NO: 3390090 - DNA, 25 bp, Homo sapien
ggttctcaaagaacccgctgcagaa

SEQ ID NO: 3390091 - DNA, 25 bp, Homo sapien
gcagtgtcaatgggcgaaccatgga

SEQ ID NO: 3390092 - DNA, 25 bp, Homo sapien
agtgtcaatgggcgaaccatggacg

SEQ ID NO: 3390093 - DNA, 25 bp, Homo sapien
cagtgtcaatgggcgaaccatggac

SEQ ID NO: 3390094 - DNA, 25 bp, Homo sapien
ctggccggccagaagataccggcaa

SEQ ID NO: 3390095 - DNA, 25 bp, Homo sapien
agaagataccggcaacgggcccagg

SEQ ID NO: 3390096 - DNA, 25 bp, Homo sapien
ccggccagaagataccggcaacggg

SEQ ID NO: 3390097 - DNA, 25 bp, Homo sapien
ggccagaagataccggcaacgggcc

SEQ ID NO: 3390098 - DNA, 25 bp, Homo sapien
ctgagctcgcgaggaaacctgggcc

SEQ ID NO: 3390099 - DNA, 25 bp, Homo sapien
tgagctcgcgaggaaacctgggccg

SEQ ID NO: 3390100 - DNA, 25 bp, Homo sapien
agctcgcgaggaaacctgggccggc

SEQ ID NO: 3390101 - DNA, 25 bp, Homo sapien
gagctcgcgaggaaacctgggccgg

SEQ ID NO: 3390102 - DNA, 25 bp, Homo sapien
caggtagccagtgggtgagggcttg

SEQ ID NO: 3390103 - DNA, 25 bp, Homo sapien
cttggccccagtgatgggcttcagg

SEQ ID NO: 3390104 - DNA, 25 bp, Homo sapien
agggcttggccccagtgatgggctt

SEQ ID NO: 3390105 - DNA, 25 bp, Homo sapien
tgagcccaggtagccagtgggtgag

SEQ ID NO: 3390106 - DNA, 25 bp, Homo sapien
gcggttcagtctggatgtaggtctt

SEQ ID NO: 3390107 - DNA, 25 bp, Homo sapien
ctcggtggaggaatgggaggtcttc

SEQ ID NO: 3390108 - DNA, 25 bp, Homo sapien
tctttgccttgaagggcggttcagt

SEQ ID NO: 3390109 - DNA, 25 bp, Homo sapien
gaggtcttctcgtgaagggtctttg

SEQ ID NO: 3390110 - DNA, 25 bp, Homo sapien
aaagcccacacaactcgcagcaggt

SEQ ID NO: 3390111 - DNA, 25 bp, Homo sapien
gtcacgtcgaactgcctcaggtgtt

SEQ ID NO: 3390112 - DNA, 25 bp, Homo sapien
tcgctcagtgtctcgatgggcgaac

SEQ ID NO: 3390113 - DNA, 25 bp, Homo sapien
gctcagtgtctcgatgggcgaacca

SEQ ID NO: 3390114 - DNA, 25 bp, Homo sapien
cagtgtctcgatgggcgaaccactg

SEQ ID NO: 3390115 - DNA, 25 bp, Homo sapien
ctcagtgtctcgatgggcgaaccac

SEQ ID NO: 3390116 - DNA, 25 bp, Homo sapien
tgtagttgtggtaggtgcccacctt

SEQ ID NO: 3390117 - DNA, 25 bp, Homo sapien
gatgtagttgtggtaggtgcccacc

SEQ ID NO: 3390118 - DNA, 25 bp, Homo sapien
ctggatgtagttgtggtaggtgccc

SEQ ID NO: 3390119 - DNA, 25 bp, Homo sapien
ggatgtagttgtggtaggtgcccac

SEQ ID NO: 3390120 - DNA, 25 bp, Homo sapien
cagggacggccgcttgtcactgtca

SEQ ID NO: 3390121 - DNA, 25 bp, Homo sapien
catggatggcactggggaacttctt

SEQ ID NO: 3390122 - DNA, 25 bp, Homo sapien
ctgtcacggccatggatggcactgg

SEQ ID NO: 3390123 - DNA, 25 bp, Homo sapien
gcttgtcactgtcacggccatggat

SEQ ID NO: 3390124 - DNA, 25 bp, Homo sapien
gcctcaggccctgcccccagcgctg

SEQ ID NO: 3390125 - DNA, 25 bp, Homo sapien
ctcaggccctgcccccagcgctgcg

SEQ ID NO: 3390126 - DNA, 25 bp, Homo sapien
caggccctgcccccagcgctgcgtc

SEQ ID NO: 3390127 - DNA, 25 bp, Homo sapien
ctgccgcgccagcctcaggccctgc

SEQ ID NO: 3390128 - DNA, 25 bp, Homo sapien
gggctggctgccagaggcctcttac

SEQ ID NO: 3390129 - DNA, 25 bp, Homo sapien
gcctggcgggctggctgccagaggc

SEQ ID NO: 3390130 - DNA, 25 bp, Homo sapien
gctggctgccagaggcctcttacca

SEQ ID NO: 3390131 - DNA, 25 bp, Homo sapien
ggtgcctggcgggctggctgccaga

SEQ ID NO: 3390132 - DNA, 25 bp, Homo sapien
cttgtcggcgttcgaatttgttgat

SEQ ID NO: 3390133 - DNA, 25 bp, Homo sapien
cgttcgaatttgttgatgttctgcg

SEQ ID NO: 3390134 - DNA, 25 bp, Homo sapien
gaatttgttgatgttctgcggctgg

SEQ ID NO: 3390135 - DNA, 25 bp, Homo sapien
tgttgatgttctgcggctggtgctc

SEQ ID NO: 3390136 - DNA, 25 bp, Homo sapien
ttctgctgtaggtcattggtctcct

SEQ ID NO: 3390137 - DNA, 25 bp, Homo sapien
acctccccgggctgcggaggcatct

SEQ ID NO: 3390138 - DNA, 25 bp, Homo sapien
ctgtaggtcattggtctcctcacct

SEQ ID NO: 3390139 - DNA, 25 bp, Homo sapien
cagcttctgctgtaggtcattggtc

SEQ ID NO: 3390140 - DNA, 25 bp, Homo sapien
cggactcgggttggaggttgcctca

SEQ ID NO: 3390141 - DNA, 25 bp, Homo sapien
ggactcgggttggaggttgcctcac

SEQ ID NO: 3390142 - DNA, 25 bp, Homo sapien
tgcatttgaggacacgtgtagatgt

SEQ ID NO: 3390143 - DNA, 25 bp, Homo sapien
tttgaggacacgtgtagatgttgcc

SEQ ID NO: 3390144 - DNA, 25 bp, Homo sapien
gcatttgaggacacgtgtagatgtt

SEQ ID NO: 3390145 - DNA, 25 bp, Homo sapien
gggggccctggaattccacctcgca

SEQ ID NO: 3390146 - DNA, 25 bp, Homo sapien
gccctggaattccacctcgcagaac

SEQ ID NO: 3390147 - DNA, 25 bp, Homo sapien
gggccctggaattccacctcgcaga

SEQ ID NO: 3390148 - DNA, 25 bp, Homo sapien
tcttcctggatagagagggggccct

SEQ ID NO: 3390149 - DNA, 25 bp, Homo sapien
gagaagttcatctccaggatgtgcc

SEQ ID NO: 3390150 - DNA, 25 bp, Homo sapien
tgggggtccgctttggagaagttca

SEQ ID NO: 3390151 - DNA, 25 bp, Homo sapien
ttaggctgggggtccgctttggaga

SEQ ID NO: 3390152 - DNA, 25 bp, Homo sapien
agaagttcatctccaggatgtgccg

SEQ ID NO: 3390153 - DNA, 25 bp, Homo sapien
taggaagcctctgccgccactgtct

SEQ ID NO: 3390154 - DNA, 25 bp, Homo sapien
cactgtctgtgcctgcgggacctgg

SEQ ID NO: 3390155 - DNA, 25 bp, Homo sapien
agcctctgccgccactgtctgtgcc

SEQ ID NO: 3390156 - DNA, 25 bp, Homo sapien
tgccgccactgtctgtgcctgcggg

SEQ ID NO: 3390157 - DNA, 25 bp, Homo sapien
cttactcctatggaaatggaaagaa

SEQ ID NO: 3390158 - DNA, 25 bp, Homo sapien
tttggcttactcctatggaaatgga

SEQ ID NO: 3390159 - DNA, 25 bp, Homo sapien
tggcttactcctatggaaatggaaa

SEQ ID NO: 3390160 - DNA, 25 bp, Homo sapien
gaccagatcggctgccacccgagac

SEQ ID NO: 3390161 - DNA, 25 bp, Homo sapien
gtgtgttcgcatgtagacgcgtttg

SEQ ID NO: 3390162 - DNA, 25 bp, Homo sapien
tgttcgcatgtagacgcgtttgaga

SEQ ID NO: 3390163 - DNA, 25 bp, Homo sapien
tgtagacgcgtttgagaggatattc

SEQ ID NO: 3390164 - DNA, 25 bp, Homo sapien
gcatgtagacgcgtttgagaggata

SEQ ID NO: 3390165 - DNA, 25 bp, Homo sapien
gccagctgtcagctctaggctcttc

SEQ ID NO: 3390166 - DNA, 25 bp, Homo sapien
ccatacatagaaagcaacagtgaaa

SEQ ID NO: 3390167 - DNA, 25 bp, Homo sapien
gagccatacatagaaagcaacagtg

SEQ ID NO: 3390168 - DNA, 25 bp, Homo sapien
gtgaaaaatgtagggagccatacat

SEQ ID NO: 3390169 - DNA, 25 bp, Homo sapien
aaagtgaaaaatgtagggagccata

SEQ ID NO: 3390170 - DNA, 25 bp, Homo sapien
atggtccttcagaaatccatttcct

SEQ ID NO: 3390171 - DNA, 25 bp, Homo sapien
gacataatggtccttcagaaatcca

SEQ ID NO: 3390172 - DNA, 25 bp, Homo sapien
tactgacataatggtccttcagaaa

SEQ ID NO: 3390173 - DNA, 25 bp, Homo sapien
tttactgacataatggtccttcaga

SEQ ID NO: 3390174 - DNA, 25 bp, Homo sapien
gccttgccagatcccctttattatc

SEQ ID NO: 3390175 - DNA, 25 bp, Homo sapien
tagccttgccagatcccctttatta

SEQ ID NO: 3390176 - DNA, 25 bp, Homo sapien
agccttgccagatcccctttattat

SEQ ID NO: 3390177 - DNA, 25 bp, Homo sapien
aatcctgatctccaaaaggaaacta

SEQ ID NO: 3390178 - DNA, 25 bp, Homo sapien
aaggaaactactttcatcaataatt

SEQ ID NO: 3390179 - DNA, 25 bp, Homo sapien
tggaggcccagtgggggattttgtg

SEQ ID NO: 3390180 - DNA, 25 bp, Homo sapien
ccagtgggggattttgtgctttttg

SEQ ID NO: 3390181 - DNA, 25 bp, Homo sapien
tgaccttcgataatcccatttttaa

SEQ ID NO: 3390182 - DNA, 25 bp, Homo sapien
ctgaccttcgataatcccattttta

SEQ ID NO: 3390183 - DNA, 25 bp, Homo sapien
cagctgtcaattggtagaactcttt

SEQ ID NO: 3390184 - DNA, 25 bp, Homo sapien
ctgtcaattggtagaactcttttca

SEQ ID NO: 3390185 - DNA, 25 bp, Homo sapien
gctgtcaattggtagaactcttttc

SEQ ID NO: 3390186 - DNA, 25 bp, Homo sapien
tcagctgtcaattggtagaactctt

SEQ ID NO: 3390187 - DNA, 25 bp, Homo sapien
cctgtgtaatccaacgggagcaacg

SEQ ID NO: 3390188 - DNA, 25 bp, Homo sapien
caacgggagtatgctgggagaagac

SEQ ID NO: 3390189 - DNA, 25 bp, Homo sapien
tctgttccaggaaacacattcgtag

SEQ ID NO: 3390190 - DNA, 25 bp, Homo sapien
gagaagacctttgtgtgattgtcac

SEQ ID NO: 3390191 - DNA, 25 bp, Homo sapien
tgctggatcttttggtaagaccatg

SEQ ID NO: 3390192 - DNA, 25 bp, Homo sapien
tttttgttgctccacatccctgcta

SEQ ID NO: 3390193 - DNA, 25 bp, Homo sapien
catttagtgttgtcagtgtcctgaa

SEQ ID NO: 3390194 - DNA, 25 bp, Homo sapien
ccaaagtagctgtacaatgtgcatt

SEQ ID NO: 3390195 - DNA, 25 bp, Homo sapien
tctggcccgatactgcaggaacttg

SEQ ID NO: 3390196 - DNA, 25 bp, Homo sapien
gcccgatactgcaggaacttgaaga

SEQ ID NO: 3390197 - DNA, 25 bp, Homo sapien
acatgctcctccgcttgcagttggg

SEQ ID NO: 3390198 - DNA, 25 bp, Homo sapien
tctgggctctggcccgatactgcag

SEQ ID NO: 3390199 - DNA, 25 bp, Homo sapien
caggcactctagcattgcttgaaag

SEQ ID NO: 3390200 - DNA, 25 bp, Homo sapien
ggacctccgcaccagaatttatcag

SEQ ID NO: 3390201 - DNA, 25 bp, Homo sapien
catgtccattcagcgacacattttg

SEQ ID NO: 3390202 - DNA, 25 bp, Homo sapien
tatcttgagtaaagagacctcctgt

SEQ ID NO: 3390203 - DNA, 25 bp, Homo sapien
tgatagaaaagaagtgtgagtctct

SEQ ID NO: 3390204 - DNA, 25 bp, Homo sapien
acattgtcagtgatgatagaaaaga

SEQ ID NO: 3390205 - DNA, 25 bp, Homo sapien
tacattgtcagtgatgatagaaaag

SEQ ID NO: 3390206 - DNA, 25 bp, Homo sapien
tagaaaagaagtgtgagtctctcac

SEQ ID NO: 3390207 - DNA, 25 bp, Homo sapien
cataagccaggaagtctacaagttc

SEQ ID NO: 3390208 - DNA, 25 bp, Homo sapien
tcttcattgttctgaaaaagaatag

SEQ ID NO: 3390209 - DNA, 25 bp, Homo sapien
cattgtaaagttctacaagcagttg

SEQ ID NO: 3390210 - DNA, 25 bp, Homo sapien
ttacattgtaaagttctacaagcag

SEQ ID NO: 3390211 - DNA, 25 bp, Homo sapien
aaagaatagaaattacattgtaaag

SEQ ID NO: 3390212 - DNA, 25 bp, Homo sapien
caaagaagacatcagaggtttgccc

SEQ ID NO: 3390213 - DNA, 25 bp, Homo sapien
gcaaagaagacatcagaggtttgcc

SEQ ID NO: 3390214 - DNA, 25 bp, Homo sapien
ctgcaaagaagacatcagaggtttg

SEQ ID NO: 3390215 - DNA, 25 bp, Homo sapien
tgcaaagaagacatcagaggtttgc

SEQ ID NO: 3390216 - DNA, 25 bp, Homo sapien
caaaactcctcataaactttaatgt

SEQ ID NO: 3390217 - DNA, 25 bp, Homo sapien
ttggctaccaaattcatggcttcct

SEQ ID NO: 3390218 - DNA, 25 bp, Homo sapien
cagggagattcatctgcatatcaag

SEQ ID NO: 3390219 - DNA, 25 bp, Homo sapien
ctcaaaccaaaactcctcataaact

SEQ ID NO: 3390220 - DNA, 25 bp, Homo sapien
tatgttatgcaaagcatggttactc

SEQ ID NO: 3390221 - DNA, 25 bp, Homo sapien
gaggacttcataaatggtgaatgga

SEQ ID NO: 3390222 - DNA, 25 bp, Homo sapien
cacaggtcatacagcaatgcataca

SEQ ID NO: 3390223 - DNA, 25 bp, Homo sapien
acttctgtacatgttggcatggtgt

SEQ ID NO: 3390224 - DNA, 25 bp, Homo sapien
gagtgccactagaagagatcacaca

SEQ ID NO: 3390225 - DNA, 25 bp, Homo sapien
agagtgccactagaagagatcacac

SEQ ID NO: 3390226 - DNA, 25 bp, Homo sapien
aattccagagtgccactagaagaga

SEQ ID NO: 3390227 - DNA, 25 bp, Homo sapien
ttccagagtgccactagaagagatc

SEQ ID NO: 3390228 - DNA, 25 bp, Homo sapien
tcaaatttgtgtttggtggattcct

SEQ ID NO: 3390229 - DNA, 25 bp, Homo sapien
ttggtggattcctgtttcccccaca

SEQ ID NO: 3390230 - DNA, 25 bp, Homo sapien
tgtgtttggtggattcctgtttccc

SEQ ID NO: 3390231 - DNA, 25 bp, Homo sapien
atttgtgtttggtggattcctgttt

SEQ ID NO: 3390232 - DNA, 25 bp, Homo sapien
tatacatgctacttcttcttaatcc

SEQ ID NO: 3390233 - DNA, 25 bp, Homo sapien
gcaaaatattataccatgttgtata

SEQ ID NO: 3390234 - DNA, 25 bp, Homo sapien
gctgcaacaaacataccatgtgcat

SEQ ID NO: 3390235 - DNA, 25 bp, Homo sapien
ttcttaatccagtccaatactgatg

SEQ ID NO: 3390236 - DNA, 25 bp, Homo sapien
caatgggggccaatacacttcagct

SEQ ID NO: 3390237 - DNA, 25 bp, Homo sapien
ccaaggactgctgccctgcgagttt

SEQ ID NO: 3390238 - DNA, 25 bp, Homo sapien
tgcttgcagctctcacttaagttag

SEQ ID NO: 3390239 - DNA, 25 bp, Homo sapien
agtttggttgtactgcaggccacca

SEQ ID NO: 3390240 - DNA, 25 bp, Homo sapien
aaaaagtaagtcagcactgaactca

SEQ ID NO: 3390241 - DNA, 25 bp, Homo sapien
tacaaaacgaggactattattgtaa

SEQ ID NO: 3390242 - DNA, 25 bp, Homo sapien
tctaccagatttgtgaagtcctgta

SEQ ID NO: 3390243 - DNA, 25 bp, Homo sapien
tattagataaatttctaccagattt

SEQ ID NO: 3390244 - DNA, 25 bp, Homo sapien
gttctaccagggtgttcctggctct

SEQ ID NO: 3390245 - DNA, 25 bp, Homo sapien
tgctggggtagttctaccagggtgt

SEQ ID NO: 3390246 - DNA, 25 bp, Homo sapien
ctgctggggtagttctaccagggtg

SEQ ID NO: 3390247 - DNA, 25 bp, Homo sapien
gtagttctaccagggtgttcctggc

SEQ ID NO: 3390248 - DNA, 25 bp, Homo sapien
catttaacatccagacggacatggc

SEQ ID NO: 3390249 - DNA, 25 bp, Homo sapien
ccttggggcatttaacatccagacg

SEQ ID NO: 3390250 - DNA, 25 bp, Homo sapien
ggcatttaacatccagacggacatg

SEQ ID NO: 3390251 - DNA, 25 bp, Homo sapien
ggggcatttaacatccagacggaca

SEQ ID NO: 3390252 - DNA, 25 bp, Homo sapien
caggatgttggcccatcggatggca

SEQ ID NO: 3390253 - DNA, 25 bp, Homo sapien
tgggcaaagtggctgagacaatgcc

SEQ ID NO: 3390254 - DNA, 25 bp, Homo sapien
gagagtgtgggttttgccaatcctg

SEQ ID NO: 3390255 - DNA, 25 bp, Homo sapien
ttggcccatcggatggcagtggcaa

SEQ ID NO: 3390256 - DNA, 25 bp, Homo sapien
cttctcagaaatagcacctcttgca

SEQ ID NO: 3390257 - DNA, 25 bp, Homo sapien
cagaaatagcacctcttgcatgcat

SEQ ID NO: 3390258 - DNA, 25 bp, Homo sapien
gtcttctcagaaatagcacctcttg

SEQ ID NO: 3390259 - DNA, 25 bp, Homo sapien
tctcagaaatagcacctcttgcatg

SEQ ID NO: 3390260 - DNA, 25 bp, Homo sapien
gcaaatcgtattatccaggttacac

SEQ ID NO: 3390261 - DNA, 25 bp, Homo sapien
tgtcatacaaagtgagtccagcaaa

SEQ ID NO: 3390262 - DNA, 25 bp, Homo sapien
caaagtgagtccagcaaatcgtatt

SEQ ID NO: 3390263 - DNA, 25 bp, Homo sapien
tccaggttacaccaaaatctctaag

SEQ ID NO: 3390264 - DNA, 25 bp, Homo sapien
aatagacggcaacatgaactttagg

SEQ ID NO: 3390265 - DNA, 25 bp, Homo sapien
aggctgagaataatagacggcaaca

SEQ ID NO: 3390266 - DNA, 25 bp, Homo sapien
taaccagtagttgcaaataagaaca

SEQ ID NO: 3390267 - DNA, 25 bp, Homo sapien
ttgaagaccataaccagtagttgca

SEQ ID NO: 3390268 - DNA, 25 bp, Homo sapien
tcagaccgggtaaggatcacagctt

SEQ ID NO: 3390269 - DNA, 25 bp, Homo sapien
ccagtagtcagaccgggtaaggatc

SEQ ID NO: 3390270 - DNA, 25 bp, Homo sapien
tctagttcaaaatgccagtagtcag

SEQ ID NO: 3390271 - DNA, 25 bp, Homo sapien
tcaggtactttctagttcaaaatgc

SEQ ID NO: 3390272 - DNA, 25 bp, Homo sapien
taaaaccaagtactgagagtgctca

SEQ ID NO: 3390273 - DNA, 25 bp, Homo sapien
tccttgcagaagagactatcagtgg

SEQ ID NO: 3390274 - DNA, 25 bp, Homo sapien
ggtacagagcgccaatttaaatcat

SEQ ID NO: 3390275 - DNA, 25 bp, Homo sapien
cactactgggtatgcctgattttgt

SEQ ID NO: 3390276 - DNA, 25 bp, Homo sapien
aaatgtcaagttggaaatcctcagc

SEQ ID NO: 3390277 - DNA, 25 bp, Homo sapien
taagatgtagaaaagtaagcccagg

SEQ ID NO: 3390278 - DNA, 25 bp, Homo sapien
cattcgactgtagttggacacttga

SEQ ID NO: 3390279 - DNA, 25 bp, Homo sapien
gacacttgaagtgagtccaaacaaa

SEQ ID NO: 3390280 - DNA, 25 bp, Homo sapien
tgaccatcacctgggtccttacctc

SEQ ID NO: 3390281 - DNA, 25 bp, Homo sapien
aaatctgaccatcacctgggtcctt

SEQ ID NO: 3390282 - DNA, 25 bp, Homo sapien
atctgaccatcacctgggtccttac

SEQ ID NO: 3390283 - DNA, 25 bp, Homo sapien
cagaaatctgaccatcacctgggtc

SEQ ID NO: 3390284 - DNA, 25 bp, Homo sapien
gagatttacatctacctttggctca

SEQ ID NO: 3390285 - DNA, 25 bp, Homo sapien
taagtgagatttacatctacctttg

SEQ ID NO: 3390286 - DNA, 25 bp, Homo sapien
tttacatctacctttggctcatctg

SEQ ID NO: 3390287 - DNA, 25 bp, Homo sapien
atctacctttggctcatctgtctcc

SEQ ID NO: 3390288 - DNA, 25 bp, Homo sapien
tgaagcctcgccaagaaaggagctg

SEQ ID NO: 3390289 - DNA, 25 bp, Homo sapien
tctccgaaggtggacagactgaggc

SEQ ID NO: 3390290 - DNA, 25 bp, Homo sapien
gccagagaccgggttgtcactcgcg

SEQ ID NO: 3390291 - DNA, 25 bp, Homo sapien
agactgaggccgactaagggactga

SEQ ID NO: 3390292 - DNA, 25 bp, Homo sapien
tcacttctcggtgtctacctgtctc

SEQ ID NO: 3390293 - DNA, 25 bp, Homo sapien
tctgtcacttctcggtgtctacctg

SEQ ID NO: 3390294 - DNA, 25 bp, Homo sapien
gccctcgtttcctcgctgcctctct

SEQ ID NO: 3390295 - DNA, 25 bp, Homo sapien
tgggttctgtcacttctcggtgtct

SEQ ID NO: 3390296 - DNA, 25 bp, Homo sapien
caggtagggcactgggctgaatttc

SEQ ID NO: 3390297 - DNA, 25 bp, Homo sapien
tgctgaggaccagcgcgggcaggag

SEQ ID NO: 3390298 - DNA, 25 bp, Homo sapien
ctggtgctgaggaccagcgcgggca

SEQ ID NO: 3390299 - DNA, 25 bp, Homo sapien
cagcaggtagggcactgggctgaat

SEQ ID NO: 3390300 - DNA, 25 bp, Homo sapien
ttcagagttcactgagtgcctttga

SEQ ID NO: 3390301 - DNA, 25 bp, Homo sapien
tcactgagtgcctttgacccctggt

SEQ ID NO: 3390302 - DNA, 25 bp, Homo sapien
gacccctggtggttcgcagtaggac

SEQ ID NO: 3390303 - DNA, 25 bp, Homo sapien
cctggtggttcgcagtaggacccac

SEQ ID NO: 3390304 - DNA, 25 bp, Homo sapien
tttcctccaaaaggcctttgctgct

SEQ ID NO: 3390305 - DNA, 25 bp, Homo sapien
acaggaagcagtcctgagatttcct

SEQ ID NO: 3390306 - DNA, 25 bp, Homo sapien
ttgctgctgtagtgtgttagagtcc

SEQ ID NO: 3390307 - DNA, 25 bp, Homo sapien
tgttagagtcctaatcatagaaact

SEQ ID NO: 3390308 - DNA, 25 bp, Homo sapien
tgctgcagaccggagccgttcctat

SEQ ID NO: 3390309 - DNA, 25 bp, Homo sapien
gccttctgcgttggtcttgctgggt

SEQ ID NO: 3390310 - DNA, 25 bp, Homo sapien
ttctgcgttggtcttgctgggtgct

SEQ ID NO: 3390311 - DNA, 25 bp, Homo sapien
ttgctgggtgctgcagaccggagcc

SEQ ID NO: 3390312 - DNA, 25 bp, Homo sapien
cttttcttctggttgatcaattcgg

SEQ ID NO: 3390313 - DNA, 25 bp, Homo sapien
tggaggagttcgttattagccacct

SEQ ID NO: 3390314 - DNA, 25 bp, Homo sapien
agcttggaggagttcgttattagcc

SEQ ID NO: 3390315 - DNA, 25 bp, Homo sapien
gcttcaccaagttcccatgctgtat

SEQ ID NO: 3390316 - DNA, 25 bp, Homo sapien
ttcgttttgccggaaagggagcaca

SEQ ID NO: 3390317 - DNA, 25 bp, Homo sapien
gcaataccactctgcaacaaaaagt

SEQ ID NO: 3390318 - DNA, 25 bp, Homo sapien
agggagcacatgagtaatttctggg

SEQ ID NO: 3390319 - DNA, 25 bp, Homo sapien
ggttttgtcatacaatgcaatacca

SEQ ID NO: 3390320 - DNA, 25 bp, Homo sapien
ctttttcttgttgtgattctgggtc

SEQ ID NO: 3390321 - DNA, 25 bp, Homo sapien
tttttcttgttgtgattctgggtcc

SEQ ID NO: 3390322 - DNA, 25 bp, Homo sapien
tcttttaacatagaagtgaaaggaa

SEQ ID NO: 3390323 - DNA, 25 bp, Homo sapien
aaaggaatgctatagaggaatgaag

SEQ ID NO: 3390324 - DNA, 25 bp, Homo sapien
ctcttttaacatagaagtgaaagga

SEQ ID NO: 3390325 - DNA, 25 bp, Homo sapien
tgggcagacattggctctcctcctt

SEQ ID NO: 3390326 - DNA, 25 bp, Homo sapien
gctccagcagaatgaccaatgttgg

SEQ ID NO: 3390327 - DNA, 25 bp, Homo sapien
tggatctactaaacaggagctgggc

SEQ ID NO: 3390328 - DNA, 25 bp, Homo sapien
gaattcgcagaagaccaagttgctg

SEQ ID NO: 3390329 - DNA, 25 bp, Homo sapien
tgggctggacgtccttgaagtaatc

SEQ ID NO: 3390330 - DNA, 25 bp, Homo sapien
gcagccaatcctgggtagccctgaa

SEQ ID NO: 3390331 - DNA, 25 bp, Homo sapien
tctggttaaagtctagcccacagtt

SEQ ID NO: 3390332 - DNA, 25 bp, Homo sapien
tcccattgtgttgtcctccctagaa

SEQ ID NO: 3390333 - DNA, 25 bp, Homo sapien
gagtcatctcatgagtaaagaggac

SEQ ID NO: 3390334 - DNA, 25 bp, Homo sapien
aaagctttcctcctgagtgagtcat

SEQ ID NO: 3390335 - DNA, 25 bp, Homo sapien
gctttcctcctgagtgagtcatctc

SEQ ID NO: 3390336 - DNA, 25 bp, Homo sapien
tcatctcatgagtaaagaggactga

SEQ ID NO: 3390337 - DNA, 25 bp, Homo sapien
cagtatatgatctcttgtgtgtgac

SEQ ID NO: 3390338 - DNA, 25 bp, Homo sapien
ttctggctaaaagcgtgcccacaat

SEQ ID NO: 3390339 - DNA, 25 bp, Homo sapien
tgacaagagctgatttatagctaaa

SEQ ID NO: 3390340 - DNA, 25 bp, Homo sapien
tgcccacaatctgggcagagataag

SEQ ID NO: 3390341 - DNA, 25 bp, Homo sapien
cctcttgtgtgtgataaggttggat

SEQ ID NO: 3390342 - DNA, 25 bp, Homo sapien
tgataaggttggatttatccctaaa

SEQ ID NO: 3390343 - DNA, 25 bp, Homo sapien
tgtgtgataaggttggatttatccc

SEQ ID NO: 3390344 - DNA, 25 bp, Homo sapien
gagtcctcttgtgtgtgataaggtt

SEQ ID NO: 3390345 - DNA, 25 bp, Homo sapien
tctctggtgtttactgacagccgat

SEQ ID NO: 3390346 - DNA, 25 bp, Homo sapien
acacatatacgggttctctcctgag

SEQ ID NO: 3390347 - DNA, 25 bp, Homo sapien
tttctgactaaagctctggccacat

SEQ ID NO: 3390348 - DNA, 25 bp, Homo sapien
tttgacttatcgctaaaccctcgcc

SEQ ID NO: 3390349 - DNA, 25 bp, Homo sapien
gagtgagctatcttgcctaaataga

SEQ ID NO: 3390350 - DNA, 25 bp, Homo sapien
cctttgagtgagctatcttgcctaa

SEQ ID NO: 3390351 - DNA, 25 bp, Homo sapien
tccacacgctctgcacacaaagggc

SEQ ID NO: 3390352 - DNA, 25 bp, Homo sapien
cttctcctttgagtgagctatcttg

SEQ ID NO: 3390353 - DNA, 25 bp, Homo sapien
cctgaatgtgtcctctgatgtctta

SEQ ID NO: 3390354 - DNA, 25 bp, Homo sapien
tcccctgaatgtgtcctctgatgtc

SEQ ID NO: 3390355 - DNA, 25 bp, Homo sapien
tcctctgatgtcttatgagggctga

SEQ ID NO: 3390356 - DNA, 25 bp, Homo sapien
tgtcctctgatgtcttatgagggct

SEQ ID NO: 3390357 - DNA, 25 bp, Homo sapien
gatgcatgatgagggttgccttaac

SEQ ID NO: 3390358 - DNA, 25 bp, Homo sapien
catgatgagggttgccttaacacta

SEQ ID NO: 3390359 - DNA, 25 bp, Homo sapien
gatgagggttgccttaacactaaac

SEQ ID NO: 3390360 - DNA, 25 bp, Homo sapien
tctctgatgcatgatgagggttgcc

SEQ ID NO: 3390361 - DNA, 25 bp, Homo sapien
cataaggtgtgacttcaatgtaaaa

SEQ ID NO: 3390362 - DNA, 25 bp, Homo sapien
atctctctttcttcctttctctttt

SEQ ID NO: 3390363 - DNA, 25 bp, Homo sapien
ttcttcctttctctttttctctctc

SEQ ID NO: 3390364 - DNA, 25 bp, Homo sapien
cagtgatttatatttgttccctttg

SEQ ID NO: 3390365 - DNA, 25 bp, Homo sapien
gttccctttgtgttatctctctttc

SEQ ID NO: 3390366 - DNA, 25 bp, Homo sapien
aataatctattgaaatgcttctctg

SEQ ID NO: 3390367 - DNA, 25 bp, Homo sapien
tgtctagaatggtagcttgctttaa

SEQ ID NO: 3390368 - DNA, 25 bp, Homo sapien
cagcttgcatcttaaggttgacaga

SEQ ID NO: 3390369 - DNA, 25 bp, Homo sapien
tgtgtcctttcaactattatatagc

SEQ ID NO: 3390370 - DNA, 25 bp, Homo sapien
catgtccacgttaaccttctatcat

SEQ ID NO: 3390371 - DNA, 25 bp, Homo sapien
gggccatgtccacgttaaccttcta

SEQ ID NO: 3390372 - DNA, 25 bp, Homo sapien
gccatgtccacgttaaccttctatc

SEQ ID NO: 3390373 - DNA, 25 bp, Homo sapien
taaccttctatcataccaattttag

SEQ ID NO: 3390374 - DNA, 25 bp, Homo sapien
cctcccggcattatgtaagtataag

SEQ ID NO: 3390375 - DNA, 25 bp, Homo sapien
taagagtgaattcaatacttatcca

SEQ ID NO: 3390376 - DNA, 25 bp, Homo sapien
atccaaaactgaattgcacaatatt

SEQ ID NO: 3390377 - DNA, 25 bp, Homo sapien
tgacacgtctttgaattacaagtgc

SEQ ID NO: 3390378 - DNA, 25 bp, Homo sapien
gagtcagtagagaaagcggagtcaa

SEQ ID NO: 3390379 - DNA, 25 bp, Homo sapien
tataaataagattgcccatccagca

SEQ ID NO: 3390380 - DNA, 25 bp, Homo sapien
agcaaagaatagttggttcagacgc

SEQ ID NO: 3390381 - DNA, 25 bp, Homo sapien
gacgcccttaggaggaataatcaga

SEQ ID NO: 3390382 - DNA, 25 bp, Homo sapien
tagtcacattgcaacactaccttga

SEQ ID NO: 3390383 - DNA, 25 bp, Homo sapien
gtaaaacgtagtcacattgcaacac

SEQ ID NO: 3390384 - DNA, 25 bp, Homo sapien
gcaacactaccttgatgtgaaacat

SEQ ID NO: 3390385 - DNA, 25 bp, Homo sapien
ttgttgtaaaacgtagtcacattgc

SEQ ID NO: 3390386 - DNA, 25 bp, Homo sapien
tctgcattgacatcaataggtgagt

SEQ ID NO: 3390387 - DNA, 25 bp, Homo sapien
tcctgctgggtggattaaaatcccc

SEQ ID NO: 3390388 - DNA, 25 bp, Homo sapien
ccccagttttatacagataccacag

SEQ ID NO: 3390389 - DNA, 25 bp, Homo sapien
ggaactctctgcattgacatcaata

SEQ ID NO: 3390390 - DNA, 25 bp, Homo sapien
ttagggatcccaatccatcatattg

SEQ ID NO: 3390391 - DNA, 25 bp, Homo sapien
agggatcccaatccatcatattgtt

SEQ ID NO: 3390392 - DNA, 25 bp, Homo sapien
tagggatcccaatccatcatattgt

SEQ ID NO: 3390393 - DNA, 25 bp, Homo sapien
cattgctctatagagtaaagccatc

SEQ ID NO: 3390394 - DNA, 25 bp, Homo sapien
tatagaaacattgctctatagagta

SEQ ID NO: 3390395 - DNA, 25 bp, Homo sapien
gaaacattgctctatagagtaaagc

SEQ ID NO: 3390396 - DNA, 25 bp, Homo sapien
tcaagctgtgtcaattgctgctgcc

SEQ ID NO: 3390397 - DNA, 25 bp, Homo sapien
ttttgctgccttaccaatgcagttc

SEQ ID NO: 3390398 - DNA, 25 bp, Homo sapien
ttgctgccttaccaatgcagttcat

SEQ ID NO: 3390399 - DNA, 25 bp, Homo sapien
ttttttgctgccttaccaatgcagt

SEQ ID NO: 3390400 - DNA, 25 bp, Homo sapien
cttttttgctgccttaccaatgcag

SEQ ID NO: 3390401 - DNA, 25 bp, Homo sapien
tccaaatgtttcatgaaagcatgct

SEQ ID NO: 3390402 - DNA, 25 bp, Homo sapien
cctccaaatgtttcatgaaagcatg

SEQ ID NO: 3390403 - DNA, 25 bp, Homo sapien
gagtgaatgcccttaccccaatcct

SEQ ID NO: 3390404 - DNA, 25 bp, Homo sapien
gccttctcctgagtgaatgccctta

SEQ ID NO: 3390405 - DNA, 25 bp, Homo sapien
ttagcaatacttcaagagggaaaat

SEQ ID NO: 3390406 - DNA, 25 bp, Homo sapien
cactcatctctgctattagcaatac

SEQ ID NO: 3390407 - DNA, 25 bp, Homo sapien
ctaataggagggtacatctccactc

SEQ ID NO: 3390408 - DNA, 25 bp, Homo sapien
taggagggtacatctccactcatct

SEQ ID NO: 3390409 - DNA, 25 bp, Homo sapien
tcaagccacggtatatgcattgttg

SEQ ID NO: 3390410 - DNA, 25 bp, Homo sapien
agccacggtatatgcattgttgcat

SEQ ID NO: 3390411 - DNA, 25 bp, Homo sapien
caagccacggtatatgcattgttgc

SEQ ID NO: 3390412 - DNA, 25 bp, Homo sapien
aagccacggtatatgcattgttgca

SEQ ID NO: 3390413 - DNA, 25 bp, Homo sapien
aaatcccaggtatttgcatggagcc

SEQ ID NO: 3390414 - DNA, 25 bp, Homo sapien
ggcttgagtttccacaaatcccagg

SEQ ID NO: 3390415 - DNA, 25 bp, Homo sapien
gaccaaatcgctggcttgagtttcc

SEQ ID NO: 3390416 - DNA, 25 bp, Homo sapien
ggggcacaacctgtgagaaggacca

SEQ ID NO: 3390417 - DNA, 25 bp, Homo sapien
agcagtgatgaaagctatttgcccc

SEQ ID NO: 3390418 - DNA, 25 bp, Homo sapien
gcagtgatgaaagctatttgcccca

SEQ ID NO: 3390419 - DNA, 25 bp, Homo sapien
tgacgtgtgtttgaagaaaccaagc

SEQ ID NO: 3390420 - DNA, 25 bp, Homo sapien
actgtcacatatgagcaaatgctag

SEQ ID NO: 3390421 - DNA, 25 bp, Homo sapien
tagtgaaggcctgacgtgtgtttga

SEQ ID NO: 3390422 - DNA, 25 bp, Homo sapien
caattgtgcatctactcttcccttg

SEQ ID NO: 3390423 - DNA, 25 bp, Homo sapien
tcaattgtgcatctactcttccctt

SEQ ID NO: 3390424 - DNA, 25 bp, Homo sapien
ttttgtcaatacctttgtacgtctg

SEQ ID NO: 3390425 - DNA, 25 bp, Homo sapien
tacgtctgtggcttaatggaggtca

SEQ ID NO: 3390426 - DNA, 25 bp, Homo sapien
tttgtacgtctgtggcttaatggag

SEQ ID NO: 3390427 - DNA, 25 bp, Homo sapien
aatacctttgtacgtctgtggctta

SEQ ID NO: 3390428 - DNA, 25 bp, Homo sapien
tcagttcagctcttgtaaagagcag

SEQ ID NO: 3390429 - DNA, 25 bp, Homo sapien
gagcaggccacatttctctggatca

SEQ ID NO: 3390430 - DNA, 25 bp, Homo sapien
gtggcttttctgagacatgcaataa

SEQ ID NO: 3390431 - DNA, 25 bp, Homo sapien
tctcctgctgatacttgtggctttt

SEQ ID NO: 3390432 - DNA, 25 bp, Homo sapien
aggcccccatttgtctggtcagtgg

SEQ ID NO: 3390433 - DNA, 25 bp, Homo sapien
gatcaatcaggcctttagcctgagg

SEQ ID NO: 3390434 - DNA, 25 bp, Homo sapien
atcaggcctttagcctgaggtctga

SEQ ID NO: 3390435 - DNA, 25 bp, Homo sapien
cccatttgtctggtcagtggatcaa

SEQ ID NO: 3390436 - DNA, 25 bp, Homo sapien
agccagccagaattctaaaaattcc

SEQ ID NO: 3390437 - DNA, 25 bp, Homo sapien
aaaattccctgatatactgcgaatc

SEQ ID NO: 3390438 - DNA, 25 bp, Homo sapien
gacagggagctctcttcactctggt

SEQ ID NO: 3390439 - DNA, 25 bp, Homo sapien
cccacagtcacagtcaggattatat

SEQ ID NO: 3390440 - DNA, 25 bp, Homo sapien
ggctcattcgtctccacatgtgtgc

SEQ ID NO: 3390441 - DNA, 25 bp, Homo sapien
tctccacaggctcgtcagtgcaggg

SEQ ID NO: 3390442 - DNA, 25 bp, Homo sapien
agggtggcccagacaaagcaaggtt

SEQ ID NO: 3390443 - DNA, 25 bp, Homo sapien
gcagatatcccaacaagtcagcagc

SEQ ID NO: 3390444 - DNA, 25 bp, Homo sapien
cacatctcgtactgatgtaaatgtc

SEQ ID NO: 3390445 - DNA, 25 bp, Homo sapien
ataatgttctccaatcacatctcgt

SEQ ID NO: 3390446 - DNA, 25 bp, Homo sapien
caatcacatctcgtactgatgtaaa

SEQ ID NO: 3390447 - DNA, 25 bp, Homo sapien
tgttctccaatcacatctcgtactg

SEQ ID NO: 3390448 - DNA, 25 bp, Homo sapien
ccaaaatagcctgaggatcgtgtcc

SEQ ID NO: 3390449 - DNA, 25 bp, Homo sapien
caaaatagcctgaggatcgtgtcca

SEQ ID NO: 3390450 - DNA, 25 bp, Homo sapien
aaaatagcctgaggatcgtgtccat

SEQ ID NO: 3390451 - DNA, 25 bp, Homo sapien
gacaatcatcttccctagatgtgga

SEQ ID NO: 3390452 - DNA, 25 bp, Homo sapien
aatctcaggtttcttaataataggc

SEQ ID NO: 3390453 - DNA, 25 bp, Homo sapien
tagatgtggacagtaagctgttacc

SEQ ID NO: 3390454 - DNA, 25 bp, Homo sapien
caccaggttcttgatagtaactcca

SEQ ID NO: 3390455 - DNA, 25 bp, Homo sapien
attctaacacatcattgggctggtt

SEQ ID NO: 3390456 - DNA, 25 bp, Homo sapien
aacacatcattgggctggttcctgg

SEQ ID NO: 3390457 - DNA, 25 bp, Homo sapien
tctaacacatcattgggctggttcc

SEQ ID NO: 3390458 - DNA, 25 bp, Homo sapien
taacacatcattgggctggttcctg

SEQ ID NO: 3390459 - DNA, 25 bp, Homo sapien
cgacataactaacggtaagccaagt

SEQ ID NO: 3390460 - DNA, 25 bp, Homo sapien
aacctccagctttacagaactcctt

SEQ ID NO: 3390461 - DNA, 25 bp, Homo sapien
tgctggctgatactcagaactgagg

SEQ ID NO: 3390462 - DNA, 25 bp, Homo sapien
tcctggattacttgctatgctgctc

SEQ ID NO: 3390463 - DNA, 25 bp, Homo sapien
tctccaataagattgttgcagttgg

SEQ ID NO: 3390464 - DNA, 25 bp, Homo sapien
gactctgcattgcaagacatgctaa

SEQ ID NO: 3390465 - DNA, 25 bp, Homo sapien
caataagattgttgcagttggtgat

SEQ ID NO: 3390466 - DNA, 25 bp, Homo sapien
ttttctccaataagattgttgcagt

SEQ ID NO: 3390467 - DNA, 25 bp, Homo sapien
tgagagtggaaaagacaaagaagtc

SEQ ID NO: 3390468 - DNA, 25 bp, Homo sapien
gcagtgagagtggaaaagacaaaga

SEQ ID NO: 3390469 - DNA, 25 bp, Homo sapien
agcagtgagagtggaaaagacaaag

SEQ ID NO: 3390470 - DNA, 25 bp, Homo sapien
agtggaaaagacaaagaagtctgta

SEQ ID NO: 3390471 - DNA, 25 bp, Homo sapien
cgtccacttatcactttaaattcta

SEQ ID NO: 3390472 - DNA, 25 bp, Homo sapien
cacttatcactttaaattctacttc

SEQ ID NO: 3390473 - DNA, 25 bp, Homo sapien
tcactttaaattctacttctccttc

SEQ ID NO: 3390474 - DNA, 25 bp, Homo sapien
tccgtccacttatcactttaaattc

SEQ ID NO: 3390475 - DNA, 25 bp, Homo sapien
aattacaggcatacgtttcagcagc

SEQ ID NO: 3390476 - DNA, 25 bp, Homo sapien
acaggcatacgtttcagcagcaact

SEQ ID NO: 3390477 - DNA, 25 bp, Homo sapien
attacaggcatacgtttcagcagca

SEQ ID NO: 3390478 - DNA, 25 bp, Homo sapien
tacaggcatacgtttcagcagcaac

SEQ ID NO: 3390479 - DNA, 25 bp, Homo sapien
accaagagtgtagatgtaaaggaag

SEQ ID NO: 3390480 - DNA, 25 bp, Homo sapien
cagtgtctagacaataggaaggctt

SEQ ID NO: 3390481 - DNA, 25 bp, Homo sapien
ggctccagtagcactaatcaactga

SEQ ID NO: 3390482 - DNA, 25 bp, Homo sapien
gtcagtgtctagacaataggaaggc

SEQ ID NO: 3390483 - DNA, 25 bp, Homo sapien
ttgcgtactcggcaggagatgagac

SEQ ID NO: 3390484 - DNA, 25 bp, Homo sapien
taatctgccgataattgaacttgcg

SEQ ID NO: 3390485 - DNA, 25 bp, Homo sapien
tgagacccaattcactgggagagac

SEQ ID NO: 3390486 - DNA, 25 bp, Homo sapien
gggcacggagagtagaaacctaatc

SEQ ID NO: 3390487 - DNA, 25 bp, Homo sapien
gcgatcgccccgtgcgcttcggtca

SEQ ID NO: 3390488 - DNA, 25 bp, Homo sapien
cgctctggtcagtcgggtgagcact

SEQ ID NO: 3390489 - DNA, 25 bp, Homo sapien
tgcgcttcggtcaccgggctgcgct

SEQ ID NO: 3390490 - DNA, 25 bp, Homo sapien
caccgggctgcgctctggtcagtcg

SEQ ID NO: 3390491 - DNA, 25 bp, Homo sapien
gcgctgggagcgaggagtatcttca

SEQ ID NO: 3390492 - DNA, 25 bp, Homo sapien
atgtcaccggcgaggcgagccctgc

SEQ ID NO: 3390493 - DNA, 25 bp, Homo sapien
agccagtgatgagcgctcttccgag

SEQ ID NO: 3390494 - DNA, 25 bp, Homo sapien
tcttcgggatcctgtcgctccttgg

SEQ ID NO: 3390495 - DNA, 25 bp, Homo sapien
ctggtgctgaggaccagcgcaggca

SEQ ID NO: 3390496 - DNA, 25 bp, Homo sapien
tgctgaggaccagcgcaggcaggag

SEQ ID NO: 3390497 - DNA, 25 bp, Homo sapien
aggtagtgcgctgggctgaatttca

SEQ ID NO: 3390498 - DNA, 25 bp, Homo sapien
ggagaggcagcaggtagtgcgctgg

SEQ ID NO: 3390499 - DNA, 25 bp, Homo sapien
ttttgaatcagaatctgaaggtcag

SEQ ID NO: 3390500 - DNA, 25 bp, Homo sapien
gatggtaacagtatgttttgaatca

SEQ ID NO: 3390501 - DNA, 25 bp, Homo sapien
cgactccatttatcagcactcatgg

SEQ ID NO: 3390502 - DNA, 25 bp, Homo sapien
gcactcatggaataagtgattctag

SEQ ID NO: 3390503 - DNA, 25 bp, Homo sapien
ttcagcctgtgacaaccaccacatt

SEQ ID NO: 3390504 - DNA, 25 bp, Homo sapien
gttttttcagcctgtgacaaccacc

SEQ ID NO: 3390505 - DNA, 25 bp, Homo sapien
caccaccgctatttgttttttcagc

SEQ ID NO: 3390506 - DNA, 25 bp, Homo sapien
ttttcagcctgtgacaaccaccaca

SEQ ID NO: 3390507 - DNA, 25 bp, Homo sapien
tcaacttttcatcacttctttgaga

SEQ ID NO: 3390508 - DNA, 25 bp, Homo sapien
tttcatcacttctttgagataaaca

SEQ ID NO: 3390509 - DNA, 25 bp, Homo sapien
catcacttctttgagataaacactg

SEQ ID NO: 3390510 - DNA, 25 bp, Homo sapien
tctttgagataaacactgtctacat

SEQ ID NO: 3390511 - DNA, 25 bp, Homo sapien
tcctagacagttccagatggcctgc

SEQ ID NO: 3390512 - DNA, 25 bp, Homo sapien
tctagggaactaaaaacacgcattg

SEQ ID NO: 3390513 - DNA, 25 bp, Homo sapien
taaggtttcctaagcctagtctggc

SEQ ID NO: 3390514 - DNA, 25 bp, Homo sapien
tcttgacttgtctgcaaccctggaa

SEQ ID NO: 3390515 - DNA, 25 bp, Homo sapien
gctggtattcaatggatatgacttt

SEQ ID NO: 3390516 - DNA, 25 bp, Homo sapien
aagtcttaacttctatgtcataaac

SEQ ID NO: 3390517 - DNA, 25 bp, Homo sapien
aacattgctggtattcaatggatat

SEQ ID NO: 3390518 - DNA, 25 bp, Homo sapien
tctatgtcataaacattgctggtat

SEQ ID NO: 3390519 - DNA, 25 bp, Homo sapien
ttttctctatagcatgcactttcag

SEQ ID NO: 3390520 - DNA, 25 bp, Homo sapien
ttttttctctatagcatgcactttc

SEQ ID NO: 3390521 - DNA, 25 bp, Homo sapien
tctctatagcatgcactttcaggag

SEQ ID NO: 3390522 - DNA, 25 bp, Homo sapien
ttctctatagcatgcactttcagga

SEQ ID NO: 3390523 - DNA, 25 bp, Homo sapien
catgaagttttgggataatgcacat

SEQ ID NO: 3390524 - DNA, 25 bp, Homo sapien
tcatgaagttttgggataatgcaca

SEQ ID NO: 3390525 - DNA, 25 bp, Homo sapien
gtataaatggtcataacagatgctt

SEQ ID NO: 3390526 - DNA, 25 bp, Homo sapien
taatgcccctatcaagtataaatgg

SEQ ID NO: 3390527 - DNA, 25 bp, Homo sapien
ccagtgaaacctttggaatcacagc

SEQ ID NO: 3390528 - DNA, 25 bp, Homo sapien
gaacatgagtgttccttctagccca

SEQ ID NO: 3390529 - DNA, 25 bp, Homo sapien
taaacttgaacagtgcaatttttct

SEQ ID NO: 3390530 - DNA, 25 bp, Homo sapien
tattagcattattgattttcctgga

SEQ ID NO: 3390531 - DNA, 25 bp, Homo sapien
attattagcattattgattttcctg

SEQ ID NO: 3390532 - DNA, 25 bp, Homo sapien
ctcccttgcatgttaaacttgaaca

SEQ ID NO: 3390533 - DNA, 25 bp, Homo sapien
caccatggatatcctttaagtggca

SEQ ID NO: 3390534 - DNA, 25 bp, Homo sapien
tgcaacacggacaattatgaagaac

SEQ ID NO: 3390535 - DNA, 25 bp, Homo sapien
tagcgcaaatagcatcagtgttcag

SEQ ID NO: 3390536 - DNA, 25 bp, Homo sapien
gaagtgctgccttaatgatagctac

SEQ ID NO: 3390537 - DNA, 25 bp, Homo sapien
gcttgtagtgttggcaacaagccta

SEQ ID NO: 3390538 - DNA, 25 bp, Homo sapien
tgtccctgactttctggtgtcagca

SEQ ID NO: 3390539 - DNA, 25 bp, Homo sapien
tgtcagcaggcttgtagtgttggca

SEQ ID NO: 3390540 - DNA, 25 bp, Homo sapien
tagtgttggcaacaagcctatcttt

SEQ ID NO: 3390541 - DNA, 25 bp, Homo sapien
tcttccctgatactccttgccttgg

SEQ ID NO: 3390542 - DNA, 25 bp, Homo sapien
tgagacaatataggctcttccctga

SEQ ID NO: 3390543 - DNA, 25 bp, Homo sapien
taaagcctgctgcttgctaaggatg

SEQ ID NO: 3390544 - DNA, 25 bp, Homo sapien
tgttttgcaggtgataggatggcac

SEQ ID NO: 3390545 - DNA, 25 bp, Homo sapien
gaggtttccccattgctatggcata

SEQ ID NO: 3390546 - DNA, 25 bp, Homo sapien
aacatttgaacaggagggtgacagc

SEQ ID NO: 3390547 - DNA, 25 bp, Homo sapien
tgttaacagcaaactagcaggtact

SEQ ID NO: 3390548 - DNA, 25 bp, Homo sapien
tagataaattggatacagcatgcct

SEQ ID NO: 3390549 - DNA, 25 bp, Homo sapien
tctttccacttgtaggaaatgaagt

SEQ ID NO: 3390550 - DNA, 25 bp, Homo sapien
cacttgtaggaaatgaagtggttaa

SEQ ID NO: 3390551 - DNA, 25 bp, Homo sapien
aaatgaagtggttaaaggaacactg

SEQ ID NO: 3390552 - DNA, 25 bp, Homo sapien
aatgaagtggttaaaggaacactgg

SEQ ID NO: 3390553 - DNA, 25 bp, Homo sapien
acctgatacggccatttttcagcac

SEQ ID NO: 3390554 - DNA, 25 bp, Homo sapien
tagtaagttgcaggaacgtagaacc

SEQ ID NO: 3390555 - DNA, 25 bp, Homo sapien
gttttgccagcacttattagtaagt

SEQ ID NO: 3390556 - DNA, 25 bp, Homo sapien
tttgcttctgcataggatgagttgg

SEQ ID NO: 3390557 - DNA, 25 bp, Homo sapien
aaagaccgtatattcttagaatagc

SEQ ID NO: 3390558 - DNA, 25 bp, Homo sapien
agaatagcctttactactttccttg

SEQ ID NO: 3390559 - DNA, 25 bp, Homo sapien
cagggatggtgattggcggatgcct

SEQ ID NO: 3390560 - DNA, 25 bp, Homo sapien
gcagcagggatggtgattggcggat

SEQ ID NO: 3390561 - DNA, 25 bp, Homo sapien
gggatggtgattggcggatgcctgc

SEQ ID NO: 3390562 - DNA, 25 bp, Homo sapien
gcagggatggtgattggcggatgcc

SEQ ID NO: 3390563 - DNA, 25 bp, Homo sapien
ttactgccctttcagctgaactgac

SEQ ID NO: 3390564 - DNA, 25 bp, Homo sapien
cctttactgccctttcagctgaact

SEQ ID NO: 3390565 - DNA, 25 bp, Homo sapien
ttattcctttactgccctttcagct

SEQ ID NO: 3390566 - DNA, 25 bp, Homo sapien
tattcctttactgccctttcagctg

SEQ ID NO: 3390567 - DNA, 25 bp, Homo sapien
aggagcagattaagctgacaatcat

SEQ ID NO: 3390568 - DNA, 25 bp, Homo sapien
caggagcagattaagctgacaatca

SEQ ID NO: 3390569 - DNA, 25 bp, Homo sapien
gcaggagcagattaagctgacaatc

SEQ ID NO: 3390570 - DNA, 25 bp, Homo sapien
agccccttcggccatgtcaaggtca

SEQ ID NO: 3390571 - DNA, 25 bp, Homo sapien
aatatcagtagccccttcggccatg

SEQ ID NO: 3390572 - DNA, 25 bp, Homo sapien
catgtcaaggtcaaggccatctgcc

SEQ ID NO: 3390573 - DNA, 25 bp, Homo sapien
ccttcggccatgtcaaggtcaaggc

SEQ ID NO: 3390574 - DNA, 25 bp, Homo sapien
taaatgtgaccctcctacactcagg

SEQ ID NO: 3390575 - DNA, 25 bp, Homo sapien
atgaaaagtaaatgtgaccctccta

SEQ ID NO: 3390576 - DNA, 25 bp, Homo sapien
tcatatgtcttagagcactttccat

SEQ ID NO: 3390577 - DNA, 25 bp, Homo sapien
aactggcttcatatgtcttagagca

SEQ ID NO: 3390578 - DNA, 25 bp, Homo sapien
ccaaatggttccacttggcatcagt

SEQ ID NO: 3390579 - DNA, 25 bp, Homo sapien
aaatggttccacttggcatcagtca

SEQ ID NO: 3390580 - DNA, 25 bp, Homo sapien
acaggcatgagagccccccaaatgg

SEQ ID NO: 3390581 - DNA, 25 bp, Homo sapien
gaacaggcatgagagccccccaaat

SEQ ID NO: 3390582 - DNA, 25 bp, Homo sapien
ttgtcagctgacgaagaatggtgct

SEQ ID NO: 3390583 - DNA, 25 bp, Homo sapien
ggtgcttcgctccttaaagacttct

SEQ ID NO: 3390584 - DNA, 25 bp, Homo sapien
tgtcagctgacgaagaatggtgctt

SEQ ID NO: 3390585 - DNA, 25 bp, Homo sapien
aagaatggtgcttcgctccttaaag

SEQ ID NO: 3390586 - DNA, 25 bp, Homo sapien
ggcagactgctcatcgttttttaag

SEQ ID NO: 3390587 - DNA, 25 bp, Homo sapien
tcagttttggcagactgctcatcgt

SEQ ID NO: 3390588 - DNA, 25 bp, Homo sapien
cagactgctcatcgttttttaagga

SEQ ID NO: 3390589 - DNA, 25 bp, Homo sapien
tttggcagactgctcatcgtttttt

SEQ ID NO: 3390590 - DNA, 25 bp, Homo sapien
ccagatgaagccagatgacaaggat

SEQ ID NO: 3390591 - DNA, 25 bp, Homo sapien
actagtccagatgaagccagatgac

SEQ ID NO: 3390592 - DNA, 25 bp, Homo sapien
ctagggatcactagtccagatgaag

SEQ ID NO: 3390593 - DNA, 25 bp, Homo sapien
gatcactagtccagatgaagccaga

SEQ ID NO: 3390594 - DNA, 25 bp, Homo sapien
atgtctccttaagctgattttgcag

SEQ ID NO: 3390595 - DNA, 25 bp, Homo sapien
cctgcctgtggtaaatattcgtagt

SEQ ID NO: 3390596 - DNA, 25 bp, Homo sapien
cctgtggtaaatattcgtagtaaga

SEQ ID NO: 3390597 - DNA, 25 bp, Homo sapien
ctagttttcagcatggctctcagaa

SEQ ID NO: 3390598 - DNA, 25 bp, Homo sapien
tcagcatggctctcagaaacaccat

SEQ ID NO: 3390599 - DNA, 25 bp, Homo sapien
aagatccagtgttcagccataagga

SEQ ID NO: 3390600 - DNA, 25 bp, Homo sapien
ccagtgttcagccataaggaaggca

SEQ ID NO: 3390601 - DNA, 25 bp, Homo sapien
cagtgttcagccataaggaaggcac

SEQ ID NO: 3390602 - DNA, 25 bp, Homo sapien
gatccagtgttcagccataaggaag

SEQ ID NO: 3390603 - DNA, 25 bp, Homo sapien
gaggcctgagctgttgccattgatt

SEQ ID NO: 3390604 - DNA, 25 bp, Homo sapien
ggagaggcctgagctgttgccattg

SEQ ID NO: 3390605 - DNA, 25 bp, Homo sapien
agaggcctgagctgttgccattgat

SEQ ID NO: 3390606 - DNA, 25 bp, Homo sapien
gagaggcctgagctgttgccattga

SEQ ID NO: 3390607 - DNA, 25 bp, Homo sapien
gcagggcttttgtactgcactgatg

SEQ ID NO: 3390608 - DNA, 25 bp, Homo sapien
tacttctcattctagcagggctttt

SEQ ID NO: 3390609 - DNA, 25 bp, Homo sapien
gggcttttgtactgcactgatgtta

SEQ ID NO: 3390610 - DNA, 25 bp, Homo sapien
tcccattacttctcattctagcagg

SEQ ID NO: 3390611 - DNA, 25 bp, Homo sapien
ctcttgcctggataaacttcatttc

SEQ ID NO: 3390612 - DNA, 25 bp, Homo sapien
tcttgcctggataaacttcatttcc

SEQ ID NO: 3390613 - DNA, 25 bp, Homo sapien
ctggaggtctcggatcattttgctc

SEQ ID NO: 3390614 - DNA, 25 bp, Homo sapien
ggaggtctcggatcattttgctctt

SEQ ID NO: 3390615 - DNA, 25 bp, Homo sapien
cattctggaggtctcggatcatttt

SEQ ID NO: 3390616 - DNA, 25 bp, Homo sapien
ggtctcggatcattttgctctttct

SEQ ID NO: 3390617 - DNA, 25 bp, Homo sapien
tagattggccctttctagcacgcag

SEQ ID NO: 3390618 - DNA, 25 bp, Homo sapien
tagcacgcagccaatttctagctag

SEQ ID NO: 3390619 - DNA, 25 bp, Homo sapien
gaagtttggactaatgaaatgatca

SEQ ID NO: 3390620 - DNA, 25 bp, Homo sapien
tttaatactccaaactagtggcaac

SEQ ID NO: 3390621 - DNA, 25 bp, Homo sapien
tatttcaaagtctatagtcatgagg

SEQ ID NO: 3390622 - DNA, 25 bp, Homo sapien
tgtggttgatgtcacatttatttca

SEQ ID NO: 3390623 - DNA, 25 bp, Homo sapien
tttcaaagtctatagtcatgagggt

SEQ ID NO: 3390624 - DNA, 25 bp, Homo sapien
tttatttcaaagtctatagtcatga

SEQ ID NO: 3390625 - DNA, 25 bp, Homo sapien
tgccagccgatgaaaaatgtgccca

SEQ ID NO: 3390626 - DNA, 25 bp, Homo sapien
tacaacgccttcataactttgaggg

SEQ ID NO: 3390627 - DNA, 25 bp, Homo sapien
tacattgatgtactcggtgccccaa

SEQ ID NO: 3390628 - DNA, 25 bp, Homo sapien
tacagtcatataccaggtgccagcc

SEQ ID NO: 3390629 - DNA, 25 bp, Homo sapien
catgtatggagcgtgtgtaggataa

SEQ ID NO: 3390630 - DNA, 25 bp, Homo sapien
aagcttatccgttatcaccttcaga

SEQ ID NO: 3390631 - DNA, 25 bp, Homo sapien
caccttcagatattcacttccatgt

SEQ ID NO: 3390632 - DNA, 25 bp, Homo sapien
tcaccaagaattctgcaagagaaaa

SEQ ID NO: 3390633 - DNA, 25 bp, Homo sapien
tgaaagagatgcactaatacaaacc

SEQ ID NO: 3390634 - DNA, 25 bp, Homo sapien
tacttatatgacaccagtggcttgg

SEQ ID NO: 3390635 - DNA, 25 bp, Homo sapien
cgagtattaggtatcaaaacatcca

SEQ ID NO: 3390636 - DNA, 25 bp, Homo sapien
tacttgaaaacccacgatgaagaga

SEQ ID NO: 3390637 - DNA, 25 bp, Homo sapien
tcttccactggagatctcttggtct

SEQ ID NO: 3390638 - DNA, 25 bp, Homo sapien
catcaataagtatattgacatggtc

SEQ ID NO: 3390639 - DNA, 25 bp, Homo sapien
acatggtcctcatggagactatctt

SEQ ID NO: 3390640 - DNA, 25 bp, Homo sapien
tacatcaataagtatattgacatgg

SEQ ID NO: 3390641 - DNA, 25 bp, Homo sapien
taatataaatctccactattctagg

SEQ ID NO: 3390642 - DNA, 25 bp, Homo sapien
tgtatctaatataaatctccactat

SEQ ID NO: 3390643 - DNA, 25 bp, Homo sapien
aatataaatctccactattctaggt

SEQ ID NO: 3390644 - DNA, 25 bp, Homo sapien
tattttgtatctaatataaatctcc

SEQ ID NO: 3390645 - DNA, 25 bp, Homo sapien
tatttaggaatagagttgttgggcc

SEQ ID NO: 3390646 - DNA, 25 bp, Homo sapien
gaggaacagaggaactattctccaa

SEQ ID NO: 3390647 - DNA, 25 bp, Homo sapien
agctctccctgtgagtgtaaagtgg

SEQ ID NO: 3390648 - DNA, 25 bp, Homo sapien
tattccattcggcaggttgtcttcc

SEQ ID NO: 3390649 - DNA, 25 bp, Homo sapien
gtgacatttgcctcagcagtcatca

SEQ ID NO: 3390650 - DNA, 25 bp, Homo sapien
cttagtgtgacatttgcctcagcag

SEQ ID NO: 3390651 - DNA, 25 bp, Homo sapien
atttgcctcagcagtcatcatgacc

SEQ ID NO: 3390652 - DNA, 25 bp, Homo sapien
gacatttgcctcagcagtcatcatg

SEQ ID NO: 3390653 - DNA, 25 bp, Homo sapien
gaatgcaaggagttactctgggatc

SEQ ID NO: 3390654 - DNA, 25 bp, Homo sapien
tggtggaagtgcacccttttattaa

SEQ ID NO: 3390655 - DNA, 25 bp, Homo sapien
ctctggtggaagtgcacccttttat

SEQ ID NO: 3390656 - DNA, 25 bp, Homo sapien
gttactctgggatcataaaaggaat

SEQ ID NO: 3390657 - DNA, 25 bp, Homo sapien
ttatactagaactcagggtccctgg

SEQ ID NO: 3390658 - DNA, 25 bp, Homo sapien
agaatctgacttaaagacggcctga

SEQ ID NO: 3390659 - DNA, 25 bp, Homo sapien
gctgaaggatatctcagaatctgac

SEQ ID NO: 3390660 - DNA, 25 bp, Homo sapien
gaggtagaccagaagttgcataact

SEQ ID NO: 3390661 - DNA, 25 bp, Homo sapien
aacatcacaaacaattctgtgatta

SEQ ID NO: 3390662 - DNA, 25 bp, Homo sapien
tatgaaagattcatagaaataacat

SEQ ID NO: 3390663 - DNA, 25 bp, Homo sapien
aaagattcatagaaataacatcaca

SEQ ID NO: 3390664 - DNA, 25 bp, Homo sapien
ctgtgattaaatacatttggggaac

SEQ ID NO: 3390665 - DNA, 25 bp, Homo sapien
caaataatatctgaagtcaaagggt

SEQ ID NO: 3390666 - DNA, 25 bp, Homo sapien
tcaaataatatctgaagtcaaaggg

SEQ ID NO: 3390667 - DNA, 25 bp, Homo sapien
tcccaaaattgcatgtgtgcagcaa

SEQ ID NO: 3390668 - DNA, 25 bp, Homo sapien
gcatgtgtgcagcaattattgccat

SEQ ID NO: 3390669 - DNA, 25 bp, Homo sapien
cttcttcccaaaattgcatgtgtgc

SEQ ID NO: 3390670 - DNA, 25 bp, Homo sapien
caaagcccagattcatacaaattga

SEQ ID NO: 3390671 - DNA, 25 bp, Homo sapien
ttcatcataagagcaatagaattaa

SEQ ID NO: 3390672 - DNA, 25 bp, Homo sapien
tttcatcataagagcaatagaatta

SEQ ID NO: 3390673 - DNA, 25 bp, Homo sapien
gccttatcaccaaagttgacaaggg

SEQ ID NO: 3390674 - DNA, 25 bp, Homo sapien
tgacaagggtatgcttcatcacact

SEQ ID NO: 3390675 - DNA, 25 bp, Homo sapien
tctagctcacattagatactgtcgg

SEQ ID NO: 3390676 - DNA, 25 bp, Homo sapien
tccttccatgaataaacgtagagtg

SEQ ID NO: 3390677 - DNA, 25 bp, Homo sapien
tggctaattgaagtcagatgttcag

SEQ ID NO: 3390678 - DNA, 25 bp, Homo sapien
tctcccttagtaatccttttgtgat

SEQ ID NO: 3390679 - DNA, 25 bp, Homo sapien
gttcagtgcagagtgttgcagcgta

SEQ ID NO: 3390680 - DNA, 25 bp, Homo sapien
tgcagcgtatcccaatttgttgcct

SEQ ID NO: 3390681 - DNA, 25 bp, Homo sapien
tatacctactgtactggacaccctg

SEQ ID NO: 3390682 - DNA, 25 bp, Homo sapien
taacaagcaaacgagtctagctcca

SEQ ID NO: 3390683 - DNA, 25 bp, Homo sapien
gtaagtcacgagtgaccatgagccc

SEQ ID NO: 3390684 - DNA, 25 bp, Homo sapien
gagcctatcaaactagtaagtcacg

SEQ ID NO: 3390685 - DNA, 25 bp, Homo sapien
tcgaggccagacagagaacttcagc

SEQ ID NO: 3390686 - DNA, 25 bp, Homo sapien
tgctaatcgagacatcactgggtat

SEQ ID NO: 3390687 - DNA, 25 bp, Homo sapien
tttaggtcatctactccagtggtgg

SEQ ID NO: 3390688 - DNA, 25 bp, Homo sapien
ggtgctccttcctatagcagatggt

SEQ ID NO: 3390689 - DNA, 25 bp, Homo sapien
gactagaaatagcatagggcttatc

SEQ ID NO: 3390690 - DNA, 25 bp, Homo sapien
gattgtgacatcagtctgtagctct

SEQ ID NO: 3390691 - DNA, 25 bp, Homo sapien
tacctcttggtctacattgtgcttc

SEQ ID NO: 3390692 - DNA, 25 bp, Homo sapien
gattaagctggcaatccattgtctc

SEQ ID NO: 3390693 - DNA, 25 bp, Homo sapien
tctagccagaggtaaaagttctcca

SEQ ID NO: 3390694 - DNA, 25 bp, Homo sapien
cactaggttaactagacacagagca

SEQ ID NO: 3390695 - DNA, 25 bp, Homo sapien
agctgcccaccagtcccgtagggtg

SEQ ID NO: 3390696 - DNA, 25 bp, Homo sapien
tggcttcccctagtggatcccgtgc

SEQ ID NO: 3390697 - DNA, 25 bp, Homo sapien
cttgtttcctgacaagagtttgttt

SEQ ID NO: 3390698 - DNA, 25 bp, Homo sapien
ctcttctgcgtgaatgccacagagc

SEQ ID NO: 3390699 - DNA, 25 bp, Homo sapien
tcttctgcgtgaatgccacagagct

SEQ ID NO: 3390700 - DNA, 25 bp, Homo sapien
cttctgcgtgaatgccacagagctt

SEQ ID NO: 3390701 - DNA, 25 bp, Homo sapien
ttcccataacgaagctccttcagct

SEQ ID NO: 3390702 - DNA, 25 bp, Homo sapien
aatgtttttgaggagataagcctct

SEQ ID NO: 3390703 - DNA, 25 bp, Homo sapien
ctattgagtaagagactgaaattgc

SEQ ID NO: 3390704 - DNA, 25 bp, Homo sapien
cactggatatttacaatcagaggca

SEQ ID NO: 3390705 - DNA, 25 bp, Homo sapien
ggatatttacaatcagaggcaatgt

SEQ ID NO: 3390706 - DNA, 25 bp, Homo sapien
gcaaagaatacacagtccatatatt

SEQ ID NO: 3390707 - DNA, 25 bp, Homo sapien
agcaaagaatacacagtccatatat

SEQ ID NO: 3390708 - DNA, 25 bp, Homo sapien
tctcaggtacgtggaaaaatggtct

SEQ ID NO: 3390709 - DNA, 25 bp, Homo sapien
gtaaacagctggcaagtgagcaaag

SEQ ID NO: 3390710 - DNA, 25 bp, Homo sapien
gggctgcatgctctttatgagaatc

SEQ ID NO: 3390711 - DNA, 25 bp, Homo sapien
aactacgcatgtaagggatctgggc

SEQ ID NO: 3390712 - DNA, 25 bp, Homo sapien
taagtagttggcattgtaggtgcat

SEQ ID NO: 3390713 - DNA, 25 bp, Homo sapien
agtagttggcattgtaggtgcatgc

SEQ ID NO: 3390714 - DNA, 25 bp, Homo sapien
tagttggcattgtaggtgcatgcca

SEQ ID NO: 3390715 - DNA, 25 bp, Homo sapien
ctcttaagtagttggcattgtaggt

SEQ ID NO: 3390716 - DNA, 25 bp, Homo sapien
tatgacagcccaagcagacaaatgt

SEQ ID NO: 3390717 - DNA, 25 bp, Homo sapien
tgaagtcacaagagtgaggccctaa

SEQ ID NO: 3390718 - DNA, 25 bp, Homo sapien
gaaggcactgactacaagccaggaa

SEQ ID NO: 3390719 - DNA, 25 bp, Homo sapien
ggacaccttactctgggacttctag

SEQ ID NO: 3390720 - DNA, 25 bp, Homo sapien
aatttttgttccagatcagtaagct

SEQ ID NO: 3390721 - DNA, 25 bp, Homo sapien
gttccagatcagtaagctgctgcgc

SEQ ID NO: 3390722 - DNA, 25 bp, Homo sapien
tttttgttccagatcagtaagctgc

SEQ ID NO: 3390723 - DNA, 25 bp, Homo sapien
tgttccagatcagtaagctgctgcg

SEQ ID NO: 3390724 - DNA, 25 bp, Homo sapien
tcctgggtgggagtaacatccgagt

SEQ ID NO: 3390725 - DNA, 25 bp, Homo sapien
gcttagaggcaatattcctgggtgg

SEQ ID NO: 3390726 - DNA, 25 bp, Homo sapien
ccgagttggatttgatgtgattaaa

SEQ ID NO: 3390727 - DNA, 25 bp, Homo sapien
gaggaggctgatcacggaaaacaga

SEQ ID NO: 3390728 - DNA, 25 bp, Homo sapien
aaaagatacgtcatctcctgtgtgt

SEQ ID NO: 3390729 - DNA, 25 bp, Homo sapien
aacaaagacataaaagatacgtcat

SEQ ID NO: 3390730 - DNA, 25 bp, Homo sapien
gacataaaagatacgtcatctcctg

SEQ ID NO: 3390731 - DNA, 25 bp, Homo sapien
caaagacataaaagatacgtcatct

SEQ ID NO: 3390732 - DNA, 25 bp, Homo sapien
ctagaaatttggcaagctcagtttc

SEQ ID NO: 3390733 - DNA, 25 bp, Homo sapien
caagctcagtttcaccgtatcccag

SEQ ID NO: 3390734 - DNA, 25 bp, Homo sapien
agtttcaccgtatcccagttgttca

SEQ ID NO: 3390735 - DNA, 25 bp, Homo sapien
gaacaaatgggccagcatattctct

SEQ ID NO: 3390736 - DNA, 25 bp, Homo sapien
tcacaggcagtggtacttggatttc

SEQ ID NO: 3390737 - DNA, 25 bp, Homo sapien
gtcacaggcagtggtacttggattt

SEQ ID NO: 3390738 - DNA, 25 bp, Homo sapien
agtcacaggcagtggtacttggatt

SEQ ID NO: 3390739 - DNA, 25 bp, Homo sapien
taaaagtacaatccttagatagtag

SEQ ID NO: 3390740 - DNA, 25 bp, Homo sapien
taaatagtttcatggtggcatgaat

SEQ ID NO: 3390741 - DNA, 25 bp, Homo sapien
tctcctgtctaatactgtaaaaagc

SEQ ID NO: 3390742 - DNA, 25 bp, Homo sapien
catggtggcatgaattagaattgct

SEQ ID NO: 3390743 - DNA, 25 bp, Homo sapien
atgcttaatggaacacttacctgat

SEQ ID NO: 3390744 - DNA, 25 bp, Homo sapien
ctaagaatctagttgcaatgcttaa

SEQ ID NO: 3390745 - DNA, 25 bp, Homo sapien
gaatctagttgcaatgcttaatgga

SEQ ID NO: 3390746 - DNA, 25 bp, Homo sapien
atctagttgcaatgcttaatggaac

SEQ ID NO: 3390747 - DNA, 25 bp, Homo sapien
gctttctttcatgtagctgtgggaa

SEQ ID NO: 3390748 - DNA, 25 bp, Homo sapien
tgggaatgagcaccttgcttagcct

SEQ ID NO: 3390749 - DNA, 25 bp, Homo sapien
tggagaagtacatcctataaggttt

SEQ ID NO: 3390750 - DNA, 25 bp, Homo sapien
ctttcaagcatagtttcatcagaca

SEQ ID NO: 3390751 - DNA, 25 bp, Homo sapien
taggttcaatgtctcaactcagagg

SEQ ID NO: 3390752 - DNA, 25 bp, Homo sapien
cattatatggctacacttagagccc

SEQ ID NO: 3390753 - DNA, 25 bp, Homo sapien
tgcagatgatagaaacagacaacct

SEQ ID NO: 3390754 - DNA, 25 bp, Homo sapien
tagagccccttagcgaatgtcattg

SEQ ID NO: 3390755 - DNA, 25 bp, Homo sapien
cattacttgggggactttctttgtg

SEQ ID NO: 3390756 - DNA, 25 bp, Homo sapien
ctgtgggataggctcggtttctgca

SEQ ID NO: 3390757 - DNA, 25 bp, Homo sapien
gtttctgcagtggcattacttgggg

SEQ ID NO: 3390758 - DNA, 25 bp, Homo sapien
gccaaaagcttagtagaaagcagag

SEQ ID NO: 3390759 - DNA, 25 bp, Homo sapien
ggcaccatggctttacatatagtac

SEQ ID NO: 3390760 - DNA, 25 bp, Homo sapien
caaaagcttagtagaaagcagagca

SEQ ID NO: 3390761 - DNA, 25 bp, Homo sapien
tacatatagtactagcaagtacaat

SEQ ID NO: 3390762 - DNA, 25 bp, Homo sapien
tcaaagctggtcaatggtttttctg

SEQ ID NO: 3390763 - DNA, 25 bp, Homo sapien
aaagctggtcaatggtttttctggg

SEQ ID NO: 3390764 - DNA, 25 bp, Homo sapien
caaagctggtcaatggtttttctgg

SEQ ID NO: 3390765 - DNA, 25 bp, Homo sapien
taactttctataggacccacaaggc

SEQ ID NO: 3390766 - DNA, 25 bp, Homo sapien
gtactagatatccaaatgaaccggg

SEQ ID NO: 3390767 - DNA, 25 bp, Homo sapien
gacctgcctgtgctaatgaatgaca

SEQ ID NO: 3390768 - DNA, 25 bp, Homo sapien
taaatgatctgcttccctgtcagga

SEQ ID NO: 3390769 - DNA, 25 bp, Homo sapien
ggctaatattcattaaagtacctcc

SEQ ID NO: 3390770 - DNA, 25 bp, Homo sapien
caaacttgtagttattaattgggct

SEQ ID NO: 3390771 - DNA, 25 bp, Homo sapien
tagttattaattgggctaatattca

SEQ ID NO: 3390772 - DNA, 25 bp, Homo sapien
tacctccatggtcaatgagtaatga

SEQ ID NO: 3390773 - DNA, 25 bp, Homo sapien
agaggtacatgagccaagcctgcgt

SEQ ID NO: 3390774 - DNA, 25 bp, Homo sapien
tacctttgttccagtacagtcacag

SEQ ID NO: 3390775 - DNA, 25 bp, Homo sapien
tcagggtaagctaggcctagaaact

SEQ ID NO: 3390776 - DNA, 25 bp, Homo sapien
ccttagtgcatccagcaagtagttc

SEQ ID NO: 3390777 - DNA, 25 bp, Homo sapien
cccgggaccccatctagaatgccct

SEQ ID NO: 3390778 - DNA, 25 bp, Homo sapien
tacactcaaattggcaccaaaacct

SEQ ID NO: 3390779 - DNA, 25 bp, Homo sapien
ctcccgggaccccatctagaatgcc

SEQ ID NO: 3390780 - DNA, 25 bp, Homo sapien
ttatacactcaaattggcaccaaaa

SEQ ID NO: 3390781 - DNA, 25 bp, Homo sapien
ttctgtagcttgatttctatgggtc

SEQ ID NO: 3390782 - DNA, 25 bp, Homo sapien
gattctgtagcttgatttctatggg

SEQ ID NO: 3390783 - DNA, 25 bp, Homo sapien
ctgattctgtagcttgatttctatg

SEQ ID NO: 3390784 - DNA, 25 bp, Homo sapien
tgattctgtagcttgatttctatgg

SEQ ID NO: 3390785 - DNA, 25 bp, Homo sapien
cttcagtttccacatactgcttacc

SEQ ID NO: 3390786 - DNA, 25 bp, Homo sapien
cagattccaccctcatacttcctat

SEQ ID NO: 3390787 - DNA, 25 bp, Homo sapien
tttcttatgtcttgttgactgtgcg

SEQ ID NO: 3390788 - DNA, 25 bp, Homo sapien
tgcttaccactctttgagctgctat

SEQ ID NO: 3390789 - DNA, 25 bp, Homo sapien
tgcaggccctttactctgacatgga

SEQ ID NO: 3390790 - DNA, 25 bp, Homo sapien
tgcatatggtgttggcggctgagtc

SEQ ID NO: 3390791 - DNA, 25 bp, Homo sapien
cggctgagtcgcatgcaggcccttt

SEQ ID NO: 3390792 - DNA, 25 bp, Homo sapien
gacatggacaacacgcccatcgata

SEQ ID NO: 3390793 - DNA, 25 bp, Homo sapien
taccacacttatcctcattagccat

SEQ ID NO: 3390794 - DNA, 25 bp, Homo sapien
tcctttcgatcttctctcccactac

SEQ ID NO: 3390795 - DNA, 25 bp, Homo sapien
ttctctcccactaccacacttatcc

SEQ ID NO: 3390796 - DNA, 25 bp, Homo sapien
ctcctttcgatcttctctcccacta

SEQ ID NO: 3390797 - DNA, 25 bp, Homo sapien
ccttcattttctctctgttccccat

SEQ ID NO: 3390798 - DNA, 25 bp, Homo sapien
ctgccttcattttctctctgttccc

SEQ ID NO: 3390799 - DNA, 25 bp, Homo sapien
tgccttcattttctctctgttcccc

SEQ ID NO: 3390800 - DNA, 25 bp, Homo sapien
gccttcattttctctctgttcccca

SEQ ID NO: 3390801 - DNA, 25 bp, Homo sapien
gccagattcagaactagttttatca

SEQ ID NO: 3390802 - DNA, 25 bp, Homo sapien
aattgtcccacccttgaagaccctg

SEQ ID NO: 3390803 - DNA, 25 bp, Homo sapien
tcatggctataggaataaagtgctt

SEQ ID NO: 3390804 - DNA, 25 bp, Homo sapien
tttatcagcaattgtcccacccttg

SEQ ID NO: 3390805 - DNA, 25 bp, Homo sapien
cagcattaggtcgtaacactaaaga

SEQ ID NO: 3390806 - DNA, 25 bp, Homo sapien
tcgtaacactaaagaagttagacag

SEQ ID NO: 3390807 - DNA, 25 bp, Homo sapien
agaagttagacagtgccttcttgtc

SEQ ID NO: 3390808 - DNA, 25 bp, Homo sapien
acactaaagaagttagacagtgcct

SEQ ID NO: 3390809 - DNA, 25 bp, Homo sapien
aggtttggagaggtaagaatgccgt

SEQ ID NO: 3390810 - DNA, 25 bp, Homo sapien
tatcgttttgaggtttggagaggta

SEQ ID NO: 3390811 - DNA, 25 bp, Homo sapien
tttgaggtttggagaggtaagaatg

SEQ ID NO: 3390812 - DNA, 25 bp, Homo sapien
tgaggtttggagaggtaagaatgcc

SEQ ID NO: 3390813 - DNA, 25 bp, Homo sapien
tttttatctctaatcaaacttcgat

SEQ ID NO: 3390814 - DNA, 25 bp, Homo sapien
tctgcatgcattgtaatgtttttat

SEQ ID NO: 3390815 - DNA, 25 bp, Homo sapien
taatcaaacttcgatatttcttgtc

SEQ ID NO: 3390816 - DNA, 25 bp, Homo sapien
gcatgcattgtaatgtttttatctc

SEQ ID NO: 3390817 - DNA, 25 bp, Homo sapien
tattgatagacagattgacgtactc

SEQ ID NO: 3390818 - DNA, 25 bp, Homo sapien
cagattgacgtactcaaggcttatt

SEQ ID NO: 3390819 - DNA, 25 bp, Homo sapien
tgtgttagcataaggatttcaatca

SEQ ID NO: 3390820 - DNA, 25 bp, Homo sapien
acgtactcaaggcttattctgaagt

SEQ ID NO: 3390821 - DNA, 25 bp, Homo sapien
atacattcaccttcagagtattaac

SEQ ID NO: 3390822 - DNA, 25 bp, Homo sapien
tacattcaccttcagagtattaact

SEQ ID NO: 3390823 - DNA, 25 bp, Homo sapien
acattcaccttcagagtattaactg

SEQ ID NO: 3390824 - DNA, 25 bp, Homo sapien
tatacattcaccttcagagtattaa

SEQ ID NO: 3390825 - DNA, 25 bp, Homo sapien
catgaggatcgactataatctttaa

SEQ ID NO: 3390826 - DNA, 25 bp, Homo sapien
gaggatcgactataatctttaaaca

SEQ ID NO: 3390827 - DNA, 25 bp, Homo sapien
tgaggatcgactataatctttaaac

SEQ ID NO: 3390828 - DNA, 25 bp, Homo sapien
tcatgaggatcgactataatcttta

SEQ ID NO: 3390829 - DNA, 25 bp, Homo sapien
ttgtttcagatgctttcaaaaagtg

SEQ ID NO: 3390830 - DNA, 25 bp, Homo sapien
ggctttgtttcagatgctttcaaaa

SEQ ID NO: 3390831 - DNA, 25 bp, Homo sapien
atggctttgtttcagatgctttcaa

SEQ ID NO: 3390832 - DNA, 25 bp, Homo sapien
ctttgtttcagatgctttcaaaaag

SEQ ID NO: 3390833 - DNA, 25 bp, Homo sapien
cagggtgataataagtaggtcaaca

SEQ ID NO: 3390834 - DNA, 25 bp, Homo sapien
tgataataagtaggtcaacaaaaaa

SEQ ID NO: 3390835 - DNA, 25 bp, Homo sapien
gggtgataataagtaggtcaacaaa

SEQ ID NO: 3390836 - DNA, 25 bp, Homo sapien
ataagtaggtcaacaaaaaacatat

SEQ ID NO: 3390837 - DNA, 25 bp, Homo sapien
aagtcagtgctctgggttgtaactg

SEQ ID NO: 3390838 - DNA, 25 bp, Homo sapien
cattaaagtcagtgctctgggttgt

SEQ ID NO: 3390839 - DNA, 25 bp, Homo sapien
ccattccagcttccaatggtgtcca

SEQ ID NO: 3390840 - DNA, 25 bp, Homo sapien
agaagcattaaagtcagtgctctgg

SEQ ID NO: 3390841 - DNA, 25 bp, Homo sapien
catatgaatggcagtatcaccgccc

SEQ ID NO: 3390842 - DNA, 25 bp, Homo sapien
ttccatgcagggtggaatgatcagg

SEQ ID NO: 3390843 - DNA, 25 bp, Homo sapien
tgcaaaccaggataaggtagacttg

SEQ ID NO: 3390844 - DNA, 25 bp, Homo sapien
caccgcccttattattgcaaaccag

SEQ ID NO: 3390845 - DNA, 25 bp, Homo sapien
gaaatgtggcaagcatcaacctcac

SEQ ID NO: 3390846 - DNA, 25 bp, Homo sapien
tatgcccagggaaagaggcgctatg

SEQ ID NO: 3390847 - DNA, 25 bp, Homo sapien
agaggcgctatgatcagaagcagag

SEQ ID NO: 3390848 - DNA, 25 bp, Homo sapien
cctcacaaagtgacgcagtataaga

SEQ ID NO: 3390849 - DNA, 25 bp, Homo sapien
ctctctcctttatcaaaacactgta

SEQ ID NO: 3390850 - DNA, 25 bp, Homo sapien
gcattctattgtccttcttctgagt

SEQ ID NO: 3390851 - DNA, 25 bp, Homo sapien
tgagtccagacttctttgtgccctc

SEQ ID NO: 3390852 - DNA, 25 bp, Homo sapien
aaacactgtatttctcccagagggc

SEQ ID NO: 3390853 - DNA, 25 bp, Homo sapien
tggcttccggtgaaaacacttaaca

SEQ ID NO: 3390854 - DNA, 25 bp, Homo sapien
atccagccagatgcatatagttttt

SEQ ID NO: 3390855 - DNA, 25 bp, Homo sapien
tcagttcttggcttccggtgaaaac

SEQ ID NO: 3390856 - DNA, 25 bp, Homo sapien
catgtctctggttatctatatttgg

SEQ ID NO: 3390857 - DNA, 25 bp, Homo sapien
gaactgtcctgaataaggaacaggg

SEQ ID NO: 3390858 - DNA, 25 bp, Homo sapien
catccatcagttattgaatgagggc

SEQ ID NO: 3390859 - DNA, 25 bp, Homo sapien
gaagttgcgtggctctccagaactg

SEQ ID NO: 3390860 - DNA, 25 bp, Homo sapien
tcatggagataatgtgaagttgcgt

SEQ ID NO: 3390861 - DNA, 25 bp, Homo sapien
ctaaacaagtgggcagggataaaat

SEQ ID NO: 3390862 - DNA, 25 bp, Homo sapien
taactgtaaaaccaaatatatacca

SEQ ID NO: 3390863 - DNA, 25 bp, Homo sapien
taacagattcttcttattatgaaat

SEQ ID NO: 3390864 - DNA, 25 bp, Homo sapien
actgtaaaaccaaatatataccaat

SEQ ID NO: 3390865 - DNA, 25 bp, Homo sapien
gggttgcctatagagggcgccataa

SEQ ID NO: 3390866 - DNA, 25 bp, Homo sapien
tagaagagctgggttgcctatagag

SEQ ID NO: 3390867 - DNA, 25 bp, Homo sapien
gcagcaacttttaaattagaagagc

SEQ ID NO: 3390868 - DNA, 25 bp, Homo sapien
tatagagggcgccataacagtgcat

SEQ ID NO: 3390869 - DNA, 25 bp, Homo sapien
ggtaagaatagtctaacaaatgatg

SEQ ID NO: 3390870 - DNA, 25 bp, Homo sapien
tggcgccaagaatcaccatggaggt

SEQ ID NO: 3390871 - DNA, 25 bp, Homo sapien
accatggaggtaagaatagtctaac

SEQ ID NO: 3390872 - DNA, 25 bp, Homo sapien
gctggcctttgacaatggcgccaag

SEQ ID NO: 3390873 - DNA, 25 bp, Homo sapien
gctttaattcgtcatccttcaacat

SEQ ID NO: 3390874 - DNA, 25 bp, Homo sapien
actaattcgctttaattcgtcatcc

SEQ ID NO: 3390875 - DNA, 25 bp, Homo sapien
cttgttccatactaattcgctttaa

SEQ ID NO: 3390876 - DNA, 25 bp, Homo sapien
tccatactaattcgctttaattcgt

SEQ ID NO: 3390877 - DNA, 25 bp, Homo sapien
agtatgatccaatattacagaagtc

SEQ ID NO: 3390878 - DNA, 25 bp, Homo sapien
tatgatccaatattacagaagtccc

SEQ ID NO: 3390879 - DNA, 25 bp, Homo sapien
tccaatattacagaagtcccagggt

SEQ ID NO: 3390880 - DNA, 25 bp, Homo sapien
gatccaatattacagaagtcccagg

SEQ ID NO: 3390881 - DNA, 25 bp, Homo sapien
caggtccagtttgggaataagcact

SEQ ID NO: 3390882 - DNA, 25 bp, Homo sapien
tgattgttgtgcctagaacagagca

SEQ ID NO: 3390883 - DNA, 25 bp, Homo sapien
gaacagagcaaaggatgcatgatgc

SEQ ID NO: 3390884 - DNA, 25 bp, Homo sapien
tctggctgaagtcaggtccagtttg

SEQ ID NO: 3390885 - DNA, 25 bp, Homo sapien
ttaaacgtagatttatatatgtccc

SEQ ID NO: 3390886 - DNA, 25 bp, Homo sapien
aattggaagcttttcgtactttgct

SEQ ID NO: 3390887 - DNA, 25 bp, Homo sapien
aaaaaactgattgtcggtgaggatg

SEQ ID NO: 3390888 - DNA, 25 bp, Homo sapien
taggaaacagtctggcaagtcttca

SEQ ID NO: 3390889 - DNA, 25 bp, Homo sapien
ccagttgggtcttgtgaggtctcag

SEQ ID NO: 3390890 - DNA, 25 bp, Homo sapien
gcatagggaatctcacggtgacata

SEQ ID NO: 3390891 - DNA, 25 bp, Homo sapien
cacatgggcctctgcatagggaatc

SEQ ID NO: 3390892 - DNA, 25 bp, Homo sapien
ggcctctgcatagggaatctcacgg

SEQ ID NO: 3390893 - DNA, 25 bp, Homo sapien
gggtccgcaccagtctctagtcact

SEQ ID NO: 3390894 - DNA, 25 bp, Homo sapien
cagtctctagtcactgagaaccttc

SEQ ID NO: 3390895 - DNA, 25 bp, Homo sapien
gagtaacaactttgagggctgtggg

SEQ ID NO: 3390896 - DNA, 25 bp, Homo sapien
gagaaccttccagagtcggggagta

SEQ ID NO: 3390897 - DNA, 25 bp, Homo sapien
ggtctgaggcgagctcaagctttat

SEQ ID NO: 3390898 - DNA, 25 bp, Homo sapien
tcctgagctgtataccactggtctg

SEQ ID NO: 3390899 - DNA, 25 bp, Homo sapien
gctgtataccactggtctgaggcga

SEQ ID NO: 3390900 - DNA, 25 bp, Homo sapien
tgatggttgtgagagagattttttc

SEQ ID NO: 3390901 - DNA, 25 bp, Homo sapien
agtagatggtgcttaaatataatgg

SEQ ID NO: 3390902 - DNA, 25 bp, Homo sapien
ccctcagtggtctgaaagtgtgtgc

SEQ ID NO: 3390903 - DNA, 25 bp, Homo sapien
gatggtgcttaaatataatggccag

SEQ ID NO: 3390904 - DNA, 25 bp, Homo sapien
gtgcttaaatataatggccagtagg

SEQ ID NO: 3390905 - DNA, 25 bp, Homo sapien
ggttttattgatattatcattggta

SEQ ID NO: 3390906 - DNA, 25 bp, Homo sapien
tattgatattatcattggtattgat

SEQ ID NO: 3390907 - DNA, 25 bp, Homo sapien
tatcattggtattgattttgtccat

SEQ ID NO: 3390908 - DNA, 25 bp, Homo sapien
gatattatcattggtattgattttg

SEQ ID NO: 3390909 - DNA, 25 bp, Homo sapien
caagggctgctgatcaagaggacaa

SEQ ID NO: 3390910 - DNA, 25 bp, Homo sapien
cttgatgttacacttgggagcctct

SEQ ID NO: 3390911 - DNA, 25 bp, Homo sapien
caaggtagggctgttgttcgacaaa

SEQ ID NO: 3390912 - DNA, 25 bp, Homo sapien
ttagggatccttgtgtccagagaca

SEQ ID NO: 3390913 - DNA, 25 bp, Homo sapien
tcatcaagcagttgaatcagttcat

SEQ ID NO: 3390914 - DNA, 25 bp, Homo sapien
gaagggaaagatttgtgcgtagata

SEQ ID NO: 3390915 - DNA, 25 bp, Homo sapien
aatggatgcaagctgtgatgacccg

SEQ ID NO: 3390916 - DNA, 25 bp, Homo sapien
aagctgtgatgacccgcactggcac

SEQ ID NO: 3390917 - DNA, 25 bp, Homo sapien
gcactggcactcacatacaaatgca

SEQ ID NO: 3390918 - DNA, 25 bp, Homo sapien
acttgaaatggatgcaagctgtgat

SEQ ID NO: 3390919 - DNA, 25 bp, Homo sapien
ggaccatagacattgtaaagtttcg

SEQ ID NO: 3390920 - DNA, 25 bp, Homo sapien
ccttgatctctgcacggaccataga

SEQ ID NO: 3390921 - DNA, 25 bp, Homo sapien
tacccaaaggcttgtggagttgagg

SEQ ID NO: 3390922 - DNA, 25 bp, Homo sapien
gaaccacagggaaagatgtctctga

SEQ ID NO: 3390923 - DNA, 25 bp, Homo sapien
ttggtactgccagttgtgttctatg

SEQ ID NO: 3390924 - DNA, 25 bp, Homo sapien
ggtactgccagttgtgttctatgat

SEQ ID NO: 3390925 - DNA, 25 bp, Homo sapien
tactgccagttgtgttctatgatgg

SEQ ID NO: 3390926 - DNA, 25 bp, Homo sapien
gccagttgtgttctatgatggtcat

SEQ ID NO: 3390927 - DNA, 25 bp, Homo sapien
atacatttaattcaggaaccaaaag

SEQ ID NO: 3390928 - DNA, 25 bp, Homo sapien
cgtgagacctcttgagttcagtacc

SEQ ID NO: 3390929 - DNA, 25 bp, Homo sapien
ggtccaagtgcacgtgagacctctt

SEQ ID NO: 3390930 - DNA, 25 bp, Homo sapien
tgagttcagtacctcatgttctgct

SEQ ID NO: 3390931 - DNA, 25 bp, Homo sapien
ttgtcatgtaaatcaggtccaagtg

SEQ ID NO: 3390932 - DNA, 25 bp, Homo sapien
tcatgttactgaatcaggccagaac

SEQ ID NO: 3390933 - DNA, 25 bp, Homo sapien
ctcccaataccccacataagattgt

SEQ ID NO: 3390934 - DNA, 25 bp, Homo sapien
taccccacataagattgtatcatgt

SEQ ID NO: 3390935 - DNA, 25 bp, Homo sapien
ttgtatcatgttactgaatcaggcc

SEQ ID NO: 3390936 - DNA, 25 bp, Homo sapien
cacaggtagagtttaggtttttatg

SEQ ID NO: 3390937 - DNA, 25 bp, Homo sapien
gtttctgttctgtacacaggtagag

SEQ ID NO: 3390938 - DNA, 25 bp, Homo sapien
cagtatagttgttttttcgctctca

SEQ ID NO: 3390939 - DNA, 25 bp, Homo sapien
tggaagctaaacttgtcgagcaaaa

SEQ ID NO: 3390940 - DNA, 25 bp, Homo sapien
tggcaacagtttccgtggtggattt

SEQ ID NO: 3390941 - DNA, 25 bp, Homo sapien
ttgcaaaggtgagagtgactctcct

SEQ ID NO: 3390942 - DNA, 25 bp, Homo sapien
aaaagtcctgcatgtatggtccaat

SEQ ID NO: 3390943 - DNA, 25 bp, Homo sapien
tacatccccgacaaatggcaacagt

SEQ ID NO: 3390944 - DNA, 25 bp, Homo sapien
gaccagtaccatttccatggcctag

SEQ ID NO: 3390945 - DNA, 25 bp, Homo sapien
tccttataggtggtgcaagtctcag

SEQ ID NO: 3390946 - DNA, 25 bp, Homo sapien
taatcatgatgtagtcttacctagg

SEQ ID NO: 3390947 - DNA, 25 bp, Homo sapien
tcatgagcacggaagtagagcaaac

SEQ ID NO: 3390948 - DNA, 25 bp, Homo sapien
ctacttttgtagcattatcatccat

SEQ ID NO: 3390949 - DNA, 25 bp, Homo sapien
catctaccagtcacttgtcctgctg

SEQ ID NO: 3390950 - DNA, 25 bp, Homo sapien
cacttgtcctgctggcagtcctgct

SEQ ID NO: 3390951 - DNA, 25 bp, Homo sapien
ggcagtcctgctgaactctccttct

SEQ ID NO: 3390952 - DNA, 25 bp, Homo sapien
caatctccatctaccagtcacttgt

SEQ ID NO: 3390953 - DNA, 25 bp, Homo sapien
cccaagtacaatgtcggcattgctt

SEQ ID NO: 3390954 - DNA, 25 bp, Homo sapien
caagtacaatgtcggcattgcttca

SEQ ID NO: 3390955 - DNA, 25 bp, Homo sapien
aagtacaatgtcggcattgcttcat

SEQ ID NO: 3390956 - DNA, 25 bp, Homo sapien
ccaagtacaatgtcggcattgcttc

SEQ ID NO: 3390957 - DNA, 25 bp, Homo sapien
tttcttgttgctaccagaggcacaa

SEQ ID NO: 3390958 - DNA, 25 bp, Homo sapien
tctggttcacgtgacacggtgtaca

SEQ ID NO: 3390959 - DNA, 25 bp, Homo sapien
tgctaccagaggcacaattgtgagc

SEQ ID NO: 3390960 - DNA, 25 bp, Homo sapien
ttgtgagcagagttaggccttgatc

SEQ ID NO: 3390961 - DNA, 25 bp, Homo sapien
gaaatgacaaccagagagcgcagct

SEQ ID NO: 3390962 - DNA, 25 bp, Homo sapien
tatgagctccttagaagtcagggca

SEQ ID NO: 3390963 - DNA, 25 bp, Homo sapien
gagcgcagcttttgctatgagctcc

SEQ ID NO: 3390964 - DNA, 25 bp, Homo sapien
cagtgatgtcatggcgtctaggtcc

SEQ ID NO: 3390965 - DNA, 25 bp, Homo sapien
taagaggagccagcatatgaataga

SEQ ID NO: 3390966 - DNA, 25 bp, Homo sapien
ggcactccagacactgtcacattgg

SEQ ID NO: 3390967 - DNA, 25 bp, Homo sapien
gagagagcatgtggtcttccaccca

SEQ ID NO: 3390968 - DNA, 25 bp, Homo sapien
tgtttcctgcccaatctaatcggag

SEQ ID NO: 3390969 - DNA, 25 bp, Homo sapien
gaagacatcaaactctgtgtcacag

SEQ ID NO: 3390970 - DNA, 25 bp, Homo sapien
aaactctgtgtcacagaatatagga

SEQ ID NO: 3390971 - DNA, 25 bp, Homo sapien
gacatcaaactctgtgtcacagaat

SEQ ID NO: 3390972 - DNA, 25 bp, Homo sapien
caaactctgtgtcacagaatatagg

SEQ ID NO: 3390973 - DNA, 25 bp, Homo sapien
tgagcgatggatcctgtttatcctg

SEQ ID NO: 3390974 - DNA, 25 bp, Homo sapien
tatgagcgatggatcctgtttatcc

SEQ ID NO: 3390975 - DNA, 25 bp, Homo sapien
caaaatatgagcgatggatcctgtt

SEQ ID NO: 3390976 - DNA, 25 bp, Homo sapien
gcgatggatcctgtttatcctgtgt

SEQ ID NO: 3390977 - DNA, 25 bp, Homo sapien
aacgttatccgcagtttctcttgat

SEQ ID NO: 3390978 - DNA, 25 bp, Homo sapien
cttgattaaacagttgtcttagttg

SEQ ID NO: 3390979 - DNA, 25 bp, Homo sapien
tcctgtgccgaaacgttatccgcag

SEQ ID NO: 3390980 - DNA, 25 bp, Homo sapien
tgtcagtgttgacattcatcctgtg

SEQ ID NO: 3390981 - DNA, 25 bp, Homo sapien
tattgaaatttatcctagccccatt

SEQ ID NO: 3390982 - DNA, 25 bp, Homo sapien
tagccccattgtatactaataagtg

SEQ ID NO: 3390983 - DNA, 25 bp, Homo sapien
gcttccctggctgtactatggctat

SEQ ID NO: 3390984 - DNA, 25 bp, Homo sapien
ttgtttgctgaacccgacagttaag

SEQ ID NO: 3390985 - DNA, 25 bp, Homo sapien
gaattccatggtaactcaagctcag

SEQ ID NO: 3390986 - DNA, 25 bp, Homo sapien
gatactgctcgtttgaaggaaaaag

SEQ ID NO: 3390987 - DNA, 25 bp, Homo sapien
tccacaaaggttgtagaggcatctt

SEQ ID NO: 3390988 - DNA, 25 bp, Homo sapien
taaataaaacctctcgcccatgatc

SEQ ID NO: 3390989 - DNA, 25 bp, Homo sapien
tttcataggaactagacccatgcta

SEQ ID NO: 3390990 - DNA, 25 bp, Homo sapien
aggctggtcattcttacgtactgac

SEQ ID NO: 3390991 - DNA, 25 bp, Homo sapien
acgtactgactctgactcaaccaca

SEQ ID NO: 3390992 - DNA, 25 bp, Homo sapien
tgctacatgcaccttcaagaagtct

SEQ ID NO: 3390993 - DNA, 25 bp, Homo sapien
ttggaaattcggatataattgaggg

SEQ ID NO: 3390994 - DNA, 25 bp, Homo sapien
ggaagaagtcatgtgaatgatggca

SEQ ID NO: 3390995 - DNA, 25 bp, Homo sapien
gaagaagtcatgtgaatgatggcat

SEQ ID NO: 3390996 - DNA, 25 bp, Homo sapien
atggcattggaaattcggatataat

SEQ ID NO: 3390997 - DNA, 25 bp, Homo sapien
ttctccattctgtagttcagaaaat

SEQ ID NO: 3390998 - DNA, 25 bp, Homo sapien
gagtgtggcattccaggtacaaatg

SEQ ID NO: 3390999 - DNA, 25 bp, Homo sapien
agtgtggcattccaggtacaaatgc

SEQ ID NO: 3391000 - DNA, 25 bp, Homo sapien
gtgtggcattccaggtacaaatgca

SEQ ID NO: 3391001 - DNA, 25 bp, Homo sapien
gataaccgggtgatacttctgcctc

SEQ ID NO: 3391002 - DNA, 25 bp, Homo sapien
gcaggtcctgataaccgggtgatac

SEQ ID NO: 3391003 - DNA, 25 bp, Homo sapien
tccagcatcgtatctcagccaatga

SEQ ID NO: 3391004 - DNA, 25 bp, Homo sapien
acatccagcatcgtatctcagccaa

SEQ ID NO: 3391005 - DNA, 25 bp, Homo sapien
cactgtagaacttgtaacgcttctc

SEQ ID NO: 3391006 - DNA, 25 bp, Homo sapien
tgcctccactgtagaacttgtaacg

SEQ ID NO: 3391007 - DNA, 25 bp, Homo sapien
gattatgcctccactgtagaacttg

SEQ ID NO: 3391008 - DNA, 25 bp, Homo sapien
ccgtgattatgcctccactgtagaa

SEQ ID NO: 3391009 - DNA, 25 bp, Homo sapien
caaaacatgagttggaagcgtgctc

SEQ ID NO: 3391010 - DNA, 25 bp, Homo sapien
gaatcaccagagagttcagtcaaac

SEQ ID NO: 3391011 - DNA, 25 bp, Homo sapien
tgtctgaagccttcaggagaaaaat

SEQ ID NO: 3391012 - DNA, 25 bp, Homo sapien
gaagttccagttgactagaatcacc

SEQ ID NO: 3391013 - DNA, 25 bp, Homo sapien
tctaatggaatggatgtgctaactc

SEQ ID NO: 3391014 - DNA, 25 bp, Homo sapien
gaatctaacggcataaagacaatag

SEQ ID NO: 3391015 - DNA, 25 bp, Homo sapien
taactctgcacaaagacaatagttg

SEQ ID NO: 3391016 - DNA, 25 bp, Homo sapien
ggatgtgctaactctgacagaaatg

SEQ ID NO: 3391017 - DNA, 25 bp, Homo sapien
tgaggcatagccagaatagcaaggt

SEQ ID NO: 3391018 - DNA, 25 bp, Homo sapien
gagacatcctattgggtacagaggc

SEQ ID NO: 3391019 - DNA, 25 bp, Homo sapien
ggaggaagcatttcaagggatttca

SEQ ID NO: 3391020 - DNA, 25 bp, Homo sapien
ggaagtgtcttctaggctgttcata

SEQ ID NO: 3391021 - DNA, 25 bp, Homo sapien
gaccatggtgatgccactatcatca

SEQ ID NO: 3391022 - DNA, 25 bp, Homo sapien
acagaaaccaaggtcctcgtgcagc

SEQ ID NO: 3391023 - DNA, 25 bp, Homo sapien
ctcattaagaccatggtgatgccac

SEQ ID NO: 3391024 - DNA, 25 bp, Homo sapien
tcaacaccctagtagccaacagaaa

SEQ ID NO: 3391025 - DNA, 25 bp, Homo sapien
tcacataaggtactgatactgactt

SEQ ID NO: 3391026 - DNA, 25 bp, Homo sapien
atctatcacataaggtactgatact

SEQ ID NO: 3391027 - DNA, 25 bp, Homo sapien
tctatcacataaggtactgatactg

SEQ ID NO: 3391028 - DNA, 25 bp, Homo sapien
tatcacataaggtactgatactgac

SEQ ID NO: 3391029 - DNA, 25 bp, Homo sapien
ggctcccaaaacctgaggaagatct

SEQ ID NO: 3391030 - DNA, 25 bp, Homo sapien
gctcccaaaacctgaggaagatctt

SEQ ID NO: 3391031 - DNA, 25 bp, Homo sapien
gctctggaataatccacatgttgta

SEQ ID NO: 3391032 - DNA, 25 bp, Homo sapien
catcctctaccagctctggaataat

SEQ ID NO: 3391033 - DNA, 25 bp, Homo sapien
taccagctctggaataatccacatg

SEQ ID NO: 3391034 - DNA, 25 bp, Homo sapien
tctaccagctctggaataatccaca

SEQ ID NO: 3391035 - DNA, 25 bp, Homo sapien
gatctcacgaatagactaattgctt

SEQ ID NO: 3391036 - DNA, 25 bp, Homo sapien
aacccccgaggtgatagtgtctgga

SEQ ID NO: 3391037 - DNA, 25 bp, Homo sapien
gagattcaagaaagacttctcactt

SEQ ID NO: 3391038 - DNA, 25 bp, Homo sapien
gggcagagatctcacgaatagacta

SEQ ID NO: 3391039 - DNA, 25 bp, Homo sapien
taccgagaggagcaatggtgatttt

SEQ ID NO: 3391040 - DNA, 25 bp, Homo sapien
tgctgtgacctattgtacggggcct

SEQ ID NO: 3391041 - DNA, 25 bp, Homo sapien
gccctgtgcatccagtcactgaact

SEQ ID NO: 3391042 - DNA, 25 bp, Homo sapien
ggagcacatccttggttaccgagag

SEQ ID NO: 3391043 - DNA, 25 bp, Homo sapien
agcatttactaataccttgatcatt

SEQ ID NO: 3391044 - DNA, 25 bp, Homo sapien
cagcatttactaataccttgatcat

SEQ ID NO: 3391045 - DNA, 25 bp, Homo sapien
gcatttactaataccttgatcattt

SEQ ID NO: 3391046 - DNA, 25 bp, Homo sapien
catttactaataccttgatcatttc

SEQ ID NO: 3391047 - DNA, 25 bp, Homo sapien
gaagcgttaaagaagccctctgctt

SEQ ID NO: 3391048 - DNA, 25 bp, Homo sapien
attgtgaagcgttaaagaagccctc

SEQ ID NO: 3391049 - DNA, 25 bp, Homo sapien
tgtgaagcgttaaagaagccctctg

SEQ ID NO: 3391050 - DNA, 25 bp, Homo sapien
gtgaagcgttaaagaagccctctgc

SEQ ID NO: 3391051 - DNA, 25 bp, Homo sapien
gaatgctgacctgcttattttcata

SEQ ID NO: 3391052 - DNA, 25 bp, Homo sapien
tcatttcaggatttagaatgctgac

SEQ ID NO: 3391053 - DNA, 25 bp, Homo sapien
tattttcatatggaagacaataagc

SEQ ID NO: 3391054 - DNA, 25 bp, Homo sapien
ccctgtagattgagctaacggccat

SEQ ID NO: 3391055 - DNA, 25 bp, Homo sapien
ttcctttgctcactctgatcttttt

SEQ ID NO: 3391056 - DNA, 25 bp, Homo sapien
tcactctgatctttttcataggcat

SEQ ID NO: 3391057 - DNA, 25 bp, Homo sapien
tttgctcactctgatctttttcata

SEQ ID NO: 3391058 - DNA, 25 bp, Homo sapien
ctcactctgatctttttcataggca

SEQ ID NO: 3391059 - DNA, 25 bp, Homo sapien
tgagaaaagcacaacttttgcagac

SEQ ID NO: 3391060 - DNA, 25 bp, Homo sapien
acacactcttctcaagctcacgatg

SEQ ID NO: 3391061 - DNA, 25 bp, Homo sapien
tctcaagctcacgatgagaaaagca

SEQ ID NO: 3391062 - DNA, 25 bp, Homo sapien
gctcacgatgagaaaagcacaactt

SEQ ID NO: 3391063 - DNA, 25 bp, Homo sapien
ctttgagtatgaagaaacttctgat

SEQ ID NO: 3391064 - DNA, 25 bp, Homo sapien
tttgagtatgaagaaacttctgata

SEQ ID NO: 3391065 - DNA, 25 bp, Homo sapien
accacctttctttgagtatgaagaa

SEQ ID NO: 3391066 - DNA, 25 bp, Homo sapien
cacctttctttgagtatgaagaaac

SEQ ID NO: 3391067 - DNA, 25 bp, Homo sapien
ccttttcatgtactctcacactttg

SEQ ID NO: 3391068 - DNA, 25 bp, Homo sapien
ttcatgtactctcacactttgctca

SEQ ID NO: 3391069 - DNA, 25 bp, Homo sapien
cttctaattttgaatccaatgttct

SEQ ID NO: 3391070 - DNA, 25 bp, Homo sapien
taattttgaatccaatgttcttttc

SEQ ID NO: 3391071 - DNA, 25 bp, Homo sapien
actgagactagctacgacagtgtgc

SEQ ID NO: 3391072 - DNA, 25 bp, Homo sapien
ggtgaacctgaccttgagtctgaac

SEQ ID NO: 3391073 - DNA, 25 bp, Homo sapien
aaaacagcctggattgtaggaagca

SEQ ID NO: 3391074 - DNA, 25 bp, Homo sapien
attgtctctggccaactaggtgtag

SEQ ID NO: 3391075 - DNA, 25 bp, Homo sapien
cttagcggctactctgggaacaacc

SEQ ID NO: 3391076 - DNA, 25 bp, Homo sapien
caaagttggtctgtgctctgagagg

SEQ ID NO: 3391077 - DNA, 25 bp, Homo sapien
ggctgaaaaaacactacccacgatg

SEQ ID NO: 3391078 - DNA, 25 bp, Homo sapien
aaacctctagagctgatactgatgc

SEQ ID NO: 3391079 - DNA, 25 bp, Homo sapien
gtcccagccggcttagggagctgcc

SEQ ID NO: 3391080 - DNA, 25 bp, Homo sapien
cagtagccagactctagacgctcca

SEQ ID NO: 3391081 - DNA, 25 bp, Homo sapien
gtccggagcctcagcgagcgcactg

SEQ ID NO: 3391082 - DNA, 25 bp, Homo sapien
aatccgacacctgctgtagccggca

SEQ ID NO: 3391083 - DNA, 25 bp, Homo sapien
aaggactgaatggagcctgaatggt

SEQ ID NO: 3391084 - DNA, 25 bp, Homo sapien
actgaatggagcctgaatggtggac

SEQ ID NO: 3391085 - DNA, 25 bp, Homo sapien
gaatggagcctgaatggtggaccat

SEQ ID NO: 3391086 - DNA, 25 bp, Homo sapien
ttaaaggactgaatggagcctgaat

SEQ ID NO: 3391087 - DNA, 25 bp, Homo sapien
cttcacatctggtaagagctatgac

SEQ ID NO: 3391088 - DNA, 25 bp, Homo sapien
cgtctgagtgggtgctttcttcaca

SEQ ID NO: 3391089 - DNA, 25 bp, Homo sapien
gagctatgactaattgcaagctgtt

SEQ ID NO: 3391090 - DNA, 25 bp, Homo sapien
ctaaataggcataagtacgtctgag

SEQ ID NO: 3391091 - DNA, 25 bp, Homo sapien
cacccacgtacaatgatttcttatc

SEQ ID NO: 3391092 - DNA, 25 bp, Homo sapien
gaattgaacgtatcttaaagtccag

SEQ ID NO: 3391093 - DNA, 25 bp, Homo sapien
tcttctagactgtaggttattccct

SEQ ID NO: 3391094 - DNA, 25 bp, Homo sapien
tgttgaaaggtttatggatgtgtat

SEQ ID NO: 3391095 - DNA, 25 bp, Homo sapien
gaccagcaaaagcaagaggttccat

SEQ ID NO: 3391096 - DNA, 25 bp, Homo sapien
gatactgatcactatttcccattga

SEQ ID NO: 3391097 - DNA, 25 bp, Homo sapien
cccagaccagcaaaagcaagaggtt

SEQ ID NO: 3391098 - DNA, 25 bp, Homo sapien
gttaactcgagttgttgtgcaacag

SEQ ID NO: 3391099 - DNA, 25 bp, Homo sapien
gcagggatctccgagacggttttaa

SEQ ID NO: 3391100 - DNA, 25 bp, Homo sapien
caaggcagggatctccgagacggtt

SEQ ID NO: 3391101 - DNA, 25 bp, Homo sapien
ggcaaggcagggatctccgagacgg

SEQ ID NO: 3391102 - DNA, 25 bp, Homo sapien
gttatctcactcttgcttatattca

SEQ ID NO: 3391103 - DNA, 25 bp, Homo sapien
gattaaggttatagatgtgggagcc

SEQ ID NO: 3391104 - DNA, 25 bp, Homo sapien
cactctcggttgactggaagaggga

SEQ ID NO: 3391105 - DNA, 25 bp, Homo sapien
aagagggaagtagactggctcaagc

SEQ ID NO: 3391106 - DNA, 25 bp, Homo sapien
ttcactctcggttgactggaagagg

SEQ ID NO: 3391107 - DNA, 25 bp, Homo sapien
gagtcgtttttattctcctcagtat

SEQ ID NO: 3391108 - DNA, 25 bp, Homo sapien
aaacaaaaatcgctgaggtcagcaa

SEQ ID NO: 3391109 - DNA, 25 bp, Homo sapien
tgaacatctcagcacagagtcgttt

SEQ ID NO: 3391110 - DNA, 25 bp, Homo sapien
cgctgaggtcagcaaatgaacatct

SEQ ID NO: 3391111 - DNA, 25 bp, Homo sapien
taagtagcgtgttctgattcatccg

SEQ ID NO: 3391112 - DNA, 25 bp, Homo sapien
tcatccgtgtaatccttatcttttc

SEQ ID NO: 3391113 - DNA, 25 bp, Homo sapien
cgagatcggtcataagtagcgtgtt

SEQ ID NO: 3391114 - DNA, 25 bp, Homo sapien
taacaaagtcattaatgagacgaga

SEQ ID NO: 3391115 - DNA, 25 bp, Homo sapien
cctgagctaggatttgtcgtgaaaa

SEQ ID NO: 3391116 - DNA, 25 bp, Homo sapien
gtcaagcagacaaccagaagcatat

SEQ ID NO: 3391117 - DNA, 25 bp, Homo sapien
tactaacacactggtgggtgactaa

SEQ ID NO: 3391118 - DNA, 25 bp, Homo sapien
gaaatctggcacaattatccctgca

SEQ ID NO: 3391119 - DNA, 25 bp, Homo sapien
aatattcatgtccagattttccttg

SEQ ID NO: 3391120 - DNA, 25 bp, Homo sapien
gatacccaatatcctttcaaaggtg

SEQ ID NO: 3391121 - DNA, 25 bp, Homo sapien
gcaatatctgtagttaatttgggca

SEQ ID NO: 3391122 - DNA, 25 bp, Homo sapien
catcgtaagtgacagtggtggaccc

SEQ ID NO: 3391123 - DNA, 25 bp, Homo sapien
ggggtccagccagtgaatggcagtc

SEQ ID NO: 3391124 - DNA, 25 bp, Homo sapien
tcaggtggcagtccctagggcatct

SEQ ID NO: 3391125 - DNA, 25 bp, Homo sapien
gccagtgaatggcagtccctgaggg

SEQ ID NO: 3391126 - DNA, 25 bp, Homo sapien
ccagccagtgaatggcagtccctga

SEQ ID NO: 3391127 - DNA, 25 bp, Homo sapien
catggcaaaacaaggatgtaacaag

SEQ ID NO: 3391128 - DNA, 25 bp, Homo sapien
gatgctgccagtatctgctcccacc

SEQ ID NO: 3391129 - DNA, 25 bp, Homo sapien
tgctcccacccacagtactcctttt

SEQ ID NO: 3391130 - DNA, 25 bp, Homo sapien
agtgtggatggctctcagatgctgc

SEQ ID NO: 3391131 - DNA, 25 bp, Homo sapien
tccaatttatggtgtcctgcaagtc

SEQ ID NO: 3391132 - DNA, 25 bp, Homo sapien
gagcttgttgggtaaaggccctgat

SEQ ID NO: 3391133 - DNA, 25 bp, Homo sapien
gattcctggcctatgcttaaaatgt

SEQ ID NO: 3391134 - DNA, 25 bp, Homo sapien
catgcatggctctgtacaagtagaa

SEQ ID NO: 3391135 - DNA, 25 bp, Homo sapien
aggtcatagttctgcctcagcttgc

SEQ ID NO: 3391136 - DNA, 25 bp, Homo sapien
gaagaggtcatagttctgcctcagc

SEQ ID NO: 3391137 - DNA, 25 bp, Homo sapien
tcagaagaggtcatagttctgcctc

SEQ ID NO: 3391138 - DNA, 25 bp, Homo sapien
ggtcatagttctgcctcagcttgcc

SEQ ID NO: 3391139 - DNA, 25 bp, Homo sapien
caatatggactgaaaatggaacgct

SEQ ID NO: 3391140 - DNA, 25 bp, Homo sapien
tgcggtaaacggaatcaactgagtc

SEQ ID NO: 3391141 - DNA, 25 bp, Homo sapien
agtatactactctcccagtgcggta

SEQ ID NO: 3391142 - DNA, 25 bp, Homo sapien
taatcccaggtgaaggcaaatgttg

SEQ ID NO: 3391143 - DNA, 25 bp, Homo sapien
tagtttgttctcaacatgacagccg

SEQ ID NO: 3391144 - DNA, 25 bp, Homo sapien
tgacagccgagttatcccaatgatt

SEQ ID NO: 3391145 - DNA, 25 bp, Homo sapien
ttttaaacatctagtccacagccag

SEQ ID NO: 3391146 - DNA, 25 bp, Homo sapien
tagggttaacctcaagaatactggc

SEQ ID NO: 3391147 - DNA, 25 bp, Homo sapien
ctttctataaaccaagatgtaatca

SEQ ID NO: 3391148 - DNA, 25 bp, Homo sapien
ggtccactggatgctatgtaattca

SEQ ID NO: 3391149 - DNA, 25 bp, Homo sapien
cagaggtccactggatgctatgtaa

SEQ ID NO: 3391150 - DNA, 25 bp, Homo sapien
atctttgaacagaggtccactggat

SEQ ID NO: 3391151 - DNA, 25 bp, Homo sapien
tctgcatacttgcacagcgtgtccc

SEQ ID NO: 3391152 - DNA, 25 bp, Homo sapien
tgatatcggggcttgcaatagctgg

SEQ ID NO: 3391153 - DNA, 25 bp, Homo sapien
taataaacatgatatcggggcttgc

SEQ ID NO: 3391154 - DNA, 25 bp, Homo sapien
tgcacagcgtgtcccatggaatgtg

SEQ ID NO: 3391155 - DNA, 25 bp, Homo sapien
tttgctcctcccgtcagtgtaatag

SEQ ID NO: 3391156 - DNA, 25 bp, Homo sapien
tgatttgctcctcccgtcagtgtaa

SEQ ID NO: 3391157 - DNA, 25 bp, Homo sapien
cccgtcagtgtaatagcattttttc

SEQ ID NO: 3391158 - DNA, 25 bp, Homo sapien
cctcccgtcagtgtaatagcatttt

SEQ ID NO: 3391159 - DNA, 25 bp, Homo sapien
tagcagtctgactcctctaggtctg

SEQ ID NO: 3391160 - DNA, 25 bp, Homo sapien
tggtgaatccgtgcacggctgaagg

SEQ ID NO: 3391161 - DNA, 25 bp, Homo sapien
cacggctgaaggggccagtatagca

SEQ ID NO: 3391162 - DNA, 25 bp, Homo sapien
cagtatagcagtctgactcctctag

SEQ ID NO: 3391163 - DNA, 25 bp, Homo sapien
agcatgcttctagttacacctccaa

SEQ ID NO: 3391164 - DNA, 25 bp, Homo sapien
gcttctagttacacctccaagaata

SEQ ID NO: 3391165 - DNA, 25 bp, Homo sapien
ctgccactacaatatcactggaatt

SEQ ID NO: 3391166 - DNA, 25 bp, Homo sapien
ctagttacacctccaagaataagta

SEQ ID NO: 3391167 - DNA, 25 bp, Homo sapien
ccacttttgatattccattttcata

SEQ ID NO: 3391168 - DNA, 25 bp, Homo sapien
tgcgttccagcatgtgatagactat

SEQ ID NO: 3391169 - DNA, 25 bp, Homo sapien
cattgctgaagaaggtgtctttatt

SEQ ID NO: 3391170 - DNA, 25 bp, Homo sapien
gatagactattctgcttcgagtagc

SEQ ID NO: 3391171 - DNA, 25 bp, Homo sapien
gagccattgtttataagtttacgga

SEQ ID NO: 3391172 - DNA, 25 bp, Homo sapien
atgagccattgtttataagtttacg

SEQ ID NO: 3391173 - DNA, 25 bp, Homo sapien
ctcatgtggtggaaacgctgctatg

SEQ ID NO: 3391174 - DNA, 25 bp, Homo sapien
gaaacgctgctatgtatgagccatt

SEQ ID NO: 3391175 - DNA, 25 bp, Homo sapien
gcaaacaacaggaccaagcattgag

SEQ ID NO: 3391176 - DNA, 25 bp, Homo sapien
gaccaagcattgagcatgaaaacct

SEQ ID NO: 3391177 - DNA, 25 bp, Homo sapien
tacttgcagactgaatcctcctggg

SEQ ID NO: 3391178 - DNA, 25 bp, Homo sapien
cttgtttataaagcggaaactgtat

SEQ ID NO: 3391179 - DNA, 25 bp, Homo sapien
tccagaggctgatgcttataccaca

SEQ ID NO: 3391180 - DNA, 25 bp, Homo sapien
cgtgcccagcgctcatataatagat

SEQ ID NO: 3391181 - DNA, 25 bp, Homo sapien
tagatgtctgttattctgaggtcca

SEQ ID NO: 3391182 - DNA, 25 bp, Homo sapien
catgggttttaatgggctggctact

SEQ ID NO: 3391183 - DNA, 25 bp, Homo sapien
tccatagaagaaaacgcacaaacca

SEQ ID NO: 3391184 - DNA, 25 bp, Homo sapien
caaagtatagtccaatcttctcacc

SEQ ID NO: 3391185 - DNA, 25 bp, Homo sapien
tagtccaatcttctcaccaaagtat

SEQ ID NO: 3391186 - DNA, 25 bp, Homo sapien
tcaacattccagtataccatcccag

SEQ ID NO: 3391187 - DNA, 25 bp, Homo sapien
aacatgatcaatagagccacatctg

SEQ ID NO: 3391188 - DNA, 25 bp, Homo sapien
catgatcaatagagccacatctgca

SEQ ID NO: 3391189 - DNA, 25 bp, Homo sapien
gaaacatgatcaatagagccacatc

SEQ ID NO: 3391190 - DNA, 25 bp, Homo sapien
cataacttgtagaaacatgatcaat

SEQ ID NO: 3391191 - DNA, 25 bp, Homo sapien
ttcagtggctttacaaatttcttgg

SEQ ID NO: 3391192 - DNA, 25 bp, Homo sapien
aaagacttcagtggctttacaaatt

SEQ ID NO: 3391193 - DNA, 25 bp, Homo sapien
acttcagtggctttacaaatttctt

SEQ ID NO: 3391194 - DNA, 25 bp, Homo sapien
agacttcagtggctttacaaatttc

SEQ ID NO: 3391195 - DNA, 25 bp, Homo sapien
gcatagatacagctgtcgttgagtc

SEQ ID NO: 3391196 - DNA, 25 bp, Homo sapien
catagatacagctgtcgttgagtct

SEQ ID NO: 3391197 - DNA, 25 bp, Homo sapien
tggcatagatacagctgtcgttgag

SEQ ID NO: 3391198 - DNA, 25 bp, Homo sapien
cttggcatagatacagctgtcgttg

SEQ ID NO: 3391199 - DNA, 25 bp, Homo sapien
ggagaatgtgagggtccacactcac

SEQ ID NO: 3391200 - DNA, 25 bp, Homo sapien
agactgtccctccattatcgaacaa

SEQ ID NO: 3391201 - DNA, 25 bp, Homo sapien
tgtccctccattatcgaacaaatat

SEQ ID NO: 3391202 - DNA, 25 bp, Homo sapien
tccctccattatcgaacaaatatgt

SEQ ID NO: 3391203 - DNA, 25 bp, Homo sapien
ctccattatcgaacaaatatgtcac

SEQ ID NO: 3391204 - DNA, 25 bp, Homo sapien
caaagaaggcgaaagtcgtgttcat

SEQ ID NO: 3391205 - DNA, 25 bp, Homo sapien
acaaagaaggcgaaagtcgtgttca

SEQ ID NO: 3391206 - DNA, 25 bp, Homo sapien
ccagtaacaaagaaggcgaaagtcg

SEQ ID NO: 3391207 - DNA, 25 bp, Homo sapien
agtaacaaagaaggcgaaagtcgtg

SEQ ID NO: 3391208 - DNA, 25 bp, Homo sapien
catattgagctgaacggcccttggc

SEQ ID NO: 3391209 - DNA, 25 bp, Homo sapien
tggcgccatccccaaacgctgatgt

SEQ ID NO: 3391210 - DNA, 25 bp, Homo sapien
tgatgtgcggaagatcccagtttca

SEQ ID NO: 3391211 - DNA, 25 bp, Homo sapien
caaacgctgatgtgcggaagatccc

SEQ ID NO: 3391212 - DNA, 25 bp, Homo sapien
cgtttctcgctcagcagttgaaaac

SEQ ID NO: 3391213 - DNA, 25 bp, Homo sapien
gaaaacctatctccttgtgcagcag

SEQ ID NO: 3391214 - DNA, 25 bp, Homo sapien
ttagctaaagtttcgtttctcgctc

SEQ ID NO: 3391215 - DNA, 25 bp, Homo sapien
tctccttgtgcagcagaaaccaagt

SEQ ID NO: 3391216 - DNA, 25 bp, Homo sapien
taactctcgtgcttagcagtagtgg

SEQ ID NO: 3391217 - DNA, 25 bp, Homo sapien
caacctttttaactctcgtgcttag

SEQ ID NO: 3391218 - DNA, 25 bp, Homo sapien
tgcttagcagtagtgggacctatct

SEQ ID NO: 3391219 - DNA, 25 bp, Homo sapien
tagtgggacctatcttgcagtgagg

SEQ ID NO: 3391220 - DNA, 25 bp, Homo sapien
tttgctactaagcagacatctgggt

SEQ ID NO: 3391221 - DNA, 25 bp, Homo sapien
ttcttttgctactaagcagacatct

SEQ ID NO: 3391222 - DNA, 25 bp, Homo sapien
tctttcttttgctactaagcagaca

SEQ ID NO: 3391223 - DNA, 25 bp, Homo sapien
tctctttcttttgctactaagcaga

SEQ ID NO: 3391224 - DNA, 25 bp, Homo sapien
cattcgataaggtcccaagtatagg

SEQ ID NO: 3391225 - DNA, 25 bp, Homo sapien
tcccaagtataggtcagtatactcc

SEQ ID NO: 3391226 - DNA, 25 bp, Homo sapien
tataggtcagtatactccttctcct

SEQ ID NO: 3391227 - DNA, 25 bp, Homo sapien
tcttcttcccattcgataaggtccc

SEQ ID NO: 3391228 - DNA, 25 bp, Homo sapien
tacttggcttcaaactggggacgaa

SEQ ID NO: 3391229 - DNA, 25 bp, Homo sapien
tggcttcaaactggggacgaagtgt

SEQ ID NO: 3391230 - DNA, 25 bp, Homo sapien
taatacttggcttcaaactggggac

SEQ ID NO: 3391231 - DNA, 25 bp, Homo sapien
cttggcttcaaactggggacgaagt

SEQ ID NO: 3391232 - DNA, 25 bp, Homo sapien
tcaggttttcccgtgatgggattta

SEQ ID NO: 3391233 - DNA, 25 bp, Homo sapien
agacgagtgactttgtctgaggaag

SEQ ID NO: 3391234 - DNA, 25 bp, Homo sapien
gacagaaacaagaagacgagtgact

SEQ ID NO: 3391235 - DNA, 25 bp, Homo sapien
aaggctgatgtggttcaggttttcc

SEQ ID NO: 3391236 - DNA, 25 bp, Homo sapien
tgaatgatgcaaactgttccatgac

SEQ ID NO: 3391237 - DNA, 25 bp, Homo sapien
cagatgttgcaaactgccagtattg

SEQ ID NO: 3391238 - DNA, 25 bp, Homo sapien
gccagtattgtttgatgaaattcca

SEQ ID NO: 3391239 - DNA, 25 bp, Homo sapien
tccatgacaaccaggcggtacacca

SEQ ID NO: 3391240 - DNA, 25 bp, Homo sapien
caggatagcatgtgaatcctgcatg

SEQ ID NO: 3391241 - DNA, 25 bp, Homo sapien
tagcatgtgaatcctgcatgtgatc

SEQ ID NO: 3391242 - DNA, 25 bp, Homo sapien
ggatagcatgtgaatcctgcatgtg

SEQ ID NO: 3391243 - DNA, 25 bp, Homo sapien
ctgcaggatagcatgtgaatcctgc

SEQ ID NO: 3391244 - DNA, 25 bp, Homo sapien
gaatcctgcatgtgatatcctgcag

SEQ ID NO: 3391245 - DNA, 25 bp, Homo sapien
aatcctgcatgtgatatcttgcagg

SEQ ID NO: 3391246 - DNA, 25 bp, Homo sapien
atcctgcatgtgatatcttgcagga

SEQ ID NO: 3391247 - DNA, 25 bp, Homo sapien
tcctgcagcagcagtatccccagga

SEQ ID NO: 3391248 - DNA, 25 bp, Homo sapien
agacagaactttgcaaaaccaccca

SEQ ID NO: 3391249 - DNA, 25 bp, Homo sapien
ttcatgtacagcctgaaagcgggtc

SEQ ID NO: 3391250 - DNA, 25 bp, Homo sapien
ccagtgccattacacccatgagcat

SEQ ID NO: 3391251 - DNA, 25 bp, Homo sapien
cctgacagccagtcctatgttgaat

SEQ ID NO: 3391252 - DNA, 25 bp, Homo sapien
tagcctgacagccagtcctatgttg

SEQ ID NO: 3391253 - DNA, 25 bp, Homo sapien
gaaacaactgcttcaacctgcctag

SEQ ID NO: 3391254 - DNA, 25 bp, Homo sapien
ctagcctgacagccagtcctatgtt

SEQ ID NO: 3391255 - DNA, 25 bp, Homo sapien
tggtgaggaggtaagcaattttttc

SEQ ID NO: 3391256 - DNA, 25 bp, Homo sapien
ctaaattggtgaggaggtaagcaat

SEQ ID NO: 3391257 - DNA, 25 bp, Homo sapien
gaggaggtaagcaattttttcataa

SEQ ID NO: 3391258 - DNA, 25 bp, Homo sapien
ggaggtaagcaattttttcataagc

SEQ ID NO: 3391259 - DNA, 25 bp, Homo sapien
actgaaatgcccatatgttattttc

SEQ ID NO: 3391260 - DNA, 25 bp, Homo sapien
cattatataaagtaactacagactg

SEQ ID NO: 3391261 - DNA, 25 bp, Homo sapien
tctgactaaggagtgaagtaagaaa

SEQ ID NO: 3391262 - DNA, 25 bp, Homo sapien
caacttcctatactacccctctcct

SEQ ID NO: 3391263 - DNA, 25 bp, Homo sapien
cagggcgaagctgttttcccactct

SEQ ID NO: 3391264 - DNA, 25 bp, Homo sapien
gaaagcgatatagaagatggaactg

SEQ ID NO: 3391265 - DNA, 25 bp, Homo sapien
gaggaacatcttcagggcgaagctg

SEQ ID NO: 3391266 - DNA, 25 bp, Homo sapien
cccaaaaagaaagcgatatagaaga

SEQ ID NO: 3391267 - DNA, 25 bp, Homo sapien
tcctccagtctccaccggtcaaaaa

SEQ ID NO: 3391268 - DNA, 25 bp, Homo sapien
cctccagtctccaccggtcaaaaag

SEQ ID NO: 3391269 - DNA, 25 bp, Homo sapien
ctccagtctccaccggtcaaaaagt

SEQ ID NO: 3391270 - DNA, 25 bp, Homo sapien
ttcctccagtctccaccggtcaaaa

SEQ ID NO: 3391271 - DNA, 25 bp, Homo sapien
tcccgcagtaactggcccatatcca

SEQ ID NO: 3391272 - DNA, 25 bp, Homo sapien
tgcacccacactcccaaagttactt

SEQ ID NO: 3391273 - DNA, 25 bp, Homo sapien
tatccatgcccattcctgcacccac

SEQ ID NO: 3391274 - DNA, 25 bp, Homo sapien
atatccatgcccattcctgcaccca

SEQ ID NO: 3391275 - DNA, 25 bp, Homo sapien
catgatgacacccatctggaggcag

SEQ ID NO: 3391276 - DNA, 25 bp, Homo sapien
tctggaggcagaggtctatcaaaca

SEQ ID NO: 3391277 - DNA, 25 bp, Homo sapien
aaacatgatgacacccatctggagg

SEQ ID NO: 3391278 - DNA, 25 bp, Homo sapien
gcagaggtctatcaaacagccacta

SEQ ID NO: 3391279 - DNA, 25 bp, Homo sapien
tactcatccatcagtccatgaaggt

SEQ ID NO: 3391280 - DNA, 25 bp, Homo sapien
gcatcatgtattccccgcttgattt

SEQ ID NO: 3391281 - DNA, 25 bp, Homo sapien
ttctaagtactcatccatcagtcca

SEQ ID NO: 3391282 - DNA, 25 bp, Homo sapien
tgattttatgtcgtgaccaccagtt

SEQ ID NO: 3391283 - DNA, 25 bp, Homo sapien
aagatggtggtaaaaccaaattgca

SEQ ID NO: 3391284 - DNA, 25 bp, Homo sapien
gatggtggtaaaaccaaattgcaaa

SEQ ID NO: 3391285 - DNA, 25 bp, Homo sapien
aggaaaagccgcaacaaagatggtg

SEQ ID NO: 3391286 - DNA, 25 bp, Homo sapien
tagaggaaaagccgcaacaaagatg

SEQ ID NO: 3391287 - DNA, 25 bp, Homo sapien
cctccgccattgagtgacaaatttg

SEQ ID NO: 3391288 - DNA, 25 bp, Homo sapien
tatgtcagttgctcgggctggcaaa

SEQ ID NO: 3391289 - DNA, 25 bp, Homo sapien
aaaggcctccgccattgagtgacaa

SEQ ID NO: 3391290 - DNA, 25 bp, Homo sapien
tccagcctgatttcaatgatattgt

SEQ ID NO: 3391291 - DNA, 25 bp, Homo sapien
aacgtgggatgtaatcagaagtaat

SEQ ID NO: 3391292 - DNA, 25 bp, Homo sapien
aattacaaatgcattggtgatcaca

SEQ ID NO: 3391293 - DNA, 25 bp, Homo sapien
cttggttctacatgatttgcacagg

SEQ ID NO: 3391294 - DNA, 25 bp, Homo sapien
cgattccttcgagaattccaagcca

SEQ ID NO: 3391295 - DNA, 25 bp, Homo sapien
taggctattgttgacatatcccttc

SEQ ID NO: 3391296 - DNA, 25 bp, Homo sapien
ctcaggtcaaagaaggataggctat

SEQ ID NO: 3391297 - DNA, 25 bp, Homo sapien
taaccagattttcccataccaagct

SEQ ID NO: 3391298 - DNA, 25 bp, Homo sapien
tattgttgacatatcccttcaagca

SEQ ID NO: 3391299 - DNA, 25 bp, Homo sapien
aactcatagggtttggaactccagg

SEQ ID NO: 3391300 - DNA, 25 bp, Homo sapien
gatatgccagtattgtaaagtaaac

SEQ ID NO: 3391301 - DNA, 25 bp, Homo sapien
taatgaaggccaatctagcagcaag

SEQ ID NO: 3391302 - DNA, 25 bp, Homo sapien
tccagggcgggcctctgtagtctct

SEQ ID NO: 3391303 - DNA, 25 bp, Homo sapien
ggtatgcgatgaatgacttaatccc

SEQ ID NO: 3391304 - DNA, 25 bp, Homo sapien
taagtacttctctcgtcgtattcgg

SEQ ID NO: 3391305 - DNA, 25 bp, Homo sapien
ttgttgcaaatgttccagttcagcc

SEQ ID NO: 3391306 - DNA, 25 bp, Homo sapien
agaccctttggtacgtctggaatca

SEQ ID NO: 3391307 - DNA, 25 bp, Homo sapien
taaggccattcatggtgaacaggct

SEQ ID NO: 3391308 - DNA, 25 bp, Homo sapien
ggccattcatggtgaacaggctgac

SEQ ID NO: 3391309 - DNA, 25 bp, Homo sapien
aggccattcatggtgaacaggctga

SEQ ID NO: 3391310 - DNA, 25 bp, Homo sapien
ctaaggccattcatggtgaacaggc

SEQ ID NO: 3391311 - DNA, 25 bp, Homo sapien
cataacaacggcacttgagggaagt

SEQ ID NO: 3391312 - DNA, 25 bp, Homo sapien
taaaagtacgtgcacagactcagac

SEQ ID NO: 3391313 - DNA, 25 bp, Homo sapien
gatctaaaactaacacactgcaagg

SEQ ID NO: 3391314 - DNA, 25 bp, Homo sapien
tacgtactgtcaaggtgcaaaggga

SEQ ID NO: 3391315 - DNA, 25 bp, Homo sapien
taactttcaatgcatctgtagctga

SEQ ID NO: 3391316 - DNA, 25 bp, Homo sapien
aggctcctcagacatactatatgac

SEQ ID NO: 3391317 - DNA, 25 bp, Homo sapien
tcaaatctcttccaacataggctcc

SEQ ID NO: 3391318 - DNA, 25 bp, Homo sapien
aagaagtgagtttctctaactttca

SEQ ID NO: 3391319 - DNA, 25 bp, Homo sapien
caaaggctttgactcatctagtttt

SEQ ID NO: 3391320 - DNA, 25 bp, Homo sapien
gatttatttatcactcctcaaaggc

SEQ ID NO: 3391321 - DNA, 25 bp, Homo sapien
tgatgtgcctgttctttcatgcttt

SEQ ID NO: 3391322 - DNA, 25 bp, Homo sapien
tttttgaaagcacgaacttaattga

SEQ ID NO: 3391323 - DNA, 25 bp, Homo sapien
gccctctgtccagtcatgaatattc

SEQ ID NO: 3391324 - DNA, 25 bp, Homo sapien
cctctgtccagtcatgaatattcat

SEQ ID NO: 3391325 - DNA, 25 bp, Homo sapien
ccctctgtccagtcatgaatattca

SEQ ID NO: 3391326 - DNA, 25 bp, Homo sapien
ggtcaatgtcctttgttgagacttt

SEQ ID NO: 3391327 - DNA, 25 bp, Homo sapien
tcctttgttgagactttcctataac

SEQ ID NO: 3391328 - DNA, 25 bp, Homo sapien
aaaggtcaatgtcctttgttgagac

SEQ ID NO: 3391329 - DNA, 25 bp, Homo sapien
aatgtcctttgttgagactttccta

SEQ ID NO: 3391330 - DNA, 25 bp, Homo sapien
gcaataatgacccagacaagtcctt

SEQ ID NO: 3391331 - DNA, 25 bp, Homo sapien
tccttttatgcacagcttgacaggc

SEQ ID NO: 3391332 - DNA, 25 bp, Homo sapien
tacttctgctcatactccaaccacc

SEQ ID NO: 3391333 - DNA, 25 bp, Homo sapien
cagtaatcaaagcaataatgaccca

SEQ ID NO: 3391334 - DNA, 25 bp, Homo sapien
ggaatgtaattcattgctctccttc

SEQ ID NO: 3391335 - DNA, 25 bp, Homo sapien
gaatgtaattcattgctctccttca

SEQ ID NO: 3391336 - DNA, 25 bp, Homo sapien
aatgtaattcattgctctccttcat

SEQ ID NO: 3391337 - DNA, 25 bp, Homo sapien
tctgttacataagaccctgctggca

SEQ ID NO: 3391338 - DNA, 25 bp, Homo sapien
tggacgtagcgtttcctgctggagt

SEQ ID NO: 3391339 - DNA, 25 bp, Homo sapien
taaacaggccctctgttacataaga

SEQ ID NO: 3391340 - DNA, 25 bp, Homo sapien
tggaagcagggtgtcgtctggacgt

SEQ ID NO: 3391341 - DNA, 25 bp, Homo sapien
gaagttgttgaagatggtgcccgcc

SEQ ID NO: 3391342 - DNA, 25 bp, Homo sapien
tatccgtgcacactgagaagctttg

SEQ ID NO: 3391343 - DNA, 25 bp, Homo sapien
gatccacagtagaaatatccgtgca

SEQ ID NO: 3391344 - DNA, 25 bp, Homo sapien
gaaacgttctgtggtatctacaatg

SEQ ID NO: 3391345 - DNA, 25 bp, Homo sapien
ccagaagcttaagattaattgaaaa

SEQ ID NO: 3391346 - DNA, 25 bp, Homo sapien
aagtccagaagcttaagattaattg

SEQ ID NO: 3391347 - DNA, 25 bp, Homo sapien
gtccagaagcttaagattaattgaa

SEQ ID NO: 3391348 - DNA, 25 bp, Homo sapien
taagtccagaagcttaagattaatt

SEQ ID NO: 3391349 - DNA, 25 bp, Homo sapien
acttccaaaactcttacatgcagtt

SEQ ID NO: 3391350 - DNA, 25 bp, Homo sapien
aacttccaaaactcttacatgcagt

SEQ ID NO: 3391351 - DNA, 25 bp, Homo sapien
ctctgtgtaggttggagaagtaaaa

SEQ ID NO: 3391352 - DNA, 25 bp, Homo sapien
agctccaatcttcactcatcagtct

SEQ ID NO: 3391353 - DNA, 25 bp, Homo sapien
cagctccaatcttcactcatcagtc

SEQ ID NO: 3391354 - DNA, 25 bp, Homo sapien
gctccaatcttcactcatcagtctc

SEQ ID NO: 3391355 - DNA, 25 bp, Homo sapien
ccttccacatctcaatacctattac

SEQ ID NO: 3391356 - DNA, 25 bp, Homo sapien
tccttccacatctcaatacctatta

SEQ ID NO: 3391357 - DNA, 25 bp, Homo sapien
ttccacatctcaatacctattacca

SEQ ID NO: 3391358 - DNA, 25 bp, Homo sapien
ccacatctcaatacctattaccagg

SEQ ID NO: 3391359 - DNA, 25 bp, Homo sapien
aatgtatcattttggactgcagatg

SEQ ID NO: 3391360 - DNA, 25 bp, Homo sapien
ttattaatgtatcattttggactgc

SEQ ID NO: 3391361 - DNA, 25 bp, Homo sapien
acttgggatcattttggattcgtct

SEQ ID NO: 3391362 - DNA, 25 bp, Homo sapien
gatcattttggattcgtctctgagg

SEQ ID NO: 3391363 - DNA, 25 bp, Homo sapien
gaccttatcccgttgatgtatacca

SEQ ID NO: 3391364 - DNA, 25 bp, Homo sapien
tgattttgaggaccttatcccgttg

SEQ ID NO: 3391365 - DNA, 25 bp, Homo sapien
cgttgatgtataccattattcttac

SEQ ID NO: 3391366 - DNA, 25 bp, Homo sapien
tgaggaccttatcccgttgatgtat

SEQ ID NO: 3391367 - DNA, 25 bp, Homo sapien
ctaaggcactgactaaggaatattt

SEQ ID NO: 3391368 - DNA, 25 bp, Homo sapien
catctttgtattcctctcacctaag

SEQ ID NO: 3391369 - DNA, 25 bp, Homo sapien
ggctatgtcctatgttgtattagac

SEQ ID NO: 3391370 - DNA, 25 bp, Homo sapien
gaaaattcagttagtcagaactcct

SEQ ID NO: 3391371 - DNA, 25 bp, Homo sapien
ttcaactgctttctcgtggggtcct

SEQ ID NO: 3391372 - DNA, 25 bp, Homo sapien
acagagtcggttctcccttctgtgc

SEQ ID NO: 3391373 - DNA, 25 bp, Homo sapien
caactgctttctcgtggggtcctca

SEQ ID NO: 3391374 - DNA, 25 bp, Homo sapien
cagtaaaacgacagagtcggttctc

SEQ ID NO: 3391375 - DNA, 25 bp, Homo sapien
atttccaagtggaaacgctttagca

SEQ ID NO: 3391376 - DNA, 25 bp, Homo sapien
tagcacaagtagtccaagagctctt

SEQ ID NO: 3391377 - DNA, 25 bp, Homo sapien
caagtggaaacgctttagcacaagt

SEQ ID NO: 3391378 - DNA, 25 bp, Homo sapien
aaatgacaatgtctttgttgtagtt

SEQ ID NO: 3391379 - DNA, 25 bp, Homo sapien
attcctatgttttgaccaaaatcct

SEQ ID NO: 3391380 - DNA, 25 bp, Homo sapien
tgtaattcctatgttttgaccaaaa

SEQ ID NO: 3391381 - DNA, 25 bp, Homo sapien
taattcctatgttttgaccaaaatc

SEQ ID NO: 3391382 - DNA, 25 bp, Homo sapien
tcctatgttttgaccaaaatccttc

SEQ ID NO: 3391383 - DNA, 25 bp, Homo sapien
gcacggtgcgcgcacccgctgacct

SEQ ID NO: 3391384 - DNA, 25 bp, Homo sapien
gcccgtcagaaaagcgcagtgttcg

SEQ ID NO: 3391385 - DNA, 25 bp, Homo sapien
cggtgcgcgcacccgctgacctgcg

SEQ ID NO: 3391386 - DNA, 25 bp, Homo sapien
cccgtcagaaaagcgcagtgttcgg

SEQ ID NO: 3391387 - DNA, 25 bp, Homo sapien
tacagctggtttcgtcacttggaag

SEQ ID NO: 3391388 - DNA, 25 bp, Homo sapien
tgtctttgcgagtcagcgtctccct

SEQ ID NO: 3391389 - DNA, 25 bp, Homo sapien
tcgctcggtgactggaactcctccg

SEQ ID NO: 3391390 - DNA, 25 bp, Homo sapien
tgcacaccagcgtctgggtagcgcg

SEQ ID NO: 3391391 - DNA, 25 bp, Homo sapien
ttgtccgagttggagtaggcatccc

SEQ ID NO: 3391392 - DNA, 25 bp, Homo sapien
tcgaagtagccttgacacaggtggc

SEQ ID NO: 3391393 - DNA, 25 bp, Homo sapien
tccccgtctaggtcgtaggagatgc

SEQ ID NO: 3391394 - DNA, 25 bp, Homo sapien
tcatagtccccatcgggcacgaagt

SEQ ID NO: 3391395 - DNA, 25 bp, Homo sapien
ttaagataatcatttttcagccgac

SEQ ID NO: 3391396 - DNA, 25 bp, Homo sapien
tagatgtggctgaaacgggtgtctc

SEQ ID NO: 3391397 - DNA, 25 bp, Homo sapien
tgtgcaaccactacaaagcttggcc

SEQ ID NO: 3391398 - DNA, 25 bp, Homo sapien
aacttccatgggttggcaggcatgc

SEQ ID NO: 3391399 - DNA, 25 bp, Homo sapien
gcaactgggatagcttttggagccc

SEQ ID NO: 3391400 - DNA, 25 bp, Homo sapien
gacattaaataaagtgcatctccac

SEQ ID NO: 3391401 - DNA, 25 bp, Homo sapien
gataagtcatttagcctttcccagc

SEQ ID NO: 3391402 - DNA, 25 bp, Homo sapien
taacttaggatggaatgcttgctct

SEQ ID NO: 3391403 - DNA, 25 bp, Homo sapien
tgcttgctctgcataagggtacagg

SEQ ID NO: 3391404 - DNA, 25 bp, Homo sapien
tcgattctcaaaatagtccatggtc

SEQ ID NO: 3391405 - DNA, 25 bp, Homo sapien
gctttcctcatgcagtttgtcgtaa

SEQ ID NO: 3391406 - DNA, 25 bp, Homo sapien
ttaacagaaatgacccagacaaagt

SEQ ID NO: 3391407 - DNA, 25 bp, Homo sapien
gcctcctgttccaaataaaactcta

SEQ ID NO: 3391408 - DNA, 25 bp, Homo sapien
caattgagagaagaattagtggtac

SEQ ID NO: 3391409 - DNA, 25 bp, Homo sapien
acttcaaaatagtgatatagatgtt

SEQ ID NO: 3391410 - DNA, 25 bp, Homo sapien
tgatatagatgttttcacgtggtcc

SEQ ID NO: 3391411 - DNA, 25 bp, Homo sapien
tttcacgtggtccaattgagagaag

SEQ ID NO: 3391412 - DNA, 25 bp, Homo sapien
caggagcctggctttggtggttgca

SEQ ID NO: 3391413 - DNA, 25 bp, Homo sapien
tggttgcagaggctaaagtagcctg

SEQ ID NO: 3391414 - DNA, 25 bp, Homo sapien
gaggctaaagtagcctggtgtcttt

SEQ ID NO: 3391415 - DNA, 25 bp, Homo sapien
tgtctttcatcaacggcctccagat

SEQ ID NO: 3391416 - DNA, 25 bp, Homo sapien
gaatgggaacaagcacatatttggc

SEQ ID NO: 3391417 - DNA, 25 bp, Homo sapien
caagcacatatttggcttctgagga

SEQ ID NO: 3391418 - DNA, 25 bp, Homo sapien
tttcttatatgaatgggaacaagca

SEQ ID NO: 3391419 - DNA, 25 bp, Homo sapien
tcttatatgaatgggaacaagcaca

SEQ ID NO: 3391420 - DNA, 25 bp, Homo sapien
gagctcagcctgaacatgaagcttt

SEQ ID NO: 3391421 - DNA, 25 bp, Homo sapien
aaagccaatggaatttccatcttcc

SEQ ID NO: 3391422 - DNA, 25 bp, Homo sapien
tgagctcagcctgaacatgaagctt

SEQ ID NO: 3391423 - DNA, 25 bp, Homo sapien
gagaggaaaagccaatggaatttcc

SEQ ID NO: 3391424 - DNA, 25 bp, Homo sapien
ttcctgttattgaaagatggatcac

SEQ ID NO: 3391425 - DNA, 25 bp, Homo sapien
tcttcctgttattgaaagatggatc

SEQ ID NO: 3391426 - DNA, 25 bp, Homo sapien
catcttcctgttattgaaagatgga

SEQ ID NO: 3391427 - DNA, 25 bp, Homo sapien
tcatcttcctgttattgaaagatgg

SEQ ID NO: 3391428 - DNA, 25 bp, Homo sapien
gaagatgatttaagagctgagacat

SEQ ID NO: 3391429 - DNA, 25 bp, Homo sapien
gagctgagacatgatcagaattgga

SEQ ID NO: 3391430 - DNA, 25 bp, Homo sapien
cagaattggaagagtcagttccacg

SEQ ID NO: 3391431 - DNA, 25 bp, Homo sapien
cacggctttgaaataagctttgggg

SEQ ID NO: 3391432 - DNA, 25 bp, Homo sapien
tctgcatctaacttggggtggcccc

SEQ ID NO: 3391433 - DNA, 25 bp, Homo sapien
tggcaacagcagcaagtgaacaagc

SEQ ID NO: 3391434 - DNA, 25 bp, Homo sapien
ccctagcagaggtgaagtggtatct

SEQ ID NO: 3391435 - DNA, 25 bp, Homo sapien
cacaactcacttagggcagaggcat

SEQ ID NO: 3391436 - DNA, 25 bp, Homo sapien
tcaacagagtattccaatatgagcc

SEQ ID NO: 3391437 - DNA, 25 bp, Homo sapien
tcaatctgaaggtgtagcaactact

SEQ ID NO: 3391438 - DNA, 25 bp, Homo sapien
ggatgtctcaatctgaaggtgtagc

SEQ ID NO: 3391439 - DNA, 25 bp, Homo sapien
tagcaactactgaagggagcttgga

SEQ ID NO: 3391440 - DNA, 25 bp, Homo sapien
tgtaaatgaggaaggatgtctcaat

SEQ ID NO: 3391441 - DNA, 25 bp, Homo sapien
ccaggaatgatctgtccccagtttc

SEQ ID NO: 3391442 - DNA, 25 bp, Homo sapien
cagctttggtccttagatcctttgg

SEQ ID NO: 3391443 - DNA, 25 bp, Homo sapien
ccagtttccaatctgatgtggtact

SEQ ID NO: 3391444 - DNA, 25 bp, Homo sapien
ttggaagcctttttgctcctggcag

SEQ ID NO: 3391445 - DNA, 25 bp, Homo sapien
tcagtccacagacttgaattcacaa

SEQ ID NO: 3391446 - DNA, 25 bp, Homo sapien
aagtttgtctcctgattcttcagca

SEQ ID NO: 3391447 - DNA, 25 bp, Homo sapien
actgggggaacctgagaccattctt

SEQ ID NO: 3391448 - DNA, 25 bp, Homo sapien
aggtgttccaagagaggcgatgtca

SEQ ID NO: 3391449 - DNA, 25 bp, Homo sapien
ccaagagaggcgatgtcaggatagt

SEQ ID NO: 3391450 - DNA, 25 bp, Homo sapien
aggaaggtgttccaagagaggcgat

SEQ ID NO: 3391451 - DNA, 25 bp, Homo sapien
tattcactcagctgtcagagtctgc

SEQ ID NO: 3391452 - DNA, 25 bp, Homo sapien
tttgacttattgacgctgggacctt

SEQ ID NO: 3391453 - DNA, 25 bp, Homo sapien
acacttcaagtggactctggcctct

SEQ ID NO: 3391454 - DNA, 25 bp, Homo sapien
tggcctctgagagtgtgaacacttc

SEQ ID NO: 3391455 - DNA, 25 bp, Homo sapien
gtttccggtcttcaggagtagatgc

SEQ ID NO: 3391456 - DNA, 25 bp, Homo sapien
tccggtcttcaggagtagatgctgt

SEQ ID NO: 3391457 - DNA, 25 bp, Homo sapien
ttccggtcttcaggagtagatgctg

SEQ ID NO: 3391458 - DNA, 25 bp, Homo sapien
gttgtctctcaaccatacagctggg

SEQ ID NO: 3391459 - DNA, 25 bp, Homo sapien
gaggatctgcatcaaatgagccccg

SEQ ID NO: 3391460 - DNA, 25 bp, Homo sapien
cgtgcttttgcggaatccaggtagc

SEQ ID NO: 3391461 - DNA, 25 bp, Homo sapien
gcaatcagagcacggacagttgtct

SEQ ID NO: 3391462 - DNA, 25 bp, Homo sapien
ttgctctggcctgcttggaaaagca

SEQ ID NO: 3391463 - DNA, 25 bp, Homo sapien
gctcatcgggccatgtgatgtacac

SEQ ID NO: 3391464 - DNA, 25 bp, Homo sapien
gaattcactgtaatgctcatcgggc

SEQ ID NO: 3391465 - DNA, 25 bp, Homo sapien
tgctctggcctgcttggaaaagcat

SEQ ID NO: 3391466 - DNA, 25 bp, Homo sapien
caaaggtttgaattttctgtgagca

SEQ ID NO: 3391467 - DNA, 25 bp, Homo sapien
tctgtgagcaaatttcttaataaaa

SEQ ID NO: 3391468 - DNA, 25 bp, Homo sapien
aaaaagacattgaagactttggcaa

SEQ ID NO: 3391469 - DNA, 25 bp, Homo sapien
attttaatcaaagcacaaaggtttg

SEQ ID NO: 3391470 - DNA, 25 bp, Homo sapien
ttaatggaggaggatgtccatatcc

SEQ ID NO: 3391471 - DNA, 25 bp, Homo sapien
gcccgatagtactgaaaaatgtaag

SEQ ID NO: 3391472 - DNA, 25 bp, Homo sapien
gatgtccatatccttttacaatgct

SEQ ID NO: 3391473 - DNA, 25 bp, Homo sapien
tccattttgctactgcccgatagta

SEQ ID NO: 3391474 - DNA, 25 bp, Homo sapien
tgcaactccaaacctaacgctgtgt

SEQ ID NO: 3391475 - DNA, 25 bp, Homo sapien
tataggcactagcaaaattggcagg

SEQ ID NO: 3391476 - DNA, 25 bp, Homo sapien
gcccagagctattccatgtattcca

SEQ ID NO: 3391477 - DNA, 25 bp, Homo sapien
taagtgtgctgaagataactgcaac

SEQ ID NO: 3391478 - DNA, 25 bp, Homo sapien
gcttatgactggaatgaccatctat

SEQ ID NO: 3391479 - DNA, 25 bp, Homo sapien
tcatattgatttttcgatttcccat

SEQ ID NO: 3391480 - DNA, 25 bp, Homo sapien
tactatgcctactttcttgagggtg

SEQ ID NO: 3391481 - DNA, 25 bp, Homo sapien
tcagatgctccggtgagtcttacta

SEQ ID NO: 3391482 - DNA, 25 bp, Homo sapien
gagccacttgtatgcgtgttcatca

SEQ ID NO: 3391483 - DNA, 25 bp, Homo sapien
agctctgagccccagtattggcatt

SEQ ID NO: 3391484 - DNA, 25 bp, Homo sapien
aaatgcaagaaacacatgtttaaac

SEQ ID NO: 3391485 - DNA, 25 bp, Homo sapien
tcccagttgtgtaagccacattgtt

SEQ ID NO: 3391486 - DNA, 25 bp, Homo sapien
catcgattttgtcttgcacttgcca

SEQ ID NO: 3391487 - DNA, 25 bp, Homo sapien
gtgtgaaagcttagcttcccagttg

SEQ ID NO: 3391488 - DNA, 25 bp, Homo sapien
ctggataatcagtgtgaaagcttag

SEQ ID NO: 3391489 - DNA, 25 bp, Homo sapien
tagtttttggcacacattaaaccca

SEQ ID NO: 3391490 - DNA, 25 bp, Homo sapien
cccctgtgactgtttgctttatgca

SEQ ID NO: 3391491 - DNA, 25 bp, Homo sapien
caatgtctgtaaagtccacaaaggt

SEQ ID NO: 3391492 - DNA, 25 bp, Homo sapien
acaaaggtagaggacaaaatctgga

SEQ ID NO: 3391493 - DNA, 25 bp, Homo sapien
tattctttcacttctggccaaaagc

SEQ ID NO: 3391494 - DNA, 25 bp, Homo sapien
tggagcttctgctgatcatctttga

SEQ ID NO: 3391495 - DNA, 25 bp, Homo sapien
taactcttgggatcaacctattttg

SEQ ID NO: 3391496 - DNA, 25 bp, Homo sapien
gattgagtcatctagctttattggg

SEQ ID NO: 3391497 - DNA, 25 bp, Homo sapien
gccattgacagtgaagtacaaattg

SEQ ID NO: 3391498 - DNA, 25 bp, Homo sapien
caattgtaatggtaaactcaacagt

SEQ ID NO: 3391499 - DNA, 25 bp, Homo sapien
ggctctgagccaaacggcaattgta

SEQ ID NO: 3391500 - DNA, 25 bp, Homo sapien
gtacaaattgtgatgatcagggccc

SEQ ID NO: 3391501 - DNA, 25 bp, Homo sapien
ggtagaaacaggatgaatgcatgca

SEQ ID NO: 3391502 - DNA, 25 bp, Homo sapien
gatggtggcaaagtacctaggatta

SEQ ID NO: 3391503 - DNA, 25 bp, Homo sapien
gacgatcttaaagtgtcagtcaact

SEQ ID NO: 3391504 - DNA, 25 bp, Homo sapien
cctaggattactcctgggagcagca

SEQ ID NO: 3391505 - DNA, 25 bp, Homo sapien
ccctagttgcgttattgaagttgat

SEQ ID NO: 3391506 - DNA, 25 bp, Homo sapien
ggcacatcaaatattgtgtccctag

SEQ ID NO: 3391507 - DNA, 25 bp, Homo sapien
tcaaatattgtgtccctagttgcgt

SEQ ID NO: 3391508 - DNA, 25 bp, Homo sapien
gaagttgatgcgaaccacttggcct

SEQ ID NO: 3391509 - DNA, 25 bp, Homo sapien
attcatcttgaaggtaaacttggat

SEQ ID NO: 3391510 - DNA, 25 bp, Homo sapien
ttcatcttgaaggtaaacttggatt

SEQ ID NO: 3391511 - DNA, 25 bp, Homo sapien
gattcatcttgaaggtaaacttgga

SEQ ID NO: 3391512 - DNA, 25 bp, Homo sapien
tacgaagccttgacatgaccacatc

SEQ ID NO: 3391513 - DNA, 25 bp, Homo sapien
cataagctccttctagatggcggga

SEQ ID NO: 3391514 - DNA, 25 bp, Homo sapien
tacgtcggccatgaagtaagcgcca

SEQ ID NO: 3391515 - DNA, 25 bp, Homo sapien
agttcctgcttcatagctacgtcgg

SEQ ID NO: 3391516 - DNA, 25 bp, Homo sapien
tcttgtgagagaagttacatgttca

SEQ ID NO: 3391517 - DNA, 25 bp, Homo sapien
gtggtgaaacatctaaaaagttgac

SEQ ID NO: 3391518 - DNA, 25 bp, Homo sapien
tatctcacaaaatatggtcattgga

SEQ ID NO: 3391519 - DNA, 25 bp, Homo sapien
gatcatggtctgtgaataatgtgcc

SEQ ID NO: 3391520 - DNA, 25 bp, Homo sapien
tagacattctggagatactcatata

SEQ ID NO: 3391521 - DNA, 25 bp, Homo sapien
tacaaaaactatttgtagacattct

SEQ ID NO: 3391522 - DNA, 25 bp, Homo sapien
ctcatatatgggcaaaagaaattag

SEQ ID NO: 3391523 - DNA, 25 bp, Homo sapien
tcatttgctacaaaaactatttgta

SEQ ID NO: 3391524 - DNA, 25 bp, Homo sapien
tgccatgggcgcactttgtggaaat

SEQ ID NO: 3391525 - DNA, 25 bp, Homo sapien
tcaaagtgtccgagtggtgtgccca

SEQ ID NO: 3391526 - DNA, 25 bp, Homo sapien
ccacacaggctaaaggtagtcttca

SEQ ID NO: 3391527 - DNA, 25 bp, Homo sapien
tctggaggcaacaagtagagagctc

SEQ ID NO: 3391528 - DNA, 25 bp, Homo sapien
acgttctaactaaagctggcaaaag

SEQ ID NO: 3391529 - DNA, 25 bp, Homo sapien
gattgccgtctgataccaacatggt

SEQ ID NO: 3391530 - DNA, 25 bp, Homo sapien
tgatcaaggtagttcacgttctaac

SEQ ID NO: 3391531 - DNA, 25 bp, Homo sapien
actttctaaagtcaaacgcctgagc

SEQ ID NO: 3391532 - DNA, 25 bp, Homo sapien
caatgccgatactcgcattttacct

SEQ ID NO: 3391533 - DNA, 25 bp, Homo sapien
cccaatgccgatactcgcattttac

SEQ ID NO: 3391534 - DNA, 25 bp, Homo sapien
ttacccaatgccgatactcgcattt

SEQ ID NO: 3391535 - DNA, 25 bp, Homo sapien
gccgatactcgcattttaccttggg

SEQ ID NO: 3391536 - DNA, 25 bp, Homo sapien
aaagcatcttgagctacaaggggct

SEQ ID NO: 3391537 - DNA, 25 bp, Homo sapien
tgagacacgtcttattctgtttccc

SEQ ID NO: 3391538 - DNA, 25 bp, Homo sapien
agctacaaggggcttcaagtaacaa

SEQ ID NO: 3391539 - DNA, 25 bp, Homo sapien
gacacgtcttattctgtttcccagg

SEQ ID NO: 3391540 - DNA, 25 bp, Homo sapien
tactcagggtaagtaataggcccaa

SEQ ID NO: 3391541 - DNA, 25 bp, Homo sapien
cagaggagccaacagcaatgtggaa

SEQ ID NO: 3391542 - DNA, 25 bp, Homo sapien
cagacctgcgtgcatatggcaagcg

SEQ ID NO: 3391543 - DNA, 25 bp, Homo sapien
catgctgcagaagcctactcagggt

SEQ ID NO: 3391544 - DNA, 25 bp, Homo sapien
tgccaggggactagcaactgcaacg

SEQ ID NO: 3391545 - DNA, 25 bp, Homo sapien
ctgcaacgcccttatttgctctggg

SEQ ID NO: 3391546 - DNA, 25 bp, Homo sapien
gaggaatgtaatagccccagctgga

SEQ ID NO: 3391547 - DNA, 25 bp, Homo sapien
tatgagggaggaatgtaatagcccc

SEQ ID NO: 3391548 - DNA, 25 bp, Homo sapien
gctccccgacaactctgatgccttt

SEQ ID NO: 3391549 - DNA, 25 bp, Homo sapien
ctgctccccgacaactctgatgcct

SEQ ID NO: 3391550 - DNA, 25 bp, Homo sapien
tgctccccgacaactctgatgcctt

SEQ ID NO: 3391551 - DNA, 25 bp, Homo sapien
tccccgacaactctgatgccttttt

SEQ ID NO: 3391552 - DNA, 25 bp, Homo sapien
gcttcttgctgattggaggccaact

SEQ ID NO: 3391553 - DNA, 25 bp, Homo sapien
cagatggttggcagaatgtatttcc

SEQ ID NO: 3391554 - DNA, 25 bp, Homo sapien
catgtaggctttcccgacaaggctg

SEQ ID NO: 3391555 - DNA, 25 bp, Homo sapien
cttgctgcagtaggactaagtgccc

SEQ ID NO: 3391556 - DNA, 25 bp, Homo sapien
tagagggttaacacaggagctacca

SEQ ID NO: 3391557 - DNA, 25 bp, Homo sapien
tacagatccggaagcctggactttc

SEQ ID NO: 3391558 - DNA, 25 bp, Homo sapien
caaagacttagtgcttaggaactca

SEQ ID NO: 3391559 - DNA, 25 bp, Homo sapien
ctaccagaatccacgggacagcagg

SEQ ID NO: 3391560 - DNA, 25 bp, Homo sapien
gatatgtatcgaatgtccaccatgg

SEQ ID NO: 3391561 - DNA, 25 bp, Homo sapien
caagttcaatgcatatgacactaaa

SEQ ID NO: 3391562 - DNA, 25 bp, Homo sapien
tgttggttcaactctgccaagtgac

SEQ ID NO: 3391563 - DNA, 25 bp, Homo sapien
tttatacccttagtcattccctcta

SEQ ID NO: 3391564 - DNA, 25 bp, Homo sapien
ccattctggatatcaatgttgagaa

SEQ ID NO: 3391565 - DNA, 25 bp, Homo sapien
ttctggatatcaatgttgagaaaga

SEQ ID NO: 3391566 - DNA, 25 bp, Homo sapien
cattctggatatcaatgttgagaaa

SEQ ID NO: 3391567 - DNA, 25 bp, Homo sapien
tctggatatcaatgttgagaaagaa

SEQ ID NO: 3391568 - DNA, 25 bp, Homo sapien
tttttaaggttgatcttggcatgtt

SEQ ID NO: 3391569 - DNA, 25 bp, Homo sapien
ttttgcatttgtatatggagtcctt

SEQ ID NO: 3391570 - DNA, 25 bp, Homo sapien
gtatatggagtccttagagttgagg

SEQ ID NO: 3391571 - DNA, 25 bp, Homo sapien
gtcaataactcaacacttaatgtga

SEQ ID NO: 3391572 - DNA, 25 bp, Homo sapien
tgaggaaatgcccaaacgtgtagat

SEQ ID NO: 3391573 - DNA, 25 bp, Homo sapien
gagtgacagagtggtggcattcaac

SEQ ID NO: 3391574 - DNA, 25 bp, Homo sapien
cccatgcccaagtaggtaggtcttt

SEQ ID NO: 3391575 - DNA, 25 bp, Homo sapien
tagattcgagtgacagcaaggcagt

SEQ ID NO: 3391576 - DNA, 25 bp, Homo sapien
tatgggctttagacctattactggg

SEQ ID NO: 3391577 - DNA, 25 bp, Homo sapien
gggatgtcacctagcaatagcttgg

SEQ ID NO: 3391578 - DNA, 25 bp, Homo sapien
tcctaaactatagtggctgccagta

SEQ ID NO: 3391579 - DNA, 25 bp, Homo sapien
tggctaaactactaactaatgtggg

SEQ ID NO: 3391580 - DNA, 25 bp, Homo sapien
taatggccgttatctacactaaact

SEQ ID NO: 3391581 - DNA, 25 bp, Homo sapien
tatcagccccgaaataatgaagtct

SEQ ID NO: 3391582 - DNA, 25 bp, Homo sapien
gccatcattaggattcactgtaacg

SEQ ID NO: 3391583 - DNA, 25 bp, Homo sapien
catgattaagcatgtcgcttggcta

SEQ ID NO: 3391584 - DNA, 25 bp, Homo sapien
tgtgttcctgaatacggagctggct

SEQ ID NO: 3391585 - DNA, 25 bp, Homo sapien
ggagctggctgtactgttgatgcaa

SEQ ID NO: 3391586 - DNA, 25 bp, Homo sapien
taagcctgggcagtcatagggaaga

SEQ ID NO: 3391587 - DNA, 25 bp, Homo sapien
gaaaagaagggtatctgcagccctc

SEQ ID NO: 3391588 - DNA, 25 bp, Homo sapien
cttcattccctgtaagtatgtgaat

SEQ ID NO: 3391589 - DNA, 25 bp, Homo sapien
gagtgcttgtgaacatatgaaaatt

SEQ ID NO: 3391590 - DNA, 25 bp, Homo sapien
gggaactcagcatttcacaatttat

SEQ ID NO: 3391591 - DNA, 25 bp, Homo sapien
tcccttgggcagaatttataattgt

SEQ ID NO: 3391592 - DNA, 25 bp, Homo sapien
tatttctctttggtacagaatcaga

SEQ ID NO: 3391593 - DNA, 25 bp, Homo sapien
ggcacgtagtgtccctcatcatatt

SEQ ID NO: 3391594 - DNA, 25 bp, Homo sapien
gaaagggacaattatggcaggaact

SEQ ID NO: 3391595 - DNA, 25 bp, Homo sapien
ggtagattcttaaggcagccgctca

SEQ ID NO: 3391596 - DNA, 25 bp, Homo sapien
gaactgaagttggaacagcgcaagg

SEQ ID NO: 3391597 - DNA, 25 bp, Homo sapien
aacagctctgtaggcagtactttgc

SEQ ID NO: 3391598 - DNA, 25 bp, Homo sapien
ggcctcatgcctgttgtgttaacta

SEQ ID NO: 3391599 - DNA, 25 bp, Homo sapien
tgtttgaacacagttctatctgctc

SEQ ID NO: 3391600 - DNA, 25 bp, Homo sapien
aacaagatgctcaatttaactgcgt

SEQ ID NO: 3391601 - DNA, 25 bp, Homo sapien
gttgtatgttacctccgccactgga

SEQ ID NO: 3391602 - DNA, 25 bp, Homo sapien
ggaatgtggaccctgtttgcatccc

SEQ ID NO: 3391603 - DNA, 25 bp, Homo sapien
tacctggcctatagggacttaagga

SEQ ID NO: 3391604 - DNA, 25 bp, Homo sapien
ggtttctgctactgggtctctgacg

SEQ ID NO: 3391605 - DNA, 25 bp, Homo sapien
tctttactcttatgggtgcctcacc

SEQ ID NO: 3391606 - DNA, 25 bp, Homo sapien
tagtacggaggaaattgtatccatg

SEQ ID NO: 3391607 - DNA, 25 bp, Homo sapien
cactggtctcagtataagtacatac

SEQ ID NO: 3391608 - DNA, 25 bp, Homo sapien
caccacacccacatgtgaattgaga

SEQ ID NO: 3391609 - DNA, 25 bp, Homo sapien
tttggagaaggcacgtaggaaacag

SEQ ID NO: 3391610 - DNA, 25 bp, Homo sapien
ggagaaggcacgtaggaaacaggct

SEQ ID NO: 3391611 - DNA, 25 bp, Homo sapien
ctttggagaaggcacgtaggaaaca

SEQ ID NO: 3391612 - DNA, 25 bp, Homo sapien
gaaggcacgtaggaaacaggctcac

SEQ ID NO: 3391613 - DNA, 25 bp, Homo sapien
tatcatgtacgcacttgtccttagc

SEQ ID NO: 3391614 - DNA, 25 bp, Homo sapien
ctatcatgtacgcacttgtccttag

SEQ ID NO: 3391615 - DNA, 25 bp, Homo sapien
gatcaaattccttggtggtcttatc

SEQ ID NO: 3391616 - DNA, 25 bp, Homo sapien
tggtggtcttatctttttggaccat

SEQ ID NO: 3391617 - DNA, 25 bp, Homo sapien
cacatactgcctataatgatcaaat

SEQ ID NO: 3391618 - DNA, 25 bp, Homo sapien
cacttgtacacatactgcctataat

SEQ ID NO: 3391619 - DNA, 25 bp, Homo sapien
ccaagggctctaataagggaattcg

SEQ ID NO: 3391620 - DNA, 25 bp, Homo sapien
gaaacgcagctattcttggaatgga

SEQ ID NO: 3391621 - DNA, 25 bp, Homo sapien
catcgggttacaattttggctgaca

SEQ ID NO: 3391622 - DNA, 25 bp, Homo sapien
tgtgattccacgttgtccataagat

SEQ ID NO: 3391623 - DNA, 25 bp, Homo sapien
ttttacagcagctgataaatactgg

SEQ ID NO: 3391624 - DNA, 25 bp, Homo sapien
cagtgttgatgatgggcagcatgtt

SEQ ID NO: 3391625 - DNA, 25 bp, Homo sapien
gattcactcattatacttaagtagg

SEQ ID NO: 3391626 - DNA, 25 bp, Homo sapien
tcttaggcatgtcttgaggattcac

SEQ ID NO: 3391627 - DNA, 25 bp, Homo sapien
catttcttgtgggagtgactaagcc

SEQ ID NO: 3391628 - DNA, 25 bp, Homo sapien
gacttttttgagtgacgccgagtga

SEQ ID NO: 3391629 - DNA, 25 bp, Homo sapien
tcttcagggttgcaccaaggaaacg

SEQ ID NO: 3391630 - DNA, 25 bp, Homo sapien
gaagacatccgagttcaggagggca

SEQ ID NO: 3391631 - DNA, 25 bp, Homo sapien
ggaccttcagatttcagttcgtgga

SEQ ID NO: 3391632 - DNA, 25 bp, Homo sapien
gaggaaactcatggttgccactcca

SEQ ID NO: 3391633 - DNA, 25 bp, Homo sapien
gatcagctgtatgcctagaagccct

SEQ ID NO: 3391634 - DNA, 25 bp, Homo sapien
tgtgtgcaaaccgtctcagagaact

SEQ ID NO: 3391635 - DNA, 25 bp, Homo sapien
ggctgctgcttacttccagaagttc

SEQ ID NO: 3391636 - DNA, 25 bp, Homo sapien
tatgccactgagtaattgaatggcc

SEQ ID NO: 3391637 - DNA, 25 bp, Homo sapien
ccatggagacttgttgcagaatgca

SEQ ID NO: 3391638 - DNA, 25 bp, Homo sapien
gacctgagtccttgatcatagcttt

SEQ ID NO: 3391639 - DNA, 25 bp, Homo sapien
cgaggcatgtctcgtggggaagcac

SEQ ID NO: 3391640 - DNA, 25 bp, Homo sapien
aggcatgtctcgtggggaagcacct

SEQ ID NO: 3391641 - DNA, 25 bp, Homo sapien
gaggcatgtctcgtggggaagcacc

SEQ ID NO: 3391642 - DNA, 25 bp, Homo sapien
ggcatgtctcgtggggaagcacctg

SEQ ID NO: 3391643 - DNA, 25 bp, Homo sapien
agtaatctaaaaacgcttgcccctg

SEQ ID NO: 3391644 - DNA, 25 bp, Homo sapien
tctaaaaacgcttgcccctggcagc

SEQ ID NO: 3391645 - DNA, 25 bp, Homo sapien
ggcagcctgtccacgcgaccttccc

SEQ ID NO: 3391646 - DNA, 25 bp, Homo sapien
ctgtccacgcgaccttcccttctca

SEQ ID NO: 3391647 - DNA, 25 bp, Homo sapien
catagtaatgagctcgagacctccc

SEQ ID NO: 3391648 - DNA, 25 bp, Homo sapien
tggtcctcctcttggccaatggcgg

SEQ ID NO: 3391649 - DNA, 25 bp, Homo sapien
ggtttgggaaccagagcgtgcaacc

SEQ ID NO: 3391650 - DNA, 25 bp, Homo sapien
tgatttgcataagccagcggccggg

SEQ ID NO: 3391651 - DNA, 25 bp, Homo sapien
gtcatccaatttaggagatccaatt

SEQ ID NO: 3391652 - DNA, 25 bp, Homo sapien
tcatccaatttaggagatccaattt

SEQ ID NO: 3391653 - DNA, 25 bp, Homo sapien
gcactggagagggtacacttttaac

SEQ ID NO: 3391654 - DNA, 25 bp, Homo sapien
ccctttggaacagcggagagtcatt

SEQ ID NO: 3391655 - DNA, 25 bp, Homo sapien
gtttgcagagctccagacgtcctcg

SEQ ID NO: 3391656 - DNA, 25 bp, Homo sapien
tcaagataggtgtaaagatcccagg

SEQ ID NO: 3391657 - DNA, 25 bp, Homo sapien
ggaaattgtccagtgttcagaaaca

SEQ ID NO: 3391658 - DNA, 25 bp, Homo sapien
cagccgtagtcacctcccactcaga

SEQ ID NO: 3391659 - DNA, 25 bp, Homo sapien
cactcagatgttttggaaattgtcc

SEQ ID NO: 3391660 - DNA, 25 bp, Homo sapien
ttctcagccgtagtcacctcccact

SEQ ID NO: 3391661 - DNA, 25 bp, Homo sapien
ttggtacaggtaatgattccgtggg

SEQ ID NO: 3391662 - DNA, 25 bp, Homo sapien
ggtctattaggccacagggactcaa

SEQ ID NO: 3391663 - DNA, 25 bp, Homo sapien
gactcaacgccatggcagagagcaa

SEQ ID NO: 3391664 - DNA, 25 bp, Homo sapien
cagagagcaagaaacgaagtaccct

SEQ ID NO: 3391665 - DNA, 25 bp, Homo sapien
actctctctcgagcctcagatttct

SEQ ID NO: 3391666 - DNA, 25 bp, Homo sapien
gagctgttccgtgatgatgttgggc

SEQ ID NO: 3391667 - DNA, 25 bp, Homo sapien
cccaggagctgttccgtgatgatgt

SEQ ID NO: 3391668 - DNA, 25 bp, Homo sapien
aggagctgttccgtgatgatgttgg

SEQ ID NO: 3391669 - DNA, 25 bp, Homo sapien
tatccatcagtcaacaagtcctgtg

SEQ ID NO: 3391670 - DNA, 25 bp, Homo sapien
ggtacaaagggagcttcaactacat

SEQ ID NO: 3391671 - DNA, 25 bp, Homo sapien
ggtggtagaaccgaagtccagctta

SEQ ID NO: 3391672 - DNA, 25 bp, Homo sapien
taacagggcaccttgaaccgttcac

SEQ ID NO: 3391673 - DNA, 25 bp, Homo sapien
cgggtcccatatttactgatgattc

SEQ ID NO: 3391674 - DNA, 25 bp, Homo sapien
ctgatgattctgactttcttggtgc

SEQ ID NO: 3391675 - DNA, 25 bp, Homo sapien
gatgattctgactttcttggtgcat

SEQ ID NO: 3391676 - DNA, 25 bp, Homo sapien
gccccatagcgggtcccatatttac

SEQ ID NO: 3391677 - DNA, 25 bp, Homo sapien
ggtgtgctgggtgatttcaattctt

SEQ ID NO: 3391678 - DNA, 25 bp, Homo sapien
gagcgtctaccggtctttgaattcc

SEQ ID NO: 3391679 - DNA, 25 bp, Homo sapien
gcttctccaaaacgatagtattaac

SEQ ID NO: 3391680 - DNA, 25 bp, Homo sapien
aatccatcacagcatgcttctccaa

SEQ ID NO: 3391681 - DNA, 25 bp, Homo sapien
gttgtgtcctctgccaacaatctgg

SEQ ID NO: 3391682 - DNA, 25 bp, Homo sapien
gcatgacctggtgtagacttaaaaa

SEQ ID NO: 3391683 - DNA, 25 bp, Homo sapien
tcttcaaaggttattccaggtatgg

SEQ ID NO: 3391684 - DNA, 25 bp, Homo sapien
aagtacttaagtagtctggctcaag

SEQ ID NO: 3391685 - DNA, 25 bp, Homo sapien
ccttcaggaagaatagaattgtatg

SEQ ID NO: 3391686 - DNA, 25 bp, Homo sapien
tgttgagaccaaagtagtatagaag

SEQ ID NO: 3391687 - DNA, 25 bp, Homo sapien
tctttaatccactacaaaatgtgct

SEQ ID NO: 3391688 - DNA, 25 bp, Homo sapien
ttaaggtattgaacactggattgca

SEQ ID NO: 3391689 - DNA, 25 bp, Homo sapien
tgatggccgcggcgacacactcggc

SEQ ID NO: 3391690 - DNA, 25 bp, Homo sapien
cctgatggccgcggcgacacactcg

SEQ ID NO: 3391691 - DNA, 25 bp, Homo sapien
ctgatggccgcggcgacacactcgg

SEQ ID NO: 3391692 - DNA, 25 bp, Homo sapien
ggacctaagagataggacctctcgt

SEQ ID NO: 3391693 - DNA, 25 bp, Homo sapien
gacctctcgttgtacagatgcggaa

SEQ ID NO: 3391694 - DNA, 25 bp, Homo sapien
tctacgctgagccaagggttcgaag

SEQ ID NO: 3391695 - DNA, 25 bp, Homo sapien
tcacagagctgctaatgggcaaggt

SEQ ID NO: 3391696 - DNA, 25 bp, Homo sapien
cctcaagtgataaacatgtctcagc

SEQ ID NO: 3391697 - DNA, 25 bp, Homo sapien
gctactgtacttggcttggctcact

SEQ ID NO: 3391698 - DNA, 25 bp, Homo sapien
ggctcacttcctactattgatggag

SEQ ID NO: 3391699 - DNA, 25 bp, Homo sapien
tgatggagcacattttctagtagct

SEQ ID NO: 3391700 - DNA, 25 bp, Homo sapien
gcaccactggatcaaagcccatctg

SEQ ID NO: 3391701 - DNA, 25 bp, Homo sapien
cagcaccactggatcaaagcccatc

SEQ ID NO: 3391702 - DNA, 25 bp, Homo sapien
agcaccactggatcaaagcccatct

SEQ ID NO: 3391703 - DNA, 25 bp, Homo sapien
gtatctaaccttctgtaaagctcct

SEQ ID NO: 3391704 - DNA, 25 bp, Homo sapien
cttaatggagtatctaaccttctgt

SEQ ID NO: 3391705 - DNA, 25 bp, Homo sapien
aagctcctgaccaagtgtctcaggg

SEQ ID NO: 3391706 - DNA, 25 bp, Homo sapien
ctgtaaagctcctgaccaagtgtct

SEQ ID NO: 3391707 - DNA, 25 bp, Homo sapien
tcttctgtggtctaaccaccaatcc

SEQ ID NO: 3391708 - DNA, 25 bp, Homo sapien
ttctgtggtctaaccaccaatccac

SEQ ID NO: 3391709 - DNA, 25 bp, Homo sapien
gttcttctgtggtctaaccaccaat

SEQ ID NO: 3391710 - DNA, 25 bp, Homo sapien
gggttcttctgtggtctaaccacca

SEQ ID NO: 3391711 - DNA, 25 bp, Homo sapien
ccatcgggagcatgcagcttcttca

SEQ ID NO: 3391712 - DNA, 25 bp, Homo sapien
atcccatcccatcgggagcatgcag

SEQ ID NO: 3391713 - DNA, 25 bp, Homo sapien
caatatcatcccatcccatcgggag

SEQ ID NO: 3391714 - DNA, 25 bp, Homo sapien
ccatcccatcgggagcatgcagctt

SEQ ID NO: 3391715 - DNA, 25 bp, Homo sapien
gaaacattagccaatatgctttccc

SEQ ID NO: 3391716 - DNA, 25 bp, Homo sapien
caaaggactgaaacattagccaata

SEQ ID NO: 3391717 - DNA, 25 bp, Homo sapien
tcaaattcaattcagaaatgagact

SEQ ID NO: 3391718 - DNA, 25 bp, Homo sapien
cccagcactcaaattcaattcagaa

SEQ ID NO: 3391719 - DNA, 25 bp, Homo sapien
gaaacgcatactagaaccttcctta

SEQ ID NO: 3391720 - DNA, 25 bp, Homo sapien
actagaaccttccttaatttgctga

SEQ ID NO: 3391721 - DNA, 25 bp, Homo sapien
accttccttaatttgctgaatggga

SEQ ID NO: 3391722 - DNA, 25 bp, Homo sapien
tgctgcataagaaacgcatactaga

SEQ ID NO: 3391723 - DNA, 25 bp, Homo sapien
cttcttcatacaagggcaggaagga

SEQ ID NO: 3391724 - DNA, 25 bp, Homo sapien
ttcttcatacaagggcaggaaggag

SEQ ID NO: 3391725 - DNA, 25 bp, Homo sapien
ccagctaggtgcagtgcttgggcat

SEQ ID NO: 3391726 - DNA, 25 bp, Homo sapien
tactcctgtcatcacgcagtgggct

SEQ ID NO: 3391727 - DNA, 25 bp, Homo sapien
cattctccagggtaattagccagct

SEQ ID NO: 3391728 - DNA, 25 bp, Homo sapien
gcaatgggcccacactcagggaatt

SEQ ID NO: 3391729 - DNA, 25 bp, Homo sapien
tacaataaatgctttatgggatctc

SEQ ID NO: 3391730 - DNA, 25 bp, Homo sapien
taaatgctttatgggatctccttcc

SEQ ID NO: 3391731 - DNA, 25 bp, Homo sapien
caataaatgctttatgggatctcct

SEQ ID NO: 3391732 - DNA, 25 bp, Homo sapien
tttctacaataaatgctttatggga

SEQ ID NO: 3391733 - DNA, 25 bp, Homo sapien
ctttttatcaatcctgcacaaaatc

SEQ ID NO: 3391734 - DNA, 25 bp, Homo sapien
gtagtaggcatctttttatcaatcc

SEQ ID NO: 3391735 - DNA, 25 bp, Homo sapien
tagcagatgatgtaaccgcatattg

SEQ ID NO: 3391736 - DNA, 25 bp, Homo sapien
cagatgatgtaaccgcatattgctg

SEQ ID NO: 3391737 - DNA, 25 bp, Homo sapien
gcttagcagatgatgtaaccgcata

SEQ ID NO: 3391738 - DNA, 25 bp, Homo sapien
tgatgtaaccgcatattgctgctgt

SEQ ID NO: 3391739 - DNA, 25 bp, Homo sapien
gaatggttaccatgtcatcttggaa

SEQ ID NO: 3391740 - DNA, 25 bp, Homo sapien
taatggactgcttctatgacaaaac

SEQ ID NO: 3391741 - DNA, 25 bp, Homo sapien
gatgtcaaccactatgtcctgtcaa

SEQ ID NO: 3391742 - DNA, 25 bp, Homo sapien
aaagagactgctatttttggaccaa

SEQ ID NO: 3391743 - DNA, 25 bp, Homo sapien
tcggacaaaaaggactaaagagcat

SEQ ID NO: 3391744 - DNA, 25 bp, Homo sapien
gtcggacaaaaaggactaaagagca

SEQ ID NO: 3391745 - DNA, 25 bp, Homo sapien
ggacagcagcagcagacaccgcagc

SEQ ID NO: 3391746 - DNA, 25 bp, Homo sapien
acagcagcagcagacaccgcagcct

SEQ ID NO: 3391747 - DNA, 25 bp, Homo sapien
agcagcagcagacaccgcagcctcg

SEQ ID NO: 3391748 - DNA, 25 bp, Homo sapien
tgtgaagctcggacagcagcagcag

SEQ ID NO: 3391749 - DNA, 25 bp, Homo sapien
tcttggccgactttccagcatcctt

SEQ ID NO: 3391750 - DNA, 25 bp, Homo sapien
ctttcttggccgactttccagcatc

SEQ ID NO: 3391751 - DNA, 25 bp, Homo sapien
tggccgactttccagcatccttctt

SEQ ID NO: 3391752 - DNA, 25 bp, Homo sapien
gtctttcttggccgactttccagca

SEQ ID NO: 3391753 - DNA, 25 bp, Homo sapien
atttttccaaatgtacagttggttg

SEQ ID NO: 3391754 - DNA, 25 bp, Homo sapien
tttccaaatgtacagttggttggac

SEQ ID NO: 3391755 - DNA, 25 bp, Homo sapien
tccaaatgtacagttggttggacct

SEQ ID NO: 3391756 - DNA, 25 bp, Homo sapien
caaatgtacagttggttggacctat

SEQ ID NO: 3391757 - DNA, 25 bp, Homo sapien
ttacatattcttggacgaagatcag

SEQ ID NO: 3391758 - DNA, 25 bp, Homo sapien
gaagatcagtcacatggctataacc

SEQ ID NO: 3391759 - DNA, 25 bp, Homo sapien
tggacgaagatcagtcacatggcta

SEQ ID NO: 3391760 - DNA, 25 bp, Homo sapien
tattcttggacgaagatcagtcaca

SEQ ID NO: 3391761 - DNA, 25 bp, Homo sapien
taaggatcgttggcagggctgacat

SEQ ID NO: 3391762 - DNA, 25 bp, Homo sapien
attttgcaacagcttttcggcttcc

SEQ ID NO: 3391763 - DNA, 25 bp, Homo sapien
gggaatgtcagttttgggaacgtca

SEQ ID NO: 3391764 - DNA, 25 bp, Homo sapien
agtcattttgcaacagcttttcggc

SEQ ID NO: 3391765 - DNA, 25 bp, Homo sapien
cacatgtgtactagtcgagagggag

SEQ ID NO: 3391766 - DNA, 25 bp, Homo sapien
tagggaattggcttattcagttgtg

SEQ ID NO: 3391767 - DNA, 25 bp, Homo sapien
tggctatagtcactttctctgaatc

SEQ ID NO: 3391768 - DNA, 25 bp, Homo sapien
ggcaagctggtggtctgaaaattca

SEQ ID NO: 3391769 - DNA, 25 bp, Homo sapien
cactcctatccatgtaggctagagt

SEQ ID NO: 3391770 - DNA, 25 bp, Homo sapien
tcactcctatccatgtaggctagag

SEQ ID NO: 3391771 - DNA, 25 bp, Homo sapien
tctcactcctatccatgtaggctag

SEQ ID NO: 3391772 - DNA, 25 bp, Homo sapien
ctcactcctatccatgtaggctaga

SEQ ID NO: 3391773 - DNA, 25 bp, Homo sapien
cctgacatctgatttggcatctctg

SEQ ID NO: 3391774 - DNA, 25 bp, Homo sapien
tgacatctgatttggcatctctgtc

SEQ ID NO: 3391775 - DNA, 25 bp, Homo sapien
gcatctctgtcttgaccttccaaca

SEQ ID NO: 3391776 - DNA, 25 bp, Homo sapien
gatttggcatctctgtcttgacctt

SEQ ID NO: 3391777 - DNA, 25 bp, Homo sapien
cagtttcacccacctgatgtccagg

SEQ ID NO: 3391778 - DNA, 25 bp, Homo sapien
tggttttggggtgtccattccaggc

SEQ ID NO: 3391779 - DNA, 25 bp, Homo sapien
ttctcactctcttgctactgtcact

SEQ ID NO: 3391780 - DNA, 25 bp, Homo sapien
tcctcaactgtgtcccctattgccc

SEQ ID NO: 3391781 - DNA, 25 bp, Homo sapien
tctctacagcttccttaagtgagcc

SEQ ID NO: 3391782 - DNA, 25 bp, Homo sapien
taagattagccacttgaatgacatg

SEQ ID NO: 3391783 - DNA, 25 bp, Homo sapien
taagtgagcctaagatacattgctc

SEQ ID NO: 3391784 - DNA, 25 bp, Homo sapien
tagggagccaacaaacaactggtga

SEQ ID NO: 3391785 - DNA, 25 bp, Homo sapien
ttcagactaaccaaccactcacgaa

SEQ ID NO: 3391786 - DNA, 25 bp, Homo sapien
aaccactcacgaaagaacttggcag

SEQ ID NO: 3391787 - DNA, 25 bp, Homo sapien
aaccaaccactcacgaaagaacttg

SEQ ID NO: 3391788 - DNA, 25 bp, Homo sapien
gactaaccaaccactcacgaaagaa

SEQ ID NO: 3391789 - DNA, 25 bp, Homo sapien
tcctggtttggacacattccacttg

SEQ ID NO: 3391790 - DNA, 25 bp, Homo sapien
ggtttggacacattccacttgaagc

SEQ ID NO: 3391791 - DNA, 25 bp, Homo sapien
tggacacattccacttgaagctcct

SEQ ID NO: 3391792 - DNA, 25 bp, Homo sapien
cctggtttggacacattccacttga

SEQ ID NO: 3391793 - DNA, 25 bp, Homo sapien
tctacctcctctgcatctttgtcca

SEQ ID NO: 3391794 - DNA, 25 bp, Homo sapien
cactctacctcctctgcatctttgt

SEQ ID NO: 3391795 - DNA, 25 bp, Homo sapien
cttacactctacctcctctgcatct

SEQ ID NO: 3391796 - DNA, 25 bp, Homo sapien
ctacctcctctgcatctttgtccat

SEQ ID NO: 3391797 - DNA, 25 bp, Homo sapien
agcatccagtttcacccttatccag

SEQ ID NO: 3391798 - DNA, 25 bp, Homo sapien
tgggaccagaggctattttgggcct

SEQ ID NO: 3391799 - DNA, 25 bp, Homo sapien
gcatccagtttcacccttatccagg

SEQ ID NO: 3391800 - DNA, 25 bp, Homo sapien
ctagcctatgggaccagaggctatt

SEQ ID NO: 3391801 - DNA, 25 bp, Homo sapien
gtagttcaatcatcaggttggccaa

SEQ ID NO: 3391802 - DNA, 25 bp, Homo sapien
tcttggtagttcaatcatcaggttg

SEQ ID NO: 3391803 - DNA, 25 bp, Homo sapien
gccaggtatcttggtagttcaatca

SEQ ID NO: 3391804 - DNA, 25 bp, Homo sapien
gtatcttggtagttcaatcatcagg

SEQ ID NO: 3391805 - DNA, 25 bp, Homo sapien
ttcaggacccagagcacgtagtcgt

SEQ ID NO: 3391806 - DNA, 25 bp, Homo sapien
caggacccagagcacgtagtcgttt

SEQ ID NO: 3391807 - DNA, 25 bp, Homo sapien
ggattcaggacccagagcacgtagt

SEQ ID NO: 3391808 - DNA, 25 bp, Homo sapien
cccagagcacgtagtcgtttgtaac

SEQ ID NO: 3391809 - DNA, 25 bp, Homo sapien
cagattgctaggatttctaaaagga

SEQ ID NO: 3391810 - DNA, 25 bp, Homo sapien
taatttttgtacgtggagcacacag

SEQ ID NO: 3391811 - DNA, 25 bp, Homo sapien
tatcatagtacccacaatctaacag

SEQ ID NO: 3391812 - DNA, 25 bp, Homo sapien
tctaaaaggatttgcctccgtgatg

SEQ ID NO: 3391813 - DNA, 25 bp, Homo sapien
tgctcaagaggttctcgactggagg

SEQ ID NO: 3391814 - DNA, 25 bp, Homo sapien
gaggaccacactcaagccgacttat

SEQ ID NO: 3391815 - DNA, 25 bp, Homo sapien
tagaagatgtttgctacctgaacac

SEQ ID NO: 3391816 - DNA, 25 bp, Homo sapien
taaaattggattagcctggagcagg

SEQ ID NO: 3391817 - DNA, 25 bp, Homo sapien
caataaggacgcagacttgtacacg

SEQ ID NO: 3391818 - DNA, 25 bp, Homo sapien
tcattggctgacactttcgaacacg

SEQ ID NO: 3391819 - DNA, 25 bp, Homo sapien
tcagtagtcaagtgcctttggagcc

SEQ ID NO: 3391820 - DNA, 25 bp, Homo sapien
ctctggagagcgtgaatgggcccaa

SEQ ID NO: 3391821 - DNA, 25 bp, Homo sapien
ctttcttctttgctataatagagta

SEQ ID NO: 3391822 - DNA, 25 bp, Homo sapien
caggatggctcaatgaaattatctt

SEQ ID NO: 3391823 - DNA, 25 bp, Homo sapien
ctgtaaaacaggatggctcaatgaa

SEQ ID NO: 3391824 - DNA, 25 bp, Homo sapien
gtaaaacaggatggctcaatgaaat

SEQ ID NO: 3391825 - DNA, 25 bp, Homo sapien
tattgacctaaataagaggtgcccc

SEQ ID NO: 3391826 - DNA, 25 bp, Homo sapien
tgatcacagaaagtctctaccagtg

SEQ ID NO: 3391827 - DNA, 25 bp, Homo sapien
ccttcctaatctgagaacattgtgc

SEQ ID NO: 3391828 - DNA, 25 bp, Homo sapien
tctttgatggtacaggactcagaac

SEQ ID NO: 3391829 - DNA, 25 bp, Homo sapien
tggccatcttggaacctccctttcc

SEQ ID NO: 3391830 - DNA, 25 bp, Homo sapien
ttggccatcttggaacctccctttc

SEQ ID NO: 3391831 - DNA, 25 bp, Homo sapien
gcatcactcacgctgggggctgtag

SEQ ID NO: 3391832 - DNA, 25 bp, Homo sapien
cttctgcatcactcacgctgggggc

SEQ ID NO: 3391833 - DNA, 25 bp, Homo sapien
tccatctggtcctgatggatttttt

SEQ ID NO: 3391834 - DNA, 25 bp, Homo sapien
tgattagaatagtttcagaatggta

SEQ ID NO: 3391835 - DNA, 25 bp, Homo sapien
attgattagaatagtttcagaatgg

SEQ ID NO: 3391836 - DNA, 25 bp, Homo sapien
atccatctggtcctgatggattttt

SEQ ID NO: 3391837 - DNA, 25 bp, Homo sapien
gatgtccttgctcactgatggacat

SEQ ID NO: 3391838 - DNA, 25 bp, Homo sapien
tgatgtccttgctcactgatggaca

SEQ ID NO: 3391839 - DNA, 25 bp, Homo sapien
aatgatgtccttgctcactgatgga

SEQ ID NO: 3391840 - DNA, 25 bp, Homo sapien
atgatgtccttgctcactgatggac

SEQ ID NO: 3391841 - DNA, 25 bp, Homo sapien
gatgacaggtaaccgtatgacacgc

SEQ ID NO: 3391842 - DNA, 25 bp, Homo sapien
aattaatgattgtgtagatgtccag

SEQ ID NO: 3391843 - DNA, 25 bp, Homo sapien
gaaaagctagttgacataaaaggag

SEQ ID NO: 3391844 - DNA, 25 bp, Homo sapien
tgtccccataaaacaagttgaacca

SEQ ID NO: 3391845 - DNA, 25 bp, Homo sapien
gtatgcatatatggttggtaccttg

SEQ ID NO: 3391846 - DNA, 25 bp, Homo sapien
caaaataccctattaagtatgcata

SEQ ID NO: 3391847 - DNA, 25 bp, Homo sapien
ttggtaccttgtggtaataattcaa

SEQ ID NO: 3391848 - DNA, 25 bp, Homo sapien
ttaagtatgcatatatggttggtac

SEQ ID NO: 3391849 - DNA, 25 bp, Homo sapien
caaatggatgggtcacaagtcacgt

SEQ ID NO: 3391850 - DNA, 25 bp, Homo sapien
tgtgagagaacccattccatgaccc

SEQ ID NO: 3391851 - DNA, 25 bp, Homo sapien
tcacgtagcatagggtgtcagacca

SEQ ID NO: 3391852 - DNA, 25 bp, Homo sapien
tgtctgatgctctatccatgccgga

SEQ ID NO: 3391853 - DNA, 25 bp, Homo sapien
aggtgttctgtcttttgtgccatca

SEQ ID NO: 3391854 - DNA, 25 bp, Homo sapien
tcttttgtgccatcatcatctaact

SEQ ID NO: 3391855 - DNA, 25 bp, Homo sapien
tgccacacacatttgggatgtcagc

SEQ ID NO: 3391856 - DNA, 25 bp, Homo sapien
gcagctgctcctctaaaagtgtgct

SEQ ID NO: 3391857 - DNA, 25 bp, Homo sapien
ttcctgggcataagaatggactgcc

SEQ ID NO: 3391858 - DNA, 25 bp, Homo sapien
tggactgccaaaatctagctgaaac

SEQ ID NO: 3391859 - DNA, 25 bp, Homo sapien
tctacacaagaggtcattcctgggc

SEQ ID NO: 3391860 - DNA, 25 bp, Homo sapien
tatagaagagttgcacctggacagt

SEQ ID NO: 3391861 - DNA, 25 bp, Homo sapien
tgggcttgcgccagctctagtgaca

SEQ ID NO: 3391862 - DNA, 25 bp, Homo sapien
gagcagtcttttaccccatccgtag

SEQ ID NO: 3391863 - DNA, 25 bp, Homo sapien
tattgcctaattgtcctgcacaggg

SEQ ID NO: 3391864 - DNA, 25 bp, Homo sapien
ccatccgtagtttgcagtgggaaca

SEQ ID NO: 3391865 - DNA, 25 bp, Homo sapien
ctttcattgtgaagtcaggaggtga

SEQ ID NO: 3391866 - DNA, 25 bp, Homo sapien
tctagtaccaaacctacagccatgt

SEQ ID NO: 3391867 - DNA, 25 bp, Homo sapien
tcaggaagtcggaataggtcccact

SEQ ID NO: 3391868 - DNA, 25 bp, Homo sapien
gatataatcggagcacagtttggca

SEQ ID NO: 3391869 - DNA, 25 bp, Homo sapien
gaggtcctggggtatttcttgttca

SEQ ID NO: 3391870 - DNA, 25 bp, Homo sapien
tgttcattttgactcaccaggaggg

SEQ ID NO: 3391871 - DNA, 25 bp, Homo sapien
ttcttgttcattttgactcaccagg

SEQ ID NO: 3391872 - DNA, 25 bp, Homo sapien
tttgactcaccaggagggaaaatcc

SEQ ID NO: 3391873 - DNA, 25 bp, Homo sapien
ggaactgaaagggtctgcgacactc

SEQ ID NO: 3391874 - DNA, 25 bp, Homo sapien
gaattcctaccgctgggaactgaaa

SEQ ID NO: 3391875 - DNA, 25 bp, Homo sapien
ttcttgactcgggttagtctctggg

SEQ ID NO: 3391876 - DNA, 25 bp, Homo sapien
tctgaagcgccctccagggaagtta

SEQ ID NO: 3391877 - DNA, 25 bp, Homo sapien
tcaaggcaccgtggagccctctcgt

SEQ ID NO: 3391878 - DNA, 25 bp, Homo sapien
tggtaattcgtgcactagagtgtct

SEQ ID NO: 3391879 - DNA, 25 bp, Homo sapien
tagagtgtctatttcgaggcagcgg

SEQ ID NO: 3391880 - DNA, 25 bp, Homo sapien
catatgacagcgcacgtcaaggcac

SEQ ID NO: 3391881 - DNA, 25 bp, Homo sapien
gtcttggctacaggcaaatgagaac

SEQ ID NO: 3391882 - DNA, 25 bp, Homo sapien
ccatataagttctcttcaagggtct

SEQ ID NO: 3391883 - DNA, 25 bp, Homo sapien
ctagccatataagttctcttcaagg

SEQ ID NO: 3391884 - DNA, 25 bp, Homo sapien
gagaacccgaaaggctatttgctct

SEQ ID NO: 3391885 - DNA, 25 bp, Homo sapien
gaggttcggctcacactgagatcgg

SEQ ID NO: 3391886 - DNA, 25 bp, Homo sapien
cctgtgtcgcccttaaaaagcgtct

SEQ ID NO: 3391887 - DNA, 25 bp, Homo sapien
ccgctgtaaagccaaccctgtgtcg

SEQ ID NO: 3391888 - DNA, 25 bp, Homo sapien
ggtagtcttcttggccccgctgtaa

SEQ ID NO: 3391889 - DNA, 25 bp, Homo sapien
tggacagagccaacggatttgtccg

SEQ ID NO: 3391890 - DNA, 25 bp, Homo sapien
agagccaacggatttgtccgaggtg

SEQ ID NO: 3391891 - DNA, 25 bp, Homo sapien
agccaacggatttgtccgaggtggc

SEQ ID NO: 3391892 - DNA, 25 bp, Homo sapien
acagagccaacggatttgtccgagg

SEQ ID NO: 3391893 - DNA, 25 bp, Homo sapien
cgggtgtgtaatccgggcgatagga

SEQ ID NO: 3391894 - DNA, 25 bp, Homo sapien
cgggcgataggagtccattcagcac

SEQ ID NO: 3391895 - DNA, 25 bp, Homo sapien
cctgctgtgccgggtgtgtaatccg

SEQ ID NO: 3391896 - DNA, 25 bp, Homo sapien
tgtaatccgggcgataggagtccat

SEQ ID NO: 3391897 - DNA, 25 bp, Homo sapien
cctgcattataattgaaaaatcttg

SEQ ID NO: 3391898 - DNA, 25 bp, Homo sapien
tgagtagcaataaaacctgcattat

SEQ ID NO: 3391899 - DNA, 25 bp, Homo sapien
ttgagtctccaggacagcaaaggca

SEQ ID NO: 3391900 - DNA, 25 bp, Homo sapien
aggcacaatggtgagtagcaataaa

SEQ ID NO: 3391901 - DNA, 25 bp, Homo sapien
tgatgacttcaaacaagacacatta

SEQ ID NO: 3391902 - DNA, 25 bp, Homo sapien
agtggtgggcgatccactgagcaaa

SEQ ID NO: 3391903 - DNA, 25 bp, Homo sapien
caagtggtgggcgatccactgagca

SEQ ID NO: 3391904 - DNA, 25 bp, Homo sapien
catgatgacttcaaacaagacacat

SEQ ID NO: 3391905 - DNA, 25 bp, Homo sapien
tttgtcttctgtagtcgccaaggtg

SEQ ID NO: 3391906 - DNA, 25 bp, Homo sapien
tgtctctcggagtgagggcgtttgc

SEQ ID NO: 3391907 - DNA, 25 bp, Homo sapien
cagttgctttgtcttctgtagtcgc

SEQ ID NO: 3391908 - DNA, 25 bp, Homo sapien
gcgtaaatctataggtttttcgaca

SEQ ID NO: 3391909 - DNA, 25 bp, Homo sapien
acaggttcctgtgggcaactagtgg

SEQ ID NO: 3391910 - DNA, 25 bp, Homo sapien
gccttggtgcctctcgcctagtcat

SEQ ID NO: 3391911 - DNA, 25 bp, Homo sapien
ggtgcctctcgcctagtcatcagta

SEQ ID NO: 3391912 - DNA, 25 bp, Homo sapien
caactagtggctcgccttggtgcct

SEQ ID NO: 3391913 - DNA, 25 bp, Homo sapien
gagatttccggagtcgtccccacat

SEQ ID NO: 3391914 - DNA, 25 bp, Homo sapien
gggacgttgccaaagctcgagttat

SEQ ID NO: 3391915 - DNA, 25 bp, Homo sapien
ctatttcccgagatttccggagtcg

SEQ ID NO: 3391916 - DNA, 25 bp, Homo sapien
cgagttattgcctatttcccgagat

SEQ ID NO: 3391917 - DNA, 25 bp, Homo sapien
ggaaagataccttgcgttagcgcct

SEQ ID NO: 3391918 - DNA, 25 bp, Homo sapien
tcatggtgtcagtgccaaaacgacg

SEQ ID NO: 3391919 - DNA, 25 bp, Homo sapien
tcagagcgagtaaaatcatggtgtc

SEQ ID NO: 3391920 - DNA, 25 bp, Homo sapien
ccccttggtgggaactcagagcgag

SEQ ID NO: 3391921 - DNA, 25 bp, Homo sapien
ggtctgaaacttaagagctatccac

SEQ ID NO: 3391922 - DNA, 25 bp, Homo sapien
ggtggtctgaaacttaagagctatc

SEQ ID NO: 3391923 - DNA, 25 bp, Homo sapien
ctgggtggtctgaaacttaagagct

SEQ ID NO: 3391924 - DNA, 25 bp, Homo sapien
gggctgggtggtctgaaacttaaga

SEQ ID NO: 3391925 - DNA, 25 bp, Homo sapien
gcaagaatgatattcaaacaaagca

SEQ ID NO: 3391926 - DNA, 25 bp, Homo sapien
cataagcaagcaagaatgatattca

SEQ ID NO: 3391927 - DNA, 25 bp, Homo sapien
ctacataagcaagcaagaatgatat

SEQ ID NO: 3391928 - DNA, 25 bp, Homo sapien
caagaatgatattcaaacaaagcac

SEQ ID NO: 3391929 - DNA, 25 bp, Homo sapien
caaattgtgtgtcgtgattctttgc

SEQ ID NO: 3391930 - DNA, 25 bp, Homo sapien
tgtgtcgtgattctttgcctctcct

SEQ ID NO: 3391931 - DNA, 25 bp, Homo sapien
tgtgtgtcgtgattctttgcctctc

SEQ ID NO: 3391932 - DNA, 25 bp, Homo sapien
attgtgtgtcgtgattctttgcctc

SEQ ID NO: 3391933 - DNA, 25 bp, Homo sapien
atttgcagtgtataccccatcttcg

SEQ ID NO: 3391934 - DNA, 25 bp, Homo sapien
cccatcttcgatttgctgcttgtag

SEQ ID NO: 3391935 - DNA, 25 bp, Homo sapien
tcgaggcctcttcaaggatgcatct

SEQ ID NO: 3391936 - DNA, 25 bp, Homo sapien
aagcgaattggcctaggttctgtcg

SEQ ID NO: 3391937 - DNA, 25 bp, Homo sapien
ggcaggtcttggctaggcaattctt

SEQ ID NO: 3391938 - DNA, 25 bp, Homo sapien
ccagcatctcagcagggcaaagtgg

SEQ ID NO: 3391939 - DNA, 25 bp, Homo sapien
cacttagtgaccttcagctggtggc

SEQ ID NO: 3391940 - DNA, 25 bp, Homo sapien
tcacattgcatctccagcagggtag

SEQ ID NO: 3391941 - DNA, 25 bp, Homo sapien
cttcacagttcaaagtggctggaga

SEQ ID NO: 3391942 - DNA, 25 bp, Homo sapien
tacttagcaaggctcctacaatggc

SEQ ID NO: 3391943 - DNA, 25 bp, Homo sapien
caaggctcctacaatggcttcttca

SEQ ID NO: 3391944 - DNA, 25 bp, Homo sapien
ctttgcccctctacttagcaaggct

SEQ ID NO: 3391945 - DNA, 25 bp, Homo sapien
tcatcaagggaaagtgttccctgca

SEQ ID NO: 3391946 - DNA, 25 bp, Homo sapien
ggaaagtgttccctgcagtgtatta

SEQ ID NO: 3391947 - DNA, 25 bp, Homo sapien
tgttccctgcagtgtattaagctgt

SEQ ID NO: 3391948 - DNA, 25 bp, Homo sapien
ttttcatcatcaagggaaagtgttc

SEQ ID NO: 3391949 - DNA, 25 bp, Homo sapien
tatgttccaagcataaggattctgc

SEQ ID NO: 3391950 - DNA, 25 bp, Homo sapien
tttccattatactctgaggacagca

SEQ ID NO: 3391951 - DNA, 25 bp, Homo sapien
cattctggtgtcgtttttcgaccac

SEQ ID NO: 3391952 - DNA, 25 bp, Homo sapien
gattctgctctcgagaagtagccca

SEQ ID NO: 3391953 - DNA, 25 bp, Homo sapien
ttactgaaagctgtcatcataggct

SEQ ID NO: 3391954 - DNA, 25 bp, Homo sapien
aagctgtcatcataggcttgatcaa

SEQ ID NO: 3391955 - DNA, 25 bp, Homo sapien
gaaagctgtcatcataggcttgatc

SEQ ID NO: 3391956 - DNA, 25 bp, Homo sapien
actgaaagctgtcatcataggcttg

SEQ ID NO: 3391957 - DNA, 25 bp, Homo sapien
tgggaagcacaagcctataccattg

SEQ ID NO: 3391958 - DNA, 25 bp, Homo sapien
tagcattggaaacagtgggaagcac

SEQ ID NO: 3391959 - DNA, 25 bp, Homo sapien
taggctcagtactgctagcattgga

SEQ ID NO: 3391960 - DNA, 25 bp, Homo sapien
gcctataccattgcccttcatctgt

SEQ ID NO: 3391961 - DNA, 25 bp, Homo sapien
cttcccaatctaaagatggtgccag

SEQ ID NO: 3391962 - DNA, 25 bp, Homo sapien
gatggtgccagtccaaattggcatc

SEQ ID NO: 3391963 - DNA, 25 bp, Homo sapien
ccaatctaaagatggtgccagtcca

SEQ ID NO: 3391964 - DNA, 25 bp, Homo sapien
tctgttgttcttgttacaaatatag

SEQ ID NO: 3391965 - DNA, 25 bp, Homo sapien
caattttgaccgctaccgttttgtg

SEQ ID NO: 3391966 - DNA, 25 bp, Homo sapien
attttgaccgctaccgttttgtgca

SEQ ID NO: 3391967 - DNA, 25 bp, Homo sapien
ccgctaccgttttgtgcattggagg

SEQ ID NO: 3391968 - DNA, 25 bp, Homo sapien
ttgaccgctaccgttttgtgcattg

SEQ ID NO: 3391969 - DNA, 25 bp, Homo sapien
ttgttctttatcaaagcatcactac

SEQ ID NO: 3391970 - DNA, 25 bp, Homo sapien
aaagcatcactactgacctgtccac

SEQ ID NO: 3391971 - DNA, 25 bp, Homo sapien
tctttatcaaagcatcactactgac

SEQ ID NO: 3391972 - DNA, 25 bp, Homo sapien
cactactgacctgtccactccctga

SEQ ID NO: 3391973 - DNA, 25 bp, Homo sapien
cagtttacatgaagtgacggtgttt

SEQ ID NO: 3391974 - DNA, 25 bp, Homo sapien
tgtttattgtgtaggataggtacat

SEQ ID NO: 3391975 - DNA, 25 bp, Homo sapien
gtttacatgaagtgacggtgtttat

SEQ ID NO: 3391976 - DNA, 25 bp, Homo sapien
catgaagtgacggtgtttattgtgt

SEQ ID NO: 3391977 - DNA, 25 bp, Homo sapien
caacaacaatagctctgattaggct

SEQ ID NO: 3391978 - DNA, 25 bp, Homo sapien
aagcagtacacttttttgggccaga

SEQ ID NO: 3391979 - DNA, 25 bp, Homo sapien
tctgggtggcaacaacaatagctct

SEQ ID NO: 3391980 - DNA, 25 bp, Homo sapien
tctgattaggctctaagcagtacac

SEQ ID NO: 3391981 - DNA, 25 bp, Homo sapien
actcttaaattaacagtgtatctct

SEQ ID NO: 3391982 - DNA, 25 bp, Homo sapien
gtgtatctctggaatttgtaaaaca

SEQ ID NO: 3391983 - DNA, 25 bp, Homo sapien
cctctattctctggaaagttactct

SEQ ID NO: 3391984 - DNA, 25 bp, Homo sapien
tctctggaaagttactcttaaatta

SEQ ID NO: 3391985 - DNA, 25 bp, Homo sapien
ggatcatgtttctattctctggaag

SEQ ID NO: 3391986 - DNA, 25 bp, Homo sapien
tctgacatcctatccgagcctccag

SEQ ID NO: 3391987 - DNA, 25 bp, Homo sapien
tgggatcatgtttctattctctgga

SEQ ID NO: 3391988 - DNA, 25 bp, Homo sapien
aggccctctgacatcctatccgagc

SEQ ID NO: 3391989 - DNA, 25 bp, Homo sapien
gacaagatagatagagaaaaggacc

SEQ ID NO: 3391990 - DNA, 25 bp, Homo sapien
ttttttaacattattcctagtctgc

SEQ ID NO: 3391991 - DNA, 25 bp, Homo sapien
ggaccggtatggaattttatccaga

SEQ ID NO: 3391992 - DNA, 25 bp, Homo sapien
gatagagaaaaggaccggtatggaa

SEQ ID NO: 3391993 - DNA, 25 bp, Homo sapien
atttctacagcacttgactgttggg

SEQ ID NO: 3391994 - DNA, 25 bp, Homo sapien
actgttggggcaggcacctttttga

SEQ ID NO: 3391995 - DNA, 25 bp, Homo sapien
ctcccttatttcctagacagtaatc

SEQ ID NO: 3391996 - DNA, 25 bp, Homo sapien
ttcattatggaagtccgagtagttc

SEQ ID NO: 3391997 - DNA, 25 bp, Homo sapien
gccatgtagttttattggaggctat

SEQ ID NO: 3391998 - DNA, 25 bp, Homo sapien
cattttttgccatgtagttttattg

SEQ ID NO: 3391999 - DNA, 25 bp, Homo sapien
tgccatgtagttttattggaggcta

SEQ ID NO: 3392000 - DNA, 25 bp, Homo sapien
ttttgccatgtagttttattggagg

SEQ ID NO: 3392001 - DNA, 25 bp, Homo sapien
tacttcatattcgcctcttttgagg

SEQ ID NO: 3392002 - DNA, 25 bp, Homo sapien
cttcatattcgcctcttttgaggcc

SEQ ID NO: 3392003 - DNA, 25 bp, Homo sapien
acttcatattcgcctcttttgaggc

SEQ ID NO: 3392004 - DNA, 25 bp, Homo sapien
ttcatattcgcctcttttgaggcca

SEQ ID NO: 3392005 - DNA, 25 bp, Homo sapien
ggataactcagaggttcctggcaga

SEQ ID NO: 3392006 - DNA, 25 bp, Homo sapien
tagactttcatggaagcacaaaccc

SEQ ID NO: 3392007 - DNA, 25 bp, Homo sapien
catgcaagggatgtaggttcacact

SEQ ID NO: 3392008 - DNA, 25 bp, Homo sapien
cattgctggcattatcccctgagcc

SEQ ID NO: 3392009 - DNA, 25 bp, Homo sapien
aggagagtgtttccattcgccaaat

SEQ ID NO: 3392010 - DNA, 25 bp, Homo sapien
tccagacaggttcctatccaggctt

SEQ ID NO: 3392011 - DNA, 25 bp, Homo sapien
tctctcctggcgctgacacaaggag

SEQ ID NO: 3392012 - DNA, 25 bp, Homo sapien
tcctatccaggcttccctgtgggct

SEQ ID NO: 3392013 - DNA, 25 bp, Homo sapien
tctgagggcagctgaaaaccaggag

SEQ ID NO: 3392014 - DNA, 25 bp, Homo sapien
tcagggtctctgagggcagctgaaa

SEQ ID NO: 3392015 - DNA, 25 bp, Homo sapien
caggaggggtttggcgttttcagct

SEQ ID NO: 3392016 - DNA, 25 bp, Homo sapien
ggtctctgagggcagctgaaaacca

SEQ ID NO: 3392017 - DNA, 25 bp, Homo sapien
agggcctgggaccactgggacattc

SEQ ID NO: 3392018 - DNA, 25 bp, Homo sapien
ctcctgcaactgttccagagagtgt

SEQ ID NO: 3392019 - DNA, 25 bp, Homo sapien
gttccagagagtgtttttccagagg

SEQ ID NO: 3392020 - DNA, 25 bp, Homo sapien
gggacattctccagagccctcaggc

SEQ ID NO: 3392021 - DNA, 25 bp, Homo sapien
tagagtagaaaggtaaagcagcgac

SEQ ID NO: 3392022 - DNA, 25 bp, Homo sapien
ttctctgtgctttggggtcaagggt

SEQ ID NO: 3392023 - DNA, 25 bp, Homo sapien
taaggagtatcttttgtagagtaga

SEQ ID NO: 3392024 - DNA, 25 bp, Homo sapien
ttgatttctgtttttcggagactga

SEQ ID NO: 3392025 - DNA, 25 bp, Homo sapien
tagggctcccattgaccctggctct

SEQ ID NO: 3392026 - DNA, 25 bp, Homo sapien
tggctctctccctaattgaacctga

SEQ ID NO: 3392027 - DNA, 25 bp, Homo sapien
ttgaacctgaggactaaaacatcct

SEQ ID NO: 3392028 - DNA, 25 bp, Homo sapien
gcttttagaaaaggcgagccatatt

SEQ ID NO: 3392029 - DNA, 25 bp, Homo sapien
ctttgtttctgacatttctatgcag

SEQ ID NO: 3392030 - DNA, 25 bp, Homo sapien
gcagagctgaagggacctttatcat

SEQ ID NO: 3392031 - DNA, 25 bp, Homo sapien
tgtttctgacatttctatgcagagc

SEQ ID NO: 3392032 - DNA, 25 bp, Homo sapien
tttctgacatttctatgcagagctg

SEQ ID NO: 3392033 - DNA, 25 bp, Homo sapien
ggtcaatcagacctttgcctgtttc

SEQ ID NO: 3392034 - DNA, 25 bp, Homo sapien
tcagagctcccctaataccagtgcc

SEQ ID NO: 3392035 - DNA, 25 bp, Homo sapien
cctaataccagtgccctctggcctg

SEQ ID NO: 3392036 - DNA, 25 bp, Homo sapien
ctgatgggtcaatcagacctttgcc

SEQ ID NO: 3392037 - DNA, 25 bp, Homo sapien
gcagcagacactctgaagttctgaa

SEQ ID NO: 3392038 - DNA, 25 bp, Homo sapien
tgaaaaggaccctatcagtatcccc

SEQ ID NO: 3392039 - DNA, 25 bp, Homo sapien
caggtaaatcccagatcaaattttt

SEQ ID NO: 3392040 - DNA, 25 bp, Homo sapien
gtatccccggggtcaggcagatcct

SEQ ID NO: 3392041 - DNA, 25 bp, Homo sapien
gctgcactgcatgatgcaagagcta

SEQ ID NO: 3392042 - DNA, 25 bp, Homo sapien
gatgcaagagctaatccctttgact

SEQ ID NO: 3392043 - DNA, 25 bp, Homo sapien
tgcatgatgcaagagctaatccctt

SEQ ID NO: 3392044 - DNA, 25 bp, Homo sapien
aagagctaatccctttgacttccag

SEQ ID NO: 3392045 - DNA, 25 bp, Homo sapien
gatcagttaatccttccatatggtt

SEQ ID NO: 3392046 - DNA, 25 bp, Homo sapien
ggttacttgatagcaccgatcagtt

SEQ ID NO: 3392047 - DNA, 25 bp, Homo sapien
cctgattgactttcacttgatacgg

SEQ ID NO: 3392048 - DNA, 25 bp, Homo sapien
cacttgatacggttacttgatagca

SEQ ID NO: 3392049 - DNA, 25 bp, Homo sapien
gtcagcatcatgtgactgcgttgag

SEQ ID NO: 3392050 - DNA, 25 bp, Homo sapien
tcgtcagcatcatgtgactgcgttg

SEQ ID NO: 3392051 - DNA, 25 bp, Homo sapien
cttcgtcagcatcatgtgactgcgt

SEQ ID NO: 3392052 - DNA, 25 bp, Homo sapien
cgtcagcatcatgtgactgcgttga

SEQ ID NO: 3392053 - DNA, 25 bp, Homo sapien
tagccgtaggaggtttatctccaga

SEQ ID NO: 3392054 - DNA, 25 bp, Homo sapien
ctgtgtcttctacagggtttgtaca

SEQ ID NO: 3392055 - DNA, 25 bp, Homo sapien
gacccaaagctgcctaatcctttaa

SEQ ID NO: 3392056 - DNA, 25 bp, Homo sapien
tctacagggtttgtacaaagaacag

SEQ ID NO: 3392057 - DNA, 25 bp, Homo sapien
ccatggcagacgggaagcctttgat

SEQ ID NO: 3392058 - DNA, 25 bp, Homo sapien
aataccatggcagacgggaagcctt

SEQ ID NO: 3392059 - DNA, 25 bp, Homo sapien
aaataccatggcagacgggaagcct

SEQ ID NO: 3392060 - DNA, 25 bp, Homo sapien
taccatggcagacgggaagcctttg

SEQ ID NO: 3392061 - DNA, 25 bp, Homo sapien
tttgatttccacttcaatttcctaa

SEQ ID NO: 3392062 - DNA, 25 bp, Homo sapien
ctctgttctcattgtaatctttccc

SEQ ID NO: 3392063 - DNA, 25 bp, Homo sapien
tctgtgtgggattcatttgctcgag

SEQ ID NO: 3392064 - DNA, 25 bp, Homo sapien
gctcgagataattgcttctctataa

SEQ ID NO: 3392065 - DNA, 25 bp, Homo sapien
cttgcacattctggtcaactaaatc

SEQ ID NO: 3392066 - DNA, 25 bp, Homo sapien
tgtattctctatccctggggcttct

SEQ ID NO: 3392067 - DNA, 25 bp, Homo sapien
cttctgtattgaaccgtaggtggga

SEQ ID NO: 3392068 - DNA, 25 bp, Homo sapien
cattctggtcaactaaatctgtttg

SEQ ID NO: 3392069 - DNA, 25 bp, Homo sapien
ccaaatcgaccagaatcagattctt

SEQ ID NO: 3392070 - DNA, 25 bp, Homo sapien
aaatcgaccagaatcagattcttct

SEQ ID NO: 3392071 - DNA, 25 bp, Homo sapien
caaatcgaccagaatcagattcttc

SEQ ID NO: 3392072 - DNA, 25 bp, Homo sapien
tctttgtaaatccattatctgcaaa

SEQ ID NO: 3392073 - DNA, 25 bp, Homo sapien
cctctttgtaaatccattatctgca

SEQ ID NO: 3392074 - DNA, 25 bp, Homo sapien
gacaaacacgtttgcagaaaaacaa

SEQ ID NO: 3392075 - DNA, 25 bp, Homo sapien
aaacaaggctcctgacaaacacgtt

SEQ ID NO: 3392076 - DNA, 25 bp, Homo sapien
ctcaacagctcgttttcttttggta

SEQ ID NO: 3392077 - DNA, 25 bp, Homo sapien
tagaaccctcgatttttgcagaagc

SEQ ID NO: 3392078 - DNA, 25 bp, Homo sapien
gcctctgagggttcatattacacag

SEQ ID NO: 3392079 - DNA, 25 bp, Homo sapien
tcttaatgtcccaaaataattgcaa

SEQ ID NO: 3392080 - DNA, 25 bp, Homo sapien
gtactgcagtaattttgaatgaagg

SEQ ID NO: 3392081 - DNA, 25 bp, Homo sapien
tctagaggacacgttcgacaattgt

SEQ ID NO: 3392082 - DNA, 25 bp, Homo sapien
caggacccaacacctttcaatatgt

SEQ ID NO: 3392083 - DNA, 25 bp, Homo sapien
gagccaagtgctatttaccccagga

SEQ ID NO: 3392084 - DNA, 25 bp, Homo sapien
gataaattcttcactgattaaacaa

SEQ ID NO: 3392085 - DNA, 25 bp, Homo sapien
tttccatctggcgttagtgagatag

SEQ ID NO: 3392086 - DNA, 25 bp, Homo sapien
aattcttcactgattaaacaattgg

SEQ ID NO: 3392087 - DNA, 25 bp, Homo sapien
cgttagtgagataggatttgtgata

SEQ ID NO: 3392088 - DNA, 25 bp, Homo sapien
caaattcaggctgttgaacaaattc

SEQ ID NO: 3392089 - DNA, 25 bp, Homo sapien
tacttcctcctacagtcaaattcag

SEQ ID NO: 3392090 - DNA, 25 bp, Homo sapien
ggtatttccataccgcatatagcgt

SEQ ID NO: 3392091 - DNA, 25 bp, Homo sapien
aaaacgcagctgagaggtatttcca

SEQ ID NO: 3392092 - DNA, 25 bp, Homo sapien
cttcagcagatgcttgcactaggtg

SEQ ID NO: 3392093 - DNA, 25 bp, Homo sapien
ttcagcagatgcttgcactaggtgg

SEQ ID NO: 3392094 - DNA, 25 bp, Homo sapien
atgcttgcactaggtgggctgcatg

SEQ ID NO: 3392095 - DNA, 25 bp, Homo sapien
tgatcattggtaggactgttaggct

SEQ ID NO: 3392096 - DNA, 25 bp, Homo sapien
ctgcagcccatccttgtgaagaagg

SEQ ID NO: 3392097 - DNA, 25 bp, Homo sapien
gatgatgaaggttactgttccccac

SEQ ID NO: 3392098 - DNA, 25 bp, Homo sapien
ggtaccagtgcgctctcaaagccaa

SEQ ID NO: 3392099 - DNA, 25 bp, Homo sapien
ggacctttctactgagtctaaagct

SEQ ID NO: 3392100 - DNA, 25 bp, Homo sapien
tcacatgtgtggcacggattctgga

SEQ ID NO: 3392101 - DNA, 25 bp, Homo sapien
tctgctgtttcttttaggacctttc

SEQ ID NO: 3392102 - DNA, 25 bp, Homo sapien
aaagctttgctgatgcgtttgccca

SEQ ID NO: 3392103 - DNA, 25 bp, Homo sapien
ccttggcatgccttaatgtttgaga

SEQ ID NO: 3392104 - DNA, 25 bp, Homo sapien
tgagaacaggccataatacgtagtc

SEQ ID NO: 3392105 - DNA, 25 bp, Homo sapien
tacgtagtcagctagagtcccacaa

SEQ ID NO: 3392106 - DNA, 25 bp, Homo sapien
taattagccatcctgaacccatcat

SEQ ID NO: 3392107 - DNA, 25 bp, Homo sapien
ctatcaaacgaggagcttttgttca

SEQ ID NO: 3392108 - DNA, 25 bp, Homo sapien
tatcaaacgaggagcttttgttcat

SEQ ID NO: 3392109 - DNA, 25 bp, Homo sapien
cacatgaaggtaaaactggactctg

SEQ ID NO: 3392110 - DNA, 25 bp, Homo sapien
tattattgggaacggagggtcctgc

SEQ ID NO: 3392111 - DNA, 25 bp, Homo sapien
gggtcctgccgcttcaggtctagaa

SEQ ID NO: 3392112 - DNA, 25 bp, Homo sapien
gaccaggtgggcttcttgacaaaca

SEQ ID NO: 3392113 - DNA, 25 bp, Homo sapien
aggcggacattaaagtgaagtggtt

SEQ ID NO: 3392114 - DNA, 25 bp, Homo sapien
cggacattaaagtgaagtggttgcg

SEQ ID NO: 3392115 - DNA, 25 bp, Homo sapien
cattaaagtgaagtggttgcggtaa

SEQ ID NO: 3392116 - DNA, 25 bp, Homo sapien
tgggaggcggacattaaagtgaagt

SEQ ID NO: 3392117 - DNA, 25 bp, Homo sapien
gaatattgtggttgagtctgaagcg

SEQ ID NO: 3392118 - DNA, 25 bp, Homo sapien
aaacgaagcgctgaggaaagtggct

SEQ ID NO: 3392119 - DNA, 25 bp, Homo sapien
cggcagccaatgaaacgaagcgctg

SEQ ID NO: 3392120 - DNA, 25 bp, Homo sapien
tgaatattgtggttgagtctgaagc

SEQ ID NO: 3392121 - DNA, 25 bp, Homo sapien
tcttggcgccaagctgccgcgagcc

SEQ ID NO: 3392122 - DNA, 25 bp, Homo sapien
tgccgcgagccgtgacagcgtccga

SEQ ID NO: 3392123 - DNA, 25 bp, Homo sapien
ccgtgacagcgtccgacgtgatgac

SEQ ID NO: 3392124 - DNA, 25 bp, Homo sapien
ccaggctgagcttcttggcgccaag

SEQ ID NO: 3392125 - DNA, 25 bp, Homo sapien
cgttgccacggtgacgagcaagcaa

SEQ ID NO: 3392126 - DNA, 25 bp, Homo sapien
cgcgcgttgccacggtgacgagcaa

SEQ ID NO: 3392127 - DNA, 25 bp, Homo sapien
cacggtgacgagcaagcaaagagct

SEQ ID NO: 3392128 - DNA, 25 bp, Homo sapien
gtgacgagcaagcaaagagcttccc

SEQ ID NO: 3392129 - DNA, 25 bp, Homo sapien
gcagctccggcctagccccgcccac

SEQ ID NO: 3392130 - DNA, 25 bp, Homo sapien
agcagctccggcctagccccgccca

SEQ ID NO: 3392131 - DNA, 25 bp, Homo sapien
cagcagctccggcctagccccgccc

SEQ ID NO: 3392132 - DNA, 25 bp, Homo sapien
ctgcacccgccggtctacaggaggc

SEQ ID NO: 3392133 - DNA, 25 bp, Homo sapien
gggccctgcacccgccggtctacag

SEQ ID NO: 3392134 - DNA, 25 bp, Homo sapien
cccgccggtctacaggaggcctggt

SEQ ID NO: 3392135 - DNA, 25 bp, Homo sapien
cctggtgatctcaagtggctgcctc

SEQ ID NO: 3392136 - DNA, 25 bp, Homo sapien
aggagaacctgaatgcgccgcgcgt

SEQ ID NO: 3392137 - DNA, 25 bp, Homo sapien
caactgaggaccgtctgcctttggt

SEQ ID NO: 3392138 - DNA, 25 bp, Homo sapien
taaggacggacagattgggtccacg

SEQ ID NO: 3392139 - DNA, 25 bp, Homo sapien
gcgactaccactacggtccaggaga

SEQ ID NO: 3392140 - DNA, 25 bp, Homo sapien
ggccagacacctaaattaggtatgc

SEQ ID NO: 3392141 - DNA, 25 bp, Homo sapien
cacctaaattaggtatgccagattc

SEQ ID NO: 3392142 - DNA, 25 bp, Homo sapien
ctaaattaggtatgccagattccaa

SEQ ID NO: 3392143 - DNA, 25 bp, Homo sapien
cagacacctaaattaggtatgccag

SEQ ID NO: 3392144 - DNA, 25 bp, Homo sapien
ttcatccaccattactggaatatgt

SEQ ID NO: 3392145 - DNA, 25 bp, Homo sapien
tcatccaccattactggaatatgta

SEQ ID NO: 3392146 - DNA, 25 bp, Homo sapien
catccaccattactggaatatgtaa

SEQ ID NO: 3392147 - DNA, 25 bp, Homo sapien
cttcatccaccattactggaatatg

SEQ ID NO: 3392148 - DNA, 25 bp, Homo sapien
tctactccatggcttagtgcaacat

SEQ ID NO: 3392149 - DNA, 25 bp, Homo sapien
tctctaagtgtacctcacaagaaag

SEQ ID NO: 3392150 - DNA, 25 bp, Homo sapien
gaagacctttcctgtccaaggactg

SEQ ID NO: 3392151 - DNA, 25 bp, Homo sapien
cagcagtgtaggtcaagttgtagaa

SEQ ID NO: 3392152 - DNA, 25 bp, Homo sapien
gtaggattcatattcccacactcct

SEQ ID NO: 3392153 - DNA, 25 bp, Homo sapien
taggattcatattcccacactcctc

SEQ ID NO: 3392154 - DNA, 25 bp, Homo sapien
aggattcatattcccacactcctca

SEQ ID NO: 3392155 - DNA, 25 bp, Homo sapien
tattaaatatccacagtttacttct

SEQ ID NO: 3392156 - DNA, 25 bp, Homo sapien
aaatatccacagtttacttcttttg

SEQ ID NO: 3392157 - DNA, 25 bp, Homo sapien
caagtgggaaattctccatctttat

SEQ ID NO: 3392158 - DNA, 25 bp, Homo sapien
gaatatattaaatatccacagttta

SEQ ID NO: 3392159 - DNA, 25 bp, Homo sapien
taaaatcagctagcttggttccaaa

SEQ ID NO: 3392160 - DNA, 25 bp, Homo sapien
tgtacctggaatacgcaatcatcgt

SEQ ID NO: 3392161 - DNA, 25 bp, Homo sapien
tattacagaagtacagtgaaaggtg

SEQ ID NO: 3392162 - DNA, 25 bp, Homo sapien
gagacctgtaacattgcggttttga

SEQ ID NO: 3392163 - DNA, 25 bp, Homo sapien
caaggtatgcatacttcaggaacta

SEQ ID NO: 3392164 - DNA, 25 bp, Homo sapien
tagcatgggcatttcccctaggaaa

SEQ ID NO: 3392165 - DNA, 25 bp, Homo sapien
ctttgcaaggagacccaagaagcat

SEQ ID NO: 3392166 - DNA, 25 bp, Homo sapien
cagacttggtttaatgccccaggta

SEQ ID NO: 3392167 - DNA, 25 bp, Homo sapien
tactcgctcttcaatgtccacgtgg

SEQ ID NO: 3392168 - DNA, 25 bp, Homo sapien
gggtctctttcacaaggttgcgggc

SEQ ID NO: 3392169 - DNA, 25 bp, Homo sapien
gtgggcaaccggcaacctgctttca

SEQ ID NO: 3392170 - DNA, 25 bp, Homo sapien
tatggatcaggaattcagtagcagc

SEQ ID NO: 3392171 - DNA, 25 bp, Homo sapien
caaaagatggcttataatcagatat

SEQ ID NO: 3392172 - DNA, 25 bp, Homo sapien
cagatatagtactttgacaggtgct

SEQ ID NO: 3392173 - DNA, 25 bp, Homo sapien
gagagaaacatacaggactcatgaa

SEQ ID NO: 3392174 - DNA, 25 bp, Homo sapien
tggcccaccctcgacacaaggggga

SEQ ID NO: 3392175 - DNA, 25 bp, Homo sapien
gatgtctaccattctaatgtctgag

SEQ ID NO: 3392176 - DNA, 25 bp, Homo sapien
gaggacccctagagcatccaagaga

SEQ ID NO: 3392177 - DNA, 25 bp, Homo sapien
tagttacagaggattgccaaagtga

SEQ ID NO: 3392178 - DNA, 25 bp, Homo sapien
tagcttttggatgctagaggacccc

SEQ ID NO: 3392179 - DNA, 25 bp, Homo sapien
tgaaaagccacattggcacccatgg

SEQ ID NO: 3392180 - DNA, 25 bp, Homo sapien
tccatggcacagacaaggtctaggg

SEQ ID NO: 3392181 - DNA, 25 bp, Homo sapien
taattgtgtccccataccacaggac

SEQ ID NO: 3392182 - DNA, 25 bp, Homo sapien
tctgcaccatcccaaggttacaggg

SEQ ID NO: 3392183 - DNA, 25 bp, Homo sapien
aaaatagtcaacagtgcttacactg

SEQ ID NO: 3392184 - DNA, 25 bp, Homo sapien
aatagtcaacagtgcttacactgct

SEQ ID NO: 3392185 - DNA, 25 bp, Homo sapien
agtcaacagtgcttacactgctagc

SEQ ID NO: 3392186 - DNA, 25 bp, Homo sapien
tagtcaacagtgcttacactgctag

SEQ ID NO: 3392187 - DNA, 25 bp, Homo sapien
caaaagaccactcgttgcagggaaa

SEQ ID NO: 3392188 - DNA, 25 bp, Homo sapien
aagacgaggtgttccacaggccaaa

SEQ ID NO: 3392189 - DNA, 25 bp, Homo sapien
gacgtatttgaagcctagattggcc

SEQ ID NO: 3392190 - DNA, 25 bp, Homo sapien
tcaaagttagtaccaagtcagttcc

SEQ ID NO: 3392191 - DNA, 25 bp, Homo sapien
tccctcttcatattcaaaataataa

SEQ ID NO: 3392192 - DNA, 25 bp, Homo sapien
tttaattttcttctcagtgtctcct

SEQ ID NO: 3392193 - DNA, 25 bp, Homo sapien
gtctcctccctcttcatattcaaaa

SEQ ID NO: 3392194 - DNA, 25 bp, Homo sapien
taattttcttctcagtgtctcctcc

SEQ ID NO: 3392195 - DNA, 25 bp, Homo sapien
tcagcacaggctggaacagtttcag

SEQ ID NO: 3392196 - DNA, 25 bp, Homo sapien
tgataactagaaggcgagagcaaca

SEQ ID NO: 3392197 - DNA, 25 bp, Homo sapien
tctggcatggatttacaaagagtgc

SEQ ID NO: 3392198 - DNA, 25 bp, Homo sapien
aacattccaaccctaatgagcagga

SEQ ID NO: 3392199 - DNA, 25 bp, Homo sapien
agagacaattacaaaaagtgtaata

SEQ ID NO: 3392200 - DNA, 25 bp, Homo sapien
attacaaaaagtgtaataactccat

SEQ ID NO: 3392201 - DNA, 25 bp, Homo sapien
gagacaattacaaaaagtgtaataa

SEQ ID NO: 3392202 - DNA, 25 bp, Homo sapien
ttacaaaaagtgtaataactccatc

SEQ ID NO: 3392203 - DNA, 25 bp, Homo sapien
tataaagtagcaggtgtggtccagg

SEQ ID NO: 3392204 - DNA, 25 bp, Homo sapien
catgatcttgggcaactcatttcac

SEQ ID NO: 3392205 - DNA, 25 bp, Homo sapien
tttaagacagcagcttaggcctagt

SEQ ID NO: 3392206 - DNA, 25 bp, Homo sapien
taggcctagtgcttatgaggttagc

SEQ ID NO: 3392207 - DNA, 25 bp, Homo sapien
aatcccattaggagaaacttctatc

SEQ ID NO: 3392208 - DNA, 25 bp, Homo sapien
ccttgtattctcaatcctgatcctg

SEQ ID NO: 3392209 - DNA, 25 bp, Homo sapien
caaattcacttaagtcatacgctaa

SEQ ID NO: 3392210 - DNA, 25 bp, Homo sapien
cacttaagtcatacgctaaaatcat

SEQ ID NO: 3392211 - DNA, 25 bp, Homo sapien
tcttcctcaactgggtacctttcag

SEQ ID NO: 3392212 - DNA, 25 bp, Homo sapien
ctacttcttcctcaactgggtacct

SEQ ID NO: 3392213 - DNA, 25 bp, Homo sapien
ttcctcaactgggtacctttcagga

SEQ ID NO: 3392214 - DNA, 25 bp, Homo sapien
caactgggtacctttcaggatcatg

SEQ ID NO: 3392215 - DNA, 25 bp, Homo sapien
tgaaggtgtccacagaacgggtcat

SEQ ID NO: 3392216 - DNA, 25 bp, Homo sapien
gccactatggccattttgttcacag

SEQ ID NO: 3392217 - DNA, 25 bp, Homo sapien
tggctacagcccgtgaatctgaata

SEQ ID NO: 3392218 - DNA, 25 bp, Homo sapien
tgttcacaggcgcattgcatgatga

SEQ ID NO: 3392219 - DNA, 25 bp, Homo sapien
cctggattgggctgctataatttcc

SEQ ID NO: 3392220 - DNA, 25 bp, Homo sapien
tagtgtatcactagggttgatggta

SEQ ID NO: 3392221 - DNA, 25 bp, Homo sapien
tatcactagggttgatggtaagtgg

SEQ ID NO: 3392222 - DNA, 25 bp, Homo sapien
catgaagggtctggatcacttgtag

SEQ ID NO: 3392223 - DNA, 25 bp, Homo sapien
tatcactcatcctatgttccttttt

SEQ ID NO: 3392224 - DNA, 25 bp, Homo sapien
tatatcaccctttacgacaacctag

SEQ ID NO: 3392225 - DNA, 25 bp, Homo sapien
aaatgtgacctgctattacttattc

SEQ ID NO: 3392226 - DNA, 25 bp, Homo sapien
tacaattaaaataaggcccaactca

SEQ ID NO: 3392227 - DNA, 25 bp, Homo sapien
gatagatttcccttgagaataacac

SEQ ID NO: 3392228 - DNA, 25 bp, Homo sapien
ctaatagaagagtccagagcacgta

SEQ ID NO: 3392229 - DNA, 25 bp, Homo sapien
tatcacacccaagaatgagttgctt

SEQ ID NO: 3392230 - DNA, 25 bp, Homo sapien
cataccttgaatacccagacaaacg

SEQ ID NO: 3392231 - DNA, 25 bp, Homo sapien
cactttatggactcaccccaaattg

SEQ ID NO: 3392232 - DNA, 25 bp, Homo sapien
tataagtattatcaatcaagcagcc

SEQ ID NO: 3392233 - DNA, 25 bp, Homo sapien
tattatcaatcaagcagcccaagct

SEQ ID NO: 3392234 - DNA, 25 bp, Homo sapien
ctttatggactcaccccaaattgtt

SEQ ID NO: 3392235 - DNA, 25 bp, Homo sapien
tttctgttaggaacccaataacatc

SEQ ID NO: 3392236 - DNA, 25 bp, Homo sapien
ggtgagctacagttttgtcactgta

SEQ ID NO: 3392237 - DNA, 25 bp, Homo sapien
aacattcaagaatatgaggttttct

SEQ ID NO: 3392238 - DNA, 25 bp, Homo sapien
gatagaggaataccctgtccctaaa

SEQ ID NO: 3392239 - DNA, 25 bp, Homo sapien
tcatgtcttagtactcttgggttgc

SEQ ID NO: 3392240 - DNA, 25 bp, Homo sapien
tcttagagggtactcttccccttca

SEQ ID NO: 3392241 - DNA, 25 bp, Homo sapien
catcttcacttggtataagagacaa

SEQ ID NO: 3392242 - DNA, 25 bp, Homo sapien
tgatgtctggtgaaggattttttcc

SEQ ID NO: 3392243 - DNA, 25 bp, Homo sapien
aaaagattggacaaacaaataaatg

SEQ ID NO: 3392244 - DNA, 25 bp, Homo sapien
cctactccttaagtatgcactgtgc

SEQ ID NO: 3392245 - DNA, 25 bp, Homo sapien
gaaggcagtgtaactccctactcct

SEQ ID NO: 3392246 - DNA, 25 bp, Homo sapien
gaagagacgaattgcctgtgtagaa

SEQ ID NO: 3392247 - DNA, 25 bp, Homo sapien
gctccgccccccggcttcataccat

SEQ ID NO: 3392248 - DNA, 25 bp, Homo sapien
cgccccccggcttcataccattctc

SEQ ID NO: 3392249 - DNA, 25 bp, Homo sapien
cccccggcttcataccattctcccg

SEQ ID NO: 3392250 - DNA, 25 bp, Homo sapien
ccccggcttcataccattctcccgc

SEQ ID NO: 3392251 - DNA, 25 bp, Homo sapien
ttagttgactattaaattctcagga

SEQ ID NO: 3392252 - DNA, 25 bp, Homo sapien
ctattaaattctcaggaacatccaa

SEQ ID NO: 3392253 - DNA, 25 bp, Homo sapien
tgactattaaattctcaggaacatc

SEQ ID NO: 3392254 - DNA, 25 bp, Homo sapien
tcaggaacatccaaagtacaaaaag

SEQ ID NO: 3392255 - DNA, 25 bp, Homo sapien
gtctctgtccaaggcatagagaaca

SEQ ID NO: 3392256 - DNA, 25 bp, Homo sapien
gcataagctgttgggtctctgtcca

SEQ ID NO: 3392257 - DNA, 25 bp, Homo sapien
ggtctctgtccaaggcatagagaac

SEQ ID NO: 3392258 - DNA, 25 bp, Homo sapien
taatgcataagctgttgggtctctg

SEQ ID NO: 3392259 - DNA, 25 bp, Homo sapien
tcttcttaaagaaggcgcatctaag

SEQ ID NO: 3392260 - DNA, 25 bp, Homo sapien
tgaatgttcacatcataaccaagtg

SEQ ID NO: 3392261 - DNA, 25 bp, Homo sapien
tacaacgtttcgcaaatatgaatgc

SEQ ID NO: 3392262 - DNA, 25 bp, Homo sapien
tgaatgctctaataaaacatcttct

SEQ ID NO: 3392263 - DNA, 25 bp, Homo sapien
tcttgtgtctatggttggtcttccc

SEQ ID NO: 3392264 - DNA, 25 bp, Homo sapien
tctattacggtaatgacattcaaat

SEQ ID NO: 3392265 - DNA, 25 bp, Homo sapien
catttggtcagggtcagttaccttc

SEQ ID NO: 3392266 - DNA, 25 bp, Homo sapien
tcatctaggttttgcaagttaccag

SEQ ID NO: 3392267 - DNA, 25 bp, Homo sapien
aaaaaacttggctatcccctatgct

SEQ ID NO: 3392268 - DNA, 25 bp, Homo sapien
gctatttgctatatgactggatctc

SEQ ID NO: 3392269 - DNA, 25 bp, Homo sapien
aaagattgccaatacatcaatgcag

SEQ ID NO: 3392270 - DNA, 25 bp, Homo sapien
tttaaaggaacaagcactaagctct

SEQ ID NO: 3392271 - DNA, 25 bp, Homo sapien
tattataggatctgccttgctagaa

SEQ ID NO: 3392272 - DNA, 25 bp, Homo sapien
tattctgcttattataggatctgcc

SEQ ID NO: 3392273 - DNA, 25 bp, Homo sapien
tactagaaaacttacctattctgct

SEQ ID NO: 3392274 - DNA, 25 bp, Homo sapien
cttgctagaagttaactcccatggt

SEQ ID NO: 3392275 - DNA, 25 bp, Homo sapien
gagcatgaagtactgtttggtatcc

SEQ ID NO: 3392276 - DNA, 25 bp, Homo sapien
gaagtactgtttggtatcccatacc

SEQ ID NO: 3392277 - DNA, 25 bp, Homo sapien
gcatgaagtactgtttggtatccca

SEQ ID NO: 3392278 - DNA, 25 bp, Homo sapien
atgtgagcatgaagtactgtttggt

SEQ ID NO: 3392279 - DNA, 25 bp, Homo sapien
ggagtggcataaatctgacacgttt

SEQ ID NO: 3392280 - DNA, 25 bp, Homo sapien
gtttacggagacataattatctggg

SEQ ID NO: 3392281 - DNA, 25 bp, Homo sapien
gacataattatctgggaaagagact

SEQ ID NO: 3392282 - DNA, 25 bp, Homo sapien
tggctgccatgttgagaatagttta

SEQ ID NO: 3392283 - DNA, 25 bp, Homo sapien
atacagtgtcccaataattagaaac

SEQ ID NO: 3392284 - DNA, 25 bp, Homo sapien
gactactgtgacaattaggtaggtt

SEQ ID NO: 3392285 - DNA, 25 bp, Homo sapien
tattttcagccactcaatatatata

SEQ ID NO: 3392286 - DNA, 25 bp, Homo sapien
aaacattttaggtagttgactactg

SEQ ID NO: 3392287 - DNA, 25 bp, Homo sapien
cttttttcctgttggctgttgtcat

SEQ ID NO: 3392288 - DNA, 25 bp, Homo sapien
ttgggcatcctgtagttaataagtg

SEQ ID NO: 3392289 - DNA, 25 bp, Homo sapien
ggttgggcatcctgtagttaataag

SEQ ID NO: 3392290 - DNA, 25 bp, Homo sapien
gcatcctgtagttaataagtgctca

SEQ ID NO: 3392291 - DNA, 25 bp, Homo sapien
cctgtagttaataagtgctcatcca

SEQ ID NO: 3392292 - DNA, 25 bp, Homo sapien
tggcccagcatagctcggatttgtt

SEQ ID NO: 3392293 - DNA, 25 bp, Homo sapien
tgaactggcccagcatagctcggat

SEQ ID NO: 3392294 - DNA, 25 bp, Homo sapien
actggcccagcatagctcggatttg

SEQ ID NO: 3392295 - DNA, 25 bp, Homo sapien
gcccagcatagctcggatttgttta

SEQ ID NO: 3392296 - DNA, 25 bp, Homo sapien
tcattgacaagacgtgaaacttcag

SEQ ID NO: 3392297 - DNA, 25 bp, Homo sapien
cagaccattcctgtttaccttaggg

SEQ ID NO: 3392298 - DNA, 25 bp, Homo sapien
cattcatcaaggtcaaggcagcagg

SEQ ID NO: 3392299 - DNA, 25 bp, Homo sapien
gctttaagaactgagggtccaacca

SEQ ID NO: 3392300 - DNA, 25 bp, Homo sapien
ctaaagcattcacaacatcagcagc

SEQ ID NO: 3392301 - DNA, 25 bp, Homo sapien
tcagcagcagtgggcatgtcagggt

SEQ ID NO: 3392302 - DNA, 25 bp, Homo sapien
catcagcagcagtgggcatgtcagg

SEQ ID NO: 3392303 - DNA, 25 bp, Homo sapien
agcagcagtgggcatgtcagggtac

SEQ ID NO: 3392304 - DNA, 25 bp, Homo sapien
gctgcgtgcctgaacaattgctgaa

SEQ ID NO: 3392305 - DNA, 25 bp, Homo sapien
tgctgcgtgcctgaacaattgctga

SEQ ID NO: 3392306 - DNA, 25 bp, Homo sapien
atgctgcgtgcctgaacaattgctg

SEQ ID NO: 3392307 - DNA, 25 bp, Homo sapien
gatgctgcgtgcctgaacaattgct

SEQ ID NO: 3392308 - DNA, 25 bp, Homo sapien
aattttttctcttagacactgttga

SEQ ID NO: 3392309 - DNA, 25 bp, Homo sapien
cactgttgagaattaatgaggctac

SEQ ID NO: 3392310 - DNA, 25 bp, Homo sapien
tagacactgttgagaattaatgagg

SEQ ID NO: 3392311 - DNA, 25 bp, Homo sapien
ttttctcttagacactgttgagaat

SEQ ID NO: 3392312 - DNA, 25 bp, Homo sapien
gtgcatgcgtgcatgcacacaaaca

SEQ ID NO: 3392313 - DNA, 25 bp, Homo sapien
tgcatgcgtgcatgcacacaaacac

SEQ ID NO: 3392314 - DNA, 25 bp, Homo sapien
tgcatgcacacaaacacatgcacac

SEQ ID NO: 3392315 - DNA, 25 bp, Homo sapien
gtgcatgcacacaaacacatgcaca

SEQ ID NO: 3392316 - DNA, 25 bp, Homo sapien
tgacattagagaaggataggcaaga

SEQ ID NO: 3392317 - DNA, 25 bp, Homo sapien
taggcaagattctatcctggatttc

SEQ ID NO: 3392318 - DNA, 25 bp, Homo sapien
aagtacaaatgaatccctcagggag

SEQ ID NO: 3392319 - DNA, 25 bp, Homo sapien
gtctgggggattaatgcacacacac

SEQ ID NO: 3392320 - DNA, 25 bp, Homo sapien
gatgtaaccggagaatgaaaagagc

SEQ ID NO: 3392321 - DNA, 25 bp, Homo sapien
actggtaatttccttgatgtaaccg

SEQ ID NO: 3392322 - DNA, 25 bp, Homo sapien
taatttccttgatgtaaccggagaa

SEQ ID NO: 3392323 - DNA, 25 bp, Homo sapien
tccttgatgtaaccggagaatgaaa

SEQ ID NO: 3392324 - DNA, 25 bp, Homo sapien
tacagtgtgtaatagattgagttcg

SEQ ID NO: 3392325 - DNA, 25 bp, Homo sapien
ttcaactgtaggtttgaccatacca

SEQ ID NO: 3392326 - DNA, 25 bp, Homo sapien
tctgagttggagttcatgtacagaa

SEQ ID NO: 3392327 - DNA, 25 bp, Homo sapien
tttccatcagagtgaaaactgaaca

SEQ ID NO: 3392328 - DNA, 25 bp, Homo sapien
tatgggacatccttgaagactgagc

SEQ ID NO: 3392329 - DNA, 25 bp, Homo sapien
ttatcacaagatacaaagtgctggg

SEQ ID NO: 3392330 - DNA, 25 bp, Homo sapien
aaaccagtaccagcctcatgggttg

SEQ ID NO: 3392331 - DNA, 25 bp, Homo sapien
taatcccagctctagttgacaagag

SEQ ID NO: 3392332 - DNA, 25 bp, Homo sapien
tgccactgatatctctacctgctga

SEQ ID NO: 3392333 - DNA, 25 bp, Homo sapien
ctgccactgatatctctacctgctg

SEQ ID NO: 3392334 - DNA, 25 bp, Homo sapien
gactgccactgatatctctacctgc

SEQ ID NO: 3392335 - DNA, 25 bp, Homo sapien
actgccactgatatctctacctgct

SEQ ID NO: 3392336 - DNA, 25 bp, Homo sapien
tttttgaggaagtgaactcctgaga

SEQ ID NO: 3392337 - DNA, 25 bp, Homo sapien
gctaccatctcaggagtgggttagt

SEQ ID NO: 3392338 - DNA, 25 bp, Homo sapien
tgacatagcgagaaggcactcacta

SEQ ID NO: 3392339 - DNA, 25 bp, Homo sapien
tgcatgcatgctcttttgaccttct

SEQ ID NO: 3392340 - DNA, 25 bp, Homo sapien
tacgagagtgacagggcttaaaaag

SEQ ID NO: 3392341 - DNA, 25 bp, Homo sapien
gtcctatggtgggaatgtgttcccc

SEQ ID NO: 3392342 - DNA, 25 bp, Homo sapien
aaaaacaagtcctatggtgggaatg

SEQ ID NO: 3392343 - DNA, 25 bp, Homo sapien
gacatgaactctgactaataatacg

SEQ ID NO: 3392344 - DNA, 25 bp, Homo sapien
tataaattagaaaccattatcctat

SEQ ID NO: 3392345 - DNA, 25 bp, Homo sapien
gaggcttagaatagtcatgtcattt

SEQ ID NO: 3392346 - DNA, 25 bp, Homo sapien
ccagaactagcataggtagttttaa

SEQ ID NO: 3392347 - DNA, 25 bp, Homo sapien
gtgcccagaactagcataggtagtt

SEQ ID NO: 3392348 - DNA, 25 bp, Homo sapien
tctgctgcttccatcaaattcttaa

SEQ ID NO: 3392349 - DNA, 25 bp, Homo sapien
tgcatgtacatgcaattttatgcgg

SEQ ID NO: 3392350 - DNA, 25 bp, Homo sapien
ttggaatgtggaaattcatgaactc

SEQ ID NO: 3392351 - DNA, 25 bp, Homo sapien
aaatgaacaagtgacccacagtagg

SEQ ID NO: 3392352 - DNA, 25 bp, Homo sapien
taagaactgcaggatatttttgcta

SEQ ID NO: 3392353 - DNA, 25 bp, Homo sapien
cctgtggcagaaggatggacataat

SEQ ID NO: 3392354 - DNA, 25 bp, Homo sapien
ttggcttactagctaaaatagcacc

SEQ ID NO: 3392355 - DNA, 25 bp, Homo sapien
agctagctgtcaaacgatgagattc

SEQ ID NO: 3392356 - DNA, 25 bp, Homo sapien
ttgggccactgggaaatatgtttca

SEQ ID NO: 3392357 - DNA, 25 bp, Homo sapien
tgggccactgggaaatatgtttcag

SEQ ID NO: 3392358 - DNA, 25 bp, Homo sapien
tttgggccactgggaaatatgtttc

SEQ ID NO: 3392359 - DNA, 25 bp, Homo sapien
catttgctattcaattcgtccattt

SEQ ID NO: 3392360 - DNA, 25 bp, Homo sapien
tttgctattcaattcgtccattttc

SEQ ID NO: 3392361 - DNA, 25 bp, Homo sapien
atttgctattcaattcgtccatttt

SEQ ID NO: 3392362 - DNA, 25 bp, Homo sapien
catctaataagggacatgtatctag

SEQ ID NO: 3392363 - DNA, 25 bp, Homo sapien
tcaaaacaggtatgtcccatctact

SEQ ID NO: 3392364 - DNA, 25 bp, Homo sapien
ggctaaatcttaatgacttcgaatg

SEQ ID NO: 3392365 - DNA, 25 bp, Homo sapien
gaaagacaagtcagagaatgggaaa

SEQ ID NO: 3392366 - DNA, 25 bp, Homo sapien
tgtagtaagtctttccgtgtataaa

SEQ ID NO: 3392367 - DNA, 25 bp, Homo sapien
ctgtagtaagtctttccgtgtataa

SEQ ID NO: 3392368 - DNA, 25 bp, Homo sapien
gctgtagtaagtctttccgtgtata

SEQ ID NO: 3392369 - DNA, 25 bp, Homo sapien
aaaatcttttgacgatgcgatcctc

SEQ ID NO: 3392370 - DNA, 25 bp, Homo sapien
catcacttgttgtctaacacttagg

SEQ ID NO: 3392371 - DNA, 25 bp, Homo sapien
tcttgtacatcctgatcttgtggac

SEQ ID NO: 3392372 - DNA, 25 bp, Homo sapien
tctaagcttggctgagcgccctctg

SEQ ID NO: 3392373 - DNA, 25 bp, Homo sapien
taccaagacattcagggacataaca

SEQ ID NO: 3392374 - DNA, 25 bp, Homo sapien
tatgtatggttaatcaacatgcccc

SEQ ID NO: 3392375 - DNA, 25 bp, Homo sapien
tttctgtgtactgtaggaacttccc

SEQ ID NO: 3392376 - DNA, 25 bp, Homo sapien
gattcagggaattaacctaggtgca

SEQ ID NO: 3392377 - DNA, 25 bp, Homo sapien
tgacattgatactatgttaaaatga

SEQ ID NO: 3392378 - DNA, 25 bp, Homo sapien
taagaactgatgtactacacaatga

SEQ ID NO: 3392379 - DNA, 25 bp, Homo sapien
ctgttaagaactgatgtactacaca

SEQ ID NO: 3392380 - DNA, 25 bp, Homo sapien
gaactgatgtactacacaatgacat

SEQ ID NO: 3392381 - DNA, 25 bp, Homo sapien
tttctaggccatacaagaagcatgg

SEQ ID NO: 3392382 - DNA, 25 bp, Homo sapien
aagggcttcagggtggatcctctta

SEQ ID NO: 3392383 - DNA, 25 bp, Homo sapien
tcagttattacatgtagatccggaa

SEQ ID NO: 3392384 - DNA, 25 bp, Homo sapien
gatcctcttatggtcgaaggcaaag

SEQ ID NO: 3392385 - DNA, 25 bp, Homo sapien
tcttgtcattaccaaagctgaagtc

SEQ ID NO: 3392386 - DNA, 25 bp, Homo sapien
gaaactcacaattggcagctacaaa

SEQ ID NO: 3392387 - DNA, 25 bp, Homo sapien
caaatcttgtagagatcaggtagct

SEQ ID NO: 3392388 - DNA, 25 bp, Homo sapien
catgagtcaccatatggctacggaa

SEQ ID NO: 3392389 - DNA, 25 bp, Homo sapien
ccaacctctgacaggccctgatgtg

SEQ ID NO: 3392390 - DNA, 25 bp, Homo sapien
gcatccatcaaccagtcatctacaa

SEQ ID NO: 3392391 - DNA, 25 bp, Homo sapien
ggtttgttgcatccatcaaccagtc

SEQ ID NO: 3392392 - DNA, 25 bp, Homo sapien
tccatcaaccagtcatctacaatag

SEQ ID NO: 3392393 - DNA, 25 bp, Homo sapien
gggtcacatgtgggaaatgtgactt

SEQ ID NO: 3392394 - DNA, 25 bp, Homo sapien
gaagtttctctagtacaggagttat

SEQ ID NO: 3392395 - DNA, 25 bp, Homo sapien
tgacttgaattgagagaagtttctc

SEQ ID NO: 3392396 - DNA, 25 bp, Homo sapien
tagtacaggagttattggactggag

SEQ ID NO: 3392397 - DNA, 25 bp, Homo sapien
gtgaagaggtgcaggttaggccttg

SEQ ID NO: 3392398 - DNA, 25 bp, Homo sapien
ctgtgaagaggtgcaggttaggcct

SEQ ID NO: 3392399 - DNA, 25 bp, Homo sapien
ctatgctgtgaagaggtgcaggtta

SEQ ID NO: 3392400 - DNA, 25 bp, Homo sapien
tgctgtgaagaggtgcaggttaggc

SEQ ID NO: 3392401 - DNA, 25 bp, Homo sapien
gatgaagttgggagaataagtagtt

SEQ ID NO: 3392402 - DNA, 25 bp, Homo sapien
atccacgttgtttgggtcttctagg

SEQ ID NO: 3392403 - DNA, 25 bp, Homo sapien
acactgagatgaagttgggagaata

SEQ ID NO: 3392404 - DNA, 25 bp, Homo sapien
cgttgtttgggtcttctaggaagct

SEQ ID NO: 3392405 - DNA, 25 bp, Homo sapien
gcagatttcaaaaacggttgtgtat

SEQ ID NO: 3392406 - DNA, 25 bp, Homo sapien
ttgtgtatagtagggagaaatcagc

SEQ ID NO: 3392407 - DNA, 25 bp, Homo sapien
cagatttcaaaaacggttgtgtata

SEQ ID NO: 3392408 - DNA, 25 bp, Homo sapien
acggttgtgtatagtagggagaaat

SEQ ID NO: 3392409 - DNA, 25 bp, Homo sapien
tgtttgggcaatttactgggctgaa

SEQ ID NO: 3392410 - DNA, 25 bp, Homo sapien
gaaactgtaaagaccaaactgcatt

SEQ ID NO: 3392411 - DNA, 25 bp, Homo sapien
acaagtcccttatggtgtttgggca

SEQ ID NO: 3392412 - DNA, 25 bp, Homo sapien
aagagcaaagtatctgtggaagcca

SEQ ID NO: 3392413 - DNA, 25 bp, Homo sapien
tgagagttgatgaagaggacagaaa

SEQ ID NO: 3392414 - DNA, 25 bp, Homo sapien
tcaaagagtgacagctggcagtatc

SEQ ID NO: 3392415 - DNA, 25 bp, Homo sapien
ttgataccagaactccaaaccggat

SEQ ID NO: 3392416 - DNA, 25 bp, Homo sapien
cagctggcagtatcaaagactgaca

SEQ ID NO: 3392417 - DNA, 25 bp, Homo sapien
tttagatctttttccgaagaacatg

SEQ ID NO: 3392418 - DNA, 25 bp, Homo sapien
tctttttccgaagaacatgtgcagc

SEQ ID NO: 3392419 - DNA, 25 bp, Homo sapien
gatgcttttagatctttttccgaag

SEQ ID NO: 3392420 - DNA, 25 bp, Homo sapien
agatctttttccgaagaacatgtgc

SEQ ID NO: 3392421 - DNA, 25 bp, Homo sapien
ggacacaggcactcgccgtttctgc

SEQ ID NO: 3392422 - DNA, 25 bp, Homo sapien
accagacaacccgatgtaggacaca

SEQ ID NO: 3392423 - DNA, 25 bp, Homo sapien
ttaagatctaccagacaacccgatg

SEQ ID NO: 3392424 - DNA, 25 bp, Homo sapien
atgtaggacacaggcactcgccgtt

SEQ ID NO: 3392425 - DNA, 25 bp, Homo sapien
tgttggcagtgtaagctgaagtacc

SEQ ID NO: 3392426 - DNA, 25 bp, Homo sapien
tcagacactgtagtagtctgggacg

SEQ ID NO: 3392427 - DNA, 25 bp, Homo sapien
tgaagtacccattcctcagacactg

SEQ ID NO: 3392428 - DNA, 25 bp, Homo sapien
gttaatctccaattgatgttggcag

SEQ ID NO: 3392429 - DNA, 25 bp, Homo sapien
tcctagattccaggaccataagaag

SEQ ID NO: 3392430 - DNA, 25 bp, Homo sapien
ctcctagattccaggaccataagaa

SEQ ID NO: 3392431 - DNA, 25 bp, Homo sapien
ctgagcccctaaaagatagggattc

SEQ ID NO: 3392432 - DNA, 25 bp, Homo sapien
tgcagcatgccccttgaaatccaac

SEQ ID NO: 3392433 - DNA, 25 bp, Homo sapien
tgaaatccaacaccaaggtggcctt

SEQ ID NO: 3392434 - DNA, 25 bp, Homo sapien
gagcccctaaaagatagggattcat

SEQ ID NO: 3392435 - DNA, 25 bp, Homo sapien
gttcaaataaccacctttggctatc

SEQ ID NO: 3392436 - DNA, 25 bp, Homo sapien
ataaccacctttggctatcaaaacg

SEQ ID NO: 3392437 - DNA, 25 bp, Homo sapien
caaataaccacctttggctatcaaa

SEQ ID NO: 3392438 - DNA, 25 bp, Homo sapien
aaccacctttggctatcaaaacgat

SEQ ID NO: 3392439 - DNA, 25 bp, Homo sapien
gccacatcgctggttatgttcttca

SEQ ID NO: 3392440 - DNA, 25 bp, Homo sapien
gatacagctgatgattattattgcc

SEQ ID NO: 3392441 - DNA, 25 bp, Homo sapien
tattattgccacatcgctggttatg

SEQ ID NO: 3392442 - DNA, 25 bp, Homo sapien
gatgattattattgccacatcgctg

SEQ ID NO: 3392443 - DNA, 25 bp, Homo sapien
aaaagctacccctcccattggatgg

SEQ ID NO: 3392444 - DNA, 25 bp, Homo sapien
cactgtcaggcttttgctcgggtac

SEQ ID NO: 3392445 - DNA, 25 bp, Homo sapien
tgaagaaactccctccactgtcagg

SEQ ID NO: 3392446 - DNA, 25 bp, Homo sapien
cctgagctgcggctttgaagaaact

SEQ ID NO: 3392447 - DNA, 25 bp, Homo sapien
tgactccgtaggtaggcccaagaaa

SEQ ID NO: 3392448 - DNA, 25 bp, Homo sapien
cactttgcatgtagccctgagccag

SEQ ID NO: 3392449 - DNA, 25 bp, Homo sapien
tgatccggattgtgtcccacagtgg

SEQ ID NO: 3392450 - DNA, 25 bp, Homo sapien
tcatcctgagagatgctgactccgt

SEQ ID NO: 3392451 - DNA, 25 bp, Homo sapien
cacagctctactcaaaacgatcgca

SEQ ID NO: 3392452 - DNA, 25 bp, Homo sapien
ccagcataaaggttgtcaagatcat

SEQ ID NO: 3392453 - DNA, 25 bp, Homo sapien
taccagagcacctaggatgttttga

SEQ ID NO: 3392454 - DNA, 25 bp, Homo sapien
gatcgcattcccaataagaagagca

SEQ ID NO: 3392455 - DNA, 25 bp, Homo sapien
tgggacggccagactgtttagaaac

SEQ ID NO: 3392456 - DNA, 25 bp, Homo sapien
cagcaacagaaggtaggccattaaa

SEQ ID NO: 3392457 - DNA, 25 bp, Homo sapien
ctgaggcatgtgaccaacagcaaca

SEQ ID NO: 3392458 - DNA, 25 bp, Homo sapien
gattcatgagcaggcacagttctaa

SEQ ID NO: 3392459 - DNA, 25 bp, Homo sapien
aactgattcttcctgacaaggtgaa

SEQ ID NO: 3392460 - DNA, 25 bp, Homo sapien
gacaaggtgaacagtgtccacatgc

SEQ ID NO: 3392461 - DNA, 25 bp, Homo sapien
agaactgattcttcctgacaaggtg

SEQ ID NO: 3392462 - DNA, 25 bp, Homo sapien
gaagaactgattcttcctgacaagg

SEQ ID NO: 3392463 - DNA, 25 bp, Homo sapien
cctggactaatgaccactgacatga

SEQ ID NO: 3392464 - DNA, 25 bp, Homo sapien
cacagtgggtgatacggattgctcc

SEQ ID NO: 3392465 - DNA, 25 bp, Homo sapien
aatctggtatcttccgtgacggtgt

SEQ ID NO: 3392466 - DNA, 25 bp, Homo sapien
tgctcatatctactgcacagtgggt

SEQ ID NO: 3392467 - DNA, 25 bp, Homo sapien
taccttatgtttacactgaaatcca

SEQ ID NO: 3392468 - DNA, 25 bp, Homo sapien
tatggtactaacaagcaacagctgc

SEQ ID NO: 3392469 - DNA, 25 bp, Homo sapien
atttcacaaaccttagaacatatgg

SEQ ID NO: 3392470 - DNA, 25 bp, Homo sapien
tcaaaatgcttcagacattcacagt

SEQ ID NO: 3392471 - DNA, 25 bp, Homo sapien
cctcgagtttctccaagatccccat

SEQ ID NO: 3392472 - DNA, 25 bp, Homo sapien
cttccctcgagtttctccaagatcc

SEQ ID NO: 3392473 - DNA, 25 bp, Homo sapien
ccctcgagtttctccaagatcccca

SEQ ID NO: 3392474 - DNA, 25 bp, Homo sapien
ttccctcgagtttctccaagatccc

SEQ ID NO: 3392475 - DNA, 25 bp, Homo sapien
tgttcaacggccaagctaaggatgc

SEQ ID NO: 3392476 - DNA, 25 bp, Homo sapien
gagtctgtcccatttgcaaagaaag

SEQ ID NO: 3392477 - DNA, 25 bp, Homo sapien
taactggatcgctgtcatttgaccc

SEQ ID NO: 3392478 - DNA, 25 bp, Homo sapien
cactgaaaggatacaatctgaggtc

SEQ ID NO: 3392479 - DNA, 25 bp, Homo sapien
tcagcctgtgtagaggtaggctcag

SEQ ID NO: 3392480 - DNA, 25 bp, Homo sapien
tcaggtgaatttcatccacacaaaa

SEQ ID NO: 3392481 - DNA, 25 bp, Homo sapien
cacaaaagtttcagcacagcaaagc

SEQ ID NO: 3392482 - DNA, 25 bp, Homo sapien
ctcaggaaggtgcatttaaacaagc

SEQ ID NO: 3392483 - DNA, 25 bp, Homo sapien
agaagctatgaaggccaaaggcagt

SEQ ID NO: 3392484 - DNA, 25 bp, Homo sapien
cagaagctatgaaggccaaaggcag

SEQ ID NO: 3392485 - DNA, 25 bp, Homo sapien
tgttgtcaccaataccacagaccga

SEQ ID NO: 3392486 - DNA, 25 bp, Homo sapien
cgttctggaggttagaccccaagat

SEQ ID NO: 3392487 - DNA, 25 bp, Homo sapien
cacagaccgaatggcttaaataaca

SEQ ID NO: 3392488 - DNA, 25 bp, Homo sapien
gagaattaaattgcataaagtctgt

SEQ ID NO: 3392489 - DNA, 25 bp, Homo sapien
tagtattagggaatcagctggttcg

SEQ ID NO: 3392490 - DNA, 25 bp, Homo sapien
tagtctcggttcagatgggaaagca

SEQ ID NO: 3392491 - DNA, 25 bp, Homo sapien
tacaagggctttgcactgggtaaga

SEQ ID NO: 3392492 - DNA, 25 bp, Homo sapien
cagtttactggtcagaagccttcaa

SEQ ID NO: 3392493 - DNA, 25 bp, Homo sapien
tgttgacagcctcagccacaagtta

SEQ ID NO: 3392494 - DNA, 25 bp, Homo sapien
tcagggtgaatttctgcgttccaca

SEQ ID NO: 3392495 - DNA, 25 bp, Homo sapien
gaggctgacacaaggctgcggtcta

SEQ ID NO: 3392496 - DNA, 25 bp, Homo sapien
tcctcaattcacgaaagaagtaggg

SEQ ID NO: 3392497 - DNA, 25 bp, Homo sapien
ctttgggaaaggacgtgccaagcaa

SEQ ID NO: 3392498 - DNA, 25 bp, Homo sapien
aattcaacagcagcatagctgtaag

SEQ ID NO: 3392499 - DNA, 25 bp, Homo sapien
cagcagcatagctgtaagatttgaa

SEQ ID NO: 3392500 - DNA, 25 bp, Homo sapien
caagcaaccttttaagatcaccaaa

SEQ ID NO: 3392501 - DNA, 25 bp, Homo sapien
gcttggcttgactcctggatgttcc

SEQ ID NO: 3392502 - DNA, 25 bp, Homo sapien
gcttgactcctggatgttcctcatt

SEQ ID NO: 3392503 - DNA, 25 bp, Homo sapien
ttggcttgactcctggatgttcctc

SEQ ID NO: 3392504 - DNA, 25 bp, Homo sapien
tgttcctcattatacccaccatcca

SEQ ID NO: 3392505 - DNA, 25 bp, Homo sapien
caaaaatcatccctgtcatgggttg

SEQ ID NO: 3392506 - DNA, 25 bp, Homo sapien
tttcagtgttcaggatgggcagtcc

SEQ ID NO: 3392507 - DNA, 25 bp, Homo sapien
taaggctcggtcgaggtgcctcaat

SEQ ID NO: 3392508 - DNA, 25 bp, Homo sapien
tgctctagcacagcgttcattatga

SEQ ID NO: 3392509 - DNA, 25 bp, Homo sapien
caaacagttcgtgcagttctaggaa

SEQ ID NO: 3392510 - DNA, 25 bp, Homo sapien
aaaagtacccggcagtgcctcctga

SEQ ID NO: 3392511 - DNA, 25 bp, Homo sapien
tgctcccacacgtgtgctcaaggtg

SEQ ID NO: 3392512 - DNA, 25 bp, Homo sapien
gaccagttcaagtcagtccaaacag

SEQ ID NO: 3392513 - DNA, 25 bp, Homo sapien
cttgactgaattatggacaccatca

SEQ ID NO: 3392514 - DNA, 25 bp, Homo sapien
gactgaattatggacaccatcactg

SEQ ID NO: 3392515 - DNA, 25 bp, Homo sapien
ctgaattatggacaccatcactggc

SEQ ID NO: 3392516 - DNA, 25 bp, Homo sapien
aacttgactgaattatggacaccat

SEQ ID NO: 3392517 - DNA, 25 bp, Homo sapien
taggcaccgcattcatcaccggaca

SEQ ID NO: 3392518 - DNA, 25 bp, Homo sapien
tcacagccgtatggtttcccagaca

SEQ ID NO: 3392519 - DNA, 25 bp, Homo sapien
accggacaactggtggagcctgaca

SEQ ID NO: 3392520 - DNA, 25 bp, Homo sapien
cagagataaccttccgtcgcaaatg

SEQ ID NO: 3392521 - DNA, 25 bp, Homo sapien
ggataaagagaacagctctctgaaa

SEQ ID NO: 3392522 - DNA, 25 bp, Homo sapien
tagatgataatcaactctttttaac

SEQ ID NO: 3392523 - DNA, 25 bp, Homo sapien
agcctctgaatcctcaagtcttgac

SEQ ID NO: 3392524 - DNA, 25 bp, Homo sapien
tgaccaccctaggagagtagatgat

SEQ ID NO: 3392525 - DNA, 25 bp, Homo sapien
attttatattcttgcacaccataaa

SEQ ID NO: 3392526 - DNA, 25 bp, Homo sapien
ttatattcttgcacaccataaaaag

SEQ ID NO: 3392527 - DNA, 25 bp, Homo sapien
gaaaccactgaagatgaatctccat

SEQ ID NO: 3392528 - DNA, 25 bp, Homo sapien
atattcttgcacaccataaaaagtt

SEQ ID NO: 3392529 - DNA, 25 bp, Homo sapien
tccttcctctctgggaggttgccat

SEQ ID NO: 3392530 - DNA, 25 bp, Homo sapien
taactgcctgtatgtctcccttcct

SEQ ID NO: 3392531 - DNA, 25 bp, Homo sapien
tgcctgtatgtctcccttcctgttc

SEQ ID NO: 3392532 - DNA, 25 bp, Homo sapien
actgcctgtatgtctcccttcctgt

SEQ ID NO: 3392533 - DNA, 25 bp, Homo sapien
tctctcggataaagaaagataacct

SEQ ID NO: 3392534 - DNA, 25 bp, Homo sapien
aaggctctgacaattgctgataaag

SEQ ID NO: 3392535 - DNA, 25 bp, Homo sapien
caaggctctgacaattgctgataaa

SEQ ID NO: 3392536 - DNA, 25 bp, Homo sapien
cctggggcttctctcggataaagaa

SEQ ID NO: 3392537 - DNA, 25 bp, Homo sapien
gagtcatgccgtagttttttttcac

SEQ ID NO: 3392538 - DNA, 25 bp, Homo sapien
gaagggcatattcttagagacttaa

SEQ ID NO: 3392539 - DNA, 25 bp, Homo sapien
ggtaagaaggctgaagggcatattc

SEQ ID NO: 3392540 - DNA, 25 bp, Homo sapien
gaagtcaaggtaagaaggctgaagg

SEQ ID NO: 3392541 - DNA, 25 bp, Homo sapien
tagagatgttcgcacactatattcc

SEQ ID NO: 3392542 - DNA, 25 bp, Homo sapien
caggtcaagtgttacctacaggaag

SEQ ID NO: 3392543 - DNA, 25 bp, Homo sapien
tccccatgaaggcaacagccgtttt

SEQ ID NO: 3392544 - DNA, 25 bp, Homo sapien
aaatatggtggtcagcctcatggcc

SEQ ID NO: 3392545 - DNA, 25 bp, Homo sapien
cctttggcgtatagaagaagagcaa

SEQ ID NO: 3392546 - DNA, 25 bp, Homo sapien
tgtgagtgggcgctttcttggcatc

SEQ ID NO: 3392547 - DNA, 25 bp, Homo sapien
taattcagcagagagaagtcggcaa

SEQ ID NO: 3392548 - DNA, 25 bp, Homo sapien
aagtcggcaacgctcatgtgagtgg

SEQ ID NO: 3392549 - DNA, 25 bp, Homo sapien
tatatttcaggacatactctaggaa

SEQ ID NO: 3392550 - DNA, 25 bp, Homo sapien
gaagacatgggacctgggaaactgc

SEQ ID NO: 3392551 - DNA, 25 bp, Homo sapien
tgcaggttagaaagaactagaggtt

SEQ ID NO: 3392552 - DNA, 25 bp, Homo sapien
aattacatcagaatgacctagctga

SEQ ID NO: 3392553 - DNA, 25 bp, Homo sapien
cagattccatctactaggcattcca

SEQ ID NO: 3392554 - DNA, 25 bp, Homo sapien
cattgttacccagtcctatggcagg

SEQ ID NO: 3392555 - DNA, 25 bp, Homo sapien
catctactaggcattccataatttc

SEQ ID NO: 3392556 - DNA, 25 bp, Homo sapien
tgttcttcttcccatgatatctttg

SEQ ID NO: 3392557 - DNA, 25 bp, Homo sapien
gtcttatttgccctttgtattgtat

SEQ ID NO: 3392558 - DNA, 25 bp, Homo sapien
cctatgaatcattacaataattttg

SEQ ID NO: 3392559 - DNA, 25 bp, Homo sapien
ctttcctatgaatcattacaataat

SEQ ID NO: 3392560 - DNA, 25 bp, Homo sapien
tgtaaactgtcttatttgccctttg

SEQ ID NO: 3392561 - DNA, 25 bp, Homo sapien
taagagagatcattgcatagtgata

SEQ ID NO: 3392562 - DNA, 25 bp, Homo sapien
tctcccatataagttcattaagaga

SEQ ID NO: 3392563 - DNA, 25 bp, Homo sapien
cattgcatagtgatagagagcctta

SEQ ID NO: 3392564 - DNA, 25 bp, Homo sapien
gagagccttatggatagttagtggt

SEQ ID NO: 3392565 - DNA, 25 bp, Homo sapien
tctgaaggtataaaatctagctact

SEQ ID NO: 3392566 - DNA, 25 bp, Homo sapien
tttttctgaaggtataaaatctagc

SEQ ID NO: 3392567 - DNA, 25 bp, Homo sapien
ttctgaaggtataaaatctagctac

SEQ ID NO: 3392568 - DNA, 25 bp, Homo sapien
tttctgaaggtataaaatctagcta

SEQ ID NO: 3392569 - DNA, 25 bp, Homo sapien
caccttgcccggtccactggttagt

SEQ ID NO: 3392570 - DNA, 25 bp, Homo sapien
taacactagctagttctcaaactca

SEQ ID NO: 3392571 - DNA, 25 bp, Homo sapien
agctagttctcaaactcatgccaca

SEQ ID NO: 3392572 - DNA, 25 bp, Homo sapien
tccactggttagttctaacactagc

SEQ ID NO: 3392573 - DNA, 25 bp, Homo sapien
taaatgtaagcattgcacctgtgga

SEQ ID NO: 3392574 - DNA, 25 bp, Homo sapien
tacaggaattcagcataaggagagc

SEQ ID NO: 3392575 - DNA, 25 bp, Homo sapien
tacccagaggatgatatatacagga

SEQ ID NO: 3392576 - DNA, 25 bp, Homo sapien
ctgcacagttgatcctacccagagg

SEQ ID NO: 3392577 - DNA, 25 bp, Homo sapien
tcacttgtgattggctctgtttgtc

SEQ ID NO: 3392578 - DNA, 25 bp, Homo sapien
actgaggattttcgctttggtgttc

SEQ ID NO: 3392579 - DNA, 25 bp, Homo sapien
ggagttcacttgtgattggctctgt

SEQ ID NO: 3392580 - DNA, 25 bp, Homo sapien
gtttttagtatgaacgtctgttgaa

SEQ ID NO: 3392581 - DNA, 25 bp, Homo sapien
agataatttctcctactctgtggac

SEQ ID NO: 3392582 - DNA, 25 bp, Homo sapien
gaagtcgttgcacattctggataaa

SEQ ID NO: 3392583 - DNA, 25 bp, Homo sapien
tggtggcaattcagatatcctccct

SEQ ID NO: 3392584 - DNA, 25 bp, Homo sapien
ccctgatgaagtgattgttgaagcc

SEQ ID NO: 3392585 - DNA, 25 bp, Homo sapien
tcactcaacacccatttcaaaccac

SEQ ID NO: 3392586 - DNA, 25 bp, Homo sapien
cctccctctattttgtcatcccagg

SEQ ID NO: 3392587 - DNA, 25 bp, Homo sapien
ttgcctccctctattttgtcatccc

SEQ ID NO: 3392588 - DNA, 25 bp, Homo sapien
actcaacacccatttcaaaccactt

SEQ ID NO: 3392589 - DNA, 25 bp, Homo sapien
gaaccatctaaacaagttgtctata

SEQ ID NO: 3392590 - DNA, 25 bp, Homo sapien
tctgggttgcataattattcaatga

SEQ ID NO: 3392591 - DNA, 25 bp, Homo sapien
aatagaaccatctaaacaagttgtc

SEQ ID NO: 3392592 - DNA, 25 bp, Homo sapien
caaaaaatagaaccatctaaacaag

SEQ ID NO: 3392593 - DNA, 25 bp, Homo sapien
aaactgtcagatgtcaaattggctt

SEQ ID NO: 3392594 - DNA, 25 bp, Homo sapien
taataaaactgtcagatgtcaaatt

SEQ ID NO: 3392595 - DNA, 25 bp, Homo sapien
atgaattcacaaagatgaattcttc

SEQ ID NO: 3392596 - DNA, 25 bp, Homo sapien
aggtaaagcctcctagaaaatcagg

SEQ ID NO: 3392597 - DNA, 25 bp, Homo sapien
tcctgtgtgaatcatatcttcagca

SEQ ID NO: 3392598 - DNA, 25 bp, Homo sapien
gtgaatcatatcttcagcaactgtg

SEQ ID NO: 3392599 - DNA, 25 bp, Homo sapien
tgtgtgaatcatatcttcagcaact

SEQ ID NO: 3392600 - DNA, 25 bp, Homo sapien
tgtgaatcatatcttcagcaactgt

SEQ ID NO: 3392601 - DNA, 25 bp, Homo sapien
tttgccacaagccttcttcatacat

SEQ ID NO: 3392602 - DNA, 25 bp, Homo sapien
tctggtgtttgaaaccccagaggta

SEQ ID NO: 3392603 - DNA, 25 bp, Homo sapien
caagccttcttcatacatgcagttt

SEQ ID NO: 3392604 - DNA, 25 bp, Homo sapien
gccacaagccttcttcatacatgca

SEQ ID NO: 3392605 - DNA, 25 bp, Homo sapien
cattgtttgatccactatgaagtga

SEQ ID NO: 3392606 - DNA, 25 bp, Homo sapien
tatgttcggattttagtcaatgcaa

SEQ ID NO: 3392607 - DNA, 25 bp, Homo sapien
cttttaaacaagggtcagaacagag

SEQ ID NO: 3392608 - DNA, 25 bp, Homo sapien
cagaggtccgcttgaatgaggaatt

SEQ ID NO: 3392609 - DNA, 25 bp, Homo sapien
ctcttcctgtgtaatatccactttc

SEQ ID NO: 3392610 - DNA, 25 bp, Homo sapien
tcttcctgtgtaatatccactttca

SEQ ID NO: 3392611 - DNA, 25 bp, Homo sapien
tgaactcttcctgtgtaatatccac

SEQ ID NO: 3392612 - DNA, 25 bp, Homo sapien
aactcttcctgtgtaatatccactt

SEQ ID NO: 3392613 - DNA, 25 bp, Homo sapien
atctgttcttaggtgtccttgattc

SEQ ID NO: 3392614 - DNA, 25 bp, Homo sapien
ctgttcttaggtgtccttgattcat

SEQ ID NO: 3392615 - DNA, 25 bp, Homo sapien
tctgttcttaggtgtccttgattca

SEQ ID NO: 3392616 - DNA, 25 bp, Homo sapien
tcctgatccctcctttgttgacttc

SEQ ID NO: 3392617 - DNA, 25 bp, Homo sapien
tttcctgatccctcctttgttgact

SEQ ID NO: 3392618 - DNA, 25 bp, Homo sapien
ttcctgatccctcctttgttgactt

SEQ ID NO: 3392619 - DNA, 25 bp, Homo sapien
attgcagctagttttactatagctt

SEQ ID NO: 3392620 - DNA, 25 bp, Homo sapien
ttctgtgcacactgatggcattcca

SEQ ID NO: 3392621 - DNA, 25 bp, Homo sapien
cagtgcctgccaaatctttcagctt

SEQ ID NO: 3392622 - DNA, 25 bp, Homo sapien
tgatggcattccacctccagtgcct

SEQ ID NO: 3392623 - DNA, 25 bp, Homo sapien
gatgattacaaaaggtatccctcca

SEQ ID NO: 3392624 - DNA, 25 bp, Homo sapien
tgctcactctatatggaacctttgc

SEQ ID NO: 3392625 - DNA, 25 bp, Homo sapien
cactggactgacacttggagtttgt

SEQ ID NO: 3392626 - DNA, 25 bp, Homo sapien
gaaactatgggaatgctcacaaact

SEQ ID NO: 3392627 - DNA, 25 bp, Homo sapien
tatcataaaagcctgtttgttcact

SEQ ID NO: 3392628 - DNA, 25 bp, Homo sapien
gtttgttcactttctgacagctctc

SEQ ID NO: 3392629 - DNA, 25 bp, Homo sapien
tacttcgaccttttatcataaaagc

SEQ ID NO: 3392630 - DNA, 25 bp, Homo sapien
ttcactttctgacagctctccacag

SEQ ID NO: 3392631 - DNA, 25 bp, Homo sapien
catggggttgtattcctcgaaaata

SEQ ID NO: 3392632 - DNA, 25 bp, Homo sapien
ctatatgtctgtaattttccatttc

SEQ ID NO: 3392633 - DNA, 25 bp, Homo sapien
attcctcgaaaatattaacgatcat

SEQ ID NO: 3392634 - DNA, 25 bp, Homo sapien
cattggcatggggttgtattcctcg

SEQ ID NO: 3392635 - DNA, 25 bp, Homo sapien
aattctgaaaatacgagcagtgggc

SEQ ID NO: 3392636 - DNA, 25 bp, Homo sapien
cttttgtaaggagtaaggtgggcag

SEQ ID NO: 3392637 - DNA, 25 bp, Homo sapien
cgtaattctgaaaatacgagcagtg

SEQ ID NO: 3392638 - DNA, 25 bp, Homo sapien
agaagttggcagagcgtaattctga

SEQ ID NO: 3392639 - DNA, 25 bp, Homo sapien
tattcatgacttcaaaggattgtca

SEQ ID NO: 3392640 - DNA, 25 bp, Homo sapien
tcttctcttattcatgctcttgtat

SEQ ID NO: 3392641 - DNA, 25 bp, Homo sapien
atcttttcttctcttattcatgctc

SEQ ID NO: 3392642 - DNA, 25 bp, Homo sapien
tcatgctcttgtatattcatgactt

SEQ ID NO: 3392643 - DNA, 25 bp, Homo sapien
gcttgttaaggataataacctccag

SEQ ID NO: 3392644 - DNA, 25 bp, Homo sapien
ccttctcccttcaagtagacaccag

SEQ ID NO: 3392645 - DNA, 25 bp, Homo sapien
tctcccttcaagtagacaccagtgt

SEQ ID NO: 3392646 - DNA, 25 bp, Homo sapien
ctgcattagcttgttaaggataata

SEQ ID NO: 3392647 - DNA, 25 bp, Homo sapien
cctaggcctatacagtctcaggttc

SEQ ID NO: 3392648 - DNA, 25 bp, Homo sapien
tctctggggctataagccttagcct

SEQ ID NO: 3392649 - DNA, 25 bp, Homo sapien
catctttgcaacagcggaggcttcc

SEQ ID NO: 3392650 - DNA, 25 bp, Homo sapien
ttccagagcagtatttctattcttc

SEQ ID NO: 3392651 - DNA, 25 bp, Homo sapien
tttgcaacagcggaggcttccgtct

SEQ ID NO: 3392652 - DNA, 25 bp, Homo sapien
gaccgaggcagtgaaaagccagctt

SEQ ID NO: 3392653 - DNA, 25 bp, Homo sapien
caccggattgttttgtgggccttcg

SEQ ID NO: 3392654 - DNA, 25 bp, Homo sapien
gctgatatccgaaacctgtccctga

SEQ ID NO: 3392655 - DNA, 25 bp, Homo sapien
ttagaacgaccccactgcacgggct

SEQ ID NO: 3392656 - DNA, 25 bp, Homo sapien
taatccgattgacgtcagccagcac

SEQ ID NO: 3392657 - DNA, 25 bp, Homo sapien
gcagtgctcgcattgaggccactta

SEQ ID NO: 3392658 - DNA, 25 bp, Homo sapien
ggaatcgatcgtctctcaacttgca

SEQ ID NO: 3392659 - DNA, 25 bp, Homo sapien
gggcctgcgttgcactcatcttgca

SEQ ID NO: 3392660 - DNA, 25 bp, Homo sapien
cagactgtccttattcttgctatga

SEQ ID NO: 3392661 - DNA, 25 bp, Homo sapien
cttattcttgctatgaagtaggaac

SEQ ID NO: 3392662 - DNA, 25 bp, Homo sapien
ccttattcttgctatgaagtaggaa

SEQ ID NO: 3392663 - DNA, 25 bp, Homo sapien
gactgtccttattcttgctatgaag

SEQ ID NO: 3392664 - DNA, 25 bp, Homo sapien
atcagacatgtctgaacagtacttg

SEQ ID NO: 3392665 - DNA, 25 bp, Homo sapien
caggttttcaagatcagacatgtct

SEQ ID NO: 3392666 - DNA, 25 bp, Homo sapien
ttcaagatcagacatgtctgaacag

SEQ ID NO: 3392667 - DNA, 25 bp, Homo sapien
caagatcagacatgtctgaacagta

SEQ ID NO: 3392668 - DNA, 25 bp, Homo sapien
ggtgcagaaggctcttgctccctga

SEQ ID NO: 3392669 - DNA, 25 bp, Homo sapien
tttttggtaatatgaggatgctccg

SEQ ID NO: 3392670 - DNA, 25 bp, Homo sapien
gaggatgctccgatgattagaggtg

SEQ ID NO: 3392671 - DNA, 25 bp, Homo sapien
aggtgcagaaggctcttgctccctg

SEQ ID NO: 3392672 - DNA, 25 bp, Homo sapien
agctgccaatcagcccaatatacct

SEQ ID NO: 3392673 - DNA, 25 bp, Homo sapien
caatcagcccaatatacctccattt

SEQ ID NO: 3392674 - DNA, 25 bp, Homo sapien
ccacttctatagactttgggtcttc

SEQ ID NO: 3392675 - DNA, 25 bp, Homo sapien
aactccacttctatagactttgggt

SEQ ID NO: 3392676 - DNA, 25 bp, Homo sapien
gaagacaacaattgcaggcgagata

SEQ ID NO: 3392677 - DNA, 25 bp, Homo sapien
cacgtggggatttatgaagacaaca

SEQ ID NO: 3392678 - DNA, 25 bp, Homo sapien
tgacacgtggggatttatgaagaca

SEQ ID NO: 3392679 - DNA, 25 bp, Homo sapien
acaacaattgcaggcgagatatggg

SEQ ID NO: 3392680 - DNA, 25 bp, Homo sapien
cagaggagaagcaggcatcttcctc

SEQ ID NO: 3392681 - DNA, 25 bp, Homo sapien
gcagaggagaagcaggcatcttcct

SEQ ID NO: 3392682 - DNA, 25 bp, Homo sapien
gaaacttgccatcttggcagaaggc

SEQ ID NO: 3392683 - DNA, 25 bp, Homo sapien
cctcaggaaacttgccatcttggca

SEQ ID NO: 3392684 - DNA, 25 bp, Homo sapien
tcttgttcagaccatcagtagtagt

SEQ ID NO: 3392685 - DNA, 25 bp, Homo sapien
tgggaaacctgatcctaaaagcctg

SEQ ID NO: 3392686 - DNA, 25 bp, Homo sapien
tgttgtctaacacaaagggctttaa

SEQ ID NO: 3392687 - DNA, 25 bp, Homo sapien
tgtgaccattgttaaggacctctgg

SEQ ID NO: 3392688 - DNA, 25 bp, Homo sapien
tatcttcaaaggttgaactgctcat

SEQ ID NO: 3392689 - DNA, 25 bp, Homo sapien
cttcttatgatctcagaccctcaga

SEQ ID NO: 3392690 - DNA, 25 bp, Homo sapien
cagaccctcagacggagaggctggc

SEQ ID NO: 3392691 - DNA, 25 bp, Homo sapien
tctgagttatcttcaaaggttgaac

SEQ ID NO: 3392692 - DNA, 25 bp, Homo sapien
aaagagcctctgattctatatcctc

SEQ ID NO: 3392693 - DNA, 25 bp, Homo sapien
ttccttatatcttccaggttaggga

SEQ ID NO: 3392694 - DNA, 25 bp, Homo sapien
gattctatatcctctttccttatat

SEQ ID NO: 3392695 - DNA, 25 bp, Homo sapien
tccttatatcttccaggttagggat

SEQ ID NO: 3392696 - DNA, 25 bp, Homo sapien
gagtgcgttgtggttgagtccaccc

SEQ ID NO: 3392697 - DNA, 25 bp, Homo sapien
cagcgagtgcgttgtggttgagtcc

SEQ ID NO: 3392698 - DNA, 25 bp, Homo sapien
gttgtggttgagtccacccttcacc

SEQ ID NO: 3392699 - DNA, 25 bp, Homo sapien
cttcacctattaagggggtgctcct

SEQ ID NO: 3392700 - DNA, 25 bp, Homo sapien
cttaaggtgacatcactgactaaca

SEQ ID NO: 3392701 - DNA, 25 bp, Homo sapien
ttgagtagatgataactccagtgga

SEQ ID NO: 3392702 - DNA, 25 bp, Homo sapien
agtagatgataactccagtggattc

SEQ ID NO: 3392703 - DNA, 25 bp, Homo sapien
cttagaaactgtgcttaaggtgaca

SEQ ID NO: 3392704 - DNA, 25 bp, Homo sapien
tcacagctagctcttactcacaagc

SEQ ID NO: 3392705 - DNA, 25 bp, Homo sapien
tcatctactggcctgtaggttgaag

SEQ ID NO: 3392706 - DNA, 25 bp, Homo sapien
cctgtaggttgaagtgcacagccca

SEQ ID NO: 3392707 - DNA, 25 bp, Homo sapien
tcacaagcttcatctactggcctgt

SEQ ID NO: 3392708 - DNA, 25 bp, Homo sapien
aactacagaaacaatggttagcata

SEQ ID NO: 3392709 - DNA, 25 bp, Homo sapien
attttgagaaaagataacaccaaga

SEQ ID NO: 3392710 - DNA, 25 bp, Homo sapien
cagaaacaatggttagcataaaaaa

SEQ ID NO: 3392711 - DNA, 25 bp, Homo sapien
aattaataatcaaaaagatacacca

SEQ ID NO: 3392712 - DNA, 25 bp, Homo sapien
taatatgtaacaattgagaagttca

SEQ ID NO: 3392713 - DNA, 25 bp, Homo sapien
gcccaaaggattgctttggtaccat

SEQ ID NO: 3392714 - DNA, 25 bp, Homo sapien
ttgcccaaaggattgctttggtacc

SEQ ID NO: 3392715 - DNA, 25 bp, Homo sapien
tatgtaacaattgagaagttcattt

SEQ ID NO: 3392716 - DNA, 25 bp, Homo sapien
agggacagtaccgatatcgccaatt

SEQ ID NO: 3392717 - DNA, 25 bp, Homo sapien
gcttgcagttggatgaggtggacgc

SEQ ID NO: 3392718 - DNA, 25 bp, Homo sapien
gacagtaccgatatcgccaatttta

SEQ ID NO: 3392719 - DNA, 25 bp, Homo sapien
tgaggtggacgcagtatgttcacgc

SEQ ID NO: 3392720 - DNA, 25 bp, Homo sapien
ctgggtttgagaacaccagtctcca

SEQ ID NO: 3392721 - DNA, 25 bp, Homo sapien
tgggtttgagaacaccagtctccat

SEQ ID NO: 3392722 - DNA, 25 bp, Homo sapien
agcaaccttgcaagcaatttgagtt

SEQ ID NO: 3392723 - DNA, 25 bp, Homo sapien
aagatcttcactcggagcttcatgg

SEQ ID NO: 3392724 - DNA, 25 bp, Homo sapien
aaccttgcaagcaatttgagttgtg

SEQ ID NO: 3392725 - DNA, 25 bp, Homo sapien
cttgcaagcaatttgagttgtgtga

SEQ ID NO: 3392726 - DNA, 25 bp, Homo sapien
acaacccagaggaggccagtcagag

SEQ ID NO: 3392727 - DNA, 25 bp, Homo sapien
gaggccagtcagagaagttctcaac

SEQ ID NO: 3392728 - DNA, 25 bp, Homo sapien
ccagtcagagaagttctcaacacac

SEQ ID NO: 3392729 - DNA, 25 bp, Homo sapien
ccagaggaggccagtcagagaagtt

SEQ ID NO: 3392730 - DNA, 25 bp, Homo sapien
tatctaaatgccactcatttcgaag

SEQ ID NO: 3392731 - DNA, 25 bp, Homo sapien
actcatttcgaagagattcaggatc

SEQ ID NO: 3392732 - DNA, 25 bp, Homo sapien
taaatgccactcatttcgaagagat

SEQ ID NO: 3392733 - DNA, 25 bp, Homo sapien
tgccactcatttcgaagagattcag

SEQ ID NO: 3392734 - DNA, 25 bp, Homo sapien
gaatcatccctgaatgacctgtgta

SEQ ID NO: 3392735 - DNA, 25 bp, Homo sapien
tgtgcgcaagtgaaactgaaaggtc

SEQ ID NO: 3392736 - DNA, 25 bp, Homo sapien
catctattgacagatggaatgagca

SEQ ID NO: 3392737 - DNA, 25 bp, Homo sapien
tgaaaggtcgaatgtgtgactcaca

SEQ ID NO: 3392738 - DNA, 25 bp, Homo sapien
tccacagtgctgaaacaaacatccc

SEQ ID NO: 3392739 - DNA, 25 bp, Homo sapien
ctttgcaggtatggctcccttccac

SEQ ID NO: 3392740 - DNA, 25 bp, Homo sapien
ctggagctttgcaggtatggctccc

SEQ ID NO: 3392741 - DNA, 25 bp, Homo sapien
ttgcaggtatggctcccttccacag

SEQ ID NO: 3392742 - DNA, 25 bp, Homo sapien
ggctgccactaccacacgatggagt

SEQ ID NO: 3392743 - DNA, 25 bp, Homo sapien
tcaagatacagcaagcaattggcga

SEQ ID NO: 3392744 - DNA, 25 bp, Homo sapien
taaaacactgtcttctagagcaatg

SEQ ID NO: 3392745 - DNA, 25 bp, Homo sapien
caaggattcaggagttacgagcagt

SEQ ID NO: 3392746 - DNA, 25 bp, Homo sapien
ggcagtgctccttcgagttgacatt

SEQ ID NO: 3392747 - DNA, 25 bp, Homo sapien
tggcagtgctccttcgagttgacat

SEQ ID NO: 3392748 - DNA, 25 bp, Homo sapien
tgctccttcgagttgacatttccaa

SEQ ID NO: 3392749 - DNA, 25 bp, Homo sapien
cagtgctccttcgagttgacatttc

SEQ ID NO: 3392750 - DNA, 25 bp, Homo sapien
cttgtgtatgaagcatcagtaaagc

SEQ ID NO: 3392751 - DNA, 25 bp, Homo sapien
agctgcttgtgtatgaagcatcagt

SEQ ID NO: 3392752 - DNA, 25 bp, Homo sapien
tgtatgaagcatcagtaaagctgct

SEQ ID NO: 3392753 - DNA, 25 bp, Homo sapien
cagtaaagctgctaagatttatata

SEQ ID NO: 3392754 - DNA, 25 bp, Homo sapien
cccatcatcttcaatttccacattt

SEQ ID NO: 3392755 - DNA, 25 bp, Homo sapien
cctctattacatcctttaatgtgct

SEQ ID NO: 3392756 - DNA, 25 bp, Homo sapien
tttccctctattacatcctttaatg

SEQ ID NO: 3392757 - DNA, 25 bp, Homo sapien
caatttccacatttcatcaaataat

SEQ ID NO: 3392758 - DNA, 25 bp, Homo sapien
ttcaagagtgatggtgtcaacagaa

SEQ ID NO: 3392759 - DNA, 25 bp, Homo sapien
agagtgatggtgtcaacagaaaaca

SEQ ID NO: 3392760 - DNA, 25 bp, Homo sapien
gagtgatggtgtcaacagaaaacat

SEQ ID NO: 3392761 - DNA, 25 bp, Homo sapien
caagagtgatggtgtcaacagaaaa

SEQ ID NO: 3392762 - DNA, 25 bp, Homo sapien
ttgaattccactcaaccagaggtga

SEQ ID NO: 3392763 - DNA, 25 bp, Homo sapien
gtaagctttccgcagccatggtcct

SEQ ID NO: 3392764 - DNA, 25 bp, Homo sapien
ccatggtcctctgcaattgaattcc

SEQ ID NO: 3392765 - DNA, 25 bp, Homo sapien
gaaaatttgagtgcactttgtaagc

SEQ ID NO: 3392766 - DNA, 25 bp, Homo sapien
ttcaatgatgttatgccactagatg

SEQ ID NO: 3392767 - DNA, 25 bp, Homo sapien
gatgttatgccactagatggctcca

SEQ ID NO: 3392768 - DNA, 25 bp, Homo sapien
cactagatggctccagagtgtctac

SEQ ID NO: 3392769 - DNA, 25 bp, Homo sapien
tatgccactagatggctccagagtg

SEQ ID NO: 3392770 - DNA, 25 bp, Homo sapien
acattaatcaaaggagctctatttt

SEQ ID NO: 3392771 - DNA, 25 bp, Homo sapien
cattgagtttctatgaaggatctca

SEQ ID NO: 3392772 - DNA, 25 bp, Homo sapien
ctatttttacctgtcttatacattg

SEQ ID NO: 3392773 - DNA, 25 bp, Homo sapien
tctcatttgaagaaccagatctatt

SEQ ID NO: 3392774 - DNA, 25 bp, Homo sapien
aagtcagaccatacttccatgttca

SEQ ID NO: 3392775 - DNA, 25 bp, Homo sapien
tggcaccgtgaagtcagaccatact

SEQ ID NO: 3392776 - DNA, 25 bp, Homo sapien
gggaggaaaggatgcttgatactat

SEQ ID NO: 3392777 - DNA, 25 bp, Homo sapien
gcttgatactatatggcaccgtgaa

SEQ ID NO: 3392778 - DNA, 25 bp, Homo sapien
tggagccagggaatttggttctgct

SEQ ID NO: 3392779 - DNA, 25 bp, Homo sapien
cgattggagccagggaatttggttc

SEQ ID NO: 3392780 - DNA, 25 bp, Homo sapien
caacgcgacagcgattggagccagg

SEQ ID NO: 3392781 - DNA, 25 bp, Homo sapien
ctttcctcagagtcaacgcgacagc

SEQ ID NO: 3392782 - DNA, 25 bp, Homo sapien
catgggggactgccacaggaggtat

SEQ ID NO: 3392783 - DNA, 25 bp, Homo sapien
ctggaagaatttagggtcccatggg

SEQ ID NO: 3392784 - DNA, 25 bp, Homo sapien
cccatgggggactgccacaggaggt

SEQ ID NO: 3392785 - DNA, 25 bp, Homo sapien
ccctggaagaatttagggtcccatg

SEQ ID NO: 3392786 - DNA, 25 bp, Homo sapien
tggtcctccacaggccactgatttt

SEQ ID NO: 3392787 - DNA, 25 bp, Homo sapien
tccacaggccactgattttctgcat

SEQ ID NO: 3392788 - DNA, 25 bp, Homo sapien
tttctgcattgctactttgggtatt

SEQ ID NO: 3392789 - DNA, 25 bp, Homo sapien
ctcctggtcctccacaggccactga

SEQ ID NO: 3392790 - DNA, 25 bp, Homo sapien
tctccagaccatggaggggcctggc

SEQ ID NO: 3392791 - DNA, 25 bp, Homo sapien
ttgtgtttgtggagaaattgctttg

SEQ ID NO: 3392792 - DNA, 25 bp, Homo sapien
aaatttctgctttgatttgtgtttg

SEQ ID NO: 3392793 - DNA, 25 bp, Homo sapien
aggctggccctctccaaaagttgta

SEQ ID NO: 3392794 - DNA, 25 bp, Homo sapien
tttgccatgaaagtgcttgatacct

SEQ ID NO: 3392795 - DNA, 25 bp, Homo sapien
tgccatgaaagtgcttgatacctgc

SEQ ID NO: 3392796 - DNA, 25 bp, Homo sapien
tggcaggcttggcagctatgccagc

SEQ ID NO: 3392797 - DNA, 25 bp, Homo sapien
ggcttggcagctatgccagctgccc

SEQ ID NO: 3392798 - DNA, 25 bp, Homo sapien
gtagagtcatttggatcacagtctc

SEQ ID NO: 3392799 - DNA, 25 bp, Homo sapien
gctcttaatccagtgcccatttggg

SEQ ID NO: 3392800 - DNA, 25 bp, Homo sapien
catttgggttggtgtagagtcattt

SEQ ID NO: 3392801 - DNA, 25 bp, Homo sapien
cagttccataggctcttaatccagt

SEQ ID NO: 3392802 - DNA, 25 bp, Homo sapien
ttctttccataaccagtctctttgt

SEQ ID NO: 3392803 - DNA, 25 bp, Homo sapien
attctttccataaccagtctctttg

SEQ ID NO: 3392804 - DNA, 25 bp, Homo sapien
tgtctgtttcctggtggtttaagga

SEQ ID NO: 3392805 - DNA, 25 bp, Homo sapien
cctcttttcctttatatagtcaatt

SEQ ID NO: 3392806 - DNA, 25 bp, Homo sapien
cttcctcttttcctttatatagtca

SEQ ID NO: 3392807 - DNA, 25 bp, Homo sapien
tcctcttttcctttatatagtcaat

SEQ ID NO: 3392808 - DNA, 25 bp, Homo sapien
ctcttttcctttatatagtcaattt

SEQ ID NO: 3392809 - DNA, 25 bp, Homo sapien
tttgcaaactcagatccaggattca

SEQ ID NO: 3392810 - DNA, 25 bp, Homo sapien
ttcttttgcaaactcagatccagga

SEQ ID NO: 3392811 - DNA, 25 bp, Homo sapien
caaactcagatccaggattcaagtc

SEQ ID NO: 3392812 - DNA, 25 bp, Homo sapien
ttttgcaaactcagatccaggattc

SEQ ID NO: 3392813 - DNA, 25 bp, Homo sapien
ttttgcatctcaactaagaccagaa

SEQ ID NO: 3392814 - DNA, 25 bp, Homo sapien
tctttttgcatctcaactaagacca

SEQ ID NO: 3392815 - DNA, 25 bp, Homo sapien
tttgcatctcaactaagaccagaag

SEQ ID NO: 3392816 - DNA, 25 bp, Homo sapien
tttttgcatctcaactaagaccaga

SEQ ID NO: 3392817 - DNA, 25 bp, Homo sapien
cattcatggtatacatgaatgtcaa

SEQ ID NO: 3392818 - DNA, 25 bp, Homo sapien
ttcatggtatacatgaatgtcaatt

SEQ ID NO: 3392819 - DNA, 25 bp, Homo sapien
tttcatacaggaacttttcatggta

SEQ ID NO: 3392820 - DNA, 25 bp, Homo sapien
attcatggtatacatgaatgtcaat

SEQ ID NO: 3392821 - DNA, 25 bp, Homo sapien
gctcccctgcaatgtaaccccatga

SEQ ID NO: 3392822 - DNA, 25 bp, Homo sapien
tgctcccctgcaatgtaaccccatg

SEQ ID NO: 3392823 - DNA, 25 bp, Homo sapien
cccctgcaatgtaaccccatgacat

SEQ ID NO: 3392824 - DNA, 25 bp, Homo sapien
gtgtctgctcccctgcaatgtaacc

SEQ ID NO: 3392825 - DNA, 25 bp, Homo sapien
tactgcccacctttctcacaagtat

SEQ ID NO: 3392826 - DNA, 25 bp, Homo sapien
tctcacaagtatttctgacaccttc

SEQ ID NO: 3392827 - DNA, 25 bp, Homo sapien
ttactgcccacctttctcacaagta

SEQ ID NO: 3392828 - DNA, 25 bp, Homo sapien
acctttctcacaagtatttctgaca

SEQ ID NO: 3392829 - DNA, 25 bp, Homo sapien
caatgtctgtggtaagtcagcctca

SEQ ID NO: 3392830 - DNA, 25 bp, Homo sapien
cccaatgtctgtggtaagtcagcct

SEQ ID NO: 3392831 - DNA, 25 bp, Homo sapien
cagcctcacaggtagtaagaggagg

SEQ ID NO: 3392832 - DNA, 25 bp, Homo sapien
tctgtggtaagtcagcctcacaggt

SEQ ID NO: 3392833 - DNA, 25 bp, Homo sapien
tgaagaccagaagtttgtctccaaa

SEQ ID NO: 3392834 - DNA, 25 bp, Homo sapien
ggtaatataaactccagggtgcttg

SEQ ID NO: 3392835 - DNA, 25 bp, Homo sapien
tgaatttgaatggtccgggtgagcc

SEQ ID NO: 3392836 - DNA, 25 bp, Homo sapien
catgtcagcagtgagaatgagtgcc

SEQ ID NO: 3392837 - DNA, 25 bp, Homo sapien
tcaggctagcccttctttcatcatc

SEQ ID NO: 3392838 - DNA, 25 bp, Homo sapien
gcagggagccatactttttgcatct

SEQ ID NO: 3392839 - DNA, 25 bp, Homo sapien
tttgttgtagcagggagccatactt

SEQ ID NO: 3392840 - DNA, 25 bp, Homo sapien
ttctttcaggctagcccttctttca

SEQ ID NO: 3392841 - DNA, 25 bp, Homo sapien
gagacatctcttacactgagtgaaa

SEQ ID NO: 3392842 - DNA, 25 bp, Homo sapien
gttggcaacaggtttgagacatctc

SEQ ID NO: 3392843 - DNA, 25 bp, Homo sapien
aaaattgacagctttatggccgtga

SEQ ID NO: 3392844 - DNA, 25 bp, Homo sapien
cctagaatgggaaggactctaagaa

SEQ ID NO: 3392845 - DNA, 25 bp, Homo sapien
ggagttagcagctttgcagttaata

SEQ ID NO: 3392846 - DNA, 25 bp, Homo sapien
ctgtccgttgtttctttaggccttg

SEQ ID NO: 3392847 - DNA, 25 bp, Homo sapien
gcagctttgcagttaatagcctcat

SEQ ID NO: 3392848 - DNA, 25 bp, Homo sapien
cttggggagttagcagctttgcagt

SEQ ID NO: 3392849 - DNA, 25 bp, Homo sapien
aaagcagttgtggagataagctggt

SEQ ID NO: 3392850 - DNA, 25 bp, Homo sapien
tttctatactatattggagtgtctt

SEQ ID NO: 3392851 - DNA, 25 bp, Homo sapien
tattggagtgtctttctatgctgtg

SEQ ID NO: 3392852 - DNA, 25 bp, Homo sapien
actatattggagtgtctttctatgc

SEQ ID NO: 3392853 - DNA, 25 bp, Homo sapien
ctctgtgctatgagctgattaatat

SEQ ID NO: 3392854 - DNA, 25 bp, Homo sapien
tgagctgattaatatcttcgatgca

SEQ ID NO: 3392855 - DNA, 25 bp, Homo sapien
tctgtgctatgagctgattaatatc

SEQ ID NO: 3392856 - DNA, 25 bp, Homo sapien
ctatgagctgattaatatcttcgat

SEQ ID NO: 3392857 - DNA, 25 bp, Homo sapien
gcgacagttgttatccacaggggat

SEQ ID NO: 3392858 - DNA, 25 bp, Homo sapien
ctgcgacagttgttatccacagggg

SEQ ID NO: 3392859 - DNA, 25 bp, Homo sapien
cgacagttgttatccacaggggatt

SEQ ID NO: 3392860 - DNA, 25 bp, Homo sapien
ttgttatccacaggggattggtttg

SEQ ID NO: 3392861 - DNA, 25 bp, Homo sapien
catgtttgttacttctgggaggcac

SEQ ID NO: 3392862 - DNA, 25 bp, Homo sapien
tgtgtgccctaggtaatcaagtact

SEQ ID NO: 3392863 - DNA, 25 bp, Homo sapien
aaaattctgtcgttacggctcagcc

SEQ ID NO: 3392864 - DNA, 25 bp, Homo sapien
tatcttggtctgtgctatgtgtgcc

SEQ ID NO: 3392865 - DNA, 25 bp, Homo sapien
taacatcttaggttggatactcaga

SEQ ID NO: 3392866 - DNA, 25 bp, Homo sapien
ttcttagtgtgtccaccctcctggg

SEQ ID NO: 3392867 - DNA, 25 bp, Homo sapien
tcagagctccttaattcacttgtag

SEQ ID NO: 3392868 - DNA, 25 bp, Homo sapien
caactgtgtatcaggacaaggcaca

SEQ ID NO: 3392869 - DNA, 25 bp, Homo sapien
gtaccttgagtattgctgctgtctt

SEQ ID NO: 3392870 - DNA, 25 bp, Homo sapien
ccagaagaatggctgtaccttgagt

SEQ ID NO: 3392871 - DNA, 25 bp, Homo sapien
gaatggctgtaccttgagtattgct

SEQ ID NO: 3392872 - DNA, 25 bp, Homo sapien
tgtcaccaccattgactccagcttc

SEQ ID NO: 3392873 - DNA, 25 bp, Homo sapien
ccaggttggtagtggatgggacacc

SEQ ID NO: 3392874 - DNA, 25 bp, Homo sapien
ttccttctgttccaggttggtagtg

SEQ ID NO: 3392875 - DNA, 25 bp, Homo sapien
caggggaggctcgagctctagaact

SEQ ID NO: 3392876 - DNA, 25 bp, Homo sapien
tgaagggaagttacaacatccagct

SEQ ID NO: 3392877 - DNA, 25 bp, Homo sapien
ccaaatgatatggcacatttctcaa

SEQ ID NO: 3392878 - DNA, 25 bp, Homo sapien
actcctccaaatgatatggcacatt

SEQ ID NO: 3392879 - DNA, 25 bp, Homo sapien
cactttcctttaataaccatagtct

SEQ ID NO: 3392880 - DNA, 25 bp, Homo sapien
aatgatatggcacatttctcaaatt

SEQ ID NO: 3392881 - DNA, 25 bp, Homo sapien
ttcaaatgagtattggaagaacttg

SEQ ID NO: 3392882 - DNA, 25 bp, Homo sapien
tcaaatgagtattggaagaacttgg

SEQ ID NO: 3392883 - DNA, 25 bp, Homo sapien
tatttccgacaacaagcagaacttg

SEQ ID NO: 3392884 - DNA, 25 bp, Homo sapien
agatgcatcaccagctatgaaaagg

SEQ ID NO: 3392885 - DNA, 25 bp, Homo sapien
gatgctctccgttaaactgccctca

SEQ ID NO: 3392886 - DNA, 25 bp, Homo sapien
ccttatttttgggtattgtgattgt

SEQ ID NO: 3392887 - DNA, 25 bp, Homo sapien
agcagcagggaccagagccaccttc

SEQ ID NO: 3392888 - DNA, 25 bp, Homo sapien
cttcttcacagcagcagggaccaga

SEQ ID NO: 3392889 - DNA, 25 bp, Homo sapien
cctgcttcttcacagcagcagggac

SEQ ID NO: 3392890 - DNA, 25 bp, Homo sapien
tgcttcttcacagcagcagggacca

SEQ ID NO: 3392891 - DNA, 25 bp, Homo sapien
tgtttgctggtccagggcctggata

SEQ ID NO: 3392892 - DNA, 25 bp, Homo sapien
gtttgctggtccagggcctggataa

SEQ ID NO: 3392893 - DNA, 25 bp, Homo sapien
ctgtttgctggtccagggcctggat

SEQ ID NO: 3392894 - DNA, 25 bp, Homo sapien
tttgctggtccagggcctggataaa

SEQ ID NO: 3392895 - DNA, 25 bp, Homo sapien
ctcagccctgggccaatagcctctg

SEQ ID NO: 3392896 - DNA, 25 bp, Homo sapien
caatagcctctgcttattcttttgc

SEQ ID NO: 3392897 - DNA, 25 bp, Homo sapien
ccctgggccaatagcctctgcttat

SEQ ID NO: 3392898 - DNA, 25 bp, Homo sapien
ggccaatagcctctgcttattcttt

SEQ ID NO: 3392899 - DNA, 25 bp, Homo sapien
cccattttacaatgtaggacaggca

SEQ ID NO: 3392900 - DNA, 25 bp, Homo sapien
gccttccccttgataatgcagtaag

SEQ ID NO: 3392901 - DNA, 25 bp, Homo sapien
tccccttgataatgcagtaagggac

SEQ ID NO: 3392902 - DNA, 25 bp, Homo sapien
cttccccttgataatgcagtaaggg

SEQ ID NO: 3392903 - DNA, 25 bp, Homo sapien
tagatgtcccagtcttgccttcccc

SEQ ID NO: 3392904 - DNA, 25 bp, Homo sapien
tcttcagagtgtgaagagatttcac

SEQ ID NO: 3392905 - DNA, 25 bp, Homo sapien
gttttctgttaggatcttcagagtg

SEQ ID NO: 3392906 - DNA, 25 bp, Homo sapien
tctgttaggatcttcagagtgtgaa

SEQ ID NO: 3392907 - DNA, 25 bp, Homo sapien
gtgaagagatttcactatagagaga

SEQ ID NO: 3392908 - DNA, 25 bp, Homo sapien
actgctgatagccagttctgcctct

SEQ ID NO: 3392909 - DNA, 25 bp, Homo sapien
tgagagaactgcccaactcttcttg

SEQ ID NO: 3392910 - DNA, 25 bp, Homo sapien
tctgagagaactgcccaactcttct

SEQ ID NO: 3392911 - DNA, 25 bp, Homo sapien
agagaactgcccaactcttcttgga

SEQ ID NO: 3392912 - DNA, 25 bp, Homo sapien
cattaaagaagctctcaaggtatcc

SEQ ID NO: 3392913 - DNA, 25 bp, Homo sapien
aaattcattaaagaagctctcaagg

SEQ ID NO: 3392914 - DNA, 25 bp, Homo sapien
ttcattaaagaagctctcaaggtat

SEQ ID NO: 3392915 - DNA, 25 bp, Homo sapien
aattcattaaagaagctctcaaggt

SEQ ID NO: 3392916 - DNA, 25 bp, Homo sapien
tgcacctatgccagggacgatgcct

SEQ ID NO: 3392917 - DNA, 25 bp, Homo sapien
tggcttcccggatccagctcttcac

SEQ ID NO: 3392918 - DNA, 25 bp, Homo sapien
cagggacgatgcctgcagcatccca

SEQ ID NO: 3392919 - DNA, 25 bp, Homo sapien
ctactctgctgtccacttagccaca

SEQ ID NO: 3392920 - DNA, 25 bp, Homo sapien
ctcaggatatttaactccctcctct

SEQ ID NO: 3392921 - DNA, 25 bp, Homo sapien
atttaactccctcctctgaagcaga

SEQ ID NO: 3392922 - DNA, 25 bp, Homo sapien
ttaactccctcctctgaagcagaca

SEQ ID NO: 3392923 - DNA, 25 bp, Homo sapien
caggatatttaactccctcctctga

SEQ ID NO: 3392924 - DNA, 25 bp, Homo sapien
tgaacatttgcgaactctagtcaca

SEQ ID NO: 3392925 - DNA, 25 bp, Homo sapien
aaatgaacatttgcgaactctagtc

SEQ ID NO: 3392926 - DNA, 25 bp, Homo sapien
aacatttgcgaactctagtcacaac

SEQ ID NO: 3392927 - DNA, 25 bp, Homo sapien
gaaatgaacatttgcgaactctagt

SEQ ID NO: 3392928 - DNA, 25 bp, Homo sapien
ctggattggcctggatgtgaagtaa

SEQ ID NO: 3392929 - DNA, 25 bp, Homo sapien
cactaattctccagaaacaagttta

SEQ ID NO: 3392930 - DNA, 25 bp, Homo sapien
gaagtaaaacactaattctccagaa

SEQ ID NO: 3392931 - DNA, 25 bp, Homo sapien
gattggcctggatgtgaagtaaaac

SEQ ID NO: 3392932 - DNA, 25 bp, Homo sapien
tttctgtagccccttcggcactggg

SEQ ID NO: 3392933 - DNA, 25 bp, Homo sapien
gctgggtttgttgcatgtctgtggg

SEQ ID NO: 3392934 - DNA, 25 bp, Homo sapien
gggatccaggagaatgctatttatg

SEQ ID NO: 3392935 - DNA, 25 bp, Homo sapien
caaactggttactgaaatctagcca

SEQ ID NO: 3392936 - DNA, 25 bp, Homo sapien
ggactgctctttggaattcctggca

SEQ ID NO: 3392937 - DNA, 25 bp, Homo sapien
cacctgcagctaactctctgggaag

SEQ ID NO: 3392938 - DNA, 25 bp, Homo sapien
tacttctgattttatcataggtccc

SEQ ID NO: 3392939 - DNA, 25 bp, Homo sapien
catcgtaaaaacaatccaatttcag

SEQ ID NO: 3392940 - DNA, 25 bp, Homo sapien
cataggtccctcttaggtctttaca

SEQ ID NO: 3392941 - DNA, 25 bp, Homo sapien
tttcagtgacctgagtacttctgat

SEQ ID NO: 3392942 - DNA, 25 bp, Homo sapien
ccacattggcgaatttctgcatctc

SEQ ID NO: 3392943 - DNA, 25 bp, Homo sapien
ttctggcaacagataggtgaaagcc

SEQ ID NO: 3392944 - DNA, 25 bp, Homo sapien
agttcttcccacattggcgaatttc

SEQ ID NO: 3392945 - DNA, 25 bp, Homo sapien
caacagataggtgaaagccaagttc

SEQ ID NO: 3392946 - DNA, 25 bp, Homo sapien
ctgccttgattggaagagggttctg

SEQ ID NO: 3392947 - DNA, 25 bp, Homo sapien
taagccatggctggcacttgtgctt

SEQ ID NO: 3392948 - DNA, 25 bp, Homo sapien
tgagtgctgtctggtaagccatggc

SEQ ID NO: 3392949 - DNA, 25 bp, Homo sapien
gctgaacaatgagtgctgtctggta

SEQ ID NO: 3392950 - DNA, 25 bp, Homo sapien
gctgtctggtaagccatggctggca

SEQ ID NO: 3392951 - DNA, 25 bp, Homo sapien
gccaatgtaaattaactcagcattg

SEQ ID NO: 3392952 - DNA, 25 bp, Homo sapien
cagcattgttcaaaatcacgtgtgc

SEQ ID NO: 3392953 - DNA, 25 bp, Homo sapien
actcagcattgttcaaaatcacgtg

SEQ ID NO: 3392954 - DNA, 25 bp, Homo sapien
tgccaatgtaaattaactcagcatt

SEQ ID NO: 3392955 - DNA, 25 bp, Homo sapien
agggagttagaggcttacttcccat

SEQ ID NO: 3392956 - DNA, 25 bp, Homo sapien
gccttggtaccagttgcatctgagc

SEQ ID NO: 3392957 - DNA, 25 bp, Homo sapien
ttggtaccagttgcatctgagcccc

SEQ ID NO: 3392958 - DNA, 25 bp, Homo sapien
ggtaccagttgcatctgagcccctg

SEQ ID NO: 3392959 - DNA, 25 bp, Homo sapien
gtagccttggtaccagttgcatctg

SEQ ID NO: 3392960 - DNA, 25 bp, Homo sapien
gctatggagagactatcatattgtg

SEQ ID NO: 3392961 - DNA, 25 bp, Homo sapien
aagctatggagagactatcatattg

SEQ ID NO: 3392962 - DNA, 25 bp, Homo sapien
ctatggagagactatcatattgtga

SEQ ID NO: 3392963 - DNA, 25 bp, Homo sapien
ttaagctatggagagactatcatat

SEQ ID NO: 3392964 - DNA, 25 bp, Homo sapien
tgtgctatcccctacttgtgagttg

SEQ ID NO: 3392965 - DNA, 25 bp, Homo sapien
ggctctgactgctataacaaggtat

SEQ ID NO: 3392966 - DNA, 25 bp, Homo sapien
tagtagtaggtcaggataaagagct

SEQ ID NO: 3392967 - DNA, 25 bp, Homo sapien
gttgtactataaattcagcacctgt

SEQ ID NO: 3392968 - DNA, 25 bp, Homo sapien
tgtggcttagtcatgatgacataac

SEQ ID NO: 3392969 - DNA, 25 bp, Homo sapien
tcatgctaaactaatcacagcatac

SEQ ID NO: 3392970 - DNA, 25 bp, Homo sapien
taatcacagcatactgtggcttagt

SEQ ID NO: 3392971 - DNA, 25 bp, Homo sapien
tgacataacaattaggtggttcttc

SEQ ID NO: 3392972 - DNA, 25 bp, Homo sapien
gtggcttcatttaatgttccatttt

SEQ ID NO: 3392973 - DNA, 25 bp, Homo sapien
catcgcttggtgtgagtggcttcat

SEQ ID NO: 3392974 - DNA, 25 bp, Homo sapien
ttcatttaatgttccattttcaggg

SEQ ID NO: 3392975 - DNA, 25 bp, Homo sapien
tcatcgcttggtgtgagtggcttca

SEQ ID NO: 3392976 - DNA, 25 bp, Homo sapien
ctcaggtttccgtttgctttcaaga

SEQ ID NO: 3392977 - DNA, 25 bp, Homo sapien
tactacctaggcaaatcagatggaa

SEQ ID NO: 3392978 - DNA, 25 bp, Homo sapien
tccgaggtgccatctatctgcatcg

SEQ ID NO: 3392979 - DNA, 25 bp, Homo sapien
cattcattacatggctaagtcagga

SEQ ID NO: 3392980 - DNA, 25 bp, Homo sapien
cccctttagaatctatatgtgtggg

SEQ ID NO: 3392981 - DNA, 25 bp, Homo sapien
tgtgggtaggtctagtttctccttg

SEQ ID NO: 3392982 - DNA, 25 bp, Homo sapien
aatctatatgtgtgggtaggtctag

SEQ ID NO: 3392983 - DNA, 25 bp, Homo sapien
atgtgtgggtaggtctagtttctcc

SEQ ID NO: 3392984 - DNA, 25 bp, Homo sapien
caaaacataggtgtctgagagactc

SEQ ID NO: 3392985 - DNA, 25 bp, Homo sapien
tatttatctcgaccagccaagctct

SEQ ID NO: 3392986 - DNA, 25 bp, Homo sapien
catttaatggactgagcattggcca

SEQ ID NO: 3392987 - DNA, 25 bp, Homo sapien
tggttcgagccatcactagaaggca

SEQ ID NO: 3392988 - DNA, 25 bp, Homo sapien
gaacagccggtgaacgggtctgaat

SEQ ID NO: 3392989 - DNA, 25 bp, Homo sapien
ggtgaacgggtctgaattgctgcct

SEQ ID NO: 3392990 - DNA, 25 bp, Homo sapien
ttccaacgtttggatttgcgtgcat

SEQ ID NO: 3392991 - DNA, 25 bp, Homo sapien
tgctgcctcttccaacgtttggatt

SEQ ID NO: 3392992 - DNA, 25 bp, Homo sapien
ctgtggggaccacagccaaagactc

SEQ ID NO: 3392993 - DNA, 25 bp, Homo sapien
cgctgccgtcgaaacccctattccg

SEQ ID NO: 3392994 - DNA, 25 bp, Homo sapien
cccattggagctccccgctcccaag

SEQ ID NO: 3392995 - DNA, 25 bp, Homo sapien
ctcccattggagctccccgctccca

SEQ ID NO: 3392996 - DNA, 25 bp, Homo sapien
cctctggggactcccgcgctgccgt

SEQ ID NO: 3392997 - DNA, 25 bp, Homo sapien
tagagcccttgaacaaagctgccgc

SEQ ID NO: 3392998 - DNA, 25 bp, Homo sapien
agtgacagtcctggcgccaaccaac

SEQ ID NO: 3392999 - DNA, 25 bp, Homo sapien
aaggaggaggcccaatagagccctt

SEQ ID NO: 3393000 - DNA, 25 bp, Homo sapien
agctgccgccccgaggacgacagtg

SEQ ID NO: 3393001 - DNA, 25 bp, Homo sapien
catttatagacacccaccatatttg

SEQ ID NO: 3393002 - DNA, 25 bp, Homo sapien
tgcatcctcatatggcagtaggagg

SEQ ID NO: 3393003 - DNA, 25 bp, Homo sapien
tttggcattgtaaatctgccttcca

SEQ ID NO: 3393004 - DNA, 25 bp, Homo sapien
aaaccctggagagcatgtgccaact

SEQ ID NO: 3393005 - DNA, 25 bp, Homo sapien
cttctttatcgcatgggttccccag

SEQ ID NO: 3393006 - DNA, 25 bp, Homo sapien
gcaaacagtccttgagtacagcatc

SEQ ID NO: 3393007 - DNA, 25 bp, Homo sapien
tagtcacttcatgtatgtggcaccc

SEQ ID NO: 3393008 - DNA, 25 bp, Homo sapien
catacggagtgaacagcagctagag

SEQ ID NO: 3393009 - DNA, 25 bp, Homo sapien
tttacttaaacgtgcagaacttagc

SEQ ID NO: 3393010 - DNA, 25 bp, Homo sapien
taaacgtgcagaacttagcctcttg

SEQ ID NO: 3393011 - DNA, 25 bp, Homo sapien
tggtaatttacttaaacgtgcagaa

SEQ ID NO: 3393012 - DNA, 25 bp, Homo sapien
aacgtgcagaacttagcctcttgtt

SEQ ID NO: 3393013 - DNA, 25 bp, Homo sapien
aagacaggatatttgacccttgttc

SEQ ID NO: 3393014 - DNA, 25 bp, Homo sapien
ccaagacaggatatttgacccttgt

SEQ ID NO: 3393015 - DNA, 25 bp, Homo sapien
tccaagacaggatatttgacccttg

SEQ ID NO: 3393016 - DNA, 25 bp, Homo sapien
attccaagacaggatatttgaccct

SEQ ID NO: 3393017 - DNA, 25 bp, Homo sapien
tgtgtgatgtgtaattgtgcctggg

SEQ ID NO: 3393018 - DNA, 25 bp, Homo sapien
tcatattcctgcacactactcttcg

SEQ ID NO: 3393019 - DNA, 25 bp, Homo sapien
cactactcttcgacccttcaaccct

SEQ ID NO: 3393020 - DNA, 25 bp, Homo sapien
tgatgtgtaattgtgcctgggagcc

SEQ ID NO: 3393021 - DNA, 25 bp, Homo sapien
tcgttgctgctctggtagtggatgc

SEQ ID NO: 3393022 - DNA, 25 bp, Homo sapien
taggccattaatcagctgatggagt

SEQ ID NO: 3393023 - DNA, 25 bp, Homo sapien
ttcctgtaaccattcgttgctgctc

SEQ ID NO: 3393024 - DNA, 25 bp, Homo sapien
tagtggatgctcttaacagaagacc

SEQ ID NO: 3393025 - DNA, 25 bp, Homo sapien
ttcgattcagactgtggttcaaggg

SEQ ID NO: 3393026 - DNA, 25 bp, Homo sapien
tgggacttcgattcagactgtggtt

SEQ ID NO: 3393027 - DNA, 25 bp, Homo sapien
caggtctaagtagggtgctcctatg

SEQ ID NO: 3393028 - DNA, 25 bp, Homo sapien
gggcctgggacttcgattcagactg

SEQ ID NO: 3393029 - DNA, 25 bp, Homo sapien
aatgcagggttggatgtttggaaca

SEQ ID NO: 3393030 - DNA, 25 bp, Homo sapien
caatgcagggttggatgtttggaac

SEQ ID NO: 3393031 - DNA, 25 bp, Homo sapien
gaagatatccagtaatgggttgcaa

SEQ ID NO: 3393032 - DNA, 25 bp, Homo sapien
ttatccttcatacagggaagatatc

SEQ ID NO: 3393033 - DNA, 25 bp, Homo sapien
ttccttgtctgttaccagagggtta

SEQ ID NO: 3393034 - DNA, 25 bp, Homo sapien
gatatggtgttgatggcacggtatc

SEQ ID NO: 3393035 - DNA, 25 bp, Homo sapien
ttgtctgttaccagagggttaactc

SEQ ID NO: 3393036 - DNA, 25 bp, Homo sapien
ggtatcatcgccatgtgtttccttg

SEQ ID NO: 3393037 - DNA, 25 bp, Homo sapien
atgataatgtcaatgcagccacaga

SEQ ID NO: 3393038 - DNA, 25 bp, Homo sapien
tcatccctgctaactacccactgaa

SEQ ID NO: 3393039 - DNA, 25 bp, Homo sapien
ccctgctaactacccactgaatcat

SEQ ID NO: 3393040 - DNA, 25 bp, Homo sapien
tccctgctaactacccactgaatca

SEQ ID NO: 3393041 - DNA, 25 bp, Homo sapien
caggagactataatgacttttggtt

SEQ ID NO: 3393042 - DNA, 25 bp, Homo sapien
tgagagatctcaggagactataatg

SEQ ID NO: 3393043 - DNA, 25 bp, Homo sapien
tctgaatgcagtcatagtggaagac

SEQ ID NO: 3393044 - DNA, 25 bp, Homo sapien
tggtttcaagtaatagaagccaact

SEQ ID NO: 3393045 - DNA, 25 bp, Homo sapien
agaacacatattctctgcatatggg

SEQ ID NO: 3393046 - DNA, 25 bp, Homo sapien
gagggcagtgaagaacacatattct

SEQ ID NO: 3393047 - DNA, 25 bp, Homo sapien
cacatattctctgcatatgggccac

SEQ ID NO: 3393048 - DNA, 25 bp, Homo sapien
cctggatggttgagggcagtgaaga

SEQ ID NO: 3393049 - DNA, 25 bp, Homo sapien
tgggtctctgaagccacatccatgg

SEQ ID NO: 3393050 - DNA, 25 bp, Homo sapien
gaagccacatccatggtcagtggga

SEQ ID NO: 3393051 - DNA, 25 bp, Homo sapien
atggtcagtgggaccatgaaggcca

SEQ ID NO: 3393052 - DNA, 25 bp, Homo sapien
tggtcagtgggaccatgaaggccat

SEQ ID NO: 3393053 - DNA, 25 bp, Homo sapien
tgaatcacgctgaaagagcaaggct

SEQ ID NO: 3393054 - DNA, 25 bp, Homo sapien
agcagtcgggactcttggaaggcca

SEQ ID NO: 3393055 - DNA, 25 bp, Homo sapien
taaccttgtataccaccttgctggc

SEQ ID NO: 3393056 - DNA, 25 bp, Homo sapien
tctgtgaacgagatgctggataacc

SEQ ID NO: 3393057 - DNA, 25 bp, Homo sapien
tttgttttattgccagtggaagcca

SEQ ID NO: 3393058 - DNA, 25 bp, Homo sapien
ttgttttattgccagtggaagccat

SEQ ID NO: 3393059 - DNA, 25 bp, Homo sapien
attttgttttattgccagtggaagc

SEQ ID NO: 3393060 - DNA, 25 bp, Homo sapien
ttttgttttattgccagtggaagcc

SEQ ID NO: 3393061 - DNA, 25 bp, Homo sapien
tactgaactgataaaccagatccat

SEQ ID NO: 3393062 - DNA, 25 bp, Homo sapien
tcttgaacagtcagcaagcatttac

SEQ ID NO: 3393063 - DNA, 25 bp, Homo sapien
ttcttgaacagtcagcaagcattta

SEQ ID NO: 3393064 - DNA, 25 bp, Homo sapien
tttactgaactgataaaccagatcc

SEQ ID NO: 3393065 - DNA, 25 bp, Homo sapien
cagctgcagaggatgagtcactgag

SEQ ID NO: 3393066 - DNA, 25 bp, Homo sapien
ctgttcagcctgaggtgctcaggtg

SEQ ID NO: 3393067 - DNA, 25 bp, Homo sapien
caggtgccttcgaatcagctgcaga

SEQ ID NO: 3393068 - DNA, 25 bp, Homo sapien
tgagtcactgagcattccctggtac

SEQ ID NO: 3393069 - DNA, 25 bp, Homo sapien
tgtgtcatagggtaatagaggactc

SEQ ID NO: 3393070 - DNA, 25 bp, Homo sapien
tttttagacaaaaggaggctgtaca

SEQ ID NO: 3393071 - DNA, 25 bp, Homo sapien
caaaatctgggcatagggtgtgtca

SEQ ID NO: 3393072 - DNA, 25 bp, Homo sapien
tagaggactcatcaaaatagcagac

SEQ ID NO: 3393073 - DNA, 25 bp, Homo sapien
aaagtagggcacagcgttagaggga

SEQ ID NO: 3393074 - DNA, 25 bp, Homo sapien
gagaggagcattcttctatttcatc

SEQ ID NO: 3393075 - DNA, 25 bp, Homo sapien
gcatccctctcccattcatgtagtt

SEQ ID NO: 3393076 - DNA, 25 bp, Homo sapien
tccctctcccattcatgtagttcaa

SEQ ID NO: 3393077 - DNA, 25 bp, Homo sapien
ctgtggtcggctgccttgcctggca

SEQ ID NO: 3393078 - DNA, 25 bp, Homo sapien
cctggtctgggaagcaaacaatgaa

SEQ ID NO: 3393079 - DNA, 25 bp, Homo sapien
ctggtctgggaagcaaacaatgaag

SEQ ID NO: 3393080 - DNA, 25 bp, Homo sapien
tggtctgggaagcaaacaatgaagc

SEQ ID NO: 3393081 - DNA, 25 bp, Homo sapien
attgcagcagattgctttccagcaa

SEQ ID NO: 3393082 - DNA, 25 bp, Homo sapien
ctattgcagcagattgctttccagc

SEQ ID NO: 3393083 - DNA, 25 bp, Homo sapien
ggaagaaaaactggagtgtcttcat

SEQ ID NO: 3393084 - DNA, 25 bp, Homo sapien
tgcagcagattgctttccagcaaca

SEQ ID NO: 3393085 - DNA, 25 bp, Homo sapien
tttctctattgcaatggtgatgttg

SEQ ID NO: 3393086 - DNA, 25 bp, Homo sapien
tgcagaaacgacattcttctttctc

SEQ ID NO: 3393087 - DNA, 25 bp, Homo sapien
tgatgcttatgcagaaacgacattc

SEQ ID NO: 3393088 - DNA, 25 bp, Homo sapien
ctctattgcaatggtgatgttggtc

SEQ ID NO: 3393089 - DNA, 25 bp, Homo sapien
tacaatcagtgctgtcgctgtcaca

SEQ ID NO: 3393090 - DNA, 25 bp, Homo sapien
tcaccaaaggagcagtagctgggcc

SEQ ID NO: 3393091 - DNA, 25 bp, Homo sapien
tggctgggtccttatacaccagatc

SEQ ID NO: 3393092 - DNA, 25 bp, Homo sapien
tggccactgggtatgtatacaagga

SEQ ID NO: 3393093 - DNA, 25 bp, Homo sapien
taactttcatgggactggtgtggct

SEQ ID NO: 3393094 - DNA, 25 bp, Homo sapien
tagagtctgaatcccctgatccagt

SEQ ID NO: 3393095 - DNA, 25 bp, Homo sapien
aatagaggcaggctaatttccacag

SEQ ID NO: 3393096 - DNA, 25 bp, Homo sapien
gagggcccaagagtctaccagaaga

SEQ ID NO: 3393097 - DNA, 25 bp, Homo sapien
tgctgcttctcactaggggcaacat

SEQ ID NO: 3393098 - DNA, 25 bp, Homo sapien
acattcttcccttgtccattgttct

SEQ ID NO: 3393099 - DNA, 25 bp, Homo sapien
ctgctgcttctcactaggggcaaca

SEQ ID NO: 3393100 - DNA, 25 bp, Homo sapien
gtggcttctcatgagctggcaactc

SEQ ID NO: 3393101 - DNA, 25 bp, Homo sapien
tcaacctgtggacaaaaaagacttg

SEQ ID NO: 3393102 - DNA, 25 bp, Homo sapien
gatgaagtacggacactttgcgcaa

SEQ ID NO: 3393103 - DNA, 25 bp, Homo sapien
ccaggcccttaatacccggatgata

SEQ ID NO: 3393104 - DNA, 25 bp, Homo sapien
agtgaatgcttgcaatcaccaccca

SEQ ID NO: 3393105 - DNA, 25 bp, Homo sapien
tgagaattgtcacactgattctgca

SEQ ID NO: 3393106 - DNA, 25 bp, Homo sapien
ctcgaacagcttctaggtgatcttg

SEQ ID NO: 3393107 - DNA, 25 bp, Homo sapien
ggtgatcttgagaattgtcacactg

SEQ ID NO: 3393108 - DNA, 25 bp, Homo sapien
ggctcgaacagcttctaggtgatct

SEQ ID NO: 3393109 - DNA, 25 bp, Homo sapien
tcatggtctctgtactgtgggattc

SEQ ID NO: 3393110 - DNA, 25 bp, Homo sapien
cccttttgtaggtttcatggtctct

SEQ ID NO: 3393111 - DNA, 25 bp, Homo sapien
tgtgggattccacatagcattttcc

SEQ ID NO: 3393112 - DNA, 25 bp, Homo sapien
tcaaaactcaaattgaagagtcccc

SEQ ID NO: 3393113 - DNA, 25 bp, Homo sapien
tgtgttcgttcctccccataatcag

SEQ ID NO: 3393114 - DNA, 25 bp, Homo sapien
ctgtgttcgttcctccccataatca

SEQ ID NO: 3393115 - DNA, 25 bp, Homo sapien
ggcacagtttccaggattcttgcaa

SEQ ID NO: 3393116 - DNA, 25 bp, Homo sapien
gcacagtttccaggattcttgcaag

SEQ ID NO: 3393117 - DNA, 25 bp, Homo sapien
cagccctatcatggttactacttgg

SEQ ID NO: 3393118 - DNA, 25 bp, Homo sapien
tacttggaaagtcttctttggttca

SEQ ID NO: 3393119 - DNA, 25 bp, Homo sapien
taggccagacttgaaataagcttca

SEQ ID NO: 3393120 - DNA, 25 bp, Homo sapien
tctttggttcaacaaaactaccata

SEQ ID NO: 3393121 - DNA, 25 bp, Homo sapien
gaatgtctgggttgagtgtagctaa

SEQ ID NO: 3393122 - DNA, 25 bp, Homo sapien
cctcctcataaattgagagtctgag

SEQ ID NO: 3393123 - DNA, 25 bp, Homo sapien
ccaggaatatgtctgaatgtagccc

SEQ ID NO: 3393124 - DNA, 25 bp, Homo sapien
cccttgctttgtgatggcaggagaa

SEQ ID NO: 3393125 - DNA, 25 bp, Homo sapien
tgaagtgcgcattctgaactaccca

SEQ ID NO: 3393126 - DNA, 25 bp, Homo sapien
gaagtgcgcattctgaactacccat

SEQ ID NO: 3393127 - DNA, 25 bp, Homo sapien
ttgctgaagtgcgcattctgaacta

SEQ ID NO: 3393128 - DNA, 25 bp, Homo sapien
gctgaagtgcgcattctgaactacc

SEQ ID NO: 3393129 - DNA, 25 bp, Homo sapien
ctgcagagaagatgccagacagaat

SEQ ID NO: 3393130 - DNA, 25 bp, Homo sapien
gagaagatgccagacagaatcttct

SEQ ID NO: 3393131 - DNA, 25 bp, Homo sapien
tgccagacagaatcttctgtcttac

SEQ ID NO: 3393132 - DNA, 25 bp, Homo sapien
cagagaagatgccagacagaatctt

SEQ ID NO: 3393133 - DNA, 25 bp, Homo sapien
acaacagccttctccgctggtggta

SEQ ID NO: 3393134 - DNA, 25 bp, Homo sapien
tcatatatcctatctgccacaacag

SEQ ID NO: 3393135 - DNA, 25 bp, Homo sapien
tacttacgaggaccagaggtgaggt

SEQ ID NO: 3393136 - DNA, 25 bp, Homo sapien
ctgaatcatgggttaagtaatgttc

SEQ ID NO: 3393137 - DNA, 25 bp, Homo sapien
ttctgcagtgcgtctatggtcctcc

SEQ ID NO: 3393138 - DNA, 25 bp, Homo sapien
actttcatactgctcgccgactagg

SEQ ID NO: 3393139 - DNA, 25 bp, Homo sapien
caaggcccaagcgtgctagtaattc

SEQ ID NO: 3393140 - DNA, 25 bp, Homo sapien
gccgactaggcaagcgatttgatgc

SEQ ID NO: 3393141 - DNA, 25 bp, Homo sapien
gcttcgggcaagatgcgagtccaca

SEQ ID NO: 3393142 - DNA, 25 bp, Homo sapien
cccggcttcgggcaagatgcgagtc

SEQ ID NO: 3393143 - DNA, 25 bp, Homo sapien
ggcaagatgcgagtccacacaggcc

SEQ ID NO: 3393144 - DNA, 25 bp, Homo sapien
acaggccacactcgaccgaccgctt

SEQ ID NO: 3393145 - DNA, 25 bp, Homo sapien
gtcagaggcggcagaacctgtgctg

SEQ ID NO: 3393146 - DNA, 25 bp, Homo sapien
tcctgggcctacaggacaggcgacg

SEQ ID NO: 3393147 - DNA, 25 bp, Homo sapien
tgctgggctttgacacaaggcgttg

SEQ ID NO: 3393148 - DNA, 25 bp, Homo sapien
caggcgacgaccctcagagaggtca

SEQ ID NO: 3393149 - DNA, 25 bp, Homo sapien
caacagcagagggaattgaggatta

SEQ ID NO: 3393150 - DNA, 25 bp, Homo sapien
gggagatgcagaaatacccgttcca

SEQ ID NO: 3393151 - DNA, 25 bp, Homo sapien
tgaggattaattagggaactcactt

SEQ ID NO: 3393152 - DNA, 25 bp, Homo sapien
cagtctccttattagtgggaaaagt

SEQ ID NO: 3393153 - DNA, 25 bp, Homo sapien
taaattcgatacactaaggacagag

SEQ ID NO: 3393154 - DNA, 25 bp, Homo sapien
gaaggttcaatggacttccgtctga

SEQ ID NO: 3393155 - DNA, 25 bp, Homo sapien
ccgtctgactgtggaagcagccaat

SEQ ID NO: 3393156 - DNA, 25 bp, Homo sapien
caggaagtctaactctagggaagat

SEQ ID NO: 3393157 - DNA, 25 bp, Homo sapien
tacaagggaaactaggacaactatc

SEQ ID NO: 3393158 - DNA, 25 bp, Homo sapien
aatattcaaaacttgggctaccatg

SEQ ID NO: 3393159 - DNA, 25 bp, Homo sapien
gcctgacctttcttaatacaaggga

SEQ ID NO: 3393160 - DNA, 25 bp, Homo sapien
tatttggaggtaatcatcaccagtt

SEQ ID NO: 3393161 - DNA, 25 bp, Homo sapien
cagaagcgttccctgtaaagtcaga

SEQ ID NO: 3393162 - DNA, 25 bp, Homo sapien
tacaaggcaacgaactatgtggcaa

SEQ ID NO: 3393163 - DNA, 25 bp, Homo sapien
taaaaagaagactctggcctcaggt

SEQ ID NO: 3393164 - DNA, 25 bp, Homo sapien
cagatccatgagtagatgagggctc

SEQ ID NO: 3393165 - DNA, 25 bp, Homo sapien
ctggaggtttaggtcatgggctgat

SEQ ID NO: 3393166 - DNA, 25 bp, Homo sapien
aggtttaggtcatgggctgatcacc

SEQ ID NO: 3393167 - DNA, 25 bp, Homo sapien
gaggtttaggtcatgggctgatcac

SEQ ID NO: 3393168 - DNA, 25 bp, Homo sapien
ggaggtttaggtcatgggctgatca

SEQ ID NO: 3393169 - DNA, 25 bp, Homo sapien
tgattctagcaaattttccgtttta

SEQ ID NO: 3393170 - DNA, 25 bp, Homo sapien
gattatctgtgtgcattttggacaa

SEQ ID NO: 3393171 - DNA, 25 bp, Homo sapien
tgattatctgtgtgcattttggaca

SEQ ID NO: 3393172 - DNA, 25 bp, Homo sapien
tacgaagctggactccaactgaaca

SEQ ID NO: 3393173 - DNA, 25 bp, Homo sapien
atttgtagtacgaagctggactcca

SEQ ID NO: 3393174 - DNA, 25 bp, Homo sapien
gcagtgatttccaagtccttcatat

SEQ ID NO: 3393175 - DNA, 25 bp, Homo sapien
tctctaatgttccttttaaagcagt

SEQ ID NO: 3393176 - DNA, 25 bp, Homo sapien
aagcagtgatttccaagtccttcat

SEQ ID NO: 3393177 - DNA, 25 bp, Homo sapien
gtgatttccaagtccttcatataaa

SEQ ID NO: 3393178 - DNA, 25 bp, Homo sapien
taaaccagacgattccctaacatgg

SEQ ID NO: 3393179 - DNA, 25 bp, Homo sapien
tatgaactacagataaactgggccc

SEQ ID NO: 3393180 - DNA, 25 bp, Homo sapien
aactgggccctcaagatgttcctct

SEQ ID NO: 3393181 - DNA, 25 bp, Homo sapien
gagctgcagctgatatattctacaa

SEQ ID NO: 3393182 - DNA, 25 bp, Homo sapien
gagcaaattcagtttgccttcctgg

SEQ ID NO: 3393183 - DNA, 25 bp, Homo sapien
ctggagcaaattcagtttgccttcc

SEQ ID NO: 3393184 - DNA, 25 bp, Homo sapien
ggagcaaattcagtttgccttcctg

SEQ ID NO: 3393185 - DNA, 25 bp, Homo sapien
gcaaattcagtttgccttcctggat

SEQ ID NO: 3393186 - DNA, 25 bp, Homo sapien
cagcagtaaatgaactccatgtgag

SEQ ID NO: 3393187 - DNA, 25 bp, Homo sapien
tccatgtgagaagaggagacctaac

SEQ ID NO: 3393188 - DNA, 25 bp, Homo sapien
tctataatttatcaggctcaaggct

SEQ ID NO: 3393189 - DNA, 25 bp, Homo sapien
tcaaggcttattctatcgtcagcag

SEQ ID NO: 3393190 - DNA, 25 bp, Homo sapien
gtcacagaggtccatcccactaaaa

SEQ ID NO: 3393191 - DNA, 25 bp, Homo sapien
gctccacacttggtagaaccacagg

SEQ ID NO: 3393192 - DNA, 25 bp, Homo sapien
gagaccctggctatcatagacctta

SEQ ID NO: 3393193 - DNA, 25 bp, Homo sapien
cacaggcaggacaagcatagaaaca

SEQ ID NO: 3393194 - DNA, 25 bp, Homo sapien
tacaagcgatcctcatttcacatgg

SEQ ID NO: 3393195 - DNA, 25 bp, Homo sapien
gaattaacagatgcacagggacaaa

SEQ ID NO: 3393196 - DNA, 25 bp, Homo sapien
cactgaaatttgtgcccatgggaaa

SEQ ID NO: 3393197 - DNA, 25 bp, Homo sapien
tagaggactgcctacaccctacttg

SEQ ID NO: 3393198 - DNA, 25 bp, Homo sapien
atcctcactccctaaggagtctttt

SEQ ID NO: 3393199 - DNA, 25 bp, Homo sapien
gagtctttttacaatcctaatcaac

SEQ ID NO: 3393200 - DNA, 25 bp, Homo sapien
aatcttgacaaggactgcgtggcgc

SEQ ID NO: 3393201 - DNA, 25 bp, Homo sapien
tatactctgtattaaccagtgtttc

SEQ ID NO: 3393202 - DNA, 25 bp, Homo sapien
gaccaacattgtgtgagaccaacat

SEQ ID NO: 3393203 - DNA, 25 bp, Homo sapien
tccctacgaaaagcctaagcactgt

SEQ ID NO: 3393204 - DNA, 25 bp, Homo sapien
ccctaaatgggcatgatgaacaaat

SEQ ID NO: 3393205 - DNA, 25 bp, Homo sapien
tatgcacaatataaagaggctctag

SEQ ID NO: 3393206 - DNA, 25 bp, Homo sapien
taaggagcctctcaacatgggttgt

SEQ ID NO: 3393207 - DNA, 25 bp, Homo sapien
catccaatttagagaggtcaggagc

SEQ ID NO: 3393208 - DNA, 25 bp, Homo sapien
ttttcatacaccaaactgtagggcc

SEQ ID NO: 3393209 - DNA, 25 bp, Homo sapien
catgggttgtcggtatgtcacacag

SEQ ID NO: 3393210 - DNA, 25 bp, Homo sapien
ttatttttggttcgcatgatacatg

SEQ ID NO: 3393211 - DNA, 25 bp, Homo sapien
catgggtaaatcgtatgttgttggg

SEQ ID NO: 3393212 - DNA, 25 bp, Homo sapien
ttttggttcgcatgatacatgtgca

SEQ ID NO: 3393213 - DNA, 25 bp, Homo sapien
tgtcacccaggtagtctataatagt

SEQ ID NO: 3393214 - DNA, 25 bp, Homo sapien
ggttgttcggtcacaatgatctgca

SEQ ID NO: 3393215 - DNA, 25 bp, Homo sapien
ttttctggttgttcggtcacaatga

SEQ ID NO: 3393216 - DNA, 25 bp, Homo sapien
attttctggttgttcggtcacaatg

SEQ ID NO: 3393217 - DNA, 25 bp, Homo sapien
tctggttgttcggtcacaatgatct

SEQ ID NO: 3393218 - DNA, 25 bp, Homo sapien
tctgttcaccttcgaatagatagcg

SEQ ID NO: 3393219 - DNA, 25 bp, Homo sapien
gaaatgcaagctcaatctgttcacc

SEQ ID NO: 3393220 - DNA, 25 bp, Homo sapien
taacttctcaagtcctaatcttaag

SEQ ID NO: 3393221 - DNA, 25 bp, Homo sapien
cttttcaaccaacacagggcgcttg

SEQ ID NO: 3393222 - DNA, 25 bp, Homo sapien
ccttcactctatggccccaatctgc

SEQ ID NO: 3393223 - DNA, 25 bp, Homo sapien
tgccaactcctcaaacaggcgccca

SEQ ID NO: 3393224 - DNA, 25 bp, Homo sapien
tcctgactttgtcctgctcgaaagc

SEQ ID NO: 3393225 - DNA, 25 bp, Homo sapien
gcccacggcccttcactctatggcc

SEQ ID NO: 3393226 - DNA, 25 bp, Homo sapien
attcattaacgttgagtgttctagg

SEQ ID NO: 3393227 - DNA, 25 bp, Homo sapien
taacgttgagtgttctagggaccac

SEQ ID NO: 3393228 - DNA, 25 bp, Homo sapien
cattaacgttgagtgttctagggac

SEQ ID NO: 3393229 - DNA, 25 bp, Homo sapien
ttaacgttgagtgttctagggacca

SEQ ID NO: 3393230 - DNA, 25 bp, Homo sapien
ggggtatcatatcaccctcagtctc

SEQ ID NO: 3393231 - DNA, 25 bp, Homo sapien
cagctgggggtatcatatcaccctc

SEQ ID NO: 3393232 - DNA, 25 bp, Homo sapien
gaaggcggcagtggtagacagctgg

SEQ ID NO: 3393233 - DNA, 25 bp, Homo sapien
tggtagacagctgggggtatcatat

SEQ ID NO: 3393234 - DNA, 25 bp, Homo sapien
aattgtgtgcggcagttgccggcct

SEQ ID NO: 3393235 - DNA, 25 bp, Homo sapien
tgcccctgaattgtgtgcggcagtt

SEQ ID NO: 3393236 - DNA, 25 bp, Homo sapien
gagcgtcgccaccaaagcttattat

SEQ ID NO: 3393237 - DNA, 25 bp, Homo sapien
catatttcaatggagcgtcgccacc

SEQ ID NO: 3393238 - DNA, 25 bp, Homo sapien
aggtggggccagtgcataaagggcc

SEQ ID NO: 3393239 - DNA, 25 bp, Homo sapien
ggtggggccagtgcataaagggcca

SEQ ID NO: 3393240 - DNA, 25 bp, Homo sapien
gaggtggggccagtgcataaagggc

SEQ ID NO: 3393241 - DNA, 25 bp, Homo sapien
ggaggtggggccagtgcataaaggg

SEQ ID NO: 3393242 - DNA, 25 bp, Homo sapien
ctggtggacaacaggaaagactgcg

SEQ ID NO: 3393243 - DNA, 25 bp, Homo sapien
gacaacaggaaagactgcggaggag

SEQ ID NO: 3393244 - DNA, 25 bp, Homo sapien
acaggaaagactgcggaggagggct

SEQ ID NO: 3393245 - DNA, 25 bp, Homo sapien
tggacaacaggaaagactgcggagg

SEQ ID NO: 3393246 - DNA, 25 bp, Homo sapien
ggtaagcagcctgttcagggccttt

SEQ ID NO: 3393247 - DNA, 25 bp, Homo sapien
tcacacagagttcagtggaactgaa

SEQ ID NO: 3393248 - DNA, 25 bp, Homo sapien
agtaattattgtctgcgaaggtcac

SEQ ID NO: 3393249 - DNA, 25 bp, Homo sapien
gctgttgcctaaccctatgttaaag

SEQ ID NO: 3393250 - DNA, 25 bp, Homo sapien
attaatacctccgtgaacatgtgtg

SEQ ID NO: 3393251 - DNA, 25 bp, Homo sapien
agattgattgcaaaggccagttccc

SEQ ID NO: 3393252 - DNA, 25 bp, Homo sapien
agttcccaggaaagacaagcaggta

SEQ ID NO: 3393253 - DNA, 25 bp, Homo sapien
ggtttaagccaaagagtccagtgcc

SEQ ID NO: 3393254 - DNA, 25 bp, Homo sapien
tcccacatatacgtccagctgtgcc

SEQ ID NO: 3393255 - DNA, 25 bp, Homo sapien
gtccagctgtgccacgttctgattg

SEQ ID NO: 3393256 - DNA, 25 bp, Homo sapien
catagcctcccacatatacgtccag

SEQ ID NO: 3393257 - DNA, 25 bp, Homo sapien
acgttctgattgttgcgtgtctgca

SEQ ID NO: 3393258 - DNA, 25 bp, Homo sapien
gaagtcctgccatgatctttcctct

SEQ ID NO: 3393259 - DNA, 25 bp, Homo sapien
accaagacagaagtcctgccatgat

SEQ ID NO: 3393260 - DNA, 25 bp, Homo sapien
ctgcctcgtcaggctctctttgcat

SEQ ID NO: 3393261 - DNA, 25 bp, Homo sapien
ctgtccaccaagacagaagtcctgc

SEQ ID NO: 3393262 - DNA, 25 bp, Homo sapien
tggacattagtgcaggtcccactgg

SEQ ID NO: 3393263 - DNA, 25 bp, Homo sapien
gctgctaagttcaccgcgtttcctc

SEQ ID NO: 3393264 - DNA, 25 bp, Homo sapien
gctgagcaggaccagcccttgtttt

SEQ ID NO: 3393265 - DNA, 25 bp, Homo sapien
ggcaccctggtaccttgtcctttga

SEQ ID NO: 3393266 - DNA, 25 bp, Homo sapien
tatttgcaactcacacatataggcc

SEQ ID NO: 3393267 - DNA, 25 bp, Homo sapien
tctatctcccaagtgaacgtcttct

SEQ ID NO: 3393268 - DNA, 25 bp, Homo sapien
gcagttggcccacccatatcaaatg

SEQ ID NO: 3393269 - DNA, 25 bp, Homo sapien
gtttgacaatcttgctagagcctta

SEQ ID NO: 3393270 - DNA, 25 bp, Homo sapien
aggggcaagtgaggaagggatatgc

SEQ ID NO: 3393271 - DNA, 25 bp, Homo sapien
gctgttcaggggctattgtggatga

SEQ ID NO: 3393272 - DNA, 25 bp, Homo sapien
ggcaagtgaggaagggatatgcccc

SEQ ID NO: 3393273 - DNA, 25 bp, Homo sapien
tcaggggctattgtggatgagctgg

SEQ ID NO: 3393274 - DNA, 25 bp, Homo sapien
tcattttagactgggacttggcgtc

SEQ ID NO: 3393275 - DNA, 25 bp, Homo sapien
gggctccgacagtcttggcaaacaa

SEQ ID NO: 3393276 - DNA, 25 bp, Homo sapien
ggagctctctaattgctttactgag

SEQ ID NO: 3393277 - DNA, 25 bp, Homo sapien
cagagaaatcggtaacttggacata

SEQ ID NO: 3393278 - DNA, 25 bp, Homo sapien
tatccagcgagtgctggctcttgtc

SEQ ID NO: 3393279 - DNA, 25 bp, Homo sapien
catattttctggtccctgtcaggcc

SEQ ID NO: 3393280 - DNA, 25 bp, Homo sapien
actgctcggctcctattacaactgg

SEQ ID NO: 3393281 - DNA, 25 bp, Homo sapien
agtctaatttctggttgctgccgct

SEQ ID NO: 3393282 - DNA, 25 bp, Homo sapien
aatgccccgtgtgcctttgtaacgg

SEQ ID NO: 3393283 - DNA, 25 bp, Homo sapien
ctttgtaacggccaagctcccagtg

SEQ ID NO: 3393284 - DNA, 25 bp, Homo sapien
gtgtgtgccaagtacaaaatgcccc

SEQ ID NO: 3393285 - DNA, 25 bp, Homo sapien
caagtacaaaatgccccgtgtgcct

SEQ ID NO: 3393286 - DNA, 25 bp, Homo sapien
gaaaggatgacatgtgtaagtaggt

SEQ ID NO: 3393287 - DNA, 25 bp, Homo sapien
tatccagatgattagaaaacagcca

SEQ ID NO: 3393288 - DNA, 25 bp, Homo sapien
gaaggatgatccctcattgtgaaat

SEQ ID NO: 3393289 - DNA, 25 bp, Homo sapien
gaaatgtagacgatagtcaagtggt

SEQ ID NO: 3393290 - DNA, 25 bp, Homo sapien
tgccatctagggtccagcgatccct

SEQ ID NO: 3393291 - DNA, 25 bp, Homo sapien
agggccctttcctcaatggatccag

SEQ ID NO: 3393292 - DNA, 25 bp, Homo sapien
gacagcccaccattggaccggatgt

SEQ ID NO: 3393293 - DNA, 25 bp, Homo sapien
ccggatgtcagggtgctcctggcct

SEQ ID NO: 3393294 - DNA, 25 bp, Homo sapien
tgtttaaaccatcacatacaaacac

SEQ ID NO: 3393295 - DNA, 25 bp, Homo sapien
gtttaaaccatcacatacaaacacc

SEQ ID NO: 3393296 - DNA, 25 bp, Homo sapien
tttaaaccatcacatacaaacaccc

SEQ ID NO: 3393297 - DNA, 25 bp, Homo sapien
ctgtttaaaccatcacatacaaaca

SEQ ID NO: 3393298 - DNA, 25 bp, Homo sapien
tggctctcctcccatatgtgttgat

SEQ ID NO: 3393299 - DNA, 25 bp, Homo sapien
tcctcccatatgtgttgatctagcc

SEQ ID NO: 3393300 - DNA, 25 bp, Homo sapien
catatgtgttgatctagccttgtgc

SEQ ID NO: 3393301 - DNA, 25 bp, Homo sapien
tgtgttgatctagccttgtgccctc

SEQ ID NO: 3393302 - DNA, 25 bp, Homo sapien
attccaagtgatctccaaggagcct

SEQ ID NO: 3393303 - DNA, 25 bp, Homo sapien
gtaggatgtggttgttggtccattc

SEQ ID NO: 3393304 - DNA, 25 bp, Homo sapien
gggagagctgtaggatgtggttgtt

SEQ ID NO: 3393305 - DNA, 25 bp, Homo sapien
gtccattccaagtgatctccaagga

SEQ ID NO: 3393306 - DNA, 25 bp, Homo sapien
tgtccacctcatgatggaccatcct

SEQ ID NO: 3393307 - DNA, 25 bp, Homo sapien
ctcatgatggaccatcctatgtgta

SEQ ID NO: 3393308 - DNA, 25 bp, Homo sapien
ttagaatcatgagctgactctccag

SEQ ID NO: 3393309 - DNA, 25 bp, Homo sapien
tactgggccagtagggtaggggaca

SEQ ID NO: 3393310 - DNA, 25 bp, Homo sapien
ttaaaaattggtctatgcaggatgg

SEQ ID NO: 3393311 - DNA, 25 bp, Homo sapien
tggagagaatcttagaggttaaaaa

SEQ ID NO: 3393312 - DNA, 25 bp, Homo sapien
tggaggtatatttatggagagaatc

SEQ ID NO: 3393313 - DNA, 25 bp, Homo sapien
ggttaaaaattggtctatgcaggat

SEQ ID NO: 3393314 - DNA, 25 bp, Homo sapien
ctattgtgagaaacgtttgatgatt

SEQ ID NO: 3393315 - DNA, 25 bp, Homo sapien
ggtggcacatcctgcaagcttcttt

SEQ ID NO: 3393316 - DNA, 25 bp, Homo sapien
ctgggcaccctttctaggtggcaca

SEQ ID NO: 3393317 - DNA, 25 bp, Homo sapien
accctttctaggtggcacatcctgc

SEQ ID NO: 3393318 - DNA, 25 bp, Homo sapien
tgcagtggaccaccgggctttcact

SEQ ID NO: 3393319 - DNA, 25 bp, Homo sapien
cagtagtgactactgtaagggatgg

SEQ ID NO: 3393320 - DNA, 25 bp, Homo sapien
gcatttccgctgtggtgtcttacac

SEQ ID NO: 3393321 - DNA, 25 bp, Homo sapien
tgtcttacactggtgctcattcctg

SEQ ID NO: 3393322 - DNA, 25 bp, Homo sapien
tataattggagttgcatttaggtgg

SEQ ID NO: 3393323 - DNA, 25 bp, Homo sapien
gaatataattggagttgcatttagg

SEQ ID NO: 3393324 - DNA, 25 bp, Homo sapien
tggaatataattggagttgcattta

SEQ ID NO: 3393325 - DNA, 25 bp, Homo sapien
aatataattggagttgcatttaggt

SEQ ID NO: 3393326 - DNA, 25 bp, Homo sapien
gagcccactggtagagtgtagcaag

SEQ ID NO: 3393327 - DNA, 25 bp, Homo sapien
cctggctagacctcttgaaacaaag

SEQ ID NO: 3393328 - DNA, 25 bp, Homo sapien
tagagtgtagcaagaatccctggct

SEQ ID NO: 3393329 - DNA, 25 bp, Homo sapien
gacacttggttgatatctgagccca

SEQ ID NO: 3393330 - DNA, 25 bp, Homo sapien
gaaaaccggaacactctctcaggat

SEQ ID NO: 3393331 - DNA, 25 bp, Homo sapien
tgtaaattatctggtgcgcgcctgc

SEQ ID NO: 3393332 - DNA, 25 bp, Homo sapien
tctcaggatgctgttagggccaagc

SEQ ID NO: 3393333 - DNA, 25 bp, Homo sapien
tgcaccggatgccaagtagaaaacc

SEQ ID NO: 3393334 - DNA, 25 bp, Homo sapien
tttcctccaacatgtaagtggagct

SEQ ID NO: 3393335 - DNA, 25 bp, Homo sapien
ttcctccaacatgtaagtggagctt

SEQ ID NO: 3393336 - DNA, 25 bp, Homo sapien
tcctccaacatgtaagtggagcttc

SEQ ID NO: 3393337 - DNA, 25 bp, Homo sapien
taatcccgtgggagtctgtttgctc

SEQ ID NO: 3393338 - DNA, 25 bp, Homo sapien
tggtggatggctcccctgttttgca

SEQ ID NO: 3393339 - DNA, 25 bp, Homo sapien
tgatcctcctgagaattcggaaggg

SEQ ID NO: 3393340 - DNA, 25 bp, Homo sapien
tggtgtgagtcctgttctaacccct

SEQ ID NO: 3393341 - DNA, 25 bp, Homo sapien
tctgaacacatcttagcaccttcca

SEQ ID NO: 3393342 - DNA, 25 bp, Homo sapien
atctgaacacatcttagcaccttcc

SEQ ID NO: 3393343 - DNA, 25 bp, Homo sapien
ctgaacacatcttagcaccttccat

SEQ ID NO: 3393344 - DNA, 25 bp, Homo sapien
gcaaggattttgcagcacctggttg

SEQ ID NO: 3393345 - DNA, 25 bp, Homo sapien
actccctaatactatttaagtcatg

SEQ ID NO: 3393346 - DNA, 25 bp, Homo sapien
ttttctggtcctctgctacaggatg

SEQ ID NO: 3393347 - DNA, 25 bp, Homo sapien
gcagcacctggttgcacatcaactt

SEQ ID NO: 3393348 - DNA, 25 bp, Homo sapien
gggaggtaatgaatgcattcaaagt

SEQ ID NO: 3393349 - DNA, 25 bp, Homo sapien
agggaggtaatgaatgcattcaaag

SEQ ID NO: 3393350 - DNA, 25 bp, Homo sapien
agatgtaatggccgcccttctttac

SEQ ID NO: 3393351 - DNA, 25 bp, Homo sapien
cgcccttctttaccgctccatcggg

SEQ ID NO: 3393352 - DNA, 25 bp, Homo sapien
cttatatagactccacgagttgcca

SEQ ID NO: 3393353 - DNA, 25 bp, Homo sapien
actccacgagttgccagaggctccg

SEQ ID NO: 3393354 - DNA, 25 bp, Homo sapien
tagactccacgagttgccagaggct

SEQ ID NO: 3393355 - DNA, 25 bp, Homo sapien
tatagactccacgagttgccagagg

SEQ ID NO: 3393356 - DNA, 25 bp, Homo sapien
tcgggctcagcgctgtgggttcggg

SEQ ID NO: 3393357 - DNA, 25 bp, Homo sapien
gcgcccaggcgtagagcagggagga

SEQ ID NO: 3393358 - DNA, 25 bp, Homo sapien
cgtggtgtcagagccattggccgcc

SEQ ID NO: 3393359 - DNA, 25 bp, Homo sapien
tgtgatgcccgaccgaggatggcgt

SEQ ID NO: 3393360 - DNA, 25 bp, Homo sapien
ttgtgttggcccgatccccgggctc

SEQ ID NO: 3393361 - DNA, 25 bp, Homo sapien
tgatgtgttcgagccgccccggcct

SEQ ID NO: 3393362 - DNA, 25 bp, Homo sapien
gcctaggcctgggtgcattgtgttg

SEQ ID NO: 3393363 - DNA, 25 bp, Homo sapien
cctgggtgcattgtgttggcccgat

SEQ ID NO: 3393364 - DNA, 25 bp, Homo sapien
ccacagagtgttgaagcctgcaaac

SEQ ID NO: 3393365 - DNA, 25 bp, Homo sapien
agcacggaccccagagactttcaac

SEQ ID NO: 3393366 - DNA, 25 bp, Homo sapien
tcttttcagtgacagacatctccat

SEQ ID NO: 3393367 - DNA, 25 bp, Homo sapien
tgcaaacgcagcctgaatcagcacg

SEQ ID NO: 3393368 - DNA, 25 bp, Homo sapien
tctctctttttctaactccatttcc

SEQ ID NO: 3393369 - DNA, 25 bp, Homo sapien
atctctctttttctaactccatttc

SEQ ID NO: 3393370 - DNA, 25 bp, Homo sapien
tctctttttctaactccatttccac

SEQ ID NO: 3393371 - DNA, 25 bp, Homo sapien
caatctctctttttctaactccatt

SEQ ID NO: 3393372 - DNA, 25 bp, Homo sapien
cataagtcttctaaagctgtttttt

SEQ ID NO: 3393373 - DNA, 25 bp, Homo sapien
tcataagtcttctaaagctgttttt

SEQ ID NO: 3393374 - DNA, 25 bp, Homo sapien
ttgtgtgcattgaaagccagtcacc

SEQ ID NO: 3393375 - DNA, 25 bp, Homo sapien
tagtcaaatgattactcagctggca

SEQ ID NO: 3393376 - DNA, 25 bp, Homo sapien
aacacaccgtgctttatttggataa

SEQ ID NO: 3393377 - DNA, 25 bp, Homo sapien
cattatgggtgatgaaacacaccgt

SEQ ID NO: 3393378 - DNA, 25 bp, Homo sapien
tgttttgtcacattattgttgttac

SEQ ID NO: 3393379 - DNA, 25 bp, Homo sapien
ctttcgctgtgaacttttaagatcc

SEQ ID NO: 3393380 - DNA, 25 bp, Homo sapien
aataaaatacccaaggcttatattg

SEQ ID NO: 3393381 - DNA, 25 bp, Homo sapien
tgcctgtgtgtttccgaaggggtgt

SEQ ID NO: 3393382 - DNA, 25 bp, Homo sapien
tttaacctgttcagatcagagcagc

SEQ ID NO: 3393383 - DNA, 25 bp, Homo sapien
gagcaaaacagagaagtacatgtac

SEQ ID NO: 3393384 - DNA, 25 bp, Homo sapien
ttttatgtctccaagcaggtagtca

SEQ ID NO: 3393385 - DNA, 25 bp, Homo sapien
ggatactacactctcgaaagactat

SEQ ID NO: 3393386 - DNA, 25 bp, Homo sapien
agaacttcaagatttgtcacagcag

SEQ ID NO: 3393387 - DNA, 25 bp, Homo sapien
gaacttcaagatttgtcacagcagc

SEQ ID NO: 3393388 - DNA, 25 bp, Homo sapien
acagaaggaagctaggctcagagtt

SEQ ID NO: 3393389 - DNA, 25 bp, Homo sapien
cagaaggaagctaggctcagagttt

SEQ ID NO: 3393390 - DNA, 25 bp, Homo sapien
gaaggaagctaggctcagagtttgg

SEQ ID NO: 3393391 - DNA, 25 bp, Homo sapien
agaaggaagctaggctcagagtttg

SEQ ID NO: 3393392 - DNA, 25 bp, Homo sapien
ttccaagtatacagccaaaactgag

SEQ ID NO: 3393393 - DNA, 25 bp, Homo sapien
gcaaggtttccaagtatacagccaa

SEQ ID NO: 3393394 - DNA, 25 bp, Homo sapien
cagccaaaactgagtcggcagacac

SEQ ID NO: 3393395 - DNA, 25 bp, Homo sapien
tatacagccaaaactgagtcggcag

SEQ ID NO: 3393396 - DNA, 25 bp, Homo sapien
tgtgggtctgccagatggaagctcg

SEQ ID NO: 3393397 - DNA, 25 bp, Homo sapien
gtgggtctgccagatggaagctcga

SEQ ID NO: 3393398 - DNA, 25 bp, Homo sapien
gggcttggcatattgggcctcaaag

SEQ ID NO: 3393399 - DNA, 25 bp, Homo sapien
tggggcttggcatattgggcctcaa

SEQ ID NO: 3393400 - DNA, 25 bp, Homo sapien
gcttggcatattgggcctcaaagtc

SEQ ID NO: 3393401 - DNA, 25 bp, Homo sapien
tggcatattgggcctcaaagtcggg

SEQ ID NO: 3393402 - DNA, 25 bp, Homo sapien
ctgtgcagaaatggccaggacggca

SEQ ID NO: 3393403 - DNA, 25 bp, Homo sapien
gctggttgaagcctgtgcagaaatg

SEQ ID NO: 3393404 - DNA, 25 bp, Homo sapien
ctgtgcaaagctggttgaagcctgt

SEQ ID NO: 3393405 - DNA, 25 bp, Homo sapien
gacggcagtggctgtagcaaaaggt

SEQ ID NO: 3393406 - DNA, 25 bp, Homo sapien
aaaagtgttcccatgggcaccccat

SEQ ID NO: 3393407 - DNA, 25 bp, Homo sapien
ctctgactggtcaaggtggccccac

SEQ ID NO: 3393408 - DNA, 25 bp, Homo sapien
ccttgcacgttgagatttgcatgta

SEQ ID NO: 3393409 - DNA, 25 bp, Homo sapien
cagctgcttactcccttgcacgttg

SEQ ID NO: 3393410 - DNA, 25 bp, Homo sapien
ctatttggttatttggcctcaccat

SEQ ID NO: 3393411 - DNA, 25 bp, Homo sapien
gttcctgcttgtgcatccaaatgag

SEQ ID NO: 3393412 - DNA, 25 bp, Homo sapien
tatcaacttttgaggagtaacttcc

SEQ ID NO: 3393413 - DNA, 25 bp, Homo sapien
caaatgagttctgctcctcgaaata

SEQ ID NO: 3393414 - DNA, 25 bp, Homo sapien
ctttttatcctatcaacttttgagg

SEQ ID NO: 3393415 - DNA, 25 bp, Homo sapien
tccaagctgattctgactcccaagg

SEQ ID NO: 3393416 - DNA, 25 bp, Homo sapien
ggcaagctcttcaatccaaagggat

SEQ ID NO: 3393417 - DNA, 25 bp, Homo sapien
cctgtgtgttcttgggctgtcacca

SEQ ID NO: 3393418 - DNA, 25 bp, Homo sapien
gattcagaaggatgtggtccctctc

SEQ ID NO: 3393419 - DNA, 25 bp, Homo sapien
ttcttttaattcatccaaacttgcc

SEQ ID NO: 3393420 - DNA, 25 bp, Homo sapien
ggcatgtgaaattctctttctttta

SEQ ID NO: 3393421 - DNA, 25 bp, Homo sapien
ttaattcatccaaacttgcctgcca

SEQ ID NO: 3393422 - DNA, 25 bp, Homo sapien
tcatggcatgtgaaattctctttct

SEQ ID NO: 3393423 - DNA, 25 bp, Homo sapien
ttccagttgtaagggcctgattatg

SEQ ID NO: 3393424 - DNA, 25 bp, Homo sapien
atgtttccagttgtaagggcctgat

SEQ ID NO: 3393425 - DNA, 25 bp, Homo sapien
ttgtaagggcctgattatggtttaa

SEQ ID NO: 3393426 - DNA, 25 bp, Homo sapien
gggcctgattatggtttaatgcttg

SEQ ID NO: 3393427 - DNA, 25 bp, Homo sapien
ttgagatttcaattcatgaaggcag

SEQ ID NO: 3393428 - DNA, 25 bp, Homo sapien
cattgagatttcaattcatgaaggc

SEQ ID NO: 3393429 - DNA, 25 bp, Homo sapien
attgagatttcaattcatgaaggca

SEQ ID NO: 3393430 - DNA, 25 bp, Homo sapien
ggtctctcataaacgatagcccacg

SEQ ID NO: 3393431 - DNA, 25 bp, Homo sapien
tacagaaatatatgatggaccctcc

SEQ ID NO: 3393432 - DNA, 25 bp, Homo sapien
gctgggctgatggaaactaacgtct

SEQ ID NO: 3393433 - DNA, 25 bp, Homo sapien
gaaaagtcagtaactcaccgccctg

SEQ ID NO: 3393434 - DNA, 25 bp, Homo sapien
catccctgtgccaagctaagtagcg

SEQ ID NO: 3393435 - DNA, 25 bp, Homo sapien
tatccatgagaattgaggcctgtcc

SEQ ID NO: 3393436 - DNA, 25 bp, Homo sapien
aaaagacttattgaggccatccctg

SEQ ID NO: 3393437 - DNA, 25 bp, Homo sapien
catgttcccagaagaatgagcagct

SEQ ID NO: 3393438 - DNA, 25 bp, Homo sapien
ctgaggtaacggagagattcctgag

SEQ ID NO: 3393439 - DNA, 25 bp, Homo sapien
gaggtaacggagagattcctgagtg

SEQ ID NO: 3393440 - DNA, 25 bp, Homo sapien
tgaggtaacggagagattcctgagt

SEQ ID NO: 3393441 - DNA, 25 bp, Homo sapien
gacaggttgggcaatttccactctg

SEQ ID NO: 3393442 - DNA, 25 bp, Homo sapien
tgatcggatctgtctctttcaagag

SEQ ID NO: 3393443 - DNA, 25 bp, Homo sapien
tcaagagagtgatagcagacaggtt

SEQ ID NO: 3393444 - DNA, 25 bp, Homo sapien
cacagttgagagatgctgatcggat

SEQ ID NO: 3393445 - DNA, 25 bp, Homo sapien
aattccccaatctcctcacatttga

SEQ ID NO: 3393446 - DNA, 25 bp, Homo sapien
tgatcccctcttgattcaggacttg

SEQ ID NO: 3393447 - DNA, 25 bp, Homo sapien
atttgatcccctcttgattcaggac

SEQ ID NO: 3393448 - DNA, 25 bp, Homo sapien
aatctcctcacatttgatcccctct

SEQ ID NO: 3393449 - DNA, 25 bp, Homo sapien
gaagtctacagaggcatatacatca

SEQ ID NO: 3393450 - DNA, 25 bp, Homo sapien
cagaggcatatacatcaagaagcac

SEQ ID NO: 3393451 - DNA, 25 bp, Homo sapien
tacagaggcatatacatcaagaagc

SEQ ID NO: 3393452 - DNA, 25 bp, Homo sapien
cttcctgaagtctacagaggcatat

SEQ ID NO: 3393453 - DNA, 25 bp, Homo sapien
ctgaagggcaacaggatgatggatt

SEQ ID NO: 3393454 - DNA, 25 bp, Homo sapien
gaggtgtttgaacgacacatttctc

SEQ ID NO: 3393455 - DNA, 25 bp, Homo sapien
gatgatggatttgtgagtctctgag

SEQ ID NO: 3393456 - DNA, 25 bp, Homo sapien
catttctcctcgtatctgaagggca

SEQ ID NO: 3393457 - DNA, 25 bp, Homo sapien
gggtcgaatagattgaaaaagcttc

SEQ ID NO: 3393458 - DNA, 25 bp, Homo sapien
gccccagtgggtcgaatagattgaa

SEQ ID NO: 3393459 - DNA, 25 bp, Homo sapien
tggccccagtgggtcgaatagattg

SEQ ID NO: 3393460 - DNA, 25 bp, Homo sapien
ccagtgggtcgaatagattgaaaaa

SEQ ID NO: 3393461 - DNA, 25 bp, Homo sapien
agtcctggcgcttttgctgttgtca

SEQ ID NO: 3393462 - DNA, 25 bp, Homo sapien
ctctcctggtcagtcctggcgcttt

SEQ ID NO: 3393463 - DNA, 25 bp, Homo sapien
tttgctgttgtcaacagaaactttg

SEQ ID NO: 3393464 - DNA, 25 bp, Homo sapien
tggctttcccgttcccagcatgcct

SEQ ID NO: 3393465 - DNA, 25 bp, Homo sapien
gacaccgtgtttcgaactgtacaac

SEQ ID NO: 3393466 - DNA, 25 bp, Homo sapien
gtttcgaactgtacaactgctttta

SEQ ID NO: 3393467 - DNA, 25 bp, Homo sapien
aatatcctttggacaccgtgtttcg

SEQ ID NO: 3393468 - DNA, 25 bp, Homo sapien
cctttggacaccgtgtttcgaactg

SEQ ID NO: 3393469 - DNA, 25 bp, Homo sapien
tccctcaaacagttctctcgctgct

SEQ ID NO: 3393470 - DNA, 25 bp, Homo sapien
cctccctcaaacagttctctcgctg

SEQ ID NO: 3393471 - DNA, 25 bp, Homo sapien
ccctcaaacagttctctcgctgctt

SEQ ID NO: 3393472 - DNA, 25 bp, Homo sapien
ctccctcaaacagttctctcgctgc

SEQ ID NO: 3393473 - DNA, 25 bp, Homo sapien
cagccataggtcatcaaaggtgaag

SEQ ID NO: 3393474 - DNA, 25 bp, Homo sapien
aggtcatcaaaggtgaagttatctg

SEQ ID NO: 3393475 - DNA, 25 bp, Homo sapien
tcagccataggtcatcaaaggtgaa

SEQ ID NO: 3393476 - DNA, 25 bp, Homo sapien
tcatcaaaggtgaagttatctgatc

SEQ ID NO: 3393477 - DNA, 25 bp, Homo sapien
gaacatcccaatttgaaaggcctct

SEQ ID NO: 3393478 - DNA, 25 bp, Homo sapien
gctgaatctcccttgaccctctcaa

SEQ ID NO: 3393479 - DNA, 25 bp, Homo sapien
aatccccacgggattgtcgtgcttg

SEQ ID NO: 3393480 - DNA, 25 bp, Homo sapien
tcaggccttctattccgttctgtag

SEQ ID NO: 3393481 - DNA, 25 bp, Homo sapien
gtttgaggagtactgtttctccatg

SEQ ID NO: 3393482 - DNA, 25 bp, Homo sapien
tggctttataattcttgtttaactc

SEQ ID NO: 3393483 - DNA, 25 bp, Homo sapien
acagtttgaggagtactgtttctcc

SEQ ID NO: 3393484 - DNA, 25 bp, Homo sapien
gtttctccatgataagaaagcattt

SEQ ID NO: 3393485 - DNA, 25 bp, Homo sapien
gtttctttgaacataggagcctcag

SEQ ID NO: 3393486 - DNA, 25 bp, Homo sapien
gatgcccatttagacacgatattta

SEQ ID NO: 3393487 - DNA, 25 bp, Homo sapien
gccagtatgtcaagagacgtttgga

SEQ ID NO: 3393488 - DNA, 25 bp, Homo sapien
catgtgatgcgcaagttccctcttc

SEQ ID NO: 3393489 - DNA, 25 bp, Homo sapien
gataaagcttgaatgtgtttccatc

SEQ ID NO: 3393490 - DNA, 25 bp, Homo sapien
aagcttgaatgtgtttccatccaaa

SEQ ID NO: 3393491 - DNA, 25 bp, Homo sapien
ctgataaagcttgaatgtgtttcca

SEQ ID NO: 3393492 - DNA, 25 bp, Homo sapien
taaagcttgaatgtgtttccatcca

SEQ ID NO: 3393493 - DNA, 25 bp, Homo sapien
ggctggtcgctaacctgtatggggt

SEQ ID NO: 3393494 - DNA, 25 bp, Homo sapien
ctgaatggctggtcgctaacctgta

SEQ ID NO: 3393495 - DNA, 25 bp, Homo sapien
tgaatggctggtcgctaacctgtat

SEQ ID NO: 3393496 - DNA, 25 bp, Homo sapien
aatggctggtcgctaacctgtatgg

SEQ ID NO: 3393497 - DNA, 25 bp, Homo sapien
gacactgatgtaaaggcatgattca

SEQ ID NO: 3393498 - DNA, 25 bp, Homo sapien
cagaaagcattgtaggacactgatg

SEQ ID NO: 3393499 - DNA, 25 bp, Homo sapien
catgattcattttcacggccttagg

SEQ ID NO: 3393500 - DNA, 25 bp, Homo sapien
cgtgtgatacaagaaagagcactgt

SEQ ID NO: 3393501 - DNA, 25 bp, Homo sapien
ggctcaggttggaatcttttatcat

SEQ ID NO: 3393502 - DNA, 25 bp, Homo sapien
aggcatggcaacacttgggtactgt

SEQ ID NO: 3393503 - DNA, 25 bp, Homo sapien
gagaattggcaccaacgcctttgct

SEQ ID NO: 3393504 - DNA, 25 bp, Homo sapien
tgtgatctgtgggtatttttcacct

SEQ ID NO: 3393505 - DNA, 25 bp, Homo sapien
tcatgtggcaccgtattggaggctg

SEQ ID NO: 3393506 - DNA, 25 bp, Homo sapien
gattcactgtgggagggtactactt

SEQ ID NO: 3393507 - DNA, 25 bp, Homo sapien
cacctagtctagaagttgcaatgcc

SEQ ID NO: 3393508 - DNA, 25 bp, Homo sapien
catcagtgacttgcagcatggtgac

SEQ ID NO: 3393509 - DNA, 25 bp, Homo sapien
tgtgatcagtgtggcaacctgcctc

SEQ ID NO: 3393510 - DNA, 25 bp, Homo sapien
tgagagctatgaggtcactgccttt

SEQ ID NO: 3393511 - DNA, 25 bp, Homo sapien
gcctccttgatctgttgccaactag

SEQ ID NO: 3393512 - DNA, 25 bp, Homo sapien
tgatctttcttatagacgcagccag

SEQ ID NO: 3393513 - DNA, 25 bp, Homo sapien
tccactgctcgccttttacccacaa

SEQ ID NO: 3393514 - DNA, 25 bp, Homo sapien
ccactgctcgccttttacccacaaa

SEQ ID NO: 3393515 - DNA, 25 bp, Homo sapien
cactgctcgccttttacccacaaac

SEQ ID NO: 3393516 - DNA, 25 bp, Homo sapien
tttcacttgactccaatcctgaaat

SEQ ID NO: 3393517 - DNA, 25 bp, Homo sapien
tgttttcacttgactccaatcctga

SEQ ID NO: 3393518 - DNA, 25 bp, Homo sapien
ctgttttcacttgactccaatcctg

SEQ ID NO: 3393519 - DNA, 25 bp, Homo sapien
gttttcacttgactccaatcctgaa

SEQ ID NO: 3393520 - DNA, 25 bp, Homo sapien
gcaaagcacaagatcactcactgac

SEQ ID NO: 3393521 - DNA, 25 bp, Homo sapien
aaagcacaagatcactcactgacca

SEQ ID NO: 3393522 - DNA, 25 bp, Homo sapien
tgcaaagcacaagatcactcactga

SEQ ID NO: 3393523 - DNA, 25 bp, Homo sapien
agcacaagatcactcactgaccatc

SEQ ID NO: 3393524 - DNA, 25 bp, Homo sapien
tgcatgtagcctgatttgtcaataa

SEQ ID NO: 3393525 - DNA, 25 bp, Homo sapien
gaaggattgtactgaaggctcagca

SEQ ID NO: 3393526 - DNA, 25 bp, Homo sapien
gcagcaatagaggtgagtgcatgta

SEQ ID NO: 3393527 - DNA, 25 bp, Homo sapien
ggtacacagcccttttatctctgct

SEQ ID NO: 3393528 - DNA, 25 bp, Homo sapien
gggactgctgatctttgaccttggc

SEQ ID NO: 3393529 - DNA, 25 bp, Homo sapien
gaccttggcccattgatggctcttg

SEQ ID NO: 3393530 - DNA, 25 bp, Homo sapien
aagtgacagagggactgctgatctt

SEQ ID NO: 3393531 - DNA, 25 bp, Homo sapien
ttgaccttggcccattgatggctct

SEQ ID NO: 3393532 - DNA, 25 bp, Homo sapien
aactgagattgagttcctatggact

SEQ ID NO: 3393533 - DNA, 25 bp, Homo sapien
gaagactttgtttgccttatgaatt

SEQ ID NO: 3393534 - DNA, 25 bp, Homo sapien
tctgagtggatgagctttgattaga

SEQ ID NO: 3393535 - DNA, 25 bp, Homo sapien
tcatctagctggcagttgcaccaca

SEQ ID NO: 3393536 - DNA, 25 bp, Homo sapien
gatttcataactcacatcaggcctt

SEQ ID NO: 3393537 - DNA, 25 bp, Homo sapien
tcttctaaataacaatcctgcatag

SEQ ID NO: 3393538 - DNA, 25 bp, Homo sapien
ggccaattatttccatcgctgaaga

SEQ ID NO: 3393539 - DNA, 25 bp, Homo sapien
cgctgaagactctaaatttggcaaa

SEQ ID NO: 3393540 - DNA, 25 bp, Homo sapien
acctcaatccctgccttcatattta

SEQ ID NO: 3393541 - DNA, 25 bp, Homo sapien
gggcccaccctagtctagtgtgact

SEQ ID NO: 3393542 - DNA, 25 bp, Homo sapien
taggggcccaccctagtctagtgtg

SEQ ID NO: 3393543 - DNA, 25 bp, Homo sapien
cccaccctagtctagtgtgacttca

SEQ ID NO: 3393544 - DNA, 25 bp, Homo sapien
cctgggacgacatagagcgagatat

SEQ ID NO: 3393545 - DNA, 25 bp, Homo sapien
tacaaggtaagcttcaccggagagt

SEQ ID NO: 3393546 - DNA, 25 bp, Homo sapien
gaatgtctaacaactatcagtgggc

SEQ ID NO: 3393547 - DNA, 25 bp, Homo sapien
tacctgtctgaagtaacaaagaggc

SEQ ID NO: 3393548 - DNA, 25 bp, Homo sapien
gaatgaagtcgtattaaattcacat

SEQ ID NO: 3393549 - DNA, 25 bp, Homo sapien
ttattttgtatttggacactttgct

SEQ ID NO: 3393550 - DNA, 25 bp, Homo sapien
ctgcaactaggctgtggtattcttt

SEQ ID NO: 3393551 - DNA, 25 bp, Homo sapien
ttttaccttattcaatttctgcaac

SEQ ID NO: 3393552 - DNA, 25 bp, Homo sapien
atgacagtgactccaaagaagctca

SEQ ID NO: 3393553 - DNA, 25 bp, Homo sapien
tgacagtgactccaaagaagctcag

SEQ ID NO: 3393554 - DNA, 25 bp, Homo sapien
tcagttaggaatgtatcctttcacg

SEQ ID NO: 3393555 - DNA, 25 bp, Homo sapien
tttcacgctgtcaggctgtataaaa

SEQ ID NO: 3393556 - DNA, 25 bp, Homo sapien
tctagataccatgagacacaaaatg

SEQ ID NO: 3393557 - DNA, 25 bp, Homo sapien
caacagacgttttgtgggcttcaga

SEQ ID NO: 3393558 - DNA, 25 bp, Homo sapien
tacctgggcaagagaaactacctca

SEQ ID NO: 3393559 - DNA, 25 bp, Homo sapien
cagaattttggctgatctagatacc

SEQ ID NO: 3393560 - DNA, 25 bp, Homo sapien
taaagaaatgccttaagccctgtca

SEQ ID NO: 3393561 - DNA, 25 bp, Homo sapien
gaattgcaccctttaggcagtaggt

SEQ ID NO: 3393562 - DNA, 25 bp, Homo sapien
taattcacactgaggacgacctgtc

SEQ ID NO: 3393563 - DNA, 25 bp, Homo sapien
caactaatatgtgcacagggatagc

SEQ ID NO: 3393564 - DNA, 25 bp, Homo sapien
ggtaataatacctgtcagttcttgg

SEQ ID NO: 3393565 - DNA, 25 bp, Homo sapien
aatttacagctggattggactactg

SEQ ID NO: 3393566 - DNA, 25 bp, Homo sapien
tactgttgtgaaattaggtaggaca

SEQ ID NO: 3393567 - DNA, 25 bp, Homo sapien
ttagcaactccaagattcacccagg

SEQ ID NO: 3393568 - DNA, 25 bp, Homo sapien
tctttacggatgaagacctgcacgc

SEQ ID NO: 3393569 - DNA, 25 bp, Homo sapien
gataaatgtccctggccagattcac

SEQ ID NO: 3393570 - DNA, 25 bp, Homo sapien
gaacattccccatggtaagtggcta

SEQ ID NO: 3393571 - DNA, 25 bp, Homo sapien
gcacgcaagctgcatctcacagtgg

SEQ ID NO: 3393572 - DNA, 25 bp, Homo sapien
tccaataactcaaatatgttgtctg

SEQ ID NO: 3393573 - DNA, 25 bp, Homo sapien
ctcaaatatgttgtctgaattaatg

SEQ ID NO: 3393574 - DNA, 25 bp, Homo sapien
gttgttcgctaatattccaataact

SEQ ID NO: 3393575 - DNA, 25 bp, Homo sapien
cgccttctgaagttgttcgctaata

SEQ ID NO: 3393576 - DNA, 25 bp, Homo sapien
tttcattctctgatgccaactgctt

SEQ ID NO: 3393577 - DNA, 25 bp, Homo sapien
tctttcattctctgatgccaactgc

SEQ ID NO: 3393578 - DNA, 25 bp, Homo sapien
ctttcattctctgatgccaactgct

SEQ ID NO: 3393579 - DNA, 25 bp, Homo sapien
ggagacttagttcagacttcagggc

SEQ ID NO: 3393580 - DNA, 25 bp, Homo sapien
gctggagacttagttcagacttcag

SEQ ID NO: 3393581 - DNA, 25 bp, Homo sapien
cccaagctggagacttagttcagac

SEQ ID NO: 3393582 - DNA, 25 bp, Homo sapien
ttaccccaagctggagacttagttc

SEQ ID NO: 3393583 - DNA, 25 bp, Homo sapien
tcaagatcaattctccaatcactcc

SEQ ID NO: 3393584 - DNA, 25 bp, Homo sapien
gacttattgcatccactggcagaag

SEQ ID NO: 3393585 - DNA, 25 bp, Homo sapien
cagtcctcatggcaatcaagatcaa

SEQ ID NO: 3393586 - DNA, 25 bp, Homo sapien
tctccaatcactccccaggtcagtg

SEQ ID NO: 3393587 - DNA, 25 bp, Homo sapien
ctttgcctccactgtgtaggggcaa

SEQ ID NO: 3393588 - DNA, 25 bp, Homo sapien
tgcctccactgtgtaggggcaaatt

SEQ ID NO: 3393589 - DNA, 25 bp, Homo sapien
tcagacctttgcctccactgtgtag

SEQ ID NO: 3393590 - DNA, 25 bp, Homo sapien
cctttgcctccactgtgtaggggca

SEQ ID NO: 3393591 - DNA, 25 bp, Homo sapien
cccatgagcattccatagttcagtg

SEQ ID NO: 3393592 - DNA, 25 bp, Homo sapien
tatgaaggaacactccatacccatg

SEQ ID NO: 3393593 - DNA, 25 bp, Homo sapien
tggagcactccagtagttcagtggg

SEQ ID NO: 3393594 - DNA, 25 bp, Homo sapien
tagttcagtgggtatgaaggaagct

SEQ ID NO: 3393595 - DNA, 25 bp, Homo sapien
tgctcctaggagcatcttccggtgc

SEQ ID NO: 3393596 - DNA, 25 bp, Homo sapien
gtgcctccataacaacatgggtttg

SEQ ID NO: 3393597 - DNA, 25 bp, Homo sapien
ctcctaggagcatcttccggtgcat

SEQ ID NO: 3393598 - DNA, 25 bp, Homo sapien
ctccataacaacatgggtttgctgc

SEQ ID NO: 3393599 - DNA, 25 bp, Homo sapien
cactggctttgaccgaccttttctt

SEQ ID NO: 3393600 - DNA, 25 bp, Homo sapien
ccactggctttgaccgaccttttct

SEQ ID NO: 3393601 - DNA, 25 bp, Homo sapien
cagccagcacagatggttcctctta

SEQ ID NO: 3393602 - DNA, 25 bp, Homo sapien
tgcttcttcctgcagtaatcccttg

SEQ ID NO: 3393603 - DNA, 25 bp, Homo sapien
aactgacaatggacccgactgctcc

SEQ ID NO: 3393604 - DNA, 25 bp, Homo sapien
taatcccttggtgtttcccttgcaa

SEQ ID NO: 3393605 - DNA, 25 bp, Homo sapien
tgctaaccaccttacactgagctgt

SEQ ID NO: 3393606 - DNA, 25 bp, Homo sapien
aggacactggaaattcattagaatc

SEQ ID NO: 3393607 - DNA, 25 bp, Homo sapien
ggagtagttgcagcatccaaatgga

SEQ ID NO: 3393608 - DNA, 25 bp, Homo sapien
tcaatgtacctttgatatactcact

SEQ ID NO: 3393609 - DNA, 25 bp, Homo sapien
tcttccctgaggcaatgcaatctga

SEQ ID NO: 3393610 - DNA, 25 bp, Homo sapien
gaggcaatgcaatctgatgactgca

SEQ ID NO: 3393611 - DNA, 25 bp, Homo sapien
ctctaagggtatagggcactgggta

SEQ ID NO: 3393612 - DNA, 25 bp, Homo sapien
tttgcctatttcacccttcccatgc

SEQ ID NO: 3393613 - DNA, 25 bp, Homo sapien
agccgagcgataactcagggctgcc

SEQ ID NO: 3393614 - DNA, 25 bp, Homo sapien
gatcctgagccgagcgataactcag

SEQ ID NO: 3393615 - DNA, 25 bp, Homo sapien
ggaagactggaatgatcctgagccg

SEQ ID NO: 3393616 - DNA, 25 bp, Homo sapien
tctccccctctctattcattggaag

SEQ ID NO: 3393617 - DNA, 25 bp, Homo sapien
ctgctgtggcaccaaagagtttcat

SEQ ID NO: 3393618 - DNA, 25 bp, Homo sapien
tatatacggagctcttttcagtaac

SEQ ID NO: 3393619 - DNA, 25 bp, Homo sapien
cccacagtctggacaaatgattgat

SEQ ID NO: 3393620 - DNA, 25 bp, Homo sapien
tgtatattagcagaccattgggaaa

SEQ ID NO: 3393621 - DNA, 25 bp, Homo sapien
aaagctctcgcgctaaactctgtag

SEQ ID NO: 3393622 - DNA, 25 bp, Homo sapien
aggacaatcaagtgtatcaaataaa

SEQ ID NO: 3393623 - DNA, 25 bp, Homo sapien
ttgagaaggacaatcaagtgtatca

SEQ ID NO: 3393624 - DNA, 25 bp, Homo sapien
aattgagaaggacaatcaagtgtat

SEQ ID NO: 3393625 - DNA, 25 bp, Homo sapien
caaattgagaaggacaatcaagtgt

SEQ ID NO: 3393626 - DNA, 25 bp, Homo sapien
gaagcaccaccataaaaaatgcctg

SEQ ID NO: 3393627 - DNA, 25 bp, Homo sapien
acaagttcacacactgcaggccagt

SEQ ID NO: 3393628 - DNA, 25 bp, Homo sapien
gaatgtgggccatccttccatcgac

SEQ ID NO: 3393629 - DNA, 25 bp, Homo sapien
agccaaaagaatgggccacaagttc

SEQ ID NO: 3393630 - DNA, 25 bp, Homo sapien
gaaattcttgtaagacacagatgtc

SEQ ID NO: 3393631 - DNA, 25 bp, Homo sapien
tttttaaatgatatcctgccagctt

SEQ ID NO: 3393632 - DNA, 25 bp, Homo sapien
taattcctggatcaacatcagaagg

SEQ ID NO: 3393633 - DNA, 25 bp, Homo sapien
tgccagctttttcacaatccattaa

SEQ ID NO: 3393634 - DNA, 25 bp, Homo sapien
agactgaatttccaagtatccgtta

SEQ ID NO: 3393635 - DNA, 25 bp, Homo sapien
atttccaagtatccgttaaacatca

SEQ ID NO: 3393636 - DNA, 25 bp, Homo sapien
ttaaattcagactgaatttccaagt

SEQ ID NO: 3393637 - DNA, 25 bp, Homo sapien
ctgtttaaattcagactgaatttcc

SEQ ID NO: 3393638 - DNA, 25 bp, Homo sapien
gtgtcagtgactgcaaattttgtat

SEQ ID NO: 3393639 - DNA, 25 bp, Homo sapien
tctgtgtcagtgactgcaaattttg

SEQ ID NO: 3393640 - DNA, 25 bp, Homo sapien
caaattttgtatttctacaattagt

SEQ ID NO: 3393641 - DNA, 25 bp, Homo sapien
ctctgtgtcagtgactgcaaatttt

SEQ ID NO: 3393642 - DNA, 25 bp, Homo sapien
cagcctgaggaactggcacaccaaa

SEQ ID NO: 3393643 - DNA, 25 bp, Homo sapien
ggaacaattgatagtcagtgacata

SEQ ID NO: 3393644 - DNA, 25 bp, Homo sapien
gagaaactaggatttatcggatacc

SEQ ID NO: 3393645 - DNA, 25 bp, Homo sapien
ctttgcgtgggagggcactgacttt

SEQ ID NO: 3393646 - DNA, 25 bp, Homo sapien
ctgaagtagtccagagatcaaccaa

SEQ ID NO: 3393647 - DNA, 25 bp, Homo sapien
tagtccagagatcaaccaagtaagt

SEQ ID NO: 3393648 - DNA, 25 bp, Homo sapien
gatcaaccaagtaagtttggcctct

SEQ ID NO: 3393649 - DNA, 25 bp, Homo sapien
tccagagatcaaccaagtaagtttg

SEQ ID NO: 3393650 - DNA, 25 bp, Homo sapien
cagcatcagaatcacataggtcccg

SEQ ID NO: 3393651 - DNA, 25 bp, Homo sapien
cctgacagcatcagaatcacatagg

SEQ ID NO: 3393652 - DNA, 25 bp, Homo sapien
ccgcctctgctcatgtttatattca

SEQ ID NO: 3393653 - DNA, 25 bp, Homo sapien
agaatcacataggtcccgcctctgc

SEQ ID NO: 3393654 - DNA, 25 bp, Homo sapien
gacatcctatctgttctgtcaacat

SEQ ID NO: 3393655 - DNA, 25 bp, Homo sapien
ttgtcttgatagagatgaaaatgga

SEQ ID NO: 3393656 - DNA, 25 bp, Homo sapien
cttgtcttgatagagatgaaaatgg

SEQ ID NO: 3393657 - DNA, 25 bp, Homo sapien
tcttgatagagatgaaaatggattt

SEQ ID NO: 3393658 - DNA, 25 bp, Homo sapien
tgtcttgatagagatgaaaatggat

SEQ ID NO: 3393659 - DNA, 25 bp, Homo sapien
acagggccgttccatctcattagca

SEQ ID NO: 3393660 - DNA, 25 bp, Homo sapien
tgttgaagtaggaatgccattgtgt

SEQ ID NO: 3393661 - DNA, 25 bp, Homo sapien
cattcttgttatgtagtggtgctgt

SEQ ID NO: 3393662 - DNA, 25 bp, Homo sapien
cattgtgtcgagttctagtgtttgg

SEQ ID NO: 3393663 - DNA, 25 bp, Homo sapien
taccaagctaaatgaggactaggtt

SEQ ID NO: 3393664 - DNA, 25 bp, Homo sapien
acatttgtaaagcagaataactgat

SEQ ID NO: 3393665 - DNA, 25 bp, Homo sapien
tatttttataatcatgtatagggac

SEQ ID NO: 3393666 - DNA, 25 bp, Homo sapien
tacttggttttaagaatcgaagcac

SEQ ID NO: 3393667 - DNA, 25 bp, Homo sapien
caaatgggccctattcagaatcagt

SEQ ID NO: 3393668 - DNA, 25 bp, Homo sapien
gcataaagcgtattggaaaactacc

SEQ ID NO: 3393669 - DNA, 25 bp, Homo sapien
gacctgttctaccaatgtgctactg

SEQ ID NO: 3393670 - DNA, 25 bp, Homo sapien
gattccatgctgttacaaggccagc

SEQ ID NO: 3393671 - DNA, 25 bp, Homo sapien
taatgtcagttagtttgtctgttgg

SEQ ID NO: 3393672 - DNA, 25 bp, Homo sapien
actattggtggtgctgccattgcca

SEQ ID NO: 3393673 - DNA, 25 bp, Homo sapien
gccattgccatagcttcttgctgac

SEQ ID NO: 3393674 - DNA, 25 bp, Homo sapien
tgctgacccacatcaccattactga

SEQ ID NO: 3393675 - DNA, 25 bp, Homo sapien
tgtgaaccttaggtgttaactgtcg

SEQ ID NO: 3393676 - DNA, 25 bp, Homo sapien
tatctgtgaaccttaggtgttaact

SEQ ID NO: 3393677 - DNA, 25 bp, Homo sapien
tctgtgaaccttaggtgttaactgt

SEQ ID NO: 3393678 - DNA, 25 bp, Homo sapien
ttatctgtgaaccttaggtgttaac

SEQ ID NO: 3393679 - DNA, 25 bp, Homo sapien
tgcctgattctgtaatacaagccaa

SEQ ID NO: 3393680 - DNA, 25 bp, Homo sapien
ttgcctgattctgtaatacaagcca

SEQ ID NO: 3393681 - DNA, 25 bp, Homo sapien
tttgccattttgacaatagtcatca

SEQ ID NO: 3393682 - DNA, 25 bp, Homo sapien
tgacaatagtcatcatcgatgaact

SEQ ID NO: 3393683 - DNA, 25 bp, Homo sapien
gatgaactttcgttgagtttgtgca

SEQ ID NO: 3393684 - DNA, 25 bp, Homo sapien
tcatcatcgatgaactttcgttgag

SEQ ID NO: 3393685 - DNA, 25 bp, Homo sapien
aaccggtcaccgcttctatggagtg

SEQ ID NO: 3393686 - DNA, 25 bp, Homo sapien
gaagaaaggcgcctttggcttcgct

SEQ ID NO: 3393687 - DNA, 25 bp, Homo sapien
tggagtggcgtttactaccagtaag

SEQ ID NO: 3393688 - DNA, 25 bp, Homo sapien
taccagtaagttcccaaactgtgaa

SEQ ID NO: 3393689 - DNA, 25 bp, Homo sapien
cagaactccggaccggcttcttctt

SEQ ID NO: 3393690 - DNA, 25 bp, Homo sapien
ttccgacgtgttcgcgtttctggcc

SEQ ID NO: 3393691 - DNA, 25 bp, Homo sapien
tgtggccgtggcacagctcagaagc

SEQ ID NO: 3393692 - DNA, 25 bp, Homo sapien
gccggaagtcactgttccgacgtgt

SEQ ID NO: 3393693 - DNA, 25 bp, Homo sapien
gaaatcaggcaacctcttcccacag

SEQ ID NO: 3393694 - DNA, 25 bp, Homo sapien
atatacacttaacgaaacagccggg

SEQ ID NO: 3393695 - DNA, 25 bp, Homo sapien
aagctcgggacttgggaatcttctc

SEQ ID NO: 3393696 - DNA, 25 bp, Homo sapien
tccgcgctttatacgacatcagacc

SEQ ID NO: 3393697 - DNA, 25 bp, Homo sapien
tgtaccgacaagtatggaaaacgtg

SEQ ID NO: 3393698 - DNA, 25 bp, Homo sapien
cagtttgccatgtatctaagaaaaa

SEQ ID NO: 3393699 - DNA, 25 bp, Homo sapien
tctttagtatttagtcgagtaaatc

SEQ ID NO: 3393700 - DNA, 25 bp, Homo sapien
gaattccaggtataagtgtaccgac

SEQ ID NO: 3393701 - DNA, 25 bp, Homo sapien
accagaagtgggccttctcagatta

SEQ ID NO: 3393702 - DNA, 25 bp, Homo sapien
gaaccagaagtgggccttctcagat

SEQ ID NO: 3393703 - DNA, 25 bp, Homo sapien
ccagaagtgggccttctcagattag

SEQ ID NO: 3393704 - DNA, 25 bp, Homo sapien
ggaaccagaagtgggccttctcaga

SEQ ID NO: 3393705 - DNA, 25 bp, Homo sapien
ctcccaggatgctgtaccaatcctt

SEQ ID NO: 3393706 - DNA, 25 bp, Homo sapien
ggatgctgtaccaatccttttttgg

SEQ ID NO: 3393707 - DNA, 25 bp, Homo sapien
ccaggatgctgtaccaatccttttt

SEQ ID NO: 3393708 - DNA, 25 bp, Homo sapien
gatgctgtaccaatccttttttggc

SEQ ID NO: 3393709 - DNA, 25 bp, Homo sapien
tagaacatattataacagaagcata

SEQ ID NO: 3393710 - DNA, 25 bp, Homo sapien
tcttcaagattatagaacatattat

SEQ ID NO: 3393711 - DNA, 25 bp, Homo sapien
gaagcatataattttccaacacaat

SEQ ID NO: 3393712 - DNA, 25 bp, Homo sapien
tataacagaagcatataattttcca

SEQ ID NO: 3393713 - DNA, 25 bp, Homo sapien
cacatgggtcaagggctatgtaaca

SEQ ID NO: 3393714 - DNA, 25 bp, Homo sapien
gttcacatgggtcaagggctatgta

SEQ ID NO: 3393715 - DNA, 25 bp, Homo sapien
atgggtcaagggctatgtaacatca

SEQ ID NO: 3393716 - DNA, 25 bp, Homo sapien
ggtcaagggctatgtaacatcatca

SEQ ID NO: 3393717 - DNA, 25 bp, Homo sapien
caatcatatggtgggacagtaagtg

SEQ ID NO: 3393718 - DNA, 25 bp, Homo sapien
tggtgggacagtaagtgattaaatt

SEQ ID NO: 3393719 - DNA, 25 bp, Homo sapien
ttggagtcaatcatatggtgggaca

SEQ ID NO: 3393720 - DNA, 25 bp, Homo sapien
tcccagggggattggagtcaatcat

SEQ ID NO: 3393721 - DNA, 25 bp, Homo sapien
tcggtagtcaccgtttagaagactg

SEQ ID NO: 3393722 - DNA, 25 bp, Homo sapien
aagactgtcagtggtgaaatggagt

SEQ ID NO: 3393723 - DNA, 25 bp, Homo sapien
cagatgtcacagtaaatccactaca

SEQ ID NO: 3393724 - DNA, 25 bp, Homo sapien
ggaacactggccacttcggtagtca

SEQ ID NO: 3393725 - DNA, 25 bp, Homo sapien
ctaattctgcgaataaccattgtgg

SEQ ID NO: 3393726 - DNA, 25 bp, Homo sapien
ttctaattctgcgaataaccattgt

SEQ ID NO: 3393727 - DNA, 25 bp, Homo sapien
taattctgcgaataaccattgtgga

SEQ ID NO: 3393728 - DNA, 25 bp, Homo sapien
attctgcgaataaccattgtggaag

SEQ ID NO: 3393729 - DNA, 25 bp, Homo sapien
tggtgaacctgatgggcagacccaa

SEQ ID NO: 3393730 - DNA, 25 bp, Homo sapien
gtctttgcatgtaacgtaacctctg

SEQ ID NO: 3393731 - DNA, 25 bp, Homo sapien
taacacaactagaagagcattcccc

SEQ ID NO: 3393732 - DNA, 25 bp, Homo sapien
tataagccatagaggaggttgggtc

SEQ ID NO: 3393733 - DNA, 25 bp, Homo sapien
aatgggactaagacctactgggctg

SEQ ID NO: 3393734 - DNA, 25 bp, Homo sapien
tcagtaagcaaaaggtcataacagc

SEQ ID NO: 3393735 - DNA, 25 bp, Homo sapien
gggaaggtcccactcaagtactgtc

SEQ ID NO: 3393736 - DNA, 25 bp, Homo sapien
gaaaattcaaggcactcagctagcc

SEQ ID NO: 3393737 - DNA, 25 bp, Homo sapien
tcactaatcataaatgtcaacttct

SEQ ID NO: 3393738 - DNA, 25 bp, Homo sapien
ttcgttcactaatcataaatgtcaa

SEQ ID NO: 3393739 - DNA, 25 bp, Homo sapien
cgttcactaatcataaatgtcaact

SEQ ID NO: 3393740 - DNA, 25 bp, Homo sapien
ctttcgttcactaatcataaatgtc

SEQ ID NO: 3393741 - DNA, 25 bp, Homo sapien
tccaagtatgtacaccaaaaagagg

SEQ ID NO: 3393742 - DNA, 25 bp, Homo sapien
aaatttgagaagcacactgtttgcc

SEQ ID NO: 3393743 - DNA, 25 bp, Homo sapien
caagcaactgttacgcgtgctaaaa

SEQ ID NO: 3393744 - DNA, 25 bp, Homo sapien
tcctgtgacagatgcgtccttccaa

SEQ ID NO: 3393745 - DNA, 25 bp, Homo sapien
cactgttcctgctggtacatctgta

SEQ ID NO: 3393746 - DNA, 25 bp, Homo sapien
gatcaatttcgatgaacttctgtac

SEQ ID NO: 3393747 - DNA, 25 bp, Homo sapien
cgctgcaggtcatactctctttttg

SEQ ID NO: 3393748 - DNA, 25 bp, Homo sapien
aattttccatgcttgatcaatttcg

SEQ ID NO: 3393749 - DNA, 25 bp, Homo sapien
caataacacttggtgcaaatgctgg

SEQ ID NO: 3393750 - DNA, 25 bp, Homo sapien
tggatacacaatagtcactgctaag

SEQ ID NO: 3393751 - DNA, 25 bp, Homo sapien
tcacaagaagccacatcctagtagt

SEQ ID NO: 3393752 - DNA, 25 bp, Homo sapien
tgcttctaagagttgccgatgtgct

SEQ ID NO: 3393753 - DNA, 25 bp, Homo sapien
tttgaaaagcaaaggtacacccatc

SEQ ID NO: 3393754 - DNA, 25 bp, Homo sapien
gaagataatcatgaaacccagccta

SEQ ID NO: 3393755 - DNA, 25 bp, Homo sapien
caccaacgggtagaacttatcatca

SEQ ID NO: 3393756 - DNA, 25 bp, Homo sapien
tccctaggccagtgctgaaagacag

SEQ ID NO: 3393757 - DNA, 25 bp, Homo sapien
tgaaggtaccaaatgaaacccacaa

SEQ ID NO: 3393758 - DNA, 25 bp, Homo sapien
tgttctgaccctcaaatatccctcg

SEQ ID NO: 3393759 - DNA, 25 bp, Homo sapien
ctgaaggtaccaaatgaaacccaca

SEQ ID NO: 3393760 - DNA, 25 bp, Homo sapien
tcaaatatccctcgtacgtgactat

SEQ ID NO: 3393761 - DNA, 25 bp, Homo sapien
cactggcaggactcatcagagaggt

SEQ ID NO: 3393762 - DNA, 25 bp, Homo sapien
gttctattggatttgtctgacaaca

SEQ ID NO: 3393763 - DNA, 25 bp, Homo sapien
tttagaagtataggcccttctgacc

SEQ ID NO: 3393764 - DNA, 25 bp, Homo sapien
ctgacaacaagaggtgaaagaattc

SEQ ID NO: 3393765 - DNA, 25 bp, Homo sapien
tgctaaaaaggcaacgccagcctgg

SEQ ID NO: 3393766 - DNA, 25 bp, Homo sapien
cctatcacttaaaaacttagactag

SEQ ID NO: 3393767 - DNA, 25 bp, Homo sapien
ttaaagtaacctgactttagctgac

SEQ ID NO: 3393768 - DNA, 25 bp, Homo sapien
tagactagtatttttgacagcagtg

SEQ ID NO: 3393769 - DNA, 25 bp, Homo sapien
tactggtcctacatttcttagatca

SEQ ID NO: 3393770 - DNA, 25 bp, Homo sapien
attccaagacatttcttcaagatat

SEQ ID NO: 3393771 - DNA, 25 bp, Homo sapien
catctactggtcctacatttcttag

SEQ ID NO: 3393772 - DNA, 25 bp, Homo sapien
cttgagcatctactggtcctacatt

SEQ ID NO: 3393773 - DNA, 25 bp, Homo sapien
ttcatgttgcatcaagggaaatggc

SEQ ID NO: 3393774 - DNA, 25 bp, Homo sapien
tctaagttaggcttgtgacccacgt

SEQ ID NO: 3393775 - DNA, 25 bp, Homo sapien
gatgtctaaccagaacaattcaagg

SEQ ID NO: 3393776 - DNA, 25 bp, Homo sapien
tgtttactctgatgagactgtcacc

SEQ ID NO: 3393777 - DNA, 25 bp, Homo sapien
aaattccactgccttgtacctgctc

SEQ ID NO: 3393778 - DNA, 25 bp, Homo sapien
tctatgtactacagcatgttctgaa

SEQ ID NO: 3393779 - DNA, 25 bp, Homo sapien
ttccctgtctaagccaacatctatg

SEQ ID NO: 3393780 - DNA, 25 bp, Homo sapien
catgggctactgtggagttttgtca

SEQ ID NO: 3393781 - DNA, 25 bp, Homo sapien
tgaaatgcttgtgccctttgactta

SEQ ID NO: 3393782 - DNA, 25 bp, Homo sapien
ttaggctcctgatcgtggaaatttt

SEQ ID NO: 3393783 - DNA, 25 bp, Homo sapien
cctgggaagttgaaatgcttgtgcc

SEQ ID NO: 3393784 - DNA, 25 bp, Homo sapien
aagaatctctgatccattggtcatt

SEQ ID NO: 3393785 - DNA, 25 bp, Homo sapien
ggatactttctcttctagtgtcaca

SEQ ID NO: 3393786 - DNA, 25 bp, Homo sapien
ccaaaggaggcaatacggtgcaata

SEQ ID NO: 3393787 - DNA, 25 bp, Homo sapien
tgatacatgaaccaacaagatgctg

SEQ ID NO: 3393788 - DNA, 25 bp, Homo sapien
gtgtcacactatttcaagaatcttg

SEQ ID NO: 3393789 - DNA, 25 bp, Homo sapien
ggtgcagagtttattccataggaat

SEQ ID NO: 3393790 - DNA, 25 bp, Homo sapien
cttgtaagtaactacctcactaata

SEQ ID NO: 3393791 - DNA, 25 bp, Homo sapien
tcactaatacccttaaaaggtgcag

SEQ ID NO: 3393792 - DNA, 25 bp, Homo sapien
taaaaggtgcagagtttattccata

SEQ ID NO: 3393793 - DNA, 25 bp, Homo sapien
gaacatgtatcacaagaaatcaggc

SEQ ID NO: 3393794 - DNA, 25 bp, Homo sapien
gaaatcaggctaacttcttccgctt

SEQ ID NO: 3393795 - DNA, 25 bp, Homo sapien
taatgaaggagttctataattagtg

SEQ ID NO: 3393796 - DNA, 25 bp, Homo sapien
tctgcaactcagataaaaagagtga

SEQ ID NO: 3393797 - DNA, 25 bp, Homo sapien
tacggaccaagattggaggcaacac

SEQ ID NO: 3393798 - DNA, 25 bp, Homo sapien
gaatggacaaagctcaacggcttct

SEQ ID NO: 3393799 - DNA, 25 bp, Homo sapien
tactgttacccactgaaaagaggag

SEQ ID NO: 3393800 - DNA, 25 bp, Homo sapien
caaagattctaggtgtacaacagcc

SEQ ID NO: 3393801 - DNA, 25 bp, Homo sapien
tctctattaacaaaacttaggccag

SEQ ID NO: 3393802 - DNA, 25 bp, Homo sapien
tgcaccaacttccaagtcattattt

SEQ ID NO: 3393803 - DNA, 25 bp, Homo sapien
cctggccccaatattatatcaacac

SEQ ID NO: 3393804 - DNA, 25 bp, Homo sapien
gggaaataatgcaccaacttccaag

SEQ ID NO: 3393805 - DNA, 25 bp, Homo sapien
ggcagacaccaacgtgactggctaa

SEQ ID NO: 3393806 - DNA, 25 bp, Homo sapien
cagacaccaacgtgactggctaatt

SEQ ID NO: 3393807 - DNA, 25 bp, Homo sapien
caggcagacaccaacgtgactggct

SEQ ID NO: 3393808 - DNA, 25 bp, Homo sapien
ccacaggcagacaccaacgtgactg

SEQ ID NO: 3393809 - DNA, 25 bp, Homo sapien
aagttcatttcagcatagcagcagt

SEQ ID NO: 3393810 - DNA, 25 bp, Homo sapien
tataagttcaacctgacaatgccag

SEQ ID NO: 3393811 - DNA, 25 bp, Homo sapien
gattttggatttttacgtgccagcc

SEQ ID NO: 3393812 - DNA, 25 bp, Homo sapien
tgccagccctaatggccacagattt

SEQ ID NO: 3393813 - DNA, 25 bp, Homo sapien
ctacaaaagtgacctagctaatggc

SEQ ID NO: 3393814 - DNA, 25 bp, Homo sapien
ggcagttatcattgtgctttcaaag

SEQ ID NO: 3393815 - DNA, 25 bp, Homo sapien
gcaaaagtaggcacagactattcac

SEQ ID NO: 3393816 - DNA, 25 bp, Homo sapien
ttgagatcccaaagactaatatatg

SEQ ID NO: 3393817 - DNA, 25 bp, Homo sapien
tgtcttaaccatagtagctaccctg

SEQ ID NO: 3393818 - DNA, 25 bp, Homo sapien
tagtcatacatgtgccttttggaca

SEQ ID NO: 3393819 - DNA, 25 bp, Homo sapien
ttagtgtggttagtggatagcagtc

SEQ ID NO: 3393820 - DNA, 25 bp, Homo sapien
tctgagggctaccaaagatatctgg

SEQ ID NO: 3393821 - DNA, 25 bp, Homo sapien
tatttgagttctagggaaacatgga

SEQ ID NO: 3393822 - DNA, 25 bp, Homo sapien
cctttttagtgtgctctagagtcaa

SEQ ID NO: 3393823 - DNA, 25 bp, Homo sapien
gctactggctggaccgcaatattta

SEQ ID NO: 3393824 - DNA, 25 bp, Homo sapien
gaaacatggatgatgcttttacctt

SEQ ID NO: 3393825 - DNA, 25 bp, Homo sapien
ggtaacaccttcactgcagaaaaag

SEQ ID NO: 3393826 - DNA, 25 bp, Homo sapien
cacctggcgctataactggcagcaa

SEQ ID NO: 3393827 - DNA, 25 bp, Homo sapien
ggcagcaactgagaactaatccttt

SEQ ID NO: 3393828 - DNA, 25 bp, Homo sapien
caagatttagtaccagtgtaatggg

SEQ ID NO: 3393829 - DNA, 25 bp, Homo sapien
ggtattccccagatactagcagaga

SEQ ID NO: 3393830 - DNA, 25 bp, Homo sapien
cagggagtttgctgccggctaaaac

SEQ ID NO: 3393831 - DNA, 25 bp, Homo sapien
gaatcacgactgacattctcaggga

SEQ ID NO: 3393832 - DNA, 25 bp, Homo sapien
catgaggtccctggtaggattaaac

SEQ ID NO: 3393833 - DNA, 25 bp, Homo sapien
agtgtggatttcatctgtagtgtct

SEQ ID NO: 3393834 - DNA, 25 bp, Homo sapien
tgtggatttcatctgtagtgtctgt

SEQ ID NO: 3393835 - DNA, 25 bp, Homo sapien
tctgtagtgtctgtgacttgcctat

SEQ ID NO: 3393836 - DNA, 25 bp, Homo sapien
gtgacttgcctatcatggaccttca

SEQ ID NO: 3393837 - DNA, 25 bp, Homo sapien
cttagagcctccagtgttaacccaa

SEQ ID NO: 3393838 - DNA, 25 bp, Homo sapien
tactcgcggcaacactaccgcaggt

SEQ ID NO: 3393839 - DNA, 25 bp, Homo sapien
ctgggagcccggttgataccagcag

SEQ ID NO: 3393840 - DNA, 25 bp, Homo sapien
gtgcccgcaatggacaccagtcgag

SEQ ID NO: 3393841 - DNA, 25 bp, Homo sapien
tcctctggaaactggtgacgttgct

SEQ ID NO: 3393842 - DNA, 25 bp, Homo sapien
ccaggctattctctcctcctccgaa

SEQ ID NO: 3393843 - DNA, 25 bp, Homo sapien
tcaatcagaccaggctattctctcc

SEQ ID NO: 3393844 - DNA, 25 bp, Homo sapien
tccctaagtttcccctcggctgagc

SEQ ID NO: 3393845 - DNA, 25 bp, Homo sapien
taagtttcccctcggctgagcccag

SEQ ID NO: 3393846 - DNA, 25 bp, Homo sapien
gaatgtagcagcaatcaatactggg

SEQ ID NO: 3393847 - DNA, 25 bp, Homo sapien
tatctaaatatcaacgacaggctca

SEQ ID NO: 3393848 - DNA, 25 bp, Homo sapien
tatacacagatttaacgcagacact

SEQ ID NO: 3393849 - DNA, 25 bp, Homo sapien
gaacaggcagtctgacggtcaaaga

SEQ ID NO: 3393850 - DNA, 25 bp, Homo sapien
tttcaattcatgcagtagtaagaca

SEQ ID NO: 3393851 - DNA, 25 bp, Homo sapien
caaaatcataagacaacgaaagggc

SEQ ID NO: 3393852 - DNA, 25 bp, Homo sapien
aaatttaagatcttgcaaatgccag

SEQ ID NO: 3393853 - DNA, 25 bp, Homo sapien
cctctgactaagctatacattttgg

SEQ ID NO: 3393854 - DNA, 25 bp, Homo sapien
attagaagaactgttccaacggcta

SEQ ID NO: 3393855 - DNA, 25 bp, Homo sapien
ttagaagaactgttccaacggctaa

SEQ ID NO: 3393856 - DNA, 25 bp, Homo sapien
tagaagaactgttccaacggctaaa

SEQ ID NO: 3393857 - DNA, 25 bp, Homo sapien
tgcccattgacaattccttctgcca

SEQ ID NO: 3393858 - DNA, 25 bp, Homo sapien
tgcaaccaacaaagtatgcccattg

SEQ ID NO: 3393859 - DNA, 25 bp, Homo sapien
caaagtatgcccattgacaattcct

SEQ ID NO: 3393860 - DNA, 25 bp, Homo sapien
tcctctttagcagatgcaaccaaca

SEQ ID NO: 3393861 - DNA, 25 bp, Homo sapien
ctttggtcctatctatgtaatgtgc

SEQ ID NO: 3393862 - DNA, 25 bp, Homo sapien
tgtaatgtgcttttatctctggtca

SEQ ID NO: 3393863 - DNA, 25 bp, Homo sapien
tgtctttatcacttgcttcaagaaa

SEQ ID NO: 3393864 - DNA, 25 bp, Homo sapien
tatgatgtgcattgatgttgttttc

SEQ ID NO: 3393865 - DNA, 25 bp, Homo sapien
aggaactgcaatccttttgaggagg

SEQ ID NO: 3393866 - DNA, 25 bp, Homo sapien
ggtgctctgctttttctcctctgtt

SEQ ID NO: 3393867 - DNA, 25 bp, Homo sapien
ctggtgaggaactgcaatccttttg

SEQ ID NO: 3393868 - DNA, 25 bp, Homo sapien
tgcaatccttttgaggaggagaggt

SEQ ID NO: 3393869 - DNA, 25 bp, Homo sapien
tgctgtaaatatatttcggcccgtt

SEQ ID NO: 3393870 - DNA, 25 bp, Homo sapien
tgtaaatatatttcggcccgtttca

SEQ ID NO: 3393871 - DNA, 25 bp, Homo sapien
gtgggaagatctcttgagtcctgga

SEQ ID NO: 3393872 - DNA, 25 bp, Homo sapien
agatctcttgagtcctggaggcagg

SEQ ID NO: 3393873 - DNA, 25 bp, Homo sapien
gaagatctcttgagtcctggaggca

SEQ ID NO: 3393874 - DNA, 25 bp, Homo sapien
gggaagatctcttgagtcctggagg

SEQ ID NO: 3393875 - DNA, 25 bp, Homo sapien
ggtaataactggtaacgccaagcta

SEQ ID NO: 3393876 - DNA, 25 bp, Homo sapien
tatcatcaagtaatggtgctggaag

SEQ ID NO: 3393877 - DNA, 25 bp, Homo sapien
tggtaacgccaagctattttcatct

SEQ ID NO: 3393878 - DNA, 25 bp, Homo sapien
catcttaatattagattctggtgtt

SEQ ID NO: 3393879 - DNA, 25 bp, Homo sapien
gtaggtgataacctttcctgattca

SEQ ID NO: 3393880 - DNA, 25 bp, Homo sapien
cagcatggattaaggtaggtgataa

SEQ ID NO: 3393881 - DNA, 25 bp, Homo sapien
ggtgataacctttcctgattcaaaa

SEQ ID NO: 3393882 - DNA, 25 bp, Homo sapien
tgcagcagcatggattaaggtaggt

SEQ ID NO: 3393883 - DNA, 25 bp, Homo sapien
catcataatagtgaccaaatcttga

SEQ ID NO: 3393884 - DNA, 25 bp, Homo sapien
tagtgaccaaatcttgaagatgata

SEQ ID NO: 3393885 - DNA, 25 bp, Homo sapien
taatagtgaccaaatcttgaagatg

SEQ ID NO: 3393886 - DNA, 25 bp, Homo sapien
cataatagtgaccaaatcttgaaga

SEQ ID NO: 3393887 - DNA, 25 bp, Homo sapien
aaaatccatgccaatttgaagcctc

SEQ ID NO: 3393888 - DNA, 25 bp, Homo sapien
tgccaatttgaagcctcaattagtt

SEQ ID NO: 3393889 - DNA, 25 bp, Homo sapien
tccatgccaatttgaagcctcaatt

SEQ ID NO: 3393890 - DNA, 25 bp, Homo sapien
aatttgaagcctcaattagttcttg

SEQ ID NO: 3393891 - DNA, 25 bp, Homo sapien
cagggttctactttgagagttgaag

SEQ ID NO: 3393892 - DNA, 25 bp, Homo sapien
tctgtccttatacgcaatttttact

SEQ ID NO: 3393893 - DNA, 25 bp, Homo sapien
gggctatctattctattggtttgtg

SEQ ID NO: 3393894 - DNA, 25 bp, Homo sapien
taccctgttgaagattatttgacca

SEQ ID NO: 3393895 - DNA, 25 bp, Homo sapien
cagtccttgtgagtgaccttggtac

SEQ ID NO: 3393896 - DNA, 25 bp, Homo sapien
tcaaatccttcctcataaatgatgt

SEQ ID NO: 3393897 - DNA, 25 bp, Homo sapien
tgatgttctggataaactgaagcag

SEQ ID NO: 3393898 - DNA, 25 bp, Homo sapien
ctgaggattggatccatcaaatcct

SEQ ID NO: 3393899 - DNA, 25 bp, Homo sapien
cagctttgtgtagccaggggtcaaa

SEQ ID NO: 3393900 - DNA, 25 bp, Homo sapien
ggaactgttatgacatgcctgtttc

SEQ ID NO: 3393901 - DNA, 25 bp, Homo sapien
tgcctgtttccatagttaccacagc

SEQ ID NO: 3393902 - DNA, 25 bp, Homo sapien
gcacactgtaccattggaactgtta

SEQ ID NO: 3393903 - DNA, 25 bp, Homo sapien
ttccatagttaccacagcaagtggg

SEQ ID NO: 3393904 - DNA, 25 bp, Homo sapien
tgggattctataaaatttcttactc

SEQ ID NO: 3393905 - DNA, 25 bp, Homo sapien
cagatgtgttggcattgtgatgatg

SEQ ID NO: 3393906 - DNA, 25 bp, Homo sapien
tagaggaacttggtaaggctgtgac

SEQ ID NO: 3393907 - DNA, 25 bp, Homo sapien
gatgcaggctgaaagagaggttctc

SEQ ID NO: 3393908 - DNA, 25 bp, Homo sapien
agaccacggagaacatagaggaact

SEQ ID NO: 3393909 - DNA, 25 bp, Homo sapien
gtgcagactatgacagcttgaataa

SEQ ID NO: 3393910 - DNA, 25 bp, Homo sapien
aaaaatgctgtgagaatggtataag

SEQ ID NO: 3393911 - DNA, 25 bp, Homo sapien
tctagacaagtacattaaactctgg

SEQ ID NO: 3393912 - DNA, 25 bp, Homo sapien
taccaactactgttctctagacaag

SEQ ID NO: 3393913 - DNA, 25 bp, Homo sapien
ggctctgcataatgccccgtaatga

SEQ ID NO: 3393914 - DNA, 25 bp, Homo sapien
aaacagcatagatgtacagcgccaa

SEQ ID NO: 3393915 - DNA, 25 bp, Homo sapien
gcgccaaacctatctgataatctaa

SEQ ID NO: 3393916 - DNA, 25 bp, Homo sapien
tcaggctctgcataatgccccgtaa

SEQ ID NO: 3393917 - DNA, 25 bp, Homo sapien
tacatctgacaaggttgtgacacgg

SEQ ID NO: 3393918 - DNA, 25 bp, Homo sapien
tgtgacacgggcaataatggcttta

SEQ ID NO: 3393919 - DNA, 25 bp, Homo sapien
tatacaatgggttagtttctctctc

SEQ ID NO: 3393920 - DNA, 25 bp, Homo sapien
gattccagaccaactactacatctg

SEQ ID NO: 3393921 - DNA, 25 bp, Homo sapien
atggtgaatagcttcctttttaatt

SEQ ID NO: 3393922 - DNA, 25 bp, Homo sapien
tttgacatctgattcatcacagatc

SEQ ID NO: 3393923 - DNA, 25 bp, Homo sapien
gacatctgattcatcacagatcaag

SEQ ID NO: 3393924 - DNA, 25 bp, Homo sapien
caatggtgaatagcttcctttttaa

SEQ ID NO: 3393925 - DNA, 25 bp, Homo sapien
tcatacctggcaaaacaacagtggg

SEQ ID NO: 3393926 - DNA, 25 bp, Homo sapien
ggttcactaattggcccaattgcgg

SEQ ID NO: 3393927 - DNA, 25 bp, Homo sapien
taggatggtgtcagatctaatcaaa

SEQ ID NO: 3393928 - DNA, 25 bp, Homo sapien
gcccaattgcggattataccttttg

SEQ ID NO: 3393929 - DNA, 25 bp, Homo sapien
ttagtactaatggttaagaggttgc

SEQ ID NO: 3393930 - DNA, 25 bp, Homo sapien
ggtatttattatcgatctggtaaca

SEQ ID NO: 3393931 - DNA, 25 bp, Homo sapien
taaaagatgttgtgcttaaggttct

SEQ ID NO: 3393932 - DNA, 25 bp, Homo sapien
tgtgtattcaaacatgctacaaatg

SEQ ID NO: 3393933 - DNA, 25 bp, Homo sapien
tgaaatacaaagccctaggccgggc

SEQ ID NO: 3393934 - DNA, 25 bp, Homo sapien
ctttgaaatacaaagccctaggccg

SEQ ID NO: 3393935 - DNA, 25 bp, Homo sapien
tctttcctacggctgaagtctgtaa

SEQ ID NO: 3393936 - DNA, 25 bp, Homo sapien
ttttggcataagtcacaggtgatca

SEQ ID NO: 3393937 - DNA, 25 bp, Homo sapien
tcaaagttgtgtaggatcatagcag

SEQ ID NO: 3393938 - DNA, 25 bp, Homo sapien
aaatgttgacatagggtagttctcc

SEQ ID NO: 3393939 - DNA, 25 bp, Homo sapien
gaatccaaaattgtgagctggaaat

SEQ ID NO: 3393940 - DNA, 25 bp, Homo sapien
gaaaaatcagacatatggtacaggt

SEQ ID NO: 3393941 - DNA, 25 bp, Homo sapien
cattacccatgggagagaatccaaa

SEQ ID NO: 3393942 - DNA, 25 bp, Homo sapien
caaatctgattggtaatctctgcat

SEQ ID NO: 3393943 - DNA, 25 bp, Homo sapien
ttctcctttctttcattctcaagaa

SEQ ID NO: 3393944 - DNA, 25 bp, Homo sapien
ctctattattctttccttctccttt

SEQ ID NO: 3393945 - DNA, 25 bp, Homo sapien
ccttctcctttctttcattctcaag

SEQ ID NO: 3393946 - DNA, 25 bp, Homo sapien
ttccttctcctttctttcattctca

SEQ ID NO: 3393947 - DNA, 25 bp, Homo sapien
tattatacaaagtggtaccttcttg

SEQ ID NO: 3393948 - DNA, 25 bp, Homo sapien
taatgaaacatgacacagtactgta

SEQ ID NO: 3393949 - DNA, 25 bp, Homo sapien
gtaagcaggcatgtatctcccaggg

SEQ ID NO: 3393950 - DNA, 25 bp, Homo sapien
cactcttcacaggtcagtgactatg

SEQ ID NO: 3393951 - DNA, 25 bp, Homo sapien
tgttctcccaatgataagagctgca

SEQ ID NO: 3393952 - DNA, 25 bp, Homo sapien
gctaaaggcattctcacaggacaag

SEQ ID NO: 3393953 - DNA, 25 bp, Homo sapien
taaatagtctatgcctgaaagcttc

SEQ ID NO: 3393954 - DNA, 25 bp, Homo sapien
gaattaaagcgaaccctgtgcaagg

SEQ ID NO: 3393955 - DNA, 25 bp, Homo sapien
gaaagcagctatgccccaaatgttg

SEQ ID NO: 3393956 - DNA, 25 bp, Homo sapien
tccaggtttccattagcagagcaat

SEQ ID NO: 3393957 - DNA, 25 bp, Homo sapien
caacatttccctggtatatggagga

SEQ ID NO: 3393958 - DNA, 25 bp, Homo sapien
accttatttgagattgcactgtgcg

SEQ ID NO: 3393959 - DNA, 25 bp, Homo sapien
ttgtagggcagattcttctcagcac

SEQ ID NO: 3393960 - DNA, 25 bp, Homo sapien
tcttgtagggcagattcttctcagc

SEQ ID NO: 3393961 - DNA, 25 bp, Homo sapien
gctcttgtagggcagattcttctca

SEQ ID NO: 3393962 - DNA, 25 bp, Homo sapien
tgtagggcagattcttctcagcacc

SEQ ID NO: 3393963 - DNA, 25 bp, Homo sapien
tattccctagggttgtcattgcttc

SEQ ID NO: 3393964 - DNA, 25 bp, Homo sapien
caatatttgggtacttggagtattc

SEQ ID NO: 3393965 - DNA, 25 bp, Homo sapien
tgtgcatggtgtataatcatgacca

SEQ ID NO: 3393966 - DNA, 25 bp, Homo sapien
taagatcttcatacagcaatcacct

SEQ ID NO: 3393967 - DNA, 25 bp, Homo sapien
ccagagagttggtaacataaggact

SEQ ID NO: 3393968 - DNA, 25 bp, Homo sapien
tagcttcttccttggaccatccagg

SEQ ID NO: 3393969 - DNA, 25 bp, Homo sapien
ggaacgtagctgtgctgaccccttt

SEQ ID NO: 3393970 - DNA, 25 bp, Homo sapien
caatgttgctcgctttgaaaacgga

SEQ ID NO: 3393971 - DNA, 25 bp, Homo sapien
catccaaagcatactgctaggtaca

SEQ ID NO: 3393972 - DNA, 25 bp, Homo sapien
gaattcttactgcacttggcatcaa

SEQ ID NO: 3393973 - DNA, 25 bp, Homo sapien
tatcctattggtaaggttgtccagc

SEQ ID NO: 3393974 - DNA, 25 bp, Homo sapien
tcttctcatctagacagggaggttt

SEQ ID NO: 3393975 - DNA, 25 bp, Homo sapien
aggtcacatgcaaaggctacacaca

SEQ ID NO: 3393976 - DNA, 25 bp, Homo sapien
tcctccacaattaagtgtcagggct

SEQ ID NO: 3393977 - DNA, 25 bp, Homo sapien
gctacacacaggtgctccggaagac

SEQ ID NO: 3393978 - DNA, 25 bp, Homo sapien
agacagctccagttgaggtcccagt

SEQ ID NO: 3393979 - DNA, 25 bp, Homo sapien
cctgatacctaatgggctgcttgtg

SEQ ID NO: 3393980 - DNA, 25 bp, Homo sapien
tgtgctgagtatccctgtgcctgaa

SEQ ID NO: 3393981 - DNA, 25 bp, Homo sapien
tggcaagagcaaaaacctgatacct

SEQ ID NO: 3393982 - DNA, 25 bp, Homo sapien
ctgggccctgaaaactatgtagtca

SEQ ID NO: 3393983 - DNA, 25 bp, Homo sapien
ctattctgaatgcttgatgctatgc

SEQ ID NO: 3393984 - DNA, 25 bp, Homo sapien
tgtaggtctatgcataagatactgc

SEQ ID NO: 3393985 - DNA, 25 bp, Homo sapien
tatctttgagatagatgagcctctt

SEQ ID NO: 3393986 - DNA, 25 bp, Homo sapien
catcctctgaggtaacaacccttca

SEQ ID NO: 3393987 - DNA, 25 bp, Homo sapien
gcctgaggaaatgggccaatacata

SEQ ID NO: 3393988 - DNA, 25 bp, Homo sapien
tttttgtatcatccccatgaggtag

SEQ ID NO: 3393989 - DNA, 25 bp, Homo sapien
tattgctaagttagtacatagatac

SEQ ID NO: 3393990 - DNA, 25 bp, Homo sapien
tacacattatgccactagtgacatt

SEQ ID NO: 3393991 - DNA, 25 bp, Homo sapien
tgtttttttgagatctgaagtctaa

SEQ ID NO: 3393992 - DNA, 25 bp, Homo sapien
caaaaatgtttttttgagatctgaa

SEQ ID NO: 3393993 - DNA, 25 bp, Homo sapien
aaatgtttttttgagatctgaagtc

SEQ ID NO: 3393994 - DNA, 25 bp, Homo sapien
aaaatgtttttttgagatctgaagt

SEQ ID NO: 3393995 - DNA, 25 bp, Homo sapien
taatgcatctagagtatgccaggcc

SEQ ID NO: 3393996 - DNA, 25 bp, Homo sapien
tgactcggagtatgcaaggacaatg

SEQ ID NO: 3393997 - DNA, 25 bp, Homo sapien
ggaattcccagccaccaagattgtg

SEQ ID NO: 3393998 - DNA, 25 bp, Homo sapien
tgtgagaacacctagacaggccttc

SEQ ID NO: 3393999 - DNA, 25 bp, Homo sapien
agtggtgatgaactcccacagcttc

SEQ ID NO: 3394000 - DNA, 25 bp, Homo sapien
cacagcttctgaatatctaggagag

SEQ ID NO: 3394001 - DNA, 25 bp, Homo sapien
aatagagaggaagttaccattgcca

SEQ ID NO: 3394002 - DNA, 25 bp, Homo sapien
gatgtgtccccttatatctaagtga

SEQ ID NO: 3394003 - DNA, 25 bp, Homo sapien
tgtcctatgtgtgcatgagaacaat

SEQ ID NO: 3394004 - DNA, 25 bp, Homo sapien
tttccttaccaagcttctgtctctt

SEQ ID NO: 3394005 - DNA, 25 bp, Homo sapien
tgttgaaaacactaccgtttcctca

SEQ ID NO: 3394006 - DNA, 25 bp, Homo sapien
aaaaataccactgggcttcccatag

SEQ ID NO: 3394007 - DNA, 25 bp, Homo sapien
aagtcagttcaccatacagttgtgc

SEQ ID NO: 3394008 - DNA, 25 bp, Homo sapien
gaacgtgtagattgttctgggtact

SEQ ID NO: 3394009 - DNA, 25 bp, Homo sapien
ctgagacctcgacccgcaggctcag

SEQ ID NO: 3394010 - DNA, 25 bp, Homo sapien
ctcccccggcgctgagactataggc

SEQ ID NO: 3394011 - DNA, 25 bp, Homo sapien
ttgtttcgaactcgtagcctcaagc

SEQ ID NO: 3394012 - DNA, 25 bp, Homo sapien
tagccccccgcagtgtgctgggatt

SEQ ID NO: 3394013 - DNA, 25 bp, Homo sapien
tgctgatttaaagcttcagagcaaa

SEQ ID NO: 3394014 - DNA, 25 bp, Homo sapien
ttggcaaccgtgtttgctgatttaa

SEQ ID NO: 3394015 - DNA, 25 bp, Homo sapien
taaagcttcagagcaaagcatgtct

SEQ ID NO: 3394016 - DNA, 25 bp, Homo sapien
agcttctcttggcaaccgtgtttgc

SEQ ID NO: 3394017 - DNA, 25 bp, Homo sapien
aattatctgacgaactctaggcctg

SEQ ID NO: 3394018 - DNA, 25 bp, Homo sapien
ggcctgacagccaaaccagataatt

SEQ ID NO: 3394019 - DNA, 25 bp, Homo sapien
aaacaactaactcggctatggcggg

SEQ ID NO: 3394020 - DNA, 25 bp, Homo sapien
ctatcctctgggactaaaatgtgcc

SEQ ID NO: 3394021 - DNA, 25 bp, Homo sapien
cattcttactcctgactttagtaga

SEQ ID NO: 3394022 - DNA, 25 bp, Homo sapien
tgttcctgatggtgactaagaaaaa

SEQ ID NO: 3394023 - DNA, 25 bp, Homo sapien
ggttagcatctctagtaacaatgca

SEQ ID NO: 3394024 - DNA, 25 bp, Homo sapien
ctctagtaacaatgcaaaatagacc

SEQ ID NO: 3394025 - DNA, 25 bp, Homo sapien
gcttctcagcgcattttaccaaggg

SEQ ID NO: 3394026 - DNA, 25 bp, Homo sapien
tcattaggagctatttcaggctggc

SEQ ID NO: 3394027 - DNA, 25 bp, Homo sapien
catcctttgaggaatcttgtctgca

SEQ ID NO: 3394028 - DNA, 25 bp, Homo sapien
tatactggtgctgtttaccttgact

SEQ ID NO: 3394029 - DNA, 25 bp, Homo sapien
ctagtggtaggaaattcaaccatgg

SEQ ID NO: 3394030 - DNA, 25 bp, Homo sapien
ccatgggatggttgttaatacgctc

SEQ ID NO: 3394031 - DNA, 25 bp, Homo sapien
taatacgctctgaaattagaagttg

SEQ ID NO: 3394032 - DNA, 25 bp, Homo sapien
cagtaactttaagctgtgttgaaag

SEQ ID NO: 3394033 - DNA, 25 bp, Homo sapien
ccaactgagctctgtgtatcagcca

SEQ ID NO: 3394034 - DNA, 25 bp, Homo sapien
tatctgtctggattacactctaagg

SEQ ID NO: 3394035 - DNA, 25 bp, Homo sapien
tcacttggagcagatggtcatcatc

SEQ ID NO: 3394036 - DNA, 25 bp, Homo sapien
tatcagccagtaggagtcacttgga

SEQ ID NO: 3394037 - DNA, 25 bp, Homo sapien
gatgttaaaggttgtgctaaatatc

SEQ ID NO: 3394038 - DNA, 25 bp, Homo sapien
atatctcgtgagctgtaatagtttc

SEQ ID NO: 3394039 - DNA, 25 bp, Homo sapien
ctaaatatctcgtgagctgtaatag

SEQ ID NO: 3394040 - DNA, 25 bp, Homo sapien
gttaaaggttgtgctaaatatctcg

SEQ ID NO: 3394041 - DNA, 25 bp, Homo sapien
tagagctgaataaactatatggcaa

SEQ ID NO: 3394042 - DNA, 25 bp, Homo sapien
tataaaatctgtatcaggttgatca

SEQ ID NO: 3394043 - DNA, 25 bp, Homo sapien
tagaaaagtttacatctgagcttac

SEQ ID NO: 3394044 - DNA, 25 bp, Homo sapien
tagcccataaatagctatagggaaa

SEQ ID NO: 3394045 - DNA, 25 bp, Homo sapien
gtctcaagtagttgtcttgcaccca

SEQ ID NO: 3394046 - DNA, 25 bp, Homo sapien
tctttctgcttgagtaagtatgaga

SEQ ID NO: 3394047 - DNA, 25 bp, Homo sapien
tgtctcaagtagttgtcttgcaccc

SEQ ID NO: 3394048 - DNA, 25 bp, Homo sapien
tttctgcttgagtaagtatgagaag

SEQ ID NO: 3394049 - DNA, 25 bp, Homo sapien
tatgtgaacaccttaaactatcatc

SEQ ID NO: 3394050 - DNA, 25 bp, Homo sapien
ttcttaatgagaacaaatccctctt

SEQ ID NO: 3394051 - DNA, 25 bp, Homo sapien
gaacaaatccctctttcagtagaag

SEQ ID NO: 3394052 - DNA, 25 bp, Homo sapien
aatagcagtatgtgaacaccttaaa

SEQ ID NO: 3394053 - DNA, 25 bp, Homo sapien
ggttacttgatatctccccaactga

SEQ ID NO: 3394054 - DNA, 25 bp, Homo sapien
ggaacacacaatacaggccggagca

SEQ ID NO: 3394055 - DNA, 25 bp, Homo sapien
tgggatggataagtcacacatggtc

SEQ ID NO: 3394056 - DNA, 25 bp, Homo sapien
taacccatggcttgtgtggctctgg

SEQ ID NO: 3394057 - DNA, 25 bp, Homo sapien
cagccccctctctccagcagcatca

SEQ ID NO: 3394058 - DNA, 25 bp, Homo sapien
agccccctctctccagcagcatcat

SEQ ID NO: 3394059 - DNA, 25 bp, Homo sapien
gatttgttaaactgtacttggatag

SEQ ID NO: 3394060 - DNA, 25 bp, Homo sapien
ccaacatgagtagaactgaaaaaaa

SEQ ID NO: 3394061 - DNA, 25 bp, Homo sapien
cagctggatttgttaaactgtactt

SEQ ID NO: 3394062 - DNA, 25 bp, Homo sapien
tacttggatagtaaaaacactgtga

SEQ ID NO: 3394063 - DNA, 25 bp, Homo sapien
ggaatgggtgctcagcatccatcag

SEQ ID NO: 3394064 - DNA, 25 bp, Homo sapien
tccatcaggaagtatcttgtcttct

SEQ ID NO: 3394065 - DNA, 25 bp, Homo sapien
caaggggaatgggtgctcagcatcc

SEQ ID NO: 3394066 - DNA, 25 bp, Homo sapien
tgtcttctggtgtgtcttcttacac

SEQ ID NO: 3394067 - DNA, 25 bp, Homo sapien
ggccagggtgatttgctgtaatccc

SEQ ID NO: 3394068 - DNA, 25 bp, Homo sapien
gatctgggaaaggtgtgacaacttc

SEQ ID NO: 3394069 - DNA, 25 bp, Homo sapien
tctgtgtaggcaaacggatctggga

SEQ ID NO: 3394070 - DNA, 25 bp, Homo sapien
tgacaacttccacggttcctgcaca

SEQ ID NO: 3394071 - DNA, 25 bp, Homo sapien
tgtggtccacaagcatatgctccag

SEQ ID NO: 3394072 - DNA, 25 bp, Homo sapien
tggagacaacctagctgaaaccctt

SEQ ID NO: 3394073 - DNA, 25 bp, Homo sapien
ccttctagaggagaactgacctgga

SEQ ID NO: 3394074 - DNA, 25 bp, Homo sapien
gatgactacacacagccttctagag

SEQ ID NO: 3394075 - DNA, 25 bp, Homo sapien
tgtctgacaagtctggaggcaaatg

SEQ ID NO: 3394076 - DNA, 25 bp, Homo sapien
tgtgtctgacaagtctggaggcaaa

SEQ ID NO: 3394077 - DNA, 25 bp, Homo sapien
actgtgtctgacaagtctggaggca

SEQ ID NO: 3394078 - DNA, 25 bp, Homo sapien
gtctgacaagtctggaggcaaatgc

SEQ ID NO: 3394079 - DNA, 25 bp, Homo sapien
tgccagatccattttgcttgagcgg

SEQ ID NO: 3394080 - DNA, 25 bp, Homo sapien
gtgcttcttgcctccggccatcatg

SEQ ID NO: 3394081 - DNA, 25 bp, Homo sapien
gcttggcggattctgccagatccat

SEQ ID NO: 3394082 - DNA, 25 bp, Homo sapien
tgggcccagccgcttggcggattct

SEQ ID NO: 3394083 - DNA, 25 bp, Homo sapien
gcaatcataattagagtgtcataga

SEQ ID NO: 3394084 - DNA, 25 bp, Homo sapien
tctgctgtgctagttctgtaaaaag

SEQ ID NO: 3394085 - DNA, 25 bp, Homo sapien
tttcaaggagtggagggtcaaattg

SEQ ID NO: 3394086 - DNA, 25 bp, Homo sapien
gcatgcagcgactaaggaggaatcc

SEQ ID NO: 3394087 - DNA, 25 bp, Homo sapien
tagccagggaagtatatcaatgacc

SEQ ID NO: 3394088 - DNA, 25 bp, Homo sapien
tatttttacaaagccggcccagtga

SEQ ID NO: 3394089 - DNA, 25 bp, Homo sapien
aattttatagacatggtagccaggg

SEQ ID NO: 3394090 - DNA, 25 bp, Homo sapien
aaagtcttagaacccgagcacctga

SEQ ID NO: 3394091 - DNA, 25 bp, Homo sapien
tagaatcccaggactaaacgtctaa

SEQ ID NO: 3394092 - DNA, 25 bp, Homo sapien
aggatggagattatttgtgaagact

SEQ ID NO: 3394093 - DNA, 25 bp, Homo sapien
tttatcaatggggtatctgcaggga

SEQ ID NO: 3394094 - DNA, 25 bp, Homo sapien
ccaggtgaatagaataagagctgaa

SEQ ID NO: 3394095 - DNA, 25 bp, Homo sapien
gtaatttccaccacggtcaggcagc

SEQ ID NO: 3394096 - DNA, 25 bp, Homo sapien
ttgccagggcaaagtagcacagtct

SEQ ID NO: 3394097 - DNA, 25 bp, Homo sapien
tctggtatagtctgaagaagcggct

SEQ ID NO: 3394098 - DNA, 25 bp, Homo sapien
tgtccttccaaacagagctccaggc

SEQ ID NO: 3394099 - DNA, 25 bp, Homo sapien
gggagtgagcacacatacgcactgt

SEQ ID NO: 3394100 - DNA, 25 bp, Homo sapien
caattgccggtgcagacatttctac

SEQ ID NO: 3394101 - DNA, 25 bp, Homo sapien
tacgcactgttggtacaattgccgg

SEQ ID NO: 3394102 - DNA, 25 bp, Homo sapien
agtgtcagcctgcactgcacagcag

SEQ ID NO: 3394103 - DNA, 25 bp, Homo sapien
tacagcagggtgtagatctgtgccc

SEQ ID NO: 3394104 - DNA, 25 bp, Homo sapien
gcagcttaagccaaacattcccaaa

SEQ ID NO: 3394105 - DNA, 25 bp, Homo sapien
tcaaggaataatgagcacagacaca

SEQ ID NO: 3394106 - DNA, 25 bp, Homo sapien
gcttgagcccaagcaaaggatggaa

SEQ ID NO: 3394107 - DNA, 25 bp, Homo sapien
tgatatgtctcaatactggccaaga

SEQ ID NO: 3394108 - DNA, 25 bp, Homo sapien
tcccggaagtgaacctgatatgtct

SEQ ID NO: 3394109 - DNA, 25 bp, Homo sapien
gacacaacagttgagctttcaggaa

SEQ ID NO: 3394110 - DNA, 25 bp, Homo sapien
tctcaaagggaatatctacatggct

SEQ ID NO: 3394111 - DNA, 25 bp, Homo sapien
ccctgacaagagtctggcccactta

SEQ ID NO: 3394112 - DNA, 25 bp, Homo sapien
tagacactggacacacccaagtgac

SEQ ID NO: 3394113 - DNA, 25 bp, Homo sapien
ggcccacttagtccgagaagtcttg

SEQ ID NO: 3394114 - DNA, 25 bp, Homo sapien
tctggtgagactagcgattgacccc

SEQ ID NO: 3394115 - DNA, 25 bp, Homo sapien
gcaccgcggcttccgaaaggagaaa

SEQ ID NO: 3394116 - DNA, 25 bp, Homo sapien
cctctgtacacaaagtaagtggcgt

SEQ ID NO: 3394117 - DNA, 25 bp, Homo sapien
taagtggcgtgtttactcgggcctc

SEQ ID NO: 3394118 - DNA, 25 bp, Homo sapien
gcctctggcctcgtttagttctcgg

SEQ ID NO: 3394119 - DNA, 25 bp, Homo sapien
gctgcctccgtggactgagcagacc

SEQ ID NO: 3394120 - DNA, 25 bp, Homo sapien
agtcgtggtgcggagacacacgcac

SEQ ID NO: 3394121 - DNA, 25 bp, Homo sapien
ccccggttttctggcaacagctgaa

SEQ ID NO: 3394122 - DNA, 25 bp, Homo sapien
accacacacagatgaccggtggcac

SEQ ID NO: 3394123 - DNA, 25 bp, Homo sapien
gtcgcgcagattttattgatgagct

SEQ ID NO: 3394124 - DNA, 25 bp, Homo sapien
cagcgagttcaggtcgcgcagattt

SEQ ID NO: 3394125 - DNA, 25 bp, Homo sapien
gttcaggtcgcgcagattttattga

SEQ ID NO: 3394126 - DNA, 25 bp, Homo sapien
cggcgacgcggccagtcagcagcga

SEQ ID NO: 3394127 - DNA, 25 bp, Homo sapien
ggtcccaggcaggaacgagagggtg

SEQ ID NO: 3394128 - DNA, 25 bp, Homo sapien
gccctgcccgggctccttggtcgca

SEQ ID NO: 3394129 - DNA, 25 bp, Homo sapien
tgaggcccacatgtggcccggcggc

SEQ ID NO: 3394130 - DNA, 25 bp, Homo sapien
cccagggcggcttgcagcgtcctca

SEQ ID NO: 3394131 - DNA, 25 bp, Homo sapien
ttgccggcatcctccgaaagtcgcg

SEQ ID NO: 3394132 - DNA, 25 bp, Homo sapien
tttcgctggtctgggactcagggcc

SEQ ID NO: 3394133 - DNA, 25 bp, Homo sapien
aatgctcgcttggaaagtaaaagga

SEQ ID NO: 3394134 - DNA, 25 bp, Homo sapien
gaaagtcgcgctcctgcgaaatgaa

SEQ ID NO: 3394135 - DNA, 25 bp, Homo sapien
aaatggcgacctgcgagttgtctcg

SEQ ID NO: 3394136 - DNA, 25 bp, Homo sapien
gaaggtgctaatccactcggtcgct

SEQ ID NO: 3394137 - DNA, 25 bp, Homo sapien
gatactcgcctccagttcggacaga

SEQ ID NO: 3394138 - DNA, 25 bp, Homo sapien
tgttaaaacttttctccgcagcgag

SEQ ID NO: 3394139 - DNA, 25 bp, Homo sapien
ctccggatgggaggctcttggttct

SEQ ID NO: 3394140 - DNA, 25 bp, Homo sapien
gagtttggaggtgtcagaactgtca

SEQ ID NO: 3394141 - DNA, 25 bp, Homo sapien
ggtgtcagaactgtcagaactccgg

SEQ ID NO: 3394142 - DNA, 25 bp, Homo sapien
gcgcctctgcttgaccggggaaaga

SEQ ID NO: 3394143 - DNA, 25 bp, Homo sapien
tacaaagtgacgcaggtgtctgcca

SEQ ID NO: 3394144 - DNA, 25 bp, Homo sapien
gtgacgcaggtgtctgccaagactt

SEQ ID NO: 3394145 - DNA, 25 bp, Homo sapien
gggcactacaaagtgacgcaggtgt

SEQ ID NO: 3394146 - DNA, 25 bp, Homo sapien
aaagagagacgtttggggcactaca

SEQ ID NO: 3394147 - DNA, 25 bp, Homo sapien
cgtttgccagctccgcggacaaggg

SEQ ID NO: 3394148 - DNA, 25 bp, Homo sapien
ctccgcggacaagggatcccacctt

SEQ ID NO: 3394149 - DNA, 25 bp, Homo sapien
ttgccagctccgcggacaagggatc

SEQ ID NO: 3394150 - DNA, 25 bp, Homo sapien
ccagctccgcggacaagggatccca

SEQ ID NO: 3394151 - DNA, 25 bp, Homo sapien
ggcggccgggatgggagcctttgcc

SEQ ID NO: 3394152 - DNA, 25 bp, Homo sapien
cccccaagccgagcagtggccacag

SEQ ID NO: 3394153 - DNA, 25 bp, Homo sapien
gcggcttccccccaagccgagcagt

SEQ ID NO: 3394154 - DNA, 25 bp, Homo sapien
ctgaaggtgccacggggcggctctg

SEQ ID NO: 3394155 - DNA, 25 bp, Homo sapien
gctgccgggttagcgggaaccggca

SEQ ID NO: 3394156 - DNA, 25 bp, Homo sapien
cactggccatttggcaggaggcgag

SEQ ID NO: 3394157 - DNA, 25 bp, Homo sapien
ctggccatttggcaggaggcgagga

SEQ ID NO: 3394158 - DNA, 25 bp, Homo sapien
aggaggcgaggaagggcgagggcac

SEQ ID NO: 3394159 - DNA, 25 bp, Homo sapien
ctagcactggccatttggcaggagg

SEQ ID NO: 3394160 - DNA, 25 bp, Homo sapien
gactgaggactgaacccagggagcc

SEQ ID NO: 3394161 - DNA, 25 bp, Homo sapien
gcctcccagagcgaacggaagagga

SEQ ID NO: 3394162 - DNA, 25 bp, Homo sapien
tggcctcccagagcgaacggaagag

SEQ ID NO: 3394163 - DNA, 25 bp, Homo sapien
tcccagagcgaacggaagaggactg

SEQ ID NO: 3394164 - DNA, 25 bp, Homo sapien
gctgacaaatatatgggatcccggc

SEQ ID NO: 3394165 - DNA, 25 bp, Homo sapien
ttttaaaagcccgtcaggatgcgct

SEQ ID NO: 3394166 - DNA, 25 bp, Homo sapien
gatgcgcttagcttcggttccctgg

SEQ ID NO: 3394167 - DNA, 25 bp, Homo sapien
tatttgcaaaaatcggagagtgccg

SEQ ID NO: 3394168 - DNA, 25 bp, Homo sapien
cgagcaggtcgcctgcttcgcagtg

SEQ ID NO: 3394169 - DNA, 25 bp, Homo sapien
cgcagtgggaagtggaccttctcct

SEQ ID NO: 3394170 - DNA, 25 bp, Homo sapien
gagctgggcggcgagcaggtcgcct

SEQ ID NO: 3394171 - DNA, 25 bp, Homo sapien
ataaatcaaacccagccatcctcgg

SEQ ID NO: 3394172 - DNA, 25 bp, Homo sapien
gccgtggcgtttccagagtcgctct

SEQ ID NO: 3394173 - DNA, 25 bp, Homo sapien
cagggatttgcgcacacttaatggc

SEQ ID NO: 3394174 - DNA, 25 bp, Homo sapien
gaacgcgccctttattgacaggcag

SEQ ID NO: 3394175 - DNA, 25 bp, Homo sapien
tctcgagcaccctgctgggttgcag

SEQ ID NO: 3394176 - DNA, 25 bp, Homo sapien
ggagaggcgaggtgggacctcgtag

SEQ ID NO: 3394177 - DNA, 25 bp, Homo sapien
gaggtgggacctcgtaggctgggca

SEQ ID NO: 3394178 - DNA, 25 bp, Homo sapien
acctcgtaggctgggcaccacacgg

SEQ ID NO: 3394179 - DNA, 25 bp, Homo sapien
tgggacctcgtaggctgggcaccac

SEQ ID NO: 3394180 - DNA, 25 bp, Homo sapien
ccctaggtgtcggaaatttgcagtc

SEQ ID NO: 3394181 - DNA, 25 bp, Homo sapien
tcttcccgcaatgcgagccagtgtg

SEQ ID NO: 3394182 - DNA, 25 bp, Homo sapien
cctcaggtagcactcggcatttggg

SEQ ID NO: 3394183 - DNA, 25 bp, Homo sapien
cactgtgcggtggagaatcagagcc

SEQ ID NO: 3394184 - DNA, 25 bp, Homo sapien
gtcacagtcacaacacctagacttc

SEQ ID NO: 3394185 - DNA, 25 bp, Homo sapien
agtcacagtcacaacacctagactt

SEQ ID NO: 3394186 - DNA, 25 bp, Homo sapien
cagtcacaacacctagacttcccca

SEQ ID NO: 3394187 - DNA, 25 bp, Homo sapien
tcacaacacctagacttccccagaa

SEQ ID NO: 3394188 - DNA, 25 bp, Homo sapien
caatccgggagctgccgatattata

SEQ ID NO: 3394189 - DNA, 25 bp, Homo sapien
atttcccgtgcctagcacctgcagg

SEQ ID NO: 3394190 - DNA, 25 bp, Homo sapien
taaactcgcctttatgtaacgctaa

SEQ ID NO: 3394191 - DNA, 25 bp, Homo sapien
gatacaccagttgactgtaaccgag

SEQ ID NO: 3394192 - DNA, 25 bp, Homo sapien
tgtccttgaagtatcccttcgagcg

SEQ ID NO: 3394193 - DNA, 25 bp, Homo sapien
gcctttgaagcccaagtccgcggct

SEQ ID NO: 3394194 - DNA, 25 bp, Homo sapien
tttgctgggcaaatagcaccctgca

SEQ ID NO: 3394195 - DNA, 25 bp, Homo sapien
ctttacactaatatcgcctctcggg

SEQ ID NO: 3394196 - DNA, 25 bp, Homo sapien
gtgactgttcatattcaaagtcagg

SEQ ID NO: 3394197 - DNA, 25 bp, Homo sapien
catattcaaagtcaggcagcaatga

SEQ ID NO: 3394198 - DNA, 25 bp, Homo sapien
gttcatattcaaagtcaggcagcaa

SEQ ID NO: 3394199 - DNA, 25 bp, Homo sapien
caaagtcaggcagcaatgaattgta

SEQ ID NO: 3394200 - DNA, 25 bp, Homo sapien
caagatttctgcattagcgccacgt

SEQ ID NO: 3394201 - DNA, 25 bp, Homo sapien
tcccgaagtcggataatggaaatta

SEQ ID NO: 3394202 - DNA, 25 bp, Homo sapien
gtccccgaaatgaataatgcaggca

SEQ ID NO: 3394203 - DNA, 25 bp, Homo sapien
cggctggcgctaggatcccgaagtc

SEQ ID NO: 3394204 - DNA, 25 bp, Homo sapien
caactttcaaatctgcgaaggggcc

SEQ ID NO: 3394205 - DNA, 25 bp, Homo sapien
gagaagatcaaggccgaggcaactt

SEQ ID NO: 3394206 - DNA, 25 bp, Homo sapien
agcgtccccgccgtgcaaagagact

SEQ ID NO: 3394207 - DNA, 25 bp, Homo sapien
tccccgccgtgcaaagagactctgg

SEQ ID NO: 3394208 - DNA, 25 bp, Homo sapien
cctgctacgtctgtcgggtttgtaa

SEQ ID NO: 3394209 - DNA, 25 bp, Homo sapien
cagcagatcctgctacgtctgtcgg

SEQ ID NO: 3394210 - DNA, 25 bp, Homo sapien
atttgtaattactgcccttcatgtg

SEQ ID NO: 3394211 - DNA, 25 bp, Homo sapien
tcatgtggtccggtgccttgaacca

SEQ ID NO: 3394212 - DNA, 25 bp, Homo sapien
ttctgaccatgcattagtagtacta

SEQ ID NO: 3394213 - DNA, 25 bp, Homo sapien
gggctgtggcggtgcaactcccgcc

SEQ ID NO: 3394214 - DNA, 25 bp, Homo sapien
ccccttctgaccatgcattagtagt

SEQ ID NO: 3394215 - DNA, 25 bp, Homo sapien
gccgcctgcgttctagacagaaaag

SEQ ID NO: 3394216 - DNA, 25 bp, Homo sapien
cggacgtacatctatagcaaggtgc

SEQ ID NO: 3394217 - DNA, 25 bp, Homo sapien
gaacacatgtggttaacagaaagcc

SEQ ID NO: 3394218 - DNA, 25 bp, Homo sapien
catcatcccgccgtaagtgggtgtg

SEQ ID NO: 3394219 - DNA, 25 bp, Homo sapien
aattgtccatgcgtgttccccgagg

SEQ ID NO: 3394220 - DNA, 25 bp, Homo sapien
ttcactttcatcgtggaattgaggg

SEQ ID NO: 3394221 - DNA, 25 bp, Homo sapien
tgcttgagttcctctaaattgaatg

SEQ ID NO: 3394222 - DNA, 25 bp, Homo sapien
gaacagtgagtcataaagtagccat

SEQ ID NO: 3394223 - DNA, 25 bp, Homo sapien
gggaagtagctacaatgggatttgt

SEQ ID NO: 3394224 - DNA, 25 bp, Homo sapien
catcaaccgttcctcagctgggatc

SEQ ID NO: 3394225 - DNA, 25 bp, Homo sapien
ctcatcaaccgttcctcagctggga

SEQ ID NO: 3394226 - DNA, 25 bp, Homo sapien
gatcagcagaaccaaccctgggatt

SEQ ID NO: 3394227 - DNA, 25 bp, Homo sapien
gggattcaacaaggtgtcaggtgta

SEQ ID NO: 3394228 - DNA, 25 bp, Homo sapien
taaagcctctggctgagtaactccc

SEQ ID NO: 3394229 - DNA, 25 bp, Homo sapien
tgagtaactcccaagtggatcctct

SEQ ID NO: 3394230 - DNA, 25 bp, Homo sapien
ctctgcatctcaaccaaggatgcca

SEQ ID NO: 3394231 - DNA, 25 bp, Homo sapien
caagtggatcctctgcatctcaacc

SEQ ID NO: 3394232 - DNA, 25 bp, Homo sapien
tccagaaaccagacaagtcctatgg

SEQ ID NO: 3394233 - DNA, 25 bp, Homo sapien
tcctatggcacgatttaggctacag

SEQ ID NO: 3394234 - DNA, 25 bp, Homo sapien
tactaattctctgtgggtgatccag

SEQ ID NO: 3394235 - DNA, 25 bp, Homo sapien
cagtccagggacattggtggtagca

SEQ ID NO: 3394236 - DNA, 25 bp, Homo sapien
taccatcatgcttgccaggacagcc

SEQ ID NO: 3394237 - DNA, 25 bp, Homo sapien
ctaccatcatgcttgccaggacagc

SEQ ID NO: 3394238 - DNA, 25 bp, Homo sapien
tctaccatcatgcttgccaggacag

SEQ ID NO: 3394239 - DNA, 25 bp, Homo sapien
cagactgagctcatagtacacctgc

SEQ ID NO: 3394240 - DNA, 25 bp, Homo sapien
acctgcagactgagctcatagtaca

SEQ ID NO: 3394241 - DNA, 25 bp, Homo sapien
tgcagactgagctcatagtacacct

SEQ ID NO: 3394242 - DNA, 25 bp, Homo sapien
ttcacatcttgctctatgatgctgt

SEQ ID NO: 3394243 - DNA, 25 bp, Homo sapien
tctcctgtgcaattgagcagatcct

SEQ ID NO: 3394244 - DNA, 25 bp, Homo sapien
ttctgctggaaaccgagagcctcaa

SEQ ID NO: 3394245 - DNA, 25 bp, Homo sapien
cagatcttgctgcagggtcccagct

SEQ ID NO: 3394246 - DNA, 25 bp, Homo sapien
tgagtcccagggttcctaccaatag

SEQ ID NO: 3394247 - DNA, 25 bp, Homo sapien
tcaccctggcatggcttcttcctgg

SEQ ID NO: 3394248 - DNA, 25 bp, Homo sapien
ctggctgggctgcttttgaaaacct

SEQ ID NO: 3394249 - DNA, 25 bp, Homo sapien
gctgggctgcttttgaaaacctccc

SEQ ID NO: 3394250 - DNA, 25 bp, Homo sapien
cctccccggacttgggtgtgctcct

SEQ ID NO: 3394251 - DNA, 25 bp, Homo sapien
cgcctttgcattgtggccaaacgca

SEQ ID NO: 3394252 - DNA, 25 bp, Homo sapien
ttgcattgtggccaaacgcacaggg

SEQ ID NO: 3394253 - DNA, 25 bp, Homo sapien
cattgtggccaaacgcacagggata

SEQ ID NO: 3394254 - DNA, 25 bp, Homo sapien
cctttgcattgtggccaaacgcaca

SEQ ID NO: 3394255 - DNA, 25 bp, Homo sapien
cctggaagacactcctccagcagaa

SEQ ID NO: 3394256 - DNA, 25 bp, Homo sapien
ccttcctggaagacactcctccagc

SEQ ID NO: 3394257 - DNA, 25 bp, Homo sapien
ttgagggtcttttgagaaaggcagc

SEQ ID NO: 3394258 - DNA, 25 bp, Homo sapien
ataatttgagggtcttttgagaaag

SEQ ID NO: 3394259 - DNA, 25 bp, Homo sapien
ttggtcaacattggccctcaagcag

SEQ ID NO: 3394260 - DNA, 25 bp, Homo sapien
agatggatccatagagctcagcaga

SEQ ID NO: 3394261 - DNA, 25 bp, Homo sapien
gaatttgcaaatcgcgatagcccta

SEQ ID NO: 3394262 - DNA, 25 bp, Homo sapien
cagaggtcacattactgctgagggc

SEQ ID NO: 3394263 - DNA, 25 bp, Homo sapien
caagtgctgtagatggtacctgacc

SEQ ID NO: 3394264 - DNA, 25 bp, Homo sapien
gaactggtactgatccctaacctgg

SEQ ID NO: 3394265 - DNA, 25 bp, Homo sapien
gactttgtcaacgtggccctgtgca

SEQ ID NO: 3394266 - DNA, 25 bp, Homo sapien
taaatgaacaatgcccaccaaggtg

SEQ ID NO: 3394267 - DNA, 25 bp, Homo sapien
gcttctgggttattgttggacaaaa

SEQ ID NO: 3394268 - DNA, 25 bp, Homo sapien
gtggtctggctgtaggtcaaaacaa

SEQ ID NO: 3394269 - DNA, 25 bp, Homo sapien
caaaaagtggtctggctgtaggtca

SEQ ID NO: 3394270 - DNA, 25 bp, Homo sapien
ccgcttctgggttattgttggacaa

SEQ ID NO: 3394271 - DNA, 25 bp, Homo sapien
ccatcgtacaagagcagaaggtgtc

SEQ ID NO: 3394272 - DNA, 25 bp, Homo sapien
cttaggaaatgaaggcgccatggtc

SEQ ID NO: 3394273 - DNA, 25 bp, Homo sapien
ggagcccaacttcggagccatggaa

SEQ ID NO: 3394274 - DNA, 25 bp, Homo sapien
gcagaaaattaccatggaccttagg

SEQ ID NO: 3394275 - DNA, 25 bp, Homo sapien
cagctatccataagcactatttgga

SEQ ID NO: 3394276 - DNA, 25 bp, Homo sapien
tagaagccgtggcaattctgcccat

SEQ ID NO: 3394277 - DNA, 25 bp, Homo sapien
cattagtaggatcctgagcttctag

SEQ ID NO: 3394278 - DNA, 25 bp, Homo sapien
gagcttctagctgttcttggtactt

SEQ ID NO: 3394279 - DNA, 25 bp, Homo sapien
gcatttggcaaaagaggggttggat

SEQ ID NO: 3394280 - DNA, 25 bp, Homo sapien
catttggcaaaagaggggttggatt

SEQ ID NO: 3394281 - DNA, 25 bp, Homo sapien
gaggctttttgcagactccagtgtc

SEQ ID NO: 3394282 - DNA, 25 bp, Homo sapien
cagtgtccaatttctacgatgacag

SEQ ID NO: 3394283 - DNA, 25 bp, Homo sapien
tagcctccaaggtggcactgcaggt

SEQ ID NO: 3394284 - DNA, 25 bp, Homo sapien
tacgatgacagcagttgtctttcca

SEQ ID NO: 3394285 - DNA, 25 bp, Homo sapien
gagatctcactccataggcagccac

SEQ ID NO: 3394286 - DNA, 25 bp, Homo sapien
aaggacgagcaatggcctgagtgtg

SEQ ID NO: 3394287 - DNA, 25 bp, Homo sapien
ccatgagacatgctatgaggtctac

SEQ ID NO: 3394288 - DNA, 25 bp, Homo sapien
cagtgaaggacgagcaatggcctga

SEQ ID NO: 3394289 - DNA, 25 bp, Homo sapien
tatcgaatagatatgaatatggcaa

SEQ ID NO: 3394290 - DNA, 25 bp, Homo sapien
cccattgctagagtagaatatcgaa

SEQ ID NO: 3394291 - DNA, 25 bp, Homo sapien
gaatataaggcatgttatgggtccc

SEQ ID NO: 3394292 - DNA, 25 bp, Homo sapien
ttgtttctgaccaatgaatataagg

SEQ ID NO: 3394293 - DNA, 25 bp, Homo sapien
atggagtttcagatgatgttggtca

SEQ ID NO: 3394294 - DNA, 25 bp, Homo sapien
cataatggaatcaacagcacacatg

SEQ ID NO: 3394295 - DNA, 25 bp, Homo sapien
cagcggcagaggttaccctgagcag

SEQ ID NO: 3394296 - DNA, 25 bp, Homo sapien
atggaatcaacagcacacatggtct

SEQ ID NO: 3394297 - DNA, 25 bp, Homo sapien
taccctgagcagcataatggaatca

SEQ ID NO: 3394298 - DNA, 25 bp, Homo sapien
ccagaggtttgctcgttcataaaca

SEQ ID NO: 3394299 - DNA, 25 bp, Homo sapien
accagaggtttgctcgttcataaac

SEQ ID NO: 3394300 - DNA, 25 bp, Homo sapien
cagaggtttgctcgttcataaacat

SEQ ID NO: 3394301 - DNA, 25 bp, Homo sapien
caccagaggtttgctcgttcataaa

SEQ ID NO: 3394302 - DNA, 25 bp, Homo sapien
aataacaaccaagcagcagtctcca

SEQ ID NO: 3394303 - DNA, 25 bp, Homo sapien
ggtgtaggatcattcttatttgcgg

SEQ ID NO: 3394304 - DNA, 25 bp, Homo sapien
tcttatttgcggtgtcatgactcct

SEQ ID NO: 3394305 - DNA, 25 bp, Homo sapien
gcgcatgtaggtcacagtatttttg

SEQ ID NO: 3394306 - DNA, 25 bp, Homo sapien
acttgacatcaaggtaccttcctac

SEQ ID NO: 3394307 - DNA, 25 bp, Homo sapien
ttaaatgtccaaacataagtccatg

SEQ ID NO: 3394308 - DNA, 25 bp, Homo sapien
aacataagtccatgctctctgatgt

SEQ ID NO: 3394309 - DNA, 25 bp, Homo sapien
aatccagactgtaaatgatcatgcc

SEQ ID NO: 3394310 - DNA, 25 bp, Homo sapien
gctctctgatgtattgtcaaatcca

SEQ ID NO: 3394311 - DNA, 25 bp, Homo sapien
tacaattgtggctatctctgagaag

SEQ ID NO: 3394312 - DNA, 25 bp, Homo sapien
cacccaagttgttcgtggacagatg

SEQ ID NO: 3394313 - DNA, 25 bp, Homo sapien
aacagtatggcggtttcttgaaaca

SEQ ID NO: 3394314 - DNA, 25 bp, Homo sapien
ttaggactatctcacacccattggg

SEQ ID NO: 3394315 - DNA, 25 bp, Homo sapien
gctctggccagatctatcctctctt

SEQ ID NO: 3394316 - DNA, 25 bp, Homo sapien
tacaggacaggctacatgcaggagc

SEQ ID NO: 3394317 - DNA, 25 bp, Homo sapien
tgagaaccaaggctgcaaggcagat

SEQ ID NO: 3394318 - DNA, 25 bp, Homo sapien
cttctagtgcgacacccagcaagtg

SEQ ID NO: 3394319 - DNA, 25 bp, Homo sapien
gttgcagcaattagtagctatcagg

SEQ ID NO: 3394320 - DNA, 25 bp, Homo sapien
gacagagttgaatgagctccactga

SEQ ID NO: 3394321 - DNA, 25 bp, Homo sapien
gtagctgacaggcaatcaaagtttt

SEQ ID NO: 3394322 - DNA, 25 bp, Homo sapien
agctatcaggtagcattggaaggac

SEQ ID NO: 3394323 - DNA, 25 bp, Homo sapien
gagggagattccatttgattcacaa

SEQ ID NO: 3394324 - DNA, 25 bp, Homo sapien
gcaaagcatatggaatgacagctct

SEQ ID NO: 3394325 - DNA, 25 bp, Homo sapien
tctgcagccccttagcacgagggag

SEQ ID NO: 3394326 - DNA, 25 bp, Homo sapien
cctgagcaaagcatatggaatgaca

SEQ ID NO: 3394327 - DNA, 25 bp, Homo sapien
catgaccttccttcttggtagaaaa

SEQ ID NO: 3394328 - DNA, 25 bp, Homo sapien
tttggaagggtcaagaatagagtta

SEQ ID NO: 3394329 - DNA, 25 bp, Homo sapien
aaaggcagttaaagaatgttcctct

SEQ ID NO: 3394330 - DNA, 25 bp, Homo sapien
aatttgcgagttgaaggaaaggcag

SEQ ID NO: 3394331 - DNA, 25 bp, Homo sapien
gccagaatgaaaacggaaacacaac

SEQ ID NO: 3394332 - DNA, 25 bp, Homo sapien
gaaacacaacccgttatatgattcg

SEQ ID NO: 3394333 - DNA, 25 bp, Homo sapien
gattcgattttctgtgaggagatgc

SEQ ID NO: 3394334 - DNA, 25 bp, Homo sapien
taacgtttagctccctagtagccag

SEQ ID NO: 3394335 - DNA, 25 bp, Homo sapien
cttgacatgctagagaagtaaagcc

SEQ ID NO: 3394336 - DNA, 25 bp, Homo sapien
tgacatgctagagaagtaaagcccc

SEQ ID NO: 3394337 - DNA, 25 bp, Homo sapien
gacatgctagagaagtaaagcccca

SEQ ID NO: 3394338 - DNA, 25 bp, Homo sapien
acatgctagagaagtaaagccccat

SEQ ID NO: 3394339 - DNA, 25 bp, Homo sapien
ggcagaatccccagcgtaaaatggg

SEQ ID NO: 3394340 - DNA, 25 bp, Homo sapien
gcgtttgagagtcatttcatcacca

SEQ ID NO: 3394341 - DNA, 25 bp, Homo sapien
tcatcaccaacttgcttcatgaaaa

SEQ ID NO: 3394342 - DNA, 25 bp, Homo sapien
aagggtaaaggcagaatccccagcg

SEQ ID NO: 3394343 - DNA, 25 bp, Homo sapien
cagagtgaggtaagtacggatttcc

SEQ ID NO: 3394344 - DNA, 25 bp, Homo sapien
ctcgtgcacgtgagacagggattct

SEQ ID NO: 3394345 - DNA, 25 bp, Homo sapien
aatggccacgtcctgatccttgtga

SEQ ID NO: 3394346 - DNA, 25 bp, Homo sapien
gagcagtacaacaacttgatcagga

SEQ ID NO: 3394347 - DNA, 25 bp, Homo sapien
cttctgacttatgtaggccagtgtc

SEQ ID NO: 3394348 - DNA, 25 bp, Homo sapien
tggtggtcaagatgccactctcctt

SEQ ID NO: 3394349 - DNA, 25 bp, Homo sapien
cctgtgggatgctctcttctgactt

SEQ ID NO: 3394350 - DNA, 25 bp, Homo sapien
gctgtgctggatactagaggtaact

SEQ ID NO: 3394351 - DNA, 25 bp, Homo sapien
aaatgataggtcacagaacaccctg

SEQ ID NO: 3394352 - DNA, 25 bp, Homo sapien
tgaccacattgaaccgtatctctag

SEQ ID NO: 3394353 - DNA, 25 bp, Homo sapien
taaatgtaccacgagcactgccttg

SEQ ID NO: 3394354 - DNA, 25 bp, Homo sapien
tggtaattactccactgttcagtgg

SEQ ID NO: 3394355 - DNA, 25 bp, Homo sapien
agaggaatttgtgactatcctcaga

SEQ ID NO: 3394356 - DNA, 25 bp, Homo sapien
tttgtgactatcctcagaggccaca

SEQ ID NO: 3394357 - DNA, 25 bp, Homo sapien
gaggcaactacaatccagaggaatt

SEQ ID NO: 3394358 - DNA, 25 bp, Homo sapien
atgaggcaactacaatccagaggaa

SEQ ID NO: 3394359 - DNA, 25 bp, Homo sapien
tcccaacactgagtagcaaggctct

SEQ ID NO: 3394360 - DNA, 25 bp, Homo sapien
aatagaagagggcatagcatgtccc

SEQ ID NO: 3394361 - DNA, 25 bp, Homo sapien
gttagagtcctgctacactttgcaa

SEQ ID NO: 3394362 - DNA, 25 bp, Homo sapien
gatcctcccaagagataggcttaca

SEQ ID NO: 3394363 - DNA, 25 bp, Homo sapien
gccgtgagcaccttccaagtttaac

SEQ ID NO: 3394364 - DNA, 25 bp, Homo sapien
actggaaccctggtagagcttgaat

SEQ ID NO: 3394365 - DNA, 25 bp, Homo sapien
gtaaggctgagcgtggccgtgagca

SEQ ID NO: 3394366 - DNA, 25 bp, Homo sapien
caagtaatatcctacagtaaggctg

SEQ ID NO: 3394367 - DNA, 25 bp, Homo sapien
tgctaatcgtttcagcagaagacag

SEQ ID NO: 3394368 - DNA, 25 bp, Homo sapien
tcaaaggtacgggaaaggaggtgca

SEQ ID NO: 3394369 - DNA, 25 bp, Homo sapien
tggctgtcagacagccggatgatct

SEQ ID NO: 3394370 - DNA, 25 bp, Homo sapien
gatgatctgacgcagcgcactgcta

SEQ ID NO: 3394371 - DNA, 25 bp, Homo sapien
ttttgccattataaataacactggg

SEQ ID NO: 3394372 - DNA, 25 bp, Homo sapien
ttgccattataaataacactgggat

SEQ ID NO: 3394373 - DNA, 25 bp, Homo sapien
gccattataaataacactgggatga

SEQ ID NO: 3394374 - DNA, 25 bp, Homo sapien
cattataaataacactgggatgaac

SEQ ID NO: 3394375 - DNA, 25 bp, Homo sapien
tacgagcattaatgcaccgagtctc

SEQ ID NO: 3394376 - DNA, 25 bp, Homo sapien
cacagtacgagcattaatgcaccga

SEQ ID NO: 3394377 - DNA, 25 bp, Homo sapien
cattaatgcaccgagtctcccagga

SEQ ID NO: 3394378 - DNA, 25 bp, Homo sapien
tacccacagtacgagcattaatgca

SEQ ID NO: 3394379 - DNA, 25 bp, Homo sapien
ggtgccaaatcctgaaagcataaac

SEQ ID NO: 3394380 - DNA, 25 bp, Homo sapien
acattttcctgtataacattagacc

SEQ ID NO: 3394381 - DNA, 25 bp, Homo sapien
tataacattagaccaactcgctcca

SEQ ID NO: 3394382 - DNA, 25 bp, Homo sapien
ctcaaggtgccaaatcctgaaagca

SEQ ID NO: 3394383 - DNA, 25 bp, Homo sapien
ttcattaacataaagaatatctgag

SEQ ID NO: 3394384 - DNA, 25 bp, Homo sapien
tcattaacataaagaatatctgagg

SEQ ID NO: 3394385 - DNA, 25 bp, Homo sapien
ggtagcaatatcttagctacaatct

SEQ ID NO: 3394386 - DNA, 25 bp, Homo sapien
ctgggtagcaatatcttagctacaa

SEQ ID NO: 3394387 - DNA, 25 bp, Homo sapien
caatatcttagctacaatcttagac

SEQ ID NO: 3394388 - DNA, 25 bp, Homo sapien
agcaatatcttagctacaatcttag

SEQ ID NO: 3394389 - DNA, 25 bp, Homo sapien
cactgtaacaaatgacgtttccaga

SEQ ID NO: 3394390 - DNA, 25 bp, Homo sapien
gttgatgggcaacccttctgtgcac

SEQ ID NO: 3394391 - DNA, 25 bp, Homo sapien
tgtgcacagtcatcctggactcagg

SEQ ID NO: 3394392 - DNA, 25 bp, Homo sapien
aaagtgtatgtctcacgcacgtgac

SEQ ID NO: 3394393 - DNA, 25 bp, Homo sapien
gctttggctctagagccagggttct

SEQ ID NO: 3394394 - DNA, 25 bp, Homo sapien
tggttcttgggccacattggttcat

SEQ ID NO: 3394395 - DNA, 25 bp, Homo sapien
ccagggttctttctgattgattggt

SEQ ID NO: 3394396 - DNA, 25 bp, Homo sapien
ggcctggcacgccagggatgtccag

SEQ ID NO: 3394397 - DNA, 25 bp, Homo sapien
tgaaatatatctgtatcagctggtc

SEQ ID NO: 3394398 - DNA, 25 bp, Homo sapien
tagagctcatgttcagccaggatgc

SEQ ID NO: 3394399 - DNA, 25 bp, Homo sapien
tcagctggtctgtagtcactgccaa

SEQ ID NO: 3394400 - DNA, 25 bp, Homo sapien
ggatgcaccggcatgtccatgcagg

SEQ ID NO: 3394401 - DNA, 25 bp, Homo sapien
cactgaccagacttgacagatccac

SEQ ID NO: 3394402 - DNA, 25 bp, Homo sapien
gttcccactgaccagacttgacaga

SEQ ID NO: 3394403 - DNA, 25 bp, Homo sapien
ccagacttgacagatccacccagtt

SEQ ID NO: 3394404 - DNA, 25 bp, Homo sapien
ctgctgttcccactgaccagacttg

SEQ ID NO: 3394405 - DNA, 25 bp, Homo sapien
ctcactgtacaaaaaggaaagttgg

SEQ ID NO: 3394406 - DNA, 25 bp, Homo sapien
taataagtgcccagtctgtgaactc

SEQ ID NO: 3394407 - DNA, 25 bp, Homo sapien
tgaaccagacgtggtaatttcttgc

SEQ ID NO: 3394408 - DNA, 25 bp, Homo sapien
tggttcccagaagtaaatgtcaatg

SEQ ID NO: 3394409 - DNA, 25 bp, Homo sapien
actgcttttgcctggtgactctctg

SEQ ID NO: 3394410 - DNA, 25 bp, Homo sapien
gccctctcacctgagtggggaaatt

SEQ ID NO: 3394411 - DNA, 25 bp, Homo sapien
cctctcacctgagtggggaaattta

SEQ ID NO: 3394412 - DNA, 25 bp, Homo sapien
tctcacctgagtggggaaatttagt

SEQ ID NO: 3394413 - DNA, 25 bp, Homo sapien
gaagcctatggtggcaatcacagaa

SEQ ID NO: 3394414 - DNA, 25 bp, Homo sapien
tggtcaggcatccagcagtggagtt

SEQ ID NO: 3394415 - DNA, 25 bp, Homo sapien
tgaaccatcacctgctgatcctggg

SEQ ID NO: 3394416 - DNA, 25 bp, Homo sapien
tgacctcagtgtttcccattggaag

SEQ ID NO: 3394417 - DNA, 25 bp, Homo sapien
gaaacacaggtttgttctgctgttt

SEQ ID NO: 3394418 - DNA, 25 bp, Homo sapien
ccctctgtgcagctaggccaggtct

SEQ ID NO: 3394419 - DNA, 25 bp, Homo sapien
tctctgtcacgtttttttaatgggc

SEQ ID NO: 3394420 - DNA, 25 bp, Homo sapien
ctgtttgtagctcagtcattggact

SEQ ID NO: 3394421 - DNA, 25 bp, Homo sapien
taggaaattgctcagctgtggtgtt

SEQ ID NO: 3394422 - DNA, 25 bp, Homo sapien
ggtgttcgtggtcagtatctcccca

SEQ ID NO: 3394423 - DNA, 25 bp, Homo sapien
cgcttttcaccacctcgctctctgg

SEQ ID NO: 3394424 - DNA, 25 bp, Homo sapien
caggctcttgcagtcaaggagtgca

SEQ ID NO: 3394425 - DNA, 25 bp, Homo sapien
tcagggtgctgatttcccgaccagg

SEQ ID NO: 3394426 - DNA, 25 bp, Homo sapien
attcagcaagcttccagtaggggcc

SEQ ID NO: 3394427 - DNA, 25 bp, Homo sapien
gagtcctgcacagtgaattccggtc

SEQ ID NO: 3394428 - DNA, 25 bp, Homo sapien
tgttcaaggcctctcagcttcaaag

SEQ ID NO: 3394429 - DNA, 25 bp, Homo sapien
ctggaagttattggggtgggctggt

SEQ ID NO: 3394430 - DNA, 25 bp, Homo sapien
tggaagttattggggtgggctggtg

SEQ ID NO: 3394431 - DNA, 25 bp, Homo sapien
agtctgccctctgtaactcctccac

SEQ ID NO: 3394432 - DNA, 25 bp, Homo sapien
tggatcccaagcctccagtctgccc

SEQ ID NO: 3394433 - DNA, 25 bp, Homo sapien
tctctccttcaagccactgacatct

SEQ ID NO: 3394434 - DNA, 25 bp, Homo sapien
gacatctttcactggatcccaagcc

SEQ ID NO: 3394435 - DNA, 25 bp, Homo sapien
cacagacccgatgagttgcctggat

SEQ ID NO: 3394436 - DNA, 25 bp, Homo sapien
tctctgattcaaatttgcggtggca

SEQ ID NO: 3394437 - DNA, 25 bp, Homo sapien
gtcacgtggccgatgtcccgaaggc

SEQ ID NO: 3394438 - DNA, 25 bp, Homo sapien
cctggatgtcaaagaattaagcctg

SEQ ID NO: 3394439 - DNA, 25 bp, Homo sapien
cagatagacttctttagtaatgaac

SEQ ID NO: 3394440 - DNA, 25 bp, Homo sapien
tccttatggtgtcatgtgttctaca

SEQ ID NO: 3394441 - DNA, 25 bp, Homo sapien
gtgtcatgtgttctacatgttcaga

SEQ ID NO: 3394442 - DNA, 25 bp, Homo sapien
gctgctgtagtcatgaaacaccaag

SEQ ID NO: 3394443 - DNA, 25 bp, Homo sapien
cctccccgcgatcttgttgctaggg

SEQ ID NO: 3394444 - DNA, 25 bp, Homo sapien
cgctgagcgagcgacaacagcggca

SEQ ID NO: 3394445 - DNA, 25 bp, Homo sapien
gcgcccattggtcgctgagctgccg

SEQ ID NO: 3394446 - DNA, 25 bp, Homo sapien
gcctcgggctgggaagctgcgggcg

SEQ ID NO: 3394447 - DNA, 25 bp, Homo sapien
tggttgtcctcagggggccgctcgc

SEQ ID NO: 3394448 - DNA, 25 bp, Homo sapien
aaggcctcgtggtcgtactggaagc

SEQ ID NO: 3394449 - DNA, 25 bp, Homo sapien
cgtggtcgtactggaagctctggtt

SEQ ID NO: 3394450 - DNA, 25 bp, Homo sapien
gcttggcccgcagaacccgcggcgc

SEQ ID NO: 3394451 - DNA, 25 bp, Homo sapien
ggccgagaccaggaagcaagcctgt

SEQ ID NO: 3394452 - DNA, 25 bp, Homo sapien
tcttagcgagtgtctcaagcccttc

SEQ ID NO: 3394453 - DNA, 25 bp, Homo sapien
taggcaaaaggcaagaccactgcgg

SEQ ID NO: 3394454 - DNA, 25 bp, Homo sapien
tcatggcactaacaggccactgtgg

SEQ ID NO: 3394455 - DNA, 25 bp, Homo sapien
tccacctcctacctgaacccaagaa

SEQ ID NO: 3394456 - DNA, 25 bp, Homo sapien
ggagtgaataatcaatgtctccacc

SEQ ID NO: 3394457 - DNA, 25 bp, Homo sapien
tctttctcaggaaggtgtaaacatc

SEQ ID NO: 3394458 - DNA, 25 bp, Homo sapien
ctctttctcaggaaggtgtaaacat

SEQ ID NO: 3394459 - DNA, 25 bp, Homo sapien
gatggccattatcaacggatcagag

SEQ ID NO: 3394460 - DNA, 25 bp, Homo sapien
tctgtcctgataaacctagaggtgc

SEQ ID NO: 3394461 - DNA, 25 bp, Homo sapien
ccacagctggcctaggtttcacaaa

SEQ ID NO: 3394462 - DNA, 25 bp, Homo sapien
gacactgctaatggatcgtgcccct

SEQ ID NO: 3394463 - DNA, 25 bp, Homo sapien
ccgtttgatccaggttttcagctcc

SEQ ID NO: 3394464 - DNA, 25 bp, Homo sapien
atcttttctgcacccgtttgatcca

SEQ ID NO: 3394465 - DNA, 25 bp, Homo sapien
aagatgtatcttttctgcacccgtt

SEQ ID NO: 3394466 - DNA, 25 bp, Homo sapien
tgtatcttttctgcacccgtttgat

SEQ ID NO: 3394467 - DNA, 25 bp, Homo sapien
gaatcatgaaactctgcggggtttc

SEQ ID NO: 3394468 - DNA, 25 bp, Homo sapien
aagaatcatgaaactctgcggggtt

SEQ ID NO: 3394469 - DNA, 25 bp, Homo sapien
tgaagaatcatgaaactctgcgggg

SEQ ID NO: 3394470 - DNA, 25 bp, Homo sapien
ctgaagaatcatgaaactctgcggg

SEQ ID NO: 3394471 - DNA, 25 bp, Homo sapien
tatgttcaaactcttcaggatgcag

SEQ ID NO: 3394472 - DNA, 25 bp, Homo sapien
tcttctctcatcacgtggcagcatc

SEQ ID NO: 3394473 - DNA, 25 bp, Homo sapien
tcaggtcaccattgaggtctgcagc

SEQ ID NO: 3394474 - DNA, 25 bp, Homo sapien
aaaggcagtgaactcctcccgagta

SEQ ID NO: 3394475 - DNA, 25 bp, Homo sapien
tatctaggagggaccagtggaacat

SEQ ID NO: 3394476 - DNA, 25 bp, Homo sapien
ctggccggaagagtaaacaaagact

SEQ ID NO: 3394477 - DNA, 25 bp, Homo sapien
tctaggcacgtatctaaactgtatt

SEQ ID NO: 3394478 - DNA, 25 bp, Homo sapien
ttttcctttgtcagccagctgggtg

SEQ ID NO: 3394479 - DNA, 25 bp, Homo sapien
aaacccatccccgttcttgtcgatg

SEQ ID NO: 3394480 - DNA, 25 bp, Homo sapien
caatatactcatcctgatccacaaa

SEQ ID NO: 3394481 - DNA, 25 bp, Homo sapien
atccacaaacccatccccgttcttg

SEQ ID NO: 3394482 - DNA, 25 bp, Homo sapien
cccgttcttgtcgatgtcctccagg

SEQ ID NO: 3394483 - DNA, 25 bp, Homo sapien
ccccgagaagtgaaatgacgagtca

SEQ ID NO: 3394484 - DNA, 25 bp, Homo sapien
tattcgattttcaagcgcaacgcct

SEQ ID NO: 3394485 - DNA, 25 bp, Homo sapien
gaagccattacatgattaccccagg

SEQ ID NO: 3394486 - DNA, 25 bp, Homo sapien
cacttggtgccgcttgaagagaagc

SEQ ID NO: 3394487 - DNA, 25 bp, Homo sapien
aaacagctggtaggcagcttcttgg

SEQ ID NO: 3394488 - DNA, 25 bp, Homo sapien
cagtaatttattcatgatgaaggcc

SEQ ID NO: 3394489 - DNA, 25 bp, Homo sapien
gtgactgagcctgaagtttccttgt

SEQ ID NO: 3394490 - DNA, 25 bp, Homo sapien
ccatgtggtggagtagaaagaactg

SEQ ID NO: 3394491 - DNA, 25 bp, Homo sapien
taggaaaggcgacaaccaatccaga

SEQ ID NO: 3394492 - DNA, 25 bp, Homo sapien
gaaaggcgacaaccaatccagagac

SEQ ID NO: 3394493 - DNA, 25 bp, Homo sapien
agctttaggaaaggcgacaaccaat

SEQ ID NO: 3394494 - DNA, 25 bp, Homo sapien
ctgagctttaggaaaggcgacaacc

SEQ ID NO: 3394495 - DNA, 25 bp, Homo sapien
tctcatctttgtctaacttcccgtc

SEQ ID NO: 3394496 - DNA, 25 bp, Homo sapien
atctttgtctaacttcccgtccttg

SEQ ID NO: 3394497 - DNA, 25 bp, Homo sapien
tcatctttgtctaacttcccgtcct

SEQ ID NO: 3394498 - DNA, 25 bp, Homo sapien
atctcatctttgtctaacttcccgt

SEQ ID NO: 3394499 - DNA, 25 bp, Homo sapien
gagatcttccccgtaattggtagct

SEQ ID NO: 3394500 - DNA, 25 bp, Homo sapien
tgagatcttccccgtaattggtagc

SEQ ID NO: 3394501 - DNA, 25 bp, Homo sapien
agatcttccccgtaattggtagctt

SEQ ID NO: 3394502 - DNA, 25 bp, Homo sapien
ccccaatctgaggtataaacttgct

SEQ ID NO: 3394503 - DNA, 25 bp, Homo sapien
tgcaatttaccaaggttttcacgtg

SEQ ID NO: 3394504 - DNA, 25 bp, Homo sapien
cagtaaatactgagcgaaaaacaat

SEQ ID NO: 3394505 - DNA, 25 bp, Homo sapien
ggatcacaactgctgtaaattagac

SEQ ID NO: 3394506 - DNA, 25 bp, Homo sapien
tcgcttaatcagaatttcccctttc

SEQ ID NO: 3394507 - DNA, 25 bp, Homo sapien
ctttcgcttaatcagaatttcccct

SEQ ID NO: 3394508 - DNA, 25 bp, Homo sapien
aattagtaaatatgagtctattctg

SEQ ID NO: 3394509 - DNA, 25 bp, Homo sapien
accccactgttttatgctatatgaa

SEQ ID NO: 3394510 - DNA, 25 bp, Homo sapien
tctattctgaacattctagtaattg

SEQ ID NO: 3394511 - DNA, 25 bp, Homo sapien
gaacattctagtaattggatgaaaa

SEQ ID NO: 3394512 - DNA, 25 bp, Homo sapien
catctgcccactggcttcctacaac

SEQ ID NO: 3394513 - DNA, 25 bp, Homo sapien
tcacacagacccaggagcactgggt

SEQ ID NO: 3394514 - DNA, 25 bp, Homo sapien
cactggcttcctacaacctgacagg

SEQ ID NO: 3394515 - DNA, 25 bp, Homo sapien
tacaacctgacaggcactttctctc

SEQ ID NO: 3394516 - DNA, 25 bp, Homo sapien
ggccaagcccgtgtttattctgatt

SEQ ID NO: 3394517 - DNA, 25 bp, Homo sapien
tcagctgcccgtgcgatgctccttg

SEQ ID NO: 3394518 - DNA, 25 bp, Homo sapien
cgtgcgatgctccttgaggactctg

SEQ ID NO: 3394519 - DNA, 25 bp, Homo sapien
gttcatgtggccaagcccgtgttta

SEQ ID NO: 3394520 - DNA, 25 bp, Homo sapien
taacgaattgcaagatgctggacat

SEQ ID NO: 3394521 - DNA, 25 bp, Homo sapien
gacattggggacttcgttgagtgct

SEQ ID NO: 3394522 - DNA, 25 bp, Homo sapien
ggaagcatcaccacactcttctgag

SEQ ID NO: 3394523 - DNA, 25 bp, Homo sapien
ctagacttgtccataacgaattgca

SEQ ID NO: 3394524 - DNA, 25 bp, Homo sapien
gttcaatggagtcacagttccacac

SEQ ID NO: 3394525 - DNA, 25 bp, Homo sapien
gaaagaagttcaatggagtcacagt

SEQ ID NO: 3394526 - DNA, 25 bp, Homo sapien
taaaggaaagaagttcaatggagtc

SEQ ID NO: 3394527 - DNA, 25 bp, Homo sapien
aaggaaagaagttcaatggagtcac

SEQ ID NO: 3394528 - DNA, 25 bp, Homo sapien
cagaaaactggtccatagagaaaga

SEQ ID NO: 3394529 - DNA, 25 bp, Homo sapien
ccagtatctctgtgagaaatcaccc

SEQ ID NO: 3394530 - DNA, 25 bp, Homo sapien
aacacagaaaactggtccatagaga

SEQ ID NO: 3394531 - DNA, 25 bp, Homo sapien
agtatctctgtgagaaatcaccctt

SEQ ID NO: 3394532 - DNA, 25 bp, Homo sapien
cacagttagttgtatgagcttcact

SEQ ID NO: 3394533 - DNA, 25 bp, Homo sapien
cagagtctcccagggacttctagtg

SEQ ID NO: 3394534 - DNA, 25 bp, Homo sapien
gtatgagcttcactagtcagagtct

SEQ ID NO: 3394535 - DNA, 25 bp, Homo sapien
cactagtcagagtctcccagggact

SEQ ID NO: 3394536 - DNA, 25 bp, Homo sapien
tgagtctgttgcaaccgtgttacct

SEQ ID NO: 3394537 - DNA, 25 bp, Homo sapien
cgtgttacctttaagactatcctca

SEQ ID NO: 3394538 - DNA, 25 bp, Homo sapien
ctttatattcgcatagatgagtctg

SEQ ID NO: 3394539 - DNA, 25 bp, Homo sapien
tacctttaagactatcctcatctcc

SEQ ID NO: 3394540 - DNA, 25 bp, Homo sapien
ggcatcttgaaggaaacacgtcaga

SEQ ID NO: 3394541 - DNA, 25 bp, Homo sapien
gagatatctgccttgctcctaatgg

SEQ ID NO: 3394542 - DNA, 25 bp, Homo sapien
cattcttagtggatgacatcaccat

SEQ ID NO: 3394543 - DNA, 25 bp, Homo sapien
tcctcctaagctagaaatttgagtc

SEQ ID NO: 3394544 - DNA, 25 bp, Homo sapien
tgcgtaccgcttgaaaagcatgcct

SEQ ID NO: 3394545 - DNA, 25 bp, Homo sapien
gcaaaaatgcagtgcaccttatgat

SEQ ID NO: 3394546 - DNA, 25 bp, Homo sapien
gcaccttatgatcaactagcaccat

SEQ ID NO: 3394547 - DNA, 25 bp, Homo sapien
gccatggctcagcacctgctattaa

SEQ ID NO: 3394548 - DNA, 25 bp, Homo sapien
catcattgcatgacgaggagaggtc

SEQ ID NO: 3394549 - DNA, 25 bp, Homo sapien
gagaggtctagttgcacagatgcag

SEQ ID NO: 3394550 - DNA, 25 bp, Homo sapien
gtgagtcattacgtcagcgcatagg

SEQ ID NO: 3394551 - DNA, 25 bp, Homo sapien
taatgaagctacaggttgcccaggg

SEQ ID NO: 3394552 - DNA, 25 bp, Homo sapien
cactgggactcggtgaggattggct

SEQ ID NO: 3394553 - DNA, 25 bp, Homo sapien
gacactttagcagcccagtagattt

SEQ ID NO: 3394554 - DNA, 25 bp, Homo sapien
gggaatgacactttagcagcccagt

SEQ ID NO: 3394555 - DNA, 25 bp, Homo sapien
ctcggtgaggattggctcttgggaa

SEQ ID NO: 3394556 - DNA, 25 bp, Homo sapien
agtttccccaattgaccaggggctg

SEQ ID NO: 3394557 - DNA, 25 bp, Homo sapien
ccagagtttccccaattgaccaggg

SEQ ID NO: 3394558 - DNA, 25 bp, Homo sapien
ctatttcccagagtttccccaattg

SEQ ID NO: 3394559 - DNA, 25 bp, Homo sapien
ttcccagagtttccccaattgacca

SEQ ID NO: 3394560 - DNA, 25 bp, Homo sapien
ctgatggattttcattagggccttg

SEQ ID NO: 3394561 - DNA, 25 bp, Homo sapien
gatggattttcattagggccttgtt

SEQ ID NO: 3394562 - DNA, 25 bp, Homo sapien
atactgatggattttcattagggcc

SEQ ID NO: 3394563 - DNA, 25 bp, Homo sapien
ctttaggaatactgatggattttca

SEQ ID NO: 3394564 - DNA, 25 bp, Homo sapien
gggagagtgcctggatttatcacca

SEQ ID NO: 3394565 - DNA, 25 bp, Homo sapien
tgggaaccaagcactactcagcttt

SEQ ID NO: 3394566 - DNA, 25 bp, Homo sapien
aagggtgtaatcctggagccattct

SEQ ID NO: 3394567 - DNA, 25 bp, Homo sapien
gaaggcaatgtctatcagttgggaa

SEQ ID NO: 3394568 - DNA, 25 bp, Homo sapien
cagtggtttcttatcggccagtggg

SEQ ID NO: 3394569 - DNA, 25 bp, Homo sapien
cactccttagttgacattccctata

SEQ ID NO: 3394570 - DNA, 25 bp, Homo sapien
cattccctatacaatgtcagtggtt

SEQ ID NO: 3394571 - DNA, 25 bp, Homo sapien
taccctcgagtcaggaatatgtccc

SEQ ID NO: 3394572 - DNA, 25 bp, Homo sapien
tcattaaagactgaagtaggttccc

SEQ ID NO: 3394573 - DNA, 25 bp, Homo sapien
gaggctgagcgctctgtcattcgaa

SEQ ID NO: 3394574 - DNA, 25 bp, Homo sapien
caaggagccgctatcttcagattac

SEQ ID NO: 3394575 - DNA, 25 bp, Homo sapien
tgatttacagggacattcatcgccc

SEQ ID NO: 3394576 - DNA, 25 bp, Homo sapien
cttggagggctacagtatcatatac

SEQ ID NO: 3394577 - DNA, 25 bp, Homo sapien
tgatgctttattgcttatctgcttc

SEQ ID NO: 3394578 - DNA, 25 bp, Homo sapien
tgcttcttgatctggctgacttgga

SEQ ID NO: 3394579 - DNA, 25 bp, Homo sapien
tcacaagcaccggagagaagaattt

SEQ ID NO: 3394580 - DNA, 25 bp, Homo sapien
tggatgcccttgtacatggcggtcc

SEQ ID NO: 3394581 - DNA, 25 bp, Homo sapien
gttggatgcccttgtacatggcggt

SEQ ID NO: 3394582 - DNA, 25 bp, Homo sapien
ttggatgcccttgtacatggcggtc

SEQ ID NO: 3394583 - DNA, 25 bp, Homo sapien
cactgttgcgaagggactcagcagg

SEQ ID NO: 3394584 - DNA, 25 bp, Homo sapien
ttcgtgcacttggtgagcacactgt

SEQ ID NO: 3394585 - DNA, 25 bp, Homo sapien
tgagcacactgttgcgaagggactc

SEQ ID NO: 3394586 - DNA, 25 bp, Homo sapien
tgatgccaggcattcgtgcacttgg

SEQ ID NO: 3394587 - DNA, 25 bp, Homo sapien
ttgtaacattctggttcactggtac

SEQ ID NO: 3394588 - DNA, 25 bp, Homo sapien
tttcgaggagaactgttgaaacttg

SEQ ID NO: 3394589 - DNA, 25 bp, Homo sapien
gaaacttgtaacattctggttcact

SEQ ID NO: 3394590 - DNA, 25 bp, Homo sapien
tcgaggagaactgttgaaacttgta

SEQ ID NO: 3394591 - DNA, 25 bp, Homo sapien
tcatggtcgtgctaatggcaccaga

SEQ ID NO: 3394592 - DNA, 25 bp, Homo sapien
gaaacgccagaaactctgagtggag

SEQ ID NO: 3394593 - DNA, 25 bp, Homo sapien
actctgagtggagcctggtgtttac

SEQ ID NO: 3394594 - DNA, 25 bp, Homo sapien
tgctaatggcaccagaaacgccaga

SEQ ID NO: 3394595 - DNA, 25 bp, Homo sapien
cacttctggagtgggtatagggaat

SEQ ID NO: 3394596 - DNA, 25 bp, Homo sapien
gacttcaaccctttggatctggaca

SEQ ID NO: 3394597 - DNA, 25 bp, Homo sapien
tggacttcaaccctttggatctgga

SEQ ID NO: 3394598 - DNA, 25 bp, Homo sapien
gctgaagacacttctggagtgggta

SEQ ID NO: 3394599 - DNA, 25 bp, Homo sapien
tgactgacagctgccgttgagagca

SEQ ID NO: 3394600 - DNA, 25 bp, Homo sapien
tgagagcaccagtcagcaagtaccc

SEQ ID NO: 3394601 - DNA, 25 bp, Homo sapien
tgagtctaaggaaggccacaccctt

SEQ ID NO: 3394602 - DNA, 25 bp, Homo sapien
tgtatcctgatgtggtgagtctaag

SEQ ID NO: 3394603 - DNA, 25 bp, Homo sapien
actgccgacggcgctctaaaccatt

SEQ ID NO: 3394604 - DNA, 25 bp, Homo sapien
taaaccattcccctagcatcacatt

SEQ ID NO: 3394605 - DNA, 25 bp, Homo sapien
gctcctcgaataagtgggactttct

SEQ ID NO: 3394606 - DNA, 25 bp, Homo sapien
cctagcatcacattcctgacttcaa

SEQ ID NO: 3394607 - DNA, 25 bp, Homo sapien
cacttctgatttttgtttcctttct

SEQ ID NO: 3394608 - DNA, 25 bp, Homo sapien
caagggagcacttctgatttttgtt

SEQ ID NO: 3394609 - DNA, 25 bp, Homo sapien
ttcctttctctttcgggtctgcgga

SEQ ID NO: 3394610 - DNA, 25 bp, Homo sapien
tcctttctctttcgggtctgcggaa

SEQ ID NO: 3394611 - DNA, 25 bp, Homo sapien
gccagcaaatcccattcttgacgat

SEQ ID NO: 3394612 - DNA, 25 bp, Homo sapien
aatcccattcttgacgatgaggaca

SEQ ID NO: 3394613 - DNA, 25 bp, Homo sapien
cattagtcagatggggacaattgtc

SEQ ID NO: 3394614 - DNA, 25 bp, Homo sapien
cattcttgacgatgaggacattagt

SEQ ID NO: 3394615 - DNA, 25 bp, Homo sapien
gctaatgggcttatcaaaattcatg

SEQ ID NO: 3394616 - DNA, 25 bp, Homo sapien
gaaggccgacaagtgcatgagagac

SEQ ID NO: 3394617 - DNA, 25 bp, Homo sapien
gcctggctggctaatgggcttatca

SEQ ID NO: 3394618 - DNA, 25 bp, Homo sapien
gactctggctgtcactcaaggaaaa

SEQ ID NO: 3394619 - DNA, 25 bp, Homo sapien
ggcagccagaaatcctctctttggt

SEQ ID NO: 3394620 - DNA, 25 bp, Homo sapien
gcagccagaaatcctctctttggtc

SEQ ID NO: 3394621 - DNA, 25 bp, Homo sapien
caggcagccagaaatcctctctttg

SEQ ID NO: 3394622 - DNA, 25 bp, Homo sapien
aggcagccagaaatcctctctttgg

SEQ ID NO: 3394623 - DNA, 25 bp, Homo sapien
tcaacattcacaggaaactgtggct

SEQ ID NO: 3394624 - DNA, 25 bp, Homo sapien
tgcttagggaagaggtgtgtgcagg

SEQ ID NO: 3394625 - DNA, 25 bp, Homo sapien
ctcaacattcacaggaaactgtggc

SEQ ID NO: 3394626 - DNA, 25 bp, Homo sapien
ggaaactgtggctgcttagggaaga

SEQ ID NO: 3394627 - DNA, 25 bp, Homo sapien
ggaagagaccatgtcacttatgttc

SEQ ID NO: 3394628 - DNA, 25 bp, Homo sapien
tagagtcaaagcatctctgagggaa

SEQ ID NO: 3394629 - DNA, 25 bp, Homo sapien
ggaccaggctttagcaccttttgac

SEQ ID NO: 3394630 - DNA, 25 bp, Homo sapien
tctgtatctagtcccatggacctgg

SEQ ID NO: 3394631 - DNA, 25 bp, Homo sapien
aactggatccctgtctccatcactt

SEQ ID NO: 3394632 - DNA, 25 bp, Homo sapien
gaccctcggcgcttctgtttgggag

SEQ ID NO: 3394633 - DNA, 25 bp, Homo sapien
ttcctgggctggagccaactggatc

SEQ ID NO: 3394634 - DNA, 25 bp, Homo sapien
cactttgacatgagcctggtagagt

SEQ ID NO: 3394635 - DNA, 25 bp, Homo sapien
gtgttcctggtaagcagactccggt

SEQ ID NO: 3394636 - DNA, 25 bp, Homo sapien
gcatggagactaattctcactctca

SEQ ID NO: 3394637 - DNA, 25 bp, Homo sapien
tccggttgaaccacacctctctggg

SEQ ID NO: 3394638 - DNA, 25 bp, Homo sapien
ggtaagcagactccggttgaaccac

SEQ ID NO: 3394639 - DNA, 25 bp, Homo sapien
atctatttcccagcagtaaggatgc

SEQ ID NO: 3394640 - DNA, 25 bp, Homo sapien
tctatttcccagcagtaaggatgca

SEQ ID NO: 3394641 - DNA, 25 bp, Homo sapien
ctatttcccagcagtaaggatgcac

SEQ ID NO: 3394642 - DNA, 25 bp, Homo sapien
catctatttcccagcagtaaggatg

SEQ ID NO: 3394643 - DNA, 25 bp, Homo sapien
tgcagtttcaagaaggctagatttt

SEQ ID NO: 3394644 - DNA, 25 bp, Homo sapien
tggttaactgaagagtcagagatag

SEQ ID NO: 3394645 - DNA, 25 bp, Homo sapien
cagtttcaagaaggctagattttag

SEQ ID NO: 3394646 - DNA, 25 bp, Homo sapien
acttgcagtttcaagaaggctagat

SEQ ID NO: 3394647 - DNA, 25 bp, Homo sapien
gctgatgtctcagagtggtcactgg

SEQ ID NO: 3394648 - DNA, 25 bp, Homo sapien
ccgatgtccattgtggggccggata

SEQ ID NO: 3394649 - DNA, 25 bp, Homo sapien
cagccttaacaaaagcagcctcgtt

SEQ ID NO: 3394650 - DNA, 25 bp, Homo sapien
tcactgggaagacggatgacggtcc

SEQ ID NO: 3394651 - DNA, 25 bp, Homo sapien
tctgtttggcgtaacaagttaccat

SEQ ID NO: 3394652 - DNA, 25 bp, Homo sapien
gtctgtttggcgtaacaagttacca

SEQ ID NO: 3394653 - DNA, 25 bp, Homo sapien
ggagactttgagtctgtttggcgta

SEQ ID NO: 3394654 - DNA, 25 bp, Homo sapien
ctttgagtctgtttggcgtaacaag

SEQ ID NO: 3394655 - DNA, 25 bp, Homo sapien
tgctttcttattcctgctcctggtt

SEQ ID NO: 3394656 - DNA, 25 bp, Homo sapien
cttgatgctttcttattcctgctcc

SEQ ID NO: 3394657 - DNA, 25 bp, Homo sapien
tttcttattcctgctcctggtttct

SEQ ID NO: 3394658 - DNA, 25 bp, Homo sapien
ttctctctgaagctctctgtttaca

SEQ ID NO: 3394659 - DNA, 25 bp, Homo sapien
gctgcttctcctgcgtcctctgcat

SEQ ID NO: 3394660 - DNA, 25 bp, Homo sapien
tcctctgcccatcgtgcagatgctg

SEQ ID NO: 3394661 - DNA, 25 bp, Homo sapien
tgtcctctgcccatcgtgcagatgc

SEQ ID NO: 3394662 - DNA, 25 bp, Homo sapien
ctgcccatcgtgcagatgctgcttc

SEQ ID NO: 3394663 - DNA, 25 bp, Homo sapien
gatcccatgggattcttcctcatcc

SEQ ID NO: 3394664 - DNA, 25 bp, Homo sapien
gatgagtagggatcccatgggattc

SEQ ID NO: 3394665 - DNA, 25 bp, Homo sapien
tcagcccctggggtgtgagatcctc

SEQ ID NO: 3394666 - DNA, 25 bp, Homo sapien
ctgtagatgagtagggatcccatgg

SEQ ID NO: 3394667 - DNA, 25 bp, Homo sapien
cacaatgcgattggagttatgttgg

SEQ ID NO: 3394668 - DNA, 25 bp, Homo sapien
aggcagagggtgagtgtgactgggc

SEQ ID NO: 3394669 - DNA, 25 bp, Homo sapien
gggaggtctctccatcaggcagagg

SEQ ID NO: 3394670 - DNA, 25 bp, Homo sapien
tgggtatgtgctagaaggcaccggg

SEQ ID NO: 3394671 - DNA, 25 bp, Homo sapien
tattatcaggccagttggccagcca

SEQ ID NO: 3394672 - DNA, 25 bp, Homo sapien
aggccagttggccagccagcattta

SEQ ID NO: 3394673 - DNA, 25 bp, Homo sapien
tcatattatcaggccagttggccag

SEQ ID NO: 3394674 - DNA, 25 bp, Homo sapien
ggccagttggccagccagcatttac

SEQ ID NO: 3394675 - DNA, 25 bp, Homo sapien
catactatcagtgggtccaaacaac

SEQ ID NO: 3394676 - DNA, 25 bp, Homo sapien
gactggcgagaatggcattagcttg

SEQ ID NO: 3394677 - DNA, 25 bp, Homo sapien
ccagcactgtggcacgacgatcaaa

SEQ ID NO: 3394678 - DNA, 25 bp, Homo sapien
caaacgctgctgtcatactatcagt

SEQ ID NO: 3394679 - DNA, 25 bp, Homo sapien
ccttgggaatcactgggaagacctt

SEQ ID NO: 3394680 - DNA, 25 bp, Homo sapien
ttgtcactaaaggagtcaagtaggc

SEQ ID NO: 3394681 - DNA, 25 bp, Homo sapien
ctgagaatttgtcactaaaggagtc

SEQ ID NO: 3394682 - DNA, 25 bp, Homo sapien
taaaggagtcaagtaggctgtccat

SEQ ID NO: 3394683 - DNA, 25 bp, Homo sapien
cgtgccgccaccgtatcaattgctt

SEQ ID NO: 3394684 - DNA, 25 bp, Homo sapien
tgactttgactgactggaatgaggg

SEQ ID NO: 3394685 - DNA, 25 bp, Homo sapien
tgcttgtcaattcggtttagcgatg

SEQ ID NO: 3394686 - DNA, 25 bp, Homo sapien
cggtttagcgatgactttgactgac

SEQ ID NO: 3394687 - DNA, 25 bp, Homo sapien
aagcgcttagccctcaacagctgca

SEQ ID NO: 3394688 - DNA, 25 bp, Homo sapien
ctggaagcgcttagccctcaacagc

SEQ ID NO: 3394689 - DNA, 25 bp, Homo sapien
agcgcttagccctcaacagctgcag

SEQ ID NO: 3394690 - DNA, 25 bp, Homo sapien
ggaagcgcttagccctcaacagctg

SEQ ID NO: 3394691 - DNA, 25 bp, Homo sapien
cccattttgcgataacagtttttat

SEQ ID NO: 3394692 - DNA, 25 bp, Homo sapien
tgtgtagcgagtggccgggcgcttc

SEQ ID NO: 3394693 - DNA, 25 bp, Homo sapien
cataagcttaagatgtgtgtagcga

SEQ ID NO: 3394694 - DNA, 25 bp, Homo sapien
caaagtcttgtccatccatcaatcc

SEQ ID NO: 3394695 - DNA, 25 bp, Homo sapien
taatgtccagaaagctgggagagtc

SEQ ID NO: 3394696 - DNA, 25 bp, Homo sapien
tttgccctgtgagtagaagggagct

SEQ ID NO: 3394697 - DNA, 25 bp, Homo sapien
gagggtcccacacctttgccctgtg

SEQ ID NO: 3394698 - DNA, 25 bp, Homo sapien
gagtctggtgaagtggaagtgaaaa

SEQ ID NO: 3394699 - DNA, 25 bp, Homo sapien
gcagtcgttagtttctgtgccaggg

SEQ ID NO: 3394700 - DNA, 25 bp, Homo sapien
caccatggggaccaaatctttagtt

SEQ ID NO: 3394701 - DNA, 25 bp, Homo sapien
tagttctagagcagtcgttagtttc

SEQ ID NO: 3394702 - DNA, 25 bp, Homo sapien
gaatctgggctagcagatttgagga

SEQ ID NO: 3394703 - DNA, 25 bp, Homo sapien
tacctgctgagacgacgggttgttg

SEQ ID NO: 3394704 - DNA, 25 bp, Homo sapien
tcagaattacctgctgagacgacgg

SEQ ID NO: 3394705 - DNA, 25 bp, Homo sapien
aagcatgagggtgctcagaattacc

SEQ ID NO: 3394706 - DNA, 25 bp, Homo sapien
gagggtgctcagaattacctgctga

SEQ ID NO: 3394707 - DNA, 25 bp, Homo sapien
tcagacaccctttgggtggaagctc

SEQ ID NO: 3394708 - DNA, 25 bp, Homo sapien
tggaagctctgtgactccgggaatc

SEQ ID NO: 3394709 - DNA, 25 bp, Homo sapien
ggtggaagctctgtgactcctggaa

SEQ ID NO: 3394710 - DNA, 25 bp, Homo sapien
tcacagctgcttgaaatccctttgg

SEQ ID NO: 3394711 - DNA, 25 bp, Homo sapien
attagtcacagcaagaccggcccat

SEQ ID NO: 3394712 - DNA, 25 bp, Homo sapien
caaccaatcatcttattagtcacag

SEQ ID NO: 3394713 - DNA, 25 bp, Homo sapien
taatgaacaaccataaagaggatat

SEQ ID NO: 3394714 - DNA, 25 bp, Homo sapien
cttgttgattattatcagcaagtcc

SEQ ID NO: 3394715 - DNA, 25 bp, Homo sapien
aacatgtcagaatcattgagcagat

SEQ ID NO: 3394716 - DNA, 25 bp, Homo sapien
gggaagccaacgattctccatactg

SEQ ID NO: 3394717 - DNA, 25 bp, Homo sapien
gtgctggcaggtcatacctgagcag

SEQ ID NO: 3394718 - DNA, 25 bp, Homo sapien
tactgccacggctaggtgctggcag

SEQ ID NO: 3394719 - DNA, 25 bp, Homo sapien
gttacagcatctttgtctattgaag

SEQ ID NO: 3394720 - DNA, 25 bp, Homo sapien
tacagcatctttgtctattgaagga

SEQ ID NO: 3394721 - DNA, 25 bp, Homo sapien
ttgttacagcatctttgtctattga

SEQ ID NO: 3394722 - DNA, 25 bp, Homo sapien
cagcatctttgtctattgaaggaaa

SEQ ID NO: 3394723 - DNA, 25 bp, Homo sapien
gatctccctgccgtgcaaatagtgg

SEQ ID NO: 3394724 - DNA, 25 bp, Homo sapien
tggaaggctagaccacttttggaga

SEQ ID NO: 3394725 - DNA, 25 bp, Homo sapien
ggagagttggcaccagatctccctg

SEQ ID NO: 3394726 - DNA, 25 bp, Homo sapien
agtggaaggctagaccacttttgga

SEQ ID NO: 3394727 - DNA, 25 bp, Homo sapien
ccctgcttatcacaacgaaggaact

SEQ ID NO: 3394728 - DNA, 25 bp, Homo sapien
tatcctgaagtgtattcagggccaa

SEQ ID NO: 3394729 - DNA, 25 bp, Homo sapien
cgaaggaacttatcctgaagtgtat

SEQ ID NO: 3394730 - DNA, 25 bp, Homo sapien
aacagctgtcagagatcgtgggccc

SEQ ID NO: 3394731 - DNA, 25 bp, Homo sapien
ctaagggtggccaaatacccatggg

SEQ ID NO: 3394732 - DNA, 25 bp, Homo sapien
tacccatggggtaatcaatgagcca

SEQ ID NO: 3394733 - DNA, 25 bp, Homo sapien
cccatggggtaatcaatgagccaca

SEQ ID NO: 3394734 - DNA, 25 bp, Homo sapien
catggggtaatcaatgagccacaca

SEQ ID NO: 3394735 - DNA, 25 bp, Homo sapien
gagcggcgaattgcctcatttcggg

SEQ ID NO: 3394736 - DNA, 25 bp, Homo sapien
gactgttggaagcaaacctagcacc

SEQ ID NO: 3394737 - DNA, 25 bp, Homo sapien
tcacagactgtggtgccctgtagcc

SEQ ID NO: 3394738 - DNA, 25 bp, Homo sapien
ggtcgggccacagtgatgcatcaca

SEQ ID NO: 3394739 - DNA, 25 bp, Homo sapien
attgtgctatccctgagtactgtgg

SEQ ID NO: 3394740 - DNA, 25 bp, Homo sapien
tatccctgagtactgtggcattcat

SEQ ID NO: 3394741 - DNA, 25 bp, Homo sapien
ccccattgtgctatccctgagtact

SEQ ID NO: 3394742 - DNA, 25 bp, Homo sapien
tgtgctatccctgagtactgtggca

SEQ ID NO: 3394743 - DNA, 25 bp, Homo sapien
gtatgttgcctcttttggacatgcg

SEQ ID NO: 3394744 - DNA, 25 bp, Homo sapien
tggacatgcggttctgggtcatgaa

SEQ ID NO: 3394745 - DNA, 25 bp, Homo sapien
tgttgcctcttttggacatgcggtt

SEQ ID NO: 3394746 - DNA, 25 bp, Homo sapien
ttaatccttacgctgtatgttgcct

SEQ ID NO: 3394747 - DNA, 25 bp, Homo sapien
caccttacagctcctttgcaagagg

SEQ ID NO: 3394748 - DNA, 25 bp, Homo sapien
tgtcctgaggggtcgctgtgcacct

SEQ ID NO: 3394749 - DNA, 25 bp, Homo sapien
cacagctctatggtcagttctccaa

SEQ ID NO: 3394750 - DNA, 25 bp, Homo sapien
gagggaatacacagctctatggtca

SEQ ID NO: 3394751 - DNA, 25 bp, Homo sapien
gaggacaaattgcagatacctgctc

SEQ ID NO: 3394752 - DNA, 25 bp, Homo sapien
tacctgctcctgcaaagatcaaccg

SEQ ID NO: 3394753 - DNA, 25 bp, Homo sapien
tgctcctgcaaagatcaaccgcctg

SEQ ID NO: 3394754 - DNA, 25 bp, Homo sapien
gcagatacctgctcctgcaaagatc

SEQ ID NO: 3394755 - DNA, 25 bp, Homo sapien
ctgattgtctccacacaagcgtcac

SEQ ID NO: 3394756 - DNA, 25 bp, Homo sapien
tattggacagcctgattgtctccac

SEQ ID NO: 3394757 - DNA, 25 bp, Homo sapien
tctctcttattggacagcctgattg

SEQ ID NO: 3394758 - DNA, 25 bp, Homo sapien
gattgtctccacacaagcgtcacac

SEQ ID NO: 3394759 - DNA, 25 bp, Homo sapien
tgagggaagctaggattgttttaac

SEQ ID NO: 3394760 - DNA, 25 bp, Homo sapien
cagctacaaggtcatgaaaggattt

SEQ ID NO: 3394761 - DNA, 25 bp, Homo sapien
aagagtgtgagggaagctaggattg

SEQ ID NO: 3394762 - DNA, 25 bp, Homo sapien
cctgcgaatgccttggaagagtgtg

SEQ ID NO: 3394763 - DNA, 25 bp, Homo sapien
tttgaccgacatgatttccaccact

SEQ ID NO: 3394764 - DNA, 25 bp, Homo sapien
tcaggcttctctcatagtctcaggt

SEQ ID NO: 3394765 - DNA, 25 bp, Homo sapien
tcctctgaagacgtttgaatccttg

SEQ ID NO: 3394766 - DNA, 25 bp, Homo sapien
tgaatccttggacaactttgaccga

SEQ ID NO: 3394767 - DNA, 25 bp, Homo sapien
tttcgagggtgagagacactggcac

SEQ ID NO: 3394768 - DNA, 25 bp, Homo sapien
tgtgttagggcacactattcctagc

SEQ ID NO: 3394769 - DNA, 25 bp, Homo sapien
ggtaattttgccagagaccaagtcc

SEQ ID NO: 3394770 - DNA, 25 bp, Homo sapien
caaacaggatttggattagacctga

SEQ ID NO: 3394771 - DNA, 25 bp, Homo sapien
gccagtgtccactgacatgaaattg

SEQ ID NO: 3394772 - DNA, 25 bp, Homo sapien
cagtgtccactgacatgaaattgca

SEQ ID NO: 3394773 - DNA, 25 bp, Homo sapien
gtgtccactgacatgaaattgcaca

SEQ ID NO: 3394774 - DNA, 25 bp, Homo sapien
tgccagtgtccactgacatgaaatt

SEQ ID NO: 3394775 - DNA, 25 bp, Homo sapien
cctgtggattcctgcgtggttctca

SEQ ID NO: 3394776 - DNA, 25 bp, Homo sapien
gctgccgtctggcctgcttgctggc

SEQ ID NO: 3394777 - DNA, 25 bp, Homo sapien
ctggcaaaggccatggattcctgtg

SEQ ID NO: 3394778 - DNA, 25 bp, Homo sapien
ctgctgctaaagttgaggtctttcc

SEQ ID NO: 3394779 - DNA, 25 bp, Homo sapien
cccagcgcttggctgcatgtgtgag

SEQ ID NO: 3394780 - DNA, 25 bp, Homo sapien
cttggctgcatgtgtgaggttccga

SEQ ID NO: 3394781 - DNA, 25 bp, Homo sapien
cgaaccctctgaccctttagcactt

SEQ ID NO: 3394782 - DNA, 25 bp, Homo sapien
tttagcacttcccagcgcttggctg

SEQ ID NO: 3394783 - DNA, 25 bp, Homo sapien
ccaggccagtcccaggaaataagac

SEQ ID NO: 3394784 - DNA, 25 bp, Homo sapien
atcccaggccagtcccaggaaataa

SEQ ID NO: 3394785 - DNA, 25 bp, Homo sapien
ctgcaggatcccaggccagtcccag

SEQ ID NO: 3394786 - DNA, 25 bp, Homo sapien
tgcaggatcccaggccagtcccagg

SEQ ID NO: 3394787 - DNA, 25 bp, Homo sapien
actcgctggcccttcttagggtcca

SEQ ID NO: 3394788 - DNA, 25 bp, Homo sapien
cttaggtgtagttgttcgcagttgc

SEQ ID NO: 3394789 - DNA, 25 bp, Homo sapien
ggtgtagttgttcgcagttgctgtc

SEQ ID NO: 3394790 - DNA, 25 bp, Homo sapien
cagttgctgtctgactcgctggccc

SEQ ID NO: 3394791 - DNA, 25 bp, Homo sapien
tgagatctgcaggttctcgccagct

SEQ ID NO: 3394792 - DNA, 25 bp, Homo sapien
gctgcttcccttccgcctggataga

SEQ ID NO: 3394793 - DNA, 25 bp, Homo sapien
ggtcgttttcgctgcagagtggccc

SEQ ID NO: 3394794 - DNA, 25 bp, Homo sapien
gtcaatcgcgacttgtacccgccgg

SEQ ID NO: 3394795 - DNA, 25 bp, Homo sapien
gaacttcaggaagaccaccttccag

SEQ ID NO: 3394796 - DNA, 25 bp, Homo sapien
tgtgcacagatcactggaacttcag

SEQ ID NO: 3394797 - DNA, 25 bp, Homo sapien
aagaccaccttccagggcgtggcag

SEQ ID NO: 3394798 - DNA, 25 bp, Homo sapien
ctgtgtgcacagatcactggaactt

SEQ ID NO: 3394799 - DNA, 25 bp, Homo sapien
tccttgaggtccaacccctgggtca

SEQ ID NO: 3394800 - DNA, 25 bp, Homo sapien
cttgaggtccaacccctgggtcagt

SEQ ID NO: 3394801 - DNA, 25 bp, Homo sapien
catggagatgattagcaggtccttg

SEQ ID NO: 3394802 - DNA, 25 bp, Homo sapien
ttcccatggagatgattagcaggtc

SEQ ID NO: 3394803 - DNA, 25 bp, Homo sapien
ctattgtcggttgatgttatgctga

SEQ ID NO: 3394804 - DNA, 25 bp, Homo sapien
aaatcctgattctgttagctctcag

SEQ ID NO: 3394805 - DNA, 25 bp, Homo sapien
tgtcggttgatgttatgctgagaaa

SEQ ID NO: 3394806 - DNA, 25 bp, Homo sapien
cggttgatgttatgctgagaaagta

SEQ ID NO: 3394807 - DNA, 25 bp, Homo sapien
ggttttctcgttcagaccagctcaa

SEQ ID NO: 3394808 - DNA, 25 bp, Homo sapien
cagtcctagtaggagaggttgcctt

SEQ ID NO: 3394809 - DNA, 25 bp, Homo sapien
gctccagcgaagtgccttaggcatt

SEQ ID NO: 3394810 - DNA, 25 bp, Homo sapien
tcaaggactgtgaacgaaggttttc

SEQ ID NO: 3394811 - DNA, 25 bp, Homo sapien
ttggagccgagactaataacacagg

SEQ ID NO: 3394812 - DNA, 25 bp, Homo sapien
atataagttgtatctgggccagacc

SEQ ID NO: 3394813 - DNA, 25 bp, Homo sapien
caatccatggctgcaacctgagtaa

SEQ ID NO: 3394814 - DNA, 25 bp, Homo sapien
tcacgatactgcttcttagggaggc

SEQ ID NO: 3394815 - DNA, 25 bp, Homo sapien
gaactggatttagttgaatctgtaa

SEQ ID NO: 3394816 - DNA, 25 bp, Homo sapien
gcccagaactggatttagttgaatc

SEQ ID NO: 3394817 - DNA, 25 bp, Homo sapien
cagaactggatttagttgaatctgt

SEQ ID NO: 3394818 - DNA, 25 bp, Homo sapien
ccaggggagaccaatctgggttggg

SEQ ID NO: 3394819 - DNA, 25 bp, Homo sapien
ttttagcattcaaacatggtgacac

SEQ ID NO: 3394820 - DNA, 25 bp, Homo sapien
ttttcagcagttttatccagatctc

SEQ ID NO: 3394821 - DNA, 25 bp, Homo sapien
ttcagcagttttatccagatctcct

SEQ ID NO: 3394822 - DNA, 25 bp, Homo sapien
tcagcagttttatccagatctcctc

SEQ ID NO: 3394823 - DNA, 25 bp, Homo sapien
agcagttttatccagatctcctctt

SEQ ID NO: 3394824 - DNA, 25 bp, Homo sapien
tggcaaagcaaatggcgtaggcctt

SEQ ID NO: 3394825 - DNA, 25 bp, Homo sapien
gcttgccagatccatgcatgctcca

SEQ ID NO: 3394826 - DNA, 25 bp, Homo sapien
ccagctcagtgaaatggacagaagg

SEQ ID NO: 3394827 - DNA, 25 bp, Homo sapien
tggacaatgcggagatggcaaagca

SEQ ID NO: 3394828 - DNA, 25 bp, Homo sapien
ttagaccatttatcacccatcactc

SEQ ID NO: 3394829 - DNA, 25 bp, Homo sapien
caacttaatggccttttcacgaata

SEQ ID NO: 3394830 - DNA, 25 bp, Homo sapien
aaatgattccttccgctgtgcatag

SEQ ID NO: 3394831 - DNA, 25 bp, Homo sapien
taatgttgagttatccagcctgtgt

SEQ ID NO: 3394832 - DNA, 25 bp, Homo sapien
accttaggaatcaaccagactattc

SEQ ID NO: 3394833 - DNA, 25 bp, Homo sapien
ttaggaatcaaccagactattcttt

SEQ ID NO: 3394834 - DNA, 25 bp, Homo sapien
gtacttccttacagagaccttagga

SEQ ID NO: 3394835 - DNA, 25 bp, Homo sapien
ttccttacagagaccttaggaatca

SEQ ID NO: 3394836 - DNA, 25 bp, Homo sapien
ccgcccgcgtctgcgatagggttgc

SEQ ID NO: 3394837 - DNA, 25 bp, Homo sapien
tcaactttgggtgaacttggccggc

SEQ ID NO: 3394838 - DNA, 25 bp, Homo sapien
cggccgcccgcgtctgcgatagggt

SEQ ID NO: 3394839 - DNA, 25 bp, Homo sapien
gcgtctgcgatagggttgcctagta

SEQ ID NO: 3394840 - DNA, 25 bp, Homo sapien
tgtttgacccaatttactcctgaga

SEQ ID NO: 3394841 - DNA, 25 bp, Homo sapien
tcgaaaatggaggtaacgatgccct

SEQ ID NO: 3394842 - DNA, 25 bp, Homo sapien
tttgtgaagtttggagacccagggc

SEQ ID NO: 3394843 - DNA, 25 bp, Homo sapien
taagtctttggaggcactttggtca

SEQ ID NO: 3394844 - DNA, 25 bp, Homo sapien
agagcgcgtgttgggttgaagagga

SEQ ID NO: 3394845 - DNA, 25 bp, Homo sapien
ggtgtctccgagagggacgctccct

SEQ ID NO: 3394846 - DNA, 25 bp, Homo sapien
ggagggttgtgccacaccggccagc

SEQ ID NO: 3394847 - DNA, 25 bp, Homo sapien
actctccagtgagacgaggctccca

SEQ ID NO: 3394848 - DNA, 25 bp, Homo sapien
gagtcagatttagcgaagctcttcg

SEQ ID NO: 3394849 - DNA, 25 bp, Homo sapien
agaatggtatcctcgaccagggcca

SEQ ID NO: 3394850 - DNA, 25 bp, Homo sapien
tgccaaacagagactagacgaaggg

SEQ ID NO: 3394851 - DNA, 25 bp, Homo sapien
agattcgaacactaactcgcgcccg

SEQ ID NO: 3394852 - DNA, 25 bp, Homo sapien
tgtcatttattgaaacgccattctt

SEQ ID NO: 3394853 - DNA, 25 bp, Homo sapien
gaggccggactgcaaccggttgctt

SEQ ID NO: 3394854 - DNA, 25 bp, Homo sapien
cctgggattttatacgcacctctga

SEQ ID NO: 3394855 - DNA, 25 bp, Homo sapien
tgtcaaactgcaactactttgcttc

SEQ ID NO: 3394856 - DNA, 25 bp, Homo sapien
ctaaaggaggtacaggagagcgcct

SEQ ID NO: 3394857 - DNA, 25 bp, Homo sapien
tgctacagatctcggcgctgacagg

SEQ ID NO: 3394858 - DNA, 25 bp, Homo sapien
gccaatcggtggttcagaccaggaa

SEQ ID NO: 3394859 - DNA, 25 bp, Homo sapien
tctttagtcggagaagtccaagtcg

SEQ ID NO: 3394860 - DNA, 25 bp, Homo sapien
gctcagagagactgcggaactcgtc

SEQ ID NO: 3394861 - DNA, 25 bp, Homo sapien
tccaactggacgttgagagacccgg

SEQ ID NO: 3394862 - DNA, 25 bp, Homo sapien
cattatcccgtttgaccagtaagga

SEQ ID NO: 3394863 - DNA, 25 bp, Homo sapien
ttgattgagtcaaaggcccacactg

SEQ ID NO: 3394864 - DNA, 25 bp, Homo sapien
cctgcgctttgccagtgtatcaacg

SEQ ID NO: 3394865 - DNA, 25 bp, Homo sapien
gttgcggctgtagcagcccagctcc

SEQ ID NO: 3394866 - DNA, 25 bp, Homo sapien
cgcgctctgtcagatgcagtggaca

SEQ ID NO: 3394867 - DNA, 25 bp, Homo sapien
ttcgaggccgggatgcctgcgcttt

SEQ ID NO: 3394868 - DNA, 25 bp, Homo sapien
gcggtggcatcagaacagacgagta

SEQ ID NO: 3394869 - DNA, 25 bp, Homo sapien
gaattccagatggtgcgctcaggac

SEQ ID NO: 3394870 - DNA, 25 bp, Homo sapien
tcatgggcctacgtatctgctctgg

SEQ ID NO: 3394871 - DNA, 25 bp, Homo sapien
ggaaattttgcaccgcattcggcag

SEQ ID NO: 3394872 - DNA, 25 bp, Homo sapien
caagggactgacttcattgggatac

SEQ ID NO: 3394873 - DNA, 25 bp, Homo sapien
taacagattctccagtactgcttgg

SEQ ID NO: 3394874 - DNA, 25 bp, Homo sapien
cgattaagctggaatggcggtcaaa

SEQ ID NO: 3394875 - DNA, 25 bp, Homo sapien
aactgacaactattaaactgagggc

SEQ ID NO: 3394876 - DNA, 25 bp, Homo sapien
tatcctggacaaggctgcaaacctg

SEQ ID NO: 3394877 - DNA, 25 bp, Homo sapien
gctgccctgccgctttcataaagtc

SEQ ID NO: 3394878 - DNA, 25 bp, Homo sapien
ggcagagatttatccagaccaacca

SEQ ID NO: 3394879 - DNA, 25 bp, Homo sapien
ggtcagattcagcaaaggtttctct

SEQ ID NO: 3394880 - DNA, 25 bp, Homo sapien
gatggctaatatcgagggacccggc

SEQ ID NO: 3394881 - DNA, 25 bp, Homo sapien
gagaaggacaatctgcagcatgaca

SEQ ID NO: 3394882 - DNA, 25 bp, Homo sapien
gctggcagaccttagtgaatcacgt

SEQ ID NO: 3394883 - DNA, 25 bp, Homo sapien
tcctgcgccagaagtaaacatgtca

SEQ ID NO: 3394884 - DNA, 25 bp, Homo sapien
ttttttctctgctaggtcaccctga

SEQ ID NO: 3394885 - DNA, 25 bp, Homo sapien
ctctgctaggtcaccctgagacatc

SEQ ID NO: 3394886 - DNA, 25 bp, Homo sapien
gattttttctctgctaggtcaccct

SEQ ID NO: 3394887 - DNA, 25 bp, Homo sapien
ttttctctgctaggtcaccctgaga

SEQ ID NO: 3394888 - DNA, 25 bp, Homo sapien
gagccgcacctgtacagatcctgtg

SEQ ID NO: 3394889 - DNA, 25 bp, Homo sapien
gcgtatcatctctgatgggccacat

SEQ ID NO: 3394890 - DNA, 25 bp, Homo sapien
tcctgtggatcccacataatgatcc

SEQ ID NO: 3394891 - DNA, 25 bp, Homo sapien
tgatgaggcatcttcatgtcagcag

SEQ ID NO: 3394892 - DNA, 25 bp, Homo sapien
tcgttaattaatgggcctgcagctg

SEQ ID NO: 3394893 - DNA, 25 bp, Homo sapien
cctgcagctggtggtaccacttgga

SEQ ID NO: 3394894 - DNA, 25 bp, Homo sapien
gtaccacttggatgctcagctccag

SEQ ID NO: 3394895 - DNA, 25 bp, Homo sapien
tgcaggactattcttggaccagatc

SEQ ID NO: 3394896 - DNA, 25 bp, Homo sapien
ttttggcaggtcagccttctcggca

SEQ ID NO: 3394897 - DNA, 25 bp, Homo sapien
ggtccatcttggtgttcagcggcaa

SEQ ID NO: 3394898 - DNA, 25 bp, Homo sapien
tggttcctgccaccccataacatgg

SEQ ID NO: 3394899 - DNA, 25 bp, Homo sapien
tcagcggcaatagtggcagaccctt

SEQ ID NO: 3394900 - DNA, 25 bp, Homo sapien
gctctctgtgactgcgttgtctgtc

SEQ ID NO: 3394901 - DNA, 25 bp, Homo sapien
acagtgggtgtgacggccaggctct

SEQ ID NO: 3394902 - DNA, 25 bp, Homo sapien
tgtgactgcgttgtctgtcttgctt

SEQ ID NO: 3394903 - DNA, 25 bp, Homo sapien
tctggtgactgtgccgggtgggctc

SEQ ID NO: 3394904 - DNA, 25 bp, Homo sapien
gaatcaggtactctaaatcatcaac

SEQ ID NO: 3394905 - DNA, 25 bp, Homo sapien
aattcagatgctttatgaatcaggt

SEQ ID NO: 3394906 - DNA, 25 bp, Homo sapien
gatgctttatgaatcaggtactcta

SEQ ID NO: 3394907 - DNA, 25 bp, Homo sapien
taaatcatcaacaccaccactctta

SEQ ID NO: 3394908 - DNA, 25 bp, Homo sapien
gtgggttgctcctccatctgagcag

SEQ ID NO: 3394909 - DNA, 25 bp, Homo sapien
cagagttcagtctgtgaggacctgg

SEQ ID NO: 3394910 - DNA, 25 bp, Homo sapien
atggaaggtcactggcaaattgggt

SEQ ID NO: 3394911 - DNA, 25 bp, Homo sapien
tgtttccttgaaggtaccagcgtcc

SEQ ID NO: 3394912 - DNA, 25 bp, Homo sapien
ggtgatgatggccaacttggcaaga

SEQ ID NO: 3394913 - DNA, 25 bp, Homo sapien
gaagctgcagggttatgctcaaacc

SEQ ID NO: 3394914 - DNA, 25 bp, Homo sapien
gaaatctgcttctatgacagaggtg

SEQ ID NO: 3394915 - DNA, 25 bp, Homo sapien
tattagcttccaatggccttgcgaa

SEQ ID NO: 3394916 - DNA, 25 bp, Homo sapien
gctccccactgaactcctccttggc

SEQ ID NO: 3394917 - DNA, 25 bp, Homo sapien
agctccccactgaactcctccttgg

SEQ ID NO: 3394918 - DNA, 25 bp, Homo sapien
ctccccactgaactcctccttggcc

SEQ ID NO: 3394919 - DNA, 25 bp, Homo sapien
caagacttagaggtagatgtgaggc

SEQ ID NO: 3394920 - DNA, 25 bp, Homo sapien
ttgcctttaccaataatggccaaga

SEQ ID NO: 3394921 - DNA, 25 bp, Homo sapien
ggcctgtgcttcgaatgcaccataa

SEQ ID NO: 3394922 - DNA, 25 bp, Homo sapien
gaatgcaccataacctttccagaga

SEQ ID NO: 3394923 - DNA, 25 bp, Homo sapien
gctgcttagttgtgcttggtgacac

SEQ ID NO: 3394924 - DNA, 25 bp, Homo sapien
caggattgatgatttggaggagcca

SEQ ID NO: 3394925 - DNA, 25 bp, Homo sapien
taaggagacttgtccacatccccca

SEQ ID NO: 3394926 - DNA, 25 bp, Homo sapien
cagcaaaggccacttaaacttagct

SEQ ID NO: 3394927 - DNA, 25 bp, Homo sapien
tccaagctgtgcgtgcatgccaaac

SEQ ID NO: 3394928 - DNA, 25 bp, Homo sapien
acttccaagctgtgcgtgcatgcca

SEQ ID NO: 3394929 - DNA, 25 bp, Homo sapien
cacttccaagctgtgcgtgcatgcc

SEQ ID NO: 3394930 - DNA, 25 bp, Homo sapien
caagctgtgcgtgcatgccaaacat

SEQ ID NO: 3394931 - DNA, 25 bp, Homo sapien
ggtttgccagcaggaatgagagaca

SEQ ID NO: 3394932 - DNA, 25 bp, Homo sapien
tcactggtgaatgtggtttgccagc

SEQ ID NO: 3394933 - DNA, 25 bp, Homo sapien
aaaagaaggagcgtcaacatgaaga

SEQ ID NO: 3394934 - DNA, 25 bp, Homo sapien
actcattattcaatctcatgggact

SEQ ID NO: 3394935 - DNA, 25 bp, Homo sapien
ggcaaggactctgtgatccaacaga

SEQ ID NO: 3394936 - DNA, 25 bp, Homo sapien
tgttggccctgagtagccatgctgt

SEQ ID NO: 3394937 - DNA, 25 bp, Homo sapien
tcttcccatttgagactatgcagta

SEQ ID NO: 3394938 - DNA, 25 bp, Homo sapien
tatcttctaattggaaggcaaggac

SEQ ID NO: 3394939 - DNA, 25 bp, Homo sapien
catagtcataagaaaatgtatttta

SEQ ID NO: 3394940 - DNA, 25 bp, Homo sapien
tagtcataagaaaatgtattttatg

SEQ ID NO: 3394941 - DNA, 25 bp, Homo sapien
taagaaaatgtattttatgaaatac

SEQ ID NO: 3394942 - DNA, 25 bp, Homo sapien
cataagaaaatgtattttatgaaat

SEQ ID NO: 3394943 - DNA, 25 bp, Homo sapien
tatggtgaatccacattgcctccca

SEQ ID NO: 3394944 - DNA, 25 bp, Homo sapien
tgagttacattggagaaagaagcct

SEQ ID NO: 3394945 - DNA, 25 bp, Homo sapien
gaacacagtgatgctttgagtaact

SEQ ID NO: 3394946 - DNA, 25 bp, Homo sapien
tgtcagaggcacagctcagtatctt

SEQ ID NO: 3394947 - DNA, 25 bp, Homo sapien
ggactcatcctgctgatctaacgct

SEQ ID NO: 3394948 - DNA, 25 bp, Homo sapien
taagacagacattgtacacactggc

SEQ ID NO: 3394949 - DNA, 25 bp, Homo sapien
aaactcttatctctgacttatggtc

SEQ ID NO: 3394950 - DNA, 25 bp, Homo sapien
ctgctgatctaacgcttcataaact

SEQ ID NO: 3394951 - DNA, 25 bp, Homo sapien
taacttgctaggaggttccgctgca

SEQ ID NO: 3394952 - DNA, 25 bp, Homo sapien
gaaatatgtgaagctcacaggagca

SEQ ID NO: 3394953 - DNA, 25 bp, Homo sapien
tgaacttttgctcaagcagctctgg

SEQ ID NO: 3394954 - DNA, 25 bp, Homo sapien
tttggcaaccccacggtgttgtgtg

SEQ ID NO: 3394955 - DNA, 25 bp, Homo sapien
cgcgacgctgctggcgcaactgctt

SEQ ID NO: 3394956 - DNA, 25 bp, Homo sapien
agcggacactccactcgcaagacca

SEQ ID NO: 3394957 - DNA, 25 bp, Homo sapien
tgcaggcccgggcacagcggacact

SEQ ID NO: 3394958 - DNA, 25 bp, Homo sapien
cgcaagaccacgccgaccggaaaag

SEQ ID NO: 3394959 - DNA, 25 bp, Homo sapien
ttcttcactgatgtcgatgaaggcc

SEQ ID NO: 3394960 - DNA, 25 bp, Homo sapien
tcttcactgatgtcgatgaaggccg

SEQ ID NO: 3394961 - DNA, 25 bp, Homo sapien
gtggcggcacccgtagaccgaagca

SEQ ID NO: 3394962 - DNA, 25 bp, Homo sapien
cgtggcggcacccgtagaccgaagc

SEQ ID NO: 3394963 - DNA, 25 bp, Homo sapien
tggcggcacccgtagaccgaagcac

SEQ ID NO: 3394964 - DNA, 25 bp, Homo sapien
gcggcacccgtagaccgaagcacac

SEQ ID NO: 3394965 - DNA, 25 bp, Homo sapien
gcatttgacggacggaagcagacat

SEQ ID NO: 3394966 - DNA, 25 bp, Homo sapien
tactatgtcgtcagaaatgagtccc

SEQ ID NO: 3394967 - DNA, 25 bp, Homo sapien
gcagcggtcccttgcgctactagga

SEQ ID NO: 3394968 - DNA, 25 bp, Homo sapien
cattctcgcgtgtagaacagctgcg

SEQ ID NO: 3394969 - DNA, 25 bp, Homo sapien
cccggcccggcattttgatctttag

SEQ ID NO: 3394970 - DNA, 25 bp, Homo sapien
ttttgatctttagcacaaaattact

SEQ ID NO: 3394971 - DNA, 25 bp, Homo sapien
gcgcccggcccggcattttgatctt

SEQ ID NO: 3394972 - DNA, 25 bp, Homo sapien
gatctttagcacaaaattacttttc

SEQ ID NO: 3394973 - DNA, 25 bp, Homo sapien
cccaagtatatttagttgcctcagg

SEQ ID NO: 3394974 - DNA, 25 bp, Homo sapien
aatgcacaggcattacattttctag

SEQ ID NO: 3394975 - DNA, 25 bp, Homo sapien
gaaagtattaaacctgcagatctga

SEQ ID NO: 3394976 - DNA, 25 bp, Homo sapien
aaggataccattagtaaatgcacag

SEQ ID NO: 3394977 - DNA, 25 bp, Homo sapien
ctggacttccagcatacagcaaaaa

SEQ ID NO: 3394978 - DNA, 25 bp, Homo sapien
cacagctactagaaaagttacagac

SEQ ID NO: 3394979 - DNA, 25 bp, Homo sapien
tagtattgctctcaagtacacacat

SEQ ID NO: 3394980 - DNA, 25 bp, Homo sapien
aatgaacaatagtattgctctcaag

SEQ ID NO: 3394981 - DNA, 25 bp, Homo sapien
ttttcctccatgaggtccagtggct

SEQ ID NO: 3394982 - DNA, 25 bp, Homo sapien
cacaagagccacaggttttcctcca

SEQ ID NO: 3394983 - DNA, 25 bp, Homo sapien
gaggtccagtggctccttagacaca

SEQ ID NO: 3394984 - DNA, 25 bp, Homo sapien
tccatgaggtccagtggctccttag

SEQ ID NO: 3394985 - DNA, 25 bp, Homo sapien
taaaactgactacgaatgacaaagc

SEQ ID NO: 3394986 - DNA, 25 bp, Homo sapien
gaatgacaaagcacaatctcaaatt

SEQ ID NO: 3394987 - DNA, 25 bp, Homo sapien
tgactacgaatgacaaagcacaatc

SEQ ID NO: 3394988 - DNA, 25 bp, Homo sapien
ttataaaactgactacgaatgacaa

SEQ ID NO: 3394989 - DNA, 25 bp, Homo sapien
tagatttcagataagcacgaagctc

SEQ ID NO: 3394990 - DNA, 25 bp, Homo sapien
ttagatttcagataagcacgaagct

SEQ ID NO: 3394991 - DNA, 25 bp, Homo sapien
gatttcagataagcacgaagctcag

SEQ ID NO: 3394992 - DNA, 25 bp, Homo sapien
atttcagataagcacgaagctcagc

SEQ ID NO: 3394993 - DNA, 25 bp, Homo sapien
taatttgagctaaatcaacatgaag

SEQ ID NO: 3394994 - DNA, 25 bp, Homo sapien
atttgagctaaatcaacatgaagtc

SEQ ID NO: 3394995 - DNA, 25 bp, Homo sapien
aatttgagctaaatcaacatgaagt

SEQ ID NO: 3394996 - DNA, 25 bp, Homo sapien
tttgagctaaatcaacatgaagtcc

SEQ ID NO: 3394997 - DNA, 25 bp, Homo sapien
gatttccgaactcaacaattctgaa

SEQ ID NO: 3394998 - DNA, 25 bp, Homo sapien
gagggacgactctataattcacaag

SEQ ID NO: 3394999 - DNA, 25 bp, Homo sapien
tatgcctggcctatgatgtggtttc

SEQ ID NO: 3395000 - DNA, 25 bp, Homo sapien
tccttgcctcagataatgagggacg

SEQ ID NO: 3395001 - DNA, 25 bp, Homo sapien
tgtctggttccaggatcaagagtag

SEQ ID NO: 3395002 - DNA, 25 bp, Homo sapien
aactgcagtctcagagacgggcgtt

SEQ ID NO: 3395003 - DNA, 25 bp, Homo sapien
caccttcgcgaaatttgaccagctt

SEQ ID NO: 3395004 - DNA, 25 bp, Homo sapien
taggctttcaatcaaagcttcttgc

SEQ ID NO: 3395005 - DNA, 25 bp, Homo sapien
cctgtggcaggtaccgttaacaact

SEQ ID NO: 3395006 - DNA, 25 bp, Homo sapien
agctgagagtcaagttccagaattc

SEQ ID NO: 3395007 - DNA, 25 bp, Homo sapien
tgaaaaaagcacctagaaaaactga

SEQ ID NO: 3395008 - DNA, 25 bp, Homo sapien
caggtaccgttaacaacttcatatt

SEQ ID NO: 3395009 - DNA, 25 bp, Homo sapien
taaggctgcaatacactgtgtatct

SEQ ID NO: 3395010 - DNA, 25 bp, Homo sapien
tccatcccgtggaaaaggttgctta

SEQ ID NO: 3395011 - DNA, 25 bp, Homo sapien
ggatgtactggatggccccacaaga

SEQ ID NO: 3395012 - DNA, 25 bp, Homo sapien
gatgctgccactttaataaggctgc

SEQ ID NO: 3395013 - DNA, 25 bp, Homo sapien
actgagtaacacatataaagtataa

SEQ ID NO: 3395014 - DNA, 25 bp, Homo sapien
aaaagtacatttctggctgggcgtg

SEQ ID NO: 3395015 - DNA, 25 bp, Homo sapien
ctacaagagattgacaaaaggagaa

SEQ ID NO: 3395016 - DNA, 25 bp, Homo sapien
tataaaagtacatttctggctgggc

SEQ ID NO: 3395017 - DNA, 25 bp, Homo sapien
caagtgcctcataaagtagtcttaa

SEQ ID NO: 3395018 - DNA, 25 bp, Homo sapien
agtgcctcataaagtagtcttaaaa

SEQ ID NO: 3395019 - DNA, 25 bp, Homo sapien
tccacaagtgcctcataaagtagtc

SEQ ID NO: 3395020 - DNA, 25 bp, Homo sapien
tacaatccacaagtgcctcataaag

SEQ ID NO: 3395021 - DNA, 25 bp, Homo sapien
gagagttctgtaaagcccagtgccc

SEQ ID NO: 3395022 - DNA, 25 bp, Homo sapien
caggttgtgtggtaatcagagaccc

SEQ ID NO: 3395023 - DNA, 25 bp, Homo sapien
tgtgtgctcaaccacacaaggctga

SEQ ID NO: 3395024 - DNA, 25 bp, Homo sapien
ccagtgcccatccaacagtgaagaa

SEQ ID NO: 3395025 - DNA, 25 bp, Homo sapien
gtggtaacccgcatcttaaatgtag

SEQ ID NO: 3395026 - DNA, 25 bp, Homo sapien
ggctgtaatgcactacaattgcacc

SEQ ID NO: 3395027 - DNA, 25 bp, Homo sapien
cagaaataccactgtaggcatggct

SEQ ID NO: 3395028 - DNA, 25 bp, Homo sapien
gcaaaatcagcaggaactgtatcat

SEQ ID NO: 3395029 - DNA, 25 bp, Homo sapien
tgctgatgacattataacggtgact

SEQ ID NO: 3395030 - DNA, 25 bp, Homo sapien
atttaatcaaagcaacaagggcaga

SEQ ID NO: 3395031 - DNA, 25 bp, Homo sapien
gcaagtaagctgagaccaaaatgat

SEQ ID NO: 3395032 - DNA, 25 bp, Homo sapien
aaaggccgctttatgtacagtggga

SEQ ID NO: 3395033 - DNA, 25 bp, Homo sapien
tcgagcctgggaagcattgtcctct

SEQ ID NO: 3395034 - DNA, 25 bp, Homo sapien
tgtaacttccgagcaattccaccat

SEQ ID NO: 3395035 - DNA, 25 bp, Homo sapien
gcatcaactcgagcctgggaagcat

SEQ ID NO: 3395036 - DNA, 25 bp, Homo sapien
gtcctctgtgtaacttccgagcaat

SEQ ID NO: 3395037 - DNA, 25 bp, Homo sapien
caaaccctcatcagagtaacgttta

SEQ ID NO: 3395038 - DNA, 25 bp, Homo sapien
tgtcaaaccctcatcagagtaacgt

SEQ ID NO: 3395039 - DNA, 25 bp, Homo sapien
ccctcatcagagtaacgtttaacat

SEQ ID NO: 3395040 - DNA, 25 bp, Homo sapien
tcatcagagtaacgtttaacattac

SEQ ID NO: 3395041 - DNA, 25 bp, Homo sapien
gaggcagcctgacctcaaagtcaag

SEQ ID NO: 3395042 - DNA, 25 bp, Homo sapien
ctacaggattgggttaagacaggcc

SEQ ID NO: 3395043 - DNA, 25 bp, Homo sapien
tgtagaggtccacacaaagcaatga

SEQ ID NO: 3395044 - DNA, 25 bp, Homo sapien
tctggatcactggtagttgcaaaca

SEQ ID NO: 3395045 - DNA, 25 bp, Homo sapien
catgaataagctcgccttccaaaaa

SEQ ID NO: 3395046 - DNA, 25 bp, Homo sapien
gaaatgcatttggatctttcaatgc

SEQ ID NO: 3395047 - DNA, 25 bp, Homo sapien
atcatgaataagctcgccttccaaa

SEQ ID NO: 3395048 - DNA, 25 bp, Homo sapien
gatctttcaatgctcgtacaataca

SEQ ID NO: 3395049 - DNA, 25 bp, Homo sapien
ctgcttcagtatgtaaaatttagga

SEQ ID NO: 3395050 - DNA, 25 bp, Homo sapien
tctgttcctgatataaaaagaatac

SEQ ID NO: 3395051 - DNA, 25 bp, Homo sapien
tatgtctgttcctgatataaaaaga

SEQ ID NO: 3395052 - DNA, 25 bp, Homo sapien
tgtctgttcctgatataaaaagaat

SEQ ID NO: 3395053 - DNA, 25 bp, Homo sapien
ctgtttcatcaaattaccaaaccat

SEQ ID NO: 3395054 - DNA, 25 bp, Homo sapien
taaagatactgactcctacattttg

SEQ ID NO: 3395055 - DNA, 25 bp, Homo sapien
tctgctttcacatggctcactttta

SEQ ID NO: 3395056 - DNA, 25 bp, Homo sapien
aagataccatcaatacagaattcag

SEQ ID NO: 3395057 - DNA, 25 bp, Homo sapien
atgatgccaatttagcactcacaaa

SEQ ID NO: 3395058 - DNA, 25 bp, Homo sapien
tgatgccaatttagcactcacaaaa

SEQ ID NO: 3395059 - DNA, 25 bp, Homo sapien
ttcaagtggttctcttgcctaaggc

SEQ ID NO: 3395060 - DNA, 25 bp, Homo sapien
tgggattacaagtgctaagttgttt

SEQ ID NO: 3395061 - DNA, 25 bp, Homo sapien
tggttctcttgcctaaggctcctga

SEQ ID NO: 3395062 - DNA, 25 bp, Homo sapien
gcagcagtgtgatctgaactcactg

SEQ ID NO: 3395063 - DNA, 25 bp, Homo sapien
tactgaactgatacgctagacaaga

SEQ ID NO: 3395064 - DNA, 25 bp, Homo sapien
caatggaggcacacaatttacaggt

SEQ ID NO: 3395065 - DNA, 25 bp, Homo sapien
tgtatcgtcaagaaccaggaagact

SEQ ID NO: 3395066 - DNA, 25 bp, Homo sapien
ttttctgggtctagtgcacctggca

SEQ ID NO: 3395067 - DNA, 25 bp, Homo sapien
tgctgcattgtgtcaaaagaaattt

SEQ ID NO: 3395068 - DNA, 25 bp, Homo sapien
tcagctccaatctgaagttcttgct

SEQ ID NO: 3395069 - DNA, 25 bp, Homo sapien
gtaagtagtctcatttttgccatat

SEQ ID NO: 3395070 - DNA, 25 bp, Homo sapien
tactgccattcccataaaagtaagt

SEQ ID NO: 3395071 - DNA, 25 bp, Homo sapien
ggttaacacttgaaagatcacttac

SEQ ID NO: 3395072 - DNA, 25 bp, Homo sapien
tcttacaaccacaaatgaaccccta

SEQ ID NO: 3395073 - DNA, 25 bp, Homo sapien
caaatctttgttgtgtaaggctcag

SEQ ID NO: 3395074 - DNA, 25 bp, Homo sapien
ctttgttctacgtgatttcaaggga

SEQ ID NO: 3395075 - DNA, 25 bp, Homo sapien
ctaagttattacttcttcatagaaa

SEQ ID NO: 3395076 - DNA, 25 bp, Homo sapien
taagttattacttcttcatagaaaa

SEQ ID NO: 3395077 - DNA, 25 bp, Homo sapien
taccatctcatataggggaataaac

SEQ ID NO: 3395078 - DNA, 25 bp, Homo sapien
ttcccctaccatctcatatagggga

SEQ ID NO: 3395079 - DNA, 25 bp, Homo sapien
ccatctcatataggggaataaacta

SEQ ID NO: 3395080 - DNA, 25 bp, Homo sapien
ccctaccatctcatataggggaata

SEQ ID NO: 3395081 - DNA, 25 bp, Homo sapien
cagtagaccattttagttcttacgg

SEQ ID NO: 3395082 - DNA, 25 bp, Homo sapien
ttttgcagtagaccattttagttct

SEQ ID NO: 3395083 - DNA, 25 bp, Homo sapien
gatcaattttgcagtagaccatttt

SEQ ID NO: 3395084 - DNA, 25 bp, Homo sapien
ctgatcaattttgcagtagaccatt

SEQ ID NO: 3395085 - DNA, 25 bp, Homo sapien
actaaatcgttctataaaatgctgc

SEQ ID NO: 3395086 - DNA, 25 bp, Homo sapien
aatcgttctataaaatgctgcaaag

SEQ ID NO: 3395087 - DNA, 25 bp, Homo sapien
tcgttctataaaatgctgcaaagca

SEQ ID NO: 3395088 - DNA, 25 bp, Homo sapien
taaatcgttctataaaatgctgcaa

SEQ ID NO: 3395089 - DNA, 25 bp, Homo sapien
tagtattctagccaatgctcagcca

SEQ ID NO: 3395090 - DNA, 25 bp, Homo sapien
aataagctaatcacattcagtctga

SEQ ID NO: 3395091 - DNA, 25 bp, Homo sapien
taagctaatcacattcagtctgaac

SEQ ID NO: 3395092 - DNA, 25 bp, Homo sapien
cataaaagtcattagtattctagcc

SEQ ID NO: 3395093 - DNA, 25 bp, Homo sapien
gatcctaagccttctaattctcctg

SEQ ID NO: 3395094 - DNA, 25 bp, Homo sapien
tcctaagccttctaattctcctgag

SEQ ID NO: 3395095 - DNA, 25 bp, Homo sapien
ctaagccttctaattctcctgagca

SEQ ID NO: 3395096 - DNA, 25 bp, Homo sapien
taagccttctaattctcctgagcaa

SEQ ID NO: 3395097 - DNA, 25 bp, Homo sapien
ttagaatagtaagagaatttaagaa

SEQ ID NO: 3395098 - DNA, 25 bp, Homo sapien
cagatttgaatccagttaaaagcaa

SEQ ID NO: 3395099 - DNA, 25 bp, Homo sapien
cacagtgttagtcaaccttttagcc

SEQ ID NO: 3395100 - DNA, 25 bp, Homo sapien
gtgttagtcaaccttttagcctctg

SEQ ID NO: 3395101 - DNA, 25 bp, Homo sapien
cagtgttagtcaaccttttagcctc

SEQ ID NO: 3395102 - DNA, 25 bp, Homo sapien
tgtgtcatacagttgttgccactgc

SEQ ID NO: 3395103 - DNA, 25 bp, Homo sapien
gtgtgtcatacagttgttgccactg

SEQ ID NO: 3395104 - DNA, 25 bp, Homo sapien
gtatgacagacattgtgaccccttg

SEQ ID NO: 3395105 - DNA, 25 bp, Homo sapien
gcagagcctcattacgaatcaacta

SEQ ID NO: 3395106 - DNA, 25 bp, Homo sapien
catttgcaggcaatcaagacgacta

SEQ ID NO: 3395107 - DNA, 25 bp, Homo sapien
ctactaaggtagtggaaatcagcca

SEQ ID NO: 3395108 - DNA, 25 bp, Homo sapien
aactctttaatggtggttgggatct

SEQ ID NO: 3395109 - DNA, 25 bp, Homo sapien
tgatggagctatcctcttaacagac

SEQ ID NO: 3395110 - DNA, 25 bp, Homo sapien
gaaaagagaccagaagatttacaca

SEQ ID NO: 3395111 - DNA, 25 bp, Homo sapien
taatgtaaggcagtacccaaagatc

SEQ ID NO: 3395112 - DNA, 25 bp, Homo sapien
ggaacactccttagggagccgtgaa

SEQ ID NO: 3395113 - DNA, 25 bp, Homo sapien
ggttctcttagcagtcctgtgcaga

SEQ ID NO: 3395114 - DNA, 25 bp, Homo sapien
taggatttcagggagggagccaaac

SEQ ID NO: 3395115 - DNA, 25 bp, Homo sapien
aaagaatcaccccaaagatcagagg

SEQ ID NO: 3395116 - DNA, 25 bp, Homo sapien
actaaaattactgcggtaggctgca

SEQ ID NO: 3395117 - DNA, 25 bp, Homo sapien
caggacaagttttgttaagcgcaaa

SEQ ID NO: 3395118 - DNA, 25 bp, Homo sapien
cgaaagaacgaagatacaaggcaat

SEQ ID NO: 3395119 - DNA, 25 bp, Homo sapien
cccctctcagcaagtgggtagttaa

SEQ ID NO: 3395120 - DNA, 25 bp, Homo sapien
cactccattagactgttcccgctta

SEQ ID NO: 3395121 - DNA, 25 bp, Homo sapien
cattagactgttcccgcttatgtgg

SEQ ID NO: 3395122 - DNA, 25 bp, Homo sapien
cccgcttatgtggaattccctgcat

SEQ ID NO: 3395123 - DNA, 25 bp, Homo sapien
tgttcccgcttatgtggaattccct

SEQ ID NO: 3395124 - DNA, 25 bp, Homo sapien
tttgttgatagtcatgaaattagtg

SEQ ID NO: 3395125 - DNA, 25 bp, Homo sapien
aaaccatttgttgatagtcatgaaa

SEQ ID NO: 3395126 - DNA, 25 bp, Homo sapien
tttaaaccatttgttgatagtcatg

SEQ ID NO: 3395127 - DNA, 25 bp, Homo sapien
tcatgaaattagtggcaaactggac

SEQ ID NO: 3395128 - DNA, 25 bp, Homo sapien
tttcatccactactaacaccctagt

SEQ ID NO: 3395129 - DNA, 25 bp, Homo sapien
catctggattattgcagtagcttat

SEQ ID NO: 3395130 - DNA, 25 bp, Homo sapien
tagcttattaagtggtttctcttgc

SEQ ID NO: 3395131 - DNA, 25 bp, Homo sapien
gagtgtatctagcatccaaccactt

SEQ ID NO: 3395132 - DNA, 25 bp, Homo sapien
caatttggtttgatcatacataaag

SEQ ID NO: 3395133 - DNA, 25 bp, Homo sapien
tagctacgatctgattatgaacagg

SEQ ID NO: 3395134 - DNA, 25 bp, Homo sapien
tcatacataaagttacccgtaagtc

SEQ ID NO: 3395135 - DNA, 25 bp, Homo sapien
cccgtaagtcaacatctaaattagc

SEQ ID NO: 3395136 - DNA, 25 bp, Homo sapien
aacgcccttgagatccttgtataag

SEQ ID NO: 3395137 - DNA, 25 bp, Homo sapien
gatgctctaagataacgcccttgag

SEQ ID NO: 3395138 - DNA, 25 bp, Homo sapien
cttgggcatgtcaggatgctctaag

SEQ ID NO: 3395139 - DNA, 25 bp, Homo sapien
gatccttgtataaggctgccttgaa

SEQ ID NO: 3395140 - DNA, 25 bp, Homo sapien
actgcgggtgagtcatgagggtctc

SEQ ID NO: 3395141 - DNA, 25 bp, Homo sapien
gctgcgtaacctacccttccttgct

SEQ ID NO: 3395142 - DNA, 25 bp, Homo sapien
tgtctagaatcttccacgctcccga

SEQ ID NO: 3395143 - DNA, 25 bp, Homo sapien
acctccagctgcgtaacctaccctt

SEQ ID NO: 3395144 - DNA, 25 bp, Homo sapien
ctaatgaccttcaagccggaagtgc

SEQ ID NO: 3395145 - DNA, 25 bp, Homo sapien
taatgaccttcaagccggaagtgcc

SEQ ID NO: 3395146 - DNA, 25 bp, Homo sapien
tgcgctctcagccgccccagcttct

SEQ ID NO: 3395147 - DNA, 25 bp, Homo sapien
ctgcgctctcagccgccccagcttc

SEQ ID NO: 3395148 - DNA, 25 bp, Homo sapien
cggggtgaggtcctgcctcggtccg

SEQ ID NO: 3395149 - DNA, 25 bp, Homo sapien
cgcggggtgaggtcctgcctcggtc

SEQ ID NO: 3395150 - DNA, 25 bp, Homo sapien
gaggaggcggctacctggggacacc

SEQ ID NO: 3395151 - DNA, 25 bp, Homo sapien
gcctggggttcgcagaggggcgccc

SEQ ID NO: 3395152 - DNA, 25 bp, Homo sapien
caaacctcggcgacgctccgggcct

SEQ ID NO: 3395153 - DNA, 25 bp, Homo sapien
gggcctcgctctccgcagggtctgg

SEQ ID NO: 3395154 - DNA, 25 bp, Homo sapien
tctccggcgccctcaaacctcggcg

SEQ ID NO: 3395155 - DNA, 25 bp, Homo sapien
ccgccaggccctcggtctccggcgc

SEQ ID NO: 3395156 - DNA, 25 bp, Homo sapien
ctgagtagaaccagaagcgtaaaca

SEQ ID NO: 3395157 - DNA, 25 bp, Homo sapien
tgagtagaaccagaagcgtaaacat

SEQ ID NO: 3395158 - DNA, 25 bp, Homo sapien
ttcttctcccgcatgcttagaagcc

SEQ ID NO: 3395159 - DNA, 25 bp, Homo sapien
ttctcccgcatgcttagaagccttt

SEQ ID NO: 3395160 - DNA, 25 bp, Homo sapien
gacctcttgcgcaatgaggaaaccc

SEQ ID NO: 3395161 - DNA, 25 bp, Homo sapien
aagcctttggacctcttgcgcaatg

SEQ ID NO: 3395162 - DNA, 25 bp, Homo sapien
cgtattctgttgtagctatgctggc

SEQ ID NO: 3395163 - DNA, 25 bp, Homo sapien
gggctatttgaaccaagcaggaagc

SEQ ID NO: 3395164 - DNA, 25 bp, Homo sapien
cactgggattcctacaatggtcttc

SEQ ID NO: 3395165 - DNA, 25 bp, Homo sapien
tcattacagtggcttacaaggccct

SEQ ID NO: 3395166 - DNA, 25 bp, Homo sapien
tacagaaggcgtctatgtatgaaaa

SEQ ID NO: 3395167 - DNA, 25 bp, Homo sapien
caaagttcttcattgcactctcttt

SEQ ID NO: 3395168 - DNA, 25 bp, Homo sapien
gtgaagagctccagatcaaatctat

SEQ ID NO: 3395169 - DNA, 25 bp, Homo sapien
ctctttctaggttgccgggagtgaa

SEQ ID NO: 3395170 - DNA, 25 bp, Homo sapien
ttccagccaattaacataatcaacc

SEQ ID NO: 3395171 - DNA, 25 bp, Homo sapien
gccaattaacataatcaaccacatt

SEQ ID NO: 3395172 - DNA, 25 bp, Homo sapien
caattaacataatcaaccacattac

SEQ ID NO: 3395173 - DNA, 25 bp, Homo sapien
acatttccagccaattaacataatc

SEQ ID NO: 3395174 - DNA, 25 bp, Homo sapien
ggttggtcctttagctgaatattcc

SEQ ID NO: 3395175 - DNA, 25 bp, Homo sapien
cctttagctgaatattcctgccaaa

SEQ ID NO: 3395176 - DNA, 25 bp, Homo sapien
tgtggttggtcctttagctgaatat

SEQ ID NO: 3395177 - DNA, 25 bp, Homo sapien
tggtcctttagctgaatattcctgc

SEQ ID NO: 3395178 - DNA, 25 bp, Homo sapien
ggatgttgtagcctattacacttag

SEQ ID NO: 3395179 - DNA, 25 bp, Homo sapien
gatagtagccaagtaatccaaaaat

SEQ ID NO: 3395180 - DNA, 25 bp, Homo sapien
acttagtgatacaaagatagtagcc

SEQ ID NO: 3395181 - DNA, 25 bp, Homo sapien
tccagcagcaattaatccagtcaga

SEQ ID NO: 3395182 - DNA, 25 bp, Homo sapien
tacactgtttctatttgggtagcca

SEQ ID NO: 3395183 - DNA, 25 bp, Homo sapien
tactcagccatacttactgggaaga

SEQ ID NO: 3395184 - DNA, 25 bp, Homo sapien
tatttcaatagggatgctgagcttc

SEQ ID NO: 3395185 - DNA, 25 bp, Homo sapien
cagcgtaaactataggacttcttgc

SEQ ID NO: 3395186 - DNA, 25 bp, Homo sapien
ttagaaccactacagaattaagtat

SEQ ID NO: 3395187 - DNA, 25 bp, Homo sapien
tctaacatgtagctatatccaaatt

SEQ ID NO: 3395188 - DNA, 25 bp, Homo sapien
atttggaatacttaacattggttca

SEQ ID NO: 3395189 - DNA, 25 bp, Homo sapien
cattggttcattactattatctaac

SEQ ID NO: 3395190 - DNA, 25 bp, Homo sapien
tatcccacactgatggtatgcctgc

SEQ ID NO: 3395191 - DNA, 25 bp, Homo sapien
tctaaaacccatgtccgccaaagtg

SEQ ID NO: 3395192 - DNA, 25 bp, Homo sapien
gccaaagtgactagttgtatcccac

SEQ ID NO: 3395193 - DNA, 25 bp, Homo sapien
cagccgagtgttctctatcttacaa

SEQ ID NO: 3395194 - DNA, 25 bp, Homo sapien
acttcaatctccccggctcaatcaa

SEQ ID NO: 3395195 - DNA, 25 bp, Homo sapien
ttcaatctccccggctcaatcaatt

SEQ ID NO: 3395196 - DNA, 25 bp, Homo sapien
caacttcaatctccccggctcaatc

SEQ ID NO: 3395197 - DNA, 25 bp, Homo sapien
gcaacttcaatctccccggctcaat

SEQ ID NO: 3395198 - DNA, 25 bp, Homo sapien
tcacagtgccactttacttcctgca

SEQ ID NO: 3395199 - DNA, 25 bp, Homo sapien
tcctctgaaactcagagagttgctg

SEQ ID NO: 3395200 - DNA, 25 bp, Homo sapien
gaagaatttcttgggacaatagatg

SEQ ID NO: 3395201 - DNA, 25 bp, Homo sapien
tataataacacacccggaagacatg

SEQ ID NO: 3395202 - DNA, 25 bp, Homo sapien
taaatccttttgtgtgcccaggata

SEQ ID NO: 3395203 - DNA, 25 bp, Homo sapien
cataagaaggtaatcctgcatcctc

SEQ ID NO: 3395204 - DNA, 25 bp, Homo sapien
cacagaaggcggcaatggagacaag

SEQ ID NO: 3395205 - DNA, 25 bp, Homo sapien
tgtgttttctggtcagcgccactgc

SEQ ID NO: 3395206 - DNA, 25 bp, Homo sapien
gagatgggagagacatagatttttt

SEQ ID NO: 3395207 - DNA, 25 bp, Homo sapien
tgagatgggagagacatagattttt

SEQ ID NO: 3395208 - DNA, 25 bp, Homo sapien
gtgagatgggagagacatagatttt

SEQ ID NO: 3395209 - DNA, 25 bp, Homo sapien
ggcatgccccatgacgcctaggtaa

SEQ ID NO: 3395210 - DNA, 25 bp, Homo sapien
tgatcaagttcaggtccaagatgca

SEQ ID NO: 3395211 - DNA, 25 bp, Homo sapien
tgcccggcctatcaaataacacaaa

SEQ ID NO: 3395212 - DNA, 25 bp, Homo sapien
gaacttctgtggtacagtacatgga

SEQ ID NO: 3395213 - DNA, 25 bp, Homo sapien
cctataataaaacatgactgacagc

SEQ ID NO: 3395214 - DNA, 25 bp, Homo sapien
caagagttaagaactaaactctgca

SEQ ID NO: 3395215 - DNA, 25 bp, Homo sapien
gactgctgtgcaataatttaacata

SEQ ID NO: 3395216 - DNA, 25 bp, Homo sapien
tactgaccccactacctataataaa

SEQ ID NO: 3395217 - DNA, 25 bp, Homo sapien
taatagcctggcaaaaacataaagc

SEQ ID NO: 3395218 - DNA, 25 bp, Homo sapien
gcagtctcactcctgtaaaaattat

SEQ ID NO: 3395219 - DNA, 25 bp, Homo sapien
tgtgtgcatatactccagaaattta

SEQ ID NO: 3395220 - DNA, 25 bp, Homo sapien
cccacccagataaatttgtgtgcat

SEQ ID NO: 3395221 - DNA, 25 bp, Homo sapien
taaagtatcatgatctccacattgg

SEQ ID NO: 3395222 - DNA, 25 bp, Homo sapien
gcaaaactttgacacagcagtccag

SEQ ID NO: 3395223 - DNA, 25 bp, Homo sapien
attagccaggtgtaccgaggtgcac

SEQ ID NO: 3395224 - DNA, 25 bp, Homo sapien
taacactaatcaattgccaggagac

SEQ ID NO: 3395225 - DNA, 25 bp, Homo sapien
taaaaagtctcttgtacgtctagga

SEQ ID NO: 3395226 - DNA, 25 bp, Homo sapien
cgtctaggaagagtacacacacata

SEQ ID NO: 3395227 - DNA, 25 bp, Homo sapien
ctaagacatggaggacactgttgct

SEQ ID NO: 3395228 - DNA, 25 bp, Homo sapien
gaaatgctagagattcccctaatag

SEQ ID NO: 3395229 - DNA, 25 bp, Homo sapien
gagcttcaagaaacatacttgatca

SEQ ID NO: 3395230 - DNA, 25 bp, Homo sapien
atgaatggtttcgttgatcaagggc

SEQ ID NO: 3395231 - DNA, 25 bp, Homo sapien
tcatcaattttgtgcggagaggtag

SEQ ID NO: 3395232 - DNA, 25 bp, Homo sapien
tctgagctacggatatggagggact

SEQ ID NO: 3395233 - DNA, 25 bp, Homo sapien
ggatttttctcgctctgggtttcag

SEQ ID NO: 3395234 - DNA, 25 bp, Homo sapien
gatttttctcgctctgggtttcaga

SEQ ID NO: 3395235 - DNA, 25 bp, Homo sapien
gggatttttctcgctctgggtttca

SEQ ID NO: 3395236 - DNA, 25 bp, Homo sapien
ttccgcagcccggaagggagctgtc

SEQ ID NO: 3395237 - DNA, 25 bp, Homo sapien
cagtactcagttccctgatcgcgat

SEQ ID NO: 3395238 - DNA, 25 bp, Homo sapien
tagccgggtcaacgctttgcttgga

SEQ ID NO: 3395239 - DNA, 25 bp, Homo sapien
ggagctcactatttgacccttcggg

SEQ ID NO: 3395240 - DNA, 25 bp, Homo sapien
gctcggggttcgtacgcccaggctg

SEQ ID NO: 3395241 - DNA, 25 bp, Homo sapien
cctagtcaatgcaaaaagctacttg

SEQ ID NO: 3395242 - DNA, 25 bp, Homo sapien
aatgcggcacaaatacctatcatgc

SEQ ID NO: 3395243 - DNA, 25 bp, Homo sapien
gggaagtcatttcgtgttactctga

SEQ ID NO: 3395244 - DNA, 25 bp, Homo sapien
aataatgggtgaagtgccaaacgtc

SEQ ID NO: 3395245 - DNA, 25 bp, Homo sapien
tcacaactagtactcatttgcacct

SEQ ID NO: 3395246 - DNA, 25 bp, Homo sapien
tgacagacaggctaattctttatgg

SEQ ID NO: 3395247 - DNA, 25 bp, Homo sapien
cagacaggctaattctttatggata

SEQ ID NO: 3395248 - DNA, 25 bp, Homo sapien
tacatcatcacaactagtactcatt

SEQ ID NO: 3395249 - DNA, 25 bp, Homo sapien
cccttactttctggtgcatattcaa

SEQ ID NO: 3395250 - DNA, 25 bp, Homo sapien
atttccattcccttactttctggtg

SEQ ID NO: 3395251 - DNA, 25 bp, Homo sapien
aatatttccattcccttactttctg

SEQ ID NO: 3395252 - DNA, 25 bp, Homo sapien
cttactttctggtgcatattcaaat

SEQ ID NO: 3395253 - DNA, 25 bp, Homo sapien
gaaaacatataccattgcacaaagc

SEQ ID NO: 3395254 - DNA, 25 bp, Homo sapien
catgagataccttaacaagtcagtc

SEQ ID NO: 3395255 - DNA, 25 bp, Homo sapien
tgcacaaagcaacaaggagtgaggg

SEQ ID NO: 3395256 - DNA, 25 bp, Homo sapien
gaatttaatacaggccagtgcgagg

SEQ ID NO: 3395257 - DNA, 25 bp, Homo sapien
taagtatgtattaagcaccaactat

SEQ ID NO: 3395258 - DNA, 25 bp, Homo sapien
catgatataagtatgtattaagcac

SEQ ID NO: 3395259 - DNA, 25 bp, Homo sapien
tcttggtcccaactacagggtagag

SEQ ID NO: 3395260 - DNA, 25 bp, Homo sapien
gggaatggcattagaggctgcaaca

SEQ ID NO: 3395261 - DNA, 25 bp, Homo sapien
gagatggccactacattttaatgag

SEQ ID NO: 3395262 - DNA, 25 bp, Homo sapien
ggtaacactgccttaacaattgcag

SEQ ID NO: 3395263 - DNA, 25 bp, Homo sapien
ggaagaaacaagtagtagcccatat

SEQ ID NO: 3395264 - DNA, 25 bp, Homo sapien
taactcaaggagatacaggtaacac

SEQ ID NO: 3395265 - DNA, 25 bp, Homo sapien
cttctggacataagcaatggagtaa

SEQ ID NO: 3395266 - DNA, 25 bp, Homo sapien
aacaggatttgctgagggactcaat

SEQ ID NO: 3395267 - DNA, 25 bp, Homo sapien
gttctaagcagggtaatgacattac

SEQ ID NO: 3395268 - DNA, 25 bp, Homo sapien
tcatggatggctctaaccttctgga

SEQ ID NO: 3395269 - DNA, 25 bp, Homo sapien
tatactcaatgtgctgttctttcct

SEQ ID NO: 3395270 - DNA, 25 bp, Homo sapien
gattcaaatgtatgggtgctacgaa

SEQ ID NO: 3395271 - DNA, 25 bp, Homo sapien
tatcctgttgtaacggtactatact

SEQ ID NO: 3395272 - DNA, 25 bp, Homo sapien
ccaatgaaatatgtataggttgcct

SEQ ID NO: 3395273 - DNA, 25 bp, Homo sapien
tgaagaagggatcttaagcaagccc

SEQ ID NO: 3395274 - DNA, 25 bp, Homo sapien
ggtagtagttaacggtcagacatgg

SEQ ID NO: 3395275 - DNA, 25 bp, Homo sapien
ccttgtgggcacaatgagtctggat

SEQ ID NO: 3395276 - DNA, 25 bp, Homo sapien
gaagaccagcatattgtgagtgtac

SEQ ID NO: 3395277 - DNA, 25 bp, Homo sapien
tttaaaatcaattacctgagatgca

SEQ ID NO: 3395278 - DNA, 25 bp, Homo sapien
taaaatcaattacctgagatgcaga

SEQ ID NO: 3395279 - DNA, 25 bp, Homo sapien
aaaatcaattacctgagatgcagat

SEQ ID NO: 3395280 - DNA, 25 bp, Homo sapien
atcaattacctgagatgcagattta

SEQ ID NO: 3395281 - DNA, 25 bp, Homo sapien
tgggaagacttcctctaggacatga

SEQ ID NO: 3395282 - DNA, 25 bp, Homo sapien
aattctgtgacttagaggctagcca

SEQ ID NO: 3395283 - DNA, 25 bp, Homo sapien
caataaagcacatacggtcagcagc

SEQ ID NO: 3395284 - DNA, 25 bp, Homo sapien
gcaactggcgcataatgaatgctga

SEQ ID NO: 3395285 - DNA, 25 bp, Homo sapien
tatattcatccagccgagcgcggtg

SEQ ID NO: 3395286 - DNA, 25 bp, Homo sapien
aaaatggtcactcatccatgtaaat

SEQ ID NO: 3395287 - DNA, 25 bp, Homo sapien
ttattaggtaatgaaaatgctctag

SEQ ID NO: 3395288 - DNA, 25 bp, Homo sapien
gaaaagactgctactgggtatgtgg

SEQ ID NO: 3395289 - DNA, 25 bp, Homo sapien
cacccaacctcaattgcagtggcat

SEQ ID NO: 3395290 - DNA, 25 bp, Homo sapien
tccggtcacccaacctcaattgcag

SEQ ID NO: 3395291 - DNA, 25 bp, Homo sapien
cggtcacccaacctcaattgcagtg

SEQ ID NO: 3395292 - DNA, 25 bp, Homo sapien
actccggtcacccaacctcaattgc

SEQ ID NO: 3395293 - DNA, 25 bp, Homo sapien
gaatccagggcaactaaattataag

SEQ ID NO: 3395294 - DNA, 25 bp, Homo sapien
aaattataagatgtcccaaattctg

SEQ ID NO: 3395295 - DNA, 25 bp, Homo sapien
agaatccagggcaactaaattataa

SEQ ID NO: 3395296 - DNA, 25 bp, Homo sapien
tataagatgtcccaaattctggatt

SEQ ID NO: 3395297 - DNA, 25 bp, Homo sapien
gattcgtggatcaaacacagtctga

SEQ ID NO: 3395298 - DNA, 25 bp, Homo sapien
ctggacaacagagaggtgaattcat

SEQ ID NO: 3395299 - DNA, 25 bp, Homo sapien
aatttcctgacctatagattcgtgg

SEQ ID NO: 3395300 - DNA, 25 bp, Homo sapien
caggctctacttctggcttacagtg

SEQ ID NO: 3395301 - DNA, 25 bp, Homo sapien
gctgaggtgtgggagcatatccagg

SEQ ID NO: 3395302 - DNA, 25 bp, Homo sapien
gtttcagagtgtgagggatgtcctt

SEQ ID NO: 3395303 - DNA, 25 bp, Homo sapien
aaggagatctgtttcagagtgtgag

SEQ ID NO: 3395304 - DNA, 25 bp, Homo sapien
gggagcatatccaggaagctgatga

SEQ ID NO: 3395305 - DNA, 25 bp, Homo sapien
tgttcacactagtatcaaatattcc

SEQ ID NO: 3395306 - DNA, 25 bp, Homo sapien
ttcacactagtatcaaatattccag

SEQ ID NO: 3395307 - DNA, 25 bp, Homo sapien
cactgttcacactagtatcaaatat

SEQ ID NO: 3395308 - DNA, 25 bp, Homo sapien
cacactagtatcaaatattccagaa

SEQ ID NO: 3395309 - DNA, 25 bp, Homo sapien
aattgtggtaagagagtagttcctg

SEQ ID NO: 3395310 - DNA, 25 bp, Homo sapien
agcagcctgagcagttcgggattca

SEQ ID NO: 3395311 - DNA, 25 bp, Homo sapien
tggagccctgaattgtggtaagaga

SEQ ID NO: 3395312 - DNA, 25 bp, Homo sapien
agagtagttcctgaagcagcagcct

SEQ ID NO: 3395313 - DNA, 25 bp, Homo sapien
tgcccaggcgctcaaatgccaaagc

SEQ ID NO: 3395314 - DNA, 25 bp, Homo sapien
tgcctgaattgactgggtacctgaa

SEQ ID NO: 3395315 - DNA, 25 bp, Homo sapien
ggcaaaggtccagtagcaaacagct

SEQ ID NO: 3395316 - DNA, 25 bp, Homo sapien
tggaatctccaattgggctacagga

SEQ ID NO: 3395317 - DNA, 25 bp, Homo sapien
tgtctggctaactggtgataaaccc

SEQ ID NO: 3395318 - DNA, 25 bp, Homo sapien
gataaaaggcttggtagctgcgctg

SEQ ID NO: 3395319 - DNA, 25 bp, Homo sapien
tagaataaatttgtgcttggcccga

SEQ ID NO: 3395320 - DNA, 25 bp, Homo sapien
gctgttaatgttagggactcccctg

SEQ ID NO: 3395321 - DNA, 25 bp, Homo sapien
gatgcttgtggctgcaacacctgta

SEQ ID NO: 3395322 - DNA, 25 bp, Homo sapien
tatttgatcgtgctgttcctggacc

SEQ ID NO: 3395323 - DNA, 25 bp, Homo sapien
aacacgctgtgcttgtaaagatgcc

SEQ ID NO: 3395324 - DNA, 25 bp, Homo sapien
gaaatataattctgggtcgggctag

SEQ ID NO: 3395325 - DNA, 25 bp, Homo sapien
catttcagccaagtccattttatcc

SEQ ID NO: 3395326 - DNA, 25 bp, Homo sapien
gactatatagctctaacattctact

SEQ ID NO: 3395327 - DNA, 25 bp, Homo sapien
tgagtgctgttcgtcagtttggcct

SEQ ID NO: 3395328 - DNA, 25 bp, Homo sapien
aacataccagtcactttgaatgaaa

SEQ ID NO: 3395329 - DNA, 25 bp, Homo sapien
catatgaagtagagtggagaggttc

SEQ ID NO: 3395330 - DNA, 25 bp, Homo sapien
gaggaagtagtagcagtaccagtag

SEQ ID NO: 3395331 - DNA, 25 bp, Homo sapien
taccagtagtattggcagttgggct

SEQ ID NO: 3395332 - DNA, 25 bp, Homo sapien
tcttgcttaactgcacccacagtgg

SEQ ID NO: 3395333 - DNA, 25 bp, Homo sapien
gaagaccatcaagttcaatgggctt

SEQ ID NO: 3395334 - DNA, 25 bp, Homo sapien
tcatctgtaaaaccttctatggcaa

SEQ ID NO: 3395335 - DNA, 25 bp, Homo sapien
ccacaaattcatcacgctctctgta

SEQ ID NO: 3395336 - DNA, 25 bp, Homo sapien
ttaaaagtctctatgtcttctatct

SEQ ID NO: 3395337 - DNA, 25 bp, Homo sapien
tcacgctctctgtattggccttctc

SEQ ID NO: 3395338 - DNA, 25 bp, Homo sapien
tttacactggtgaacactgacatca

SEQ ID NO: 3395339 - DNA, 25 bp, Homo sapien
ctttacactggtgaacactgacatc

SEQ ID NO: 3395340 - DNA, 25 bp, Homo sapien
ttacactggtgaacactgacatcac

SEQ ID NO: 3395341 - DNA, 25 bp, Homo sapien
tgaccatctcgaatttcaggaacaa

SEQ ID NO: 3395342 - DNA, 25 bp, Homo sapien
ctttgaccatctcgaatttcaggaa

SEQ ID NO: 3395343 - DNA, 25 bp, Homo sapien
agcagcaaattctctttgaccatct

SEQ ID NO: 3395344 - DNA, 25 bp, Homo sapien
ttccaaatagctggaggttcttttc

SEQ ID NO: 3395345 - DNA, 25 bp, Homo sapien
ttagaacacactctgacatattcct

SEQ ID NO: 3395346 - DNA, 25 bp, Homo sapien
ctgcaatgttataaacaaacttcat

SEQ ID NO: 3395347 - DNA, 25 bp, Homo sapien
gcaatgttataaacaaacttcatta

SEQ ID NO: 3395348 - DNA, 25 bp, Homo sapien
ataaacaaacttcattaacacactg

SEQ ID NO: 3395349 - DNA, 25 bp, Homo sapien
tgttataaacaaacttcattaacac

SEQ ID NO: 3395350 - DNA, 25 bp, Homo sapien
gatgagtcagattgggatgatgaaa

SEQ ID NO: 3395351 - DNA, 25 bp, Homo sapien
gatgctagaggatcagaagttttac

SEQ ID NO: 3395352 - DNA, 25 bp, Homo sapien
gctactacttggcttagcttgaaca

SEQ ID NO: 3395353 - DNA, 25 bp, Homo sapien
cactactactagtatggatctcagg

SEQ ID NO: 3395354 - DNA, 25 bp, Homo sapien
gaaccgtcatgctttcctggtggga

SEQ ID NO: 3395355 - DNA, 25 bp, Homo sapien
taggttagaggttaccagtagctgg

SEQ ID NO: 3395356 - DNA, 25 bp, Homo sapien
ccatgcatggatgagagatatgtaa

SEQ ID NO: 3395357 - DNA, 25 bp, Homo sapien
tctgcttcaggtctatgcctccaaa

SEQ ID NO: 3395358 - DNA, 25 bp, Homo sapien
tagctcttaaaggtttccttcattg

SEQ ID NO: 3395359 - DNA, 25 bp, Homo sapien
caaaaagcgagtgacaaagggagcg

SEQ ID NO: 3395360 - DNA, 25 bp, Homo sapien
gctcttaaaggtttccttcattgct

SEQ ID NO: 3395361 - DNA, 25 bp, Homo sapien
ttgtgttcaaaaagcgagtgacaaa

SEQ ID NO: 3395362 - DNA, 25 bp, Homo sapien
taaggcttgcattgtgtcagggtcc

SEQ ID NO: 3395363 - DNA, 25 bp, Homo sapien
aggcttgcattgtgtcagggtccaa

SEQ ID NO: 3395364 - DNA, 25 bp, Homo sapien
tctaaggcttgcattgtgtcagggt

SEQ ID NO: 3395365 - DNA, 25 bp, Homo sapien
tctctaaggcttgcattgtgtcagg

SEQ ID NO: 3395366 - DNA, 25 bp, Homo sapien
aagtctctttcggttatcatttagc

SEQ ID NO: 3395367 - DNA, 25 bp, Homo sapien
tctttcggttatcatttagcatgcc

SEQ ID NO: 3395368 - DNA, 25 bp, Homo sapien
ggttatcatttagcatgccatctat

SEQ ID NO: 3395369 - DNA, 25 bp, Homo sapien
ttcggttatcatttagcatgccatc

SEQ ID NO: 3395370 - DNA, 25 bp, Homo sapien
caaatagaatttaaagtctaaagat

SEQ ID NO: 3395371 - DNA, 25 bp, Homo sapien
gggtttaaacatggtcataagctct

SEQ ID NO: 3395372 - DNA, 25 bp, Homo sapien
tctgagccaactctatgacctgctt

SEQ ID NO: 3395373 - DNA, 25 bp, Homo sapien
tatacatacacaggttggggtttaa

SEQ ID NO: 3395374 - DNA, 25 bp, Homo sapien
ttatttaagcaacagcacaccacac

SEQ ID NO: 3395375 - DNA, 25 bp, Homo sapien
tcgagtaattattgttagttcagga

SEQ ID NO: 3395376 - DNA, 25 bp, Homo sapien
gctttagaatctcgagtaattattg

SEQ ID NO: 3395377 - DNA, 25 bp, Homo sapien
tagaatctcgagtaattattgttag

SEQ ID NO: 3395378 - DNA, 25 bp, Homo sapien
aatctcgagtaattattgttagttc

SEQ ID NO: 3395379 - DNA, 25 bp, Homo sapien
tatgcctgatactgtgctatagaaa

SEQ ID NO: 3395380 - DNA, 25 bp, Homo sapien
gagccattgtgcttagccctgaata

SEQ ID NO: 3395381 - DNA, 25 bp, Homo sapien
acatgagcacgagatgatttcttcc

SEQ ID NO: 3395382 - DNA, 25 bp, Homo sapien
ttcctcaggccagtgacgcttattc

SEQ ID NO: 3395383 - DNA, 25 bp, Homo sapien
tccttacatatcagataaacatggt

SEQ ID NO: 3395384 - DNA, 25 bp, Homo sapien
gtattttctctggatcgacagcaaa

SEQ ID NO: 3395385 - DNA, 25 bp, Homo sapien
catggtacttataatgatggagtga

SEQ ID NO: 3395386 - DNA, 25 bp, Homo sapien
ttttctctggatcgacagcaaactc

SEQ ID NO: 3395387 - DNA, 25 bp, Homo sapien
gaggctcgggtaaatctgagcacaa

SEQ ID NO: 3395388 - DNA, 25 bp, Homo sapien
tgagcacaaaacatagcagagagac

SEQ ID NO: 3395389 - DNA, 25 bp, Homo sapien
ggctagagtctccttaacattctga

SEQ ID NO: 3395390 - DNA, 25 bp, Homo sapien
tagctcctacaagaggtggtgaggc

SEQ ID NO: 3395391 - DNA, 25 bp, Homo sapien
aaagaaaatcgccaaattagcttat

SEQ ID NO: 3395392 - DNA, 25 bp, Homo sapien
ttatcacatcatatttaagttcaac

SEQ ID NO: 3395393 - DNA, 25 bp, Homo sapien
taagttcaactacaagtactggtat

SEQ ID NO: 3395394 - DNA, 25 bp, Homo sapien
tagcttatacttatcacatcatatt

SEQ ID NO: 3395395 - DNA, 25 bp, Homo sapien
agaggtcctccacccattttacatt

SEQ ID NO: 3395396 - DNA, 25 bp, Homo sapien
aatttcctcctgtcctaaatcttca

SEQ ID NO: 3395397 - DNA, 25 bp, Homo sapien
tcaaagaggtcctccacccatttta

SEQ ID NO: 3395398 - DNA, 25 bp, Homo sapien
ttcctcctgtcctaaatcttcattt

SEQ ID NO: 3395399 - DNA, 25 bp, Homo sapien
agttccatgatggaagcggccggcc

SEQ ID NO: 3395400 - DNA, 25 bp, Homo sapien
gggatttaggtccatttccagagga

SEQ ID NO: 3395401 - DNA, 25 bp, Homo sapien
gaaggccactacttgacatctgatt

SEQ ID NO: 3395402 - DNA, 25 bp, Homo sapien
tcattctggtgtttagccggagtca

SEQ ID NO: 3395403 - DNA, 25 bp, Homo sapien
taaggcctgaggttgacatctttgc

SEQ ID NO: 3395404 - DNA, 25 bp, Homo sapien
tacaaagcgataactcatggacggc

SEQ ID NO: 3395405 - DNA, 25 bp, Homo sapien
tacactaggatgttcgcacaacgga

SEQ ID NO: 3395406 - DNA, 25 bp, Homo sapien
aagacagaccgcgtatttgacagtg

SEQ ID NO: 3395407 - DNA, 25 bp, Homo sapien
atcttctggtgctgctaactgagac

SEQ ID NO: 3395408 - DNA, 25 bp, Homo sapien
gctgctaactgagacgctttgcatt

SEQ ID NO: 3395409 - DNA, 25 bp, Homo sapien
tctggtgctgctaactgagacgctt

SEQ ID NO: 3395410 - DNA, 25 bp, Homo sapien
taactgagacgctttgcatttctcc

SEQ ID NO: 3395411 - DNA, 25 bp, Homo sapien
gcaagaaggctctcaacagtcacca

SEQ ID NO: 3395412 - DNA, 25 bp, Homo sapien
gctctcaacagtcaccagatacagg

SEQ ID NO: 3395413 - DNA, 25 bp, Homo sapien
taaaggcacattgttcatatcacct

SEQ ID NO: 3395414 - DNA, 25 bp, Homo sapien
catgtaaaggcacattgttcatatc

SEQ ID NO: 3395415 - DNA, 25 bp, Homo sapien
cctgagcgcccgtctgttaactgtg

SEQ ID NO: 3395416 - DNA, 25 bp, Homo sapien
ctccccggacgccaactcctccagc

SEQ ID NO: 3395417 - DNA, 25 bp, Homo sapien
ctgagcgcccgtctgttaactgtgc

SEQ ID NO: 3395418 - DNA, 25 bp, Homo sapien
gagcgcccgtctgttaactgtgcgg

SEQ ID NO: 3395419 - DNA, 25 bp, Homo sapien
agagccgagaggttcagcgcagcag

SEQ ID NO: 3395420 - DNA, 25 bp, Homo sapien
tggagagccgagaggttcagcgcag

SEQ ID NO: 3395421 - DNA, 25 bp, Homo sapien
gggctgtggagagccgagaggttca

SEQ ID NO: 3395422 - DNA, 25 bp, Homo sapien
ctgtggagagccgagaggttcagcg

SEQ ID NO: 3395423 - DNA, 25 bp, Homo sapien
gggcaaagaactacacaaattccag

SEQ ID NO: 3395424 - DNA, 25 bp, Homo sapien
gtagcaccgcggagcatatcccgga

SEQ ID NO: 3395425 - DNA, 25 bp, Homo sapien
accagccagagaggaactcgatccg

SEQ ID NO: 3395426 - DNA, 25 bp, Homo sapien
gataccacacttgtcaccggtagca

SEQ ID NO: 3395427 - DNA, 25 bp, Homo sapien
ctcctagcagtctggagaacaaagt

SEQ ID NO: 3395428 - DNA, 25 bp, Homo sapien
gaactcacataaacctctcatccct

SEQ ID NO: 3395429 - DNA, 25 bp, Homo sapien
agctgactcttgactcctagcagtc

SEQ ID NO: 3395430 - DNA, 25 bp, Homo sapien
aattcctgccagtagaactcacata

SEQ ID NO: 3395431 - DNA, 25 bp, Homo sapien
gctgaagactggcatatagatctca

SEQ ID NO: 3395432 - DNA, 25 bp, Homo sapien
gactggcatatagatctcatttctt

SEQ ID NO: 3395433 - DNA, 25 bp, Homo sapien
tagatctcatttcttgtacataaat

SEQ ID NO: 3395434 - DNA, 25 bp, Homo sapien
gtacataaatcaggtccctggtcat

SEQ ID NO: 3395435 - DNA, 25 bp, Homo sapien
tggtgaatctataaaggctgcaact

SEQ ID NO: 3395436 - DNA, 25 bp, Homo sapien
gctgctccatacatacgtggctcca

SEQ ID NO: 3395437 - DNA, 25 bp, Homo sapien
tgtagtccataagcgcttgacacac

SEQ ID NO: 3395438 - DNA, 25 bp, Homo sapien
cactttggctcgaggaatatctaca

SEQ ID NO: 3395439 - DNA, 25 bp, Homo sapien
ctaaactggctgatctgatatcgga

SEQ ID NO: 3395440 - DNA, 25 bp, Homo sapien
tgacttaaataatgcatctgcatac

SEQ ID NO: 3395441 - DNA, 25 bp, Homo sapien
acaaggttgcagagatatttacatg

SEQ ID NO: 3395442 - DNA, 25 bp, Homo sapien
gttggcaggctttaaactcagattt

SEQ ID NO: 3395443 - DNA, 25 bp, Homo sapien
tctacttcttactttgcttcatcct

SEQ ID NO: 3395444 - DNA, 25 bp, Homo sapien
gtcttctacttcttactttgcttca

SEQ ID NO: 3395445 - DNA, 25 bp, Homo sapien
ataaacagctttaatacatagtgca

SEQ ID NO: 3395446 - DNA, 25 bp, Homo sapien
cagctttaatacatagtgcactctt

SEQ ID NO: 3395447 - DNA, 25 bp, Homo sapien
tacaagttgtagtagacgcccaatt

SEQ ID NO: 3395448 - DNA, 25 bp, Homo sapien
cactataagccttgagaatccctcg

SEQ ID NO: 3395449 - DNA, 25 bp, Homo sapien
gaattttaggtacagcctcttgctg

SEQ ID NO: 3395450 - DNA, 25 bp, Homo sapien
tgaccatggtggactgcctcttagg

SEQ ID NO: 3395451 - DNA, 25 bp, Homo sapien
ctattcttccaggtccctttgagga

SEQ ID NO: 3395452 - DNA, 25 bp, Homo sapien
tccagacagctctacattttaacaa

SEQ ID NO: 3395453 - DNA, 25 bp, Homo sapien
tcaaaggatctcaataatctgtcaa

SEQ ID NO: 3395454 - DNA, 25 bp, Homo sapien
taacaggcattctagatatgtaatc

SEQ ID NO: 3395455 - DNA, 25 bp, Homo sapien
tagctatttcaagccatcaggataa

SEQ ID NO: 3395456 - DNA, 25 bp, Homo sapien
ggataaatttctacatgagcttaaa

SEQ ID NO: 3395457 - DNA, 25 bp, Homo sapien
attcagtagctatttcaagccatca

SEQ ID NO: 3395458 - DNA, 25 bp, Homo sapien
caagccatcaggataaatttctaca

SEQ ID NO: 3395459 - DNA, 25 bp, Homo sapien
gcaattccattatgaacgtcagata

SEQ ID NO: 3395460 - DNA, 25 bp, Homo sapien
taagtctgttcggtctggttgctca

SEQ ID NO: 3395461 - DNA, 25 bp, Homo sapien
ggtctggaaggtattctaaacagtc

SEQ ID NO: 3395462 - DNA, 25 bp, Homo sapien
aacagtcaattgctgccgagagcca

SEQ ID NO: 3395463 - DNA, 25 bp, Homo sapien
tcctgggtaaccagaagtttctgca

SEQ ID NO: 3395464 - DNA, 25 bp, Homo sapien
taagcttccggtgaatgagagcagc

SEQ ID NO: 3395465 - DNA, 25 bp, Homo sapien
gagagcagcattatactcctgggta

SEQ ID NO: 3395466 - DNA, 25 bp, Homo sapien
tgaattaatccagatccactcccag

SEQ ID NO: 3395467 - DNA, 25 bp, Homo sapien
atttgctgcaacagccatgaaatac

SEQ ID NO: 3395468 - DNA, 25 bp, Homo sapien
ctgcaacagccatgaaatacagtag

SEQ ID NO: 3395469 - DNA, 25 bp, Homo sapien
gaaggagctgggtagcttctaaagc

SEQ ID NO: 3395470 - DNA, 25 bp, Homo sapien
aaagctatttccgtcttcccattca

SEQ ID NO: 3395471 - DNA, 25 bp, Homo sapien
atgatccattaaaaagagtaccaga

SEQ ID NO: 3395472 - DNA, 25 bp, Homo sapien
caacaatagcttttgagaatatcct

SEQ ID NO: 3395473 - DNA, 25 bp, Homo sapien
taccagaagatctgttttgcctttg

SEQ ID NO: 3395474 - DNA, 25 bp, Homo sapien
tccttttcacaaccattcggttgtc

SEQ ID NO: 3395475 - DNA, 25 bp, Homo sapien
tctgtatggccataagcttaacact

SEQ ID NO: 3395476 - DNA, 25 bp, Homo sapien
caattttatgtagagttccaggaat

SEQ ID NO: 3395477 - DNA, 25 bp, Homo sapien
ggatctcttccgttctgtatggcca

SEQ ID NO: 3395478 - DNA, 25 bp, Homo sapien
atctctatttggatctcttccgttc

SEQ ID NO: 3395479 - DNA, 25 bp, Homo sapien
gacacttatagaattgacctagcaa

SEQ ID NO: 3395480 - DNA, 25 bp, Homo sapien
cagctcatctttggttgtcttctct

SEQ ID NO: 3395481 - DNA, 25 bp, Homo sapien
tagtcacgttgatcaattctctggc

SEQ ID NO: 3395482 - DNA, 25 bp, Homo sapien
tctctgtattgttggaatagtcacg

SEQ ID NO: 3395483 - DNA, 25 bp, Homo sapien
ccacgcttacaaatgtgattggata

SEQ ID NO: 3395484 - DNA, 25 bp, Homo sapien
acagtttcaaatttagagcttccac

SEQ ID NO: 3395485 - DNA, 25 bp, Homo sapien
agagcttccacgcttacaaatgtga

SEQ ID NO: 3395486 - DNA, 25 bp, Homo sapien
caaatttagagcttccacgcttaca

SEQ ID NO: 3395487 - DNA, 25 bp, Homo sapien
gcagcggtcagagcggccgcttctc

SEQ ID NO: 3395488 - DNA, 25 bp, Homo sapien
gaggcgccagcccaatatagggcag

SEQ ID NO: 3395489 - DNA, 25 bp, Homo sapien
tcagtaagcggtgactcgcagctgg

SEQ ID NO: 3395490 - DNA, 25 bp, Homo sapien
catgtcttcgtacggaaaggcggga

SEQ ID NO: 3395491 - DNA, 25 bp, Homo sapien
gcctaggctggacacaagaggctcc

SEQ ID NO: 3395492 - DNA, 25 bp, Homo sapien
gtccggattccgttgtaaacagctg

SEQ ID NO: 3395493 - DNA, 25 bp, Homo sapien
cgaagagatgcctgcgacttggacc

SEQ ID NO: 3395494 - DNA, 25 bp, Homo sapien
taaacagctgttcaggccagcgagg

SEQ ID NO: 3395495 - DNA, 25 bp, Homo sapien
taattaaagggctctaggatgcggc

SEQ ID NO: 3395496 - DNA, 25 bp, Homo sapien
gaagaaactaactctgcctgggagg

SEQ ID NO: 3395497 - DNA, 25 bp, Homo sapien
ggtttcagacatacctgggccccaa

SEQ ID NO: 3395498 - DNA, 25 bp, Homo sapien
gagggcatttcactcagagggcaga

SEQ ID NO: 3395499 - DNA, 25 bp, Homo sapien
tcaaaagaaatgtcaactgatttag

SEQ ID NO: 3395500 - DNA, 25 bp, Homo sapien
aagttttagtcaattcctccactct

SEQ ID NO: 3395501 - DNA, 25 bp, Homo sapien
ggagtttggcagactgtgttctgca

SEQ ID NO: 3395502 - DNA, 25 bp, Homo sapien
acatggaaggtaatcaggtgatcaa

SEQ ID NO: 3395503 - DNA, 25 bp, Homo sapien
ctttttgtaaggcttcatcagcacc

SEQ ID NO: 3395504 - DNA, 25 bp, Homo sapien
ggccttcctcagaatcattggattt

SEQ ID NO: 3395505 - DNA, 25 bp, Homo sapien
ttccacagcatcttcgaggccttcc

SEQ ID NO: 3395506 - DNA, 25 bp, Homo sapien
ttcatttacattggacttgtcaagg

SEQ ID NO: 3395507 - DNA, 25 bp, Homo sapien
caactggtttaatctgaaagtctcc

SEQ ID NO: 3395508 - DNA, 25 bp, Homo sapien
catgttggtgacacctctcgctgtc

SEQ ID NO: 3395509 - DNA, 25 bp, Homo sapien
gaaagtctccatttactacaatttc

SEQ ID NO: 3395510 - DNA, 25 bp, Homo sapien
tcttctactgtcacaaagcgaggag

SEQ ID NO: 3395511 - DNA, 25 bp, Homo sapien
gagccgagatagtgccactacactc

SEQ ID NO: 3395512 - DNA, 25 bp, Homo sapien
ccagcctggacaacagagcgagact

SEQ ID NO: 3395513 - DNA, 25 bp, Homo sapien
ctccagcctggacaacagagcgaga

SEQ ID NO: 3395514 - DNA, 25 bp, Homo sapien
gatcagcctggccagaggttgcagt

SEQ ID NO: 3395515 - DNA, 25 bp, Homo sapien
gatttcccaggcatacttcaactga

SEQ ID NO: 3395516 - DNA, 25 bp, Homo sapien
catacttcaactgagggcatacttt

SEQ ID NO: 3395517 - DNA, 25 bp, Homo sapien
gggtaagatcaatcccagtgatttg

SEQ ID NO: 3395518 - DNA, 25 bp, Homo sapien
atactatgggtttagggtaagatca

SEQ ID NO: 3395519 - DNA, 25 bp, Homo sapien
tcaagcaatcccaaaacgctttatg

SEQ ID NO: 3395520 - DNA, 25 bp, Homo sapien
caagtttgatagcatggtcatatgc

SEQ ID NO: 3395521 - DNA, 25 bp, Homo sapien
gggatcttcacttagctgcacactc

SEQ ID NO: 3395522 - DNA, 25 bp, Homo sapien
tatgtacaatctcctttactctctt

SEQ ID NO: 3395523 - DNA, 25 bp, Homo sapien
catcacaattcactctttgcctcac

SEQ ID NO: 3395524 - DNA, 25 bp, Homo sapien
agcatcacaattcactctttgcctc

SEQ ID NO: 3395525 - DNA, 25 bp, Homo sapien
aagcatcacaattcactctttgcct

SEQ ID NO: 3395526 - DNA, 25 bp, Homo sapien
gcatcacaattcactctttgcctca

SEQ ID NO: 3395527 - DNA, 25 bp, Homo sapien
agttgaataaacactcctaacacac

SEQ ID NO: 3395528 - DNA, 25 bp, Homo sapien
cacaagaagttgaataaacactcct

SEQ ID NO: 3395529 - DNA, 25 bp, Homo sapien
gaagttgaataaacactcctaacac

SEQ ID NO: 3395530 - DNA, 25 bp, Homo sapien
ttctggtggtgacacaagaagttga

SEQ ID NO: 3395531 - DNA, 25 bp, Homo sapien
cagtgtccccatcatgccaataatg

SEQ ID NO: 3395532 - DNA, 25 bp, Homo sapien
tcagtctagtatgaccaggcagcaa

SEQ ID NO: 3395533 - DNA, 25 bp, Homo sapien
tctcgagcaggtgcacacagtgtcc

SEQ ID NO: 3395534 - DNA, 25 bp, Homo sapien
gcttggaaatgtctagcgccccatt

SEQ ID NO: 3395535 - DNA, 25 bp, Homo sapien
gccaaggcagccaatcacgtgaggt

SEQ ID NO: 3395536 - DNA, 25 bp, Homo sapien
ccaaggcagccaatcacgtgaggtc

SEQ ID NO: 3395537 - DNA, 25 bp, Homo sapien
ggccaaggcagccaatcacgtgagg

SEQ ID NO: 3395538 - DNA, 25 bp, Homo sapien
ctttcgtattcaactgactgctgca

SEQ ID NO: 3395539 - DNA, 25 bp, Homo sapien
gctactgatagcaaagttggccatg

SEQ ID NO: 3395540 - DNA, 25 bp, Homo sapien
gccatgtccactttcattaggtcca

SEQ ID NO: 3395541 - DNA, 25 bp, Homo sapien
gactgctgcatgagatgaggcctga

SEQ ID NO: 3395542 - DNA, 25 bp, Homo sapien
gatgagacaccagctagagtttccc

SEQ ID NO: 3395543 - DNA, 25 bp, Homo sapien
tctcggaattacttaagggacaatc

SEQ ID NO: 3395544 - DNA, 25 bp, Homo sapien
tggcaactccagctctagagacaga

SEQ ID NO: 3395545 - DNA, 25 bp, Homo sapien
tgccaatgactaactgagggatctc

SEQ ID NO: 3395546 - DNA, 25 bp, Homo sapien
cactggcagggcgtgtttatacttc

SEQ ID NO: 3395547 - DNA, 25 bp, Homo sapien
caggtaagcgtaattctggacagca

SEQ ID NO: 3395548 - DNA, 25 bp, Homo sapien
gaagcttcaggtaagcgtaattctg

SEQ ID NO: 3395549 - DNA, 25 bp, Homo sapien
tctgagtcataaggtcctctgaggc

SEQ ID NO: 3395550 - DNA, 25 bp, Homo sapien
ctgtaatgaatagaagaggccatcg

SEQ ID NO: 3395551 - DNA, 25 bp, Homo sapien
tgtaatgaatagaagaggccatcgc

SEQ ID NO: 3395552 - DNA, 25 bp, Homo sapien
atgaatagaagaggccatcgctgag

SEQ ID NO: 3395553 - DNA, 25 bp, Homo sapien
taatgaatagaagaggccatcgctg

SEQ ID NO: 3395554 - DNA, 25 bp, Homo sapien
aaattcctggcgctgccatgctgaa

SEQ ID NO: 3395555 - DNA, 25 bp, Homo sapien
agtcggcctggctggaaattcctgg

SEQ ID NO: 3395556 - DNA, 25 bp, Homo sapien
ctgcaactggagctcgtggaagcga

SEQ ID NO: 3395557 - DNA, 25 bp, Homo sapien
tggaagcgagactggtccattaaaa

SEQ ID NO: 3395558 - DNA, 25 bp, Homo sapien
actgcctctgttgtgggtctagatc

SEQ ID NO: 3395559 - DNA, 25 bp, Homo sapien
catgctgtgagaaggtaactgcctc

SEQ ID NO: 3395560 - DNA, 25 bp, Homo sapien
ctgttgtgggtctagatcctttgta

SEQ ID NO: 3395561 - DNA, 25 bp, Homo sapien
gctgtgagaaggtaactgcctctgt

SEQ ID NO: 3395562 - DNA, 25 bp, Homo sapien
ctgaccagggggactttctttctct

SEQ ID NO: 3395563 - DNA, 25 bp, Homo sapien
tgaccagggggactttctttctctc

SEQ ID NO: 3395564 - DNA, 25 bp, Homo sapien
aggcacaccttctccccgatggtag

SEQ ID NO: 3395565 - DNA, 25 bp, Homo sapien
tagtgaggacgtccttcagatggaa

SEQ ID NO: 3395566 - DNA, 25 bp, Homo sapien
gatctggcccttgagcacggtctcc

SEQ ID NO: 3395567 - DNA, 25 bp, Homo sapien
tgagcacggtctccttgtccgtggt

SEQ ID NO: 3395568 - DNA, 25 bp, Homo sapien
catcgtagtagggacagaagaccat

SEQ ID NO: 3395569 - DNA, 25 bp, Homo sapien
ggcttctgatgacccgaggcaaggt

SEQ ID NO: 3395570 - DNA, 25 bp, Homo sapien
tcttgttatagttgaccaggcgagc

SEQ ID NO: 3395571 - DNA, 25 bp, Homo sapien
ccaggcgagcaaatttaatagcaac

SEQ ID NO: 3395572 - DNA, 25 bp, Homo sapien
gaacagatcgtctatgagacccaaa

SEQ ID NO: 3395573 - DNA, 25 bp, Homo sapien
tcacgctcagaggacatgtcaggaa

SEQ ID NO: 3395574 - DNA, 25 bp, Homo sapien
tcttttgcgcttggatggccgtcag

SEQ ID NO: 3395575 - DNA, 25 bp, Homo sapien
taccccttgctgttgtggcagttgg

SEQ ID NO: 3395576 - DNA, 25 bp, Homo sapien
aagtaccctcacaaaatgcagccag

SEQ ID NO: 3395577 - DNA, 25 bp, Homo sapien
tagattagaaccaacatcagtgctg

SEQ ID NO: 3395578 - DNA, 25 bp, Homo sapien
gatcagagaaaacagctgcttgcag

SEQ ID NO: 3395579 - DNA, 25 bp, Homo sapien
tctgggaccctcttgaattattcgc

SEQ ID NO: 3395580 - DNA, 25 bp, Homo sapien
tattcagaggccttgggatgaagct

SEQ ID NO: 3395581 - DNA, 25 bp, Homo sapien
actgcctattagtgctgtgggagcc

SEQ ID NO: 3395582 - DNA, 25 bp, Homo sapien
ttagggacattctgatagactagcc

SEQ ID NO: 3395583 - DNA, 25 bp, Homo sapien
tttcggtcttggaaggcctactgcc

SEQ ID NO: 3395584 - DNA, 25 bp, Homo sapien
cagagggtcttgtatgagcaacagc

SEQ ID NO: 3395585 - DNA, 25 bp, Homo sapien
cctgataactttgtggaccggcggt

SEQ ID NO: 3395586 - DNA, 25 bp, Homo sapien
gaaaaacatccatgctcggaaatac

SEQ ID NO: 3395587 - DNA, 25 bp, Homo sapien
gaatgaaaggattatgtgtacccaa

SEQ ID NO: 3395588 - DNA, 25 bp, Homo sapien
taaatcagagctcgccaaaaggtca

SEQ ID NO: 3395589 - DNA, 25 bp, Homo sapien
taacaatgaaaatgccgaggccttg

SEQ ID NO: 3395590 - DNA, 25 bp, Homo sapien
tctttaaaagtaccctcatggcagg

SEQ ID NO: 3395591 - DNA, 25 bp, Homo sapien
taaatgaacgaagtggatctccctg

SEQ ID NO: 3395592 - DNA, 25 bp, Homo sapien
acttcagcctgctgagatgggagca

SEQ ID NO: 3395593 - DNA, 25 bp, Homo sapien
gattagccaccatgtgaagcccttc

SEQ ID NO: 3395594 - DNA, 25 bp, Homo sapien
tagccaccatgtgaagcccttcttt

SEQ ID NO: 3395595 - DNA, 25 bp, Homo sapien
gagatgggagcacaggcctatgcca

SEQ ID NO: 3395596 - DNA, 25 bp, Homo sapien
ggcaatgagcaagtgaacttacgtt

SEQ ID NO: 3395597 - DNA, 25 bp, Homo sapien
tgagcaagtgaacttacgttttact

SEQ ID NO: 3395598 - DNA, 25 bp, Homo sapien
gtggcaatgagcaagtgaacttacg

SEQ ID NO: 3395599 - DNA, 25 bp, Homo sapien
aatgagcaagtgaacttacgtttta

SEQ ID NO: 3395600 - DNA, 25 bp, Homo sapien
ttccaaggactcatatcagtattgc

SEQ ID NO: 3395601 - DNA, 25 bp, Homo sapien
tggaaatctaatgtgcagactcatg

SEQ ID NO: 3395602 - DNA, 25 bp, Homo sapien
tgggataatcagtcctacaattcca

SEQ ID NO: 3395603 - DNA, 25 bp, Homo sapien
gcagactcatgggataatcagtcct

SEQ ID NO: 3395604 - DNA, 25 bp, Homo sapien
taccatatggcatagactttaaaat

SEQ ID NO: 3395605 - DNA, 25 bp, Homo sapien
aagacaagtaataccatatggcata

SEQ ID NO: 3395606 - DNA, 25 bp, Homo sapien
caagtaataccatatggcatagact

SEQ ID NO: 3395607 - DNA, 25 bp, Homo sapien
aaaaagacaagtaataccatatggc

SEQ ID NO: 3395608 - DNA, 25 bp, Homo sapien
tagactttgctctttggtaacaaca

SEQ ID NO: 3395609 - DNA, 25 bp, Homo sapien
tcaaaacaaagtcagctgcctctaa

SEQ ID NO: 3395610 - DNA, 25 bp, Homo sapien
cttaagacacaagtaggccaggtgt

SEQ ID NO: 3395611 - DNA, 25 bp, Homo sapien
gcatcatgttggcaccgaaaaggtt

SEQ ID NO: 3395612 - DNA, 25 bp, Homo sapien
gacatttacagagcacggcagcaga

SEQ ID NO: 3395613 - DNA, 25 bp, Homo sapien
tgtcattggtgcctctatcacatgg

SEQ ID NO: 3395614 - DNA, 25 bp, Homo sapien
tagggttttaaacgcctctgcagaa

SEQ ID NO: 3395615 - DNA, 25 bp, Homo sapien
gtcaaaaggcccaacgaggattcag

SEQ ID NO: 3395616 - DNA, 25 bp, Homo sapien
gggttcaatatccagctagatggca

SEQ ID NO: 3395617 - DNA, 25 bp, Homo sapien
tcctcctgagaagtctgggtaagcc

SEQ ID NO: 3395618 - DNA, 25 bp, Homo sapien
tgttagaacaacgatgaggcaccag

SEQ ID NO: 3395619 - DNA, 25 bp, Homo sapien
ggatacctggttcagacggcactgt

SEQ ID NO: 3395620 - DNA, 25 bp, Homo sapien
tccgaagagtttatcaacgaggttg

SEQ ID NO: 3395621 - DNA, 25 bp, Homo sapien
tatccaatctcagggaagctgtagg

SEQ ID NO: 3395622 - DNA, 25 bp, Homo sapien
gatcaacattgaacagctctggaga

SEQ ID NO: 3395623 - DNA, 25 bp, Homo sapien
caaagaataacagctgtccgaagag

SEQ ID NO: 3395624 - DNA, 25 bp, Homo sapien
gaagaatattctgcaaccactccag

SEQ ID NO: 3395625 - DNA, 25 bp, Homo sapien
tattctttaggtagtggctgcctcc

SEQ ID NO: 3395626 - DNA, 25 bp, Homo sapien
cactccagcagctaacttaaaagcc

SEQ ID NO: 3395627 - DNA, 25 bp, Homo sapien
tccagtgctagaaaagggccttaat

SEQ ID NO: 3395628 - DNA, 25 bp, Homo sapien
taatgggaggtagagtagcaaaacc

SEQ ID NO: 3395629 - DNA, 25 bp, Homo sapien
gacaaaatcaaatctgagccaaggt

SEQ ID NO: 3395630 - DNA, 25 bp, Homo sapien
gaaacttaccgttcaaaatcagctg

SEQ ID NO: 3395631 - DNA, 25 bp, Homo sapien
taaatcctcataggcctggctaaga

SEQ ID NO: 3395632 - DNA, 25 bp, Homo sapien
cagtagggtgttaatagaagtggaa

SEQ ID NO: 3395633 - DNA, 25 bp, Homo sapien
tcttatgtaactatagtctagtagc

SEQ ID NO: 3395634 - DNA, 25 bp, Homo sapien
tggaattcagaatcggacatttata

SEQ ID NO: 3395635 - DNA, 25 bp, Homo sapien
tccatgtggctacctgccatgcctt

SEQ ID NO: 3395636 - DNA, 25 bp, Homo sapien
ttctttcttttagccagttgtacat

SEQ ID NO: 3395637 - DNA, 25 bp, Homo sapien
cttctttcttttagccagttgtaca

SEQ ID NO: 3395638 - DNA, 25 bp, Homo sapien
tgttggacagttggtaatggtgtga

SEQ ID NO: 3395639 - DNA, 25 bp, Homo sapien
ggacagttggtaatggtgtgagaat

SEQ ID NO: 3395640 - DNA, 25 bp, Homo sapien
catgtagagagctattggaattacc

SEQ ID NO: 3395641 - DNA, 25 bp, Homo sapien
tgttcaaggatctcttctgaagctc

SEQ ID NO: 3395642 - DNA, 25 bp, Homo sapien
ttttcaactctagtagggaagttca

SEQ ID NO: 3395643 - DNA, 25 bp, Homo sapien
tattgcagacaagcaaaatcactgc

SEQ ID NO: 3395644 - DNA, 25 bp, Homo sapien
tagacaatagcggtaggctgcttcg

SEQ ID NO: 3395645 - DNA, 25 bp, Homo sapien
gattcatgggactactccagatggg

SEQ ID NO: 3395646 - DNA, 25 bp, Homo sapien
ggctgcttcgtcctatttagattca

SEQ ID NO: 3395647 - DNA, 25 bp, Homo sapien
tatactgtacccagaaataggttac

SEQ ID NO: 3395648 - DNA, 25 bp, Homo sapien
tgttcctccgactgctccagacatg

SEQ ID NO: 3395649 - DNA, 25 bp, Homo sapien
acgtctgttcctccgactgctccag

SEQ ID NO: 3395650 - DNA, 25 bp, Homo sapien
ctccgactgctccagacatgttcgg

SEQ ID NO: 3395651 - DNA, 25 bp, Homo sapien
ctcgtggcgacctcttctccacgtc

SEQ ID NO: 3395652 - DNA, 25 bp, Homo sapien
tgtcaggagacggagccacggagca

SEQ ID NO: 3395653 - DNA, 25 bp, Homo sapien
gccatgtcaggagacggagccacgg

SEQ ID NO: 3395654 - DNA, 25 bp, Homo sapien
catgtcaggagacggagccacggag

SEQ ID NO: 3395655 - DNA, 25 bp, Homo sapien
gtcaggagacggagccacggagcag

SEQ ID NO: 3395656 - DNA, 25 bp, Homo sapien
gcttcccatcgacggtcagtgcgca

SEQ ID NO: 3395657 - DNA, 25 bp, Homo sapien
tagcttcccatcgacggtcagtgcg

SEQ ID NO: 3395658 - DNA, 25 bp, Homo sapien
ttctagcttcccatcgacggtcagt

SEQ ID NO: 3395659 - DNA, 25 bp, Homo sapien
tctagcttcccatcgacggtcagtg

SEQ ID NO: 3395660 - DNA, 25 bp, Homo sapien
tgaattccaaaaagcgcgcgagcct

SEQ ID NO: 3395661 - DNA, 25 bp, Homo sapien
caatcaggcttcaactgtgagtagc

SEQ ID NO: 3395662 - DNA, 25 bp, Homo sapien
aaaagcgcgcgagcctccaggcgaa

SEQ ID NO: 3395663 - DNA, 25 bp, Homo sapien
ggctctaaagcttgataactgaatt

SEQ ID NO: 3395664 - DNA, 25 bp, Homo sapien
ccaattacagtggtggatttgcaca

SEQ ID NO: 3395665 - DNA, 25 bp, Homo sapien
taggcagtgcctatgtatgcagact

SEQ ID NO: 3395666 - DNA, 25 bp, Homo sapien
tttaggccccattttgctcaagaaa

SEQ ID NO: 3395667 - DNA, 25 bp, Homo sapien
gactgctaactaggtctagacgaaa

SEQ ID NO: 3395668 - DNA, 25 bp, Homo sapien
ctgggtgagagtttaggtgatggcc

SEQ ID NO: 3395669 - DNA, 25 bp, Homo sapien
gatggccacagatggttaccagtgg

SEQ ID NO: 3395670 - DNA, 25 bp, Homo sapien
cagatggttaccagtggtctccagt

SEQ ID NO: 3395671 - DNA, 25 bp, Homo sapien
cagtggtctccagtgcgggtgtgga

SEQ ID NO: 3395672 - DNA, 25 bp, Homo sapien
aagcagaactagtcatcaaagccat

SEQ ID NO: 3395673 - DNA, 25 bp, Homo sapien
acagcaaaacgtgggccgggcattg

SEQ ID NO: 3395674 - DNA, 25 bp, Homo sapien
agtcatcaaagccatagtcttcagc

SEQ ID NO: 3395675 - DNA, 25 bp, Homo sapien
ttaacagcaaaacgtgggccgggca

SEQ ID NO: 3395676 - DNA, 25 bp, Homo sapien
catctgcatggagttggtgtcctct

SEQ ID NO: 3395677 - DNA, 25 bp, Homo sapien
cagcctggctacgtgaaaatatttt

SEQ ID NO: 3395678 - DNA, 25 bp, Homo sapien
cacaggttatgatgtagacatggcc

SEQ ID NO: 3395679 - DNA, 25 bp, Homo sapien
agaagcgggccaacagtaccaatgc

SEQ ID NO: 3395680 - DNA, 25 bp, Homo sapien
cattagtgtggaaggtaaggattta

SEQ ID NO: 3395681 - DNA, 25 bp, Homo sapien
ttaagtaaccagtaacggtgctctc

SEQ ID NO: 3395682 - DNA, 25 bp, Homo sapien
tcctacaagtcattaagagactgcc

SEQ ID NO: 3395683 - DNA, 25 bp, Homo sapien
aattatgtgcataatatgctgtcat

SEQ ID NO: 3395684 - DNA, 25 bp, Homo sapien
cgcggatagttaccgtgccgttcat

SEQ ID NO: 3395685 - DNA, 25 bp, Homo sapien
ggacatgaactttctaacgcggata

SEQ ID NO: 3395686 - DNA, 25 bp, Homo sapien
cggttggacatgaactttctaacgc

SEQ ID NO: 3395687 - DNA, 25 bp, Homo sapien
ctttctaacgcggatagttaccgtg

SEQ ID NO: 3395688 - DNA, 25 bp, Homo sapien
caccgccaaaatgagctctgaatcc

SEQ ID NO: 3395689 - DNA, 25 bp, Homo sapien
caaaggccatgtcttgcaagtcaat

SEQ ID NO: 3395690 - DNA, 25 bp, Homo sapien
caatgtttggattcatttttctctg

SEQ ID NO: 3395691 - DNA, 25 bp, Homo sapien
tgcaagtcaatgtttggattcattt

SEQ ID NO: 3395692 - DNA, 25 bp, Homo sapien
agcactggcctttgcacttcccctg

SEQ ID NO: 3395693 - DNA, 25 bp, Homo sapien
gcactggcctttgcacttcccctga

SEQ ID NO: 3395694 - DNA, 25 bp, Homo sapien
tgccattgctcctcgttaaaccaca

SEQ ID NO: 3395695 - DNA, 25 bp, Homo sapien
ttcctgtgaagagatggccctccgc

SEQ ID NO: 3395696 - DNA, 25 bp, Homo sapien
tccgcagtctccacaaatgatgccg

SEQ ID NO: 3395697 - DNA, 25 bp, Homo sapien
ccacatataggtgttcctgtgaaga

SEQ ID NO: 3395698 - DNA, 25 bp, Homo sapien
ggggcctgcggcttgatctcctcag

SEQ ID NO: 3395699 - DNA, 25 bp, Homo sapien
aagactggcgggagtggtggcgacg

SEQ ID NO: 3395700 - DNA, 25 bp, Homo sapien
ctgctctggctgctaagcgccgggc

SEQ ID NO: 3395701 - DNA, 25 bp, Homo sapien
gggcctacgggcgacgcagggtgcg

SEQ ID NO: 3395702 - DNA, 25 bp, Homo sapien
tgagaggaaacggcgaaacaccctc

SEQ ID NO: 3395703 - DNA, 25 bp, Homo sapien
ctgagaggaaacggcgaaacaccct

SEQ ID NO: 3395704 - DNA, 25 bp, Homo sapien
agcccctctccgcggccgctgccat

SEQ ID NO: 3395705 - DNA, 25 bp, Homo sapien
cagcccctctccgcggccgctgcca

SEQ ID NO: 3395706 - DNA, 25 bp, Homo sapien
tcagcccctctccgcggccgctgcc

SEQ ID NO: 3395707 - DNA, 25 bp, Homo sapien
ttcctagaggcccgcgctctctcct

SEQ ID NO: 3395708 - DNA, 25 bp, Homo sapien
ccgcagccctgagcatgtccggggt

SEQ ID NO: 3395709 - DNA, 25 bp, Homo sapien
gccgcagccctgagcatgtccgggg

SEQ ID NO: 3395710 - DNA, 25 bp, Homo sapien
tctctcctcttcgggcggccgcagc

SEQ ID NO: 3395711 - DNA, 25 bp, Homo sapien
acgcgcaatgagtgcgggctgcgcc

SEQ ID NO: 3395712 - DNA, 25 bp, Homo sapien
gggctgcgccggaggtgtcgggcca

SEQ ID NO: 3395713 - DNA, 25 bp, Homo sapien
atgcggatggggcacgggacgcgca

SEQ ID NO: 3395714 - DNA, 25 bp, Homo sapien
aaactgggagcacgagagcgctggg

SEQ ID NO: 3395715 - DNA, 25 bp, Homo sapien
gagaggctccccgtgggactaaaca

SEQ ID NO: 3395716 - DNA, 25 bp, Homo sapien
tgcctgcgcgtttgtttgttcccct

SEQ ID NO: 3395717 - DNA, 25 bp, Homo sapien
cgtagttacggcctaggactgcgga

SEQ ID NO: 3395718 - DNA, 25 bp, Homo sapien
gtccccagagttgacaccctgcaaa

SEQ ID NO: 3395719 - DNA, 25 bp, Homo sapien
gtctccctcccgacagagaaacaga

SEQ ID NO: 3395720 - DNA, 25 bp, Homo sapien
cagttctcccagtgcggcgaaggga

SEQ ID NO: 3395721 - DNA, 25 bp, Homo sapien
ttttcatccaaagtctttccgccag

SEQ ID NO: 3395722 - DNA, 25 bp, Homo sapien
ccgtaacgagagaagccggcaacag

SEQ ID NO: 3395723 - DNA, 25 bp, Homo sapien
gcagatctccaaactactagaaagt

SEQ ID NO: 3395724 - DNA, 25 bp, Homo sapien
cacacgcagactggtttgccagcta

SEQ ID NO: 3395725 - DNA, 25 bp, Homo sapien
tggtttgccagctaacttttccggc

SEQ ID NO: 3395726 - DNA, 25 bp, Homo sapien
ctagaaagtacgcaaaagcacacgc

SEQ ID NO: 3395727 - DNA, 25 bp, Homo sapien
ggtccctggcataacagtggtgtct

SEQ ID NO: 3395728 - DNA, 25 bp, Homo sapien
tacaagtgactaagacaaggtccca

SEQ ID NO: 3395729 - DNA, 25 bp, Homo sapien
ttccacacagtaagaacagaggctc

SEQ ID NO: 3395730 - DNA, 25 bp, Homo sapien
ggtctgccaaaaagctcaaggtttc

SEQ ID NO: 3395731 - DNA, 25 bp, Homo sapien
tcattacccgtcataataaaatttc

SEQ ID NO: 3395732 - DNA, 25 bp, Homo sapien
cagtctgtgatcagctacaaaaaat

SEQ ID NO: 3395733 - DNA, 25 bp, Homo sapien
tattttatcattacccgtcataata

SEQ ID NO: 3395734 - DNA, 25 bp, Homo sapien
gccacagtctgtgatcagctacaaa

SEQ ID NO: 3395735 - DNA, 25 bp, Homo sapien
tgttgtccaaggtgcaatgcagtgg

SEQ ID NO: 3395736 - DNA, 25 bp, Homo sapien
ttgtccaaggtgcaatgcagtggtg

SEQ ID NO: 3395737 - DNA, 25 bp, Homo sapien
gttgtccaaggtgcaatgcagtggt

SEQ ID NO: 3395738 - DNA, 25 bp, Homo sapien
tgacagttgcataggaagtgattct

SEQ ID NO: 3395739 - DNA, 25 bp, Homo sapien
caaagcatgcagtacaagtgtggct

SEQ ID NO: 3395740 - DNA, 25 bp, Homo sapien
gaactgatgaagtgcagcaaaatga

SEQ ID NO: 3395741 - DNA, 25 bp, Homo sapien
caattgttaggtcaagacatcatcg

SEQ ID NO: 3395742 - DNA, 25 bp, Homo sapien
tgcagtagcgtgatcacagctcact

SEQ ID NO: 3395743 - DNA, 25 bp, Homo sapien
tctccctctgttgcctgcgctggag

SEQ ID NO: 3395744 - DNA, 25 bp, Homo sapien
gcaacctccgccttcccaggttcaa

SEQ ID NO: 3395745 - DNA, 25 bp, Homo sapien
ttataggcatacaccaccatgtctg

SEQ ID NO: 3395746 - DNA, 25 bp, Homo sapien
ttaccaaaccagcaatgtaatcaat

SEQ ID NO: 3395747 - DNA, 25 bp, Homo sapien
tttactacacataatattagcccat

SEQ ID NO: 3395748 - DNA, 25 bp, Homo sapien
tgacacccatagtcatgagtctgat

SEQ ID NO: 3395749 - DNA, 25 bp, Homo sapien
gatcattgctaaccatagtgggctg

SEQ ID NO: 3395750 - DNA, 25 bp, Homo sapien
ctgtgtaaagcaacctaatactgta

SEQ ID NO: 3395751 - DNA, 25 bp, Homo sapien
gattctgaatactgctacctgaaaa

SEQ ID NO: 3395752 - DNA, 25 bp, Homo sapien
tacacttgtggatttaaaggaaagc

SEQ ID NO: 3395753 - DNA, 25 bp, Homo sapien
tatagaagaacagtacaccatacat

SEQ ID NO: 3395754 - DNA, 25 bp, Homo sapien
tatgacctttgtagcacctgcagtg

SEQ ID NO: 3395755 - DNA, 25 bp, Homo sapien
ctttgatacatgactggccgaccca

SEQ ID NO: 3395756 - DNA, 25 bp, Homo sapien
tactttaaccctgtaaggctgccga

SEQ ID NO: 3395757 - DNA, 25 bp, Homo sapien
gaatgggccgaatcacttttagtgg

SEQ ID NO: 3395758 - DNA, 25 bp, Homo sapien
tgttcttgacagaaaccatactcaa

SEQ ID NO: 3395759 - DNA, 25 bp, Homo sapien
catactcaagcagctcaatttagaa

SEQ ID NO: 3395760 - DNA, 25 bp, Homo sapien
tagcacgtacttctggcttgtatca

SEQ ID NO: 3395761 - DNA, 25 bp, Homo sapien
tgaccttaagcaaatcaatgccctt

SEQ ID NO: 3395762 - DNA, 25 bp, Homo sapien
cataatcacactgaaggtgggagag

SEQ ID NO: 3395763 - DNA, 25 bp, Homo sapien
cagtattttgactacatactccaag

SEQ ID NO: 3395764 - DNA, 25 bp, Homo sapien
caatcaacaaggacatgggagaccc

SEQ ID NO: 3395765 - DNA, 25 bp, Homo sapien
tacaggcattagacactatacctca

SEQ ID NO: 3395766 - DNA, 25 bp, Homo sapien
ttacaattatttggtcctggccaca

SEQ ID NO: 3395767 - DNA, 25 bp, Homo sapien
tccctacaactcttctggcaaagga

SEQ ID NO: 3395768 - DNA, 25 bp, Homo sapien
ttagaccaatgggaggaccacccca

SEQ ID NO: 3395769 - DNA, 25 bp, Homo sapien
gaacaagctgttttctactacagac

SEQ ID NO: 3395770 - DNA, 25 bp, Homo sapien
cagggtgatggtccgcacctgtagt

SEQ ID NO: 3395771 - DNA, 25 bp, Homo sapien
gattttcccagatttggcgtggtag

SEQ ID NO: 3395772 - DNA, 25 bp, Homo sapien
tataatccatgactataattactta

SEQ ID NO: 3395773 - DNA, 25 bp, Homo sapien
tttcccagatttggcgtggtagctc

SEQ ID NO: 3395774 - DNA, 25 bp, Homo sapien
atggcaaccccaatataatctctgg

SEQ ID NO: 3395775 - DNA, 25 bp, Homo sapien
aatggcaaccccaatataatctctg

SEQ ID NO: 3395776 - DNA, 25 bp, Homo sapien
aaatggcaaccccaatataatctct

SEQ ID NO: 3395777 - DNA, 25 bp, Homo sapien
gcaatcacacatcccaatgaccaca

SEQ ID NO: 3395778 - DNA, 25 bp, Homo sapien
caaggctcctgggtagagcggccat

SEQ ID NO: 3395779 - DNA, 25 bp, Homo sapien
ctcctgggtagagcggccatccaag

SEQ ID NO: 3395780 - DNA, 25 bp, Homo sapien
gtagagcggccatccaagaaataat

SEQ ID NO: 3395781 - DNA, 25 bp, Homo sapien
ctattagattatcattatttgttac

SEQ ID NO: 3395782 - DNA, 25 bp, Homo sapien
ctgacggtagtcttgcatctgtatc

SEQ ID NO: 3395783 - DNA, 25 bp, Homo sapien
tcttgcatctgtatcaaagctagta

SEQ ID NO: 3395784 - DNA, 25 bp, Homo sapien
tatcaaagctagtaattgggtagaa

SEQ ID NO: 3395785 - DNA, 25 bp, Homo sapien
actgacggtagtcttgcatctgtat

SEQ ID NO: 3395786 - DNA, 25 bp, Homo sapien
aaaggattatgggactctgattcaa

SEQ ID NO: 3395787 - DNA, 25 bp, Homo sapien
aacagctaaaggattatgggactct

SEQ ID NO: 3395788 - DNA, 25 bp, Homo sapien
ggactctgattcaattactaactcg

SEQ ID NO: 3395789 - DNA, 25 bp, Homo sapien
cctcagtattccaacagctaaagga

SEQ ID NO: 3395790 - DNA, 25 bp, Homo sapien
gctccaggcccaaccgcttattgaa

SEQ ID NO: 3395791 - DNA, 25 bp, Homo sapien
taataaccctttactgcctagagca

SEQ ID NO: 3395792 - DNA, 25 bp, Homo sapien
gaaacctgaaattgatgccctgtac

SEQ ID NO: 3395793 - DNA, 25 bp, Homo sapien
aagcttgtccaaccagaagtcccgg

SEQ ID NO: 3395794 - DNA, 25 bp, Homo sapien
gctccatcaattagtccatcctctt

SEQ ID NO: 3395795 - DNA, 25 bp, Homo sapien
catcaattagtccatcctcttctgc

SEQ ID NO: 3395796 - DNA, 25 bp, Homo sapien
tctgctccatcaattagtccatcct

SEQ ID NO: 3395797 - DNA, 25 bp, Homo sapien
tccatcaattagtccatcctcttct

SEQ ID NO: 3395798 - DNA, 25 bp, Homo sapien
ctttaatctccaaccagaatgagac

SEQ ID NO: 3395799 - DNA, 25 bp, Homo sapien
tctcctggcaaaccttgagtctgag

SEQ ID NO: 3395800 - DNA, 25 bp, Homo sapien
aaatcttgtggatttagtacccaca

SEQ ID NO: 3395801 - DNA, 25 bp, Homo sapien
ccagaatgagacatatctgtttctt

SEQ ID NO: 3395802 - DNA, 25 bp, Homo sapien
tctctgcctcatgctcttccaatgt

SEQ ID NO: 3395803 - DNA, 25 bp, Homo sapien
ctgtctctgcctcatgctcttccaa

SEQ ID NO: 3395804 - DNA, 25 bp, Homo sapien
tcctgtctctgcctcatgctcttcc

SEQ ID NO: 3395805 - DNA, 25 bp, Homo sapien
tgtctctgcctcatgctcttccaat

SEQ ID NO: 3395806 - DNA, 25 bp, Homo sapien
gctacatcatccagactgttgaaaa

SEQ ID NO: 3395807 - DNA, 25 bp, Homo sapien
atcatccagactgttgaaaatgtat

SEQ ID NO: 3395808 - DNA, 25 bp, Homo sapien
gcgctacatcatccagactgttgaa

SEQ ID NO: 3395809 - DNA, 25 bp, Homo sapien
atgcgctacatcatccagactgttg

SEQ ID NO: 3395810 - DNA, 25 bp, Homo sapien
tctcttctatcagctttctcagcca

SEQ ID NO: 3395811 - DNA, 25 bp, Homo sapien
aattcttaaatctgcatcaatcagc

SEQ ID NO: 3395812 - DNA, 25 bp, Homo sapien
gctatgagggaaatctagaagatgt

SEQ ID NO: 3395813 - DNA, 25 bp, Homo sapien
gggtctcagctggagtaattcttaa

SEQ ID NO: 3395814 - DNA, 25 bp, Homo sapien
tagtaaaatttgcagtcagtgtagc

SEQ ID NO: 3395815 - DNA, 25 bp, Homo sapien
gaagcaactggtcttaaaagtgaag

SEQ ID NO: 3395816 - DNA, 25 bp, Homo sapien
cagtgtagcagtactgcttgaagca

SEQ ID NO: 3395817 - DNA, 25 bp, Homo sapien
cacatgaatttaggtgggacttaca

SEQ ID NO: 3395818 - DNA, 25 bp, Homo sapien
tggtgcacaactgaatgagcagatg

SEQ ID NO: 3395819 - DNA, 25 bp, Homo sapien
catggtgcacaactgaatgagcaga

SEQ ID NO: 3395820 - DNA, 25 bp, Homo sapien
ggtgcacaactgaatgagcagatgt

SEQ ID NO: 3395821 - DNA, 25 bp, Homo sapien
tccatggtgcacaactgaatgagca

SEQ ID NO: 3395822 - DNA, 25 bp, Homo sapien
tttagggccccatctgtaattgacc

SEQ ID NO: 3395823 - DNA, 25 bp, Homo sapien
gacctcttgcattaactagatgtta

SEQ ID NO: 3395824 - DNA, 25 bp, Homo sapien
ctgtacagtatcaccactaagttgg

SEQ ID NO: 3395825 - DNA, 25 bp, Homo sapien
caggctagcctacaatgatacagca

SEQ ID NO: 3395826 - DNA, 25 bp, Homo sapien
gtttttgccaaagaagctaggctct

SEQ ID NO: 3395827 - DNA, 25 bp, Homo sapien
tttagaaatgtgtctccgaagtctc

SEQ ID NO: 3395828 - DNA, 25 bp, Homo sapien
cacagtataagtggtgaccctcaaa

SEQ ID NO: 3395829 - DNA, 25 bp, Homo sapien
tacatgggagggattactagaacca

SEQ ID NO: 3395830 - DNA, 25 bp, Homo sapien
tcggatctgtagtggctgcacagct

SEQ ID NO: 3395831 - DNA, 25 bp, Homo sapien
tctacccttattgaataactggtgg

SEQ ID NO: 3395832 - DNA, 25 bp, Homo sapien
gagaaagaactcctggtcggatctg

SEQ ID NO: 3395833 - DNA, 25 bp, Homo sapien
ggcctgagttacaagtggaactgta

SEQ ID NO: 3395834 - DNA, 25 bp, Homo sapien
tctgctgtgttctaccagaccacgt

SEQ ID NO: 3395835 - DNA, 25 bp, Homo sapien
ttagtgtagtagtagcaggagccag

SEQ ID NO: 3395836 - DNA, 25 bp, Homo sapien
gccacactctcagaagttagtgtag

SEQ ID NO: 3395837 - DNA, 25 bp, Homo sapien
cactctcagaagttagtgtagtagt

SEQ ID NO: 3395838 - DNA, 25 bp, Homo sapien
cagaagttagtgtagtagtagcagg

SEQ ID NO: 3395839 - DNA, 25 bp, Homo sapien
gataaagttatctgattggtcagaa

SEQ ID NO: 3395840 - DNA, 25 bp, Homo sapien
ttttcttggtagtggcaggctgagg

SEQ ID NO: 3395841 - DNA, 25 bp, Homo sapien
aagaggctgcggcatcactgagtta

SEQ ID NO: 3395842 - DNA, 25 bp, Homo sapien
ggccagacaacatgtgcaatcccca

SEQ ID NO: 3395843 - DNA, 25 bp, Homo sapien
tctcttcctggctcccattccatta

SEQ ID NO: 3395844 - DNA, 25 bp, Homo sapien
ctggctcccattccattagttttac

SEQ ID NO: 3395845 - DNA, 25 bp, Homo sapien
ttcctggctcccattccattagttt

SEQ ID NO: 3395846 - DNA, 25 bp, Homo sapien
caactgaaagcatttatttcctctc

SEQ ID NO: 3395847 - DNA, 25 bp, Homo sapien
aataaatgctgaatgtgggatattg

SEQ ID NO: 3395848 - DNA, 25 bp, Homo sapien
atgctgaatgtgggatattggtatt

SEQ ID NO: 3395849 - DNA, 25 bp, Homo sapien
taaatgctgaatgtgggatattggt

SEQ ID NO: 3395850 - DNA, 25 bp, Homo sapien
aaatgctgaatgtgggatattggta

SEQ ID NO: 3395851 - DNA, 25 bp, Homo sapien
gtctgatagatgtttcacagcaatt

SEQ ID NO: 3395852 - DNA, 25 bp, Homo sapien
tctgggaagtctcttcctcatcagt

SEQ ID NO: 3395853 - DNA, 25 bp, Homo sapien
taatgatggtttgccgctgtttgtc

SEQ ID NO: 3395854 - DNA, 25 bp, Homo sapien
tatacaacttacttcctcgacatct

SEQ ID NO: 3395855 - DNA, 25 bp, Homo sapien
gcaagcttcacaatctagactacct

SEQ ID NO: 3395856 - DNA, 25 bp, Homo sapien
gagctggtactcagagtactatcag

SEQ ID NO: 3395857 - DNA, 25 bp, Homo sapien
gaacacatccgatcaatattcaaag

SEQ ID NO: 3395858 - DNA, 25 bp, Homo sapien
tactatcaggactacttaatgaaca

SEQ ID NO: 3395859 - DNA, 25 bp, Homo sapien
catcaggatatgtgcctctgctggt

SEQ ID NO: 3395860 - DNA, 25 bp, Homo sapien
ccaggtatctgaaaggtatccccac

SEQ ID NO: 3395861 - DNA, 25 bp, Homo sapien
ttcctgacactcttgggccctgaca

SEQ ID NO: 3395862 - DNA, 25 bp, Homo sapien
tctgaaggcctagacagagccccat

SEQ ID NO: 3395863 - DNA, 25 bp, Homo sapien
catgagtgtcctccacaaaagtgct

SEQ ID NO: 3395864 - DNA, 25 bp, Homo sapien
catgcccggaagagtcagatgtcgg

SEQ ID NO: 3395865 - DNA, 25 bp, Homo sapien
ctgtgtcagcagaggataccaattc

SEQ ID NO: 3395866 - DNA, 25 bp, Homo sapien
tctgcaaatggactgtcatgcccgg

SEQ ID NO: 3395867 - DNA, 25 bp, Homo sapien
tgactgaagttcaaatgctgctgct

SEQ ID NO: 3395868 - DNA, 25 bp, Homo sapien
tttgctgacgagtacccactgcaga

SEQ ID NO: 3395869 - DNA, 25 bp, Homo sapien
ggaatgctgatgtcaatttttgctg

SEQ ID NO: 3395870 - DNA, 25 bp, Homo sapien
ccaggggcagatcgtccttttatta

SEQ ID NO: 3395871 - DNA, 25 bp, Homo sapien
cattaactgtgctccaaatcagatt

SEQ ID NO: 3395872 - DNA, 25 bp, Homo sapien
tttgaatccccgtccaactccagta

SEQ ID NO: 3395873 - DNA, 25 bp, Homo sapien
tattatgtaagagaacctaaggact

SEQ ID NO: 3395874 - DNA, 25 bp, Homo sapien
gttctgagataacagacacactctg

SEQ ID NO: 3395875 - DNA, 25 bp, Homo sapien
gacttggtgaactatgccactggga

SEQ ID NO: 3395876 - DNA, 25 bp, Homo sapien
gtcctccgaggtgtgtatttccagc

SEQ ID NO: 3395877 - DNA, 25 bp, Homo sapien
ggaagtagagtaggctgtcctccga

SEQ ID NO: 3395878 - DNA, 25 bp, Homo sapien
taacataggtcttgaggtacacgga

SEQ ID NO: 3395879 - DNA, 25 bp, Homo sapien
atcattgagcttccccaatatactg

SEQ ID NO: 3395880 - DNA, 25 bp, Homo sapien
aatgtttgtatcattgagcttcccc

SEQ ID NO: 3395881 - DNA, 25 bp, Homo sapien
tgtatcattgagcttccccaatata

SEQ ID NO: 3395882 - DNA, 25 bp, Homo sapien
ttgagcttccccaatatactgtttt

SEQ ID NO: 3395883 - DNA, 25 bp, Homo sapien
gaagataacatgaccaaagacaagt

SEQ ID NO: 3395884 - DNA, 25 bp, Homo sapien
aattgcacccaagtctacatgattc

SEQ ID NO: 3395885 - DNA, 25 bp, Homo sapien
gcaaaactggacttctgctcccata

SEQ ID NO: 3395886 - DNA, 25 bp, Homo sapien
tgctcccataagtcacctgtctaga

SEQ ID NO: 3395887 - DNA, 25 bp, Homo sapien
ttcccaaatgtagacgtgtcttgca

SEQ ID NO: 3395888 - DNA, 25 bp, Homo sapien
ctaagtctgtacacagaatggcttc

SEQ ID NO: 3395889 - DNA, 25 bp, Homo sapien
gcttcccaaatgtagacgtgtcttg

SEQ ID NO: 3395890 - DNA, 25 bp, Homo sapien
tatgtgcatctgttgctctaagtct

SEQ ID NO: 3395891 - DNA, 25 bp, Homo sapien
aacatgctgccctcttaataaggaa

SEQ ID NO: 3395892 - DNA, 25 bp, Homo sapien
tgtaggaacggtttacaatgcagct

SEQ ID NO: 3395893 - DNA, 25 bp, Homo sapien
taaatactgcatggtttgcccaagc

SEQ ID NO: 3395894 - DNA, 25 bp, Homo sapien
tgcccaagctaagataaaaccacat

SEQ ID NO: 3395895 - DNA, 25 bp, Homo sapien
gaggtctatgcaaaaagtagctacc

SEQ ID NO: 3395896 - DNA, 25 bp, Homo sapien
gaagtggcaatcgttatatagcagc

SEQ ID NO: 3395897 - DNA, 25 bp, Homo sapien
aatactgatgcaaataacacacccc

SEQ ID NO: 3395898 - DNA, 25 bp, Homo sapien
gcatgtaatttctgtccctgacgga

SEQ ID NO: 3395899 - DNA, 25 bp, Homo sapien
gagagaaatactatcgcaaaccgta

SEQ ID NO: 3395900 - DNA, 25 bp, Homo sapien
gaacgctgtactagagctgtactag

SEQ ID NO: 3395901 - DNA, 25 bp, Homo sapien
taagtcaagcctgcaagatacagct

SEQ ID NO: 3395902 - DNA, 25 bp, Homo sapien
catggcaaactagtgtagcatagga

SEQ ID NO: 3395903 - DNA, 25 bp, Homo sapien
gacactcaccaaaatagtcacctgg

SEQ ID NO: 3395904 - DNA, 25 bp, Homo sapien
agtacagaaggcttggtcacattta

SEQ ID NO: 3395905 - DNA, 25 bp, Homo sapien
gaatcgacagtaatacaccataaat

SEQ ID NO: 3395906 - DNA, 25 bp, Homo sapien
taattcaaagtgaatcgacagtaat

SEQ ID NO: 3395907 - DNA, 25 bp, Homo sapien
caatgaattcgtctccctgatgaga

SEQ ID NO: 3395908 - DNA, 25 bp, Homo sapien
tgatgagactgacctcaagacgaga

SEQ ID NO: 3395909 - DNA, 25 bp, Homo sapien
caagacgagataccatccctttcct

SEQ ID NO: 3395910 - DNA, 25 bp, Homo sapien
tcaagaagcctacagtcagccaggt

SEQ ID NO: 3395911 - DNA, 25 bp, Homo sapien
gagcggcgcgactggctcgctcgtc

SEQ ID NO: 3395912 - DNA, 25 bp, Homo sapien
gccccggtcctcaccgggcatcgcc

SEQ ID NO: 3395913 - DNA, 25 bp, Homo sapien
tcctcaccgggcatcgccggccacg

SEQ ID NO: 3395914 - DNA, 25 bp, Homo sapien
ctgcctcgctctgcaccgcgccggg

SEQ ID NO: 3395915 - DNA, 25 bp, Homo sapien
caccagggctaaacccaaacaatgt

SEQ ID NO: 3395916 - DNA, 25 bp, Homo sapien
aacccaaacaatgtggatgagaagt

SEQ ID NO: 3395917 - DNA, 25 bp, Homo sapien
tgtaatcaaagcatctttcccagcc

SEQ ID NO: 3395918 - DNA, 25 bp, Homo sapien
gagaagtcctctaaatcaggctctg

SEQ ID NO: 3395919 - DNA, 25 bp, Homo sapien
aaactcaacgtgcattgctagtgcc

SEQ ID NO: 3395920 - DNA, 25 bp, Homo sapien
gactactttgttcaactggcaacct

SEQ ID NO: 3395921 - DNA, 25 bp, Homo sapien
tatgccttaggacctgttatcgccc

SEQ ID NO: 3395922 - DNA, 25 bp, Homo sapien
aatgctgcagtaatcccaggctcct

SEQ ID NO: 3395923 - DNA, 25 bp, Homo sapien
ttgctgttgacacctggtaaataaa

SEQ ID NO: 3395924 - DNA, 25 bp, Homo sapien
caagtgacaggggaacggcattcat

SEQ ID NO: 3395925 - DNA, 25 bp, Homo sapien
ggtttgctgttgacacctggtaaat

SEQ ID NO: 3395926 - DNA, 25 bp, Homo sapien
gctgttgacacctggtaaataaaaa

SEQ ID NO: 3395927 - DNA, 25 bp, Homo sapien
tgagagctggccaaggttagcaaca

SEQ ID NO: 3395928 - DNA, 25 bp, Homo sapien
catcagtaggacactgggagttcca

SEQ ID NO: 3395929 - DNA, 25 bp, Homo sapien
gccaaggttagcaacatcatcacat

SEQ ID NO: 3395930 - DNA, 25 bp, Homo sapien
cagtgaccaacacgacccgttgtga

SEQ ID NO: 3395931 - DNA, 25 bp, Homo sapien
ccatttcaccagatggccagctcat

SEQ ID NO: 3395932 - DNA, 25 bp, Homo sapien
gaggtgatgtccatttcaccagatg

SEQ ID NO: 3395933 - DNA, 25 bp, Homo sapien
catgggagatgcctctgtgtaggag

SEQ ID NO: 3395934 - DNA, 25 bp, Homo sapien
tgcctctgtgtaggaggtgatgtcc

SEQ ID NO: 3395935 - DNA, 25 bp, Homo sapien
gctcctttctagcaagggctggctt

SEQ ID NO: 3395936 - DNA, 25 bp, Homo sapien
tcctagcagtatgagcggagtcagc

SEQ ID NO: 3395937 - DNA, 25 bp, Homo sapien
ctaaaaagctgagtccacaaagtgg

SEQ ID NO: 3395938 - DNA, 25 bp, Homo sapien
tacaagaatctgacccaaacatggc

SEQ ID NO: 3395939 - DNA, 25 bp, Homo sapien
cttggaaagccgaatgcttagaaac

SEQ ID NO: 3395940 - DNA, 25 bp, Homo sapien
tcatggcccccttggaaagccgaat

SEQ ID NO: 3395941 - DNA, 25 bp, Homo sapien
ccgaatgcttagaaacttcctgtct

SEQ ID NO: 3395942 - DNA, 25 bp, Homo sapien
gaaagccgaatgcttagaaacttcc

SEQ ID NO: 3395943 - DNA, 25 bp, Homo sapien
tgaaactctttcaccaagtaaatcc

SEQ ID NO: 3395944 - DNA, 25 bp, Homo sapien
ttgaaactctttcaccaagtaaatc

SEQ ID NO: 3395945 - DNA, 25 bp, Homo sapien
attgaaactctttcaccaagtaaat

SEQ ID NO: 3395946 - DNA, 25 bp, Homo sapien
caagcccattaacatagagccttcc

SEQ ID NO: 3395947 - DNA, 25 bp, Homo sapien
tggagaacccattaaccttcctata

SEQ ID NO: 3395948 - DNA, 25 bp, Homo sapien
cattaaccttcctatagtagaccag

SEQ ID NO: 3395949 - DNA, 25 bp, Homo sapien
ctatagtagaccaggtccacaagcc

SEQ ID NO: 3395950 - DNA, 25 bp, Homo sapien
cagggacagtacagcgacacattct

SEQ ID NO: 3395951 - DNA, 25 bp, Homo sapien
tgcgcagtacagaccaagaagagga

SEQ ID NO: 3395952 - DNA, 25 bp, Homo sapien
ggctgttccactcgggtatcctaaa

SEQ ID NO: 3395953 - DNA, 25 bp, Homo sapien
tagaggcaggatccccaatgagcat

SEQ ID NO: 3395954 - DNA, 25 bp, Homo sapien
taatgagttatcaaaggatagcctc

SEQ ID NO: 3395955 - DNA, 25 bp, Homo sapien
caggccttttggatgtacagtttcc

SEQ ID NO: 3395956 - DNA, 25 bp, Homo sapien
gagttatcaaaggatagcctcaggg

SEQ ID NO: 3395957 - DNA, 25 bp, Homo sapien
ctcagggcaagttcaggccttttgg

SEQ ID NO: 3395958 - DNA, 25 bp, Homo sapien
ccagaaatggcacagctttttatca

SEQ ID NO: 3395959 - DNA, 25 bp, Homo sapien
taggaaagggcacacatcattctgt

SEQ ID NO: 3395960 - DNA, 25 bp, Homo sapien
cttattggtgagacatttgcatgcc

SEQ ID NO: 3395961 - DNA, 25 bp, Homo sapien
gataagttgctacatttggcccctc

SEQ ID NO: 3395962 - DNA, 25 bp, Homo sapien
tgcaaatcagaaacacccttggaaa

SEQ ID NO: 3395963 - DNA, 25 bp, Homo sapien
caaatcagaaacacccttggaaaat

SEQ ID NO: 3395964 - DNA, 25 bp, Homo sapien
tttgcaaatcagaaacacccttgga

SEQ ID NO: 3395965 - DNA, 25 bp, Homo sapien
ttgcaaatcagaaacacccttggaa

SEQ ID NO: 3395966 - DNA, 25 bp, Homo sapien
ttagctagatacaaggcaattcttc

SEQ ID NO: 3395967 - DNA, 25 bp, Homo sapien
tgaccactggcccagtattcagggc

SEQ ID NO: 3395968 - DNA, 25 bp, Homo sapien
tgtcaccacgggcacagctgacatc

SEQ ID NO: 3395969 - DNA, 25 bp, Homo sapien
caaagctgccagattctttcgaggc

SEQ ID NO: 3395970 - DNA, 25 bp, Homo sapien
tcttcgttggcatggaaggcccacg

SEQ ID NO: 3395971 - DNA, 25 bp, Homo sapien
ggggcctaactgtgctgcgctctcc

SEQ ID NO: 3395972 - DNA, 25 bp, Homo sapien
ggcctaactgtgctgcgctctccat

SEQ ID NO: 3395973 - DNA, 25 bp, Homo sapien
acctgggggcctaactgtgctgcgc

SEQ ID NO: 3395974 - DNA, 25 bp, Homo sapien
tgggggcctaactgtgctgcgctct

SEQ ID NO: 3395975 - DNA, 25 bp, Homo sapien
tgaaaatctagcctgcccatcacag

SEQ ID NO: 3395976 - DNA, 25 bp, Homo sapien
tcatcatgcagtcaagggcaccaga

SEQ ID NO: 3395977 - DNA, 25 bp, Homo sapien
ccatcacagttgaagtccagtttct

SEQ ID NO: 3395978 - DNA, 25 bp, Homo sapien
tgttatggtcccgtccagcatacct

SEQ ID NO: 3395979 - DNA, 25 bp, Homo sapien
tgaccgttatgacattcccatgata

SEQ ID NO: 3395980 - DNA, 25 bp, Homo sapien
cttggcagctaaaggcacacatgac

SEQ ID NO: 3395981 - DNA, 25 bp, Homo sapien
taaaggcacacatgaccgttatgac

SEQ ID NO: 3395982 - DNA, 25 bp, Homo sapien
catgatacccgcctccattcagctg

SEQ ID NO: 3395983 - DNA, 25 bp, Homo sapien
tggtagttcctcaaatgattcaaca

SEQ ID NO: 3395984 - DNA, 25 bp, Homo sapien
gaatcctcatacattgccggcaaga

SEQ ID NO: 3395985 - DNA, 25 bp, Homo sapien
cattgccggcaagattctaaaatgg

SEQ ID NO: 3395986 - DNA, 25 bp, Homo sapien
tagttcctcaaatgattcaacatag

SEQ ID NO: 3395987 - DNA, 25 bp, Homo sapien
gcaaattccctgatagggctaacag

SEQ ID NO: 3395988 - DNA, 25 bp, Homo sapien
tccctgatagggctaacagattttg

SEQ ID NO: 3395989 - DNA, 25 bp, Homo sapien
tggcaaattccctgatagggctaac

SEQ ID NO: 3395990 - DNA, 25 bp, Homo sapien
aattccctgatagggctaacagatt

SEQ ID NO: 3395991 - DNA, 25 bp, Homo sapien
tacgactgaatgtgatcaatgctgc

SEQ ID NO: 3395992 - DNA, 25 bp, Homo sapien
taaggcttcacaagccagatgacat

SEQ ID NO: 3395993 - DNA, 25 bp, Homo sapien
gggcaaatttaaggcttcacaagcc

SEQ ID NO: 3395994 - DNA, 25 bp, Homo sapien
gggcaaagtaagtccaattcagggc

SEQ ID NO: 3395995 - DNA, 25 bp, Homo sapien
tcagccaagatgtgcactagaccag

SEQ ID NO: 3395996 - DNA, 25 bp, Homo sapien
tggaagccatccacactgaaatggg

SEQ ID NO: 3395997 - DNA, 25 bp, Homo sapien
tgaatagcagctgctgacgacccct

SEQ ID NO: 3395998 - DNA, 25 bp, Homo sapien
catattgcaaaagagatgccggcac

SEQ ID NO: 3395999 - DNA, 25 bp, Homo sapien
gctgacttctcatgagtgatgcgat

SEQ ID NO: 3396000 - DNA, 25 bp, Homo sapien
gatgcgatgtagctctacccagaag

SEQ ID NO: 3396001 - DNA, 25 bp, Homo sapien
taaaagctttcggtgcaatacttcc

SEQ ID NO: 3396002 - DNA, 25 bp, Homo sapien
aaatccccgattaaagctgacttct

SEQ ID NO: 3396003 - DNA, 25 bp, Homo sapien
aaaactgtgtatttattaattactg

SEQ ID NO: 3396004 - DNA, 25 bp, Homo sapien
ctgtgtatttattaattactgccat

SEQ ID NO: 3396005 - DNA, 25 bp, Homo sapien
actgtgtatttattaattactgcca

SEQ ID NO: 3396006 - DNA, 25 bp, Homo sapien
aactgtgtatttattaattactgcc

SEQ ID NO: 3396007 - DNA, 25 bp, Homo sapien
gccgtcagattgtctctgggccaca

SEQ ID NO: 3396008 - DNA, 25 bp, Homo sapien
agagtgaacgtctgccccaggagaa

SEQ ID NO: 3396009 - DNA, 25 bp, Homo sapien
ttctggcctcacagccgtcagattg

SEQ ID NO: 3396010 - DNA, 25 bp, Homo sapien
cttgcagcatggatccacagaaagt

SEQ ID NO: 3396011 - DNA, 25 bp, Homo sapien
ggcccacatacatgccaaaacagag

SEQ ID NO: 3396012 - DNA, 25 bp, Homo sapien
catgtctggcccacatacatgccaa

SEQ ID NO: 3396013 - DNA, 25 bp, Homo sapien
tgtctggcccacatacatgccaaaa

SEQ ID NO: 3396014 - DNA, 25 bp, Homo sapien
tctggcccacatacatgccaaaaca

SEQ ID NO: 3396015 - DNA, 25 bp, Homo sapien
cttcctggccacagatgcttggacc

SEQ ID NO: 3396016 - DNA, 25 bp, Homo sapien
tcgtccaacttgaactagttggatt

SEQ ID NO: 3396017 - DNA, 25 bp, Homo sapien
gaaatggataactcgtccaacttga

SEQ ID NO: 3396018 - DNA, 25 bp, Homo sapien
ggccacagatgcttggaccagaaat

SEQ ID NO: 3396019 - DNA, 25 bp, Homo sapien
gatctactgtatagcatagggccca

SEQ ID NO: 3396020 - DNA, 25 bp, Homo sapien
tagggcccatgattcacaacactgt

SEQ ID NO: 3396021 - DNA, 25 bp, Homo sapien
gagatagtggataagttcagggcat

SEQ ID NO: 3396022 - DNA, 25 bp, Homo sapien
aagacaaatattgcacaagctcact

SEQ ID NO: 3396023 - DNA, 25 bp, Homo sapien
cagcctggaagtcatgggcttttac

SEQ ID NO: 3396024 - DNA, 25 bp, Homo sapien
tgcaccaggctgagatgttactttt

SEQ ID NO: 3396025 - DNA, 25 bp, Homo sapien
gaagagtttaccttttagagatgct

SEQ ID NO: 3396026 - DNA, 25 bp, Homo sapien
tagagatgcttcgttttttaagaga

SEQ ID NO: 3396027 - DNA, 25 bp, Homo sapien
ctaggggtgcccacaaagagagaaa

SEQ ID NO: 3396028 - DNA, 25 bp, Homo sapien
tctgatcaggactaggggtgcccac

SEQ ID NO: 3396029 - DNA, 25 bp, Homo sapien
caacagagtatcaagatgtctgatc

SEQ ID NO: 3396030 - DNA, 25 bp, Homo sapien
accagaatgctggtactttcgtcat

SEQ ID NO: 3396031 - DNA, 25 bp, Homo sapien
ctagtaataaccatatcattagaca

SEQ ID NO: 3396032 - DNA, 25 bp, Homo sapien
atgatttttcagtatgggattttcc

SEQ ID NO: 3396033 - DNA, 25 bp, Homo sapien
agacatgatttttcagtatgggatt

SEQ ID NO: 3396034 - DNA, 25 bp, Homo sapien
gtaataaccatatcattagacatga

SEQ ID NO: 3396035 - DNA, 25 bp, Homo sapien
gaatcttttttaggaccctgaggca

SEQ ID NO: 3396036 - DNA, 25 bp, Homo sapien
tcaagcacgaatcttttttaggacc

SEQ ID NO: 3396037 - DNA, 25 bp, Homo sapien
gaactgtgtattcaagcacgaatct

SEQ ID NO: 3396038 - DNA, 25 bp, Homo sapien
caaaatgcacgaaactaaagaagaa

SEQ ID NO: 3396039 - DNA, 25 bp, Homo sapien
caaggcgtggactgtgaaacttgca

SEQ ID NO: 3396040 - DNA, 25 bp, Homo sapien
cacctacaaggcgtggactgtgaaa

SEQ ID NO: 3396041 - DNA, 25 bp, Homo sapien
cgtggactgtgaaacttgcaaagct

SEQ ID NO: 3396042 - DNA, 25 bp, Homo sapien
caaagctgaatgtggtcaactgcca

SEQ ID NO: 3396043 - DNA, 25 bp, Homo sapien
tgagaggcaaacctgacacatcggc

SEQ ID NO: 3396044 - DNA, 25 bp, Homo sapien
ggagtccgggtgacattcatctgta

SEQ ID NO: 3396045 - DNA, 25 bp, Homo sapien
ttggaccagggactcggtagaatcc

SEQ ID NO: 3396046 - DNA, 25 bp, Homo sapien
agagaagtccgcgtgagccctagtt

SEQ ID NO: 3396047 - DNA, 25 bp, Homo sapien
ttaagggattagctatgttctgacc

SEQ ID NO: 3396048 - DNA, 25 bp, Homo sapien
ctcaaaaacccaggtgtggatgaac

SEQ ID NO: 3396049 - DNA, 25 bp, Homo sapien
cagtgtggtccatttcatcagaaaa

SEQ ID NO: 3396050 - DNA, 25 bp, Homo sapien
gggacagctcggaatgccattttgt

SEQ ID NO: 3396051 - DNA, 25 bp, Homo sapien
caaatgcagcgggttagcagagtca

SEQ ID NO: 3396052 - DNA, 25 bp, Homo sapien
gctggtcatttctatggcccctgat

SEQ ID NO: 3396053 - DNA, 25 bp, Homo sapien
cagaaaggatggcttgctcttgacc

SEQ ID NO: 3396054 - DNA, 25 bp, Homo sapien
aagttggcaaagacaccccattgtg

SEQ ID NO: 3396055 - DNA, 25 bp, Homo sapien
cttccctaaaatggctgtcacactg

SEQ ID NO: 3396056 - DNA, 25 bp, Homo sapien
tacagtgtgaagactcaaaacctct

SEQ ID NO: 3396057 - DNA, 25 bp, Homo sapien
ggagatgagacactaccggtgctga

SEQ ID NO: 3396058 - DNA, 25 bp, Homo sapien
cctggagaggaatcgtcacatttgc

SEQ ID NO: 3396059 - DNA, 25 bp, Homo sapien
cagcagcagagtgatatcccaagat

SEQ ID NO: 3396060 - DNA, 25 bp, Homo sapien
catatacatccatggaggagggcga

SEQ ID NO: 3396061 - DNA, 25 bp, Homo sapien
gattttatggcatcggcagctgaag

SEQ ID NO: 3396062 - DNA, 25 bp, Homo sapien
caggctgctcaatgcttgtaccgag

SEQ ID NO: 3396063 - DNA, 25 bp, Homo sapien
tgggaaggctgtatggactgcccct

SEQ ID NO: 3396064 - DNA, 25 bp, Homo sapien
gaaacaatgtgacggcagctgctgc

SEQ ID NO: 3396065 - DNA, 25 bp, Homo sapien
gccagatgcggccttgtttgtgaca

SEQ ID NO: 3396066 - DNA, 25 bp, Homo sapien
tagtcatcgaactgctcttagctgg

SEQ ID NO: 3396067 - DNA, 25 bp, Homo sapien
ctgtaatggatgtcagcgcggccgt

SEQ ID NO: 3396068 - DNA, 25 bp, Homo sapien
caaccgggtggccttcactgaggct

SEQ ID NO: 3396069 - DNA, 25 bp, Homo sapien
caggttggatgccattttgccagtc

SEQ ID NO: 3396070 - DNA, 25 bp, Homo sapien
tctgctcgcaatggtggcaaccggg

SEQ ID NO: 3396071 - DNA, 25 bp, Homo sapien
gaacttcaaggattcactgatctgc

SEQ ID NO: 3396072 - DNA, 25 bp, Homo sapien
aagccttccgcaatgcctgtgtgag

SEQ ID NO: 3396073 - DNA, 25 bp, Homo sapien
agccctttggcgatactgaacttca

SEQ ID NO: 3396074 - DNA, 25 bp, Homo sapien
catcgttctggtggaaagccttccg

SEQ ID NO: 3396075 - DNA, 25 bp, Homo sapien
aagcagagagaagacttgttcagac

SEQ ID NO: 3396076 - DNA, 25 bp, Homo sapien
tcctaggggacactgatggtctgag

SEQ ID NO: 3396077 - DNA, 25 bp, Homo sapien
caccggtcaaggagtaagtaaagtg

SEQ ID NO: 3396078 - DNA, 25 bp, Homo sapien
ccaaggcaggatgcaccagagaatt

SEQ ID NO: 3396079 - DNA, 25 bp, Homo sapien
cagcatttcgatcaccacagcaggc

SEQ ID NO: 3396080 - DNA, 25 bp, Homo sapien
ggtagcataataaccaactgtgaca

SEQ ID NO: 3396081 - DNA, 25 bp, Homo sapien
cacagcaggcaaatacaccaacttc

SEQ ID NO: 3396082 - DNA, 25 bp, Homo sapien
tgtgacattatgagaatattccaga

SEQ ID NO: 3396083 - DNA, 25 bp, Homo sapien
gcagtgacgttgctgactccataca

SEQ ID NO: 3396084 - DNA, 25 bp, Homo sapien
ttcaggtctgcagtgacgttgctga

SEQ ID NO: 3396085 - DNA, 25 bp, Homo sapien
ggaggcaagtactgccacagactgt

SEQ ID NO: 3396086 - DNA, 25 bp, Homo sapien
gattccatggggaggcaagtactgc

SEQ ID NO: 3396087 - DNA, 25 bp, Homo sapien
tgttccattgtctgagcaaacttgc

SEQ ID NO: 3396088 - DNA, 25 bp, Homo sapien
gcttttggtattcaggactttcctc

SEQ ID NO: 3396089 - DNA, 25 bp, Homo sapien
caaacttgcaggactgtatgttgtc

SEQ ID NO: 3396090 - DNA, 25 bp, Homo sapien
tgtccgcttggctcacaaactgcag

SEQ ID NO: 3396091 - DNA, 25 bp, Homo sapien
ccaaataagaccagggtgtgtttca

SEQ ID NO: 3396092 - DNA, 25 bp, Homo sapien
caggccaaataagaccagggtgtgt

SEQ ID NO: 3396093 - DNA, 25 bp, Homo sapien
taagaccagggtgtgtttcatggag

SEQ ID NO: 3396094 - DNA, 25 bp, Homo sapien
agggagacaggccaaataagaccag

SEQ ID NO: 3396095 - DNA, 25 bp, Homo sapien
tgggaggcattggacgtgctcacaa

SEQ ID NO: 3396096 - DNA, 25 bp, Homo sapien
cgacgtacaccaaggtgactgcctg

SEQ ID NO: 3396097 - DNA, 25 bp, Homo sapien
taggtgaggtagaatcccaccagct

SEQ ID NO: 3396098 - DNA, 25 bp, Homo sapien
acggtgccgttgaggaatgtgctct

SEQ ID NO: 3396099 - DNA, 25 bp, Homo sapien
tctgatatgtcaaggttgggatatt

SEQ ID NO: 3396100 - DNA, 25 bp, Homo sapien
ggttgtttctgatatgtcaaggttg

SEQ ID NO: 3396101 - DNA, 25 bp, Homo sapien
tgtttctgatatgtcaaggttggga

SEQ ID NO: 3396102 - DNA, 25 bp, Homo sapien
tatgtcaaggttgggatattccagt

SEQ ID NO: 3396103 - DNA, 25 bp, Homo sapien
ttgtgcaggcccaccagcgaattgt

SEQ ID NO: 3396104 - DNA, 25 bp, Homo sapien
tgcacagtgtagcttcccagggtgg

SEQ ID NO: 3396105 - DNA, 25 bp, Homo sapien
catcatgaatagctgggccaggcgc

SEQ ID NO: 3396106 - DNA, 25 bp, Homo sapien
taaaccgccggccttgttgctggga

SEQ ID NO: 3396107 - DNA, 25 bp, Homo sapien
tggaccctgcaatcacccaggtgat

SEQ ID NO: 3396108 - DNA, 25 bp, Homo sapien
agggcattttgcatggaccctgcaa

SEQ ID NO: 3396109 - DNA, 25 bp, Homo sapien
cccaggtgatcagcagatgttcctc

SEQ ID NO: 3396110 - DNA, 25 bp, Homo sapien
aggccgagtgtttgcagggcatttt

SEQ ID NO: 3396111 - DNA, 25 bp, Homo sapien
cagcttgcagaaggacaacgtgatg

SEQ ID NO: 3396112 - DNA, 25 bp, Homo sapien
aatcaatggtgctcaggatcttggc

SEQ ID NO: 3396113 - DNA, 25 bp, Homo sapien
caacaaaggcttcccgttgtacagg

SEQ ID NO: 3396114 - DNA, 25 bp, Homo sapien
cagggtatagtaagtcagctccgct

SEQ ID NO: 3396115 - DNA, 25 bp, Homo sapien
tgtctgctcccatcctagacactgc

SEQ ID NO: 3396116 - DNA, 25 bp, Homo sapien
tctgctcccatcctagacactgctg

SEQ ID NO: 3396117 - DNA, 25 bp, Homo sapien
gtctgctcccatcctagacactgct

SEQ ID NO: 3396118 - DNA, 25 bp, Homo sapien
catggtgtcaggcttgaagtcgttc

SEQ ID NO: 3396119 - DNA, 25 bp, Homo sapien
cagcactgcagcgatgatccacagg

SEQ ID NO: 3396120 - DNA, 25 bp, Homo sapien
ctctctgcggcaggtttatcatggt

SEQ ID NO: 3396121 - DNA, 25 bp, Homo sapien
tgatgatgaccgtgaccacggcaat

SEQ ID NO: 3396122 - DNA, 25 bp, Homo sapien
gatttggcggtcttgatggtgcttc

SEQ ID NO: 3396123 - DNA, 25 bp, Homo sapien
tggtgcttccatcctgagcgacgtc

SEQ ID NO: 3396124 - DNA, 25 bp, Homo sapien
tcctgagtcacagggatgacctcct

SEQ ID NO: 3396125 - DNA, 25 bp, Homo sapien
tgaggagcatctctaatgggcagtg

SEQ ID NO: 3396126 - DNA, 25 bp, Homo sapien
cgaacatggcacgaatcacggccaa

SEQ ID NO: 3396127 - DNA, 25 bp, Homo sapien
ctttgcaaacagctgtaaacggttg

SEQ ID NO: 3396128 - DNA, 25 bp, Homo sapien
ggattaatcaactgccgaacatggc

SEQ ID NO: 3396129 - DNA, 25 bp, Homo sapien
tcacggccaatcactacactgaagt

SEQ ID NO: 3396130 - DNA, 25 bp, Homo sapien
tgtgcatgcatgtccactcacatga

SEQ ID NO: 3396131 - DNA, 25 bp, Homo sapien
gagtgagatttgtgcccgtgtgttt

SEQ ID NO: 3396132 - DNA, 25 bp, Homo sapien
tacagggagtcatcaagtcaaaact

SEQ ID NO: 3396133 - DNA, 25 bp, Homo sapien
gagcaaatttctgtagcaaaaccca

SEQ ID NO: 3396134 - DNA, 25 bp, Homo sapien
ctgatgacagagccattctcactgg

SEQ ID NO: 3396135 - DNA, 25 bp, Homo sapien
cttccctgattcgttgctgatgaca

SEQ ID NO: 3396136 - DNA, 25 bp, Homo sapien
gggcttccctgattcgttgctgatg

SEQ ID NO: 3396137 - DNA, 25 bp, Homo sapien
cctgattcgttgctgatgacagagc

SEQ ID NO: 3396138 - DNA, 25 bp, Homo sapien
aaacatcagttcattccgcaaaagg

SEQ ID NO: 3396139 - DNA, 25 bp, Homo sapien
tctgctgccttagtggaactggtgc

SEQ ID NO: 3396140 - DNA, 25 bp, Homo sapien
catacagactcctggcccttgtggg

SEQ ID NO: 3396141 - DNA, 25 bp, Homo sapien
tgagaggaatctccaagatgagcag

SEQ ID NO: 3396142 - DNA, 25 bp, Homo sapien
ttttagatgtagttttgctgggcag

SEQ ID NO: 3396143 - DNA, 25 bp, Homo sapien
gatgcatccatatttttagatgtag

SEQ ID NO: 3396144 - DNA, 25 bp, Homo sapien
cagatgcatccatatttttagatgt

SEQ ID NO: 3396145 - DNA, 25 bp, Homo sapien
agatgtagttttgctgggcagctct

SEQ ID NO: 3396146 - DNA, 25 bp, Homo sapien
ttatggcaatgagctgcacagaccc

SEQ ID NO: 3396147 - DNA, 25 bp, Homo sapien
tgtcaaagggttcagcggccacctt

SEQ ID NO: 3396148 - DNA, 25 bp, Homo sapien
gagttgtcaaatagaaccgctccct

SEQ ID NO: 3396149 - DNA, 25 bp, Homo sapien
tcgccgttgaggactgccgatgact

SEQ ID NO: 3396150 - DNA, 25 bp, Homo sapien
tgaatctggatccaaaacatgctcc

SEQ ID NO: 3396151 - DNA, 25 bp, Homo sapien
tttagactcggtgaatggagcacag

SEQ ID NO: 3396152 - DNA, 25 bp, Homo sapien
gctttgaggcgcagcttgttccgat

SEQ ID NO: 3396153 - DNA, 25 bp, Homo sapien
tccactgcagggaagtcgtaatatc

SEQ ID NO: 3396154 - DNA, 25 bp, Homo sapien
gcagaacctctggagggttatactg

SEQ ID NO: 3396155 - DNA, 25 bp, Homo sapien
tggtcactgaaagcagaacctctgg

SEQ ID NO: 3396156 - DNA, 25 bp, Homo sapien
tgctgtggcttggtcactgaaagca

SEQ ID NO: 3396157 - DNA, 25 bp, Homo sapien
cctctggagggttatactgtgaaca

SEQ ID NO: 3396158 - DNA, 25 bp, Homo sapien
tacagtttaagaaagtaactctcaa

SEQ ID NO: 3396159 - DNA, 25 bp, Homo sapien
gctggttaatcccaatacagtttaa

SEQ ID NO: 3396160 - DNA, 25 bp, Homo sapien
ggtaatgatgagttttacttgctgg

SEQ ID NO: 3396161 - DNA, 25 bp, Homo sapien
ctctgaaaatactgctgggtgggta

SEQ ID NO: 3396162 - DNA, 25 bp, Homo sapien
ggtcgctcccgagtcaccagaaggt

SEQ ID NO: 3396163 - DNA, 25 bp, Homo sapien
tccgctgttgcggattccacgccgg

SEQ ID NO: 3396164 - DNA, 25 bp, Homo sapien
agaaggtccatctcggtttcccctg

SEQ ID NO: 3396165 - DNA, 25 bp, Homo sapien
gagactgccggcttctgtagacaga

SEQ ID NO: 3396166 - DNA, 25 bp, Homo sapien
tcaagtgaattctaacccatggccg

SEQ ID NO: 3396167 - DNA, 25 bp, Homo sapien
agtgaattctaacccatggccgtgg

SEQ ID NO: 3396168 - DNA, 25 bp, Homo sapien
gaattctaacccatggccgtggtcc

SEQ ID NO: 3396169 - DNA, 25 bp, Homo sapien
attctaacccatggccgtggtccct

SEQ ID NO: 3396170 - DNA, 25 bp, Homo sapien
agatatttctcttggattagaagtc

SEQ ID NO: 3396171 - DNA, 25 bp, Homo sapien
tgatttcccatgagcagatatttct

SEQ ID NO: 3396172 - DNA, 25 bp, Homo sapien
gagcctgatttcccatgagcagata

SEQ ID NO: 3396173 - DNA, 25 bp, Homo sapien
gatatttctcttggattagaagtcc

SEQ ID NO: 3396174 - DNA, 25 bp, Homo sapien
gcaggggaaattcaattactgagca

SEQ ID NO: 3396175 - DNA, 25 bp, Homo sapien
ggggaaattcaattactgagcagcc

SEQ ID NO: 3396176 - DNA, 25 bp, Homo sapien
ggaaattcaattactgagcagccca

SEQ ID NO: 3396177 - DNA, 25 bp, Homo sapien
ggagcaggggaaattcaattactga

SEQ ID NO: 3396178 - DNA, 25 bp, Homo sapien
cttaggtgccagctcaacttcccgt

SEQ ID NO: 3396179 - DNA, 25 bp, Homo sapien
cctaaagcaaaacatcttccccgtg

SEQ ID NO: 3396180 - DNA, 25 bp, Homo sapien
cagaagtcttaggtgccagctcaac

SEQ ID NO: 3396181 - DNA, 25 bp, Homo sapien
cttccccgtgtaacagaagtcttag

SEQ ID NO: 3396182 - DNA, 25 bp, Homo sapien
aagagtacatactgaataaatccat

SEQ ID NO: 3396183 - DNA, 25 bp, Homo sapien
acatagatgaatcttgagtgaaaga

SEQ ID NO: 3396184 - DNA, 25 bp, Homo sapien
atagatgaatcttgagtgaaagaag

SEQ ID NO: 3396185 - DNA, 25 bp, Homo sapien
gagtacatactgaataaatccattt

SEQ ID NO: 3396186 - DNA, 25 bp, Homo sapien
ggaatagtacccagtataaaagaga

SEQ ID NO: 3396187 - DNA, 25 bp, Homo sapien
tggaatagtacccagtataaaagag

SEQ ID NO: 3396188 - DNA, 25 bp, Homo sapien
caaatgttggtgaggtttaagacta

SEQ ID NO: 3396189 - DNA, 25 bp, Homo sapien
catttcatattcagtggaatggcta

SEQ ID NO: 3396190 - DNA, 25 bp, Homo sapien
aagacaagcaactcaatttagaaat

SEQ ID NO: 3396191 - DNA, 25 bp, Homo sapien
tagtgggagaggcaacagtgcaaaa

SEQ ID NO: 3396192 - DNA, 25 bp, Homo sapien
cccggggctcaggaactctgtcaat

SEQ ID NO: 3396193 - DNA, 25 bp, Homo sapien
ccggggctcaggaactctgtcaatg

SEQ ID NO: 3396194 - DNA, 25 bp, Homo sapien
ctgtcgagacctggaatagccccgg

SEQ ID NO: 3396195 - DNA, 25 bp, Homo sapien
agacctggaatagccccggggctca

SEQ ID NO: 3396196 - DNA, 25 bp, Homo sapien
cctgacctcgtcgatggatggctgg

SEQ ID NO: 3396197 - DNA, 25 bp, Homo sapien
tggtcaccacctccgaatagggcag

SEQ ID NO: 3396198 - DNA, 25 bp, Homo sapien
tcttggtgccggctctggcctgcgt

SEQ ID NO: 3396199 - DNA, 25 bp, Homo sapien
catttctgggcggtaggtcggcacc

SEQ ID NO: 3396200 - DNA, 25 bp, Homo sapien
tcttgctatcatggatttatgcatg

SEQ ID NO: 3396201 - DNA, 25 bp, Homo sapien
gctatcatggatttatgcatgaaac

SEQ ID NO: 3396202 - DNA, 25 bp, Homo sapien
gatttatgcatgaaactctccctgg

SEQ ID NO: 3396203 - DNA, 25 bp, Homo sapien
catggatttatgcatgaaactctcc

SEQ ID NO: 3396204 - DNA, 25 bp, Homo sapien
atgggccatcgcatcttcttacctg

SEQ ID NO: 3396205 - DNA, 25 bp, Homo sapien
aattgagatacgatggctatgggcc

SEQ ID NO: 3396206 - DNA, 25 bp, Homo sapien
gttagttctggtttgatgacccatc

SEQ ID NO: 3396207 - DNA, 25 bp, Homo sapien
tgtccttcttgccacaaacactaag

SEQ ID NO: 3396208 - DNA, 25 bp, Homo sapien
cattaattccatctgtaaagagtct

SEQ ID NO: 3396209 - DNA, 25 bp, Homo sapien
gatgtggagtccaatttcttcacag

SEQ ID NO: 3396210 - DNA, 25 bp, Homo sapien
ggaagatgtgttagccctgttgtct

SEQ ID NO: 3396211 - DNA, 25 bp, Homo sapien
tagatccattatgactgctagcaaa

SEQ ID NO: 3396212 - DNA, 25 bp, Homo sapien
aggagaggacataagtctcatcaaa

SEQ ID NO: 3396213 - DNA, 25 bp, Homo sapien
gacataagtctcatcaaaatttggg

SEQ ID NO: 3396214 - DNA, 25 bp, Homo sapien
gaggacataagtctcatcaaaattt

SEQ ID NO: 3396215 - DNA, 25 bp, Homo sapien
gggaatctgaaagacaaggaacctg

SEQ ID NO: 3396216 - DNA, 25 bp, Homo sapien
cacaggaccagtccggggaggtacg

SEQ ID NO: 3396217 - DNA, 25 bp, Homo sapien
cgcctgagagaagcgacagccacag

SEQ ID NO: 3396218 - DNA, 25 bp, Homo sapien
tgagagaagcgacagccacaggacc

SEQ ID NO: 3396219 - DNA, 25 bp, Homo sapien
gtggaggcggtgagcccatgaccat

SEQ ID NO: 3396220 - DNA, 25 bp, Homo sapien
ggccctgtagactcggccattctgg

SEQ ID NO: 3396221 - DNA, 25 bp, Homo sapien
tgatccaactgcgtcacggacacag

SEQ ID NO: 3396222 - DNA, 25 bp, Homo sapien
gcctctggacatctgcgtgaaggag

SEQ ID NO: 3396223 - DNA, 25 bp, Homo sapien
tgagtaatttaaagccgactgatcc

SEQ ID NO: 3396224 - DNA, 25 bp, Homo sapien
ggcgaacactgctggcaccgtatta

SEQ ID NO: 3396225 - DNA, 25 bp, Homo sapien
tgaagtagccggtgaagccaggtct

SEQ ID NO: 3396226 - DNA, 25 bp, Homo sapien
gcctggttcctataggatgagggag

SEQ ID NO: 3396227 - DNA, 25 bp, Homo sapien
gggagctcattctctcctgcatagg

SEQ ID NO: 3396228 - DNA, 25 bp, Homo sapien
tcagacgggtcgttttctgccaggc

SEQ ID NO: 3396229 - DNA, 25 bp, Homo sapien
ctggaactcaaacatgtctgtctgt

SEQ ID NO: 3396230 - DNA, 25 bp, Homo sapien
gctggctgtactgacgaggaagcct

SEQ ID NO: 3396231 - DNA, 25 bp, Homo sapien
tgtctgttttttggccagcttggcc

SEQ ID NO: 3396232 - DNA, 25 bp, Homo sapien
gagagagtatcaaacataaggcccc

SEQ ID NO: 3396233 - DNA, 25 bp, Homo sapien
cagagtttggaagtccagagtccca

SEQ ID NO: 3396234 - DNA, 25 bp, Homo sapien
cacacttggcgagggaaccagagtc

SEQ ID NO: 3396235 - DNA, 25 bp, Homo sapien
gggcaacttgcaacatcatggtcac

SEQ ID NO: 3396236 - DNA, 25 bp, Homo sapien
ggttttggactacaacaactggcca

SEQ ID NO: 3396237 - DNA, 25 bp, Homo sapien
gaatgcctatgtggatagacgtagg

SEQ ID NO: 3396238 - DNA, 25 bp, Homo sapien
tcaataaaatctcgcactgtccaca

SEQ ID NO: 3396239 - DNA, 25 bp, Homo sapien
tcataccatttgcatgaacaggctg

SEQ ID NO: 3396240 - DNA, 25 bp, Homo sapien
tgagtgggataacatgaacagactg

SEQ ID NO: 3396241 - DNA, 25 bp, Homo sapien
tagtcgtctcagttgactcactcag

SEQ ID NO: 3396242 - DNA, 25 bp, Homo sapien
taatactattcttgaacccatggtg

SEQ ID NO: 3396243 - DNA, 25 bp, Homo sapien
caacttaaggttttcctctcatcta

SEQ ID NO: 3396244 - DNA, 25 bp, Homo sapien
gggctctctgggaaccttatttcaa

SEQ ID NO: 3396245 - DNA, 25 bp, Homo sapien
gaggcacttttgaccatctcttaga

SEQ ID NO: 3396246 - DNA, 25 bp, Homo sapien
tctcttagagtcagctgtccagtca

SEQ ID NO: 3396247 - DNA, 25 bp, Homo sapien
aacagggtgtttgttcattgctgcc

SEQ ID NO: 3396248 - DNA, 25 bp, Homo sapien
tgcaggccacatggcgagatggaaa

SEQ ID NO: 3396249 - DNA, 25 bp, Homo sapien
gaaagcaagcaggttcgtgaaccag

SEQ ID NO: 3396250 - DNA, 25 bp, Homo sapien
ccaggaggttgggactgaatcactg

SEQ ID NO: 3396251 - DNA, 25 bp, Homo sapien
tcactccacttcgtggtacttctgc

SEQ ID NO: 3396252 - DNA, 25 bp, Homo sapien
tacactgtatctgaagttcgttata

SEQ ID NO: 3396253 - DNA, 25 bp, Homo sapien
tatggagttcttcatatgaccctta

SEQ ID NO: 3396254 - DNA, 25 bp, Homo sapien
caaatgcatcatcctctatacactg

SEQ ID NO: 3396255 - DNA, 25 bp, Homo sapien
tcttggcaagaacattatggagttc

SEQ ID NO: 3396256 - DNA, 25 bp, Homo sapien
tgcacctcccctgatgcagagcatg

SEQ ID NO: 3396257 - DNA, 25 bp, Homo sapien
cacacaatggacctttactgcacct

SEQ ID NO: 3396258 - DNA, 25 bp, Homo sapien
gaggtctccgtttccttgatggtac

SEQ ID NO: 3396259 - DNA, 25 bp, Homo sapien
tgcacaagcctcagatcataggtct

SEQ ID NO: 3396260 - DNA, 25 bp, Homo sapien
catgcttaaatgacacggccctgcc

SEQ ID NO: 3396261 - DNA, 25 bp, Homo sapien
cactaatgagaaagctggttggcca

SEQ ID NO: 3396262 - DNA, 25 bp, Homo sapien
ggtggctcacccataggcagatgaa

SEQ ID NO: 3396263 - DNA, 25 bp, Homo sapien
gcaagagcaaaggtagctgtctcca

SEQ ID NO: 3396264 - DNA, 25 bp, Homo sapien
gactgctctccgagtgctggctgct

SEQ ID NO: 3396265 - DNA, 25 bp, Homo sapien
ctctgtgtggtagtatccaggggac

SEQ ID NO: 3396266 - DNA, 25 bp, Homo sapien
tgtggtagtatccaggggactgctc

SEQ ID NO: 3396267 - DNA, 25 bp, Homo sapien
ctgatgtgcaagtgaagatgcccct

SEQ ID NO: 3396268 - DNA, 25 bp, Homo sapien
tgggccttgttcagaaatcgcttcc

SEQ ID NO: 3396269 - DNA, 25 bp, Homo sapien
gcaagacattgtgctaactgggcct

SEQ ID NO: 3396270 - DNA, 25 bp, Homo sapien
gacccagcggctgtatcaataactg

SEQ ID NO: 3396271 - DNA, 25 bp, Homo sapien
gagtttcaagtgtgtgcaccctcac

SEQ ID NO: 3396272 - DNA, 25 bp, Homo sapien
tggccgtgagccacattagtagcac

SEQ ID NO: 3396273 - DNA, 25 bp, Homo sapien
catgcaagtgtgtggccgtgagcca

SEQ ID NO: 3396274 - DNA, 25 bp, Homo sapien
ttatccatgcaagtgtgtggccgtg

SEQ ID NO: 3396275 - DNA, 25 bp, Homo sapien
tgtgtggccgtgagccacattagta

SEQ ID NO: 3396276 - DNA, 25 bp, Homo sapien
taacagcaactccagatgaggctag

SEQ ID NO: 3396277 - DNA, 25 bp, Homo sapien
tcccggcagaggctaaggacgtaca

SEQ ID NO: 3396278 - DNA, 25 bp, Homo sapien
tttccttggcaaaacatggtgtcat

SEQ ID NO: 3396279 - DNA, 25 bp, Homo sapien
tgtgctcctcaaaatcaccatggga

SEQ ID NO: 3396280 - DNA, 25 bp, Homo sapien
tagcaacccccaacaggcactgttt

SEQ ID NO: 3396281 - DNA, 25 bp, Homo sapien
caggactggaatggctctttagcaa

SEQ ID NO: 3396282 - DNA, 25 bp, Homo sapien
ctggcttgtgaaagggattccatct

SEQ ID NO: 3396283 - DNA, 25 bp, Homo sapien
catcacccaagctgggatggctcct

SEQ ID NO: 3396284 - DNA, 25 bp, Homo sapien
catctttctttagctgctaagtcat

SEQ ID NO: 3396285 - DNA, 25 bp, Homo sapien
ttctttatgctctgagaatggcacc

SEQ ID NO: 3396286 - DNA, 25 bp, Homo sapien
tgttggccccaggaatacatctttc

SEQ ID NO: 3396287 - DNA, 25 bp, Homo sapien
cacctaagtggacattggcttcttc

SEQ ID NO: 3396288 - DNA, 25 bp, Homo sapien
gagcaggcggcaccacatatgttct

SEQ ID NO: 3396289 - DNA, 25 bp, Homo sapien
cagcctgtgagcttgtgactcctgg

SEQ ID NO: 3396290 - DNA, 25 bp, Homo sapien
tcctgtccaataggcggaagccaga

SEQ ID NO: 3396291 - DNA, 25 bp, Homo sapien
tctggatagggctgaacataaggca

SEQ ID NO: 3396292 - DNA, 25 bp, Homo sapien
cactccttcgtaggcacattctttc

SEQ ID NO: 3396293 - DNA, 25 bp, Homo sapien
ggttgaccctcaacgatgtttccat

SEQ ID NO: 3396294 - DNA, 25 bp, Homo sapien
tggttccacactccttcgtaggcac

SEQ ID NO: 3396295 - DNA, 25 bp, Homo sapien
cagtggttgaccctcaacgatgttt

SEQ ID NO: 3396296 - DNA, 25 bp, Homo sapien
tgagtgaagattcatcagagtccag

SEQ ID NO: 3396297 - DNA, 25 bp, Homo sapien
caggacctgtaggtctcccaaaggc

SEQ ID NO: 3396298 - DNA, 25 bp, Homo sapien
tgaagtgggcaccaaaagaaaaagc

SEQ ID NO: 3396299 - DNA, 25 bp, Homo sapien
aaaagcaagctctcatatatgttga

SEQ ID NO: 3396300 - DNA, 25 bp, Homo sapien
gaactgaaaagagtctacctagcca

SEQ ID NO: 3396301 - DNA, 25 bp, Homo sapien
atacaccaacagtgatcaagctaag

SEQ ID NO: 3396302 - DNA, 25 bp, Homo sapien
tgatcaagctaagaatcaaatgaag

SEQ ID NO: 3396303 - DNA, 25 bp, Homo sapien
acatggaactgaaaagagtctacct

SEQ ID NO: 3396304 - DNA, 25 bp, Homo sapien
cctggccagaactcgaaagagggca

SEQ ID NO: 3396305 - DNA, 25 bp, Homo sapien
gagggagccataatcctcctgggag

SEQ ID NO: 3396306 - DNA, 25 bp, Homo sapien
tgcctggaaacaagttcggtgctgc

SEQ ID NO: 3396307 - DNA, 25 bp, Homo sapien
ggtggcgaggcatgaaagcccttct

SEQ ID NO: 3396308 - DNA, 25 bp, Homo sapien
ccgaagctctagtcctgcttaatct

SEQ ID NO: 3396309 - DNA, 25 bp, Homo sapien
attttgactgtctgcttttccgaag

SEQ ID NO: 3396310 - DNA, 25 bp, Homo sapien
gcttttccgaagctctagtcctgct

SEQ ID NO: 3396311 - DNA, 25 bp, Homo sapien
gactgtctgcttttccgaagctcta

SEQ ID NO: 3396312 - DNA, 25 bp, Homo sapien
tgcatcactttaacgacactgtcct

SEQ ID NO: 3396313 - DNA, 25 bp, Homo sapien
gagaatgtttgtgtgggcaaacgtc

SEQ ID NO: 3396314 - DNA, 25 bp, Homo sapien
gcaaacgtcttaattgccaagggta

SEQ ID NO: 3396315 - DNA, 25 bp, Homo sapien
tgttgtcctttagcccacagcagcc

SEQ ID NO: 3396316 - DNA, 25 bp, Homo sapien
ggcctcgcgcaattggcaccagggc

SEQ ID NO: 3396317 - DNA, 25 bp, Homo sapien
atgggcctcgcgcaattggcaccag

SEQ ID NO: 3396318 - DNA, 25 bp, Homo sapien
tcatgggcctcgcgcaattggcacc

SEQ ID NO: 3396319 - DNA, 25 bp, Homo sapien
cctcatgggcctcgcgcaattggca

SEQ ID NO: 3396320 - DNA, 25 bp, Homo sapien
ttccatctctgtccatgttgcggag

SEQ ID NO: 3396321 - DNA, 25 bp, Homo sapien
ttcccaaaagaaggaccctggctgc

SEQ ID NO: 3396322 - DNA, 25 bp, Homo sapien
cagctcgggctacgtttccatctct

SEQ ID NO: 3396323 - DNA, 25 bp, Homo sapien
ccatgttgcggaggaggtggccagg

SEQ ID NO: 3396324 - DNA, 25 bp, Homo sapien
gtgtgacccttgtctagggccacag

SEQ ID NO: 3396325 - DNA, 25 bp, Homo sapien
agaggagggagtggttgccagaacc

SEQ ID NO: 3396326 - DNA, 25 bp, Homo sapien
taggcgggtaggtgtgagaggaggg

SEQ ID NO: 3396327 - DNA, 25 bp, Homo sapien
ggtccttcataagtgtgacccttgt

SEQ ID NO: 3396328 - DNA, 25 bp, Homo sapien
tgtggtacaagtccttttaatccag

SEQ ID NO: 3396329 - DNA, 25 bp, Homo sapien
tgtgccattcctgtggtacaagtcc

SEQ ID NO: 3396330 - DNA, 25 bp, Homo sapien
cattcctgtggtacaagtcctttta

SEQ ID NO: 3396331 - DNA, 25 bp, Homo sapien
gggcccatgtgccattcctgtggta

SEQ ID NO: 3396332 - DNA, 25 bp, Homo sapien
tagagaaaccaagtttgtcatcaac

SEQ ID NO: 3396333 - DNA, 25 bp, Homo sapien
ctggctataacttcatggattatgt

SEQ ID NO: 3396334 - DNA, 25 bp, Homo sapien
cacttgagttttcttgcatacttgt

SEQ ID NO: 3396335 - DNA, 25 bp, Homo sapien
ggattatgttataattaagccatcc

SEQ ID NO: 3396336 - DNA, 25 bp, Homo sapien
cctgacagcagtttatgggtgttca

SEQ ID NO: 3396337 - DNA, 25 bp, Homo sapien
ctcatagggactttgcctcctgaca

SEQ ID NO: 3396338 - DNA, 25 bp, Homo sapien
cctcctgacagcagtttatgggtgt

SEQ ID NO: 3396339 - DNA, 25 bp, Homo sapien
gactttgcctcctgacagcagttta

SEQ ID NO: 3396340 - DNA, 25 bp, Homo sapien
gaattcaagactgttctttcatcac

SEQ ID NO: 3396341 - DNA, 25 bp, Homo sapien
tgcagaaacaaccgtagggttttgc

SEQ ID NO: 3396342 - DNA, 25 bp, Homo sapien
ggtgacatagtgctttggagcccag

SEQ ID NO: 3396343 - DNA, 25 bp, Homo sapien
gctgaagttgaattcaagactgttc

SEQ ID NO: 3396344 - DNA, 25 bp, Homo sapien
gttaggaagctccaacaggatggta

SEQ ID NO: 3396345 - DNA, 25 bp, Homo sapien
atcaacgaagagggacttgtgtctc

SEQ ID NO: 3396346 - DNA, 25 bp, Homo sapien
gacttgtgtctctcagttggttcca

SEQ ID NO: 3396347 - DNA, 25 bp, Homo sapien
agcaggggcgttaggaagctccaac

SEQ ID NO: 3396348 - DNA, 25 bp, Homo sapien
tgtgacatatccctaaagaggctga

SEQ ID NO: 3396349 - DNA, 25 bp, Homo sapien
ccgggcacggcaaattgtgacatat

SEQ ID NO: 3396350 - DNA, 25 bp, Homo sapien
gatctgatggctgacagtgtgtcca

SEQ ID NO: 3396351 - DNA, 25 bp, Homo sapien
agagccaccgggcacggcaaattgt

SEQ ID NO: 3396352 - DNA, 25 bp, Homo sapien
tgggcttcccagaatagcttggtcc

SEQ ID NO: 3396353 - DNA, 25 bp, Homo sapien
cataggaccacatttacctgggaaa

SEQ ID NO: 3396354 - DNA, 25 bp, Homo sapien
ttaaattgtggcacaaacaacctcc

SEQ ID NO: 3396355 - DNA, 25 bp, Homo sapien
aggaaagactgttctgggcttccca

SEQ ID NO: 3396356 - DNA, 25 bp, Homo sapien
tcccacagttagaaggcgaagtcgc

SEQ ID NO: 3396357 - DNA, 25 bp, Homo sapien
tggtgctgactctcaatagccccac

SEQ ID NO: 3396358 - DNA, 25 bp, Homo sapien
tgctatggccagaactgaaacttag

SEQ ID NO: 3396359 - DNA, 25 bp, Homo sapien
cgcagctacatacaacgtggccaac

SEQ ID NO: 3396360 - DNA, 25 bp, Homo sapien
ccccactgacttggacataagtgaa

SEQ ID NO: 3396361 - DNA, 25 bp, Homo sapien
cacactcctgttattctgggataag

SEQ ID NO: 3396362 - DNA, 25 bp, Homo sapien
ccttaatttctaggtgggtgcctgt

SEQ ID NO: 3396363 - DNA, 25 bp, Homo sapien
atttgtaaagggtctgccagatagg

SEQ ID NO: 3396364 - DNA, 25 bp, Homo sapien
gggagttaggaatcgaacaccagtc

SEQ ID NO: 3396365 - DNA, 25 bp, Homo sapien
cgaagagggattcatgtgtctgtct

SEQ ID NO: 3396366 - DNA, 25 bp, Homo sapien
tcaacgaagagggattcatgtgtct

SEQ ID NO: 3396367 - DNA, 25 bp, Homo sapien
gagttaggaatcgaacaccagtcat

SEQ ID NO: 3396368 - DNA, 25 bp, Homo sapien
aaatgatacacacctttcacaaggg

SEQ ID NO: 3396369 - DNA, 25 bp, Homo sapien
tgaacactctactacatgtgactgg

SEQ ID NO: 3396370 - DNA, 25 bp, Homo sapien
ggctcttagcacactcacagatgtt

SEQ ID NO: 3396371 - DNA, 25 bp, Homo sapien
tatgttttaccatctgcatccagcc

SEQ ID NO: 3396372 - DNA, 25 bp, Homo sapien
tgagcatcctctctcacatggaacg

SEQ ID NO: 3396373 - DNA, 25 bp, Homo sapien
cattagtacatctttggagggtggg

SEQ ID NO: 3396374 - DNA, 25 bp, Homo sapien
ccttaatgcagagctagaggacttc

SEQ ID NO: 3396375 - DNA, 25 bp, Homo sapien
tcagtcagggacaacaagatcctta

SEQ ID NO: 3396376 - DNA, 25 bp, Homo sapien
tttaagctttgcagaccaagaggca

SEQ ID NO: 3396377 - DNA, 25 bp, Homo sapien
gagtccagcataataatacacatct

SEQ ID NO: 3396378 - DNA, 25 bp, Homo sapien
cataacataattattgagtccagca

SEQ ID NO: 3396379 - DNA, 25 bp, Homo sapien
gaggcaaaatcaagggtattatgag

SEQ ID NO: 3396380 - DNA, 25 bp, Homo sapien
gataaacctagccttcagccttaga

SEQ ID NO: 3396381 - DNA, 25 bp, Homo sapien
catcacacgtgtggactgtaactca

SEQ ID NO: 3396382 - DNA, 25 bp, Homo sapien
gggtatccatacaaaccaggaagat

SEQ ID NO: 3396383 - DNA, 25 bp, Homo sapien
gaactagaagtcagctgttgggctc

SEQ ID NO: 3396384 - DNA, 25 bp, Homo sapien
tccttgtcctaaagttcaaagagca

SEQ ID NO: 3396385 - DNA, 25 bp, Homo sapien
gaaatctccatctttatcgctgata

SEQ ID NO: 3396386 - DNA, 25 bp, Homo sapien
taaggacggtggttgtcaactttca

SEQ ID NO: 3396387 - DNA, 25 bp, Homo sapien
tattgggtcgacttgatcctttgga

SEQ ID NO: 3396388 - DNA, 25 bp, Homo sapien
aacgcgtagttcaaaatagtgtcag

SEQ ID NO: 3396389 - DNA, 25 bp, Homo sapien
tataaatgataggtcaaatcggttg

SEQ ID NO: 3396390 - DNA, 25 bp, Homo sapien
gatcatttaaaggagcaacttttgg

SEQ ID NO: 3396391 - DNA, 25 bp, Homo sapien
tattgtggttagagaatttgctctg

SEQ ID NO: 3396392 - DNA, 25 bp, Homo sapien
gcagagggccgaaacaaaaatgaag

SEQ ID NO: 3396393 - DNA, 25 bp, Homo sapien
gttagacgtcgatacagctgccgga

SEQ ID NO: 3396394 - DNA, 25 bp, Homo sapien
gaagcatggcactgtctaatcacta

SEQ ID NO: 3396395 - DNA, 25 bp, Homo sapien
tgagtcagtacatagcagtggaagc

SEQ ID NO: 3396396 - DNA, 25 bp, Homo sapien
gttgccaggctagtggtatttaact

SEQ ID NO: 3396397 - DNA, 25 bp, Homo sapien
tgttgccaggctagtggtatttaac

SEQ ID NO: 3396398 - DNA, 25 bp, Homo sapien
ttgccaggctagtggtatttaactc

SEQ ID NO: 3396399 - DNA, 25 bp, Homo sapien
cgggatgcgagaacagagctggaga

SEQ ID NO: 3396400 - DNA, 25 bp, Homo sapien
atgcgagaacagagctggagagatt

SEQ ID NO: 3396401 - DNA, 25 bp, Homo sapien
tgcgagaacagagctggagagattt

SEQ ID NO: 3396402 - DNA, 25 bp, Homo sapien
gagaacagagctggagagatttgac

SEQ ID NO: 3396403 - DNA, 25 bp, Homo sapien
cagaccgaggcagatttggcaacaa

SEQ ID NO: 3396404 - DNA, 25 bp, Homo sapien
gctcttgctgagtggacaagtctcg

SEQ ID NO: 3396405 - DNA, 25 bp, Homo sapien
taaaatttcgcaggaggagttgggc

SEQ ID NO: 3396406 - DNA, 25 bp, Homo sapien
gattttgagcgaggcttcctgcata

SEQ ID NO: 3396407 - DNA, 25 bp, Homo sapien
agagcagacatcttcgtgcctccat

SEQ ID NO: 3396408 - DNA, 25 bp, Homo sapien
ggatacttaactctgcgggatctaa

SEQ ID NO: 3396409 - DNA, 25 bp, Homo sapien
cagttcatcccttcacacgcgggat

SEQ ID NO: 3396410 - DNA, 25 bp, Homo sapien
catcttcgtgcctccatcagttatg

SEQ ID NO: 3396411 - DNA, 25 bp, Homo sapien
tatcgccatccttagttcaccagag

SEQ ID NO: 3396412 - DNA, 25 bp, Homo sapien
cagtctcagagaacttaggcgtaac

SEQ ID NO: 3396413 - DNA, 25 bp, Homo sapien
gcgtaactacgccagcatttcacta

SEQ ID NO: 3396414 - DNA, 25 bp, Homo sapien
taaatgacgggcgtgtgaagtccag

SEQ ID NO: 3396415 - DNA, 25 bp, Homo sapien
cctgaaactcctaccagcttttgga

SEQ ID NO: 3396416 - DNA, 25 bp, Homo sapien
caagtgcaataggacagcagaagca

SEQ ID NO: 3396417 - DNA, 25 bp, Homo sapien
gcagaagcaaatgcagtgtacctga

SEQ ID NO: 3396418 - DNA, 25 bp, Homo sapien
ggtcatagctgcaccaagtccaagt

SEQ ID NO: 3396419 - DNA, 25 bp, Homo sapien
tgagcccggatgcttgtacttgata

SEQ ID NO: 3396420 - DNA, 25 bp, Homo sapien
aggagttaatgtctgaaggatttac

SEQ ID NO: 3396421 - DNA, 25 bp, Homo sapien
tgttcagcttgatctctcacagtcc

SEQ ID NO: 3396422 - DNA, 25 bp, Homo sapien
actgtgttcagcttgatctctcaca

SEQ ID NO: 3396423 - DNA, 25 bp, Homo sapien
atcactggcagtcttgcggcccagg

SEQ ID NO: 3396424 - DNA, 25 bp, Homo sapien
cctgcaattttatccttctccctgt

SEQ ID NO: 3396425 - DNA, 25 bp, Homo sapien
cacaaccaggattgctgacactggg

SEQ ID NO: 3396426 - DNA, 25 bp, Homo sapien
gccataaagcgtaattctcctgaat

SEQ ID NO: 3396427 - DNA, 25 bp, Homo sapien
gaagatccactcatcatgcacccag

SEQ ID NO: 3396428 - DNA, 25 bp, Homo sapien
cagtaaggttccatataccagtggc

SEQ ID NO: 3396429 - DNA, 25 bp, Homo sapien
tagtggccactgacatgtttaagcc

SEQ ID NO: 3396430 - DNA, 25 bp, Homo sapien
tgtttaagcctcaacagggtacagt

SEQ ID NO: 3396431 - DNA, 25 bp, Homo sapien
cataaccactaactcgaagactttt

SEQ ID NO: 3396432 - DNA, 25 bp, Homo sapien
gagaaagtgaggtatatgagaaaat

SEQ ID NO: 3396433 - DNA, 25 bp, Homo sapien
gaattgtggaatcataaccactaac

SEQ ID NO: 3396434 - DNA, 25 bp, Homo sapien
tgtggaatcataaccactaactcga

SEQ ID NO: 3396435 - DNA, 25 bp, Homo sapien
gccccagtgaaaaaggcctcttcca

SEQ ID NO: 3396436 - DNA, 25 bp, Homo sapien
aaggcctcttccagaaatgcccagc

SEQ ID NO: 3396437 - DNA, 25 bp, Homo sapien
catgcttagggaggccccagtgaaa

SEQ ID NO: 3396438 - DNA, 25 bp, Homo sapien
tcttccagaaatgcccagcatcagg

SEQ ID NO: 3396439 - DNA, 25 bp, Homo sapien
tgctgaaatcctacacctgttaaaa

SEQ ID NO: 3396440 - DNA, 25 bp, Homo sapien
tatatgagaaggaatagctacccac

SEQ ID NO: 3396441 - DNA, 25 bp, Homo sapien
caggtgaggtgataaaaagtaagga

SEQ ID NO: 3396442 - DNA, 25 bp, Homo sapien
taacatcaaattattcttactgctg

SEQ ID NO: 3396443 - DNA, 25 bp, Homo sapien
tgtgtttaaacctgcatgcccatgt

SEQ ID NO: 3396444 - DNA, 25 bp, Homo sapien
catgttgcctgatcaaaatccttca

SEQ ID NO: 3396445 - DNA, 25 bp, Homo sapien
tgcatgaacataggagaaagtggct

SEQ ID NO: 3396446 - DNA, 25 bp, Homo sapien
tggtctttcatcatggcggtcacct

SEQ ID NO: 3396447 - DNA, 25 bp, Homo sapien
agatgtgtttgtgagaacatctgag

SEQ ID NO: 3396448 - DNA, 25 bp, Homo sapien
caagagcagatgtgtttgtgagaac

SEQ ID NO: 3396449 - DNA, 25 bp, Homo sapien
gtttgtgagaacatctgagatgccc

SEQ ID NO: 3396450 - DNA, 25 bp, Homo sapien
gcagccaagctgagcaagagcagat

SEQ ID NO: 3396451 - DNA, 25 bp, Homo sapien
ggagcacagactgcgggtgtggaga

SEQ ID NO: 3396452 - DNA, 25 bp, Homo sapien
ctgaatggtgttctcagcccctgga

SEQ ID NO: 3396453 - DNA, 25 bp, Homo sapien
catcgatgtcttttgagcagggaga

SEQ ID NO: 3396454 - DNA, 25 bp, Homo sapien
tgaagggccatcgatgtcttttgag

SEQ ID NO: 3396455 - DNA, 25 bp, Homo sapien
cgtaagtttgggttctctggacctg

SEQ ID NO: 3396456 - DNA, 25 bp, Homo sapien
caggaaggagcttaacgtaagtttg

SEQ ID NO: 3396457 - DNA, 25 bp, Homo sapien
cctcgtagggctgagtgaaatttgc

SEQ ID NO: 3396458 - DNA, 25 bp, Homo sapien
aatttgctgatagagctgcagaatc

SEQ ID NO: 3396459 - DNA, 25 bp, Homo sapien
gctgctcaggaatggggtcctccaa

SEQ ID NO: 3396460 - DNA, 25 bp, Homo sapien
ccaaatgcaacgcagagagggcttg

SEQ ID NO: 3396461 - DNA, 25 bp, Homo sapien
cctccaactcggagaggagaacaag

SEQ ID NO: 3396462 - DNA, 25 bp, Homo sapien
tgttctctgcacggagactgatcat

SEQ ID NO: 3396463 - DNA, 25 bp, Homo sapien
tgatattaggtgatgcccggggtac

SEQ ID NO: 3396464 - DNA, 25 bp, Homo sapien
aggctggcttttgaggcgcctcccg

SEQ ID NO: 3396465 - DNA, 25 bp, Homo sapien
tccaggctggcttttgaggcgcctc

SEQ ID NO: 3396466 - DNA, 25 bp, Homo sapien
gtggtgatattaggtgatgcccggg

SEQ ID NO: 3396467 - DNA, 25 bp, Homo sapien
gctttcgggacatcgccggccactt

SEQ ID NO: 3396468 - DNA, 25 bp, Homo sapien
ctgcagggtcaccgcgagccgagct

SEQ ID NO: 3396469 - DNA, 25 bp, Homo sapien
acagggacgggcagctttcgaagcc

SEQ ID NO: 3396470 - DNA, 25 bp, Homo sapien
ttcgtcccgcgcgaaggcgaggaaa

SEQ ID NO: 3396471 - DNA, 25 bp, Homo sapien
tgcggcttggggttccgcccaggtg

SEQ ID NO: 3396472 - DNA, 25 bp, Homo sapien
ttccgcccaggtgtccgcgggtcca

SEQ ID NO: 3396473 - DNA, 25 bp, Homo sapien
tcgctgcggcttggggttccgccca

SEQ ID NO: 3396474 - DNA, 25 bp, Homo sapien
ctatcgctgcggcttggggttccgc

SEQ ID NO: 3396475 - DNA, 25 bp, Homo sapien
cagttaacccagttgcgccgctgaa

SEQ ID NO: 3396476 - DNA, 25 bp, Homo sapien
agaaaaccaggatccaggtaatctg

SEQ ID NO: 3396477 - DNA, 25 bp, Homo sapien
tcctcttggtggaactcgggaacaa

SEQ ID NO: 3396478 - DNA, 25 bp, Homo sapien
tgcggagaaaaccaggatccaggta

SEQ ID NO: 3396479 - DNA, 25 bp, Homo sapien
tggcttggattaaggtgttaaaatg

SEQ ID NO: 3396480 - DNA, 25 bp, Homo sapien
aaagtaggcaagtgtattcggccat

SEQ ID NO: 3396481 - DNA, 25 bp, Homo sapien
gggaagcgaggcatttcacatggcc

SEQ ID NO: 3396482 - DNA, 25 bp, Homo sapien
tggtggcttggattaaggtgttaaa

SEQ ID NO: 3396483 - DNA, 25 bp, Homo sapien
ccaaggaaaactgcatggagacgca

SEQ ID NO: 3396484 - DNA, 25 bp, Homo sapien
caaggccttaagctttggacccaag

SEQ ID NO: 3396485 - DNA, 25 bp, Homo sapien
tcggttgagaatggaaaccacaact

SEQ ID NO: 3396486 - DNA, 25 bp, Homo sapien
cactgtcctccacacaagggaagga

SEQ ID NO: 3396487 - DNA, 25 bp, Homo sapien
ggtgttcactgaagacgccgtctcc

SEQ ID NO: 3396488 - DNA, 25 bp, Homo sapien
gaacaggacatctacgagtggacta

SEQ ID NO: 3396489 - DNA, 25 bp, Homo sapien
tctgacatagtgtgcgaacaggaca

SEQ ID NO: 3396490 - DNA, 25 bp, Homo sapien
gaatgtttcaaatgcgccgcctgtc

SEQ ID NO: 3396491 - DNA, 25 bp, Homo sapien
agctgagagccttgcccacagagga

SEQ ID NO: 3396492 - DNA, 25 bp, Homo sapien
gcctaactccttatgatagatcaca

SEQ ID NO: 3396493 - DNA, 25 bp, Homo sapien
cagcctaggggaatgatgagcggtt

SEQ ID NO: 3396494 - DNA, 25 bp, Homo sapien
tcttctgaaatgagggttcccctgg

SEQ ID NO: 3396495 - DNA, 25 bp, Homo sapien
tatctcagaggcacgattagctgca

SEQ ID NO: 3396496 - DNA, 25 bp, Homo sapien
ttatggaggtattcaaggccagctc

SEQ ID NO: 3396497 - DNA, 25 bp, Homo sapien
cagcgagggccatgaattaagatcc

SEQ ID NO: 3396498 - DNA, 25 bp, Homo sapien
ctctccccatgggtagaatcagtgg

SEQ ID NO: 3396499 - DNA, 25 bp, Homo sapien
tctattgtatttgaatcgtgatcag

SEQ ID NO: 3396500 - DNA, 25 bp, Homo sapien
tatttgaatcgtgatcaggaaaaag

SEQ ID NO: 3396501 - DNA, 25 bp, Homo sapien
cagagggaagctgagcgaaaataga

SEQ ID NO: 3396502 - DNA, 25 bp, Homo sapien
tagaccttcccgagagaggaggaag

SEQ ID NO: 3396503 - DNA, 25 bp, Homo sapien
taagaagccaagtcagtcctgatgc

SEQ ID NO: 3396504 - DNA, 25 bp, Homo sapien
tcttgcttgctcgagctgttcgtgg

SEQ ID NO: 3396505 - DNA, 25 bp, Homo sapien
aagaatgatttagtggttgcccagc

SEQ ID NO: 3396506 - DNA, 25 bp, Homo sapien
ttccaaggagaggtgttcgctgagc

SEQ ID NO: 3396507 - DNA, 25 bp, Homo sapien
ggaatgaaatttcagtcccactggc

SEQ ID NO: 3396508 - DNA, 25 bp, Homo sapien
tgtaaccttagtcacttgaaactgc

SEQ ID NO: 3396509 - DNA, 25 bp, Homo sapien
cagagccatcgtgtagattgattca

SEQ ID NO: 3396510 - DNA, 25 bp, Homo sapien
gcatatgttgcaacttggcttctaa

SEQ ID NO: 3396511 - DNA, 25 bp, Homo sapien
tagtaccaaagctttagaacaggga

SEQ ID NO: 3396512 - DNA, 25 bp, Homo sapien
gatgacccagatagtaagttgtaaa

SEQ ID NO: 3396513 - DNA, 25 bp, Homo sapien
taaccctacatttatcattgtctgt

SEQ ID NO: 3396514 - DNA, 25 bp, Homo sapien
tatctcaatgactactcctaaccct

SEQ ID NO: 3396515 - DNA, 25 bp, Homo sapien
tgtgcctttagagtcatatccaaga

SEQ ID NO: 3396516 - DNA, 25 bp, Homo sapien
cacggcagtctcgaagtctttggaa

SEQ ID NO: 3396517 - DNA, 25 bp, Homo sapien
gatgaacctgagaagaccgtgagct

SEQ ID NO: 3396518 - DNA, 25 bp, Homo sapien
gatgggacctgctatactctaagta

SEQ ID NO: 3396519 - DNA, 25 bp, Homo sapien
tttgcgagatatgacccaaggcggc

SEQ ID NO: 3396520 - DNA, 25 bp, Homo sapien
acacaggccaccaaagttataactc

SEQ ID NO: 3396521 - DNA, 25 bp, Homo sapien
cattgggcacaataaacctcattgc

SEQ ID NO: 3396522 - DNA, 25 bp, Homo sapien
acttcctccccattgggcacaataa

SEQ ID NO: 3396523 - DNA, 25 bp, Homo sapien
cacaggccaccaaagttataactct

SEQ ID NO: 3396524 - DNA, 25 bp, Homo sapien
ccctaggaactcagagagtgtgtcc

SEQ ID NO: 3396525 - DNA, 25 bp, Homo sapien
cctggagagtctggctgcgagctca

SEQ ID NO: 3396526 - DNA, 25 bp, Homo sapien
taaattcttggtgcccagtacagtg

SEQ ID NO: 3396527 - DNA, 25 bp, Homo sapien
tgtctggcacaacagaactgctcag

SEQ ID NO: 3396528 - DNA, 25 bp, Homo sapien
tcctctgcctaattcgagctcttca

SEQ ID NO: 3396529 - DNA, 25 bp, Homo sapien
gagacccgtcctcaatttcgccttg

SEQ ID NO: 3396530 - DNA, 25 bp, Homo sapien
cgtcctcaatttcgccttgaccttt

SEQ ID NO: 3396531 - DNA, 25 bp, Homo sapien
gcaggggcagctgtcccgaactaat

SEQ ID NO: 3396532 - DNA, 25 bp, Homo sapien
aggctataaatcctgtcccacttgc

SEQ ID NO: 3396533 - DNA, 25 bp, Homo sapien
caaggctagtttccagattacccta

SEQ ID NO: 3396534 - DNA, 25 bp, Homo sapien
cccttcactcaaggctagtttccag

SEQ ID NO: 3396535 - DNA, 25 bp, Homo sapien
tccagcagcaggctataaatcctgt

SEQ ID NO: 3396536 - DNA, 25 bp, Homo sapien
aactgcagtgggcttcgtggttcag

SEQ ID NO: 3396537 - DNA, 25 bp, Homo sapien
gtgggcttcgtggttcaggattcat

SEQ ID NO: 3396538 - DNA, 25 bp, Homo sapien
cagtgggcttcgtggttcaggattc

SEQ ID NO: 3396539 - DNA, 25 bp, Homo sapien
gtaaactgcagtgggcttcgtggtt

SEQ ID NO: 3396540 - DNA, 25 bp, Homo sapien
gcagaagaaaggcccattagttact

SEQ ID NO: 3396541 - DNA, 25 bp, Homo sapien
gaagaaaggcccattagttactgtc

SEQ ID NO: 3396542 - DNA, 25 bp, Homo sapien
agaaaggcccattagttactgtctg

SEQ ID NO: 3396543 - DNA, 25 bp, Homo sapien
aaaggcccattagttactgtctgtg

SEQ ID NO: 3396544 - DNA, 25 bp, Homo sapien
cattaagcggttcaggctggtgacc

SEQ ID NO: 3396545 - DNA, 25 bp, Homo sapien
ctgaggacaaaggttgggagttcca

SEQ ID NO: 3396546 - DNA, 25 bp, Homo sapien
ttttcctgaccagcgatgcagaggc

SEQ ID NO: 3396547 - DNA, 25 bp, Homo sapien
aacccaggcgtgatgtgcattaagc

SEQ ID NO: 3396548 - DNA, 25 bp, Homo sapien
cagtatttcccgtggtaggtgacag

SEQ ID NO: 3396549 - DNA, 25 bp, Homo sapien
ttcggtgatcatgaacttgagggcc

SEQ ID NO: 3396550 - DNA, 25 bp, Homo sapien
cctgtccactgagctgaggtgtcaa

SEQ ID NO: 3396551 - DNA, 25 bp, Homo sapien
caggtttcaagatgcttcggtgatc

SEQ ID NO: 3396552 - DNA, 25 bp, Homo sapien
tcctccagcgatataattgtcttcg

SEQ ID NO: 3396553 - DNA, 25 bp, Homo sapien
acttaatcctccagcgatataattg

SEQ ID NO: 3396554 - DNA, 25 bp, Homo sapien
tgtcttcgttactcccagtgatgga

SEQ ID NO: 3396555 - DNA, 25 bp, Homo sapien
gatataattgtcttcgttactccca

SEQ ID NO: 3396556 - DNA, 25 bp, Homo sapien
gcgggggctgtttcatggcttccat

SEQ ID NO: 3396557 - DNA, 25 bp, Homo sapien
ggagcgggggctgtttcatggcttc

SEQ ID NO: 3396558 - DNA, 25 bp, Homo sapien
taggagcgggggctgtttcatggct

SEQ ID NO: 3396559 - DNA, 25 bp, Homo sapien
ctggctaggagcgggggctgtttca

SEQ ID NO: 3396560 - DNA, 25 bp, Homo sapien
caggacagacatgatcagggtaggg

SEQ ID NO: 3396561 - DNA, 25 bp, Homo sapien
ctacgtgtagacacatgcatggagg

SEQ ID NO: 3396562 - DNA, 25 bp, Homo sapien
catgatcagggtagggcgtcttttg

SEQ ID NO: 3396563 - DNA, 25 bp, Homo sapien
gacccatactgcttcctacgtgtag

SEQ ID NO: 3396564 - DNA, 25 bp, Homo sapien
cttagggttgtgatgtgtgggggtt

SEQ ID NO: 3396565 - DNA, 25 bp, Homo sapien
accatgcctagctatttaaaaaaat

SEQ ID NO: 3396566 - DNA, 25 bp, Homo sapien
ggccttaaggtatcctcccacctca

SEQ ID NO: 3396567 - DNA, 25 bp, Homo sapien
aatcctgggctcaggggaccttcct

SEQ ID NO: 3396568 - DNA, 25 bp, Homo sapien
gctcaggggaccttcctgcctcagt

SEQ ID NO: 3396569 - DNA, 25 bp, Homo sapien
aaactgaaacagcatctcccaacag

SEQ ID NO: 3396570 - DNA, 25 bp, Homo sapien
ctaaaactgaaacagcatctcccaa

SEQ ID NO: 3396571 - DNA, 25 bp, Homo sapien
actgaaacagcatctcccaacagca

SEQ ID NO: 3396572 - DNA, 25 bp, Homo sapien
taaaactgaaacagcatctcccaac

SEQ ID NO: 3396573 - DNA, 25 bp, Homo sapien
cttgtttgaccctgagcttgggtgg

SEQ ID NO: 3396574 - DNA, 25 bp, Homo sapien
catttgtcaaactacattcaccctg

SEQ ID NO: 3396575 - DNA, 25 bp, Homo sapien
tgccaggccaccatcatttgtcaaa

SEQ ID NO: 3396576 - DNA, 25 bp, Homo sapien
tgtttgaccctgagcttgggtggca

SEQ ID NO: 3396577 - DNA, 25 bp, Homo sapien
ggtaggctattcctgaggaaggtct

SEQ ID NO: 3396578 - DNA, 25 bp, Homo sapien
tgggtatgagttgtatatttcattc

SEQ ID NO: 3396579 - DNA, 25 bp, Homo sapien
acgtttcgtaggtaggctattcctg

SEQ ID NO: 3396580 - DNA, 25 bp, Homo sapien
acacatataataagggacgtttcgt

SEQ ID NO: 3396581 - DNA, 25 bp, Homo sapien
cctccttagggtgacaaattcatca

SEQ ID NO: 3396582 - DNA, 25 bp, Homo sapien
ggagcaacagatctgcacatctgaa

SEQ ID NO: 3396583 - DNA, 25 bp, Homo sapien
gaagctccgggctgattggactcac

SEQ ID NO: 3396584 - DNA, 25 bp, Homo sapien
gccatttttgcttcgctgggctcca

SEQ ID NO: 3396585 - DNA, 25 bp, Homo sapien
ggaactgatcaagaagtactgcaga

SEQ ID NO: 3396586 - DNA, 25 bp, Homo sapien
aaaatcctgttctattcgcctatta

SEQ ID NO: 3396587 - DNA, 25 bp, Homo sapien
gaagacatccatgcggtcctttgct

SEQ ID NO: 3396588 - DNA, 25 bp, Homo sapien
gccgggagattagggaactgatcaa

SEQ ID NO: 3396589 - DNA, 25 bp, Homo sapien
gcgaaataaacgcacttcctgcaga

SEQ ID NO: 3396590 - DNA, 25 bp, Homo sapien
cacatactgtaaatggactctggga

SEQ ID NO: 3396591 - DNA, 25 bp, Homo sapien
gaggcctttgctgttcctacacata

SEQ ID NO: 3396592 - DNA, 25 bp, Homo sapien
gccttggagggcaaagcacactcca

SEQ ID NO: 3396593 - DNA, 25 bp, Homo sapien
gccaatgagactaggtgaataaata

SEQ ID NO: 3396594 - DNA, 25 bp, Homo sapien
cagctatgattcccgatcccaggag

SEQ ID NO: 3396595 - DNA, 25 bp, Homo sapien
gatcccaggagtttatatgccaatg

SEQ ID NO: 3396596 - DNA, 25 bp, Homo sapien
aataagttaatttcacatgctgctg

SEQ ID NO: 3396597 - DNA, 25 bp, Homo sapien
ggttctctgctactggagcaaccat

SEQ ID NO: 3396598 - DNA, 25 bp, Homo sapien
tgtctcgaggtgaagctcagactgt

SEQ ID NO: 3396599 - DNA, 25 bp, Homo sapien
tatttcagtgggttgactgcagcga

SEQ ID NO: 3396600 - DNA, 25 bp, Homo sapien
tgcctttaggtgtcctagggccgaa

SEQ ID NO: 3396601 - DNA, 25 bp, Homo sapien
gatttgaaggtggtatgttatcact

SEQ ID NO: 3396602 - DNA, 25 bp, Homo sapien
tggtatgttatcactcaggtttctc

SEQ ID NO: 3396603 - DNA, 25 bp, Homo sapien
gtgcccataaatcactcgtggccat

SEQ ID NO: 3396604 - DNA, 25 bp, Homo sapien
tcccagggaaaattatacgtgccca

SEQ ID NO: 3396605 - DNA, 25 bp, Homo sapien
tgcatcctggtaggattgttggtgc

SEQ ID NO: 3396606 - DNA, 25 bp, Homo sapien
gcagtgatataatcagatgtctggc

SEQ ID NO: 3396607 - DNA, 25 bp, Homo sapien
gaatcagagaccagattaaagctgc

SEQ ID NO: 3396608 - DNA, 25 bp, Homo sapien
ggctccgccgacaagcagcagtggt

SEQ ID NO: 3396609 - DNA, 25 bp, Homo sapien
ttctctgtagaacgtgtcggacacg

SEQ ID NO: 3396610 - DNA, 25 bp, Homo sapien
ccagtaacctaggagttctctgtag

SEQ ID NO: 3396611 - DNA, 25 bp, Homo sapien
tgtagaacgtgtcggacacggtcat

SEQ ID NO: 3396612 - DNA, 25 bp, Homo sapien
taggagttctctgtagaacgtgtcg

SEQ ID NO: 3396613 - DNA, 25 bp, Homo sapien
tctgtatgcagagcgagcaaactcc

SEQ ID NO: 3396614 - DNA, 25 bp, Homo sapien
aattccttctgtatgcagagcgagc

SEQ ID NO: 3396615 - DNA, 25 bp, Homo sapien
tctagaattccttctgtatgcagag

SEQ ID NO: 3396616 - DNA, 25 bp, Homo sapien
ggtgcgatcccagcttctagaattc

SEQ ID NO: 3396617 - DNA, 25 bp, Homo sapien
ggggacaataggtgtcaagcagctg

SEQ ID NO: 3396618 - DNA, 25 bp, Homo sapien
tggagctggcaactgccccttgaag

SEQ ID NO: 3396619 - DNA, 25 bp, Homo sapien
tggcaactgccccttgaagagccct

SEQ ID NO: 3396620 - DNA, 25 bp, Homo sapien
gggacaataggtgtcaagcagctgg

SEQ ID NO: 3396621 - DNA, 25 bp, Homo sapien
tccttcaggcgaaatcgtttgacgc

SEQ ID NO: 3396622 - DNA, 25 bp, Homo sapien
caggcgaaatcgtttgacgcccaaa

SEQ ID NO: 3396623 - DNA, 25 bp, Homo sapien
gctagggtccttcaggcgaaatcgt

SEQ ID NO: 3396624 - DNA, 25 bp, Homo sapien
ggtccttcaggcgaaatcgtttgac

SEQ ID NO: 3396625 - DNA, 25 bp, Homo sapien
cccttgagttttgagagcaatcgac

SEQ ID NO: 3396626 - DNA, 25 bp, Homo sapien
ggccccttgagttttgagagcaatc

SEQ ID NO: 3396627 - DNA, 25 bp, Homo sapien
gatggccccggcaaggccgaaggaa

SEQ ID NO: 3396628 - DNA, 25 bp, Homo sapien
aaaggccccttgagttttgagagca

SEQ ID NO: 3396629 - DNA, 25 bp, Homo sapien
gcgggagggacttagccagccagca

SEQ ID NO: 3396630 - DNA, 25 bp, Homo sapien
gagcgggagggacttagccagccag

SEQ ID NO: 3396631 - DNA, 25 bp, Homo sapien
agcgggagggacttagccagccagc

SEQ ID NO: 3396632 - DNA, 25 bp, Homo sapien
gtgtcgcgcgctccgtgggcgcagg

SEQ ID NO: 3396633 - DNA, 25 bp, Homo sapien
tggtcccttccgggcagtgtcgcgc

SEQ ID NO: 3396634 - DNA, 25 bp, Homo sapien
cgctggaaatcacgagtgggcagct

SEQ ID NO: 3396635 - DNA, 25 bp, Homo sapien
gcggaggccgctggaaatcacgagt

SEQ ID NO: 3396636 - DNA, 25 bp, Homo sapien
aagcccctcggaagctccagcgggt

SEQ ID NO: 3396637 - DNA, 25 bp, Homo sapien
tgcagcggctcggtcccgggtggcg

SEQ ID NO: 3396638 - DNA, 25 bp, Homo sapien
cactgcaacggtccctaccggggag

SEQ ID NO: 3396639 - DNA, 25 bp, Homo sapien
agataaaggacacccgggcgcagcg

SEQ ID NO: 3396640 - DNA, 25 bp, Homo sapien
cttcagaccgcaaggagagagaaga

SEQ ID NO: 3396641 - DNA, 25 bp, Homo sapien
aggaaggacaagagcggccagtcag

SEQ ID NO: 3396642 - DNA, 25 bp, Homo sapien
aaaacgcgcagcgagcggtagccta

SEQ ID NO: 3396643 - DNA, 25 bp, Homo sapien
agggcaggaagagtgcgcgggcgcg

SEQ ID NO: 3396644 - DNA, 25 bp, Homo sapien
gcggccgcctcactcccggaggaac

SEQ ID NO: 3396645 - DNA, 25 bp, Homo sapien
ggcggtggcggtccggacgacttgc

SEQ ID NO: 3396646 - DNA, 25 bp, Homo sapien
gcggtccggacgacttgctgccgct

SEQ ID NO: 3396647 - DNA, 25 bp, Homo sapien
ccgcggccgcctcactcccggagga

SEQ ID NO: 3396648 - DNA, 25 bp, Homo sapien
tggacagcgccggtgccggttgcgg

SEQ ID NO: 3396649 - DNA, 25 bp, Homo sapien
ggacagcgccggtgccggttgcggg

SEQ ID NO: 3396650 - DNA, 25 bp, Homo sapien
ggcctcggtctggacagcgccggtg

SEQ ID NO: 3396651 - DNA, 25 bp, Homo sapien
ctcggtctggacagcgccggtgccg

SEQ ID NO: 3396652 - DNA, 25 bp, Homo sapien
tcttgtcgatcaccccgagaatctg

SEQ ID NO: 3396653 - DNA, 25 bp, Homo sapien
gttccgaagtttcttgtcgatcacc

SEQ ID NO: 3396654 - DNA, 25 bp, Homo sapien
gaagtttcttgtcgatcaccccgag

SEQ ID NO: 3396655 - DNA, 25 bp, Homo sapien
cgatcaccccgagaatctgcttcat

SEQ ID NO: 3396656 - DNA, 25 bp, Homo sapien
gtacagtgccgcgtccgagtcaggt

SEQ ID NO: 3396657 - DNA, 25 bp, Homo sapien
gacccacagcggaagagtaataaag

SEQ ID NO: 3396658 - DNA, 25 bp, Homo sapien
ccgttttctgggcacgaagctcccg

SEQ ID NO: 3396659 - DNA, 25 bp, Homo sapien
ggtgacaagtgcctcttccaagagc

SEQ ID NO: 3396660 - DNA, 25 bp, Homo sapien
gcgcagggacctcttcattttgggc

SEQ ID NO: 3396661 - DNA, 25 bp, Homo sapien
ccaactccacgaggcggtcggttga

SEQ ID NO: 3396662 - DNA, 25 bp, Homo sapien
acttctctcctacggaagaagaggg

SEQ ID NO: 3396663 - DNA, 25 bp, Homo sapien
cgacaggtctcgagtgcatggtaac

SEQ ID NO: 3396664 - DNA, 25 bp, Homo sapien
tcacaatgcagctccagtaaagcgc

SEQ ID NO: 3396665 - DNA, 25 bp, Homo sapien
catctcgcgattgagctgagcctga

SEQ ID NO: 3396666 - DNA, 25 bp, Homo sapien
tcccctaggaacaaaaagtcgctgc

SEQ ID NO: 3396667 - DNA, 25 bp, Homo sapien
tcaaaatgggcctgccggaaaggca

SEQ ID NO: 3396668 - DNA, 25 bp, Homo sapien
agatcagcaggcttgcttactgcat

SEQ ID NO: 3396669 - DNA, 25 bp, Homo sapien
aatcaaaaactcaagtagcagccag

SEQ ID NO: 3396670 - DNA, 25 bp, Homo sapien
aattggctgccaatcagcacctacc

SEQ ID NO: 3396671 - DNA, 25 bp, Homo sapien
gaacactagattctaacagccacct

SEQ ID NO: 3396672 - DNA, 25 bp, Homo sapien
gagtacactaatttggccacgttaa

SEQ ID NO: 3396673 - DNA, 25 bp, Homo sapien
cacatgggtagtatcctagagtaca

SEQ ID NO: 3396674 - DNA, 25 bp, Homo sapien
gacacactgcaacgttctagaaaga

SEQ ID NO: 3396675 - DNA, 25 bp, Homo sapien
taatacttaggcttcgactctcacc

SEQ ID NO: 3396676 - DNA, 25 bp, Homo sapien
catgaactaagcgaatatacaagga

SEQ ID NO: 3396677 - DNA, 25 bp, Homo sapien
gaaagcctcttacgacaattggtct

SEQ ID NO: 3396678 - DNA, 25 bp, Homo sapien
gagaacactcgtttatgatctgaac

SEQ ID NO: 3396679 - DNA, 25 bp, Homo sapien
tgtacactataaacagaaagcctct

SEQ ID NO: 3396680 - DNA, 25 bp, Homo sapien
cagaaaatacgcaaataggagggcc

SEQ ID NO: 3396681 - DNA, 25 bp, Homo sapien
taggagggcctaaagttcagtgcta

SEQ ID NO: 3396682 - DNA, 25 bp, Homo sapien
cagtacattgttaggactctcacca

SEQ ID NO: 3396683 - DNA, 25 bp, Homo sapien
gacaagctatcctagagtagaaaac

SEQ ID NO: 3396684 - DNA, 25 bp, Homo sapien
gggaagactcataagcttgggaagc

SEQ ID NO: 3396685 - DNA, 25 bp, Homo sapien
tgatatgacagacctgaccccaggt

SEQ ID NO: 3396686 - DNA, 25 bp, Homo sapien
caattccttcctaacactggaggta

SEQ ID NO: 3396687 - DNA, 25 bp, Homo sapien
cagaagatgtgtccaattacctcac

SEQ ID NO: 3396688 - DNA, 25 bp, Homo sapien
ctgatcttgattaagcctttcccct

SEQ ID NO: 3396689 - DNA, 25 bp, Homo sapien
gctgatcttgattaagcctttcccc

SEQ ID NO: 3396690 - DNA, 25 bp, Homo sapien
agctgatcttgattaagcctttccc

SEQ ID NO: 3396691 - DNA, 25 bp, Homo sapien
cagctgatcttgattaagcctttcc

SEQ ID NO: 3396692 - DNA, 25 bp, Homo sapien
tcttgacttagtgccatgaaactcc

SEQ ID NO: 3396693 - DNA, 25 bp, Homo sapien
ttgacttagtgccatgaaactcctc

SEQ ID NO: 3396694 - DNA, 25 bp, Homo sapien
gacttagtgccatgaaactcctctg

SEQ ID NO: 3396695 - DNA, 25 bp, Homo sapien
atcttgacttagtgccatgaaactc

SEQ ID NO: 3396696 - DNA, 25 bp, Homo sapien
cgcacttcatcatctcccaatttgt

SEQ ID NO: 3396697 - DNA, 25 bp, Homo sapien
ttcttctctcataagctgctcccga

SEQ ID NO: 3396698 - DNA, 25 bp, Homo sapien
tgtttcaggtcagtccgcacttcat

SEQ ID NO: 3396699 - DNA, 25 bp, Homo sapien
tgtccaaaacatactgtagctcaag

SEQ ID NO: 3396700 - DNA, 25 bp, Homo sapien
ggacaatattggcactccattcaaa

SEQ ID NO: 3396701 - DNA, 25 bp, Homo sapien
caacaatgacaactcctcttcggac

SEQ ID NO: 3396702 - DNA, 25 bp, Homo sapien
tcccgttcagggtctactagcttat

SEQ ID NO: 3396703 - DNA, 25 bp, Homo sapien
agcttatagaattcatccaacaatg

SEQ ID NO: 3396704 - DNA, 25 bp, Homo sapien
gaggcatgttcatactgttcattca

SEQ ID NO: 3396705 - DNA, 25 bp, Homo sapien
tcccacaggtgaatggaggcatgtt

SEQ ID NO: 3396706 - DNA, 25 bp, Homo sapien
ggtgaatggaggcatgttcatactg

SEQ ID NO: 3396707 - DNA, 25 bp, Homo sapien
ggcatgttcatactgttcattcaac

SEQ ID NO: 3396708 - DNA, 25 bp, Homo sapien
aaaaaatcagttcacagttgcatgt

SEQ ID NO: 3396709 - DNA, 25 bp, Homo sapien
ttcctaatgcaaccttataaatggc

SEQ ID NO: 3396710 - DNA, 25 bp, Homo sapien
cctatactgaaggagtgaaacgtaa

SEQ ID NO: 3396711 - DNA, 25 bp, Homo sapien
catgtttgagaataaggagctcaca

SEQ ID NO: 3396712 - DNA, 25 bp, Homo sapien
gcggctcctggctcaaaactgtttt

SEQ ID NO: 3396713 - DNA, 25 bp, Homo sapien
tctgatgaagcttgacctaaaacta

SEQ ID NO: 3396714 - DNA, 25 bp, Homo sapien
tgaggaccatattgtatcaaaagca

SEQ ID NO: 3396715 - DNA, 25 bp, Homo sapien
gattagtacctttccattgtaaaga

SEQ ID NO: 3396716 - DNA, 25 bp, Homo sapien
gccactgtggctaaaatacagggaa

SEQ ID NO: 3396717 - DNA, 25 bp, Homo sapien
gactggacccaatcagagtgaggcc

SEQ ID NO: 3396718 - DNA, 25 bp, Homo sapien
tttccctaggtaagtgctacaagag

SEQ ID NO: 3396719 - DNA, 25 bp, Homo sapien
tatatcccctcaataagcttatggt

SEQ ID NO: 3396720 - DNA, 25 bp, Homo sapien
gtgggtgctgtcaaagtagtttgac

SEQ ID NO: 3396721 - DNA, 25 bp, Homo sapien
tgaaaaacacgctcaacaatttcct

SEQ ID NO: 3396722 - DNA, 25 bp, Homo sapien
ctgaaaaacacgctcaacaatttcc

SEQ ID NO: 3396723 - DNA, 25 bp, Homo sapien
gtcaaagtagtttgactgaaaaaca

SEQ ID NO: 3396724 - DNA, 25 bp, Homo sapien
aaggatttttaggtcagtgatacta

SEQ ID NO: 3396725 - DNA, 25 bp, Homo sapien
acaaaaggatttttaggtcagtgat

SEQ ID NO: 3396726 - DNA, 25 bp, Homo sapien
gatttttaggtcagtgatactactc

SEQ ID NO: 3396727 - DNA, 25 bp, Homo sapien
atttttaggtcagtgatactactct

SEQ ID NO: 3396728 - DNA, 25 bp, Homo sapien
ctctgttgattcaacttcactttgc

SEQ ID NO: 3396729 - DNA, 25 bp, Homo sapien
gttgattcaacttcactttgctcag

SEQ ID NO: 3396730 - DNA, 25 bp, Homo sapien
gattcaacttcactttgctcagtgt

SEQ ID NO: 3396731 - DNA, 25 bp, Homo sapien
ttcaacttcactttgctcagtgtac

SEQ ID NO: 3396732 - DNA, 25 bp, Homo sapien
gtttgaaaggcagcaaagtaaaggc

SEQ ID NO: 3396733 - DNA, 25 bp, Homo sapien
caaagtaaaggcagcattaaattaa

SEQ ID NO: 3396734 - DNA, 25 bp, Homo sapien
tgcaaagcaaagtaaatgtttgaga

SEQ ID NO: 3396735 - DNA, 25 bp, Homo sapien
gtttgagacatttgtttgaaaggca

SEQ ID NO: 3396736 - DNA, 25 bp, Homo sapien
tcaaccgtttcaactgtccactcat

SEQ ID NO: 3396737 - DNA, 25 bp, Homo sapien
cctgctccttttcaccactggtgaa

SEQ ID NO: 3396738 - DNA, 25 bp, Homo sapien
tttcaactgtccactcatctacctg

SEQ ID NO: 3396739 - DNA, 25 bp, Homo sapien
acctgctccttttcaccactggtga

SEQ ID NO: 3396740 - DNA, 25 bp, Homo sapien
tttttacagagcaacctaatttcag

SEQ ID NO: 3396741 - DNA, 25 bp, Homo sapien
caactttgcaatacagagaactctt

SEQ ID NO: 3396742 - DNA, 25 bp, Homo sapien
catccacagggataaacattcattt

SEQ ID NO: 3396743 - DNA, 25 bp, Homo sapien
caaagcagggatcctattaaacatc

SEQ ID NO: 3396744 - DNA, 25 bp, Homo sapien
gattacctgtgtttacatcctaaaa

SEQ ID NO: 3396745 - DNA, 25 bp, Homo sapien
aagattacctgtgtttacatcctaa

SEQ ID NO: 3396746 - DNA, 25 bp, Homo sapien
aagaaagattacctgtgtttacatc

SEQ ID NO: 3396747 - DNA, 25 bp, Homo sapien
gaaagattacctgtgtttacatcct

SEQ ID NO: 3396748 - DNA, 25 bp, Homo sapien
catttgtgccataaggtcttgtact

SEQ ID NO: 3396749 - DNA, 25 bp, Homo sapien
tgtcttctcacaaggggatctgcct

SEQ ID NO: 3396750 - DNA, 25 bp, Homo sapien
ctctggtactgaaggggatgcagcc

SEQ ID NO: 3396751 - DNA, 25 bp, Homo sapien
ctgcatttgtgccataaggtcttgt

SEQ ID NO: 3396752 - DNA, 25 bp, Homo sapien
tgttggattcataggctgtgcagat

SEQ ID NO: 3396753 - DNA, 25 bp, Homo sapien
ggattcataggctgtgcagatacaa

SEQ ID NO: 3396754 - DNA, 25 bp, Homo sapien
cataggctgtgcagatacaatggca

SEQ ID NO: 3396755 - DNA, 25 bp, Homo sapien
tgttttgtgttggattcataggctg

SEQ ID NO: 3396756 - DNA, 25 bp, Homo sapien
ctgtgtcgcttctggttgtacagga

SEQ ID NO: 3396757 - DNA, 25 bp, Homo sapien
ggaacttgattaggctgagcaagtc

SEQ ID NO: 3396758 - DNA, 25 bp, Homo sapien
tgagcaagtctagattcagaatgaa

SEQ ID NO: 3396759 - DNA, 25 bp, Homo sapien
cgcttctggttgtacaggaacttga

SEQ ID NO: 3396760 - DNA, 25 bp, Homo sapien
gagaaggctggtacaagggttgaga

SEQ ID NO: 3396761 - DNA, 25 bp, Homo sapien
gagatgctgtgtacccctcacttgt

SEQ ID NO: 3396762 - DNA, 25 bp, Homo sapien
tggttccttctgtggtcgttgctct

SEQ ID NO: 3396763 - DNA, 25 bp, Homo sapien
gtggtcgttgctctgtagcatgaga

SEQ ID NO: 3396764 - DNA, 25 bp, Homo sapien
ctcatcaaatgtatgtgacccggta

SEQ ID NO: 3396765 - DNA, 25 bp, Homo sapien
catcaaatgtatgtgacccggtaac

SEQ ID NO: 3396766 - DNA, 25 bp, Homo sapien
tgttcaattcatgagtaagtgcctc

SEQ ID NO: 3396767 - DNA, 25 bp, Homo sapien
atctgttcaattcatgagtaagtgc

SEQ ID NO: 3396768 - DNA, 25 bp, Homo sapien
tgagacgcagcaggaagggatgatg

SEQ ID NO: 3396769 - DNA, 25 bp, Homo sapien
caggaagggatgatgatgctgtagt

SEQ ID NO: 3396770 - DNA, 25 bp, Homo sapien
gacgcagcaggaagggatgatgatg

SEQ ID NO: 3396771 - DNA, 25 bp, Homo sapien
cagcaggaagggatgatgatgctgt

SEQ ID NO: 3396772 - DNA, 25 bp, Homo sapien
cattgattccactgctatgtaaagg

SEQ ID NO: 3396773 - DNA, 25 bp, Homo sapien
tggattggaatggagctgcatttac

SEQ ID NO: 3396774 - DNA, 25 bp, Homo sapien
ggagctgcatttacattgattccac

SEQ ID NO: 3396775 - DNA, 25 bp, Homo sapien
aaaggtttgcttgtcccagcctgaa

SEQ ID NO: 3396776 - DNA, 25 bp, Homo sapien
tgttctacttggtgaggctgactag

SEQ ID NO: 3396777 - DNA, 25 bp, Homo sapien
ggctgactagaaaagctctggttat

SEQ ID NO: 3396778 - DNA, 25 bp, Homo sapien
aactggcctggtactgattttgctg

SEQ ID NO: 3396779 - DNA, 25 bp, Homo sapien
gaactggggcattcatattgaacac

SEQ ID NO: 3396780 - DNA, 25 bp, Homo sapien
ctgtcaataactgtgctggaaagca

SEQ ID NO: 3396781 - DNA, 25 bp, Homo sapien
gtctaaactgtcctaacactgtcaa

SEQ ID NO: 3396782 - DNA, 25 bp, Homo sapien
tggcacatgcgtgtattcccaagct

SEQ ID NO: 3396783 - DNA, 25 bp, Homo sapien
aaagtatagtttatcaccaggtgca

SEQ ID NO: 3396784 - DNA, 25 bp, Homo sapien
gcttgaacccaagcgattgaaccta

SEQ ID NO: 3396785 - DNA, 25 bp, Homo sapien
tcaacaaatatcaggccgggaatgg

SEQ ID NO: 3396786 - DNA, 25 bp, Homo sapien
tatttcatcatgaacgcctggcctc

SEQ ID NO: 3396787 - DNA, 25 bp, Homo sapien
ggacaacggcccacaatgtatacat

SEQ ID NO: 3396788 - DNA, 25 bp, Homo sapien
ggttctagactaaggtacacactaa

SEQ ID NO: 3396789 - DNA, 25 bp, Homo sapien
tagtaaaccaactacatcggtgtca

SEQ ID NO: 3396790 - DNA, 25 bp, Homo sapien
gtaagaaattcatagccaggctggg

SEQ ID NO: 3396791 - DNA, 25 bp, Homo sapien
tacgatgaaagcactagggaatacc

SEQ ID NO: 3396792 - DNA, 25 bp, Homo sapien
tcagcagaggccttcgacttgtagc

SEQ ID NO: 3396793 - DNA, 25 bp, Homo sapien
gtttgttctcccacgcactttctag

SEQ ID NO: 3396794 - DNA, 25 bp, Homo sapien
cagggtgcatgattgatccttccaa

SEQ ID NO: 3396795 - DNA, 25 bp, Homo sapien
gctatattaacgtcttctgaaaggc

SEQ ID NO: 3396796 - DNA, 25 bp, Homo sapien
cagtcacttgatgggactggtctgg

SEQ ID NO: 3396797 - DNA, 25 bp, Homo sapien
tccacgagacacaccacgactattg

SEQ ID NO: 3396798 - DNA, 25 bp, Homo sapien
agggccccggtatccattcatcaag

SEQ ID NO: 3396799 - DNA, 25 bp, Homo sapien
gctgattgctacgtggaaatccagt

SEQ ID NO: 3396800 - DNA, 25 bp, Homo sapien
taatcccggggagcactgaactgag

SEQ ID NO: 3396801 - DNA, 25 bp, Homo sapien
ttagagaatgaagggcggtaaccat

SEQ ID NO: 3396802 - DNA, 25 bp, Homo sapien
cgttgatagccagagtaatcccggg

SEQ ID NO: 3396803 - DNA, 25 bp, Homo sapien
gactgtgtataaccactgtttggag

SEQ ID NO: 3396804 - DNA, 25 bp, Homo sapien
ctaagtcactttcattggtatattt

SEQ ID NO: 3396805 - DNA, 25 bp, Homo sapien
ttcattggtatatttagttcaggtt

SEQ ID NO: 3396806 - DNA, 25 bp, Homo sapien
tggtatatttagttcaggtttacac

SEQ ID NO: 3396807 - DNA, 25 bp, Homo sapien
cattggtatatttagttcaggttta

SEQ ID NO: 3396808 - DNA, 25 bp, Homo sapien
aaaagacaagctagttagtattgaa

SEQ ID NO: 3396809 - DNA, 25 bp, Homo sapien
taaaaaatgcttacccatctattct

SEQ ID NO: 3396810 - DNA, 25 bp, Homo sapien
agacaagctagttagtattgaaaag

SEQ ID NO: 3396811 - DNA, 25 bp, Homo sapien
caagctagttagtattgaaaaggta

SEQ ID NO: 3396812 - DNA, 25 bp, Homo sapien
ctcgcttgaaattctgctgatatcc

SEQ ID NO: 3396813 - DNA, 25 bp, Homo sapien
gcttgaaattctgctgatatccatc

SEQ ID NO: 3396814 - DNA, 25 bp, Homo sapien
cgcttgaaattctgctgatatccat

SEQ ID NO: 3396815 - DNA, 25 bp, Homo sapien
tcgcttgaaattctgctgatatcca

SEQ ID NO: 3396816 - DNA, 25 bp, Homo sapien
ggctccccgtggtccactctgccca

SEQ ID NO: 3396817 - DNA, 25 bp, Homo sapien
gctccccgtggtccactctgcccag

SEQ ID NO: 3396818 - DNA, 25 bp, Homo sapien
tcctaacatgcagactattaacagc

SEQ ID NO: 3396819 - DNA, 25 bp, Homo sapien
ttcaagacagtttatatagtaacag

SEQ ID NO: 3396820 - DNA, 25 bp, Homo sapien
tagttttcaagacagtttatatagt

SEQ ID NO: 3396821 - DNA, 25 bp, Homo sapien
ctaacatgcagactattaacagctc

SEQ ID NO: 3396822 - DNA, 25 bp, Homo sapien
tcaagcgttgggaatagatacagca

SEQ ID NO: 3396823 - DNA, 25 bp, Homo sapien
tatccggccattaaagggtgtctgg

SEQ ID NO: 3396824 - DNA, 25 bp, Homo sapien
catgttatggccaatagaggaaacc

SEQ ID NO: 3396825 - DNA, 25 bp, Homo sapien
tatcactaatagaggtccaaaaggc

SEQ ID NO: 3396826 - DNA, 25 bp, Homo sapien
tgaagtcaagaagcatgtgggcagc

SEQ ID NO: 3396827 - DNA, 25 bp, Homo sapien
tcaccacattattaggcttaagagg

SEQ ID NO: 3396828 - DNA, 25 bp, Homo sapien
tggaagttgtcatgcgcaaatttgc

SEQ ID NO: 3396829 - DNA, 25 bp, Homo sapien
taaagctaatggagtattccaccag

SEQ ID NO: 3396830 - DNA, 25 bp, Homo sapien
gagtgttcatttgcggcatccctct

SEQ ID NO: 3396831 - DNA, 25 bp, Homo sapien
agtgttcatttgcggcatccctctg

SEQ ID NO: 3396832 - DNA, 25 bp, Homo sapien
tgagtgttcatttgcggcatccctc

SEQ ID NO: 3396833 - DNA, 25 bp, Homo sapien
catattatggtacactggccagtgt

SEQ ID NO: 3396834 - DNA, 25 bp, Homo sapien
tggcgattaaacataatcctgtgaa

SEQ ID NO: 3396835 - DNA, 25 bp, Homo sapien
tggtaacatattatggtacactggc

SEQ ID NO: 3396836 - DNA, 25 bp, Homo sapien
ggccagtgtgtttttggcgattaaa

SEQ ID NO: 3396837 - DNA, 25 bp, Homo sapien
tgtctttatgggatgaaaacagtcc

SEQ ID NO: 3396838 - DNA, 25 bp, Homo sapien
catatccaggtaatagaaagctgac

SEQ ID NO: 3396839 - DNA, 25 bp, Homo sapien
taactatggagattattatcaccct

SEQ ID NO: 3396840 - DNA, 25 bp, Homo sapien
gaaagctgacaattgtagtcctgtc

SEQ ID NO: 3396841 - DNA, 25 bp, Homo sapien
attaagtacagaagcggccatccgg

SEQ ID NO: 3396842 - DNA, 25 bp, Homo sapien
tcagaactgaaactactgtccgtga

SEQ ID NO: 3396843 - DNA, 25 bp, Homo sapien
tcaatctaaaacacatactggtgcc

SEQ ID NO: 3396844 - DNA, 25 bp, Homo sapien
ccacagttgtttggccagatgaaca

SEQ ID NO: 3396845 - DNA, 25 bp, Homo sapien
tgctagcacaaattccaacagagta

SEQ ID NO: 3396846 - DNA, 25 bp, Homo sapien
taaaatttgtgacactaacgtggca

SEQ ID NO: 3396847 - DNA, 25 bp, Homo sapien
taagctgctagctgttgaacaccag

SEQ ID NO: 3396848 - DNA, 25 bp, Homo sapien
caataagcagcattaacttcctagg

SEQ ID NO: 3396849 - DNA, 25 bp, Homo sapien
tgtgagcttgctacaccaagaggct

SEQ ID NO: 3396850 - DNA, 25 bp, Homo sapien
gactgcaagcatacatcatctaggg

SEQ ID NO: 3396851 - DNA, 25 bp, Homo sapien
tatggttgtggtacatcccaggcag

SEQ ID NO: 3396852 - DNA, 25 bp, Homo sapien
taaaactgccctaatcaaggtaatc

SEQ ID NO: 3396853 - DNA, 25 bp, Homo sapien
aacccaagtggaatgcagattcagg

SEQ ID NO: 3396854 - DNA, 25 bp, Homo sapien
aaaagtctcccacgtaagagctgca

SEQ ID NO: 3396855 - DNA, 25 bp, Homo sapien
taaaatgaagggtttgaattcggca

SEQ ID NO: 3396856 - DNA, 25 bp, Homo sapien
gatcaagggcaatactgattctgtg

SEQ ID NO: 3396857 - DNA, 25 bp, Homo sapien
ttttaaacattcactagtcttttgc

SEQ ID NO: 3396858 - DNA, 25 bp, Homo sapien
catgggatgcaactattatgccgtc

SEQ ID NO: 3396859 - DNA, 25 bp, Homo sapien
tcttaagagacaaaacatgggatgc

SEQ ID NO: 3396860 - DNA, 25 bp, Homo sapien
caaatgcctttgctagatgatcagg

SEQ ID NO: 3396861 - DNA, 25 bp, Homo sapien
taagcagactgcgttcaaggacagt

SEQ ID NO: 3396862 - DNA, 25 bp, Homo sapien
gtaactttattaagtgagccaccaa

SEQ ID NO: 3396863 - DNA, 25 bp, Homo sapien
cattaaagtcgcagagatggcgagc

SEQ ID NO: 3396864 - DNA, 25 bp, Homo sapien
tctcaggaactggtagacagcacgt

SEQ ID NO: 3396865 - DNA, 25 bp, Homo sapien
tagcgtatgcctggtgtccgggtca

SEQ ID NO: 3396866 - DNA, 25 bp, Homo sapien
ccgggtcacgtagtaagcctggctc

SEQ ID NO: 3396867 - DNA, 25 bp, Homo sapien
acggcgtaggccaggtatccgtccg

SEQ ID NO: 3396868 - DNA, 25 bp, Homo sapien
taggccaggtatccgtccggatgca

SEQ ID NO: 3396869 - DNA, 25 bp, Homo sapien
ccaggtatccgtccggatgcagagc

SEQ ID NO: 3396870 - DNA, 25 bp, Homo sapien
aggacaaacggcgtaggccaggtat

SEQ ID NO: 3396871 - DNA, 25 bp, Homo sapien
tgagaatccggattcggttatccac

SEQ ID NO: 3396872 - DNA, 25 bp, Homo sapien
cccaactacaacaaagagagatctt

SEQ ID NO: 3396873 - DNA, 25 bp, Homo sapien
ggttatccacctttttccgatgcat

SEQ ID NO: 3396874 - DNA, 25 bp, Homo sapien
gatctttgccgctcagctactccat

SEQ ID NO: 3396875 - DNA, 25 bp, Homo sapien
gataacatgtgatgaagtattacca

SEQ ID NO: 3396876 - DNA, 25 bp, Homo sapien
gccttcacagttgctttggataaca

SEQ ID NO: 3396877 - DNA, 25 bp, Homo sapien
cactgaaggccgagccttcacagtt

SEQ ID NO: 3396878 - DNA, 25 bp, Homo sapien
ctttggataacatgtgatgaagtat

SEQ ID NO: 3396879 - DNA, 25 bp, Homo sapien
aaatacagcagtgaactggtagaag

SEQ ID NO: 3396880 - DNA, 25 bp, Homo sapien
aatacagcagtgaactggtagaaga

SEQ ID NO: 3396881 - DNA, 25 bp, Homo sapien
tacagcagtgaactggtagaagaag

SEQ ID NO: 3396882 - DNA, 25 bp, Homo sapien
caaatacagcagtgaactggtagaa

SEQ ID NO: 3396883 - DNA, 25 bp, Homo sapien
cagtagcgaatgtttgtggctgcta

SEQ ID NO: 3396884 - DNA, 25 bp, Homo sapien
ccaggatcttgtgggtctcgttgta

SEQ ID NO: 3396885 - DNA, 25 bp, Homo sapien
gctgtcgcattcttttcttccggtg

SEQ ID NO: 3396886 - DNA, 25 bp, Homo sapien
tgcagcacacacatgccgaaggtat

SEQ ID NO: 3396887 - DNA, 25 bp, Homo sapien
gacttcagagcacaaagccaagacc

SEQ ID NO: 3396888 - DNA, 25 bp, Homo sapien
tattcaggcaattgatcatggcagc

SEQ ID NO: 3396889 - DNA, 25 bp, Homo sapien
caatcagtgataacccagggcattt

SEQ ID NO: 3396890 - DNA, 25 bp, Homo sapien
caagccagcagtataggagacaacc

SEQ ID NO: 3396891 - DNA, 25 bp, Homo sapien
agcaagtttggagttaaggcttcaa

SEQ ID NO: 3396892 - DNA, 25 bp, Homo sapien
cagcaagtttggagttaaggcttca

SEQ ID NO: 3396893 - DNA, 25 bp, Homo sapien
ctacagtcctggccagcaagtttgg

SEQ ID NO: 3396894 - DNA, 25 bp, Homo sapien
tctacagtcctggccagcaagtttg

SEQ ID NO: 3396895 - DNA, 25 bp, Homo sapien
tcactgtgtacaattgcttgagtga

SEQ ID NO: 3396896 - DNA, 25 bp, Homo sapien
gtcactgtgtacaattgcttgagtg

SEQ ID NO: 3396897 - DNA, 25 bp, Homo sapien
ctgatgggcctcagttctgtacctg

SEQ ID NO: 3396898 - DNA, 25 bp, Homo sapien
tgatgggcctcagttctgtacctgg

SEQ ID NO: 3396899 - DNA, 25 bp, Homo sapien
tacaagaggccagagacagaataaa

SEQ ID NO: 3396900 - DNA, 25 bp, Homo sapien
cttacaagaggccagagacagaata

SEQ ID NO: 3396901 - DNA, 25 bp, Homo sapien
ttacaagaggccagagacagaataa

SEQ ID NO: 3396902 - DNA, 25 bp, Homo sapien
acaagaggccagagacagaataaac

SEQ ID NO: 3396903 - DNA, 25 bp, Homo sapien
catggtggcaacgtgggaggagatg

SEQ ID NO: 3396904 - DNA, 25 bp, Homo sapien
tccatggtggcaacgtgggaggaga

SEQ ID NO: 3396905 - DNA, 25 bp, Homo sapien
cctccatggtggcaacgtgggagga

SEQ ID NO: 3396906 - DNA, 25 bp, Homo sapien
tggtggcaacgtgggaggagatggg

SEQ ID NO: 3396907 - DNA, 25 bp, Homo sapien
ggtctagagtcttacagcagtccac

SEQ ID NO: 3396908 - DNA, 25 bp, Homo sapien
ctagagtcttacagcagtccaccaa

SEQ ID NO: 3396909 - DNA, 25 bp, Homo sapien
gatcagaaggaccaagactctcatc

SEQ ID NO: 3396910 - DNA, 25 bp, Homo sapien
ccagatcagaaggaccaagactctc

SEQ ID NO: 3396911 - DNA, 25 bp, Homo sapien
tgttggaagtgctgagcaccacact

SEQ ID NO: 3396912 - DNA, 25 bp, Homo sapien
gctccgtatgctatgttttactacc

SEQ ID NO: 3396913 - DNA, 25 bp, Homo sapien
cttggcttctgttacgctccgtatg

SEQ ID NO: 3396914 - DNA, 25 bp, Homo sapien
tttactacctttgtgttggaagtgc

SEQ ID NO: 3396915 - DNA, 25 bp, Homo sapien
cagaaacatattaggtgaactccaa

SEQ ID NO: 3396916 - DNA, 25 bp, Homo sapien
acagaaacatattaggtgaactcca

SEQ ID NO: 3396917 - DNA, 25 bp, Homo sapien
tgtgagtgcaacagtactcctcagg

SEQ ID NO: 3396918 - DNA, 25 bp, Homo sapien
gatgccctcgataaatttcaagaca

SEQ ID NO: 3396919 - DNA, 25 bp, Homo sapien
agcaatcgccaatcccagggctgca

SEQ ID NO: 3396920 - DNA, 25 bp, Homo sapien
gggctgcagattttccccgtcctcg

SEQ ID NO: 3396921 - DNA, 25 bp, Homo sapien
cagagcccagagttcctaaagatgg

SEQ ID NO: 3396922 - DNA, 25 bp, Homo sapien
caaaggccctggtatatatgtgtct

SEQ ID NO: 3396923 - DNA, 25 bp, Homo sapien
gcaaggctggtcatacacattctca

SEQ ID NO: 3396924 - DNA, 25 bp, Homo sapien
cagaactaggaacgtgagataccag

SEQ ID NO: 3396925 - DNA, 25 bp, Homo sapien
ggaggtaacaaagatattggagtac

SEQ ID NO: 3396926 - DNA, 25 bp, Homo sapien
tacaaattcaaacagagtatggagg

SEQ ID NO: 3396927 - DNA, 25 bp, Homo sapien
ttatcagggcttggggaggtaacaa

SEQ ID NO: 3396928 - DNA, 25 bp, Homo sapien
ctgatattgcagagcatcaaatcct

SEQ ID NO: 3396929 - DNA, 25 bp, Homo sapien
ctggtggggagtcaaaccaatgaca

SEQ ID NO: 3396930 - DNA, 25 bp, Homo sapien
tggtggggagtcaaaccaatgacaa

SEQ ID NO: 3396931 - DNA, 25 bp, Homo sapien
tgttctcgaaatacattcactctga

SEQ ID NO: 3396932 - DNA, 25 bp, Homo sapien
ggataatctcataatccagatgttc

SEQ ID NO: 3396933 - DNA, 25 bp, Homo sapien
tctgcctgtgttctcgaaatacatt

SEQ ID NO: 3396934 - DNA, 25 bp, Homo sapien
caggatttagagactggataatctc

SEQ ID NO: 3396935 - DNA, 25 bp, Homo sapien
catgaaaacaaggtaggggccaagt

SEQ ID NO: 3396936 - DNA, 25 bp, Homo sapien
atgccatgaaaacaaggtaggggcc

SEQ ID NO: 3396937 - DNA, 25 bp, Homo sapien
ccattgatggtggatgccatgaaaa

SEQ ID NO: 3396938 - DNA, 25 bp, Homo sapien
cattgatggtggatgccatgaaaac

SEQ ID NO: 3396939 - DNA, 25 bp, Homo sapien
ggagtaaggactcctgcccacagta

SEQ ID NO: 3396940 - DNA, 25 bp, Homo sapien
tcgggccagagacgtgtaacagttc

SEQ ID NO: 3396941 - DNA, 25 bp, Homo sapien
taagagaccagtttccatttgcaga

SEQ ID NO: 3396942 - DNA, 25 bp, Homo sapien
gaatgaagcagcctcaaacactcag

SEQ ID NO: 3396943 - DNA, 25 bp, Homo sapien
gttgacggagctgctgaattagctt

SEQ ID NO: 3396944 - DNA, 25 bp, Homo sapien
tggctctgggcgctctgttgacgga

SEQ ID NO: 3396945 - DNA, 25 bp, Homo sapien
gctgctgaattagcttgagggacag

SEQ ID NO: 3396946 - DNA, 25 bp, Homo sapien
aattagcttgagggacagtgaccgg

SEQ ID NO: 3396947 - DNA, 25 bp, Homo sapien
ctgatgccaatctggctgtcgtcgt

SEQ ID NO: 3396948 - DNA, 25 bp, Homo sapien
tgtcgtcgtggtcttattctcagca

SEQ ID NO: 3396949 - DNA, 25 bp, Homo sapien
tcgtggtcttattctcagcagtggt

SEQ ID NO: 3396950 - DNA, 25 bp, Homo sapien
tgccaatctggctgtcgtcgtggtc

SEQ ID NO: 3396951 - DNA, 25 bp, Homo sapien
gaagcgaggatcagtaagactgaag

SEQ ID NO: 3396952 - DNA, 25 bp, Homo sapien
catgatgtcacaggggaagcgagga

SEQ ID NO: 3396953 - DNA, 25 bp, Homo sapien
tcctcttggggactcaacctctcag

SEQ ID NO: 3396954 - DNA, 25 bp, Homo sapien
tctcagcctgatggtgggaaggttt

SEQ ID NO: 3396955 - DNA, 25 bp, Homo sapien
aaggacacacaagggccccaccatc

SEQ ID NO: 3396956 - DNA, 25 bp, Homo sapien
caaccatgccctgagacaaggacac

SEQ ID NO: 3396957 - DNA, 25 bp, Homo sapien
tagtctggctcccatctggtcactg

SEQ ID NO: 3396958 - DNA, 25 bp, Homo sapien
caccatcagaaggccctagtctggc

SEQ ID NO: 3396959 - DNA, 25 bp, Homo sapien
catggtggccagagacgtgtggtaa

SEQ ID NO: 3396960 - DNA, 25 bp, Homo sapien
cactttatatttgtcccatggtggc

SEQ ID NO: 3396961 - DNA, 25 bp, Homo sapien
cagagacgtgtggtaagaatttaaa

SEQ ID NO: 3396962 - DNA, 25 bp, Homo sapien
ggatattcaacttgccacgatacca

SEQ ID NO: 3396963 - DNA, 25 bp, Homo sapien
ggagggaaacctcatacagtgtccg

SEQ ID NO: 3396964 - DNA, 25 bp, Homo sapien
gagggaaacctcatacagtgtccgc

SEQ ID NO: 3396965 - DNA, 25 bp, Homo sapien
ctggagggaaacctcatacagtgtc

SEQ ID NO: 3396966 - DNA, 25 bp, Homo sapien
agggaaacctcatacagtgtccgcg

SEQ ID NO: 3396967 - DNA, 25 bp, Homo sapien
gatgttgaggcaatccaggcacagc

SEQ ID NO: 3396968 - DNA, 25 bp, Homo sapien
tccccaggggcgtatcggattgact

SEQ ID NO: 3396969 - DNA, 25 bp, Homo sapien
gactatccgagtgatgttgaggcaa

SEQ ID NO: 3396970 - DNA, 25 bp, Homo sapien
gggcagcctgagactatccgagtga

SEQ ID NO: 3396971 - DNA, 25 bp, Homo sapien
acagggccagtgaaacccagaggag

SEQ ID NO: 3396972 - DNA, 25 bp, Homo sapien
cacagggccagtgaaacccagagga

SEQ ID NO: 3396973 - DNA, 25 bp, Homo sapien
gacaggtcatactactctctggagg

SEQ ID NO: 3396974 - DNA, 25 bp, Homo sapien
caaatagccgaagacaggtcatact

SEQ ID NO: 3396975 - DNA, 25 bp, Homo sapien
aatttccgtagctgggaacaggagc

SEQ ID NO: 3396976 - DNA, 25 bp, Homo sapien
ggcagaacaaatttccgtagctggg

SEQ ID NO: 3396977 - DNA, 25 bp, Homo sapien
ttgtggtagcaaaagagggtatctc

SEQ ID NO: 3396978 - DNA, 25 bp, Homo sapien
cagaggccttgtggtagcaaaagag

SEQ ID NO: 3396979 - DNA, 25 bp, Homo sapien
acgtagagggccataagccgttgga

SEQ ID NO: 3396980 - DNA, 25 bp, Homo sapien
cttgtagtgagaagccacgtagagg

SEQ ID NO: 3396981 - DNA, 25 bp, Homo sapien
tggaagccaaacacgggtcagtgag

SEQ ID NO: 3396982 - DNA, 25 bp, Homo sapien
tgtggaagccaaacacgggtcagtg

SEQ ID NO: 3396983 - DNA, 25 bp, Homo sapien
ggaagccaaacacgggtcagtgaga

SEQ ID NO: 3396984 - DNA, 25 bp, Homo sapien
aagccaaacacgggtcagtgagaag

SEQ ID NO: 3396985 - DNA, 25 bp, Homo sapien
tggggggcacgggaggcagaaggca

SEQ ID NO: 3396986 - DNA, 25 bp, Homo sapien
ggtgagcaggtgcatcggagagcat

SEQ ID NO: 3396987 - DNA, 25 bp, Homo sapien
tcggagagcatctggagatcattgg

SEQ ID NO: 3396988 - DNA, 25 bp, Homo sapien
tgagcaggtgcatcggagagcatct

SEQ ID NO: 3396989 - DNA, 25 bp, Homo sapien
actgtccatggaatcaggtcccctg

SEQ ID NO: 3396990 - DNA, 25 bp, Homo sapien
gactgttcaagatggactggcgaga

SEQ ID NO: 3396991 - DNA, 25 bp, Homo sapien
tcttgcctcgagacagactgttcaa

SEQ ID NO: 3396992 - DNA, 25 bp, Homo sapien
tggcgagaaatctccccttcaaggc

SEQ ID NO: 3396993 - DNA, 25 bp, Homo sapien
aatctgggtgaacagcaatgcgaac

SEQ ID NO: 3396994 - DNA, 25 bp, Homo sapien
gaacagcaatgcgaacgacccttcc

SEQ ID NO: 3396995 - DNA, 25 bp, Homo sapien
ataatctgggtgaacagcaatgcga

SEQ ID NO: 3396996 - DNA, 25 bp, Homo sapien
tgggtgaacagcaatgcgaacgacc

SEQ ID NO: 3396997 - DNA, 25 bp, Homo sapien
ccagcaacacggcttcaggggagcc

SEQ ID NO: 3396998 - DNA, 25 bp, Homo sapien
cgccagcaacacggcttcaggggag

SEQ ID NO: 3396999 - DNA, 25 bp, Homo sapien
cagcaacacggcttcaggggagcct

SEQ ID NO: 3397000 - DNA, 25 bp, Homo sapien
agcaacacggcttcaggggagcctg

SEQ ID NO: 3397001 - DNA, 25 bp, Homo sapien
gtgaatttcctgtggtgtctcaagg

SEQ ID NO: 3397002 - DNA, 25 bp, Homo sapien
gcagagcacggctgccatagcccat

SEQ ID NO: 3397003 - DNA, 25 bp, Homo sapien
tcgctgcttacggtgtgaatttcct

SEQ ID NO: 3397004 - DNA, 25 bp, Homo sapien
cctgtggtgtctcaaggaccttttc

SEQ ID NO: 3397005 - DNA, 25 bp, Homo sapien
aagccataggaaacacccaggtaat

SEQ ID NO: 3397006 - DNA, 25 bp, Homo sapien
acccaggtaatccaggcgttcggca

SEQ ID NO: 3397007 - DNA, 25 bp, Homo sapien
tccttccggggagtgatgacctctt

SEQ ID NO: 3397008 - DNA, 25 bp, Homo sapien
tgacctcttccaacaagctgacagc

SEQ ID NO: 3397009 - DNA, 25 bp, Homo sapien
gaacaaatccagctcgtttccagaa

SEQ ID NO: 3397010 - DNA, 25 bp, Homo sapien
tcagataaacaggaacaaatccagc

SEQ ID NO: 3397011 - DNA, 25 bp, Homo sapien
taaacaggaacaaatccagctcgtt

SEQ ID NO: 3397012 - DNA, 25 bp, Homo sapien
caggaacaaatccagctcgtttcca

SEQ ID NO: 3397013 - DNA, 25 bp, Homo sapien
actgaggatggctgtttccatgtcc

SEQ ID NO: 3397014 - DNA, 25 bp, Homo sapien
tgccattttatgactaagctcaacg

SEQ ID NO: 3397015 - DNA, 25 bp, Homo sapien
gctcaacgcatgcaccgtgtagtcg

SEQ ID NO: 3397016 - DNA, 25 bp, Homo sapien
tgatgatgtggcctgtcactgagga

SEQ ID NO: 3397017 - DNA, 25 bp, Homo sapien
gtgcacagtgcaagaccacacggac

SEQ ID NO: 3397018 - DNA, 25 bp, Homo sapien
cagtcattagggcttaagcgccaca

SEQ ID NO: 3397019 - DNA, 25 bp, Homo sapien
aaaacctacacctcagtgctggcag

SEQ ID NO: 3397020 - DNA, 25 bp, Homo sapien
gtcaacatgggtttgatgcctcaca

SEQ ID NO: 3397021 - DNA, 25 bp, Homo sapien
cattgatgaagggtaaacactcaga

SEQ ID NO: 3397022 - DNA, 25 bp, Homo sapien
ttttttgaataacccatcattgatg

SEQ ID NO: 3397023 - DNA, 25 bp, Homo sapien
aaacactcagagaagaaaggcttag

SEQ ID NO: 3397024 - DNA, 25 bp, Homo sapien
agaaaggcttagtgcttccgcaggc

SEQ ID NO: 3397025 - DNA, 25 bp, Homo sapien
catcctcatcagtgagcgtcttcag

SEQ ID NO: 3397026 - DNA, 25 bp, Homo sapien
cacgagtgctctccggtcaggtcat

SEQ ID NO: 3397027 - DNA, 25 bp, Homo sapien
cagtgagcgtcttcagcatgatgca

SEQ ID NO: 3397028 - DNA, 25 bp, Homo sapien
tcttcagcatgatgcacgagtgctc

SEQ ID NO: 3397029 - DNA, 25 bp, Homo sapien
ctgtggggtgccatcacgcagagtt

SEQ ID NO: 3397030 - DNA, 25 bp, Homo sapien
gtgccatcacgcagagttagaggtc

SEQ ID NO: 3397031 - DNA, 25 bp, Homo sapien
tggggtgccatcacgcagagttaga

SEQ ID NO: 3397032 - DNA, 25 bp, Homo sapien
gtctggaggcatccccggcagcccc

SEQ ID NO: 3397033 - DNA, 25 bp, Homo sapien
gttcctgttctgaatgatgttcaga

SEQ ID NO: 3397034 - DNA, 25 bp, Homo sapien
gagagcaaggctaggaaccgccgtc

SEQ ID NO: 3397035 - DNA, 25 bp, Homo sapien
gcaaggctaggaaccgccgtcggaa

SEQ ID NO: 3397036 - DNA, 25 bp, Homo sapien
tactgaactggtaggagagcaaggc

SEQ ID NO: 3397037 - DNA, 25 bp, Homo sapien
catactgaacacatggaccaaggaa

SEQ ID NO: 3397038 - DNA, 25 bp, Homo sapien
ctgaacacatggaccaaggaaaagc

SEQ ID NO: 3397039 - DNA, 25 bp, Homo sapien
ttcccatactgaacacatggaccaa

SEQ ID NO: 3397040 - DNA, 25 bp, Homo sapien
cccatactgaacacatggaccaagg

SEQ ID NO: 3397041 - DNA, 25 bp, Homo sapien
caggaaatagatgcgagagatggcc

SEQ ID NO: 3397042 - DNA, 25 bp, Homo sapien
tcataggggaggaagagtgcttcca

SEQ ID NO: 3397043 - DNA, 25 bp, Homo sapien
tccatgatgaggtgatagtccacca

SEQ ID NO: 3397044 - DNA, 25 bp, Homo sapien
actgagccgcagacagggccaggtc

SEQ ID NO: 3397045 - DNA, 25 bp, Homo sapien
gcaggccaatccccaagagaagagc

SEQ ID NO: 3397046 - DNA, 25 bp, Homo sapien
tgcaggccaatccccaagagaagag

SEQ ID NO: 3397047 - DNA, 25 bp, Homo sapien
cttcacaactttgcggatgatccgg

SEQ ID NO: 3397048 - DNA, 25 bp, Homo sapien
cggttgaaaagtcccatcaactggc

SEQ ID NO: 3397049 - DNA, 25 bp, Homo sapien
aaagtcccatcaactggcccgaggg

SEQ ID NO: 3397050 - DNA, 25 bp, Homo sapien
cggatgatccggttgaaaagtccca

SEQ ID NO: 3397051 - DNA, 25 bp, Homo sapien
taacatgtgttcatctcgggagcag

SEQ ID NO: 3397052 - DNA, 25 bp, Homo sapien
gcactatttgagagacatcaagccc

SEQ ID NO: 3397053 - DNA, 25 bp, Homo sapien
tgacgagatgcagcaaacacagcta

SEQ ID NO: 3397054 - DNA, 25 bp, Homo sapien
cagggagtgggtttgttgcactatt

SEQ ID NO: 3397055 - DNA, 25 bp, Homo sapien
gaacacagactggatatgtaccaaa

SEQ ID NO: 3397056 - DNA, 25 bp, Homo sapien
cactctacagtttaggaatgtggat

SEQ ID NO: 3397057 - DNA, 25 bp, Homo sapien
gaagacacaaagcaacactctacag

SEQ ID NO: 3397058 - DNA, 25 bp, Homo sapien
aatgtggatattagcgggaagagct

SEQ ID NO: 3397059 - DNA, 25 bp, Homo sapien
catgaccacatccttcgctgccacc

SEQ ID NO: 3397060 - DNA, 25 bp, Homo sapien
tcatcgtgggctccatgaccacatc

SEQ ID NO: 3397061 - DNA, 25 bp, Homo sapien
ctgagggtcttcatcgtgggctcca

SEQ ID NO: 3397062 - DNA, 25 bp, Homo sapien
gagggtcttcatcgtgggctccatg

SEQ ID NO: 3397063 - DNA, 25 bp, Homo sapien
gctctgttataaactatgcatttaa

SEQ ID NO: 3397064 - DNA, 25 bp, Homo sapien
agtcaaggattgaaccaaacacagg

SEQ ID NO: 3397065 - DNA, 25 bp, Homo sapien
tgtggttaaggacccataaagagac

SEQ ID NO: 3397066 - DNA, 25 bp, Homo sapien
catctacctgcaaaaaccttgtagg

SEQ ID NO: 3397067 - DNA, 25 bp, Homo sapien
tcagagaggtccatgctcttcagct

SEQ ID NO: 3397068 - DNA, 25 bp, Homo sapien
tgtttctcctgaaattcctttgctg

SEQ ID NO: 3397069 - DNA, 25 bp, Homo sapien
cagcttccctacttccttcttgtgt

SEQ ID NO: 3397070 - DNA, 25 bp, Homo sapien
tgtgtttctcctgaaattcctttgc

SEQ ID NO: 3397071 - DNA, 25 bp, Homo sapien
gatcgaggcgttcggcccagctttg

SEQ ID NO: 3397072 - DNA, 25 bp, Homo sapien
ttcatcgtccccacggattatgtat

SEQ ID NO: 3397073 - DNA, 25 bp, Homo sapien
cttttcaggctgatgatcgaggcgt

SEQ ID NO: 3397074 - DNA, 25 bp, Homo sapien
actcttcatcgtccccacggattat

SEQ ID NO: 3397075 - DNA, 25 bp, Homo sapien
gattgccaaaatctcaccctcccca

SEQ ID NO: 3397076 - DNA, 25 bp, Homo sapien
gaaaccaataaataggggattgcca

SEQ ID NO: 3397077 - DNA, 25 bp, Homo sapien
tctgggatctatagttcctagagac

SEQ ID NO: 3397078 - DNA, 25 bp, Homo sapien
gagacacaaggtttcctcttcccga

SEQ ID NO: 3397079 - DNA, 25 bp, Homo sapien
aaagccaccgtgctcaaggccaaag

SEQ ID NO: 3397080 - DNA, 25 bp, Homo sapien
cagcaatggccaaacaaatggcagg

SEQ ID NO: 3397081 - DNA, 25 bp, Homo sapien
tcatgggccctgtgctacatttgcc

SEQ ID NO: 3397082 - DNA, 25 bp, Homo sapien
tcaagcacatgaacaaccacacaac

SEQ ID NO: 3397083 - DNA, 25 bp, Homo sapien
ttcttccgcttcagtttcatatctt

SEQ ID NO: 3397084 - DNA, 25 bp, Homo sapien
tcttgaggacgcagatgtggcattc

SEQ ID NO: 3397085 - DNA, 25 bp, Homo sapien
catgatcaaacacagatgcccgagt

SEQ ID NO: 3397086 - DNA, 25 bp, Homo sapien
tatgaacttataggaaaggagggcc

SEQ ID NO: 3397087 - DNA, 25 bp, Homo sapien
aaagcgatgtacttaagggcctcag

SEQ ID NO: 3397088 - DNA, 25 bp, Homo sapien
gtccaggtgcgtggatttcagaaca

SEQ ID NO: 3397089 - DNA, 25 bp, Homo sapien
tccaggtgcgtggatttcagaacac

SEQ ID NO: 3397090 - DNA, 25 bp, Homo sapien
acaacttgcacagtcccatccagct

SEQ ID NO: 3397091 - DNA, 25 bp, Homo sapien
gaccatttgagcatgtgactctgct

SEQ ID NO: 3397092 - DNA, 25 bp, Homo sapien
tctgaccatttgagcatgtgactct

SEQ ID NO: 3397093 - DNA, 25 bp, Homo sapien
cagctctgaccatttgagcatgtga

SEQ ID NO: 3397094 - DNA, 25 bp, Homo sapien
ccgggacttccgggccagatgagca

SEQ ID NO: 3397095 - DNA, 25 bp, Homo sapien
cctttgtgtcccgtctcctggtcat

SEQ ID NO: 3397096 - DNA, 25 bp, Homo sapien
tggtcatccggagtcctccgggact

SEQ ID NO: 3397097 - DNA, 25 bp, Homo sapien
gacttccgggccagatgagcagtgg

SEQ ID NO: 3397098 - DNA, 25 bp, Homo sapien
ctagctgcttggctggatgtacaaa

SEQ ID NO: 3397099 - DNA, 25 bp, Homo sapien
cctgattgatttgagggacctatcc

SEQ ID NO: 3397100 - DNA, 25 bp, Homo sapien
ggttgtcttcagaggcacatcccca

SEQ ID NO: 3397101 - DNA, 25 bp, Homo sapien
ggcatttcagaaggtggcactcagg

SEQ ID NO: 3397102 - DNA, 25 bp, Homo sapien
cactaggctccagcgtgatggcaga

SEQ ID NO: 3397103 - DNA, 25 bp, Homo sapien
gaatttagatcacaccagcaatgag

SEQ ID NO: 3397104 - DNA, 25 bp, Homo sapien
gggccttggccaacatctcctgatg

SEQ ID NO: 3397105 - DNA, 25 bp, Homo sapien
tttttgaggaagcacacctgagaca

SEQ ID NO: 3397106 - DNA, 25 bp, Homo sapien
cacattggtcaaacacgtggccgtg

SEQ ID NO: 3397107 - DNA, 25 bp, Homo sapien
ggacagatacaagccacacagctgg

SEQ ID NO: 3397108 - DNA, 25 bp, Homo sapien
cagtcagggcagacaaggtccagag

SEQ ID NO: 3397109 - DNA, 25 bp, Homo sapien
tacatactagaaactccagtcaggg

SEQ ID NO: 3397110 - DNA, 25 bp, Homo sapien
tctaaccgctggacaggtggtctgg

SEQ ID NO: 3397111 - DNA, 25 bp, Homo sapien
tcacatgggtcctgagctctaaccg

SEQ ID NO: 3397112 - DNA, 25 bp, Homo sapien
cattctggccacaggcgtcaggtcg

SEQ ID NO: 3397113 - DNA, 25 bp, Homo sapien
aaaatgttccgtcttgtggtagccg

SEQ ID NO: 3397114 - DNA, 25 bp, Homo sapien
ggtgacagcttctaacaggtaggca

SEQ ID NO: 3397115 - DNA, 25 bp, Homo sapien
gactgcagtcacattgcagcagagc

SEQ ID NO: 3397116 - DNA, 25 bp, Homo sapien
tgcccctcagactgcagtcacattg

SEQ ID NO: 3397117 - DNA, 25 bp, Homo sapien
ggtaggcagcctcagataacaaact

SEQ ID NO: 3397118 - DNA, 25 bp, Homo sapien
gagttttttcactgccaaggccaag

SEQ ID NO: 3397119 - DNA, 25 bp, Homo sapien
aggctgcactgccagaaacagtttc

SEQ ID NO: 3397120 - DNA, 25 bp, Homo sapien
aacagtttccagctcacactcgaca

SEQ ID NO: 3397121 - DNA, 25 bp, Homo sapien
tgggtctgtgttccttgctgttgcc

SEQ ID NO: 3397122 - DNA, 25 bp, Homo sapien
ggagccgtcacttgcttaggaaaag

SEQ ID NO: 3397123 - DNA, 25 bp, Homo sapien
catgggagcagtgtgtttcacggca

SEQ ID NO: 3397124 - DNA, 25 bp, Homo sapien
caaagaagtctgttcgtggagccgt

SEQ ID NO: 3397125 - DNA, 25 bp, Homo sapien
aagttcctgacggtgccacttggca

SEQ ID NO: 3397126 - DNA, 25 bp, Homo sapien
ttgtaacacgggcagcaacaatccc

SEQ ID NO: 3397127 - DNA, 25 bp, Homo sapien
tgcagtcttgccaggattctcaatg

SEQ ID NO: 3397128 - DNA, 25 bp, Homo sapien
aggattctcaatgcagggaattccc

SEQ ID NO: 3397129 - DNA, 25 bp, Homo sapien
ttggagtgtttttgtaacacgggca

SEQ ID NO: 3397130 - DNA, 25 bp, Homo sapien
aattgtagaaaccactgcactcaga

SEQ ID NO: 3397131 - DNA, 25 bp, Homo sapien
tgatcgattaattgtagaaaccact

SEQ ID NO: 3397132 - DNA, 25 bp, Homo sapien
tgtgatcgattaattgtagaaacca

SEQ ID NO: 3397133 - DNA, 25 bp, Homo sapien
tggttgtgatcgattaattgtagaa

SEQ ID NO: 3397134 - DNA, 25 bp, Homo sapien
ggactcctgcggatccatggagaag

SEQ ID NO: 3397135 - DNA, 25 bp, Homo sapien
tggactcctgcggatccatggagaa

SEQ ID NO: 3397136 - DNA, 25 bp, Homo sapien
tccctggactcctgcggatccatgg

SEQ ID NO: 3397137 - DNA, 25 bp, Homo sapien
ctcctgcggatccatggagaagggc

SEQ ID NO: 3397138 - DNA, 25 bp, Homo sapien
gaccttgttggccaagacacacagg

SEQ ID NO: 3397139 - DNA, 25 bp, Homo sapien
ccccattggtgcagctatttgtgat

SEQ ID NO: 3397140 - DNA, 25 bp, Homo sapien
tgattggctgggttttatttgtcct

SEQ ID NO: 3397141 - DNA, 25 bp, Homo sapien
ggtcctgcccccattggtgcagcta

SEQ ID NO: 3397142 - DNA, 25 bp, Homo sapien
agcacgatggtttgtatcaggcagg

SEQ ID NO: 3397143 - DNA, 25 bp, Homo sapien
cagagtccaagtggctagaggcagc

SEQ ID NO: 3397144 - DNA, 25 bp, Homo sapien
aacagggcctaggacacactgagta

SEQ ID NO: 3397145 - DNA, 25 bp, Homo sapien
aaggcaccccagagagaccggcgat

SEQ ID NO: 3397146 - DNA, 25 bp, Homo sapien
gacttcacatctttccgtaaggggc

SEQ ID NO: 3397147 - DNA, 25 bp, Homo sapien
tgtggcattccctgctaagccacct

SEQ ID NO: 3397148 - DNA, 25 bp, Homo sapien
gcattccctgctaagccacctgctg

SEQ ID NO: 3397149 - DNA, 25 bp, Homo sapien
gtggcattccctgctaagccacctg

SEQ ID NO: 3397150 - DNA, 25 bp, Homo sapien
tagctggagtttgctagggttccag

SEQ ID NO: 3397151 - DNA, 25 bp, Homo sapien
ttggggatgtgcgacgtctgtctct

SEQ ID NO: 3397152 - DNA, 25 bp, Homo sapien
catcctcctgaagccccgtcctctg

SEQ ID NO: 3397153 - DNA, 25 bp, Homo sapien
tagtagctggagtttgctagggttc

SEQ ID NO: 3397154 - DNA, 25 bp, Homo sapien
gaaaagtgttgtggttgaaggagtc

SEQ ID NO: 3397155 - DNA, 25 bp, Homo sapien
gtggaaaagtgttgtggttgaagga

SEQ ID NO: 3397156 - DNA, 25 bp, Homo sapien
aaaagtgttgtggttgaaggagtca

SEQ ID NO: 3397157 - DNA, 25 bp, Homo sapien
tttgtggaaaagtgttgtggttgaa

SEQ ID NO: 3397158 - DNA, 25 bp, Homo sapien
gcaaatgcaagtctgaggagggcca

SEQ ID NO: 3397159 - DNA, 25 bp, Homo sapien
gagggcaaatgcaagtctgaggagg

SEQ ID NO: 3397160 - DNA, 25 bp, Homo sapien
ttacttctctgggagttggagggca

SEQ ID NO: 3397161 - DNA, 25 bp, Homo sapien
tgaaagacacctttggcgggagctg

SEQ ID NO: 3397162 - DNA, 25 bp, Homo sapien
agcgtatgacaaaggaccgtggtca

SEQ ID NO: 3397163 - DNA, 25 bp, Homo sapien
gtcatgtggcggactgttcttttca

SEQ ID NO: 3397164 - DNA, 25 bp, Homo sapien
ccactgcgggtcaaggacagcgtat

SEQ ID NO: 3397165 - DNA, 25 bp, Homo sapien
tgacaaaggaccgtggtcatgtggc

SEQ ID NO: 3397166 - DNA, 25 bp, Homo sapien
tgtttgtgcccttttgatccctttc

SEQ ID NO: 3397167 - DNA, 25 bp, Homo sapien
aataaacatcttggccatctgccct

SEQ ID NO: 3397168 - DNA, 25 bp, Homo sapien
tggcactgagaggtcacacccactg

SEQ ID NO: 3397169 - DNA, 25 bp, Homo sapien
aattggaaccgaagctgattgaagc

SEQ ID NO: 3397170 - DNA, 25 bp, Homo sapien
tgattctcttgcctcctctcgagta

SEQ ID NO: 3397171 - DNA, 25 bp, Homo sapien
ctcaggtgatctgcccacctcagcc

SEQ ID NO: 3397172 - DNA, 25 bp, Homo sapien
caggtgatctgcccacctcagcctc

SEQ ID NO: 3397173 - DNA, 25 bp, Homo sapien
acctcaggtgatctgcccacctcag

SEQ ID NO: 3397174 - DNA, 25 bp, Homo sapien
gtgcctttctgcaaagcacagcccc

SEQ ID NO: 3397175 - DNA, 25 bp, Homo sapien
gggttagaagtcagtgcaccgaggt

SEQ ID NO: 3397176 - DNA, 25 bp, Homo sapien
gttagaagtcagtgcaccgaggtct

SEQ ID NO: 3397177 - DNA, 25 bp, Homo sapien
ttagaagtcagtgcaccgaggtctc

SEQ ID NO: 3397178 - DNA, 25 bp, Homo sapien
ggctctgtcgttcccccagaaactg

SEQ ID NO: 3397179 - DNA, 25 bp, Homo sapien
cctagttttcccatagggaggcaag

SEQ ID NO: 3397180 - DNA, 25 bp, Homo sapien
gagaccttcctattttggttctgtg

SEQ ID NO: 3397181 - DNA, 25 bp, Homo sapien
tctgtgtgcaaagcactcgagagcc

SEQ ID NO: 3397182 - DNA, 25 bp, Homo sapien
tgcctgcaaggcacaagctgcaaag

SEQ ID NO: 3397183 - DNA, 25 bp, Homo sapien
cagcaatttgagtaatgaggctgag

SEQ ID NO: 3397184 - DNA, 25 bp, Homo sapien
gctctgatgtaactggaggcatgct

SEQ ID NO: 3397185 - DNA, 25 bp, Homo sapien
gcatgctagcgggtcagcaatttga

SEQ ID NO: 3397186 - DNA, 25 bp, Homo sapien
cgagtgctgagtgcgtgtgccacct

SEQ ID NO: 3397187 - DNA, 25 bp, Homo sapien
gggccctgctgttgagaactgaaca

SEQ ID NO: 3397188 - DNA, 25 bp, Homo sapien
caggcaaggactatggtgtcaccaa

SEQ ID NO: 3397189 - DNA, 25 bp, Homo sapien
tcactgagctgactgccacttaacg

SEQ ID NO: 3397190 - DNA, 25 bp, Homo sapien
cactcagtgagtgaagccatagctt

SEQ ID NO: 3397191 - DNA, 25 bp, Homo sapien
ccaccagccgatggagacggttcat

SEQ ID NO: 3397192 - DNA, 25 bp, Homo sapien
gtggatcgctcgagactccctggaa

SEQ ID NO: 3397193 - DNA, 25 bp, Homo sapien
tggaggtgagcaacccagatgtcaa

SEQ ID NO: 3397194 - DNA, 25 bp, Homo sapien
tatgaatgtgatccagccagttttg

SEQ ID NO: 3397195 - DNA, 25 bp, Homo sapien
gaaagagacagtgataccccacaga

SEQ ID NO: 3397196 - DNA, 25 bp, Homo sapien
ccagttttgaaacgccattgatagg

SEQ ID NO: 3397197 - DNA, 25 bp, Homo sapien
gaatacctgactatttctgagaagg

SEQ ID NO: 3397198 - DNA, 25 bp, Homo sapien
tgtgaaagtgccttacaaagtgtct

SEQ ID NO: 3397199 - DNA, 25 bp, Homo sapien
aaacctaggtgagcgtgattgagag

SEQ ID NO: 3397200 - DNA, 25 bp, Homo sapien
gactaccttgtagaatcccattgta

SEQ ID NO: 3397201 - DNA, 25 bp, Homo sapien
tctttgtggtaagcctggatctttc

SEQ ID NO: 3397202 - DNA, 25 bp, Homo sapien
gaaacactggctgtatccagacctc

SEQ ID NO: 3397203 - DNA, 25 bp, Homo sapien
gagacacatcgccatgtgcctgatg

SEQ ID NO: 3397204 - DNA, 25 bp, Homo sapien
ggcaaattcccatggatctgggcca

SEQ ID NO: 3397205 - DNA, 25 bp, Homo sapien
tgaaaggtctccctcgagtagctgg

SEQ ID NO: 3397206 - DNA, 25 bp, Homo sapien
ccatggttccaaaggcaagttgtat

SEQ ID NO: 3397207 - DNA, 25 bp, Homo sapien
acagagccctgctaggtgccataca

SEQ ID NO: 3397208 - DNA, 25 bp, Homo sapien
tagtatgaccactgggtagtaccca

SEQ ID NO: 3397209 - DNA, 25 bp, Homo sapien
tacacagtctagcattagccagtcc

SEQ ID NO: 3397210 - DNA, 25 bp, Homo sapien
aatggccctgttgtgtgacttccag

SEQ ID NO: 3397211 - DNA, 25 bp, Homo sapien
gattggagcctctctaccgtctagc

SEQ ID NO: 3397212 - DNA, 25 bp, Homo sapien
tttgacagtggccttgattggagcc

SEQ ID NO: 3397213 - DNA, 25 bp, Homo sapien
tccaggacgacagctgtcttctcgg

SEQ ID NO: 3397214 - DNA, 25 bp, Homo sapien
agatcgagaatgtcctggctaacac

SEQ ID NO: 3397215 - DNA, 25 bp, Homo sapien
gctaacactgtgaaaccccatctct

SEQ ID NO: 3397216 - DNA, 25 bp, Homo sapien
atcgagaatgtcctggctaacactg

SEQ ID NO: 3397217 - DNA, 25 bp, Homo sapien
taacactgtgaaaccccatctctac

SEQ ID NO: 3397218 - DNA, 25 bp, Homo sapien
cttttcttccagcgtcagctttcat

SEQ ID NO: 3397219 - DNA, 25 bp, Homo sapien
attactgtccatttctgcacctttg

SEQ ID NO: 3397220 - DNA, 25 bp, Homo sapien
tgtccatttctgcacctttgtggtt

SEQ ID NO: 3397221 - DNA, 25 bp, Homo sapien
catttctgcacctttgtggttaaga

SEQ ID NO: 3397222 - DNA, 25 bp, Homo sapien
tctgcacctttgtggttaagaaggc

SEQ ID NO: 3397223 - DNA, 25 bp, Homo sapien
cataaggcatgtagcttctgcagct

SEQ ID NO: 3397224 - DNA, 25 bp, Homo sapien
agtgagtctttgctaaatcactccc

SEQ ID NO: 3397225 - DNA, 25 bp, Homo sapien
agagaacactgcggcttttccttcc

SEQ ID NO: 3397226 - DNA, 25 bp, Homo sapien
tagaagtttccaagtgagtctttgc

SEQ ID NO: 3397227 - DNA, 25 bp, Homo sapien
gcccctttgacatggagaaacggca

SEQ ID NO: 3397228 - DNA, 25 bp, Homo sapien
catcaggaccttggctgaagagagg

SEQ ID NO: 3397229 - DNA, 25 bp, Homo sapien
tcagggtcccctggaacgagatgca

SEQ ID NO: 3397230 - DNA, 25 bp, Homo sapien
caaggccaagaaggtcagaaactga

SEQ ID NO: 3397231 - DNA, 25 bp, Homo sapien
ctgagagcctgccatgaaaggcagc

SEQ ID NO: 3397232 - DNA, 25 bp, Homo sapien
ggcagctggaaacctggggggtggc

SEQ ID NO: 3397233 - DNA, 25 bp, Homo sapien
caggtgttgggaattctgtgtgtca

SEQ ID NO: 3397234 - DNA, 25 bp, Homo sapien
tggggggtggctgctcgtgtcattt

SEQ ID NO: 3397235 - DNA, 25 bp, Homo sapien
tatggtgttgtaaatgtgaaatgca

SEQ ID NO: 3397236 - DNA, 25 bp, Homo sapien
gtgtaaacaatgcttctcagaaggt

SEQ ID NO: 3397237 - DNA, 25 bp, Homo sapien
gatagtagtacctgccttatggtgt

SEQ ID NO: 3397238 - DNA, 25 bp, Homo sapien
gctcagctgacattgaatgaatagg

SEQ ID NO: 3397239 - DNA, 25 bp, Homo sapien
agaagagcctgtatgaagggggctt

SEQ ID NO: 3397240 - DNA, 25 bp, Homo sapien
cctgtatgaagggggctttgatttc

SEQ ID NO: 3397241 - DNA, 25 bp, Homo sapien
gagcctgtatgaagggggctttgat

SEQ ID NO: 3397242 - DNA, 25 bp, Homo sapien
tgtatgaagggggctttgatttcct

SEQ ID NO: 3397243 - DNA, 25 bp, Homo sapien
tcttgcaggcgaggtgaccattcac

SEQ ID NO: 3397244 - DNA, 25 bp, Homo sapien
ttaatcctgggtagtcaagagagca

SEQ ID NO: 3397245 - DNA, 25 bp, Homo sapien
tggcagacaacaaagctccccggat

SEQ ID NO: 3397246 - DNA, 25 bp, Homo sapien
tgctcagagtcaaagtgtctccctc

SEQ ID NO: 3397247 - DNA, 25 bp, Homo sapien
ggtggtgctactccggctccatgaa

SEQ ID NO: 3397248 - DNA, 25 bp, Homo sapien
catggagttgtgagtgcccctcgct

SEQ ID NO: 3397249 - DNA, 25 bp, Homo sapien
tgaagacgctggaggacttgacctt

SEQ ID NO: 3397250 - DNA, 25 bp, Homo sapien
gggacgtacagctcgactctgaaga

SEQ ID NO: 3397251 - DNA, 25 bp, Homo sapien
tttctcgccggctggtcccggactc

SEQ ID NO: 3397252 - DNA, 25 bp, Homo sapien
cggccggcgcagcgcagaagtttgc

SEQ ID NO: 3397253 - DNA, 25 bp, Homo sapien
ccggcgcagcgcagaagtttgcaga

SEQ ID NO: 3397254 - DNA, 25 bp, Homo sapien
tggtcccggactcgcgctgcgccct

SEQ ID NO: 3397255 - DNA, 25 bp, Homo sapien
ttattggagcctagacggcagcgca

SEQ ID NO: 3397256 - DNA, 25 bp, Homo sapien
cacacagaggtaacagggaagtcac

SEQ ID NO: 3397257 - DNA, 25 bp, Homo sapien
gaaaccacaaatgggcggaggcact

SEQ ID NO: 3397258 - DNA, 25 bp, Homo sapien
gaatctgacaaaagttggtgcccct

SEQ ID NO: 3397259 - DNA, 25 bp, Homo sapien
tcacggcccaaggtcagaactgtgt

SEQ ID NO: 3397260 - DNA, 25 bp, Homo sapien
tgttgcataaataaagacccgcgga

SEQ ID NO: 3397261 - DNA, 25 bp, Homo sapien
ccaattctaaccatcgggcggcgat

SEQ ID NO: 3397262 - DNA, 25 bp, Homo sapien
tctgtaaagtgtgactgcattctcc

SEQ ID NO: 3397263 - DNA, 25 bp, Homo sapien
gggtgttccctgctgcaaatttgta

SEQ ID NO: 3397264 - DNA, 25 bp, Homo sapien
gtgttccctgctgcaaatttgtaca

SEQ ID NO: 3397265 - DNA, 25 bp, Homo sapien
ttgtacatgatcttggtggacttca

SEQ ID NO: 3397266 - DNA, 25 bp, Homo sapien
tggtggacttcaagctgactgtcat

SEQ ID NO: 3397267 - DNA, 25 bp, Homo sapien
tttctcatggagcttctttctgcca

SEQ ID NO: 3397268 - DNA, 25 bp, Homo sapien
attaaggccattctttacacattca

SEQ ID NO: 3397269 - DNA, 25 bp, Homo sapien
tcctggtggggcctcacaaatgaaa

SEQ ID NO: 3397270 - DNA, 25 bp, Homo sapien
tggcatatttttctcatggagcttc

SEQ ID NO: 3397271 - DNA, 25 bp, Homo sapien
gagtccgtggcgacttcaggctcag

SEQ ID NO: 3397272 - DNA, 25 bp, Homo sapien
taggcaggccaagattggaagccca

SEQ ID NO: 3397273 - DNA, 25 bp, Homo sapien
cagggctctccgaaggaggcctgaa

SEQ ID NO: 3397274 - DNA, 25 bp, Homo sapien
gcaaatctgcctgttgccccgagtc

SEQ ID NO: 3397275 - DNA, 25 bp, Homo sapien
ctgcatctggtcgctggcgggatcc

SEQ ID NO: 3397276 - DNA, 25 bp, Homo sapien
catctggtcgctggcgggatcccgg

SEQ ID NO: 3397277 - DNA, 25 bp, Homo sapien
ttccagtgctgcatctggtcgctgg

SEQ ID NO: 3397278 - DNA, 25 bp, Homo sapien
ccagtgctgcatctggtcgctggcg

SEQ ID NO: 3397279 - DNA, 25 bp, Homo sapien
cttcgggcccgctcggggagcacag

SEQ ID NO: 3397280 - DNA, 25 bp, Homo sapien
agtgagccgcggtacagtccctcca

SEQ ID NO: 3397281 - DNA, 25 bp, Homo sapien
tgagccgcggtacagtccctccaag

SEQ ID NO: 3397282 - DNA, 25 bp, Homo sapien
tacttgccgacgcccccgctttcta

SEQ ID NO: 3397283 - DNA, 25 bp, Homo sapien
cccagtgagccgcggtacagtccct

SEQ ID NO: 3397284 - DNA, 25 bp, Homo sapien
aagctgcgacctctgtcccagttgg

SEQ ID NO: 3397285 - DNA, 25 bp, Homo sapien
gagcctgtcgcggacaacaaagcct

SEQ ID NO: 3397286 - DNA, 25 bp, Homo sapien
cctcccctgcttcggcgaatgtaaa

SEQ ID NO: 3397287 - DNA, 25 bp, Homo sapien
cccagttggcaaaagtgcaaaattc

SEQ ID NO: 3397288 - DNA, 25 bp, Homo sapien
tctctagactgtgtactccttttac

SEQ ID NO: 3397289 - DNA, 25 bp, Homo sapien
ccttttacatctatatacctgatcc

SEQ ID NO: 3397290 - DNA, 25 bp, Homo sapien
cgcccagcctgtcactatttttcct

SEQ ID NO: 3397291 - DNA, 25 bp, Homo sapien
gatccctaatacactgctcaatata

SEQ ID NO: 3397292 - DNA, 25 bp, Homo sapien
caagtgcgctaccttgtttagtgca

SEQ ID NO: 3397293 - DNA, 25 bp, Homo sapien
gtttagtgcatctcaagaaatgtac

SEQ ID NO: 3397294 - DNA, 25 bp, Homo sapien
gaaatgtacaccagctatttgcaac

SEQ ID NO: 3397295 - DNA, 25 bp, Homo sapien
aaacgctttattactgccacgatct

SEQ ID NO: 3397296 - DNA, 25 bp, Homo sapien
tcaggaattctctctcggtcaaaat

SEQ ID NO: 3397297 - DNA, 25 bp, Homo sapien
agtttgtctcctactgggttaccag

SEQ ID NO: 3397298 - DNA, 25 bp, Homo sapien
ccagctccagtggtcaggacatcag

SEQ ID NO: 3397299 - DNA, 25 bp, Homo sapien
tttagcatgcacaactctctcagga

SEQ ID NO: 3397300 - DNA, 25 bp, Homo sapien
tgccttggagtatttggtaatgtca

SEQ ID NO: 3397301 - DNA, 25 bp, Homo sapien
gtatttggtaatgtcatgtgtgacc

SEQ ID NO: 3397302 - DNA, 25 bp, Homo sapien
tgggagtcttctttccaatatgctc

SEQ ID NO: 3397303 - DNA, 25 bp, Homo sapien
caacagtggagaaccgaactgcgat

SEQ ID NO: 3397304 - DNA, 25 bp, Homo sapien
aacgagatcccagttaccatcttct

SEQ ID NO: 3397305 - DNA, 25 bp, Homo sapien
gtgtcagctgaacccgattctccag

SEQ ID NO: 3397306 - DNA, 25 bp, Homo sapien
tcactgcaaacccacgagggtcccg

SEQ ID NO: 3397307 - DNA, 25 bp, Homo sapien
ggtgttatttccaacgagatcccag

SEQ ID NO: 3397308 - DNA, 25 bp, Homo sapien
gaccatgtccggatccttcagatgt

SEQ ID NO: 3397309 - DNA, 25 bp, Homo sapien
tccagaagtcccagaccatgtccgg

SEQ ID NO: 3397310 - DNA, 25 bp, Homo sapien
tgatgcagagactcaggacgtaggc

SEQ ID NO: 3397311 - DNA, 25 bp, Homo sapien
actcaggacgtaggctccagaagtc

SEQ ID NO: 3397312 - DNA, 25 bp, Homo sapien
ccagcttgaaagtatgtgatccata

SEQ ID NO: 3397313 - DNA, 25 bp, Homo sapien
catatccattcatgtggcgatgtcc

SEQ ID NO: 3397314 - DNA, 25 bp, Homo sapien
tggaatttgcaataaactgcctccc

SEQ ID NO: 3397315 - DNA, 25 bp, Homo sapien
ccccatttgcattaaccagcttgaa

SEQ ID NO: 3397316 - DNA, 25 bp, Homo sapien
tactgaacaagaagtaaagccacct

SEQ ID NO: 3397317 - DNA, 25 bp, Homo sapien
actagttctctgactatgagcaggc

SEQ ID NO: 3397318 - DNA, 25 bp, Homo sapien
caccatgtacagatcgcccaaagag

SEQ ID NO: 3397319 - DNA, 25 bp, Homo sapien
gccaagtgccgcagaaagatttcct

SEQ ID NO: 3397320 - DNA, 25 bp, Homo sapien
tggcgttaaaaagatcccggatgcc

SEQ ID NO: 3397321 - DNA, 25 bp, Homo sapien
gccatagtcaggatcttcctgggaa

SEQ ID NO: 3397322 - DNA, 25 bp, Homo sapien
cagaaaggtttttgatgccctggtc

SEQ ID NO: 3397323 - DNA, 25 bp, Homo sapien
aaagtctcgccgcatcttcaacaga

SEQ ID NO: 3397324 - DNA, 25 bp, Homo sapien
caatgaaatgacaaacaggaacgtg

SEQ ID NO: 3397325 - DNA, 25 bp, Homo sapien
caattaccaggcaatcaactgaagg

SEQ ID NO: 3397326 - DNA, 25 bp, Homo sapien
gacactctgaagtggtaccctctgt

SEQ ID NO: 3397327 - DNA, 25 bp, Homo sapien
tcaaagctacccacaaaaataccag

SEQ ID NO: 3397328 - DNA, 25 bp, Homo sapien
gagggtagtccttgtgaggccaaac

SEQ ID NO: 3397329 - DNA, 25 bp, Homo sapien
gaagcattttgtcaggactggcctc

SEQ ID NO: 3397330 - DNA, 25 bp, Homo sapien
catgttgcttgggtcgaaggctatc

SEQ ID NO: 3397331 - DNA, 25 bp, Homo sapien
gaaggctatctgttcaacctcagca

SEQ ID NO: 3397332 - DNA, 25 bp, Homo sapien
agaacatctcaatccaccaggctca

SEQ ID NO: 3397333 - DNA, 25 bp, Homo sapien
tgtgcatgctcacatggacacctgc

SEQ ID NO: 3397334 - DNA, 25 bp, Homo sapien
gtgaatcccacaaggtaaccaagca

SEQ ID NO: 3397335 - DNA, 25 bp, Homo sapien
catatgtagggatcttaccatggac

SEQ ID NO: 3397336 - DNA, 25 bp, Homo sapien
cactggcagcatacatgtagttcat

SEQ ID NO: 3397337 - DNA, 25 bp, Homo sapien
tgtagttcataaagatcatccctag

SEQ ID NO: 3397338 - DNA, 25 bp, Homo sapien
tcatccctagatctctttttacaaa

SEQ ID NO: 3397339 - DNA, 25 bp, Homo sapien
ggaaaaattcaagcatcaccatgaa

SEQ ID NO: 3397340 - DNA, 25 bp, Homo sapien
caccaagaggagtgattctactcaa

SEQ ID NO: 3397341 - DNA, 25 bp, Homo sapien
actgcctcacggtcccactgtggtt

SEQ ID NO: 3397342 - DNA, 25 bp, Homo sapien
cagccaccaggtagggagttttagg

SEQ ID NO: 3397343 - DNA, 25 bp, Homo sapien
taaccagggttatgcagcctctgct

SEQ ID NO: 3397344 - DNA, 25 bp, Homo sapien
taacatataacataggaatgggctg

SEQ ID NO: 3397345 - DNA, 25 bp, Homo sapien
gaaacgagttctccctaactgaaca

SEQ ID NO: 3397346 - DNA, 25 bp, Homo sapien
aaatgaaagccctacaatgccaaag

SEQ ID NO: 3397347 - DNA, 25 bp, Homo sapien
gcctttcccgctacttaagagtgaa

SEQ ID NO: 3397348 - DNA, 25 bp, Homo sapien
tgagtgtcaggataggcaaaaaggc

SEQ ID NO: 3397349 - DNA, 25 bp, Homo sapien
cggtagggacagttcacaggtatat

SEQ ID NO: 3397350 - DNA, 25 bp, Homo sapien
tgattgtcctgcatgcacatcgggc

SEQ ID NO: 3397351 - DNA, 25 bp, Homo sapien
tggtagttggccactcgagcacggt

SEQ ID NO: 3397352 - DNA, 25 bp, Homo sapien
gccctctgcccacgcagggggagcc

SEQ ID NO: 3397353 - DNA, 25 bp, Homo sapien
acgtgccctctgcccacgcaggggg

SEQ ID NO: 3397354 - DNA, 25 bp, Homo sapien
cccatctgctccacgtgccctctgc

SEQ ID NO: 3397355 - DNA, 25 bp, Homo sapien
ggcctggcctcccgcccatctgctc

SEQ ID NO: 3397356 - DNA, 25 bp, Homo sapien
cagaggctgtttgtatacgacacca

SEQ ID NO: 3397357 - DNA, 25 bp, Homo sapien
acttttacaatcaagccaggcgcgg

SEQ ID NO: 3397358 - DNA, 25 bp, Homo sapien
tgtttgaatatagacatctgtggct

SEQ ID NO: 3397359 - DNA, 25 bp, Homo sapien
tgtaatagctatgacctttgggtgt

SEQ ID NO: 3397360 - DNA, 25 bp, Homo sapien
cagatgcacttaggaataagaaaag

SEQ ID NO: 3397361 - DNA, 25 bp, Homo sapien
gcaaataatcactgtgatgagaaat

SEQ ID NO: 3397362 - DNA, 25 bp, Homo sapien
agtggtaatcaaatacacacgtaca

SEQ ID NO: 3397363 - DNA, 25 bp, Homo sapien
gtcaagtaagtctgcaaataatcac

SEQ ID NO: 3397364 - DNA, 25 bp, Homo sapien
gagtaacgttatcatcattggcagt

SEQ ID NO: 3397365 - DNA, 25 bp, Homo sapien
tgttgaatctccgcacttctccaga

SEQ ID NO: 3397366 - DNA, 25 bp, Homo sapien
gcagaaggctgttgttccggagcac

SEQ ID NO: 3397367 - DNA, 25 bp, Homo sapien
tgttccggagcaccaaagctgttgg

SEQ ID NO: 3397368 - DNA, 25 bp, Homo sapien
tagagcctgaccaaggccaatggtg

SEQ ID NO: 3397369 - DNA, 25 bp, Homo sapien
aaagaggatgagcatttgccctggg

SEQ ID NO: 3397370 - DNA, 25 bp, Homo sapien
cagaagctctgacgcagataggaga

SEQ ID NO: 3397371 - DNA, 25 bp, Homo sapien
gattagccaagtcaataggattcca

SEQ ID NO: 3397372 - DNA, 25 bp, Homo sapien
gctgaaacagctcttagggcagcca

SEQ ID NO: 3397373 - DNA, 25 bp, Homo sapien
aaacagctcttagggcagccatagg

SEQ ID NO: 3397374 - DNA, 25 bp, Homo sapien
cagctcttagggcagccataggcaa

SEQ ID NO: 3397375 - DNA, 25 bp, Homo sapien
tgaaacagctcttagggcagccata

SEQ ID NO: 3397376 - DNA, 25 bp, Homo sapien
tgtggtataagttgcactggacaca

SEQ ID NO: 3397377 - DNA, 25 bp, Homo sapien
tatcctcacagcgaattaattcatg

SEQ ID NO: 3397378 - DNA, 25 bp, Homo sapien
ttaacactaactgctcaaacagagc

SEQ ID NO: 3397379 - DNA, 25 bp, Homo sapien
ggacacattaaggaggcagctgccc

SEQ ID NO: 3397380 - DNA, 25 bp, Homo sapien
tgtttgcccttattcctaggcatgg

SEQ ID NO: 3397381 - DNA, 25 bp, Homo sapien
caccttaatccaatctgagactgag

SEQ ID NO: 3397382 - DNA, 25 bp, Homo sapien
cagatggcgtagaaagagatcacct

SEQ ID NO: 3397383 - DNA, 25 bp, Homo sapien
tcttaatgtgttaggtgcctggtca

SEQ ID NO: 3397384 - DNA, 25 bp, Homo sapien
ctctttccaattatcatgtctatga

SEQ ID NO: 3397385 - DNA, 25 bp, Homo sapien
tgattcttccatctattattgcatg

SEQ ID NO: 3397386 - DNA, 25 bp, Homo sapien
tactaaattcttcaagcagtcatct

SEQ ID NO: 3397387 - DNA, 25 bp, Homo sapien
gactcatcagatgaagtagtcttga

SEQ ID NO: 3397388 - DNA, 25 bp, Homo sapien
gagcaagtgcagagaattgaatcac

SEQ ID NO: 3397389 - DNA, 25 bp, Homo sapien
cacctactacaacacttaggaaatc

SEQ ID NO: 3397390 - DNA, 25 bp, Homo sapien
gtttatcaccaacaaaattcaccta

SEQ ID NO: 3397391 - DNA, 25 bp, Homo sapien
tcatttgttaatagctcatacctgc

SEQ ID NO: 3397392 - DNA, 25 bp, Homo sapien
gttcctcattcagcacgttcacata

SEQ ID NO: 3397393 - DNA, 25 bp, Homo sapien
tcagcacgttcacatagaatgcccg

SEQ ID NO: 3397394 - DNA, 25 bp, Homo sapien
tgtgcatccttcaggtggccggcaa

SEQ ID NO: 3397395 - DNA, 25 bp, Homo sapien
tgttctcacacagacgtttcctctg

SEQ ID NO: 3397396 - DNA, 25 bp, Homo sapien
tcttaagtcaagtaaaacagaaatg

SEQ ID NO: 3397397 - DNA, 25 bp, Homo sapien
ttttagggttctcccacacagctgc

SEQ ID NO: 3397398 - DNA, 25 bp, Homo sapien
agttctcttaagtcaagtaaaacag

SEQ ID NO: 3397399 - DNA, 25 bp, Homo sapien
tctttttagggttctcccacacagc

SEQ ID NO: 3397400 - DNA, 25 bp, Homo sapien
ggtgtttaacaatgccagcctcaga

SEQ ID NO: 3397401 - DNA, 25 bp, Homo sapien
ttcagcaggaggcagtactacaggt

SEQ ID NO: 3397402 - DNA, 25 bp, Homo sapien
tctgacatatactggctgagcaacc

SEQ ID NO: 3397403 - DNA, 25 bp, Homo sapien
cagagttaagatgcaggtccagtga

SEQ ID NO: 3397404 - DNA, 25 bp, Homo sapien
ggtggacctcagtgaagttcttgac

SEQ ID NO: 3397405 - DNA, 25 bp, Homo sapien
gcctggatgtggctcccgtagtcag

SEQ ID NO: 3397406 - DNA, 25 bp, Homo sapien
ccgtagtcagggtggacctcagtga

SEQ ID NO: 3397407 - DNA, 25 bp, Homo sapien
cttctcagcattgtacttgtccaga

SEQ ID NO: 3397408 - DNA, 25 bp, Homo sapien
gtgagatccggactgcacaaaggtg

SEQ ID NO: 3397409 - DNA, 25 bp, Homo sapien
gccaagtgagatccggactgcacaa

SEQ ID NO: 3397410 - DNA, 25 bp, Homo sapien
gccttctcccttgccgccaagtgag

SEQ ID NO: 3397411 - DNA, 25 bp, Homo sapien
cttgccgccaagtgagatccggact

SEQ ID NO: 3397412 - DNA, 25 bp, Homo sapien
ttacacggatgaacgctaagcttcg

SEQ ID NO: 3397413 - DNA, 25 bp, Homo sapien
catccagtgatgagcgggttacacg

SEQ ID NO: 3397414 - DNA, 25 bp, Homo sapien
ggattctctattttgaagccactag

SEQ ID NO: 3397415 - DNA, 25 bp, Homo sapien
tgcatttgcacatctagcacaggag

SEQ ID NO: 3397416 - DNA, 25 bp, Homo sapien
taatccaatcatccgtcaaaacaaa

SEQ ID NO: 3397417 - DNA, 25 bp, Homo sapien
aaatgaataatccaatcatccgtca

SEQ ID NO: 3397418 - DNA, 25 bp, Homo sapien
taggccatgaggtgatatgtaaaca

SEQ ID NO: 3397419 - DNA, 25 bp, Homo sapien
gaaacttgccttctaatcattttaa

SEQ ID NO: 3397420 - DNA, 25 bp, Homo sapien
ctgctgtattaaatgtacttttcct

SEQ ID NO: 3397421 - DNA, 25 bp, Homo sapien
ccatgacggtgctcaagttatcttc

SEQ ID NO: 3397422 - DNA, 25 bp, Homo sapien
taaaaatttctgagtagatcatctt

SEQ ID NO: 3397423 - DNA, 25 bp, Homo sapien
caggaataaacattaagccatgacg

SEQ ID NO: 3397424 - DNA, 25 bp, Homo sapien
taacattaatgtaactccagtgaaa

SEQ ID NO: 3397425 - DNA, 25 bp, Homo sapien
tgtgaaatcagtgctgaattaacat

SEQ ID NO: 3397426 - DNA, 25 bp, Homo sapien
aacattaatgtaactccagtgaaaa

SEQ ID NO: 3397427 - DNA, 25 bp, Homo sapien
cattaatgtaactccagtgaaaaaa

SEQ ID NO: 3397428 - DNA, 25 bp, Homo sapien
tgatgatgttcaaattaagagtctg

SEQ ID NO: 3397429 - DNA, 25 bp, Homo sapien
gtctggtagcagtttacagttacat

SEQ ID NO: 3397430 - DNA, 25 bp, Homo sapien
catatggagtcgaaagaaagaaaat

SEQ ID NO: 3397431 - DNA, 25 bp, Homo sapien
ttcaaattaagagtctggtagcagt

SEQ ID NO: 3397432 - DNA, 25 bp, Homo sapien
cagctgccattcaactttgttcttg

SEQ ID NO: 3397433 - DNA, 25 bp, Homo sapien
gccattcaactttgttcttgcacta

SEQ ID NO: 3397434 - DNA, 25 bp, Homo sapien
cactattgatggtggttgttaaaac

SEQ ID NO: 3397435 - DNA, 25 bp, Homo sapien
gaatgtgggacccacgtcctggcca

SEQ ID NO: 3397436 - DNA, 25 bp, Homo sapien
cagagttagtcaacagacactggca

SEQ ID NO: 3397437 - DNA, 25 bp, Homo sapien
gcccatgccattgatgctgatcaga

SEQ ID NO: 3397438 - DNA, 25 bp, Homo sapien
tgtggaatgacaacagcccatgcca

SEQ ID NO: 3397439 - DNA, 25 bp, Homo sapien
tgctcccatcccaaaggttcaaaag

SEQ ID NO: 3397440 - DNA, 25 bp, Homo sapien
ctgatttgtgtgacactgagaagcc

SEQ ID NO: 3397441 - DNA, 25 bp, Homo sapien
tgatttgtgtgacactgagaagccc

SEQ ID NO: 3397442 - DNA, 25 bp, Homo sapien
tgtgagccagctctgagaagggttc

SEQ ID NO: 3397443 - DNA, 25 bp, Homo sapien
tctgatttgtgtgacactgagaagc

SEQ ID NO: 3397444 - DNA, 25 bp, Homo sapien
tgcctcagagagacctgcttgcctc

SEQ ID NO: 3397445 - DNA, 25 bp, Homo sapien
ggcacctgcgctgggtgcagtccca

SEQ ID NO: 3397446 - DNA, 25 bp, Homo sapien
acacggatgtgacggcttgcctcag

SEQ ID NO: 3397447 - DNA, 25 bp, Homo sapien
gcctccgggagctgtttgacacgga

SEQ ID NO: 3397448 - DNA, 25 bp, Homo sapien
tagctgtttccagacgcatgccttc

SEQ ID NO: 3397449 - DNA, 25 bp, Homo sapien
aagtagtcgctgtctttagccctag

SEQ ID NO: 3397450 - DNA, 25 bp, Homo sapien
gaggatgccgatccaaatctccagg

SEQ ID NO: 3397451 - DNA, 25 bp, Homo sapien
tccaggcccttggtattgaacgcca

SEQ ID NO: 3397452 - DNA, 25 bp, Homo sapien
cagaatctccaggataagttctgat

SEQ ID NO: 3397453 - DNA, 25 bp, Homo sapien
ctggtaaaagttgcctgttccatcg

SEQ ID NO: 3397454 - DNA, 25 bp, Homo sapien
aagccagctggtaaaagttgcctgt

SEQ ID NO: 3397455 - DNA, 25 bp, Homo sapien
cttccagaatctccaggataagttc

SEQ ID NO: 3397456 - DNA, 25 bp, Homo sapien
cggttgagctcatgaggaacagaca

SEQ ID NO: 3397457 - DNA, 25 bp, Homo sapien
cagacatttgtgtgttactcccatg

SEQ ID NO: 3397458 - DNA, 25 bp, Homo sapien
tactcccatgaagtaccggatgaat

SEQ ID NO: 3397459 - DNA, 25 bp, Homo sapien
ctttgtgagtgtagcaaacctcggt

SEQ ID NO: 3397460 - DNA, 25 bp, Homo sapien
cacagagctggcatagtaaatgggc

SEQ ID NO: 3397461 - DNA, 25 bp, Homo sapien
gaagttccagctggcagtcgtttag

SEQ ID NO: 3397462 - DNA, 25 bp, Homo sapien
gctgttgcacagctacgtgagccca

SEQ ID NO: 3397463 - DNA, 25 bp, Homo sapien
tcttctccgggatacagctagtctt

SEQ ID NO: 3397464 - DNA, 25 bp, Homo sapien
gctcctatagggatggggcaccacg

SEQ ID NO: 3397465 - DNA, 25 bp, Homo sapien
ccacgggtgttatcaagtctgagcc

SEQ ID NO: 3397466 - DNA, 25 bp, Homo sapien
gtgggaaatccaatagctgtggctg

SEQ ID NO: 3397467 - DNA, 25 bp, Homo sapien
ttctgggtgggaaatccaatagctg

SEQ ID NO: 3397468 - DNA, 25 bp, Homo sapien
ttctccacaatgtccaagcaaaatc

SEQ ID NO: 3397469 - DNA, 25 bp, Homo sapien
gcctgatatttaccaacaagaagtt

SEQ ID NO: 3397470 - DNA, 25 bp, Homo sapien
ctcagcctgatatttaccaacaaga

SEQ ID NO: 3397471 - DNA, 25 bp, Homo sapien
tctccacaatgtccaagcaaaatca

SEQ ID NO: 3397472 - DNA, 25 bp, Homo sapien
catggctgcagaaccaactcctgaa

SEQ ID NO: 3397473 - DNA, 25 bp, Homo sapien
ggacggtgaaaatgtcgctttctca

SEQ ID NO: 3397474 - DNA, 25 bp, Homo sapien
tagacttccatcagtaagttcttgg

SEQ ID NO: 3397475 - DNA, 25 bp, Homo sapien
caaggtgagtgcagataaccagcag

SEQ ID NO: 3397476 - DNA, 25 bp, Homo sapien
actaccttgagaggtcttgatgaag

SEQ ID NO: 3397477 - DNA, 25 bp, Homo sapien
ccacactaccttgagaggtcttgat

SEQ ID NO: 3397478 - DNA, 25 bp, Homo sapien
cactaccttgagaggtcttgatgaa

SEQ ID NO: 3397479 - DNA, 25 bp, Homo sapien
cacactaccttgagaggtcttgatg

SEQ ID NO: 3397480 - DNA, 25 bp, Homo sapien
gctgaaagccacagcgccgcgttcg

SEQ ID NO: 3397481 - DNA, 25 bp, Homo sapien
aagctgaaagccacagcgccgcgtt

SEQ ID NO: 3397482 - DNA, 25 bp, Homo sapien
agctgaaagccacagcgccgcgttc

SEQ ID NO: 3397483 - DNA, 25 bp, Homo sapien
ccaagctgaaagccacagcgccgcg

SEQ ID NO: 3397484 - DNA, 25 bp, Homo sapien
taatatggttcatgcatctccctgc

SEQ ID NO: 3397485 - DNA, 25 bp, Homo sapien
cagtgaagaaccaatgttgatcgcc

SEQ ID NO: 3397486 - DNA, 25 bp, Homo sapien
ttacaacagcccaatgcagtagatg

SEQ ID NO: 3397487 - DNA, 25 bp, Homo sapien
cccagtggtagagtccagcttaaac

SEQ ID NO: 3397488 - DNA, 25 bp, Homo sapien
cattcttgttatgagcagcgtaggg

SEQ ID NO: 3397489 - DNA, 25 bp, Homo sapien
ttcaagtcaaggaaagagcaacagc

SEQ ID NO: 3397490 - DNA, 25 bp, Homo sapien
gatatggctgactgagcgttcccag

SEQ ID NO: 3397491 - DNA, 25 bp, Homo sapien
gagtgcttagaaccaaatcgggcag

SEQ ID NO: 3397492 - DNA, 25 bp, Homo sapien
aatcgggctgtgtagacccactcat

SEQ ID NO: 3397493 - DNA, 25 bp, Homo sapien
caaaatcgggctgtgtagacccact

SEQ ID NO: 3397494 - DNA, 25 bp, Homo sapien
aaatcgggctgtgtagacccactca

SEQ ID NO: 3397495 - DNA, 25 bp, Homo sapien
ctcaaaatcgggctgtgtagaccca

SEQ ID NO: 3397496 - DNA, 25 bp, Homo sapien
tgttgctctgctccgataacaacgc

SEQ ID NO: 3397497 - DNA, 25 bp, Homo sapien
cctgagctggtttgactgagtgttc

SEQ ID NO: 3397498 - DNA, 25 bp, Homo sapien
aaagaaaggcatctgcccaaacagc

SEQ ID NO: 3397499 - DNA, 25 bp, Homo sapien
caacgcagttaagcattgatttgta

SEQ ID NO: 3397500 - DNA, 25 bp, Homo sapien
ctcctgctgcaagggtgaaggtaca

SEQ ID NO: 3397501 - DNA, 25 bp, Homo sapien
ggccacggagcagatcttaaccagg

SEQ ID NO: 3397502 - DNA, 25 bp, Homo sapien
ctgctgcaagggtgaaggtacactg

SEQ ID NO: 3397503 - DNA, 25 bp, Homo sapien
agggccacggagcagatcttaacca

SEQ ID NO: 3397504 - DNA, 25 bp, Homo sapien
aaggacgaaagccatccctcctgtc

SEQ ID NO: 3397505 - DNA, 25 bp, Homo sapien
tgccaagaacagtggtaaggcatat

SEQ ID NO: 3397506 - DNA, 25 bp, Homo sapien
gcatatgctcctaagctctgtgttg

SEQ ID NO: 3397507 - DNA, 25 bp, Homo sapien
cactagacacattgccaaggctgcc

SEQ ID NO: 3397508 - DNA, 25 bp, Homo sapien
tcagggtgggcacatgaggcccagg

SEQ ID NO: 3397509 - DNA, 25 bp, Homo sapien
gggccagtgtagcagaagggctttg

SEQ ID NO: 3397510 - DNA, 25 bp, Homo sapien
tcctctgaggcatagtttttcaggc

SEQ ID NO: 3397511 - DNA, 25 bp, Homo sapien
tttggccgagtcctaccctcctctg

SEQ ID NO: 3397512 - DNA, 25 bp, Homo sapien
tgtaagcaaagaaggtcagcatttc

SEQ ID NO: 3397513 - DNA, 25 bp, Homo sapien
ggcttgtaagcaaagaaggtcagca

SEQ ID NO: 3397514 - DNA, 25 bp, Homo sapien
taagcaaagaaggtcagcatttcca

SEQ ID NO: 3397515 - DNA, 25 bp, Homo sapien
gcaaagaaggtcagcatttccaact

SEQ ID NO: 3397516 - DNA, 25 bp, Homo sapien
cagggcccagtgtcttgtttgctca

SEQ ID NO: 3397517 - DNA, 25 bp, Homo sapien
agaaaatctctaagtccccagaccg

SEQ ID NO: 3397518 - DNA, 25 bp, Homo sapien
gcatttgctcaaccacaagcagtgg

SEQ ID NO: 3397519 - DNA, 25 bp, Homo sapien
catttgcatggagggattggccttc

SEQ ID NO: 3397520 - DNA, 25 bp, Homo sapien
caccatgtataggagctttgaagcc

SEQ ID NO: 3397521 - DNA, 25 bp, Homo sapien
taaaggttgaactaggctacacaca

SEQ ID NO: 3397522 - DNA, 25 bp, Homo sapien
taaggttagtactcacccagacaag

SEQ ID NO: 3397523 - DNA, 25 bp, Homo sapien
taaataattaggactgaatccagcc

SEQ ID NO: 3397524 - DNA, 25 bp, Homo sapien
taaagtatttaaagtgcaatttcaa

SEQ ID NO: 3397525 - DNA, 25 bp, Homo sapien
tcaaacaatgaaaatccaagctggt

SEQ ID NO: 3397526 - DNA, 25 bp, Homo sapien
caaacaatgaaaatccaagctggtg

SEQ ID NO: 3397527 - DNA, 25 bp, Homo sapien
tgaaaatccaagctggtggcagcac

SEQ ID NO: 3397528 - DNA, 25 bp, Homo sapien
taatctctgatcaggaatgaagcgg

SEQ ID NO: 3397529 - DNA, 25 bp, Homo sapien
catgaggcaagtttttacagccacc

SEQ ID NO: 3397530 - DNA, 25 bp, Homo sapien
caaacagcctgttcagtcagtgcct

SEQ ID NO: 3397531 - DNA, 25 bp, Homo sapien
caaatgtcattggaaagtgcagatc

SEQ ID NO: 3397532 - DNA, 25 bp, Homo sapien
tgagattcattacaccacctccttc

SEQ ID NO: 3397533 - DNA, 25 bp, Homo sapien
gctggcggctggtgaaggaggttgt

SEQ ID NO: 3397534 - DNA, 25 bp, Homo sapien
gctggtgaaggaggttgttgccggg

SEQ ID NO: 3397535 - DNA, 25 bp, Homo sapien
tgttgccggggttgagattcattac

SEQ ID NO: 3397536 - DNA, 25 bp, Homo sapien
caaacgagcttttgtctggaacgct

SEQ ID NO: 3397537 - DNA, 25 bp, Homo sapien
tcacagggtatttgaggcccacaac

SEQ ID NO: 3397538 - DNA, 25 bp, Homo sapien
cacatggattagcactcgctgcaga

SEQ ID NO: 3397539 - DNA, 25 bp, Homo sapien
gattaaagctctagggagaacacct

SEQ ID NO: 3397540 - DNA, 25 bp, Homo sapien
tcctcgtacctcatggcgaaacaaa

SEQ ID NO: 3397541 - DNA, 25 bp, Homo sapien
gcacttagctcctcgtacctcatgg

SEQ ID NO: 3397542 - DNA, 25 bp, Homo sapien
cctcatggcgaaacaaaagcagccc

SEQ ID NO: 3397543 - DNA, 25 bp, Homo sapien
agtatgcacttagctcctcgtacct

SEQ ID NO: 3397544 - DNA, 25 bp, Homo sapien
caacaaattcaagggtggaccagta

SEQ ID NO: 3397545 - DNA, 25 bp, Homo sapien
tgcatcccaccaagctgaagcaggg

SEQ ID NO: 3397546 - DNA, 25 bp, Homo sapien
tcagaagcactaagagcaggaggtc

SEQ ID NO: 3397547 - DNA, 25 bp, Homo sapien
gagagagcttacagttcccttggaa

SEQ ID NO: 3397548 - DNA, 25 bp, Homo sapien
gccgttgatgtcgaactcttggaaa

SEQ ID NO: 3397549 - DNA, 25 bp, Homo sapien
cctgcaaactcatgctgcagaggtg

SEQ ID NO: 3397550 - DNA, 25 bp, Homo sapien
ctcttggaaagggatacaattggca

SEQ ID NO: 3397551 - DNA, 25 bp, Homo sapien
tacaattggcatccagctggttggt

SEQ ID NO: 3397552 - DNA, 25 bp, Homo sapien
taggcacaccaggtaccctatgctt

SEQ ID NO: 3397553 - DNA, 25 bp, Homo sapien
caagtgactggactgtttgcaaagg

SEQ ID NO: 3397554 - DNA, 25 bp, Homo sapien
gcatttataagggattaggcacacc

SEQ ID NO: 3397555 - DNA, 25 bp, Homo sapien
catggtaatttggaggtgagaccac

SEQ ID NO: 3397556 - DNA, 25 bp, Homo sapien
agtttgttcagtcttgacaatgaca

SEQ ID NO: 3397557 - DNA, 25 bp, Homo sapien
tgttcagtcttgacaatgacattgt

SEQ ID NO: 3397558 - DNA, 25 bp, Homo sapien
tggaacaggtcactactgcactggc

SEQ ID NO: 3397559 - DNA, 25 bp, Homo sapien
ctggaacaggtcactactgcactgg

SEQ ID NO: 3397560 - DNA, 25 bp, Homo sapien
gccacaaccaggagtaggaggcaga

SEQ ID NO: 3397561 - DNA, 25 bp, Homo sapien
gcagtcactggtcgcaagggcaaga

SEQ ID NO: 3397562 - DNA, 25 bp, Homo sapien
agtgtggctccccataagtctataa

SEQ ID NO: 3397563 - DNA, 25 bp, Homo sapien
taaattggaaataggtggcagtcac

SEQ ID NO: 3397564 - DNA, 25 bp, Homo sapien
gctaccatagttggtgtcatataaa

SEQ ID NO: 3397565 - DNA, 25 bp, Homo sapien
ctactgtgctaccatagttggtgtc

SEQ ID NO: 3397566 - DNA, 25 bp, Homo sapien
gttggtgtcatataaatagttctcg

SEQ ID NO: 3397567 - DNA, 25 bp, Homo sapien
tcatataaatagttctcgtctttcc

SEQ ID NO: 3397568 - DNA, 25 bp, Homo sapien
tgtcatggagatctgagcccggcag

SEQ ID NO: 3397569 - DNA, 25 bp, Homo sapien
atctgagcccggcagaaagttttgc

SEQ ID NO: 3397570 - DNA, 25 bp, Homo sapien
gcccggcagaaagttttgctgtcca

SEQ ID NO: 3397571 - DNA, 25 bp, Homo sapien
gttgtcatggagatctgagcccggc

SEQ ID NO: 3397572 - DNA, 25 bp, Homo sapien
tggataaacacatcaagcccgagct

SEQ ID NO: 3397573 - DNA, 25 bp, Homo sapien
gactgtcgagcagaacaggacaccg

SEQ ID NO: 3397574 - DNA, 25 bp, Homo sapien
tagaccgtgccaccctagctttagg

SEQ ID NO: 3397575 - DNA, 25 bp, Homo sapien
tgagagagcgtgacttcagctaagc

SEQ ID NO: 3397576 - DNA, 25 bp, Homo sapien
gacaaaggcgccattgagtggccca

SEQ ID NO: 3397577 - DNA, 25 bp, Homo sapien
tgcgactattaccaaagaggagatg

SEQ ID NO: 3397578 - DNA, 25 bp, Homo sapien
gacttttaaggacatgactctgaga

SEQ ID NO: 3397579 - DNA, 25 bp, Homo sapien
caagctcaatacagagggccacagt

SEQ ID NO: 3397580 - DNA, 25 bp, Homo sapien
gcaggggggtcttgctcctttttca

SEQ ID NO: 3397581 - DNA, 25 bp, Homo sapien
gagagaggaaattgccaaccccatg

SEQ ID NO: 3397582 - DNA, 25 bp, Homo sapien
ccagatgtgcccgatgtgatgggaa

SEQ ID NO: 3397583 - DNA, 25 bp, Homo sapien
ttagagcacatatgacagaacaggg

SEQ ID NO: 3397584 - DNA, 25 bp, Homo sapien
cactccaccctgtttgggatgaaga

SEQ ID NO: 3397585 - DNA, 25 bp, Homo sapien
ttgtctgggttcaagaggatgtcgc

SEQ ID NO: 3397586 - DNA, 25 bp, Homo sapien
tttttaccccatagctgagccactg

SEQ ID NO: 3397587 - DNA, 25 bp, Homo sapien
aattcccataagtgagtccctctcg

SEQ ID NO: 3397588 - DNA, 25 bp, Homo sapien
gcttttcataggtcatgctgctgtt

SEQ ID NO: 3397589 - DNA, 25 bp, Homo sapien
atataccagtcttcgtccatccaca

SEQ ID NO: 3397590 - DNA, 25 bp, Homo sapien
ttcgtccatccacacgctccagaat

SEQ ID NO: 3397591 - DNA, 25 bp, Homo sapien
atttatataccagtcttcgtccatc

SEQ ID NO: 3397592 - DNA, 25 bp, Homo sapien
ttatataccagtcttcgtccatcca

SEQ ID NO: 3397593 - DNA, 25 bp, Homo sapien
ctcatggtacataaatatcagagaa

SEQ ID NO: 3397594 - DNA, 25 bp, Homo sapien
aatatttacgtccaggagttctttg

SEQ ID NO: 3397595 - DNA, 25 bp, Homo sapien
catggtacataaatatcagagaaaa

SEQ ID NO: 3397596 - DNA, 25 bp, Homo sapien
tctttgaaatatttacgtccaggag

SEQ ID NO: 3397597 - DNA, 25 bp, Homo sapien
gacattttgcgttatcacagctggg

SEQ ID NO: 3397598 - DNA, 25 bp, Homo sapien
tcctgaatgagtataaagaccccac

SEQ ID NO: 3397599 - DNA, 25 bp, Homo sapien
tagaatagaggagcaagccaaggac

SEQ ID NO: 3397600 - DNA, 25 bp, Homo sapien
tatgcagagattatagccaaccttg

SEQ ID NO: 3397601 - DNA, 25 bp, Homo sapien
gacactgtggtaggtgctctattag

SEQ ID NO: 3397602 - DNA, 25 bp, Homo sapien
atgacactgtggtaggtgctctatt

SEQ ID NO: 3397603 - DNA, 25 bp, Homo sapien
gagcactccttcttatggatacatg

SEQ ID NO: 3397604 - DNA, 25 bp, Homo sapien
gctctattagttgatgaagagcact

SEQ ID NO: 3397605 - DNA, 25 bp, Homo sapien
gaagtcagcgaaggatctagcctcc

SEQ ID NO: 3397606 - DNA, 25 bp, Homo sapien
gaaactgttgcttatgcccctggga

SEQ ID NO: 3397607 - DNA, 25 bp, Homo sapien
tattgacttgtggaacccaacggcc

SEQ ID NO: 3397608 - DNA, 25 bp, Homo sapien
aagtgagagccatgtgtccccaaaa

SEQ ID NO: 3397609 - DNA, 25 bp, Homo sapien
agcccagcattgaatggcttattga

SEQ ID NO: 3397610 - DNA, 25 bp, Homo sapien
gttctgttgctagaggctaagtgca

SEQ ID NO: 3397611 - DNA, 25 bp, Homo sapien
ccagcattgaatggcttattgaaga

SEQ ID NO: 3397612 - DNA, 25 bp, Homo sapien
agctgtatgtgttctgttgctagag

SEQ ID NO: 3397613 - DNA, 25 bp, Homo sapien
cattagccatatgcgactattcggc

SEQ ID NO: 3397614 - DNA, 25 bp, Homo sapien
taatgcccaggtcagtaagtgaggg

SEQ ID NO: 3397615 - DNA, 25 bp, Homo sapien
gcatcaacgcagataaataatgccc

SEQ ID NO: 3397616 - DNA, 25 bp, Homo sapien
taagtgagggatttcttctcaagga

SEQ ID NO: 3397617 - DNA, 25 bp, Homo sapien
ctgtttgtactggcagctactgtca

SEQ ID NO: 3397618 - DNA, 25 bp, Homo sapien
tgtttgtactggcagctactgtcat

SEQ ID NO: 3397619 - DNA, 25 bp, Homo sapien
tcatttcttaacagcgctgacatgg

SEQ ID NO: 3397620 - DNA, 25 bp, Homo sapien
caatgtctaggatgtgcagttcttc

SEQ ID NO: 3397621 - DNA, 25 bp, Homo sapien
ttggctggatttgaggaatcagcac

SEQ ID NO: 3397622 - DNA, 25 bp, Homo sapien
gaaagttgcgtggtatcaccatgga

SEQ ID NO: 3397623 - DNA, 25 bp, Homo sapien
gtcttggaatagaaccccaggggca

SEQ ID NO: 3397624 - DNA, 25 bp, Homo sapien
ccatgccatcatccaagtaaggctg

SEQ ID NO: 3397625 - DNA, 25 bp, Homo sapien
tcatccaagtaaggctgatagtctt

SEQ ID NO: 3397626 - DNA, 25 bp, Homo sapien
tgccatcatccaagtaaggctgata

SEQ ID NO: 3397627 - DNA, 25 bp, Homo sapien
tccaagtaaggctgatagtcttcca

SEQ ID NO: 3397628 - DNA, 25 bp, Homo sapien
tcaggttctttggtggatcactgtc

SEQ ID NO: 3397629 - DNA, 25 bp, Homo sapien
ggccccacaggctggtaggtagaat

SEQ ID NO: 3397630 - DNA, 25 bp, Homo sapien
ggatcactgtcttgtcccaagtaca

SEQ ID NO: 3397631 - DNA, 25 bp, Homo sapien
ccccacaggctggtaggtagaataa

SEQ ID NO: 3397632 - DNA, 25 bp, Homo sapien
gcaacaatgaatacatggcatgaat

SEQ ID NO: 3397633 - DNA, 25 bp, Homo sapien
aaatgtaggtggtctaaacactgca

SEQ ID NO: 3397634 - DNA, 25 bp, Homo sapien
taagataatagacctaacaactatc

SEQ ID NO: 3397635 - DNA, 25 bp, Homo sapien
ttcctatggcactaagttttgttaa

SEQ ID NO: 3397636 - DNA, 25 bp, Homo sapien
aattagctgggtggaaactgtggaa

SEQ ID NO: 3397637 - DNA, 25 bp, Homo sapien
ccggtaaagtcaatcagagaacagt

SEQ ID NO: 3397638 - DNA, 25 bp, Homo sapien
gagtgggcaggctatcagtttcctt

SEQ ID NO: 3397639 - DNA, 25 bp, Homo sapien
tacacggctcctgtgaaatgttgcc

SEQ ID NO: 3397640 - DNA, 25 bp, Homo sapien
atggagagctcaaggaaacagtgcc

SEQ ID NO: 3397641 - DNA, 25 bp, Homo sapien
tgccaaaaaggtgcagaaggaggaa

SEQ ID NO: 3397642 - DNA, 25 bp, Homo sapien
cagttgtccagaaagttgctgagga

SEQ ID NO: 3397643 - DNA, 25 bp, Homo sapien
taactttcgatggataggatggaga

SEQ ID NO: 3397644 - DNA, 25 bp, Homo sapien
cactggcaacttggcctggaatggt

SEQ ID NO: 3397645 - DNA, 25 bp, Homo sapien
catccactggcaacttggcctggaa

SEQ ID NO: 3397646 - DNA, 25 bp, Homo sapien
tcccatgccaacttcacggattttg

SEQ ID NO: 3397647 - DNA, 25 bp, Homo sapien
gattttgtgagtttcccacatccac

SEQ ID NO: 3397648 - DNA, 25 bp, Homo sapien
atggtcttgtgctcaaggggatttt

SEQ ID NO: 3397649 - DNA, 25 bp, Homo sapien
gtgtaggaactgatggtcttgtgct

SEQ ID NO: 3397650 - DNA, 25 bp, Homo sapien
ggtgtaggaactgatggtcttgtgc

SEQ ID NO: 3397651 - DNA, 25 bp, Homo sapien
tgtgctcaaggggattttccttcat

SEQ ID NO: 3397652 - DNA, 25 bp, Homo sapien
tgatgtttctcctgcacatagaggt

SEQ ID NO: 3397653 - DNA, 25 bp, Homo sapien
gaagttccaaagtgatgtttctcct

SEQ ID NO: 3397654 - DNA, 25 bp, Homo sapien
cctgcacatagaggtatccctccat

SEQ ID NO: 3397655 - DNA, 25 bp, Homo sapien
gttccaaagtgatgtttctcctgca

SEQ ID NO: 3397656 - DNA, 25 bp, Homo sapien
tcattcggttcccactgcgtggcag

SEQ ID NO: 3397657 - DNA, 25 bp, Homo sapien
gacagagactctccttaggtagcaa

SEQ ID NO: 3397658 - DNA, 25 bp, Homo sapien
ttttgctggaacatattctggatca

SEQ ID NO: 3397659 - DNA, 25 bp, Homo sapien
cagccagagctgaggatttcgaaat

SEQ ID NO: 3397660 - DNA, 25 bp, Homo sapien
caagcacatcctttttgatgatgag

SEQ ID NO: 3397661 - DNA, 25 bp, Homo sapien
gaggaccaagtatgtgtcaagcaca

SEQ ID NO: 3397662 - DNA, 25 bp, Homo sapien
agggctccgtgaggtgctctgcacc

SEQ ID NO: 3397663 - DNA, 25 bp, Homo sapien
atttgttgaggaccaagtatgtgtc

SEQ ID NO: 3397664 - DNA, 25 bp, Homo sapien
gaagattgaggtgggtacggtggaa

SEQ ID NO: 3397665 - DNA, 25 bp, Homo sapien
tgcatgaagattgaggtgggtacgg

SEQ ID NO: 3397666 - DNA, 25 bp, Homo sapien
catgaagattgaggtgggtacggtg

SEQ ID NO: 3397667 - DNA, 25 bp, Homo sapien
tgtgcatgaagattgaggtgggtac

SEQ ID NO: 3397668 - DNA, 25 bp, Homo sapien
gatgagaatcagcacctctctcaga

SEQ ID NO: 3397669 - DNA, 25 bp, Homo sapien
tccagccagctggatgagaatcagc

SEQ ID NO: 3397670 - DNA, 25 bp, Homo sapien
ggaaggcagccgataattacaggac

SEQ ID NO: 3397671 - DNA, 25 bp, Homo sapien
ggcagccgataattacaggacagga

SEQ ID NO: 3397672 - DNA, 25 bp, Homo sapien
tagggttaccatcagctctggccac

SEQ ID NO: 3397673 - DNA, 25 bp, Homo sapien
tgttcctggatgtcgctggctgata

SEQ ID NO: 3397674 - DNA, 25 bp, Homo sapien
tatcttgacttctggagctcatgcc

SEQ ID NO: 3397675 - DNA, 25 bp, Homo sapien
gccatgaatgacgtccagggcttca

SEQ ID NO: 3397676 - DNA, 25 bp, Homo sapien
tagaaaacggaaagcttgtgccctg

SEQ ID NO: 3397677 - DNA, 25 bp, Homo sapien
tcttgctacatctatagaagctgag

SEQ ID NO: 3397678 - DNA, 25 bp, Homo sapien
taatagtttttctagccaccatgac

SEQ ID NO: 3397679 - DNA, 25 bp, Homo sapien
tgccagaaactgctattaggaagct

SEQ ID NO: 3397680 - DNA, 25 bp, Homo sapien
tggaatgtgccaaaaaattgacccc

SEQ ID NO: 3397681 - DNA, 25 bp, Homo sapien
tgctctgtgagtcccgtggaatgtg

SEQ ID NO: 3397682 - DNA, 25 bp, Homo sapien
gagtcccgtggaatgtgccaaaaaa

SEQ ID NO: 3397683 - DNA, 25 bp, Homo sapien
aaaaattgaccccagttgcagctca

SEQ ID NO: 3397684 - DNA, 25 bp, Homo sapien
tgcccctctggagaattggagctat

SEQ ID NO: 3397685 - DNA, 25 bp, Homo sapien
cccctctggagaattggagctattg

SEQ ID NO: 3397686 - DNA, 25 bp, Homo sapien
ccctctggagaattggagctattgt

SEQ ID NO: 3397687 - DNA, 25 bp, Homo sapien
ctgcccctctggagaattggagcta

SEQ ID NO: 3397688 - DNA, 25 bp, Homo sapien
gcaagaattgttcaagaaatgaacc

SEQ ID NO: 3397689 - DNA, 25 bp, Homo sapien
aatgaacccttttcaggagccttca

SEQ ID NO: 3397690 - DNA, 25 bp, Homo sapien
gaagccgaatgctcctgtgagtgcc

SEQ ID NO: 3397691 - DNA, 25 bp, Homo sapien
gaggagtgaacgtcatactcttggg

SEQ ID NO: 3397692 - DNA, 25 bp, Homo sapien
tcatccctggatgtcctctatgggt

SEQ ID NO: 3397693 - DNA, 25 bp, Homo sapien
ctggatgtcctctatgggtgacagc

SEQ ID NO: 3397694 - DNA, 25 bp, Homo sapien
cagaattgacagtgggctccttgta

SEQ ID NO: 3397695 - DNA, 25 bp, Homo sapien
agcagaattgacagtgggctccttg

SEQ ID NO: 3397696 - DNA, 25 bp, Homo sapien
gctcatctctttgaatctgcagtcc

SEQ ID NO: 3397697 - DNA, 25 bp, Homo sapien
ctaagcgtcagtagcctttgttctc

SEQ ID NO: 3397698 - DNA, 25 bp, Homo sapien
tgcttccattgctggccaggtggtt

SEQ ID NO: 3397699 - DNA, 25 bp, Homo sapien
gcttccattgctggccaggtggttc

SEQ ID NO: 3397700 - DNA, 25 bp, Homo sapien
gttctgtttggcctgagctggtaca

SEQ ID NO: 3397701 - DNA, 25 bp, Homo sapien
tgtttggcctgagctggtacatagt

SEQ ID NO: 3397702 - DNA, 25 bp, Homo sapien
cagcgtatcatggtcaagttcttca

SEQ ID NO: 3397703 - DNA, 25 bp, Homo sapien
acctgcagctccagcgtatcatggt

SEQ ID NO: 3397704 - DNA, 25 bp, Homo sapien
ctttgacctgcagctccagcgtatc

SEQ ID NO: 3397705 - DNA, 25 bp, Homo sapien
gcagctccagcgtatcatggtcaag

SEQ ID NO: 3397706 - DNA, 25 bp, Homo sapien
gaagaagcagtaacctcctgagcca

SEQ ID NO: 3397707 - DNA, 25 bp, Homo sapien
aagaagcagtaacctcctgagccat

SEQ ID NO: 3397708 - DNA, 25 bp, Homo sapien
ggaagaagcagtaacctcctgagcc

SEQ ID NO: 3397709 - DNA, 25 bp, Homo sapien
gggaagaagcagtaacctcctgagc

SEQ ID NO: 3397710 - DNA, 25 bp, Homo sapien
agggaggctggtgccttggctccac

SEQ ID NO: 3397711 - DNA, 25 bp, Homo sapien
cagggaggctggtgccttggctcca

SEQ ID NO: 3397712 - DNA, 25 bp, Homo sapien
ggaggctggtgccttggctccacac

SEQ ID NO: 3397713 - DNA, 25 bp, Homo sapien
tgcagggaggctggtgccttggctc

SEQ ID NO: 3397714 - DNA, 25 bp, Homo sapien
atcctccgaaaccagcccaacaaga

SEQ ID NO: 3397715 - DNA, 25 bp, Homo sapien
gataggtgttgtctcctggcaaaga

SEQ ID NO: 3397716 - DNA, 25 bp, Homo sapien
acatttaggataggtgttgtctcct

SEQ ID NO: 3397717 - DNA, 25 bp, Homo sapien
tacactgagcttaatcctccgaaac

SEQ ID NO: 3397718 - DNA, 25 bp, Homo sapien
agcataagagcaagtggtaacgcca

SEQ ID NO: 3397719 - DNA, 25 bp, Homo sapien
caaacctttaagtctctcagcataa

SEQ ID NO: 3397720 - DNA, 25 bp, Homo sapien
aacatagagatggtattgctcagca

SEQ ID NO: 3397721 - DNA, 25 bp, Homo sapien
tgctcagcacttagaaactgaatcc

SEQ ID NO: 3397722 - DNA, 25 bp, Homo sapien
aacactacgatctttatcaggctgg

SEQ ID NO: 3397723 - DNA, 25 bp, Homo sapien
taaagagcaattataactttgcagc

SEQ ID NO: 3397724 - DNA, 25 bp, Homo sapien
ggaataatcagattgatggtctcag

SEQ ID NO: 3397725 - DNA, 25 bp, Homo sapien
agtgcaatcttaaatcacagtaaag

SEQ ID NO: 3397726 - DNA, 25 bp, Homo sapien
gaagacccacaagtccacttatctg

SEQ ID NO: 3397727 - DNA, 25 bp, Homo sapien
taaatttctccccacataagaagac

SEQ ID NO: 3397728 - DNA, 25 bp, Homo sapien
ggaggtgagtggaccatgtaccatc

SEQ ID NO: 3397729 - DNA, 25 bp, Homo sapien
tgtaccatcctagagcttcttccat

SEQ ID NO: 3397730 - DNA, 25 bp, Homo sapien
taatagtaatcaaggcaattccagg

SEQ ID NO: 3397731 - DNA, 25 bp, Homo sapien
ggaccattccagcttatgctacaag

SEQ ID NO: 3397732 - DNA, 25 bp, Homo sapien
caattccaggatactcaatagctac

SEQ ID NO: 3397733 - DNA, 25 bp, Homo sapien
taggttgggtcgctatcattcaaat

SEQ ID NO: 3397734 - DNA, 25 bp, Homo sapien
ggctaattgctgtaatatcgcagca

SEQ ID NO: 3397735 - DNA, 25 bp, Homo sapien
tatgggtctcaaggattgaaaatgt

SEQ ID NO: 3397736 - DNA, 25 bp, Homo sapien
ggtgcctgctaagtgataatctctt

SEQ ID NO: 3397737 - DNA, 25 bp, Homo sapien
tattgctttagcttgaagctggcta

SEQ ID NO: 3397738 - DNA, 25 bp, Homo sapien
aggtgcgccgctggatatctcagcc

SEQ ID NO: 3397739 - DNA, 25 bp, Homo sapien
cgggaagtcaggtgcgccgctggat

SEQ ID NO: 3397740 - DNA, 25 bp, Homo sapien
gaagtcaggtgcgccgctggatatc

SEQ ID NO: 3397741 - DNA, 25 bp, Homo sapien
gtcaggtgcgccgctggatatctca

SEQ ID NO: 3397742 - DNA, 25 bp, Homo sapien
ctgatgtccagcatcaaggccccgc

SEQ ID NO: 3397743 - DNA, 25 bp, Homo sapien
gacgctagcggtgcctttaggtctc

SEQ ID NO: 3397744 - DNA, 25 bp, Homo sapien
ccgcctcccgcatggttggccacgc

SEQ ID NO: 3397745 - DNA, 25 bp, Homo sapien
ccccagacgctagcggtgcctttag

SEQ ID NO: 3397746 - DNA, 25 bp, Homo sapien
ttcaccagccctacgcttcggcggc

SEQ ID NO: 3397747 - DNA, 25 bp, Homo sapien
ctccaattagctccgcggcttacag

SEQ ID NO: 3397748 - DNA, 25 bp, Homo sapien
cactgcgtgctgtgaaaccatctcc

SEQ ID NO: 3397749 - DNA, 25 bp, Homo sapien
gggaagcccacaagataacgcagca

SEQ ID NO: 3397750 - DNA, 25 bp, Homo sapien
catgcattaggccaagtcggcggac

SEQ ID NO: 3397751 - DNA, 25 bp, Homo sapien
caacagtggcttttcaatctcggca

SEQ ID NO: 3397752 - DNA, 25 bp, Homo sapien
ggtaaaactcgactggcctcaatga

SEQ ID NO: 3397753 - DNA, 25 bp, Homo sapien
tttaagtcttccacgagtcatggcg

SEQ ID NO: 3397754 - DNA, 25 bp, Homo sapien
tagctcagaatatgaaggcaacgtc

SEQ ID NO: 3397755 - DNA, 25 bp, Homo sapien
taaggtagctcagaatatgaaggca

SEQ ID NO: 3397756 - DNA, 25 bp, Homo sapien
gaatatgaaggcaacgtctactaga

SEQ ID NO: 3397757 - DNA, 25 bp, Homo sapien
gaaggcaacgtctactagacctatt

SEQ ID NO: 3397758 - DNA, 25 bp, Homo sapien
gaccagaccgaatctctaggagctg

SEQ ID NO: 3397759 - DNA, 25 bp, Homo sapien
aaaggatctgcttgataaacaagat

SEQ ID NO: 3397760 - DNA, 25 bp, Homo sapien
ttaatattccatgattttctaaggc

SEQ ID NO: 3397761 - DNA, 25 bp, Homo sapien
gagcactcttcctagattatatcca

SEQ ID NO: 3397762 - DNA, 25 bp, Homo sapien
agtgatggcattagtatcttaatgg

SEQ ID NO: 3397763 - DNA, 25 bp, Homo sapien
agacagtgatggcattagtatctta

SEQ ID NO: 3397764 - DNA, 25 bp, Homo sapien
gtgatggcattagtatcttaatggg

SEQ ID NO: 3397765 - DNA, 25 bp, Homo sapien
gagacagtgatggcattagtatctt

SEQ ID NO: 3397766 - DNA, 25 bp, Homo sapien
tcctttttcagccatttcacaatgt

SEQ ID NO: 3397767 - DNA, 25 bp, Homo sapien
cttcctttttcagccatttcacaat

SEQ ID NO: 3397768 - DNA, 25 bp, Homo sapien
cctttttcagccatttcacaatgtt

SEQ ID NO: 3397769 - DNA, 25 bp, Homo sapien
tttttcagccatttcacaatgtttc

SEQ ID NO: 3397770 - DNA, 25 bp, Homo sapien
caggacattaggaaggtacctcctc

SEQ ID NO: 3397771 - DNA, 25 bp, Homo sapien
ggactgaagtatacggaggcttccc

SEQ ID NO: 3397772 - DNA, 25 bp, Homo sapien
aggactgaagtatacggaggcttcc

SEQ ID NO: 3397773 - DNA, 25 bp, Homo sapien
gactgaagtatacggaggcttccct

SEQ ID NO: 3397774 - DNA, 25 bp, Homo sapien
actgaagtatacggaggcttccctt

SEQ ID NO: 3397775 - DNA, 25 bp, Homo sapien
agcatcatcgtcctgttcctttgtc

SEQ ID NO: 3397776 - DNA, 25 bp, Homo sapien
tcctttgtccgatgggcagctgcca

SEQ ID NO: 3397777 - DNA, 25 bp, Homo sapien
cctgttcctttgtccgatgggcagc

SEQ ID NO: 3397778 - DNA, 25 bp, Homo sapien
tcgtcctgttcctttgtccgatggg

SEQ ID NO: 3397779 - DNA, 25 bp, Homo sapien
cagagcgagagtgcgggccccagga

SEQ ID NO: 3397780 - DNA, 25 bp, Homo sapien
ggcagtggcggaagaggagcgggcc

SEQ ID NO: 3397781 - DNA, 25 bp, Homo sapien
cttctcgtggtccatggcagtggcg

SEQ ID NO: 3397782 - DNA, 25 bp, Homo sapien
tggcggaagaggagcgggcccagag

SEQ ID NO: 3397783 - DNA, 25 bp, Homo sapien
tatcaattgcaaaattccttggatg

SEQ ID NO: 3397784 - DNA, 25 bp, Homo sapien
atctgccaatatccccaatatcaat

SEQ ID NO: 3397785 - DNA, 25 bp, Homo sapien
caaaattccttggatggtggcaagg

SEQ ID NO: 3397786 - DNA, 25 bp, Homo sapien
gccaatatccccaatatcaattgca

SEQ ID NO: 3397787 - DNA, 25 bp, Homo sapien
gagcaaacaggggaaaagaggtaca

SEQ ID NO: 3397788 - DNA, 25 bp, Homo sapien
tagcttctggatttaggagcaggtt

SEQ ID NO: 3397789 - DNA, 25 bp, Homo sapien
ttaggagcaggtttggagcaaacag

SEQ ID NO: 3397790 - DNA, 25 bp, Homo sapien
tggagcaaacaggggaaaagaggta

SEQ ID NO: 3397791 - DNA, 25 bp, Homo sapien
tcatcacttgcatctaaggtaacca

SEQ ID NO: 3397792 - DNA, 25 bp, Homo sapien
ttttggccaagattccatcatcact

SEQ ID NO: 3397793 - DNA, 25 bp, Homo sapien
taaccacagctttgtcagtctcaat

SEQ ID NO: 3397794 - DNA, 25 bp, Homo sapien
cagtctcaatttcacataatgcatc

SEQ ID NO: 3397795 - DNA, 25 bp, Homo sapien
tgtgttccttcttgacagggatgga

SEQ ID NO: 3397796 - DNA, 25 bp, Homo sapien
cttctactatcaaaccaattagtga

SEQ ID NO: 3397797 - DNA, 25 bp, Homo sapien
tagtgtcccgggtatgtgttccttc

SEQ ID NO: 3397798 - DNA, 25 bp, Homo sapien
tggtggaggacctacgtctttggga

SEQ ID NO: 3397799 - DNA, 25 bp, Homo sapien
tttttccagaatattgcgggcagct

SEQ ID NO: 3397800 - DNA, 25 bp, Homo sapien
tgccctggctagcatccagtgagtg

SEQ ID NO: 3397801 - DNA, 25 bp, Homo sapien
gcgggcagctggacttaaacggaac

SEQ ID NO: 3397802 - DNA, 25 bp, Homo sapien
tctttagtgaatatcccccgagggc

SEQ ID NO: 3397803 - DNA, 25 bp, Homo sapien
gtatggagcatgtcctcaccgtgtc

SEQ ID NO: 3397804 - DNA, 25 bp, Homo sapien
aatacagtgggctggaggcatttcc

SEQ ID NO: 3397805 - DNA, 25 bp, Homo sapien
gcttctaattgtggcctcgacactg

SEQ ID NO: 3397806 - DNA, 25 bp, Homo sapien
tcaagaacgtgtgttggctgggcac

SEQ ID NO: 3397807 - DNA, 25 bp, Homo sapien
cttaattattgtttagtaacagcca

SEQ ID NO: 3397808 - DNA, 25 bp, Homo sapien
gattttatacttacatacctatgaa

SEQ ID NO: 3397809 - DNA, 25 bp, Homo sapien
tttctgcacattaaataatcagact

SEQ ID NO: 3397810 - DNA, 25 bp, Homo sapien
tgatttagttttttgtgaggcagaa

SEQ ID NO: 3397811 - DNA, 25 bp, Homo sapien
ttggtctggactcggtaatcttgcc

SEQ ID NO: 3397812 - DNA, 25 bp, Homo sapien
caggagttgatactggtgggatcac

SEQ ID NO: 3397813 - DNA, 25 bp, Homo sapien
tgcattgggttgtccaggagttgat

SEQ ID NO: 3397814 - DNA, 25 bp, Homo sapien
tcacaggccggggataagatggtcc

SEQ ID NO: 3397815 - DNA, 25 bp, Homo sapien
tggcggggatttcagtgaatgtgcc

SEQ ID NO: 3397816 - DNA, 25 bp, Homo sapien
ctggcggggatttcagtgaatgtgc

SEQ ID NO: 3397817 - DNA, 25 bp, Homo sapien
cagttaatctcttggcaataactct

SEQ ID NO: 3397818 - DNA, 25 bp, Homo sapien
tgaccagatcttgcctaacttttaa

SEQ ID NO: 3397819 - DNA, 25 bp, Homo sapien
acagtcagcagtagcatatgcatga

SEQ ID NO: 3397820 - DNA, 25 bp, Homo sapien
gaggtacagtacttttagattcagt

SEQ ID NO: 3397821 - DNA, 25 bp, Homo sapien
atccaactatcccattaaatgtgag

SEQ ID NO: 3397822 - DNA, 25 bp, Homo sapien
tggtagatttaaatccaactatccc

SEQ ID NO: 3397823 - DNA, 25 bp, Homo sapien
cccattaaatgtgagcggtctaaac

SEQ ID NO: 3397824 - DNA, 25 bp, Homo sapien
tgtgagcggtctaaacatcttaaga

SEQ ID NO: 3397825 - DNA, 25 bp, Homo sapien
tatccattagggtgactactatcaa

SEQ ID NO: 3397826 - DNA, 25 bp, Homo sapien
gaacggcagcagacattctaagaca

SEQ ID NO: 3397827 - DNA, 25 bp, Homo sapien
gctctatgagccaggctggaattaa

SEQ ID NO: 3397828 - DNA, 25 bp, Homo sapien
gcaaccagacaggtggaaaacatca

SEQ ID NO: 3397829 - DNA, 25 bp, Homo sapien
tcctacgagctgatcataactaaag

SEQ ID NO: 3397830 - DNA, 25 bp, Homo sapien
tctagtcagtggtatgtggcaaaaa

SEQ ID NO: 3397831 - DNA, 25 bp, Homo sapien
tactgtcaaactgtcacgataactg

SEQ ID NO: 3397832 - DNA, 25 bp, Homo sapien
ggcatcctggagactacagaaaggg

SEQ ID NO: 3397833 - DNA, 25 bp, Homo sapien
ttctctgtatgctttataacatact

SEQ ID NO: 3397834 - DNA, 25 bp, Homo sapien
tcttttcaaatacccttattctctg

SEQ ID NO: 3397835 - DNA, 25 bp, Homo sapien
tgtatgctttataacatactgatta

SEQ ID NO: 3397836 - DNA, 25 bp, Homo sapien
gctttataacatactgattatacta

SEQ ID NO: 3397837 - DNA, 25 bp, Homo sapien
tgaaggacccattacaagcataatc

SEQ ID NO: 3397838 - DNA, 25 bp, Homo sapien
cttagatatcatacacaagaacctg

SEQ ID NO: 3397839 - DNA, 25 bp, Homo sapien
aaggacccattacaagcataatcag

SEQ ID NO: 3397840 - DNA, 25 bp, Homo sapien
ttaaattgcttagatatcatacaca

SEQ ID NO: 3397841 - DNA, 25 bp, Homo sapien
ttaagggtaacagctgctgccttga

SEQ ID NO: 3397842 - DNA, 25 bp, Homo sapien
tttaagggtaacagctgctgccttg

SEQ ID NO: 3397843 - DNA, 25 bp, Homo sapien
tcctggatacctttagcagcagcat

SEQ ID NO: 3397844 - DNA, 25 bp, Homo sapien
gattggagtaagtaagcctttatct

SEQ ID NO: 3397845 - DNA, 25 bp, Homo sapien
catcccagcttacattaacatctgg

SEQ ID NO: 3397846 - DNA, 25 bp, Homo sapien
gcctttatctgttgccacagccact

SEQ ID NO: 3397847 - DNA, 25 bp, Homo sapien
ctatacatacaacaggtccttggca

SEQ ID NO: 3397848 - DNA, 25 bp, Homo sapien
gaggctgtcaaagctgccctactgc

SEQ ID NO: 3397849 - DNA, 25 bp, Homo sapien
tacacattggagttacaaaaactgc

SEQ ID NO: 3397850 - DNA, 25 bp, Homo sapien
catttatgtactgtcggctccccaa

SEQ ID NO: 3397851 - DNA, 25 bp, Homo sapien
aaaagccagccaagtgacgatcaga

SEQ ID NO: 3397852 - DNA, 25 bp, Homo sapien
gaataccaacttgaacttggctggg

SEQ ID NO: 3397853 - DNA, 25 bp, Homo sapien
tacagagggtcaagaagtaaatgcg

SEQ ID NO: 3397854 - DNA, 25 bp, Homo sapien
gaacatcagacagtagggaacacag

SEQ ID NO: 3397855 - DNA, 25 bp, Homo sapien
tctcacttgtacttggaattaacca

SEQ ID NO: 3397856 - DNA, 25 bp, Homo sapien
gattgcacgcacacatactaaaaac

SEQ ID NO: 3397857 - DNA, 25 bp, Homo sapien
cattactgtaacgtactgccaacag

SEQ ID NO: 3397858 - DNA, 25 bp, Homo sapien
tcctgtcagtgaactctagtaagtc

SEQ ID NO: 3397859 - DNA, 25 bp, Homo sapien
gaatgagctagtccaatttacactg

SEQ ID NO: 3397860 - DNA, 25 bp, Homo sapien
tttcagaagtggaattatagtgccc

SEQ ID NO: 3397861 - DNA, 25 bp, Homo sapien
tttgttcctaaagactgcacctgcc

SEQ ID NO: 3397862 - DNA, 25 bp, Homo sapien
tatagtgccctagagaatagacttc

SEQ ID NO: 3397863 - DNA, 25 bp, Homo sapien
tcttcaggcaacaattttccatctc

SEQ ID NO: 3397864 - DNA, 25 bp, Homo sapien
aaaaatcaccgagagagtcccaaag

SEQ ID NO: 3397865 - DNA, 25 bp, Homo sapien
tacccaaacggctgatgagtgaaaa

SEQ ID NO: 3397866 - DNA, 25 bp, Homo sapien
taaatggacaccagattgcagtggg

SEQ ID NO: 3397867 - DNA, 25 bp, Homo sapien
gctgctaaagcttctaacttaggaa

SEQ ID NO: 3397868 - DNA, 25 bp, Homo sapien
gagtcatgtcccacataacgaagga

SEQ ID NO: 3397869 - DNA, 25 bp, Homo sapien
tataggtttgcagtctaggagcaac

SEQ ID NO: 3397870 - DNA, 25 bp, Homo sapien
ctaaggtgtgtagcagcatgtacca

SEQ ID NO: 3397871 - DNA, 25 bp, Homo sapien
taatggagctcaggaatttctgctg

SEQ ID NO: 3397872 - DNA, 25 bp, Homo sapien
tgtgactgttatgagctggcgctgc

SEQ ID NO: 3397873 - DNA, 25 bp, Homo sapien
ggcctgaggagggttaatcactgca

SEQ ID NO: 3397874 - DNA, 25 bp, Homo sapien
caaccgccaaaatgcaggcctgagg

SEQ ID NO: 3397875 - DNA, 25 bp, Homo sapien
tgagcttcagcacaggtcggaacct

SEQ ID NO: 3397876 - DNA, 25 bp, Homo sapien
ggcaagtcggataggattctctagg

SEQ ID NO: 3397877 - DNA, 25 bp, Homo sapien
taggcaagtcggataggattctcta

SEQ ID NO: 3397878 - DNA, 25 bp, Homo sapien
ctaggcaagtcggataggattctct

SEQ ID NO: 3397879 - DNA, 25 bp, Homo sapien
aggcaagtcggataggattctctag

SEQ ID NO: 3397880 - DNA, 25 bp, Homo sapien
taagctgaacaccaacttcttatct

SEQ ID NO: 3397881 - DNA, 25 bp, Homo sapien
acatatgtttcttggtaacaactac

SEQ ID NO: 3397882 - DNA, 25 bp, Homo sapien
tactgaatcaactaagctgaacacc

SEQ ID NO: 3397883 - DNA, 25 bp, Homo sapien
ggtaacaactactgaatcaactaag

SEQ ID NO: 3397884 - DNA, 25 bp, Homo sapien
tgctaagttaatggccatctctttg

SEQ ID NO: 3397885 - DNA, 25 bp, Homo sapien
ctagagcagtgcttgtaaaagtgag

SEQ ID NO: 3397886 - DNA, 25 bp, Homo sapien
acttctaccttcaacataattatgg

SEQ ID NO: 3397887 - DNA, 25 bp, Homo sapien
taaaagtgaggtcccactgctaagt

SEQ ID NO: 3397888 - DNA, 25 bp, Homo sapien
ctcacattttactgcacaatacaaa

SEQ ID NO: 3397889 - DNA, 25 bp, Homo sapien
tctcacattttactgcacaatacaa

SEQ ID NO: 3397890 - DNA, 25 bp, Homo sapien
tttcatattttaaaaagcatggcat

SEQ ID NO: 3397891 - DNA, 25 bp, Homo sapien
tgggtttcatattttaaaaagcatg

SEQ ID NO: 3397892 - DNA, 25 bp, Homo sapien
aggagtggggccctgggtttcatat

SEQ ID NO: 3397893 - DNA, 25 bp, Homo sapien
cttagactcatttccaggagtgggg

SEQ ID NO: 3397894 - DNA, 25 bp, Homo sapien
gctctccaagatcgctgtgcttgtt

SEQ ID NO: 3397895 - DNA, 25 bp, Homo sapien
cgctgtgcttgttgcatattctggt

SEQ ID NO: 3397896 - DNA, 25 bp, Homo sapien
ctctccaggacacttagagccatga

SEQ ID NO: 3397897 - DNA, 25 bp, Homo sapien
ccaagatcgctgtgcttgttgcata

SEQ ID NO: 3397898 - DNA, 25 bp, Homo sapien
tagttcaggcttatcaccaattcct

SEQ ID NO: 3397899 - DNA, 25 bp, Homo sapien
ctagttcaggcttatcaccaattcc

SEQ ID NO: 3397900 - DNA, 25 bp, Homo sapien
ctgttactgccaaagcaaaagtcca

SEQ ID NO: 3397901 - DNA, 25 bp, Homo sapien
gcagcatcccttggtcactatccag

SEQ ID NO: 3397902 - DNA, 25 bp, Homo sapien
tcactatccagccatctgttactgc

SEQ ID NO: 3397903 - DNA, 25 bp, Homo sapien
tgttactgccaaagcaaaagtccat

SEQ ID NO: 3397904 - DNA, 25 bp, Homo sapien
cattttcataccaagcctcatcttc

SEQ ID NO: 3397905 - DNA, 25 bp, Homo sapien
acgctttcacaagctgttcattttc

SEQ ID NO: 3397906 - DNA, 25 bp, Homo sapien
gttcattttcataccaagcctcatc

SEQ ID NO: 3397907 - DNA, 25 bp, Homo sapien
ttacgctttcacaagctgttcattt

SEQ ID NO: 3397908 - DNA, 25 bp, Homo sapien
gacacaatgccctagatggttggat

SEQ ID NO: 3397909 - DNA, 25 bp, Homo sapien
ggctttccaggccactgaattcaaa

SEQ ID NO: 3397910 - DNA, 25 bp, Homo sapien
tactgacacagtagtgtacttcccg

SEQ ID NO: 3397911 - DNA, 25 bp, Homo sapien
tgttttcaacacacagggacctgga

SEQ ID NO: 3397912 - DNA, 25 bp, Homo sapien
ggaccatctaactggattccactgg

SEQ ID NO: 3397913 - DNA, 25 bp, Homo sapien
tagctggaacgaaagcattaggacc

SEQ ID NO: 3397914 - DNA, 25 bp, Homo sapien
tctgtgaaaccatgccgaagtcttt

SEQ ID NO: 3397915 - DNA, 25 bp, Homo sapien
tcaggtaaggctattatggacccat

SEQ ID NO: 3397916 - DNA, 25 bp, Homo sapien
ttgaggttcactccaaaaactgagc

SEQ ID NO: 3397917 - DNA, 25 bp, Homo sapien
tgagtgtgtaaagtgcagcgattcc

SEQ ID NO: 3397918 - DNA, 25 bp, Homo sapien
ccagctatgccccactttgaacaaa

SEQ ID NO: 3397919 - DNA, 25 bp, Homo sapien
gaagaatcttctgttagccaaggat

SEQ ID NO: 3397920 - DNA, 25 bp, Homo sapien
atagaaacaaagctagtaaacaaga

SEQ ID NO: 3397921 - DNA, 25 bp, Homo sapien
aatggaaagttcccaaagtgtagct

SEQ ID NO: 3397922 - DNA, 25 bp, Homo sapien
caataaatggaaagttcccaaagtg

SEQ ID NO: 3397923 - DNA, 25 bp, Homo sapien
acaaagctagtaaacaagaagacac

SEQ ID NO: 3397924 - DNA, 25 bp, Homo sapien
taaacagactcttgatgggtgattc

SEQ ID NO: 3397925 - DNA, 25 bp, Homo sapien
gggccacgatgtacataaacagact

SEQ ID NO: 3397926 - DNA, 25 bp, Homo sapien
tctatgcagatctcggtaggtcggg

SEQ ID NO: 3397927 - DNA, 25 bp, Homo sapien
gtttccaaaacacagtcttatttca

SEQ ID NO: 3397928 - DNA, 25 bp, Homo sapien
gcactgactcattgcctccttctta

SEQ ID NO: 3397929 - DNA, 25 bp, Homo sapien
ctttttctggggatggtaagcactg

SEQ ID NO: 3397930 - DNA, 25 bp, Homo sapien
cctccaaatacccatatgccaatct

SEQ ID NO: 3397931 - DNA, 25 bp, Homo sapien
acatgtacagactttgccccaaaga

SEQ ID NO: 3397932 - DNA, 25 bp, Homo sapien
tggcagggacacagccaaagcatat

SEQ ID NO: 3397933 - DNA, 25 bp, Homo sapien
caagttgagattttggcagggacac

SEQ ID NO: 3397934 - DNA, 25 bp, Homo sapien
gcctgagaatcgtggcggaaggtga

SEQ ID NO: 3397935 - DNA, 25 bp, Homo sapien
gggaggcctgagaatcgtggcggaa

SEQ ID NO: 3397936 - DNA, 25 bp, Homo sapien
gaaacacttctgcagacatctgttc

SEQ ID NO: 3397937 - DNA, 25 bp, Homo sapien
tcacttttaaagcaaggtgcctcac

SEQ ID NO: 3397938 - DNA, 25 bp, Homo sapien
agtaattggcatgttaccaagtgca

SEQ ID NO: 3397939 - DNA, 25 bp, Homo sapien
cagcttcattatttcactgaggagc

SEQ ID NO: 3397940 - DNA, 25 bp, Homo sapien
gaaccttccatttccttgcccatga

SEQ ID NO: 3397941 - DNA, 25 bp, Homo sapien
tatctccaaagtacattatgagccc

SEQ ID NO: 3397942 - DNA, 25 bp, Homo sapien
tttagaccatggctctaccactagc

SEQ ID NO: 3397943 - DNA, 25 bp, Homo sapien
gagtccaagcctcatcatccattgc

SEQ ID NO: 3397944 - DNA, 25 bp, Homo sapien
gagccttagttaccaaagagtagga

SEQ ID NO: 3397945 - DNA, 25 bp, Homo sapien
catgcagagccttagttaccaaaga

SEQ ID NO: 3397946 - DNA, 25 bp, Homo sapien
ctcaccatgcagagccttagttacc

SEQ ID NO: 3397947 - DNA, 25 bp, Homo sapien
gcagagccttagttaccaaagagta

SEQ ID NO: 3397948 - DNA, 25 bp, Homo sapien
agttggggtgtagatctctcattga

SEQ ID NO: 3397949 - DNA, 25 bp, Homo sapien
ggtcaagttggggtgtagatctctc

SEQ ID NO: 3397950 - DNA, 25 bp, Homo sapien
tggggtgtagatctctcattgagag

SEQ ID NO: 3397951 - DNA, 25 bp, Homo sapien
tcaagttggggtgtagatctctcat

SEQ ID NO: 3397952 - DNA, 25 bp, Homo sapien
tgagcacactcaataagccaacttc

SEQ ID NO: 3397953 - DNA, 25 bp, Homo sapien
tgtttccacactatagctaggatcc

SEQ ID NO: 3397954 - DNA, 25 bp, Homo sapien
gaggtccctgcatgacttgctgatg

SEQ ID NO: 3397955 - DNA, 25 bp, Homo sapien
gccaatgctttggactgactctgtc

SEQ ID NO: 3397956 - DNA, 25 bp, Homo sapien
tgggcttggcagttccaagctttct

SEQ ID NO: 3397957 - DNA, 25 bp, Homo sapien
ttgggcttggcagttccaagctttc

SEQ ID NO: 3397958 - DNA, 25 bp, Homo sapien
cattcacgagggctgtacactcatg

SEQ ID NO: 3397959 - DNA, 25 bp, Homo sapien
gattggactgcatgagcctcagagc

SEQ ID NO: 3397960 - DNA, 25 bp, Homo sapien
tgaggagccccatgttgaaagaaat

SEQ ID NO: 3397961 - DNA, 25 bp, Homo sapien
gagacaatgctaaggtgcaaacagc

SEQ ID NO: 3397962 - DNA, 25 bp, Homo sapien
aatggcattcatagctgtggaacac

SEQ ID NO: 3397963 - DNA, 25 bp, Homo sapien
tcctggtttaggccctccattggca

SEQ ID NO: 3397964 - DNA, 25 bp, Homo sapien
gctagttcccctgaggtgatcctgg

SEQ ID NO: 3397965 - DNA, 25 bp, Homo sapien
tgggaatcaggtcctatgctagttc

SEQ ID NO: 3397966 - DNA, 25 bp, Homo sapien
aatcagggactcttggtctcttcca

SEQ ID NO: 3397967 - DNA, 25 bp, Homo sapien
caatcagggactcttggtctcttcc

SEQ ID NO: 3397968 - DNA, 25 bp, Homo sapien
acaatcagggactcttggtctcttc

SEQ ID NO: 3397969 - DNA, 25 bp, Homo sapien
ctcttcctttgacactccaccctcc

SEQ ID NO: 3397970 - DNA, 25 bp, Homo sapien
ggccaaagaagagcccagccaggtc

SEQ ID NO: 3397971 - DNA, 25 bp, Homo sapien
tttgacactccaccctccaaatcgc

SEQ ID NO: 3397972 - DNA, 25 bp, Homo sapien
gacactccaccctccaaatcgcaca

SEQ ID NO: 3397973 - DNA, 25 bp, Homo sapien
ggaatgtgagcagccaggatgggag

SEQ ID NO: 3397974 - DNA, 25 bp, Homo sapien
cacataggaatgtgagcagccagga

SEQ ID NO: 3397975 - DNA, 25 bp, Homo sapien
gatgggagggaggtgaaggatgaac

SEQ ID NO: 3397976 - DNA, 25 bp, Homo sapien
agggaggtgaaggatgaacggggag

SEQ ID NO: 3397977 - DNA, 25 bp, Homo sapien
cagaaggttcctccctatctccgtg

SEQ ID NO: 3397978 - DNA, 25 bp, Homo sapien
cattggagaggtctcagaaggttcc

SEQ ID NO: 3397979 - DNA, 25 bp, Homo sapien
ctatctccgtggtaacccgacactg

SEQ ID NO: 3397980 - DNA, 25 bp, Homo sapien
atctccgtggtaacccgacactgtg

SEQ ID NO: 3397981 - DNA, 25 bp, Homo sapien
taaacattcggcatgcgtgagacac

SEQ ID NO: 3397982 - DNA, 25 bp, Homo sapien
gtgagacacgctgaagtccgccagt

SEQ ID NO: 3397983 - DNA, 25 bp, Homo sapien
ccagttgctatggataccaagtggg

SEQ ID NO: 3397984 - DNA, 25 bp, Homo sapien
cagtgcaaaggtggttcctcttctc

SEQ ID NO: 3397985 - DNA, 25 bp, Homo sapien
ttgggccaacctcctatgcagtcgc

SEQ ID NO: 3397986 - DNA, 25 bp, Homo sapien
gtgtgttggcttgggccaacctcct

SEQ ID NO: 3397987 - DNA, 25 bp, Homo sapien
ggcttgggccaacctcctatgcagt

SEQ ID NO: 3397988 - DNA, 25 bp, Homo sapien
ttggcttgggccaacctcctatgca

SEQ ID NO: 3397989 - DNA, 25 bp, Homo sapien
tagctcttgtaccaaacttggccag

SEQ ID NO: 3397990 - DNA, 25 bp, Homo sapien
tcccattgttcccagactcttagct

SEQ ID NO: 3397991 - DNA, 25 bp, Homo sapien
caatctggatatccctccacttgct

SEQ ID NO: 3397992 - DNA, 25 bp, Homo sapien
cttgcttagatttccacagcagctg

SEQ ID NO: 3397993 - DNA, 25 bp, Homo sapien
aaaagtacttcctttgtatccacag

SEQ ID NO: 3397994 - DNA, 25 bp, Homo sapien
tcaaaagtacttcctttgtatccac

SEQ ID NO: 3397995 - DNA, 25 bp, Homo sapien
agtacttcctttgtatccacagtga

SEQ ID NO: 3397996 - DNA, 25 bp, Homo sapien
cttcctttgtatccacagtgacaca

SEQ ID NO: 3397997 - DNA, 25 bp, Homo sapien
gtggccaattagtgaagtgacaggg

SEQ ID NO: 3397998 - DNA, 25 bp, Homo sapien
acaactggtctagaatggccttggc

SEQ ID NO: 3397999 - DNA, 25 bp, Homo sapien
gaatgtggctctcttccgtgtgcct

SEQ ID NO: 3398000 - DNA, 25 bp, Homo sapien
tagcctgggcatggtctcatgatga

SEQ ID NO: 3398001 - DNA, 25 bp, Homo sapien
gttgggcactttacacactcattca

SEQ ID NO: 3398002 - DNA, 25 bp, Homo sapien
ttgggcactttacacactcattcaa

SEQ ID NO: 3398003 - DNA, 25 bp, Homo sapien
gaagccagtgtaccaccacatggcc

SEQ ID NO: 3398004 - DNA, 25 bp, Homo sapien
gtgtaccaccacatggcctgtgctc

SEQ ID NO: 3398005 - DNA, 25 bp, Homo sapien
ttggaagccagtgtaccaccacatg

SEQ ID NO: 3398006 - DNA, 25 bp, Homo sapien
gccagtgtaccaccacatggcctgt

SEQ ID NO: 3398007 - DNA, 25 bp, Homo sapien
tcaaccttactgctggacaggcccc

SEQ ID NO: 3398008 - DNA, 25 bp, Homo sapien
cagtattcagcccagcatgcatagc

SEQ ID NO: 3398009 - DNA, 25 bp, Homo sapien
tgcctcaaccttactgctggacagg

SEQ ID NO: 3398010 - DNA, 25 bp, Homo sapien
gtattcagcccagcatgcatagcta

SEQ ID NO: 3398011 - DNA, 25 bp, Homo sapien
ctgttgccctttgattggctttcta

SEQ ID NO: 3398012 - DNA, 25 bp, Homo sapien
cacttaggaaagtatgaagctccct

SEQ ID NO: 3398013 - DNA, 25 bp, Homo sapien
gaaaggcccacttaggaaagtatga

SEQ ID NO: 3398014 - DNA, 25 bp, Homo sapien
tcaagtggtctcaagtagaaaggcc

SEQ ID NO: 3398015 - DNA, 25 bp, Homo sapien
agtttgagtccaccagacttccaag

SEQ ID NO: 3398016 - DNA, 25 bp, Homo sapien
gttccagctgttaataccatgacca

SEQ ID NO: 3398017 - DNA, 25 bp, Homo sapien
agctgttaataccatgaccaagaag

SEQ ID NO: 3398018 - DNA, 25 bp, Homo sapien
accaagaagcagtggagttgtgagc

SEQ ID NO: 3398019 - DNA, 25 bp, Homo sapien
caagaagcagtggagttgtgagctc

SEQ ID NO: 3398020 - DNA, 25 bp, Homo sapien
tgtgctgatcatcttgataggactg

SEQ ID NO: 3398021 - DNA, 25 bp, Homo sapien
gatcatcttgataggactgccattt

SEQ ID NO: 3398022 - DNA, 25 bp, Homo sapien
tcttgataggactgccatttaccca

SEQ ID NO: 3398023 - DNA, 25 bp, Homo sapien
gctgatcatcttgataggactgcca

SEQ ID NO: 3398024 - DNA, 25 bp, Homo sapien
tctccttctcatgaccatcaggtaa

SEQ ID NO: 3398025 - DNA, 25 bp, Homo sapien
ctctccttctcatgaccatcaggta

SEQ ID NO: 3398026 - DNA, 25 bp, Homo sapien
agtggatagcagcccggaatggacc

SEQ ID NO: 3398027 - DNA, 25 bp, Homo sapien
agcagcccggaatggaccctcactg

SEQ ID NO: 3398028 - DNA, 25 bp, Homo sapien
tggatagcagcccggaatggaccct

SEQ ID NO: 3398029 - DNA, 25 bp, Homo sapien
gatagcagcccggaatggaccctca

SEQ ID NO: 3398030 - DNA, 25 bp, Homo sapien
tgtctgcctgaacatgcctcacagt

SEQ ID NO: 3398031 - DNA, 25 bp, Homo sapien
tcctgactgggcttagcatcaaatc

SEQ ID NO: 3398032 - DNA, 25 bp, Homo sapien
aaattctgggctctaacgtacaggc

SEQ ID NO: 3398033 - DNA, 25 bp, Homo sapien
gttgtatgtcaatccaaatgagtgg

SEQ ID NO: 3398034 - DNA, 25 bp, Homo sapien
tctgctgaggctgtaaataatcggg

SEQ ID NO: 3398035 - DNA, 25 bp, Homo sapien
tgaaaacagtgacctaagacggagg

SEQ ID NO: 3398036 - DNA, 25 bp, Homo sapien
ctgtgactaagcagcccgcagaggt

SEQ ID NO: 3398037 - DNA, 25 bp, Homo sapien
ttaagaagtagcagccctcccgggc

SEQ ID NO: 3398038 - DNA, 25 bp, Homo sapien
gctgcgtgccaccaaaacttgtcca

SEQ ID NO: 3398039 - DNA, 25 bp, Homo sapien
aggcagagtccccaggctgcgtgcc

SEQ ID NO: 3398040 - DNA, 25 bp, Homo sapien
atctgcgccaggctcagcggcacga

SEQ ID NO: 3398041 - DNA, 25 bp, Homo sapien
gctcagcggcacgaggcagagtccc

SEQ ID NO: 3398042 - DNA, 25 bp, Homo sapien
ccccgcacccatcttgctgcccagg

SEQ ID NO: 3398043 - DNA, 25 bp, Homo sapien
agggccgactcagccggaggggctg

SEQ ID NO: 3398044 - DNA, 25 bp, Homo sapien
ctgccgccgggtccgcgctgagcac

SEQ ID NO: 3398045 - DNA, 25 bp, Homo sapien
ctgagcaccccgcacccatcttgct

SEQ ID NO: 3398046 - DNA, 25 bp, Homo sapien
ctgtttggatgagatattggagccc

SEQ ID NO: 3398047 - DNA, 25 bp, Homo sapien
gtttggatgagatattggagcccta

SEQ ID NO: 3398048 - DNA, 25 bp, Homo sapien
tggatgagatattggagccctagct

SEQ ID NO: 3398049 - DNA, 25 bp, Homo sapien
tgagatattggagccctagctccag

SEQ ID NO: 3398050 - DNA, 25 bp, Homo sapien
agactgcgggtctctgggagaacct

SEQ ID NO: 3398051 - DNA, 25 bp, Homo sapien
caagggttaggacagtgccaaatat

SEQ ID NO: 3398052 - DNA, 25 bp, Homo sapien
tctctgggagaacctcaagggttag

SEQ ID NO: 3398053 - DNA, 25 bp, Homo sapien
tgtacttcctctaaatgatgctgcg

SEQ ID NO: 3398054 - DNA, 25 bp, Homo sapien
ggtgcctggtagcatctgccacctg

SEQ ID NO: 3398055 - DNA, 25 bp, Homo sapien
ggtttcttgctgtgcaaaccccaga

SEQ ID NO: 3398056 - DNA, 25 bp, Homo sapien
caaaggaaattgagtcatcggtttc

SEQ ID NO: 3398057 - DNA, 25 bp, Homo sapien
cctttgaaaactacacggtgcctgg

SEQ ID NO: 3398058 - DNA, 25 bp, Homo sapien
ttatcttggtacgtcacccagtggg

SEQ ID NO: 3398059 - DNA, 25 bp, Homo sapien
cttataggcatacctgcaatgtgca

SEQ ID NO: 3398060 - DNA, 25 bp, Homo sapien
tatgtccacatccagcaaacaagaa

SEQ ID NO: 3398061 - DNA, 25 bp, Homo sapien
gatccttcaggcatgtacttatagg

SEQ ID NO: 3398062 - DNA, 25 bp, Homo sapien
accttgatctttgatggccttggag

SEQ ID NO: 3398063 - DNA, 25 bp, Homo sapien
tggtaactggtgattgcaaggattt

SEQ ID NO: 3398064 - DNA, 25 bp, Homo sapien
tgtattgtgagattgcagtaaccat

SEQ ID NO: 3398065 - DNA, 25 bp, Homo sapien
cattgtattgtgagattgcagtaac

SEQ ID NO: 3398066 - DNA, 25 bp, Homo sapien
caaggatttaccctcattgtattgt

SEQ ID NO: 3398067 - DNA, 25 bp, Homo sapien
ctctgaacgcttgcaaggctctcct

SEQ ID NO: 3398068 - DNA, 25 bp, Homo sapien
tgaacgcttgcaaggctctcctgac

SEQ ID NO: 3398069 - DNA, 25 bp, Homo sapien
aagccctctgaacgcttgcaaggct

SEQ ID NO: 3398070 - DNA, 25 bp, Homo sapien
gcgctgcccagcagagtgcaactgt

SEQ ID NO: 3398071 - DNA, 25 bp, Homo sapien
ccttgactttaggagggtacagaca

SEQ ID NO: 3398072 - DNA, 25 bp, Homo sapien
ccaggaagtagccatgagaccaaag

SEQ ID NO: 3398073 - DNA, 25 bp, Homo sapien
ggatatttgttcttcccaggacaga

SEQ ID NO: 3398074 - DNA, 25 bp, Homo sapien
gattcacagggtgcacaatgccagt

SEQ ID NO: 3398075 - DNA, 25 bp, Homo sapien
tgccttttttccgtggagcctggag

SEQ ID NO: 3398076 - DNA, 25 bp, Homo sapien
tggcacttagaaatgcaaggcaccc

SEQ ID NO: 3398077 - DNA, 25 bp, Homo sapien
ccctgggttgctttcaactgagcta

SEQ ID NO: 3398078 - DNA, 25 bp, Homo sapien
actgagctattcatcacttggcact

SEQ ID NO: 3398079 - DNA, 25 bp, Homo sapien
tcagtagttcaacctagttaggacc

SEQ ID NO: 3398080 - DNA, 25 bp, Homo sapien
tgccactcactttaggtgacacagg

SEQ ID NO: 3398081 - DNA, 25 bp, Homo sapien
ccttgatgggatgacaatgcgaacc

SEQ ID NO: 3398082 - DNA, 25 bp, Homo sapien
cctataaagctggtctgtagtgcca

SEQ ID NO: 3398083 - DNA, 25 bp, Homo sapien
ctttagcacgctcattactataggg

SEQ ID NO: 3398084 - DNA, 25 bp, Homo sapien
ggagacttcccgtggtagaaatgcc

SEQ ID NO: 3398085 - DNA, 25 bp, Homo sapien
cgtggtagaaatgccaccaggcctt

SEQ ID NO: 3398086 - DNA, 25 bp, Homo sapien
ttgaggccacttttggatttggaga

SEQ ID NO: 3398087 - DNA, 25 bp, Homo sapien
cattgatgtgattaaattcccagga

SEQ ID NO: 3398088 - DNA, 25 bp, Homo sapien
actaaatggccgctatcatagctta

SEQ ID NO: 3398089 - DNA, 25 bp, Homo sapien
tgtatgtgcatgtgatcagccaaga

SEQ ID NO: 3398090 - DNA, 25 bp, Homo sapien
aacctttagccttcctagatgtgaa

SEQ ID NO: 3398091 - DNA, 25 bp, Homo sapien
agaaatagaaatgttagattctttt

SEQ ID NO: 3398092 - DNA, 25 bp, Homo sapien
aaatagaaatgttagattcttttgc

SEQ ID NO: 3398093 - DNA, 25 bp, Homo sapien
gaagaaatagaaatgttagattctt

SEQ ID NO: 3398094 - DNA, 25 bp, Homo sapien
aatagaaatgttagattcttttgca

SEQ ID NO: 3398095 - DNA, 25 bp, Homo sapien
tgcaaagcggcaggttatattcaaa

SEQ ID NO: 3398096 - DNA, 25 bp, Homo sapien
ctgcaaagcggcaggttatattcaa

SEQ ID NO: 3398097 - DNA, 25 bp, Homo sapien
gcaaagcggcaggttatattcaaat

SEQ ID NO: 3398098 - DNA, 25 bp, Homo sapien
gcaaggtgctattgaaagccttgca

SEQ ID NO: 3398099 - DNA, 25 bp, Homo sapien
caggtctcaaatccgatgctcagag

SEQ ID NO: 3398100 - DNA, 25 bp, Homo sapien
tccgagagatgctgtagcgaccatt

SEQ ID NO: 3398101 - DNA, 25 bp, Homo sapien
cttgcagaggtcagcggcctccgtc

SEQ ID NO: 3398102 - DNA, 25 bp, Homo sapien
tgggttcccgctctatgattcacaa

SEQ ID NO: 3398103 - DNA, 25 bp, Homo sapien
cagtggtcgggtgctggtctcttac

SEQ ID NO: 3398104 - DNA, 25 bp, Homo sapien
tacaggttgcagattgacttggcca

SEQ ID NO: 3398105 - DNA, 25 bp, Homo sapien
acaagaggattccagccgagaggac

SEQ ID NO: 3398106 - DNA, 25 bp, Homo sapien
tactttttcaaaccagagaaacata

SEQ ID NO: 3398107 - DNA, 25 bp, Homo sapien
ctttttcaaaccagagaaacataga

SEQ ID NO: 3398108 - DNA, 25 bp, Homo sapien
aaagtctgctttgatccaagtctgc

SEQ ID NO: 3398109 - DNA, 25 bp, Homo sapien
tgctttgatccaagtctgcagggcc

SEQ ID NO: 3398110 - DNA, 25 bp, Homo sapien
tctgcagcttgacttttcaaaagca

SEQ ID NO: 3398111 - DNA, 25 bp, Homo sapien
tggtttccgtagagttctgcagctt

SEQ ID NO: 3398112 - DNA, 25 bp, Homo sapien
agttctgcagcttgacttttcaaaa

SEQ ID NO: 3398113 - DNA, 25 bp, Homo sapien
acttcatggtttccgtagagttctg

SEQ ID NO: 3398114 - DNA, 25 bp, Homo sapien
cagttcacccctagggatatcggag

SEQ ID NO: 3398115 - DNA, 25 bp, Homo sapien
aaaatggccagcttccatagatagg

SEQ ID NO: 3398116 - DNA, 25 bp, Homo sapien
gatatcggaggtttcaacaaccgag

SEQ ID NO: 3398117 - DNA, 25 bp, Homo sapien
caaacagaaggaagcctgagtcaca

SEQ ID NO: 3398118 - DNA, 25 bp, Homo sapien
tgttggatgtgaggatgtacacccc

SEQ ID NO: 3398119 - DNA, 25 bp, Homo sapien
aagcaatatgtgtcatactgggagg

SEQ ID NO: 3398120 - DNA, 25 bp, Homo sapien
tacacccctgtgttgtttgctgcac

SEQ ID NO: 3398121 - DNA, 25 bp, Homo sapien
gatccggggaatcaccacgtgccct

SEQ ID NO: 3398122 - DNA, 25 bp, Homo sapien
atttgttatgtaaatggaggctaca

SEQ ID NO: 3398123 - DNA, 25 bp, Homo sapien
acatgaatccccacttaagctgagc

SEQ ID NO: 3398124 - DNA, 25 bp, Homo sapien
ttaagctgagctccaaagaccaggc

SEQ ID NO: 3398125 - DNA, 25 bp, Homo sapien
ggctctgctgtacagatattcagtg

SEQ ID NO: 3398126 - DNA, 25 bp, Homo sapien
tcaactgaactaaccctccaaagag

SEQ ID NO: 3398127 - DNA, 25 bp, Homo sapien
cagtactgagcacatagaggtgatc

SEQ ID NO: 3398128 - DNA, 25 bp, Homo sapien
cttacaaaagtagccatcaatatcg

SEQ ID NO: 3398129 - DNA, 25 bp, Homo sapien
catctctgcctagtgcagtactgag

SEQ ID NO: 3398130 - DNA, 25 bp, Homo sapien
tccagggccttattagatagccttt

SEQ ID NO: 3398131 - DNA, 25 bp, Homo sapien
cttggaaagctagacctggtgaggt

SEQ ID NO: 3398132 - DNA, 25 bp, Homo sapien
catgctctcatgtcggattccaggg

SEQ ID NO: 3398133 - DNA, 25 bp, Homo sapien
tgaggtgggctttctcataaacctt

SEQ ID NO: 3398134 - DNA, 25 bp, Homo sapien
gatttctgcctgaatcttgggcctg

SEQ ID NO: 3398135 - DNA, 25 bp, Homo sapien
tgagcagcactgtctcaagcggtct

SEQ ID NO: 3398136 - DNA, 25 bp, Homo sapien
gatgttactggtagccctctgagca

SEQ ID NO: 3398137 - DNA, 25 bp, Homo sapien
caagcggtctgataacaggccctga

SEQ ID NO: 3398138 - DNA, 25 bp, Homo sapien
taggtgcttactctgtatagactgc

SEQ ID NO: 3398139 - DNA, 25 bp, Homo sapien
tctgaggttgaccacctttggccta

SEQ ID NO: 3398140 - DNA, 25 bp, Homo sapien
tatagactgcttctcagcatgttgc

SEQ ID NO: 3398141 - DNA, 25 bp, Homo sapien
ggcctaggtgcccagaatatttttc

SEQ ID NO: 3398142 - DNA, 25 bp, Homo sapien
tatggtaattggtccatcaaaggca

SEQ ID NO: 3398143 - DNA, 25 bp, Homo sapien
ttatggtaattggtccatcaaaggc

SEQ ID NO: 3398144 - DNA, 25 bp, Homo sapien
aattggtccatcaaaggcattgggc

SEQ ID NO: 3398145 - DNA, 25 bp, Homo sapien
ggtaattggtccatcaaaggcattg

SEQ ID NO: 3398146 - DNA, 25 bp, Homo sapien
tattaaacctctactatgggctgga

SEQ ID NO: 3398147 - DNA, 25 bp, Homo sapien
gctcagaggccgtaagatcagggtt

SEQ ID NO: 3398148 - DNA, 25 bp, Homo sapien
taggatttcataccaggcctgctga

SEQ ID NO: 3398149 - DNA, 25 bp, Homo sapien
cacacatggtgagggaactaggatt

SEQ ID NO: 3398150 - DNA, 25 bp, Homo sapien
tgtattctcctttctggacatagcg

SEQ ID NO: 3398151 - DNA, 25 bp, Homo sapien
cttcaggattcgttctgtattctcc

SEQ ID NO: 3398152 - DNA, 25 bp, Homo sapien
tcatcatcagtagggttgctggggt

SEQ ID NO: 3398153 - DNA, 25 bp, Homo sapien
gcgggtgccatcacggttaacaata

SEQ ID NO: 3398154 - DNA, 25 bp, Homo sapien
ctcctgaagtgctgctcctttcact

SEQ ID NO: 3398155 - DNA, 25 bp, Homo sapien
tgctcctttcactggaggagccgct

SEQ ID NO: 3398156 - DNA, 25 bp, Homo sapien
gctcctttcactggaggagccgctg

SEQ ID NO: 3398157 - DNA, 25 bp, Homo sapien
gaagtgctgctcctttcactggagg

SEQ ID NO: 3398158 - DNA, 25 bp, Homo sapien
tgggatggggtgtacagtagaaaag

SEQ ID NO: 3398159 - DNA, 25 bp, Homo sapien
ctgggatggggtgtacagtagaaaa

SEQ ID NO: 3398160 - DNA, 25 bp, Homo sapien
tgtgctgtcggtgatccagggactg

SEQ ID NO: 3398161 - DNA, 25 bp, Homo sapien
gtgctgtcggtgatccagggactgt

SEQ ID NO: 3398162 - DNA, 25 bp, Homo sapien
agggattctgtctgtgctgtcggtg

SEQ ID NO: 3398163 - DNA, 25 bp, Homo sapien
ttgggaagcacagtgatttattctc

SEQ ID NO: 3398164 - DNA, 25 bp, Homo sapien
gaagcacagtgatttattctcctta

SEQ ID NO: 3398165 - DNA, 25 bp, Homo sapien
aagcacagtgatttattctccttac

SEQ ID NO: 3398166 - DNA, 25 bp, Homo sapien
gggaagcacagtgatttattctcct

SEQ ID NO: 3398167 - DNA, 25 bp, Homo sapien
aggtcagagacattttgccagggaa

SEQ ID NO: 3398168 - DNA, 25 bp, Homo sapien
gagtgtgcaatgctcaggaaggtca

SEQ ID NO: 3398169 - DNA, 25 bp, Homo sapien
tcagcacgtgagtgtgcaatgctca

SEQ ID NO: 3398170 - DNA, 25 bp, Homo sapien
ctagagacgagaaaatcagcacgtg

SEQ ID NO: 3398171 - DNA, 25 bp, Homo sapien
tgaatggcatcaccagcttccagct

SEQ ID NO: 3398172 - DNA, 25 bp, Homo sapien
ctccctgaatggcatcaccagcttc

SEQ ID NO: 3398173 - DNA, 25 bp, Homo sapien
aatggcatcaccagcttccagctgt

SEQ ID NO: 3398174 - DNA, 25 bp, Homo sapien
cctgaatggcatcaccagcttccag

SEQ ID NO: 3398175 - DNA, 25 bp, Homo sapien
taggcagtagtagtcaatgcaggca

SEQ ID NO: 3398176 - DNA, 25 bp, Homo sapien
aaacagttttcatatcaggcttgaa

SEQ ID NO: 3398177 - DNA, 25 bp, Homo sapien
tccataggtggataagaacaagaag

SEQ ID NO: 3398178 - DNA, 25 bp, Homo sapien
gctagtggagtggtatgcaaactct

SEQ ID NO: 3398179 - DNA, 25 bp, Homo sapien
tgagtattcacaagccagcgcattt

SEQ ID NO: 3398180 - DNA, 25 bp, Homo sapien
gagtttgattaatcctccacaggag

SEQ ID NO: 3398181 - DNA, 25 bp, Homo sapien
cccaacaggctggattatagagctc

SEQ ID NO: 3398182 - DNA, 25 bp, Homo sapien
gagtgatgggaaccccaagcctatt

SEQ ID NO: 3398183 - DNA, 25 bp, Homo sapien
tagtaggttctcaaaatacgtttgc

SEQ ID NO: 3398184 - DNA, 25 bp, Homo sapien
tacgtttgctgactaacttaggaag

SEQ ID NO: 3398185 - DNA, 25 bp, Homo sapien
ggaagatacagttcttaagagatat

SEQ ID NO: 3398186 - DNA, 25 bp, Homo sapien
tgactaacttaggaagggaagatac

SEQ ID NO: 3398187 - DNA, 25 bp, Homo sapien
tctccatgaaggtaagtccaactct

SEQ ID NO: 3398188 - DNA, 25 bp, Homo sapien
tcgatcccaagcattctaataggcc

SEQ ID NO: 3398189 - DNA, 25 bp, Homo sapien
tggcatacagaagacctcagatatt

SEQ ID NO: 3398190 - DNA, 25 bp, Homo sapien
aatatctcagtaatccttgcctctc

SEQ ID NO: 3398191 - DNA, 25 bp, Homo sapien
tggaaaaagctactgcctagccagc

SEQ ID NO: 3398192 - DNA, 25 bp, Homo sapien
ccaaataggccataccagatctgaa

SEQ ID NO: 3398193 - DNA, 25 bp, Homo sapien
tacagtgttccaaggcaggagtctg

SEQ ID NO: 3398194 - DNA, 25 bp, Homo sapien
gtttcttgatcccagagagttccag

SEQ ID NO: 3398195 - DNA, 25 bp, Homo sapien
ctgtttgagtgcacagttgaagtaa

SEQ ID NO: 3398196 - DNA, 25 bp, Homo sapien
ggctgtgaattaccaaaccaggacc

SEQ ID NO: 3398197 - DNA, 25 bp, Homo sapien
cgttgctgttgttgtgagatcctga

SEQ ID NO: 3398198 - DNA, 25 bp, Homo sapien
tattttgctcctgagctgttgcgtg

SEQ ID NO: 3398199 - DNA, 25 bp, Homo sapien
taccaaaccaggaccatatctagtt

SEQ ID NO: 3398200 - DNA, 25 bp, Homo sapien
taacactaaaaggtctgacatccag

SEQ ID NO: 3398201 - DNA, 25 bp, Homo sapien
tgataatggacgtcctctcccctaa

SEQ ID NO: 3398202 - DNA, 25 bp, Homo sapien
tggtacaagaccctattctcactaa

SEQ ID NO: 3398203 - DNA, 25 bp, Homo sapien
taagaatatcaatcatatccccaga

SEQ ID NO: 3398204 - DNA, 25 bp, Homo sapien
ttaatcttctatacaatcttgggca

SEQ ID NO: 3398205 - DNA, 25 bp, Homo sapien
aatcttagcaatccaacacacaggg

SEQ ID NO: 3398206 - DNA, 25 bp, Homo sapien
gacagacagagatgaagtgacccca

SEQ ID NO: 3398207 - DNA, 25 bp, Homo sapien
gggcaaccaatatcattctccaaga

SEQ ID NO: 3398208 - DNA, 25 bp, Homo sapien
ggatcttaaatgtcatctggttcat

SEQ ID NO: 3398209 - DNA, 25 bp, Homo sapien
aatagcattgaatatgcttgtactc

SEQ ID NO: 3398210 - DNA, 25 bp, Homo sapien
taacggttcctaagaaatagcattg

SEQ ID NO: 3398211 - DNA, 25 bp, Homo sapien
tttactactcaagagaatcatctat

SEQ ID NO: 3398212 - DNA, 25 bp, Homo sapien
tcagttgctgtagcactagtgctca

SEQ ID NO: 3398213 - DNA, 25 bp, Homo sapien
cagccatttgtgttgttgtgtgaag

SEQ ID NO: 3398214 - DNA, 25 bp, Homo sapien
aacaaccatgaaaaccaatcccagg

SEQ ID NO: 3398215 - DNA, 25 bp, Homo sapien
gaagatgattctttgactctgatgg

SEQ ID NO: 3398216 - DNA, 25 bp, Homo sapien
tcagtgtacctccaaacagagatgg

SEQ ID NO: 3398217 - DNA, 25 bp, Homo sapien
gaaatctgcttattggtgccataca

SEQ ID NO: 3398218 - DNA, 25 bp, Homo sapien
gagggagttgacttgcataccccaa

SEQ ID NO: 3398219 - DNA, 25 bp, Homo sapien
tagtgtctaccccaagaatagttcc

SEQ ID NO: 3398220 - DNA, 25 bp, Homo sapien
ctgttgtggtgacttgcattagtgg

SEQ ID NO: 3398221 - DNA, 25 bp, Homo sapien
ttgcattagtggctgagctggacgc

SEQ ID NO: 3398222 - DNA, 25 bp, Homo sapien
tgttgtggtgacttgcattagtggc

SEQ ID NO: 3398223 - DNA, 25 bp, Homo sapien
gttgtggtgacttgcattagtggct

SEQ ID NO: 3398224 - DNA, 25 bp, Homo sapien
aatgcctgatccagaaaaactgagg

SEQ ID NO: 3398225 - DNA, 25 bp, Homo sapien
tggtgctggagataaaatcttcatc

SEQ ID NO: 3398226 - DNA, 25 bp, Homo sapien
tcatcaatgcctgatccagaaaaac

SEQ ID NO: 3398227 - DNA, 25 bp, Homo sapien
catcatcatcaatgcctgatccaga

SEQ ID NO: 3398228 - DNA, 25 bp, Homo sapien
taaggtatgatcataggttcaccca

SEQ ID NO: 3398229 - DNA, 25 bp, Homo sapien
tctgtagcagtagatcccatagata

SEQ ID NO: 3398230 - DNA, 25 bp, Homo sapien
tattgctccaacagaccatgagctt

SEQ ID NO: 3398231 - DNA, 25 bp, Homo sapien
gatcattcaaagacaatctgtagca

SEQ ID NO: 3398232 - DNA, 25 bp, Homo sapien
gatttgttcctttgacctcagctgg

SEQ ID NO: 3398233 - DNA, 25 bp, Homo sapien
gaattgggagagctcacacagcacc

SEQ ID NO: 3398234 - DNA, 25 bp, Homo sapien
tatatactcagatgccttcaaggcc

SEQ ID NO: 3398235 - DNA, 25 bp, Homo sapien
cacgtatttactgatgggcccatct

SEQ ID NO: 3398236 - DNA, 25 bp, Homo sapien
catgggaaatttttccctgaagcct

SEQ ID NO: 3398237 - DNA, 25 bp, Homo sapien
gaaatttttccctgaagcctgacca

SEQ ID NO: 3398238 - DNA, 25 bp, Homo sapien
tgggaaatttttccctgaagcctga

SEQ ID NO: 3398239 - DNA, 25 bp, Homo sapien
aatttttccctgaagcctgaccata

SEQ ID NO: 3398240 - DNA, 25 bp, Homo sapien
gcctgaaaaagtgcttattatcaag

SEQ ID NO: 3398241 - DNA, 25 bp, Homo sapien
cacattctcaataggcctgaaaaag

SEQ ID NO: 3398242 - DNA, 25 bp, Homo sapien
gaatcattaaccacattctcaatag

SEQ ID NO: 3398243 - DNA, 25 bp, Homo sapien
gcttattatcaagcagttatcacac

SEQ ID NO: 3398244 - DNA, 25 bp, Homo sapien
gagcaagccattcatagccagtgaa

SEQ ID NO: 3398245 - DNA, 25 bp, Homo sapien
gatattgtcacccaatctgttaggg

SEQ ID NO: 3398246 - DNA, 25 bp, Homo sapien
tagggctggaataagagatgcacct

SEQ ID NO: 3398247 - DNA, 25 bp, Homo sapien
aggtaaccagccaccatcatagcag

SEQ ID NO: 3398248 - DNA, 25 bp, Homo sapien
tagatcctccgggtgaagaggcaga

SEQ ID NO: 3398249 - DNA, 25 bp, Homo sapien
cactgtgtgctgtttgtagatcctc

SEQ ID NO: 3398250 - DNA, 25 bp, Homo sapien
ccgaggataaccaaaggcgccattt

SEQ ID NO: 3398251 - DNA, 25 bp, Homo sapien
ggttcagaacatgagatcttccaga

SEQ ID NO: 3398252 - DNA, 25 bp, Homo sapien
tataccaggttgtatagatggctgc

SEQ ID NO: 3398253 - DNA, 25 bp, Homo sapien
taattcagccatattggtaagcatc

SEQ ID NO: 3398254 - DNA, 25 bp, Homo sapien
tctgtaggctatgcaatgaatcatc

SEQ ID NO: 3398255 - DNA, 25 bp, Homo sapien
tatttcttgagccttcgccacttgt

SEQ ID NO: 3398256 - DNA, 25 bp, Homo sapien
cagtcatccttgtggttgtctgaag

SEQ ID NO: 3398257 - DNA, 25 bp, Homo sapien
ggatttgaatggcttgggttccact

SEQ ID NO: 3398258 - DNA, 25 bp, Homo sapien
gaagtagcacttccggatttgaatg

SEQ ID NO: 3398259 - DNA, 25 bp, Homo sapien
tcaaaagcccgtggtgtggttgaaa

SEQ ID NO: 3398260 - DNA, 25 bp, Homo sapien
tgattgacctttgcagcatcatggg

SEQ ID NO: 3398261 - DNA, 25 bp, Homo sapien
cccactgtgcctcgatgattgacct

SEQ ID NO: 3398262 - DNA, 25 bp, Homo sapien
tctatgccaaagtgttacctctgag

SEQ ID NO: 3398263 - DNA, 25 bp, Homo sapien
cctgtgcccacatggtataattgat

SEQ ID NO: 3398264 - DNA, 25 bp, Homo sapien
ccagtttccttcataagcagtggtg

SEQ ID NO: 3398265 - DNA, 25 bp, Homo sapien
gggagggtgtgcttctgggttccag

SEQ ID NO: 3398266 - DNA, 25 bp, Homo sapien
ttccttcataagcagtggtgccatt

SEQ ID NO: 3398267 - DNA, 25 bp, Homo sapien
tcctcatgatgctcatggtgaatga

SEQ ID NO: 3398268 - DNA, 25 bp, Homo sapien
gaactgccgaccgccatcttgctta

SEQ ID NO: 3398269 - DNA, 25 bp, Homo sapien
cccagaactgccgaccgccatcttg

SEQ ID NO: 3398270 - DNA, 25 bp, Homo sapien
cagaactgccgaccgccatcttgct

SEQ ID NO: 3398271 - DNA, 25 bp, Homo sapien
tactaattcatctaacccagaactg

SEQ ID NO: 3398272 - DNA, 25 bp, Homo sapien
gattccactactaagcaccaaaaga

SEQ ID NO: 3398273 - DNA, 25 bp, Homo sapien
tctttctatagaacagtcagggaca

SEQ ID NO: 3398274 - DNA, 25 bp, Homo sapien
ttaccgagtggaaatagaagatgcg

SEQ ID NO: 3398275 - DNA, 25 bp, Homo sapien
ggcctttgggcaacctgatgagtta

SEQ ID NO: 3398276 - DNA, 25 bp, Homo sapien
tgaaggcacccctcaagccatagat

SEQ ID NO: 3398277 - DNA, 25 bp, Homo sapien
tccatcggccaagccattattgggt

SEQ ID NO: 3398278 - DNA, 25 bp, Homo sapien
taaagcccagaggtcaccaatcaga

SEQ ID NO: 3398279 - DNA, 25 bp, Homo sapien
gctctaagggagtggaacaaaatcc

SEQ ID NO: 3398280 - DNA, 25 bp, Homo sapien
ccctgttgtcgaatgggagtcttct

SEQ ID NO: 3398281 - DNA, 25 bp, Homo sapien
ttggcgatatccctcatgccatctg

SEQ ID NO: 3398282 - DNA, 25 bp, Homo sapien
cgttgtactactaggagttgcctgg

SEQ ID NO: 3398283 - DNA, 25 bp, Homo sapien
ctttgggtgtttggcgatatccctc

SEQ ID NO: 3398284 - DNA, 25 bp, Homo sapien
cctgttcttattcataactggcttg

SEQ ID NO: 3398285 - DNA, 25 bp, Homo sapien
ggtgacttgttatgagcctttaagg

SEQ ID NO: 3398286 - DNA, 25 bp, Homo sapien
acatctcgtgacaattcctccagtg

SEQ ID NO: 3398287 - DNA, 25 bp, Homo sapien
gcttgtatccattcctgttcaggtg

SEQ ID NO: 3398288 - DNA, 25 bp, Homo sapien
tactgaacaggcatggccaaaaggc

SEQ ID NO: 3398289 - DNA, 25 bp, Homo sapien
catttagaacttgccatgccccaga

SEQ ID NO: 3398290 - DNA, 25 bp, Homo sapien
gacaaaagaatcctgcatgggagct

SEQ ID NO: 3398291 - DNA, 25 bp, Homo sapien
tctcaaaagcatgaatggaatccgt

SEQ ID NO: 3398292 - DNA, 25 bp, Homo sapien
cataaacgcagaatgtttcagcagc

SEQ ID NO: 3398293 - DNA, 25 bp, Homo sapien
aaccatcttccttgtatagagggca

SEQ ID NO: 3398294 - DNA, 25 bp, Homo sapien
cgcagtgcagaaaggatgagttacc

SEQ ID NO: 3398295 - DNA, 25 bp, Homo sapien
aaaagcattaacaactcccgcagtg

SEQ ID NO: 3398296 - DNA, 25 bp, Homo sapien
caaagtgttaatggacgcttggtca

SEQ ID NO: 3398297 - DNA, 25 bp, Homo sapien
caattgtcaaagtgttaatggacgc

SEQ ID NO: 3398298 - DNA, 25 bp, Homo sapien
ggacgcttggtcagggatacaccga

SEQ ID NO: 3398299 - DNA, 25 bp, Homo sapien
ccatgcagtttgagcaattgtcaaa

SEQ ID NO: 3398300 - DNA, 25 bp, Homo sapien
tggtgttgtccttccttgcattgga

SEQ ID NO: 3398301 - DNA, 25 bp, Homo sapien
ttgggttgaagaaatcagtccagga

SEQ ID NO: 3398302 - DNA, 25 bp, Homo sapien
tgatgacctcgtcccatggggtgtg

SEQ ID NO: 3398303 - DNA, 25 bp, Homo sapien
cttgcattggatggctggtatgagc

SEQ ID NO: 3398304 - DNA, 25 bp, Homo sapien
cagctcagaacttcatattcaggtg

SEQ ID NO: 3398305 - DNA, 25 bp, Homo sapien
aaatagtcagcagtcactcagtgga

SEQ ID NO: 3398306 - DNA, 25 bp, Homo sapien
tggtctaaaaccaagggcatatttc

SEQ ID NO: 3398307 - DNA, 25 bp, Homo sapien
tgagtatcactcctaccaagaaaac

SEQ ID NO: 3398308 - DNA, 25 bp, Homo sapien
tacagaaagtatacaggggcaagaa

SEQ ID NO: 3398309 - DNA, 25 bp, Homo sapien
caagaaataagaagcagtggacgtc

SEQ ID NO: 3398310 - DNA, 25 bp, Homo sapien
tttaacagttatcacagatctactc

SEQ ID NO: 3398311 - DNA, 25 bp, Homo sapien
catgtacaatgttgagtagtgcaga

SEQ ID NO: 3398312 - DNA, 25 bp, Homo sapien
tgcaaataaacagaatcgtcatcca

SEQ ID NO: 3398313 - DNA, 25 bp, Homo sapien
aaacagaatcgtcatccaagaccac

SEQ ID NO: 3398314 - DNA, 25 bp, Homo sapien
aataaacagaatcgtcatccaagac

SEQ ID NO: 3398315 - DNA, 25 bp, Homo sapien
caaataaacagaatcgtcatccaag

SEQ ID NO: 3398316 - DNA, 25 bp, Homo sapien
tcaaagagcaccacaacaagtaact

SEQ ID NO: 3398317 - DNA, 25 bp, Homo sapien
gatggaacacccaaatcttgcagag

SEQ ID NO: 3398318 - DNA, 25 bp, Homo sapien
ttgaagggccgagttatatgaaagc

SEQ ID NO: 3398319 - DNA, 25 bp, Homo sapien
tactgactatatctcccgaactgag

SEQ ID NO: 3398320 - DNA, 25 bp, Homo sapien
ctgaaggaatcaatattagtgttat

SEQ ID NO: 3398321 - DNA, 25 bp, Homo sapien
aaggtggcttatggtctacagctga

SEQ ID NO: 3398322 - DNA, 25 bp, Homo sapien
tggcttatggtctacagctgatttt

SEQ ID NO: 3398323 - DNA, 25 bp, Homo sapien
tgaaggtggcttatggtctacagct

SEQ ID NO: 3398324 - DNA, 25 bp, Homo sapien
gaagcgttatactatgactggagtc

SEQ ID NO: 3398325 - DNA, 25 bp, Homo sapien
caaatcttccaccaaacctgtgttt

SEQ ID NO: 3398326 - DNA, 25 bp, Homo sapien
tttgcagtaggctgaagcgttatac

SEQ ID NO: 3398327 - DNA, 25 bp, Homo sapien
gtgtttggatttgcagtaggctgaa

SEQ ID NO: 3398328 - DNA, 25 bp, Homo sapien
ttgatgtcagagtagaagttgttgg

SEQ ID NO: 3398329 - DNA, 25 bp, Homo sapien
caagccttcatgtgatgtagagaag

SEQ ID NO: 3398330 - DNA, 25 bp, Homo sapien
cttcttccaagccttcatgtgatgt

SEQ ID NO: 3398331 - DNA, 25 bp, Homo sapien
gcttgatgtcagagtagaagttgtt

SEQ ID NO: 3398332 - DNA, 25 bp, Homo sapien
atcagtgatgaacccgtatttgtaa

SEQ ID NO: 3398333 - DNA, 25 bp, Homo sapien
tggaatcagtgatgaacccgtattt

SEQ ID NO: 3398334 - DNA, 25 bp, Homo sapien
gaatcagtgatgaacccgtatttgt

SEQ ID NO: 3398335 - DNA, 25 bp, Homo sapien
gatgaacccgtatttgtaagatcac

SEQ ID NO: 3398336 - DNA, 25 bp, Homo sapien
tgcagtaactccaaaggacccagtc

SEQ ID NO: 3398337 - DNA, 25 bp, Homo sapien
tccagtaaagtagttgagccttcag

SEQ ID NO: 3398338 - DNA, 25 bp, Homo sapien
ggtcctgctttccttcgtgtgtggg

SEQ ID NO: 3398339 - DNA, 25 bp, Homo sapien
ggtaatgagaggtataaccttccag

SEQ ID NO: 3398340 - DNA, 25 bp, Homo sapien
tctaggtccgtgtcaaacttcattg

SEQ ID NO: 3398341 - DNA, 25 bp, Homo sapien
tatcacaaactagtccaatcccaga

SEQ ID NO: 3398342 - DNA, 25 bp, Homo sapien
tattagtcgaattaaacggaattgc

SEQ ID NO: 3398343 - DNA, 25 bp, Homo sapien
aaaattcgactactttcacctgcaa

SEQ ID NO: 3398344 - DNA, 25 bp, Homo sapien
ctaaggagtgtaaggggctttgtct

SEQ ID NO: 3398345 - DNA, 25 bp, Homo sapien
gagacagcactataagattttctga

SEQ ID NO: 3398346 - DNA, 25 bp, Homo sapien
aagaatactgacaatggtacttgga

SEQ ID NO: 3398347 - DNA, 25 bp, Homo sapien
aaattcattgggttgcacaacaggc

SEQ ID NO: 3398348 - DNA, 25 bp, Homo sapien
tacagttatccattatgaaggcacc

SEQ ID NO: 3398349 - DNA, 25 bp, Homo sapien
tggaagcgggtgacacttagtcacc

SEQ ID NO: 3398350 - DNA, 25 bp, Homo sapien
tagtaacctgatcgtcaccatttcc

SEQ ID NO: 3398351 - DNA, 25 bp, Homo sapien
cacctgtgtaactatattgaagaga

SEQ ID NO: 3398352 - DNA, 25 bp, Homo sapien
ggaaggtcagtactgcatgttttca

SEQ ID NO: 3398353 - DNA, 25 bp, Homo sapien
tgtaatgagcaatcaggaaggtcag

SEQ ID NO: 3398354 - DNA, 25 bp, Homo sapien
tgcattcttatacagcctatcacaa

SEQ ID NO: 3398355 - DNA, 25 bp, Homo sapien
tgatggcaaaacagccttgaatggg

SEQ ID NO: 3398356 - DNA, 25 bp, Homo sapien
cagatccatgagtggtatgggaccc

SEQ ID NO: 3398357 - DNA, 25 bp, Homo sapien
tgagtggtatgggaccccccactgg

SEQ ID NO: 3398358 - DNA, 25 bp, Homo sapien
agatccatgagtggtatgggacccc

SEQ ID NO: 3398359 - DNA, 25 bp, Homo sapien
tccatgagtggtatgggacccccca

SEQ ID NO: 3398360 - DNA, 25 bp, Homo sapien
gccaaacaaaagagactggctcctg

SEQ ID NO: 3398361 - DNA, 25 bp, Homo sapien
ctagatgtctacaaatccagccagg

SEQ ID NO: 3398362 - DNA, 25 bp, Homo sapien
gtttgaacaatagacacctgctcag

SEQ ID NO: 3398363 - DNA, 25 bp, Homo sapien
ggatgtgagatagcaggtcttgcct

SEQ ID NO: 3398364 - DNA, 25 bp, Homo sapien
gaaacttctaagaagccgggcatgg

SEQ ID NO: 3398365 - DNA, 25 bp, Homo sapien
aataaggagtttagcggcagtggcc

SEQ ID NO: 3398366 - DNA, 25 bp, Homo sapien
tcaagtcagaactggaggcctatcg

SEQ ID NO: 3398367 - DNA, 25 bp, Homo sapien
gaagtatcgcaagacagacaatcct

SEQ ID NO: 3398368 - DNA, 25 bp, Homo sapien
tataggaccagaggttgtgtttgct

SEQ ID NO: 3398369 - DNA, 25 bp, Homo sapien
ggtgtccttataggaccagaggttg

SEQ ID NO: 3398370 - DNA, 25 bp, Homo sapien
atttggggtgtccttataggaccag

SEQ ID NO: 3398371 - DNA, 25 bp, Homo sapien
tccttataggaccagaggttgtgtt

SEQ ID NO: 3398372 - DNA, 25 bp, Homo sapien
aagagggatgccaagatgatcagcc

SEQ ID NO: 3398373 - DNA, 25 bp, Homo sapien
agagggatgccaagatgatcagcca

SEQ ID NO: 3398374 - DNA, 25 bp, Homo sapien
gagggatgccaagatgatcagccat

SEQ ID NO: 3398375 - DNA, 25 bp, Homo sapien
agggatgccaagatgatcagccatt

SEQ ID NO: 3398376 - DNA, 25 bp, Homo sapien
cttcttcgactgttgactgcaatgc

SEQ ID NO: 3398377 - DNA, 25 bp, Homo sapien
ttcttcgactgttgactgcaatgca

SEQ ID NO: 3398378 - DNA, 25 bp, Homo sapien
tcttcgactgttgactgcaatgcaa

SEQ ID NO: 3398379 - DNA, 25 bp, Homo sapien
tctttccattcaatcataggcggcc

SEQ ID NO: 3398380 - DNA, 25 bp, Homo sapien
tagacctcctaacagcaagaagacg

SEQ ID NO: 3398381 - DNA, 25 bp, Homo sapien
taattagagactgtatgggctgccc

SEQ ID NO: 3398382 - DNA, 25 bp, Homo sapien
cagcccatgtgtcagttctagcgag

SEQ ID NO: 3398383 - DNA, 25 bp, Homo sapien
ctgaatgtatcgagaagaataaaac

SEQ ID NO: 3398384 - DNA, 25 bp, Homo sapien
gtcaacactttgtcggccttgtcag

SEQ ID NO: 3398385 - DNA, 25 bp, Homo sapien
tgcagatttagataaaccatcaaca

SEQ ID NO: 3398386 - DNA, 25 bp, Homo sapien
tattccagaaagtcccataacttcc

SEQ ID NO: 3398387 - DNA, 25 bp, Homo sapien
tcagaaagattgcagtgactcaggc

SEQ ID NO: 3398388 - DNA, 25 bp, Homo sapien
taacaaccagactcataacaaccag

SEQ ID NO: 3398389 - DNA, 25 bp, Homo sapien
ccaggaagccggtgttattattata

SEQ ID NO: 3398390 - DNA, 25 bp, Homo sapien
gactcaggcatcagatcatcatcct

SEQ ID NO: 3398391 - DNA, 25 bp, Homo sapien
gagtttctgacgactccttgttcac

SEQ ID NO: 3398392 - DNA, 25 bp, Homo sapien
cagctgtcataaactggtctggagt

SEQ ID NO: 3398393 - DNA, 25 bp, Homo sapien
tggcctctccgttgagtccacttgg

SEQ ID NO: 3398394 - DNA, 25 bp, Homo sapien
catttcctgagacttgctggcctct

SEQ ID NO: 3398395 - DNA, 25 bp, Homo sapien
tcatgtccacattctgcaggttcct

SEQ ID NO: 3398396 - DNA, 25 bp, Homo sapien
ttacaccccaatcttcatgtccaca

SEQ ID NO: 3398397 - DNA, 25 bp, Homo sapien
cttcatgtccacattctgcaggttc

SEQ ID NO: 3398398 - DNA, 25 bp, Homo sapien
tgtccacattctgcaggttccttgt

SEQ ID NO: 3398399 - DNA, 25 bp, Homo sapien
cagataaatagcttcaccctttggg

SEQ ID NO: 3398400 - DNA, 25 bp, Homo sapien
ccaagtgggaactggaacgatcaaa

SEQ ID NO: 3398401 - DNA, 25 bp, Homo sapien
taagtgtcccagctccctgtaatgg

SEQ ID NO: 3398402 - DNA, 25 bp, Homo sapien
cacccgagggatgaaaggcctccaa

SEQ ID NO: 3398403 - DNA, 25 bp, Homo sapien
gaagttctaggaccaatcggacacc

SEQ ID NO: 3398404 - DNA, 25 bp, Homo sapien
gcctctatgaaatagggccccaggg

SEQ ID NO: 3398405 - DNA, 25 bp, Homo sapien
tgtgcttccagagttacgcccttga

SEQ ID NO: 3398406 - DNA, 25 bp, Homo sapien
ccccagggataacaggtcatgcaaa

SEQ ID NO: 3398407 - DNA, 25 bp, Homo sapien
tcatatatgctactagaaaatgcct

SEQ ID NO: 3398408 - DNA, 25 bp, Homo sapien
acaatgtggactgattactgtaaca

SEQ ID NO: 3398409 - DNA, 25 bp, Homo sapien
tgttttcgcctttagctttctaagc

SEQ ID NO: 3398410 - DNA, 25 bp, Homo sapien
tatatactggaaataacctgtgaat

SEQ ID NO: 3398411 - DNA, 25 bp, Homo sapien
gagggagtatgacgttctctaccta

SEQ ID NO: 3398412 - DNA, 25 bp, Homo sapien
aatagtgagtgtacagcttatgcgg

SEQ ID NO: 3398413 - DNA, 25 bp, Homo sapien
gaacacaggtcccacatatatgagg

SEQ ID NO: 3398414 - DNA, 25 bp, Homo sapien
tagccatgtgctatagggaaccctg

SEQ ID NO: 3398415 - DNA, 25 bp, Homo sapien
tgtctttagagaaaggtcagcctct

SEQ ID NO: 3398416 - DNA, 25 bp, Homo sapien
tggttgccaaatactcatcatgatg

SEQ ID NO: 3398417 - DNA, 25 bp, Homo sapien
catgatgctcatgacttaaaggttc

SEQ ID NO: 3398418 - DNA, 25 bp, Homo sapien
ttgagtcagggtacaggaaaaaaca

SEQ ID NO: 3398419 - DNA, 25 bp, Homo sapien
agattagatgtaccctcgactggca

SEQ ID NO: 3398420 - DNA, 25 bp, Homo sapien
tagaaccaactatgaggcaatactg

SEQ ID NO: 3398421 - DNA, 25 bp, Homo sapien
tagccactgcagagacgaggtgtct

SEQ ID NO: 3398422 - DNA, 25 bp, Homo sapien
ttggttcacgcatgaagaacagtgc

SEQ ID NO: 3398423 - DNA, 25 bp, Homo sapien
gccaaggaagttggtccagcacatc

SEQ ID NO: 3398424 - DNA, 25 bp, Homo sapien
catgttgcacaacacagatcagatt

SEQ ID NO: 3398425 - DNA, 25 bp, Homo sapien
gaaagttggctgtctggtggtttaa

SEQ ID NO: 3398426 - DNA, 25 bp, Homo sapien
tggacccatggagcgaattccctga

SEQ ID NO: 3398427 - DNA, 25 bp, Homo sapien
aacctgatgcaagggcagcaagata

SEQ ID NO: 3398428 - DNA, 25 bp, Homo sapien
tagtgcaaaaaacctgatgcaaggg

SEQ ID NO: 3398429 - DNA, 25 bp, Homo sapien
caaaaaacctgatgcaagggcagca

SEQ ID NO: 3398430 - DNA, 25 bp, Homo sapien
tccattagtgcaaaaaacctgatgc

SEQ ID NO: 3398431 - DNA, 25 bp, Homo sapien
ttgtagggtggatgggatacaatgc

SEQ ID NO: 3398432 - DNA, 25 bp, Homo sapien
caaggcctgattagtttgtagggtg

SEQ ID NO: 3398433 - DNA, 25 bp, Homo sapien
tgtagggtggatgggatacaatgca

SEQ ID NO: 3398434 - DNA, 25 bp, Homo sapien
cttcaaggcctgattagtttgtagg

SEQ ID NO: 3398435 - DNA, 25 bp, Homo sapien
tatcatgggtatcacattgcaggaa

SEQ ID NO: 3398436 - DNA, 25 bp, Homo sapien
cacccagtatgggaatttgagagcc

SEQ ID NO: 3398437 - DNA, 25 bp, Homo sapien
tgctgtagcaacagagccctctctg

SEQ ID NO: 3398438 - DNA, 25 bp, Homo sapien
ttctccgccagtatgtagacatgca

SEQ ID NO: 3398439 - DNA, 25 bp, Homo sapien
tagatgggcagtaaacagggtcagg

SEQ ID NO: 3398440 - DNA, 25 bp, Homo sapien
cagatacctttgaaacatacaagag

SEQ ID NO: 3398441 - DNA, 25 bp, Homo sapien
ccctagtgatttttggataaggatc

SEQ ID NO: 3398442 - DNA, 25 bp, Homo sapien
tactgaacagtattaggcaactttt

SEQ ID NO: 3398443 - DNA, 25 bp, Homo sapien
tatttccaaagtactcttggatatt

SEQ ID NO: 3398444 - DNA, 25 bp, Homo sapien
caaaaacaacttgggaatccatatt

SEQ ID NO: 3398445 - DNA, 25 bp, Homo sapien
aagtactcttggatattttgatatg

SEQ ID NO: 3398446 - DNA, 25 bp, Homo sapien
caacttgggaatccatatttccaaa

SEQ ID NO: 3398447 - DNA, 25 bp, Homo sapien
tctcatggctatgggtgccagaggc

SEQ ID NO: 3398448 - DNA, 25 bp, Homo sapien
aaattatctgacaaacctaggtctc

SEQ ID NO: 3398449 - DNA, 25 bp, Homo sapien
ctgacaaacctaggtctcatggcta

SEQ ID NO: 3398450 - DNA, 25 bp, Homo sapien
cctaggtctcatggctatgggtgcc

SEQ ID NO: 3398451 - DNA, 25 bp, Homo sapien
catacattgctttgaacatgaccag

SEQ ID NO: 3398452 - DNA, 25 bp, Homo sapien
tcctcttatgagacagctgcccttc

SEQ ID NO: 3398453 - DNA, 25 bp, Homo sapien
agcttagccctttaagacaacggag

SEQ ID NO: 3398454 - DNA, 25 bp, Homo sapien
tgatgataatcactccactctttgg

SEQ ID NO: 3398455 - DNA, 25 bp, Homo sapien
cgttggttctggataggccctggaa

SEQ ID NO: 3398456 - DNA, 25 bp, Homo sapien
tagcaagctaggtctgatgccatcc

SEQ ID NO: 3398457 - DNA, 25 bp, Homo sapien
gaatgcttgcaatcgagaatcctgg

SEQ ID NO: 3398458 - DNA, 25 bp, Homo sapien
tgcatgcaaatgaggccaggctcca

SEQ ID NO: 3398459 - DNA, 25 bp, Homo sapien
cccacgtagcagactcctctccatg

SEQ ID NO: 3398460 - DNA, 25 bp, Homo sapien
ttttgtacattactgcggaactagt

SEQ ID NO: 3398461 - DNA, 25 bp, Homo sapien
ttgtacattactgcggaactagttc

SEQ ID NO: 3398462 - DNA, 25 bp, Homo sapien
tttgacctcccacgtagcagactcc

SEQ ID NO: 3398463 - DNA, 25 bp, Homo sapien
cactagaatggtgtccccgagacag

SEQ ID NO: 3398464 - DNA, 25 bp, Homo sapien
tttattaccatgtgagcggctctag

SEQ ID NO: 3398465 - DNA, 25 bp, Homo sapien
catgagggacagaggtttattacca

SEQ ID NO: 3398466 - DNA, 25 bp, Homo sapien
tatagggcacagtagcacatgccat

SEQ ID NO: 3398467 - DNA, 25 bp, Homo sapien
actaagatggttatcaagaagggcc

SEQ ID NO: 3398468 - DNA, 25 bp, Homo sapien
agggagctcaccgtcattgggcaca

SEQ ID NO: 3398469 - DNA, 25 bp, Homo sapien
gatgaacgtcttaggtaggccagct

SEQ ID NO: 3398470 - DNA, 25 bp, Homo sapien
tgaacgagactgtgactgaggtgcc

SEQ ID NO: 3398471 - DNA, 25 bp, Homo sapien
tgagggttgtggtatagctactgag

SEQ ID NO: 3398472 - DNA, 25 bp, Homo sapien
gttgtggtatagctactgagctgtc

SEQ ID NO: 3398473 - DNA, 25 bp, Homo sapien
tggtatagctactgagctgtctcat

SEQ ID NO: 3398474 - DNA, 25 bp, Homo sapien
agggttgtggtatagctactgagct

SEQ ID NO: 3398475 - DNA, 25 bp, Homo sapien
gcactttgctggtcccaatgccagt

SEQ ID NO: 3398476 - DNA, 25 bp, Homo sapien
cctgatgtaggtggtctctcaatga

SEQ ID NO: 3398477 - DNA, 25 bp, Homo sapien
cagtaattgactgtgcctgatgtag

SEQ ID NO: 3398478 - DNA, 25 bp, Homo sapien
gtttgactgtgttcccaaggcattg

SEQ ID NO: 3398479 - DNA, 25 bp, Homo sapien
tttgagatgatcaaacaccccaccc

SEQ ID NO: 3398480 - DNA, 25 bp, Homo sapien
tagccattacttcagaattgacagg

SEQ ID NO: 3398481 - DNA, 25 bp, Homo sapien
gtcttgttccatgaaccagaggtgg

SEQ ID NO: 3398482 - DNA, 25 bp, Homo sapien
caaaacccagagtgcatgccacatg

SEQ ID NO: 3398483 - DNA, 25 bp, Homo sapien
tttggagggtccaatttagagatgt

SEQ ID NO: 3398484 - DNA, 25 bp, Homo sapien
ctcttggaaggggaatgagtactca

SEQ ID NO: 3398485 - DNA, 25 bp, Homo sapien
tgttgatgcttggtagttgggtcct

SEQ ID NO: 3398486 - DNA, 25 bp, Homo sapien
taagatatccttcacggacaagtgc

SEQ ID NO: 3398487 - DNA, 25 bp, Homo sapien
ctgttcggagagtgaatacttgatc

SEQ ID NO: 3398488 - DNA, 25 bp, Homo sapien
ctgaggaacagttggcagttgtttg

SEQ ID NO: 3398489 - DNA, 25 bp, Homo sapien
tgtttgaagatccaccaggtttagc

SEQ ID NO: 3398490 - DNA, 25 bp, Homo sapien
tacttgatcagctgtgtgcggatgg

SEQ ID NO: 3398491 - DNA, 25 bp, Homo sapien
tgttttttgagtagctgcgaaagag

SEQ ID NO: 3398492 - DNA, 25 bp, Homo sapien
ttttttgagtagctgcgaaagagac

SEQ ID NO: 3398493 - DNA, 25 bp, Homo sapien
ttatgttttttgagtagctgcgaaa

SEQ ID NO: 3398494 - DNA, 25 bp, Homo sapien
tatgttttttgagtagctgcgaaag

SEQ ID NO: 3398495 - DNA, 25 bp, Homo sapien
gaagtgacacgtgagcagagagctc

SEQ ID NO: 3398496 - DNA, 25 bp, Homo sapien
actgagttggggcagacaccaaagg

SEQ ID NO: 3398497 - DNA, 25 bp, Homo sapien
tcagagaagtgacacgtgagcagag

SEQ ID NO: 3398498 - DNA, 25 bp, Homo sapien
aaggaacaggtctcatgtaacatct

SEQ ID NO: 3398499 - DNA, 25 bp, Homo sapien
tacagtggagctgtaattggaaccc

SEQ ID NO: 3398500 - DNA, 25 bp, Homo sapien
caagagttatgaggtgtgatggtct

SEQ ID NO: 3398501 - DNA, 25 bp, Homo sapien
gatggtcttagcactgcgagtcctt

SEQ ID NO: 3398502 - DNA, 25 bp, Homo sapien
gcaaggtctgcacgttttatgaagt

SEQ ID NO: 3398503 - DNA, 25 bp, Homo sapien
aaatgtggatccctgggttgtacat

SEQ ID NO: 3398504 - DNA, 25 bp, Homo sapien
catgccctgctctggtgtgtcgtgc

SEQ ID NO: 3398505 - DNA, 25 bp, Homo sapien
tgtacataggcctgaatctctgatc

SEQ ID NO: 3398506 - DNA, 25 bp, Homo sapien
tgccccacacatggctcatgccctg

SEQ ID NO: 3398507 - DNA, 25 bp, Homo sapien
caggagcaggggtggccaccatctc

SEQ ID NO: 3398508 - DNA, 25 bp, Homo sapien
gcagaagggacagtgagcaggagca

SEQ ID NO: 3398509 - DNA, 25 bp, Homo sapien
ctgcagaagggacagtgagcaggag

SEQ ID NO: 3398510 - DNA, 25 bp, Homo sapien
agcaggagcaggggtggccaccatc

SEQ ID NO: 3398511 - DNA, 25 bp, Homo sapien
tctgaaagaaggtgttgaatggaga

SEQ ID NO: 3398512 - DNA, 25 bp, Homo sapien
ttgaggtctgaaagaaggtgttgaa

SEQ ID NO: 3398513 - DNA, 25 bp, Homo sapien
agcacttggtcatgggtcttgaggt

SEQ ID NO: 3398514 - DNA, 25 bp, Homo sapien
gcacttggtcatgggtcttgaggtc

SEQ ID NO: 3398515 - DNA, 25 bp, Homo sapien
tgactggcatccctaccgggtttgt

SEQ ID NO: 3398516 - DNA, 25 bp, Homo sapien
tcctgggacctgttgtttggcacag

SEQ ID NO: 3398517 - DNA, 25 bp, Homo sapien
ttgcttggttcctgggacctgttgt

SEQ ID NO: 3398518 - DNA, 25 bp, Homo sapien
tggcacagtctaggggcagaagatc

SEQ ID NO: 3398519 - DNA, 25 bp, Homo sapien
cactgcccgggtctgcaagtacttg

SEQ ID NO: 3398520 - DNA, 25 bp, Homo sapien
tgacgactttgcagcaaggacctgg

SEQ ID NO: 3398521 - DNA, 25 bp, Homo sapien
tctcgtggcccaactgaaatagcca

SEQ ID NO: 3398522 - DNA, 25 bp, Homo sapien
gtttttagacatggttctcgtggcc

SEQ ID NO: 3398523 - DNA, 25 bp, Homo sapien
ttgaggaaatttgtcgaatagcgac

SEQ ID NO: 3398524 - DNA, 25 bp, Homo sapien
tagcagcttccatcaatgtgcaggg

SEQ ID NO: 3398525 - DNA, 25 bp, Homo sapien
gaccttcaacctccaagtgatccag

SEQ ID NO: 3398526 - DNA, 25 bp, Homo sapien
aatagcgacattgaggatatgagtc

SEQ ID NO: 3398527 - DNA, 25 bp, Homo sapien
gaacagaggaggcgatggcaggcca

SEQ ID NO: 3398528 - DNA, 25 bp, Homo sapien
tggaacagaggaggcgatggcaggc

SEQ ID NO: 3398529 - DNA, 25 bp, Homo sapien
ctggaacagaggaggcgatggcagg

SEQ ID NO: 3398530 - DNA, 25 bp, Homo sapien
aacagaggaggcgatggcaggccat

SEQ ID NO: 3398531 - DNA, 25 bp, Homo sapien
cggtttaagttacatgtgacaagac

SEQ ID NO: 3398532 - DNA, 25 bp, Homo sapien
gtgacaagacagcttctattactat

SEQ ID NO: 3398533 - DNA, 25 bp, Homo sapien
tagcaatatgatactctcctctttt

SEQ ID NO: 3398534 - DNA, 25 bp, Homo sapien
tccatgagatatctatacttagcaa

SEQ ID NO: 3398535 - DNA, 25 bp, Homo sapien
ggtcccaaaccatgtcgctgtaagg

SEQ ID NO: 3398536 - DNA, 25 bp, Homo sapien
catgtcgctgtaaggtgttctgaga

SEQ ID NO: 3398537 - DNA, 25 bp, Homo sapien
cgctgtaaggtgttctgagaaagaa

SEQ ID NO: 3398538 - DNA, 25 bp, Homo sapien
caaaccatgtcgctgtaaggtgttc

SEQ ID NO: 3398539 - DNA, 25 bp, Homo sapien
ttccttctagactggttgacggtca

SEQ ID NO: 3398540 - DNA, 25 bp, Homo sapien
tgacggtcaggtgggctgattggtt

SEQ ID NO: 3398541 - DNA, 25 bp, Homo sapien
ggttctccctgctacagtggtagaa

SEQ ID NO: 3398542 - DNA, 25 bp, Homo sapien
ctccctgctacagtggtagaattca

SEQ ID NO: 3398543 - DNA, 25 bp, Homo sapien
ccctgaggagatcccttcttcccca

SEQ ID NO: 3398544 - DNA, 25 bp, Homo sapien
taaattccctgaggagatcccttct

SEQ ID NO: 3398545 - DNA, 25 bp, Homo sapien
attccctgaggagatcccttcttcc

SEQ ID NO: 3398546 - DNA, 25 bp, Homo sapien
ttaaattccctgaggagatcccttc

SEQ ID NO: 3398547 - DNA, 25 bp, Homo sapien
taaaaatagccctgcttgcaagcag

SEQ ID NO: 3398548 - DNA, 25 bp, Homo sapien
tgaaaattcctaactgaagagagcg

SEQ ID NO: 3398549 - DNA, 25 bp, Homo sapien
cctgagcggtatttgtttgcatggc

SEQ ID NO: 3398550 - DNA, 25 bp, Homo sapien
ttaaattttggtcacacctgagcgg

SEQ ID NO: 3398551 - DNA, 25 bp, Homo sapien
ctttggagacccgttttgatgtgtc

SEQ ID NO: 3398552 - DNA, 25 bp, Homo sapien
tttgaaaagcggcctttcactccag

SEQ ID NO: 3398553 - DNA, 25 bp, Homo sapien
caggctcaggctgccaaattggtgt

SEQ ID NO: 3398554 - DNA, 25 bp, Homo sapien
gtgtctttgatccctccacacgtgg

SEQ ID NO: 3398555 - DNA, 25 bp, Homo sapien
gccttgcagctgactaggagaaact

SEQ ID NO: 3398556 - DNA, 25 bp, Homo sapien
aaggtggtacaatggagtgaattct

SEQ ID NO: 3398557 - DNA, 25 bp, Homo sapien
catgtttatccttatatcaggaggt

SEQ ID NO: 3398558 - DNA, 25 bp, Homo sapien
acctcctgatataaggataaacatg

SEQ ID NO: 3398559 - DNA, 25 bp, Homo sapien
gttccagtccccttgttatcctgag

SEQ ID NO: 3398560 - DNA, 25 bp, Homo sapien
tatcctgaggaccacagtcaaagca

SEQ ID NO: 3398561 - DNA, 25 bp, Homo sapien
tggatggactcaggatgttccagtc

SEQ ID NO: 3398562 - DNA, 25 bp, Homo sapien
acccaggttttagccctgcctgtgc

SEQ ID NO: 3398563 - DNA, 25 bp, Homo sapien
ctggttccggagcttgggtatgttc

SEQ ID NO: 3398564 - DNA, 25 bp, Homo sapien
cagcggggttcgaacaagatttgct

SEQ ID NO: 3398565 - DNA, 25 bp, Homo sapien
gcttgggtatgttcagcctggtttt

SEQ ID NO: 3398566 - DNA, 25 bp, Homo sapien
aacaagatttgctggttccggagct

SEQ ID NO: 3398567 - DNA, 25 bp, Homo sapien
tgaggttgaaagtgagttgacagca

SEQ ID NO: 3398568 - DNA, 25 bp, Homo sapien
gcagttgccattcaccagcgggtcc

SEQ ID NO: 3398569 - DNA, 25 bp, Homo sapien
agcgggtcctgggtcctcgtcctca

SEQ ID NO: 3398570 - DNA, 25 bp, Homo sapien
gacaactggctgaggttgaaagtga

SEQ ID NO: 3398571 - DNA, 25 bp, Homo sapien
acaaccggggaccagctctctggag

SEQ ID NO: 3398572 - DNA, 25 bp, Homo sapien
gtaacaaccggggaccagctctctg

SEQ ID NO: 3398573 - DNA, 25 bp, Homo sapien
ctggagtaacaaccggggaccagct

SEQ ID NO: 3398574 - DNA, 25 bp, Homo sapien
agtaacaaccggggaccagctctct

SEQ ID NO: 3398575 - DNA, 25 bp, Homo sapien
ttctggtgactggacatgttgggag

SEQ ID NO: 3398576 - DNA, 25 bp, Homo sapien
gactggacatgttgggagatattta

SEQ ID NO: 3398577 - DNA, 25 bp, Homo sapien
tctgcgagtcctcacagtgcgagtc

SEQ ID NO: 3398578 - DNA, 25 bp, Homo sapien
ctttcttgactctgcgagtcctcac

SEQ ID NO: 3398579 - DNA, 25 bp, Homo sapien
tccttcactgcatcaattacaactt

SEQ ID NO: 3398580 - DNA, 25 bp, Homo sapien
caccctctgatcctggagcatgctt

SEQ ID NO: 3398581 - DNA, 25 bp, Homo sapien
ctaccctaccaccattccacagatg

SEQ ID NO: 3398582 - DNA, 25 bp, Homo sapien
tgaagactagttcatcatcatgtcc

SEQ ID NO: 3398583 - DNA, 25 bp, Homo sapien
catcagtatcaatggccacttcttt

SEQ ID NO: 3398584 - DNA, 25 bp, Homo sapien
gacaaatctgttcatcagtatcaat

SEQ ID NO: 3398585 - DNA, 25 bp, Homo sapien
ccagatgaaacttgtgaggcagaaa

SEQ ID NO: 3398586 - DNA, 25 bp, Homo sapien
aaagtccttaagtgatgatgcttca

SEQ ID NO: 3398587 - DNA, 25 bp, Homo sapien
aggcgggtggaagggcgggcagagg

SEQ ID NO: 3398588 - DNA, 25 bp, Homo sapien
gaggcgggtggaagggcgggcagag

SEQ ID NO: 3398589 - DNA, 25 bp, Homo sapien
cggaggcgggtggaagggcgggcag

SEQ ID NO: 3398590 - DNA, 25 bp, Homo sapien
ggcgggtggaagggcgggcagaggc

SEQ ID NO: 3398591 - DNA, 25 bp, Homo sapien
cgcagcaaagcacaggtggcagcgg

SEQ ID NO: 3398592 - DNA, 25 bp, Homo sapien
cgccactcgccgcgcccgcgagccc

SEQ ID NO: 3398593 - DNA, 25 bp, Homo sapien
accactctctgctcccgccactcgc

SEQ ID NO: 3398594 - DNA, 25 bp, Homo sapien
cgtcctctgccaccactctctgctc

SEQ ID NO: 3398595 - DNA, 25 bp, Homo sapien
actgggtgccagacgccactttagg

SEQ ID NO: 3398596 - DNA, 25 bp, Homo sapien
tcagagagtttgcacgtggccggtc

SEQ ID NO: 3398597 - DNA, 25 bp, Homo sapien
tccagcacagcgcaaatccgaagat

SEQ ID NO: 3398598 - DNA, 25 bp, Homo sapien
ccttcggatatcagcgcctggcatt

SEQ ID NO: 3398599 - DNA, 25 bp, Homo sapien
tgaggctctcaagttctagagagct

SEQ ID NO: 3398600 - DNA, 25 bp, Homo sapien
cttttgaggctctcaagttctagag

SEQ ID NO: 3398601 - DNA, 25 bp, Homo sapien
gtgtacatggccacagtacagtctg

SEQ ID NO: 3398602 - DNA, 25 bp, Homo sapien
tgtggtgcatgcctttgtgtacatg

SEQ ID NO: 3398603 - DNA, 25 bp, Homo sapien
cttggtgtgttcagagggatgccat

SEQ ID NO: 3398604 - DNA, 25 bp, Homo sapien
tccttggtgtgttcagagggatgcc

SEQ ID NO: 3398605 - DNA, 25 bp, Homo sapien
ccttggtgtgttcagagggatgcca

SEQ ID NO: 3398606 - DNA, 25 bp, Homo sapien
tggtgtgttcagagggatgccatcc

SEQ ID NO: 3398607 - DNA, 25 bp, Homo sapien
ttggagtctctgaaggttcccactg

SEQ ID NO: 3398608 - DNA, 25 bp, Homo sapien
tgggttttggagtctctgaaggttc

SEQ ID NO: 3398609 - DNA, 25 bp, Homo sapien
tcatttgggttttggagtctctgaa

SEQ ID NO: 3398610 - DNA, 25 bp, Homo sapien
tctgaaggttcccactggcctgtcc

SEQ ID NO: 3398611 - DNA, 25 bp, Homo sapien
gtcttggtgagactccagatgcttc

SEQ ID NO: 3398612 - DNA, 25 bp, Homo sapien
tctttgtggaaaggtagatgctcag

SEQ ID NO: 3398613 - DNA, 25 bp, Homo sapien
tctctcagacacgacacttgctgta

SEQ ID NO: 3398614 - DNA, 25 bp, Homo sapien
cagagaatgcaagacactggtcccc

SEQ ID NO: 3398615 - DNA, 25 bp, Homo sapien
agccactgcactggcccagttttca

SEQ ID NO: 3398616 - DNA, 25 bp, Homo sapien
ccactgcactggcccagttttcact

SEQ ID NO: 3398617 - DNA, 25 bp, Homo sapien
gccactgcactggcccagttttcac

SEQ ID NO: 3398618 - DNA, 25 bp, Homo sapien
cactgcactggcccagttttcacta

SEQ ID NO: 3398619 - DNA, 25 bp, Homo sapien
aaatatcactgaaagtgtgggccct

SEQ ID NO: 3398620 - DNA, 25 bp, Homo sapien
ggccctgttcgatttcattaactgt

SEQ ID NO: 3398621 - DNA, 25 bp, Homo sapien
aatatcactgaaagtgtgggccctg

SEQ ID NO: 3398622 - DNA, 25 bp, Homo sapien
aaagtgtgggccctgttcgatttca

SEQ ID NO: 3398623 - DNA, 25 bp, Homo sapien
tacaggttagccttcagttgccctc

SEQ ID NO: 3398624 - DNA, 25 bp, Homo sapien
gacccgccgcatacaggttagcctt

SEQ ID NO: 3398625 - DNA, 25 bp, Homo sapien
tgtgtttccctgaagtgctcaccat

SEQ ID NO: 3398626 - DNA, 25 bp, Homo sapien
gccctcctgcgtgcatgtggtccag

SEQ ID NO: 3398627 - DNA, 25 bp, Homo sapien
tggaaacctgcatgatttatgggtc

SEQ ID NO: 3398628 - DNA, 25 bp, Homo sapien
cctgcatgatttatgggtcctctgg

SEQ ID NO: 3398629 - DNA, 25 bp, Homo sapien
taactcccattagagcgccttgcct

SEQ ID NO: 3398630 - DNA, 25 bp, Homo sapien
gctcatggctagacagcaaccccca

SEQ ID NO: 3398631 - DNA, 25 bp, Homo sapien
tctcatgggggcgttgatgttccct

SEQ ID NO: 3398632 - DNA, 25 bp, Homo sapien
gatctcatgggggcgttgatgttcc

SEQ ID NO: 3398633 - DNA, 25 bp, Homo sapien
tcatgggggcgttgatgttccctag

SEQ ID NO: 3398634 - DNA, 25 bp, Homo sapien
actgagatctcatgggggcgttgat

SEQ ID NO: 3398635 - DNA, 25 bp, Homo sapien
tggttgcaactggatgcattgtgtc

SEQ ID NO: 3398636 - DNA, 25 bp, Homo sapien
aagagaaaaatccaatggttgcaac

SEQ ID NO: 3398637 - DNA, 25 bp, Homo sapien
tggtgacttgttggtttgtgagcac

SEQ ID NO: 3398638 - DNA, 25 bp, Homo sapien
cattgtgtctaatggtgacttgttg

SEQ ID NO: 3398639 - DNA, 25 bp, Homo sapien
cattggcattcttgtgaaggactgg

SEQ ID NO: 3398640 - DNA, 25 bp, Homo sapien
agcagtggtaggtagcacccttgcc

SEQ ID NO: 3398641 - DNA, 25 bp, Homo sapien
cacccttgccgtggacattggcatt

SEQ ID NO: 3398642 - DNA, 25 bp, Homo sapien
ttctgaatggaccagagcggcctgc

SEQ ID NO: 3398643 - DNA, 25 bp, Homo sapien
ttagcggagatcaggaggtgatttg

SEQ ID NO: 3398644 - DNA, 25 bp, Homo sapien
aggaggtgatttgcaggacagctct

SEQ ID NO: 3398645 - DNA, 25 bp, Homo sapien
gtcagccatgcatttgagtccagtg

SEQ ID NO: 3398646 - DNA, 25 bp, Homo sapien
cttaacacggaggaaccaggggatg

SEQ ID NO: 3398647 - DNA, 25 bp, Homo sapien
tcatctgccaccctccaaagtttgg

SEQ ID NO: 3398648 - DNA, 25 bp, Homo sapien
ttgaccatcatctgccaccctccaa

SEQ ID NO: 3398649 - DNA, 25 bp, Homo sapien
ccatcatctgccaccctccaaagtt

SEQ ID NO: 3398650 - DNA, 25 bp, Homo sapien
accatcatctgccaccctccaaagt

SEQ ID NO: 3398651 - DNA, 25 bp, Homo sapien
aaaggatggtgatatggaaacactg

SEQ ID NO: 3398652 - DNA, 25 bp, Homo sapien
ttagtggagtaatgtctggagagaa

SEQ ID NO: 3398653 - DNA, 25 bp, Homo sapien
ttacaacagcacaaggatatttcct

SEQ ID NO: 3398654 - DNA, 25 bp, Homo sapien
caggtctggaacatgtattagtgga

SEQ ID NO: 3398655 - DNA, 25 bp, Homo sapien
tctacctccagtgccttttcttgca

SEQ ID NO: 3398656 - DNA, 25 bp, Homo sapien
ctacctccagtgccttttcttgcat

SEQ ID NO: 3398657 - DNA, 25 bp, Homo sapien
cttctacctccagtgccttttcttg

SEQ ID NO: 3398658 - DNA, 25 bp, Homo sapien
ttctacctccagtgccttttcttgc

SEQ ID NO: 3398659 - DNA, 25 bp, Homo sapien
agggttgctccaaaggttggtggag

SEQ ID NO: 3398660 - DNA, 25 bp, Homo sapien
tagggttgctccaaaggttggtgga

SEQ ID NO: 3398661 - DNA, 25 bp, Homo sapien
tgtggggggaatgatggatcctggg

SEQ ID NO: 3398662 - DNA, 25 bp, Homo sapien
ggatcctgggacaagactggtttct

SEQ ID NO: 3398663 - DNA, 25 bp, Homo sapien
tgtccacaatagtggccaactccag

SEQ ID NO: 3398664 - DNA, 25 bp, Homo sapien
cacagttgggcccaattgtccacaa

SEQ ID NO: 3398665 - DNA, 25 bp, Homo sapien
gaccatttcccaaactacctgcgtg

SEQ ID NO: 3398666 - DNA, 25 bp, Homo sapien
caactccagcccttgtaatggcttt

SEQ ID NO: 3398667 - DNA, 25 bp, Homo sapien
gcattcaacatgacccccagaaggt

SEQ ID NO: 3398668 - DNA, 25 bp, Homo sapien
ggcattcaacatgacccccagaagg

SEQ ID NO: 3398669 - DNA, 25 bp, Homo sapien
attcaacatgacccccagaaggtac

SEQ ID NO: 3398670 - DNA, 25 bp, Homo sapien
ggggcattcaacatgacccccagaa

SEQ ID NO: 3398671 - DNA, 25 bp, Homo sapien
ttaccactattattaggacctctga

SEQ ID NO: 3398672 - DNA, 25 bp, Homo sapien
tctcaattgcttcagaacgtggaag

SEQ ID NO: 3398673 - DNA, 25 bp, Homo sapien
gaccaggtagccagtattaccacta

SEQ ID NO: 3398674 - DNA, 25 bp, Homo sapien
ggaagacagaaaggcacgattaagt

SEQ ID NO: 3398675 - DNA, 25 bp, Homo sapien
acattgagacttgatgctgaatgtc

SEQ ID NO: 3398676 - DNA, 25 bp, Homo sapien
cacattgagacttgatgctgaatgt

SEQ ID NO: 3398677 - DNA, 25 bp, Homo sapien
gctgtttgatataggtactacctgc

SEQ ID NO: 3398678 - DNA, 25 bp, Homo sapien
ctgcacgtcgtctttctcaaggctg

SEQ ID NO: 3398679 - DNA, 25 bp, Homo sapien
tctcaaggctgtttgatataggtac

SEQ ID NO: 3398680 - DNA, 25 bp, Homo sapien
gcacgtcgtctttctcaaggctgtt

SEQ ID NO: 3398681 - DNA, 25 bp, Homo sapien
tccaaatgtacccttccacgtgctt

SEQ ID NO: 3398682 - DNA, 25 bp, Homo sapien
tggatctcctgagttataagcccct

SEQ ID NO: 3398683 - DNA, 25 bp, Homo sapien
tataagcccctggaaaagacagagg

SEQ ID NO: 3398684 - DNA, 25 bp, Homo sapien
ggaaaagacagaggcgtccaaatgt

SEQ ID NO: 3398685 - DNA, 25 bp, Homo sapien
gatctggttcatgtaatggtgcctc

SEQ ID NO: 3398686 - DNA, 25 bp, Homo sapien
tccacagtcctgtttgaagaatgat

SEQ ID NO: 3398687 - DNA, 25 bp, Homo sapien
cctgaacttccaatatcttcaaact

SEQ ID NO: 3398688 - DNA, 25 bp, Homo sapien
tactccttagaatttatccctgagc

SEQ ID NO: 3398689 - DNA, 25 bp, Homo sapien
tcgccgggtccctttgcctaggcag

SEQ ID NO: 3398690 - DNA, 25 bp, Homo sapien
ttgtatttcgctgtgagaccctccg

SEQ ID NO: 3398691 - DNA, 25 bp, Homo sapien
ttaaagcggcgatggctccttccga

SEQ ID NO: 3398692 - DNA, 25 bp, Homo sapien
agaccctccggtgggcgcgattcac

SEQ ID NO: 3398693 - DNA, 25 bp, Homo sapien
cagccagagccccgcggtggcggcg

SEQ ID NO: 3398694 - DNA, 25 bp, Homo sapien
gcagccagagccccgcggtggcggc

SEQ ID NO: 3398695 - DNA, 25 bp, Homo sapien
agcagccagagccccgcggtggcgg

SEQ ID NO: 3398696 - DNA, 25 bp, Homo sapien
acctgggctcgctccgggactgccg

SEQ ID NO: 3398697 - DNA, 25 bp, Homo sapien
cgggcgccgtgggagtcggtcttcg

SEQ ID NO: 3398698 - DNA, 25 bp, Homo sapien
agggtgagcagcgcccggaaagttt

SEQ ID NO: 3398699 - DNA, 25 bp, Homo sapien
ctggctgacacgtgccacctgggct

SEQ ID NO: 3398700 - DNA, 25 bp, Homo sapien
acgcccccgtgcaccgcggcgctct

SEQ ID NO: 3398701 - DNA, 25 bp, Homo sapien
gaagacgcccccgtgcaccgcggcg

SEQ ID NO: 3398702 - DNA, 25 bp, Homo sapien
aggccgcggctccagaagacgcccc

SEQ ID NO: 3398703 - DNA, 25 bp, Homo sapien
ggctccagaagacgcccccgtgcac

SEQ ID NO: 3398704 - DNA, 25 bp, Homo sapien
tgaagaggttgcttacgagccggtc

SEQ ID NO: 3398705 - DNA, 25 bp, Homo sapien
taagtcggtccattgtactaggtcc

SEQ ID NO: 3398706 - DNA, 25 bp, Homo sapien
tcattgtccagaaagaccagcgccc

SEQ ID NO: 3398707 - DNA, 25 bp, Homo sapien
gaagttggccgtcaggtagtcgaaa

SEQ ID NO: 3398708 - DNA, 25 bp, Homo sapien
ctttgaaaggaaacagcgtgggatt

SEQ ID NO: 3398709 - DNA, 25 bp, Homo sapien
gaaacagcgtgggattgaaagaaag

SEQ ID NO: 3398710 - DNA, 25 bp, Homo sapien
cacctttgcgggtgggcgttggccg

SEQ ID NO: 3398711 - DNA, 25 bp, Homo sapien
acagtggcagaggcgaccgcccttc

SEQ ID NO: 3398712 - DNA, 25 bp, Homo sapien
aatgttacacttctcgcctcggtga

SEQ ID NO: 3398713 - DNA, 25 bp, Homo sapien
gtggagagaatgttacacttctcgc

SEQ ID NO: 3398714 - DNA, 25 bp, Homo sapien
ttctcgcctcggtgagttcgtcctc

SEQ ID NO: 3398715 - DNA, 25 bp, Homo sapien
cctcggtgagttcgtcctcccagaa

SEQ ID NO: 3398716 - DNA, 25 bp, Homo sapien
ccccagtagccagtttcttcggatc

SEQ ID NO: 3398717 - DNA, 25 bp, Homo sapien
ttcggatccaatccccgtgctggca

SEQ ID NO: 3398718 - DNA, 25 bp, Homo sapien
gggcccaagaatggggtgcatctcc

SEQ ID NO: 3398719 - DNA, 25 bp, Homo sapien
cgtgctggcacagtaaagaatcctt

SEQ ID NO: 3398720 - DNA, 25 bp, Homo sapien
tttggtagaaaattgcagaattagc

SEQ ID NO: 3398721 - DNA, 25 bp, Homo sapien
gtttggtagaaaattgcagaattag

SEQ ID NO: 3398722 - DNA, 25 bp, Homo sapien
tgtttggtagaaaattgcagaatta

SEQ ID NO: 3398723 - DNA, 25 bp, Homo sapien
ctgtttggtagaaaattgcagaatt

SEQ ID NO: 3398724 - DNA, 25 bp, Homo sapien
gagaacacaggaagggggctccacc

SEQ ID NO: 3398725 - DNA, 25 bp, Homo sapien
tggaacaaagggagaacacaggaag

SEQ ID NO: 3398726 - DNA, 25 bp, Homo sapien
tccaccagccaatgtcacagccctg

SEQ ID NO: 3398727 - DNA, 25 bp, Homo sapien
gccctgctccggggccaccagcgct

SEQ ID NO: 3398728 - DNA, 25 bp, Homo sapien
caggaatgagtcaggcaaattgtca

SEQ ID NO: 3398729 - DNA, 25 bp, Homo sapien
tctctttgtcctatcgcgagccgtc

SEQ ID NO: 3398730 - DNA, 25 bp, Homo sapien
tgctctctttgtcctatcgcgagcc

SEQ ID NO: 3398731 - DNA, 25 bp, Homo sapien
gaatgagtcaggcaaattgtcaagg

SEQ ID NO: 3398732 - DNA, 25 bp, Homo sapien
atatttacaccacactttatgcaca

SEQ ID NO: 3398733 - DNA, 25 bp, Homo sapien
aaattcattatttgacttagtgcat

SEQ ID NO: 3398734 - DNA, 25 bp, Homo sapien
tcatcgttgtcaaaattttggtcgg

SEQ ID NO: 3398735 - DNA, 25 bp, Homo sapien
ttccttctggtgaacatcatcgttg

SEQ ID NO: 3398736 - DNA, 25 bp, Homo sapien
gatttggcttagcaaaaggcactga

SEQ ID NO: 3398737 - DNA, 25 bp, Homo sapien
caaagcactgtacgccttcatggtc

SEQ ID NO: 3398738 - DNA, 25 bp, Homo sapien
ggaccatgcacttagtacccagaaa

SEQ ID NO: 3398739 - DNA, 25 bp, Homo sapien
tgggcccagataccaaagaaaatgc

SEQ ID NO: 3398740 - DNA, 25 bp, Homo sapien
ttgctgaatacttgtcctgttcttg

SEQ ID NO: 3398741 - DNA, 25 bp, Homo sapien
ggttgctgaatacttgtcctgttct

SEQ ID NO: 3398742 - DNA, 25 bp, Homo sapien
gcaggttgctgaatacttgtcctgt

SEQ ID NO: 3398743 - DNA, 25 bp, Homo sapien
gctgaatacttgtcctgttcttgga

SEQ ID NO: 3398744 - DNA, 25 bp, Homo sapien
ggatgtatttcctgtgcaatctgtg

SEQ ID NO: 3398745 - DNA, 25 bp, Homo sapien
gctgaatcttcatgggatccaggat

SEQ ID NO: 3398746 - DNA, 25 bp, Homo sapien
ttcctgtgcaatctgtgaaacttct

SEQ ID NO: 3398747 - DNA, 25 bp, Homo sapien
gaaacttctaacttattactgctca

SEQ ID NO: 3398748 - DNA, 25 bp, Homo sapien
agctgtagcacaggcaggatgctga

SEQ ID NO: 3398749 - DNA, 25 bp, Homo sapien
gattgaaggtcaacgtgagggctat

SEQ ID NO: 3398750 - DNA, 25 bp, Homo sapien
cctaaatgtaacctgcagaggcact

SEQ ID NO: 3398751 - DNA, 25 bp, Homo sapien
tggacttcgcatagttgggagctgt

SEQ ID NO: 3398752 - DNA, 25 bp, Homo sapien
tttttctaagtcagctagtgggctc

SEQ ID NO: 3398753 - DNA, 25 bp, Homo sapien
ctgactgtgaacatactgatacttg

SEQ ID NO: 3398754 - DNA, 25 bp, Homo sapien
cattgcactccccacctaaaaataa

SEQ ID NO: 3398755 - DNA, 25 bp, Homo sapien
cagctagtgggctcagttcattgca

SEQ ID NO: 3398756 - DNA, 25 bp, Homo sapien
ccattcctgtggatatacttgccac

SEQ ID NO: 3398757 - DNA, 25 bp, Homo sapien
gtgagccggcgatcacgccacagca

SEQ ID NO: 3398758 - DNA, 25 bp, Homo sapien
gagcttgcggtgagccggcgatcac

SEQ ID NO: 3398759 - DNA, 25 bp, Homo sapien
gcggtgagccggcgatcacgccaca

SEQ ID NO: 3398760 - DNA, 25 bp, Homo sapien
agcttgcggtgagccggcgatcacg

SEQ ID NO: 3398761 - DNA, 25 bp, Homo sapien
agattggggcccctttctgataaca

SEQ ID NO: 3398762 - DNA, 25 bp, Homo sapien
tccttccttctaggtacagggcagg

SEQ ID NO: 3398763 - DNA, 25 bp, Homo sapien
cattccttccttctaggtacagggc

SEQ ID NO: 3398764 - DNA, 25 bp, Homo sapien
ctgataacaataacagactgagtgg

SEQ ID NO: 3398765 - DNA, 25 bp, Homo sapien
ttttcacagtagcatcatttgccat

SEQ ID NO: 3398766 - DNA, 25 bp, Homo sapien
gatgatgttttgctgggaatgtcct

SEQ ID NO: 3398767 - DNA, 25 bp, Homo sapien
acagtagcatcatttgccatctggg

SEQ ID NO: 3398768 - DNA, 25 bp, Homo sapien
tcacagtagcatcatttgccatctg

SEQ ID NO: 3398769 - DNA, 25 bp, Homo sapien
tttcccccagctcatttctctggaa

SEQ ID NO: 3398770 - DNA, 25 bp, Homo sapien
gttccaattccatacacatttctgt

SEQ ID NO: 3398771 - DNA, 25 bp, Homo sapien
ctgtgtctgcttttgaaacatgaat

SEQ ID NO: 3398772 - DNA, 25 bp, Homo sapien
ttgaaacatgaattgaagcaccatt

SEQ ID NO: 3398773 - DNA, 25 bp, Homo sapien
tctccagaagcaggaattgggctcc

SEQ ID NO: 3398774 - DNA, 25 bp, Homo sapien
ttgtgccaatttgtcgccgcccgtc

SEQ ID NO: 3398775 - DNA, 25 bp, Homo sapien
agttttcacggccactaggctggtg

SEQ ID NO: 3398776 - DNA, 25 bp, Homo sapien
tccctccctggaagtgtcaacttga

SEQ ID NO: 3398777 - DNA, 25 bp, Homo sapien
accagggagagatcgcggcagccgc

SEQ ID NO: 3398778 - DNA, 25 bp, Homo sapien
agggagagatcgcggcagccgccgg

SEQ ID NO: 3398779 - DNA, 25 bp, Homo sapien
taccagggagagatcgcggcagccg

SEQ ID NO: 3398780 - DNA, 25 bp, Homo sapien
ccagggagagatcgcggcagccgcc

SEQ ID NO: 3398781 - DNA, 25 bp, Homo sapien
ttccttccgcgcggcctcacttcct

SEQ ID NO: 3398782 - DNA, 25 bp, Homo sapien
tgcgcttcctctgccgcgcaaggca

SEQ ID NO: 3398783 - DNA, 25 bp, Homo sapien
gcagcaaagaccctttccgccggct

SEQ ID NO: 3398784 - DNA, 25 bp, Homo sapien
cgccgcgtctcgaagcgggacctgg

SEQ ID NO: 3398785 - DNA, 25 bp, Homo sapien
ctgtgacgcggccaaggcctcgggg

SEQ ID NO: 3398786 - DNA, 25 bp, Homo sapien
gcactcgtcacacgtgccgtcgtga

SEQ ID NO: 3398787 - DNA, 25 bp, Homo sapien
gtcgggctcgcactcgtcacacgtg

SEQ ID NO: 3398788 - DNA, 25 bp, Homo sapien
cacacgtgccgtcgtgaggcagttc

SEQ ID NO: 3398789 - DNA, 25 bp, Homo sapien
tgaggcagttcctcgaaggccgcgc

SEQ ID NO: 3398790 - DNA, 25 bp, Homo sapien
gcgcctcggcatggcggcggcagta

SEQ ID NO: 3398791 - DNA, 25 bp, Homo sapien
gcagtagcagaagccgcattctcgg

SEQ ID NO: 3398792 - DNA, 25 bp, Homo sapien
cggcagtagcagaagccgcattctc

SEQ ID NO: 3398793 - DNA, 25 bp, Homo sapien
tctgcctgtgcgcctcggcatggcg

SEQ ID NO: 3398794 - DNA, 25 bp, Homo sapien
ttcctccgactcactctcttcccct

SEQ ID NO: 3398795 - DNA, 25 bp, Homo sapien
tcccctgcctcgctttctatctccc

SEQ ID NO: 3398796 - DNA, 25 bp, Homo sapien
ttggttgtcttcttcggcctcgctt

SEQ ID NO: 3398797 - DNA, 25 bp, Homo sapien
ttcactctcctcatcgctctcatcc

SEQ ID NO: 3398798 - DNA, 25 bp, Homo sapien
ctggcaataggtactcaaatcaagc

SEQ ID NO: 3398799 - DNA, 25 bp, Homo sapien
tcaaatcaagcccatggtccggaca

SEQ ID NO: 3398800 - DNA, 25 bp, Homo sapien
tggtccggacacttcctcttggcca

SEQ ID NO: 3398801 - DNA, 25 bp, Homo sapien
aaatcaagcccatggtccggacact

SEQ ID NO: 3398802 - DNA, 25 bp, Homo sapien
tcaaaggcttcgtctagggtggaga

SEQ ID NO: 3398803 - DNA, 25 bp, Homo sapien
ctggtgagccccaatgactggacac

SEQ ID NO: 3398804 - DNA, 25 bp, Homo sapien
ttcttcaaaggcttcgtctagggtg

SEQ ID NO: 3398805 - DNA, 25 bp, Homo sapien
cctggtgagccccaatgactggaca

SEQ ID NO: 3398806 - DNA, 25 bp, Homo sapien
tactccccgtatcaagactaaagct

SEQ ID NO: 3398807 - DNA, 25 bp, Homo sapien
cccgtatcaagactaaagcttctgt

SEQ ID NO: 3398808 - DNA, 25 bp, Homo sapien
tatcaagactaaagcttctgtttca

SEQ ID NO: 3398809 - DNA, 25 bp, Homo sapien
tctctactccccgtatcaagactaa

SEQ ID NO: 3398810 - DNA, 25 bp, Homo sapien
tctccacttccatagcatactgttt

SEQ ID NO: 3398811 - DNA, 25 bp, Homo sapien
catagcatactgtttgtaccttttc

SEQ ID NO: 3398812 - DNA, 25 bp, Homo sapien
cacttccatagcatactgtttgtac

SEQ ID NO: 3398813 - DNA, 25 bp, Homo sapien
aaagactccttcctctaagaatcta

SEQ ID NO: 3398814 - DNA, 25 bp, Homo sapien
ccatgaaaattggggtgcctttctt

SEQ ID NO: 3398815 - DNA, 25 bp, Homo sapien
caccatgaaaattggggtgcctttc

SEQ ID NO: 3398816 - DNA, 25 bp, Homo sapien
accatgaaaattggggtgcctttct

SEQ ID NO: 3398817 - DNA, 25 bp, Homo sapien
ccaattcgatcatagcggccttcag

SEQ ID NO: 3398818 - DNA, 25 bp, Homo sapien
aacctttccaccaattcgatcatag

SEQ ID NO: 3398819 - DNA, 25 bp, Homo sapien
tgaacttcaacctttccaccaattc

SEQ ID NO: 3398820 - DNA, 25 bp, Homo sapien
tttccaccaattcgatcatagcggc

SEQ ID NO: 3398821 - DNA, 25 bp, Homo sapien
taatcttcttccacgatatagaggg

SEQ ID NO: 3398822 - DNA, 25 bp, Homo sapien
caaacacattaggacagcgtattat

SEQ ID NO: 3398823 - DNA, 25 bp, Homo sapien
gatgcccagaggtatgtacccttta

SEQ ID NO: 3398824 - DNA, 25 bp, Homo sapien
aaaacagggctcaccacagcaacat

SEQ ID NO: 3398825 - DNA, 25 bp, Homo sapien
atcctgcttgtgcaataggtgtttc

SEQ ID NO: 3398826 - DNA, 25 bp, Homo sapien
cctgcttgtgcaataggtgtttcag

SEQ ID NO: 3398827 - DNA, 25 bp, Homo sapien
tacagataagaatcctgcttgtgca

SEQ ID NO: 3398828 - DNA, 25 bp, Homo sapien
tcaatctacagataagaatcctgct

SEQ ID NO: 3398829 - DNA, 25 bp, Homo sapien
gataactgcatagtcactacaaagg

SEQ ID NO: 3398830 - DNA, 25 bp, Homo sapien
tacataatagagagaaagtggctgt

SEQ ID NO: 3398831 - DNA, 25 bp, Homo sapien
aatcaacgtgttttccaagcctagg

SEQ ID NO: 3398832 - DNA, 25 bp, Homo sapien
caagcctaggttacctctgagtaaa

SEQ ID NO: 3398833 - DNA, 25 bp, Homo sapien
ctaatttcatgctgctagataattt

SEQ ID NO: 3398834 - DNA, 25 bp, Homo sapien
actaatttcatgctgctagataatt

SEQ ID NO: 3398835 - DNA, 25 bp, Homo sapien
taatttcatgctgctagataatttt

SEQ ID NO: 3398836 - DNA, 25 bp, Homo sapien
actcatgatctccaaaattccctac

SEQ ID NO: 3398837 - DNA, 25 bp, Homo sapien
tatgtaacaacttgatagctgaggc

SEQ ID NO: 3398838 - DNA, 25 bp, Homo sapien
tccagaaatgggtcaataattctag

SEQ ID NO: 3398839 - DNA, 25 bp, Homo sapien
ggaacacttctatatgtaacaactt

SEQ ID NO: 3398840 - DNA, 25 bp, Homo sapien
ttgttttgataaagccaggggaatg

SEQ ID NO: 3398841 - DNA, 25 bp, Homo sapien
aataggctttggttagattattttg

SEQ ID NO: 3398842 - DNA, 25 bp, Homo sapien
tgttcagtaggttggatgtactaaa

SEQ ID NO: 3398843 - DNA, 25 bp, Homo sapien
agtgtcctgcacacgtttaaggtag

SEQ ID NO: 3398844 - DNA, 25 bp, Homo sapien
taatcggctctatagcggattcttc

SEQ ID NO: 3398845 - DNA, 25 bp, Homo sapien
tttagaggattaatgaagagactgc

SEQ ID NO: 3398846 - DNA, 25 bp, Homo sapien
atctgtgtatgtgcagctgttggca

SEQ ID NO: 3398847 - DNA, 25 bp, Homo sapien
gaaacgtatcccacgtaatcggctc

SEQ ID NO: 3398848 - DNA, 25 bp, Homo sapien
gcttattatattaggccttagaaac

SEQ ID NO: 3398849 - DNA, 25 bp, Homo sapien
gaaccccaggaattggaaatggata

SEQ ID NO: 3398850 - DNA, 25 bp, Homo sapien
ggccctgttcttccaaggactccac

SEQ ID NO: 3398851 - DNA, 25 bp, Homo sapien
actgcatgctttcccggccctgttc

SEQ ID NO: 3398852 - DNA, 25 bp, Homo sapien
caaaaatgtccactgatacggcaga

SEQ ID NO: 3398853 - DNA, 25 bp, Homo sapien
acggcagattccgttcataggcatc

SEQ ID NO: 3398854 - DNA, 25 bp, Homo sapien
tcacagctggcgctcaataaagatg

SEQ ID NO: 3398855 - DNA, 25 bp, Homo sapien
taaagatgcgttctccttttaaaca

SEQ ID NO: 3398856 - DNA, 25 bp, Homo sapien
gggttcaagatatgctatcccaaaa

SEQ ID NO: 3398857 - DNA, 25 bp, Homo sapien
aaaatacgcctctttggcagaagaa

SEQ ID NO: 3398858 - DNA, 25 bp, Homo sapien
aaaagaaaccccattgctattagca

SEQ ID NO: 3398859 - DNA, 25 bp, Homo sapien
ctgtaggaggccagaatattccatc

SEQ ID NO: 3398860 - DNA, 25 bp, Homo sapien
ggtgctgtggttcaattaggaggtc

SEQ ID NO: 3398861 - DNA, 25 bp, Homo sapien
gtctggggctccagtaagaaagaga

SEQ ID NO: 3398862 - DNA, 25 bp, Homo sapien
ggggctccagtaagaaagagaagga

SEQ ID NO: 3398863 - DNA, 25 bp, Homo sapien
tgctgtggttcaattaggaggtctg

SEQ ID NO: 3398864 - DNA, 25 bp, Homo sapien
gactggcaagcaccccttaacgtga

SEQ ID NO: 3398865 - DNA, 25 bp, Homo sapien
gcttgttcacactgtcagctgctat

SEQ ID NO: 3398866 - DNA, 25 bp, Homo sapien
tgatgtgtaacccagtgacatgaca

SEQ ID NO: 3398867 - DNA, 25 bp, Homo sapien
tggatgtctaaccactatgactgtg

SEQ ID NO: 3398868 - DNA, 25 bp, Homo sapien
ccactaccaacattctcagtgatgt

SEQ ID NO: 3398869 - DNA, 25 bp, Homo sapien
gaaacacggtagacataaactctga

SEQ ID NO: 3398870 - DNA, 25 bp, Homo sapien
tctgaacagcattccactaccaaca

SEQ ID NO: 3398871 - DNA, 25 bp, Homo sapien
ttattcagcagcctagaaacacggt

SEQ ID NO: 3398872 - DNA, 25 bp, Homo sapien
gagaaactctcttaatggctaccag

SEQ ID NO: 3398873 - DNA, 25 bp, Homo sapien
gaagctgacatctcacttagtaaag

SEQ ID NO: 3398874 - DNA, 25 bp, Homo sapien
actgcagcaggtgaatgagtcatgg

SEQ ID NO: 3398875 - DNA, 25 bp, Homo sapien
tacacatgtggttcagttaggaagc

SEQ ID NO: 3398876 - DNA, 25 bp, Homo sapien
ccatgtgggattggatgtctgccag

SEQ ID NO: 3398877 - DNA, 25 bp, Homo sapien
gagtcatcaacctatccatgtggga

SEQ ID NO: 3398878 - DNA, 25 bp, Homo sapien
gccattgcctcttggatgtccacta

SEQ ID NO: 3398879 - DNA, 25 bp, Homo sapien
tgtccactagatgaagggccttctg

SEQ ID NO: 3398880 - DNA, 25 bp, Homo sapien
gggtctaacaaatatggcatcagtt

SEQ ID NO: 3398881 - DNA, 25 bp, Homo sapien
aattcattcacgttcagggaccaca

SEQ ID NO: 3398882 - DNA, 25 bp, Homo sapien
ctagacttcaattcattcacgttca

SEQ ID NO: 3398883 - DNA, 25 bp, Homo sapien
tctcttgctactaataattatgggc

SEQ ID NO: 3398884 - DNA, 25 bp, Homo sapien
taaaagccctcagcacattaggaat

SEQ ID NO: 3398885 - DNA, 25 bp, Homo sapien
agtattctccttaccaaactggaca

SEQ ID NO: 3398886 - DNA, 25 bp, Homo sapien
ggccaaatgggactttatctcagaa

SEQ ID NO: 3398887 - DNA, 25 bp, Homo sapien
tgaacccagattatacatcatggcc

SEQ ID NO: 3398888 - DNA, 25 bp, Homo sapien
tgagagcggaagcaacctgcagaaa

SEQ ID NO: 3398889 - DNA, 25 bp, Homo sapien
gcaagacactccagctagtagagag

SEQ ID NO: 3398890 - DNA, 25 bp, Homo sapien
taccagtttgagaggcatcagacag

SEQ ID NO: 3398891 - DNA, 25 bp, Homo sapien
tcccaggttagaggaacaagaccag

SEQ ID NO: 3398892 - DNA, 25 bp, Homo sapien
gtacacttcaccctttacaagctgg

SEQ ID NO: 3398893 - DNA, 25 bp, Homo sapien
ttctagtctagtctcctaccccagg

SEQ ID NO: 3398894 - DNA, 25 bp, Homo sapien
ctaccccaggccagtcatgcagtta

SEQ ID NO: 3398895 - DNA, 25 bp, Homo sapien
aagctggactcaacccaccttctag

SEQ ID NO: 3398896 - DNA, 25 bp, Homo sapien
tagtcaagaggtaaagcgtaacaga

SEQ ID NO: 3398897 - DNA, 25 bp, Homo sapien
tttacccataacaaatcatgagatg

SEQ ID NO: 3398898 - DNA, 25 bp, Homo sapien
agtaacaacttctggtgcctcaaca

SEQ ID NO: 3398899 - DNA, 25 bp, Homo sapien
tgcttagttttccaactaaaagagc

SEQ ID NO: 3398900 - DNA, 25 bp, Homo sapien
tatgtacagttgtgcacagggtgct

SEQ ID NO: 3398901 - DNA, 25 bp, Homo sapien
ggattgtaacccactgatgagctgg

SEQ ID NO: 3398902 - DNA, 25 bp, Homo sapien
tggtaaccctgtatccatggcagat

SEQ ID NO: 3398903 - DNA, 25 bp, Homo sapien
tagttcacgccaaggtatcatggac

SEQ ID NO: 3398904 - DNA, 25 bp, Homo sapien
tcccagtccgggccactgtgtgtgg

SEQ ID NO: 3398905 - DNA, 25 bp, Homo sapien
gaactggtgtgtctaaattgtcata

SEQ ID NO: 3398906 - DNA, 25 bp, Homo sapien
gcaatgaaatggcatcctggccagg

SEQ ID NO: 3398907 - DNA, 25 bp, Homo sapien
attgtcatagtctgagtgagtgtgg

SEQ ID NO: 3398908 - DNA, 25 bp, Homo sapien
caaaaaactccaccagcatatgctg

SEQ ID NO: 3398909 - DNA, 25 bp, Homo sapien
gcttctggataaagaggtaactgca

SEQ ID NO: 3398910 - DNA, 25 bp, Homo sapien
ttgcctgcctctcactgggaaaaaa

SEQ ID NO: 3398911 - DNA, 25 bp, Homo sapien
aatagaattactgacctcttgcctg

SEQ ID NO: 3398912 - DNA, 25 bp, Homo sapien
cattcatgtttaggtcctgggtcca

SEQ ID NO: 3398913 - DNA, 25 bp, Homo sapien
aaatctgcactcatcgactctgaac

SEQ ID NO: 3398914 - DNA, 25 bp, Homo sapien
gaatttgcctcatggtttgtaaaac

SEQ ID NO: 3398915 - DNA, 25 bp, Homo sapien
gctgaactccctgcttatagacaag

SEQ ID NO: 3398916 - DNA, 25 bp, Homo sapien
caactgagactcactgtttcaaagt

SEQ ID NO: 3398917 - DNA, 25 bp, Homo sapien
tctacagttatatccctagcaccaa

SEQ ID NO: 3398918 - DNA, 25 bp, Homo sapien
tgaaggctgggactttgaatgtttt

SEQ ID NO: 3398919 - DNA, 25 bp, Homo sapien
gaatgaagcaggtgctctaaaaact

SEQ ID NO: 3398920 - DNA, 25 bp, Homo sapien
ggagatttccatttacagctacaag

SEQ ID NO: 3398921 - DNA, 25 bp, Homo sapien
tgtggtaagcgccatgaaaacaagg

SEQ ID NO: 3398922 - DNA, 25 bp, Homo sapien
gccttttgcatcacgaccctgtatt

SEQ ID NO: 3398923 - DNA, 25 bp, Homo sapien
catgaatgttttagtaggctgccga

SEQ ID NO: 3398924 - DNA, 25 bp, Homo sapien
gctcagacagtccactgttctccag

SEQ ID NO: 3398925 - DNA, 25 bp, Homo sapien
catcatgtacaaggtacacaagcct

SEQ ID NO: 3398926 - DNA, 25 bp, Homo sapien
agcctgcacggtcactggctcagac

SEQ ID NO: 3398927 - DNA, 25 bp, Homo sapien
ccagtctcatcatgtacaaggtaca

SEQ ID NO: 3398928 - DNA, 25 bp, Homo sapien
tgtgcttatccaagtccagaatgtc

SEQ ID NO: 3398929 - DNA, 25 bp, Homo sapien
actgtgcttatccaagtccagaatg

SEQ ID NO: 3398930 - DNA, 25 bp, Homo sapien
cttatccaagtccagaatgtcaaga

SEQ ID NO: 3398931 - DNA, 25 bp, Homo sapien
tgctactgtgcttatccaagtccag

SEQ ID NO: 3398932 - DNA, 25 bp, Homo sapien
aactgtgatgtgatgccgaacgggt

SEQ ID NO: 3398933 - DNA, 25 bp, Homo sapien
actgtgatgtgatgccgaacgggtt

SEQ ID NO: 3398934 - DNA, 25 bp, Homo sapien
tcctctttgataattgtactctcct

SEQ ID NO: 3398935 - DNA, 25 bp, Homo sapien
aaggtgcaaaccgtcttcctctttg

SEQ ID NO: 3398936 - DNA, 25 bp, Homo sapien
gcaaaccgtcttcctctttgataat

SEQ ID NO: 3398937 - DNA, 25 bp, Homo sapien
taattgtactctcctactggcaaag

SEQ ID NO: 3398938 - DNA, 25 bp, Homo sapien
agaaacaaggctagactgtgacctc

SEQ ID NO: 3398939 - DNA, 25 bp, Homo sapien
ggtgcgagcaccataagactcctct

SEQ ID NO: 3398940 - DNA, 25 bp, Homo sapien
gagccaactgtatgtccagccctag

SEQ ID NO: 3398941 - DNA, 25 bp, Homo sapien
gaacatgcacatcagaatgctggat

SEQ ID NO: 3398942 - DNA, 25 bp, Homo sapien
agccaccgtgcgcatccaaaactaa

SEQ ID NO: 3398943 - DNA, 25 bp, Homo sapien
caccgtgcgcatccaaaactaaatg

SEQ ID NO: 3398944 - DNA, 25 bp, Homo sapien
gtgcgcatccaaaactaaatgcttt

SEQ ID NO: 3398945 - DNA, 25 bp, Homo sapien
ccgtgcgcatccaaaactaaatgct

SEQ ID NO: 3398946 - DNA, 25 bp, Homo sapien
cctaaagtatgtggttctctcagca

SEQ ID NO: 3398947 - DNA, 25 bp, Homo sapien
tgactctggcatatctggatcctga

SEQ ID NO: 3398948 - DNA, 25 bp, Homo sapien
gaagtaagattactagccccgctgc

SEQ ID NO: 3398949 - DNA, 25 bp, Homo sapien
tgaatacagtgagtcgctcctcagg

SEQ ID NO: 3398950 - DNA, 25 bp, Homo sapien
cttgcacaggttcactgataggcat

SEQ ID NO: 3398951 - DNA, 25 bp, Homo sapien
aaagaaacctgcttgcacaggttca

SEQ ID NO: 3398952 - DNA, 25 bp, Homo sapien
cctgcttgcacaggttcactgatag

SEQ ID NO: 3398953 - DNA, 25 bp, Homo sapien
gaaacctgcttgcacaggttcactg

SEQ ID NO: 3398954 - DNA, 25 bp, Homo sapien
ccctcaacattgaaggccacgtcag

SEQ ID NO: 3398955 - DNA, 25 bp, Homo sapien
aggccacgtcagtgtgaggctgata

SEQ ID NO: 3398956 - DNA, 25 bp, Homo sapien
cacgtcagtgtgaggctgatagatg

SEQ ID NO: 3398957 - DNA, 25 bp, Homo sapien
cctcaacattgaaggccacgtcagt

SEQ ID NO: 3398958 - DNA, 25 bp, Homo sapien
tttggtaaagaacagtacaacacca

SEQ ID NO: 3398959 - DNA, 25 bp, Homo sapien
acagataatccttgaatctctgtgg

SEQ ID NO: 3398960 - DNA, 25 bp, Homo sapien
ggcagctccagttctaaactcctcc

SEQ ID NO: 3398961 - DNA, 25 bp, Homo sapien
cagctccagttctaaactcctcctt

SEQ ID NO: 3398962 - DNA, 25 bp, Homo sapien
tagtctggtcaccattagatgaccc

SEQ ID NO: 3398963 - DNA, 25 bp, Homo sapien
ctctccttgtactgcagttcagtgc

SEQ ID NO: 3398964 - DNA, 25 bp, Homo sapien
tcagtgctgtcagatgagagacagc

SEQ ID NO: 3398965 - DNA, 25 bp, Homo sapien
gacagcactagtctggtcaccatta

SEQ ID NO: 3398966 - DNA, 25 bp, Homo sapien
catcttggttcttgtgggctccagc

SEQ ID NO: 3398967 - DNA, 25 bp, Homo sapien
cagtcatgtaaaagggcctgccacc

SEQ ID NO: 3398968 - DNA, 25 bp, Homo sapien
gaacttaggacagaatctcgttggg

SEQ ID NO: 3398969 - DNA, 25 bp, Homo sapien
taactgcagccggtcatgactctcc

SEQ ID NO: 3398970 - DNA, 25 bp, Homo sapien
gcaacacccatttcctctgaaactg

SEQ ID NO: 3398971 - DNA, 25 bp, Homo sapien
cacccatttcctctgaaactgctat

SEQ ID NO: 3398972 - DNA, 25 bp, Homo sapien
ctgcaacacccatttcctctgaaac

SEQ ID NO: 3398973 - DNA, 25 bp, Homo sapien
aacacccatttcctctgaaactgct

SEQ ID NO: 3398974 - DNA, 25 bp, Homo sapien
tctcaagcagtttccttccatagaa

SEQ ID NO: 3398975 - DNA, 25 bp, Homo sapien
caaatctctctcaagcagtttcctt

SEQ ID NO: 3398976 - DNA, 25 bp, Homo sapien
atctctctcaagcagtttccttcca

SEQ ID NO: 3398977 - DNA, 25 bp, Homo sapien
tctctcaagcagtttccttccatag

SEQ ID NO: 3398978 - DNA, 25 bp, Homo sapien
ccagtttcctcatcttcttttggca

SEQ ID NO: 3398979 - DNA, 25 bp, Homo sapien
caggaaatccacctgacccagtttc

SEQ ID NO: 3398980 - DNA, 25 bp, Homo sapien
cagtttcctcatcttcttttggcat

SEQ ID NO: 3398981 - DNA, 25 bp, Homo sapien
cttcaggaaatccacctgacccagt

SEQ ID NO: 3398982 - DNA, 25 bp, Homo sapien
tcatacctaatattgggcatttaaa

SEQ ID NO: 3398983 - DNA, 25 bp, Homo sapien
cacatcattgtggatgaatcatcct

SEQ ID NO: 3398984 - DNA, 25 bp, Homo sapien
caatcatgaatgtcatatcaagaaa

SEQ ID NO: 3398985 - DNA, 25 bp, Homo sapien
ttttcactattacccacatctctgt

SEQ ID NO: 3398986 - DNA, 25 bp, Homo sapien
tattgacaaggaacgaaggctagag

SEQ ID NO: 3398987 - DNA, 25 bp, Homo sapien
tgggagctcctaaattctgaccagg

SEQ ID NO: 3398988 - DNA, 25 bp, Homo sapien
taataaatcaggtagcaggcattct

SEQ ID NO: 3398989 - DNA, 25 bp, Homo sapien
tatgtcagtgagcacacccttagca

SEQ ID NO: 3398990 - DNA, 25 bp, Homo sapien
gaacaagtgtgttcctatccccaaa

SEQ ID NO: 3398991 - DNA, 25 bp, Homo sapien
gaaatgctatcttccagggttactg

SEQ ID NO: 3398992 - DNA, 25 bp, Homo sapien
cagacagcacgttctatagcaggta

SEQ ID NO: 3398993 - DNA, 25 bp, Homo sapien
gctctggcagctgaaacattacatt

SEQ ID NO: 3398994 - DNA, 25 bp, Homo sapien
catgtgtcctcttcttcactggcac

SEQ ID NO: 3398995 - DNA, 25 bp, Homo sapien
atgtgtcctcttcttcactggcacc

SEQ ID NO: 3398996 - DNA, 25 bp, Homo sapien
tcatgtgtcctcttcttcactggca

SEQ ID NO: 3398997 - DNA, 25 bp, Homo sapien
tgtgtcctcttcttcactggcacca

SEQ ID NO: 3398998 - DNA, 25 bp, Homo sapien
tcacagaaatcagaagccgttacat

SEQ ID NO: 3398999 - DNA, 25 bp, Homo sapien
gcataaaactggtcatcccttggag

SEQ ID NO: 3399000 - DNA, 25 bp, Homo sapien
ggaagtacgtttgttgctgagcagc

SEQ ID NO: 3399001 - DNA, 25 bp, Homo sapien
tcccttggagagatatgtgcctgct

SEQ ID NO: 3399002 - DNA, 25 bp, Homo sapien
ctgaaggacctttcttaattgctcc

SEQ ID NO: 3399003 - DNA, 25 bp, Homo sapien
ttaattgctcctggtggatcaaagg

SEQ ID NO: 3399004 - DNA, 25 bp, Homo sapien
aaggacctttcttaattgctcctgg

SEQ ID NO: 3399005 - DNA, 25 bp, Homo sapien
tggtggatcaaaggggctcttttcc

SEQ ID NO: 3399006 - DNA, 25 bp, Homo sapien
aataggcagggagaaaactctgact

SEQ ID NO: 3399007 - DNA, 25 bp, Homo sapien
ggacttttagggactgtccacaaga

SEQ ID NO: 3399008 - DNA, 25 bp, Homo sapien
gatccttcctaacaaagcgatactg

SEQ ID NO: 3399009 - DNA, 25 bp, Homo sapien
tttcctgagtaagttcaaagcagcc

SEQ ID NO: 3399010 - DNA, 25 bp, Homo sapien
taaattttttcgagagtggccactg

SEQ ID NO: 3399011 - DNA, 25 bp, Homo sapien
tgtgacaagcccataaaacctgcag

SEQ ID NO: 3399012 - DNA, 25 bp, Homo sapien
tattatctaagagacagctcagggc

SEQ ID NO: 3399013 - DNA, 25 bp, Homo sapien
cattgataaatgctgccggcaggaa

SEQ ID NO: 3399014 - DNA, 25 bp, Homo sapien
tccagaatcaagaactgcctgagtc

SEQ ID NO: 3399015 - DNA, 25 bp, Homo sapien
ccagaatcaagaactgcctgagtct

SEQ ID NO: 3399016 - DNA, 25 bp, Homo sapien
ctaaggagggaatgtgactgtgcac

SEQ ID NO: 3399017 - DNA, 25 bp, Homo sapien
cctcaaagtcatatcaagcccagta

SEQ ID NO: 3399018 - DNA, 25 bp, Homo sapien
cccagtatgggctccgtggcttttt

SEQ ID NO: 3399019 - DNA, 25 bp, Homo sapien
caagtccgaacatcctgggatagca

SEQ ID NO: 3399020 - DNA, 25 bp, Homo sapien
gtaatagtttattgatttccaaatg

SEQ ID NO: 3399021 - DNA, 25 bp, Homo sapien
taatagtttattgatttccaaatgc

SEQ ID NO: 3399022 - DNA, 25 bp, Homo sapien
atagtttattgatttccaaatgcac

SEQ ID NO: 3399023 - DNA, 25 bp, Homo sapien
cagtaatagtttattgatttccaaa

SEQ ID NO: 3399024 - DNA, 25 bp, Homo sapien
gcagggtcctttgtgcacaactctg

SEQ ID NO: 3399025 - DNA, 25 bp, Homo sapien
tcaagtatgcagctcgtcataaata

SEQ ID NO: 3399026 - DNA, 25 bp, Homo sapien
agggtcctttgtgcacaactctgag

SEQ ID NO: 3399027 - DNA, 25 bp, Homo sapien
cataaatatttacaccttgcagggt

SEQ ID NO: 3399028 - DNA, 25 bp, Homo sapien
taagagccagggaaagtagctaacc

SEQ ID NO: 3399029 - DNA, 25 bp, Homo sapien
catccaactgggtctaaaaggtctc

SEQ ID NO: 3399030 - DNA, 25 bp, Homo sapien
ccttgcctgggtaccaaatgggatg

SEQ ID NO: 3399031 - DNA, 25 bp, Homo sapien
cacaagtgggctaggtatactctca

SEQ ID NO: 3399032 - DNA, 25 bp, Homo sapien
tcttgaagaatgacccaagctgaga

SEQ ID NO: 3399033 - DNA, 25 bp, Homo sapien
tgactgccttgtgaactaggccagg

SEQ ID NO: 3399034 - DNA, 25 bp, Homo sapien
taggccaggtcccttatttgctctg

SEQ ID NO: 3399035 - DNA, 25 bp, Homo sapien
ccatttgacaatgggccaggtctga

SEQ ID NO: 3399036 - DNA, 25 bp, Homo sapien
tttgtgaagatgcaacactagggtc

SEQ ID NO: 3399037 - DNA, 25 bp, Homo sapien
aaagacagaagacggcacattgctc

SEQ ID NO: 3399038 - DNA, 25 bp, Homo sapien
tagtatcaggagcaagcttgtccca

SEQ ID NO: 3399039 - DNA, 25 bp, Homo sapien
tgtactaagccctgtagaccatctg

SEQ ID NO: 3399040 - DNA, 25 bp, Homo sapien
aagtacatggggatgtggtacagag

SEQ ID NO: 3399041 - DNA, 25 bp, Homo sapien
aaaaagtacatggggatgtggtaca

SEQ ID NO: 3399042 - DNA, 25 bp, Homo sapien
gtacatggggatgtggtacagaggg

SEQ ID NO: 3399043 - DNA, 25 bp, Homo sapien
aaagtacatggggatgtggtacaga

SEQ ID NO: 3399044 - DNA, 25 bp, Homo sapien
tcatgacaacaaagggcggatgttg

SEQ ID NO: 3399045 - DNA, 25 bp, Homo sapien
gaccctacccgtcattttaggcgca

SEQ ID NO: 3399046 - DNA, 25 bp, Homo sapien
gagcagtactagtctccatgaagtc

SEQ ID NO: 3399047 - DNA, 25 bp, Homo sapien
taagatcttaccgtgttagaggtgg

SEQ ID NO: 3399048 - DNA, 25 bp, Homo sapien
ctataaagaaacacctgagactgca

SEQ ID NO: 3399049 - DNA, 25 bp, Homo sapien
tataaagaaacacctgagactgcat

SEQ ID NO: 3399050 - DNA, 25 bp, Homo sapien
tgggagccaatcaggcaatagcttt

SEQ ID NO: 3399051 - DNA, 25 bp, Homo sapien
caaagtcacttgataggtgtgaaac

SEQ ID NO: 3399052 - DNA, 25 bp, Homo sapien
tgagctcttctagatgaagctcctt

SEQ ID NO: 3399053 - DNA, 25 bp, Homo sapien
tccatgagctcttctagatgaagct

SEQ ID NO: 3399054 - DNA, 25 bp, Homo sapien
ggcttagtgaagttggccacttcac

SEQ ID NO: 3399055 - DNA, 25 bp, Homo sapien
tgggcttagtgaagttggccacttc

SEQ ID NO: 3399056 - DNA, 25 bp, Homo sapien
ctgggcttagtgaagttggccactt

SEQ ID NO: 3399057 - DNA, 25 bp, Homo sapien
gggcttagtgaagttggccacttca

SEQ ID NO: 3399058 - DNA, 25 bp, Homo sapien
tcacagtcgtgagatgggattatac

SEQ ID NO: 3399059 - DNA, 25 bp, Homo sapien
taagtcatcctgattagcttcccag

SEQ ID NO: 3399060 - DNA, 25 bp, Homo sapien
ccagggtatcgttcaacaatgttcc

SEQ ID NO: 3399061 - DNA, 25 bp, Homo sapien
tttggctggagtgacacaaatccac

SEQ ID NO: 3399062 - DNA, 25 bp, Homo sapien
aggccctgctctcattaaagagaag

SEQ ID NO: 3399063 - DNA, 25 bp, Homo sapien
caggccctgctctcattaaagagaa

SEQ ID NO: 3399064 - DNA, 25 bp, Homo sapien
acaggccctgctctcattaaagaga

SEQ ID NO: 3399065 - DNA, 25 bp, Homo sapien
gctcagcagcaacaaggattgattt

SEQ ID NO: 3399066 - DNA, 25 bp, Homo sapien
tcaggttcaccagtgccgttgatgt

SEQ ID NO: 3399067 - DNA, 25 bp, Homo sapien
aggttcaccagtgccgttgatgtgc

SEQ ID NO: 3399068 - DNA, 25 bp, Homo sapien
ccctgctcagcagcaacaaggattg

SEQ ID NO: 3399069 - DNA, 25 bp, Homo sapien
gtggagtcataacgccagagctgcc

SEQ ID NO: 3399070 - DNA, 25 bp, Homo sapien
gagtcataacgccagagctgccagc

SEQ ID NO: 3399071 - DNA, 25 bp, Homo sapien
ctgtagggcgtggagtcataacgcc

SEQ ID NO: 3399072 - DNA, 25 bp, Homo sapien
tagggcgtggagtcataacgccaga

SEQ ID NO: 3399073 - DNA, 25 bp, Homo sapien
actctggacgggtggttggaaggct

SEQ ID NO: 3399074 - DNA, 25 bp, Homo sapien
tctggacgggtggttggaaggctcc

SEQ ID NO: 3399075 - DNA, 25 bp, Homo sapien
ctctggacgggtggttggaaggctc

SEQ ID NO: 3399076 - DNA, 25 bp, Homo sapien
aataatagcagaaagccaccctggg

SEQ ID NO: 3399077 - DNA, 25 bp, Homo sapien
caaacacccagcaaactgtaaagtg

SEQ ID NO: 3399078 - DNA, 25 bp, Homo sapien
tgggtactgcacatggtggctgctc

SEQ ID NO: 3399079 - DNA, 25 bp, Homo sapien
taaagtgctcagcaataatagcaga

SEQ ID NO: 3399080 - DNA, 25 bp, Homo sapien
ggaagttgagtgacaggtatgtgga

SEQ ID NO: 3399081 - DNA, 25 bp, Homo sapien
gttgagtgacaggtatgtggattgt

SEQ ID NO: 3399082 - DNA, 25 bp, Homo sapien
ttgagtgacaggtatgtggattgtc

SEQ ID NO: 3399083 - DNA, 25 bp, Homo sapien
aagttgagtgacaggtatgtggatt

SEQ ID NO: 3399084 - DNA, 25 bp, Homo sapien
cttcttgggaacgataagaccaggg

SEQ ID NO: 3399085 - DNA, 25 bp, Homo sapien
ctggattcttcttgggaacgataag

SEQ ID NO: 3399086 - DNA, 25 bp, Homo sapien
tcttgggaacgataagaccagggtg

SEQ ID NO: 3399087 - DNA, 25 bp, Homo sapien
gattcttcttgggaacgataagacc

SEQ ID NO: 3399088 - DNA, 25 bp, Homo sapien
tcaaaacgatgagcgtgcagaatgg

SEQ ID NO: 3399089 - DNA, 25 bp, Homo sapien
gcgtgcagaatggtgggttccagct

SEQ ID NO: 3399090 - DNA, 25 bp, Homo sapien
taactcctgctcaaaacgatgagcg

SEQ ID NO: 3399091 - DNA, 25 bp, Homo sapien
cagctccagaatcagctaactcctg

SEQ ID NO: 3399092 - DNA, 25 bp, Homo sapien
agcagggctctagaacagccagaag

SEQ ID NO: 3399093 - DNA, 25 bp, Homo sapien
gatggtgttgatagtttggtaccct

SEQ ID NO: 3399094 - DNA, 25 bp, Homo sapien
gcagggctctagaacagccagaaga

SEQ ID NO: 3399095 - DNA, 25 bp, Homo sapien
tgatgatggtgttgatagtttggta

SEQ ID NO: 3399096 - DNA, 25 bp, Homo sapien
ccttgcctgcaattccagaaactgc

SEQ ID NO: 3399097 - DNA, 25 bp, Homo sapien
ctcttccttgcctgcaattccagaa

SEQ ID NO: 3399098 - DNA, 25 bp, Homo sapien
cttccttgcctgcaattccagaaac

SEQ ID NO: 3399099 - DNA, 25 bp, Homo sapien
ttgcctgcaattccagaaactgcca

SEQ ID NO: 3399100 - DNA, 25 bp, Homo sapien
caaatgcttgctttttctccagtct

SEQ ID NO: 3399101 - DNA, 25 bp, Homo sapien
aatgcttgctttttctccagtctgc

SEQ ID NO: 3399102 - DNA, 25 bp, Homo sapien
ttcaaatgcttgctttttctccagt

SEQ ID NO: 3399103 - DNA, 25 bp, Homo sapien
tcagccttcaaatgcttgctttttc

SEQ ID NO: 3399104 - DNA, 25 bp, Homo sapien
gccaaggcccattggtacagggtga

SEQ ID NO: 3399105 - DNA, 25 bp, Homo sapien
atggccaaggcccattggtacaggg

SEQ ID NO: 3399106 - DNA, 25 bp, Homo sapien
ccaaggcccattggtacagggtgac

SEQ ID NO: 3399107 - DNA, 25 bp, Homo sapien
tggccaaggcccattggtacagggt

SEQ ID NO: 3399108 - DNA, 25 bp, Homo sapien
cagcgtattgtcaaggtggctctct

SEQ ID NO: 3399109 - DNA, 25 bp, Homo sapien
ctttgctgctatcatggctacaggg

SEQ ID NO: 3399110 - DNA, 25 bp, Homo sapien
tgttgtatgtgcgtactcctcagtg

SEQ ID NO: 3399111 - DNA, 25 bp, Homo sapien
caagacaacagtgtgagtgacaggg

SEQ ID NO: 3399112 - DNA, 25 bp, Homo sapien
accacctgccagatagtggatggca

SEQ ID NO: 3399113 - DNA, 25 bp, Homo sapien
aaaagaccaccacctgccagatagt

SEQ ID NO: 3399114 - DNA, 25 bp, Homo sapien
cctggacatcagcaactccatgaaa

SEQ ID NO: 3399115 - DNA, 25 bp, Homo sapien
caccacctgctggaagacggcgagg

SEQ ID NO: 3399116 - DNA, 25 bp, Homo sapien
taaaaggtaaggcatgtcgtaaatg

SEQ ID NO: 3399117 - DNA, 25 bp, Homo sapien
ttcacaggagtgtcagctgggagca

SEQ ID NO: 3399118 - DNA, 25 bp, Homo sapien
gtagccaccaaaccaacttgacctg

SEQ ID NO: 3399119 - DNA, 25 bp, Homo sapien
taaggcatgtcgtaaatgtaaggtg

SEQ ID NO: 3399120 - DNA, 25 bp, Homo sapien
agcttcgaccgcaggaatgtcacag

SEQ ID NO: 3399121 - DNA, 25 bp, Homo sapien
tctgtccatctcctctgaactcttg

SEQ ID NO: 3399122 - DNA, 25 bp, Homo sapien
tccatctcctctgaactcttgcctc

SEQ ID NO: 3399123 - DNA, 25 bp, Homo sapien
ggcagcttcgaccgcaggaatgtca

SEQ ID NO: 3399124 - DNA, 25 bp, Homo sapien
catcttaagtcccttctttaaggct

SEQ ID NO: 3399125 - DNA, 25 bp, Homo sapien
tttctataatagtttgttgtttcat

SEQ ID NO: 3399126 - DNA, 25 bp, Homo sapien
ctccatcttaagtcccttctttaag

SEQ ID NO: 3399127 - DNA, 25 bp, Homo sapien
ctatctccatcttaagtcccttctt

SEQ ID NO: 3399128 - DNA, 25 bp, Homo sapien
agcaggcacagcggccccagcagcc

SEQ ID NO: 3399129 - DNA, 25 bp, Homo sapien
ctcagcagcaggcacagcggcccca

SEQ ID NO: 3399130 - DNA, 25 bp, Homo sapien
ccgcggcgctgctcagcagcaggca

SEQ ID NO: 3399131 - DNA, 25 bp, Homo sapien
gcggcgctgctcagcagcaggcaca

SEQ ID NO: 3399132 - DNA, 25 bp, Homo sapien
cgcctccgttcctcaacacacacaa

SEQ ID NO: 3399133 - DNA, 25 bp, Homo sapien
acactcgagctacgcccaatcgggg

SEQ ID NO: 3399134 - DNA, 25 bp, Homo sapien
acagccacactcgagctacgcccaa

SEQ ID NO: 3399135 - DNA, 25 bp, Homo sapien
cacacacagccacactcgagctacg

SEQ ID NO: 3399136 - DNA, 25 bp, Homo sapien
aataaagcttcggttcccaggatca

SEQ ID NO: 3399137 - DNA, 25 bp, Homo sapien
aaagaggcttgctgcggtccaggcc

SEQ ID NO: 3399138 - DNA, 25 bp, Homo sapien
gtgatgccaggttcaaagggccgcc

SEQ ID NO: 3399139 - DNA, 25 bp, Homo sapien
aggcacggagtgcacgccagagact

SEQ ID NO: 3399140 - DNA, 25 bp, Homo sapien
ggaattcggatcatgcccacatcag

SEQ ID NO: 3399141 - DNA, 25 bp, Homo sapien
cccaggctggaattcggatcatgcc

SEQ ID NO: 3399142 - DNA, 25 bp, Homo sapien
tctaggcatcagatgcccagaaata

SEQ ID NO: 3399143 - DNA, 25 bp, Homo sapien
catgcccacatcagcagaaaagttc

SEQ ID NO: 3399144 - DNA, 25 bp, Homo sapien
tggacatgtggatggcacaaacacc

SEQ ID NO: 3399145 - DNA, 25 bp, Homo sapien
ggacatgtggatggcacaaacacca

SEQ ID NO: 3399146 - DNA, 25 bp, Homo sapien
ggcaaaatagggcagctattggaca

SEQ ID NO: 3399147 - DNA, 25 bp, Homo sapien
cacttggcaaaatagggcagctatt

SEQ ID NO: 3399148 - DNA, 25 bp, Homo sapien
gaaaatcgacctgctctaacagcct

SEQ ID NO: 3399149 - DNA, 25 bp, Homo sapien
taatttaagggcactctcacccaga

SEQ ID NO: 3399150 - DNA, 25 bp, Homo sapien
tcatatctgtagacgccctgaaaat

SEQ ID NO: 3399151 - DNA, 25 bp, Homo sapien
ctgcccaatgtcctgtgagaactct

SEQ ID NO: 3399152 - DNA, 25 bp, Homo sapien
tatgagaggcccgaagctgctcttg

SEQ ID NO: 3399153 - DNA, 25 bp, Homo sapien
tttatccccatagcttccatgagtg

SEQ ID NO: 3399154 - DNA, 25 bp, Homo sapien
cattagcaggaaggattttatcccc

SEQ ID NO: 3399155 - DNA, 25 bp, Homo sapien
gggctccccaaggaactggtcagtc

SEQ ID NO: 3399156 - DNA, 25 bp, Homo sapien
taatcagtttcagttggctgcctcc

SEQ ID NO: 3399157 - DNA, 25 bp, Homo sapien
ttcaagttatcttcctacctcaagc

SEQ ID NO: 3399158 - DNA, 25 bp, Homo sapien
taatatccaagcctgggaattgtgt

SEQ ID NO: 3399159 - DNA, 25 bp, Homo sapien
tatactaatcagtttcagttggctg

SEQ ID NO: 3399160 - DNA, 25 bp, Homo sapien
cattcttgcacgtaaacagctacct

SEQ ID NO: 3399161 - DNA, 25 bp, Homo sapien
taaccagtaaactgtgcagtgaagc

SEQ ID NO: 3399162 - DNA, 25 bp, Homo sapien
tatctgctcagacatacctacctac

SEQ ID NO: 3399163 - DNA, 25 bp, Homo sapien
gcatggtatgctacagtttctgcaa

SEQ ID NO: 3399164 - DNA, 25 bp, Homo sapien
actctttttggcttcacacccttct

SEQ ID NO: 3399165 - DNA, 25 bp, Homo sapien
ccatcagcacatccaaacacaactg

SEQ ID NO: 3399166 - DNA, 25 bp, Homo sapien
tcagaagtctctaccaccatcagca

SEQ ID NO: 3399167 - DNA, 25 bp, Homo sapien
ccaaacacaactgacaactcttttt

SEQ ID NO: 3399168 - DNA, 25 bp, Homo sapien
cttgacccgacgagattgagactgc

SEQ ID NO: 3399169 - DNA, 25 bp, Homo sapien
cataaggaacttaattcgaaaagca

SEQ ID NO: 3399170 - DNA, 25 bp, Homo sapien
ttgacccgacgagattgagactgca

SEQ ID NO: 3399171 - DNA, 25 bp, Homo sapien
tgaaattgaacacccatctttcact

SEQ ID NO: 3399172 - DNA, 25 bp, Homo sapien
aattgaacacccatctttcactata

SEQ ID NO: 3399173 - DNA, 25 bp, Homo sapien
aaattgaacacccatctttcactat

SEQ ID NO: 3399174 - DNA, 25 bp, Homo sapien
ccacaaactataagactcccagaag

SEQ ID NO: 3399175 - DNA, 25 bp, Homo sapien
gatgggcaccatttaccaacactga

SEQ ID NO: 3399176 - DNA, 25 bp, Homo sapien
ggaaccctgctgaagtacaggactg

SEQ ID NO: 3399177 - DNA, 25 bp, Homo sapien
tatctctgaggtatggtaggctccc

SEQ ID NO: 3399178 - DNA, 25 bp, Homo sapien
aaacagacctgcttatgaaatggcc

SEQ ID NO: 3399179 - DNA, 25 bp, Homo sapien
attgaggtctctgagcccatatttc

SEQ ID NO: 3399180 - DNA, 25 bp, Homo sapien
cattgaggtctctgagcccatattt

SEQ ID NO: 3399181 - DNA, 25 bp, Homo sapien
cctggtatgttgcactcattggtga

SEQ ID NO: 3399182 - DNA, 25 bp, Homo sapien
agcagtcaggcagcccgtcacactg

SEQ ID NO: 3399183 - DNA, 25 bp, Homo sapien
catcactcttgtcgaagcagtcagg

SEQ ID NO: 3399184 - DNA, 25 bp, Homo sapien
gggatgcaccgtccattgctgcaca

SEQ ID NO: 3399185 - DNA, 25 bp, Homo sapien
cccagcaaagggccaggccactcac

SEQ ID NO: 3399186 - DNA, 25 bp, Homo sapien
cataggaatcaccataagcaggcct

SEQ ID NO: 3399187 - DNA, 25 bp, Homo sapien
ggaatcaccataagcaggcctaaat

SEQ ID NO: 3399188 - DNA, 25 bp, Homo sapien
cataagcaggcctaaatatgcagca

SEQ ID NO: 3399189 - DNA, 25 bp, Homo sapien
tctctaggtgcccctgaaacctttc

SEQ ID NO: 3399190 - DNA, 25 bp, Homo sapien
ccagccgtacaacacagccagtcat

SEQ ID NO: 3399191 - DNA, 25 bp, Homo sapien
tgtttccaggtagcccctgtagtaa

SEQ ID NO: 3399192 - DNA, 25 bp, Homo sapien
tagtaactgtgaaaggccccatctc

SEQ ID NO: 3399193 - DNA, 25 bp, Homo sapien
gaggtgctcatacaatgtttccagg

SEQ ID NO: 3399194 - DNA, 25 bp, Homo sapien
gcatggcccattcgcagtgtcaagg

SEQ ID NO: 3399195 - DNA, 25 bp, Homo sapien
ggtgatgtcaatcctgtaaatagcc

SEQ ID NO: 3399196 - DNA, 25 bp, Homo sapien
gtgatgtcaatcctgtaaatagcca

SEQ ID NO: 3399197 - DNA, 25 bp, Homo sapien
tgtaaatagccagcatctctgggaa

SEQ ID NO: 3399198 - DNA, 25 bp, Homo sapien
tgagtgctccagtgagattccagtg

SEQ ID NO: 3399199 - DNA, 25 bp, Homo sapien
ctccagtgagattccagtgttgtgc

SEQ ID NO: 3399200 - DNA, 25 bp, Homo sapien
gaagacgtggctctttgcttctggg

SEQ ID NO: 3399201 - DNA, 25 bp, Homo sapien
cagaagcgtgaaggaagacgtggct

SEQ ID NO: 3399202 - DNA, 25 bp, Homo sapien
tttaaaggagctgcaccatacagtg

SEQ ID NO: 3399203 - DNA, 25 bp, Homo sapien
catacagtgcctacaccatgtgcct

SEQ ID NO: 3399204 - DNA, 25 bp, Homo sapien
ggagctgcaccatacagtgcctaca

SEQ ID NO: 3399205 - DNA, 25 bp, Homo sapien
cataaatatttgcataatgtccaaa

SEQ ID NO: 3399206 - DNA, 25 bp, Homo sapien
tgtaacatgctgactttggcaacag

SEQ ID NO: 3399207 - DNA, 25 bp, Homo sapien
acatgctgactttggcaacagccaa

SEQ ID NO: 3399208 - DNA, 25 bp, Homo sapien
taacatgctgactttggcaacagcc

SEQ ID NO: 3399209 - DNA, 25 bp, Homo sapien
ctgtaacatgctgactttggcaaca

SEQ ID NO: 3399210 - DNA, 25 bp, Homo sapien
atcgctgccatcgggacagtcctca

SEQ ID NO: 3399211 - DNA, 25 bp, Homo sapien
gtcctcaaacccattgcaccggaag

SEQ ID NO: 3399212 - DNA, 25 bp, Homo sapien
ggaagcgaccaatgatgcaatggat

SEQ ID NO: 3399213 - DNA, 25 bp, Homo sapien
gggccacatttcgacttagccttgg

SEQ ID NO: 3399214 - DNA, 25 bp, Homo sapien
tgaactcacaaactactggtagggc

SEQ ID NO: 3399215 - DNA, 25 bp, Homo sapien
tggacctggtcctaatcagcacatc

SEQ ID NO: 3399216 - DNA, 25 bp, Homo sapien
gattgtaaccatagcccacagaggg

SEQ ID NO: 3399217 - DNA, 25 bp, Homo sapien
taggatgatcccctcaagctgcatg

SEQ ID NO: 3399218 - DNA, 25 bp, Homo sapien
ctctctgccactgtggaggtaatga

SEQ ID NO: 3399219 - DNA, 25 bp, Homo sapien
ctctgccactgtggaggtaatgaca

SEQ ID NO: 3399220 - DNA, 25 bp, Homo sapien
tctgccactgtggaggtaatgacat

SEQ ID NO: 3399221 - DNA, 25 bp, Homo sapien
tctctgccactgtggaggtaatgac

SEQ ID NO: 3399222 - DNA, 25 bp, Homo sapien
aatggtcaacccgaaggctggccag

SEQ ID NO: 3399223 - DNA, 25 bp, Homo sapien
cgaaatggtcaacccgaaggctggc

SEQ ID NO: 3399224 - DNA, 25 bp, Homo sapien
tggtcaacccgaaggctggccagca

SEQ ID NO: 3399225 - DNA, 25 bp, Homo sapien
ccgaaatggtcaacccgaaggctgg

SEQ ID NO: 3399226 - DNA, 25 bp, Homo sapien
tcttgcagtggtagcgggcggtgga

SEQ ID NO: 3399227 - DNA, 25 bp, Homo sapien
ctcatcactgttgtcttgacagtta

SEQ ID NO: 3399228 - DNA, 25 bp, Homo sapien
tcttgtcaatacagaggccgttctt

SEQ ID NO: 3399229 - DNA, 25 bp, Homo sapien
tctgtccatcgcagatgaagctctt

SEQ ID NO: 3399230 - DNA, 25 bp, Homo sapien
gggagcacgtgcatatgtagcttat

SEQ ID NO: 3399231 - DNA, 25 bp, Homo sapien
gcatatgtagcttattttctaaggg

SEQ ID NO: 3399232 - DNA, 25 bp, Homo sapien
gcacgtgcatatgtagcttattttc

SEQ ID NO: 3399233 - DNA, 25 bp, Homo sapien
gcttattttctaaggggatgccctc

SEQ ID NO: 3399234 - DNA, 25 bp, Homo sapien
ggtggctgttatacccatgaaactg

SEQ ID NO: 3399235 - DNA, 25 bp, Homo sapien
tttgagaggcaaaacgggcacaggt

SEQ ID NO: 3399236 - DNA, 25 bp, Homo sapien
tcttcttgggtagctcacagcaatg

SEQ ID NO: 3399237 - DNA, 25 bp, Homo sapien
cacagcaatgccttccacaagtggg

SEQ ID NO: 3399238 - DNA, 25 bp, Homo sapien
gcacttagcaaatccactatgtaca

SEQ ID NO: 3399239 - DNA, 25 bp, Homo sapien
cttagcaaatccactatgtacagag

SEQ ID NO: 3399240 - DNA, 25 bp, Homo sapien
cacttagcaaatccactatgtacag

SEQ ID NO: 3399241 - DNA, 25 bp, Homo sapien
tagcaaatccactatgtacagagca

SEQ ID NO: 3399242 - DNA, 25 bp, Homo sapien
tctttaccggcaactgtccagttcc

SEQ ID NO: 3399243 - DNA, 25 bp, Homo sapien
tgccaaggggattctttaccggcaa

SEQ ID NO: 3399244 - DNA, 25 bp, Homo sapien
gggattctttaccggcaactgtcca

SEQ ID NO: 3399245 - DNA, 25 bp, Homo sapien
caaggggattctttaccggcaactg

SEQ ID NO: 3399246 - DNA, 25 bp, Homo sapien
cactgtgccataatttaatggtcag

SEQ ID NO: 3399247 - DNA, 25 bp, Homo sapien
gcctggaatgcatcttaaaaacaac

SEQ ID NO: 3399248 - DNA, 25 bp, Homo sapien
ctggcctggaatgcatcttaaaaac

SEQ ID NO: 3399249 - DNA, 25 bp, Homo sapien
taaaaacaacactgtgccataattt

SEQ ID NO: 3399250 - DNA, 25 bp, Homo sapien
tccccatggtgataacgcagcttgc

SEQ ID NO: 3399251 - DNA, 25 bp, Homo sapien
gagagcgcaacatccttcccatggt

SEQ ID NO: 3399252 - DNA, 25 bp, Homo sapien
gtctgattctagcaaaagccctatg

SEQ ID NO: 3399253 - DNA, 25 bp, Homo sapien
caaatcttggcgattctagcctgaa

SEQ ID NO: 3399254 - DNA, 25 bp, Homo sapien
gtttcagagtagcagaggtatccat

SEQ ID NO: 3399255 - DNA, 25 bp, Homo sapien
agggtttcagagtagcagaggtatc

SEQ ID NO: 3399256 - DNA, 25 bp, Homo sapien
aaggagggtttcagagtagcagagg

SEQ ID NO: 3399257 - DNA, 25 bp, Homo sapien
ggagggtttcagagtagcagaggta

SEQ ID NO: 3399258 - DNA, 25 bp, Homo sapien
ggtccagtgaaaggttcgagctgcc

SEQ ID NO: 3399259 - DNA, 25 bp, Homo sapien
gggtccagtgaaaggttcgagctgc

SEQ ID NO: 3399260 - DNA, 25 bp, Homo sapien
gtccagtgaaaggttcgagctgccc

SEQ ID NO: 3399261 - DNA, 25 bp, Homo sapien
gaacacaagggccacatgaatgctc

SEQ ID NO: 3399262 - DNA, 25 bp, Homo sapien
cgtccttttgcggatgtgaccgtgg

SEQ ID NO: 3399263 - DNA, 25 bp, Homo sapien
cacagcagagcttgaggtcagtagc

SEQ ID NO: 3399264 - DNA, 25 bp, Homo sapien
gaagcaccatatacagcctcgctgg

SEQ ID NO: 3399265 - DNA, 25 bp, Homo sapien
aagtggaagctcagttgcagacacc

SEQ ID NO: 3399266 - DNA, 25 bp, Homo sapien
tgctcctgaatcagagcagagctga

SEQ ID NO: 3399267 - DNA, 25 bp, Homo sapien
ctgacactgctcctgaatcagagca

SEQ ID NO: 3399268 - DNA, 25 bp, Homo sapien
gaagctcagttgcagacaccacagc

SEQ ID NO: 3399269 - DNA, 25 bp, Homo sapien
tacatcatcatacagcttcggcttg

SEQ ID NO: 3399270 - DNA, 25 bp, Homo sapien
gacgtgtgtggtgttataaggtcac

SEQ ID NO: 3399271 - DNA, 25 bp, Homo sapien
tagtctaagatctcacaaggtttaa

SEQ ID NO: 3399272 - DNA, 25 bp, Homo sapien
caactatcactatctgtggagcaga

SEQ ID NO: 3399273 - DNA, 25 bp, Homo sapien
cagacatttgtggctagggcctact

SEQ ID NO: 3399274 - DNA, 25 bp, Homo sapien
gacatttgtggctagggcctactcc

SEQ ID NO: 3399275 - DNA, 25 bp, Homo sapien
catttgtggctagggcctactcccc

SEQ ID NO: 3399276 - DNA, 25 bp, Homo sapien
tggctagggcctactccccctccaa

SEQ ID NO: 3399277 - DNA, 25 bp, Homo sapien
agtccgggtggttggcacagaccct

SEQ ID NO: 3399278 - DNA, 25 bp, Homo sapien
agagtcagggggtcggcactgtgcc

SEQ ID NO: 3399279 - DNA, 25 bp, Homo sapien
ccacagccggactttaggagtccgg

SEQ ID NO: 3399280 - DNA, 25 bp, Homo sapien
acagaccctcggacaagagtcaggg

SEQ ID NO: 3399281 - DNA, 25 bp, Homo sapien
ctgggttgtgacgggtaccaggtag

SEQ ID NO: 3399282 - DNA, 25 bp, Homo sapien
tgtgacgggtaccaggtagaggctt

SEQ ID NO: 3399283 - DNA, 25 bp, Homo sapien
gttgtgacgggtaccaggtagaggc

SEQ ID NO: 3399284 - DNA, 25 bp, Homo sapien
tgggttgtgacgggtaccaggtaga

SEQ ID NO: 3399285 - DNA, 25 bp, Homo sapien
tgtcctatcctttctagcgactgca

SEQ ID NO: 3399286 - DNA, 25 bp, Homo sapien
ttgtcctatcctttctagcgactgc

SEQ ID NO: 3399287 - DNA, 25 bp, Homo sapien
tttgtcctatcctttctagcgactg

SEQ ID NO: 3399288 - DNA, 25 bp, Homo sapien
gtcctatcctttctagcgactgcat

SEQ ID NO: 3399289 - DNA, 25 bp, Homo sapien
cattttcaacaggtagataggagca

SEQ ID NO: 3399290 - DNA, 25 bp, Homo sapien
gacagcgtctcagacacagacggtg

SEQ ID NO: 3399291 - DNA, 25 bp, Homo sapien
tcctcatctctcaccagctggacaa

SEQ ID NO: 3399292 - DNA, 25 bp, Homo sapien
taggagcagcgaacagattcaaact

SEQ ID NO: 3399293 - DNA, 25 bp, Homo sapien
gcttggtagaattcatgctagcgcc

SEQ ID NO: 3399294 - DNA, 25 bp, Homo sapien
gacaagacaatagtactcagtgggc

SEQ ID NO: 3399295 - DNA, 25 bp, Homo sapien
gattgattgtaaagtctagcctgct

SEQ ID NO: 3399296 - DNA, 25 bp, Homo sapien
tccttgtagtggtactaagagacaa

SEQ ID NO: 3399297 - DNA, 25 bp, Homo sapien
gttagtctatcgatgacacttgcac

SEQ ID NO: 3399298 - DNA, 25 bp, Homo sapien
cgatgacacttgcacatgatttatc

SEQ ID NO: 3399299 - DNA, 25 bp, Homo sapien
ctcttgttagtctatcgatgacact

SEQ ID NO: 3399300 - DNA, 25 bp, Homo sapien
agtctatcgatgacacttgcacatg

SEQ ID NO: 3399301 - DNA, 25 bp, Homo sapien
gggtcgctaagctgccattcactcc

SEQ ID NO: 3399302 - DNA, 25 bp, Homo sapien
cccacgggccttatctcctctggct

SEQ ID NO: 3399303 - DNA, 25 bp, Homo sapien
ggctttctgtgagcgtgattttccc

SEQ ID NO: 3399304 - DNA, 25 bp, Homo sapien
cctctggctgggaaatcacgctggc

SEQ ID NO: 3399305 - DNA, 25 bp, Homo sapien
ggctcaaccatgatatcagctcctg

SEQ ID NO: 3399306 - DNA, 25 bp, Homo sapien
ccatggaagcttgtatgagatgcac

SEQ ID NO: 3399307 - DNA, 25 bp, Homo sapien
tcacccagggcagtggtaagaggct

SEQ ID NO: 3399308 - DNA, 25 bp, Homo sapien
ggctgagattcccagggctcaacca

SEQ ID NO: 3399309 - DNA, 25 bp, Homo sapien
caagtgcaggggcaggggcacaatt

SEQ ID NO: 3399310 - DNA, 25 bp, Homo sapien
agaccatatgcaagtgcaggggcag

SEQ ID NO: 3399311 - DNA, 25 bp, Homo sapien
tgcaggggcaggggcacaattccat

SEQ ID NO: 3399312 - DNA, 25 bp, Homo sapien
agtgcaggggcaggggcacaattcc

SEQ ID NO: 3399313 - DNA, 25 bp, Homo sapien
gttgacatggagcaatgtttcattt

SEQ ID NO: 3399314 - DNA, 25 bp, Homo sapien
gacatggagcaatgtttcatttcca

SEQ ID NO: 3399315 - DNA, 25 bp, Homo sapien
tgacatggagcaatgtttcatttcc

SEQ ID NO: 3399316 - DNA, 25 bp, Homo sapien
acatggagcaatgtttcatttccag

SEQ ID NO: 3399317 - DNA, 25 bp, Homo sapien
tgtcttgctctaggctcccactgta

SEQ ID NO: 3399318 - DNA, 25 bp, Homo sapien
gctctaggctcccactgtaactcat

SEQ ID NO: 3399319 - DNA, 25 bp, Homo sapien
gacagtgtctcacttgaatactcat

SEQ ID NO: 3399320 - DNA, 25 bp, Homo sapien
tgaatactcatgtcttgctctaggc

SEQ ID NO: 3399321 - DNA, 25 bp, Homo sapien
tttcccccttccatgtctcactgag

SEQ ID NO: 3399322 - DNA, 25 bp, Homo sapien
gaggcactgccatgccgatgtgatt

SEQ ID NO: 3399323 - DNA, 25 bp, Homo sapien
ctgagaggcactgccatgccgatgt

SEQ ID NO: 3399324 - DNA, 25 bp, Homo sapien
cccttccatgtctcactgagaggca

SEQ ID NO: 3399325 - DNA, 25 bp, Homo sapien
ggagaatatcgatgagcgttttcag

SEQ ID NO: 3399326 - DNA, 25 bp, Homo sapien
tatcgatgagcgttttcagaccaac

SEQ ID NO: 3399327 - DNA, 25 bp, Homo sapien
tagaggagaatatcgatgagcgttt

SEQ ID NO: 3399328 - DNA, 25 bp, Homo sapien
gaaagtagaggagaatatcgatgag

SEQ ID NO: 3399329 - DNA, 25 bp, Homo sapien
atttgtcaccgggctgccctgcaac

SEQ ID NO: 3399330 - DNA, 25 bp, Homo sapien
catttgtcaccgggctgccctgcaa

SEQ ID NO: 3399331 - DNA, 25 bp, Homo sapien
tcatttgtcaccgggctgccctgca

SEQ ID NO: 3399332 - DNA, 25 bp, Homo sapien
ggaaacacaccctatgcttgtggat

SEQ ID NO: 3399333 - DNA, 25 bp, Homo sapien
tctccaaattcaatctaattcccat

SEQ ID NO: 3399334 - DNA, 25 bp, Homo sapien
aattcccatcaatatattatcataa

SEQ ID NO: 3399335 - DNA, 25 bp, Homo sapien
agagctctcatagccaaagaaagac

SEQ ID NO: 3399336 - DNA, 25 bp, Homo sapien
catgtgaagggaattagcgctggtc

SEQ ID NO: 3399337 - DNA, 25 bp, Homo sapien
tgcacaactagggaactgaagaact

SEQ ID NO: 3399338 - DNA, 25 bp, Homo sapien
caaatcaaggtaggcaagtgtcagg

SEQ ID NO: 3399339 - DNA, 25 bp, Homo sapien
gctggagtccaaccaatcgggagca

SEQ ID NO: 3399340 - DNA, 25 bp, Homo sapien
tacggcagtgtattcaaagaggcca

SEQ ID NO: 3399341 - DNA, 25 bp, Homo sapien
gccagaggcgtttcggaggctccat

SEQ ID NO: 3399342 - DNA, 25 bp, Homo sapien
tccatgtgaaaacctagggtgcttg

SEQ ID NO: 3399343 - DNA, 25 bp, Homo sapien
gagtctgaaggcctaagcttgagcc

SEQ ID NO: 3399344 - DNA, 25 bp, Homo sapien
ttgctctgacaaacctatatacctc

SEQ ID NO: 3399345 - DNA, 25 bp, Homo sapien
aagaggaatgcggagtcacctccta

SEQ ID NO: 3399346 - DNA, 25 bp, Homo sapien
tatatacctcttggtgataagcact

SEQ ID NO: 3399347 - DNA, 25 bp, Homo sapien
tggtgataagcactatgtagtttca

SEQ ID NO: 3399348 - DNA, 25 bp, Homo sapien
ggcatccttcagaaccagtggcaat

SEQ ID NO: 3399349 - DNA, 25 bp, Homo sapien
cctcgagaggccaattaatccatgt

SEQ ID NO: 3399350 - DNA, 25 bp, Homo sapien
taatgaactcgacagtgagggagcc

SEQ ID NO: 3399351 - DNA, 25 bp, Homo sapien
catggtgatcgtgacagggaagact

SEQ ID NO: 3399352 - DNA, 25 bp, Homo sapien
taaatgtgagtattcaagttaccac

SEQ ID NO: 3399353 - DNA, 25 bp, Homo sapien
tttactcccctcaactattgaaggc

SEQ ID NO: 3399354 - DNA, 25 bp, Homo sapien
caagttttgaaggtaggtagtcata

SEQ ID NO: 3399355 - DNA, 25 bp, Homo sapien
tagtcatatcatttactcccctcaa

SEQ ID NO: 3399356 - DNA, 25 bp, Homo sapien
tcaaaaaaccactcatcctgcagtt

SEQ ID NO: 3399357 - DNA, 25 bp, Homo sapien
cacaaagcggccttgtgatgctttg

SEQ ID NO: 3399358 - DNA, 25 bp, Homo sapien
tgtgtgacccaaacccatttagatg

SEQ ID NO: 3399359 - DNA, 25 bp, Homo sapien
tggtagaccaaaatgctcagaattg

SEQ ID NO: 3399360 - DNA, 25 bp, Homo sapien
tcagggtggccagataagctatttt

SEQ ID NO: 3399361 - DNA, 25 bp, Homo sapien
tctggcgactgtatgcaggatgagc

SEQ ID NO: 3399362 - DNA, 25 bp, Homo sapien
tagcaaggtccagatttgaactccg

SEQ ID NO: 3399363 - DNA, 25 bp, Homo sapien
aacactctcgaggatgcagcattac

SEQ ID NO: 3399364 - DNA, 25 bp, Homo sapien
aaatgttcaattcctattcagctgt

SEQ ID NO: 3399365 - DNA, 25 bp, Homo sapien
cagagaatcagttggaacaacataa

SEQ ID NO: 3399366 - DNA, 25 bp, Homo sapien
atgttcaaaaggaattagacggtgg

SEQ ID NO: 3399367 - DNA, 25 bp, Homo sapien
tatactctgagccttaatcatgaaa

SEQ ID NO: 3399368 - DNA, 25 bp, Homo sapien
ttaacagtggcatgtctctggctct

SEQ ID NO: 3399369 - DNA, 25 bp, Homo sapien
tcactgctgggtcaagtgtcttggg

SEQ ID NO: 3399370 - DNA, 25 bp, Homo sapien
cacaagtaaatatagacccagaggt

SEQ ID NO: 3399371 - DNA, 25 bp, Homo sapien
tacgtgcagatgctaaacacaagta

SEQ ID NO: 3399372 - DNA, 25 bp, Homo sapien
tttagacattctacagccgggactc

SEQ ID NO: 3399373 - DNA, 25 bp, Homo sapien
gatagggagctaccaccagggttaa

SEQ ID NO: 3399374 - DNA, 25 bp, Homo sapien
tagtgccacactgaataccgatgag

SEQ ID NO: 3399375 - DNA, 25 bp, Homo sapien
gaagagccccacgtgcattgttagc

SEQ ID NO: 3399376 - DNA, 25 bp, Homo sapien
tttattcattttggactgactcagg

SEQ ID NO: 3399377 - DNA, 25 bp, Homo sapien
tattcattttggactgactcagggt

SEQ ID NO: 3399378 - DNA, 25 bp, Homo sapien
cattttggactgactcagggttaag

SEQ ID NO: 3399379 - DNA, 25 bp, Homo sapien
tcattttggactgactcagggttaa

SEQ ID NO: 3399380 - DNA, 25 bp, Homo sapien
gctcactacacatccgcctttctgg

SEQ ID NO: 3399381 - DNA, 25 bp, Homo sapien
ggctcactacacatccgcctttctg

SEQ ID NO: 3399382 - DNA, 25 bp, Homo sapien
taaagtatgtagcacagggctggac

SEQ ID NO: 3399383 - DNA, 25 bp, Homo sapien
ccctctggtgagctgtaactgcctt

SEQ ID NO: 3399384 - DNA, 25 bp, Homo sapien
tcattacagtgagggacaatctaca

SEQ ID NO: 3399385 - DNA, 25 bp, Homo sapien
taacagctgacctcaaaaagtgtgc

SEQ ID NO: 3399386 - DNA, 25 bp, Homo sapien
tatggagaagtccacgtgcccagga

SEQ ID NO: 3399387 - DNA, 25 bp, Homo sapien
gatcttaagccagagaaactcgtgt

SEQ ID NO: 3399388 - DNA, 25 bp, Homo sapien
tatcaaaggactgtggtttccgttc

SEQ ID NO: 3399389 - DNA, 25 bp, Homo sapien
taagaaccatgatgtgagctgccct

SEQ ID NO: 3399390 - DNA, 25 bp, Homo sapien
agatgaatcccacggagggcaggca

SEQ ID NO: 3399391 - DNA, 25 bp, Homo sapien
gaatccctgttgaaagccctcgaaa

SEQ ID NO: 3399392 - DNA, 25 bp, Homo sapien
taaaaggacctacaccgtctgatgt

SEQ ID NO: 3399393 - DNA, 25 bp, Homo sapien
tcgaaacacctaagacagactggag

SEQ ID NO: 3399394 - DNA, 25 bp, Homo sapien
ggcttcgccagatccagattcctat

SEQ ID NO: 3399395 - DNA, 25 bp, Homo sapien
gcaggccacatctggaaatgactat

SEQ ID NO: 3399396 - DNA, 25 bp, Homo sapien
ctatatatgatatcctgggctgctc

SEQ ID NO: 3399397 - DNA, 25 bp, Homo sapien
tcctctgcatcgagtggcttcgcca

SEQ ID NO: 3399398 - DNA, 25 bp, Homo sapien
tggacgaagagtctgacccttcaca

SEQ ID NO: 3399399 - DNA, 25 bp, Homo sapien
tttgagccgagtgaagcgactgtga

SEQ ID NO: 3399400 - DNA, 25 bp, Homo sapien
tccttttacctggacgaagagtctg

SEQ ID NO: 3399401 - DNA, 25 bp, Homo sapien
tgccacaaagtttagatgaacactg

SEQ ID NO: 3399402 - DNA, 25 bp, Homo sapien
ttctccagacactgggctcttgggc

SEQ ID NO: 3399403 - DNA, 25 bp, Homo sapien
gctcttgggctccagtcccagtgca

SEQ ID NO: 3399404 - DNA, 25 bp, Homo sapien
gcagggctgttcgttttgcacacac

SEQ ID NO: 3399405 - DNA, 25 bp, Homo sapien
gacatatccgatgccaaacgggact

SEQ ID NO: 3399406 - DNA, 25 bp, Homo sapien
ctgtatgacactctgccgcgtctta

SEQ ID NO: 3399407 - DNA, 25 bp, Homo sapien
acactctgccgcgtcttacatttgt

SEQ ID NO: 3399408 - DNA, 25 bp, Homo sapien
gtatgacactctgccgcgtcttaca

SEQ ID NO: 3399409 - DNA, 25 bp, Homo sapien
tctgccgcgtcttacatttgtcaag

SEQ ID NO: 3399410 - DNA, 25 bp, Homo sapien
ccatctgtattgagttgagtagtgt

SEQ ID NO: 3399411 - DNA, 25 bp, Homo sapien
cctattctcattaatatctgatgtg

SEQ ID NO: 3399412 - DNA, 25 bp, Homo sapien
acacttttaatccttgcaccatctg

SEQ ID NO: 3399413 - DNA, 25 bp, Homo sapien
catcaccataattatcctggcagct

SEQ ID NO: 3399414 - DNA, 25 bp, Homo sapien
gacagcactgttccctgtgattaat

SEQ ID NO: 3399415 - DNA, 25 bp, Homo sapien
ttggcctgtcgttcacagacagcac

SEQ ID NO: 3399416 - DNA, 25 bp, Homo sapien
atcaccctgtttggcctgtcgttca

SEQ ID NO: 3399417 - DNA, 25 bp, Homo sapien
tgattaatttcccagcatcaacccc

SEQ ID NO: 3399418 - DNA, 25 bp, Homo sapien
gctacaataccattcaggcagacag

SEQ ID NO: 3399419 - DNA, 25 bp, Homo sapien
tccacatcaagcaaccaagtatggt

SEQ ID NO: 3399420 - DNA, 25 bp, Homo sapien
ctagatgctggatgtttacctggcc

SEQ ID NO: 3399421 - DNA, 25 bp, Homo sapien
gaaaacctccgtgagagtcttgcca

SEQ ID NO: 3399422 - DNA, 25 bp, Homo sapien
gtagaaagctgggggagccacctct

SEQ ID NO: 3399423 - DNA, 25 bp, Homo sapien
agaaagctgggggagccacctctgg

SEQ ID NO: 3399424 - DNA, 25 bp, Homo sapien
gctgggggagccacctctgggggat

SEQ ID NO: 3399425 - DNA, 25 bp, Homo sapien
tgggggtagaaagctgggggagcca

SEQ ID NO: 3399426 - DNA, 25 bp, Homo sapien
cattatcctcaccaacttctcgcaa

SEQ ID NO: 3399427 - DNA, 25 bp, Homo sapien
ctaaggagccatacttcaagcaccc

SEQ ID NO: 3399428 - DNA, 25 bp, Homo sapien
acctggctaccactgtaaggtccag

SEQ ID NO: 3399429 - DNA, 25 bp, Homo sapien
tggaggaaaccaggggtccgagctg

SEQ ID NO: 3399430 - DNA, 25 bp, Homo sapien
caggttgctatcataatagccttct

SEQ ID NO: 3399431 - DNA, 25 bp, Homo sapien
acgggcagcgtcatgaggttgttcc

SEQ ID NO: 3399432 - DNA, 25 bp, Homo sapien
aatgacggagctgccgatgatggca

SEQ ID NO: 3399433 - DNA, 25 bp, Homo sapien
gggagcctacttccgacgcattctg

SEQ ID NO: 3399434 - DNA, 25 bp, Homo sapien
gttccgcttccgctggtggtgcaag

SEQ ID NO: 3399435 - DNA, 25 bp, Homo sapien
tggaggaaggtcataccacgcaggc

SEQ ID NO: 3399436 - DNA, 25 bp, Homo sapien
gctggcactgttggcactcccggac

SEQ ID NO: 3399437 - DNA, 25 bp, Homo sapien
caggtcggcttggttcagagattcc

SEQ ID NO: 3399438 - DNA, 25 bp, Homo sapien
ggctggtgtcttccacgctcaggag

SEQ ID NO: 3399439 - DNA, 25 bp, Homo sapien
tggccactgactctgctgaactggg

SEQ ID NO: 3399440 - DNA, 25 bp, Homo sapien
tacagccaggtcagactttgggcca

SEQ ID NO: 3399441 - DNA, 25 bp, Homo sapien
catagagactatacacggagggaga

SEQ ID NO: 3399442 - DNA, 25 bp, Homo sapien
tgacagtccagaaaccaggtaagtg

SEQ ID NO: 3399443 - DNA, 25 bp, Homo sapien
ttggacaagagtagaatacctgacc

SEQ ID NO: 3399444 - DNA, 25 bp, Homo sapien
caagagtagaatacctgaccaaaga

SEQ ID NO: 3399445 - DNA, 25 bp, Homo sapien
aatggattggacaagagtagaatac

SEQ ID NO: 3399446 - DNA, 25 bp, Homo sapien
gagtagaatacctgaccaaagacaa

SEQ ID NO: 3399447 - DNA, 25 bp, Homo sapien
gcaagctatacattcgtctttctgg

SEQ ID NO: 3399448 - DNA, 25 bp, Homo sapien
gctttttctgcaagctatacattcg

SEQ ID NO: 3399449 - DNA, 25 bp, Homo sapien
tacattcgtctttctggaaaccttc

SEQ ID NO: 3399450 - DNA, 25 bp, Homo sapien
tttgggctgaacaggctttttctgc

SEQ ID NO: 3399451 - DNA, 25 bp, Homo sapien
tctgctcaccaggtaaactccttga

SEQ ID NO: 3399452 - DNA, 25 bp, Homo sapien
ctgctcaccaggtaaactccttgat

SEQ ID NO: 3399453 - DNA, 25 bp, Homo sapien
cccatgtcaaacagccagctgtgga

SEQ ID NO: 3399454 - DNA, 25 bp, Homo sapien
ctctcccatgtcaaacagccagctg

SEQ ID NO: 3399455 - DNA, 25 bp, Homo sapien
cctctctcccatgtcaaacagccag

SEQ ID NO: 3399456 - DNA, 25 bp, Homo sapien
ttttccacatcattcgcctccactc

SEQ ID NO: 3399457 - DNA, 25 bp, Homo sapien
cagggaacccccgtggtcatccagg

SEQ ID NO: 3399458 - DNA, 25 bp, Homo sapien
ccccgtggtcatccagggtgcatgg

SEQ ID NO: 3399459 - DNA, 25 bp, Homo sapien
gaacccccgtggtcatccagggtgc

SEQ ID NO: 3399460 - DNA, 25 bp, Homo sapien
agggtgcatgggcatgactgctgac

SEQ ID NO: 3399461 - DNA, 25 bp, Homo sapien
cagcagatggcgcagtcgtcctcct

SEQ ID NO: 3399462 - DNA, 25 bp, Homo sapien
cccagcagatggcgcagtcgtcctc

SEQ ID NO: 3399463 - DNA, 25 bp, Homo sapien
cgcagctggagcttgcccaagatgc

SEQ ID NO: 3399464 - DNA, 25 bp, Homo sapien
gcgcagctggagcttgcccaagatg

SEQ ID NO: 3399465 - DNA, 25 bp, Homo sapien
cacacctgagcgcacagataatggg

SEQ ID NO: 3399466 - DNA, 25 bp, Homo sapien
cagcttctgtgggtaccgagagttt

SEQ ID NO: 3399467 - DNA, 25 bp, Homo sapien
agctgaactggaagtgtatccctgg

SEQ ID NO: 3399468 - DNA, 25 bp, Homo sapien
tgtgggtaccgagagtttcctggca

SEQ ID NO: 3399469 - DNA, 25 bp, Homo sapien
agtggaggggcagacgtggatcttc

SEQ ID NO: 3399470 - DNA, 25 bp, Homo sapien
ctgccactgtagagttcagggacca

SEQ ID NO: 3399471 - DNA, 25 bp, Homo sapien
cttgggtaggaagaggtagggattg

SEQ ID NO: 3399472 - DNA, 25 bp, Homo sapien
tagggattgggaactctggatgagg

SEQ ID NO: 3399473 - DNA, 25 bp, Homo sapien
tgcagccactcctaggtgaagaagt

SEQ ID NO: 3399474 - DNA, 25 bp, Homo sapien
gagcatggtccatccagagtgttcc

SEQ ID NO: 3399475 - DNA, 25 bp, Homo sapien
gagggaacatttgcatcgtcagctg

SEQ ID NO: 3399476 - DNA, 25 bp, Homo sapien
gggctactgccatccagaagttaca

SEQ ID NO: 3399477 - DNA, 25 bp, Homo sapien
catcggtccatgtaatagtctctgt

SEQ ID NO: 3399478 - DNA, 25 bp, Homo sapien
cattttggctgctctgtacctaccc

SEQ ID NO: 3399479 - DNA, 25 bp, Homo sapien
gactggcaatctagggctctcagct

SEQ ID NO: 3399480 - DNA, 25 bp, Homo sapien
cattagcattctccactcctaaggg

SEQ ID NO: 3399481 - DNA, 25 bp, Homo sapien
tacaggcaggagttaaacctagaac

SEQ ID NO: 3399482 - DNA, 25 bp, Homo sapien
caggaatcaggccatgagggttcat

SEQ ID NO: 3399483 - DNA, 25 bp, Homo sapien
tcaattaacccaagacaatgggccc

SEQ ID NO: 3399484 - DNA, 25 bp, Homo sapien
atgggcccagccctatagatacagg

SEQ ID NO: 3399485 - DNA, 25 bp, Homo sapien
gggagaggtgaatgaccatggcctt

SEQ ID NO: 3399486 - DNA, 25 bp, Homo sapien
gggatgttccaacgggcgcagagat

SEQ ID NO: 3399487 - DNA, 25 bp, Homo sapien
agcctcccgagaaggggatgttcca

SEQ ID NO: 3399488 - DNA, 25 bp, Homo sapien
tgttccaacgggcgcagagatctct

SEQ ID NO: 3399489 - DNA, 25 bp, Homo sapien
ttgcacatgccaagagacaccagga

SEQ ID NO: 3399490 - DNA, 25 bp, Homo sapien
gcctcaactatcctcccaaaattta

SEQ ID NO: 3399491 - DNA, 25 bp, Homo sapien
acagagagagcacgaagcttcatcc

SEQ ID NO: 3399492 - DNA, 25 bp, Homo sapien
gagagagcacgaagcttcatccata

SEQ ID NO: 3399493 - DNA, 25 bp, Homo sapien
gatgagggggtattctcccacctaa

SEQ ID NO: 3399494 - DNA, 25 bp, Homo sapien
cagacatcatgatatttcactccta

SEQ ID NO: 3399495 - DNA, 25 bp, Homo sapien
caacaattggtaacgttttgccata

SEQ ID NO: 3399496 - DNA, 25 bp, Homo sapien
taatatcactgaatgcttggtctac

SEQ ID NO: 3399497 - DNA, 25 bp, Homo sapien
ccatcaatgcgcttgctactttgta

SEQ ID NO: 3399498 - DNA, 25 bp, Homo sapien
tataagactctataggacctgccta

SEQ ID NO: 3399499 - DNA, 25 bp, Homo sapien
tcaaattctgattagaggccattca

SEQ ID NO: 3399500 - DNA, 25 bp, Homo sapien
ccctagttatgctgtggttgggaca

SEQ ID NO: 3399501 - DNA, 25 bp, Homo sapien
ttgagagacaattagggaagggacc

SEQ ID NO: 3399502 - DNA, 25 bp, Homo sapien
cacatcactcaaggctaatggcagg

SEQ ID NO: 3399503 - DNA, 25 bp, Homo sapien
cacagacaggtgcatacgtcacatc

SEQ ID NO: 3399504 - DNA, 25 bp, Homo sapien
gggctgccagatcctagcaactgca

SEQ ID NO: 3399505 - DNA, 25 bp, Homo sapien
cctgtgatccaactttctctcaatt

SEQ ID NO: 3399506 - DNA, 25 bp, Homo sapien
ttccagatatccaggatccttcctt

SEQ ID NO: 3399507 - DNA, 25 bp, Homo sapien
gtcctgtgatccaactttctctcaa

SEQ ID NO: 3399508 - DNA, 25 bp, Homo sapien
ctgtcctgtgatccaactttctctc

SEQ ID NO: 3399509 - DNA, 25 bp, Homo sapien
cttttagacatgttagttgatgccc

SEQ ID NO: 3399510 - DNA, 25 bp, Homo sapien
gacatgttagttgatgcccaacctc

SEQ ID NO: 3399511 - DNA, 25 bp, Homo sapien
gcccaacctctagggacacaatttc

SEQ ID NO: 3399512 - DNA, 25 bp, Homo sapien
caacctctagggacacaatttcttt

SEQ ID NO: 3399513 - DNA, 25 bp, Homo sapien
aggcatgctgtatgggcactgccag

SEQ ID NO: 3399514 - DNA, 25 bp, Homo sapien
ggcatgctgtatgggcactgccagc

SEQ ID NO: 3399515 - DNA, 25 bp, Homo sapien
aaagcagaggcggtgaacccacgct

SEQ ID NO: 3399516 - DNA, 25 bp, Homo sapien
agaggcggtgaacccacgctgatgc

SEQ ID NO: 3399517 - DNA, 25 bp, Homo sapien
agcagaggcggtgaacccacgctga

SEQ ID NO: 3399518 - DNA, 25 bp, Homo sapien
ttaaagcagaggcggtgaacccacg

SEQ ID NO: 3399519 - DNA, 25 bp, Homo sapien
cagagactgcttccacaggttgtgt

SEQ ID NO: 3399520 - DNA, 25 bp, Homo sapien
ccccaactgggggcacagagtcaga

SEQ ID NO: 3399521 - DNA, 25 bp, Homo sapien
tgtgttaaattaatagctacctgta

SEQ ID NO: 3399522 - DNA, 25 bp, Homo sapien
gcttccacaggttgtgttaaattaa

SEQ ID NO: 3399523 - DNA, 25 bp, Homo sapien
ggttcattaaactgctaagatcaag

SEQ ID NO: 3399524 - DNA, 25 bp, Homo sapien
ccactagactgagttaagatttcca

SEQ ID NO: 3399525 - DNA, 25 bp, Homo sapien
catatttgagactgatgtgccttga

SEQ ID NO: 3399526 - DNA, 25 bp, Homo sapien
ttttctctctataagccctgcagaa

SEQ ID NO: 3399527 - DNA, 25 bp, Homo sapien
caagacccacggaaagggatatgac

SEQ ID NO: 3399528 - DNA, 25 bp, Homo sapien
tcatgtttaacaaaagggcctctct

SEQ ID NO: 3399529 - DNA, 25 bp, Homo sapien
tatgacaagtactcagaagtacagg

SEQ ID NO: 3399530 - DNA, 25 bp, Homo sapien
gggcctctctcaagacccacggaaa

SEQ ID NO: 3399531 - DNA, 25 bp, Homo sapien
tgatggaaaccactataaaggctga

SEQ ID NO: 3399532 - DNA, 25 bp, Homo sapien
ggcgtcattgcgagaatcacatacc

SEQ ID NO: 3399533 - DNA, 25 bp, Homo sapien
tagcatttacatcacggcgtcattg

SEQ ID NO: 3399534 - DNA, 25 bp, Homo sapien
gataggtgacttaagctttccagac

SEQ ID NO: 3399535 - DNA, 25 bp, Homo sapien
ttctgttcttccagaggtccgttgt

SEQ ID NO: 3399536 - DNA, 25 bp, Homo sapien
cagaggtccgttgttctacttttgc

SEQ ID NO: 3399537 - DNA, 25 bp, Homo sapien
gttcttccagaggtccgttgttcta

SEQ ID NO: 3399538 - DNA, 25 bp, Homo sapien
tcttccagaggtccgttgttctact

SEQ ID NO: 3399539 - DNA, 25 bp, Homo sapien
ccgtgcttgcgtttctctcacacaa

SEQ ID NO: 3399540 - DNA, 25 bp, Homo sapien
agggagctccgtgcttgcgtttctc

SEQ ID NO: 3399541 - DNA, 25 bp, Homo sapien
gcgtttctctcacacaacgggagat

SEQ ID NO: 3399542 - DNA, 25 bp, Homo sapien
tctctcacacaacgggagatctgca

SEQ ID NO: 3399543 - DNA, 25 bp, Homo sapien
tcaccggagagaaatgagcgacctg

SEQ ID NO: 3399544 - DNA, 25 bp, Homo sapien
gacctggatggttctccccgtcgcg

SEQ ID NO: 3399545 - DNA, 25 bp, Homo sapien
ccgaggaagttttctcaccggagag

SEQ ID NO: 3399546 - DNA, 25 bp, Homo sapien
cagcgcgagtcaacaaacgcttcgg

SEQ ID NO: 3399547 - DNA, 25 bp, Homo sapien
tccccggcgtgaatcaccccgagtc

SEQ ID NO: 3399548 - DNA, 25 bp, Homo sapien
cccggcgtgaatcaccccgagtcgc

SEQ ID NO: 3399549 - DNA, 25 bp, Homo sapien
ggcgtgaatcaccccgagtcgcgca

SEQ ID NO: 3399550 - DNA, 25 bp, Homo sapien
gtgaatcaccccgagtcgcgcacac

SEQ ID NO: 3399551 - DNA, 25 bp, Homo sapien
ccctaaagagcagaccgggagcgtg

SEQ ID NO: 3399552 - DNA, 25 bp, Homo sapien
ttcaaccaccctaaagagcagaccg

SEQ ID NO: 3399553 - DNA, 25 bp, Homo sapien
accaccctaaagagcagaccgggag

SEQ ID NO: 3399554 - DNA, 25 bp, Homo sapien
ggtacttcaaccaccctaaagagca

SEQ ID NO: 3399555 - DNA, 25 bp, Homo sapien
ctgaagcacagttagcaagcacaca

SEQ ID NO: 3399556 - DNA, 25 bp, Homo sapien
acagttagcaagcacacagcctggt

SEQ ID NO: 3399557 - DNA, 25 bp, Homo sapien
ttagcaagcacacagcctggtccca

SEQ ID NO: 3399558 - DNA, 25 bp, Homo sapien
gaagcacagttagcaagcacacagc

SEQ ID NO: 3399559 - DNA, 25 bp, Homo sapien
tgctgacaaacaaaacgcgggctcc

SEQ ID NO: 3399560 - DNA, 25 bp, Homo sapien
ctgacaaacaaaacgcgggctcccg

SEQ ID NO: 3399561 - DNA, 25 bp, Homo sapien
gctgacaaacaaaacgcgggctccc

SEQ ID NO: 3399562 - DNA, 25 bp, Homo sapien
agagctttttccacgcgggtctccg

SEQ ID NO: 3399563 - DNA, 25 bp, Homo sapien
aattctgcccaagcagggaagcccg

SEQ ID NO: 3399564 - DNA, 25 bp, Homo sapien
cagacgcagcgcgtgaacctttcgt

SEQ ID NO: 3399565 - DNA, 25 bp, Homo sapien
taattgaaaccttgcgcaccgcagg

SEQ ID NO: 3399566 - DNA, 25 bp, Homo sapien
tagcatgggtcatctgaatgtgcac

SEQ ID NO: 3399567 - DNA, 25 bp, Homo sapien
ttagcatgggtcatctgaatgtgca

SEQ ID NO: 3399568 - DNA, 25 bp, Homo sapien
caaatttctacggtggtcaggatca

SEQ ID NO: 3399569 - DNA, 25 bp, Homo sapien
gaaaggctacatgctacagaaaccg

SEQ ID NO: 3399570 - DNA, 25 bp, Homo sapien
gtgttgtcagtaacagcgccttcca

SEQ ID NO: 3399571 - DNA, 25 bp, Homo sapien
taaatatatatccatggccctctgg

SEQ ID NO: 3399572 - DNA, 25 bp, Homo sapien
cccgtacatgaaatccgaggattaa

SEQ ID NO: 3399573 - DNA, 25 bp, Homo sapien
ttctctctcccgtacatgaaatccg

SEQ ID NO: 3399574 - DNA, 25 bp, Homo sapien
cgaggattaatctacaaaggccata

SEQ ID NO: 3399575 - DNA, 25 bp, Homo sapien
gaaatccgaggattaatctacaaag

SEQ ID NO: 3399576 - DNA, 25 bp, Homo sapien
tagatgtttacaaggtcttcccgta

SEQ ID NO: 3399577 - DNA, 25 bp, Homo sapien
gagaatgtcctctacacatttgaag

SEQ ID NO: 3399578 - DNA, 25 bp, Homo sapien
gccacggtcagatggatttctactg

SEQ ID NO: 3399579 - DNA, 25 bp, Homo sapien
aaacccttctagctgagcctagctg

SEQ ID NO: 3399580 - DNA, 25 bp, Homo sapien
agtgttgccggcatttggtaaccag

SEQ ID NO: 3399581 - DNA, 25 bp, Homo sapien
aatgtaaggagagaacggtaaagtg

SEQ ID NO: 3399582 - DNA, 25 bp, Homo sapien
tctgtaataggtaatgtaaggagag

SEQ ID NO: 3399583 - DNA, 25 bp, Homo sapien
ctagtatttgctggaaacccaactg

SEQ ID NO: 3399584 - DNA, 25 bp, Homo sapien
tttcctctgtgcactcatgcccttg

SEQ ID NO: 3399585 - DNA, 25 bp, Homo sapien
ttctctttatgtccgaattgcctct

SEQ ID NO: 3399586 - DNA, 25 bp, Homo sapien
tctgtgcactcatgcccttgatgtt

SEQ ID NO: 3399587 - DNA, 25 bp, Homo sapien
tgccttgtagccatgccgtcacatg

SEQ ID NO: 3399588 - DNA, 25 bp, Homo sapien
agtgagttaagccactcagatgggc

SEQ ID NO: 3399589 - DNA, 25 bp, Homo sapien
gtggtcagaagagtgagttaagcca

SEQ ID NO: 3399590 - DNA, 25 bp, Homo sapien
gaagagtgagttaagccactcagat

SEQ ID NO: 3399591 - DNA, 25 bp, Homo sapien
ggtcagaagagtgagttaagccact

SEQ ID NO: 3399592 - DNA, 25 bp, Homo sapien
cagaaggttccgaatgccctcggaa

SEQ ID NO: 3399593 - DNA, 25 bp, Homo sapien
gggctgccttcaggccctcaggctt

SEQ ID NO: 3399594 - DNA, 25 bp, Homo sapien
ttcaggccctcaggctttcttaaaa

SEQ ID NO: 3399595 - DNA, 25 bp, Homo sapien
ctctaggaccagaaggttccgaatg

SEQ ID NO: 3399596 - DNA, 25 bp, Homo sapien
aagtcctggtgacagttcagcttca

SEQ ID NO: 3399597 - DNA, 25 bp, Homo sapien
agtcctggtgacagttcagcttcac

SEQ ID NO: 3399598 - DNA, 25 bp, Homo sapien
tcatgaagcgcggtctaggcctgcg

SEQ ID NO: 3399599 - DNA, 25 bp, Homo sapien
gaatgggagcgaagccgcgggtcat

SEQ ID NO: 3399600 - DNA, 25 bp, Homo sapien
gagcctgccgagctgcttggaatcg

SEQ ID NO: 3399601 - DNA, 25 bp, Homo sapien
tcttgtggaactcgacgggcagaat

SEQ ID NO: 3399602 - DNA, 25 bp, Homo sapien
cctgggagattccaaatggcatttc

SEQ ID NO: 3399603 - DNA, 25 bp, Homo sapien
ctgcatggacctgggagattccaaa

SEQ ID NO: 3399604 - DNA, 25 bp, Homo sapien
gatcgcaggaaactgcatggacctg

SEQ ID NO: 3399605 - DNA, 25 bp, Homo sapien
cagccagtgggatctgatcgcagga

SEQ ID NO: 3399606 - DNA, 25 bp, Homo sapien
gagctcgttgctttgcaagccaccc

SEQ ID NO: 3399607 - DNA, 25 bp, Homo sapien
tgatgttttcgttcagggcatagag

SEQ ID NO: 3399608 - DNA, 25 bp, Homo sapien
cccctttgaaaacgttgatcacagc

SEQ ID NO: 3399609 - DNA, 25 bp, Homo sapien
ctttgaaaacgttgatcacagcagt

SEQ ID NO: 3399610 - DNA, 25 bp, Homo sapien
aagcagcccttgatggtacagctca

SEQ ID NO: 3399611 - DNA, 25 bp, Homo sapien
caccgtcaagcagcccttgatggta

SEQ ID NO: 3399612 - DNA, 25 bp, Homo sapien
agaaacaccgtcaagcagcccttga

SEQ ID NO: 3399613 - DNA, 25 bp, Homo sapien
ggagaagagaaacaccgtcaagcag

SEQ ID NO: 3399614 - DNA, 25 bp, Homo sapien
aaatagtctgtaatgaatgatccaa

SEQ ID NO: 3399615 - DNA, 25 bp, Homo sapien
atccaagttcactcttcaacagccg

SEQ ID NO: 3399616 - DNA, 25 bp, Homo sapien
gaatgatccaagttcactcttcaac

SEQ ID NO: 3399617 - DNA, 25 bp, Homo sapien
aatgaatgatccaagttcactcttc

SEQ ID NO: 3399618 - DNA, 25 bp, Homo sapien
ttgcctgatggcaccaaccccacca

SEQ ID NO: 3399619 - DNA, 25 bp, Homo sapien
tcacagtattcccatcccctgacca

SEQ ID NO: 3399620 - DNA, 25 bp, Homo sapien
ctgagctgtagtgatggagctgtat

SEQ ID NO: 3399621 - DNA, 25 bp, Homo sapien
gcctgactccagaagtttctgagtg

SEQ ID NO: 3399622 - DNA, 25 bp, Homo sapien
gaacagtccttttgcaagaagctgg

SEQ ID NO: 3399623 - DNA, 25 bp, Homo sapien
ccacaaagaacagtccttttgcaag

SEQ ID NO: 3399624 - DNA, 25 bp, Homo sapien
cttctcctccacaaagaacagtcct

SEQ ID NO: 3399625 - DNA, 25 bp, Homo sapien
acagtccttttgcaagaagctggtt

SEQ ID NO: 3399626 - DNA, 25 bp, Homo sapien
gaggccccagtctaccagggctgtc

SEQ ID NO: 3399627 - DNA, 25 bp, Homo sapien
agaggccccagtctaccagggctgt

SEQ ID NO: 3399628 - DNA, 25 bp, Homo sapien
cccagtctaccagggctgtcttgta

SEQ ID NO: 3399629 - DNA, 25 bp, Homo sapien
ggccccagtctaccagggctgtctt

SEQ ID NO: 3399630 - DNA, 25 bp, Homo sapien
agcatctcagccgtccagacatcaa

SEQ ID NO: 3399631 - DNA, 25 bp, Homo sapien
agaagcatctcagccgtccagacat

SEQ ID NO: 3399632 - DNA, 25 bp, Homo sapien
tctcagccgtccagacatcaaagac

SEQ ID NO: 3399633 - DNA, 25 bp, Homo sapien
gacagaagcatctcagccgtccaga

SEQ ID NO: 3399634 - DNA, 25 bp, Homo sapien
tgtaggaaatagctcgggacagacc

SEQ ID NO: 3399635 - DNA, 25 bp, Homo sapien
tctacggttcattaggctggagcag

SEQ ID NO: 3399636 - DNA, 25 bp, Homo sapien
cataccctattgagtgagtgcctgc

SEQ ID NO: 3399637 - DNA, 25 bp, Homo sapien
gtccggtatgttcgcctgtgtgcca

SEQ ID NO: 3399638 - DNA, 25 bp, Homo sapien
tttcaaatataggctatgctgtttc

SEQ ID NO: 3399639 - DNA, 25 bp, Homo sapien
ctttcaaatataggctatgctgttt

SEQ ID NO: 3399640 - DNA, 25 bp, Homo sapien
ccactttacagtaactgggaaggca

SEQ ID NO: 3399641 - DNA, 25 bp, Homo sapien
tctgggtttcagctgtcaatggaga

SEQ ID NO: 3399642 - DNA, 25 bp, Homo sapien
ttattctgggtttcagctgtcaatg

SEQ ID NO: 3399643 - DNA, 25 bp, Homo sapien
tcattaagatattggctttattctg

SEQ ID NO: 3399644 - DNA, 25 bp, Homo sapien
aggtgtggggaggaaagagagctca

SEQ ID NO: 3399645 - DNA, 25 bp, Homo sapien
taggtgtggggaggaaagagagctc

SEQ ID NO: 3399646 - DNA, 25 bp, Homo sapien
ggtgtggggaggaaagagagctcat

SEQ ID NO: 3399647 - DNA, 25 bp, Homo sapien
tcttcactagtaagactctgaatgg

SEQ ID NO: 3399648 - DNA, 25 bp, Homo sapien
gtcttcactagtaagactctgaatg

SEQ ID NO: 3399649 - DNA, 25 bp, Homo sapien
agactctgaatgggaggcgcagcat

SEQ ID NO: 3399650 - DNA, 25 bp, Homo sapien
tagtcttcactagtaagactctgaa

SEQ ID NO: 3399651 - DNA, 25 bp, Homo sapien
agtgaagaagtggtcccagacttca

SEQ ID NO: 3399652 - DNA, 25 bp, Homo sapien
agtggtcccagacttcagccagaac

SEQ ID NO: 3399653 - DNA, 25 bp, Homo sapien
tggtcccagacttcagccagaacct

SEQ ID NO: 3399654 - DNA, 25 bp, Homo sapien
aagaagtggtcccagacttcagcca

SEQ ID NO: 3399655 - DNA, 25 bp, Homo sapien
gcctttgggacttctaagcccatgg

SEQ ID NO: 3399656 - DNA, 25 bp, Homo sapien
aaacattacactctcagaagaaaag

SEQ ID NO: 3399657 - DNA, 25 bp, Homo sapien
ccatggttaaacattacactctcag

SEQ ID NO: 3399658 - DNA, 25 bp, Homo sapien
ttgcctttgggacttctaagcccat

SEQ ID NO: 3399659 - DNA, 25 bp, Homo sapien
accttcagcaagactaggtctcgga

SEQ ID NO: 3399660 - DNA, 25 bp, Homo sapien
ctaggtctcggaagcccagcaggga

SEQ ID NO: 3399661 - DNA, 25 bp, Homo sapien
gagatctggcggatagtcagctcct

SEQ ID NO: 3399662 - DNA, 25 bp, Homo sapien
tctggacaatggacgagggcagctt

SEQ ID NO: 3399663 - DNA, 25 bp, Homo sapien
tcgatcaggtacaaaccaaacacag

SEQ ID NO: 3399664 - DNA, 25 bp, Homo sapien
tggaagcacatcagctgtgaggtgt

SEQ ID NO: 3399665 - DNA, 25 bp, Homo sapien
gatgaagacagacaaagtagcccag

SEQ ID NO: 3399666 - DNA, 25 bp, Homo sapien
caaagtagcccagatacaagtagag

SEQ ID NO: 3399667 - DNA, 25 bp, Homo sapien
ctggcacagggcccggaatgttgga

SEQ ID NO: 3399668 - DNA, 25 bp, Homo sapien
tgttggaatgtgatagacacaggcc

SEQ ID NO: 3399669 - DNA, 25 bp, Homo sapien
cacagggcccggaatgttggaatgt

SEQ ID NO: 3399670 - DNA, 25 bp, Homo sapien
aatgttggaatgtgatagacacagg

SEQ ID NO: 3399671 - DNA, 25 bp, Homo sapien
gatgacagctttctcatatggctgc

SEQ ID NO: 3399672 - DNA, 25 bp, Homo sapien
gactcaggggtatgatgacagcttt

SEQ ID NO: 3399673 - DNA, 25 bp, Homo sapien
agctttctcatatggctgcagggct

SEQ ID NO: 3399674 - DNA, 25 bp, Homo sapien
gacagctttctcatatggctgcagg

SEQ ID NO: 3399675 - DNA, 25 bp, Homo sapien
ctgagaatgcaccattccggtggtc

SEQ ID NO: 3399676 - DNA, 25 bp, Homo sapien
tgcaccattccggtggtctcaggac

SEQ ID NO: 3399677 - DNA, 25 bp, Homo sapien
ccggtggtctcaggacctgtctgca

SEQ ID NO: 3399678 - DNA, 25 bp, Homo sapien
gggcccctgagaatgcaccattccg

SEQ ID NO: 3399679 - DNA, 25 bp, Homo sapien
tgaccagcaggttctcactcaacaa

SEQ ID NO: 3399680 - DNA, 25 bp, Homo sapien
tcctccaatgtacaaggctgtgttg

SEQ ID NO: 3399681 - DNA, 25 bp, Homo sapien
tgaacagccaagatacacaaaggtc

SEQ ID NO: 3399682 - DNA, 25 bp, Homo sapien
cactcaacaaatcctgattgtcctc

SEQ ID NO: 3399683 - DNA, 25 bp, Homo sapien
ggagaaaccacttgcttcaccagct

SEQ ID NO: 3399684 - DNA, 25 bp, Homo sapien
cgctgatgccgaggaaaggagaaac

SEQ ID NO: 3399685 - DNA, 25 bp, Homo sapien
cctccagttgcaaataactctcact

SEQ ID NO: 3399686 - DNA, 25 bp, Homo sapien
gggcctgagaagctacggtccccgc

SEQ ID NO: 3399687 - DNA, 25 bp, Homo sapien
gaaagattaatgtcctaggcgcacc

SEQ ID NO: 3399688 - DNA, 25 bp, Homo sapien
gaggtttctctactcaaccagaggg

SEQ ID NO: 3399689 - DNA, 25 bp, Homo sapien
tgtactgaacccatctagactgcag

SEQ ID NO: 3399690 - DNA, 25 bp, Homo sapien
caaagggaaatctatctcaggaggt

SEQ ID NO: 3399691 - DNA, 25 bp, Homo sapien
ggaggacgctcctttctttgaagct

SEQ ID NO: 3399692 - DNA, 25 bp, Homo sapien
gagggggcatcaggttcccaatttg

SEQ ID NO: 3399693 - DNA, 25 bp, Homo sapien
ttgaagctcaactattacaactcca

SEQ ID NO: 3399694 - DNA, 25 bp, Homo sapien
actattacaactccattaaagtgag

SEQ ID NO: 3399695 - DNA, 25 bp, Homo sapien
agggtggtgaaaactgccagctggc

SEQ ID NO: 3399696 - DNA, 25 bp, Homo sapien
ggtgtctccagaaaaacatgagcag

SEQ ID NO: 3399697 - DNA, 25 bp, Homo sapien
agcagggtggtgaaaactgccagct

SEQ ID NO: 3399698 - DNA, 25 bp, Homo sapien
gctggtgtctccagaaaaacatgag

SEQ ID NO: 3399699 - DNA, 25 bp, Homo sapien
tgggaggaatgagtgaggaagggag

SEQ ID NO: 3399700 - DNA, 25 bp, Homo sapien
ctgggaggaatgagtgaggaaggga

SEQ ID NO: 3399701 - DNA, 25 bp, Homo sapien
aggaaggagaagaaccagcaggcag

SEQ ID NO: 3399702 - DNA, 25 bp, Homo sapien
gagggaggaaggagaagaaccagca

SEQ ID NO: 3399703 - DNA, 25 bp, Homo sapien
cagtgtcattgaaactctggcccat

SEQ ID NO: 3399704 - DNA, 25 bp, Homo sapien
cattgaaactctggcccattccagc

SEQ ID NO: 3399705 - DNA, 25 bp, Homo sapien
tccttcagtgtcattgaaactctgg

SEQ ID NO: 3399706 - DNA, 25 bp, Homo sapien
tggggctgcagaagactgttttcct

SEQ ID NO: 3399707 - DNA, 25 bp, Homo sapien
actccagggagaccgcagcaacatg

SEQ ID NO: 3399708 - DNA, 25 bp, Homo sapien
tggactccagggagaccgcagcaac

SEQ ID NO: 3399709 - DNA, 25 bp, Homo sapien
gtggactccagggagaccgcagcaa

SEQ ID NO: 3399710 - DNA, 25 bp, Homo sapien
aaggtggactccagggagaccgcag

SEQ ID NO: 3399711 - DNA, 25 bp, Homo sapien
tctacactggcattaggcccaaaca

SEQ ID NO: 3399712 - DNA, 25 bp, Homo sapien
tacagggttctgttccaactaagag

SEQ ID NO: 3399713 - DNA, 25 bp, Homo sapien
aatggtagcgttcctgccatggccc

SEQ ID NO: 3399714 - DNA, 25 bp, Homo sapien
caactaagagcttaggagagttgga

SEQ ID NO: 3399715 - DNA, 25 bp, Homo sapien
caggacgaggtctgtgtccagtagc

SEQ ID NO: 3399716 - DNA, 25 bp, Homo sapien
acgaggtctgtgtccagtagctccc

SEQ ID NO: 3399717 - DNA, 25 bp, Homo sapien
ggacgaggtctgtgtccagtagctc

SEQ ID NO: 3399718 - DNA, 25 bp, Homo sapien
ccaggacgaggtctgtgtccagtag

SEQ ID NO: 3399719 - DNA, 25 bp, Homo sapien
ggaataaaccgcttctctggctctg

SEQ ID NO: 3399720 - DNA, 25 bp, Homo sapien
ctcgtgcagtcaaacacaggcgcgg

SEQ ID NO: 3399721 - DNA, 25 bp, Homo sapien
tgcagtgcggagccccgggaataaa

SEQ ID NO: 3399722 - DNA, 25 bp, Homo sapien
gaagggacacctccggagaatcctc

SEQ ID NO: 3399723 - DNA, 25 bp, Homo sapien
cctgcaccggagccagcaagagcag

SEQ ID NO: 3399724 - DNA, 25 bp, Homo sapien
actggcattcatcccctgcaccgga

SEQ ID NO: 3399725 - DNA, 25 bp, Homo sapien
aagcctggataaggccgtcctcggg

SEQ ID NO: 3399726 - DNA, 25 bp, Homo sapien
gctcctttcaaacccccagagagat

SEQ ID NO: 3399727 - DNA, 25 bp, Homo sapien
caggagccctgctgaacactggcat

SEQ ID NO: 3399728 - DNA, 25 bp, Homo sapien
agggcagcttcttcctcctgctgat

SEQ ID NO: 3399729 - DNA, 25 bp, Homo sapien
agacagggcagcttcttcctcctgc

SEQ ID NO: 3399730 - DNA, 25 bp, Homo sapien
ctgagacagggcagcttcttcctcc

SEQ ID NO: 3399731 - DNA, 25 bp, Homo sapien
gggcagcttcttcctcctgctgatc

SEQ ID NO: 3399732 - DNA, 25 bp, Homo sapien
gtgcccatatctctgacaccctgaa

SEQ ID NO: 3399733 - DNA, 25 bp, Homo sapien
ccctgaagacccaagagaaaggtgt

SEQ ID NO: 3399734 - DNA, 25 bp, Homo sapien
tgaagacccaagagaaaggtgttcc

SEQ ID NO: 3399735 - DNA, 25 bp, Homo sapien
gcttcccagtcacatacaccatttc

SEQ ID NO: 3399736 - DNA, 25 bp, Homo sapien
tgtccgagtgggcattggccaccgt

SEQ ID NO: 3399737 - DNA, 25 bp, Homo sapien
gaccatctcattcagtggccggctg

SEQ ID NO: 3399738 - DNA, 25 bp, Homo sapien
gcccgagtgcatcatggtggccatg

SEQ ID NO: 3399739 - DNA, 25 bp, Homo sapien
ttcaggacagtcaccttgggccgga

SEQ ID NO: 3399740 - DNA, 25 bp, Homo sapien
catcaggcagtccaacatcggaggg

SEQ ID NO: 3399741 - DNA, 25 bp, Homo sapien
tgagaccgacaactacaaagaggag

SEQ ID NO: 3399742 - DNA, 25 bp, Homo sapien
gcaaaacaggagatggaaaggccca

SEQ ID NO: 3399743 - DNA, 25 bp, Homo sapien
tgagaaggtctcatcaccgtggcag

SEQ ID NO: 3399744 - DNA, 25 bp, Homo sapien
ctccttagcgtgaaggcagagccct

SEQ ID NO: 3399745 - DNA, 25 bp, Homo sapien
ctgctccttagcgtgaaggcagagc

SEQ ID NO: 3399746 - DNA, 25 bp, Homo sapien
cactgctccttagcgtgaaggcaga

SEQ ID NO: 3399747 - DNA, 25 bp, Homo sapien
tgctccttagcgtgaaggcagagcc

SEQ ID NO: 3399748 - DNA, 25 bp, Homo sapien
agttggaacatgcttggagagagct

SEQ ID NO: 3399749 - DNA, 25 bp, Homo sapien
tcactgggtcacctggccacacagc

SEQ ID NO: 3399750 - DNA, 25 bp, Homo sapien
caggaacagggttaactctctgcag

SEQ ID NO: 3399751 - DNA, 25 bp, Homo sapien
ggaacagggttaactctctgcaggg

SEQ ID NO: 3399752 - DNA, 25 bp, Homo sapien
aacagggttaactctctgcagggaa

SEQ ID NO: 3399753 - DNA, 25 bp, Homo sapien
cagggttaactctctgcagggaagt

SEQ ID NO: 3399754 - DNA, 25 bp, Homo sapien
aacagtaactcaacactgctgctgg

SEQ ID NO: 3399755 - DNA, 25 bp, Homo sapien
gacaaagacaggatgagcccaactc

SEQ ID NO: 3399756 - DNA, 25 bp, Homo sapien
gctggacccagctgtctatgctagg

SEQ ID NO: 3399757 - DNA, 25 bp, Homo sapien
ctgggaatgtggataaactgcaaac

SEQ ID NO: 3399758 - DNA, 25 bp, Homo sapien
attgtgttgggggaacccacagaag

SEQ ID NO: 3399759 - DNA, 25 bp, Homo sapien
ctttctggtggcaggtttcggggct

SEQ ID NO: 3399760 - DNA, 25 bp, Homo sapien
ggtttcggggctgagcctcatggct

SEQ ID NO: 3399761 - DNA, 25 bp, Homo sapien
tctcacacattgtgttgggggaacc

SEQ ID NO: 3399762 - DNA, 25 bp, Homo sapien
cagatacgaaaggacatattttgca

SEQ ID NO: 3399763 - DNA, 25 bp, Homo sapien
tttatatgaggcactaagagtagca

SEQ ID NO: 3399764 - DNA, 25 bp, Homo sapien
accttgaagatattaagccaagtga

SEQ ID NO: 3399765 - DNA, 25 bp, Homo sapien
gagtagcaaaattcataagagacag

SEQ ID NO: 3399766 - DNA, 25 bp, Homo sapien
acaattcaggcagttcaggctggag

SEQ ID NO: 3399767 - DNA, 25 bp, Homo sapien
gatggagccattagctgggaaagct

SEQ ID NO: 3399768 - DNA, 25 bp, Homo sapien
aatgggtggactctacaactctggg

SEQ ID NO: 3399769 - DNA, 25 bp, Homo sapien
tgcaagagcactcgaggaaaagggc

SEQ ID NO: 3399770 - DNA, 25 bp, Homo sapien
cattagtaccacaagctcatggcta

SEQ ID NO: 3399771 - DNA, 25 bp, Homo sapien
agcagagaccttgtttcccgtgcca

SEQ ID NO: 3399772 - DNA, 25 bp, Homo sapien
aatcagagtcgccagccagcgttct

SEQ ID NO: 3399773 - DNA, 25 bp, Homo sapien
gaatctagttctcagggagacccgc

SEQ ID NO: 3399774 - DNA, 25 bp, Homo sapien
gcttgagtatgttgctgtagcctaa

SEQ ID NO: 3399775 - DNA, 25 bp, Homo sapien
tgagaaggatcctgtagaatcctgg

SEQ ID NO: 3399776 - DNA, 25 bp, Homo sapien
ctaacaactgcaggttctgagaagg

SEQ ID NO: 3399777 - DNA, 25 bp, Homo sapien
tcacaacttagcttgagtatgttgc

SEQ ID NO: 3399778 - DNA, 25 bp, Homo sapien
catacgcatgactactatcctggaa

SEQ ID NO: 3399779 - DNA, 25 bp, Homo sapien
tctggcttcaggatacatacgcatg

SEQ ID NO: 3399780 - DNA, 25 bp, Homo sapien
gcaaaacgcgtggtacattctctag

SEQ ID NO: 3399781 - DNA, 25 bp, Homo sapien
cccctaagaggtggacgatgaacca

SEQ ID NO: 3399782 - DNA, 25 bp, Homo sapien
ttttaaggccagaatcctgtattca

SEQ ID NO: 3399783 - DNA, 25 bp, Homo sapien
tttaaggccagaatcctgtattcag

SEQ ID NO: 3399784 - DNA, 25 bp, Homo sapien
ttaaggccagaatcctgtattcaga

SEQ ID NO: 3399785 - DNA, 25 bp, Homo sapien
tttgaagtggcttcagattgcactc

SEQ ID NO: 3399786 - DNA, 25 bp, Homo sapien
gggtctcatcgtccccactgcaatg

SEQ ID NO: 3399787 - DNA, 25 bp, Homo sapien
gaatgtccttgggtctcatcgtccc

SEQ ID NO: 3399788 - DNA, 25 bp, Homo sapien
caagaaaacaaggtgattctttgaa

SEQ ID NO: 3399789 - DNA, 25 bp, Homo sapien
gaacttgatagatatccacctggtc

SEQ ID NO: 3399790 - DNA, 25 bp, Homo sapien
cttgatagatatccacctggtctag

SEQ ID NO: 3399791 - DNA, 25 bp, Homo sapien
atagatatccacctggtctagcaga

SEQ ID NO: 3399792 - DNA, 25 bp, Homo sapien
aagagaacttgatagatatccacct

SEQ ID NO: 3399793 - DNA, 25 bp, Homo sapien
tctcttcccatctgaatacgcttta

SEQ ID NO: 3399794 - DNA, 25 bp, Homo sapien
tcctctcttcccatctgaatacgct

SEQ ID NO: 3399795 - DNA, 25 bp, Homo sapien
gagacggagttttctaaatgtacaa

SEQ ID NO: 3399796 - DNA, 25 bp, Homo sapien
ttgatttttgtatcccgagactttg

SEQ ID NO: 3399797 - DNA, 25 bp, Homo sapien
aagtcctcagtgacctacaaagaga

SEQ ID NO: 3399798 - DNA, 25 bp, Homo sapien
cataaagcaagtcctcagtgaccta

SEQ ID NO: 3399799 - DNA, 25 bp, Homo sapien
agtcctcagtgacctacaaagagac

SEQ ID NO: 3399800 - DNA, 25 bp, Homo sapien
aagcaagtcctcagtgacctacaaa

SEQ ID NO: 3399801 - DNA, 25 bp, Homo sapien
gagaaccaggaaaatccgtagtgta

SEQ ID NO: 3399802 - DNA, 25 bp, Homo sapien
gtaattcagtccaagcccgaagtcc

SEQ ID NO: 3399803 - DNA, 25 bp, Homo sapien
tcctgagatccaggaacacggatgt

SEQ ID NO: 3399804 - DNA, 25 bp, Homo sapien
caagcccgaagtcctgagatccagg

SEQ ID NO: 3399805 - DNA, 25 bp, Homo sapien
atggtctgagtgtgtgaacgctgca

SEQ ID NO: 3399806 - DNA, 25 bp, Homo sapien
cagcaatgagttccaattgctgata

SEQ ID NO: 3399807 - DNA, 25 bp, Homo sapien
cagacagcaatgagttccaattgct

SEQ ID NO: 3399808 - DNA, 25 bp, Homo sapien
tggtctgagtgtgtgaacgctgcat

SEQ ID NO: 3399809 - DNA, 25 bp, Homo sapien
gagaagtaagacctcccttggatca

SEQ ID NO: 3399810 - DNA, 25 bp, Homo sapien
tcccatccgtgttgaaatcaagtca

SEQ ID NO: 3399811 - DNA, 25 bp, Homo sapien
tcaagtcacttgtctcctattgaga

SEQ ID NO: 3399812 - DNA, 25 bp, Homo sapien
ttccatgtttctcccaatttcacct

SEQ ID NO: 3399813 - DNA, 25 bp, Homo sapien
gctccttaaaatcttgcatctccaa

SEQ ID NO: 3399814 - DNA, 25 bp, Homo sapien
cttaaaatcttgcatctccaatgga

SEQ ID NO: 3399815 - DNA, 25 bp, Homo sapien
ttaaaatcttgcatctccaatggac

SEQ ID NO: 3399816 - DNA, 25 bp, Homo sapien
tccttaaaatcttgcatctccaatg

SEQ ID NO: 3399817 - DNA, 25 bp, Homo sapien
ttccccaaggagatgcagcctttac

SEQ ID NO: 3399818 - DNA, 25 bp, Homo sapien
tttccccaaggagatgcagccttta

SEQ ID NO: 3399819 - DNA, 25 bp, Homo sapien
ttcgacgctcctcttacatctccca

SEQ ID NO: 3399820 - DNA, 25 bp, Homo sapien
ctgccctcattcgacgctcctctta

SEQ ID NO: 3399821 - DNA, 25 bp, Homo sapien
ttggacctacttaaccacacaacag

SEQ ID NO: 3399822 - DNA, 25 bp, Homo sapien
catctcccactctttcgcatttgga

SEQ ID NO: 3399823 - DNA, 25 bp, Homo sapien
ttgattcattacttaaactttagga

SEQ ID NO: 3399824 - DNA, 25 bp, Homo sapien
tgattcattacttaaactttaggaa

SEQ ID NO: 3399825 - DNA, 25 bp, Homo sapien
ggaacttcaatctcatcacctgcaa

SEQ ID NO: 3399826 - DNA, 25 bp, Homo sapien
ctttaggaacttcaatctcatcacc

SEQ ID NO: 3399827 - DNA, 25 bp, Homo sapien
gagatgtctgcaatttggttgatat

SEQ ID NO: 3399828 - DNA, 25 bp, Homo sapien
tggttgatattactcaataccaaag

SEQ ID NO: 3399829 - DNA, 25 bp, Homo sapien
ttgatattactcaataccaaagaga

SEQ ID NO: 3399830 - DNA, 25 bp, Homo sapien
ttgagatgtctgcaatttggttgat

SEQ ID NO: 3399831 - DNA, 25 bp, Homo sapien
aggtgggtgggaaagaggctgccat

SEQ ID NO: 3399832 - DNA, 25 bp, Homo sapien
tgagtcccaaggtgggtgggaaaga

SEQ ID NO: 3399833 - DNA, 25 bp, Homo sapien
ccaaggtgggtgggaaagaggctgc

SEQ ID NO: 3399834 - DNA, 25 bp, Homo sapien
ctgagtcccaaggtgggtgggaaag

SEQ ID NO: 3399835 - DNA, 25 bp, Homo sapien
cacatcgatccggaaaaccttggca

SEQ ID NO: 3399836 - DNA, 25 bp, Homo sapien
tcagtagggaagcatggatatcggc

SEQ ID NO: 3399837 - DNA, 25 bp, Homo sapien
aaaagaattcccacagatgcggcag

SEQ ID NO: 3399838 - DNA, 25 bp, Homo sapien
catcagggaattcaagacgctcaga

SEQ ID NO: 3399839 - DNA, 25 bp, Homo sapien
tgtgacttgagatgtggtgattata

SEQ ID NO: 3399840 - DNA, 25 bp, Homo sapien
ttgtgacttgagatgtggtgattat

SEQ ID NO: 3399841 - DNA, 25 bp, Homo sapien
cttgtgacttgagatgtggtgatta

SEQ ID NO: 3399842 - DNA, 25 bp, Homo sapien
tgacttgagatgtggtgattatatt

SEQ ID NO: 3399843 - DNA, 25 bp, Homo sapien
tccgaagggcatgcaaaggctgaaa

SEQ ID NO: 3399844 - DNA, 25 bp, Homo sapien
aagtttttcatcatagccggtgccc

SEQ ID NO: 3399845 - DNA, 25 bp, Homo sapien
gactcatggtaagggttggaacgcc

SEQ ID NO: 3399846 - DNA, 25 bp, Homo sapien
gaacttgaaagtccggagaatgcct

SEQ ID NO: 3399847 - DNA, 25 bp, Homo sapien
ccagtggtgtttcaggacatcttcc

SEQ ID NO: 3399848 - DNA, 25 bp, Homo sapien
cattttccggaagcgcctaaacagt

SEQ ID NO: 3399849 - DNA, 25 bp, Homo sapien
ctcatagcatttggactgcctggca

SEQ ID NO: 3399850 - DNA, 25 bp, Homo sapien
tatttggaggtgtacaaccagtggt

SEQ ID NO: 3399851 - DNA, 25 bp, Homo sapien
gctttccagagagtcctctatgcct

SEQ ID NO: 3399852 - DNA, 25 bp, Homo sapien
taatgggtcccctaagcttgcctga

SEQ ID NO: 3399853 - DNA, 25 bp, Homo sapien
ttccattgaatcttggctttccaga

SEQ ID NO: 3399854 - DNA, 25 bp, Homo sapien
gcttgcctgagggttcatggtaaac

SEQ ID NO: 3399855 - DNA, 25 bp, Homo sapien
tgaagccccatacacagcagtaaag

SEQ ID NO: 3399856 - DNA, 25 bp, Homo sapien
tattgcagtctcaacagtaagggca

SEQ ID NO: 3399857 - DNA, 25 bp, Homo sapien
taccactggcgcttatatatcctgc

SEQ ID NO: 3399858 - DNA, 25 bp, Homo sapien
caaataactggagccacaagagggt

SEQ ID NO: 3399859 - DNA, 25 bp, Homo sapien
gaagatgttcaacagctgtacctct

SEQ ID NO: 3399860 - DNA, 25 bp, Homo sapien
gttcaacagctgtacctctttcttc

SEQ ID NO: 3399861 - DNA, 25 bp, Homo sapien
cttgaagatgttcaacagctgtacc

SEQ ID NO: 3399862 - DNA, 25 bp, Homo sapien
gatgttcaacagctgtacctctttc

SEQ ID NO: 3399863 - DNA, 25 bp, Homo sapien
tgtgctgaagatgatactaatgaag

SEQ ID NO: 3399864 - DNA, 25 bp, Homo sapien
gaagatccaggggattccactccct

SEQ ID NO: 3399865 - DNA, 25 bp, Homo sapien
ttgaagactctgaagaattttgttt

SEQ ID NO: 3399866 - DNA, 25 bp, Homo sapien
cagtgcagaagcaaatagttttgat

SEQ ID NO: 3399867 - DNA, 25 bp, Homo sapien
tcccagagcaacaaagacagatttc

SEQ ID NO: 3399868 - DNA, 25 bp, Homo sapien
ctcccagagcaacaaagacagattt

SEQ ID NO: 3399869 - DNA, 25 bp, Homo sapien
cccagagcaacaaagacagatttcc

SEQ ID NO: 3399870 - DNA, 25 bp, Homo sapien
ttgctcccgtctagtcacttcgcac

SEQ ID NO: 3399871 - DNA, 25 bp, Homo sapien
cctttgctcccgtctagtcacttcg

SEQ ID NO: 3399872 - DNA, 25 bp, Homo sapien
tttgctcccgtctagtcacttcgca

SEQ ID NO: 3399873 - DNA, 25 bp, Homo sapien
ctttgctcccgtctagtcacttcgc

SEQ ID NO: 3399874 - DNA, 25 bp, Homo sapien
cagggtagcggtttgcccgacaccg

SEQ ID NO: 3399875 - DNA, 25 bp, Homo sapien
gacgttgggtcggtgtcagccactc

SEQ ID NO: 3399876 - DNA, 25 bp, Homo sapien
agcaataccagggtagcggtttgcc

SEQ ID NO: 3399877 - DNA, 25 bp, Homo sapien
cccaggagaggctccagcaatacca

SEQ ID NO: 3399878 - DNA, 25 bp, Homo sapien
cagtcacggcttttgtaacctcggt

SEQ ID NO: 3399879 - DNA, 25 bp, Homo sapien
ggcaggacaccgtaacgacatctct

SEQ ID NO: 3399880 - DNA, 25 bp, Homo sapien
ttgagtcgcgctcctaagcatccag

SEQ ID NO: 3399881 - DNA, 25 bp, Homo sapien
caatgtctcccctgcactctaggga

SEQ ID NO: 3399882 - DNA, 25 bp, Homo sapien
tataccaagattatccccagttaga

SEQ ID NO: 3399883 - DNA, 25 bp, Homo sapien
tatctgtctatacccactgacctga

SEQ ID NO: 3399884 - DNA, 25 bp, Homo sapien
taacatttggtgcacaggacatcac

SEQ ID NO: 3399885 - DNA, 25 bp, Homo sapien
cattactggcaggtgcgtatgcact

SEQ ID NO: 3399886 - DNA, 25 bp, Homo sapien
tacttgctactctggagcaatcaag

SEQ ID NO: 3399887 - DNA, 25 bp, Homo sapien
cagcacggatcagcaagatttaatg

SEQ ID NO: 3399888 - DNA, 25 bp, Homo sapien
tcaagaaaacatggccagcacggat

SEQ ID NO: 3399889 - DNA, 25 bp, Homo sapien
tctggagcaatcaagaaaacatggc

SEQ ID NO: 3399890 - DNA, 25 bp, Homo sapien
gagtcaactttacagctctataatc

SEQ ID NO: 3399891 - DNA, 25 bp, Homo sapien
gactcctgataaaactgtgaatcca

SEQ ID NO: 3399892 - DNA, 25 bp, Homo sapien
taaaagatttattagctcaaaccta

SEQ ID NO: 3399893 - DNA, 25 bp, Homo sapien
agcagtaaggtttctgagtcaactt

SEQ ID NO: 3399894 - DNA, 25 bp, Homo sapien
gagtaaaagtgttcagaaattcttc

SEQ ID NO: 3399895 - DNA, 25 bp, Homo sapien
tcttcatcatatgtttgctcatgac

SEQ ID NO: 3399896 - DNA, 25 bp, Homo sapien
gaatttatccaagacgtctttgatt

SEQ ID NO: 3399897 - DNA, 25 bp, Homo sapien
tatgtttgctcatgacaattaagga

SEQ ID NO: 3399898 - DNA, 25 bp, Homo sapien
aacaacctccactctttgcatttgg

SEQ ID NO: 3399899 - DNA, 25 bp, Homo sapien
aacctccactctttgcatttggctt

SEQ ID NO: 3399900 - DNA, 25 bp, Homo sapien
actctttgcatttggctttcttaaa

SEQ ID NO: 3399901 - DNA, 25 bp, Homo sapien
ctccactctttgcatttggctttct

SEQ ID NO: 3399902 - DNA, 25 bp, Homo sapien
cacaacatgggtttggcctcatcac

SEQ ID NO: 3399903 - DNA, 25 bp, Homo sapien
catccagtctaaagggttgtttcca

SEQ ID NO: 3399904 - DNA, 25 bp, Homo sapien
caataacactggatgagggaaacaa

SEQ ID NO: 3399905 - DNA, 25 bp, Homo sapien
caggatccagaagtgtgcagtgtaa

SEQ ID NO: 3399906 - DNA, 25 bp, Homo sapien
tacgaatcccttgatcctagctgag

SEQ ID NO: 3399907 - DNA, 25 bp, Homo sapien
ttctaaaagcgagtcaggtgagtct

SEQ ID NO: 3399908 - DNA, 25 bp, Homo sapien
tacatattagaagcaccagaggagg

SEQ ID NO: 3399909 - DNA, 25 bp, Homo sapien
gatggcaatctgaagcagaacccag

SEQ ID NO: 3399910 - DNA, 25 bp, Homo sapien
tataagtattcacatcagtgtttct

SEQ ID NO: 3399911 - DNA, 25 bp, Homo sapien
caaatataagtattcacatcagtgt

SEQ ID NO: 3399912 - DNA, 25 bp, Homo sapien
aagtattcacatcagtgtttctata

SEQ ID NO: 3399913 - DNA, 25 bp, Homo sapien
tcaaatataagtattcacatcagtg

SEQ ID NO: 3399914 - DNA, 25 bp, Homo sapien
gccacctggaagcataaagctggtc

SEQ ID NO: 3399915 - DNA, 25 bp, Homo sapien
taaatgactgataacaacggcactg

SEQ ID NO: 3399916 - DNA, 25 bp, Homo sapien
gaaaatgtggcttcagtgccacctg

SEQ ID NO: 3399917 - DNA, 25 bp, Homo sapien
taaagctggtcagttcgtttccaac

SEQ ID NO: 3399918 - DNA, 25 bp, Homo sapien
gatgaagtacgaagaaagatggttt

SEQ ID NO: 3399919 - DNA, 25 bp, Homo sapien
tctaagatggtagtcatctgcttca

SEQ ID NO: 3399920 - DNA, 25 bp, Homo sapien
tcttccaaacattgtgatgaagtac

SEQ ID NO: 3399921 - DNA, 25 bp, Homo sapien
catttttatgagtaacttttgctga

SEQ ID NO: 3399922 - DNA, 25 bp, Homo sapien
cacatattgatggaaaaatgaaaca

SEQ ID NO: 3399923 - DNA, 25 bp, Homo sapien
acatattgatggaaaaatgaaacaa

SEQ ID NO: 3399924 - DNA, 25 bp, Homo sapien
aaaatactttttggccttcatccat

SEQ ID NO: 3399925 - DNA, 25 bp, Homo sapien
tttctgcccaattcagatcaccttg

SEQ ID NO: 3399926 - DNA, 25 bp, Homo sapien
ccagctcaaggcttttgtgttcact

SEQ ID NO: 3399927 - DNA, 25 bp, Homo sapien
tgtaggcaccatagtcaggcctctg

SEQ ID NO: 3399928 - DNA, 25 bp, Homo sapien
gtcccagctcaaggcttttgtgttc

SEQ ID NO: 3399929 - DNA, 25 bp, Homo sapien
ggcctggattttgtaggcaccatag

SEQ ID NO: 3399930 - DNA, 25 bp, Homo sapien
atttggggtttaatctcttcatcca

SEQ ID NO: 3399931 - DNA, 25 bp, Homo sapien
catttggggtttaatctcttcatcc

SEQ ID NO: 3399932 - DNA, 25 bp, Homo sapien
gaggtcaggtagtatagaaaggaaa

SEQ ID NO: 3399933 - DNA, 25 bp, Homo sapien
agaggtcaggtagtatagaaaggaa

SEQ ID NO: 3399934 - DNA, 25 bp, Homo sapien
aagaggtcaggtagtatagaaagga

SEQ ID NO: 3399935 - DNA, 25 bp, Homo sapien
ggtcaggtagtatagaaaggaaata

SEQ ID NO: 3399936 - DNA, 25 bp, Homo sapien
caggaaagctgtctaaagccttatt

SEQ ID NO: 3399937 - DNA, 25 bp, Homo sapien
gccaaaaacaggaaagctgtctaaa

SEQ ID NO: 3399938 - DNA, 25 bp, Homo sapien
agaggtggaggtaagaattgccaaa

SEQ ID NO: 3399939 - DNA, 25 bp, Homo sapien
gaggtaagaattgccaaaaacagga

SEQ ID NO: 3399940 - DNA, 25 bp, Homo sapien
gctttcagcgctatttaaaatcatc

SEQ ID NO: 3399941 - DNA, 25 bp, Homo sapien
cgcaaacgtcagttcaaatgtgaaa

SEQ ID NO: 3399942 - DNA, 25 bp, Homo sapien
cattggctgacagcgcaaacgtcag

SEQ ID NO: 3399943 - DNA, 25 bp, Homo sapien
gacagcgcaaacgtcagttcaaatg

SEQ ID NO: 3399944 - DNA, 25 bp, Homo sapien
aatgaagcaaatatgctcatgtaat

SEQ ID NO: 3399945 - DNA, 25 bp, Homo sapien
gaggctgggccacaaaagggataca

SEQ ID NO: 3399946 - DNA, 25 bp, Homo sapien
ggtgcttacatcctgctccacttct

SEQ ID NO: 3399947 - DNA, 25 bp, Homo sapien
ttgtccattcttttaacactgggct

SEQ ID NO: 3399948 - DNA, 25 bp, Homo sapien
gaatgctggtgcttacatcctgctc

SEQ ID NO: 3399949 - DNA, 25 bp, Homo sapien
gaaaaaagttgaacttcatctccaa

SEQ ID NO: 3399950 - DNA, 25 bp, Homo sapien
tcacaggatttctctaagtctgggc

SEQ ID NO: 3399951 - DNA, 25 bp, Homo sapien
ttcttcatcaagtgaaaaaagttga

SEQ ID NO: 3399952 - DNA, 25 bp, Homo sapien
aggatttctctaagtctgggctggt

SEQ ID NO: 3399953 - DNA, 25 bp, Homo sapien
cttttattctaatgttgctagaata

SEQ ID NO: 3399954 - DNA, 25 bp, Homo sapien
tctaatgttgctagaataagaacaa

SEQ ID NO: 3399955 - DNA, 25 bp, Homo sapien
tattctaatgttgctagaataagaa

SEQ ID NO: 3399956 - DNA, 25 bp, Homo sapien
tatcttttattctaatgttgctaga

SEQ ID NO: 3399957 - DNA, 25 bp, Homo sapien
taaagcctttcccaatcaattccag

SEQ ID NO: 3399958 - DNA, 25 bp, Homo sapien
taggacccagacctactcatattgg

SEQ ID NO: 3399959 - DNA, 25 bp, Homo sapien
tccatagatgctgattcctgttccc

SEQ ID NO: 3399960 - DNA, 25 bp, Homo sapien
cacaagatgcaacaatgacatggcg

SEQ ID NO: 3399961 - DNA, 25 bp, Homo sapien
cacaacactgtgcatataggtaaca

SEQ ID NO: 3399962 - DNA, 25 bp, Homo sapien
taggtaacaagactgtattgtacac

SEQ ID NO: 3399963 - DNA, 25 bp, Homo sapien
ttgctgttccgtgggtatagtttca

SEQ ID NO: 3399964 - DNA, 25 bp, Homo sapien
gagtagagctcatgtgaagttctta

SEQ ID NO: 3399965 - DNA, 25 bp, Homo sapien
gaaggacaaataccccatgtccact

SEQ ID NO: 3399966 - DNA, 25 bp, Homo sapien
caacatgggcaaacctgaagggcat

SEQ ID NO: 3399967 - DNA, 25 bp, Homo sapien
gaaggaaatcctgctatatgcgaca

SEQ ID NO: 3399968 - DNA, 25 bp, Homo sapien
tatgagctatctataaagtcaaact

SEQ ID NO: 3399969 - DNA, 25 bp, Homo sapien
gcttgaacacacaaatggagcttta

SEQ ID NO: 3399970 - DNA, 25 bp, Homo sapien
ccactgcctagcataaagcttgaac

SEQ ID NO: 3399971 - DNA, 25 bp, Homo sapien
gactctagggcaacatgaaatcaag

SEQ ID NO: 3399972 - DNA, 25 bp, Homo sapien
tggaccatgtctaacttgcctgtat

SEQ ID NO: 3399973 - DNA, 25 bp, Homo sapien
attcagacactaagctatgatggtt

SEQ ID NO: 3399974 - DNA, 25 bp, Homo sapien
aattcagacactaagctatgatggt

SEQ ID NO: 3399975 - DNA, 25 bp, Homo sapien
tataacaaggttatctcaagtcaaa

SEQ ID NO: 3399976 - DNA, 25 bp, Homo sapien
gtcaaagagtacatagattgcacac

SEQ ID NO: 3399977 - DNA, 25 bp, Homo sapien
tagattgcacactaaaatcttgtct

SEQ ID NO: 3399978 - DNA, 25 bp, Homo sapien
gccaaaagagtatccactcctgtga

SEQ ID NO: 3399979 - DNA, 25 bp, Homo sapien
aggcagtttccaacttctagaggaa

SEQ ID NO: 3399980 - DNA, 25 bp, Homo sapien
gcctttttgtttcttccaagctgca

SEQ ID NO: 3399981 - DNA, 25 bp, Homo sapien
ctatgcctttttgtttcttccaagc

SEQ ID NO: 3399982 - DNA, 25 bp, Homo sapien
gtttcttccaagctgcaggagatca

SEQ ID NO: 3399983 - DNA, 25 bp, Homo sapien
tttgtttcttccaagctgcaggaga

SEQ ID NO: 3399984 - DNA, 25 bp, Homo sapien
ggtcaatctaagtgttctcagaaga

SEQ ID NO: 3399985 - DNA, 25 bp, Homo sapien
cgatctctgttagctgtgcttgcag

SEQ ID NO: 3399986 - DNA, 25 bp, Homo sapien
gcccagtattaaggtggaagtgtcc

SEQ ID NO: 3399987 - DNA, 25 bp, Homo sapien
tattcagccatctcggaacctctaa

SEQ ID NO: 3399988 - DNA, 25 bp, Homo sapien
gacaaggcctatttccagatggaca

SEQ ID NO: 3399989 - DNA, 25 bp, Homo sapien
cacagtagtaactgggtaatcgggt

SEQ ID NO: 3399990 - DNA, 25 bp, Homo sapien
taatcgggtttaccctcctgagctc

SEQ ID NO: 3399991 - DNA, 25 bp, Homo sapien
gtcaggacagccatgggtaaaggtc

SEQ ID NO: 3399992 - DNA, 25 bp, Homo sapien
taccataaggtcagcgtgcagcata

SEQ ID NO: 3399993 - DNA, 25 bp, Homo sapien
gaaggatccctattgcccaacaggt

SEQ ID NO: 3399994 - DNA, 25 bp, Homo sapien
taatctcgaagtagtggcagtaacc

SEQ ID NO: 3399995 - DNA, 25 bp, Homo sapien
tgctagaacttatcgagagctccag

SEQ ID NO: 3399996 - DNA, 25 bp, Homo sapien
ctctcctcttactattcagggccat

SEQ ID NO: 3399997 - DNA, 25 bp, Homo sapien
ctgaagaaccactaagggttggact

SEQ ID NO: 3399998 - DNA, 25 bp, Homo sapien
cactaagggttggactatggcaaaa

SEQ ID NO: 3399999 - DNA, 25 bp, Homo sapien
caaaatgtagggaagttcctctcct

SEQ ID NO: 3400000 - DNA, 25 bp, Homo sapien
cgaggctacctaggctgaaagtcca

SEQ ID NO: 3400001 - DNA, 25 bp, Homo sapien
taagcacatggatccaggagcgagg

SEQ ID NO: 3400002 - DNA, 25 bp, Homo sapien
gacaaaagagtttgggagacagctc

SEQ ID NO: 3400003 - DNA, 25 bp, Homo sapien
gaaacagacatcatccagggactta

SEQ ID NO: 3400004 - DNA, 25 bp, Homo sapien
tcatcgtggcttcagctgtccagca

SEQ ID NO: 3400005 - DNA, 25 bp, Homo sapien
atcgtggcttcagctgtccagcatt

SEQ ID NO: 3400006 - DNA, 25 bp, Homo sapien
cgtggcttcagctgtccagcatttc

SEQ ID NO: 3400007 - DNA, 25 bp, Homo sapien
gcttcagctgtccagcatttccagg

SEQ ID NO: 3400008 - DNA, 25 bp, Homo sapien
caaatgacagaatcctttcggtggc

SEQ ID NO: 3400009 - DNA, 25 bp, Homo sapien
tgagcataacttacactggagcacc

SEQ ID NO: 3400010 - DNA, 25 bp, Homo sapien
gcattcgtttgcttgggctgaccta

SEQ ID NO: 3400011 - DNA, 25 bp, Homo sapien
tcgagcttgcatagaacaggccctg

SEQ ID NO: 3400012 - DNA, 25 bp, Homo sapien
aaacaatcgacattggtgcctttga

SEQ ID NO: 3400013 - DNA, 25 bp, Homo sapien
caatcgacattggtgcctttgaaag

SEQ ID NO: 3400014 - DNA, 25 bp, Homo sapien
cgacattggtgcctttgaaagggaa

SEQ ID NO: 3400015 - DNA, 25 bp, Homo sapien
gaaagggaagtggaactagctttga

SEQ ID NO: 3400016 - DNA, 25 bp, Homo sapien
ttttcccattctcaactctggtggg

SEQ ID NO: 3400017 - DNA, 25 bp, Homo sapien
ttcatggatttcagggtgtgccctt

SEQ ID NO: 3400018 - DNA, 25 bp, Homo sapien
ggttcatggatttcagggtgtgccc

SEQ ID NO: 3400019 - DNA, 25 bp, Homo sapien
cattctcaactctggtgggttcatg

SEQ ID NO: 3400020 - DNA, 25 bp, Homo sapien
cccgcgtgtttatagtggctccaaa

SEQ ID NO: 3400021 - DNA, 25 bp, Homo sapien
ttgtcagtttagctgccaagtccag

SEQ ID NO: 3400022 - DNA, 25 bp, Homo sapien
ccgcgtgtttatagtggctccaaag

SEQ ID NO: 3400023 - DNA, 25 bp, Homo sapien
ctgcaggcttccagatgtagctgct

SEQ ID NO: 3400024 - DNA, 25 bp, Homo sapien
tcctggaatggaagcttctgcaggc

SEQ ID NO: 3400025 - DNA, 25 bp, Homo sapien
gcttccagatgtagctgctgtcctt

SEQ ID NO: 3400026 - DNA, 25 bp, Homo sapien
agggacagcgtagcagacagcactt

SEQ ID NO: 3400027 - DNA, 25 bp, Homo sapien
caggtttgaagcagactatgacagc

SEQ ID NO: 3400028 - DNA, 25 bp, Homo sapien
tgttttgacaggtttgaagcagact

SEQ ID NO: 3400029 - DNA, 25 bp, Homo sapien
tgacaggtttgaagcagactatgac

SEQ ID NO: 3400030 - DNA, 25 bp, Homo sapien
gaagcagactatgacagcaaaaggg

SEQ ID NO: 3400031 - DNA, 25 bp, Homo sapien
ctggcttggccactagggaaggcaa

SEQ ID NO: 3400032 - DNA, 25 bp, Homo sapien
aagctttgggagatactgctccagg

SEQ ID NO: 3400033 - DNA, 25 bp, Homo sapien
gtaagtaaggaggtgaccagcctca

SEQ ID NO: 3400034 - DNA, 25 bp, Homo sapien
tctgcaccaatggtaagtaaggagg

SEQ ID NO: 3400035 - DNA, 25 bp, Homo sapien
cccctctttacacaccagagtaagg

SEQ ID NO: 3400036 - DNA, 25 bp, Homo sapien
tttacacaccagagtaaggaaacaa

SEQ ID NO: 3400037 - DNA, 25 bp, Homo sapien
gatgagtcctcggaatctgttgcct

SEQ ID NO: 3400038 - DNA, 25 bp, Homo sapien
tttgaacgatgagtcctcggaatct

SEQ ID NO: 3400039 - DNA, 25 bp, Homo sapien
tctcctagcattgcagtgaaatagg

SEQ ID NO: 3400040 - DNA, 25 bp, Homo sapien
ctttacttctaaggggttgcactgg

SEQ ID NO: 3400041 - DNA, 25 bp, Homo sapien
tcatcccgattttctccacatgcaa

SEQ ID NO: 3400042 - DNA, 25 bp, Homo sapien
catcggagggcggtagttttctcct

SEQ ID NO: 3400043 - DNA, 25 bp, Homo sapien
ccttctctataattgagaagtacct

SEQ ID NO: 3400044 - DNA, 25 bp, Homo sapien
tctataattgagaagtaccttatca

SEQ ID NO: 3400045 - DNA, 25 bp, Homo sapien
tctctataattgagaagtaccttat

SEQ ID NO: 3400046 - DNA, 25 bp, Homo sapien
gtccttctctataattgagaagtac

SEQ ID NO: 3400047 - DNA, 25 bp, Homo sapien
tctcttctcagtactgaagtagttt

SEQ ID NO: 3400048 - DNA, 25 bp, Homo sapien
tttctcttctcagtactgaagtagt

SEQ ID NO: 3400049 - DNA, 25 bp, Homo sapien
tcttctcagtactgaagtagtttcc

SEQ ID NO: 3400050 - DNA, 25 bp, Homo sapien
tctcagtactgaagtagtttcccat

SEQ ID NO: 3400051 - DNA, 25 bp, Homo sapien
ggtatgcctatgatgtatttcttca

SEQ ID NO: 3400052 - DNA, 25 bp, Homo sapien
tttaggtatgcctatgatgtatttc

SEQ ID NO: 3400053 - DNA, 25 bp, Homo sapien
aggtatgcctatgatgtatttcttc

SEQ ID NO: 3400054 - DNA, 25 bp, Homo sapien
tcattttaggtatgcctatgatgta

SEQ ID NO: 3400055 - DNA, 25 bp, Homo sapien
tttggtcaaccatgaccacagattc

SEQ ID NO: 3400056 - DNA, 25 bp, Homo sapien
cctgtctcctttggtcaaccatgac

SEQ ID NO: 3400057 - DNA, 25 bp, Homo sapien
tggaacctctgcagttagcagctgc

SEQ ID NO: 3400058 - DNA, 25 bp, Homo sapien
cccagctggaacctctgcagttagc

SEQ ID NO: 3400059 - DNA, 25 bp, Homo sapien
tattgtgctccctttggacatgtca

SEQ ID NO: 3400060 - DNA, 25 bp, Homo sapien
ttattgtgctccctttggacatgtc

SEQ ID NO: 3400061 - DNA, 25 bp, Homo sapien
attgtgctccctttggacatgtcac

SEQ ID NO: 3400062 - DNA, 25 bp, Homo sapien
gccactcactagctagtacactggt

SEQ ID NO: 3400063 - DNA, 25 bp, Homo sapien
gaaaaggtgcctggaaatgtcactc

SEQ ID NO: 3400064 - DNA, 25 bp, Homo sapien
gaaatgtcactcttggattctccaa

SEQ ID NO: 3400065 - DNA, 25 bp, Homo sapien
cactagctagtacactggttctatt

SEQ ID NO: 3400066 - DNA, 25 bp, Homo sapien
catctgtcgtggctgcaactgcccc

SEQ ID NO: 3400067 - DNA, 25 bp, Homo sapien
aactgccccaggagaatactagcct

SEQ ID NO: 3400068 - DNA, 25 bp, Homo sapien
ctgccccaggagaatactagccttc

SEQ ID NO: 3400069 - DNA, 25 bp, Homo sapien
actgccccaggagaatactagcctt

SEQ ID NO: 3400070 - DNA, 25 bp, Homo sapien
ctgccaatagacataaggagatttc

SEQ ID NO: 3400071 - DNA, 25 bp, Homo sapien
cataaggagatttctgagatagctt

SEQ ID NO: 3400072 - DNA, 25 bp, Homo sapien
gatttctgagatagcttttccctcc

SEQ ID NO: 3400073 - DNA, 25 bp, Homo sapien
aaggagatttctgagatagcttttc

SEQ ID NO: 3400074 - DNA, 25 bp, Homo sapien
tccttacagttaagggttccatgga

SEQ ID NO: 3400075 - DNA, 25 bp, Homo sapien
ttacagttaagggttccatggagct

SEQ ID NO: 3400076 - DNA, 25 bp, Homo sapien
cttccttacagttaagggttccatg

SEQ ID NO: 3400077 - DNA, 25 bp, Homo sapien
ccttacagttaagggttccatggag

SEQ ID NO: 3400078 - DNA, 25 bp, Homo sapien
tatatggagacaacgggacagaata

SEQ ID NO: 3400079 - DNA, 25 bp, Homo sapien
gacaacgggacagaatagttgaaat

SEQ ID NO: 3400080 - DNA, 25 bp, Homo sapien
agtatatggagacaacgggacagaa

SEQ ID NO: 3400081 - DNA, 25 bp, Homo sapien
tggagacaacgggacagaatagttg

SEQ ID NO: 3400082 - DNA, 25 bp, Homo sapien
caggacgtcctctcttcccccgcag

SEQ ID NO: 3400083 - DNA, 25 bp, Homo sapien
acgtcctctcttcccccgcagctca

SEQ ID NO: 3400084 - DNA, 25 bp, Homo sapien
ggacgtcctctcttcccccgcagct

SEQ ID NO: 3400085 - DNA, 25 bp, Homo sapien
tgcaggacgtcctctcttcccccgc

SEQ ID NO: 3400086 - DNA, 25 bp, Homo sapien
ttgagtgtaatataaagtggagaga

SEQ ID NO: 3400087 - DNA, 25 bp, Homo sapien
gccagacccctccaattgagtgtaa

SEQ ID NO: 3400088 - DNA, 25 bp, Homo sapien
gggtgggataaccagcacagcactg

SEQ ID NO: 3400089 - DNA, 25 bp, Homo sapien
gtgggataaccagcacagcactgcc

SEQ ID NO: 3400090 - DNA, 25 bp, Homo sapien
gctctctggaacaaccaaaactgga

SEQ ID NO: 3400091 - DNA, 25 bp, Homo sapien
ctgctctctggaacaaccaaaactg

SEQ ID NO: 3400092 - DNA, 25 bp, Homo sapien
ctggaacaaccaaaactggaaagtg

SEQ ID NO: 3400093 - DNA, 25 bp, Homo sapien
tctctggaacaaccaaaactggaaa

SEQ ID NO: 3400094 - DNA, 25 bp, Homo sapien
tgccttcaaaactcagctttgttcc

SEQ ID NO: 3400095 - DNA, 25 bp, Homo sapien
ccttcaaaactcagctttgttccaa

SEQ ID NO: 3400096 - DNA, 25 bp, Homo sapien
ggtgtcaattctgccttcaaaactc

SEQ ID NO: 3400097 - DNA, 25 bp, Homo sapien
ttcaaaactcagctttgttccaact

SEQ ID NO: 3400098 - DNA, 25 bp, Homo sapien
cattggcacagcaagacacaagttc

SEQ ID NO: 3400099 - DNA, 25 bp, Homo sapien
ggcacagcaagacacaagttccatc

SEQ ID NO: 3400100 - DNA, 25 bp, Homo sapien
tggcattggcacagcaagacacaag

SEQ ID NO: 3400101 - DNA, 25 bp, Homo sapien
cagcaagacacaagttccatcatca

SEQ ID NO: 3400102 - DNA, 25 bp, Homo sapien
tgttactctccgtggagctaaagta

SEQ ID NO: 3400103 - DNA, 25 bp, Homo sapien
ctgtttgttgttactctccgtggag

SEQ ID NO: 3400104 - DNA, 25 bp, Homo sapien
ccgtggagctaaagtaattatctat

SEQ ID NO: 3400105 - DNA, 25 bp, Homo sapien
tctattagcatgagcttagaaaaca

SEQ ID NO: 3400106 - DNA, 25 bp, Homo sapien
caaaactgatcacaaaactttgctt

SEQ ID NO: 3400107 - DNA, 25 bp, Homo sapien
tttgcttcgagcttgctagaaactg

SEQ ID NO: 3400108 - DNA, 25 bp, Homo sapien
aaactttgcttcgagcttgctagaa

SEQ ID NO: 3400109 - DNA, 25 bp, Homo sapien
acaaaactttgcttcgagcttgcta

SEQ ID NO: 3400110 - DNA, 25 bp, Homo sapien
taatccgcagaacagggatgctggg

SEQ ID NO: 3400111 - DNA, 25 bp, Homo sapien
ggtaccagaaagttgctagtatgga

SEQ ID NO: 3400112 - DNA, 25 bp, Homo sapien
tccaggaggtagcacacgatcaagt

SEQ ID NO: 3400113 - DNA, 25 bp, Homo sapien
gccagttgctagatgggtaccagaa

SEQ ID NO: 3400114 - DNA, 25 bp, Homo sapien
ttcaatagctttcccaaaaactgtc

SEQ ID NO: 3400115 - DNA, 25 bp, Homo sapien
aaagaagtgacagtgttacatttca

SEQ ID NO: 3400116 - DNA, 25 bp, Homo sapien
aaactgtcaagatcaaagaagtgac

SEQ ID NO: 3400117 - DNA, 25 bp, Homo sapien
cacagtcatacttttggcatagcat

SEQ ID NO: 3400118 - DNA, 25 bp, Homo sapien
tgttgatagccaaccctctagcatc

SEQ ID NO: 3400119 - DNA, 25 bp, Homo sapien
tatgcctttcatgtgactcctgttg

SEQ ID NO: 3400120 - DNA, 25 bp, Homo sapien
gaaatatagacagtaactctatgcc

SEQ ID NO: 3400121 - DNA, 25 bp, Homo sapien
taggtcttggcaggcaacgaattcc

SEQ ID NO: 3400122 - DNA, 25 bp, Homo sapien
aatttcttgaatagcacttaggttt

SEQ ID NO: 3400123 - DNA, 25 bp, Homo sapien
gcaatttcttgaatagcacttaggt

SEQ ID NO: 3400124 - DNA, 25 bp, Homo sapien
tttcttgaatagcacttaggttttc

SEQ ID NO: 3400125 - DNA, 25 bp, Homo sapien
tcttgaatagcacttaggttttctc

SEQ ID NO: 3400126 - DNA, 25 bp, Homo sapien
ctgcacaagtcaaggcaaagctgca

SEQ ID NO: 3400127 - DNA, 25 bp, Homo sapien
tgcacaagtcaaggcaaagctgcag

SEQ ID NO: 3400128 - DNA, 25 bp, Homo sapien
gccataggctacacatggctgctct

SEQ ID NO: 3400129 - DNA, 25 bp, Homo sapien
tatgtccagtaaagtgcgagccctg

SEQ ID NO: 3400130 - DNA, 25 bp, Homo sapien
cctgccagagttgttgcttcaacag

SEQ ID NO: 3400131 - DNA, 25 bp, Homo sapien
cctgctgctgtagagttgtttggca

SEQ ID NO: 3400132 - DNA, 25 bp, Homo sapien
tatgacaatctatgaaaaaccaggc

SEQ ID NO: 3400133 - DNA, 25 bp, Homo sapien
cattgtcttccccatagggtaaagc

SEQ ID NO: 3400134 - DNA, 25 bp, Homo sapien
gatcaccagaaagatagctagcact

SEQ ID NO: 3400135 - DNA, 25 bp, Homo sapien
tactacggcatataatacagctggt

SEQ ID NO: 3400136 - DNA, 25 bp, Homo sapien
tccagtgctttccaaggtaccgtat

SEQ ID NO: 3400137 - DNA, 25 bp, Homo sapien
tatggtgcataatgtgtacagagcc

SEQ ID NO: 3400138 - DNA, 25 bp, Homo sapien
caaggtaccccatagcatcggaggt

SEQ ID NO: 3400139 - DNA, 25 bp, Homo sapien
cagagtcctttggaggtccatcagg

SEQ ID NO: 3400140 - DNA, 25 bp, Homo sapien
taaagcgtaataagaagtccagtta

SEQ ID NO: 3400141 - DNA, 25 bp, Homo sapien
aagcgtaataagaagtccagttagg

SEQ ID NO: 3400142 - DNA, 25 bp, Homo sapien
tcagagtaaagcgtaataagaagtc

SEQ ID NO: 3400143 - DNA, 25 bp, Homo sapien
gagtaaagcgtaataagaagtccag

SEQ ID NO: 3400144 - DNA, 25 bp, Homo sapien
aatatctcccattactcatgtctaa

SEQ ID NO: 3400145 - DNA, 25 bp, Homo sapien
tactcatgtctaaaattcctatcac

SEQ ID NO: 3400146 - DNA, 25 bp, Homo sapien
gacatgataaaacaatcgactcagc

SEQ ID NO: 3400147 - DNA, 25 bp, Homo sapien
gataaaacaatcgactcagctcaaa

SEQ ID NO: 3400148 - DNA, 25 bp, Homo sapien
gagaagagaggatcttcgctttcca

SEQ ID NO: 3400149 - DNA, 25 bp, Homo sapien
aaaaacaggtgcctgagagaagaga

SEQ ID NO: 3400150 - DNA, 25 bp, Homo sapien
cacgttagtctccatttgtccttgc

SEQ ID NO: 3400151 - DNA, 25 bp, Homo sapien
gaggatcttcgctttccacgttagt

SEQ ID NO: 3400152 - DNA, 25 bp, Homo sapien
ttccctgcagccgacgtcctcacaa

SEQ ID NO: 3400153 - DNA, 25 bp, Homo sapien
caagcagcactctggaatctaccat

SEQ ID NO: 3400154 - DNA, 25 bp, Homo sapien
acgtcctcacaagcagcactctgga

SEQ ID NO: 3400155 - DNA, 25 bp, Homo sapien
tgcagccgacgtcctcacaagcagc

SEQ ID NO: 3400156 - DNA, 25 bp, Homo sapien
atcttagtggagagtccttctccca

SEQ ID NO: 3400157 - DNA, 25 bp, Homo sapien
tatcttagtggagagtccttctccc

SEQ ID NO: 3400158 - DNA, 25 bp, Homo sapien
ttatcttagtggagagtccttctcc

SEQ ID NO: 3400159 - DNA, 25 bp, Homo sapien
gaatgcctctcaagccgtcctgggt

SEQ ID NO: 3400160 - DNA, 25 bp, Homo sapien
atgcctctcaagccgtcctgggtca

SEQ ID NO: 3400161 - DNA, 25 bp, Homo sapien
gcctctcaagccgtcctgggtcacc

SEQ ID NO: 3400162 - DNA, 25 bp, Homo sapien
gagaatgcctctcaagccgtcctgg

SEQ ID NO: 3400163 - DNA, 25 bp, Homo sapien
ctgatgctttttgaatataagtaaa

SEQ ID NO: 3400164 - DNA, 25 bp, Homo sapien
gatgctttttgaatataagtaaagc

SEQ ID NO: 3400165 - DNA, 25 bp, Homo sapien
ctcttgctgatgctttttgaatata

SEQ ID NO: 3400166 - DNA, 25 bp, Homo sapien
tgctgatgctttttgaatataagta

SEQ ID NO: 3400167 - DNA, 25 bp, Homo sapien
ctaactgtgggattctaatcttaga

SEQ ID NO: 3400168 - DNA, 25 bp, Homo sapien
tcatccggggcccataactctcttt

SEQ ID NO: 3400169 - DNA, 25 bp, Homo sapien
tctttgagcttccttctaactgtgg

SEQ ID NO: 3400170 - DNA, 25 bp, Homo sapien
gggtcgatctcctttattgcacaag

SEQ ID NO: 3400171 - DNA, 25 bp, Homo sapien
ctgtagatggtattgactgagtttc

SEQ ID NO: 3400172 - DNA, 25 bp, Homo sapien
gagtttcttctaaaggtccaatgtc

SEQ ID NO: 3400173 - DNA, 25 bp, Homo sapien
ctgagtttcttctaaaggtccaatg

SEQ ID NO: 3400174 - DNA, 25 bp, Homo sapien
taatctactgtagatggtattgact

SEQ ID NO: 3400175 - DNA, 25 bp, Homo sapien
atggatgctatgaaccaatacacag

SEQ ID NO: 3400176 - DNA, 25 bp, Homo sapien
cagggctaaattccttcagggcaga

SEQ ID NO: 3400177 - DNA, 25 bp, Homo sapien
tacacagtgacatcgtaaatgtggc

SEQ ID NO: 3400178 - DNA, 25 bp, Homo sapien
tgtggcaatttatatcctagtttcc

SEQ ID NO: 3400179 - DNA, 25 bp, Homo sapien
cttttcaatctttgtggagctaact

SEQ ID NO: 3400180 - DNA, 25 bp, Homo sapien
caagcctccagggaagatatgattg

SEQ ID NO: 3400181 - DNA, 25 bp, Homo sapien
caatctttgtggagctaacttcacc

SEQ ID NO: 3400182 - DNA, 25 bp, Homo sapien
atatgattggtcccaattgcagcat

SEQ ID NO: 3400183 - DNA, 25 bp, Homo sapien
caaatgctaccagtcttgttcagta

SEQ ID NO: 3400184 - DNA, 25 bp, Homo sapien
catggaatctagcaaattcttgagc

SEQ ID NO: 3400185 - DNA, 25 bp, Homo sapien
catgtcagggttatgataagatcac

SEQ ID NO: 3400186 - DNA, 25 bp, Homo sapien
tgagcagtctctgtcatactaagaa

SEQ ID NO: 3400187 - DNA, 25 bp, Homo sapien
gtgagtccactttcataaccgagga

SEQ ID NO: 3400188 - DNA, 25 bp, Homo sapien
ggtgctgagactggaattcagtcct

SEQ ID NO: 3400189 - DNA, 25 bp, Homo sapien
ggctgctttggccagaaggtgctga

SEQ ID NO: 3400190 - DNA, 25 bp, Homo sapien
ccttgatttgagtaatgccaacctg

SEQ ID NO: 3400191 - DNA, 25 bp, Homo sapien
ggcctcagtaggaaggaaccattag

SEQ ID NO: 3400192 - DNA, 25 bp, Homo sapien
gaaccattagcaattccattagtca

SEQ ID NO: 3400193 - DNA, 25 bp, Homo sapien
ccattagtcagtgttctgttcactc

SEQ ID NO: 3400194 - DNA, 25 bp, Homo sapien
tcagtaggaaggaaccattagcaat

SEQ ID NO: 3400195 - DNA, 25 bp, Homo sapien
agcgagacccagaagtccgatgtgt

SEQ ID NO: 3400196 - DNA, 25 bp, Homo sapien
caggttctcgttacaacagcgagac

SEQ ID NO: 3400197 - DNA, 25 bp, Homo sapien
tattccaggttctcgttacaacagc

SEQ ID NO: 3400198 - DNA, 25 bp, Homo sapien
gttacaacagcgagacccagaagtc

SEQ ID NO: 3400199 - DNA, 25 bp, Homo sapien
taggtctacacaaaatgactgagag

SEQ ID NO: 3400200 - DNA, 25 bp, Homo sapien
atgactgagagttcctctgcaatta

SEQ ID NO: 3400201 - DNA, 25 bp, Homo sapien
ttttcttgccattgcacattttgct

SEQ ID NO: 3400202 - DNA, 25 bp, Homo sapien
tacacaaaatgactgagagttcctc

SEQ ID NO: 3400203 - DNA, 25 bp, Homo sapien
aggatttcagaaggagttgggcttc

SEQ ID NO: 3400204 - DNA, 25 bp, Homo sapien
ggatttcagaaggagttgggcttcc

SEQ ID NO: 3400205 - DNA, 25 bp, Homo sapien
aaggatttcagaaggagttgggctt

SEQ ID NO: 3400206 - DNA, 25 bp, Homo sapien
tctctacttcaatcacgctgattcc

SEQ ID NO: 3400207 - DNA, 25 bp, Homo sapien
tctacttcaatcacgctgattcctt

SEQ ID NO: 3400208 - DNA, 25 bp, Homo sapien
acttcaatcacgctgattcctttcc

SEQ ID NO: 3400209 - DNA, 25 bp, Homo sapien
cttcaatcacgctgattcctttcct

SEQ ID NO: 3400210 - DNA, 25 bp, Homo sapien
cccaaggccatctgagtatttgtca

SEQ ID NO: 3400211 - DNA, 25 bp, Homo sapien
ccccaaggccatctgagtatttgtc

SEQ ID NO: 3400212 - DNA, 25 bp, Homo sapien
ttgtcagcttctcccggtgagaaac

SEQ ID NO: 3400213 - DNA, 25 bp, Homo sapien
gtatttgtcagcttctcccggtgag

SEQ ID NO: 3400214 - DNA, 25 bp, Homo sapien
caccagagttgaaggcctgcaaagt

SEQ ID NO: 3400215 - DNA, 25 bp, Homo sapien
agttgaaggcctgcaaagtacatac

SEQ ID NO: 3400216 - DNA, 25 bp, Homo sapien
tgtgtttttgtaccaccagagttga

SEQ ID NO: 3400217 - DNA, 25 bp, Homo sapien
tttgtaccaccagagttgaaggcct

SEQ ID NO: 3400218 - DNA, 25 bp, Homo sapien
tcgaacattagcttgagcacctcct

SEQ ID NO: 3400219 - DNA, 25 bp, Homo sapien
tattcactcgaacattagcttgagc

SEQ ID NO: 3400220 - DNA, 25 bp, Homo sapien
cactcgaacattagcttgagcacct

SEQ ID NO: 3400221 - DNA, 25 bp, Homo sapien
ttatttattcactcgaacattagct

SEQ ID NO: 3400222 - DNA, 25 bp, Homo sapien
tccattgctatttctacttgttcct

SEQ ID NO: 3400223 - DNA, 25 bp, Homo sapien
cttctgctcctccattgctatttct

SEQ ID NO: 3400224 - DNA, 25 bp, Homo sapien
gttcctcttcattccaattgctcat

SEQ ID NO: 3400225 - DNA, 25 bp, Homo sapien
gctatttctacttgttcctcttcat

SEQ ID NO: 3400226 - DNA, 25 bp, Homo sapien
tcttgaaggactgaaatgtagaggc

SEQ ID NO: 3400227 - DNA, 25 bp, Homo sapien
tctaagggcactcgaatagcactgt

SEQ ID NO: 3400228 - DNA, 25 bp, Homo sapien
ggttttctaccatggttctgctgag

SEQ ID NO: 3400229 - DNA, 25 bp, Homo sapien
taattgcctgggaaagcaatgctct

SEQ ID NO: 3400230 - DNA, 25 bp, Homo sapien
agaaggcaatgctctccttgtaggg

SEQ ID NO: 3400231 - DNA, 25 bp, Homo sapien
gcttgtcacaatacgccagaaggca

SEQ ID NO: 3400232 - DNA, 25 bp, Homo sapien
cctaatgtgacagttggtgatggtt

SEQ ID NO: 3400233 - DNA, 25 bp, Homo sapien
catgcatgcagataagcttgtcaca

SEQ ID NO: 3400234 - DNA, 25 bp, Homo sapien
aatatcagcatagcagtgcatagct

SEQ ID NO: 3400235 - DNA, 25 bp, Homo sapien
agcagcagctcgagctggcatatga

SEQ ID NO: 3400236 - DNA, 25 bp, Homo sapien
gctcgagctggcatatgagtttcac

SEQ ID NO: 3400237 - DNA, 25 bp, Homo sapien
gcatagcagtgcatagctgcttcat

SEQ ID NO: 3400238 - DNA, 25 bp, Homo sapien
cctttctctagacggtatctttggc

SEQ ID NO: 3400239 - DNA, 25 bp, Homo sapien
tccctttctctagacggtatctttg

SEQ ID NO: 3400240 - DNA, 25 bp, Homo sapien
tctctagacggtatctttggcagat

SEQ ID NO: 3400241 - DNA, 25 bp, Homo sapien
tctagacggtatctttggcagataa

SEQ ID NO: 3400242 - DNA, 25 bp, Homo sapien
ttccaaggtggttcaggagatccat

SEQ ID NO: 3400243 - DNA, 25 bp, Homo sapien
ccagttttgcaactaatacttttat

SEQ ID NO: 3400244 - DNA, 25 bp, Homo sapien
caactaatacttttattccaaggtg

SEQ ID NO: 3400245 - DNA, 25 bp, Homo sapien
tattccaaggtggttcaggagatcc

SEQ ID NO: 3400246 - DNA, 25 bp, Homo sapien
tggttcatcttctgccttaaaatac

SEQ ID NO: 3400247 - DNA, 25 bp, Homo sapien
ctggttcatcttctgccttaaaata

SEQ ID NO: 3400248 - DNA, 25 bp, Homo sapien
ggttcatcttctgccttaaaataca

SEQ ID NO: 3400249 - DNA, 25 bp, Homo sapien
cagaaaagataagtcgtttggattg

SEQ ID NO: 3400250 - DNA, 25 bp, Homo sapien
aaggttacgtacactgtctctgcac

SEQ ID NO: 3400251 - DNA, 25 bp, Homo sapien
cctgtagtccttgctggataaggtt

SEQ ID NO: 3400252 - DNA, 25 bp, Homo sapien
gataagtcgtttggattgttcaaat

SEQ ID NO: 3400253 - DNA, 25 bp, Homo sapien
tactcgggcagcatttttgcaactg

SEQ ID NO: 3400254 - DNA, 25 bp, Homo sapien
tgcagatatatagggcactgcgtac

SEQ ID NO: 3400255 - DNA, 25 bp, Homo sapien
caaagtctcaaatactcgggcagca

SEQ ID NO: 3400256 - DNA, 25 bp, Homo sapien
gcactgcgtacttttggctctttca

SEQ ID NO: 3400257 - DNA, 25 bp, Homo sapien
tgctggctattacgacaatgtgtaa

SEQ ID NO: 3400258 - DNA, 25 bp, Homo sapien
ttctccaaactatgaggaaaggctt

SEQ ID NO: 3400259 - DNA, 25 bp, Homo sapien
taatatttatgctggctattacgac

SEQ ID NO: 3400260 - DNA, 25 bp, Homo sapien
tctttctccaaactatgaggaaagg

SEQ ID NO: 3400261 - DNA, 25 bp, Homo sapien
tccacttgatgtttactttaaactg

SEQ ID NO: 3400262 - DNA, 25 bp, Homo sapien
ggtttctatgtggattacagctgta

SEQ ID NO: 3400263 - DNA, 25 bp, Homo sapien
tattgacatcaaagattagttgcct

SEQ ID NO: 3400264 - DNA, 25 bp, Homo sapien
tgcctcagctcattaaacttatcac

SEQ ID NO: 3400265 - DNA, 25 bp, Homo sapien
acagctgtataagcaattgcctcag

SEQ ID NO: 3400266 - DNA, 25 bp, Homo sapien
taaatcagtagtttctaaacattga

SEQ ID NO: 3400267 - DNA, 25 bp, Homo sapien
tctgaaaggcagcttctaaatcagt

SEQ ID NO: 3400268 - DNA, 25 bp, Homo sapien
gaaaggcagcttctaaatcagtagt

SEQ ID NO: 3400269 - DNA, 25 bp, Homo sapien
attgatttttcatctcatgctccat

SEQ ID NO: 3400270 - DNA, 25 bp, Homo sapien
acactggtcataacattaatcctga

SEQ ID NO: 3400271 - DNA, 25 bp, Homo sapien
ggctccttgtgcaaacactggtcat

SEQ ID NO: 3400272 - DNA, 25 bp, Homo sapien
tctgctgcttcttttcgcttacttg

SEQ ID NO: 3400273 - DNA, 25 bp, Homo sapien
tttcgcttacttggctccttgtgca

SEQ ID NO: 3400274 - DNA, 25 bp, Homo sapien
tagcgcttgaaaagagtcctttctc

SEQ ID NO: 3400275 - DNA, 25 bp, Homo sapien
aaaattcccttttggcaagagcagt

SEQ ID NO: 3400276 - DNA, 25 bp, Homo sapien
cattgtgtagcgcttgaaaagagtc

SEQ ID NO: 3400277 - DNA, 25 bp, Homo sapien
tcccttttggcaagagcagtcccca

SEQ ID NO: 3400278 - DNA, 25 bp, Homo sapien
tggcagagagatcatcggtatttgt

SEQ ID NO: 3400279 - DNA, 25 bp, Homo sapien
cttccaaatctgcatgagaatttcg

SEQ ID NO: 3400280 - DNA, 25 bp, Homo sapien
aatttcggagagcaacactttgaag

SEQ ID NO: 3400281 - DNA, 25 bp, Homo sapien
gagagatcatcggtatttgttccat

SEQ ID NO: 3400282 - DNA, 25 bp, Homo sapien
cagtatgtctgtggaatcagacttc

SEQ ID NO: 3400283 - DNA, 25 bp, Homo sapien
agtatgtctgtggaatcagacttcc

SEQ ID NO: 3400284 - DNA, 25 bp, Homo sapien
ccggacatagtgatcaaggagtttc

SEQ ID NO: 3400285 - DNA, 25 bp, Homo sapien
tgcaagtgcctccttgtccgatccc

SEQ ID NO: 3400286 - DNA, 25 bp, Homo sapien
tctttggaagctactaccagccctg

SEQ ID NO: 3400287 - DNA, 25 bp, Homo sapien
tgtccgatccccatcagggcaagga

SEQ ID NO: 3400288 - DNA, 25 bp, Homo sapien
ctttttctgtgctttcactcccttg

SEQ ID NO: 3400289 - DNA, 25 bp, Homo sapien
atttctgtgtggcatttaaaagtga

SEQ ID NO: 3400290 - DNA, 25 bp, Homo sapien
tttcactcccttgccctatttctgt

SEQ ID NO: 3400291 - DNA, 25 bp, Homo sapien
aattggcttttgaaatattggctcc

SEQ ID NO: 3400292 - DNA, 25 bp, Homo sapien
ttttacaacctctccttcatgtgag

SEQ ID NO: 3400293 - DNA, 25 bp, Homo sapien
gaaatcagagtggattggagagcca

SEQ ID NO: 3400294 - DNA, 25 bp, Homo sapien
tctgcagtttgattggatgactgcc

SEQ ID NO: 3400295 - DNA, 25 bp, Homo sapien
ttatagcagcactgcagactacaag

SEQ ID NO: 3400296 - DNA, 25 bp, Homo sapien
ttttggttagaagaaactcacaggc

SEQ ID NO: 3400297 - DNA, 25 bp, Homo sapien
tccagagtctgggtgcaacaagctt

SEQ ID NO: 3400298 - DNA, 25 bp, Homo sapien
tgagtacaagagttagggcaattcg

SEQ ID NO: 3400299 - DNA, 25 bp, Homo sapien
ccacaatggcactcagagaagctaa

SEQ ID NO: 3400300 - DNA, 25 bp, Homo sapien
tcactttcacagtcattagggaaaa

SEQ ID NO: 3400301 - DNA, 25 bp, Homo sapien
tcacagtcattagggaaaatctcca

SEQ ID NO: 3400302 - DNA, 25 bp, Homo sapien
ttcacagtcattagggaaaatctcc

SEQ ID NO: 3400303 - DNA, 25 bp, Homo sapien
ctttcacagtcattagggaaaatct

SEQ ID NO: 3400304 - DNA, 25 bp, Homo sapien
ccttcctcatccacaacatttaaaa

SEQ ID NO: 3400305 - DNA, 25 bp, Homo sapien
ttgccttcctcatccacaacattta

SEQ ID NO: 3400306 - DNA, 25 bp, Homo sapien
tcattccttgccttcctcatccaca

SEQ ID NO: 3400307 - DNA, 25 bp, Homo sapien
cctcatccacaacatttaaaacttc

SEQ ID NO: 3400308 - DNA, 25 bp, Homo sapien
ttccttgcccttctttcctattggc

SEQ ID NO: 3400309 - DNA, 25 bp, Homo sapien
cttcttggtctgctgcttcttcaca

SEQ ID NO: 3400310 - DNA, 25 bp, Homo sapien
caggagctggaatccccttcttttc

SEQ ID NO: 3400311 - DNA, 25 bp, Homo sapien
ttcacaacagcaggagctggaatcc

SEQ ID NO: 3400312 - DNA, 25 bp, Homo sapien
gggcaggttgtcccgtccaaggcca

SEQ ID NO: 3400313 - DNA, 25 bp, Homo sapien
ggcaggttgtcccgtccaaggccaa

SEQ ID NO: 3400314 - DNA, 25 bp, Homo sapien
tgggcaggttgtcccgtccaaggcc

SEQ ID NO: 3400315 - DNA, 25 bp, Homo sapien
gcaggttgtcccgtccaaggccaaa

SEQ ID NO: 3400316 - DNA, 25 bp, Homo sapien
tcagcctgaactaacaacctctgct

SEQ ID NO: 3400317 - DNA, 25 bp, Homo sapien
tttcagcctgaactaacaacctctg

SEQ ID NO: 3400318 - DNA, 25 bp, Homo sapien
ttcagcctgaactaacaacctctgc

SEQ ID NO: 3400319 - DNA, 25 bp, Homo sapien
tgtgtactagagtccagtctggcct

SEQ ID NO: 3400320 - DNA, 25 bp, Homo sapien
tggccttcccatagttaatgcaatg

SEQ ID NO: 3400321 - DNA, 25 bp, Homo sapien
tgacacagggcagatacatccagct

SEQ ID NO: 3400322 - DNA, 25 bp, Homo sapien
caaagtggtgtcagtgccaatctct

SEQ ID NO: 3400323 - DNA, 25 bp, Homo sapien
catatctgtccttgtcatcggtcat

SEQ ID NO: 3400324 - DNA, 25 bp, Homo sapien
cttgtcatcggtcatgatagcttcc

SEQ ID NO: 3400325 - DNA, 25 bp, Homo sapien
ccagagaggatgatacttcatcata

SEQ ID NO: 3400326 - DNA, 25 bp, Homo sapien
cagattttgtacccaggatatttcc

SEQ ID NO: 3400327 - DNA, 25 bp, Homo sapien
tagaatagctatcacagctgcatgc

SEQ ID NO: 3400328 - DNA, 25 bp, Homo sapien
tctttgcctttaccatatggccata

SEQ ID NO: 3400329 - DNA, 25 bp, Homo sapien
atgtggagatatatgcagctgcttc

SEQ ID NO: 3400330 - DNA, 25 bp, Homo sapien
caaccgttcattaatgtcagataca

SEQ ID NO: 3400331 - DNA, 25 bp, Homo sapien
gacaatacatctgttgtaattcttg

SEQ ID NO: 3400332 - DNA, 25 bp, Homo sapien
tggacaatacatctgttgtaattct

SEQ ID NO: 3400333 - DNA, 25 bp, Homo sapien
cattaatggacaatacatctgttgt

SEQ ID NO: 3400334 - DNA, 25 bp, Homo sapien
atggacaatacatctgttgtaattc

SEQ ID NO: 3400335 - DNA, 25 bp, Homo sapien
tcatttcactggctctggtggagta

SEQ ID NO: 3400336 - DNA, 25 bp, Homo sapien
acctcacttgaacaacacgaactga

SEQ ID NO: 3400337 - DNA, 25 bp, Homo sapien
gagtaatgacatgagcaccgtagaa

SEQ ID NO: 3400338 - DNA, 25 bp, Homo sapien
ccgtagaatgaatctctatggccag

SEQ ID NO: 3400339 - DNA, 25 bp, Homo sapien
gaggagattgatgtcatcagaactg

SEQ ID NO: 3400340 - DNA, 25 bp, Homo sapien
ttcaaagaggagattgatgtcatca

SEQ ID NO: 3400341 - DNA, 25 bp, Homo sapien
gcttttcaaagaggagattgatgtc

SEQ ID NO: 3400342 - DNA, 25 bp, Homo sapien
gagattgatgtcatcagaactgctt

SEQ ID NO: 3400343 - DNA, 25 bp, Homo sapien
aatgtaataaaccttccctgtggtg

SEQ ID NO: 3400344 - DNA, 25 bp, Homo sapien
gttgcagtagagtgtcaactcattg

SEQ ID NO: 3400345 - DNA, 25 bp, Homo sapien
tttcatgactggttcaaaaagcaaa

SEQ ID NO: 3400346 - DNA, 25 bp, Homo sapien
tgagtctgcaaagaatctctacatg

SEQ ID NO: 3400347 - DNA, 25 bp, Homo sapien
gtatctctcgagtgatatagttttt

SEQ ID NO: 3400348 - DNA, 25 bp, Homo sapien
tttggcacaagctgacataatctgt

SEQ ID NO: 3400349 - DNA, 25 bp, Homo sapien
ttggcacaagctgacataatctgta

SEQ ID NO: 3400350 - DNA, 25 bp, Homo sapien
ttatttggcacaagctgacataatc

SEQ ID NO: 3400351 - DNA, 25 bp, Homo sapien
tgccccagccaaggtgaatctagat

SEQ ID NO: 3400352 - DNA, 25 bp, Homo sapien
agtcagttcatctcagttgccccag

SEQ ID NO: 3400353 - DNA, 25 bp, Homo sapien
aaagtccagccaagattagtgcagc

SEQ ID NO: 3400354 - DNA, 25 bp, Homo sapien
taactagtggctcctcttagacatg

SEQ ID NO: 3400355 - DNA, 25 bp, Homo sapien
taaagattccctgccatcattaggg

SEQ ID NO: 3400356 - DNA, 25 bp, Homo sapien
atcattaggggctttctggacctca

SEQ ID NO: 3400357 - DNA, 25 bp, Homo sapien
caaatcacataaagattccctgcca

SEQ ID NO: 3400358 - DNA, 25 bp, Homo sapien
tgctgtatgatctatcgcccaactc

SEQ ID NO: 3400359 - DNA, 25 bp, Homo sapien
aggaagagaagacatacttctcctt

SEQ ID NO: 3400360 - DNA, 25 bp, Homo sapien
tcatttctcggcttggatcagagtt

SEQ ID NO: 3400361 - DNA, 25 bp, Homo sapien
aatacacccatgtgccagtgctttt

SEQ ID NO: 3400362 - DNA, 25 bp, Homo sapien
tttatcatcgcattgcaactctggg

SEQ ID NO: 3400363 - DNA, 25 bp, Homo sapien
tttgtccataacagatttactgctg

SEQ ID NO: 3400364 - DNA, 25 bp, Homo sapien
aattcatagtactcaggaccctggc

SEQ ID NO: 3400365 - DNA, 25 bp, Homo sapien
cagtctcagaattggccatgtgacc

SEQ ID NO: 3400366 - DNA, 25 bp, Homo sapien
actgattggcccttagatgggccca

SEQ ID NO: 3400367 - DNA, 25 bp, Homo sapien
tagtagaccctcaatcttcaaacct

SEQ ID NO: 3400368 - DNA, 25 bp, Homo sapien
ccaagcaacaatttatggtttgtaa

SEQ ID NO: 3400369 - DNA, 25 bp, Homo sapien
ctttgactttacatcgacgtgtagg

SEQ ID NO: 3400370 - DNA, 25 bp, Homo sapien
gatggaccgtcagtcaccttgatga

SEQ ID NO: 3400371 - DNA, 25 bp, Homo sapien
tacacgccagtgtaagatggaccgt

SEQ ID NO: 3400372 - DNA, 25 bp, Homo sapien
tttaggtatccctctgattcatcag

SEQ ID NO: 3400373 - DNA, 25 bp, Homo sapien
cattggcaaacttggctcatccttt

SEQ ID NO: 3400374 - DNA, 25 bp, Homo sapien
ggtatccctctgattcatcagtcac

SEQ ID NO: 3400375 - DNA, 25 bp, Homo sapien
caaacttggctcatcctttggtgtt

SEQ ID NO: 3400376 - DNA, 25 bp, Homo sapien
atcattttggttgcgactcagagcc

SEQ ID NO: 3400377 - DNA, 25 bp, Homo sapien
ctacaggcctgcaatgtaccctggg

SEQ ID NO: 3400378 - DNA, 25 bp, Homo sapien
ttcctgacaacccagcccctacagg

SEQ ID NO: 3400379 - DNA, 25 bp, Homo sapien
ctgatcattttggttgcgactcaga

SEQ ID NO: 3400380 - DNA, 25 bp, Homo sapien
ctgtgggagaaaagcactagtgggc

SEQ ID NO: 3400381 - DNA, 25 bp, Homo sapien
gccatgagccccataggtgtctgcc

SEQ ID NO: 3400382 - DNA, 25 bp, Homo sapien
agaaaagcactagtgggccatgagc

SEQ ID NO: 3400383 - DNA, 25 bp, Homo sapien
agtgggccatgagccccataggtgt

SEQ ID NO: 3400384 - DNA, 25 bp, Homo sapien
tgggatccagccacatcaatgctgc

SEQ ID NO: 3400385 - DNA, 25 bp, Homo sapien
ccagataaaggatactgccactgct

SEQ ID NO: 3400386 - DNA, 25 bp, Homo sapien
tggaggcctgcattctatgctggga

SEQ ID NO: 3400387 - DNA, 25 bp, Homo sapien
tcaatgctgccatagtcacttccag

SEQ ID NO: 3400388 - DNA, 25 bp, Homo sapien
caaatatgagtaggatatcatctct

SEQ ID NO: 3400389 - DNA, 25 bp, Homo sapien
gagcaaatatgagtaggatatcatc

SEQ ID NO: 3400390 - DNA, 25 bp, Homo sapien
tgcttcagagcaaatatgagtagga

SEQ ID NO: 3400391 - DNA, 25 bp, Homo sapien
tcagagcaaatatgagtaggatatc

SEQ ID NO: 3400392 - DNA, 25 bp, Homo sapien
taagatgaacatcacaagagggaac

SEQ ID NO: 3400393 - DNA, 25 bp, Homo sapien
cataagcactatgtgagcccaggtg

SEQ ID NO: 3400394 - DNA, 25 bp, Homo sapien
tcaagattgagactgggcataagca

SEQ ID NO: 3400395 - DNA, 25 bp, Homo sapien
actcagtgatattagacagacaggg

SEQ ID NO: 3400396 - DNA, 25 bp, Homo sapien
tttggttgtcttggatttattctgc

SEQ ID NO: 3400397 - DNA, 25 bp, Homo sapien
ccctccagcttttccaaaagtcata

SEQ ID NO: 3400398 - DNA, 25 bp, Homo sapien
ctccagcttttccaaaagtcataaa

SEQ ID NO: 3400399 - DNA, 25 bp, Homo sapien
tccagcttttccaaaagtcataaaa

SEQ ID NO: 3400400 - DNA, 25 bp, Homo sapien
cctccagcttttccaaaagtcataa

SEQ ID NO: 3400401 - DNA, 25 bp, Homo sapien
ggttctaattagaggagcttgacac

SEQ ID NO: 3400402 - DNA, 25 bp, Homo sapien
attagaggagcttgacacaagagat

SEQ ID NO: 3400403 - DNA, 25 bp, Homo sapien
tctaattagaggagcttgacacaag

SEQ ID NO: 3400404 - DNA, 25 bp, Homo sapien
tcattggcttccttgatgggatttt

SEQ ID NO: 3400405 - DNA, 25 bp, Homo sapien
tgttgtcccgatatttctcctcatc

SEQ ID NO: 3400406 - DNA, 25 bp, Homo sapien
cagtgggacttttgttgtcccgata

SEQ ID NO: 3400407 - DNA, 25 bp, Homo sapien
ttctcagtgggacttttgttgtccc

SEQ ID NO: 3400408 - DNA, 25 bp, Homo sapien
gacttttgttgtcccgatatttctc

SEQ ID NO: 3400409 - DNA, 25 bp, Homo sapien
ttctaagagcttcagaatacaactg

SEQ ID NO: 3400410 - DNA, 25 bp, Homo sapien
tcatcaccctcattatcacaccaaa

SEQ ID NO: 3400411 - DNA, 25 bp, Homo sapien
ctccatccacttttccacaaacttt

SEQ ID NO: 3400412 - DNA, 25 bp, Homo sapien
ttcagaatacaactgacatcttcaa

SEQ ID NO: 3400413 - DNA, 25 bp, Homo sapien
catgattgcattgcgttatttcaaa

SEQ ID NO: 3400414 - DNA, 25 bp, Homo sapien
tgtaaagagtagttggctggaagat

SEQ ID NO: 3400415 - DNA, 25 bp, Homo sapien
cagggtatactgtgatgttatgata

SEQ ID NO: 3400416 - DNA, 25 bp, Homo sapien
ctggaagataagtgacccgcacatt

SEQ ID NO: 3400417 - DNA, 25 bp, Homo sapien
ttgtcagatcttttgaatttagaca

SEQ ID NO: 3400418 - DNA, 25 bp, Homo sapien
tcagatcttttgaatttagacacat

SEQ ID NO: 3400419 - DNA, 25 bp, Homo sapien
tgtcagatcttttgaatttagacac

SEQ ID NO: 3400420 - DNA, 25 bp, Homo sapien
gtcagatcttttgaatttagacaca

SEQ ID NO: 3400421 - DNA, 25 bp, Homo sapien
caaggtgattgaaacagagcaggac

SEQ ID NO: 3400422 - DNA, 25 bp, Homo sapien
ctgaatgtggtgaaaaggctgcctc

SEQ ID NO: 3400423 - DNA, 25 bp, Homo sapien
cgtcgacagtggagttcagagctca

SEQ ID NO: 3400424 - DNA, 25 bp, Homo sapien
cctgtttgaggaagcgatggcaact

SEQ ID NO: 3400425 - DNA, 25 bp, Homo sapien
ttggcagaatccactaacatgatgg

SEQ ID NO: 3400426 - DNA, 25 bp, Homo sapien
gacagatttagtgacttctaaagac

SEQ ID NO: 3400427 - DNA, 25 bp, Homo sapien
tttgatctttcgatcaggaggacag

SEQ ID NO: 3400428 - DNA, 25 bp, Homo sapien
gaggacagtaggagtgacagattta

SEQ ID NO: 3400429 - DNA, 25 bp, Homo sapien
taacacatgtgaggcaggaaatgga

SEQ ID NO: 3400430 - DNA, 25 bp, Homo sapien
gaaatggacccgaagtcctccacag

SEQ ID NO: 3400431 - DNA, 25 bp, Homo sapien
ttcctaacacatgtgaggcaggaaa

SEQ ID NO: 3400432 - DNA, 25 bp, Homo sapien
ttacagctggctctttacattccta

SEQ ID NO: 3400433 - DNA, 25 bp, Homo sapien
tatttggctttatgtgaggatgttg

SEQ ID NO: 3400434 - DNA, 25 bp, Homo sapien
tggctttatgtgaggatgttgctga

SEQ ID NO: 3400435 - DNA, 25 bp, Homo sapien
agtctgcctcatctgtatcagctct

SEQ ID NO: 3400436 - DNA, 25 bp, Homo sapien
gcttgagaagtattttagcaactgt

SEQ ID NO: 3400437 - DNA, 25 bp, Homo sapien
accacgcttggcctaaaaatgaaat

SEQ ID NO: 3400438 - DNA, 25 bp, Homo sapien
tctcagaggaaccatctaagaagag

SEQ ID NO: 3400439 - DNA, 25 bp, Homo sapien
tacatgttcgacaagctgaaaggca

SEQ ID NO: 3400440 - DNA, 25 bp, Homo sapien
ccttggaggtgatattgctttatga

SEQ ID NO: 3400441 - DNA, 25 bp, Homo sapien
cagacagtcggcacattttgctgct

SEQ ID NO: 3400442 - DNA, 25 bp, Homo sapien
tttatgaaaggcaaccatctgaccc

SEQ ID NO: 3400443 - DNA, 25 bp, Homo sapien
gacaggctgagggtagtttataaag

SEQ ID NO: 3400444 - DNA, 25 bp, Homo sapien
gttgctgtagcccaaaatcttacaa

SEQ ID NO: 3400445 - DNA, 25 bp, Homo sapien
catcactgtagcaggtgttgctgta

SEQ ID NO: 3400446 - DNA, 25 bp, Homo sapien
tcatttacgtggccagccatcccag

SEQ ID NO: 3400447 - DNA, 25 bp, Homo sapien
gctgtagcccaaaatcttacaaagt

SEQ ID NO: 3400448 - DNA, 25 bp, Homo sapien
tatattttctccttttcctctccat

SEQ ID NO: 3400449 - DNA, 25 bp, Homo sapien
gaacataaatattattactcttata

SEQ ID NO: 3400450 - DNA, 25 bp, Homo sapien
catgaacataaatattattactctt

SEQ ID NO: 3400451 - DNA, 25 bp, Homo sapien
tattattactcttatattttctcct

SEQ ID NO: 3400452 - DNA, 25 bp, Homo sapien
tttatatctagatcatgtgggtact

SEQ ID NO: 3400453 - DNA, 25 bp, Homo sapien
tatatctagatcatgtgggtacttt

SEQ ID NO: 3400454 - DNA, 25 bp, Homo sapien
tctagatcatgtgggtactttattt

SEQ ID NO: 3400455 - DNA, 25 bp, Homo sapien
tcatgtgggtactttatttgtaaca

SEQ ID NO: 3400456 - DNA, 25 bp, Homo sapien
catagcattacttaagaattgccca

SEQ ID NO: 3400457 - DNA, 25 bp, Homo sapien
ttcatagcattacttaagaattgcc

SEQ ID NO: 3400458 - DNA, 25 bp, Homo sapien
gctaggttttgctttcatagcatta

SEQ ID NO: 3400459 - DNA, 25 bp, Homo sapien
gtctatgctaggttttgctttcata

SEQ ID NO: 3400460 - DNA, 25 bp, Homo sapien
ggcggaagtggagccagtactcccc

SEQ ID NO: 3400461 - DNA, 25 bp, Homo sapien
gggtccaattagtcctgtttcagtc

SEQ ID NO: 3400462 - DNA, 25 bp, Homo sapien
ttcagtctcattgccaccaatttga

SEQ ID NO: 3400463 - DNA, 25 bp, Homo sapien
tcactgatgtcaggcggaagtggag

SEQ ID NO: 3400464 - DNA, 25 bp, Homo sapien
taaaattatttgtgcagaatgcgtg

SEQ ID NO: 3400465 - DNA, 25 bp, Homo sapien
aaaattatttgtgcagaatgcgtgg

SEQ ID NO: 3400466 - DNA, 25 bp, Homo sapien
tatttgtgcagaatgcgtggagatg

SEQ ID NO: 3400467 - DNA, 25 bp, Homo sapien
aattatttgtgcagaatgcgtggag

SEQ ID NO: 3400468 - DNA, 25 bp, Homo sapien
cacacgttgcttgatctggtcaaat

SEQ ID NO: 3400469 - DNA, 25 bp, Homo sapien
tccacaatgcatccaatgcccttaa

SEQ ID NO: 3400470 - DNA, 25 bp, Homo sapien
tattttcctgcacacttctggcatc

SEQ ID NO: 3400471 - DNA, 25 bp, Homo sapien
attgtccaaacttgtcatgagcccc

SEQ ID NO: 3400472 - DNA, 25 bp, Homo sapien
gaagagctaaaagatcttgatacat

SEQ ID NO: 3400473 - DNA, 25 bp, Homo sapien
cttctagttggcaacgaagacttca

SEQ ID NO: 3400474 - DNA, 25 bp, Homo sapien
ttctagttggcaacgaagacttcat

SEQ ID NO: 3400475 - DNA, 25 bp, Homo sapien
gaagacttcatcacctgcagtaggt

SEQ ID NO: 3400476 - DNA, 25 bp, Homo sapien
acttggggtaaatgtggtcactaga

SEQ ID NO: 3400477 - DNA, 25 bp, Homo sapien
agtgacttggggtaaatgtggtcac

SEQ ID NO: 3400478 - DNA, 25 bp, Homo sapien
tggggtaaatgtggtcactagagct

SEQ ID NO: 3400479 - DNA, 25 bp, Homo sapien
gggtaaatgtggtcactagagctgc

SEQ ID NO: 3400480 - DNA, 25 bp, Homo sapien
cacgattacgagagagcagtctcct

SEQ ID NO: 3400481 - DNA, 25 bp, Homo sapien
tcaaggcacgattacgagagagcag

SEQ ID NO: 3400482 - DNA, 25 bp, Homo sapien
ggaaattcaaggcacgattacgaga

SEQ ID NO: 3400483 - DNA, 25 bp, Homo sapien
gagagcagtctcctagcagcaataa

SEQ ID NO: 3400484 - DNA, 25 bp, Homo sapien
ccttatctgtgtcttgtaaaagttc

SEQ ID NO: 3400485 - DNA, 25 bp, Homo sapien
tttcacccttatctgtgtcttgtaa

SEQ ID NO: 3400486 - DNA, 25 bp, Homo sapien
cacccttatctgtgtcttgtaaaag

SEQ ID NO: 3400487 - DNA, 25 bp, Homo sapien
tcacccttatctgtgtcttgtaaaa

SEQ ID NO: 3400488 - DNA, 25 bp, Homo sapien
tctgaacttgagcttcccctctgac

SEQ ID NO: 3400489 - DNA, 25 bp, Homo sapien
ttctgaacttgagcttcccctctga

SEQ ID NO: 3400490 - DNA, 25 bp, Homo sapien
ccccttctgaacttgagcttcccct

SEQ ID NO: 3400491 - DNA, 25 bp, Homo sapien
tgcttgtggcttcacctatggctag

SEQ ID NO: 3400492 - DNA, 25 bp, Homo sapien
cttccgtggtggactgagcactggt

SEQ ID NO: 3400493 - DNA, 25 bp, Homo sapien
ggcaccagtactggctttggcagtg

SEQ ID NO: 3400494 - DNA, 25 bp, Homo sapien
gctagcgagatttcaggtttattcc

SEQ ID NO: 3400495 - DNA, 25 bp, Homo sapien
ttggtggtggaccaagcagtggtcc

SEQ ID NO: 3400496 - DNA, 25 bp, Homo sapien
tggtggtggaccaagcagtggtcct

SEQ ID NO: 3400497 - DNA, 25 bp, Homo sapien
gtggtggaccaagcagtggtcctag

SEQ ID NO: 3400498 - DNA, 25 bp, Homo sapien
cttggtggtggaccaagcagtggtc

SEQ ID NO: 3400499 - DNA, 25 bp, Homo sapien
caacagcttcaatagtggatcttgt

SEQ ID NO: 3400500 - DNA, 25 bp, Homo sapien
gcttcaatagtggatcttgttctat

SEQ ID NO: 3400501 - DNA, 25 bp, Homo sapien
gctccagcaacagcttcaatagtgg

SEQ ID NO: 3400502 - DNA, 25 bp, Homo sapien
cagcaacagcttcaatagtggatct

SEQ ID NO: 3400503 - DNA, 25 bp, Homo sapien
aatgtcagctttgacagaggactga

SEQ ID NO: 3400504 - DNA, 25 bp, Homo sapien
actgatgctggctttagtgatgaca

SEQ ID NO: 3400505 - DNA, 25 bp, Homo sapien
caccagcgatagctttggcagtggg

SEQ ID NO: 3400506 - DNA, 25 bp, Homo sapien
ctgagtaccatcattggttgtggca

SEQ ID NO: 3400507 - DNA, 25 bp, Homo sapien
cgaagaagccccacaaacattgcat

SEQ ID NO: 3400508 - DNA, 25 bp, Homo sapien
cagagagcacactgtaaccaaatca

SEQ ID NO: 3400509 - DNA, 25 bp, Homo sapien
tttcgaagaagccccacaaacattg

SEQ ID NO: 3400510 - DNA, 25 bp, Homo sapien
ctgtaaccaaatcagtgcctttttt

SEQ ID NO: 3400511 - DNA, 25 bp, Homo sapien
tctgaccttgtcttttggtcattta

SEQ ID NO: 3400512 - DNA, 25 bp, Homo sapien
acttccttaatatctgaccttgtct

SEQ ID NO: 3400513 - DNA, 25 bp, Homo sapien
tgaccttgtcttttggtcatttact

SEQ ID NO: 3400514 - DNA, 25 bp, Homo sapien
tcacttccttaatatctgaccttgt

SEQ ID NO: 3400515 - DNA, 25 bp, Homo sapien
gactggttgtttcagtgacacatta

SEQ ID NO: 3400516 - DNA, 25 bp, Homo sapien
cagactgtccaaaacggagctcatt

SEQ ID NO: 3400517 - DNA, 25 bp, Homo sapien
taaatctttaaggtgaagatggcac

SEQ ID NO: 3400518 - DNA, 25 bp, Homo sapien
ggcatcatgaaatgatccatctttc

SEQ ID NO: 3400519 - DNA, 25 bp, Homo sapien
atcactggtgttaagcccgagtcca

SEQ ID NO: 3400520 - DNA, 25 bp, Homo sapien
tgttaagcccgagtccaaaagctga

SEQ ID NO: 3400521 - DNA, 25 bp, Homo sapien
cagcaccagagacagatggaggcca

SEQ ID NO: 3400522 - DNA, 25 bp, Homo sapien
gcaaatcactggtgttaagcccgag

SEQ ID NO: 3400523 - DNA, 25 bp, Homo sapien
ggttggacaattgcttcttaagaag

SEQ ID NO: 3400524 - DNA, 25 bp, Homo sapien
ttggacaattgcttcttaagaagtc

SEQ ID NO: 3400525 - DNA, 25 bp, Homo sapien
aaggttggacaattgcttcttaaga

SEQ ID NO: 3400526 - DNA, 25 bp, Homo sapien
aggttggacaattgcttcttaagaa

SEQ ID NO: 3400527 - DNA, 25 bp, Homo sapien
taaggcagtcgtgggacctctttcg

SEQ ID NO: 3400528 - DNA, 25 bp, Homo sapien
gtcatgatctatcacctcccgaagg

SEQ ID NO: 3400529 - DNA, 25 bp, Homo sapien
tctttcgaaagagcatgaatcccat

SEQ ID NO: 3400530 - DNA, 25 bp, Homo sapien
tatagacggtatctcctagctgtgt

SEQ ID NO: 3400531 - DNA, 25 bp, Homo sapien
cacatctccatgtgtgcaagacaca

SEQ ID NO: 3400532 - DNA, 25 bp, Homo sapien
aatacagagctgttccattgaactg

SEQ ID NO: 3400533 - DNA, 25 bp, Homo sapien
gaactgatgatctgccttcatgtag

SEQ ID NO: 3400534 - DNA, 25 bp, Homo sapien
acaaacactctcacacgacagcagg

SEQ ID NO: 3400535 - DNA, 25 bp, Homo sapien
tcttctattgaatttaaccattcct

SEQ ID NO: 3400536 - DNA, 25 bp, Homo sapien
tgatatcttctattgaatttaacca

SEQ ID NO: 3400537 - DNA, 25 bp, Homo sapien
ctattgaatttaaccattccttctg

SEQ ID NO: 3400538 - DNA, 25 bp, Homo sapien
ttgaatttaaccattccttctgtga

SEQ ID NO: 3400539 - DNA, 25 bp, Homo sapien
tgggatggctcctttaaagacctct

SEQ ID NO: 3400540 - DNA, 25 bp, Homo sapien
caaagaacctaactgctgtgaccac

SEQ ID NO: 3400541 - DNA, 25 bp, Homo sapien
actgagggccccagatggagatctc

SEQ ID NO: 3400542 - DNA, 25 bp, Homo sapien
catttcttgttgattgctgggtggg

SEQ ID NO: 3400543 - DNA, 25 bp, Homo sapien
tgttagtaatctaactctgtagcaa

SEQ ID NO: 3400544 - DNA, 25 bp, Homo sapien
tatgctggaactttgcaattaggaa

SEQ ID NO: 3400545 - DNA, 25 bp, Homo sapien
gaaacactcatcttatgctggaact

SEQ ID NO: 3400546 - DNA, 25 bp, Homo sapien
actttgcaattaggaactttgttag

SEQ ID NO: 3400547 - DNA, 25 bp, Homo sapien
acttcaccttcaaagtcaagagtca

SEQ ID NO: 3400548 - DNA, 25 bp, Homo sapien
cttacttcaccttcaaagtcaagag

SEQ ID NO: 3400549 - DNA, 25 bp, Homo sapien
tacttcaccttcaaagtcaagagtc

SEQ ID NO: 3400550 - DNA, 25 bp, Homo sapien
cttcaccttcaaagtcaagagtcat

SEQ ID NO: 3400551 - DNA, 25 bp, Homo sapien
gcttgaattcgttccgcagggaaac

SEQ ID NO: 3400552 - DNA, 25 bp, Homo sapien
ttttgaagacagagggagctttgtg

SEQ ID NO: 3400553 - DNA, 25 bp, Homo sapien
aattcgttccgcagggaaacagtca

SEQ ID NO: 3400554 - DNA, 25 bp, Homo sapien
tgaagacagagggagctttgtgctt

SEQ ID NO: 3400555 - DNA, 25 bp, Homo sapien
tcttgagagcatgggctgtgaacac

SEQ ID NO: 3400556 - DNA, 25 bp, Homo sapien
ttgcctcctcctaagctgagattct

SEQ ID NO: 3400557 - DNA, 25 bp, Homo sapien
gctgagattcttgagagcatgggct

SEQ ID NO: 3400558 - DNA, 25 bp, Homo sapien
cctcctaagctgagattcttgagag

SEQ ID NO: 3400559 - DNA, 25 bp, Homo sapien
ctgtcttgccagcactaatgaagga

SEQ ID NO: 3400560 - DNA, 25 bp, Homo sapien
gcactaatgaaggatatgtactttc

SEQ ID NO: 3400561 - DNA, 25 bp, Homo sapien
tcttgccagcactaatgaaggatat

SEQ ID NO: 3400562 - DNA, 25 bp, Homo sapien
gaaaggcattaattcatctgtcttg

SEQ ID NO: 3400563 - DNA, 25 bp, Homo sapien
tcatcagatctcctaatgcatttta

SEQ ID NO: 3400564 - DNA, 25 bp, Homo sapien
tcttcttaagacatctatcatcaga

SEQ ID NO: 3400565 - DNA, 25 bp, Homo sapien
cttagggctagttagatattaaaca

SEQ ID NO: 3400566 - DNA, 25 bp, Homo sapien
gatctgtgtgagaatgtccttccga

SEQ ID NO: 3400567 - DNA, 25 bp, Homo sapien
tccagctccgtaaggaatattcatg

SEQ ID NO: 3400568 - DNA, 25 bp, Homo sapien
tcagataacgttttttccagctccg

SEQ ID NO: 3400569 - DNA, 25 bp, Homo sapien
tatttaatgactgtatcccaaagca

SEQ ID NO: 3400570 - DNA, 25 bp, Homo sapien
cagtgcacgtaatataatcctccca

SEQ ID NO: 3400571 - DNA, 25 bp, Homo sapien
cagagttcctgactaaatgacttat

SEQ ID NO: 3400572 - DNA, 25 bp, Homo sapien
acttatttaccttactgtagagcgg

SEQ ID NO: 3400573 - DNA, 25 bp, Homo sapien
atgacttatttaccttactgtagag

SEQ ID NO: 3400574 - DNA, 25 bp, Homo sapien
tgtgcagagttcctgactaaatgac

SEQ ID NO: 3400575 - DNA, 25 bp, Homo sapien
ggacacctattgctcctcgagtgct

SEQ ID NO: 3400576 - DNA, 25 bp, Homo sapien
aatgcaggtcgatgtgtgtgacagc

SEQ ID NO: 3400577 - DNA, 25 bp, Homo sapien
ggtcttgttaaagcggcagggcatc

SEQ ID NO: 3400578 - DNA, 25 bp, Homo sapien
tgggagccattttgacatatcctgg

SEQ ID NO: 3400579 - DNA, 25 bp, Homo sapien
tgatgacctcactttcacctgaatc

SEQ ID NO: 3400580 - DNA, 25 bp, Homo sapien
cacctgaatcttactaaaatggaac

SEQ ID NO: 3400581 - DNA, 25 bp, Homo sapien
acatcatttatgtgagtccatctgg

SEQ ID NO: 3400582 - DNA, 25 bp, Homo sapien
agctgtcaaaacctgtgaattgttc

SEQ ID NO: 3400583 - DNA, 25 bp, Homo sapien
tgtcaagagattctttatcaaaggg

SEQ ID NO: 3400584 - DNA, 25 bp, Homo sapien
cacaaattttctcaagccttccaat

SEQ ID NO: 3400585 - DNA, 25 bp, Homo sapien
ttctttatcaaaggggagtatgcca

SEQ ID NO: 3400586 - DNA, 25 bp, Homo sapien
gaatgaaaatgccatgcccatagac

SEQ ID NO: 3400587 - DNA, 25 bp, Homo sapien
gaaagaatctggttcctgaactgct

SEQ ID NO: 3400588 - DNA, 25 bp, Homo sapien
caacttgatggctgggtttactcac

SEQ ID NO: 3400589 - DNA, 25 bp, Homo sapien
gagaacaaatgcagagtcatactcc

SEQ ID NO: 3400590 - DNA, 25 bp, Homo sapien
gatgccagcatgttgatgattatta

SEQ ID NO: 3400591 - DNA, 25 bp, Homo sapien
tgaaggcatatgtctgtggccagtg

SEQ ID NO: 3400592 - DNA, 25 bp, Homo sapien
ctgagtagcattaggtgcaagccaa

SEQ ID NO: 3400593 - DNA, 25 bp, Homo sapien
agcttctgaaggcatatgtctgtgg

SEQ ID NO: 3400594 - DNA, 25 bp, Homo sapien
cattaggtgcaagccaatagggcag

SEQ ID NO: 3400595 - DNA, 25 bp, Homo sapien
tttaccatctgccttgtctttgcat

SEQ ID NO: 3400596 - DNA, 25 bp, Homo sapien
tctggatttggagtatagggaagaa

SEQ ID NO: 3400597 - DNA, 25 bp, Homo sapien
aggaaagtcaggcagcacgtcttta

SEQ ID NO: 3400598 - DNA, 25 bp, Homo sapien
tcaggcagcacgtctttaccatctg

SEQ ID NO: 3400599 - DNA, 25 bp, Homo sapien
cagccacagtaccattcttgggttt

SEQ ID NO: 3400600 - DNA, 25 bp, Homo sapien
cacacagccacagtaccattcttgg

SEQ ID NO: 3400601 - DNA, 25 bp, Homo sapien
cacagcagagcatttccacacagcc

SEQ ID NO: 3400602 - DNA, 25 bp, Homo sapien
cacagtaccattcttgggttttctc

SEQ ID NO: 3400603 - DNA, 25 bp, Homo sapien
tttgaccaaacttgtctgaaaacat

SEQ ID NO: 3400604 - DNA, 25 bp, Homo sapien
taagatgtcttttactgccttcctt

SEQ ID NO: 3400605 - DNA, 25 bp, Homo sapien
actattgtgctgactgagtgaagca

SEQ ID NO: 3400606 - DNA, 25 bp, Homo sapien
tgttcactctatgaacactattgtg

SEQ ID NO: 3400607 - DNA, 25 bp, Homo sapien
taaaagacaagaatacacaactctc

SEQ ID NO: 3400608 - DNA, 25 bp, Homo sapien
caggcctaggcctaattgcttttcg

SEQ ID NO: 3400609 - DNA, 25 bp, Homo sapien
gcctaattgcttttcgccgatgcgg

SEQ ID NO: 3400610 - DNA, 25 bp, Homo sapien
ttagtcatttgagcacaggcctagg

SEQ ID NO: 3400611 - DNA, 25 bp, Homo sapien
ttcgccgatgcggaaaaatttttga

SEQ ID NO: 3400612 - DNA, 25 bp, Homo sapien
cttcaaatgggtgacatgcttcttg

SEQ ID NO: 3400613 - DNA, 25 bp, Homo sapien
ttcaaatgggtgacatgcttcttga

SEQ ID NO: 3400614 - DNA, 25 bp, Homo sapien
atcaagtgatagctgaatctgaggc

SEQ ID NO: 3400615 - DNA, 25 bp, Homo sapien
ggctaggaatcagagggcttatact

SEQ ID NO: 3400616 - DNA, 25 bp, Homo sapien
gccaactgtgcatacctctgtgtag

SEQ ID NO: 3400617 - DNA, 25 bp, Homo sapien
cataaactgaggtcaactgtctatc

SEQ ID NO: 3400618 - DNA, 25 bp, Homo sapien
agtacatatgacttgaacttgggag

SEQ ID NO: 3400619 - DNA, 25 bp, Homo sapien
gggctccactcttagaatgtttcaa

SEQ ID NO: 3400620 - DNA, 25 bp, Homo sapien
catatgcgggatatatggaatacca

SEQ ID NO: 3400621 - DNA, 25 bp, Homo sapien
gcattaatggactaatctgcagcta

SEQ ID NO: 3400622 - DNA, 25 bp, Homo sapien
gcactgattctgagcacaatctttt

SEQ ID NO: 3400623 - DNA, 25 bp, Homo sapien
agcttgttgtggcactgattctgag

SEQ ID NO: 3400624 - DNA, 25 bp, Homo sapien
cactgattctgagcacaatcttttc

SEQ ID NO: 3400625 - DNA, 25 bp, Homo sapien
tgggttcatgccattttcctgcctc

SEQ ID NO: 3400626 - DNA, 25 bp, Homo sapien
tcatgatccacctgcctcccaaagt

SEQ ID NO: 3400627 - DNA, 25 bp, Homo sapien
ctcactgaaagctccacctctgggt

SEQ ID NO: 3400628 - DNA, 25 bp, Homo sapien
tcactgaaagctccacctctgggtt

SEQ ID NO: 3400629 - DNA, 25 bp, Homo sapien
tctcagagcagaggctacactttat

SEQ ID NO: 3400630 - DNA, 25 bp, Homo sapien
ctcagagcagaggctacactttatt

SEQ ID NO: 3400631 - DNA, 25 bp, Homo sapien
tgtgaaagtcacactcagtctctgc

SEQ ID NO: 3400632 - DNA, 25 bp, Homo sapien
tcttgtgaaagtcacactcagtctc

SEQ ID NO: 3400633 - DNA, 25 bp, Homo sapien
tttcttgtgaaagtcacactcagtc

SEQ ID NO: 3400634 - DNA, 25 bp, Homo sapien
gaaagtcacactcagtctctgccac

SEQ ID NO: 3400635 - DNA, 25 bp, Homo sapien
tcaaataatttttcagtagaataat

SEQ ID NO: 3400636 - DNA, 25 bp, Homo sapien
ctcaaataatttttcagtagaataa

SEQ ID NO: 3400637 - DNA, 25 bp, Homo sapien
cctcaaataatttttcagtagaata

SEQ ID NO: 3400638 - DNA, 25 bp, Homo sapien
caaataatttttcagtagaataata

SEQ ID NO: 3400639 - DNA, 25 bp, Homo sapien
tatatgatgagatcaaacagctcta

SEQ ID NO: 3400640 - DNA, 25 bp, Homo sapien
agctctaacaatccccttaaaagcg

SEQ ID NO: 3400641 - DNA, 25 bp, Homo sapien
aatccccttaaaagcgcttgctgct

SEQ ID NO: 3400642 - DNA, 25 bp, Homo sapien
gcgcttgctgctcaagtagattatt

SEQ ID NO: 3400643 - DNA, 25 bp, Homo sapien
tctttaatgagacatcatacaattt

SEQ ID NO: 3400644 - DNA, 25 bp, Homo sapien
tttcttctttaatgagacatcatac

SEQ ID NO: 3400645 - DNA, 25 bp, Homo sapien
tcttctttaatgagacatcatacaa

SEQ ID NO: 3400646 - DNA, 25 bp, Homo sapien
aattactcataaaaacaggttgtat

SEQ ID NO: 3400647 - DNA, 25 bp, Homo sapien
caatcttgcaggcataaggtagtat

SEQ ID NO: 3400648 - DNA, 25 bp, Homo sapien
tggccaatcttgcaggcataaggta

SEQ ID NO: 3400649 - DNA, 25 bp, Homo sapien
gccaatcttgcaggcataaggtagt

SEQ ID NO: 3400650 - DNA, 25 bp, Homo sapien
gcataaggtagtatcatattgtggt

SEQ ID NO: 3400651 - DNA, 25 bp, Homo sapien
tttgctttattgtgaactcaagaat

SEQ ID NO: 3400652 - DNA, 25 bp, Homo sapien
gctttattgtgaactcaagaatatt

SEQ ID NO: 3400653 - DNA, 25 bp, Homo sapien
ttttgctttattgtgaactcaagaa

SEQ ID NO: 3400654 - DNA, 25 bp, Homo sapien
tgctttattgtgaactcaagaatat

SEQ ID NO: 3400655 - DNA, 25 bp, Homo sapien
tctcttcttggtttagatggaaaaa

SEQ ID NO: 3400656 - DNA, 25 bp, Homo sapien
aaaaacaaagtgaaaagcgtgacat

SEQ ID NO: 3400657 - DNA, 25 bp, Homo sapien
acaaagtgaaaagcgtgacattcat

SEQ ID NO: 3400658 - DNA, 25 bp, Homo sapien
aaacaaagtgaaaagcgtgacattc

SEQ ID NO: 3400659 - DNA, 25 bp, Homo sapien
gtgttatgatatgcaatgaatccca

SEQ ID NO: 3400660 - DNA, 25 bp, Homo sapien
catgggtgttatgatatgcaatgaa

SEQ ID NO: 3400661 - DNA, 25 bp, Homo sapien
tgggtgttatgatatgcaatgaatc

SEQ ID NO: 3400662 - DNA, 25 bp, Homo sapien
tgtgagtactccatgggtgttatga

SEQ ID NO: 3400663 - DNA, 25 bp, Homo sapien
gctgcaagtgtatctaagaaaggag

SEQ ID NO: 3400664 - DNA, 25 bp, Homo sapien
aagaaaggagatatctggtattgtc

SEQ ID NO: 3400665 - DNA, 25 bp, Homo sapien
tgtctgtggatatagtggaagacag

SEQ ID NO: 3400666 - DNA, 25 bp, Homo sapien
gagatatctggtattgtctgtggat

SEQ ID NO: 3400667 - DNA, 25 bp, Homo sapien
tcaatgttaaatttagctctttcat

SEQ ID NO: 3400668 - DNA, 25 bp, Homo sapien
cttttcaatgttaaatttagctctt

SEQ ID NO: 3400669 - DNA, 25 bp, Homo sapien
ttcaatgttaaatttagctctttca

SEQ ID NO: 3400670 - DNA, 25 bp, Homo sapien
tttcaatgttaaatttagctctttc

SEQ ID NO: 3400671 - DNA, 25 bp, Homo sapien
tctgttataataggaaaaactgatg

SEQ ID NO: 3400672 - DNA, 25 bp, Homo sapien
ctatcttgtttctgttataatagga

SEQ ID NO: 3400673 - DNA, 25 bp, Homo sapien
atcttgtttctgttataataggaaa

SEQ ID NO: 3400674 - DNA, 25 bp, Homo sapien
tttctgttataataggaaaaactga

SEQ ID NO: 3400675 - DNA, 25 bp, Homo sapien
ggaggatgtcaactcctatgatggc

SEQ ID NO: 3400676 - DNA, 25 bp, Homo sapien
aggtgggcccttggtgcgactccta

SEQ ID NO: 3400677 - DNA, 25 bp, Homo sapien
ggcccttggtgcgactcctaaacaa

SEQ ID NO: 3400678 - DNA, 25 bp, Homo sapien
gcggattatccggaaaaggggcaga

SEQ ID NO: 3400679 - DNA, 25 bp, Homo sapien
gcacatcatcccttatagtccccac

SEQ ID NO: 3400680 - DNA, 25 bp, Homo sapien
gccttggttgtccagtcggcctctg

SEQ ID NO: 3400681 - DNA, 25 bp, Homo sapien
tggtgccgcgtttccggggccttgc

SEQ ID NO: 3400682 - DNA, 25 bp, Homo sapien
tggagcggacgtaggttttggtgcc

SEQ ID NO: 3400683 - DNA, 25 bp, Homo sapien
agcggacgtaggttttggtgccgcg

SEQ ID NO: 3400684 - DNA, 25 bp, Homo sapien
cttactcgtgctttgaaatgagcca

SEQ ID NO: 3400685 - DNA, 25 bp, Homo sapien
caagcaaggcggcatagtgtcggta

SEQ ID NO: 3400686 - DNA, 25 bp, Homo sapien
catagtgtcggtaaccagcagaatc

SEQ ID NO: 3400687 - DNA, 25 bp, Homo sapien
gtgaaaatgatacagcgtcagtaga

SEQ ID NO: 3400688 - DNA, 25 bp, Homo sapien
gaaaatgatacagcgtcagtagaca

SEQ ID NO: 3400689 - DNA, 25 bp, Homo sapien
tcctgggttagggtagcagccattg

SEQ ID NO: 3400690 - DNA, 25 bp, Homo sapien
tacagatatgtggtgagacgcaggt

SEQ ID NO: 3400691 - DNA, 25 bp, Homo sapien
gtaagaccttctttcacaacttgag

SEQ ID NO: 3400692 - DNA, 25 bp, Homo sapien
tctgaagtaaatcttttccgtatgg

SEQ ID NO: 3400693 - DNA, 25 bp, Homo sapien
gtatatgtgctactaaagtaagcaa

SEQ ID NO: 3400694 - DNA, 25 bp, Homo sapien
acatagaatgcttcacaaatctgtg

SEQ ID NO: 3400695 - DNA, 25 bp, Homo sapien
aaatctgtgtgttgttgttgcacag

SEQ ID NO: 3400696 - DNA, 25 bp, Homo sapien
tgtgttgttgttgcacaggggccat

SEQ ID NO: 3400697 - DNA, 25 bp, Homo sapien
gctgtgcaacattggctgcacagat

SEQ ID NO: 3400698 - DNA, 25 bp, Homo sapien
gaggctgctgtgcaacattggctgc

SEQ ID NO: 3400699 - DNA, 25 bp, Homo sapien
tagaggctgctgtgcaacattggct

SEQ ID NO: 3400700 - DNA, 25 bp, Homo sapien
acattggctgcacagatgtttttcc

SEQ ID NO: 3400701 - DNA, 25 bp, Homo sapien
aatgtttcaaaggtgatggagctat

SEQ ID NO: 3400702 - DNA, 25 bp, Homo sapien
atgtttcaaaggtgatggagctatg

SEQ ID NO: 3400703 - DNA, 25 bp, Homo sapien
gtttcaaaggtgatggagctatgag

SEQ ID NO: 3400704 - DNA, 25 bp, Homo sapien
tgtttcaaaggtgatggagctatga

SEQ ID NO: 3400705 - DNA, 25 bp, Homo sapien
caatgttgttcttggtaaatgccat

SEQ ID NO: 3400706 - DNA, 25 bp, Homo sapien
tcaatgttgttcttggtaaatgcca

SEQ ID NO: 3400707 - DNA, 25 bp, Homo sapien
ccttccctgataagtcattaaatga

SEQ ID NO: 3400708 - DNA, 25 bp, Homo sapien
cttccttccctgataagtcattaaa

SEQ ID NO: 3400709 - DNA, 25 bp, Homo sapien
aaatggtacctgtaatgtatgaccc

SEQ ID NO: 3400710 - DNA, 25 bp, Homo sapien
agtggctggcatcctattggtctag

SEQ ID NO: 3400711 - DNA, 25 bp, Homo sapien
caggcagttgatttaaagttacgtc

SEQ ID NO: 3400712 - DNA, 25 bp, Homo sapien
tgtcaagacttgcttccccaacgtt

SEQ ID NO: 3400713 - DNA, 25 bp, Homo sapien
tttttttcatcaattgtgttctcca

SEQ ID NO: 3400714 - DNA, 25 bp, Homo sapien
tttttcatcaattgtgttctccaaa

SEQ ID NO: 3400715 - DNA, 25 bp, Homo sapien
ttcatcaattgtgttctccaaaatg

SEQ ID NO: 3400716 - DNA, 25 bp, Homo sapien
catcaattgtgttctccaaaatgac

SEQ ID NO: 3400717 - DNA, 25 bp, Homo sapien
aggcaagagggaatgagataaagag

SEQ ID NO: 3400718 - DNA, 25 bp, Homo sapien
taaagagtgtagattgagcaagtgg

SEQ ID NO: 3400719 - DNA, 25 bp, Homo sapien
tactgggcaatatgtgaagaaagga

SEQ ID NO: 3400720 - DNA, 25 bp, Homo sapien
gagcaagtggtctttgactgaagaa

SEQ ID NO: 3400721 - DNA, 25 bp, Homo sapien
ttcagcaaacatacagcccagaccg

SEQ ID NO: 3400722 - DNA, 25 bp, Homo sapien
gagctccttactactatgatggcaa

SEQ ID NO: 3400723 - DNA, 25 bp, Homo sapien
gatccatagtcacctctttcaagag

SEQ ID NO: 3400724 - DNA, 25 bp, Homo sapien
tagcttataagaggagcagtctcca

SEQ ID NO: 3400725 - DNA, 25 bp, Homo sapien
tgtgatatcagcagtcttatatttt

SEQ ID NO: 3400726 - DNA, 25 bp, Homo sapien
tcagcatttgttcatccttattcac

SEQ ID NO: 3400727 - DNA, 25 bp, Homo sapien
ccaagttgtggttcaaatgaatccc

SEQ ID NO: 3400728 - DNA, 25 bp, Homo sapien
tcactactgtcagagagagctctgc

SEQ ID NO: 3400729 - DNA, 25 bp, Homo sapien
gaatccccttgacaacagctgctca

SEQ ID NO: 3400730 - DNA, 25 bp, Homo sapien
tataaatgcagatggccttaataaa

SEQ ID NO: 3400731 - DNA, 25 bp, Homo sapien
tcacctcatcccaacgtttataaat

SEQ ID NO: 3400732 - DNA, 25 bp, Homo sapien
aacgtttataaatgcagatggcctt

SEQ ID NO: 3400733 - DNA, 25 bp, Homo sapien
aatttctcatactggcccaattcac

SEQ ID NO: 3400734 - DNA, 25 bp, Homo sapien
atttaatatcttcaattcccaccat

SEQ ID NO: 3400735 - DNA, 25 bp, Homo sapien
ccatttaatatcttcaattcccacc

SEQ ID NO: 3400736 - DNA, 25 bp, Homo sapien
catttaatatcttcaattcccacca

SEQ ID NO: 3400737 - DNA, 25 bp, Homo sapien
agaaataattgtgggatttgcccat

SEQ ID NO: 3400738 - DNA, 25 bp, Homo sapien
ggctttggagttcttgggaaacaga

SEQ ID NO: 3400739 - DNA, 25 bp, Homo sapien
cagttccagactgattatagcttgc

SEQ ID NO: 3400740 - DNA, 25 bp, Homo sapien
gattatagcttgcaaggttgatgtc

SEQ ID NO: 3400741 - DNA, 25 bp, Homo sapien
gacctgttacccaaatgacttccca

SEQ ID NO: 3400742 - DNA, 25 bp, Homo sapien
aggttgatgtctacgaagaattctg

SEQ ID NO: 3400743 - DNA, 25 bp, Homo sapien
cagaggcatcgtagtaatgaataat

SEQ ID NO: 3400744 - DNA, 25 bp, Homo sapien
aggcatcgtagtaatgaataatatc

SEQ ID NO: 3400745 - DNA, 25 bp, Homo sapien
tcagaggcatcgtagtaatgaataa

SEQ ID NO: 3400746 - DNA, 25 bp, Homo sapien
attcagaggcatcgtagtaatgaat

SEQ ID NO: 3400747 - DNA, 25 bp, Homo sapien
tacaacacctggcttggaccagaca

SEQ ID NO: 3400748 - DNA, 25 bp, Homo sapien
acagtgcaatgtaagtggtctctcc

SEQ ID NO: 3400749 - DNA, 25 bp, Homo sapien
ggatcaaattgagccagtgccatgg

SEQ ID NO: 3400750 - DNA, 25 bp, Homo sapien
gaaggcagagatcgctggacaccat

SEQ ID NO: 3400751 - DNA, 25 bp, Homo sapien
tctaaataagtggttgagagccatt

SEQ ID NO: 3400752 - DNA, 25 bp, Homo sapien
tcaggatacttagtgagatgcaaaa

SEQ ID NO: 3400753 - DNA, 25 bp, Homo sapien
gaccttcaagttgttgcttccataa

SEQ ID NO: 3400754 - DNA, 25 bp, Homo sapien
tcaggctgaagtcgccaatgtctgc

SEQ ID NO: 3400755 - DNA, 25 bp, Homo sapien
atggcagctgtctctaaaagatttt

SEQ ID NO: 3400756 - DNA, 25 bp, Homo sapien
taaatggctttctgagaaccctttc

SEQ ID NO: 3400757 - DNA, 25 bp, Homo sapien
ggctttctgagaaccctttccgcat

SEQ ID NO: 3400758 - DNA, 25 bp, Homo sapien
taatagacctgagtatagaaataag

SEQ ID NO: 3400759 - DNA, 25 bp, Homo sapien
aatggctttctgagaaccctttccg

SEQ ID NO: 3400760 - DNA, 25 bp, Homo sapien
acaagctgtccatgagtataacgag

SEQ ID NO: 3400761 - DNA, 25 bp, Homo sapien
gagtataacgagattcttctgtggc

SEQ ID NO: 3400762 - DNA, 25 bp, Homo sapien
ttagaacccgagatgtttagcttct

SEQ ID NO: 3400763 - DNA, 25 bp, Homo sapien
cattagaacccgagatgtttagctt

SEQ ID NO: 3400764 - DNA, 25 bp, Homo sapien
ttcaatttgcctctgcagtgatggg

SEQ ID NO: 3400765 - DNA, 25 bp, Homo sapien
tttgtatatgcatttcaatcaattt

SEQ ID NO: 3400766 - DNA, 25 bp, Homo sapien
taaatcagagagacaataaagcaaa

SEQ ID NO: 3400767 - DNA, 25 bp, Homo sapien
caggcagcctttgacagcttttcca

SEQ ID NO: 3400768 - DNA, 25 bp, Homo sapien
tggattttaacatcctgttaggaca

SEQ ID NO: 3400769 - DNA, 25 bp, Homo sapien
aatgccttcttggaggagtttggat

SEQ ID NO: 3400770 - DNA, 25 bp, Homo sapien
gagttgataagcgtaaattaatgcc

SEQ ID NO: 3400771 - DNA, 25 bp, Homo sapien
ccttgaaggatttgtggtacagagt

SEQ ID NO: 3400772 - DNA, 25 bp, Homo sapien
ggtagaggagaacaagtctggtatt

SEQ ID NO: 3400773 - DNA, 25 bp, Homo sapien
gaacaagtctggtattacagccaca

SEQ ID NO: 3400774 - DNA, 25 bp, Homo sapien
gggagccatctgctactgtcatgta

SEQ ID NO: 3400775 - DNA, 25 bp, Homo sapien
gtctggtattacagccacatctgct

SEQ ID NO: 3400776 - DNA, 25 bp, Homo sapien
aaatcacggggtggattttaggcat

SEQ ID NO: 3400777 - DNA, 25 bp, Homo sapien
tgtgttttgaaatcacggggtggat

SEQ ID NO: 3400778 - DNA, 25 bp, Homo sapien
agatgatcagcagcattctctttgt

SEQ ID NO: 3400779 - DNA, 25 bp, Homo sapien
tgatcagcagcattctctttgtgtt

SEQ ID NO: 3400780 - DNA, 25 bp, Homo sapien
gcacattgacagaggattgagggtg

SEQ ID NO: 3400781 - DNA, 25 bp, Homo sapien
attgagggtggggtatgatagtctt

SEQ ID NO: 3400782 - DNA, 25 bp, Homo sapien
gataaattcttgatggtgtggccca

SEQ ID NO: 3400783 - DNA, 25 bp, Homo sapien
gggtatgatagtcttgtttgataaa

SEQ ID NO: 3400784 - DNA, 25 bp, Homo sapien
gtgatgtagcaggattgtttggttc

SEQ ID NO: 3400785 - DNA, 25 bp, Homo sapien
gatgtagcaggattgtttggttcag

SEQ ID NO: 3400786 - DNA, 25 bp, Homo sapien
tgatgtagcaggattgtttggttca

SEQ ID NO: 3400787 - DNA, 25 bp, Homo sapien
tggtgtttcccgcaaaagtctcaga

SEQ ID NO: 3400788 - DNA, 25 bp, Homo sapien
tcccgcaaaagtctcagaagagcca

SEQ ID NO: 3400789 - DNA, 25 bp, Homo sapien
tgtttatatctctgacccactattg

SEQ ID NO: 3400790 - DNA, 25 bp, Homo sapien
tctgacccactattggtgtttcccg

SEQ ID NO: 3400791 - DNA, 25 bp, Homo sapien
tgaaaatggcaaaaaatctccttga

SEQ ID NO: 3400792 - DNA, 25 bp, Homo sapien
gcaaaaaatctccttgaaatgttca

SEQ ID NO: 3400793 - DNA, 25 bp, Homo sapien
aatggcaaaaaatctccttgaaatg

SEQ ID NO: 3400794 - DNA, 25 bp, Homo sapien
caaaaaatctccttgaaatgttcat

SEQ ID NO: 3400795 - DNA, 25 bp, Homo sapien
atcatcatcagtgtatctttggtct

SEQ ID NO: 3400796 - DNA, 25 bp, Homo sapien
tgccacacagtaagatgtacactgt

SEQ ID NO: 3400797 - DNA, 25 bp, Homo sapien
ctgggatgctgccactagaaaccga

SEQ ID NO: 3400798 - DNA, 25 bp, Homo sapien
tccacgagactagtgattggtgcct

SEQ ID NO: 3400799 - DNA, 25 bp, Homo sapien
ccaggaacggtgtacccagagcttt

SEQ ID NO: 3400800 - DNA, 25 bp, Homo sapien
ttctggatcatttgcctctaactgg

SEQ ID NO: 3400801 - DNA, 25 bp, Homo sapien
gtacgtctgacattgattctggatc

SEQ ID NO: 3400802 - DNA, 25 bp, Homo sapien
tgattctggatcatttgcctctaac

SEQ ID NO: 3400803 - DNA, 25 bp, Homo sapien
tctttcttcttgtacgtctgacatt

SEQ ID NO: 3400804 - DNA, 25 bp, Homo sapien
cacgtgcccaagtagactcgtcttc

SEQ ID NO: 3400805 - DNA, 25 bp, Homo sapien
ctttagcacgtgcccaagtagactc

SEQ ID NO: 3400806 - DNA, 25 bp, Homo sapien
tagcacgtgcccaagtagactcgtc

SEQ ID NO: 3400807 - DNA, 25 bp, Homo sapien
gtgcccaagtagactcgtcttcctc

SEQ ID NO: 3400808 - DNA, 25 bp, Homo sapien
aggagtaacgtcagggcataccgga

SEQ ID NO: 3400809 - DNA, 25 bp, Homo sapien
ggtgaagtagattttagcataggtc

SEQ ID NO: 3400810 - DNA, 25 bp, Homo sapien
aggataaggagtaacgtcagggcat

SEQ ID NO: 3400811 - DNA, 25 bp, Homo sapien
aatggtgaagtagattttagcatag

SEQ ID NO: 3400812 - DNA, 25 bp, Homo sapien
ctttgacaaagttatataataattt

SEQ ID NO: 3400813 - DNA, 25 bp, Homo sapien
taagacatacaggatttaacctata

SEQ ID NO: 3400814 - DNA, 25 bp, Homo sapien
tgacaaagttatataataattttac

SEQ ID NO: 3400815 - DNA, 25 bp, Homo sapien
gacatacaggatttaacctataaat

SEQ ID NO: 3400816 - DNA, 25 bp, Homo sapien
aggagaataattatgagagcatggc

SEQ ID NO: 3400817 - DNA, 25 bp, Homo sapien
ggagaataattatgagagcatggcc

SEQ ID NO: 3400818 - DNA, 25 bp, Homo sapien
cattcagcatattctcggtatgctg

SEQ ID NO: 3400819 - DNA, 25 bp, Homo sapien
agcatattctcggtatgctgctttc

SEQ ID NO: 3400820 - DNA, 25 bp, Homo sapien
tcagcatattctcggtatgctgctt

SEQ ID NO: 3400821 - DNA, 25 bp, Homo sapien
catattctcggtatgctgctttcat

SEQ ID NO: 3400822 - DNA, 25 bp, Homo sapien
atggagtaacagtttgaggaagtgt

SEQ ID NO: 3400823 - DNA, 25 bp, Homo sapien
tggagtaacagtttgaggaagtgtc

SEQ ID NO: 3400824 - DNA, 25 bp, Homo sapien
catggagtaacagtttgaggaagtg

SEQ ID NO: 3400825 - DNA, 25 bp, Homo sapien
tcatggagtaacagtttgaggaagt

SEQ ID NO: 3400826 - DNA, 25 bp, Homo sapien
caactgtttcatgacctactgtggg

SEQ ID NO: 3400827 - DNA, 25 bp, Homo sapien
acagattggcatatctcccttcagg

SEQ ID NO: 3400828 - DNA, 25 bp, Homo sapien
agtgtgcacagggatacagattggc

SEQ ID NO: 3400829 - DNA, 25 bp, Homo sapien
tgtgcagaactactctcagagggca

SEQ ID NO: 3400830 - DNA, 25 bp, Homo sapien
tctctcctagtcaagaggcacaggg

SEQ ID NO: 3400831 - DNA, 25 bp, Homo sapien
tgtcccttagcagacctagtgcact

SEQ ID NO: 3400832 - DNA, 25 bp, Homo sapien
aatggcctgcccaagtaaggaggaa

SEQ ID NO: 3400833 - DNA, 25 bp, Homo sapien
gtccgctgaagctgcaaccacagct

SEQ ID NO: 3400834 - DNA, 25 bp, Homo sapien
gagcagtgtaggttttatgggcatt

SEQ ID NO: 3400835 - DNA, 25 bp, Homo sapien
tagtcatccgtatttatgttcctgc

SEQ ID NO: 3400836 - DNA, 25 bp, Homo sapien
tgttcctgctaccttgtggcaccat

SEQ ID NO: 3400837 - DNA, 25 bp, Homo sapien
tttaaccagcccagtaaatagtcat

SEQ ID NO: 3400838 - DNA, 25 bp, Homo sapien
gctttcaaatccaagtacaatatta

SEQ ID NO: 3400839 - DNA, 25 bp, Homo sapien
tactggacttattatcctggaagag

SEQ ID NO: 3400840 - DNA, 25 bp, Homo sapien
agtagcaatgccagatagggcctga

SEQ ID NO: 3400841 - DNA, 25 bp, Homo sapien
tatttttactggacttattatcctg

SEQ ID NO: 3400842 - DNA, 25 bp, Homo sapien
caatgacgattatgcaaaagagaaa

SEQ ID NO: 3400843 - DNA, 25 bp, Homo sapien
ttggttgcagctccaatgccgatca

SEQ ID NO: 3400844 - DNA, 25 bp, Homo sapien
cagaagtgcaggcaatgacgattat

SEQ ID NO: 3400845 - DNA, 25 bp, Homo sapien
tgatgatcaagagtgaattggttgc

SEQ ID NO: 3400846 - DNA, 25 bp, Homo sapien
gaaaacccatttgattaaattgcca

SEQ ID NO: 3400847 - DNA, 25 bp, Homo sapien
tattgcaaatgtcctagataaatct

SEQ ID NO: 3400848 - DNA, 25 bp, Homo sapien
ttaacttgccccagaataggcccat

SEQ ID NO: 3400849 - DNA, 25 bp, Homo sapien
ttccttatcacatctcattgggttg

SEQ ID NO: 3400850 - DNA, 25 bp, Homo sapien
atcttcagctcctagaacacccttc

SEQ ID NO: 3400851 - DNA, 25 bp, Homo sapien
agctcctagaacacccttctttact

SEQ ID NO: 3400852 - DNA, 25 bp, Homo sapien
ttcagctcctagaacacccttcttt

SEQ ID NO: 3400853 - DNA, 25 bp, Homo sapien
tcagctcctagaacacccttcttta

SEQ ID NO: 3400854 - DNA, 25 bp, Homo sapien
agatctgagggtggttcgggttttg

SEQ ID NO: 3400855 - DNA, 25 bp, Homo sapien
cttggaggtcgctttcttgaaagac

SEQ ID NO: 3400856 - DNA, 25 bp, Homo sapien
cacttcttggaggtcgctttcttga

SEQ ID NO: 3400857 - DNA, 25 bp, Homo sapien
tcatgggtgtagaaagagatctgag

SEQ ID NO: 3400858 - DNA, 25 bp, Homo sapien
catctctaagggatatggaaaacca

SEQ ID NO: 3400859 - DNA, 25 bp, Homo sapien
ggcagttttcaaggcagttataaaa

SEQ ID NO: 3400860 - DNA, 25 bp, Homo sapien
tctccatctctaagggatatggaaa

SEQ ID NO: 3400861 - DNA, 25 bp, Homo sapien
atttctccatctctaagggatatgg

SEQ ID NO: 3400862 - DNA, 25 bp, Homo sapien
acaaatgacactttatttccgctgc

SEQ ID NO: 3400863 - DNA, 25 bp, Homo sapien
tgacactttatttccgctgcttttg

SEQ ID NO: 3400864 - DNA, 25 bp, Homo sapien
tcaaacaacagccaaagccctcatt

SEQ ID NO: 3400865 - DNA, 25 bp, Homo sapien
ttatttccgctgcttttgtactggc

SEQ ID NO: 3400866 - DNA, 25 bp, Homo sapien
aggttgagaggttggtcccatgctc

SEQ ID NO: 3400867 - DNA, 25 bp, Homo sapien
tgaagaggttgagaggttggtccca

SEQ ID NO: 3400868 - DNA, 25 bp, Homo sapien
ggttgagaggttggtcccatgctca

SEQ ID NO: 3400869 - DNA, 25 bp, Homo sapien
cttctgaagaggttgagaggttggt

SEQ ID NO: 3400870 - DNA, 25 bp, Homo sapien
tatgtcatgagcagatggtattgca

SEQ ID NO: 3400871 - DNA, 25 bp, Homo sapien
ccagggatgtatgtcatgagcagat

SEQ ID NO: 3400872 - DNA, 25 bp, Homo sapien
gccgaatgagccattgattgattca

SEQ ID NO: 3400873 - DNA, 25 bp, Homo sapien
cagatggtattgcattgccgaatga

SEQ ID NO: 3400874 - DNA, 25 bp, Homo sapien
gcaccggctcctttacaactcttaa

SEQ ID NO: 3400875 - DNA, 25 bp, Homo sapien
tggcagtttgtagcaccggctcctt

SEQ ID NO: 3400876 - DNA, 25 bp, Homo sapien
ccgtagcagatcatatccttttggc

SEQ ID NO: 3400877 - DNA, 25 bp, Homo sapien
ctcccgtagcagatcatatcctttt

SEQ ID NO: 3400878 - DNA, 25 bp, Homo sapien
agctgaacagtcctggactgtatgt

SEQ ID NO: 3400879 - DNA, 25 bp, Homo sapien
ttggttgtcccattagaatacttgg

SEQ ID NO: 3400880 - DNA, 25 bp, Homo sapien
tcttggttgtcccattagaatactt

SEQ ID NO: 3400881 - DNA, 25 bp, Homo sapien
ggactgtatgtccttgttgttacct

SEQ ID NO: 3400882 - DNA, 25 bp, Homo sapien
tttgatcctacgtatccttgtagca

SEQ ID NO: 3400883 - DNA, 25 bp, Homo sapien
taagaacagacatatggagcttttc

SEQ ID NO: 3400884 - DNA, 25 bp, Homo sapien
tctttgcttgcaggtctgtttttga

SEQ ID NO: 3400885 - DNA, 25 bp, Homo sapien
caaagaggatcttgttaagaacaga

SEQ ID NO: 3400886 - DNA, 25 bp, Homo sapien
actgggatttagttataaaaatgag

SEQ ID NO: 3400887 - DNA, 25 bp, Homo sapien
atgagtttggcttcaacttcaggtc

SEQ ID NO: 3400888 - DNA, 25 bp, Homo sapien
ctgggatttagttataaaaatgagt

SEQ ID NO: 3400889 - DNA, 25 bp, Homo sapien
aaaatgagtttggcttcaacttcag

SEQ ID NO: 3400890 - DNA, 25 bp, Homo sapien
tgtctcttcctgactaccttgagta

SEQ ID NO: 3400891 - DNA, 25 bp, Homo sapien
aatgaaaactgctgtaacttctgtc

SEQ ID NO: 3400892 - DNA, 25 bp, Homo sapien
gagtataagagtgggtccttcatta

SEQ ID NO: 3400893 - DNA, 25 bp, Homo sapien
agttcatgctcaccctttgccaaaa

SEQ ID NO: 3400894 - DNA, 25 bp, Homo sapien
aatagtttcttgcccaaagatcctc

SEQ ID NO: 3400895 - DNA, 25 bp, Homo sapien
agtaaatccactggctttgaaggag

SEQ ID NO: 3400896 - DNA, 25 bp, Homo sapien
caaatgtgttctccctcatttcatt

SEQ ID NO: 3400897 - DNA, 25 bp, Homo sapien
taagtgatgtaacttttacaaatgt

SEQ ID NO: 3400898 - DNA, 25 bp, Homo sapien
ctgtgagattaatggataggtaagg

SEQ ID NO: 3400899 - DNA, 25 bp, Homo sapien
gatgctgttgggaaggtagttcaac

SEQ ID NO: 3400900 - DNA, 25 bp, Homo sapien
tctgtttggcagcaccttgtagatg

SEQ ID NO: 3400901 - DNA, 25 bp, Homo sapien
tttgatctctgtttggcagcacctt

SEQ ID NO: 3400902 - DNA, 25 bp, Homo sapien
caaattagcaagtccaattttggct

SEQ ID NO: 3400903 - DNA, 25 bp, Homo sapien
caatatgccacggagtcttttgggt

SEQ ID NO: 3400904 - DNA, 25 bp, Homo sapien
ctttgatgtaagtgaccatctggtg

SEQ ID NO: 3400905 - DNA, 25 bp, Homo sapien
gagtctcaacaaattagcaagtcca

SEQ ID NO: 3400906 - DNA, 25 bp, Homo sapien
caatccttattatacactccagcac

SEQ ID NO: 3400907 - DNA, 25 bp, Homo sapien
tacaatccttattatacactccagc

SEQ ID NO: 3400908 - DNA, 25 bp, Homo sapien
tcttacaatccttattatacactcc

SEQ ID NO: 3400909 - DNA, 25 bp, Homo sapien
aatccttattatacactccagcaca

SEQ ID NO: 3400910 - DNA, 25 bp, Homo sapien
gcactgtttccatgagtggtagttc

SEQ ID NO: 3400911 - DNA, 25 bp, Homo sapien
tctgtagcactgtttccatgagtgg

SEQ ID NO: 3400912 - DNA, 25 bp, Homo sapien
gtagcactgtttccatgagtggtag

SEQ ID NO: 3400913 - DNA, 25 bp, Homo sapien
ctgtttccatgagtggtagttctac

SEQ ID NO: 3400914 - DNA, 25 bp, Homo sapien
accagcaaaccatcgcatacacata

SEQ ID NO: 3400915 - DNA, 25 bp, Homo sapien
catcgcatacacataaacgtattta

SEQ ID NO: 3400916 - DNA, 25 bp, Homo sapien
caaaccatcgcatacacataaacgt

SEQ ID NO: 3400917 - DNA, 25 bp, Homo sapien
accatccaccagcaaaccatcgcat

SEQ ID NO: 3400918 - DNA, 25 bp, Homo sapien
caggatcttatatatcttcatggct

SEQ ID NO: 3400919 - DNA, 25 bp, Homo sapien
gcaggcaatgctcttgtacaggatc

SEQ ID NO: 3400920 - DNA, 25 bp, Homo sapien
agattccctctagtaagctgttgac

SEQ ID NO: 3400921 - DNA, 25 bp, Homo sapien
ggctttcttgttgacacctttgtat

SEQ ID NO: 3400922 - DNA, 25 bp, Homo sapien
acaatttctattaagccctggaggc

SEQ ID NO: 3400923 - DNA, 25 bp, Homo sapien
agggccaaatggtgcagcgtcagtc

SEQ ID NO: 3400924 - DNA, 25 bp, Homo sapien
ggttttcagccctgtaattctgtct

SEQ ID NO: 3400925 - DNA, 25 bp, Homo sapien
gtcagtccctgtatgggaaaggttg

SEQ ID NO: 3400926 - DNA, 25 bp, Homo sapien
ttttcacagccccaacaatatccaa

SEQ ID NO: 3400927 - DNA, 25 bp, Homo sapien
ttccagtttctaagccctccagctg

SEQ ID NO: 3400928 - DNA, 25 bp, Homo sapien
cgtgtgaccatgcagaacaggcttt

SEQ ID NO: 3400929 - DNA, 25 bp, Homo sapien
cactagagactgtaagaaaaagctt

SEQ ID NO: 3400930 - DNA, 25 bp, Homo sapien
ctgctgccatatctgctggcacgtg

SEQ ID NO: 3400931 - DNA, 25 bp, Homo sapien
ccactgctgccatatctgctggcac

SEQ ID NO: 3400932 - DNA, 25 bp, Homo sapien
cactgctgccatatctgctggcacg

SEQ ID NO: 3400933 - DNA, 25 bp, Homo sapien
gctgccatatctgctggcacgtgaa

SEQ ID NO: 3400934 - DNA, 25 bp, Homo sapien
aatgagttcgtgaatattggccttc

SEQ ID NO: 3400935 - DNA, 25 bp, Homo sapien
gacagttccgtacaatatattaaga

SEQ ID NO: 3400936 - DNA, 25 bp, Homo sapien
attgtttgatgtatggagggctgcc

SEQ ID NO: 3400937 - DNA, 25 bp, Homo sapien
catttcagctacaatgacagttccg

SEQ ID NO: 3400938 - DNA, 25 bp, Homo sapien
cactagccctcatgatctcttgctc

SEQ ID NO: 3400939 - DNA, 25 bp, Homo sapien
cctgaatcacactagccctcatgat

SEQ ID NO: 3400940 - DNA, 25 bp, Homo sapien
tgctgtaggtccctgaatcacacta

SEQ ID NO: 3400941 - DNA, 25 bp, Homo sapien
tctttttgtcgtttgctgtaggtcc

SEQ ID NO: 3400942 - DNA, 25 bp, Homo sapien
tacactcttgcagggagaacactct

SEQ ID NO: 3400943 - DNA, 25 bp, Homo sapien
atatcatattctggcaccatatggg

SEQ ID NO: 3400944 - DNA, 25 bp, Homo sapien
tgagtggctagattctcagtgtgct

SEQ ID NO: 3400945 - DNA, 25 bp, Homo sapien
tgggtgatgatagagaaaaacagcc

SEQ ID NO: 3400946 - DNA, 25 bp, Homo sapien
tttattggcattgccacacctttct

SEQ ID NO: 3400947 - DNA, 25 bp, Homo sapien
ttattggcattgccacacctttctg

SEQ ID NO: 3400948 - DNA, 25 bp, Homo sapien
atttgctggtagtttggagctttat

SEQ ID NO: 3400949 - DNA, 25 bp, Homo sapien
ttttcagcttctccgggcattggtc

SEQ ID NO: 3400950 - DNA, 25 bp, Homo sapien
tactccttcagcatatcgcccttta

SEQ ID NO: 3400951 - DNA, 25 bp, Homo sapien
gatgggaggcaatgcccccaatcag

SEQ ID NO: 3400952 - DNA, 25 bp, Homo sapien
cccatgaaggtactaaacaaaattg

SEQ ID NO: 3400953 - DNA, 25 bp, Homo sapien
gagatatagtgatatagctctggga

SEQ ID NO: 3400954 - DNA, 25 bp, Homo sapien
agtgatatagctctgggatactgtc

SEQ ID NO: 3400955 - DNA, 25 bp, Homo sapien
gaggcaggaagagatatagtgatat

SEQ ID NO: 3400956 - DNA, 25 bp, Homo sapien
tcctaccaggatggtacatgggaga

SEQ ID NO: 3400957 - DNA, 25 bp, Homo sapien
tttagcttactttcctgccaaggga

SEQ ID NO: 3400958 - DNA, 25 bp, Homo sapien
ggttcctgtagaccccgagagagat

SEQ ID NO: 3400959 - DNA, 25 bp, Homo sapien
tagcatgcattgcaggtctctggaa

SEQ ID NO: 3400960 - DNA, 25 bp, Homo sapien
aagatctggtttactgggctgttgc

SEQ ID NO: 3400961 - DNA, 25 bp, Homo sapien
gacgttgttcgtgaagtctgctggt

SEQ ID NO: 3400962 - DNA, 25 bp, Homo sapien
agtctgctggtcacaaaaatcaagg

SEQ ID NO: 3400963 - DNA, 25 bp, Homo sapien
acgttgttcgtgaagtctgctggtc

SEQ ID NO: 3400964 - DNA, 25 bp, Homo sapien
tgacgttgttcgtgaagtctgctgg

SEQ ID NO: 3400965 - DNA, 25 bp, Homo sapien
tgtaggtgtggtaatgtacagtcct

SEQ ID NO: 3400966 - DNA, 25 bp, Homo sapien
aggtgtggtaatgtacagtcctcac

SEQ ID NO: 3400967 - DNA, 25 bp, Homo sapien
taggtgtggtaatgtacagtcctca

SEQ ID NO: 3400968 - DNA, 25 bp, Homo sapien
gtaggtgtggtaatgtacagtcctc

SEQ ID NO: 3400969 - DNA, 25 bp, Homo sapien
tataaattgagccaaaagcaaaggt

SEQ ID NO: 3400970 - DNA, 25 bp, Homo sapien
tccaatgcatagcttctcataggct

SEQ ID NO: 3400971 - DNA, 25 bp, Homo sapien
cttgtgcaagtacatgggtatgtgt

SEQ ID NO: 3400972 - DNA, 25 bp, Homo sapien
gataatagctgttcttgaggatctc

SEQ ID NO: 3400973 - DNA, 25 bp, Homo sapien
taatttcattctctacagcagcagc

SEQ ID NO: 3400974 - DNA, 25 bp, Homo sapien
tcccacaccagtggttttctgaggc

SEQ ID NO: 3400975 - DNA, 25 bp, Homo sapien
cttcccacaccagtggttttctgag

SEQ ID NO: 3400976 - DNA, 25 bp, Homo sapien
gctcataatttcattctctacagca

SEQ ID NO: 3400977 - DNA, 25 bp, Homo sapien
tttgtgagtaagcagttgtccacca

SEQ ID NO: 3400978 - DNA, 25 bp, Homo sapien
tgtccaccagaatctgccgaggacc

SEQ ID NO: 3400979 - DNA, 25 bp, Homo sapien
gagtaagcagttgtccaccagaatc

SEQ ID NO: 3400980 - DNA, 25 bp, Homo sapien
cagttgtccaccagaatctgccgag

SEQ ID NO: 3400981 - DNA, 25 bp, Homo sapien
ccggagccactaccggctgatggag

SEQ ID NO: 3400982 - DNA, 25 bp, Homo sapien
ggcgagggaccgcatcctgcgtctc

SEQ ID NO: 3400983 - DNA, 25 bp, Homo sapien
cgaccgcggagttctgcaacacctg

SEQ ID NO: 3400984 - DNA, 25 bp, Homo sapien
ttctgcaacacctggaggatctgga

SEQ ID NO: 3400985 - DNA, 25 bp, Homo sapien
ccatttgaaataaaagccccagtct

SEQ ID NO: 3400986 - DNA, 25 bp, Homo sapien
ataaaagccccagtctcaacttcca

SEQ ID NO: 3400987 - DNA, 25 bp, Homo sapien
aagccccagtctcaacttccatcac

SEQ ID NO: 3400988 - DNA, 25 bp, Homo sapien
taaaagccccagtctcaacttccat

SEQ ID NO: 3400989 - DNA, 25 bp, Homo sapien
agacatcgggaaggtctgcgccaac

SEQ ID NO: 3400990 - DNA, 25 bp, Homo sapien
caacgggaaccaacttgtggctcca

SEQ ID NO: 3400991 - DNA, 25 bp, Homo sapien
gtttctgccgcgcagggagccgtga

SEQ ID NO: 3400992 - DNA, 25 bp, Homo sapien
tcgcagaggactagcagacatcggg

SEQ ID NO: 3400993 - DNA, 25 bp, Homo sapien
ctggttttccgttgttcttctctga

SEQ ID NO: 3400994 - DNA, 25 bp, Homo sapien
tgcctttgtttagatcctcgtaacc

SEQ ID NO: 3400995 - DNA, 25 bp, Homo sapien
cttctgcctttgtttagatcctcgt

SEQ ID NO: 3400996 - DNA, 25 bp, Homo sapien
tgtttagatcctcgtaacctccaag

SEQ ID NO: 3400997 - DNA, 25 bp, Homo sapien
gattattcatgaagtaagaataggg

SEQ ID NO: 3400998 - DNA, 25 bp, Homo sapien
cctcttcaaaatatgatcttcatga

SEQ ID NO: 3400999 - DNA, 25 bp, Homo sapien
tgattattcatgaagtaagaatagg

SEQ ID NO: 3401000 - DNA, 25 bp, Homo sapien
aatatgatcttcatgattattcatg

SEQ ID NO: 3401001 - DNA, 25 bp, Homo sapien
tattgaagcatggttgtacttttga

SEQ ID NO: 3401002 - DNA, 25 bp, Homo sapien
ttgaagcatggttgtacttttgaaa

SEQ ID NO: 3401003 - DNA, 25 bp, Homo sapien
attgaagcatggttgtacttttgaa

SEQ ID NO: 3401004 - DNA, 25 bp, Homo sapien
gataactgactaccctaggactagt

SEQ ID NO: 3401005 - DNA, 25 bp, Homo sapien
agataactgactaccctaggactag

SEQ ID NO: 3401006 - DNA, 25 bp, Homo sapien
gtcttgccacttttggagccctcca

SEQ ID NO: 3401007 - DNA, 25 bp, Homo sapien
gatccccacggagtttttgttctga

SEQ ID NO: 3401008 - DNA, 25 bp, Homo sapien
tgtccaggcctttctacttgctgag

SEQ ID NO: 3401009 - DNA, 25 bp, Homo sapien
gcctcattggcaaggttagcagtta

SEQ ID NO: 3401010 - DNA, 25 bp, Homo sapien
gagttcttaggattgtgttgaaaat

SEQ ID NO: 3401011 - DNA, 25 bp, Homo sapien
attgagttcttaggattgtgttgaa

SEQ ID NO: 3401012 - DNA, 25 bp, Homo sapien
ttgagttcttaggattgtgttgaaa

SEQ ID NO: 3401013 - DNA, 25 bp, Homo sapien
tgagttcttaggattgtgttgaaaa

SEQ ID NO: 3401014 - DNA, 25 bp, Homo sapien
ccctgactgggtccattaatataaa

SEQ ID NO: 3401015 - DNA, 25 bp, Homo sapien
gttgcaacatatggtggtggtgtcc

SEQ ID NO: 3401016 - DNA, 25 bp, Homo sapien
cagccacagtgtgaggagcatatgc

SEQ ID NO: 3401017 - DNA, 25 bp, Homo sapien
tatctggcaggcaaggtggtaaaga

SEQ ID NO: 3401018 - DNA, 25 bp, Homo sapien
ttgatcaagtgtttggcgctataac

SEQ ID NO: 3401019 - DNA, 25 bp, Homo sapien
ctgtctatttgtgaagcaggtaaaa

SEQ ID NO: 3401020 - DNA, 25 bp, Homo sapien
ggtaatgtctgcctcggcactgact

SEQ ID NO: 3401021 - DNA, 25 bp, Homo sapien
taaatggttgggcacagggtaatgt

SEQ ID NO: 3401022 - DNA, 25 bp, Homo sapien
gaaggctcatttcaggcatacattc

SEQ ID NO: 3401023 - DNA, 25 bp, Homo sapien
cagctcagctggtgtgttacgtttc

SEQ ID NO: 3401024 - DNA, 25 bp, Homo sapien
tctctcttgggtgcacacaccaggc

SEQ ID NO: 3401025 - DNA, 25 bp, Homo sapien
ctgacagtgctgttcttcaccatgc

SEQ ID NO: 3401026 - DNA, 25 bp, Homo sapien
tcaagtgtggacaactggttgaagc

SEQ ID NO: 3401027 - DNA, 25 bp, Homo sapien
agtgtggacaactggttgaagccag

SEQ ID NO: 3401028 - DNA, 25 bp, Homo sapien
ttttcaagtgtggacaactggttga

SEQ ID NO: 3401029 - DNA, 25 bp, Homo sapien
tgtggacaactggttgaagccagtt

SEQ ID NO: 3401030 - DNA, 25 bp, Homo sapien
agactcccaaatagagctttgtgag

SEQ ID NO: 3401031 - DNA, 25 bp, Homo sapien
gctttgtgagtcatcacccttgttc

SEQ ID NO: 3401032 - DNA, 25 bp, Homo sapien
ttgttcttctttcgtgagggctctg

SEQ ID NO: 3401033 - DNA, 25 bp, Homo sapien
tgtctctaatgtatctgctccggtt

SEQ ID NO: 3401034 - DNA, 25 bp, Homo sapien
tttggctttccttcaaatcaatcct

SEQ ID NO: 3401035 - DNA, 25 bp, Homo sapien
ctctggattcttggattctgtccac

SEQ ID NO: 3401036 - DNA, 25 bp, Homo sapien
gttcatattctgttcatctgagtct

SEQ ID NO: 3401037 - DNA, 25 bp, Homo sapien
ggattcttggattctgtccacttgg

SEQ ID NO: 3401038 - DNA, 25 bp, Homo sapien
tggattctgtccacttggaggacag

SEQ ID NO: 3401039 - DNA, 25 bp, Homo sapien
ttccagagtaatgttgccaaacagg

SEQ ID NO: 3401040 - DNA, 25 bp, Homo sapien
aagtcatcgattgaacctctttttg

SEQ ID NO: 3401041 - DNA, 25 bp, Homo sapien
cagagtaatgttgccaaacaggaca

SEQ ID NO: 3401042 - DNA, 25 bp, Homo sapien
aggacactggaaaagtcatcgattg

SEQ ID NO: 3401043 - DNA, 25 bp, Homo sapien
tgtgtctctgaattgtggtcctcct

SEQ ID NO: 3401044 - DNA, 25 bp, Homo sapien
atgacactagatatccctgtgtctc

SEQ ID NO: 3401045 - DNA, 25 bp, Homo sapien
gaaactgtgtgtcgtcagtaatatt

SEQ ID NO: 3401046 - DNA, 25 bp, Homo sapien
aactgtgtgtcgtcagtaatattta

SEQ ID NO: 3401047 - DNA, 25 bp, Homo sapien
actgtgtgtcgtcagtaatatttaa

SEQ ID NO: 3401048 - DNA, 25 bp, Homo sapien
aagaaactgtgtgtcgtcagtaata

SEQ ID NO: 3401049 - DNA, 25 bp, Homo sapien
tcatgacccttgaattcatgtcttc

SEQ ID NO: 3401050 - DNA, 25 bp, Homo sapien
taatctcctctaccaatgtgtgatc

SEQ ID NO: 3401051 - DNA, 25 bp, Homo sapien
cactgaacttggtgttgctattatc

SEQ ID NO: 3401052 - DNA, 25 bp, Homo sapien
cattaatatcatcagtatcatgacc

SEQ ID NO: 3401053 - DNA, 25 bp, Homo sapien
cattgtgtagtatgagccgtcctcc

SEQ ID NO: 3401054 - DNA, 25 bp, Homo sapien
ggcaacttgtccactaaaggagtcc

SEQ ID NO: 3401055 - DNA, 25 bp, Homo sapien
taatgatatcttgctttggtccctg

SEQ ID NO: 3401056 - DNA, 25 bp, Homo sapien
gggaccactccctctaatctggaag

SEQ ID NO: 3401057 - DNA, 25 bp, Homo sapien
cacagcgttgtactgagttatggtt

SEQ ID NO: 3401058 - DNA, 25 bp, Homo sapien
cgttgtactgagttatggttttcac

SEQ ID NO: 3401059 - DNA, 25 bp, Homo sapien
gagttatggttttcactggagcttc

SEQ ID NO: 3401060 - DNA, 25 bp, Homo sapien
tcactggagcttctatagttgaaca

SEQ ID NO: 3401061 - DNA, 25 bp, Homo sapien
ctaacacagtaggttggagggttat

SEQ ID NO: 3401062 - DNA, 25 bp, Homo sapien
gccagtttatttcttctccgatgac

SEQ ID NO: 3401063 - DNA, 25 bp, Homo sapien
aaattgtttttccatcccatgatta

SEQ ID NO: 3401064 - DNA, 25 bp, Homo sapien
caaaagccagaataactggcaactg

SEQ ID NO: 3401065 - DNA, 25 bp, Homo sapien
gtgaatcaggttggcccattttctg

SEQ ID NO: 3401066 - DNA, 25 bp, Homo sapien
tttgacagagcttggtttttgtgaa

SEQ ID NO: 3401067 - DNA, 25 bp, Homo sapien
ggtttttgtgaatcaggttggccca

SEQ ID NO: 3401068 - DNA, 25 bp, Homo sapien
gacagagcttggtttttgtgaatca

SEQ ID NO: 3401069 - DNA, 25 bp, Homo sapien
tttctcaaagatagttttggctttg

SEQ ID NO: 3401070 - DNA, 25 bp, Homo sapien
agtatcttcattgctcagaccctcc

SEQ ID NO: 3401071 - DNA, 25 bp, Homo sapien
gtgttggaaactggccgctgagata

SEQ ID NO: 3401072 - DNA, 25 bp, Homo sapien
tgtgttggaaactggccgctgagat

SEQ ID NO: 3401073 - DNA, 25 bp, Homo sapien
ggaaactggccgctgagatagatgt

SEQ ID NO: 3401074 - DNA, 25 bp, Homo sapien
aactggccgctgagatagatgtcca

SEQ ID NO: 3401075 - DNA, 25 bp, Homo sapien
gctgagtgacttagacttctgacat

SEQ ID NO: 3401076 - DNA, 25 bp, Homo sapien
atactccttaggctgagtgacttag

SEQ ID NO: 3401077 - DNA, 25 bp, Homo sapien
ccataaaccatactccttaggctga

SEQ ID NO: 3401078 - DNA, 25 bp, Homo sapien
gacttctgacatgcagttgtcttca

SEQ ID NO: 3401079 - DNA, 25 bp, Homo sapien
atgactgtgcctcagaccggcattc

SEQ ID NO: 3401080 - DNA, 25 bp, Homo sapien
gccagtgcaatgttgtcaactgaag

SEQ ID NO: 3401081 - DNA, 25 bp, Homo sapien
cctcagaccggcattctcagggtgc

SEQ ID NO: 3401082 - DNA, 25 bp, Homo sapien
gtgcaatgttgtcaactgaagatct

SEQ ID NO: 3401083 - DNA, 25 bp, Homo sapien
ttttcttatccggtgacaaatatgc

SEQ ID NO: 3401084 - DNA, 25 bp, Homo sapien
gacaaatatgctgaaaaatcacggg

SEQ ID NO: 3401085 - DNA, 25 bp, Homo sapien
tatgctgaaaaatcacgggaattca

SEQ ID NO: 3401086 - DNA, 25 bp, Homo sapien
aaatcacgggaattcattatgcttg

SEQ ID NO: 3401087 - DNA, 25 bp, Homo sapien
tttttaacccaccaccttcgcatca

SEQ ID NO: 3401088 - DNA, 25 bp, Homo sapien
gatatccagtggtccccagcaagag

SEQ ID NO: 3401089 - DNA, 25 bp, Homo sapien
accttcgcatcaagcctttgctgct

SEQ ID NO: 3401090 - DNA, 25 bp, Homo sapien
gcaagagggcagcattgccataatt

SEQ ID NO: 3401091 - DNA, 25 bp, Homo sapien
tctgtcttgccatcagatgtcagca

SEQ ID NO: 3401092 - DNA, 25 bp, Homo sapien
ctctgtcttgccatcagatgtcagc

SEQ ID NO: 3401093 - DNA, 25 bp, Homo sapien
tgtcttgccatcagatgtcagcaat

SEQ ID NO: 3401094 - DNA, 25 bp, Homo sapien
caaaaactggccttttatcatacat

SEQ ID NO: 3401095 - DNA, 25 bp, Homo sapien
gaagatgttcactagtctaatgctt

SEQ ID NO: 3401096 - DNA, 25 bp, Homo sapien
gatacagcagctgaccaaaaactgg

SEQ ID NO: 3401097 - DNA, 25 bp, Homo sapien
tatcatacattgaaaaggtgtgctt

SEQ ID NO: 3401098 - DNA, 25 bp, Homo sapien
taggcactgcatcaggacgggtagt

SEQ ID NO: 3401099 - DNA, 25 bp, Homo sapien
cccctaaaagtgagagcagccatac

SEQ ID NO: 3401100 - DNA, 25 bp, Homo sapien
gacgggtagtaactgtttccactga

SEQ ID NO: 3401101 - DNA, 25 bp, Homo sapien
taccagagcctgaagcagctcagaa

SEQ ID NO: 3401102 - DNA, 25 bp, Homo sapien
tgtgaactggggtggctttcatttt

SEQ ID NO: 3401103 - DNA, 25 bp, Homo sapien
tcatttagatctcggcaacacggca

SEQ ID NO: 3401104 - DNA, 25 bp, Homo sapien
taattctgcagaaaccgagaatggg

SEQ ID NO: 3401105 - DNA, 25 bp, Homo sapien
ggtgatggaatcgtctggaccttca

SEQ ID NO: 3401106 - DNA, 25 bp, Homo sapien
ccgagaatgggcagtctcctttaag

SEQ ID NO: 3401107 - DNA, 25 bp, Homo sapien
tttggcagcgacagtctttggcttc

SEQ ID NO: 3401108 - DNA, 25 bp, Homo sapien
aactctgcacatggtactcctttgg

SEQ ID NO: 3401109 - DNA, 25 bp, Homo sapien
catggtactcctttggcagcgacag

SEQ ID NO: 3401110 - DNA, 25 bp, Homo sapien
tgtctggtaactctgcacatggtac

SEQ ID NO: 3401111 - DNA, 25 bp, Homo sapien
tataaggatctaatgaactccagag

SEQ ID NO: 3401112 - DNA, 25 bp, Homo sapien
ttcaattctgataataatgcccagc

SEQ ID NO: 3401113 - DNA, 25 bp, Homo sapien
cagcagagactttatctgagaagct

SEQ ID NO: 3401114 - DNA, 25 bp, Homo sapien
gaagctatgctaagtcagagaaaaa

SEQ ID NO: 3401115 - DNA, 25 bp, Homo sapien
gcataggttcttacaccttcctgta

SEQ ID NO: 3401116 - DNA, 25 bp, Homo sapien
tctcaggtagtgaaggtatgatggc

SEQ ID NO: 3401117 - DNA, 25 bp, Homo sapien
gtatgatggcataggttcttacacc

SEQ ID NO: 3401118 - DNA, 25 bp, Homo sapien
gggaatgagatggaatcctttctca

SEQ ID NO: 3401119 - DNA, 25 bp, Homo sapien
tgatgatgtttactattttcaagtc

SEQ ID NO: 3401120 - DNA, 25 bp, Homo sapien
gatgatgtttactattttcaagtcc

SEQ ID NO: 3401121 - DNA, 25 bp, Homo sapien
tgatgtttactattttcaagtccat

SEQ ID NO: 3401122 - DNA, 25 bp, Homo sapien
ctctgatgatgtttactattttcaa

SEQ ID NO: 3401123 - DNA, 25 bp, Homo sapien
agtcaaacatggacagctcaagaga

SEQ ID NO: 3401124 - DNA, 25 bp, Homo sapien
cccttggaatttgaacgtgaattct

SEQ ID NO: 3401125 - DNA, 25 bp, Homo sapien
acatggacagctcaagagaatacaa

SEQ ID NO: 3401126 - DNA, 25 bp, Homo sapien
aagcccttggaatttgaacgtgaat

SEQ ID NO: 3401127 - DNA, 25 bp, Homo sapien
ctcagattttccataaacctcatcc

SEQ ID NO: 3401128 - DNA, 25 bp, Homo sapien
tctcagattttccataaacctcatc

SEQ ID NO: 3401129 - DNA, 25 bp, Homo sapien
cagattttccataaacctcatccat

SEQ ID NO: 3401130 - DNA, 25 bp, Homo sapien
tcagattttccataaacctcatcca

SEQ ID NO: 3401131 - DNA, 25 bp, Homo sapien
gggtggcccatgatatcatgagaca

SEQ ID NO: 3401132 - DNA, 25 bp, Homo sapien
ttaggggtggcccatgatatcatga

SEQ ID NO: 3401133 - DNA, 25 bp, Homo sapien
gcccatgatatcatgagacaggttc

SEQ ID NO: 3401134 - DNA, 25 bp, Homo sapien
tggcccatgatatcatgagacaggt

SEQ ID NO: 3401135 - DNA, 25 bp, Homo sapien
gccctgtatcgggtgaacctgccca

SEQ ID NO: 3401136 - DNA, 25 bp, Homo sapien
cgccccgccgaagtggccatttcag

SEQ ID NO: 3401137 - DNA, 25 bp, Homo sapien
cctgcccacaatagtcacgtaggtt

SEQ ID NO: 3401138 - DNA, 25 bp, Homo sapien
tatgtaatcattcaagctgtgacaa

SEQ ID NO: 3401139 - DNA, 25 bp, Homo sapien
tttctgatacagaatgactgaacat

SEQ ID NO: 3401140 - DNA, 25 bp, Homo sapien
tggcagtttctgatacagaatgact

SEQ ID NO: 3401141 - DNA, 25 bp, Homo sapien
ctgagaggctccatctggtggtgtg

SEQ ID NO: 3401142 - DNA, 25 bp, Homo sapien
ctccatctggtggtgtggcagtttc

SEQ ID NO: 3401143 - DNA, 25 bp, Homo sapien
tgtgtgtgtctgtttgctgctgttt

SEQ ID NO: 3401144 - DNA, 25 bp, Homo sapien
tgtgtctgtttgctgctgttttacc

SEQ ID NO: 3401145 - DNA, 25 bp, Homo sapien
cagttaatttcttggtgtgcgtgtg

SEQ ID NO: 3401146 - DNA, 25 bp, Homo sapien
aacacagttaatttcttggtgtgcg

SEQ ID NO: 3401147 - DNA, 25 bp, Homo sapien
gatgaaagtgtgttccgcactccca

SEQ ID NO: 3401148 - DNA, 25 bp, Homo sapien
cgacttttaagtccgatacaggtag

SEQ ID NO: 3401149 - DNA, 25 bp, Homo sapien
ggcttcatcctttgaacatcgactt

SEQ ID NO: 3401150 - DNA, 25 bp, Homo sapien
ccgatacaggtaggggcttgatgaa

SEQ ID NO: 3401151 - DNA, 25 bp, Homo sapien
gagcaacaaactcctttccccatgg

SEQ ID NO: 3401152 - DNA, 25 bp, Homo sapien
ttcctgccaggaatatacaggagca

SEQ ID NO: 3401153 - DNA, 25 bp, Homo sapien
gctctgatggtgtggtttgtactgt

SEQ ID NO: 3401154 - DNA, 25 bp, Homo sapien
ttgataactgtccagtaaggacagc

SEQ ID NO: 3401155 - DNA, 25 bp, Homo sapien
tggaaagtgtcattatatgcctttg

SEQ ID NO: 3401156 - DNA, 25 bp, Homo sapien
ttatatgcctttggcttgacttgct

SEQ ID NO: 3401157 - DNA, 25 bp, Homo sapien
agtgtcattatatgcctttggcttg

SEQ ID NO: 3401158 - DNA, 25 bp, Homo sapien
gtcattatatgcctttggcttgact

SEQ ID NO: 3401159 - DNA, 25 bp, Homo sapien
taatggtaatatgaggaagctgtcc

SEQ ID NO: 3401160 - DNA, 25 bp, Homo sapien
ttgaacagacgttgtagcatttggc

SEQ ID NO: 3401161 - DNA, 25 bp, Homo sapien
taaggtgcatcagccagtaaaacat

SEQ ID NO: 3401162 - DNA, 25 bp, Homo sapien
taatccaacattcactttgaacaga

SEQ ID NO: 3401163 - DNA, 25 bp, Homo sapien
ctctcagcagtagatgaccagttaa

SEQ ID NO: 3401164 - DNA, 25 bp, Homo sapien
tgttatagttccatgctccgatact

SEQ ID NO: 3401165 - DNA, 25 bp, Homo sapien
catgctccgatactagattcaattt

SEQ ID NO: 3401166 - DNA, 25 bp, Homo sapien
cagttaagcaatgttatagttccat

SEQ ID NO: 3401167 - DNA, 25 bp, Homo sapien
ggcttgtgttggcttccttgtgttt

SEQ ID NO: 3401168 - DNA, 25 bp, Homo sapien
tattttgactccgttctcttgagga

SEQ ID NO: 3401169 - DNA, 25 bp, Homo sapien
attttgactccgttctcttgaggaa

SEQ ID NO: 3401170 - DNA, 25 bp, Homo sapien
taatattttgactccgttctcttga

SEQ ID NO: 3401171 - DNA, 25 bp, Homo sapien
tttgactccgttctcttgaggaata

SEQ ID NO: 3401172 - DNA, 25 bp, Homo sapien
cgaacgtcaactcgtccttctgtct

SEQ ID NO: 3401173 - DNA, 25 bp, Homo sapien
taacagattaaaggcacgaacgtca

SEQ ID NO: 3401174 - DNA, 25 bp, Homo sapien
cagttggacataacagattaaaggc

SEQ ID NO: 3401175 - DNA, 25 bp, Homo sapien
aagaggaacagttggacataacaga

SEQ ID NO: 3401176 - DNA, 25 bp, Homo sapien
tctcccatgcagttataagttgccc

SEQ ID NO: 3401177 - DNA, 25 bp, Homo sapien
cgttcaccggtttgaattgaatatt

SEQ ID NO: 3401178 - DNA, 25 bp, Homo sapien
tgcagagaatttccacactattcac

SEQ ID NO: 3401179 - DNA, 25 bp, Homo sapien
taagttgcccaatgaacgttcaccg

SEQ ID NO: 3401180 - DNA, 25 bp, Homo sapien
taatgccagtggctgtccttcagtg

SEQ ID NO: 3401181 - DNA, 25 bp, Homo sapien
tgccagtggctgtccttcagtggaa

SEQ ID NO: 3401182 - DNA, 25 bp, Homo sapien
cagtggctgtccttcagtggaataa

SEQ ID NO: 3401183 - DNA, 25 bp, Homo sapien
aatgccagtggctgtccttcagtgg

SEQ ID NO: 3401184 - DNA, 25 bp, Homo sapien
tcttgtgtacatgtaactaacactt

SEQ ID NO: 3401185 - DNA, 25 bp, Homo sapien
gatcttgtgtacatgtaactaacac

SEQ ID NO: 3401186 - DNA, 25 bp, Homo sapien
atcttgtgtacatgtaactaacact

SEQ ID NO: 3401187 - DNA, 25 bp, Homo sapien
cttgtgtacatgtaactaacacttc

SEQ ID NO: 3401188 - DNA, 25 bp, Homo sapien
catttccaagcctgcgaaggtcggg

SEQ ID NO: 3401189 - DNA, 25 bp, Homo sapien
ttagagcgggcacaaatagcaggga

SEQ ID NO: 3401190 - DNA, 25 bp, Homo sapien
tgtgagagtacccaggctttgtccc

SEQ ID NO: 3401191 - DNA, 25 bp, Homo sapien
gactggtgtttcagcactgcctcga

SEQ ID NO: 3401192 - DNA, 25 bp, Homo sapien
tgttatattcagacatgctgctgat

SEQ ID NO: 3401193 - DNA, 25 bp, Homo sapien
aagtattagacttgcctttggctac

SEQ ID NO: 3401194 - DNA, 25 bp, Homo sapien
ctgttttgcatacatctctttatca

SEQ ID NO: 3401195 - DNA, 25 bp, Homo sapien
tgaacaatcagtgtaagtattagac

SEQ ID NO: 3401196 - DNA, 25 bp, Homo sapien
gaaaccagcaggttgtttctatgtg

SEQ ID NO: 3401197 - DNA, 25 bp, Homo sapien
caaaagaaaccagcaggttgtttct

SEQ ID NO: 3401198 - DNA, 25 bp, Homo sapien
accagcaggttgtttctatgtgaaa

SEQ ID NO: 3401199 - DNA, 25 bp, Homo sapien
gataaaattgtattcaccaaaagaa

SEQ ID NO: 3401200 - DNA, 25 bp, Homo sapien
gtcatcacgtggaagatggctttgt

SEQ ID NO: 3401201 - DNA, 25 bp, Homo sapien
attccagatttatggtgccttattc

SEQ ID NO: 3401202 - DNA, 25 bp, Homo sapien
ttctcagtctttgagtcatcacgtg

SEQ ID NO: 3401203 - DNA, 25 bp, Homo sapien
ttaattccagatttatggtgcctta

SEQ ID NO: 3401204 - DNA, 25 bp, Homo sapien
ctttagcactctgaaacaataatgt

SEQ ID NO: 3401205 - DNA, 25 bp, Homo sapien
cagcttcctaatttgctcatcaaca

SEQ ID NO: 3401206 - DNA, 25 bp, Homo sapien
gcactctgaaacaataatgttgctt

SEQ ID NO: 3401207 - DNA, 25 bp, Homo sapien
gaaacaataatgttgcttcctcctt

SEQ ID NO: 3401208 - DNA, 25 bp, Homo sapien
cgttcagtatctacatgccttttca

SEQ ID NO: 3401209 - DNA, 25 bp, Homo sapien
cagctggcctggtggtcgttcagta

SEQ ID NO: 3401210 - DNA, 25 bp, Homo sapien
taatgaggtgagatgccgtaactgt

SEQ ID NO: 3401211 - DNA, 25 bp, Homo sapien
gccgtaactgtttttcccagcagct

SEQ ID NO: 3401212 - DNA, 25 bp, Homo sapien
tttcgatagcagaagatatcttagg

SEQ ID NO: 3401213 - DNA, 25 bp, Homo sapien
tctgcggcagggatttttcgatagc

SEQ ID NO: 3401214 - DNA, 25 bp, Homo sapien
cacttcttagtgtatcaagcaggaa

SEQ ID NO: 3401215 - DNA, 25 bp, Homo sapien
ccaattagctaacaggacagagatc

SEQ ID NO: 3401216 - DNA, 25 bp, Homo sapien
cttcagaagtggcttggtgctaaat

SEQ ID NO: 3401217 - DNA, 25 bp, Homo sapien
cttggtgctaaatgatttgactgta

SEQ ID NO: 3401218 - DNA, 25 bp, Homo sapien
cagaagtggcttggtgctaaatgat

SEQ ID NO: 3401219 - DNA, 25 bp, Homo sapien
gtggcttggtgctaaatgatttgac

SEQ ID NO: 3401220 - DNA, 25 bp, Homo sapien
ggcttctcctagctaaatatggcag

SEQ ID NO: 3401221 - DNA, 25 bp, Homo sapien
cacttgggtcactgctgttgtcata

SEQ ID NO: 3401222 - DNA, 25 bp, Homo sapien
cagggagtcactagcacctggcagc

SEQ ID NO: 3401223 - DNA, 25 bp, Homo sapien
tctgagtagactgccaatggtgatt

SEQ ID NO: 3401224 - DNA, 25 bp, Homo sapien
tttaccaacatttcccacactcagc

SEQ ID NO: 3401225 - DNA, 25 bp, Homo sapien
tgtttctttaccaacatttcccaca

SEQ ID NO: 3401226 - DNA, 25 bp, Homo sapien
taccaacatttcccacactcagcat

SEQ ID NO: 3401227 - DNA, 25 bp, Homo sapien
tctttaccaacatttcccacactca

SEQ ID NO: 3401228 - DNA, 25 bp, Homo sapien
cacaaccttccctgttatttcagca

SEQ ID NO: 3401229 - DNA, 25 bp, Homo sapien
gactttatccgaaattgttgtcact

SEQ ID NO: 3401230 - DNA, 25 bp, Homo sapien
tcttagctggatccaatgtactctt

SEQ ID NO: 3401231 - DNA, 25 bp, Homo sapien
tctttgactttatccgaaattgttg

SEQ ID NO: 3401232 - DNA, 25 bp, Homo sapien
ggcagatacagtaagaaatagaact

SEQ ID NO: 3401233 - DNA, 25 bp, Homo sapien
aaatttggcaggcagatacagtaag

SEQ ID NO: 3401234 - DNA, 25 bp, Homo sapien
gcaggcagatacagtaagaaataga

SEQ ID NO: 3401235 - DNA, 25 bp, Homo sapien
tttggcaggcagatacagtaagaaa

SEQ ID NO: 3401236 - DNA, 25 bp, Homo sapien
caaggagctaaaacacaggctggct

SEQ ID NO: 3401237 - DNA, 25 bp, Homo sapien
aggctggctgtcctgtgtggatggt

SEQ ID NO: 3401238 - DNA, 25 bp, Homo sapien
tggatggtgaccagggagaaataac

SEQ ID NO: 3401239 - DNA, 25 bp, Homo sapien
ggtgaccagggagaaataactcaag

SEQ ID NO: 3401240 - DNA, 25 bp, Homo sapien
gatgttctagttggtagcagtccag

SEQ ID NO: 3401241 - DNA, 25 bp, Homo sapien
ccccgggcagacatcccaaagttag

SEQ ID NO: 3401242 - DNA, 25 bp, Homo sapien
tatgcctgttaggaggaggactgtc

SEQ ID NO: 3401243 - DNA, 25 bp, Homo sapien
gaggactgtcttcacgtaaagattc

SEQ ID NO: 3401244 - DNA, 25 bp, Homo sapien
gatcacagacaatcttcagtgcaca

SEQ ID NO: 3401245 - DNA, 25 bp, Homo sapien
taggcattgatatgcctgtaacaca

SEQ ID NO: 3401246 - DNA, 25 bp, Homo sapien
taaatccaggacaatttggctccaa

SEQ ID NO: 3401247 - DNA, 25 bp, Homo sapien
ggaaactggcaaccaaatgtaggca

SEQ ID NO: 3401248 - DNA, 25 bp, Homo sapien
tagcacctggcattaaactttccat

SEQ ID NO: 3401249 - DNA, 25 bp, Homo sapien
gttagcacctggcattaaactttcc

SEQ ID NO: 3401250 - DNA, 25 bp, Homo sapien
tctgatttcctgttagcacctggca

SEQ ID NO: 3401251 - DNA, 25 bp, Homo sapien
acactttctgatttcctgttagcac

SEQ ID NO: 3401252 - DNA, 25 bp, Homo sapien
aggaactactaagggccactttcat

SEQ ID NO: 3401253 - DNA, 25 bp, Homo sapien
tcctgtcttttggtatagtttagaa

SEQ ID NO: 3401254 - DNA, 25 bp, Homo sapien
tcatcaaggcactaactggtaagaa

SEQ ID NO: 3401255 - DNA, 25 bp, Homo sapien
tacaactgtggatgcaaagacaggt

SEQ ID NO: 3401256 - DNA, 25 bp, Homo sapien
cagactgtagattggctatgtagac

SEQ ID NO: 3401257 - DNA, 25 bp, Homo sapien
tagacatcattagagtccaaattac

SEQ ID NO: 3401258 - DNA, 25 bp, Homo sapien
ctagccagactgtagattggctatg

SEQ ID NO: 3401259 - DNA, 25 bp, Homo sapien
gattggctatgtagacatcattaga

SEQ ID NO: 3401260 - DNA, 25 bp, Homo sapien
gctatattagtgttgcctgttatta

SEQ ID NO: 3401261 - DNA, 25 bp, Homo sapien
gcagcatttgctggttccttaaatt

SEQ ID NO: 3401262 - DNA, 25 bp, Homo sapien
catttgctggttccttaaattgcct

SEQ ID NO: 3401263 - DNA, 25 bp, Homo sapien
gcatttgctggttccttaaattgcc

SEQ ID NO: 3401264 - DNA, 25 bp, Homo sapien
gaaaggcaaagtatccaccaacttc

SEQ ID NO: 3401265 - DNA, 25 bp, Homo sapien
gacaaaaatgaaaggcaaagtatcc

SEQ ID NO: 3401266 - DNA, 25 bp, Homo sapien
aggcaaagtatccaccaacttccat

SEQ ID NO: 3401267 - DNA, 25 bp, Homo sapien
aaatgaaaggcaaagtatccaccaa

SEQ ID NO: 3401268 - DNA, 25 bp, Homo sapien
ggtgcctgtttgaataacaccttga

SEQ ID NO: 3401269 - DNA, 25 bp, Homo sapien
ttgaataacaccttgatcttcttcc

SEQ ID NO: 3401270 - DNA, 25 bp, Homo sapien
tatttcggtactgcaaagtcagcct

SEQ ID NO: 3401271 - DNA, 25 bp, Homo sapien
cagggttttgtccttcaggttgtgg

SEQ ID NO: 3401272 - DNA, 25 bp, Homo sapien
aagtcagcctttccctgtgcatgga

SEQ ID NO: 3401273 - DNA, 25 bp, Homo sapien
tgacccaggtatttcggtactgcaa

SEQ ID NO: 3401274 - DNA, 25 bp, Homo sapien
ggattctctgctcatagctatttgc

SEQ ID NO: 3401275 - DNA, 25 bp, Homo sapien
tgctcatagctatttgctgcaattc

SEQ ID NO: 3401276 - DNA, 25 bp, Homo sapien
ctgtggggagtattagaaggattct

SEQ ID NO: 3401277 - DNA, 25 bp, Homo sapien
gggagtattagaaggattctctgct

SEQ ID NO: 3401278 - DNA, 25 bp, Homo sapien
gacacgtttttgctggtgctggaag

SEQ ID NO: 3401279 - DNA, 25 bp, Homo sapien
gagtctcttggacacgtttttgctg

SEQ ID NO: 3401280 - DNA, 25 bp, Homo sapien
tggacacgtttttgctggtgctgga

SEQ ID NO: 3401281 - DNA, 25 bp, Homo sapien
tcttggacacgtttttgctggtgct

SEQ ID NO: 3401282 - DNA, 25 bp, Homo sapien
caatcatctcaatgcaggctgccga

SEQ ID NO: 3401283 - DNA, 25 bp, Homo sapien
tcacacacggagcactgggaagtac

SEQ ID NO: 3401284 - DNA, 25 bp, Homo sapien
tgcatgccgactgccttgaagaaac

SEQ ID NO: 3401285 - DNA, 25 bp, Homo sapien
gctgattgacctgctactggcttga

SEQ ID NO: 3401286 - DNA, 25 bp, Homo sapien
gacagtgatgattccgatgatgata

SEQ ID NO: 3401287 - DNA, 25 bp, Homo sapien
gcaggatacaaaacatttcgtcttc

SEQ ID NO: 3401288 - DNA, 25 bp, Homo sapien
tgatgatatagttctcccaggcagg

SEQ ID NO: 3401289 - DNA, 25 bp, Homo sapien
agacaacgccgttgcaggacagtga

SEQ ID NO: 3401290 - DNA, 25 bp, Homo sapien
cagtcacttgtcttgtcagtaagaa

SEQ ID NO: 3401291 - DNA, 25 bp, Homo sapien
taatgctcacattgaaagccatttg

SEQ ID NO: 3401292 - DNA, 25 bp, Homo sapien
caattggtatgcttacctgtctgga

SEQ ID NO: 3401293 - DNA, 25 bp, Homo sapien
tcccagttgtgtgatgtggaccctc

SEQ ID NO: 3401294 - DNA, 25 bp, Homo sapien
agtctgcagcctcgagaaactggca

SEQ ID NO: 3401295 - DNA, 25 bp, Homo sapien
gtctgcagcctcgagaaactggcat

SEQ ID NO: 3401296 - DNA, 25 bp, Homo sapien
ttagtctgcagcctcgagaaactgg

SEQ ID NO: 3401297 - DNA, 25 bp, Homo sapien
tagtctgcagcctcgagaaactggc

SEQ ID NO: 3401298 - DNA, 25 bp, Homo sapien
aagaagatgcaacttatctgatcgg

SEQ ID NO: 3401299 - DNA, 25 bp, Homo sapien
tggagcaagaactaagcaagcttcg

SEQ ID NO: 3401300 - DNA, 25 bp, Homo sapien
agcaagcttcgtttagcctcctctg

SEQ ID NO: 3401301 - DNA, 25 bp, Homo sapien
tatctgatcggtgaatttggagcaa

SEQ ID NO: 3401302 - DNA, 25 bp, Homo sapien
caggcccagattatgtagatgtaca

SEQ ID NO: 3401303 - DNA, 25 bp, Homo sapien
aagcttatcatcagtcaggcccaga

SEQ ID NO: 3401304 - DNA, 25 bp, Homo sapien
ggtgagaattgacaccaagcttatc

SEQ ID NO: 3401305 - DNA, 25 bp, Homo sapien
tctctttcatcaaggcctgtttgga

SEQ ID NO: 3401306 - DNA, 25 bp, Homo sapien
acaagaatagcttcagtagtggcag

SEQ ID NO: 3401307 - DNA, 25 bp, Homo sapien
cagagaggacaagaatagcttcagt

SEQ ID NO: 3401308 - DNA, 25 bp, Homo sapien
tagcagggggtacaatgcagagagg

SEQ ID NO: 3401309 - DNA, 25 bp, Homo sapien
ggacaagaatagcttcagtagtggc

SEQ ID NO: 3401310 - DNA, 25 bp, Homo sapien
atgtcatacacctgggctagaggag

SEQ ID NO: 3401311 - DNA, 25 bp, Homo sapien
tcccactcgccttgcctggatgatg

SEQ ID NO: 3401312 - DNA, 25 bp, Homo sapien
tctgacccttcctgtttggcccttc

SEQ ID NO: 3401313 - DNA, 25 bp, Homo sapien
ctggcacagtatatgttccccggaa

SEQ ID NO: 3401314 - DNA, 25 bp, Homo sapien
atatgttccccggaactcaataaag

SEQ ID NO: 3401315 - DNA, 25 bp, Homo sapien
agacatagatagtatccaaaaagtt

SEQ ID NO: 3401316 - DNA, 25 bp, Homo sapien
acatagatagtatccaaaaagtttc

SEQ ID NO: 3401317 - DNA, 25 bp, Homo sapien
atcagactgctgaactattcctttt

SEQ ID NO: 3401318 - DNA, 25 bp, Homo sapien
catcagactgctgaactattccttt

SEQ ID NO: 3401319 - DNA, 25 bp, Homo sapien
agtcaacagatatcacggaggcttc

SEQ ID NO: 3401320 - DNA, 25 bp, Homo sapien
aatcagtgctttcaagaggttgggc

SEQ ID NO: 3401321 - DNA, 25 bp, Homo sapien
ggaggcttcttctaccccataggtg

SEQ ID NO: 3401322 - DNA, 25 bp, Homo sapien
ccaagactctgatgttaagttgaac

SEQ ID NO: 3401323 - DNA, 25 bp, Homo sapien
ttcacagtggtaggacatgcattcc

SEQ ID NO: 3401324 - DNA, 25 bp, Homo sapien
tactgacacggaatggcggaaattg

SEQ ID NO: 3401325 - DNA, 25 bp, Homo sapien
gatagagtgaattctactgacacgg

SEQ ID NO: 3401326 - DNA, 25 bp, Homo sapien
gagtctacctggtcactgcaaaaca

SEQ ID NO: 3401327 - DNA, 25 bp, Homo sapien
tctgttcagagttattgttattttg

SEQ ID NO: 3401328 - DNA, 25 bp, Homo sapien
gacatagtctgtccaaaattctgtt

SEQ ID NO: 3401329 - DNA, 25 bp, Homo sapien
ccataacaagttctgcagaaaattg

SEQ ID NO: 3401330 - DNA, 25 bp, Homo sapien
tgtttgtcagccataacaagttctg

SEQ ID NO: 3401331 - DNA, 25 bp, Homo sapien
tactgcatggaaagggttgtaactt

SEQ ID NO: 3401332 - DNA, 25 bp, Homo sapien
cttttgagattggtaaaggtactca

SEQ ID NO: 3401333 - DNA, 25 bp, Homo sapien
gagattggtaaaggtactcaaggca

SEQ ID NO: 3401334 - DNA, 25 bp, Homo sapien
tttactgcatggaaagggttgtaac

SEQ ID NO: 3401335 - DNA, 25 bp, Homo sapien
tttgtggtccgtgttcagcaggatc

SEQ ID NO: 3401336 - DNA, 25 bp, Homo sapien
ccctttgtggtccgtgttcagcagg

SEQ ID NO: 3401337 - DNA, 25 bp, Homo sapien
ctttgtggtccgtgttcagcaggat

SEQ ID NO: 3401338 - DNA, 25 bp, Homo sapien
cctttgtggtccgtgttcagcagga

SEQ ID NO: 3401339 - DNA, 25 bp, Homo sapien
gccaggaaccaatcacagcatgggt

SEQ ID NO: 3401340 - DNA, 25 bp, Homo sapien
tgtggccaggaaccaatcacagcat

SEQ ID NO: 3401341 - DNA, 25 bp, Homo sapien
attttcactgtttgatctacggagg

SEQ ID NO: 3401342 - DNA, 25 bp, Homo sapien
tttgatctacggaggctgtggccag

SEQ ID NO: 3401343 - DNA, 25 bp, Homo sapien
gaaataagactcttgcagttacttg

SEQ ID NO: 3401344 - DNA, 25 bp, Homo sapien
tgacaagctggtagatgaataattc

SEQ ID NO: 3401345 - DNA, 25 bp, Homo sapien
tacttgtaggttagcaatctgcagt

SEQ ID NO: 3401346 - DNA, 25 bp, Homo sapien
accactttcagatgggaagtgccca

SEQ ID NO: 3401347 - DNA, 25 bp, Homo sapien
ctaggacagattttgaataccattc

SEQ ID NO: 3401348 - DNA, 25 bp, Homo sapien
ctttcctgctgtctcgaattagagc

SEQ ID NO: 3401349 - DNA, 25 bp, Homo sapien
cctctaggattattgacacgttttc

SEQ ID NO: 3401350 - DNA, 25 bp, Homo sapien
gagcattctgcttatcctctaggat

SEQ ID NO: 3401351 - DNA, 25 bp, Homo sapien
ttggctggtggtagctcccagtact

SEQ ID NO: 3401352 - DNA, 25 bp, Homo sapien
ggctggtggtagctcccagtactga

SEQ ID NO: 3401353 - DNA, 25 bp, Homo sapien
gctggtggtagctcccagtactgac

SEQ ID NO: 3401354 - DNA, 25 bp, Homo sapien
tggctggtggtagctcccagtactg

SEQ ID NO: 3401355 - DNA, 25 bp, Homo sapien
ggaaacatgagtagcattcagtaat

SEQ ID NO: 3401356 - DNA, 25 bp, Homo sapien
aaacatgagtagcattcagtaatag

SEQ ID NO: 3401357 - DNA, 25 bp, Homo sapien
gcagcaaagatgcgtcagcatccat

SEQ ID NO: 3401358 - DNA, 25 bp, Homo sapien
gtagtataaggaaacatgagtagca

SEQ ID NO: 3401359 - DNA, 25 bp, Homo sapien
gattggaatatcaaaaactgcagct

SEQ ID NO: 3401360 - DNA, 25 bp, Homo sapien
tatgaatcaagagacactgcatgct

SEQ ID NO: 3401361 - DNA, 25 bp, Homo sapien
ggtaaccagcccatggagctccatt

SEQ ID NO: 3401362 - DNA, 25 bp, Homo sapien
gatagtgagccacaactctctctgg

SEQ ID NO: 3401363 - DNA, 25 bp, Homo sapien
caattttcttatggatcatctgcat

SEQ ID NO: 3401364 - DNA, 25 bp, Homo sapien
tgtatttatataatgatcatgaggt

SEQ ID NO: 3401365 - DNA, 25 bp, Homo sapien
tctttcaattttcttatggatcatc

SEQ ID NO: 3401366 - DNA, 25 bp, Homo sapien
tataatgatcatgaggttgaacatc

SEQ ID NO: 3401367 - DNA, 25 bp, Homo sapien
ctgtaggatttggtgactacgaaaa

SEQ ID NO: 3401368 - DNA, 25 bp, Homo sapien
tgtaggatttggtgactacgaaaag

SEQ ID NO: 3401369 - DNA, 25 bp, Homo sapien
gctgtaggatttggtgactacgaaa

SEQ ID NO: 3401370 - DNA, 25 bp, Homo sapien
tcacgatcacatgatgaaaaccgaa

SEQ ID NO: 3401371 - DNA, 25 bp, Homo sapien
tgaatcacgatcacatgatgaaaac

SEQ ID NO: 3401372 - DNA, 25 bp, Homo sapien
taaaatgaatcacgatcacatgatg

SEQ ID NO: 3401373 - DNA, 25 bp, Homo sapien
cacatgatgaaaaccgaaataagga

SEQ ID NO: 3401374 - DNA, 25 bp, Homo sapien
tatggaacagcctatgcaaaggcct

SEQ ID NO: 3401375 - DNA, 25 bp, Homo sapien
taggagagtttaagccatccctggg

SEQ ID NO: 3401376 - DNA, 25 bp, Homo sapien
tcaagaagaaagaagggctaggaca

SEQ ID NO: 3401377 - DNA, 25 bp, Homo sapien
catgaagcctacagtctagtgagag

SEQ ID NO: 3401378 - DNA, 25 bp, Homo sapien
gacaactgggagtctgcctttgtaa

SEQ ID NO: 3401379 - DNA, 25 bp, Homo sapien
agtgactcttctcgtagtttgtctg

SEQ ID NO: 3401380 - DNA, 25 bp, Homo sapien
caactgggagtctgcctttgtaact

SEQ ID NO: 3401381 - DNA, 25 bp, Homo sapien
ctgagttttggcaaactgacaactg

SEQ ID NO: 3401382 - DNA, 25 bp, Homo sapien
tcaacttttgttctactttactgca

SEQ ID NO: 3401383 - DNA, 25 bp, Homo sapien
tatttctctataacatggtgtacag

SEQ ID NO: 3401384 - DNA, 25 bp, Homo sapien
gccaacttttgttgtggtcagataa

SEQ ID NO: 3401385 - DNA, 25 bp, Homo sapien
catcagctcctgtaactatttttct

SEQ ID NO: 3401386 - DNA, 25 bp, Homo sapien
tgcaacctttcctctttcggtcctg

SEQ ID NO: 3401387 - DNA, 25 bp, Homo sapien
gcaacctttcctctttcggtcctga

SEQ ID NO: 3401388 - DNA, 25 bp, Homo sapien
tccaaaagtactactgattgtctac

SEQ ID NO: 3401389 - DNA, 25 bp, Homo sapien
tactgattgtctactactttcagat

SEQ ID NO: 3401390 - DNA, 25 bp, Homo sapien
cagtgtaatcaggatatgtgtacta

SEQ ID NO: 3401391 - DNA, 25 bp, Homo sapien
atccttcttcagtgtaatcaggata

SEQ ID NO: 3401392 - DNA, 25 bp, Homo sapien
tcttcagtgtaatcaggatatgtgt

SEQ ID NO: 3401393 - DNA, 25 bp, Homo sapien
gtgtaatcaggatatgtgtactaga

SEQ ID NO: 3401394 - DNA, 25 bp, Homo sapien
cagtgtttcagatatatgaactaca

SEQ ID NO: 3401395 - DNA, 25 bp, Homo sapien
tgagatgaagtcagtgtttcagata

SEQ ID NO: 3401396 - DNA, 25 bp, Homo sapien
gatgaagtcagtgtttcagatatat

SEQ ID NO: 3401397 - DNA, 25 bp, Homo sapien
aagtcagtgtttcagatatatgaac

SEQ ID NO: 3401398 - DNA, 25 bp, Homo sapien
caattgtagtgcaaagcttaatcac

SEQ ID NO: 3401399 - DNA, 25 bp, Homo sapien
tgtttataaccctggatagaactct

SEQ ID NO: 3401400 - DNA, 25 bp, Homo sapien
cagtagtgggctcacggtgccgtaa

SEQ ID NO: 3401401 - DNA, 25 bp, Homo sapien
tagcacaatgttgactagagatagt

SEQ ID NO: 3401402 - DNA, 25 bp, Homo sapien
ctttttcggaagaaactgcagattc

SEQ ID NO: 3401403 - DNA, 25 bp, Homo sapien
ctctgttgtattggccaaacctgtt

SEQ ID NO: 3401404 - DNA, 25 bp, Homo sapien
catctgttggttttcacgtctctgt

SEQ ID NO: 3401405 - DNA, 25 bp, Homo sapien
aaaattgtgtgagcattggagattt

SEQ ID NO: 3401406 - DNA, 25 bp, Homo sapien
tgtgtgagcattggagatttcttga

SEQ ID NO: 3401407 - DNA, 25 bp, Homo sapien
gatatctgcttcttgcgagagcctc

SEQ ID NO: 3401408 - DNA, 25 bp, Homo sapien
tcttgagggaagtctcacaggtcct

SEQ ID NO: 3401409 - DNA, 25 bp, Homo sapien
ttgttctcaggactatgaagactgt

SEQ ID NO: 3401410 - DNA, 25 bp, Homo sapien
agagggaagaggtcctaggctcttt

SEQ ID NO: 3401411 - DNA, 25 bp, Homo sapien
gaatgtcaaggaatcctaggattta

SEQ ID NO: 3401412 - DNA, 25 bp, Homo sapien
tttactcagaaaaaacgtacagata

SEQ ID NO: 3401413 - DNA, 25 bp, Homo sapien
tgagactgcagactctcagtaacag

SEQ ID NO: 3401414 - DNA, 25 bp, Homo sapien
aacgtacagataacattcctttgga

SEQ ID NO: 3401415 - DNA, 25 bp, Homo sapien
ctaatagagagcactggtaggcgga

SEQ ID NO: 3401416 - DNA, 25 bp, Homo sapien
actgatgatcttgcataggaaggcc

SEQ ID NO: 3401417 - DNA, 25 bp, Homo sapien
aatgatgaacctcctgcataaaggg

SEQ ID NO: 3401418 - DNA, 25 bp, Homo sapien
gcagacagtgggatgaattgccccc

SEQ ID NO: 3401419 - DNA, 25 bp, Homo sapien
aagtcatcagggctgttttagagaa

SEQ ID NO: 3401420 - DNA, 25 bp, Homo sapien
tacttagtccagaagatgctctgca

SEQ ID NO: 3401421 - DNA, 25 bp, Homo sapien
aaagcccacttggaatattgttgag

SEQ ID NO: 3401422 - DNA, 25 bp, Homo sapien
tacataatatggaggcttactcaga

SEQ ID NO: 3401423 - DNA, 25 bp, Homo sapien
cctggcatttcatctcctcaacacc

SEQ ID NO: 3401424 - DNA, 25 bp, Homo sapien
ctggcatttcatctcctcaacacct

SEQ ID NO: 3401425 - DNA, 25 bp, Homo sapien
tggcatttcatctcctcaacacctt

SEQ ID NO: 3401426 - DNA, 25 bp, Homo sapien
cctgcagctgtgaattgaaacctgg

SEQ ID NO: 3401427 - DNA, 25 bp, Homo sapien
gaattctcttgataggaacagtcca

SEQ ID NO: 3401428 - DNA, 25 bp, Homo sapien
aaacctggtgtgagagccctgactg

SEQ ID NO: 3401429 - DNA, 25 bp, Homo sapien
cagaacagtgtcttacctgcagctg

SEQ ID NO: 3401430 - DNA, 25 bp, Homo sapien
ccctgaagtcactattgagcctgga

SEQ ID NO: 3401431 - DNA, 25 bp, Homo sapien
gagttttccgtcatcatcacctgca

SEQ ID NO: 3401432 - DNA, 25 bp, Homo sapien
tcaaaggcttgcaagctcctcatcc

SEQ ID NO: 3401433 - DNA, 25 bp, Homo sapien
tgggctggtttaagatcgatgatct

SEQ ID NO: 3401434 - DNA, 25 bp, Homo sapien
tcaaaatcgaattaatattaggagc

SEQ ID NO: 3401435 - DNA, 25 bp, Homo sapien
ttaggagcattaggctccccttcaa

SEQ ID NO: 3401436 - DNA, 25 bp, Homo sapien
gagtggttaaccaaattgcatcaaa

SEQ ID NO: 3401437 - DNA, 25 bp, Homo sapien
tctctgaacctttgagttgagtggt

SEQ ID NO: 3401438 - DNA, 25 bp, Homo sapien
acttttcctagtgtggctggcttac

SEQ ID NO: 3401439 - DNA, 25 bp, Homo sapien
aataatgtaaacatgacgttgcaca

SEQ ID NO: 3401440 - DNA, 25 bp, Homo sapien
acatgacgttgcacacttttcctag

SEQ ID NO: 3401441 - DNA, 25 bp, Homo sapien
tcctagtgtggctggcttacttgga

SEQ ID NO: 3401442 - DNA, 25 bp, Homo sapien
tctgcctttctatggagaatgcctt

SEQ ID NO: 3401443 - DNA, 25 bp, Homo sapien
ctgtgcttactgaaatgttgtccat

SEQ ID NO: 3401444 - DNA, 25 bp, Homo sapien
tgcttccaactgtgcttactgaaat

SEQ ID NO: 3401445 - DNA, 25 bp, Homo sapien
tgcctttctatggagaatgccttct

SEQ ID NO: 3401446 - DNA, 25 bp, Homo sapien
tgtaaatagtctttgccaaaggcaa

SEQ ID NO: 3401447 - DNA, 25 bp, Homo sapien
ataactgtgccagagggtctgtaaa

SEQ ID NO: 3401448 - DNA, 25 bp, Homo sapien
aactgtgccagagggtctgtaaata

SEQ ID NO: 3401449 - DNA, 25 bp, Homo sapien
taaatagtctttgccaaaggcaatt

SEQ ID NO: 3401450 - DNA, 25 bp, Homo sapien
cttgcaagtccgcagggattcttgc

SEQ ID NO: 3401451 - DNA, 25 bp, Homo sapien
tccgcagggattcttgcccgaaatc

SEQ ID NO: 3401452 - DNA, 25 bp, Homo sapien
ctatgacttcagaccatttttctcc

SEQ ID NO: 3401453 - DNA, 25 bp, Homo sapien
tctccttcctgatcttgcaagtccg

SEQ ID NO: 3401454 - DNA, 25 bp, Homo sapien
gaagtacggatcttagatttaacag

SEQ ID NO: 3401455 - DNA, 25 bp, Homo sapien
cagtgtctaaatgaagtacggatct

SEQ ID NO: 3401456 - DNA, 25 bp, Homo sapien
aagctttcaaactcagtgtctaaat

SEQ ID NO: 3401457 - DNA, 25 bp, Homo sapien
caaactcagtgtctaaatgaagtac

SEQ ID NO: 3401458 - DNA, 25 bp, Homo sapien
cgtccttaaaagtgacgcgagtcga

SEQ ID NO: 3401459 - DNA, 25 bp, Homo sapien
tattgtgttgcaatctttctcgccc

SEQ ID NO: 3401460 - DNA, 25 bp, Homo sapien
tgtctgacataaatgtagccagctt

SEQ ID NO: 3401461 - DNA, 25 bp, Homo sapien
cattttcagtgtatgcgtccttaaa

SEQ ID NO: 3401462 - DNA, 25 bp, Homo sapien
gactgggctagaagaccaaagttta

SEQ ID NO: 3401463 - DNA, 25 bp, Homo sapien
tgctcttcgtctgttgaagcatcaa

SEQ ID NO: 3401464 - DNA, 25 bp, Homo sapien
gattcatgcccaaagtgaccctgtg

SEQ ID NO: 3401465 - DNA, 25 bp, Homo sapien
aaaatactgggaatcagattcatgc

SEQ ID NO: 3401466 - DNA, 25 bp, Homo sapien
ggggccttcaagataccactgaaag

SEQ ID NO: 3401467 - DNA, 25 bp, Homo sapien
aaaaggggccttcaagataccactg

SEQ ID NO: 3401468 - DNA, 25 bp, Homo sapien
aaggggccttcaagataccactgaa

SEQ ID NO: 3401469 - DNA, 25 bp, Homo sapien
ggccttcaagataccactgaaagat

SEQ ID NO: 3401470 - DNA, 25 bp, Homo sapien
tggtccacaaatggacacttacccc

SEQ ID NO: 3401471 - DNA, 25 bp, Homo sapien
catccatagctgattggtccacaaa

SEQ ID NO: 3401472 - DNA, 25 bp, Homo sapien
tggacacttaccccaaagaaagtca

SEQ ID NO: 3401473 - DNA, 25 bp, Homo sapien
tagctgattggtccacaaatggaca

SEQ ID NO: 3401474 - DNA, 25 bp, Homo sapien
aagctgtgttgtggataatggtggt

SEQ ID NO: 3401475 - DNA, 25 bp, Homo sapien
agctgtgttgtggataatggtggtc

SEQ ID NO: 3401476 - DNA, 25 bp, Homo sapien
gctgtgttgtggataatggtggtct

SEQ ID NO: 3401477 - DNA, 25 bp, Homo sapien
tgagacaagaaagggttctcagtgc

SEQ ID NO: 3401478 - DNA, 25 bp, Homo sapien
gacaagaaagggttctcagtgcctg

SEQ ID NO: 3401479 - DNA, 25 bp, Homo sapien
agacaagaaagggttctcagtgcct

SEQ ID NO: 3401480 - DNA, 25 bp, Homo sapien
ctgagacaagaaagggttctcagtg

SEQ ID NO: 3401481 - DNA, 25 bp, Homo sapien
gggcatcaacagcatctcggaaaat

SEQ ID NO: 3401482 - DNA, 25 bp, Homo sapien
atggggcatcaacagcatctcggaa

SEQ ID NO: 3401483 - DNA, 25 bp, Homo sapien
taagggatttgagatggggcatcaa

SEQ ID NO: 3401484 - DNA, 25 bp, Homo sapien
ttaagggatttgagatggggcatca

SEQ ID NO: 3401485 - DNA, 25 bp, Homo sapien
acatcctctgtagcctcagggtaca

SEQ ID NO: 3401486 - DNA, 25 bp, Homo sapien
atcctctgtagcctcagggtacatt

SEQ ID NO: 3401487 - DNA, 25 bp, Homo sapien
tctttcacatcctctgtagcctcag

SEQ ID NO: 3401488 - DNA, 25 bp, Homo sapien
ctctgtagcctcagggtacattccc

SEQ ID NO: 3401489 - DNA, 25 bp, Homo sapien
tgtttgattcatagagttcctctgc

SEQ ID NO: 3401490 - DNA, 25 bp, Homo sapien
ctggatagcctgtcccctgaactct

SEQ ID NO: 3401491 - DNA, 25 bp, Homo sapien
atagcctgtcccctgaactctgtgt

SEQ ID NO: 3401492 - DNA, 25 bp, Homo sapien
aggaaaggtgacaagttggctacaa

SEQ ID NO: 3401493 - DNA, 25 bp, Homo sapien
aggtgacaagttggctacaaagagc

SEQ ID NO: 3401494 - DNA, 25 bp, Homo sapien
ggaataatcagagcaaacaaaggca

SEQ ID NO: 3401495 - DNA, 25 bp, Homo sapien
tccctggaataatcagagcaaacaa

SEQ ID NO: 3401496 - DNA, 25 bp, Homo sapien
cattccctggaataatcagagcaaa

SEQ ID NO: 3401497 - DNA, 25 bp, Homo sapien
ttttccattccctggaataatcaga

SEQ ID NO: 3401498 - DNA, 25 bp, Homo sapien
ggatgagcttgccactgtgtaaagt

SEQ ID NO: 3401499 - DNA, 25 bp, Homo sapien
tagtggagtaatggcacaaggactc

SEQ ID NO: 3401500 - DNA, 25 bp, Homo sapien
acatggtggtcttctgctgatgatc

SEQ ID NO: 3401501 - DNA, 25 bp, Homo sapien
tgatgatccccagttgtccatgtaa

SEQ ID NO: 3401502 - DNA, 25 bp, Homo sapien
ccattcacactgaggaactcccaag

SEQ ID NO: 3401503 - DNA, 25 bp, Homo sapien
acactgaggaactcccaagaggatg

SEQ ID NO: 3401504 - DNA, 25 bp, Homo sapien
ccaagaggatgatgtggttgcacat

SEQ ID NO: 3401505 - DNA, 25 bp, Homo sapien
cagtggcctctccacagaagacact

SEQ ID NO: 3401506 - DNA, 25 bp, Homo sapien
tgctgattgttgtcttggtgcggac

SEQ ID NO: 3401507 - DNA, 25 bp, Homo sapien
tgtcttggtgcggactggtggtggt

SEQ ID NO: 3401508 - DNA, 25 bp, Homo sapien
cttgctgattgttgtcttggtgcgg

SEQ ID NO: 3401509 - DNA, 25 bp, Homo sapien
ctgattgttgtcttggtgcggactg

SEQ ID NO: 3401510 - DNA, 25 bp, Homo sapien
agaacatggctaagccagtggcgat

SEQ ID NO: 3401511 - DNA, 25 bp, Homo sapien
taagccagtggcgataaggcatgaa

SEQ ID NO: 3401512 - DNA, 25 bp, Homo sapien
gcgataaggcatgaaggtctgctct

SEQ ID NO: 3401513 - DNA, 25 bp, Homo sapien
tgaaggtctgctctcctttatacat

SEQ ID NO: 3401514 - DNA, 25 bp, Homo sapien
cagctccccctccttcttccatttg

SEQ ID NO: 3401515 - DNA, 25 bp, Homo sapien
agcagctccccctccttcttccatt

SEQ ID NO: 3401516 - DNA, 25 bp, Homo sapien
ctgcagcagctccccctccttcttc

SEQ ID NO: 3401517 - DNA, 25 bp, Homo sapien
ctccccctccttcttccatttgcac

SEQ ID NO: 3401518 - DNA, 25 bp, Homo sapien
tcacctttcctaaatcaacacaatg

SEQ ID NO: 3401519 - DNA, 25 bp, Homo sapien
cacaaactccataagtcacccttaa

SEQ ID NO: 3401520 - DNA, 25 bp, Homo sapien
tcacccttaacgaagaccatttaga

SEQ ID NO: 3401521 - DNA, 25 bp, Homo sapien
aacaggtatcacctttcctaaatca

SEQ ID NO: 3401522 - DNA, 25 bp, Homo sapien
catcatttgagtcgcatgtgtgtct

SEQ ID NO: 3401523 - DNA, 25 bp, Homo sapien
ctcatcatttgagtcgcatgtgtgt

SEQ ID NO: 3401524 - DNA, 25 bp, Homo sapien
cactgcttagggcaccacaggattc

SEQ ID NO: 3401525 - DNA, 25 bp, Homo sapien
agcagtgcccttgtcaccatgacaa

SEQ ID NO: 3401526 - DNA, 25 bp, Homo sapien
gtatttccaggactaatacctgcag

SEQ ID NO: 3401527 - DNA, 25 bp, Homo sapien
gcccgtcggcaagctgtagaatcag

SEQ ID NO: 3401528 - DNA, 25 bp, Homo sapien
cactgggtaaaatcgaatctcacgc

SEQ ID NO: 3401529 - DNA, 25 bp, Homo sapien
tagaatcagaggctaaaccaagtcc

SEQ ID NO: 3401530 - DNA, 25 bp, Homo sapien
tctctgtgtctatgattacttccct

SEQ ID NO: 3401531 - DNA, 25 bp, Homo sapien
tctgtgtctatgattacttcccttt

SEQ ID NO: 3401532 - DNA, 25 bp, Homo sapien
ggttctctgtgtctatgattacttc

SEQ ID NO: 3401533 - DNA, 25 bp, Homo sapien
gtgtctatgattacttcccttttgt

SEQ ID NO: 3401534 - DNA, 25 bp, Homo sapien
tcagtatgtgtagtttgtatcactc

SEQ ID NO: 3401535 - DNA, 25 bp, Homo sapien
tacttggaaactgtcctctgaaatt

SEQ ID NO: 3401536 - DNA, 25 bp, Homo sapien
ttatgggagaaggatgtttttggaa

SEQ ID NO: 3401537 - DNA, 25 bp, Homo sapien
aaaagtacttggaaactgtcctctg

SEQ ID NO: 3401538 - DNA, 25 bp, Homo sapien
tgggagaaggatgtttttggaaata

SEQ ID NO: 3401539 - DNA, 25 bp, Homo sapien
tcagtgaaacaccacattcacacca

SEQ ID NO: 3401540 - DNA, 25 bp, Homo sapien
agtgaaacaccacattcacaccaaa

SEQ ID NO: 3401541 - DNA, 25 bp, Homo sapien
cagtgaaacaccacattcacaccaa

SEQ ID NO: 3401542 - DNA, 25 bp, Homo sapien
tgccatgtgcttgcagcgttttcat

SEQ ID NO: 3401543 - DNA, 25 bp, Homo sapien
tgtgccatgtgcttgcagcgttttc

SEQ ID NO: 3401544 - DNA, 25 bp, Homo sapien
gtgccatgtgcttgcagcgttttca

SEQ ID NO: 3401545 - DNA, 25 bp, Homo sapien
agtagtgatttcagaggctcttggg

SEQ ID NO: 3401546 - DNA, 25 bp, Homo sapien
tgttgtctagagtagtggggccacc

SEQ ID NO: 3401547 - DNA, 25 bp, Homo sapien
tatcatgtgtatttgctccagggta

SEQ ID NO: 3401548 - DNA, 25 bp, Homo sapien
agtgtatctgctgttgttcttttgt

SEQ ID NO: 3401549 - DNA, 25 bp, Homo sapien
tctaagagaaacgaatagccagttc

SEQ ID NO: 3401550 - DNA, 25 bp, Homo sapien
tctcatctaagagaaacgaatagcc

SEQ ID NO: 3401551 - DNA, 25 bp, Homo sapien
gctctaaattgctctcatctaagag

SEQ ID NO: 3401552 - DNA, 25 bp, Homo sapien
ctattcaattagttgttgctctaaa

SEQ ID NO: 3401553 - DNA, 25 bp, Homo sapien
gctataggatggagcaccttcaggg

SEQ ID NO: 3401554 - DNA, 25 bp, Homo sapien
ccagcatcccaacagctataggatg

SEQ ID NO: 3401555 - DNA, 25 bp, Homo sapien
tagctacatcaggaccagcatccca

SEQ ID NO: 3401556 - DNA, 25 bp, Homo sapien
ggaccagcatcccaacagctatagg

SEQ ID NO: 3401557 - DNA, 25 bp, Homo sapien
tgatttcagcatcacgccatccggc

SEQ ID NO: 3401558 - DNA, 25 bp, Homo sapien
gggtagccaaggatgaatactgcct

SEQ ID NO: 3401559 - DNA, 25 bp, Homo sapien
aagctgttgtaacattgcaggcacg

SEQ ID NO: 3401560 - DNA, 25 bp, Homo sapien
agtaagatagagagtgggtagccaa

SEQ ID NO: 3401561 - DNA, 25 bp, Homo sapien
gcatattaatagattcttcacctga

SEQ ID NO: 3401562 - DNA, 25 bp, Homo sapien
ctttgtgctccaggcttcggccagt

SEQ ID NO: 3401563 - DNA, 25 bp, Homo sapien
ggccagtccatctggccttttatgc

SEQ ID NO: 3401564 - DNA, 25 bp, Homo sapien
tattaatagattcttcacctgagcc

SEQ ID NO: 3401565 - DNA, 25 bp, Homo sapien
tctgccactttcttaattgccaaac

SEQ ID NO: 3401566 - DNA, 25 bp, Homo sapien
tttcttaattgccaaactgtatcca

SEQ ID NO: 3401567 - DNA, 25 bp, Homo sapien
ccaaactgtatccagttgtttgtga

SEQ ID NO: 3401568 - DNA, 25 bp, Homo sapien
gccactttcttaattgccaaactgt

SEQ ID NO: 3401569 - DNA, 25 bp, Homo sapien
gtgctttgtaattacctaaggccat

SEQ ID NO: 3401570 - DNA, 25 bp, Homo sapien
taaggccattacaatatctccttcc

SEQ ID NO: 3401571 - DNA, 25 bp, Homo sapien
gtaattacctaaggccattacaata

SEQ ID NO: 3401572 - DNA, 25 bp, Homo sapien
tacctaaggccattacaatatctcc

SEQ ID NO: 3401573 - DNA, 25 bp, Homo sapien
gagatacagcgtctttcatttccca

SEQ ID NO: 3401574 - DNA, 25 bp, Homo sapien
ctgagatacagcgtctttcatttcc

SEQ ID NO: 3401575 - DNA, 25 bp, Homo sapien
tataactgagatacagcgtctttca

SEQ ID NO: 3401576 - DNA, 25 bp, Homo sapien
tctgagtataactgagatacagcgt

SEQ ID NO: 3401577 - DNA, 25 bp, Homo sapien
gcctcaggcaggcaatgtagggtaa

SEQ ID NO: 3401578 - DNA, 25 bp, Homo sapien
tcttcatggtagccatcatcagggc

SEQ ID NO: 3401579 - DNA, 25 bp, Homo sapien
ccaatggagacttcatctccagatg

SEQ ID NO: 3401580 - DNA, 25 bp, Homo sapien
gatggagccaagtacaatacatgca

SEQ ID NO: 3401581 - DNA, 25 bp, Homo sapien
gtgttagtagaaggtggcctgagca

SEQ ID NO: 3401582 - DNA, 25 bp, Homo sapien
tgtgttagtagaaggtggcctgagc

SEQ ID NO: 3401583 - DNA, 25 bp, Homo sapien
tgttagtagaaggtggcctgagcat

SEQ ID NO: 3401584 - DNA, 25 bp, Homo sapien
tctgtctgtcctttggtattaggtc

SEQ ID NO: 3401585 - DNA, 25 bp, Homo sapien
tccaaccccaacaaaaccatcttca

SEQ ID NO: 3401586 - DNA, 25 bp, Homo sapien
caaccccaacaaaaccatcttcaga

SEQ ID NO: 3401587 - DNA, 25 bp, Homo sapien
tctgtcctttggtattaggtccaac

SEQ ID NO: 3401588 - DNA, 25 bp, Homo sapien
tgtgtatcttccacctgttgtctct

SEQ ID NO: 3401589 - DNA, 25 bp, Homo sapien
tgtatcttccacctgttgtctctta

SEQ ID NO: 3401590 - DNA, 25 bp, Homo sapien
gtatcttccacctgttgtctcttac

SEQ ID NO: 3401591 - DNA, 25 bp, Homo sapien
ctgtgtatcttccacctgttgtctc

SEQ ID NO: 3401592 - DNA, 25 bp, Homo sapien
tagggagcccttttacactggtcca

SEQ ID NO: 3401593 - DNA, 25 bp, Homo sapien
gaatccgtgactcttgtttcttgtc

SEQ ID NO: 3401594 - DNA, 25 bp, Homo sapien
gtccaggtgctttcagtgacttgcc

SEQ ID NO: 3401595 - DNA, 25 bp, Homo sapien
caaggctctaagctgtaaaaggctg

SEQ ID NO: 3401596 - DNA, 25 bp, Homo sapien
tgttggtgtttaccttgctcatctc

SEQ ID NO: 3401597 - DNA, 25 bp, Homo sapien
tgccttccgacaacctgagaggtta

SEQ ID NO: 3401598 - DNA, 25 bp, Homo sapien
ttttctgttgccttccgacaacctg

SEQ ID NO: 3401599 - DNA, 25 bp, Homo sapien
cccttgttggtgtttaccttgctca

SEQ ID NO: 3401600 - DNA, 25 bp, Homo sapien
gacagcctcatagaatttgattctg

SEQ ID NO: 3401601 - DNA, 25 bp, Homo sapien
ctgagtggggattaaaatagttcct

SEQ ID NO: 3401602 - DNA, 25 bp, Homo sapien
agaatgacagcctcatagaatttga

SEQ ID NO: 3401603 - DNA, 25 bp, Homo sapien
tctccaaatgaatggtggttcatgt

SEQ ID NO: 3401604 - DNA, 25 bp, Homo sapien
gaaagctatgtttagactctggaag

SEQ ID NO: 3401605 - DNA, 25 bp, Homo sapien
ctatgtttagactctggaagaggca

SEQ ID NO: 3401606 - DNA, 25 bp, Homo sapien
tcgtgatcacatagagaaagctatg

SEQ ID NO: 3401607 - DNA, 25 bp, Homo sapien
tctcttcttcgtgatcacatagaga

SEQ ID NO: 3401608 - DNA, 25 bp, Homo sapien
aaacagagccttttatcatgacatc

SEQ ID NO: 3401609 - DNA, 25 bp, Homo sapien
ttatcatgacatcattagggcccat

SEQ ID NO: 3401610 - DNA, 25 bp, Homo sapien
tttatcatgacatcattagggccca

SEQ ID NO: 3401611 - DNA, 25 bp, Homo sapien
gcatcctgatggagtctgatgttga

SEQ ID NO: 3401612 - DNA, 25 bp, Homo sapien
ctaggaaatctgttgggtttgtgta

SEQ ID NO: 3401613 - DNA, 25 bp, Homo sapien
tctgctgatccatgtgtaactgatt

SEQ ID NO: 3401614 - DNA, 25 bp, Homo sapien
gggtgcatatgtattctcgtgacca

SEQ ID NO: 3401615 - DNA, 25 bp, Homo sapien
aggaagcgagctacaaaataaaatt

SEQ ID NO: 3401616 - DNA, 25 bp, Homo sapien
cacatttaaaaggaagcgagctaca

SEQ ID NO: 3401617 - DNA, 25 bp, Homo sapien
gaagcaatataaaagctcttctctc

SEQ ID NO: 3401618 - DNA, 25 bp, Homo sapien
aaattgctttctggttaccctccat

SEQ ID NO: 3401619 - DNA, 25 bp, Homo sapien
tggcgcttagatggctactgcagat

SEQ ID NO: 3401620 - DNA, 25 bp, Homo sapien
acttgctctctgaatctcgcctcaa

SEQ ID NO: 3401621 - DNA, 25 bp, Homo sapien
aaatatcagtatgctctctgcagtc

SEQ ID NO: 3401622 - DNA, 25 bp, Homo sapien
cttggcgcttagatggctactgcag

SEQ ID NO: 3401623 - DNA, 25 bp, Homo sapien
cacacagtgtaactccaacgtctaa

SEQ ID NO: 3401624 - DNA, 25 bp, Homo sapien
gactgtttcattacatggttcattc

SEQ ID NO: 3401625 - DNA, 25 bp, Homo sapien
ccaacgtctaagatgaggaaagact

SEQ ID NO: 3401626 - DNA, 25 bp, Homo sapien
tgtaactccaacgtctaagatgagg

SEQ ID NO: 3401627 - DNA, 25 bp, Homo sapien
cattcctctctctactgctatcaga

SEQ ID NO: 3401628 - DNA, 25 bp, Homo sapien
ccatctgtagggccacctctccctc

SEQ ID NO: 3401629 - DNA, 25 bp, Homo sapien
cattcacactgctccaaggccatct

SEQ ID NO: 3401630 - DNA, 25 bp, Homo sapien
ccattcctctctctactgctatcag

SEQ ID NO: 3401631 - DNA, 25 bp, Homo sapien
ctgtgttaagggagaaaggatgtaa

SEQ ID NO: 3401632 - DNA, 25 bp, Homo sapien
taagtgtatctctgtgtatcgattt

SEQ ID NO: 3401633 - DNA, 25 bp, Homo sapien
ggatgtaagtgtatctctgtgtatc

SEQ ID NO: 3401634 - DNA, 25 bp, Homo sapien
tgtaagtgtatctctgtgtatcgat

SEQ ID NO: 3401635 - DNA, 25 bp, Homo sapien
taccactgctccccaacatagagac

SEQ ID NO: 3401636 - DNA, 25 bp, Homo sapien
ctaccactgctccccaacatagaga

SEQ ID NO: 3401637 - DNA, 25 bp, Homo sapien
tctccttgggctcatcatcttgctc

SEQ ID NO: 3401638 - DNA, 25 bp, Homo sapien
tcttgctcagtctttgacactgtgg

SEQ ID NO: 3401639 - DNA, 25 bp, Homo sapien
caggtgaatggcttctgatagcttc

SEQ ID NO: 3401640 - DNA, 25 bp, Homo sapien
tgatagcttcttctgagttcctacc

SEQ ID NO: 3401641 - DNA, 25 bp, Homo sapien
tcactctcgtaaaggctttcagtct

SEQ ID NO: 3401642 - DNA, 25 bp, Homo sapien
ctgcatcactctcgtaaaggctttc

SEQ ID NO: 3401643 - DNA, 25 bp, Homo sapien
gcatcactctcgtaaaggctttcag

SEQ ID NO: 3401644 - DNA, 25 bp, Homo sapien
catcactctcgtaaaggctttcagt

SEQ ID NO: 3401645 - DNA, 25 bp, Homo sapien
tatcataggatccttcaggatccct

SEQ ID NO: 3401646 - DNA, 25 bp, Homo sapien
cataggatccttcaggatcccttac

SEQ ID NO: 3401647 - DNA, 25 bp, Homo sapien
atcataggatccttcaggatccctt

SEQ ID NO: 3401648 - DNA, 25 bp, Homo sapien
tcataggatccttcaggatccctta

SEQ ID NO: 3401649 - DNA, 25 bp, Homo sapien
ctgggcacctgagcctcttttgccc

SEQ ID NO: 3401650 - DNA, 25 bp, Homo sapien
tggtttggcccacttgcctacttgg

SEQ ID NO: 3401651 - DNA, 25 bp, Homo sapien
tctggtttggcccacttgcctactt

SEQ ID NO: 3401652 - DNA, 25 bp, Homo sapien
gagctttctagagaagataccatct

SEQ ID NO: 3401653 - DNA, 25 bp, Homo sapien
ccatctggtttggcccacttgccta

SEQ ID NO: 3401654 - DNA, 25 bp, Homo sapien
aaggaggtaccgctgagctgtggct

SEQ ID NO: 3401655 - DNA, 25 bp, Homo sapien
caaggaggtaccgctgagctgtggc

SEQ ID NO: 3401656 - DNA, 25 bp, Homo sapien
cacaaggaggtaccgctgagctgtg

SEQ ID NO: 3401657 - DNA, 25 bp, Homo sapien
tcacaaggaggtaccgctgagctgt

SEQ ID NO: 3401658 - DNA, 25 bp, Homo sapien
tcttgggtcccattttaattgcctg

SEQ ID NO: 3401659 - DNA, 25 bp, Homo sapien
ttgggtcccattttaattgcctgga

SEQ ID NO: 3401660 - DNA, 25 bp, Homo sapien
tattcttgggtcccattttaattgc

SEQ ID NO: 3401661 - DNA, 25 bp, Homo sapien
tgggtcccattttaattgcctggaa

SEQ ID NO: 3401662 - DNA, 25 bp, Homo sapien
tgagctgccttgtgattccatcgcc

SEQ ID NO: 3401663 - DNA, 25 bp, Homo sapien
tcattctgagtgattagtttcccat

SEQ ID NO: 3401664 - DNA, 25 bp, Homo sapien
catcgcctatctcggatctcaagag

SEQ ID NO: 3401665 - DNA, 25 bp, Homo sapien
gattagtttcccatgagctgccttg

SEQ ID NO: 3401666 - DNA, 25 bp, Homo sapien
ctgggtgtgtctcatcattgagttc

SEQ ID NO: 3401667 - DNA, 25 bp, Homo sapien
gagttcctcagtctcgtttaaaaga

SEQ ID NO: 3401668 - DNA, 25 bp, Homo sapien
tagaatagtctgtgtcagtctccat

SEQ ID NO: 3401669 - DNA, 25 bp, Homo sapien
cttaaagtctgggtgtgtctcatca

SEQ ID NO: 3401670 - DNA, 25 bp, Homo sapien
caaagggtacaaccatcctgtaatt

SEQ ID NO: 3401671 - DNA, 25 bp, Homo sapien
tgagccttcttgctacagctgcttt

SEQ ID NO: 3401672 - DNA, 25 bp, Homo sapien
tcaaagggtacaaccatcctgtaat

SEQ ID NO: 3401673 - DNA, 25 bp, Homo sapien
tgtaattcattgagccttcttgcta

SEQ ID NO: 3401674 - DNA, 25 bp, Homo sapien
gagacactaacattctgcaggtcat

SEQ ID NO: 3401675 - DNA, 25 bp, Homo sapien
gtgtcaggaacagagacactaacat

SEQ ID NO: 3401676 - DNA, 25 bp, Homo sapien
tttcagggggattggtgtcaggaac

SEQ ID NO: 3401677 - DNA, 25 bp, Homo sapien
gaacagagacactaacattctgcag

SEQ ID NO: 3401678 - DNA, 25 bp, Homo sapien
aacgttttgtgttgatctgtgccag

SEQ ID NO: 3401679 - DNA, 25 bp, Homo sapien
cagtatgcctatagagacccttgga

SEQ ID NO: 3401680 - DNA, 25 bp, Homo sapien
gatgtgcatgcctgctcaaagatga

SEQ ID NO: 3401681 - DNA, 25 bp, Homo sapien
tgtggaattagagcacacagcaact

SEQ ID NO: 3401682 - DNA, 25 bp, Homo sapien
cagattggattaagtgcctcccgta

SEQ ID NO: 3401683 - DNA, 25 bp, Homo sapien
gattggattaagtgcctcccgtaac

SEQ ID NO: 3401684 - DNA, 25 bp, Homo sapien
agattggattaagtgcctcccgtaa

SEQ ID NO: 3401685 - DNA, 25 bp, Homo sapien
ccaccaggtttcgaaaattgtgcca

SEQ ID NO: 3401686 - DNA, 25 bp, Homo sapien
ccaggtttcgaaaattgtgccacat

SEQ ID NO: 3401687 - DNA, 25 bp, Homo sapien
ggttccatgatttccagggcagagt

SEQ ID NO: 3401688 - DNA, 25 bp, Homo sapien
actcccttgttagggttccatgatt

SEQ ID NO: 3401689 - DNA, 25 bp, Homo sapien
tctgttgaaacaagtacagggagtc

SEQ ID NO: 3401690 - DNA, 25 bp, Homo sapien
tgttgaaacaagtacagggagtctc

SEQ ID NO: 3401691 - DNA, 25 bp, Homo sapien
gttgaaacaagtacagggagtctct

SEQ ID NO: 3401692 - DNA, 25 bp, Homo sapien
cactctgttgaaacaagtacaggga

SEQ ID NO: 3401693 - DNA, 25 bp, Homo sapien
tcaaatctcttggacagaagggatc

SEQ ID NO: 3401694 - DNA, 25 bp, Homo sapien
caatttacatatggcaccagctcag

SEQ ID NO: 3401695 - DNA, 25 bp, Homo sapien
tttacatatggcaccagctcagaca

SEQ ID NO: 3401696 - DNA, 25 bp, Homo sapien
aaagacaatttacatatggcaccag

SEQ ID NO: 3401697 - DNA, 25 bp, Homo sapien
gacaatttacatatggcaccagctc

SEQ ID NO: 3401698 - DNA, 25 bp, Homo sapien
ggcggatgttcgaaggtgacttaaa

SEQ ID NO: 3401699 - DNA, 25 bp, Homo sapien
ggaagtccaaatcagtgtgtgactc

SEQ ID NO: 3401700 - DNA, 25 bp, Homo sapien
tttgtgtactgcattgactctctga

SEQ ID NO: 3401701 - DNA, 25 bp, Homo sapien
gactctctgagtactaagatccagg

SEQ ID NO: 3401702 - DNA, 25 bp, Homo sapien
gtctcttaggcccattcttttcaga

SEQ ID NO: 3401703 - DNA, 25 bp, Homo sapien
aatgagtctcttaggcccattcttt

SEQ ID NO: 3401704 - DNA, 25 bp, Homo sapien
aggatgggatagggaatgagtctct

SEQ ID NO: 3401705 - DNA, 25 bp, Homo sapien
taggcccattcttttcagatcatac

SEQ ID NO: 3401706 - DNA, 25 bp, Homo sapien
gttcatgtgtgtgcataagtacacc

SEQ ID NO: 3401707 - DNA, 25 bp, Homo sapien
cacagttatccacgactctggatcc

SEQ ID NO: 3401708 - DNA, 25 bp, Homo sapien
ttatccacgactctggatccatctc

SEQ ID NO: 3401709 - DNA, 25 bp, Homo sapien
atgtgtgtgcataagtacacctgtg

SEQ ID NO: 3401710 - DNA, 25 bp, Homo sapien
gatattttgattactgccactgcct

SEQ ID NO: 3401711 - DNA, 25 bp, Homo sapien
gcagatgaaaccgaacaaataggca

SEQ ID NO: 3401712 - DNA, 25 bp, Homo sapien
acttccagagttgatatccagatgc

SEQ ID NO: 3401713 - DNA, 25 bp, Homo sapien
aataggcatcactttctgatggagc

SEQ ID NO: 3401714 - DNA, 25 bp, Homo sapien
tcctttctcttccaactgaaatgga

SEQ ID NO: 3401715 - DNA, 25 bp, Homo sapien
ttctcttccaactgaaatggaatgt

SEQ ID NO: 3401716 - DNA, 25 bp, Homo sapien
tttctcttccaactgaaatggaatg

SEQ ID NO: 3401717 - DNA, 25 bp, Homo sapien
tcctcctttctcttccaactgaaat

SEQ ID NO: 3401718 - DNA, 25 bp, Homo sapien
ggcaatagctgtgttcaccaagtga

SEQ ID NO: 3401719 - DNA, 25 bp, Homo sapien
cataagtacacagttagtggctgct

SEQ ID NO: 3401720 - DNA, 25 bp, Homo sapien
cagggaaaggttacaaattggcagg

SEQ ID NO: 3401721 - DNA, 25 bp, Homo sapien
tgtcagttgaagaccacagggattt

SEQ ID NO: 3401722 - DNA, 25 bp, Homo sapien
tctctgctggttacgggttttagaa

SEQ ID NO: 3401723 - DNA, 25 bp, Homo sapien
tcccacactgcactcagttgcccca

SEQ ID NO: 3401724 - DNA, 25 bp, Homo sapien
ctctctgctggttacgggttttaga

SEQ ID NO: 3401725 - DNA, 25 bp, Homo sapien
ttagaaaacttgtttcccacactgc

SEQ ID NO: 3401726 - DNA, 25 bp, Homo sapien
agaatcagtcacattggcaaaactg

SEQ ID NO: 3401727 - DNA, 25 bp, Homo sapien
aatcagtcacattggcaaaactgca

SEQ ID NO: 3401728 - DNA, 25 bp, Homo sapien
aagtgcccctgaacatctctcctcc

SEQ ID NO: 3401729 - DNA, 25 bp, Homo sapien
tctctcgtcctctacaagtgcccct

SEQ ID NO: 3401730 - DNA, 25 bp, Homo sapien
tgtgcatctaatcctttgcctctga

SEQ ID NO: 3401731 - DNA, 25 bp, Homo sapien
atctaatcctttgcctctgactgct

SEQ ID NO: 3401732 - DNA, 25 bp, Homo sapien
catgtgtgcatctaatcctttgcct

SEQ ID NO: 3401733 - DNA, 25 bp, Homo sapien
gcatctaatcctttgcctctgactg

SEQ ID NO: 3401734 - DNA, 25 bp, Homo sapien
ttaccttagctatgactctatgttc

SEQ ID NO: 3401735 - DNA, 25 bp, Homo sapien
tgttaccttagctatgactctatgt

SEQ ID NO: 3401736 - DNA, 25 bp, Homo sapien
ctgttaccttagctatgactctatg

SEQ ID NO: 3401737 - DNA, 25 bp, Homo sapien
gttaccttagctatgactctatgtt

SEQ ID NO: 3401738 - DNA, 25 bp, Homo sapien
ggattagcgtaaataactcccatgg

SEQ ID NO: 3401739 - DNA, 25 bp, Homo sapien
taaattggcttgtgtgcttcctctg

SEQ ID NO: 3401740 - DNA, 25 bp, Homo sapien
tcatcattgtccagccaggctacag

SEQ ID NO: 3401741 - DNA, 25 bp, Homo sapien
gtctcttttaatacccgatgctggg

SEQ ID NO: 3401742 - DNA, 25 bp, Homo sapien
cacccacattcacacacgaggatgt

SEQ ID NO: 3401743 - DNA, 25 bp, Homo sapien
gcttcacaagacctgcaaggatcat

SEQ ID NO: 3401744 - DNA, 25 bp, Homo sapien
gaggatgttaccttgctctccccgg

SEQ ID NO: 3401745 - DNA, 25 bp, Homo sapien
aaatgcttcacaagacctgcaagga

SEQ ID NO: 3401746 - DNA, 25 bp, Homo sapien
cctgggctgatggtctttgaagaca

SEQ ID NO: 3401747 - DNA, 25 bp, Homo sapien
agggacagtcaatctgctcaggcag

SEQ ID NO: 3401748 - DNA, 25 bp, Homo sapien
gaacatatgctgtgcgggaaccgta

SEQ ID NO: 3401749 - DNA, 25 bp, Homo sapien
gctgcttccaccatagttagtgtag

SEQ ID NO: 3401750 - DNA, 25 bp, Homo sapien
tgaactgtgcatcgtggcacgatgg

SEQ ID NO: 3401751 - DNA, 25 bp, Homo sapien
gaacttaaattgcataactgaactg

SEQ ID NO: 3401752 - DNA, 25 bp, Homo sapien
tcttcggttgccatagaacttaaat

SEQ ID NO: 3401753 - DNA, 25 bp, Homo sapien
aggcttccgtagctgggttgccgaa

SEQ ID NO: 3401754 - DNA, 25 bp, Homo sapien
cggcaattgtctcactgcttggtga

SEQ ID NO: 3401755 - DNA, 25 bp, Homo sapien
ctcggcaattgtctcactgcttggt

SEQ ID NO: 3401756 - DNA, 25 bp, Homo sapien
tcggcaattgtctcactgcttggtg

SEQ ID NO: 3401757 - DNA, 25 bp, Homo sapien
gtcgttgaccgctctagctacttcc

SEQ ID NO: 3401758 - DNA, 25 bp, Homo sapien
ttgggaatttggtcgttgaccgctc

SEQ ID NO: 3401759 - DNA, 25 bp, Homo sapien
ctgttgggaatttggtcgttgaccg

SEQ ID NO: 3401760 - DNA, 25 bp, Homo sapien
gaatttggtcgttgaccgctctagc

SEQ ID NO: 3401761 - DNA, 25 bp, Homo sapien
aagtgtggtcattagaagtttgacc

SEQ ID NO: 3401762 - DNA, 25 bp, Homo sapien
catttcccatacaacagaagacctg

SEQ ID NO: 3401763 - DNA, 25 bp, Homo sapien
cccatacaacagaagacctggtttg

SEQ ID NO: 3401764 - DNA, 25 bp, Homo sapien
tggtctgcagcccaaagtgtggtca

SEQ ID NO: 3401765 - DNA, 25 bp, Homo sapien
ccttagtatccaccttgaattcagc

SEQ ID NO: 3401766 - DNA, 25 bp, Homo sapien
tcagccccaaatacacctttatgct

SEQ ID NO: 3401767 - DNA, 25 bp, Homo sapien
tatgtgccctgtatcatgacactgg

SEQ ID NO: 3401768 - DNA, 25 bp, Homo sapien
cgtgtcatgtgccattcaaaaccaa

SEQ ID NO: 3401769 - DNA, 25 bp, Homo sapien
ccctggcataggcaccgaactgtat

SEQ ID NO: 3401770 - DNA, 25 bp, Homo sapien
tttggcaaaactacatcgtgtcatg

SEQ ID NO: 3401771 - DNA, 25 bp, Homo sapien
gaatacagtgagtgttccaacagtg

SEQ ID NO: 3401772 - DNA, 25 bp, Homo sapien
cagtgagtgttccaacagtgcgaaa

SEQ ID NO: 3401773 - DNA, 25 bp, Homo sapien
ctgcaagcccgggaatacagtgagt

SEQ ID NO: 3401774 - DNA, 25 bp, Homo sapien
ccaacagtgcgaaatcatagatgct

SEQ ID NO: 3401775 - DNA, 25 bp, Homo sapien
aaatctgcgcatgcctttattcttg

SEQ ID NO: 3401776 - DNA, 25 bp, Homo sapien
tcagctacacaaaacttatagagag

SEQ ID NO: 3401777 - DNA, 25 bp, Homo sapien
cctttattcttggttcagctacaca

SEQ ID NO: 3401778 - DNA, 25 bp, Homo sapien
ctgtagaaatctgcgcatgccttta

SEQ ID NO: 3401779 - DNA, 25 bp, Homo sapien
aacggagagctttgtagataaattg

SEQ ID NO: 3401780 - DNA, 25 bp, Homo sapien
cttctctgcgcactgtggacccaat

SEQ ID NO: 3401781 - DNA, 25 bp, Homo sapien
actgtggacccaatcatctaatact

SEQ ID NO: 3401782 - DNA, 25 bp, Homo sapien
tagtaggatacccaatcaggtcatg

SEQ ID NO: 3401783 - DNA, 25 bp, Homo sapien
agaaatcaagggcagccccagtggt

SEQ ID NO: 3401784 - DNA, 25 bp, Homo sapien
agtcccgcactgtgcgccggcactc

SEQ ID NO: 3401785 - DNA, 25 bp, Homo sapien
taaggctcagtgagaaatcaagggc

SEQ ID NO: 3401786 - DNA, 25 bp, Homo sapien
ctcagtgagaaatcaagggcagccc

SEQ ID NO: 3401787 - DNA, 25 bp, Homo sapien
gatggcaaaaggatgtagaggctct

SEQ ID NO: 3401788 - DNA, 25 bp, Homo sapien
gcaaaaggatgtagaggctctctga

SEQ ID NO: 3401789 - DNA, 25 bp, Homo sapien
tctgaagacatgaatcgtcctgaga

SEQ ID NO: 3401790 - DNA, 25 bp, Homo sapien
acatgaatcgtcctgagatgccacc

SEQ ID NO: 3401791 - DNA, 25 bp, Homo sapien
ttctcgactttcgtgggcatcaagg

SEQ ID NO: 3401792 - DNA, 25 bp, Homo sapien
aggaactcttaggcccacacgaggc

SEQ ID NO: 3401793 - DNA, 25 bp, Homo sapien
ctgccactgcgccagagtggagtgt

SEQ ID NO: 3401794 - DNA, 25 bp, Homo sapien
cttgatttgtgccttctcgactttc

SEQ ID NO: 3401795 - DNA, 25 bp, Homo sapien
cgccttctatgtagtggttctagag

SEQ ID NO: 3401796 - DNA, 25 bp, Homo sapien
agcagtagcgccgccttctatgtag

SEQ ID NO: 3401797 - DNA, 25 bp, Homo sapien
acacagcagtagcgccgccttctat

SEQ ID NO: 3401798 - DNA, 25 bp, Homo sapien
tggttctagagtgtggcaatctgga

SEQ ID NO: 3401799 - DNA, 25 bp, Homo sapien
ggatttggctctcacaggtcataca

SEQ ID NO: 3401800 - DNA, 25 bp, Homo sapien
taaatgagtcgcatgtgctccagag

SEQ ID NO: 3401801 - DNA, 25 bp, Homo sapien
tgaagcctctcatagacattccggt

SEQ ID NO: 3401802 - DNA, 25 bp, Homo sapien
ctcagtgactatggcgaagggtgca

SEQ ID NO: 3401803 - DNA, 25 bp, Homo sapien
tcattgtctggagttccgtcatctg

SEQ ID NO: 3401804 - DNA, 25 bp, Homo sapien
ttcatcatctggagtgccacctgaa

SEQ ID NO: 3401805 - DNA, 25 bp, Homo sapien
catcatctggagtgccacctgaatt

SEQ ID NO: 3401806 - DNA, 25 bp, Homo sapien
accccagttcattgtctggagttcc

SEQ ID NO: 3401807 - DNA, 25 bp, Homo sapien
tgaggcagcccaggaggggcgttgg

SEQ ID NO: 3401808 - DNA, 25 bp, Homo sapien
tgtgaggcagcccaggaggggcgtt

SEQ ID NO: 3401809 - DNA, 25 bp, Homo sapien
ggtgtgaggcagcccaggaggggcg

SEQ ID NO: 3401810 - DNA, 25 bp, Homo sapien
aggcagcccaggaggggcgttgggc

SEQ ID NO: 3401811 - DNA, 25 bp, Homo sapien
agcagtctgtgtttttagcctccct

SEQ ID NO: 3401812 - DNA, 25 bp, Homo sapien
cacagctacgacttcatccatgatg

SEQ ID NO: 3401813 - DNA, 25 bp, Homo sapien
ggaaaattggaaagtcagcagtctg

SEQ ID NO: 3401814 - DNA, 25 bp, Homo sapien
tgtgaaacgccctcgtttcttaggc

SEQ ID NO: 3401815 - DNA, 25 bp, Homo sapien
agtgcagccgccagtcaccgcgcac

SEQ ID NO: 3401816 - DNA, 25 bp, Homo sapien
gctatccttgtcctgaccggcgcca

SEQ ID NO: 3401817 - DNA, 25 bp, Homo sapien
ttctccaaacccactacccgcacta

SEQ ID NO: 3401818 - DNA, 25 bp, Homo sapien
tacccgcactattacacctccagct

SEQ ID NO: 3401819 - DNA, 25 bp, Homo sapien
caggatgccataattgcggtaaagc

SEQ ID NO: 3401820 - DNA, 25 bp, Homo sapien
aggatgccataattgcggtaaagct

SEQ ID NO: 3401821 - DNA, 25 bp, Homo sapien
ccaggatgccataattgcggtaaag

SEQ ID NO: 3401822 - DNA, 25 bp, Homo sapien
ggatgccataattgcggtaaagctc

SEQ ID NO: 3401823 - DNA, 25 bp, Homo sapien
tctgcacttagaatttgtcatctgc

SEQ ID NO: 3401824 - DNA, 25 bp, Homo sapien
tggcagttacatgagaagatgatag

SEQ ID NO: 3401825 - DNA, 25 bp, Homo sapien
tgtgtgtgtatgataaagttccctt

SEQ ID NO: 3401826 - DNA, 25 bp, Homo sapien
ggactggaagatttgaggtattaaa

SEQ ID NO: 3401827 - DNA, 25 bp, Homo sapien
tttgagttgggggagatggatgagt

SEQ ID NO: 3401828 - DNA, 25 bp, Homo sapien
ttttgagttgggggagatggatgag

SEQ ID NO: 3401829 - DNA, 25 bp, Homo sapien
ttcccaattccgttctccctccatc

SEQ ID NO: 3401830 - DNA, 25 bp, Homo sapien
cccaattccgttctccctccatctt

SEQ ID NO: 3401831 - DNA, 25 bp, Homo sapien
tcccaattccgttctccctccatct

SEQ ID NO: 3401832 - DNA, 25 bp, Homo sapien
cttcccaattccgttctccctccat

SEQ ID NO: 3401833 - DNA, 25 bp, Homo sapien
catccaatatcacttgataggcatc

SEQ ID NO: 3401834 - DNA, 25 bp, Homo sapien
tcctcacagaggtctaactgtgcat

SEQ ID NO: 3401835 - DNA, 25 bp, Homo sapien
cggaataaattgagctgctaatcgc

SEQ ID NO: 3401836 - DNA, 25 bp, Homo sapien
agaatcagccaattctggaaaatgc

SEQ ID NO: 3401837 - DNA, 25 bp, Homo sapien
tatatctgccactcgaggaagattt

SEQ ID NO: 3401838 - DNA, 25 bp, Homo sapien
actcgaggaagattttctccagtgg

SEQ ID NO: 3401839 - DNA, 25 bp, Homo sapien
gccactcgaggaagattttctccag

SEQ ID NO: 3401840 - DNA, 25 bp, Homo sapien
tctgccactcgaggaagattttctc

SEQ ID NO: 3401841 - DNA, 25 bp, Homo sapien
tttaaatatacttaatagggcattg

SEQ ID NO: 3401842 - DNA, 25 bp, Homo sapien
atatacttaatagggcattgttcac

SEQ ID NO: 3401843 - DNA, 25 bp, Homo sapien
taaatatacttaatagggcattgtt

SEQ ID NO: 3401844 - DNA, 25 bp, Homo sapien
gggcattgttcactaggttaaattc

SEQ ID NO: 3401845 - DNA, 25 bp, Homo sapien
tcgttctctaacaatgtcctctcct

SEQ ID NO: 3401846 - DNA, 25 bp, Homo sapien
tatttggctgaacaacccacctaaa

SEQ ID NO: 3401847 - DNA, 25 bp, Homo sapien
aattgctcgttctctaacaatgtcc

SEQ ID NO: 3401848 - DNA, 25 bp, Homo sapien
gaaaggaatttaattgctcgttctc

SEQ ID NO: 3401849 - DNA, 25 bp, Homo sapien
ggtctgttctaggtcggcctgttca

SEQ ID NO: 3401850 - DNA, 25 bp, Homo sapien
ttctaggtcggcctgttcagccacc

SEQ ID NO: 3401851 - DNA, 25 bp, Homo sapien
tctgttctaggtcggcctgttcagc

SEQ ID NO: 3401852 - DNA, 25 bp, Homo sapien
tgaaggtctgttctaggtcggcctg

SEQ ID NO: 3401853 - DNA, 25 bp, Homo sapien
tagccgagtgtgatagtgcatgact

SEQ ID NO: 3401854 - DNA, 25 bp, Homo sapien
gaccaagcatccctcatctgaaaat

SEQ ID NO: 3401855 - DNA, 25 bp, Homo sapien
gatgctcaaacatcacgctcaaagg

SEQ ID NO: 3401856 - DNA, 25 bp, Homo sapien
tatatatagctaataccgggtgtgt

SEQ ID NO: 3401857 - DNA, 25 bp, Homo sapien
tgaagaccccttatatactttactg

SEQ ID NO: 3401858 - DNA, 25 bp, Homo sapien
tctggagcattggaacatctataca

SEQ ID NO: 3401859 - DNA, 25 bp, Homo sapien
tttactgcaaagtcatctggagcat

SEQ ID NO: 3401860 - DNA, 25 bp, Homo sapien
ggagcattggaacatctatacattt

SEQ ID NO: 3401861 - DNA, 25 bp, Homo sapien
ttaaatttttcctcgcaaattgatc

SEQ ID NO: 3401862 - DNA, 25 bp, Homo sapien
taaatttttcctcgcaaattgatct

SEQ ID NO: 3401863 - DNA, 25 bp, Homo sapien
ttttcctcgcaaattgatctgctgc

SEQ ID NO: 3401864 - DNA, 25 bp, Homo sapien
tttttcctcgcaaattgatctgctg

SEQ ID NO: 3401865 - DNA, 25 bp, Homo sapien
gacacttttgcaggtaatgatacca

SEQ ID NO: 3401866 - DNA, 25 bp, Homo sapien
agacattattctttagccctccaga

SEQ ID NO: 3401867 - DNA, 25 bp, Homo sapien
gatgctttcctaggcgttttcctgc

SEQ ID NO: 3401868 - DNA, 25 bp, Homo sapien
atcagaagggcccaaataaggactt

SEQ ID NO: 3401869 - DNA, 25 bp, Homo sapien
gtcgaaaaacaaatattcgctcaaa

SEQ ID NO: 3401870 - DNA, 25 bp, Homo sapien
aaatgcattgtcgaaaaacaaatat

SEQ ID NO: 3401871 - DNA, 25 bp, Homo sapien
aatattcgctcaaatattatagcag

SEQ ID NO: 3401872 - DNA, 25 bp, Homo sapien
gcattgtcgaaaaacaaatattcgc

SEQ ID NO: 3401873 - DNA, 25 bp, Homo sapien
taccgaggttagggagaacctgctc

SEQ ID NO: 3401874 - DNA, 25 bp, Homo sapien
ccaactgtatatcaagaccttccac

SEQ ID NO: 3401875 - DNA, 25 bp, Homo sapien
tccactggggtagtcaaggtaccga

SEQ ID NO: 3401876 - DNA, 25 bp, Homo sapien
cacaaaccttgtggaatggacattt

SEQ ID NO: 3401877 - DNA, 25 bp, Homo sapien
taattgaatccatgaagcagtccta

SEQ ID NO: 3401878 - DNA, 25 bp, Homo sapien
taaactgctcccttagaaatcggat

SEQ ID NO: 3401879 - DNA, 25 bp, Homo sapien
tgccttatcagtgctaaagctgaaa

SEQ ID NO: 3401880 - DNA, 25 bp, Homo sapien
tctagggagattactggctggccat

SEQ ID NO: 3401881 - DNA, 25 bp, Homo sapien
tccatgtcaccacaaaatgaactca

SEQ ID NO: 3401882 - DNA, 25 bp, Homo sapien
ttccatgtcaccacaaaatgaactc

SEQ ID NO: 3401883 - DNA, 25 bp, Homo sapien
taggcacttacagataaaggcactg

SEQ ID NO: 3401884 - DNA, 25 bp, Homo sapien
tcagtatcagtgctataacaaccca

SEQ ID NO: 3401885 - DNA, 25 bp, Homo sapien
caacatgtggcctaggaagctaaca

SEQ ID NO: 3401886 - DNA, 25 bp, Homo sapien
gatgctctgagagttagggtaacct

SEQ ID NO: 3401887 - DNA, 25 bp, Homo sapien
cggcccaactggtgaaaactgtaca

SEQ ID NO: 3401888 - DNA, 25 bp, Homo sapien
tccacataactgaactgtagcttgg

SEQ ID NO: 3401889 - DNA, 25 bp, Homo sapien
gggttcttcattaccagcattctct

SEQ ID NO: 3401890 - DNA, 25 bp, Homo sapien
aatctggaagttttcggcccaactg

SEQ ID NO: 3401891 - DNA, 25 bp, Homo sapien
tgatctcatcgcccagacaggagtg

SEQ ID NO: 3401892 - DNA, 25 bp, Homo sapien
tgcggaggcatgactgcagctgacc

SEQ ID NO: 3401893 - DNA, 25 bp, Homo sapien
gtcatatgtttacaaacatgcccat

SEQ ID NO: 3401894 - DNA, 25 bp, Homo sapien
tgcagctgaccgtaacctcgagctc

SEQ ID NO: 3401895 - DNA, 25 bp, Homo sapien
ttaccctggagagctaagcgaagtt

SEQ ID NO: 3401896 - DNA, 25 bp, Homo sapien
taccctggagagctaagcgaagttg

SEQ ID NO: 3401897 - DNA, 25 bp, Homo sapien
gagtaaggtcacatgcacatagaag

SEQ ID NO: 3401898 - DNA, 25 bp, Homo sapien
tcccttgacaggttagaatgtagct

SEQ ID NO: 3401899 - DNA, 25 bp, Homo sapien
gcgtattcctattgcttgactctaa

SEQ ID NO: 3401900 - DNA, 25 bp, Homo sapien
caaattgccaataacttctatgagg

SEQ ID NO: 3401901 - DNA, 25 bp, Homo sapien
tttcaatgcaacgactttaatcttg

SEQ ID NO: 3401902 - DNA, 25 bp, Homo sapien
tattttcaatgcaacgactttaatc

SEQ ID NO: 3401903 - DNA, 25 bp, Homo sapien
gttattttcaatgcaacgactttaa

SEQ ID NO: 3401904 - DNA, 25 bp, Homo sapien
ttttcaatgcaacgactttaatctt

SEQ ID NO: 3401905 - DNA, 25 bp, Homo sapien
ccaaatttagcattggcaggggggt

SEQ ID NO: 3401906 - DNA, 25 bp, Homo sapien
tgtataccaattttggtgatgctaa

SEQ ID NO: 3401907 - DNA, 25 bp, Homo sapien
accaattttggtgatgctaatgtta

SEQ ID NO: 3401908 - DNA, 25 bp, Homo sapien
ttagcattggcaggggggttgtata

SEQ ID NO: 3401909 - DNA, 25 bp, Homo sapien
ccaggatagtgttactgtgctctta

SEQ ID NO: 3401910 - DNA, 25 bp, Homo sapien
tttccaggatagtgttactgtgctc

SEQ ID NO: 3401911 - DNA, 25 bp, Homo sapien
tacaggtttccaggatagtgttact

SEQ ID NO: 3401912 - DNA, 25 bp, Homo sapien
ggtttccaggatagtgttactgtgc

SEQ ID NO: 3401913 - DNA, 25 bp, Homo sapien
gaacctgaagttgtatcttcactgg

SEQ ID NO: 3401914 - DNA, 25 bp, Homo sapien
taaagttgcccaaattgctgctata

SEQ ID NO: 3401915 - DNA, 25 bp, Homo sapien
tttttggtcctgctgaagatttctt

SEQ ID NO: 3401916 - DNA, 25 bp, Homo sapien
ccactgggagggttataaatctgcc

SEQ ID NO: 3401917 - DNA, 25 bp, Homo sapien
tcaacagccctagttctccaagcta

SEQ ID NO: 3401918 - DNA, 25 bp, Homo sapien
gcatgttcaatacagtcagcccaga

SEQ ID NO: 3401919 - DNA, 25 bp, Homo sapien
cacaatttctgcctaatctctcata

SEQ ID NO: 3401920 - DNA, 25 bp, Homo sapien
cattggatagaaccatgacactgta

SEQ ID NO: 3401921 - DNA, 25 bp, Homo sapien
tacttttgattcgacagccgtggga

SEQ ID NO: 3401922 - DNA, 25 bp, Homo sapien
cctgagggagaatgcacagaatgcc

SEQ ID NO: 3401923 - DNA, 25 bp, Homo sapien
gaagctatacccatccctgagggag

SEQ ID NO: 3401924 - DNA, 25 bp, Homo sapien
tggactggtatgaagctctcctggc

SEQ ID NO: 3401925 - DNA, 25 bp, Homo sapien
ggaaactttgtgcactggaaggaaa

SEQ ID NO: 3401926 - DNA, 25 bp, Homo sapien
tatatgtttatgaatgcaccgggaa

SEQ ID NO: 3401927 - DNA, 25 bp, Homo sapien
aataaacttggatactgagaactgc

SEQ ID NO: 3401928 - DNA, 25 bp, Homo sapien
gaaccaataccatgtttgtaaagca

SEQ ID NO: 3401929 - DNA, 25 bp, Homo sapien
tactagggtgatgtcttgatgtctt

SEQ ID NO: 3401930 - DNA, 25 bp, Homo sapien
aataccttttcagtcaattttgcaa

SEQ ID NO: 3401931 - DNA, 25 bp, Homo sapien
tttttgccattatgtcttactaggg

SEQ ID NO: 3401932 - DNA, 25 bp, Homo sapien
ccttttcagtcaattttgcaatcaa

SEQ ID NO: 3401933 - DNA, 25 bp, Homo sapien
gatcgaagttatcacaaggctggac

SEQ ID NO: 3401934 - DNA, 25 bp, Homo sapien
gaatgtacagttatcagctcagggt

SEQ ID NO: 3401935 - DNA, 25 bp, Homo sapien
tgaagcacgtaaggcaaggtaccga

SEQ ID NO: 3401936 - DNA, 25 bp, Homo sapien
aatggtcctcaaaggtgtcgtccca

SEQ ID NO: 3401937 - DNA, 25 bp, Homo sapien
tcagtagagtcttccccgactacga

SEQ ID NO: 3401938 - DNA, 25 bp, Homo sapien
tccccgactacgatttcctcgtgtg

SEQ ID NO: 3401939 - DNA, 25 bp, Homo sapien
tcgtgtgccccaacctcggccacct

SEQ ID NO: 3401940 - DNA, 25 bp, Homo sapien
actacgatttcctcgtgtgccccaa

SEQ ID NO: 3401941 - DNA, 25 bp, Homo sapien
taataacggattcagcctcaaaagg

SEQ ID NO: 3401942 - DNA, 25 bp, Homo sapien
tccccggcaatccaatgagtagtag

SEQ ID NO: 3401943 - DNA, 25 bp, Homo sapien
gataatcaccgtgtcagactacccg

SEQ ID NO: 3401944 - DNA, 25 bp, Homo sapien
taggtaggaatgctgcaccactgcc

SEQ ID NO: 3401945 - DNA, 25 bp, Homo sapien
tcctgtagaaacctgtatgtacatc

SEQ ID NO: 3401946 - DNA, 25 bp, Homo sapien
ggtagccctggttattaaatctcca

SEQ ID NO: 3401947 - DNA, 25 bp, Homo sapien
tgtaaattataccatctcttcctgt

SEQ ID NO: 3401948 - DNA, 25 bp, Homo sapien
ggtaccatgttatcaagtcactttt

SEQ ID NO: 3401949 - DNA, 25 bp, Homo sapien
aaagcaggaaagatccaaaattgac

SEQ ID NO: 3401950 - DNA, 25 bp, Homo sapien
aggaaagatccaaaattgacaccct

SEQ ID NO: 3401951 - DNA, 25 bp, Homo sapien
agcaggaaagatccaaaattgacac

SEQ ID NO: 3401952 - DNA, 25 bp, Homo sapien
caggaaagatccaaaattgacaccc

SEQ ID NO: 3401953 - DNA, 25 bp, Homo sapien
ggaagctagtctccggcgcccgcca

SEQ ID NO: 3401954 - DNA, 25 bp, Homo sapien
gcccgccatcttgaagaggtcggcc

SEQ ID NO: 3401955 - DNA, 25 bp, Homo sapien
gctcacaccggaagcggaagctagt

SEQ ID NO: 3401956 - DNA, 25 bp, Homo sapien
cgggccgctcacaccggaagcggaa

SEQ ID NO: 3401957 - DNA, 25 bp, Homo sapien
ctgctggattttcccgtcctccgtg

SEQ ID NO: 3401958 - DNA, 25 bp, Homo sapien
ccagtgcgtggtggcgaaggcccct

SEQ ID NO: 3401959 - DNA, 25 bp, Homo sapien
gtcctccgtgacgacccagtgcgtg

SEQ ID NO: 3401960 - DNA, 25 bp, Homo sapien
agcaaggcggcagctcgtaccggcc

SEQ ID NO: 3401961 - DNA, 25 bp, Homo sapien
tgttcgaagtcagtaagtttaccaa

SEQ ID NO: 3401962 - DNA, 25 bp, Homo sapien
tgtcctcaagtgttcgaagtcagta

SEQ ID NO: 3401963 - DNA, 25 bp, Homo sapien
gtttgctagacacttcaagattgtc

SEQ ID NO: 3401964 - DNA, 25 bp, Homo sapien
gacacttcaagattgtcctcaagtg

SEQ ID NO: 3401965 - DNA, 25 bp, Homo sapien
ttcacagggatggaatgacgcaggc

SEQ ID NO: 3401966 - DNA, 25 bp, Homo sapien
tcttgagagagatacgcatgggctc

SEQ ID NO: 3401967 - DNA, 25 bp, Homo sapien
caaatgattgtctaagagacccttc

SEQ ID NO: 3401968 - DNA, 25 bp, Homo sapien
tacaggttcgcaaaaatagcagccc

SEQ ID NO: 3401969 - DNA, 25 bp, Homo sapien
cctcgtgtattcacttatagagaaa

SEQ ID NO: 3401970 - DNA, 25 bp, Homo sapien
tgtatttttccctcgtgtattcact

SEQ ID NO: 3401971 - DNA, 25 bp, Homo sapien
gataaggaccaaggtagaacatctc

SEQ ID NO: 3401972 - DNA, 25 bp, Homo sapien
ggaccaaggtagaacatctcaaaaa

SEQ ID NO: 3401973 - DNA, 25 bp, Homo sapien
ctgcgtcaggccatgaatacatttc

SEQ ID NO: 3401974 - DNA, 25 bp, Homo sapien
gctgcgtcaggccatgaatacattt

SEQ ID NO: 3401975 - DNA, 25 bp, Homo sapien
tgcgtcaggccatgaatacatttca

SEQ ID NO: 3401976 - DNA, 25 bp, Homo sapien
ctgctgcgtcaggccatgaatacat

SEQ ID NO: 3401977 - DNA, 25 bp, Homo sapien
acttgctttcaggtatatgctaggc

SEQ ID NO: 3401978 - DNA, 25 bp, Homo sapien
gggacgcaagcaaatgatttctaaa

SEQ ID NO: 3401979 - DNA, 25 bp, Homo sapien
gaccagtctatgactaactgtatgg

SEQ ID NO: 3401980 - DNA, 25 bp, Homo sapien
catctataaactgaagggacgcaag

SEQ ID NO: 3401981 - DNA, 25 bp, Homo sapien
ctgactggtgcgaggtagtatctta

SEQ ID NO: 3401982 - DNA, 25 bp, Homo sapien
taatcagtacaggaactgctggatc

SEQ ID NO: 3401983 - DNA, 25 bp, Homo sapien
tctgcagcccttacaatttgcccaa

SEQ ID NO: 3401984 - DNA, 25 bp, Homo sapien
tagggcatcttattactactgtggc

SEQ ID NO: 3401985 - DNA, 25 bp, Homo sapien
gtctcattaatatgactaggtcatg

SEQ ID NO: 3401986 - DNA, 25 bp, Homo sapien
taggtcatgaggatgcttcaagttc

SEQ ID NO: 3401987 - DNA, 25 bp, Homo sapien
actaggtcatgaggatgcttcaagt

SEQ ID NO: 3401988 - DNA, 25 bp, Homo sapien
aggtcatgaggatgcttcaagttca

SEQ ID NO: 3401989 - DNA, 25 bp, Homo sapien
gcaccttggctttgatgcagtctgg

SEQ ID NO: 3401990 - DNA, 25 bp, Homo sapien
tatgtctctgttccagtcctgtgtc

SEQ ID NO: 3401991 - DNA, 25 bp, Homo sapien
gctctccaaagttatgtatgtgcca

SEQ ID NO: 3401992 - DNA, 25 bp, Homo sapien
gtatgtgccatcatatagatccagg

SEQ ID NO: 3401993 - DNA, 25 bp, Homo sapien
gaagcttacccttattacagaaata

SEQ ID NO: 3401994 - DNA, 25 bp, Homo sapien
actcatctgtgattgaagcttaccc

SEQ ID NO: 3401995 - DNA, 25 bp, Homo sapien
attttcaaattcgaaaactcatctg

SEQ ID NO: 3401996 - DNA, 25 bp, Homo sapien
tctactgtggtgttaaatattttaa

SEQ ID NO: 3401997 - DNA, 25 bp, Homo sapien
gttctagaattttagtacaatcagg

SEQ ID NO: 3401998 - DNA, 25 bp, Homo sapien
gagggacaggagattctgtgtctat

SEQ ID NO: 3401999 - DNA, 25 bp, Homo sapien
catgtatactatatggaagttctag

SEQ ID NO: 3402000 - DNA, 25 bp, Homo sapien
ttttagtacaatcaggttgctctgg

SEQ ID NO: 3402001 - DNA, 25 bp, Homo sapien
cttctttaggtagcagaggtgcaga

SEQ ID NO: 3402002 - DNA, 25 bp, Homo sapien
cctaaccgtttagataaatatgtga

SEQ ID NO: 3402003 - DNA, 25 bp, Homo sapien
gccttcatgaatgaggtgacctatg

SEQ ID NO: 3402004 - DNA, 25 bp, Homo sapien
gacctatgtcatctatactccttcc

SEQ ID NO: 3402005 - DNA, 25 bp, Homo sapien
cctgggaaaggagactagtctatcc

SEQ ID NO: 3402006 - DNA, 25 bp, Homo sapien
gcccgctggctctttaagtgactga

SEQ ID NO: 3402007 - DNA, 25 bp, Homo sapien
tccggataggataaccccaactgct

SEQ ID NO: 3402008 - DNA, 25 bp, Homo sapien
gagcagaaacggtccaaagtggtac

SEQ ID NO: 3402009 - DNA, 25 bp, Homo sapien
aaagttctacatgaactactgaaga

SEQ ID NO: 3402010 - DNA, 25 bp, Homo sapien
ctgaagagatcatgataagttaaat

SEQ ID NO: 3402011 - DNA, 25 bp, Homo sapien
tatatatcatagcatactggaggta

SEQ ID NO: 3402012 - DNA, 25 bp, Homo sapien
tatatcatagcatactggaggtaag

SEQ ID NO: 3402013 - DNA, 25 bp, Homo sapien
catcagctgagcacgtgcattaggg

SEQ ID NO: 3402014 - DNA, 25 bp, Homo sapien
ccaactccagcttattccaagaggg

SEQ ID NO: 3402015 - DNA, 25 bp, Homo sapien
gaaactatacctgtcagaagagcat

SEQ ID NO: 3402016 - DNA, 25 bp, Homo sapien
gtgaaggcacaaaccaacaggctta

SEQ ID NO: 3402017 - DNA, 25 bp, Homo sapien
gttatacagtacccacgaggaagtg

SEQ ID NO: 3402018 - DNA, 25 bp, Homo sapien
ttatacagtacccacgaggaagtgt

SEQ ID NO: 3402019 - DNA, 25 bp, Homo sapien
tatacagtacccacgaggaagtgtt

SEQ ID NO: 3402020 - DNA, 25 bp, Homo sapien
taattctccagtaaaatgaagccat

SEQ ID NO: 3402021 - DNA, 25 bp, Homo sapien
tggaagagaagtgaagtgctcgcat

SEQ ID NO: 3402022 - DNA, 25 bp, Homo sapien
tctactacctgatatggctcattct

SEQ ID NO: 3402023 - DNA, 25 bp, Homo sapien
gaagtgctcgcatggcacattctac

SEQ ID NO: 3402024 - DNA, 25 bp, Homo sapien
tcctgaggaatgtggaaaatcaggt

SEQ ID NO: 3402025 - DNA, 25 bp, Homo sapien
cctgaggaatgtggaaaatcaggtc

SEQ ID NO: 3402026 - DNA, 25 bp, Homo sapien
catattccatgattatgtagaacca

SEQ ID NO: 3402027 - DNA, 25 bp, Homo sapien
catgattatgtagaaccacttgaca

SEQ ID NO: 3402028 - DNA, 25 bp, Homo sapien
taggaaactaagatataggtggaga

SEQ ID NO: 3402029 - DNA, 25 bp, Homo sapien
gcagcacatattccatgattatgta

SEQ ID NO: 3402030 - DNA, 25 bp, Homo sapien
ggttgaccagggcaatgtctttatt

SEQ ID NO: 3402031 - DNA, 25 bp, Homo sapien
tgtagaacgtttgccaggttgacca

SEQ ID NO: 3402032 - DNA, 25 bp, Homo sapien
attccccaaagtgtaatagctggtg

SEQ ID NO: 3402033 - DNA, 25 bp, Homo sapien
agagctgcatggaccacgacagcag

SEQ ID NO: 3402034 - DNA, 25 bp, Homo sapien
ctataggatggtttagttggcaggt

SEQ ID NO: 3402035 - DNA, 25 bp, Homo sapien
gaccattattttgatcagtgaccag

SEQ ID NO: 3402036 - DNA, 25 bp, Homo sapien
ccagatccctacaatattaaggcat

SEQ ID NO: 3402037 - DNA, 25 bp, Homo sapien
acacctacctcttactctacagtga

SEQ ID NO: 3402038 - DNA, 25 bp, Homo sapien
ctgcaaagcgtggtcataacagagc

SEQ ID NO: 3402039 - DNA, 25 bp, Homo sapien
ctctttatagcttgctcaaacccag

SEQ ID NO: 3402040 - DNA, 25 bp, Homo sapien
gacataggacagcatgcttcctctt

SEQ ID NO: 3402041 - DNA, 25 bp, Homo sapien
tcctctttatagcttgctcaaaccc

SEQ ID NO: 3402042 - DNA, 25 bp, Homo sapien
ctttatagcttgctcaaacccaggt

SEQ ID NO: 3402043 - DNA, 25 bp, Homo sapien
gccatctgagtctcatgaatgatat

SEQ ID NO: 3402044 - DNA, 25 bp, Homo sapien
cctgctgtctcaggtagtggtcatg

SEQ ID NO: 3402045 - DNA, 25 bp, Homo sapien
atttcttaagatttgctcctcctga

SEQ ID NO: 3402046 - DNA, 25 bp, Homo sapien
catgctgcttttgatactcttttaa

SEQ ID NO: 3402047 - DNA, 25 bp, Homo sapien
taaactatgctgctggttgaccagt

SEQ ID NO: 3402048 - DNA, 25 bp, Homo sapien
ggctggtcccactggcaatgtaaac

SEQ ID NO: 3402049 - DNA, 25 bp, Homo sapien
tatctccacgatgatagcgtacagg

SEQ ID NO: 3402050 - DNA, 25 bp, Homo sapien
tgctggttgaccagtcggcatatct

SEQ ID NO: 3402051 - DNA, 25 bp, Homo sapien
taaagatctaaatgacaatcacaaa

SEQ ID NO: 3402052 - DNA, 25 bp, Homo sapien
atacctggccaatttatatatgttt

SEQ ID NO: 3402053 - DNA, 25 bp, Homo sapien
gcaaacgtttataagaattagactg

SEQ ID NO: 3402054 - DNA, 25 bp, Homo sapien
gaattagactggaccaagaaaaaga

SEQ ID NO: 3402055 - DNA, 25 bp, Homo sapien
aattctggctgtacttgctgtctgt

SEQ ID NO: 3402056 - DNA, 25 bp, Homo sapien
tgtggtttgtcctcctatagatgct

SEQ ID NO: 3402057 - DNA, 25 bp, Homo sapien
gctggaaatttctgtatctacgatt

SEQ ID NO: 3402058 - DNA, 25 bp, Homo sapien
taagcatcccaatcaaaaaatgtga

SEQ ID NO: 3402059 - DNA, 25 bp, Homo sapien
gaccgaatcattgatatcactctga

SEQ ID NO: 3402060 - DNA, 25 bp, Homo sapien
ggagaagacttgaccgaatcattga

SEQ ID NO: 3402061 - DNA, 25 bp, Homo sapien
tccagagaatagaatgggctacggg

SEQ ID NO: 3402062 - DNA, 25 bp, Homo sapien
tagaatgggctacgggagaagactt

SEQ ID NO: 3402063 - DNA, 25 bp, Homo sapien
tctgctcttttaggccatagaatat

SEQ ID NO: 3402064 - DNA, 25 bp, Homo sapien
tcttttaggccatagaatatgctgt

SEQ ID NO: 3402065 - DNA, 25 bp, Homo sapien
ttggcaattccccaccaacagggac

SEQ ID NO: 3402066 - DNA, 25 bp, Homo sapien
gactctagggtagctttctgtacaa

SEQ ID NO: 3402067 - DNA, 25 bp, Homo sapien
ctgagtcctttgttttccggaggca

SEQ ID NO: 3402068 - DNA, 25 bp, Homo sapien
gagtcctttgttttccggaggcaga

SEQ ID NO: 3402069 - DNA, 25 bp, Homo sapien
tgagtcctttgttttccggaggcag

SEQ ID NO: 3402070 - DNA, 25 bp, Homo sapien
ctggtgctctcaaagaaccgctaga

SEQ ID NO: 3402071 - DNA, 25 bp, Homo sapien
gaaccgctagatgacaatcatgcag

SEQ ID NO: 3402072 - DNA, 25 bp, Homo sapien
caaagtttgggtgacttcaagataa

SEQ ID NO: 3402073 - DNA, 25 bp, Homo sapien
gcagaatcaggtgctttgccaaatc

SEQ ID NO: 3402074 - DNA, 25 bp, Homo sapien
ttctgaagtcagttatggaacagtc

SEQ ID NO: 3402075 - DNA, 25 bp, Homo sapien
ttctgtagaataatcatcactgctg

SEQ ID NO: 3402076 - DNA, 25 bp, Homo sapien
ttgactaagtaggacagagtgtggc

SEQ ID NO: 3402077 - DNA, 25 bp, Homo sapien
ttggctttcagatccatgcgaacct

SEQ ID NO: 3402078 - DNA, 25 bp, Homo sapien
ggtgatctacgtatagcagccccga

SEQ ID NO: 3402079 - DNA, 25 bp, Homo sapien
taatagcatgactgacttcgccatc

SEQ ID NO: 3402080 - DNA, 25 bp, Homo sapien
cctggaggatgcaaagctaactttt

SEQ ID NO: 3402081 - DNA, 25 bp, Homo sapien
ctcatataaggtcacagcagggttg

SEQ ID NO: 3402082 - DNA, 25 bp, Homo sapien
gtatagttattaatacgggaaagca

SEQ ID NO: 3402083 - DNA, 25 bp, Homo sapien
tctgggatagtatagttattaatac

SEQ ID NO: 3402084 - DNA, 25 bp, Homo sapien
tatagttattaatacgggaaagcaa

SEQ ID NO: 3402085 - DNA, 25 bp, Homo sapien
gatagtatagttattaatacgggaa

SEQ ID NO: 3402086 - DNA, 25 bp, Homo sapien
cctactgctctccagtatagtccag

SEQ ID NO: 3402087 - DNA, 25 bp, Homo sapien
agtccagcttcattgagtatgagcc

SEQ ID NO: 3402088 - DNA, 25 bp, Homo sapien
tgaagacaggcaatagcaaaagtgc

SEQ ID NO: 3402089 - DNA, 25 bp, Homo sapien
gtatgagccagataggagcatttgg

SEQ ID NO: 3402090 - DNA, 25 bp, Homo sapien
tggcatcaagatgaaggccgtaatg

SEQ ID NO: 3402091 - DNA, 25 bp, Homo sapien
tgaagtagcagcttagtggcatcaa

SEQ ID NO: 3402092 - DNA, 25 bp, Homo sapien
gaacatcttggtattgaagtggagc

SEQ ID NO: 3402093 - DNA, 25 bp, Homo sapien
gccaagttgacaagaggaacatctt

SEQ ID NO: 3402094 - DNA, 25 bp, Homo sapien
atcacatctgttcccactgtaccag

SEQ ID NO: 3402095 - DNA, 25 bp, Homo sapien
aaagtttcaagggaatacggctgca

SEQ ID NO: 3402096 - DNA, 25 bp, Homo sapien
tttgatgtacttctctggcaatgtg

SEQ ID NO: 3402097 - DNA, 25 bp, Homo sapien
cctaagtcccttggctgaaaacagt

SEQ ID NO: 3402098 - DNA, 25 bp, Homo sapien
catttggtggttaatttcaaggcct

SEQ ID NO: 3402099 - DNA, 25 bp, Homo sapien
gatattcttcagagcaaggtaagca

SEQ ID NO: 3402100 - DNA, 25 bp, Homo sapien
tcaaggcctgtctaaaggcctcaag

SEQ ID NO: 3402101 - DNA, 25 bp, Homo sapien
tgcatacagcggatcaacttcaggc

SEQ ID NO: 3402102 - DNA, 25 bp, Homo sapien
gatgagctccctctgaaagaactat

SEQ ID NO: 3402103 - DNA, 25 bp, Homo sapien
tcaagcataagaagttcctggtttc

SEQ ID NO: 3402104 - DNA, 25 bp, Homo sapien
gaagaccacagaatatattccagga

SEQ ID NO: 3402105 - DNA, 25 bp, Homo sapien
catttgaaagatcacagcattctga

SEQ ID NO: 3402106 - DNA, 25 bp, Homo sapien
ggaggtgacctaactagtagcatat

SEQ ID NO: 3402107 - DNA, 25 bp, Homo sapien
gatccttcattgcaggcagtatata

SEQ ID NO: 3402108 - DNA, 25 bp, Homo sapien
tatgctggataatccactggagggc

SEQ ID NO: 3402109 - DNA, 25 bp, Homo sapien
gatgtgataaagcaaagatccttca

SEQ ID NO: 3402110 - DNA, 25 bp, Homo sapien
tcctttgcattggtagaggtagcaa

SEQ ID NO: 3402111 - DNA, 25 bp, Homo sapien
gagtctagtaatacctcataggtcc

SEQ ID NO: 3402112 - DNA, 25 bp, Homo sapien
aaaaatcccgctgaagtccctctat

SEQ ID NO: 3402113 - DNA, 25 bp, Homo sapien
gagaactcaagatcctagttattcc

SEQ ID NO: 3402114 - DNA, 25 bp, Homo sapien
gactgaaggtgggacaatacaggcc

SEQ ID NO: 3402115 - DNA, 25 bp, Homo sapien
tcaatgagggtcgagagagacacta

SEQ ID NO: 3402116 - DNA, 25 bp, Homo sapien
aatacaggccacttgtcagacatgt

SEQ ID NO: 3402117 - DNA, 25 bp, Homo sapien
tctgggcaaactttgggtggataca

SEQ ID NO: 3402118 - DNA, 25 bp, Homo sapien
ttctcaacagagaatacagggtcct

SEQ ID NO: 3402119 - DNA, 25 bp, Homo sapien
tgtcaaaatatttctgtttgtcatg

SEQ ID NO: 3402120 - DNA, 25 bp, Homo sapien
aacagagaatacagggtcctcctct

SEQ ID NO: 3402121 - DNA, 25 bp, Homo sapien
caagtctaagggcatctgagtccct

SEQ ID NO: 3402122 - DNA, 25 bp, Homo sapien
tgagtaatatcaatgggtgccagag

SEQ ID NO: 3402123 - DNA, 25 bp, Homo sapien
ccagagtacttaagattgtggcttc

SEQ ID NO: 3402124 - DNA, 25 bp, Homo sapien
taagattaccaccatacagccgggc

SEQ ID NO: 3402125 - DNA, 25 bp, Homo sapien
ttctgaaggcaagtaaggcacatac

SEQ ID NO: 3402126 - DNA, 25 bp, Homo sapien
aaggcacatgtgagggcattaccaa

SEQ ID NO: 3402127 - DNA, 25 bp, Homo sapien
gaagaataacaggatgagggccata

SEQ ID NO: 3402128 - DNA, 25 bp, Homo sapien
taagatactgaggaaaaggtaggtg

SEQ ID NO: 3402129 - DNA, 25 bp, Homo sapien
gaaagtcacgaagaggatttgttgt

SEQ ID NO: 3402130 - DNA, 25 bp, Homo sapien
ggccatgcctgttgaaattcatcca

SEQ ID NO: 3402131 - DNA, 25 bp, Homo sapien
tccatagcaagagcttctggccact

SEQ ID NO: 3402132 - DNA, 25 bp, Homo sapien
ggacctttcttcagcacccgtattc

SEQ ID NO: 3402133 - DNA, 25 bp, Homo sapien
tccttgtaagtctagacgccgccct

SEQ ID NO: 3402134 - DNA, 25 bp, Homo sapien
ccattctgttgcttcatcatcttca

SEQ ID NO: 3402135 - DNA, 25 bp, Homo sapien
cattctgttgcttcatcatcttcac

SEQ ID NO: 3402136 - DNA, 25 bp, Homo sapien
ttcccaggagttttcttatgatctc

SEQ ID NO: 3402137 - DNA, 25 bp, Homo sapien
ggccagtgatctctaggtttgcttg

SEQ ID NO: 3402138 - DNA, 25 bp, Homo sapien
tttctatctgacctgtttctacttt

SEQ ID NO: 3402139 - DNA, 25 bp, Homo sapien
ggtttgcttggtaacgatgtccatt

SEQ ID NO: 3402140 - DNA, 25 bp, Homo sapien
tccataatgttttagagtttgaaca

SEQ ID NO: 3402141 - DNA, 25 bp, Homo sapien
ctggtttcttgaccacactttgccc

SEQ ID NO: 3402142 - DNA, 25 bp, Homo sapien
actttgcccctttatcatctcatct

SEQ ID NO: 3402143 - DNA, 25 bp, Homo sapien
gaaactggcatattaaacattcaaa

SEQ ID NO: 3402144 - DNA, 25 bp, Homo sapien
gtagttccataatctcatttgcaag

SEQ ID NO: 3402145 - DNA, 25 bp, Homo sapien
agtacattcaatgccctacttgggc

SEQ ID NO: 3402146 - DNA, 25 bp, Homo sapien
gcttaagtgctctcgtatcatctca

SEQ ID NO: 3402147 - DNA, 25 bp, Homo sapien
tcatctcaaccatattcggctttag

SEQ ID NO: 3402148 - DNA, 25 bp, Homo sapien
atggcactttcctggtcttccagtc

SEQ ID NO: 3402149 - DNA, 25 bp, Homo sapien
ctatggcactttcctggtcttccag

SEQ ID NO: 3402150 - DNA, 25 bp, Homo sapien
tatggcactttcctggtcttccagt

SEQ ID NO: 3402151 - DNA, 25 bp, Homo sapien
taggcaatgggaaggcttcaagccc

SEQ ID NO: 3402152 - DNA, 25 bp, Homo sapien
aaagggtcttgtacaccacactagg

SEQ ID NO: 3402153 - DNA, 25 bp, Homo sapien
ttcacaaggatatcataagaggctc

SEQ ID NO: 3402154 - DNA, 25 bp, Homo sapien
gtgatattttagcacggcagagggc

SEQ ID NO: 3402155 - DNA, 25 bp, Homo sapien
acaaatcattacaatacaacaggaa

SEQ ID NO: 3402156 - DNA, 25 bp, Homo sapien
agatatagaacaattgcacagagga

SEQ ID NO: 3402157 - DNA, 25 bp, Homo sapien
gagctagagcgaagatatagaacaa

SEQ ID NO: 3402158 - DNA, 25 bp, Homo sapien
aacaggaaaagagctagagcgaaga

SEQ ID NO: 3402159 - DNA, 25 bp, Homo sapien
tgagaaccataaaagacactagggg

SEQ ID NO: 3402160 - DNA, 25 bp, Homo sapien
tattcagatcccatgctaagtgctt

SEQ ID NO: 3402161 - DNA, 25 bp, Homo sapien
taagttagagacagcaccttgcttt

SEQ ID NO: 3402162 - DNA, 25 bp, Homo sapien
gccgtggcatgatactagctttctg

SEQ ID NO: 3402163 - DNA, 25 bp, Homo sapien
ggtcacctggctagcaactggcaga

SEQ ID NO: 3402164 - DNA, 25 bp, Homo sapien
gccttatgccctggtgattacttca

SEQ ID NO: 3402165 - DNA, 25 bp, Homo sapien
catctctgagtaaagataggtggag

SEQ ID NO: 3402166 - DNA, 25 bp, Homo sapien
gaagagaacccaaagggccttatgc

SEQ ID NO: 3402167 - DNA, 25 bp, Homo sapien
ggaggtgctagtcattcctgtagtc

SEQ ID NO: 3402168 - DNA, 25 bp, Homo sapien
tcccagacgctggtagtcacgtttt

SEQ ID NO: 3402169 - DNA, 25 bp, Homo sapien
cagtcagctctacccagcggagttt

SEQ ID NO: 3402170 - DNA, 25 bp, Homo sapien
ccagcggagtttgaggcattcgtcc

SEQ ID NO: 3402171 - DNA, 25 bp, Homo sapien
aggcattcgtccgggctgggccatc

SEQ ID NO: 3402172 - DNA, 25 bp, Homo sapien
tgactttagttttcccgagcatggg

SEQ ID NO: 3402173 - DNA, 25 bp, Homo sapien
gaagtactggatgaaccgacgtagg

SEQ ID NO: 3402174 - DNA, 25 bp, Homo sapien
gcaagaggaccagctaggaagtact

SEQ ID NO: 3402175 - DNA, 25 bp, Homo sapien
tttttggcctaagcattactggagc

SEQ ID NO: 3402176 - DNA, 25 bp, Homo sapien
tgttaactgactctcccctgtgtag

SEQ ID NO: 3402177 - DNA, 25 bp, Homo sapien
tgcaggctggctcggttggaaaccc

SEQ ID NO: 3402178 - DNA, 25 bp, Homo sapien
gaaaccccatgcaagtggtccaggg

SEQ ID NO: 3402179 - DNA, 25 bp, Homo sapien
gggtggcaaaatctatgtgttctgt

SEQ ID NO: 3402180 - DNA, 25 bp, Homo sapien
caaaactttggcaattcgggtgcca

SEQ ID NO: 3402181 - DNA, 25 bp, Homo sapien
tgttgtggatattggtctttgccga

SEQ ID NO: 3402182 - DNA, 25 bp, Homo sapien
ggtgccaatctgttcaagcgactgt

SEQ ID NO: 3402183 - DNA, 25 bp, Homo sapien
ggtctttgccgagattttgtaatac

SEQ ID NO: 3402184 - DNA, 25 bp, Homo sapien
tgggctatattctgttggtccccta

SEQ ID NO: 3402185 - DNA, 25 bp, Homo sapien
tggatatttctcgaatacagcataa

SEQ ID NO: 3402186 - DNA, 25 bp, Homo sapien
gtccttggtcccttgaatccatctg

SEQ ID NO: 3402187 - DNA, 25 bp, Homo sapien
tggtcccctactatgaacagtatgg

SEQ ID NO: 3402188 - DNA, 25 bp, Homo sapien
gacgaccacctgtacttcagaaaga

SEQ ID NO: 3402189 - DNA, 25 bp, Homo sapien
gccagtgtctagctgacgctctcag

SEQ ID NO: 3402190 - DNA, 25 bp, Homo sapien
tgtgacatcgtatccttgccataac

SEQ ID NO: 3402191 - DNA, 25 bp, Homo sapien
gaaccatcataagtggacgaccacc

SEQ ID NO: 3402192 - DNA, 25 bp, Homo sapien
tgttgcaactgtgaaggcaactggt

SEQ ID NO: 3402193 - DNA, 25 bp, Homo sapien
aagctaacagtctcattgttgcaac

SEQ ID NO: 3402194 - DNA, 25 bp, Homo sapien
tgtcactaccatcaggtagaggata

SEQ ID NO: 3402195 - DNA, 25 bp, Homo sapien
caactggtgaattaacgatgggaca

SEQ ID NO: 3402196 - DNA, 25 bp, Homo sapien
tacttttactacttggctgatacca

SEQ ID NO: 3402197 - DNA, 25 bp, Homo sapien
cataaaattgaaactcctcagggtg

SEQ ID NO: 3402198 - DNA, 25 bp, Homo sapien
gcttgggtctatattcgccattgta

SEQ ID NO: 3402199 - DNA, 25 bp, Homo sapien
caggcctactggtgccaaattgtct

SEQ ID NO: 3402200 - DNA, 25 bp, Homo sapien
tgatttctggcttaatctgtattgg

SEQ ID NO: 3402201 - DNA, 25 bp, Homo sapien
gtgttcacatatgataaatgttcct

SEQ ID NO: 3402202 - DNA, 25 bp, Homo sapien
atatgataaatgttccttccttgtg

SEQ ID NO: 3402203 - DNA, 25 bp, Homo sapien
ggtcaatatccatttccatgctaag

SEQ ID NO: 3402204 - DNA, 25 bp, Homo sapien
gaatggtcttggtacccgtgtggaa

SEQ ID NO: 3402205 - DNA, 25 bp, Homo sapien
gaaatacatatattgtcttaatgct

SEQ ID NO: 3402206 - DNA, 25 bp, Homo sapien
tgcctatgatataaggtaagggtcc

SEQ ID NO: 3402207 - DNA, 25 bp, Homo sapien
tgtacaagttgtttatataatttgg

SEQ ID NO: 3402208 - DNA, 25 bp, Homo sapien
accatttggccatggcagtgcagat

SEQ ID NO: 3402209 - DNA, 25 bp, Homo sapien
gatgtgtcctaagggcttgctgttg

SEQ ID NO: 3402210 - DNA, 25 bp, Homo sapien
tctgcagttggcaatggcgatcttg

SEQ ID NO: 3402211 - DNA, 25 bp, Homo sapien
tgaagggcacagtcgggatgaccat

SEQ ID NO: 3402212 - DNA, 25 bp, Homo sapien
ggctactgtgaatggtatagctatg

SEQ ID NO: 3402213 - DNA, 25 bp, Homo sapien
cgtggagggacataatgaaaatata

SEQ ID NO: 3402214 - DNA, 25 bp, Homo sapien
ttataggatattgtgagcgaatggg

SEQ ID NO: 3402215 - DNA, 25 bp, Homo sapien
ctgcaatccagctatacgtggaggg

SEQ ID NO: 3402216 - DNA, 25 bp, Homo sapien
ttcacatcatgtaaccaaccttcag

SEQ ID NO: 3402217 - DNA, 25 bp, Homo sapien
aacctgttttgacctatctttcatc

SEQ ID NO: 3402218 - DNA, 25 bp, Homo sapien
tgctgtgactaatcatctgttctac

SEQ ID NO: 3402219 - DNA, 25 bp, Homo sapien
tgactaatcatctgttctactgttc

SEQ ID NO: 3402220 - DNA, 25 bp, Homo sapien
acagaggtctaggttggtgctgttt

SEQ ID NO: 3402221 - DNA, 25 bp, Homo sapien
attttgccaataacatacataatga

SEQ ID NO: 3402222 - DNA, 25 bp, Homo sapien
tttgccaataacatacataatgatt

SEQ ID NO: 3402223 - DNA, 25 bp, Homo sapien
gcagggtacagaggtctaggttggt

SEQ ID NO: 3402224 - DNA, 25 bp, Homo sapien
caaggtgatgggattggaggtgtca

SEQ ID NO: 3402225 - DNA, 25 bp, Homo sapien
ggtgatgggattggaggtgtcagcc

SEQ ID NO: 3402226 - DNA, 25 bp, Homo sapien
tacaggcgttgctggctgattttta

SEQ ID NO: 3402227 - DNA, 25 bp, Homo sapien
ctacaggcgttgctggctgattttt

SEQ ID NO: 3402228 - DNA, 25 bp, Homo sapien
taactcaaggtcgtggaagtccgtc

SEQ ID NO: 3402229 - DNA, 25 bp, Homo sapien
gaatggcccctggactaaggtgcga

SEQ ID NO: 3402230 - DNA, 25 bp, Homo sapien
taaggtgcgaactatgtgagggctc

SEQ ID NO: 3402231 - DNA, 25 bp, Homo sapien
aagtccgtccgtgagcctaaaatgg

SEQ ID NO: 3402232 - DNA, 25 bp, Homo sapien
taacctggcatacaagctggtgcag

SEQ ID NO: 3402233 - DNA, 25 bp, Homo sapien
gctgatgcattaggccaaactaggc

SEQ ID NO: 3402234 - DNA, 25 bp, Homo sapien
caaactaggcattgatgacgggctg

SEQ ID NO: 3402235 - DNA, 25 bp, Homo sapien
ttgatgcaagtctagggccaccggt

SEQ ID NO: 3402236 - DNA, 25 bp, Homo sapien
cctattgagaggtatgtaaaattcc

SEQ ID NO: 3402237 - DNA, 25 bp, Homo sapien
taaaaatgagtagtttgtcacagtt

SEQ ID NO: 3402238 - DNA, 25 bp, Homo sapien
tccactaagactgcagatttatgtt

SEQ ID NO: 3402239 - DNA, 25 bp, Homo sapien
gactcaggttatgatcaagatggta

SEQ ID NO: 3402240 - DNA, 25 bp, Homo sapien
taaatatacgttctactttgtacag

SEQ ID NO: 3402241 - DNA, 25 bp, Homo sapien
tgatcatcccactcttaaatatacg

SEQ ID NO: 3402242 - DNA, 25 bp, Homo sapien
aactctcttctcctgcataataaaa

SEQ ID NO: 3402243 - DNA, 25 bp, Homo sapien
cttttgaaaacctaagatctgatca

SEQ ID NO: 3402244 - DNA, 25 bp, Homo sapien
ctctctactcctaataattattgtt

SEQ ID NO: 3402245 - DNA, 25 bp, Homo sapien
cattatgtagtcattctctctactc

SEQ ID NO: 3402246 - DNA, 25 bp, Homo sapien
tcaggtaattaatataactatgcct

SEQ ID NO: 3402247 - DNA, 25 bp, Homo sapien
taatataactatgcctactacctcc

SEQ ID NO: 3402248 - DNA, 25 bp, Homo sapien
gaccttgttgtaatctttgtgagaa

SEQ ID NO: 3402249 - DNA, 25 bp, Homo sapien
tcccttaatttgatataaccatagt

SEQ ID NO: 3402250 - DNA, 25 bp, Homo sapien
tggcataaagttgcaattatatgct

SEQ ID NO: 3402251 - DNA, 25 bp, Homo sapien
tatattaggatgaggtatttctcaa

SEQ ID NO: 3402252 - DNA, 25 bp, Homo sapien
taatcatatcacctctgaatgacat

SEQ ID NO: 3402253 - DNA, 25 bp, Homo sapien
tcttctttacacttatgccattaat

SEQ ID NO: 3402254 - DNA, 25 bp, Homo sapien
gggtttactatacagataatcatat

SEQ ID NO: 3402255 - DNA, 25 bp, Homo sapien
ctatacttgctaggagtttcagtac

SEQ ID NO: 3402256 - DNA, 25 bp, Homo sapien
atacattccaagacccgcggtggat

SEQ ID NO: 3402257 - DNA, 25 bp, Homo sapien
tacattccaagacccgcggtggatg

SEQ ID NO: 3402258 - DNA, 25 bp, Homo sapien
tattcatgctgtaaaacatacaatg

SEQ ID NO: 3402259 - DNA, 25 bp, Homo sapien
caccttactgaaaaatggaacttgt

SEQ ID NO: 3402260 - DNA, 25 bp, Homo sapien
gattatcagaatgagtcaccgtgcc

SEQ ID NO: 3402261 - DNA, 25 bp, Homo sapien
caatgaatattccagaaacgaccac

SEQ ID NO: 3402262 - DNA, 25 bp, Homo sapien
cagagtttgttactaaactcttagg

SEQ ID NO: 3402263 - DNA, 25 bp, Homo sapien
tcctgccagaaatatctaagtatca

SEQ ID NO: 3402264 - DNA, 25 bp, Homo sapien
tgcccacccggattataacaattta

SEQ ID NO: 3402265 - DNA, 25 bp, Homo sapien
tcttaggcccctgacaatctgatgg

SEQ ID NO: 3402266 - DNA, 25 bp, Homo sapien
tgaataggtaacacagtcacacgtt

SEQ ID NO: 3402267 - DNA, 25 bp, Homo sapien
tcagtaacacaagtcatgaccattc

SEQ ID NO: 3402268 - DNA, 25 bp, Homo sapien
gttataccatgaagtctctctccca

SEQ ID NO: 3402269 - DNA, 25 bp, Homo sapien
gaatgttagccaaggctggtgtcct

SEQ ID NO: 3402270 - DNA, 25 bp, Homo sapien
gctggagaggacccaggacgtctgg

SEQ ID NO: 3402271 - DNA, 25 bp, Homo sapien
ctggagaggacccaggacgtctggt

SEQ ID NO: 3402272 - DNA, 25 bp, Homo sapien
tggagaggacccaggacgtctggtt

SEQ ID NO: 3402273 - DNA, 25 bp, Homo sapien
ggtgtggcgcatagtgcagagcctg

SEQ ID NO: 3402274 - DNA, 25 bp, Homo sapien
gcggaggcagtcgattgccttcttt

SEQ ID NO: 3402275 - DNA, 25 bp, Homo sapien
cttcatctggtgtggcgcatagtgc

SEQ ID NO: 3402276 - DNA, 25 bp, Homo sapien
ctggcggaggcagtcgattgccttc

SEQ ID NO: 3402277 - DNA, 25 bp, Homo sapien
gaaaggacccatctttgtgacagcc

SEQ ID NO: 3402278 - DNA, 25 bp, Homo sapien
aaacaagtctaagaggtcaccaggc

SEQ ID NO: 3402279 - DNA, 25 bp, Homo sapien
ccaacctgctgaagctgggaaggca

SEQ ID NO: 3402280 - DNA, 25 bp, Homo sapien
gccatattgggttctgtagcagaca

SEQ ID NO: 3402281 - DNA, 25 bp, Homo sapien
cattgccacgtagacattgcccaga

SEQ ID NO: 3402282 - DNA, 25 bp, Homo sapien
ggtgcgatctctactgccatggtgg

SEQ ID NO: 3402283 - DNA, 25 bp, Homo sapien
tatgacggcgtcattccagagcttg

SEQ ID NO: 3402284 - DNA, 25 bp, Homo sapien
ttcacagcaaagtgtggtgcgatct

SEQ ID NO: 3402285 - DNA, 25 bp, Homo sapien
catgagtgcgatgacaggtacctta

SEQ ID NO: 3402286 - DNA, 25 bp, Homo sapien
ggtggaaccagcaattttagacaag

SEQ ID NO: 3402287 - DNA, 25 bp, Homo sapien
ggtaccttagcccaacctggaagca

SEQ ID NO: 3402288 - DNA, 25 bp, Homo sapien
tcatgttgaggaactacgtagttgc

SEQ ID NO: 3402289 - DNA, 25 bp, Homo sapien
gatggtctggattcggttcttggct

SEQ ID NO: 3402290 - DNA, 25 bp, Homo sapien
tgtggattcataccacaccagtgct

SEQ ID NO: 3402291 - DNA, 25 bp, Homo sapien
aactcgggctgaagcttcaatgtgg

SEQ ID NO: 3402292 - DNA, 25 bp, Homo sapien
ttcttggctgggacaaactcgggct

SEQ ID NO: 3402293 - DNA, 25 bp, Homo sapien
gaacgttgcttctcactgacgggca

SEQ ID NO: 3402294 - DNA, 25 bp, Homo sapien
caaagagaaggctagctggaccact

SEQ ID NO: 3402295 - DNA, 25 bp, Homo sapien
cattgacaacagaggctacgacagg

SEQ ID NO: 3402296 - DNA, 25 bp, Homo sapien
taacattacaaaggtcaggtgatcc

SEQ ID NO: 3402297 - DNA, 25 bp, Homo sapien
gtagatgtgctcacaaaatatcatc

SEQ ID NO: 3402298 - DNA, 25 bp, Homo sapien
ggtagatgtgctcacaaaatatcat

SEQ ID NO: 3402299 - DNA, 25 bp, Homo sapien
attggcttcacggggtccatgggct

SEQ ID NO: 3402300 - DNA, 25 bp, Homo sapien
tggcttcacggggtccatgggcttc

SEQ ID NO: 3402301 - DNA, 25 bp, Homo sapien
ggattggcttcacggggtccatggg

SEQ ID NO: 3402302 - DNA, 25 bp, Homo sapien
cttggattggcttcacggggtccat

SEQ ID NO: 3402303 - DNA, 25 bp, Homo sapien
gaggcatgacaggtctaaccctggg

SEQ ID NO: 3402304 - DNA, 25 bp, Homo sapien
ggcaggagctgtgagatgacgacat

SEQ ID NO: 3402305 - DNA, 25 bp, Homo sapien
actgacgggaggcatgacaggtcta

SEQ ID NO: 3402306 - DNA, 25 bp, Homo sapien
ggttgtcccggaaactctgcaatgt

SEQ ID NO: 3402307 - DNA, 25 bp, Homo sapien
cagaatatgagaaatgccattgaga

SEQ ID NO: 3402308 - DNA, 25 bp, Homo sapien
ctgactttgagtcagccatggaccc

SEQ ID NO: 3402309 - DNA, 25 bp, Homo sapien
agaaatgccattgagatcagcctga

SEQ ID NO: 3402310 - DNA, 25 bp, Homo sapien
gactttgagtcagccatggacccca

SEQ ID NO: 3402311 - DNA, 25 bp, Homo sapien
ggggtccattcatgatgccttcaca

SEQ ID NO: 3402312 - DNA, 25 bp, Homo sapien
ggtgcaatctcggcagtccagcagc

SEQ ID NO: 3402313 - DNA, 25 bp, Homo sapien
cagcagcaccatcgggggtgggagt

SEQ ID NO: 3402314 - DNA, 25 bp, Homo sapien
catttaaaaccgtctggtggatctc

SEQ ID NO: 3402315 - DNA, 25 bp, Homo sapien
tccaggtcctccctggtgagggtga

SEQ ID NO: 3402316 - DNA, 25 bp, Homo sapien
tcagggccttgaacttttccaggtc

SEQ ID NO: 3402317 - DNA, 25 bp, Homo sapien
ctggtgagggtgatggtgtggtaca

SEQ ID NO: 3402318 - DNA, 25 bp, Homo sapien
tctcagggccttgaacttttccagg

SEQ ID NO: 3402319 - DNA, 25 bp, Homo sapien
tccagggctccggacgggatgttgc

SEQ ID NO: 3402320 - DNA, 25 bp, Homo sapien
tgtccacgttgtcgttgccactgtc

SEQ ID NO: 3402321 - DNA, 25 bp, Homo sapien
cggtggagtcggctgtctcttccag

SEQ ID NO: 3402322 - DNA, 25 bp, Homo sapien
ttgccactgtctatccacacgatca

SEQ ID NO: 3402323 - DNA, 25 bp, Homo sapien
ctgaacccacgtcccttcccgcagt

SEQ ID NO: 3402324 - DNA, 25 bp, Homo sapien
tgaacccacgtcccttcccgcagtg

SEQ ID NO: 3402325 - DNA, 25 bp, Homo sapien
gaacccacgtcccttcccgcagtgc

SEQ ID NO: 3402326 - DNA, 25 bp, Homo sapien
acggatgcggaccactcccaaggcc

SEQ ID NO: 3402327 - DNA, 25 bp, Homo sapien
ctacccacggatgcggaccactccc

SEQ ID NO: 3402328 - DNA, 25 bp, Homo sapien
tcccaaggccacctcgaggatttgc

SEQ ID NO: 3402329 - DNA, 25 bp, Homo sapien
aaggccacctcgaggatttgctcca

SEQ ID NO: 3402330 - DNA, 25 bp, Homo sapien
tcgtgcgaccaaagctcatgagacc

SEQ ID NO: 3402331 - DNA, 25 bp, Homo sapien
tgtagacccattgaatgcccaggga

SEQ ID NO: 3402332 - DNA, 25 bp, Homo sapien
cagtgcgaggagacgcagtaactct

SEQ ID NO: 3402333 - DNA, 25 bp, Homo sapien
ttgaaatgcaactgcctgcctcgtg

SEQ ID NO: 3402334 - DNA, 25 bp, Homo sapien
ggagccacacccacggtgcctggtg

SEQ ID NO: 3402335 - DNA, 25 bp, Homo sapien
ggtgcctggtggatatctgtatgtg

SEQ ID NO: 3402336 - DNA, 25 bp, Homo sapien
gatgaattgtttgctggtctactga

SEQ ID NO: 3402337 - DNA, 25 bp, Homo sapien
atgaattgtttgctggtctactgac

SEQ ID NO: 3402338 - DNA, 25 bp, Homo sapien
cactgggatgcctccagggatgatc

SEQ ID NO: 3402339 - DNA, 25 bp, Homo sapien
cctccagggatgatcccttccacgg

SEQ ID NO: 3402340 - DNA, 25 bp, Homo sapien
gatgcctccagggatgatcccttcc

SEQ ID NO: 3402341 - DNA, 25 bp, Homo sapien
ctgggatgcctccagggatgatccc

SEQ ID NO: 3402342 - DNA, 25 bp, Homo sapien
tctattgtccccgtgttttgtggac

SEQ ID NO: 3402343 - DNA, 25 bp, Homo sapien
ctattcctccttggggtgctctcta

SEQ ID NO: 3402344 - DNA, 25 bp, Homo sapien
tattgtccccgtgttttgtggactg

SEQ ID NO: 3402345 - DNA, 25 bp, Homo sapien
cttggggtgctctctattgtccccg

SEQ ID NO: 3402346 - DNA, 25 bp, Homo sapien
tgactgttgaactctgctatggctt

SEQ ID NO: 3402347 - DNA, 25 bp, Homo sapien
catattcttcatgactgttgaactc

SEQ ID NO: 3402348 - DNA, 25 bp, Homo sapien
tcaccatttgatctgccaaagccat

SEQ ID NO: 3402349 - DNA, 25 bp, Homo sapien
gctatggctttcaccatttgatctg

SEQ ID NO: 3402350 - DNA, 25 bp, Homo sapien
tgcaggtcacgcgggcagcacgagg

SEQ ID NO: 3402351 - DNA, 25 bp, Homo sapien
tagtgatgctatccctaggagcaac

SEQ ID NO: 3402352 - DNA, 25 bp, Homo sapien
ttggtcagagacaaaatcacagagc

SEQ ID NO: 3402353 - DNA, 25 bp, Homo sapien
cagtttctcaatctgggtgacgcca

SEQ ID NO: 3402354 - DNA, 25 bp, Homo sapien
aagtggtcctcttgcgctaagcaga

SEQ ID NO: 3402355 - DNA, 25 bp, Homo sapien
gcattcataagcaaggattctggga

SEQ ID NO: 3402356 - DNA, 25 bp, Homo sapien
caaactcagcgaagacagtgcattc

SEQ ID NO: 3402357 - DNA, 25 bp, Homo sapien
gcctccccatggaagcaaagtgggt

SEQ ID NO: 3402358 - DNA, 25 bp, Homo sapien
gcagcccacgaaaacaggcttaggt

SEQ ID NO: 3402359 - DNA, 25 bp, Homo sapien
caaagctgggatatttgcagagttg

SEQ ID NO: 3402360 - DNA, 25 bp, Homo sapien
gttggggctgtttgaaaaggctcca

SEQ ID NO: 3402361 - DNA, 25 bp, Homo sapien
cctggctcggtgtagcacgcccagt

SEQ ID NO: 3402362 - DNA, 25 bp, Homo sapien
gcccagttccagcagtgtgtgctat

SEQ ID NO: 3402363 - DNA, 25 bp, Homo sapien
gatgcacacacgctcgagtctattt

SEQ ID NO: 3402364 - DNA, 25 bp, Homo sapien
gagcaaagaactcatcacccacgtt

SEQ ID NO: 3402365 - DNA, 25 bp, Homo sapien
tgtgtgcacggattacatacggttc

SEQ ID NO: 3402366 - DNA, 25 bp, Homo sapien
gcactgcagtgcgtctgattatatc

SEQ ID NO: 3402367 - DNA, 25 bp, Homo sapien
agaggaggcagccccctcccacgct

SEQ ID NO: 3402368 - DNA, 25 bp, Homo sapien
ggaggcagccccctcccacgctccc

SEQ ID NO: 3402369 - DNA, 25 bp, Homo sapien
cgctcccacccccacacattcaggc

SEQ ID NO: 3402370 - DNA, 25 bp, Homo sapien
aggagaaagaggaggcagccccctc

SEQ ID NO: 3402371 - DNA, 25 bp, Homo sapien
aaaacagttcgcgttcagtgccaga

SEQ ID NO: 3402372 - DNA, 25 bp, Homo sapien
aacagttcgcgttcagtgccagact

SEQ ID NO: 3402373 - DNA, 25 bp, Homo sapien
agcaaagcaaaacagttcgcgttca

SEQ ID NO: 3402374 - DNA, 25 bp, Homo sapien
agcaaaacagttcgcgttcagtgcc

SEQ ID NO: 3402375 - DNA, 25 bp, Homo sapien
ctagggaaatttggaaggactggtg

SEQ ID NO: 3402376 - DNA, 25 bp, Homo sapien
ggatttcacgttatgtgtctgcact

SEQ ID NO: 3402377 - DNA, 25 bp, Homo sapien
ttaaatgcaccacgcaaaaagctcg

SEQ ID NO: 3402378 - DNA, 25 bp, Homo sapien
ggaatgagggtaatataaacaagga

SEQ ID NO: 3402379 - DNA, 25 bp, Homo sapien
gcaaatgttttcccctccgcatgct

SEQ ID NO: 3402380 - DNA, 25 bp, Homo sapien
atgttttcccctccgcatgctttac

SEQ ID NO: 3402381 - DNA, 25 bp, Homo sapien
gcgagctccttcactttttgtgcaa

SEQ ID NO: 3402382 - DNA, 25 bp, Homo sapien
aaatgttttcccctccgcatgcttt

SEQ ID NO: 3402383 - DNA, 25 bp, Homo sapien
acacaagacagtgcatggtataacc

SEQ ID NO: 3402384 - DNA, 25 bp, Homo sapien
aacacaagacagtgcatggtataac

SEQ ID NO: 3402385 - DNA, 25 bp, Homo sapien
aactgacatcataaactttgcaaaa

SEQ ID NO: 3402386 - DNA, 25 bp, Homo sapien
caaacacaagacagtgcatggtata

SEQ ID NO: 3402387 - DNA, 25 bp, Homo sapien
caagcaccagggctcatccaaggtg

SEQ ID NO: 3402388 - DNA, 25 bp, Homo sapien
tgtaatgctctccaacgtcgcgtga

SEQ ID NO: 3402389 - DNA, 25 bp, Homo sapien
ttgccataaatgagtagacacctgc

SEQ ID NO: 3402390 - DNA, 25 bp, Homo sapien
ccaccatgacgattctagagagaga

SEQ ID NO: 3402391 - DNA, 25 bp, Homo sapien
gacttcaggagcgtgcaacttgtgt

SEQ ID NO: 3402392 - DNA, 25 bp, Homo sapien
gattgacttcaggagcgtgcaactt

SEQ ID NO: 3402393 - DNA, 25 bp, Homo sapien
tcaggagcgtgcaacttgtgtagtt

SEQ ID NO: 3402394 - DNA, 25 bp, Homo sapien
tggattgacttcaggagcgtgcaac

SEQ ID NO: 3402395 - DNA, 25 bp, Homo sapien
caatgggtcaaaaatggaggccgtt

SEQ ID NO: 3402396 - DNA, 25 bp, Homo sapien
tcaaagctgtgatagcgtcaccagg

SEQ ID NO: 3402397 - DNA, 25 bp, Homo sapien
tacagatcagtcagggtatctcctg

SEQ ID NO: 3402398 - DNA, 25 bp, Homo sapien
tggaacccatgcttcatctgcaagg

SEQ ID NO: 3402399 - DNA, 25 bp, Homo sapien
tccactaactggactgtcgctgcag

SEQ ID NO: 3402400 - DNA, 25 bp, Homo sapien
ggtactgtcagtagcctagaccaag

SEQ ID NO: 3402401 - DNA, 25 bp, Homo sapien
tgtcacttgaaggaacaggctagaa

SEQ ID NO: 3402402 - DNA, 25 bp, Homo sapien
cagcagtctccaagtctagtaaagg

SEQ ID NO: 3402403 - DNA, 25 bp, Homo sapien
tgacaaccaattgctcaggagacac

SEQ ID NO: 3402404 - DNA, 25 bp, Homo sapien
caggagacactgcagaaagtctgcc

SEQ ID NO: 3402405 - DNA, 25 bp, Homo sapien
caaattggcctatctgaacagacta

SEQ ID NO: 3402406 - DNA, 25 bp, Homo sapien
cagcaggtggccaaatatgaatata

SEQ ID NO: 3402407 - DNA, 25 bp, Homo sapien
taataggaagatgaacatgaacagc

SEQ ID NO: 3402408 - DNA, 25 bp, Homo sapien
ccattagagggcactttagagaagg

SEQ ID NO: 3402409 - DNA, 25 bp, Homo sapien
gttaaccctctggacataatttgcc

SEQ ID NO: 3402410 - DNA, 25 bp, Homo sapien
gactgaatctagcatgagggaggaa

SEQ ID NO: 3402411 - DNA, 25 bp, Homo sapien
cactatatctgactgggagcaaggt

SEQ ID NO: 3402412 - DNA, 25 bp, Homo sapien
tattcagggacaatccacttctgag

SEQ ID NO: 3402413 - DNA, 25 bp, Homo sapien
tacatcacactcagatacaccctgg

SEQ ID NO: 3402414 - DNA, 25 bp, Homo sapien
ccctgggtcccttcattgagtgtga

SEQ ID NO: 3402415 - DNA, 25 bp, Homo sapien
cgacttgggaatccgtgctggttcc

SEQ ID NO: 3402416 - DNA, 25 bp, Homo sapien
tttttgcagtcacgacttgggaatc

SEQ ID NO: 3402417 - DNA, 25 bp, Homo sapien
aaccaaaattacaccgctaccattg

SEQ ID NO: 3402418 - DNA, 25 bp, Homo sapien
ggaatccgtgctggttccaaccaaa

SEQ ID NO: 3402419 - DNA, 25 bp, Homo sapien
tccaacttgttgaagactcgtcgct

SEQ ID NO: 3402420 - DNA, 25 bp, Homo sapien
tgcggctttccgagcttaacccctg

SEQ ID NO: 3402421 - DNA, 25 bp, Homo sapien
tcacgatcttggtaattgcggcttt

SEQ ID NO: 3402422 - DNA, 25 bp, Homo sapien
gcggcaaagcgggttcttccaggta

SEQ ID NO: 3402423 - DNA, 25 bp, Homo sapien
tccggctattgagttatgtacagca

SEQ ID NO: 3402424 - DNA, 25 bp, Homo sapien
gggcttccggctattgagttatgta

SEQ ID NO: 3402425 - DNA, 25 bp, Homo sapien
gtaagggcttccggctattgagtta

SEQ ID NO: 3402426 - DNA, 25 bp, Homo sapien
accgcaaaaagattcgcgaagggca

SEQ ID NO: 3402427 - DNA, 25 bp, Homo sapien
aaaacgtgaaggttcgcagccctcg

SEQ ID NO: 3402428 - DNA, 25 bp, Homo sapien
ctaattctggagagggtagagtccg

SEQ ID NO: 3402429 - DNA, 25 bp, Homo sapien
taaaagattgactctgtccagcacc

SEQ ID NO: 3402430 - DNA, 25 bp, Homo sapien
tccgggtgttcaaccagcggacagg

SEQ ID NO: 3402431 - DNA, 25 bp, Homo sapien
atgcagacctctgggtgtcaggaca

SEQ ID NO: 3402432 - DNA, 25 bp, Homo sapien
tgcagacctctgggtgtcaggacag

SEQ ID NO: 3402433 - DNA, 25 bp, Homo sapien
ctgtggcctttgagaactcctcctt

SEQ ID NO: 3402434 - DNA, 25 bp, Homo sapien
aaagaagctgactctggcagaagtg

SEQ ID NO: 3402435 - DNA, 25 bp, Homo sapien
gaaataactgaacagctgcttgaaa

SEQ ID NO: 3402436 - DNA, 25 bp, Homo sapien
caaagaagctgactctggcagaagt

SEQ ID NO: 3402437 - DNA, 25 bp, Homo sapien
agtggaaataactgaacagctgctt

SEQ ID NO: 3402438 - DNA, 25 bp, Homo sapien
tattggtacaatagattcacactgt

SEQ ID NO: 3402439 - DNA, 25 bp, Homo sapien
tcccaagactacactgagaacactc

SEQ ID NO: 3402440 - DNA, 25 bp, Homo sapien
cacaaattaatgagttgtacaaaag

SEQ ID NO: 3402441 - DNA, 25 bp, Homo sapien
tatttaactggttacaatgaacatg

SEQ ID NO: 3402442 - DNA, 25 bp, Homo sapien
ctggccctgtgcaagtgctcatcaa

SEQ ID NO: 3402443 - DNA, 25 bp, Homo sapien
gattttatgacctgggatgattcct

SEQ ID NO: 3402444 - DNA, 25 bp, Homo sapien
tgattcctgtagaacgggcacttga

SEQ ID NO: 3402445 - DNA, 25 bp, Homo sapien
cttgcagacggtagagggaacagac

SEQ ID NO: 3402446 - DNA, 25 bp, Homo sapien
tacctcctgtctgcgaggacatgag

SEQ ID NO: 3402447 - DNA, 25 bp, Homo sapien
aaaacctcccatggatgccttcaca

SEQ ID NO: 3402448 - DNA, 25 bp, Homo sapien
ttcaaaacctcccatggatgccttc

SEQ ID NO: 3402449 - DNA, 25 bp, Homo sapien
ctttatactgatcaaacacaaaagc

SEQ ID NO: 3402450 - DNA, 25 bp, Homo sapien
caaaagtcagtggacaactgggcct

SEQ ID NO: 3402451 - DNA, 25 bp, Homo sapien
gcgtatttgcacaagagactccatc

SEQ ID NO: 3402452 - DNA, 25 bp, Homo sapien
actctgtccagaggcgtatttgcac

SEQ ID NO: 3402453 - DNA, 25 bp, Homo sapien
ggttggcccatgcagccatagcctt

SEQ ID NO: 3402454 - DNA, 25 bp, Homo sapien
cttcctgctgatgactaaggggttc

SEQ ID NO: 3402455 - DNA, 25 bp, Homo sapien
gttattggtattattgaggcccaca

SEQ ID NO: 3402456 - DNA, 25 bp, Homo sapien
ctgacttaaattttaagtcatgctc

SEQ ID NO: 3402457 - DNA, 25 bp, Homo sapien
taaattttaagtcatgctcagccat

SEQ ID NO: 3402458 - DNA, 25 bp, Homo sapien
cttaaattttaagtcatgctcagcc

SEQ ID NO: 3402459 - DNA, 25 bp, Homo sapien
gacttaaattttaagtcatgctcag

SEQ ID NO: 3402460 - DNA, 25 bp, Homo sapien
tgttcttcaccagggcatcccgctt

SEQ ID NO: 3402461 - DNA, 25 bp, Homo sapien
gtacttgtggacttgcaatttgcca

SEQ ID NO: 3402462 - DNA, 25 bp, Homo sapien
atcccgcttagggttctcatacagg

SEQ ID NO: 3402463 - DNA, 25 bp, Homo sapien
taagcttatctctccatactccaaa

SEQ ID NO: 3402464 - DNA, 25 bp, Homo sapien
cttcaggagatgaaatttttgctat

SEQ ID NO: 3402465 - DNA, 25 bp, Homo sapien
atttcttcaggagatgaaatttttg

SEQ ID NO: 3402466 - DNA, 25 bp, Homo sapien
tcaggagatgaaatttttgctattt

SEQ ID NO: 3402467 - DNA, 25 bp, Homo sapien
ttcaaatttcttcaggagatgaaat

SEQ ID NO: 3402468 - DNA, 25 bp, Homo sapien
catttctgtcacgtggtggccccta

SEQ ID NO: 3402469 - DNA, 25 bp, Homo sapien
caaatgcgctaagaacagtggagga

SEQ ID NO: 3402470 - DNA, 25 bp, Homo sapien
gatcagggtcccaacatgcagagaa

SEQ ID NO: 3402471 - DNA, 25 bp, Homo sapien
ggagctggctccctagaactaaagg

SEQ ID NO: 3402472 - DNA, 25 bp, Homo sapien
aaacctcattcatcacaagacacaa

SEQ ID NO: 3402473 - DNA, 25 bp, Homo sapien
tataaaaacctcattcatcacaaga

SEQ ID NO: 3402474 - DNA, 25 bp, Homo sapien
gggagttataaaaacctcattcatc

SEQ ID NO: 3402475 - DNA, 25 bp, Homo sapien
tcattcatcacaagacacaaagggc

SEQ ID NO: 3402476 - DNA, 25 bp, Homo sapien
gaatcacatgtacatacccagccag

SEQ ID NO: 3402477 - DNA, 25 bp, Homo sapien
gagatctgactagcaacccaacaat

SEQ ID NO: 3402478 - DNA, 25 bp, Homo sapien
gttaacattctaagacacacttagg

SEQ ID NO: 3402479 - DNA, 25 bp, Homo sapien
cacacttaggtcaggttagagggaa

SEQ ID NO: 3402480 - DNA, 25 bp, Homo sapien
tctacaaagtctagccatccggtct

SEQ ID NO: 3402481 - DNA, 25 bp, Homo sapien
tctgtttaactcaagccagaggtaa

SEQ ID NO: 3402482 - DNA, 25 bp, Homo sapien
cctcaccactttgtagagagatgtg

SEQ ID NO: 3402483 - DNA, 25 bp, Homo sapien
tttcacaccagcatcagaattggag

SEQ ID NO: 3402484 - DNA, 25 bp, Homo sapien
ccttactatcctgtcagggtgaggg

SEQ ID NO: 3402485 - DNA, 25 bp, Homo sapien
taagtgttggtttgctctgtcctac

SEQ ID NO: 3402486 - DNA, 25 bp, Homo sapien
ttaactggtaggacatatgcatacg

SEQ ID NO: 3402487 - DNA, 25 bp, Homo sapien
ccagcagggcagagataatatattc

SEQ ID NO: 3402488 - DNA, 25 bp, Homo sapien
tgctttattcgattcttttatgtga

SEQ ID NO: 3402489 - DNA, 25 bp, Homo sapien
cacatatagaactgctttattcgat

SEQ ID NO: 3402490 - DNA, 25 bp, Homo sapien
aaacacatatagaactgctttattc

SEQ ID NO: 3402491 - DNA, 25 bp, Homo sapien
gctttattcgattcttttatgtgaa

SEQ ID NO: 3402492 - DNA, 25 bp, Homo sapien
tgatgtcgcatcctccagggcttct

SEQ ID NO: 3402493 - DNA, 25 bp, Homo sapien
tagtcttggtcaaaacagtcgaagg

SEQ ID NO: 3402494 - DNA, 25 bp, Homo sapien
tttacgtaacaactagggcagctgg

SEQ ID NO: 3402495 - DNA, 25 bp, Homo sapien
tcgaaggatccactcagattcaagg

SEQ ID NO: 3402496 - DNA, 25 bp, Homo sapien
gaccaaaagccttcacaggatcctc

SEQ ID NO: 3402497 - DNA, 25 bp, Homo sapien
ttcacaggatcctcataaataagct

SEQ ID NO: 3402498 - DNA, 25 bp, Homo sapien
tataaagactttaacatgggtctct

SEQ ID NO: 3402499 - DNA, 25 bp, Homo sapien
tgtttaagaaggatatgaatgaaca

SEQ ID NO: 3402500 - DNA, 25 bp, Homo sapien
tgacaagaatttggccaatataggc

SEQ ID NO: 3402501 - DNA, 25 bp, Homo sapien
ttggccaatataggctgatatcagc

SEQ ID NO: 3402502 - DNA, 25 bp, Homo sapien
ctactccgtgggttgacaagaattt

SEQ ID NO: 3402503 - DNA, 25 bp, Homo sapien
ccaatataggctgatatcagcaggc

SEQ ID NO: 3402504 - DNA, 25 bp, Homo sapien
cctatcccaaatcagttggtttgct

SEQ ID NO: 3402505 - DNA, 25 bp, Homo sapien
acctatcccaaatcagttggtttgc

SEQ ID NO: 3402506 - DNA, 25 bp, Homo sapien
tatcccaaatcagttggtttgctat

SEQ ID NO: 3402507 - DNA, 25 bp, Homo sapien
tcacctatcccaaatcagttggttt

SEQ ID NO: 3402508 - DNA, 25 bp, Homo sapien
gtttcctgggtaacatgactgttgc

SEQ ID NO: 3402509 - DNA, 25 bp, Homo sapien
tggatgatgcaggagtacaaaagcc

SEQ ID NO: 3402510 - DNA, 25 bp, Homo sapien
aatcctggtctatgtccctctatgg

SEQ ID NO: 3402511 - DNA, 25 bp, Homo sapien
tatgggacctgtcctaggctaaagg

SEQ ID NO: 3402512 - DNA, 25 bp, Homo sapien
tcagggagtttcatagaagcgagga

SEQ ID NO: 3402513 - DNA, 25 bp, Homo sapien
taatcctttgggacatagctgaatc

SEQ ID NO: 3402514 - DNA, 25 bp, Homo sapien
gaaagtacacttcataatcagggag

SEQ ID NO: 3402515 - DNA, 25 bp, Homo sapien
taacagttctgtcttctcgctcatc

SEQ ID NO: 3402516 - DNA, 25 bp, Homo sapien
caaatttagagtttagaatagtatt

SEQ ID NO: 3402517 - DNA, 25 bp, Homo sapien
aaaatgaagcaacaatattgtatca

SEQ ID NO: 3402518 - DNA, 25 bp, Homo sapien
aatgaagcaacaatattgtatcata

SEQ ID NO: 3402519 - DNA, 25 bp, Homo sapien
aaaaaatgaagcaacaatattgtat

SEQ ID NO: 3402520 - DNA, 25 bp, Homo sapien
gatgacactaataggcgctgctccg

SEQ ID NO: 3402521 - DNA, 25 bp, Homo sapien
taccttcgtgaatgaaaagagcgag

SEQ ID NO: 3402522 - DNA, 25 bp, Homo sapien
ttccctctgcgcgtagtgcgtcagc

SEQ ID NO: 3402523 - DNA, 25 bp, Homo sapien
gccatatccgtgtcgctattggtga

SEQ ID NO: 3402524 - DNA, 25 bp, Homo sapien
ccggagggccgtgaagagcgagtac

SEQ ID NO: 3402525 - DNA, 25 bp, Homo sapien
aaatacgcagggctaggtaggccac

SEQ ID NO: 3402526 - DNA, 25 bp, Homo sapien
cgagtacgaaatacgcagggctagg

SEQ ID NO: 3402527 - DNA, 25 bp, Homo sapien
gccgtgaagagcgagtacgaaatac

SEQ ID NO: 3402528 - DNA, 25 bp, Homo sapien
aggaggcagcagggcgactgactgg

SEQ ID NO: 3402529 - DNA, 25 bp, Homo sapien
cagggcgactgactggctccatgaa

SEQ ID NO: 3402530 - DNA, 25 bp, Homo sapien
ggaggcagcagggcgactgactggc

SEQ ID NO: 3402531 - DNA, 25 bp, Homo sapien
cagcagggcgactgactggctccat

SEQ ID NO: 3402532 - DNA, 25 bp, Homo sapien
gcgaaccaaggaggacagcgtgtga

SEQ ID NO: 3402533 - DNA, 25 bp, Homo sapien
gggcgaaccaaggaggacagcgtgt

SEQ ID NO: 3402534 - DNA, 25 bp, Homo sapien
aggggcgaaccaaggaggacagcgt

SEQ ID NO: 3402535 - DNA, 25 bp, Homo sapien
aaggggcgaaccaaggaggacagcg

SEQ ID NO: 3402536 - DNA, 25 bp, Homo sapien
aaacacctgaaactccacattcaca

SEQ ID NO: 3402537 - DNA, 25 bp, Homo sapien
cacctgaaactccacattcacagga

SEQ ID NO: 3402538 - DNA, 25 bp, Homo sapien
actccacattcacaggatctccttt

SEQ ID NO: 3402539 - DNA, 25 bp, Homo sapien
gaaactccacattcacaggatctcc

SEQ ID NO: 3402540 - DNA, 25 bp, Homo sapien
gcccactctggagcgcagtggtgca

SEQ ID NO: 3402541 - DNA, 25 bp, Homo sapien
tccgcccacttcagcctcccaaagt

SEQ ID NO: 3402542 - DNA, 25 bp, Homo sapien
tgatccgcccacttcagcctcccaa

SEQ ID NO: 3402543 - DNA, 25 bp, Homo sapien
tgcccactctggagcgcagtggtgc

SEQ ID NO: 3402544 - DNA, 25 bp, Homo sapien
ctgtgtgagaatcaactgcaggaga

SEQ ID NO: 3402545 - DNA, 25 bp, Homo sapien
ggtggcttagaactcactagattct

SEQ ID NO: 3402546 - DNA, 25 bp, Homo sapien
attagagagacaagagtctgtggtg

SEQ ID NO: 3402547 - DNA, 25 bp, Homo sapien
tgctgtgtgagaatcaactgcagga

SEQ ID NO: 3402548 - DNA, 25 bp, Homo sapien
gatataagcacagctgagactctgg

SEQ ID NO: 3402549 - DNA, 25 bp, Homo sapien
tcaaaactagtatgacagccctgct

SEQ ID NO: 3402550 - DNA, 25 bp, Homo sapien
cactgaactgtctggcctggccatt

SEQ ID NO: 3402551 - DNA, 25 bp, Homo sapien
gcagtagcttcctgttccacggcaa

SEQ ID NO: 3402552 - DNA, 25 bp, Homo sapien
ttagcccagcttttcttcagactga

SEQ ID NO: 3402553 - DNA, 25 bp, Homo sapien
tagcccagcttttcttcagactgag

SEQ ID NO: 3402554 - DNA, 25 bp, Homo sapien
atttgggctgcttccggagtcgtgg

SEQ ID NO: 3402555 - DNA, 25 bp, Homo sapien
gggctgcttccggagtcgtggtgtc

SEQ ID NO: 3402556 - DNA, 25 bp, Homo sapien
ggctgcttccggagtcgtggtgtct

SEQ ID NO: 3402557 - DNA, 25 bp, Homo sapien
ttgggctgcttccggagtcgtggtg

SEQ ID NO: 3402558 - DNA, 25 bp, Homo sapien
gttgaacatatgctttcttctctcc

SEQ ID NO: 3402559 - DNA, 25 bp, Homo sapien
agccagttgaacatatgctttcttc

SEQ ID NO: 3402560 - DNA, 25 bp, Homo sapien
ccagttgaacatatgctttcttctc

SEQ ID NO: 3402561 - DNA, 25 bp, Homo sapien
caggagccagttgaacatatgcttt

SEQ ID NO: 3402562 - DNA, 25 bp, Homo sapien
tctgtttaagccaccatagttgtgt

SEQ ID NO: 3402563 - DNA, 25 bp, Homo sapien
agtatgctgtactgccatgtctgtg

SEQ ID NO: 3402564 - DNA, 25 bp, Homo sapien
gctgaacagtttgctcaaggtaaca

SEQ ID NO: 3402565 - DNA, 25 bp, Homo sapien
caaaactaggaaatgactggcacaa

SEQ ID NO: 3402566 - DNA, 25 bp, Homo sapien
ttcccaaatacaacatgccagggaa

SEQ ID NO: 3402567 - DNA, 25 bp, Homo sapien
aatacaacatgccagggaatcagtt

SEQ ID NO: 3402568 - DNA, 25 bp, Homo sapien
atacaacatgccagggaatcagttt

SEQ ID NO: 3402569 - DNA, 25 bp, Homo sapien
tacaacatgccagggaatcagtttc

SEQ ID NO: 3402570 - DNA, 25 bp, Homo sapien
ctaagaccaggccaaacttgccaat

SEQ ID NO: 3402571 - DNA, 25 bp, Homo sapien
ggccaaacttgccaatggactcaaa

SEQ ID NO: 3402572 - DNA, 25 bp, Homo sapien
ttgccaatggactcaaacactttgg

SEQ ID NO: 3402573 - DNA, 25 bp, Homo sapien
tggactcaaacactttggcagccaa

SEQ ID NO: 3402574 - DNA, 25 bp, Homo sapien
gagtttaccacacctcctgcaacgg

SEQ ID NO: 3402575 - DNA, 25 bp, Homo sapien
ccatggaattggtcaaagatcgcag

SEQ ID NO: 3402576 - DNA, 25 bp, Homo sapien
ggaattggtcaaagatcgcagctct

SEQ ID NO: 3402577 - DNA, 25 bp, Homo sapien
agagtttaccacacctcctgcaacg

SEQ ID NO: 3402578 - DNA, 25 bp, Homo sapien
gactggagcattacgtggtcgagaa

SEQ ID NO: 3402579 - DNA, 25 bp, Homo sapien
tgatgactggagcattacgtggtcg

SEQ ID NO: 3402580 - DNA, 25 bp, Homo sapien
ttacgtggtcgagaacagcaaagat

SEQ ID NO: 3402581 - DNA, 25 bp, Homo sapien
agtgatgactggagcattacgtggt

SEQ ID NO: 3402582 - DNA, 25 bp, Homo sapien
aagatatgaggaagttggctagcga

SEQ ID NO: 3402583 - DNA, 25 bp, Homo sapien
ctagcgataggccggaagaggatcc

SEQ ID NO: 3402584 - DNA, 25 bp, Homo sapien
gaggatccgccgtgtgatattgaca

SEQ ID NO: 3402585 - DNA, 25 bp, Homo sapien
gatatgaggaagttggctagcgata

SEQ ID NO: 3402586 - DNA, 25 bp, Homo sapien
atttggtagtgatggacggcagcac

SEQ ID NO: 3402587 - DNA, 25 bp, Homo sapien
cttgatttggtagtgatggacggca

SEQ ID NO: 3402588 - DNA, 25 bp, Homo sapien
gatttggtagtgatggacggcagca

SEQ ID NO: 3402589 - DNA, 25 bp, Homo sapien
tgatttggtagtgatggacggcagc

SEQ ID NO: 3402590 - DNA, 25 bp, Homo sapien
agttctccagcatcaaagcgtgcca

SEQ ID NO: 3402591 - DNA, 25 bp, Homo sapien
tccagcatcaaagcgtgccaccact

SEQ ID NO: 3402592 - DNA, 25 bp, Homo sapien
tctccagcatcaaagcgtgccacca

SEQ ID NO: 3402593 - DNA, 25 bp, Homo sapien
cagcatcaaagcgtgccaccactga

SEQ ID NO: 3402594 - DNA, 25 bp, Homo sapien
gtagtccaggatgaacccaaaggtg

SEQ ID NO: 3402595 - DNA, 25 bp, Homo sapien
cacgtagtccaggatgaacccaaag

SEQ ID NO: 3402596 - DNA, 25 bp, Homo sapien
ggacacgtagtccaggatgaaccca

SEQ ID NO: 3402597 - DNA, 25 bp, Homo sapien
gatgatggccgcctttttcctctgc

SEQ ID NO: 3402598 - DNA, 25 bp, Homo sapien
ctggtatgcaatgtcctccacgact

SEQ ID NO: 3402599 - DNA, 25 bp, Homo sapien
taggtgatattccgagagcgagagc

SEQ ID NO: 3402600 - DNA, 25 bp, Homo sapien
tgatcagctcggctgccttagagtc

SEQ ID NO: 3402601 - DNA, 25 bp, Homo sapien
ccagcttacacagctcgatcaggct

SEQ ID NO: 3402602 - DNA, 25 bp, Homo sapien
gggctgtggccagttggcccgtgaa

SEQ ID NO: 3402603 - DNA, 25 bp, Homo sapien
cagttggcccgtgaagatgcaggca

SEQ ID NO: 3402604 - DNA, 25 bp, Homo sapien
tggccagttggcccgtgaagatgca

SEQ ID NO: 3402605 - DNA, 25 bp, Homo sapien
gaaggcggtgttaagaatcatcggg

SEQ ID NO: 3402606 - DNA, 25 bp, Homo sapien
ttcactttttaagccaatcatgaaa

SEQ ID NO: 3402607 - DNA, 25 bp, Homo sapien
ccttcactttttaagccaatcatga

SEQ ID NO: 3402608 - DNA, 25 bp, Homo sapien
cactttttaagccaatcatgaaatt

SEQ ID NO: 3402609 - DNA, 25 bp, Homo sapien
cttcactttttaagccaatcatgaa

SEQ ID NO: 3402610 - DNA, 25 bp, Homo sapien
tcagaagtactgcttgttttttgtg

SEQ ID NO: 3402611 - DNA, 25 bp, Homo sapien
tccaagtcatccaaatcagaagtac

SEQ ID NO: 3402612 - DNA, 25 bp, Homo sapien
catccaaatcagaagtactgcttgt

SEQ ID NO: 3402613 - DNA, 25 bp, Homo sapien
cagaagtactgcttgttttttgtgg

SEQ ID NO: 3402614 - DNA, 25 bp, Homo sapien
tagaccacagtgtctactgtttgca

SEQ ID NO: 3402615 - DNA, 25 bp, Homo sapien
tctccaagaccccagaactgttggg

SEQ ID NO: 3402616 - DNA, 25 bp, Homo sapien
tcccgactgtttttagaggcacagg

SEQ ID NO: 3402617 - DNA, 25 bp, Homo sapien
ctttggtattgtgactagagtagca

SEQ ID NO: 3402618 - DNA, 25 bp, Homo sapien
tacatacaaaaggaccagtgtgaca

SEQ ID NO: 3402619 - DNA, 25 bp, Homo sapien
ggttgaatacacaccgcaatagcta

SEQ ID NO: 3402620 - DNA, 25 bp, Homo sapien
aattggtcatagttaggacccacca

SEQ ID NO: 3402621 - DNA, 25 bp, Homo sapien
taccagcggttcaaatctaaggttg

SEQ ID NO: 3402622 - DNA, 25 bp, Homo sapien
ttttccaattccatcagtactacct

SEQ ID NO: 3402623 - DNA, 25 bp, Homo sapien
cttctgcatatgattttccaattcc

SEQ ID NO: 3402624 - DNA, 25 bp, Homo sapien
gattttccaattccatcagtactac

SEQ ID NO: 3402625 - DNA, 25 bp, Homo sapien
ttccaattccatcagtactacctgt

SEQ ID NO: 3402626 - DNA, 25 bp, Homo sapien
tggtatttccaacaaggtagaaaca

SEQ ID NO: 3402627 - DNA, 25 bp, Homo sapien
gactgtacacacttacatgacataa

SEQ ID NO: 3402628 - DNA, 25 bp, Homo sapien
aaaagcatctattgtaccatgcaac

SEQ ID NO: 3402629 - DNA, 25 bp, Homo sapien
ttgtgtctgtttaggcaaatatggt

SEQ ID NO: 3402630 - DNA, 25 bp, Homo sapien
tggagtgccacggtgtgatctcggc

SEQ ID NO: 3402631 - DNA, 25 bp, Homo sapien
ggagtgccacggtgtgatctcggct

SEQ ID NO: 3402632 - DNA, 25 bp, Homo sapien
ctgataaggacaaccttcattccat

SEQ ID NO: 3402633 - DNA, 25 bp, Homo sapien
gataaggacaaccttcattccatgc

SEQ ID NO: 3402634 - DNA, 25 bp, Homo sapien
taaggacaaccttcattccatgctt

SEQ ID NO: 3402635 - DNA, 25 bp, Homo sapien
tgataaggacaaccttcattccatg

SEQ ID NO: 3402636 - DNA, 25 bp, Homo sapien
tgttcaacactaatttgacggccaa

SEQ ID NO: 3402637 - DNA, 25 bp, Homo sapien
tcctggccacaaatggtcagcaaac

SEQ ID NO: 3402638 - DNA, 25 bp, Homo sapien
tcagttctagtaaagtacagcacaa

SEQ ID NO: 3402639 - DNA, 25 bp, Homo sapien
tgagattggatctgcggacttgaat

SEQ ID NO: 3402640 - DNA, 25 bp, Homo sapien
taggtgttctagtcaacagtcccag

SEQ ID NO: 3402641 - DNA, 25 bp, Homo sapien
tgggcaaattgcaatgaacgctctt

SEQ ID NO: 3402642 - DNA, 25 bp, Homo sapien
tcactagacctgttaagagaagcca

SEQ ID NO: 3402643 - DNA, 25 bp, Homo sapien
taatgctacgtgaattctgagacca

SEQ ID NO: 3402644 - DNA, 25 bp, Homo sapien
gagatgcagaccaacacatgctaat

SEQ ID NO: 3402645 - DNA, 25 bp, Homo sapien
ccaactaattggtgggtatgctaca

SEQ ID NO: 3402646 - DNA, 25 bp, Homo sapien
catgctaatttagctgggccaacta

SEQ ID NO: 3402647 - DNA, 25 bp, Homo sapien
caagcagctgccttaattggagatg

SEQ ID NO: 3402648 - DNA, 25 bp, Homo sapien
tgttgagaggtacagctagtgtctg

SEQ ID NO: 3402649 - DNA, 25 bp, Homo sapien
actgaaccatcaataatccaattgg

SEQ ID NO: 3402650 - DNA, 25 bp, Homo sapien
tgtctggccacggtggagtacactc

SEQ ID NO: 3402651 - DNA, 25 bp, Homo sapien
gtggagtacactcccacatccctaa

SEQ ID NO: 3402652 - DNA, 25 bp, Homo sapien
gaacacagagtcttcaatcacagat

SEQ ID NO: 3402653 - DNA, 25 bp, Homo sapien
acacagagtcttcaatcacagatgt

SEQ ID NO: 3402654 - DNA, 25 bp, Homo sapien
tgtggaacacagagtcttcaatcac

SEQ ID NO: 3402655 - DNA, 25 bp, Homo sapien
ttatgtggaacacagagtcttcaat

SEQ ID NO: 3402656 - DNA, 25 bp, Homo sapien
gaacagggaaactgcagaatgctta

SEQ ID NO: 3402657 - DNA, 25 bp, Homo sapien
taatcaggcatcaaaaacatagcgt

SEQ ID NO: 3402658 - DNA, 25 bp, Homo sapien
tcaccaagaccttatgaggaggcgt

SEQ ID NO: 3402659 - DNA, 25 bp, Homo sapien
tataggtgcgactagtctgcatgca

SEQ ID NO: 3402660 - DNA, 25 bp, Homo sapien
tatttgtgaccttcacttggtggat

SEQ ID NO: 3402661 - DNA, 25 bp, Homo sapien
taatgatatataagcaactccacgc

SEQ ID NO: 3402662 - DNA, 25 bp, Homo sapien
ccttcaagctggatagtggaaatcc

SEQ ID NO: 3402663 - DNA, 25 bp, Homo sapien
tccaggtttggttagatagcatccc

SEQ ID NO: 3402664 - DNA, 25 bp, Homo sapien
ataattattctcacaaatatcagtt

SEQ ID NO: 3402665 - DNA, 25 bp, Homo sapien
cagttttcaacatttgaaaggtcat

SEQ ID NO: 3402666 - DNA, 25 bp, Homo sapien
tggtatattgctgaagtttaaaata

SEQ ID NO: 3402667 - DNA, 25 bp, Homo sapien
ctcacaaatatcagttttcaacatt

SEQ ID NO: 3402668 - DNA, 25 bp, Homo sapien
aaatcttgccacaggaaaaaattat

SEQ ID NO: 3402669 - DNA, 25 bp, Homo sapien
gatctcccactttggtagttagaaa

SEQ ID NO: 3402670 - DNA, 25 bp, Homo sapien
tcactttgttcttatgagattccac

SEQ ID NO: 3402671 - DNA, 25 bp, Homo sapien
taattagaagtcaaatatcacacag

SEQ ID NO: 3402672 - DNA, 25 bp, Homo sapien
gagggacttctgagtgagagcccac

SEQ ID NO: 3402673 - DNA, 25 bp, Homo sapien
tggcagagtagaagatacacagctt

SEQ ID NO: 3402674 - DNA, 25 bp, Homo sapien
aagcagctgcttcattagtcccgtg

SEQ ID NO: 3402675 - DNA, 25 bp, Homo sapien
taaaaagcgacaggtggcaggcaga

SEQ ID NO: 3402676 - DNA, 25 bp, Homo sapien
tcatacacgggtctggactatcatt

SEQ ID NO: 3402677 - DNA, 25 bp, Homo sapien
tacacgggtctggactatcattctc

SEQ ID NO: 3402678 - DNA, 25 bp, Homo sapien
cacgggtctggactatcattctcat

SEQ ID NO: 3402679 - DNA, 25 bp, Homo sapien
gggtctggactatcattctcatata

SEQ ID NO: 3402680 - DNA, 25 bp, Homo sapien
gtttaccatacttccagctctggcc

SEQ ID NO: 3402681 - DNA, 25 bp, Homo sapien
taaaactcacacatttttaggtaca

SEQ ID NO: 3402682 - DNA, 25 bp, Homo sapien
ctttatgtttaccatacttccagct

SEQ ID NO: 3402683 - DNA, 25 bp, Homo sapien
ggctttatgtttaccatacttccag

SEQ ID NO: 3402684 - DNA, 25 bp, Homo sapien
gacaacaatgttcggaggcagagat

SEQ ID NO: 3402685 - DNA, 25 bp, Homo sapien
tgtggcaacagcctaataaacggtg

SEQ ID NO: 3402686 - DNA, 25 bp, Homo sapien
tacagaatgttgtccacgtacactc

SEQ ID NO: 3402687 - DNA, 25 bp, Homo sapien
cacatcccttgtctctggtgggtcc

SEQ ID NO: 3402688 - DNA, 25 bp, Homo sapien
tggttcttgtctccactttgaattt

SEQ ID NO: 3402689 - DNA, 25 bp, Homo sapien
gatgcaaagtcaacagcaatggttc

SEQ ID NO: 3402690 - DNA, 25 bp, Homo sapien
aagaccagccaagcctgttttaatt

SEQ ID NO: 3402691 - DNA, 25 bp, Homo sapien
ctaagatgccgatttcaagaccagc

SEQ ID NO: 3402692 - DNA, 25 bp, Homo sapien
gaaaaatgcaacacaattgcttccc

SEQ ID NO: 3402693 - DNA, 25 bp, Homo sapien
tttaatgaggaaagtggtggcacag

SEQ ID NO: 3402694 - DNA, 25 bp, Homo sapien
ctagaaccttctgggaaacactagg

SEQ ID NO: 3402695 - DNA, 25 bp, Homo sapien
cacaggcaaggataacaaagagttt

SEQ ID NO: 3402696 - DNA, 25 bp, Homo sapien
ggctggggctttaagccagcccaac

SEQ ID NO: 3402697 - DNA, 25 bp, Homo sapien
gtagtggaatcaagatgacccagga

SEQ ID NO: 3402698 - DNA, 25 bp, Homo sapien
tcttcgtttttgatatatactcagt

SEQ ID NO: 3402699 - DNA, 25 bp, Homo sapien
cccaggatggggttggacaccagaa

SEQ ID NO: 3402700 - DNA, 25 bp, Homo sapien
gaggagccatcctcttaagagttga

SEQ ID NO: 3402701 - DNA, 25 bp, Homo sapien
tcttaagagttgatccttgcagaga

SEQ ID NO: 3402702 - DNA, 25 bp, Homo sapien
ccatcctcttaagagttgatccttg

SEQ ID NO: 3402703 - DNA, 25 bp, Homo sapien
tcctcttaagagttgatccttgcag

SEQ ID NO: 3402704 - DNA, 25 bp, Homo sapien
aaagtattcaggatactcatacgac

SEQ ID NO: 3402705 - DNA, 25 bp, Homo sapien
aaaagtattcaggatactcatacga

SEQ ID NO: 3402706 - DNA, 25 bp, Homo sapien
agtattcaggatactcatacgacat

SEQ ID NO: 3402707 - DNA, 25 bp, Homo sapien
aagtattcaggatactcatacgaca

SEQ ID NO: 3402708 - DNA, 25 bp, Homo sapien
tatggctaggcccatacccagggaa

SEQ ID NO: 3402709 - DNA, 25 bp, Homo sapien
gctggactccagtgtcatagtgtga

SEQ ID NO: 3402710 - DNA, 25 bp, Homo sapien
tatggagcatagaaattactgaacc

SEQ ID NO: 3402711 - DNA, 25 bp, Homo sapien
cccagggaactcaggtagtaaacag

SEQ ID NO: 3402712 - DNA, 25 bp, Homo sapien
ttacaaacagaaagaatattaatat

SEQ ID NO: 3402713 - DNA, 25 bp, Homo sapien
taatatttatcattttcttgatcac

SEQ ID NO: 3402714 - DNA, 25 bp, Homo sapien
cagaaagaatattaatatttatcat

SEQ ID NO: 3402715 - DNA, 25 bp, Homo sapien
aacagaaagaatattaatatttatc

SEQ ID NO: 3402716 - DNA, 25 bp, Homo sapien
catgagaattctgcctcaggcaatt

SEQ ID NO: 3402717 - DNA, 25 bp, Homo sapien
gcatcaattttgtgcatgagagtct

SEQ ID NO: 3402718 - DNA, 25 bp, Homo sapien
tttcaagtatctgacactgcccatg

SEQ ID NO: 3402719 - DNA, 25 bp, Homo sapien
gctaagtattcctccttttggcagg

SEQ ID NO: 3402720 - DNA, 25 bp, Homo sapien
cactgaatatgctgatctgtgctca

SEQ ID NO: 3402721 - DNA, 25 bp, Homo sapien
tgctcagatcctgcatgaaggataa

SEQ ID NO: 3402722 - DNA, 25 bp, Homo sapien
tctgtgctcagatcctgcatgaagg

SEQ ID NO: 3402723 - DNA, 25 bp, Homo sapien
cgtaatgaccactgaatatgctgat

SEQ ID NO: 3402724 - DNA, 25 bp, Homo sapien
cctggccctggcaacgtaacacagt

SEQ ID NO: 3402725 - DNA, 25 bp, Homo sapien
gtggcattaggctgcagacatccat

SEQ ID NO: 3402726 - DNA, 25 bp, Homo sapien
ggccctggcaacgtaacacagtcaa

SEQ ID NO: 3402727 - DNA, 25 bp, Homo sapien
atccatgccccagttcccctgatgt

SEQ ID NO: 3402728 - DNA, 25 bp, Homo sapien
tttccataggcaccacaggcagttc

SEQ ID NO: 3402729 - DNA, 25 bp, Homo sapien
ctttccataggcaccacaggcagtt

SEQ ID NO: 3402730 - DNA, 25 bp, Homo sapien
ggcagttcaggtaatactgtttggg

SEQ ID NO: 3402731 - DNA, 25 bp, Homo sapien
caggcagttcaggtaatactgtttg

SEQ ID NO: 3402732 - DNA, 25 bp, Homo sapien
tttgggaggccgaggcggcggatca

SEQ ID NO: 3402733 - DNA, 25 bp, Homo sapien
aagtagacaaaagtggccgggcgcg

SEQ ID NO: 3402734 - DNA, 25 bp, Homo sapien
tggctcacgcctgtaatcccagcac

SEQ ID NO: 3402735 - DNA, 25 bp, Homo sapien
cgaggtcaggagatcgagaccatcc

SEQ ID NO: 3402736 - DNA, 25 bp, Homo sapien
gtagtaaacatgatttccagaccca

SEQ ID NO: 3402737 - DNA, 25 bp, Homo sapien
tattagacaagtagtagtaaacatg

SEQ ID NO: 3402738 - DNA, 25 bp, Homo sapien
tatagcgaacaattttaattctttc

SEQ ID NO: 3402739 - DNA, 25 bp, Homo sapien
ttccaaaagtgtatagcgaacaatt

SEQ ID NO: 3402740 - DNA, 25 bp, Homo sapien
catctgcaggtgataattgctgcac

SEQ ID NO: 3402741 - DNA, 25 bp, Homo sapien
gaggcttcgttatattcagatcaaa

SEQ ID NO: 3402742 - DNA, 25 bp, Homo sapien
tctacgcattagttaagaggcttcg

SEQ ID NO: 3402743 - DNA, 25 bp, Homo sapien
caggctgtttctggagttaactcaa

SEQ ID NO: 3402744 - DNA, 25 bp, Homo sapien
aaaaatgtctttacccaggtgtatg

SEQ ID NO: 3402745 - DNA, 25 bp, Homo sapien
tgttaactataaagcagctaagtgg

SEQ ID NO: 3402746 - DNA, 25 bp, Homo sapien
tcaagaggccttttatgtagggaca

SEQ ID NO: 3402747 - DNA, 25 bp, Homo sapien
tgcgtgcgcatttgtattaaggaaa

SEQ ID NO: 3402748 - DNA, 25 bp, Homo sapien
tcctgcctaccaagatgacttaagc

SEQ ID NO: 3402749 - DNA, 25 bp, Homo sapien
ccgaggctgtaacgtgaatttctga

SEQ ID NO: 3402750 - DNA, 25 bp, Homo sapien
ggaatactttaatgaacctggctaa

SEQ ID NO: 3402751 - DNA, 25 bp, Homo sapien
cacttctacagacagcaggttattt

SEQ ID NO: 3402752 - DNA, 25 bp, Homo sapien
gcaagagagaaagcaaaacattcat

SEQ ID NO: 3402753 - DNA, 25 bp, Homo sapien
ctgcaagagagaaagcaaaacattc

SEQ ID NO: 3402754 - DNA, 25 bp, Homo sapien
tgcaagagagaaagcaaaacattca

SEQ ID NO: 3402755 - DNA, 25 bp, Homo sapien
tgactcgcctggtacatcactctgt

SEQ ID NO: 3402756 - DNA, 25 bp, Homo sapien
catggaggcttggttcattagtcac

SEQ ID NO: 3402757 - DNA, 25 bp, Homo sapien
cactctgtggctaagacatggaggc

SEQ ID NO: 3402758 - DNA, 25 bp, Homo sapien
gggaatcgagtggaaaaggcctcca

SEQ ID NO: 3402759 - DNA, 25 bp, Homo sapien
cattcggcatgtactagcagaacca

SEQ ID NO: 3402760 - DNA, 25 bp, Homo sapien
gctagctcaggatgcaagcccaaat

SEQ ID NO: 3402761 - DNA, 25 bp, Homo sapien
tcaaagctgtgattcctctgggtct

SEQ ID NO: 3402762 - DNA, 25 bp, Homo sapien
aagctgtaatccctgcctggagtag

SEQ ID NO: 3402763 - DNA, 25 bp, Homo sapien
actgcgaccaatgcctcccagggtt

SEQ ID NO: 3402764 - DNA, 25 bp, Homo sapien
tgattcttgtgcctaagccacctga

SEQ ID NO: 3402765 - DNA, 25 bp, Homo sapien
tcactgcgaccaatgcctcccaggg

SEQ ID NO: 3402766 - DNA, 25 bp, Homo sapien
caagtgattcttgtgcctaagccac

SEQ ID NO: 3402767 - DNA, 25 bp, Homo sapien
acaaatattgctttgtggaagaaag

SEQ ID NO: 3402768 - DNA, 25 bp, Homo sapien
attgtacaaatattgctttgtggaa

SEQ ID NO: 3402769 - DNA, 25 bp, Homo sapien
gtacaaatattgctttgtggaagaa

SEQ ID NO: 3402770 - DNA, 25 bp, Homo sapien
caaatattgctttgtggaagaaagt

SEQ ID NO: 3402771 - DNA, 25 bp, Homo sapien
cagaatagatggtcaagagtgggac

SEQ ID NO: 3402772 - DNA, 25 bp, Homo sapien
aaatgttcagaatagcccctttgga

SEQ ID NO: 3402773 - DNA, 25 bp, Homo sapien
cagggagcatgccactgccagatga

SEQ ID NO: 3402774 - DNA, 25 bp, Homo sapien
cttggttgcagaatagatggtcaag

SEQ ID NO: 3402775 - DNA, 25 bp, Homo sapien
ctcctcatggaggcactgagagaag

SEQ ID NO: 3402776 - DNA, 25 bp, Homo sapien
ccttgctcctatactcctcatggag

SEQ ID NO: 3402777 - DNA, 25 bp, Homo sapien
actgagagaagaaatctacaaaagt

SEQ ID NO: 3402778 - DNA, 25 bp, Homo sapien
cacaaagacgcccttgctcctatac

SEQ ID NO: 3402779 - DNA, 25 bp, Homo sapien
ggaactgtggcccaagccttgagag

SEQ ID NO: 3402780 - DNA, 25 bp, Homo sapien
gccatagggttcaggtgcaaatagg

SEQ ID NO: 3402781 - DNA, 25 bp, Homo sapien
tgggaggagatacagtgagaagaac

SEQ ID NO: 3402782 - DNA, 25 bp, Homo sapien
tgcaaatagggctgggaggagatac

SEQ ID NO: 3402783 - DNA, 25 bp, Homo sapien
gtcctcatcaacagactacacttat

SEQ ID NO: 3402784 - DNA, 25 bp, Homo sapien
cctccagggcatttacatcacttgt

SEQ ID NO: 3402785 - DNA, 25 bp, Homo sapien
cacttatgataaggtttccttgaga

SEQ ID NO: 3402786 - DNA, 25 bp, Homo sapien
tcaaaatcaaatagtctctcaggcc

SEQ ID NO: 3402787 - DNA, 25 bp, Homo sapien
taagcaagtttcaggactcctcttt

SEQ ID NO: 3402788 - DNA, 25 bp, Homo sapien
gactttaagcaagtttcaggactcc

SEQ ID NO: 3402789 - DNA, 25 bp, Homo sapien
tttaagcaagtttcaggactcctct

SEQ ID NO: 3402790 - DNA, 25 bp, Homo sapien
gcaagtttcaggactcctctttatt

SEQ ID NO: 3402791 - DNA, 25 bp, Homo sapien
gtgcatggcgcccagaggatttctt

SEQ ID NO: 3402792 - DNA, 25 bp, Homo sapien
gcatggcgcccagaggatttcttca

SEQ ID NO: 3402793 - DNA, 25 bp, Homo sapien
tattcttttgtaatctcctgctaag

SEQ ID NO: 3402794 - DNA, 25 bp, Homo sapien
ttcaaatgtaaatggagtattcttt

SEQ ID NO: 3402795 - DNA, 25 bp, Homo sapien
caaatagtgggtatgctgcaaggat

SEQ ID NO: 3402796 - DNA, 25 bp, Homo sapien
aaccacgatgggtgtaggaaggcca

SEQ ID NO: 3402797 - DNA, 25 bp, Homo sapien
cattctggctgctatgagtaggcta

SEQ ID NO: 3402798 - DNA, 25 bp, Homo sapien
tagtaagatactgcaaaatgtccag

SEQ ID NO: 3402799 - DNA, 25 bp, Homo sapien
cacactagggtgagatctccgactc

SEQ ID NO: 3402800 - DNA, 25 bp, Homo sapien
tattgataagatagaaccacctccc

SEQ ID NO: 3402801 - DNA, 25 bp, Homo sapien
gatttccgtcctgctgagacctaga

SEQ ID NO: 3402802 - DNA, 25 bp, Homo sapien
tagaaccaagaaccccagatggagt

SEQ ID NO: 3402803 - DNA, 25 bp, Homo sapien
gattcaggataggatacttttcaca

SEQ ID NO: 3402804 - DNA, 25 bp, Homo sapien
gaaccaccaagtaggagatctttga

SEQ ID NO: 3402805 - DNA, 25 bp, Homo sapien
catgccattgattagtaaggccaca

SEQ ID NO: 3402806 - DNA, 25 bp, Homo sapien
caaactcagaatgtacagtggtgct

SEQ ID NO: 3402807 - DNA, 25 bp, Homo sapien
acttcacaaacgtctccggagaggg

SEQ ID NO: 3402808 - DNA, 25 bp, Homo sapien
gcaggccgactgttttaattgcaga

SEQ ID NO: 3402809 - DNA, 25 bp, Homo sapien
cataagagcatggatcaggtatcca

SEQ ID NO: 3402810 - DNA, 25 bp, Homo sapien
ccattggttcgggattgcaggccga

SEQ ID NO: 3402811 - DNA, 25 bp, Homo sapien
ttcagatagtgagcccgtgtagact

SEQ ID NO: 3402812 - DNA, 25 bp, Homo sapien
gatagtgagcccgtgtagacttgtt

SEQ ID NO: 3402813 - DNA, 25 bp, Homo sapien
tcttcagatagtgagcccgtgtaga

SEQ ID NO: 3402814 - DNA, 25 bp, Homo sapien
tttcttcagatagtgagcccgtgta

SEQ ID NO: 3402815 - DNA, 25 bp, Homo sapien
ggtaaagaccaatcttcttgctgca

SEQ ID NO: 3402816 - DNA, 25 bp, Homo sapien
catctggccaagttacaatgcagtt

SEQ ID NO: 3402817 - DNA, 25 bp, Homo sapien
cagtgaacgtgcatatgctggagca

SEQ ID NO: 3402818 - DNA, 25 bp, Homo sapien
taggtgttcccgacaatattagttc

SEQ ID NO: 3402819 - DNA, 25 bp, Homo sapien
gacaagagcttgctacgttgcccgg

SEQ ID NO: 3402820 - DNA, 25 bp, Homo sapien
tcaaatacaagtgggtgcttgccaa

SEQ ID NO: 3402821 - DNA, 25 bp, Homo sapien
tcacggtagcttctaatccctgggc

SEQ ID NO: 3402822 - DNA, 25 bp, Homo sapien
tgtatacttgcaagagaatccctcc

SEQ ID NO: 3402823 - DNA, 25 bp, Homo sapien
aacatagggttcatggattaggacc

SEQ ID NO: 3402824 - DNA, 25 bp, Homo sapien
catgtagatgcaagaatcccaggta

SEQ ID NO: 3402825 - DNA, 25 bp, Homo sapien
caataaataccagggccagacagct

SEQ ID NO: 3402826 - DNA, 25 bp, Homo sapien
caaattgttggtgggatgcttcatc

SEQ ID NO: 3402827 - DNA, 25 bp, Homo sapien
aaaaactggccatactgtggctggg

SEQ ID NO: 3402828 - DNA, 25 bp, Homo sapien
gatcatgccatcgtacatgcctagg

SEQ ID NO: 3402829 - DNA, 25 bp, Homo sapien
ttaacaagcagtgccacatatgtag

SEQ ID NO: 3402830 - DNA, 25 bp, Homo sapien
gcttgggcaacatacccagctactc

SEQ ID NO: 3402831 - DNA, 25 bp, Homo sapien
tactaaagggtagagatggccaaat

SEQ ID NO: 3402832 - DNA, 25 bp, Homo sapien
gaagagttcaactcaccaggacaac

SEQ ID NO: 3402833 - DNA, 25 bp, Homo sapien
ggaagtcactacataacaagaagag

SEQ ID NO: 3402834 - DNA, 25 bp, Homo sapien
catcaacacgtaggaggtaaaagga

SEQ ID NO: 3402835 - DNA, 25 bp, Homo sapien
tacgggtagggaattctgtacttgc

SEQ ID NO: 3402836 - DNA, 25 bp, Homo sapien
gcatggcacctaatgtaaactgtac

SEQ ID NO: 3402837 - DNA, 25 bp, Homo sapien
tctggcagtatagctaaaaaatcct

SEQ ID NO: 3402838 - DNA, 25 bp, Homo sapien
gagtggccacaaataccctaggtat

SEQ ID NO: 3402839 - DNA, 25 bp, Homo sapien
cagggaaaggacaaactctctatgg

SEQ ID NO: 3402840 - DNA, 25 bp, Homo sapien
acttctgggctcaatcggttggtcc

SEQ ID NO: 3402841 - DNA, 25 bp, Homo sapien
gagtctggcccctttcatagtcttg

SEQ ID NO: 3402842 - DNA, 25 bp, Homo sapien
tacagggcactgaatctaatcaagg

SEQ ID NO: 3402843 - DNA, 25 bp, Homo sapien
cactggagaccgatgtaagcaatga

SEQ ID NO: 3402844 - DNA, 25 bp, Homo sapien
ggacatagcaatagcaagccattac

SEQ ID NO: 3402845 - DNA, 25 bp, Homo sapien
taaagcaccattagcaagagtcagc

SEQ ID NO: 3402846 - DNA, 25 bp, Homo sapien
aggtactggcatctctactagagga

SEQ ID NO: 3402847 - DNA, 25 bp, Homo sapien
cccatgtctgatggaaacaaacaca

SEQ ID NO: 3402848 - DNA, 25 bp, Homo sapien
ttctcccatgaagaatttacattta

SEQ ID NO: 3402849 - DNA, 25 bp, Homo sapien
agaccaaaattggtagtgtccccat

SEQ ID NO: 3402850 - DNA, 25 bp, Homo sapien
aaattggtagtgtccccatgtctga

SEQ ID NO: 3402851 - DNA, 25 bp, Homo sapien
tcaatcatgtgcagcttgtggagtg

SEQ ID NO: 3402852 - DNA, 25 bp, Homo sapien
actctcttgccaagcgttccctgtt

SEQ ID NO: 3402853 - DNA, 25 bp, Homo sapien
gttgccgattttcacaccactctct

SEQ ID NO: 3402854 - DNA, 25 bp, Homo sapien
aagcgttccctgtttcaatcatgtg

SEQ ID NO: 3402855 - DNA, 25 bp, Homo sapien
caagcatcggcatctttgtggcaga

SEQ ID NO: 3402856 - DNA, 25 bp, Homo sapien
ggcacttcctctcgacgttacgcag

SEQ ID NO: 3402857 - DNA, 25 bp, Homo sapien
tggagggcctaatcaccgaaggtgc

SEQ ID NO: 3402858 - DNA, 25 bp, Homo sapien
cgcagtctgtgatcggaaccttaag

SEQ ID NO: 3402859 - DNA, 25 bp, Homo sapien
actttccgcacggttgaggtgcaga

SEQ ID NO: 3402860 - DNA, 25 bp, Homo sapien
gactaagcgagctccgcaggtggaa

SEQ ID NO: 3402861 - DNA, 25 bp, Homo sapien
ccttctctttaaggaggcctagaat

SEQ ID NO: 3402862 - DNA, 25 bp, Homo sapien
gcttggtcgtggataagggcacttc

SEQ ID NO: 3402863 - DNA, 25 bp, Homo sapien
ggagccatatgttatttgccaggga

SEQ ID NO: 3402864 - DNA, 25 bp, Homo sapien
taaaatacaaggactctggcgccag

SEQ ID NO: 3402865 - DNA, 25 bp, Homo sapien
gccagaactcgctttgaatccagat

SEQ ID NO: 3402866 - DNA, 25 bp, Homo sapien
tgttgaaaatagattccagagcccc

SEQ ID NO: 3402867 - DNA, 25 bp, Homo sapien
tttgttcctgtttcaaactactcca

SEQ ID NO: 3402868 - DNA, 25 bp, Homo sapien
caaaaaggcttctgctccgagcttt

SEQ ID NO: 3402869 - DNA, 25 bp, Homo sapien
gcttctgctccgagctttcagaaga

SEQ ID NO: 3402870 - DNA, 25 bp, Homo sapien
cctgtttcaaactactccatggtat

SEQ ID NO: 3402871 - DNA, 25 bp, Homo sapien
gctccctgaactcgggctcgccgtc

SEQ ID NO: 3402872 - DNA, 25 bp, Homo sapien
cctgaactcgggctcgccgtctttt

SEQ ID NO: 3402873 - DNA, 25 bp, Homo sapien
ctgaactcgggctcgccgtcttttt

SEQ ID NO: 3402874 - DNA, 25 bp, Homo sapien
caggctccctgaactcgggctcgcc

SEQ ID NO: 3402875 - DNA, 25 bp, Homo sapien
tggagatggctcttagcagtggtag

SEQ ID NO: 3402876 - DNA, 25 bp, Homo sapien
ctggtggagatggctcttagcagtg

SEQ ID NO: 3402877 - DNA, 25 bp, Homo sapien
ggtggagatggctcttagcagtggt

SEQ ID NO: 3402878 - DNA, 25 bp, Homo sapien
gtggagatggctcttagcagtggta

SEQ ID NO: 3402879 - DNA, 25 bp, Homo sapien
tctgtcagagagatgatgctctttg

SEQ ID NO: 3402880 - DNA, 25 bp, Homo sapien
cacaaactctctgtcagagagatga

SEQ ID NO: 3402881 - DNA, 25 bp, Homo sapien
agagagatgatgctctttgttcttc

SEQ ID NO: 3402882 - DNA, 25 bp, Homo sapien
actctctgtcagagagatgatgctc

SEQ ID NO: 3402883 - DNA, 25 bp, Homo sapien
gtggctcaggagctctacgtactac

SEQ ID NO: 3402884 - DNA, 25 bp, Homo sapien
tgtgggtgacaggctgatttcatac

SEQ ID NO: 3402885 - DNA, 25 bp, Homo sapien
ggtgacaggctgatttcatacacac

SEQ ID NO: 3402886 - DNA, 25 bp, Homo sapien
ctagatacacctgtgggtgacaggc

SEQ ID NO: 3402887 - DNA, 25 bp, Homo sapien
tgggtgacaggctgatttcatacac

SEQ ID NO: 3402888 - DNA, 25 bp, Homo sapien
cacgtcaacaaagccaggatacaaa

SEQ ID NO: 3402889 - DNA, 25 bp, Homo sapien
tttcacgtcaacaaagccaggatac

SEQ ID NO: 3402890 - DNA, 25 bp, Homo sapien
ctttcacgtcaacaaagccaggata

SEQ ID NO: 3402891 - DNA, 25 bp, Homo sapien
tcacgtcaacaaagccaggatacaa

SEQ ID NO: 3402892 - DNA, 25 bp, Homo sapien
cctctctgatgccagtcctctgttt

SEQ ID NO: 3402893 - DNA, 25 bp, Homo sapien
atgccagtcctctgtttccagggaa

SEQ ID NO: 3402894 - DNA, 25 bp, Homo sapien
ctgatgccagtcctctgtttccagg

SEQ ID NO: 3402895 - DNA, 25 bp, Homo sapien
ctctgatgccagtcctctgtttcca

SEQ ID NO: 3402896 - DNA, 25 bp, Homo sapien
aagtgtaaggaagttctccatacca

SEQ ID NO: 3402897 - DNA, 25 bp, Homo sapien
ccataccatgctgtaagtcttggtt

SEQ ID NO: 3402898 - DNA, 25 bp, Homo sapien
taagtgtaaggaagttctccatacc

SEQ ID NO: 3402899 - DNA, 25 bp, Homo sapien
aagtcttggttgctgataagttata

SEQ ID NO: 3402900 - DNA, 25 bp, Homo sapien
ccaaagcaaaatcagacggaagtct

SEQ ID NO: 3402901 - DNA, 25 bp, Homo sapien
aacaagccaaagcaaaatcagacgg

SEQ ID NO: 3402902 - DNA, 25 bp, Homo sapien
agcagcagaaacaagccaaagcaaa

SEQ ID NO: 3402903 - DNA, 25 bp, Homo sapien
aaatcagacggaagtctgagaactg

SEQ ID NO: 3402904 - DNA, 25 bp, Homo sapien
gggtgtggccgataatcacaactat

SEQ ID NO: 3402905 - DNA, 25 bp, Homo sapien
tttgtacgggatattaagcttcagg

SEQ ID NO: 3402906 - DNA, 25 bp, Homo sapien
gagccagccaaatctgaattaaaga

SEQ ID NO: 3402907 - DNA, 25 bp, Homo sapien
taaaggcaaagttatgagccagcca

SEQ ID NO: 3402908 - DNA, 25 bp, Homo sapien
ggttccactaacaggtgctgacttc

SEQ ID NO: 3402909 - DNA, 25 bp, Homo sapien
ctgcggagcagtcgcggttccacta

SEQ ID NO: 3402910 - DNA, 25 bp, Homo sapien
cagctctgcggagcagtcgcggttc

SEQ ID NO: 3402911 - DNA, 25 bp, Homo sapien
gcagtcgcggttccactaacaggtg

SEQ ID NO: 3402912 - DNA, 25 bp, Homo sapien
gggatgtggggtggcgacgggcgct

SEQ ID NO: 3402913 - DNA, 25 bp, Homo sapien
tgggatgtggggtggcgacgggcgc

SEQ ID NO: 3402914 - DNA, 25 bp, Homo sapien
cctgggatgtggggtggcgacgggc

SEQ ID NO: 3402915 - DNA, 25 bp, Homo sapien
atgtggggtggcgacgggcgctcat

SEQ ID NO: 3402916 - DNA, 25 bp, Homo sapien
caaggagcccaaagtctagttcttg

SEQ ID NO: 3402917 - DNA, 25 bp, Homo sapien
tcaaggagcccaaagtctagttctt

SEQ ID NO: 3402918 - DNA, 25 bp, Homo sapien
cacctgtcttgccaaggataatcat

SEQ ID NO: 3402919 - DNA, 25 bp, Homo sapien
cacacctgtcttgccaaggataatc

SEQ ID NO: 3402920 - DNA, 25 bp, Homo sapien
acacctgtcttgccaaggataatca

SEQ ID NO: 3402921 - DNA, 25 bp, Homo sapien
ttttaagctgaatatggtgagagga

SEQ ID NO: 3402922 - DNA, 25 bp, Homo sapien
gcccatgaatgtcggaatcaaagga

SEQ ID NO: 3402923 - DNA, 25 bp, Homo sapien
ttgaaggggtatttgtataccctca

SEQ ID NO: 3402924 - DNA, 25 bp, Homo sapien
tcactgcccatgaatgtcggaatca

SEQ ID NO: 3402925 - DNA, 25 bp, Homo sapien
ctgcccatgaatgtcggaatcaaag

SEQ ID NO: 3402926 - DNA, 25 bp, Homo sapien
gtgaacggtatagcaattggaaaat

SEQ ID NO: 3402927 - DNA, 25 bp, Homo sapien
gggtgaacggtatagcaattggaaa

SEQ ID NO: 3402928 - DNA, 25 bp, Homo sapien
ttcagggtgaacggtatagcaattg

SEQ ID NO: 3402929 - DNA, 25 bp, Homo sapien
cagggtgaacggtatagcaattgga

SEQ ID NO: 3402930 - DNA, 25 bp, Homo sapien
ggtatattgtttcattgcaattttt

SEQ ID NO: 3402931 - DNA, 25 bp, Homo sapien
tattgtttcattgcaattttttcca

SEQ ID NO: 3402932 - DNA, 25 bp, Homo sapien
gtttcattgcaattttttccatggt

SEQ ID NO: 3402933 - DNA, 25 bp, Homo sapien
ctggtatattgtttcattgcaattt

SEQ ID NO: 3402934 - DNA, 25 bp, Homo sapien
aaatggcgaaggtagtattcaataa

SEQ ID NO: 3402935 - DNA, 25 bp, Homo sapien
atggcgaaggtagtattcaataatt

SEQ ID NO: 3402936 - DNA, 25 bp, Homo sapien
gcgaaggtagtattcaataattttc

SEQ ID NO: 3402937 - DNA, 25 bp, Homo sapien
ctaaatggcgaaggtagtattcaat

SEQ ID NO: 3402938 - DNA, 25 bp, Homo sapien
gaaggtggagtccaatggggcacaa

SEQ ID NO: 3402939 - DNA, 25 bp, Homo sapien
gaagagggcgtgatggaaggtggag

SEQ ID NO: 3402940 - DNA, 25 bp, Homo sapien
agtccaatggggcacaaaggttatg

SEQ ID NO: 3402941 - DNA, 25 bp, Homo sapien
tggggcacaaaggttatgcctcctt

SEQ ID NO: 3402942 - DNA, 25 bp, Homo sapien
gcttgtttcttgcaggatgacgaag

SEQ ID NO: 3402943 - DNA, 25 bp, Homo sapien
tgcttgtttcttgcaggatgacgaa

SEQ ID NO: 3402944 - DNA, 25 bp, Homo sapien
gctgcttgtttcttgcaggatgacg

SEQ ID NO: 3402945 - DNA, 25 bp, Homo sapien
ttgtttcttgcaggatgacgaagat

SEQ ID NO: 3402946 - DNA, 25 bp, Homo sapien
ttgaggacagcatctgggatgacaa

SEQ ID NO: 3402947 - DNA, 25 bp, Homo sapien
actcagcccctccttgaggacagca

SEQ ID NO: 3402948 - DNA, 25 bp, Homo sapien
tgagggcatcgccactcagcccctc

SEQ ID NO: 3402949 - DNA, 25 bp, Homo sapien
ctgctgagggcatcgccactcagcc

SEQ ID NO: 3402950 - DNA, 25 bp, Homo sapien
cccatgcacataggaactgaagaat

SEQ ID NO: 3402951 - DNA, 25 bp, Homo sapien
tagtttgttatcagggatgcccacc

SEQ ID NO: 3402952 - DNA, 25 bp, Homo sapien
tggaacggcccaggtagcaagaatg

SEQ ID NO: 3402953 - DNA, 25 bp, Homo sapien
ccgtgaagtctaatgagacagctct

SEQ ID NO: 3402954 - DNA, 25 bp, Homo sapien
atacagaggggccacccatctttgt

SEQ ID NO: 3402955 - DNA, 25 bp, Homo sapien
tgagcatacagaggggccacccatc

SEQ ID NO: 3402956 - DNA, 25 bp, Homo sapien
gaggggccacccatctttgtcgtga

SEQ ID NO: 3402957 - DNA, 25 bp, Homo sapien
gccacccatctttgtcgtgatgatg

SEQ ID NO: 3402958 - DNA, 25 bp, Homo sapien
agagaacgtatctcagcagggcttc

SEQ ID NO: 3402959 - DNA, 25 bp, Homo sapien
tcttcttcatttatggagagaacgt

SEQ ID NO: 3402960 - DNA, 25 bp, Homo sapien
cgagtgctctcaccaagccgttggt

SEQ ID NO: 3402961 - DNA, 25 bp, Homo sapien
tattctcttcacatcgccttagctc

SEQ ID NO: 3402962 - DNA, 25 bp, Homo sapien
ccgcagcactttgacatcaggtctc

SEQ ID NO: 3402963 - DNA, 25 bp, Homo sapien
tgaccgcaggatgagaagtcggccc

SEQ ID NO: 3402964 - DNA, 25 bp, Homo sapien
ctcgatgatccaccgcagcactttg

SEQ ID NO: 3402965 - DNA, 25 bp, Homo sapien
tctcttagggtaactggccttcacc

SEQ ID NO: 3402966 - DNA, 25 bp, Homo sapien
cctggtagtcatttcctgcataaat

SEQ ID NO: 3402967 - DNA, 25 bp, Homo sapien
ggtgttgtcatcaataaatggacta

SEQ ID NO: 3402968 - DNA, 25 bp, Homo sapien
gaatttccttctggtgttgtcatca

SEQ ID NO: 3402969 - DNA, 25 bp, Homo sapien
ttcctgcataaatgaggaatttcct

SEQ ID NO: 3402970 - DNA, 25 bp, Homo sapien
atgtaatccagcaggcctccaggac

SEQ ID NO: 3402971 - DNA, 25 bp, Homo sapien
tcaatgtaatccagcaggcctccag

SEQ ID NO: 3402972 - DNA, 25 bp, Homo sapien
ctatcaatgtaatccagcaggcctc

SEQ ID NO: 3402973 - DNA, 25 bp, Homo sapien
tatcaatgtaatccagcaggcctcc

SEQ ID NO: 3402974 - DNA, 25 bp, Homo sapien
aatgagaatcttgtgtggggctcct

SEQ ID NO: 3402975 - DNA, 25 bp, Homo sapien
aattccaagtggtgactgaagaggc

SEQ ID NO: 3402976 - DNA, 25 bp, Homo sapien
tccatggtccagtagagagatttgg

SEQ ID NO: 3402977 - DNA, 25 bp, Homo sapien
aatgtcccctttgtacatgtcaaaa

SEQ ID NO: 3402978 - DNA, 25 bp, Homo sapien
ggagtcctttttgggtggctgtggc

SEQ ID NO: 3402979 - DNA, 25 bp, Homo sapien
gtcctttttgggtggctgtggcgac

SEQ ID NO: 3402980 - DNA, 25 bp, Homo sapien
ctagggagtcctttttgggtggctg

SEQ ID NO: 3402981 - DNA, 25 bp, Homo sapien
ctggagaggtggggcccctagggag

SEQ ID NO: 3402982 - DNA, 25 bp, Homo sapien
ggccccactgccagactttgtctat

SEQ ID NO: 3402983 - DNA, 25 bp, Homo sapien
atgctgtagtcacggccccactgcc

SEQ ID NO: 3402984 - DNA, 25 bp, Homo sapien
catgctgtagtcacggccccactgc

SEQ ID NO: 3402985 - DNA, 25 bp, Homo sapien
cccactgccagactttgtctatgag

SEQ ID NO: 3402986 - DNA, 25 bp, Homo sapien
tgcacgccttctcctttgcagatca

SEQ ID NO: 3402987 - DNA, 25 bp, Homo sapien
ctttgcagatcagaggcaattccac

SEQ ID NO: 3402988 - DNA, 25 bp, Homo sapien
cacgccttctcctttgcagatcaga

SEQ ID NO: 3402989 - DNA, 25 bp, Homo sapien
ctcctttgcagatcagaggcaattc

SEQ ID NO: 3402990 - DNA, 25 bp, Homo sapien
gcccggccacgtggtcacatgcgag

SEQ ID NO: 3402991 - DNA, 25 bp, Homo sapien
tgcaggatgcagaggcccggccacg

SEQ ID NO: 3402992 - DNA, 25 bp, Homo sapien
atgcagaggcccggccacgtggtca

SEQ ID NO: 3402993 - DNA, 25 bp, Homo sapien
cagaggcccggccacgtggtcacat

SEQ ID NO: 3402994 - DNA, 25 bp, Homo sapien
tgcagggacgcgagcacatcatcca

SEQ ID NO: 3402995 - DNA, 25 bp, Homo sapien
ggtgcacacgggcatgctgtggaat

SEQ ID NO: 3402996 - DNA, 25 bp, Homo sapien
gacgcgagcacatcatccacctggg

SEQ ID NO: 3402997 - DNA, 25 bp, Homo sapien
gagatctgcagggacgcgagcacat

SEQ ID NO: 3402998 - DNA, 25 bp, Homo sapien
ctctgaaatcctcggagcctatcac

SEQ ID NO: 3402999 - DNA, 25 bp, Homo sapien
cctctgaaatcctcggagcctatca

SEQ ID NO: 3403000 - DNA, 25 bp, Homo sapien
acctctgaaatcctcggagcctatc

SEQ ID NO: 3403001 - DNA, 25 bp, Homo sapien
tgagaggagtccatacaatgtctct

SEQ ID NO: 3403002 - DNA, 25 bp, Homo sapien
aatgtctctgctcggcgggagggtg

SEQ ID NO: 3403003 - DNA, 25 bp, Homo sapien
tacaatgtctctgctcggcgggagg

SEQ ID NO: 3403004 - DNA, 25 bp, Homo sapien
agaggagtccatacaatgtctctgc

SEQ ID NO: 3403005 - DNA, 25 bp, Homo sapien
ggatcagagttaaaactacctgcca

SEQ ID NO: 3403006 - DNA, 25 bp, Homo sapien
taggatcagagttaaaactacctgc

SEQ ID NO: 3403007 - DNA, 25 bp, Homo sapien
atcagagttaaaactacctgccaag

SEQ ID NO: 3403008 - DNA, 25 bp, Homo sapien
gatcagagttaaaactacctgccaa

SEQ ID NO: 3403009 - DNA, 25 bp, Homo sapien
cacgctgtccttctcattgcgataa

SEQ ID NO: 3403010 - DNA, 25 bp, Homo sapien
tccctagtgagggttcatcatcact

SEQ ID NO: 3403011 - DNA, 25 bp, Homo sapien
tcttcaatgcggttctttagtgtgc

SEQ ID NO: 3403012 - DNA, 25 bp, Homo sapien
aagattgcagagtaaggagttgaag

SEQ ID NO: 3403013 - DNA, 25 bp, Homo sapien
catctcaaatgtgcgtgtggcacca

SEQ ID NO: 3403014 - DNA, 25 bp, Homo sapien
tctcatctcaaatgtgcgtgtggca

SEQ ID NO: 3403015 - DNA, 25 bp, Homo sapien
caaatgtgcgtgtggcaccaaaact

SEQ ID NO: 3403016 - DNA, 25 bp, Homo sapien
ttctttctcatctcaaatgtgcgtg

SEQ ID NO: 3403017 - DNA, 25 bp, Homo sapien
attataagctgaatgatcaggaatg

SEQ ID NO: 3403018 - DNA, 25 bp, Homo sapien
cgactgggtctggtttaacattata

SEQ ID NO: 3403019 - DNA, 25 bp, Homo sapien
aacattataagctgaatgatcagga

SEQ ID NO: 3403020 - DNA, 25 bp, Homo sapien
ttaacattataagctgaatgatcag

SEQ ID NO: 3403021 - DNA, 25 bp, Homo sapien
catgttcatcaaaataggctccaag

SEQ ID NO: 3403022 - DNA, 25 bp, Homo sapien
cttgccactggcagacaattatgtg

SEQ ID NO: 3403023 - DNA, 25 bp, Homo sapien
tcagctaccatcgtcatagcgcaga

SEQ ID NO: 3403024 - DNA, 25 bp, Homo sapien
tatgtggactttaccacttctgagt

SEQ ID NO: 3403025 - DNA, 25 bp, Homo sapien
tgattactacagcaactttcatggg

SEQ ID NO: 3403026 - DNA, 25 bp, Homo sapien
tgaaaagtcaccatagcatctacca

SEQ ID NO: 3403027 - DNA, 25 bp, Homo sapien
ttggcaacatcagggatagaaacag

SEQ ID NO: 3403028 - DNA, 25 bp, Homo sapien
catttcacagaccaagggtaccttg

SEQ ID NO: 3403029 - DNA, 25 bp, Homo sapien
ctgaggttattggttcgaaacagtt

SEQ ID NO: 3403030 - DNA, 25 bp, Homo sapien
gtcactgaggttattggttcgaaac

SEQ ID NO: 3403031 - DNA, 25 bp, Homo sapien
taagtcactgaggttattggttcga

SEQ ID NO: 3403032 - DNA, 25 bp, Homo sapien
cactgaggttattggttcgaaacag

SEQ ID NO: 3403033 - DNA, 25 bp, Homo sapien
gcgcaccaccacgcctgcctatttt

SEQ ID NO: 3403034 - DNA, 25 bp, Homo sapien
cgcgcaccaccacgcctgcctattt

SEQ ID NO: 3403035 - DNA, 25 bp, Homo sapien
gacacaagtgctacttcatcttcaa

SEQ ID NO: 3403036 - DNA, 25 bp, Homo sapien
ctgagagatgctcaggacacaagtg

SEQ ID NO: 3403037 - DNA, 25 bp, Homo sapien
tatcaaatacacgtacaattgcttt

SEQ ID NO: 3403038 - DNA, 25 bp, Homo sapien
gggaaatatcaaatacacgtacaat

SEQ ID NO: 3403039 - DNA, 25 bp, Homo sapien
gattcccttgtcagtcaccttagca

SEQ ID NO: 3403040 - DNA, 25 bp, Homo sapien
tctaagaccgttgtcatctgatgtg

SEQ ID NO: 3403041 - DNA, 25 bp, Homo sapien
tgctgctgataggtccatgacatga

SEQ ID NO: 3403042 - DNA, 25 bp, Homo sapien
gcagacttgtaagcgtctaagaccg

SEQ ID NO: 3403043 - DNA, 25 bp, Homo sapien
gccagattcagctccagggttgccc

SEQ ID NO: 3403044 - DNA, 25 bp, Homo sapien
acaagtctgagggccagattcagct

SEQ ID NO: 3403045 - DNA, 25 bp, Homo sapien
gggccagattcagctccagggttgc

SEQ ID NO: 3403046 - DNA, 25 bp, Homo sapien
cagattcagctccagggttgcccag

SEQ ID NO: 3403047 - DNA, 25 bp, Homo sapien
gcatttgaatgtagattggcccggc

SEQ ID NO: 3403048 - DNA, 25 bp, Homo sapien
tctacgatggcatgtgctcaggtgc

SEQ ID NO: 3403049 - DNA, 25 bp, Homo sapien
tatggcaccctgactatactgtagg

SEQ ID NO: 3403050 - DNA, 25 bp, Homo sapien
tttctctaaggcaaaagctagcagg

SEQ ID NO: 3403051 - DNA, 25 bp, Homo sapien
tagaaattacaaacaatcatcaatg

SEQ ID NO: 3403052 - DNA, 25 bp, Homo sapien
tcttagaaattacaaacaatcatca

SEQ ID NO: 3403053 - DNA, 25 bp, Homo sapien
ttagaaattacaaacaatcatcaat

SEQ ID NO: 3403054 - DNA, 25 bp, Homo sapien
cttagaaattacaaacaatcatcaa

SEQ ID NO: 3403055 - DNA, 25 bp, Homo sapien
tacttgaaaccctacgagtacatgg

SEQ ID NO: 3403056 - DNA, 25 bp, Homo sapien
cacatggctgtgcataaaggctcca

SEQ ID NO: 3403057 - DNA, 25 bp, Homo sapien
tagggtcacactcaagctacagggt

SEQ ID NO: 3403058 - DNA, 25 bp, Homo sapien
gaagagtgccttcctagtcattaag

SEQ ID NO: 3403059 - DNA, 25 bp, Homo sapien
ggcagctgcttgactgttggcaagt

SEQ ID NO: 3403060 - DNA, 25 bp, Homo sapien
aaaatggaaacctctgctcagccag

SEQ ID NO: 3403061 - DNA, 25 bp, Homo sapien
caagatgcaacagaacctgacagag

SEQ ID NO: 3403062 - DNA, 25 bp, Homo sapien
tgtgggaatccatatatagctctgt

SEQ ID NO: 3403063 - DNA, 25 bp, Homo sapien
gccagtcagcttgtgtcgctccttc

SEQ ID NO: 3403064 - DNA, 25 bp, Homo sapien
gattaacaaggtcccatgatccaag

SEQ ID NO: 3403065 - DNA, 25 bp, Homo sapien
gcttgtgtcgctccttccatgatta

SEQ ID NO: 3403066 - DNA, 25 bp, Homo sapien
catgatccaagggtatcttcactct

SEQ ID NO: 3403067 - DNA, 25 bp, Homo sapien
aaatacacataactctgacataaat

SEQ ID NO: 3403068 - DNA, 25 bp, Homo sapien
atacacataactctgacataaatac

SEQ ID NO: 3403069 - DNA, 25 bp, Homo sapien
cacataactctgacataaatacaca

SEQ ID NO: 3403070 - DNA, 25 bp, Homo sapien
tacacataactctgacataaataca

SEQ ID NO: 3403071 - DNA, 25 bp, Homo sapien
tctggatagactgtccgaaaggtca

SEQ ID NO: 3403072 - DNA, 25 bp, Homo sapien
tgcccctcgagggtctggatagact

SEQ ID NO: 3403073 - DNA, 25 bp, Homo sapien
agtggtattctttgggcactcgatg

SEQ ID NO: 3403074 - DNA, 25 bp, Homo sapien
aaggtcaggttcactctcggttctc

SEQ ID NO: 3403075 - DNA, 25 bp, Homo sapien
cagtagacctattaccaacatgagt

SEQ ID NO: 3403076 - DNA, 25 bp, Homo sapien
taataggactccaagctggcaaaca

SEQ ID NO: 3403077 - DNA, 25 bp, Homo sapien
tcatgagatctagcagcaccagcct

SEQ ID NO: 3403078 - DNA, 25 bp, Homo sapien
aaggtttgctccgtttcagtgaagc

SEQ ID NO: 3403079 - DNA, 25 bp, Homo sapien
tcttcaaatgaaggcggggcgtgtg

SEQ ID NO: 3403080 - DNA, 25 bp, Homo sapien
gaggaaaactgcttagaacaaaatc

SEQ ID NO: 3403081 - DNA, 25 bp, Homo sapien
aaaactgcttagaacaaaatcatcc

SEQ ID NO: 3403082 - DNA, 25 bp, Homo sapien
acaagtccattgatatttcttcaaa

SEQ ID NO: 3403083 - DNA, 25 bp, Homo sapien
ctttcccccactggcagacagagaa

SEQ ID NO: 3403084 - DNA, 25 bp, Homo sapien
tggcagacagagaaactctaactct

SEQ ID NO: 3403085 - DNA, 25 bp, Homo sapien
actctcccgccctattttcatccat

SEQ ID NO: 3403086 - DNA, 25 bp, Homo sapien
agaaactctaactctcccgccctat

SEQ ID NO: 3403087 - DNA, 25 bp, Homo sapien
gcatggtgctccatctgagtgccga

SEQ ID NO: 3403088 - DNA, 25 bp, Homo sapien
tcttacagcctggaatggaaacagg

SEQ ID NO: 3403089 - DNA, 25 bp, Homo sapien
ccagagagcttgtcagagaacagcc

SEQ ID NO: 3403090 - DNA, 25 bp, Homo sapien
tttcttagagaaacaagccgtgctc

SEQ ID NO: 3403091 - DNA, 25 bp, Homo sapien
caatctggtgctaagtgtgtgttcc

SEQ ID NO: 3403092 - DNA, 25 bp, Homo sapien
gggtccccaagtgtattcacaggta

SEQ ID NO: 3403093 - DNA, 25 bp, Homo sapien
tgtggatcctgatttcaacactggg

SEQ ID NO: 3403094 - DNA, 25 bp, Homo sapien
gagtgctcagcagaccatttcgcct

SEQ ID NO: 3403095 - DNA, 25 bp, Homo sapien
caccaggcctctcagagtggcagaa

SEQ ID NO: 3403096 - DNA, 25 bp, Homo sapien
accaggcctctcagagtggcagaaa

SEQ ID NO: 3403097 - DNA, 25 bp, Homo sapien
ccaggcctctcagagtggcagaaag

SEQ ID NO: 3403098 - DNA, 25 bp, Homo sapien
caggcctctcagagtggcagaaaga

SEQ ID NO: 3403099 - DNA, 25 bp, Homo sapien
ctggtgcagcgtggagacgatcaat

SEQ ID NO: 3403100 - DNA, 25 bp, Homo sapien
gacgatcaataccactccttggagg

SEQ ID NO: 3403101 - DNA, 25 bp, Homo sapien
gggatccttgccacatatccagcca

SEQ ID NO: 3403102 - DNA, 25 bp, Homo sapien
ttggagggctgtcccagtaggcacc

SEQ ID NO: 3403103 - DNA, 25 bp, Homo sapien
gccgccgagagtgagcagagcatca

SEQ ID NO: 3403104 - DNA, 25 bp, Homo sapien
cgagagtgagcagagcatcaacgca

SEQ ID NO: 3403105 - DNA, 25 bp, Homo sapien
gtgagcagagcatcaacgcaaggcc

SEQ ID NO: 3403106 - DNA, 25 bp, Homo sapien
gagcatcaacgcaaggccactttgg

SEQ ID NO: 3403107 - DNA, 25 bp, Homo sapien
cttgcaggccaaggcgttctgtaca

SEQ ID NO: 3403108 - DNA, 25 bp, Homo sapien
tccagcctggtaatcttgtttactc

SEQ ID NO: 3403109 - DNA, 25 bp, Homo sapien
ggtcttgaacagaattccagcctgg

SEQ ID NO: 3403110 - DNA, 25 bp, Homo sapien
caatctctggatataaaagccctgg

SEQ ID NO: 3403111 - DNA, 25 bp, Homo sapien
gcggctggcagagaccgggcctgca

SEQ ID NO: 3403112 - DNA, 25 bp, Homo sapien
caagggaggcagcgatcctcctggc

SEQ ID NO: 3403113 - DNA, 25 bp, Homo sapien
cagagaccgggcctgcagcacagac

SEQ ID NO: 3403114 - DNA, 25 bp, Homo sapien
tgtttcctcggatggggtaccctga

SEQ ID NO: 3403115 - DNA, 25 bp, Homo sapien
gaagaatatcggaaaggcagcttcc

SEQ ID NO: 3403116 - DNA, 25 bp, Homo sapien
cccgagagcggaggaatgacttata

SEQ ID NO: 3403117 - DNA, 25 bp, Homo sapien
gaatttgccaaaggccatgtagcag

SEQ ID NO: 3403118 - DNA, 25 bp, Homo sapien
caggtctactggactaaaattgcca

SEQ ID NO: 3403119 - DNA, 25 bp, Homo sapien
ttttccagggaatagactgatgcag

SEQ ID NO: 3403120 - DNA, 25 bp, Homo sapien
ggagtgtggatgacacccaaaccta

SEQ ID NO: 3403121 - DNA, 25 bp, Homo sapien
gaaggcctcacgctgctcagacagg

SEQ ID NO: 3403122 - DNA, 25 bp, Homo sapien
cccaaacctactctgtgatgatggc

SEQ ID NO: 3403123 - DNA, 25 bp, Homo sapien
tgctccaaggttaaagtataagtct

SEQ ID NO: 3403124 - DNA, 25 bp, Homo sapien
gctccaaggttaaagtataagtctc

SEQ ID NO: 3403125 - DNA, 25 bp, Homo sapien
tatgctccaaggttaaagtataagt

SEQ ID NO: 3403126 - DNA, 25 bp, Homo sapien
cttatgctccaaggttaaagtataa

SEQ ID NO: 3403127 - DNA, 25 bp, Homo sapien
gttactgctgatgcccaaacgtggc

SEQ ID NO: 3403128 - DNA, 25 bp, Homo sapien
ctctaatcatatctccaagggtgga

SEQ ID NO: 3403129 - DNA, 25 bp, Homo sapien
tccacacagcagaagtgaaccaggt

SEQ ID NO: 3403130 - DNA, 25 bp, Homo sapien
gggaccttggcggatatcaacacct

SEQ ID NO: 3403131 - DNA, 25 bp, Homo sapien
ccaggctcgcggcttatatagcccg

SEQ ID NO: 3403132 - DNA, 25 bp, Homo sapien
ggctcgcggcttatatagcccgcgg

SEQ ID NO: 3403133 - DNA, 25 bp, Homo sapien
tcggggggcgctgttccgccgcgct

SEQ ID NO: 3403134 - DNA, 25 bp, Homo sapien
gcggcttatatagcccgcggctgcc

SEQ ID NO: 3403135 - DNA, 25 bp, Homo sapien
cgggcgggggatccaaatctgctgc

SEQ ID NO: 3403136 - DNA, 25 bp, Homo sapien
gaagtgcggcatcaccgcctggtaa

SEQ ID NO: 3403137 - DNA, 25 bp, Homo sapien
gccaggcacacgaagtgcggcatca

SEQ ID NO: 3403138 - DNA, 25 bp, Homo sapien
cggccatggcgcctccggcgtctgc

SEQ ID NO: 3403139 - DNA, 25 bp, Homo sapien
ccttgggcagcttggcgggccgcac

SEQ ID NO: 3403140 - DNA, 25 bp, Homo sapien
ccggcccttgggcagcttggcgggc

SEQ ID NO: 3403141 - DNA, 25 bp, Homo sapien
gcccttgggcagcttggcgggccgc

SEQ ID NO: 3403142 - DNA, 25 bp, Homo sapien
gccccggcccttgggcagcttggcg

SEQ ID NO: 3403143 - DNA, 25 bp, Homo sapien
gctctgcaggaacgacttcttggcc

SEQ ID NO: 3403144 - DNA, 25 bp, Homo sapien
ccgctgcagcgacaggctctgcgtg

SEQ ID NO: 3403145 - DNA, 25 bp, Homo sapien
tcggagtcgctggagtccaggctgt

SEQ ID NO: 3403146 - DNA, 25 bp, Homo sapien
tcctggatctcgtcgaaggtcaccg

SEQ ID NO: 3403147 - DNA, 25 bp, Homo sapien
cacagcagagttcgcactgggaaga

SEQ ID NO: 3403148 - DNA, 25 bp, Homo sapien
gagttgcaaaccatcggacaagggc

SEQ ID NO: 3403149 - DNA, 25 bp, Homo sapien
taaataaatgccttcagccatcgca

SEQ ID NO: 3403150 - DNA, 25 bp, Homo sapien
acaagggcatggagtggctacccgc

SEQ ID NO: 3403151 - DNA, 25 bp, Homo sapien
caactgcggtcagggagtcacctgc

SEQ ID NO: 3403152 - DNA, 25 bp, Homo sapien
tctcgcattgctggctccgacatct

SEQ ID NO: 3403153 - DNA, 25 bp, Homo sapien
ccgccgccaggaatcagcgcagagg

SEQ ID NO: 3403154 - DNA, 25 bp, Homo sapien
tgaactgtacggaggagagagctct

SEQ ID NO: 3403155 - DNA, 25 bp, Homo sapien
tgaagggtctagaagcccactggaa

SEQ ID NO: 3403156 - DNA, 25 bp, Homo sapien
ttcttccgcgagagaaggctatgca

SEQ ID NO: 3403157 - DNA, 25 bp, Homo sapien
tgctgccgaagaggtaagacagaga

SEQ ID NO: 3403158 - DNA, 25 bp, Homo sapien
gaaggtcttccagacacttgggaca

SEQ ID NO: 3403159 - DNA, 25 bp, Homo sapien
cttgcccttgtgaacccaaaatatc

SEQ ID NO: 3403160 - DNA, 25 bp, Homo sapien
ccctcacccacttgcccttgtgaac

SEQ ID NO: 3403161 - DNA, 25 bp, Homo sapien
tgactttcaatgtaaactatcagct

SEQ ID NO: 3403162 - DNA, 25 bp, Homo sapien
tttcaatgtaaactatcagctcaca

SEQ ID NO: 3403163 - DNA, 25 bp, Homo sapien
ttccaggtcaaagcacaggatatca

SEQ ID NO: 3403164 - DNA, 25 bp, Homo sapien
aaagtcctctccagagccacatgtg

SEQ ID NO: 3403165 - DNA, 25 bp, Homo sapien
gatatcagagagtgaaagtcctctc

SEQ ID NO: 3403166 - DNA, 25 bp, Homo sapien
ggtcaaagcacaggatatcagagag

SEQ ID NO: 3403167 - DNA, 25 bp, Homo sapien
caatggtggaagtgggtagcactgt

SEQ ID NO: 3403168 - DNA, 25 bp, Homo sapien
cctgggcaatggtggaagtgggtag

SEQ ID NO: 3403169 - DNA, 25 bp, Homo sapien
gaagtgggtagcactgtccgaatgc

SEQ ID NO: 3403170 - DNA, 25 bp, Homo sapien
gtgggtagcactgtccgaatgcccc

SEQ ID NO: 3403171 - DNA, 25 bp, Homo sapien
tgtagaagccaagttaccaccatat

SEQ ID NO: 3403172 - DNA, 25 bp, Homo sapien
tgctctgtagaagccaagttaccac

SEQ ID NO: 3403173 - DNA, 25 bp, Homo sapien
atctgctctgtagaagccaagttac

SEQ ID NO: 3403174 - DNA, 25 bp, Homo sapien
taccaccatatccaagttgctccct

SEQ ID NO: 3403175 - DNA, 25 bp, Homo sapien
gggcaagacacttcctccctctcag

SEQ ID NO: 3403176 - DNA, 25 bp, Homo sapien
atcctggttccattgcttgttgcct

SEQ ID NO: 3403177 - DNA, 25 bp, Homo sapien
gaaaagagacaaggatctctgcctt

SEQ ID NO: 3403178 - DNA, 25 bp, Homo sapien
caataccttagtacgttggctcttc

SEQ ID NO: 3403179 - DNA, 25 bp, Homo sapien
tgacattcactagaaaggagctttc

SEQ ID NO: 3403180 - DNA, 25 bp, Homo sapien
gctctctgtctatcacaggctagtg

SEQ ID NO: 3403181 - DNA, 25 bp, Homo sapien
tccccatctgggaaaatattccacc

SEQ ID NO: 3403182 - DNA, 25 bp, Homo sapien
cttgcataagtctctctccccatct

SEQ ID NO: 3403183 - DNA, 25 bp, Homo sapien
ctctctccccatctgggaaaatatt

SEQ ID NO: 3403184 - DNA, 25 bp, Homo sapien
ctctccccatctgggaaaatattcc

SEQ ID NO: 3403185 - DNA, 25 bp, Homo sapien
tcctaggcctcatgtgtgtcctcca

SEQ ID NO: 3403186 - DNA, 25 bp, Homo sapien
atgtgcgtcgactgccaactgctca

SEQ ID NO: 3403187 - DNA, 25 bp, Homo sapien
taagacagttctgttgacggctgcc

SEQ ID NO: 3403188 - DNA, 25 bp, Homo sapien
aaagtcaattccatgaggacagaca

SEQ ID NO: 3403189 - DNA, 25 bp, Homo sapien
ctctgtgactcccatagttaggaca

SEQ ID NO: 3403190 - DNA, 25 bp, Homo sapien
gtgactcccatagttaggacagggc

SEQ ID NO: 3403191 - DNA, 25 bp, Homo sapien
tgtgactcccatagttaggacaggg

SEQ ID NO: 3403192 - DNA, 25 bp, Homo sapien
tctgtgactcccatagttaggacag

SEQ ID NO: 3403193 - DNA, 25 bp, Homo sapien
atgccgcatccagacccctccagcc

SEQ ID NO: 3403194 - DNA, 25 bp, Homo sapien
catgccgcatccagacccctccagc

SEQ ID NO: 3403195 - DNA, 25 bp, Homo sapien
aaacagatccaaaaaccagctctct

SEQ ID NO: 3403196 - DNA, 25 bp, Homo sapien
tctctagcagctagaaccagtatcc

SEQ ID NO: 3403197 - DNA, 25 bp, Homo sapien
gctagaaccagtatcccaggatcag

SEQ ID NO: 3403198 - DNA, 25 bp, Homo sapien
tatcccaggatcagcccagtagatg

SEQ ID NO: 3403199 - DNA, 25 bp, Homo sapien
gcccagtagatgctagcagcctttt

SEQ ID NO: 3403200 - DNA, 25 bp, Homo sapien
actccgggtatctttactggcctct

SEQ ID NO: 3403201 - DNA, 25 bp, Homo sapien
cagctgggtatagatgctgtggtct

SEQ ID NO: 3403202 - DNA, 25 bp, Homo sapien
tctccaacagctgggtatagatgct

SEQ ID NO: 3403203 - DNA, 25 bp, Homo sapien
gaagggtgtctgaccgatgactcat

SEQ ID NO: 3403204 - DNA, 25 bp, Homo sapien
tgcaagtgcagcgttatctccaaca

SEQ ID NO: 3403205 - DNA, 25 bp, Homo sapien
tgatcatccggcatattaagcgact

SEQ ID NO: 3403206 - DNA, 25 bp, Homo sapien
taggtcgcggttgacaaaggcagct

SEQ ID NO: 3403207 - DNA, 25 bp, Homo sapien
gacagagatgtcaatcccacggatg

SEQ ID NO: 3403208 - DNA, 25 bp, Homo sapien
ccccagactgtaggaggttgatcat

SEQ ID NO: 3403209 - DNA, 25 bp, Homo sapien
gttcttgtccttatgatatttatct

SEQ ID NO: 3403210 - DNA, 25 bp, Homo sapien
tatctttttggtaggcattgtagtc

SEQ ID NO: 3403211 - DNA, 25 bp, Homo sapien
caaggtgttcttgtccttatgatat

SEQ ID NO: 3403212 - DNA, 25 bp, Homo sapien
atttatctttttggtaggcattgta

SEQ ID NO: 3403213 - DNA, 25 bp, Homo sapien
gaatccaagatcaggtcagtcctct

SEQ ID NO: 3403214 - DNA, 25 bp, Homo sapien
aaggaatccaagatcaggtcagtcc

SEQ ID NO: 3403215 - DNA, 25 bp, Homo sapien
ggaatccaagatcaggtcagtcctc

SEQ ID NO: 3403216 - DNA, 25 bp, Homo sapien
ggaaggaatccaagatcaggtcagt

SEQ ID NO: 3403217 - DNA, 25 bp, Homo sapien
cttgttctcactggtgccaaggtta

SEQ ID NO: 3403218 - DNA, 25 bp, Homo sapien
gtgtcctcaatgcagttcatgtcac

SEQ ID NO: 3403219 - DNA, 25 bp, Homo sapien
ggtgtcctcaatgcagttcatgtca

SEQ ID NO: 3403220 - DNA, 25 bp, Homo sapien
ctgggtcaagtcgggtaggtgccct

SEQ ID NO: 3403221 - DNA, 25 bp, Homo sapien
ggtcaagtcgggtaggtgccctgca

SEQ ID NO: 3403222 - DNA, 25 bp, Homo sapien
gggtcaagtcgggtaggtgccctgc

SEQ ID NO: 3403223 - DNA, 25 bp, Homo sapien
ctgcagtagtaggtcaggaaccggg

SEQ ID NO: 3403224 - DNA, 25 bp, Homo sapien
acacagaaccatggccagggcacag

SEQ ID NO: 3403225 - DNA, 25 bp, Homo sapien
gatcacacagaaccatggccagggc

SEQ ID NO: 3403226 - DNA, 25 bp, Homo sapien
agcagcagccatttagaaccaccac

SEQ ID NO: 3403227 - DNA, 25 bp, Homo sapien
gacagagcagcagccatttagaacc

SEQ ID NO: 3403228 - DNA, 25 bp, Homo sapien
gtgttgctagtatttcactgagagt

SEQ ID NO: 3403229 - DNA, 25 bp, Homo sapien
tgagagtgaaaggagagcccactga

SEQ ID NO: 3403230 - DNA, 25 bp, Homo sapien
gttgctagtatttcactgagagtga

SEQ ID NO: 3403231 - DNA, 25 bp, Homo sapien
tgttgctagtatttcactgagagtg

SEQ ID NO: 3403232 - DNA, 25 bp, Homo sapien
ttgcatacaggcgggagctaaaggc

SEQ ID NO: 3403233 - DNA, 25 bp, Homo sapien
aacctttgcatacaggcgggagcta

SEQ ID NO: 3403234 - DNA, 25 bp, Homo sapien
gcatacaggcgggagctaaaggcaa

SEQ ID NO: 3403235 - DNA, 25 bp, Homo sapien
cctttgcatacaggcgggagctaaa

SEQ ID NO: 3403236 - DNA, 25 bp, Homo sapien
ctggaaaggatgggtgtttgtaaca

SEQ ID NO: 3403237 - DNA, 25 bp, Homo sapien
aaggatgggtgtttgtaacagtgac

SEQ ID NO: 3403238 - DNA, 25 bp, Homo sapien
gaaaggatgggtgtttgtaacagtg

SEQ ID NO: 3403239 - DNA, 25 bp, Homo sapien
tggaaaggatgggtgtttgtaacag

SEQ ID NO: 3403240 - DNA, 25 bp, Homo sapien
ctcaagcctagcttcaagcagggct

SEQ ID NO: 3403241 - DNA, 25 bp, Homo sapien
agggcttcctctaacttgtccacag

SEQ ID NO: 3403242 - DNA, 25 bp, Homo sapien
agcagggcttcctctaacttgtcca

SEQ ID NO: 3403243 - DNA, 25 bp, Homo sapien
tcaagcagggcttcctctaacttgt

SEQ ID NO: 3403244 - DNA, 25 bp, Homo sapien
caggtatttcatcagtgagtctggg

SEQ ID NO: 3403245 - DNA, 25 bp, Homo sapien
aggtatttcatcagtgagtctgggg

SEQ ID NO: 3403246 - DNA, 25 bp, Homo sapien
aatctcatctatgatcacatgtagg

SEQ ID NO: 3403247 - DNA, 25 bp, Homo sapien
catctatgatcacatgtaggttata

SEQ ID NO: 3403248 - DNA, 25 bp, Homo sapien
agcatgtaaatctcatctatgatca

SEQ ID NO: 3403249 - DNA, 25 bp, Homo sapien
tgtaaatctcatctatgatcacatg

SEQ ID NO: 3403250 - DNA, 25 bp, Homo sapien
gatcacatgggtcctgttgctatca

SEQ ID NO: 3403251 - DNA, 25 bp, Homo sapien
ggtaccccagatcacatgggtcctg

SEQ ID NO: 3403252 - DNA, 25 bp, Homo sapien
ttactggtaccccagatcacatggg

SEQ ID NO: 3403253 - DNA, 25 bp, Homo sapien
catgggtcctgttgctatcaggcaa

SEQ ID NO: 3403254 - DNA, 25 bp, Homo sapien
tgttgtgggtatacagagcaccaaa

SEQ ID NO: 3403255 - DNA, 25 bp, Homo sapien
cttgttgtgggtatacagagcacca

SEQ ID NO: 3403256 - DNA, 25 bp, Homo sapien
ccttgttgtgggtatacagagcacc

SEQ ID NO: 3403257 - DNA, 25 bp, Homo sapien
ttgttgtgggtatacagagcaccaa

SEQ ID NO: 3403258 - DNA, 25 bp, Homo sapien
ctggccaccttggaagatgagatta

SEQ ID NO: 3403259 - DNA, 25 bp, Homo sapien
ggccaccttggaagatgagattatg

SEQ ID NO: 3403260 - DNA, 25 bp, Homo sapien
ttgtattagaagaatcagagtgttt

SEQ ID NO: 3403261 - DNA, 25 bp, Homo sapien
tgttgtattagaagaatcagagtgt

SEQ ID NO: 3403262 - DNA, 25 bp, Homo sapien
ccttcagctcagcagtgatgtactt

SEQ ID NO: 3403263 - DNA, 25 bp, Homo sapien
gtgagcttcccggagccggtagcaa

SEQ ID NO: 3403264 - DNA, 25 bp, Homo sapien
gtagcaattggtgggtaggtatact

SEQ ID NO: 3403265 - DNA, 25 bp, Homo sapien
ctgcggttgtgaaaagggatctcca

SEQ ID NO: 3403266 - DNA, 25 bp, Homo sapien
gaagcggcaatagaggagccgttct

SEQ ID NO: 3403267 - DNA, 25 bp, Homo sapien
tgtaggttttgccacgggataacaa

SEQ ID NO: 3403268 - DNA, 25 bp, Homo sapien
ttttgccacgggataacaatagctt

SEQ ID NO: 3403269 - DNA, 25 bp, Homo sapien
tagaggagccgttcttcttcaaatg

SEQ ID NO: 3403270 - DNA, 25 bp, Homo sapien
cagcacatcacagaaccgacgcata

SEQ ID NO: 3403271 - DNA, 25 bp, Homo sapien
agcacatcacagaaccgacgcatag

SEQ ID NO: 3403272 - DNA, 25 bp, Homo sapien
gcttcactatcaaagcctccttctg

SEQ ID NO: 3403273 - DNA, 25 bp, Homo sapien
tccaactgcttcactatcaaagcct

SEQ ID NO: 3403274 - DNA, 25 bp, Homo sapien
ccctcattgcatcctccaactgctt

SEQ ID NO: 3403275 - DNA, 25 bp, Homo sapien
ttgcatcctccaactgcttcactat

SEQ ID NO: 3403276 - DNA, 25 bp, Homo sapien
gtgctggcactcggtgggcgcccat

SEQ ID NO: 3403277 - DNA, 25 bp, Homo sapien
acagagggaggcctgaacggcttcc

SEQ ID NO: 3403278 - DNA, 25 bp, Homo sapien
tcctctgcaaagtagtggatcccac

SEQ ID NO: 3403279 - DNA, 25 bp, Homo sapien
aagtgtgatcggcgccaagggattc

SEQ ID NO: 3403280 - DNA, 25 bp, Homo sapien
cgagagacggctccaggtttccagg

SEQ ID NO: 3403281 - DNA, 25 bp, Homo sapien
gttcgagcctccaggcgtccagcag

SEQ ID NO: 3403282 - DNA, 25 bp, Homo sapien
tgaggccttggaatcccgcaagtgg

SEQ ID NO: 3403283 - DNA, 25 bp, Homo sapien
gatacccgcactcgatgaggccttg

SEQ ID NO: 3403284 - DNA, 25 bp, Homo sapien
cgtccagcaggacggcggcgaatcc

SEQ ID NO: 3403285 - DNA, 25 bp, Homo sapien
aaagcagagtattgcctgggagtcc

SEQ ID NO: 3403286 - DNA, 25 bp, Homo sapien
caaatgccaggttaaaatttcctga

SEQ ID NO: 3403287 - DNA, 25 bp, Homo sapien
cagatggcgggtaggaactgaggga

SEQ ID NO: 3403288 - DNA, 25 bp, Homo sapien
gattatgtggtgttctgaggcagat

SEQ ID NO: 3403289 - DNA, 25 bp, Homo sapien
gagccctgaagtccttttgaggaag

SEQ ID NO: 3403290 - DNA, 25 bp, Homo sapien
agtccttttgaggaagggtgaacat

SEQ ID NO: 3403291 - DNA, 25 bp, Homo sapien
ggcccagacaggtggtgggagccct

SEQ ID NO: 3403292 - DNA, 25 bp, Homo sapien
caggtggtgggagccctgaagtcct

SEQ ID NO: 3403293 - DNA, 25 bp, Homo sapien
agcattctccttccagatcttcccc

SEQ ID NO: 3403294 - DNA, 25 bp, Homo sapien
gcattctccttccagatcttcccca

SEQ ID NO: 3403295 - DNA, 25 bp, Homo sapien
catgtggtaggtcctgtagccctcc

SEQ ID NO: 3403296 - DNA, 25 bp, Homo sapien
tatcagaggagatcatggcaggatc

SEQ ID NO: 3403297 - DNA, 25 bp, Homo sapien
gggttcttgtcctcatcatactcat

SEQ ID NO: 3403298 - DNA, 25 bp, Homo sapien
tcctcagctgaatcccagaaccatt

SEQ ID NO: 3403299 - DNA, 25 bp, Homo sapien
tcactggtgcccaagttaatgatgc

SEQ ID NO: 3403300 - DNA, 25 bp, Homo sapien
ctcactggtgcccaagttaatgatg

SEQ ID NO: 3403301 - DNA, 25 bp, Homo sapien
tctcactggtgcccaagttaatgat

SEQ ID NO: 3403302 - DNA, 25 bp, Homo sapien
cactggtgcccaagttaatgatgcc

SEQ ID NO: 3403303 - DNA, 25 bp, Homo sapien
ttttgtccccctgaagagctaattg

SEQ ID NO: 3403304 - DNA, 25 bp, Homo sapien
ttgctaaatacctacaccacaaagc

SEQ ID NO: 3403305 - DNA, 25 bp, Homo sapien
gggactgagtgaaataagagtctac

SEQ ID NO: 3403306 - DNA, 25 bp, Homo sapien
agtgatatcacataaggagcttgaa

SEQ ID NO: 3403307 - DNA, 25 bp, Homo sapien
cttagctgccttagaaggaggagct

SEQ ID NO: 3403308 - DNA, 25 bp, Homo sapien
agctggctttaggtaaaacaggcct

SEQ ID NO: 3403309 - DNA, 25 bp, Homo sapien
taaaatctattccctggccgggtgc

SEQ ID NO: 3403310 - DNA, 25 bp, Homo sapien
ggaggagctggctttaggtaaaaca

SEQ ID NO: 3403311 - DNA, 25 bp, Homo sapien
tcatacccatgttgcaggtgaggaa

SEQ ID NO: 3403312 - DNA, 25 bp, Homo sapien
ttaacggaagagcacactgatcagc

SEQ ID NO: 3403313 - DNA, 25 bp, Homo sapien
aaaaagtgaggtcactcagccaagg

SEQ ID NO: 3403314 - DNA, 25 bp, Homo sapien
ccaacttctagagggacttaggcca

SEQ ID NO: 3403315 - DNA, 25 bp, Homo sapien
ccctctgcatgtcgcgctgactcag

SEQ ID NO: 3403316 - DNA, 25 bp, Homo sapien
tccaccctctgcatgtcgcgctgac

SEQ ID NO: 3403317 - DNA, 25 bp, Homo sapien
gatgtcccctccagtcagcatactg

SEQ ID NO: 3403318 - DNA, 25 bp, Homo sapien
acagatgtcccctccagtcagcata

SEQ ID NO: 3403319 - DNA, 25 bp, Homo sapien
ggctcttgcagtagaaagacaggaa

SEQ ID NO: 3403320 - DNA, 25 bp, Homo sapien
tctgaggggtactgggctcttgcag

SEQ ID NO: 3403321 - DNA, 25 bp, Homo sapien
gggctcttgcagtagaaagacagga

SEQ ID NO: 3403322 - DNA, 25 bp, Homo sapien
attctctggtctgaggggtactggg

SEQ ID NO: 3403323 - DNA, 25 bp, Homo sapien
aaagccactagactgacagccaagc

SEQ ID NO: 3403324 - DNA, 25 bp, Homo sapien
cacaacaaagccactagactgacag

SEQ ID NO: 3403325 - DNA, 25 bp, Homo sapien
tgacagccaagctcatccgtgtgga

SEQ ID NO: 3403326 - DNA, 25 bp, Homo sapien
tccgtgtggaccctgctccagatca

SEQ ID NO: 3403327 - DNA, 25 bp, Homo sapien
agaagagcgaggcaccaccattcag

SEQ ID NO: 3403328 - DNA, 25 bp, Homo sapien
gaagagcgaggcaccaccattcagg

SEQ ID NO: 3403329 - DNA, 25 bp, Homo sapien
agagaagagcgaggcaccaccattc

SEQ ID NO: 3403330 - DNA, 25 bp, Homo sapien
cagagaagagcgaggcaccaccatt

SEQ ID NO: 3403331 - DNA, 25 bp, Homo sapien
tgatagcgccatagtaaggggtggg

SEQ ID NO: 3403332 - DNA, 25 bp, Homo sapien
tgtgatagcgccatagtaaggggtg

SEQ ID NO: 3403333 - DNA, 25 bp, Homo sapien
atagcgccatagtaaggggtgggga

SEQ ID NO: 3403334 - DNA, 25 bp, Homo sapien
ctgtgtgatagcgccatagtaaggg

SEQ ID NO: 3403335 - DNA, 25 bp, Homo sapien
aggccagccggatgttgccatagag

SEQ ID NO: 3403336 - DNA, 25 bp, Homo sapien
agacataggccagccggatgttgcc

SEQ ID NO: 3403337 - DNA, 25 bp, Homo sapien
tagacataggccagccggatgttgc

SEQ ID NO: 3403338 - DNA, 25 bp, Homo sapien
cataggccagccggatgttgccata

SEQ ID NO: 3403339 - DNA, 25 bp, Homo sapien
tcagacccaggaaactcttgaccac

SEQ ID NO: 3403340 - DNA, 25 bp, Homo sapien
ttccacctaggaagtcaagactctt

SEQ ID NO: 3403341 - DNA, 25 bp, Homo sapien
cactcttgggtgtcatgcttaggtc

SEQ ID NO: 3403342 - DNA, 25 bp, Homo sapien
ggcttctacatcaaccccagggatc

SEQ ID NO: 3403343 - DNA, 25 bp, Homo sapien
gaaggggcgtgtgtctagcccagtg

SEQ ID NO: 3403344 - DNA, 25 bp, Homo sapien
gctggaaggggcgtgtgtctagccc

SEQ ID NO: 3403345 - DNA, 25 bp, Homo sapien
tgagctggaaggggcgtgtgtctag

SEQ ID NO: 3403346 - DNA, 25 bp, Homo sapien
tggaaggggcgtgtgtctagcccag

SEQ ID NO: 3403347 - DNA, 25 bp, Homo sapien
gaaaccatccgttagggcaggagac

SEQ ID NO: 3403348 - DNA, 25 bp, Homo sapien
tatcaaccctactcccgggaggaga

SEQ ID NO: 3403349 - DNA, 25 bp, Homo sapien
tgtctgtcccaatcaccgggtatca

SEQ ID NO: 3403350 - DNA, 25 bp, Homo sapien
cagcctcaggtttgatttgatcccc

SEQ ID NO: 3403351 - DNA, 25 bp, Homo sapien
aataccaggtactcctgtagctctt

SEQ ID NO: 3403352 - DNA, 25 bp, Homo sapien
ggatgaggcctttgaccttcacacc

SEQ ID NO: 3403353 - DNA, 25 bp, Homo sapien
tggcaaataccaggtactcctgtag

SEQ ID NO: 3403354 - DNA, 25 bp, Homo sapien
ggagtatacatcacccagagggttc

SEQ ID NO: 3403355 - DNA, 25 bp, Homo sapien
catgcacaagggctcgagtcggaga

SEQ ID NO: 3403356 - DNA, 25 bp, Homo sapien
tgtgtagggcagatgcgtcccacag

SEQ ID NO: 3403357 - DNA, 25 bp, Homo sapien
aaggaagggcccaagcaagtagcag

SEQ ID NO: 3403358 - DNA, 25 bp, Homo sapien
tgaccactctaaggctcagtgagct

SEQ ID NO: 3403359 - DNA, 25 bp, Homo sapien
ctttccaggcttaggacactgcggt

SEQ ID NO: 3403360 - DNA, 25 bp, Homo sapien
acagacttctcaaacacggacagca

SEQ ID NO: 3403361 - DNA, 25 bp, Homo sapien
actgcggtacccaacagacttctca

SEQ ID NO: 3403362 - DNA, 25 bp, Homo sapien
cagcatgtagacctcatccacaatc

SEQ ID NO: 3403363 - DNA, 25 bp, Homo sapien
cctaacttaagggatcctgaggcct

SEQ ID NO: 3403364 - DNA, 25 bp, Homo sapien
ggatgatctgctccaagtgttccca

SEQ ID NO: 3403365 - DNA, 25 bp, Homo sapien
ctccagaggtgctgagtgaatgaga

SEQ ID NO: 3403366 - DNA, 25 bp, Homo sapien
gaataaaactggagcgactctggag

SEQ ID NO: 3403367 - DNA, 25 bp, Homo sapien
catgggaacagaggcaacacagaac

SEQ ID NO: 3403368 - DNA, 25 bp, Homo sapien
tctagttttggttccaggacaagcc

SEQ ID NO: 3403369 - DNA, 25 bp, Homo sapien
taatgactaaccaaggatcgtggac

SEQ ID NO: 3403370 - DNA, 25 bp, Homo sapien
gaacacagccatgatctagagccta

SEQ ID NO: 3403371 - DNA, 25 bp, Homo sapien
catcacatgggtcctctgggggtca

SEQ ID NO: 3403372 - DNA, 25 bp, Homo sapien
atcacatgggtcctctgggggtcag

SEQ ID NO: 3403373 - DNA, 25 bp, Homo sapien
cacccttctgacacccccaaggcca

SEQ ID NO: 3403374 - DNA, 25 bp, Homo sapien
gaagaagcaccctaggcggtggcca

SEQ ID NO: 3403375 - DNA, 25 bp, Homo sapien
gtactggaccaagccactgaggccg

SEQ ID NO: 3403376 - DNA, 25 bp, Homo sapien
tttctgtgtacagcgtgccaaagcg

SEQ ID NO: 3403377 - DNA, 25 bp, Homo sapien
cctggttttctgtgtacagcgtgcc

SEQ ID NO: 3403378 - DNA, 25 bp, Homo sapien
ccactgaggccgtggtagcggcaga

SEQ ID NO: 3403379 - DNA, 25 bp, Homo sapien
gtcaacacttgatgttgtcactatt

SEQ ID NO: 3403380 - DNA, 25 bp, Homo sapien
tcaacacttgatgttgtcactattt

SEQ ID NO: 3403381 - DNA, 25 bp, Homo sapien
tggggtagtatctggtcctcatttt

SEQ ID NO: 3403382 - DNA, 25 bp, Homo sapien
tagctactatagtgagtggggtagt

SEQ ID NO: 3403383 - DNA, 25 bp, Homo sapien
gagtgatgctctgtagtcccacaga

SEQ ID NO: 3403384 - DNA, 25 bp, Homo sapien
tgtaaagcaccttaaacccagacac

SEQ ID NO: 3403385 - DNA, 25 bp, Homo sapien
caccctgatgctgttgatagtcaca

SEQ ID NO: 3403386 - DNA, 25 bp, Homo sapien
tgtgactataaacagatctgcaagc

SEQ ID NO: 3403387 - DNA, 25 bp, Homo sapien
agccagccccacgactcaagaaggg

SEQ ID NO: 3403388 - DNA, 25 bp, Homo sapien
atggttttccggcaggtacacctgg

SEQ ID NO: 3403389 - DNA, 25 bp, Homo sapien
gggatccccaatgccctaagctctt

SEQ ID NO: 3403390 - DNA, 25 bp, Homo sapien
ccttgagccgggcatggttttccgg

SEQ ID NO: 3403391 - DNA, 25 bp, Homo sapien
gggagacctgaaactccctctcagc

SEQ ID NO: 3403392 - DNA, 25 bp, Homo sapien
tggagggagacctgaaactccctct

SEQ ID NO: 3403393 - DNA, 25 bp, Homo sapien
ctgctggagggagacctgaaactcc

SEQ ID NO: 3403394 - DNA, 25 bp, Homo sapien
ctgaaactccctctcagcccgcacc

SEQ ID NO: 3403395 - DNA, 25 bp, Homo sapien
tggtctgagaagacaaagcgaaacc

SEQ ID NO: 3403396 - DNA, 25 bp, Homo sapien
aaccaggctctttacactcgaaggc

SEQ ID NO: 3403397 - DNA, 25 bp, Homo sapien
gcaccttgttgtccaaaaagcggcg

SEQ ID NO: 3403398 - DNA, 25 bp, Homo sapien
cactcgaaggccttgccaaaggaca

SEQ ID NO: 3403399 - DNA, 25 bp, Homo sapien
ctgcgttggtcacttggctcctggc

SEQ ID NO: 3403400 - DNA, 25 bp, Homo sapien
agagggacgggggtcttctgccact

SEQ ID NO: 3403401 - DNA, 25 bp, Homo sapien
cttctgccacttgggatttgcctgc

SEQ ID NO: 3403402 - DNA, 25 bp, Homo sapien
tgcgttggtcacttggctcctggct

SEQ ID NO: 3403403 - DNA, 25 bp, Homo sapien
ggagtttcccactgctacagcgaaa

SEQ ID NO: 3403404 - DNA, 25 bp, Homo sapien
tagataccttcctggcaaatggcac

SEQ ID NO: 3403405 - DNA, 25 bp, Homo sapien
cctctggccacgagacaatgaccag

SEQ ID NO: 3403406 - DNA, 25 bp, Homo sapien
ggcacaaagccaagttagatacctt

SEQ ID NO: 3403407 - DNA, 25 bp, Homo sapien
gtcacgactcctccattctaaataa

SEQ ID NO: 3403408 - DNA, 25 bp, Homo sapien
gaggctctggttagaagcagtcacg

SEQ ID NO: 3403409 - DNA, 25 bp, Homo sapien
ctcctgtatgtgctgttcctttgac

SEQ ID NO: 3403410 - DNA, 25 bp, Homo sapien
gaatgacggtgatatcagaaagaag

SEQ ID NO: 3403411 - DNA, 25 bp, Homo sapien
aatggcacatatctaaaaggaggga

SEQ ID NO: 3403412 - DNA, 25 bp, Homo sapien
cctgcaatgaactaacaatgagact

SEQ ID NO: 3403413 - DNA, 25 bp, Homo sapien
caacaacgatcgatctgaaagacag

SEQ ID NO: 3403414 - DNA, 25 bp, Homo sapien
acaatgaaactgataaacctgtggg

SEQ ID NO: 3403415 - DNA, 25 bp, Homo sapien
gctacctaggattctgacaaataaa

SEQ ID NO: 3403416 - DNA, 25 bp, Homo sapien
tattcccaggttggtagcacccaaa

SEQ ID NO: 3403417 - DNA, 25 bp, Homo sapien
gtttgaatttataccaccagcatgg

SEQ ID NO: 3403418 - DNA, 25 bp, Homo sapien
ggatagtaacatacagtattcccag

SEQ ID NO: 3403419 - DNA, 25 bp, Homo sapien
cattattcaagagtctactgtaaca

SEQ ID NO: 3403420 - DNA, 25 bp, Homo sapien
tctctaaagaaaagggctccataat

SEQ ID NO: 3403421 - DNA, 25 bp, Homo sapien
taaggtgtccagtcaacagaaggct

SEQ ID NO: 3403422 - DNA, 25 bp, Homo sapien
ttcaactgcttaggggattggcacc

SEQ ID NO: 3403423 - DNA, 25 bp, Homo sapien
ggagtccgagcaccgctgcagtgtt

SEQ ID NO: 3403424 - DNA, 25 bp, Homo sapien
tggacaggaggagtccgagcaccgc

SEQ ID NO: 3403425 - DNA, 25 bp, Homo sapien
caggaggagtccgagcaccgctgca

SEQ ID NO: 3403426 - DNA, 25 bp, Homo sapien
tccgagcaccgctgcagtgttttcc

SEQ ID NO: 3403427 - DNA, 25 bp, Homo sapien
catgcgggagctgccgggccgcgcc

SEQ ID NO: 3403428 - DNA, 25 bp, Homo sapien
cgcatgcgggagctgccgggccgcg

SEQ ID NO: 3403429 - DNA, 25 bp, Homo sapien
tgcgcatgcgggagctgccgggccg

SEQ ID NO: 3403430 - DNA, 25 bp, Homo sapien
ctgcgcatgcgggagctgccgggcc

SEQ ID NO: 3403431 - DNA, 25 bp, Homo sapien
gatccgggccgtctgacaccgagcg

SEQ ID NO: 3403432 - DNA, 25 bp, Homo sapien
ctggcgagcagcgagcgaggggccg

SEQ ID NO: 3403433 - DNA, 25 bp, Homo sapien
agcagcgagcgaggggccggtaacc

SEQ ID NO: 3403434 - DNA, 25 bp, Homo sapien
cgggatccgggccgtctgacaccga

SEQ ID NO: 3403435 - DNA, 25 bp, Homo sapien
gccagccgccactgccagggccgag

SEQ ID NO: 3403436 - DNA, 25 bp, Homo sapien
cgagcttggtcaccggctcatgccg

SEQ ID NO: 3403437 - DNA, 25 bp, Homo sapien
tcggatcggtccgaatcgccagccg

SEQ ID NO: 3403438 - DNA, 25 bp, Homo sapien
ccgcccaggtcggatcggtccgaat

SEQ ID NO: 3403439 - DNA, 25 bp, Homo sapien
cgcaggccaccaccggaccctgagg

SEQ ID NO: 3403440 - DNA, 25 bp, Homo sapien
accggaccctgaggcgcaggacatc

SEQ ID NO: 3403441 - DNA, 25 bp, Homo sapien
tcgtcccacggcttctggcaccgca

SEQ ID NO: 3403442 - DNA, 25 bp, Homo sapien
ttctggcaccgcaagggatgccgca

SEQ ID NO: 3403443 - DNA, 25 bp, Homo sapien
aagggccttacagctgaactcctgg

SEQ ID NO: 3403444 - DNA, 25 bp, Homo sapien
aaagttatgttatggctaaatgccc

SEQ ID NO: 3403445 - DNA, 25 bp, Homo sapien
gaattataccataagacaatgtgtg

SEQ ID NO: 3403446 - DNA, 25 bp, Homo sapien
tggatcttaacccaaccattccgaa

SEQ ID NO: 3403447 - DNA, 25 bp, Homo sapien
tgtatccttcccagttccataggtg

SEQ ID NO: 3403448 - DNA, 25 bp, Homo sapien
agttattatatgtgacggcctctga

SEQ ID NO: 3403449 - DNA, 25 bp, Homo sapien
taaacctgtgctatactggacccct

SEQ ID NO: 3403450 - DNA, 25 bp, Homo sapien
cataggtgcacacggtttagcatcc

SEQ ID NO: 3403451 - DNA, 25 bp, Homo sapien
gagagaggatcttccctgtgagcac

SEQ ID NO: 3403452 - DNA, 25 bp, Homo sapien
caagtagcttgcaaaaggtgaatcc

SEQ ID NO: 3403453 - DNA, 25 bp, Homo sapien
gatccctctggagaagcacggagaa

SEQ ID NO: 3403454 - DNA, 25 bp, Homo sapien
tgccaactgagggtgagtgattcca

SEQ ID NO: 3403455 - DNA, 25 bp, Homo sapien
cattggaggtggctgaatagcatcc

SEQ ID NO: 3403456 - DNA, 25 bp, Homo sapien
tcgcatcagagtgggtcaagattcc

SEQ ID NO: 3403457 - DNA, 25 bp, Homo sapien
tcgttgtgtccaagcttcaaggagc

SEQ ID NO: 3403458 - DNA, 25 bp, Homo sapien
gcttctcaaagatgcaggtcccctc

SEQ ID NO: 3403459 - DNA, 25 bp, Homo sapien
aacagcaactctgagtagctctata

SEQ ID NO: 3403460 - DNA, 25 bp, Homo sapien
gagtagctctataacattaaagaca

SEQ ID NO: 3403461 - DNA, 25 bp, Homo sapien
gcaactctgagtagctctataacat

SEQ ID NO: 3403462 - DNA, 25 bp, Homo sapien
tctgagtagctctataacattaaag

SEQ ID NO: 3403463 - DNA, 25 bp, Homo sapien
gacacagacagcctcttcctcacac

SEQ ID NO: 3403464 - DNA, 25 bp, Homo sapien
atgacacagacagcctcttcctcac

SEQ ID NO: 3403465 - DNA, 25 bp, Homo sapien
aatgacacagacagcctcttcctca

SEQ ID NO: 3403466 - DNA, 25 bp, Homo sapien
cacagacagcctcttcctcacactc

SEQ ID NO: 3403467 - DNA, 25 bp, Homo sapien
ggaacaaacagacaggcccggttga

SEQ ID NO: 3403468 - DNA, 25 bp, Homo sapien
gcagttcattatactcccgggagat

SEQ ID NO: 3403469 - DNA, 25 bp, Homo sapien
ttctggttaagcacatcgatggagg

SEQ ID NO: 3403470 - DNA, 25 bp, Homo sapien
gatattatacttgaccgacgcacac

SEQ ID NO: 3403471 - DNA, 25 bp, Homo sapien
gctgggctgtatgagtgtgagatac

SEQ ID NO: 3403472 - DNA, 25 bp, Homo sapien
ctgagggccactcaagtatctcctg

SEQ ID NO: 3403473 - DNA, 25 bp, Homo sapien
gggctgggctgtatgagtgtgagat

SEQ ID NO: 3403474 - DNA, 25 bp, Homo sapien
ccctgagggccactcaagtatctcc

SEQ ID NO: 3403475 - DNA, 25 bp, Homo sapien
gaagagccacgcttagtttggaaac

SEQ ID NO: 3403476 - DNA, 25 bp, Homo sapien
gatggcagactactcttcacgggca

SEQ ID NO: 3403477 - DNA, 25 bp, Homo sapien
cacagcagtagtgccggagatggca

SEQ ID NO: 3403478 - DNA, 25 bp, Homo sapien
gcaagaagacagcatcgggaaacca

SEQ ID NO: 3403479 - DNA, 25 bp, Homo sapien
caggtgattcgtacctcgatcccac

SEQ ID NO: 3403480 - DNA, 25 bp, Homo sapien
catgttgaacaacaggtgattcgta

SEQ ID NO: 3403481 - DNA, 25 bp, Homo sapien
gggacctccaggcaacatgttgaac

SEQ ID NO: 3403482 - DNA, 25 bp, Homo sapien
gaacaacaggtgattcgtacctcga

SEQ ID NO: 3403483 - DNA, 25 bp, Homo sapien
tagccttgccggtaagtccacgtag

SEQ ID NO: 3403484 - DNA, 25 bp, Homo sapien
cagctgacagtggactatagacagg

SEQ ID NO: 3403485 - DNA, 25 bp, Homo sapien
gtaagtccacgtagaaaagccgcca

SEQ ID NO: 3403486 - DNA, 25 bp, Homo sapien
gacaggaatgctgacatcgtagcct

SEQ ID NO: 3403487 - DNA, 25 bp, Homo sapien
tagcacctgtgggtaatcgaagacc

SEQ ID NO: 3403488 - DNA, 25 bp, Homo sapien
cacctgagatgacaggaggaagtat

SEQ ID NO: 3403489 - DNA, 25 bp, Homo sapien
gcgcttacggacagaaaggacaccc

SEQ ID NO: 3403490 - DNA, 25 bp, Homo sapien
gactctccatgtttgacctggaggg

SEQ ID NO: 3403491 - DNA, 25 bp, Homo sapien
ggcaaaatataggagtctgcaatga

SEQ ID NO: 3403492 - DNA, 25 bp, Homo sapien
taacacatcgctcaatactgcctgg

SEQ ID NO: 3403493 - DNA, 25 bp, Homo sapien
ctgcaatgacaaccgggacacagcc

SEQ ID NO: 3403494 - DNA, 25 bp, Homo sapien
gacacagccagcttgtaacacatcg

SEQ ID NO: 3403495 - DNA, 25 bp, Homo sapien
gggggatgctctgcaaaatactgta

SEQ ID NO: 3403496 - DNA, 25 bp, Homo sapien
tgggggatgctctgcaaaatactgt

SEQ ID NO: 3403497 - DNA, 25 bp, Homo sapien
ggggatgctctgcaaaatactgtac

SEQ ID NO: 3403498 - DNA, 25 bp, Homo sapien
tttgggggatgctctgcaaaatact

SEQ ID NO: 3403499 - DNA, 25 bp, Homo sapien
tgctgaagcgtgaaagcacaaactg

SEQ ID NO: 3403500 - DNA, 25 bp, Homo sapien
gctgaagcgtgaaagcacaaactgc

SEQ ID NO: 3403501 - DNA, 25 bp, Homo sapien
ctgaagcgtgaaagcacaaactgcc

SEQ ID NO: 3403502 - DNA, 25 bp, Homo sapien
ttgctgaagcgtgaaagcacaaact

SEQ ID NO: 3403503 - DNA, 25 bp, Homo sapien
tcctctatgaactgcttgctggtag

SEQ ID NO: 3403504 - DNA, 25 bp, Homo sapien
cagaggcacatgagtcctctatgaa

SEQ ID NO: 3403505 - DNA, 25 bp, Homo sapien
ggcacatgagtcctctatgaactgc

SEQ ID NO: 3403506 - DNA, 25 bp, Homo sapien
tgagtcctctatgaactgcttgctg

SEQ ID NO: 3403507 - DNA, 25 bp, Homo sapien
cagggagttcatttggtgattagca

SEQ ID NO: 3403508 - DNA, 25 bp, Homo sapien
cctaggccagatcagggagttcatt

SEQ ID NO: 3403509 - DNA, 25 bp, Homo sapien
tgaatcccactgttccctaggccag

SEQ ID NO: 3403510 - DNA, 25 bp, Homo sapien
tgattagcagctgaccagttctctc

SEQ ID NO: 3403511 - DNA, 25 bp, Homo sapien
taaatctaactttctccactcctag

SEQ ID NO: 3403512 - DNA, 25 bp, Homo sapien
ttgttaaccatctcttaacctcctc

SEQ ID NO: 3403513 - DNA, 25 bp, Homo sapien
atctaactttctccactcctagcat

SEQ ID NO: 3403514 - DNA, 25 bp, Homo sapien
aaatctaactttctccactcctagc

SEQ ID NO: 3403515 - DNA, 25 bp, Homo sapien
taaaaatagtctccacccagttggc

SEQ ID NO: 3403516 - DNA, 25 bp, Homo sapien
tgtaagaatgtagaatccacgatgg

SEQ ID NO: 3403517 - DNA, 25 bp, Homo sapien
gaaactctgtgccatactaaatgga

SEQ ID NO: 3403518 - DNA, 25 bp, Homo sapien
cccagttggcacatatgtagtgaaa

SEQ ID NO: 3403519 - DNA, 25 bp, Homo sapien
caaccacagcagaatagggcagcag

SEQ ID NO: 3403520 - DNA, 25 bp, Homo sapien
tgggttaatggctaaagtactctgg

SEQ ID NO: 3403521 - DNA, 25 bp, Homo sapien
tctttctttgagcagcaggtctcga

SEQ ID NO: 3403522 - DNA, 25 bp, Homo sapien
caggcagagtcctgaaaccctcatt

SEQ ID NO: 3403523 - DNA, 25 bp, Homo sapien
agatgggctaattattaaactggat

SEQ ID NO: 3403524 - DNA, 25 bp, Homo sapien
gatataactgaggaaataatctctg

SEQ ID NO: 3403525 - DNA, 25 bp, Homo sapien
tgagtaagcatcaaaccagaatgag

SEQ ID NO: 3403526 - DNA, 25 bp, Homo sapien
tgaataatgtaaacagagagatgaa

SEQ ID NO: 3403527 - DNA, 25 bp, Homo sapien
gagcagggagtctggtgtccttctt

SEQ ID NO: 3403528 - DNA, 25 bp, Homo sapien
tgacagcacaagagcagggagtctg

SEQ ID NO: 3403529 - DNA, 25 bp, Homo sapien
cactgtagaattcgtgggtgactct

SEQ ID NO: 3403530 - DNA, 25 bp, Homo sapien
tcagctgacaatcttactggtgcac

SEQ ID NO: 3403531 - DNA, 25 bp, Homo sapien
tcccactgaggattgtagcgcttct

SEQ ID NO: 3403532 - DNA, 25 bp, Homo sapien
ggccctttgtatttatcccactgag

SEQ ID NO: 3403533 - DNA, 25 bp, Homo sapien
ggctttaattgactggaagtacgct

SEQ ID NO: 3403534 - DNA, 25 bp, Homo sapien
aattgactggaagtacgcttcccag

SEQ ID NO: 3403535 - DNA, 25 bp, Homo sapien
ctttaattgactggaagtacgcttc

SEQ ID NO: 3403536 - DNA, 25 bp, Homo sapien
ctggaagtacgcttcccagaaccac

SEQ ID NO: 3403537 - DNA, 25 bp, Homo sapien
ggagatggcagcatatggatagatc

SEQ ID NO: 3403538 - DNA, 25 bp, Homo sapien
cattccattcttcataggagatggc

SEQ ID NO: 3403539 - DNA, 25 bp, Homo sapien
aggagggtcattccattcttcatag

SEQ ID NO: 3403540 - DNA, 25 bp, Homo sapien
catatggatagatccggtcattgat

SEQ ID NO: 3403541 - DNA, 25 bp, Homo sapien
gtggctagcactggaattcacttac

SEQ ID NO: 3403542 - DNA, 25 bp, Homo sapien
cctgacagctggaccatgcctcatg

SEQ ID NO: 3403543 - DNA, 25 bp, Homo sapien
gctggaccatgcctcatgtggctag

SEQ ID NO: 3403544 - DNA, 25 bp, Homo sapien
ataacctttacaattgtagtacatt

SEQ ID NO: 3403545 - DNA, 25 bp, Homo sapien
gccagctgctgaagcctgtataaat

SEQ ID NO: 3403546 - DNA, 25 bp, Homo sapien
agccagctgctgaagcctgtataaa

SEQ ID NO: 3403547 - DNA, 25 bp, Homo sapien
cagccagctgctgaagcctgtataa

SEQ ID NO: 3403548 - DNA, 25 bp, Homo sapien
gcaatggtgcgaactcggctccctg

SEQ ID NO: 3403549 - DNA, 25 bp, Homo sapien
atggtgcgaactcggctccctgcaa

SEQ ID NO: 3403550 - DNA, 25 bp, Homo sapien
aagtgattctcccacctcagcctcc

SEQ ID NO: 3403551 - DNA, 25 bp, Homo sapien
cctccgcctcctggcttcaagtgat

SEQ ID NO: 3403552 - DNA, 25 bp, Homo sapien
tatcaatggatataggacaaggcct

SEQ ID NO: 3403553 - DNA, 25 bp, Homo sapien
ctaacgtgcataagggtggtgtccc

SEQ ID NO: 3403554 - DNA, 25 bp, Homo sapien
caagtctgaagtttacctgatgcac

SEQ ID NO: 3403555 - DNA, 25 bp, Homo sapien
taatgtggtccatgttgccttaacc

SEQ ID NO: 3403556 - DNA, 25 bp, Homo sapien
gggatcagcgggaggaagagtggat

SEQ ID NO: 3403557 - DNA, 25 bp, Homo sapien
atcagcgggaggaagagtggattgc

SEQ ID NO: 3403558 - DNA, 25 bp, Homo sapien
gatcagcgggaggaagagtggattg

SEQ ID NO: 3403559 - DNA, 25 bp, Homo sapien
tcagcgggaggaagagtggattgct

SEQ ID NO: 3403560 - DNA, 25 bp, Homo sapien
tggacacttcagtgatgacccggaa

SEQ ID NO: 3403561 - DNA, 25 bp, Homo sapien
tttggatagactgggcaccttggac

SEQ ID NO: 3403562 - DNA, 25 bp, Homo sapien
ggactatggcggtgaacccttgaga

SEQ ID NO: 3403563 - DNA, 25 bp, Homo sapien
gaagaggctctctactcggtcgtag

SEQ ID NO: 3403564 - DNA, 25 bp, Homo sapien
tttggccatccaaaattgatccagc

SEQ ID NO: 3403565 - DNA, 25 bp, Homo sapien
ttggccatccaaaattgatccagct

SEQ ID NO: 3403566 - DNA, 25 bp, Homo sapien
tggccatccaaaattgatccagctg

SEQ ID NO: 3403567 - DNA, 25 bp, Homo sapien
ccagggcttggagttaaatgggcca

SEQ ID NO: 3403568 - DNA, 25 bp, Homo sapien
tgggccaccctagaacaagaatgag

SEQ ID NO: 3403569 - DNA, 25 bp, Homo sapien
tggctacagagtatgccagggcttg

SEQ ID NO: 3403570 - DNA, 25 bp, Homo sapien
gccctcaaacacttgtggctacaga

SEQ ID NO: 3403571 - DNA, 25 bp, Homo sapien
agagccctgacctaaaaaccactgt

SEQ ID NO: 3403572 - DNA, 25 bp, Homo sapien
cactgttagtaaaaagccagtccag

SEQ ID NO: 3403573 - DNA, 25 bp, Homo sapien
gatgcatttgctggcatgcggacca

SEQ ID NO: 3403574 - DNA, 25 bp, Homo sapien
acatgtcaaaattagggcctcatca

SEQ ID NO: 3403575 - DNA, 25 bp, Homo sapien
taaccaaattgcagctcgtcagagg

SEQ ID NO: 3403576 - DNA, 25 bp, Homo sapien
gaacccggattttgggccagagaga

SEQ ID NO: 3403577 - DNA, 25 bp, Homo sapien
aatggccagaacagcttctgtctcg

SEQ ID NO: 3403578 - DNA, 25 bp, Homo sapien
tcatcataagggaagaaacggttac

SEQ ID NO: 3403579 - DNA, 25 bp, Homo sapien
caggaatttgggcacggaggcccta

SEQ ID NO: 3403580 - DNA, 25 bp, Homo sapien
gtcactcacagtaaaatcctcaggg

SEQ ID NO: 3403581 - DNA, 25 bp, Homo sapien
gaggtaaagattcgagctcagtccc

SEQ ID NO: 3403582 - DNA, 25 bp, Homo sapien
taatgtatggaaacactcgggacgt

SEQ ID NO: 3403583 - DNA, 25 bp, Homo sapien
ctgctagagtataagtaacattcct

SEQ ID NO: 3403584 - DNA, 25 bp, Homo sapien
catgttttggcatctgtatacacca

SEQ ID NO: 3403585 - DNA, 25 bp, Homo sapien
tgaacatatccatttcccctaaaag

SEQ ID NO: 3403586 - DNA, 25 bp, Homo sapien
accactgatctttctatctctaggg

SEQ ID NO: 3403587 - DNA, 25 bp, Homo sapien
gctctaactgtacctgacaggtggg

SEQ ID NO: 3403588 - DNA, 25 bp, Homo sapien
aagctctaactgtacctgacaggtg

SEQ ID NO: 3403589 - DNA, 25 bp, Homo sapien
tctaactgtacctgacaggtgggaa

SEQ ID NO: 3403590 - DNA, 25 bp, Homo sapien
aactgtacctgacaggtgggaacac

SEQ ID NO: 3403591 - DNA, 25 bp, Homo sapien
tgatcctctaagaaagaatgactca

SEQ ID NO: 3403592 - DNA, 25 bp, Homo sapien
gatcctctaagaaagaatgactcac

SEQ ID NO: 3403593 - DNA, 25 bp, Homo sapien
gagatgatcctctaagaaagaatga

SEQ ID NO: 3403594 - DNA, 25 bp, Homo sapien
gatgatcctctaagaaagaatgact

SEQ ID NO: 3403595 - DNA, 25 bp, Homo sapien
gcagagatacgaaaccaggtggcct

SEQ ID NO: 3403596 - DNA, 25 bp, Homo sapien
tcctcactagggctgcttggcacat

SEQ ID NO: 3403597 - DNA, 25 bp, Homo sapien
cacagcgctggccatggaaaggtct

SEQ ID NO: 3403598 - DNA, 25 bp, Homo sapien
gattaatgtgaaccctaggaaccaa

SEQ ID NO: 3403599 - DNA, 25 bp, Homo sapien
ggtatcaacagacttcctaggttca

SEQ ID NO: 3403600 - DNA, 25 bp, Homo sapien
tcagtgctgagttatccaaacaggt

SEQ ID NO: 3403601 - DNA, 25 bp, Homo sapien
gccaaaactcaaagacagatgctga

SEQ ID NO: 3403602 - DNA, 25 bp, Homo sapien
aattcagacagcaaccattcagtgc

SEQ ID NO: 3403603 - DNA, 25 bp, Homo sapien
cttgtgataaaaagctgccccagtg

SEQ ID NO: 3403604 - DNA, 25 bp, Homo sapien
agagatgcagacgacccgggtaacc

SEQ ID NO: 3403605 - DNA, 25 bp, Homo sapien
caaccggtcaggaaattcccgccag

SEQ ID NO: 3403606 - DNA, 25 bp, Homo sapien
gtgagcaccatggacacttcattcg

SEQ ID NO: 3403607 - DNA, 25 bp, Homo sapien
ctacccagttcttgatatccccagg

SEQ ID NO: 3403608 - DNA, 25 bp, Homo sapien
ttgataactgcttttcccgtgacgt

SEQ ID NO: 3403609 - DNA, 25 bp, Homo sapien
cagttcatatgagcatctacccagt

SEQ ID NO: 3403610 - DNA, 25 bp, Homo sapien
tccccaggcattttgtaggtataca

SEQ ID NO: 3403611 - DNA, 25 bp, Homo sapien
ccatgtgtgtttggtctagtgaaag

SEQ ID NO: 3403612 - DNA, 25 bp, Homo sapien
aagcccatctatggctgtgcactca

SEQ ID NO: 3403613 - DNA, 25 bp, Homo sapien
agtgaaagcccatctatggctgtgc

SEQ ID NO: 3403614 - DNA, 25 bp, Homo sapien
gtgtttggtctagtgaaagcccatc

SEQ ID NO: 3403615 - DNA, 25 bp, Homo sapien
tatctgagtgcattttggtcccctg

SEQ ID NO: 3403616 - DNA, 25 bp, Homo sapien
tataacgtggagctattaccctgaa

SEQ ID NO: 3403617 - DNA, 25 bp, Homo sapien
aaagtactaggcttgattcaggcac

SEQ ID NO: 3403618 - DNA, 25 bp, Homo sapien
tggtcccctgacaagcactactggg

SEQ ID NO: 3403619 - DNA, 25 bp, Homo sapien
accaccttgagaggcatggtcccga

SEQ ID NO: 3403620 - DNA, 25 bp, Homo sapien
agggtcagctcggtgttccaccacc

SEQ ID NO: 3403621 - DNA, 25 bp, Homo sapien
cccgaagactgaagcaaacttgttg

SEQ ID NO: 3403622 - DNA, 25 bp, Homo sapien
tgagaggcatggtcccgaagactga

SEQ ID NO: 3403623 - DNA, 25 bp, Homo sapien
cataagctgccaatgttggggaagc

SEQ ID NO: 3403624 - DNA, 25 bp, Homo sapien
caagatgtttggcttttgcaccgaa

SEQ ID NO: 3403625 - DNA, 25 bp, Homo sapien
ggatttaaatctggagcatgccaca

SEQ ID NO: 3403626 - DNA, 25 bp, Homo sapien
ggcattttcgagaagaacccatcag

SEQ ID NO: 3403627 - DNA, 25 bp, Homo sapien
ggtgcatgccaagatccaagtaggt

SEQ ID NO: 3403628 - DNA, 25 bp, Homo sapien
gggaccttcttacgcttgatgcaga

SEQ ID NO: 3403629 - DNA, 25 bp, Homo sapien
ttttacgggtaccagctagagcgac

SEQ ID NO: 3403630 - DNA, 25 bp, Homo sapien
ttgcatggctagtacagaccctctg

SEQ ID NO: 3403631 - DNA, 25 bp, Homo sapien
tgttgtcaggccaaagacggagtta

SEQ ID NO: 3403632 - DNA, 25 bp, Homo sapien
caaactgtggctaatcttaatatca

SEQ ID NO: 3403633 - DNA, 25 bp, Homo sapien
cataacatttaacattcgccagggt

SEQ ID NO: 3403634 - DNA, 25 bp, Homo sapien
ggacatatgttgtggctaaagccca

SEQ ID NO: 3403635 - DNA, 25 bp, Homo sapien
actgacgctgactggcaaaacaact

SEQ ID NO: 3403636 - DNA, 25 bp, Homo sapien
tgggccagggccagttcaagttcgt

SEQ ID NO: 3403637 - DNA, 25 bp, Homo sapien
gaaaccaggctctatggcatcccga

SEQ ID NO: 3403638 - DNA, 25 bp, Homo sapien
gatgatcctgacctaagcttatggg

SEQ ID NO: 3403639 - DNA, 25 bp, Homo sapien
caagttcgtcttctctataggccag

SEQ ID NO: 3403640 - DNA, 25 bp, Homo sapien
aaggttgcctgtacagacccacaca

SEQ ID NO: 3403641 - DNA, 25 bp, Homo sapien
gatacagatgctggtgactcaacta

SEQ ID NO: 3403642 - DNA, 25 bp, Homo sapien
ccctgaaatggttgcaaatgtgaag

SEQ ID NO: 3403643 - DNA, 25 bp, Homo sapien
ccagcaatggtgagccggaaattga

SEQ ID NO: 3403644 - DNA, 25 bp, Homo sapien
tggagctcaagaacaggatagggac

SEQ ID NO: 3403645 - DNA, 25 bp, Homo sapien
ctaaggcatggtcaagggaagtcac

SEQ ID NO: 3403646 - DNA, 25 bp, Homo sapien
tcatttggtaatccaccctgacggg

SEQ ID NO: 3403647 - DNA, 25 bp, Homo sapien
gaggactccaaatagcttcagacag

SEQ ID NO: 3403648 - DNA, 25 bp, Homo sapien
gaagtaaatagtcacagcccaaggt

SEQ ID NO: 3403649 - DNA, 25 bp, Homo sapien
gaaatcctataggaggtgctgccac

SEQ ID NO: 3403650 - DNA, 25 bp, Homo sapien
ggaaccctcatttggccaagttgta

SEQ ID NO: 3403651 - DNA, 25 bp, Homo sapien
caaggtgtgaaacaatgtcgtgtcc

SEQ ID NO: 3403652 - DNA, 25 bp, Homo sapien
ggtatcctacagacaccttcctggt

SEQ ID NO: 3403653 - DNA, 25 bp, Homo sapien
taattcagcctgataatctctgccc

SEQ ID NO: 3403654 - DNA, 25 bp, Homo sapien
tgggtaatcttatcaagtcctaggg

SEQ ID NO: 3403655 - DNA, 25 bp, Homo sapien
taattcactggcaactacttcgtct

SEQ ID NO: 3403656 - DNA, 25 bp, Homo sapien
atgagctaattacccaccagatgcc

SEQ ID NO: 3403657 - DNA, 25 bp, Homo sapien
tgacagctctgctcatgagctaatt

SEQ ID NO: 3403658 - DNA, 25 bp, Homo sapien
cacctgccaacaccagtgaactggg

SEQ ID NO: 3403659 - DNA, 25 bp, Homo sapien
caacacataaacttggagtggagtg

SEQ ID NO: 3403660 - DNA, 25 bp, Homo sapien
gtgtaatctgcacctcccgtgttca

SEQ ID NO: 3403661 - DNA, 25 bp, Homo sapien
ctttttggtatatacttttatgagt

SEQ ID NO: 3403662 - DNA, 25 bp, Homo sapien
ttcagtgtaatctgcacctcccgtg

SEQ ID NO: 3403663 - DNA, 25 bp, Homo sapien
ctcagttcagtgtaatctgcacctc

SEQ ID NO: 3403664 - DNA, 25 bp, Homo sapien
tgtttttgcgagagcccagcattaa

SEQ ID NO: 3403665 - DNA, 25 bp, Homo sapien
ctataaaatggaaacctggcggttg

SEQ ID NO: 3403666 - DNA, 25 bp, Homo sapien
tgattcttagcaaggcatttacccc

SEQ ID NO: 3403667 - DNA, 25 bp, Homo sapien
gctggaaccctactggtggcataat

SEQ ID NO: 3403668 - DNA, 25 bp, Homo sapien
ttagaagtaaagcagaccccgccat

SEQ ID NO: 3403669 - DNA, 25 bp, Homo sapien
gagagcacccgtggaatccctggtg

SEQ ID NO: 3403670 - DNA, 25 bp, Homo sapien
tgggattgcagggacctgactctaa

SEQ ID NO: 3403671 - DNA, 25 bp, Homo sapien
gatgcgactcctgcaataagtccag

SEQ ID NO: 3403672 - DNA, 25 bp, Homo sapien
gaatagggtgacacttcagccaggg

SEQ ID NO: 3403673 - DNA, 25 bp, Homo sapien
gccggcacgcagtaggaaaacagat

SEQ ID NO: 3403674 - DNA, 25 bp, Homo sapien
tacagaaaatctcggcgaagtcccg

SEQ ID NO: 3403675 - DNA, 25 bp, Homo sapien
taatgcgaagttccaagcggctgcg

SEQ ID NO: 3403676 - DNA, 25 bp, Homo sapien
ttcctgttggtccattttcacaaat

SEQ ID NO: 3403677 - DNA, 25 bp, Homo sapien
tggggtgaaatttcctgttggtcca

SEQ ID NO: 3403678 - DNA, 25 bp, Homo sapien
tttcacaaatttagattctggctga

SEQ ID NO: 3403679 - DNA, 25 bp, Homo sapien
acaaatttagattctggctgatgct

SEQ ID NO: 3403680 - DNA, 25 bp, Homo sapien
tgcagaagtctcttgttatccaaag

SEQ ID NO: 3403681 - DNA, 25 bp, Homo sapien
atgtttgaaggtttgtctctctgca

SEQ ID NO: 3403682 - DNA, 25 bp, Homo sapien
tatttaaaccatacagcctcaatct

SEQ ID NO: 3403683 - DNA, 25 bp, Homo sapien
aatattttggcgattgaaatctggc

SEQ ID NO: 3403684 - DNA, 25 bp, Homo sapien
cggaagcagcagaggccactcgctc

SEQ ID NO: 3403685 - DNA, 25 bp, Homo sapien
gaagcagcagaggccactcgctcat

SEQ ID NO: 3403686 - DNA, 25 bp, Homo sapien
ggaagcagcagaggccactcgctca

SEQ ID NO: 3403687 - DNA, 25 bp, Homo sapien
gcactgttattaatgacccaagtgg

SEQ ID NO: 3403688 - DNA, 25 bp, Homo sapien
actgttattaatgacccaagtggaa

SEQ ID NO: 3403689 - DNA, 25 bp, Homo sapien
ctgttattaatgacccaagtggaag

SEQ ID NO: 3403690 - DNA, 25 bp, Homo sapien
cactgttattaatgacccaagtgga

SEQ ID NO: 3403691 - DNA, 25 bp, Homo sapien
tccaacccatagggataactgtgac

SEQ ID NO: 3403692 - DNA, 25 bp, Homo sapien
ccaacccatagggataactgtgacc

SEQ ID NO: 3403693 - DNA, 25 bp, Homo sapien
catttctaccatgaagcaagatacc

SEQ ID NO: 3403694 - DNA, 25 bp, Homo sapien
attctgccagtatgcatttctacca

SEQ ID NO: 3403695 - DNA, 25 bp, Homo sapien
atgcatttctaccatgaagcaagat

SEQ ID NO: 3403696 - DNA, 25 bp, Homo sapien
acacaattctgccagtatgcatttc

SEQ ID NO: 3403697 - DNA, 25 bp, Homo sapien
cctacttcatcaccagaaaagctct

SEQ ID NO: 3403698 - DNA, 25 bp, Homo sapien
tctcctacttcatcaccagaaaagc

SEQ ID NO: 3403699 - DNA, 25 bp, Homo sapien
tcatctcctacttcatcaccagaaa

SEQ ID NO: 3403700 - DNA, 25 bp, Homo sapien
tcctacttcatcaccagaaaagctc

SEQ ID NO: 3403701 - DNA, 25 bp, Homo sapien
cttggggtccacacccctccaagct

SEQ ID NO: 3403702 - DNA, 25 bp, Homo sapien
gtccaaatttagcttggggtccaca

SEQ ID NO: 3403703 - DNA, 25 bp, Homo sapien
tggggtccacacccctccaagctaa

SEQ ID NO: 3403704 - DNA, 25 bp, Homo sapien
ggtccacacccctccaagctaacat

SEQ ID NO: 3403705 - DNA, 25 bp, Homo sapien
caggtatcatacagccaaaggtctc

SEQ ID NO: 3403706 - DNA, 25 bp, Homo sapien
gctgaagtaggaagcttgcaccagt

SEQ ID NO: 3403707 - DNA, 25 bp, Homo sapien
gataacagggttacgaacccattgc

SEQ ID NO: 3403708 - DNA, 25 bp, Homo sapien
gaccttcagttgaagccagccggag

SEQ ID NO: 3403709 - DNA, 25 bp, Homo sapien
tttcatgtggattgaaactcataaa

SEQ ID NO: 3403710 - DNA, 25 bp, Homo sapien
ttaattgagggccctttcatgtgga

SEQ ID NO: 3403711 - DNA, 25 bp, Homo sapien
ttcatgtggattgaaactcataaat

SEQ ID NO: 3403712 - DNA, 25 bp, Homo sapien
actcagtgtccgtggttacaggata

SEQ ID NO: 3403713 - DNA, 25 bp, Homo sapien
tgaatttgggtagattccaaggccc

SEQ ID NO: 3403714 - DNA, 25 bp, Homo sapien
tggttacaggataacggtctaccat

SEQ ID NO: 3403715 - DNA, 25 bp, Homo sapien
ggtgaatttgggtagattccaaggc

SEQ ID NO: 3403716 - DNA, 25 bp, Homo sapien
tcttccatactgaactacctccctc

SEQ ID NO: 3403717 - DNA, 25 bp, Homo sapien
tccatactgaactacctccctccac

SEQ ID NO: 3403718 - DNA, 25 bp, Homo sapien
gcatcttccatactgaactacctcc

SEQ ID NO: 3403719 - DNA, 25 bp, Homo sapien
ttccatactgaactacctccctcca

SEQ ID NO: 3403720 - DNA, 25 bp, Homo sapien
gtagggctggagaagccatctgaaa

SEQ ID NO: 3403721 - DNA, 25 bp, Homo sapien
tggatgaccagggtagggctggaga

SEQ ID NO: 3403722 - DNA, 25 bp, Homo sapien
ccagctcctggatgaccagggtagg

SEQ ID NO: 3403723 - DNA, 25 bp, Homo sapien
gggtagggctggagaagccatctga

SEQ ID NO: 3403724 - DNA, 25 bp, Homo sapien
tcctgtcaccctgagtggtgctgat

SEQ ID NO: 3403725 - DNA, 25 bp, Homo sapien
ggtgctgatgtcatcttcccacact

SEQ ID NO: 3403726 - DNA, 25 bp, Homo sapien
attccctgtagtcacctgtctgccg

SEQ ID NO: 3403727 - DNA, 25 bp, Homo sapien
tcgggggcacgcactgctttcttcc

SEQ ID NO: 3403728 - DNA, 25 bp, Homo sapien
gagtcaccgagagcactccagagga

SEQ ID NO: 3403729 - DNA, 25 bp, Homo sapien
tcaccgagagcactccagaggaggc

SEQ ID NO: 3403730 - DNA, 25 bp, Homo sapien
gcagggaagggagtcaccgagagca

SEQ ID NO: 3403731 - DNA, 25 bp, Homo sapien
aagggagtcaccgagagcactccag

SEQ ID NO: 3403732 - DNA, 25 bp, Homo sapien
gtattggagccagccttcaagtcaa

SEQ ID NO: 3403733 - DNA, 25 bp, Homo sapien
ctgcaaattgcaggctcggcggcag

SEQ ID NO: 3403734 - DNA, 25 bp, Homo sapien
aagtcttcttggagggcggatgttt

SEQ ID NO: 3403735 - DNA, 25 bp, Homo sapien
ttttcataggagctagtattggagc

SEQ ID NO: 3403736 - DNA, 25 bp, Homo sapien
catcagattatgcagccaagccagg

SEQ ID NO: 3403737 - DNA, 25 bp, Homo sapien
tgtatacctgtcaactgcctctcca

SEQ ID NO: 3403738 - DNA, 25 bp, Homo sapien
gagccgcggtcagattgtatacctg

SEQ ID NO: 3403739 - DNA, 25 bp, Homo sapien
tgtaatgaggcctgacacttcagga

SEQ ID NO: 3403740 - DNA, 25 bp, Homo sapien
cagaagacaccgagaccttgtcatc

SEQ ID NO: 3403741 - DNA, 25 bp, Homo sapien
acaccgagaccttgtcatccagcag

SEQ ID NO: 3403742 - DNA, 25 bp, Homo sapien
gaagacaccgagaccttgtcatcca

SEQ ID NO: 3403743 - DNA, 25 bp, Homo sapien
gacaccgagaccttgtcatccagca

SEQ ID NO: 3403744 - DNA, 25 bp, Homo sapien
tcaaagccccgcgaagtggttgtcc

SEQ ID NO: 3403745 - DNA, 25 bp, Homo sapien
agccccgcgaagtggttgtccagcc

SEQ ID NO: 3403746 - DNA, 25 bp, Homo sapien
gagcatcaaagccccgcgaagtggt

SEQ ID NO: 3403747 - DNA, 25 bp, Homo sapien
cccgcgaagtggttgtccagccctg

SEQ ID NO: 3403748 - DNA, 25 bp, Homo sapien
tggatgttccgctgaggagtggtgg

SEQ ID NO: 3403749 - DNA, 25 bp, Homo sapien
tctgtggctagttccatgtctccca

SEQ ID NO: 3403750 - DNA, 25 bp, Homo sapien
ctttgaggtgctggatgttccgctg

SEQ ID NO: 3403751 - DNA, 25 bp, Homo sapien
tgtctcccactaggaaggagggatt

SEQ ID NO: 3403752 - DNA, 25 bp, Homo sapien
agcataacaaagctccccccgggat

SEQ ID NO: 3403753 - DNA, 25 bp, Homo sapien
gcataacaaagctccccccgggata

SEQ ID NO: 3403754 - DNA, 25 bp, Homo sapien
tgtgaggggcacgtggccgtgctga

SEQ ID NO: 3403755 - DNA, 25 bp, Homo sapien
gcacgtggccgtgctgacagcccag

SEQ ID NO: 3403756 - DNA, 25 bp, Homo sapien
ggcccctgctcacaaatctcccccc

SEQ ID NO: 3403757 - DNA, 25 bp, Homo sapien
cactggccgatctgccggcccctgg

SEQ ID NO: 3403758 - DNA, 25 bp, Homo sapien
actcccactccactggccgatctgc

SEQ ID NO: 3403759 - DNA, 25 bp, Homo sapien
aaaatgttttcatggcaagactgac

SEQ ID NO: 3403760 - DNA, 25 bp, Homo sapien
catggaagatgggctaaagatgctt

SEQ ID NO: 3403761 - DNA, 25 bp, Homo sapien
aagatgggctaaagatgcttgtatc

SEQ ID NO: 3403762 - DNA, 25 bp, Homo sapien
gaagatgggctaaagatgcttgtat

SEQ ID NO: 3403763 - DNA, 25 bp, Homo sapien
tggaagatgggctaaagatgcttgt

SEQ ID NO: 3403764 - DNA, 25 bp, Homo sapien
gagatggggtctggttcctcctgac

SEQ ID NO: 3403765 - DNA, 25 bp, Homo sapien
aggttctggtgtccacggtccccag

SEQ ID NO: 3403766 - DNA, 25 bp, Homo sapien
ctagtgcacattttcagagatgggg

SEQ ID NO: 3403767 - DNA, 25 bp, Homo sapien
tggtgtccacggtccccagttccca

SEQ ID NO: 3403768 - DNA, 25 bp, Homo sapien
tctcctcatagctttgcagagggag

SEQ ID NO: 3403769 - DNA, 25 bp, Homo sapien
tttgtctcctcatagctttgcagag

SEQ ID NO: 3403770 - DNA, 25 bp, Homo sapien
gtctcctcatagctttgcagaggga

SEQ ID NO: 3403771 - DNA, 25 bp, Homo sapien
tttgcagagggaggtcccgcaccat

SEQ ID NO: 3403772 - DNA, 25 bp, Homo sapien
agttgataggcgttggatttgcggt

SEQ ID NO: 3403773 - DNA, 25 bp, Homo sapien
ataggcgttggatttgcggttttgt

SEQ ID NO: 3403774 - DNA, 25 bp, Homo sapien
tgataggcgttggatttgcggtttt

SEQ ID NO: 3403775 - DNA, 25 bp, Homo sapien
ttgataggcgttggatttgcggttt

SEQ ID NO: 3403776 - DNA, 25 bp, Homo sapien
cgtgggaccagcagatccgagttgt

SEQ ID NO: 3403777 - DNA, 25 bp, Homo sapien
agcaggtgtcgcccttgtctctgaa

SEQ ID NO: 3403778 - DNA, 25 bp, Homo sapien
tgaaacggccgtctgggccctgctc

SEQ ID NO: 3403779 - DNA, 25 bp, Homo sapien
tgacggtccgatgagacctgaggac

SEQ ID NO: 3403780 - DNA, 25 bp, Homo sapien
caggatgatccctgtgaaaactgcc

SEQ ID NO: 3403781 - DNA, 25 bp, Homo sapien
gacaccactttccaggatgatccct

SEQ ID NO: 3403782 - DNA, 25 bp, Homo sapien
aggatgatccctgtgaaaactgcca

SEQ ID NO: 3403783 - DNA, 25 bp, Homo sapien
agacagggacaccactttccaggat

SEQ ID NO: 3403784 - DNA, 25 bp, Homo sapien
gtggtgacattgagagcagtcttca

SEQ ID NO: 3403785 - DNA, 25 bp, Homo sapien
cctgattagagatagaggcagctgt

SEQ ID NO: 3403786 - DNA, 25 bp, Homo sapien
cctgccactcctgattagagataga

SEQ ID NO: 3403787 - DNA, 25 bp, Homo sapien
tagaatctctgccatactccctgtc

SEQ ID NO: 3403788 - DNA, 25 bp, Homo sapien
gcctcagtcggcgtcggactgcaca

SEQ ID NO: 3403789 - DNA, 25 bp, Homo sapien
agtcggcgtcggactgcacagcccg

SEQ ID NO: 3403790 - DNA, 25 bp, Homo sapien
cgctcgtgcctcagtcggcgtcgga

SEQ ID NO: 3403791 - DNA, 25 bp, Homo sapien
cagcgtcacccgctcgtgcctcagt

SEQ ID NO: 3403792 - DNA, 25 bp, Homo sapien
gtcttagggggtccggctcagttga

SEQ ID NO: 3403793 - DNA, 25 bp, Homo sapien
agtcttagggggtccggctcagttg

SEQ ID NO: 3403794 - DNA, 25 bp, Homo sapien
tcttagggggtccggctcagttgaa

SEQ ID NO: 3403795 - DNA, 25 bp, Homo sapien
tgtaagaactgttccccagtttcca

SEQ ID NO: 3403796 - DNA, 25 bp, Homo sapien
cagtgtaagaactgttccccagttt

SEQ ID NO: 3403797 - DNA, 25 bp, Homo sapien
tgttccccagtttccaacctcctgc

SEQ ID NO: 3403798 - DNA, 25 bp, Homo sapien
ctgttccccagtttccaacctcctg

SEQ ID NO: 3403799 - DNA, 25 bp, Homo sapien
gcacaggctcccacctttcggccca

SEQ ID NO: 3403800 - DNA, 25 bp, Homo sapien
tgcctccccttcatgggcaaacccc

SEQ ID NO: 3403801 - DNA, 25 bp, Homo sapien
cagatgcctccccttcatgggcaaa

SEQ ID NO: 3403802 - DNA, 25 bp, Homo sapien
tggcacaggctcccacctttcggcc

SEQ ID NO: 3403803 - DNA, 25 bp, Homo sapien
gtataacggtttggagcagaaggcc

SEQ ID NO: 3403804 - DNA, 25 bp, Homo sapien
gctggccccagatgctccgaatctg

SEQ ID NO: 3403805 - DNA, 25 bp, Homo sapien
ttcttgattaagtcataaccgcccc

SEQ ID NO: 3403806 - DNA, 25 bp, Homo sapien
cctggccgtttgatgttcttgatta

SEQ ID NO: 3403807 - DNA, 25 bp, Homo sapien
agtccccacaggatagcagcacctt

SEQ ID NO: 3403808 - DNA, 25 bp, Homo sapien
agcaccttccacaaacaattgttga

SEQ ID NO: 3403809 - DNA, 25 bp, Homo sapien
ggaggccaccgtcccatttctccag

SEQ ID NO: 3403810 - DNA, 25 bp, Homo sapien
caaacaattgttgactccaagatgc

SEQ ID NO: 3403811 - DNA, 25 bp, Homo sapien
cccctctctgagtagtaacggttca

SEQ ID NO: 3403812 - DNA, 25 bp, Homo sapien
cagagaggatagtgagtccagctgt

SEQ ID NO: 3403813 - DNA, 25 bp, Homo sapien
ctgtgggccttgggcgagttcccct

SEQ ID NO: 3403814 - DNA, 25 bp, Homo sapien
tgagtagtaacggttcattcctgtc

SEQ ID NO: 3403815 - DNA, 25 bp, Homo sapien
ccaaccaactttccattgctgatgg

SEQ ID NO: 3403816 - DNA, 25 bp, Homo sapien
tagccatccgccggcctctcctctt

SEQ ID NO: 3403817 - DNA, 25 bp, Homo sapien
gatggatttagccaagaatttgaca

SEQ ID NO: 3403818 - DNA, 25 bp, Homo sapien
agccaagaatttgacatccactgag

SEQ ID NO: 3403819 - DNA, 25 bp, Homo sapien
gtctactgcggagatctgggcctgc

SEQ ID NO: 3403820 - DNA, 25 bp, Homo sapien
tgagccctctccatgacgggagccc

SEQ ID NO: 3403821 - DNA, 25 bp, Homo sapien
cccaggcagggaagcggccatttaa

SEQ ID NO: 3403822 - DNA, 25 bp, Homo sapien
gacccacttccatggtctactgcgg

SEQ ID NO: 3403823 - DNA, 25 bp, Homo sapien
tcctgatcacccacgggaagaggct

SEQ ID NO: 3403824 - DNA, 25 bp, Homo sapien
tgttttcatgtttgacaggtgatgt

SEQ ID NO: 3403825 - DNA, 25 bp, Homo sapien
gactttgtcctgatcacccacggga

SEQ ID NO: 3403826 - DNA, 25 bp, Homo sapien
gggcacagacggctgtgtttgtttt

SEQ ID NO: 3403827 - DNA, 25 bp, Homo sapien
gcatccgatcccgtgggagctcggt

SEQ ID NO: 3403828 - DNA, 25 bp, Homo sapien
tccagccagtttggtgagttgggca

SEQ ID NO: 3403829 - DNA, 25 bp, Homo sapien
ccagtttggtgagttgggcatccga

SEQ ID NO: 3403830 - DNA, 25 bp, Homo sapien
tggtgagttgggcatccgatcccgt

SEQ ID NO: 3403831 - DNA, 25 bp, Homo sapien
tgaaaaacacgacccagatctcgtc

SEQ ID NO: 3403832 - DNA, 25 bp, Homo sapien
tgttgtcctggtatatcaggcccca

SEQ ID NO: 3403833 - DNA, 25 bp, Homo sapien
gacatactcactttaaatccaggct

SEQ ID NO: 3403834 - DNA, 25 bp, Homo sapien
ccttatacctacctgagggcctttg

SEQ ID NO: 3403835 - DNA, 25 bp, Homo sapien
cctgtgcccacgtgtcgtccacaca

SEQ ID NO: 3403836 - DNA, 25 bp, Homo sapien
ctgtgcccacgtgtcgtccacacag

SEQ ID NO: 3403837 - DNA, 25 bp, Homo sapien
gcctgtgcccacgtgtcgtccacac

SEQ ID NO: 3403838 - DNA, 25 bp, Homo sapien
aagcttggctggtcccttggtcacg

SEQ ID NO: 3403839 - DNA, 25 bp, Homo sapien
ccttgtcaccaaggcagacgtggct

SEQ ID NO: 3403840 - DNA, 25 bp, Homo sapien
tggccgccagggaatagcaactact

SEQ ID NO: 3403841 - DNA, 25 bp, Homo sapien
aagtgagtattcctatccctggcag

SEQ ID NO: 3403842 - DNA, 25 bp, Homo sapien
agaaaatccaggagtgccagccgcc

SEQ ID NO: 3403843 - DNA, 25 bp, Homo sapien
ccagaaaatccaggagtgccagccg

SEQ ID NO: 3403844 - DNA, 25 bp, Homo sapien
aaaatccaggagtgccagccgccag

SEQ ID NO: 3403845 - DNA, 25 bp, Homo sapien
aagggagccagcaccgccgggcagc

SEQ ID NO: 3403846 - DNA, 25 bp, Homo sapien
tgactttgatacaggctgagcccat

SEQ ID NO: 3403847 - DNA, 25 bp, Homo sapien
ggtgactttgatacaggctgagccc

SEQ ID NO: 3403848 - DNA, 25 bp, Homo sapien
gtatttggtgactttgatacaggct

SEQ ID NO: 3403849 - DNA, 25 bp, Homo sapien
gtgactttgatacaggctgagccca

SEQ ID NO: 3403850 - DNA, 25 bp, Homo sapien
gaatccagtgcttggtcaaaggacc

SEQ ID NO: 3403851 - DNA, 25 bp, Homo sapien
gctgggaatggcagggaatctcctc

SEQ ID NO: 3403852 - DNA, 25 bp, Homo sapien
aatcttttcggaggtggtcaggacg

SEQ ID NO: 3403853 - DNA, 25 bp, Homo sapien
ggagatagttcgtcctcagtcccta

SEQ ID NO: 3403854 - DNA, 25 bp, Homo sapien
aggctatgaagtcctctccagggca

SEQ ID NO: 3403855 - DNA, 25 bp, Homo sapien
aaggcaagaggcagtccatgccagg

SEQ ID NO: 3403856 - DNA, 25 bp, Homo sapien
tccacagagctgacatccggatggc

SEQ ID NO: 3403857 - DNA, 25 bp, Homo sapien
gaaaaccagcagtcaatgtccacag

SEQ ID NO: 3403858 - DNA, 25 bp, Homo sapien
aactgctcttgtcggccaggatcca

SEQ ID NO: 3403859 - DNA, 25 bp, Homo sapien
gatgaaactgctcttgtcggccagg

SEQ ID NO: 3403860 - DNA, 25 bp, Homo sapien
tgaaactgctcttgtcggccaggat

SEQ ID NO: 3403861 - DNA, 25 bp, Homo sapien
accccgaagcccaggatcactgcgc

SEQ ID NO: 3403862 - DNA, 25 bp, Homo sapien
acactgtacccccagggcatgggac

SEQ ID NO: 3403863 - DNA, 25 bp, Homo sapien
gggtacactgtacccccagggcatg

SEQ ID NO: 3403864 - DNA, 25 bp, Homo sapien
actgtacccccagggcatgggacgc

SEQ ID NO: 3403865 - DNA, 25 bp, Homo sapien
gtacactgtacccccagggcatggg

SEQ ID NO: 3403866 - DNA, 25 bp, Homo sapien
tttccacacgccgtctccaactctg

SEQ ID NO: 3403867 - DNA, 25 bp, Homo sapien
cacacgccgtctccaactctgacat

SEQ ID NO: 3403868 - DNA, 25 bp, Homo sapien
tcatgggctttccacacgccgtctc

SEQ ID NO: 3403869 - DNA, 25 bp, Homo sapien
gccgtctccaactctgacatcaccc

SEQ ID NO: 3403870 - DNA, 25 bp, Homo sapien
gaagaagtacaaaatcagtgggcac

SEQ ID NO: 3403871 - DNA, 25 bp, Homo sapien
aaaatcagtgggcacagcaggtata

SEQ ID NO: 3403872 - DNA, 25 bp, Homo sapien
gggaagaagaagtacaaaatcagtg

SEQ ID NO: 3403873 - DNA, 25 bp, Homo sapien
gaagtacaaaatcagtgggcacagc

SEQ ID NO: 3403874 - DNA, 25 bp, Homo sapien
agcggacctcgttgacggcgccgat

SEQ ID NO: 3403875 - DNA, 25 bp, Homo sapien
ccatcctaagcgagctggaggaggt

SEQ ID NO: 3403876 - DNA, 25 bp, Homo sapien
catgagcatagtgactgcccccacg

SEQ ID NO: 3403877 - DNA, 25 bp, Homo sapien
gatgaagacataggcccccatccta

SEQ ID NO: 3403878 - DNA, 25 bp, Homo sapien
cggtcaggctgcactcggctggatg

SEQ ID NO: 3403879 - DNA, 25 bp, Homo sapien
cagctgcggagggatccgtactcac

SEQ ID NO: 3403880 - DNA, 25 bp, Homo sapien
gatgctctccacccgatgttacggc

SEQ ID NO: 3403881 - DNA, 25 bp, Homo sapien
gcctgcgtgccccgagagatgctct

SEQ ID NO: 3403882 - DNA, 25 bp, Homo sapien
acctgggcaatgaggatcaggagca

SEQ ID NO: 3403883 - DNA, 25 bp, Homo sapien
agaagagggccccggccgtcacctg

SEQ ID NO: 3403884 - DNA, 25 bp, Homo sapien
gccccggccgtcacctgggcaatga

SEQ ID NO: 3403885 - DNA, 25 bp, Homo sapien
cttgcccatgttgaagtagaagagg

SEQ ID NO: 3403886 - DNA, 25 bp, Homo sapien
tcttggaaccacgaggtaagtgtca

SEQ ID NO: 3403887 - DNA, 25 bp, Homo sapien
acatcgtgcctggtgctgtggcagc

SEQ ID NO: 3403888 - DNA, 25 bp, Homo sapien
gacttccggtcaagtcaaccacaga

SEQ ID NO: 3403889 - DNA, 25 bp, Homo sapien
taagtgtcataatgcaggaaagcca

SEQ ID NO: 3403890 - DNA, 25 bp, Homo sapien
ttctcagcctcttttgcaaccaggg

SEQ ID NO: 3403891 - DNA, 25 bp, Homo sapien
ctcttttgcaaccaggggtggcttt

SEQ ID NO: 3403892 - DNA, 25 bp, Homo sapien
caggggtggctttgtaacccagtct

SEQ ID NO: 3403893 - DNA, 25 bp, Homo sapien
gtctttagagtctgaaagttggata

SEQ ID NO: 3403894 - DNA, 25 bp, Homo sapien
tctgctaggccacaggccatgtgca

SEQ ID NO: 3403895 - DNA, 25 bp, Homo sapien
ctaagggtctgctaggccacaggcc

SEQ ID NO: 3403896 - DNA, 25 bp, Homo sapien
tgctaggccacaggccatgtgcagc

SEQ ID NO: 3403897 - DNA, 25 bp, Homo sapien
taggccacaggccatgtgcagcagg

SEQ ID NO: 3403898 - DNA, 25 bp, Homo sapien
gcaacatcagcctccggctgagtgc

SEQ ID NO: 3403899 - DNA, 25 bp, Homo sapien
ggctgagtgccgcacgacgcccttc

SEQ ID NO: 3403900 - DNA, 25 bp, Homo sapien
ttcatgaagtgaataatggcggcaa

SEQ ID NO: 3403901 - DNA, 25 bp, Homo sapien
cgcccttcccgtttgttagtgctct

SEQ ID NO: 3403902 - DNA, 25 bp, Homo sapien
ggaggtcaccctggcaaccaggtag

SEQ ID NO: 3403903 - DNA, 25 bp, Homo sapien
gggaggtcaccctggcaaccaggta

SEQ ID NO: 3403904 - DNA, 25 bp, Homo sapien
agggaggtcaccctggcaaccaggt

SEQ ID NO: 3403905 - DNA, 25 bp, Homo sapien
gggctggttcagcttggagctgatg

SEQ ID NO: 3403906 - DNA, 25 bp, Homo sapien
cttggagctgatgctcaggaggcct

SEQ ID NO: 3403907 - DNA, 25 bp, Homo sapien
ctgggccacggggaccatggccaca

SEQ ID NO: 3403908 - DNA, 25 bp, Homo sapien
ggttcagcttggagctgatgctcag

SEQ ID NO: 3403909 - DNA, 25 bp, Homo sapien
ctcaggaattaagggttccttcttg

SEQ ID NO: 3403910 - DNA, 25 bp, Homo sapien
ggcccaaatctacatcttgcctatg

SEQ ID NO: 3403911 - DNA, 25 bp, Homo sapien
tgctctcagctaaccccacagagaa

SEQ ID NO: 3403912 - DNA, 25 bp, Homo sapien
acatcttgcctatgctggtcctcac

SEQ ID NO: 3403913 - DNA, 25 bp, Homo sapien
cgaatgagctcagtcacgatgccgc

SEQ ID NO: 3403914 - DNA, 25 bp, Homo sapien
cctgcacgtagtcccaggcatcctg

SEQ ID NO: 3403915 - DNA, 25 bp, Homo sapien
gctgttgtagtctcgaatgagctca

SEQ ID NO: 3403916 - DNA, 25 bp, Homo sapien
tgcaggctgtcctcgcgactgctgt

SEQ ID NO: 3403917 - DNA, 25 bp, Homo sapien
aagttcaagttgaaggagcgcaggt

SEQ ID NO: 3403918 - DNA, 25 bp, Homo sapien
tgcttgtgctcacggctcaccctag

SEQ ID NO: 3403919 - DNA, 25 bp, Homo sapien
ggtcccagccgaaccatcataaact

SEQ ID NO: 3403920 - DNA, 25 bp, Homo sapien
cagagactgagatatgccacttcca

SEQ ID NO: 3403921 - DNA, 25 bp, Homo sapien
cagggtggttgccactctgggtcct

SEQ ID NO: 3403922 - DNA, 25 bp, Homo sapien
cagcgttgtctgtccagttgtagaa

SEQ ID NO: 3403923 - DNA, 25 bp, Homo sapien
agttgtagaagctgacccagccgca

SEQ ID NO: 3403924 - DNA, 25 bp, Homo sapien
gggcgattcatgagctcagcgttgt

SEQ ID NO: 3403925 - DNA, 25 bp, Homo sapien
tcgatgatggccacacccacgccca

SEQ ID NO: 3403926 - DNA, 25 bp, Homo sapien
ctcgatgatggccacacccacgccc

SEQ ID NO: 3403927 - DNA, 25 bp, Homo sapien
gtttacatggggattaagtggatcc

SEQ ID NO: 3403928 - DNA, 25 bp, Homo sapien
cctcaccatccaggtttacatgggg

SEQ ID NO: 3403929 - DNA, 25 bp, Homo sapien
ggatcctcaacttgagcctcacaac

SEQ ID NO: 3403930 - DNA, 25 bp, Homo sapien
gggtgtcccggcctcagacgcccca

SEQ ID NO: 3403931 - DNA, 25 bp, Homo sapien
cttcggaatggacgtgccggcacaa

SEQ ID NO: 3403932 - DNA, 25 bp, Homo sapien
gacgtgccggcacaagcagatggac

SEQ ID NO: 3403933 - DNA, 25 bp, Homo sapien
cttgctgtagtcttcggaatggacg

SEQ ID NO: 3403934 - DNA, 25 bp, Homo sapien
cgtgccggcacaagcagatggacag

SEQ ID NO: 3403935 - DNA, 25 bp, Homo sapien
gcaagagggtcttcgcagtgaagtg

SEQ ID NO: 3403936 - DNA, 25 bp, Homo sapien
tactttcagtcaggatgggcaagag

SEQ ID NO: 3403937 - DNA, 25 bp, Homo sapien
tggcagcggataggccaggagagat

SEQ ID NO: 3403938 - DNA, 25 bp, Homo sapien
gagagatcgctaggccccagaaagc

SEQ ID NO: 3403939 - DNA, 25 bp, Homo sapien
ggacgctgtggggagcatttttctc

SEQ ID NO: 3403940 - DNA, 25 bp, Homo sapien
ctgcgccagggacgctgtggggagc

SEQ ID NO: 3403941 - DNA, 25 bp, Homo sapien
agcatttttctctgagttgctaaga

SEQ ID NO: 3403942 - DNA, 25 bp, Homo sapien
gtggggagcatttttctctgagttg

SEQ ID NO: 3403943 - DNA, 25 bp, Homo sapien
aataagttgacccacccagtaggca

SEQ ID NO: 3403944 - DNA, 25 bp, Homo sapien
gacagcccagagtgccttatctaac

SEQ ID NO: 3403945 - DNA, 25 bp, Homo sapien
ccagaggaccgcttgccaagaaagg

SEQ ID NO: 3403946 - DNA, 25 bp, Homo sapien
catggcctaggctaatctgagctgt

SEQ ID NO: 3403947 - DNA, 25 bp, Homo sapien
atggacgtgtcagaggaagcagccc

SEQ ID NO: 3403948 - DNA, 25 bp, Homo sapien
tttcacaaaagcgagggtcagagcc

SEQ ID NO: 3403949 - DNA, 25 bp, Homo sapien
aatcttccggaatcaacgcaaaggg

SEQ ID NO: 3403950 - DNA, 25 bp, Homo sapien
tcatcacgtggcttgggacagacat

SEQ ID NO: 3403951 - DNA, 25 bp, Homo sapien
ctggaagatcatctggggcagaggc

SEQ ID NO: 3403952 - DNA, 25 bp, Homo sapien
tctggggcagaggctggaggcagct

SEQ ID NO: 3403953 - DNA, 25 bp, Homo sapien
ggggcagaggctggaggcagctctg

SEQ ID NO: 3403954 - DNA, 25 bp, Homo sapien
tggaagatcatctggggcagaggct

SEQ ID NO: 3403955 - DNA, 25 bp, Homo sapien
tcagttgtgtgcaagagtctctaca

SEQ ID NO: 3403956 - DNA, 25 bp, Homo sapien
gatgcctgttggctagatgctccag

SEQ ID NO: 3403957 - DNA, 25 bp, Homo sapien
tcggcagtgtgtgctggtacgtacc

SEQ ID NO: 3403958 - DNA, 25 bp, Homo sapien
acatttgccccgaggcagcgtagca

SEQ ID NO: 3403959 - DNA, 25 bp, Homo sapien
ccagccccttgggccaatcagccat

SEQ ID NO: 3403960 - DNA, 25 bp, Homo sapien
cccagccccttgggccaatcagcca

SEQ ID NO: 3403961 - DNA, 25 bp, Homo sapien
cttcccactaggcaagaggctgagt

SEQ ID NO: 3403962 - DNA, 25 bp, Homo sapien
taggcaagaggctgagtacaggtct

SEQ ID NO: 3403963 - DNA, 25 bp, Homo sapien
ctaggcaagaggctgagtacaggtc

SEQ ID NO: 3403964 - DNA, 25 bp, Homo sapien
gcaagaggctgagtacaggtcttac

SEQ ID NO: 3403965 - DNA, 25 bp, Homo sapien
tccagggcatcaagcaagccagtgt

SEQ ID NO: 3403966 - DNA, 25 bp, Homo sapien
cttcatccagggcatcaagcaagcc

SEQ ID NO: 3403967 - DNA, 25 bp, Homo sapien
tgtgcatttgcgggtatgacccacc

SEQ ID NO: 3403968 - DNA, 25 bp, Homo sapien
cagcccatgaatcgggcagggcgtc

SEQ ID NO: 3403969 - DNA, 25 bp, Homo sapien
cataaggcctaagttcatagtcaat

SEQ ID NO: 3403970 - DNA, 25 bp, Homo sapien
cctgggggctggacttcataaggcc

SEQ ID NO: 3403971 - DNA, 25 bp, Homo sapien
agtcaatatgtaacaataaaatgtc

SEQ ID NO: 3403972 - DNA, 25 bp, Homo sapien
gaatcaataacatccctgtacacac

SEQ ID NO: 3403973 - DNA, 25 bp, Homo sapien
tcccgcatgttgctacagactgagc

SEQ ID NO: 3403974 - DNA, 25 bp, Homo sapien
attcctggatgaaaactcgggcagc

SEQ ID NO: 3403975 - DNA, 25 bp, Homo sapien
tggacctactttgcccctgcacatg

SEQ ID NO: 3403976 - DNA, 25 bp, Homo sapien
tctggtccgaggtagtaactgcatc

SEQ ID NO: 3403977 - DNA, 25 bp, Homo sapien
cagggagggtgacgtcaccgccggg

SEQ ID NO: 3403978 - DNA, 25 bp, Homo sapien
ccacccaggatgtgtcattctcaca

SEQ ID NO: 3403979 - DNA, 25 bp, Homo sapien
ttagtaatgctttggcagagcctga

SEQ ID NO: 3403980 - DNA, 25 bp, Homo sapien
gtcaccgccgggcttagtaatgctt

SEQ ID NO: 3403981 - DNA, 25 bp, Homo sapien
ccccaggccttgtaatatgggagtg

SEQ ID NO: 3403982 - DNA, 25 bp, Homo sapien
atatgggagtgaactcagggcccac

SEQ ID NO: 3403983 - DNA, 25 bp, Homo sapien
gccttgtaatatgggagtgaactca

SEQ ID NO: 3403984 - DNA, 25 bp, Homo sapien
tgtaatatgggagtgaactcagggc

SEQ ID NO: 3403985 - DNA, 25 bp, Homo sapien
agacagtgtgcgcaacccatggctt

SEQ ID NO: 3403986 - DNA, 25 bp, Homo sapien
caaggcctgccataaatgggtccca

SEQ ID NO: 3403987 - DNA, 25 bp, Homo sapien
tggaaaagccggagaggagagaacc

SEQ ID NO: 3403988 - DNA, 25 bp, Homo sapien
tccggctttcataagtggaaaagcc

SEQ ID NO: 3403989 - DNA, 25 bp, Homo sapien
tcctggaaaagcaggaacaagtcag

SEQ ID NO: 3403990 - DNA, 25 bp, Homo sapien
gaaaagcaggaacaagtcaggaacc

SEQ ID NO: 3403991 - DNA, 25 bp, Homo sapien
agtcaggaacctctggcttgattac

SEQ ID NO: 3403992 - DNA, 25 bp, Homo sapien
aagcaggaacaagtcaggaacctct

SEQ ID NO: 3403993 - DNA, 25 bp, Homo sapien
tggctccatacctctttagtggcac

SEQ ID NO: 3403994 - DNA, 25 bp, Homo sapien
gaaactggccgacttgcttgcaaaa

SEQ ID NO: 3403995 - DNA, 25 bp, Homo sapien
tccatacctctttagtggcactttt

SEQ ID NO: 3403996 - DNA, 25 bp, Homo sapien
atttgttatcagaatcatttgaaac

SEQ ID NO: 3403997 - DNA, 25 bp, Homo sapien
gtcacgtcttctgtggcctgaccca

SEQ ID NO: 3403998 - DNA, 25 bp, Homo sapien
gggctcccacgccttgagtcacgtc

SEQ ID NO: 3403999 - DNA, 25 bp, Homo sapien
cacccagcccaactggattgcttct

SEQ ID NO: 3404000 - DNA, 25 bp, Homo sapien
cacgccttgagtcacgtcttctgtg

SEQ ID NO: 3404001 - DNA, 25 bp, Homo sapien
aaagtccttagccatatcctggtgt

SEQ ID NO: 3404002 - DNA, 25 bp, Homo sapien
gtgaggaaattaacaatcagtcccg

SEQ ID NO: 3404003 - DNA, 25 bp, Homo sapien
tagtgactctccataaaaggtgagg

SEQ ID NO: 3404004 - DNA, 25 bp, Homo sapien
ggaatttgctcaagaaagctcagct

SEQ ID NO: 3404005 - DNA, 25 bp, Homo sapien
cagcattgaatccttacagccagtc

SEQ ID NO: 3404006 - DNA, 25 bp, Homo sapien
tccagccctcccacagttttgcaac

SEQ ID NO: 3404007 - DNA, 25 bp, Homo sapien
aatccttacagccagtcctgctgca

SEQ ID NO: 3404008 - DNA, 25 bp, Homo sapien
cattgaatccttacagccagtcctg

SEQ ID NO: 3404009 - DNA, 25 bp, Homo sapien
ttccgcacatctgagtcatatcaac

SEQ ID NO: 3404010 - DNA, 25 bp, Homo sapien
gaggttctataggtaaacatgcccc

SEQ ID NO: 3404011 - DNA, 25 bp, Homo sapien
tactgttgaatgtcgaggcaggttc

SEQ ID NO: 3404012 - DNA, 25 bp, Homo sapien
aggtggtagccaccgagctgcagct

SEQ ID NO: 3404013 - DNA, 25 bp, Homo sapien
tggagcggccctagcatctgctcac

SEQ ID NO: 3404014 - DNA, 25 bp, Homo sapien
gaaactggattcctaccgggccatc

SEQ ID NO: 3404015 - DNA, 25 bp, Homo sapien
ctgaggaaactggattcctaccggg

SEQ ID NO: 3404016 - DNA, 25 bp, Homo sapien
aactggattcctaccgggccatctc

SEQ ID NO: 3404017 - DNA, 25 bp, Homo sapien
ggattcctaccgggccatctccagg

SEQ ID NO: 3404018 - DNA, 25 bp, Homo sapien
tgctgaaaatcccaccatggaagta

SEQ ID NO: 3404019 - DNA, 25 bp, Homo sapien
acttccttgaggtgttggaatgacc

SEQ ID NO: 3404020 - DNA, 25 bp, Homo sapien
gtaatggtgattcagatcaacttcc

SEQ ID NO: 3404021 - DNA, 25 bp, Homo sapien
aatcccaccatggaagtaatggtga

SEQ ID NO: 3404022 - DNA, 25 bp, Homo sapien
tcccctaggaagctcttaggcttcg

SEQ ID NO: 3404023 - DNA, 25 bp, Homo sapien
gaagctcttaggcttcgctttctcc

SEQ ID NO: 3404024 - DNA, 25 bp, Homo sapien
cctaggaagctcttaggcttcgctt

SEQ ID NO: 3404025 - DNA, 25 bp, Homo sapien
gctcttaggcttcgctttctccagc

SEQ ID NO: 3404026 - DNA, 25 bp, Homo sapien
gaagcccacagcaagggtgctggag

SEQ ID NO: 3404027 - DNA, 25 bp, Homo sapien
gggaagcccacagcaagggtgctgg

SEQ ID NO: 3404028 - DNA, 25 bp, Homo sapien
aaacgggaagcccacagcaagggtg

SEQ ID NO: 3404029 - DNA, 25 bp, Homo sapien
gaggaaaaacgggaagcccacagca

SEQ ID NO: 3404030 - DNA, 25 bp, Homo sapien
cggtggatcgctcggcgctacgtcc

SEQ ID NO: 3404031 - DNA, 25 bp, Homo sapien
cgcggctccgcggtggatcgctcgg

SEQ ID NO: 3404032 - DNA, 25 bp, Homo sapien
tccgcggtggatcgctcggcgctac

SEQ ID NO: 3404033 - DNA, 25 bp, Homo sapien
gctccgcggtggatcgctcggcgct

SEQ ID NO: 3404034 - DNA, 25 bp, Homo sapien
ggcgcgtccggggacccgcagcgcg

SEQ ID NO: 3404035 - DNA, 25 bp, Homo sapien
ggcgcgctcgcaacttgcccggcgc

SEQ ID NO: 3404036 - DNA, 25 bp, Homo sapien
gcgctcgcaacttgcccggcgccgg

SEQ ID NO: 3404037 - DNA, 25 bp, Homo sapien
aggggcgcgctcgcaacttgcccgg

SEQ ID NO: 3404038 - DNA, 25 bp, Homo sapien
tgccggaccccgcgccaaatcccgc

SEQ ID NO: 3404039 - DNA, 25 bp, Homo sapien
cctaaatctggacgtgcccgagcct

SEQ ID NO: 3404040 - DNA, 25 bp, Homo sapien
gtggcgtggcgagcagcccctttcc

SEQ ID NO: 3404041 - DNA, 25 bp, Homo sapien
ccccgcgtgctagtttgagtggaac

SEQ ID NO: 3404042 - DNA, 25 bp, Homo sapien
tggtccctcactgtcttaccgggtg

SEQ ID NO: 3404043 - DNA, 25 bp, Homo sapien
ctggcgagggccggggcagtgcgcc

SEQ ID NO: 3404044 - DNA, 25 bp, Homo sapien
tggcgagggccggggcagtgcgccc

SEQ ID NO: 3404045 - DNA, 25 bp, Homo sapien
ggcgagggccggggcagtgcgcccc

SEQ ID NO: 3404046 - DNA, 25 bp, Homo sapien
accccgcgtaagttgggtgtctgtg

SEQ ID NO: 3404047 - DNA, 25 bp, Homo sapien
tctggctagtgtagggcgggctcct

SEQ ID NO: 3404048 - DNA, 25 bp, Homo sapien
tctgtggtccctgcgtcctggatgt

SEQ ID NO: 3404049 - DNA, 25 bp, Homo sapien
tgtcggcgcggttgcctcgcaggag

SEQ ID NO: 3404050 - DNA, 25 bp, Homo sapien
atttgccctggcagccttcccgaga

SEQ ID NO: 3404051 - DNA, 25 bp, Homo sapien
gaaaaatcacatcctgactcctagc

SEQ ID NO: 3404052 - DNA, 25 bp, Homo sapien
ctttccagcccacggcgcagttata

SEQ ID NO: 3404053 - DNA, 25 bp, Homo sapien
cagttataactgtgaacctttcgcc

SEQ ID NO: 3404054 - DNA, 25 bp, Homo sapien
ccgaggactcggctgttcctgcaga

SEQ ID NO: 3404055 - DNA, 25 bp, Homo sapien
ttccgaggactcggctgttcctgca

SEQ ID NO: 3404056 - DNA, 25 bp, Homo sapien
aggcctcaaacttccgaggactcgg

SEQ ID NO: 3404057 - DNA, 25 bp, Homo sapien
gaggcctcaaacttccgaggactcg

SEQ ID NO: 3404058 - DNA, 25 bp, Homo sapien
gagaggacttcatcacatcagctaa

SEQ ID NO: 3404059 - DNA, 25 bp, Homo sapien
aagatagagtcactgcgcttcagcc

SEQ ID NO: 3404060 - DNA, 25 bp, Homo sapien
ggaaggtcagatcttacaagtaaac

SEQ ID NO: 3404061 - DNA, 25 bp, Homo sapien
ccttgtatcggttaaaacagagagg

SEQ ID NO: 3404062 - DNA, 25 bp, Homo sapien
tacagtgtcctcctgacagtagctt

SEQ ID NO: 3404063 - DNA, 25 bp, Homo sapien
cccagaggtgccaaggttctcttac

SEQ ID NO: 3404064 - DNA, 25 bp, Homo sapien
cagaggtgccaaggttctcttacag

SEQ ID NO: 3404065 - DNA, 25 bp, Homo sapien
agtgtcctcctgacagtagcttctg

SEQ ID NO: 3404066 - DNA, 25 bp, Homo sapien
ccccgttgccctcacccatgagtaa

SEQ ID NO: 3404067 - DNA, 25 bp, Homo sapien
ggccccgttgccctcacccatgagt

SEQ ID NO: 3404068 - DNA, 25 bp, Homo sapien
ccgttgccctcacccatgagtaaat

SEQ ID NO: 3404069 - DNA, 25 bp, Homo sapien
gttgccctcacccatgagtaaatgt

SEQ ID NO: 3404070 - DNA, 25 bp, Homo sapien
agcctccgaaacagaccaaggcttt

SEQ ID NO: 3404071 - DNA, 25 bp, Homo sapien
atggaatgtggtgattgatcctagt

SEQ ID NO: 3404072 - DNA, 25 bp, Homo sapien
ggaaatgacttataagtcacattgg

SEQ ID NO: 3404073 - DNA, 25 bp, Homo sapien
aagcttccatgaggccacccagccc

SEQ ID NO: 3404074 - DNA, 25 bp, Homo sapien
gacttataagtcacattggtggctg

SEQ ID NO: 3404075 - DNA, 25 bp, Homo sapien
aagtcacattggtggctgaggctgc

SEQ ID NO: 3404076 - DNA, 25 bp, Homo sapien
ccacaacctcccaacccctgacctg

SEQ ID NO: 3404077 - DNA, 25 bp, Homo sapien
tttctcttctgataggcagggactc

SEQ ID NO: 3404078 - DNA, 25 bp, Homo sapien
gcacctcggaccctgtgatttacca

SEQ ID NO: 3404079 - DNA, 25 bp, Homo sapien
gtgagtgagcgtcacactgtgcctg

SEQ ID NO: 3404080 - DNA, 25 bp, Homo sapien
tgaagccctccatcatattgctggt

SEQ ID NO: 3404081 - DNA, 25 bp, Homo sapien
ctcttctgtaatgtggaggtgatca

SEQ ID NO: 3404082 - DNA, 25 bp, Homo sapien
taatgtggaggtgatcatagtggca

SEQ ID NO: 3404083 - DNA, 25 bp, Homo sapien
ttttctcttctgtaatgtggaggtg

SEQ ID NO: 3404084 - DNA, 25 bp, Homo sapien
tctgtaatgtggaggtgatcatagt

SEQ ID NO: 3404085 - DNA, 25 bp, Homo sapien
gattaagaatactgggcaggatcca

SEQ ID NO: 3404086 - DNA, 25 bp, Homo sapien
tgtgataaggcaaccgcttcctgtg

SEQ ID NO: 3404087 - DNA, 25 bp, Homo sapien
tcagcgccttctccagattaagaat

SEQ ID NO: 3404088 - DNA, 25 bp, Homo sapien
gatccaggctctgtgataaggcaac

SEQ ID NO: 3404089 - DNA, 25 bp, Homo sapien
taattagaacagctgcctccatggg

SEQ ID NO: 3404090 - DNA, 25 bp, Homo sapien
acagctgcctccatgggctacactg

SEQ ID NO: 3404091 - DNA, 25 bp, Homo sapien
ttaattagaacagctgcctccatgg

SEQ ID NO: 3404092 - DNA, 25 bp, Homo sapien
tagaacagctgcctccatgggctac

SEQ ID NO: 3404093 - DNA, 25 bp, Homo sapien
ttgacatgacctggggtaaactgag

SEQ ID NO: 3404094 - DNA, 25 bp, Homo sapien
gaggaatggttgaggaggaacatgc

SEQ ID NO: 3404095 - DNA, 25 bp, Homo sapien
gagaacacagccatggagtgggtgg

SEQ ID NO: 3404096 - DNA, 25 bp, Homo sapien
aatggttgaggaggaacatgcgcac

SEQ ID NO: 3404097 - DNA, 25 bp, Homo sapien
cagcagggtccgggggaggagagcc

SEQ ID NO: 3404098 - DNA, 25 bp, Homo sapien
gccccacagagacaagaattaggag

SEQ ID NO: 3404099 - DNA, 25 bp, Homo sapien
tcatgcccctaacgcactcagaaag

SEQ ID NO: 3404100 - DNA, 25 bp, Homo sapien
gatcatccttcatgcccctaacgca

SEQ ID NO: 3404101 - DNA, 25 bp, Homo sapien
gggcccctggagatacattttgaac

SEQ ID NO: 3404102 - DNA, 25 bp, Homo sapien
agggagattcactgctgcccttggc

SEQ ID NO: 3404103 - DNA, 25 bp, Homo sapien
accttagagactggttccctggagc

SEQ ID NO: 3404104 - DNA, 25 bp, Homo sapien
cctctctggcaacgccactgtccac

SEQ ID NO: 3404105 - DNA, 25 bp, Homo sapien
cccagaccttagagactggttccct

SEQ ID NO: 3404106 - DNA, 25 bp, Homo sapien
aaagaccctgggctctacacacaca

SEQ ID NO: 3404107 - DNA, 25 bp, Homo sapien
tggccaggtactctctggataccag

SEQ ID NO: 3404108 - DNA, 25 bp, Homo sapien
gaagctccaggttcttttggccagg

SEQ ID NO: 3404109 - DNA, 25 bp, Homo sapien
gcctgagttcttaataccaaagacc

SEQ ID NO: 3404110 - DNA, 25 bp, Homo sapien
aggcacagaatccattcatcagtct

SEQ ID NO: 3404111 - DNA, 25 bp, Homo sapien
gtgtttgctcccgtccccattttca

SEQ ID NO: 3404112 - DNA, 25 bp, Homo sapien
acagaatccattcatcagtctccat

SEQ ID NO: 3404113 - DNA, 25 bp, Homo sapien
tgtaggtgtgtttgctcccgtcccc

SEQ ID NO: 3404114 - DNA, 25 bp, Homo sapien
gggctgccgtattccactgtccatt

SEQ ID NO: 3404115 - DNA, 25 bp, Homo sapien
ccaggggctgccgtattccactgtc

SEQ ID NO: 3404116 - DNA, 25 bp, Homo sapien
gctgccgtattccactgtccatttc

SEQ ID NO: 3404117 - DNA, 25 bp, Homo sapien
aggggctgccgtattccactgtcca

SEQ ID NO: 3404118 - DNA, 25 bp, Homo sapien
agaccactggcctggtccaaaacct

SEQ ID NO: 3404119 - DNA, 25 bp, Homo sapien
tatagagttgtcctgctacctcctg

SEQ ID NO: 3404120 - DNA, 25 bp, Homo sapien
tccttgcagtagacaacttgttcca

SEQ ID NO: 3404121 - DNA, 25 bp, Homo sapien
gcttctactccttggatccttgcag

SEQ ID NO: 3404122 - DNA, 25 bp, Homo sapien
tgtgagtgccacctaaaattgtctg

SEQ ID NO: 3404123 - DNA, 25 bp, Homo sapien
aagcattccagttcatgtgagtgcc

SEQ ID NO: 3404124 - DNA, 25 bp, Homo sapien
actttgtcttaagcagcactgttca

SEQ ID NO: 3404125 - DNA, 25 bp, Homo sapien
cactgttcaggaaaccatgggtttt

SEQ ID NO: 3404126 - DNA, 25 bp, Homo sapien
ggacacaggatcgggcccctgctga

SEQ ID NO: 3404127 - DNA, 25 bp, Homo sapien
ctgttcatctgccctgatcagctgg

SEQ ID NO: 3404128 - DNA, 25 bp, Homo sapien
tgttcatctgccctgatcagctgga

SEQ ID NO: 3404129 - DNA, 25 bp, Homo sapien
caaggacacaggatcgggcccctgc

SEQ ID NO: 3404130 - DNA, 25 bp, Homo sapien
cagacaaatgcaggacgctgggcca

SEQ ID NO: 3404131 - DNA, 25 bp, Homo sapien
tcagacaaatgcaggacgctgggcc

SEQ ID NO: 3404132 - DNA, 25 bp, Homo sapien
agacaaatgcaggacgctgggccac

SEQ ID NO: 3404133 - DNA, 25 bp, Homo sapien
taagccctgactagaccttgacagc

SEQ ID NO: 3404134 - DNA, 25 bp, Homo sapien
cccatgagaatgtgtggcgcaggca

SEQ ID NO: 3404135 - DNA, 25 bp, Homo sapien
tgataattacttccactgccgtgcc

SEQ ID NO: 3404136 - DNA, 25 bp, Homo sapien
tctgtgtccttagtcccagggagct

SEQ ID NO: 3404137 - DNA, 25 bp, Homo sapien
cacctaacagcaagaggcattcagg

SEQ ID NO: 3404138 - DNA, 25 bp, Homo sapien
gcttctgagaagtggacagtgcacc

SEQ ID NO: 3404139 - DNA, 25 bp, Homo sapien
gtctagctctcaagtgccacgtggc

SEQ ID NO: 3404140 - DNA, 25 bp, Homo sapien
tatggatgaggatcccaaggcttag

SEQ ID NO: 3404141 - DNA, 25 bp, Homo sapien
gagttaaactcgatgatctctcagg

SEQ ID NO: 3404142 - DNA, 25 bp, Homo sapien
cacttgttaatcagacactggcagc

SEQ ID NO: 3404143 - DNA, 25 bp, Homo sapien
tttagccccgtgagaaacagtccaa

SEQ ID NO: 3404144 - DNA, 25 bp, Homo sapien
gagaggccagaaccttaatatgcac

SEQ ID NO: 3404145 - DNA, 25 bp, Homo sapien
aagttctctaatgtccctatccctg

SEQ ID NO: 3404146 - DNA, 25 bp, Homo sapien
cagccaggcctctcgaaggaattgg

SEQ ID NO: 3404147 - DNA, 25 bp, Homo sapien
catttaaattgggaactatttactg

SEQ ID NO: 3404148 - DNA, 25 bp, Homo sapien
cttacccacaaccattcttgaaagt

SEQ ID NO: 3404149 - DNA, 25 bp, Homo sapien
taagccactgagattctgggtttac

SEQ ID NO: 3404150 - DNA, 25 bp, Homo sapien
ccaaaatactgtgtggacagccacc

SEQ ID NO: 3404151 - DNA, 25 bp, Homo sapien
cactttcactggattgtcgctgagt

SEQ ID NO: 3404152 - DNA, 25 bp, Homo sapien
ctgggtttacctcttgcagcatctg

SEQ ID NO: 3404153 - DNA, 25 bp, Homo sapien
tgtaattccagaagggtggctgtcc

SEQ ID NO: 3404154 - DNA, 25 bp, Homo sapien
gaaagtctaagaaacctgcccaatg

SEQ ID NO: 3404155 - DNA, 25 bp, Homo sapien
gtgggagaatcaactcagctccacc

SEQ ID NO: 3404156 - DNA, 25 bp, Homo sapien
gccagaagtgtcttgctgatcctca

SEQ ID NO: 3404157 - DNA, 25 bp, Homo sapien
acaaaaacatgatgatatcagttct

SEQ ID NO: 3404158 - DNA, 25 bp, Homo sapien
tactcgactcaaatgagcttctctg

SEQ ID NO: 3404159 - DNA, 25 bp, Homo sapien
agaggggggcctctttcatattctc

SEQ ID NO: 3404160 - DNA, 25 bp, Homo sapien
cattttgccttaaacctaagccagg

SEQ ID NO: 3404161 - DNA, 25 bp, Homo sapien
tttttagccgattcccagcgactgg

SEQ ID NO: 3404162 - DNA, 25 bp, Homo sapien
caatccatccttccctagcggaggg

SEQ ID NO: 3404163 - DNA, 25 bp, Homo sapien
tacagcacgggactctagtacctct

SEQ ID NO: 3404164 - DNA, 25 bp, Homo sapien
ccaaagaggccaactgattagctaa

SEQ ID NO: 3404165 - DNA, 25 bp, Homo sapien
cagaggtattcggttagggcagaat

SEQ ID NO: 3404166 - DNA, 25 bp, Homo sapien
actgccccagaggtattcggttagg

SEQ ID NO: 3404167 - DNA, 25 bp, Homo sapien
cagctttgtttggaggtcacagggt

SEQ ID NO: 3404168 - DNA, 25 bp, Homo sapien
gccccagaggtattcggttagggca

SEQ ID NO: 3404169 - DNA, 25 bp, Homo sapien
aaaggccctgagcaccccttcatcc

SEQ ID NO: 3404170 - DNA, 25 bp, Homo sapien
cctgcaaaggccctgagcacccctt

SEQ ID NO: 3404171 - DNA, 25 bp, Homo sapien
taccagccctgcaaaggccctgagc

SEQ ID NO: 3404172 - DNA, 25 bp, Homo sapien
gcaaaggccctgagcaccccttcat

SEQ ID NO: 3404173 - DNA, 25 bp, Homo sapien
gcttatccataggaagtaactcctc

SEQ ID NO: 3404174 - DNA, 25 bp, Homo sapien
ggactgaacgcctcgaagagccaaa

SEQ ID NO: 3404175 - DNA, 25 bp, Homo sapien
tgccccatctttggtgcgcaaagga

SEQ ID NO: 3404176 - DNA, 25 bp, Homo sapien
tctttggtgcgcaaaggactgaacg

SEQ ID NO: 3404177 - DNA, 25 bp, Homo sapien
tgcgcaaaggactgaacgcctcgaa

SEQ ID NO: 3404178 - DNA, 25 bp, Homo sapien
tgctgcttgccaagcctgaacagct

SEQ ID NO: 3404179 - DNA, 25 bp, Homo sapien
cctgctgcttgccaagcctgaacag

SEQ ID NO: 3404180 - DNA, 25 bp, Homo sapien
ctgttaatttggtttctgagcccct

SEQ ID NO: 3404181 - DNA, 25 bp, Homo sapien
cccctgctgcttgccaagcctgaac

SEQ ID NO: 3404182 - DNA, 25 bp, Homo sapien
taacaataggaataaatcagccatg

SEQ ID NO: 3404183 - DNA, 25 bp, Homo sapien
tcactcgatatgtaggaataacaat

SEQ ID NO: 3404184 - DNA, 25 bp, Homo sapien
cccctggtgaaattccaggacttgg

SEQ ID NO: 3404185 - DNA, 25 bp, Homo sapien
gagcaggagcggcttcagctgtgtt

SEQ ID NO: 3404186 - DNA, 25 bp, Homo sapien
caaaagaagggccaatgttagctat

SEQ ID NO: 3404187 - DNA, 25 bp, Homo sapien
tactcgaccaatgggtggtgaaatc

SEQ ID NO: 3404188 - DNA, 25 bp, Homo sapien
cttggtgcctagagctgaacatggc

SEQ ID NO: 3404189 - DNA, 25 bp, Homo sapien
tgaacatggcatacagtactcgacc

SEQ ID NO: 3404190 - DNA, 25 bp, Homo sapien
gaaataaagacaggctcctgcaggc

SEQ ID NO: 3404191 - DNA, 25 bp, Homo sapien
tcagtttccaagtgaagccctggtc

SEQ ID NO: 3404192 - DNA, 25 bp, Homo sapien
tcctcttggaaatgcatgtccactc

SEQ ID NO: 3404193 - DNA, 25 bp, Homo sapien
ggtgctgcttctgcactccggtcag

SEQ ID NO: 3404194 - DNA, 25 bp, Homo sapien
ttctgtttgaaaggctctcctggcc

SEQ ID NO: 3404195 - DNA, 25 bp, Homo sapien
cccgagctgcggtctcttctttctg

SEQ ID NO: 3404196 - DNA, 25 bp, Homo sapien
ctgcccgagctgcggtctcttcttt

SEQ ID NO: 3404197 - DNA, 25 bp, Homo sapien
tctttctgtttgaaaggctctcctg

SEQ ID NO: 3404198 - DNA, 25 bp, Homo sapien
tgaagcttgagggtggtccaggaga

SEQ ID NO: 3404199 - DNA, 25 bp, Homo sapien
ctgaagcttgagggtggtccaggag

SEQ ID NO: 3404200 - DNA, 25 bp, Homo sapien
gatggtagtgttagaagctcagctc

SEQ ID NO: 3404201 - DNA, 25 bp, Homo sapien
gagagccagcgttgagatgtctgca

SEQ ID NO: 3404202 - DNA, 25 bp, Homo sapien
gatgtctgcaaaaggattatgctcg

SEQ ID NO: 3404203 - DNA, 25 bp, Homo sapien
aaaaggattatgctcgcgtctccag

SEQ ID NO: 3404204 - DNA, 25 bp, Homo sapien
cctggtgggctagcctgcacctcag

SEQ ID NO: 3404205 - DNA, 25 bp, Homo sapien
ccctccgagggttatcttcttggct

SEQ ID NO: 3404206 - DNA, 25 bp, Homo sapien
ccagcaacctggtgggctagcctgc

SEQ ID NO: 3404207 - DNA, 25 bp, Homo sapien
cttccccagttgagcttgaggggca

SEQ ID NO: 3404208 - DNA, 25 bp, Homo sapien
ctgagctggctgcatggtgagtcag

SEQ ID NO: 3404209 - DNA, 25 bp, Homo sapien
ttggagcccacaggcgagacacaga

SEQ ID NO: 3404210 - DNA, 25 bp, Homo sapien
gctggctgcatggtgagtcagagct

SEQ ID NO: 3404211 - DNA, 25 bp, Homo sapien
cgctgagctggctgcatggtgagtc

SEQ ID NO: 3404212 - DNA, 25 bp, Homo sapien
ctctggctgatgccccacatggcag

SEQ ID NO: 3404213 - DNA, 25 bp, Homo sapien
gctgatgccccacatggcaggctct

SEQ ID NO: 3404214 - DNA, 25 bp, Homo sapien
tggctgatgccccacatggcaggct

SEQ ID NO: 3404215 - DNA, 25 bp, Homo sapien
tgatgccccacatggcaggctctgc

SEQ ID NO: 3404216 - DNA, 25 bp, Homo sapien
gagtgcagactgtcagaaggtgagc

SEQ ID NO: 3404217 - DNA, 25 bp, Homo sapien
gggagtgcagactgtcagaaggtga

SEQ ID NO: 3404218 - DNA, 25 bp, Homo sapien
tgggagtgcagactgtcagaaggtg

SEQ ID NO: 3404219 - DNA, 25 bp, Homo sapien
aggtgagcaggaacaatcgattgtg

SEQ ID NO: 3404220 - DNA, 25 bp, Homo sapien
ggcctgtgcccgagtgtggcagcag

SEQ ID NO: 3404221 - DNA, 25 bp, Homo sapien
ctgcaagtccatttagcaccgatga

SEQ ID NO: 3404222 - DNA, 25 bp, Homo sapien
tgtgcccgagtgtggcagcagaggg

SEQ ID NO: 3404223 - DNA, 25 bp, Homo sapien
ttagcaccgatgatgtgctgggccc

SEQ ID NO: 3404224 - DNA, 25 bp, Homo sapien
ttagagaagtaaaggcagacggcac

SEQ ID NO: 3404225 - DNA, 25 bp, Homo sapien
agctcttccaagaggtgatcaggct

SEQ ID NO: 3404226 - DNA, 25 bp, Homo sapien
gtgatcaggctttaatggagtgatc

SEQ ID NO: 3404227 - DNA, 25 bp, Homo sapien
tgttcccggaacagctcttccaaga

SEQ ID NO: 3404228 - DNA, 25 bp, Homo sapien
tcaggtgccctgttcccggaacagc

SEQ ID NO: 3404229 - DNA, 25 bp, Homo sapien
ctgggtctaggaagacagcttaggc

SEQ ID NO: 3404230 - DNA, 25 bp, Homo sapien
agacagcttaggctgaagcccatga

SEQ ID NO: 3404231 - DNA, 25 bp, Homo sapien
aagatggtggccaagtctttgggtc

SEQ ID NO: 3404232 - DNA, 25 bp, Homo sapien
tctctcttctttccgaagatggtgg

SEQ ID NO: 3404233 - DNA, 25 bp, Homo sapien
ctccacctgagctgttatactggtg

SEQ ID NO: 3404234 - DNA, 25 bp, Homo sapien
tatactggtgctttctcgttatttc

SEQ ID NO: 3404235 - DNA, 25 bp, Homo sapien
gtcactgccagtttcagggaccacc

SEQ ID NO: 3404236 - DNA, 25 bp, Homo sapien
tcactgccagtttcagggaccacct

SEQ ID NO: 3404237 - DNA, 25 bp, Homo sapien
acaggtcactgaggtatgggataag

SEQ ID NO: 3404238 - DNA, 25 bp, Homo sapien
cccggggcacaggtcactgaggtat

SEQ ID NO: 3404239 - DNA, 25 bp, Homo sapien
ctttgttcatctggggaatgagcca

SEQ ID NO: 3404240 - DNA, 25 bp, Homo sapien
gagccagggtgatcttctcccagtc

SEQ ID NO: 3404241 - DNA, 25 bp, Homo sapien
gatggccacttttgtcagctgacag

SEQ ID NO: 3404242 - DNA, 25 bp, Homo sapien
gggacccctcgactgtttggcagcg

SEQ ID NO: 3404243 - DNA, 25 bp, Homo sapien
gaaaccacagtgaagccattatggg

SEQ ID NO: 3404244 - DNA, 25 bp, Homo sapien
cctgcagacgtcgtaggaaaccaca

SEQ ID NO: 3404245 - DNA, 25 bp, Homo sapien
aggccccagatgcttggacacccgg

SEQ ID NO: 3404246 - DNA, 25 bp, Homo sapien
aacccatcctattttcgtagccaag

SEQ ID NO: 3404247 - DNA, 25 bp, Homo sapien
ctgtgggcgaagtggaacaacccat

SEQ ID NO: 3404248 - DNA, 25 bp, Homo sapien
gtggtcaccataacctggctgtttc

SEQ ID NO: 3404249 - DNA, 25 bp, Homo sapien
gatctcattatctctacagcgtcca

SEQ ID NO: 3404250 - DNA, 25 bp, Homo sapien
ctggatctcattatctctacagcgt

SEQ ID NO: 3404251 - DNA, 25 bp, Homo sapien
ctcattatctctacagcgtccagag

SEQ ID NO: 3404252 - DNA, 25 bp, Homo sapien
tctcattatctctacagcgtccaga

SEQ ID NO: 3404253 - DNA, 25 bp, Homo sapien
gtacagtcgggcacactcatgctgc

SEQ ID NO: 3404254 - DNA, 25 bp, Homo sapien
tcatcctgtaaaagcactagatttc

SEQ ID NO: 3404255 - DNA, 25 bp, Homo sapien
cttggcaggggaggtcgcaggtaca

SEQ ID NO: 3404256 - DNA, 25 bp, Homo sapien
gatttcaggggctgttgttcctgcc

SEQ ID NO: 3404257 - DNA, 25 bp, Homo sapien
taggtgccactagctccatttctgg

SEQ ID NO: 3404258 - DNA, 25 bp, Homo sapien
ttttgctatctaccgagggccactg

SEQ ID NO: 3404259 - DNA, 25 bp, Homo sapien
tctgggaggaaaggattcaggtatt

SEQ ID NO: 3404260 - DNA, 25 bp, Homo sapien
ggtttcacggttcccagtgccaatg

SEQ ID NO: 3404261 - DNA, 25 bp, Homo sapien
caggcctcagcagtcgattccagag

SEQ ID NO: 3404262 - DNA, 25 bp, Homo sapien
ggccaatgcctctgtgaatatcaag

SEQ ID NO: 3404263 - DNA, 25 bp, Homo sapien
tcctgcgtgaatgaactaactatag

SEQ ID NO: 3404264 - DNA, 25 bp, Homo sapien
cctccccagttggttaggacagcaa

SEQ ID NO: 3404265 - DNA, 25 bp, Homo sapien
ctcacttgatcctccaaaaagctct

SEQ ID NO: 3404266 - DNA, 25 bp, Homo sapien
cttcatggggctagaaaggtcccag

SEQ ID NO: 3404267 - DNA, 25 bp, Homo sapien
tcctccaaaaagctctacaaagtag

SEQ ID NO: 3404268 - DNA, 25 bp, Homo sapien
gctgggatttgtagccaggttttgc

SEQ ID NO: 3404269 - DNA, 25 bp, Homo sapien
gcctgatattaacgcaaggcaatgt

SEQ ID NO: 3404270 - DNA, 25 bp, Homo sapien
taaggcctgatattaacgcaaggca

SEQ ID NO: 3404271 - DNA, 25 bp, Homo sapien
atttactaaggcctgatattaacgc

SEQ ID NO: 3404272 - DNA, 25 bp, Homo sapien
tactaaggcctgatattaacgcaag

SEQ ID NO: 3404273 - DNA, 25 bp, Homo sapien
ggacagactctcccgtcagcgaggc

SEQ ID NO: 3404274 - DNA, 25 bp, Homo sapien
gacagactctcccgtcagcgaggct

SEQ ID NO: 3404275 - DNA, 25 bp, Homo sapien
aggacagactctcccgtcagcgagg

SEQ ID NO: 3404276 - DNA, 25 bp, Homo sapien
ccttctctcctcaggtcttcctgag

SEQ ID NO: 3404277 - DNA, 25 bp, Homo sapien
ttctctcctcaggtcttcctgaggc

SEQ ID NO: 3404278 - DNA, 25 bp, Homo sapien
gcctagagctgcctgctttggtgcc

SEQ ID NO: 3404279 - DNA, 25 bp, Homo sapien
tcctgaggcctgaaagcctagagct

SEQ ID NO: 3404280 - DNA, 25 bp, Homo sapien
catcagatacttcatgcagctcaga

SEQ ID NO: 3404281 - DNA, 25 bp, Homo sapien
cccagatgccgatggccagcaggca

SEQ ID NO: 3404282 - DNA, 25 bp, Homo sapien
cagatgccgatggccagcaggcagg

SEQ ID NO: 3404283 - DNA, 25 bp, Homo sapien
ccagatgccgatggccagcaggcag

SEQ ID NO: 3404284 - DNA, 25 bp, Homo sapien
agccacgatctcccggaagccggtg

SEQ ID NO: 3404285 - DNA, 25 bp, Homo sapien
gagcagaggattggcagccacgatc

SEQ ID NO: 3404286 - DNA, 25 bp, Homo sapien
agacacttgttctcacggacggccc

SEQ ID NO: 3404287 - DNA, 25 bp, Homo sapien
ccacgatctcccggaagccggtggg

SEQ ID NO: 3404288 - DNA, 25 bp, Homo sapien
ctgcaggcacgggcccactgcaaaa

SEQ ID NO: 3404289 - DNA, 25 bp, Homo sapien
tgcaggcacgggcccactgcaaaag

SEQ ID NO: 3404290 - DNA, 25 bp, Homo sapien
ccactgcaggcacgggcccactgca

SEQ ID NO: 3404291 - DNA, 25 bp, Homo sapien
actgcaggcacgggcccactgcaaa

SEQ ID NO: 3404292 - DNA, 25 bp, Homo sapien
agatgatcaggatgaacaggaagaa

SEQ ID NO: 3404293 - DNA, 25 bp, Homo sapien
attttccctgaagatgaaggccagg

SEQ ID NO: 3404294 - DNA, 25 bp, Homo sapien
gccaggatggctgctgagagctctg

SEQ ID NO: 3404295 - DNA, 25 bp, Homo sapien
gctctgccaggaagatgatcaggat

SEQ ID NO: 3404296 - DNA, 25 bp, Homo sapien
aggaaagcttggggcctgatacgta

SEQ ID NO: 3404297 - DNA, 25 bp, Homo sapien
caggaaagcttggggcctgatacgt

SEQ ID NO: 3404298 - DNA, 25 bp, Homo sapien
ggaaagcttggggcctgatacgtac

SEQ ID NO: 3404299 - DNA, 25 bp, Homo sapien
gtgatcatgaccgagttccaggtgg

SEQ ID NO: 3404300 - DNA, 25 bp, Homo sapien
gatcatgaccgagttccaggtggca

SEQ ID NO: 3404301 - DNA, 25 bp, Homo sapien
agacgtctgtgtcgttattgccctg

SEQ ID NO: 3404302 - DNA, 25 bp, Homo sapien
tgccctggtagtgcttggtgagctc

SEQ ID NO: 3404303 - DNA, 25 bp, Homo sapien
tgcaaaggagtggcatcagaagact

SEQ ID NO: 3404304 - DNA, 25 bp, Homo sapien
catacagcctctgcaaaggagtggc

SEQ ID NO: 3404305 - DNA, 25 bp, Homo sapien
acagagaaggacatacagcctctgc

SEQ ID NO: 3404306 - DNA, 25 bp, Homo sapien
aagactgggtgtgggcgggctccac

SEQ ID NO: 3404307 - DNA, 25 bp, Homo sapien
ctgcttgtttaggaataggctcctt

SEQ ID NO: 3404308 - DNA, 25 bp, Homo sapien
gtcttcaggcccgttgaccccgcag

SEQ ID NO: 3404309 - DNA, 25 bp, Homo sapien
ggtcaggagtcgaaacacagatgca

SEQ ID NO: 3404310 - DNA, 25 bp, Homo sapien
ggcacctcttcactatccagggtca

SEQ ID NO: 3404311 - DNA, 25 bp, Homo sapien
ctttccttcctttataggagcctgc

SEQ ID NO: 3404312 - DNA, 25 bp, Homo sapien
tcgatggccagtaccccgatggcaa

SEQ ID NO: 3404313 - DNA, 25 bp, Homo sapien
tgttgaggatcaccgtgtaacagcc

SEQ ID NO: 3404314 - DNA, 25 bp, Homo sapien
aagggctccggccaagtagacgtag

SEQ ID NO: 3404315 - DNA, 25 bp, Homo sapien
ccaagtagacgtaggtctcgaaggt

SEQ ID NO: 3404316 - DNA, 25 bp, Homo sapien
tcagataaaggaggctaaggccacc

SEQ ID NO: 3404317 - DNA, 25 bp, Homo sapien
tgctgatgcctctgcaagcgtgaaa

SEQ ID NO: 3404318 - DNA, 25 bp, Homo sapien
cctagtggtgattgcaaacggtctg

SEQ ID NO: 3404319 - DNA, 25 bp, Homo sapien
aatctctctggaccatggagctggg

SEQ ID NO: 3404320 - DNA, 25 bp, Homo sapien
ggcacatggcaaagatcatggcgaa

SEQ ID NO: 3404321 - DNA, 25 bp, Homo sapien
gcacatggcaaagatcatggcgaaa

SEQ ID NO: 3404322 - DNA, 25 bp, Homo sapien
gaggcacatggcaaagatcatggcg

SEQ ID NO: 3404323 - DNA, 25 bp, Homo sapien
agaggcacatggcaaagatcatggc

SEQ ID NO: 3404324 - DNA, 25 bp, Homo sapien
gagtccaggcgaggatacatcagtc

SEQ ID NO: 3404325 - DNA, 25 bp, Homo sapien
tgggttccgagtcctcaaagacatg

SEQ ID NO: 3404326 - DNA, 25 bp, Homo sapien
tcagggtaggagcatcttgcaatcc

SEQ ID NO: 3404327 - DNA, 25 bp, Homo sapien
gacatggcagctgaatctccgtgca

SEQ ID NO: 3404328 - DNA, 25 bp, Homo sapien
ggctccgagtgtccctggtgactgg

SEQ ID NO: 3404329 - DNA, 25 bp, Homo sapien
atgccggtggcttgtgagacagaat

SEQ ID NO: 3404330 - DNA, 25 bp, Homo sapien
gctgatacaggatgccggtggcttg

SEQ ID NO: 3404331 - DNA, 25 bp, Homo sapien
tccgagtgtccctggtgactggaaa

SEQ ID NO: 3404332 - DNA, 25 bp, Homo sapien
cctttccagcctaagagggtggcca

SEQ ID NO: 3404333 - DNA, 25 bp, Homo sapien
tgcaaaaccatcagtgtgggcgtcc

SEQ ID NO: 3404334 - DNA, 25 bp, Homo sapien
aaagtggctttcgatacaggcaggg

SEQ ID NO: 3404335 - DNA, 25 bp, Homo sapien
tccgggccccttaagcatggataga

SEQ ID NO: 3404336 - DNA, 25 bp, Homo sapien
tggcgtggccttaccccatgaggct

SEQ ID NO: 3404337 - DNA, 25 bp, Homo sapien
taagtccagcgaggaaagctcggtg

SEQ ID NO: 3404338 - DNA, 25 bp, Homo sapien
aatagtgatggttggtttgtcctcc

SEQ ID NO: 3404339 - DNA, 25 bp, Homo sapien
agacagacgtacagcttggagggca

SEQ ID NO: 3404340 - DNA, 25 bp, Homo sapien
ctcaggccgaagcctcaatccccca

SEQ ID NO: 3404341 - DNA, 25 bp, Homo sapien
tcaggccgaagcctcaatcccccat

SEQ ID NO: 3404342 - DNA, 25 bp, Homo sapien
gatgccccgagactctgcttggtaa

SEQ ID NO: 3404343 - DNA, 25 bp, Homo sapien
ggaacagaaggaaagccatagcgct

SEQ ID NO: 3404344 - DNA, 25 bp, Homo sapien
tgtctataggtacagcccgctctgg

SEQ ID NO: 3404345 - DNA, 25 bp, Homo sapien
accaccatggttacagcggatgccc

SEQ ID NO: 3404346 - DNA, 25 bp, Homo sapien
gcaccaggtgaagggctgatgactc

SEQ ID NO: 3404347 - DNA, 25 bp, Homo sapien
tgatgactctccagcaagtgttccc

SEQ ID NO: 3404348 - DNA, 25 bp, Homo sapien
caggtgaagggctgatgactctcca

SEQ ID NO: 3404349 - DNA, 25 bp, Homo sapien
tgaagggctgatgactctccagcaa

SEQ ID NO: 3404350 - DNA, 25 bp, Homo sapien
tctagggcagttgtgtgctgtcttc

SEQ ID NO: 3404351 - DNA, 25 bp, Homo sapien
atgctcggatgccacgctgcctgta

SEQ ID NO: 3404352 - DNA, 25 bp, Homo sapien
cagcaatggctagacagcctactcc

SEQ ID NO: 3404353 - DNA, 25 bp, Homo sapien
cagacccattgtcctatgagcagat

SEQ ID NO: 3404354 - DNA, 25 bp, Homo sapien
ctgtagtcttagcaactagggaggc

SEQ ID NO: 3404355 - DNA, 25 bp, Homo sapien
gccgagattgtgcaattgcactcca

SEQ ID NO: 3404356 - DNA, 25 bp, Homo sapien
cgagattgtgcaattgcactccagc

SEQ ID NO: 3404357 - DNA, 25 bp, Homo sapien
gagccgagattgtgcaattgcactc

SEQ ID NO: 3404358 - DNA, 25 bp, Homo sapien
tagttatttcttaaagctcagtttc

SEQ ID NO: 3404359 - DNA, 25 bp, Homo sapien
gagatcccgtggaagtggcaaagac

SEQ ID NO: 3404360 - DNA, 25 bp, Homo sapien
cccagagatcccgtggaagtggcaa

SEQ ID NO: 3404361 - DNA, 25 bp, Homo sapien
ccagctcccagagatcccgtggaag

SEQ ID NO: 3404362 - DNA, 25 bp, Homo sapien
tgcatgcctgagattgcgctctgag

SEQ ID NO: 3404363 - DNA, 25 bp, Homo sapien
taacgtatgtggcacgtggccttcc

SEQ ID NO: 3404364 - DNA, 25 bp, Homo sapien
ttgcttcagaccgagcctcagatgg

SEQ ID NO: 3404365 - DNA, 25 bp, Homo sapien
aaagccttgcagtgtggtgcgacgc

SEQ ID NO: 3404366 - DNA, 25 bp, Homo sapien
atttacagaagtgcagcgtattaat

SEQ ID NO: 3404367 - DNA, 25 bp, Homo sapien
gaagtgcagcgtattaatatcccag

SEQ ID NO: 3404368 - DNA, 25 bp, Homo sapien
tgcagcgtattaatatcccagtcct

SEQ ID NO: 3404369 - DNA, 25 bp, Homo sapien
gcgtattaatatcccagtcctgctg

SEQ ID NO: 3404370 - DNA, 25 bp, Homo sapien
tggggtcctgacaattggttgctga

SEQ ID NO: 3404371 - DNA, 25 bp, Homo sapien
ctggggtcctgacaattggttgctg

SEQ ID NO: 3404372 - DNA, 25 bp, Homo sapien
ctgctccagggatgcgggcttgagg

SEQ ID NO: 3404373 - DNA, 25 bp, Homo sapien
tgctccagggatgcgggcttgaggg

SEQ ID NO: 3404374 - DNA, 25 bp, Homo sapien
tccagggatgcgggcttgagggtta

SEQ ID NO: 3404375 - DNA, 25 bp, Homo sapien
ccagggatgcgggcttgagggttac

SEQ ID NO: 3404376 - DNA, 25 bp, Homo sapien
gccagggaagagaacattaccattg

SEQ ID NO: 3404377 - DNA, 25 bp, Homo sapien
ttaccattggcagggcctccgtgga

SEQ ID NO: 3404378 - DNA, 25 bp, Homo sapien
ccgaagatagatctctctggctttc

SEQ ID NO: 3404379 - DNA, 25 bp, Homo sapien
tggctgagggccgaagatagatctc

SEQ ID NO: 3404380 - DNA, 25 bp, Homo sapien
atccagaaacttgtgcctacagtgt

SEQ ID NO: 3404381 - DNA, 25 bp, Homo sapien
gggtttgatctctttggatatccag

SEQ ID NO: 3404382 - DNA, 25 bp, Homo sapien
cagtggacagagagtgtgtctttca

SEQ ID NO: 3404383 - DNA, 25 bp, Homo sapien
gtctcagctatgtccgaggaagaat

SEQ ID NO: 3404384 - DNA, 25 bp, Homo sapien
gaatttgtgttcaccctcgtgccac

SEQ ID NO: 3404385 - DNA, 25 bp, Homo sapien
tgttcaggctgaagcgaaattgtat

SEQ ID NO: 3404386 - DNA, 25 bp, Homo sapien
ccagaatttattgctagcagattca

SEQ ID NO: 3404387 - DNA, 25 bp, Homo sapien
tctacaagaaggaataaagagcacc

SEQ ID NO: 3404388 - DNA, 25 bp, Homo sapien
gattcagataataagatgttcaggc

SEQ ID NO: 3404389 - DNA, 25 bp, Homo sapien
tccagcacgtagtggagatgccact

SEQ ID NO: 3404390 - DNA, 25 bp, Homo sapien
tgagggtgaatgaacttcaggcact

SEQ ID NO: 3404391 - DNA, 25 bp, Homo sapien
gagtccctgaagacgtagcctgagg

SEQ ID NO: 3404392 - DNA, 25 bp, Homo sapien
gttttagtagcagatcagagtccct

SEQ ID NO: 3404393 - DNA, 25 bp, Homo sapien
atggaagggagcaactggtaccagc

SEQ ID NO: 3404394 - DNA, 25 bp, Homo sapien
gcactaaacatggaagggagcaact

SEQ ID NO: 3404395 - DNA, 25 bp, Homo sapien
actaaacatggaagggagcaactgg

SEQ ID NO: 3404396 - DNA, 25 bp, Homo sapien
ggaagggagcaactggtaccagcca

SEQ ID NO: 3404397 - DNA, 25 bp, Homo sapien
agggtccgcgacaggaagagcttcc

SEQ ID NO: 3404398 - DNA, 25 bp, Homo sapien
tgaggaacacgtctcaggccagctc

SEQ ID NO: 3404399 - DNA, 25 bp, Homo sapien
tgctgtgcgtgtgcagagggtccgc

SEQ ID NO: 3404400 - DNA, 25 bp, Homo sapien
aggccagctcctttgtctagaacag

SEQ ID NO: 3404401 - DNA, 25 bp, Homo sapien
aaacacatcacaacttcacccaagg

SEQ ID NO: 3404402 - DNA, 25 bp, Homo sapien
atcacaacttcacccaaggacccag

SEQ ID NO: 3404403 - DNA, 25 bp, Homo sapien
gaaaacacatcacaacttcacccaa

SEQ ID NO: 3404404 - DNA, 25 bp, Homo sapien
ttcacccaaggacccagccttcttc

SEQ ID NO: 3404405 - DNA, 25 bp, Homo sapien
ggcatttccccgatgtgctttgtgg

SEQ ID NO: 3404406 - DNA, 25 bp, Homo sapien
ggagatgtagcttggaggctcaaat

SEQ ID NO: 3404407 - DNA, 25 bp, Homo sapien
gcaaggcggaccatatcaaatgagg

SEQ ID NO: 3404408 - DNA, 25 bp, Homo sapien
tagcttggaggctcaaatgctggca

SEQ ID NO: 3404409 - DNA, 25 bp, Homo sapien
atgtgttacagtagttgttgcccct

SEQ ID NO: 3404410 - DNA, 25 bp, Homo sapien
tgttacagtagttgttgccccttgg

SEQ ID NO: 3404411 - DNA, 25 bp, Homo sapien
gttacagtagttgttgccccttggc

SEQ ID NO: 3404412 - DNA, 25 bp, Homo sapien
gtgttacagtagttgttgccccttg

SEQ ID NO: 3404413 - DNA, 25 bp, Homo sapien
ttggtccaagacatgcaagcaaaag

SEQ ID NO: 3404414 - DNA, 25 bp, Homo sapien
aattttggtccaagacatgcaagca

SEQ ID NO: 3404415 - DNA, 25 bp, Homo sapien
ggtccaagacatgcaagcaaaagtc

SEQ ID NO: 3404416 - DNA, 25 bp, Homo sapien
ataattttggtccaagacatgcaag

SEQ ID NO: 3404417 - DNA, 25 bp, Homo sapien
taggagatgaaggttctttcgacat

SEQ ID NO: 3404418 - DNA, 25 bp, Homo sapien
tagacccaataggagatgaaggttc

SEQ ID NO: 3404419 - DNA, 25 bp, Homo sapien
cccaataggagatgaaggttctttc

SEQ ID NO: 3404420 - DNA, 25 bp, Homo sapien
taagggtagacccaataggagatga

SEQ ID NO: 3404421 - DNA, 25 bp, Homo sapien
gtccccttgaccgtggccatgggct

SEQ ID NO: 3404422 - DNA, 25 bp, Homo sapien
tctgtccccttgaccgtggccatgg

SEQ ID NO: 3404423 - DNA, 25 bp, Homo sapien
gagctctgtccccttgaccgtggcc

SEQ ID NO: 3404424 - DNA, 25 bp, Homo sapien
gaccgtggccatgggctcctgtcct

SEQ ID NO: 3404425 - DNA, 25 bp, Homo sapien
tcagagggcggtcgagggctgccca

SEQ ID NO: 3404426 - DNA, 25 bp, Homo sapien
gagggcggtcgagggctgcccacag

SEQ ID NO: 3404427 - DNA, 25 bp, Homo sapien
acagtgaacaatggcgggggtgcag

SEQ ID NO: 3404428 - DNA, 25 bp, Homo sapien
cacagtgaacaatggcgggggtgca

SEQ ID NO: 3404429 - DNA, 25 bp, Homo sapien
gagaggtgtgatgtttatgataaac

SEQ ID NO: 3404430 - DNA, 25 bp, Homo sapien
ggtagggaatcacctccaaactgga

SEQ ID NO: 3404431 - DNA, 25 bp, Homo sapien
tatgataaacggcaataacaggaca

SEQ ID NO: 3404432 - DNA, 25 bp, Homo sapien
tgcatcaatatcagtaacttccttt

SEQ ID NO: 3404433 - DNA, 25 bp, Homo sapien
ggacgtgctgctgtcacagctgaca

SEQ ID NO: 3404434 - DNA, 25 bp, Homo sapien
aggcagctgttaaggtcctgataca

SEQ ID NO: 3404435 - DNA, 25 bp, Homo sapien
gcacccatggacgtgctgctgtcac

SEQ ID NO: 3404436 - DNA, 25 bp, Homo sapien
ggcagctgttaaggtcctgatacag

SEQ ID NO: 3404437 - DNA, 25 bp, Homo sapien
tgggccctatagctgtgcaaggtgc

SEQ ID NO: 3404438 - DNA, 25 bp, Homo sapien
gctgggccctatagctgtgcaaggt

SEQ ID NO: 3404439 - DNA, 25 bp, Homo sapien
ggctgggccctatagctgtgcaagg

SEQ ID NO: 3404440 - DNA, 25 bp, Homo sapien
gtgcctgggaaggtgtcggacctgc

SEQ ID NO: 3404441 - DNA, 25 bp, Homo sapien
tatcgggatgggtagcactgcccac

SEQ ID NO: 3404442 - DNA, 25 bp, Homo sapien
tggacctatcgggatgggtagcact

SEQ ID NO: 3404443 - DNA, 25 bp, Homo sapien
tcctgtagatgtgcaaaggtgcctg

SEQ ID NO: 3404444 - DNA, 25 bp, Homo sapien
tgcctgggaaggtgttggacctatc

SEQ ID NO: 3404445 - DNA, 25 bp, Homo sapien
aatggcgcttgggagctgggttcag

SEQ ID NO: 3404446 - DNA, 25 bp, Homo sapien
ccggactccatcacaatcattgcag

SEQ ID NO: 3404447 - DNA, 25 bp, Homo sapien
ttcctcagaagggtccggactccat

SEQ ID NO: 3404448 - DNA, 25 bp, Homo sapien
tagggagtcagtgttaatggcgctt

SEQ ID NO: 3404449 - DNA, 25 bp, Homo sapien
gatccatgtgagtgcgtggtcaaaa

SEQ ID NO: 3404450 - DNA, 25 bp, Homo sapien
ggctctccgacgactgctgagcagt

SEQ ID NO: 3404451 - DNA, 25 bp, Homo sapien
tgtcgtcagctgtgatgggcctaca

SEQ ID NO: 3404452 - DNA, 25 bp, Homo sapien
caggttgtcacggacttggcggctc

SEQ ID NO: 3404453 - DNA, 25 bp, Homo sapien
caggaatccttggtaccatcccaac

SEQ ID NO: 3404454 - DNA, 25 bp, Homo sapien
caacagcaacgggaaagcccttagg

SEQ ID NO: 3404455 - DNA, 25 bp, Homo sapien
gacgccagggattcacagtttgtgc

SEQ ID NO: 3404456 - DNA, 25 bp, Homo sapien
ttgtgccagtgaacgagcccaagcc

SEQ ID NO: 3404457 - DNA, 25 bp, Homo sapien
taatcatcacagtcaatagtaatgc

SEQ ID NO: 3404458 - DNA, 25 bp, Homo sapien
tcccacctgcgctgagcttttaact

SEQ ID NO: 3404459 - DNA, 25 bp, Homo sapien
gctgagctgctgattatccgaggca

SEQ ID NO: 3404460 - DNA, 25 bp, Homo sapien
tgccaagctggattttagagaataa

SEQ ID NO: 3404461 - DNA, 25 bp, Homo sapien
tcaaaggcccaaattgccctgggct

SEQ ID NO: 3404462 - DNA, 25 bp, Homo sapien
gtatcccgtatagagcaggccttgg

SEQ ID NO: 3404463 - DNA, 25 bp, Homo sapien
tacaaccctcgagtatcccgtatag

SEQ ID NO: 3404464 - DNA, 25 bp, Homo sapien
ctcgagtatcccgtatagagcaggc

SEQ ID NO: 3404465 - DNA, 25 bp, Homo sapien
aaccctcgagtatcccgtatagagc

SEQ ID NO: 3404466 - DNA, 25 bp, Homo sapien
tgccgggagagatggtcctcaagac

SEQ ID NO: 3404467 - DNA, 25 bp, Homo sapien
tgtgaagccacacggtatgctgccg

SEQ ID NO: 3404468 - DNA, 25 bp, Homo sapien
cacagtccattgaggtggcttactc

SEQ ID NO: 3404469 - DNA, 25 bp, Homo sapien
gctgcaactgcatgctagctacttg

SEQ ID NO: 3404470 - DNA, 25 bp, Homo sapien
tgtgacccgaaatgggtgccccagc

SEQ ID NO: 3404471 - DNA, 25 bp, Homo sapien
gccatcgtatctgcggccatcataa

SEQ ID NO: 3404472 - DNA, 25 bp, Homo sapien
cctaccttgtgacccgaaatgggtg

SEQ ID NO: 3404473 - DNA, 25 bp, Homo sapien
ggtgccccagctgtagccatcgtat

SEQ ID NO: 3404474 - DNA, 25 bp, Homo sapien
gcatctcaggcaggcccggcactcc

SEQ ID NO: 3404475 - DNA, 25 bp, Homo sapien
tccacgatcatcagggatgcaattg

SEQ ID NO: 3404476 - DNA, 25 bp, Homo sapien
tcagggatgcaattggctctgccat

SEQ ID NO: 3404477 - DNA, 25 bp, Homo sapien
ccggcactccacgatcatcagggat

SEQ ID NO: 3404478 - DNA, 25 bp, Homo sapien
gatgagcaccagtgggtgggtatgg

SEQ ID NO: 3404479 - DNA, 25 bp, Homo sapien
gatgatgagcaccagtgggtgggta

SEQ ID NO: 3404480 - DNA, 25 bp, Homo sapien
tgatgagcaccagtgggtgggtatg

SEQ ID NO: 3404481 - DNA, 25 bp, Homo sapien
atgatgagcaccagtgggtgggtat

SEQ ID NO: 3404482 - DNA, 25 bp, Homo sapien
cagaggctcgcctggcgtttccagc

SEQ ID NO: 3404483 - DNA, 25 bp, Homo sapien
ctggcgtttccagcatccaccaggg

SEQ ID NO: 3404484 - DNA, 25 bp, Homo sapien
gctgcccctgtgcaatgggccaggc

SEQ ID NO: 3404485 - DNA, 25 bp, Homo sapien
caggcaccaccttctgtggccagag

SEQ ID NO: 3404486 - DNA, 25 bp, Homo sapien
cctggcaattgttgttgtggccacc

SEQ ID NO: 3404487 - DNA, 25 bp, Homo sapien
ctacgtcctggcaattgttgttgtg

SEQ ID NO: 3404488 - DNA, 25 bp, Homo sapien
cgtcctggcaattgttgttgtggcc

SEQ ID NO: 3404489 - DNA, 25 bp, Homo sapien
tcctggcaattgttgttgtggccac

SEQ ID NO: 3404490 - DNA, 25 bp, Homo sapien
tcttgtttgctaaggcaggttttct

SEQ ID NO: 3404491 - DNA, 25 bp, Homo sapien
cttgtttgctaaggcaggttttctc

SEQ ID NO: 3404492 - DNA, 25 bp, Homo sapien
gataatctcattacattctagaaat

SEQ ID NO: 3404493 - DNA, 25 bp, Homo sapien
ttattcctattttagtaggagagag

SEQ ID NO: 3404494 - DNA, 25 bp, Homo sapien
acttctaacagctttggcagttgca

SEQ ID NO: 3404495 - DNA, 25 bp, Homo sapien
ttccttgctaataagaagagctccg

SEQ ID NO: 3404496 - DNA, 25 bp, Homo sapien
cgtaactgatcagccttcccttctt

SEQ ID NO: 3404497 - DNA, 25 bp, Homo sapien
ttcttgcacgggttgccaggaagct

SEQ ID NO: 3404498 - DNA, 25 bp, Homo sapien
tgtcaaccttgctgctggcgatccg

SEQ ID NO: 3404499 - DNA, 25 bp, Homo sapien
cgttcatggtcagatgggcgttcat

SEQ ID NO: 3404500 - DNA, 25 bp, Homo sapien
ctcccaaggcggaaggagttccgtg

SEQ ID NO: 3404501 - DNA, 25 bp, Homo sapien
tggcgatccgcagatgggcgttcat

SEQ ID NO: 3404502 - DNA, 25 bp, Homo sapien
caatcaacccctttctcgtggcgtc

SEQ ID NO: 3404503 - DNA, 25 bp, Homo sapien
gacatgctttcctgagcgcctggaa

SEQ ID NO: 3404504 - DNA, 25 bp, Homo sapien
acactgcagggtggcgtaaccagga

SEQ ID NO: 3404505 - DNA, 25 bp, Homo sapien
gagtgcttgagtgcttgacatgctt

SEQ ID NO: 3404506 - DNA, 25 bp, Homo sapien
cggttttgtagtcacgaatcgcaca

SEQ ID NO: 3404507 - DNA, 25 bp, Homo sapien
tcccggtcgcgtggctgtccatttg

SEQ ID NO: 3404508 - DNA, 25 bp, Homo sapien
tttaaccctttgaatgctcagcagt

SEQ ID NO: 3404509 - DNA, 25 bp, Homo sapien
tacaaactgaagttgcgagacgcag

SEQ ID NO: 3404510 - DNA, 25 bp, Homo sapien
gagagaactttcgaactgggatact

SEQ ID NO: 3404511 - DNA, 25 bp, Homo sapien
gagcgttttataatccagcccgtgg

SEQ ID NO: 3404512 - DNA, 25 bp, Homo sapien
cagcccgtggagaaatcgagaaaaa

SEQ ID NO: 3404513 - DNA, 25 bp, Homo sapien
tccccggcgaggcaaagtttcagcg

SEQ ID NO: 3404514 - DNA, 25 bp, Homo sapien
gagcggccgcgctgcgggcgcgctg

SEQ ID NO: 3404515 - DNA, 25 bp, Homo sapien
agggcgtccgcgagaactaggccgg

SEQ ID NO: 3404516 - DNA, 25 bp, Homo sapien
gcggcgagccctctggcgtcggcgt

SEQ ID NO: 3404517 - DNA, 25 bp, Homo sapien
attggtcggcggccacgtccgtcag

SEQ ID NO: 3404518 - DNA, 25 bp, Homo sapien
cgtgtcaccgcgttctcattccgag

SEQ ID NO: 3404519 - DNA, 25 bp, Homo sapien
ttcgcgggcaatcgcgaaccgcgat

SEQ ID NO: 3404520 - DNA, 25 bp, Homo sapien
gagaggtttcccgaagagtctacac

SEQ ID NO: 3404521 - DNA, 25 bp, Homo sapien
gaaccgcgatggagaaggcttcgtc

SEQ ID NO: 3404522 - DNA, 25 bp, Homo sapien
actgacacttaaaacgcattccaga

SEQ ID NO: 3404523 - DNA, 25 bp, Homo sapien
tctgaccttcgctgtagagggccaa

SEQ ID NO: 3404524 - DNA, 25 bp, Homo sapien
tggattttatctgcgggtcccctcg

SEQ ID NO: 3404525 - DNA, 25 bp, Homo sapien
ggtcccctcgctactcagaagcaga

SEQ ID NO: 3404526 - DNA, 25 bp, Homo sapien
tggtgccagaagcaggactgaacct

SEQ ID NO: 3404527 - DNA, 25 bp, Homo sapien
tctgggaattattatgtaatacaaa

SEQ ID NO: 3404528 - DNA, 25 bp, Homo sapien
tatgtaatacaaataggcaacctca

SEQ ID NO: 3404529 - DNA, 25 bp, Homo sapien
atacaaataggcaacctcaaagact

SEQ ID NO: 3404530 - DNA, 25 bp, Homo sapien
tattatgtaatacaaataggcaacc

SEQ ID NO: 3404531 - DNA, 25 bp, Homo sapien
aggagtaccccattagcagccctgt

SEQ ID NO: 3404532 - DNA, 25 bp, Homo sapien
gacttactaactatgcgatctggag

SEQ ID NO: 3404533 - DNA, 25 bp, Homo sapien
gcagtccactggcaagaggcagctt

SEQ ID NO: 3404534 - DNA, 25 bp, Homo sapien
tctgggaaatccgaagggctggcaa

SEQ ID NO: 3404535 - DNA, 25 bp, Homo sapien
gaagagggcctttacaagcagtgaa

SEQ ID NO: 3404536 - DNA, 25 bp, Homo sapien
gatactacaatggaaggcacatgtc

SEQ ID NO: 3404537 - DNA, 25 bp, Homo sapien
tatatgctctgaagatgcttacctc

SEQ ID NO: 3404538 - DNA, 25 bp, Homo sapien
tgaacaagcaatctgcaaagaccaa

SEQ ID NO: 3404539 - DNA, 25 bp, Homo sapien
ctgcccagcaaaagtcttgggggaa

SEQ ID NO: 3404540 - DNA, 25 bp, Homo sapien
tgcccagcaaaagtcttgggggaag

SEQ ID NO: 3404541 - DNA, 25 bp, Homo sapien
gaaggtcatgcagaccacacccgat

SEQ ID NO: 3404542 - DNA, 25 bp, Homo sapien
caagtgtttcaagttggcttcacca

SEQ ID NO: 3404543 - DNA, 25 bp, Homo sapien
agtcctctaccgaacaatcgctggg

SEQ ID NO: 3404544 - DNA, 25 bp, Homo sapien
ggcttcaccatgcagtatcctcagt

SEQ ID NO: 3404545 - DNA, 25 bp, Homo sapien
ggagtctggttaccctccctgccat

SEQ ID NO: 3404546 - DNA, 25 bp, Homo sapien
ggaagaggagtgagcggcggagagg

SEQ ID NO: 3404547 - DNA, 25 bp, Homo sapien
gaagaggatcaaagaaacaggggaa

SEQ ID NO: 3404548 - DNA, 25 bp, Homo sapien
ggcaagtgggggtctcgcggagtct

SEQ ID NO: 3404549 - DNA, 25 bp, Homo sapien
aagcactccttcatgttctcggtca

SEQ ID NO: 3404550 - DNA, 25 bp, Homo sapien
tgggccaagcactccttcatgttct

SEQ ID NO: 3404551 - DNA, 25 bp, Homo sapien
tatcccccacggctgcattggtctg

SEQ ID NO: 3404552 - DNA, 25 bp, Homo sapien
gtctgggccaagcactccttcatgt

SEQ ID NO: 3404553 - DNA, 25 bp, Homo sapien
gggctggccatactcctggtctcgg

SEQ ID NO: 3404554 - DNA, 25 bp, Homo sapien
agggctggccatactcctggtctcg

SEQ ID NO: 3404555 - DNA, 25 bp, Homo sapien
cagggctggccatactcctggtctc

SEQ ID NO: 3404556 - DNA, 25 bp, Homo sapien
ggctggccatactcctggtctcgga

SEQ ID NO: 3404557 - DNA, 25 bp, Homo sapien
atgaggtcgcgcttccccttcagtt

SEQ ID NO: 3404558 - DNA, 25 bp, Homo sapien
cttttgggcacgatgaggtcgcgct

SEQ ID NO: 3404559 - DNA, 25 bp, Homo sapien
gcacgatgaggtcgcgcttcccctt

SEQ ID NO: 3404560 - DNA, 25 bp, Homo sapien
ttgctggaagcttttgggcacgatg

SEQ ID NO: 3404561 - DNA, 25 bp, Homo sapien
caggagaagaagccagctgatttgt

SEQ ID NO: 3404562 - DNA, 25 bp, Homo sapien
gggatgacctcgtttacacatcgca

SEQ ID NO: 3404563 - DNA, 25 bp, Homo sapien
cgggcaccggtgtgtcagacacaaa

SEQ ID NO: 3404564 - DNA, 25 bp, Homo sapien
ttgggcattcatccacgaagtactc

SEQ ID NO: 3404565 - DNA, 25 bp, Homo sapien
gaaagggatcctaatagccattcct

SEQ ID NO: 3404566 - DNA, 25 bp, Homo sapien
caaggtacagactctagcagctgca

SEQ ID NO: 3404567 - DNA, 25 bp, Homo sapien
agcagctgcagaaagggatcctaat

SEQ ID NO: 3404568 - DNA, 25 bp, Homo sapien
aggtacagactctagcagctgcaga

SEQ ID NO: 3404569 - DNA, 25 bp, Homo sapien
aggcagccaacctgggaaagttcat

SEQ ID NO: 3404570 - DNA, 25 bp, Homo sapien
catctgctttaaagattctcaactt

SEQ ID NO: 3404571 - DNA, 25 bp, Homo sapien
ctgctttaaagattctcaactttcc

SEQ ID NO: 3404572 - DNA, 25 bp, Homo sapien
tctgctttaaagattctcaactttc

SEQ ID NO: 3404573 - DNA, 25 bp, Homo sapien
tctagaaccaggttgcaaacaccag

SEQ ID NO: 3404574 - DNA, 25 bp, Homo sapien
agtctagaaccaggttgcaaacacc

SEQ ID NO: 3404575 - DNA, 25 bp, Homo sapien
agaaccaggttgcaaacaccagggc

SEQ ID NO: 3404576 - DNA, 25 bp, Homo sapien
ctagtctagaaccaggttgcaaaca

SEQ ID NO: 3404577 - DNA, 25 bp, Homo sapien
gaatagagtctacccaggcaaggag

SEQ ID NO: 3404578 - DNA, 25 bp, Homo sapien
gaatgtaccagctactctcccagtg

SEQ ID NO: 3404579 - DNA, 25 bp, Homo sapien
tcctccaggttaagcgaagacaaag

SEQ ID NO: 3404580 - DNA, 25 bp, Homo sapien
tacatagaaaccctgtgctcgcggc

SEQ ID NO: 3404581 - DNA, 25 bp, Homo sapien
gttggctttggtctcgtctgagcca

SEQ ID NO: 3404582 - DNA, 25 bp, Homo sapien
tgagccatctatggacttatagcgg

SEQ ID NO: 3404583 - DNA, 25 bp, Homo sapien
tggtctcgtctgagccatctatgga

SEQ ID NO: 3404584 - DNA, 25 bp, Homo sapien
tatggacttatagcggttgttcttg

SEQ ID NO: 3404585 - DNA, 25 bp, Homo sapien
aagttccactttggtggacaccagg

SEQ ID NO: 3404586 - DNA, 25 bp, Homo sapien
aacaggtttccttcccatgggagtg

SEQ ID NO: 3404587 - DNA, 25 bp, Homo sapien
tagaatttgagaagcccacgactgt

SEQ ID NO: 3404588 - DNA, 25 bp, Homo sapien
tgtcctgagggagtcaagttccact

SEQ ID NO: 3404589 - DNA, 25 bp, Homo sapien
ttcccaaatcttgtccctgtcagca

SEQ ID NO: 3404590 - DNA, 25 bp, Homo sapien
gattttccgggctatgccttcccaa

SEQ ID NO: 3404591 - DNA, 25 bp, Homo sapien
tgtcagcatgggacagccgcatggt

SEQ ID NO: 3404592 - DNA, 25 bp, Homo sapien
ttacgctcagccaggtgtgccacat

SEQ ID NO: 3404593 - DNA, 25 bp, Homo sapien
tgcttaatgtccttgacggagcggg

SEQ ID NO: 3404594 - DNA, 25 bp, Homo sapien
cccatctgtgcttaatgtccttgac

SEQ ID NO: 3404595 - DNA, 25 bp, Homo sapien
ttggtcctccgtttcatgtcatccc

SEQ ID NO: 3404596 - DNA, 25 bp, Homo sapien
agcttgtccttggtcctccgtttca

SEQ ID NO: 3404597 - DNA, 25 bp, Homo sapien
ctcgtgggccgtgagcacgatggtg

SEQ ID NO: 3404598 - DNA, 25 bp, Homo sapien
ggccccagggcccgacagggactgc

SEQ ID NO: 3404599 - DNA, 25 bp, Homo sapien
ccgtgagcacgatggtgggggcccg

SEQ ID NO: 3404600 - DNA, 25 bp, Homo sapien
tgagcacgatggtgggggcccggcc

SEQ ID NO: 3404601 - DNA, 25 bp, Homo sapien
tgccatccagttccgccctggggaa

SEQ ID NO: 3404602 - DNA, 25 bp, Homo sapien
ccgtgagcagcgccgacttgatggc

SEQ ID NO: 3404603 - DNA, 25 bp, Homo sapien
tgcacgggccgtgagcagcgccgac

SEQ ID NO: 3404604 - DNA, 25 bp, Homo sapien
gtcgaagggctgtcggtgccatcca

SEQ ID NO: 3404605 - DNA, 25 bp, Homo sapien
cgaaccgcttggctacctaattggg

SEQ ID NO: 3404606 - DNA, 25 bp, Homo sapien
gcaatgataacgactgccctgtcta

SEQ ID NO: 3404607 - DNA, 25 bp, Homo sapien
taagacgctcttggccctctgagca

SEQ ID NO: 3404608 - DNA, 25 bp, Homo sapien
acatgaaggtgctctgtaacgctga

SEQ ID NO: 3404609 - DNA, 25 bp, Homo sapien
cttcctccggagaccgctgcagagg

SEQ ID NO: 3404610 - DNA, 25 bp, Homo sapien
ccgctgcagaggcacccgaagaggc

SEQ ID NO: 3404611 - DNA, 25 bp, Homo sapien
gaggcacccgaagaggctgccttga

SEQ ID NO: 3404612 - DNA, 25 bp, Homo sapien
cccgaagaggctgccttgagggccc

SEQ ID NO: 3404613 - DNA, 25 bp, Homo sapien
tggggcagggcctctggcttggggc

SEQ ID NO: 3404614 - DNA, 25 bp, Homo sapien
ggatggggcagggcctctggcttgg

SEQ ID NO: 3404615 - DNA, 25 bp, Homo sapien
ggcagggcctctggcttggggccca

SEQ ID NO: 3404616 - DNA, 25 bp, Homo sapien
gggcagggcctctggcttggggccc

SEQ ID NO: 3404617 - DNA, 25 bp, Homo sapien
agtggagcccgtagggtctgcccct

SEQ ID NO: 3404618 - DNA, 25 bp, Homo sapien
agaactgccggaacacctcggtctg

SEQ ID NO: 3404619 - DNA, 25 bp, Homo sapien
catggcctggccgatgacgtgcatg

SEQ ID NO: 3404620 - DNA, 25 bp, Homo sapien
tgttggccatgtcccggtgcacggt

SEQ ID NO: 3404621 - DNA, 25 bp, Homo sapien
ctggtagtccgtgtgggggctgatg

SEQ ID NO: 3404622 - DNA, 25 bp, Homo sapien
gtagtccgtgtgggggctgatgctg

SEQ ID NO: 3404623 - DNA, 25 bp, Homo sapien
ggtagtccgtgtgggggctgatgct

SEQ ID NO: 3404624 - DNA, 25 bp, Homo sapien
tggtagtccgtgtgggggctgatgc

SEQ ID NO: 3404625 - DNA, 25 bp, Homo sapien
ttagaaattgtgctttctcttccga

SEQ ID NO: 3404626 - DNA, 25 bp, Homo sapien
tagaaattgtgctttctcttccgag

SEQ ID NO: 3404627 - DNA, 25 bp, Homo sapien
gaaattgtgctttctcttccgagac

SEQ ID NO: 3404628 - DNA, 25 bp, Homo sapien
agaaattgtgctttctcttccgaga

SEQ ID NO: 3404629 - DNA, 25 bp, Homo sapien
tgttcctggacacgaaagactggcc

SEQ ID NO: 3404630 - DNA, 25 bp, Homo sapien
tatgtagctagtgcgtaggcagccc

SEQ ID NO: 3404631 - DNA, 25 bp, Homo sapien
gagctaagcttgtatctgccacctg

SEQ ID NO: 3404632 - DNA, 25 bp, Homo sapien
aatctttgattccagcatcggaggc

SEQ ID NO: 3404633 - DNA, 25 bp, Homo sapien
tctttgcatctctcggaaattgggt

SEQ ID NO: 3404634 - DNA, 25 bp, Homo sapien
ccctgggaatggtttcacgacatct

SEQ ID NO: 3404635 - DNA, 25 bp, Homo sapien
tggtttcacgacatctttgcatctc

SEQ ID NO: 3404636 - DNA, 25 bp, Homo sapien
gaaattgggtagtcctccatttcta

SEQ ID NO: 3404637 - DNA, 25 bp, Homo sapien
cagccagtcactgcttcatacattg

SEQ ID NO: 3404638 - DNA, 25 bp, Homo sapien
cagcttccaatttggctccttccct

SEQ ID NO: 3404639 - DNA, 25 bp, Homo sapien
gccagtcactgcttcatacattgac

SEQ ID NO: 3404640 - DNA, 25 bp, Homo sapien
tccatttcagttttacagcttccaa

SEQ ID NO: 3404641 - DNA, 25 bp, Homo sapien
tggtcatggctagaggcctccctct

SEQ ID NO: 3404642 - DNA, 25 bp, Homo sapien
gatggtcacctggtcatggctagag

SEQ ID NO: 3404643 - DNA, 25 bp, Homo sapien
tggtcacctggtcatggctagaggc

SEQ ID NO: 3404644 - DNA, 25 bp, Homo sapien
tcacctggtcatggctagaggcctc

SEQ ID NO: 3404645 - DNA, 25 bp, Homo sapien
gaggcatttcaactccaacccacag

SEQ ID NO: 3404646 - DNA, 25 bp, Homo sapien
gggcaaaatctatccactgtggctg

SEQ ID NO: 3404647 - DNA, 25 bp, Homo sapien
cacagagaatgcctggctgagactg

SEQ ID NO: 3404648 - DNA, 25 bp, Homo sapien
gagctctggactaaacctgtcatga

SEQ ID NO: 3404649 - DNA, 25 bp, Homo sapien
tattttcaaaggcagatcaatgctt

SEQ ID NO: 3404650 - DNA, 25 bp, Homo sapien
gagcaacttctagggtgtgtcaaaa

SEQ ID NO: 3404651 - DNA, 25 bp, Homo sapien
tatttggaaagctaacctcaaggcg

SEQ ID NO: 3404652 - DNA, 25 bp, Homo sapien
tggcaactcttggtgaatcacaacc

SEQ ID NO: 3404653 - DNA, 25 bp, Homo sapien
tcacatcggatataagcatcgctat

SEQ ID NO: 3404654 - DNA, 25 bp, Homo sapien
acatcggtgttcttatcacatcgga

SEQ ID NO: 3404655 - DNA, 25 bp, Homo sapien
gatttacggtgcttagatccgccag

SEQ ID NO: 3404656 - DNA, 25 bp, Homo sapien
tctgttagccccaacacatcggtgt

SEQ ID NO: 3404657 - DNA, 25 bp, Homo sapien
gagagaagcaagccacaggctccac

SEQ ID NO: 3404658 - DNA, 25 bp, Homo sapien
cttttgagagaagcaagccacaggc

SEQ ID NO: 3404659 - DNA, 25 bp, Homo sapien
ttgagagaagcaagccacaggctcc

SEQ ID NO: 3404660 - DNA, 25 bp, Homo sapien
ttttgagagaagcaagccacaggct

SEQ ID NO: 3404661 - DNA, 25 bp, Homo sapien
gaaggagtaagaccaaggcagatgg

SEQ ID NO: 3404662 - DNA, 25 bp, Homo sapien
aaggagtaagaccaaggcagatggg

SEQ ID NO: 3404663 - DNA, 25 bp, Homo sapien
aggagtaagaccaaggcagatggga

SEQ ID NO: 3404664 - DNA, 25 bp, Homo sapien
tggagtccagggaacaatccattct

SEQ ID NO: 3404665 - DNA, 25 bp, Homo sapien
cattctggcaacaggatgctgcaag

SEQ ID NO: 3404666 - DNA, 25 bp, Homo sapien
ggagtccagggaacaatccattctg

SEQ ID NO: 3404667 - DNA, 25 bp, Homo sapien
acaatccattctggcaacaggatgc

SEQ ID NO: 3404668 - DNA, 25 bp, Homo sapien
cgttttagggttctgagctacacaa

SEQ ID NO: 3404669 - DNA, 25 bp, Homo sapien
ccgaggagtgaaggtgtacagatca

SEQ ID NO: 3404670 - DNA, 25 bp, Homo sapien
agggcaagaggaaattagttgacgt

SEQ ID NO: 3404671 - DNA, 25 bp, Homo sapien
tagttgacgttttagggttctgagc

SEQ ID NO: 3404672 - DNA, 25 bp, Homo sapien
ctccaaaaggtgggatgagggaaca

SEQ ID NO: 3404673 - DNA, 25 bp, Homo sapien
tccaaaaggtgggatgagggaacac

SEQ ID NO: 3404674 - DNA, 25 bp, Homo sapien
ccggagaagcagcaccagccagaac

SEQ ID NO: 3404675 - DNA, 25 bp, Homo sapien
agaagcagcaccagccagaacccat

SEQ ID NO: 3404676 - DNA, 25 bp, Homo sapien
ggagaagcagcaccagccagaaccc

SEQ ID NO: 3404677 - DNA, 25 bp, Homo sapien
ctgtccggagaagcagcaccagcca

SEQ ID NO: 3404678 - DNA, 25 bp, Homo sapien
agaagtccacaggcacgtgggccca

SEQ ID NO: 3404679 - DNA, 25 bp, Homo sapien
tgtggatggttagaagtccacaggc

SEQ ID NO: 3404680 - DNA, 25 bp, Homo sapien
ggcaagtgtggatggttagaagtcc

SEQ ID NO: 3404681 - DNA, 25 bp, Homo sapien
caagtgtggatggttagaagtccac

SEQ ID NO: 3404682 - DNA, 25 bp, Homo sapien
agacaggtgagaacgcacgggccac

SEQ ID NO: 3404683 - DNA, 25 bp, Homo sapien
ggaggggagacaggtgagaacgcac

SEQ ID NO: 3404684 - DNA, 25 bp, Homo sapien
gggagacaggtgagaacgcacgggc

SEQ ID NO: 3404685 - DNA, 25 bp, Homo sapien
gaggggagacaggtgagaacgcacg

SEQ ID NO: 3404686 - DNA, 25 bp, Homo sapien
tttcctgggacatgctgtgcaggcg

SEQ ID NO: 3404687 - DNA, 25 bp, Homo sapien
tcatgtagtcctcgctgtaccagac

SEQ ID NO: 3404688 - DNA, 25 bp, Homo sapien
gaagtagatgcgctcactgtgctgg

SEQ ID NO: 3404689 - DNA, 25 bp, Homo sapien
gccaggttgcggtgaatggtttcct

SEQ ID NO: 3404690 - DNA, 25 bp, Homo sapien
cccctgtggtcttggggctcatgga

SEQ ID NO: 3404691 - DNA, 25 bp, Homo sapien
gctcatggaggatgatgcagcttca

SEQ ID NO: 3404692 - DNA, 25 bp, Homo sapien
cttctctgagcaatcccctgtggtc

SEQ ID NO: 3404693 - DNA, 25 bp, Homo sapien
ggctcatggaggatgatgcagcttc

SEQ ID NO: 3404694 - DNA, 25 bp, Homo sapien
tctttaggcgaatacagttagggca

SEQ ID NO: 3404695 - DNA, 25 bp, Homo sapien
tgggtctggcctatattctgcacac

SEQ ID NO: 3404696 - DNA, 25 bp, Homo sapien
agccacgcttgtagggacttttgcc

SEQ ID NO: 3404697 - DNA, 25 bp, Homo sapien
gggcttccaccttcgcagattccag

SEQ ID NO: 3404698 - DNA, 25 bp, Homo sapien
gtactctgccctccgacaataatct

SEQ ID NO: 3404699 - DNA, 25 bp, Homo sapien
aataatctcatccaaaccaacttac

SEQ ID NO: 3404700 - DNA, 25 bp, Homo sapien
caataatctcatccaaaccaactta

SEQ ID NO: 3404701 - DNA, 25 bp, Homo sapien
cacacagcccactgcgtactctgcc

SEQ ID NO: 3404702 - DNA, 25 bp, Homo sapien
taagacaccagtaccagagaaaggc

SEQ ID NO: 3404703 - DNA, 25 bp, Homo sapien
agtgggacaccctgcttgagactgg

SEQ ID NO: 3404704 - DNA, 25 bp, Homo sapien
aactgggaccatgtgtggcaggaca

SEQ ID NO: 3404705 - DNA, 25 bp, Homo sapien
aaaggcaacgggtcaagaacacagc

SEQ ID NO: 3404706 - DNA, 25 bp, Homo sapien
tcaaagttggtgattggcggtccgt

SEQ ID NO: 3404707 - DNA, 25 bp, Homo sapien
gaggttcttcatggcgatcccgttg

SEQ ID NO: 3404708 - DNA, 25 bp, Homo sapien
ccttcacaaagatccggctgcggga

SEQ ID NO: 3404709 - DNA, 25 bp, Homo sapien
gaactcctgcaggtattctcccggg

SEQ ID NO: 3404710 - DNA, 25 bp, Homo sapien
tacctaaaggtgatgacagagacct

SEQ ID NO: 3404711 - DNA, 25 bp, Homo sapien
agtggcttctggtggacgcgtcacc

SEQ ID NO: 3404712 - DNA, 25 bp, Homo sapien
tgttgcagctgccaaattttgtaga

SEQ ID NO: 3404713 - DNA, 25 bp, Homo sapien
cagcttagtgaactctgcagcgcca

SEQ ID NO: 3404714 - DNA, 25 bp, Homo sapien
tgcattgacactacctgccactgaa

SEQ ID NO: 3404715 - DNA, 25 bp, Homo sapien
aggaagggatccacaacccagggat

SEQ ID NO: 3404716 - DNA, 25 bp, Homo sapien
gcaaaaggaggaccacatctctaca

SEQ ID NO: 3404717 - DNA, 25 bp, Homo sapien
cccaaaagccctggattggaatgga

SEQ ID NO: 3404718 - DNA, 25 bp, Homo sapien
tataatgtctgaaccaagcaggctg

SEQ ID NO: 3404719 - DNA, 25 bp, Homo sapien
cactatggttctcaacggtggcatg

SEQ ID NO: 3404720 - DNA, 25 bp, Homo sapien
ctggtggaaccaagaaagggctata

SEQ ID NO: 3404721 - DNA, 25 bp, Homo sapien
ccccagggaataggcaagtggctat

SEQ ID NO: 3404722 - DNA, 25 bp, Homo sapien
ctttctcaggaactacagggtaggc

SEQ ID NO: 3404723 - DNA, 25 bp, Homo sapien
tattccctgtcccatggcagtgtgg

SEQ ID NO: 3404724 - DNA, 25 bp, Homo sapien
gaagagaccccgtgtaaattgcagt

SEQ ID NO: 3404725 - DNA, 25 bp, Homo sapien
tagcttttccgaggtctggtggcca

SEQ ID NO: 3404726 - DNA, 25 bp, Homo sapien
aaacattgcctgaaaggctccttaa

SEQ ID NO: 3404727 - DNA, 25 bp, Homo sapien
ggctaacatgcaaacattgcctgaa

SEQ ID NO: 3404728 - DNA, 25 bp, Homo sapien
ccctctggctaacatgcaaacattg

SEQ ID NO: 3404729 - DNA, 25 bp, Homo sapien
aacattgcctgaaaggctccttaaa

SEQ ID NO: 3404730 - DNA, 25 bp, Homo sapien
cagtgaccgcctaagcgtgggctgt

SEQ ID NO: 3404731 - DNA, 25 bp, Homo sapien
gtttgtgcagtggtccctccaccag

SEQ ID NO: 3404732 - DNA, 25 bp, Homo sapien
gtcagagaccacgtcctactgccaa

SEQ ID NO: 3404733 - DNA, 25 bp, Homo sapien
tggacctttcctattgccactgacg

SEQ ID NO: 3404734 - DNA, 25 bp, Homo sapien
gtagccattgaatttatgagtgtgc

SEQ ID NO: 3404735 - DNA, 25 bp, Homo sapien
agatatgtctctcccaccgtttcct

SEQ ID NO: 3404736 - DNA, 25 bp, Homo sapien
tatgagtgtgcagatatgtctctcc

SEQ ID NO: 3404737 - DNA, 25 bp, Homo sapien
accgtttcctgctagctgatgcccc

SEQ ID NO: 3404738 - DNA, 25 bp, Homo sapien
ccaggtactggagggtgtcccaaga

SEQ ID NO: 3404739 - DNA, 25 bp, Homo sapien
gaaatagacggaatcagactgctgg

SEQ ID NO: 3404740 - DNA, 25 bp, Homo sapien
gactgctggttcttccggagagaca

SEQ ID NO: 3404741 - DNA, 25 bp, Homo sapien
tccccaacgaaagtggatgagcttg

SEQ ID NO: 3404742 - DNA, 25 bp, Homo sapien
cctgttgtcaaatgctaagtgtgtg

SEQ ID NO: 3404743 - DNA, 25 bp, Homo sapien
ctttggagcaaaaaccttgcagtgg

SEQ ID NO: 3404744 - DNA, 25 bp, Homo sapien
cagagaatcagctaggagaccagtt

SEQ ID NO: 3404745 - DNA, 25 bp, Homo sapien
tgtgggttgaatgacaaatcactcc

SEQ ID NO: 3404746 - DNA, 25 bp, Homo sapien
caaatggtgattcaaggaccagact

SEQ ID NO: 3404747 - DNA, 25 bp, Homo sapien
tttttctccaaatggtgattcaagg

SEQ ID NO: 3404748 - DNA, 25 bp, Homo sapien
atggtgattcaaggaccagactcct

SEQ ID NO: 3404749 - DNA, 25 bp, Homo sapien
ccttccagctgtggctccataaccc

SEQ ID NO: 3404750 - DNA, 25 bp, Homo sapien
tgtgtgtctatctcccctggagaag

SEQ ID NO: 3404751 - DNA, 25 bp, Homo sapien
ggtatggctcttatttgactctcgt

SEQ ID NO: 3404752 - DNA, 25 bp, Homo sapien
tggaaggtatggctcttatttgact

SEQ ID NO: 3404753 - DNA, 25 bp, Homo sapien
cttatttgactctcgtgggcttctg

SEQ ID NO: 3404754 - DNA, 25 bp, Homo sapien
acattgaccccacctgttgtcttgg

SEQ ID NO: 3404755 - DNA, 25 bp, Homo sapien
ttcgactttcttaacaggtgtggtg

SEQ ID NO: 3404756 - DNA, 25 bp, Homo sapien
tgggtggcagtgacgatttcgactt

SEQ ID NO: 3404757 - DNA, 25 bp, Homo sapien
gcctaatgggctgtgacattgaccc

SEQ ID NO: 3404758 - DNA, 25 bp, Homo sapien
ctgcggactgactgtactctggaca

SEQ ID NO: 3404759 - DNA, 25 bp, Homo sapien
tgcggactgactgtactctggacac

SEQ ID NO: 3404760 - DNA, 25 bp, Homo sapien
gcggactgactgtactctggacaca

SEQ ID NO: 3404761 - DNA, 25 bp, Homo sapien
ggactgactgtactctggacacagt

SEQ ID NO: 3404762 - DNA, 25 bp, Homo sapien
ctagcctgatgctttgtgcgtcttg

SEQ ID NO: 3404763 - DNA, 25 bp, Homo sapien
gatgctttgtgcgtcttgaagcctt

SEQ ID NO: 3404764 - DNA, 25 bp, Homo sapien
atatctgcttgccaaacagacacac

SEQ ID NO: 3404765 - DNA, 25 bp, Homo sapien
tgtgcgtcttgaagcctttaatatc

SEQ ID NO: 3404766 - DNA, 25 bp, Homo sapien
tgatacatgatacctgcccatccac

SEQ ID NO: 3404767 - DNA, 25 bp, Homo sapien
gtaaccatgtgcaagctcaataggg

SEQ ID NO: 3404768 - DNA, 25 bp, Homo sapien
atcttcaaatactggtgcatgcacc

SEQ ID NO: 3404769 - DNA, 25 bp, Homo sapien
ccttacctggttccctcagtgacaa

SEQ ID NO: 3404770 - DNA, 25 bp, Homo sapien
cttgggcttggggaacacccagtca

SEQ ID NO: 3404771 - DNA, 25 bp, Homo sapien
ctttggcaagggacttgggcttggg

SEQ ID NO: 3404772 - DNA, 25 bp, Homo sapien
tgggcttggggaacacccagtcagt

SEQ ID NO: 3404773 - DNA, 25 bp, Homo sapien
gcttggggaacacccagtcagtcat

SEQ ID NO: 3404774 - DNA, 25 bp, Homo sapien
taaccaactggagcctttagattag

SEQ ID NO: 3404775 - DNA, 25 bp, Homo sapien
tgttgtacactccagaagcctataa

SEQ ID NO: 3404776 - DNA, 25 bp, Homo sapien
cttctcatatggcaggcaaaatcct

SEQ ID NO: 3404777 - DNA, 25 bp, Homo sapien
gcaaaatccttcagacgatgtcttg

SEQ ID NO: 3404778 - DNA, 25 bp, Homo sapien
gctcccatggtctctgactccaaga

SEQ ID NO: 3404779 - DNA, 25 bp, Homo sapien
tgctggccgagttttctgattgctt

SEQ ID NO: 3404780 - DNA, 25 bp, Homo sapien
ttgaggggagtatccactcttggcg

SEQ ID NO: 3404781 - DNA, 25 bp, Homo sapien
aatggtatgcctggtgtgtactgca

SEQ ID NO: 3404782 - DNA, 25 bp, Homo sapien
gatattggtggcaggtctccgaggg

SEQ ID NO: 3404783 - DNA, 25 bp, Homo sapien
ctatgtgtgcaaaaagatattggtg

SEQ ID NO: 3404784 - DNA, 25 bp, Homo sapien
ccgagggtctgcaagaattcaaaga

SEQ ID NO: 3404785 - DNA, 25 bp, Homo sapien
cactggctggtgctatgtgtgcaaa

SEQ ID NO: 3404786 - DNA, 25 bp, Homo sapien
ggcacacactgacctctgcggactt

SEQ ID NO: 3404787 - DNA, 25 bp, Homo sapien
gcgtacaactcgtggcgggcacaca

SEQ ID NO: 3404788 - DNA, 25 bp, Homo sapien
tggctcctctggactgggcgtacaa

SEQ ID NO: 3404789 - DNA, 25 bp, Homo sapien
gcacctgcgggtacctctgcttctg

SEQ ID NO: 3404790 - DNA, 25 bp, Homo sapien
gtagcaggaatagtcgcataccagt

SEQ ID NO: 3404791 - DNA, 25 bp, Homo sapien
caggaatagtcgcataccagttcac

SEQ ID NO: 3404792 - DNA, 25 bp, Homo sapien
gaatagtcgcataccagttcacaag

SEQ ID NO: 3404793 - DNA, 25 bp, Homo sapien
caagtagcaggaatagtcgcatacc

SEQ ID NO: 3404794 - DNA, 25 bp, Homo sapien
agaggccagcgcttgtgcaggctca

SEQ ID NO: 3404795 - DNA, 25 bp, Homo sapien
aaaagaggccagcgcttgtgcaggc

SEQ ID NO: 3404796 - DNA, 25 bp, Homo sapien
gccagcgcttgtgcaggctcaggcc

SEQ ID NO: 3404797 - DNA, 25 bp, Homo sapien
aggaaaagaggccagcgcttgtgca

SEQ ID NO: 3404798 - DNA, 25 bp, Homo sapien
gctgacgttaagatgcactggtgca

SEQ ID NO: 3404799 - DNA, 25 bp, Homo sapien
taagaagttgggtagcctcgctgac

SEQ ID NO: 3404800 - DNA, 25 bp, Homo sapien
tgttttcgctgcttagcctgtcctg

SEQ ID NO: 3404801 - DNA, 25 bp, Homo sapien
gcttgtgttcacacgccaggcctgt

SEQ ID NO: 3404802 - DNA, 25 bp, Homo sapien
gaaggcgcgaaggaagaagacttcc

SEQ ID NO: 3404803 - DNA, 25 bp, Homo sapien
ccagcagagccttcgagcggctctg

SEQ ID NO: 3404804 - DNA, 25 bp, Homo sapien
tgccctggagcgtaaggaagaagaa

SEQ ID NO: 3404805 - DNA, 25 bp, Homo sapien
cttcgagcggctctgtcaggctgcc

SEQ ID NO: 3404806 - DNA, 25 bp, Homo sapien
aatttactggacatgcctccgagcc

SEQ ID NO: 3404807 - DNA, 25 bp, Homo sapien
tggccctctctacacacaaattttg

SEQ ID NO: 3404808 - DNA, 25 bp, Homo sapien
catcattgtctttgcgcaaccgctg

SEQ ID NO: 3404809 - DNA, 25 bp, Homo sapien
tgaagtcctggctactaagcatcat

SEQ ID NO: 3404810 - DNA, 25 bp, Homo sapien
gagagaactggcctgcgatcaatga

SEQ ID NO: 3404811 - DNA, 25 bp, Homo sapien
aagtcaatggctctggtctcctgta

SEQ ID NO: 3404812 - DNA, 25 bp, Homo sapien
gaaagtttaccagacagcaggagtg

SEQ ID NO: 3404813 - DNA, 25 bp, Homo sapien
cacagtgcacttgagaaatgtctgc

SEQ ID NO: 3404814 - DNA, 25 bp, Homo sapien
gcacaggagcccaagtaagccttca

SEQ ID NO: 3404815 - DNA, 25 bp, Homo sapien
tgctcatgctctgcccatgtggtgg

SEQ ID NO: 3404816 - DNA, 25 bp, Homo sapien
gccaaactgaggtgtaatccaaggt

SEQ ID NO: 3404817 - DNA, 25 bp, Homo sapien
gagccacttcatcgtagtttcagtg

SEQ ID NO: 3404818 - DNA, 25 bp, Homo sapien
aacaggcatggattaggctaagggt

SEQ ID NO: 3404819 - DNA, 25 bp, Homo sapien
gaaatgtagcacattgattccctca

SEQ ID NO: 3404820 - DNA, 25 bp, Homo sapien
taagggtgtggaccctctaatccaa

SEQ ID NO: 3404821 - DNA, 25 bp, Homo sapien
gatcatgggctggtacatatgacaa

SEQ ID NO: 3404822 - DNA, 25 bp, Homo sapien
taaattaggctacacaaagaaccag

SEQ ID NO: 3404823 - DNA, 25 bp, Homo sapien
gcagatcagatagaaagacctttgt

SEQ ID NO: 3404824 - DNA, 25 bp, Homo sapien
agagaagctggatgctgcgccactg

SEQ ID NO: 3404825 - DNA, 25 bp, Homo sapien
aagctgatcttctagggttgcgaga

SEQ ID NO: 3404826 - DNA, 25 bp, Homo sapien
tgccatgaacgtagtccttctggtt

SEQ ID NO: 3404827 - DNA, 25 bp, Homo sapien
ctctggtgccatgaacgtagtcctt

SEQ ID NO: 3404828 - DNA, 25 bp, Homo sapien
ccatgaacgtagtccttctggttct

SEQ ID NO: 3404829 - DNA, 25 bp, Homo sapien
tggtgccatgaacgtagtccttctg

SEQ ID NO: 3404830 - DNA, 25 bp, Homo sapien
ccctgccgggtttttctcagatcct

SEQ ID NO: 3404831 - DNA, 25 bp, Homo sapien
tgaaaacgaatctcctgggagcagc

SEQ ID NO: 3404832 - DNA, 25 bp, Homo sapien
tgccatcaaccctgccgggtttttc

SEQ ID NO: 3404833 - DNA, 25 bp, Homo sapien
gatcctctgaaaacgaatctcctgg

SEQ ID NO: 3404834 - DNA, 25 bp, Homo sapien
cttgcaaataagcggggcctgctgc

SEQ ID NO: 3404835 - DNA, 25 bp, Homo sapien
tgcttcttgcaaataagcggggcct

SEQ ID NO: 3404836 - DNA, 25 bp, Homo sapien
ttgcaaataagcggggcctgctgca

SEQ ID NO: 3404837 - DNA, 25 bp, Homo sapien
ggctgcttcttgcaaataagcgggg

SEQ ID NO: 3404838 - DNA, 25 bp, Homo sapien
ttaataatcgtgtccctgggccgga

SEQ ID NO: 3404839 - DNA, 25 bp, Homo sapien
gaggctgtgacccaaatacgacggg

SEQ ID NO: 3404840 - DNA, 25 bp, Homo sapien
tattagatggctcggcgaaaacctg

SEQ ID NO: 3404841 - DNA, 25 bp, Homo sapien
tttacacggccaggttaggcttgcg

SEQ ID NO: 3404842 - DNA, 25 bp, Homo sapien
tcttcatgtgcgaaatgggaaccaa

SEQ ID NO: 3404843 - DNA, 25 bp, Homo sapien
caatcttctcttcatgtgcgaaatg

SEQ ID NO: 3404844 - DNA, 25 bp, Homo sapien
tgggaaccaagatctgggtcatagc

SEQ ID NO: 3404845 - DNA, 25 bp, Homo sapien
gtcatagcttacagtcccaaaaccc

SEQ ID NO: 3404846 - DNA, 25 bp, Homo sapien
tccatcccaggagtcagtcaagtga

SEQ ID NO: 3404847 - DNA, 25 bp, Homo sapien
ttctgagagctggagtaaggacccg

SEQ ID NO: 3404848 - DNA, 25 bp, Homo sapien
tggagggtacaaccagacaggcttc

SEQ ID NO: 3404849 - DNA, 25 bp, Homo sapien
gatgggtcaacaggcgattcagcgt

SEQ ID NO: 3404850 - DNA, 25 bp, Homo sapien
cttgcccaaaagccatgagcttcct

SEQ ID NO: 3404851 - DNA, 25 bp, Homo sapien
aggtgcctggagaccatccttgtgt

SEQ ID NO: 3404852 - DNA, 25 bp, Homo sapien
cttctgtgaagggtaccggaatctg

SEQ ID NO: 3404853 - DNA, 25 bp, Homo sapien
tggctgatcctaaagggcaggagac

SEQ ID NO: 3404854 - DNA, 25 bp, Homo sapien
tacagaagtgaaggaagggccttgc

SEQ ID NO: 3404855 - DNA, 25 bp, Homo sapien
tgtgcagggcccattagtgccaaag

SEQ ID NO: 3404856 - DNA, 25 bp, Homo sapien
gaggtggaaccctctcgggagcaca

SEQ ID NO: 3404857 - DNA, 25 bp, Homo sapien
ggtttctgctgccaagcttcttaca

SEQ ID NO: 3404858 - DNA, 25 bp, Homo sapien
ggagccatcaccgtctttcggaggt

SEQ ID NO: 3404859 - DNA, 25 bp, Homo sapien
tcagaggtgacccctctggaaggca

SEQ ID NO: 3404860 - DNA, 25 bp, Homo sapien
cagaggtgacccctctggaaggcag

SEQ ID NO: 3404861 - DNA, 25 bp, Homo sapien
aagtgatggcatagaggctcagtac

SEQ ID NO: 3404862 - DNA, 25 bp, Homo sapien
gctctggaagcaaagtgatggcata

SEQ ID NO: 3404863 - DNA, 25 bp, Homo sapien
gcaaagtgatggcatagaggctcag

SEQ ID NO: 3404864 - DNA, 25 bp, Homo sapien
gaagcaaagtgatggcatagaggct

SEQ ID NO: 3404865 - DNA, 25 bp, Homo sapien
tgccgtcaccctttgcgagctcttc

SEQ ID NO: 3404866 - DNA, 25 bp, Homo sapien
tctctgccgtcaccctttgcgagct

SEQ ID NO: 3404867 - DNA, 25 bp, Homo sapien
ctgggcatctctctgccgtcaccct

SEQ ID NO: 3404868 - DNA, 25 bp, Homo sapien
atctctctgccgtcaccctttgcga

SEQ ID NO: 3404869 - DNA, 25 bp, Homo sapien
aactgtgccttttgtagatggagac

SEQ ID NO: 3404870 - DNA, 25 bp, Homo sapien
ggctcttactcacacgtctcctgaa

SEQ ID NO: 3404871 - DNA, 25 bp, Homo sapien
tgtaggctgatctgggaaatcttgg

SEQ ID NO: 3404872 - DNA, 25 bp, Homo sapien
tcacacagctgggataggattccag

SEQ ID NO: 3404873 - DNA, 25 bp, Homo sapien
ggacaaggatctccattgggacccg

SEQ ID NO: 3404874 - DNA, 25 bp, Homo sapien
ccctggacatcatgacgctggggac

SEQ ID NO: 3404875 - DNA, 25 bp, Homo sapien
tcagtgagacagctggctacatcca

SEQ ID NO: 3404876 - DNA, 25 bp, Homo sapien
gggacccgcattgttattgatgttt

SEQ ID NO: 3404877 - DNA, 25 bp, Homo sapien
cacacagtcagcgatgaaagggagg

SEQ ID NO: 3404878 - DNA, 25 bp, Homo sapien
gcctcttctcccgaaatacaggatc

SEQ ID NO: 3404879 - DNA, 25 bp, Homo sapien
ccgaaatacaggatcgacaacccga

SEQ ID NO: 3404880 - DNA, 25 bp, Homo sapien
aacccgaacacaaaggcacttccat

SEQ ID NO: 3404881 - DNA, 25 bp, Homo sapien
gacttcacgactaccaccagctctc

SEQ ID NO: 3404882 - DNA, 25 bp, Homo sapien
cactgccatggcagtgctttcaggg

SEQ ID NO: 3404883 - DNA, 25 bp, Homo sapien
gagtgagggcctcacaggctttgat

SEQ ID NO: 3404884 - DNA, 25 bp, Homo sapien
caatgccattgccaagcactgccat

SEQ ID NO: 3404885 - DNA, 25 bp, Homo sapien
cattttacccatcgggaagctgaaa

SEQ ID NO: 3404886 - DNA, 25 bp, Homo sapien
gaaaccgcatgtcgtgcttgtggct

SEQ ID NO: 3404887 - DNA, 25 bp, Homo sapien
catctcagttctgcgggtgtcccag

SEQ ID NO: 3404888 - DNA, 25 bp, Homo sapien
ggtagaccccagagaagtgacaatt

SEQ ID NO: 3404889 - DNA, 25 bp, Homo sapien
aggaagtcctgcattgccaccgcag

SEQ ID NO: 3404890 - DNA, 25 bp, Homo sapien
tgagtggcagaactagggctcaaac

SEQ ID NO: 3404891 - DNA, 25 bp, Homo sapien
gggccaagatcaactcagatgacca

SEQ ID NO: 3404892 - DNA, 25 bp, Homo sapien
tccacatagaaggtgcagcctgtta

SEQ ID NO: 3404893 - DNA, 25 bp, Homo sapien
tttcacaggttgcatctccttctcc

SEQ ID NO: 3404894 - DNA, 25 bp, Homo sapien
ttcacaggttgcatctccttctcca

SEQ ID NO: 3404895 - DNA, 25 bp, Homo sapien
gctggtgctggacagggctctccca

SEQ ID NO: 3404896 - DNA, 25 bp, Homo sapien
tggtgctggacagggctctcccaat

SEQ ID NO: 3404897 - DNA, 25 bp, Homo sapien
tggacagggctctcccaattcagca

SEQ ID NO: 3404898 - DNA, 25 bp, Homo sapien
tgctggacagggctctcccaattca

SEQ ID NO: 3404899 - DNA, 25 bp, Homo sapien
cctgttgtccccgatcttttcttct

SEQ ID NO: 3404900 - DNA, 25 bp, Homo sapien
tgcagaggctaaaacagcaatttcc

SEQ ID NO: 3404901 - DNA, 25 bp, Homo sapien
tgttcccagaggaacacgtggcccc

SEQ ID NO: 3404902 - DNA, 25 bp, Homo sapien
ggttctcgtgggcagcccctgttgt

SEQ ID NO: 3404903 - DNA, 25 bp, Homo sapien
aattgcatccttggagttttggggt

SEQ ID NO: 3404904 - DNA, 25 bp, Homo sapien
aaattgcatccttggagttttgggg

SEQ ID NO: 3404905 - DNA, 25 bp, Homo sapien
tcaaattgcatccttggagttttgg

SEQ ID NO: 3404906 - DNA, 25 bp, Homo sapien
caaattgcatccttggagttttggg

SEQ ID NO: 3404907 - DNA, 25 bp, Homo sapien
tttgcacagtgagggacctcaatct

SEQ ID NO: 3404908 - DNA, 25 bp, Homo sapien
caactaccgctccagtggctgaaat

SEQ ID NO: 3404909 - DNA, 25 bp, Homo sapien
ccgggaagaaagactgggtcatgga

SEQ ID NO: 3404910 - DNA, 25 bp, Homo sapien
gagagcgatgtttgggcagcaccta

SEQ ID NO: 3404911 - DNA, 25 bp, Homo sapien
gatgagcaggacaaccatatagaag

SEQ ID NO: 3404912 - DNA, 25 bp, Homo sapien
aagtcagccccttctccgtagatat

SEQ ID NO: 3404913 - DNA, 25 bp, Homo sapien
tataaaaccagtggctgacagcccg

SEQ ID NO: 3404914 - DNA, 25 bp, Homo sapien
gacagcccggatttccaggttgcca

SEQ ID NO: 3404915 - DNA, 25 bp, Homo sapien
gtcccatggtcatttgcaatgttcc

SEQ ID NO: 3404916 - DNA, 25 bp, Homo sapien
tcccatggtcatttgcaatgttcct

SEQ ID NO: 3404917 - DNA, 25 bp, Homo sapien
cccatggtcatttgcaatgttcctg

SEQ ID NO: 3404918 - DNA, 25 bp, Homo sapien
ctgagaggagccacagcatggaaga

SEQ ID NO: 3404919 - DNA, 25 bp, Homo sapien
atacagccacggcaaagttttggca

SEQ ID NO: 3404920 - DNA, 25 bp, Homo sapien
gctgttggagttgcgtcagcagcat

SEQ ID NO: 3404921 - DNA, 25 bp, Homo sapien
aaaggatacagccacggcaaagttt

SEQ ID NO: 3404922 - DNA, 25 bp, Homo sapien
ggtagtgggtcttctaagcaaagga

SEQ ID NO: 3404923 - DNA, 25 bp, Homo sapien
cacgagggtgggtaaaatctggatc

SEQ ID NO: 3404924 - DNA, 25 bp, Homo sapien
aaaaaacagttgtctagcactcggg

SEQ ID NO: 3404925 - DNA, 25 bp, Homo sapien
gagaagcagatctaatttcctccct

SEQ ID NO: 3404926 - DNA, 25 bp, Homo sapien
ctgcttccacggtgagcacgagggt

SEQ ID NO: 3404927 - DNA, 25 bp, Homo sapien
tctttgctgcatccctagggcccag

SEQ ID NO: 3404928 - DNA, 25 bp, Homo sapien
tgtgaccccacaatggtgaccagag

SEQ ID NO: 3404929 - DNA, 25 bp, Homo sapien
gcaaacctgcctgttcctaggatgg

SEQ ID NO: 3404930 - DNA, 25 bp, Homo sapien
taaactccataatggcaggcgacca

SEQ ID NO: 3404931 - DNA, 25 bp, Homo sapien
ctggtagcatagtgggctgacacat

SEQ ID NO: 3404932 - DNA, 25 bp, Homo sapien
caagctggcagctggtagcatagtg

SEQ ID NO: 3404933 - DNA, 25 bp, Homo sapien
ccaagctggcagctggtagcatagt

SEQ ID NO: 3404934 - DNA, 25 bp, Homo sapien
cagctggtagcatagtgggctgaca

SEQ ID NO: 3404935 - DNA, 25 bp, Homo sapien
ccaagtttatgggagaactcaaggc

SEQ ID NO: 3404936 - DNA, 25 bp, Homo sapien
tcctccaagtttatgggagaactca

SEQ ID NO: 3404937 - DNA, 25 bp, Homo sapien
gtcctccaagtttatgggagaactc

SEQ ID NO: 3404938 - DNA, 25 bp, Homo sapien
tgggagaactcaaggctggcaccat

SEQ ID NO: 3404939 - DNA, 25 bp, Homo sapien
caaactgcaattgcgctgagtgccc

SEQ ID NO: 3404940 - DNA, 25 bp, Homo sapien
gcaagctgggatcttcaaactgcaa

SEQ ID NO: 3404941 - DNA, 25 bp, Homo sapien
caatacagaatagatgctaaggtaa

SEQ ID NO: 3404942 - DNA, 25 bp, Homo sapien
aacgcactgctgtacatctgaatga

SEQ ID NO: 3404943 - DNA, 25 bp, Homo sapien
tctggttggaggccttgtcagagca

SEQ ID NO: 3404944 - DNA, 25 bp, Homo sapien
cagccctgatagacttggggatccc

SEQ ID NO: 3404945 - DNA, 25 bp, Homo sapien
ttccttcagagaggcgagtggaacc

SEQ ID NO: 3404946 - DNA, 25 bp, Homo sapien
cagcatctgagccaatacctccttg

SEQ ID NO: 3404947 - DNA, 25 bp, Homo sapien
ccagatcaaggatgaattgtctccc

SEQ ID NO: 3404948 - DNA, 25 bp, Homo sapien
gagttgtcatatgcctgcccaatgg

SEQ ID NO: 3404949 - DNA, 25 bp, Homo sapien
ctgaggactgaagaccagatcaagg

SEQ ID NO: 3404950 - DNA, 25 bp, Homo sapien
tgtctcccggagttgtcatatgcct

SEQ ID NO: 3404951 - DNA, 25 bp, Homo sapien
tgagagctgactgcgtggtcaggag

SEQ ID NO: 3404952 - DNA, 25 bp, Homo sapien
gtgagagctgactgcgtggtcagga

SEQ ID NO: 3404953 - DNA, 25 bp, Homo sapien
aggcagccaggcctccttatggcca

SEQ ID NO: 3404954 - DNA, 25 bp, Homo sapien
agccaggcctccttatggccaaaga

SEQ ID NO: 3404955 - DNA, 25 bp, Homo sapien
aaccctttgcacgtaggggctccat

SEQ ID NO: 3404956 - DNA, 25 bp, Homo sapien
aggcctccttatggccaaagacatt

SEQ ID NO: 3404957 - DNA, 25 bp, Homo sapien
tgggtccttttaggcctgggctctg

SEQ ID NO: 3404958 - DNA, 25 bp, Homo sapien
tgcattttctgcaggacaattcccc

SEQ ID NO: 3404959 - DNA, 25 bp, Homo sapien
tgtgcctgctctgtgttggcagctg

SEQ ID NO: 3404960 - DNA, 25 bp, Homo sapien
ccttgccggcatcagcttctcccat

SEQ ID NO: 3404961 - DNA, 25 bp, Homo sapien
tccttgccggcatcagcttctccca

SEQ ID NO: 3404962 - DNA, 25 bp, Homo sapien
gggaatgaacatgtcaggattcatc

SEQ ID NO: 3404963 - DNA, 25 bp, Homo sapien
ttgggaatgaacatgtcaggattca

SEQ ID NO: 3404964 - DNA, 25 bp, Homo sapien
ctttgggaatgaacatgtcaggatt

SEQ ID NO: 3404965 - DNA, 25 bp, Homo sapien
tttgggaatgaacatgtcaggattc

SEQ ID NO: 3404966 - DNA, 25 bp, Homo sapien
acctcttttgtctcccatttgccgt

SEQ ID NO: 3404967 - DNA, 25 bp, Homo sapien
atttgccgtcccttctcaggctcca

SEQ ID NO: 3404968 - DNA, 25 bp, Homo sapien
cttgctggctggagattattttcag

SEQ ID NO: 3404969 - DNA, 25 bp, Homo sapien
tggcagcgaccaggaccatctttgc

SEQ ID NO: 3404970 - DNA, 25 bp, Homo sapien
ccagcataggactggcctgggcgca

SEQ ID NO: 3404971 - DNA, 25 bp, Homo sapien
gccagcataggactggcctgggcgc

SEQ ID NO: 3404972 - DNA, 25 bp, Homo sapien
cagcataggactggcctgggcgcac

SEQ ID NO: 3404973 - DNA, 25 bp, Homo sapien
catggtgttttggagcagagtctta

SEQ ID NO: 3404974 - DNA, 25 bp, Homo sapien
gtggagcacagactccatggtgttt

SEQ ID NO: 3404975 - DNA, 25 bp, Homo sapien
accatccccagggtaaagctcaggg

SEQ ID NO: 3404976 - DNA, 25 bp, Homo sapien
cagagaagacttgtatcaccatccc

SEQ ID NO: 3404977 - DNA, 25 bp, Homo sapien
cttctctgctcctcatccaaggagg

SEQ ID NO: 3404978 - DNA, 25 bp, Homo sapien
tgcccggatccttctctgctcctca

SEQ ID NO: 3404979 - DNA, 25 bp, Homo sapien
tctctgctcctcatccaaggaggtc

SEQ ID NO: 3404980 - DNA, 25 bp, Homo sapien
ctgctcctcatccaaggaggtctgg

SEQ ID NO: 3404981 - DNA, 25 bp, Homo sapien
tggggtgtgtgatgtcattaatagt

SEQ ID NO: 3404982 - DNA, 25 bp, Homo sapien
ttggggtgtgtgatgtcattaatag

SEQ ID NO: 3404983 - DNA, 25 bp, Homo sapien
tgtcattaatagttaaccagagtcc

SEQ ID NO: 3404984 - DNA, 25 bp, Homo sapien
ggggtgtgtgatgtcattaatagtt

SEQ ID NO: 3404985 - DNA, 25 bp, Homo sapien
caacggccgtcacatgctcatttaa

SEQ ID NO: 3404986 - DNA, 25 bp, Homo sapien
atgtagacactggcagtactgggct

SEQ ID NO: 3404987 - DNA, 25 bp, Homo sapien
tgctcatttaatgccatgtagacac

SEQ ID NO: 3404988 - DNA, 25 bp, Homo sapien
agggaagccaacggccgtcacatgc

SEQ ID NO: 3404989 - DNA, 25 bp, Homo sapien
ccatcaaagctcatttggatcttta

SEQ ID NO: 3404990 - DNA, 25 bp, Homo sapien
acttctctccatcaaagctcatttg

SEQ ID NO: 3404991 - DNA, 25 bp, Homo sapien
tttttctaccacaacccacactcac

SEQ ID NO: 3404992 - DNA, 25 bp, Homo sapien
gcatctgttaagttagggttccaaa

SEQ ID NO: 3404993 - DNA, 25 bp, Homo sapien
ctgtatccaggacaaccgacagctc

SEQ ID NO: 3404994 - DNA, 25 bp, Homo sapien
ctgctgtatccaggacaaccgacag

SEQ ID NO: 3404995 - DNA, 25 bp, Homo sapien
tgctgtatccaggacaaccgacagc

SEQ ID NO: 3404996 - DNA, 25 bp, Homo sapien
gctgtatccaggacaaccgacagct

SEQ ID NO: 3404997 - DNA, 25 bp, Homo sapien
caggtggggcctgtacccatttctc

SEQ ID NO: 3404998 - DNA, 25 bp, Homo sapien
tgtacccatttctcagttgaggtaa

SEQ ID NO: 3404999 - DNA, 25 bp, Homo sapien
acccatttctcagttgaggtaagtt

SEQ ID NO: 3405000 - DNA, 25 bp, Homo sapien
tgcaggtggggcctgtacccatttc

SEQ ID NO: 3405001 - DNA, 25 bp, Homo sapien
tcaagactgggagtgtcttgagggc

SEQ ID NO: 3405002 - DNA, 25 bp, Homo sapien
caagactgggagtgtcttgagggca

SEQ ID NO: 3405003 - DNA, 25 bp, Homo sapien
aatgacacccttgtggcggttgggc

SEQ ID NO: 3405004 - DNA, 25 bp, Homo sapien
ctgggtgcaatgacacccttgtggc

SEQ ID NO: 3405005 - DNA, 25 bp, Homo sapien
agcacatgccaagacgccgtgcgtc

SEQ ID NO: 3405006 - DNA, 25 bp, Homo sapien
gtggagccagcacatgccaagacgc

SEQ ID NO: 3405007 - DNA, 25 bp, Homo sapien
aggtgaagaccgcgggagaaattgg

SEQ ID NO: 3405008 - DNA, 25 bp, Homo sapien
gaggtaggtgaagaccgcgggagaa

SEQ ID NO: 3405009 - DNA, 25 bp, Homo sapien
cagaggtaggtgaagaccgcgggag

SEQ ID NO: 3405010 - DNA, 25 bp, Homo sapien
ctcttcatccaagcagaggtaggtg

SEQ ID NO: 3405011 - DNA, 25 bp, Homo sapien
cacaatctgggacaaaaacccttca

SEQ ID NO: 3405012 - DNA, 25 bp, Homo sapien
aattctatgtaaactggatagaggc

SEQ ID NO: 3405013 - DNA, 25 bp, Homo sapien
ctcagggatgttggcaaggaattct

SEQ ID NO: 3405014 - DNA, 25 bp, Homo sapien
aaggttggagaataggcataaagga

SEQ ID NO: 3405015 - DNA, 25 bp, Homo sapien
gtgaatggggacgagccaccagctt

SEQ ID NO: 3405016 - DNA, 25 bp, Homo sapien
ctccttgaagcagtgaatggggacg

SEQ ID NO: 3405017 - DNA, 25 bp, Homo sapien
gcacattaagcttgggcgctattct

SEQ ID NO: 3405018 - DNA, 25 bp, Homo sapien
aagcacattaagcttgggcgctatt

SEQ ID NO: 3405019 - DNA, 25 bp, Homo sapien
gtgatggccgcagcatcaggaggac

SEQ ID NO: 3405020 - DNA, 25 bp, Homo sapien
ttcctcgtgatggccgcagcatcag

SEQ ID NO: 3405021 - DNA, 25 bp, Homo sapien
taatccggggatttcctcgtgatgg

SEQ ID NO: 3405022 - DNA, 25 bp, Homo sapien
aatccggggatttcctcgtgatggc

SEQ ID NO: 3405023 - DNA, 25 bp, Homo sapien
tagaggacagggtgactattttcat

SEQ ID NO: 3405024 - DNA, 25 bp, Homo sapien
tttagaggacagggtgactattttc

SEQ ID NO: 3405025 - DNA, 25 bp, Homo sapien
ttagaggacagggtgactattttca

SEQ ID NO: 3405026 - DNA, 25 bp, Homo sapien
actgtgtacagattactcagctgcc

SEQ ID NO: 3405027 - DNA, 25 bp, Homo sapien
gaagtcctgggctgtataactgtgt

SEQ ID NO: 3405028 - DNA, 25 bp, Homo sapien
agggagccctagagtgggcactgga

SEQ ID NO: 3405029 - DNA, 25 bp, Homo sapien
ggcttgcaagtgatgtcaggtcaga

SEQ ID NO: 3405030 - DNA, 25 bp, Homo sapien
agcccatgggcaatgctggcaagga

SEQ ID NO: 3405031 - DNA, 25 bp, Homo sapien
aatgctggcaaggaggcctccagag

SEQ ID NO: 3405032 - DNA, 25 bp, Homo sapien
ggcaatgctggcaaggaggcctcca

SEQ ID NO: 3405033 - DNA, 25 bp, Homo sapien
tccagagcagcccatgggcaatgct

SEQ ID NO: 3405034 - DNA, 25 bp, Homo sapien
gatctcattgttaacatccacattc

SEQ ID NO: 3405035 - DNA, 25 bp, Homo sapien
tttgatctcattgttaacatccaca

SEQ ID NO: 3405036 - DNA, 25 bp, Homo sapien
ttgatctcattgttaacatccacat

SEQ ID NO: 3405037 - DNA, 25 bp, Homo sapien
tagtatctcatagagaacacttcgt

SEQ ID NO: 3405038 - DNA, 25 bp, Homo sapien
gtttctgtcaccagtgattacccta

SEQ ID NO: 3405039 - DNA, 25 bp, Homo sapien
tcatccaaaaatggtgagcttcaag

SEQ ID NO: 3405040 - DNA, 25 bp, Homo sapien
ccttcaaccctggactttgacatga

SEQ ID NO: 3405041 - DNA, 25 bp, Homo sapien
ggactgcagctggaagacttgaaga

SEQ ID NO: 3405042 - DNA, 25 bp, Homo sapien
aggtcacagcagaatggtttcatga

SEQ ID NO: 3405043 - DNA, 25 bp, Homo sapien
cactcagaagttatagggcatcaat

SEQ ID NO: 3405044 - DNA, 25 bp, Homo sapien
ccctcatatctggtggttggtgtgg

SEQ ID NO: 3405045 - DNA, 25 bp, Homo sapien
tgccatcctggtaccccggggctgc

SEQ ID NO: 3405046 - DNA, 25 bp, Homo sapien
ccatcctggtaccccggggctgcct

SEQ ID NO: 3405047 - DNA, 25 bp, Homo sapien
gccatcctggtaccccggggctgcc

SEQ ID NO: 3405048 - DNA, 25 bp, Homo sapien
gctccaatgctaagcccctttgcca

SEQ ID NO: 3405049 - DNA, 25 bp, Homo sapien
aatgctaagcccctttgccactgag

SEQ ID NO: 3405050 - DNA, 25 bp, Homo sapien
gtaaagtcagggcatttagtgggca

SEQ ID NO: 3405051 - DNA, 25 bp, Homo sapien
tgcttgttgtaaagtcagggcattt

SEQ ID NO: 3405052 - DNA, 25 bp, Homo sapien
taggtagcactatgttggtgtagct

SEQ ID NO: 3405053 - DNA, 25 bp, Homo sapien
taaacttcttgaactgagccccagt

SEQ ID NO: 3405054 - DNA, 25 bp, Homo sapien
gaacaagcttgatgtgtgcaaaggt

SEQ ID NO: 3405055 - DNA, 25 bp, Homo sapien
cttgatgtgtgcaaaggttccaggc

SEQ ID NO: 3405056 - DNA, 25 bp, Homo sapien
gcccttctgggctgcctgataggcg

SEQ ID NO: 3405057 - DNA, 25 bp, Homo sapien
cagccagagcaggtcttaatccaat

SEQ ID NO: 3405058 - DNA, 25 bp, Homo sapien
agctttgcaccacgggtgacagcca

SEQ ID NO: 3405059 - DNA, 25 bp, Homo sapien
gcctgataggcgagctttgcaccac

SEQ ID NO: 3405060 - DNA, 25 bp, Homo sapien
ccaggccctgaagtcaggtgcaatg

SEQ ID NO: 3405061 - DNA, 25 bp, Homo sapien
caggccctgaagtcaggtgcaatgc

SEQ ID NO: 3405062 - DNA, 25 bp, Homo sapien
aggccctgaagtcaggtgcaatgct

SEQ ID NO: 3405063 - DNA, 25 bp, Homo sapien
gaatgaatgaagaagccccccaaca

SEQ ID NO: 3405064 - DNA, 25 bp, Homo sapien
atgaatgaagaagccccccaacaat

SEQ ID NO: 3405065 - DNA, 25 bp, Homo sapien
ttccttcagggagtgatacccccag

SEQ ID NO: 3405066 - DNA, 25 bp, Homo sapien
gaagaagccccccaacaatctgttg

SEQ ID NO: 3405067 - DNA, 25 bp, Homo sapien
tggatcatttcacttgctaagattg

SEQ ID NO: 3405068 - DNA, 25 bp, Homo sapien
gccatcatgctctggatcatttcac

SEQ ID NO: 3405069 - DNA, 25 bp, Homo sapien
ttggagagttctgccatcatgctct

SEQ ID NO: 3405070 - DNA, 25 bp, Homo sapien
gatcatttcacttgctaagattgct

SEQ ID NO: 3405071 - DNA, 25 bp, Homo sapien
ctatagatccaggtaatagttccca

SEQ ID NO: 3405072 - DNA, 25 bp, Homo sapien
gtgtaaacttgacattgtaaggaaa

SEQ ID NO: 3405073 - DNA, 25 bp, Homo sapien
cctgctttggatccaggtggttgta

SEQ ID NO: 3405074 - DNA, 25 bp, Homo sapien
gtaaacttgacattgtaaggaaaca

SEQ ID NO: 3405075 - DNA, 25 bp, Homo sapien
gctttggatccaggtggttgtaaac

SEQ ID NO: 3405076 - DNA, 25 bp, Homo sapien
taggtctcctaaacaccactcatag

SEQ ID NO: 3405077 - DNA, 25 bp, Homo sapien
aaggggaggctttatcatcagctgc

SEQ ID NO: 3405078 - DNA, 25 bp, Homo sapien
ttgggtttctggagaacttgttgga

SEQ ID NO: 3405079 - DNA, 25 bp, Homo sapien
gaacttgttggagaatgagtgtcat

SEQ ID NO: 3405080 - DNA, 25 bp, Homo sapien
cctgcctgcctgtagttgcgtcttc

SEQ ID NO: 3405081 - DNA, 25 bp, Homo sapien
gccacctgctgatgacttctgattg

SEQ ID NO: 3405082 - DNA, 25 bp, Homo sapien
gtagttgcgtcttctgctccttgga

SEQ ID NO: 3405083 - DNA, 25 bp, Homo sapien
cctgcctgtagttgcgtcttctgct

SEQ ID NO: 3405084 - DNA, 25 bp, Homo sapien
gtgcagccaggagactaatgcccat

SEQ ID NO: 3405085 - DNA, 25 bp, Homo sapien
gggagtcgagctgcagtcatcagca

SEQ ID NO: 3405086 - DNA, 25 bp, Homo sapien
gtggtgcagccaggagactaatgcc

SEQ ID NO: 3405087 - DNA, 25 bp, Homo sapien
cagggagtcgagctgcagtcatcag

SEQ ID NO: 3405088 - DNA, 25 bp, Homo sapien
cagaccagcattggctctcctgttt

SEQ ID NO: 3405089 - DNA, 25 bp, Homo sapien
tgtttctttgtcacgatgccatcac

SEQ ID NO: 3405090 - DNA, 25 bp, Homo sapien
cagcaactctaactctacagaccag

SEQ ID NO: 3405091 - DNA, 25 bp, Homo sapien
gttttgttccaagagtccacatcct

SEQ ID NO: 3405092 - DNA, 25 bp, Homo sapien
caaaggagtgtctggtgattaggca

SEQ ID NO: 3405093 - DNA, 25 bp, Homo sapien
caatctagcaggttgctccaggcag

SEQ ID NO: 3405094 - DNA, 25 bp, Homo sapien
taactggtacaggtttactggtgtc

SEQ ID NO: 3405095 - DNA, 25 bp, Homo sapien
cagagtagctggaggtaagaatgac

SEQ ID NO: 3405096 - DNA, 25 bp, Homo sapien
gcgaggcgacttctcaagcttttga

SEQ ID NO: 3405097 - DNA, 25 bp, Homo sapien
ggaccacttgtctctaatttatgaa

SEQ ID NO: 3405098 - DNA, 25 bp, Homo sapien
cacatggatgttgggtctctgtgcg

SEQ ID NO: 3405099 - DNA, 25 bp, Homo sapien
gaggatacaaacaagaggaccactt

SEQ ID NO: 3405100 - DNA, 25 bp, Homo sapien
tcagactctatgaggtgcatcgagg

SEQ ID NO: 3405101 - DNA, 25 bp, Homo sapien
tcggtgtggttggaagaagactttc

SEQ ID NO: 3405102 - DNA, 25 bp, Homo sapien
ccactttcgctttgagtttcaggta

SEQ ID NO: 3405103 - DNA, 25 bp, Homo sapien
tgcatcgaggtcaggaatgctccct

SEQ ID NO: 3405104 - DNA, 25 bp, Homo sapien
acatttccaggagggctggacttcc

SEQ ID NO: 3405105 - DNA, 25 bp, Homo sapien
tgggagagcggggacatttccagga

SEQ ID NO: 3405106 - DNA, 25 bp, Homo sapien
caaggacacttggccagccccaggc

SEQ ID NO: 3405107 - DNA, 25 bp, Homo sapien
gcggggacatttccaggagggctgg

SEQ ID NO: 3405108 - DNA, 25 bp, Homo sapien
agacaaagcccatttctggcggaaa

SEQ ID NO: 3405109 - DNA, 25 bp, Homo sapien
caaagcccatttctggcggaaaagc

SEQ ID NO: 3405110 - DNA, 25 bp, Homo sapien
tttctggcggaaaagcagtgccttt

SEQ ID NO: 3405111 - DNA, 25 bp, Homo sapien
gcggaaaagcagtgcctttgaccct

SEQ ID NO: 3405112 - DNA, 25 bp, Homo sapien
ggtagaccaattgctctccaggtgc

SEQ ID NO: 3405113 - DNA, 25 bp, Homo sapien
gacattggagtgctctgccctggag

SEQ ID NO: 3405114 - DNA, 25 bp, Homo sapien
gacatccatgggtatcatgtggaca

SEQ ID NO: 3405115 - DNA, 25 bp, Homo sapien
tgtccctactggaggtgctcagaaa

SEQ ID NO: 3405116 - DNA, 25 bp, Homo sapien
agcagtcccatgtccacacccactt

SEQ ID NO: 3405117 - DNA, 25 bp, Homo sapien
cagcagtcccatgtccacacccact

SEQ ID NO: 3405118 - DNA, 25 bp, Homo sapien
gcagcagtcccatgtccacacccac

SEQ ID NO: 3405119 - DNA, 25 bp, Homo sapien
cttggcaagctctggactggaccca

SEQ ID NO: 3405120 - DNA, 25 bp, Homo sapien
ttggcaagctctggactggacccat

SEQ ID NO: 3405121 - DNA, 25 bp, Homo sapien
gctggatcacagatgtggctcggaa

SEQ ID NO: 3405122 - DNA, 25 bp, Homo sapien
ttctgagctggatcacagatgtggc

SEQ ID NO: 3405123 - DNA, 25 bp, Homo sapien
cacattctgagctggatcacagatg

SEQ ID NO: 3405124 - DNA, 25 bp, Homo sapien
gatcacagatgtggctcggaactgc

SEQ ID NO: 3405125 - DNA, 25 bp, Homo sapien
gggaacacgccagaagggcctccag

SEQ ID NO: 3405126 - DNA, 25 bp, Homo sapien
ctgccagcagggaacacgccagaag

SEQ ID NO: 3405127 - DNA, 25 bp, Homo sapien
gtgagcccgtgtgggcaagagggag

SEQ ID NO: 3405128 - DNA, 25 bp, Homo sapien
ggtggtgagcccgtgtgggcaagag

SEQ ID NO: 3405129 - DNA, 25 bp, Homo sapien
ttagtatctgccatgtgcgtgttac

SEQ ID NO: 3405130 - DNA, 25 bp, Homo sapien
tatttacacatttatgtcccttgct

SEQ ID NO: 3405131 - DNA, 25 bp, Homo sapien
tgtgaagtacgtgctattacctccc

SEQ ID NO: 3405132 - DNA, 25 bp, Homo sapien
aaggttgctcttgtggtctaactga

SEQ ID NO: 3405133 - DNA, 25 bp, Homo sapien
tagcctagcagaaggactggtgcca

SEQ ID NO: 3405134 - DNA, 25 bp, Homo sapien
catcttgagaaaagcggtggcccaa

SEQ ID NO: 3405135 - DNA, 25 bp, Homo sapien
agcaatgaccaagggggagtcctgt

SEQ ID NO: 3405136 - DNA, 25 bp, Homo sapien
tcctgtggtggcgtcagcattagcc

SEQ ID NO: 3405137 - DNA, 25 bp, Homo sapien
taggtgcttggtaaaagagaacttc

SEQ ID NO: 3405138 - DNA, 25 bp, Homo sapien
tccagggtgtcaatgcaaatgaaat

SEQ ID NO: 3405139 - DNA, 25 bp, Homo sapien
aggtgcttggtaaaagagaacttct

SEQ ID NO: 3405140 - DNA, 25 bp, Homo sapien
cttccagggtgtcaatgcaaatgaa

SEQ ID NO: 3405141 - DNA, 25 bp, Homo sapien
gtgcccccagtactgacaatgccat

SEQ ID NO: 3405142 - DNA, 25 bp, Homo sapien
caatgccatctgtccttagagtgga

SEQ ID NO: 3405143 - DNA, 25 bp, Homo sapien
tttgtgccctctcacagtgtagccc

SEQ ID NO: 3405144 - DNA, 25 bp, Homo sapien
catctttttccacgcactctttatg

SEQ ID NO: 3405145 - DNA, 25 bp, Homo sapien
gcccgcgggctccattctctcccca

SEQ ID NO: 3405146 - DNA, 25 bp, Homo sapien
attctctccccaggcaatagtctct

SEQ ID NO: 3405147 - DNA, 25 bp, Homo sapien
tcctctccgacttctctccctccaa

SEQ ID NO: 3405148 - DNA, 25 bp, Homo sapien
tagtctctctcctctccgacttctc

SEQ ID NO: 3405149 - DNA, 25 bp, Homo sapien
aaaggcagaaaacactttcctccag

SEQ ID NO: 3405150 - DNA, 25 bp, Homo sapien
ctgtctggcaaaaaggcagaaaaca

SEQ ID NO: 3405151 - DNA, 25 bp, Homo sapien
aaggcagaaaacactttcctccagc

SEQ ID NO: 3405152 - DNA, 25 bp, Homo sapien
ctggcaaaaaggcagaaaacacttt

SEQ ID NO: 3405153 - DNA, 25 bp, Homo sapien
aacaacatcagcagtcttaatgtct

SEQ ID NO: 3405154 - DNA, 25 bp, Homo sapien
ctctttctcatattcgggtccctgg

SEQ ID NO: 3405155 - DNA, 25 bp, Homo sapien
tatcttgttgatcaaaatagttgtt

SEQ ID NO: 3405156 - DNA, 25 bp, Homo sapien
aacatcagcagtcttaatgtctttc

SEQ ID NO: 3405157 - DNA, 25 bp, Homo sapien
tgcttagtgagtgggtagccctcct

SEQ ID NO: 3405158 - DNA, 25 bp, Homo sapien
gctagcaggtaccaccaggagactg

SEQ ID NO: 3405159 - DNA, 25 bp, Homo sapien
tcctgcttagtgagtgggtagccct

SEQ ID NO: 3405160 - DNA, 25 bp, Homo sapien
agtcatttgtaaggcgtgccagcta

SEQ ID NO: 3405161 - DNA, 25 bp, Homo sapien
cagagtgatggtctcacccatctcc

SEQ ID NO: 3405162 - DNA, 25 bp, Homo sapien
gtgatggtctcacccatctcccctg

SEQ ID NO: 3405163 - DNA, 25 bp, Homo sapien
gcagagtgatggtctcacccatctc

SEQ ID NO: 3405164 - DNA, 25 bp, Homo sapien
gagtgatggtctcacccatctcccc

SEQ ID NO: 3405165 - DNA, 25 bp, Homo sapien
ctgttcagccagtgaagagagtctg

SEQ ID NO: 3405166 - DNA, 25 bp, Homo sapien
tgaagagagtctgagttaagctctc

SEQ ID NO: 3405167 - DNA, 25 bp, Homo sapien
ccagtgaagagagtctgagttaagc

SEQ ID NO: 3405168 - DNA, 25 bp, Homo sapien
gagtctgagttaagctctcttattc

SEQ ID NO: 3405169 - DNA, 25 bp, Homo sapien
caaaagcatgtaaggggcaggcaat

SEQ ID NO: 3405170 - DNA, 25 bp, Homo sapien
tgagcaaaagcatgtaaggggcagg

SEQ ID NO: 3405171 - DNA, 25 bp, Homo sapien
ggaccctcagtggagcatgtgtggt

SEQ ID NO: 3405172 - DNA, 25 bp, Homo sapien
accctcagtggagcatgtgtggtcc

SEQ ID NO: 3405173 - DNA, 25 bp, Homo sapien
tcttctctgcacccttgatacgcat

SEQ ID NO: 3405174 - DNA, 25 bp, Homo sapien
tcttcttctctgcacccttgatacg

SEQ ID NO: 3405175 - DNA, 25 bp, Homo sapien
cccctcttcttctctgcacccttga

SEQ ID NO: 3405176 - DNA, 25 bp, Homo sapien
cctcttcttctctgcacccttgata

SEQ ID NO: 3405177 - DNA, 25 bp, Homo sapien
gaatccctaatgtcagttccacttt

SEQ ID NO: 3405178 - DNA, 25 bp, Homo sapien
tctctggagagcctgcattggggga

SEQ ID NO: 3405179 - DNA, 25 bp, Homo sapien
aaatgcttctgaatccctaatgtca

SEQ ID NO: 3405180 - DNA, 25 bp, Homo sapien
aatgtcagttccactttctctggag

SEQ ID NO: 3405181 - DNA, 25 bp, Homo sapien
gggaaaagagcatggatgaaggtgg

SEQ ID NO: 3405182 - DNA, 25 bp, Homo sapien
ccaagtctgctgcagtagcctggtt

SEQ ID NO: 3405183 - DNA, 25 bp, Homo sapien
aagtctgctgcagtagcctggttga

SEQ ID NO: 3405184 - DNA, 25 bp, Homo sapien
ggggaaaagagcatggatgaaggtg

SEQ ID NO: 3405185 - DNA, 25 bp, Homo sapien
tctatttccactgaatatggttctc

SEQ ID NO: 3405186 - DNA, 25 bp, Homo sapien
ctgccaaatcttcaaagtcttttct

SEQ ID NO: 3405187 - DNA, 25 bp, Homo sapien
tctatttctatttccactgaatatg

SEQ ID NO: 3405188 - DNA, 25 bp, Homo sapien
gccaaatcttcaaagtcttttctat

SEQ ID NO: 3405189 - DNA, 25 bp, Homo sapien
aaatgccgtggccattcttggggtc

SEQ ID NO: 3405190 - DNA, 25 bp, Homo sapien
gtgtgaaatgccgtggccattcttg

SEQ ID NO: 3405191 - DNA, 25 bp, Homo sapien
atgccgtggccattcttggggtctg

SEQ ID NO: 3405192 - DNA, 25 bp, Homo sapien
gtgaaatgccgtggccattcttggg

SEQ ID NO: 3405193 - DNA, 25 bp, Homo sapien
ctttgcgagatcctggggtaacggt

SEQ ID NO: 3405194 - DNA, 25 bp, Homo sapien
agtcaattctcgctttgcgagatcc

SEQ ID NO: 3405195 - DNA, 25 bp, Homo sapien
ttattcttttccgaagtagattcag

SEQ ID NO: 3405196 - DNA, 25 bp, Homo sapien
ttcttttccgaagtagattcagcca

SEQ ID NO: 3405197 - DNA, 25 bp, Homo sapien
gcccagtgaatgatgagccttggaa

SEQ ID NO: 3405198 - DNA, 25 bp, Homo sapien
agccttggaagcgtgatggcagtta

SEQ ID NO: 3405199 - DNA, 25 bp, Homo sapien
tcagtagcccagtgaatgatgagcc

SEQ ID NO: 3405200 - DNA, 25 bp, Homo sapien
gccttggaagcgtgatggcagttac

SEQ ID NO: 3405201 - DNA, 25 bp, Homo sapien
tgggtgtaggctgacgctaccgtcc

SEQ ID NO: 3405202 - DNA, 25 bp, Homo sapien
ggtgtaggctgacgctaccgtcccc

SEQ ID NO: 3405203 - DNA, 25 bp, Homo sapien
tgtgggtgtaggctgacgctaccgt

SEQ ID NO: 3405204 - DNA, 25 bp, Homo sapien
gcccaggccctagcggtgagaccag

SEQ ID NO: 3405205 - DNA, 25 bp, Homo sapien
tggaagtgcttctctactctggtgc

SEQ ID NO: 3405206 - DNA, 25 bp, Homo sapien
cacaattaactagcccgtgacgcag

SEQ ID NO: 3405207 - DNA, 25 bp, Homo sapien
aggtgcctgctatgacgcctgacta

SEQ ID NO: 3405208 - DNA, 25 bp, Homo sapien
gacagtggaccaaaacgcttcctct

SEQ ID NO: 3405209 - DNA, 25 bp, Homo sapien
tgggaacacatctccgttcaacttg

SEQ ID NO: 3405210 - DNA, 25 bp, Homo sapien
gtcagcttctgaggcatatgaatgg

SEQ ID NO: 3405211 - DNA, 25 bp, Homo sapien
aaaaccgagggcagcaaatgcaggg

SEQ ID NO: 3405212 - DNA, 25 bp, Homo sapien
ttagttgggaaaaccgagggcagca

SEQ ID NO: 3405213 - DNA, 25 bp, Homo sapien
atgataaattgccagggaggccaag

SEQ ID NO: 3405214 - DNA, 25 bp, Homo sapien
tgggtggtgctcaggttaaagctcc

SEQ ID NO: 3405215 - DNA, 25 bp, Homo sapien
taccgtcaccatatctctagtttcc

SEQ ID NO: 3405216 - DNA, 25 bp, Homo sapien
tcagtatgccagagtctaaggtgac

SEQ ID NO: 3405217 - DNA, 25 bp, Homo sapien
gtgaattcataagtcccaaaatttg

SEQ ID NO: 3405218 - DNA, 25 bp, Homo sapien
tgttgctgtgaattcataagtccca

SEQ ID NO: 3405219 - DNA, 25 bp, Homo sapien
gaattcataagtcccaaaatttgca

SEQ ID NO: 3405220 - DNA, 25 bp, Homo sapien
gctgtgaattcataagtcccaaaat

SEQ ID NO: 3405221 - DNA, 25 bp, Homo sapien
ctgtcacagtaagaggtgggtgagc

SEQ ID NO: 3405222 - DNA, 25 bp, Homo sapien
gtgcccaactcatgatttatccagg

SEQ ID NO: 3405223 - DNA, 25 bp, Homo sapien
gacaatactcctgcttcattacagg

SEQ ID NO: 3405224 - DNA, 25 bp, Homo sapien
ctcggcctggtatgcagagaagacg

SEQ ID NO: 3405225 - DNA, 25 bp, Homo sapien
tttatccaggtcacaccagtctggt

SEQ ID NO: 3405226 - DNA, 25 bp, Homo sapien
cagggcagacaataggcacctttca

SEQ ID NO: 3405227 - DNA, 25 bp, Homo sapien
tcaaggacgaggcaagtaaggccca

SEQ ID NO: 3405228 - DNA, 25 bp, Homo sapien
tctctagcagctgatgggcgacagt

SEQ ID NO: 3405229 - DNA, 25 bp, Homo sapien
cgacagtctatagggagcaagagca

SEQ ID NO: 3405230 - DNA, 25 bp, Homo sapien
ctaggtctgggttcctgtccccagg

SEQ ID NO: 3405231 - DNA, 25 bp, Homo sapien
ctcaaaaactgaactcgctggcacg

SEQ ID NO: 3405232 - DNA, 25 bp, Homo sapien
aactcgctggcacggtggtgagcac

SEQ ID NO: 3405233 - DNA, 25 bp, Homo sapien
tctgagcaacgcagcgagatcctgt

SEQ ID NO: 3405234 - DNA, 25 bp, Homo sapien
cagtctgagcaacgcagcgagatcc

SEQ ID NO: 3405235 - DNA, 25 bp, Homo sapien
gggagatggtacttctaggttcaca

SEQ ID NO: 3405236 - DNA, 25 bp, Homo sapien
tcatcgccgtgcagaggacttgtcc

SEQ ID NO: 3405237 - DNA, 25 bp, Homo sapien
caaagccgggccacagactgtgtgt

SEQ ID NO: 3405238 - DNA, 25 bp, Homo sapien
tttgctcagagaccaaggatcgtgc

SEQ ID NO: 3405239 - DNA, 25 bp, Homo sapien
ggataagaaggtgaaaccggcatgt

SEQ ID NO: 3405240 - DNA, 25 bp, Homo sapien
ggccaaatcaaaggaagacgttgag

SEQ ID NO: 3405241 - DNA, 25 bp, Homo sapien
ggccctactgagaacaacttggtgt

SEQ ID NO: 3405242 - DNA, 25 bp, Homo sapien
aggattctggtgacacctggaaacg

SEQ ID NO: 3405243 - DNA, 25 bp, Homo sapien
ctgagcactgccccaagctccctgc

SEQ ID NO: 3405244 - DNA, 25 bp, Homo sapien
ccagcagtctgggagtgagtcgttt

SEQ ID NO: 3405245 - DNA, 25 bp, Homo sapien
tctgggagtgagtcgttttgtctta

SEQ ID NO: 3405246 - DNA, 25 bp, Homo sapien
attctgggggcgaagtccagcagtc

SEQ ID NO: 3405247 - DNA, 25 bp, Homo sapien
gggggcgaagtccagcagtctggga

SEQ ID NO: 3405248 - DNA, 25 bp, Homo sapien
acctcaagttttacaggggccagct

SEQ ID NO: 3405249 - DNA, 25 bp, Homo sapien
tctccacgctcttctctacctcaag

SEQ ID NO: 3405250 - DNA, 25 bp, Homo sapien
cctcaagttttacaggggccagctc

SEQ ID NO: 3405251 - DNA, 25 bp, Homo sapien
cacgctcttctctacctcaagtttt

SEQ ID NO: 3405252 - DNA, 25 bp, Homo sapien
tggctctgagaccgtaggtttcccc

SEQ ID NO: 3405253 - DNA, 25 bp, Homo sapien
gctgctttaccctgtgggcgtgtga

SEQ ID NO: 3405254 - DNA, 25 bp, Homo sapien
tgcacttgacccacgtttgcacact

SEQ ID NO: 3405255 - DNA, 25 bp, Homo sapien
cctgtgggcgtgtgagagtgggtcc

SEQ ID NO: 3405256 - DNA, 25 bp, Homo sapien
ttggagcacgatggcgtccttgttc

SEQ ID NO: 3405257 - DNA, 25 bp, Homo sapien
cattggagcacgatggcgtccttgt

SEQ ID NO: 3405258 - DNA, 25 bp, Homo sapien
ggagcacgatggcgtccttgttcgg

SEQ ID NO: 3405259 - DNA, 25 bp, Homo sapien
tcattggagcacgatggcgtccttg

SEQ ID NO: 3405260 - DNA, 25 bp, Homo sapien
catctgtattttttcgtctggtgta

SEQ ID NO: 3405261 - DNA, 25 bp, Homo sapien
tattttttcgtctggtgtatgggct

SEQ ID NO: 3405262 - DNA, 25 bp, Homo sapien
ttttcgtctggtgtatgggcttgtt

SEQ ID NO: 3405263 - DNA, 25 bp, Homo sapien
tcgtctggtgtatgggcttgttttt

SEQ ID NO: 3405264 - DNA, 25 bp, Homo sapien
ttctgaccgcagtccccataaggaa

SEQ ID NO: 3405265 - DNA, 25 bp, Homo sapien
aaacagggcagggatcactggctgt

SEQ ID NO: 3405266 - DNA, 25 bp, Homo sapien
ataactccgaagctcccctctctaa

SEQ ID NO: 3405267 - DNA, 25 bp, Homo sapien
tcccgtggctttctcagttattaaa

SEQ ID NO: 3405268 - DNA, 25 bp, Homo sapien
tcctctctaaacaggaccgtgacag

SEQ ID NO: 3405269 - DNA, 25 bp, Homo sapien
tgacagtgacagtttctgccccact

SEQ ID NO: 3405270 - DNA, 25 bp, Homo sapien
ccagggtcatagagccggtgagctg

SEQ ID NO: 3405271 - DNA, 25 bp, Homo sapien
tggtttctccgaccttcctctctaa

SEQ ID NO: 3405272 - DNA, 25 bp, Homo sapien
ctgctctgacgaagtttccattctt

SEQ ID NO: 3405273 - DNA, 25 bp, Homo sapien
ggtgcccgggtgagcagttcaccct

SEQ ID NO: 3405274 - DNA, 25 bp, Homo sapien
ctcacgtccctgctctgacgaagtt

SEQ ID NO: 3405275 - DNA, 25 bp, Homo sapien
gagggagctgggttccggtcgccag

SEQ ID NO: 3405276 - DNA, 25 bp, Homo sapien
aaagccaggtgccatggggacccag

SEQ ID NO: 3405277 - DNA, 25 bp, Homo sapien
aggagaaagccaggtgccatgggga

SEQ ID NO: 3405278 - DNA, 25 bp, Homo sapien
agaaagccaggtgccatggggaccc

SEQ ID NO: 3405279 - DNA, 25 bp, Homo sapien
ggagcaggagaaagccaggtgccat

SEQ ID NO: 3405280 - DNA, 25 bp, Homo sapien
gagacttgccctggcggctggtgac

SEQ ID NO: 3405281 - DNA, 25 bp, Homo sapien
ctggcggctggtgacaggtgggcgg

SEQ ID NO: 3405282 - DNA, 25 bp, Homo sapien
ttgccctggcggctggtgacaggtg

SEQ ID NO: 3405283 - DNA, 25 bp, Homo sapien
ctggtgacaggtgggcgggagaaga

SEQ ID NO: 3405284 - DNA, 25 bp, Homo sapien
tcggaatccgggtgggatgaatcct

SEQ ID NO: 3405285 - DNA, 25 bp, Homo sapien
catcggaatccgggtgggatgaatc

SEQ ID NO: 3405286 - DNA, 25 bp, Homo sapien
atcggaatccgggtgggatgaatcc

SEQ ID NO: 3405287 - DNA, 25 bp, Homo sapien
tcatcggaatccgggtgggatgaat

SEQ ID NO: 3405288 - DNA, 25 bp, Homo sapien
taactgtgaggctggccattcaaac

SEQ ID NO: 3405289 - DNA, 25 bp, Homo sapien
caaacttgtctttattaactgtgag

SEQ ID NO: 3405290 - DNA, 25 bp, Homo sapien
gtgaggctggccattcaaacaccag

SEQ ID NO: 3405291 - DNA, 25 bp, Homo sapien
cttgtctttattaactgtgaggctg

SEQ ID NO: 3405292 - DNA, 25 bp, Homo sapien
ccttatacatcccagggtaccagta

SEQ ID NO: 3405293 - DNA, 25 bp, Homo sapien
acgcctcatccagtcgcttttctaa

SEQ ID NO: 3405294 - DNA, 25 bp, Homo sapien
gggtaccagtaaatgtacgcctcat

SEQ ID NO: 3405295 - DNA, 25 bp, Homo sapien
ggacactggcccttatacatcccag

SEQ ID NO: 3405296 - DNA, 25 bp, Homo sapien
ctctcttgtggtacagcagagcaat

SEQ ID NO: 3405297 - DNA, 25 bp, Homo sapien
taaaatgacatggacctaggttcag

SEQ ID NO: 3405298 - DNA, 25 bp, Homo sapien
gggttcgctgctttataagctaagc

SEQ ID NO: 3405299 - DNA, 25 bp, Homo sapien
tgtggtacagcagagcaatggaaac

SEQ ID NO: 3405300 - DNA, 25 bp, Homo sapien
ggacccggcttcagttaccgcagct

SEQ ID NO: 3405301 - DNA, 25 bp, Homo sapien
gggacttggctgtatccctggcccg

SEQ ID NO: 3405302 - DNA, 25 bp, Homo sapien
gagaggcggtgatccggacggtcgt

SEQ ID NO: 3405303 - DNA, 25 bp, Homo sapien
cagctggcacgtcccgggacttggc

SEQ ID NO: 3405304 - DNA, 25 bp, Homo sapien
agcctcgccggcctgttcgcggcat

SEQ ID NO: 3405305 - DNA, 25 bp, Homo sapien
ggcaccttgccagcctcgccggcct

SEQ ID NO: 3405306 - DNA, 25 bp, Homo sapien
atcgacttcctgctttccgccccgg

SEQ ID NO: 3405307 - DNA, 25 bp, Homo sapien
ccgcgcccgcgggatcgacttcctg

SEQ ID NO: 3405308 - DNA, 25 bp, Homo sapien
tccccggccggtccagccgcatcag

SEQ ID NO: 3405309 - DNA, 25 bp, Homo sapien
ccctgcctgtgtccccgggccgcga

SEQ ID NO: 3405310 - DNA, 25 bp, Homo sapien
tttccccggccggtccagccgcatc

SEQ ID NO: 3405311 - DNA, 25 bp, Homo sapien
tgtgtccccgggccgcgaaggcgac

SEQ ID NO: 3405312 - DNA, 25 bp, Homo sapien
tcacttgtgctctccgcaaggaagc

SEQ ID NO: 3405313 - DNA, 25 bp, Homo sapien
ccgacttggctaggcttggctcgca

SEQ ID NO: 3405314 - DNA, 25 bp, Homo sapien
tcacatgtgggctggcctaaaggcc

SEQ ID NO: 3405315 - DNA, 25 bp, Homo sapien
tgtgctcctgtcgaggtcctctggg

SEQ ID NO: 3405316 - DNA, 25 bp, Homo sapien
ggtcagcgccatgtgcaggatcctg

SEQ ID NO: 3405317 - DNA, 25 bp, Homo sapien
cacaccgacgtacttgaggcagagg

SEQ ID NO: 3405318 - DNA, 25 bp, Homo sapien
gagtgagcggcccacattgtagaag

SEQ ID NO: 3405319 - DNA, 25 bp, Homo sapien
tgatcatgccgatgaagaccaccga

SEQ ID NO: 3405320 - DNA, 25 bp, Homo sapien
tagtacaaggtgctgtgagagcctg

SEQ ID NO: 3405321 - DNA, 25 bp, Homo sapien
tccttgttcatgtcctgtgccagaa

SEQ ID NO: 3405322 - DNA, 25 bp, Homo sapien
tcatctgtcaaggtcaaagttggct

SEQ ID NO: 3405323 - DNA, 25 bp, Homo sapien
ggtgaccctgcgtaaatgacttcca

SEQ ID NO: 3405324 - DNA, 25 bp, Homo sapien
caggcgttgacgttgttgtagaaag

SEQ ID NO: 3405325 - DNA, 25 bp, Homo sapien
tagatggcgttgagcgagacacaga

SEQ ID NO: 3405326 - DNA, 25 bp, Homo sapien
ccgggagcaccttcgtggtgtagat

SEQ ID NO: 3405327 - DNA, 25 bp, Homo sapien
ttgtagaaagtcaggcgccagatgc

SEQ ID NO: 3405328 - DNA, 25 bp, Homo sapien
agtcctgtcacgtagccgatggcaa

SEQ ID NO: 3405329 - DNA, 25 bp, Homo sapien
tggccgtgcccgacacattgtgggt

SEQ ID NO: 3405330 - DNA, 25 bp, Homo sapien
agcggactggtgaacttgatctgca

SEQ ID NO: 3405331 - DNA, 25 bp, Homo sapien
tctcctcgtagtagagcacggccag

SEQ ID NO: 3405332 - DNA, 25 bp, Homo sapien
cattttgatataggagctcgctgga

SEQ ID NO: 3405333 - DNA, 25 bp, Homo sapien
tttcagaaggctgttacctgggcca

SEQ ID NO: 3405334 - DNA, 25 bp, Homo sapien
cattgaggatacagcgagaaggcac

SEQ ID NO: 3405335 - DNA, 25 bp, Homo sapien
tctatggatcgggaaacagccctca

SEQ ID NO: 3405336 - DNA, 25 bp, Homo sapien
aaatgcccaccagaagggccaggga

SEQ ID NO: 3405337 - DNA, 25 bp, Homo sapien
gagaaaggacataccaaatgcccac

SEQ ID NO: 3405338 - DNA, 25 bp, Homo sapien
tatggccccgaaatttgtgtgtgtc

SEQ ID NO: 3405339 - DNA, 25 bp, Homo sapien
ctcatgaacagggttggagtcctta

SEQ ID NO: 3405340 - DNA, 25 bp, Homo sapien
aggaaggagcctggtatccttagaa

SEQ ID NO: 3405341 - DNA, 25 bp, Homo sapien
tatgttatcctttaaagtagaacaa

SEQ ID NO: 3405342 - DNA, 25 bp, Homo sapien
ggcctatgttatcctttaaagtaga

SEQ ID NO: 3405343 - DNA, 25 bp, Homo sapien
ctatgttatcctttaaagtagaaca

SEQ ID NO: 3405344 - DNA, 25 bp, Homo sapien
cggcctatgttatcctttaaagtag

SEQ ID NO: 3405345 - DNA, 25 bp, Homo sapien
catcaatgcacttgttgcaggacaa

SEQ ID NO: 3405346 - DNA, 25 bp, Homo sapien
tggtgcactccgaagagaatcaggc

SEQ ID NO: 3405347 - DNA, 25 bp, Homo sapien
cctggttctacccatcacactgtgg

SEQ ID NO: 3405348 - DNA, 25 bp, Homo sapien
tagtcctttcatagaagccacggtg

SEQ ID NO: 3405349 - DNA, 25 bp, Homo sapien
ctggatgggcagctgcggcgcagca

SEQ ID NO: 3405350 - DNA, 25 bp, Homo sapien
gcgcagcaggctctgctgtccccat

SEQ ID NO: 3405351 - DNA, 25 bp, Homo sapien
atgggcagctgcggcgcagcaggct

SEQ ID NO: 3405352 - DNA, 25 bp, Homo sapien
ggcgcagcaggctctgctgtcccca

SEQ ID NO: 3405353 - DNA, 25 bp, Homo sapien
tcagagccatagcaagggagttggc

SEQ ID NO: 3405354 - DNA, 25 bp, Homo sapien
tatatttggtctctcggtgtgcaga

SEQ ID NO: 3405355 - DNA, 25 bp, Homo sapien
gaagctggacatcctacgtgattga

SEQ ID NO: 3405356 - DNA, 25 bp, Homo sapien
gttggccaccactacatatattcgg

SEQ ID NO: 3405357 - DNA, 25 bp, Homo sapien
cttctctccacaaggttggtgcttt

SEQ ID NO: 3405358 - DNA, 25 bp, Homo sapien
ttctctccacaaggttggtgctttg

SEQ ID NO: 3405359 - DNA, 25 bp, Homo sapien
tcttctctccacaaggttggtgctt

SEQ ID NO: 3405360 - DNA, 25 bp, Homo sapien
caaattcttgctgaataaatcgatg

SEQ ID NO: 3405361 - DNA, 25 bp, Homo sapien
gctgaataaatcgatgcaatctttc

SEQ ID NO: 3405362 - DNA, 25 bp, Homo sapien
tcttgctgaataaatcgatgcaatc

SEQ ID NO: 3405363 - DNA, 25 bp, Homo sapien
aattcttgctgaataaatcgatgca

SEQ ID NO: 3405364 - DNA, 25 bp, Homo sapien
gactgtccagactgctccagccacc

SEQ ID NO: 3405365 - DNA, 25 bp, Homo sapien
actgtccagactgctccagccaccc

SEQ ID NO: 3405366 - DNA, 25 bp, Homo sapien
ccggggccacagctgccgccgtcgc

SEQ ID NO: 3405367 - DNA, 25 bp, Homo sapien
ctgtccgtgccgggcgctggcgccg

SEQ ID NO: 3405368 - DNA, 25 bp, Homo sapien
ccgccgtcgccacagtcgccgccat

SEQ ID NO: 3405369 - DNA, 25 bp, Homo sapien
gtccgtgccgggcgctggcgccggg

SEQ ID NO: 3405370 - DNA, 25 bp, Homo sapien
cgcgaaccacgggtcgagaatgtaa

SEQ ID NO: 3405371 - DNA, 25 bp, Homo sapien
agaatgtaaacgcagcgcacgcagc

SEQ ID NO: 3405372 - DNA, 25 bp, Homo sapien
tccatcggttgatcccgactgagga

SEQ ID NO: 3405373 - DNA, 25 bp, Homo sapien
ggttgtcgtggagtcgcagcccttt

SEQ ID NO: 3405374 - DNA, 25 bp, Homo sapien
acagctgtccctcacatttggagca

SEQ ID NO: 3405375 - DNA, 25 bp, Homo sapien
tacctttgaggcctgccaggtgaca

SEQ ID NO: 3405376 - DNA, 25 bp, Homo sapien
cctcctctgagtgtggtctgacaat

SEQ ID NO: 3405377 - DNA, 25 bp, Homo sapien
tcaacaaacagagcactgaggctgt

SEQ ID NO: 3405378 - DNA, 25 bp, Homo sapien
ggctgtccccggactacaaacaggc

SEQ ID NO: 3405379 - DNA, 25 bp, Homo sapien
ccttgggaacacgtcggctggctgt

SEQ ID NO: 3405380 - DNA, 25 bp, Homo sapien
aacttgtgtccaaatcttccagaga

SEQ ID NO: 3405381 - DNA, 25 bp, Homo sapien
tacaaacaggcgggagttcagtttc

SEQ ID NO: 3405382 - DNA, 25 bp, Homo sapien
gaagccagtggcatccagagtggaa

SEQ ID NO: 3405383 - DNA, 25 bp, Homo sapien
cctcaaagtcttggcctagaaggaa

SEQ ID NO: 3405384 - DNA, 25 bp, Homo sapien
cctatgtctggactgagctgagagc

SEQ ID NO: 3405385 - DNA, 25 bp, Homo sapien
gaaggaaccctaataaatctggctg

SEQ ID NO: 3405386 - DNA, 25 bp, Homo sapien
ggactggccccgttactgcaaacag

SEQ ID NO: 3405387 - DNA, 25 bp, Homo sapien
tctatcaatcatttaccccatggga

SEQ ID NO: 3405388 - DNA, 25 bp, Homo sapien
gagggtgatggcagtctgtcccaca

SEQ ID NO: 3405389 - DNA, 25 bp, Homo sapien
acagccctctgtccatgagttcctg

SEQ ID NO: 3405390 - DNA, 25 bp, Homo sapien
gggaattgaaggatgatgtattcac

SEQ ID NO: 3405391 - DNA, 25 bp, Homo sapien
tattcactaagctgtttgccttgac

SEQ ID NO: 3405392 - DNA, 25 bp, Homo sapien
tgcacaattatgtgtggggttacgg

SEQ ID NO: 3405393 - DNA, 25 bp, Homo sapien
tgtttgccttgacatgacttttcct

SEQ ID NO: 3405394 - DNA, 25 bp, Homo sapien
tagccacctcttaggcctgctgtga

SEQ ID NO: 3405395 - DNA, 25 bp, Homo sapien
tgatgtaaacaagcactgggaacag

SEQ ID NO: 3405396 - DNA, 25 bp, Homo sapien
taaatcgggatagcagtagccacct

SEQ ID NO: 3405397 - DNA, 25 bp, Homo sapien
tgggaacagcgcttgactcataggc

SEQ ID NO: 3405398 - DNA, 25 bp, Homo sapien
ggatgacctagctatatctctggga

SEQ ID NO: 3405399 - DNA, 25 bp, Homo sapien
tctctgggatataagtgggttggcc

SEQ ID NO: 3405400 - DNA, 25 bp, Homo sapien
gcctagtacctagcagaagctcaat

SEQ ID NO: 3405401 - DNA, 25 bp, Homo sapien
ggtaaggatacagctctagagtcag

SEQ ID NO: 3405402 - DNA, 25 bp, Homo sapien
actgaatactcattgtaacctgtga

SEQ ID NO: 3405403 - DNA, 25 bp, Homo sapien
tgccaggtaccatgcttatagttca

SEQ ID NO: 3405404 - DNA, 25 bp, Homo sapien
tgggtccttagcagggccagttatc

SEQ ID NO: 3405405 - DNA, 25 bp, Homo sapien
gattgagcccttgctatatgccagg

SEQ ID NO: 3405406 - DNA, 25 bp, Homo sapien
caaacagagctaataggttccagcc

SEQ ID NO: 3405407 - DNA, 25 bp, Homo sapien
tagatctcatagcaagctggcccag

SEQ ID NO: 3405408 - DNA, 25 bp, Homo sapien
gcccagtgaatggttgtacagtcaa

SEQ ID NO: 3405409 - DNA, 25 bp, Homo sapien
gccctagagcatgcaacttgcaaga

SEQ ID NO: 3405410 - DNA, 25 bp, Homo sapien
tgtccaggtcatagagggtatgaga

SEQ ID NO: 3405411 - DNA, 25 bp, Homo sapien
tattcaaaggtcaagcgggtcactc

SEQ ID NO: 3405412 - DNA, 25 bp, Homo sapien
tcccaaagggttcagagtcatattc

SEQ ID NO: 3405413 - DNA, 25 bp, Homo sapien
gagaattctccgtcactacttccac

SEQ ID NO: 3405414 - DNA, 25 bp, Homo sapien
ccatgcatggctaatatatttattt

SEQ ID NO: 3405415 - DNA, 25 bp, Homo sapien
actcatggactcatgtgatcctctc

SEQ ID NO: 3405416 - DNA, 25 bp, Homo sapien
aacctcagcctcttcagtaattggg

SEQ ID NO: 3405417 - DNA, 25 bp, Homo sapien
ctcatggcagcctcaagcccctggg

SEQ ID NO: 3405418 - DNA, 25 bp, Homo sapien
ggatggtatggagccacattcccgg

SEQ ID NO: 3405419 - DNA, 25 bp, Homo sapien
tcagtttgctctccccacgttagtg

SEQ ID NO: 3405420 - DNA, 25 bp, Homo sapien
caagaagtagcttacgcaaggccca

SEQ ID NO: 3405421 - DNA, 25 bp, Homo sapien
ccatctggctgggtgagttcatttc

SEQ ID NO: 3405422 - DNA, 25 bp, Homo sapien
gctgatgatggcctgaaagcgcttg

SEQ ID NO: 3405423 - DNA, 25 bp, Homo sapien
tccagggagggcacgccgtaggtct

SEQ ID NO: 3405424 - DNA, 25 bp, Homo sapien
tgctggctggtcaccaagcccactg

SEQ ID NO: 3405425 - DNA, 25 bp, Homo sapien
taggtctcgtcgtggttctcctgga

SEQ ID NO: 3405426 - DNA, 25 bp, Homo sapien
cagattagctggcaacaactgtggt

SEQ ID NO: 3405427 - DNA, 25 bp, Homo sapien
gaactttatgagaattgaaccacag

SEQ ID NO: 3405428 - DNA, 25 bp, Homo sapien
gaaccacagtgtctcggtgctactg

SEQ ID NO: 3405429 - DNA, 25 bp, Homo sapien
ccggcacggctgttctgttatttga

SEQ ID NO: 3405430 - DNA, 25 bp, Homo sapien
agtgcttatccaggcgggccagagc

SEQ ID NO: 3405431 - DNA, 25 bp, Homo sapien
caaaaaggtgcggagacacatcaac

SEQ ID NO: 3405432 - DNA, 25 bp, Homo sapien
gaacagcttagtacctaccttgcag

SEQ ID NO: 3405433 - DNA, 25 bp, Homo sapien
caaaaatgctgagcctagtgaccag

SEQ ID NO: 3405434 - DNA, 25 bp, Homo sapien
caaacaatgtgagctaagagggact

SEQ ID NO: 3405435 - DNA, 25 bp, Homo sapien
tacttttatagagagatgcttgccc

SEQ ID NO: 3405436 - DNA, 25 bp, Homo sapien
gctttcggaaaagaggcacatacct

SEQ ID NO: 3405437 - DNA, 25 bp, Homo sapien
tccagttctgggagcggactcatga

SEQ ID NO: 3405438 - DNA, 25 bp, Homo sapien
gacaatgaaaacatgccttgggact

SEQ ID NO: 3405439 - DNA, 25 bp, Homo sapien
cgctaactcattctccacgctggga

SEQ ID NO: 3405440 - DNA, 25 bp, Homo sapien
gacagagcccaaatcttcatgaaag

SEQ ID NO: 3405441 - DNA, 25 bp, Homo sapien
tgctcgggataatgtacacagtggg

SEQ ID NO: 3405442 - DNA, 25 bp, Homo sapien
gctgggaccagagtaatgtaatgcc

SEQ ID NO: 3405443 - DNA, 25 bp, Homo sapien
gttggcgttcattcggggtctctca

SEQ ID NO: 3405444 - DNA, 25 bp, Homo sapien
ggtctctcatagttggcaacccagg

SEQ ID NO: 3405445 - DNA, 25 bp, Homo sapien
agagacaaccaaagcgcaggtaggg

SEQ ID NO: 3405446 - DNA, 25 bp, Homo sapien
ctttttatacaggtcccacaggcgg

SEQ ID NO: 3405447 - DNA, 25 bp, Homo sapien
tgcacacacttaggcccttccaggg

SEQ ID NO: 3405448 - DNA, 25 bp, Homo sapien
tggctgcaggccttaggtgcaatgt

SEQ ID NO: 3405449 - DNA, 25 bp, Homo sapien
tctcctcctccggactatctgcaca

SEQ ID NO: 3405450 - DNA, 25 bp, Homo sapien
ggtgactgacaagcccaaaaggcct

SEQ ID NO: 3405451 - DNA, 25 bp, Homo sapien
ataggagttgcccaaatagggagag

SEQ ID NO: 3405452 - DNA, 25 bp, Homo sapien
ggtagctgccgtgtagaagaactct

SEQ ID NO: 3405453 - DNA, 25 bp, Homo sapien
aggtccccgcgggtcaggaagcagg

SEQ ID NO: 3405454 - DNA, 25 bp, Homo sapien
tggggttcccctccatgcggtcaaa

SEQ ID NO: 3405455 - DNA, 25 bp, Homo sapien
ttcacgctgaaatctgcatccagga

SEQ ID NO: 3405456 - DNA, 25 bp, Homo sapien
gggtccgtgcgacggccaaagccca

SEQ ID NO: 3405457 - DNA, 25 bp, Homo sapien
cagctgcctgcgttcacgctgaaat

SEQ ID NO: 3405458 - DNA, 25 bp, Homo sapien
cgtgcgacggccaaagcccacaggg

SEQ ID NO: 3405459 - DNA, 25 bp, Homo sapien
tgaaataagatacaccagatgaccc

SEQ ID NO: 3405460 - DNA, 25 bp, Homo sapien
ctgaaataagatacaccagatgacc

SEQ ID NO: 3405461 - DNA, 25 bp, Homo sapien
cattcgttcaatgttaagccggctg

SEQ ID NO: 3405462 - DNA, 25 bp, Homo sapien
cattccagggctcatagatgtatcg

SEQ ID NO: 3405463 - DNA, 25 bp, Homo sapien
cccggtagcgcgaaagctgctggta

SEQ ID NO: 3405464 - DNA, 25 bp, Homo sapien
tgggtagtccacaccaatgatgcac

SEQ ID NO: 3405465 - DNA, 25 bp, Homo sapien
tcatgctgccagcctggctcgagct

SEQ ID NO: 3405466 - DNA, 25 bp, Homo sapien
ttccacacaggaagggacagatgcc

SEQ ID NO: 3405467 - DNA, 25 bp, Homo sapien
ccacagggtgactgaggtcttccac

SEQ ID NO: 3405468 - DNA, 25 bp, Homo sapien
ctggctcgagctgggctctgccaca

SEQ ID NO: 3405469 - DNA, 25 bp, Homo sapien
tgctgggccactgggtagtggtctt

SEQ ID NO: 3405470 - DNA, 25 bp, Homo sapien
caggtggttcctcggctgcttccag

SEQ ID NO: 3405471 - DNA, 25 bp, Homo sapien
tgctgagttcttcaccaggtggttc

SEQ ID NO: 3405472 - DNA, 25 bp, Homo sapien
ggttggcaactctgccacccgggcc

SEQ ID NO: 3405473 - DNA, 25 bp, Homo sapien
gggtcctaccactacgttctgttca

SEQ ID NO: 3405474 - DNA, 25 bp, Homo sapien
cagatgccagaatcccagctagggt

SEQ ID NO: 3405475 - DNA, 25 bp, Homo sapien
taaagactagaatggtttccctggc

SEQ ID NO: 3405476 - DNA, 25 bp, Homo sapien
gaaagtcactgccataacctcgagc

SEQ ID NO: 3405477 - DNA, 25 bp, Homo sapien
ggcttctctgggtcaaacctcccac

SEQ ID NO: 3405478 - DNA, 25 bp, Homo sapien
aaacctcccacctactgctcctgga

SEQ ID NO: 3405479 - DNA, 25 bp, Homo sapien
cttctctgggtcaaacctcccacct

SEQ ID NO: 3405480 - DNA, 25 bp, Homo sapien
aacctcccacctactgctcctggaa

SEQ ID NO: 3405481 - DNA, 25 bp, Homo sapien
ttgatctgggaacgggctgacatgc

SEQ ID NO: 3405482 - DNA, 25 bp, Homo sapien
gaagacttgctttagttggccaccg

SEQ ID NO: 3405483 - DNA, 25 bp, Homo sapien
tgaatactaaatctgggcctcggcc

SEQ ID NO: 3405484 - DNA, 25 bp, Homo sapien
aaggaatcatcctgctacccgaagg

SEQ ID NO: 3405485 - DNA, 25 bp, Homo sapien
cagggcgcggcacagcaccgcgcac

SEQ ID NO: 3405486 - DNA, 25 bp, Homo sapien
acagcaccgcgcacggcccgcggga

SEQ ID NO: 3405487 - DNA, 25 bp, Homo sapien
gccgccgcggagttcgggctaggcg

SEQ ID NO: 3405488 - DNA, 25 bp, Homo sapien
gctaggcgggcgcacctgtgtctgg

SEQ ID NO: 3405489 - DNA, 25 bp, Homo sapien
gaggcgaagcgatgtgcagccccag

SEQ ID NO: 3405490 - DNA, 25 bp, Homo sapien
caggccgccgctttctcgctccgcc

SEQ ID NO: 3405491 - DNA, 25 bp, Homo sapien
ggccgccgctttctcgctccgccat

SEQ ID NO: 3405492 - DNA, 25 bp, Homo sapien
ctcccaggccgccgctttctcgctc

SEQ ID NO: 3405493 - DNA, 25 bp, Homo sapien
taaatcagtgcctattaaagaggca

SEQ ID NO: 3405494 - DNA, 25 bp, Homo sapien
ggtgctaaatcagtgcctattaaag

SEQ ID NO: 3405495 - DNA, 25 bp, Homo sapien
tttgctccaatctatgcacaaagcc

SEQ ID NO: 3405496 - DNA, 25 bp, Homo sapien
cacaccataggtgctaaatcagtgc

SEQ ID NO: 3405497 - DNA, 25 bp, Homo sapien
gatattcccacttccttggacaata

SEQ ID NO: 3405498 - DNA, 25 bp, Homo sapien
aaggacagcagcattcttcctgtac

SEQ ID NO: 3405499 - DNA, 25 bp, Homo sapien
tattcccacttccttggacaatagg

SEQ ID NO: 3405500 - DNA, 25 bp, Homo sapien
ggacagcagcattcttcctgtacag

SEQ ID NO: 3405501 - DNA, 25 bp, Homo sapien
tccctcacgggatcaggttactgca

SEQ ID NO: 3405502 - DNA, 25 bp, Homo sapien
tggcagaaatctaggatgtttcccc

SEQ ID NO: 3405503 - DNA, 25 bp, Homo sapien
agccagcccttggttggctttaaag

SEQ ID NO: 3405504 - DNA, 25 bp, Homo sapien
gctgccctctcatgcccggaagggt

SEQ ID NO: 3405505 - DNA, 25 bp, Homo sapien
ctgtcattgtctgggctcgaatcca

SEQ ID NO: 3405506 - DNA, 25 bp, Homo sapien
agcgctcccattgatcctccaacca

SEQ ID NO: 3405507 - DNA, 25 bp, Homo sapien
cattgatcctccaaccagctgtcat

SEQ ID NO: 3405508 - DNA, 25 bp, Homo sapien
gatcctccaaccagctgtcattgtc

SEQ ID NO: 3405509 - DNA, 25 bp, Homo sapien
gcactgtaagctgatgccacactca

SEQ ID NO: 3405510 - DNA, 25 bp, Homo sapien
cgtaaggacagggtgtctttgcact

SEQ ID NO: 3405511 - DNA, 25 bp, Homo sapien
tgatctccgagaggtcttcatcctc

SEQ ID NO: 3405512 - DNA, 25 bp, Homo sapien
gccacactcatcagtgatctccgag

SEQ ID NO: 3405513 - DNA, 25 bp, Homo sapien
ccatctcgtgggcagttgaaggagc

SEQ ID NO: 3405514 - DNA, 25 bp, Homo sapien
gacgtgccaagcagtatacctatgt

SEQ ID NO: 3405515 - DNA, 25 bp, Homo sapien
catttcatgagggtgccagcacaga

SEQ ID NO: 3405516 - DNA, 25 bp, Homo sapien
tctgattgtacactcaagacgtgcc

SEQ ID NO: 3405517 - DNA, 25 bp, Homo sapien
aggggcccaaaccagcagcaatgct

SEQ ID NO: 3405518 - DNA, 25 bp, Homo sapien
tcttcctgccctaaagcactgcaga

SEQ ID NO: 3405519 - DNA, 25 bp, Homo sapien
ggtagccctgagtctcccttaagtc

SEQ ID NO: 3405520 - DNA, 25 bp, Homo sapien
gggctgctcccaaaaggattcaggg

SEQ ID NO: 3405521 - DNA, 25 bp, Homo sapien
tttagggacaggagagagccatctt

SEQ ID NO: 3405522 - DNA, 25 bp, Homo sapien
ctcctggcagcattcagatctttag

SEQ ID NO: 3405523 - DNA, 25 bp, Homo sapien
tagggacaggagagagccatcttcc

SEQ ID NO: 3405524 - DNA, 25 bp, Homo sapien
attcagatctttagggacaggagag

SEQ ID NO: 3405525 - DNA, 25 bp, Homo sapien
gaaaagacatagttgggatccccat

SEQ ID NO: 3405526 - DNA, 25 bp, Homo sapien
tattcactggaacgtgtgtgaagcc

SEQ ID NO: 3405527 - DNA, 25 bp, Homo sapien
agaacaggtgcctgacctctgagaa

SEQ ID NO: 3405528 - DNA, 25 bp, Homo sapien
gagtagcaggaggtcaacacagaga

SEQ ID NO: 3405529 - DNA, 25 bp, Homo sapien
agtgtcccccgtcgcgtcgatcagg

SEQ ID NO: 3405530 - DNA, 25 bp, Homo sapien
ccgtcgcgtcgatcaggtccatctg

SEQ ID NO: 3405531 - DNA, 25 bp, Homo sapien
cgggagtgtcccccgtcgcgtcgat

SEQ ID NO: 3405532 - DNA, 25 bp, Homo sapien
agcatctcggcctgcaaccggctcc

SEQ ID NO: 3405533 - DNA, 25 bp, Homo sapien
gcgggacgccggctcctggccggac

SEQ ID NO: 3405534 - DNA, 25 bp, Homo sapien
tggccctggccgcgggacgccggct

SEQ ID NO: 3405535 - DNA, 25 bp, Homo sapien
gctctggccctggccgcgggacgcc

SEQ ID NO: 3405536 - DNA, 25 bp, Homo sapien
ccctggccgcgggacgccggctcct

SEQ ID NO: 3405537 - DNA, 25 bp, Homo sapien
aagaggttgagcgtggtgggccgct

SEQ ID NO: 3405538 - DNA, 25 bp, Homo sapien
gttgagcgtggtgggccgcttgggc

SEQ ID NO: 3405539 - DNA, 25 bp, Homo sapien
ctgcggaaagaggttgagcgtggtg

SEQ ID NO: 3405540 - DNA, 25 bp, Homo sapien
aggttgagcgtggtgggccgcttgg

SEQ ID NO: 3405541 - DNA, 25 bp, Homo sapien
gcctcccccacgatgaccatttcag

SEQ ID NO: 3405542 - DNA, 25 bp, Homo sapien
gaccatttcagatgcccttttctcc

SEQ ID NO: 3405543 - DNA, 25 bp, Homo sapien
ctcgccacgatctcccacggcctcc

SEQ ID NO: 3405544 - DNA, 25 bp, Homo sapien
tcgccacgatctcccacggcctccc

SEQ ID NO: 3405545 - DNA, 25 bp, Homo sapien
cccctcaggccatccctagggccat

SEQ ID NO: 3405546 - DNA, 25 bp, Homo sapien
ccatccctagggccatttgctgtgt

SEQ ID NO: 3405547 - DNA, 25 bp, Homo sapien
ccaccccgcctccactgtcaaaggc

SEQ ID NO: 3405548 - DNA, 25 bp, Homo sapien
gtcaaaggcctcactcgtaactctc

SEQ ID NO: 3405549 - DNA, 25 bp, Homo sapien
gggtgaggatgatcgagacacccga

SEQ ID NO: 3405550 - DNA, 25 bp, Homo sapien
gaggatgatcgagacacccgatcct

SEQ ID NO: 3405551 - DNA, 25 bp, Homo sapien
tgaggatgatcgagacacccgatcc

SEQ ID NO: 3405552 - DNA, 25 bp, Homo sapien
tcttcaggggtgaggatgatcgaga

SEQ ID NO: 3405553 - DNA, 25 bp, Homo sapien
gattcggtctcgatgcgagtggccc

SEQ ID NO: 3405554 - DNA, 25 bp, Homo sapien
tgacagagtcataggacagggcgct

SEQ ID NO: 3405555 - DNA, 25 bp, Homo sapien
tgtgcatgctcatctaccaccagcg

SEQ ID NO: 3405556 - DNA, 25 bp, Homo sapien
tctagtcgcacatcggcctggtagt

SEQ ID NO: 3405557 - DNA, 25 bp, Homo sapien
gcctcccagaacacttcgcattttg

SEQ ID NO: 3405558 - DNA, 25 bp, Homo sapien
agaacacttcgcattttggctctgc

SEQ ID NO: 3405559 - DNA, 25 bp, Homo sapien
gaagcctcagtcctaaccagatggg

SEQ ID NO: 3405560 - DNA, 25 bp, Homo sapien
gctctgatccaggtttagcggggca

SEQ ID NO: 3405561 - DNA, 25 bp, Homo sapien
gatgatgcaggagaacagcccgaag

SEQ ID NO: 3405562 - DNA, 25 bp, Homo sapien
tccactagcagagggtcatccactt

SEQ ID NO: 3405563 - DNA, 25 bp, Homo sapien
taggcctcgtaccagtagtcttcag

SEQ ID NO: 3405564 - DNA, 25 bp, Homo sapien
cccgggcaccagtgcgcatgttgta

SEQ ID NO: 3405565 - DNA, 25 bp, Homo sapien
gttcgtcttcgtgtcgaggcacaaa

SEQ ID NO: 3405566 - DNA, 25 bp, Homo sapien
gccatgtgctcgggctccttggtga

SEQ ID NO: 3405567 - DNA, 25 bp, Homo sapien
ccatgtgctcgggctccttggtgac

SEQ ID NO: 3405568 - DNA, 25 bp, Homo sapien
ctgccatgtgctcgggctccttggt

SEQ ID NO: 3405569 - DNA, 25 bp, Homo sapien
tgccatgtgctcgggctccttggtg

SEQ ID NO: 3405570 - DNA, 25 bp, Homo sapien
agcacagaggacgtcattgcccttg

SEQ ID NO: 3405571 - DNA, 25 bp, Homo sapien
gcagcacagaggacgtcattgccct

SEQ ID NO: 3405572 - DNA, 25 bp, Homo sapien
atagcagcacagaggacgtcattgc

SEQ ID NO: 3405573 - DNA, 25 bp, Homo sapien
cacagaggacgtcattgcccttgtg

SEQ ID NO: 3405574 - DNA, 25 bp, Homo sapien
gctggagggcgggttaaagtgcacg

SEQ ID NO: 3405575 - DNA, 25 bp, Homo sapien
cccgcacgctgatctccaggacaca

SEQ ID NO: 3405576 - DNA, 25 bp, Homo sapien
acaccccgcacgctgatctccagga

SEQ ID NO: 3405577 - DNA, 25 bp, Homo sapien
gcctcctgggagtcatcggccttga

SEQ ID NO: 3405578 - DNA, 25 bp, Homo sapien
gatgatatccgcagaaagagatgtt

SEQ ID NO: 3405579 - DNA, 25 bp, Homo sapien
tctttggatgatatccgcagaaaga

SEQ ID NO: 3405580 - DNA, 25 bp, Homo sapien
ttgttctttggatgatatccgcaga

SEQ ID NO: 3405581 - DNA, 25 bp, Homo sapien
tttggatgatatccgcagaaagaga

SEQ ID NO: 3405582 - DNA, 25 bp, Homo sapien
agacgtggcaggcaaaccggtggtc

SEQ ID NO: 3405583 - DNA, 25 bp, Homo sapien
acgtggcaggcaaaccggtggtcgg

SEQ ID NO: 3405584 - DNA, 25 bp, Homo sapien
aaagacgtggcaggcaaaccggtgg

SEQ ID NO: 3405585 - DNA, 25 bp, Homo sapien
gtggcaggcaaaccggtggtcggcg

SEQ ID NO: 3405586 - DNA, 25 bp, Homo sapien
gccacccgcactggggtccggagat

SEQ ID NO: 3405587 - DNA, 25 bp, Homo sapien
tgggattgggcgtgctccctcgggc

SEQ ID NO: 3405588 - DNA, 25 bp, Homo sapien
aaccgaggggcaaagctgagcgcca

SEQ ID NO: 3405589 - DNA, 25 bp, Homo sapien
ggtccggagatagttctccagagct

SEQ ID NO: 3405590 - DNA, 25 bp, Homo sapien
tgtggggcaggtgtactccacaaac

SEQ ID NO: 3405591 - DNA, 25 bp, Homo sapien
tggggcaggtgtactccacaaactg

SEQ ID NO: 3405592 - DNA, 25 bp, Homo sapien
tctgtggggcaggtgtactccacaa

SEQ ID NO: 3405593 - DNA, 25 bp, Homo sapien
ttctgtggggcaggtgtactccaca

SEQ ID NO: 3405594 - DNA, 25 bp, Homo sapien
tggaacggacatccttctctgccag

SEQ ID NO: 3405595 - DNA, 25 bp, Homo sapien
actctgccctccatagatgaatcta

SEQ ID NO: 3405596 - DNA, 25 bp, Homo sapien
caggaaatggcactttaatagttgg

SEQ ID NO: 3405597 - DNA, 25 bp, Homo sapien
gccagggtgacaggaccaagatggg

SEQ ID NO: 3405598 - DNA, 25 bp, Homo sapien
gctggctagcactcatggaaagttg

SEQ ID NO: 3405599 - DNA, 25 bp, Homo sapien
ccttgacgttccttctggcagcgga

SEQ ID NO: 3405600 - DNA, 25 bp, Homo sapien
ggctagcactcatggaaagttgaag

SEQ ID NO: 3405601 - DNA, 25 bp, Homo sapien
ttctggcagcggagcctcccagggc

SEQ ID NO: 3405602 - DNA, 25 bp, Homo sapien
cccgtctcaagcggccccactccgt

SEQ ID NO: 3405603 - DNA, 25 bp, Homo sapien
ctcccgtctcaagcggccccactcc

SEQ ID NO: 3405604 - DNA, 25 bp, Homo sapien
gcccctcccgtctcaagcggcccca

SEQ ID NO: 3405605 - DNA, 25 bp, Homo sapien
ccctcccgtctcaagcggccccact

SEQ ID NO: 3405606 - DNA, 25 bp, Homo sapien
gctccagcggctcccgggctgggcc

SEQ ID NO: 3405607 - DNA, 25 bp, Homo sapien
ctgctccagcggctcccgggctggg

SEQ ID NO: 3405608 - DNA, 25 bp, Homo sapien
ccagcggctcccgggctgggccctg

SEQ ID NO: 3405609 - DNA, 25 bp, Homo sapien
tccagcggctcccgggctgggccct

SEQ ID NO: 3405610 - DNA, 25 bp, Homo sapien
ccgacggccgggttgtgcggctcgc

SEQ ID NO: 3405611 - DNA, 25 bp, Homo sapien
ccggggctgcaggctccatcgcagg

SEQ ID NO: 3405612 - DNA, 25 bp, Homo sapien
cggggctgcaggctccatcgcaggc

SEQ ID NO: 3405613 - DNA, 25 bp, Homo sapien
ggggctgcaggctccatcgcaggcc

SEQ ID NO: 3405614 - DNA, 25 bp, Homo sapien
ggccgccgacgggggcgctcaggga

SEQ ID NO: 3405615 - DNA, 25 bp, Homo sapien
cgaacaggaggaatccgagcagcag

SEQ ID NO: 3405616 - DNA, 25 bp, Homo sapien
aacaggaggaatccgagcagcagca

SEQ ID NO: 3405617 - DNA, 25 bp, Homo sapien
cccgggggcgccctcggggcagcat

SEQ ID NO: 3405618 - DNA, 25 bp, Homo sapien
gcagcaacagcgcggcggcccccag

SEQ ID NO: 3405619 - DNA, 25 bp, Homo sapien
cacgtggcatgagcgggccggggaa

SEQ ID NO: 3405620 - DNA, 25 bp, Homo sapien
acgtggcatgagcgggccggggaag

SEQ ID NO: 3405621 - DNA, 25 bp, Homo sapien
gacacgtggcatgagcgggccgggg

SEQ ID NO: 3405622 - DNA, 25 bp, Homo sapien
gggacacgtggcatgagcgggccgg

SEQ ID NO: 3405623 - DNA, 25 bp, Homo sapien
ggctgcgggccgcagtcggagcggt

SEQ ID NO: 3405624 - DNA, 25 bp, Homo sapien
ggcggcggctctccgcagcctcccg

SEQ ID NO: 3405625 - DNA, 25 bp, Homo sapien
gccgcagtcggagcggttgtggtcc

SEQ ID NO: 3405626 - DNA, 25 bp, Homo sapien
cagtcggagcggttgtggtccccgg

SEQ ID NO: 3405627 - DNA, 25 bp, Homo sapien
caggtactgtgattcccgcagatgt

SEQ ID NO: 3405628 - DNA, 25 bp, Homo sapien
gagctgcacgttcgaggtgcgcccc

SEQ ID NO: 3405629 - DNA, 25 bp, Homo sapien
gcagcaggagccaacccttcatttc

SEQ ID NO: 3405630 - DNA, 25 bp, Homo sapien
cgcagatgtccaagaggccgggctc

SEQ ID NO: 3405631 - DNA, 25 bp, Homo sapien
gggagggacgcccaggtcggcagca

SEQ ID NO: 3405632 - DNA, 25 bp, Homo sapien
ggagggacgcccaggtcggcagcag

SEQ ID NO: 3405633 - DNA, 25 bp, Homo sapien
ctggggagggacgcccaggtcggca

SEQ ID NO: 3405634 - DNA, 25 bp, Homo sapien
ggacgcccaggtcggcagcagcccc

SEQ ID NO: 3405635 - DNA, 25 bp, Homo sapien
agttatgccccgcacacacgatggc

SEQ ID NO: 3405636 - DNA, 25 bp, Homo sapien
cagggtgatgacgtctcggctggag

SEQ ID NO: 3405637 - DNA, 25 bp, Homo sapien
tgacgtctcggctggagttatgccc

SEQ ID NO: 3405638 - DNA, 25 bp, Homo sapien
ggctggagttatgccccgcacacac

SEQ ID NO: 3405639 - DNA, 25 bp, Homo sapien
actcctgaccctcctccacggacac

SEQ ID NO: 3405640 - DNA, 25 bp, Homo sapien
cactcctgaccctcctccacggaca

SEQ ID NO: 3405641 - DNA, 25 bp, Homo sapien
tgttcttacaactgcccttctaagg

SEQ ID NO: 3405642 - DNA, 25 bp, Homo sapien
aggatgttcttacaactgcccttct

SEQ ID NO: 3405643 - DNA, 25 bp, Homo sapien
ttacaactgcccttctaagggagga

SEQ ID NO: 3405644 - DNA, 25 bp, Homo sapien
cttacaactgcccttctaagggagg

SEQ ID NO: 3405645 - DNA, 25 bp, Homo sapien
gagcaacatgggacagcccccaccc

SEQ ID NO: 3405646 - DNA, 25 bp, Homo sapien
agcaggagcaacatgggacagcccc

SEQ ID NO: 3405647 - DNA, 25 bp, Homo sapien
aggggcgcagagatggaagcgccat

SEQ ID NO: 3405648 - DNA, 25 bp, Homo sapien
gaagcgccatctgcaaagagctttt

SEQ ID NO: 3405649 - DNA, 25 bp, Homo sapien
tccatgtgtggaagagcgtctccag

SEQ ID NO: 3405650 - DNA, 25 bp, Homo sapien
caggatgtttctggccacggcgtca

SEQ ID NO: 3405651 - DNA, 25 bp, Homo sapien
ggccacggcgtcagtcaccaagtgg

SEQ ID NO: 3405652 - DNA, 25 bp, Homo sapien
cagtcaccaagtggaggtgcagtgg

SEQ ID NO: 3405653 - DNA, 25 bp, Homo sapien
taaaagctgacacggacagcaggca

SEQ ID NO: 3405654 - DNA, 25 bp, Homo sapien
agctggtcggcatgataaaagctga

SEQ ID NO: 3405655 - DNA, 25 bp, Homo sapien
agctgaggggaggggggaagggctg

SEQ ID NO: 3405656 - DNA, 25 bp, Homo sapien
cagctgaggggaggggggaagggct

SEQ ID NO: 3405657 - DNA, 25 bp, Homo sapien
agcaccagcttcattagcccataga

SEQ ID NO: 3405658 - DNA, 25 bp, Homo sapien
tccaggacaatgacgcgggccagct

SEQ ID NO: 3405659 - DNA, 25 bp, Homo sapien
catagaggccggagtagtgcttgtt

SEQ ID NO: 3405660 - DNA, 25 bp, Homo sapien
tgtcagaggcgaaggtgacatccgt

SEQ ID NO: 3405661 - DNA, 25 bp, Homo sapien
gcataagggagctgtctgaagctgc

SEQ ID NO: 3405662 - DNA, 25 bp, Homo sapien
agggcataagggagctgtctgaagc

SEQ ID NO: 3405663 - DNA, 25 bp, Homo sapien
taagggagctgtctgaagctgccac

SEQ ID NO: 3405664 - DNA, 25 bp, Homo sapien
agggagctgtctgaagctgccacag

SEQ ID NO: 3405665 - DNA, 25 bp, Homo sapien
gaggttgcccaggtaccagtcactc

SEQ ID NO: 3405666 - DNA, 25 bp, Homo sapien
tgtgttaaatccccggcccaaggca

SEQ ID NO: 3405667 - DNA, 25 bp, Homo sapien
tctggttctccacaagaccgatcgc

SEQ ID NO: 3405668 - DNA, 25 bp, Homo sapien
ggccagggcctgtggttcttccaga

SEQ ID NO: 3405669 - DNA, 25 bp, Homo sapien
gccaatgaagagatgctgtcatgcc

SEQ ID NO: 3405670 - DNA, 25 bp, Homo sapien
caatgaagagatgctgtcatgccca

SEQ ID NO: 3405671 - DNA, 25 bp, Homo sapien
aatgaagagatgctgtcatgcccac

SEQ ID NO: 3405672 - DNA, 25 bp, Homo sapien
ctgccaatgaagagatgctgtcatg

SEQ ID NO: 3405673 - DNA, 25 bp, Homo sapien
gcaggctaaggagctcccgcctggc

SEQ ID NO: 3405674 - DNA, 25 bp, Homo sapien
ggcaggctaaggagctcccgcctgg

SEQ ID NO: 3405675 - DNA, 25 bp, Homo sapien
aggcaggctaaggagctcccgcctg

SEQ ID NO: 3405676 - DNA, 25 bp, Homo sapien
caggctaaggagctcccgcctggct

SEQ ID NO: 3405677 - DNA, 25 bp, Homo sapien
caccccacccggcaaggcttcctca

SEQ ID NO: 3405678 - DNA, 25 bp, Homo sapien
gagcagagacacccatcacatccca

SEQ ID NO: 3405679 - DNA, 25 bp, Homo sapien
cccacccggcaaggcttcctcagac

SEQ ID NO: 3405680 - DNA, 25 bp, Homo sapien
agcagagacacccatcacatcccag

SEQ ID NO: 3405681 - DNA, 25 bp, Homo sapien
ttccagacacaaggcagacgctgca

SEQ ID NO: 3405682 - DNA, 25 bp, Homo sapien
gaggtcagacgcctcagagtagcag

SEQ ID NO: 3405683 - DNA, 25 bp, Homo sapien
tccttgatcacagcgttgaagatgt

SEQ ID NO: 3405684 - DNA, 25 bp, Homo sapien
agacgctgcactagccccgggtgct

SEQ ID NO: 3405685 - DNA, 25 bp, Homo sapien
gttggggccatgggagcagggagca

SEQ ID NO: 3405686 - DNA, 25 bp, Homo sapien
gagcagggagcagaagtctccatcc

SEQ ID NO: 3405687 - DNA, 25 bp, Homo sapien
agggagcagaagtctccatccatgg

SEQ ID NO: 3405688 - DNA, 25 bp, Homo sapien
acccaggagggtgttggggccatgg

SEQ ID NO: 3405689 - DNA, 25 bp, Homo sapien
ggcacacaaagagctctctccgcag

SEQ ID NO: 3405690 - DNA, 25 bp, Homo sapien
gaaattgcggaagaattccacatgc

SEQ ID NO: 3405691 - DNA, 25 bp, Homo sapien
agcaggttcccatcgtactccagga

SEQ ID NO: 3405692 - DNA, 25 bp, Homo sapien
tcaggtagaaattgcggaagaattc

SEQ ID NO: 3405693 - DNA, 25 bp, Homo sapien
tgcacacggtgcacagtgagctgct

SEQ ID NO: 3405694 - DNA, 25 bp, Homo sapien
tgctgctgccggaactcaaagcagg

SEQ ID NO: 3405695 - DNA, 25 bp, Homo sapien
ccacaagggtgacatcgtgaggccg

SEQ ID NO: 3405696 - DNA, 25 bp, Homo sapien
aaagcaggggtcttcctcgtccagt

SEQ ID NO: 3405697 - DNA, 25 bp, Homo sapien
cactggtgaggcctcgacgaaatgc

SEQ ID NO: 3405698 - DNA, 25 bp, Homo sapien
tctgtcaggtacaaggccaggctca

SEQ ID NO: 3405699 - DNA, 25 bp, Homo sapien
ggcctcgacgaaatgcaggaactgc

SEQ ID NO: 3405700 - DNA, 25 bp, Homo sapien
gcttctgcgtctgtcaggtacaagg

SEQ ID NO: 3405701 - DNA, 25 bp, Homo sapien
gccaaggccacgttgcgaagctggt

SEQ ID NO: 3405702 - DNA, 25 bp, Homo sapien
tataggggcccctcacggtacacca

SEQ ID NO: 3405703 - DNA, 25 bp, Homo sapien
tcactgaggaagacgtaaggcgtga

SEQ ID NO: 3405704 - DNA, 25 bp, Homo sapien
tagtcgtagagagaataggcaggca

SEQ ID NO: 3405705 - DNA, 25 bp, Homo sapien
ggccatcttgcctgatgcgacgggt

SEQ ID NO: 3405706 - DNA, 25 bp, Homo sapien
tgacactcatcagggcattagccac

SEQ ID NO: 3405707 - DNA, 25 bp, Homo sapien
gactagaccaccatgggccatcttg

SEQ ID NO: 3405708 - DNA, 25 bp, Homo sapien
gcatctaggactgggccagtgacac

SEQ ID NO: 3405709 - DNA, 25 bp, Homo sapien
ggtgtagagagtgcccgcatccagc

SEQ ID NO: 3405710 - DNA, 25 bp, Homo sapien
gagtgcccgcatccagcaaggccaa

SEQ ID NO: 3405711 - DNA, 25 bp, Homo sapien
tgggggaagctgaagcggtagcgca

SEQ ID NO: 3405712 - DNA, 25 bp, Homo sapien
agcgcagggtctcgaatgccggcac

SEQ ID NO: 3405713 - DNA, 25 bp, Homo sapien
tttgttccagccgaagcccacaaag

SEQ ID NO: 3405714 - DNA, 25 bp, Homo sapien
gcccacaaagcgaggatcatagcgg

SEQ ID NO: 3405715 - DNA, 25 bp, Homo sapien
cacgtagggttcatagttggccgcc

SEQ ID NO: 3405716 - DNA, 25 bp, Homo sapien
agtctcgtggcaccaccacgtaggg

SEQ ID NO: 3405717 - DNA, 25 bp, Homo sapien
gctggagcggaagcgggagatgtcc

SEQ ID NO: 3405718 - DNA, 25 bp, Homo sapien
cggaagcgggagatgtccaggcttg

SEQ ID NO: 3405719 - DNA, 25 bp, Homo sapien
cctggaggcagtcacgataggtggg

SEQ ID NO: 3405720 - DNA, 25 bp, Homo sapien
tccaggcttggagcgtggggcagat

SEQ ID NO: 3405721 - DNA, 25 bp, Homo sapien
ggtatttgagggcagcagccccatg

SEQ ID NO: 3405722 - DNA, 25 bp, Homo sapien
tgcagggctgggaggtatttgaggg

SEQ ID NO: 3405723 - DNA, 25 bp, Homo sapien
tatttgagggcagcagccccatggt

SEQ ID NO: 3405724 - DNA, 25 bp, Homo sapien
ctgggaggtatttgagggcagcagc

SEQ ID NO: 3405725 - DNA, 25 bp, Homo sapien
cagcccttcccagagaccttaaata

SEQ ID NO: 3405726 - DNA, 25 bp, Homo sapien
tgtctgcccaatgctaagatgaggg

SEQ ID NO: 3405727 - DNA, 25 bp, Homo sapien
cggagggcaggttgccctggtgtct

SEQ ID NO: 3405728 - DNA, 25 bp, Homo sapien
cccagccatacaatagcagcaaggg

SEQ ID NO: 3405729 - DNA, 25 bp, Homo sapien
gaaaccaaggtgctgtgtctagtca

SEQ ID NO: 3405730 - DNA, 25 bp, Homo sapien
gagaggtagaaacgatcctatcagc

SEQ ID NO: 3405731 - DNA, 25 bp, Homo sapien
gctaggaattgaccagggctttgcc

SEQ ID NO: 3405732 - DNA, 25 bp, Homo sapien
aatcgttggcagaggatcagagacc

SEQ ID NO: 3405733 - DNA, 25 bp, Homo sapien
gcatccaggactttaaaatgtcact

SEQ ID NO: 3405734 - DNA, 25 bp, Homo sapien
tcactgtaaactactttcccactgg

SEQ ID NO: 3405735 - DNA, 25 bp, Homo sapien
gcacacccttatagttgaccttctt

SEQ ID NO: 3405736 - DNA, 25 bp, Homo sapien
ccttggaatggaacagcacaccctt

SEQ ID NO: 3405737 - DNA, 25 bp, Homo sapien
ggagcatcagtcaagtcctctcacc

SEQ ID NO: 3405738 - DNA, 25 bp, Homo sapien
tccagggtaactacctcagaggcga

SEQ ID NO: 3405739 - DNA, 25 bp, Homo sapien
tagtggctgccaaatcagacagtgc

SEQ ID NO: 3405740 - DNA, 25 bp, Homo sapien
gctgcaatagcacttaaggagcatc

SEQ ID NO: 3405741 - DNA, 25 bp, Homo sapien
taattagacttggatttcaaagttc

SEQ ID NO: 3405742 - DNA, 25 bp, Homo sapien
tgtgttccctaatacttgggaaaga

SEQ ID NO: 3405743 - DNA, 25 bp, Homo sapien
ccttttgtcatctaaacccaggagt

SEQ ID NO: 3405744 - DNA, 25 bp, Homo sapien
gatctaagcactacctgggtcttgg

SEQ ID NO: 3405745 - DNA, 25 bp, Homo sapien
tattcattaagagatcgttcatgct

SEQ ID NO: 3405746 - DNA, 25 bp, Homo sapien
gagccaattccatgaagttaatcag

SEQ ID NO: 3405747 - DNA, 25 bp, Homo sapien
tcttctacaatgctgaacctctctc

SEQ ID NO: 3405748 - DNA, 25 bp, Homo sapien
tgcacttgtgaggaacttgcaccct

SEQ ID NO: 3405749 - DNA, 25 bp, Homo sapien
cagtgagtgtaattaccgtctgagg

SEQ ID NO: 3405750 - DNA, 25 bp, Homo sapien
cctagtagttacagttcagtgagtg

SEQ ID NO: 3405751 - DNA, 25 bp, Homo sapien
gatgtcagtccctatcatgcctagt

SEQ ID NO: 3405752 - DNA, 25 bp, Homo sapien
ggcccatgggctttatctatcagca

SEQ ID NO: 3405753 - DNA, 25 bp, Homo sapien
ataagaggacctattgctggtgagg

SEQ ID NO: 3405754 - DNA, 25 bp, Homo sapien
gaagtggtagttttaggttctgata

SEQ ID NO: 3405755 - DNA, 25 bp, Homo sapien
tagttttaggttctgataagaggac

SEQ ID NO: 3405756 - DNA, 25 bp, Homo sapien
cgagttgattgaagtggtagtttta

SEQ ID NO: 3405757 - DNA, 25 bp, Homo sapien
tcataccagttaactctgatgcaca

SEQ ID NO: 3405758 - DNA, 25 bp, Homo sapien
tctagtacgagtgacagccctgtga

SEQ ID NO: 3405759 - DNA, 25 bp, Homo sapien
tctcccatggcctatcataccagtt

SEQ ID NO: 3405760 - DNA, 25 bp, Homo sapien
gtttttctagtacgagtgacagccc

SEQ ID NO: 3405761 - DNA, 25 bp, Homo sapien
taaacgatggcagattagcatggaa

SEQ ID NO: 3405762 - DNA, 25 bp, Homo sapien
taaataaggtaaacgatggcagatt

SEQ ID NO: 3405763 - DNA, 25 bp, Homo sapien
ggaatattgtttgatgtgaataatc

SEQ ID NO: 3405764 - DNA, 25 bp, Homo sapien
ggcagattagcatggaatattgttt

SEQ ID NO: 3405765 - DNA, 25 bp, Homo sapien
tttaaagcagttgctgcgatccatc

SEQ ID NO: 3405766 - DNA, 25 bp, Homo sapien
ttcaatgtgggtatatgacagcggg

SEQ ID NO: 3405767 - DNA, 25 bp, Homo sapien
gaaaactgcccttctggagtccaaa

SEQ ID NO: 3405768 - DNA, 25 bp, Homo sapien
tgttttctgcactcacatccaaatg

SEQ ID NO: 3405769 - DNA, 25 bp, Homo sapien
aatgtagtactcctctaatgcattg

SEQ ID NO: 3405770 - DNA, 25 bp, Homo sapien
tcaaatgtagtactcctctaatgca

SEQ ID NO: 3405771 - DNA, 25 bp, Homo sapien
tgtagtactcctctaatgcattgtt

SEQ ID NO: 3405772 - DNA, 25 bp, Homo sapien
tagtactcctctaatgcattgttac

SEQ ID NO: 3405773 - DNA, 25 bp, Homo sapien
aaataagtttggtaatctggctagc

SEQ ID NO: 3405774 - DNA, 25 bp, Homo sapien
tggctagctgaatgccagagctcac

SEQ ID NO: 3405775 - DNA, 25 bp, Homo sapien
aatctggctagctgaatgccagagc

SEQ ID NO: 3405776 - DNA, 25 bp, Homo sapien
ataagtttggtaatctggctagctg

SEQ ID NO: 3405777 - DNA, 25 bp, Homo sapien
ataaagatttcagaggctccaccag

SEQ ID NO: 3405778 - DNA, 25 bp, Homo sapien
ttgataaagatttcagaggctccac

SEQ ID NO: 3405779 - DNA, 25 bp, Homo sapien
gataaagatttcagaggctccacca

SEQ ID NO: 3405780 - DNA, 25 bp, Homo sapien
tgataaagatttcagaggctccacc

SEQ ID NO: 3405781 - DNA, 25 bp, Homo sapien
gtattttctgttcacctgtggagtg

SEQ ID NO: 3405782 - DNA, 25 bp, Homo sapien
tcgaaaatcagggttgccaagctct

SEQ ID NO: 3405783 - DNA, 25 bp, Homo sapien
acattcagagggttcgcctcgaaaa

SEQ ID NO: 3405784 - DNA, 25 bp, Homo sapien
acctgtggagtgtcataaaagaaac

SEQ ID NO: 3405785 - DNA, 25 bp, Homo sapien
tcaaaagttcagattcccagccagg

SEQ ID NO: 3405786 - DNA, 25 bp, Homo sapien
tttctgctaatacagctaggcctgc

SEQ ID NO: 3405787 - DNA, 25 bp, Homo sapien
ggcctgcatgttccaccgttcgata

SEQ ID NO: 3405788 - DNA, 25 bp, Homo sapien
gactaggtagacatcgtgtgcctga

SEQ ID NO: 3405789 - DNA, 25 bp, Homo sapien
ctgacagtagaggtcacttgttggg

SEQ ID NO: 3405790 - DNA, 25 bp, Homo sapien
ttgcttgtcttgaaaaactatggaa

SEQ ID NO: 3405791 - DNA, 25 bp, Homo sapien
tatggaaaagtagcaatttaactgc

SEQ ID NO: 3405792 - DNA, 25 bp, Homo sapien
atgaggaccaaactaagaactagtg

SEQ ID NO: 3405793 - DNA, 25 bp, Homo sapien
caatggagggagctgcaatagttcc

SEQ ID NO: 3405794 - DNA, 25 bp, Homo sapien
gatgtcaatggagggagctgcaata

SEQ ID NO: 3405795 - DNA, 25 bp, Homo sapien
tgtcaatggagggagctgcaatagt

SEQ ID NO: 3405796 - DNA, 25 bp, Homo sapien
tcaatggagggagctgcaatagttc

SEQ ID NO: 3405797 - DNA, 25 bp, Homo sapien
cgaggagttcttacaatattgttgc

SEQ ID NO: 3405798 - DNA, 25 bp, Homo sapien
agctttttctcttgcgaggagttct

SEQ ID NO: 3405799 - DNA, 25 bp, Homo sapien
tctcttgcgaggagttcttacaata

SEQ ID NO: 3405800 - DNA, 25 bp, Homo sapien
caatattgttgctgagggctaccat

SEQ ID NO: 3405801 - DNA, 25 bp, Homo sapien
ttgcttaacttcagattagagcact

SEQ ID NO: 3405802 - DNA, 25 bp, Homo sapien
tacaagtcccagtatgcattgcagt

SEQ ID NO: 3405803 - DNA, 25 bp, Homo sapien
cttaacttcagattagagcactgca

SEQ ID NO: 3405804 - DNA, 25 bp, Homo sapien
caagtcccagtatgcattgcagttt

SEQ ID NO: 3405805 - DNA, 25 bp, Homo sapien
gtgcaccctggacactatagttttt

SEQ ID NO: 3405806 - DNA, 25 bp, Homo sapien
agctgtgattatagaggtgtccgcc

SEQ ID NO: 3405807 - DNA, 25 bp, Homo sapien
tatcactgaaaatatcatgccactg

SEQ ID NO: 3405808 - DNA, 25 bp, Homo sapien
tatagcacatggtcctttgaaactc

SEQ ID NO: 3405809 - DNA, 25 bp, Homo sapien
cacctacctgggctaaattgtattt

SEQ ID NO: 3405810 - DNA, 25 bp, Homo sapien
gcaggaggtgctacagcaagataaa

SEQ ID NO: 3405811 - DNA, 25 bp, Homo sapien
agtctttgtggaactggagtagtaa

SEQ ID NO: 3405812 - DNA, 25 bp, Homo sapien
tacagtttgactgacattgcttggc

SEQ ID NO: 3405813 - DNA, 25 bp, Homo sapien
gtcggtgtcaggaatgtagatgctc

SEQ ID NO: 3405814 - DNA, 25 bp, Homo sapien
tagtcggtgtcaggaatgtagatgc

SEQ ID NO: 3405815 - DNA, 25 bp, Homo sapien
ctaatagtcggtgtcaggaatgtag

SEQ ID NO: 3405816 - DNA, 25 bp, Homo sapien
cggtgtcaggaatgtagatgctcga

SEQ ID NO: 3405817 - DNA, 25 bp, Homo sapien
tcactaataaaatatgacaaaccgc

SEQ ID NO: 3405818 - DNA, 25 bp, Homo sapien
tacgtggccgattcccagtgattgc

SEQ ID NO: 3405819 - DNA, 25 bp, Homo sapien
caaaccgccggattatacgtggccg

SEQ ID NO: 3405820 - DNA, 25 bp, Homo sapien
ccttggaggtagaataggcataaaa

SEQ ID NO: 3405821 - DNA, 25 bp, Homo sapien
tgcagtagcctttaacactttggtt

SEQ ID NO: 3405822 - DNA, 25 bp, Homo sapien
actgcagtagcctttaacactttgg

SEQ ID NO: 3405823 - DNA, 25 bp, Homo sapien
gcgcctggactgttcaacagggttt

SEQ ID NO: 3405824 - DNA, 25 bp, Homo sapien
tcagctccccactagtagcttggat

SEQ ID NO: 3405825 - DNA, 25 bp, Homo sapien
ctgcaacttctatctcatcagttct

SEQ ID NO: 3405826 - DNA, 25 bp, Homo sapien
tcagtaaacttggtcatctgcaact

SEQ ID NO: 3405827 - DNA, 25 bp, Homo sapien
catctgcaacttctatctcatcagt

SEQ ID NO: 3405828 - DNA, 25 bp, Homo sapien
tcatctgcaacttctatctcatcag

SEQ ID NO: 3405829 - DNA, 25 bp, Homo sapien
gactctctgggccagtgactggatc

SEQ ID NO: 3405830 - DNA, 25 bp, Homo sapien
atctgtttttcccatgttggtgcct

SEQ ID NO: 3405831 - DNA, 25 bp, Homo sapien
tgactctctgggccagtgactggat

SEQ ID NO: 3405832 - DNA, 25 bp, Homo sapien
gatctgtttttcccatgttggtgcc

SEQ ID NO: 3405833 - DNA, 25 bp, Homo sapien
cctgccctgcaacgtacctgatata

SEQ ID NO: 3405834 - DNA, 25 bp, Homo sapien
tgatatacttccaacgaggtccctc

SEQ ID NO: 3405835 - DNA, 25 bp, Homo sapien
tttggtacccggtccttctgagcca

SEQ ID NO: 3405836 - DNA, 25 bp, Homo sapien
ggatttctaccatggcaagcaaaag

SEQ ID NO: 3405837 - DNA, 25 bp, Homo sapien
cagctgctctaagtccgcaataagt

SEQ ID NO: 3405838 - DNA, 25 bp, Homo sapien
gtgcagctgctctaagtccgcaata

SEQ ID NO: 3405839 - DNA, 25 bp, Homo sapien
gcagctgctctaagtccgcaataag

SEQ ID NO: 3405840 - DNA, 25 bp, Homo sapien
gctgctctaagtccgcaataagtga

SEQ ID NO: 3405841 - DNA, 25 bp, Homo sapien
gcggcagctctttttccacgggcca

SEQ ID NO: 3405842 - DNA, 25 bp, Homo sapien
ccagaggggatccggcccaggctgg

SEQ ID NO: 3405843 - DNA, 25 bp, Homo sapien
ggccagaggggatccggcccaggct

SEQ ID NO: 3405844 - DNA, 25 bp, Homo sapien
cggcagctctttttccacgggccag

SEQ ID NO: 3405845 - DNA, 25 bp, Homo sapien
caggtggcacgccttgcagaagaga

SEQ ID NO: 3405846 - DNA, 25 bp, Homo sapien
gggtcgcatatccttctgatagaag

SEQ ID NO: 3405847 - DNA, 25 bp, Homo sapien
cagcactctgcttcaggtggcacgc

SEQ ID NO: 3405848 - DNA, 25 bp, Homo sapien
tccagtgcactcgattttgaaggca

SEQ ID NO: 3405849 - DNA, 25 bp, Homo sapien
gccgggactagtagtccgctcactg

SEQ ID NO: 3405850 - DNA, 25 bp, Homo sapien
ctagtagtccgctcactgcctgaca

SEQ ID NO: 3405851 - DNA, 25 bp, Homo sapien
gggactagtagtccgctcactgcct

SEQ ID NO: 3405852 - DNA, 25 bp, Homo sapien
actagtagtccgctcactgcctgac

SEQ ID NO: 3405853 - DNA, 25 bp, Homo sapien
ttcagcacttaacaccttcatcatt

SEQ ID NO: 3405854 - DNA, 25 bp, Homo sapien
acttaacaccttcatcatttcagcc

SEQ ID NO: 3405855 - DNA, 25 bp, Homo sapien
acatcatgaatcagcttgtccctga

SEQ ID NO: 3405856 - DNA, 25 bp, Homo sapien
cacatcatgaatcagcttgtccctg

SEQ ID NO: 3405857 - DNA, 25 bp, Homo sapien
ggaagccacgcccatcgctctgtct

SEQ ID NO: 3405858 - DNA, 25 bp, Homo sapien
ccatcgctctgtcttgggcttgatc

SEQ ID NO: 3405859 - DNA, 25 bp, Homo sapien
tctgtcttgggcttgatcatgatca

SEQ ID NO: 3405860 - DNA, 25 bp, Homo sapien
tcgctctgtcttgggcttgatcatg

SEQ ID NO: 3405861 - DNA, 25 bp, Homo sapien
gactggtgttgaggcaatgactaga

SEQ ID NO: 3405862 - DNA, 25 bp, Homo sapien
cagggagcatttcgggcttgggagt

SEQ ID NO: 3405863 - DNA, 25 bp, Homo sapien
tgggtgggagtaggaatgactggtg

SEQ ID NO: 3405864 - DNA, 25 bp, Homo sapien
ctcagcctcgaaggcatggcaggga

SEQ ID NO: 3405865 - DNA, 25 bp, Homo sapien
tgtcattggatgcaggatgccccag

SEQ ID NO: 3405866 - DNA, 25 bp, Homo sapien
caatgcagcttccttcggttgaggg

SEQ ID NO: 3405867 - DNA, 25 bp, Homo sapien
gggcaatccctagaagagactccgt

SEQ ID NO: 3405868 - DNA, 25 bp, Homo sapien
gagactccgttgtgagcagtccgca

SEQ ID NO: 3405869 - DNA, 25 bp, Homo sapien
tagaatgggtcttttgaggtgctcc

SEQ ID NO: 3405870 - DNA, 25 bp, Homo sapien
tcagcaaatcagaggaaggttcagg

SEQ ID NO: 3405871 - DNA, 25 bp, Homo sapien
aagatgtgagtagaatgggtctttt

SEQ ID NO: 3405872 - DNA, 25 bp, Homo sapien
gaggaaggttcaggttgaggaagat

SEQ ID NO: 3405873 - DNA, 25 bp, Homo sapien
gccaatggacctacgggccttggga

SEQ ID NO: 3405874 - DNA, 25 bp, Homo sapien
tcctctgagtccaatcggaatgtgg

SEQ ID NO: 3405875 - DNA, 25 bp, Homo sapien
gtgaccttgccaatggacctacggg

SEQ ID NO: 3405876 - DNA, 25 bp, Homo sapien
caatcggaatgtgggcaaaggaact

SEQ ID NO: 3405877 - DNA, 25 bp, Homo sapien
gaggagggccaaggacgcggccgcg

SEQ ID NO: 3405878 - DNA, 25 bp, Homo sapien
tatcagtaaccgaaggacagccggc

SEQ ID NO: 3405879 - DNA, 25 bp, Homo sapien
cgtccttatcagtaaccgaaggaca

SEQ ID NO: 3405880 - DNA, 25 bp, Homo sapien
gacagccggccttccagagtttgga

SEQ ID NO: 3405881 - DNA, 25 bp, Homo sapien
aattcaccagcggatcggaggccgc

SEQ ID NO: 3405882 - DNA, 25 bp, Homo sapien
ccaagaccgcgggttctgcgtacag

SEQ ID NO: 3405883 - DNA, 25 bp, Homo sapien
ttaagatggacagaaggatcccgtc

SEQ ID NO: 3405884 - DNA, 25 bp, Homo sapien
gacagccgcggttggaattctggca

SEQ ID NO: 3405885 - DNA, 25 bp, Homo sapien
tgtaactgaatgtgatcagttagtt

SEQ ID NO: 3405886 - DNA, 25 bp, Homo sapien
cagtgtgagtggagaagaaaagaaa

SEQ ID NO: 3405887 - DNA, 25 bp, Homo sapien
atctgtaactgaatgtgatcagtta

SEQ ID NO: 3405888 - DNA, 25 bp, Homo sapien
agcagtgtgagtggagaagaaaaga

SEQ ID NO: 3405889 - DNA, 25 bp, Homo sapien
caaaagacggtgaaactgctgtctc

SEQ ID NO: 3405890 - DNA, 25 bp, Homo sapien
tagctctgcggcctttgctctcggg

SEQ ID NO: 3405891 - DNA, 25 bp, Homo sapien
ccacggcaggccacaagcaaaagac

SEQ ID NO: 3405892 - DNA, 25 bp, Homo sapien
gcctgcgagggttctgggaactggg

SEQ ID NO: 3405893 - DNA, 25 bp, Homo sapien
ccattgtctgtagggtttctcaaat

SEQ ID NO: 3405894 - DNA, 25 bp, Homo sapien
attgtctgtagggtttctcaaatgc

SEQ ID NO: 3405895 - DNA, 25 bp, Homo sapien
ttcctccattaacaaccatcgaatt

SEQ ID NO: 3405896 - DNA, 25 bp, Homo sapien
taacaaccatcgaattccattgtct

SEQ ID NO: 3405897 - DNA, 25 bp, Homo sapien
cttgcagcaggaagaggaggttcat

SEQ ID NO: 3405898 - DNA, 25 bp, Homo sapien
ttcagggcccatcaaagctggctgc

SEQ ID NO: 3405899 - DNA, 25 bp, Homo sapien
ttctgagcagcaggcctatttttaa

SEQ ID NO: 3405900 - DNA, 25 bp, Homo sapien
tcagagatcaatttgctgaggtcca

SEQ ID NO: 3405901 - DNA, 25 bp, Homo sapien
acactccgggttttgtagttcattg

SEQ ID NO: 3405902 - DNA, 25 bp, Homo sapien
ttgaagtctccagtaataggagaga

SEQ ID NO: 3405903 - DNA, 25 bp, Homo sapien
cctcatattgttggggacactcccc

SEQ ID NO: 3405904 - DNA, 25 bp, Homo sapien
tccagtaataggagagaaaccaaca

SEQ ID NO: 3405905 - DNA, 25 bp, Homo sapien
tcctgccttgagtcctcatattgtt

SEQ ID NO: 3405906 - DNA, 25 bp, Homo sapien
gacatctctagaacgcagccacctg

SEQ ID NO: 3405907 - DNA, 25 bp, Homo sapien
tagacatctctagaacgcagccacc

SEQ ID NO: 3405908 - DNA, 25 bp, Homo sapien
atctctagaacgcagccacctggct

SEQ ID NO: 3405909 - DNA, 25 bp, Homo sapien
ctagaacgcagccacctggctccct

SEQ ID NO: 3405910 - DNA, 25 bp, Homo sapien
tggcacactctaacaggaacttctg

SEQ ID NO: 3405911 - DNA, 25 bp, Homo sapien
aaaacatattcatcctggagattag

SEQ ID NO: 3405912 - DNA, 25 bp, Homo sapien
gctccctaaattgggctgcatggct

SEQ ID NO: 3405913 - DNA, 25 bp, Homo sapien
cctggagattagactgacttccggg

SEQ ID NO: 3405914 - DNA, 25 bp, Homo sapien
ctgtgacgggctcaggaacacctgg

SEQ ID NO: 3405915 - DNA, 25 bp, Homo sapien
cagctccttctgtgacgggctcagg

SEQ ID NO: 3405916 - DNA, 25 bp, Homo sapien
cacgagaggcactgatggcagctcc

SEQ ID NO: 3405917 - DNA, 25 bp, Homo sapien
aatactgcaggtcacgagaggcact

SEQ ID NO: 3405918 - DNA, 25 bp, Homo sapien
cagcttctgcggagtctgagaggca

SEQ ID NO: 3405919 - DNA, 25 bp, Homo sapien
aggtgaacaccccaggaaaccattg

SEQ ID NO: 3405920 - DNA, 25 bp, Homo sapien
tgaacaccccaggaaaccattgaaa

SEQ ID NO: 3405921 - DNA, 25 bp, Homo sapien
gaggcagaatctcccaagagaaatc

SEQ ID NO: 3405922 - DNA, 25 bp, Homo sapien
gtgtcctctctttccttattcttac

SEQ ID NO: 3405923 - DNA, 25 bp, Homo sapien
gagtgtcctctctttccttattctt

SEQ ID NO: 3405924 - DNA, 25 bp, Homo sapien
ttagagtgtcctctctttccttatt

SEQ ID NO: 3405925 - DNA, 25 bp, Homo sapien
tagagtgtcctctctttccttattc

SEQ ID NO: 3405926 - DNA, 25 bp, Homo sapien
gcgcaccgtgggcattcagccgact

SEQ ID NO: 3405927 - DNA, 25 bp, Homo sapien
agtgctcccccgagactgggtggct

SEQ ID NO: 3405928 - DNA, 25 bp, Homo sapien
cctgcctgagcgctggcaaacgggc

SEQ ID NO: 3405929 - DNA, 25 bp, Homo sapien
gggccttagggcagcggctaggagc

SEQ ID NO: 3405930 - DNA, 25 bp, Homo sapien
ttgttgaggaagtccgactcgttca

SEQ ID NO: 3405931 - DNA, 25 bp, Homo sapien
ttgaggaagtccgactcgttcagat

SEQ ID NO: 3405932 - DNA, 25 bp, Homo sapien
aggaagtccgactcgttcagatccc

SEQ ID NO: 3405933 - DNA, 25 bp, Homo sapien
ggaagtccgactcgttcagatcccc

SEQ ID NO: 3405934 - DNA, 25 bp, Homo sapien
tccgaggatcggacggacccgatac

SEQ ID NO: 3405935 - DNA, 25 bp, Homo sapien
ggatcggacggacccgatacctcga

SEQ ID NO: 3405936 - DNA, 25 bp, Homo sapien
ggacggacccgatacctcgatggcc

SEQ ID NO: 3405937 - DNA, 25 bp, Homo sapien
tcagatccgaggatcggacggaccc

SEQ ID NO: 3405938 - DNA, 25 bp, Homo sapien
ttccatctggagaaacgacctgctc

SEQ ID NO: 3405939 - DNA, 25 bp, Homo sapien
ctgtctctctcattcgtccgcgatt

SEQ ID NO: 3405940 - DNA, 25 bp, Homo sapien
taccctggcaccagcatagatgttc

SEQ ID NO: 3405941 - DNA, 25 bp, Homo sapien
tcttcatctgggttaccctggcacc

SEQ ID NO: 3405942 - DNA, 25 bp, Homo sapien
tccgcgattgactggagggtcaagt

SEQ ID NO: 3405943 - DNA, 25 bp, Homo sapien
tcttaagctgggtaagtttccatgt

SEQ ID NO: 3405944 - DNA, 25 bp, Homo sapien
tgagtctgattcttaagctgggtaa

SEQ ID NO: 3405945 - DNA, 25 bp, Homo sapien
tgattcttaagctgggtaagtttcc

SEQ ID NO: 3405946 - DNA, 25 bp, Homo sapien
taagctgggtaagtttccatgtatt

SEQ ID NO: 3405947 - DNA, 25 bp, Homo sapien
accgagtgccggggttggcgcaggg

SEQ ID NO: 3405948 - DNA, 25 bp, Homo sapien
agtgccggggttggcgcaggggcct

SEQ ID NO: 3405949 - DNA, 25 bp, Homo sapien
gagtgccggggttggcgcaggggcc

SEQ ID NO: 3405950 - DNA, 25 bp, Homo sapien
gaaaccgagtgccggggttggcgca

SEQ ID NO: 3405951 - DNA, 25 bp, Homo sapien
gtgtctggcacctccgagggcacag

SEQ ID NO: 3405952 - DNA, 25 bp, Homo sapien
aggaagcgatggcagcgagtgccgc

SEQ ID NO: 3405953 - DNA, 25 bp, Homo sapien
gctgggattagctgtgtctggcacc

SEQ ID NO: 3405954 - DNA, 25 bp, Homo sapien
gatgctggtctataggcagcggcca

SEQ ID NO: 3405955 - DNA, 25 bp, Homo sapien
caggcagcccatgcgctgtggtcca

SEQ ID NO: 3405956 - DNA, 25 bp, Homo sapien
ccatgcgctgtggtccaaccctggg

SEQ ID NO: 3405957 - DNA, 25 bp, Homo sapien
cagcccatgcgctgtggtccaaccc

SEQ ID NO: 3405958 - DNA, 25 bp, Homo sapien
gcccatgcgctgtggtccaaccctg

SEQ ID NO: 3405959 - DNA, 25 bp, Homo sapien
agtaatggtaccagctctagccttg

SEQ ID NO: 3405960 - DNA, 25 bp, Homo sapien
ctctcccggggcagtaatggtacca

SEQ ID NO: 3405961 - DNA, 25 bp, Homo sapien
gtaatggtaccagctctagccttgt

SEQ ID NO: 3405962 - DNA, 25 bp, Homo sapien
ggactctcccggggcagtaatggta

SEQ ID NO: 3405963 - DNA, 25 bp, Homo sapien
gagtgcagggctcgcgcggaggagg

SEQ ID NO: 3405964 - DNA, 25 bp, Homo sapien
cggcgtggagggcaccggaggagtg

SEQ ID NO: 3405965 - DNA, 25 bp, Homo sapien
agagctcctggccaatggcgggagg

SEQ ID NO: 3405966 - DNA, 25 bp, Homo sapien
actggctcgggcctgcatgggaccc

SEQ ID NO: 3405967 - DNA, 25 bp, Homo sapien
tggctacaccctccgcagagcccgg

SEQ ID NO: 3405968 - DNA, 25 bp, Homo sapien
gcgcttccgccagttctctccctta

SEQ ID NO: 3405969 - DNA, 25 bp, Homo sapien
gctggctacaccctccgcagagccc

SEQ ID NO: 3405970 - DNA, 25 bp, Homo sapien
gctgggggcgcttccgccagttctc

SEQ ID NO: 3405971 - DNA, 25 bp, Homo sapien
gccatcagcataccaattgtccatc

SEQ ID NO: 3405972 - DNA, 25 bp, Homo sapien
tgccatcagcataccaattgtccat

SEQ ID NO: 3405973 - DNA, 25 bp, Homo sapien
ctggctcatgatactggtggaggga

SEQ ID NO: 3405974 - DNA, 25 bp, Homo sapien
tgctccgcctggatgcctggcgtag

SEQ ID NO: 3405975 - DNA, 25 bp, Homo sapien
tctccgtaaagtggtccaggtgctc

SEQ ID NO: 3405976 - DNA, 25 bp, Homo sapien
cctggcgtaggggagtccagttcca

SEQ ID NO: 3405977 - DNA, 25 bp, Homo sapien
ccagttccatgtccaatagagggct

SEQ ID NO: 3405978 - DNA, 25 bp, Homo sapien
tggtcttcgtctcctcacctcaggt

SEQ ID NO: 3405979 - DNA, 25 bp, Homo sapien
ctcactacaccttctccacccgggt

SEQ ID NO: 3405980 - DNA, 25 bp, Homo sapien
aatggaggcaccatgtgatggaggg

SEQ ID NO: 3405981 - DNA, 25 bp, Homo sapien
tgatggagggcatcatgctgggcta

SEQ ID NO: 3405982 - DNA, 25 bp, Homo sapien
gtgccatcatgagtcactgcagtct

SEQ ID NO: 3405983 - DNA, 25 bp, Homo sapien
ccatcatgagtcactgcagtcttga

SEQ ID NO: 3405984 - DNA, 25 bp, Homo sapien
tgccatcatgagtcactgcagtctt

SEQ ID NO: 3405985 - DNA, 25 bp, Homo sapien
gccatcatgagtcactgcagtcttg

SEQ ID NO: 3405986 - DNA, 25 bp, Homo sapien
taatacaactactgttatttagtaa

SEQ ID NO: 3405987 - DNA, 25 bp, Homo sapien
acaactactgttatttagtaaacat

SEQ ID NO: 3405988 - DNA, 25 bp, Homo sapien
tacaactactgttatttagtaaaca

SEQ ID NO: 3405989 - DNA, 25 bp, Homo sapien
gtgttaatacaactactgttattta

SEQ ID NO: 3405990 - DNA, 25 bp, Homo sapien
aatgagcttgggcaccagattcaca

SEQ ID NO: 3405991 - DNA, 25 bp, Homo sapien
tgaagagagctgttagggtagacca

SEQ ID NO: 3405992 - DNA, 25 bp, Homo sapien
gggagctaccctaggctgaactgaa

SEQ ID NO: 3405993 - DNA, 25 bp, Homo sapien
cattcagcagcttacagaatgagct

SEQ ID NO: 3405994 - DNA, 25 bp, Homo sapien
tggagcacagtttgtgtcccagcgc

SEQ ID NO: 3405995 - DNA, 25 bp, Homo sapien
caccatgatggagcacagtttgtgt

SEQ ID NO: 3405996 - DNA, 25 bp, Homo sapien
gagcacagtttgtgtcccagcgccc

SEQ ID NO: 3405997 - DNA, 25 bp, Homo sapien
cctgcttcaccatgatggagcacag

SEQ ID NO: 3405998 - DNA, 25 bp, Homo sapien
ttcaatggctggtagcagtagtaca

SEQ ID NO: 3405999 - DNA, 25 bp, Homo sapien
gcagtagtacagaaggaggcattaa

SEQ ID NO: 3406000 - DNA, 25 bp, Homo sapien
tacagaaggaggcattaattggctg

SEQ ID NO: 3406001 - DNA, 25 bp, Homo sapien
tgtctggaacagtgtagctgttcaa

SEQ ID NO: 3406002 - DNA, 25 bp, Homo sapien
tttgaggaactggttcacctccaga

SEQ ID NO: 3406003 - DNA, 25 bp, Homo sapien
tgaggaactggttcacctccagagg

SEQ ID NO: 3406004 - DNA, 25 bp, Homo sapien
ggaactggttcacctccagaggctc

SEQ ID NO: 3406005 - DNA, 25 bp, Homo sapien
gaggaactggttcacctccagaggc

SEQ ID NO: 3406006 - DNA, 25 bp, Homo sapien
atggccgtggaggagcgcgccatgg

SEQ ID NO: 3406007 - DNA, 25 bp, Homo sapien
ggagcgcgccatgggcctgacaggg

SEQ ID NO: 3406008 - DNA, 25 bp, Homo sapien
gaggagcgcgccatgggcctgacag

SEQ ID NO: 3406009 - DNA, 25 bp, Homo sapien
tgctggggggcgtcggaggcatctg

SEQ ID NO: 3406010 - DNA, 25 bp, Homo sapien
agcagtggccctgatgtcccctgta

SEQ ID NO: 3406011 - DNA, 25 bp, Homo sapien
ctgtcaggagcagtggccctgatgt

SEQ ID NO: 3406012 - DNA, 25 bp, Homo sapien
gtcaggagcagtggccctgatgtcc

SEQ ID NO: 3406013 - DNA, 25 bp, Homo sapien
gtggccctgatgtcccctgtaattt

SEQ ID NO: 3406014 - DNA, 25 bp, Homo sapien
tgattttcctccggactctcttcaa

SEQ ID NO: 3406015 - DNA, 25 bp, Homo sapien
tttcctccggactctcttcaaggcc

SEQ ID NO: 3406016 - DNA, 25 bp, Homo sapien
gattttcctccggactctcttcaag

SEQ ID NO: 3406017 - DNA, 25 bp, Homo sapien
ttttcctccggactctcttcaaggc

SEQ ID NO: 3406018 - DNA, 25 bp, Homo sapien
cttcttcttacgacggctctcctgg

SEQ ID NO: 3406019 - DNA, 25 bp, Homo sapien
tactccttcttcttacgacggctct

SEQ ID NO: 3406020 - DNA, 25 bp, Homo sapien
ttcttacgacggctctcctgggctg

SEQ ID NO: 3406021 - DNA, 25 bp, Homo sapien
atactccttcttcttacgacggctc

SEQ ID NO: 3406022 - DNA, 25 bp, Homo sapien
accttcttccacagttcattgttct

SEQ ID NO: 3406023 - DNA, 25 bp, Homo sapien
tgttctcagatgtaaatgtctccac

SEQ ID NO: 3406024 - DNA, 25 bp, Homo sapien
gttctcagatgtaaatgtctccacc

SEQ ID NO: 3406025 - DNA, 25 bp, Homo sapien
gattctccaggccaatcagggaaca

SEQ ID NO: 3406026 - DNA, 25 bp, Homo sapien
cttggacctactttgggccagaaag

SEQ ID NO: 3406027 - DNA, 25 bp, Homo sapien
tggcgaaataactacaagggcttgg

SEQ ID NO: 3406028 - DNA, 25 bp, Homo sapien
cacaatgtacagcaggtggcgaaat

SEQ ID NO: 3406029 - DNA, 25 bp, Homo sapien
taggaaaggtcacctcctgcgtggc

SEQ ID NO: 3406030 - DNA, 25 bp, Homo sapien
tcttttgcttaaccgacacctgcca

SEQ ID NO: 3406031 - DNA, 25 bp, Homo sapien
cagcagtcagctggcaggctttgac

SEQ ID NO: 3406032 - DNA, 25 bp, Homo sapien
gccaggtgcccgtttcagtcaagat

SEQ ID NO: 3406033 - DNA, 25 bp, Homo sapien
gagatcttgttggtgaccagagtct

SEQ ID NO: 3406034 - DNA, 25 bp, Homo sapien
catcttgtaaggtctggagatcttg

SEQ ID NO: 3406035 - DNA, 25 bp, Homo sapien
cccagtctgggtggcggccatcttg

SEQ ID NO: 3406036 - DNA, 25 bp, Homo sapien
tcttgttggtgaccagagtctggag

SEQ ID NO: 3406037 - DNA, 25 bp, Homo sapien
gtgtagacgccgtctgcggccaggg

SEQ ID NO: 3406038 - DNA, 25 bp, Homo sapien
ggagaactcgggaaggcagggcacg

SEQ ID NO: 3406039 - DNA, 25 bp, Homo sapien
agaactcgggaaggcagggcacgag

SEQ ID NO: 3406040 - DNA, 25 bp, Homo sapien
cgtgtagacgccgtctgcggccagg

SEQ ID NO: 3406041 - DNA, 25 bp, Homo sapien
caaggcccatagacctaagtagagt

SEQ ID NO: 3406042 - DNA, 25 bp, Homo sapien
tttgttaggcattatccaaggccca

SEQ ID NO: 3406043 - DNA, 25 bp, Homo sapien
gttggacacccatcatttgttaggc

SEQ ID NO: 3406044 - DNA, 25 bp, Homo sapien
gagattaccggagtgagttaccgca

SEQ ID NO: 3406045 - DNA, 25 bp, Homo sapien
tgctgtccaggtgatcatgctgcag

SEQ ID NO: 3406046 - DNA, 25 bp, Homo sapien
taggccaggcctcactcaggtactt

SEQ ID NO: 3406047 - DNA, 25 bp, Homo sapien
tgtcgtggaaccactccttggagtg

SEQ ID NO: 3406048 - DNA, 25 bp, Homo sapien
catcgtagaataggaggcttcggga

SEQ ID NO: 3406049 - DNA, 25 bp, Homo sapien
tggagagagaagagaggccagcgat

SEQ ID NO: 3406050 - DNA, 25 bp, Homo sapien
gagagagaagagaggccagcgatga

SEQ ID NO: 3406051 - DNA, 25 bp, Homo sapien
ggagagagaagagaggccagcgatg

SEQ ID NO: 3406052 - DNA, 25 bp, Homo sapien
tgatggtggtgttggggcccagatc

SEQ ID NO: 3406053 - DNA, 25 bp, Homo sapien
ctaggagagtttgatggtggtgttg

SEQ ID NO: 3406054 - DNA, 25 bp, Homo sapien
gtttgatggtggtgttggggcccag

SEQ ID NO: 3406055 - DNA, 25 bp, Homo sapien
taggagagtttgatggtggtgttgg

SEQ ID NO: 3406056 - DNA, 25 bp, Homo sapien
cccagtgagtggtttgtctgagaag

SEQ ID NO: 3406057 - DNA, 25 bp, Homo sapien
cacgaggcggatccgggttagtgag

SEQ ID NO: 3406058 - DNA, 25 bp, Homo sapien
tagtgagcaagaactcctcttctgg

SEQ ID NO: 3406059 - DNA, 25 bp, Homo sapien
aatgagaacagagtggtcggcccaa

SEQ ID NO: 3406060 - DNA, 25 bp, Homo sapien
tacaatatcttaggggattggcaat

SEQ ID NO: 3406061 - DNA, 25 bp, Homo sapien
ggccagggagcagcaaagcccgcac

SEQ ID NO: 3406062 - DNA, 25 bp, Homo sapien
caatttctgttcttggtctctgtac

SEQ ID NO: 3406063 - DNA, 25 bp, Homo sapien
gcaaagcccgcactaacttcataaa

SEQ ID NO: 3406064 - DNA, 25 bp, Homo sapien
gtgagggtcaggtagtccctctttc

SEQ ID NO: 3406065 - DNA, 25 bp, Homo sapien
tgctttcttaaagcatgtgctgagc

SEQ ID NO: 3406066 - DNA, 25 bp, Homo sapien
ggtgccaggtgagggtcaggtagtc

SEQ ID NO: 3406067 - DNA, 25 bp, Homo sapien
tttcttaaagcatgtgctgagctga

SEQ ID NO: 3406068 - DNA, 25 bp, Homo sapien
tgcccttatctcacatccctttatg

SEQ ID NO: 3406069 - DNA, 25 bp, Homo sapien
actccaggagcgaggacacccctga

SEQ ID NO: 3406070 - DNA, 25 bp, Homo sapien
tttatgcagacccaaggctttcacc

SEQ ID NO: 3406071 - DNA, 25 bp, Homo sapien
tgaccatcgccccgggaagtgctct

SEQ ID NO: 3406072 - DNA, 25 bp, Homo sapien
tagcgacgccgacgcttagacgaca

SEQ ID NO: 3406073 - DNA, 25 bp, Homo sapien
ttcgggcacccgctcaagttcgagt

SEQ ID NO: 3406074 - DNA, 25 bp, Homo sapien
gcgcacccgagtgtcaccttagaga

SEQ ID NO: 3406075 - DNA, 25 bp, Homo sapien
ttagacgacaggagcagcgagatgc

SEQ ID NO: 3406076 - DNA, 25 bp, Homo sapien
ggccgccttccgcccgcggctcctg

SEQ ID NO: 3406077 - DNA, 25 bp, Homo sapien
gtgcggccgccttccgcccgcggct

SEQ ID NO: 3406078 - DNA, 25 bp, Homo sapien
cgccttccgcccgcggctcctgcgg

SEQ ID NO: 3406079 - DNA, 25 bp, Homo sapien
cgtgcggccgccttccgcccgcggc

SEQ ID NO: 3406080 - DNA, 25 bp, Homo sapien
cagggctgcgcgacctgggcctcct

SEQ ID NO: 3406081 - DNA, 25 bp, Homo sapien
tgcagctggcggaaacgctcctcca

SEQ ID NO: 3406082 - DNA, 25 bp, Homo sapien
tttcgtaggtgcagctggcggaaac

SEQ ID NO: 3406083 - DNA, 25 bp, Homo sapien
gtaagacacctgctttcgtaggtgc

SEQ ID NO: 3406084 - DNA, 25 bp, Homo sapien
cactcctcgccctcagatttttttg

SEQ ID NO: 3406085 - DNA, 25 bp, Homo sapien
catttctgtctaaaagccttttcgc

SEQ ID NO: 3406086 - DNA, 25 bp, Homo sapien
agcccgcttccgcttccactcctcg

SEQ ID NO: 3406087 - DNA, 25 bp, Homo sapien
gccaggccttcagcccgcttccgct

SEQ ID NO: 3406088 - DNA, 25 bp, Homo sapien
ggaagccactgagtttaactctgga

SEQ ID NO: 3406089 - DNA, 25 bp, Homo sapien
tgagcccaaccctgatcatttacgc

SEQ ID NO: 3406090 - DNA, 25 bp, Homo sapien
catttacgctgagagtgacttttcc

SEQ ID NO: 3406091 - DNA, 25 bp, Homo sapien
cactctggctttacctagctggagc

SEQ ID NO: 3406092 - DNA, 25 bp, Homo sapien
ggagagttggatcaggtgcccctcc

SEQ ID NO: 3406093 - DNA, 25 bp, Homo sapien
ttgaggagtcgtggacccgcagcag

SEQ ID NO: 3406094 - DNA, 25 bp, Homo sapien
ttctggtaaatagccgcagggagag

SEQ ID NO: 3406095 - DNA, 25 bp, Homo sapien
ttagcttctggtaaatagccgcagg

SEQ ID NO: 3406096 - DNA, 25 bp, Homo sapien
ggcctggatgagcaagtgggagctg

SEQ ID NO: 3406097 - DNA, 25 bp, Homo sapien
ctcagaatccacccaggtacacaca

SEQ ID NO: 3406098 - DNA, 25 bp, Homo sapien
gtggcctggatgagcaagtgggagc

SEQ ID NO: 3406099 - DNA, 25 bp, Homo sapien
cctcagaatccacccaggtacacac

SEQ ID NO: 3406100 - DNA, 25 bp, Homo sapien
ggacaggtgcatgggactatggagg

SEQ ID NO: 3406101 - DNA, 25 bp, Homo sapien
gcatgggactatggaggatgccctt

SEQ ID NO: 3406102 - DNA, 25 bp, Homo sapien
tgcatgggactatggaggatgccct

SEQ ID NO: 3406103 - DNA, 25 bp, Homo sapien
ggaagggacaggtgcatgggactat

SEQ ID NO: 3406104 - DNA, 25 bp, Homo sapien
cttggcgctgtcaatgtcatctctg

SEQ ID NO: 3406105 - DNA, 25 bp, Homo sapien
ctccttggcgctgtcaatgtcatct

SEQ ID NO: 3406106 - DNA, 25 bp, Homo sapien
ccttggcgctgtcaatgtcatctct

SEQ ID NO: 3406107 - DNA, 25 bp, Homo sapien
tccttggcgctgtcaatgtcatctc

SEQ ID NO: 3406108 - DNA, 25 bp, Homo sapien
caagaagcagggcagtcctgactgt

SEQ ID NO: 3406109 - DNA, 25 bp, Homo sapien
agaagcagggcagtcctgactgtga

SEQ ID NO: 3406110 - DNA, 25 bp, Homo sapien
cttcaagaagcagggcagtcctgac

SEQ ID NO: 3406111 - DNA, 25 bp, Homo sapien
ggcttcaagaagcagggcagtcctg

SEQ ID NO: 3406112 - DNA, 25 bp, Homo sapien
aggctcagggctcataggcgccttc

SEQ ID NO: 3406113 - DNA, 25 bp, Homo sapien
tgctagaggccgctggccgcccaag

SEQ ID NO: 3406114 - DNA, 25 bp, Homo sapien
tcagggctcataggcgccttccgct

SEQ ID NO: 3406115 - DNA, 25 bp, Homo sapien
tcataggcgccttccgctggctggg

SEQ ID NO: 3406116 - DNA, 25 bp, Homo sapien
ggccagcccccggtgcgctcatcct

SEQ ID NO: 3406117 - DNA, 25 bp, Homo sapien
tcctgcccggcgactctcttcctct

SEQ ID NO: 3406118 - DNA, 25 bp, Homo sapien
tcattgcagcttcccccggcactgt

SEQ ID NO: 3406119 - DNA, 25 bp, Homo sapien
agcttcccccggcactgtggccagc

SEQ ID NO: 3406120 - DNA, 25 bp, Homo sapien
tgcctcagtgaccccggccgctccc

SEQ ID NO: 3406121 - DNA, 25 bp, Homo sapien
gctccccttcttccgtccccagcgc

SEQ ID NO: 3406122 - DNA, 25 bp, Homo sapien
cgctccccttcttccgtccccagcg

SEQ ID NO: 3406123 - DNA, 25 bp, Homo sapien
tcagtgaccccggccgctccccttc

SEQ ID NO: 3406124 - DNA, 25 bp, Homo sapien
gtctggggtgcctctgatgggatct

SEQ ID NO: 3406125 - DNA, 25 bp, Homo sapien
gcacgtcccaggagcggtagcgcca

SEQ ID NO: 3406126 - DNA, 25 bp, Homo sapien
ctctgatgggatctgtggcacgtcc

SEQ ID NO: 3406127 - DNA, 25 bp, Homo sapien
cgtcccaggagcggtagcgccacat

SEQ ID NO: 3406128 - DNA, 25 bp, Homo sapien
tagtcagccgcaaatagccaatgct

SEQ ID NO: 3406129 - DNA, 25 bp, Homo sapien
tgggttctggcagcccgttttccag

SEQ ID NO: 3406130 - DNA, 25 bp, Homo sapien
ttccagccttagtcagccgcaaata

SEQ ID NO: 3406131 - DNA, 25 bp, Homo sapien
tgcttagggctgtgacctgcggaca

SEQ ID NO: 3406132 - DNA, 25 bp, Homo sapien
gagggcccgcgggagacgcccatgc

SEQ ID NO: 3406133 - DNA, 25 bp, Homo sapien
gcgggagacgcccatgccgggccgg

SEQ ID NO: 3406134 - DNA, 25 bp, Homo sapien
gcccgcgggagacgcccatgccggg

SEQ ID NO: 3406135 - DNA, 25 bp, Homo sapien
ggagacgcccatgccgggccggcgg

SEQ ID NO: 3406136 - DNA, 25 bp, Homo sapien
tgtccggctcgggaccggcgtcgcg

SEQ ID NO: 3406137 - DNA, 25 bp, Homo sapien
agccgctggacgaggcggaagccga

SEQ ID NO: 3406138 - DNA, 25 bp, Homo sapien
cagccccgggaagcgccgcttgttg

SEQ ID NO: 3406139 - DNA, 25 bp, Homo sapien
cgcttgttgagtcgccgcggcgcct

SEQ ID NO: 3406140 - DNA, 25 bp, Homo sapien
agagaggccctgttctatcagtgcc

SEQ ID NO: 3406141 - DNA, 25 bp, Homo sapien
tctatcagtgccaagaaggcgtggg

SEQ ID NO: 3406142 - DNA, 25 bp, Homo sapien
ggtactacacatgaggcgcactaga

SEQ ID NO: 3406143 - DNA, 25 bp, Homo sapien
gttgggagccgatcctcccacggta

SEQ ID NO: 3406144 - DNA, 25 bp, Homo sapien
agcggctcacgaccaagagcagcac

SEQ ID NO: 3406145 - DNA, 25 bp, Homo sapien
cagcggctcacgaccaagagcagca

SEQ ID NO: 3406146 - DNA, 25 bp, Homo sapien
gcagcggctcacgaccaagagcagc

SEQ ID NO: 3406147 - DNA, 25 bp, Homo sapien
gcaacaggaagcctctggtggcgcc

SEQ ID NO: 3406148 - DNA, 25 bp, Homo sapien
gacattgaagcctgcgtggtaacac

SEQ ID NO: 3406149 - DNA, 25 bp, Homo sapien
gaacccaacacttgataccctgtgg

SEQ ID NO: 3406150 - DNA, 25 bp, Homo sapien
gaatactggaggctacatcctgcag

SEQ ID NO: 3406151 - DNA, 25 bp, Homo sapien
ctcagggaggagactgatagttccg

SEQ ID NO: 3406152 - DNA, 25 bp, Homo sapien
cacaagctggggagaatcatggctc

SEQ ID NO: 3406153 - DNA, 25 bp, Homo sapien
gagactgatagttccggcaagaagt

SEQ ID NO: 3406154 - DNA, 25 bp, Homo sapien
atagttccggcaagaagtaaggtgg

SEQ ID NO: 3406155 - DNA, 25 bp, Homo sapien
cacactgcccccgcagctgacttag

SEQ ID NO: 3406156 - DNA, 25 bp, Homo sapien
acactgcccccgcagctgacttaga

SEQ ID NO: 3406157 - DNA, 25 bp, Homo sapien
ctgcccccgcagctgacttagaggg

SEQ ID NO: 3406158 - DNA, 25 bp, Homo sapien
actgcccccgcagctgacttagagg

SEQ ID NO: 3406159 - DNA, 25 bp, Homo sapien
ggatgctatcgcccgctccatgttc

SEQ ID NO: 3406160 - DNA, 25 bp, Homo sapien
tcctctctagaggaccccaagagtg

SEQ ID NO: 3406161 - DNA, 25 bp, Homo sapien
gggatggcaacagccttggtttggg

SEQ ID NO: 3406162 - DNA, 25 bp, Homo sapien
ggccacttctctttgttgggtacaa

SEQ ID NO: 3406163 - DNA, 25 bp, Homo sapien
ttgtgtaaccacatgcaacggctga

SEQ ID NO: 3406164 - DNA, 25 bp, Homo sapien
tgtgtaaccacatgcaacggctgac

SEQ ID NO: 3406165 - DNA, 25 bp, Homo sapien
cttgtgtaaccacatgcaacggctg

SEQ ID NO: 3406166 - DNA, 25 bp, Homo sapien
agcttaaaacaataagcccattacg

SEQ ID NO: 3406167 - DNA, 25 bp, Homo sapien
aaaattggtgaagatcccaaaagag

SEQ ID NO: 3406168 - DNA, 25 bp, Homo sapien
gaaatgtttaagatacttactagct

SEQ ID NO: 3406169 - DNA, 25 bp, Homo sapien
tgttttagggggtgacagctattaa

SEQ ID NO: 3406170 - DNA, 25 bp, Homo sapien
cctagtttggagagctagcagccgt

SEQ ID NO: 3406171 - DNA, 25 bp, Homo sapien
ctgagcaagtcctagtttggagagc

SEQ ID NO: 3406172 - DNA, 25 bp, Homo sapien
tgcagcctgagacagccgttatgaa

SEQ ID NO: 3406173 - DNA, 25 bp, Homo sapien
taacccgattggtaactgaacgcac

SEQ ID NO: 3406174 - DNA, 25 bp, Homo sapien
cccagaaccccctcggctctgctcc

SEQ ID NO: 3406175 - DNA, 25 bp, Homo sapien
gaaccccctcggctctgctcccaca

SEQ ID NO: 3406176 - DNA, 25 bp, Homo sapien
accccctcggctctgctcccacaga

SEQ ID NO: 3406177 - DNA, 25 bp, Homo sapien
gcagccccagagcaagggcctgcag

SEQ ID NO: 3406178 - DNA, 25 bp, Homo sapien
gtcacctgggtatctgctcgtgcca

SEQ ID NO: 3406179 - DNA, 25 bp, Homo sapien
gttgctctcacaggataccccatgg

SEQ ID NO: 3406180 - DNA, 25 bp, Homo sapien
agagccggccacaggtgtcacctgg

SEQ ID NO: 3406181 - DNA, 25 bp, Homo sapien
tgctcgtgccatgaggaatgccctc

SEQ ID NO: 3406182 - DNA, 25 bp, Homo sapien
acctcgccacacagtacgtgtaaag

SEQ ID NO: 3406183 - DNA, 25 bp, Homo sapien
agtacgtgtaaaggtcaccctgagg

SEQ ID NO: 3406184 - DNA, 25 bp, Homo sapien
gagggcttcaacaccaagagcacag

SEQ ID NO: 3406185 - DNA, 25 bp, Homo sapien
cacacagtacgtgtaaaggtcaccc

SEQ ID NO: 3406186 - DNA, 25 bp, Homo sapien
gggtgatgccgggaaacccttctga

SEQ ID NO: 3406187 - DNA, 25 bp, Homo sapien
gactctgctcctgatggagcctgtg

SEQ ID NO: 3406188 - DNA, 25 bp, Homo sapien
tcttctgcggccctgatgctggaag

SEQ ID NO: 3406189 - DNA, 25 bp, Homo sapien
actcacaattccaaacgctgcacag

SEQ ID NO: 3406190 - DNA, 25 bp, Homo sapien
gctgatggtaagaactttctggtgc

SEQ ID NO: 3406191 - DNA, 25 bp, Homo sapien
tgacaataggcttgggccaaaagca

SEQ ID NO: 3406192 - DNA, 25 bp, Homo sapien
cttgggccaaaagcaaagccttctg

SEQ ID NO: 3406193 - DNA, 25 bp, Homo sapien
ccttctggattctgggtgtgtgcgt

SEQ ID NO: 3406194 - DNA, 25 bp, Homo sapien
tcatgggacatggagcaaaccaagc

SEQ ID NO: 3406195 - DNA, 25 bp, Homo sapien
gcaggttaggtgtcccctcatggga

SEQ ID NO: 3406196 - DNA, 25 bp, Homo sapien
ccctgccggaagctgatggaaaaga

SEQ ID NO: 3406197 - DNA, 25 bp, Homo sapien
tctacagagctctgggcctaaaggc

SEQ ID NO: 3406198 - DNA, 25 bp, Homo sapien
tgtgtccgggagcccattcacagcc

SEQ ID NO: 3406199 - DNA, 25 bp, Homo sapien
ctgtgtccgggagcccattcacagc

SEQ ID NO: 3406200 - DNA, 25 bp, Homo sapien
gtgtccgggagcccattcacagcct

SEQ ID NO: 3406201 - DNA, 25 bp, Homo sapien
agagaccgggagcatcaggagctgg

SEQ ID NO: 3406202 - DNA, 25 bp, Homo sapien
tggagcggcgccgctgtgccagtga

SEQ ID NO: 3406203 - DNA, 25 bp, Homo sapien
ccccgcaactcaggaggcagccctg

SEQ ID NO: 3406204 - DNA, 25 bp, Homo sapien
gagcaccttatccacgatgaagcgg

SEQ ID NO: 3406205 - DNA, 25 bp, Homo sapien
cccacggtggtaggctgtggagtga

SEQ ID NO: 3406206 - DNA, 25 bp, Homo sapien
attcatgcccacaagcccggtcaac

SEQ ID NO: 3406207 - DNA, 25 bp, Homo sapien
gccttgcgccgtagggctacctggc

SEQ ID NO: 3406208 - DNA, 25 bp, Homo sapien
cagagagcgtggtcatatacggcat

SEQ ID NO: 3406209 - DNA, 25 bp, Homo sapien
gatagtagccgtgcaggccccagag

SEQ ID NO: 3406210 - DNA, 25 bp, Homo sapien
gctacctggcgcctgcgggacagtg

SEQ ID NO: 3406211 - DNA, 25 bp, Homo sapien
ggatctgccgctctgactcgctgca

SEQ ID NO: 3406212 - DNA, 25 bp, Homo sapien
gtactccggatctgccgctctgact

SEQ ID NO: 3406213 - DNA, 25 bp, Homo sapien
agtccactgtactccggatctgccg

SEQ ID NO: 3406214 - DNA, 25 bp, Homo sapien
tccagtccactgtactccggatctg

SEQ ID NO: 3406215 - DNA, 25 bp, Homo sapien
acgttggtctcgaaccagatgtgct

SEQ ID NO: 3406216 - DNA, 25 bp, Homo sapien
ccaacgtagcagaagtccccggaca

SEQ ID NO: 3406217 - DNA, 25 bp, Homo sapien
cagaagtccccggacacgttggtct

SEQ ID NO: 3406218 - DNA, 25 bp, Homo sapien
cagcatcctggctacacagtactgc

SEQ ID NO: 3406219 - DNA, 25 bp, Homo sapien
gggagcgggctcaatcccacgttcc

SEQ ID NO: 3406220 - DNA, 25 bp, Homo sapien
ccagggagcgggctcaatcccacgt

SEQ ID NO: 3406221 - DNA, 25 bp, Homo sapien
gggtgccagggagcgggctcaatcc

SEQ ID NO: 3406222 - DNA, 25 bp, Homo sapien
ggcggcgtgcccctacgagcactca

SEQ ID NO: 3406223 - DNA, 25 bp, Homo sapien
caggtaagtctatctcggaggctgc

SEQ ID NO: 3406224 - DNA, 25 bp, Homo sapien
ctgaggcaccaggtaagtctatctc

SEQ ID NO: 3406225 - DNA, 25 bp, Homo sapien
acagctgccctttgtgtgcactggg

SEQ ID NO: 3406226 - DNA, 25 bp, Homo sapien
tggcatccggacaaagcccctgcac

SEQ ID NO: 3406227 - DNA, 25 bp, Homo sapien
tccagctgctcgatgcagggcgtgt

SEQ ID NO: 3406228 - DNA, 25 bp, Homo sapien
gcaccacaatcttgcaggctgcgca

SEQ ID NO: 3406229 - DNA, 25 bp, Homo sapien
gcgcactttcttcgagacactgact

SEQ ID NO: 3406230 - DNA, 25 bp, Homo sapien
gatgcagggcgtgtgcaccacaatc

SEQ ID NO: 3406231 - DNA, 25 bp, Homo sapien
ctggcaggccgtttgtataacatgt

SEQ ID NO: 3406232 - DNA, 25 bp, Homo sapien
gggcgggcaaagctgagctacccac

SEQ ID NO: 3406233 - DNA, 25 bp, Homo sapien
acatgtgggtgtgagtgcgcgctga

SEQ ID NO: 3406234 - DNA, 25 bp, Homo sapien
tgtgagtgcgcgctgaaagggcctc

SEQ ID NO: 3406235 - DNA, 25 bp, Homo sapien
taggcgccaggtttgttccaggcag

SEQ ID NO: 3406236 - DNA, 25 bp, Homo sapien
agtggggatacagcagctaatcagt

SEQ ID NO: 3406237 - DNA, 25 bp, Homo sapien
cactaggcgccaggtttgttccagg

SEQ ID NO: 3406238 - DNA, 25 bp, Homo sapien
agcagctaatcagtgaggagccagg

SEQ ID NO: 3406239 - DNA, 25 bp, Homo sapien
cagtctctcccgtatgatggcctgg

SEQ ID NO: 3406240 - DNA, 25 bp, Homo sapien
catggtgaaatggtacaagggccac

SEQ ID NO: 3406241 - DNA, 25 bp, Homo sapien
gcagggtgtagccacagctgagtta

SEQ ID NO: 3406242 - DNA, 25 bp, Homo sapien
tgcaaatgcacagtggacaatggcc

SEQ ID NO: 3406243 - DNA, 25 bp, Homo sapien
cccttcggggtcaggtatgtggtca

SEQ ID NO: 3406244 - DNA, 25 bp, Homo sapien
gggatacccccaaatcgtcacgaga

SEQ ID NO: 3406245 - DNA, 25 bp, Homo sapien
accaaaatgtcagaacctcccttcg

SEQ ID NO: 3406246 - DNA, 25 bp, Homo sapien
caaaatgtcagaacctcccttcggg

SEQ ID NO: 3406247 - DNA, 25 bp, Homo sapien
tcctggagcctgattcacggaagga

SEQ ID NO: 3406248 - DNA, 25 bp, Homo sapien
acttgccgtcctggcgtcgtctgtg

SEQ ID NO: 3406249 - DNA, 25 bp, Homo sapien
acagtgccgacacttgccgtcctgg

SEQ ID NO: 3406250 - DNA, 25 bp, Homo sapien
gtgccgacacttgccgtcctggcgt

SEQ ID NO: 3406251 - DNA, 25 bp, Homo sapien
tcctggcgtcgtctgtgtacccagt

SEQ ID NO: 3406252 - DNA, 25 bp, Homo sapien
tgcctgcttgcaccacgagcagctg

SEQ ID NO: 3406253 - DNA, 25 bp, Homo sapien
gcttgcaccacgagcagctgatggc

SEQ ID NO: 3406254 - DNA, 25 bp, Homo sapien
tgcttgcaccacgagcagctgatgg

SEQ ID NO: 3406255 - DNA, 25 bp, Homo sapien
tcagcgggaccgtgttcagactcgg

SEQ ID NO: 3406256 - DNA, 25 bp, Homo sapien
cgggctcagcgggaccgtgttcaga

SEQ ID NO: 3406257 - DNA, 25 bp, Homo sapien
cggggacccaaacccagcagtgcag

SEQ ID NO: 3406258 - DNA, 25 bp, Homo sapien
actcggggacccaaacccagcagtg

SEQ ID NO: 3406259 - DNA, 25 bp, Homo sapien
atgaccacggctgcgtggaccccca

SEQ ID NO: 3406260 - DNA, 25 bp, Homo sapien
cctccgggcgcggaggatccaggtg

SEQ ID NO: 3406261 - DNA, 25 bp, Homo sapien
gggcctccgggcgcggaggatccag

SEQ ID NO: 3406262 - DNA, 25 bp, Homo sapien
agcgagcacggctcctcgatctgct

SEQ ID NO: 3406263 - DNA, 25 bp, Homo sapien
tcttcttcttgcttgctttcagagt

SEQ ID NO: 3406264 - DNA, 25 bp, Homo sapien
cttcctcttgaaggatgccctcttc

SEQ ID NO: 3406265 - DNA, 25 bp, Homo sapien
tcttcttgcttgctttcagagtatt

SEQ ID NO: 3406266 - DNA, 25 bp, Homo sapien
gccctttcttgctggacttcctctt

SEQ ID NO: 3406267 - DNA, 25 bp, Homo sapien
agaggctgtaagctccttcccgtcc

SEQ ID NO: 3406268 - DNA, 25 bp, Homo sapien
tgttccctctttgtaccctcacgta

SEQ ID NO: 3406269 - DNA, 25 bp, Homo sapien
ttcccgtccaggacaccctaccatc

SEQ ID NO: 3406270 - DNA, 25 bp, Homo sapien
tcatccttagcaggccccctgggtg

SEQ ID NO: 3406271 - DNA, 25 bp, Homo sapien
cctgatgatgaagggtctccagcgg

SEQ ID NO: 3406272 - DNA, 25 bp, Homo sapien
ctgatgatgaagggtctccagcggc

SEQ ID NO: 3406273 - DNA, 25 bp, Homo sapien
tgatgatgaagggtctccagcggcc

SEQ ID NO: 3406274 - DNA, 25 bp, Homo sapien
agcccttagctgagaggcaaggccg

SEQ ID NO: 3406275 - DNA, 25 bp, Homo sapien
gggtagaagccagaaacgggctctg

SEQ ID NO: 3406276 - DNA, 25 bp, Homo sapien
cgcccgagcccttagctgagaggca

SEQ ID NO: 3406277 - DNA, 25 bp, Homo sapien
ttagctgagaggcaaggccgcgttc

SEQ ID NO: 3406278 - DNA, 25 bp, Homo sapien
tcgaagacttgtcggggattgagat

SEQ ID NO: 3406279 - DNA, 25 bp, Homo sapien
tcggggattgagataccagaggaaa

SEQ ID NO: 3406280 - DNA, 25 bp, Homo sapien
cttgtcggggattgagataccagag

SEQ ID NO: 3406281 - DNA, 25 bp, Homo sapien
tggctcaggtcgaagacttgtcggg

SEQ ID NO: 3406282 - DNA, 25 bp, Homo sapien
ctgggctcatgggaagatggcagtg

SEQ ID NO: 3406283 - DNA, 25 bp, Homo sapien
tggcagtggggtcaggggatgtgtg

SEQ ID NO: 3406284 - DNA, 25 bp, Homo sapien
gatggcagtggggtcaggggatgtg

SEQ ID NO: 3406285 - DNA, 25 bp, Homo sapien
gggctcatgggaagatggcagtggg

SEQ ID NO: 3406286 - DNA, 25 bp, Homo sapien
cgcaggttgtgcactttgcggtaca

SEQ ID NO: 3406287 - DNA, 25 bp, Homo sapien
ccgcacgccaggatccgcaggttgt

SEQ ID NO: 3406288 - DNA, 25 bp, Homo sapien
gtgcactttgcggtacatctccagc

SEQ ID NO: 3406289 - DNA, 25 bp, Homo sapien
aggatccgcaggttgtgcactttgc

SEQ ID NO: 3406290 - DNA, 25 bp, Homo sapien
cctggtgctcggctggcccatgcgg

SEQ ID NO: 3406291 - DNA, 25 bp, Homo sapien
agaggcaaatcaggcccacagggac

SEQ ID NO: 3406292 - DNA, 25 bp, Homo sapien
ctggtgctcggctggcccatgcggg

SEQ ID NO: 3406293 - DNA, 25 bp, Homo sapien
caaatcaggcccacagggaccccgg

SEQ ID NO: 3406294 - DNA, 25 bp, Homo sapien
ggttcgggccaagtcgttgccagta

SEQ ID NO: 3406295 - DNA, 25 bp, Homo sapien
ggccaagtcgttgccagtacccagg

SEQ ID NO: 3406296 - DNA, 25 bp, Homo sapien
gggtggcggcttcaggcgtagctgg

SEQ ID NO: 3406297 - DNA, 25 bp, Homo sapien
ccagttgagggttcgggccaagtcg

SEQ ID NO: 3406298 - DNA, 25 bp, Homo sapien
ggtcggtggcgccttcatctcggtc

SEQ ID NO: 3406299 - DNA, 25 bp, Homo sapien
gatcttggacacaggctcatctgtg

SEQ ID NO: 3406300 - DNA, 25 bp, Homo sapien
tcctccacgtgggagaggatcttgg

SEQ ID NO: 3406301 - DNA, 25 bp, Homo sapien
tcagcgtggaggtcccagcggtcca

SEQ ID NO: 3406302 - DNA, 25 bp, Homo sapien
tgaagtagttgttgaagacatccag

SEQ ID NO: 3406303 - DNA, 25 bp, Homo sapien
ggctgaagtagttgttgaagacatc

SEQ ID NO: 3406304 - DNA, 25 bp, Homo sapien
ctcgagactcgtggaactccagggt

SEQ ID NO: 3406305 - DNA, 25 bp, Homo sapien
actccagggtgacgtgggcgtcaaa

SEQ ID NO: 3406306 - DNA, 25 bp, Homo sapien
gaacatcttattccgaaagcggctg

SEQ ID NO: 3406307 - DNA, 25 bp, Homo sapien
agaacatcttattccgaaagcggct

SEQ ID NO: 3406308 - DNA, 25 bp, Homo sapien
tccgaaagcggctgttgaatttctc

SEQ ID NO: 3406309 - DNA, 25 bp, Homo sapien
ccgaaagcggctgttgaatttctct

SEQ ID NO: 3406310 - DNA, 25 bp, Homo sapien
gcacgggcacgggtggtagaagagg

SEQ ID NO: 3406311 - DNA, 25 bp, Homo sapien
cacgggcacgggtggtagaagaggt

SEQ ID NO: 3406312 - DNA, 25 bp, Homo sapien
cgggcacgggtggtagaagaggtgg

SEQ ID NO: 3406313 - DNA, 25 bp, Homo sapien
gggcacgggcacgggtggtagaaga

SEQ ID NO: 3406314 - DNA, 25 bp, Homo sapien
cagcacccggcagggctcctggggc

SEQ ID NO: 3406315 - DNA, 25 bp, Homo sapien
gagacagagggcgtcaccatctgct

SEQ ID NO: 3406316 - DNA, 25 bp, Homo sapien
gacagagggcgtcaccatctgctga

SEQ ID NO: 3406317 - DNA, 25 bp, Homo sapien
tgtgggagacagagggcgtcaccat

SEQ ID NO: 3406318 - DNA, 25 bp, Homo sapien
gtgggagacagagggcgtcaccatc

SEQ ID NO: 3406319 - DNA, 25 bp, Homo sapien
caccactcggatgtgcttggccagg

SEQ ID NO: 3406320 - DNA, 25 bp, Homo sapien
ggagctgcccatcaggaagtcagag

SEQ ID NO: 3406321 - DNA, 25 bp, Homo sapien
tgtgcttggccaggtccttggagct

SEQ ID NO: 3406322 - DNA, 25 bp, Homo sapien
gcccatcaggaagtcagagaaagct

SEQ ID NO: 3406323 - DNA, 25 bp, Homo sapien
caggtcctggatcttgggagtcaag

SEQ ID NO: 3406324 - DNA, 25 bp, Homo sapien
aggtcctggatcttgggagtcaagt

SEQ ID NO: 3406325 - DNA, 25 bp, Homo sapien
tgaagccaatgacctcgaggtagcc

SEQ ID NO: 3406326 - DNA, 25 bp, Homo sapien
tcgtcatgccgctggggctcaaagt

SEQ ID NO: 3406327 - DNA, 25 bp, Homo sapien
gacctcgaggtagccgtcgtcatgc

SEQ ID NO: 3406328 - DNA, 25 bp, Homo sapien
tcaaagtcgtggtgctccccagggt

SEQ ID NO: 3406329 - DNA, 25 bp, Homo sapien
tgctcccaggcaccatgggcccagg

SEQ ID NO: 3406330 - DNA, 25 bp, Homo sapien
tgtgctcccaggcaccatgggccca

SEQ ID NO: 3406331 - DNA, 25 bp, Homo sapien
ttgggctgtgctcccaggcaccatg

SEQ ID NO: 3406332 - DNA, 25 bp, Homo sapien
ggctgtgctcccaggcaccatgggc

SEQ ID NO: 3406333 - DNA, 25 bp, Homo sapien
atggccttggatgtggtgagcacca

SEQ ID NO: 3406334 - DNA, 25 bp, Homo sapien
tgcggatgcgtgaggctgcaagctt

SEQ ID NO: 3406335 - DNA, 25 bp, Homo sapien
gctgcaagcttgcagggctcgccat

SEQ ID NO: 3406336 - DNA, 25 bp, Homo sapien
ctgcgtcagccgctcgccgtgtccg

SEQ ID NO: 3406337 - DNA, 25 bp, Homo sapien
caaaccacttgccgagagaaggtcc

SEQ ID NO: 3406338 - DNA, 25 bp, Homo sapien
caccaaaccacttgccgagagaagg

SEQ ID NO: 3406339 - DNA, 25 bp, Homo sapien
cttggtgccaccctcggcctggcac

SEQ ID NO: 3406340 - DNA, 25 bp, Homo sapien
aaccacttgccgagagaaggtcccg

SEQ ID NO: 3406341 - DNA, 25 bp, Homo sapien
gagctgctccttgtcgtagtgcagg

SEQ ID NO: 3406342 - DNA, 25 bp, Homo sapien
cacctggatgcgcaactgctctggc

SEQ ID NO: 3406343 - DNA, 25 bp, Homo sapien
atgcgcaactgctctggcaccggct

SEQ ID NO: 3406344 - DNA, 25 bp, Homo sapien
ccttgtcgtagtgcagggcctcata

SEQ ID NO: 3406345 - DNA, 25 bp, Homo sapien
ggagtctctcaatgtgggcacggca

SEQ ID NO: 3406346 - DNA, 25 bp, Homo sapien
ctgctggagtctctcaatgtgggca

SEQ ID NO: 3406347 - DNA, 25 bp, Homo sapien
ctggagtctctcaatgtgggcacgg

SEQ ID NO: 3406348 - DNA, 25 bp, Homo sapien
tgctggagtctctcaatgtgggcac

SEQ ID NO: 3406349 - DNA, 25 bp, Homo sapien
cttgggggacagtttctggcatgtc

SEQ ID NO: 3406350 - DNA, 25 bp, Homo sapien
cacttgggggacagtttctggcatg

SEQ ID NO: 3406351 - DNA, 25 bp, Homo sapien
tttctggcatgtcggggacttggct

SEQ ID NO: 3406352 - DNA, 25 bp, Homo sapien
gacagtttctggcatgtcggggact

SEQ ID NO: 3406353 - DNA, 25 bp, Homo sapien
ctgggctcggtcgatcctgtagaag

SEQ ID NO: 3406354 - DNA, 25 bp, Homo sapien
tcggtcgatcctgtagaagcggctg

SEQ ID NO: 3406355 - DNA, 25 bp, Homo sapien
gctcggtcgatcctgtagaagcggc

SEQ ID NO: 3406356 - DNA, 25 bp, Homo sapien
gggctcggtcgatcctgtagaagcg

SEQ ID NO: 3406357 - DNA, 25 bp, Homo sapien
ttaccaggtgagctggcgcctgacc

SEQ ID NO: 3406358 - DNA, 25 bp, Homo sapien
gcatgaggacagaggtgagcccatc

SEQ ID NO: 3406359 - DNA, 25 bp, Homo sapien
cagcaaggctggtagacctggagaa

SEQ ID NO: 3406360 - DNA, 25 bp, Homo sapien
cagcaagcctttggtaggtacccca

SEQ ID NO: 3406361 - DNA, 25 bp, Homo sapien
ggtccaggatataaatctcatcctg

SEQ ID NO: 3406362 - DNA, 25 bp, Homo sapien
tcctgtgcgatctcagtcacatagt

SEQ ID NO: 3406363 - DNA, 25 bp, Homo sapien
tcaggccgggccgatgcccccagca

SEQ ID NO: 3406364 - DNA, 25 bp, Homo sapien
cagggtccaggatataaatctcatc

SEQ ID NO: 3406365 - DNA, 25 bp, Homo sapien
gattcagaagtcatcggcttacagg

SEQ ID NO: 3406366 - DNA, 25 bp, Homo sapien
gaggcagcgatgacagaagtccagt

SEQ ID NO: 3406367 - DNA, 25 bp, Homo sapien
tctagttcagggatacaaacaagtc

SEQ ID NO: 3406368 - DNA, 25 bp, Homo sapien
gcacgaatggccacagggatataag

SEQ ID NO: 3406369 - DNA, 25 bp, Homo sapien
caacagagcatgatgtgctgtgacc

SEQ ID NO: 3406370 - DNA, 25 bp, Homo sapien
tgtgaccggctacggcacaggccag

SEQ ID NO: 3406371 - DNA, 25 bp, Homo sapien
gcatgatgtgctgtgaccggctacg

SEQ ID NO: 3406372 - DNA, 25 bp, Homo sapien
tgatgtgctgtgaccggctacggca

SEQ ID NO: 3406373 - DNA, 25 bp, Homo sapien
tgagggggtgcagcatccccttgca

SEQ ID NO: 3406374 - DNA, 25 bp, Homo sapien
agggggtgcagcatccccttgcagt

SEQ ID NO: 3406375 - DNA, 25 bp, Homo sapien
cttgagggggtgcagcatccccttg

SEQ ID NO: 3406376 - DNA, 25 bp, Homo sapien
ggggtgcagcatccccttgcagtga

SEQ ID NO: 3406377 - DNA, 25 bp, Homo sapien
ctgttactctgcagtcggaggcctg

SEQ ID NO: 3406378 - DNA, 25 bp, Homo sapien
ctgcacggaatacctgcctgttact

SEQ ID NO: 3406379 - DNA, 25 bp, Homo sapien
ttggtgcgtgaagctcaaaggctgt

SEQ ID NO: 3406380 - DNA, 25 bp, Homo sapien
gcttgggttggtgcctcagtggaca

SEQ ID NO: 3406381 - DNA, 25 bp, Homo sapien
cagaagtcgttcctcttggcagcct

SEQ ID NO: 3406382 - DNA, 25 bp, Homo sapien
cttacagaagtcgttcctcttggca

SEQ ID NO: 3406383 - DNA, 25 bp, Homo sapien
ttggcagcctcaatcagctcttcac

SEQ ID NO: 3406384 - DNA, 25 bp, Homo sapien
cttggcagcctcaatcagctcttca

SEQ ID NO: 3406385 - DNA, 25 bp, Homo sapien
agcaggtcagctcttggcccaaccc

SEQ ID NO: 3406386 - DNA, 25 bp, Homo sapien
tgagcaggtcagctcttggcccaac

SEQ ID NO: 3406387 - DNA, 25 bp, Homo sapien
ctgagcaggtcagctcttggcccaa

SEQ ID NO: 3406388 - DNA, 25 bp, Homo sapien
gagcaggtcagctcttggcccaacc

SEQ ID NO: 3406389 - DNA, 25 bp, Homo sapien
acaggtggactgagctaggaagccc

SEQ ID NO: 3406390 - DNA, 25 bp, Homo sapien
taggaagcccctactaggagccatc

SEQ ID NO: 3406391 - DNA, 25 bp, Homo sapien
ggcctagacagagatacagtgaagt

SEQ ID NO: 3406392 - DNA, 25 bp, Homo sapien
gagggccagacgatgacagatgaca

SEQ ID NO: 3406393 - DNA, 25 bp, Homo sapien
gaaacgagtgcgctcacacatctta

SEQ ID NO: 3406394 - DNA, 25 bp, Homo sapien
ggtctctctggagcacaccggagga

SEQ ID NO: 3406395 - DNA, 25 bp, Homo sapien
tcttactcctgagttgcctctgtgg

SEQ ID NO: 3406396 - DNA, 25 bp, Homo sapien
ctggcagcactggtgaccaagccct

SEQ ID NO: 3406397 - DNA, 25 bp, Homo sapien
ggcccacagccgggtacaccagcac

SEQ ID NO: 3406398 - DNA, 25 bp, Homo sapien
tggcccacagccgggtacaccagca

SEQ ID NO: 3406399 - DNA, 25 bp, Homo sapien
gcccacagccgggtacaccagcaca

SEQ ID NO: 3406400 - DNA, 25 bp, Homo sapien
cacagccgggtacaccagcacaggc

SEQ ID NO: 3406401 - DNA, 25 bp, Homo sapien
ggcagggctggacctcctggggcca

SEQ ID NO: 3406402 - DNA, 25 bp, Homo sapien
ctgagggcaggaggcatggcagggc

SEQ ID NO: 3406403 - DNA, 25 bp, Homo sapien
gctggacctcctggggccacccctc

SEQ ID NO: 3406404 - DNA, 25 bp, Homo sapien
tggggccacccctccttccctgagc

SEQ ID NO: 3406405 - DNA, 25 bp, Homo sapien
agcaggtagcggaccacatccttgc

SEQ ID NO: 3406406 - DNA, 25 bp, Homo sapien
gcgtggtgcaggagcgtgcgactct

SEQ ID NO: 3406407 - DNA, 25 bp, Homo sapien
ggaccacatccttgctgccagtgct

SEQ ID NO: 3406408 - DNA, 25 bp, Homo sapien
ctgccagtgctgactgcgtggtgca

SEQ ID NO: 3406409 - DNA, 25 bp, Homo sapien
tcctccaccgcatcaaggatctctg

SEQ ID NO: 3406410 - DNA, 25 bp, Homo sapien
tttcctccaccgcatcaaggatctc

SEQ ID NO: 3406411 - DNA, 25 bp, Homo sapien
ctccaccgcatcaaggatctctggg

SEQ ID NO: 3406412 - DNA, 25 bp, Homo sapien
ttttcctccaccgcatcaaggatct

SEQ ID NO: 3406413 - DNA, 25 bp, Homo sapien
gaagtttatgggctctgacctgaca

SEQ ID NO: 3406414 - DNA, 25 bp, Homo sapien
agtttatgggctctgacctgacaaa

SEQ ID NO: 3406415 - DNA, 25 bp, Homo sapien
aagtttatgggctctgacctgacaa

SEQ ID NO: 3406416 - DNA, 25 bp, Homo sapien
gggctggctgtgtaccccatcccgt

SEQ ID NO: 3406417 - DNA, 25 bp, Homo sapien
caggggctggctgtgtaccccatcc

SEQ ID NO: 3406418 - DNA, 25 bp, Homo sapien
tctcccaagggccatcagaaagggc

SEQ ID NO: 3406419 - DNA, 25 bp, Homo sapien
catctgtctcccaagggccatcaga

SEQ ID NO: 3406420 - DNA, 25 bp, Homo sapien
gctggtctgtcttcatgagcgaggc

SEQ ID NO: 3406421 - DNA, 25 bp, Homo sapien
ctggtctgtcttcatgagcgaggcc

SEQ ID NO: 3406422 - DNA, 25 bp, Homo sapien
tggtctgtcttcatgagcgaggccc

SEQ ID NO: 3406423 - DNA, 25 bp, Homo sapien
tctggtagtgctgccggttctccag

SEQ ID NO: 3406424 - DNA, 25 bp, Homo sapien
catctggtagtgctgccggttctcc

SEQ ID NO: 3406425 - DNA, 25 bp, Homo sapien
tggatcatctggtagtgctgccggt

SEQ ID NO: 3406426 - DNA, 25 bp, Homo sapien
cagctcggtgtcctgagccttctca

SEQ ID NO: 3406427 - DNA, 25 bp, Homo sapien
agaaccccggcaaaggcatatccaa

SEQ ID NO: 3406428 - DNA, 25 bp, Homo sapien
ctttactgagtcacacccagctgta

SEQ ID NO: 3406429 - DNA, 25 bp, Homo sapien
cacagtccgcgatgaaatgacaggg

SEQ ID NO: 3406430 - DNA, 25 bp, Homo sapien
cagctgtaaacatgtcaccgtgaga

SEQ ID NO: 3406431 - DNA, 25 bp, Homo sapien
gcctgtggcattgcctcgcccggtt

SEQ ID NO: 3406432 - DNA, 25 bp, Homo sapien
aaatgggccacagaacccgggctcg

SEQ ID NO: 3406433 - DNA, 25 bp, Homo sapien
tgggcctgtggcattgcctcgcccg

SEQ ID NO: 3406434 - DNA, 25 bp, Homo sapien
gcaaatgggccacagaacccgggct

SEQ ID NO: 3406435 - DNA, 25 bp, Homo sapien
cccgcaggcctggatttggtgaaac

SEQ ID NO: 3406436 - DNA, 25 bp, Homo sapien
gtcgcccagtgcctttccgggagca

SEQ ID NO: 3406437 - DNA, 25 bp, Homo sapien
gacaggagccgtctgagaagttcca

SEQ ID NO: 3406438 - DNA, 25 bp, Homo sapien
ttggtgaaacttggcgctgacagga

SEQ ID NO: 3406439 - DNA, 25 bp, Homo sapien
agccccggcgcctgtataacccgcg

SEQ ID NO: 3406440 - DNA, 25 bp, Homo sapien
ccgctcccctccacggccggctcag

SEQ ID NO: 3406441 - DNA, 25 bp, Homo sapien
gagccccggcgcctgtataacccgc

SEQ ID NO: 3406442 - DNA, 25 bp, Homo sapien
atcccaggtcgtcccctgccgtacg

SEQ ID NO: 3406443 - DNA, 25 bp, Homo sapien
tcccggccccatcttccgagcggtg

SEQ ID NO: 3406444 - DNA, 25 bp, Homo sapien
ctgccgtacgccaaggcccgggccg

SEQ ID NO: 3406445 - DNA, 25 bp, Homo sapien
atcttccgagcggtggtctcccgac

SEQ ID NO: 3406446 - DNA, 25 bp, Homo sapien
gccgcggccccttttgtctccagaa

SEQ ID NO: 3406447 - DNA, 25 bp, Homo sapien
tgcccgcgctgcttcgctccctccc

SEQ ID NO: 3406448 - DNA, 25 bp, Homo sapien
ccgccgcggccccttttgtctccag

SEQ ID NO: 3406449 - DNA, 25 bp, Homo sapien
tcgctgcccgcgctgcttcgctccc

SEQ ID NO: 3406450 - DNA, 25 bp, Homo sapien
cagcccctagatcggccgcggccgg

SEQ ID NO: 3406451 - DNA, 25 bp, Homo sapien
ggacgcctcgagcccaggacgcagc

SEQ ID NO: 3406452 - DNA, 25 bp, Homo sapien
acgcctcgagcccaggacgcagctc

SEQ ID NO: 3406453 - DNA, 25 bp, Homo sapien
ccccagcccctagatcggccgcggc

SEQ ID NO: 3406454 - DNA, 25 bp, Homo sapien
agagcccgagtctgaatccctggcc

SEQ ID NO: 3406455 - DNA, 25 bp, Homo sapien
ccccaagtcgggctgctaaggtggc

SEQ ID NO: 3406456 - DNA, 25 bp, Homo sapien
acctccgcgtgctccactttccagg

SEQ ID NO: 3406457 - DNA, 25 bp, Homo sapien
gggagagcccgagtctgaatccctg

SEQ ID NO: 3406458 - DNA, 25 bp, Homo sapien
ttctttttggcgaccgcggaggtga

SEQ ID NO: 3406459 - DNA, 25 bp, Homo sapien
tctttttggcgaccgcggaggtgag

SEQ ID NO: 3406460 - DNA, 25 bp, Homo sapien
ccgcaggtgccctcgcggaaaccca

SEQ ID NO: 3406461 - DNA, 25 bp, Homo sapien
ccctgcaccggatgcgctgggtctg

SEQ ID NO: 3406462 - DNA, 25 bp, Homo sapien
cagttgcagggcaccctgcaccgga

SEQ ID NO: 3406463 - DNA, 25 bp, Homo sapien
aacccacgccgcaatccttgctgct

SEQ ID NO: 3406464 - DNA, 25 bp, Homo sapien
tgccttggcggactttggtgcctgt

SEQ ID NO: 3406465 - DNA, 25 bp, Homo sapien
cactgagcattgtagcgcgccttct

SEQ ID NO: 3406466 - DNA, 25 bp, Homo sapien
gcggatggtctcctggcactgagca

SEQ ID NO: 3406467 - DNA, 25 bp, Homo sapien
cagttctcaaacttgtacttgcagt

SEQ ID NO: 3406468 - DNA, 25 bp, Homo sapien
cagggaggatttatgtccccagcat

SEQ ID NO: 3406469 - DNA, 25 bp, Homo sapien
ccaagtgaggcgatgtcaggaagcc

SEQ ID NO: 3406470 - DNA, 25 bp, Homo sapien
atcacctgcggcctctcttgtagtg

SEQ ID NO: 3406471 - DNA, 25 bp, Homo sapien
taacttggaattgtcccctcacagg

SEQ ID NO: 3406472 - DNA, 25 bp, Homo sapien
tgacaaaggcaagccgttccaggac

SEQ ID NO: 3406473 - DNA, 25 bp, Homo sapien
gccagatgctccaatggagtagttt

SEQ ID NO: 3406474 - DNA, 25 bp, Homo sapien
aagggcagagctgaccaaatgctgc

SEQ ID NO: 3406475 - DNA, 25 bp, Homo sapien
tcctcccaacactagaaagggcaga

SEQ ID NO: 3406476 - DNA, 25 bp, Homo sapien
cgggcagattcacccctgccctgct

SEQ ID NO: 3406477 - DNA, 25 bp, Homo sapien
agcgggcagattcacccctgccctg

SEQ ID NO: 3406478 - DNA, 25 bp, Homo sapien
ctgagaagcgggcagattcacccct

SEQ ID NO: 3406479 - DNA, 25 bp, Homo sapien
gagaagcgggcagattcacccctgc

SEQ ID NO: 3406480 - DNA, 25 bp, Homo sapien
cagccctgggcatcctcagcctcct

SEQ ID NO: 3406481 - DNA, 25 bp, Homo sapien
agcagccctgggcatcctcagcctc

SEQ ID NO: 3406482 - DNA, 25 bp, Homo sapien
ctagtcctggtcacagcagccctgg

SEQ ID NO: 3406483 - DNA, 25 bp, Homo sapien
gccctgggcatcctcagcctcctca

SEQ ID NO: 3406484 - DNA, 25 bp, Homo sapien
gttaggctgacccattgcagaccgc

SEQ ID NO: 3406485 - DNA, 25 bp, Homo sapien
tccaatcagctgactcggaagcagg

SEQ ID NO: 3406486 - DNA, 25 bp, Homo sapien
tgtgatgtggacatgggacatcccc

SEQ ID NO: 3406487 - DNA, 25 bp, Homo sapien
ccacttgggatcagaaaaccttcaa

SEQ ID NO: 3406488 - DNA, 25 bp, Homo sapien
ttgggggaggctcaagcttcccaga

SEQ ID NO: 3406489 - DNA, 25 bp, Homo sapien
tgtttcttagtaatggaattgtggg

SEQ ID NO: 3406490 - DNA, 25 bp, Homo sapien
taaagctaacgagcagacagaaggc

SEQ ID NO: 3406491 - DNA, 25 bp, Homo sapien
actggtgggtcacatctcgggcctg

SEQ ID NO: 3406492 - DNA, 25 bp, Homo sapien
cccactaatgaagcagagcgtcaag

SEQ ID NO: 3406493 - DNA, 25 bp, Homo sapien
gagaagaaagccaagacgctggcct

SEQ ID NO: 3406494 - DNA, 25 bp, Homo sapien
tcatgacggtgctgtacatccacat

SEQ ID NO: 3406495 - DNA, 25 bp, Homo sapien
ggccttcctcaagagcccactaatg

SEQ ID NO: 3406496 - DNA, 25 bp, Homo sapien
gcggttcccagcgacctctgagatt

SEQ ID NO: 3406497 - DNA, 25 bp, Homo sapien
acaagcgctggagcggaatcaggca

SEQ ID NO: 3406498 - DNA, 25 bp, Homo sapien
agtggtccgcggtgggctcttctct

SEQ ID NO: 3406499 - DNA, 25 bp, Homo sapien
gaggcgcgaaaatagctcagggtcc

SEQ ID NO: 3406500 - DNA, 25 bp, Homo sapien
agactactgtctaagcctagcctgc

SEQ ID NO: 3406501 - DNA, 25 bp, Homo sapien
tagggaagtgctgattgagtcctta

SEQ ID NO: 3406502 - DNA, 25 bp, Homo sapien
ggttcttagggcagctcttgcattc

SEQ ID NO: 3406503 - DNA, 25 bp, Homo sapien
ttatcggctgaattaggtcagtggc

SEQ ID NO: 3406504 - DNA, 25 bp, Homo sapien
tgcctcactgccgatcaggttgatt

SEQ ID NO: 3406505 - DNA, 25 bp, Homo sapien
gctttatggaggtcagagtttctcc

SEQ ID NO: 3406506 - DNA, 25 bp, Homo sapien
ttgattgctgcgtgggacgctgcaa

SEQ ID NO: 3406507 - DNA, 25 bp, Homo sapien
cattagagacgctgggagtcagcca

SEQ ID NO: 3406508 - DNA, 25 bp, Homo sapien
tagtgaaagcagattgaaaagctca

SEQ ID NO: 3406509 - DNA, 25 bp, Homo sapien
gatctctaacaacaattctgtcttg

SEQ ID NO: 3406510 - DNA, 25 bp, Homo sapien
tgcttggagctctagcttatactag

SEQ ID NO: 3406511 - DNA, 25 bp, Homo sapien
taatagccgatctctaactgatctc

SEQ ID NO: 3406512 - DNA, 25 bp, Homo sapien
caccactatcactgtaacagcccat

SEQ ID NO: 3406513 - DNA, 25 bp, Homo sapien
gctgcttccgctgcaattatcttaa

SEQ ID NO: 3406514 - DNA, 25 bp, Homo sapien
gcacaaagcatctatcctcaaaaag

SEQ ID NO: 3406515 - DNA, 25 bp, Homo sapien
aaagacagatggctttgttgtcaga

SEQ ID NO: 3406516 - DNA, 25 bp, Homo sapien
gctgcctgtcagttgattaaaagct

SEQ ID NO: 3406517 - DNA, 25 bp, Homo sapien
ctggacggctacggcgtaggatggc

SEQ ID NO: 3406518 - DNA, 25 bp, Homo sapien
ctctggacggctacggcgtaggatg

SEQ ID NO: 3406519 - DNA, 25 bp, Homo sapien
tctggacggctacggcgtaggatgg

SEQ ID NO: 3406520 - DNA, 25 bp, Homo sapien
ggacggctacggcgtaggatggcag

SEQ ID NO: 3406521 - DNA, 25 bp, Homo sapien
tggacggctacggcgtaggatggca

SEQ ID NO: 3406522 - DNA, 25 bp, Homo sapien
gacggctacggcgtaggatggcagg

SEQ ID NO: 3406523 - DNA, 25 bp, Homo sapien
cacagcactccgtctgtaggtatct

SEQ ID NO: 3406524 - DNA, 25 bp, Homo sapien
acagcactccgtctgtaggtatctc

SEQ ID NO: 3406525 - DNA, 25 bp, Homo sapien
gagatacctacagacggagtgctgt

SEQ ID NO: 3406526 - DNA, 25 bp, Homo sapien
agatacctacagacggagtgctgtg

SEQ ID NO: 3406527 - DNA, 25 bp, Homo sapien
ccatcctacgccgtagccgtccaga

SEQ ID NO: 3406528 - DNA, 25 bp, Homo sapien
gccatcctacgccgtagccgtccag

SEQ ID NO: 3406529 - DNA, 25 bp, Homo sapien
cctgccatcctacgccgtagccgtc

SEQ ID NO: 3406530 - DNA, 25 bp, Homo sapien
tgccatcctacgccgtagccgtcca

SEQ ID NO: 3406531 - DNA, 25 bp, Homo sapien
ctgccatcctacgccgtagccgtcc

SEQ ID NO: 3406532 - DNA, 25 bp, Homo sapien
catcctacgccgtagccgtccagag

SEQ ID NO: 3406533 - DNA, 25 bp, Homo sapien
acggcgtaggatggcaggcacaatc

SEQ ID NO: 3406534 - DNA, 25 bp, Homo sapien
ctttcttgtcggcaccaggtggcac

SEQ ID NO: 3406535 - DNA, 25 bp, Homo sapien
tcaatgcaaaagaatcctctccaat

SEQ ID NO: 3406536 - DNA, 25 bp, Homo sapien
caggtggcacagcactccgtctgta

SEQ ID NO: 3406537 - DNA, 25 bp, Homo sapien
tctctggacggctacggcgtaggat

SEQ ID NO: 3406538 - DNA, 25 bp, Homo sapien
ggctataagtttattcaatgcaaaa

SEQ ID NO: 3406539 - DNA, 25 bp, Homo sapien
gtgccacctggtgccgacaagaaag

SEQ ID NO: 3406540 - DNA, 25 bp, Homo sapien
gattgtgcctgccatcctacgccgt

SEQ ID NO: 3406541 - DNA, 25 bp, Homo sapien
taaaattggagaggattcttttgca

SEQ ID NO: 3406542 - DNA, 25 bp, Homo sapien
tacagacggagtgctgtgccacctg

SEQ ID NO: 3406543 - DNA, 25 bp, Homo sapien
ttttgcattgaataaacttatagcc

SEQ ID NO: 3406544 - DNA, 25 bp, Homo sapien
atcctacgccgtagccgtccagaga

SEQ ID NO: 3406545 - DNA, 25 bp, Homo sapien
tggagttaggctaaagatcttgcca

SEQ ID NO: 3406546 - DNA, 25 bp, Homo sapien
gtgagcccagcctgattctgtgttt

SEQ ID NO: 3406547 - DNA, 25 bp, Homo sapien
caccaagttgatttatgtgaattgc

SEQ ID NO: 3406548 - DNA, 25 bp, Homo sapien
ttcctggagttaggctaaagatctt

SEQ ID NO: 3406549 - DNA, 25 bp, Homo sapien
cccgaattagcttttctgatagatt

SEQ ID NO: 3406550 - DNA, 25 bp, Homo sapien
cttccccgaattagcttttctgata

SEQ ID NO: 3406551 - DNA, 25 bp, Homo sapien
tccccgaattagcttttctgataga

SEQ ID NO: 3406552 - DNA, 25 bp, Homo sapien
ccccgaattagcttttctgatagat

SEQ ID NO: 3406553 - DNA, 25 bp, Homo sapien
tgaatgtctttgtgtgcacgctacc

SEQ ID NO: 3406554 - DNA, 25 bp, Homo sapien
gctacctagttatgcatctcctctt

SEQ ID NO: 3406555 - DNA, 25 bp, Homo sapien
ttctcccatcagaccttactacttt

SEQ ID NO: 3406556 - DNA, 25 bp, Homo sapien
gacagatcaagaggttatattctcc

SEQ ID NO: 3406557 - DNA, 25 bp, Homo sapien
ctgctgctgacgagccaaagaccct

SEQ ID NO: 3406558 - DNA, 25 bp, Homo sapien
cctgtgatcgacagatgaggaaagc

SEQ ID NO: 3406559 - DNA, 25 bp, Homo sapien
gcagcaataaaggtcgtttccctcc

SEQ ID NO: 3406560 - DNA, 25 bp, Homo sapien
agctgccagtcaaacccacgttcag

SEQ ID NO: 3406561 - DNA, 25 bp, Homo sapien
cattaaccattgttggaatttttgc

SEQ ID NO: 3406562 - DNA, 25 bp, Homo sapien
gggcgtcctgatgacattttaaata

SEQ ID NO: 3406563 - DNA, 25 bp, Homo sapien
gaaaacatctagtgctgattctctg

SEQ ID NO: 3406564 - DNA, 25 bp, Homo sapien
gagtttatcccattgcctaattctg

SEQ ID NO: 3406565 - DNA, 25 bp, Homo sapien
cagccttagtgaggttgaaggccaa

SEQ ID NO: 3406566 - DNA, 25 bp, Homo sapien
gaaggccaaggctttatctgtttgc

SEQ ID NO: 3406567 - DNA, 25 bp, Homo sapien
tagaatatagcatggacagttgcac

SEQ ID NO: 3406568 - DNA, 25 bp, Homo sapien
tgctgatactgtcgctggttggcac

SEQ ID NO: 3406569 - DNA, 25 bp, Homo sapien
atgttttctttagctctaaggaaga

SEQ ID NO: 3406570 - DNA, 25 bp, Homo sapien
gctctaaggaagataatacaagtct

SEQ ID NO: 3406571 - DNA, 25 bp, Homo sapien
cagtcttgaatgaaagcttttagag

SEQ ID NO: 3406572 - DNA, 25 bp, Homo sapien
agagcacttattttggcacttggca

SEQ ID NO: 3406573 - DNA, 25 bp, Homo sapien
gtggcatcatttataatccagagct

SEQ ID NO: 3406574 - DNA, 25 bp, Homo sapien
cgtggcatcatttataatccagagc

SEQ ID NO: 3406575 - DNA, 25 bp, Homo sapien
ccgtggcatcatttataatccagag

SEQ ID NO: 3406576 - DNA, 25 bp, Homo sapien
tggcatcatttataatccagagctc

SEQ ID NO: 3406577 - DNA, 25 bp, Homo sapien
gtgattacattccaaaacagagctg

SEQ ID NO: 3406578 - DNA, 25 bp, Homo sapien
gagctgtttgggtgtaattgcaccg

SEQ ID NO: 3406579 - DNA, 25 bp, Homo sapien
tcccaaacaatgaattgtgtagtgg

SEQ ID NO: 3406580 - DNA, 25 bp, Homo sapien
gggacggcaggcctctggtctccat

SEQ ID NO: 3406581 - DNA, 25 bp, Homo sapien
ggtttgtcagctgcactcattcaga

SEQ ID NO: 3406582 - DNA, 25 bp, Homo sapien
cacgttgcagggtgatgacgaacca

SEQ ID NO: 3406583 - DNA, 25 bp, Homo sapien
tgaggccagttgtcagtgcttcagg

SEQ ID NO: 3406584 - DNA, 25 bp, Homo sapien
gaattatcccactaccgtcagcgtg

SEQ ID NO: 3406585 - DNA, 25 bp, Homo sapien
ggatttccagtcgaatacaggccaa

SEQ ID NO: 3406586 - DNA, 25 bp, Homo sapien
gctatgtcacttaatgctgggactg

SEQ ID NO: 3406587 - DNA, 25 bp, Homo sapien
tatgctttacggttaggatgaactc

SEQ ID NO: 3406588 - DNA, 25 bp, Homo sapien
gcttcttgccggtgtagctgccata

SEQ ID NO: 3406589 - DNA, 25 bp, Homo sapien
tcttagggagtaaattaggatgaag

SEQ ID NO: 3406590 - DNA, 25 bp, Homo sapien
gttataaacttgactgatactccta

SEQ ID NO: 3406591 - DNA, 25 bp, Homo sapien
gctcgaaaggtgtaatatcccatat

SEQ ID NO: 3406592 - DNA, 25 bp, Homo sapien
ttagtattctcaagctcgaaaggtg

SEQ ID NO: 3406593 - DNA, 25 bp, Homo sapien
gtcctacgcacaggaatgaccaagg

SEQ ID NO: 3406594 - DNA, 25 bp, Homo sapien
cccaaagttagcttgtcctacgcac

SEQ ID NO: 3406595 - DNA, 25 bp, Homo sapien
tagcttgtcctacgcacaggaatga

SEQ ID NO: 3406596 - DNA, 25 bp, Homo sapien
ttcactgtcatgcttttcttactgt

SEQ ID NO: 3406597 - DNA, 25 bp, Homo sapien
ggattctgcaaactttcgcaaccta

SEQ ID NO: 3406598 - DNA, 25 bp, Homo sapien
aaccttgcttaagccagagcagctc

SEQ ID NO: 3406599 - DNA, 25 bp, Homo sapien
caaaggttatacagctggcaaatgg

SEQ ID NO: 3406600 - DNA, 25 bp, Homo sapien
ccatgagagtaaggatgagctttag

SEQ ID NO: 3406601 - DNA, 25 bp, Homo sapien
gattgcttgggcgttcctcctttga

SEQ ID NO: 3406602 - DNA, 25 bp, Homo sapien
cgagctcccgtctgccttgcaggta

SEQ ID NO: 3406603 - DNA, 25 bp, Homo sapien
ttctcctgccggtcggtagaacgga

SEQ ID NO: 3406604 - DNA, 25 bp, Homo sapien
ggcgctcggctgtggttccttgaac

SEQ ID NO: 3406605 - DNA, 25 bp, Homo sapien
tatttacgcctcagacaggagccgg

SEQ ID NO: 3406606 - DNA, 25 bp, Homo sapien
atttacgcctcagacaggagccgga

SEQ ID NO: 3406607 - DNA, 25 bp, Homo sapien
tttacgcctcagacaggagccggac

SEQ ID NO: 3406608 - DNA, 25 bp, Homo sapien
ttatttacgcctcagacaggagccg

SEQ ID NO: 3406609 - DNA, 25 bp, Homo sapien
catgtgattgacaggggcaaggtcc

SEQ ID NO: 3406610 - DNA, 25 bp, Homo sapien
aggtccatgcttaagagtgaactgt

SEQ ID NO: 3406611 - DNA, 25 bp, Homo sapien
tgaactgtcccagatttcccatggc

SEQ ID NO: 3406612 - DNA, 25 bp, Homo sapien
gggattgccagtgtatgccaccact

SEQ ID NO: 3406613 - DNA, 25 bp, Homo sapien
actgtggttagctgttggattctga

SEQ ID NO: 3406614 - DNA, 25 bp, Homo sapien
tcttgcaccaacatcttcattggga

SEQ ID NO: 3406615 - DNA, 25 bp, Homo sapien
gctatatggccgtggtcaccggaca

SEQ ID NO: 3406616 - DNA, 25 bp, Homo sapien
caacattcacatttaccatggctat

SEQ ID NO: 3406617 - DNA, 25 bp, Homo sapien
gcctatatagttagaagccgacctc

SEQ ID NO: 3406618 - DNA, 25 bp, Homo sapien
tgttagactggtttgaacaccccag

SEQ ID NO: 3406619 - DNA, 25 bp, Homo sapien
tccttgaatcagagcaagcctgtcg

SEQ ID NO: 3406620 - DNA, 25 bp, Homo sapien
tctttggataatgaaacccgtgacc

SEQ ID NO: 3406621 - DNA, 25 bp, Homo sapien
taagactccgcgagttgtcgcaccc

SEQ ID NO: 3406622 - DNA, 25 bp, Homo sapien
aaggcttcagaagggtcctggctcg

SEQ ID NO: 3406623 - DNA, 25 bp, Homo sapien
ccggcgccgccatcgttagtgtttg

SEQ ID NO: 3406624 - DNA, 25 bp, Homo sapien
ggccccagacgttttgctcctaaga

SEQ ID NO: 3406625 - DNA, 25 bp, Homo sapien
tgaccgtacacgtcgccgatagaca

SEQ ID NO: 3406626 - DNA, 25 bp, Homo sapien
ctctcattacggaggccgggacctg

SEQ ID NO: 3406627 - DNA, 25 bp, Homo sapien
cgaagctgcggcacaaagagtggtt

SEQ ID NO: 3406628 - DNA, 25 bp, Homo sapien
gagctgcagtgaccgtacacgtcgc

SEQ ID NO: 3406629 - DNA, 25 bp, Homo sapien
ggggcgctgagagatcttggggtat

SEQ ID NO: 3406630 - DNA, 25 bp, Homo sapien
ggcgctgagagatcttggggtatcc

SEQ ID NO: 3406631 - DNA, 25 bp, Homo sapien
ccgggggcgctgagagatcttgggg

SEQ ID NO: 3406632 - DNA, 25 bp, Homo sapien
cgctgagagatcttggggtatcccc

SEQ ID NO: 3406633 - DNA, 25 bp, Homo sapien
attggcacccaaccccggagttatg

SEQ ID NO: 3406634 - DNA, 25 bp, Homo sapien
tcttgattgaatgaaaacctacctc

SEQ ID NO: 3406635 - DNA, 25 bp, Homo sapien
gacgacctaacccaaggagctgaaa

SEQ ID NO: 3406636 - DNA, 25 bp, Homo sapien
tacacgcggagtacatatttggcac

SEQ ID NO: 3406637 - DNA, 25 bp, Homo sapien
catgggtcccttttttcactagtca

SEQ ID NO: 3406638 - DNA, 25 bp, Homo sapien
ttttcactagtcaacagtcaccctc

SEQ ID NO: 3406639 - DNA, 25 bp, Homo sapien
tttttcactagtcaacagtcaccct

SEQ ID NO: 3406640 - DNA, 25 bp, Homo sapien
ttcactagtcaacagtcaccctcac

SEQ ID NO: 3406641 - DNA, 25 bp, Homo sapien
gagaatggatcacaggtttccacag

SEQ ID NO: 3406642 - DNA, 25 bp, Homo sapien
ggtggccagagaacgaagaaatacc

SEQ ID NO: 3406643 - DNA, 25 bp, Homo sapien
gaaatgctacgctgaattgaccagg

SEQ ID NO: 3406644 - DNA, 25 bp, Homo sapien
tagtgatgagctcaagaaggtgctt

SEQ ID NO: 3406645 - DNA, 25 bp, Homo sapien
aggctaactgggaactcactggaaa

SEQ ID NO: 3406646 - DNA, 25 bp, Homo sapien
ggctgatgtgggaagatcactcgaa

SEQ ID NO: 3406647 - DNA, 25 bp, Homo sapien
gatgtgggaagatcactcgaaccca

SEQ ID NO: 3406648 - DNA, 25 bp, Homo sapien
ctgatgtgggaagatcactcgaacc

SEQ ID NO: 3406649 - DNA, 25 bp, Homo sapien
ctcgaacccaggaggtatggctgca

SEQ ID NO: 3406650 - DNA, 25 bp, Homo sapien
aaaaatgctcttaaattcaggccag

SEQ ID NO: 3406651 - DNA, 25 bp, Homo sapien
actgcgcttggccttaaaaatgctc

SEQ ID NO: 3406652 - DNA, 25 bp, Homo sapien
cactgcgcttggccttaaaaatgct

SEQ ID NO: 3406653 - DNA, 25 bp, Homo sapien
aatgctcttaaattcaggccaggca

SEQ ID NO: 3406654 - DNA, 25 bp, Homo sapien
gatcatgactgtgaataccactgca

SEQ ID NO: 3406655 - DNA, 25 bp, Homo sapien
tacttagtatctttgggacgacaca

SEQ ID NO: 3406656 - DNA, 25 bp, Homo sapien
aatttgtgccatatccaattctgcc

SEQ ID NO: 3406657 - DNA, 25 bp, Homo sapien
cgagaccgcatctctttaaacagaa

SEQ ID NO: 3406658 - DNA, 25 bp, Homo sapien
aggagaatcacttgagtccaagatg

SEQ ID NO: 3406659 - DNA, 25 bp, Homo sapien
cgaggtggacagattacttgagcca

SEQ ID NO: 3406660 - DNA, 25 bp, Homo sapien
tgagccaggagtttgaaactacagt

SEQ ID NO: 3406661 - DNA, 25 bp, Homo sapien
gagctatgattgcaccactgcactc

SEQ ID NO: 3406662 - DNA, 25 bp, Homo sapien
ggtggacagattacttgagccagga

SEQ ID NO: 3406663 - DNA, 25 bp, Homo sapien
gagcattctagtctctcatttactt

SEQ ID NO: 3406664 - DNA, 25 bp, Homo sapien
aatatgtaagttcatgtgagctgct

SEQ ID NO: 3406665 - DNA, 25 bp, Homo sapien
gagctgcttactatcttgttattaa

SEQ ID NO: 3406666 - DNA, 25 bp, Homo sapien
cctctttcctgctaatatgctgaat

SEQ ID NO: 3406667 - DNA, 25 bp, Homo sapien
tcagcaggtacaaggccacagttag

SEQ ID NO: 3406668 - DNA, 25 bp, Homo sapien
agtgttctatatcatagcagaatga

SEQ ID NO: 3406669 - DNA, 25 bp, Homo sapien
tacaaggccacagttagataggagg

SEQ ID NO: 3406670 - DNA, 25 bp, Homo sapien
tagggtgtaggttgatggtgagaaa

SEQ ID NO: 3406671 - DNA, 25 bp, Homo sapien
ataaaatagactcccgcagctgagg

SEQ ID NO: 3406672 - DNA, 25 bp, Homo sapien
catttagagagagacgagcatgaac

SEQ ID NO: 3406673 - DNA, 25 bp, Homo sapien
tgttaatggacgtcctgagccagca

SEQ ID NO: 3406674 - DNA, 25 bp, Homo sapien
cacgttgttggagctgttgatccca

SEQ ID NO: 3406675 - DNA, 25 bp, Homo sapien
ctgattctgaaactttgagctttaa

SEQ ID NO: 3406676 - DNA, 25 bp, Homo sapien
ctgaaactttgagctttaattatcc

SEQ ID NO: 3406677 - DNA, 25 bp, Homo sapien
tatttcatcatccagcagattcagg

SEQ ID NO: 3406678 - DNA, 25 bp, Homo sapien
aactttgagctttaattatccattc

SEQ ID NO: 3406679 - DNA, 25 bp, Homo sapien
tctgtcctgggaattgagatcagtt

SEQ ID NO: 3406680 - DNA, 25 bp, Homo sapien
gtcctgggaattgagatcagtttcc

SEQ ID NO: 3406681 - DNA, 25 bp, Homo sapien
aataaacttgtccaggtcctttctg

SEQ ID NO: 3406682 - DNA, 25 bp, Homo sapien
cctgggaattgagatcagtttccat

SEQ ID NO: 3406683 - DNA, 25 bp, Homo sapien
ccaagccgagcctggacaatcactt

SEQ ID NO: 3406684 - DNA, 25 bp, Homo sapien
gagaagatgatgaacgagtgcaaat

SEQ ID NO: 3406685 - DNA, 25 bp, Homo sapien
ccaatctgaacccgttggagaagat

SEQ ID NO: 3406686 - DNA, 25 bp, Homo sapien
gaacgagtgcaaatcttttcaccaa

SEQ ID NO: 3406687 - DNA, 25 bp, Homo sapien
ggacctcccgactgcaggcagctgt

SEQ ID NO: 3406688 - DNA, 25 bp, Homo sapien
ttgcttcatgtgtaacctctgggat

SEQ ID NO: 3406689 - DNA, 25 bp, Homo sapien
atggacctcccgactgcaggcagct

SEQ ID NO: 3406690 - DNA, 25 bp, Homo sapien
ctttgcttcatgtgtaacctctggg

SEQ ID NO: 3406691 - DNA, 25 bp, Homo sapien
ttcatttcaagacaccatatttcca

SEQ ID NO: 3406692 - DNA, 25 bp, Homo sapien
tcattcatttcaagacaccatattt

SEQ ID NO: 3406693 - DNA, 25 bp, Homo sapien
caagacaccatatttccagctccat

SEQ ID NO: 3406694 - DNA, 25 bp, Homo sapien
tcaagacaccatatttccagctcca

SEQ ID NO: 3406695 - DNA, 25 bp, Homo sapien
tgtcaccctagttatagcaagaagg

SEQ ID NO: 3406696 - DNA, 25 bp, Homo sapien
gcaatgacagtctgttgtacaccgt

SEQ ID NO: 3406697 - DNA, 25 bp, Homo sapien
taatatgacatattcatgcccttgt

SEQ ID NO: 3406698 - DNA, 25 bp, Homo sapien
gagcctataggctggtgtcacccta

SEQ ID NO: 3406699 - DNA, 25 bp, Homo sapien
gcattagtaattcctactacttcaa

SEQ ID NO: 3406700 - DNA, 25 bp, Homo sapien
ctgatggagcattagtaattcctac

SEQ ID NO: 3406701 - DNA, 25 bp, Homo sapien
gatggagcattagtaattcctacta

SEQ ID NO: 3406702 - DNA, 25 bp, Homo sapien
ggagcattagtaattcctactactt

SEQ ID NO: 3406703 - DNA, 25 bp, Homo sapien
gccactcagctgaacttctccaaaa

SEQ ID NO: 3406704 - DNA, 25 bp, Homo sapien
aagccactcagctgaacttctccaa

SEQ ID NO: 3406705 - DNA, 25 bp, Homo sapien
tcctaagccactcagctgaacttct

SEQ ID NO: 3406706 - DNA, 25 bp, Homo sapien
ctaagccactcagctgaacttctcc

SEQ ID NO: 3406707 - DNA, 25 bp, Homo sapien
tttccctgaattatttggcctattg

SEQ ID NO: 3406708 - DNA, 25 bp, Homo sapien
tctctggcattatccacttagcatg

SEQ ID NO: 3406709 - DNA, 25 bp, Homo sapien
ttgcagagaatactgacactgcccc

SEQ ID NO: 3406710 - DNA, 25 bp, Homo sapien
ttcttttgcagagaatactgacact

SEQ ID NO: 3406711 - DNA, 25 bp, Homo sapien
tgtcccaacacgaactgtctggaag

SEQ ID NO: 3406712 - DNA, 25 bp, Homo sapien
ctggtagacatgaatgccaagttaa

SEQ ID NO: 3406713 - DNA, 25 bp, Homo sapien
aggggtgcccactgtcccaacacga

SEQ ID NO: 3406714 - DNA, 25 bp, Homo sapien
gccaagttaattctgtaagcacaag

SEQ ID NO: 3406715 - DNA, 25 bp, Homo sapien
aagtgatcaataataatccccatga

SEQ ID NO: 3406716 - DNA, 25 bp, Homo sapien
gagaggagctgggatagggacggtc

SEQ ID NO: 3406717 - DNA, 25 bp, Homo sapien
aataataatccccatgataggtggg

SEQ ID NO: 3406718 - DNA, 25 bp, Homo sapien
gacggtccacaaagtgatcaataat

SEQ ID NO: 3406719 - DNA, 25 bp, Homo sapien
tacagacgggtatattactccagtg

SEQ ID NO: 3406720 - DNA, 25 bp, Homo sapien
gggtatattactccagtgtcctcac

SEQ ID NO: 3406721 - DNA, 25 bp, Homo sapien
gagtcttctacagacgggtatatta

SEQ ID NO: 3406722 - DNA, 25 bp, Homo sapien
aaagaggtggtacacacttcttgag

SEQ ID NO: 3406723 - DNA, 25 bp, Homo sapien
agggtgtccgtcaccacaggagtag

SEQ ID NO: 3406724 - DNA, 25 bp, Homo sapien
accacaggagtaggggtctgaaaat

SEQ ID NO: 3406725 - DNA, 25 bp, Homo sapien
cgtcaccacaggagtaggggtctga

SEQ ID NO: 3406726 - DNA, 25 bp, Homo sapien
ggccagtcctgccatggggaccctc

SEQ ID NO: 3406727 - DNA, 25 bp, Homo sapien
ctgataggaaaggcgagagcttgag

SEQ ID NO: 3406728 - DNA, 25 bp, Homo sapien
tgataggaaaggcgagagcttgaga

SEQ ID NO: 3406729 - DNA, 25 bp, Homo sapien
gggtgtgtagcatttaagccagcag

SEQ ID NO: 3406730 - DNA, 25 bp, Homo sapien
cagcagcaaacactactggataagc

SEQ ID NO: 3406731 - DNA, 25 bp, Homo sapien
ggtcagctgatccaacgcccagggc

SEQ ID NO: 3406732 - DNA, 25 bp, Homo sapien
tgtgtagcatttaagccagcagcaa

SEQ ID NO: 3406733 - DNA, 25 bp, Homo sapien
gcctgggtaccatggacaggctggt

SEQ ID NO: 3406734 - DNA, 25 bp, Homo sapien
tgggtaccatggacaggctggttgg

SEQ ID NO: 3406735 - DNA, 25 bp, Homo sapien
gcagcacagtgggttctgtcagaag

SEQ ID NO: 3406736 - DNA, 25 bp, Homo sapien
cagcacagtgggttctgtcagaagg

SEQ ID NO: 3406737 - DNA, 25 bp, Homo sapien
ccctcactgctgtttgatacggttt

SEQ ID NO: 3406738 - DNA, 25 bp, Homo sapien
gatggtctccaagacatcgtgaggg

SEQ ID NO: 3406739 - DNA, 25 bp, Homo sapien
cacttttcggacaaagatggtctcc

SEQ ID NO: 3406740 - DNA, 25 bp, Homo sapien
acatcgtgaggggaggcccgtccct

SEQ ID NO: 3406741 - DNA, 25 bp, Homo sapien
gtatatccaaactcgtcagggtcac

SEQ ID NO: 3406742 - DNA, 25 bp, Homo sapien
gcaaacatggcaaagggtatatcca

SEQ ID NO: 3406743 - DNA, 25 bp, Homo sapien
tcttgggagcaaacatggcaaaggg

SEQ ID NO: 3406744 - DNA, 25 bp, Homo sapien
ccagctccaaattcttgggagcaaa

SEQ ID NO: 3406745 - DNA, 25 bp, Homo sapien
gccgaggggccatggtttatagtct

SEQ ID NO: 3406746 - DNA, 25 bp, Homo sapien
aactcgtagtcaacggtgggctcac

SEQ ID NO: 3406747 - DNA, 25 bp, Homo sapien
gctcaggaagaacaatgactagcgc

SEQ ID NO: 3406748 - DNA, 25 bp, Homo sapien
aatgactagcgcaccatctactggg

SEQ ID NO: 3406749 - DNA, 25 bp, Homo sapien
gaagaacttaatgctggctacaaac

SEQ ID NO: 3406750 - DNA, 25 bp, Homo sapien
caagttactgtaaacaatctgaaaa

SEQ ID NO: 3406751 - DNA, 25 bp, Homo sapien
gatgctgtgacccagattcaagtta

SEQ ID NO: 3406752 - DNA, 25 bp, Homo sapien
aaattctgggaagaacttaatgctg

SEQ ID NO: 3406753 - DNA, 25 bp, Homo sapien
cagtctctggggaatctggaggatt

SEQ ID NO: 3406754 - DNA, 25 bp, Homo sapien
tctctggggaatctggaggattcac

SEQ ID NO: 3406755 - DNA, 25 bp, Homo sapien
ctggagaggagattcagtctctggg

SEQ ID NO: 3406756 - DNA, 25 bp, Homo sapien
tcagtctctggggaatctggaggat

SEQ ID NO: 3406757 - DNA, 25 bp, Homo sapien
catcatgggtattgccactgctgcc

SEQ ID NO: 3406758 - DNA, 25 bp, Homo sapien
atcatgggtattgccactgctgccc

SEQ ID NO: 3406759 - DNA, 25 bp, Homo sapien
tcatcatgggtattgccactgctgc

SEQ ID NO: 3406760 - DNA, 25 bp, Homo sapien
ccaatatctatggagaggctgctca

SEQ ID NO: 3406761 - DNA, 25 bp, Homo sapien
ctcagctgaggtgggttctgaaact

SEQ ID NO: 3406762 - DNA, 25 bp, Homo sapien
tgaaactcccgatagaaggtcccca

SEQ ID NO: 3406763 - DNA, 25 bp, Homo sapien
agtcttcagccatggactgtgctcc

SEQ ID NO: 3406764 - DNA, 25 bp, Homo sapien
caaagagggacatctcctggcatgg

SEQ ID NO: 3406765 - DNA, 25 bp, Homo sapien
catctgcaaggagaagacgtcaggc

SEQ ID NO: 3406766 - DNA, 25 bp, Homo sapien
caatggctgttagagcaacttggcc

SEQ ID NO: 3406767 - DNA, 25 bp, Homo sapien
ccagggcagctaccataggatctta

SEQ ID NO: 3406768 - DNA, 25 bp, Homo sapien
caaaggcatcaaactcgcggacatt

SEQ ID NO: 3406769 - DNA, 25 bp, Homo sapien
aggcatcaaactcgcggacattctt

SEQ ID NO: 3406770 - DNA, 25 bp, Homo sapien
aactcgcggacattcttctcatgca

SEQ ID NO: 3406771 - DNA, 25 bp, Homo sapien
atcaaactcgcggacattcttctca

SEQ ID NO: 3406772 - DNA, 25 bp, Homo sapien
caggaggtccaagagtagggacttc

SEQ ID NO: 3406773 - DNA, 25 bp, Homo sapien
gaggaacaggatgacacccttggga

SEQ ID NO: 3406774 - DNA, 25 bp, Homo sapien
ctgggcttgactgccgccacggagt

SEQ ID NO: 3406775 - DNA, 25 bp, Homo sapien
cacgtgagtcttctccaactgggca

SEQ ID NO: 3406776 - DNA, 25 bp, Homo sapien
ggaaggggccagctgcaaggcaggc

SEQ ID NO: 3406777 - DNA, 25 bp, Homo sapien
cagggaaggggccagctgcaaggca

SEQ ID NO: 3406778 - DNA, 25 bp, Homo sapien
agggaaggggccagctgcaaggcag

SEQ ID NO: 3406779 - DNA, 25 bp, Homo sapien
gcagggaaggggccagctgcaaggc

SEQ ID NO: 3406780 - DNA, 25 bp, Homo sapien
ttctgatcttgggtaggcaggcctg

SEQ ID NO: 3406781 - DNA, 25 bp, Homo sapien
tgcgactccacaccaatctcttggc

SEQ ID NO: 3406782 - DNA, 25 bp, Homo sapien
ggcaggcctgtcatattgccagaaa

SEQ ID NO: 3406783 - DNA, 25 bp, Homo sapien
tacaggcatagaggcaagagagaga

SEQ ID NO: 3406784 - DNA, 25 bp, Homo sapien
ctgaggacctgagcacaggcagcca

SEQ ID NO: 3406785 - DNA, 25 bp, Homo sapien
tttttatttcccatggagctgagga

SEQ ID NO: 3406786 - DNA, 25 bp, Homo sapien
ttatttcccatggagctgaggacct

SEQ ID NO: 3406787 - DNA, 25 bp, Homo sapien
ttcccatggagctgaggacctgagc

SEQ ID NO: 3406788 - DNA, 25 bp, Homo sapien
taaggctctcaccaggaatacgcaa

SEQ ID NO: 3406789 - DNA, 25 bp, Homo sapien
ttgaccaggactaccagcgaggctg

SEQ ID NO: 3406790 - DNA, 25 bp, Homo sapien
ggttaagtcaatcatacgcccagct

SEQ ID NO: 3406791 - DNA, 25 bp, Homo sapien
cctttagtcagttccagtgcagcca

SEQ ID NO: 3406792 - DNA, 25 bp, Homo sapien
aaagattgctgcctcagacaatggc

SEQ ID NO: 3406793 - DNA, 25 bp, Homo sapien
tgccaaagattgctgcctcagacaa

SEQ ID NO: 3406794 - DNA, 25 bp, Homo sapien
agacaatggctaggcctttccatgc

SEQ ID NO: 3406795 - DNA, 25 bp, Homo sapien
aaggccttggaaagagagcagtagc

SEQ ID NO: 3406796 - DNA, 25 bp, Homo sapien
caagggctggccttaacagttgctt

SEQ ID NO: 3406797 - DNA, 25 bp, Homo sapien
tgaagtgtagctcggtatttccaaa

SEQ ID NO: 3406798 - DNA, 25 bp, Homo sapien
gagacaaacagctggtcccagcctg

SEQ ID NO: 3406799 - DNA, 25 bp, Homo sapien
tgcaggagtcagtctagggctcatt

SEQ ID NO: 3406800 - DNA, 25 bp, Homo sapien
ggtatacagcccctaagaggccaca

SEQ ID NO: 3406801 - DNA, 25 bp, Homo sapien
tgaggtctttctgcgcttcacaacg

SEQ ID NO: 3406802 - DNA, 25 bp, Homo sapien
tcaagcccctgataggggaccaggg

SEQ ID NO: 3406803 - DNA, 25 bp, Homo sapien
gaggccacacccgactcaaaacagg

SEQ ID NO: 3406804 - DNA, 25 bp, Homo sapien
gatgctttaaagaggtaggacacca

SEQ ID NO: 3406805 - DNA, 25 bp, Homo sapien
tgctaatggcaatcaggaggctata

SEQ ID NO: 3406806 - DNA, 25 bp, Homo sapien
gccttaacaacgatggcctccaggg

SEQ ID NO: 3406807 - DNA, 25 bp, Homo sapien
tcccatagtggtcaggttccaggtg

SEQ ID NO: 3406808 - DNA, 25 bp, Homo sapien
cctgggcataacttcgctgggctct

SEQ ID NO: 3406809 - DNA, 25 bp, Homo sapien
tgatggaatcagtgaccggccaggt

SEQ ID NO: 3406810 - DNA, 25 bp, Homo sapien
ggccagccctgttgtctttcaaaga

SEQ ID NO: 3406811 - DNA, 25 bp, Homo sapien
tgtatcaagtgtcgctcacagcccc

SEQ ID NO: 3406812 - DNA, 25 bp, Homo sapien
tagacatatttttacagggtcagag

SEQ ID NO: 3406813 - DNA, 25 bp, Homo sapien
aaaaggccataacctccatcagtgg

SEQ ID NO: 3406814 - DNA, 25 bp, Homo sapien
ggttgatttaaccaattccctgctg

SEQ ID NO: 3406815 - DNA, 25 bp, Homo sapien
tatgtcactcacaccctacaaaggg

SEQ ID NO: 3406816 - DNA, 25 bp, Homo sapien
agtggcacacccttgcatgcaggag

SEQ ID NO: 3406817 - DNA, 25 bp, Homo sapien
tgtgtttagtgcctgtcgaatgccc

SEQ ID NO: 3406818 - DNA, 25 bp, Homo sapien
tcagtagccctgaaagcaagctgtc

SEQ ID NO: 3406819 - DNA, 25 bp, Homo sapien
cacctaggagatgacaagtatgggc

SEQ ID NO: 3406820 - DNA, 25 bp, Homo sapien
tctgtccgagagcaatgcgaacctc

SEQ ID NO: 3406821 - DNA, 25 bp, Homo sapien
tcggattccggaggtgcaccagtga

SEQ ID NO: 3406822 - DNA, 25 bp, Homo sapien
cagagctggacctcattggtgcaca

SEQ ID NO: 3406823 - DNA, 25 bp, Homo sapien
cagtgattcgactagctgggaaagc

SEQ ID NO: 3406824 - DNA, 25 bp, Homo sapien
gagttgcagcgccttcttcccctcc

SEQ ID NO: 3406825 - DNA, 25 bp, Homo sapien
tcttcccctccaagagcagctcctc

SEQ ID NO: 3406826 - DNA, 25 bp, Homo sapien
cgagttgcagcgccttcttcccctc

SEQ ID NO: 3406827 - DNA, 25 bp, Homo sapien
ccttcttcccctccaagagcagctc

SEQ ID NO: 3406828 - DNA, 25 bp, Homo sapien
gctcgggtgggacgtctttgaggcc

SEQ ID NO: 3406829 - DNA, 25 bp, Homo sapien
gaagggttccatcctaagtccaggc

SEQ ID NO: 3406830 - DNA, 25 bp, Homo sapien
tctttaaagcgaggatgtctcgggt

SEQ ID NO: 3406831 - DNA, 25 bp, Homo sapien
caagcgctgttccttggcgagtgag

SEQ ID NO: 3406832 - DNA, 25 bp, Homo sapien
tctccttggaggcagactcctcttc

SEQ ID NO: 3406833 - DNA, 25 bp, Homo sapien
tcctcctgccgtggctttactccct

SEQ ID NO: 3406834 - DNA, 25 bp, Homo sapien
ccttctccttggaggcagactcctc

SEQ ID NO: 3406835 - DNA, 25 bp, Homo sapien
cgtggctttactccctcgcccttct

SEQ ID NO: 3406836 - DNA, 25 bp, Homo sapien
gtatgattccagctttcaacaactt

SEQ ID NO: 3406837 - DNA, 25 bp, Homo sapien
tcaaacctcgattctttaactactg

SEQ ID NO: 3406838 - DNA, 25 bp, Homo sapien
ctgtatgattccagctttcaacaac

SEQ ID NO: 3406839 - DNA, 25 bp, Homo sapien
tcgattctttaactactgctgctga

SEQ ID NO: 3406840 - DNA, 25 bp, Homo sapien
gcacacacgtctccccatgggccta

SEQ ID NO: 3406841 - DNA, 25 bp, Homo sapien
cacacgtctccccatgggcctaatg

SEQ ID NO: 3406842 - DNA, 25 bp, Homo sapien
ctccccatgggcctaatgacaggtt

SEQ ID NO: 3406843 - DNA, 25 bp, Homo sapien
acgtctccccatgggcctaatgaca

SEQ ID NO: 3406844 - DNA, 25 bp, Homo sapien
gccgtgcctttggaacattcactgc

SEQ ID NO: 3406845 - DNA, 25 bp, Homo sapien
taaaggacgccgtgcctttggaaca

SEQ ID NO: 3406846 - DNA, 25 bp, Homo sapien
tctgggtcctaaaggacgccgtgcc

SEQ ID NO: 3406847 - DNA, 25 bp, Homo sapien
tccccaagcagtctgggtcctaaag

SEQ ID NO: 3406848 - DNA, 25 bp, Homo sapien
tctccagcctgccccgttgtaccaa

SEQ ID NO: 3406849 - DNA, 25 bp, Homo sapien
tgctgtacagcagactccacttctg

SEQ ID NO: 3406850 - DNA, 25 bp, Homo sapien
ctcgctgatccgcactggggccaca

SEQ ID NO: 3406851 - DNA, 25 bp, Homo sapien
cgctgatccgcactggggccacatt

SEQ ID NO: 3406852 - DNA, 25 bp, Homo sapien
ctatccttggaaattcggtcctggg

SEQ ID NO: 3406853 - DNA, 25 bp, Homo sapien
gggctcaccatattctctgcctgga

SEQ ID NO: 3406854 - DNA, 25 bp, Homo sapien
caatgggccaagtggctggctatcc

SEQ ID NO: 3406855 - DNA, 25 bp, Homo sapien
ggtcctgctgggtagccgaattgct

SEQ ID NO: 3406856 - DNA, 25 bp, Homo sapien
tccaagtgagatttgaggtggcgcc

SEQ ID NO: 3406857 - DNA, 25 bp, Homo sapien
gagcctcatatggttccgcagggag

SEQ ID NO: 3406858 - DNA, 25 bp, Homo sapien
tgtggcccgtgtgcacaaatgcgtg

SEQ ID NO: 3406859 - DNA, 25 bp, Homo sapien
cacctggtgggtcttgcgatgcagc

SEQ ID NO: 3406860 - DNA, 25 bp, Homo sapien
gtgtgtgtccagcagttgtggctca

SEQ ID NO: 3406861 - DNA, 25 bp, Homo sapien
aggagcaccacagtgggctcagaag

SEQ ID NO: 3406862 - DNA, 25 bp, Homo sapien
gagcaccacagtgggctcagaagca

SEQ ID NO: 3406863 - DNA, 25 bp, Homo sapien
aacaacatccctggcgggggagact

SEQ ID NO: 3406864 - DNA, 25 bp, Homo sapien
aggcccatgtccttatggattagca

SEQ ID NO: 3406865 - DNA, 25 bp, Homo sapien
ccacaaagcacttctcctggctttc

SEQ ID NO: 3406866 - DNA, 25 bp, Homo sapien
ccatgtccttatggattagcaccag

SEQ ID NO: 3406867 - DNA, 25 bp, Homo sapien
atgtccttatggattagcaccaggc

SEQ ID NO: 3406868 - DNA, 25 bp, Homo sapien
agaaagcacgagtctttatggagct

SEQ ID NO: 3406869 - DNA, 25 bp, Homo sapien
gagaaagcacgagtctttatggagc

SEQ ID NO: 3406870 - DNA, 25 bp, Homo sapien
gaaagcacgagtctttatggagctg

SEQ ID NO: 3406871 - DNA, 25 bp, Homo sapien
aaagcacgagtctttatggagctgt

SEQ ID NO: 3406872 - DNA, 25 bp, Homo sapien
tcctgggtcactgaggaattgtctg

SEQ ID NO: 3406873 - DNA, 25 bp, Homo sapien
agtgtgtcagctcctgggtcactga

SEQ ID NO: 3406874 - DNA, 25 bp, Homo sapien
cctgggtcactgaggaattgtctgt

SEQ ID NO: 3406875 - DNA, 25 bp, Homo sapien
agctcctgggtcactgaggaattgt

SEQ ID NO: 3406876 - DNA, 25 bp, Homo sapien
tggctgtgcacaaggctacacaggg

SEQ ID NO: 3406877 - DNA, 25 bp, Homo sapien
ggctgtgcacaaggctacacagggc

SEQ ID NO: 3406878 - DNA, 25 bp, Homo sapien
gctgtgcacaaggctacacagggca

SEQ ID NO: 3406879 - DNA, 25 bp, Homo sapien
ttaggggccagctctgtgtgctctg

SEQ ID NO: 3406880 - DNA, 25 bp, Homo sapien
aggagaccccagcccatgggcccac

SEQ ID NO: 3406881 - DNA, 25 bp, Homo sapien
gaccccagcccatgggcccacaccc

SEQ ID NO: 3406882 - DNA, 25 bp, Homo sapien
tctgtgtgctctgtccagccaggag

SEQ ID NO: 3406883 - DNA, 25 bp, Homo sapien
caagaaggtgttggctcgccggacc

SEQ ID NO: 3406884 - DNA, 25 bp, Homo sapien
cgcactctcgctccaggttgccctt

SEQ ID NO: 3406885 - DNA, 25 bp, Homo sapien
cccgctggagcagcgaccgtgcttg

SEQ ID NO: 3406886 - DNA, 25 bp, Homo sapien
agcctcgaaggcctcctcgtagctg

SEQ ID NO: 3406887 - DNA, 25 bp, Homo sapien
ctgtgtacttggcccagaacacatc

SEQ ID NO: 3406888 - DNA, 25 bp, Homo sapien
gcaagcttatctcgaggcgtcctcg

SEQ ID NO: 3406889 - DNA, 25 bp, Homo sapien
tcgaggcgtcctcgctgtctcacaa

SEQ ID NO: 3406890 - DNA, 25 bp, Homo sapien
cttccagacatgcagcaagcttatc

SEQ ID NO: 3406891 - DNA, 25 bp, Homo sapien
catgcagcaagcttatctcgaggcg

SEQ ID NO: 3406892 - DNA, 25 bp, Homo sapien
tcaggcttatgtgggtagcgactcc

SEQ ID NO: 3406893 - DNA, 25 bp, Homo sapien
ggtagcgactcctccatagctggca

SEQ ID NO: 3406894 - DNA, 25 bp, Homo sapien
tcggtagttcgtacccagaccctca

SEQ ID NO: 3406895 - DNA, 25 bp, Homo sapien
tagctggcactcaatgcctgaccgg

SEQ ID NO: 3406896 - DNA, 25 bp, Homo sapien
cggtggggtctgtagtgtagcacca

SEQ ID NO: 3406897 - DNA, 25 bp, Homo sapien
aattctcctgtaggtcggccccagg

SEQ ID NO: 3406898 - DNA, 25 bp, Homo sapien
gccccaggatgggtagtggagttga

SEQ ID NO: 3406899 - DNA, 25 bp, Homo sapien
caccagggtcccgtggtgctgctgt

SEQ ID NO: 3406900 - DNA, 25 bp, Homo sapien
cacaatagttgaggtcgcagtaccc

SEQ ID NO: 3406901 - DNA, 25 bp, Homo sapien
tcacactggagccttcggagcgtgg

SEQ ID NO: 3406902 - DNA, 25 bp, Homo sapien
gctccaatggaggtgacagattcac

SEQ ID NO: 3406903 - DNA, 25 bp, Homo sapien
tcatccccgtctgggttgcggcaga

SEQ ID NO: 3406904 - DNA, 25 bp, Homo sapien
cactggtggcggtacgcccttcgat

SEQ ID NO: 3406905 - DNA, 25 bp, Homo sapien
tcccgagccaaaggtcctcggattg

SEQ ID NO: 3406906 - DNA, 25 bp, Homo sapien
ttgaagaaagtctggtactcactgg

SEQ ID NO: 3406907 - DNA, 25 bp, Homo sapien
acgcccttcgatggccctgtctgag

SEQ ID NO: 3406908 - DNA, 25 bp, Homo sapien
cagtgaggggcaagtcctggccacc

SEQ ID NO: 3406909 - DNA, 25 bp, Homo sapien
gccccgcatcccctcggatgcccac

SEQ ID NO: 3406910 - DNA, 25 bp, Homo sapien
agtgaggggcaagtcctggccacca

SEQ ID NO: 3406911 - DNA, 25 bp, Homo sapien
atcccctcggatgcccactacctca

SEQ ID NO: 3406912 - DNA, 25 bp, Homo sapien
tgacatgccgatctctgcatccgag

SEQ ID NO: 3406913 - DNA, 25 bp, Homo sapien
ttcttctcgaacagaggtcgcagcc

SEQ ID NO: 3406914 - DNA, 25 bp, Homo sapien
cgcccgtcgatgtaggattccagga

SEQ ID NO: 3406915 - DNA, 25 bp, Homo sapien
tgtcctccagcgacttcttctcgaa

SEQ ID NO: 3406916 - DNA, 25 bp, Homo sapien
tctcggtgaagttcttgtcccaggg

SEQ ID NO: 3406917 - DNA, 25 bp, Homo sapien
gactcttccggaaaagcatcacctg

SEQ ID NO: 3406918 - DNA, 25 bp, Homo sapien
aatgcgcaccagaaggtcattctcg

SEQ ID NO: 3406919 - DNA, 25 bp, Homo sapien
tgcgggagtgcttgccaatgcgcac

SEQ ID NO: 3406920 - DNA, 25 bp, Homo sapien
gatgtagatcttttccaacatggat

SEQ ID NO: 3406921 - DNA, 25 bp, Homo sapien
ttgtacctggggtggatgtagatct

SEQ ID NO: 3406922 - DNA, 25 bp, Homo sapien
caatgtcccggtccaggttctcccg

SEQ ID NO: 3406923 - DNA, 25 bp, Homo sapien
aggttctcccgccagttgtacctgg

SEQ ID NO: 3406924 - DNA, 25 bp, Homo sapien
tgaatgtagtcactgaaggcaacag

SEQ ID NO: 3406925 - DNA, 25 bp, Homo sapien
tgccgtctccctgtcgggcagacac

SEQ ID NO: 3406926 - DNA, 25 bp, Homo sapien
aatgtagtcactgaaggcaacaggc

SEQ ID NO: 3406927 - DNA, 25 bp, Homo sapien
ctccctgtcgggcagacacacaggg

SEQ ID NO: 3406928 - DNA, 25 bp, Homo sapien
ctgtcacccgccccttgtatccagc

SEQ ID NO: 3406929 - DNA, 25 bp, Homo sapien
gtcacccgccccttgtatccagcct

SEQ ID NO: 3406930 - DNA, 25 bp, Homo sapien
acccgccccttgtatccagcctgga

SEQ ID NO: 3406931 - DNA, 25 bp, Homo sapien
gccccttgtatccagcctggagcaa

SEQ ID NO: 3406932 - DNA, 25 bp, Homo sapien
caacgttggctgtccacgtctcctt

SEQ ID NO: 3406933 - DNA, 25 bp, Homo sapien
aacgttggctgtccacgtctccttc

SEQ ID NO: 3406934 - DNA, 25 bp, Homo sapien
tccacgtctccttcaggttgcccca

SEQ ID NO: 3406935 - DNA, 25 bp, Homo sapien
gccgctccacaatgggcaggttcac

SEQ ID NO: 3406936 - DNA, 25 bp, Homo sapien
ggccgctccacaatgggcaggttca

SEQ ID NO: 3406937 - DNA, 25 bp, Homo sapien
cgctccacaatgggcaggttcacca

SEQ ID NO: 3406938 - DNA, 25 bp, Homo sapien
cggccgctccacaatgggcaggttc

SEQ ID NO: 3406939 - DNA, 25 bp, Homo sapien
catgttgtcagtgatgcggatccgg

SEQ ID NO: 3406940 - DNA, 25 bp, Homo sapien
cggatccgggtggagtccttgcaga

SEQ ID NO: 3406941 - DNA, 25 bp, Homo sapien
cagtgatgcggatccgggtggagtc

SEQ ID NO: 3406942 - DNA, 25 bp, Homo sapien
atgcggatccgggtggagtccttgc

SEQ ID NO: 3406943 - DNA, 25 bp, Homo sapien
ccccagacaagccaagagtgctccc

SEQ ID NO: 3406944 - DNA, 25 bp, Homo sapien
agacaagccaagagtgctcccacct

SEQ ID NO: 3406945 - DNA, 25 bp, Homo sapien
tcagggccttagtgcctgccatgcc

SEQ ID NO: 3406946 - DNA, 25 bp, Homo sapien
ccacctcagggccttagtgcctgcc

SEQ ID NO: 3406947 - DNA, 25 bp, Homo sapien
ttcccatctcactcaataaagtcct

SEQ ID NO: 3406948 - DNA, 25 bp, Homo sapien
tgcctcaagcccctcaataacttcc

SEQ ID NO: 3406949 - DNA, 25 bp, Homo sapien
gatttgctctcaaactatgcatata

SEQ ID NO: 3406950 - DNA, 25 bp, Homo sapien
caatctggatgacagtatacaggaa

SEQ ID NO: 3406951 - DNA, 25 bp, Homo sapien
ttgtatcatcattaatttcctggtt

SEQ ID NO: 3406952 - DNA, 25 bp, Homo sapien
tattgtatcatcattaatttcctgg

SEQ ID NO: 3406953 - DNA, 25 bp, Homo sapien
attgtatcatcattaatttcctggt

SEQ ID NO: 3406954 - DNA, 25 bp, Homo sapien
gatcgcaccacacactccagcccgg

SEQ ID NO: 3406955 - DNA, 25 bp, Homo sapien
ggtttctcactgtcaacagagagag

SEQ ID NO: 3406956 - DNA, 25 bp, Homo sapien
tattctagtattgttcaaataggca

SEQ ID NO: 3406957 - DNA, 25 bp, Homo sapien
gaaactatattctagtattgttcaa

SEQ ID NO: 3406958 - DNA, 25 bp, Homo sapien
aatgcattacagataatgagggtca

SEQ ID NO: 3406959 - DNA, 25 bp, Homo sapien
tctcaagtagctgagactacaaggc

SEQ ID NO: 3406960 - DNA, 25 bp, Homo sapien
ctcactgcagtattgaactcctagg

SEQ ID NO: 3406961 - DNA, 25 bp, Homo sapien
ctgagactacaaggcacatgccacc

SEQ ID NO: 3406962 - DNA, 25 bp, Homo sapien
ctcaagcaatcctcctaactcagcc

SEQ ID NO: 3406963 - DNA, 25 bp, Homo sapien
ataatgatagttgcttttatccaaa

SEQ ID NO: 3406964 - DNA, 25 bp, Homo sapien
caaacaatacagaacaacactaaca

SEQ ID NO: 3406965 - DNA, 25 bp, Homo sapien
cctacaagtctgatgaggataataa

SEQ ID NO: 3406966 - DNA, 25 bp, Homo sapien
cactaacaacagtaaaacctacaca

SEQ ID NO: 3406967 - DNA, 25 bp, Homo sapien
aggagcatagctcatagcccagcca

SEQ ID NO: 3406968 - DNA, 25 bp, Homo sapien
cttacccctccagtcattcttgctg

SEQ ID NO: 3406969 - DNA, 25 bp, Homo sapien
cagctggtgagagtccacttacccc

SEQ ID NO: 3406970 - DNA, 25 bp, Homo sapien
cacgccccttcacgagacacagctg

SEQ ID NO: 3406971 - DNA, 25 bp, Homo sapien
tcacaggcatcccctcgtttccctt

SEQ ID NO: 3406972 - DNA, 25 bp, Homo sapien
caccttcacaggcatcccctcgttt

SEQ ID NO: 3406973 - DNA, 25 bp, Homo sapien
accttcacaggcatcccctcgtttc

SEQ ID NO: 3406974 - DNA, 25 bp, Homo sapien
acaggcatcccctcgtttcccttca

SEQ ID NO: 3406975 - DNA, 25 bp, Homo sapien
tctagatactagagtttctccccac

SEQ ID NO: 3406976 - DNA, 25 bp, Homo sapien
cctgccaggcaactgtttctagata

SEQ ID NO: 3406977 - DNA, 25 bp, Homo sapien
tcaagttcaaggtcacatcagtatt

SEQ ID NO: 3406978 - DNA, 25 bp, Homo sapien
gatgaggtttccaatagagtcaagt

SEQ ID NO: 3406979 - DNA, 25 bp, Homo sapien
tcttcaggcggaacacatgtgtgta

SEQ ID NO: 3406980 - DNA, 25 bp, Homo sapien
gcccatttgataccagcggttgtta

SEQ ID NO: 3406981 - DNA, 25 bp, Homo sapien
tatccacttcttcaggcggaacaca

SEQ ID NO: 3406982 - DNA, 25 bp, Homo sapien
ttcaccccatgagacgatgcccatt

SEQ ID NO: 3406983 - DNA, 25 bp, Homo sapien
aggagcccagaatatgagtggcccc

SEQ ID NO: 3406984 - DNA, 25 bp, Homo sapien
taattctttcacgggattggttcca

SEQ ID NO: 3406985 - DNA, 25 bp, Homo sapien
aattctttcacgggattggttccag

SEQ ID NO: 3406986 - DNA, 25 bp, Homo sapien
gctgagagtcacttttattgggaac

SEQ ID NO: 3406987 - DNA, 25 bp, Homo sapien
ctgagagtcacttttattgggaacc

SEQ ID NO: 3406988 - DNA, 25 bp, Homo sapien
cagccctgatttttataaacagggt

SEQ ID NO: 3406989 - DNA, 25 bp, Homo sapien
ccagccctgatttttataaacaggg

SEQ ID NO: 3406990 - DNA, 25 bp, Homo sapien
aaacttgtctctcctttatagtggg

SEQ ID NO: 3406991 - DNA, 25 bp, Homo sapien
ggtggctcactcatacaaccgtagc

SEQ ID NO: 3406992 - DNA, 25 bp, Homo sapien
gatgatggaggcgtttgctgctata

SEQ ID NO: 3406993 - DNA, 25 bp, Homo sapien
agtcatcgttttcaggtggccccgg

SEQ ID NO: 3406994 - DNA, 25 bp, Homo sapien
tgctgctctagaagactgtccgtgg

SEQ ID NO: 3406995 - DNA, 25 bp, Homo sapien
tgtatgtatcatgccgtggagctag

SEQ ID NO: 3406996 - DNA, 25 bp, Homo sapien
ggtaccagctgggtattcagccagt

SEQ ID NO: 3406997 - DNA, 25 bp, Homo sapien
cctcagcaggcctagtgtatacaaa

SEQ ID NO: 3406998 - DNA, 25 bp, Homo sapien
tcagttgggcaattacagtatgctt

SEQ ID NO: 3406999 - DNA, 25 bp, Homo sapien
taaaggcccgcattgtatcattgtt

SEQ ID NO: 3407000 - DNA, 25 bp, Homo sapien
ggtagggttacagacactccagttc

SEQ ID NO: 3407001 - DNA, 25 bp, Homo sapien
ccatgaatacaccatagccttggac

SEQ ID NO: 3407002 - DNA, 25 bp, Homo sapien
ggcactgttgtcatcatattagaag

SEQ ID NO: 3407003 - DNA, 25 bp, Homo sapien
tgcagggaaatatcttttgtcccag

SEQ ID NO: 3407004 - DNA, 25 bp, Homo sapien
tgtagctctggcataataaacactt

SEQ ID NO: 3407005 - DNA, 25 bp, Homo sapien
gatgtttcggttagtctgcagggaa

SEQ ID NO: 3407006 - DNA, 25 bp, Homo sapien
cagcgatttaccaagactagggcgg

SEQ ID NO: 3407007 - DNA, 25 bp, Homo sapien
gcctctcgcgtaattgtcaagtgaa

SEQ ID NO: 3407008 - DNA, 25 bp, Homo sapien
gcttgctgcgatgtgaacgattccg

SEQ ID NO: 3407009 - DNA, 25 bp, Homo sapien
gaatgaataagtaagcgcctacgag

SEQ ID NO: 3407010 - DNA, 25 bp, Homo sapien
tgaggcggcgaagcgagccggaggc

SEQ ID NO: 3407011 - DNA, 25 bp, Homo sapien
cggcaggtctgaggcggcgaagcga

SEQ ID NO: 3407012 - DNA, 25 bp, Homo sapien
gtctgaggcggcgaagcgagccgga

SEQ ID NO: 3407013 - DNA, 25 bp, Homo sapien
ccggcaggtctgaggcggcgaagcg

SEQ ID NO: 3407014 - DNA, 25 bp, Homo sapien
acccgcgaggccctcgagtgcaggc

SEQ ID NO: 3407015 - DNA, 25 bp, Homo sapien
tggaggtctccagacgcgcgcccca

SEQ ID NO: 3407016 - DNA, 25 bp, Homo sapien
tgaggtgagtggtcggtgggcctgc

SEQ ID NO: 3407017 - DNA, 25 bp, Homo sapien
tagagcaggccgcttggttctgacc

SEQ ID NO: 3407018 - DNA, 25 bp, Homo sapien
ggtgtgcggcggcccaagcggtttc

SEQ ID NO: 3407019 - DNA, 25 bp, Homo sapien
ctgcggggtgtgcggcggcccaagc

SEQ ID NO: 3407020 - DNA, 25 bp, Homo sapien
tgcggcggcccaagcggtttcaaac

SEQ ID NO: 3407021 - DNA, 25 bp, Homo sapien
tgtgcggcggcccaagcggtttcaa

SEQ ID NO: 3407022 - DNA, 25 bp, Homo sapien
caataaaagtccgatgggcggtccg

SEQ ID NO: 3407023 - DNA, 25 bp, Homo sapien
tcaaatggaccaataaaagtccgat

SEQ ID NO: 3407024 - DNA, 25 bp, Homo sapien
cgaggaccaataaagaacgaggaca

SEQ ID NO: 3407025 - DNA, 25 bp, Homo sapien
tgggcggtccgtcgaggaccaataa

SEQ ID NO: 3407026 - DNA, 25 bp, Homo sapien
cggcgtctggtccagagggaaacac

SEQ ID NO: 3407027 - DNA, 25 bp, Homo sapien
ggcggcgtctggtccagagggaaac

SEQ ID NO: 3407028 - DNA, 25 bp, Homo sapien
gagggaaacacggctgcgcgcggcc

SEQ ID NO: 3407029 - DNA, 25 bp, Homo sapien
gcaggcggcgtctggtccagaggga

SEQ ID NO: 3407030 - DNA, 25 bp, Homo sapien
ttctggagtcggcagacttgccccc

SEQ ID NO: 3407031 - DNA, 25 bp, Homo sapien
tttctttctggagtcggcagacttg

SEQ ID NO: 3407032 - DNA, 25 bp, Homo sapien
tttctggagtcggcagacttgcccc

SEQ ID NO: 3407033 - DNA, 25 bp, Homo sapien
tctttctggagtcggcagacttgcc

SEQ ID NO: 3407034 - DNA, 25 bp, Homo sapien
cattcgctgttacttccacgacatc

SEQ ID NO: 3407035 - DNA, 25 bp, Homo sapien
acttccacgacatctcagctgcctc

SEQ ID NO: 3407036 - DNA, 25 bp, Homo sapien
agcatcctggcttcattcgctgtta

SEQ ID NO: 3407037 - DNA, 25 bp, Homo sapien
ggcttcattcgctgttacttccacg

SEQ ID NO: 3407038 - DNA, 25 bp, Homo sapien
taaactaatggaagcgattctccca

SEQ ID NO: 3407039 - DNA, 25 bp, Homo sapien
tagccttgctctcagtagcgtcagc

SEQ ID NO: 3407040 - DNA, 25 bp, Homo sapien
tactcactggagagattggactttc

SEQ ID NO: 3407041 - DNA, 25 bp, Homo sapien
tagagagagataccaggcccttagc

SEQ ID NO: 3407042 - DNA, 25 bp, Homo sapien
tcgaaataccattgaggcgtccagg

SEQ ID NO: 3407043 - DNA, 25 bp, Homo sapien
tttatggccagcagaagagagatcc

SEQ ID NO: 3407044 - DNA, 25 bp, Homo sapien
tggactatgatacccgcaggtggga

SEQ ID NO: 3407045 - DNA, 25 bp, Homo sapien
tgatcaacaatagcctggatgagcc

SEQ ID NO: 3407046 - DNA, 25 bp, Homo sapien
taggagtcagtaaggaaggactata

SEQ ID NO: 3407047 - DNA, 25 bp, Homo sapien
cccgggtgtgtcaatcatcatttaa

SEQ ID NO: 3407048 - DNA, 25 bp, Homo sapien
ggaaaaaggcgcttctttctcttgc

SEQ ID NO: 3407049 - DNA, 25 bp, Homo sapien
ttgctcagagtgttacgtaatgaac

SEQ ID NO: 3407050 - DNA, 25 bp, Homo sapien
tatttgtagcctctttggcgtgttg

SEQ ID NO: 3407051 - DNA, 25 bp, Homo sapien
tctctccgaagagcggtagcttggc

SEQ ID NO: 3407052 - DNA, 25 bp, Homo sapien
tctctagcgcggactgagctctttc

SEQ ID NO: 3407053 - DNA, 25 bp, Homo sapien
gcttttttccgcgtcctctctagcg

SEQ ID NO: 3407054 - DNA, 25 bp, Homo sapien
gccggcgctgggggcgggcccaggc

SEQ ID NO: 3407055 - DNA, 25 bp, Homo sapien
tgggggcgggcccaggcgcggtggc

SEQ ID NO: 3407056 - DNA, 25 bp, Homo sapien
cgcggtggcggtggccggggctgcg

SEQ ID NO: 3407057 - DNA, 25 bp, Homo sapien
cgctgggggcgggcccaggcgcggt

SEQ ID NO: 3407058 - DNA, 25 bp, Homo sapien
ctggggaggcctctgaattgtggca

SEQ ID NO: 3407059 - DNA, 25 bp, Homo sapien
gggaggcctctgaattgtggcagga

SEQ ID NO: 3407060 - DNA, 25 bp, Homo sapien
ggcctctgaattgtggcaggaggca

SEQ ID NO: 3407061 - DNA, 25 bp, Homo sapien
cctctgaattgtggcaggaggcaaa

SEQ ID NO: 3407062 - DNA, 25 bp, Homo sapien
gctgctataacggtctctgacatgg

SEQ ID NO: 3407063 - DNA, 25 bp, Homo sapien
ttcattggtcggtgttgagtgtctg

SEQ ID NO: 3407064 - DNA, 25 bp, Homo sapien
caccttagcctggactaagcttatg

SEQ ID NO: 3407065 - DNA, 25 bp, Homo sapien
gcttatggttcacatcactatcagc

SEQ ID NO: 3407066 - DNA, 25 bp, Homo sapien
tggtccaggtttctttggactccca

SEQ ID NO: 3407067 - DNA, 25 bp, Homo sapien
ggaggaggtgtcacacaaacagtct

SEQ ID NO: 3407068 - DNA, 25 bp, Homo sapien
gttccgggggcagtcgcttcacgat

SEQ ID NO: 3407069 - DNA, 25 bp, Homo sapien
ccgtgtcgcaaagtggagctggcca

SEQ ID NO: 3407070 - DNA, 25 bp, Homo sapien
ccggaacccaggttgccgtctctct

SEQ ID NO: 3407071 - DNA, 25 bp, Homo sapien
agctctccggcttccggaacccagg

SEQ ID NO: 3407072 - DNA, 25 bp, Homo sapien
tgaccggggtggcttcaaagctcca

SEQ ID NO: 3407073 - DNA, 25 bp, Homo sapien
ggggtggcttcaaagctccagctct

SEQ ID NO: 3407074 - DNA, 25 bp, Homo sapien
ccagatactcgtagtccggtagggc

SEQ ID NO: 3407075 - DNA, 25 bp, Homo sapien
gggctaggcgctccggactcagcat

SEQ ID NO: 3407076 - DNA, 25 bp, Homo sapien
tagggctaggcgctccggactcagc

SEQ ID NO: 3407077 - DNA, 25 bp, Homo sapien
gatactcgtagtccggtagggctag

SEQ ID NO: 3407078 - DNA, 25 bp, Homo sapien
ccaaaaggcccattccagaactagg

SEQ ID NO: 3407079 - DNA, 25 bp, Homo sapien
tcaatttatctactcggcctcctag

SEQ ID NO: 3407080 - DNA, 25 bp, Homo sapien
aaatctagatcgaccttccaggaac

SEQ ID NO: 3407081 - DNA, 25 bp, Homo sapien
caagggttgggaacaacatggctta

SEQ ID NO: 3407082 - DNA, 25 bp, Homo sapien
tgagctatttcctaaggcccctagg

SEQ ID NO: 3407083 - DNA, 25 bp, Homo sapien
ttttagagagaaaaggcctgccctc

SEQ ID NO: 3407084 - DNA, 25 bp, Homo sapien
tactttgggccaatgggactgtccc

SEQ ID NO: 3407085 - DNA, 25 bp, Homo sapien
ggcaatgggccctaatgcagctcta

SEQ ID NO: 3407086 - DNA, 25 bp, Homo sapien
tggagccgaccggttctggcagcct

SEQ ID NO: 3407087 - DNA, 25 bp, Homo sapien
ggcctttcatatatcttacattcaa

SEQ ID NO: 3407088 - DNA, 25 bp, Homo sapien
gcatgagaaccatggagccgaccgg

SEQ ID NO: 3407089 - DNA, 25 bp, Homo sapien
catttgacaagcaaagccgaagacg

SEQ ID NO: 3407090 - DNA, 25 bp, Homo sapien
tgaacagtgtcctgagtgctagcct

SEQ ID NO: 3407091 - DNA, 25 bp, Homo sapien
gcagccttccacaaagagacctgag

SEQ ID NO: 3407092 - DNA, 25 bp, Homo sapien
tccttccatatgacaggctgaacag

SEQ ID NO: 3407093 - DNA, 25 bp, Homo sapien
gtggcagcataaggcatcctcttct

SEQ ID NO: 3407094 - DNA, 25 bp, Homo sapien
gactcattaagtccaaaagaggtga

SEQ ID NO: 3407095 - DNA, 25 bp, Homo sapien
aaaagaggtgactatgccatgtaag

SEQ ID NO: 3407096 - DNA, 25 bp, Homo sapien
aaagatgactcattaagtccaaaag

SEQ ID NO: 3407097 - DNA, 25 bp, Homo sapien
ccaaaagaggtgactatgccatgta

SEQ ID NO: 3407098 - DNA, 25 bp, Homo sapien
cagtaacaacacaaagatgtccact

SEQ ID NO: 3407099 - DNA, 25 bp, Homo sapien
ggttctaaccagcacaattaggcaa

SEQ ID NO: 3407100 - DNA, 25 bp, Homo sapien
aattctactcaatattctactgcag

SEQ ID NO: 3407101 - DNA, 25 bp, Homo sapien
agacttaaaccctactacttgatca

SEQ ID NO: 3407102 - DNA, 25 bp, Homo sapien
gaagagaccaatttccttgcagatg

SEQ ID NO: 3407103 - DNA, 25 bp, Homo sapien
tgaaacagaacaatacaggagggtg

SEQ ID NO: 3407104 - DNA, 25 bp, Homo sapien
gccaattccccagagtattcactgc

SEQ ID NO: 3407105 - DNA, 25 bp, Homo sapien
tacatccaagaaacggaagagacca

SEQ ID NO: 3407106 - DNA, 25 bp, Homo sapien
cagaatttttagttttccctgcaca

SEQ ID NO: 3407107 - DNA, 25 bp, Homo sapien
ctttatgcaaatactgctgagctta

SEQ ID NO: 3407108 - DNA, 25 bp, Homo sapien
gtctcactatggctggtgtcaaact

SEQ ID NO: 3407109 - DNA, 25 bp, Homo sapien
tcactttgttattgcactatagaaa

SEQ ID NO: 3407110 - DNA, 25 bp, Homo sapien
tgtgactgaaacctagcttactctg

SEQ ID NO: 3407111 - DNA, 25 bp, Homo sapien
gattttggtatactcagagagccct

SEQ ID NO: 3407112 - DNA, 25 bp, Homo sapien
tcgtagattcgggttccacagggcc

SEQ ID NO: 3407113 - DNA, 25 bp, Homo sapien
gactgcatacaataagggccttaaa

SEQ ID NO: 3407114 - DNA, 25 bp, Homo sapien
tgctgaaagcctaacaaaggttctg

SEQ ID NO: 3407115 - DNA, 25 bp, Homo sapien
cagtcctcagtaagccaccgttcat

SEQ ID NO: 3407116 - DNA, 25 bp, Homo sapien
tgttgtgctcttgcatggcagggcc

SEQ ID NO: 3407117 - DNA, 25 bp, Homo sapien
tatagaaaatgcaggctagctggac

SEQ ID NO: 3407118 - DNA, 25 bp, Homo sapien
gcattcgatgcaattaccagttcct

SEQ ID NO: 3407119 - DNA, 25 bp, Homo sapien
ccttctattgttactaagagcctca

SEQ ID NO: 3407120 - DNA, 25 bp, Homo sapien
tgttcaaggtaaagcgaaaaaatgc

SEQ ID NO: 3407121 - DNA, 25 bp, Homo sapien
gggggctacttgtcatttcaacatc

SEQ ID NO: 3407122 - DNA, 25 bp, Homo sapien
gctaccatttttgagtacttgcaca

SEQ ID NO: 3407123 - DNA, 25 bp, Homo sapien
taatgtgaaagctttttacgggata

SEQ ID NO: 3407124 - DNA, 25 bp, Homo sapien
ttttcagagcagtaaaaatcaaagt

SEQ ID NO: 3407125 - DNA, 25 bp, Homo sapien
tagctccagggactcaaagttaatg

SEQ ID NO: 3407126 - DNA, 25 bp, Homo sapien
gccaacctgagcccaaaagtcttca

SEQ ID NO: 3407127 - DNA, 25 bp, Homo sapien
tgccaacctgagcccaaaagtcttc

SEQ ID NO: 3407128 - DNA, 25 bp, Homo sapien
ccaacctgagcccaaaagtcttcat

SEQ ID NO: 3407129 - DNA, 25 bp, Homo sapien
ctgccaacctgagcccaaaagtctt

SEQ ID NO: 3407130 - DNA, 25 bp, Homo sapien
ttatcccagggagttagtaattcca

SEQ ID NO: 3407131 - DNA, 25 bp, Homo sapien
tatcccagggagttagtaattccat

SEQ ID NO: 3407132 - DNA, 25 bp, Homo sapien
caatcaaatagcaagagagaaagag

SEQ ID NO: 3407133 - DNA, 25 bp, Homo sapien
gcaatcaaatagcaagagagaaaga

SEQ ID NO: 3407134 - DNA, 25 bp, Homo sapien
ctgcaatcaaatagcaagagagaaa

SEQ ID NO: 3407135 - DNA, 25 bp, Homo sapien
tgcaatcaaatagcaagagagaaag

SEQ ID NO: 3407136 - DNA, 25 bp, Homo sapien
tattcagtgaagaacctggcaattc

SEQ ID NO: 3407137 - DNA, 25 bp, Homo sapien
ttccatattggctaatatcttccct

SEQ ID NO: 3407138 - DNA, 25 bp, Homo sapien
ccatattggctaatatcttccctgt

SEQ ID NO: 3407139 - DNA, 25 bp, Homo sapien
attcagtgaagaacctggcaattcc

SEQ ID NO: 3407140 - DNA, 25 bp, Homo sapien
cattaagtgattggcacagcatcct

SEQ ID NO: 3407141 - DNA, 25 bp, Homo sapien
aaactgcagaggaacattagcctag

SEQ ID NO: 3407142 - DNA, 25 bp, Homo sapien
tctgttcctcaagtatcctgcctgc

SEQ ID NO: 3407143 - DNA, 25 bp, Homo sapien
tggacaaactagctgcaccaaaggc

SEQ ID NO: 3407144 - DNA, 25 bp, Homo sapien
tactctaaacagtgctgtaacaaac

SEQ ID NO: 3407145 - DNA, 25 bp, Homo sapien
gtactgatatttattcgatacacta

SEQ ID NO: 3407146 - DNA, 25 bp, Homo sapien
caaatcttagtactctaaacagtgc

SEQ ID NO: 3407147 - DNA, 25 bp, Homo sapien
tgtaacaaacataggagtactgata

SEQ ID NO: 3407148 - DNA, 25 bp, Homo sapien
aagctccctgatgccatagtgttgg

SEQ ID NO: 3407149 - DNA, 25 bp, Homo sapien
caagaatctggtcacactctgctgt

SEQ ID NO: 3407150 - DNA, 25 bp, Homo sapien
cacagagtaggtgcccaaaagtaat

SEQ ID NO: 3407151 - DNA, 25 bp, Homo sapien
cacttgatcataaaagcgagctctc

SEQ ID NO: 3407152 - DNA, 25 bp, Homo sapien
ctacaccttgagttttaaaattctg

SEQ ID NO: 3407153 - DNA, 25 bp, Homo sapien
caccttgagttttaaaattctgtat

SEQ ID NO: 3407154 - DNA, 25 bp, Homo sapien
gcatagcagaattaacagtacctgt

SEQ ID NO: 3407155 - DNA, 25 bp, Homo sapien
tcaaatgactgttagggcttgcaga

SEQ ID NO: 3407156 - DNA, 25 bp, Homo sapien
ggaagattcaactgatacactaagc

SEQ ID NO: 3407157 - DNA, 25 bp, Homo sapien
tagaaatctcagatattggctaggc

SEQ ID NO: 3407158 - DNA, 25 bp, Homo sapien
ccagtcgtagttcttggaaaaagtg

SEQ ID NO: 3407159 - DNA, 25 bp, Homo sapien
gaaaatgggtcagaaaacctgccaa

SEQ ID NO: 3407160 - DNA, 25 bp, Homo sapien
gaatttatcactatctgaagctacc

SEQ ID NO: 3407161 - DNA, 25 bp, Homo sapien
catgtctagggtgcagtaggccttc

SEQ ID NO: 3407162 - DNA, 25 bp, Homo sapien
tattcctgctttgctaggtggtctt

SEQ ID NO: 3407163 - DNA, 25 bp, Homo sapien
ggtgagaatggaaatcgttgccctg

SEQ ID NO: 3407164 - DNA, 25 bp, Homo sapien
tcatgtcctatgtgaacaaacttgt

SEQ ID NO: 3407165 - DNA, 25 bp, Homo sapien
cgtagatgcccttcacttggtgaaa

SEQ ID NO: 3407166 - DNA, 25 bp, Homo sapien
atgtagaacctgaggtaccactgaa

SEQ ID NO: 3407167 - DNA, 25 bp, Homo sapien
ggtcacacagttcaggaggtccagc

SEQ ID NO: 3407168 - DNA, 25 bp, Homo sapien
gtcacacagttcaggaggtccagct

SEQ ID NO: 3407169 - DNA, 25 bp, Homo sapien
catgtagaacctgaggtaccactga

SEQ ID NO: 3407170 - DNA, 25 bp, Homo sapien
cagggtttgttcttttagagccatc

SEQ ID NO: 3407171 - DNA, 25 bp, Homo sapien
ctaaaataagggcactataggcaca

SEQ ID NO: 3407172 - DNA, 25 bp, Homo sapien
ttaataataggccaagtctccttgg

SEQ ID NO: 3407173 - DNA, 25 bp, Homo sapien
tactaccgttatttccagagtcgcc

SEQ ID NO: 3407174 - DNA, 25 bp, Homo sapien
agcaagaagttgatgcaggaagcca

SEQ ID NO: 3407175 - DNA, 25 bp, Homo sapien
gaaattgaccccagccagggtgcag

SEQ ID NO: 3407176 - DNA, 25 bp, Homo sapien
caaaggtgcctaccaaggtcaaagg

SEQ ID NO: 3407177 - DNA, 25 bp, Homo sapien
gcctttcccggcatcaatgaggcca

SEQ ID NO: 3407178 - DNA, 25 bp, Homo sapien
tatgcataggaccatgtaacctgtg

SEQ ID NO: 3407179 - DNA, 25 bp, Homo sapien
tgaattcatttataagctctagaag

SEQ ID NO: 3407180 - DNA, 25 bp, Homo sapien
tatgtgttgctcttgtcccctgcaa

SEQ ID NO: 3407181 - DNA, 25 bp, Homo sapien
ggattctttaggatgctttttatgc

SEQ ID NO: 3407182 - DNA, 25 bp, Homo sapien
tccctctactgcatttggaattagg

SEQ ID NO: 3407183 - DNA, 25 bp, Homo sapien
cctctactgcatttggaattaggtt

SEQ ID NO: 3407184 - DNA, 25 bp, Homo sapien
ccctctactgcatttggaattaggt

SEQ ID NO: 3407185 - DNA, 25 bp, Homo sapien
tctaactggatgacactggcactca

SEQ ID NO: 3407186 - DNA, 25 bp, Homo sapien
tcgagcaacgcatatggaggaaagc

SEQ ID NO: 3407187 - DNA, 25 bp, Homo sapien
gaaagccttttagcctctaactgga

SEQ ID NO: 3407188 - DNA, 25 bp, Homo sapien
gaggacatctgaatcagtcattcga

SEQ ID NO: 3407189 - DNA, 25 bp, Homo sapien
ctttccgaaaactcttggaggccag

SEQ ID NO: 3407190 - DNA, 25 bp, Homo sapien
tccgaaaactcttggaggccagttc

SEQ ID NO: 3407191 - DNA, 25 bp, Homo sapien
aaagagaatgtgtgttccctggcat

SEQ ID NO: 3407192 - DNA, 25 bp, Homo sapien
gacgaagctgaattctcgaaagaga

SEQ ID NO: 3407193 - DNA, 25 bp, Homo sapien
ccacagttcggaagcatctccagaa

SEQ ID NO: 3407194 - DNA, 25 bp, Homo sapien
tccagaaggcccgtaaaaatgatac

SEQ ID NO: 3407195 - DNA, 25 bp, Homo sapien
ttctaaatgccttgaatagcatgca

SEQ ID NO: 3407196 - DNA, 25 bp, Homo sapien
attctaaatgccttgaatagcatgc

SEQ ID NO: 3407197 - DNA, 25 bp, Homo sapien
tattctaaatgccttgaatagcatg

SEQ ID NO: 3407198 - DNA, 25 bp, Homo sapien
tcccagcttagatcaaacagtcagt

SEQ ID NO: 3407199 - DNA, 25 bp, Homo sapien
gcaagggctgtgaagtcagactgcc

SEQ ID NO: 3407200 - DNA, 25 bp, Homo sapien
gcttcagcatatgttctacctagga

SEQ ID NO: 3407201 - DNA, 25 bp, Homo sapien
tttaatatctgccaagagcaagggc

SEQ ID NO: 3407202 - DNA, 25 bp, Homo sapien
ttcttgttgattgtctacatctggt

SEQ ID NO: 3407203 - DNA, 25 bp, Homo sapien
attcttgttgattgtctacatctgg

SEQ ID NO: 3407204 - DNA, 25 bp, Homo sapien
gacttgagaacaagcttgtgcacag

SEQ ID NO: 3407205 - DNA, 25 bp, Homo sapien
tttcaaggtccaatctaagcttcct

SEQ ID NO: 3407206 - DNA, 25 bp, Homo sapien
tctaggacctgctcaagtatacaaa

SEQ ID NO: 3407207 - DNA, 25 bp, Homo sapien
tagcgctcatgctgcctaaaatgcc

SEQ ID NO: 3407208 - DNA, 25 bp, Homo sapien
atggctacagcatttagggtataca

SEQ ID NO: 3407209 - DNA, 25 bp, Homo sapien
cagctcacagcaacccagcaacctc

SEQ ID NO: 3407210 - DNA, 25 bp, Homo sapien
cacctgccatcatgctgagctaatt

SEQ ID NO: 3407211 - DNA, 25 bp, Homo sapien
agctcacagcaacccagcaacctcc

SEQ ID NO: 3407212 - DNA, 25 bp, Homo sapien
tcacagcaacccagcaacctccacc

SEQ ID NO: 3407213 - DNA, 25 bp, Homo sapien
tgcctttgctgggtaatttcttgat

SEQ ID NO: 3407214 - DNA, 25 bp, Homo sapien
ttcagctattacaatgtttactttc

SEQ ID NO: 3407215 - DNA, 25 bp, Homo sapien
ttctttgcctttgctgggtaatttc

SEQ ID NO: 3407216 - DNA, 25 bp, Homo sapien
ttgctgggtaatttcttgatctttc

SEQ ID NO: 3407217 - DNA, 25 bp, Homo sapien
tttgtccatctaccttgctgaagca

SEQ ID NO: 3407218 - DNA, 25 bp, Homo sapien
tcctgcctaatacagtagcattgac

SEQ ID NO: 3407219 - DNA, 25 bp, Homo sapien
taagtaatcatatcacctgcaatca

SEQ ID NO: 3407220 - DNA, 25 bp, Homo sapien
gattaccttgggctttccagctaag

SEQ ID NO: 3407221 - DNA, 25 bp, Homo sapien
tagctgagactattgctacgaatgg

SEQ ID NO: 3407222 - DNA, 25 bp, Homo sapien
actgtagctggcctatattgaaatt

SEQ ID NO: 3407223 - DNA, 25 bp, Homo sapien
gagactattgctacgaatggcaaaa

SEQ ID NO: 3407224 - DNA, 25 bp, Homo sapien
gctacgaatggcaaaagccgcaatt

SEQ ID NO: 3407225 - DNA, 25 bp, Homo sapien
tgtgtatacaaacatccacagcagc

SEQ ID NO: 3407226 - DNA, 25 bp, Homo sapien
gaaacaatccaatgtctatcaatgg

SEQ ID NO: 3407227 - DNA, 25 bp, Homo sapien
gaaaactgtaagtgatgcagccata

SEQ ID NO: 3407228 - DNA, 25 bp, Homo sapien
aaaagtgtgtatacaaacatccaca

SEQ ID NO: 3407229 - DNA, 25 bp, Homo sapien
cacctctaggctggcgataataaaa

SEQ ID NO: 3407230 - DNA, 25 bp, Homo sapien
aaaaaagacacgtaacatcaaatgc

SEQ ID NO: 3407231 - DNA, 25 bp, Homo sapien
tctaggctggcgataataaaaaaga

SEQ ID NO: 3407232 - DNA, 25 bp, Homo sapien
aaagacacgtaacatcaaatgctgg

SEQ ID NO: 3407233 - DNA, 25 bp, Homo sapien
acaatgatgcatataacctctgtaa

SEQ ID NO: 3407234 - DNA, 25 bp, Homo sapien
ctacaatgatgcatataacctctgt

SEQ ID NO: 3407235 - DNA, 25 bp, Homo sapien
tacaatgatgcatataacctctgta

SEQ ID NO: 3407236 - DNA, 25 bp, Homo sapien
tcaacattgtgcatactgctcattt

SEQ ID NO: 3407237 - DNA, 25 bp, Homo sapien
tgcatactgctcattttcttggacc

SEQ ID NO: 3407238 - DNA, 25 bp, Homo sapien
ctgtttcaacattgtgcatactgct

SEQ ID NO: 3407239 - DNA, 25 bp, Homo sapien
cattgtgcatactgctcattttctt

SEQ ID NO: 3407240 - DNA, 25 bp, Homo sapien
gctcaagcctgaaacacgtatatgt

SEQ ID NO: 3407241 - DNA, 25 bp, Homo sapien
tgccttttaatcttgaccaacttag

SEQ ID NO: 3407242 - DNA, 25 bp, Homo sapien
caaactcagcttaagtctcttgcag

SEQ ID NO: 3407243 - DNA, 25 bp, Homo sapien
tcttgccagtcacatcacagttgcc

SEQ ID NO: 3407244 - DNA, 25 bp, Homo sapien
gattgaatatcaccaactagtcagt

SEQ ID NO: 3407245 - DNA, 25 bp, Homo sapien
agaaagtgttatagaggttaccagg

SEQ ID NO: 3407246 - DNA, 25 bp, Homo sapien
taaatccagtaaatccgaatgtgac

SEQ ID NO: 3407247 - DNA, 25 bp, Homo sapien
tgacttgtcaggtcaagacaccaat

SEQ ID NO: 3407248 - DNA, 25 bp, Homo sapien
caaagtattggttctaacaagtaga

SEQ ID NO: 3407249 - DNA, 25 bp, Homo sapien
tctgaaatcattaccccttagggta

SEQ ID NO: 3407250 - DNA, 25 bp, Homo sapien
ctctcagactgaaggaataatcaat

SEQ ID NO: 3407251 - DNA, 25 bp, Homo sapien
tagatgtttgttacgtttgtttgtc

SEQ ID NO: 3407252 - DNA, 25 bp, Homo sapien
ctgaggtttggttacacccacccag

SEQ ID NO: 3407253 - DNA, 25 bp, Homo sapien
tgtgactgaggtttggttacaccca

SEQ ID NO: 3407254 - DNA, 25 bp, Homo sapien
ttggttacacccacccagtggctaa

SEQ ID NO: 3407255 - DNA, 25 bp, Homo sapien
tacacccacccagtggctaacaaag

SEQ ID NO: 3407256 - DNA, 25 bp, Homo sapien
cagaagtttgcacagagggaatgaa

SEQ ID NO: 3407257 - DNA, 25 bp, Homo sapien
cattggtacctcataccaaggctgt

SEQ ID NO: 3407258 - DNA, 25 bp, Homo sapien
gctgcagctcgttaacctcatttga

SEQ ID NO: 3407259 - DNA, 25 bp, Homo sapien
tcttgtgattagagccattggtacc

SEQ ID NO: 3407260 - DNA, 25 bp, Homo sapien
taattgaggctaagatcataggctc

SEQ ID NO: 3407261 - DNA, 25 bp, Homo sapien
caggtgtagcttttgtgataacaac

SEQ ID NO: 3407262 - DNA, 25 bp, Homo sapien
aagtaataaaccaggcgttcagttg

SEQ ID NO: 3407263 - DNA, 25 bp, Homo sapien
caatttgatcggttctccttcccac

SEQ ID NO: 3407264 - DNA, 25 bp, Homo sapien
tgggtaccattctgtggaaacattc

SEQ ID NO: 3407265 - DNA, 25 bp, Homo sapien
gggtaccattctgtggaaacattcc

SEQ ID NO: 3407266 - DNA, 25 bp, Homo sapien
tctgagccaagttgacagccacagg

SEQ ID NO: 3407267 - DNA, 25 bp, Homo sapien
catctaaggatgctcaggccaaacc

SEQ ID NO: 3407268 - DNA, 25 bp, Homo sapien
taatgggacctcataaggacagaac

SEQ ID NO: 3407269 - DNA, 25 bp, Homo sapien
cattcattaggttcaggtagctcaa

SEQ ID NO: 3407270 - DNA, 25 bp, Homo sapien
agcccatcacagattccaggtttag

SEQ ID NO: 3407271 - DNA, 25 bp, Homo sapien
cagatcttcatttttggtgagccca

SEQ ID NO: 3407272 - DNA, 25 bp, Homo sapien
gcagccagatcttcatttttggtga

SEQ ID NO: 3407273 - DNA, 25 bp, Homo sapien
ttggtgagcccatcacagattccag

SEQ ID NO: 3407274 - DNA, 25 bp, Homo sapien
tgtcaataagtctccaagtaggcaa

SEQ ID NO: 3407275 - DNA, 25 bp, Homo sapien
tcgtgtggctaacttacagggttcc

SEQ ID NO: 3407276 - DNA, 25 bp, Homo sapien
tactcgcagttttaacaagcttggc

SEQ ID NO: 3407277 - DNA, 25 bp, Homo sapien
gactttgccagactacctcacttga

SEQ ID NO: 3407278 - DNA, 25 bp, Homo sapien
tgcctgaaggcaggtgcgccacttt

SEQ ID NO: 3407279 - DNA, 25 bp, Homo sapien
cagtgggtggctgaaacgatcttat

SEQ ID NO: 3407280 - DNA, 25 bp, Homo sapien
gaggctcaagcaagggacaaaattg

SEQ ID NO: 3407281 - DNA, 25 bp, Homo sapien
gatggcacctgcataacaaaaggca

SEQ ID NO: 3407282 - DNA, 25 bp, Homo sapien
gtgatattctttcatggtcagcaaa

SEQ ID NO: 3407283 - DNA, 25 bp, Homo sapien
gagctccagcgggaaatcaggacac

SEQ ID NO: 3407284 - DNA, 25 bp, Homo sapien
caggacacagtaattgcagcaaaca

SEQ ID NO: 3407285 - DNA, 25 bp, Homo sapien
aacagtgatattctttcatggtcag

SEQ ID NO: 3407286 - DNA, 25 bp, Homo sapien
tgtatacactccaggtttctctagg

SEQ ID NO: 3407287 - DNA, 25 bp, Homo sapien
aaccacaaaggatcatttcgcttcc

SEQ ID NO: 3407288 - DNA, 25 bp, Homo sapien
gggcacatcccaaatagacccctct

SEQ ID NO: 3407289 - DNA, 25 bp, Homo sapien
aaaggatcatttcgcttccctttgg

SEQ ID NO: 3407290 - DNA, 25 bp, Homo sapien
cctggttctggactgatcttgaaaa

SEQ ID NO: 3407291 - DNA, 25 bp, Homo sapien
gaggcatagtccaattacctcatgt

SEQ ID NO: 3407292 - DNA, 25 bp, Homo sapien
tgtctggcctagctcaggttttgag

SEQ ID NO: 3407293 - DNA, 25 bp, Homo sapien
cctaaatctcaacccgaattgtaat

SEQ ID NO: 3407294 - DNA, 25 bp, Homo sapien
gaagttgacacagaagcttgatgct

SEQ ID NO: 3407295 - DNA, 25 bp, Homo sapien
tgtagcacataaggcaggcgcatgt

SEQ ID NO: 3407296 - DNA, 25 bp, Homo sapien
catcatcacagactggagcctgctt

SEQ ID NO: 3407297 - DNA, 25 bp, Homo sapien
taaagtaagcctggcagtgaaatgg

SEQ ID NO: 3407298 - DNA, 25 bp, Homo sapien
atctgcatcttgctttggaatctca

SEQ ID NO: 3407299 - DNA, 25 bp, Homo sapien
tgggcatctgcatcttgctttggaa

SEQ ID NO: 3407300 - DNA, 25 bp, Homo sapien
atcttgctttggaatctcagcagaa

SEQ ID NO: 3407301 - DNA, 25 bp, Homo sapien
ctatgggatctttctggctgtgggc

SEQ ID NO: 3407302 - DNA, 25 bp, Homo sapien
cggatatctccatattcttcaggct

SEQ ID NO: 3407303 - DNA, 25 bp, Homo sapien
ttcttcaggctgaagcctccacagc

SEQ ID NO: 3407304 - DNA, 25 bp, Homo sapien
cttcaggctgaagcctccacagcat

SEQ ID NO: 3407305 - DNA, 25 bp, Homo sapien
tattcttcaggctgaagcctccaca

SEQ ID NO: 3407306 - DNA, 25 bp, Homo sapien
gggatccgaccaaggctatgttcat

SEQ ID NO: 3407307 - DNA, 25 bp, Homo sapien
aggaagaaaaccgtctgactcataa

SEQ ID NO: 3407308 - DNA, 25 bp, Homo sapien
gaagaaaaccgtctgactcataaag

SEQ ID NO: 3407309 - DNA, 25 bp, Homo sapien
ctcataaagggatccgaccaaggct

SEQ ID NO: 3407310 - DNA, 25 bp, Homo sapien
caagcagtccatggcatcgtccatg

SEQ ID NO: 3407311 - DNA, 25 bp, Homo sapien
acatcaagcagtccatggcatcgtc

SEQ ID NO: 3407312 - DNA, 25 bp, Homo sapien
catcaagcagtccatggcatcgtcc

SEQ ID NO: 3407313 - DNA, 25 bp, Homo sapien
atcaagcagtccatggcatcgtcca

SEQ ID NO: 3407314 - DNA, 25 bp, Homo sapien
tgaccaccactgaacactagacatc

SEQ ID NO: 3407315 - DNA, 25 bp, Homo sapien
gcagactgaatcttgtgaccaccac

SEQ ID NO: 3407316 - DNA, 25 bp, Homo sapien
ggtcctgtgcggagccagatggagc

SEQ ID NO: 3407317 - DNA, 25 bp, Homo sapien
ctagacatcctgttagcgacccgca

SEQ ID NO: 3407318 - DNA, 25 bp, Homo sapien
tggtctccaccacttatgagctgca

SEQ ID NO: 3407319 - DNA, 25 bp, Homo sapien
aacgcacgatcagttgccaagggag

SEQ ID NO: 3407320 - DNA, 25 bp, Homo sapien
tccagagagacttaagggtgcagct

SEQ ID NO: 3407321 - DNA, 25 bp, Homo sapien
taaaatagcagcgaggttgggaacg

SEQ ID NO: 3407322 - DNA, 25 bp, Homo sapien
cgctgggcagtgtcagtaatgctcc

SEQ ID NO: 3407323 - DNA, 25 bp, Homo sapien
gcccaatgtggtggctgtcccatcc

SEQ ID NO: 3407324 - DNA, 25 bp, Homo sapien
ggcagtgtcagtaatgctcccagcc

SEQ ID NO: 3407325 - DNA, 25 bp, Homo sapien
tgggcagtgtcagtaatgctcccag

SEQ ID NO: 3407326 - DNA, 25 bp, Homo sapien
gacgtcggcacaatcactgtgttgg

SEQ ID NO: 3407327 - DNA, 25 bp, Homo sapien
tgtacttgtgccgatcacacaggtt

SEQ ID NO: 3407328 - DNA, 25 bp, Homo sapien
acactggtagaacagcgacgcctcc

SEQ ID NO: 3407329 - DNA, 25 bp, Homo sapien
cggtgctgcccactggacgacgtcg

SEQ ID NO: 3407330 - DNA, 25 bp, Homo sapien
gtcaactacagtggtcttgcctgag

SEQ ID NO: 3407331 - DNA, 25 bp, Homo sapien
tgttacattatgaccagcaagggcc

SEQ ID NO: 3407332 - DNA, 25 bp, Homo sapien
gaacatcctgcggagctctgttccg

SEQ ID NO: 3407333 - DNA, 25 bp, Homo sapien
cagtctgtcacccagtaaattggtc

SEQ ID NO: 3407334 - DNA, 25 bp, Homo sapien
gattccacggtgctttgagagagcc

SEQ ID NO: 3407335 - DNA, 25 bp, Homo sapien
agggcttggttgattccacggtgct

SEQ ID NO: 3407336 - DNA, 25 bp, Homo sapien
tctgaacattgctgagggcctcttt

SEQ ID NO: 3407337 - DNA, 25 bp, Homo sapien
tgaggaatccatagaaggtcagtct

SEQ ID NO: 3407338 - DNA, 25 bp, Homo sapien
tcaaggcagagatggtgatgcccct

SEQ ID NO: 3407339 - DNA, 25 bp, Homo sapien
aatagtcctgtgtctgcccgacctg

SEQ ID NO: 3407340 - DNA, 25 bp, Homo sapien
tgttgctaacagaggccagctgctc

SEQ ID NO: 3407341 - DNA, 25 bp, Homo sapien
cctaccatgggaatgtgtaagagcc

SEQ ID NO: 3407342 - DNA, 25 bp, Homo sapien
tgactcagaataaccaggctgtggg

SEQ ID NO: 3407343 - DNA, 25 bp, Homo sapien
tcttagtccagtgggtaaccttggc

SEQ ID NO: 3407344 - DNA, 25 bp, Homo sapien
attgcctcctttctagtcttagtcc

SEQ ID NO: 3407345 - DNA, 25 bp, Homo sapien
caagcactgactcagaataaccagg

SEQ ID NO: 3407346 - DNA, 25 bp, Homo sapien
gaggttacttcaggctgtgacccag

SEQ ID NO: 3407347 - DNA, 25 bp, Homo sapien
cagttgctaattggcttctccttcc

SEQ ID NO: 3407348 - DNA, 25 bp, Homo sapien
gacccagttgctaattggcttctcc

SEQ ID NO: 3407349 - DNA, 25 bp, Homo sapien
ggatgaggttacttcaggctgtgac

SEQ ID NO: 3407350 - DNA, 25 bp, Homo sapien
aaggatatggtccaggctaagccca

SEQ ID NO: 3407351 - DNA, 25 bp, Homo sapien
caaggagtgtggtgatccccttcca

SEQ ID NO: 3407352 - DNA, 25 bp, Homo sapien
gaaggtgctcgctgttgcttgatac

SEQ ID NO: 3407353 - DNA, 25 bp, Homo sapien
cgatctaaagatctgaggactgcta

SEQ ID NO: 3407354 - DNA, 25 bp, Homo sapien
cccctcaccttcacggctgcctgtt

SEQ ID NO: 3407355 - DNA, 25 bp, Homo sapien
gggcacagtagttaatctgagggcc

SEQ ID NO: 3407356 - DNA, 25 bp, Homo sapien
ctaggagatcattgggggcacagta

SEQ ID NO: 3407357 - DNA, 25 bp, Homo sapien
cagtagttaatctgagggcccttca

SEQ ID NO: 3407358 - DNA, 25 bp, Homo sapien
cttcatccattgctgggtcgtgcat

SEQ ID NO: 3407359 - DNA, 25 bp, Homo sapien
atccattgctgggtcgtgcatcaga

SEQ ID NO: 3407360 - DNA, 25 bp, Homo sapien
ttgctgggtcgtgcatcagatcccc

SEQ ID NO: 3407361 - DNA, 25 bp, Homo sapien
cattgctgggtcgtgcatcagatcc

SEQ ID NO: 3407362 - DNA, 25 bp, Homo sapien
gagaggcctcctgtacagagagcag

SEQ ID NO: 3407363 - DNA, 25 bp, Homo sapien
tgcccactcttaacactagggtaaa

SEQ ID NO: 3407364 - DNA, 25 bp, Homo sapien
cagatggggcacagccgtgtccgac

SEQ ID NO: 3407365 - DNA, 25 bp, Homo sapien
ggcagatgtgggatgttacagacaa

SEQ ID NO: 3407366 - DNA, 25 bp, Homo sapien
ccgggaaggcaggcaactggcctct

SEQ ID NO: 3407367 - DNA, 25 bp, Homo sapien
tggactggctgtgaccgagttgacc

SEQ ID NO: 3407368 - DNA, 25 bp, Homo sapien
cttttcgggaatgatggagaggtct

SEQ ID NO: 3407369 - DNA, 25 bp, Homo sapien
ttcagtggagccatcactctctcca

SEQ ID NO: 3407370 - DNA, 25 bp, Homo sapien
gctacggcgtgacaaggtggcctca

SEQ ID NO: 3407371 - DNA, 25 bp, Homo sapien
ctgggctgatcatcagagcccctct

SEQ ID NO: 3407372 - DNA, 25 bp, Homo sapien
ctgtgaggagatgaaccttattggg

SEQ ID NO: 3407373 - DNA, 25 bp, Homo sapien
aagagactgctcttaagaggttagg

SEQ ID NO: 3407374 - DNA, 25 bp, Homo sapien
cctgcgtggctattcgggttctccc

SEQ ID NO: 3407375 - DNA, 25 bp, Homo sapien
caggccacagcggttatgtcctcct

SEQ ID NO: 3407376 - DNA, 25 bp, Homo sapien
tacttgcgtcgcaggtgtcaccctt

SEQ ID NO: 3407377 - DNA, 25 bp, Homo sapien
tgtcacccttgatggtgcaaggccc

SEQ ID NO: 3407378 - DNA, 25 bp, Homo sapien
cctgaaggccgttccagctgtgagc

SEQ ID NO: 3407379 - DNA, 25 bp, Homo sapien
tcctagtcctaccagaaaagcaccg

SEQ ID NO: 3407380 - DNA, 25 bp, Homo sapien
cagtattaaccctttatggccacgg

SEQ ID NO: 3407381 - DNA, 25 bp, Homo sapien
tgctcttgtgcgaagctaggcccct

SEQ ID NO: 3407382 - DNA, 25 bp, Homo sapien
agtgatctacctcgggtctcccaag

SEQ ID NO: 3407383 - DNA, 25 bp, Homo sapien
caagtgatctacctcgggtctccca

SEQ ID NO: 3407384 - DNA, 25 bp, Homo sapien
tcaagtgatctacctcgggtctccc

SEQ ID NO: 3407385 - DNA, 25 bp, Homo sapien
gatctacctcgggtctcccaagtag

SEQ ID NO: 3407386 - DNA, 25 bp, Homo sapien
taccgaagctgaggacactctctcc

SEQ ID NO: 3407387 - DNA, 25 bp, Homo sapien
aggtccggtgcagcttcgacctcac

SEQ ID NO: 3407388 - DNA, 25 bp, Homo sapien
ttggctctgtgctgccgtgaggtcc

SEQ ID NO: 3407389 - DNA, 25 bp, Homo sapien
gcgtcggtaccgaagctgaggacac

SEQ ID NO: 3407390 - DNA, 25 bp, Homo sapien
caggcttacgatggtgacggcaaca

SEQ ID NO: 3407391 - DNA, 25 bp, Homo sapien
tctgggcgttaccaagggctggaaa

SEQ ID NO: 3407392 - DNA, 25 bp, Homo sapien
ttcatttgggatcagaccggagacc

SEQ ID NO: 3407393 - DNA, 25 bp, Homo sapien
tcttctagttcgaggccttgggtcc

SEQ ID NO: 3407394 - DNA, 25 bp, Homo sapien
agctctcaccgtggactcctgcctc

SEQ ID NO: 3407395 - DNA, 25 bp, Homo sapien
tggccttgtcacctgtaccgctctt

SEQ ID NO: 3407396 - DNA, 25 bp, Homo sapien
ttccctgttgtcgggtgcccgagtg

SEQ ID NO: 3407397 - DNA, 25 bp, Homo sapien
tgtcgggtgcccgagtggccgctgc

SEQ ID NO: 3407398 - DNA, 25 bp, Homo sapien
taactacttcatagggtctccggaa

SEQ ID NO: 3407399 - DNA, 25 bp, Homo sapien
tcagagccacaaaccggagggaagt

SEQ ID NO: 3407400 - DNA, 25 bp, Homo sapien
tcagaaattcgcaggagccaaagcc

SEQ ID NO: 3407401 - DNA, 25 bp, Homo sapien
tgcctacagcggacattgcccagtt

SEQ ID NO: 3407402 - DNA, 25 bp, Homo sapien
gccactactatgtggctatgagccc

SEQ ID NO: 3407403 - DNA, 25 bp, Homo sapien
tctctgtgttgtttaatatggtagc

SEQ ID NO: 3407404 - DNA, 25 bp, Homo sapien
ggtagccactactatgtggctatga

SEQ ID NO: 3407405 - DNA, 25 bp, Homo sapien
ccactactatgtggctatgagccct

SEQ ID NO: 3407406 - DNA, 25 bp, Homo sapien
tctcttgtgcggtgatgctgatgcc

SEQ ID NO: 3407407 - DNA, 25 bp, Homo sapien
gagtgcaaaatcctctcgctcgcag

SEQ ID NO: 3407408 - DNA, 25 bp, Homo sapien
caagcatccggcctatttcagaaag

SEQ ID NO: 3407409 - DNA, 25 bp, Homo sapien
gatgttggtactttcgcctctggac

SEQ ID NO: 3407410 - DNA, 25 bp, Homo sapien
atctggtgcacaatattaaaattac

SEQ ID NO: 3407411 - DNA, 25 bp, Homo sapien
tggtgcacaatattaaaattacaac

SEQ ID NO: 3407412 - DNA, 25 bp, Homo sapien
ggtgcacaatattaaaattacaaca

SEQ ID NO: 3407413 - DNA, 25 bp, Homo sapien
tctggtgcacaatattaaaattaca

SEQ ID NO: 3407414 - DNA, 25 bp, Homo sapien
cacggcgcccagtgcttggattacg

SEQ ID NO: 3407415 - DNA, 25 bp, Homo sapien
tttgataggacacccttgccaggcc

SEQ ID NO: 3407416 - DNA, 25 bp, Homo sapien
ttttaagaggcttcgcgcagttcca

SEQ ID NO: 3407417 - DNA, 25 bp, Homo sapien
gttgggccagcatcacgtacggtgt

SEQ ID NO: 3407418 - DNA, 25 bp, Homo sapien
tgtaccctgccaactacgtggagtg

SEQ ID NO: 3407419 - DNA, 25 bp, Homo sapien
catggcgaggtagagctagaatctt

SEQ ID NO: 3407420 - DNA, 25 bp, Homo sapien
tcgggtgagggcactctatgactac

SEQ ID NO: 3407421 - DNA, 25 bp, Homo sapien
tatgactacgctggccaggaagctg

SEQ ID NO: 3407422 - DNA, 25 bp, Homo sapien
tctttgctcacagtcgggcatggcg

SEQ ID NO: 3407423 - DNA, 25 bp, Homo sapien
cagcattgtgcctacaagagatggc

SEQ ID NO: 3407424 - DNA, 25 bp, Homo sapien
tggccggagccctgatgaggttacc

SEQ ID NO: 3407425 - DNA, 25 bp, Homo sapien
ttggacacacagaggacaatcagcc

SEQ ID NO: 3407426 - DNA, 25 bp, Homo sapien
tgaggttaccctgaccagcattgtg

SEQ ID NO: 3407427 - DNA, 25 bp, Homo sapien
tacatggaggacatggaacaggcct

SEQ ID NO: 3407428 - DNA, 25 bp, Homo sapien
tgattgcccctagtggctagccctg

SEQ ID NO: 3407429 - DNA, 25 bp, Homo sapien
cagttcgaggcatgtgttccaggcg

SEQ ID NO: 3407430 - DNA, 25 bp, Homo sapien
tagccctgggtctagcagcctatgg

SEQ ID NO: 3407431 - DNA, 25 bp, Homo sapien
ccaggagttgaggtggaagtcacca

SEQ ID NO: 3407432 - DNA, 25 bp, Homo sapien
caggagttgaggtggaagtcaccat

SEQ ID NO: 3407433 - DNA, 25 bp, Homo sapien
gccaggagttgaggtggaagtcacc

SEQ ID NO: 3407434 - DNA, 25 bp, Homo sapien
agccaggagttgaggtggaagtcac

SEQ ID NO: 3407435 - DNA, 25 bp, Homo sapien
catgcccagggcttgttcaaaccag

SEQ ID NO: 3407436 - DNA, 25 bp, Homo sapien
tgctctatgcgaagatcatggaggg

SEQ ID NO: 3407437 - DNA, 25 bp, Homo sapien
caggtagccgagctaagccaacttc

SEQ ID NO: 3407438 - DNA, 25 bp, Homo sapien
ggactacaaaactgcggggccacag

SEQ ID NO: 3407439 - DNA, 25 bp, Homo sapien
gtttctgggcgtttcttgggagcca

SEQ ID NO: 3407440 - DNA, 25 bp, Homo sapien
gtaatacaatctcggaggtcttctg

SEQ ID NO: 3407441 - DNA, 25 bp, Homo sapien
ggagcccttcgcacagagcttcttg

SEQ ID NO: 3407442 - DNA, 25 bp, Homo sapien
tcctcttgttcctggggcgtaatac

SEQ ID NO: 3407443 - DNA, 25 bp, Homo sapien
aaaaggcggaaatattcaagcagca

SEQ ID NO: 3407444 - DNA, 25 bp, Homo sapien
ctaaaaggcggaaatattcaagcag

SEQ ID NO: 3407445 - DNA, 25 bp, Homo sapien
aggcggaaatattcaagcagcaggc

SEQ ID NO: 3407446 - DNA, 25 bp, Homo sapien
gcggaaatattcaagcagcaggcac

SEQ ID NO: 3407447 - DNA, 25 bp, Homo sapien
ggtagaatgcacagccggaggcacc

SEQ ID NO: 3407448 - DNA, 25 bp, Homo sapien
ctgcaggtagaatgcacagccggag

SEQ ID NO: 3407449 - DNA, 25 bp, Homo sapien
ggcacccgtgacctgcgcgggcctc

SEQ ID NO: 3407450 - DNA, 25 bp, Homo sapien
gcctcgggagcctcggagcacccat

SEQ ID NO: 3407451 - DNA, 25 bp, Homo sapien
tctgaagccgtcctaactgtgcaag

SEQ ID NO: 3407452 - DNA, 25 bp, Homo sapien
tataggtccgacgtcttgacaacca

SEQ ID NO: 3407453 - DNA, 25 bp, Homo sapien
taaatacagtcgtgcagggttcctg

SEQ ID NO: 3407454 - DNA, 25 bp, Homo sapien
caaaactcgagatgggactgggtca

SEQ ID NO: 3407455 - DNA, 25 bp, Homo sapien
gcaggatctgtgggccagccagccc

SEQ ID NO: 3407456 - DNA, 25 bp, Homo sapien
caggatctgtgggccagccagcccc

SEQ ID NO: 3407457 - DNA, 25 bp, Homo sapien
aggatctgtgggccagccagcccca

SEQ ID NO: 3407458 - DNA, 25 bp, Homo sapien
agctctgcccagcttatgctggtgg

SEQ ID NO: 3407459 - DNA, 25 bp, Homo sapien
ctgctggacagatggccaggaagct

SEQ ID NO: 3407460 - DNA, 25 bp, Homo sapien
ggaagctctgcccagcttatgctgg

SEQ ID NO: 3407461 - DNA, 25 bp, Homo sapien
tgctggacagatggccaggaagctc

SEQ ID NO: 3407462 - DNA, 25 bp, Homo sapien
aaaatgcacgtgtaaacccttgagg

SEQ ID NO: 3407463 - DNA, 25 bp, Homo sapien
gagtgcattccagctgggaccttta

SEQ ID NO: 3407464 - DNA, 25 bp, Homo sapien
gctggtgaaccaagccatcatctaa

SEQ ID NO: 3407465 - DNA, 25 bp, Homo sapien
cacagtctgggtgatcggaccactc

SEQ ID NO: 3407466 - DNA, 25 bp, Homo sapien
gaatccagagtgtgcaaaaaggact

SEQ ID NO: 3407467 - DNA, 25 bp, Homo sapien
gaaggtgggtttgtccttgatgcca

SEQ ID NO: 3407468 - DNA, 25 bp, Homo sapien
ggtgccacgccaaggatgtagccct

SEQ ID NO: 3407469 - DNA, 25 bp, Homo sapien
gggcagccttttgtaatatccggta

SEQ ID NO: 3407470 - DNA, 25 bp, Homo sapien
cagagacccggtttcaggaatagaa

SEQ ID NO: 3407471 - DNA, 25 bp, Homo sapien
taatgatacagggaatgacggtgga

SEQ ID NO: 3407472 - DNA, 25 bp, Homo sapien
tgagtaaggacaaccagcgaaagcc

SEQ ID NO: 3407473 - DNA, 25 bp, Homo sapien
gagaagacgccagccatgagaagac

SEQ ID NO: 3407474 - DNA, 25 bp, Homo sapien
gaacagtgcatcaaccacctgcagg

SEQ ID NO: 3407475 - DNA, 25 bp, Homo sapien
cagcagaaggttagatattacagaa

SEQ ID NO: 3407476 - DNA, 25 bp, Homo sapien
accatatgtaatcgcagtcccaaga

SEQ ID NO: 3407477 - DNA, 25 bp, Homo sapien
tgaaaaatacgctgggctactttgc

SEQ ID NO: 3407478 - DNA, 25 bp, Homo sapien
gatattgatcttaaaccctccgtct

SEQ ID NO: 3407479 - DNA, 25 bp, Homo sapien
ttaggatgcttggactcttttaccc

SEQ ID NO: 3407480 - DNA, 25 bp, Homo sapien
tgtttgggcccagtctctatgtact

SEQ ID NO: 3407481 - DNA, 25 bp, Homo sapien
gaataattcccaagctaaagagggc

SEQ ID NO: 3407482 - DNA, 25 bp, Homo sapien
gggccaggtcagcttagacactagg

SEQ ID NO: 3407483 - DNA, 25 bp, Homo sapien
gacactaggacgctctctacagggc

SEQ ID NO: 3407484 - DNA, 25 bp, Homo sapien
atgctgcgccgtcacagaagcaccc

SEQ ID NO: 3407485 - DNA, 25 bp, Homo sapien
gatgatgggcctggccgtgaggaac

SEQ ID NO: 3407486 - DNA, 25 bp, Homo sapien
ggttaaacttcagcccagtgatgct

SEQ ID NO: 3407487 - DNA, 25 bp, Homo sapien
tgtctgagctggcaaaaactcgtag

SEQ ID NO: 3407488 - DNA, 25 bp, Homo sapien
cagcctagttgttccctccattgag

SEQ ID NO: 3407489 - DNA, 25 bp, Homo sapien
cattgaggaggcgtaaaactggttg

SEQ ID NO: 3407490 - DNA, 25 bp, Homo sapien
gcattcagtctcaagttctgagctg

SEQ ID NO: 3407491 - DNA, 25 bp, Homo sapien
cacagtgagtgcagggcattcagtc

SEQ ID NO: 3407492 - DNA, 25 bp, Homo sapien
tctaggtggctttctgggtccacgc

SEQ ID NO: 3407493 - DNA, 25 bp, Homo sapien
ggaacaggtcaggtcattacaccac

SEQ ID NO: 3407494 - DNA, 25 bp, Homo sapien
ttcggctactagcagacacatccag

SEQ ID NO: 3407495 - DNA, 25 bp, Homo sapien
tctttgccgtccatgttcagcagga

SEQ ID NO: 3407496 - DNA, 25 bp, Homo sapien
acgttccccacgttgtctcctgtga

SEQ ID NO: 3407497 - DNA, 25 bp, Homo sapien
gtgaccaccattcggctactagcag

SEQ ID NO: 3407498 - DNA, 25 bp, Homo sapien
gaaaggcaggacctcggagaacgca

SEQ ID NO: 3407499 - DNA, 25 bp, Homo sapien
aaaggcaggacctcggagaacgcac

SEQ ID NO: 3407500 - DNA, 25 bp, Homo sapien
gccaggaaccaatcacagcatgggt

SEQ ID NO: 3407501 - DNA, 25 bp, Homo sapien
tgtggccaggaaccaatcacagcat

SEQ ID NO: 3407502 - DNA, 25 bp, Homo sapien
tttgatctacggaggctgtggccag

SEQ ID NO: 3407503 - DNA, 25 bp, Homo sapien
attttcactgtttgatctacggagg

SEQ ID NO: 3407504 - DNA, 25 bp, Homo sapien
cgttgacaggatgcctgtgcggcag

SEQ ID NO: 3407505 - DNA, 25 bp, Homo sapien
ctgcgttgacaggatgcctgtgcgg

SEQ ID NO: 3407506 - DNA, 25 bp, Homo sapien
tgcctgtgcggcagcgagtagagga

SEQ ID NO: 3407507 - DNA, 25 bp, Homo sapien
ctgtgcggcagcgagtagaggaagc

SEQ ID NO: 3407508 - DNA, 25 bp, Homo sapien
caggagagatgaggtctgggatatc

SEQ ID NO: 3407509 - DNA, 25 bp, Homo sapien
agagatgaggtctgggatatcacac

SEQ ID NO: 3407510 - DNA, 25 bp, Homo sapien
ggagagatgaggtctgggatatcac

SEQ ID NO: 3407511 - DNA, 25 bp, Homo sapien
gcaggagagatgaggtctgggatat

SEQ ID NO: 3407512 - DNA, 25 bp, Homo sapien
ggaaaaccccagcagtggtcagaca

SEQ ID NO: 3407513 - DNA, 25 bp, Homo sapien
ctgagggaaaaccccagcagtggtc

SEQ ID NO: 3407514 - DNA, 25 bp, Homo sapien
gaaaaccccagcagtggtcagacag

SEQ ID NO: 3407515 - DNA, 25 bp, Homo sapien
agggaaaaccccagcagtggtcaga

SEQ ID NO: 3407516 - DNA, 25 bp, Homo sapien
cgctatcaggggtaaaggtttgacg

SEQ ID NO: 3407517 - DNA, 25 bp, Homo sapien
gtgaatctgggctgtgaacaacaac

SEQ ID NO: 3407518 - DNA, 25 bp, Homo sapien
aaggtttgacgtagtggcttccaca

SEQ ID NO: 3407519 - DNA, 25 bp, Homo sapien
tctggaaactcagcagctgatgggg

SEQ ID NO: 3407520 - DNA, 25 bp, Homo sapien
ctgaaggaaccacaagccctctgtg

SEQ ID NO: 3407521 - DNA, 25 bp, Homo sapien
tgcaggggtactctccctcccactc

SEQ ID NO: 3407522 - DNA, 25 bp, Homo sapien
tgtggtcctggccttgcaggccttc

SEQ ID NO: 3407523 - DNA, 25 bp, Homo sapien
gccttctcctgcaggggtactctcc

SEQ ID NO: 3407524 - DNA, 25 bp, Homo sapien
gccgggctccatcgggactgaaaca

SEQ ID NO: 3407525 - DNA, 25 bp, Homo sapien
tcaggagccgggctccatcgggact

SEQ ID NO: 3407526 - DNA, 25 bp, Homo sapien
gagccgggctccatcgggactgaaa

SEQ ID NO: 3407527 - DNA, 25 bp, Homo sapien
aggagccgggctccatcgggactga

SEQ ID NO: 3407528 - DNA, 25 bp, Homo sapien
gaagcagagtaaactcggatctcgc

SEQ ID NO: 3407529 - DNA, 25 bp, Homo sapien
ccagggggcagtcccactgggaagc

SEQ ID NO: 3407530 - DNA, 25 bp, Homo sapien
gacggtgagggtgcgggatcaggcc

SEQ ID NO: 3407531 - DNA, 25 bp, Homo sapien
tgctggaagtgacggtgagggtgcg

SEQ ID NO: 3407532 - DNA, 25 bp, Homo sapien
gtaagagatgctctgtgctcgggcc

SEQ ID NO: 3407533 - DNA, 25 bp, Homo sapien
tgggtcaactgtacacaggtaactg

SEQ ID NO: 3407534 - DNA, 25 bp, Homo sapien
gaaaactcaaccatatgggatggca

SEQ ID NO: 3407535 - DNA, 25 bp, Homo sapien
gaaaaatatcttatcagcgagacag

SEQ ID NO: 3407536 - DNA, 25 bp, Homo sapien
taatgacttacgacacctggctaga

SEQ ID NO: 3407537 - DNA, 25 bp, Homo sapien
cctggctagatacaaactgggacat

SEQ ID NO: 3407538 - DNA, 25 bp, Homo sapien
cagacagatggattatcgggaacac

SEQ ID NO: 3407539 - DNA, 25 bp, Homo sapien
taccagtacttaccaggtgctgggc

SEQ ID NO: 3407540 - DNA, 25 bp, Homo sapien
gaacacgtcgatcgtcctcaattca

SEQ ID NO: 3407541 - DNA, 25 bp, Homo sapien
gaaattaggatctgggtatcggccc

SEQ ID NO: 3407542 - DNA, 25 bp, Homo sapien
tcatcttccctgagtttccatcgaa

SEQ ID NO: 3407543 - DNA, 25 bp, Homo sapien
ggttgtagcgaggatgccaggctgc

SEQ ID NO: 3407544 - DNA, 25 bp, Homo sapien
ccattgcagaggccagcgtgtcccc

SEQ ID NO: 3407545 - DNA, 25 bp, Homo sapien
cagcgtgtcccccatgggattgaat

SEQ ID NO: 3407546 - DNA, 25 bp, Homo sapien
tgtcccccatgggattgaattcatt

SEQ ID NO: 3407547 - DNA, 25 bp, Homo sapien
cgtgtcccccatgggattgaattca

SEQ ID NO: 3407548 - DNA, 25 bp, Homo sapien
cagccatcttcttcgtgggccactg

SEQ ID NO: 3407549 - DNA, 25 bp, Homo sapien
tcccagccatcttcttcgtgggcca

SEQ ID NO: 3407550 - DNA, 25 bp, Homo sapien
tgtctcccagccatcttcttcgtgg

SEQ ID NO: 3407551 - DNA, 25 bp, Homo sapien
tatagagaccactgtctcccagcca

SEQ ID NO: 3407552 - DNA, 25 bp, Homo sapien
tcctcctggctccagatgagaatgt

SEQ ID NO: 3407553 - DNA, 25 bp, Homo sapien
tcacttccgtgtcctggcttcctcc

SEQ ID NO: 3407554 - DNA, 25 bp, Homo sapien
tggctccagatgagaatgtggtaac

SEQ ID NO: 3407555 - DNA, 25 bp, Homo sapien
acttccgtgtcctggcttcctcctg

SEQ ID NO: 3407556 - DNA, 25 bp, Homo sapien
tgtctggcccacaccttctttagtg

SEQ ID NO: 3407557 - DNA, 25 bp, Homo sapien
ggaggcaagtccagagcattaacat

SEQ ID NO: 3407558 - DNA, 25 bp, Homo sapien
ttggttccaggctagatacagaggg

SEQ ID NO: 3407559 - DNA, 25 bp, Homo sapien
ttaacaaatcgccacctctgcttgc

SEQ ID NO: 3407560 - DNA, 25 bp, Homo sapien
ggttttattggccatatcaaaagtg

SEQ ID NO: 3407561 - DNA, 25 bp, Homo sapien
taactgcttgatccctctgctacca

SEQ ID NO: 3407562 - DNA, 25 bp, Homo sapien
acaaatcaaataactgcttgatccc

SEQ ID NO: 3407563 - DNA, 25 bp, Homo sapien
tttattggccatatcaaaagtgagc

SEQ ID NO: 3407564 - DNA, 25 bp, Homo sapien
gaccaggtcacttctggaagatcca

SEQ ID NO: 3407565 - DNA, 25 bp, Homo sapien
tcacttctggaagatccacgcagaa

SEQ ID NO: 3407566 - DNA, 25 bp, Homo sapien
cttcatttctgagacgcaagaagct

SEQ ID NO: 3407567 - DNA, 25 bp, Homo sapien
caagaagctctctgaccaggtcact

SEQ ID NO: 3407568 - DNA, 25 bp, Homo sapien
tagctcagagggacacggtcttgcc

SEQ ID NO: 3407569 - DNA, 25 bp, Homo sapien
aagaaagttctagactgtggcccag

SEQ ID NO: 3407570 - DNA, 25 bp, Homo sapien
ttagactcagacagaatgcttcagg

SEQ ID NO: 3407571 - DNA, 25 bp, Homo sapien
gaagtcttcggcaaatagctcagag

SEQ ID NO: 3407572 - DNA, 25 bp, Homo sapien
cagaccacgaccctcctgcacgcaa

SEQ ID NO: 3407573 - DNA, 25 bp, Homo sapien
tcctgcacgcaatcccaccgagact

SEQ ID NO: 3407574 - DNA, 25 bp, Homo sapien
acagccagaccacgaccctcctgca

SEQ ID NO: 3407575 - DNA, 25 bp, Homo sapien
aatcccaccgagactgcgccttttc

SEQ ID NO: 3407576 - DNA, 25 bp, Homo sapien
agatctgaatcaaagcatccccagg

SEQ ID NO: 3407577 - DNA, 25 bp, Homo sapien
ggagtcacaaagtcctgaggccaaa

SEQ ID NO: 3407578 - DNA, 25 bp, Homo sapien
tcctaatggtcaatgccaagagggc

SEQ ID NO: 3407579 - DNA, 25 bp, Homo sapien
cactttatgatatgcgcctgtccct

SEQ ID NO: 3407580 - DNA, 25 bp, Homo sapien
cctccatgacaactctggaagcaaa

SEQ ID NO: 3407581 - DNA, 25 bp, Homo sapien
ttggcctcctccatgacaactctgg

SEQ ID NO: 3407582 - DNA, 25 bp, Homo sapien
aagtttaaatcctgaagtatatata

SEQ ID NO: 3407583 - DNA, 25 bp, Homo sapien
aagcaaagtttaaatcctgaagtat

SEQ ID NO: 3407584 - DNA, 25 bp, Homo sapien
gactaggttaaatcaggtattcaga

SEQ ID NO: 3407585 - DNA, 25 bp, Homo sapien
cctaagctgtaaagtaagaggacta

SEQ ID NO: 3407586 - DNA, 25 bp, Homo sapien
ttctcaaactgtgcccatgcccaaa

SEQ ID NO: 3407587 - DNA, 25 bp, Homo sapien
ggtctttgtgaaccatttgggatta

SEQ ID NO: 3407588 - DNA, 25 bp, Homo sapien
cctacgtgggatacttgcatgcaca

SEQ ID NO: 3407589 - DNA, 25 bp, Homo sapien
tgcttcatcaatccctcctacgtgg

SEQ ID NO: 3407590 - DNA, 25 bp, Homo sapien
tctgaaagtacaatggtctggctag

SEQ ID NO: 3407591 - DNA, 25 bp, Homo sapien
tcatctggcagaaaatgcaaaagct

SEQ ID NO: 3407592 - DNA, 25 bp, Homo sapien
cacagtaaactctaggagatagtta

SEQ ID NO: 3407593 - DNA, 25 bp, Homo sapien
tctaggagatagttactagcaaggg

SEQ ID NO: 3407594 - DNA, 25 bp, Homo sapien
ttattctcacagtaaactctaggag

SEQ ID NO: 3407595 - DNA, 25 bp, Homo sapien
taaactctaggagatagttactagc

SEQ ID NO: 3407596 - DNA, 25 bp, Homo sapien
ccagcagcctccagaatcgtgttcc

SEQ ID NO: 3407597 - DNA, 25 bp, Homo sapien
agcagcctccagaatcgtgttccct

SEQ ID NO: 3407598 - DNA, 25 bp, Homo sapien
gcctccagaatcgtgttccctcccc

SEQ ID NO: 3407599 - DNA, 25 bp, Homo sapien
ccagcgctcttagcagctcttgcaa

SEQ ID NO: 3407600 - DNA, 25 bp, Homo sapien
tcccggccaaaacagtggcatttcc

SEQ ID NO: 3407601 - DNA, 25 bp, Homo sapien
ggccaaaacagtggcatttccctgc

SEQ ID NO: 3407602 - DNA, 25 bp, Homo sapien
agaccagccaagttccatgtctctc

SEQ ID NO: 3407603 - DNA, 25 bp, Homo sapien
tgcagaccagccaagttccatgtct

SEQ ID NO: 3407604 - DNA, 25 bp, Homo sapien
agggactgccgaggggtcaggccac

SEQ ID NO: 3407605 - DNA, 25 bp, Homo sapien
ggagggactgccgaggggtcaggcc

SEQ ID NO: 3407606 - DNA, 25 bp, Homo sapien
actgccgaggggtcaggccacccct

SEQ ID NO: 3407607 - DNA, 25 bp, Homo sapien
aggggagggactgccgaggggtcag

SEQ ID NO: 3407608 - DNA, 25 bp, Homo sapien
cctgtccagaagtctcggtggccag

SEQ ID NO: 3407609 - DNA, 25 bp, Homo sapien
ttcctgtccagaagtctcggtggcc

SEQ ID NO: 3407610 - DNA, 25 bp, Homo sapien
tgtccagaagtctcggtggccagcc

SEQ ID NO: 3407611 - DNA, 25 bp, Homo sapien
ccagaagtctcggtggccagccagt

SEQ ID NO: 3407612 - DNA, 25 bp, Homo sapien
ggccactgctaaggagcagacccac

SEQ ID NO: 3407613 - DNA, 25 bp, Homo sapien
tattagagaacctcgctcgtgccac

SEQ ID NO: 3407614 - DNA, 25 bp, Homo sapien
gattatgggcgcacgctactgctcc

SEQ ID NO: 3407615 - DNA, 25 bp, Homo sapien
actatggtcacacagttaggcggcg

SEQ ID NO: 3407616 - DNA, 25 bp, Homo sapien
ttaggcggcggtagagtcaagactc

SEQ ID NO: 3407617 - DNA, 25 bp, Homo sapien
gcaggaaggacccagattatactct

SEQ ID NO: 3407618 - DNA, 25 bp, Homo sapien
ggaaggacccagattatactcttct

SEQ ID NO: 3407619 - DNA, 25 bp, Homo sapien
tatactcttctagaactgggctcct

SEQ ID NO: 3407620 - DNA, 25 bp, Homo sapien
aggacccagattatactcttctaga

SEQ ID NO: 3407621 - DNA, 25 bp, Homo sapien
ttcctggagccctggtcattaccaa

SEQ ID NO: 3407622 - DNA, 25 bp, Homo sapien
ccctggtcattaccaaggcactgtc

SEQ ID NO: 3407623 - DNA, 25 bp, Homo sapien
tggagccctggtcattaccaaggca

SEQ ID NO: 3407624 - DNA, 25 bp, Homo sapien
gagccctggtcattaccaaggcact

SEQ ID NO: 3407625 - DNA, 25 bp, Homo sapien
aggaggaatgtcaggcacaggggcc

SEQ ID NO: 3407626 - DNA, 25 bp, Homo sapien
gcacaggggcccccagccacaagga

SEQ ID NO: 3407627 - DNA, 25 bp, Homo sapien
caggggcccccagccacaaggacat

SEQ ID NO: 3407628 - DNA, 25 bp, Homo sapien
caggaggaatgtcaggcacaggggc

SEQ ID NO: 3407629 - DNA, 25 bp, Homo sapien
cacggcccagcgtcctagctgggaa

SEQ ID NO: 3407630 - DNA, 25 bp, Homo sapien
agcgtcctagctgggaaactgcaaa

SEQ ID NO: 3407631 - DNA, 25 bp, Homo sapien
tgcaaacttatccccacccttagag

SEQ ID NO: 3407632 - DNA, 25 bp, Homo sapien
ggcccagcgtcctagctgggaaact

SEQ ID NO: 3407633 - DNA, 25 bp, Homo sapien
ctggctgcttgcatcctgtgcgcct

SEQ ID NO: 3407634 - DNA, 25 bp, Homo sapien
gcttgcatcctgtgcgcctggcttc

SEQ ID NO: 3407635 - DNA, 25 bp, Homo sapien
tgcttgcatcctgtgcgcctggctt

SEQ ID NO: 3407636 - DNA, 25 bp, Homo sapien
gctgcttgcatcctgtgcgcctggc

SEQ ID NO: 3407637 - DNA, 25 bp, Homo sapien
cccacccctgcagtacccccagcag

SEQ ID NO: 3407638 - DNA, 25 bp, Homo sapien
acccctgcagtacccccagcagagt

SEQ ID NO: 3407639 - DNA, 25 bp, Homo sapien
cctgcagtacccccagcagagtggg

SEQ ID NO: 3407640 - DNA, 25 bp, Homo sapien
gcagtacccccagcagagtggggca

SEQ ID NO: 3407641 - DNA, 25 bp, Homo sapien
gccctcgcagctcagaacattgtag

SEQ ID NO: 3407642 - DNA, 25 bp, Homo sapien
cgctgcatagctcgttccccagcat

SEQ ID NO: 3407643 - DNA, 25 bp, Homo sapien
ccacacacgctgcatagctcgttcc

SEQ ID NO: 3407644 - DNA, 25 bp, Homo sapien
gcagctcagaacattgtagtggaag

SEQ ID NO: 3407645 - DNA, 25 bp, Homo sapien
ccagcctgacggcatttgcgaagcc

SEQ ID NO: 3407646 - DNA, 25 bp, Homo sapien
cacttgcgacgcatgtaggtgtcca

SEQ ID NO: 3407647 - DNA, 25 bp, Homo sapien
atttgcgaagccgacactcctggca

SEQ ID NO: 3407648 - DNA, 25 bp, Homo sapien
gatgtagtgcgctcccttgatgacg

SEQ ID NO: 3407649 - DNA, 25 bp, Homo sapien
aaaggagcgccggttacactgttgc

SEQ ID NO: 3407650 - DNA, 25 bp, Homo sapien
tgcccagttgttccgggctgagctg

SEQ ID NO: 3407651 - DNA, 25 bp, Homo sapien
tcgaagccggtcagaaaaggagcgc

SEQ ID NO: 3407652 - DNA, 25 bp, Homo sapien
cgagcttctcgatcatgcccagttg

SEQ ID NO: 3407653 - DNA, 25 bp, Homo sapien
cccaggagggaaaaggcaaagcgct

SEQ ID NO: 3407654 - DNA, 25 bp, Homo sapien
cccactggtgatctgggcgcagccg

SEQ ID NO: 3407655 - DNA, 25 bp, Homo sapien
gagtcggacatcaagaagcccactg

SEQ ID NO: 3407656 - DNA, 25 bp, Homo sapien
gcaaagcgctttgagtcggacatca

SEQ ID NO: 3407657 - DNA, 25 bp, Homo sapien
caggaagccgggtagctgtttagca

SEQ ID NO: 3407658 - DNA, 25 bp, Homo sapien
aaagtcaactatctcctgcacagag

SEQ ID NO: 3407659 - DNA, 25 bp, Homo sapien
tcttcagcagggcaatctggtcctc

SEQ ID NO: 3407660 - DNA, 25 bp, Homo sapien
tgctgacgggcctcccggctatggg

SEQ ID NO: 3407661 - DNA, 25 bp, Homo sapien
tcttccagggaggccgattctcctc

SEQ ID NO: 3407662 - DNA, 25 bp, Homo sapien
cagcagatttggctctcccagctcg

SEQ ID NO: 3407663 - DNA, 25 bp, Homo sapien
ggaggcccctcccacagataatccc

SEQ ID NO: 3407664 - DNA, 25 bp, Homo sapien
acacaagcagcaaacctcaaacggg

SEQ ID NO: 3407665 - DNA, 25 bp, Homo sapien
cagggttgtacctccgagatgtctc

SEQ ID NO: 3407666 - DNA, 25 bp, Homo sapien
cactcccagggttgtacctccgaga

SEQ ID NO: 3407667 - DNA, 25 bp, Homo sapien
ctccgagatgtctccagaagcatca

SEQ ID NO: 3407668 - DNA, 25 bp, Homo sapien
gaaggtgatactctcactcccaggg

SEQ ID NO: 3407669 - DNA, 25 bp, Homo sapien
caaactcggcatcattgagttgcag

SEQ ID NO: 3407670 - DNA, 25 bp, Homo sapien
aatgagcaaggcaaactcggcatca

SEQ ID NO: 3407671 - DNA, 25 bp, Homo sapien
gcaaggcaaactcggcatcattgag

SEQ ID NO: 3407672 - DNA, 25 bp, Homo sapien
cggcatcattgagttgcagctcatt

SEQ ID NO: 3407673 - DNA, 25 bp, Homo sapien
cagccctccttggtgtaagtctctt

SEQ ID NO: 3407674 - DNA, 25 bp, Homo sapien
agccctccttggtgtaagtctcttg

SEQ ID NO: 3407675 - DNA, 25 bp, Homo sapien
gccctccttggtgtaagtctcttgc

SEQ ID NO: 3407676 - DNA, 25 bp, Homo sapien
ttgcaaccaaaatatagagacatgc

SEQ ID NO: 3407677 - DNA, 25 bp, Homo sapien
cagggtccagttccataccccaaat

SEQ ID NO: 3407678 - DNA, 25 bp, Homo sapien
tatagagacatgctccagccaagct

SEQ ID NO: 3407679 - DNA, 25 bp, Homo sapien
gttccataccccaaattgcaaccaa

SEQ ID NO: 3407680 - DNA, 25 bp, Homo sapien
tggtggatggagacgtaggcatgca

SEQ ID NO: 3407681 - DNA, 25 bp, Homo sapien
gcttccacatatgtgtgctgcagcc

SEQ ID NO: 3407682 - DNA, 25 bp, Homo sapien
gggcttccacatatgtgtgctgcag

SEQ ID NO: 3407683 - DNA, 25 bp, Homo sapien
ttccacatatgtgtgctgcagcctc

SEQ ID NO: 3407684 - DNA, 25 bp, Homo sapien
aggtatgtcagggaatgggcctgtg

SEQ ID NO: 3407685 - DNA, 25 bp, Homo sapien
ttgaagggaaagtaggtatgtcagg

SEQ ID NO: 3407686 - DNA, 25 bp, Homo sapien
ggagttgtgggagaggtgaattgtc

SEQ ID NO: 3407687 - DNA, 25 bp, Homo sapien
aattgtctgcacagcatgcagtcag

SEQ ID NO: 3407688 - DNA, 25 bp, Homo sapien
attagcatccgtgggaacatcagtc

SEQ ID NO: 3407689 - DNA, 25 bp, Homo sapien
gcatccgtgggaacatcagtcggtc

SEQ ID NO: 3407690 - DNA, 25 bp, Homo sapien
tagcatccgtgggaacatcagtcgg

SEQ ID NO: 3407691 - DNA, 25 bp, Homo sapien
cattagcatccgtgggaacatcagt

SEQ ID NO: 3407692 - DNA, 25 bp, Homo sapien
gagtggacgctgctcagggtccgga

SEQ ID NO: 3407693 - DNA, 25 bp, Homo sapien
agctttttgtcctgcagacgcagtg

SEQ ID NO: 3407694 - DNA, 25 bp, Homo sapien
gtcctgcagacgcagtgcaaacact

SEQ ID NO: 3407695 - DNA, 25 bp, Homo sapien
ctgcagacgcagtgcaaacacttgc

SEQ ID NO: 3407696 - DNA, 25 bp, Homo sapien
gaatgtttgcccttctcagtctgtt

SEQ ID NO: 3407697 - DNA, 25 bp, Homo sapien
agctcccaggaatgtttgcccttct

SEQ ID NO: 3407698 - DNA, 25 bp, Homo sapien
cagccatccggccaagaaaacagaa

SEQ ID NO: 3407699 - DNA, 25 bp, Homo sapien
cagtctgttccacttctaggaggca

SEQ ID NO: 3407700 - DNA, 25 bp, Homo sapien
gactctcttttaatgccacgggagg

SEQ ID NO: 3407701 - DNA, 25 bp, Homo sapien
ctttgactctcttttaatgccacgg

SEQ ID NO: 3407702 - DNA, 25 bp, Homo sapien
actctcttttaatgccacgggagga

SEQ ID NO: 3407703 - DNA, 25 bp, Homo sapien
ttgactctcttttaatgccacggga

SEQ ID NO: 3407704 - DNA, 25 bp, Homo sapien
cagtgttagcgagggctccactgct

SEQ ID NO: 3407705 - DNA, 25 bp, Homo sapien
gtcagcatgatcttcagacacagca

SEQ ID NO: 3407706 - DNA, 25 bp, Homo sapien
cacagcacagtgttagcgagggctc

SEQ ID NO: 3407707 - DNA, 25 bp, Homo sapien
ccatccgtttgtggggtcagcatga

SEQ ID NO: 3407708 - DNA, 25 bp, Homo sapien
gaggcggcgctgaggcatttatggc

SEQ ID NO: 3407709 - DNA, 25 bp, Homo sapien
cagacctatcagtgaggcggcgctg

SEQ ID NO: 3407710 - DNA, 25 bp, Homo sapien
cctgttcaaacagtaccagacctat

SEQ ID NO: 3407711 - DNA, 25 bp, Homo sapien
gcatttatggccataccacagagtg

SEQ ID NO: 3407712 - DNA, 25 bp, Homo sapien
atttacccatatggcgcagtggggg

SEQ ID NO: 3407713 - DNA, 25 bp, Homo sapien
aagggggcgcctaagcctcagcatt

SEQ ID NO: 3407714 - DNA, 25 bp, Homo sapien
aggccccctctcacggccaaggctg

SEQ ID NO: 3407715 - DNA, 25 bp, Homo sapien
cccctctcacggccaaggctgtcat

SEQ ID NO: 3407716 - DNA, 25 bp, Homo sapien
ccaaggcatgctacacatgcacgtg

SEQ ID NO: 3407717 - DNA, 25 bp, Homo sapien
gcctggggaccgacactgggttcta

SEQ ID NO: 3407718 - DNA, 25 bp, Homo sapien
ggttctaggtctttcaggttgtgcc

SEQ ID NO: 3407719 - DNA, 25 bp, Homo sapien
agtccagtcagtccgcgaggacagc

SEQ ID NO: 3407720 - DNA, 25 bp, Homo sapien
gctgccgagcggtggagcctaccaa

SEQ ID NO: 3407721 - DNA, 25 bp, Homo sapien
ggagcctaccaatcctgggcagcgg

SEQ ID NO: 3407722 - DNA, 25 bp, Homo sapien
ccgagcagggaagccggctgccgag

SEQ ID NO: 3407723 - DNA, 25 bp, Homo sapien
cggtgctcggcgtccgagcagggaa

SEQ ID NO: 3407724 - DNA, 25 bp, Homo sapien
tcccaagataatcggcccctgagac

SEQ ID NO: 3407725 - DNA, 25 bp, Homo sapien
ctcagagagactctcacccgacggg

SEQ ID NO: 3407726 - DNA, 25 bp, Homo sapien
tgtttgggttgctcagagagactct

SEQ ID NO: 3407727 - DNA, 25 bp, Homo sapien
atagcgcccgtttcgacgacatggg

SEQ ID NO: 3407728 - DNA, 25 bp, Homo sapien
gctgcgcacagacctagcctagcgc

SEQ ID NO: 3407729 - DNA, 25 bp, Homo sapien
ggctgcgcacagacctagcctagcg

SEQ ID NO: 3407730 - DNA, 25 bp, Homo sapien
cggctgcgcacagacctagcctagc

SEQ ID NO: 3407731 - DNA, 25 bp, Homo sapien
agcgggcgccagttccgcgtctgca

SEQ ID NO: 3407732 - DNA, 25 bp, Homo sapien
gggcacgcaccactcgcgcggggtg

SEQ ID NO: 3407733 - DNA, 25 bp, Homo sapien
gcgtcagtcgctccccagcgcggcg

SEQ ID NO: 3407734 - DNA, 25 bp, Homo sapien
gcagcggggcgtcagtcgctcccca

SEQ ID NO: 3407735 - DNA, 25 bp, Homo sapien
tcagagaagcatcagggcaccaagc

SEQ ID NO: 3407736 - DNA, 25 bp, Homo sapien
agagaagcatcagggcaccaagcaa

SEQ ID NO: 3407737 - DNA, 25 bp, Homo sapien
tctcagagaagcatcagggcaccaa

SEQ ID NO: 3407738 - DNA, 25 bp, Homo sapien
tatctcagagaagcatcagggcacc

SEQ ID NO: 3407739 - DNA, 25 bp, Homo sapien
tcaagtaaccgaggacagaacttct

SEQ ID NO: 3407740 - DNA, 25 bp, Homo sapien
tagatagtcaagtaaccgaggacag

SEQ ID NO: 3407741 - DNA, 25 bp, Homo sapien
ctggcccctacgatcactagatagt

SEQ ID NO: 3407742 - DNA, 25 bp, Homo sapien
cgatcactagatagtcaagtaaccg

SEQ ID NO: 3407743 - DNA, 25 bp, Homo sapien
agaacataaagacaaattcagcagc

SEQ ID NO: 3407744 - DNA, 25 bp, Homo sapien
ctgaagaacataaagacaaattcag

SEQ ID NO: 3407745 - DNA, 25 bp, Homo sapien
gaagaacataaagacaaattcagca

SEQ ID NO: 3407746 - DNA, 25 bp, Homo sapien
tgaagaacataaagacaaattcagc

SEQ ID NO: 3407747 - DNA, 25 bp, Homo sapien
gggtatcgccgtagcaattcaggag

SEQ ID NO: 3407748 - DNA, 25 bp, Homo sapien
gaaactcagtgtgatcctccaaggg

SEQ ID NO: 3407749 - DNA, 25 bp, Homo sapien
cagatgccatatcgcgtgactccag

SEQ ID NO: 3407750 - DNA, 25 bp, Homo sapien
tccaccaggcgcttgagagtataca

SEQ ID NO: 3407751 - DNA, 25 bp, Homo sapien
gatgtctactcgcttctgcccagag

SEQ ID NO: 3407752 - DNA, 25 bp, Homo sapien
tccagtaaagatccgccacatggtg

SEQ ID NO: 3407753 - DNA, 25 bp, Homo sapien
gagcgcagcaatcgatagatccagg

SEQ ID NO: 3407754 - DNA, 25 bp, Homo sapien
ggcgtccacacctagaagttccaag

SEQ ID NO: 3407755 - DNA, 25 bp, Homo sapien
tgtagtctcgggactgtagcaccac

SEQ ID NO: 3407756 - DNA, 25 bp, Homo sapien
caggaaacatatactccagtgggta

SEQ ID NO: 3407757 - DNA, 25 bp, Homo sapien
gtagcagcgggatgacaggaaacat

SEQ ID NO: 3407758 - DNA, 25 bp, Homo sapien
tgccacgaatgccatcacagacatg

SEQ ID NO: 3407759 - DNA, 25 bp, Homo sapien
tattgctgtccagatccactagcca

SEQ ID NO: 3407760 - DNA, 25 bp, Homo sapien
gcaggaaccccaatgatgtacgggg

SEQ ID NO: 3407761 - DNA, 25 bp, Homo sapien
atgtacggggttggagccaacagca

SEQ ID NO: 3407762 - DNA, 25 bp, Homo sapien
cattttgaagtccagtttgtagagg

SEQ ID NO: 3407763 - DNA, 25 bp, Homo sapien
gcaggataggcagcacttctgcatt

SEQ ID NO: 3407764 - DNA, 25 bp, Homo sapien
ttctggcaggataggcagcacttct

SEQ ID NO: 3407765 - DNA, 25 bp, Homo sapien
tttcagctctagtgattctggttct

SEQ ID NO: 3407766 - DNA, 25 bp, Homo sapien
gattctggttctggcaggataggca

SEQ ID NO: 3407767 - DNA, 25 bp, Homo sapien
aatccacatcattgccatagatgag

SEQ ID NO: 3407768 - DNA, 25 bp, Homo sapien
tgcaggtcattagaaggccttccca

SEQ ID NO: 3407769 - DNA, 25 bp, Homo sapien
ttgaattcagtggacggtgtggact

SEQ ID NO: 3407770 - DNA, 25 bp, Homo sapien
cacatcattgccatagatgagtggg

SEQ ID NO: 3407771 - DNA, 25 bp, Homo sapien
ggtacgcgtgtgcatctgaaatccc

SEQ ID NO: 3407772 - DNA, 25 bp, Homo sapien
gcacgttggcggaattgaagaaccg

SEQ ID NO: 3407773 - DNA, 25 bp, Homo sapien
ttgaaaagctaccacaggccgagga

SEQ ID NO: 3407774 - DNA, 25 bp, Homo sapien
gagtcctggccaatttctcggcaaa

SEQ ID NO: 3407775 - DNA, 25 bp, Homo sapien
cagctgatgagcataccactttggc

SEQ ID NO: 3407776 - DNA, 25 bp, Homo sapien
tcatagacgcgatagtggataggct

SEQ ID NO: 3407777 - DNA, 25 bp, Homo sapien
catcagtaggttcggagtcagagtc

SEQ ID NO: 3407778 - DNA, 25 bp, Homo sapien
gagtcccgctctggtggtacactca

SEQ ID NO: 3407779 - DNA, 25 bp, Homo sapien
actgacaaagtcaccaagggaggag

SEQ ID NO: 3407780 - DNA, 25 bp, Homo sapien
gagtaagaagagcttgaatcgtcat

SEQ ID NO: 3407781 - DNA, 25 bp, Homo sapien
tttcactgacaaagtcaccaaggga

SEQ ID NO: 3407782 - DNA, 25 bp, Homo sapien
gaatcgtcataatccatactatcac

SEQ ID NO: 3407783 - DNA, 25 bp, Homo sapien
gctggcatcccccagtgctgcatgt

SEQ ID NO: 3407784 - DNA, 25 bp, Homo sapien
tggcatcccccagtgctgcatgtgt

SEQ ID NO: 3407785 - DNA, 25 bp, Homo sapien
atcccccagtgctgcatgtgtcaga

SEQ ID NO: 3407786 - DNA, 25 bp, Homo sapien
ctcgctggcatcccccagtgctgca

SEQ ID NO: 3407787 - DNA, 25 bp, Homo sapien
tgattctgcagctcgtcaatctcca

SEQ ID NO: 3407788 - DNA, 25 bp, Homo sapien
gattctgcagctcgtcaatctccac

SEQ ID NO: 3407789 - DNA, 25 bp, Homo sapien
ctgattctgcagctcgtcaatctcc

SEQ ID NO: 3407790 - DNA, 25 bp, Homo sapien
agagttggctccgtggatgacagtg

SEQ ID NO: 3407791 - DNA, 25 bp, Homo sapien
tggctgtggtgctagagctggagcg

SEQ ID NO: 3407792 - DNA, 25 bp, Homo sapien
tgtggtgctagagctggagcgcagt

SEQ ID NO: 3407793 - DNA, 25 bp, Homo sapien
agttggctccgtggatgacagtgct

SEQ ID NO: 3407794 - DNA, 25 bp, Homo sapien
ggagacgcctactgctgccttatca

SEQ ID NO: 3407795 - DNA, 25 bp, Homo sapien
tgccttatcatccatctccgtagag

SEQ ID NO: 3407796 - DNA, 25 bp, Homo sapien
ccacgttcgatttgccaatgctggg

SEQ ID NO: 3407797 - DNA, 25 bp, Homo sapien
ccatctccgtagagtcagcaggttc

SEQ ID NO: 3407798 - DNA, 25 bp, Homo sapien
ggaaagccatattggggctcgaagt

SEQ ID NO: 3407799 - DNA, 25 bp, Homo sapien
ggctcgaagtatggattgtcataga

SEQ ID NO: 3407800 - DNA, 25 bp, Homo sapien
ggagtgtaactttccccctgctcat

SEQ ID NO: 3407801 - DNA, 25 bp, Homo sapien
cactgacatgttggctgaatcgggg

SEQ ID NO: 3407802 - DNA, 25 bp, Homo sapien
gcaaaagacatgatgcccccgaagc

SEQ ID NO: 3407803 - DNA, 25 bp, Homo sapien
tgagtcacttgccagtctcaagctg

SEQ ID NO: 3407804 - DNA, 25 bp, Homo sapien
gagagcttgcccgagagtctgactc

SEQ ID NO: 3407805 - DNA, 25 bp, Homo sapien
agtctgactctgcatctgagtcact

SEQ ID NO: 3407806 - DNA, 25 bp, Homo sapien
ctggtactgtggttccgatagaggc

SEQ ID NO: 3407807 - DNA, 25 bp, Homo sapien
tggtactgtggttccgatagaggct

SEQ ID NO: 3407808 - DNA, 25 bp, Homo sapien
gcgtggccttctctcgggcaccttt

SEQ ID NO: 3407809 - DNA, 25 bp, Homo sapien
ggccttctctcgggcacctttggtg

SEQ ID NO: 3407810 - DNA, 25 bp, Homo sapien
gggccggcttcagtaacaatctcca

SEQ ID NO: 3407811 - DNA, 25 bp, Homo sapien
ccggggccggcttcagtaacaatct

SEQ ID NO: 3407812 - DNA, 25 bp, Homo sapien
aacaatctccattagagtatttagc

SEQ ID NO: 3407813 - DNA, 25 bp, Homo sapien
tctccattagagtatttagcccaaa

SEQ ID NO: 3407814 - DNA, 25 bp, Homo sapien
ttcactgttgggctgtgtttaatga

SEQ ID NO: 3407815 - DNA, 25 bp, Homo sapien
tgacagatgacttctgatccactaa

SEQ ID NO: 3407816 - DNA, 25 bp, Homo sapien
gatgacttctgatccactaacgccc

SEQ ID NO: 3407817 - DNA, 25 bp, Homo sapien
tcactgttgggctgtgtttaatgac

SEQ ID NO: 3407818 - DNA, 25 bp, Homo sapien
cacctttcacccagactagatgtct

SEQ ID NO: 3407819 - DNA, 25 bp, Homo sapien
cctttcacccagactagatgtctgc

SEQ ID NO: 3407820 - DNA, 25 bp, Homo sapien
ctttgcagagcaccccccacctttc

SEQ ID NO: 3407821 - DNA, 25 bp, Homo sapien
ccccacctttcacccagactagatg

SEQ ID NO: 3407822 - DNA, 25 bp, Homo sapien
ctacagggtccacacaccgcttctg

SEQ ID NO: 3407823 - DNA, 25 bp, Homo sapien
ggtccacacaccgcttctgtggtca

SEQ ID NO: 3407824 - DNA, 25 bp, Homo sapien
tccacacaccgcttctgtggtcatc

SEQ ID NO: 3407825 - DNA, 25 bp, Homo sapien
agggtccacacaccgcttctgtggt

SEQ ID NO: 3407826 - DNA, 25 bp, Homo sapien
tgactgcaccatgcggttcagcttg

SEQ ID NO: 3407827 - DNA, 25 bp, Homo sapien
acaaagactcgcagctgctcgctct

SEQ ID NO: 3407828 - DNA, 25 bp, Homo sapien
cagccggcgcacctttttcatgttg

SEQ ID NO: 3407829 - DNA, 25 bp, Homo sapien
tgtcctgccgggcatcgtcctctga

SEQ ID NO: 3407830 - DNA, 25 bp, Homo sapien
tactatagtagtgggtctgggcaat

SEQ ID NO: 3407831 - DNA, 25 bp, Homo sapien
caagctgaggactgtacacttgagg

SEQ ID NO: 3407832 - DNA, 25 bp, Homo sapien
cgcgtgggcataggactgctccaag

SEQ ID NO: 3407833 - DNA, 25 bp, Homo sapien
ggaggtctaacattcccttgtacac

SEQ ID NO: 3407834 - DNA, 25 bp, Homo sapien
tctgttggacttctcttccgcttgt

SEQ ID NO: 3407835 - DNA, 25 bp, Homo sapien
cttggtgcccgaggtcccagttgtg

SEQ ID NO: 3407836 - DNA, 25 bp, Homo sapien
taggaccctttcctgtggcacttgg

SEQ ID NO: 3407837 - DNA, 25 bp, Homo sapien
ccagttgtggaactctcagttgtgc

SEQ ID NO: 3407838 - DNA, 25 bp, Homo sapien
gaagcataaagactagagaagtaca

SEQ ID NO: 3407839 - DNA, 25 bp, Homo sapien
aagaaacaccaccagaaatggacac

SEQ ID NO: 3407840 - DNA, 25 bp, Homo sapien
cccttccctctctaagaagcaaagc

SEQ ID NO: 3407841 - DNA, 25 bp, Homo sapien
cataaagactagagaagtacaaaga

SEQ ID NO: 3407842 - DNA, 25 bp, Homo sapien
cttcatctaagatacggggtggggg

SEQ ID NO: 3407843 - DNA, 25 bp, Homo sapien
tcttcatctaagatacggggtgggg

SEQ ID NO: 3407844 - DNA, 25 bp, Homo sapien
catctaagatacggggtggggggtg

SEQ ID NO: 3407845 - DNA, 25 bp, Homo sapien
attcttcatctaagatacggggtgg

SEQ ID NO: 3407846 - DNA, 25 bp, Homo sapien
cactgcctttgtgggaacggagaaa

SEQ ID NO: 3407847 - DNA, 25 bp, Homo sapien
caaagttgcattcctagttggaggc

SEQ ID NO: 3407848 - DNA, 25 bp, Homo sapien
tagaaagctcactaaggcactgcct

SEQ ID NO: 3407849 - DNA, 25 bp, Homo sapien
gaagcagagtgcctagggacctaga

SEQ ID NO: 3407850 - DNA, 25 bp, Homo sapien
ctaccccagatgcaatgcaagcagg

SEQ ID NO: 3407851 - DNA, 25 bp, Homo sapien
taccccagatgcaatgcaagcagga

SEQ ID NO: 3407852 - DNA, 25 bp, Homo sapien
tttcacttcctggtgcttgttccac

SEQ ID NO: 3407853 - DNA, 25 bp, Homo sapien
tcacttcctggtgcttgttccacaa

SEQ ID NO: 3407854 - DNA, 25 bp, Homo sapien
ctttttcacttcctggtgcttgttc

SEQ ID NO: 3407855 - DNA, 25 bp, Homo sapien
acttcctggtgcttgttccacaatt

SEQ ID NO: 3407856 - DNA, 25 bp, Homo sapien
caaagggagcctgccccaactgggc

SEQ ID NO: 3407857 - DNA, 25 bp, Homo sapien
gggcctggggagttggcaggtatgg

SEQ ID NO: 3407858 - DNA, 25 bp, Homo sapien
ctaagagcaaatttggggtggggct

SEQ ID NO: 3407859 - DNA, 25 bp, Homo sapien
agggagcctgccccaactgggcctg

SEQ ID NO: 3407860 - DNA, 25 bp, Homo sapien
catcttctcaacctgagaaaattct

SEQ ID NO: 3407861 - DNA, 25 bp, Homo sapien
tggtctcaatgggttctccagccat

SEQ ID NO: 3407862 - DNA, 25 bp, Homo sapien
tctcaacctgagaaaattctgagca

SEQ ID NO: 3407863 - DNA, 25 bp, Homo sapien
tctccagccatcttctcaacctgag

SEQ ID NO: 3407864 - DNA, 25 bp, Homo sapien
gggaagacttctgttactccgtgca

SEQ ID NO: 3407865 - DNA, 25 bp, Homo sapien
aagacttctgttactccgtgcacaa

SEQ ID NO: 3407866 - DNA, 25 bp, Homo sapien
gaagacttctgttactccgtgcaca

SEQ ID NO: 3407867 - DNA, 25 bp, Homo sapien
acttctgttactccgtgcacaaagg

SEQ ID NO: 3407868 - DNA, 25 bp, Homo sapien
ggctcacaccactgtctgcgctgat

SEQ ID NO: 3407869 - DNA, 25 bp, Homo sapien
aagacaggtttgattacttcaggcc

SEQ ID NO: 3407870 - DNA, 25 bp, Homo sapien
tctgcgctgatctgggactttttct

SEQ ID NO: 3407871 - DNA, 25 bp, Homo sapien
ctgggaactagacgtcaggctcaca

SEQ ID NO: 3407872 - DNA, 25 bp, Homo sapien
cggatcataacagctggactcacgc

SEQ ID NO: 3407873 - DNA, 25 bp, Homo sapien
tggactcacgccgatgacagagtct

SEQ ID NO: 3407874 - DNA, 25 bp, Homo sapien
ctcacgccgatgacagagtcttgat

SEQ ID NO: 3407875 - DNA, 25 bp, Homo sapien
cctgacttgagctgcggatcataac

SEQ ID NO: 3407876 - DNA, 25 bp, Homo sapien
aagatgccagtgtggtgttccccta

SEQ ID NO: 3407877 - DNA, 25 bp, Homo sapien
caagatgccagtgtggtgttcccct

SEQ ID NO: 3407878 - DNA, 25 bp, Homo sapien
agatgccagtgtggtgttcccctac

SEQ ID NO: 3407879 - DNA, 25 bp, Homo sapien
caagggtctctccagagctattact

SEQ ID NO: 3407880 - DNA, 25 bp, Homo sapien
tgcttgtggcagagttggtctcaat

SEQ ID NO: 3407881 - DNA, 25 bp, Homo sapien
gtgccccgagagcttgccaggtgaa

SEQ ID NO: 3407882 - DNA, 25 bp, Homo sapien
tcactatcagacaaagtgccccgag

SEQ ID NO: 3407883 - DNA, 25 bp, Homo sapien
taggcagactggtactaaacgagag

SEQ ID NO: 3407884 - DNA, 25 bp, Homo sapien
aaacgagagctgtaattgtcctgac

SEQ ID NO: 3407885 - DNA, 25 bp, Homo sapien
catcaatgattcaggagagggttct

SEQ ID NO: 3407886 - DNA, 25 bp, Homo sapien
ggattcaaagcccttacgtgactgg

SEQ ID NO: 3407887 - DNA, 25 bp, Homo sapien
tagagatagactcgctggctcacat

SEQ ID NO: 3407888 - DNA, 25 bp, Homo sapien
tcacatcttcagaagtacgaatggg

SEQ ID NO: 3407889 - DNA, 25 bp, Homo sapien
ggagtccctcatagagatagactcg

SEQ ID NO: 3407890 - DNA, 25 bp, Homo sapien
gactcgctggctcacatcttcagaa

SEQ ID NO: 3407891 - DNA, 25 bp, Homo sapien
tcctctaactggtcccacatggatc

SEQ ID NO: 3407892 - DNA, 25 bp, Homo sapien
tggtcccacatggatcctttgtccc

SEQ ID NO: 3407893 - DNA, 25 bp, Homo sapien
ttatagaaaaggtctccatagctgc

SEQ ID NO: 3407894 - DNA, 25 bp, Homo sapien
tccatagctgcatcctctaactggt

SEQ ID NO: 3407895 - DNA, 25 bp, Homo sapien
tggtcccataaagtagaacgctctt

SEQ ID NO: 3407896 - DNA, 25 bp, Homo sapien
cagaattgcatttggtcccataaag

SEQ ID NO: 3407897 - DNA, 25 bp, Homo sapien
tgcatttggtcccataaagtagaac

SEQ ID NO: 3407898 - DNA, 25 bp, Homo sapien
tcccataaagtagaacgctctttgc

SEQ ID NO: 3407899 - DNA, 25 bp, Homo sapien
gtgtggccaacaagcgatcttcatc

SEQ ID NO: 3407900 - DNA, 25 bp, Homo sapien
caggcgcttccggtcatgttctcca

SEQ ID NO: 3407901 - DNA, 25 bp, Homo sapien
gcttccggtcatgttctccaaggga

SEQ ID NO: 3407902 - DNA, 25 bp, Homo sapien
aggttgtgcagaagtgtggccaaca

SEQ ID NO: 3407903 - DNA, 25 bp, Homo sapien
gaaatttaggcgacaggaacaagcc

SEQ ID NO: 3407904 - DNA, 25 bp, Homo sapien
cagctaccccgaaatttaggcgaca

SEQ ID NO: 3407905 - DNA, 25 bp, Homo sapien
gctggacacagcaaaattgacatta

SEQ ID NO: 3407906 - DNA, 25 bp, Homo sapien
taggatcagcggagctggacacagc

SEQ ID NO: 3407907 - DNA, 25 bp, Homo sapien
catgactcttaacaagggatctgct

SEQ ID NO: 3407908 - DNA, 25 bp, Homo sapien
caacacatgactcttaacaagggat

SEQ ID NO: 3407909 - DNA, 25 bp, Homo sapien
tgactcttaacaagggatctgctct

SEQ ID NO: 3407910 - DNA, 25 bp, Homo sapien
cacatgactcttaacaagggatctg

SEQ ID NO: 3407911 - DNA, 25 bp, Homo sapien
tggctgtacacaagcccaatgtgcg

SEQ ID NO: 3407912 - DNA, 25 bp, Homo sapien
aatgtgcgactttcccattaggcgc

SEQ ID NO: 3407913 - DNA, 25 bp, Homo sapien
cattaggcgcctcaccttcttgcgg

SEQ ID NO: 3407914 - DNA, 25 bp, Homo sapien
caggttcgccagctgatcaagcacc

SEQ ID NO: 3407915 - DNA, 25 bp, Homo sapien
gcttcttcatgtgccggctgccact

SEQ ID NO: 3407916 - DNA, 25 bp, Homo sapien
gaaaaagatatctccgtttgtatct

SEQ ID NO: 3407917 - DNA, 25 bp, Homo sapien
gaccagatagagagatcgcgtccat

SEQ ID NO: 3407918 - DNA, 25 bp, Homo sapien
tctgtccctgcatgtaccacaaatg

SEQ ID NO: 3407919 - DNA, 25 bp, Homo sapien
tgctctacggacttaaagtatttgg

SEQ ID NO: 3407920 - DNA, 25 bp, Homo sapien
gagatcatgacagacttaaccaagg

SEQ ID NO: 3407921 - DNA, 25 bp, Homo sapien
caaaggtaggagatcatgacagact

SEQ ID NO: 3407922 - DNA, 25 bp, Homo sapien
gttatttattacctcttatgtgctc

SEQ ID NO: 3407923 - DNA, 25 bp, Homo sapien
tcagagccatttctacgccacaagc

SEQ ID NO: 3407924 - DNA, 25 bp, Homo sapien
gcacaacaccttcgtcttgggacag

SEQ ID NO: 3407925 - DNA, 25 bp, Homo sapien
tgatgagcttctcgtaccaccagcg

SEQ ID NO: 3407926 - DNA, 25 bp, Homo sapien
gatgttactacgcaacaccacacag

SEQ ID NO: 3407927 - DNA, 25 bp, Homo sapien
caacccaaacacagatcctgcgtac

SEQ ID NO: 3407928 - DNA, 25 bp, Homo sapien
ctactagccccaacccaaacacaga

SEQ ID NO: 3407929 - DNA, 25 bp, Homo sapien
ccccaacccaaacacagatcctgcg

SEQ ID NO: 3407930 - DNA, 25 bp, Homo sapien
tactagccccaacccaaacacagat

SEQ ID NO: 3407931 - DNA, 25 bp, Homo sapien
ttgatgctttgctgtcgggcggcag

SEQ ID NO: 3407932 - DNA, 25 bp, Homo sapien
tgatgctttgctgtcgggcggcagc

SEQ ID NO: 3407933 - DNA, 25 bp, Homo sapien
gggcggcagcgcgctccatgctgtc

SEQ ID NO: 3407934 - DNA, 25 bp, Homo sapien
gatgctttgctgtcgggcggcagcg

SEQ ID NO: 3407935 - DNA, 25 bp, Homo sapien
aggtcctgcacagggaactcgccac

SEQ ID NO: 3407936 - DNA, 25 bp, Homo sapien
ggccaccctcaccagtcttcaggtc

SEQ ID NO: 3407937 - DNA, 25 bp, Homo sapien
ttcaggtcctgcacagggaactcgc

SEQ ID NO: 3407938 - DNA, 25 bp, Homo sapien
ctgattgtgcatgaatttgaggttg

SEQ ID NO: 3407939 - DNA, 25 bp, Homo sapien
ttttaatgtgattcagctctatgaa

SEQ ID NO: 3407940 - DNA, 25 bp, Homo sapien
taatgtgattcagctctatgaaaac

SEQ ID NO: 3407941 - DNA, 25 bp, Homo sapien
caaagacgcctcgaactgtattgca

SEQ ID NO: 3407942 - DNA, 25 bp, Homo sapien
caggacaaagacgcctcgaactgta

SEQ ID NO: 3407943 - DNA, 25 bp, Homo sapien
ctcctgacttctctacagaggttct

SEQ ID NO: 3407944 - DNA, 25 bp, Homo sapien
ttgctcttctgcgatccattatcta

SEQ ID NO: 3407945 - DNA, 25 bp, Homo sapien
ctggagctccgaggtttgagttact

SEQ ID NO: 3407946 - DNA, 25 bp, Homo sapien
tgcgatccattatctatctttccct

SEQ ID NO: 3407947 - DNA, 25 bp, Homo sapien
gaacgaaggttttcatagcagcgat

SEQ ID NO: 3407948 - DNA, 25 bp, Homo sapien
tagcgcactgggctgctagagagat

SEQ ID NO: 3407949 - DNA, 25 bp, Homo sapien
gagattgcagcaggtgacatggaca

SEQ ID NO: 3407950 - DNA, 25 bp, Homo sapien
gcacgagccgaggtcactttacctg

SEQ ID NO: 3407951 - DNA, 25 bp, Homo sapien
cagcttaggctatgacagggcagag

SEQ ID NO: 3407952 - DNA, 25 bp, Homo sapien
tacttgatggccgtgattctaccca

SEQ ID NO: 3407953 - DNA, 25 bp, Homo sapien
gctaggcctctgtcatccgcagtgg

SEQ ID NO: 3407954 - DNA, 25 bp, Homo sapien
aactttgctgagacacccgtgaact

SEQ ID NO: 3407955 - DNA, 25 bp, Homo sapien
taagagcaatcgtgccatgctcccc

SEQ ID NO: 3407956 - DNA, 25 bp, Homo sapien
caacactaagagcaatcgtgccatg

SEQ ID NO: 3407957 - DNA, 25 bp, Homo sapien
aaacagaaagttcaacactaagagc

SEQ ID NO: 3407958 - DNA, 25 bp, Homo sapien
gaaagttcaacactaagagcaatcg

SEQ ID NO: 3407959 - DNA, 25 bp, Homo sapien
catcagggttgagcggcacactcac

SEQ ID NO: 3407960 - DNA, 25 bp, Homo sapien
cccatcagggttgagcggcacactc

SEQ ID NO: 3407961 - DNA, 25 bp, Homo sapien
ccatcagggttgagcggcacactca

SEQ ID NO: 3407962 - DNA, 25 bp, Homo sapien
atacggagtagcagatttcgtgggc

SEQ ID NO: 3407963 - DNA, 25 bp, Homo sapien
gaactgcagccacgtacgagaagag

SEQ ID NO: 3407964 - DNA, 25 bp, Homo sapien
gaagagacataatacggagtagcag

SEQ ID NO: 3407965 - DNA, 25 bp, Homo sapien
gccacgtacgagaagagacataata

SEQ ID NO: 3407966 - DNA, 25 bp, Homo sapien
agacaggccggggcggggttctgag

SEQ ID NO: 3407967 - DNA, 25 bp, Homo sapien
gagacaggccggggcggggttctga

SEQ ID NO: 3407968 - DNA, 25 bp, Homo sapien
ggcggggttctgagatcttcctcac

SEQ ID NO: 3407969 - DNA, 25 bp, Homo sapien
agagacaggccggggcggggttctg

SEQ ID NO: 3407970 - DNA, 25 bp, Homo sapien
cagagggacacataaccggtaacca

SEQ ID NO: 3407971 - DNA, 25 bp, Homo sapien
gaggacacacgagcatcatccactc

SEQ ID NO: 3407972 - DNA, 25 bp, Homo sapien
gggcttgcagaggacacacgagcat

SEQ ID NO: 3407973 - DNA, 25 bp, Homo sapien
actcagagggacacataaccggtaa

SEQ ID NO: 3407974 - DNA, 25 bp, Homo sapien
tagctgccggcttgggaatgcagaa

SEQ ID NO: 3407975 - DNA, 25 bp, Homo sapien
gaagggagagccagactcttgcagt

SEQ ID NO: 3407976 - DNA, 25 bp, Homo sapien
tcttgcagtggacagttataacgcc

SEQ ID NO: 3407977 - DNA, 25 bp, Homo sapien
gacacaaaatagtgggttcacaccg

SEQ ID NO: 3407978 - DNA, 25 bp, Homo sapien
caatctggcgtttgggtgcattgca

SEQ ID NO: 3407979 - DNA, 25 bp, Homo sapien
tctcgtccaagcacaaggaggcgct

SEQ ID NO: 3407980 - DNA, 25 bp, Homo sapien
caagaagaagatccgcctgtaccag

SEQ ID NO: 3407981 - DNA, 25 bp, Homo sapien
gaagggcaaccgcaagaagatgacc

SEQ ID NO: 3407982 - DNA, 25 bp, Homo sapien
cagctaatattttgtattttagtag

SEQ ID NO: 3407983 - DNA, 25 bp, Homo sapien
gctgggattacggcacctaccacca

SEQ ID NO: 3407984 - DNA, 25 bp, Homo sapien
gtagagatgggatttcaccacgttg

SEQ ID NO: 3407985 - DNA, 25 bp, Homo sapien
ggattacggcacctaccaccacgcc

SEQ ID NO: 3407986 - DNA, 25 bp, Homo sapien
tctcgaagagtcatccggaaatggg

SEQ ID NO: 3407987 - DNA, 25 bp, Homo sapien
ttataccagggcactccaacttggg

SEQ ID NO: 3407988 - DNA, 25 bp, Homo sapien
tctactgcctgttgggtgcctaccg

SEQ ID NO: 3407989 - DNA, 25 bp, Homo sapien
accttaattgtagctcgggagtctc

SEQ ID NO: 3407990 - DNA, 25 bp, Homo sapien
agtctgggcgaaagcatgagactcc

SEQ ID NO: 3407991 - DNA, 25 bp, Homo sapien
ccagtctgggcgaaagcatgagact

SEQ ID NO: 3407992 - DNA, 25 bp, Homo sapien
tccagtctgggcgaaagcatgagac

SEQ ID NO: 3407993 - DNA, 25 bp, Homo sapien
tcatctatttcccatagtggctgca

SEQ ID NO: 3407994 - DNA, 25 bp, Homo sapien
gtgctgggatttgctatttacgata

SEQ ID NO: 3407995 - DNA, 25 bp, Homo sapien
caacaacagtatactaatatcctaa

SEQ ID NO: 3407996 - DNA, 25 bp, Homo sapien
ttttctgcaccttcactaacacttg

SEQ ID NO: 3407997 - DNA, 25 bp, Homo sapien
cttagggtgtttctgccgtttggct

SEQ ID NO: 3407998 - DNA, 25 bp, Homo sapien
tttacccatggtgtagcacgtgtca

SEQ ID NO: 3407999 - DNA, 25 bp, Homo sapien
tattccattgtatgcgcgcgccacg

SEQ ID NO: 3408000 - DNA, 25 bp, Homo sapien
acgttttgcgtatccagccgtccga

SEQ ID NO: 3408001 - DNA, 25 bp, Homo sapien
aggacgaggcccgtgctagcttcac

SEQ ID NO: 3408002 - DNA, 25 bp, Homo sapien
gcttcactgcattcctcaaggcagg

SEQ ID NO: 3408003 - DNA, 25 bp, Homo sapien
ttcagcgaggtaaggcatataatct

SEQ ID NO: 3408004 - DNA, 25 bp, Homo sapien
taatctctgaggtaaggtaacgtgc

SEQ ID NO: 3408005 - DNA, 25 bp, Homo sapien
ccacgaccgtccagcccctgacggg

SEQ ID NO: 3408006 - DNA, 25 bp, Homo sapien
ctgcacccgccccacgaccgtccag

SEQ ID NO: 3408007 - DNA, 25 bp, Homo sapien
cgccccacgaccgtccagcccctga

SEQ ID NO: 3408008 - DNA, 25 bp, Homo sapien
tccagcccctgacggggcaccccat

SEQ ID NO: 3408009 - DNA, 25 bp, Homo sapien
acttcctgtatgtagcgcaagagat

SEQ ID NO: 3408010 - DNA, 25 bp, Homo sapien
gcaggcccttcgataaaatcaggaa

SEQ ID NO: 3408011 - DNA, 25 bp, Homo sapien
caagagatttatgcaaacgggttgg

SEQ ID NO: 3408012 - DNA, 25 bp, Homo sapien
cagcggcaggcccttcgataaaatc

SEQ ID NO: 3408013 - DNA, 25 bp, Homo sapien
cttaaagggcacaatgtacactatt

SEQ ID NO: 3408014 - DNA, 25 bp, Homo sapien
ggataaactgaaagcctagacttct

SEQ ID NO: 3408015 - DNA, 25 bp, Homo sapien
cactattctggtgatggataaactg

SEQ ID NO: 3408016 - DNA, 25 bp, Homo sapien
ctgaaagcctagacttctccattat

SEQ ID NO: 3408017 - DNA, 25 bp, Homo sapien
gtggcccctgccgtctccccctgcc

SEQ ID NO: 3408018 - DNA, 25 bp, Homo sapien
cagtggcccctgccgtctccccctg

SEQ ID NO: 3408019 - DNA, 25 bp, Homo sapien
ccagtggcccctgccgtctccccct

SEQ ID NO: 3408020 - DNA, 25 bp, Homo sapien
agtggcccctgccgtctccccctgc

SEQ ID NO: 3408021 - DNA, 25 bp, Homo sapien
ccgtcagggggctcgtttctggaca

SEQ ID NO: 3408022 - DNA, 25 bp, Homo sapien
agcagacacgagagggcccagaaat

SEQ ID NO: 3408023 - DNA, 25 bp, Homo sapien
gatgcccttgaccttcaagcagaca

SEQ ID NO: 3408024 - DNA, 25 bp, Homo sapien
gaagccccggccatcattctcagcc

SEQ ID NO: 3408025 - DNA, 25 bp, Homo sapien
ccacactggagcaaggcttggaggt

SEQ ID NO: 3408026 - DNA, 25 bp, Homo sapien
ggcccatgttttgcagacagggtgc

SEQ ID NO: 3408027 - DNA, 25 bp, Homo sapien
caggcccatgttttgcagacagggt

SEQ ID NO: 3408028 - DNA, 25 bp, Homo sapien
ccggtgggggttccacactggagca

SEQ ID NO: 3408029 - DNA, 25 bp, Homo sapien
cattcgttgggctttgcattcccaa

SEQ ID NO: 3408030 - DNA, 25 bp, Homo sapien
atcccggttctcacattcgttgggc

SEQ ID NO: 3408031 - DNA, 25 bp, Homo sapien
tcccggttctcacattcgttgggct

SEQ ID NO: 3408032 - DNA, 25 bp, Homo sapien
cccggttctcacattcgttgggctt

SEQ ID NO: 3408033 - DNA, 25 bp, Homo sapien
cttcatgttgcactgttggccttcc

SEQ ID NO: 3408034 - DNA, 25 bp, Homo sapien
ttgggcagagatagcgactgagtac

SEQ ID NO: 3408035 - DNA, 25 bp, Homo sapien
gactgagtacaggtctcttaagtct

SEQ ID NO: 3408036 - DNA, 25 bp, Homo sapien
tggcagctccaaccatttactctgt

SEQ ID NO: 3408037 - DNA, 25 bp, Homo sapien
cccccggcgcgcggccacgtcacaa

SEQ ID NO: 3408038 - DNA, 25 bp, Homo sapien
ccccggcgcgcggccacgtcacaag

SEQ ID NO: 3408039 - DNA, 25 bp, Homo sapien
gcccccggcgcgcggccacgtcaca

SEQ ID NO: 3408040 - DNA, 25 bp, Homo sapien
ggcggcggcgatccgggcggcccca

SEQ ID NO: 3408041 - DNA, 25 bp, Homo sapien
gcggcggcggcgatccgggcggccc

SEQ ID NO: 3408042 - DNA, 25 bp, Homo sapien
gcggcgatccgggcggccccagcca

SEQ ID NO: 3408043 - DNA, 25 bp, Homo sapien
cggcggcggcggcgatccgggcggc

SEQ ID NO: 3408044 - DNA, 25 bp, Homo sapien
ctgatgaagccagcggggctccact

SEQ ID NO: 3408045 - DNA, 25 bp, Homo sapien
actgatgaagccagcggggctccac

SEQ ID NO: 3408046 - DNA, 25 bp, Homo sapien
gccaggacgaggcggtcacgcagag

SEQ ID NO: 3408047 - DNA, 25 bp, Homo sapien
aggacgaggcggtcacgcagaggtg

SEQ ID NO: 3408048 - DNA, 25 bp, Homo sapien
ccagggcaagaccatccacgcttct

SEQ ID NO: 3408049 - DNA, 25 bp, Homo sapien
cagggcaagaccatccacgcttctt

SEQ ID NO: 3408050 - DNA, 25 bp, Homo sapien
agggcaagaccatccacgcttcttc

SEQ ID NO: 3408051 - DNA, 25 bp, Homo sapien
agccagggcaagaccatccacgctt

SEQ ID NO: 3408052 - DNA, 25 bp, Homo sapien
ggggaatgacaagcaacgggaagac

SEQ ID NO: 3408053 - DNA, 25 bp, Homo sapien
aagaccccactgagccccaccatga

SEQ ID NO: 3408054 - DNA, 25 bp, Homo sapien
gttgtccaggcgacaggccgtcgca

SEQ ID NO: 3408055 - DNA, 25 bp, Homo sapien
gaggagccttgggcccgccatgcca

SEQ ID NO: 3408056 - DNA, 25 bp, Homo sapien
tctgagcgcagcatggtccccatct

SEQ ID NO: 3408057 - DNA, 25 bp, Homo sapien
cttctgagcgcagcatggtccccat

SEQ ID NO: 3408058 - DNA, 25 bp, Homo sapien
ttctgagcgcagcatggtccccatc

SEQ ID NO: 3408059 - DNA, 25 bp, Homo sapien
ctggcgctgcacgtgtaggcccagg

SEQ ID NO: 3408060 - DNA, 25 bp, Homo sapien
agagtccccccagggcgaagctgag

SEQ ID NO: 3408061 - DNA, 25 bp, Homo sapien
cacgtgtaggcccaggcttcgggca

SEQ ID NO: 3408062 - DNA, 25 bp, Homo sapien
acattgcccaagagtccccccaggg

SEQ ID NO: 3408063 - DNA, 25 bp, Homo sapien
tcctgccagaaacccagaatccctc

SEQ ID NO: 3408064 - DNA, 25 bp, Homo sapien
aatgggatctcatccagggcaccag

SEQ ID NO: 3408065 - DNA, 25 bp, Homo sapien
aacccagaatccctctcctggtcat

SEQ ID NO: 3408066 - DNA, 25 bp, Homo sapien
gggcccagaactcccactgggacca

SEQ ID NO: 3408067 - DNA, 25 bp, Homo sapien
cttctccaacgccaggaaggtcagg

SEQ ID NO: 3408068 - DNA, 25 bp, Homo sapien
gaacatcttctccaacgccaggaag

SEQ ID NO: 3408069 - DNA, 25 bp, Homo sapien
catcttctccaacgccaggaaggtc

SEQ ID NO: 3408070 - DNA, 25 bp, Homo sapien
gatgccagcaatgacccacagcccc

SEQ ID NO: 3408071 - DNA, 25 bp, Homo sapien
agacagtggcctccattgagcgcgg

SEQ ID NO: 3408072 - DNA, 25 bp, Homo sapien
acagtggcctccattgagcgcggcg

SEQ ID NO: 3408073 - DNA, 25 bp, Homo sapien
tttgatgctccggaccacggcaccg

SEQ ID NO: 3408074 - DNA, 25 bp, Homo sapien
gatgctccggaccacggcaccgagg

SEQ ID NO: 3408075 - DNA, 25 bp, Homo sapien
ccagcccgtgggtgaagttatcgat

SEQ ID NO: 3408076 - DNA, 25 bp, Homo sapien
gtgaagttatcgatggtgttggcca

SEQ ID NO: 3408077 - DNA, 25 bp, Homo sapien
aagttatcgatggtgttggccagca

SEQ ID NO: 3408078 - DNA, 25 bp, Homo sapien
cagccagcccgtgggtgaagttatc

SEQ ID NO: 3408079 - DNA, 25 bp, Homo sapien
aggatgagtcgtcagccgctcgaag

SEQ ID NO: 3408080 - DNA, 25 bp, Homo sapien
agtccatgtaagtcgaggccccaag

SEQ ID NO: 3408081 - DNA, 25 bp, Homo sapien
ttgacagaggcacccaacaaggagt

SEQ ID NO: 3408082 - DNA, 25 bp, Homo sapien
tgccttcacgaagctagcggtatag

SEQ ID NO: 3408083 - DNA, 25 bp, Homo sapien
tggccatggttgtcaggagcccgat

SEQ ID NO: 3408084 - DNA, 25 bp, Homo sapien
ggatggccatggttgtcaggagccc

SEQ ID NO: 3408085 - DNA, 25 bp, Homo sapien
ctcatgggggatctcatgcaggagg

SEQ ID NO: 3408086 - DNA, 25 bp, Homo sapien
gatctcatgcaggaggatggccatg

SEQ ID NO: 3408087 - DNA, 25 bp, Homo sapien
aagggaggtccagaggttcaccctg

SEQ ID NO: 3408088 - DNA, 25 bp, Homo sapien
cctgagtgctcaggtacgatataca

SEQ ID NO: 3408089 - DNA, 25 bp, Homo sapien
cccagcggggcctgatgccctgagt

SEQ ID NO: 3408090 - DNA, 25 bp, Homo sapien
aggtacgatatacacactgagcccc

SEQ ID NO: 3408091 - DNA, 25 bp, Homo sapien
actgggtacagatggcgaagccagc

SEQ ID NO: 3408092 - DNA, 25 bp, Homo sapien
cccccagcgctgttgagagttgcag

SEQ ID NO: 3408093 - DNA, 25 bp, Homo sapien
tccatcggtcaaagccggcccggag

SEQ ID NO: 3408094 - DNA, 25 bp, Homo sapien
cttggctgcgctccatcggtcaaag

SEQ ID NO: 3408095 - DNA, 25 bp, Homo sapien
agtgcggtagccacaccctttggct

SEQ ID NO: 3408096 - DNA, 25 bp, Homo sapien
tggggaccagcagtgcggtagccac

SEQ ID NO: 3408097 - DNA, 25 bp, Homo sapien
ggtagccacaccctttggctggtgc

SEQ ID NO: 3408098 - DNA, 25 bp, Homo sapien
tctgctgatgccacccgccacaacc

SEQ ID NO: 3408099 - DNA, 25 bp, Homo sapien
cacgttcaccaaggcgatgtagaga

SEQ ID NO: 3408100 - DNA, 25 bp, Homo sapien
agggagcacgttcaccaaggcgatg

SEQ ID NO: 3408101 - DNA, 25 bp, Homo sapien
aggtcagggagcacgttcaccaagg

SEQ ID NO: 3408102 - DNA, 25 bp, Homo sapien
agaggtcagggagcacgttcaccaa

SEQ ID NO: 3408103 - DNA, 25 bp, Homo sapien
cccctaagggccctgtgagtggcag

SEQ ID NO: 3408104 - DNA, 25 bp, Homo sapien
acggctcacggtggaggcatgggca

SEQ ID NO: 3408105 - DNA, 25 bp, Homo sapien
ggccctgtgagtggcagtcctcttc

SEQ ID NO: 3408106 - DNA, 25 bp, Homo sapien
ctcctgagcccctaagggccctgtg

SEQ ID NO: 3408107 - DNA, 25 bp, Homo sapien
ccacgatgcccgcacagagcagaag

SEQ ID NO: 3408108 - DNA, 25 bp, Homo sapien
gagaacagcaccattaccacgatgc

SEQ ID NO: 3408109 - DNA, 25 bp, Homo sapien
ttaatccacgaagagcgagaacagc

SEQ ID NO: 3408110 - DNA, 25 bp, Homo sapien
acgatgcccgcacagagcagaagca

SEQ ID NO: 3408111 - DNA, 25 bp, Homo sapien
tctgcctctcacatatgcggtcaca

SEQ ID NO: 3408112 - DNA, 25 bp, Homo sapien
gaatccgagcatcttattgctgcag

SEQ ID NO: 3408113 - DNA, 25 bp, Homo sapien
gctcattctctctcgcagccactcg

SEQ ID NO: 3408114 - DNA, 25 bp, Homo sapien
cacatatgcggtcacagagtgaatc

SEQ ID NO: 3408115 - DNA, 25 bp, Homo sapien
tatggcttcagcactctgccggagc

SEQ ID NO: 3408116 - DNA, 25 bp, Homo sapien
cacagggatcacagtgtcggtctcg

SEQ ID NO: 3408117 - DNA, 25 bp, Homo sapien
ttcctgagcgctgacaacgtggagc

SEQ ID NO: 3408118 - DNA, 25 bp, Homo sapien
ggctcactatgtgcctgctccagga

SEQ ID NO: 3408119 - DNA, 25 bp, Homo sapien
agacctctcgatggccacttctgaa

SEQ ID NO: 3408120 - DNA, 25 bp, Homo sapien
cggaatcacagcaaagttgctataa

SEQ ID NO: 3408121 - DNA, 25 bp, Homo sapien
tacaaacggaatcacagcaaagttg

SEQ ID NO: 3408122 - DNA, 25 bp, Homo sapien
tctgaaaacatccacggtgaagggc

SEQ ID NO: 3408123 - DNA, 25 bp, Homo sapien
tggaaggccgtgcagaaccaaggca

SEQ ID NO: 3408124 - DNA, 25 bp, Homo sapien
caatactacgcctagggcacacagg

SEQ ID NO: 3408125 - DNA, 25 bp, Homo sapien
gaggtgcaggccaagaagaaagcca

SEQ ID NO: 3408126 - DNA, 25 bp, Homo sapien
gccaacctacaatactacgcctagg

SEQ ID NO: 3408127 - DNA, 25 bp, Homo sapien
cacccacgaggactacatggaaggc

SEQ ID NO: 3408128 - DNA, 25 bp, Homo sapien
tactagtagtacaaagacaagtaaa

SEQ ID NO: 3408129 - DNA, 25 bp, Homo sapien
gacaagtaaaccacagtcgttgcca

SEQ ID NO: 3408130 - DNA, 25 bp, Homo sapien
cacagtcgttgccatagaggagcat

SEQ ID NO: 3408131 - DNA, 25 bp, Homo sapien
tgccaggggccgtgccgttagttac

SEQ ID NO: 3408132 - DNA, 25 bp, Homo sapien
cacaggtatctactgcttccttatt

SEQ ID NO: 3408133 - DNA, 25 bp, Homo sapien
ttaagttactatgccctgggctccc

SEQ ID NO: 3408134 - DNA, 25 bp, Homo sapien
ctgggtacacaggtatctactgctt

SEQ ID NO: 3408135 - DNA, 25 bp, Homo sapien
tccttatttagagtctacatagcac

SEQ ID NO: 3408136 - DNA, 25 bp, Homo sapien
ctgagcagctcggtccctgatgagg

SEQ ID NO: 3408137 - DNA, 25 bp, Homo sapien
gtccctgatgaggaaaaagccacca

SEQ ID NO: 3408138 - DNA, 25 bp, Homo sapien
ctcggtccctgatgaggaaaaagcc

SEQ ID NO: 3408139 - DNA, 25 bp, Homo sapien
gcagctcggtccctgatgaggaaaa

SEQ ID NO: 3408140 - DNA, 25 bp, Homo sapien
actggttggtcagcgggctcctgca

SEQ ID NO: 3408141 - DNA, 25 bp, Homo sapien
ggttcacttgtaactggttggtcag

SEQ ID NO: 3408142 - DNA, 25 bp, Homo sapien
agcagccattttggtgtttgagagg

SEQ ID NO: 3408143 - DNA, 25 bp, Homo sapien
agctgcgccctccttaaagcagcca

SEQ ID NO: 3408144 - DNA, 25 bp, Homo sapien
tctgcagcaacaacgggattcaatc

SEQ ID NO: 3408145 - DNA, 25 bp, Homo sapien
agtctgttctgcagcaacaacggga

SEQ ID NO: 3408146 - DNA, 25 bp, Homo sapien
tgtcccaatggggaacctaaatctg

SEQ ID NO: 3408147 - DNA, 25 bp, Homo sapien
tgttctgcagcaacaacgggattca

SEQ ID NO: 3408148 - DNA, 25 bp, Homo sapien
ttggagacaaacctgtgtgagtttt

SEQ ID NO: 3408149 - DNA, 25 bp, Homo sapien
tggagacaaacctgtgtgagttttt

SEQ ID NO: 3408150 - DNA, 25 bp, Homo sapien
gcccagtgtctggtaggctgctgaa

SEQ ID NO: 3408151 - DNA, 25 bp, Homo sapien
gatgatagatcccacccagacttaa

SEQ ID NO: 3408152 - DNA, 25 bp, Homo sapien
tggtattatgcccaaggccgctctg

SEQ ID NO: 3408153 - DNA, 25 bp, Homo sapien
gaagcgctattgagcatcctccaca

SEQ ID NO: 3408154 - DNA, 25 bp, Homo sapien
cagggtcttggagacttgagtaaga

SEQ ID NO: 3408155 - DNA, 25 bp, Homo sapien
gcaccatccagcctcagggtcttgg

SEQ ID NO: 3408156 - DNA, 25 bp, Homo sapien
tctcttgtggcaccatccagcctca

SEQ ID NO: 3408157 - DNA, 25 bp, Homo sapien
cttgagtaagaatgtgagtggaggg

SEQ ID NO: 3408158 - DNA, 25 bp, Homo sapien
gagccaaacagctactgtccctggg

SEQ ID NO: 3408159 - DNA, 25 bp, Homo sapien
ctgtccctgggtgccaagcaagcca

SEQ ID NO: 3408160 - DNA, 25 bp, Homo sapien
aaacagctactgtccctgggtgcca

SEQ ID NO: 3408161 - DNA, 25 bp, Homo sapien
attgggtggagagccaaacagctac

SEQ ID NO: 3408162 - DNA, 25 bp, Homo sapien
acaatactacagtcttcacactgtt

SEQ ID NO: 3408163 - DNA, 25 bp, Homo sapien
gggcaccagccacccggcactggct

SEQ ID NO: 3408164 - DNA, 25 bp, Homo sapien
cttcacactgtttacagccctgggc

SEQ ID NO: 3408165 - DNA, 25 bp, Homo sapien
cagccacccggcactggctcttcat

SEQ ID NO: 3408166 - DNA, 25 bp, Homo sapien
tagactgtcacttcgtgtggcctcc

SEQ ID NO: 3408167 - DNA, 25 bp, Homo sapien
tattgcccttagagcgtttgcctgt

SEQ ID NO: 3408168 - DNA, 25 bp, Homo sapien
tgagttctcaactgcggagagcacc

SEQ ID NO: 3408169 - DNA, 25 bp, Homo sapien
agacacgagaagcagaggtagagcc

SEQ ID NO: 3408170 - DNA, 25 bp, Homo sapien
cacacagccagtccgtttctaggct

SEQ ID NO: 3408171 - DNA, 25 bp, Homo sapien
cagccagtccgtttctaggctttgt

SEQ ID NO: 3408172 - DNA, 25 bp, Homo sapien
gaacacacagccagtccgtttctag

SEQ ID NO: 3408173 - DNA, 25 bp, Homo sapien
cacagccagtccgtttctaggcttt

SEQ ID NO: 3408174 - DNA, 25 bp, Homo sapien
gccaaattggttttgctagaacgac

SEQ ID NO: 3408175 - DNA, 25 bp, Homo sapien
ttttgctagaacgactgctgaaggg

SEQ ID NO: 3408176 - DNA, 25 bp, Homo sapien
gattttgtgattccaattctttgta

SEQ ID NO: 3408177 - DNA, 25 bp, Homo sapien
gataaccacttgattttgtgattcc

SEQ ID NO: 3408178 - DNA, 25 bp, Homo sapien
gcatgtcgatgtggcgtcaagtaca

SEQ ID NO: 3408179 - DNA, 25 bp, Homo sapien
tctgtgtaactcagtgggtctccct

SEQ ID NO: 3408180 - DNA, 25 bp, Homo sapien
gtcaagtacatcgtccaaatccctg

SEQ ID NO: 3408181 - DNA, 25 bp, Homo sapien
catcgttgtgcctaaagcatgtcga

SEQ ID NO: 3408182 - DNA, 25 bp, Homo sapien
tcattacccaacccctgcccgccca

SEQ ID NO: 3408183 - DNA, 25 bp, Homo sapien
tgtcattacccaacccctgcccgcc

SEQ ID NO: 3408184 - DNA, 25 bp, Homo sapien
cctgtcattacccaacccctgcccg

SEQ ID NO: 3408185 - DNA, 25 bp, Homo sapien
ttccctgtcattacccaacccctgc

SEQ ID NO: 3408186 - DNA, 25 bp, Homo sapien
agggtgctgccggtgctgtgctccc

SEQ ID NO: 3408187 - DNA, 25 bp, Homo sapien
cagaacgccactcccttcccacatc

SEQ ID NO: 3408188 - DNA, 25 bp, Homo sapien
tccatagggtgctgccggtgctgtg

SEQ ID NO: 3408189 - DNA, 25 bp, Homo sapien
ctccttagccagaacgccactccct

SEQ ID NO: 3408190 - DNA, 25 bp, Homo sapien
tcccaaccggctggaaccaagaatg

SEQ ID NO: 3408191 - DNA, 25 bp, Homo sapien
tccagaatgtgattgttatacacac

SEQ ID NO: 3408192 - DNA, 25 bp, Homo sapien
gggaggcgctgttctgaatcccaac

SEQ ID NO: 3408193 - DNA, 25 bp, Homo sapien
tatagaagttttatacagctccggg

SEQ ID NO: 3408194 - DNA, 25 bp, Homo sapien
gcctcttgcaggtcttacttcagct

SEQ ID NO: 3408195 - DNA, 25 bp, Homo sapien
cagtatgcttcatttgccagtggcc

SEQ ID NO: 3408196 - DNA, 25 bp, Homo sapien
gaggtgtcccagatgtagtattccc

SEQ ID NO: 3408197 - DNA, 25 bp, Homo sapien
aggacgtttacagcctccacatgaa

SEQ ID NO: 3408198 - DNA, 25 bp, Homo sapien
cagacgatgatcaggatttgcccca

SEQ ID NO: 3408199 - DNA, 25 bp, Homo sapien
catgaagcggcttaaagtgcagctc

SEQ ID NO: 3408200 - DNA, 25 bp, Homo sapien
gaggagcacccttaatgattcgaag

SEQ ID NO: 3408201 - DNA, 25 bp, Homo sapien
ggagtttcgcttcgtacagaggaca

SEQ ID NO: 3408202 - DNA, 25 bp, Homo sapien
ggtcaggtgcagacagatgttagcc

SEQ ID NO: 3408203 - DNA, 25 bp, Homo sapien
tcaggtgcagacagatgttagccat

SEQ ID NO: 3408204 - DNA, 25 bp, Homo sapien
tgggtcaggtgcagacagatgttag

SEQ ID NO: 3408205 - DNA, 25 bp, Homo sapien
cttcctgggtcaggtgcagacagat

SEQ ID NO: 3408206 - DNA, 25 bp, Homo sapien
aaacaggaaggaatacttatgaaat

SEQ ID NO: 3408207 - DNA, 25 bp, Homo sapien
gaaatcctggtagaagataaaccaa

SEQ ID NO: 3408208 - DNA, 25 bp, Homo sapien
ttcaaaaaacatttgtggtccatgg

SEQ ID NO: 3408209 - DNA, 25 bp, Homo sapien
caaaaaacatttgtggtccatgggc

SEQ ID NO: 3408210 - DNA, 25 bp, Homo sapien
ttattatgatcttgaccaattcaaa

SEQ ID NO: 3408211 - DNA, 25 bp, Homo sapien
gatcttgaccaattcaaaaaacatt

SEQ ID NO: 3408212 - DNA, 25 bp, Homo sapien
aaggtagaaccagcaagttttgcca

SEQ ID NO: 3408213 - DNA, 25 bp, Homo sapien
aggtagaaccagcaagttttgccat

SEQ ID NO: 3408214 - DNA, 25 bp, Homo sapien
tatgaatcagtctaacccattttca

SEQ ID NO: 3408215 - DNA, 25 bp, Homo sapien
atgaatcagtctaacccattttcat

SEQ ID NO: 3408216 - DNA, 25 bp, Homo sapien
ttggttttgcagatcaccatcaact

SEQ ID NO: 3408217 - DNA, 25 bp, Homo sapien
attatgaatcagtctaacccatttt

SEQ ID NO: 3408218 - DNA, 25 bp, Homo sapien
ccttgtaatgccttttggtgtcatg

SEQ ID NO: 3408219 - DNA, 25 bp, Homo sapien
taatggataggagctaggcagtgct

SEQ ID NO: 3408220 - DNA, 25 bp, Homo sapien
catgaatgtgcctctactgctggaa

SEQ ID NO: 3408221 - DNA, 25 bp, Homo sapien
tccttatgtttagtgttaagaggct

SEQ ID NO: 3408222 - DNA, 25 bp, Homo sapien
gctggaatcctgctgtgtactcagt

SEQ ID NO: 3408223 - DNA, 25 bp, Homo sapien
tgaggttatacttggagcaattcct

SEQ ID NO: 3408224 - DNA, 25 bp, Homo sapien
caactgtggtgtattgctgtgtgtt

SEQ ID NO: 3408225 - DNA, 25 bp, Homo sapien
gattttgaggttatacttggagcaa

SEQ ID NO: 3408226 - DNA, 25 bp, Homo sapien
tccttttcatgtacacaactgtggt

SEQ ID NO: 3408227 - DNA, 25 bp, Homo sapien
tctgcatagttgactctattatatc

SEQ ID NO: 3408228 - DNA, 25 bp, Homo sapien
cttggatcttctgcatagttgactc

SEQ ID NO: 3408229 - DNA, 25 bp, Homo sapien
ggatcttctgcatagttgactctat

SEQ ID NO: 3408230 - DNA, 25 bp, Homo sapien
gaacttggatcttctgcatagttga

SEQ ID NO: 3408231 - DNA, 25 bp, Homo sapien
catcaaaagacattatggttaaggt

SEQ ID NO: 3408232 - DNA, 25 bp, Homo sapien
aaaatgtaagcagctttccatcaaa

SEQ ID NO: 3408233 - DNA, 25 bp, Homo sapien
tatggttaaggtttgtactgtaggc

SEQ ID NO: 3408234 - DNA, 25 bp, Homo sapien
tgtgaatttaagtcattgtcttctg

SEQ ID NO: 3408235 - DNA, 25 bp, Homo sapien
tatttcatgttcgatatagtcccat

SEQ ID NO: 3408236 - DNA, 25 bp, Homo sapien
ggttttgttgcctgcgcacttggtg

SEQ ID NO: 3408237 - DNA, 25 bp, Homo sapien
cactttgtcgattgtatgctttgat

SEQ ID NO: 3408238 - DNA, 25 bp, Homo sapien
tgaaatcattgtcaaatccaatatc

SEQ ID NO: 3408239 - DNA, 25 bp, Homo sapien
gcccctgtcgtctcacgtgttctta

SEQ ID NO: 3408240 - DNA, 25 bp, Homo sapien
tgttcttagtgtccactcctgtggg

SEQ ID NO: 3408241 - DNA, 25 bp, Homo sapien
ctctgcccctgtcgtctcacgtgtt

SEQ ID NO: 3408242 - DNA, 25 bp, Homo sapien
cacgtgttcttagtgtccactcctg

SEQ ID NO: 3408243 - DNA, 25 bp, Homo sapien
cagctccgttttcctcgtctttctg

SEQ ID NO: 3408244 - DNA, 25 bp, Homo sapien
cactctctaggctcagaggcctcgt

SEQ ID NO: 3408245 - DNA, 25 bp, Homo sapien
tctaggctcagaggcctcgtgccct

SEQ ID NO: 3408246 - DNA, 25 bp, Homo sapien
tccgttttcctcgtctttctggctg

SEQ ID NO: 3408247 - DNA, 25 bp, Homo sapien
tcctgtcgcgtttgcccagcgcgtg

SEQ ID NO: 3408248 - DNA, 25 bp, Homo sapien
cccgggtcctgtcgcgtttgcccag

SEQ ID NO: 3408249 - DNA, 25 bp, Homo sapien
ctcgttccctgcgtcctggggtagg

SEQ ID NO: 3408250 - DNA, 25 bp, Homo sapien
cctggggtagggctgcgatctcctc

SEQ ID NO: 3408251 - DNA, 25 bp, Homo sapien
ccgccggtggtaggtgccggaagtg

SEQ ID NO: 3408252 - DNA, 25 bp, Homo sapien
tggtaggtgccggaagtgccgccat

SEQ ID NO: 3408253 - DNA, 25 bp, Homo sapien
cgggcggcgccgcggtgatacgttc

SEQ ID NO: 3408254 - DNA, 25 bp, Homo sapien
cggtgatacgttccccctcgccgcg

SEQ ID NO: 3408255 - DNA, 25 bp, Homo sapien
cgctcggcccgcccctacgccgcgc

SEQ ID NO: 3408256 - DNA, 25 bp, Homo sapien
ctcggcccgcccctacgccgcgctc

SEQ ID NO: 3408257 - DNA, 25 bp, Homo sapien
gctcggcccgcccctacgccgcgct

SEQ ID NO: 3408258 - DNA, 25 bp, Homo sapien
gagtcgagaacttcagattcccagg

SEQ ID NO: 3408259 - DNA, 25 bp, Homo sapien
ccctccagtagggatcggagacaaa

SEQ ID NO: 3408260 - DNA, 25 bp, Homo sapien
tcatctagagctcctgtgggtgcga

SEQ ID NO: 3408261 - DNA, 25 bp, Homo sapien
gagacaaagagatgcgcccctgcag

SEQ ID NO: 3408262 - DNA, 25 bp, Homo sapien
agctgcactaggcctctcgcgggct

SEQ ID NO: 3408263 - DNA, 25 bp, Homo sapien
agagcgcgtcgcaggccagacacgt

SEQ ID NO: 3408264 - DNA, 25 bp, Homo sapien
ctcgcggtccggacccgcgagaaga

SEQ ID NO: 3408265 - DNA, 25 bp, Homo sapien
cagacacgtgtgagccctgtagcgt

SEQ ID NO: 3408266 - DNA, 25 bp, Homo sapien
cgcagcggcgacccgtcggcccccg

SEQ ID NO: 3408267 - DNA, 25 bp, Homo sapien
gcagcggcgacccgtcggcccccgc

SEQ ID NO: 3408268 - DNA, 25 bp, Homo sapien
cgccaggccggcctccagcagcgcg

SEQ ID NO: 3408269 - DNA, 25 bp, Homo sapien
cctccagcagcgcggtggccgccat

SEQ ID NO: 3408270 - DNA, 25 bp, Homo sapien
ccgcgccaggccggcctccagcagc

SEQ ID NO: 3408271 - DNA, 25 bp, Homo sapien
aggccggcctccagcagcgcggtgg

SEQ ID NO: 3408272 - DNA, 25 bp, Homo sapien
gtagagcagcgtcgggtagaagagc

SEQ ID NO: 3408273 - DNA, 25 bp, Homo sapien
caccttcccgcggaacagggtgtag

SEQ ID NO: 3408274 - DNA, 25 bp, Homo sapien
tcgatgcggtggtaccagtcccggt

SEQ ID NO: 3408275 - DNA, 25 bp, Homo sapien
tggcgcgtcaagctccgcaacggca

SEQ ID NO: 3408276 - DNA, 25 bp, Homo sapien
gcaaagaggtggctcagcaaagacg

SEQ ID NO: 3408277 - DNA, 25 bp, Homo sapien
tggctcagcaaagacggtggagacc

SEQ ID NO: 3408278 - DNA, 25 bp, Homo sapien
agcaaagacggtggagaccccagcg

SEQ ID NO: 3408279 - DNA, 25 bp, Homo sapien
agcggcccgacagggacggagcggc

SEQ ID NO: 3408280 - DNA, 25 bp, Homo sapien
cgcgcacgttctcgtcctgtaccag

SEQ ID NO: 3408281 - DNA, 25 bp, Homo sapien
accccgcgcacgttctcgtcctgta

SEQ ID NO: 3408282 - DNA, 25 bp, Homo sapien
ggtgatcaccccgcgcacgttctcg

SEQ ID NO: 3408283 - DNA, 25 bp, Homo sapien
atcaccccgcgcacgttctcgtcct

SEQ ID NO: 3408284 - DNA, 25 bp, Homo sapien
gagttgcacaggaacctcgtctcgt

SEQ ID NO: 3408285 - DNA, 25 bp, Homo sapien
ctgtgaagagttgcacaggaacctc

SEQ ID NO: 3408286 - DNA, 25 bp, Homo sapien
aggaacctcgtctcgtactcctcgt

SEQ ID NO: 3408287 - DNA, 25 bp, Homo sapien
tgcacaggaacctcgtctcgtactc

SEQ ID NO: 3408288 - DNA, 25 bp, Homo sapien
tgaatcaggtatgctgccaccatag

SEQ ID NO: 3408289 - DNA, 25 bp, Homo sapien
ccagcgactggtacttgagagcaaa

SEQ ID NO: 3408290 - DNA, 25 bp, Homo sapien
gagagcaaattggactcccttctgg

SEQ ID NO: 3408291 - DNA, 25 bp, Homo sapien
tcatgtctactgtgctgagccgcag

SEQ ID NO: 3408292 - DNA, 25 bp, Homo sapien
tgctagttcaattctcacttggtgc

SEQ ID NO: 3408293 - DNA, 25 bp, Homo sapien
gcagagcccttatgaccaaaatttt

SEQ ID NO: 3408294 - DNA, 25 bp, Homo sapien
ggccagacttagctattcacatgac

SEQ ID NO: 3408295 - DNA, 25 bp, Homo sapien
tagtccacagtaacacaaggccaga

SEQ ID NO: 3408296 - DNA, 25 bp, Homo sapien
aagcaggtgtcaaggtgcccttgac

SEQ ID NO: 3408297 - DNA, 25 bp, Homo sapien
caggtgctaaaggactctgagattt

SEQ ID NO: 3408298 - DNA, 25 bp, Homo sapien
ctttggaaactctattttgcaggca

SEQ ID NO: 3408299 - DNA, 25 bp, Homo sapien
aaggtgcccttgacccatgagcagg

SEQ ID NO: 3408300 - DNA, 25 bp, Homo sapien
ccaggcctgatgtggatgtatgacc

SEQ ID NO: 3408301 - DNA, 25 bp, Homo sapien
aaagtcccatcctttgttgcccgtg

SEQ ID NO: 3408302 - DNA, 25 bp, Homo sapien
gaactctttaagaacatccagctgg

SEQ ID NO: 3408303 - DNA, 25 bp, Homo sapien
agtaatctgcttgtggaactcttta

SEQ ID NO: 3408304 - DNA, 25 bp, Homo sapien
tgttggtcctgttaagctctttttg

SEQ ID NO: 3408305 - DNA, 25 bp, Homo sapien
acatttctgttacgtcaagtctggg

SEQ ID NO: 3408306 - DNA, 25 bp, Homo sapien
tgttctgtatcaagcaggagtgtct

SEQ ID NO: 3408307 - DNA, 25 bp, Homo sapien
ttgagttctttctaatccccataca

SEQ ID NO: 3408308 - DNA, 25 bp, Homo sapien
tcaagaaaagatgatagccccatcc

SEQ ID NO: 3408309 - DNA, 25 bp, Homo sapien
ggaactcattacgtaccatcacatg

SEQ ID NO: 3408310 - DNA, 25 bp, Homo sapien
gataggatccctactccacagggcc

SEQ ID NO: 3408311 - DNA, 25 bp, Homo sapien
cagattctgacagtggcaaagagcc

SEQ ID NO: 3408312 - DNA, 25 bp, Homo sapien
gaagattgccagctgtaacgggagc

SEQ ID NO: 3408313 - DNA, 25 bp, Homo sapien
gagcatctatgtcttccgggaccga

SEQ ID NO: 3408314 - DNA, 25 bp, Homo sapien
gctggtgccaacctcaacgggatca

SEQ ID NO: 3408315 - DNA, 25 bp, Homo sapien
tgttaaatgtaagcacccctgatcc

SEQ ID NO: 3408316 - DNA, 25 bp, Homo sapien
tattcactgggtggcaagacactgc

SEQ ID NO: 3408317 - DNA, 25 bp, Homo sapien
gtttgtgccaccagatcactgcggc

SEQ ID NO: 3408318 - DNA, 25 bp, Homo sapien
tcactgcggcctgcaagcatggtgg

SEQ ID NO: 3408319 - DNA, 25 bp, Homo sapien
gattgggaaagagtcatctcgtacc

SEQ ID NO: 3408320 - DNA, 25 bp, Homo sapien
tagcatggaatcaccagaggagcct

SEQ ID NO: 3408321 - DNA, 25 bp, Homo sapien
cgtcagggacatcatggatagggcc

SEQ ID NO: 3408322 - DNA, 25 bp, Homo sapien
gaaactgtgtctagaggaggagctc

SEQ ID NO: 3408323 - DNA, 25 bp, Homo sapien
ttcaaagatcggtcacattcaggcc

SEQ ID NO: 3408324 - DNA, 25 bp, Homo sapien
ctaggcagcggacggaaagacagca

SEQ ID NO: 3408325 - DNA, 25 bp, Homo sapien
agactaggcagcggacggaaagaca

SEQ ID NO: 3408326 - DNA, 25 bp, Homo sapien
gatgcagactaggcagcggacggaa

SEQ ID NO: 3408327 - DNA, 25 bp, Homo sapien
atgcagactaggcagcggacggaaa

SEQ ID NO: 3408328 - DNA, 25 bp, Homo sapien
ctggtcagcgccgaggcccccaaga

SEQ ID NO: 3408329 - DNA, 25 bp, Homo sapien
tggtcagcgccgaggcccccaagat

SEQ ID NO: 3408330 - DNA, 25 bp, Homo sapien
gtcagcgccgaggcccccaagatcc

SEQ ID NO: 3408331 - DNA, 25 bp, Homo sapien
ccctggtcagcgccgaggcccccaa

SEQ ID NO: 3408332 - DNA, 25 bp, Homo sapien
cgcgcgggatgagccctgaggagct

SEQ ID NO: 3408333 - DNA, 25 bp, Homo sapien
ctctgcactgggcacgccgctgcgc

SEQ ID NO: 3408334 - DNA, 25 bp, Homo sapien
gataaaaggcacagacgcgcgggat

SEQ ID NO: 3408335 - DNA, 25 bp, Homo sapien
gcctgaccccggtctcagctggctg

SEQ ID NO: 3408336 - DNA, 25 bp, Homo sapien
gctctcccgcctcaccggcagcaac

SEQ ID NO: 3408337 - DNA, 25 bp, Homo sapien
gcaacagaacggagggtcgcccagt

SEQ ID NO: 3408338 - DNA, 25 bp, Homo sapien
tctcccgcctcaccggcagcaacag

SEQ ID NO: 3408339 - DNA, 25 bp, Homo sapien
accggcagcaacagaacggagggtc

SEQ ID NO: 3408340 - DNA, 25 bp, Homo sapien
aacgcttagcgaggttccaggcaca

SEQ ID NO: 3408341 - DNA, 25 bp, Homo sapien
aaatggacaaggaacaatcagggcc

SEQ ID NO: 3408342 - DNA, 25 bp, Homo sapien
ggccccgccgatagttcagagaaga

SEQ ID NO: 3408343 - DNA, 25 bp, Homo sapien
tctgcatgcagggtgaagaccactg

SEQ ID NO: 3408344 - DNA, 25 bp, Homo sapien
tgaggcccaggtgtgtgtgtgtgtg

SEQ ID NO: 3408345 - DNA, 25 bp, Homo sapien
aaaactgaggcccaggtgtgtgtgt

SEQ ID NO: 3408346 - DNA, 25 bp, Homo sapien
actgaggcccaggtgtgtgtgtgtg

SEQ ID NO: 3408347 - DNA, 25 bp, Homo sapien
aaactgaggcccaggtgtgtgtgtg

SEQ ID NO: 3408348 - DNA, 25 bp, Homo sapien
tgggcaagatttcagccacatactc

SEQ ID NO: 3408349 - DNA, 25 bp, Homo sapien
ttgggcaagatttcagccacatact

SEQ ID NO: 3408350 - DNA, 25 bp, Homo sapien
gtgggccacatcattccgtggtctg

SEQ ID NO: 3408351 - DNA, 25 bp, Homo sapien
acatcattccgtggtctgacagtgg

SEQ ID NO: 3408352 - DNA, 25 bp, Homo sapien
tgagagaaaagtccaagcttgggat

SEQ ID NO: 3408353 - DNA, 25 bp, Homo sapien
tcttgacccagacccaaataacatt

SEQ ID NO: 3408354 - DNA, 25 bp, Homo sapien
tggtttaatgctgagagaaaagtcc

SEQ ID NO: 3408355 - DNA, 25 bp, Homo sapien
catgccctgcgaacatggttctttc

SEQ ID NO: 3408356 - DNA, 25 bp, Homo sapien
gaacaaagagctactgagggaacag

SEQ ID NO: 3408357 - DNA, 25 bp, Homo sapien
gctactgagggaacagctaacttca

SEQ ID NO: 3408358 - DNA, 25 bp, Homo sapien
gggaacaaagagctactgagggaac

SEQ ID NO: 3408359 - DNA, 25 bp, Homo sapien
caaagagctactgagggaacagcta

SEQ ID NO: 3408360 - DNA, 25 bp, Homo sapien
cctctaactcattgaagcaggacac

SEQ ID NO: 3408361 - DNA, 25 bp, Homo sapien
gccatcaggatggatacagacctct

SEQ ID NO: 3408362 - DNA, 25 bp, Homo sapien
gtcaaccagagatttgaactgtgca

SEQ ID NO: 3408363 - DNA, 25 bp, Homo sapien
gtccactgctgtcaagtcaaccaga

SEQ ID NO: 3408364 - DNA, 25 bp, Homo sapien
actctgaagttccagtttaactgct

SEQ ID NO: 3408365 - DNA, 25 bp, Homo sapien
cccaaaaccttctcagatctcccaa

SEQ ID NO: 3408366 - DNA, 25 bp, Homo sapien
tgaagttccagtttaactgctgtgt

SEQ ID NO: 3408367 - DNA, 25 bp, Homo sapien
ccagtttaactgctgtgttctattg

SEQ ID NO: 3408368 - DNA, 25 bp, Homo sapien
tacaactacttccaaaggcccaggc

SEQ ID NO: 3408369 - DNA, 25 bp, Homo sapien
tccatctcacaaggctacctggtct

SEQ ID NO: 3408370 - DNA, 25 bp, Homo sapien
ccacagctgtagcttagcatgtcag

SEQ ID NO: 3408371 - DNA, 25 bp, Homo sapien
aagattctcctatgcttacaactac

SEQ ID NO: 3408372 - DNA, 25 bp, Homo sapien
tgtgtaggtcttcacacggatccgt

SEQ ID NO: 3408373 - DNA, 25 bp, Homo sapien
aatgggcgtcagctcatctgtgtag

SEQ ID NO: 3408374 - DNA, 25 bp, Homo sapien
gacagcagactcaatgggcgtcagc

SEQ ID NO: 3408375 - DNA, 25 bp, Homo sapien
gagttgaagcgcagagacaacaggt

SEQ ID NO: 3408376 - DNA, 25 bp, Homo sapien
catcaagactaacaacagggggaag

SEQ ID NO: 3408377 - DNA, 25 bp, Homo sapien
aggggctacactgcatcccgtagtc

SEQ ID NO: 3408378 - DNA, 25 bp, Homo sapien
ggaaagagaccacctcaaacagcca

SEQ ID NO: 3408379 - DNA, 25 bp, Homo sapien
acactgcatcccgtagtctgaacca

SEQ ID NO: 3408380 - DNA, 25 bp, Homo sapien
aaagaagactccaaacatgtcccag

SEQ ID NO: 3408381 - DNA, 25 bp, Homo sapien
tctttccggaaaggatgtccctcga

SEQ ID NO: 3408382 - DNA, 25 bp, Homo sapien
gatcagggtggttagcaaagaagac

SEQ ID NO: 3408383 - DNA, 25 bp, Homo sapien
tagccagatagaggaaagtctttcc

SEQ ID NO: 3408384 - DNA, 25 bp, Homo sapien
caggagcctacttttcacaaggcta

SEQ ID NO: 3408385 - DNA, 25 bp, Homo sapien
gcctctgtcagtaagtctccatcca

SEQ ID NO: 3408386 - DNA, 25 bp, Homo sapien
cacaaggctattggtgacttcccca

SEQ ID NO: 3408387 - DNA, 25 bp, Homo sapien
cattcctctcggttactgactcctg

SEQ ID NO: 3408388 - DNA, 25 bp, Homo sapien
gtcaaatttgcggaactcttgggcc

SEQ ID NO: 3408389 - DNA, 25 bp, Homo sapien
actctccgggggttggcgatagact

SEQ ID NO: 3408390 - DNA, 25 bp, Homo sapien
tcttgtctccggcttcaagcttgag

SEQ ID NO: 3408391 - DNA, 25 bp, Homo sapien
tggcatcaggcttcttgtctccggc

SEQ ID NO: 3408392 - DNA, 25 bp, Homo sapien
ggacactcaatcatagataaggcgc

SEQ ID NO: 3408393 - DNA, 25 bp, Homo sapien
gacactcaatcatagataaggcgct

SEQ ID NO: 3408394 - DNA, 25 bp, Homo sapien
cactcaatcatagataaggcgctgt

SEQ ID NO: 3408395 - DNA, 25 bp, Homo sapien
acactcaatcatagataaggcgctg

SEQ ID NO: 3408396 - DNA, 25 bp, Homo sapien
ctcaaccacgtcctctgagtctcac

SEQ ID NO: 3408397 - DNA, 25 bp, Homo sapien
caaccacgtcctctgagtctcactc

SEQ ID NO: 3408398 - DNA, 25 bp, Homo sapien
gctcaaccacgtcctctgagtctca

SEQ ID NO: 3408399 - DNA, 25 bp, Homo sapien
tcaaccacgtcctctgagtctcact

SEQ ID NO: 3408400 - DNA, 25 bp, Homo sapien
gagaggagacaaatggctaccacca

SEQ ID NO: 3408401 - DNA, 25 bp, Homo sapien
aaaccaggaactgcagggtcgcagc

SEQ ID NO: 3408402 - DNA, 25 bp, Homo sapien
gttgtagtcacaccagagaggagac

SEQ ID NO: 3408403 - DNA, 25 bp, Homo sapien
aaatggctaccaccaggcaaaccag

SEQ ID NO: 3408404 - DNA, 25 bp, Homo sapien
aggctgggaggaaagacctcaaaca

SEQ ID NO: 3408405 - DNA, 25 bp, Homo sapien
caaacatcacttccggggcctctgg

SEQ ID NO: 3408406 - DNA, 25 bp, Homo sapien
aggccacctcccacgctggtgctgt

SEQ ID NO: 3408407 - DNA, 25 bp, Homo sapien
ctcccacgctggtgctgtccatggg

SEQ ID NO: 3408408 - DNA, 25 bp, Homo sapien
agaaacctttgcacaggtcccagag

SEQ ID NO: 3408409 - DNA, 25 bp, Homo sapien
tgtggacgctagttcctcatcctgg

SEQ ID NO: 3408410 - DNA, 25 bp, Homo sapien
tcccaagtgctaagaggaggcccct

SEQ ID NO: 3408411 - DNA, 25 bp, Homo sapien
tcactagctgcgtggagccggtaga

SEQ ID NO: 3408412 - DNA, 25 bp, Homo sapien
gcccagagatctgaacacggtgaaa

SEQ ID NO: 3408413 - DNA, 25 bp, Homo sapien
cggtgaaaagaatcagatgccagac

SEQ ID NO: 3408414 - DNA, 25 bp, Homo sapien
aagatctaggaaacaagatctggtc

SEQ ID NO: 3408415 - DNA, 25 bp, Homo sapien
acagaagcccctgcgcaagatgggt

SEQ ID NO: 3408416 - DNA, 25 bp, Homo sapien
tgatgctggtgcgaaaccgcgacga

SEQ ID NO: 3408417 - DNA, 25 bp, Homo sapien
tcgacaaggtgtacgtgaacatcgg

SEQ ID NO: 3408418 - DNA, 25 bp, Homo sapien
cacgtcggagatggcggtgaccttc

SEQ ID NO: 3408419 - DNA, 25 bp, Homo sapien
cacaagagcctgtcggtgatgctgg

SEQ ID NO: 3408420 - DNA, 25 bp, Homo sapien
ttcaacttacaaatacgatccaggt

SEQ ID NO: 3408421 - DNA, 25 bp, Homo sapien
gaaagaatccctagatgagacctag

SEQ ID NO: 3408422 - DNA, 25 bp, Homo sapien
taaatattgtctctggaatcccaag

SEQ ID NO: 3408423 - DNA, 25 bp, Homo sapien
cctagaagccatttgagtgcccaca

SEQ ID NO: 3408424 - DNA, 25 bp, Homo sapien
cctaagtaggaacatatatatctac

SEQ ID NO: 3408425 - DNA, 25 bp, Homo sapien
tgccattttttagcacagtgtaaac

SEQ ID NO: 3408426 - DNA, 25 bp, Homo sapien
tcaagatgaagtgattatacctaag

SEQ ID NO: 3408427 - DNA, 25 bp, Homo sapien
tctactgtttatatccgttttcatg

SEQ ID NO: 3408428 - DNA, 25 bp, Homo sapien
ggcgtgcctttcctccgaaataata

SEQ ID NO: 3408429 - DNA, 25 bp, Homo sapien
catggtttggtactgcttagctttc

SEQ ID NO: 3408430 - DNA, 25 bp, Homo sapien
taaagagagtaaggcagaacccctg

SEQ ID NO: 3408431 - DNA, 25 bp, Homo sapien
tcgaaggaaccacagactcacatgt

SEQ ID NO: 3408432 - DNA, 25 bp, Homo sapien
atttattgagcacctcgtatgtgct

SEQ ID NO: 3408433 - DNA, 25 bp, Homo sapien
tttattgagcacctcgtatgtgctg

SEQ ID NO: 3408434 - DNA, 25 bp, Homo sapien
cactctgagttatgcagtgcacagc

SEQ ID NO: 3408435 - DNA, 25 bp, Homo sapien
caccactgcaatatgggtcagcaaa

SEQ ID NO: 3408436 - DNA, 25 bp, Homo sapien
cccatcttagggtcatcatactgaa

SEQ ID NO: 3408437 - DNA, 25 bp, Homo sapien
gcctaggcagctgtacatagcacct

SEQ ID NO: 3408438 - DNA, 25 bp, Homo sapien
gaactggtagctcggtcgtttcgca

SEQ ID NO: 3408439 - DNA, 25 bp, Homo sapien
gaatttcccctcaagtatgtggcag

SEQ ID NO: 3408440 - DNA, 25 bp, Homo sapien
tacctcgtgctgatagatggccaca

SEQ ID NO: 3408441 - DNA, 25 bp, Homo sapien
taacacttctgtagaggactccctg

SEQ ID NO: 3408442 - DNA, 25 bp, Homo sapien
ccccagctaatatggcagtttgctt

SEQ ID NO: 3408443 - DNA, 25 bp, Homo sapien
taatcatttgataggaatgctgcat

SEQ ID NO: 3408444 - DNA, 25 bp, Homo sapien
gataggaatgctgcatctatttaaa

SEQ ID NO: 3408445 - DNA, 25 bp, Homo sapien
aatgggaacgctgtaattctgagga

SEQ ID NO: 3408446 - DNA, 25 bp, Homo sapien
ttgacagtagcaccttgcaaatgga

SEQ ID NO: 3408447 - DNA, 25 bp, Homo sapien
tgatcctgcaacttttcagctgcaa

SEQ ID NO: 3408448 - DNA, 25 bp, Homo sapien
caatttcgtaatgtagacttcagca

SEQ ID NO: 3408449 - DNA, 25 bp, Homo sapien
gccatccctaacttgtgtctctgtg

SEQ ID NO: 3408450 - DNA, 25 bp, Homo sapien
cattacctttaactgaggaggttga

SEQ ID NO: 3408451 - DNA, 25 bp, Homo sapien
ggaatcagacttgagttctagctct

SEQ ID NO: 3408452 - DNA, 25 bp, Homo sapien
aaatccccttcaacattcctgggat

SEQ ID NO: 3408453 - DNA, 25 bp, Homo sapien
tggtatctcaccaggacatcttagt

SEQ ID NO: 3408454 - DNA, 25 bp, Homo sapien
cattatgcttctagaggagacatcc

SEQ ID NO: 3408455 - DNA, 25 bp, Homo sapien
tattaaccttgaaccgactctgtgt

SEQ ID NO: 3408456 - DNA, 25 bp, Homo sapien
tgcataatagcatgtcaccaccatc

SEQ ID NO: 3408457 - DNA, 25 bp, Homo sapien
tgtagactacttggccatacttgat

SEQ ID NO: 3408458 - DNA, 25 bp, Homo sapien
caagaccagcctgggcaacatggtg

SEQ ID NO: 3408459 - DNA, 25 bp, Homo sapien
ggtggatcacctgaggtcaagagtt

SEQ ID NO: 3408460 - DNA, 25 bp, Homo sapien
cccaatactttggggggctgaggcg

SEQ ID NO: 3408461 - DNA, 25 bp, Homo sapien
tgaaaccctgcctctactaaaagta

SEQ ID NO: 3408462 - DNA, 25 bp, Homo sapien
tgtcaatatatgtggcatgctgaga

SEQ ID NO: 3408463 - DNA, 25 bp, Homo sapien
tcatgccactgactaagctgtgggt

SEQ ID NO: 3408464 - DNA, 25 bp, Homo sapien
gctgtgggtctccaaaaataggaat

SEQ ID NO: 3408465 - DNA, 25 bp, Homo sapien
caaaaagcgtggttggtacaaatca

SEQ ID NO: 3408466 - DNA, 25 bp, Homo sapien
tcaccaccatctgacgacatgacag

SEQ ID NO: 3408467 - DNA, 25 bp, Homo sapien
aataaacgccactcctaaaggctgg

SEQ ID NO: 3408468 - DNA, 25 bp, Homo sapien
aaagcaccgcaagcacaaagtttgg

SEQ ID NO: 3408469 - DNA, 25 bp, Homo sapien
catgacagcctgtctggagactgag

SEQ ID NO: 3408470 - DNA, 25 bp, Homo sapien
tcgcctagcgcagttggtaatcccg

SEQ ID NO: 3408471 - DNA, 25 bp, Homo sapien
tgaatattgattacgcgtcgcagcg

SEQ ID NO: 3408472 - DNA, 25 bp, Homo sapien
ggtcaaaacagccaatcgcctagcg

SEQ ID NO: 3408473 - DNA, 25 bp, Homo sapien
gacaacatgaaactctaggccgaga

SEQ ID NO: 3408474 - DNA, 25 bp, Homo sapien
gaatctggttctgagctaaagttga

SEQ ID NO: 3408475 - DNA, 25 bp, Homo sapien
ttgtagctgaccaccaaaagcagtc

SEQ ID NO: 3408476 - DNA, 25 bp, Homo sapien
gaagcattcatgctcacaagttttg

SEQ ID NO: 3408477 - DNA, 25 bp, Homo sapien
gcctaaaatgatgaccagctaatta

SEQ ID NO: 3408478 - DNA, 25 bp, Homo sapien
aatgttagggaatcagccactcaac

SEQ ID NO: 3408479 - DNA, 25 bp, Homo sapien
tatttaacagataagggcctcccaa

SEQ ID NO: 3408480 - DNA, 25 bp, Homo sapien
tcccaaactgcctagaggtaacggc

SEQ ID NO: 3408481 - DNA, 25 bp, Homo sapien
tatgaccttttagaagaagctgtgg

SEQ ID NO: 3408482 - DNA, 25 bp, Homo sapien
cgggtggatcgcttgggaccagcct

SEQ ID NO: 3408483 - DNA, 25 bp, Homo sapien
gaccaccagactcttgttgctaata

SEQ ID NO: 3408484 - DNA, 25 bp, Homo sapien
gtggtcctcctaactctattctgtg

SEQ ID NO: 3408485 - DNA, 25 bp, Homo sapien
cagaatgtattaactcaggctgggc

SEQ ID NO: 3408486 - DNA, 25 bp, Homo sapien
tctctacagtgcaaggcttacccta

SEQ ID NO: 3408487 - DNA, 25 bp, Homo sapien
ggctcttgccgaatgttagtctggt

SEQ ID NO: 3408488 - DNA, 25 bp, Homo sapien
agtctggtgaatgttgcggttagca

SEQ ID NO: 3408489 - DNA, 25 bp, Homo sapien
gagaagaccttcttgagacagttca

SEQ ID NO: 3408490 - DNA, 25 bp, Homo sapien
tgttgcggttagcatttaggacttt

SEQ ID NO: 3408491 - DNA, 25 bp, Homo sapien
gactcaagcagtgccccgttctcgg

SEQ ID NO: 3408492 - DNA, 25 bp, Homo sapien
cagtgccccgttctcggcctcccaa

SEQ ID NO: 3408493 - DNA, 25 bp, Homo sapien
ttgaactgccagactcaagcagtgc

SEQ ID NO: 3408494 - DNA, 25 bp, Homo sapien
gagacagtctggctccattgtccag

SEQ ID NO: 3408495 - DNA, 25 bp, Homo sapien
tttcgggaattcacagtctgcagca

SEQ ID NO: 3408496 - DNA, 25 bp, Homo sapien
tttctcagaagacgcgtgtgcaggc

SEQ ID NO: 3408497 - DNA, 25 bp, Homo sapien
ggaaggttcccgcagatagagtctg

SEQ ID NO: 3408498 - DNA, 25 bp, Homo sapien
tctagccccgggatcagagattcct

SEQ ID NO: 3408499 - DNA, 25 bp, Homo sapien
tacggtgagctactgctttctaatc

SEQ ID NO: 3408500 - DNA, 25 bp, Homo sapien
ttagtcttctgacaggcacctagga

SEQ ID NO: 3408501 - DNA, 25 bp, Homo sapien
gattacggtgagctactgctttcta

SEQ ID NO: 3408502 - DNA, 25 bp, Homo sapien
tgcctccttttagtcttctgacagg

SEQ ID NO: 3408503 - DNA, 25 bp, Homo sapien
caaagtttggccatagttgggtacg

SEQ ID NO: 3408504 - DNA, 25 bp, Homo sapien
tgtaaggaaaaaagacgatgacttc

SEQ ID NO: 3408505 - DNA, 25 bp, Homo sapien
cttgtaaggaaaaaagacgatgact

SEQ ID NO: 3408506 - DNA, 25 bp, Homo sapien
ccgtctcggccccctaaagtgctga

SEQ ID NO: 3408507 - DNA, 25 bp, Homo sapien
ctctgtttcccaggttggagtgcag

SEQ ID NO: 3408508 - DNA, 25 bp, Homo sapien
cgtctcggccccctaaagtgctgag

SEQ ID NO: 3408509 - DNA, 25 bp, Homo sapien
tcgctctgtttcccaggttggagtg

SEQ ID NO: 3408510 - DNA, 25 bp, Homo sapien
taatgcgtgtggctcccttggcatc

SEQ ID NO: 3408511 - DNA, 25 bp, Homo sapien
ccttggcatcttgctcaactttgtc

SEQ ID NO: 3408512 - DNA, 25 bp, Homo sapien
tcttgagcgtgccaagcacacagct

SEQ ID NO: 3408513 - DNA, 25 bp, Homo sapien
tgctgtatctgtgaatgtgtctgga

SEQ ID NO: 3408514 - DNA, 25 bp, Homo sapien
tataaggtatttcacatttcccaac

SEQ ID NO: 3408515 - DNA, 25 bp, Homo sapien
tctacccttcatataaggtatttca

SEQ ID NO: 3408516 - DNA, 25 bp, Homo sapien
tcatataaggtatttcacatttccc

SEQ ID NO: 3408517 - DNA, 25 bp, Homo sapien
tcttttctacccttcatataaggta

SEQ ID NO: 3408518 - DNA, 25 bp, Homo sapien
cttggtagccctgcaacgtcccact

SEQ ID NO: 3408519 - DNA, 25 bp, Homo sapien
gcctgtagcagggattgaatattcg

SEQ ID NO: 3408520 - DNA, 25 bp, Homo sapien
agccctgcaacgtcccactcagtgt

SEQ ID NO: 3408521 - DNA, 25 bp, Homo sapien
ggattgaatattcgtgcagatgcat

SEQ ID NO: 3408522 - DNA, 25 bp, Homo sapien
accgagacccctactgagagcgcag

SEQ ID NO: 3408523 - DNA, 25 bp, Homo sapien
cacaccaggtccacggcgccgggtt

SEQ ID NO: 3408524 - DNA, 25 bp, Homo sapien
cggcgccgggttcgggtgggcagag

SEQ ID NO: 3408525 - DNA, 25 bp, Homo sapien
tgggcagaggttgaccgagacccct

SEQ ID NO: 3408526 - DNA, 25 bp, Homo sapien
acacgccggagcctagcgcggctgc

SEQ ID NO: 3408527 - DNA, 25 bp, Homo sapien
ctgctgcagggagccgcggcgagcg

SEQ ID NO: 3408528 - DNA, 25 bp, Homo sapien
cctctgaatattcatcgcttcctcc

SEQ ID NO: 3408529 - DNA, 25 bp, Homo sapien
ctcctccgcgcgtcatgcggctggg

SEQ ID NO: 3408530 - DNA, 25 bp, Homo sapien
ctccgccagccggtccgcctcgtcc

SEQ ID NO: 3408531 - DNA, 25 bp, Homo sapien
aacgtgccccggacgcgcgaatcgg

SEQ ID NO: 3408532 - DNA, 25 bp, Homo sapien
gccccgcgcgccctggaacgtgccc

SEQ ID NO: 3408533 - DNA, 25 bp, Homo sapien
cgcgaatcgggccccgccgtgcgcc

SEQ ID NO: 3408534 - DNA, 25 bp, Homo sapien
cgcccagcgcagcccgggcgagcgc

SEQ ID NO: 3408535 - DNA, 25 bp, Homo sapien
cgcagcccgggcgagcgcggaggca

SEQ ID NO: 3408536 - DNA, 25 bp, Homo sapien
cgagcgcggaggcagccgcgcctcc

SEQ ID NO: 3408537 - DNA, 25 bp, Homo sapien
gggcgagcgcggaggcagccgcgcc

SEQ ID NO: 3408538 - DNA, 25 bp, Homo sapien
tgttggaatcatctctgaccgtcct

SEQ ID NO: 3408539 - DNA, 25 bp, Homo sapien
gagtcagacactgcaactagcaaag

SEQ ID NO: 3408540 - DNA, 25 bp, Homo sapien
gctcttaggaaggtagtcacatact

SEQ ID NO: 3408541 - DNA, 25 bp, Homo sapien
ttttccgggcctactaagcactgag

SEQ ID NO: 3408542 - DNA, 25 bp, Homo sapien
ctaaccataaaccaatttgctgttt

SEQ ID NO: 3408543 - DNA, 25 bp, Homo sapien
ctgttttcgtaaactgtctgcaaac

SEQ ID NO: 3408544 - DNA, 25 bp, Homo sapien
tgctgttttcgtaaactgtctgcaa

SEQ ID NO: 3408545 - DNA, 25 bp, Homo sapien
gttttcgtaaactgtctgcaaacaa

SEQ ID NO: 3408546 - DNA, 25 bp, Homo sapien
tcgtggggcccaacttgaagtcagc

SEQ ID NO: 3408547 - DNA, 25 bp, Homo sapien
aacttgaagtcagctcaaagtcacg

SEQ ID NO: 3408548 - DNA, 25 bp, Homo sapien
gggcccaacttgaagtcagctcaaa

SEQ ID NO: 3408549 - DNA, 25 bp, Homo sapien
tatcgtggggcccaacttgaagtca

SEQ ID NO: 3408550 - DNA, 25 bp, Homo sapien
ttgagattgcagtgaattacgtttg

SEQ ID NO: 3408551 - DNA, 25 bp, Homo sapien
taaaacgagaggagcccttgagccc

SEQ ID NO: 3408552 - DNA, 25 bp, Homo sapien
gcagtgaattacgtttgtaccactg

SEQ ID NO: 3408553 - DNA, 25 bp, Homo sapien
ggctaaaacgagaggagcccttgag

SEQ ID NO: 3408554 - DNA, 25 bp, Homo sapien
ggcgctatcaaggttcaccgcagct

SEQ ID NO: 3408555 - DNA, 25 bp, Homo sapien
catcttgcacacacccagagttatt

SEQ ID NO: 3408556 - DNA, 25 bp, Homo sapien
aaaagtattgtgactgagctcagtt

SEQ ID NO: 3408557 - DNA, 25 bp, Homo sapien
gagttattccatactactctgtgga

SEQ ID NO: 3408558 - DNA, 25 bp, Homo sapien
cgtggaaacaggtggcaagtcagca

SEQ ID NO: 3408559 - DNA, 25 bp, Homo sapien
taaattgtgctatcagggaagttcc

SEQ ID NO: 3408560 - DNA, 25 bp, Homo sapien
tgaccgccacagaaaatgtaccgag

SEQ ID NO: 3408561 - DNA, 25 bp, Homo sapien
catagccagagttggccaggtcaca

SEQ ID NO: 3408562 - DNA, 25 bp, Homo sapien
cattagaaggataggcccaaggtca

SEQ ID NO: 3408563 - DNA, 25 bp, Homo sapien
ggaaaacttccccatgacacaacga

SEQ ID NO: 3408564 - DNA, 25 bp, Homo sapien
cagaagagactccaagcattagaag

SEQ ID NO: 3408565 - DNA, 25 bp, Homo sapien
gagaagttggctctgactccaaagc

SEQ ID NO: 3408566 - DNA, 25 bp, Homo sapien
acacgtgcgcacatatataactgaa

SEQ ID NO: 3408567 - DNA, 25 bp, Homo sapien
tacctgctgcaggaatggtttccag

SEQ ID NO: 3408568 - DNA, 25 bp, Homo sapien
gttttctggcaacaggtgaacccat

SEQ ID NO: 3408569 - DNA, 25 bp, Homo sapien
tccaaagctttcagtcggcccactt

SEQ ID NO: 3408570 - DNA, 25 bp, Homo sapien
ggcccatgcaaatcagtgccggagc

SEQ ID NO: 3408571 - DNA, 25 bp, Homo sapien
caggcccatgcaaatcagtgccgga

SEQ ID NO: 3408572 - DNA, 25 bp, Homo sapien
attcaggcccatgcaaatcagtgcc

SEQ ID NO: 3408573 - DNA, 25 bp, Homo sapien
tcaggcccatgcaaatcagtgccgg

SEQ ID NO: 3408574 - DNA, 25 bp, Homo sapien
gatcacacagcttagtaagaggaag

SEQ ID NO: 3408575 - DNA, 25 bp, Homo sapien
tcattagggtgtcatgaggattcac

SEQ ID NO: 3408576 - DNA, 25 bp, Homo sapien
ctcacagaggttagtaatgtcccaa

SEQ ID NO: 3408577 - DNA, 25 bp, Homo sapien
gagaagagacctacctcattagggt

SEQ ID NO: 3408578 - DNA, 25 bp, Homo sapien
taatggtgaaaaattggctactgct

SEQ ID NO: 3408579 - DNA, 25 bp, Homo sapien
taggcaagtggtatgtgtctaatac

SEQ ID NO: 3408580 - DNA, 25 bp, Homo sapien
aaggacctgaaacggtccctgctct

SEQ ID NO: 3408581 - DNA, 25 bp, Homo sapien
gatattggtccttgcaccacttgta

SEQ ID NO: 3408582 - DNA, 25 bp, Homo sapien
aagacagcaggaacgcacagaagaa

SEQ ID NO: 3408583 - DNA, 25 bp, Homo sapien
agaagaaaaaggcctcagccgggtg

SEQ ID NO: 3408584 - DNA, 25 bp, Homo sapien
aggactccccacaagaagccatccg

SEQ ID NO: 3408585 - DNA, 25 bp, Homo sapien
tcacaggactccccacaagaagcca

SEQ ID NO: 3408586 - DNA, 25 bp, Homo sapien
cacttcacaggtcccccacaccatg

SEQ ID NO: 3408587 - DNA, 25 bp, Homo sapien
acaggactccccacaagaagccatc

SEQ ID NO: 3408588 - DNA, 25 bp, Homo sapien
cgactagatcacgagttcctggact

SEQ ID NO: 3408589 - DNA, 25 bp, Homo sapien
tgtgggtcaaaactagctgatctgc

SEQ ID NO: 3408590 - DNA, 25 bp, Homo sapien
cagggaaatcctgctgaacgaacag

SEQ ID NO: 3408591 - DNA, 25 bp, Homo sapien
tggtataagaccttctgacaaggcc

SEQ ID NO: 3408592 - DNA, 25 bp, Homo sapien
tcttctcccaaggcccctccagaag

SEQ ID NO: 3408593 - DNA, 25 bp, Homo sapien
actcttctcccaaggcccctccaga

SEQ ID NO: 3408594 - DNA, 25 bp, Homo sapien
cctggaggactcttctcccaaggcc

SEQ ID NO: 3408595 - DNA, 25 bp, Homo sapien
ttctcccaaggcccctccagaagca

SEQ ID NO: 3408596 - DNA, 25 bp, Homo sapien
agagctctgaaacctctctcaaggg

SEQ ID NO: 3408597 - DNA, 25 bp, Homo sapien
gagctaccgtgcctaaccttgaact

SEQ ID NO: 3408598 - DNA, 25 bp, Homo sapien
agatggatgagagctctgaaacctc

SEQ ID NO: 3408599 - DNA, 25 bp, Homo sapien
gctaagtgccaggatatgaagatgg

SEQ ID NO: 3408600 - DNA, 25 bp, Homo sapien
aactgggttctgatagaccactggc

SEQ ID NO: 3408601 - DNA, 25 bp, Homo sapien
tcagatcccgaggaccattcagtca

SEQ ID NO: 3408602 - DNA, 25 bp, Homo sapien
tgagtctacctagtaccggcactgg

SEQ ID NO: 3408603 - DNA, 25 bp, Homo sapien
gacctctgacccctgtatgctgctg

SEQ ID NO: 3408604 - DNA, 25 bp, Homo sapien
gctggcagtcaggccacccaaatga

SEQ ID NO: 3408605 - DNA, 25 bp, Homo sapien
catgagaagcaagattctcctgagc

SEQ ID NO: 3408606 - DNA, 25 bp, Homo sapien
agtcaggccacccaaatgacaacca

SEQ ID NO: 3408607 - DNA, 25 bp, Homo sapien
ccatgagaagcaagattctcctgag

SEQ ID NO: 3408608 - DNA, 25 bp, Homo sapien
ctgagtccccaggtggccgcccaca

SEQ ID NO: 3408609 - DNA, 25 bp, Homo sapien
gtcttcatcaccactgggagggcag

SEQ ID NO: 3408610 - DNA, 25 bp, Homo sapien
gagggcagcactttctttgaagtgg

SEQ ID NO: 3408611 - DNA, 25 bp, Homo sapien
cggaaggtcttcatcaccactggga

SEQ ID NO: 3408612 - DNA, 25 bp, Homo sapien
gaaggtcttcatcaccactgggagg

SEQ ID NO: 3408613 - DNA, 25 bp, Homo sapien
tacccaagtaaaggccagatcccag

SEQ ID NO: 3408614 - DNA, 25 bp, Homo sapien
ccaagtaaaggccagatcccagagg

SEQ ID NO: 3408615 - DNA, 25 bp, Homo sapien
agggccacatgaatacccaagtaaa

SEQ ID NO: 3408616 - DNA, 25 bp, Homo sapien
catgaatacccaagtaaaggccaga

SEQ ID NO: 3408617 - DNA, 25 bp, Homo sapien
gacactctggttgcccctgcacatt

SEQ ID NO: 3408618 - DNA, 25 bp, Homo sapien
gatccttcagacctaaacagctggc

SEQ ID NO: 3408619 - DNA, 25 bp, Homo sapien
cctactaactctggaacacatcatg

SEQ ID NO: 3408620 - DNA, 25 bp, Homo sapien
gctggcttcacccaaacagatggac

SEQ ID NO: 3408621 - DNA, 25 bp, Homo sapien
gataactcacatgcctaatacacag

SEQ ID NO: 3408622 - DNA, 25 bp, Homo sapien
ggagcagtcactagcacataacaga

SEQ ID NO: 3408623 - DNA, 25 bp, Homo sapien
aatggaagttcttgaaagcgggatc

SEQ ID NO: 3408624 - DNA, 25 bp, Homo sapien
taaatgaatttcctacagcaggttc

SEQ ID NO: 3408625 - DNA, 25 bp, Homo sapien
tcactgcaacctccgacctccacca

SEQ ID NO: 3408626 - DNA, 25 bp, Homo sapien
actgcaacctccgacctccaccagg

SEQ ID NO: 3408627 - DNA, 25 bp, Homo sapien
tgcaacctccgacctccaccaggtt

SEQ ID NO: 3408628 - DNA, 25 bp, Homo sapien
cagtggcatgatcttggctcactgc

SEQ ID NO: 3408629 - DNA, 25 bp, Homo sapien
cagatgctactactctcaggtggga

SEQ ID NO: 3408630 - DNA, 25 bp, Homo sapien
cagtgtgccaggcttgttatccagc

SEQ ID NO: 3408631 - DNA, 25 bp, Homo sapien
tcagtgtggctagccctcagatgct

SEQ ID NO: 3408632 - DNA, 25 bp, Homo sapien
caggtgggacataagccagtgctac

SEQ ID NO: 3408633 - DNA, 25 bp, Homo sapien
acagagcacttccacaaacacggtg

SEQ ID NO: 3408634 - DNA, 25 bp, Homo sapien
aacacggtgcatgcaggtagaagag

SEQ ID NO: 3408635 - DNA, 25 bp, Homo sapien
ccacaaacacggtgcatgcaggtag

SEQ ID NO: 3408636 - DNA, 25 bp, Homo sapien
cacagagcacttccacaaacacggt

SEQ ID NO: 3408637 - DNA, 25 bp, Homo sapien
tcctgagactaatactggtgtcact

SEQ ID NO: 3408638 - DNA, 25 bp, Homo sapien
tgtgacactctaaactgtccctcac

SEQ ID NO: 3408639 - DNA, 25 bp, Homo sapien
gaaaaactaaccaggagtcaatgat

SEQ ID NO: 3408640 - DNA, 25 bp, Homo sapien
ggtgtcactgcccaaagctctatga

SEQ ID NO: 3408641 - DNA, 25 bp, Homo sapien
caggtatctaaccctccctgggcag

SEQ ID NO: 3408642 - DNA, 25 bp, Homo sapien
ccaggtatctaaccctccctgggca

SEQ ID NO: 3408643 - DNA, 25 bp, Homo sapien
gggcctctgctctatcctcccaggt

SEQ ID NO: 3408644 - DNA, 25 bp, Homo sapien
ctgctctatcctcccaggtatctaa

SEQ ID NO: 3408645 - DNA, 25 bp, Homo sapien
ggagacgtacccacaaagcaatatt

SEQ ID NO: 3408646 - DNA, 25 bp, Homo sapien
ttaatgtctttggatcgccactagc

SEQ ID NO: 3408647 - DNA, 25 bp, Homo sapien
caagtaagacgcaaggtggagacgt

SEQ ID NO: 3408648 - DNA, 25 bp, Homo sapien
tcctgaagtttcaccaaactcagct

SEQ ID NO: 3408649 - DNA, 25 bp, Homo sapien
gtgctaggatttacaggcatgagcc

SEQ ID NO: 3408650 - DNA, 25 bp, Homo sapien
tcgtgttactcaggctggaatgcaa

SEQ ID NO: 3408651 - DNA, 25 bp, Homo sapien
gctgcaacctctgcctcccaggttc

SEQ ID NO: 3408652 - DNA, 25 bp, Homo sapien
atggcacgatctcggctcgctgcaa

SEQ ID NO: 3408653 - DNA, 25 bp, Homo sapien
gagctctccgaagcagttttgtggg

SEQ ID NO: 3408654 - DNA, 25 bp, Homo sapien
gcaggcaaacttgggacctaagagc

SEQ ID NO: 3408655 - DNA, 25 bp, Homo sapien
gggacctaagagctctccgaagcag

SEQ ID NO: 3408656 - DNA, 25 bp, Homo sapien
aacttgggacctaagagctctccga

SEQ ID NO: 3408657 - DNA, 25 bp, Homo sapien
ggctgtgcgggcaggacctcatcca

SEQ ID NO: 3408658 - DNA, 25 bp, Homo sapien
tgcaggcctagggccaatgttgtgc

SEQ ID NO: 3408659 - DNA, 25 bp, Homo sapien
caggcatgggtatcaacgccgaatg

SEQ ID NO: 3408660 - DNA, 25 bp, Homo sapien
tatcaacgccgaatgaggctgtgcg

SEQ ID NO: 3408661 - DNA, 25 bp, Homo sapien
tcagagttgggttaggcttctcagc

SEQ ID NO: 3408662 - DNA, 25 bp, Homo sapien
accaacagtacattgaagtccagag

SEQ ID NO: 3408663 - DNA, 25 bp, Homo sapien
cccccattgatgttgtgtttcataa

SEQ ID NO: 3408664 - DNA, 25 bp, Homo sapien
gttttgaaaccaacagtacattgaa

SEQ ID NO: 3408665 - DNA, 25 bp, Homo sapien
gagcagctcagtggcttatccttgg

SEQ ID NO: 3408666 - DNA, 25 bp, Homo sapien
tccttggtcactatgcgcagataca

SEQ ID NO: 3408667 - DNA, 25 bp, Homo sapien
cgcagatacagattagatgtcaaca

SEQ ID NO: 3408668 - DNA, 25 bp, Homo sapien
gatgaacaggtacttgtatcccagg

SEQ ID NO: 3408669 - DNA, 25 bp, Homo sapien
ccagaacagcatgggccaaaggaca

SEQ ID NO: 3408670 - DNA, 25 bp, Homo sapien
cacccaagtgagaaggactccactc

SEQ ID NO: 3408671 - DNA, 25 bp, Homo sapien
tccacccaagtgagaaggactccac

SEQ ID NO: 3408672 - DNA, 25 bp, Homo sapien
agaacagcatgggccaaaggacagg

SEQ ID NO: 3408673 - DNA, 25 bp, Homo sapien
tggtcaaggaacagaaacgctcagc

SEQ ID NO: 3408674 - DNA, 25 bp, Homo sapien
cacagtaggccttcaatgagtagca

SEQ ID NO: 3408675 - DNA, 25 bp, Homo sapien
gataaaacccagcatagtgagctca

SEQ ID NO: 3408676 - DNA, 25 bp, Homo sapien
caaaagtggccaacaggaactagcc

SEQ ID NO: 3408677 - DNA, 25 bp, Homo sapien
cttcctcatgtctttcgcatgtgcg

SEQ ID NO: 3408678 - DNA, 25 bp, Homo sapien
gtctttcgcatgtgcgcagtccctc

SEQ ID NO: 3408679 - DNA, 25 bp, Homo sapien
catgtctttcgcatgtgcgcagtcc

SEQ ID NO: 3408680 - DNA, 25 bp, Homo sapien
cagagaaggctgtgcgggccaaggc

SEQ ID NO: 3408681 - DNA, 25 bp, Homo sapien
agactctcagtgcagcatttggtgg

SEQ ID NO: 3408682 - DNA, 25 bp, Homo sapien
gaaggcactgacctcccaagcaaag

SEQ ID NO: 3408683 - DNA, 25 bp, Homo sapien
gcactgacctcccaagcaaaggcaa

SEQ ID NO: 3408684 - DNA, 25 bp, Homo sapien
tggatgaaggcactgacctcccaag

SEQ ID NO: 3408685 - DNA, 25 bp, Homo sapien
tgagaaactgtaccagaacctggaa

SEQ ID NO: 3408686 - DNA, 25 bp, Homo sapien
gaacctggaagcttactagtgggaa

SEQ ID NO: 3408687 - DNA, 25 bp, Homo sapien
ccttagataggcgtcagctgtaaaa

SEQ ID NO: 3408688 - DNA, 25 bp, Homo sapien
taagggagctttagaaccaccctgc

SEQ ID NO: 3408689 - DNA, 25 bp, Homo sapien
cagcatggtatagtggttaaacacc

SEQ ID NO: 3408690 - DNA, 25 bp, Homo sapien
tatcctgctcaataacatgaaggcc

SEQ ID NO: 3408691 - DNA, 25 bp, Homo sapien
tgacacacactgagcgggcttagag

SEQ ID NO: 3408692 - DNA, 25 bp, Homo sapien
tggcatagtaagcaccccatagggt

SEQ ID NO: 3408693 - DNA, 25 bp, Homo sapien
gcaccattggcagcggcattgcttt

SEQ ID NO: 3408694 - DNA, 25 bp, Homo sapien
tgtccgcagaatggtgtctcctcca

SEQ ID NO: 3408695 - DNA, 25 bp, Homo sapien
tccgaggagggactttgaaagtgca

SEQ ID NO: 3408696 - DNA, 25 bp, Homo sapien
attgaggaagtcatccgcaccattg

SEQ ID NO: 3408697 - DNA, 25 bp, Homo sapien
gcctattgagacatgggccttctgt

SEQ ID NO: 3408698 - DNA, 25 bp, Homo sapien
gaagaactgcacttgttggaccaat

SEQ ID NO: 3408699 - DNA, 25 bp, Homo sapien
taagcccgtccccaagggctatgga

SEQ ID NO: 3408700 - DNA, 25 bp, Homo sapien
gaaaaacaagaaggcatgctttggg

SEQ ID NO: 3408701 - DNA, 25 bp, Homo sapien
ccaaaataagtattatacagtcaag

SEQ ID NO: 3408702 - DNA, 25 bp, Homo sapien
aacaaattaattgtcaatgcaaggc

SEQ ID NO: 3408703 - DNA, 25 bp, Homo sapien
ccataaacaaattaattgtcaatgc

SEQ ID NO: 3408704 - DNA, 25 bp, Homo sapien
attaattgtcaatgcaaggccaggc

SEQ ID NO: 3408705 - DNA, 25 bp, Homo sapien
gagcatctgctaaacaaggtcacca

SEQ ID NO: 3408706 - DNA, 25 bp, Homo sapien
cattttagaatagagactgccagta

SEQ ID NO: 3408707 - DNA, 25 bp, Homo sapien
gacattttcagctacgtgggtttac

SEQ ID NO: 3408708 - DNA, 25 bp, Homo sapien
gaaaggatcctttcactatgagtcc

SEQ ID NO: 3408709 - DNA, 25 bp, Homo sapien
tatgcttgcttaatgtgtaaaaccc

SEQ ID NO: 3408710 - DNA, 25 bp, Homo sapien
tagctcccctgtatgcaaaggaacc

SEQ ID NO: 3408711 - DNA, 25 bp, Homo sapien
gctgtctcagctggtatacacccac

SEQ ID NO: 3408712 - DNA, 25 bp, Homo sapien
ggccaaacgactgacagccatcact

SEQ ID NO: 3408713 - DNA, 25 bp, Homo sapien
gatcactccccaggtaaacagatgg

SEQ ID NO: 3408714 - DNA, 25 bp, Homo sapien
tcaggccctgtgtaaggtaccccag

SEQ ID NO: 3408715 - DNA, 25 bp, Homo sapien
tcttaaatgcaaccgccacagggtc

SEQ ID NO: 3408716 - DNA, 25 bp, Homo sapien
ggagagaagctactacagtcaggcc

SEQ ID NO: 3408717 - DNA, 25 bp, Homo sapien
gaagactgtagcacgctccgtaagg

SEQ ID NO: 3408718 - DNA, 25 bp, Homo sapien
tcattcctggaagagtcggtcactc

SEQ ID NO: 3408719 - DNA, 25 bp, Homo sapien
caaacaagagcatcaaagggtccat

SEQ ID NO: 3408720 - DNA, 25 bp, Homo sapien
tcctgggacgaccatcaaaactggg

SEQ ID NO: 3408721 - DNA, 25 bp, Homo sapien
catatttagcaatggtcctcggcgg

SEQ ID NO: 3408722 - DNA, 25 bp, Homo sapien
tgtggcgaccgaccaacacaaaagc

SEQ ID NO: 3408723 - DNA, 25 bp, Homo sapien
gaagtggaagttcccttctgcctga

SEQ ID NO: 3408724 - DNA, 25 bp, Homo sapien
gaacaacagccacacatttgtggcg

SEQ ID NO: 3408725 - DNA, 25 bp, Homo sapien
caagatggaccccaagcagcaaagt

SEQ ID NO: 3408726 - DNA, 25 bp, Homo sapien
catcgtggaatgtgaaactgtgtcg

SEQ ID NO: 3408727 - DNA, 25 bp, Homo sapien
gggctcagctgtatcaccaatcaga

SEQ ID NO: 3408728 - DNA, 25 bp, Homo sapien
tcacatgaaccaagcagtcagagct

SEQ ID NO: 3408729 - DNA, 25 bp, Homo sapien
ggaccgctgaaaacttcacgggctg

SEQ ID NO: 3408730 - DNA, 25 bp, Homo sapien
tagcttcacgagaatctcagcactt

SEQ ID NO: 3408731 - DNA, 25 bp, Homo sapien
ttagcttcatttagcttcacgagaa

SEQ ID NO: 3408732 - DNA, 25 bp, Homo sapien
taacaaggaccgctgaaaacttcac

SEQ ID NO: 3408733 - DNA, 25 bp, Homo sapien
tgtcaccaggagagtccggtacagc

SEQ ID NO: 3408734 - DNA, 25 bp, Homo sapien
cagttattacaagccttcaagaggg

SEQ ID NO: 3408735 - DNA, 25 bp, Homo sapien
gtacagcacagcttaggccagggcc

SEQ ID NO: 3408736 - DNA, 25 bp, Homo sapien
cagcctcccagtgctctagatgaga

SEQ ID NO: 3408737 - DNA, 25 bp, Homo sapien
gatgacctctatagagggcccatag

SEQ ID NO: 3408738 - DNA, 25 bp, Homo sapien
aggaatccccaggtgatgacctcta

SEQ ID NO: 3408739 - DNA, 25 bp, Homo sapien
caggtgatgacctctatagagggcc

SEQ ID NO: 3408740 - DNA, 25 bp, Homo sapien
gagggcccatagaaggcccactgga

SEQ ID NO: 3408741 - DNA, 25 bp, Homo sapien
ggtacctagttcatccgtcctgcag

SEQ ID NO: 3408742 - DNA, 25 bp, Homo sapien
aaacagacctgtcctgggtacctag

SEQ ID NO: 3408743 - DNA, 25 bp, Homo sapien
gagtaacatggaaagacctcaggac

SEQ ID NO: 3408744 - DNA, 25 bp, Homo sapien
taagaagctcttatgttactcaagt

SEQ ID NO: 3408745 - DNA, 25 bp, Homo sapien
tggagagtgctggccacaggaccag

SEQ ID NO: 3408746 - DNA, 25 bp, Homo sapien
agtggagagtgctggccacaggacc

SEQ ID NO: 3408747 - DNA, 25 bp, Homo sapien
gtggagagtgctggccacaggacca

SEQ ID NO: 3408748 - DNA, 25 bp, Homo sapien
catcctttgaaataacagtcctgca

SEQ ID NO: 3408749 - DNA, 25 bp, Homo sapien
ctctgggccccagaaaacaggtttg

SEQ ID NO: 3408750 - DNA, 25 bp, Homo sapien
gtcctgcataaagagcaaggcctct

SEQ ID NO: 3408751 - DNA, 25 bp, Homo sapien
caaaaggtcaaatccagagcagaaa

SEQ ID NO: 3408752 - DNA, 25 bp, Homo sapien
tcaagcccggcgcagtagttcacgc

SEQ ID NO: 3408753 - DNA, 25 bp, Homo sapien
ccttaactcaacacggcaatttgcc

SEQ ID NO: 3408754 - DNA, 25 bp, Homo sapien
taccaggaatacacgagtagtttag

SEQ ID NO: 3408755 - DNA, 25 bp, Homo sapien
aagctatttgcaaactcagactgga

SEQ ID NO: 3408756 - DNA, 25 bp, Homo sapien
ggtgctggaatgtctgtggaccggc

SEQ ID NO: 3408757 - DNA, 25 bp, Homo sapien
gaatgtctgtggaccggcctgagac

SEQ ID NO: 3408758 - DNA, 25 bp, Homo sapien
ctgtggaccggcctgagactcgata

SEQ ID NO: 3408759 - DNA, 25 bp, Homo sapien
gtggaccggcctgagactcgatacc

SEQ ID NO: 3408760 - DNA, 25 bp, Homo sapien
cattttatgtctccacttgatcttg

SEQ ID NO: 3408761 - DNA, 25 bp, Homo sapien
ttatgtctccacttgatcttgttct

SEQ ID NO: 3408762 - DNA, 25 bp, Homo sapien
gagctcaatgccctccaaaaagcct

SEQ ID NO: 3408763 - DNA, 25 bp, Homo sapien
gacagcacaggaaactgccgctgtt

SEQ ID NO: 3408764 - DNA, 25 bp, Homo sapien
gctgttctgcaatcctctttcaatg

SEQ ID NO: 3408765 - DNA, 25 bp, Homo sapien
tctgctgagtttaggtgggagccca

SEQ ID NO: 3408766 - DNA, 25 bp, Homo sapien
taggataaagcagggccagaaggta

SEQ ID NO: 3408767 - DNA, 25 bp, Homo sapien
tctgcaacacagaagcctcaacagc

SEQ ID NO: 3408768 - DNA, 25 bp, Homo sapien
agggccagaaggtatctctgcaaca

SEQ ID NO: 3408769 - DNA, 25 bp, Homo sapien
gggcaagtcagtgtcttggattctg

SEQ ID NO: 3408770 - DNA, 25 bp, Homo sapien
tacctcataagactgttgtgacaag

SEQ ID NO: 3408771 - DNA, 25 bp, Homo sapien
aggagagttcgagcagtgaaacacg

SEQ ID NO: 3408772 - DNA, 25 bp, Homo sapien
gcttgggatatctctgtgaaacttc

SEQ ID NO: 3408773 - DNA, 25 bp, Homo sapien
tataatctacgtgaagcacttagca

SEQ ID NO: 3408774 - DNA, 25 bp, Homo sapien
tgaggacagcgggatcctaccagct

SEQ ID NO: 3408775 - DNA, 25 bp, Homo sapien
gccccttacccactctcagcaatga

SEQ ID NO: 3408776 - DNA, 25 bp, Homo sapien
gatcctaccagctacaggaacctga

SEQ ID NO: 3408777 - DNA, 25 bp, Homo sapien
cagcgggatcctaccagctacagga

SEQ ID NO: 3408778 - DNA, 25 bp, Homo sapien
atgagcatgcgaaagactgagaggc

SEQ ID NO: 3408779 - DNA, 25 bp, Homo sapien
gtgtttgtaacccttgatcaaaatg

SEQ ID NO: 3408780 - DNA, 25 bp, Homo sapien
aaacatgagcatgcgaaagactgag

SEQ ID NO: 3408781 - DNA, 25 bp, Homo sapien
ttgtaacccttgatcaaaatgcacc

SEQ ID NO: 3408782 - DNA, 25 bp, Homo sapien
aacgctgaggacaaatggcagttgc

SEQ ID NO: 3408783 - DNA, 25 bp, Homo sapien
cccaacgctgaggacaaatggcagt

SEQ ID NO: 3408784 - DNA, 25 bp, Homo sapien
ccaacgctgaggacaaatggcagtt

SEQ ID NO: 3408785 - DNA, 25 bp, Homo sapien
acgctgaggacaaatggcagttgcc

SEQ ID NO: 3408786 - DNA, 25 bp, Homo sapien
gagttcacagccattccctagtaat

SEQ ID NO: 3408787 - DNA, 25 bp, Homo sapien
gcttggagttcacagccattcccta

SEQ ID NO: 3408788 - DNA, 25 bp, Homo sapien
gaagtgcttggagttcacagccatt

SEQ ID NO: 3408789 - DNA, 25 bp, Homo sapien
agtgcttggagttcacagccattcc

SEQ ID NO: 3408790 - DNA, 25 bp, Homo sapien
gacttccccgcttctgtactgtgca

SEQ ID NO: 3408791 - DNA, 25 bp, Homo sapien
cagaacagggttgtatctacggccg

SEQ ID NO: 3408792 - DNA, 25 bp, Homo sapien
catttcttgaagctccaggtgcaca

SEQ ID NO: 3408793 - DNA, 25 bp, Homo sapien
tcatcctagggctgagaaacactca

SEQ ID NO: 3408794 - DNA, 25 bp, Homo sapien
ctcccctagagcctttacatattta

SEQ ID NO: 3408795 - DNA, 25 bp, Homo sapien
tcccctagagcctttacatatttat

SEQ ID NO: 3408796 - DNA, 25 bp, Homo sapien
gagcaactccccaggtcagcacctc

SEQ ID NO: 3408797 - DNA, 25 bp, Homo sapien
tccccggagcaactccccaggtcag

SEQ ID NO: 3408798 - DNA, 25 bp, Homo sapien
cctctccccggagcaactccccagg

SEQ ID NO: 3408799 - DNA, 25 bp, Homo sapien
ggagcaactccccaggtcagcacct

SEQ ID NO: 3408800 - DNA, 25 bp, Homo sapien
catagctgttgggaacaaagaccac

SEQ ID NO: 3408801 - DNA, 25 bp, Homo sapien
tcaaacagagtgtgaccagacgttc

SEQ ID NO: 3408802 - DNA, 25 bp, Homo sapien
gaggtgcagcagagaccactcttga

SEQ ID NO: 3408803 - DNA, 25 bp, Homo sapien
tcctagagtctctgttcagggaggt

SEQ ID NO: 3408804 - DNA, 25 bp, Homo sapien
tccacctgaggtgttccagttccat

SEQ ID NO: 3408805 - DNA, 25 bp, Homo sapien
gagttttttgagatgccccatcagt

SEQ ID NO: 3408806 - DNA, 25 bp, Homo sapien
tcttaaactatcgttggctccagag

SEQ ID NO: 3408807 - DNA, 25 bp, Homo sapien
tgtactgctgatctgcgttatgcca

SEQ ID NO: 3408808 - DNA, 25 bp, Homo sapien
tgactggcagaaaagcctatgctta

SEQ ID NO: 3408809 - DNA, 25 bp, Homo sapien
catgactggcagaaaagcctatgct

SEQ ID NO: 3408810 - DNA, 25 bp, Homo sapien
catttataaattctaccgatttcct

SEQ ID NO: 3408811 - DNA, 25 bp, Homo sapien
gactggcagaaaagcctatgcttac

SEQ ID NO: 3408812 - DNA, 25 bp, Homo sapien
agcacagttaacaatattttttggt

SEQ ID NO: 3408813 - DNA, 25 bp, Homo sapien
atttattgttttgcacaggttgaac

SEQ ID NO: 3408814 - DNA, 25 bp, Homo sapien
gcacagttaacaatattttttggtc

SEQ ID NO: 3408815 - DNA, 25 bp, Homo sapien
tattgttttgcacaggttgaaccct

SEQ ID NO: 3408816 - DNA, 25 bp, Homo sapien
gaagtcgctggacgtaagcctgtga

SEQ ID NO: 3408817 - DNA, 25 bp, Homo sapien
tgatgttacaccatggttgatgcac

SEQ ID NO: 3408818 - DNA, 25 bp, Homo sapien
tcacattggttggactgatggaaac

SEQ ID NO: 3408819 - DNA, 25 bp, Homo sapien
catacttgtactcagaagcagctgt

SEQ ID NO: 3408820 - DNA, 25 bp, Homo sapien
ggcagtgccattgccattgctccag

SEQ ID NO: 3408821 - DNA, 25 bp, Homo sapien
tttcaagaagaacccggcaggaggc

SEQ ID NO: 3408822 - DNA, 25 bp, Homo sapien
tcacacccgtgagggcaacacggag

SEQ ID NO: 3408823 - DNA, 25 bp, Homo sapien
gagtcttgagtcaactcctcatggc

SEQ ID NO: 3408824 - DNA, 25 bp, Homo sapien
tgatgttgtattgaacccctggctt

SEQ ID NO: 3408825 - DNA, 25 bp, Homo sapien
ctggcttcaggcccgagatattgac

SEQ ID NO: 3408826 - DNA, 25 bp, Homo sapien
tgattgtagaagatacgggttgatg

SEQ ID NO: 3408827 - DNA, 25 bp, Homo sapien
cttctgtgcccaaggggtctccctt

SEQ ID NO: 3408828 - DNA, 25 bp, Homo sapien
atgggtccacaggtcccacgaggga

SEQ ID NO: 3408829 - DNA, 25 bp, Homo sapien
ctggccggaggatgggtccacaggt

SEQ ID NO: 3408830 - DNA, 25 bp, Homo sapien
ctgcccggcttctctctgtattgct

SEQ ID NO: 3408831 - DNA, 25 bp, Homo sapien
cacaggtcccacgagggactcatca

SEQ ID NO: 3408832 - DNA, 25 bp, Homo sapien
gggaataaacggtggcattgtatcg

SEQ ID NO: 3408833 - DNA, 25 bp, Homo sapien
ggctctaacccgacaagcaggactt

SEQ ID NO: 3408834 - DNA, 25 bp, Homo sapien
ctgtccttctgtgccattcgctgct

SEQ ID NO: 3408835 - DNA, 25 bp, Homo sapien
cattgtatcgggtgccaggctctaa

SEQ ID NO: 3408836 - DNA, 25 bp, Homo sapien
gatgacgactcgttatcgctgactt

SEQ ID NO: 3408837 - DNA, 25 bp, Homo sapien
tccagatcagggtcaggcttgtggc

SEQ ID NO: 3408838 - DNA, 25 bp, Homo sapien
tcacagcggtgacgtcaaaaacctg

SEQ ID NO: 3408839 - DNA, 25 bp, Homo sapien
acagcgcgaggctcactgacgttga

SEQ ID NO: 3408840 - DNA, 25 bp, Homo sapien
gggtgtgcacttggaggaagcccgg

SEQ ID NO: 3408841 - DNA, 25 bp, Homo sapien
aggaagcccggcgtgccctcgatgt

SEQ ID NO: 3408842 - DNA, 25 bp, Homo sapien
gcacttggaggaagcccggcgtgcc

SEQ ID NO: 3408843 - DNA, 25 bp, Homo sapien
gtgcacttggaggaagcccggcgtg

SEQ ID NO: 3408844 - DNA, 25 bp, Homo sapien
tgctccatgctaagccgatctccgt

SEQ ID NO: 3408845 - DNA, 25 bp, Homo sapien
tattgcaaactgtccgagatgcccc

SEQ ID NO: 3408846 - DNA, 25 bp, Homo sapien
tatttctacccgagaattgccagct

SEQ ID NO: 3408847 - DNA, 25 bp, Homo sapien
tgtcactcggaagtcagaaactgga

SEQ ID NO: 3408848 - DNA, 25 bp, Homo sapien
tgatttcctttaagaaacatgatgg

SEQ ID NO: 3408849 - DNA, 25 bp, Homo sapien
catgatggtttaacagaaaagccta

SEQ ID NO: 3408850 - DNA, 25 bp, Homo sapien
ttaagaaacatgatggtttaacaga

SEQ ID NO: 3408851 - DNA, 25 bp, Homo sapien
tggtttaacagaaaagcctatttgc

SEQ ID NO: 3408852 - DNA, 25 bp, Homo sapien
tcttatctgccaactctgtttcaga

SEQ ID NO: 3408853 - DNA, 25 bp, Homo sapien
tatctgccaactctgtttcagatga

SEQ ID NO: 3408854 - DNA, 25 bp, Homo sapien
caaatttggcataggggccattctt

SEQ ID NO: 3408855 - DNA, 25 bp, Homo sapien
attcttatctgccaactctgtttca

SEQ ID NO: 3408856 - DNA, 25 bp, Homo sapien
tatgagagcactcagcacttcgcag

SEQ ID NO: 3408857 - DNA, 25 bp, Homo sapien
gagacaatgcaattccaggcaggtg

SEQ ID NO: 3408858 - DNA, 25 bp, Homo sapien
cagttacttaagtttgcagagcccc

SEQ ID NO: 3408859 - DNA, 25 bp, Homo sapien
cattgaatgaaacgggtcctttgag

SEQ ID NO: 3408860 - DNA, 25 bp, Homo sapien
gccacatctccgtggtggtgacgta

SEQ ID NO: 3408861 - DNA, 25 bp, Homo sapien
ctaaatggtagacatactcggaagc

SEQ ID NO: 3408862 - DNA, 25 bp, Homo sapien
gaagcaccgtcagggctcttccagt

SEQ ID NO: 3408863 - DNA, 25 bp, Homo sapien
catctccgtggtggtgacgtagacc

SEQ ID NO: 3408864 - DNA, 25 bp, Homo sapien
aatcgctttgtcatacgtgcttgtg

SEQ ID NO: 3408865 - DNA, 25 bp, Homo sapien
tgcccggaatcaggccctggagagt

SEQ ID NO: 3408866 - DNA, 25 bp, Homo sapien
gatgttatataaggtgcccggaatc

SEQ ID NO: 3408867 - DNA, 25 bp, Homo sapien
tgtggttagagccatgcttggactc

SEQ ID NO: 3408868 - DNA, 25 bp, Homo sapien
caataagaaggcagtaggagtacgt

SEQ ID NO: 3408869 - DNA, 25 bp, Homo sapien
tgtacagaatgacttccggccaggt

SEQ ID NO: 3408870 - DNA, 25 bp, Homo sapien
gatcccatcccctacttgtgcaaag

SEQ ID NO: 3408871 - DNA, 25 bp, Homo sapien
gactacttgtgttgcgttgctggaa

SEQ ID NO: 3408872 - DNA, 25 bp, Homo sapien
aagaggcagttggggctacactcac

SEQ ID NO: 3408873 - DNA, 25 bp, Homo sapien
ccaagaggcagttggggctacactc

SEQ ID NO: 3408874 - DNA, 25 bp, Homo sapien
tccaagaggcagttggggctacact

SEQ ID NO: 3408875 - DNA, 25 bp, Homo sapien
caagaggcagttggggctacactca

SEQ ID NO: 3408876 - DNA, 25 bp, Homo sapien
caaagcaagtacagcacagcatgag

SEQ ID NO: 3408877 - DNA, 25 bp, Homo sapien
gattccgggacttttgcctttgcaa

SEQ ID NO: 3408878 - DNA, 25 bp, Homo sapien
ctgcaaagcaagtacagcacagcat

SEQ ID NO: 3408879 - DNA, 25 bp, Homo sapien
cagcacagcatgagattccgggact

SEQ ID NO: 3408880 - DNA, 25 bp, Homo sapien
tcaaagcctgcattggcgccaggag

SEQ ID NO: 3408881 - DNA, 25 bp, Homo sapien
cttcgcagtcgaaggaggccatgga

SEQ ID NO: 3408882 - DNA, 25 bp, Homo sapien
tgatgccagtagtgcaggtgttccg

SEQ ID NO: 3408883 - DNA, 25 bp, Homo sapien
tctccaggtgggtcgcattgttcca

SEQ ID NO: 3408884 - DNA, 25 bp, Homo sapien
cataggctttgatgggtccgtggct

SEQ ID NO: 3408885 - DNA, 25 bp, Homo sapien
gaatgacagcataggctttgatggg

SEQ ID NO: 3408886 - DNA, 25 bp, Homo sapien
tccactgaacttgacctttactgaa

SEQ ID NO: 3408887 - DNA, 25 bp, Homo sapien
cctttactgaattgtgactgacaga

SEQ ID NO: 3408888 - DNA, 25 bp, Homo sapien
tcactcatgggctgtttaacccacg

SEQ ID NO: 3408889 - DNA, 25 bp, Homo sapien
ctgcatcactcatgggctgtttaac

SEQ ID NO: 3408890 - DNA, 25 bp, Homo sapien
gctgtttaacccacggaggcctctc

SEQ ID NO: 3408891 - DNA, 25 bp, Homo sapien
catgggctgtttaacccacggaggc

SEQ ID NO: 3408892 - DNA, 25 bp, Homo sapien
gaaatcctcatacgtgtatttcagg

SEQ ID NO: 3408893 - DNA, 25 bp, Homo sapien
gtggttgactcattcccaacgtcaa

SEQ ID NO: 3408894 - DNA, 25 bp, Homo sapien
gacaagctctgagaacgtccctttt

SEQ ID NO: 3408895 - DNA, 25 bp, Homo sapien
gaggtatgtcacataagtatctgag

SEQ ID NO: 3408896 - DNA, 25 bp, Homo sapien
aaggacacatagctctcagccccat

SEQ ID NO: 3408897 - DNA, 25 bp, Homo sapien
ttgagggtggaaggtaatgttggtg

SEQ ID NO: 3408898 - DNA, 25 bp, Homo sapien
acagcatctgagtagcgactgaagg

SEQ ID NO: 3408899 - DNA, 25 bp, Homo sapien
tctgagtagcgactgaaggacacat

SEQ ID NO: 3408900 - DNA, 25 bp, Homo sapien
tacacagctggccttctatggacac

SEQ ID NO: 3408901 - DNA, 25 bp, Homo sapien
agtgccaggactgttgtcttctccc

SEQ ID NO: 3408902 - DNA, 25 bp, Homo sapien
tctgagggaggcatgtacacagctg

SEQ ID NO: 3408903 - DNA, 25 bp, Homo sapien
ctatggacacgtggagcaaaatgcc

SEQ ID NO: 3408904 - DNA, 25 bp, Homo sapien
ggcattctttcctgcgcccaacaac

SEQ ID NO: 3408905 - DNA, 25 bp, Homo sapien
catttgtttaccggggaaggatgtg

SEQ ID NO: 3408906 - DNA, 25 bp, Homo sapien
agcagcatccatgctcaggtgacag

SEQ ID NO: 3408907 - DNA, 25 bp, Homo sapien
ctttcctgcgcccaacaaccaccaa

SEQ ID NO: 3408908 - DNA, 25 bp, Homo sapien
cacagtcacaataaccagggcacca

SEQ ID NO: 3408909 - DNA, 25 bp, Homo sapien
gatacagccaaaaaccgctccacag

SEQ ID NO: 3408910 - DNA, 25 bp, Homo sapien
gccaaaaaccgctccacagatgaca

SEQ ID NO: 3408911 - DNA, 25 bp, Homo sapien
cagtcacaataaccagggcaccaaa

SEQ ID NO: 3408912 - DNA, 25 bp, Homo sapien
tgagaaaaggacacttcattattct

SEQ ID NO: 3408913 - DNA, 25 bp, Homo sapien
gagaaaaggacacttcattattctt

SEQ ID NO: 3408914 - DNA, 25 bp, Homo sapien
agaaaaggacacttcattattcttt

SEQ ID NO: 3408915 - DNA, 25 bp, Homo sapien
tattcctctgcgaacccacagttgg

SEQ ID NO: 3408916 - DNA, 25 bp, Homo sapien
cttgaagtaggcctcaaaattctcc

SEQ ID NO: 3408917 - DNA, 25 bp, Homo sapien
ttcgtattcctctgcgaacccacag

SEQ ID NO: 3408918 - DNA, 25 bp, Homo sapien
gcgaacccacagttggagtcagctt

SEQ ID NO: 3408919 - DNA, 25 bp, Homo sapien
gacgcccaccaccacgcctggctaa

SEQ ID NO: 3408920 - DNA, 25 bp, Homo sapien
acgcccaccaccacgcctggctaat

SEQ ID NO: 3408921 - DNA, 25 bp, Homo sapien
cagtggcgcggtctcctgcctcagc

SEQ ID NO: 3408922 - DNA, 25 bp, Homo sapien
cagaacattattatagcgattcttt

SEQ ID NO: 3408923 - DNA, 25 bp, Homo sapien
tatttaggttgactaattccaacaa

SEQ ID NO: 3408924 - DNA, 25 bp, Homo sapien
gcatatttaggttgactaattccaa

SEQ ID NO: 3408925 - DNA, 25 bp, Homo sapien
tcctctattctcagccagttctgct

SEQ ID NO: 3408926 - DNA, 25 bp, Homo sapien
catccgttgaatgggtctggaccga

SEQ ID NO: 3408927 - DNA, 25 bp, Homo sapien
atgtagtcatccgttgaatgggtct

SEQ ID NO: 3408928 - DNA, 25 bp, Homo sapien
cgaaagtttgacacgggaaatatca

SEQ ID NO: 3408929 - DNA, 25 bp, Homo sapien
gaatgggtctggaccgaaagtttga

SEQ ID NO: 3408930 - DNA, 25 bp, Homo sapien
tcggtaaaggtccttgtgtggcaat

SEQ ID NO: 3408931 - DNA, 25 bp, Homo sapien
taaaatctttcttggagtggtagcc

SEQ ID NO: 3408932 - DNA, 25 bp, Homo sapien
caaaccatacgccaaaaatctttca

SEQ ID NO: 3408933 - DNA, 25 bp, Homo sapien
tgttcaacacatttagtcaacataa

SEQ ID NO: 3408934 - DNA, 25 bp, Homo sapien
cacagttatgtctccatagtcctga

SEQ ID NO: 3408935 - DNA, 25 bp, Homo sapien
tgtcattgccacagttatgtctcca

SEQ ID NO: 3408936 - DNA, 25 bp, Homo sapien
tctgatggtccattccggaagaaca

SEQ ID NO: 3408937 - DNA, 25 bp, Homo sapien
gcctgcttggagggccaatactcct

SEQ ID NO: 3408938 - DNA, 25 bp, Homo sapien
ggaactgtctcagagggtgactctc

SEQ ID NO: 3408939 - DNA, 25 bp, Homo sapien
tgaaatggaactgtctcagagggtg

SEQ ID NO: 3408940 - DNA, 25 bp, Homo sapien
aaatggaactgtctcagagggtgac

SEQ ID NO: 3408941 - DNA, 25 bp, Homo sapien
tggaactgtctcagagggtgactct

SEQ ID NO: 3408942 - DNA, 25 bp, Homo sapien
gagcaggtcagtggtgtcgggaaca

SEQ ID NO: 3408943 - DNA, 25 bp, Homo sapien
tgcaatgcaccagaatcggcgattc

SEQ ID NO: 3408944 - DNA, 25 bp, Homo sapien
acgaggtaccggaagttgatgagca

SEQ ID NO: 3408945 - DNA, 25 bp, Homo sapien
tctgcttcatgtagtcacgaacgag

SEQ ID NO: 3408946 - DNA, 25 bp, Homo sapien
tctgtctgcaccattaaaggcctat

SEQ ID NO: 3408947 - DNA, 25 bp, Homo sapien
catacacatccacggtgttctcatt

SEQ ID NO: 3408948 - DNA, 25 bp, Homo sapien
cattcgaaggtcatacacaatccca

SEQ ID NO: 3408949 - DNA, 25 bp, Homo sapien
tctggtagatgagacgatcaatggc

SEQ ID NO: 3408950 - DNA, 25 bp, Homo sapien
ctttctgggatctgacaatatccaa

SEQ ID NO: 3408951 - DNA, 25 bp, Homo sapien
aatatccaaaacacactgattgagg

SEQ ID NO: 3408952 - DNA, 25 bp, Homo sapien
tccaaatgtggtcacgggcgcaagg

SEQ ID NO: 3408953 - DNA, 25 bp, Homo sapien
aggttttcatagattgtcattgcag

SEQ ID NO: 3408954 - DNA, 25 bp, Homo sapien
catcggctagattccaagacacagt

SEQ ID NO: 3408955 - DNA, 25 bp, Homo sapien
tctactgagttttgcctgtggaagc

SEQ ID NO: 3408956 - DNA, 25 bp, Homo sapien
ccattcggaagaggtgccacgtacc

SEQ ID NO: 3408957 - DNA, 25 bp, Homo sapien
tactgaggaagcaaacctctgatgc

SEQ ID NO: 3408958 - DNA, 25 bp, Homo sapien
tccagtcagttatcgaagtgccagt

SEQ ID NO: 3408959 - DNA, 25 bp, Homo sapien
tgattcacacctactgagccaaggc

SEQ ID NO: 3408960 - DNA, 25 bp, Homo sapien
tctgaagttaggtcaagagggccca

SEQ ID NO: 3408961 - DNA, 25 bp, Homo sapien
cacagaactgctgcctgaacaggga

SEQ ID NO: 3408962 - DNA, 25 bp, Homo sapien
ccagcccttttcaggatgcagagaa

SEQ ID NO: 3408963 - DNA, 25 bp, Homo sapien
cagcccttttcaggatgcagagaag

SEQ ID NO: 3408964 - DNA, 25 bp, Homo sapien
tgtccccagcccttttcaggatgca

SEQ ID NO: 3408965 - DNA, 25 bp, Homo sapien
ccccagcccttttcaggatgcagag

SEQ ID NO: 3408966 - DNA, 25 bp, Homo sapien
gtatgcaattgtcaaagactgaaca

SEQ ID NO: 3408967 - DNA, 25 bp, Homo sapien
acacattaatcttcccttttcaagc

SEQ ID NO: 3408968 - DNA, 25 bp, Homo sapien
aatttgagctcattgttcctgggag

SEQ ID NO: 3408969 - DNA, 25 bp, Homo sapien
gcctgtgtgtcctttatatttacac

SEQ ID NO: 3408970 - DNA, 25 bp, Homo sapien
acacccaaacccataccagctgctt

SEQ ID NO: 3408971 - DNA, 25 bp, Homo sapien
cacccaaacccataccagctgcttt

SEQ ID NO: 3408972 - DNA, 25 bp, Homo sapien
acccaaacccataccagctgctttt

SEQ ID NO: 3408973 - DNA, 25 bp, Homo sapien
tgacacccaaacccataccagctgc

SEQ ID NO: 3408974 - DNA, 25 bp, Homo sapien
aaaccagctggccaccagtctttgg

SEQ ID NO: 3408975 - DNA, 25 bp, Homo sapien
gcaaaaagtcgttgttcctgggaga

SEQ ID NO: 3408976 - DNA, 25 bp, Homo sapien
tcactagatccaactttggaggcaa

SEQ ID NO: 3408977 - DNA, 25 bp, Homo sapien
cagtggagtcaattaggcggaagtc

SEQ ID NO: 3408978 - DNA, 25 bp, Homo sapien
aagagaaccaggctttttcatccca

SEQ ID NO: 3408979 - DNA, 25 bp, Homo sapien
tacacagtagtctgaaaacccagga

SEQ ID NO: 3408980 - DNA, 25 bp, Homo sapien
cgtgatgggctgcatagctgacccc

SEQ ID NO: 3408981 - DNA, 25 bp, Homo sapien
cagatgaaaaacacacgtgatgggc

SEQ ID NO: 3408982 - DNA, 25 bp, Homo sapien
agccttgccttacggacctcctggt

SEQ ID NO: 3408983 - DNA, 25 bp, Homo sapien
tagtggcatcatccaaaactgctgg

SEQ ID NO: 3408984 - DNA, 25 bp, Homo sapien
tttccaatcctatgtgctccactgc

SEQ ID NO: 3408985 - DNA, 25 bp, Homo sapien
acaaattatacggaaagctgccagc

SEQ ID NO: 3408986 - DNA, 25 bp, Homo sapien
gaacatatgtcaagtgctcggcagt

SEQ ID NO: 3408987 - DNA, 25 bp, Homo sapien
catgcaatacacgtgtttgggtgga

SEQ ID NO: 3408988 - DNA, 25 bp, Homo sapien
taactgtactatggtggagaaggcc

SEQ ID NO: 3408989 - DNA, 25 bp, Homo sapien
gcaggcactccgtgaacatcagctt

SEQ ID NO: 3408990 - DNA, 25 bp, Homo sapien
ggcacattttggaaccctcagcaaa

SEQ ID NO: 3408991 - DNA, 25 bp, Homo sapien
gcacattttggaaccctcagcaaac

SEQ ID NO: 3408992 - DNA, 25 bp, Homo sapien
cacagggtaagacatatcagcaaga

SEQ ID NO: 3408993 - DNA, 25 bp, Homo sapien
gtaagacatatcagcaagagccagt

SEQ ID NO: 3408994 - DNA, 25 bp, Homo sapien
atcagcaagagccagtgaaggccac

SEQ ID NO: 3408995 - DNA, 25 bp, Homo sapien
ctggagatacacagggtaagacata

SEQ ID NO: 3408996 - DNA, 25 bp, Homo sapien
taattaatcctctgtaatgacagag

SEQ ID NO: 3408997 - DNA, 25 bp, Homo sapien
cagaaggagaccaatttcatctcca

SEQ ID NO: 3408998 - DNA, 25 bp, Homo sapien
aagggcagaaggagaccaatttcat

SEQ ID NO: 3408999 - DNA, 25 bp, Homo sapien
catggccaggagcaacaaacatggc

SEQ ID NO: 3409000 - DNA, 25 bp, Homo sapien
ctaagtcagcaggaatgtcagcatc

SEQ ID NO: 3409001 - DNA, 25 bp, Homo sapien
cctgtaaacatattgtgggccaaaa

SEQ ID NO: 3409002 - DNA, 25 bp, Homo sapien
taaggtccgtaacaacacatttgga

SEQ ID NO: 3409003 - DNA, 25 bp, Homo sapien
gataagccaggacttaaggttccag

SEQ ID NO: 3409004 - DNA, 25 bp, Homo sapien
taagacataatctttaaccagtacc

SEQ ID NO: 3409005 - DNA, 25 bp, Homo sapien
cacagtattccagaccacaagagat

SEQ ID NO: 3409006 - DNA, 25 bp, Homo sapien
tctcatgaccatacgtgcagccttc

SEQ ID NO: 3409007 - DNA, 25 bp, Homo sapien
cagattgttgtttgccccacaagac

SEQ ID NO: 3409008 - DNA, 25 bp, Homo sapien
ggatcttatcaaggccctctttggc

SEQ ID NO: 3409009 - DNA, 25 bp, Homo sapien
aactcagtcacattacttgtactgg

SEQ ID NO: 3409010 - DNA, 25 bp, Homo sapien
cagtcacattacttgtactggccat

SEQ ID NO: 3409011 - DNA, 25 bp, Homo sapien
tgaattatggagtgacaaaagcccc

SEQ ID NO: 3409012 - DNA, 25 bp, Homo sapien
cagaaggtgacacagttgacgactg

SEQ ID NO: 3409013 - DNA, 25 bp, Homo sapien
cacagaagggcaattggatgataac

SEQ ID NO: 3409014 - DNA, 25 bp, Homo sapien
tgcaaatggccacgtagcaatcata

SEQ ID NO: 3409015 - DNA, 25 bp, Homo sapien
gttgaccagaatgacaatataagag

SEQ ID NO: 3409016 - DNA, 25 bp, Homo sapien
ggttcctcaagttgaccagaatgac

SEQ ID NO: 3409017 - DNA, 25 bp, Homo sapien
gacaatataagaggacaccaagatg

SEQ ID NO: 3409018 - DNA, 25 bp, Homo sapien
gaatgacaatataagaggacaccaa

SEQ ID NO: 3409019 - DNA, 25 bp, Homo sapien
gaatacagccacaagtttatcttca

SEQ ID NO: 3409020 - DNA, 25 bp, Homo sapien
gggtgatgaccgtgtagaatacagc

SEQ ID NO: 3409021 - DNA, 25 bp, Homo sapien
aagaaggtcgcatgtagaggaagat

SEQ ID NO: 3409022 - DNA, 25 bp, Homo sapien
cattcctgagtgtgtaaatgatggg

SEQ ID NO: 3409023 - DNA, 25 bp, Homo sapien
ccacaatcttcttatggcgattttc

SEQ ID NO: 3409024 - DNA, 25 bp, Homo sapien
cactccctccctggattctcctttt

SEQ ID NO: 3409025 - DNA, 25 bp, Homo sapien
ccctccctggattctcctttttgct

SEQ ID NO: 3409026 - DNA, 25 bp, Homo sapien
tcactccctccctggattctccttt

SEQ ID NO: 3409027 - DNA, 25 bp, Homo sapien
ctccctccctggattctcctttttg

SEQ ID NO: 3409028 - DNA, 25 bp, Homo sapien
ggtgatcattgactcagtcacatta

SEQ ID NO: 3409029 - DNA, 25 bp, Homo sapien
aaaaggctggtgatcattgactcag

SEQ ID NO: 3409030 - DNA, 25 bp, Homo sapien
gctggtgatcattgactcagtcaca

SEQ ID NO: 3409031 - DNA, 25 bp, Homo sapien
tggaaaaggctggtgatcattgact

SEQ ID NO: 3409032 - DNA, 25 bp, Homo sapien
acacggggagaaacaccacaaagca

SEQ ID NO: 3409033 - DNA, 25 bp, Homo sapien
tacacggggagaaacaccacaaagc

SEQ ID NO: 3409034 - DNA, 25 bp, Homo sapien
cagacaggcagctcatgatggttgt

SEQ ID NO: 3409035 - DNA, 25 bp, Homo sapien
cattggtcatcagtgggagcagaaa

SEQ ID NO: 3409036 - DNA, 25 bp, Homo sapien
ccatcaatgacaggtagctcaggaa

SEQ ID NO: 3409037 - DNA, 25 bp, Homo sapien
ctgagccagatagccctccagagag

SEQ ID NO: 3409038 - DNA, 25 bp, Homo sapien
tcaaaatacaagataagaggcacag

SEQ ID NO: 3409039 - DNA, 25 bp, Homo sapien
tgaaccattgagtgaattatgcccc

SEQ ID NO: 3409040 - DNA, 25 bp, Homo sapien
gagtcacacgtagaggaaaatggca

SEQ ID NO: 3409041 - DNA, 25 bp, Homo sapien
cacagaagaacaattggacagagac

SEQ ID NO: 3409042 - DNA, 25 bp, Homo sapien
cacgtaaaatacagccacgagttta

SEQ ID NO: 3409043 - DNA, 25 bp, Homo sapien
tgtcctgcccaacaatctcctcatg

SEQ ID NO: 3409044 - DNA, 25 bp, Homo sapien
cattcccaagcgtgtagatgaaggg

SEQ ID NO: 3409045 - DNA, 25 bp, Homo sapien
gatgaccacgtaaaatacagccacg

SEQ ID NO: 3409046 - DNA, 25 bp, Homo sapien
tgggtggtgtgatctgaaatgatac

SEQ ID NO: 3409047 - DNA, 25 bp, Homo sapien
catgttgtgtatgttagccaagagg

SEQ ID NO: 3409048 - DNA, 25 bp, Homo sapien
aatgaattcagtcatgttgtgtatg

SEQ ID NO: 3409049 - DNA, 25 bp, Homo sapien
caagaggtcatcatcaagaggcagc

SEQ ID NO: 3409050 - DNA, 25 bp, Homo sapien
tgagcacaatgaggaaattccccag

SEQ ID NO: 3409051 - DNA, 25 bp, Homo sapien
ccccagcacaattgctgtgtacaag

SEQ ID NO: 3409052 - DNA, 25 bp, Homo sapien
caattgctgtgtacaagaacagaaa

SEQ ID NO: 3409053 - DNA, 25 bp, Homo sapien
gacagtgagcacaatgaggaaattc

SEQ ID NO: 3409054 - DNA, 25 bp, Homo sapien
tgatcacagacagggtgcctccatt

SEQ ID NO: 3409055 - DNA, 25 bp, Homo sapien
gagggctttgcaccacccttcagag

SEQ ID NO: 3409056 - DNA, 25 bp, Homo sapien
tcagagagttgaagacgcagggccc

SEQ ID NO: 3409057 - DNA, 25 bp, Homo sapien
catataggatgctaagaggacccca

SEQ ID NO: 3409058 - DNA, 25 bp, Homo sapien
tcaggatcgcggttatcactgtgta

SEQ ID NO: 3409059 - DNA, 25 bp, Homo sapien
atgacagggttcaggatcgcggtta

SEQ ID NO: 3409060 - DNA, 25 bp, Homo sapien
tcgcggttatcactgtgtagaacac

SEQ ID NO: 3409061 - DNA, 25 bp, Homo sapien
cagggttcaggatcgcggttatcac

SEQ ID NO: 3409062 - DNA, 25 bp, Homo sapien
tctcatttagtctcaatgtcctaat

SEQ ID NO: 3409063 - DNA, 25 bp, Homo sapien
tctacatctatttggaagattattc

SEQ ID NO: 3409064 - DNA, 25 bp, Homo sapien
ctttctctctacatctatttggaag

SEQ ID NO: 3409065 - DNA, 25 bp, Homo sapien
ttctctctacatctatttggaagat

SEQ ID NO: 3409066 - DNA, 25 bp, Homo sapien
ctacatctatttggaagattattca

SEQ ID NO: 3409067 - DNA, 25 bp, Homo sapien
cagtcacattgtttgtagcaaccat

SEQ ID NO: 3409068 - DNA, 25 bp, Homo sapien
tcagtcacattgtttgtagcaacca

SEQ ID NO: 3409069 - DNA, 25 bp, Homo sapien
aatcccacgaaaattatttcagtca

SEQ ID NO: 3409070 - DNA, 25 bp, Homo sapien
ccacgaaaattatttcagtcacatt

SEQ ID NO: 3409071 - DNA, 25 bp, Homo sapien
aggtgagcactttgctggccaggat

SEQ ID NO: 3409072 - DNA, 25 bp, Homo sapien
aatgaggccattgcccagcacaaca

SEQ ID NO: 3409073 - DNA, 25 bp, Homo sapien
gctgtgtacatgaggagaaacatca

SEQ ID NO: 3409074 - DNA, 25 bp, Homo sapien
gccaggatggtcaccacaatgaggc

SEQ ID NO: 3409075 - DNA, 25 bp, Homo sapien
caaagataagcttgggggccatgac

SEQ ID NO: 3409076 - DNA, 25 bp, Homo sapien
gaacagtagcagatctccacaaagg

SEQ ID NO: 3409077 - DNA, 25 bp, Homo sapien
cacattcgctggttcatgatggcca

SEQ ID NO: 3409078 - DNA, 25 bp, Homo sapien
gggccatgacagaacagtagcagat

SEQ ID NO: 3409079 - DNA, 25 bp, Homo sapien
atcaggaaggtttgcccaacagaat

SEQ ID NO: 3409080 - DNA, 25 bp, Homo sapien
aggaaggtttgcccaacagaatgca

SEQ ID NO: 3409081 - DNA, 25 bp, Homo sapien
gaaggtttgcccaacagaatgcagc

SEQ ID NO: 3409082 - DNA, 25 bp, Homo sapien
aaggtttgcccaacagaatgcagca

SEQ ID NO: 3409083 - DNA, 25 bp, Homo sapien
tcagcacgaagaaactgactacgga

SEQ ID NO: 3409084 - DNA, 25 bp, Homo sapien
atggagccgccattggtgatgatca

SEQ ID NO: 3409085 - DNA, 25 bp, Homo sapien
tgcaggatgatcaggtaggaagcca

SEQ ID NO: 3409086 - DNA, 25 bp, Homo sapien
gctaatgaagaaggtgtctgcgcag

SEQ ID NO: 3409087 - DNA, 25 bp, Homo sapien
ccaaggagcaaggtatgaagaacag

SEQ ID NO: 3409088 - DNA, 25 bp, Homo sapien
gaccaaggagcaaggtatgaagaac

SEQ ID NO: 3409089 - DNA, 25 bp, Homo sapien
aatatagaccaaggagcaaggtatg

SEQ ID NO: 3409090 - DNA, 25 bp, Homo sapien
tatagaccaaggagcaaggtatgaa

SEQ ID NO: 3409091 - DNA, 25 bp, Homo sapien
tacagcaactatcttgtctgcaggg

SEQ ID NO: 3409092 - DNA, 25 bp, Homo sapien
gcattcctgaaggagtaaatcacag

SEQ ID NO: 3409093 - DNA, 25 bp, Homo sapien
aatcacagggtttaagagaggtgtg

SEQ ID NO: 3409094 - DNA, 25 bp, Homo sapien
aggtgtgaccactgtataaaataca

SEQ ID NO: 3409095 - DNA, 25 bp, Homo sapien
ctctctgctctcaaaaaggccaaat

SEQ ID NO: 3409096 - DNA, 25 bp, Homo sapien
ctctgctctcaaaaaggccaaataa

SEQ ID NO: 3409097 - DNA, 25 bp, Homo sapien
aaactcagtcacattgttcttggca

SEQ ID NO: 3409098 - DNA, 25 bp, Homo sapien
cagtcacattgttcttggcacccat

SEQ ID NO: 3409099 - DNA, 25 bp, Homo sapien
gatggaatgcaggaagccagctaac

SEQ ID NO: 3409100 - DNA, 25 bp, Homo sapien
cctaccatgtaggtgtctgcacagg

SEQ ID NO: 3409101 - DNA, 25 bp, Homo sapien
catggctgtaaggaggaagatctca

SEQ ID NO: 3409102 - DNA, 25 bp, Homo sapien
agaagttgtctatctcattgggccc

SEQ ID NO: 3409103 - DNA, 25 bp, Homo sapien
gaaccaaaaggacagtgattacgtg

SEQ ID NO: 3409104 - DNA, 25 bp, Homo sapien
agccacatgtggagacagccttacg

SEQ ID NO: 3409105 - DNA, 25 bp, Homo sapien
gccttacgccggtcctcagatgact

SEQ ID NO: 3409106 - DNA, 25 bp, Homo sapien
taagctcctcttgaccctaaacagc

SEQ ID NO: 3409107 - DNA, 25 bp, Homo sapien
ctttaaacctgaataaccattcatg

SEQ ID NO: 3409108 - DNA, 25 bp, Homo sapien
tttaaacctgaataaccattcatgc

SEQ ID NO: 3409109 - DNA, 25 bp, Homo sapien
ttaaacctgaataaccattcatgca

SEQ ID NO: 3409110 - DNA, 25 bp, Homo sapien
taaacctgaataaccattcatgcat

SEQ ID NO: 3409111 - DNA, 25 bp, Homo sapien
cttttctgccttcactgtggacact

SEQ ID NO: 3409112 - DNA, 25 bp, Homo sapien
ttttctgccttcactgtggacactt

SEQ ID NO: 3409113 - DNA, 25 bp, Homo sapien
ttctgccttcactgtggacactttc

SEQ ID NO: 3409114 - DNA, 25 bp, Homo sapien
ctgccttcactgtggacactttcac

SEQ ID NO: 3409115 - DNA, 25 bp, Homo sapien
acataagtaatagaactaattgcat

SEQ ID NO: 3409116 - DNA, 25 bp, Homo sapien
aacataagtaatagaactaattgca

SEQ ID NO: 3409117 - DNA, 25 bp, Homo sapien
tgccacaaaccgtgaccacatagat

SEQ ID NO: 3409118 - DNA, 25 bp, Homo sapien
catagatcagcaaaaagaccacaaa

SEQ ID NO: 3409119 - DNA, 25 bp, Homo sapien
cactgagaatgcaggtgcagtattg

SEQ ID NO: 3409120 - DNA, 25 bp, Homo sapien
attttgtggtatgtccatagattcc

SEQ ID NO: 3409121 - DNA, 25 bp, Homo sapien
caagccaagccacccctacaagcat

SEQ ID NO: 3409122 - DNA, 25 bp, Homo sapien
gcagaccaatgacatacgtattggt

SEQ ID NO: 3409123 - DNA, 25 bp, Homo sapien
tacgtattggtgcaggcaacttcca

SEQ ID NO: 3409124 - DNA, 25 bp, Homo sapien
gtagaaaatggatgcacataagtaa

SEQ ID NO: 3409125 - DNA, 25 bp, Homo sapien
catgtaaagagctttctcatggcat

SEQ ID NO: 3409126 - DNA, 25 bp, Homo sapien
agagctttctcatggcattttttac

SEQ ID NO: 3409127 - DNA, 25 bp, Homo sapien
gtaaagagctttctcatggcatttt

SEQ ID NO: 3409128 - DNA, 25 bp, Homo sapien
taaagagctttctcatggcattttt

SEQ ID NO: 3409129 - DNA, 25 bp, Homo sapien
cccatgtactcttttccgtcctatt

SEQ ID NO: 3409130 - DNA, 25 bp, Homo sapien
accatatccttcaatggctgcatga

SEQ ID NO: 3409131 - DNA, 25 bp, Homo sapien
tcttcttccatagcccctaaaatga

SEQ ID NO: 3409132 - DNA, 25 bp, Homo sapien
ttgacttgatctctgaaaagaacac

SEQ ID NO: 3409133 - DNA, 25 bp, Homo sapien
tagagtctatttgcggccgtgttcc

SEQ ID NO: 3409134 - DNA, 25 bp, Homo sapien
aattcagactgacaatggaaagcaa

SEQ ID NO: 3409135 - DNA, 25 bp, Homo sapien
aatatcccacttggcaactcgtaga

SEQ ID NO: 3409136 - DNA, 25 bp, Homo sapien
actggaagagccatctagagaattc

SEQ ID NO: 3409137 - DNA, 25 bp, Homo sapien
ttctgtgtaagacctgttaaaacga

SEQ ID NO: 3409138 - DNA, 25 bp, Homo sapien
gacctgttaaaacgaattcagtcac

SEQ ID NO: 3409139 - DNA, 25 bp, Homo sapien
taaaacgaattcagtcacattcctt

SEQ ID NO: 3409140 - DNA, 25 bp, Homo sapien
tgtaagacctgttaaaacgaattca

SEQ ID NO: 3409141 - DNA, 25 bp, Homo sapien
catacacccattaaaggagatgatt

SEQ ID NO: 3409142 - DNA, 25 bp, Homo sapien
gcaggttgcctgaaagtgttatcat

SEQ ID NO: 3409143 - DNA, 25 bp, Homo sapien
tgatctcagtagcaccaaaaatgtg

SEQ ID NO: 3409144 - DNA, 25 bp, Homo sapien
aagaataaactgtgtctatcaaaga

SEQ ID NO: 3409145 - DNA, 25 bp, Homo sapien
agtcacacatgaagtggtctatgac

SEQ ID NO: 3409146 - DNA, 25 bp, Homo sapien
taacaaagggcacaagtcacacatg

SEQ ID NO: 3409147 - DNA, 25 bp, Homo sapien
gagtgtccaggcaaacaagttttaa

SEQ ID NO: 3409148 - DNA, 25 bp, Homo sapien
tggcagcaacaaagagaccaagggt

SEQ ID NO: 3409149 - DNA, 25 bp, Homo sapien
gaaggaagtttaataagcagatgaa

SEQ ID NO: 3409150 - DNA, 25 bp, Homo sapien
ctagagaaggaagtttaataagcag

SEQ ID NO: 3409151 - DNA, 25 bp, Homo sapien
gagaaggaagtttaataagcagatg

SEQ ID NO: 3409152 - DNA, 25 bp, Homo sapien
gaagtttaataagcagatgaaccca

SEQ ID NO: 3409153 - DNA, 25 bp, Homo sapien
caatgggcagagtttgtcactgggt

SEQ ID NO: 3409154 - DNA, 25 bp, Homo sapien
gcagagtttgtcactgggtgcagat

SEQ ID NO: 3409155 - DNA, 25 bp, Homo sapien
gtttgtcactgggtgcagatacaca

SEQ ID NO: 3409156 - DNA, 25 bp, Homo sapien
atcaatgggcagagtttgtcactgg

SEQ ID NO: 3409157 - DNA, 25 bp, Homo sapien
caacttcacggaaaatttcccattg

SEQ ID NO: 3409158 - DNA, 25 bp, Homo sapien
cggaaaatttcccattgagtttcag

SEQ ID NO: 3409159 - DNA, 25 bp, Homo sapien
aaaatttcccattgagtttcagtga

SEQ ID NO: 3409160 - DNA, 25 bp, Homo sapien
cttcacggaaaatttcccattgagt

SEQ ID NO: 3409161 - DNA, 25 bp, Homo sapien
cctcaaatattcaaactgcttttgc

SEQ ID NO: 3409162 - DNA, 25 bp, Homo sapien
ctcaaatattcaaactgcttttgca

SEQ ID NO: 3409163 - DNA, 25 bp, Homo sapien
gtcctcaaatattcaaactgctttt

SEQ ID NO: 3409164 - DNA, 25 bp, Homo sapien
cagtcctcaaatattcaaactgctt

SEQ ID NO: 3409165 - DNA, 25 bp, Homo sapien
gtagaagagcaagaacataacaaaa

SEQ ID NO: 3409166 - DNA, 25 bp, Homo sapien
acaaaaagtactttctgctcctttg

SEQ ID NO: 3409167 - DNA, 25 bp, Homo sapien
tacggtcactacaatgagcaggttg

SEQ ID NO: 3409168 - DNA, 25 bp, Homo sapien
tatgtactacttgatatgaggtctc

SEQ ID NO: 3409169 - DNA, 25 bp, Homo sapien
tgtactacttgatatgaggtctctt

SEQ ID NO: 3409170 - DNA, 25 bp, Homo sapien
tactacttgatatgaggtctcttct

SEQ ID NO: 3409171 - DNA, 25 bp, Homo sapien
ttatgtactacttgatatgaggtct

SEQ ID NO: 3409172 - DNA, 25 bp, Homo sapien
tgttacagacaaaatgaccaatgac

SEQ ID NO: 3409173 - DNA, 25 bp, Homo sapien
tcaagttgtattactgtgtgcaaaa

SEQ ID NO: 3409174 - DNA, 25 bp, Homo sapien
gggtccatgttacagacaaaatgac

SEQ ID NO: 3409175 - DNA, 25 bp, Homo sapien
agatgggagcccatgaataaggtca

SEQ ID NO: 3409176 - DNA, 25 bp, Homo sapien
tcacattgttcctttgctccgtacg

SEQ ID NO: 3409177 - DNA, 25 bp, Homo sapien
cacattgttcctttgctccgtacgt

SEQ ID NO: 3409178 - DNA, 25 bp, Homo sapien
cattgttcctttgctccgtacgtct

SEQ ID NO: 3409179 - DNA, 25 bp, Homo sapien
attgttcctttgctccgtacgtctt

SEQ ID NO: 3409180 - DNA, 25 bp, Homo sapien
tgaatatgttgcctaccattgtcac

SEQ ID NO: 3409181 - DNA, 25 bp, Homo sapien
caatgtagatgagcaagaacacaac

SEQ ID NO: 3409182 - DNA, 25 bp, Homo sapien
ccacagtcacaacaatgaatatgtt

SEQ ID NO: 3409183 - DNA, 25 bp, Homo sapien
caacaatgaatatgttgcctaccat

SEQ ID NO: 3409184 - DNA, 25 bp, Homo sapien
ctataaaaagctgggtcatgcaagc

SEQ ID NO: 3409185 - DNA, 25 bp, Homo sapien
taaaaagctgggtcatgcaagcttg

SEQ ID NO: 3409186 - DNA, 25 bp, Homo sapien
ctgggtcatgcaagcttggaacgaa

SEQ ID NO: 3409187 - DNA, 25 bp, Homo sapien
aagctgggtcatgcaagcttggaac

SEQ ID NO: 3409188 - DNA, 25 bp, Homo sapien
agtaaaatctcagcacccccaaatg

SEQ ID NO: 3409189 - DNA, 25 bp, Homo sapien
gacaaccaggagtaaaatctcagca

SEQ ID NO: 3409190 - DNA, 25 bp, Homo sapien
accaggagtaaaatctcagcacccc

SEQ ID NO: 3409191 - DNA, 25 bp, Homo sapien
caaccaggagtaaaatctcagcacc

SEQ ID NO: 3409192 - DNA, 25 bp, Homo sapien
ttcttcagggagtgcagaatgaccc

SEQ ID NO: 3409193 - DNA, 25 bp, Homo sapien
caaggatttatcaatgggtaaggtc

SEQ ID NO: 3409194 - DNA, 25 bp, Homo sapien
tcttaaagtatagattagagggttc

SEQ ID NO: 3409195 - DNA, 25 bp, Homo sapien
gcagtagaatgcacacccgttggtt

SEQ ID NO: 3409196 - DNA, 25 bp, Homo sapien
tgactccttgtccaacttataagga

SEQ ID NO: 3409197 - DNA, 25 bp, Homo sapien
tggtctgactccttgtccaacttat

SEQ ID NO: 3409198 - DNA, 25 bp, Homo sapien
tctgactccttgtccaacttataag

SEQ ID NO: 3409199 - DNA, 25 bp, Homo sapien
ggtctgactccttgtccaacttata

SEQ ID NO: 3409200 - DNA, 25 bp, Homo sapien
cccaggaggacaatttctgtaatat

SEQ ID NO: 3409201 - DNA, 25 bp, Homo sapien
caggaggacaatttctgtaatattg

SEQ ID NO: 3409202 - DNA, 25 bp, Homo sapien
gaagcccaggaggacaatttctgta

SEQ ID NO: 3409203 - DNA, 25 bp, Homo sapien
ggagaagcccaggaggacaatttct

SEQ ID NO: 3409204 - DNA, 25 bp, Homo sapien
tatacaatcaataagggaggaatgg

SEQ ID NO: 3409205 - DNA, 25 bp, Homo sapien
gtatacaatcaataagggaggaatg

SEQ ID NO: 3409206 - DNA, 25 bp, Homo sapien
atacaatcaataagggaggaatggt

SEQ ID NO: 3409207 - DNA, 25 bp, Homo sapien
gatgtaaacctgtcaattcatgatg

SEQ ID NO: 3409208 - DNA, 25 bp, Homo sapien
tgaaacacagaatacagaaaacctc

SEQ ID NO: 3409209 - DNA, 25 bp, Homo sapien
cagaatacagaaaacctccagtcac

SEQ ID NO: 3409210 - DNA, 25 bp, Homo sapien
acagaaggatgtaaacctgtcaatt

SEQ ID NO: 3409211 - DNA, 25 bp, Homo sapien
gtcaatgcaccccagttccaataaa

SEQ ID NO: 3409212 - DNA, 25 bp, Homo sapien
taaagtaggtgtcaatgcaccccag

SEQ ID NO: 3409213 - DNA, 25 bp, Homo sapien
aatgcaccccagttccaataaaggg

SEQ ID NO: 3409214 - DNA, 25 bp, Homo sapien
aagtaggtgtcaatgcaccccagtt

SEQ ID NO: 3409215 - DNA, 25 bp, Homo sapien
gcaatgcttctttcactgaggattg

SEQ ID NO: 3409216 - DNA, 25 bp, Homo sapien
aatgcttctttcactgaggattgcc

SEQ ID NO: 3409217 - DNA, 25 bp, Homo sapien
tcttggtccagaaaagcaatgcttc

SEQ ID NO: 3409218 - DNA, 25 bp, Homo sapien
tgcttctttcactgaggattgccat

SEQ ID NO: 3409219 - DNA, 25 bp, Homo sapien
taggaggacaaatgctgtaacattg

SEQ ID NO: 3409220 - DNA, 25 bp, Homo sapien
ggaggacaaatgctgtaacattgat

SEQ ID NO: 3409221 - DNA, 25 bp, Homo sapien
ctaggaggacaaatgctgtaacatt

SEQ ID NO: 3409222 - DNA, 25 bp, Homo sapien
aggacaaatgctgtaacattgatac

SEQ ID NO: 3409223 - DNA, 25 bp, Homo sapien
aaagtatgtgagtaaaccgtatgac

SEQ ID NO: 3409224 - DNA, 25 bp, Homo sapien
gagtaaaccgtatgacaaataatgc

SEQ ID NO: 3409225 - DNA, 25 bp, Homo sapien
atgtgagtaaaccgtatgacaaata

SEQ ID NO: 3409226 - DNA, 25 bp, Homo sapien
agtaaaccgtatgacaaataatgca

SEQ ID NO: 3409227 - DNA, 25 bp, Homo sapien
aaggtggggttggcaataatagtca

SEQ ID NO: 3409228 - DNA, 25 bp, Homo sapien
gaaacagtctttttatcatggagat

SEQ ID NO: 3409229 - DNA, 25 bp, Homo sapien
ggaaacagtctttttatcatggaga

SEQ ID NO: 3409230 - DNA, 25 bp, Homo sapien
gaatgcacaaaacctgcagtgacag

SEQ ID NO: 3409231 - DNA, 25 bp, Homo sapien
aaacacagaatgcacaaaacctgca

SEQ ID NO: 3409232 - DNA, 25 bp, Homo sapien
acagaatgcacaaaacctgcagtga

SEQ ID NO: 3409233 - DNA, 25 bp, Homo sapien
aatgcacaaaacctgcagtgacagc

SEQ ID NO: 3409234 - DNA, 25 bp, Homo sapien
gattagtagaaggatgaacacgacc

SEQ ID NO: 3409235 - DNA, 25 bp, Homo sapien
gaaggatgaacacgaccatacagat

SEQ ID NO: 3409236 - DNA, 25 bp, Homo sapien
gaacacgaccatacagattcctcca

SEQ ID NO: 3409237 - DNA, 25 bp, Homo sapien
tacagattcctccaccattggcaac

SEQ ID NO: 3409238 - DNA, 25 bp, Homo sapien
gacagtcacggtaatgtgggagctg

SEQ ID NO: 3409239 - DNA, 25 bp, Homo sapien
aaaaaacaggacagtcacggtaatg

SEQ ID NO: 3409240 - DNA, 25 bp, Homo sapien
acaggacagtcacggtaatgtggga

SEQ ID NO: 3409241 - DNA, 25 bp, Homo sapien
aaacaggacagtcacggtaatgtgg

SEQ ID NO: 3409242 - DNA, 25 bp, Homo sapien
taatatttacaccagaggttttcta

SEQ ID NO: 3409243 - DNA, 25 bp, Homo sapien
atttacaccagaggttttctatagc

SEQ ID NO: 3409244 - DNA, 25 bp, Homo sapien
agagttaatatttacaccagaggtt

SEQ ID NO: 3409245 - DNA, 25 bp, Homo sapien
tagagttaatatttacaccagaggt

SEQ ID NO: 3409246 - DNA, 25 bp, Homo sapien
ctgtaatactgttattttgtctcat

SEQ ID NO: 3409247 - DNA, 25 bp, Homo sapien
tgcattttgcacatcaggatcctga

SEQ ID NO: 3409248 - DNA, 25 bp, Homo sapien
cactgacacaatgtatgtgagtaaa

SEQ ID NO: 3409249 - DNA, 25 bp, Homo sapien
attttgcacatcaggatcctgagag

SEQ ID NO: 3409250 - DNA, 25 bp, Homo sapien
catcaggatcctgagagaagcccag

SEQ ID NO: 3409251 - DNA, 25 bp, Homo sapien
agaggaagtcgacaatcaatacagg

SEQ ID NO: 3409252 - DNA, 25 bp, Homo sapien
tcacagaggaagtcgacaatcaata

SEQ ID NO: 3409253 - DNA, 25 bp, Homo sapien
gaagtcgacaatcaatacaggagaa

SEQ ID NO: 3409254 - DNA, 25 bp, Homo sapien
ggaagtcgacaatcaatacaggaga

SEQ ID NO: 3409255 - DNA, 25 bp, Homo sapien
catcaccagaagaaagatctgcacc

SEQ ID NO: 3409256 - DNA, 25 bp, Homo sapien
tcaccagaagaaagatctgcaccac

SEQ ID NO: 3409257 - DNA, 25 bp, Homo sapien
atggccatgtagcgatcccaggcca

SEQ ID NO: 3409258 - DNA, 25 bp, Homo sapien
tggccatgtagcgatcccaggccat

SEQ ID NO: 3409259 - DNA, 25 bp, Homo sapien
agatggccatgtagcgatcccaggc

SEQ ID NO: 3409260 - DNA, 25 bp, Homo sapien
gatggccatgtagcgatcccaggcc

SEQ ID NO: 3409261 - DNA, 25 bp, Homo sapien
ttgattcatgatggtcaaatagtgc

SEQ ID NO: 3409262 - DNA, 25 bp, Homo sapien
catgatggtcaaatagtgcagtggc

SEQ ID NO: 3409263 - DNA, 25 bp, Homo sapien
ctgttgattcatgatggtcaaatag

SEQ ID NO: 3409264 - DNA, 25 bp, Homo sapien
gatggtcaaatagtgcagtggctta

SEQ ID NO: 3409265 - DNA, 25 bp, Homo sapien
aaaacctccagtcatggccaacaca

SEQ ID NO: 3409266 - DNA, 25 bp, Homo sapien
ggccaacacaaacagaaggatgcaa

SEQ ID NO: 3409267 - DNA, 25 bp, Homo sapien
gggagacagtatacaacaacaattt

SEQ ID NO: 3409268 - DNA, 25 bp, Homo sapien
aaaaatggtcaatggcattcgggcc

SEQ ID NO: 3409269 - DNA, 25 bp, Homo sapien
ggagtttaggatgaccctatatgag

SEQ ID NO: 3409270 - DNA, 25 bp, Homo sapien
gaccctatatgagattagtagaagg

SEQ ID NO: 3409271 - DNA, 25 bp, Homo sapien
acaaccacggtaatgtgggatctgc

SEQ ID NO: 3409272 - DNA, 25 bp, Homo sapien
aaaccacagtgagacctataaagta

SEQ ID NO: 3409273 - DNA, 25 bp, Homo sapien
tgaggaatttatcaatagaaaagtt

SEQ ID NO: 3409274 - DNA, 25 bp, Homo sapien
agtgaggaatttatcaatagaaaag

SEQ ID NO: 3409275 - DNA, 25 bp, Homo sapien
atcaatagaaaagtttgaaacaggt

SEQ ID NO: 3409276 - DNA, 25 bp, Homo sapien
ttatcaatagaaaagtttgaaacag

SEQ ID NO: 3409277 - DNA, 25 bp, Homo sapien
gctcattgtaccaaagagtttttct

SEQ ID NO: 3409278 - DNA, 25 bp, Homo sapien
tatagctcattgtaccaaagagttt

SEQ ID NO: 3409279 - DNA, 25 bp, Homo sapien
tagctcattgtaccaaagagttttt

SEQ ID NO: 3409280 - DNA, 25 bp, Homo sapien
ttatagctcattgtaccaaagagtt

SEQ ID NO: 3409281 - DNA, 25 bp, Homo sapien
caggatcctgagtgttgcccaagag

SEQ ID NO: 3409282 - DNA, 25 bp, Homo sapien
atcaggatcctgagtgttgcccaag

SEQ ID NO: 3409283 - DNA, 25 bp, Homo sapien
cacatcaggatcctgagtgttgccc

SEQ ID NO: 3409284 - DNA, 25 bp, Homo sapien
aggatcctgagtgttgcccaagagg

SEQ ID NO: 3409285 - DNA, 25 bp, Homo sapien
aactctacagtcaatttgggacaaa

SEQ ID NO: 3409286 - DNA, 25 bp, Homo sapien
aagtggtcagtgacactggcaccac

SEQ ID NO: 3409287 - DNA, 25 bp, Homo sapien
gacaaatggctgtggaatatgcagc

SEQ ID NO: 3409288 - DNA, 25 bp, Homo sapien
tagaccatccccaccagtaggaaga

SEQ ID NO: 3409289 - DNA, 25 bp, Homo sapien
ctaaactagaatgactccataggag

SEQ ID NO: 3409290 - DNA, 25 bp, Homo sapien
agtaagtctacaattaacttgggag

SEQ ID NO: 3409291 - DNA, 25 bp, Homo sapien
cactgtcaccaagtgtgtgagtaaa

SEQ ID NO: 3409292 - DNA, 25 bp, Homo sapien
gcaagcaaggaagaaatacaccggg

SEQ ID NO: 3409293 - DNA, 25 bp, Homo sapien
tacaattaacttgggagaaatggta

SEQ ID NO: 3409294 - DNA, 25 bp, Homo sapien
gtcagtgcacgccactttcagtaat

SEQ ID NO: 3409295 - DNA, 25 bp, Homo sapien
tgtcagtgcacgccactttcagtaa

SEQ ID NO: 3409296 - DNA, 25 bp, Homo sapien
ctcttttcctgactgtttaagggag

SEQ ID NO: 3409297 - DNA, 25 bp, Homo sapien
caggagattaacagaagggtgaaaa

SEQ ID NO: 3409298 - DNA, 25 bp, Homo sapien
tacagattgctccactattgaaaac

SEQ ID NO: 3409299 - DNA, 25 bp, Homo sapien
ggatgactccacaggagattaacag

SEQ ID NO: 3409300 - DNA, 25 bp, Homo sapien
aaagagggcaaccacggtaatgcgg

SEQ ID NO: 3409301 - DNA, 25 bp, Homo sapien
gagggcaaccacggtaatgcgggag

SEQ ID NO: 3409302 - DNA, 25 bp, Homo sapien
aagagggcaaccacggtaatgcggg

SEQ ID NO: 3409303 - DNA, 25 bp, Homo sapien
aaaagagggcaaccacggtaatgcg

SEQ ID NO: 3409304 - DNA, 25 bp, Homo sapien
cattgagggttactgtagatacctc

SEQ ID NO: 3409305 - DNA, 25 bp, Homo sapien
ttgagggttactgtagatacctcat

SEQ ID NO: 3409306 - DNA, 25 bp, Homo sapien
tttcattgagggttactgtagatac

SEQ ID NO: 3409307 - DNA, 25 bp, Homo sapien
tcattgagggttactgtagatacct

SEQ ID NO: 3409308 - DNA, 25 bp, Homo sapien
ctcttccagctgattccagagttct

SEQ ID NO: 3409309 - DNA, 25 bp, Homo sapien
ttccagctgattccagagttctgtc

SEQ ID NO: 3409310 - DNA, 25 bp, Homo sapien
tcttccagctgattccagagttctg

SEQ ID NO: 3409311 - DNA, 25 bp, Homo sapien
ccagctgattccagagttctgtcat

SEQ ID NO: 3409312 - DNA, 25 bp, Homo sapien
gcacaacctcctgttggtcactggg

SEQ ID NO: 3409313 - DNA, 25 bp, Homo sapien
agcacaacctcctgttggtcactgg

SEQ ID NO: 3409314 - DNA, 25 bp, Homo sapien
gaaatactggaagcacaacctcctg

SEQ ID NO: 3409315 - DNA, 25 bp, Homo sapien
catccataaataacgggcagtgagg

SEQ ID NO: 3409316 - DNA, 25 bp, Homo sapien
ggtattggaatatgccacatccata

SEQ ID NO: 3409317 - DNA, 25 bp, Homo sapien
gaagaaatggtattggaatatgcca

SEQ ID NO: 3409318 - DNA, 25 bp, Homo sapien
tctataatcaatttggaagaaatgg

SEQ ID NO: 3409319 - DNA, 25 bp, Homo sapien
aatcgtaggacatccccacaagtag

SEQ ID NO: 3409320 - DNA, 25 bp, Homo sapien
cgtaggacatccccacaagtaggaa

SEQ ID NO: 3409321 - DNA, 25 bp, Homo sapien
taggacatccccacaagtaggaaga

SEQ ID NO: 3409322 - DNA, 25 bp, Homo sapien
atcgtaggacatccccacaagtagg

SEQ ID NO: 3409323 - DNA, 25 bp, Homo sapien
ggtatcagtgcacgccagttccagt

SEQ ID NO: 3409324 - DNA, 25 bp, Homo sapien
aagtggtcagtgacattgggccaca

SEQ ID NO: 3409325 - DNA, 25 bp, Homo sapien
gccacagaatgagagagtgtacaca

SEQ ID NO: 3409326 - DNA, 25 bp, Homo sapien
acagctcacaaaacctgcagacaca

SEQ ID NO: 3409327 - DNA, 25 bp, Homo sapien
caaaactcctgttgtcctttccagg

SEQ ID NO: 3409328 - DNA, 25 bp, Homo sapien
tatcttcaaaactcctgttgtcctt

SEQ ID NO: 3409329 - DNA, 25 bp, Homo sapien
ccacattttgctgttatcttcaaaa

SEQ ID NO: 3409330 - DNA, 25 bp, Homo sapien
tcctactgaaatgctttccacattt

SEQ ID NO: 3409331 - DNA, 25 bp, Homo sapien
cgctccccgccaccctgtggctggg

SEQ ID NO: 3409332 - DNA, 25 bp, Homo sapien
cctccagtacgctctccacgccctg

SEQ ID NO: 3409333 - DNA, 25 bp, Homo sapien
gtggcagggtcacgcagcgctcccc

SEQ ID NO: 3409334 - DNA, 25 bp, Homo sapien
ggcggtggcagggtcacgcagcgct

SEQ ID NO: 3409335 - DNA, 25 bp, Homo sapien
gcctccaatacgacctcctctagga

SEQ ID NO: 3409336 - DNA, 25 bp, Homo sapien
ccatgcctccaatacgacctcctct

SEQ ID NO: 3409337 - DNA, 25 bp, Homo sapien
atgcctccaatacgacctcctctag

SEQ ID NO: 3409338 - DNA, 25 bp, Homo sapien
agccccatgcctccaatacgacctc

SEQ ID NO: 3409339 - DNA, 25 bp, Homo sapien
gaaatatccatttgtgacctggaag

SEQ ID NO: 3409340 - DNA, 25 bp, Homo sapien
ccagaaatatccatttgtgacctgg

SEQ ID NO: 3409341 - DNA, 25 bp, Homo sapien
gaagcagcagacacccaaggcttag

SEQ ID NO: 3409342 - DNA, 25 bp, Homo sapien
ggtcaggaccagaaatatccatttg

SEQ ID NO: 3409343 - DNA, 25 bp, Homo sapien
acagggacccaacacgcccactccg

SEQ ID NO: 3409344 - DNA, 25 bp, Homo sapien
aacacgcccactccggaacagcgtg

SEQ ID NO: 3409345 - DNA, 25 bp, Homo sapien
acccaacacgcccactccggaacag

SEQ ID NO: 3409346 - DNA, 25 bp, Homo sapien
cagggacccaacacgcccactccgg

SEQ ID NO: 3409347 - DNA, 25 bp, Homo sapien
cactggccaggtaaaggcagcttct

SEQ ID NO: 3409348 - DNA, 25 bp, Homo sapien
tctctcaagttgcatacactggcca

SEQ ID NO: 3409349 - DNA, 25 bp, Homo sapien
catacactggccaggtaaaggcagc

SEQ ID NO: 3409350 - DNA, 25 bp, Homo sapien
caagttgcatacactggccaggtaa

SEQ ID NO: 3409351 - DNA, 25 bp, Homo sapien
tccccagggtaagagtgaagagaca

SEQ ID NO: 3409352 - DNA, 25 bp, Homo sapien
ccccagggtaagagtgaagagacag

SEQ ID NO: 3409353 - DNA, 25 bp, Homo sapien
ggtccccagggtaagagtgaagaga

SEQ ID NO: 3409354 - DNA, 25 bp, Homo sapien
gtccccagggtaagagtgaagagac

SEQ ID NO: 3409355 - DNA, 25 bp, Homo sapien
tgttctttagtcgagtgatgggttg

SEQ ID NO: 3409356 - DNA, 25 bp, Homo sapien
tctttagtcgagtgatgggttgagc

SEQ ID NO: 3409357 - DNA, 25 bp, Homo sapien
atctgttctttagtcgagtgatggg

SEQ ID NO: 3409358 - DNA, 25 bp, Homo sapien
tctgttctttagtcgagtgatgggt

SEQ ID NO: 3409359 - DNA, 25 bp, Homo sapien
ttgctgggacctgcctagaaccgcc

SEQ ID NO: 3409360 - DNA, 25 bp, Homo sapien
gcctagaaccgcctggagggccatg

SEQ ID NO: 3409361 - DNA, 25 bp, Homo sapien
ccttgcaagcccctggggtccctgt

SEQ ID NO: 3409362 - DNA, 25 bp, Homo sapien
ccagtacttttttgctgggacctgc

SEQ ID NO: 3409363 - DNA, 25 bp, Homo sapien
ctgaaaaggatgcaaagcctgctgt

SEQ ID NO: 3409364 - DNA, 25 bp, Homo sapien
aggatgcaaagcctgctgtttcagg

SEQ ID NO: 3409365 - DNA, 25 bp, Homo sapien
gaaaaggatgcaaagcctgctgttt

SEQ ID NO: 3409366 - DNA, 25 bp, Homo sapien
aaaggatgcaaagcctgctgtttca

SEQ ID NO: 3409367 - DNA, 25 bp, Homo sapien
gagaccgcgagttcttgatgttcgt

SEQ ID NO: 3409368 - DNA, 25 bp, Homo sapien
gaccgcgagttcttgatgttcgttg

SEQ ID NO: 3409369 - DNA, 25 bp, Homo sapien
aggagaccgcgagttcttgatgttc

SEQ ID NO: 3409370 - DNA, 25 bp, Homo sapien
cgcgagttcttgatgttcgttggaa

SEQ ID NO: 3409371 - DNA, 25 bp, Homo sapien
cttgtcaagtaatgctcctggtgtc

SEQ ID NO: 3409372 - DNA, 25 bp, Homo sapien
tttaatcttaagtggtctagaataa

SEQ ID NO: 3409373 - DNA, 25 bp, Homo sapien
cgatatgaaactcgggttttaatct

SEQ ID NO: 3409374 - DNA, 25 bp, Homo sapien
ctggatgtcgatatgaaactcgggt

SEQ ID NO: 3409375 - DNA, 25 bp, Homo sapien
tcttaagtggtctagaataaaacat

SEQ ID NO: 3409376 - DNA, 25 bp, Homo sapien
tagcttttctaacaaaggaagccat

SEQ ID NO: 3409377 - DNA, 25 bp, Homo sapien
acaaaggaagccatattcttcaaac

SEQ ID NO: 3409378 - DNA, 25 bp, Homo sapien
ctagcttttctaacaaaggaagcca

SEQ ID NO: 3409379 - DNA, 25 bp, Homo sapien
atagatcttcagaggcattacttac

SEQ ID NO: 3409380 - DNA, 25 bp, Homo sapien
catgtgtcctgcatagaaatagatc

SEQ ID NO: 3409381 - DNA, 25 bp, Homo sapien
gaatttcatgtgtcctgcatagaaa

SEQ ID NO: 3409382 - DNA, 25 bp, Homo sapien
aatagatcttcagaggcattactta

SEQ ID NO: 3409383 - DNA, 25 bp, Homo sapien
ccaatctccaaggaaatagacttac

SEQ ID NO: 3409384 - DNA, 25 bp, Homo sapien
catccaatctccaaggaaatagact

SEQ ID NO: 3409385 - DNA, 25 bp, Homo sapien
gatggcatcatccaatctccaagga

SEQ ID NO: 3409386 - DNA, 25 bp, Homo sapien
agagatggcatcatccaatctccaa

SEQ ID NO: 3409387 - DNA, 25 bp, Homo sapien
gagccatgaatttaagcacaagtga

SEQ ID NO: 3409388 - DNA, 25 bp, Homo sapien
catgaatttaagcacaagtgaagac

SEQ ID NO: 3409389 - DNA, 25 bp, Homo sapien
ctgcaaaagagccatgaatttaagc

SEQ ID NO: 3409390 - DNA, 25 bp, Homo sapien
caaaagagccatgaatttaagcaca

SEQ ID NO: 3409391 - DNA, 25 bp, Homo sapien
cagcttcttgttctggtggtttcca

SEQ ID NO: 3409392 - DNA, 25 bp, Homo sapien
gttcaggtttctgagattttcccaa

SEQ ID NO: 3409393 - DNA, 25 bp, Homo sapien
gcttcttgttctggtggtttccatg

SEQ ID NO: 3409394 - DNA, 25 bp, Homo sapien
ggtttccatgttcaggtttctgaga

SEQ ID NO: 3409395 - DNA, 25 bp, Homo sapien
aatgtttcattctggctttgctttc

SEQ ID NO: 3409396 - DNA, 25 bp, Homo sapien
gcaggcatcttctgatattcagctc

SEQ ID NO: 3409397 - DNA, 25 bp, Homo sapien
ttgctgaaaaatgtcctcgtcctcc

SEQ ID NO: 3409398 - DNA, 25 bp, Homo sapien
cttaaaagctccctggaatgtttca

SEQ ID NO: 3409399 - DNA, 25 bp, Homo sapien
tggcacatttgcttcagatcctcat

SEQ ID NO: 3409400 - DNA, 25 bp, Homo sapien
agtagctccacatctgctttatggc

SEQ ID NO: 3409401 - DNA, 25 bp, Homo sapien
gcacatttgcttcagatcctcatac

SEQ ID NO: 3409402 - DNA, 25 bp, Homo sapien
acatctgctttatggcacatttgct

SEQ ID NO: 3409403 - DNA, 25 bp, Homo sapien
accctcccaaccaaggagcattagt

SEQ ID NO: 3409404 - DNA, 25 bp, Homo sapien
ccctcccaaccaaggagcattagtt

SEQ ID NO: 3409405 - DNA, 25 bp, Homo sapien
ttgatgggaaatatttcttggggct

SEQ ID NO: 3409406 - DNA, 25 bp, Homo sapien
tgatgggaaatatttcttggggcta

SEQ ID NO: 3409407 - DNA, 25 bp, Homo sapien
atgggaaatatttcttggggctatt

SEQ ID NO: 3409408 - DNA, 25 bp, Homo sapien
gatgggaaatatttcttggggctat

SEQ ID NO: 3409409 - DNA, 25 bp, Homo sapien
ctgcaaggagaaacataccctttcc

SEQ ID NO: 3409410 - DNA, 25 bp, Homo sapien
gcaaggagaaacataccctttccac

SEQ ID NO: 3409411 - DNA, 25 bp, Homo sapien
aaggagaaacataccctttccacat

SEQ ID NO: 3409412 - DNA, 25 bp, Homo sapien
tgcaaggagaaacataccctttcca

SEQ ID NO: 3409413 - DNA, 25 bp, Homo sapien
cagatgcttgcagcaacagggactc

SEQ ID NO: 3409414 - DNA, 25 bp, Homo sapien
ctcagatgcttgcagcaacagggac

SEQ ID NO: 3409415 - DNA, 25 bp, Homo sapien
tcagatgcttgcagcaacagggact

SEQ ID NO: 3409416 - DNA, 25 bp, Homo sapien
taatattctctataagaagaacaaa

SEQ ID NO: 3409417 - DNA, 25 bp, Homo sapien
tattctctataagaagaacaaaacc

SEQ ID NO: 3409418 - DNA, 25 bp, Homo sapien
ttaatattctctataagaagaacaa

SEQ ID NO: 3409419 - DNA, 25 bp, Homo sapien
atattctctataagaagaacaaaac

SEQ ID NO: 3409420 - DNA, 25 bp, Homo sapien
tcgggatcttcttgagggtcacatc

SEQ ID NO: 3409421 - DNA, 25 bp, Homo sapien
ttttgcagtgatatcgggatcttct

SEQ ID NO: 3409422 - DNA, 25 bp, Homo sapien
tgagccccccatacaagaaaacatt

SEQ ID NO: 3409423 - DNA, 25 bp, Homo sapien
agatatgactattggctctttcagg

SEQ ID NO: 3409424 - DNA, 25 bp, Homo sapien
ctcccaataatatttgccagatgtg

SEQ ID NO: 3409425 - DNA, 25 bp, Homo sapien
ccaataatatttgccagatgtgaaa

SEQ ID NO: 3409426 - DNA, 25 bp, Homo sapien
cccaataatatttgccagatgtgaa

SEQ ID NO: 3409427 - DNA, 25 bp, Homo sapien
aataatatttgccagatgtgaaagc

SEQ ID NO: 3409428 - DNA, 25 bp, Homo sapien
aaagagattgcagtgactgtcctcc

SEQ ID NO: 3409429 - DNA, 25 bp, Homo sapien
tgtctcctctttccaataattgtta

SEQ ID NO: 3409430 - DNA, 25 bp, Homo sapien
tggtaggtcttggaacgtattgcac

SEQ ID NO: 3409431 - DNA, 25 bp, Homo sapien
tcaattccaagagtcccccacgtga

SEQ ID NO: 3409432 - DNA, 25 bp, Homo sapien
ctttctgttaggcttgtgtgatgtc

SEQ ID NO: 3409433 - DNA, 25 bp, Homo sapien
tctgttaggcttgtgtgatgtctga

SEQ ID NO: 3409434 - DNA, 25 bp, Homo sapien
gttaggcttgtgtgatgtctgagac

SEQ ID NO: 3409435 - DNA, 25 bp, Homo sapien
ggcagatgggttctttctgttaggc

SEQ ID NO: 3409436 - DNA, 25 bp, Homo sapien
gctgtgacagttccccgcatgtggg

SEQ ID NO: 3409437 - DNA, 25 bp, Homo sapien
gcaggtaggaattttggcttcttcc

SEQ ID NO: 3409438 - DNA, 25 bp, Homo sapien
acagttccccgcatgtgggcagcag

SEQ ID NO: 3409439 - DNA, 25 bp, Homo sapien
ttggttttgatgtcctcctgctgtg

SEQ ID NO: 3409440 - DNA, 25 bp, Homo sapien
atgggttgagcacagagatccgagc

SEQ ID NO: 3409441 - DNA, 25 bp, Homo sapien
tgggttgagcacagagatccgagct

SEQ ID NO: 3409442 - DNA, 25 bp, Homo sapien
gatgggttgagcacagagatccgag

SEQ ID NO: 3409443 - DNA, 25 bp, Homo sapien
tgatgggttgagcacagagatccga

SEQ ID NO: 3409444 - DNA, 25 bp, Homo sapien
ccctgtaccttttagctgggacctg

SEQ ID NO: 3409445 - DNA, 25 bp, Homo sapien
tctagacgtggcttgcctgtggaca

SEQ ID NO: 3409446 - DNA, 25 bp, Homo sapien
gaggtaggtccaggtagcttctgca

SEQ ID NO: 3409447 - DNA, 25 bp, Homo sapien
cctttggcccatgaggtaggtccag

SEQ ID NO: 3409448 - DNA, 25 bp, Homo sapien
ctagacgtggcttgcctgtggacag

SEQ ID NO: 3409449 - DNA, 25 bp, Homo sapien
tgcctttacctggccagtgtatgca

SEQ ID NO: 3409450 - DNA, 25 bp, Homo sapien
gggcaggacccagattgctttggca

SEQ ID NO: 3409451 - DNA, 25 bp, Homo sapien
ctgccaagccaacaagtatggggca

SEQ ID NO: 3409452 - DNA, 25 bp, Homo sapien
caggacccagattgctttggcaaat

SEQ ID NO: 3409453 - DNA, 25 bp, Homo sapien
tgccaagccaacaagtatggggcag

SEQ ID NO: 3409454 - DNA, 25 bp, Homo sapien
aatggacatgtctagtcctgaccgg

SEQ ID NO: 3409455 - DNA, 25 bp, Homo sapien
caaaaatggacatgtctagtcctga

SEQ ID NO: 3409456 - DNA, 25 bp, Homo sapien
caggtcaaaaatggacatgtctagt

SEQ ID NO: 3409457 - DNA, 25 bp, Homo sapien
ggacatgtctagtcctgaccggcca

SEQ ID NO: 3409458 - DNA, 25 bp, Homo sapien
gccctgttgactttgtgcattcaga

SEQ ID NO: 3409459 - DNA, 25 bp, Homo sapien
gcattcagagcactggacaagaaat

SEQ ID NO: 3409460 - DNA, 25 bp, Homo sapien
tttgaggtttatctgccctgttgac

SEQ ID NO: 3409461 - DNA, 25 bp, Homo sapien
gagttccctctgaaagacctgtaag

SEQ ID NO: 3409462 - DNA, 25 bp, Homo sapien
cagcaaacagagcaggctcctgtcc

SEQ ID NO: 3409463 - DNA, 25 bp, Homo sapien
tcaatgggacagtgtctgtgatccc

SEQ ID NO: 3409464 - DNA, 25 bp, Homo sapien
tctgtgatcccggtgctcctgagag

SEQ ID NO: 3409465 - DNA, 25 bp, Homo sapien
agtgtctgtgatcccggtgctcctg

SEQ ID NO: 3409466 - DNA, 25 bp, Homo sapien
tacagaaatcgatcttcagagccat

SEQ ID NO: 3409467 - DNA, 25 bp, Homo sapien
gccataaattgaagcaccagtgcag

SEQ ID NO: 3409468 - DNA, 25 bp, Homo sapien
ccagaggttggaagctaagaaagcc

SEQ ID NO: 3409469 - DNA, 25 bp, Homo sapien
cagagctgcttaaagggactcagag

SEQ ID NO: 3409470 - DNA, 25 bp, Homo sapien
agcatctggttctggtggtttccac

SEQ ID NO: 3409471 - DNA, 25 bp, Homo sapien
cattcaggtttctgtgattttcaca

SEQ ID NO: 3409472 - DNA, 25 bp, Homo sapien
gtggtttccacattcaggtttctgt

SEQ ID NO: 3409473 - DNA, 25 bp, Homo sapien
caaagactgcattttctgtaaaagc

SEQ ID NO: 3409474 - DNA, 25 bp, Homo sapien
gaaggtagagtagtacaggactaac

SEQ ID NO: 3409475 - DNA, 25 bp, Homo sapien
tggagaaggtagagtagtacaggac

SEQ ID NO: 3409476 - DNA, 25 bp, Homo sapien
tcctggagaaggtagagtagtacag

SEQ ID NO: 3409477 - DNA, 25 bp, Homo sapien
gagaaggtagagtagtacaggacta

SEQ ID NO: 3409478 - DNA, 25 bp, Homo sapien
tgcagtgataatgggttagtcaaaa

SEQ ID NO: 3409479 - DNA, 25 bp, Homo sapien
gcagtgataatgggttagtcaaaag

SEQ ID NO: 3409480 - DNA, 25 bp, Homo sapien
ctgcagtgataatgggttagtcaaa

SEQ ID NO: 3409481 - DNA, 25 bp, Homo sapien
gcaggcatcttctgatactcagctc

SEQ ID NO: 3409482 - DNA, 25 bp, Homo sapien
gctctaattgcttctagccttaaat

SEQ ID NO: 3409483 - DNA, 25 bp, Homo sapien
ctttacttaaatgaagtcgatgaaa

SEQ ID NO: 3409484 - DNA, 25 bp, Homo sapien
tcagcatctccaaattatgtttttc

SEQ ID NO: 3409485 - DNA, 25 bp, Homo sapien
cttaaaatctccctcctatgagcca

SEQ ID NO: 3409486 - DNA, 25 bp, Homo sapien
gtttatggcacatttcgttcagctc

SEQ ID NO: 3409487 - DNA, 25 bp, Homo sapien
aatctccctcctatgagccattttg

SEQ ID NO: 3409488 - DNA, 25 bp, Homo sapien
tctggtttatggcacatttcgttca

SEQ ID NO: 3409489 - DNA, 25 bp, Homo sapien
ctgaaaccacatggcgagtttgtac

SEQ ID NO: 3409490 - DNA, 25 bp, Homo sapien
tgtccctcagtccagtgatgggccc

SEQ ID NO: 3409491 - DNA, 25 bp, Homo sapien
ctcggaattggttgagcctgtccct

SEQ ID NO: 3409492 - DNA, 25 bp, Homo sapien
tgcactgagctctggattcagaggc

SEQ ID NO: 3409493 - DNA, 25 bp, Homo sapien
cggaattggttgagcctgtccctca

SEQ ID NO: 3409494 - DNA, 25 bp, Homo sapien
ggcttcttcatgatgcagagtaata

SEQ ID NO: 3409495 - DNA, 25 bp, Homo sapien
tgcagtgaaatagggtacatcttga

SEQ ID NO: 3409496 - DNA, 25 bp, Homo sapien
gggtacatcttgatggtcacatcca

SEQ ID NO: 3409497 - DNA, 25 bp, Homo sapien
tgaaatagggtacatcttgatggtc

SEQ ID NO: 3409498 - DNA, 25 bp, Homo sapien
aattccaggagtcccctacatggac

SEQ ID NO: 3409499 - DNA, 25 bp, Homo sapien
ttctctttccaatacatattacaga

SEQ ID NO: 3409500 - DNA, 25 bp, Homo sapien
ccatctatcttctcattctgattct

SEQ ID NO: 3409501 - DNA, 25 bp, Homo sapien
gaagaaagagtccatcctctccatc

SEQ ID NO: 3409502 - DNA, 25 bp, Homo sapien
aaagctcacagtcttagcctcacaa

SEQ ID NO: 3409503 - DNA, 25 bp, Homo sapien
agctcacagtcttagcctcacaatc

SEQ ID NO: 3409504 - DNA, 25 bp, Homo sapien
aagctcacagtcttagcctcacaat

SEQ ID NO: 3409505 - DNA, 25 bp, Homo sapien
actttgtggagctcccacaaagggc

SEQ ID NO: 3409506 - DNA, 25 bp, Homo sapien
ctaattgtcgttggaatagccaggg

SEQ ID NO: 3409507 - DNA, 25 bp, Homo sapien
gtcacctttaagtggccactttgtg

SEQ ID NO: 3409508 - DNA, 25 bp, Homo sapien
ttgtcgttggaatagccagggttag

SEQ ID NO: 3409509 - DNA, 25 bp, Homo sapien
gactatgcaaagactatcaggccca

SEQ ID NO: 3409510 - DNA, 25 bp, Homo sapien
tgagagatggagcaaagctcccagg

SEQ ID NO: 3409511 - DNA, 25 bp, Homo sapien
agaagcagctcagacctcgtgcaga

SEQ ID NO: 3409512 - DNA, 25 bp, Homo sapien
gatcttcatgcagttatggaaaccc

SEQ ID NO: 3409513 - DNA, 25 bp, Homo sapien
accggtcctgtgatgggccctatag

SEQ ID NO: 3409514 - DNA, 25 bp, Homo sapien
cggtcctgtgatgggccctatagtg

SEQ ID NO: 3409515 - DNA, 25 bp, Homo sapien
tgatgggccctatagtgagctctgg

SEQ ID NO: 3409516 - DNA, 25 bp, Homo sapien
tccaccggtcctgtgatgggcccta

SEQ ID NO: 3409517 - DNA, 25 bp, Homo sapien
catgttgattccaccaagagggcca

SEQ ID NO: 3409518 - DNA, 25 bp, Homo sapien
catagaaaaccataattgaaggcat

SEQ ID NO: 3409519 - DNA, 25 bp, Homo sapien
attgaaggcattgcatgttgattcc

SEQ ID NO: 3409520 - DNA, 25 bp, Homo sapien
attgcatgttgattccaccaagagg

SEQ ID NO: 3409521 - DNA, 25 bp, Homo sapien
tgtaattggttacttcccaagtgaa

SEQ ID NO: 3409522 - DNA, 25 bp, Homo sapien
atattgtaattggttacttcccaag

SEQ ID NO: 3409523 - DNA, 25 bp, Homo sapien
gatccacatctaaacatcaaacttc

SEQ ID NO: 3409524 - DNA, 25 bp, Homo sapien
tctgtcagaattcaaagatccacat

SEQ ID NO: 3409525 - DNA, 25 bp, Homo sapien
taactccatatgagggaactctttg

SEQ ID NO: 3409526 - DNA, 25 bp, Homo sapien
gattatccaccttaacacataaaag

SEQ ID NO: 3409527 - DNA, 25 bp, Homo sapien
ctctacatagtcaggaaacattggg

SEQ ID NO: 3409528 - DNA, 25 bp, Homo sapien
taaggagccagtcgggtaactccat

SEQ ID NO: 3409529 - DNA, 25 bp, Homo sapien
ctgtgttggaccaatggccttggct

SEQ ID NO: 3409530 - DNA, 25 bp, Homo sapien
aatggccttggcttctaggcaaagc

SEQ ID NO: 3409531 - DNA, 25 bp, Homo sapien
ggccttggcttctaggcaaagccat

SEQ ID NO: 3409532 - DNA, 25 bp, Homo sapien
caatggccttggcttctaggcaaag

SEQ ID NO: 3409533 - DNA, 25 bp, Homo sapien
tcccagggtacatttgggagtactg

SEQ ID NO: 3409534 - DNA, 25 bp, Homo sapien
cccagggtacatttgggagtactgg

SEQ ID NO: 3409535 - DNA, 25 bp, Homo sapien
agcgtctgccaatctctaccatgcg

SEQ ID NO: 3409536 - DNA, 25 bp, Homo sapien
ccaatctctaccatgcgctccctca

SEQ ID NO: 3409537 - DNA, 25 bp, Homo sapien
tgccaatctctaccatgcgctccct

SEQ ID NO: 3409538 - DNA, 25 bp, Homo sapien
ccagcgtctgccaatctctaccatg

SEQ ID NO: 3409539 - DNA, 25 bp, Homo sapien
aaagtcttgagccagagatccaatt

SEQ ID NO: 3409540 - DNA, 25 bp, Homo sapien
ccttagcataggtcgattctttgta

SEQ ID NO: 3409541 - DNA, 25 bp, Homo sapien
gacaaagtcttgagccagagatcca

SEQ ID NO: 3409542 - DNA, 25 bp, Homo sapien
aggtgacaaagtcttgagccagaga

SEQ ID NO: 3409543 - DNA, 25 bp, Homo sapien
ctggggtccgggcctcctgtcatgg

SEQ ID NO: 3409544 - DNA, 25 bp, Homo sapien
actgatgttcaagggttactccata

SEQ ID NO: 3409545 - DNA, 25 bp, Homo sapien
gatgttcaagggttactccatattc

SEQ ID NO: 3409546 - DNA, 25 bp, Homo sapien
tgttcaagggttactccatattcat

SEQ ID NO: 3409547 - DNA, 25 bp, Homo sapien
ttactgatgttcaagggttactcca

SEQ ID NO: 3409548 - DNA, 25 bp, Homo sapien
gaaaaaagagcattgacaaaaaaca

SEQ ID NO: 3409549 - DNA, 25 bp, Homo sapien
ccacccatgggcatccataagtatc

SEQ ID NO: 3409550 - DNA, 25 bp, Homo sapien
aggcatcctgtccacccatgggcat

SEQ ID NO: 3409551 - DNA, 25 bp, Homo sapien
aagagcattgacaaaaaacacccag

SEQ ID NO: 3409552 - DNA, 25 bp, Homo sapien
ggctatgtattgtgctttctaccaa

SEQ ID NO: 3409553 - DNA, 25 bp, Homo sapien
tccaggtagccctttactattggca

SEQ ID NO: 3409554 - DNA, 25 bp, Homo sapien
cctcttcatgttgcttgatgcttta

SEQ ID NO: 3409555 - DNA, 25 bp, Homo sapien
cgcactttcagcttgctaatctatg

SEQ ID NO: 3409556 - DNA, 25 bp, Homo sapien
gcccttgtaccgtgcacgttctctt

SEQ ID NO: 3409557 - DNA, 25 bp, Homo sapien
taccgtgcacgttctctttcccaga

SEQ ID NO: 3409558 - DNA, 25 bp, Homo sapien
catgttaccgcccttgtaccgtgca

SEQ ID NO: 3409559 - DNA, 25 bp, Homo sapien
cttcttggtcacatgttaccgccct

SEQ ID NO: 3409560 - DNA, 25 bp, Homo sapien
taattggctagtgagttcattttac

SEQ ID NO: 3409561 - DNA, 25 bp, Homo sapien
aggagttcagtcatgcattctaagt

SEQ ID NO: 3409562 - DNA, 25 bp, Homo sapien
ctaagtagcagatcactcgaatgta

SEQ ID NO: 3409563 - DNA, 25 bp, Homo sapien
tcgaatgtaattggctagtgagttc

SEQ ID NO: 3409564 - DNA, 25 bp, Homo sapien
tgatatttatcagagagaatggtgc

SEQ ID NO: 3409565 - DNA, 25 bp, Homo sapien
gatatttatcagagagaatggtgcc

SEQ ID NO: 3409566 - DNA, 25 bp, Homo sapien
tctatatatcttccaactatttcaa

SEQ ID NO: 3409567 - DNA, 25 bp, Homo sapien
ttttctatatatcttccaactattt

SEQ ID NO: 3409568 - DNA, 25 bp, Homo sapien
tttctatatatcttccaactatttc

SEQ ID NO: 3409569 - DNA, 25 bp, Homo sapien
ttctatatatcttccaactatttca

SEQ ID NO: 3409570 - DNA, 25 bp, Homo sapien
tcttttgagaagatgggcattcaca

SEQ ID NO: 3409571 - DNA, 25 bp, Homo sapien
tatgggcttcttaaataagggctcc

SEQ ID NO: 3409572 - DNA, 25 bp, Homo sapien
gctgctcagatctgttggcatctac

SEQ ID NO: 3409573 - DNA, 25 bp, Homo sapien
ggcatctacagcatgtcttttgaga

SEQ ID NO: 3409574 - DNA, 25 bp, Homo sapien
aggccagtctctggttgtattcgcc

SEQ ID NO: 3409575 - DNA, 25 bp, Homo sapien
ggccagtctctggttgtattcgcca

SEQ ID NO: 3409576 - DNA, 25 bp, Homo sapien
gccagtctctggttgtattcgccat

SEQ ID NO: 3409577 - DNA, 25 bp, Homo sapien
caggccagtctctggttgtattcgc

SEQ ID NO: 3409578 - DNA, 25 bp, Homo sapien
aatgtgttctgggtaaactcttcca

SEQ ID NO: 3409579 - DNA, 25 bp, Homo sapien
acaaatgtgttctgggtaaactctt

SEQ ID NO: 3409580 - DNA, 25 bp, Homo sapien
caaatgtgttctgggtaaactcttc

SEQ ID NO: 3409581 - DNA, 25 bp, Homo sapien
gtctttcagcacagtacaggcacaa

SEQ ID NO: 3409582 - DNA, 25 bp, Homo sapien
catctgagggatgacttatgaccaa

SEQ ID NO: 3409583 - DNA, 25 bp, Homo sapien
ggcacaaaggtccagaaatccaaag

SEQ ID NO: 3409584 - DNA, 25 bp, Homo sapien
ggtgactggcttattgctccgcata

SEQ ID NO: 3409585 - DNA, 25 bp, Homo sapien
ctgaccaggtcttgctttaaaattt

SEQ ID NO: 3409586 - DNA, 25 bp, Homo sapien
ttttctttgaccatccggatttcca

SEQ ID NO: 3409587 - DNA, 25 bp, Homo sapien
tttctttgaccatccggatttccat

SEQ ID NO: 3409588 - DNA, 25 bp, Homo sapien
gattttctaatgcagatatactggg

SEQ ID NO: 3409589 - DNA, 25 bp, Homo sapien
ggatgattttctaatgcagatatac

SEQ ID NO: 3409590 - DNA, 25 bp, Homo sapien
gatatactgggacaatgtagagtaa

SEQ ID NO: 3409591 - DNA, 25 bp, Homo sapien
tactgggacaatgtagagtaatata

SEQ ID NO: 3409592 - DNA, 25 bp, Homo sapien
aagaaattagatctagaagcctctc

SEQ ID NO: 3409593 - DNA, 25 bp, Homo sapien
gggcctaggcctgctgaaagaaatt

SEQ ID NO: 3409594 - DNA, 25 bp, Homo sapien
gaagcctctcttcagtgtgaacata

SEQ ID NO: 3409595 - DNA, 25 bp, Homo sapien
cataggttaaaaattctttgataca

SEQ ID NO: 3409596 - DNA, 25 bp, Homo sapien
aagatgaaccccaaatgttgctttg

SEQ ID NO: 3409597 - DNA, 25 bp, Homo sapien
attttaagatgaaccccaaatgttg

SEQ ID NO: 3409598 - DNA, 25 bp, Homo sapien
taagatgaaccccaaatgttgcttt

SEQ ID NO: 3409599 - DNA, 25 bp, Homo sapien
tttaagatgaaccccaaatgttgct

SEQ ID NO: 3409600 - DNA, 25 bp, Homo sapien
tacctatggaaaggcttccttgatc

SEQ ID NO: 3409601 - DNA, 25 bp, Homo sapien
tctagagtcatacctatggaaaggc

SEQ ID NO: 3409602 - DNA, 25 bp, Homo sapien
gagtcatacctatggaaaggcttcc

SEQ ID NO: 3409603 - DNA, 25 bp, Homo sapien
ggaaaggcttccttgatccctccat

SEQ ID NO: 3409604 - DNA, 25 bp, Homo sapien
aatttctagattgaatgaagggcag

SEQ ID NO: 3409605 - DNA, 25 bp, Homo sapien
gagtcttgactagatggaggcagta

SEQ ID NO: 3409606 - DNA, 25 bp, Homo sapien
tgaagggcagaatttcggagtcttg

SEQ ID NO: 3409607 - DNA, 25 bp, Homo sapien
ggcagtagtaaatctcgaaatcgtt

SEQ ID NO: 3409608 - DNA, 25 bp, Homo sapien
gattcctcaaatggacttccaaaag

SEQ ID NO: 3409609 - DNA, 25 bp, Homo sapien
tccaaaaggaccatcaatatacagc

SEQ ID NO: 3409610 - DNA, 25 bp, Homo sapien
tcaaatggacttccaaaaggaccat

SEQ ID NO: 3409611 - DNA, 25 bp, Homo sapien
ttcagtgattcctcaaatggacttc

SEQ ID NO: 3409612 - DNA, 25 bp, Homo sapien
ccaatgactccagccatgcagaggc

SEQ ID NO: 3409613 - DNA, 25 bp, Homo sapien
tccaatgactccagccatgcagagg

SEQ ID NO: 3409614 - DNA, 25 bp, Homo sapien
tgactccagccatgcagaggctgac

SEQ ID NO: 3409615 - DNA, 25 bp, Homo sapien
aatgactccagccatgcagaggctg

SEQ ID NO: 3409616 - DNA, 25 bp, Homo sapien
agtcttctaagcttgtatggtttcc

SEQ ID NO: 3409617 - DNA, 25 bp, Homo sapien
taaagtatagtcttctaagcttgta

SEQ ID NO: 3409618 - DNA, 25 bp, Homo sapien
caaataaagtatagtcttctaagct

SEQ ID NO: 3409619 - DNA, 25 bp, Homo sapien
agtatagtcttctaagcttgtatgg

SEQ ID NO: 3409620 - DNA, 25 bp, Homo sapien
atgttgacatagtcaggtctgttct

SEQ ID NO: 3409621 - DNA, 25 bp, Homo sapien
catctgtttgactgaggtacagctg

SEQ ID NO: 3409622 - DNA, 25 bp, Homo sapien
cagtcttgaattcagtgcatgatat

SEQ ID NO: 3409623 - DNA, 25 bp, Homo sapien
ttccaccgaggacgtccaagaaaca

SEQ ID NO: 3409624 - DNA, 25 bp, Homo sapien
gaggacgtccaagaaacagtcttga

SEQ ID NO: 3409625 - DNA, 25 bp, Homo sapien
catcaaacaaaagtttccaccgagg

SEQ ID NO: 3409626 - DNA, 25 bp, Homo sapien
gtgaattgggtccacaacagaaaac

SEQ ID NO: 3409627 - DNA, 25 bp, Homo sapien
atagtgaattgggtccacaacagaa

SEQ ID NO: 3409628 - DNA, 25 bp, Homo sapien
attgggtccacaacagaaaacacca

SEQ ID NO: 3409629 - DNA, 25 bp, Homo sapien
gaattgggtccacaacagaaaacac

SEQ ID NO: 3409630 - DNA, 25 bp, Homo sapien
tgttctaacatacatgcggtaaggt

SEQ ID NO: 3409631 - DNA, 25 bp, Homo sapien
gtgcagcacatccaatcacagagtg

SEQ ID NO: 3409632 - DNA, 25 bp, Homo sapien
taaaaatgccacactgactgaagag

SEQ ID NO: 3409633 - DNA, 25 bp, Homo sapien
tcacagagtgtagggtatgtcccag

SEQ ID NO: 3409634 - DNA, 25 bp, Homo sapien
tctaactgcaaacccgaaattgttg

SEQ ID NO: 3409635 - DNA, 25 bp, Homo sapien
agcactgtgtcatgttctaaagcaa

SEQ ID NO: 3409636 - DNA, 25 bp, Homo sapien
gccaaacctggattgctgagcatct

SEQ ID NO: 3409637 - DNA, 25 bp, Homo sapien
tcacacttggatgggaggactacac

SEQ ID NO: 3409638 - DNA, 25 bp, Homo sapien
aacatctgacgtctcttccacttca

SEQ ID NO: 3409639 - DNA, 25 bp, Homo sapien
caacatctgacgtctcttccacttc

SEQ ID NO: 3409640 - DNA, 25 bp, Homo sapien
tctgacgtctcttccacttcaggaa

SEQ ID NO: 3409641 - DNA, 25 bp, Homo sapien
atctgacgtctcttccacttcagga

SEQ ID NO: 3409642 - DNA, 25 bp, Homo sapien
agtcggcctgatgtgaatattccca

SEQ ID NO: 3409643 - DNA, 25 bp, Homo sapien
caagtcggcctgatgtgaatattcc

SEQ ID NO: 3409644 - DNA, 25 bp, Homo sapien
aagtcggcctgatgtgaatattccc

SEQ ID NO: 3409645 - DNA, 25 bp, Homo sapien
cagaccttccataatagaatgtggg

SEQ ID NO: 3409646 - DNA, 25 bp, Homo sapien
gaagggaatacacaaggacatgagt

SEQ ID NO: 3409647 - DNA, 25 bp, Homo sapien
cacgattattaccacagtgtgccct

SEQ ID NO: 3409648 - DNA, 25 bp, Homo sapien
gcccagacgtcatagcccttggctt

SEQ ID NO: 3409649 - DNA, 25 bp, Homo sapien
cttaagatgtcagattccgtgaatg

SEQ ID NO: 3409650 - DNA, 25 bp, Homo sapien
ggccattaccaaccacacatagaat

SEQ ID NO: 3409651 - DNA, 25 bp, Homo sapien
tgtcacttttcctaaattggccatt

SEQ ID NO: 3409652 - DNA, 25 bp, Homo sapien
attcacctggatttgaagggttaat

SEQ ID NO: 3409653 - DNA, 25 bp, Homo sapien
gatctcttgatgttccatggactca

SEQ ID NO: 3409654 - DNA, 25 bp, Homo sapien
tgatgttccatggactcatgtcttg

SEQ ID NO: 3409655 - DNA, 25 bp, Homo sapien
tcttctgatctcttgatgttccatg

SEQ ID NO: 3409656 - DNA, 25 bp, Homo sapien
ccatggactcatgtcttgtttccat

SEQ ID NO: 3409657 - DNA, 25 bp, Homo sapien
aagttgggccacggggatcagcagg

SEQ ID NO: 3409658 - DNA, 25 bp, Homo sapien
agcagtgagactcggtctagctagc

SEQ ID NO: 3409659 - DNA, 25 bp, Homo sapien
agtgagactcggtctagctagcccc

SEQ ID NO: 3409660 - DNA, 25 bp, Homo sapien
agttgggccacggggatcagcaggg

SEQ ID NO: 3409661 - DNA, 25 bp, Homo sapien
gcaagcctatagatcctaaatcctt

SEQ ID NO: 3409662 - DNA, 25 bp, Homo sapien
gttgagctactcagcaagcctatag

SEQ ID NO: 3409663 - DNA, 25 bp, Homo sapien
gctactcagcaagcctatagatcct

SEQ ID NO: 3409664 - DNA, 25 bp, Homo sapien
ccaaactgttgagctactcagcaag

SEQ ID NO: 3409665 - DNA, 25 bp, Homo sapien
tttcttccctaagtcgctgtagcca

SEQ ID NO: 3409666 - DNA, 25 bp, Homo sapien
caggatcaacagaaggaccgtttta

SEQ ID NO: 3409667 - DNA, 25 bp, Homo sapien
tcaacagaaggaccgttttaggaca

SEQ ID NO: 3409668 - DNA, 25 bp, Homo sapien
ctgacaggatcaacagaaggaccgt

SEQ ID NO: 3409669 - DNA, 25 bp, Homo sapien
cagaaggaccgttttaggacaggag

SEQ ID NO: 3409670 - DNA, 25 bp, Homo sapien
tggactgtgcactcccacggacatc

SEQ ID NO: 3409671 - DNA, 25 bp, Homo sapien
tgtgcactcccacggacatcttctt

SEQ ID NO: 3409672 - DNA, 25 bp, Homo sapien
cctcctctcactggactgtgcactc

SEQ ID NO: 3409673 - DNA, 25 bp, Homo sapien
ctcccacggacatcttctttcaaaa

SEQ ID NO: 3409674 - DNA, 25 bp, Homo sapien
caaattctggacctgaatggctaca

SEQ ID NO: 3409675 - DNA, 25 bp, Homo sapien
gctgagcatctgaaggcacaaccct

SEQ ID NO: 3409676 - DNA, 25 bp, Homo sapien
caggcccaatgacccctactatggg

SEQ ID NO: 3409677 - DNA, 25 bp, Homo sapien
gggtctgaattgatcctttccaggg

SEQ ID NO: 3409678 - DNA, 25 bp, Homo sapien
taataatatatactcgatgtatgca

SEQ ID NO: 3409679 - DNA, 25 bp, Homo sapien
tatatactcgatgtatgcaagggaa

SEQ ID NO: 3409680 - DNA, 25 bp, Homo sapien
ctcgatgtatgcaagggaaactcac

SEQ ID NO: 3409681 - DNA, 25 bp, Homo sapien
actgttgagtgcataataatatata

SEQ ID NO: 3409682 - DNA, 25 bp, Homo sapien
tgaagatacagagacttaaaaacct

SEQ ID NO: 3409683 - DNA, 25 bp, Homo sapien
caatgaagatacagagacttaaaaa

SEQ ID NO: 3409684 - DNA, 25 bp, Homo sapien
atgaagatacagagacttaaaaacc

SEQ ID NO: 3409685 - DNA, 25 bp, Homo sapien
tcaatgaagatacagagacttaaaa

SEQ ID NO: 3409686 - DNA, 25 bp, Homo sapien
ttatttactgagtccataggctgtt

SEQ ID NO: 3409687 - DNA, 25 bp, Homo sapien
tcagcaattgatgacagcaatggtg

SEQ ID NO: 3409688 - DNA, 25 bp, Homo sapien
cagcaattgatgacagcaatggtgc

SEQ ID NO: 3409689 - DNA, 25 bp, Homo sapien
caacgtgacccccaaacgctcttct

SEQ ID NO: 3409690 - DNA, 25 bp, Homo sapien
tatccctttcttttgtctctgcttt

SEQ ID NO: 3409691 - DNA, 25 bp, Homo sapien
ttatccctttcttttgtctctgctt

SEQ ID NO: 3409692 - DNA, 25 bp, Homo sapien
cttttgtctctgctttccatcttac

SEQ ID NO: 3409693 - DNA, 25 bp, Homo sapien
tttcttttgtctctgctttccatct

SEQ ID NO: 3409694 - DNA, 25 bp, Homo sapien
cttagttgagtcagccagagacaca

SEQ ID NO: 3409695 - DNA, 25 bp, Homo sapien
tcagatattgaccttagttgagtca

SEQ ID NO: 3409696 - DNA, 25 bp, Homo sapien
tattgaccttagttgagtcagccag

SEQ ID NO: 3409697 - DNA, 25 bp, Homo sapien
gaccttagttgagtcagccagagac

SEQ ID NO: 3409698 - DNA, 25 bp, Homo sapien
cacctcaagagtgttctaagatgcg

SEQ ID NO: 3409699 - DNA, 25 bp, Homo sapien
tcaagagtgttctaagatgcggcac

SEQ ID NO: 3409700 - DNA, 25 bp, Homo sapien
cagaaagcacctcaagagtgttcta

SEQ ID NO: 3409701 - DNA, 25 bp, Homo sapien
gtgttctaagatgcggcactggccg

SEQ ID NO: 3409702 - DNA, 25 bp, Homo sapien
tgttccattgaatcccaaggtagga

SEQ ID NO: 3409703 - DNA, 25 bp, Homo sapien
tccattgaatcccaaggtaggatcc

SEQ ID NO: 3409704 - DNA, 25 bp, Homo sapien
tctgttccattgaatcccaaggtag

SEQ ID NO: 3409705 - DNA, 25 bp, Homo sapien
cattgaatcccaaggtaggatccat

SEQ ID NO: 3409706 - DNA, 25 bp, Homo sapien
aattctgtaccttgccaatgctctg

SEQ ID NO: 3409707 - DNA, 25 bp, Homo sapien
tctgtaccttgccaatgctctgata

SEQ ID NO: 3409708 - DNA, 25 bp, Homo sapien
tgtaccttgccaatgctctgataaa

SEQ ID NO: 3409709 - DNA, 25 bp, Homo sapien
taaattctgtaccttgccaatgctc

SEQ ID NO: 3409710 - DNA, 25 bp, Homo sapien
tcaccatagggagcatctctctctg

SEQ ID NO: 3409711 - DNA, 25 bp, Homo sapien
gcagccccacctagtgtaataggga

SEQ ID NO: 3409712 - DNA, 25 bp, Homo sapien
tctgcccttggtctgaaaagcacat

SEQ ID NO: 3409713 - DNA, 25 bp, Homo sapien
ttcaaggaacagagggtcaccctca

SEQ ID NO: 3409714 - DNA, 25 bp, Homo sapien
agatgtcggtaacagaatctccaac

SEQ ID NO: 3409715 - DNA, 25 bp, Homo sapien
gatggtgccaatcaaccggaaagcc

SEQ ID NO: 3409716 - DNA, 25 bp, Homo sapien
taaggtttccacagataacctgcct

SEQ ID NO: 3409717 - DNA, 25 bp, Homo sapien
gacaagcgagctgggagattgcaca

SEQ ID NO: 3409718 - DNA, 25 bp, Homo sapien
tctgccagccatgtatactgtaaag

SEQ ID NO: 3409719 - DNA, 25 bp, Homo sapien
tagccagattccctttggaaggact

SEQ ID NO: 3409720 - DNA, 25 bp, Homo sapien
aaaaagtcgcttctttgacagcagc

SEQ ID NO: 3409721 - DNA, 25 bp, Homo sapien
agctgaaggcagaaaatcctctaca

SEQ ID NO: 3409722 - DNA, 25 bp, Homo sapien
ctgtctgggttctgttgtagccaga

SEQ ID NO: 3409723 - DNA, 25 bp, Homo sapien
gatctaatgacaatgcagaaattct

SEQ ID NO: 3409724 - DNA, 25 bp, Homo sapien
taatgacaatgcagaaattctccca

SEQ ID NO: 3409725 - DNA, 25 bp, Homo sapien
tggatctaatgacaatgcagaaatt

SEQ ID NO: 3409726 - DNA, 25 bp, Homo sapien
tctaatgacaatgcagaaattctcc

SEQ ID NO: 3409727 - DNA, 25 bp, Homo sapien
tttggtgaagctttatctccgtgaa

SEQ ID NO: 3409728 - DNA, 25 bp, Homo sapien
tggattttggtgaagctttatctcc

SEQ ID NO: 3409729 - DNA, 25 bp, Homo sapien
gctgcctatgaaatctgttaacttt

SEQ ID NO: 3409730 - DNA, 25 bp, Homo sapien
cttgctgcctatgaaatctgttaac

SEQ ID NO: 3409731 - DNA, 25 bp, Homo sapien
caaatcccttccttcgctgacatat

SEQ ID NO: 3409732 - DNA, 25 bp, Homo sapien
taagagtgggcgatgcaaatccctt

SEQ ID NO: 3409733 - DNA, 25 bp, Homo sapien
gcaagtgacttgtgagcttcttcag

SEQ ID NO: 3409734 - DNA, 25 bp, Homo sapien
gctgacatatctttgaaggcttcca

SEQ ID NO: 3409735 - DNA, 25 bp, Homo sapien
gacccaggcgcctcatggccatcag

SEQ ID NO: 3409736 - DNA, 25 bp, Homo sapien
caggcgcctcatggccatcagcaga

SEQ ID NO: 3409737 - DNA, 25 bp, Homo sapien
ctgcccagaagcagaaattctccca

SEQ ID NO: 3409738 - DNA, 25 bp, Homo sapien
gaaattctcccactagacccaggcg

SEQ ID NO: 3409739 - DNA, 25 bp, Homo sapien
ctttgagatctcaataaagatggca

SEQ ID NO: 3409740 - DNA, 25 bp, Homo sapien
gaaggaagcgaccttggcattttct

SEQ ID NO: 3409741 - DNA, 25 bp, Homo sapien
ctcaataaagatggcatctggttcc

SEQ ID NO: 3409742 - DNA, 25 bp, Homo sapien
tcccataggatgctgttctttgaga

SEQ ID NO: 3409743 - DNA, 25 bp, Homo sapien
ttttagccagaggtgactaaaggaa

SEQ ID NO: 3409744 - DNA, 25 bp, Homo sapien
tatctgctggaaggcaagccttatc

SEQ ID NO: 3409745 - DNA, 25 bp, Homo sapien
gccaacacatattgaatatctgctg

SEQ ID NO: 3409746 - DNA, 25 bp, Homo sapien
tgtctctttaactgtaggcagatat

SEQ ID NO: 3409747 - DNA, 25 bp, Homo sapien
gggcatgtgcagcagcacggactca

SEQ ID NO: 3409748 - DNA, 25 bp, Homo sapien
catgtgcagcagcacggactcactt

SEQ ID NO: 3409749 - DNA, 25 bp, Homo sapien
tggggcatgtgcagcagcacggact

SEQ ID NO: 3409750 - DNA, 25 bp, Homo sapien
gcatgtgcagcagcacggactcact

SEQ ID NO: 3409751 - DNA, 25 bp, Homo sapien
ctgcactgagctctagattcagagg

SEQ ID NO: 3409752 - DNA, 25 bp, Homo sapien
tgtccctcagtccagtgatgggccc

SEQ ID NO: 3409753 - DNA, 25 bp, Homo sapien
tcagtccagtgatgggccctgcact

SEQ ID NO: 3409754 - DNA, 25 bp, Homo sapien
cagaattagatgagcctgtccctca

SEQ ID NO: 3409755 - DNA, 25 bp, Homo sapien
ctccacatcagaagatatgactgtt

SEQ ID NO: 3409756 - DNA, 25 bp, Homo sapien
cacatcagaagatatgactgttggc

SEQ ID NO: 3409757 - DNA, 25 bp, Homo sapien
gactgttggcttcattataatgcag

SEQ ID NO: 3409758 - DNA, 25 bp, Homo sapien
cagaagatatgactgttggcttcat

SEQ ID NO: 3409759 - DNA, 25 bp, Homo sapien
tggttggtaggtcttgggacatact

SEQ ID NO: 3409760 - DNA, 25 bp, Homo sapien
ctacatggttggtaggtcttgggac

SEQ ID NO: 3409761 - DNA, 25 bp, Homo sapien
catggttggtaggtcttgggacata

SEQ ID NO: 3409762 - DNA, 25 bp, Homo sapien
tacatggttggtaggtcttgggaca

SEQ ID NO: 3409763 - DNA, 25 bp, Homo sapien
ttggcgcattacaaactgtagccca

SEQ ID NO: 3409764 - DNA, 25 bp, Homo sapien
tggcgcattacaaactgtagcccaa

SEQ ID NO: 3409765 - DNA, 25 bp, Homo sapien
ggcgcattacaaactgtagcccaaa

SEQ ID NO: 3409766 - DNA, 25 bp, Homo sapien
ctggaaggtgggcgcgggagccttg

SEQ ID NO: 3409767 - DNA, 25 bp, Homo sapien
aaggccacttgggtatccgcaggtg

SEQ ID NO: 3409768 - DNA, 25 bp, Homo sapien
ctcctccgtggccaccttgtaaggc

SEQ ID NO: 3409769 - DNA, 25 bp, Homo sapien
ccttgtaaggccacttgggtatccg

SEQ ID NO: 3409770 - DNA, 25 bp, Homo sapien
tcagcctccggtttctcctccgtgg

SEQ ID NO: 3409771 - DNA, 25 bp, Homo sapien
ccacggcgccgggtgcttctcctgc

SEQ ID NO: 3409772 - DNA, 25 bp, Homo sapien
ttccacggcgccgggtgcttctcct

SEQ ID NO: 3409773 - DNA, 25 bp, Homo sapien
cttcttccacggcgccgggtgcttc

SEQ ID NO: 3409774 - DNA, 25 bp, Homo sapien
ttcttccacggcgccgggtgcttct

SEQ ID NO: 3409775 - DNA, 25 bp, Homo sapien
gacaccaggagcattacttgacaag

SEQ ID NO: 3409776 - DNA, 25 bp, Homo sapien
ggacaccaggagcattacttgacaa

SEQ ID NO: 3409777 - DNA, 25 bp, Homo sapien
ggtcccaccatgataacaccacatt

SEQ ID NO: 3409778 - DNA, 25 bp, Homo sapien
aggtcccaccatgataacaccacat

SEQ ID NO: 3409779 - DNA, 25 bp, Homo sapien
gtcccaccatgataacaccacattg

SEQ ID NO: 3409780 - DNA, 25 bp, Homo sapien
tccccagggtaagagtgaagagaca

SEQ ID NO: 3409781 - DNA, 25 bp, Homo sapien
ccccagggtaagagtgaagagacag

SEQ ID NO: 3409782 - DNA, 25 bp, Homo sapien
ggtccccagggtaagagtgaagaga

SEQ ID NO: 3409783 - DNA, 25 bp, Homo sapien
gtccccagggtaagagtgaagagac

SEQ ID NO: 3409784 - DNA, 25 bp, Homo sapien
cgccccgccaccctgcggctgggtc

SEQ ID NO: 3409785 - DNA, 25 bp, Homo sapien
cgcgccccgccaccctgcggctggg

SEQ ID NO: 3409786 - DNA, 25 bp, Homo sapien
cagcgcgccccgccaccctgcggct

SEQ ID NO: 3409787 - DNA, 25 bp, Homo sapien
gccaccctgcggctgggtcccagcc

SEQ ID NO: 3409788 - DNA, 25 bp, Homo sapien
ggtcccaggcgatgttgtgggtgtc

SEQ ID NO: 3409789 - DNA, 25 bp, Homo sapien
agagtggtcccaggcgatgttgtgg

SEQ ID NO: 3409790 - DNA, 25 bp, Homo sapien
gagtggtcccaggcgatgttgtggg

SEQ ID NO: 3409791 - DNA, 25 bp, Homo sapien
gtggtcccaggcgatgttgtgggtg

SEQ ID NO: 3409792 - DNA, 25 bp, Homo sapien
ccctcgtccagaacgcccttctcca

SEQ ID NO: 3409793 - DNA, 25 bp, Homo sapien
cgtccagaacgcccttctccaggac

SEQ ID NO: 3409794 - DNA, 25 bp, Homo sapien
tcgtccagaacgcccttctccagga

SEQ ID NO: 3409795 - DNA, 25 bp, Homo sapien
cctcgtccagaacgcccttctccag

SEQ ID NO: 3409796 - DNA, 25 bp, Homo sapien
tatgatttgggttgcgttcccctcc

SEQ ID NO: 3409797 - DNA, 25 bp, Homo sapien
cggtatatccacaaagccatggtag

SEQ ID NO: 3409798 - DNA, 25 bp, Homo sapien
atggtagcaggcgacattaaggccg

SEQ ID NO: 3409799 - DNA, 25 bp, Homo sapien
cctgcctgtgcagctatgatttggg

SEQ ID NO: 3409800 - DNA, 25 bp, Homo sapien
acaagtagttggtgatgatagcgtg

SEQ ID NO: 3409801 - DNA, 25 bp, Homo sapien
aagtagttggtgatgatagcgtgcc

SEQ ID NO: 3409802 - DNA, 25 bp, Homo sapien
agttcaacaagtagttggtgatgat

SEQ ID NO: 3409803 - DNA, 25 bp, Homo sapien
tcaacaagtagttggtgatgatagc

SEQ ID NO: 3409804 - DNA, 25 bp, Homo sapien
ccttcaaggtcaagacccaggacat

SEQ ID NO: 3409805 - DNA, 25 bp, Homo sapien
cagggctcggttgcgatcggttcca

SEQ ID NO: 3409806 - DNA, 25 bp, Homo sapien
cggttgcgatcggttccaccctgcg

SEQ ID NO: 3409807 - DNA, 25 bp, Homo sapien
ttgcgatcggttccaccctgcgtgg

SEQ ID NO: 3409808 - DNA, 25 bp, Homo sapien
ctcagggctcggttgcgatcggttc

SEQ ID NO: 3409809 - DNA, 25 bp, Homo sapien
ccgggccacacagggagcgcagcgt

SEQ ID NO: 3409810 - DNA, 25 bp, Homo sapien
cgggccacacagggagcgcagcgtc

SEQ ID NO: 3409811 - DNA, 25 bp, Homo sapien
tccgggccacacagggagcgcagcg

SEQ ID NO: 3409812 - DNA, 25 bp, Homo sapien
gggccacacagggagcgcagcgtca

SEQ ID NO: 3409813 - DNA, 25 bp, Homo sapien
ggctttcagaggctggtggtcatcc

SEQ ID NO: 3409814 - DNA, 25 bp, Homo sapien
ttcagaggctggtggtcatcctgac

SEQ ID NO: 3409815 - DNA, 25 bp, Homo sapien
ctttcagaggctggtggtcatcctg

SEQ ID NO: 3409816 - DNA, 25 bp, Homo sapien
gccacggcggggctttcagaggctg

SEQ ID NO: 3409817 - DNA, 25 bp, Homo sapien
cgcgtcaccagaatttcctgagccg

SEQ ID NO: 3409818 - DNA, 25 bp, Homo sapien
acgccgcgtcaccagaatttcctga

SEQ ID NO: 3409819 - DNA, 25 bp, Homo sapien
tcaccagaatttcctgagccgccag

SEQ ID NO: 3409820 - DNA, 25 bp, Homo sapien
ccccacgccgcgtcaccagaatttc

SEQ ID NO: 3409821 - DNA, 25 bp, Homo sapien
caggaccccggcaaaggggcaggtg

SEQ ID NO: 3409822 - DNA, 25 bp, Homo sapien
aggccagctcttggggagccctgcc

SEQ ID NO: 3409823 - DNA, 25 bp, Homo sapien
tctgggcagggccacttgtgctgct

SEQ ID NO: 3409824 - DNA, 25 bp, Homo sapien
gccgggagcccgcggcctctgggca

SEQ ID NO: 3409825 - DNA, 25 bp, Homo sapien
gcaggcgctgcaggcgcaggaggct

SEQ ID NO: 3409826 - DNA, 25 bp, Homo sapien
cacgccgggccgcaagctgctccgc

SEQ ID NO: 3409827 - DNA, 25 bp, Homo sapien
gccgggccgcaagctgctccgccgc

SEQ ID NO: 3409828 - DNA, 25 bp, Homo sapien
ccgcaggcgctgcaggcgcaggagg

SEQ ID NO: 3409829 - DNA, 25 bp, Homo sapien
ctggaaggtgggcgcgggcgccttg

SEQ ID NO: 3409830 - DNA, 25 bp, Homo sapien
tgcccttcggcaccggcctctggcg

SEQ ID NO: 3409831 - DNA, 25 bp, Homo sapien
ctgcccttcggcaccggcctctggc

SEQ ID NO: 3409832 - DNA, 25 bp, Homo sapien
gtcctcttcttccacggcggcaggc

SEQ ID NO: 3409833 - DNA, 25 bp, Homo sapien
tccacggcggcaggcgcttctcctg

SEQ ID NO: 3409834 - DNA, 25 bp, Homo sapien
tcctccgtggccaccttgtacggcc

SEQ ID NO: 3409835 - DNA, 25 bp, Homo sapien
tcttcttccacggcggcaggcgctt

SEQ ID NO: 3409836 - DNA, 25 bp, Homo sapien
gacaccaggagcattacttgacaag

SEQ ID NO: 3409837 - DNA, 25 bp, Homo sapien
ggacaccaggagcattacttgacaa

SEQ ID NO: 3409838 - DNA, 25 bp, Homo sapien
aaacagcaggctttgcatccttttc

SEQ ID NO: 3409839 - DNA, 25 bp, Homo sapien
tgtttcacccacaacagactcgcct

SEQ ID NO: 3409840 - DNA, 25 bp, Homo sapien
ctggccttaccccaggggcttctgt

SEQ ID NO: 3409841 - DNA, 25 bp, Homo sapien
gctttgcatccttttcaggcctggg

SEQ ID NO: 3409842 - DNA, 25 bp, Homo sapien
ttcatcatattcactttgtagccat

SEQ ID NO: 3409843 - DNA, 25 bp, Homo sapien
actttgtagccatgattcttcctga

SEQ ID NO: 3409844 - DNA, 25 bp, Homo sapien
ttgtagccatgattcttcctgacag

SEQ ID NO: 3409845 - DNA, 25 bp, Homo sapien
tattcactttgtagccatgattctt

SEQ ID NO: 3409846 - DNA, 25 bp, Homo sapien
gggatgtagtcctttcgccagtgga

SEQ ID NO: 3409847 - DNA, 25 bp, Homo sapien
gatgtagtcctttcgccagtggact

SEQ ID NO: 3409848 - DNA, 25 bp, Homo sapien
ggatgtagtcctttcgccagtggac

SEQ ID NO: 3409849 - DNA, 25 bp, Homo sapien
aggggatgtagtcctttcgccagtg

SEQ ID NO: 3409850 - DNA, 25 bp, Homo sapien
tatcacgtgaaacactaatgatgtc

SEQ ID NO: 3409851 - DNA, 25 bp, Homo sapien
gaccaccacaggaccagagagatgt

SEQ ID NO: 3409852 - DNA, 25 bp, Homo sapien
cagaacaggaggactctgaccacca

SEQ ID NO: 3409853 - DNA, 25 bp, Homo sapien
taatgatgtctaggagctgacacag

SEQ ID NO: 3409854 - DNA, 25 bp, Homo sapien
gaaatcatcttggttaggatttgag

SEQ ID NO: 3409855 - DNA, 25 bp, Homo sapien
aatcatcttggttaggatttgagga

SEQ ID NO: 3409856 - DNA, 25 bp, Homo sapien
tggaaatcatcttggttaggatttg

SEQ ID NO: 3409857 - DNA, 25 bp, Homo sapien
atcatcttggttaggatttgaggaa

SEQ ID NO: 3409858 - DNA, 25 bp, Homo sapien
acagcctctgcaattccacacctat

SEQ ID NO: 3409859 - DNA, 25 bp, Homo sapien
ctctgcaattccacacctataagca

SEQ ID NO: 3409860 - DNA, 25 bp, Homo sapien
gcctctgcaattccacacctataag

SEQ ID NO: 3409861 - DNA, 25 bp, Homo sapien
ctgcaattccacacctataagcata

SEQ ID NO: 3409862 - DNA, 25 bp, Homo sapien
catagtatccaattggatgaacagg

SEQ ID NO: 3409863 - DNA, 25 bp, Homo sapien
tctctgcatcatagtatccaattgg

SEQ ID NO: 3409864 - DNA, 25 bp, Homo sapien
gtatccaattggatgaacaggaata

SEQ ID NO: 3409865 - DNA, 25 bp, Homo sapien
tctaggagcttctctgcatcatagt

SEQ ID NO: 3409866 - DNA, 25 bp, Homo sapien
ggctcagacacttgcagcagcaggg

SEQ ID NO: 3409867 - DNA, 25 bp, Homo sapien
acaggctcagacacttgcagcagca

SEQ ID NO: 3409868 - DNA, 25 bp, Homo sapien
actgagcctgtccagcagtccagtg

SEQ ID NO: 3409869 - DNA, 25 bp, Homo sapien
ctctgaatccactgagcctgtccag

SEQ ID NO: 3409870 - DNA, 25 bp, Homo sapien
gaagaggcagatgggttctttctgg

SEQ ID NO: 3409871 - DNA, 25 bp, Homo sapien
tctggaaggcttgtgtgatgtctga

SEQ ID NO: 3409872 - DNA, 25 bp, Homo sapien
ttgtgtgatgtctgagaccattttc

SEQ ID NO: 3409873 - DNA, 25 bp, Homo sapien
aagaggcagatgggttctttctgga

SEQ ID NO: 3409874 - DNA, 25 bp, Homo sapien
ttttcgctgggacctgcaagaactg

SEQ ID NO: 3409875 - DNA, 25 bp, Homo sapien
ccttttcgctgggacctgcaagaac

SEQ ID NO: 3409876 - DNA, 25 bp, Homo sapien
cccattaccttttcgctgggacctg

SEQ ID NO: 3409877 - DNA, 25 bp, Homo sapien
accttttcgctgggacctgcaagaa

SEQ ID NO: 3409878 - DNA, 25 bp, Homo sapien
ctctctgggtcccatggtaggtagt

SEQ ID NO: 3409879 - DNA, 25 bp, Homo sapien
ccatggtaggtagttctatggattc

SEQ ID NO: 3409880 - DNA, 25 bp, Homo sapien
gggtcccatggtaggtagttctatg

SEQ ID NO: 3409881 - DNA, 25 bp, Homo sapien
gtaggtagttctatggattctgcac

SEQ ID NO: 3409882 - DNA, 25 bp, Homo sapien
tctacttgcttatgtgaataaagtg

SEQ ID NO: 3409883 - DNA, 25 bp, Homo sapien
gttctacagtcagccagcactaaac

SEQ ID NO: 3409884 - DNA, 25 bp, Homo sapien
gcttatgtgaataaagtgttctaca

SEQ ID NO: 3409885 - DNA, 25 bp, Homo sapien
tcactgctggtctgacattggagca

SEQ ID NO: 3409886 - DNA, 25 bp, Homo sapien
aaagcatgtatcaacaccagtgaaa

SEQ ID NO: 3409887 - DNA, 25 bp, Homo sapien
gaaagcatgtatcaacaccagtgaa

SEQ ID NO: 3409888 - DNA, 25 bp, Homo sapien
aagcatgtatcaacaccagtgaaat

SEQ ID NO: 3409889 - DNA, 25 bp, Homo sapien
tgcctttacctggccagtgtatgca

SEQ ID NO: 3409890 - DNA, 25 bp, Homo sapien
atgctgttctggagtgggcatgtta

SEQ ID NO: 3409891 - DNA, 25 bp, Homo sapien
cccatgctgttctggagtgggcatg

SEQ ID NO: 3409892 - DNA, 25 bp, Homo sapien
tctggagtgggcatgttaggtccct

SEQ ID NO: 3409893 - DNA, 25 bp, Homo sapien
ttctggagtgggcatgttaggtccc

SEQ ID NO: 3409894 - DNA, 25 bp, Homo sapien
ccacacggagagctgtggctctaac

SEQ ID NO: 3409895 - DNA, 25 bp, Homo sapien
agcccacacggagagctgtggctct

SEQ ID NO: 3409896 - DNA, 25 bp, Homo sapien
cccacacggagagctgtggctctaa

SEQ ID NO: 3409897 - DNA, 25 bp, Homo sapien
gcccacacggagagctgtggctcta

SEQ ID NO: 3409898 - DNA, 25 bp, Homo sapien
attaccaagtcaccgcgagctctac

SEQ ID NO: 3409899 - DNA, 25 bp, Homo sapien
accaagtcaccgcgagctctacgct

SEQ ID NO: 3409900 - DNA, 25 bp, Homo sapien
aagtcaccgcgagctctacgctcac

SEQ ID NO: 3409901 - DNA, 25 bp, Homo sapien
cattaccaagtcaccgcgagctcta

SEQ ID NO: 3409902 - DNA, 25 bp, Homo sapien
tcatgtggacctcatggaatttcca

SEQ ID NO: 3409903 - DNA, 25 bp, Homo sapien
atttccaagacgtggggccttggca

SEQ ID NO: 3409904 - DNA, 25 bp, Homo sapien
gacctcatggaatttccaagacgtg

SEQ ID NO: 3409905 - DNA, 25 bp, Homo sapien
tgtggacctcatggaatttccaaga

SEQ ID NO: 3409906 - DNA, 25 bp, Homo sapien
ctggacacatacactctcccaagac

SEQ ID NO: 3409907 - DNA, 25 bp, Homo sapien
aaaatctagaagaaatggataaatt

SEQ ID NO: 3409908 - DNA, 25 bp, Homo sapien
aacacctctacgcaagtaaaactag

SEQ ID NO: 3409909 - DNA, 25 bp, Homo sapien
ttcctggacacatacactctcccaa

SEQ ID NO: 3409910 - DNA, 25 bp, Homo sapien
caagatctatactgccctgcagggc

SEQ ID NO: 3409911 - DNA, 25 bp, Homo sapien
aagatctatactgccctgcagggct

SEQ ID NO: 3409912 - DNA, 25 bp, Homo sapien
cctgcagggcttggcttctgtccat

SEQ ID NO: 3409913 - DNA, 25 bp, Homo sapien
tgccctgcagggcttggcttctgtc

SEQ ID NO: 3409914 - DNA, 25 bp, Homo sapien
taaacttctccactgtaatatgtaa

SEQ ID NO: 3409915 - DNA, 25 bp, Homo sapien
tctactgggttgtgatttgaggatc

SEQ ID NO: 3409916 - DNA, 25 bp, Homo sapien
aatataataaattcttggattctac

SEQ ID NO: 3409917 - DNA, 25 bp, Homo sapien
tgttaaacttctccactgtaatatg

SEQ ID NO: 3409918 - DNA, 25 bp, Homo sapien
tatttcaaatgatggttaattacat

SEQ ID NO: 3409919 - DNA, 25 bp, Homo sapien
gtatttcaaatgatggttaattaca

SEQ ID NO: 3409920 - DNA, 25 bp, Homo sapien
tttcaaatgatggttaattacatta

SEQ ID NO: 3409921 - DNA, 25 bp, Homo sapien
ttcaaatgatggttaattacattac

SEQ ID NO: 3409922 - DNA, 25 bp, Homo sapien
taagccccaatagaataaactctgt

SEQ ID NO: 3409923 - DNA, 25 bp, Homo sapien
tggattctctgtaagccccaataga

SEQ ID NO: 3409924 - DNA, 25 bp, Homo sapien
aactctgtcacattgtttctattcg

SEQ ID NO: 3409925 - DNA, 25 bp, Homo sapien
ctctgtaagccccaatagaataaac

SEQ ID NO: 3409926 - DNA, 25 bp, Homo sapien
cattacagtaagtaggatgacctca

SEQ ID NO: 3409927 - DNA, 25 bp, Homo sapien
tgacactcccactagcaggctacaa

SEQ ID NO: 3409928 - DNA, 25 bp, Homo sapien
ctcccactagcaggctacaaacatg

SEQ ID NO: 3409929 - DNA, 25 bp, Homo sapien
gtaagtaggatgacctcaacacctc

SEQ ID NO: 3409930 - DNA, 25 bp, Homo sapien
attgatcaaagtgtagagatcacac

SEQ ID NO: 3409931 - DNA, 25 bp, Homo sapien
gaaatagctttcctactacacaatt

SEQ ID NO: 3409932 - DNA, 25 bp, Homo sapien
tttctgctgcatcaaagcacctttg

SEQ ID NO: 3409933 - DNA, 25 bp, Homo sapien
gtctgggaagtcctggaccaggctc

SEQ ID NO: 3409934 - DNA, 25 bp, Homo sapien
gctggtgcaagtgctgattctgctg

SEQ ID NO: 3409935 - DNA, 25 bp, Homo sapien
aggctaccagggcaaccctccagga

SEQ ID NO: 3409936 - DNA, 25 bp, Homo sapien
cttgaacttcaaaggcattggagtt

SEQ ID NO: 3409937 - DNA, 25 bp, Homo sapien
gttttgaaaatgcttgctgaatcca

SEQ ID NO: 3409938 - DNA, 25 bp, Homo sapien
tgctgaatccatttgaagaaatttg

SEQ ID NO: 3409939 - DNA, 25 bp, Homo sapien
gaacttcaaaggcattggagttttg

SEQ ID NO: 3409940 - DNA, 25 bp, Homo sapien
tgaacagaattcagacttaggacca

SEQ ID NO: 3409941 - DNA, 25 bp, Homo sapien
ttgcttcagcgctgtcttggaatag

SEQ ID NO: 3409942 - DNA, 25 bp, Homo sapien
gggaattgcttcagcgctgtcttgg

SEQ ID NO: 3409943 - DNA, 25 bp, Homo sapien
cgctgtcttggaatagttgattctg

SEQ ID NO: 3409944 - DNA, 25 bp, Homo sapien
cagcgctgtcttggaatagttgatt

SEQ ID NO: 3409945 - DNA, 25 bp, Homo sapien
ctgtgcccaacctctactgattctt

SEQ ID NO: 3409946 - DNA, 25 bp, Homo sapien
cagtcttgagtttctacacctgtaa

SEQ ID NO: 3409947 - DNA, 25 bp, Homo sapien
tgcccaacctctactgattcttctt

SEQ ID NO: 3409948 - DNA, 25 bp, Homo sapien
cttgagtttctacacctgtaaaaag

SEQ ID NO: 3409949 - DNA, 25 bp, Homo sapien
agttaaatatcattttgggggccat

SEQ ID NO: 3409950 - DNA, 25 bp, Homo sapien
tagtttcctttcagtgagtaagtta

SEQ ID NO: 3409951 - DNA, 25 bp, Homo sapien
ctgaaggagatagtttcctttcagt

SEQ ID NO: 3409952 - DNA, 25 bp, Homo sapien
gatagtttcctttcagtgagtaagt

SEQ ID NO: 3409953 - DNA, 25 bp, Homo sapien
gcttgcagattgtctcatagcggtc

SEQ ID NO: 3409954 - DNA, 25 bp, Homo sapien
cttgcagattgtctcatagcggtca

SEQ ID NO: 3409955 - DNA, 25 bp, Homo sapien
gcagattgtctcatagcggtcatag

SEQ ID NO: 3409956 - DNA, 25 bp, Homo sapien
ggcttgcagattgtctcatagcggt

SEQ ID NO: 3409957 - DNA, 25 bp, Homo sapien
agggcagccagactattaaaagcat

SEQ ID NO: 3409958 - DNA, 25 bp, Homo sapien
gggcagccagactattaaaagcatt

SEQ ID NO: 3409959 - DNA, 25 bp, Homo sapien
acgtgagtgtcagtgcaggagagtt

SEQ ID NO: 3409960 - DNA, 25 bp, Homo sapien
tgagtctttagtaagcagaggatta

SEQ ID NO: 3409961 - DNA, 25 bp, Homo sapien
tgatatgggaggtgcaagtagagag

SEQ ID NO: 3409962 - DNA, 25 bp, Homo sapien
agtctttagtaagcagaggattagg

SEQ ID NO: 3409963 - DNA, 25 bp, Homo sapien
ggaggtgcaagtagagagagccttc

SEQ ID NO: 3409964 - DNA, 25 bp, Homo sapien
tacagggaacaaagaataggatgac

SEQ ID NO: 3409965 - DNA, 25 bp, Homo sapien
gaatatacagggaacaaagaatagg

SEQ ID NO: 3409966 - DNA, 25 bp, Homo sapien
atgaatatacagggaacaaagaata

SEQ ID NO: 3409967 - DNA, 25 bp, Homo sapien
atatacagggaacaaagaataggat

SEQ ID NO: 3409968 - DNA, 25 bp, Homo sapien
ttaccccagattatttggctccaga

SEQ ID NO: 3409969 - DNA, 25 bp, Homo sapien
taccccagattatttggctccagag

SEQ ID NO: 3409970 - DNA, 25 bp, Homo sapien
aaagtagttgtctgtaacgagtggt

SEQ ID NO: 3409971 - DNA, 25 bp, Homo sapien
ctaaagtagttgtctgtaacgagtg

SEQ ID NO: 3409972 - DNA, 25 bp, Homo sapien
taaagtagttgtctgtaacgagtgg

SEQ ID NO: 3409973 - DNA, 25 bp, Homo sapien
agttctggattgtgagtgaggccca

SEQ ID NO: 3409974 - DNA, 25 bp, Homo sapien
gatcaagtaggtgattaaaaacata

SEQ ID NO: 3409975 - DNA, 25 bp, Homo sapien
acataacaaacaggaatttctgcag

SEQ ID NO: 3409976 - DNA, 25 bp, Homo sapien
cagcaggatgaattctgttacattg

SEQ ID NO: 3409977 - DNA, 25 bp, Homo sapien
aataggacagaaaaaggtacatggg

SEQ ID NO: 3409978 - DNA, 25 bp, Homo sapien
tccagaagaggtactaaatcacaca

SEQ ID NO: 3409979 - DNA, 25 bp, Homo sapien
gccagctccagaagaggtactaaat

SEQ ID NO: 3409980 - DNA, 25 bp, Homo sapien
gctccagaagaggtactaaatcaca

SEQ ID NO: 3409981 - DNA, 25 bp, Homo sapien
gaagaggtactaaatcacacataaa

SEQ ID NO: 3409982 - DNA, 25 bp, Homo sapien
tcagagctatgagaccttagggagc

SEQ ID NO: 3409983 - DNA, 25 bp, Homo sapien
ttcagagctatgagaccttagggag

SEQ ID NO: 3409984 - DNA, 25 bp, Homo sapien
tatcatcagttgtcattatttgctt

SEQ ID NO: 3409985 - DNA, 25 bp, Homo sapien
tttatcatcagttgtcattatttgc

SEQ ID NO: 3409986 - DNA, 25 bp, Homo sapien
ttatttatcatcagttgtcattatt

SEQ ID NO: 3409987 - DNA, 25 bp, Homo sapien
atttatcatcagttgtcattatttg

SEQ ID NO: 3409988 - DNA, 25 bp, Homo sapien
tgtctggaaccgcagtctgctgcat

SEQ ID NO: 3409989 - DNA, 25 bp, Homo sapien
gaagaagagtggtgatgtacttgtt

SEQ ID NO: 3409990 - DNA, 25 bp, Homo sapien
tgtacttgttatcgtttgtctggaa

SEQ ID NO: 3409991 - DNA, 25 bp, Homo sapien
gcataccttagactccggtgccatc

SEQ ID NO: 3409992 - DNA, 25 bp, Homo sapien
aagatcagtggggaagttgtcacca

SEQ ID NO: 3409993 - DNA, 25 bp, Homo sapien
tcagtggggaagttgtcaccagttc

SEQ ID NO: 3409994 - DNA, 25 bp, Homo sapien
agaaagatcagtggggaagttgtca

SEQ ID NO: 3409995 - DNA, 25 bp, Homo sapien
tcaagaaagatcagtggggaagttg

SEQ ID NO: 3409996 - DNA, 25 bp, Homo sapien
aacagctaccctgcctcttgatgag

SEQ ID NO: 3409997 - DNA, 25 bp, Homo sapien
cagctaccctgcctcttgatgagaa

SEQ ID NO: 3409998 - DNA, 25 bp, Homo sapien
gagcgctgcttagttgcatcataga

SEQ ID NO: 3409999 - DNA, 25 bp, Homo sapien
agctaccctgcctcttgatgagaat

SEQ ID NO: 3410000 - DNA, 25 bp, Homo sapien
ggaggcacttgctgacattatattg

SEQ ID NO: 3410001 - DNA, 25 bp, Homo sapien
aagtaggggaggcacttgctgacat

SEQ ID NO: 3410002 - DNA, 25 bp, Homo sapien
ggggaggcacttgctgacattatat

SEQ ID NO: 3410003 - DNA, 25 bp, Homo sapien
taggggaggcacttgctgacattat

SEQ ID NO: 3410004 - DNA, 25 bp, Homo sapien
tttggatgcccctcatgccttgtgt

SEQ ID NO: 3410005 - DNA, 25 bp, Homo sapien
gatgcccctcatgccttgtgtttcc

SEQ ID NO: 3410006 - DNA, 25 bp, Homo sapien
tggatgcccctcatgccttgtgttt

SEQ ID NO: 3410007 - DNA, 25 bp, Homo sapien
ctttggatgcccctcatgccttgtg

SEQ ID NO: 3410008 - DNA, 25 bp, Homo sapien
cattagatttctgctttgtggtagt

SEQ ID NO: 3410009 - DNA, 25 bp, Homo sapien
aacagtgttcctggtactgtgctga

SEQ ID NO: 3410010 - DNA, 25 bp, Homo sapien
ttcatggaataccaacagtgttcct

SEQ ID NO: 3410011 - DNA, 25 bp, Homo sapien
tgcattagatttctgctttgtggta

SEQ ID NO: 3410012 - DNA, 25 bp, Homo sapien
tctgcgaagagacatttgggaaccc

SEQ ID NO: 3410013 - DNA, 25 bp, Homo sapien
gaagccctatgtgaagctgctttgt

SEQ ID NO: 3410014 - DNA, 25 bp, Homo sapien
ctttttgtagcataagtgaagtgac

SEQ ID NO: 3410015 - DNA, 25 bp, Homo sapien
acagacattttgtaggatctgcgaa

SEQ ID NO: 3410016 - DNA, 25 bp, Homo sapien
ctctgtaatcgggccagtgcctgcc

SEQ ID NO: 3410017 - DNA, 25 bp, Homo sapien
gctctgtaatcgggccagtgcctgc

SEQ ID NO: 3410018 - DNA, 25 bp, Homo sapien
tgctctgtaatcgggccagtgcctg

SEQ ID NO: 3410019 - DNA, 25 bp, Homo sapien
caaagacaagcagatctgccaaatt

SEQ ID NO: 3410020 - DNA, 25 bp, Homo sapien
aaagacaagcagatctgccaaattc

SEQ ID NO: 3410021 - DNA, 25 bp, Homo sapien
ctcagaatagagttcatcctcatta

SEQ ID NO: 3410022 - DNA, 25 bp, Homo sapien
tctcagaatagagttcatcctcatt

SEQ ID NO: 3410023 - DNA, 25 bp, Homo sapien
gcgagtccggctattaatcctacac

SEQ ID NO: 3410024 - DNA, 25 bp, Homo sapien
cggcgagtccggctattaatcctac

SEQ ID NO: 3410025 - DNA, 25 bp, Homo sapien
cccacggcgagtccggctattaatc

SEQ ID NO: 3410026 - DNA, 25 bp, Homo sapien
caagcccacggcgagtccggctatt

SEQ ID NO: 3410027 - DNA, 25 bp, Homo sapien
gccgggtgggcgtactcaggttgat

SEQ ID NO: 3410028 - DNA, 25 bp, Homo sapien
tctccccgaggtgcaaccacaggtg

SEQ ID NO: 3410029 - DNA, 25 bp, Homo sapien
gagccaggtgatcctgctctccccg

SEQ ID NO: 3410030 - DNA, 25 bp, Homo sapien
cttcatctcggggagccaggtgatc

SEQ ID NO: 3410031 - DNA, 25 bp, Homo sapien
cagccggcgaactccatggtcagga

SEQ ID NO: 3410032 - DNA, 25 bp, Homo sapien
gccggcgaactccatggtcaggaga

SEQ ID NO: 3410033 - DNA, 25 bp, Homo sapien
agccagccggcgaactccatggtca

SEQ ID NO: 3410034 - DNA, 25 bp, Homo sapien
cggcgaactccatggtcaggagata

SEQ ID NO: 3410035 - DNA, 25 bp, Homo sapien
tacttccggtcaattccactgtttc

SEQ ID NO: 3410036 - DNA, 25 bp, Homo sapien
gctgaactcccaccataacatcaaa

SEQ ID NO: 3410037 - DNA, 25 bp, Homo sapien
tactagtgctacaaagaacaccttg

SEQ ID NO: 3410038 - DNA, 25 bp, Homo sapien
tggaagcccaaactagagatgatct

SEQ ID NO: 3410039 - DNA, 25 bp, Homo sapien
gaagccggtgacacttgcggtgagt

SEQ ID NO: 3410040 - DNA, 25 bp, Homo sapien
aagccggtgacacttgcggtgagtg

SEQ ID NO: 3410041 - DNA, 25 bp, Homo sapien
gccggtgacacttgcggtgagtgtt

SEQ ID NO: 3410042 - DNA, 25 bp, Homo sapien
tgaagccggtgacacttgcggtgag

SEQ ID NO: 3410043 - DNA, 25 bp, Homo sapien
cctggcatctgttggttcatgatca

SEQ ID NO: 3410044 - DNA, 25 bp, Homo sapien
gggtgacagatattgtataagttgc

SEQ ID NO: 3410045 - DNA, 25 bp, Homo sapien
tttgttgggcttatcaaaacaagga

SEQ ID NO: 3410046 - DNA, 25 bp, Homo sapien
ttcatgatcagtggccgctatgctc

SEQ ID NO: 3410047 - DNA, 25 bp, Homo sapien
aagactaaaggtatggccaccaaag

SEQ ID NO: 3410048 - DNA, 25 bp, Homo sapien
aaggtatggccaccaaagtccgtgc

SEQ ID NO: 3410049 - DNA, 25 bp, Homo sapien
ggtatggccaccaaagtccgtgcct

SEQ ID NO: 3410050 - DNA, 25 bp, Homo sapien
tggccaccaaagtccgtgcctcggt

SEQ ID NO: 3410051 - DNA, 25 bp, Homo sapien
aagtattttctgattcgactgtgca

SEQ ID NO: 3410052 - DNA, 25 bp, Homo sapien
tttctgattcgactgtgcagagggc

SEQ ID NO: 3410053 - DNA, 25 bp, Homo sapien
aacaggctcgtgctcaagtattttc

SEQ ID NO: 3410054 - DNA, 25 bp, Homo sapien
atgaaaaacaggctcgtgctcaagt

SEQ ID NO: 3410055 - DNA, 25 bp, Homo sapien
tctgatattgtctttacagtatgaa

SEQ ID NO: 3410056 - DNA, 25 bp, Homo sapien
gatattgtctttacagtatgaaatt

SEQ ID NO: 3410057 - DNA, 25 bp, Homo sapien
ctgatattgtctttacagtatgaaa

SEQ ID NO: 3410058 - DNA, 25 bp, Homo sapien
tatctgatattgtctttacagtatg

SEQ ID NO: 3410059 - DNA, 25 bp, Homo sapien
ttctgtaaaccccggatgggatgct

SEQ ID NO: 3410060 - DNA, 25 bp, Homo sapien
taaaccccggatgggatgctgttgg

SEQ ID NO: 3410061 - DNA, 25 bp, Homo sapien
gcccagtagtaattgtacatctgga

SEQ ID NO: 3410062 - DNA, 25 bp, Homo sapien
tagtaattgtacatctggacttccc

SEQ ID NO: 3410063 - DNA, 25 bp, Homo sapien
gtcatagtggcagcattccagcaga

SEQ ID NO: 3410064 - DNA, 25 bp, Homo sapien
tcatagtggcagcattccagcagag

SEQ ID NO: 3410065 - DNA, 25 bp, Homo sapien
tccagtagtgcagtggaagccttct

SEQ ID NO: 3410066 - DNA, 25 bp, Homo sapien
agaagctcgtgcctggcccatgaaa

SEQ ID NO: 3410067 - DNA, 25 bp, Homo sapien
ttgctgcttattggttggagataaa

SEQ ID NO: 3410068 - DNA, 25 bp, Homo sapien
gctaagcagtggttgctgcttattg

SEQ ID NO: 3410069 - DNA, 25 bp, Homo sapien
gggctaagcagtggttgctgcttat

SEQ ID NO: 3410070 - DNA, 25 bp, Homo sapien
aatttgcctgggaggggctaagcag

SEQ ID NO: 3410071 - DNA, 25 bp, Homo sapien
atgggaaagaggatttcttgccatc

SEQ ID NO: 3410072 - DNA, 25 bp, Homo sapien
gtggatccacatgctacattagaaa

SEQ ID NO: 3410073 - DNA, 25 bp, Homo sapien
atccacatgctacattagaaatcaa

SEQ ID NO: 3410074 - DNA, 25 bp, Homo sapien
ggatccacatgctacattagaaatc

SEQ ID NO: 3410075 - DNA, 25 bp, Homo sapien
taaataatagcactccgcatgccca

SEQ ID NO: 3410076 - DNA, 25 bp, Homo sapien
ttagctaaataatagcactccgcat

SEQ ID NO: 3410077 - DNA, 25 bp, Homo sapien
tccgcatgcccattgaaaccaacag

SEQ ID NO: 3410078 - DNA, 25 bp, Homo sapien
tagcactccgcatgcccattgaaac

SEQ ID NO: 3410079 - DNA, 25 bp, Homo sapien
ctcttcaaaactttcacagccagtc

SEQ ID NO: 3410080 - DNA, 25 bp, Homo sapien
tttggaatggactgctaaaatactg

SEQ ID NO: 3410081 - DNA, 25 bp, Homo sapien
gccagtcaataaactgcataaaccc

SEQ ID NO: 3410082 - DNA, 25 bp, Homo sapien
catccaggttaaaaggcatcttttg

SEQ ID NO: 3410083 - DNA, 25 bp, Homo sapien
gtcagcttgtcagcttatgtgctgt

SEQ ID NO: 3410084 - DNA, 25 bp, Homo sapien
ggtcagcttgtcagcttatgtgctg

SEQ ID NO: 3410085 - DNA, 25 bp, Homo sapien
tcagcttgtcagcttatgtgctgtc

SEQ ID NO: 3410086 - DNA, 25 bp, Homo sapien
tgaccttttgacgaaagatccggtg

SEQ ID NO: 3410087 - DNA, 25 bp, Homo sapien
ttgacgaaagatccggtgcatatgc

SEQ ID NO: 3410088 - DNA, 25 bp, Homo sapien
cgaaagatccggtgcatatgccaaa

SEQ ID NO: 3410089 - DNA, 25 bp, Homo sapien
ttcagttgaccttttgacgaaagat

SEQ ID NO: 3410090 - DNA, 25 bp, Homo sapien
acagagatccggtcgcgccatattg

SEQ ID NO: 3410091 - DNA, 25 bp, Homo sapien
actgtgcttggtctgagttttcaac

SEQ ID NO: 3410092 - DNA, 25 bp, Homo sapien
ctccactctgatgataagactgccc

SEQ ID NO: 3410093 - DNA, 25 bp, Homo sapien
ttccagttttgaccgatataaacac

SEQ ID NO: 3410094 - DNA, 25 bp, Homo sapien
gcattgaactcatgaaacctggctg

SEQ ID NO: 3410095 - DNA, 25 bp, Homo sapien
gagtgtgtaccccagtctcagcttg

SEQ ID NO: 3410096 - DNA, 25 bp, Homo sapien
ggtgagcactcttgtctggtctggc

SEQ ID NO: 3410097 - DNA, 25 bp, Homo sapien
gttggaatccctcactacttttcag

SEQ ID NO: 3410098 - DNA, 25 bp, Homo sapien
aagtcttcatgtgttgaattcataa

SEQ ID NO: 3410099 - DNA, 25 bp, Homo sapien
tatcaagttgtaagtcttcatgtgt

SEQ ID NO: 3410100 - DNA, 25 bp, Homo sapien
agtcttcatgtgttgaattcataag

SEQ ID NO: 3410101 - DNA, 25 bp, Homo sapien
ggtttatcaagttgtaagtcttcat

SEQ ID NO: 3410102 - DNA, 25 bp, Homo sapien
tttttgcaaaaagctgatctaccat

SEQ ID NO: 3410103 - DNA, 25 bp, Homo sapien
atttttttgcaaaaagctgatctac

SEQ ID NO: 3410104 - DNA, 25 bp, Homo sapien
aaatttttttgcaaaaagctgatct

SEQ ID NO: 3410105 - DNA, 25 bp, Homo sapien
ttttttgcaaaaagctgatctacca

SEQ ID NO: 3410106 - DNA, 25 bp, Homo sapien
gccaaatgactgcaggattatgagg

SEQ ID NO: 3410107 - DNA, 25 bp, Homo sapien
tgccaaatgactgcaggattatgag

SEQ ID NO: 3410108 - DNA, 25 bp, Homo sapien
ggtgccaaatgactgcaggattatg

SEQ ID NO: 3410109 - DNA, 25 bp, Homo sapien
aggtgccaaatgactgcaggattat

SEQ ID NO: 3410110 - DNA, 25 bp, Homo sapien
tcacttgaaagatgttttcgagcct

SEQ ID NO: 3410111 - DNA, 25 bp, Homo sapien
aacttaattcaattgctcacttgaa

SEQ ID NO: 3410112 - DNA, 25 bp, Homo sapien
ttttcgagccttgggatttcatgca

SEQ ID NO: 3410113 - DNA, 25 bp, Homo sapien
gatttcatgcaatgaggggattctg

SEQ ID NO: 3410114 - DNA, 25 bp, Homo sapien
aacttcagttgtattgtgagtaaga

SEQ ID NO: 3410115 - DNA, 25 bp, Homo sapien
cttcagttgtattgtgagtaagaag

SEQ ID NO: 3410116 - DNA, 25 bp, Homo sapien
agtaacttcagttgtattgtgagta

SEQ ID NO: 3410117 - DNA, 25 bp, Homo sapien
tcagttgtattgtgagtaagaagtt

SEQ ID NO: 3410118 - DNA, 25 bp, Homo sapien
cattgcagaactcttggacaaggat

SEQ ID NO: 3410119 - DNA, 25 bp, Homo sapien
cgaaaaccatgcttaacctatgagt

SEQ ID NO: 3410120 - DNA, 25 bp, Homo sapien
tataatacaggtttcgcattctcac

SEQ ID NO: 3410121 - DNA, 25 bp, Homo sapien
tatgagttaagcactgagttttgtc

SEQ ID NO: 3410122 - DNA, 25 bp, Homo sapien
tctcacgtgtaacttctacctttca

SEQ ID NO: 3410123 - DNA, 25 bp, Homo sapien
tccaccgccttctcacgtgtaactt

SEQ ID NO: 3410124 - DNA, 25 bp, Homo sapien
gccttctcacgtgtaacttctacct

SEQ ID NO: 3410125 - DNA, 25 bp, Homo sapien
accgccttctcacgtgtaacttcta

SEQ ID NO: 3410126 - DNA, 25 bp, Homo sapien
tcctcccatggaggacttcacaccc

SEQ ID NO: 3410127 - DNA, 25 bp, Homo sapien
ggcatctcttcctcccatggaggac

SEQ ID NO: 3410128 - DNA, 25 bp, Homo sapien
gagccaggtgccaccttccactctt

SEQ ID NO: 3410129 - DNA, 25 bp, Homo sapien
cttccactcttcgaggctccatcat

SEQ ID NO: 3410130 - DNA, 25 bp, Homo sapien
cctcagtgtggaggtcatctctgat

SEQ ID NO: 3410131 - DNA, 25 bp, Homo sapien
gggagtggaacattcgcctcagtgt

SEQ ID NO: 3410132 - DNA, 25 bp, Homo sapien
caaaggtcatctctgattgccgaca

SEQ ID NO: 3410133 - DNA, 25 bp, Homo sapien
tattgctaaaggttggcagtttcag

SEQ ID NO: 3410134 - DNA, 25 bp, Homo sapien
caaaagccggcttggagacaatgga

SEQ ID NO: 3410135 - DNA, 25 bp, Homo sapien
ggtgttcagagcttgtgtggaggcg

SEQ ID NO: 3410136 - DNA, 25 bp, Homo sapien
agagcttgtgtggaggcgttgtgga

SEQ ID NO: 3410137 - DNA, 25 bp, Homo sapien
atgaggacaaaagccggcttggaga

SEQ ID NO: 3410138 - DNA, 25 bp, Homo sapien
ctttctgtgaaagggtgcaattgac

SEQ ID NO: 3410139 - DNA, 25 bp, Homo sapien
cctttctgtgaaagggtgcaattga

SEQ ID NO: 3410140 - DNA, 25 bp, Homo sapien
ttctgtgaaagggtgcaattgacag

SEQ ID NO: 3410141 - DNA, 25 bp, Homo sapien
tctgtgaaagggtgcaattgacaga

SEQ ID NO: 3410142 - DNA, 25 bp, Homo sapien
tgtcaagagatccacactaagcctg

SEQ ID NO: 3410143 - DNA, 25 bp, Homo sapien
taagcctggtgctataaactccagc

SEQ ID NO: 3410144 - DNA, 25 bp, Homo sapien
agaggtgtcaagagatccacactaa

SEQ ID NO: 3410145 - DNA, 25 bp, Homo sapien
gatccacactaagcctggtgctata

SEQ ID NO: 3410146 - DNA, 25 bp, Homo sapien
tcccacgtggtacatttgtgcagca

SEQ ID NO: 3410147 - DNA, 25 bp, Homo sapien
ttgtcccacgtggtacatttgtgca

SEQ ID NO: 3410148 - DNA, 25 bp, Homo sapien
cccacgtggtacatttgtgcagcag

SEQ ID NO: 3410149 - DNA, 25 bp, Homo sapien
gcagtcagaaatttataacacagtt

SEQ ID NO: 3410150 - DNA, 25 bp, Homo sapien
tagaagacatgctaagaatctccag

SEQ ID NO: 3410151 - DNA, 25 bp, Homo sapien
gtctcttctagtagaagacatgcta

SEQ ID NO: 3410152 - DNA, 25 bp, Homo sapien
cattcctcctgataaactgacattg

SEQ ID NO: 3410153 - DNA, 25 bp, Homo sapien
tatatagcccatatttcttagactt

SEQ ID NO: 3410154 - DNA, 25 bp, Homo sapien
ctttttatgcggaacacaagcaact

SEQ ID NO: 3410155 - DNA, 25 bp, Homo sapien
caactataacatcagagccgtgtag

SEQ ID NO: 3410156 - DNA, 25 bp, Homo sapien
tgtctctgatgtagaagccgtgtag

SEQ ID NO: 3410157 - DNA, 25 bp, Homo sapien
tctgatgtagaagccgtgtagaagc

SEQ ID NO: 3410158 - DNA, 25 bp, Homo sapien
tcagcacatctccttgagctatgat

SEQ ID NO: 3410159 - DNA, 25 bp, Homo sapien
tgctgtcgatggatgcaaacacttc

SEQ ID NO: 3410160 - DNA, 25 bp, Homo sapien
caatagtcctgtgcatgctgtcgat

SEQ ID NO: 3410161 - DNA, 25 bp, Homo sapien
caccgttcttgtgtgagttagacca

SEQ ID NO: 3410162 - DNA, 25 bp, Homo sapien
ccagcagccctggaacaattttctt

SEQ ID NO: 3410163 - DNA, 25 bp, Homo sapien
agcagccctggaacaattttctttg

SEQ ID NO: 3410164 - DNA, 25 bp, Homo sapien
ttgcccctttgctgatgatcccccc

SEQ ID NO: 3410165 - DNA, 25 bp, Homo sapien
ccctttgctgatgatccccccacac

SEQ ID NO: 3410166 - DNA, 25 bp, Homo sapien
tttcatctccatgtggtgaacttga

SEQ ID NO: 3410167 - DNA, 25 bp, Homo sapien
cataacaagctacccaaaacttgtg

SEQ ID NO: 3410168 - DNA, 25 bp, Homo sapien
tatgtagttgatggatcactggagg

SEQ ID NO: 3410169 - DNA, 25 bp, Homo sapien
gggtcacacatgtgacttaggatca

SEQ ID NO: 3410170 - DNA, 25 bp, Homo sapien
tgtgtgatccacctaaaggactgtt

SEQ ID NO: 3410171 - DNA, 25 bp, Homo sapien
gtgatccacctaaaggactgttgtt

SEQ ID NO: 3410172 - DNA, 25 bp, Homo sapien
gaatgtgtgatccacctaaaggact

SEQ ID NO: 3410173 - DNA, 25 bp, Homo sapien
aatgtgtgatccacctaaaggactg

SEQ ID NO: 3410174 - DNA, 25 bp, Homo sapien
ccacatagtcctcaatgggttccaa

SEQ ID NO: 3410175 - DNA, 25 bp, Homo sapien
tattctgcaaaaagcgtgtctccaa

SEQ ID NO: 3410176 - DNA, 25 bp, Homo sapien
ttccacatagtcctcaatgggttcc

SEQ ID NO: 3410177 - DNA, 25 bp, Homo sapien
ctgcaaaaagcgtgtctccaacctg

SEQ ID NO: 3410178 - DNA, 25 bp, Homo sapien
tctggagatatttggtttttcccca

SEQ ID NO: 3410179 - DNA, 25 bp, Homo sapien
cccataggcctcaaaggggtttgat

SEQ ID NO: 3410180 - DNA, 25 bp, Homo sapien
ggtttgattttcccttcacagattc

SEQ ID NO: 3410181 - DNA, 25 bp, Homo sapien
acagattctacaaaacgagtctttc

SEQ ID NO: 3410182 - DNA, 25 bp, Homo sapien
gattacaaacgtcccttcacagatt

SEQ ID NO: 3410183 - DNA, 25 bp, Homo sapien
gggattacaaacgtcccttcacaga

SEQ ID NO: 3410184 - DNA, 25 bp, Homo sapien
ttccccataggccttaatgggattg

SEQ ID NO: 3410185 - DNA, 25 bp, Homo sapien
aatgggattgcaaatgtccctttgc

SEQ ID NO: 3410186 - DNA, 25 bp, Homo sapien
taggcctcaaaacccaaactgtcac

SEQ ID NO: 3410187 - DNA, 25 bp, Homo sapien
tgttccagccagcagaatgaaaagg

SEQ ID NO: 3410188 - DNA, 25 bp, Homo sapien
cacactacacaaagcagactcacag

SEQ ID NO: 3410189 - DNA, 25 bp, Homo sapien
gcttcaaaatatcccgtagcagatt

SEQ ID NO: 3410190 - DNA, 25 bp, Homo sapien
gactcaattcgaacagtgtatccac

SEQ ID NO: 3410191 - DNA, 25 bp, Homo sapien
gagtacagactcaattcgaacagtg

SEQ ID NO: 3410192 - DNA, 25 bp, Homo sapien
tactggcatgaaaacgagggagtac

SEQ ID NO: 3410193 - DNA, 25 bp, Homo sapien
tgaaaacgagggagtacagactcaa

SEQ ID NO: 3410194 - DNA, 25 bp, Homo sapien
tttaaacaagaaatctgagactgaa

SEQ ID NO: 3410195 - DNA, 25 bp, Homo sapien
tatcaatagtagcagacataagaac

SEQ ID NO: 3410196 - DNA, 25 bp, Homo sapien
ggtatcaatagtagcagacataaga

SEQ ID NO: 3410197 - DNA, 25 bp, Homo sapien
gtatcaatagtagcagacataagaa

SEQ ID NO: 3410198 - DNA, 25 bp, Homo sapien
caaagtgggtcatccgaatgcagtc

SEQ ID NO: 3410199 - DNA, 25 bp, Homo sapien
tcatccgaatgcagtcttccagaaa

SEQ ID NO: 3410200 - DNA, 25 bp, Homo sapien
tggaggaacaaagtgggtcatccga

SEQ ID NO: 3410201 - DNA, 25 bp, Homo sapien
gggtcatccgaatgcagtcttccag

SEQ ID NO: 3410202 - DNA, 25 bp, Homo sapien
tgtttctggaccatattcatcacca

SEQ ID NO: 3410203 - DNA, 25 bp, Homo sapien
gaatgcagaagtagaatctggtact

SEQ ID NO: 3410204 - DNA, 25 bp, Homo sapien
atgcagaagtagaatctggtactga

SEQ ID NO: 3410205 - DNA, 25 bp, Homo sapien
cagaagtagaatctggtactgatgg

SEQ ID NO: 3410206 - DNA, 25 bp, Homo sapien
tgagaatgcagaagtagaatctggt

SEQ ID NO: 3410207 - DNA, 25 bp, Homo sapien
ttggttactccaactggtactggat

SEQ ID NO: 3410208 - DNA, 25 bp, Homo sapien
cttggttactccaactggtactgga

SEQ ID NO: 3410209 - DNA, 25 bp, Homo sapien
tggttactccaactggtactggatc

SEQ ID NO: 3410210 - DNA, 25 bp, Homo sapien
ttccaatcccatcattgtaatgttt

SEQ ID NO: 3410211 - DNA, 25 bp, Homo sapien
ccaatcccatcattgtaatgtttaa

SEQ ID NO: 3410212 - DNA, 25 bp, Homo sapien
gtaacatttgtttaatatcaacatc

SEQ ID NO: 3410213 - DNA, 25 bp, Homo sapien
ttgtttaatatcaacatcacttcca

SEQ ID NO: 3410214 - DNA, 25 bp, Homo sapien
gcaggagccaatgacataaacaaca

SEQ ID NO: 3410215 - DNA, 25 bp, Homo sapien
caacatcatttatggtaatgcttgt

SEQ ID NO: 3410216 - DNA, 25 bp, Homo sapien
ggagccaatgacataaacaacatca

SEQ ID NO: 3410217 - DNA, 25 bp, Homo sapien
tggcaggagccaatgacataaacaa

SEQ ID NO: 3410218 - DNA, 25 bp, Homo sapien
ttccagttggtaatactggaacagg

SEQ ID NO: 3410219 - DNA, 25 bp, Homo sapien
cattctgttaactggtaagaagttt

SEQ ID NO: 3410220 - DNA, 25 bp, Homo sapien
tcattctgttaactggtaagaagtt

SEQ ID NO: 3410221 - DNA, 25 bp, Homo sapien
tggtaatactggaacaggtaaatag

SEQ ID NO: 3410222 - DNA, 25 bp, Homo sapien
tgagcagtgaagagttttactttct

SEQ ID NO: 3410223 - DNA, 25 bp, Homo sapien
agttggtcatattgttgtgagcagt

SEQ ID NO: 3410224 - DNA, 25 bp, Homo sapien
ttgtgagcagtgaagagttttactt

SEQ ID NO: 3410225 - DNA, 25 bp, Homo sapien
catattgttgtgagcagtgaagagt

SEQ ID NO: 3410226 - DNA, 25 bp, Homo sapien
gctcaaggtttgtttatgatgtctg

SEQ ID NO: 3410227 - DNA, 25 bp, Homo sapien
ctcaaggtttgtttatgatgtctgt

SEQ ID NO: 3410228 - DNA, 25 bp, Homo sapien
caaggtttgtttatgatgtctgtac

SEQ ID NO: 3410229 - DNA, 25 bp, Homo sapien
aggtttgtttatgatgtctgtactc

SEQ ID NO: 3410230 - DNA, 25 bp, Homo sapien
cagaatccgggacgtactcggccag

SEQ ID NO: 3410231 - DNA, 25 bp, Homo sapien
gtgaaagcagaatccgggacgtact

SEQ ID NO: 3410232 - DNA, 25 bp, Homo sapien
gtcaaaacgagcttggctgcagagg

SEQ ID NO: 3410233 - DNA, 25 bp, Homo sapien
ctgtcaaaacgagcttggctgcaga

SEQ ID NO: 3410234 - DNA, 25 bp, Homo sapien
gtggaaaaggtaatatcttcatata

SEQ ID NO: 3410235 - DNA, 25 bp, Homo sapien
ggtggaaaaggtaatatcttcatat

SEQ ID NO: 3410236 - DNA, 25 bp, Homo sapien
aaaaactagacagaggcattctcag

SEQ ID NO: 3410237 - DNA, 25 bp, Homo sapien
tcatataaaaactagacagaggcat

SEQ ID NO: 3410238 - DNA, 25 bp, Homo sapien
aagtggatatttggagtgctttgag

SEQ ID NO: 3410239 - DNA, 25 bp, Homo sapien
tgagcagttttgaaacactcctttt

SEQ ID NO: 3410240 - DNA, 25 bp, Homo sapien
ttgagcagttttgaaacactccttt

SEQ ID NO: 3410241 - DNA, 25 bp, Homo sapien
atatttggagtgctttgaggcctat

SEQ ID NO: 3410242 - DNA, 25 bp, Homo sapien
ggagtgctttgaggcctatggtgga

SEQ ID NO: 3410243 - DNA, 25 bp, Homo sapien
tggagtgctttgaggcctatggtgg

SEQ ID NO: 3410244 - DNA, 25 bp, Homo sapien
ggatatttggagtgctttgaggcct

SEQ ID NO: 3410245 - DNA, 25 bp, Homo sapien
tatttggagtgctttgaggcctatg

SEQ ID NO: 3410246 - DNA, 25 bp, Homo sapien
gcattcatctcacagtgttgaactt

SEQ ID NO: 3410247 - DNA, 25 bp, Homo sapien
gtgcattcatctcacagtgttgaac

SEQ ID NO: 3410248 - DNA, 25 bp, Homo sapien
tgtgtgcattcatctcacagtgttg

SEQ ID NO: 3410249 - DNA, 25 bp, Homo sapien
attcatctcacagtgttgaactttt

SEQ ID NO: 3410250 - DNA, 25 bp, Homo sapien
tcaagtggatattaggagcactttg

SEQ ID NO: 3410251 - DNA, 25 bp, Homo sapien
tcttcaagtggatattaggagcact

SEQ ID NO: 3410252 - DNA, 25 bp, Homo sapien
aatcttcaagtggatattaggagca

SEQ ID NO: 3410253 - DNA, 25 bp, Homo sapien
cttcaagtggatattaggagcactt

SEQ ID NO: 3410254 - DNA, 25 bp, Homo sapien
tacacagaagcattctgagaaactc

SEQ ID NO: 3410255 - DNA, 25 bp, Homo sapien
cacagaagcattctgagaaactcct

SEQ ID NO: 3410256 - DNA, 25 bp, Homo sapien
ataaaaactacacagaagcattctg

SEQ ID NO: 3410257 - DNA, 25 bp, Homo sapien
aaaaactacacagaagcattctgag

SEQ ID NO: 3410258 - DNA, 25 bp, Homo sapien
gatatttggagccatttgaggccta

SEQ ID NO: 3410259 - DNA, 25 bp, Homo sapien
atggatatttggagccatttgaggc

SEQ ID NO: 3410260 - DNA, 25 bp, Homo sapien
ggagccatttgaggcctattgtgga

SEQ ID NO: 3410261 - DNA, 25 bp, Homo sapien
ttggagccatttgaggcctattgtg

SEQ ID NO: 3410262 - DNA, 25 bp, Homo sapien
tgagagatttgaggcctattatgaa

SEQ ID NO: 3410263 - DNA, 25 bp, Homo sapien
tctggaagtggatactttgagagat

SEQ ID NO: 3410264 - DNA, 25 bp, Homo sapien
aatctggaagtggatactttgagag

SEQ ID NO: 3410265 - DNA, 25 bp, Homo sapien
ggaagtggatactttgagagatttg

SEQ ID NO: 3410266 - DNA, 25 bp, Homo sapien
gccctttgcgccctatagtgtaaaa

SEQ ID NO: 3410267 - DNA, 25 bp, Homo sapien
tttgcgccctatagtgtaaaaggaa

SEQ ID NO: 3410268 - DNA, 25 bp, Homo sapien
ttggagccctttgcgccctatagtg

SEQ ID NO: 3410269 - DNA, 25 bp, Homo sapien
gtggaaatttggagccctttgcgcc

SEQ ID NO: 3410270 - DNA, 25 bp, Homo sapien
cagagttgaacatttcttttgattg

SEQ ID NO: 3410271 - DNA, 25 bp, Homo sapien
cttcaactaaaaactacacagaagc

SEQ ID NO: 3410272 - DNA, 25 bp, Homo sapien
caactaaaaactacacagaagcatt

SEQ ID NO: 3410273 - DNA, 25 bp, Homo sapien
ctgagaaacttctttgcattgtgtg

SEQ ID NO: 3410274 - DNA, 25 bp, Homo sapien
tgagaaacttctttgcattgtgtgc

SEQ ID NO: 3410275 - DNA, 25 bp, Homo sapien
gcattcaatacacacagttgaacct

SEQ ID NO: 3410276 - DNA, 25 bp, Homo sapien
taagagtctcacgcttcatcaacta

SEQ ID NO: 3410277 - DNA, 25 bp, Homo sapien
aagagtctcacgcttcatcaactaa

SEQ ID NO: 3410278 - DNA, 25 bp, Homo sapien
cacgcttcatcaactaagctattcg

SEQ ID NO: 3410279 - DNA, 25 bp, Homo sapien
gcttcatcaactaagctattcggtt

SEQ ID NO: 3410280 - DNA, 25 bp, Homo sapien
cttaggctccccagtgtacttcttc

SEQ ID NO: 3410281 - DNA, 25 bp, Homo sapien
tgggcacagactttctaacaggaag

SEQ ID NO: 3410282 - DNA, 25 bp, Homo sapien
ctcaccgggagcatttttagcaaag

SEQ ID NO: 3410283 - DNA, 25 bp, Homo sapien
cagactttctaacaggaagggtaag

SEQ ID NO: 3410284 - DNA, 25 bp, Homo sapien
catgaatcagaatgtcaacttccgt

SEQ ID NO: 3410285 - DNA, 25 bp, Homo sapien
aggtcttgatcaaaagcctcaaaag

SEQ ID NO: 3410286 - DNA, 25 bp, Homo sapien
gacttagatacaggtcttgatcaaa

SEQ ID NO: 3410287 - DNA, 25 bp, Homo sapien
atctgacttagatacaggtcttgat

SEQ ID NO: 3410288 - DNA, 25 bp, Homo sapien
tacaggtcttgatcaaaagcctcaa

SEQ ID NO: 3410289 - DNA, 25 bp, Homo sapien
cagtatcgttgatcatatctgatag

SEQ ID NO: 3410290 - DNA, 25 bp, Homo sapien
ccacagtatcgttgatcatatctga

SEQ ID NO: 3410291 - DNA, 25 bp, Homo sapien
gaccacagtatcgttgatcatatct

SEQ ID NO: 3410292 - DNA, 25 bp, Homo sapien
ttagaccacagtatcgttgatcata

SEQ ID NO: 3410293 - DNA, 25 bp, Homo sapien
tagtacccatgcagaggagtttcaa

SEQ ID NO: 3410294 - DNA, 25 bp, Homo sapien
gatctaaactgtgcctggataaagc

SEQ ID NO: 3410295 - DNA, 25 bp, Homo sapien
ggtagttgaacccaccattggcagc

SEQ ID NO: 3410296 - DNA, 25 bp, Homo sapien
tcacgatggtcatgtagtacagacg

SEQ ID NO: 3410297 - DNA, 25 bp, Homo sapien
caaatggtggctaattgcattacct

SEQ ID NO: 3410298 - DNA, 25 bp, Homo sapien
tttcaaatggtggctaattgcatta

SEQ ID NO: 3410299 - DNA, 25 bp, Homo sapien
tcaaatggtggctaattgcattacc

SEQ ID NO: 3410300 - DNA, 25 bp, Homo sapien
aaatggtggctaattgcattacctg

SEQ ID NO: 3410301 - DNA, 25 bp, Homo sapien
catccattgagtaagatagtcttgt

SEQ ID NO: 3410302 - DNA, 25 bp, Homo sapien
tttcatagagtgaatctgtgatcag

SEQ ID NO: 3410303 - DNA, 25 bp, Homo sapien
aagatagtcttgttttcatagagtg

SEQ ID NO: 3410304 - DNA, 25 bp, Homo sapien
acatccattgagtaagatagtcttg

SEQ ID NO: 3410305 - DNA, 25 bp, Homo sapien
cagtaagtaggatgacctcaacacc

SEQ ID NO: 3410306 - DNA, 25 bp, Homo sapien
tacagtaagtaggatgacctcaaca

SEQ ID NO: 3410307 - DNA, 25 bp, Homo sapien
agtaagtaggatgacctcaacacct

SEQ ID NO: 3410308 - DNA, 25 bp, Homo sapien
gtaagtaggatgacctcaacacctc

SEQ ID NO: 3410309 - DNA, 25 bp, Homo sapien
caagattgagcaaagggttgagatc

SEQ ID NO: 3410310 - DNA, 25 bp, Homo sapien
ttatttgacacttgaaatagctttc

SEQ ID NO: 3410311 - DNA, 25 bp, Homo sapien
tgacacttgaaatagctttcctact

SEQ ID NO: 3410312 - DNA, 25 bp, Homo sapien
tttgacacttgaaatagctttccta

SEQ ID NO: 3410313 - DNA, 25 bp, Homo sapien
gacacttgaaatagctttcctacta

SEQ ID NO: 3410314 - DNA, 25 bp, Homo sapien
tatttctcatgatgattaattgcat

SEQ ID NO: 3410315 - DNA, 25 bp, Homo sapien
gtatttctcatgatgattaattgca

SEQ ID NO: 3410316 - DNA, 25 bp, Homo sapien
ttctcatgatgattaattgcattac

SEQ ID NO: 3410317 - DNA, 25 bp, Homo sapien
tttctcatgatgattaattgcatta

SEQ ID NO: 3410318 - DNA, 25 bp, Homo sapien
tttggattctctgtaagccccagca

SEQ ID NO: 3410319 - DNA, 25 bp, Homo sapien
caaaacaaactctgtcatgttattc

SEQ ID NO: 3410320 - DNA, 25 bp, Homo sapien
tctgtcatgttattcctattctcca

SEQ ID NO: 3410321 - DNA, 25 bp, Homo sapien
gtaagccccagcaaaacaaactctg

SEQ ID NO: 3410322 - DNA, 25 bp, Homo sapien
caggcgaggttgagcaaagggttca

SEQ ID NO: 3410323 - DNA, 25 bp, Homo sapien
gtcatgcatccattgaataggatgg

SEQ ID NO: 3410324 - DNA, 25 bp, Homo sapien
tctgcacctccgaagaaatgttctc

SEQ ID NO: 3410325 - DNA, 25 bp, Homo sapien
cgaggttgagcaaagggttcagatc

SEQ ID NO: 3410326 - DNA, 25 bp, Homo sapien
gaaatgtcctttctactacacaatt

SEQ ID NO: 3410327 - DNA, 25 bp, Homo sapien
ctgaaatgtcctttctactacacaa

SEQ ID NO: 3410328 - DNA, 25 bp, Homo sapien
tgaaatgtcctttctactacacaat

SEQ ID NO: 3410329 - DNA, 25 bp, Homo sapien
aatgtcctttctactacacaatttc

SEQ ID NO: 3410330 - DNA, 25 bp, Homo sapien
aacattcctatggatagtgcagttt

SEQ ID NO: 3410331 - DNA, 25 bp, Homo sapien
tgctttgtggcctacggtattaaag

SEQ ID NO: 3410332 - DNA, 25 bp, Homo sapien
tatggatagtgcagtttgtaaacac

SEQ ID NO: 3410333 - DNA, 25 bp, Homo sapien
tttggactgctttgtggcctacggt

SEQ ID NO: 3410334 - DNA, 25 bp, Homo sapien
tctggaaagagcagctatgaaacac

SEQ ID NO: 3410335 - DNA, 25 bp, Homo sapien
ggaaagagcagctatgaaacactct

SEQ ID NO: 3410336 - DNA, 25 bp, Homo sapien
tggaaagagcagctatgaaacactc

SEQ ID NO: 3410337 - DNA, 25 bp, Homo sapien
ctggaaagagcagctatgaaacact

SEQ ID NO: 3410338 - DNA, 25 bp, Homo sapien
tcatagttcagctttcaaacactct

SEQ ID NO: 3410339 - DNA, 25 bp, Homo sapien
ttcatagttcagctttcaaacactc

SEQ ID NO: 3410340 - DNA, 25 bp, Homo sapien
ttccttcgaaacgggtatatcttca

SEQ ID NO: 3410341 - DNA, 25 bp, Homo sapien
gataaacttcccagaactacacgga

SEQ ID NO: 3410342 - DNA, 25 bp, Homo sapien
cctttagatggagcagtttccaaac

SEQ ID NO: 3410343 - DNA, 25 bp, Homo sapien
cattcctatgggtagaacagtttgt

SEQ ID NO: 3410344 - DNA, 25 bp, Homo sapien
gcatcggactcacagagttggacat

SEQ ID NO: 3410345 - DNA, 25 bp, Homo sapien
ccaaactgctgaatccatagaaaag

SEQ ID NO: 3410346 - DNA, 25 bp, Homo sapien
tgtccatttgcagaatggacaaaaa

SEQ ID NO: 3410347 - DNA, 25 bp, Homo sapien
actgctgaatccatagaaaagttta

SEQ ID NO: 3410348 - DNA, 25 bp, Homo sapien
ttgcagaatggacaaaaacagcatt

SEQ ID NO: 3410349 - DNA, 25 bp, Homo sapien
ttctgttaagtactcctcaaggtca

SEQ ID NO: 3410350 - DNA, 25 bp, Homo sapien
tctgttaagtactcctcaaggtcag

SEQ ID NO: 3410351 - DNA, 25 bp, Homo sapien
attctgttaagtactcctcaaggtc

SEQ ID NO: 3410352 - DNA, 25 bp, Homo sapien
aattctgttaagtactcctcaaggt

SEQ ID NO: 3410353 - DNA, 25 bp, Homo sapien
gaagggttcccacaatgattcttcg

SEQ ID NO: 3410354 - DNA, 25 bp, Homo sapien
ctttgaagggttcccacaatgattc

SEQ ID NO: 3410355 - DNA, 25 bp, Homo sapien
gttctttgaagggttcccacaatga

SEQ ID NO: 3410356 - DNA, 25 bp, Homo sapien
gggttcccacaatgattcttcgaga

SEQ ID NO: 3410357 - DNA, 25 bp, Homo sapien
cttcttcaatcgaatgttagttttg

SEQ ID NO: 3410358 - DNA, 25 bp, Homo sapien
gtattgtctttatgcattcaaagca

SEQ ID NO: 3410359 - DNA, 25 bp, Homo sapien
gtttctctgctgtattgtctttatg

SEQ ID NO: 3410360 - DNA, 25 bp, Homo sapien
ggcaagggaagccatcttcttcaat

SEQ ID NO: 3410361 - DNA, 25 bp, Homo sapien
cttccagtggctgattctggtggtt

SEQ ID NO: 3410362 - DNA, 25 bp, Homo sapien
caagctttttcccataaagactgca

SEQ ID NO: 3410363 - DNA, 25 bp, Homo sapien
acattcaggtttctctgattttcac

SEQ ID NO: 3410364 - DNA, 25 bp, Homo sapien
gtggtttccacattcaggtttctct

SEQ ID NO: 3410365 - DNA, 25 bp, Homo sapien
ttttaagagtcacccatttgcccac

SEQ ID NO: 3410366 - DNA, 25 bp, Homo sapien
aagagtcacccatttgcccaccata

SEQ ID NO: 3410367 - DNA, 25 bp, Homo sapien
agtcacccatttgcccaccataagt

SEQ ID NO: 3410368 - DNA, 25 bp, Homo sapien
agttcctattttaagagtcacccat

SEQ ID NO: 3410369 - DNA, 25 bp, Homo sapien
ttggcggggctatactctcccaata

SEQ ID NO: 3410370 - DNA, 25 bp, Homo sapien
atactctcccaataaagtagcatta

SEQ ID NO: 3410371 - DNA, 25 bp, Homo sapien
ttggcctggtaggatcccttggcgg

SEQ ID NO: 3410372 - DNA, 25 bp, Homo sapien
tagcattagttatgcgaatgtgttt

SEQ ID NO: 3410373 - DNA, 25 bp, Homo sapien
cttgaccattccacaaagttttgtg

SEQ ID NO: 3410374 - DNA, 25 bp, Homo sapien
ttgaccattccacaaagttttgtgg

SEQ ID NO: 3410375 - DNA, 25 bp, Homo sapien
ccctgagcgctagattcagaggctg

SEQ ID NO: 3410376 - DNA, 25 bp, Homo sapien
gccctgccctgagcgctagattcag

SEQ ID NO: 3410377 - DNA, 25 bp, Homo sapien
ctgccctgagcgctagattcagagg

SEQ ID NO: 3410378 - DNA, 25 bp, Homo sapien
ggccctgccctgagcgctagattca

SEQ ID NO: 3410379 - DNA, 25 bp, Homo sapien
ggagaatacagaaaaagataggtct

SEQ ID NO: 3410380 - DNA, 25 bp, Homo sapien
gagaatacagaaaaagataggtctg

SEQ ID NO: 3410381 - DNA, 25 bp, Homo sapien
taataacattagaatgcaattcaag

SEQ ID NO: 3410382 - DNA, 25 bp, Homo sapien
cattagaatgcaattcaagacataa

SEQ ID NO: 3410383 - DNA, 25 bp, Homo sapien
gataaaggggttcccacagcagatg

SEQ ID NO: 3410384 - DNA, 25 bp, Homo sapien
tatttgtcctgtttgataaggcaca

SEQ ID NO: 3410385 - DNA, 25 bp, Homo sapien
ttggcgcattacaaactgtagccca

SEQ ID NO: 3410386 - DNA, 25 bp, Homo sapien
tggcgcattacaaactgtagcccaa

SEQ ID NO: 3410387 - DNA, 25 bp, Homo sapien
ggcgcattacaaactgtagcccaaa

SEQ ID NO: 3410388 - DNA, 25 bp, Homo sapien
cattggctccacggaacaccttcat

SEQ ID NO: 3410389 - DNA, 25 bp, Homo sapien
cagagttctggcattgttgaagcta

SEQ ID NO: 3410390 - DNA, 25 bp, Homo sapien
cattgtcacaatgtatgtcagtaaa

SEQ ID NO: 3410391 - DNA, 25 bp, Homo sapien
aacatgacaaatagcgcattttgca

SEQ ID NO: 3410392 - DNA, 25 bp, Homo sapien
aaatagcgcattttgcacatcagga

SEQ ID NO: 3410393 - DNA, 25 bp, Homo sapien
ccaccattgtcacaatgtatgtcag

SEQ ID NO: 3410394 - DNA, 25 bp, Homo sapien
agctcagaaggaaatcgtctttttg

SEQ ID NO: 3410395 - DNA, 25 bp, Homo sapien
taaacagttgtcccatgcaagctca

SEQ ID NO: 3410396 - DNA, 25 bp, Homo sapien
aacagttgtcccatgcaagctcaga

SEQ ID NO: 3410397 - DNA, 25 bp, Homo sapien
ctcagaaggaaatcgtctttttgtc

SEQ ID NO: 3410398 - DNA, 25 bp, Homo sapien
ggccacacagcgatcacaggccatc

SEQ ID NO: 3410399 - DNA, 25 bp, Homo sapien
cagaaggaagacctcagaaccacca

SEQ ID NO: 3410400 - DNA, 25 bp, Homo sapien
ccaccagaaggaagacctcagaacc

SEQ ID NO: 3410401 - DNA, 25 bp, Homo sapien
aggaagacctcagaaccaccaaata

SEQ ID NO: 3410402 - DNA, 25 bp, Homo sapien
cttgaaatacaggatgcacaaaacc

SEQ ID NO: 3410403 - DNA, 25 bp, Homo sapien
tccaaataaagggtatatgtcacag

SEQ ID NO: 3410404 - DNA, 25 bp, Homo sapien
gcatgccagttccaaataaagggta

SEQ ID NO: 3410405 - DNA, 25 bp, Homo sapien
agtgcatgccagttccaaataaagg

SEQ ID NO: 3410406 - DNA, 25 bp, Homo sapien
gtcagtgcatgccagttccaaataa

SEQ ID NO: 3410407 - DNA, 25 bp, Homo sapien
taaccacggtaaaatgggagctgca

SEQ ID NO: 3410408 - DNA, 25 bp, Homo sapien
gaagactagtagaagggtgaggatg

SEQ ID NO: 3410409 - DNA, 25 bp, Homo sapien
atagaagactagtagaagggtgagg

SEQ ID NO: 3410410 - DNA, 25 bp, Homo sapien
agataaccacggtaaaatgggagct

SEQ ID NO: 3410411 - DNA, 25 bp, Homo sapien
tctaactacagttcattttacacag

SEQ ID NO: 3410412 - DNA, 25 bp, Homo sapien
ctaactacagttcattttacacagg

SEQ ID NO: 3410413 - DNA, 25 bp, Homo sapien
gaaaagttctgtaacattgttactc

SEQ ID NO: 3410414 - DNA, 25 bp, Homo sapien
gttctgtaacattgttactcagtcc

SEQ ID NO: 3410415 - DNA, 25 bp, Homo sapien
aagttctgtaacattgttactcagt

SEQ ID NO: 3410416 - DNA, 25 bp, Homo sapien
tctgtaacattgttactcagtccca

SEQ ID NO: 3410417 - DNA, 25 bp, Homo sapien
caccatagtcacaatgtatgttagt

SEQ ID NO: 3410418 - DNA, 25 bp, Homo sapien
catagtcacaatgtatgttagtaaa

SEQ ID NO: 3410419 - DNA, 25 bp, Homo sapien
ataatgcattttgcacatcgagatc

SEQ ID NO: 3410420 - DNA, 25 bp, Homo sapien
aataatgcattttgcacatcgagat

SEQ ID NO: 3410421 - DNA, 25 bp, Homo sapien
aggatggggtggcaataatagtcac

SEQ ID NO: 3410422 - DNA, 25 bp, Homo sapien
gcccaaggatggggtggcaataata

SEQ ID NO: 3410423 - DNA, 25 bp, Homo sapien
caaggatggggtggcaataatagtc

SEQ ID NO: 3410424 - DNA, 25 bp, Homo sapien
gagcccaaggatggggtggcaataa

SEQ ID NO: 3410425 - DNA, 25 bp, Homo sapien
caaccaatttgggataaatggtggt

SEQ ID NO: 3410426 - DNA, 25 bp, Homo sapien
accaatttgggataaatggtggtgg

SEQ ID NO: 3410427 - DNA, 25 bp, Homo sapien
tacaaccaatttgggataaatggtg

SEQ ID NO: 3410428 - DNA, 25 bp, Homo sapien
ctacaaccaatttgggataaatggt

SEQ ID NO: 3410429 - DNA, 25 bp, Homo sapien
ggctggcccatgcaagttgggaaca

SEQ ID NO: 3410430 - DNA, 25 bp, Homo sapien
gctggcccatgcaagttgggaacaa

SEQ ID NO: 3410431 - DNA, 25 bp, Homo sapien
agatggccacatagcgatcacaggc

SEQ ID NO: 3410432 - DNA, 25 bp, Homo sapien
gatggccacatagcgatcacaggcc

SEQ ID NO: 3410433 - DNA, 25 bp, Homo sapien
tggccacatagcgatcacaggccat

SEQ ID NO: 3410434 - DNA, 25 bp, Homo sapien
atggccacatagcgatcacaggcca

SEQ ID NO: 3410435 - DNA, 25 bp, Homo sapien
catgatggtaaaatagtgcagtggc

SEQ ID NO: 3410436 - DNA, 25 bp, Homo sapien
gatggtaaaatagtgcagtggctta

SEQ ID NO: 3410437 - DNA, 25 bp, Homo sapien
attcatgatggtaaaatagtgcagt

SEQ ID NO: 3410438 - DNA, 25 bp, Homo sapien
tgatggtaaaatagtgcagtggctt

SEQ ID NO: 3410439 - DNA, 25 bp, Homo sapien
cagaacgcacaaaactccagtcaca

SEQ ID NO: 3410440 - DNA, 25 bp, Homo sapien
acacagattgcttcaaccttgaaaa

SEQ ID NO: 3410441 - DNA, 25 bp, Homo sapien
tttggaacacagaacgcacaaaact

SEQ ID NO: 3410442 - DNA, 25 bp, Homo sapien
tgcttcaaccttgaaaaccacagtg

SEQ ID NO: 3410443 - DNA, 25 bp, Homo sapien
gaggacaactacagtaatgcgggag

SEQ ID NO: 3410444 - DNA, 25 bp, Homo sapien
aaaaaagaggacaactacagtaatg

SEQ ID NO: 3410445 - DNA, 25 bp, Homo sapien
aagaggacaactacagtaatgcggg

SEQ ID NO: 3410446 - DNA, 25 bp, Homo sapien
ggacaactacagtaatgcgggagct

SEQ ID NO: 3410447 - DNA, 25 bp, Homo sapien
aataataaatttatcaatggggaag

SEQ ID NO: 3410448 - DNA, 25 bp, Homo sapien
ataataaatttatcaatggggaagt

SEQ ID NO: 3410449 - DNA, 25 bp, Homo sapien
ctgtaacattgctgcttggtctcat

SEQ ID NO: 3410450 - DNA, 25 bp, Homo sapien
ttcacatcaggatcttgagtgaggc

SEQ ID NO: 3410451 - DNA, 25 bp, Homo sapien
cacatcaggatcttgagtgaggccc

SEQ ID NO: 3410452 - DNA, 25 bp, Homo sapien
catcaggatcttgagtgaggcccag

SEQ ID NO: 3410453 - DNA, 25 bp, Homo sapien
tttttcacatcaggatcttgagtga

SEQ ID NO: 3410454 - DNA, 25 bp, Homo sapien
ggcatccataagtgacaagtaggca

SEQ ID NO: 3410455 - DNA, 25 bp, Homo sapien
ggcagtggaatatatggcatccata

SEQ ID NO: 3410456 - DNA, 25 bp, Homo sapien
gctgccaatagtagtcacccaaatg

SEQ ID NO: 3410457 - DNA, 25 bp, Homo sapien
tatcatcaatttgggtgacatggca

SEQ ID NO: 3410458 - DNA, 25 bp, Homo sapien
acctctgcaccaccaagtaagtgtt

SEQ ID NO: 3410459 - DNA, 25 bp, Homo sapien
caccaccaagtaagtgttctatgaa

SEQ ID NO: 3410460 - DNA, 25 bp, Homo sapien
ctctgcaccaccaagtaagtgttct

SEQ ID NO: 3410461 - DNA, 25 bp, Homo sapien
cctctgcaccaccaagtaagtgttc

SEQ ID NO: 3410462 - DNA, 25 bp, Homo sapien
tccaatcatggccaccaccaacaga

SEQ ID NO: 3410463 - DNA, 25 bp, Homo sapien
ccaccaccaacagaaggatgcaaac

SEQ ID NO: 3410464 - DNA, 25 bp, Homo sapien
ctccaatcatggccaccaccaacag

SEQ ID NO: 3410465 - DNA, 25 bp, Homo sapien
tggccaccaccaacagaaggatgca

SEQ ID NO: 3410466 - DNA, 25 bp, Homo sapien
taaagatgaccatacaaattattcc

SEQ ID NO: 3410467 - DNA, 25 bp, Homo sapien
aaaggtaaagatgaccatacaaatt

SEQ ID NO: 3410468 - DNA, 25 bp, Homo sapien
gatgaccatacaaattattccacca

SEQ ID NO: 3410469 - DNA, 25 bp, Homo sapien
acagattggtagactgtacagaaag

SEQ ID NO: 3410470 - DNA, 25 bp, Homo sapien
aacaaaaacgagggcaaccacaatg

SEQ ID NO: 3410471 - DNA, 25 bp, Homo sapien
ctctgattgtctcaacgagtatatt

SEQ ID NO: 3410472 - DNA, 25 bp, Homo sapien
gattgtctcaacgagtatattaaag

SEQ ID NO: 3410473 - DNA, 25 bp, Homo sapien
ctgattgtctcaacgagtatattaa

SEQ ID NO: 3410474 - DNA, 25 bp, Homo sapien
tctgattgtctcaacgagtatatta

SEQ ID NO: 3410475 - DNA, 25 bp, Homo sapien
tttgttgccttagaactaggaataa

SEQ ID NO: 3410476 - DNA, 25 bp, Homo sapien
taaatatgttcagtgtgggagatac

SEQ ID NO: 3410477 - DNA, 25 bp, Homo sapien
cgcctatttgttgccttagaactag

SEQ ID NO: 3410478 - DNA, 25 bp, Homo sapien
tgttcagtgtgggagatactctttt

SEQ ID NO: 3410479 - DNA, 25 bp, Homo sapien
caggcttatgcagttttttctttgg

SEQ ID NO: 3410480 - DNA, 25 bp, Homo sapien
ccaaatccaggcttatgcagttttt

SEQ ID NO: 3410481 - DNA, 25 bp, Homo sapien
ttttttctttggtcctagaagatga

SEQ ID NO: 3410482 - DNA, 25 bp, Homo sapien
ttttctttggtcctagaagatgact

SEQ ID NO: 3410483 - DNA, 25 bp, Homo sapien
gtttagaatatcctcccacaattat

SEQ ID NO: 3410484 - DNA, 25 bp, Homo sapien
tagaaaagaagtgtttagaatatcc

SEQ ID NO: 3410485 - DNA, 25 bp, Homo sapien
agaaaagaagtgtttagaatatcct

SEQ ID NO: 3410486 - DNA, 25 bp, Homo sapien
tagaatatcctcccacaattatcct

SEQ ID NO: 3410487 - DNA, 25 bp, Homo sapien
atcgaccacgttttccctgaccagg

SEQ ID NO: 3410488 - DNA, 25 bp, Homo sapien
gatgccttatcgaccacgttttccc

SEQ ID NO: 3410489 - DNA, 25 bp, Homo sapien
tgtgatgccttatcgaccacgtttt

SEQ ID NO: 3410490 - DNA, 25 bp, Homo sapien
gccttatcgaccacgttttccctga

SEQ ID NO: 3410491 - DNA, 25 bp, Homo sapien
gtcagtgataaatttgagattattt

SEQ ID NO: 3410492 - DNA, 25 bp, Homo sapien
ggtcagtgataaatttgagattatt

SEQ ID NO: 3410493 - DNA, 25 bp, Homo sapien
gggtcagtgataaatttgagattat

SEQ ID NO: 3410494 - DNA, 25 bp, Homo sapien
aggtgttggactcaggtgtcggagc

SEQ ID NO: 3410495 - DNA, 25 bp, Homo sapien
gaatagacggtatctatgaatgata

SEQ ID NO: 3410496 - DNA, 25 bp, Homo sapien
catgtgttcttctgaaggtgttgga

SEQ ID NO: 3410497 - DNA, 25 bp, Homo sapien
tgagccctaagaggataaattcagt

SEQ ID NO: 3410498 - DNA, 25 bp, Homo sapien
gatggccatgtatcgatcataggcc

SEQ ID NO: 3410499 - DNA, 25 bp, Homo sapien
tggccatgtatcgatcataggccat

SEQ ID NO: 3410500 - DNA, 25 bp, Homo sapien
atggccatgtatcgatcataggcca

SEQ ID NO: 3410501 - DNA, 25 bp, Homo sapien
agatggccatgtatcgatcataggc

SEQ ID NO: 3410502 - DNA, 25 bp, Homo sapien
gaaaagtagaattgggccttgcata

SEQ ID NO: 3410503 - DNA, 25 bp, Homo sapien
taaaagttagaactacagtcatgga

SEQ ID NO: 3410504 - DNA, 25 bp, Homo sapien
gactcgacgattcatggtgatcaat

SEQ ID NO: 3410505 - DNA, 25 bp, Homo sapien
ttgggccttgcatacaagaagatac

SEQ ID NO: 3410506 - DNA, 25 bp, Homo sapien
gatacagccatttcccagctaagct

SEQ ID NO: 3410507 - DNA, 25 bp, Homo sapien
acagccatttcccagctaagcttac

SEQ ID NO: 3410508 - DNA, 25 bp, Homo sapien
tcatgagtgatacagccatttccca

SEQ ID NO: 3410509 - DNA, 25 bp, Homo sapien
catgagtgatacagccatttcccag

SEQ ID NO: 3410510 - DNA, 25 bp, Homo sapien
caatgggtccatcgaacaccttcat

SEQ ID NO: 3410511 - DNA, 25 bp, Homo sapien
ctgtaatgctgttattaggtctcat

SEQ ID NO: 3410512 - DNA, 25 bp, Homo sapien
tgagagaatcccaggaggacaaatt

SEQ ID NO: 3410513 - DNA, 25 bp, Homo sapien
ctgagagaatcccaggaggacaaat

SEQ ID NO: 3410514 - DNA, 25 bp, Homo sapien
aaatagttggcccatgaacgtttgg

SEQ ID NO: 3410515 - DNA, 25 bp, Homo sapien
cccatgaacgtttggaaggaaatag

SEQ ID NO: 3410516 - DNA, 25 bp, Homo sapien
tggttccccaacacagtcacaacgt

SEQ ID NO: 3410517 - DNA, 25 bp, Homo sapien
agtgcaatgtcttacagatggcaac

SEQ ID NO: 3410518 - DNA, 25 bp, Homo sapien
agaatgcacaaaaccgcctgtcgca

SEQ ID NO: 3410519 - DNA, 25 bp, Homo sapien
ataatggatacatgtcacaactgaa

SEQ ID NO: 3410520 - DNA, 25 bp, Homo sapien
tccaataatggatacatgtcacaac

SEQ ID NO: 3410521 - DNA, 25 bp, Homo sapien
gccaccagcaatgcaaggatacaaa

SEQ ID NO: 3410522 - DNA, 25 bp, Homo sapien
ggatgaccctataggaaattattag

SEQ ID NO: 3410523 - DNA, 25 bp, Homo sapien
cagagtgctccaccactgaaaacaa

SEQ ID NO: 3410524 - DNA, 25 bp, Homo sapien
gatgaccctataggaaattattaga

SEQ ID NO: 3410525 - DNA, 25 bp, Homo sapien
ttaggatgaccctataggaaattat

SEQ ID NO: 3410526 - DNA, 25 bp, Homo sapien
cagggaataaaaagagaacaatcac

SEQ ID NO: 3410527 - DNA, 25 bp, Homo sapien
aagacagtcatgaatgtgtcaatag

SEQ ID NO: 3410528 - DNA, 25 bp, Homo sapien
tgaggatggaccctgttattctaaa

SEQ ID NO: 3410529 - DNA, 25 bp, Homo sapien
taaaaagagaacaatcacagtgatg

SEQ ID NO: 3410530 - DNA, 25 bp, Homo sapien
ttttttcccccttcatcttctgcta

SEQ ID NO: 3410531 - DNA, 25 bp, Homo sapien
ttcccccttcatcttctgctagcat

SEQ ID NO: 3410532 - DNA, 25 bp, Homo sapien
tttttcccccttcatcttctgctag

SEQ ID NO: 3410533 - DNA, 25 bp, Homo sapien
tttcccccttcatcttctgctagca

SEQ ID NO: 3410534 - DNA, 25 bp, Homo sapien
tcagcaccaccaaatgggtgctctt

SEQ ID NO: 3410535 - DNA, 25 bp, Homo sapien
gcaccaccaaatgggtgctctttaa

SEQ ID NO: 3410536 - DNA, 25 bp, Homo sapien
accaccaaatgggtgctctttaaag

SEQ ID NO: 3410537 - DNA, 25 bp, Homo sapien
accaaatgggtgctctttaaagagc

SEQ ID NO: 3410538 - DNA, 25 bp, Homo sapien
tgcaagtcctccgtatggagaagac

SEQ ID NO: 3410539 - DNA, 25 bp, Homo sapien
agtcctccgtatggagaagacagca

SEQ ID NO: 3410540 - DNA, 25 bp, Homo sapien
tcctccgtatggagaagacagcatt

SEQ ID NO: 3410541 - DNA, 25 bp, Homo sapien
actgcaagtcctccgtatggagaag

SEQ ID NO: 3410542 - DNA, 25 bp, Homo sapien
gcccaaggtagaagagataactctt

SEQ ID NO: 3410543 - DNA, 25 bp, Homo sapien
cccaaggtagaagagataactcttc

SEQ ID NO: 3410544 - DNA, 25 bp, Homo sapien
ctatacatgacagacaggcaagtca

SEQ ID NO: 3410545 - DNA, 25 bp, Homo sapien
tccccactgttgtcaccaattatgt

SEQ ID NO: 3410546 - DNA, 25 bp, Homo sapien
tatacatgacagacaggcaagtcag

SEQ ID NO: 3410547 - DNA, 25 bp, Homo sapien
ctgttgtcaccaattatgtgagtaa

SEQ ID NO: 3410548 - DNA, 25 bp, Homo sapien
tgagtaactctacaatcagtttggg

SEQ ID NO: 3410549 - DNA, 25 bp, Homo sapien
atgagtaactctacaatcagtttgg

SEQ ID NO: 3410550 - DNA, 25 bp, Homo sapien
aacaacagtttgaaacatagaatgt

SEQ ID NO: 3410551 - DNA, 25 bp, Homo sapien
tagaatgtacaaaacctcctgtcac

SEQ ID NO: 3410552 - DNA, 25 bp, Homo sapien
acagtttgaaacatagaatgtacaa

SEQ ID NO: 3410553 - DNA, 25 bp, Homo sapien
gaatgtacaaaacctcctgtcacag

SEQ ID NO: 3410554 - DNA, 25 bp, Homo sapien
gagagtttaggatgattccgtagga

SEQ ID NO: 3410555 - DNA, 25 bp, Homo sapien
taggatgattccgtaggatattagt

SEQ ID NO: 3410556 - DNA, 25 bp, Homo sapien
tttaagagagtttaggatgattccg

SEQ ID NO: 3410557 - DNA, 25 bp, Homo sapien
gattccgtaggatattagtagaatg

SEQ ID NO: 3410558 - DNA, 25 bp, Homo sapien
tctaactacagatagcttttttaca

SEQ ID NO: 3410559 - DNA, 25 bp, Homo sapien
ctaactacagatagcttttttacac

SEQ ID NO: 3410560 - DNA, 25 bp, Homo sapien
tcttattctaactacagatagcttt

SEQ ID NO: 3410561 - DNA, 25 bp, Homo sapien
tattctaactacagatagctttttt

SEQ ID NO: 3410562 - DNA, 25 bp, Homo sapien
gcgatggcaataatggtcaccacaa

SEQ ID NO: 3410563 - DNA, 25 bp, Homo sapien
ctgtaacattattacttgttcccat

SEQ ID NO: 3410564 - DNA, 25 bp, Homo sapien
caggcatgcgaggaagaaggacact

SEQ ID NO: 3410565 - DNA, 25 bp, Homo sapien
tctatcatcaacttaggggaaaagg

SEQ ID NO: 3410566 - DNA, 25 bp, Homo sapien
gtgatcacaggccatacccaccaaa

SEQ ID NO: 3410567 - DNA, 25 bp, Homo sapien
cagccaccataaacaggaggatgca

SEQ ID NO: 3410568 - DNA, 25 bp, Homo sapien
acaggccatacccaccaaaagaaag

SEQ ID NO: 3410569 - DNA, 25 bp, Homo sapien
aaacatagaatgcaaaaacctccag

SEQ ID NO: 3410570 - DNA, 25 bp, Homo sapien
tcacaaaatggtcaatgacattggg

SEQ ID NO: 3410571 - DNA, 25 bp, Homo sapien
gacattggggccacagaaagggaga

SEQ ID NO: 3410572 - DNA, 25 bp, Homo sapien
aatgacattggggccacagaaaggg

SEQ ID NO: 3410573 - DNA, 25 bp, Homo sapien
gtcacaaaatggtcaatgacattgg

SEQ ID NO: 3410574 - DNA, 25 bp, Homo sapien
tataaagtaagtgtcagtgcacacc

SEQ ID NO: 3410575 - DNA, 25 bp, Homo sapien
ctataaagtaagtgtcagtgcacac

SEQ ID NO: 3410576 - DNA, 25 bp, Homo sapien
taaagtaagtgtcagtgcacaccat

SEQ ID NO: 3410577 - DNA, 25 bp, Homo sapien
agtaagtgtcagtgcacaccatttc

SEQ ID NO: 3410578 - DNA, 25 bp, Homo sapien
tgctccaccattggcaatcacagtg

SEQ ID NO: 3410579 - DNA, 25 bp, Homo sapien
ttttacaccagagttttttcacagc

SEQ ID NO: 3410580 - DNA, 25 bp, Homo sapien
cattggcttcattgaacaccttcat

SEQ ID NO: 3410581 - DNA, 25 bp, Homo sapien
ggctgacaataatagtcaccgcaac

SEQ ID NO: 3410582 - DNA, 25 bp, Homo sapien
gctgacaataatagtcaccgcaacg

SEQ ID NO: 3410583 - DNA, 25 bp, Homo sapien
tgacaataatagtcaccgcaacgag

SEQ ID NO: 3410584 - DNA, 25 bp, Homo sapien
acaataatagtcaccgcaacgagta

SEQ ID NO: 3410585 - DNA, 25 bp, Homo sapien
agaaatggtggtggataatacagca

SEQ ID NO: 3410586 - DNA, 25 bp, Homo sapien
gaaatggtggtggataatacagcat

SEQ ID NO: 3410587 - DNA, 25 bp, Homo sapien
cagagtaggtctacaatcaatatgg

SEQ ID NO: 3410588 - DNA, 25 bp, Homo sapien
gtaggtctacaatcaatatgggaga

SEQ ID NO: 3410589 - DNA, 25 bp, Homo sapien
ccaccagaaggaagatctcagttcc

SEQ ID NO: 3410590 - DNA, 25 bp, Homo sapien
gatctcagttccaccaaacaagtgg

SEQ ID NO: 3410591 - DNA, 25 bp, Homo sapien
ccagaaggaagatctcagttccacc

SEQ ID NO: 3410592 - DNA, 25 bp, Homo sapien
agatctcagttccaccaaacaagtg

SEQ ID NO: 3410593 - DNA, 25 bp, Homo sapien
cagaatgaaggaaacctccagtcat

SEQ ID NO: 3410594 - DNA, 25 bp, Homo sapien
agaatgaaggaaacctccagtcatg

SEQ ID NO: 3410595 - DNA, 25 bp, Homo sapien
gacaaccacggtgatgtgcgagctg

SEQ ID NO: 3410596 - DNA, 25 bp, Homo sapien
agaggacaaccacggtgatgtgcga

SEQ ID NO: 3410597 - DNA, 25 bp, Homo sapien
aaccacggtgatgtgcgagctgcag

SEQ ID NO: 3410598 - DNA, 25 bp, Homo sapien
aaagaggacaaccacggtgatgtgc

SEQ ID NO: 3410599 - DNA, 25 bp, Homo sapien
tatagttagcttcttacacaacagg

SEQ ID NO: 3410600 - DNA, 25 bp, Homo sapien
actatagttagcttcttacacaaca

SEQ ID NO: 3410601 - DNA, 25 bp, Homo sapien
ctaactatagttagcttcttacaca

SEQ ID NO: 3410602 - DNA, 25 bp, Homo sapien
cttattctaactatagttagcttct

SEQ ID NO: 3410603 - DNA, 25 bp, Homo sapien
tcatattgaagctatagactgatag

SEQ ID NO: 3410604 - DNA, 25 bp, Homo sapien
agttctgtcatattgaagctataga

SEQ ID NO: 3410605 - DNA, 25 bp, Homo sapien
tctgtcatattgaagctatagactg

SEQ ID NO: 3410606 - DNA, 25 bp, Homo sapien
ctgtcatattgaagctatagactga

SEQ ID NO: 3410607 - DNA, 25 bp, Homo sapien
cttctctaaggcttgtatcagagtt

SEQ ID NO: 3410608 - DNA, 25 bp, Homo sapien
ggcttgtatcagagttgagagctca

SEQ ID NO: 3410609 - DNA, 25 bp, Homo sapien
gtatcagagttgagagctcagaaga

SEQ ID NO: 3410610 - DNA, 25 bp, Homo sapien
taaggcttgtatcagagttgagagc

SEQ ID NO: 3410611 - DNA, 25 bp, Homo sapien
agttacactagggagcccaaagagg

SEQ ID NO: 3410612 - DNA, 25 bp, Homo sapien
aaatgaagtggaatatacggcatcc

SEQ ID NO: 3410613 - DNA, 25 bp, Homo sapien
aggaagagttacactagggagccca

SEQ ID NO: 3410614 - DNA, 25 bp, Homo sapien
gaatatacggcatccatcaatgaca

SEQ ID NO: 3410615 - DNA, 25 bp, Homo sapien
cagtcttttttatcgcagagtaagt

SEQ ID NO: 3410616 - DNA, 25 bp, Homo sapien
gaaacagtcttttttatcgcagagt

SEQ ID NO: 3410617 - DNA, 25 bp, Homo sapien
ggaaacagtcttttttatcgcagag

SEQ ID NO: 3410618 - DNA, 25 bp, Homo sapien
aacagtcttttttatcgcagagtaa

SEQ ID NO: 3410619 - DNA, 25 bp, Homo sapien
caccaaataggtggtccgcaaatag

SEQ ID NO: 3410620 - DNA, 25 bp, Homo sapien
caacaccaccaaataggtggtccgc

SEQ ID NO: 3410621 - DNA, 25 bp, Homo sapien
atcataggccatccccacgaaaaga

SEQ ID NO: 3410622 - DNA, 25 bp, Homo sapien
taggccatccccacgaaaagaaaga

SEQ ID NO: 3410623 - DNA, 25 bp, Homo sapien
aaaatcctccagtcacggccaccac

SEQ ID NO: 3410624 - DNA, 25 bp, Homo sapien
tcaaaatcctccagtcacggccacc

SEQ ID NO: 3410625 - DNA, 25 bp, Homo sapien
caaaatcctccagtcacggccacca

SEQ ID NO: 3410626 - DNA, 25 bp, Homo sapien
taactatagttcaggtttaacacca

SEQ ID NO: 3410627 - DNA, 25 bp, Homo sapien
gacagggttctatgcctcccttctt

SEQ ID NO: 3410628 - DNA, 25 bp, Homo sapien
ccataggaggttagtagaaggcaga

SEQ ID NO: 3410629 - DNA, 25 bp, Homo sapien
ctcagtggttggattaatggattca

SEQ ID NO: 3410630 - DNA, 25 bp, Homo sapien
caggtgaaactggacaaatgctgca

SEQ ID NO: 3410631 - DNA, 25 bp, Homo sapien
taccaatttgcttggtatggcaaaa

SEQ ID NO: 3410632 - DNA, 25 bp, Homo sapien
tcttcctgcaaggtgatattgaagc

SEQ ID NO: 3410633 - DNA, 25 bp, Homo sapien
tgaggtgaagcaaaagcatcccggt

SEQ ID NO: 3410634 - DNA, 25 bp, Homo sapien
tgagccccaagaggatgaattaagt

SEQ ID NO: 3410635 - DNA, 25 bp, Homo sapien
gccccaagaggatgaattaagtcaa

SEQ ID NO: 3410636 - DNA, 25 bp, Homo sapien
gaggatgaattaagtcaatttttcc

SEQ ID NO: 3410637 - DNA, 25 bp, Homo sapien
ctgtgtgagccccaagaggatgaat

SEQ ID NO: 3410638 - DNA, 25 bp, Homo sapien
gataaggaggttgcccattatcgtc

SEQ ID NO: 3410639 - DNA, 25 bp, Homo sapien
ggaggttgcccattatcgtcacaat

SEQ ID NO: 3410640 - DNA, 25 bp, Homo sapien
gcccattatcgtcacaatgtagatg

SEQ ID NO: 3410641 - DNA, 25 bp, Homo sapien
atgtagatgagtaagaatgtgacaa

SEQ ID NO: 3410642 - DNA, 25 bp, Homo sapien
gagggaagaaggtgacagtacaaat

SEQ ID NO: 3410643 - DNA, 25 bp, Homo sapien
cctcagggcatagattagtggtttc

SEQ ID NO: 3410644 - DNA, 25 bp, Homo sapien
tggagttgggccttgcaaacaggaa

SEQ ID NO: 3410645 - DNA, 25 bp, Homo sapien
tggcagtataatagacggtatgtat

SEQ ID NO: 3410646 - DNA, 25 bp, Homo sapien
agggatacagcccttttccagctaa

SEQ ID NO: 3410647 - DNA, 25 bp, Homo sapien
ggatacagcccttttccagctaagc

SEQ ID NO: 3410648 - DNA, 25 bp, Homo sapien
atgagggatacagcccttttccagc

SEQ ID NO: 3410649 - DNA, 25 bp, Homo sapien
tcatgagggatacagcccttttcca

SEQ ID NO: 3410650 - DNA, 25 bp, Homo sapien
taagataaaaaatgccaactagctc

SEQ ID NO: 3410651 - DNA, 25 bp, Homo sapien
aactagctcagctccagtaggtctt

SEQ ID NO: 3410652 - DNA, 25 bp, Homo sapien
aaaatgccaactagctcagctccag

SEQ ID NO: 3410653 - DNA, 25 bp, Homo sapien
tctggcatagctccacggccagagc

SEQ ID NO: 3410654 - DNA, 25 bp, Homo sapien
cttccaggtattagggtctgaatta

SEQ ID NO: 3410655 - DNA, 25 bp, Homo sapien
ttccaggtattagggtctgaattac

SEQ ID NO: 3410656 - DNA, 25 bp, Homo sapien
caagtgtggattctgtgtgagcccc

SEQ ID NO: 3410657 - DNA, 25 bp, Homo sapien
tattttctgcaagtgtggattctgt

SEQ ID NO: 3410658 - DNA, 25 bp, Homo sapien
tgttgggaggcatgtggtgatccat

SEQ ID NO: 3410659 - DNA, 25 bp, Homo sapien
aatgaacagattggccagcatggta

SEQ ID NO: 3410660 - DNA, 25 bp, Homo sapien
agaagtacatgggtgatgaaagtgt

SEQ ID NO: 3410661 - DNA, 25 bp, Homo sapien
ggataagtaagtgagaaagaagtac

SEQ ID NO: 3410662 - DNA, 25 bp, Homo sapien
agtacatgggtgatgaaagtgtggg

SEQ ID NO: 3410663 - DNA, 25 bp, Homo sapien
ctataaaggataagtaagtgagaaa

SEQ ID NO: 3410664 - DNA, 25 bp, Homo sapien
tcctctggtagagcaggtcggtgat

SEQ ID NO: 3410665 - DNA, 25 bp, Homo sapien
cataggccatgacaataaggaggat

SEQ ID NO: 3410666 - DNA, 25 bp, Homo sapien
aatccaggctatcaccaccagaagg

SEQ ID NO: 3410667 - DNA, 25 bp, Homo sapien
caagtcggtcatgaaaagaatctgc

SEQ ID NO: 3410668 - DNA, 25 bp, Homo sapien
tttcaacaatgggaagagatcacac

SEQ ID NO: 3410669 - DNA, 25 bp, Homo sapien
ggcaagtttcaacaatgggaagaga

SEQ ID NO: 3410670 - DNA, 25 bp, Homo sapien
caagtttcaacaatgggaagagatc

SEQ ID NO: 3410671 - DNA, 25 bp, Homo sapien
tcaacaatgggaagagatcacacat

SEQ ID NO: 3410672 - DNA, 25 bp, Homo sapien
accagcatcccaagtctgtaggtgt

SEQ ID NO: 3410673 - DNA, 25 bp, Homo sapien
caagcacatggctccactgttggct

SEQ ID NO: 3410674 - DNA, 25 bp, Homo sapien
gggaaaagatgagcaagcacatggc

SEQ ID NO: 3410675 - DNA, 25 bp, Homo sapien
tgtaggagatgacgagcagggaaaa

SEQ ID NO: 3410676 - DNA, 25 bp, Homo sapien
tgaccacaggatgcatgtaggtgaa

SEQ ID NO: 3410677 - DNA, 25 bp, Homo sapien
tgtccacagagtaggtgaccacagg

SEQ ID NO: 3410678 - DNA, 25 bp, Homo sapien
tccttcagagctataggatttcagg

SEQ ID NO: 3410679 - DNA, 25 bp, Homo sapien
tgcaaagaacacagtcaccaacttg

SEQ ID NO: 3410680 - DNA, 25 bp, Homo sapien
tcttttcctcaacaaactcctcacg

SEQ ID NO: 3410681 - DNA, 25 bp, Homo sapien
cttttcctcaacaaactcctcacgg

SEQ ID NO: 3410682 - DNA, 25 bp, Homo sapien
caacaaactcctcacggcatttttt

SEQ ID NO: 3410683 - DNA, 25 bp, Homo sapien
cctcaacaaactcctcacggcattt

SEQ ID NO: 3410684 - DNA, 25 bp, Homo sapien
catttttaactagcaatctgtgacc

SEQ ID NO: 3410685 - DNA, 25 bp, Homo sapien
tctaccctaaacatatgcaccatta

SEQ ID NO: 3410686 - DNA, 25 bp, Homo sapien
gtgaccttgtgttccttggaagata

SEQ ID NO: 3410687 - DNA, 25 bp, Homo sapien
tccttggaagatatctaccctaaac

SEQ ID NO: 3410688 - DNA, 25 bp, Homo sapien
atagctcgtatgtctatcttgtgtc

SEQ ID NO: 3410689 - DNA, 25 bp, Homo sapien
cttatagctcgtatgtctatcttgt

SEQ ID NO: 3410690 - DNA, 25 bp, Homo sapien
tatgtctatcttgtgtctgaattcc

SEQ ID NO: 3410691 - DNA, 25 bp, Homo sapien
ttatagctcgtatgtctatcttgtg

SEQ ID NO: 3410692 - DNA, 25 bp, Homo sapien
tcacatacatggctagaaacaaagc

SEQ ID NO: 3410693 - DNA, 25 bp, Homo sapien
caatgaatagatttcccaacactgt

SEQ ID NO: 3410694 - DNA, 25 bp, Homo sapien
catacatggctagaaacaaagcaga

SEQ ID NO: 3410695 - DNA, 25 bp, Homo sapien
caccacaatgaatagatttcccaac

SEQ ID NO: 3410696 - DNA, 25 bp, Homo sapien
atggaagagtaggtggcacccatga

SEQ ID NO: 3410697 - DNA, 25 bp, Homo sapien
aagtacataggtgatctcagactcc

SEQ ID NO: 3410698 - DNA, 25 bp, Homo sapien
cacccatgagagacaaggaagtaag

SEQ ID NO: 3410699 - DNA, 25 bp, Homo sapien
cagtgatggaagagtaggtggcacc

SEQ ID NO: 3410700 - DNA, 25 bp, Homo sapien
tgatcgctacaccatcagagaaatg

SEQ ID NO: 3410701 - DNA, 25 bp, Homo sapien
cagtgagaaggatgatcgctacacc

SEQ ID NO: 3410702 - DNA, 25 bp, Homo sapien
tcatgcaggggcttactgatggcct

SEQ ID NO: 3410703 - DNA, 25 bp, Homo sapien
tagtgttctcaaagagtccacagtc

SEQ ID NO: 3410704 - DNA, 25 bp, Homo sapien
tgtggcatgtgttaatccccccacc

SEQ ID NO: 3410705 - DNA, 25 bp, Homo sapien
attgtggcatgtgttaatcccccca

SEQ ID NO: 3410706 - DNA, 25 bp, Homo sapien
ggcatgtgttaatccccccacccaa

SEQ ID NO: 3410707 - DNA, 25 bp, Homo sapien
tattgtggcatgtgttaatcccccc

SEQ ID NO: 3410708 - DNA, 25 bp, Homo sapien
tacagggtgacaatgtaggatgcaa

SEQ ID NO: 3410709 - DNA, 25 bp, Homo sapien
tgtaggatgcaattaggataaggaa

SEQ ID NO: 3410710 - DNA, 25 bp, Homo sapien
cacatcaccccactgttgaggatga

SEQ ID NO: 3410711 - DNA, 25 bp, Homo sapien
ttgaggatgactaagagacccagca

SEQ ID NO: 3410712 - DNA, 25 bp, Homo sapien
ggtggaaagtgtgttgcgtcaacct

SEQ ID NO: 3410713 - DNA, 25 bp, Homo sapien
tggaaagtgtgttgcgtcaacctac

SEQ ID NO: 3410714 - DNA, 25 bp, Homo sapien
caggtggaaagtgtgttgcgtcaac

SEQ ID NO: 3410715 - DNA, 25 bp, Homo sapien
acaggtggaaagtgtgttgcgtcaa

SEQ ID NO: 3410716 - DNA, 25 bp, Homo sapien
caacaatagtaaaggaaatagccat

SEQ ID NO: 3410717 - DNA, 25 bp, Homo sapien
attttttaccttgatgcccctcagg

SEQ ID NO: 3410718 - DNA, 25 bp, Homo sapien
gatagtgaccacctagggtcccctg

SEQ ID NO: 3410719 - DNA, 25 bp, Homo sapien
gatttaacatgggtgcaacaatagt

SEQ ID NO: 3410720 - DNA, 25 bp, Homo sapien
agctccaacagggatcatgtatagt

SEQ ID NO: 3410721 - DNA, 25 bp, Homo sapien
cagttgcaatgtagacaaacaaaaa

SEQ ID NO: 3410722 - DNA, 25 bp, Homo sapien
caaatactatttcctgaacatttgg

SEQ ID NO: 3410723 - DNA, 25 bp, Homo sapien
gttgcccccaacagttgcaatgtag

SEQ ID NO: 3410724 - DNA, 25 bp, Homo sapien
caaactcagttacaaagctttggtt

SEQ ID NO: 3410725 - DNA, 25 bp, Homo sapien
tgccgccattttgtcaagggaaaaa

SEQ ID NO: 3410726 - DNA, 25 bp, Homo sapien
cagatggaggtcgtgtatatacaaa

SEQ ID NO: 3410727 - DNA, 25 bp, Homo sapien
caagctccagtaacgggtacaagtc

SEQ ID NO: 3410728 - DNA, 25 bp, Homo sapien
tccagcgcccttcagaactgtgtgt

SEQ ID NO: 3410729 - DNA, 25 bp, Homo sapien
atattctcctcatggcctgttttac

SEQ ID NO: 3410730 - DNA, 25 bp, Homo sapien
ccatattctcctcatggcctgtttt

SEQ ID NO: 3410731 - DNA, 25 bp, Homo sapien
catattctcctcatggcctgtttta

SEQ ID NO: 3410732 - DNA, 25 bp, Homo sapien
taatattttctttctcatcagaaac

SEQ ID NO: 3410733 - DNA, 25 bp, Homo sapien
catcagaaaccaccatcagtctgtt

SEQ ID NO: 3410734 - DNA, 25 bp, Homo sapien
tctcatcagaaaccaccatcagtct

SEQ ID NO: 3410735 - DNA, 25 bp, Homo sapien
ttaatattttctttctcatcagaaa

SEQ ID NO: 3410736 - DNA, 25 bp, Homo sapien
ccaccatctcttatgatatgtgcat

SEQ ID NO: 3410737 - DNA, 25 bp, Homo sapien
taaggttgttttgtgtactggctgc

SEQ ID NO: 3410738 - DNA, 25 bp, Homo sapien
tgtactggctgctgacatcctggga

SEQ ID NO: 3410739 - DNA, 25 bp, Homo sapien
tgtgcatggtagtggaaaatcaata

SEQ ID NO: 3410740 - DNA, 25 bp, Homo sapien
tcctctgaagaatcacaacctgcct

SEQ ID NO: 3410741 - DNA, 25 bp, Homo sapien
gggtaataatatctctcaaggatgg

SEQ ID NO: 3410742 - DNA, 25 bp, Homo sapien
ctgattgtgcatgcccgacaggaat

SEQ ID NO: 3410743 - DNA, 25 bp, Homo sapien
taaaaactgcctcagtgggccctga

SEQ ID NO: 3410744 - DNA, 25 bp, Homo sapien
tcttcattcaatttattttctatca

SEQ ID NO: 3410745 - DNA, 25 bp, Homo sapien
ttcttcattcaatttattttctatc

SEQ ID NO: 3410746 - DNA, 25 bp, Homo sapien
cttcattcaatttattttctatcat

SEQ ID NO: 3410747 - DNA, 25 bp, Homo sapien
aaaaaaggaattaatttatgctgtg

SEQ ID NO: 3410748 - DNA, 25 bp, Homo sapien
gttttcgtgagtgaggtgaaggggc

SEQ ID NO: 3410749 - DNA, 25 bp, Homo sapien
tttcgtgagtgaggtgaaggggcaa

SEQ ID NO: 3410750 - DNA, 25 bp, Homo sapien
gtgaaggggcaagtgtgaaatggtc

SEQ ID NO: 3410751 - DNA, 25 bp, Homo sapien
aaggggcaagtgtgaaatggtctac

SEQ ID NO: 3410752 - DNA, 25 bp, Homo sapien
tttcttccaaaaaggatcctgtgtc

SEQ ID NO: 3410753 - DNA, 25 bp, Homo sapien
gattagcaaattacccaacagtgtt

SEQ ID NO: 3410754 - DNA, 25 bp, Homo sapien
tcctgtgtcaatccaagcagaatga

SEQ ID NO: 3410755 - DNA, 25 bp, Homo sapien
gagaggcaagtatcagataaggata

SEQ ID NO: 3410756 - DNA, 25 bp, Homo sapien
cacatagcggtcaacagccgtgagg

SEQ ID NO: 3410757 - DNA, 25 bp, Homo sapien
tggccccactattggaaaccaggag

SEQ ID NO: 3410758 - DNA, 25 bp, Homo sapien
tattcttcagcgtgtaaatcacagg

SEQ ID NO: 3410759 - DNA, 25 bp, Homo sapien
taaccacataggtttctgaacaggc

SEQ ID NO: 3410760 - DNA, 25 bp, Homo sapien
atccaaatagcaatgtagcaaaaca

SEQ ID NO: 3410761 - DNA, 25 bp, Homo sapien
catggtccagtgtagatagaacata

SEQ ID NO: 3410762 - DNA, 25 bp, Homo sapien
gctgggtgcacgtgatagaaatcat

SEQ ID NO: 3410763 - DNA, 25 bp, Homo sapien
tcattatgagtaagtttcccatcca

SEQ ID NO: 3410764 - DNA, 25 bp, Homo sapien
tgtgaccggtctaatgtaaatgaac

SEQ ID NO: 3410765 - DNA, 25 bp, Homo sapien
gagaatgaagatctctatgcctcca

SEQ ID NO: 3410766 - DNA, 25 bp, Homo sapien
aatgtcaccaaagcaattaagcctg

SEQ ID NO: 3410767 - DNA, 25 bp, Homo sapien
aagagctttgctgcgtctctctgca

SEQ ID NO: 3410768 - DNA, 25 bp, Homo sapien
ttcttttcaggagtatttgacaaca

SEQ ID NO: 3410769 - DNA, 25 bp, Homo sapien
aaatgaattcagttacgttgtttat

SEQ ID NO: 3410770 - DNA, 25 bp, Homo sapien
caaactttctcaatctctgggctct

SEQ ID NO: 3410771 - DNA, 25 bp, Homo sapien
actttctcaatctctgggctctgag

SEQ ID NO: 3410772 - DNA, 25 bp, Homo sapien
gaggagatttcccagaagaatgatt

SEQ ID NO: 3410773 - DNA, 25 bp, Homo sapien
gctaacaggtcaacaatcatcttgg

SEQ ID NO: 3410774 - DNA, 25 bp, Homo sapien
ggttgctcaggcaaactgtcagcat

SEQ ID NO: 3410775 - DNA, 25 bp, Homo sapien
gcaccccacataggagatggttttg

SEQ ID NO: 3410776 - DNA, 25 bp, Homo sapien
gtgacttaaacaggttgctcaggca

SEQ ID NO: 3410777 - DNA, 25 bp, Homo sapien
ggccattacagtaaggatgaagatc

SEQ ID NO: 3410778 - DNA, 25 bp, Homo sapien
acagtaaggatgaagatctcagtgc

SEQ ID NO: 3410779 - DNA, 25 bp, Homo sapien
cattacagtaaggatgaagatctca

SEQ ID NO: 3410780 - DNA, 25 bp, Homo sapien
gaaatgtactccaaacagttgcaac

SEQ ID NO: 3410781 - DNA, 25 bp, Homo sapien
caatggtaccactgttggctgtcac

SEQ ID NO: 3410782 - DNA, 25 bp, Homo sapien
gactgctttctcagggaaactagga

SEQ ID NO: 3410783 - DNA, 25 bp, Homo sapien
tgaaaaggtcgtatcagggcgcatg

SEQ ID NO: 3410784 - DNA, 25 bp, Homo sapien
tagttggactaccagagccacttgg

SEQ ID NO: 3410785 - DNA, 25 bp, Homo sapien
tccaagaaaacatttctgccccaca

SEQ ID NO: 3410786 - DNA, 25 bp, Homo sapien
aagaaaacatttctgccccacagtt

SEQ ID NO: 3410787 - DNA, 25 bp, Homo sapien
ctttagcctccaagaaaacatttct

SEQ ID NO: 3410788 - DNA, 25 bp, Homo sapien
acatttctgccccacagtttcttca

SEQ ID NO: 3410789 - DNA, 25 bp, Homo sapien
tgagaacatgacatccaaaagggac

SEQ ID NO: 3410790 - DNA, 25 bp, Homo sapien
ttccagcactgtggctacatacatg

SEQ ID NO: 3410791 - DNA, 25 bp, Homo sapien
tctgacttgtgataatagttaccac

SEQ ID NO: 3410792 - DNA, 25 bp, Homo sapien
caataagtagattttccagcactgt

SEQ ID NO: 3410793 - DNA, 25 bp, Homo sapien
agagagatggtagtgctcttggaga

SEQ ID NO: 3410794 - DNA, 25 bp, Homo sapien
tcttggagagggtgtctacaatcac

SEQ ID NO: 3410795 - DNA, 25 bp, Homo sapien
gggtgaggcagcctttgagagagat

SEQ ID NO: 3410796 - DNA, 25 bp, Homo sapien
tgctcttggagagggtgtctacaat

SEQ ID NO: 3410797 - DNA, 25 bp, Homo sapien
cactgttgagggtaactaagaggcc

SEQ ID NO: 3410798 - DNA, 25 bp, Homo sapien
gacttcagggagcataggatgaccg

SEQ ID NO: 3410799 - DNA, 25 bp, Homo sapien
cgtgcaggcaagtgtcaacaactga

SEQ ID NO: 3410800 - DNA, 25 bp, Homo sapien
tgtgccgccctttagagctgtaaga

SEQ ID NO: 3410801 - DNA, 25 bp, Homo sapien
ctcccatttcatccagagtttcttc

SEQ ID NO: 3410802 - DNA, 25 bp, Homo sapien
tggttgaacattggagcaataatag

SEQ ID NO: 3410803 - DNA, 25 bp, Homo sapien
ttttctcatggcctttttcatctct

SEQ ID NO: 3410804 - DNA, 25 bp, Homo sapien
aataatagtgtaaaacagagcagat

SEQ ID NO: 3410805 - DNA, 25 bp, Homo sapien
tgtatttctcaggttatagattagg

SEQ ID NO: 3410806 - DNA, 25 bp, Homo sapien
tccattcttaaggccaaagctaagg

SEQ ID NO: 3410807 - DNA, 25 bp, Homo sapien
gctccattcttaaggccaaagctaa

SEQ ID NO: 3410808 - DNA, 25 bp, Homo sapien
tgctccattcttaaggccaaagcta

SEQ ID NO: 3410809 - DNA, 25 bp, Homo sapien
cattcttaaggccaaagctaaggct

SEQ ID NO: 3410810 - DNA, 25 bp, Homo sapien
cagtgcagaaagaatgcataaaagc

SEQ ID NO: 3410811 - DNA, 25 bp, Homo sapien
tgcagaaagaatgcataaaagccac

SEQ ID NO: 3410812 - DNA, 25 bp, Homo sapien
gaaagaatgcataaaagccacctga

SEQ ID NO: 3410813 - DNA, 25 bp, Homo sapien
aagaatgcataaaagccacctgaaa

SEQ ID NO: 3410814 - DNA, 25 bp, Homo sapien
tcattatgatgaagttttccatcca

SEQ ID NO: 3410815 - DNA, 25 bp, Homo sapien
ctaaatgtacatgatagaaatcatt

SEQ ID NO: 3410816 - DNA, 25 bp, Homo sapien
catccaaatagcaatgtagcaaaat

SEQ ID NO: 3410817 - DNA, 25 bp, Homo sapien
tcttgttttgagaaagtcccaggag

SEQ ID NO: 3410818 - DNA, 25 bp, Homo sapien
ctgagagtgcgaggtaattaaggaa

SEQ ID NO: 3410819 - DNA, 25 bp, Homo sapien
tgagagtgcgaggtaattaaggaag

SEQ ID NO: 3410820 - DNA, 25 bp, Homo sapien
tcaatcattagcttgggggccacag

SEQ ID NO: 3410821 - DNA, 25 bp, Homo sapien
gtcaatcattagcttgggggccaca

SEQ ID NO: 3410822 - DNA, 25 bp, Homo sapien
ggtcaatcattagcttgggggccac

SEQ ID NO: 3410823 - DNA, 25 bp, Homo sapien
caggtgcttgcagatggctatgtag

SEQ ID NO: 3410824 - DNA, 25 bp, Homo sapien
cagctttgcttggtcgtgatgatgg

SEQ ID NO: 3410825 - DNA, 25 bp, Homo sapien
cataggccattgctttgagtatgaa

SEQ ID NO: 3410826 - DNA, 25 bp, Homo sapien
taaatagctgtatcatgcagttatt

SEQ ID NO: 3410827 - DNA, 25 bp, Homo sapien
gatacacatagcagaagtactgatc

SEQ ID NO: 3410828 - DNA, 25 bp, Homo sapien
aacttcagcagaggatacacatagc

SEQ ID NO: 3410829 - DNA, 25 bp, Homo sapien
aattctgtatatatcaatgcgagcc

SEQ ID NO: 3410830 - DNA, 25 bp, Homo sapien
tatctcattaagaccacagaacggt

SEQ ID NO: 3410831 - DNA, 25 bp, Homo sapien
gagctttggtatgactctcagcaga

SEQ ID NO: 3410832 - DNA, 25 bp, Homo sapien
ggcaggcacaaagaataggaccaca

SEQ ID NO: 3410833 - DNA, 25 bp, Homo sapien
tcttctggaaaagttatggctggtc

SEQ ID NO: 3410834 - DNA, 25 bp, Homo sapien
cagcagagtaaaccctgatggtgga

SEQ ID NO: 3410835 - DNA, 25 bp, Homo sapien
cattttccttacagcgttcttcatc

SEQ ID NO: 3410836 - DNA, 25 bp, Homo sapien
ttccttacagcgttcttcatctcca

SEQ ID NO: 3410837 - DNA, 25 bp, Homo sapien
cacattttccttacagcgttcttca

SEQ ID NO: 3410838 - DNA, 25 bp, Homo sapien
tttccttacagcgttcttcatctcc

SEQ ID NO: 3410839 - DNA, 25 bp, Homo sapien
ttccttgccagaagcaattgatgac

SEQ ID NO: 3410840 - DNA, 25 bp, Homo sapien
tccttgccagaagcaattgatgaca

SEQ ID NO: 3410841 - DNA, 25 bp, Homo sapien
ccttgccagaagcaattgatgacac

SEQ ID NO: 3410842 - DNA, 25 bp, Homo sapien
aatgaaattctaaaatgcctttcat

SEQ ID NO: 3410843 - DNA, 25 bp, Homo sapien
attaaaatgaaattctaaaatgcct

SEQ ID NO: 3410844 - DNA, 25 bp, Homo sapien
aattctaaaatgcctttcatacaag

SEQ ID NO: 3410845 - DNA, 25 bp, Homo sapien
taggcattaaaatgaaattctaaaa

SEQ ID NO: 3410846 - DNA, 25 bp, Homo sapien
tttattctcagtatgcggctactag

SEQ ID NO: 3410847 - DNA, 25 bp, Homo sapien
ctactagaacaataataagggtcac

SEQ ID NO: 3410848 - DNA, 25 bp, Homo sapien
ctcagtatgcggctactagaacaat

SEQ ID NO: 3410849 - DNA, 25 bp, Homo sapien
tgcggctactagaacaataataagg

SEQ ID NO: 3410850 - DNA, 25 bp, Homo sapien
atgagggctcaaggtgccgtgcaca

SEQ ID NO: 3410851 - DNA, 25 bp, Homo sapien
tgaatgagggctcaaggtgccgtgc

SEQ ID NO: 3410852 - DNA, 25 bp, Homo sapien
gctgaatgagggctcaaggtgccgt

SEQ ID NO: 3410853 - DNA, 25 bp, Homo sapien
gagctgaatgagggctcaaggtgcc

SEQ ID NO: 3410854 - DNA, 25 bp, Homo sapien
ttcagaagtctgattttcttggtcc

SEQ ID NO: 3410855 - DNA, 25 bp, Homo sapien
cttcagaagtctgattttcttggtc

SEQ ID NO: 3410856 - DNA, 25 bp, Homo sapien
aacaggggcgtctgaaggtctggat

SEQ ID NO: 3410857 - DNA, 25 bp, Homo sapien
taactgcatggtgcatcctgtgaag

SEQ ID NO: 3410858 - DNA, 25 bp, Homo sapien
gaataactgcatggtgcatcctgtg

SEQ ID NO: 3410859 - DNA, 25 bp, Homo sapien
caaagaataactgcatggtgcatcc

SEQ ID NO: 3410860 - DNA, 25 bp, Homo sapien
aggagcaaagcctctggtacattgc

SEQ ID NO: 3410861 - DNA, 25 bp, Homo sapien
aaggagcaaagcctctggtacattg

SEQ ID NO: 3410862 - DNA, 25 bp, Homo sapien
ccaacagtatgatgtagccactaac

SEQ ID NO: 3410863 - DNA, 25 bp, Homo sapien
aggtaagtgtcagggaacagactat

SEQ ID NO: 3410864 - DNA, 25 bp, Homo sapien
gtaagtgtcagggaacagactatcc

SEQ ID NO: 3410865 - DNA, 25 bp, Homo sapien
ctaggtaagtgtcagggaacagact

SEQ ID NO: 3410866 - DNA, 25 bp, Homo sapien
taagtgtcagggaacagactatccc

SEQ ID NO: 3410867 - DNA, 25 bp, Homo sapien
aatggcagcgtgctcacagacaaag

SEQ ID NO: 3410868 - DNA, 25 bp, Homo sapien
gcaacaatggcagcgtgctcacaga

SEQ ID NO: 3410869 - DNA, 25 bp, Homo sapien
cacagcaacaatggcagcgtgctca

SEQ ID NO: 3410870 - DNA, 25 bp, Homo sapien
gacacagcaacaatggcagcgtgct

SEQ ID NO: 3410871 - DNA, 25 bp, Homo sapien
gacagtgataaaaatgaaagcatag

SEQ ID NO: 3410872 - DNA, 25 bp, Homo sapien
gataaaaatgaaagcataggaagca

SEQ ID NO: 3410873 - DNA, 25 bp, Homo sapien
taaaaatgaaagcataggaagcagg

SEQ ID NO: 3410874 - DNA, 25 bp, Homo sapien
gtgataaaaatgaaagcataggaag

SEQ ID NO: 3410875 - DNA, 25 bp, Homo sapien
gtaatggccgtcaagtgggaggcag

SEQ ID NO: 3410876 - DNA, 25 bp, Homo sapien
taatggccgtcaagtgggaggcaga

SEQ ID NO: 3410877 - DNA, 25 bp, Homo sapien
accttgaccatgagccacgaacttt

SEQ ID NO: 3410878 - DNA, 25 bp, Homo sapien
aatctacaagcccattctccaacaa

SEQ ID NO: 3410879 - DNA, 25 bp, Homo sapien
tcagaacaaatctacaagcccattc

SEQ ID NO: 3410880 - DNA, 25 bp, Homo sapien
acaaatctacaagcccattctccaa

SEQ ID NO: 3410881 - DNA, 25 bp, Homo sapien
gaacaaatctacaagcccattctcc

SEQ ID NO: 3410882 - DNA, 25 bp, Homo sapien
agttgatccagagaagtagaagcca

SEQ ID NO: 3410883 - DNA, 25 bp, Homo sapien
gaagtagaagccaatatgtgcaata

SEQ ID NO: 3410884 - DNA, 25 bp, Homo sapien
gaagccaatatgtgcaataagaaac

SEQ ID NO: 3410885 - DNA, 25 bp, Homo sapien
cagagaagtagaagccaatatgtgc

SEQ ID NO: 3410886 - DNA, 25 bp, Homo sapien
aggagcaaagcctctgggacattgc

SEQ ID NO: 3410887 - DNA, 25 bp, Homo sapien
catgcccagattccccatcacagtg

SEQ ID NO: 3410888 - DNA, 25 bp, Homo sapien
ctgtcaccacaaatatacaggcaaa

SEQ ID NO: 3410889 - DNA, 25 bp, Homo sapien
aatatgtgtatgttaaggaacaaac

SEQ ID NO: 3410890 - DNA, 25 bp, Homo sapien
aaatatgtgtatgttaaggaacaaa

SEQ ID NO: 3410891 - DNA, 25 bp, Homo sapien
gacacagcaacaatggcagcgtgct

SEQ ID NO: 3410892 - DNA, 25 bp, Homo sapien
aatggcagcgtgctcacagacaaag

SEQ ID NO: 3410893 - DNA, 25 bp, Homo sapien
gcaacaatggcagcgtgctcacaga

SEQ ID NO: 3410894 - DNA, 25 bp, Homo sapien
cacagcaacaatggcagcgtgctca

SEQ ID NO: 3410895 - DNA, 25 bp, Homo sapien
tttcattgaatgttgcagaaactaa

SEQ ID NO: 3410896 - DNA, 25 bp, Homo sapien
ttgaatgttgcagaaactaaaatga

SEQ ID NO: 3410897 - DNA, 25 bp, Homo sapien
cttatttcattgaatgttgcagaaa

SEQ ID NO: 3410898 - DNA, 25 bp, Homo sapien
tatttcattgaatgttgcagaaact

SEQ ID NO: 3410899 - DNA, 25 bp, Homo sapien
tggagttaggaacacagtagagaaa

SEQ ID NO: 3410900 - DNA, 25 bp, Homo sapien
gtagagaaaaaggatagtcccatgg

SEQ ID NO: 3410901 - DNA, 25 bp, Homo sapien
ccaccttgaccatgagccatgaact

SEQ ID NO: 3410902 - DNA, 25 bp, Homo sapien
ccatggaaaatggtaatggcggtca

SEQ ID NO: 3410903 - DNA, 25 bp, Homo sapien
taatttggtaatgactaacttcctg

SEQ ID NO: 3410904 - DNA, 25 bp, Homo sapien
aatttggtaatgactaacttcctga

SEQ ID NO: 3410905 - DNA, 25 bp, Homo sapien
atttggtaatgactaacttcctgac

SEQ ID NO: 3410906 - DNA, 25 bp, Homo sapien
cttcctgaattttggttctctcaga

SEQ ID NO: 3410907 - DNA, 25 bp, Homo sapien
tccacaggttcaggcttgttgttat

SEQ ID NO: 3410908 - DNA, 25 bp, Homo sapien
cagatccacaggttcaggcttgttg

SEQ ID NO: 3410909 - DNA, 25 bp, Homo sapien
ttcaggcttgttgttatttactctc

SEQ ID NO: 3410910 - DNA, 25 bp, Homo sapien
tagacacctagggaaagcctctaga

SEQ ID NO: 3410911 - DNA, 25 bp, Homo sapien
gcaagtccgttcagcagttcctttg

SEQ ID NO: 3410912 - DNA, 25 bp, Homo sapien
gcactcatgctctgggccattatcc

SEQ ID NO: 3410913 - DNA, 25 bp, Homo sapien
tcaagctagccaattgcaagtccgt

SEQ ID NO: 3410914 - DNA, 25 bp, Homo sapien
cagaagccggattttcctgatacac

SEQ ID NO: 3410915 - DNA, 25 bp, Homo sapien
cctgatacaccttttgttgaaggtg

SEQ ID NO: 3410916 - DNA, 25 bp, Homo sapien
ccggattttcctgatacaccttttg

SEQ ID NO: 3410917 - DNA, 25 bp, Homo sapien
tttcctgatacaccttttgttgaag

SEQ ID NO: 3410918 - DNA, 25 bp, Homo sapien
agaaacccaacaggatgaatgtggt

SEQ ID NO: 3410919 - DNA, 25 bp, Homo sapien
gagcttaggattgattcttacaacc

SEQ ID NO: 3410920 - DNA, 25 bp, Homo sapien
ggtttcccaccagagcgacagtgta

SEQ ID NO: 3410921 - DNA, 25 bp, Homo sapien
tcttacaaccacaattatgcccagg

SEQ ID NO: 3410922 - DNA, 25 bp, Homo sapien
cgacagtgtaggtggtcgagaacac

SEQ ID NO: 3410923 - DNA, 25 bp, Homo sapien
aaaaggatagatgactgaggaaaaa

SEQ ID NO: 3410924 - DNA, 25 bp, Homo sapien
caagtatccaaaaaggatagatgac

SEQ ID NO: 3410925 - DNA, 25 bp, Homo sapien
agtttgggtgtaaatacattggaat

SEQ ID NO: 3410926 - DNA, 25 bp, Homo sapien
aatacattggaataacaagtatcca

SEQ ID NO: 3410927 - DNA, 25 bp, Homo sapien
tgtgattacaaatgcacaaccaaag

SEQ ID NO: 3410928 - DNA, 25 bp, Homo sapien
ttctgtgattacaaatgcacaacca

SEQ ID NO: 3410929 - DNA, 25 bp, Homo sapien
tgattacaaatgcacaaccaaagaa

SEQ ID NO: 3410930 - DNA, 25 bp, Homo sapien
gattacaaatgcacaaccaaagaaa

SEQ ID NO: 3410931 - DNA, 25 bp, Homo sapien
aaagaatggcagagtactcacagcc

SEQ ID NO: 3410932 - DNA, 25 bp, Homo sapien
gcacagagcttaggagacatagcca

SEQ ID NO: 3410933 - DNA, 25 bp, Homo sapien
gaaatgactaaacacgccatctggt

SEQ ID NO: 3410934 - DNA, 25 bp, Homo sapien
tgagtgtcagggaacagagtccacc

SEQ ID NO: 3410935 - DNA, 25 bp, Homo sapien
ccatggaaaatggagacggtggtca

SEQ ID NO: 3410936 - DNA, 25 bp, Homo sapien
tacagtagccactttgaccaggagc

SEQ ID NO: 3410937 - DNA, 25 bp, Homo sapien
cagtaaaggagcaggatgaccccat

SEQ ID NO: 3410938 - DNA, 25 bp, Homo sapien
ggtccacccgtagaaagcatcttga

SEQ ID NO: 3410939 - DNA, 25 bp, Homo sapien
aggtgattgggagtttatcaacttc

SEQ ID NO: 3410940 - DNA, 25 bp, Homo sapien
aaggtgattgggagtttatcaactt

SEQ ID NO: 3410941 - DNA, 25 bp, Homo sapien
ggtgattgggagtttatcaacttcc

SEQ ID NO: 3410942 - DNA, 25 bp, Homo sapien
agataggaaagaggcttcatgtgtt

SEQ ID NO: 3410943 - DNA, 25 bp, Homo sapien
aaaaagagataggaaagaggcttca

SEQ ID NO: 3410944 - DNA, 25 bp, Homo sapien
ctggataggaaaaaagagataggaa

SEQ ID NO: 3410945 - DNA, 25 bp, Homo sapien
aaagagataggaaagaggcttcatg

SEQ ID NO: 3410946 - DNA, 25 bp, Homo sapien
tgactgtgtagacgaacaagaaaac

SEQ ID NO: 3410947 - DNA, 25 bp, Homo sapien
tccaacagtttaggtgtaactacag

SEQ ID NO: 3410948 - DNA, 25 bp, Homo sapien
agttccccactacagtgactgtgta

SEQ ID NO: 3410949 - DNA, 25 bp, Homo sapien
tgcatgatgcaaccagagaaagaga

SEQ ID NO: 3410950 - DNA, 25 bp, Homo sapien
tttacaaactgccacaaaacggtca

SEQ ID NO: 3410951 - DNA, 25 bp, Homo sapien
aatatgtgagtatcagggagcacac

SEQ ID NO: 3410952 - DNA, 25 bp, Homo sapien
ggcaataataaagcatagcctctgg

SEQ ID NO: 3410953 - DNA, 25 bp, Homo sapien
cagaaacaattacagagtggtcaca

SEQ ID NO: 3410954 - DNA, 25 bp, Homo sapien
gagaaagttttctggcgcccacttg

SEQ ID NO: 3410955 - DNA, 25 bp, Homo sapien
gcagatcgcatcttcataatggtag

SEQ ID NO: 3410956 - DNA, 25 bp, Homo sapien
cacagaagccactgtaactatgagg

SEQ ID NO: 3410957 - DNA, 25 bp, Homo sapien
tagaagttttaggattaggaacaca

SEQ ID NO: 3410958 - DNA, 25 bp, Homo sapien
attattgcaacaggacaattatatt

SEQ ID NO: 3410959 - DNA, 25 bp, Homo sapien
ttattgcaacaggacaattatattt

SEQ ID NO: 3410960 - DNA, 25 bp, Homo sapien
tattgcaacaggacaattatatttc

SEQ ID NO: 3410961 - DNA, 25 bp, Homo sapien
gatcatgcccaggtttcccaataca

SEQ ID NO: 3410962 - DNA, 25 bp, Homo sapien
gtttcccaatacagtgattgtgtag

SEQ ID NO: 3410963 - DNA, 25 bp, Homo sapien
ggtaaatacggctccagaactctga

SEQ ID NO: 3410964 - DNA, 25 bp, Homo sapien
cagctaatgacatggttgttgttag

SEQ ID NO: 3410965 - DNA, 25 bp, Homo sapien
cacaccgccacgtatcaatcatagg

SEQ ID NO: 3410966 - DNA, 25 bp, Homo sapien
gttacacaccgccacgtatcaatca

SEQ ID NO: 3410967 - DNA, 25 bp, Homo sapien
aagggttacacaccgccacgtatca

SEQ ID NO: 3410968 - DNA, 25 bp, Homo sapien
agcaaagggttacacaccgccacgt

SEQ ID NO: 3410969 - DNA, 25 bp, Homo sapien
cagtcccgtggaaaatagtgatggc

SEQ ID NO: 3410970 - DNA, 25 bp, Homo sapien
gggccctgccactaatgatgcacag

SEQ ID NO: 3410971 - DNA, 25 bp, Homo sapien
gattataccccatgtgtagggccct

SEQ ID NO: 3410972 - DNA, 25 bp, Homo sapien
tgatgatgttagacccacagaagga

SEQ ID NO: 3410973 - DNA, 25 bp, Homo sapien
ttaatggaagggttgaagagaattg

SEQ ID NO: 3410974 - DNA, 25 bp, Homo sapien
taatggaagggttgaagagaattgt

SEQ ID NO: 3410975 - DNA, 25 bp, Homo sapien
aatggaagggttgaagagaattgtt

SEQ ID NO: 3410976 - DNA, 25 bp, Homo sapien
atggaagggttgaagagaattgttc

SEQ ID NO: 3410977 - DNA, 25 bp, Homo sapien
gctcagattccttaaaaccatcatc

SEQ ID NO: 3410978 - DNA, 25 bp, Homo sapien
tcagattccttaaaaccatcatcat

SEQ ID NO: 3410979 - DNA, 25 bp, Homo sapien
ctcagattccttaaaaccatcatca

SEQ ID NO: 3410980 - DNA, 25 bp, Homo sapien
ctaaaagggcaaaggtgggctccat

SEQ ID NO: 3410981 - DNA, 25 bp, Homo sapien
cccaaggtttcctaccactgtgata

SEQ ID NO: 3410982 - DNA, 25 bp, Homo sapien
acacaaggaagagaggaatctgaag

SEQ ID NO: 3410983 - DNA, 25 bp, Homo sapien
gattattatgatcatcccaaggttt

SEQ ID NO: 3410984 - DNA, 25 bp, Homo sapien
tgggagtgacaatggaagagtaaca

SEQ ID NO: 3410985 - DNA, 25 bp, Homo sapien
gatgagtatatcagagccagacaca

SEQ ID NO: 3410986 - DNA, 25 bp, Homo sapien
ccggagagcataacaaaggagtacc

SEQ ID NO: 3410987 - DNA, 25 bp, Homo sapien
tgtggcgcccactaacagaacggat

SEQ ID NO: 3410988 - DNA, 25 bp, Homo sapien
aacatgccccagagatatgacccag

SEQ ID NO: 3410989 - DNA, 25 bp, Homo sapien
tgaaatggaacttgtgtatgtatta

SEQ ID NO: 3410990 - DNA, 25 bp, Homo sapien
aaatggaacttgtgtatgtattaac

SEQ ID NO: 3410991 - DNA, 25 bp, Homo sapien
gaaatggaacttgtgtatgtattaa

SEQ ID NO: 3410992 - DNA, 25 bp, Homo sapien
gtgaaatggaacttgtgtatgtatt

SEQ ID NO: 3410993 - DNA, 25 bp, Homo sapien
gtggagccgagagctgacctgaatc

SEQ ID NO: 3410994 - DNA, 25 bp, Homo sapien
gctaacaacgtgactccatagatga

SEQ ID NO: 3410995 - DNA, 25 bp, Homo sapien
gaggcagactctcaactcagggaca

SEQ ID NO: 3410996 - DNA, 25 bp, Homo sapien
ccgagagctgacctgaatcagtgca

SEQ ID NO: 3410997 - DNA, 25 bp, Homo sapien
tcagtgaccacacaagtgcaaaaca

SEQ ID NO: 3410998 - DNA, 25 bp, Homo sapien
gtgaccacacaagtgcaaaacaagt

SEQ ID NO: 3410999 - DNA, 25 bp, Homo sapien
gacctcagtgaccacacaagtgcaa

SEQ ID NO: 3411000 - DNA, 25 bp, Homo sapien
gaagacctcagtgaccacacaagtg

SEQ ID NO: 3411001 - DNA, 25 bp, Homo sapien
ttaagacaggaggtagatcacagaa

SEQ ID NO: 3411002 - DNA, 25 bp, Homo sapien
aagaagccagctccacacgcacctt

SEQ ID NO: 3411003 - DNA, 25 bp, Homo sapien
caagacttaagacaggaggtagatc

SEQ ID NO: 3411004 - DNA, 25 bp, Homo sapien
agcaagcaagacttaagacaggagg

SEQ ID NO: 3411005 - DNA, 25 bp, Homo sapien
aatggaaaggactgttccatggaag

SEQ ID NO: 3411006 - DNA, 25 bp, Homo sapien
gaaaggactgttccatggaagacag

SEQ ID NO: 3411007 - DNA, 25 bp, Homo sapien
tggaaaggactgttccatggaagac

SEQ ID NO: 3411008 - DNA, 25 bp, Homo sapien
gcatctccactattgcctgaactgg

SEQ ID NO: 3411009 - DNA, 25 bp, Homo sapien
gtgaattttggagcccatcactttt

SEQ ID NO: 3411010 - DNA, 25 bp, Homo sapien
ctaggagtgaattttggagcccatc

SEQ ID NO: 3411011 - DNA, 25 bp, Homo sapien
ggagtgaattttggagcccatcact

SEQ ID NO: 3411012 - DNA, 25 bp, Homo sapien
ttttggagcccatcacttttctgag

SEQ ID NO: 3411013 - DNA, 25 bp, Homo sapien
ttacccgcaccaaactctgctccat

SEQ ID NO: 3411014 - DNA, 25 bp, Homo sapien
ctttacccgcaccaaactctgctcc

SEQ ID NO: 3411015 - DNA, 25 bp, Homo sapien
cctttacccgcaccaaactctgctc

SEQ ID NO: 3411016 - DNA, 25 bp, Homo sapien
tttacccgcaccaaactctgctcca

SEQ ID NO: 3411017 - DNA, 25 bp, Homo sapien
ctgtttcttcgaatctgaaagttag

SEQ ID NO: 3411018 - DNA, 25 bp, Homo sapien
tctgtttcttcgaatctgaaagtta

SEQ ID NO: 3411019 - DNA, 25 bp, Homo sapien
ttctgtttcttcgaatctgaaagtt

SEQ ID NO: 3411020 - DNA, 25 bp, Homo sapien
tgtttcttcgaatctgaaagttagt

SEQ ID NO: 3411021 - DNA, 25 bp, Homo sapien
tccaaggaacatgagactccccagg

SEQ ID NO: 3411022 - DNA, 25 bp, Homo sapien
taaagcagagcacgtcagttccaag

SEQ ID NO: 3411023 - DNA, 25 bp, Homo sapien
cagcagcacgcagagtttctgggac

SEQ ID NO: 3411024 - DNA, 25 bp, Homo sapien
ccactgactgaacgcatcttgagga

SEQ ID NO: 3411025 - DNA, 25 bp, Homo sapien
acatggggatcaccacggtgtaaaa

SEQ ID NO: 3411026 - DNA, 25 bp, Homo sapien
ccacggtgtaaaacacagaggccac

SEQ ID NO: 3411027 - DNA, 25 bp, Homo sapien
accacggtgtaaaacacagaggcca

SEQ ID NO: 3411028 - DNA, 25 bp, Homo sapien
ggatcaccacggtgtaaaacacaga

SEQ ID NO: 3411029 - DNA, 25 bp, Homo sapien
aagagaagactttggtgtccagtat

SEQ ID NO: 3411030 - DNA, 25 bp, Homo sapien
gactttggtgtccagtatctcggtg

SEQ ID NO: 3411031 - DNA, 25 bp, Homo sapien
gtatctcggtgactgtatccttgac

SEQ ID NO: 3411032 - DNA, 25 bp, Homo sapien
tggtgtccagtatctcggtgactgt

SEQ ID NO: 3411033 - DNA, 25 bp, Homo sapien
ccgagagctgacctgaatcagtgca

SEQ ID NO: 3411034 - DNA, 25 bp, Homo sapien
gtggagccgagagctgacctgaatc

SEQ ID NO: 3411035 - DNA, 25 bp, Homo sapien
gctaacaacgtgactccatagatga

SEQ ID NO: 3411036 - DNA, 25 bp, Homo sapien
gaggcagactctcaactcagggaca

SEQ ID NO: 3411037 - DNA, 25 bp, Homo sapien
agagctaaggacgagtgaatcagag

SEQ ID NO: 3411038 - DNA, 25 bp, Homo sapien
atcctaagagctaaggacgagtgaa

SEQ ID NO: 3411039 - DNA, 25 bp, Homo sapien
acatctccactgttgcctgaactcg

SEQ ID NO: 3411040 - DNA, 25 bp, Homo sapien
agcaagaggtcagctccacacgcag

SEQ ID NO: 3411041 - DNA, 25 bp, Homo sapien
atcacttttctgagagctttgttca

SEQ ID NO: 3411042 - DNA, 25 bp, Homo sapien
gagtgaattttggagcccatcactt

SEQ ID NO: 3411043 - DNA, 25 bp, Homo sapien
ttttggagcccatcacttttctgag

SEQ ID NO: 3411044 - DNA, 25 bp, Homo sapien
ctaggagtgaattttggagcccatc

SEQ ID NO: 3411045 - DNA, 25 bp, Homo sapien
ccctctgtagaatataaggtgagac

SEQ ID NO: 3411046 - DNA, 25 bp, Homo sapien
tgacaaagcagcttaaccatcccct

SEQ ID NO: 3411047 - DNA, 25 bp, Homo sapien
aaaatagatctctgttaatatcctg

SEQ ID NO: 3411048 - DNA, 25 bp, Homo sapien
tgtgatccgaaaatcagtcttagaa

SEQ ID NO: 3411049 - DNA, 25 bp, Homo sapien
gaattgcaccaaacatcctgagaat

SEQ ID NO: 3411050 - DNA, 25 bp, Homo sapien
aagattccctaccacactgaagccg

SEQ ID NO: 3411051 - DNA, 25 bp, Homo sapien
taattcagtcactacaaaggtgcaa

SEQ ID NO: 3411052 - DNA, 25 bp, Homo sapien
ctgaagccgtagactgccagaaata

SEQ ID NO: 3411053 - DNA, 25 bp, Homo sapien
gcgactccccatgcatacaatacaa

SEQ ID NO: 3411054 - DNA, 25 bp, Homo sapien
tgatatcagggaggataactcacag

SEQ ID NO: 3411055 - DNA, 25 bp, Homo sapien
gagtgtcagggaacatgcgactccc

SEQ ID NO: 3411056 - DNA, 25 bp, Homo sapien
taaagcagagcacgcgagtgtcagg

SEQ ID NO: 3411057 - DNA, 25 bp, Homo sapien
ggtgacaatgatgaatgcataagat

SEQ ID NO: 3411058 - DNA, 25 bp, Homo sapien
ggcatcttcaaggtggtgacaatga

SEQ ID NO: 3411059 - DNA, 25 bp, Homo sapien
cagaatgatgagtagtgtgcttatc

SEQ ID NO: 3411060 - DNA, 25 bp, Homo sapien
tcagaatgatgagtagtgtgcttat

SEQ ID NO: 3411061 - DNA, 25 bp, Homo sapien
gattatttttcggattgcatcctta

SEQ ID NO: 3411062 - DNA, 25 bp, Homo sapien
accaatgcctatgtttaatatgaaa

SEQ ID NO: 3411063 - DNA, 25 bp, Homo sapien
aatggataccaatgcctatgtttaa

SEQ ID NO: 3411064 - DNA, 25 bp, Homo sapien
ttatttttcggattgcatccttaac

SEQ ID NO: 3411065 - DNA, 25 bp, Homo sapien
aatgataacctggacactggcaaca

SEQ ID NO: 3411066 - DNA, 25 bp, Homo sapien
aatgttaatgataacctggacactg

SEQ ID NO: 3411067 - DNA, 25 bp, Homo sapien
taatgataacctggacactggcaac

SEQ ID NO: 3411068 - DNA, 25 bp, Homo sapien
tgttaatgataacctggacactggc

SEQ ID NO: 3411069 - DNA, 25 bp, Homo sapien
tgcaaaaaggagactctgaagttcc

SEQ ID NO: 3411070 - DNA, 25 bp, Homo sapien
agaacccagtcttcacagtgccatt

SEQ ID NO: 3411071 - DNA, 25 bp, Homo sapien
tgtgcaagtgggaactgattgtgat

SEQ ID NO: 3411072 - DNA, 25 bp, Homo sapien
catcagagtaacagagtagatggaa

SEQ ID NO: 3411073 - DNA, 25 bp, Homo sapien
gcatgcatctatgaaggacaacaca

SEQ ID NO: 3411074 - DNA, 25 bp, Homo sapien
gacagaagagtagcatgcatctatg

SEQ ID NO: 3411075 - DNA, 25 bp, Homo sapien
catgcatctatgaaggacaacacac

SEQ ID NO: 3411076 - DNA, 25 bp, Homo sapien
gggagcaatgacagaagagtagcat

SEQ ID NO: 3411077 - DNA, 25 bp, Homo sapien
gaggaaagattctgtgtcaactaaa

SEQ ID NO: 3411078 - DNA, 25 bp, Homo sapien
tgtgcaacacagccattgtaagaaa

SEQ ID NO: 3411079 - DNA, 25 bp, Homo sapien
gtgcaacacagccattgtaagaaat

SEQ ID NO: 3411080 - DNA, 25 bp, Homo sapien
ctgtgcaacacagccattgtaagaa

SEQ ID NO: 3411081 - DNA, 25 bp, Homo sapien
actgtatagagcagcgggttacaga

SEQ ID NO: 3411082 - DNA, 25 bp, Homo sapien
aatcactgtatagagcagcgggtta

SEQ ID NO: 3411083 - DNA, 25 bp, Homo sapien
tcactgtatagagcagcgggttaca

SEQ ID NO: 3411084 - DNA, 25 bp, Homo sapien
atcactgtatagagcagcgggttac

SEQ ID NO: 3411085 - DNA, 25 bp, Homo sapien
tctaagaatagctgccataatgaag

SEQ ID NO: 3411086 - DNA, 25 bp, Homo sapien
aaaaatgctccaattgcaagctggc

SEQ ID NO: 3411087 - DNA, 25 bp, Homo sapien
gaaatggttaatatctctggagcag

SEQ ID NO: 3411088 - DNA, 25 bp, Homo sapien
gcaagctggcaacaaaccttcttgg

SEQ ID NO: 3411089 - DNA, 25 bp, Homo sapien
tataatcaaagtatagaacacagag

SEQ ID NO: 3411090 - DNA, 25 bp, Homo sapien
tagactgtaaattagagggttcaac

SEQ ID NO: 3411091 - DNA, 25 bp, Homo sapien
ttgtcaatatccagtgaatggccag

SEQ ID NO: 3411092 - DNA, 25 bp, Homo sapien
ccagtgctgggacgcaaataaatga

SEQ ID NO: 3411093 - DNA, 25 bp, Homo sapien
aggaagtaattttcggccaatcact

SEQ ID NO: 3411094 - DNA, 25 bp, Homo sapien
taaggaagtaattttcggccaatca

SEQ ID NO: 3411095 - DNA, 25 bp, Homo sapien
taattttcggccaatcacttttcta

SEQ ID NO: 3411096 - DNA, 25 bp, Homo sapien
gggcatgtgccgctgctctgactca

SEQ ID NO: 3411097 - DNA, 25 bp, Homo sapien
actggggcatgtgccgctgctctga

SEQ ID NO: 3411098 - DNA, 25 bp, Homo sapien
tggggcatgtgccgctgctctgact

SEQ ID NO: 3411099 - DNA, 25 bp, Homo sapien
acactggggcatgtgccgctgctct

SEQ ID NO: 3411100 - DNA, 25 bp, Homo sapien
ttcgctggggcctgcctagaactgc

SEQ ID NO: 3411101 - DNA, 25 bp, Homo sapien
gaagcccctgggatccttgtttctg

SEQ ID NO: 3411102 - DNA, 25 bp, Homo sapien
cccagtactttttcgctggggcctg

SEQ ID NO: 3411103 - DNA, 25 bp, Homo sapien
ccttggaagcccctgggatccttgt

SEQ ID NO: 3411104 - DNA, 25 bp, Homo sapien
aagtgaatatgatgaaatgcatccc

SEQ ID NO: 3411105 - DNA, 25 bp, Homo sapien
actaagaagtgggtctggctgccag

SEQ ID NO: 3411106 - DNA, 25 bp, Homo sapien
tctctggcagcccaccggcaagagg

SEQ ID NO: 3411107 - DNA, 25 bp, Homo sapien
gaggaaatgaatgtgccgtcactaa

SEQ ID NO: 3411108 - DNA, 25 bp, Homo sapien
aggatgcaaagtctgctgtttcagg

SEQ ID NO: 3411109 - DNA, 25 bp, Homo sapien
tgaaaaggatgcaaagtctgctgtt

SEQ ID NO: 3411110 - DNA, 25 bp, Homo sapien
aaggatgcaaagtctgctgtttcag

SEQ ID NO: 3411111 - DNA, 25 bp, Homo sapien
aaaaggatgcaaagtctgctgtttc

SEQ ID NO: 3411112 - DNA, 25 bp, Homo sapien
gctgtcagcagtgaccaggtctccg

SEQ ID NO: 3411113 - DNA, 25 bp, Homo sapien
tctccggtgtggaggcgagtctgtt

SEQ ID NO: 3411114 - DNA, 25 bp, Homo sapien
gaggcgagtctgttgtgggtgaaac

SEQ ID NO: 3411115 - DNA, 25 bp, Homo sapien
gaagcccctggggtaaggccagatc

SEQ ID NO: 3411116 - DNA, 25 bp, Homo sapien
aaccgggcactcctggtctgacgtt

SEQ ID NO: 3411117 - DNA, 25 bp, Homo sapien
agaaccgggcactcctggtctgacg

SEQ ID NO: 3411118 - DNA, 25 bp, Homo sapien
tccagaaccgggcactcctggtctg

SEQ ID NO: 3411119 - DNA, 25 bp, Homo sapien
ccgggcactcctggtctgacgttgg

SEQ ID NO: 3411120 - DNA, 25 bp, Homo sapien
gcctcttgtggatgtgaaagcatgt

SEQ ID NO: 3411121 - DNA, 25 bp, Homo sapien
tggagagcctcttgtggatgtgaaa

SEQ ID NO: 3411122 - DNA, 25 bp, Homo sapien
cacttctgtcccttggagagcctct

SEQ ID NO: 3411123 - DNA, 25 bp, Homo sapien
ccttggagagcctcttgtggatgtg

SEQ ID NO: 3411124 - DNA, 25 bp, Homo sapien
cctctgtgaggcaatgtggtgttat

SEQ ID NO: 3411125 - DNA, 25 bp, Homo sapien
tctcccagttggtgaagttctttat

SEQ ID NO: 3411126 - DNA, 25 bp, Homo sapien
gaggtctaccaaggacagaaaagca

SEQ ID NO: 3411127 - DNA, 25 bp, Homo sapien
gaagttctttatcatccctggcacc

SEQ ID NO: 3411128 - DNA, 25 bp, Homo sapien
tggcttgcctatgggcagccgttcc

SEQ ID NO: 3411129 - DNA, 25 bp, Homo sapien
tctagacatggcttgcctatgggca

SEQ ID NO: 3411130 - DNA, 25 bp, Homo sapien
ctatgggcagccgttccctttggcc

SEQ ID NO: 3411131 - DNA, 25 bp, Homo sapien
acatggcttgcctatgggcagccgt

SEQ ID NO: 3411132 - DNA, 25 bp, Homo sapien
gatttctttggcaaatccgaaggtg

SEQ ID NO: 3411133 - DNA, 25 bp, Homo sapien
tccgaaggtgagctggccacttgcc

SEQ ID NO: 3411134 - DNA, 25 bp, Homo sapien
tctttggcaaatccgaaggtgagct

SEQ ID NO: 3411135 - DNA, 25 bp, Homo sapien
tttctttggcaaatccgaaggtgag

SEQ ID NO: 3411136 - DNA, 25 bp, Homo sapien
cttgtcaagtaatgctcctggtgtc

SEQ ID NO: 3411137 - DNA, 25 bp, Homo sapien
agcattggtaggacagcaaaaaact

SEQ ID NO: 3411138 - DNA, 25 bp, Homo sapien
tagcattggtaggacagcaaaaaac

SEQ ID NO: 3411139 - DNA, 25 bp, Homo sapien
gcattggtaggacagcaaaaaactg

SEQ ID NO: 3411140 - DNA, 25 bp, Homo sapien
atagcattggtaggacagcaaaaaa

SEQ ID NO: 3411141 - DNA, 25 bp, Homo sapien
cgaaagttctgaaggcactggtccg

SEQ ID NO: 3411142 - DNA, 25 bp, Homo sapien
tagtgtctggcaccttcgctcgggc

SEQ ID NO: 3411143 - DNA, 25 bp, Homo sapien
aacagctagtgtctggcaccttcgc

SEQ ID NO: 3411144 - DNA, 25 bp, Homo sapien
gctagtgtctggcaccttcgctcgg

SEQ ID NO: 3411145 - DNA, 25 bp, Homo sapien
gaggcggacgaagcggagggcgcag

SEQ ID NO: 3411146 - DNA, 25 bp, Homo sapien
ctgaggaaattctggcgacgcggcg

SEQ ID NO: 3411147 - DNA, 25 bp, Homo sapien
cctgctgcggagcagcttgcggcct

SEQ ID NO: 3411148 - DNA, 25 bp, Homo sapien
cggccctgcccagaagccgcgggct

SEQ ID NO: 3411149 - DNA, 25 bp, Homo sapien
cggggcgccctggaccacatggtca

SEQ ID NO: 3411150 - DNA, 25 bp, Homo sapien
gggcgccctggaccacatggtcagg

SEQ ID NO: 3411151 - DNA, 25 bp, Homo sapien
ggcgccctggaccacatggtcagga

SEQ ID NO: 3411152 - DNA, 25 bp, Homo sapien
accggggcgccctggaccacatggt

SEQ ID NO: 3411153 - DNA, 25 bp, Homo sapien
gaagctcacagttctagcttcacaa

SEQ ID NO: 3411154 - DNA, 25 bp, Homo sapien
cgaagctcacagttctagcttcaca

SEQ ID NO: 3411155 - DNA, 25 bp, Homo sapien
taacatcaacgaagctcacagttct

SEQ ID NO: 3411156 - DNA, 25 bp, Homo sapien
aacgaagctcacagttctagcttca

SEQ ID NO: 3411157 - DNA, 25 bp, Homo sapien
gcgttgtcttcttgcattcagagca

SEQ ID NO: 3411158 - DNA, 25 bp, Homo sapien
tctgccgcgttgtcttcttgcattc

SEQ ID NO: 3411159 - DNA, 25 bp, Homo sapien
gccgcgttgtcttcttgcattcaga

SEQ ID NO: 3411160 - DNA, 25 bp, Homo sapien
tctctgccgcgttgtcttcttgcat

SEQ ID NO: 3411161 - DNA, 25 bp, Homo sapien
aagaatttcatgtgtcctgtataga

SEQ ID NO: 3411162 - DNA, 25 bp, Homo sapien
ttcatgtgtcctgtatagaaataga

SEQ ID NO: 3411163 - DNA, 25 bp, Homo sapien
agaaatagatcttcagaggcatcac

SEQ ID NO: 3411164 - DNA, 25 bp, Homo sapien
catgtgtcctgtatagaaatagatc

SEQ ID NO: 3411165 - DNA, 25 bp, Homo sapien
catgtttgtcaaatctgagaggtgt

SEQ ID NO: 3411166 - DNA, 25 bp, Homo sapien
tcaaggaagctcataacagacatgc

SEQ ID NO: 3411167 - DNA, 25 bp, Homo sapien
cgaaggacccaaaatgagagacaaa

SEQ ID NO: 3411168 - DNA, 25 bp, Homo sapien
tgatatacgaaggacccaaaatgag

SEQ ID NO: 3411169 - DNA, 25 bp, Homo sapien
gccacgaattgaagcacaagtgagg

SEQ ID NO: 3411170 - DNA, 25 bp, Homo sapien
cagccacgaattgaagcacaagtga

SEQ ID NO: 3411171 - DNA, 25 bp, Homo sapien
ctgcaaaacagccacgaattgaagc

SEQ ID NO: 3411172 - DNA, 25 bp, Homo sapien
caaaacagccacgaattgaagcaca

SEQ ID NO: 3411173 - DNA, 25 bp, Homo sapien
ctgagattttcacaagctttttccc

SEQ ID NO: 3411174 - DNA, 25 bp, Homo sapien
cccataaagactgcattttttttag

SEQ ID NO: 3411175 - DNA, 25 bp, Homo sapien
gctttttcccataaagactgcattt

SEQ ID NO: 3411176 - DNA, 25 bp, Homo sapien
cagatttctgagattttcacaagct

SEQ ID NO: 3411177 - DNA, 25 bp, Homo sapien
cagcatctggttcttgtggtttcca

SEQ ID NO: 3411178 - DNA, 25 bp, Homo sapien
ccagcatctggttcttgtggtttcc

SEQ ID NO: 3411179 - DNA, 25 bp, Homo sapien
agcatctggttcttgtggtttccat

SEQ ID NO: 3411180 - DNA, 25 bp, Homo sapien
tgaaaaatgtcctcgccctcctttc

SEQ ID NO: 3411181 - DNA, 25 bp, Homo sapien
cttaaaagctccctggaatgttcca

SEQ ID NO: 3411182 - DNA, 25 bp, Homo sapien
ctttcgcagcctttccaagtgatgt

SEQ ID NO: 3411183 - DNA, 25 bp, Homo sapien
gcaggcatcttctgatattcagctc

SEQ ID NO: 3411184 - DNA, 25 bp, Homo sapien
ctcagacacttgcagcagcagagac

SEQ ID NO: 3411185 - DNA, 25 bp, Homo sapien
aggctcagacacttgcagcagcaga

SEQ ID NO: 3411186 - DNA, 25 bp, Homo sapien
tctgaatccactgaggctgtccagc

SEQ ID NO: 3411187 - DNA, 25 bp, Homo sapien
aggctgtccagcagtccagtgatgg

SEQ ID NO: 3411188 - DNA, 25 bp, Homo sapien
tgtgggaattctgccaatgggctga

SEQ ID NO: 3411189 - DNA, 25 bp, Homo sapien
attggctctttcaggctgcagagta

SEQ ID NO: 3411190 - DNA, 25 bp, Homo sapien
actattggctctttcaggctgcaga

SEQ ID NO: 3411191 - DNA, 25 bp, Homo sapien
atgactattggctctttcaggctgc

SEQ ID NO: 3411192 - DNA, 25 bp, Homo sapien
ggctctttcaggctgcagagtaaaa

SEQ ID NO: 3411193 - DNA, 25 bp, Homo sapien
ttgatgaggtgcgaaaaagagggct

SEQ ID NO: 3411194 - DNA, 25 bp, Homo sapien
tttgatgaggtgcgaaaaagagggc

SEQ ID NO: 3411195 - DNA, 25 bp, Homo sapien
tgaggtgcgaaaaagagggctttct

SEQ ID NO: 3411196 - DNA, 25 bp, Homo sapien
gatgaggtgcgaaaaagagggcttt

SEQ ID NO: 3411197 - DNA, 25 bp, Homo sapien
gaaggaaacacgaaggcactcttct

SEQ ID NO: 3411198 - DNA, 25 bp, Homo sapien
tcatgaaggaaacacgaaggcactc

SEQ ID NO: 3411199 - DNA, 25 bp, Homo sapien
aacacgaaggcactcttctctggtg

SEQ ID NO: 3411200 - DNA, 25 bp, Homo sapien
gaaacacgaaggcactcttctctgg

SEQ ID NO: 3411201 - DNA, 25 bp, Homo sapien
cagatggtggctggctcctggatca

SEQ ID NO: 3411202 - DNA, 25 bp, Homo sapien
taaaccatgaggtctgtacccagat

SEQ ID NO: 3411203 - DNA, 25 bp, Homo sapien
cactttcttatactgggagccacag

SEQ ID NO: 3411204 - DNA, 25 bp, Homo sapien
gctgtgatggcctaagaccgctatg

SEQ ID NO: 3411205 - DNA, 25 bp, Homo sapien
tgctttgcttggacacgtctggctc

SEQ ID NO: 3411206 - DNA, 25 bp, Homo sapien
ggctcccctttgaggtatcactacc

SEQ ID NO: 3411207 - DNA, 25 bp, Homo sapien
gacacgtctggctcccctttgaggt

SEQ ID NO: 3411208 - DNA, 25 bp, Homo sapien
tgaaatagttcagctatggctggca

SEQ ID NO: 3411209 - DNA, 25 bp, Homo sapien
ctgtcggagtttcagggtagataag

SEQ ID NO: 3411210 - DNA, 25 bp, Homo sapien
gagtttcagggtagataaggcagac

SEQ ID NO: 3411211 - DNA, 25 bp, Homo sapien
cggagtttcagggtagataaggcag

SEQ ID NO: 3411212 - DNA, 25 bp, Homo sapien
gtcggagtttcagggtagataaggc

SEQ ID NO: 3411213 - DNA, 25 bp, Homo sapien
tctcctgatgtttgtaactatcgag

SEQ ID NO: 3411214 - DNA, 25 bp, Homo sapien
tctctggacagtgatgacctataac

SEQ ID NO: 3411215 - DNA, 25 bp, Homo sapien
tctctaactgatgattggctcctag

SEQ ID NO: 3411216 - DNA, 25 bp, Homo sapien
gtaactatcgagtgctttctctgga

SEQ ID NO: 3411217 - DNA, 25 bp, Homo sapien
ttggccagagtgtctgtcgaaaatt

SEQ ID NO: 3411218 - DNA, 25 bp, Homo sapien
cagctttggccagagtgtctgtcga

SEQ ID NO: 3411219 - DNA, 25 bp, Homo sapien
gatgactgttgtgaagggcagcttt

SEQ ID NO: 3411220 - DNA, 25 bp, Homo sapien
gaactgaattccactggatgactgt

SEQ ID NO: 3411221 - DNA, 25 bp, Homo sapien
ccttcatctgcagcctgagaaacag

SEQ ID NO: 3411222 - DNA, 25 bp, Homo sapien
gaaccccttcatctgcagcctgaga

SEQ ID NO: 3411223 - DNA, 25 bp, Homo sapien
ggctgcacagcagaacagtctaatc

SEQ ID NO: 3411224 - DNA, 25 bp, Homo sapien
cacagcagaacagtctaatctcatg

SEQ ID NO: 3411225 - DNA, 25 bp, Homo sapien
cgtcagtaatgtacgctgtggtggt

SEQ ID NO: 3411226 - DNA, 25 bp, Homo sapien
gtcagtaatgtacgctgtggtggtc

SEQ ID NO: 3411227 - DNA, 25 bp, Homo sapien
tcagtaatgtacgctgtggtggtca

SEQ ID NO: 3411228 - DNA, 25 bp, Homo sapien
gtttgtggccatctgtcaccccctg

SEQ ID NO: 3411229 - DNA, 25 bp, Homo sapien
ttgtggccatctgtcaccccctgaa

SEQ ID NO: 3411230 - DNA, 25 bp, Homo sapien
ctggtttgtggccatctgtcacccc

SEQ ID NO: 3411231 - DNA, 25 bp, Homo sapien
atgactggtttgtggccatctgtca

SEQ ID NO: 3411232 - DNA, 25 bp, Homo sapien
gcatgtaaggatgacatgatcctga

SEQ ID NO: 3411233 - DNA, 25 bp, Homo sapien
ttgcatgtaaggatgacatgatcct

SEQ ID NO: 3411234 - DNA, 25 bp, Homo sapien
tgcatgtaaggatgacatgatcctg

SEQ ID NO: 3411235 - DNA, 25 bp, Homo sapien
tttgcatgtaaggatgacatgatcc

SEQ ID NO: 3411236 - DNA, 25 bp, Homo sapien
ccccaagatgattgaggagatgcaa

SEQ ID NO: 3411237 - DNA, 25 bp, Homo sapien
agatgattgaggagatgcaatcgca

SEQ ID NO: 3411238 - DNA, 25 bp, Homo sapien
ttatcctggccatcggctctgactc

SEQ ID NO: 3411239 - DNA, 25 bp, Homo sapien
gaggagatgcaatcgcatagcagag

SEQ ID NO: 3411240 - DNA, 25 bp, Homo sapien
ctggtgtgaataaggtcggggctct

SEQ ID NO: 3411241 - DNA, 25 bp, Homo sapien
tctcctcctattcctacgttctctt

SEQ ID NO: 3411242 - DNA, 25 bp, Homo sapien
tattcctacgttctcttctccattt

SEQ ID NO: 3411243 - DNA, 25 bp, Homo sapien
tgacacacacttgaaggaaagcata

SEQ ID NO: 3411244 - DNA, 25 bp, Homo sapien
cagcagatgtgagttaacttgagtt

SEQ ID NO: 3411245 - DNA, 25 bp, Homo sapien
taacttgagttatggatgaaccaaa

SEQ ID NO: 3411246 - DNA, 25 bp, Homo sapien
tagtatcagcagatgtgagttaact

SEQ ID NO: 3411247 - DNA, 25 bp, Homo sapien
tttcccactggacctaggtagtatc

SEQ ID NO: 3411248 - DNA, 25 bp, Homo sapien
tacatgggaatttgaaggcttgaat

SEQ ID NO: 3411249 - DNA, 25 bp, Homo sapien
ccagaaggaataccaagaacagtgt

SEQ ID NO: 3411250 - DNA, 25 bp, Homo sapien
cagttggcatggtgtaattactctc

SEQ ID NO: 3411251 - DNA, 25 bp, Homo sapien
taagagtatatttccgaccatagtt

SEQ ID NO: 3411252 - DNA, 25 bp, Homo sapien
tttgcttctgccacctgaggacttg

SEQ ID NO: 3411253 - DNA, 25 bp, Homo sapien
cagactctcctagacatcagtgtag

SEQ ID NO: 3411254 - DNA, 25 bp, Homo sapien
ggagcgctccatagaataaggtgac

SEQ ID NO: 3411255 - DNA, 25 bp, Homo sapien
cacaaaagtgctggtctggatgaag

SEQ ID NO: 3411256 - DNA, 25 bp, Homo sapien
ttaaacatgggaaatacaacagtat

SEQ ID NO: 3411257 - DNA, 25 bp, Homo sapien
gattaaacatgggaaatacaacagt

SEQ ID NO: 3411258 - DNA, 25 bp, Homo sapien
taaacatgggaaatacaacagtata

SEQ ID NO: 3411259 - DNA, 25 bp, Homo sapien
attaaacatgggaaatacaacagta

SEQ ID NO: 3411260 - DNA, 25 bp, Homo sapien
tattgactattcttaaacgatttaa

SEQ ID NO: 3411261 - DNA, 25 bp, Homo sapien
cattgaaacaaacctgaacacccat

SEQ ID NO: 3411262 - DNA, 25 bp, Homo sapien
cagcattgaaacaaacctgaacacc

SEQ ID NO: 3411263 - DNA, 25 bp, Homo sapien
gcattgaaacaaacctgaacaccca

SEQ ID NO: 3411264 - DNA, 25 bp, Homo sapien
agcattgaaacaaacctgaacaccc

SEQ ID NO: 3411265 - DNA, 25 bp, Homo sapien
tacattggagtatgaagttgggcat

SEQ ID NO: 3411266 - DNA, 25 bp, Homo sapien
agagtagcagatatcacaaaaggag

SEQ ID NO: 3411267 - DNA, 25 bp, Homo sapien
caaattatccaacaaagtgatgaaa

SEQ ID NO: 3411268 - DNA, 25 bp, Homo sapien
gacaagcaaaaagagtgggatctgc

SEQ ID NO: 3411269 - DNA, 25 bp, Homo sapien
acagccagaaaatgtactggactta

SEQ ID NO: 3411270 - DNA, 25 bp, Homo sapien
ccagaaaatgtactggacttatgtt

SEQ ID NO: 3411271 - DNA, 25 bp, Homo sapien
cagccagaaaatgtactggacttat

SEQ ID NO: 3411272 - DNA, 25 bp, Homo sapien
gccagaaaatgtactggacttatgt

SEQ ID NO: 3411273 - DNA, 25 bp, Homo sapien
tgtggttacatatactgcaaaaggg

SEQ ID NO: 3411274 - DNA, 25 bp, Homo sapien
ttgtggttacatatactgcaaaagg

SEQ ID NO: 3411275 - DNA, 25 bp, Homo sapien
tttgtggttacatatactgcaaaag

SEQ ID NO: 3411276 - DNA, 25 bp, Homo sapien
tgagcccacctaagtaagaagcaag

SEQ ID NO: 3411277 - DNA, 25 bp, Homo sapien
tgtgtcagggaattaatgagcccac

SEQ ID NO: 3411278 - DNA, 25 bp, Homo sapien
gaccaagggcagcatttcattgata

SEQ ID NO: 3411279 - DNA, 25 bp, Homo sapien
caacaagggattagctatggccacg

SEQ ID NO: 3411280 - DNA, 25 bp, Homo sapien
aacagacccatagaataaggtcacc

SEQ ID NO: 3411281 - DNA, 25 bp, Homo sapien
caccgtggttaggtgggagacacaa

SEQ ID NO: 3411282 - DNA, 25 bp, Homo sapien
tcaccgtggttaggtgggagacaca

SEQ ID NO: 3411283 - DNA, 25 bp, Homo sapien
catagaataaggtcaccgtggttag

SEQ ID NO: 3411284 - DNA, 25 bp, Homo sapien
taaataagtgggtttagcatgggga

SEQ ID NO: 3411285 - DNA, 25 bp, Homo sapien
tcaccagtgtataaaacacagccaa

SEQ ID NO: 3411286 - DNA, 25 bp, Homo sapien
cagtgtataaaacacagccaagacc

SEQ ID NO: 3411287 - DNA, 25 bp, Homo sapien
agccaagaccttctcctgttccaag

SEQ ID NO: 3411288 - DNA, 25 bp, Homo sapien
gggtcaacctagcagccttcatcat

SEQ ID NO: 3411289 - DNA, 25 bp, Homo sapien
tccttgacagggctggattcagcac

SEQ ID NO: 3411290 - DNA, 25 bp, Homo sapien
ttcagcactgggtctatctacgatg

SEQ ID NO: 3411291 - DNA, 25 bp, Homo sapien
tctacgatggtgatcagggtcaacc

SEQ ID NO: 3411292 - DNA, 25 bp, Homo sapien
attcagagtaatgataccgcaatat

SEQ ID NO: 3411293 - DNA, 25 bp, Homo sapien
cagagtaatgataccgcaatatcaa

SEQ ID NO: 3411294 - DNA, 25 bp, Homo sapien
taatgataccgcaatatcaagacca

SEQ ID NO: 3411295 - DNA, 25 bp, Homo sapien
ggagattggaattaattcagagtaa

SEQ ID NO: 3411296 - DNA, 25 bp, Homo sapien
gccctcagtggtaaggagagacacg

SEQ ID NO: 3411297 - DNA, 25 bp, Homo sapien
gagcattcctatatttcccaccagg

SEQ ID NO: 3411298 - DNA, 25 bp, Homo sapien
taacggtcgtaagccattgtggcca

SEQ ID NO: 3411299 - DNA, 25 bp, Homo sapien
aaaaagtgagcgtggcaataatgcc

SEQ ID NO: 3411300 - DNA, 25 bp, Homo sapien
agcggatcctcaggatagcagcaac

SEQ ID NO: 3411301 - DNA, 25 bp, Homo sapien
ttagcggatcctcaggatagcagca

SEQ ID NO: 3411302 - DNA, 25 bp, Homo sapien
tagcggatcctcaggatagcagcaa

SEQ ID NO: 3411303 - DNA, 25 bp, Homo sapien
taaggtcacggtaatcaggtgagag

SEQ ID NO: 3411304 - DNA, 25 bp, Homo sapien
tatcgatccatagaataaggtcacg

SEQ ID NO: 3411305 - DNA, 25 bp, Homo sapien
taactaaagcttatcgatccataga

SEQ ID NO: 3411306 - DNA, 25 bp, Homo sapien
gaatgtaactaaagcttatcgatcc

SEQ ID NO: 3411307 - DNA, 25 bp, Homo sapien
tcttgttctagggaatactgggagt

SEQ ID NO: 3411308 - DNA, 25 bp, Homo sapien
atgggtttaacataggaaccaccag

SEQ ID NO: 3411309 - DNA, 25 bp, Homo sapien
gaaccaccagggtataaaatacaga

SEQ ID NO: 3411310 - DNA, 25 bp, Homo sapien
aaatacagacaccaccttttcttgt

SEQ ID NO: 3411311 - DNA, 25 bp, Homo sapien
aggaaaatgtttcatttctatagcc

SEQ ID NO: 3411312 - DNA, 25 bp, Homo sapien
aatgtttcatttctatagccctttt

SEQ ID NO: 3411313 - DNA, 25 bp, Homo sapien
ggaaaatgtttcatttctatagccc

SEQ ID NO: 3411314 - DNA, 25 bp, Homo sapien
aaaatgtttcatttctatagccctt

SEQ ID NO: 3411315 - DNA, 25 bp, Homo sapien
gaaatctaagaaagccaactggcta

SEQ ID NO: 3411316 - DNA, 25 bp, Homo sapien
gaggcaaccgtgataagagatgact

SEQ ID NO: 3411317 - DNA, 25 bp, Homo sapien
gaagcattcagtagtcaggaacaag

SEQ ID NO: 3411318 - DNA, 25 bp, Homo sapien
ggttatcagtcaaccccaggaggat

SEQ ID NO: 3411319 - DNA, 25 bp, Homo sapien
gagtcactaccattaggtgggaggc

SEQ ID NO: 3411320 - DNA, 25 bp, Homo sapien
gggttggctcccagataagtaaata

SEQ ID NO: 3411321 - DNA, 25 bp, Homo sapien
tcaggacaatgagtaggattaccag

SEQ ID NO: 3411322 - DNA, 25 bp, Homo sapien
taacggttgataacattggacccac

SEQ ID NO: 3411323 - DNA, 25 bp, Homo sapien
gtcttaaatgtttctggctgaaaat

SEQ ID NO: 3411324 - DNA, 25 bp, Homo sapien
atagtcttaaatgtttctggctgaa

SEQ ID NO: 3411325 - DNA, 25 bp, Homo sapien
cgcagcactgataatagtcttaaat

SEQ ID NO: 3411326 - DNA, 25 bp, Homo sapien
cttaaatgtttctggctgaaaattc

SEQ ID NO: 3411327 - DNA, 25 bp, Homo sapien
cctcagtgaaattgttgccagccat

SEQ ID NO: 3411328 - DNA, 25 bp, Homo sapien
acctcagtgaaattgttgccagcca

SEQ ID NO: 3411329 - DNA, 25 bp, Homo sapien
accaatgccttaggtgttacagtag

SEQ ID NO: 3411330 - DNA, 25 bp, Homo sapien
attcaccaatgccttaggtgttaca

SEQ ID NO: 3411331 - DNA, 25 bp, Homo sapien
caatgccttaggtgttacagtagag

SEQ ID NO: 3411332 - DNA, 25 bp, Homo sapien
tgccttaggtgttacagtagaggag

SEQ ID NO: 3411333 - DNA, 25 bp, Homo sapien
gattgctatgtagcgattgtaggcc

SEQ ID NO: 3411334 - DNA, 25 bp, Homo sapien
gaacgccaaactgcttatcacccag

SEQ ID NO: 3411335 - DNA, 25 bp, Homo sapien
tggacactttttgggacatgactac

SEQ ID NO: 3411336 - DNA, 25 bp, Homo sapien
acccagacagatatcagcgagcttg

SEQ ID NO: 3411337 - DNA, 25 bp, Homo sapien
atggaaaaagttttctatgtatgac

SEQ ID NO: 3411338 - DNA, 25 bp, Homo sapien
tcatggaaaaagttttctatgtatg

SEQ ID NO: 3411339 - DNA, 25 bp, Homo sapien
catggaaaaagttttctatgtatga

SEQ ID NO: 3411340 - DNA, 25 bp, Homo sapien
catttgtgttattccttctacccat

SEQ ID NO: 3411341 - DNA, 25 bp, Homo sapien
cacatttgtgttattccttctaccc

SEQ ID NO: 3411342 - DNA, 25 bp, Homo sapien
aaggatgaagtcagccacatttgtg

SEQ ID NO: 3411343 - DNA, 25 bp, Homo sapien
gccacatttgtgttattccttctac

SEQ ID NO: 3411344 - DNA, 25 bp, Homo sapien
tgcagatcgctgcatagcgatcatg

SEQ ID NO: 3411345 - DNA, 25 bp, Homo sapien
acattcagcagtacccaagaaggca

SEQ ID NO: 3411346 - DNA, 25 bp, Homo sapien
ttcagcagtacccaagaaggcaaaa

SEQ ID NO: 3411347 - DNA, 25 bp, Homo sapien
cgctgcatagcgatcatgggccatt

SEQ ID NO: 3411348 - DNA, 25 bp, Homo sapien
aatctgctcatggaaaccacgttga

SEQ ID NO: 3411349 - DNA, 25 bp, Homo sapien
gagagcgaggcagagccttttggac

SEQ ID NO: 3411350 - DNA, 25 bp, Homo sapien
tgatgaattacgtttgagtcgtaga

SEQ ID NO: 3411351 - DNA, 25 bp, Homo sapien
tacgtttgagtcgtagaaatgcaat

SEQ ID NO: 3411352 - DNA, 25 bp, Homo sapien
aataagtaaaaatcagagtgctata

SEQ ID NO: 3411353 - DNA, 25 bp, Homo sapien
caggatttcggtgttgtatgtatca

SEQ ID NO: 3411354 - DNA, 25 bp, Homo sapien
tgaatatcaggatttcggtgttgta

SEQ ID NO: 3411355 - DNA, 25 bp, Homo sapien
taagtaaaaatcagagtgctataaa

SEQ ID NO: 3411356 - DNA, 25 bp, Homo sapien
cctgtcttctctgcatgactctgat

SEQ ID NO: 3411357 - DNA, 25 bp, Homo sapien
tggagtcctgtcttctctgcatgac

SEQ ID NO: 3411358 - DNA, 25 bp, Homo sapien
agtcctgtcttctctgcatgactct

SEQ ID NO: 3411359 - DNA, 25 bp, Homo sapien
tgactctgatgacagcatttttcac

SEQ ID NO: 3411360 - DNA, 25 bp, Homo sapien
ctgacagtcccgtaaggatgaagtc

SEQ ID NO: 3411361 - DNA, 25 bp, Homo sapien
gtatatgaggagaaatagcataaac

SEQ ID NO: 3411362 - DNA, 25 bp, Homo sapien
gaggtccaggcggattatcaatagc

SEQ ID NO: 3411363 - DNA, 25 bp, Homo sapien
cataaacagagccatctggacctct

SEQ ID NO: 3411364 - DNA, 25 bp, Homo sapien
ccccagcatagtaattaggtatatg

SEQ ID NO: 3411365 - DNA, 25 bp, Homo sapien
gactgcagatcgctgcatagcgatc

SEQ ID NO: 3411366 - DNA, 25 bp, Homo sapien
gaggactgcagatcgctgcatagcg

SEQ ID NO: 3411367 - DNA, 25 bp, Homo sapien
tagaggactgcagatcgctgcatag

SEQ ID NO: 3411368 - DNA, 25 bp, Homo sapien
ctgcagatcgctgcatagcgatcat

SEQ ID NO: 3411369 - DNA, 25 bp, Homo sapien
gatgaattatgtttgagtcacagaa

SEQ ID NO: 3411370 - DNA, 25 bp, Homo sapien
atgcaatctgctcatggaaaccaca

SEQ ID NO: 3411371 - DNA, 25 bp, Homo sapien
tgagagcgaggcagagccttttggg

SEQ ID NO: 3411372 - DNA, 25 bp, Homo sapien
gcaatctgctcatggaaaccacatt

SEQ ID NO: 3411373 - DNA, 25 bp, Homo sapien
ggaaccagcgataatgaatatcagc

SEQ ID NO: 3411374 - DNA, 25 bp, Homo sapien
aaccagcgataatgaatatcagcat

SEQ ID NO: 3411375 - DNA, 25 bp, Homo sapien
gaaccagcgataatgaatatcagca

SEQ ID NO: 3411376 - DNA, 25 bp, Homo sapien
cctgtcttctctgcatgactctaat

SEQ ID NO: 3411377 - DNA, 25 bp, Homo sapien
gcagatccttaggatagcaaaagca

SEQ ID NO: 3411378 - DNA, 25 bp, Homo sapien
gcttaaggtaccgtagaatatggcc

SEQ ID NO: 3411379 - DNA, 25 bp, Homo sapien
tgggaatcactagtgtatagaacac

SEQ ID NO: 3411380 - DNA, 25 bp, Homo sapien
ccatagcagttaggttagaggcaca

SEQ ID NO: 3411381 - DNA, 25 bp, Homo sapien
ttttatgtctatagctcttttcact

SEQ ID NO: 3411382 - DNA, 25 bp, Homo sapien
tttatgtctatagctcttttcactg

SEQ ID NO: 3411383 - DNA, 25 bp, Homo sapien
gttttatgtctatagctcttttcac

SEQ ID NO: 3411384 - DNA, 25 bp, Homo sapien
tgaacactccgaaacacaaatgctg

SEQ ID NO: 3411385 - DNA, 25 bp, Homo sapien
tcatgcccagattcctcaacaaggt

SEQ ID NO: 3411386 - DNA, 25 bp, Homo sapien
taaagcaagggactcacaatggcca

SEQ ID NO: 3411387 - DNA, 25 bp, Homo sapien
tttagcctacaaaaggacagtctcc

SEQ ID NO: 3411388 - DNA, 25 bp, Homo sapien
tgtgtatcaacaggtttaacatggg

SEQ ID NO: 3411389 - DNA, 25 bp, Homo sapien
tgggaatccctagcgtatagaacat

SEQ ID NO: 3411390 - DNA, 25 bp, Homo sapien
gtaccatagaatatggtcacagcag

SEQ ID NO: 3411391 - DNA, 25 bp, Homo sapien
gagtggatccttaggctagcaaaag

SEQ ID NO: 3411392 - DNA, 25 bp, Homo sapien
ggaaatgtttcatttctatggccct

SEQ ID NO: 3411393 - DNA, 25 bp, Homo sapien
tatggcccttttcactgcctccttt

SEQ ID NO: 3411394 - DNA, 25 bp, Homo sapien
aaatgtttcatttctatggcccttt

SEQ ID NO: 3411395 - DNA, 25 bp, Homo sapien
cagaggaaatgtttcatttctatgg

SEQ ID NO: 3411396 - DNA, 25 bp, Homo sapien
ttgtgtcttgcaggttggttgtacg

SEQ ID NO: 3411397 - DNA, 25 bp, Homo sapien
aacttgtgtcttgcaggttggttgt

SEQ ID NO: 3411398 - DNA, 25 bp, Homo sapien
tgtcttgcaggttggttgtacggat

SEQ ID NO: 3411399 - DNA, 25 bp, Homo sapien
cttgcaggttggttgtacggattat

SEQ ID NO: 3411400 - DNA, 25 bp, Homo sapien
gttataaaggttatagcctgtgaaa

SEQ ID NO: 3411401 - DNA, 25 bp, Homo sapien
gaagcatctgtgttgcacatccgat

SEQ ID NO: 3411402 - DNA, 25 bp, Homo sapien
tggagccaggaatcctcaatgacca

SEQ ID NO: 3411403 - DNA, 25 bp, Homo sapien
tctgtgaagcctgtcaatataaaca

SEQ ID NO: 3411404 - DNA, 25 bp, Homo sapien
tataaacatggtgacttcagtcttg

SEQ ID NO: 3411405 - DNA, 25 bp, Homo sapien
ctgacgagaattgttccatgataaa

SEQ ID NO: 3411406 - DNA, 25 bp, Homo sapien
ttggtctcatataactgacgagaat

SEQ ID NO: 3411407 - DNA, 25 bp, Homo sapien
cgagaattgttccatgataaattgt

SEQ ID NO: 3411408 - DNA, 25 bp, Homo sapien
tcatataactgacgagaattgttcc

SEQ ID NO: 3411409 - DNA, 25 bp, Homo sapien
ggattcaacttgggaatcacaattg

SEQ ID NO: 3411410 - DNA, 25 bp, Homo sapien
caacttgggaatcacaattgtgtaa

SEQ ID NO: 3411411 - DNA, 25 bp, Homo sapien
ttcaacttgggaatcacaattgtgt

SEQ ID NO: 3411412 - DNA, 25 bp, Homo sapien
gattcaacttgggaatcacaattgt

SEQ ID NO: 3411413 - DNA, 25 bp, Homo sapien
tttcaacattttcttcactgccttt

SEQ ID NO: 3411414 - DNA, 25 bp, Homo sapien
caatttcaacattttcttcactgcc

SEQ ID NO: 3411415 - DNA, 25 bp, Homo sapien
accaatttcaacattttcttcactg

SEQ ID NO: 3411416 - DNA, 25 bp, Homo sapien
tcaacattttcttcactgccttttt

SEQ ID NO: 3411417 - DNA, 25 bp, Homo sapien
atgattcttacgtaacttctgaaat

SEQ ID NO: 3411418 - DNA, 25 bp, Homo sapien
tgattcttacgtaacttctgaaatt

SEQ ID NO: 3411419 - DNA, 25 bp, Homo sapien
tatgattcttacgtaacttctgaaa

SEQ ID NO: 3411420 - DNA, 25 bp, Homo sapien
ttaattgaagcttgtatagatccat

SEQ ID NO: 3411421 - DNA, 25 bp, Homo sapien
aacatggtgacttcagtaaaattgt

SEQ ID NO: 3411422 - DNA, 25 bp, Homo sapien
tataaacatggtgacttcagtaaaa

SEQ ID NO: 3411423 - DNA, 25 bp, Homo sapien
agatccatatctgaaggcaaccctg

SEQ ID NO: 3411424 - DNA, 25 bp, Homo sapien
gacatccaagaatgataaaacacca

SEQ ID NO: 3411425 - DNA, 25 bp, Homo sapien
ataaaaataggaagacttgcacatc

SEQ ID NO: 3411426 - DNA, 25 bp, Homo sapien
caatgatcggtacaaccagccctaa

SEQ ID NO: 3411427 - DNA, 25 bp, Homo sapien
caagaaaatagtacattgggctgtg

SEQ ID NO: 3411428 - DNA, 25 bp, Homo sapien
gactctgggtgacatgctcactgaa

SEQ ID NO: 3411429 - DNA, 25 bp, Homo sapien
agactctgggtgacatgctcactga

SEQ ID NO: 3411430 - DNA, 25 bp, Homo sapien
tagactctgggtgacatgctcactg

SEQ ID NO: 3411431 - DNA, 25 bp, Homo sapien
actctgggtgacatgctcactgaat

SEQ ID NO: 3411432 - DNA, 25 bp, Homo sapien
gctggattacgtgagtgtcagaaca

SEQ ID NO: 3411433 - DNA, 25 bp, Homo sapien
gaagaatagaagctggattacgtga

SEQ ID NO: 3411434 - DNA, 25 bp, Homo sapien
agtagaagaatagaagctggattac

SEQ ID NO: 3411435 - DNA, 25 bp, Homo sapien
tagaagctggattacgtgagtgtca

SEQ ID NO: 3411436 - DNA, 25 bp, Homo sapien
tatcatgtcattgtccgaagtgtag

SEQ ID NO: 3411437 - DNA, 25 bp, Homo sapien
atgtcattgtccgaagtgtagctgg

SEQ ID NO: 3411438 - DNA, 25 bp, Homo sapien
tcatgtcattgtccgaagtgtagct

SEQ ID NO: 3411439 - DNA, 25 bp, Homo sapien
tcattgtccgaagtgtagctggaac

SEQ ID NO: 3411440 - DNA, 25 bp, Homo sapien
gcaatcttttgattgcctcctttac

SEQ ID NO: 3411441 - DNA, 25 bp, Homo sapien
agcaatcttttgattgcctccttta

SEQ ID NO: 3411442 - DNA, 25 bp, Homo sapien
aagcaatcttttgattgcctccttt

SEQ ID NO: 3411443 - DNA, 25 bp, Homo sapien
taacttatttatgaaccaatttctc

SEQ ID NO: 3411444 - DNA, 25 bp, Homo sapien
acttatttatgaaccaatttctcac

SEQ ID NO: 3411445 - DNA, 25 bp, Homo sapien
tataacttatttatgaaccaatttc

SEQ ID NO: 3411446 - DNA, 25 bp, Homo sapien
ctataacttatttatgaaccaattt

SEQ ID NO: 3411447 - DNA, 25 bp, Homo sapien
tcacatagatcatgaggaacaatgc

SEQ ID NO: 3411448 - DNA, 25 bp, Homo sapien
ggtttgcaacctggagtccaacttg

SEQ ID NO: 3411449 - DNA, 25 bp, Homo sapien
tccaacttggtgaggacaatcatgc

SEQ ID NO: 3411450 - DNA, 25 bp, Homo sapien
caatgcaaataatggtgcctgcagc

SEQ ID NO: 3411451 - DNA, 25 bp, Homo sapien
taatgacgttgtagccacagaagga

SEQ ID NO: 3411452 - DNA, 25 bp, Homo sapien
tattccatgtccttcgtagggcata

SEQ ID NO: 3411453 - DNA, 25 bp, Homo sapien
taagggattgctaccagcacctgac

SEQ ID NO: 3411454 - DNA, 25 bp, Homo sapien
gacttgggctgcacgtacatgaaaa

SEQ ID NO: 3411455 - DNA, 25 bp, Homo sapien
tcatgtaaacagaatgggctaactg

SEQ ID NO: 3411456 - DNA, 25 bp, Homo sapien
aacaaaatcaggtgctaatcagaat

SEQ ID NO: 3411457 - DNA, 25 bp, Homo sapien
tatgttcggttaacagacttctatg

SEQ ID NO: 3411458 - DNA, 25 bp, Homo sapien
cagaatttaccgattattgagctac

SEQ ID NO: 3411459 - DNA, 25 bp, Homo sapien
caatgtccactacatgagctttgat

SEQ ID NO: 3411460 - DNA, 25 bp, Homo sapien
tgtgatacattagtgcttattgcac

SEQ ID NO: 3411461 - DNA, 25 bp, Homo sapien
caaacgttagcattacaatgtccac

SEQ ID NO: 3411462 - DNA, 25 bp, Homo sapien
ttcgagttgtgacatgtgatacatt

SEQ ID NO: 3411463 - DNA, 25 bp, Homo sapien
gctatggatgtccacatagtggtca

SEQ ID NO: 3411464 - DNA, 25 bp, Homo sapien
ccatggctgatgagacgaaaagttc

SEQ ID NO: 3411465 - DNA, 25 bp, Homo sapien
ggtacatgcataacagggaatggca

SEQ ID NO: 3411466 - DNA, 25 bp, Homo sapien
gaagaaagccatctgcatggtacat

SEQ ID NO: 3411467 - DNA, 25 bp, Homo sapien
tgctttctactgctttaggcctcat

SEQ ID NO: 3411468 - DNA, 25 bp, Homo sapien
ttaacaatttgatgtatgagcaata

SEQ ID NO: 3411469 - DNA, 25 bp, Homo sapien
tatttgaaacattatcttctaagaa

SEQ ID NO: 3411470 - DNA, 25 bp, Homo sapien
cttggtaactgtgcaaactagaaaa

SEQ ID NO: 3411471 - DNA, 25 bp, Homo sapien
gatgtatgagcaatagaggtatttc

SEQ ID NO: 3411472 - DNA, 25 bp, Homo sapien
gcccagattgcctatcactgtgacc

SEQ ID NO: 3411473 - DNA, 25 bp, Homo sapien
actgccgtgtgattgtgttttacca

SEQ ID NO: 3411474 - DNA, 25 bp, Homo sapien
ggaagagtccaaacagtggagcctg

SEQ ID NO: 3411475 - DNA, 25 bp, Homo sapien
ccagatatatgatgaggaagagtcc

SEQ ID NO: 3411476 - DNA, 25 bp, Homo sapien
cagaagaggtttacagatggctacg

SEQ ID NO: 3411477 - DNA, 25 bp, Homo sapien
tctcaaagaatgctagctgagtggc

SEQ ID NO: 3411478 - DNA, 25 bp, Homo sapien
catgatgatcacgtacagaagaggt

SEQ ID NO: 3411479 - DNA, 25 bp, Homo sapien
tggagtccaagtaggtcaagataac

SEQ ID NO: 3411480 - DNA, 25 bp, Homo sapien
caaacgtgctatagagatagggaac

SEQ ID NO: 3411481 - DNA, 25 bp, Homo sapien
tcaatagccaaagtatgactggact

SEQ ID NO: 3411482 - DNA, 25 bp, Homo sapien
ggagaagagcaaattacagcctgag

SEQ ID NO: 3411483 - DNA, 25 bp, Homo sapien
catcagagggatacagtcacagtaa

SEQ ID NO: 3411484 - DNA, 25 bp, Homo sapien
ctgctgaagagaggcccgcatccac

SEQ ID NO: 3411485 - DNA, 25 bp, Homo sapien
aactttaacaaactccgtcctgctg

SEQ ID NO: 3411486 - DNA, 25 bp, Homo sapien
acaaactccgtcctgctgaagagag

SEQ ID NO: 3411487 - DNA, 25 bp, Homo sapien
taacaaactccgtcctgctgaagag

SEQ ID NO: 3411488 - DNA, 25 bp, Homo sapien
aagcgtttccgagcatagtaatcag

SEQ ID NO: 3411489 - DNA, 25 bp, Homo sapien
ctgtatcaccaagcgtttccgagca

SEQ ID NO: 3411490 - DNA, 25 bp, Homo sapien
tcagttttaccctctcgtcgtcttc

SEQ ID NO: 3411491 - DNA, 25 bp, Homo sapien
ccctctcgtcgtcttctaaatttca

SEQ ID NO: 3411492 - DNA, 25 bp, Homo sapien
caaatgatatatctgtttattacat

SEQ ID NO: 3411493 - DNA, 25 bp, Homo sapien
tatctgtttattacatgaactatca

SEQ ID NO: 3411494 - DNA, 25 bp, Homo sapien
tgaactatcatccagtatttgggtg

SEQ ID NO: 3411495 - DNA, 25 bp, Homo sapien
gatatatctgtttattacatgaact

SEQ ID NO: 3411496 - DNA, 25 bp, Homo sapien
gtgcatgtgccgcgcggactatcac

SEQ ID NO: 3411497 - DNA, 25 bp, Homo sapien
gcatgtgccgcgcggactatcacat

SEQ ID NO: 3411498 - DNA, 25 bp, Homo sapien
tgtgccgcgcggactatcacattcc

SEQ ID NO: 3411499 - DNA, 25 bp, Homo sapien
atgtgccgcgcggactatcacattc

SEQ ID NO: 3411500 - DNA, 25 bp, Homo sapien
cacattgtattcatcactagtcgcc

SEQ ID NO: 3411501 - DNA, 25 bp, Homo sapien
tgtattcatcactagtcgcctccac

SEQ ID NO: 3411502 - DNA, 25 bp, Homo sapien
cattgtattcatcactagtcgcctc

SEQ ID NO: 3411503 - DNA, 25 bp, Homo sapien
ttgtattcatcactagtcgcctcca

SEQ ID NO: 3411504 - DNA, 25 bp, Homo sapien
ctgcacccaaatagcaggtaaaggc

SEQ ID NO: 3411505 - DNA, 25 bp, Homo sapien
tgcacccaaatagcaggtaaaggca

SEQ ID NO: 3411506 - DNA, 25 bp, Homo sapien
gcacccaaatagcaggtaaaggcac

SEQ ID NO: 3411507 - DNA, 25 bp, Homo sapien
tccaaccgcagcttccttcagggtg

SEQ ID NO: 3411508 - DNA, 25 bp, Homo sapien
acaagcctccaaccgcagcttcctt

SEQ ID NO: 3411509 - DNA, 25 bp, Homo sapien
agcctccaaccgcagcttccttcag

SEQ ID NO: 3411510 - DNA, 25 bp, Homo sapien
atagacaagcctccaaccgcagctt

SEQ ID NO: 3411511 - DNA, 25 bp, Homo sapien
gaactgtttcttgtaagcatcttca

SEQ ID NO: 3411512 - DNA, 25 bp, Homo sapien
gtctggagttatgctgttctttata

SEQ ID NO: 3411513 - DNA, 25 bp, Homo sapien
ctttatatattgagagaactgtttc

SEQ ID NO: 3411514 - DNA, 25 bp, Homo sapien
tgtaagcatcttcatcttcttccat

SEQ ID NO: 3411515 - DNA, 25 bp, Homo sapien
ttcataaactggattttctcctata

SEQ ID NO: 3411516 - DNA, 25 bp, Homo sapien
ataaactggattttctcctatagca

SEQ ID NO: 3411517 - DNA, 25 bp, Homo sapien
tcttttcataaactggattttctcc

SEQ ID NO: 3411518 - DNA, 25 bp, Homo sapien
cttttcataaactggattttctcct

SEQ ID NO: 3411519 - DNA, 25 bp, Homo sapien
ggacattctgggatggttctgcctc

SEQ ID NO: 3411520 - DNA, 25 bp, Homo sapien
tctgggatggttctgcctcttcttc

SEQ ID NO: 3411521 - DNA, 25 bp, Homo sapien
cattctgggatggttctgcctcttc

SEQ ID NO: 3411522 - DNA, 25 bp, Homo sapien
caagggacattctgggatggttctg

SEQ ID NO: 3411523 - DNA, 25 bp, Homo sapien
ttagctttcagcatcctgctcctga

SEQ ID NO: 3411524 - DNA, 25 bp, Homo sapien
gctttcagcatcctgctcctgagct

SEQ ID NO: 3411525 - DNA, 25 bp, Homo sapien
ggaagcttgccttctttcgagctac

SEQ ID NO: 3411526 - DNA, 25 bp, Homo sapien
gaggaagcttgccttctttcgagct

SEQ ID NO: 3411527 - DNA, 25 bp, Homo sapien
aaagaattatttgcaggactgccct

SEQ ID NO: 3411528 - DNA, 25 bp, Homo sapien
agaattatttgcaggactgccctta

SEQ ID NO: 3411529 - DNA, 25 bp, Homo sapien
tatttgcaggactgcccttatatgg

SEQ ID NO: 3411530 - DNA, 25 bp, Homo sapien
aattatttgcaggactgcccttata

SEQ ID NO: 3411531 - DNA, 25 bp, Homo sapien
taatgagagccagatgttgcaggaa

SEQ ID NO: 3411532 - DNA, 25 bp, Homo sapien
tcatcagtatccagtgaatggttac

SEQ ID NO: 3411533 - DNA, 25 bp, Homo sapien
gactgccatcatatgtgaagcacag

SEQ ID NO: 3411534 - DNA, 25 bp, Homo sapien
ggtcagcccatagagcaccagaaag

SEQ ID NO: 3411535 - DNA, 25 bp, Homo sapien
tgtcatgaatctctgtagagcagtc

SEQ ID NO: 3411536 - DNA, 25 bp, Homo sapien
tttgtcatgaatctctgtagagcag

SEQ ID NO: 3411537 - DNA, 25 bp, Homo sapien
agatttgtcatgaatctctgtagag

SEQ ID NO: 3411538 - DNA, 25 bp, Homo sapien
catgaatctctgtagagcagtcttc

SEQ ID NO: 3411539 - DNA, 25 bp, Homo sapien
caagaataaactctgtcgcctgggt

SEQ ID NO: 3411540 - DNA, 25 bp, Homo sapien
tccgctctaatgagtaggatcaaac

SEQ ID NO: 3411541 - DNA, 25 bp, Homo sapien
cattggtgtgttgagacttgtatcc

SEQ ID NO: 3411542 - DNA, 25 bp, Homo sapien
gaggtagatggataagaatagcaca

SEQ ID NO: 3411543 - DNA, 25 bp, Homo sapien
caagttgcctaccactgtgaagagg

SEQ ID NO: 3411544 - DNA, 25 bp, Homo sapien
tccagggcatggctagagctaggct

SEQ ID NO: 3411545 - DNA, 25 bp, Homo sapien
tgagagccacacgtcgagaaagcct

SEQ ID NO: 3411546 - DNA, 25 bp, Homo sapien
ccatggaagccagtagcaaggattc

SEQ ID NO: 3411547 - DNA, 25 bp, Homo sapien
cgagtgtctgagcaagttagcctga

SEQ ID NO: 3411548 - DNA, 25 bp, Homo sapien
tgattttcttcagagcttctttcac

SEQ ID NO: 3411549 - DNA, 25 bp, Homo sapien
taatgattttcttcagagcttcttt

SEQ ID NO: 3411550 - DNA, 25 bp, Homo sapien
ctagtttttattgataatgattttc

SEQ ID NO: 3411551 - DNA, 25 bp, Homo sapien
ttttattgataatgattttcttcag

SEQ ID NO: 3411552 - DNA, 25 bp, Homo sapien
tgataaagcaatgcaactgagaggc

SEQ ID NO: 3411553 - DNA, 25 bp, Homo sapien
taaacaaaagctacgtggctgagaa

SEQ ID NO: 3411554 - DNA, 25 bp, Homo sapien
gaggcacaagtaggtaaggatattc

SEQ ID NO: 3411555 - DNA, 25 bp, Homo sapien
taattaacccaaggctacccatgac

SEQ ID NO: 3411556 - DNA, 25 bp, Homo sapien
cttctgttcatgatgatactataga

SEQ ID NO: 3411557 - DNA, 25 bp, Homo sapien
tgaatacagacccttctgttcatga

SEQ ID NO: 3411558 - DNA, 25 bp, Homo sapien
tgatgatactatagagtaaagggtt

SEQ ID NO: 3411559 - DNA, 25 bp, Homo sapien
gaatacagacccttctgttcatgat

SEQ ID NO: 3411560 - DNA, 25 bp, Homo sapien
ggctttatgattagacccaaggtca

SEQ ID NO: 3411561 - DNA, 25 bp, Homo sapien
aaagcatctttgacttcgtggttcc

SEQ ID NO: 3411562 - DNA, 25 bp, Homo sapien
ggtcatttatcttgtagtaagacat

SEQ ID NO: 3411563 - DNA, 25 bp, Homo sapien
gtagtaagacatagattttccataa

SEQ ID NO: 3411564 - DNA, 25 bp, Homo sapien
ttgccatgtaatagatacaggattc

SEQ ID NO: 3411565 - DNA, 25 bp, Homo sapien
ccagagcataccttctgaataatct

SEQ ID NO: 3411566 - DNA, 25 bp, Homo sapien
ctgaataatcttgactctataagaa

SEQ ID NO: 3411567 - DNA, 25 bp, Homo sapien
ttttgccatgtaatagatacaggat

SEQ ID NO: 3411568 - DNA, 25 bp, Homo sapien
gaagttcctgattatctgtgagccc

SEQ ID NO: 3411569 - DNA, 25 bp, Homo sapien
gttcctgattatctgtgagccctag

SEQ ID NO: 3411570 - DNA, 25 bp, Homo sapien
cctgattatctgtgagccctaggag

SEQ ID NO: 3411571 - DNA, 25 bp, Homo sapien
gattatctgtgagccctaggaggat

SEQ ID NO: 3411572 - DNA, 25 bp, Homo sapien
tatggattagcacaatcaaaccaag

SEQ ID NO: 3411573 - DNA, 25 bp, Homo sapien
gattagcacaatcaaaccaagatta

SEQ ID NO: 3411574 - DNA, 25 bp, Homo sapien
aggactgatatggattagcacaatc

SEQ ID NO: 3411575 - DNA, 25 bp, Homo sapien
tgatatggattagcacaatcaaacc

SEQ ID NO: 3411576 - DNA, 25 bp, Homo sapien
cgtaaaaatccacaaaagccagatg

SEQ ID NO: 3411577 - DNA, 25 bp, Homo sapien
gtaaaaatccacaaaagccagatgg

SEQ ID NO: 3411578 - DNA, 25 bp, Homo sapien
caaagagttgacaagggtgtttgga

SEQ ID NO: 3411579 - DNA, 25 bp, Homo sapien
caagggtgtttggagtgatagcaga

SEQ ID NO: 3411580 - DNA, 25 bp, Homo sapien
taatttcatgcaaagagttgacaag

SEQ ID NO: 3411581 - DNA, 25 bp, Homo sapien
catgcaaagagttgacaagggtgtt

SEQ ID NO: 3411582 - DNA, 25 bp, Homo sapien
ctgaaagtgtaatgaagcagcacac

SEQ ID NO: 3411583 - DNA, 25 bp, Homo sapien
gagtaaagggttgcagatggcaaca

SEQ ID NO: 3411584 - DNA, 25 bp, Homo sapien
agagtaaagggttgcagatggcaac

SEQ ID NO: 3411585 - DNA, 25 bp, Homo sapien
atagagtaaagggttgcagatggca

SEQ ID NO: 3411586 - DNA, 25 bp, Homo sapien
taaagggttgcagatggcaacatac

SEQ ID NO: 3411587 - DNA, 25 bp, Homo sapien
catttgaatgcagagtctcctaggc

SEQ ID NO: 3411588 - DNA, 25 bp, Homo sapien
acaaaacgacatgtggaatgtggcc

SEQ ID NO: 3411589 - DNA, 25 bp, Homo sapien
gccagagcaatcagaggaacatcat

SEQ ID NO: 3411590 - DNA, 25 bp, Homo sapien
tgtatgagtcccatggtgaaaccat

SEQ ID NO: 3411591 - DNA, 25 bp, Homo sapien
caaagacgatgaatacataggagat

SEQ ID NO: 3411592 - DNA, 25 bp, Homo sapien
ttagatagcaaagacgatgaataca

SEQ ID NO: 3411593 - DNA, 25 bp, Homo sapien
acaaaaaacattgaacgcagcaatg

SEQ ID NO: 3411594 - DNA, 25 bp, Homo sapien
aacattgaacgcagcaatgatgaac

SEQ ID NO: 3411595 - DNA, 25 bp, Homo sapien
aactgagggtcccataatatatgga

SEQ ID NO: 3411596 - DNA, 25 bp, Homo sapien
tctagtgagtggcttgacttaggct

SEQ ID NO: 3411597 - DNA, 25 bp, Homo sapien
gggaatcaccactgcatagaatact

SEQ ID NO: 3411598 - DNA, 25 bp, Homo sapien
atagaatactgaggcaaatttgtct

SEQ ID NO: 3411599 - DNA, 25 bp, Homo sapien
caataatttttttcatagcattttt

SEQ ID NO: 3411600 - DNA, 25 bp, Homo sapien
tcaataatttttttcatagcatttt

SEQ ID NO: 3411601 - DNA, 25 bp, Homo sapien
tgctgaattgaaacctgtgtgcctt

SEQ ID NO: 3411602 - DNA, 25 bp, Homo sapien
gccttttgctctgatattaccagac

SEQ ID NO: 3411603 - DNA, 25 bp, Homo sapien
gatattaccagactctccaacatct

SEQ ID NO: 3411604 - DNA, 25 bp, Homo sapien
tcttttcagtgcttacattgctgtg

SEQ ID NO: 3411605 - DNA, 25 bp, Homo sapien
catattgatgattgtaggagcttaa

SEQ ID NO: 3411606 - DNA, 25 bp, Homo sapien
tcttcatattgatgattgtaggagc

SEQ ID NO: 3411607 - DNA, 25 bp, Homo sapien
aatctcttcatattgatgattgtag

SEQ ID NO: 3411608 - DNA, 25 bp, Homo sapien
ttcatattgatgattgtaggagctt

SEQ ID NO: 3411609 - DNA, 25 bp, Homo sapien
ctgttgaatgattgcctttggccac

SEQ ID NO: 3411610 - DNA, 25 bp, Homo sapien
cacattctgagtaatggtgttccca

SEQ ID NO: 3411611 - DNA, 25 bp, Homo sapien
gaagcagatgttaggaaatgattct

SEQ ID NO: 3411612 - DNA, 25 bp, Homo sapien
tgcctttggccactgagtaggtata

SEQ ID NO: 3411613 - DNA, 25 bp, Homo sapien
tagcataatcaaaccgaaattaccc

SEQ ID NO: 3411614 - DNA, 25 bp, Homo sapien
gctagctaagtatactacaaggaat

SEQ ID NO: 3411615 - DNA, 25 bp, Homo sapien
gaaattacccataaagctagctaag

SEQ ID NO: 3411616 - DNA, 25 bp, Homo sapien
caaggaatataccaaagagagtgac

SEQ ID NO: 3411617 - DNA, 25 bp, Homo sapien
ctacaaatgtgatgaagcagcatac

SEQ ID NO: 3411618 - DNA, 25 bp, Homo sapien
catatgccatgattgagagcaaata

SEQ ID NO: 3411619 - DNA, 25 bp, Homo sapien
tgagaatgacataaagtaaagggtt

SEQ ID NO: 3411620 - DNA, 25 bp, Homo sapien
gagaatgacataaagtaaagggtta

SEQ ID NO: 3411621 - DNA, 25 bp, Homo sapien
ctagcaatcagtttaatacagtttt

SEQ ID NO: 3411622 - DNA, 25 bp, Homo sapien
tgtacaagtcccacagtgaatccat

SEQ ID NO: 3411623 - DNA, 25 bp, Homo sapien
caagtaggatgtcgccactgtctgt

SEQ ID NO: 3411624 - DNA, 25 bp, Homo sapien
cttgggctgcgggtacataaaaatg

SEQ ID NO: 3411625 - DNA, 25 bp, Homo sapien
gagcagagagtattgaacccagcaa

SEQ ID NO: 3411626 - DNA, 25 bp, Homo sapien
atttgacagccaaacataacttttc

SEQ ID NO: 3411627 - DNA, 25 bp, Homo sapien
tatttgacagccaaacataactttt

SEQ ID NO: 3411628 - DNA, 25 bp, Homo sapien
ttatttgacagccaaacataacttt

SEQ ID NO: 3411629 - DNA, 25 bp, Homo sapien
actctgtcacatcggtgaaattgag

SEQ ID NO: 3411630 - DNA, 25 bp, Homo sapien
tgaactctgtcacatcggtgaaatt

SEQ ID NO: 3411631 - DNA, 25 bp, Homo sapien
acggctcgttagccccaaaagaatg

SEQ ID NO: 3411632 - DNA, 25 bp, Homo sapien
atgaactctgtcacatcggtgaaat

SEQ ID NO: 3411633 - DNA, 25 bp, Homo sapien
acattttaggggtgacattggaaga

SEQ ID NO: 3411634 - DNA, 25 bp, Homo sapien
caacattttaggggtgacattggaa

SEQ ID NO: 3411635 - DNA, 25 bp, Homo sapien
ttccaacattttaggggtgacattg

SEQ ID NO: 3411636 - DNA, 25 bp, Homo sapien
tccaacattttaggggtgacattgg

SEQ ID NO: 3411637 - DNA, 25 bp, Homo sapien
taaacagccagcataagaaattgtt

SEQ ID NO: 3411638 - DNA, 25 bp, Homo sapien
aaacagccagcataagaaattgttt

SEQ ID NO: 3411639 - DNA, 25 bp, Homo sapien
ctaaacagccagcataagaaattgt

SEQ ID NO: 3411640 - DNA, 25 bp, Homo sapien
tgaggatgaataagtaagagatgat

SEQ ID NO: 3411641 - DNA, 25 bp, Homo sapien
ccattttgatgagaggtggatctgc

SEQ ID NO: 3411642 - DNA, 25 bp, Homo sapien
gaaagtaatcagtcgaatacagaca

SEQ ID NO: 3411643 - DNA, 25 bp, Homo sapien
tctgctgagcgcattcgcagaatgg

SEQ ID NO: 3411644 - DNA, 25 bp, Homo sapien
atgaagatcagagtaccatagaata

SEQ ID NO: 3411645 - DNA, 25 bp, Homo sapien
tttcatcatggcctttttcacatcc

SEQ ID NO: 3411646 - DNA, 25 bp, Homo sapien
tgaagatcagagtaccatagaatat

SEQ ID NO: 3411647 - DNA, 25 bp, Homo sapien
catgaagatcagagtaccatagaat

SEQ ID NO: 3411648 - DNA, 25 bp, Homo sapien
cagataaaaactgccctatggtggg

SEQ ID NO: 3411649 - DNA, 25 bp, Homo sapien
ggtgagacacgtttgcagcaatgct

SEQ ID NO: 3411650 - DNA, 25 bp, Homo sapien
tctgagatcagataaaaactgccct

SEQ ID NO: 3411651 - DNA, 25 bp, Homo sapien
gatcagataaaaactgccctatggt

SEQ ID NO: 3411652 - DNA, 25 bp, Homo sapien
gtaaccataatgtcattgatgttta

SEQ ID NO: 3411653 - DNA, 25 bp, Homo sapien
tttatgactgactttagcaatacaa

SEQ ID NO: 3411654 - DNA, 25 bp, Homo sapien
tgactgactttagcaatacaaaacc

SEQ ID NO: 3411655 - DNA, 25 bp, Homo sapien
cataatgtcattgatgtttatgact

SEQ ID NO: 3411656 - DNA, 25 bp, Homo sapien
tatggaaccctgttctgcatgtacg

SEQ ID NO: 3411657 - DNA, 25 bp, Homo sapien
accctgttctgcatgtacgttagac

SEQ ID NO: 3411658 - DNA, 25 bp, Homo sapien
tgactgtgttttatggaaccctgtt

SEQ ID NO: 3411659 - DNA, 25 bp, Homo sapien
ctgtgttttatggaaccctgttctg

SEQ ID NO: 3411660 - DNA, 25 bp, Homo sapien
aaagtaggcacaaagcgttctccac

SEQ ID NO: 3411661 - DNA, 25 bp, Homo sapien
gaaagtaggcacaaagcgttctcca

SEQ ID NO: 3411662 - DNA, 25 bp, Homo sapien
tcttagtggactgatggaaaccatg

SEQ ID NO: 3411663 - DNA, 25 bp, Homo sapien
tctgtattcgcctgattgctggtcc

SEQ ID NO: 3411664 - DNA, 25 bp, Homo sapien
ggacataccacttgaccttctgtgg

SEQ ID NO: 3411665 - DNA, 25 bp, Homo sapien
cctatgataggtatgtggccatctg

SEQ ID NO: 3411666 - DNA, 25 bp, Homo sapien
tgcctgcccctgggaactgaatgtc

SEQ ID NO: 3411667 - DNA, 25 bp, Homo sapien
ccctgggaactgaatgtctcggtat

SEQ ID NO: 3411668 - DNA, 25 bp, Homo sapien
cctgggaactgaatgtctcggtata

SEQ ID NO: 3411669 - DNA, 25 bp, Homo sapien
ctgcccctgggaactgaatgtctcg

SEQ ID NO: 3411670 - DNA, 25 bp, Homo sapien
tttcaaggaacgctgtttcacatgt

SEQ ID NO: 3411671 - DNA, 25 bp, Homo sapien
acctgcgggtcccttgtgactgccg

SEQ ID NO: 3411672 - DNA, 25 bp, Homo sapien
ctgtttcacatgtgcctgaggcccc

SEQ ID NO: 3411673 - DNA, 25 bp, Homo sapien
tgactgccgtcactgtctttcaagg

SEQ ID NO: 3411674 - DNA, 25 bp, Homo sapien
tggtggctggttccaacctcatctg

SEQ ID NO: 3411675 - DNA, 25 bp, Homo sapien
ggtggctggttccaacctcatctgc

SEQ ID NO: 3411676 - DNA, 25 bp, Homo sapien
agtgaagctgagtcctacacagctg

SEQ ID NO: 3411677 - DNA, 25 bp, Homo sapien
aagctgagtcctacacagctgactt

SEQ ID NO: 3411678 - DNA, 25 bp, Homo sapien
caccagtgaagctgagtcctacaca

SEQ ID NO: 3411679 - DNA, 25 bp, Homo sapien
gctgagtcctacacagctgacttcc

SEQ ID NO: 3411680 - DNA, 25 bp, Homo sapien
gacttctcctggtcccttggtgttc

SEQ ID NO: 3411681 - DNA, 25 bp, Homo sapien
tccccagtaacaatggacttctcct

SEQ ID NO: 3411682 - DNA, 25 bp, Homo sapien
cctggtcccttggtgttctgtccat

SEQ ID NO: 3411683 - DNA, 25 bp, Homo sapien
gtaacaatggacttctcctggtccc

SEQ ID NO: 3411684 - DNA, 25 bp, Homo sapien
aagaagaatgtgccagatacaaaaa

SEQ ID NO: 3411685 - DNA, 25 bp, Homo sapien
agaagaatgtgccagatacaaaaag

SEQ ID NO: 3411686 - DNA, 25 bp, Homo sapien
gctagtcagtcccaacagaataaat

SEQ ID NO: 3411687 - DNA, 25 bp, Homo sapien
gctctggctggctagtcagtcccaa

SEQ ID NO: 3411688 - DNA, 25 bp, Homo sapien
tacctccgtgccattgcatttggga

SEQ ID NO: 3411689 - DNA, 25 bp, Homo sapien
gaataaattcagttacctccgtgcc

SEQ ID NO: 3411690 - DNA, 25 bp, Homo sapien
aatcatcccaaatttcccagtcagg

SEQ ID NO: 3411691 - DNA, 25 bp, Homo sapien
ctgaggagtgaatctgattaggaaa

SEQ ID NO: 3411692 - DNA, 25 bp, Homo sapien
cccagtcagggtgatgaggtaaatc

SEQ ID NO: 3411693 - DNA, 25 bp, Homo sapien
ccagtcagggtgatgaggtaaatca

SEQ ID NO: 3411694 - DNA, 25 bp, Homo sapien
aagacaaaacactgggccagacacc

SEQ ID NO: 3411695 - DNA, 25 bp, Homo sapien
gtaatactcagtaaggagcagagtc

SEQ ID NO: 3411696 - DNA, 25 bp, Homo sapien
aatactcagtaaggagcagagtcac

SEQ ID NO: 3411697 - DNA, 25 bp, Homo sapien
ggccagacacccagcgtaggaaatg

SEQ ID NO: 3411698 - DNA, 25 bp, Homo sapien
tggaacggatcctcataatggtgat

SEQ ID NO: 3411699 - DNA, 25 bp, Homo sapien
ggttaatccctgctgacacaaacaa

SEQ ID NO: 3411700 - DNA, 25 bp, Homo sapien
gtcagtattacttgcatcgtgccca

SEQ ID NO: 3411701 - DNA, 25 bp, Homo sapien
caaaaaaggacaaacgagaggtcag

SEQ ID NO: 3411702 - DNA, 25 bp, Homo sapien
tgctcaacagacagctcatttgttg

SEQ ID NO: 3411703 - DNA, 25 bp, Homo sapien
caaggcctgtttcacatccttgttt

SEQ ID NO: 3411704 - DNA, 25 bp, Homo sapien
tcttttcaaggcctgtttcacatcc

SEQ ID NO: 3411705 - DNA, 25 bp, Homo sapien
tttcaaggcctgtttcacatccttg

SEQ ID NO: 3411706 - DNA, 25 bp, Homo sapien
cttttcaaggcctgtttcacatcct

SEQ ID NO: 3411707 - DNA, 25 bp, Homo sapien
actgtagttactgaatttttcttcg

SEQ ID NO: 3411708 - DNA, 25 bp, Homo sapien
attgggaaactgtagttactgaatt

SEQ ID NO: 3411709 - DNA, 25 bp, Homo sapien
ttattgggaaactgtagttactgaa

SEQ ID NO: 3411710 - DNA, 25 bp, Homo sapien
tgtagttactgaatttttcttcgtc

SEQ ID NO: 3411711 - DNA, 25 bp, Homo sapien
cacagtagtcatccccatgttgaat

SEQ ID NO: 3411712 - DNA, 25 bp, Homo sapien
tgtgcttcccacttggcggtggtca

SEQ ID NO: 3411713 - DNA, 25 bp, Homo sapien
gctccagctactcaatggatcaaga

SEQ ID NO: 3411714 - DNA, 25 bp, Homo sapien
tgttcatgtatctctgcgtcccagc

SEQ ID NO: 3411715 - DNA, 25 bp, Homo sapien
tacccagttctcgtgtctgggagaa

SEQ ID NO: 3411716 - DNA, 25 bp, Homo sapien
gcaggttgtggaaatgcagccatac

SEQ ID NO: 3411717 - DNA, 25 bp, Homo sapien
tgaagatgccttcgttagagggcag

SEQ ID NO: 3411718 - DNA, 25 bp, Homo sapien
taatagctacctccttcttagcagg

SEQ ID NO: 3411719 - DNA, 25 bp, Homo sapien
ggaagaccacgaagaagatgatctc

SEQ ID NO: 3411720 - DNA, 25 bp, Homo sapien
cattaaccaggtaaactatgaggaa

SEQ ID NO: 3411721 - DNA, 25 bp, Homo sapien
actcagtcaccattgagctgttttc

SEQ ID NO: 3411722 - DNA, 25 bp, Homo sapien
ctgggtgatgcccatgaagataaac

SEQ ID NO: 3411723 - DNA, 25 bp, Homo sapien
gagataactttgtgatttgttagga

SEQ ID NO: 3411724 - DNA, 25 bp, Homo sapien
gctggagaaggagataactttgtga

SEQ ID NO: 3411725 - DNA, 25 bp, Homo sapien
caatggctgaggagtagcccaggtc

SEQ ID NO: 3411726 - DNA, 25 bp, Homo sapien
aaaaagcaaactgggtggcacagct

SEQ ID NO: 3411727 - DNA, 25 bp, Homo sapien
ttaaggcggccttcagctgaacgca

SEQ ID NO: 3411728 - DNA, 25 bp, Homo sapien
cagaggcccacttgtcttggtccag

SEQ ID NO: 3411729 - DNA, 25 bp, Homo sapien
tgatgccagtaaggtgagacccgca

SEQ ID NO: 3411730 - DNA, 25 bp, Homo sapien
tggaaccacagtaactcaggctgaa

SEQ ID NO: 3411731 - DNA, 25 bp, Homo sapien
ttattgagatttttttccaattagc

SEQ ID NO: 3411732 - DNA, 25 bp, Homo sapien
ttagctttttgaaagcagctttcac

SEQ ID NO: 3411733 - DNA, 25 bp, Homo sapien
ttttccaattagctttttgaaagca

SEQ ID NO: 3411734 - DNA, 25 bp, Homo sapien
attgagatttttttccaattagctt

SEQ ID NO: 3411735 - DNA, 25 bp, Homo sapien
ttcttagagccccagaattattgga

SEQ ID NO: 3411736 - DNA, 25 bp, Homo sapien
tcttgctaaaatcagccttagagat

SEQ ID NO: 3411737 - DNA, 25 bp, Homo sapien
gagccccagaattattggatttcct

SEQ ID NO: 3411738 - DNA, 25 bp, Homo sapien
gattgcatccagctttatctttctt

SEQ ID NO: 3411739 - DNA, 25 bp, Homo sapien
gaaccaagatgtgaaaggagctcga

SEQ ID NO: 3411740 - DNA, 25 bp, Homo sapien
ggaaccaagatgtgaaaggagctcg

SEQ ID NO: 3411741 - DNA, 25 bp, Homo sapien
aaccaagatgtgaaaggagctcgaa

SEQ ID NO: 3411742 - DNA, 25 bp, Homo sapien
ccaagatgtgaaaggagctcgaagg

SEQ ID NO: 3411743 - DNA, 25 bp, Homo sapien
cattgcggttttctacacggtggtc

SEQ ID NO: 3411744 - DNA, 25 bp, Homo sapien
catgcttaaccccttgatttacagc

SEQ ID NO: 3411745 - DNA, 25 bp, Homo sapien
cttcatggacatgagaccacagtcg

SEQ ID NO: 3411746 - DNA, 25 bp, Homo sapien
ggtaaccttatttatgggactgcca

SEQ ID NO: 3411747 - DNA, 25 bp, Homo sapien
ctgaatcactttttctgtgaggtac

SEQ ID NO: 3411748 - DNA, 25 bp, Homo sapien
cattatggaccaaaacacctgcatt

SEQ ID NO: 3411749 - DNA, 25 bp, Homo sapien
tgttctcacgttgagtttgccctac

SEQ ID NO: 3411750 - DNA, 25 bp, Homo sapien
tgtgggcctaatatcctgaatcact

SEQ ID NO: 3411751 - DNA, 25 bp, Homo sapien
cctctcctttggaatgattgtgtcc

SEQ ID NO: 3411752 - DNA, 25 bp, Homo sapien
tcatggcttatgacagatatgtagc

SEQ ID NO: 3411753 - DNA, 25 bp, Homo sapien
tccttggtgtcatggcttatgacag

SEQ ID NO: 3411754 - DNA, 25 bp, Homo sapien
ttggaatgattgtgtcctccttggt

SEQ ID NO: 3411755 - DNA, 25 bp, Homo sapien
gcaacttgccgtgactgtaagctca

SEQ ID NO: 3411756 - DNA, 25 bp, Homo sapien
tccactcccttaggaaccagtttgc

SEQ ID NO: 3411757 - DNA, 25 bp, Homo sapien
tgcttcctttactgcaacttgccgt

SEQ ID NO: 3411758 - DNA, 25 bp, Homo sapien
ccagtttgcttcctttactgcaact

SEQ ID NO: 3411759 - DNA, 25 bp, Homo sapien
ggcatggcccgcttaagtgccactc

SEQ ID NO: 3411760 - DNA, 25 bp, Homo sapien
agccatcgtctgtgctggagagcct

SEQ ID NO: 3411761 - DNA, 25 bp, Homo sapien
tagccatcgtctgtgctggagagcc

SEQ ID NO: 3411762 - DNA, 25 bp, Homo sapien
gtagccatcgtctgtgctggagagc

SEQ ID NO: 3411763 - DNA, 25 bp, Homo sapien
catcataggagtaaccacggtagcc

SEQ ID NO: 3411764 - DNA, 25 bp, Homo sapien
gagtaaccacggtagcctttggatg

SEQ ID NO: 3411765 - DNA, 25 bp, Homo sapien
cggtagcctttggatgcatagtaag

SEQ ID NO: 3411766 - DNA, 25 bp, Homo sapien
ggaatgtcatcataggagtaaccac

SEQ ID NO: 3411767 - DNA, 25 bp, Homo sapien
tgatgacatactacaaggtgctagc

SEQ ID NO: 3411768 - DNA, 25 bp, Homo sapien
ccaacctactggtgaactggatcag

SEQ ID NO: 3411769 - DNA, 25 bp, Homo sapien
ccggccgttaaaggaataatctgca

SEQ ID NO: 3411770 - DNA, 25 bp, Homo sapien
gatatcttaaagctgggacagttcc

SEQ ID NO: 3411771 - DNA, 25 bp, Homo sapien
gagctcaccctctgtatcagaagtg

SEQ ID NO: 3411772 - DNA, 25 bp, Homo sapien
gaccatagatcctgaaaacgttaat

SEQ ID NO: 3411773 - DNA, 25 bp, Homo sapien
aacgttaatattgtcactgagctca

SEQ ID NO: 3411774 - DNA, 25 bp, Homo sapien
tagttctataatggactcctagacc

SEQ ID NO: 3411775 - DNA, 25 bp, Homo sapien
gtgagagagtacacgcccaggaaca

SEQ ID NO: 3411776 - DNA, 25 bp, Homo sapien
tatgagactgctaccagcaatgcac

SEQ ID NO: 3411777 - DNA, 25 bp, Homo sapien
caatgatgttttcacggcagaagtt

SEQ ID NO: 3411778 - DNA, 25 bp, Homo sapien
tgctatttcctaccacagtgagaga

SEQ ID NO: 3411779 - DNA, 25 bp, Homo sapien
gaagttttttcagagcctctttcac

SEQ ID NO: 3411780 - DNA, 25 bp, Homo sapien
tgggagaagttttttcagagcctct

SEQ ID NO: 3411781 - DNA, 25 bp, Homo sapien
ttatgggagaagttttttcagagcc

SEQ ID NO: 3411782 - DNA, 25 bp, Homo sapien
agaagttttttcagagcctctttca

SEQ ID NO: 3411783 - DNA, 25 bp, Homo sapien
gtgctacttcctaccacagtcagac

SEQ ID NO: 3411784 - DNA, 25 bp, Homo sapien
tcctaccacagtcagacagtacaca

SEQ ID NO: 3411785 - DNA, 25 bp, Homo sapien
cacagtcagacagtacacacccagg

SEQ ID NO: 3411786 - DNA, 25 bp, Homo sapien
agtcagacagtacacacccaggaac

SEQ ID NO: 3411787 - DNA, 25 bp, Homo sapien
gtagctctcacactgcatgccagct

SEQ ID NO: 3411788 - DNA, 25 bp, Homo sapien
gaagactttgatgcggccctgggta

SEQ ID NO: 3411789 - DNA, 25 bp, Homo sapien
caatctccttggcatggtctgagca

SEQ ID NO: 3411790 - DNA, 25 bp, Homo sapien
ccatagtataaggtaacggagatca

SEQ ID NO: 3411791 - DNA, 25 bp, Homo sapien
ggatcagagatctgggctgctgcag

SEQ ID NO: 3411792 - DNA, 25 bp, Homo sapien
tttcttgctctagtgaagggatcag

SEQ ID NO: 3411793 - DNA, 25 bp, Homo sapien
tgctctagtgaagggatcagagatc

SEQ ID NO: 3411794 - DNA, 25 bp, Homo sapien
tctagtgaagggatcagagatctgg

SEQ ID NO: 3411795 - DNA, 25 bp, Homo sapien
gaagatccgttccattaagggccgc

SEQ ID NO: 3411796 - DNA, 25 bp, Homo sapien
tgacggctctcaccttgtactatgg

SEQ ID NO: 3411797 - DNA, 25 bp, Homo sapien
tgtgtgatgtgaaggagcgctacca

SEQ ID NO: 3411798 - DNA, 25 bp, Homo sapien
acttgtgggtctcccctgacggctc

SEQ ID NO: 3411799 - DNA, 25 bp, Homo sapien
gtgctgattcttggccctacacacc

SEQ ID NO: 3411800 - DNA, 25 bp, Homo sapien
cttcactggaaaccggttccttctg

SEQ ID NO: 3411801 - DNA, 25 bp, Homo sapien
gtccacatccccgatatcctgctga

SEQ ID NO: 3411802 - DNA, 25 bp, Homo sapien
ctggaaaccggttccttctggatct

SEQ ID NO: 3411803 - DNA, 25 bp, Homo sapien
ttcttggggagaggctttattgcgg

SEQ ID NO: 3411804 - DNA, 25 bp, Homo sapien
gggtgccatatgctgatttgaagct

SEQ ID NO: 3411805 - DNA, 25 bp, Homo sapien
catatgctgatttgaagcttggttg

SEQ ID NO: 3411806 - DNA, 25 bp, Homo sapien
gctgatttgaagcttggttggtgaa

SEQ ID NO: 3411807 - DNA, 25 bp, Homo sapien
tccactccgattttcttgcaagggt

SEQ ID NO: 3411808 - DNA, 25 bp, Homo sapien
actccgattttcttgcaagggtctg

SEQ ID NO: 3411809 - DNA, 25 bp, Homo sapien
ttattttccactccgattttcttgc

SEQ ID NO: 3411810 - DNA, 25 bp, Homo sapien
ttttccactccgattttcttgcaag

SEQ ID NO: 3411811 - DNA, 25 bp, Homo sapien
ccccttgtatagaatgtaagataaa

SEQ ID NO: 3411812 - DNA, 25 bp, Homo sapien
gggcaaatggttaggctcactcatc

SEQ ID NO: 3411813 - DNA, 25 bp, Homo sapien
tgcctgcagaggaagtctggcaaga

SEQ ID NO: 3411814 - DNA, 25 bp, Homo sapien
gaagtctggcaagattgcctccagg

SEQ ID NO: 3411815 - DNA, 25 bp, Homo sapien
tgccctcttctttaagcacagtcag

SEQ ID NO: 3411816 - DNA, 25 bp, Homo sapien
cgctttggttcagctggtgatgata

SEQ ID NO: 3411817 - DNA, 25 bp, Homo sapien
tctccaagttctcgctttggttcag

SEQ ID NO: 3411818 - DNA, 25 bp, Homo sapien
aagaactgtgttcttccctgtctcc

SEQ ID NO: 3411819 - DNA, 25 bp, Homo sapien
gaagtgcagttggaatgtatcaaat

SEQ ID NO: 3411820 - DNA, 25 bp, Homo sapien
aggtgcacgggtagtcctcagagaa

SEQ ID NO: 3411821 - DNA, 25 bp, Homo sapien
ctctgagcagcccaaatgaatggca

SEQ ID NO: 3411822 - DNA, 25 bp, Homo sapien
taggattcatgctgtgaggtgcacg

SEQ ID NO: 3411823 - DNA, 25 bp, Homo sapien
gacaaggtaagagagcagttttccc

SEQ ID NO: 3411824 - DNA, 25 bp, Homo sapien
tgtagacaaggtaagagagcagttt

SEQ ID NO: 3411825 - DNA, 25 bp, Homo sapien
caaggtaagagagcagttttcccaa

SEQ ID NO: 3411826 - DNA, 25 bp, Homo sapien
tgtgtagacaaggtaagagagcagt

SEQ ID NO: 3411827 - DNA, 25 bp, Homo sapien
ctctgctaatcctgtgagatccacc

SEQ ID NO: 3411828 - DNA, 25 bp, Homo sapien
tcatgaggagggaggttacactgca

SEQ ID NO: 3411829 - DNA, 25 bp, Homo sapien
tacactgcaatggaatttcctctgc

SEQ ID NO: 3411830 - DNA, 25 bp, Homo sapien
gctgctgtgtgggattgcatttcat

SEQ ID NO: 3411831 - DNA, 25 bp, Homo sapien
tttacttgaagtacaactggtcatc

SEQ ID NO: 3411832 - DNA, 25 bp, Homo sapien
cttggtaccttgagaggatttggat

SEQ ID NO: 3411833 - DNA, 25 bp, Homo sapien
tagctgaaggacatgatccaatttg

SEQ ID NO: 3411834 - DNA, 25 bp, Homo sapien
gacaggttttaagtagctgaaggac

SEQ ID NO: 3411835 - DNA, 25 bp, Homo sapien
ttgaatcctcctaacctacatgtgg

SEQ ID NO: 3411836 - DNA, 25 bp, Homo sapien
gggagcctgccctaagtattgttgg

SEQ ID NO: 3411837 - DNA, 25 bp, Homo sapien
gagatacacatgtcctgtcagcgtg

SEQ ID NO: 3411838 - DNA, 25 bp, Homo sapien
gaaagtgtggatgaatgaggctccc

SEQ ID NO: 3411839 - DNA, 25 bp, Homo sapien
ctcttttgttccaaggtccagctcg

SEQ ID NO: 3411840 - DNA, 25 bp, Homo sapien
tgttccaaggtccagctcggattgc

SEQ ID NO: 3411841 - DNA, 25 bp, Homo sapien
ggtccagctcggattgccccttctc

SEQ ID NO: 3411842 - DNA, 25 bp, Homo sapien
cttctctgagtagcctttcccagtc

SEQ ID NO: 3411843 - DNA, 25 bp, Homo sapien
gtagtcttaatctgttctgagtacg

SEQ ID NO: 3411844 - DNA, 25 bp, Homo sapien
tatgtgctcagaaatcaagtcttga

SEQ ID NO: 3411845 - DNA, 25 bp, Homo sapien
tgtgtctgtgtattcagggatttct

SEQ ID NO: 3411846 - DNA, 25 bp, Homo sapien
tgtgctcagaaatcaagtcttgaat

SEQ ID NO: 3411847 - DNA, 25 bp, Homo sapien
gctccttagtaaagagcctaggcca

SEQ ID NO: 3411848 - DNA, 25 bp, Homo sapien
tctctagtctcgtggaagcatcctc

SEQ ID NO: 3411849 - DNA, 25 bp, Homo sapien
ccttgatgaaggctaggccaccttc

SEQ ID NO: 3411850 - DNA, 25 bp, Homo sapien
cctgaatcttttgtgccttgatgaa

SEQ ID NO: 3411851 - DNA, 25 bp, Homo sapien
gaaaacttctgagcctagttgtctc

SEQ ID NO: 3411852 - DNA, 25 bp, Homo sapien
cattccattgcagtatgatacctac

SEQ ID NO: 3411853 - DNA, 25 bp, Homo sapien
tgaaatttctaatcctcgcctctga

SEQ ID NO: 3411854 - DNA, 25 bp, Homo sapien
aacctcatagtgagcaccttcccag

SEQ ID NO: 3411855 - DNA, 25 bp, Homo sapien
catgctgaggcttttcctgggcgtg

SEQ ID NO: 3411856 - DNA, 25 bp, Homo sapien
tcacccgggtatgactgattccttc

SEQ ID NO: 3411857 - DNA, 25 bp, Homo sapien
ttttggctgatgcttctcacccggg

SEQ ID NO: 3411858 - DNA, 25 bp, Homo sapien
tcggcctcgtgattatgcctctgga

SEQ ID NO: 3411859 - DNA, 25 bp, Homo sapien
cacagtggttgaggacctggtgccc

SEQ ID NO: 3411860 - DNA, 25 bp, Homo sapien
ggtgcccacccggatgcctgtcggc

SEQ ID NO: 3411861 - DNA, 25 bp, Homo sapien
gtgcccacccggatgcctgtcggcc

SEQ ID NO: 3411862 - DNA, 25 bp, Homo sapien
acagtggttgaggacctggtgccca

SEQ ID NO: 3411863 - DNA, 25 bp, Homo sapien
ccctaaggcaatggctagagcaagt

SEQ ID NO: 3411864 - DNA, 25 bp, Homo sapien
ctaaggcaatggctagagcaagtct

SEQ ID NO: 3411865 - DNA, 25 bp, Homo sapien
gccctaaggcaatggctagagcaag

SEQ ID NO: 3411866 - DNA, 25 bp, Homo sapien
ctgccctaaggcaatggctagagca

SEQ ID NO: 3411867 - DNA, 25 bp, Homo sapien
agccacagatgaagactcctgctcc

SEQ ID NO: 3411868 - DNA, 25 bp, Homo sapien
ctagccacagatgaagactcctgct

SEQ ID NO: 3411869 - DNA, 25 bp, Homo sapien
ccacagatgaagactcctgctccca

SEQ ID NO: 3411870 - DNA, 25 bp, Homo sapien
acagatgaagactcctgctcccaca

SEQ ID NO: 3411871 - DNA, 25 bp, Homo sapien
cggggatgccgcagagattttcaga

SEQ ID NO: 3411872 - DNA, 25 bp, Homo sapien
agtcctggaacagtgtactgacaat

SEQ ID NO: 3411873 - DNA, 25 bp, Homo sapien
tgtaacaacacatacggggatgccg

SEQ ID NO: 3411874 - DNA, 25 bp, Homo sapien
cctggaacagtgtactgacaataat

SEQ ID NO: 3411875 - DNA, 25 bp, Homo sapien
taaatcagagatacctgtcagaggc

SEQ ID NO: 3411876 - DNA, 25 bp, Homo sapien
ctgtaaatcagagatacctgtcaga

SEQ ID NO: 3411877 - DNA, 25 bp, Homo sapien
tgcttatccacagatccgttccttt

SEQ ID NO: 3411878 - DNA, 25 bp, Homo sapien
ctttgaagagacatgcttatccaca

SEQ ID NO: 3411879 - DNA, 25 bp, Homo sapien
agtggcttcaggtacaactgcacaa

SEQ ID NO: 3411880 - DNA, 25 bp, Homo sapien
tcaggtacaactgcacaatgtcaag

SEQ ID NO: 3411881 - DNA, 25 bp, Homo sapien
tggggcaagttctccaatgagcagt

SEQ ID NO: 3411882 - DNA, 25 bp, Homo sapien
aactgcacaatgtcaagctctggat

SEQ ID NO: 3411883 - DNA, 25 bp, Homo sapien
gaacatagtaacaggccagccactg

SEQ ID NO: 3411884 - DNA, 25 bp, Homo sapien
tgatacactattagccacgccagca

SEQ ID NO: 3411885 - DNA, 25 bp, Homo sapien
cagccactgccaaaatgatacacta

SEQ ID NO: 3411886 - DNA, 25 bp, Homo sapien
tgttcatagcctctgcgatgctcca

SEQ ID NO: 3411887 - DNA, 25 bp, Homo sapien
gtgtcaggcagcagctgacaccaat

SEQ ID NO: 3411888 - DNA, 25 bp, Homo sapien
ttgccaagaagtgtcaggcagcagc

SEQ ID NO: 3411889 - DNA, 25 bp, Homo sapien
cttgccaagaagtgtcaggcagcag

SEQ ID NO: 3411890 - DNA, 25 bp, Homo sapien
gaagtgtcaggcagcagctgacacc

SEQ ID NO: 3411891 - DNA, 25 bp, Homo sapien
ccccgcgtcatgctgcaaaaatgag

SEQ ID NO: 3411892 - DNA, 25 bp, Homo sapien
aaggtgccccgcgtcatgctgcaaa

SEQ ID NO: 3411893 - DNA, 25 bp, Homo sapien
ctaaatatggaaaggtgccccgcgt

SEQ ID NO: 3411894 - DNA, 25 bp, Homo sapien
atatggaaaggtgccccgcgtcatg

SEQ ID NO: 3411895 - DNA, 25 bp, Homo sapien
caaatttatgcaccacgtggttcca

SEQ ID NO: 3411896 - DNA, 25 bp, Homo sapien
cacaaatttatgcaccacgtggttc

SEQ ID NO: 3411897 - DNA, 25 bp, Homo sapien
catcacaaatttatgcaccacgtgg

SEQ ID NO: 3411898 - DNA, 25 bp, Homo sapien
ggcacatcacaaatttatgcaccac

SEQ ID NO: 3411899 - DNA, 25 bp, Homo sapien
gatgttcggctttacgtgttgttca

SEQ ID NO: 3411900 - DNA, 25 bp, Homo sapien
agtgggtccgtgtcaatatctgggt

SEQ ID NO: 3411901 - DNA, 25 bp, Homo sapien
taattccaccggtctgctgacaggc

SEQ ID NO: 3411902 - DNA, 25 bp, Homo sapien
tacgtgttgttcaaagtgccagtaa

SEQ ID NO: 3411903 - DNA, 25 bp, Homo sapien
tttcctcggtgctcaagatttctaa

SEQ ID NO: 3411904 - DNA, 25 bp, Homo sapien
caggaacatttcctcggtgctcaag

SEQ ID NO: 3411905 - DNA, 25 bp, Homo sapien
cggtgctcaagatttctaagtgtac

SEQ ID NO: 3411906 - DNA, 25 bp, Homo sapien
ggaacatttcctcggtgctcaagat

SEQ ID NO: 3411907 - DNA, 25 bp, Homo sapien
aagccagaatttccagcttgatctt

SEQ ID NO: 3411908 - DNA, 25 bp, Homo sapien
gttctcagattgtgtgtgaagccag

SEQ ID NO: 3411909 - DNA, 25 bp, Homo sapien
caaggcaaggctgtaagcctttcca

SEQ ID NO: 3411910 - DNA, 25 bp, Homo sapien
gcttgatctttccaaggcaaggctg

SEQ ID NO: 3411911 - DNA, 25 bp, Homo sapien
ctatagaaggcatgtctgaactcaa

SEQ ID NO: 3411912 - DNA, 25 bp, Homo sapien
gttttagggatgtcccaggagcagc

SEQ ID NO: 3411913 - DNA, 25 bp, Homo sapien
gaggtagcctctattgtttgtgaag

SEQ ID NO: 3411914 - DNA, 25 bp, Homo sapien
tgcttcatgaacttccctgagacaa

SEQ ID NO: 3411915 - DNA, 25 bp, Homo sapien
tgtagaagtacaggtgctgctcttc

SEQ ID NO: 3411916 - DNA, 25 bp, Homo sapien
ctcttcatagttgatgtatttgatt

SEQ ID NO: 3411917 - DNA, 25 bp, Homo sapien
tcttcatagttgatgtatttgattt

SEQ ID NO: 3411918 - DNA, 25 bp, Homo sapien
ctttgtagaagtacaggtgctgctc

SEQ ID NO: 3411919 - DNA, 25 bp, Homo sapien
tatctttggaggtacatcgcttgca

SEQ ID NO: 3411920 - DNA, 25 bp, Homo sapien
gcatggatggcagtttgagatatac

SEQ ID NO: 3411921 - DNA, 25 bp, Homo sapien
ttgagatatactggcatgaagagtg

SEQ ID NO: 3411922 - DNA, 25 bp, Homo sapien
aggtacatcgcttgcatggatggca

SEQ ID NO: 3411923 - DNA, 25 bp, Homo sapien
ggtctagtttcggagaatgagccac

SEQ ID NO: 3411924 - DNA, 25 bp, Homo sapien
ttcggagaatgagccacattactca

SEQ ID NO: 3411925 - DNA, 25 bp, Homo sapien
tctacttggtctagtttcggagaat

SEQ ID NO: 3411926 - DNA, 25 bp, Homo sapien
agtttcggagaatgagccacattac

SEQ ID NO: 3411927 - DNA, 25 bp, Homo sapien
caacatggtcccgaagattccatag

SEQ ID NO: 3411928 - DNA, 25 bp, Homo sapien
taaaagctgctaacccaggtgatgt

SEQ ID NO: 3411929 - DNA, 25 bp, Homo sapien
tgatgaaatatcagatgtaaaagct

SEQ ID NO: 3411930 - DNA, 25 bp, Homo sapien
atatatgagcaacatggtcccgaag

SEQ ID NO: 3411931 - DNA, 25 bp, Homo sapien
taacatatacaatccaaggactttc

SEQ ID NO: 3411932 - DNA, 25 bp, Homo sapien
catctgggtaacatatacaatccaa

SEQ ID NO: 3411933 - DNA, 25 bp, Homo sapien
cattctcattgttatgtggctcatc

SEQ ID NO: 3411934 - DNA, 25 bp, Homo sapien
ctgagtggtgagccagtcccggttc

SEQ ID NO: 3411935 - DNA, 25 bp, Homo sapien
gtcattgaaaaaggactattcagta

SEQ ID NO: 3411936 - DNA, 25 bp, Homo sapien
ggtgcccagtgaatcagtcattgaa

SEQ ID NO: 3411937 - DNA, 25 bp, Homo sapien
gactattcagtattacaggtggcca

SEQ ID NO: 3411938 - DNA, 25 bp, Homo sapien
ctcgatttggaagttcaggtgccca

SEQ ID NO: 3411939 - DNA, 25 bp, Homo sapien
ggagaaacacacaagagatataaaa

SEQ ID NO: 3411940 - DNA, 25 bp, Homo sapien
gacaatatctccaaatgccctcaac

SEQ ID NO: 3411941 - DNA, 25 bp, Homo sapien
cacatagtgcaatccgtgcttggca

SEQ ID NO: 3411942 - DNA, 25 bp, Homo sapien
caccagaggcgccactttgtgataa

SEQ ID NO: 3411943 - DNA, 25 bp, Homo sapien
tgccctcaacatgggtttattcaca

SEQ ID NO: 3411944 - DNA, 25 bp, Homo sapien
ttcatagtaagcatccgcccagagg

SEQ ID NO: 3411945 - DNA, 25 bp, Homo sapien
gaacagcacagtcaggtataccagt

SEQ ID NO: 3411946 - DNA, 25 bp, Homo sapien
taactaattcccagttaagcaggga

SEQ ID NO: 3411947 - DNA, 25 bp, Homo sapien
caaagtaccctgttagatggctctc

SEQ ID NO: 3411948 - DNA, 25 bp, Homo sapien
gatgttacttgttgcaacaagagaa

SEQ ID NO: 3411949 - DNA, 25 bp, Homo sapien
tacttgttgcaacaagagaaatcat

SEQ ID NO: 3411950 - DNA, 25 bp, Homo sapien
tgttacttgttgcaacaagagaaat

SEQ ID NO: 3411951 - DNA, 25 bp, Homo sapien
cgatgttacttgttgcaacaagaga

SEQ ID NO: 3411952 - DNA, 25 bp, Homo sapien
tctagattatctttatcgaagatag

SEQ ID NO: 3411953 - DNA, 25 bp, Homo sapien
tggctaggcttttaggtccacctat

SEQ ID NO: 3411954 - DNA, 25 bp, Homo sapien
gcaaataaatgatcactggctaggc

SEQ ID NO: 3411955 - DNA, 25 bp, Homo sapien
aatgatcactggctaggcttttagg

SEQ ID NO: 3411956 - DNA, 25 bp, Homo sapien
aactggcactgattgctgatcaagg

SEQ ID NO: 3411957 - DNA, 25 bp, Homo sapien
cctcatcagtgagtatatagctggg

SEQ ID NO: 3411958 - DNA, 25 bp, Homo sapien
acattctctttaggcaactggcact

SEQ ID NO: 3411959 - DNA, 25 bp, Homo sapien
taagagatcaatacccgctccctgg

SEQ ID NO: 3411960 - DNA, 25 bp, Homo sapien
ccttgtgactttttgcaataaaatg

SEQ ID NO: 3411961 - DNA, 25 bp, Homo sapien
ttgtgactttttgcaataaaatggc

SEQ ID NO: 3411962 - DNA, 25 bp, Homo sapien
aatggctctatattttaagtcactt

SEQ ID NO: 3411963 - DNA, 25 bp, Homo sapien
tgactttttgcaataaaatggctct

SEQ ID NO: 3411964 - DNA, 25 bp, Homo sapien
gaaaggaccaagagaaggacccaga

SEQ ID NO: 3411965 - DNA, 25 bp, Homo sapien
ccaagagaaggacccagaaaagcag

SEQ ID NO: 3411966 - DNA, 25 bp, Homo sapien
gaccaagagaaggacccagaaaagc

SEQ ID NO: 3411967 - DNA, 25 bp, Homo sapien
tagaaaggaccaagagaaggaccca

SEQ ID NO: 3411968 - DNA, 25 bp, Homo sapien
ctgaaattcgtgttggacaccaaat

SEQ ID NO: 3411969 - DNA, 25 bp, Homo sapien
tgaaattcgtgttggacaccaaatc

SEQ ID NO: 3411970 - DNA, 25 bp, Homo sapien
taatagctaggaggtaacagtcact

SEQ ID NO: 3411971 - DNA, 25 bp, Homo sapien
tatgagccagctacgagttggatgt

SEQ ID NO: 3411972 - DNA, 25 bp, Homo sapien
tgaccaactcagtgaacatcaagtc

SEQ ID NO: 3411973 - DNA, 25 bp, Homo sapien
gactgtttgggacatgatcatggga

SEQ ID NO: 3411974 - DNA, 25 bp, Homo sapien
caagctatagattaaaggattcaac

SEQ ID NO: 3411975 - DNA, 25 bp, Homo sapien
ttccttatttctcaagctatagatt

SEQ ID NO: 3411976 - DNA, 25 bp, Homo sapien
atttctcaagctatagattaaagga

SEQ ID NO: 3411977 - DNA, 25 bp, Homo sapien
tccttccttatttctcaagctatag

SEQ ID NO: 3411978 - DNA, 25 bp, Homo sapien
gttctgtgttggtgggaatgttcat

SEQ ID NO: 3411979 - DNA, 25 bp, Homo sapien
ttatgttctgtgttggtgggaatgt

SEQ ID NO: 3411980 - DNA, 25 bp, Homo sapien
atgttctgtgttggtgggaatgttc

SEQ ID NO: 3411981 - DNA, 25 bp, Homo sapien
ctttatgttctgtgttggtgggaat

SEQ ID NO: 3411982 - DNA, 25 bp, Homo sapien
gctgactcctctcaactctactgag

SEQ ID NO: 3411983 - DNA, 25 bp, Homo sapien
cattcttcgatgttgttacaagtag

SEQ ID NO: 3411984 - DNA, 25 bp, Homo sapien
gcaaagctcttgttgctgcttcact

SEQ ID NO: 3411985 - DNA, 25 bp, Homo sapien
caagtagttgcttcacccagtaagc

SEQ ID NO: 3411986 - DNA, 25 bp, Homo sapien
ttgtgcacctgcttagcctcttcct

SEQ ID NO: 3411987 - DNA, 25 bp, Homo sapien
ccttccctgtattgtgcacctgctt

SEQ ID NO: 3411988 - DNA, 25 bp, Homo sapien
tgtgcacctgcttagcctcttcctt

SEQ ID NO: 3411989 - DNA, 25 bp, Homo sapien
aaatggctctatatttcaagtcact

SEQ ID NO: 3411990 - DNA, 25 bp, Homo sapien
aagaagggaaatctttgagatttct

SEQ ID NO: 3411991 - DNA, 25 bp, Homo sapien
ttcttgcaatgaaatggctctatat

SEQ ID NO: 3411992 - DNA, 25 bp, Homo sapien
aaatgaccaagagaaggacccagaa

SEQ ID NO: 3411993 - DNA, 25 bp, Homo sapien
ttcctagtgtcatggctagtaaaag

SEQ ID NO: 3411994 - DNA, 25 bp, Homo sapien
tcctagtgtcatggctagtaaaagt

SEQ ID NO: 3411995 - DNA, 25 bp, Homo sapien
gtttcctagtgtcatggctagtaaa

SEQ ID NO: 3411996 - DNA, 25 bp, Homo sapien
gctgtttcctagtgtcatggctagt

SEQ ID NO: 3411997 - DNA, 25 bp, Homo sapien
tatgaaccagctaccaaacggatgc

SEQ ID NO: 3411998 - DNA, 25 bp, Homo sapien
gaagaggatacaccaaaactcatgc

SEQ ID NO: 3411999 - DNA, 25 bp, Homo sapien
aaacggatgcagactgttcgggaca

SEQ ID NO: 3412000 - DNA, 25 bp, Homo sapien
taaggatccactgccatcatagcca

SEQ ID NO: 3412001 - DNA, 25 bp, Homo sapien
caagactcaactccgttggccaaga

SEQ ID NO: 3412002 - DNA, 25 bp, Homo sapien
tttggcgcagccatcaaaggtgaaa

SEQ ID NO: 3412003 - DNA, 25 bp, Homo sapien
tgaacctgacagtcacagacgcgca

SEQ ID NO: 3412004 - DNA, 25 bp, Homo sapien
taagccatgcccaatggccacgagg

SEQ ID NO: 3412005 - DNA, 25 bp, Homo sapien
tttccctgtactttgcatctgctta

SEQ ID NO: 3412006 - DNA, 25 bp, Homo sapien
ttccctgtactttgcatctgcttac

SEQ ID NO: 3412007 - DNA, 25 bp, Homo sapien
tcctcatcagcaagtatattgctgg

SEQ ID NO: 3412008 - DNA, 25 bp, Homo sapien
ggcactgattgctgaccaaggtctc

SEQ ID NO: 3412009 - DNA, 25 bp, Homo sapien
tacacgttctcttcctgcaactggc

SEQ ID NO: 3412010 - DNA, 25 bp, Homo sapien
gggcataagagatcaatacccactc

SEQ ID NO: 3412011 - DNA, 25 bp, Homo sapien
caccaaatcccagaagacagaattc

SEQ ID NO: 3412012 - DNA, 25 bp, Homo sapien
cagaattcagtcacttcagtgctgt

SEQ ID NO: 3412013 - DNA, 25 bp, Homo sapien
ctaggcaccaaatcccagaagacag

SEQ ID NO: 3412014 - DNA, 25 bp, Homo sapien
gacagaattcagtcacttcagtgct

SEQ ID NO: 3412015 - DNA, 25 bp, Homo sapien
tgaagaggatacaccaaaactcttg

SEQ ID NO: 3412016 - DNA, 25 bp, Homo sapien
atgaagaggatacaccaaaactctt

SEQ ID NO: 3412017 - DNA, 25 bp, Homo sapien
aatgaagaggatacaccaaaactct

SEQ ID NO: 3412018 - DNA, 25 bp, Homo sapien
aaccaataattgtatcatgcagccc

SEQ ID NO: 3412019 - DNA, 25 bp, Homo sapien
tcatgcagccccaaaatgatatcaa

SEQ ID NO: 3412020 - DNA, 25 bp, Homo sapien
cataatggtccactgctatcatagc

SEQ ID NO: 3412021 - DNA, 25 bp, Homo sapien
agattgcaacataatggtccactgc

SEQ ID NO: 3412022 - DNA, 25 bp, Homo sapien
tattagaatgagactggtaagtgca

SEQ ID NO: 3412023 - DNA, 25 bp, Homo sapien
cagactgtttgggacgtgattacgg

SEQ ID NO: 3412024 - DNA, 25 bp, Homo sapien
gttgatgttattggacttgcagaaa

SEQ ID NO: 3412025 - DNA, 25 bp, Homo sapien
tatgaaccagctaccaaatggatgc

SEQ ID NO: 3412026 - DNA, 25 bp, Homo sapien
catagcagagggcaagctcaggatg

SEQ ID NO: 3412027 - DNA, 25 bp, Homo sapien
atatgtgtgtacttgaaggtgacga

SEQ ID NO: 3412028 - DNA, 25 bp, Homo sapien
tgtacttgaaggtgacgatcagcat

SEQ ID NO: 3412029 - DNA, 25 bp, Homo sapien
gcggaaaaagacacatagcagaggg

SEQ ID NO: 3412030 - DNA, 25 bp, Homo sapien
tccatgtaagagagagctccaaaga

SEQ ID NO: 3412031 - DNA, 25 bp, Homo sapien
tgctcttgaaacacagtagattcag

SEQ ID NO: 3412032 - DNA, 25 bp, Homo sapien
tagattcaggttgtaagtccatgta

SEQ ID NO: 3412033 - DNA, 25 bp, Homo sapien
gtttaacacgagagtcataatgcca

SEQ ID NO: 3412034 - DNA, 25 bp, Homo sapien
ttgatacatggctgatgccgaagat

SEQ ID NO: 3412035 - DNA, 25 bp, Homo sapien
tttccccccagattgcttccagagt

SEQ ID NO: 3412036 - DNA, 25 bp, Homo sapien
gatgccgaagatgcgctttgctttg

SEQ ID NO: 3412037 - DNA, 25 bp, Homo sapien
actgtgcagcctgataacccaccat

SEQ ID NO: 3412038 - DNA, 25 bp, Homo sapien
acttgtgttgaccagcaaatcccag

SEQ ID NO: 3412039 - DNA, 25 bp, Homo sapien
ccaagacttgtgttgaccagcaaat

SEQ ID NO: 3412040 - DNA, 25 bp, Homo sapien
gggtaaccacatagattgctagaaa

SEQ ID NO: 3412041 - DNA, 25 bp, Homo sapien
ctggggtaaccacatagattgctag

SEQ ID NO: 3412042 - DNA, 25 bp, Homo sapien
cataacggtctactgccatagcagc

SEQ ID NO: 3412043 - DNA, 25 bp, Homo sapien
taatagcttaatgcagagtctctgg

SEQ ID NO: 3412044 - DNA, 25 bp, Homo sapien
gcaataattggaggttcatcacaga

SEQ ID NO: 3412045 - DNA, 25 bp, Homo sapien
tatatgcaggaaatgatgaccacca

SEQ ID NO: 3412046 - DNA, 25 bp, Homo sapien
catcttcgggatagcagccagggta

SEQ ID NO: 3412047 - DNA, 25 bp, Homo sapien
ttcctgcagtggaagacatcttcgg

SEQ ID NO: 3412048 - DNA, 25 bp, Homo sapien
acaactgctcgtcaggtgggaagct

SEQ ID NO: 3412049 - DNA, 25 bp, Homo sapien
gagacccgttgttcccatggtgtag

SEQ ID NO: 3412050 - DNA, 25 bp, Homo sapien
cacaggtagctcaatgacttgccca

SEQ ID NO: 3412051 - DNA, 25 bp, Homo sapien
atgatgtctactgtgagcccggcct

SEQ ID NO: 3412052 - DNA, 25 bp, Homo sapien
tatcaagacaatgacgagggcagga

SEQ ID NO: 3412053 - DNA, 25 bp, Homo sapien
cccaagttcatgtagcaagtaagtg

SEQ ID NO: 3412054 - DNA, 25 bp, Homo sapien
tggagcctggaagcgcaacacacta

SEQ ID NO: 3412055 - DNA, 25 bp, Homo sapien
ctggaagcgcaacacactaacatta

SEQ ID NO: 3412056 - DNA, 25 bp, Homo sapien
ttggagcctggaagcgcaacacact

SEQ ID NO: 3412057 - DNA, 25 bp, Homo sapien
agcctggaagcgcaacacactaaca

SEQ ID NO: 3412058 - DNA, 25 bp, Homo sapien
tcattccaggtcatcagtgcttgtc

SEQ ID NO: 3412059 - DNA, 25 bp, Homo sapien
tgtccctttccctcatttgttctct

SEQ ID NO: 3412060 - DNA, 25 bp, Homo sapien
acaggcccacttttccctcctccat

SEQ ID NO: 3412061 - DNA, 25 bp, Homo sapien
tttcttcattccaggtcatcagtgc

SEQ ID NO: 3412062 - DNA, 25 bp, Homo sapien
tccaggccacacgtaggcaaaccag

SEQ ID NO: 3412063 - DNA, 25 bp, Homo sapien
attctgctgtttggacaccttgtcc

SEQ ID NO: 3412064 - DNA, 25 bp, Homo sapien
caggccacacgtaggcaaaccaggg

SEQ ID NO: 3412065 - DNA, 25 bp, Homo sapien
cctggtatgcccgtggcctctaatt

SEQ ID NO: 3412066 - DNA, 25 bp, Homo sapien
catgctttttacacggaaggagctt

SEQ ID NO: 3412067 - DNA, 25 bp, Homo sapien
acacggaaggagcttaaaggacctg

SEQ ID NO: 3412068 - DNA, 25 bp, Homo sapien
cttcatgctttttacacggaaggag

SEQ ID NO: 3412069 - DNA, 25 bp, Homo sapien
cacggaaggagcttaaaggacctga

SEQ ID NO: 3412070 - DNA, 25 bp, Homo sapien
acccaataaccttgatattctgtca

SEQ ID NO: 3412071 - DNA, 25 bp, Homo sapien
actcccacaatcacccaataacctt

SEQ ID NO: 3412072 - DNA, 25 bp, Homo sapien
atcacccaataaccttgatattctg

SEQ ID NO: 3412073 - DNA, 25 bp, Homo sapien
ccacaatcacccaataaccttgata

SEQ ID NO: 3412074 - DNA, 25 bp, Homo sapien
ccaagctgtgcttatcaaatggcat

SEQ ID NO: 3412075 - DNA, 25 bp, Homo sapien
cttatcaaatggcatggcagtgggc

SEQ ID NO: 3412076 - DNA, 25 bp, Homo sapien
gctgtgcttatcaaatggcatggca

SEQ ID NO: 3412077 - DNA, 25 bp, Homo sapien
aagggcaccaagctgtgcttatcaa

SEQ ID NO: 3412078 - DNA, 25 bp, Homo sapien
gatgatattcccctacagcttgtgt

SEQ ID NO: 3412079 - DNA, 25 bp, Homo sapien
tccagaggatgttgataaggtcatg

SEQ ID NO: 3412080 - DNA, 25 bp, Homo sapien
ctaacagtgttgactcctccttttc

SEQ ID NO: 3412081 - DNA, 25 bp, Homo sapien
cagcttgtgttcctaacagtgttga

SEQ ID NO: 3412082 - DNA, 25 bp, Homo sapien
gcctaaggccgtctgaaccaaggat

SEQ ID NO: 3412083 - DNA, 25 bp, Homo sapien
gactgtcctcaagatgtccagactg

SEQ ID NO: 3412084 - DNA, 25 bp, Homo sapien
tcccttttccgccagtcgagttgct

SEQ ID NO: 3412085 - DNA, 25 bp, Homo sapien
tatttgactgtcctcaagatgtcca

SEQ ID NO: 3412086 - DNA, 25 bp, Homo sapien
caaaccatgcctgctagaaaataaa

SEQ ID NO: 3412087 - DNA, 25 bp, Homo sapien
gaggaatcagatgtgaggcatttca

SEQ ID NO: 3412088 - DNA, 25 bp, Homo sapien
taaaatggcatttgactgcacatgc

SEQ ID NO: 3412089 - DNA, 25 bp, Homo sapien
tgccatttgcaacccaagaccctaa

SEQ ID NO: 3412090 - DNA, 25 bp, Homo sapien
ccaatagccttgctactgtggcttt

SEQ ID NO: 3412091 - DNA, 25 bp, Homo sapien
ggccccctgataaccaactgcatgt

SEQ ID NO: 3412092 - DNA, 25 bp, Homo sapien
ctgataaccaactgcatgtccccat

SEQ ID NO: 3412093 - DNA, 25 bp, Homo sapien
ggaacagccaatagccttgctactg

SEQ ID NO: 3412094 - DNA, 25 bp, Homo sapien
cctttgaagttccaagccttccaca

SEQ ID NO: 3412095 - DNA, 25 bp, Homo sapien
tgcaaaagtcagctgagatgctatg

SEQ ID NO: 3412096 - DNA, 25 bp, Homo sapien
gcaaaagtcagctgagatgctatgt

SEQ ID NO: 3412097 - DNA, 25 bp, Homo sapien
ctgcaaaagtcagctgagatgctat

SEQ ID NO: 3412098 - DNA, 25 bp, Homo sapien
tctccaggttagcagacacgagtcc

SEQ ID NO: 3412099 - DNA, 25 bp, Homo sapien
caagtggcagtgcaattttgtttgc

SEQ ID NO: 3412100 - DNA, 25 bp, Homo sapien
tctgaccttgccagcgaaggtgaca

SEQ ID NO: 3412101 - DNA, 25 bp, Homo sapien
ttaccctgattgtagcagttggcag

SEQ ID NO: 3412102 - DNA, 25 bp, Homo sapien
gaggaaagtgggaaggagcccagat

SEQ ID NO: 3412103 - DNA, 25 bp, Homo sapien
gagcccagattctgccctgagattt

SEQ ID NO: 3412104 - DNA, 25 bp, Homo sapien
cacttggaatcatgcctctgaccca

SEQ ID NO: 3412105 - DNA, 25 bp, Homo sapien
cagtcacttggaatcatgcctctga

SEQ ID NO: 3412106 - DNA, 25 bp, Homo sapien
ttggaatcatgcctctgacccattc

SEQ ID NO: 3412107 - DNA, 25 bp, Homo sapien
agccagtcacttggaatcatgcctc

SEQ ID NO: 3412108 - DNA, 25 bp, Homo sapien
tgctggccagatgtgcttagcaggc

SEQ ID NO: 3412109 - DNA, 25 bp, Homo sapien
tcctttgtgaatgtcagtgggggct

SEQ ID NO: 3412110 - DNA, 25 bp, Homo sapien
tctcttcaatttgtgattctgatgc

SEQ ID NO: 3412111 - DNA, 25 bp, Homo sapien
tcaatttgtgattctgatgctggcc

SEQ ID NO: 3412112 - DNA, 25 bp, Homo sapien
agagaaggaagcacagggcaaaatt

SEQ ID NO: 3412113 - DNA, 25 bp, Homo sapien
gaagcacagggcaaaattcacagcc

SEQ ID NO: 3412114 - DNA, 25 bp, Homo sapien
agcacagggcaaaattcacagccgc

SEQ ID NO: 3412115 - DNA, 25 bp, Homo sapien
gaaggaagcacagggcaaaattcac

SEQ ID NO: 3412116 - DNA, 25 bp, Homo sapien
tgggttcctgtcttgggttagatgc

SEQ ID NO: 3412117 - DNA, 25 bp, Homo sapien
attgctgttacccacgagccctccc

SEQ ID NO: 3412118 - DNA, 25 bp, Homo sapien
ggttcctgtcttgggttagatgcat

SEQ ID NO: 3412119 - DNA, 25 bp, Homo sapien
tctgggttcctgtcttgggttagat

SEQ ID NO: 3412120 - DNA, 25 bp, Homo sapien
tggtatcatggctagggactttccc

SEQ ID NO: 3412121 - DNA, 25 bp, Homo sapien
tgagatccacgggaggtccccttcc

SEQ ID NO: 3412122 - DNA, 25 bp, Homo sapien
tctgagcaccagagggcttcctgag

SEQ ID NO: 3412123 - DNA, 25 bp, Homo sapien
cccagttgaggtcccctagggtctg

SEQ ID NO: 3412124 - DNA, 25 bp, Homo sapien
gcgtctgtgaaggtggggcttctga

SEQ ID NO: 3412125 - DNA, 25 bp, Homo sapien
tggggccagcgtctgtgaaggtggg

SEQ ID NO: 3412126 - DNA, 25 bp, Homo sapien
gtctgtgaaggtggggcttctgagc

SEQ ID NO: 3412127 - DNA, 25 bp, Homo sapien
ccagcgtctgtgaaggtggggcttc

SEQ ID NO: 3412128 - DNA, 25 bp, Homo sapien
ggactgtgtccatggaatcgagagt

SEQ ID NO: 3412129 - DNA, 25 bp, Homo sapien
aggactgtgtccatggaatcgagag

SEQ ID NO: 3412130 - DNA, 25 bp, Homo sapien
gaggactgtgtccatggaatcgaga

SEQ ID NO: 3412131 - DNA, 25 bp, Homo sapien
aagtgtcacccatcttaggcagcag

SEQ ID NO: 3412132 - DNA, 25 bp, Homo sapien
caagtgtcacccatcttaggcagca

SEQ ID NO: 3412133 - DNA, 25 bp, Homo sapien
ctgccaagaggagggagatcagcag

SEQ ID NO: 3412134 - DNA, 25 bp, Homo sapien
tgccaagaggagggagatcagcagc

SEQ ID NO: 3412135 - DNA, 25 bp, Homo sapien
ccaagaggagggagatcagcagcat

SEQ ID NO: 3412136 - DNA, 25 bp, Homo sapien
gccaagaggagggagatcagcagca

SEQ ID NO: 3412137 - DNA, 25 bp, Homo sapien
tcgatgtggactagcccatgggcct

SEQ ID NO: 3412138 - DNA, 25 bp, Homo sapien
catgtagcatgtgaggtagccaggc

SEQ ID NO: 3412139 - DNA, 25 bp, Homo sapien
ggattgccaccgatctgcagggtca

SEQ ID NO: 3412140 - DNA, 25 bp, Homo sapien
taactgaggtccaggtctcggagct

SEQ ID NO: 3412141 - DNA, 25 bp, Homo sapien
tccctgttgactgccccgttctgcc

SEQ ID NO: 3412142 - DNA, 25 bp, Homo sapien
gactgccccgttctgcccctctatt

SEQ ID NO: 3412143 - DNA, 25 bp, Homo sapien
tttgcttcccattgaggcaagccct

SEQ ID NO: 3412144 - DNA, 25 bp, Homo sapien
tgaggcaagccctccctgttgactg

SEQ ID NO: 3412145 - DNA, 25 bp, Homo sapien
gcaatgaataggtaatcatccaggg

SEQ ID NO: 3412146 - DNA, 25 bp, Homo sapien
tcgacttcaggagggccccggcact

SEQ ID NO: 3412147 - DNA, 25 bp, Homo sapien
ttcactggccttgctccagcggtgg

SEQ ID NO: 3412148 - DNA, 25 bp, Homo sapien
gcaatggagaccacgaagcccacga

SEQ ID NO: 3412149 - DNA, 25 bp, Homo sapien
gatgctgctgacgaaactgatgaag

SEQ ID NO: 3412150 - DNA, 25 bp, Homo sapien
tagagagatctgtcccaagtcagcg

SEQ ID NO: 3412151 - DNA, 25 bp, Homo sapien
gatgttcccaattcctagcgtgccg

SEQ ID NO: 3412152 - DNA, 25 bp, Homo sapien
tatccggtgctgaacaaatagaggg

SEQ ID NO: 3412153 - DNA, 25 bp, Homo sapien
cgactttatagccttctttctgttc

SEQ ID NO: 3412154 - DNA, 25 bp, Homo sapien
agccttctttctgttccaccccatg

SEQ ID NO: 3412155 - DNA, 25 bp, Homo sapien
cttctttctgttccaccccatgcat

SEQ ID NO: 3412156 - DNA, 25 bp, Homo sapien
tagccttctttctgttccaccccat

SEQ ID NO: 3412157 - DNA, 25 bp, Homo sapien
tcacaaccccttgccggcaggataa

SEQ ID NO: 3412158 - DNA, 25 bp, Homo sapien
tcagtatctgagctcgagttgccta

SEQ ID NO: 3412159 - DNA, 25 bp, Homo sapien
gagttgcctactttcctggatatcc

SEQ ID NO: 3412160 - DNA, 25 bp, Homo sapien
gataaactccgaattccctggactg

SEQ ID NO: 3412161 - DNA, 25 bp, Homo sapien
gcctagtctccccatcttaagatag

SEQ ID NO: 3412162 - DNA, 25 bp, Homo sapien
aactgggacagaagcagaggaggct

SEQ ID NO: 3412163 - DNA, 25 bp, Homo sapien
agcatctttcacagagtcacctcct

SEQ ID NO: 3412164 - DNA, 25 bp, Homo sapien
aaattgtccctctgaggccgccgtg

SEQ ID NO: 3412165 - DNA, 25 bp, Homo sapien
caagtgtgcagatagcatgatgtct

SEQ ID NO: 3412166 - DNA, 25 bp, Homo sapien
gaaagtgaaggacaagacatgagcg

SEQ ID NO: 3412167 - DNA, 25 bp, Homo sapien
catgatgtctacactgccagagaga

SEQ ID NO: 3412168 - DNA, 25 bp, Homo sapien
catcttgaccctccctggaatgacg

SEQ ID NO: 3412169 - DNA, 25 bp, Homo sapien
ttcttctagcccctgagccataagg

SEQ ID NO: 3412170 - DNA, 25 bp, Homo sapien
tccttttgctaagggttcttctagc

SEQ ID NO: 3412171 - DNA, 25 bp, Homo sapien
tcagcgtcagaatcatcagctgggt

SEQ ID NO: 3412172 - DNA, 25 bp, Homo sapien
ggttctagcgcctgttcagcgtcag

SEQ ID NO: 3412173 - DNA, 25 bp, Homo sapien
gaagttggcatgtaagaagactccg

SEQ ID NO: 3412174 - DNA, 25 bp, Homo sapien
gttggcatgtaagaagactccggtg

SEQ ID NO: 3412175 - DNA, 25 bp, Homo sapien
atcggaagttggcatgtaagaagac

SEQ ID NO: 3412176 - DNA, 25 bp, Homo sapien
catgtaagaagactccggtgcaatc

SEQ ID NO: 3412177 - DNA, 25 bp, Homo sapien
gggatttttcccgtggcaaggatca

SEQ ID NO: 3412178 - DNA, 25 bp, Homo sapien
tgagaggctacaaaagtcaggggat

SEQ ID NO: 3412179 - DNA, 25 bp, Homo sapien
gcaaggatcagaacttctgcgttcc

SEQ ID NO: 3412180 - DNA, 25 bp, Homo sapien
gatcagaacttctgcgttcccatgg

SEQ ID NO: 3412181 - DNA, 25 bp, Homo sapien
caagccagacccgactcttccttga

SEQ ID NO: 3412182 - DNA, 25 bp, Homo sapien
cttcaagccagacccgactcttcct

SEQ ID NO: 3412183 - DNA, 25 bp, Homo sapien
agccagacccgactcttccttgatg

SEQ ID NO: 3412184 - DNA, 25 bp, Homo sapien
ggcttcaagccagacccgactcttc

SEQ ID NO: 3412185 - DNA, 25 bp, Homo sapien
tgactgggctggctgagcctttatc

SEQ ID NO: 3412186 - DNA, 25 bp, Homo sapien
cctccgaatttgtactgactgggct

SEQ ID NO: 3412187 - DNA, 25 bp, Homo sapien
ctgggctggctgagcctttatcttc

SEQ ID NO: 3412188 - DNA, 25 bp, Homo sapien
gctggctgagcctttatcttctgca

SEQ ID NO: 3412189 - DNA, 25 bp, Homo sapien
agcaaatctgagacgaagacctggg

SEQ ID NO: 3412190 - DNA, 25 bp, Homo sapien
gaccagtgccgaatctcagacaaag

SEQ ID NO: 3412191 - DNA, 25 bp, Homo sapien
tactttggagagtcatcctggcatg

SEQ ID NO: 3412192 - DNA, 25 bp, Homo sapien
tcctggcatggcatgaaatggcctc

SEQ ID NO: 3412193 - DNA, 25 bp, Homo sapien
aggtgtccttcttgcgggcagctct

SEQ ID NO: 3412194 - DNA, 25 bp, Homo sapien
gctctggagtgagtagatcagagtt

SEQ ID NO: 3412195 - DNA, 25 bp, Homo sapien
tttatctgactgcttgaggtctgga

SEQ ID NO: 3412196 - DNA, 25 bp, Homo sapien
cagagtttatatcctgcttctgact

SEQ ID NO: 3412197 - DNA, 25 bp, Homo sapien
gcctttgtccatggagccctcagta

SEQ ID NO: 3412198 - DNA, 25 bp, Homo sapien
tggtcccaatgcaattacagtgaga

SEQ ID NO: 3412199 - DNA, 25 bp, Homo sapien
tgtttgggcccaagaacgagctggc

SEQ ID NO: 3412200 - DNA, 25 bp, Homo sapien
tcctaaacgtagtccagccatctgc

SEQ ID NO: 3412201 - DNA, 25 bp, Homo sapien
acgtctgcagcccaccgtctgttcg

SEQ ID NO: 3412202 - DNA, 25 bp, Homo sapien
cgtctgttcgccggctgcttcacag

SEQ ID NO: 3412203 - DNA, 25 bp, Homo sapien
tcggctgccgccgtcccttctgtgt

SEQ ID NO: 3412204 - DNA, 25 bp, Homo sapien
agcccgctcacaggtcctccgcttc

SEQ ID NO: 3412205 - DNA, 25 bp, Homo sapien
ccggcgtagctcgatgatactgtgc

SEQ ID NO: 3412206 - DNA, 25 bp, Homo sapien
tcttgccggcgtagctcgatgatac

SEQ ID NO: 3412207 - DNA, 25 bp, Homo sapien
cttcttgccggcgtagctcgatgat

SEQ ID NO: 3412208 - DNA, 25 bp, Homo sapien
tgccggcgtagctcgatgatactgt

SEQ ID NO: 3412209 - DNA, 25 bp, Homo sapien
tggtggtgcaacaaagtacggagtt

SEQ ID NO: 3412210 - DNA, 25 bp, Homo sapien
gggtatacaaacttcagtgtaggga

SEQ ID NO: 3412211 - DNA, 25 bp, Homo sapien
tacaaacttcagtgtagggaggaac

SEQ ID NO: 3412212 - DNA, 25 bp, Homo sapien
tgaagcttttgttcttacgggaaga

SEQ ID NO: 3412213 - DNA, 25 bp, Homo sapien
gtcttccaaggctttcgataatgaa

SEQ ID NO: 3412214 - DNA, 25 bp, Homo sapien
tgagcgtgtgcgtagagtggtggtg

SEQ ID NO: 3412215 - DNA, 25 bp, Homo sapien
taatgaaatcaggattgactgtcct

SEQ ID NO: 3412216 - DNA, 25 bp, Homo sapien
aatcaggattgactgtccttcccgc

SEQ ID NO: 3412217 - DNA, 25 bp, Homo sapien
tgtagctcctacctggggcctattt

SEQ ID NO: 3412218 - DNA, 25 bp, Homo sapien
gctgcttgtcctgttcaagttgctg

SEQ ID NO: 3412219 - DNA, 25 bp, Homo sapien
cagggcaatgcaggatccaaatcct

SEQ ID NO: 3412220 - DNA, 25 bp, Homo sapien
ctcatcttactttcccgaccttaag

SEQ ID NO: 3412221 - DNA, 25 bp, Homo sapien
gattctgtgccatctgaacatgctc

SEQ ID NO: 3412222 - DNA, 25 bp, Homo sapien
tcagaggactcagcgtcaggatccg

SEQ ID NO: 3412223 - DNA, 25 bp, Homo sapien
gaggaaggttctctttgcgcttgcc

SEQ ID NO: 3412224 - DNA, 25 bp, Homo sapien
gactctgaagaagaagaactagcca

SEQ ID NO: 3412225 - DNA, 25 bp, Homo sapien
gcatcacggatctttccaagaaggc

SEQ ID NO: 3412226 - DNA, 25 bp, Homo sapien
tgtctgcatacatgctgtggctcaa

SEQ ID NO: 3412227 - DNA, 25 bp, Homo sapien
gccgagagaagatcaagtcagacca

SEQ ID NO: 3412228 - DNA, 25 bp, Homo sapien
tctgtgggaaatagctgaaggcatt

SEQ ID NO: 3412229 - DNA, 25 bp, Homo sapien
ggccgcgcacgcgggaaaagcttcc

SEQ ID NO: 3412230 - DNA, 25 bp, Homo sapien
ctatgcgactgtctcgcaggcgggc

SEQ ID NO: 3412231 - DNA, 25 bp, Homo sapien
ctgtggcctgtgtacggcttccggt

SEQ ID NO: 3412232 - DNA, 25 bp, Homo sapien
actcgcgtctctctagccagctcat

SEQ ID NO: 3412233 - DNA, 25 bp, Homo sapien
catgcaatcctagtgagattctctg

SEQ ID NO: 3412234 - DNA, 25 bp, Homo sapien
cagggagacgagatcacgacctgga

SEQ ID NO: 3412235 - DNA, 25 bp, Homo sapien
gtccctttaagccatgcaatcctag

SEQ ID NO: 3412236 - DNA, 25 bp, Homo sapien
tcaggagagggaggtcctacaggac

SEQ ID NO: 3412237 - DNA, 25 bp, Homo sapien
gatgatcccgatggtccagctcttc

SEQ ID NO: 3412238 - DNA, 25 bp, Homo sapien
ccgacttggtggtctcataggtgaa

SEQ ID NO: 3412239 - DNA, 25 bp, Homo sapien
gatcagaagctgaactactcggttg

SEQ ID NO: 3412240 - DNA, 25 bp, Homo sapien
tacaaagtaggagatgatcagaagc

SEQ ID NO: 3412241 - DNA, 25 bp, Homo sapien
gaagcggctctctataactgtgcac

SEQ ID NO: 3412242 - DNA, 25 bp, Homo sapien
gggctgctcttactcatccttcggg

SEQ ID NO: 3412243 - DNA, 25 bp, Homo sapien
gggccaaacaccttcacagaagcgg

SEQ ID NO: 3412244 - DNA, 25 bp, Homo sapien
caaaagctctctaagggtgtctgag

SEQ ID NO: 3412245 - DNA, 25 bp, Homo sapien
aggccacattagaattctctctctg

SEQ ID NO: 3412246 - DNA, 25 bp, Homo sapien
tggagaggccacattagaattctct

SEQ ID NO: 3412247 - DNA, 25 bp, Homo sapien
gagaggccacattagaattctctct

SEQ ID NO: 3412248 - DNA, 25 bp, Homo sapien
ggtggagaggccacattagaattct

SEQ ID NO: 3412249 - DNA, 25 bp, Homo sapien
caaggaacaatcaaccaatctccta

SEQ ID NO: 3412250 - DNA, 25 bp, Homo sapien
tggcttaggaaagtctcaggaggaa

SEQ ID NO: 3412251 - DNA, 25 bp, Homo sapien
gaggactccaaggaacaatcaacca

SEQ ID NO: 3412252 - DNA, 25 bp, Homo sapien
ccagtgaaagcatctcctggcttag

SEQ ID NO: 3412253 - DNA, 25 bp, Homo sapien
gccacagaatagacatatttctcag

SEQ ID NO: 3412254 - DNA, 25 bp, Homo sapien
ccttctggaaccgagcttcaatgtg

SEQ ID NO: 3412255 - DNA, 25 bp, Homo sapien
ctagccacagaatagacatatttct

SEQ ID NO: 3412256 - DNA, 25 bp, Homo sapien
cgagcttcaatgtgcctagccacag

SEQ ID NO: 3412257 - DNA, 25 bp, Homo sapien
cccatctgccaaattacgtccttga

SEQ ID NO: 3412258 - DNA, 25 bp, Homo sapien
catctgccaaattacgtccttgaag

SEQ ID NO: 3412259 - DNA, 25 bp, Homo sapien
tctgccaaattacgtccttgaagaa

SEQ ID NO: 3412260 - DNA, 25 bp, Homo sapien
tgccaaattacgtccttgaagaaga

SEQ ID NO: 3412261 - DNA, 25 bp, Homo sapien
ctttaagccataatgggaccacgtg

SEQ ID NO: 3412262 - DNA, 25 bp, Homo sapien
ccacgtggatgaggccttccctttt

SEQ ID NO: 3412263 - DNA, 25 bp, Homo sapien
taatgggaccacgtggatgaggcct

SEQ ID NO: 3412264 - DNA, 25 bp, Homo sapien
tactggcgccttcctacagctttaa

SEQ ID NO: 3412265 - DNA, 25 bp, Homo sapien
aggtaaaggagctcggttgaaggtg

SEQ ID NO: 3412266 - DNA, 25 bp, Homo sapien
gcaggtaaaggagctcggttgaagg

SEQ ID NO: 3412267 - DNA, 25 bp, Homo sapien
caggtaaaggagctcggttgaaggt

SEQ ID NO: 3412268 - DNA, 25 bp, Homo sapien
caatggctgtgtcccgtacctggta

SEQ ID NO: 3412269 - DNA, 25 bp, Homo sapien
actctgttggcgtagagtccggagc

SEQ ID NO: 3412270 - DNA, 25 bp, Homo sapien
tggttaccaccgaggactcaatggc

SEQ ID NO: 3412271 - DNA, 25 bp, Homo sapien
tgaggtggcgtcacgtaatcagaca

SEQ ID NO: 3412272 - DNA, 25 bp, Homo sapien
gatcagtgacatcatggattctagt

SEQ ID NO: 3412273 - DNA, 25 bp, Homo sapien
tccaacctgcccagtgtctggacat

SEQ ID NO: 3412274 - DNA, 25 bp, Homo sapien
tctagtttgggaatcccattggcac

SEQ ID NO: 3412275 - DNA, 25 bp, Homo sapien
tgctcgctttctcccttccaacctg

SEQ ID NO: 3412276 - DNA, 25 bp, Homo sapien
gattttcagtaacaatcatcttggt

SEQ ID NO: 3412277 - DNA, 25 bp, Homo sapien
ctctgggcagaatccttgcatctga

SEQ ID NO: 3412278 - DNA, 25 bp, Homo sapien
gcagaatccttgcatctgattttca

SEQ ID NO: 3412279 - DNA, 25 bp, Homo sapien
tgatgatgacaaagaccgaggtgcc

SEQ ID NO: 3412280 - DNA, 25 bp, Homo sapien
ctggctgtctgatacacagcggtat

SEQ ID NO: 3412281 - DNA, 25 bp, Homo sapien
caggcccgcactggctgtctgatac

SEQ ID NO: 3412282 - DNA, 25 bp, Homo sapien
gcccgcactggctgtctgatacaca

SEQ ID NO: 3412283 - DNA, 25 bp, Homo sapien
gatacacagcggtatttctcctcac

SEQ ID NO: 3412284 - DNA, 25 bp, Homo sapien
tttccactgtgtccacctccgtggg

SEQ ID NO: 3412285 - DNA, 25 bp, Homo sapien
tgtagttcacgcagcggccagtgag

SEQ ID NO: 3412286 - DNA, 25 bp, Homo sapien
cacaggtccggagcacagagctgta

SEQ ID NO: 3412287 - DNA, 25 bp, Homo sapien
cagagctgtagttcacgcagcggcc

SEQ ID NO: 3412288 - DNA, 25 bp, Homo sapien
aagctcagagacgcacggctcccac

SEQ ID NO: 3412289 - DNA, 25 bp, Homo sapien
agctcagagacgcacggctcccaca

SEQ ID NO: 3412290 - DNA, 25 bp, Homo sapien
gctcagagacgcacggctcccacat

SEQ ID NO: 3412291 - DNA, 25 bp, Homo sapien
atgaaaatagtgaagttctcagctt

SEQ ID NO: 3412292 - DNA, 25 bp, Homo sapien
tgctgttcttgatgaaaatagtgaa

SEQ ID NO: 3412293 - DNA, 25 bp, Homo sapien
gaagttctcagcttccatcatgatg

SEQ ID NO: 3412294 - DNA, 25 bp, Homo sapien
aagagggggaaacggatgctgttct

SEQ ID NO: 3412295 - DNA, 25 bp, Homo sapien
ccctacccgcaagatggggcagaaa

SEQ ID NO: 3412296 - DNA, 25 bp, Homo sapien
gaagcggcaggtcttcatgtccctg

SEQ ID NO: 3412297 - DNA, 25 bp, Homo sapien
tgaccacgtcccctacccgcaagat

SEQ ID NO: 3412298 - DNA, 25 bp, Homo sapien
atcctgccccgcaaacttgaccacg

SEQ ID NO: 3412299 - DNA, 25 bp, Homo sapien
gagacggaggcagggagaacggaaa

SEQ ID NO: 3412300 - DNA, 25 bp, Homo sapien
aggcagggagaacggaaagtgacat

SEQ ID NO: 3412301 - DNA, 25 bp, Homo sapien
agaagtgctgtggtggccgggtgcg

SEQ ID NO: 3412302 - DNA, 25 bp, Homo sapien
gaagtgctgtggtggccgggtgcgg

SEQ ID NO: 3412303 - DNA, 25 bp, Homo sapien
cagaaacgctgtcgagccgggtgaa

SEQ ID NO: 3412304 - DNA, 25 bp, Homo sapien
aagtcgcacacccagccgatcttaa

SEQ ID NO: 3412305 - DNA, 25 bp, Homo sapien
cagccgatcttaatgcccagaactc

SEQ ID NO: 3412306 - DNA, 25 bp, Homo sapien
tatttggggatgcactggtcccagg

SEQ ID NO: 3412307 - DNA, 25 bp, Homo sapien
gtgactgcaatgatgccataggcat

SEQ ID NO: 3412308 - DNA, 25 bp, Homo sapien
aggaaagaacagagcccgaacagct

SEQ ID NO: 3412309 - DNA, 25 bp, Homo sapien
gatgccataggcatcagaggaaaga

SEQ ID NO: 3412310 - DNA, 25 bp, Homo sapien
gaaagcacagcatggctgtgactgc

SEQ ID NO: 3412311 - DNA, 25 bp, Homo sapien
cagggactggttctcttcccgggtg

SEQ ID NO: 3412312 - DNA, 25 bp, Homo sapien
gagtaaggctgagaacgactcagtg

SEQ ID NO: 3412313 - DNA, 25 bp, Homo sapien
gctcgagtaaggctgagaacgactc

SEQ ID NO: 3412314 - DNA, 25 bp, Homo sapien
ctgttgctcgagtaaggctgagaac

SEQ ID NO: 3412315 - DNA, 25 bp, Homo sapien
ggctgagaacgactcagtgaaaaaa

SEQ ID NO: 3412316 - DNA, 25 bp, Homo sapien
aagcggatgccaaaagccttcagga

SEQ ID NO: 3412317 - DNA, 25 bp, Homo sapien
aggagggtgcggtactcactgccat

SEQ ID NO: 3412318 - DNA, 25 bp, Homo sapien
ccttcaggagggtgcggtactcact

SEQ ID NO: 3412319 - DNA, 25 bp, Homo sapien
cgaagcggatgccaaaagccttcag

SEQ ID NO: 3412320 - DNA, 25 bp, Homo sapien
agtaaaggccgccacagagctgatg

SEQ ID NO: 3412321 - DNA, 25 bp, Homo sapien
aaggccgccacagagctgatgatgg

SEQ ID NO: 3412322 - DNA, 25 bp, Homo sapien
taaaggccgccacagagctgatgat

SEQ ID NO: 3412323 - DNA, 25 bp, Homo sapien
cagaagtaaaggccgccacagagct

SEQ ID NO: 3412324 - DNA, 25 bp, Homo sapien
tggcccgtcagagcgtggaggggct

SEQ ID NO: 3412325 - DNA, 25 bp, Homo sapien
gcccgtcagagcgtggaggggctga

SEQ ID NO: 3412326 - DNA, 25 bp, Homo sapien
ccgtcagagcgtggaggggctgaac

SEQ ID NO: 3412327 - DNA, 25 bp, Homo sapien
gactggcccgtcagagcgtggaggg

SEQ ID NO: 3412328 - DNA, 25 bp, Homo sapien
ggatgatgtcacagagaacagttcc

SEQ ID NO: 3412329 - DNA, 25 bp, Homo sapien
tggtcggcccccttgaggaagttga

SEQ ID NO: 3412330 - DNA, 25 bp, Homo sapien
ggaagttgagcaggatgatgtcaca

SEQ ID NO: 3412331 - DNA, 25 bp, Homo sapien
aacttcttggctttgtactggtcgg

SEQ ID NO: 3412332 - DNA, 25 bp, Homo sapien
ccgaatcggtggactgcttctccgc

SEQ ID NO: 3412333 - DNA, 25 bp, Homo sapien
ggtcaaagccgcgattttcagcgta

SEQ ID NO: 3412334 - DNA, 25 bp, Homo sapien
gcgattttcagcgtagtctcattca

SEQ ID NO: 3412335 - DNA, 25 bp, Homo sapien
ttctccgctgtggtctggtcgctgg

SEQ ID NO: 3412336 - DNA, 25 bp, Homo sapien
gataacgtgtgtgaaagtgcctggc

SEQ ID NO: 3412337 - DNA, 25 bp, Homo sapien
tataatctctactctttgggaaggg

SEQ ID NO: 3412338 - DNA, 25 bp, Homo sapien
acttgggtcccagctatgctcatgg

SEQ ID NO: 3412339 - DNA, 25 bp, Homo sapien
gtcggaggcccagacacttgggtcc

SEQ ID NO: 3412340 - DNA, 25 bp, Homo sapien
cctttttggccatgaactgtggcac

SEQ ID NO: 3412341 - DNA, 25 bp, Homo sapien
caggtccgggaatcaaatccccaga

SEQ ID NO: 3412342 - DNA, 25 bp, Homo sapien
tttctgggcctctcactgtaggaga

SEQ ID NO: 3412343 - DNA, 25 bp, Homo sapien
tatgcttaggattcacaaaacctgg

SEQ ID NO: 3412344 - DNA, 25 bp, Homo sapien
ggcctttgcaagtacccaccatttg

SEQ ID NO: 3412345 - DNA, 25 bp, Homo sapien
gggccgccctccatctacagttgag

SEQ ID NO: 3412346 - DNA, 25 bp, Homo sapien
gctggtgcagctaagacctcatgat

SEQ ID NO: 3412347 - DNA, 25 bp, Homo sapien
tgagcctcctgaactactcctgaag

SEQ ID NO: 3412348 - DNA, 25 bp, Homo sapien
tgacaaaccatagcggactcaccag

SEQ ID NO: 3412349 - DNA, 25 bp, Homo sapien
gaatgggcataggttccagatctca

SEQ ID NO: 3412350 - DNA, 25 bp, Homo sapien
caccagcgttggtgtgagggtccat

SEQ ID NO: 3412351 - DNA, 25 bp, Homo sapien
tagttcagatatgcggaggacaacc

SEQ ID NO: 3412352 - DNA, 25 bp, Homo sapien
gtccaagtgtctcagatggcacagc

SEQ ID NO: 3412353 - DNA, 25 bp, Homo sapien
gatcttcagattaccccctgtgatc

SEQ ID NO: 3412354 - DNA, 25 bp, Homo sapien
gagtccaagtgtctcagatggcaca

SEQ ID NO: 3412355 - DNA, 25 bp, Homo sapien
cctgatcttcagattaccccctgtg

SEQ ID NO: 3412356 - DNA, 25 bp, Homo sapien
aggactaggactttcccagtatcct

SEQ ID NO: 3412357 - DNA, 25 bp, Homo sapien
gaggactaggactttcccagtatcc

SEQ ID NO: 3412358 - DNA, 25 bp, Homo sapien
agaggactaggactttcccagtatc

SEQ ID NO: 3412359 - DNA, 25 bp, Homo sapien
caagaggactaggactttcccagta

SEQ ID NO: 3412360 - DNA, 25 bp, Homo sapien
tccagtcttgaataacccctgatta

SEQ ID NO: 3412361 - DNA, 25 bp, Homo sapien
cagcttgctgagaacaaggttttgt

SEQ ID NO: 3412362 - DNA, 25 bp, Homo sapien
tatctattaatacccctggaaggct

SEQ ID NO: 3412363 - DNA, 25 bp, Homo sapien
ttcctttggctgattaaggccttcc

SEQ ID NO: 3412364 - DNA, 25 bp, Homo sapien
ccatcaatggtcacataaggatgct

SEQ ID NO: 3412365 - DNA, 25 bp, Homo sapien
ggtgtgattccttttagcattccct

SEQ ID NO: 3412366 - DNA, 25 bp, Homo sapien
cagataagcacctatgcgggggttt

SEQ ID NO: 3412367 - DNA, 25 bp, Homo sapien
caaggtcaactatttggtgtgattc

SEQ ID NO: 3412368 - DNA, 25 bp, Homo sapien
tattggtgaagaacagtggaatgtc

SEQ ID NO: 3412369 - DNA, 25 bp, Homo sapien
cctgattagatcatacccatagagg

SEQ ID NO: 3412370 - DNA, 25 bp, Homo sapien
cacccacatggttggactctctgac

SEQ ID NO: 3412371 - DNA, 25 bp, Homo sapien
tcccttggattgaatcacccacatg

SEQ ID NO: 3412372 - DNA, 25 bp, Homo sapien
ccagctgacctgcttgaccgaagga

SEQ ID NO: 3412373 - DNA, 25 bp, Homo sapien
gcagccttggctagagaactcacag

SEQ ID NO: 3412374 - DNA, 25 bp, Homo sapien
gaccgaaggatttctgacagactat

SEQ ID NO: 3412375 - DNA, 25 bp, Homo sapien
tcatggcctcagctatgcttcctgg

SEQ ID NO: 3412376 - DNA, 25 bp, Homo sapien
gataacaccaacttggcagcgggag

SEQ ID NO: 3412377 - DNA, 25 bp, Homo sapien
tattcagaattcgagcgcaggagct

SEQ ID NO: 3412378 - DNA, 25 bp, Homo sapien
gaccaggtttgcgagtcctaggcga

SEQ ID NO: 3412379 - DNA, 25 bp, Homo sapien
cgtcgtgactaaactagccctgtga

SEQ ID NO: 3412380 - DNA, 25 bp, Homo sapien
gcccgtgcggaaagggcgcggagag

SEQ ID NO: 3412381 - DNA, 25 bp, Homo sapien
cgcggagcaggcgggtagggcgaag

SEQ ID NO: 3412382 - DNA, 25 bp, Homo sapien
ctggcccgtgcggaaagggcgcgga

SEQ ID NO: 3412383 - DNA, 25 bp, Homo sapien
cccgtgcggaaagggcgcggagagc

SEQ ID NO: 3412384 - DNA, 25 bp, Homo sapien
ttgttttcactcaggagtcgtctcc

SEQ ID NO: 3412385 - DNA, 25 bp, Homo sapien
caaaagtccagtgttcaatcggccc

SEQ ID NO: 3412386 - DNA, 25 bp, Homo sapien
ttcactcaggagtcgtctccttctc

SEQ ID NO: 3412387 - DNA, 25 bp, Homo sapien
ccagtgttcaatcggccccagcagt

SEQ ID NO: 3412388 - DNA, 25 bp, Homo sapien
cccacgacagatccctgcttaatgt

SEQ ID NO: 3412389 - DNA, 25 bp, Homo sapien
accccacgacagatccctgcttaat

SEQ ID NO: 3412390 - DNA, 25 bp, Homo sapien
ggaacattgcagcaccccacgacag

SEQ ID NO: 3412391 - DNA, 25 bp, Homo sapien
aacattgcagcaccccacgacagat

SEQ ID NO: 3412392 - DNA, 25 bp, Homo sapien
taggccttttctgccctctcccgtg

SEQ ID NO: 3412393 - DNA, 25 bp, Homo sapien
ccttttctgccctctcccgtgcagc

SEQ ID NO: 3412394 - DNA, 25 bp, Homo sapien
ttttctgccctctcccgtgcagcat

SEQ ID NO: 3412395 - DNA, 25 bp, Homo sapien
catataggccttttctgccctctcc

SEQ ID NO: 3412396 - DNA, 25 bp, Homo sapien
caccgccgccgttattaggaagaag

SEQ ID NO: 3412397 - DNA, 25 bp, Homo sapien
tgatgacgtcccacactgtgggtac

SEQ ID NO: 3412398 - DNA, 25 bp, Homo sapien
taagattaaagttggctgttctcca

SEQ ID NO: 3412399 - DNA, 25 bp, Homo sapien
tgtgggtacctttatgaacaggaat

SEQ ID NO: 3412400 - DNA, 25 bp, Homo sapien
caatacatcttgcatcctcgctgga

SEQ ID NO: 3412401 - DNA, 25 bp, Homo sapien
tatagccgttcgttcctgttgacct

SEQ ID NO: 3412402 - DNA, 25 bp, Homo sapien
ttggtgatgtacagactgagcctca

SEQ ID NO: 3412403 - DNA, 25 bp, Homo sapien
tcgctggacccaatccattggcttg

SEQ ID NO: 3412404 - DNA, 25 bp, Homo sapien
tctcccatccttgctgagagaggat

SEQ ID NO: 3412405 - DNA, 25 bp, Homo sapien
gatgggttctcttctgaccaatact

SEQ ID NO: 3412406 - DNA, 25 bp, Homo sapien
tgtccctctcccatgaagcgtatct

SEQ ID NO: 3412407 - DNA, 25 bp, Homo sapien
actgaagatctttagtaaagttctc

SEQ ID NO: 3412408 - DNA, 25 bp, Homo sapien
ctacgatgacgatggaatgcataaa

SEQ ID NO: 3412409 - DNA, 25 bp, Homo sapien
tacgatgacgatggaatgcataaag

SEQ ID NO: 3412410 - DNA, 25 bp, Homo sapien
catttagtgccagggctctcgggct

SEQ ID NO: 3412411 - DNA, 25 bp, Homo sapien
tcatttagtgccagggctctcgggc

SEQ ID NO: 3412412 - DNA, 25 bp, Homo sapien
gtgccagggctctcgggcttacatc

SEQ ID NO: 3412413 - DNA, 25 bp, Homo sapien
ttagtgccagggctctcgggcttac

SEQ ID NO: 3412414 - DNA, 25 bp, Homo sapien
agcttccaagaacaaacaagatctg

SEQ ID NO: 3412415 - DNA, 25 bp, Homo sapien
gcacattcagggtggcatggccgca

SEQ ID NO: 3412416 - DNA, 25 bp, Homo sapien
ttccaagaacaaacaagatctggca

SEQ ID NO: 3412417 - DNA, 25 bp, Homo sapien
ccaagaacaaacaagatctggcaca

SEQ ID NO: 3412418 - DNA, 25 bp, Homo sapien
cagaacaggtgctcatatacccttg

SEQ ID NO: 3412419 - DNA, 25 bp, Homo sapien
agagctccttcggagattctggcag

SEQ ID NO: 3412420 - DNA, 25 bp, Homo sapien
cagtttcgggaggaatgcatgcgga

SEQ ID NO: 3412421 - DNA, 25 bp, Homo sapien
tccttcggagattctggcaggacag

SEQ ID NO: 3412422 - DNA, 25 bp, Homo sapien
agccgcttcgggtacggtggccagg

SEQ ID NO: 3412423 - DNA, 25 bp, Homo sapien
acaggcggtatcagcagacccatca

SEQ ID NO: 3412424 - DNA, 25 bp, Homo sapien
ctgcagggcggttgacccaggtctt

SEQ ID NO: 3412425 - DNA, 25 bp, Homo sapien
ggcacttccctacaaaggctgcagg

SEQ ID NO: 3412426 - DNA, 25 bp, Homo sapien
ggccgcggcgctctaccctgcgccg

SEQ ID NO: 3412427 - DNA, 25 bp, Homo sapien
cgctagctgcgctgtccgctcgaga

SEQ ID NO: 3412428 - DNA, 25 bp, Homo sapien
ctgagcccgccggatgcacggcggg

SEQ ID NO: 3412429 - DNA, 25 bp, Homo sapien
cgctgtccgctcgagagtccgtcag

SEQ ID NO: 3412430 - DNA, 25 bp, Homo sapien
gcaggcgcctgagcccgggcagcat

SEQ ID NO: 3412431 - DNA, 25 bp, Homo sapien
tcctgattctctttcccgctacctc

SEQ ID NO: 3412432 - DNA, 25 bp, Homo sapien
ctgattctctttcccgctacctcca

SEQ ID NO: 3412433 - DNA, 25 bp, Homo sapien
ctctttcccgctacctccatcccag

SEQ ID NO: 3412434 - DNA, 25 bp, Homo sapien
ttctctttcccgctacctccatccc

SEQ ID NO: 3412435 - DNA, 25 bp, Homo sapien
ggggcaggggctgaggaggtgggag

SEQ ID NO: 3412436 - DNA, 25 bp, Homo sapien
gagggggcaggggctgaggaggtgg

SEQ ID NO: 3412437 - DNA, 25 bp, Homo sapien
tgagggggcaggggctgaggaggtg

SEQ ID NO: 3412438 - DNA, 25 bp, Homo sapien
ctgagggggcaggggctgaggaggt

SEQ ID NO: 3412439 - DNA, 25 bp, Homo sapien
gagtcgctggtgcagagtggtccca

SEQ ID NO: 3412440 - DNA, 25 bp, Homo sapien
cccagacgagaagcaagggctccac

SEQ ID NO: 3412441 - DNA, 25 bp, Homo sapien
acacccaacgggctgcttcagggaa

SEQ ID NO: 3412442 - DNA, 25 bp, Homo sapien
cgctggtgcagagtggtcccaggaa

SEQ ID NO: 3412443 - DNA, 25 bp, Homo sapien
gtaccaaggctcagaaacaaagttc

SEQ ID NO: 3412444 - DNA, 25 bp, Homo sapien
cagaacatggtattgatcccggaag

SEQ ID NO: 3412445 - DNA, 25 bp, Homo sapien
aaagtatctgttcactgagggacca

SEQ ID NO: 3412446 - DNA, 25 bp, Homo sapien
tgaagtgtccagagccaaaagtatc

SEQ ID NO: 3412447 - DNA, 25 bp, Homo sapien
aacagtgactctgttgccatttctg

SEQ ID NO: 3412448 - DNA, 25 bp, Homo sapien
gcccttgccactgccgtgcaaagca

SEQ ID NO: 3412449 - DNA, 25 bp, Homo sapien
taacagctgctgcataacagtgact

SEQ ID NO: 3412450 - DNA, 25 bp, Homo sapien
ggctctctgaagagcgaccccgtgc

SEQ ID NO: 3412451 - DNA, 25 bp, Homo sapien
gtaatactcagtgacacagcggctg

SEQ ID NO: 3412452 - DNA, 25 bp, Homo sapien
tgctggctgtcctccgcgtgtgtgt

SEQ ID NO: 3412453 - DNA, 25 bp, Homo sapien
tcgcttttgggccccaccgtgagtg

SEQ ID NO: 3412454 - DNA, 25 bp, Homo sapien
cccgtgcggcgtttcacgattactt

SEQ ID NO: 3412455 - DNA, 25 bp, Homo sapien
cagccaggtgtgcacgcatgggact

SEQ ID NO: 3412456 - DNA, 25 bp, Homo sapien
ccaggtgtgcacgcatgggactgac

SEQ ID NO: 3412457 - DNA, 25 bp, Homo sapien
tcagccaggtgtgcacgcatgggac

SEQ ID NO: 3412458 - DNA, 25 bp, Homo sapien
gccaggtgtgcacgcatgggactga

SEQ ID NO: 3412459 - DNA, 25 bp, Homo sapien
cagcaggaggcaggccgaggcggga

SEQ ID NO: 3412460 - DNA, 25 bp, Homo sapien
agcaggaggcaggccgaggcgggag

SEQ ID NO: 3412461 - DNA, 25 bp, Homo sapien
gctgaccaggcctcggaagatgttg

SEQ ID NO: 3412462 - DNA, 25 bp, Homo sapien
ctccagggcttgcaagtggcggaaa

SEQ ID NO: 3412463 - DNA, 25 bp, Homo sapien
cagcggtacaaatgcagcgactgca

SEQ ID NO: 3412464 - DNA, 25 bp, Homo sapien
tgagcaggttggacccaaaggtgcc

SEQ ID NO: 3412465 - DNA, 25 bp, Homo sapien
gaataacaattactggtattccttc

SEQ ID NO: 3412466 - DNA, 25 bp, Homo sapien
tctccagctgcataacagagattta

SEQ ID NO: 3412467 - DNA, 25 bp, Homo sapien
caatgaataacaattactggtattc

SEQ ID NO: 3412468 - DNA, 25 bp, Homo sapien
gctgcataacagagatttacccttt

SEQ ID NO: 3412469 - DNA, 25 bp, Homo sapien
aagctgttgccaaatcccgttgcca

SEQ ID NO: 3412470 - DNA, 25 bp, Homo sapien
gaatgtagctttcaaatccggtcct

SEQ ID NO: 3412471 - DNA, 25 bp, Homo sapien
cgttgccacttccttgaatgtagct

SEQ ID NO: 3412472 - DNA, 25 bp, Homo sapien
ttctctgcaaaaagtcctgcccctc

SEQ ID NO: 3412473 - DNA, 25 bp, Homo sapien
ccagcacacagggatttggtccaat

SEQ ID NO: 3412474 - DNA, 25 bp, Homo sapien
agttttaacctcatggagtctcagg

SEQ ID NO: 3412475 - DNA, 25 bp, Homo sapien
tcatatgagggaagtgctggacacg

SEQ ID NO: 3412476 - DNA, 25 bp, Homo sapien
taagggtacagtatctggcaggtgc

SEQ ID NO: 3412477 - DNA, 25 bp, Homo sapien
catcctggatttggattctgcctcc

SEQ ID NO: 3412478 - DNA, 25 bp, Homo sapien
cctctaacctatttgctgtggaaaa

SEQ ID NO: 3412479 - DNA, 25 bp, Homo sapien
gaccttttgattcatagcatcctgg

SEQ ID NO: 3412480 - DNA, 25 bp, Homo sapien
ggttgaccttttgattcatagcatc

SEQ ID NO: 3412481 - DNA, 25 bp, Homo sapien
aagaagagaatgggcctgaggtagg

SEQ ID NO: 3412482 - DNA, 25 bp, Homo sapien
ggtagggtgcagaccccgctggggc

SEQ ID NO: 3412483 - DNA, 25 bp, Homo sapien
gggcctgaggtagggtgcagacccc

SEQ ID NO: 3412484 - DNA, 25 bp, Homo sapien
gagtggggcacagaagaagagaatg

SEQ ID NO: 3412485 - DNA, 25 bp, Homo sapien
aggttggccaggtccgcgaacaagt

SEQ ID NO: 3412486 - DNA, 25 bp, Homo sapien
ggttagcgttgagccgcaggaactc

SEQ ID NO: 3412487 - DNA, 25 bp, Homo sapien
ccgcgaaacacgtgctctgtgagca

SEQ ID NO: 3412488 - DNA, 25 bp, Homo sapien
ccgcaggcggttcccgtggaggaag

SEQ ID NO: 3412489 - DNA, 25 bp, Homo sapien
agctggacacgcgcgcgcgctggaa

SEQ ID NO: 3412490 - DNA, 25 bp, Homo sapien
tcggagctggacacgcgcgcgcgct

SEQ ID NO: 3412491 - DNA, 25 bp, Homo sapien
tggacacgcgcgcgcgctggaacca

SEQ ID NO: 3412492 - DNA, 25 bp, Homo sapien
cacgcgcgcgcgctggaaccaggcc

SEQ ID NO: 3412493 - DNA, 25 bp, Homo sapien
ctggcgctccgggggggtggcgcag

SEQ ID NO: 3412494 - DNA, 25 bp, Homo sapien
cctggaagtcggcctcgcggagcgc

SEQ ID NO: 3412495 - DNA, 25 bp, Homo sapien
gagcgcgcgcaggtctcggccctgg

SEQ ID NO: 3412496 - DNA, 25 bp, Homo sapien
tggaagtcggcctcgcggagcgcgc

SEQ ID NO: 3412497 - DNA, 25 bp, Homo sapien
ctgcccggccgcgtgggtgccgcgg

SEQ ID NO: 3412498 - DNA, 25 bp, Homo sapien
tgcccggccgcgtgggtgccgcggg

SEQ ID NO: 3412499 - DNA, 25 bp, Homo sapien
ggctgcccggccgcgtgggtgccgc

SEQ ID NO: 3412500 - DNA, 25 bp, Homo sapien
gcggctgcccggccgcgtgggtgcc

SEQ ID NO: 3412501 - DNA, 25 bp, Homo sapien
gagtcttcggcaggcagatctcggt

SEQ ID NO: 3412502 - DNA, 25 bp, Homo sapien
ccccgcgagtcttcggcaggcagat

SEQ ID NO: 3412503 - DNA, 25 bp, Homo sapien
cttcggcaggcagatctcggtagag

SEQ ID NO: 3412504 - DNA, 25 bp, Homo sapien
gtagtcgtcctcagtaggcgcgtcc

SEQ ID NO: 3412505 - DNA, 25 bp, Homo sapien
gtggacgggaagcggggatcggaca

SEQ ID NO: 3412506 - DNA, 25 bp, Homo sapien
cgcagccccgggtggacgggaagcg

SEQ ID NO: 3412507 - DNA, 25 bp, Homo sapien
tggacgggaagcggggatcggacac

SEQ ID NO: 3412508 - DNA, 25 bp, Homo sapien
gacgggaagcggggatcggacactg

SEQ ID NO: 3412509 - DNA, 25 bp, Homo sapien
gaggggaaagggaggcagcaaggcc

SEQ ID NO: 3412510 - DNA, 25 bp, Homo sapien
gggaaagggaggcagcaaggccagg

SEQ ID NO: 3412511 - DNA, 25 bp, Homo sapien
aaagggaggcagcaaggccagggaa

SEQ ID NO: 3412512 - DNA, 25 bp, Homo sapien
gaaagggaggcagcaaggccaggga

SEQ ID NO: 3412513 - DNA, 25 bp, Homo sapien
gctgccacaagtcaggacagcccag

SEQ ID NO: 3412514 - DNA, 25 bp, Homo sapien
gagaggcggcctgctccccggggag

SEQ ID NO: 3412515 - DNA, 25 bp, Homo sapien
caaggagaggcggcctgctccccgg

SEQ ID NO: 3412516 - DNA, 25 bp, Homo sapien
gggctgccacaagtcaggacagccc

SEQ ID NO: 3412517 - DNA, 25 bp, Homo sapien
tccaggtgccctaaaaagtgtccag

SEQ ID NO: 3412518 - DNA, 25 bp, Homo sapien
acttaggagaaaagtattcctccag

SEQ ID NO: 3412519 - DNA, 25 bp, Homo sapien
ctctgctggtggaagacgctctgca

SEQ ID NO: 3412520 - DNA, 25 bp, Homo sapien
aaaagcccctctggtgtccgctgtg

SEQ ID NO: 3412521 - DNA, 25 bp, Homo sapien
gttcctcggtccctcttctagcctg

SEQ ID NO: 3412522 - DNA, 25 bp, Homo sapien
agtaatgcatcccaatttgggattc

SEQ ID NO: 3412523 - DNA, 25 bp, Homo sapien
attcctgtccctctgatcacccgag

SEQ ID NO: 3412524 - DNA, 25 bp, Homo sapien
gtaatgcatcccaatttgggattcc

SEQ ID NO: 3412525 - DNA, 25 bp, Homo sapien
ccaagtccttcttagcctgagctct

SEQ ID NO: 3412526 - DNA, 25 bp, Homo sapien
agaaagatgaaggttctgattgtac

SEQ ID NO: 3412527 - DNA, 25 bp, Homo sapien
aagtccttcttagcctgagctcttc

SEQ ID NO: 3412528 - DNA, 25 bp, Homo sapien
acacaccagaaagatgaaggttctg

SEQ ID NO: 3412529 - DNA, 25 bp, Homo sapien
tatatggtcagagaggtgcagtctt

SEQ ID NO: 3412530 - DNA, 25 bp, Homo sapien
atatggtcagagaggtgcagtcttg

SEQ ID NO: 3412531 - DNA, 25 bp, Homo sapien
tgtatatggtcagagaggtgcagtc

SEQ ID NO: 3412532 - DNA, 25 bp, Homo sapien
ctgtatatggtcagagaggtgcagt

SEQ ID NO: 3412533 - DNA, 25 bp, Homo sapien
gcagccgtctgcttggagggagcca

SEQ ID NO: 3412534 - DNA, 25 bp, Homo sapien
cgtctgcttggagggagccagagcc

SEQ ID NO: 3412535 - DNA, 25 bp, Homo sapien
gggcagccgtctgcttggagggagc

SEQ ID NO: 3412536 - DNA, 25 bp, Homo sapien
agccgtctgcttggagggagccaga

SEQ ID NO: 3412537 - DNA, 25 bp, Homo sapien
agtctgtatttcattggagaggagt

SEQ ID NO: 3412538 - DNA, 25 bp, Homo sapien
agaggagttcctctcggattaggga

SEQ ID NO: 3412539 - DNA, 25 bp, Homo sapien
tccacagtgtcctgagagtcccaag

SEQ ID NO: 3412540 - DNA, 25 bp, Homo sapien
tagggatcgaaaattgggagcccgc

SEQ ID NO: 3412541 - DNA, 25 bp, Homo sapien
aacaaatcaccccaaggcttggcat

SEQ ID NO: 3412542 - DNA, 25 bp, Homo sapien
tcatgaagacatagtcaggctgtca

SEQ ID NO: 3412543 - DNA, 25 bp, Homo sapien
tcagaaatcagggagagactcagcc

SEQ ID NO: 3412544 - DNA, 25 bp, Homo sapien
gaatctatgtcagttcaattacccc

SEQ ID NO: 3412545 - DNA, 25 bp, Homo sapien
cctggcttatttcatatatatatat

SEQ ID NO: 3412546 - DNA, 25 bp, Homo sapien
tgtgcaccaccatgcctggcttatt

SEQ ID NO: 3412547 - DNA, 25 bp, Homo sapien
tgcaccaccatgcctggcttatttc

SEQ ID NO: 3412548 - DNA, 25 bp, Homo sapien
ggtcttgctatgttgaccaccaggc

SEQ ID NO: 3412549 - DNA, 25 bp, Homo sapien
tgtgtgacaattctcagagccagcc

SEQ ID NO: 3412550 - DNA, 25 bp, Homo sapien
tctgcagcacagctagtggaattag

SEQ ID NO: 3412551 - DNA, 25 bp, Homo sapien
ttcccagatgagataatggagcctc

SEQ ID NO: 3412552 - DNA, 25 bp, Homo sapien
cagcctctcaggtggttgagaccac

SEQ ID NO: 3412553 - DNA, 25 bp, Homo sapien
aagcgggttccgaggtgcaaagcct

SEQ ID NO: 3412554 - DNA, 25 bp, Homo sapien
ccttataaagtcagcagccgccaga

SEQ ID NO: 3412555 - DNA, 25 bp, Homo sapien
cagctgttggcttggcccgagagac

SEQ ID NO: 3412556 - DNA, 25 bp, Homo sapien
gagctgcgcgtttgccagagttcca

SEQ ID NO: 3412557 - DNA, 25 bp, Homo sapien
tagggtctccggctatgcgtcggct

SEQ ID NO: 3412558 - DNA, 25 bp, Homo sapien
cgccaagcgcgtccttcccttttct

SEQ ID NO: 3412559 - DNA, 25 bp, Homo sapien
ggtcccgcggcacagtgtcccatct

SEQ ID NO: 3412560 - DNA, 25 bp, Homo sapien
tatgcgtcggctgagagacaccgag

SEQ ID NO: 3412561 - DNA, 25 bp, Homo sapien
cgtgcgcgtgaaactcgacctaagg

SEQ ID NO: 3412562 - DNA, 25 bp, Homo sapien
tttgaacaaggatacagagggcgct

SEQ ID NO: 3412563 - DNA, 25 bp, Homo sapien
agctccggacgcgtgtaaatacaac

SEQ ID NO: 3412564 - DNA, 25 bp, Homo sapien
ggctgctcatttgccggtgaccgga

SEQ ID NO: 3412565 - DNA, 25 bp, Homo sapien
caagatcccggagtggtagcgctgt

SEQ ID NO: 3412566 - DNA, 25 bp, Homo sapien
taagtacctggacatccatgagcgg

SEQ ID NO: 3412567 - DNA, 25 bp, Homo sapien
taataaacgtgctccctgttgggtg

SEQ ID NO: 3412568 - DNA, 25 bp, Homo sapien
tctccaagggcgagtctgtgtgcct

SEQ ID NO: 3412569 - DNA, 25 bp, Homo sapien
gaatgcagggtagaatgaggagcca

SEQ ID NO: 3412570 - DNA, 25 bp, Homo sapien
gggtagaatgcagggtagaatgagg

SEQ ID NO: 3412571 - DNA, 25 bp, Homo sapien
ggtagaatgaggagccagagtttca

SEQ ID NO: 3412572 - DNA, 25 bp, Homo sapien
gaatgaggagccagagtttcagcat

SEQ ID NO: 3412573 - DNA, 25 bp, Homo sapien
ctggcagcatccgtcctgtggtcat

SEQ ID NO: 3412574 - DNA, 25 bp, Homo sapien
acaggtggcacctttcaatcacggc

SEQ ID NO: 3412575 - DNA, 25 bp, Homo sapien
ggcacgtcccttccgccctgagcct

SEQ ID NO: 3412576 - DNA, 25 bp, Homo sapien
gaggctcggatttcccgtggaagat

SEQ ID NO: 3412577 - DNA, 25 bp, Homo sapien
actggcctgttggtacaacacttta

SEQ ID NO: 3412578 - DNA, 25 bp, Homo sapien
ctggcctgttggtacaacactttac

SEQ ID NO: 3412579 - DNA, 25 bp, Homo sapien
tactggcctgttggtacaacacttt

SEQ ID NO: 3412580 - DNA, 25 bp, Homo sapien
ttactggcctgttggtacaacactt

SEQ ID NO: 3412581 - DNA, 25 bp, Homo sapien
gctgagtggcctcactcccaggctg

SEQ ID NO: 3412582 - DNA, 25 bp, Homo sapien
caggctgcctttaagccccagtggc

SEQ ID NO: 3412583 - DNA, 25 bp, Homo sapien
tctagcccccagctctttggtcccg

SEQ ID NO: 3412584 - DNA, 25 bp, Homo sapien
tctgcctgtggcttgggagctgtct

SEQ ID NO: 3412585 - DNA, 25 bp, Homo sapien
tgtcctctgattcctgctagagccc

SEQ ID NO: 3412586 - DNA, 25 bp, Homo sapien
gtcctctgattcctgctagagcccc

SEQ ID NO: 3412587 - DNA, 25 bp, Homo sapien
tcctctgattcctgctagagcccct

SEQ ID NO: 3412588 - DNA, 25 bp, Homo sapien
aaagagaagacaagcagacctggtc

SEQ ID NO: 3412589 - DNA, 25 bp, Homo sapien
agagaagacaagcagacctggtcat

SEQ ID NO: 3412590 - DNA, 25 bp, Homo sapien
gaaagagaagacaagcagacctggt

SEQ ID NO: 3412591 - DNA, 25 bp, Homo sapien
aagagaagacaagcagacctggtca

SEQ ID NO: 3412592 - DNA, 25 bp, Homo sapien
catctcagggttgtccgcagctggg

SEQ ID NO: 3412593 - DNA, 25 bp, Homo sapien
tctcagggttgtccgcagctgggga

SEQ ID NO: 3412594 - DNA, 25 bp, Homo sapien
acatctcagggttgtccgcagctgg

SEQ ID NO: 3412595 - DNA, 25 bp, Homo sapien
tgacatctcagggttgtccgcagct

SEQ ID NO: 3412596 - DNA, 25 bp, Homo sapien
ttctcagaggccagcgtgctctcct

SEQ ID NO: 3412597 - DNA, 25 bp, Homo sapien
gagttctgctgacatgccgtcctcg

SEQ ID NO: 3412598 - DNA, 25 bp, Homo sapien
ggcttgtctctgtcattggcatcgg

SEQ ID NO: 3412599 - DNA, 25 bp, Homo sapien
cattgatggcctttccagctgtgcc

SEQ ID NO: 3412600 - DNA, 25 bp, Homo sapien
tgggttcagccttagcctcatcctc

SEQ ID NO: 3412601 - DNA, 25 bp, Homo sapien
cagcctcctcttttgcaccatgttt

SEQ ID NO: 3412602 - DNA, 25 bp, Homo sapien
gcctcctcttttgcaccatgtttgg

SEQ ID NO: 3412603 - DNA, 25 bp, Homo sapien
cgggctccttgggttcagccttagc

SEQ ID NO: 3412604 - DNA, 25 bp, Homo sapien
tggggagctgggaatcacccctgcc

SEQ ID NO: 3412605 - DNA, 25 bp, Homo sapien
tggtctgtccggaagctacacagtc

SEQ ID NO: 3412606 - DNA, 25 bp, Homo sapien
ctgaaggactggtctgtccggaagc

SEQ ID NO: 3412607 - DNA, 25 bp, Homo sapien
tccggaagctacacagtctggaccc

SEQ ID NO: 3412608 - DNA, 25 bp, Homo sapien
gaagctacacagtctggacccagcc

SEQ ID NO: 3412609 - DNA, 25 bp, Homo sapien
agtccaaagacgtgtgagagaggct

SEQ ID NO: 3412610 - DNA, 25 bp, Homo sapien
tatggagaagtccaaagacgtgtga

SEQ ID NO: 3412611 - DNA, 25 bp, Homo sapien
ctatatggagaagtccaaagacgtg

SEQ ID NO: 3412612 - DNA, 25 bp, Homo sapien
gagaagtccaaagacgtgtgagaga

SEQ ID NO: 3412613 - DNA, 25 bp, Homo sapien
tcagggggactctggggcacgtcgc

SEQ ID NO: 3412614 - DNA, 25 bp, Homo sapien
cagggggactctggggcacgtcgct

SEQ ID NO: 3412615 - DNA, 25 bp, Homo sapien
gccaaacttgtccacgatggctttg

SEQ ID NO: 3412616 - DNA, 25 bp, Homo sapien
gggctgataccctgcgctctggtgc

SEQ ID NO: 3412617 - DNA, 25 bp, Homo sapien
gctttgcggttctgtgcccggggcc

SEQ ID NO: 3412618 - DNA, 25 bp, Homo sapien
gataccctgcgctctggtgccttct

SEQ ID NO: 3412619 - DNA, 25 bp, Homo sapien
tgttcttgacaccaccaatggctgc

SEQ ID NO: 3412620 - DNA, 25 bp, Homo sapien
tcggcaccactccaagagcatgttc

SEQ ID NO: 3412621 - DNA, 25 bp, Homo sapien
gctgccccggctgccttagtgttgc

SEQ ID NO: 3412622 - DNA, 25 bp, Homo sapien
cttagtgttgcggaacaaggccgtg

SEQ ID NO: 3412623 - DNA, 25 bp, Homo sapien
cacttggaccctccctggacccctg

SEQ ID NO: 3412624 - DNA, 25 bp, Homo sapien
ttgcaccacttggaccctccctgga

SEQ ID NO: 3412625 - DNA, 25 bp, Homo sapien
tttgcaccacttggaccctccctgg

SEQ ID NO: 3412626 - DNA, 25 bp, Homo sapien
ggcgctttgcgggatccagctctgc

SEQ ID NO: 3412627 - DNA, 25 bp, Homo sapien
atccagctctgcgtagtcaaaggcg

SEQ ID NO: 3412628 - DNA, 25 bp, Homo sapien
gggtgaagttgtgccggcgctttgc

SEQ ID NO: 3412629 - DNA, 25 bp, Homo sapien
ctgcgtagtcaaaggcgtcagggaa

SEQ ID NO: 3412630 - DNA, 25 bp, Homo sapien
cttccagtggctctgcctgactcag

SEQ ID NO: 3412631 - DNA, 25 bp, Homo sapien
ggctctgcctgactcagaaccagag

SEQ ID NO: 3412632 - DNA, 25 bp, Homo sapien
cagtggctctgcctgactcagaacc

SEQ ID NO: 3412633 - DNA, 25 bp, Homo sapien
tctgcctgactcagaaccagagtcc

SEQ ID NO: 3412634 - DNA, 25 bp, Homo sapien
gtgctggcataggagaaaccagggc

SEQ ID NO: 3412635 - DNA, 25 bp, Homo sapien
agggccaaaatccacgccagactgg

SEQ ID NO: 3412636 - DNA, 25 bp, Homo sapien
gccaaaatccacgccagactgggag

SEQ ID NO: 3412637 - DNA, 25 bp, Homo sapien
ggccaaaatccacgccagactggga

SEQ ID NO: 3412638 - DNA, 25 bp, Homo sapien
tagacgcacttggagtcgggcacag

SEQ ID NO: 3412639 - DNA, 25 bp, Homo sapien
ttctgcacaaggctgcggtacagtt

SEQ ID NO: 3412640 - DNA, 25 bp, Homo sapien
gctgcggtacagttcctggatgtat

SEQ ID NO: 3412641 - DNA, 25 bp, Homo sapien
ctggatgtatgtgtagacgcacttg

SEQ ID NO: 3412642 - DNA, 25 bp, Homo sapien
taatgcagttaaaaccaacgccaca

SEQ ID NO: 3412643 - DNA, 25 bp, Homo sapien
gccacacacccttgcctaagcccct

SEQ ID NO: 3412644 - DNA, 25 bp, Homo sapien
ttgcctaagcccctggctctggtgc

SEQ ID NO: 3412645 - DNA, 25 bp, Homo sapien
gctctggtgcctccatggagcagaa

SEQ ID NO: 3412646 - DNA, 25 bp, Homo sapien
tccacggatgagtcacaatctgaag

SEQ ID NO: 3412647 - DNA, 25 bp, Homo sapien
cagatggagggtaccctatttacaa

SEQ ID NO: 3412648 - DNA, 25 bp, Homo sapien
tatttacaactgagtcagccaagcc

SEQ ID NO: 3412649 - DNA, 25 bp, Homo sapien
cagccaagccactgatgggaatata

SEQ ID NO: 3412650 - DNA, 25 bp, Homo sapien
tcatcagcattggcaagacaggagg

SEQ ID NO: 3412651 - DNA, 25 bp, Homo sapien
agacaggagggaatttctgtctgat

SEQ ID NO: 3412652 - DNA, 25 bp, Homo sapien
catccagatagctgacctggaaagc

SEQ ID NO: 3412653 - DNA, 25 bp, Homo sapien
tagctgacctggaaagccgacccgg

SEQ ID NO: 3412654 - DNA, 25 bp, Homo sapien
agatagctgacctggaaagccgacc

SEQ ID NO: 3412655 - DNA, 25 bp, Homo sapien
tccagatagctgacctggaaagccg

SEQ ID NO: 3412656 - DNA, 25 bp, Homo sapien
ggacactttcatctgccactgccat

SEQ ID NO: 3412657 - DNA, 25 bp, Homo sapien
tttctgtgtccgcattttcacaggg

SEQ ID NO: 3412658 - DNA, 25 bp, Homo sapien
cattttcacaggggacactttcatc

SEQ ID NO: 3412659 - DNA, 25 bp, Homo sapien
aggactctttctgtgtccgcatttt

SEQ ID NO: 3412660 - DNA, 25 bp, Homo sapien
gagactggtggtgcttgttacctcc

SEQ ID NO: 3412661 - DNA, 25 bp, Homo sapien
gactggtggtgcttgttacctcctc

SEQ ID NO: 3412662 - DNA, 25 bp, Homo sapien
aggagactggtggtgcttgttacct

SEQ ID NO: 3412663 - DNA, 25 bp, Homo sapien
tggtggtgcttgttacctcctctag

SEQ ID NO: 3412664 - DNA, 25 bp, Homo sapien
atgtctctttggttttccaaatcac

SEQ ID NO: 3412665 - DNA, 25 bp, Homo sapien
catgtctctttggttttccaaatca

SEQ ID NO: 3412666 - DNA, 25 bp, Homo sapien
gaaacctttctgacaactctcctta

SEQ ID NO: 3412667 - DNA, 25 bp, Homo sapien
agtttatctgcagggaaacctttct

SEQ ID NO: 3412668 - DNA, 25 bp, Homo sapien
gtccacaggttgagatctttaaaag

SEQ ID NO: 3412669 - DNA, 25 bp, Homo sapien
tcccgtccacaggttgagatcttta

SEQ ID NO: 3412670 - DNA, 25 bp, Homo sapien
ttgagacagcgtctcctctgtcccc

SEQ ID NO: 3412671 - DNA, 25 bp, Homo sapien
gcaccacctaggctcactgcagcct

SEQ ID NO: 3412672 - DNA, 25 bp, Homo sapien
tacaggtgtgtaccctcatgcctgg

SEQ ID NO: 3412673 - DNA, 25 bp, Homo sapien
ggttggagtgcagtggcaccaccta

SEQ ID NO: 3412674 - DNA, 25 bp, Homo sapien
taggtttggactgttgactcagctg

SEQ ID NO: 3412675 - DNA, 25 bp, Homo sapien
ctccattcagattgtggccccttgc

SEQ ID NO: 3412676 - DNA, 25 bp, Homo sapien
aagccaaaattcaccttgcgttcct

SEQ ID NO: 3412677 - DNA, 25 bp, Homo sapien
ttgtggccccttgctttgacctgct

SEQ ID NO: 3412678 - DNA, 25 bp, Homo sapien
gttgccagctctgtagatggaagcg

SEQ ID NO: 3412679 - DNA, 25 bp, Homo sapien
ctccgttgccagctctgtagatgga

SEQ ID NO: 3412680 - DNA, 25 bp, Homo sapien
cgttgccagctctgtagatggaagc

SEQ ID NO: 3412681 - DNA, 25 bp, Homo sapien
tccgttgccagctctgtagatggaa

SEQ ID NO: 3412682 - DNA, 25 bp, Homo sapien
gcagtcttagctattggctggcccg

SEQ ID NO: 3412683 - DNA, 25 bp, Homo sapien
gagttcctgtaaatcaggatgggac

SEQ ID NO: 3412684 - DNA, 25 bp, Homo sapien
gattgatcgctggtgtgagttcctg

SEQ ID NO: 3412685 - DNA, 25 bp, Homo sapien
cagtgcagactgagtagagagtccc

SEQ ID NO: 3412686 - DNA, 25 bp, Homo sapien
ggcccgcccccattccgtctcaggc

SEQ ID NO: 3412687 - DNA, 25 bp, Homo sapien
gccccagtccctcttagcgaattcc

SEQ ID NO: 3412688 - DNA, 25 bp, Homo sapien
gcccccattccgtctcaggccccag

SEQ ID NO: 3412689 - DNA, 25 bp, Homo sapien
gcccgcccccattccgtctcaggcc

SEQ ID NO: 3412690 - DNA, 25 bp, Homo sapien
ggagggtcagcagggtcagcctgga

SEQ ID NO: 3412691 - DNA, 25 bp, Homo sapien
cagcaggagggtcagcagggtcagc

SEQ ID NO: 3412692 - DNA, 25 bp, Homo sapien
tcagcagggtcagcctggaggccat

SEQ ID NO: 3412693 - DNA, 25 bp, Homo sapien
ggtcagcagggtcagcctggaggcc

SEQ ID NO: 3412694 - DNA, 25 bp, Homo sapien
tatgtgataccaacttgcgcgtgca

SEQ ID NO: 3412695 - DNA, 25 bp, Homo sapien
tcctaaaatgcgcagggtagcccct

SEQ ID NO: 3412696 - DNA, 25 bp, Homo sapien
tccactgagaaaccacgcattagct

SEQ ID NO: 3412697 - DNA, 25 bp, Homo sapien
catattaactagtccagggtctcac

SEQ ID NO: 3412698 - DNA, 25 bp, Homo sapien
ctccaggatgggttcaacgaatagc

SEQ ID NO: 3412699 - DNA, 25 bp, Homo sapien
tgtcggcaagctggaaacctccagg

SEQ ID NO: 3412700 - DNA, 25 bp, Homo sapien
caacgaatagcatcttggagataac

SEQ ID NO: 3412701 - DNA, 25 bp, Homo sapien
tggagataactgttgttgcgacctt

SEQ ID NO: 3412702 - DNA, 25 bp, Homo sapien
ggacccagtagtgggctgggtagga

SEQ ID NO: 3412703 - DNA, 25 bp, Homo sapien
ggctgggtaggagaatctgttggga

SEQ ID NO: 3412704 - DNA, 25 bp, Homo sapien
agaaggacccagtagtgggctgggt

SEQ ID NO: 3412705 - DNA, 25 bp, Homo sapien
ggtaggagaatctgttgggagctgg

SEQ ID NO: 3412706 - DNA, 25 bp, Homo sapien
aagtcagagcagagagtaacaggtc

SEQ ID NO: 3412707 - DNA, 25 bp, Homo sapien
caagtcagagcagagagtaacaggt

SEQ ID NO: 3412708 - DNA, 25 bp, Homo sapien
accaaagcatcccccaacacggcct

SEQ ID NO: 3412709 - DNA, 25 bp, Homo sapien
taccaaagcatcccccaacacggcc

SEQ ID NO: 3412710 - DNA, 25 bp, Homo sapien
gaaaaggccatgttggtctccacct

SEQ ID NO: 3412711 - DNA, 25 bp, Homo sapien
cgagcaggacctgggtaaggaggct

SEQ ID NO: 3412712 - DNA, 25 bp, Homo sapien
gggaaaaggccatgttggtctccac

SEQ ID NO: 3412713 - DNA, 25 bp, Homo sapien
ttcattgctgagaaggcgtggtaga

SEQ ID NO: 3412714 - DNA, 25 bp, Homo sapien
tctggattggtgactcttatgggag

SEQ ID NO: 3412715 - DNA, 25 bp, Homo sapien
tatgggagtgtccaacaaatgacct

SEQ ID NO: 3412716 - DNA, 25 bp, Homo sapien
ggagagaattcaagcagggtcttac

SEQ ID NO: 3412717 - DNA, 25 bp, Homo sapien
gaatgaaaagatacatccctctacc

SEQ ID NO: 3412718 - DNA, 25 bp, Homo sapien
gtcacagagctagaaggcagtacta

SEQ ID NO: 3412719 - DNA, 25 bp, Homo sapien
accgcatccggcctggctttctgct

SEQ ID NO: 3412720 - DNA, 25 bp, Homo sapien
tacacaagaggactcaaggctcaga

SEQ ID NO: 3412721 - DNA, 25 bp, Homo sapien
gaggtagatagcatcatcactattt

SEQ ID NO: 3412722 - DNA, 25 bp, Homo sapien
gaggatgctctccaggtttgttttg

SEQ ID NO: 3412723 - DNA, 25 bp, Homo sapien
gagagactgaggtgacacctttggt

SEQ ID NO: 3412724 - DNA, 25 bp, Homo sapien
aggtgacacctttggtcgtgaagcc

SEQ ID NO: 3412725 - DNA, 25 bp, Homo sapien
tggtggacacaggtgaagtccttgg

SEQ ID NO: 3412726 - DNA, 25 bp, Homo sapien
aacaaaggcatgtctgaagcccaca

SEQ ID NO: 3412727 - DNA, 25 bp, Homo sapien
tcactctaacttcgaattccttggc

SEQ ID NO: 3412728 - DNA, 25 bp, Homo sapien
ccgtctcagtccttcatagctggaa

SEQ ID NO: 3412729 - DNA, 25 bp, Homo sapien
tgttacccaacctagagtacagagg

SEQ ID NO: 3412730 - DNA, 25 bp, Homo sapien
ggcatgagtcctgaacacgtcgttc

SEQ ID NO: 3412731 - DNA, 25 bp, Homo sapien
caagaacaagagaagtagccccaag

SEQ ID NO: 3412732 - DNA, 25 bp, Homo sapien
gctcacttagtgaatacggcatggt

SEQ ID NO: 3412733 - DNA, 25 bp, Homo sapien
ctatgtgactatggctcggcaagat

SEQ ID NO: 3412734 - DNA, 25 bp, Homo sapien
tgttgatgagctccaagttggcgtc

SEQ ID NO: 3412735 - DNA, 25 bp, Homo sapien
cagggtccgagaggcattcacaaag

SEQ ID NO: 3412736 - DNA, 25 bp, Homo sapien
cactgttgttgcttaggactctggg

SEQ ID NO: 3412737 - DNA, 25 bp, Homo sapien
tcaggtagatagcattgaggaggac

SEQ ID NO: 3412738 - DNA, 25 bp, Homo sapien
ataactgagtttttgaagtgaaagg

SEQ ID NO: 3412739 - DNA, 25 bp, Homo sapien
tcatgggcacttttataactgagtt

SEQ ID NO: 3412740 - DNA, 25 bp, Homo sapien
ggtacttcttgctattcatcatggg

SEQ ID NO: 3412741 - DNA, 25 bp, Homo sapien
aaatgggccacagggtacttcttgc

SEQ ID NO: 3412742 - DNA, 25 bp, Homo sapien
ccattcaatatagtagagatgcatg

SEQ ID NO: 3412743 - DNA, 25 bp, Homo sapien
ctaaaatatacaatgtctgccttgg

SEQ ID NO: 3412744 - DNA, 25 bp, Homo sapien
ccagcctaaaatatacaatgtctgc

SEQ ID NO: 3412745 - DNA, 25 bp, Homo sapien
tgcatgaagaaacttgagaatcctg

SEQ ID NO: 3412746 - DNA, 25 bp, Homo sapien
ttggcttggggagatagaaattact

SEQ ID NO: 3412747 - DNA, 25 bp, Homo sapien
caaaactcatattggcttggggaga

SEQ ID NO: 3412748 - DNA, 25 bp, Homo sapien
gaatgctcaccttaacctatcacct

SEQ ID NO: 3412749 - DNA, 25 bp, Homo sapien
catattatacctgctttgtatttga

SEQ ID NO: 3412750 - DNA, 25 bp, Homo sapien
cttaaaatgcttatgggaatactaa

SEQ ID NO: 3412751 - DNA, 25 bp, Homo sapien
tgaggttacagtaagtgaggattgt

SEQ ID NO: 3412752 - DNA, 25 bp, Homo sapien
ggagtttaatctgttcaatatggca

SEQ ID NO: 3412753 - DNA, 25 bp, Homo sapien
gaaaatcgagcatattaaattttta

SEQ ID NO: 3412754 - DNA, 25 bp, Homo sapien
gataccagctgggtgaacagtgctg

SEQ ID NO: 3412755 - DNA, 25 bp, Homo sapien
tcaacaagcatcagtcagacctaag

SEQ ID NO: 3412756 - DNA, 25 bp, Homo sapien
cactgacgagctatgtaatatgggc

SEQ ID NO: 3412757 - DNA, 25 bp, Homo sapien
tgattataccctgactccaccactg

SEQ ID NO: 3412758 - DNA, 25 bp, Homo sapien
tcaagacgatgtttcaggttctggg

SEQ ID NO: 3412759 - DNA, 25 bp, Homo sapien
tcctggctggtcgtcactttgatgc

SEQ ID NO: 3412760 - DNA, 25 bp, Homo sapien
caaactcagattgtgggagagctgc

SEQ ID NO: 3412761 - DNA, 25 bp, Homo sapien
gggtaccaggatcaccaaactcaga

SEQ ID NO: 3412762 - DNA, 25 bp, Homo sapien
taacacagtgaaaccccgtctctac

SEQ ID NO: 3412763 - DNA, 25 bp, Homo sapien
cgggaggctgaggcgagagaatggc

SEQ ID NO: 3412764 - DNA, 25 bp, Homo sapien
cggagattgtgaccatcctggttaa

SEQ ID NO: 3412765 - DNA, 25 bp, Homo sapien
gtccggagattgtgaccatcctggt

SEQ ID NO: 3412766 - DNA, 25 bp, Homo sapien
ttcgtgggatcctctattagtgggc

SEQ ID NO: 3412767 - DNA, 25 bp, Homo sapien
atgtcattgcctccttatctcccag

SEQ ID NO: 3412768 - DNA, 25 bp, Homo sapien
tctctctcaaggtgagaggccttgc

SEQ ID NO: 3412769 - DNA, 25 bp, Homo sapien
ctaatatttggtctccgatcccagt

SEQ ID NO: 3412770 - DNA, 25 bp, Homo sapien
tgctgcatcgcagaaacctgaagat

SEQ ID NO: 3412771 - DNA, 25 bp, Homo sapien
cccatgaagacagggaacttgtgct

SEQ ID NO: 3412772 - DNA, 25 bp, Homo sapien
gcccacacaggttaaggtcataaga

SEQ ID NO: 3412773 - DNA, 25 bp, Homo sapien
aagaggaagggctgctgcacttcaa

SEQ ID NO: 3412774 - DNA, 25 bp, Homo sapien
cagaccctcagggagcccttttggt

SEQ ID NO: 3412775 - DNA, 25 bp, Homo sapien
gaagggctaatagaagcaggtccct

SEQ ID NO: 3412776 - DNA, 25 bp, Homo sapien
cccttttggtggatagcggacacct

SEQ ID NO: 3412777 - DNA, 25 bp, Homo sapien
aaaaagtggtttggagagcatggca

SEQ ID NO: 3412778 - DNA, 25 bp, Homo sapien
tgctactgatcagcaagaaggtttt

SEQ ID NO: 3412779 - DNA, 25 bp, Homo sapien
gagtgcagtacctattcttaggcac

SEQ ID NO: 3412780 - DNA, 25 bp, Homo sapien
gcagtacctattcttaggcacaatc

SEQ ID NO: 3412781 - DNA, 25 bp, Homo sapien
agacgcgttctgcctttgttgccca

SEQ ID NO: 3412782 - DNA, 25 bp, Homo sapien
gaggaatcgccaggaaactcagttc

SEQ ID NO: 3412783 - DNA, 25 bp, Homo sapien
tctgatgaagcagagctagatggcc

SEQ ID NO: 3412784 - DNA, 25 bp, Homo sapien
tatttcagcaagagggcaagtgttc

SEQ ID NO: 3412785 - DNA, 25 bp, Homo sapien
tgacagtctggctgtagcagcagag

SEQ ID NO: 3412786 - DNA, 25 bp, Homo sapien
cgccggccgggaccgaggttgcgag

SEQ ID NO: 3412787 - DNA, 25 bp, Homo sapien
accctctcctctgccgatctcgctc

SEQ ID NO: 3412788 - DNA, 25 bp, Homo sapien
ttgcgaggccggtgggccgcggaga

SEQ ID NO: 3412789 - DNA, 25 bp, Homo sapien
cgggaccgaggttgcgaggccggtg

SEQ ID NO: 3412790 - DNA, 25 bp, Homo sapien
agaccaggagggtcctgaaagccat

SEQ ID NO: 3412791 - DNA, 25 bp, Homo sapien
gggaggccccggctcaagttctctc

SEQ ID NO: 3412792 - DNA, 25 bp, Homo sapien
ctcctcgcagccatggcgacgggag

SEQ ID NO: 3412793 - DNA, 25 bp, Homo sapien
tccagaagcgagtgtagagaccgag

SEQ ID NO: 3412794 - DNA, 25 bp, Homo sapien
cccttttaacattgcactgctagtg

SEQ ID NO: 3412795 - DNA, 25 bp, Homo sapien
gacaggtgcagacagtagcacaatg

SEQ ID NO: 3412796 - DNA, 25 bp, Homo sapien
cagacagtagcacaatgtgaaaaga

SEQ ID NO: 3412797 - DNA, 25 bp, Homo sapien
cactacacggccaatgcccttttaa

SEQ ID NO: 3412798 - DNA, 25 bp, Homo sapien
gacaggtgtgccctcaagcagcatt

SEQ ID NO: 3412799 - DNA, 25 bp, Homo sapien
taagattaagtcatgggcaacgctg

SEQ ID NO: 3412800 - DNA, 25 bp, Homo sapien
tcttagcctaaggagttgccaccac

SEQ ID NO: 3412801 - DNA, 25 bp, Homo sapien
tgtaggtatgggatgccagcagcac

SEQ ID NO: 3412802 - DNA, 25 bp, Homo sapien
ggtcaccctctaaagtggcagtccc

SEQ ID NO: 3412803 - DNA, 25 bp, Homo sapien
aggaagagggtcaccctctaaagtg

SEQ ID NO: 3412804 - DNA, 25 bp, Homo sapien
aagagggtcaccctctaaagtggca

SEQ ID NO: 3412805 - DNA, 25 bp, Homo sapien
gagggtcaccctctaaagtggcagt

SEQ ID NO: 3412806 - DNA, 25 bp, Homo sapien
ctccactcggtagctgacattttct

SEQ ID NO: 3412807 - DNA, 25 bp, Homo sapien
ccactcggtagctgacattttctgt

SEQ ID NO: 3412808 - DNA, 25 bp, Homo sapien
gctccactcggtagctgacattttc

SEQ ID NO: 3412809 - DNA, 25 bp, Homo sapien
tccactcggtagctgacattttctg

SEQ ID NO: 3412810 - DNA, 25 bp, Homo sapien
ggccagctgaacagcgcctcttgct

SEQ ID NO: 3412811 - DNA, 25 bp, Homo sapien
gttgcgggccagctgaacagcgcct

SEQ ID NO: 3412812 - DNA, 25 bp, Homo sapien
ggtcaacgtgggttgcgggccagct

SEQ ID NO: 3412813 - DNA, 25 bp, Homo sapien
tcctgagacagggtcaacgtgggtt

SEQ ID NO: 3412814 - DNA, 25 bp, Homo sapien
cagatggaagttcccttgggctgtc

SEQ ID NO: 3412815 - DNA, 25 bp, Homo sapien
ttgaaatcataacggtggaaaaaga

SEQ ID NO: 3412816 - DNA, 25 bp, Homo sapien
ggactggactgacagtgcaacccca

SEQ ID NO: 3412817 - DNA, 25 bp, Homo sapien
gaaggcccaggctctagtcttaaag

SEQ ID NO: 3412818 - DNA, 25 bp, Homo sapien
taactccgtgtgagtctacctcttt

SEQ ID NO: 3412819 - DNA, 25 bp, Homo sapien
ctgtttaactccgtgtgagtctacc

SEQ ID NO: 3412820 - DNA, 25 bp, Homo sapien
gtttaactccgtgtgagtctacctc

SEQ ID NO: 3412821 - DNA, 25 bp, Homo sapien
tttaactccgtgtgagtctacctct

SEQ ID NO: 3412822 - DNA, 25 bp, Homo sapien
caccaagactttccgcagctatctg

SEQ ID NO: 3412823 - DNA, 25 bp, Homo sapien
gccaaacacgatgagcttatttcca

SEQ ID NO: 3412824 - DNA, 25 bp, Homo sapien
cttatttccaaggtacgcgaagcgg

SEQ ID NO: 3412825 - DNA, 25 bp, Homo sapien
gctgtcaccgcacttacagctgtgt

SEQ ID NO: 3412826 - DNA, 25 bp, Homo sapien
gggctgcacggcgccagcccctcca

SEQ ID NO: 3412827 - DNA, 25 bp, Homo sapien
ctgcgaccgtctctgcgggggctgc

SEQ ID NO: 3412828 - DNA, 25 bp, Homo sapien
tgcgaccgtctctgcgggggctgca

SEQ ID NO: 3412829 - DNA, 25 bp, Homo sapien
tgcgggggctgcacggcgccagccc

SEQ ID NO: 3412830 - DNA, 25 bp, Homo sapien
tcctgaggtcgcagctcccctgatg

SEQ ID NO: 3412831 - DNA, 25 bp, Homo sapien
gaaagtagaggtatgggtgagctga

SEQ ID NO: 3412832 - DNA, 25 bp, Homo sapien
cattccctcaggaggggtcctcctg

SEQ ID NO: 3412833 - DNA, 25 bp, Homo sapien
tatttctatctggttctcgtctggg

SEQ ID NO: 3412834 - DNA, 25 bp, Homo sapien
gacagggcgacaatgcaactggatg

SEQ ID NO: 3412835 - DNA, 25 bp, Homo sapien
gagcagaatggggatccaggggaca

SEQ ID NO: 3412836 - DNA, 25 bp, Homo sapien
ccaggggacagggcgacaatgcaac

SEQ ID NO: 3412837 - DNA, 25 bp, Homo sapien
gggacagggcgacaatgcaactgga

SEQ ID NO: 3412838 - DNA, 25 bp, Homo sapien
ctctgtggaaaatggtggaggctgc

SEQ ID NO: 3412839 - DNA, 25 bp, Homo sapien
gcagatgacgttgctcccatggcag

SEQ ID NO: 3412840 - DNA, 25 bp, Homo sapien
ctccctggctttggcgccagaagcc

SEQ ID NO: 3412841 - DNA, 25 bp, Homo sapien
gagggagaaacaccgactccctggc

SEQ ID NO: 3412842 - DNA, 25 bp, Homo sapien
cacagtgcctgtgcgatgcagagcc

SEQ ID NO: 3412843 - DNA, 25 bp, Homo sapien
cagtgcctgtgcgatgcagagcctc

SEQ ID NO: 3412844 - DNA, 25 bp, Homo sapien
gtgcctgtgcgatgcagagcctcac

SEQ ID NO: 3412845 - DNA, 25 bp, Homo sapien
gacacagtgcctgtgcgatgcagag

SEQ ID NO: 3412846 - DNA, 25 bp, Homo sapien
acgaggagagcctgtatgccctggc

SEQ ID NO: 3412847 - DNA, 25 bp, Homo sapien
cgcgtgggcagaaggcaatcttcct

SEQ ID NO: 3412848 - DNA, 25 bp, Homo sapien
ccagaatgagtgaaccaaggtgcga

SEQ ID NO: 3412849 - DNA, 25 bp, Homo sapien
taaagttctagtgaagagtcccaga

SEQ ID NO: 3412850 - DNA, 25 bp, Homo sapien
gagagactgcctggcggccttcaga

SEQ ID NO: 3412851 - DNA, 25 bp, Homo sapien
tctatggaggttttgcggagagact

SEQ ID NO: 3412852 - DNA, 25 bp, Homo sapien
cggagagactgcctggcggccttca

SEQ ID NO: 3412853 - DNA, 25 bp, Homo sapien
ctgaagatagtctctatggaggttt

SEQ ID NO: 3412854 - DNA, 25 bp, Homo sapien
ggaactcgctggcaaagttgaaggc

SEQ ID NO: 3412855 - DNA, 25 bp, Homo sapien
agccggagcccaatgtcaccctgaa

SEQ ID NO: 3412856 - DNA, 25 bp, Homo sapien
tccatgccccttgaagaaggtgttt

SEQ ID NO: 3412857 - DNA, 25 bp, Homo sapien
gaaggcaaacctgtgaagcagagac

SEQ ID NO: 3412858 - DNA, 25 bp, Homo sapien
tgtgtgtgctccctcactctgcatc

SEQ ID NO: 3412859 - DNA, 25 bp, Homo sapien
aatgggaaagtgtatcatcttaaat

SEQ ID NO: 3412860 - DNA, 25 bp, Homo sapien
ctgaaatgggaaagtgtatcatctt

SEQ ID NO: 3412861 - DNA, 25 bp, Homo sapien
ccatctcttccttcaccagccttgc

SEQ ID NO: 3412862 - DNA, 25 bp, Homo sapien
taaatgcacgggtctgcactggaca

SEQ ID NO: 3412863 - DNA, 25 bp, Homo sapien
cataatgccgcggaaacaactgcta

SEQ ID NO: 3412864 - DNA, 25 bp, Homo sapien
gtaatattaagagacgccctacgtg

SEQ ID NO: 3412865 - DNA, 25 bp, Homo sapien
taatttcccagaaggcctgtctcag

SEQ ID NO: 3412866 - DNA, 25 bp, Homo sapien
acagaggtttcaccaagctgtcatc

SEQ ID NO: 3412867 - DNA, 25 bp, Homo sapien
gacaagccacgaagcacaaaatcct

SEQ ID NO: 3412868 - DNA, 25 bp, Homo sapien
gcttggcacatggaaggcatttcaa

SEQ ID NO: 3412869 - DNA, 25 bp, Homo sapien
gaggaagacagcctgacagaggttt

SEQ ID NO: 3412870 - DNA, 25 bp, Homo sapien
gtctaggtcccgcgacggcctgctt

SEQ ID NO: 3412871 - DNA, 25 bp, Homo sapien
tcggtctaggtcccgcgacggcctg

SEQ ID NO: 3412872 - DNA, 25 bp, Homo sapien
gtctcggtctaggtcccgcgacggc

SEQ ID NO: 3412873 - DNA, 25 bp, Homo sapien
tgtctcggtctaggtcccgcgacgg

SEQ ID NO: 3412874 - DNA, 25 bp, Homo sapien
cagcccaggaaacagaagggaggcc

SEQ ID NO: 3412875 - DNA, 25 bp, Homo sapien
cagaagggaggcccgggagaaagag

SEQ ID NO: 3412876 - DNA, 25 bp, Homo sapien
aggcccgggagaaagagagactcac

SEQ ID NO: 3412877 - DNA, 25 bp, Homo sapien
ctgcagcccaggaaacagaagggag

SEQ ID NO: 3412878 - DNA, 25 bp, Homo sapien
tcattattcgtgcagccggagggag

SEQ ID NO: 3412879 - DNA, 25 bp, Homo sapien
ttgcgctgtgaaaggacacgcggtc

SEQ ID NO: 3412880 - DNA, 25 bp, Homo sapien
aaggattgttttgaacgtgacgcca

SEQ ID NO: 3412881 - DNA, 25 bp, Homo sapien
gccctttgggatgtgtagtttgccg

SEQ ID NO: 3412882 - DNA, 25 bp, Homo sapien
gtcctcccgtgcagaatttaaacca

SEQ ID NO: 3412883 - DNA, 25 bp, Homo sapien
gccaggagcccaacaggtaaactca

SEQ ID NO: 3412884 - DNA, 25 bp, Homo sapien
cacgccggaaacaaacgcagttccg

SEQ ID NO: 3412885 - DNA, 25 bp, Homo sapien
tacaagcggttcttgcccggaccca

SEQ ID NO: 3412886 - DNA, 25 bp, Homo sapien
tcttgtttcgggtcagctctgtgcc

SEQ ID NO: 3412887 - DNA, 25 bp, Homo sapien
cgtagttgagcagaaggcgacacac

SEQ ID NO: 3412888 - DNA, 25 bp, Homo sapien
tcagtgcggccgctcagttgcacag

SEQ ID NO: 3412889 - DNA, 25 bp, Homo sapien
gcgacacactgtagacttgcccaca

SEQ ID NO: 3412890 - DNA, 25 bp, Homo sapien
caggccgctcgatgtagagggcccc

SEQ ID NO: 3412891 - DNA, 25 bp, Homo sapien
cacataagtgggacggcggcccaaa

SEQ ID NO: 3412892 - DNA, 25 bp, Homo sapien
tagtgccaggagtggtggaaccaaa

SEQ ID NO: 3412893 - DNA, 25 bp, Homo sapien
gatagagaaaccctcttcgacatct

SEQ ID NO: 3412894 - DNA, 25 bp, Homo sapien
acattcccgccggaagtccttggag

SEQ ID NO: 3412895 - DNA, 25 bp, Homo sapien
ccagatttagggagcagcacagtgc

SEQ ID NO: 3412896 - DNA, 25 bp, Homo sapien
ggttgaacacatctgctaaacgaga

SEQ ID NO: 3412897 - DNA, 25 bp, Homo sapien
cattgtacagtcgttcttgatccag

SEQ ID NO: 3412898 - DNA, 25 bp, Homo sapien
aggttctcctctgtaccctcggcag

SEQ ID NO: 3412899 - DNA, 25 bp, Homo sapien
taggtggtgcaccatatctcgccca

SEQ ID NO: 3412900 - DNA, 25 bp, Homo sapien
gaagccagctacacttgtctcggac

SEQ ID NO: 3412901 - DNA, 25 bp, Homo sapien
cagtgctaacactcagtaggtggtg

SEQ ID NO: 3412902 - DNA, 25 bp, Homo sapien
ccatgaaccggatatccatgatgag

SEQ ID NO: 3412903 - DNA, 25 bp, Homo sapien
ccggatatccatgatgagaaggaag

SEQ ID NO: 3412904 - DNA, 25 bp, Homo sapien
tatccatgatgagaaggaagttctt

SEQ ID NO: 3412905 - DNA, 25 bp, Homo sapien
ttcagatccatgaaccggatatcca

SEQ ID NO: 3412906 - DNA, 25 bp, Homo sapien
acagtttactggtcaggtggcccca

SEQ ID NO: 3412907 - DNA, 25 bp, Homo sapien
caaagtggcatcttaggtggtctaa

SEQ ID NO: 3412908 - DNA, 25 bp, Homo sapien
caagattagaagagtcaggttacca

SEQ ID NO: 3412909 - DNA, 25 bp, Homo sapien
gaaatgcaattctccagggtcttag

SEQ ID NO: 3412910 - DNA, 25 bp, Homo sapien
atggcaaaaatatttattaaaatga

SEQ ID NO: 3412911 - DNA, 25 bp, Homo sapien
aaggtgtttcacaagccacttccct

SEQ ID NO: 3412912 - DNA, 25 bp, Homo sapien
cagcgtcaatccagcatttattgca

SEQ ID NO: 3412913 - DNA, 25 bp, Homo sapien
gactgtcctcgggtttggtctcaaa

SEQ ID NO: 3412914 - DNA, 25 bp, Homo sapien
tgtggttctgacactagcattaggc

SEQ ID NO: 3412915 - DNA, 25 bp, Homo sapien
tgcagcaacacaacgacgtacgcac

SEQ ID NO: 3412916 - DNA, 25 bp, Homo sapien
gggcgtgcgcgcgaaccctggcgac

SEQ ID NO: 3412917 - DNA, 25 bp, Homo sapien
cgagaagacgagagcgcgcacgtaa

SEQ ID NO: 3412918 - DNA, 25 bp, Homo sapien
cgacctcgcggcctgattggctgca

SEQ ID NO: 3412919 - DNA, 25 bp, Homo sapien
cgcgctcccgccaggcgtcgctcgt

SEQ ID NO: 3412920 - DNA, 25 bp, Homo sapien
ggcgtcgctcgtctcggagccggcg

SEQ ID NO: 3412921 - DNA, 25 bp, Homo sapien
cgccaggcgtcgctcgtctcggagc

SEQ ID NO: 3412922 - DNA, 25 bp, Homo sapien
gcggccgttgccctcagtgccgggt

SEQ ID NO: 3412923 - DNA, 25 bp, Homo sapien
cgccgtcgttgtcaccgccgcctcc

SEQ ID NO: 3412924 - DNA, 25 bp, Homo sapien
accgccgtcgttgtcaccgccgcct

SEQ ID NO: 3412925 - DNA, 25 bp, Homo sapien
caccgccgtcgttgtcaccgccgcc

SEQ ID NO: 3412926 - DNA, 25 bp, Homo sapien
ccgtcgttgtcaccgccgcctcccg

SEQ ID NO: 3412927 - DNA, 25 bp, Homo sapien
ctggtacggcacttccggttccgca

SEQ ID NO: 3412928 - DNA, 25 bp, Homo sapien
tggtacggcacttccggttccgcag

SEQ ID NO: 3412929 - DNA, 25 bp, Homo sapien
agggaccggtgtcctccgcactcac

SEQ ID NO: 3412930 - DNA, 25 bp, Homo sapien
tcgctggtacggcacttccggttcc

SEQ ID NO: 3412931 - DNA, 25 bp, Homo sapien
tggcggtcgtggatccccggcctct

SEQ ID NO: 3412932 - DNA, 25 bp, Homo sapien
gttccgagccctggcggtcgtggat

SEQ ID NO: 3412933 - DNA, 25 bp, Homo sapien
gctgagtggccgtctctaacccgtt

SEQ ID NO: 3412934 - DNA, 25 bp, Homo sapien
tctactcgtcgtccgtttccaaggc

SEQ ID NO: 3412935 - DNA, 25 bp, Homo sapien
caggcccaccgaggttgagagagcg

SEQ ID NO: 3412936 - DNA, 25 bp, Homo sapien
aagaaggaatccacggcggccaggc

SEQ ID NO: 3412937 - DNA, 25 bp, Homo sapien
gaaaggagaatcacccgttggggca

SEQ ID NO: 3412938 - DNA, 25 bp, Homo sapien
tgacgaccgctgaaaccgaaaagaa

SEQ ID NO: 3412939 - DNA, 25 bp, Homo sapien
tataccgaggtagcaaaatacatgg

SEQ ID NO: 3412940 - DNA, 25 bp, Homo sapien
aatattgacaaacgcattcgggctc

SEQ ID NO: 3412941 - DNA, 25 bp, Homo sapien
gataccagcagtaccaaggacaaca

SEQ ID NO: 3412942 - DNA, 25 bp, Homo sapien
taaacgcatggagcactcggctggt

SEQ ID NO: 3412943 - DNA, 25 bp, Homo sapien
ttttcatccactacctgcccagaga

SEQ ID NO: 3412944 - DNA, 25 bp, Homo sapien
agaactcaagaggtcacatgcccct

SEQ ID NO: 3412945 - DNA, 25 bp, Homo sapien
taaaattgaaggctacagaatgccc

SEQ ID NO: 3412946 - DNA, 25 bp, Homo sapien
tatctggtgacgcagtcccttatcc

SEQ ID NO: 3412947 - DNA, 25 bp, Homo sapien
caagatacagctcatggatggaggc

SEQ ID NO: 3412948 - DNA, 25 bp, Homo sapien
ttgatggctaaagctggacaacagc

SEQ ID NO: 3412949 - DNA, 25 bp, Homo sapien
ttactgtggatgaaaacgaagttcc

SEQ ID NO: 3412950 - DNA, 25 bp, Homo sapien
gatgcagagttcaaccaggttactg

SEQ ID NO: 3412951 - DNA, 25 bp, Homo sapien
tgcagagaccgggacatacttgctg

SEQ ID NO: 3412952 - DNA, 25 bp, Homo sapien
tgtcgtagctcccactaggaagatg

SEQ ID NO: 3412953 - DNA, 25 bp, Homo sapien
cagagaccgggacatacttgctggg

SEQ ID NO: 3412954 - DNA, 25 bp, Homo sapien
aaggcaaagaagagtgtcgtagctc

SEQ ID NO: 3412955 - DNA, 25 bp, Homo sapien
taagggtgtcaaactggtcttgtac

SEQ ID NO: 3412956 - DNA, 25 bp, Homo sapien
tatgtcaggacaactctttgtaggc

SEQ ID NO: 3412957 - DNA, 25 bp, Homo sapien
gaaaatagaccctccccaattgagc

SEQ ID NO: 3412958 - DNA, 25 bp, Homo sapien
gagggctcctactttactggcacca

SEQ ID NO: 3412959 - DNA, 25 bp, Homo sapien
tagttcagagagttttcctcttgcc

SEQ ID NO: 3412960 - DNA, 25 bp, Homo sapien
ggattctccagggaactgaacctcg

SEQ ID NO: 3412961 - DNA, 25 bp, Homo sapien
gccccacataggagctagttcagag

SEQ ID NO: 3412962 - DNA, 25 bp, Homo sapien
gcctcagcccagatatatgcttaca

SEQ ID NO: 3412963 - DNA, 25 bp, Homo sapien
ctggggcttctaataatgtagctag

SEQ ID NO: 3412964 - DNA, 25 bp, Homo sapien
gcttctaataatgtagctagttgta

SEQ ID NO: 3412965 - DNA, 25 bp, Homo sapien
gggcttctaataatgtagctagttg

SEQ ID NO: 3412966 - DNA, 25 bp, Homo sapien
ttctaataatgtagctagttgtagc

SEQ ID NO: 3412967 - DNA, 25 bp, Homo sapien
taactagttgaagtctacatgcctc

SEQ ID NO: 3412968 - DNA, 25 bp, Homo sapien
gaattaagacaggatccccaccatt

SEQ ID NO: 3412969 - DNA, 25 bp, Homo sapien
gagggcttatcccacttacctagga

SEQ ID NO: 3412970 - DNA, 25 bp, Homo sapien
gctgtaggtcaacgttctcactgta

SEQ ID NO: 3412971 - DNA, 25 bp, Homo sapien
ctacaaccttctggatatcaacttg

SEQ ID NO: 3412972 - DNA, 25 bp, Homo sapien
tccagtatctgttgccaaaataaag

SEQ ID NO: 3412973 - DNA, 25 bp, Homo sapien
gataaagtgtgtaatcctggaatgg

SEQ ID NO: 3412974 - DNA, 25 bp, Homo sapien
caaaataaagtctgcccccacagtg

SEQ ID NO: 3412975 - DNA, 25 bp, Homo sapien
ccagtattccacagcagtcaactca

SEQ ID NO: 3412976 - DNA, 25 bp, Homo sapien
tgtcagtagtatcaaacactctcgt

SEQ ID NO: 3412977 - DNA, 25 bp, Homo sapien
agtcaactcaagatatgctttaagg

SEQ ID NO: 3412978 - DNA, 25 bp, Homo sapien
caggatttgaatctacgtaggaatg

SEQ ID NO: 3412979 - DNA, 25 bp, Homo sapien
cacatacaggcttagtcctggacac

SEQ ID NO: 3412980 - DNA, 25 bp, Homo sapien
caggtgacacatacaggcttagtcc

SEQ ID NO: 3412981 - DNA, 25 bp, Homo sapien
ggtgacacatacaggcttagtcctg

SEQ ID NO: 3412982 - DNA, 25 bp, Homo sapien
gacacatacaggcttagtcctggac

SEQ ID NO: 3412983 - DNA, 25 bp, Homo sapien
agggaaaatccctgggtccatgaag

SEQ ID NO: 3412984 - DNA, 25 bp, Homo sapien
gaaaatccctgggtccatgaaggtg

SEQ ID NO: 3412985 - DNA, 25 bp, Homo sapien
aaatccctgggtccatgaaggtggc

SEQ ID NO: 3412986 - DNA, 25 bp, Homo sapien
gagggaaaatccctgggtccatgaa

SEQ ID NO: 3412987 - DNA, 25 bp, Homo sapien
aaaccccaaatgaccatcatagtgc

SEQ ID NO: 3412988 - DNA, 25 bp, Homo sapien
gccttccataatacatcaataaata

SEQ ID NO: 3412989 - DNA, 25 bp, Homo sapien
cattaaaggctcattaaaatagcct

SEQ ID NO: 3412990 - DNA, 25 bp, Homo sapien
aatgaccatcatagtgccttccata

SEQ ID NO: 3412991 - DNA, 25 bp, Homo sapien
cacctggatgccctttatctccact

SEQ ID NO: 3412992 - DNA, 25 bp, Homo sapien
gcaggtggcacaccatttcatgcgc

SEQ ID NO: 3412993 - DNA, 25 bp, Homo sapien
aggggagctcggaaatcatcttcct

SEQ ID NO: 3412994 - DNA, 25 bp, Homo sapien
catttcatgcgcacctggatgccct

SEQ ID NO: 3412995 - DNA, 25 bp, Homo sapien
gcgaccaatacagttattcacccag

SEQ ID NO: 3412996 - DNA, 25 bp, Homo sapien
gttccggcgaccaatacagttattc

SEQ ID NO: 3412997 - DNA, 25 bp, Homo sapien
acggtagttccggcgaccaatacag

SEQ ID NO: 3412998 - DNA, 25 bp, Homo sapien
gaccaatacagttattcacccaggg

SEQ ID NO: 3412999 - DNA, 25 bp, Homo sapien
ctatgtggtagaggacataaaggag

SEQ ID NO: 3413000 - DNA, 25 bp, Homo sapien
cctctatgtggtagaggacataaag

SEQ ID NO: 3413001 - DNA, 25 bp, Homo sapien
gacccctgagagttcctctatgtgg

SEQ ID NO: 3413002 - DNA, 25 bp, Homo sapien
agccgtgcggacccctgagagttcc

SEQ ID NO: 3413003 - DNA, 25 bp, Homo sapien
gatgccaaacaatcaaggagaacag

SEQ ID NO: 3413004 - DNA, 25 bp, Homo sapien
acagagcaacatgacctcactttcc

SEQ ID NO: 3413005 - DNA, 25 bp, Homo sapien
ctcccccttccaatcccacaatcta

SEQ ID NO: 3413006 - DNA, 25 bp, Homo sapien
tccccggcccctactgcagccattt

SEQ ID NO: 3413007 - DNA, 25 bp, Homo sapien
tacagggatgaagaataagccagcc

SEQ ID NO: 3413008 - DNA, 25 bp, Homo sapien
ctacagggatgaagaataagccagc

SEQ ID NO: 3413009 - DNA, 25 bp, Homo sapien
accacgtgaaatcccgtgaggccag

SEQ ID NO: 3413010 - DNA, 25 bp, Homo sapien
caccagaaccacgtgaaatcccgtg

SEQ ID NO: 3413011 - DNA, 25 bp, Homo sapien
gttcattggttgtgcgtcccctggc

SEQ ID NO: 3413012 - DNA, 25 bp, Homo sapien
ctgttcattggttgtgcgtcccctg

SEQ ID NO: 3413013 - DNA, 25 bp, Homo sapien
gagaacacggctgacattgttacag

SEQ ID NO: 3413014 - DNA, 25 bp, Homo sapien
agaactgcagagaacacggctgaca

SEQ ID NO: 3413015 - DNA, 25 bp, Homo sapien
tacagcagccattggtgaaggggtt

SEQ ID NO: 3413016 - DNA, 25 bp, Homo sapien
ctgcagagaacacggctgacattgt

SEQ ID NO: 3413017 - DNA, 25 bp, Homo sapien
caatggtaaacactagaccagaggg

SEQ ID NO: 3413018 - DNA, 25 bp, Homo sapien
tggtaaacactagaccagagggata

SEQ ID NO: 3413019 - DNA, 25 bp, Homo sapien
taaacactagaccagagggataggt

SEQ ID NO: 3413020 - DNA, 25 bp, Homo sapien
cactagaccagagggataggtgtac

SEQ ID NO: 3413021 - DNA, 25 bp, Homo sapien
agaacaagcccaaagaagataaaag

SEQ ID NO: 3413022 - DNA, 25 bp, Homo sapien
caagcccaaagaagataaaagttct

SEQ ID NO: 3413023 - DNA, 25 bp, Homo sapien
cagaacaagcccaaagaagataaaa

SEQ ID NO: 3413024 - DNA, 25 bp, Homo sapien
gcccaaagaagataaaagttctgac

SEQ ID NO: 3413025 - DNA, 25 bp, Homo sapien
gaggtctgattacaattgtcttctc

SEQ ID NO: 3413026 - DNA, 25 bp, Homo sapien
aagggaggtctgattacaattgtct

SEQ ID NO: 3413027 - DNA, 25 bp, Homo sapien
gggaggtctgattacaattgtcttc

SEQ ID NO: 3413028 - DNA, 25 bp, Homo sapien
ggaagggaggtctgattacaattgt

SEQ ID NO: 3413029 - DNA, 25 bp, Homo sapien
tcttcacagttatctgcccatctga

SEQ ID NO: 3413030 - DNA, 25 bp, Homo sapien
ctccctggatgccattatccatgat

SEQ ID NO: 3413031 - DNA, 25 bp, Homo sapien
ccctggatgccattatccatgatct

SEQ ID NO: 3413032 - DNA, 25 bp, Homo sapien
tccctggatgccattatccatgatc

SEQ ID NO: 3413033 - DNA, 25 bp, Homo sapien
tgttcgcaaccctgtgtaacggctc

SEQ ID NO: 3413034 - DNA, 25 bp, Homo sapien
cagcatctgcagactggctctctgt

SEQ ID NO: 3413035 - DNA, 25 bp, Homo sapien
tcattagtagccaagccgaggtgtg

SEQ ID NO: 3413036 - DNA, 25 bp, Homo sapien
gaggaggtggaggttcagcatctgc

SEQ ID NO: 3413037 - DNA, 25 bp, Homo sapien
ccgatacttgtacatggtaggtgtc

SEQ ID NO: 3413038 - DNA, 25 bp, Homo sapien
gctgtccttggccaataagctacta

SEQ ID NO: 3413039 - DNA, 25 bp, Homo sapien
tgctgctactgtaacccggccgata

SEQ ID NO: 3413040 - DNA, 25 bp, Homo sapien
aatgcggcatggcagctgacgtact

SEQ ID NO: 3413041 - DNA, 25 bp, Homo sapien
tgtaagacatcgatcggcccaggta

SEQ ID NO: 3413042 - DNA, 25 bp, Homo sapien
tgtctcagagacaccaggttgggct

SEQ ID NO: 3413043 - DNA, 25 bp, Homo sapien
ccaaaggtaggagaacggaagctct

SEQ ID NO: 3413044 - DNA, 25 bp, Homo sapien
tgaacgaatggattgcaactggccc

SEQ ID NO: 3413045 - DNA, 25 bp, Homo sapien
cttgggctgcccgttggatttgctg

SEQ ID NO: 3413046 - DNA, 25 bp, Homo sapien
taggtggtcttcagctgtacttcat

SEQ ID NO: 3413047 - DNA, 25 bp, Homo sapien
cgaaatctcataggtggtaccacca

SEQ ID NO: 3413048 - DNA, 25 bp, Homo sapien
ggctgagcctaagctcttgggctgc

SEQ ID NO: 3413049 - DNA, 25 bp, Homo sapien
ctcagggccccaactctccgactcc

SEQ ID NO: 3413050 - DNA, 25 bp, Homo sapien
catcctcttggaatcggtggtttaa

SEQ ID NO: 3413051 - DNA, 25 bp, Homo sapien
ccctttggtgtaggcgcagaggcgt

SEQ ID NO: 3413052 - DNA, 25 bp, Homo sapien
aactctccgactccccaagcctact

SEQ ID NO: 3413053 - DNA, 25 bp, Homo sapien
ccagggcgagcaattgcacaaatgt

SEQ ID NO: 3413054 - DNA, 25 bp, Homo sapien
tggttccctccagggcgagcaattg

SEQ ID NO: 3413055 - DNA, 25 bp, Homo sapien
acacctggtaacgcagaagaggaaa

SEQ ID NO: 3413056 - DNA, 25 bp, Homo sapien
cacaaatgtccactgagtctggtcc

SEQ ID NO: 3413057 - DNA, 25 bp, Homo sapien
gtaagatccccctccgtatatgtat

SEQ ID NO: 3413058 - DNA, 25 bp, Homo sapien
atgggaagagtaagatccccctccg

SEQ ID NO: 3413059 - DNA, 25 bp, Homo sapien
ccgtatatgtatccctccctcattt

SEQ ID NO: 3413060 - DNA, 25 bp, Homo sapien
caggaaaaagactgacgtctcccct

SEQ ID NO: 3413061 - DNA, 25 bp, Homo sapien
aggatgctatttccgtagttagtaa

SEQ ID NO: 3413062 - DNA, 25 bp, Homo sapien
gaggatgctatttccgtagttagta

SEQ ID NO: 3413063 - DNA, 25 bp, Homo sapien
agaggatgctatttccgtagttagt

SEQ ID NO: 3413064 - DNA, 25 bp, Homo sapien
ccaatattgtttgagctaggccaag

SEQ ID NO: 3413065 - DNA, 25 bp, Homo sapien
gaggctgggatctcccctatttaga

SEQ ID NO: 3413066 - DNA, 25 bp, Homo sapien
gaaactaaatgccaatgagcctaga

SEQ ID NO: 3413067 - DNA, 25 bp, Homo sapien
acccagcaccatagtgaggtgggct

SEQ ID NO: 3413068 - DNA, 25 bp, Homo sapien
agtttatgaggttgtcactgataac

SEQ ID NO: 3413069 - DNA, 25 bp, Homo sapien
tgtctcaaccagacaaaataacaca

SEQ ID NO: 3413070 - DNA, 25 bp, Homo sapien
aacttcccaccagagatcgttcacc

SEQ ID NO: 3413071 - DNA, 25 bp, Homo sapien
gatcgttcaccctgtctcaaccaga

SEQ ID NO: 3413072 - DNA, 25 bp, Homo sapien
ctgacattgtgatcagcccgcttcg

SEQ ID NO: 3413073 - DNA, 25 bp, Homo sapien
cctgacattgtgatcagcccgcttc

SEQ ID NO: 3413074 - DNA, 25 bp, Homo sapien
cccgcaccacgccaggctagttttt

SEQ ID NO: 3413075 - DNA, 25 bp, Homo sapien
ggcgcccgcaccacgccaggctagt

SEQ ID NO: 3413076 - DNA, 25 bp, Homo sapien
taatactccacagcagacacgtaac

SEQ ID NO: 3413077 - DNA, 25 bp, Homo sapien
aaccaagcgcctcggtgatctcagg

SEQ ID NO: 3413078 - DNA, 25 bp, Homo sapien
tgcccattatgttgagaaccaagcg

SEQ ID NO: 3413079 - DNA, 25 bp, Homo sapien
ccaggtagggctcaacagtgtattc

SEQ ID NO: 3413080 - DNA, 25 bp, Homo sapien
taggaccactggactctttgccagg

SEQ ID NO: 3413081 - DNA, 25 bp, Homo sapien
gtactgaacctgctgataaaagctg

SEQ ID NO: 3413082 - DNA, 25 bp, Homo sapien
gcagcagcagcctacgctaatagga

SEQ ID NO: 3413083 - DNA, 25 bp, Homo sapien
tagtccagaccacccaggtatgggc

SEQ ID NO: 3413084 - DNA, 25 bp, Homo sapien
cttcagttgccggagcagtgtcgtc

SEQ ID NO: 3413085 - DNA, 25 bp, Homo sapien
tgccggagcagtgtcgtctgatgca

SEQ ID NO: 3413086 - DNA, 25 bp, Homo sapien
cagtgtcgtctgatgcatattcagc

SEQ ID NO: 3413087 - DNA, 25 bp, Homo sapien
ggttccttcagttgccggagcagtg

SEQ ID NO: 3413088 - DNA, 25 bp, Homo sapien
gtagctctttcaatcctatcacagg

SEQ ID NO: 3413089 - DNA, 25 bp, Homo sapien
gcctccgctctctcattgagaagcc

SEQ ID NO: 3413090 - DNA, 25 bp, Homo sapien
gagaagccccctattctcagtagct

SEQ ID NO: 3413091 - DNA, 25 bp, Homo sapien
atgctggccggcttccgcctccaca

SEQ ID NO: 3413092 - DNA, 25 bp, Homo sapien
gtcttctgagttgtttggtagtaaa

SEQ ID NO: 3413093 - DNA, 25 bp, Homo sapien
agtcttctgagttgtttggtagtaa

SEQ ID NO: 3413094 - DNA, 25 bp, Homo sapien
cagtcttctgagttgtttggtagta

SEQ ID NO: 3413095 - DNA, 25 bp, Homo sapien
aatagccctttgaggtagcattact

SEQ ID NO: 3413096 - DNA, 25 bp, Homo sapien
ttgaatatatgttctgggcaaatgc

SEQ ID NO: 3413097 - DNA, 25 bp, Homo sapien
gattagttagtggttgatgtccacc

SEQ ID NO: 3413098 - DNA, 25 bp, Homo sapien
tgaaacatggagaagttgacatccc

SEQ ID NO: 3413099 - DNA, 25 bp, Homo sapien
tgcgaggtaacctaggcaacgcata

SEQ ID NO: 3413100 - DNA, 25 bp, Homo sapien
gccagccaatcaaatcttagagagg

SEQ ID NO: 3413101 - DNA, 25 bp, Homo sapien
gaactgccaggtgagtactcggcct

SEQ ID NO: 3413102 - DNA, 25 bp, Homo sapien
tacccggactgtggagccctaagtc

SEQ ID NO: 3413103 - DNA, 25 bp, Homo sapien
ctgctcgccggcgtcgtaggtctcg

SEQ ID NO: 3413104 - DNA, 25 bp, Homo sapien
tatcgcaaacgtacggcctctaaac

SEQ ID NO: 3413105 - DNA, 25 bp, Homo sapien
ccaccataacgactgctattgggct

SEQ ID NO: 3413106 - DNA, 25 bp, Homo sapien
tttcggccgtaacggccactgctcg

SEQ ID NO: 3413107 - DNA, 25 bp, Homo sapien
tgaaagtcgcggcaccgaatacacg

SEQ ID NO: 3413108 - DNA, 25 bp, Homo sapien
gcggcggcagtttcctcacgagtag

SEQ ID NO: 3413109 - DNA, 25 bp, Homo sapien
gcaattagaggtgccaagaccgcca

SEQ ID NO: 3413110 - DNA, 25 bp, Homo sapien
taaggttgggcgagccatcgtgaaa

SEQ ID NO: 3413111 - DNA, 25 bp, Homo sapien
tcaaggtcgcggggtactaacacgc

SEQ ID NO: 3413112 - DNA, 25 bp, Homo sapien
gggtactaacacgcgggaggctcac

SEQ ID NO: 3413113 - DNA, 25 bp, Homo sapien
ggggtactaacacgcgggaggctca

SEQ ID NO: 3413114 - DNA, 25 bp, Homo sapien
caaggtcgcggggtactaacacgcg

SEQ ID NO: 3413115 - DNA, 25 bp, Homo sapien
tacaggctcggaacctcaggtgtcc

SEQ ID NO: 3413116 - DNA, 25 bp, Homo sapien
ctacaggctcggaacctcaggtgtc

SEQ ID NO: 3413117 - DNA, 25 bp, Homo sapien
ggataagtctagtaagtttgacttg

SEQ ID NO: 3413118 - DNA, 25 bp, Homo sapien
ctgtggataagtctagtaagtttga

SEQ ID NO: 3413119 - DNA, 25 bp, Homo sapien
gctgactgtggataagtctagtaag

SEQ ID NO: 3413120 - DNA, 25 bp, Homo sapien
attgctgactgtggataagtctagt

SEQ ID NO: 3413121 - DNA, 25 bp, Homo sapien
ctggtggcaagtccatctatgggga

SEQ ID NO: 3413122 - DNA, 25 bp, Homo sapien
gtggcaagtccatctatggggagaa

SEQ ID NO: 3413123 - DNA, 25 bp, Homo sapien
ccatctatggggagaaatttgatga

SEQ ID NO: 3413124 - DNA, 25 bp, Homo sapien
acgccataatggcactggtggcaag

SEQ ID NO: 3413125 - DNA, 25 bp, Homo sapien
ttcctcaagggatctcagggttgtc

SEQ ID NO: 3413126 - DNA, 25 bp, Homo sapien
acaaccagttttggagaagccaatt

SEQ ID NO: 3413127 - DNA, 25 bp, Homo sapien
caagggatctcagggttgtcagaag

SEQ ID NO: 3413128 - DNA, 25 bp, Homo sapien
caatttggagagattttaagcttcc

SEQ ID NO: 3413129 - DNA, 25 bp, Homo sapien
acaggcgtgagccacttagtttctt

SEQ ID NO: 3413130 - DNA, 25 bp, Homo sapien
caggcgtgagccacttagtttcttt

SEQ ID NO: 3413131 - DNA, 25 bp, Homo sapien
cgtgagccacttagtttctttcttt

SEQ ID NO: 3413132 - DNA, 25 bp, Homo sapien
ggcgtgagccacttagtttctttct

SEQ ID NO: 3413133 - DNA, 25 bp, Homo sapien
taaagcagttattttcacaatccac

SEQ ID NO: 3413134 - DNA, 25 bp, Homo sapien
tgttcagtaatgagttctgggtcct

SEQ ID NO: 3413135 - DNA, 25 bp, Homo sapien
tctgggtcctgcattaattcaaaca

SEQ ID NO: 3413136 - DNA, 25 bp, Homo sapien
gcgtttggatcatatatactcagtg

SEQ ID NO: 3413137 - DNA, 25 bp, Homo sapien
tatttggtgggaggatatcccagtt

SEQ ID NO: 3413138 - DNA, 25 bp, Homo sapien
gggcaaagagaccttataatggcat

SEQ ID NO: 3413139 - DNA, 25 bp, Homo sapien
aagctagtgcaacatggcttgtata

SEQ ID NO: 3413140 - DNA, 25 bp, Homo sapien
gtaaggcttcttaaacagacctatg

SEQ ID NO: 3413141 - DNA, 25 bp, Homo sapien
aaagggtttgcgttcccagcatggg

SEQ ID NO: 3413142 - DNA, 25 bp, Homo sapien
tacaaagggtttgcgttcccagcat

SEQ ID NO: 3413143 - DNA, 25 bp, Homo sapien
gtacaaagggtttgcgttcccagca

SEQ ID NO: 3413144 - DNA, 25 bp, Homo sapien
cccagcatggggttgcatctgtaag

SEQ ID NO: 3413145 - DNA, 25 bp, Homo sapien
gcccttttcaatactcgtcttacag

SEQ ID NO: 3413146 - DNA, 25 bp, Homo sapien
tccccacccaatatgcatcgtgata

SEQ ID NO: 3413147 - DNA, 25 bp, Homo sapien
gccaaaagattagataaccctgttg

SEQ ID NO: 3413148 - DNA, 25 bp, Homo sapien
catcgtgataatccatgtacttttg

SEQ ID NO: 3413149 - DNA, 25 bp, Homo sapien
catcatcacaatggcactgagaaac

SEQ ID NO: 3413150 - DNA, 25 bp, Homo sapien
ttcatcatcacaatggcactgagaa

SEQ ID NO: 3413151 - DNA, 25 bp, Homo sapien
tcatcacaatggcactgagaaacat

SEQ ID NO: 3413152 - DNA, 25 bp, Homo sapien
tggatctgcggttcttcatcatcac

SEQ ID NO: 3413153 - DNA, 25 bp, Homo sapien
cattagatctaaccttgagtctgag

SEQ ID NO: 3413154 - DNA, 25 bp, Homo sapien
acgtaggacaaatttaccaaatgat

SEQ ID NO: 3413155 - DNA, 25 bp, Homo sapien
tgattgccactctcttaacatgaag

SEQ ID NO: 3413156 - DNA, 25 bp, Homo sapien
tcagccttggaattaaacgtaggac

SEQ ID NO: 3413157 - DNA, 25 bp, Homo sapien
tgggctgtgcactcctatatcccat

SEQ ID NO: 3413158 - DNA, 25 bp, Homo sapien
ggctgtgcactcctatatcccattc

SEQ ID NO: 3413159 - DNA, 25 bp, Homo sapien
gggctgtgcactcctatatcccatt

SEQ ID NO: 3413160 - DNA, 25 bp, Homo sapien
tggccactttactaaacatgaaaat

SEQ ID NO: 3413161 - DNA, 25 bp, Homo sapien
gaaaatgttgcctatatgttgctcc

SEQ ID NO: 3413162 - DNA, 25 bp, Homo sapien
gtaaagtaggcccatgcgaatatcc

SEQ ID NO: 3413163 - DNA, 25 bp, Homo sapien
gttggccactttactaaacatgaaa

SEQ ID NO: 3413164 - DNA, 25 bp, Homo sapien
tgcaactgttgggactgtggtttcc

SEQ ID NO: 3413165 - DNA, 25 bp, Homo sapien
cagtctctgtaaactgttatcatct

SEQ ID NO: 3413166 - DNA, 25 bp, Homo sapien
cattaggtatgagatatggaagaag

SEQ ID NO: 3413167 - DNA, 25 bp, Homo sapien
agaaacatgtttgggattgcaactg

SEQ ID NO: 3413168 - DNA, 25 bp, Homo sapien
gggggtttgcacgtcatcaggaaca

SEQ ID NO: 3413169 - DNA, 25 bp, Homo sapien
tatcattgaagtacttgatatactc

SEQ ID NO: 3413170 - DNA, 25 bp, Homo sapien
aagtacttgatatactcagggccca

SEQ ID NO: 3413171 - DNA, 25 bp, Homo sapien
tacttgatatactcagggcccatat

SEQ ID NO: 3413172 - DNA, 25 bp, Homo sapien
actgttgttcctcctagtgaatgga

SEQ ID NO: 3413173 - DNA, 25 bp, Homo sapien
caactacaaaatcacccacaaggga

SEQ ID NO: 3413174 - DNA, 25 bp, Homo sapien
acagtgcccgtgacatccattttga

SEQ ID NO: 3413175 - DNA, 25 bp, Homo sapien
cagggaagaaaagtcagctggatcc

SEQ ID NO: 3413176 - DNA, 25 bp, Homo sapien
caaatgattggcagtcattagacca

SEQ ID NO: 3413177 - DNA, 25 bp, Homo sapien
tggcaaagaactccacaatccaagt

SEQ ID NO: 3413178 - DNA, 25 bp, Homo sapien
cattagaccaattggcaaagaactc

SEQ ID NO: 3413179 - DNA, 25 bp, Homo sapien
agaggtcagcatagataggggcaaa

SEQ ID NO: 3413180 - DNA, 25 bp, Homo sapien
accatccctccctttgcactactca

SEQ ID NO: 3413181 - DNA, 25 bp, Homo sapien
gatgcctttggttaccatgtgtgaa

SEQ ID NO: 3413182 - DNA, 25 bp, Homo sapien
agtatagatatttaagaggggagag

SEQ ID NO: 3413183 - DNA, 25 bp, Homo sapien
tgcctttggttaccatgtgtgaaaa

SEQ ID NO: 3413184 - DNA, 25 bp, Homo sapien
gcgtactaacatcagtatagcgtcc

SEQ ID NO: 3413185 - DNA, 25 bp, Homo sapien
cgcgtactaacatcagtatagcgtc

SEQ ID NO: 3413186 - DNA, 25 bp, Homo sapien
cgtactaacatcagtatagcgtcca

SEQ ID NO: 3413187 - DNA, 25 bp, Homo sapien
caaaatttagccctgtacagttgta

SEQ ID NO: 3413188 - DNA, 25 bp, Homo sapien
gtccatgagacagcccgtcctttct

SEQ ID NO: 3413189 - DNA, 25 bp, Homo sapien
aaggtccatgagacagcccgtcctt

SEQ ID NO: 3413190 - DNA, 25 bp, Homo sapien
tgagacagcccgtcctttcttgtca

SEQ ID NO: 3413191 - DNA, 25 bp, Homo sapien
atgagacagcccgtcctttcttgtc

SEQ ID NO: 3413192 - DNA, 25 bp, Homo sapien
ccctcaaagctaatgggcaagtggc

SEQ ID NO: 3413193 - DNA, 25 bp, Homo sapien
ttgaaagcccacctactgttctgca

SEQ ID NO: 3413194 - DNA, 25 bp, Homo sapien
gtctagtaactagtccacaccctca

SEQ ID NO: 3413195 - DNA, 25 bp, Homo sapien
cagagctgtgaatcaaacccgggta

SEQ ID NO: 3413196 - DNA, 25 bp, Homo sapien
tcttaactaatgattgttacccagt

SEQ ID NO: 3413197 - DNA, 25 bp, Homo sapien
tacccagtactagcaggtctgcaca

SEQ ID NO: 3413198 - DNA, 25 bp, Homo sapien
ctagcaggtctgcacataatatata

SEQ ID NO: 3413199 - DNA, 25 bp, Homo sapien
ggcctgagaccaaatcttaactaat

SEQ ID NO: 3413200 - DNA, 25 bp, Homo sapien
tgggaagtaagaggtattttacaca

SEQ ID NO: 3413201 - DNA, 25 bp, Homo sapien
ctgcacaaaagagatgcacacgtca

SEQ ID NO: 3413202 - DNA, 25 bp, Homo sapien
caaaagagatgcacacgtcaggatc

SEQ ID NO: 3413203 - DNA, 25 bp, Homo sapien
gagatgcacacgtcaggatctgggt

SEQ ID NO: 3413204 - DNA, 25 bp, Homo sapien
tgcacacgtcaggatctgggttgga

SEQ ID NO: 3413205 - DNA, 25 bp, Homo sapien
taagttaaattctcggatcacattc

SEQ ID NO: 3413206 - DNA, 25 bp, Homo sapien
gctggtatagctcatttaagttaaa

SEQ ID NO: 3413207 - DNA, 25 bp, Homo sapien
ttggcccgctggtatagctcattta

SEQ ID NO: 3413208 - DNA, 25 bp, Homo sapien
tcagggatattgtctccagcctttg

SEQ ID NO: 3413209 - DNA, 25 bp, Homo sapien
aagctgtgcaggtcaactaagaagg

SEQ ID NO: 3413210 - DNA, 25 bp, Homo sapien
ccaagctgtgcaggtcaactaagaa

SEQ ID NO: 3413211 - DNA, 25 bp, Homo sapien
caagctgtgcaggtcaactaagaag

SEQ ID NO: 3413212 - DNA, 25 bp, Homo sapien
atctttttattacggaaagccatca

SEQ ID NO: 3413213 - DNA, 25 bp, Homo sapien
ttttattacggaaagccatcaactg

SEQ ID NO: 3413214 - DNA, 25 bp, Homo sapien
ttacggaaagccatcaactgggtgt

SEQ ID NO: 3413215 - DNA, 25 bp, Homo sapien
ttattacggaaagccatcaactggg

SEQ ID NO: 3413216 - DNA, 25 bp, Homo sapien
caaccactttgcaagcagggagcgg

SEQ ID NO: 3413217 - DNA, 25 bp, Homo sapien
caatgcccggcatttggtgaaacca

SEQ ID NO: 3413218 - DNA, 25 bp, Homo sapien
ccactgagcggaaactgggcaacga

SEQ ID NO: 3413219 - DNA, 25 bp, Homo sapien
tgcatggcgctaaatgttgtgtgcc

SEQ ID NO: 3413220 - DNA, 25 bp, Homo sapien
gataacaacggtcgcctcctccatt

SEQ ID NO: 3413221 - DNA, 25 bp, Homo sapien
agcttctctcgcttctcggctacgg

SEQ ID NO: 3413222 - DNA, 25 bp, Homo sapien
caatgctcgataacaacggtcgcct

SEQ ID NO: 3413223 - DNA, 25 bp, Homo sapien
ttctctcgcttctcggctacggcga

SEQ ID NO: 3413224 - DNA, 25 bp, Homo sapien
ccctctctcccgttactctccaggc

SEQ ID NO: 3413225 - DNA, 25 bp, Homo sapien
cctctctcccgttactctccaggcc

SEQ ID NO: 3413226 - DNA, 25 bp, Homo sapien
ctggctcagggccgcggcgttgcgc

SEQ ID NO: 3413227 - DNA, 25 bp, Homo sapien
tcagggccgcggcgttgcgcccata

SEQ ID NO: 3413228 - DNA, 25 bp, Homo sapien
agggccgcggcgttgcgcccataga

SEQ ID NO: 3413229 - DNA, 25 bp, Homo sapien
ggccgcggcgttgcgcccatagacg

SEQ ID NO: 3413230 - DNA, 25 bp, Homo sapien
ctcgaagctgcccctccggggcttc

SEQ ID NO: 3413231 - DNA, 25 bp, Homo sapien
tcgggttcacctttactggaagctc

SEQ ID NO: 3413232 - DNA, 25 bp, Homo sapien
gaagctgcccctccggggcttcgtc

SEQ ID NO: 3413233 - DNA, 25 bp, Homo sapien
cgggttcacctttactggaagctct

SEQ ID NO: 3413234 - DNA, 25 bp, Homo sapien
tgccgtccgggcgcagcagcgtcac

SEQ ID NO: 3413235 - DNA, 25 bp, Homo sapien
gctgccgtccgggcgcagcagcgtc

SEQ ID NO: 3413236 - DNA, 25 bp, Homo sapien
tgctgccgtccgggcgcagcagcgt

SEQ ID NO: 3413237 - DNA, 25 bp, Homo sapien
ctgccgtccgggcgcagcagcgtca

SEQ ID NO: 3413238 - DNA, 25 bp, Homo sapien
tacaatacttcggaacccacgagca

SEQ ID NO: 3413239 - DNA, 25 bp, Homo sapien
cacgagcacgtctctgaagtcatga

SEQ ID NO: 3413240 - DNA, 25 bp, Homo sapien
tgagactgccgtggtttctaagaat

SEQ ID NO: 3413241 - DNA, 25 bp, Homo sapien
aaggccagaatgaagcgaagttaca

SEQ ID NO: 3413242 - DNA, 25 bp, Homo sapien
ctcagggaatttgagtttgcgtggg

SEQ ID NO: 3413243 - DNA, 25 bp, Homo sapien
cagggaatttgagtttgcgtggggg

SEQ ID NO: 3413244 - DNA, 25 bp, Homo sapien
ggctcagggaatttgagtttgcgtg

SEQ ID NO: 3413245 - DNA, 25 bp, Homo sapien
gctcagggaatttgagtttgcgtgg

SEQ ID NO: 3413246 - DNA, 25 bp, Homo sapien
cacgccaggtgggtacttgtagcca

SEQ ID NO: 3413247 - DNA, 25 bp, Homo sapien
tgtagccacaccaagatcaatgcct

SEQ ID NO: 3413248 - DNA, 25 bp, Homo sapien
gacataaattccacttagggcacac

SEQ ID NO: 3413249 - DNA, 25 bp, Homo sapien
tagggcacactagacagaaaacaat

SEQ ID NO: 3413250 - DNA, 25 bp, Homo sapien
aactcacaaaccctgaagctcaagg

SEQ ID NO: 3413251 - DNA, 25 bp, Homo sapien
ggatctgggcaatcttaaggactga

SEQ ID NO: 3413252 - DNA, 25 bp, Homo sapien
tgtatgaagcactagggacaaagac

SEQ ID NO: 3413253 - DNA, 25 bp, Homo sapien
ggaagacatgttccccaacccttga

SEQ ID NO: 3413254 - DNA, 25 bp, Homo sapien
tgaaccttcatttctggcagggaag

SEQ ID NO: 3413255 - DNA, 25 bp, Homo sapien
tagagggttgcctcataactgaacc

SEQ ID NO: 3413256 - DNA, 25 bp, Homo sapien
taatgttccaacatcaccagggaca

SEQ ID NO: 3413257 - DNA, 25 bp, Homo sapien
gccatgttccatcattaatgttcca

SEQ ID NO: 3413258 - DNA, 25 bp, Homo sapien
tccagtaacttttacaatgccttac

SEQ ID NO: 3413259 - DNA, 25 bp, Homo sapien
caaatccagtaacttttacaatgcc

SEQ ID NO: 3413260 - DNA, 25 bp, Homo sapien
aaatccagtaacttttacaatgcct

SEQ ID NO: 3413261 - DNA, 25 bp, Homo sapien
accaaatccagtaacttttacaatg

SEQ ID NO: 3413262 - DNA, 25 bp, Homo sapien
caggtcacatggctatcttgggcta

SEQ ID NO: 3413263 - DNA, 25 bp, Homo sapien
taccaactccacaaggctggctttg

SEQ ID NO: 3413264 - DNA, 25 bp, Homo sapien
aaacacaaggactaccaactccaca

SEQ ID NO: 3413265 - DNA, 25 bp, Homo sapien
tcataaaagttgcaggtcaggccag

SEQ ID NO: 3413266 - DNA, 25 bp, Homo sapien
caggcaaggaggtatctggtcactc

SEQ ID NO: 3413267 - DNA, 25 bp, Homo sapien
ctttcagtaggaggccgttggacac

SEQ ID NO: 3413268 - DNA, 25 bp, Homo sapien
tgtaccctggctctttgtaggtccc

SEQ ID NO: 3413269 - DNA, 25 bp, Homo sapien
tgatactccccagaggtcttatggg

SEQ ID NO: 3413270 - DNA, 25 bp, Homo sapien
ttttaagtggatctagctcagtgcc

SEQ ID NO: 3413271 - DNA, 25 bp, Homo sapien
ccagaaagatcaggctcagtcgctc

SEQ ID NO: 3413272 - DNA, 25 bp, Homo sapien
catcaagccatagtcaagagcctag

SEQ ID NO: 3413273 - DNA, 25 bp, Homo sapien
gacaaacacctgttgcccagaaaga

SEQ ID NO: 3413274 - DNA, 25 bp, Homo sapien
tgcttcagcctacctaacagttggg

SEQ ID NO: 3413275 - DNA, 25 bp, Homo sapien
ctgaaggaagtgatgacaaaggtag

SEQ ID NO: 3413276 - DNA, 25 bp, Homo sapien
ctacctaacagttgggatttcaagc

SEQ ID NO: 3413277 - DNA, 25 bp, Homo sapien
aataaagaaacaaggtagcgggctg

SEQ ID NO: 3413278 - DNA, 25 bp, Homo sapien
cctgatacttaattagaggctgggc

SEQ ID NO: 3413279 - DNA, 25 bp, Homo sapien
gctactttgcagttgtaagcatgtt

SEQ ID NO: 3413280 - DNA, 25 bp, Homo sapien
gctactttacagagttacagtgaag

SEQ ID NO: 3413281 - DNA, 25 bp, Homo sapien
agcatgttacttaactatgcctcag

SEQ ID NO: 3413282 - DNA, 25 bp, Homo sapien
taaccccttaggtgagatctgaaag

SEQ ID NO: 3413283 - DNA, 25 bp, Homo sapien
ccagtgcattcaagtaactgtgcaa

SEQ ID NO: 3413284 - DNA, 25 bp, Homo sapien
cataggcagacttaggaggataaaa

SEQ ID NO: 3413285 - DNA, 25 bp, Homo sapien
taccgtggtcatacaaaagttcctc

SEQ ID NO: 3413286 - DNA, 25 bp, Homo sapien
aatagagccaagacccaaacctagg

SEQ ID NO: 3413287 - DNA, 25 bp, Homo sapien
gactcttgccaacatgtgctctcct

SEQ ID NO: 3413288 - DNA, 25 bp, Homo sapien
gtattatctcacctacaggagtctg

SEQ ID NO: 3413289 - DNA, 25 bp, Homo sapien
taagagagtggtcggaattcaactg

SEQ ID NO: 3413290 - DNA, 25 bp, Homo sapien
tgctacctgatagaaaactgcattc

SEQ ID NO: 3413291 - DNA, 25 bp, Homo sapien
gccaagcccgccttctcttaattta

SEQ ID NO: 3413292 - DNA, 25 bp, Homo sapien
taagcctgaagtcagaatactcagt

SEQ ID NO: 3413293 - DNA, 25 bp, Homo sapien
tgttcggaccctcagtgctacctga

SEQ ID NO: 3413294 - DNA, 25 bp, Homo sapien
ctgttctgattggttctcccgggag

SEQ ID NO: 3413295 - DNA, 25 bp, Homo sapien
gggctgcctgcaaagtctatgctgg

SEQ ID NO: 3413296 - DNA, 25 bp, Homo sapien
tgacgtatgccggacgacgtaggcc

SEQ ID NO: 3413297 - DNA, 25 bp, Homo sapien
tgctgaagcccgcagggatacaagg

SEQ ID NO: 3413298 - DNA, 25 bp, Homo sapien
gctgaggcagacgacggctttcaca

SEQ ID NO: 3413299 - DNA, 25 bp, Homo sapien
cggctttcacaagaattcctccctg

SEQ ID NO: 3413300 - DNA, 25 bp, Homo sapien
tgaggcagacgacggctttcacaag

SEQ ID NO: 3413301 - DNA, 25 bp, Homo sapien
ttcacaagaattcctccctgacggg

SEQ ID NO: 3413302 - DNA, 25 bp, Homo sapien
caaggcttcgccaaggtgctgagaa

SEQ ID NO: 3413303 - DNA, 25 bp, Homo sapien
gggcagttgatttttcgccacctct

SEQ ID NO: 3413304 - DNA, 25 bp, Homo sapien
tgtggagttctaaaaatcagtcctt

SEQ ID NO: 3413305 - DNA, 25 bp, Homo sapien
cacccagccaaaggcaagggagcct

SEQ ID NO: 3413306 - DNA, 25 bp, Homo sapien
tatcctccttttcccgtcagtacat

SEQ ID NO: 3413307 - DNA, 25 bp, Homo sapien
ttgcttatcctccttttcccgtcag

SEQ ID NO: 3413308 - DNA, 25 bp, Homo sapien
agacaaaaattcgacttgcttatcc

SEQ ID NO: 3413309 - DNA, 25 bp, Homo sapien
aaaattcgacttgcttatcctcctt

SEQ ID NO: 3413310 - DNA, 25 bp, Homo sapien
aacagcagggctgaaaccgatacgg

SEQ ID NO: 3413311 - DNA, 25 bp, Homo sapien
ggagactacatctagcaggagaatg

SEQ ID NO: 3413312 - DNA, 25 bp, Homo sapien
gatacgggccgttcaaactctctgg

SEQ ID NO: 3413313 - DNA, 25 bp, Homo sapien
ccatcggtataactgggttccgaca

SEQ ID NO: 3413314 - DNA, 25 bp, Homo sapien
tcagagtgcaaaaagctgaaaatat

SEQ ID NO: 3413315 - DNA, 25 bp, Homo sapien
taatgagcagcttacacactaaagc

SEQ ID NO: 3413316 - DNA, 25 bp, Homo sapien
tcaaaaagagaagagaataccctag

SEQ ID NO: 3413317 - DNA, 25 bp, Homo sapien
tagaatccgtacttttgcaagaatg

SEQ ID NO: 3413318 - DNA, 25 bp, Homo sapien
tctataattttcaggcggattcaca

SEQ ID NO: 3413319 - DNA, 25 bp, Homo sapien
caggaagcattcatgaactcatgtc

SEQ ID NO: 3413320 - DNA, 25 bp, Homo sapien
tctaggcaaggttgtatctaacaca

SEQ ID NO: 3413321 - DNA, 25 bp, Homo sapien
aagctgactcctttcttagaagcac

SEQ ID NO: 3413322 - DNA, 25 bp, Homo sapien
gaataaacccgcaagtttctaggca

SEQ ID NO: 3413323 - DNA, 25 bp, Homo sapien
aagcaacgcccatgaagacctaagg

SEQ ID NO: 3413324 - DNA, 25 bp, Homo sapien
gaagtggtatcctaacagttgtacc

SEQ ID NO: 3413325 - DNA, 25 bp, Homo sapien
aaaacagatgatttactccggagaa

SEQ ID NO: 3413326 - DNA, 25 bp, Homo sapien
cctttagcacatgggtacaagaaac

SEQ ID NO: 3413327 - DNA, 25 bp, Homo sapien
tcacttgcaatgaaatgggaactgc

SEQ ID NO: 3413328 - DNA, 25 bp, Homo sapien
tagtcaatagagagcagaacagcaa

SEQ ID NO: 3413329 - DNA, 25 bp, Homo sapien
tgtgccccagttaacaaagtagtca

SEQ ID NO: 3413330 - DNA, 25 bp, Homo sapien
ggtagacatccaagaggccaactgt

SEQ ID NO: 3413331 - DNA, 25 bp, Homo sapien
catcaaattgagcaggtgagataga

SEQ ID NO: 3413332 - DNA, 25 bp, Homo sapien
ggagggaagacgacaagtatagcca

SEQ ID NO: 3413333 - DNA, 25 bp, Homo sapien
ggagtgctgactcagaaatacagta

SEQ ID NO: 3413334 - DNA, 25 bp, Homo sapien
tgctgctaatccaaaaggatgcttg

SEQ ID NO: 3413335 - DNA, 25 bp, Homo sapien
tggagcctagtcagaaaagaaagcc

SEQ ID NO: 3413336 - DNA, 25 bp, Homo sapien
tgagaggacaaccactaggaattgc

SEQ ID NO: 3413337 - DNA, 25 bp, Homo sapien
gcggcaaagaggtcaagacagcaac

SEQ ID NO: 3413338 - DNA, 25 bp, Homo sapien
ttgcacagaagccaaatcctggcgg

SEQ ID NO: 3413339 - DNA, 25 bp, Homo sapien
gagtagctagatgctccgagaccca

SEQ ID NO: 3413340 - DNA, 25 bp, Homo sapien
cagtaagcttcccagtgctaagaga

SEQ ID NO: 3413341 - DNA, 25 bp, Homo sapien
tgtcacagtagcaccagaccacagt

SEQ ID NO: 3413342 - DNA, 25 bp, Homo sapien
tgctaaaacgcaaaaggccacagtc

SEQ ID NO: 3413343 - DNA, 25 bp, Homo sapien
gactgagttacttacctggatccct

SEQ ID NO: 3413344 - DNA, 25 bp, Homo sapien
atgcatgacgcacacacaggactgg

SEQ ID NO: 3413345 - DNA, 25 bp, Homo sapien
tggcaacctctatacatcaacaggg

SEQ ID NO: 3413346 - DNA, 25 bp, Homo sapien
ggatccctgtgcaaccttgccaaag

SEQ ID NO: 3413347 - DNA, 25 bp, Homo sapien
atcaaaaccaatgtcatggccgggc

SEQ ID NO: 3413348 - DNA, 25 bp, Homo sapien
ccatagcctatgtgaactctgaagt

SEQ ID NO: 3413349 - DNA, 25 bp, Homo sapien
agttataacccctgtaagcttccat

SEQ ID NO: 3413350 - DNA, 25 bp, Homo sapien
ctcttcatggtttagttttaatgag

SEQ ID NO: 3413351 - DNA, 25 bp, Homo sapien
gattctactgtcaagtgagagctcc

SEQ ID NO: 3413352 - DNA, 25 bp, Homo sapien
tgtgttcagatacctaggccttgga

SEQ ID NO: 3413353 - DNA, 25 bp, Homo sapien
tatgcagaagtcagcaagcaagagt

SEQ ID NO: 3413354 - DNA, 25 bp, Homo sapien
gcctgtttggcttagagtgtatgca

SEQ ID NO: 3413355 - DNA, 25 bp, Homo sapien
aaatcatggaagaagcatcccagcc

SEQ ID NO: 3413356 - DNA, 25 bp, Homo sapien
ctgttaagagaaggtcgcaactgat

SEQ ID NO: 3413357 - DNA, 25 bp, Homo sapien
tcgcaactgattggtttaacacaga

SEQ ID NO: 3413358 - DNA, 25 bp, Homo sapien
cagtctagattcaaaaaatcatgga

SEQ ID NO: 3413359 - DNA, 25 bp, Homo sapien
cgtacattatgtatggcccaacaca

SEQ ID NO: 3413360 - DNA, 25 bp, Homo sapien
tctagagggtctatgtgtgctatct

SEQ ID NO: 3413361 - DNA, 25 bp, Homo sapien
caggaggttttacaggcattagtga

SEQ ID NO: 3413362 - DNA, 25 bp, Homo sapien
gtgatactctgttggactcaatggg

SEQ ID NO: 3413363 - DNA, 25 bp, Homo sapien
taaatattatattgatggcaaaacg

SEQ ID NO: 3413364 - DNA, 25 bp, Homo sapien
tcaggttcagttggtcaagaccagc

SEQ ID NO: 3413365 - DNA, 25 bp, Homo sapien
gttccttgactaatggagacaacag

SEQ ID NO: 3413366 - DNA, 25 bp, Homo sapien
cacttgaggtcaggttcagttggtc

SEQ ID NO: 3413367 - DNA, 25 bp, Homo sapien
cgtgaacgccggaggtggagcttac

SEQ ID NO: 3413368 - DNA, 25 bp, Homo sapien
agccaagatcgcactattgcactcc

SEQ ID NO: 3413369 - DNA, 25 bp, Homo sapien
agtgagccaagatcgcactattgca

SEQ ID NO: 3413370 - DNA, 25 bp, Homo sapien
caagatcgcactattgcactccagc

SEQ ID NO: 3413371 - DNA, 25 bp, Homo sapien
aaggtaaggggcggagccgccgcag

SEQ ID NO: 3413372 - DNA, 25 bp, Homo sapien
aggtaaggggcggagccgccgcagg

SEQ ID NO: 3413373 - DNA, 25 bp, Homo sapien
gaaggtaaggggcggagccgccgca

SEQ ID NO: 3413374 - DNA, 25 bp, Homo sapien
gtgagacccggacgcgttccagctg

SEQ ID NO: 3413375 - DNA, 25 bp, Homo sapien
aggccaagatgctggcggtcgactc

SEQ ID NO: 3413376 - DNA, 25 bp, Homo sapien
ttggcatcttgtggtgagacccgga

SEQ ID NO: 3413377 - DNA, 25 bp, Homo sapien
tgcgccgagacgtggcgccgttcct

SEQ ID NO: 3413378 - DNA, 25 bp, Homo sapien
tgccggcgggtgagtgtgccgttgg

SEQ ID NO: 3413379 - DNA, 25 bp, Homo sapien
tgatgccggcgggtgagtgtgccgt

SEQ ID NO: 3413380 - DNA, 25 bp, Homo sapien
ggcgggtgagtgtgccgttggccat

SEQ ID NO: 3413381 - DNA, 25 bp, Homo sapien
ccggcgggtgagtgtgccgttggcc

SEQ ID NO: 3413382 - DNA, 25 bp, Homo sapien
atccctggaagaacgggcactggac

SEQ ID NO: 3413383 - DNA, 25 bp, Homo sapien
tttgggttaaacagcagcatgatgc

SEQ ID NO: 3413384 - DNA, 25 bp, Homo sapien
gagactgaactagggctgagagcac

SEQ ID NO: 3413385 - DNA, 25 bp, Homo sapien
ggtacagactgttccctcagggaga

SEQ ID NO: 3413386 - DNA, 25 bp, Homo sapien
tgacctccaaacctgagcagtccag

SEQ ID NO: 3413387 - DNA, 25 bp, Homo sapien
tcctcagtatgagggactttctcta

SEQ ID NO: 3413388 - DNA, 25 bp, Homo sapien
taggaacactgcaagcatgctgcct

SEQ ID NO: 3413389 - DNA, 25 bp, Homo sapien
catccctaactttctattgtagttc

SEQ ID NO: 3413390 - DNA, 25 bp, Homo sapien
ctgcagggagaggaagttaaacatt

SEQ ID NO: 3413391 - DNA, 25 bp, Homo sapien
agaggaagttaaacattactttcag

SEQ ID NO: 3413392 - DNA, 25 bp, Homo sapien
cagggagaggaagttaaacattact

SEQ ID NO: 3413393 - DNA, 25 bp, Homo sapien
gagaggaagttaaacattactttca

SEQ ID NO: 3413394 - DNA, 25 bp, Homo sapien
gaagttgctctgtcttaagcagcag

SEQ ID NO: 3413395 - DNA, 25 bp, Homo sapien
gaagatatgtgtggcctggagtcct

SEQ ID NO: 3413396 - DNA, 25 bp, Homo sapien
taagaacgtaaactccacgagggca

SEQ ID NO: 3413397 - DNA, 25 bp, Homo sapien
gtagaatagtgagatccaaccacct

SEQ ID NO: 3413398 - DNA, 25 bp, Homo sapien
ctttcaaggtcagcatcgcccacaa

SEQ ID NO: 3413399 - DNA, 25 bp, Homo sapien
cagcatcgcccacaaaccggccgtt

SEQ ID NO: 3413400 - DNA, 25 bp, Homo sapien
ctggggtccgttgagtttcaaatct

SEQ ID NO: 3413401 - DNA, 25 bp, Homo sapien
tggggtccgttgagtttcaaatctg

SEQ ID NO: 3413402 - DNA, 25 bp, Homo sapien
tgaaaatcccagtaagagccatctt

SEQ ID NO: 3413403 - DNA, 25 bp, Homo sapien
gctttatgttactcttcagataccg

SEQ ID NO: 3413404 - DNA, 25 bp, Homo sapien
cccagtaagagccatcttttgactg

SEQ ID NO: 3413405 - DNA, 25 bp, Homo sapien
gataccgtctaaaaggctcaagacc

SEQ ID NO: 3413406 - DNA, 25 bp, Homo sapien
tcaacatccaagtgacagacagtag

SEQ ID NO: 3413407 - DNA, 25 bp, Homo sapien
taagaagcataagtggtaaacctgg

SEQ ID NO: 3413408 - DNA, 25 bp, Homo sapien
tatctgagtgatccctcaaaagagc

SEQ ID NO: 3413409 - DNA, 25 bp, Homo sapien
gatttaacttcccagctgtggtcat

SEQ ID NO: 3413410 - DNA, 25 bp, Homo sapien
ggtgctatatagaaggtgactgtga

SEQ ID NO: 3413411 - DNA, 25 bp, Homo sapien
ggatggtgctatatagaaggtgact

SEQ ID NO: 3413412 - DNA, 25 bp, Homo sapien
tgctatatagaaggtgactgtgatc

SEQ ID NO: 3413413 - DNA, 25 bp, Homo sapien
gatggtgctatatagaaggtgactg

SEQ ID NO: 3413414 - DNA, 25 bp, Homo sapien
gtgcgccgagtggtcccatcatctg

SEQ ID NO: 3413415 - DNA, 25 bp, Homo sapien
tctgtgcgccgagtggtcccatcat

SEQ ID NO: 3413416 - DNA, 25 bp, Homo sapien
gctccctcaggatcctcctccgtgt

SEQ ID NO: 3413417 - DNA, 25 bp, Homo sapien
tccctcaggatcctcctccgtgtag

SEQ ID NO: 3413418 - DNA, 25 bp, Homo sapien
tccagatcttacacacgtcttagtt

SEQ ID NO: 3413419 - DNA, 25 bp, Homo sapien
agatcttacacacgtcttagtttac

SEQ ID NO: 3413420 - DNA, 25 bp, Homo sapien
cagatcttacacacgtcttagttta

SEQ ID NO: 3413421 - DNA, 25 bp, Homo sapien
ccagatcttacacacgtcttagttt

SEQ ID NO: 3413422 - DNA, 25 bp, Homo sapien
cgggcagtgccataatcagacatca

SEQ ID NO: 3413423 - DNA, 25 bp, Homo sapien
tctggtcccatagcgactggctgta

SEQ ID NO: 3413424 - DNA, 25 bp, Homo sapien
tagtggcgactataaccatcaggag

SEQ ID NO: 3413425 - DNA, 25 bp, Homo sapien
gcggaaatcacgacccaaagtctgg

SEQ ID NO: 3413426 - DNA, 25 bp, Homo sapien
agctaccccttgtccctggtcttgg

SEQ ID NO: 3413427 - DNA, 25 bp, Homo sapien
gctaccccttgtccctggtcttgga

SEQ ID NO: 3413428 - DNA, 25 bp, Homo sapien
aagctaccccttgtccctggtcttg

SEQ ID NO: 3413429 - DNA, 25 bp, Homo sapien
ggtactaaaaatgcccaaacagctg

SEQ ID NO: 3413430 - DNA, 25 bp, Homo sapien
attggttgtcttctaaactattatg

SEQ ID NO: 3413431 - DNA, 25 bp, Homo sapien
tttctgcttactataaaattaagga

SEQ ID NO: 3413432 - DNA, 25 bp, Homo sapien
actattatgtatcacttttgcatcc

SEQ ID NO: 3413433 - DNA, 25 bp, Homo sapien
tgagaacagttccttaaccaaacag

SEQ ID NO: 3413434 - DNA, 25 bp, Homo sapien
gaagtctgcaggcttagaaagtaac

SEQ ID NO: 3413435 - DNA, 25 bp, Homo sapien
gaaattaggcatttacacacaggaa

SEQ ID NO: 3413436 - DNA, 25 bp, Homo sapien
tgctacatcacaggaggatctggct

SEQ ID NO: 3413437 - DNA, 25 bp, Homo sapien
caagcggaatccaagcatggcgatc

SEQ ID NO: 3413438 - DNA, 25 bp, Homo sapien
taaacttcctcgctcatgctgggcc

SEQ ID NO: 3413439 - DNA, 25 bp, Homo sapien
ccagtagtattgatccgatggcacc

SEQ ID NO: 3413440 - DNA, 25 bp, Homo sapien
tttcgaagcaatcgcacaagggcag

SEQ ID NO: 3413441 - DNA, 25 bp, Homo sapien
actcaatgtggcgtggcttacagtc

SEQ ID NO: 3413442 - DNA, 25 bp, Homo sapien
tgagcaccgattcccactcaatgtg

SEQ ID NO: 3413443 - DNA, 25 bp, Homo sapien
tacagtcttcattaggttcccgctc

SEQ ID NO: 3413444 - DNA, 25 bp, Homo sapien
caaggcatgcagtgcatggtccaca

SEQ ID NO: 3413445 - DNA, 25 bp, Homo sapien
caaagatagaaaggttggagttaca

SEQ ID NO: 3413446 - DNA, 25 bp, Homo sapien
tggagttacagtatgcaatacagat

SEQ ID NO: 3413447 - DNA, 25 bp, Homo sapien
gaatggaggctaaagaataggctaa

SEQ ID NO: 3413448 - DNA, 25 bp, Homo sapien
cagataggaatggaggctaaagaat

SEQ ID NO: 3413449 - DNA, 25 bp, Homo sapien
aaccatcacattcccgaagtttccg

SEQ ID NO: 3413450 - DNA, 25 bp, Homo sapien
gaagtttccggcgagcttcactcct

SEQ ID NO: 3413451 - DNA, 25 bp, Homo sapien
tgagggcatcaactaaaccatcaca

SEQ ID NO: 3413452 - DNA, 25 bp, Homo sapien
aatccttctgcccaatctcagcctg

SEQ ID NO: 3413453 - DNA, 25 bp, Homo sapien
tgcctgtgggatctcccggtgaact

SEQ ID NO: 3413454 - DNA, 25 bp, Homo sapien
gatatgataagttccgaagaaggca

SEQ ID NO: 3413455 - DNA, 25 bp, Homo sapien
catgtggcccagtattgttggcaac

SEQ ID NO: 3413456 - DNA, 25 bp, Homo sapien
gagctgcctcttggtaacgctctgc

SEQ ID NO: 3413457 - DNA, 25 bp, Homo sapien
atcccacattaaagactaagaaaca

SEQ ID NO: 3413458 - DNA, 25 bp, Homo sapien
tcccacattaaagactaagaaacag

SEQ ID NO: 3413459 - DNA, 25 bp, Homo sapien
gagctggactcgttcttttagggaa

SEQ ID NO: 3413460 - DNA, 25 bp, Homo sapien
ctcgagctggactcgttcttttagg

SEQ ID NO: 3413461 - DNA, 25 bp, Homo sapien
tagggaaatccactgtatcgtttgc

SEQ ID NO: 3413462 - DNA, 25 bp, Homo sapien
tatcgtttgctggatcctctatagg

SEQ ID NO: 3413463 - DNA, 25 bp, Homo sapien
gcacacaagttctggatagctccag

SEQ ID NO: 3413464 - DNA, 25 bp, Homo sapien
agtcttgctctccttaagaagtgag

SEQ ID NO: 3413465 - DNA, 25 bp, Homo sapien
cttctaggatggcaggagtcttgct

SEQ ID NO: 3413466 - DNA, 25 bp, Homo sapien
tgtatatccgaaccacctctggctg

SEQ ID NO: 3413467 - DNA, 25 bp, Homo sapien
aatggcagcaaactagttatctaag

SEQ ID NO: 3413468 - DNA, 25 bp, Homo sapien
tggcagcaaactagttatctaagtt

SEQ ID NO: 3413469 - DNA, 25 bp, Homo sapien
ggcagcaaactagttatctaagttt

SEQ ID NO: 3413470 - DNA, 25 bp, Homo sapien
cagcaaactagttatctaagttttc

SEQ ID NO: 3413471 - DNA, 25 bp, Homo sapien
cagagcagagcggatgtatcgacca

SEQ ID NO: 3413472 - DNA, 25 bp, Homo sapien
gagccttctcttgacgcagagcaga

SEQ ID NO: 3413473 - DNA, 25 bp, Homo sapien
catgttcattagtcaggaggtcagc

SEQ ID NO: 3413474 - DNA, 25 bp, Homo sapien
tgcagctttcaccacccgttcatgt

SEQ ID NO: 3413475 - DNA, 25 bp, Homo sapien
taaattttgaggtaacagttagcat

SEQ ID NO: 3413476 - DNA, 25 bp, Homo sapien
ggcacctgctggactacaaacactg

SEQ ID NO: 3413477 - DNA, 25 bp, Homo sapien
caactctcgcattcataaactatga

SEQ ID NO: 3413478 - DNA, 25 bp, Homo sapien
ctaaaacccttaccaactctcgcat

SEQ ID NO: 3413479 - DNA, 25 bp, Homo sapien
gcgataacctcgttgatagtgttca

SEQ ID NO: 3413480 - DNA, 25 bp, Homo sapien
tcgaagctttttggcagcctccaag

SEQ ID NO: 3413481 - DNA, 25 bp, Homo sapien
caataccctgtgtctctcgaagctt

SEQ ID NO: 3413482 - DNA, 25 bp, Homo sapien
gcctccaagttctcagcgataacct

SEQ ID NO: 3413483 - DNA, 25 bp, Homo sapien
tctgtaatacaagtgctgctgctcg

SEQ ID NO: 3413484 - DNA, 25 bp, Homo sapien
tatatccccagattgtctgtaatac

SEQ ID NO: 3413485 - DNA, 25 bp, Homo sapien
gctgctcgaacttctttttctgagc

SEQ ID NO: 3413486 - DNA, 25 bp, Homo sapien
tggcttccgcagttccttatatccc

SEQ ID NO: 3413487 - DNA, 25 bp, Homo sapien
aaaacagaagcattatcctgggacc

SEQ ID NO: 3413488 - DNA, 25 bp, Homo sapien
gcattatcctgggaccaagaaaaaa

SEQ ID NO: 3413489 - DNA, 25 bp, Homo sapien
gtcttggtctcaaaagttactatac

SEQ ID NO: 3413490 - DNA, 25 bp, Homo sapien
cagaagcattatcctgggaccaaga

SEQ ID NO: 3413491 - DNA, 25 bp, Homo sapien
tatgttatgacatagagggatacct

SEQ ID NO: 3413492 - DNA, 25 bp, Homo sapien
cctgagctgtgtcggcaacaaatga

SEQ ID NO: 3413493 - DNA, 25 bp, Homo sapien
gctacggtagatttgggcaaaagtc

SEQ ID NO: 3413494 - DNA, 25 bp, Homo sapien
tcagagaatagtaaaaattccctca

SEQ ID NO: 3413495 - DNA, 25 bp, Homo sapien
caaatgcgacaatgtgacagaatac

SEQ ID NO: 3413496 - DNA, 25 bp, Homo sapien
gaatactgaattcaccctatcttat

SEQ ID NO: 3413497 - DNA, 25 bp, Homo sapien
ccctatcttatgctctaatgggcat

SEQ ID NO: 3413498 - DNA, 25 bp, Homo sapien
gaggcaaacacaaatgcgacaatgt

SEQ ID NO: 3413499 - DNA, 25 bp, Homo sapien
tctggcttcgggaagcattgtttag

SEQ ID NO: 3413500 - DNA, 25 bp, Homo sapien
catcatatgaatgactgctctggct

SEQ ID NO: 3413501 - DNA, 25 bp, Homo sapien
tgagagggagagtactatcatcata

SEQ ID NO: 3413502 - DNA, 25 bp, Homo sapien
ttcgggaagcattgtttagattcac

SEQ ID NO: 3413503 - DNA, 25 bp, Homo sapien
ttgtgtttgatcccatattgctcat

SEQ ID NO: 3413504 - DNA, 25 bp, Homo sapien
atttcttcccgatcaggtttcttat

SEQ ID NO: 3413505 - DNA, 25 bp, Homo sapien
ttttgtgtttgatcccatattgctc

SEQ ID NO: 3413506 - DNA, 25 bp, Homo sapien
ctgaatttcttcccgatcaggtttc

SEQ ID NO: 3413507 - DNA, 25 bp, Homo sapien
aatggctccatgtcgcctagatccc

SEQ ID NO: 3413508 - DNA, 25 bp, Homo sapien
ccccgatcgatccagtgttctattg

SEQ ID NO: 3413509 - DNA, 25 bp, Homo sapien
catcaagggtgttgttcccttcaat

SEQ ID NO: 3413510 - DNA, 25 bp, Homo sapien
cctctctcatttggtgtggaatagt

SEQ ID NO: 3413511 - DNA, 25 bp, Homo sapien
ccctaccagaaaaggatgcgatctt

SEQ ID NO: 3413512 - DNA, 25 bp, Homo sapien
taacggcccaagaaatcccaacatg

SEQ ID NO: 3413513 - DNA, 25 bp, Homo sapien
tagagacaggaacctcatgagtgtg

SEQ ID NO: 3413514 - DNA, 25 bp, Homo sapien
tttgaccactgcagaataacggccc

SEQ ID NO: 3413515 - DNA, 25 bp, Homo sapien
ttggcccccctcatcatccaaaacc

SEQ ID NO: 3413516 - DNA, 25 bp, Homo sapien
catggaggggtaagacacttggccc

SEQ ID NO: 3413517 - DNA, 25 bp, Homo sapien
cacttggcccccctcatcatccaaa

SEQ ID NO: 3413518 - DNA, 25 bp, Homo sapien
ggcccccctcatcatccaaaaccaa

SEQ ID NO: 3413519 - DNA, 25 bp, Homo sapien
aagaacaatcttgggggtgactgaa

SEQ ID NO: 3413520 - DNA, 25 bp, Homo sapien
caatcttgggggtgactgaaggaca

SEQ ID NO: 3413521 - DNA, 25 bp, Homo sapien
gagcctccttcctcaagaacaatct

SEQ ID NO: 3413522 - DNA, 25 bp, Homo sapien
ctcaagaacaatcttgggggtgact

SEQ ID NO: 3413523 - DNA, 25 bp, Homo sapien
taggagaccttcacttactcaaggg

SEQ ID NO: 3413524 - DNA, 25 bp, Homo sapien
ggagagcaaggtttcttaatcccag

SEQ ID NO: 3413525 - DNA, 25 bp, Homo sapien
ggttcttgatggtccctgccttgga

SEQ ID NO: 3413526 - DNA, 25 bp, Homo sapien
ggccaggccaactcagcagacatat

SEQ ID NO: 3413527 - DNA, 25 bp, Homo sapien
tgtacatcaagtcctttagtttgcc

SEQ ID NO: 3413528 - DNA, 25 bp, Homo sapien
caagtcctttagtttgccaaccaat

SEQ ID NO: 3413529 - DNA, 25 bp, Homo sapien
agttatgtacatcaagtcctttagt

SEQ ID NO: 3413530 - DNA, 25 bp, Homo sapien
tagtttgccaaccaatccagggcag

SEQ ID NO: 3413531 - DNA, 25 bp, Homo sapien
catggaagggcgggaggagatgcac

SEQ ID NO: 3413532 - DNA, 25 bp, Homo sapien
atggaagggcgggaggagatgcacc

SEQ ID NO: 3413533 - DNA, 25 bp, Homo sapien
acatggaagggcgggaggagatgca

SEQ ID NO: 3413534 - DNA, 25 bp, Homo sapien
caaaagcttgctatgactgaaatca

SEQ ID NO: 3413535 - DNA, 25 bp, Homo sapien
tagggccaatagtaggtaagaaagc

SEQ ID NO: 3413536 - DNA, 25 bp, Homo sapien
tggctataccaatcctcaatgaaga

SEQ ID NO: 3413537 - DNA, 25 bp, Homo sapien
tttgcaaaatcccacccatatgctg

SEQ ID NO: 3413538 - DNA, 25 bp, Homo sapien
gatggtaaattctgggcacctaagg

SEQ ID NO: 3413539 - DNA, 25 bp, Homo sapien
gcacctaaggagtaagagtcacacc

SEQ ID NO: 3413540 - DNA, 25 bp, Homo sapien
cctgtgcagtgtgctcttagggtca

SEQ ID NO: 3413541 - DNA, 25 bp, Homo sapien
taataataatcaacccgcatagcag

SEQ ID NO: 3413542 - DNA, 25 bp, Homo sapien
ccccaccgagaaaaaagagcaccag

SEQ ID NO: 3413543 - DNA, 25 bp, Homo sapien
agcccacggctgttctattacccac

SEQ ID NO: 3413544 - DNA, 25 bp, Homo sapien
cccacggctgttctattacccacac

SEQ ID NO: 3413545 - DNA, 25 bp, Homo sapien
cacaccccaccgagaaaaaagagca

SEQ ID NO: 3413546 - DNA, 25 bp, Homo sapien
gatttttggttctctggaattgaat

SEQ ID NO: 3413547 - DNA, 25 bp, Homo sapien
atttttggttctctggaattgaatg

SEQ ID NO: 3413548 - DNA, 25 bp, Homo sapien
ggatttttggttctctggaattgaa

SEQ ID NO: 3413549 - DNA, 25 bp, Homo sapien
tatacatgggccttttgatcctaca

SEQ ID NO: 3413550 - DNA, 25 bp, Homo sapien
gagaagcaacattatggcccagtgg

SEQ ID NO: 3413551 - DNA, 25 bp, Homo sapien
tctgcagcaaagatagtccctggta

SEQ ID NO: 3413552 - DNA, 25 bp, Homo sapien
taagagagctacgtattacagtggg

SEQ ID NO: 3413553 - DNA, 25 bp, Homo sapien
tgccaaaggataagaacataacagg

SEQ ID NO: 3413554 - DNA, 25 bp, Homo sapien
tggaccaatccagaaggaagagaga

SEQ ID NO: 3413555 - DNA, 25 bp, Homo sapien
aaatcatctcaagcagggctatcaa

SEQ ID NO: 3413556 - DNA, 25 bp, Homo sapien
ttgtatctagctcaatgccaaagga

SEQ ID NO: 3413557 - DNA, 25 bp, Homo sapien
ttaagtcaaagtcggcaattccagg

SEQ ID NO: 3413558 - DNA, 25 bp, Homo sapien
cacttgctcgccagttgagataccc

SEQ ID NO: 3413559 - DNA, 25 bp, Homo sapien
aaattaagggctagcttcctgcctc

SEQ ID NO: 3413560 - DNA, 25 bp, Homo sapien
gagataccctttgtagctagaagtg

SEQ ID NO: 3413561 - DNA, 25 bp, Homo sapien
ctcctccagctttctcttcatccat

SEQ ID NO: 3413562 - DNA, 25 bp, Homo sapien
tgtgttgtcacaagcactaccagaa

SEQ ID NO: 3413563 - DNA, 25 bp, Homo sapien
cataataactgagcaatcgcatagc

SEQ ID NO: 3413564 - DNA, 25 bp, Homo sapien
cagatgcttccatgtgggcgtgcca

SEQ ID NO: 3413565 - DNA, 25 bp, Homo sapien
tctagggtgtggacatgtataccac

SEQ ID NO: 3413566 - DNA, 25 bp, Homo sapien
tctccagggtggtgtgaaactcatt

SEQ ID NO: 3413567 - DNA, 25 bp, Homo sapien
ctatggctcaagtgacggtctttaa

SEQ ID NO: 3413568 - DNA, 25 bp, Homo sapien
ttgaagcctcagaatcccgttttta

SEQ ID NO: 3413569 - DNA, 25 bp, Homo sapien
agaggctccacctcagaacgctagg

SEQ ID NO: 3413570 - DNA, 25 bp, Homo sapien
ttgtcttccctaggagtatggcctg

SEQ ID NO: 3413571 - DNA, 25 bp, Homo sapien
gtcttccctaggagtatggcctggg

SEQ ID NO: 3413572 - DNA, 25 bp, Homo sapien
ttgttgtcttccctaggagtatggc

SEQ ID NO: 3413573 - DNA, 25 bp, Homo sapien
tgttgtcttccctaggagtatggcc

SEQ ID NO: 3413574 - DNA, 25 bp, Homo sapien
cattctaagtctgcaccgctggcta

SEQ ID NO: 3413575 - DNA, 25 bp, Homo sapien
cctggatgccaacatgcagaagcac

SEQ ID NO: 3413576 - DNA, 25 bp, Homo sapien
tggtggaaagcaacaactccagaag

SEQ ID NO: 3413577 - DNA, 25 bp, Homo sapien
cgctggctaccacacaggaataata

SEQ ID NO: 3413578 - DNA, 25 bp, Homo sapien
ctggcctataataaagttttcatga

SEQ ID NO: 3413579 - DNA, 25 bp, Homo sapien
acaactatgcttcattcattgacat

SEQ ID NO: 3413580 - DNA, 25 bp, Homo sapien
tttcatgactccaaactttgcattc

SEQ ID NO: 3413581 - DNA, 25 bp, Homo sapien
taacaactatgcttcattcattgac

SEQ ID NO: 3413582 - DNA, 25 bp, Homo sapien
cctcagaaggtgcaacattgggcat

SEQ ID NO: 3413583 - DNA, 25 bp, Homo sapien
ccttcacactgtaaagcctctgatg

SEQ ID NO: 3413584 - DNA, 25 bp, Homo sapien
tcctgtttccttgacgttagcataa

SEQ ID NO: 3413585 - DNA, 25 bp, Homo sapien
ggcaccctaggatgtcagtaatgtt

SEQ ID NO: 3413586 - DNA, 25 bp, Homo sapien
actgtttattctagctagctattta

SEQ ID NO: 3413587 - DNA, 25 bp, Homo sapien
tgtttattctagctagctatttatc

SEQ ID NO: 3413588 - DNA, 25 bp, Homo sapien
ttctagctagctatttatctaatct

SEQ ID NO: 3413589 - DNA, 25 bp, Homo sapien
cctacttctgttagctcatcaaagt

SEQ ID NO: 3413590 - DNA, 25 bp, Homo sapien
ggtcaacatctttcccggctgagcc

SEQ ID NO: 3413591 - DNA, 25 bp, Homo sapien
gcagaggaagcttcaggtcaacatc

SEQ ID NO: 3413592 - DNA, 25 bp, Homo sapien
caatggccaagtagtgtccgtcttc

SEQ ID NO: 3413593 - DNA, 25 bp, Homo sapien
gatctactaacaataccaatggcca

SEQ ID NO: 3413594 - DNA, 25 bp, Homo sapien
tccatctcttttgagggctgtgtgg

SEQ ID NO: 3413595 - DNA, 25 bp, Homo sapien
aagttcatcttgcagggattctcca

SEQ ID NO: 3413596 - DNA, 25 bp, Homo sapien
catctatgccataacagtggtgggc

SEQ ID NO: 3413597 - DNA, 25 bp, Homo sapien
tctgtggtcacacctaagctcttgg

SEQ ID NO: 3413598 - DNA, 25 bp, Homo sapien
cccaatgcctgtaccactaatgtgt

SEQ ID NO: 3413599 - DNA, 25 bp, Homo sapien
gatcccttgtgaatgtcttactgcc

SEQ ID NO: 3413600 - DNA, 25 bp, Homo sapien
caaatctccccagcgttggaggtgg

SEQ ID NO: 3413601 - DNA, 25 bp, Homo sapien
gaactggcctggagtctcagatgac

SEQ ID NO: 3413602 - DNA, 25 bp, Homo sapien
tctttgggcttatgctgtttaaaca

SEQ ID NO: 3413603 - DNA, 25 bp, Homo sapien
tccatataaattggcttctttgggc

SEQ ID NO: 3413604 - DNA, 25 bp, Homo sapien
ccatgctctttcggcctccttgggc

SEQ ID NO: 3413605 - DNA, 25 bp, Homo sapien
gtccttcacagtcagcacttggtta

SEQ ID NO: 3413606 - DNA, 25 bp, Homo sapien
gatttgagtgagagggtagatgtag

SEQ ID NO: 3413607 - DNA, 25 bp, Homo sapien
gggtgggacgtggagatttgagtga

SEQ ID NO: 3413608 - DNA, 25 bp, Homo sapien
agtgagagggtagatgtaggtggaa

SEQ ID NO: 3413609 - DNA, 25 bp, Homo sapien
gacgtggagatttgagtgagagggt

SEQ ID NO: 3413610 - DNA, 25 bp, Homo sapien
gaagcatgtgttggcagcagcaagc

SEQ ID NO: 3413611 - DNA, 25 bp, Homo sapien
agcagcaagcatcatttgcaggaag

SEQ ID NO: 3413612 - DNA, 25 bp, Homo sapien
ctaggaatgaagcatgtgttggcag

SEQ ID NO: 3413613 - DNA, 25 bp, Homo sapien
gcagcaagcatcatttgcaggaagg

SEQ ID NO: 3413614 - DNA, 25 bp, Homo sapien
cagacatcagtgatctctggtacat

SEQ ID NO: 3413615 - DNA, 25 bp, Homo sapien
gaaggtggtccgaggccactagtat

SEQ ID NO: 3413616 - DNA, 25 bp, Homo sapien
catctccagttgaaggtggtccgag

SEQ ID NO: 3413617 - DNA, 25 bp, Homo sapien
aaggagctgaatgtaggtgagctag

SEQ ID NO: 3413618 - DNA, 25 bp, Homo sapien
cgaggccactagtatcacagggagg

SEQ ID NO: 3413619 - DNA, 25 bp, Homo sapien
gtccctggagtaaccacacatatgc

SEQ ID NO: 3413620 - DNA, 25 bp, Homo sapien
acacatatgccaacccccactgact

SEQ ID NO: 3413621 - DNA, 25 bp, Homo sapien
gccaacccccactgactcataggaa

SEQ ID NO: 3413622 - DNA, 25 bp, Homo sapien
agtgctgtccctggagtaaccacac

SEQ ID NO: 3413623 - DNA, 25 bp, Homo sapien
catttaaacaaatcctagaggcctt

SEQ ID NO: 3413624 - DNA, 25 bp, Homo sapien
gctgtcactcaccaagtgggatgtc

SEQ ID NO: 3413625 - DNA, 25 bp, Homo sapien
gatcttaggtggagaactcaagctc

SEQ ID NO: 3413626 - DNA, 25 bp, Homo sapien
agtacattgctttggatccctggat

SEQ ID NO: 3413627 - DNA, 25 bp, Homo sapien
tatgtcttagatcgcctagagccca

SEQ ID NO: 3413628 - DNA, 25 bp, Homo sapien
ctatgtcttagatcgcctagagccc

SEQ ID NO: 3413629 - DNA, 25 bp, Homo sapien
cacccagtacctgaagatcaggaaa

SEQ ID NO: 3413630 - DNA, 25 bp, Homo sapien
ctagagcccacccagtacctgaaga

SEQ ID NO: 3413631 - DNA, 25 bp, Homo sapien
gctctagacaggatgcattcatctc

SEQ ID NO: 3413632 - DNA, 25 bp, Homo sapien
ctagacaggatgcattcatctcgcc

SEQ ID NO: 3413633 - DNA, 25 bp, Homo sapien
cagctctagacaggatgcattcatc

SEQ ID NO: 3413634 - DNA, 25 bp, Homo sapien
ttcagctctagacaggatgcattca

SEQ ID NO: 3413635 - DNA, 25 bp, Homo sapien
tataatccagatggccctcatgacc

SEQ ID NO: 3413636 - DNA, 25 bp, Homo sapien
ccatctcctttgcaggtggtataat

SEQ ID NO: 3413637 - DNA, 25 bp, Homo sapien
tctgctgctggccatcgtagcctat

SEQ ID NO: 3413638 - DNA, 25 bp, Homo sapien
ttctatggcacaggggaatgtctgc

SEQ ID NO: 3413639 - DNA, 25 bp, Homo sapien
gacagatctgatctgccaatctgca

SEQ ID NO: 3413640 - DNA, 25 bp, Homo sapien
caacctgggcatgacagatctgatc

SEQ ID NO: 3413641 - DNA, 25 bp, Homo sapien
ctgctgacctactccgtgactctgg

SEQ ID NO: 3413642 - DNA, 25 bp, Homo sapien
actctggtgggcaacctgggcatga

SEQ ID NO: 3413643 - DNA, 25 bp, Homo sapien
ttttcaatcagttgtatgtaaccca

SEQ ID NO: 3413644 - DNA, 25 bp, Homo sapien
ttgtatgtaacccaaagaactgtac

SEQ ID NO: 3413645 - DNA, 25 bp, Homo sapien
caaagaactgtacgttgatttcctt

SEQ ID NO: 3413646 - DNA, 25 bp, Homo sapien
gaactgtacgttgatttcctttgcc

SEQ ID NO: 3413647 - DNA, 25 bp, Homo sapien
caattcccagatgtttgaattcttc

SEQ ID NO: 3413648 - DNA, 25 bp, Homo sapien
aattcccagatgtttgaattcttca

SEQ ID NO: 3413649 - DNA, 25 bp, Homo sapien
gatgtttgaattcttcatctttctc

SEQ ID NO: 3413650 - DNA, 25 bp, Homo sapien
ccagatgtttgaattcttcatcttt

SEQ ID NO: 3413651 - DNA, 25 bp, Homo sapien
tgcactccctaatcagacttagctg

SEQ ID NO: 3413652 - DNA, 25 bp, Homo sapien
cttggagcctgcactccctaatcag

SEQ ID NO: 3413653 - DNA, 25 bp, Homo sapien
tagctgcctccactgtagtgatcca

SEQ ID NO: 3413654 - DNA, 25 bp, Homo sapien
taatcagacttagctgcctccactg

SEQ ID NO: 3413655 - DNA, 25 bp, Homo sapien
cccttctgaagggagtggtccttcg

SEQ ID NO: 3413656 - DNA, 25 bp, Homo sapien
ttttccagaggaatagatgacaggc

SEQ ID NO: 3413657 - DNA, 25 bp, Homo sapien
ccttctgaagggagtggtccttcgt

SEQ ID NO: 3413658 - DNA, 25 bp, Homo sapien
cagaggaatagatgacaggctgaga

SEQ ID NO: 3413659 - DNA, 25 bp, Homo sapien
tgcataaggcctgcactcgcacctg

SEQ ID NO: 3413660 - DNA, 25 bp, Homo sapien
caccgaaaataatccgacactcacg

SEQ ID NO: 3413661 - DNA, 25 bp, Homo sapien
gcttctaacaccactcaccgaaaat

SEQ ID NO: 3413662 - DNA, 25 bp, Homo sapien
gacactcacgtcatgtcgtttggca

SEQ ID NO: 3413663 - DNA, 25 bp, Homo sapien
taaggcaagcccaacagtttacatg

SEQ ID NO: 3413664 - DNA, 25 bp, Homo sapien
tactttttggaggagtttgcccatc

SEQ ID NO: 3413665 - DNA, 25 bp, Homo sapien
gatgcttgggctaaagtcacttggg

SEQ ID NO: 3413666 - DNA, 25 bp, Homo sapien
tcacttgggcccatttctctacttt

SEQ ID NO: 3413667 - DNA, 25 bp, Homo sapien
ataaagctctgtggttcaggaaaac

SEQ ID NO: 3413668 - DNA, 25 bp, Homo sapien
atgacaataaagctctgtggttcag

SEQ ID NO: 3413669 - DNA, 25 bp, Homo sapien
caataaagctctgtggttcaggaaa

SEQ ID NO: 3413670 - DNA, 25 bp, Homo sapien
gacaataaagctctgtggttcagga

SEQ ID NO: 3413671 - DNA, 25 bp, Homo sapien
agaagccggatgtcccgctctcctc

SEQ ID NO: 3413672 - DNA, 25 bp, Homo sapien
tcagaagccggatgtcccgctctcc

SEQ ID NO: 3413673 - DNA, 25 bp, Homo sapien
cagaagccggatgtcccgctctcct

SEQ ID NO: 3413674 - DNA, 25 bp, Homo sapien
aagccggatgtcccgctctcctcag

SEQ ID NO: 3413675 - DNA, 25 bp, Homo sapien
attggcgtctgtgttaacagaatcc

SEQ ID NO: 3413676 - DNA, 25 bp, Homo sapien
tattggcgtctgtgttaacagaatc

SEQ ID NO: 3413677 - DNA, 25 bp, Homo sapien
ggcgtctgtgttaacagaatccaac

SEQ ID NO: 3413678 - DNA, 25 bp, Homo sapien
tccttctctcccagtctagagctgg

SEQ ID NO: 3413679 - DNA, 25 bp, Homo sapien
tcccagtctagagctggatggaagc

SEQ ID NO: 3413680 - DNA, 25 bp, Homo sapien
gtctagagctggatggaagccactg

SEQ ID NO: 3413681 - DNA, 25 bp, Homo sapien
agcacttggcacatgttcatttcca

SEQ ID NO: 3413682 - DNA, 25 bp, Homo sapien
caatccaggttcagttctggtaagg

SEQ ID NO: 3413683 - DNA, 25 bp, Homo sapien
gtctccaatccaggttcagttctgg

SEQ ID NO: 3413684 - DNA, 25 bp, Homo sapien
tccaatccaggttcagttctggtaa

SEQ ID NO: 3413685 - DNA, 25 bp, Homo sapien
ccaggttcagttctggtaagggcag

SEQ ID NO: 3413686 - DNA, 25 bp, Homo sapien
tggagcctatggaaatcagatggct

SEQ ID NO: 3413687 - DNA, 25 bp, Homo sapien
ttcaaacgggaaggataacatgtac

SEQ ID NO: 3413688 - DNA, 25 bp, Homo sapien
catcattaagggaaagttagggcct

SEQ ID NO: 3413689 - DNA, 25 bp, Homo sapien
taacatgtacattgctgggctggac

SEQ ID NO: 3413690 - DNA, 25 bp, Homo sapien
ccgtcaggccgtagctgtgagtttg

SEQ ID NO: 3413691 - DNA, 25 bp, Homo sapien
agtgagagctcagcaaactcatagc

SEQ ID NO: 3413692 - DNA, 25 bp, Homo sapien
gcagtgagagctcagcaaactcata

SEQ ID NO: 3413693 - DNA, 25 bp, Homo sapien
tggcagtgagagctcagcaaactca

SEQ ID NO: 3413694 - DNA, 25 bp, Homo sapien
atgtggcagtgagagctcagcaaac

SEQ ID NO: 3413695 - DNA, 25 bp, Homo sapien
caaattcagttacctgggtccagtt

SEQ ID NO: 3413696 - DNA, 25 bp, Homo sapien
tgacaaattcagttacctgggtcca

SEQ ID NO: 3413697 - DNA, 25 bp, Homo sapien
gacaaattcagttacctgggtccag

SEQ ID NO: 3413698 - DNA, 25 bp, Homo sapien
catgacaaattcagttacctgggtc

SEQ ID NO: 3413699 - DNA, 25 bp, Homo sapien
caaggctagcaagggtgaggcatca

SEQ ID NO: 3413700 - DNA, 25 bp, Homo sapien
tgacatctgagcacgacaaggctag

SEQ ID NO: 3413701 - DNA, 25 bp, Homo sapien
tgaccatagaggaggccagtagcac

SEQ ID NO: 3413702 - DNA, 25 bp, Homo sapien
cacaaaagccccatagtggagaggc

SEQ ID NO: 3413703 - DNA, 25 bp, Homo sapien
gcatgggcgtgacaacagagtagaa

SEQ ID NO: 3413704 - DNA, 25 bp, Homo sapien
gagagaaaagactcgacccagagct

SEQ ID NO: 3413705 - DNA, 25 bp, Homo sapien
gacagataccaccttgttgaagttg

SEQ ID NO: 3413706 - DNA, 25 bp, Homo sapien
cactgtcccttccaaaagttgagag

SEQ ID NO: 3413707 - DNA, 25 bp, Homo sapien
agacaccatggccatggaggtcttt

SEQ ID NO: 3413708 - DNA, 25 bp, Homo sapien
acaccatggccatggaggtctttgt

SEQ ID NO: 3413709 - DNA, 25 bp, Homo sapien
acagcaaagacaccatggccatgga

SEQ ID NO: 3413710 - DNA, 25 bp, Homo sapien
ccatggccatggaggtctttgtcat

SEQ ID NO: 3413711 - DNA, 25 bp, Homo sapien
tgaagcaaagcatatcactctcagc

SEQ ID NO: 3413712 - DNA, 25 bp, Homo sapien
accttcaatgaagcaaagcatatca

SEQ ID NO: 3413713 - DNA, 25 bp, Homo sapien
agcatatcactctcagcatgttgtc

SEQ ID NO: 3413714 - DNA, 25 bp, Homo sapien
atgttgtctgctcctgtgtctgggt

SEQ ID NO: 3413715 - DNA, 25 bp, Homo sapien
gggtgggcggggacagtcctcctca

SEQ ID NO: 3413716 - DNA, 25 bp, Homo sapien
tcctcagcaccatcctcactgttcc

SEQ ID NO: 3413717 - DNA, 25 bp, Homo sapien
gtgggcggggacagtcctcctcagc

SEQ ID NO: 3413718 - DNA, 25 bp, Homo sapien
agtcctcctcagcaccatcctcact

SEQ ID NO: 3413719 - DNA, 25 bp, Homo sapien
ctggccaagaccatcgtggtggtgg

SEQ ID NO: 3413720 - DNA, 25 bp, Homo sapien
ccaagaccatcgtggtggtggcagc

SEQ ID NO: 3413721 - DNA, 25 bp, Homo sapien
ggccaagaccatcgtggtggtggca

SEQ ID NO: 3413722 - DNA, 25 bp, Homo sapien
catcgtggtggtggcagccttccat

SEQ ID NO: 3413723 - DNA, 25 bp, Homo sapien
tcatccgagccaacaactgccagct

SEQ ID NO: 3413724 - DNA, 25 bp, Homo sapien
ccttcatgttcattggccacccaga

SEQ ID NO: 3413725 - DNA, 25 bp, Homo sapien
tcccatcatccgagccaacaactgc

SEQ ID NO: 3413726 - DNA, 25 bp, Homo sapien
accacactcccatcatccgagccaa

SEQ ID NO: 3413727 - DNA, 25 bp, Homo sapien
ggcaccagcatgcagtgtctggtaa

SEQ ID NO: 3413728 - DNA, 25 bp, Homo sapien
tgtctggtaagggtcttcttggtgc

SEQ ID NO: 3413729 - DNA, 25 bp, Homo sapien
gggtcttcttggtgcttacatggct

SEQ ID NO: 3413730 - DNA, 25 bp, Homo sapien
aggcaccagcatgcagtgtctggta

SEQ ID NO: 3413731 - DNA, 25 bp, Homo sapien
ggatgcgaatctccagcgctgcact

SEQ ID NO: 3413732 - DNA, 25 bp, Homo sapien
gggcagaataatgtgttggacaatt

SEQ ID NO: 3413733 - DNA, 25 bp, Homo sapien
gaactaacaagcagaatttcccctg

SEQ ID NO: 3413734 - DNA, 25 bp, Homo sapien
aggcggagacagtccccacatggct

SEQ ID NO: 3413735 - DNA, 25 bp, Homo sapien
tgtgttgagtggttcaagggccacc

SEQ ID NO: 3413736 - DNA, 25 bp, Homo sapien
gtccacagaatttatgccattgaag

SEQ ID NO: 3413737 - DNA, 25 bp, Homo sapien
tgaagttccaatgttagtgctgcct

SEQ ID NO: 3413738 - DNA, 25 bp, Homo sapien
gagatgactcatgtgctctactatc

SEQ ID NO: 3413739 - DNA, 25 bp, Homo sapien
tcaggagccactttcaacaccatct

SEQ ID NO: 3413740 - DNA, 25 bp, Homo sapien
ggagccactttcaacaccatctgca

SEQ ID NO: 3413741 - DNA, 25 bp, Homo sapien
tcttctgtgatgacaattagatcaa

SEQ ID NO: 3413742 - DNA, 25 bp, Homo sapien
tctgcacatttgcccgcttcttctg

SEQ ID NO: 3413743 - DNA, 25 bp, Homo sapien
tatcagtcccaaagtctcaagcaac

SEQ ID NO: 3413744 - DNA, 25 bp, Homo sapien
gaagagacctatctgcagctctgcc

SEQ ID NO: 3413745 - DNA, 25 bp, Homo sapien
ctggagccgagggtcagtctgaatt

SEQ ID NO: 3413746 - DNA, 25 bp, Homo sapien
aattctgtcaccgtggtgccactct

SEQ ID NO: 3413747 - DNA, 25 bp, Homo sapien
caaaaggaaacactcaatgctagca

SEQ ID NO: 3413748 - DNA, 25 bp, Homo sapien
agccaaaaggaaacactcaatgcta

SEQ ID NO: 3413749 - DNA, 25 bp, Homo sapien
aaggaaacactcaatgctagcacag

SEQ ID NO: 3413750 - DNA, 25 bp, Homo sapien
ggaaacactcaatgctagcacagag

SEQ ID NO: 3413751 - DNA, 25 bp, Homo sapien
ccaggcgggtctttggtgtcatgac

SEQ ID NO: 3413752 - DNA, 25 bp, Homo sapien
cagtgcagatcacagaattgactat

SEQ ID NO: 3413753 - DNA, 25 bp, Homo sapien
acacagccacgtaccggtcataagc

SEQ ID NO: 3413754 - DNA, 25 bp, Homo sapien
tggcaccagaatatgccccggccag

SEQ ID NO: 3413755 - DNA, 25 bp, Homo sapien
tggtttcactacaggcaagcttcag

SEQ ID NO: 3413756 - DNA, 25 bp, Homo sapien
gcctggtttcactacaggcaagctt

SEQ ID NO: 3413757 - DNA, 25 bp, Homo sapien
ggcctggtttcactacaggcaagct

SEQ ID NO: 3413758 - DNA, 25 bp, Homo sapien
tggttgtgatgaccagaaaagctga

SEQ ID NO: 3413759 - DNA, 25 bp, Homo sapien
gatgaacaagtacgatgtaagaatc

SEQ ID NO: 3413760 - DNA, 25 bp, Homo sapien
tgctgtacgaatcttcagaacagac

SEQ ID NO: 3413761 - DNA, 25 bp, Homo sapien
gaacagactgaatgatgaacaagta

SEQ ID NO: 3413762 - DNA, 25 bp, Homo sapien
gtacgatgtaagaatcactgaaatg

SEQ ID NO: 3413763 - DNA, 25 bp, Homo sapien
cacaggtggagaaggtcttggcttt

SEQ ID NO: 3413764 - DNA, 25 bp, Homo sapien
caggtggagaaggtcttggctttcc

SEQ ID NO: 3413765 - DNA, 25 bp, Homo sapien
ggtggagaaggtcttggctttccac

SEQ ID NO: 3413766 - DNA, 25 bp, Homo sapien
tcatgtgagaagcacaggtggagaa

SEQ ID NO: 3413767 - DNA, 25 bp, Homo sapien
tactctgcttgggaaacccttatcc

SEQ ID NO: 3413768 - DNA, 25 bp, Homo sapien
gatcattggatttagcatggggatg

SEQ ID NO: 3413769 - DNA, 25 bp, Homo sapien
tgttgcctttcaggtatatgaatat

SEQ ID NO: 3413770 - DNA, 25 bp, Homo sapien
tgaatatgagtgttccaaagaagag

SEQ ID NO: 3413771 - DNA, 25 bp, Homo sapien
gcacagggtaggaggttaatgaaaa

SEQ ID NO: 3413772 - DNA, 25 bp, Homo sapien
gcaaaattggttgccactcacaaag

SEQ ID NO: 3413773 - DNA, 25 bp, Homo sapien
tatccacttggtgcatacataaggc

SEQ ID NO: 3413774 - DNA, 25 bp, Homo sapien
gggtggtttcttaagctcataaaca

SEQ ID NO: 3413775 - DNA, 25 bp, Homo sapien
tgaattccatcaccaggaaaaacct

SEQ ID NO: 3413776 - DNA, 25 bp, Homo sapien
cttttttgaattccatcaccaggaa

SEQ ID NO: 3413777 - DNA, 25 bp, Homo sapien
tttgaattccatcaccaggaaaaac

SEQ ID NO: 3413778 - DNA, 25 bp, Homo sapien
tccatcaccaggaaaaaccttcaaa

SEQ ID NO: 3413779 - DNA, 25 bp, Homo sapien
actgctgaaagtagaggcattcaag

SEQ ID NO: 3413780 - DNA, 25 bp, Homo sapien
gaggcattcaagagacttatggtaa

SEQ ID NO: 3413781 - DNA, 25 bp, Homo sapien
cttatggtaaggattggtagtctct

SEQ ID NO: 3413782 - DNA, 25 bp, Homo sapien
ttggctatgatgtatccactgctga

SEQ ID NO: 3413783 - DNA, 25 bp, Homo sapien
tatacatgctttaaggaggcgagga

SEQ ID NO: 3413784 - DNA, 25 bp, Homo sapien
cacctacgtggagctctatacatgc

SEQ ID NO: 3413785 - DNA, 25 bp, Homo sapien
ggcgaggaaagctctgagcaatgct

SEQ ID NO: 3413786 - DNA, 25 bp, Homo sapien
gctattttgaggaaccttgagcttg

SEQ ID NO: 3413787 - DNA, 25 bp, Homo sapien
tgtgtcctgggagaacggccccctg

SEQ ID NO: 3413788 - DNA, 25 bp, Homo sapien
ttcctcagtcagaataatgtcatga

SEQ ID NO: 3413789 - DNA, 25 bp, Homo sapien
gaatcatttatcttccaaggtccag

SEQ ID NO: 3413790 - DNA, 25 bp, Homo sapien
tctgacttgtcccatgaggaatcat

SEQ ID NO: 3413791 - DNA, 25 bp, Homo sapien
ctgtctgctcatgacccctgctctt

SEQ ID NO: 3413792 - DNA, 25 bp, Homo sapien
tgtctgctcatgacccctgctcttt

SEQ ID NO: 3413793 - DNA, 25 bp, Homo sapien
gctggaggaagctatcacccaattc

SEQ ID NO: 3413794 - DNA, 25 bp, Homo sapien
gaggaagctatcacccaattcaggg

SEQ ID NO: 3413795 - DNA, 25 bp, Homo sapien
tatcacccaattcagggtcagcagc

SEQ ID NO: 3413796 - DNA, 25 bp, Homo sapien
gaagctatcacccaattcagggtca

SEQ ID NO: 3413797 - DNA, 25 bp, Homo sapien
tgtcagttcggacagaagagagagt

SEQ ID NO: 3413798 - DNA, 25 bp, Homo sapien
gaggtggactttgtcagttcggaca

SEQ ID NO: 3413799 - DNA, 25 bp, Homo sapien
gactttgtcagttcggacagaagag

SEQ ID NO: 3413800 - DNA, 25 bp, Homo sapien
ggtggactttgtcagttcggacaga

SEQ ID NO: 3413801 - DNA, 25 bp, Homo sapien
ttaggaaggtgcaaataggatttac

SEQ ID NO: 3413802 - DNA, 25 bp, Homo sapien
agttaggaaggtgcaaataggattt

SEQ ID NO: 3413803 - DNA, 25 bp, Homo sapien
caagttaggaaggtgcaaataggat

SEQ ID NO: 3413804 - DNA, 25 bp, Homo sapien
gcaagttaggaaggtgcaaatagga

SEQ ID NO: 3413805 - DNA, 25 bp, Homo sapien
tgtgtaagataaagctgccccatgc

SEQ ID NO: 3413806 - DNA, 25 bp, Homo sapien
tcaactttaacagaggagggaggtc

SEQ ID NO: 3413807 - DNA, 25 bp, Homo sapien
tgagtagcagacgtccatgaaagcg

SEQ ID NO: 3413808 - DNA, 25 bp, Homo sapien
tgtccgcaccaaggcactgatgaga

SEQ ID NO: 3413809 - DNA, 25 bp, Homo sapien
caacttggctctattgagaattttt

SEQ ID NO: 3413810 - DNA, 25 bp, Homo sapien
aacttggctctattgagaatttttc

SEQ ID NO: 3413811 - DNA, 25 bp, Homo sapien
cttggctctattgagaatttttctc

SEQ ID NO: 3413812 - DNA, 25 bp, Homo sapien
gacaacttggctctattgagaattt

SEQ ID NO: 3413813 - DNA, 25 bp, Homo sapien
catcttgtaccaagtagtgtggtcc

SEQ ID NO: 3413814 - DNA, 25 bp, Homo sapien
ttgtaccaagtagtgtggtccccag

SEQ ID NO: 3413815 - DNA, 25 bp, Homo sapien
tcttgtaccaagtagtgtggtcccc

SEQ ID NO: 3413816 - DNA, 25 bp, Homo sapien
ccccatcttgtaccaagtagtgtgg

SEQ ID NO: 3413817 - DNA, 25 bp, Homo sapien
actacggtgtaattcctttcagcca

SEQ ID NO: 3413818 - DNA, 25 bp, Homo sapien
tgaggaagagaggaaccctccactg

SEQ ID NO: 3413819 - DNA, 25 bp, Homo sapien
gtggcaagatagaaactcaaaaata

SEQ ID NO: 3413820 - DNA, 25 bp, Homo sapien
gcagtaaggaagaactccgtcacta

SEQ ID NO: 3413821 - DNA, 25 bp, Homo sapien
gatggcggacgagtagcagatgtcc

SEQ ID NO: 3413822 - DNA, 25 bp, Homo sapien
ctgagggatgatggcggacgagtag

SEQ ID NO: 3413823 - DNA, 25 bp, Homo sapien
cggatcaggaggatcatgcctgtgt

SEQ ID NO: 3413824 - DNA, 25 bp, Homo sapien
tgtggagccgacgatcgccacggat

SEQ ID NO: 3413825 - DNA, 25 bp, Homo sapien
tgagggtgccaaagaaaagagcgac

SEQ ID NO: 3413826 - DNA, 25 bp, Homo sapien
caagatcaccaagatacaggcaggc

SEQ ID NO: 3413827 - DNA, 25 bp, Homo sapien
ccatgatggccagaaggtagcagtc

SEQ ID NO: 3413828 - DNA, 25 bp, Homo sapien
tgaccgttcgaacaaaggcactgaa

SEQ ID NO: 3413829 - DNA, 25 bp, Homo sapien
gggtcttctagcaggctttgatttg

SEQ ID NO: 3413830 - DNA, 25 bp, Homo sapien
tagggtcttctagcaggctttgatt

SEQ ID NO: 3413831 - DNA, 25 bp, Homo sapien
ggtcttctagcaggctttgatttgc

SEQ ID NO: 3413832 - DNA, 25 bp, Homo sapien
ttagggtcttctagcaggctttgat

SEQ ID NO: 3413833 - DNA, 25 bp, Homo sapien
atttctgccgatctgaagaaaggaa

SEQ ID NO: 3413834 - DNA, 25 bp, Homo sapien
agaaaggaactaaaagtcttcatat

SEQ ID NO: 3413835 - DNA, 25 bp, Homo sapien
agtcttcatattcctacaagaaaac

SEQ ID NO: 3413836 - DNA, 25 bp, Homo sapien
tttctgccgatctgaagaaaggaac

SEQ ID NO: 3413837 - DNA, 25 bp, Homo sapien
ggtatgaaggtacgtatccaagctg

SEQ ID NO: 3413838 - DNA, 25 bp, Homo sapien
tgctcatcctgcttgaaaaatccca

SEQ ID NO: 3413839 - DNA, 25 bp, Homo sapien
acctgggccgcatgagaattgtata

SEQ ID NO: 3413840 - DNA, 25 bp, Homo sapien
aacctgggccgcatgagaattgtat

SEQ ID NO: 3413841 - DNA, 25 bp, Homo sapien
ttttctattgatgagctttctcagg

SEQ ID NO: 3413842 - DNA, 25 bp, Homo sapien
tttttctattgatgagctttctcag

SEQ ID NO: 3413843 - DNA, 25 bp, Homo sapien
tcacttcctgttagactgtctgtct

SEQ ID NO: 3413844 - DNA, 25 bp, Homo sapien
tgacagcttcactgcggacattatc

SEQ ID NO: 3413845 - DNA, 25 bp, Homo sapien
gtctgtctgcgaggatgacagcttc

SEQ ID NO: 3413846 - DNA, 25 bp, Homo sapien
cataggtaagagcatccttggctcc

SEQ ID NO: 3413847 - DNA, 25 bp, Homo sapien
gaagatgtgattcttctcctgaata

SEQ ID NO: 3413848 - DNA, 25 bp, Homo sapien
catccttaacccaaatttcgaagat

SEQ ID NO: 3413849 - DNA, 25 bp, Homo sapien
ctcctgaatatcagcatacaaagga

SEQ ID NO: 3413850 - DNA, 25 bp, Homo sapien
cctgaatatcagcatacaaaggaaa

SEQ ID NO: 3413851 - DNA, 25 bp, Homo sapien
aaatttgtgccctgggggtttgctg

SEQ ID NO: 3413852 - DNA, 25 bp, Homo sapien
ccaatagacccacgtgtgtttttct

SEQ ID NO: 3413853 - DNA, 25 bp, Homo sapien
cctgtctccaatagacccacgtgtg

SEQ ID NO: 3413854 - DNA, 25 bp, Homo sapien
atcacacaggcattaaacctagtac

SEQ ID NO: 3413855 - DNA, 25 bp, Homo sapien
tagtgtattcctgcagacgttctgg

SEQ ID NO: 3413856 - DNA, 25 bp, Homo sapien
tatgacacagattgcaaagacctcc

SEQ ID NO: 3413857 - DNA, 25 bp, Homo sapien
gaaggtctagtgctcaacgctgttg

SEQ ID NO: 3413858 - DNA, 25 bp, Homo sapien
tatccaagccaaggtatcagagcct

SEQ ID NO: 3413859 - DNA, 25 bp, Homo sapien
tattgtcttccccatggtgaaccat

SEQ ID NO: 3413860 - DNA, 25 bp, Homo sapien
tcatgcatatacagcccagctccag

SEQ ID NO: 3413861 - DNA, 25 bp, Homo sapien
cattgacacagacaaaattgcagct

SEQ ID NO: 3413862 - DNA, 25 bp, Homo sapien
tgcagttgccatcttctatgggact

SEQ ID NO: 3413863 - DNA, 25 bp, Homo sapien
ccattccatggacacagatgaaatg

SEQ ID NO: 3413864 - DNA, 25 bp, Homo sapien
tggacacagatgaaatggcatcctt

SEQ ID NO: 3413865 - DNA, 25 bp, Homo sapien
ttccatggacacagatgaaatggca

SEQ ID NO: 3413866 - DNA, 25 bp, Homo sapien
gatgaaatggcatccttgttctatg

SEQ ID NO: 3413867 - DNA, 25 bp, Homo sapien
cgcattggggacatattcagtctct

SEQ ID NO: 3413868 - DNA, 25 bp, Homo sapien
taaatgcctccctccgcattgggga

SEQ ID NO: 3413869 - DNA, 25 bp, Homo sapien
tccaccagtcatggctgtgtcttgc

SEQ ID NO: 3413870 - DNA, 25 bp, Homo sapien
tgtaagtccaatcttgtccatcacc

SEQ ID NO: 3413871 - DNA, 25 bp, Homo sapien
tggtctttccttctttcctttcatc

SEQ ID NO: 3413872 - DNA, 25 bp, Homo sapien
catcgtgtatatgcatcacattttt

SEQ ID NO: 3413873 - DNA, 25 bp, Homo sapien
gaaaccaaggtatcagtctccagaa

SEQ ID NO: 3413874 - DNA, 25 bp, Homo sapien
tgatctctcccttcgcagtcaggtt

SEQ ID NO: 3413875 - DNA, 25 bp, Homo sapien
gattcatgcctggaacagagttggg

SEQ ID NO: 3413876 - DNA, 25 bp, Homo sapien
tgacaaattaccacatgcttaggga

SEQ ID NO: 3413877 - DNA, 25 bp, Homo sapien
catctttcatatgcttgttcactgt

SEQ ID NO: 3413878 - DNA, 25 bp, Homo sapien
taagattgctatttgtgttgctaag

SEQ ID NO: 3413879 - DNA, 25 bp, Homo sapien
tgttgctaagaacatcagagataag

SEQ ID NO: 3413880 - DNA, 25 bp, Homo sapien
cagtggctagtgtgcacaaaattca

SEQ ID NO: 3413881 - DNA, 25 bp, Homo sapien
ggctgcagagtctgcagacactcag

SEQ ID NO: 3413882 - DNA, 25 bp, Homo sapien
gcagagtctgcagacactcagaaaa

SEQ ID NO: 3413883 - DNA, 25 bp, Homo sapien
ctgcagagtctgcagacactcagaa

SEQ ID NO: 3413884 - DNA, 25 bp, Homo sapien
ggggctgcagagtctgcagacactc

SEQ ID NO: 3413885 - DNA, 25 bp, Homo sapien
agctgcatgtactctgaggccaaag

SEQ ID NO: 3413886 - DNA, 25 bp, Homo sapien
aggcactttgagtaggagcagcagt

SEQ ID NO: 3413887 - DNA, 25 bp, Homo sapien
tccttgtactcaagctgcatgtact

SEQ ID NO: 3413888 - DNA, 25 bp, Homo sapien
catgtactctgaggccaaagaaagc

SEQ ID NO: 3413889 - DNA, 25 bp, Homo sapien
gattacggacaattgcataaacttc

SEQ ID NO: 3413890 - DNA, 25 bp, Homo sapien
gatatagtcagcgtatagtgcctaa

SEQ ID NO: 3413891 - DNA, 25 bp, Homo sapien
ggttcatagaccatggattacggac

SEQ ID NO: 3413892 - DNA, 25 bp, Homo sapien
gcaccctgttgagagccatccatct

SEQ ID NO: 3413893 - DNA, 25 bp, Homo sapien
ggacaactttgagtactgacatcat

SEQ ID NO: 3413894 - DNA, 25 bp, Homo sapien
actgtcttacaatcactgctgtgga

SEQ ID NO: 3413895 - DNA, 25 bp, Homo sapien
tggaatcatgataccacttttagct

SEQ ID NO: 3413896 - DNA, 25 bp, Homo sapien
tgcatcttccttcagtgtatttttg

SEQ ID NO: 3413897 - DNA, 25 bp, Homo sapien
ccttctttgaactggatggacgtcc

SEQ ID NO: 3413898 - DNA, 25 bp, Homo sapien
cagggagcagaatgacaagacctat

SEQ ID NO: 3413899 - DNA, 25 bp, Homo sapien
gggtacaagttccatcctgagcact

SEQ ID NO: 3413900 - DNA, 25 bp, Homo sapien
cacagttgtcgaagggcattttcag

SEQ ID NO: 3413901 - DNA, 25 bp, Homo sapien
aaccatacatatactcaggagtgga

SEQ ID NO: 3413902 - DNA, 25 bp, Homo sapien
caatagttgaaaccatacatatact

SEQ ID NO: 3413903 - DNA, 25 bp, Homo sapien
tgaaaccatacatatactcaggagt

SEQ ID NO: 3413904 - DNA, 25 bp, Homo sapien
acaacaatagttgaaaccatacata

SEQ ID NO: 3413905 - DNA, 25 bp, Homo sapien
ggttcattaacaatatccagtggag

SEQ ID NO: 3413906 - DNA, 25 bp, Homo sapien
catcaagaggtgtataatgactggt

SEQ ID NO: 3413907 - DNA, 25 bp, Homo sapien
cagaggtagccccttcaatttggtt

SEQ ID NO: 3413908 - DNA, 25 bp, Homo sapien
aatttaagcagtgtcatcccgatcc

SEQ ID NO: 3413909 - DNA, 25 bp, Homo sapien
gacaggagactggaacttctaactt

SEQ ID NO: 3413910 - DNA, 25 bp, Homo sapien
catgctcaaggtaacccagagaata

SEQ ID NO: 3413911 - DNA, 25 bp, Homo sapien
gttctgcattcatgcgcttaagcaa

SEQ ID NO: 3413912 - DNA, 25 bp, Homo sapien
tagggatcagatagcccagattcaa

SEQ ID NO: 3413913 - DNA, 25 bp, Homo sapien
atgcccggcctatttgtccttcttt

SEQ ID NO: 3413914 - DNA, 25 bp, Homo sapien
cttgttgggacaccaaggagccggc

SEQ ID NO: 3413915 - DNA, 25 bp, Homo sapien
cagcgactaaatctggttccatggg

SEQ ID NO: 3413916 - DNA, 25 bp, Homo sapien
tgtgagctcctagaggtcagcgact

SEQ ID NO: 3413917 - DNA, 25 bp, Homo sapien
tagcacaaggcccactactcagttg

SEQ ID NO: 3413918 - DNA, 25 bp, Homo sapien
gggttaggtcgcgacgcgtgccgta

SEQ ID NO: 3413919 - DNA, 25 bp, Homo sapien
gcagtgtttccgggttaggtcgcga

SEQ ID NO: 3413920 - DNA, 25 bp, Homo sapien
ttccgggttaggtcgcgacgcgtgc

SEQ ID NO: 3413921 - DNA, 25 bp, Homo sapien
gttaggtcgcgacgcgtgccgtaca

SEQ ID NO: 3413922 - DNA, 25 bp, Homo sapien
tctcaccctgcgctcctctttcccc

SEQ ID NO: 3413923 - DNA, 25 bp, Homo sapien
cgaagcctgcggctcactctcaccc

SEQ ID NO: 3413924 - DNA, 25 bp, Homo sapien
cctcccgaagcctgcggctcactct

SEQ ID NO: 3413925 - DNA, 25 bp, Homo sapien
caccccctagtcctaggcggcggag

SEQ ID NO: 3413926 - DNA, 25 bp, Homo sapien
cgaccgcctcagggggccgttgttg

SEQ ID NO: 3413927 - DNA, 25 bp, Homo sapien
ccgcgaccgcctcagggggccgttg

SEQ ID NO: 3413928 - DNA, 25 bp, Homo sapien
cgcgaccgcctcagggggccgttgt

SEQ ID NO: 3413929 - DNA, 25 bp, Homo sapien
ctcagcacgcggctgctagtggtcc

SEQ ID NO: 3413930 - DNA, 25 bp, Homo sapien
ccctcagcacgcggctgctagtggt

SEQ ID NO: 3413931 - DNA, 25 bp, Homo sapien
ctcccctcagcacgcggctgctagt

SEQ ID NO: 3413932 - DNA, 25 bp, Homo sapien
tcccctcagcacgcggctgctagtg

SEQ ID NO: 3413933 - DNA, 25 bp, Homo sapien
gggacgtcgggaggcctggcgctgg

SEQ ID NO: 3413934 - DNA, 25 bp, Homo sapien
cctgaactggagacggggacttcgc

SEQ ID NO: 3413935 - DNA, 25 bp, Homo sapien
aggagtcgcggactcttcttgccct

SEQ ID NO: 3413936 - DNA, 25 bp, Homo sapien
gatactcggccttcctccggcggga

SEQ ID NO: 3413937 - DNA, 25 bp, Homo sapien
agagaggaggcacgaaggctcccgg

SEQ ID NO: 3413938 - DNA, 25 bp, Homo sapien
tacaggagcgagatgagggtggcgc

SEQ ID NO: 3413939 - DNA, 25 bp, Homo sapien
aacggcccgacaagcgaaggtacag

SEQ ID NO: 3413940 - DNA, 25 bp, Homo sapien
aacggtgtgacatctggcgtgcgga

SEQ ID NO: 3413941 - DNA, 25 bp, Homo sapien
tgtgatgtaatactggagagccgcc

SEQ ID NO: 3413942 - DNA, 25 bp, Homo sapien
gagagccgcctaaaggaaagggata

SEQ ID NO: 3413943 - DNA, 25 bp, Homo sapien
taatactggagagccgcctaaagga

SEQ ID NO: 3413944 - DNA, 25 bp, Homo sapien
tgatgtaatactggagagccgccta

SEQ ID NO: 3413945 - DNA, 25 bp, Homo sapien
taccacctagttcagcatagtacca

SEQ ID NO: 3413946 - DNA, 25 bp, Homo sapien
aagatgagggccatgtctcattttt

SEQ ID NO: 3413947 - DNA, 25 bp, Homo sapien
tagttcagcatagtaccaggcccag

SEQ ID NO: 3413948 - DNA, 25 bp, Homo sapien
gtaccaggcccagatactgatgaaa

SEQ ID NO: 3413949 - DNA, 25 bp, Homo sapien
atctccactaattaatgcatctttg

SEQ ID NO: 3413950 - DNA, 25 bp, Homo sapien
tctccactaattaatgcatctttgc

SEQ ID NO: 3413951 - DNA, 25 bp, Homo sapien
tccactaattaatgcatctttgcct

SEQ ID NO: 3413952 - DNA, 25 bp, Homo sapien
ctccactaattaatgcatctttgcc

SEQ ID NO: 3413953 - DNA, 25 bp, Homo sapien
catgtggctacataactgacagcac

SEQ ID NO: 3413954 - DNA, 25 bp, Homo sapien
ggcaaaatctcagctaggtgatcaa

SEQ ID NO: 3413955 - DNA, 25 bp, Homo sapien
tacttctgccaaaacagggaggatg

SEQ ID NO: 3413956 - DNA, 25 bp, Homo sapien
gaggatggacatagcaagcatggca

SEQ ID NO: 3413957 - DNA, 25 bp, Homo sapien
tacccaacatggaacaagatgtctg

SEQ ID NO: 3413958 - DNA, 25 bp, Homo sapien
caaaggaggtttggatgtctgaact

SEQ ID NO: 3413959 - DNA, 25 bp, Homo sapien
tctgaactagcaatacggattaaag

SEQ ID NO: 3413960 - DNA, 25 bp, Homo sapien
gattaaaggatctgggccataccca

SEQ ID NO: 3413961 - DNA, 25 bp, Homo sapien
tgcaagggatctacactagtcacag

SEQ ID NO: 3413962 - DNA, 25 bp, Homo sapien
aaatctatacatctgtggtcaactg

SEQ ID NO: 3413963 - DNA, 25 bp, Homo sapien
ggtggctaagaccattcagtaggtg

SEQ ID NO: 3413964 - DNA, 25 bp, Homo sapien
caatacaatgtattaccggcataaa

SEQ ID NO: 3413965 - DNA, 25 bp, Homo sapien
cagagctcacatcatacgcagtggt

SEQ ID NO: 3413966 - DNA, 25 bp, Homo sapien
aagacaaagctctcctgctaaggtc

SEQ ID NO: 3413967 - DNA, 25 bp, Homo sapien
tgagggtggttcgatatacaaaaac

SEQ ID NO: 3413968 - DNA, 25 bp, Homo sapien
gacaaggatgccctcattcttcact

SEQ ID NO: 3413969 - DNA, 25 bp, Homo sapien
aaatcacatgcctgaatcaataacc

SEQ ID NO: 3413970 - DNA, 25 bp, Homo sapien
cacactgttaaaccaatggatcaaa

SEQ ID NO: 3413971 - DNA, 25 bp, Homo sapien
tcaataacctaacatcatacccata

SEQ ID NO: 3413972 - DNA, 25 bp, Homo sapien
catcatacccataagagctaggaaa

SEQ ID NO: 3413973 - DNA, 25 bp, Homo sapien
tcacgatggcgagaaacagatgtcc

SEQ ID NO: 3413974 - DNA, 25 bp, Homo sapien
cagccccggctaggtctagatgcag

SEQ ID NO: 3413975 - DNA, 25 bp, Homo sapien
tagatgcagcaatggaaacttcctg

SEQ ID NO: 3413976 - DNA, 25 bp, Homo sapien
tgagctgcaatgaaccggtcttgga

SEQ ID NO: 3413977 - DNA, 25 bp, Homo sapien
ggagactgatgctcttctccaacat

SEQ ID NO: 3413978 - DNA, 25 bp, Homo sapien
ctaatgccacctggagactgatgct

SEQ ID NO: 3413979 - DNA, 25 bp, Homo sapien
atgccacctggagactgatgctctt

SEQ ID NO: 3413980 - DNA, 25 bp, Homo sapien
tggagactgatgctcttctccaaca

SEQ ID NO: 3413981 - DNA, 25 bp, Homo sapien
agaaatgagacattctggttgtagc

SEQ ID NO: 3413982 - DNA, 25 bp, Homo sapien
tgagacattctggttgtagcgaaca

SEQ ID NO: 3413983 - DNA, 25 bp, Homo sapien
gagacattctggttgtagcgaacat

SEQ ID NO: 3413984 - DNA, 25 bp, Homo sapien
aatgagacattctggttgtagcgaa

SEQ ID NO: 3413985 - DNA, 25 bp, Homo sapien
ctaagtggggtttgtaggtctcatc

SEQ ID NO: 3413986 - DNA, 25 bp, Homo sapien
ttcactgattaacatctcttcttcc

SEQ ID NO: 3413987 - DNA, 25 bp, Homo sapien
tcctcttcactgattaacatctctt

SEQ ID NO: 3413988 - DNA, 25 bp, Homo sapien
tgtaggtctcatctcttggatcatc

SEQ ID NO: 3413989 - DNA, 25 bp, Homo sapien
tgtctgcagtaaaatctgagacatg

SEQ ID NO: 3413990 - DNA, 25 bp, Homo sapien
atgtctgcagtaaaatctgagacat

SEQ ID NO: 3413991 - DNA, 25 bp, Homo sapien
gtctgcagtaaaatctgagacatgc

SEQ ID NO: 3413992 - DNA, 25 bp, Homo sapien
aaacatgcagactcataaaaacttg

SEQ ID NO: 3413993 - DNA, 25 bp, Homo sapien
ttctatacccattagcttggcaaca

SEQ ID NO: 3413994 - DNA, 25 bp, Homo sapien
gaaagaggattattatcagggtata

SEQ ID NO: 3413995 - DNA, 25 bp, Homo sapien
tcagggtatattaaggtgttagact

SEQ ID NO: 3413996 - DNA, 25 bp, Homo sapien
cctccccagactaaagatgcctgta

SEQ ID NO: 3413997 - DNA, 25 bp, Homo sapien
tatatgttgctcatggaatgaaccc

SEQ ID NO: 3413998 - DNA, 25 bp, Homo sapien
tcctcacatgcatagtaatgatcca

SEQ ID NO: 3413999 - DNA, 25 bp, Homo sapien
caaattaaagcttagagttatcact

SEQ ID NO: 3414000 - DNA, 25 bp, Homo sapien
tttcacctccacctctacttccact

SEQ ID NO: 3414001 - DNA, 25 bp, Homo sapien
caagtggcaaaggataaccaagaat

SEQ ID NO: 3414002 - DNA, 25 bp, Homo sapien
tatctggcaaatcaagcaagtaatt

SEQ ID NO: 3414003 - DNA, 25 bp, Homo sapien
acaagtggcaaaggataaccaagaa

SEQ ID NO: 3414004 - DNA, 25 bp, Homo sapien
caaagatatatctggcaaatcaagc

SEQ ID NO: 3414005 - DNA, 25 bp, Homo sapien
tctgaatcaaaactacacagtgaag

SEQ ID NO: 3414006 - DNA, 25 bp, Homo sapien
aacagtagacatattctgaatcaaa

SEQ ID NO: 3414007 - DNA, 25 bp, Homo sapien
aatcaaaactacacagtgaaggctg

SEQ ID NO: 3414008 - DNA, 25 bp, Homo sapien
aagacagggtaacagtagacatatt

SEQ ID NO: 3414009 - DNA, 25 bp, Homo sapien
tgggtaaacgtggacttttgtcatc

SEQ ID NO: 3414010 - DNA, 25 bp, Homo sapien
ggacttttgtcatcttttcgtcttc

SEQ ID NO: 3414011 - DNA, 25 bp, Homo sapien
gtggacttttgtcatcttttcgtct

SEQ ID NO: 3414012 - DNA, 25 bp, Homo sapien
acgtggacttttgtcatcttttcgt

SEQ ID NO: 3414013 - DNA, 25 bp, Homo sapien
tattagaagtaaccaagaattagca

SEQ ID NO: 3414014 - DNA, 25 bp, Homo sapien
gaaaataagatcataacacctgtgc

SEQ ID NO: 3414015 - DNA, 25 bp, Homo sapien
cagtggcctctgacttaaactgtgc

SEQ ID NO: 3414016 - DNA, 25 bp, Homo sapien
cacctgtgcatctaggacattagtg

SEQ ID NO: 3414017 - DNA, 25 bp, Homo sapien
gacatactggattggaggctttttt

SEQ ID NO: 3414018 - DNA, 25 bp, Homo sapien
atccttccatctcacaacggacata

SEQ ID NO: 3414019 - DNA, 25 bp, Homo sapien
caacggacatactggattggaggct

SEQ ID NO: 3414020 - DNA, 25 bp, Homo sapien
tctcacaacggacatactggattgg

SEQ ID NO: 3414021 - DNA, 25 bp, Homo sapien
tgatgtttggcatgtcgcagaagtt

SEQ ID NO: 3414022 - DNA, 25 bp, Homo sapien
ctgaagagtcgtccacaggagggat

SEQ ID NO: 3414023 - DNA, 25 bp, Homo sapien
tcagcaaatgctggtatttaatgtg

SEQ ID NO: 3414024 - DNA, 25 bp, Homo sapien
gaagttgcttctgaagcctgaagag

SEQ ID NO: 3414025 - DNA, 25 bp, Homo sapien
tataatacatattgcagacactcag

SEQ ID NO: 3414026 - DNA, 25 bp, Homo sapien
gattaagattcaagttcaatcctgg

SEQ ID NO: 3414027 - DNA, 25 bp, Homo sapien
aattgcagtacctatcaagaaacag

SEQ ID NO: 3414028 - DNA, 25 bp, Homo sapien
tactcagtggtatgcacccaatttg

SEQ ID NO: 3414029 - DNA, 25 bp, Homo sapien
tgggaagcccgtgcacaaagagatg

SEQ ID NO: 3414030 - DNA, 25 bp, Homo sapien
tagcaaggtctaaaaacgcacagtt

SEQ ID NO: 3414031 - DNA, 25 bp, Homo sapien
taacacggtgtggaatctatgagga

SEQ ID NO: 3414032 - DNA, 25 bp, Homo sapien
gaaactcttagcatctcccaggtca

SEQ ID NO: 3414033 - DNA, 25 bp, Homo sapien
ccggtgcactgccagattgtgggaa

SEQ ID NO: 3414034 - DNA, 25 bp, Homo sapien
tcttgaaggcccgagcacaatattc

SEQ ID NO: 3414035 - DNA, 25 bp, Homo sapien
ccagtgtgaatcatccggtgcactg

SEQ ID NO: 3414036 - DNA, 25 bp, Homo sapien
aatattcacagatataatccctttg

SEQ ID NO: 3414037 - DNA, 25 bp, Homo sapien
ggattgggaaatgttactagatgga

SEQ ID NO: 3414038 - DNA, 25 bp, Homo sapien
tgggaaatgttactagatggaaaac

SEQ ID NO: 3414039 - DNA, 25 bp, Homo sapien
tgttactagatggaaaactaatctg

SEQ ID NO: 3414040 - DNA, 25 bp, Homo sapien
tagatggaaaactaatctgatcttc

SEQ ID NO: 3414041 - DNA, 25 bp, Homo sapien
ctaaggagaggagaaaaggaaatgg

SEQ ID NO: 3414042 - DNA, 25 bp, Homo sapien
taagagatgccttttgtcgacaagt

SEQ ID NO: 3414043 - DNA, 25 bp, Homo sapien
tctccagaggttgagtttcccaagg

SEQ ID NO: 3414044 - DNA, 25 bp, Homo sapien
catctgaaggctgcgtcagggactc

SEQ ID NO: 3414045 - DNA, 25 bp, Homo sapien
tctaacagtaggcactctccagagg

SEQ ID NO: 3414046 - DNA, 25 bp, Homo sapien
ctctgtggtagcaccgagtatatct

SEQ ID NO: 3414047 - DNA, 25 bp, Homo sapien
gagtatatctgagttcataaccagc

SEQ ID NO: 3414048 - DNA, 25 bp, Homo sapien
ctaaggtccggcagagtctgaatct

SEQ ID NO: 3414049 - DNA, 25 bp, Homo sapien
tccggcagagtctgaatcttcaatc

SEQ ID NO: 3414050 - DNA, 25 bp, Homo sapien
gctgtgatccacaatggaaagagca

SEQ ID NO: 3414051 - DNA, 25 bp, Homo sapien
tgtcccatgccccaagtcttcctgt

SEQ ID NO: 3414052 - DNA, 25 bp, Homo sapien
ccttcagttatttcactagatttta

SEQ ID NO: 3414053 - DNA, 25 bp, Homo sapien
atcaattttataaggggagcaacag

SEQ ID NO: 3414054 - DNA, 25 bp, Homo sapien
ctgctgctgcttcttttttgtctac

SEQ ID NO: 3414055 - DNA, 25 bp, Homo sapien
atggctggaaccgagtatgagaata

SEQ ID NO: 3414056 - DNA, 25 bp, Homo sapien
ggaaagggggatctgccgatgagca

SEQ ID NO: 3414057 - DNA, 25 bp, Homo sapien
gcacatcagagttacaggttggaaa

SEQ ID NO: 3414058 - DNA, 25 bp, Homo sapien
accgagtatgagaataaccctcact

SEQ ID NO: 3414059 - DNA, 25 bp, Homo sapien
atttgaagataagtgtgccgcaggg

SEQ ID NO: 3414060 - DNA, 25 bp, Homo sapien
taggagccagaaccatagggcagca

SEQ ID NO: 3414061 - DNA, 25 bp, Homo sapien
gcaagtgagcaccattgagagccat

SEQ ID NO: 3414062 - DNA, 25 bp, Homo sapien
taaagtgccaagtcaagctgccagc

SEQ ID NO: 3414063 - DNA, 25 bp, Homo sapien
gaaacaatagcgcatttgagactgg

SEQ ID NO: 3414064 - DNA, 25 bp, Homo sapien
ttcgattctagcttctgaggcacac

SEQ ID NO: 3414065 - DNA, 25 bp, Homo sapien
gcttctggcggtatgaccttgtaca

SEQ ID NO: 3414066 - DNA, 25 bp, Homo sapien
tatcccaaggaaattgtgatgccca

SEQ ID NO: 3414067 - DNA, 25 bp, Homo sapien
ccattttctatccccatattatgga

SEQ ID NO: 3414068 - DNA, 25 bp, Homo sapien
ttctatccccatattatggagaaat

SEQ ID NO: 3414069 - DNA, 25 bp, Homo sapien
ttttctatccccatattatggagaa

SEQ ID NO: 3414070 - DNA, 25 bp, Homo sapien
attttctatccccatattatggaga

SEQ ID NO: 3414071 - DNA, 25 bp, Homo sapien
gattaaaagagctccctggaaggac

SEQ ID NO: 3414072 - DNA, 25 bp, Homo sapien
tccaaaccatgttggcaggaaagca

SEQ ID NO: 3414073 - DNA, 25 bp, Homo sapien
tcagttacgcaaaacaaccttgggc

SEQ ID NO: 3414074 - DNA, 25 bp, Homo sapien
caaatggtagctataaagagggtcc

SEQ ID NO: 3414075 - DNA, 25 bp, Homo sapien
tgtctctcccatgaaaggagaaggg

SEQ ID NO: 3414076 - DNA, 25 bp, Homo sapien
ctgtctctcccatgaaaggagaagg

SEQ ID NO: 3414077 - DNA, 25 bp, Homo sapien
gtctctcccatgaaaggagaagggt

SEQ ID NO: 3414078 - DNA, 25 bp, Homo sapien
tctctcccatgaaaggagaagggtc

SEQ ID NO: 3414079 - DNA, 25 bp, Homo sapien
acataaccttttcaacctatattca

SEQ ID NO: 3414080 - DNA, 25 bp, Homo sapien
agcaaagtatcccttttattataat

SEQ ID NO: 3414081 - DNA, 25 bp, Homo sapien
cataaccttttcaacctatattcag

SEQ ID NO: 3414082 - DNA, 25 bp, Homo sapien
ataaccttttcaacctatattcagg

SEQ ID NO: 3414083 - DNA, 25 bp, Homo sapien
tttaatatgccttacctagaataag

SEQ ID NO: 3414084 - DNA, 25 bp, Homo sapien
taatatgccttacctagaataagag

SEQ ID NO: 3414085 - DNA, 25 bp, Homo sapien
tgccttacctagaataagagaaaac

SEQ ID NO: 3414086 - DNA, 25 bp, Homo sapien
tatgccttacctagaataagagaaa

SEQ ID NO: 3414087 - DNA, 25 bp, Homo sapien
caatcacggtgccttcctggtagct

SEQ ID NO: 3414088 - DNA, 25 bp, Homo sapien
cagcatcacatgtttcacccctagg

SEQ ID NO: 3414089 - DNA, 25 bp, Homo sapien
gcagctatcacagcatggcttttgg

SEQ ID NO: 3414090 - DNA, 25 bp, Homo sapien
tcctaggaggcagttgtcaaaacat

SEQ ID NO: 3414091 - DNA, 25 bp, Homo sapien
gaaacaagtcagctgggtttacttc

SEQ ID NO: 3414092 - DNA, 25 bp, Homo sapien
gactcagaggaggtagcaaattcct

SEQ ID NO: 3414093 - DNA, 25 bp, Homo sapien
taactcaactgtcccaggaaacaag

SEQ ID NO: 3414094 - DNA, 25 bp, Homo sapien
tactaatgggattgtgcaccccacc

SEQ ID NO: 3414095 - DNA, 25 bp, Homo sapien
ccttgctagccagatagagcggcta

SEQ ID NO: 3414096 - DNA, 25 bp, Homo sapien
taggattccgtaagagcagtcaggt

SEQ ID NO: 3414097 - DNA, 25 bp, Homo sapien
caggtctgaacgaatcttccttgct

SEQ ID NO: 3414098 - DNA, 25 bp, Homo sapien
atagagcggctacagaggtcccgac

SEQ ID NO: 3414099 - DNA, 25 bp, Homo sapien
gactatatgattagagctttcacaa

SEQ ID NO: 3414100 - DNA, 25 bp, Homo sapien
cacaattggtaatggagctgatgcg

SEQ ID NO: 3414101 - DNA, 25 bp, Homo sapien
aataaagtcacatgggtttcctcaa

SEQ ID NO: 3414102 - DNA, 25 bp, Homo sapien
ggaagggcccatgtcaaataaccta

SEQ ID NO: 3414103 - DNA, 25 bp, Homo sapien
tggccaacaaaacatggaaggtacg

SEQ ID NO: 3414104 - DNA, 25 bp, Homo sapien
aaggttctcttggagtcgctctgcc

SEQ ID NO: 3414105 - DNA, 25 bp, Homo sapien
tatgtatagcttgatggaagtcacc

SEQ ID NO: 3414106 - DNA, 25 bp, Homo sapien
ctatctggtatgcaaaggcagcgac

SEQ ID NO: 3414107 - DNA, 25 bp, Homo sapien
gaagaaatgaaacgaaggtcatgga

SEQ ID NO: 3414108 - DNA, 25 bp, Homo sapien
ttgttagcaatataatggctcccac

SEQ ID NO: 3414109 - DNA, 25 bp, Homo sapien
tagcaatataatggctcccacgtgc

SEQ ID NO: 3414110 - DNA, 25 bp, Homo sapien
tgagaagaaatgaaacgaaggtcat

SEQ ID NO: 3414111 - DNA, 25 bp, Homo sapien
tccagtaggaacagagtgggcctca

SEQ ID NO: 3414112 - DNA, 25 bp, Homo sapien
gaatcttaagatctccagctgccct

SEQ ID NO: 3414113 - DNA, 25 bp, Homo sapien
cctgaagtggaaggacgttgtccct

SEQ ID NO: 3414114 - DNA, 25 bp, Homo sapien
ggtaacctggtataagccgtgccca

SEQ ID NO: 3414115 - DNA, 25 bp, Homo sapien
catacatattcctttacatgcaact

SEQ ID NO: 3414116 - DNA, 25 bp, Homo sapien
ccattcagtggttagtacttgtgcc

SEQ ID NO: 3414117 - DNA, 25 bp, Homo sapien
ttgtggaccctctgccacttcaaat

SEQ ID NO: 3414118 - DNA, 25 bp, Homo sapien
ttcaaatccgcctcttatacataca

SEQ ID NO: 3414119 - DNA, 25 bp, Homo sapien
tcctgaaagacaagtacacagcgtt

SEQ ID NO: 3414120 - DNA, 25 bp, Homo sapien
ttggtaaagacttggtgattctgtg

SEQ ID NO: 3414121 - DNA, 25 bp, Homo sapien
aagtacacagcgttttgcaaagtgc

SEQ ID NO: 3414122 - DNA, 25 bp, Homo sapien
aaagacttggtgattctgtgactta

SEQ ID NO: 3414123 - DNA, 25 bp, Homo sapien
caaaatgagttagggctagaaacta

SEQ ID NO: 3414124 - DNA, 25 bp, Homo sapien
aaaacgtaattccatagtgtcatcg

SEQ ID NO: 3414125 - DNA, 25 bp, Homo sapien
taccatatatgatttcccagagatc

SEQ ID NO: 3414126 - DNA, 25 bp, Homo sapien
tctttactataaggcacacatctag

SEQ ID NO: 3414127 - DNA, 25 bp, Homo sapien
ttaaatatacctgatgatgtctgca

SEQ ID NO: 3414128 - DNA, 25 bp, Homo sapien
taaatatacctgatgatgtctgcat

SEQ ID NO: 3414129 - DNA, 25 bp, Homo sapien
gaggctgtggccagatcattcctgg

SEQ ID NO: 3414130 - DNA, 25 bp, Homo sapien
gccaataggcacaatagggtgaagt

SEQ ID NO: 3414131 - DNA, 25 bp, Homo sapien
tccagtggccaaaggccaataggca

SEQ ID NO: 3414132 - DNA, 25 bp, Homo sapien
tctgagatacttaggagcttgctcc

SEQ ID NO: 3414133 - DNA, 25 bp, Homo sapien
gatgcttgtgctcaggtatggcaag

SEQ ID NO: 3414134 - DNA, 25 bp, Homo sapien
cagagatgcttgtgctcaggtatgg

SEQ ID NO: 3414135 - DNA, 25 bp, Homo sapien
tggcagagatgcttgtgctcaggta

SEQ ID NO: 3414136 - DNA, 25 bp, Homo sapien
gcttgtgctcaggtatggcaagcat

SEQ ID NO: 3414137 - DNA, 25 bp, Homo sapien
ttcagccctgcttctcgcagcatgt

SEQ ID NO: 3414138 - DNA, 25 bp, Homo sapien
ggttgtaggtcacagccagagtgca

SEQ ID NO: 3414139 - DNA, 25 bp, Homo sapien
agcatgtgcggaccctcagcaacca

SEQ ID NO: 3414140 - DNA, 25 bp, Homo sapien
gggttccatcaggttgtaggtcaca

SEQ ID NO: 3414141 - DNA, 25 bp, Homo sapien
tgacacgcctactaaaggagtggct

SEQ ID NO: 3414142 - DNA, 25 bp, Homo sapien
gacagtagtgggatagtgacacgcc

SEQ ID NO: 3414143 - DNA, 25 bp, Homo sapien
tctagtagataagctgtaaactggc

SEQ ID NO: 3414144 - DNA, 25 bp, Homo sapien
tggtctcacctaaaaaggcccactg

SEQ ID NO: 3414145 - DNA, 25 bp, Homo sapien
tgggtaagaacccagaggatttaca

SEQ ID NO: 3414146 - DNA, 25 bp, Homo sapien
cagaggatttacagggcccatcaac

SEQ ID NO: 3414147 - DNA, 25 bp, Homo sapien
agggcccatcaaccagaagcagcat

SEQ ID NO: 3414148 - DNA, 25 bp, Homo sapien
taagaacccagaggatttacagggc

SEQ ID NO: 3414149 - DNA, 25 bp, Homo sapien
caagtttcttgcactctggtagggt

SEQ ID NO: 3414150 - DNA, 25 bp, Homo sapien
tgtgcagtttgcagctcttcaagcc

SEQ ID NO: 3414151 - DNA, 25 bp, Homo sapien
tcaggtcctctaccaggcaactgag

SEQ ID NO: 3414152 - DNA, 25 bp, Homo sapien
cctgcacctgcagagtaattgtgaa

SEQ ID NO: 3414153 - DNA, 25 bp, Homo sapien
gactacaagcgagcaccaacacggc

SEQ ID NO: 3414154 - DNA, 25 bp, Homo sapien
caagcgagcaccaacacggccagct

SEQ ID NO: 3414155 - DNA, 25 bp, Homo sapien
tacaagcgagcaccaacacggccag

SEQ ID NO: 3414156 - DNA, 25 bp, Homo sapien
actacaagcgagcaccaacacggcc

SEQ ID NO: 3414157 - DNA, 25 bp, Homo sapien
ctctgaaacttacttcaatcaattc

SEQ ID NO: 3414158 - DNA, 25 bp, Homo sapien
agtgggtattctttttagtgtctga

SEQ ID NO: 3414159 - DNA, 25 bp, Homo sapien
acttcaatcaattcacatccctaca

SEQ ID NO: 3414160 - DNA, 25 bp, Homo sapien
tttgtgattagcatcttatagtggg

SEQ ID NO: 3414161 - DNA, 25 bp, Homo sapien
ttcatgcctgaactaaaaaggacca

SEQ ID NO: 3414162 - DNA, 25 bp, Homo sapien
caaggatgccaaaattattgctccc

SEQ ID NO: 3414163 - DNA, 25 bp, Homo sapien
aaacagtagccaacaccgtagacat

SEQ ID NO: 3414164 - DNA, 25 bp, Homo sapien
gacgtcccaaaattagcagcttata

SEQ ID NO: 3414165 - DNA, 25 bp, Homo sapien
aaaagtttgtgtcaaccctgcatca

SEQ ID NO: 3414166 - DNA, 25 bp, Homo sapien
gcaggtcaaaatccaagacagtcca

SEQ ID NO: 3414167 - DNA, 25 bp, Homo sapien
tctgactgcctcacctaatgaccgt

SEQ ID NO: 3414168 - DNA, 25 bp, Homo sapien
tctagcctcactattccctgagaca

SEQ ID NO: 3414169 - DNA, 25 bp, Homo sapien
caatggacacaagtggatcctgcat

SEQ ID NO: 3414170 - DNA, 25 bp, Homo sapien
ggacacaagtggatcctgcatgtag

SEQ ID NO: 3414171 - DNA, 25 bp, Homo sapien
tcagccactctgagagatcaatgga

SEQ ID NO: 3414172 - DNA, 25 bp, Homo sapien
acaagtggatcctgcatgtagcatc

SEQ ID NO: 3414173 - DNA, 25 bp, Homo sapien
gccagggattcgtacagggccagca

SEQ ID NO: 3414174 - DNA, 25 bp, Homo sapien
aatgctcacggccagggattcgtac

SEQ ID NO: 3414175 - DNA, 25 bp, Homo sapien
aggaatgctcacggccagggattcg

SEQ ID NO: 3414176 - DNA, 25 bp, Homo sapien
tcacggccagggattcgtacagggc

SEQ ID NO: 3414177 - DNA, 25 bp, Homo sapien
ttttggtggttggataataactatc

SEQ ID NO: 3414178 - DNA, 25 bp, Homo sapien
ctgttttggtggttggataataact

SEQ ID NO: 3414179 - DNA, 25 bp, Homo sapien
ggtggttggataataactatctgat

SEQ ID NO: 3414180 - DNA, 25 bp, Homo sapien
tggttggataataactatctgatac

SEQ ID NO: 3414181 - DNA, 25 bp, Homo sapien
tttactggtagacatctgccttggt

SEQ ID NO: 3414182 - DNA, 25 bp, Homo sapien
tttgtttctaagccactgttctaat

SEQ ID NO: 3414183 - DNA, 25 bp, Homo sapien
tactggtagacatctgccttggttt

SEQ ID NO: 3414184 - DNA, 25 bp, Homo sapien
ttttactggtagacatctgccttgg

SEQ ID NO: 3414185 - DNA, 25 bp, Homo sapien
catctgggtggcctatctcatccct

SEQ ID NO: 3414186 - DNA, 25 bp, Homo sapien
ttccataatacagaggaatgctctt

SEQ ID NO: 3414187 - DNA, 25 bp, Homo sapien
ctacttccaagcttgcttttattgc

SEQ ID NO: 3414188 - DNA, 25 bp, Homo sapien
tgagcttcaggatatcttccataat

SEQ ID NO: 3414189 - DNA, 25 bp, Homo sapien
ctgattaatgtgaattacaaaaaag

SEQ ID NO: 3414190 - DNA, 25 bp, Homo sapien
taagagacacccagcttggcatatt

SEQ ID NO: 3414191 - DNA, 25 bp, Homo sapien
cagggccccctgtggacccaggata

SEQ ID NO: 3414192 - DNA, 25 bp, Homo sapien
agcccagaataagagacacccagct

SEQ ID NO: 3414193 - DNA, 25 bp, Homo sapien
cctatgcagcgcttgatgtaaggaa

SEQ ID NO: 3414194 - DNA, 25 bp, Homo sapien
acggtgtaaggccagcgttgctttt

SEQ ID NO: 3414195 - DNA, 25 bp, Homo sapien
tcttagcgggtatttctggtgctga

SEQ ID NO: 3414196 - DNA, 25 bp, Homo sapien
cgttgcttttcgtattcttagcggg

SEQ ID NO: 3414197 - DNA, 25 bp, Homo sapien
tattcttagcgggtatttctggtgc

SEQ ID NO: 3414198 - DNA, 25 bp, Homo sapien
gacagagtgtttgccctgaaaaaga

SEQ ID NO: 3414199 - DNA, 25 bp, Homo sapien
aggacagagtgtttgccctgaaaaa

SEQ ID NO: 3414200 - DNA, 25 bp, Homo sapien
aaagaacattcccttggcagaaagc

SEQ ID NO: 3414201 - DNA, 25 bp, Homo sapien
ctgaaaaagaacattcccttggcag

SEQ ID NO: 3414202 - DNA, 25 bp, Homo sapien
cctgtgtcttaggtgccctgtattt

SEQ ID NO: 3414203 - DNA, 25 bp, Homo sapien
gagatcatggcaaatgataaataca

SEQ ID NO: 3414204 - DNA, 25 bp, Homo sapien
tccctgtgtcttaggtgccctgtat

SEQ ID NO: 3414205 - DNA, 25 bp, Homo sapien
agagagagatcatggcaaatgataa

SEQ ID NO: 3414206 - DNA, 25 bp, Homo sapien
gcacatgactggcactaatatgcat

SEQ ID NO: 3414207 - DNA, 25 bp, Homo sapien
gagagtaaatcattgcacaaggaga

SEQ ID NO: 3414208 - DNA, 25 bp, Homo sapien
tatgcatcggagagtaaatcattgc

SEQ ID NO: 3414209 - DNA, 25 bp, Homo sapien
tcttgaatcatctgaaagcagtgca

SEQ ID NO: 3414210 - DNA, 25 bp, Homo sapien
cagcactgcttaggcctgtttccca

SEQ ID NO: 3414211 - DNA, 25 bp, Homo sapien
ggccagcactgcttaggcctgtttc

SEQ ID NO: 3414212 - DNA, 25 bp, Homo sapien
ggggccagcactgcttaggcctgtt

SEQ ID NO: 3414213 - DNA, 25 bp, Homo sapien
gccagcactgcttaggcctgtttcc

SEQ ID NO: 3414214 - DNA, 25 bp, Homo sapien
caaggtgcttcggtgtgtggccatt

SEQ ID NO: 3414215 - DNA, 25 bp, Homo sapien
acccgcgtctgcgtgaggtctagag

SEQ ID NO: 3414216 - DNA, 25 bp, Homo sapien
ccttttgattgcgagtgggagcagc

SEQ ID NO: 3414217 - DNA, 25 bp, Homo sapien
gatgcctggcggtttcgcgcttttt

SEQ ID NO: 3414218 - DNA, 25 bp, Homo sapien
tcatgaagtatcagggagactactc

SEQ ID NO: 3414219 - DNA, 25 bp, Homo sapien
ttccatagtgggacaacattagccc

SEQ ID NO: 3414220 - DNA, 25 bp, Homo sapien
taacaacgtactggaacaaagctca

SEQ ID NO: 3414221 - DNA, 25 bp, Homo sapien
acattagcccttgttctggtcccac

SEQ ID NO: 3414222 - DNA, 25 bp, Homo sapien
aatggagaaacggatgcccagttcc

SEQ ID NO: 3414223 - DNA, 25 bp, Homo sapien
gacaaatggagaaacggatgcccag

SEQ ID NO: 3414224 - DNA, 25 bp, Homo sapien
ggagaaacggatgcccagttccagc

SEQ ID NO: 3414225 - DNA, 25 bp, Homo sapien
ctggtaaaaatcctgggacttgaca

SEQ ID NO: 3414226 - DNA, 25 bp, Homo sapien
gtggactgaggattcagtgccagtc

SEQ ID NO: 3414227 - DNA, 25 bp, Homo sapien
cagtgccagtcccagattgcactgt

SEQ ID NO: 3414228 - DNA, 25 bp, Homo sapien
agtcccagattgcactgtgaagcct

SEQ ID NO: 3414229 - DNA, 25 bp, Homo sapien
ggactgaggattcagtgccagtccc

SEQ ID NO: 3414230 - DNA, 25 bp, Homo sapien
atcaaagacagccttgaggagcctc

SEQ ID NO: 3414231 - DNA, 25 bp, Homo sapien
tcaggttctcctgagtcatcaaaga

SEQ ID NO: 3414232 - DNA, 25 bp, Homo sapien
catcaaagacagccttgaggagcct

SEQ ID NO: 3414233 - DNA, 25 bp, Homo sapien
aatatattgtaagaatttaaacaag

SEQ ID NO: 3414234 - DNA, 25 bp, Homo sapien
agacatgataccgaaaacaaaaacg

SEQ ID NO: 3414235 - DNA, 25 bp, Homo sapien
gcaatctgaaatcaaaaagacatga

SEQ ID NO: 3414236 - DNA, 25 bp, Homo sapien
tatctgcaatctgaaatcaaaaaga

SEQ ID NO: 3414237 - DNA, 25 bp, Homo sapien
tgtacatatctgcaatctgaaatca

SEQ ID NO: 3414238 - DNA, 25 bp, Homo sapien
cagttcccgtcttaagcaggctgaa

SEQ ID NO: 3414239 - DNA, 25 bp, Homo sapien
taaaagaagatctcttagcctgccc

SEQ ID NO: 3414240 - DNA, 25 bp, Homo sapien
tagcctgcccagtaacgcaaaattg

SEQ ID NO: 3414241 - DNA, 25 bp, Homo sapien
gatacactacagttatcagttcccg

SEQ ID NO: 3414242 - DNA, 25 bp, Homo sapien
attggtgccccatgtgaggagagct

SEQ ID NO: 3414243 - DNA, 25 bp, Homo sapien
gagagctgtgtgaggacagtcaggg

SEQ ID NO: 3414244 - DNA, 25 bp, Homo sapien
cagaaacagaccttccgcagttgga

SEQ ID NO: 3414245 - DNA, 25 bp, Homo sapien
cagttggagccccttgtaaggcaag

SEQ ID NO: 3414246 - DNA, 25 bp, Homo sapien
ctactgccctgttgtgagaagcaat

SEQ ID NO: 3414247 - DNA, 25 bp, Homo sapien
actgccctgttgtgagaagcaatac

SEQ ID NO: 3414248 - DNA, 25 bp, Homo sapien
tactgccctgttgtgagaagcaata

SEQ ID NO: 3414249 - DNA, 25 bp, Homo sapien
cattatttgcttagtccctgctaat

SEQ ID NO: 3414250 - DNA, 25 bp, Homo sapien
tatttgcttagtccctgctaatgca

SEQ ID NO: 3414251 - DNA, 25 bp, Homo sapien
ttcattatttgcttagtccctgcta

SEQ ID NO: 3414252 - DNA, 25 bp, Homo sapien
cctgctaatgcattctctaaagcca

SEQ ID NO: 3414253 - DNA, 25 bp, Homo sapien
ccagagggtacttatctctccagcc

SEQ ID NO: 3414254 - DNA, 25 bp, Homo sapien
tatctggatgccgatgtgaaattcc

SEQ ID NO: 3414255 - DNA, 25 bp, Homo sapien
tggtggccccagagggtacttatct

SEQ ID NO: 3414256 - DNA, 25 bp, Homo sapien
ggcaatcaggaccatggttggggcc

SEQ ID NO: 3414257 - DNA, 25 bp, Homo sapien
tcaacttagttgatggcaactccat

SEQ ID NO: 3414258 - DNA, 25 bp, Homo sapien
ctttctcaacttagttgatggcaac

SEQ ID NO: 3414259 - DNA, 25 bp, Homo sapien
gttgatggcaactccatttcttcac

SEQ ID NO: 3414260 - DNA, 25 bp, Homo sapien
cttagttgatggcaactccatttct

SEQ ID NO: 3414261 - DNA, 25 bp, Homo sapien
tctatgagtagttgaagtatggctg

SEQ ID NO: 3414262 - DNA, 25 bp, Homo sapien
gtctatgagtagttgaagtatggct

SEQ ID NO: 3414263 - DNA, 25 bp, Homo sapien
cagcagtctatgagtagttgaagta

SEQ ID NO: 3414264 - DNA, 25 bp, Homo sapien
tcagcagtctatgagtagttgaagt

SEQ ID NO: 3414265 - DNA, 25 bp, Homo sapien
gagattggttacaactgggcgcttg

SEQ ID NO: 3414266 - DNA, 25 bp, Homo sapien
cctcgtggtcaaaatgaatttatag

SEQ ID NO: 3414267 - DNA, 25 bp, Homo sapien
ggtgcctcgtggtcaaaatgaattt

SEQ ID NO: 3414268 - DNA, 25 bp, Homo sapien
aaacaaagagattggttacaactgg

SEQ ID NO: 3414269 - DNA, 25 bp, Homo sapien
acaatttgtgaatccggcagcctac

SEQ ID NO: 3414270 - DNA, 25 bp, Homo sapien
aaacaatttgtgaatccggcagcct

SEQ ID NO: 3414271 - DNA, 25 bp, Homo sapien
aacaatttgtgaatccggcagccta

SEQ ID NO: 3414272 - DNA, 25 bp, Homo sapien
caggtaccttccgtgttcacttcgc

SEQ ID NO: 3414273 - DNA, 25 bp, Homo sapien
tccgtgttcacttcgcgctcctggg

SEQ ID NO: 3414274 - DNA, 25 bp, Homo sapien
cgctcctggggatactagaagctcc

SEQ ID NO: 3414275 - DNA, 25 bp, Homo sapien
cctggggatactagaagctccactt

SEQ ID NO: 3414276 - DNA, 25 bp, Homo sapien
tccaggccagttaattccaagatca

SEQ ID NO: 3414277 - DNA, 25 bp, Homo sapien
tgtgaagctccaaaatgcgagaggg

SEQ ID NO: 3414278 - DNA, 25 bp, Homo sapien
gatcaaatctgttcctagacccagt

SEQ ID NO: 3414279 - DNA, 25 bp, Homo sapien
tcagagagctcaaaacaccaacgtg

SEQ ID NO: 3414280 - DNA, 25 bp, Homo sapien
tctgtaagacttggtatacagtcct

SEQ ID NO: 3414281 - DNA, 25 bp, Homo sapien
caattctgtacatgcctcatcctgt

SEQ ID NO: 3414282 - DNA, 25 bp, Homo sapien
ttggaatgttccactctaagtatct

SEQ ID NO: 3414283 - DNA, 25 bp, Homo sapien
cattgttgtttaaatgcattggcat

SEQ ID NO: 3414284 - DNA, 25 bp, Homo sapien
cagagggactaagtaaatttctcaa

SEQ ID NO: 3414285 - DNA, 25 bp, Homo sapien
tccattcaagtaacactcgtgatgt

SEQ ID NO: 3414286 - DNA, 25 bp, Homo sapien
catatatgactgtctccaaaaccca

SEQ ID NO: 3414287 - DNA, 25 bp, Homo sapien
caagttcttagagataaatgccaga

SEQ ID NO: 3414288 - DNA, 25 bp, Homo sapien
gccaaggatttgtatagggccagca

SEQ ID NO: 3414289 - DNA, 25 bp, Homo sapien
aggatttgtatagggccagcagctt

SEQ ID NO: 3414290 - DNA, 25 bp, Homo sapien
caaggatttgtatagggccagcagc

SEQ ID NO: 3414291 - DNA, 25 bp, Homo sapien
tggccaaggatttgtatagggccag

SEQ ID NO: 3414292 - DNA, 25 bp, Homo sapien
gacgtgaagttaccagcaagcaggc

SEQ ID NO: 3414293 - DNA, 25 bp, Homo sapien
aaaacctgcagagtggacctagctg

SEQ ID NO: 3414294 - DNA, 25 bp, Homo sapien
tcaggaaggactagaatcacaagcc

SEQ ID NO: 3414295 - DNA, 25 bp, Homo sapien
tctccaaatgagtggcaaaacctgc

SEQ ID NO: 3414296 - DNA, 25 bp, Homo sapien
tgagaccaagtcagtgatggtgaga

SEQ ID NO: 3414297 - DNA, 25 bp, Homo sapien
gagaaggtactgagaccaagtcagt

SEQ ID NO: 3414298 - DNA, 25 bp, Homo sapien
ggtactgagaccaagtcagtgatgg

SEQ ID NO: 3414299 - DNA, 25 bp, Homo sapien
tgatggtgagatgagcagtatggtc

SEQ ID NO: 3414300 - DNA, 25 bp, Homo sapien
gagaggttgagatccccagagatga

SEQ ID NO: 3414301 - DNA, 25 bp, Homo sapien
gaggttgagatccccagagatgagg

SEQ ID NO: 3414302 - DNA, 25 bp, Homo sapien
agaggttgagatccccagagatgag

SEQ ID NO: 3414303 - DNA, 25 bp, Homo sapien
aaggggttcccgtgattgatgtgat

SEQ ID NO: 3414304 - DNA, 25 bp, Homo sapien
aggggttcccgtgattgatgtgata

SEQ ID NO: 3414305 - DNA, 25 bp, Homo sapien
gggttcccgtgattgatgtgataca

SEQ ID NO: 3414306 - DNA, 25 bp, Homo sapien
ggggttcccgtgattgatgtgatac

SEQ ID NO: 3414307 - DNA, 25 bp, Homo sapien
tagtgctgtattgattcacccaaag

SEQ ID NO: 3414308 - DNA, 25 bp, Homo sapien
cattgactctatgaaatgccgcagt

SEQ ID NO: 3414309 - DNA, 25 bp, Homo sapien
tatgttcaatatcgctagtcaggga

SEQ ID NO: 3414310 - DNA, 25 bp, Homo sapien
gaacagtttgaacccaacagcagga

SEQ ID NO: 3414311 - DNA, 25 bp, Homo sapien
ctctttggagaacatacgatatacg

SEQ ID NO: 3414312 - DNA, 25 bp, Homo sapien
gagaacatacgatatacgtttgtgt

SEQ ID NO: 3414313 - DNA, 25 bp, Homo sapien
tttggagaacatacgatatacgttt

SEQ ID NO: 3414314 - DNA, 25 bp, Homo sapien
tggagaacatacgatatacgtttgt

SEQ ID NO: 3414315 - DNA, 25 bp, Homo sapien
aaatgtagccactcttatcccctca

SEQ ID NO: 3414316 - DNA, 25 bp, Homo sapien
tatcccctcacctaaactttcttga

SEQ ID NO: 3414317 - DNA, 25 bp, Homo sapien
gaaaatgtagccactcttatcccct

SEQ ID NO: 3414318 - DNA, 25 bp, Homo sapien
ttgaaaatgtagccactcttatccc

SEQ ID NO: 3414319 - DNA, 25 bp, Homo sapien
agtgctctcgaatgctctactttca

SEQ ID NO: 3414320 - DNA, 25 bp, Homo sapien
ctggaggcattgagcttcagaatat

SEQ ID NO: 3414321 - DNA, 25 bp, Homo sapien
ccagcttccaagcttgcttttactg

SEQ ID NO: 3414322 - DNA, 25 bp, Homo sapien
gaggagtgctctcgaatgctctact

SEQ ID NO: 3414323 - DNA, 25 bp, Homo sapien
caaatctgcgggagtcttcattttc

SEQ ID NO: 3414324 - DNA, 25 bp, Homo sapien
cagctgggcatacttaaagttggga

SEQ ID NO: 3414325 - DNA, 25 bp, Homo sapien
tcgtgccatgttgcctgtccttcgg

SEQ ID NO: 3414326 - DNA, 25 bp, Homo sapien
ggcaggtcttctatgcagcgcttga

SEQ ID NO: 3414327 - DNA, 25 bp, Homo sapien
gtagcaagtccattggtgccactca

SEQ ID NO: 3414328 - DNA, 25 bp, Homo sapien
ctaaaatggaactagattctgtggg

SEQ ID NO: 3414329 - DNA, 25 bp, Homo sapien
tgtgggtagcaagtccattggtgcc

SEQ ID NO: 3414330 - DNA, 25 bp, Homo sapien
actagattctgtgggtagcaagtcc

SEQ ID NO: 3414331 - DNA, 25 bp, Homo sapien
taaccaagttgcataaagagttctg

SEQ ID NO: 3414332 - DNA, 25 bp, Homo sapien
tcctgctgtattataagtgcccaat

SEQ ID NO: 3414333 - DNA, 25 bp, Homo sapien
ttggcagagattactaagcagcttc

SEQ ID NO: 3414334 - DNA, 25 bp, Homo sapien
cctggctttctagttacatgtttac

SEQ ID NO: 3414335 - DNA, 25 bp, Homo sapien
gaatgtccctgaccccttatgatag

SEQ ID NO: 3414336 - DNA, 25 bp, Homo sapien
tgaacttacaaccagactcgcaggc

SEQ ID NO: 3414337 - DNA, 25 bp, Homo sapien
tatgatagcagtagtgcaaacacca

SEQ ID NO: 3414338 - DNA, 25 bp, Homo sapien
tgtacaacagtgatggaaggtagcc

SEQ ID NO: 3414339 - DNA, 25 bp, Homo sapien
gttggtgtccatagtaaagtagaac

SEQ ID NO: 3414340 - DNA, 25 bp, Homo sapien
gcttatctgcctgaaagggcaactg

SEQ ID NO: 3414341 - DNA, 25 bp, Homo sapien
tagaactggcccaggcttatctgcc

SEQ ID NO: 3414342 - DNA, 25 bp, Homo sapien
caactgtttgaggtagagggaactg

SEQ ID NO: 3414343 - DNA, 25 bp, Homo sapien
tttgcctggtacatcctgaaatccc

SEQ ID NO: 3414344 - DNA, 25 bp, Homo sapien
cagttggggatcgagggagacagct

SEQ ID NO: 3414345 - DNA, 25 bp, Homo sapien
aacacccctcactgactgagaaaca

SEQ ID NO: 3414346 - DNA, 25 bp, Homo sapien
agacagctttgcctggtacatcctg

SEQ ID NO: 3414347 - DNA, 25 bp, Homo sapien
cgggtggtgcttggtagttgactca

SEQ ID NO: 3414348 - DNA, 25 bp, Homo sapien
ggtagggcgatcaagatttagttca

SEQ ID NO: 3414349 - DNA, 25 bp, Homo sapien
cctgtagttccagtcgggtggtgct

SEQ ID NO: 3414350 - DNA, 25 bp, Homo sapien
tgaacaggggtagggcgatcaagat

SEQ ID NO: 3414351 - DNA, 25 bp, Homo sapien
tctctcttcaagacaggcttcacct

SEQ ID NO: 3414352 - DNA, 25 bp, Homo sapien
tctctctcttcaagacaggcttcac

SEQ ID NO: 3414353 - DNA, 25 bp, Homo sapien
tctcttcaagacaggcttcacctcc

SEQ ID NO: 3414354 - DNA, 25 bp, Homo sapien
ctctctctcttcaagacaggcttca

SEQ ID NO: 3414355 - DNA, 25 bp, Homo sapien
tgatccaacttcccggacgggctgg

SEQ ID NO: 3414356 - DNA, 25 bp, Homo sapien
ttcccggacgggctggtgaacacag

SEQ ID NO: 3414357 - DNA, 25 bp, Homo sapien
cttcccggacgggctggtgaacaca

SEQ ID NO: 3414358 - DNA, 25 bp, Homo sapien
aatgatccaacttcccggacgggct

SEQ ID NO: 3414359 - DNA, 25 bp, Homo sapien
aggccaagggtttgtatagaaccag

SEQ ID NO: 3414360 - DNA, 25 bp, Homo sapien
ggccaagggtttgtatagaaccagc

SEQ ID NO: 3414361 - DNA, 25 bp, Homo sapien
gccaagggtttgtatagaaccagca

SEQ ID NO: 3414362 - DNA, 25 bp, Homo sapien
caggccaagggtttgtatagaacca

SEQ ID NO: 3414363 - DNA, 25 bp, Homo sapien
tcctgtgatttatgtggtacacaga

SEQ ID NO: 3414364 - DNA, 25 bp, Homo sapien
catattgaaggggttcctgtgattt

SEQ ID NO: 3414365 - DNA, 25 bp, Homo sapien
gggttcctgtgatttatgtggtaca

SEQ ID NO: 3414366 - DNA, 25 bp, Homo sapien
tgtgatttatgtggtacacagagcc

SEQ ID NO: 3414367 - DNA, 25 bp, Homo sapien
tctgtgagtgtcagccttatcattt

SEQ ID NO: 3414368 - DNA, 25 bp, Homo sapien
tggagtcatggaacttcaggatatt

SEQ ID NO: 3414369 - DNA, 25 bp, Homo sapien
aggatattctccataataaagagga

SEQ ID NO: 3414370 - DNA, 25 bp, Homo sapien
ctgctcttgattgctctaccttcag

SEQ ID NO: 3414371 - DNA, 25 bp, Homo sapien
tcatggaacttcaggatattctcca

SEQ ID NO: 3414372 - DNA, 25 bp, Homo sapien
tgccaaaaacccggagccttgccaa

SEQ ID NO: 3414373 - DNA, 25 bp, Homo sapien
cataccttaggcaccttctctttta

SEQ ID NO: 3414374 - DNA, 25 bp, Homo sapien
ttttccataccttaggcaccttctc

SEQ ID NO: 3414375 - DNA, 25 bp, Homo sapien
ccggagccttgccaaacctgtttct

SEQ ID NO: 3414376 - DNA, 25 bp, Homo sapien
acctgcactctgaaataatgaaaag

SEQ ID NO: 3414377 - DNA, 25 bp, Homo sapien
cctgttttgccagaggagcggtaaa

SEQ ID NO: 3414378 - DNA, 25 bp, Homo sapien
agatgctattgtcagccctgtgttt

SEQ ID NO: 3414379 - DNA, 25 bp, Homo sapien
tagaggtctcaatcttatcagatgc

SEQ ID NO: 3414380 - DNA, 25 bp, Homo sapien
ctgaagctggaaaatactttagaaa

SEQ ID NO: 3414381 - DNA, 25 bp, Homo sapien
tgaatttgtaaaatgtccaaatgct

SEQ ID NO: 3414382 - DNA, 25 bp, Homo sapien
ttagaaaaagccagtgtgtagcctt

SEQ ID NO: 3414383 - DNA, 25 bp, Homo sapien
agccagtgtgtagccttttgaattt

SEQ ID NO: 3414384 - DNA, 25 bp, Homo sapien
gtctcaatgttgagaacaaattctt

SEQ ID NO: 3414385 - DNA, 25 bp, Homo sapien
gggtctcaatgttgagaacaaattc

SEQ ID NO: 3414386 - DNA, 25 bp, Homo sapien
ctcaatgttgagaacaaattcttca

SEQ ID NO: 3414387 - DNA, 25 bp, Homo sapien
cagggtctcaatgttgagaacaaat

SEQ ID NO: 3414388 - DNA, 25 bp, Homo sapien
aagatttgaatagggccagcagctg

SEQ ID NO: 3414389 - DNA, 25 bp, Homo sapien
cagctgctcagaattattcaataga

SEQ ID NO: 3414390 - DNA, 25 bp, Homo sapien
ggaatgctccttgctaaagatttga

SEQ ID NO: 3414391 - DNA, 25 bp, Homo sapien
caatagaatcattttgtgggatgct

SEQ ID NO: 3414392 - DNA, 25 bp, Homo sapien
aggagaggttgagatccccagagat

SEQ ID NO: 3414393 - DNA, 25 bp, Homo sapien
tcggataataaccatctgatacccg

SEQ ID NO: 3414394 - DNA, 25 bp, Homo sapien
cggataataaccatctgatacccgg

SEQ ID NO: 3414395 - DNA, 25 bp, Homo sapien
ggtcggataataaccatctgatacc

SEQ ID NO: 3414396 - DNA, 25 bp, Homo sapien
gtcggataataaccatctgataccc

SEQ ID NO: 3414397 - DNA, 25 bp, Homo sapien
cgatatacattagtgtatgaatcca

SEQ ID NO: 3414398 - DNA, 25 bp, Homo sapien
gtgatttttgagggtctttggagaa

SEQ ID NO: 3414399 - DNA, 25 bp, Homo sapien
tacattagtgtatgaatccatgtca

SEQ ID NO: 3414400 - DNA, 25 bp, Homo sapien
ccagtttatgatctcagaatttttc

SEQ ID NO: 3414401 - DNA, 25 bp, Homo sapien
gcatagagcttcaggatatcttccg

SEQ ID NO: 3414402 - DNA, 25 bp, Homo sapien
cagcttccaagcttgcttttattgg

SEQ ID NO: 3414403 - DNA, 25 bp, Homo sapien
tccaattcgtcatctgggtggcctg

SEQ ID NO: 3414404 - DNA, 25 bp, Homo sapien
tatcttccgtaacaaagaggagtgc

SEQ ID NO: 3414405 - DNA, 25 bp, Homo sapien
gaagggtccatggttacccatgaga

SEQ ID NO: 3414406 - DNA, 25 bp, Homo sapien
ttaccagcccagaataagacacatt

SEQ ID NO: 3414407 - DNA, 25 bp, Homo sapien
gcaggctcctcttattcatccctag

SEQ ID NO: 3414408 - DNA, 25 bp, Homo sapien
cagcgcttgatgtaatgcaggctcc

SEQ ID NO: 3414409 - DNA, 25 bp, Homo sapien
aggaaacctagtgccttattcattc

SEQ ID NO: 3414410 - DNA, 25 bp, Homo sapien
ggaggcctcaaggaaacctagtgcc

SEQ ID NO: 3414411 - DNA, 25 bp, Homo sapien
caaggaaacctagtgccttattcat

SEQ ID NO: 3414412 - DNA, 25 bp, Homo sapien
gcctcaaggaaacctagtgccttat

SEQ ID NO: 3414413 - DNA, 25 bp, Homo sapien
agattctgtgggtagcaggtccatt

SEQ ID NO: 3414414 - DNA, 25 bp, Homo sapien
tagtagattctatcaatcaagtttc

SEQ ID NO: 3414415 - DNA, 25 bp, Homo sapien
cctggctttctagttacatgtttat

SEQ ID NO: 3414416 - DNA, 25 bp, Homo sapien
catgtgagaaggagttcctgccata

SEQ ID NO: 3414417 - DNA, 25 bp, Homo sapien
cctgccatatcataaatgcccaatc

SEQ ID NO: 3414418 - DNA, 25 bp, Homo sapien
ttcaatccaagtgcatgataaggtt

SEQ ID NO: 3414419 - DNA, 25 bp, Homo sapien
caatccaagtgcatgataaggttta

SEQ ID NO: 3414420 - DNA, 25 bp, Homo sapien
ttttcaatccaagtgcatgataagg

SEQ ID NO: 3414421 - DNA, 25 bp, Homo sapien
ccaagtgcatgataaggtttaggaa

SEQ ID NO: 3414422 - DNA, 25 bp, Homo sapien
gccatatttaaggaatcctctttcc

SEQ ID NO: 3414423 - DNA, 25 bp, Homo sapien
gtgccatatttaaggaatcctcttt

SEQ ID NO: 3414424 - DNA, 25 bp, Homo sapien
ccatatttaaggaatcctctttcct

SEQ ID NO: 3414425 - DNA, 25 bp, Homo sapien
ttgtgccatatttaaggaatcctct

SEQ ID NO: 3414426 - DNA, 25 bp, Homo sapien
acgtggaactaaaacatcgggctca

SEQ ID NO: 3414427 - DNA, 25 bp, Homo sapien
gttgaacggtagaggaataaaagca

SEQ ID NO: 3414428 - DNA, 25 bp, Homo sapien
ttgaacggtagaggaataaaagcat

SEQ ID NO: 3414429 - DNA, 25 bp, Homo sapien
tggaactaaaacatcgggctcaggg

SEQ ID NO: 3414430 - DNA, 25 bp, Homo sapien
agagtagagctctagctttgctttt

SEQ ID NO: 3414431 - DNA, 25 bp, Homo sapien
gagtagagctctagctttgcttttc

SEQ ID NO: 3414432 - DNA, 25 bp, Homo sapien
cagagagagctccacccggatgatg

SEQ ID NO: 3414433 - DNA, 25 bp, Homo sapien
tggcgctttcgcgctttcccagact

SEQ ID NO: 3414434 - DNA, 25 bp, Homo sapien
acccgcgtctgcgtgaagtctccag

SEQ ID NO: 3414435 - DNA, 25 bp, Homo sapien
gctgcagggcgaatagccagccaag

SEQ ID NO: 3414436 - DNA, 25 bp, Homo sapien
gcggcagctgggcggagtgcgaggc

SEQ ID NO: 3414437 - DNA, 25 bp, Homo sapien
ggataaactaagcaatcactgccct

SEQ ID NO: 3414438 - DNA, 25 bp, Homo sapien
cagtgatcccctctccgcgccactc

SEQ ID NO: 3414439 - DNA, 25 bp, Homo sapien
tggatgacccttcccggtctcagtg

SEQ ID NO: 3414440 - DNA, 25 bp, Homo sapien
tggagagagttgtgcaccagtccca

SEQ ID NO: 3414441 - DNA, 25 bp, Homo sapien
ggagagagttgtgcaccagtcccat

SEQ ID NO: 3414442 - DNA, 25 bp, Homo sapien
ttctctgtcactcgtgccttgtcct

SEQ ID NO: 3414443 - DNA, 25 bp, Homo sapien
gtgccttgtccttccggtctttcta

SEQ ID NO: 3414444 - DNA, 25 bp, Homo sapien
caaatatctcatcatgagtctcttc

SEQ ID NO: 3414445 - DNA, 25 bp, Homo sapien
ttctctccctctagcctggtactgg

SEQ ID NO: 3414446 - DNA, 25 bp, Homo sapien
tcttgtggctttagttgaattagtt

SEQ ID NO: 3414447 - DNA, 25 bp, Homo sapien
tacacagatatttgatctgggaact

SEQ ID NO: 3414448 - DNA, 25 bp, Homo sapien
ttgcaagatcttctggtggactttg

SEQ ID NO: 3414449 - DNA, 25 bp, Homo sapien
caagatcttctggtggactttggag

SEQ ID NO: 3414450 - DNA, 25 bp, Homo sapien
gcaagatcttctggtggactttgga

SEQ ID NO: 3414451 - DNA, 25 bp, Homo sapien
tgcaagatcttctggtggactttgg

SEQ ID NO: 3414452 - DNA, 25 bp, Homo sapien
gggatgcttcagtcctcaagccctt

SEQ ID NO: 3414453 - DNA, 25 bp, Homo sapien
gtgggatgcttcagtcctcaagccc

SEQ ID NO: 3414454 - DNA, 25 bp, Homo sapien
tgggatgcttcagtcctcaagccct

SEQ ID NO: 3414455 - DNA, 25 bp, Homo sapien
tgattgatgtgaaacagagagccat

SEQ ID NO: 3414456 - DNA, 25 bp, Homo sapien
tctgatactcgggccaggagtccac

SEQ ID NO: 3414457 - DNA, 25 bp, Homo sapien
gaggtcggataataaccatctgata

SEQ ID NO: 3414458 - DNA, 25 bp, Homo sapien
gggttcccgtgattgatgtgaaaca

SEQ ID NO: 3414459 - DNA, 25 bp, Homo sapien
cgatatacattagtgtatgaatcca

SEQ ID NO: 3414460 - DNA, 25 bp, Homo sapien
gtgatttttgagggtctttggagaa

SEQ ID NO: 3414461 - DNA, 25 bp, Homo sapien
tacattagtgtatgaatccatgtca

SEQ ID NO: 3414462 - DNA, 25 bp, Homo sapien
ccagtttatgatctcagaatttttc

SEQ ID NO: 3414463 - DNA, 25 bp, Homo sapien
tatcttccgtaacaaagaggagtgc

SEQ ID NO: 3414464 - DNA, 25 bp, Homo sapien
cagcttccaagcttgcttttattgg

SEQ ID NO: 3414465 - DNA, 25 bp, Homo sapien
tccaattcgtcatctgggtggcctg

SEQ ID NO: 3414466 - DNA, 25 bp, Homo sapien
gcatagagcttcaggatatcttccg

SEQ ID NO: 3414467 - DNA, 25 bp, Homo sapien
catgcatcgcatgatcagccgtgtc

SEQ ID NO: 3414468 - DNA, 25 bp, Homo sapien
tagtgcactagtctttctgatgacg

SEQ ID NO: 3414469 - DNA, 25 bp, Homo sapien
ggaggcctcaaggaaacctagtgca

SEQ ID NO: 3414470 - DNA, 25 bp, Homo sapien
cctaggcagcgcttgatgtaacgca

SEQ ID NO: 3414471 - DNA, 25 bp, Homo sapien
ctacaatggaacaagattctgtggg

SEQ ID NO: 3414472 - DNA, 25 bp, Homo sapien
gaacaagattctgtgggtagcagtt

SEQ ID NO: 3414473 - DNA, 25 bp, Homo sapien
tctgtgggtagcagttccattggtg

SEQ ID NO: 3414474 - DNA, 25 bp, Homo sapien
gggtagcagttccattggtgccact

SEQ ID NO: 3414475 - DNA, 25 bp, Homo sapien
caagtgttgatggtattactttgct

SEQ ID NO: 3414476 - DNA, 25 bp, Homo sapien
ccccatcgcgctgggtattttggat

SEQ ID NO: 3414477 - DNA, 25 bp, Homo sapien
aagcgtcgcggggtaaagtcagtgt

SEQ ID NO: 3414478 - DNA, 25 bp, Homo sapien
tccccatcgcgctgggtattttgga

SEQ ID NO: 3414479 - DNA, 25 bp, Homo sapien
ggtaaagtcagtgttgtgcttttcc

SEQ ID NO: 3414480 - DNA, 25 bp, Homo sapien
catttggtgtagtcccgcatgctgc

SEQ ID NO: 3414481 - DNA, 25 bp, Homo sapien
tgccatttgatgtcgcgggagaacg

SEQ ID NO: 3414482 - DNA, 25 bp, Homo sapien
ggaaggcgcctttccgcatttggtg

SEQ ID NO: 3414483 - DNA, 25 bp, Homo sapien
aggtcaatggtagctcaatcttcgg

SEQ ID NO: 3414484 - DNA, 25 bp, Homo sapien
agagtagagctctagctttgcttta

SEQ ID NO: 3414485 - DNA, 25 bp, Homo sapien
agaaactgtctagagtgataggtcc

SEQ ID NO: 3414486 - DNA, 25 bp, Homo sapien
actgcccctcacagagaaactgtct

SEQ ID NO: 3414487 - DNA, 25 bp, Homo sapien
aaactgcccctcacagagaaactgt

SEQ ID NO: 3414488 - DNA, 25 bp, Homo sapien
tttgggagtaatcttccatttcttc

SEQ ID NO: 3414489 - DNA, 25 bp, Homo sapien
cattttgggagtaatcttccatttc

SEQ ID NO: 3414490 - DNA, 25 bp, Homo sapien
gccattttgggagtaatcttccatt

SEQ ID NO: 3414491 - DNA, 25 bp, Homo sapien
ggccattttgggagtaatcttccat

SEQ ID NO: 3414492 - DNA, 25 bp, Homo sapien
ctgcagggcgaatagcccgccaagt

SEQ ID NO: 3414493 - DNA, 25 bp, Homo sapien
ccgcgtctgcgtgaaatctaaaggg

SEQ ID NO: 3414494 - DNA, 25 bp, Homo sapien
acccgcgtctgcgtgaaatctaaag

SEQ ID NO: 3414495 - DNA, 25 bp, Homo sapien
gcacccgcgtctgcgtgaaatctaa

SEQ ID NO: 3414496 - DNA, 25 bp, Homo sapien
tccgacttttgattgccagcgcgct

SEQ ID NO: 3414497 - DNA, 25 bp, Homo sapien
acttttgattgccagcgcgctggcg

SEQ ID NO: 3414498 - DNA, 25 bp, Homo sapien
tttctccgacttttgattgccagcg

SEQ ID NO: 3414499 - DNA, 25 bp, Homo sapien
ggtgcctggaggtttcgcgctttct

SEQ ID NO: 3414500 - DNA, 25 bp, Homo sapien
gccagttcccgtgtcccaggataaa

SEQ ID NO: 3414501 - DNA, 25 bp, Homo sapien
tttcccgctcatgggcgtcccctgt

SEQ ID NO: 3414502 - DNA, 25 bp, Homo sapien
gataaactaagcaatcaccgccctg

SEQ ID NO: 3414503 - DNA, 25 bp, Homo sapien
tcagtccacggccagttcccgtgtc

SEQ ID NO: 3414504 - DNA, 25 bp, Homo sapien
tgtccacacggtgcaagtgcccgtc

SEQ ID NO: 3414505 - DNA, 25 bp, Homo sapien
aaccggagagtctgtccacacggtg

SEQ ID NO: 3414506 - DNA, 25 bp, Homo sapien
agtctgtccacacggtgcaagtgcc

SEQ ID NO: 3414507 - DNA, 25 bp, Homo sapien
cacggtgcaagtgcccgtcagtgcc

SEQ ID NO: 3414508 - DNA, 25 bp, Homo sapien
caaaatggagtaacagggactggat

SEQ ID NO: 3414509 - DNA, 25 bp, Homo sapien
tggagtaacagggactggatttccc

SEQ ID NO: 3414510 - DNA, 25 bp, Homo sapien
gccaaaatggagtaacagggactgg

SEQ ID NO: 3414511 - DNA, 25 bp, Homo sapien
ctggccaaaatggagtaacagggac

SEQ ID NO: 3414512 - DNA, 25 bp, Homo sapien
taagatggagaaacaaggattgaat

SEQ ID NO: 3414513 - DNA, 25 bp, Homo sapien
taacttctactactcgataagatgg

SEQ ID NO: 3414514 - DNA, 25 bp, Homo sapien
ctactactcgataagatggagaaac

SEQ ID NO: 3414515 - DNA, 25 bp, Homo sapien
gaaacaaggattgaatttattctgc

SEQ ID NO: 3414516 - DNA, 25 bp, Homo sapien
tggtcatcttccatagcgctaaatg

SEQ ID NO: 3414517 - DNA, 25 bp, Homo sapien
tctggtcatcttccatagcgctaaa

SEQ ID NO: 3414518 - DNA, 25 bp, Homo sapien
tcatcttccatagcgctaaatgact

SEQ ID NO: 3414519 - DNA, 25 bp, Homo sapien
ttccatagcgctaaatgacttgttt

SEQ ID NO: 3414520 - DNA, 25 bp, Homo sapien
tgtcttgaacgaaatagccctaatc

SEQ ID NO: 3414521 - DNA, 25 bp, Homo sapien
tattttctagacgaacagtttggca

SEQ ID NO: 3414522 - DNA, 25 bp, Homo sapien
gatgccctagactagtactgcccaa

SEQ ID NO: 3414523 - DNA, 25 bp, Homo sapien
caatagaatgtctgcagtgacggaa

SEQ ID NO: 3414524 - DNA, 25 bp, Homo sapien
gattaatagcataccgcctacccag

SEQ ID NO: 3414525 - DNA, 25 bp, Homo sapien
cgaaaacggccatccttgcataagg

SEQ ID NO: 3414526 - DNA, 25 bp, Homo sapien
gatgcggcctccgtctaacttgtga

SEQ ID NO: 3414527 - DNA, 25 bp, Homo sapien
tgaaatagtcattagcactcagggc

SEQ ID NO: 3414528 - DNA, 25 bp, Homo sapien
ccaattgtcaggagtagggcagaac

SEQ ID NO: 3414529 - DNA, 25 bp, Homo sapien
gaaatctgtcgccatagtcctggag

SEQ ID NO: 3414530 - DNA, 25 bp, Homo sapien
gaaggttaccttcgcacatttgcta

SEQ ID NO: 3414531 - DNA, 25 bp, Homo sapien
taagctgttcgcaggttgcaactga

SEQ ID NO: 3414532 - DNA, 25 bp, Homo sapien
tactggtggtatcatagagatctac

SEQ ID NO: 3414533 - DNA, 25 bp, Homo sapien
tgtgtgttccaaacctctgatagga

SEQ ID NO: 3414534 - DNA, 25 bp, Homo sapien
taagggcatgcacattaaatcctcg

SEQ ID NO: 3414535 - DNA, 25 bp, Homo sapien
caatcgttcgtttagaggaatcaca

SEQ ID NO: 3414536 - DNA, 25 bp, Homo sapien
ccatgggttcaatctgatgatcttg

SEQ ID NO: 3414537 - DNA, 25 bp, Homo sapien
cattccatgggttcaatctgatgat

SEQ ID NO: 3414538 - DNA, 25 bp, Homo sapien
tgggttcaatctgatgatcttgaag

SEQ ID NO: 3414539 - DNA, 25 bp, Homo sapien
ctaacattccatgggttcaatctga

SEQ ID NO: 3414540 - DNA, 25 bp, Homo sapien
atgtcaccagggttttgtgttcaga

SEQ ID NO: 3414541 - DNA, 25 bp, Homo sapien
gtttaagagtccatgtgcagttttg

SEQ ID NO: 3414542 - DNA, 25 bp, Homo sapien
cataggcagtttttcagtcttcacc

SEQ ID NO: 3414543 - DNA, 25 bp, Homo sapien
tctttgccaggaattattggcatat

SEQ ID NO: 3414544 - DNA, 25 bp, Homo sapien
tttaatacaaggaccaagtgctgga

SEQ ID NO: 3414545 - DNA, 25 bp, Homo sapien
tgctgaaaccacttgtagataccca

SEQ ID NO: 3414546 - DNA, 25 bp, Homo sapien
tgatgactagacactgacaccgaat

SEQ ID NO: 3414547 - DNA, 25 bp, Homo sapien
gcagtgaggatcaggaggccaatac

SEQ ID NO: 3414548 - DNA, 25 bp, Homo sapien
ctcaagcagtgatacatgacagggc

SEQ ID NO: 3414549 - DNA, 25 bp, Homo sapien
caaaattccagggtctatgtgccca

SEQ ID NO: 3414550 - DNA, 25 bp, Homo sapien
tgtgcatgccagatatagtgtcaag

SEQ ID NO: 3414551 - DNA, 25 bp, Homo sapien
tcatacggcaggtaagctcaagcag

SEQ ID NO: 3414552 - DNA, 25 bp, Homo sapien
aatggacgagcctctgatttttctc

SEQ ID NO: 3414553 - DNA, 25 bp, Homo sapien
gaatggacgagcctctgatttttct

SEQ ID NO: 3414554 - DNA, 25 bp, Homo sapien
ggctgactttacaaggttggatgca

SEQ ID NO: 3414555 - DNA, 25 bp, Homo sapien
ctttacaaggttggatgcagtccat

SEQ ID NO: 3414556 - DNA, 25 bp, Homo sapien
tcctaaccgggctggggagtgccgc

SEQ ID NO: 3414557 - DNA, 25 bp, Homo sapien
cagcagatggcgacagaggattagc

SEQ ID NO: 3414558 - DNA, 25 bp, Homo sapien
ccgggctggggagtgccgcgcgctg

SEQ ID NO: 3414559 - DNA, 25 bp, Homo sapien
aaccgggctggggagtgccgcgcgc

SEQ ID NO: 3414560 - DNA, 25 bp, Homo sapien
tcaaaactccagaggctgctagcct

SEQ ID NO: 3414561 - DNA, 25 bp, Homo sapien
gggtgtcggccccatcaaaactcca

SEQ ID NO: 3414562 - DNA, 25 bp, Homo sapien
aaagaacctctatgagagtaatgcc

SEQ ID NO: 3414563 - DNA, 25 bp, Homo sapien
taatgccttcataaggagccttcgt

SEQ ID NO: 3414564 - DNA, 25 bp, Homo sapien
ccggaaatggtatggcgcctttgcc

SEQ ID NO: 3414565 - DNA, 25 bp, Homo sapien
gccattgttacttctcttactacta

SEQ ID NO: 3414566 - DNA, 25 bp, Homo sapien
ctggcacgaacgctccggaaatggt

SEQ ID NO: 3414567 - DNA, 25 bp, Homo sapien
aacgctccggaaatggtatggcgcc

SEQ ID NO: 3414568 - DNA, 25 bp, Homo sapien
aaaaactcgggtgtgggaggagctg

SEQ ID NO: 3414569 - DNA, 25 bp, Homo sapien
tggcagcttgagtctcgcgcgcgca

SEQ ID NO: 3414570 - DNA, 25 bp, Homo sapien
gtggcagcttgagtctcgcgcgcgc

SEQ ID NO: 3414571 - DNA, 25 bp, Homo sapien
tattggaaagcgagagcgaaagcga

SEQ ID NO: 3414572 - DNA, 25 bp, Homo sapien
gcgagagcgaaagcgaaagcatcct

SEQ ID NO: 3414573 - DNA, 25 bp, Homo sapien
gaaagcatcctagtcgccggtaggc

SEQ ID NO: 3414574 - DNA, 25 bp, Homo sapien
tccccagtcccgagtattggaaagc

SEQ ID NO: 3414575 - DNA, 25 bp, Homo sapien
ccttgacgccgcgagcaggaccctg

SEQ ID NO: 3414576 - DNA, 25 bp, Homo sapien
cttgacgccgcgagcaggaccctgt

SEQ ID NO: 3414577 - DNA, 25 bp, Homo sapien
gctcctccttgacgccgcgagcagg

SEQ ID NO: 3414578 - DNA, 25 bp, Homo sapien
acttcggaagccgattggctgcgct

SEQ ID NO: 3414579 - DNA, 25 bp, Homo sapien
tacttcggaagccgattggctgcgc

SEQ ID NO: 3414580 - DNA, 25 bp, Homo sapien
cttcggaagccgattggctgcgctg

SEQ ID NO: 3414581 - DNA, 25 bp, Homo sapien
ttcggaagccgattggctgcgctgg

SEQ ID NO: 3414582 - DNA, 25 bp, Homo sapien
ttggggaatggcgcgtctggccaat

SEQ ID NO: 3414583 - DNA, 25 bp, Homo sapien
ggaatggcgcgtctggccaatggaa

SEQ ID NO: 3414584 - DNA, 25 bp, Homo sapien
ggggaatggcgcgtctggccaatgg

SEQ ID NO: 3414585 - DNA, 25 bp, Homo sapien
gaatggcgcgtctggccaatggaat

SEQ ID NO: 3414586 - DNA, 25 bp, Homo sapien
actttggttggagaacagaactcac

SEQ ID NO: 3414587 - DNA, 25 bp, Homo sapien
ctgaactcgtgatttttagggactt

SEQ ID NO: 3414588 - DNA, 25 bp, Homo sapien
tcctgctgcggccaatgaatcctgg

SEQ ID NO: 3414589 - DNA, 25 bp, Homo sapien
tggcaaaactccaggtcagccccag

SEQ ID NO: 3414590 - DNA, 25 bp, Homo sapien
tcaacaataaaagcccgcaggagtg

SEQ ID NO: 3414591 - DNA, 25 bp, Homo sapien
aaagacacatccgttcacttggctg

SEQ ID NO: 3414592 - DNA, 25 bp, Homo sapien
gatatttgcaactttccggtccctg

SEQ ID NO: 3414593 - DNA, 25 bp, Homo sapien
tgtttatatcagacagcactgccag

SEQ ID NO: 3414594 - DNA, 25 bp, Homo sapien
aaacctcaggtagctacagcgtgca

SEQ ID NO: 3414595 - DNA, 25 bp, Homo sapien
tgaagggacttcagggcacacactg

SEQ ID NO: 3414596 - DNA, 25 bp, Homo sapien
tcaacgcagttcccgctcgtatttg

SEQ ID NO: 3414597 - DNA, 25 bp, Homo sapien
acgcagttcccgctcgtatttgagg

SEQ ID NO: 3414598 - DNA, 25 bp, Homo sapien
ttcccgctcgtatttgaggaagcaa

SEQ ID NO: 3414599 - DNA, 25 bp, Homo sapien
gcagttcccgctcgtatttgaggaa

SEQ ID NO: 3414600 - DNA, 25 bp, Homo sapien
gcgcctcgccagcactcggcctgga

SEQ ID NO: 3414601 - DNA, 25 bp, Homo sapien
cgcctcgccagcactcggcctggaa

SEQ ID NO: 3414602 - DNA, 25 bp, Homo sapien
cgcgcctcgccagcactcggcctgg

SEQ ID NO: 3414603 - DNA, 25 bp, Homo sapien
cccagcacacaaggggacttgcagc

SEQ ID NO: 3414604 - DNA, 25 bp, Homo sapien
agatgggtggcgctgtcagtccccg

SEQ ID NO: 3414605 - DNA, 25 bp, Homo sapien
agctccccttaggaatttctctgtc

SEQ ID NO: 3414606 - DNA, 25 bp, Homo sapien
gggtcgaggccaactctaagcctct

SEQ ID NO: 3414607 - DNA, 25 bp, Homo sapien
tacttgagcaatcacagtggaaagg

SEQ ID NO: 3414608 - DNA, 25 bp, Homo sapien
cggaactgggctatgttgcaacatc

SEQ ID NO: 3414609 - DNA, 25 bp, Homo sapien
ggcaagaggttaagaaaacactcca

SEQ ID NO: 3414610 - DNA, 25 bp, Homo sapien
gaaaatgtacaattgcggaactggg

SEQ ID NO: 3414611 - DNA, 25 bp, Homo sapien
ggatactttttaaacagcagagaac

SEQ ID NO: 3414612 - DNA, 25 bp, Homo sapien
cagggatactttttaaacagcagag

SEQ ID NO: 3414613 - DNA, 25 bp, Homo sapien
cacagggatactttttaaacagcag

SEQ ID NO: 3414614 - DNA, 25 bp, Homo sapien
gggatactttttaaacagcagagaa

SEQ ID NO: 3414615 - DNA, 25 bp, Homo sapien
gaggtatttttccttctatctctcc

SEQ ID NO: 3414616 - DNA, 25 bp, Homo sapien
tttccttctatctctcctctgatgt

SEQ ID NO: 3414617 - DNA, 25 bp, Homo sapien
tatttttccttctatctctcctctg

SEQ ID NO: 3414618 - DNA, 25 bp, Homo sapien
tccttctatctctcctctgatgtct

SEQ ID NO: 3414619 - DNA, 25 bp, Homo sapien
tctagctgcaaattcctgcggatgc

SEQ ID NO: 3414620 - DNA, 25 bp, Homo sapien
cttagagaaggtagacgaactgccc

SEQ ID NO: 3414621 - DNA, 25 bp, Homo sapien
ctgcggatgctatgcaaattaggta

SEQ ID NO: 3414622 - DNA, 25 bp, Homo sapien
ttcgagaacactgcgtgtcaggcac

SEQ ID NO: 3414623 - DNA, 25 bp, Homo sapien
ggtgtcctgcgtcccatctttcccc

SEQ ID NO: 3414624 - DNA, 25 bp, Homo sapien
accttgctctccctggagatggtac

SEQ ID NO: 3414625 - DNA, 25 bp, Homo sapien
aaaagattagctggtgtcctgcgtc

SEQ ID NO: 3414626 - DNA, 25 bp, Homo sapien
tgtcattaattgtacagaggaaaag

SEQ ID NO: 3414627 - DNA, 25 bp, Homo sapien
ttcaaattatagcagtatcttcaaa

SEQ ID NO: 3414628 - DNA, 25 bp, Homo sapien
tcaaattatagcagtatcttcaaag

SEQ ID NO: 3414629 - DNA, 25 bp, Homo sapien
tttcaaattatagcagtatcttcaa

SEQ ID NO: 3414630 - DNA, 25 bp, Homo sapien
tgaagatgaacggatggttcagctg

SEQ ID NO: 3414631 - DNA, 25 bp, Homo sapien
aagatgaacggatggttcagctgaa

SEQ ID NO: 3414632 - DNA, 25 bp, Homo sapien
gatgaacggatggttcagctgaaac

SEQ ID NO: 3414633 - DNA, 25 bp, Homo sapien
cttgaagatgaacggatggttcagc

SEQ ID NO: 3414634 - DNA, 25 bp, Homo sapien
cggagaaaaatagtgctcgattttc

SEQ ID NO: 3414635 - DNA, 25 bp, Homo sapien
tactactgggaataacaatgctagg

SEQ ID NO: 3414636 - DNA, 25 bp, Homo sapien
tatgggtccgtatgccagcaatgcc

SEQ ID NO: 3414637 - DNA, 25 bp, Homo sapien
tgaattcagcgataagctaccgcaa

SEQ ID NO: 3414638 - DNA, 25 bp, Homo sapien
catgggtaccagcagatatgggtcc

SEQ ID NO: 3414639 - DNA, 25 bp, Homo sapien
cattagagaagtactgcaattattc

SEQ ID NO: 3414640 - DNA, 25 bp, Homo sapien
tcactatgtgtgagcttaagtttca

SEQ ID NO: 3414641 - DNA, 25 bp, Homo sapien
taccttcaaggtaacatatattgtc

SEQ ID NO: 3414642 - DNA, 25 bp, Homo sapien
ggtattagttgtggctcttgggtct

SEQ ID NO: 3414643 - DNA, 25 bp, Homo sapien
gagtttctatctcttttctgacagc

SEQ ID NO: 3414644 - DNA, 25 bp, Homo sapien
ggccttggtgagtttctatctcttt

SEQ ID NO: 3414645 - DNA, 25 bp, Homo sapien
tcttggccttggtgagtttctatct

SEQ ID NO: 3414646 - DNA, 25 bp, Homo sapien
ggtgagtttctatctcttttctgac

SEQ ID NO: 3414647 - DNA, 25 bp, Homo sapien
tctaattcatcaactggctgggtgc

SEQ ID NO: 3414648 - DNA, 25 bp, Homo sapien
taacccgtagttgcactgtcccaga

SEQ ID NO: 3414649 - DNA, 25 bp, Homo sapien
tttgctcgctgaccctgagggatca

SEQ ID NO: 3414650 - DNA, 25 bp, Homo sapien
cactaagtggcacaggagtaattcc

SEQ ID NO: 3414651 - DNA, 25 bp, Homo sapien
aaataacaactccataagccattcc

SEQ ID NO: 3414652 - DNA, 25 bp, Homo sapien
tattattgataagatgaccattttg

SEQ ID NO: 3414653 - DNA, 25 bp, Homo sapien
cctggcagataggaaatggtcaata

SEQ ID NO: 3414654 - DNA, 25 bp, Homo sapien
gccattcccttaaatccagtagact

SEQ ID NO: 3414655 - DNA, 25 bp, Homo sapien
tgtactccagcccaggcgacagagt

SEQ ID NO: 3414656 - DNA, 25 bp, Homo sapien
atcgcttgaacctgggaggtggaag

SEQ ID NO: 3414657 - DNA, 25 bp, Homo sapien
ctgctcaggagactgaggcataaga

SEQ ID NO: 3414658 - DNA, 25 bp, Homo sapien
ttgcagtgagctgagatcgcaccac

SEQ ID NO: 3414659 - DNA, 25 bp, Homo sapien
gcttcttctgtgatagtccctggac

SEQ ID NO: 3414660 - DNA, 25 bp, Homo sapien
gggttatctgtactaccggcactgt

SEQ ID NO: 3414661 - DNA, 25 bp, Homo sapien
gaagcaatgtttctagcagccacta

SEQ ID NO: 3414662 - DNA, 25 bp, Homo sapien
tatgttagcattaattgcagcccca

SEQ ID NO: 3414663 - DNA, 25 bp, Homo sapien
caacgtactagagtcaggaagacgc

SEQ ID NO: 3414664 - DNA, 25 bp, Homo sapien
ttacctacgtagagagcaaatgtgg

SEQ ID NO: 3414665 - DNA, 25 bp, Homo sapien
tccaacctctgctaatgagacccag

SEQ ID NO: 3414666 - DNA, 25 bp, Homo sapien
ccctgctggcctaaagtgtcgtgtg

SEQ ID NO: 3414667 - DNA, 25 bp, Homo sapien
ttccttgatgcagagaagcgacccg

SEQ ID NO: 3414668 - DNA, 25 bp, Homo sapien
cgcagcgcgaactggagacacgcat

SEQ ID NO: 3414669 - DNA, 25 bp, Homo sapien
agcatgatcagtgtccgcagcgcga

SEQ ID NO: 3414670 - DNA, 25 bp, Homo sapien
cgcgctcggaatggcacgctctggt

SEQ ID NO: 3414671 - DNA, 25 bp, Homo sapien
tccccagccgtgcatccaccggggc

SEQ ID NO: 3414672 - DNA, 25 bp, Homo sapien
ccccagccgtgcatccaccggggcc

SEQ ID NO: 3414673 - DNA, 25 bp, Homo sapien
gccccgagcgcccgacctcctccgc

SEQ ID NO: 3414674 - DNA, 25 bp, Homo sapien
tcagccattcccagaccaccacggc

SEQ ID NO: 3414675 - DNA, 25 bp, Homo sapien
ctgtagggacgccagcggccgtgct

SEQ ID NO: 3414676 - DNA, 25 bp, Homo sapien
agcggccgtgctcgttcagccattc

SEQ ID NO: 3414677 - DNA, 25 bp, Homo sapien
attcccagaccaccacggccgaggc

SEQ ID NO: 3414678 - DNA, 25 bp, Homo sapien
ggccggcgcggaccaccgcctcgat

SEQ ID NO: 3414679 - DNA, 25 bp, Homo sapien
accaccgcctcgatgtggtggctca

SEQ ID NO: 3414680 - DNA, 25 bp, Homo sapien
ggaccaccgcctcgatgtggtggct

SEQ ID NO: 3414681 - DNA, 25 bp, Homo sapien
gcggaccaccgcctcgatgtggtgg

SEQ ID NO: 3414682 - DNA, 25 bp, Homo sapien
tgtcttggcggaactggttcatgga

SEQ ID NO: 3414683 - DNA, 25 bp, Homo sapien
gtgtcttggcggaactggttcatgg

SEQ ID NO: 3414684 - DNA, 25 bp, Homo sapien
cgtgtcttggcggaactggttcatg

SEQ ID NO: 3414685 - DNA, 25 bp, Homo sapien
ccgtgtcttggcggaactggttcat

SEQ ID NO: 3414686 - DNA, 25 bp, Homo sapien
ctgtagcgagaacctccggggaatc

SEQ ID NO: 3414687 - DNA, 25 bp, Homo sapien
ccgactgtagcgagaacctccgggg

SEQ ID NO: 3414688 - DNA, 25 bp, Homo sapien
tgtagcgagaacctccggggaatcc

SEQ ID NO: 3414689 - DNA, 25 bp, Homo sapien
aagcacccaaaacctttcagcttct

SEQ ID NO: 3414690 - DNA, 25 bp, Homo sapien
aatggctattcaggcctttgccagg

SEQ ID NO: 3414691 - DNA, 25 bp, Homo sapien
ttgccagggtcataacctgcccccc

SEQ ID NO: 3414692 - DNA, 25 bp, Homo sapien
tccaacccagagggatacaccaaga

SEQ ID NO: 3414693 - DNA, 25 bp, Homo sapien
aagaaacaatggctattcaggcctt

SEQ ID NO: 3414694 - DNA, 25 bp, Homo sapien
gggtagcttgaccactccaggaggc

SEQ ID NO: 3414695 - DNA, 25 bp, Homo sapien
tgatgcccacttccatgtcgtaggg

SEQ ID NO: 3414696 - DNA, 25 bp, Homo sapien
tcttcagtgggcctcgaatggtgcc

SEQ ID NO: 3414697 - DNA, 25 bp, Homo sapien
gatctggcccatggtgttgaagtca

SEQ ID NO: 3414698 - DNA, 25 bp, Homo sapien
aggagagcccatggttgtcccagtg

SEQ ID NO: 3414699 - DNA, 25 bp, Homo sapien
agggccacccttccggtcttgctgt

SEQ ID NO: 3414700 - DNA, 25 bp, Homo sapien
ccagaggcgatcagcacccgggact

SEQ ID NO: 3414701 - DNA, 25 bp, Homo sapien
tcgctgcaggttggtacgattcaag

SEQ ID NO: 3414702 - DNA, 25 bp, Homo sapien
tgacaggactggacccatttaggtt

SEQ ID NO: 3414703 - DNA, 25 bp, Homo sapien
gcagggttgacaggactggacccat

SEQ ID NO: 3414704 - DNA, 25 bp, Homo sapien
ctgccaaggcagggttgacaggact

SEQ ID NO: 3414705 - DNA, 25 bp, Homo sapien
gactggacccatttaggttcttcac

SEQ ID NO: 3414706 - DNA, 25 bp, Homo sapien
cagctttggtggcctggtgagacac

SEQ ID NO: 3414707 - DNA, 25 bp, Homo sapien
gcttgtgttggaaacccctgggatg

SEQ ID NO: 3414708 - DNA, 25 bp, Homo sapien
gcagccccgctgcactcatgaggat

SEQ ID NO: 3414709 - DNA, 25 bp, Homo sapien
tgttttttggtggtcttgcggcttg

SEQ ID NO: 3414710 - DNA, 25 bp, Homo sapien
tcagctgtggtataatcgtcaagat

SEQ ID NO: 3414711 - DNA, 25 bp, Homo sapien
tgaagccgtggctatgacccttgga

SEQ ID NO: 3414712 - DNA, 25 bp, Homo sapien
tcaagatttactggttaggcccact

SEQ ID NO: 3414713 - DNA, 25 bp, Homo sapien
gacagccaagtctttgactctcagt

SEQ ID NO: 3414714 - DNA, 25 bp, Homo sapien
tggtgggtgccggactttctgtaga

SEQ ID NO: 3414715 - DNA, 25 bp, Homo sapien
catctggtgggtgccggactttctg

SEQ ID NO: 3414716 - DNA, 25 bp, Homo sapien
tgggtgccggactttctgtagatat

SEQ ID NO: 3414717 - DNA, 25 bp, Homo sapien
tctggtgggtgccggactttctgta

SEQ ID NO: 3414718 - DNA, 25 bp, Homo sapien
gggccgtgaggcgttccatacagat

SEQ ID NO: 3414719 - DNA, 25 bp, Homo sapien
ttaccgtaggctgcgggcccttgta

SEQ ID NO: 3414720 - DNA, 25 bp, Homo sapien
cattgttgtacatggcaaccaagca

SEQ ID NO: 3414721 - DNA, 25 bp, Homo sapien
tagacgtggccgcatctggacagct

SEQ ID NO: 3414722 - DNA, 25 bp, Homo sapien
caaaaggtaccagagatgaagggcc

SEQ ID NO: 3414723 - DNA, 25 bp, Homo sapien
ggatatgtaagagaagcccctgtcc

SEQ ID NO: 3414724 - DNA, 25 bp, Homo sapien
caccctggtgagtgatagatcttag

SEQ ID NO: 3414725 - DNA, 25 bp, Homo sapien
catgctccatgctgagggatatgta

SEQ ID NO: 3414726 - DNA, 25 bp, Homo sapien
aatggtcttgcaggttggacactgc

SEQ ID NO: 3414727 - DNA, 25 bp, Homo sapien
ttcaccccataaatggtcttgcagg

SEQ ID NO: 3414728 - DNA, 25 bp, Homo sapien
tgatccggatggttttgcagtctgg

SEQ ID NO: 3414729 - DNA, 25 bp, Homo sapien
tccctggaggttgggtgcctgtctt

SEQ ID NO: 3414730 - DNA, 25 bp, Homo sapien
ctcttcccaggattcgggtgttccg

SEQ ID NO: 3414731 - DNA, 25 bp, Homo sapien
aagcctcgggcgctgaaactcttcc

SEQ ID NO: 3414732 - DNA, 25 bp, Homo sapien
aggtaacagtgtcgtgggaagcctc

SEQ ID NO: 3414733 - DNA, 25 bp, Homo sapien
tccctttctcgctgtccggaaggta

SEQ ID NO: 3414734 - DNA, 25 bp, Homo sapien
aggagggctgctccttccacctggc

SEQ ID NO: 3414735 - DNA, 25 bp, Homo sapien
cttccatgggaagggcatgggccac

SEQ ID NO: 3414736 - DNA, 25 bp, Homo sapien
ccccttccatgggaagggcatgggc

SEQ ID NO: 3414737 - DNA, 25 bp, Homo sapien
ttccgcttgggttctctgtttgtcc

SEQ ID NO: 3414738 - DNA, 25 bp, Homo sapien
agtggtttggaaggcagtgagtgca

SEQ ID NO: 3414739 - DNA, 25 bp, Homo sapien
aaggcagtgagtgcagggaggaatg

SEQ ID NO: 3414740 - DNA, 25 bp, Homo sapien
gtttggaaggcagtgagtgcaggga

SEQ ID NO: 3414741 - DNA, 25 bp, Homo sapien
ggaaggcagtgagtgcagggaggaa

SEQ ID NO: 3414742 - DNA, 25 bp, Homo sapien
ctggtagcaggtaaaagatgaagtc

SEQ ID NO: 3414743 - DNA, 25 bp, Homo sapien
gcagtggcagggttagaagaggagt

SEQ ID NO: 3414744 - DNA, 25 bp, Homo sapien
gcaggtaaaagatgaagtcttatct

SEQ ID NO: 3414745 - DNA, 25 bp, Homo sapien
ggtaaaagatgaagtcttatctatg

SEQ ID NO: 3414746 - DNA, 25 bp, Homo sapien
tgtctgactcgcctgtggtgctgga

SEQ ID NO: 3414747 - DNA, 25 bp, Homo sapien
tagccatggccagtgagattagagc

SEQ ID NO: 3414748 - DNA, 25 bp, Homo sapien
caatggcaaaaatgaggcggcgatc

SEQ ID NO: 3414749 - DNA, 25 bp, Homo sapien
taattggcatctgggtagccatggc

SEQ ID NO: 3414750 - DNA, 25 bp, Homo sapien
ggaatcccctacttgggccaggaga

SEQ ID NO: 3414751 - DNA, 25 bp, Homo sapien
tggtgagatacaatggctgcctgcc

SEQ ID NO: 3414752 - DNA, 25 bp, Homo sapien
tcactacgggataggttggcaacag

SEQ ID NO: 3414753 - DNA, 25 bp, Homo sapien
gacaggcaggtgaatcgactatcca

SEQ ID NO: 3414754 - DNA, 25 bp, Homo sapien
caaatccctcacagataggtgcact

SEQ ID NO: 3414755 - DNA, 25 bp, Homo sapien
tacagactcagggaggtaacccaaa

SEQ ID NO: 3414756 - DNA, 25 bp, Homo sapien
ttttcccagcaatgtggtctgttcc

SEQ ID NO: 3414757 - DNA, 25 bp, Homo sapien
ggtgcactaatctacaaacagcaga

SEQ ID NO: 3414758 - DNA, 25 bp, Homo sapien
catcaagtcgttttgcggagtcaga

SEQ ID NO: 3414759 - DNA, 25 bp, Homo sapien
gaagtccgaacatgggagtttgcca

SEQ ID NO: 3414760 - DNA, 25 bp, Homo sapien
caagtcctgggttcctaactggtga

SEQ ID NO: 3414761 - DNA, 25 bp, Homo sapien
cagatccctgatggaagagctcaca

SEQ ID NO: 3414762 - DNA, 25 bp, Homo sapien
catctggtgagagttgggactttgc

SEQ ID NO: 3414763 - DNA, 25 bp, Homo sapien
gtcacagaatttgagcccgctctct

SEQ ID NO: 3414764 - DNA, 25 bp, Homo sapien
gatacccattcatttccaaccgaga

SEQ ID NO: 3414765 - DNA, 25 bp, Homo sapien
caatcaagatcttgggctgagaaga

SEQ ID NO: 3414766 - DNA, 25 bp, Homo sapien
atccagtggtagactttaaaacatc

SEQ ID NO: 3414767 - DNA, 25 bp, Homo sapien
gcttaatccagtggtagactttaaa

SEQ ID NO: 3414768 - DNA, 25 bp, Homo sapien
ctggcttaatccagtggtagacttt

SEQ ID NO: 3414769 - DNA, 25 bp, Homo sapien
taatccagtggtagactttaaaaca

SEQ ID NO: 3414770 - DNA, 25 bp, Homo sapien
gattcccaatgactccatgcttgcc

SEQ ID NO: 3414771 - DNA, 25 bp, Homo sapien
catgcttgccgtgttcctggtctca

SEQ ID NO: 3414772 - DNA, 25 bp, Homo sapien
gaaaagctcagggtgggctctctca

SEQ ID NO: 3414773 - DNA, 25 bp, Homo sapien
gataactcgatgtcgcaatgcgtga

SEQ ID NO: 3414774 - DNA, 25 bp, Homo sapien
agaatgcagcaggacgggtttagga

SEQ ID NO: 3414775 - DNA, 25 bp, Homo sapien
acgggtttaggatatccgatcctgg

SEQ ID NO: 3414776 - DNA, 25 bp, Homo sapien
gacgggtttaggatatccgatcctg

SEQ ID NO: 3414777 - DNA, 25 bp, Homo sapien
cttggtcttgatctgcatggccatg

SEQ ID NO: 3414778 - DNA, 25 bp, Homo sapien
ttggtcttgatctgcatggccatgt

SEQ ID NO: 3414779 - DNA, 25 bp, Homo sapien
gataaaagagctggggtcactggca

SEQ ID NO: 3414780 - DNA, 25 bp, Homo sapien
cttgaggaaggtcaagtacatgaaa

SEQ ID NO: 3414781 - DNA, 25 bp, Homo sapien
ttgaggaaggtcaagtacatgaaag

SEQ ID NO: 3414782 - DNA, 25 bp, Homo sapien
ccttgaggaaggtcaagtacatgaa

SEQ ID NO: 3414783 - DNA, 25 bp, Homo sapien
gctccacatgccctaagtggcttct

SEQ ID NO: 3414784 - DNA, 25 bp, Homo sapien
gagatggctccacatgccctaagtg

SEQ ID NO: 3414785 - DNA, 25 bp, Homo sapien
catgccctaagtggcttcttcctgc

SEQ ID NO: 3414786 - DNA, 25 bp, Homo sapien
gatggctccacatgccctaagtggc

SEQ ID NO: 3414787 - DNA, 25 bp, Homo sapien
tggtgctctgtaatcacgggctgga

SEQ ID NO: 3414788 - DNA, 25 bp, Homo sapien
tggagaacctctatgagcatcttct

SEQ ID NO: 3414789 - DNA, 25 bp, Homo sapien
tgtaatcacgggctggagaacctct

SEQ ID NO: 3414790 - DNA, 25 bp, Homo sapien
tcttcttgaggtcaccagtgagcat

SEQ ID NO: 3414791 - DNA, 25 bp, Homo sapien
catgtgacggaagactacaggtagc

SEQ ID NO: 3414792 - DNA, 25 bp, Homo sapien
gaactctttcactaactcgtccatg

SEQ ID NO: 3414793 - DNA, 25 bp, Homo sapien
catacacaggcttagagaaaccaag

SEQ ID NO: 3414794 - DNA, 25 bp, Homo sapien
caggtagcggtactttgattgggct

SEQ ID NO: 3414795 - DNA, 25 bp, Homo sapien
tctggagtccggacagcgacctcct

SEQ ID NO: 3414796 - DNA, 25 bp, Homo sapien
tctgccctctggagtccggacagcg

SEQ ID NO: 3414797 - DNA, 25 bp, Homo sapien
ggagtccggacagcgacctcctctg

SEQ ID NO: 3414798 - DNA, 25 bp, Homo sapien
tgccctctggagtccggacagcgac

SEQ ID NO: 3414799 - DNA, 25 bp, Homo sapien
tctagcctgaatgtgactgagtgct

SEQ ID NO: 3414800 - DNA, 25 bp, Homo sapien
cctgaccatgtcctgaaacgtgagt

SEQ ID NO: 3414801 - DNA, 25 bp, Homo sapien
caagatgccctcagactttttcaag

SEQ ID NO: 3414802 - DNA, 25 bp, Homo sapien
tatcaggacggactcccatctacat

SEQ ID NO: 3414803 - DNA, 25 bp, Homo sapien
aaggagtagcatgacaattacaaag

SEQ ID NO: 3414804 - DNA, 25 bp, Homo sapien
gtagcatgacaattacaaagttcat

SEQ ID NO: 3414805 - DNA, 25 bp, Homo sapien
tattcaaagaccactatttttctct

SEQ ID NO: 3414806 - DNA, 25 bp, Homo sapien
ctctgaatattcaaagaccactatt

SEQ ID NO: 3414807 - DNA, 25 bp, Homo sapien
cccaggttccacttaggcacagaaa

SEQ ID NO: 3414808 - DNA, 25 bp, Homo sapien
aggttccacttaggcacagaaatgt

SEQ ID NO: 3414809 - DNA, 25 bp, Homo sapien
tgtaagtaatgttggcagaggcatc

SEQ ID NO: 3414810 - DNA, 25 bp, Homo sapien
tgtgaaggatatctttgtaagtaat

SEQ ID NO: 3414811 - DNA, 25 bp, Homo sapien
gccagagatgtaatgtagatcacca

SEQ ID NO: 3414812 - DNA, 25 bp, Homo sapien
gtgtatggaggtgggaatccatcct

SEQ ID NO: 3414813 - DNA, 25 bp, Homo sapien
ttaaaacaatgagggagaggttcca

SEQ ID NO: 3414814 - DNA, 25 bp, Homo sapien
tgatcctgggaaaatctgagaatcc

SEQ ID NO: 3414815 - DNA, 25 bp, Homo sapien
acaaccaacaaaagtgatagtttgc

SEQ ID NO: 3414816 - DNA, 25 bp, Homo sapien
gactcactcagtcccatcgttgaaa

SEQ ID NO: 3414817 - DNA, 25 bp, Homo sapien
gatagtttgctgttcctgtaagagg

SEQ ID NO: 3414818 - DNA, 25 bp, Homo sapien
ggctgtcatgagacaagactcactc

SEQ ID NO: 3414819 - DNA, 25 bp, Homo sapien
gaggccagtcatgtaggctcccagt

SEQ ID NO: 3414820 - DNA, 25 bp, Homo sapien
tagggcacttgctatcccaaagaac

SEQ ID NO: 3414821 - DNA, 25 bp, Homo sapien
cacagaagtggagttgaagcaaagc

SEQ ID NO: 3414822 - DNA, 25 bp, Homo sapien
tgaatgccttggacctgcctttagc

SEQ ID NO: 3414823 - DNA, 25 bp, Homo sapien
tcttctaacttgccataacacaatc

SEQ ID NO: 3414824 - DNA, 25 bp, Homo sapien
tggaccacaaggacaagatgcagac

SEQ ID NO: 3414825 - DNA, 25 bp, Homo sapien
gcttcccgtggaccacaaggacaag

SEQ ID NO: 3414826 - DNA, 25 bp, Homo sapien
ccgtggaccacaaggacaagatgca

SEQ ID NO: 3414827 - DNA, 25 bp, Homo sapien
tcccgtggaccacaaggacaagatg

SEQ ID NO: 3414828 - DNA, 25 bp, Homo sapien
caaccaccatgcgtgtacagaggcc

SEQ ID NO: 3414829 - DNA, 25 bp, Homo sapien
tgaagcctaaatatggagctggcct

SEQ ID NO: 3414830 - DNA, 25 bp, Homo sapien
tgttgggtccgcaaaagtgaagcct

SEQ ID NO: 3414831 - DNA, 25 bp, Homo sapien
ccatagcagtcaggaggaggcactc

SEQ ID NO: 3414832 - DNA, 25 bp, Homo sapien
gaacgatgttcctccgacagtgacc

SEQ ID NO: 3414833 - DNA, 25 bp, Homo sapien
gacagtgaccaccacgaggaaattc

SEQ ID NO: 3414834 - DNA, 25 bp, Homo sapien
taaccataggagataaggagttgga

SEQ ID NO: 3414835 - DNA, 25 bp, Homo sapien
cttcaggaccgcagacactatgtaa

SEQ ID NO: 3414836 - DNA, 25 bp, Homo sapien
cacacgtgttgcaggctttccatcg

SEQ ID NO: 3414837 - DNA, 25 bp, Homo sapien
aaagggctgtcccaaacagcagagt

SEQ ID NO: 3414838 - DNA, 25 bp, Homo sapien
tgggtcgcaagtacacgaaaagggc

SEQ ID NO: 3414839 - DNA, 25 bp, Homo sapien
ccatcagatgcgaggcacacgtgtt

SEQ ID NO: 3414840 - DNA, 25 bp, Homo sapien
gtaaagtgagcctgacaacttcccc

SEQ ID NO: 3414841 - DNA, 25 bp, Homo sapien
ctttgcattggtaaagtgagcctga

SEQ ID NO: 3414842 - DNA, 25 bp, Homo sapien
cattggtaaagtgagcctgacaact

SEQ ID NO: 3414843 - DNA, 25 bp, Homo sapien
tgcattggtaaagtgagcctgacaa

SEQ ID NO: 3414844 - DNA, 25 bp, Homo sapien
ggggatgactctcttccaggtccta

SEQ ID NO: 3414845 - DNA, 25 bp, Homo sapien
tggggatgactctcttccaggtcct

SEQ ID NO: 3414846 - DNA, 25 bp, Homo sapien
gatggggatgactctcttccaggtc

SEQ ID NO: 3414847 - DNA, 25 bp, Homo sapien
gggatgactctcttccaggtcctac

SEQ ID NO: 3414848 - DNA, 25 bp, Homo sapien
gattgcaaggtatctgtcataggcc

SEQ ID NO: 3414849 - DNA, 25 bp, Homo sapien
taggcgggactcacaggtaatagtg

SEQ ID NO: 3414850 - DNA, 25 bp, Homo sapien
tgttccgcaggagaaagtacatagg

SEQ ID NO: 3414851 - DNA, 25 bp, Homo sapien
gatgaaaaaacgatgtccaggactg

SEQ ID NO: 3414852 - DNA, 25 bp, Homo sapien
cagtagaaggcatccagtgtgttgg

SEQ ID NO: 3414853 - DNA, 25 bp, Homo sapien
gagcacataacagtagaaggcatcc

SEQ ID NO: 3414854 - DNA, 25 bp, Homo sapien
cataacagtagaaggcatccagtgt

SEQ ID NO: 3414855 - DNA, 25 bp, Homo sapien
ctggagcacataacagtagaaggca

SEQ ID NO: 3414856 - DNA, 25 bp, Homo sapien
ccccagagtgggatctcagcatcac

SEQ ID NO: 3414857 - DNA, 25 bp, Homo sapien
agggtcaccagtccgttgttagaga

SEQ ID NO: 3414858 - DNA, 25 bp, Homo sapien
caccagcatgtgggacgtgcacgtg

SEQ ID NO: 3414859 - DNA, 25 bp, Homo sapien
cagtccgttgttagagatcatgaaa

SEQ ID NO: 3414860 - DNA, 25 bp, Homo sapien
gggtaatgaccgtgttattaatgga

SEQ ID NO: 3414861 - DNA, 25 bp, Homo sapien
cacaaggcacgaagtgaagagtcac

SEQ ID NO: 3414862 - DNA, 25 bp, Homo sapien
tatggttgtgtccatgggcagcgtc

SEQ ID NO: 3414863 - DNA, 25 bp, Homo sapien
ggcagcgtcatgaagggccggcagt

SEQ ID NO: 3414864 - DNA, 25 bp, Homo sapien
tccaccagaaccttgggcactgtga

SEQ ID NO: 3414865 - DNA, 25 bp, Homo sapien
ccagtttgaggacccggtggacatc

SEQ ID NO: 3414866 - DNA, 25 bp, Homo sapien
cactgtgagcccaatgcaatggtct

SEQ ID NO: 3414867 - DNA, 25 bp, Homo sapien
actaagctcacttcccgattctggg

SEQ ID NO: 3414868 - DNA, 25 bp, Homo sapien
ctattttctatcagaaggcacaagt

SEQ ID NO: 3414869 - DNA, 25 bp, Homo sapien
attttctatcagaaggcacaagtct

SEQ ID NO: 3414870 - DNA, 25 bp, Homo sapien
tttctatcagaaggcacaagtcttc

SEQ ID NO: 3414871 - DNA, 25 bp, Homo sapien
tctatcagaaggcacaagtcttctc

SEQ ID NO: 3414872 - DNA, 25 bp, Homo sapien
gttctcatattcaggatagtaaagc

SEQ ID NO: 3414873 - DNA, 25 bp, Homo sapien
ctcatattcaggatagtaaagccta

SEQ ID NO: 3414874 - DNA, 25 bp, Homo sapien
tcaggatagtaaagcctaaaatgtt

SEQ ID NO: 3414875 - DNA, 25 bp, Homo sapien
ttcaggatagtaaagcctaaaatgt

SEQ ID NO: 3414876 - DNA, 25 bp, Homo sapien
tccatttgtaggtggttgggagaaa

SEQ ID NO: 3414877 - DNA, 25 bp, Homo sapien
ccagttggagagtcatgatcctcct

SEQ ID NO: 3414878 - DNA, 25 bp, Homo sapien
tgggagaaaaccagttggagagtca

SEQ ID NO: 3414879 - DNA, 25 bp, Homo sapien
ccatcagtaggtccatttgtaggtg

SEQ ID NO: 3414880 - DNA, 25 bp, Homo sapien
tccattgaatcatcctctttattct

SEQ ID NO: 3414881 - DNA, 25 bp, Homo sapien
cattgaatcatcctctttattctct

SEQ ID NO: 3414882 - DNA, 25 bp, Homo sapien
ccattgaatcatcctctttattctc

SEQ ID NO: 3414883 - DNA, 25 bp, Homo sapien
ctccattgaatcatcctctttattc

SEQ ID NO: 3414884 - DNA, 25 bp, Homo sapien
cactgtgagcccaatgcaacggtct

SEQ ID NO: 3414885 - DNA, 25 bp, Homo sapien
agtcgtcatgtacaccaagagtagg

SEQ ID NO: 3414886 - DNA, 25 bp, Homo sapien
tctgtatgggcgagtttgagaacct

SEQ ID NO: 3414887 - DNA, 25 bp, Homo sapien
tgtccccattctgggttaggccaag

SEQ ID NO: 3414888 - DNA, 25 bp, Homo sapien
gcctgagacttgagtaatgataata

SEQ ID NO: 3414889 - DNA, 25 bp, Homo sapien
cctgcctgagacttgagtaatgata

SEQ ID NO: 3414890 - DNA, 25 bp, Homo sapien
gagacttgagtaatgataatatgac

SEQ ID NO: 3414891 - DNA, 25 bp, Homo sapien
ctatcctgcctgagacttgagtaat

SEQ ID NO: 3414892 - DNA, 25 bp, Homo sapien
ccgggcatagacatagatgcagggc

SEQ ID NO: 3414893 - DNA, 25 bp, Homo sapien
tggttgacttcatctcatggtttct

SEQ ID NO: 3414894 - DNA, 25 bp, Homo sapien
gacttcatctcatggtttctcagag

SEQ ID NO: 3414895 - DNA, 25 bp, Homo sapien
tgtagatcaagggttgagcagaggg

SEQ ID NO: 3414896 - DNA, 25 bp, Homo sapien
tctcagagtgtagatcaagggttga

SEQ ID NO: 3414897 - DNA, 25 bp, Homo sapien
tatgtagcgcttcactaaattgcgt

SEQ ID NO: 3414898 - DNA, 25 bp, Homo sapien
tgctaatctcctctacattgttgca

SEQ ID NO: 3414899 - DNA, 25 bp, Homo sapien
cttcactaaattgcgtgccatcctg

SEQ ID NO: 3414900 - DNA, 25 bp, Homo sapien
taatctcctctacattgttgcattg

SEQ ID NO: 3414901 - DNA, 25 bp, Homo sapien
cttgggattgagtaagtcccagaaa

SEQ ID NO: 3414902 - DNA, 25 bp, Homo sapien
aaactctggtcttgggattgagtaa

SEQ ID NO: 3414903 - DNA, 25 bp, Homo sapien
ctctggtcttgggattgagtaagtc

SEQ ID NO: 3414904 - DNA, 25 bp, Homo sapien
tggtcttgggattgagtaagtccca

SEQ ID NO: 3414905 - DNA, 25 bp, Homo sapien
taaaccacagggtagtgaccaggcc

SEQ ID NO: 3414906 - DNA, 25 bp, Homo sapien
tcaaggatggctagattgcggagca

SEQ ID NO: 3414907 - DNA, 25 bp, Homo sapien
tgagacctcagcgtcattaggatga

SEQ ID NO: 3414908 - DNA, 25 bp, Homo sapien
aatgtctgccccaccaaggaggtgg

SEQ ID NO: 3414909 - DNA, 25 bp, Homo sapien
ccctttcagaaggcacgagtcttct

SEQ ID NO: 3414910 - DNA, 25 bp, Homo sapien
cctttcagaaggcacgagtcttctc

SEQ ID NO: 3414911 - DNA, 25 bp, Homo sapien
aataagacctggctcagttctcggg

SEQ ID NO: 3414912 - DNA, 25 bp, Homo sapien
gaagatctatcaggaccttaggagc

SEQ ID NO: 3414913 - DNA, 25 bp, Homo sapien
caagaatagacaggttgcggagcag

SEQ ID NO: 3414914 - DNA, 25 bp, Homo sapien
gaagaacatttgagtgacacagcca

SEQ ID NO: 3414915 - DNA, 25 bp, Homo sapien
caggaagccacgatgaggcctgtgc

SEQ ID NO: 3414916 - DNA, 25 bp, Homo sapien
tcgccccctactcatgatggtcata

SEQ ID NO: 3414917 - DNA, 25 bp, Homo sapien
gagaaatctgcgctatggagtggac

SEQ ID NO: 3414918 - DNA, 25 bp, Homo sapien
agtgggagcaatagagaaatctgcg

SEQ ID NO: 3414919 - DNA, 25 bp, Homo sapien
tcctgattcctcagcgtgtaaatta

SEQ ID NO: 3414920 - DNA, 25 bp, Homo sapien
ttcctgattcctcagcgtgtaaatt

SEQ ID NO: 3414921 - DNA, 25 bp, Homo sapien
cctgattcctcagcgtgtaaattat

SEQ ID NO: 3414922 - DNA, 25 bp, Homo sapien
tgtcctagccgtctcttcagtttcc

SEQ ID NO: 3414923 - DNA, 25 bp, Homo sapien
tctgattgtcctagccgtctcttca

SEQ ID NO: 3414924 - DNA, 25 bp, Homo sapien
ctttctgattgtcctagccgtctct

SEQ ID NO: 3414925 - DNA, 25 bp, Homo sapien
attgtcctagccgtctcttcagttt

SEQ ID NO: 3414926 - DNA, 25 bp, Homo sapien
taatagattgagtggcacaggtaaa

SEQ ID NO: 3414927 - DNA, 25 bp, Homo sapien
cttctaatagattgagtggcacagg

SEQ ID NO: 3414928 - DNA, 25 bp, Homo sapien
ttctaatagattgagtggcacaggt

SEQ ID NO: 3414929 - DNA, 25 bp, Homo sapien
tctaatagattgagtggcacaggta

SEQ ID NO: 3414930 - DNA, 25 bp, Homo sapien
ggtttttgaagttgagcagccagaa

SEQ ID NO: 3414931 - DNA, 25 bp, Homo sapien
accagtccatttgtatcagagccag

SEQ ID NO: 3414932 - DNA, 25 bp, Homo sapien
tcagagccagggaaatgatcaccaa

SEQ ID NO: 3414933 - DNA, 25 bp, Homo sapien
ggctccaagaatcgcctctgcatgg

SEQ ID NO: 3414934 - DNA, 25 bp, Homo sapien
gatgaggaggttacccagcacagtt

SEQ ID NO: 3414935 - DNA, 25 bp, Homo sapien
atgaggaggttacccagcacagttg

SEQ ID NO: 3414936 - DNA, 25 bp, Homo sapien
tctgtgtcatgcaaccattgaagga

SEQ ID NO: 3414937 - DNA, 25 bp, Homo sapien
tattagcaccttccgagcagtgatg

SEQ ID NO: 3414938 - DNA, 25 bp, Homo sapien
gaagcagataaccaacacagagaga

SEQ ID NO: 3414939 - DNA, 25 bp, Homo sapien
tctgcttgaaaggtctattagcacc

SEQ ID NO: 3414940 - DNA, 25 bp, Homo sapien
ttgaagatggccatgtattggtcaa

SEQ ID NO: 3414941 - DNA, 25 bp, Homo sapien
gatgtaggggagcactgtcccctac

SEQ ID NO: 3414942 - DNA, 25 bp, Homo sapien
aaccacagcatagagatcaagccat

SEQ ID NO: 3414943 - DNA, 25 bp, Homo sapien
tcacagtagaaaccatcaatcatat

SEQ ID NO: 3414944 - DNA, 25 bp, Homo sapien
taagacctcaagagcaaaggtgtgg

SEQ ID NO: 3414945 - DNA, 25 bp, Homo sapien
agatatgaggagaaagatgaaccac

SEQ ID NO: 3414946 - DNA, 25 bp, Homo sapien
tcagttctgattttccaatctggac

SEQ ID NO: 3414947 - DNA, 25 bp, Homo sapien
gcatctatccctttccagaaggtct

SEQ ID NO: 3414948 - DNA, 25 bp, Homo sapien
ggacttcgtagcatctatccctttc

SEQ ID NO: 3414949 - DNA, 25 bp, Homo sapien
tttccaatctggacttcgtagcatc

SEQ ID NO: 3414950 - DNA, 25 bp, Homo sapien
atggttccagccacaggtacgtcag

SEQ ID NO: 3414951 - DNA, 25 bp, Homo sapien
tggttccagccacaggtacgtcagg

SEQ ID NO: 3414952 - DNA, 25 bp, Homo sapien
ccagccacaggtacgtcaggattgc

SEQ ID NO: 3414953 - DNA, 25 bp, Homo sapien
gttccagccacaggtacgtcaggat

SEQ ID NO: 3414954 - DNA, 25 bp, Homo sapien
gcaaatggttctttacttctcttac

SEQ ID NO: 3414955 - DNA, 25 bp, Homo sapien
tcaatcacactgagcaaatggttct

SEQ ID NO: 3414956 - DNA, 25 bp, Homo sapien
tgagcaaatggttctttacttctct

SEQ ID NO: 3414957 - DNA, 25 bp, Homo sapien
caatcacactgagcaaatggttctt

SEQ ID NO: 3414958 - DNA, 25 bp, Homo sapien
taactccaaatgtggtagagacagc

SEQ ID NO: 3414959 - DNA, 25 bp, Homo sapien
gagaagagacagattgggcttaact

SEQ ID NO: 3414960 - DNA, 25 bp, Homo sapien
agaagagacagattgggcttaactc

SEQ ID NO: 3414961 - DNA, 25 bp, Homo sapien
gccttggaaccagagcaactgcatc

SEQ ID NO: 3414962 - DNA, 25 bp, Homo sapien
acaggctgtggtaaagaagctggcc

SEQ ID NO: 3414963 - DNA, 25 bp, Homo sapien
caaccttctgtcagaggccttggaa

SEQ ID NO: 3414964 - DNA, 25 bp, Homo sapien
tggtctaaaaagatgaggaactctc

SEQ ID NO: 3414965 - DNA, 25 bp, Homo sapien
aaatcttcctatttcgttcatacat

SEQ ID NO: 3414966 - DNA, 25 bp, Homo sapien
cttctcctaagccttgcttgggcca

SEQ ID NO: 3414967 - DNA, 25 bp, Homo sapien
ttctcctaagccttgcttgggccat

SEQ ID NO: 3414968 - DNA, 25 bp, Homo sapien
tctacggcttgtttcccgcctgctg

SEQ ID NO: 3414969 - DNA, 25 bp, Homo sapien
cgtgtctcaagaatttctacggctt

SEQ ID NO: 3414970 - DNA, 25 bp, Homo sapien
cagcccggtttctcttagcgctcgg

SEQ ID NO: 3414971 - DNA, 25 bp, Homo sapien
caggaagctggcgacgaacccgtgt

SEQ ID NO: 3414972 - DNA, 25 bp, Homo sapien
caatgtttctgtgcggtcgtgctcc

SEQ ID NO: 3414973 - DNA, 25 bp, Homo sapien
tctctgtgcacaatcgccggatgtc

SEQ ID NO: 3414974 - DNA, 25 bp, Homo sapien
gctggagacgcagacattttgacaa

SEQ ID NO: 3414975 - DNA, 25 bp, Homo sapien
taacattttgcgagcccaatcgtgg

SEQ ID NO: 3414976 - DNA, 25 bp, Homo sapien
tctccgcgatgaacacatcagggga

SEQ ID NO: 3414977 - DNA, 25 bp, Homo sapien
acaagtaagtgtggaacctttgtct

SEQ ID NO: 3414978 - DNA, 25 bp, Homo sapien
gatgaacacatcaggggaggcactt

SEQ ID NO: 3414979 - DNA, 25 bp, Homo sapien
actttctttccacaagtaagtgtgg

SEQ ID NO: 3414980 - DNA, 25 bp, Homo sapien
ttctctaactatctagaagtccaat

SEQ ID NO: 3414981 - DNA, 25 bp, Homo sapien
tttctctaactatctagaagtccaa

SEQ ID NO: 3414982 - DNA, 25 bp, Homo sapien
tctctaactatctagaagtccaatg

SEQ ID NO: 3414983 - DNA, 25 bp, Homo sapien
cgaacccacgcggatatgaatccat

SEQ ID NO: 3414984 - DNA, 25 bp, Homo sapien
gaacccacgcggatatgaatccatt

SEQ ID NO: 3414985 - DNA, 25 bp, Homo sapien
cccacgcggatatgaatccattgga

SEQ ID NO: 3414986 - DNA, 25 bp, Homo sapien
cgcggatatgaatccattggatctt

SEQ ID NO: 3414987 - DNA, 25 bp, Homo sapien
ttagatcaaagcttcctttgaagtt

SEQ ID NO: 3414988 - DNA, 25 bp, Homo sapien
tagatcaaagcttcctttgaagttt

SEQ ID NO: 3414989 - DNA, 25 bp, Homo sapien
agatcaaagcttcctttgaagtttt

SEQ ID NO: 3414990 - DNA, 25 bp, Homo sapien
cttagatcaaagcttcctttgaagt

SEQ ID NO: 3414991 - DNA, 25 bp, Homo sapien
tagctaaagcatccattgaaagatt

SEQ ID NO: 3414992 - DNA, 25 bp, Homo sapien
tttgatcaggcaagctacaggctgg

SEQ ID NO: 3414993 - DNA, 25 bp, Homo sapien
tgtgtcccagacgtacctaattagt

SEQ ID NO: 3414994 - DNA, 25 bp, Homo sapien
tgttaccttggtagctgtgtcccag

SEQ ID NO: 3414995 - DNA, 25 bp, Homo sapien
gatgatgcctgaaccgagctgtgga

SEQ ID NO: 3414996 - DNA, 25 bp, Homo sapien
tagcgactgggcacctgaagacttg

SEQ ID NO: 3414997 - DNA, 25 bp, Homo sapien
agttttccagggagtgatgatgcct

SEQ ID NO: 3414998 - DNA, 25 bp, Homo sapien
tcggcacccgaattaagagccaagt

SEQ ID NO: 3414999 - DNA, 25 bp, Homo sapien
gcgcgttggtggtgggatgccagcc

SEQ ID NO: 3415000 - DNA, 25 bp, Homo sapien
cgcgttggtggtgggatgccagcct

SEQ ID NO: 3415001 - DNA, 25 bp, Homo sapien
gacgcgcaaaacagaagaccctagt

SEQ ID NO: 3415002 - DNA, 25 bp, Homo sapien
ctggaagacgcgcaaaacagaagac

SEQ ID NO: 3415003 - DNA, 25 bp, Homo sapien
gcgcaaaacagaagaccctagtcac

SEQ ID NO: 3415004 - DNA, 25 bp, Homo sapien
gaagacgcgcaaaacagaagaccct

SEQ ID NO: 3415005 - DNA, 25 bp, Homo sapien
gagtgcaaaccgcactctcggaact

SEQ ID NO: 3415006 - DNA, 25 bp, Homo sapien
gccgcaaagacaaagtctcggccct

SEQ ID NO: 3415007 - DNA, 25 bp, Homo sapien
tactggggccgcaaagacaaagtct

SEQ ID NO: 3415008 - DNA, 25 bp, Homo sapien
ctctcggaactaagcaagtactggg

SEQ ID NO: 3415009 - DNA, 25 bp, Homo sapien
aggtttccaataatcgattggactc

SEQ ID NO: 3415010 - DNA, 25 bp, Homo sapien
caataatcgattggactcagtaagt

SEQ ID NO: 3415011 - DNA, 25 bp, Homo sapien
gattggactcagtaagtggctactt

SEQ ID NO: 3415012 - DNA, 25 bp, Homo sapien
taatcgattggactcagtaagtggc

SEQ ID NO: 3415013 - DNA, 25 bp, Homo sapien
cctccgggtaaacagcgggattgct

SEQ ID NO: 3415014 - DNA, 25 bp, Homo sapien
gatttaagacatttgaccgggcctc

SEQ ID NO: 3415015 - DNA, 25 bp, Homo sapien
tggaatttcccaggaggaatcctcc

SEQ ID NO: 3415016 - DNA, 25 bp, Homo sapien
tctttgaggagtcagtcctagagct

SEQ ID NO: 3415017 - DNA, 25 bp, Homo sapien
gcgtttgcttagtctatccacagga

SEQ ID NO: 3415018 - DNA, 25 bp, Homo sapien
caaaattgacaatgagcaggcgttc

SEQ ID NO: 3415019 - DNA, 25 bp, Homo sapien
caggcgttcagcaaaatcgagtctt

SEQ ID NO: 3415020 - DNA, 25 bp, Homo sapien
tcatagacgataaagacccaaaaag

SEQ ID NO: 3415021 - DNA, 25 bp, Homo sapien
cccggaccctcagattaaaagtctg

SEQ ID NO: 3415022 - DNA, 25 bp, Homo sapien
gatgctctaccgactgagctatccg

SEQ ID NO: 3415023 - DNA, 25 bp, Homo sapien
taaaagtctgatgctctaccgactg

SEQ ID NO: 3415024 - DNA, 25 bp, Homo sapien
ctctaccgactgagctatccgggcc

SEQ ID NO: 3415025 - DNA, 25 bp, Homo sapien
aaatttccttgacagggcgggactg

SEQ ID NO: 3415026 - DNA, 25 bp, Homo sapien
caagttctggtttccctcaaggagg

SEQ ID NO: 3415027 - DNA, 25 bp, Homo sapien
tattgaggtggccaacacgcctgtt

SEQ ID NO: 3415028 - DNA, 25 bp, Homo sapien
taagaatctggtgaaggactgcgtc

SEQ ID NO: 3415029 - DNA, 25 bp, Homo sapien
acaagggtggagagctctgggtccc

SEQ ID NO: 3415030 - DNA, 25 bp, Homo sapien
gctggagcgagaggacaagggtgga

SEQ ID NO: 3415031 - DNA, 25 bp, Homo sapien
agagctctgggtccccccagtcttt

SEQ ID NO: 3415032 - DNA, 25 bp, Homo sapien
caggctggagcgagaggacaagggt

SEQ ID NO: 3415033 - DNA, 25 bp, Homo sapien
gcgatcctcgctgctcctaggaaga

SEQ ID NO: 3415034 - DNA, 25 bp, Homo sapien
tatgcccatattcagatgactcgag

SEQ ID NO: 3415035 - DNA, 25 bp, Homo sapien
gaaatatgtgcccaatatgcccata

SEQ ID NO: 3415036 - DNA, 25 bp, Homo sapien
catattgtaataggagaggaaccat

SEQ ID NO: 3415037 - DNA, 25 bp, Homo sapien
caactggatgcgctttgggttcagg

SEQ ID NO: 3415038 - DNA, 25 bp, Homo sapien
ttcagggctaagacacgcgtaggcg

SEQ ID NO: 3415039 - DNA, 25 bp, Homo sapien
agaactgaggattcacgtttgccac

SEQ ID NO: 3415040 - DNA, 25 bp, Homo sapien
cagacagttcaattcgtgggcggct

SEQ ID NO: 3415041 - DNA, 25 bp, Homo sapien
tgttccttaactgctgagcctcagc

SEQ ID NO: 3415042 - DNA, 25 bp, Homo sapien
gatcacaaattgaggtgccttcctt

SEQ ID NO: 3415043 - DNA, 25 bp, Homo sapien
tggatagagtgagaattccccaact

SEQ ID NO: 3415044 - DNA, 25 bp, Homo sapien
ggcttctttcaaggaggctcataaa

SEQ ID NO: 3415045 - DNA, 25 bp, Homo sapien
ccacctctggaataatgtgttaaat

SEQ ID NO: 3415046 - DNA, 25 bp, Homo sapien
tctttaatagcaactggagaccact

SEQ ID NO: 3415047 - DNA, 25 bp, Homo sapien
aatggagtgtccacgcggagataac

SEQ ID NO: 3415048 - DNA, 25 bp, Homo sapien
gataactgcgatattggaacacctg

SEQ ID NO: 3415049 - DNA, 25 bp, Homo sapien
cacataagacttaccaatggaggca

SEQ ID NO: 3415050 - DNA, 25 bp, Homo sapien
gacacttagctctcaggtagcctgg

SEQ ID NO: 3415051 - DNA, 25 bp, Homo sapien
aacgctttctccatacaggcctgca

SEQ ID NO: 3415052 - DNA, 25 bp, Homo sapien
ggcaaacactcctggcaatgtgggt

SEQ ID NO: 3415053 - DNA, 25 bp, Homo sapien
tatgaaagagaccagcgtatccgac

SEQ ID NO: 3415054 - DNA, 25 bp, Homo sapien
cacacacagggtggcttcggtattc

SEQ ID NO: 3415055 - DNA, 25 bp, Homo sapien
cacagggtggcttcggtattccgtc

SEQ ID NO: 3415056 - DNA, 25 bp, Homo sapien
cacacagggtggcttcggtattccg

SEQ ID NO: 3415057 - DNA, 25 bp, Homo sapien
cacacacacagggtggcttcggtat

SEQ ID NO: 3415058 - DNA, 25 bp, Homo sapien
gctcccttcacattcagacataagg

SEQ ID NO: 3415059 - DNA, 25 bp, Homo sapien
tcccttcacattcagacataagggc

SEQ ID NO: 3415060 - DNA, 25 bp, Homo sapien
tgctcccttcacattcagacataag

SEQ ID NO: 3415061 - DNA, 25 bp, Homo sapien
ccttcacattcagacataagggcat

SEQ ID NO: 3415062 - DNA, 25 bp, Homo sapien
tccaaaactcaaggttattcgtagc

SEQ ID NO: 3415063 - DNA, 25 bp, Homo sapien
aggttattcgtagctctggatgtac

SEQ ID NO: 3415064 - DNA, 25 bp, Homo sapien
aactcaaggttattcgtagctctgg

SEQ ID NO: 3415065 - DNA, 25 bp, Homo sapien
ccagtctccaaaactcaaggttatt

SEQ ID NO: 3415066 - DNA, 25 bp, Homo sapien
cgtttggagagcgtctgtgcttcca

SEQ ID NO: 3415067 - DNA, 25 bp, Homo sapien
cacatgggtgcaattattaattctg

SEQ ID NO: 3415068 - DNA, 25 bp, Homo sapien
accagcacatgggtgcaattattaa

SEQ ID NO: 3415069 - DNA, 25 bp, Homo sapien
gctcccggcctttccagtcattagt

SEQ ID NO: 3415070 - DNA, 25 bp, Homo sapien
tcacgaaagtgaaaagcccctggac

SEQ ID NO: 3415071 - DNA, 25 bp, Homo sapien
ctgtcacgaaagtgaaaagcccctg

SEQ ID NO: 3415072 - DNA, 25 bp, Homo sapien
tgtcacgaaagtgaaaagcccctgg

SEQ ID NO: 3415073 - DNA, 25 bp, Homo sapien
cacgaaagtgaaaagcccctggacg

SEQ ID NO: 3415074 - DNA, 25 bp, Homo sapien
ggattgacagcccaggggtcggagc

SEQ ID NO: 3415075 - DNA, 25 bp, Homo sapien
gattgacagcccaggggtcggagcc

SEQ ID NO: 3415076 - DNA, 25 bp, Homo sapien
ctgtgcggattgacagcccaggggt

SEQ ID NO: 3415077 - DNA, 25 bp, Homo sapien
tgcggattgacagcccaggggtcgg

SEQ ID NO: 3415078 - DNA, 25 bp, Homo sapien
gcattaccgccagccggcaccgcag

SEQ ID NO: 3415079 - DNA, 25 bp, Homo sapien
agtcccagctccggcattaccgcca

SEQ ID NO: 3415080 - DNA, 25 bp, Homo sapien
cagctccggcattaccgccagccgg

SEQ ID NO: 3415081 - DNA, 25 bp, Homo sapien
gctccggcattaccgccagccggca

SEQ ID NO: 3415082 - DNA, 25 bp, Homo sapien
gagctactacaggtaactgcttccg

SEQ ID NO: 3415083 - DNA, 25 bp, Homo sapien
tgagcaacgggctcctgagctacta

SEQ ID NO: 3415084 - DNA, 25 bp, Homo sapien
gctactacaggtaactgcttccggg

SEQ ID NO: 3415085 - DNA, 25 bp, Homo sapien
cagcggcgatggttcgtgctgagca

SEQ ID NO: 3415086 - DNA, 25 bp, Homo sapien
tggctcttcaaatggaccaattata

SEQ ID NO: 3415087 - DNA, 25 bp, Homo sapien
ctcggctcgagagggctggctcttc

SEQ ID NO: 3415088 - DNA, 25 bp, Homo sapien
ccctgcgccgccgactgggggctcg

SEQ ID NO: 3415089 - DNA, 25 bp, Homo sapien
gttcgggctcggctcgagagggctg

SEQ ID NO: 3415090 - DNA, 25 bp, Homo sapien
gcgcggcggtggctgatgcggtagc

SEQ ID NO: 3415091 - DNA, 25 bp, Homo sapien
agcggcaccaatcgacgtccttctt

SEQ ID NO: 3415092 - DNA, 25 bp, Homo sapien
cggcgacggcggctctcgtaggcgg

SEQ ID NO: 3415093 - DNA, 25 bp, Homo sapien
tctcgtaggcggttccggtcttgta

SEQ ID NO: 3415094 - DNA, 25 bp, Homo sapien
tcccaccaacttgccaaaggctgaa

SEQ ID NO: 3415095 - DNA, 25 bp, Homo sapien
ctcccaccaacttgccaaaggctga

SEQ ID NO: 3415096 - DNA, 25 bp, Homo sapien
tacaagagaacgcatagcagaaaat

SEQ ID NO: 3415097 - DNA, 25 bp, Homo sapien
gctagattccctaaagtacggcgct

SEQ ID NO: 3415098 - DNA, 25 bp, Homo sapien
cactgggaagcacattggcaaagaa

SEQ ID NO: 3415099 - DNA, 25 bp, Homo sapien
aataacgatttcctgctacaagaga

SEQ ID NO: 3415100 - DNA, 25 bp, Homo sapien
tcctcatgccttcgcaggaagatga

SEQ ID NO: 3415101 - DNA, 25 bp, Homo sapien
ctcatgccttcgcaggaagatgact

SEQ ID NO: 3415102 - DNA, 25 bp, Homo sapien
ctcctcatgccttcgcaggaagatg

SEQ ID NO: 3415103 - DNA, 25 bp, Homo sapien
cctcctcatgccttcgcaggaagat

SEQ ID NO: 3415104 - DNA, 25 bp, Homo sapien
aggaggctcatacagcatattatcg

SEQ ID NO: 3415105 - DNA, 25 bp, Homo sapien
gaggtgacgcaggtaatgggcagca

SEQ ID NO: 3415106 - DNA, 25 bp, Homo sapien
tcagtagcttgtggaggtgacgcag

SEQ ID NO: 3415107 - DNA, 25 bp, Homo sapien
agagcaggaggctcatacagcatat

SEQ ID NO: 3415108 - DNA, 25 bp, Homo sapien
tgttccccagtgatgttacctagct

SEQ ID NO: 3415109 - DNA, 25 bp, Homo sapien
tcacaaccaatcaagtgaatacttg

SEQ ID NO: 3415110 - DNA, 25 bp, Homo sapien
tcccatgctgtaaccccaggctcca

SEQ ID NO: 3415111 - DNA, 25 bp, Homo sapien
agcttccctctaccgttgtctactg

SEQ ID NO: 3415112 - DNA, 25 bp, Homo sapien
gctgaggtatgaaaatcatttaaac

SEQ ID NO: 3415113 - DNA, 25 bp, Homo sapien
cggtaggctgaggtatgaaaatcat

SEQ ID NO: 3415114 - DNA, 25 bp, Homo sapien
ggtaggctgaggtatgaaaatcatt

SEQ ID NO: 3415115 - DNA, 25 bp, Homo sapien
taggctgaggtatgaaaatcattta

SEQ ID NO: 3415116 - DNA, 25 bp, Homo sapien
gaagacctacagagttcagaccctg

SEQ ID NO: 3415117 - DNA, 25 bp, Homo sapien
cctcctgagccgtggtgaagaccta

SEQ ID NO: 3415118 - DNA, 25 bp, Homo sapien
tgttggctgcgcctggtcactgcta

SEQ ID NO: 3415119 - DNA, 25 bp, Homo sapien
aacagagaggcgtgttggacaccat

SEQ ID NO: 3415120 - DNA, 25 bp, Homo sapien
cattctgtctaagactttgtatttc

SEQ ID NO: 3415121 - DNA, 25 bp, Homo sapien
tttattaacattctgtctaagactt

SEQ ID NO: 3415122 - DNA, 25 bp, Homo sapien
taatggaaagtttctctttatacca

SEQ ID NO: 3415123 - DNA, 25 bp, Homo sapien
atggaaagtttctctttataccatg

SEQ ID NO: 3415124 - DNA, 25 bp, Homo sapien
tgcagtgcaatggcgatatcttgtc

SEQ ID NO: 3415125 - DNA, 25 bp, Homo sapien
cagtgcaatggcgatatcttgtctc

SEQ ID NO: 3415126 - DNA, 25 bp, Homo sapien
tgcctcccaggttcaagcagttctc

SEQ ID NO: 3415127 - DNA, 25 bp, Homo sapien
actgcaacccctgcctcccaggttc

SEQ ID NO: 3415128 - DNA, 25 bp, Homo sapien
tggaattcaacagccttgggttctg

SEQ ID NO: 3415129 - DNA, 25 bp, Homo sapien
cattgattgtctggaagcactcttg

SEQ ID NO: 3415130 - DNA, 25 bp, Homo sapien
gcttggcctttaacctatcttggag

SEQ ID NO: 3415131 - DNA, 25 bp, Homo sapien
cccaagccggaatgtggttgtgcaa

SEQ ID NO: 3415132 - DNA, 25 bp, Homo sapien
tagtgtgaataatccccgaaaaatg

SEQ ID NO: 3415133 - DNA, 25 bp, Homo sapien
taagaacgtctgatttgtgaccact

SEQ ID NO: 3415134 - DNA, 25 bp, Homo sapien
ctttggattgggtagctctggctgc

SEQ ID NO: 3415135 - DNA, 25 bp, Homo sapien
catgtaccctataacctgcacgtgt

SEQ ID NO: 3415136 - DNA, 25 bp, Homo sapien
ctcaggtggccaaactggagcacgc

SEQ ID NO: 3415137 - DNA, 25 bp, Homo sapien
tgatggccctaagaaggagcgcacc

SEQ ID NO: 3415138 - DNA, 25 bp, Homo sapien
tgaacttgtgttactgtcactggca

SEQ ID NO: 3415139 - DNA, 25 bp, Homo sapien
ggagcacgcctataagccaggtaag

SEQ ID NO: 3415140 - DNA, 25 bp, Homo sapien
tagaggctgacaagttcgaaatctg

SEQ ID NO: 3415141 - DNA, 25 bp, Homo sapien
ggatgagctccacccacattattga

SEQ ID NO: 3415142 - DNA, 25 bp, Homo sapien
gaaataagtatagcaggtcagcagt

SEQ ID NO: 3415143 - DNA, 25 bp, Homo sapien
acaggtaaaagctcaagttgcagtc

SEQ ID NO: 3415144 - DNA, 25 bp, Homo sapien
gctgaaagtggcgacgaagtccgcc

SEQ ID NO: 3415145 - DNA, 25 bp, Homo sapien
ccaggctaagcgcaggattcttcaa

SEQ ID NO: 3415146 - DNA, 25 bp, Homo sapien
ttcttttttccctgcgcaaggcgca

SEQ ID NO: 3415147 - DNA, 25 bp, Homo sapien
tgagtcggacgttggaaaaactgcc

SEQ ID NO: 3415148 - DNA, 25 bp, Homo sapien
aaacgggtggctggccagattggac

SEQ ID NO: 3415149 - DNA, 25 bp, Homo sapien
cttgatctacatggcaccaattctt

SEQ ID NO: 3415150 - DNA, 25 bp, Homo sapien
tgggccatagtctgctaacccttga

SEQ ID NO: 3415151 - DNA, 25 bp, Homo sapien
ctggccagattggactgtgggccat

SEQ ID NO: 3415152 - DNA, 25 bp, Homo sapien
ggtggaataccaagagaactagaat

SEQ ID NO: 3415153 - DNA, 25 bp, Homo sapien
caggtaaggaggtgcttcttatgca

SEQ ID NO: 3415154 - DNA, 25 bp, Homo sapien
agtcactgcaggtgcggtggaatac

SEQ ID NO: 3415155 - DNA, 25 bp, Homo sapien
ggaagggacacggagctcccatgcc

SEQ ID NO: 3415156 - DNA, 25 bp, Homo sapien
agatcacgtcatctgtaaacacgta

SEQ ID NO: 3415157 - DNA, 25 bp, Homo sapien
ttttggtggagcctctaggattttg

SEQ ID NO: 3415158 - DNA, 25 bp, Homo sapien
gagcctctaggattttgtatataca

SEQ ID NO: 3415159 - DNA, 25 bp, Homo sapien
catctgtaaacacgtaaaatctaac

SEQ ID NO: 3415160 - DNA, 25 bp, Homo sapien
ggcggatcactggtggttaggagct

SEQ ID NO: 3415161 - DNA, 25 bp, Homo sapien
gaggctggcggatcactggtggtta

SEQ ID NO: 3415162 - DNA, 25 bp, Homo sapien
ggctggcggatcactggtggttagg

SEQ ID NO: 3415163 - DNA, 25 bp, Homo sapien
ccgaggctggcggatcactggtggt

SEQ ID NO: 3415164 - DNA, 25 bp, Homo sapien
tttcctggctaatctggcagttcta

SEQ ID NO: 3415165 - DNA, 25 bp, Homo sapien
gcaaacctcctttcaatgggcaaaa

SEQ ID NO: 3415166 - DNA, 25 bp, Homo sapien
ccatcacgggatgtggcacccagat

SEQ ID NO: 3415167 - DNA, 25 bp, Homo sapien
cctcggtggaaatgctacaattgca

SEQ ID NO: 3415168 - DNA, 25 bp, Homo sapien
agtggaagtgtaccactcccctctg

SEQ ID NO: 3415169 - DNA, 25 bp, Homo sapien
gtggaagtgtaccactcccctctgg

SEQ ID NO: 3415170 - DNA, 25 bp, Homo sapien
tggaagtgtaccactcccctctggt

SEQ ID NO: 3415171 - DNA, 25 bp, Homo sapien
aagtggaagtgtaccactcccctct

SEQ ID NO: 3415172 - DNA, 25 bp, Homo sapien
cttggtgcaacatcaaggccacaat

SEQ ID NO: 3415173 - DNA, 25 bp, Homo sapien
ggtgcaacatcaaggccacaattat

SEQ ID NO: 3415174 - DNA, 25 bp, Homo sapien
aggccacaattataaaggaagccac

SEQ ID NO: 3415175 - DNA, 25 bp, Homo sapien
aacatcaaggccacaattataaagg

SEQ ID NO: 3415176 - DNA, 25 bp, Homo sapien
actgtgggcccaaaggtgaagtgtc

SEQ ID NO: 3415177 - DNA, 25 bp, Homo sapien
tatggaggaagggatcttgccagac

SEQ ID NO: 3415178 - DNA, 25 bp, Homo sapien
gggcccaaaggtgaagtgtccaaca

SEQ ID NO: 3415179 - DNA, 25 bp, Homo sapien
ccaaaggtgaagtgtccaacaaggc

SEQ ID NO: 3415180 - DNA, 25 bp, Homo sapien
ccatagccagggagggagataagca

SEQ ID NO: 3415181 - DNA, 25 bp, Homo sapien
tggtggagtagccaatttccaacat

SEQ ID NO: 3415182 - DNA, 25 bp, Homo sapien
gcatcttccccatgtaaaggacggt

SEQ ID NO: 3415183 - DNA, 25 bp, Homo sapien
tgacaaagagcatctgagttccata

SEQ ID NO: 3415184 - DNA, 25 bp, Homo sapien
gatgagattgtaattgaatggatga

SEQ ID NO: 3415185 - DNA, 25 bp, Homo sapien
gagattgtaattgaatggatgacag

SEQ ID NO: 3415186 - DNA, 25 bp, Homo sapien
tcatgatgagattgtaattgaatgg

SEQ ID NO: 3415187 - DNA, 25 bp, Homo sapien
catgatgagattgtaattgaatgga

SEQ ID NO: 3415188 - DNA, 25 bp, Homo sapien
tccccatgggtaggacattggccag

SEQ ID NO: 3415189 - DNA, 25 bp, Homo sapien
tcagctgcatggctaagaagaaccc

SEQ ID NO: 3415190 - DNA, 25 bp, Homo sapien
gagttggaagataagcacggtcagc

SEQ ID NO: 3415191 - DNA, 25 bp, Homo sapien
catagacatagtggcctcatggacc

SEQ ID NO: 3415192 - DNA, 25 bp, Homo sapien
ccctctgcagagcaaatcttcaaga

SEQ ID NO: 3415193 - DNA, 25 bp, Homo sapien
ctcccctctgcagagcaaatcttca

SEQ ID NO: 3415194 - DNA, 25 bp, Homo sapien
tcaagatggcggccatgatggagac

SEQ ID NO: 3415195 - DNA, 25 bp, Homo sapien
cctctgcagagcaaatcttcaagat

SEQ ID NO: 3415196 - DNA, 25 bp, Homo sapien
gaatttggatcttttgcttgttgga

SEQ ID NO: 3415197 - DNA, 25 bp, Homo sapien
agaatttggatcttttgcttgttgg

SEQ ID NO: 3415198 - DNA, 25 bp, Homo sapien
gagatacaggacggtcagggtggtc

SEQ ID NO: 3415199 - DNA, 25 bp, Homo sapien
gtgttctaaaaatatcccgccagga

SEQ ID NO: 3415200 - DNA, 25 bp, Homo sapien
ttctaaaaatatcccgccaggagga

SEQ ID NO: 3415201 - DNA, 25 bp, Homo sapien
tgttctaaaaatatcccgccaggag

SEQ ID NO: 3415202 - DNA, 25 bp, Homo sapien
ctaaaaatatcccgccaggaggaag

SEQ ID NO: 3415203 - DNA, 25 bp, Homo sapien
tcttagccgactccttgctaggcgg

SEQ ID NO: 3415204 - DNA, 25 bp, Homo sapien
gactgtctggctgcggtcattcgct

SEQ ID NO: 3415205 - DNA, 25 bp, Homo sapien
gtcattcgctgtctgtgccgggctc

SEQ ID NO: 3415206 - DNA, 25 bp, Homo sapien
ccgaggaagagcaagagcgactgtc

SEQ ID NO: 3415207 - DNA, 25 bp, Homo sapien
ggtagcgcgtcccaggtgagcgcgt

SEQ ID NO: 3415208 - DNA, 25 bp, Homo sapien
gcgcccggaggcaggtagcgcgtcc

SEQ ID NO: 3415209 - DNA, 25 bp, Homo sapien
gcgtcccaggtgagcgcgtcccagg

SEQ ID NO: 3415210 - DNA, 25 bp, Homo sapien
gcgtcccaggtgagcgcttcccagg

SEQ ID NO: 3415211 - DNA, 25 bp, Homo sapien
ggccttcagctgctccagacggtcc

SEQ ID NO: 3415212 - DNA, 25 bp, Homo sapien
ccttcagctgctccagacggtcctt

SEQ ID NO: 3415213 - DNA, 25 bp, Homo sapien
ttcagctgctccagacggtccttca

SEQ ID NO: 3415214 - DNA, 25 bp, Homo sapien
tcagctgctccagacggtccttcat

SEQ ID NO: 3415215 - DNA, 25 bp, Homo sapien
ccccactgactacaaactcctggag

SEQ ID NO: 3415216 - DNA, 25 bp, Homo sapien
ctgtctttccccactgactacaaac

SEQ ID NO: 3415217 - DNA, 25 bp, Homo sapien
tttccccactgactacaaactcctg

SEQ ID NO: 3415218 - DNA, 25 bp, Homo sapien
tgtctttccccactgactacaaact

SEQ ID NO: 3415219 - DNA, 25 bp, Homo sapien
ttgttactgggaaatcctatggcta

SEQ ID NO: 3415220 - DNA, 25 bp, Homo sapien
gttactgggaaatcctatggctatt

SEQ ID NO: 3415221 - DNA, 25 bp, Homo sapien
tgttactgggaaatcctatggctat

SEQ ID NO: 3415222 - DNA, 25 bp, Homo sapien
ggaaatcctatggctatttgggatt

SEQ ID NO: 3415223 - DNA, 25 bp, Homo sapien
gcaatgaatgccaccagaagcctct

SEQ ID NO: 3415224 - DNA, 25 bp, Homo sapien
tgcttcttcacaagcttcatcagcc

SEQ ID NO: 3415225 - DNA, 25 bp, Homo sapien
gaccctctaagtccaagatatagca

SEQ ID NO: 3415226 - DNA, 25 bp, Homo sapien
cgaacacttagaattccatgggcaa

SEQ ID NO: 3415227 - DNA, 25 bp, Homo sapien
caaattccggtgtctcaacatctga

SEQ ID NO: 3415228 - DNA, 25 bp, Homo sapien
gatctgaaccccagggtcgctaaac

SEQ ID NO: 3415229 - DNA, 25 bp, Homo sapien
cctagctctaccaattgctgggttg

SEQ ID NO: 3415230 - DNA, 25 bp, Homo sapien
tgaatgctcacgaagtactaggaac

SEQ ID NO: 3415231 - DNA, 25 bp, Homo sapien
aaaagccgtgttgtcgatagcaatc

SEQ ID NO: 3415232 - DNA, 25 bp, Homo sapien
tgttgtcgatagcaatctcaaccgc

SEQ ID NO: 3415233 - DNA, 25 bp, Homo sapien
gatagcaatctcaaccgcatcagta

SEQ ID NO: 3415234 - DNA, 25 bp, Homo sapien
aatctcaaccgcatcagtatcatca

SEQ ID NO: 3415235 - DNA, 25 bp, Homo sapien
catggttgtgatcctatggttgatt

SEQ ID NO: 3415236 - DNA, 25 bp, Homo sapien
tggttgattctgtatttgttatgta

SEQ ID NO: 3415237 - DNA, 25 bp, Homo sapien
ggttgtgatcctatggttgattctg

SEQ ID NO: 3415238 - DNA, 25 bp, Homo sapien
tcatggttgtgatcctatggttgat

SEQ ID NO: 3415239 - DNA, 25 bp, Homo sapien
cagacacagattgttaaggaacgtt

SEQ ID NO: 3415240 - DNA, 25 bp, Homo sapien
gacctttaagatcagagtacatgga

SEQ ID NO: 3415241 - DNA, 25 bp, Homo sapien
ggatctgtagacatgaacccatttt

SEQ ID NO: 3415242 - DNA, 25 bp, Homo sapien
ctatcatagtaccatcccattgagg

SEQ ID NO: 3415243 - DNA, 25 bp, Homo sapien
aatgtcacctgtactcggatctatg

SEQ ID NO: 3415244 - DNA, 25 bp, Homo sapien
gaatagctttgcgaaaaatgggcgc

SEQ ID NO: 3415245 - DNA, 25 bp, Homo sapien
aatgggcgcaatggccaagccagat

SEQ ID NO: 3415246 - DNA, 25 bp, Homo sapien
cagatggtgcattggttcagcatca

SEQ ID NO: 3415247 - DNA, 25 bp, Homo sapien
tatgaccttgaacgcaccctgtaag

SEQ ID NO: 3415248 - DNA, 25 bp, Homo sapien
caatgctttgttagtaatacgggaa

SEQ ID NO: 3415249 - DNA, 25 bp, Homo sapien
ggaattaagatcaaacagaccaggt

SEQ ID NO: 3415250 - DNA, 25 bp, Homo sapien
taagtgtccctaagcaccagttctc

SEQ ID NO: 3415251 - DNA, 25 bp, Homo sapien
ggaaactgacaagtgcccaatctaa

SEQ ID NO: 3415252 - DNA, 25 bp, Homo sapien
caatacttctatgaggctaccatca

SEQ ID NO: 3415253 - DNA, 25 bp, Homo sapien
tttaatggtgtgaaatggcagctac

SEQ ID NO: 3415254 - DNA, 25 bp, Homo sapien
caaaaaatcatgaggcaattgcagg

SEQ ID NO: 3415255 - DNA, 25 bp, Homo sapien
tcaaaacctgattatagctcttcat

SEQ ID NO: 3415256 - DNA, 25 bp, Homo sapien
taaaatatttccagcagcacttcat

SEQ ID NO: 3415257 - DNA, 25 bp, Homo sapien
ttcccaggtagaacgccactgtcag

SEQ ID NO: 3415258 - DNA, 25 bp, Homo sapien
aggctcctgattgtacaaggctgtg

SEQ ID NO: 3415259 - DNA, 25 bp, Homo sapien
agacgatcaggacccagtagctcga

SEQ ID NO: 3415260 - DNA, 25 bp, Homo sapien
agataatgacttaaagtcctcagct

SEQ ID NO: 3415261 - DNA, 25 bp, Homo sapien
gctgagataaacgtttggcagagct

SEQ ID NO: 3415262 - DNA, 25 bp, Homo sapien
caggtccatggctgagataaacgtt

SEQ ID NO: 3415263 - DNA, 25 bp, Homo sapien
ccatggctgagataaacgtttggca

SEQ ID NO: 3415264 - DNA, 25 bp, Homo sapien
ataaacgtttggcagagctgctggt

SEQ ID NO: 3415265 - DNA, 25 bp, Homo sapien
ttagcctcctctacatgttctgaga

SEQ ID NO: 3415266 - DNA, 25 bp, Homo sapien
tcggtgcagagagaatgatactgta

SEQ ID NO: 3415267 - DNA, 25 bp, Homo sapien
tgtcaatgttaagccgagtttcctc

SEQ ID NO: 3415268 - DNA, 25 bp, Homo sapien
gatactgtagagtttcttagcctcc

SEQ ID NO: 3415269 - DNA, 25 bp, Homo sapien
gagcttcggttgagaaggttctagg

SEQ ID NO: 3415270 - DNA, 25 bp, Homo sapien
ggagcttcggttgagaaggttctag

SEQ ID NO: 3415271 - DNA, 25 bp, Homo sapien
cacgggagcttcggttgagaaggtt

SEQ ID NO: 3415272 - DNA, 25 bp, Homo sapien
cgggagcttcggttgagaaggttct

SEQ ID NO: 3415273 - DNA, 25 bp, Homo sapien
ctcagtcgtgagctgctctaggtca

SEQ ID NO: 3415274 - DNA, 25 bp, Homo sapien
taatctcagtcgtgagctgctctag

SEQ ID NO: 3415275 - DNA, 25 bp, Homo sapien
cttcagtttgttccggacgttgttg

SEQ ID NO: 3415276 - DNA, 25 bp, Homo sapien
ttcttaatctcagtcgtgagctgct

SEQ ID NO: 3415277 - DNA, 25 bp, Homo sapien
ccatcaagaggagtttcagttcgga

SEQ ID NO: 3415278 - DNA, 25 bp, Homo sapien
tcagttcggaaagctggaccctagg

SEQ ID NO: 3415279 - DNA, 25 bp, Homo sapien
tggactctttccagtacagtcagga

SEQ ID NO: 3415280 - DNA, 25 bp, Homo sapien
cacaagcaaagatggaccaagtggt

SEQ ID NO: 3415281 - DNA, 25 bp, Homo sapien
atttccgaatccgaaggtctgccga

SEQ ID NO: 3415282 - DNA, 25 bp, Homo sapien
cgaaggtctgccgatgacctgacct

SEQ ID NO: 3415283 - DNA, 25 bp, Homo sapien
gaatccgaaggtctgccgatgacct

SEQ ID NO: 3415284 - DNA, 25 bp, Homo sapien
tctgccgatgacctgacctcatctt

SEQ ID NO: 3415285 - DNA, 25 bp, Homo sapien
cattgtatttggtcatcacctccac

SEQ ID NO: 3415286 - DNA, 25 bp, Homo sapien
cacaaacttccgagaaaggacagag

SEQ ID NO: 3415287 - DNA, 25 bp, Homo sapien
tcattgtatttggtcatcacctcca

SEQ ID NO: 3415288 - DNA, 25 bp, Homo sapien
acaaacttccgagaaaggacagagt

SEQ ID NO: 3415289 - DNA, 25 bp, Homo sapien
tcgagctgccgctggattcgccctt

SEQ ID NO: 3415290 - DNA, 25 bp, Homo sapien
gagctgccgctggattcgccctttg

SEQ ID NO: 3415291 - DNA, 25 bp, Homo sapien
taatttcgagctgccgctggattcg

SEQ ID NO: 3415292 - DNA, 25 bp, Homo sapien
tttcgagctgccgctggattcgccc

SEQ ID NO: 3415293 - DNA, 25 bp, Homo sapien
aagtgaagatggccgggttgccact

SEQ ID NO: 3415294 - DNA, 25 bp, Homo sapien
gaagatggccgggttgccactctcc

SEQ ID NO: 3415295 - DNA, 25 bp, Homo sapien
agatggccgggttgccactctccaa

SEQ ID NO: 3415296 - DNA, 25 bp, Homo sapien
tggccgggttgccactctccaacat

SEQ ID NO: 3415297 - DNA, 25 bp, Homo sapien
cacgagagggatgtgctatccgagc

SEQ ID NO: 3415298 - DNA, 25 bp, Homo sapien
cctccctgctcacgagagggatgtg

SEQ ID NO: 3415299 - DNA, 25 bp, Homo sapien
gactgcatgagctccgcagtggcct

SEQ ID NO: 3415300 - DNA, 25 bp, Homo sapien
tgtgctatccgagcacacagggcac

SEQ ID NO: 3415301 - DNA, 25 bp, Homo sapien
accagcatggcgatgtccataaaca

SEQ ID NO: 3415302 - DNA, 25 bp, Homo sapien
gtccataaacatgtcgtgaagctcc

SEQ ID NO: 3415303 - DNA, 25 bp, Homo sapien
tgtcgtccctcaatctcactgaggg

SEQ ID NO: 3415304 - DNA, 25 bp, Homo sapien
caatgtccttgtgtcgtccctcaat

SEQ ID NO: 3415305 - DNA, 25 bp, Homo sapien
ttttcgtttcatctcgtgccttctc

SEQ ID NO: 3415306 - DNA, 25 bp, Homo sapien
ggtccactgtgtgcatgacattcaa

SEQ ID NO: 3415307 - DNA, 25 bp, Homo sapien
agcttttttcgtttcatctcgtgcc

SEQ ID NO: 3415308 - DNA, 25 bp, Homo sapien
ccgggcctgactctggtatttcaca

SEQ ID NO: 3415309 - DNA, 25 bp, Homo sapien
cgggcttcactctgatacttgacag

SEQ ID NO: 3415310 - DNA, 25 bp, Homo sapien
tacttgacagcctttttggtatctg

SEQ ID NO: 3415311 - DNA, 25 bp, Homo sapien
agcccactgactggtccatgttgtt

SEQ ID NO: 3415312 - DNA, 25 bp, Homo sapien
agcctttttggtatctgccacggcc

SEQ ID NO: 3415313 - DNA, 25 bp, Homo sapien
ctgagacgaaggacagttgagatga

SEQ ID NO: 3415314 - DNA, 25 bp, Homo sapien
cagctgagacgaaggacagttgaga

SEQ ID NO: 3415315 - DNA, 25 bp, Homo sapien
gacgaaggacagttgagatgaaggt

SEQ ID NO: 3415316 - DNA, 25 bp, Homo sapien
tgagacgaaggacagttgagatgaa

SEQ ID NO: 3415317 - DNA, 25 bp, Homo sapien
ggagatagcttgtgagccagatcca

SEQ ID NO: 3415318 - DNA, 25 bp, Homo sapien
gcctcatgagctaagtccaggagaa

SEQ ID NO: 3415319 - DNA, 25 bp, Homo sapien
tgggccatgcatccatcctacagaa

SEQ ID NO: 3415320 - DNA, 25 bp, Homo sapien
gagctaagtccaggagaagattagc

SEQ ID NO: 3415321 - DNA, 25 bp, Homo sapien
actactagcacaatgataattatca

SEQ ID NO: 3415322 - DNA, 25 bp, Homo sapien
cggaaagtccaataatcaatgctaa

SEQ ID NO: 3415323 - DNA, 25 bp, Homo sapien
atgcccagcaacacaactactagca

SEQ ID NO: 3415324 - DNA, 25 bp, Homo sapien
ttaattcagcccaacggaaagtcca

SEQ ID NO: 3415325 - DNA, 25 bp, Homo sapien
cagtgcagcagcctcttaggccact

SEQ ID NO: 3415326 - DNA, 25 bp, Homo sapien
agtgcagcagcctcttaggccactc

SEQ ID NO: 3415327 - DNA, 25 bp, Homo sapien
atttcagtgcagcagcctcttaggc

SEQ ID NO: 3415328 - DNA, 25 bp, Homo sapien
ttcagtgcagcagcctcttaggcca

SEQ ID NO: 3415329 - DNA, 25 bp, Homo sapien
gtactgcagccagaaaccaatagaa

SEQ ID NO: 3415330 - DNA, 25 bp, Homo sapien
tactattaaacgtgattcaggccgg

SEQ ID NO: 3415331 - DNA, 25 bp, Homo sapien
tatgtctgagtatgtgaacgtgcca

SEQ ID NO: 3415332 - DNA, 25 bp, Homo sapien
tctaactgggtacaaaactggataa

SEQ ID NO: 3415333 - DNA, 25 bp, Homo sapien
ttatcttggcgtgttggtgtacacc

SEQ ID NO: 3415334 - DNA, 25 bp, Homo sapien
tagctacagcaaaataacataaacc

SEQ ID NO: 3415335 - DNA, 25 bp, Homo sapien
tattaaataaggttagtcacactgt

SEQ ID NO: 3415336 - DNA, 25 bp, Homo sapien
aacataaacctccaacattgtgaaa

SEQ ID NO: 3415337 - DNA, 25 bp, Homo sapien
tgggtactggcatggtattatgtgc

SEQ ID NO: 3415338 - DNA, 25 bp, Homo sapien
ccacctgtctatgagaggttgttca

SEQ ID NO: 3415339 - DNA, 25 bp, Homo sapien
tgctcaatgctgtaataagctgact

SEQ ID NO: 3415340 - DNA, 25 bp, Homo sapien
gtcaagggctagactccaagtgcca

SEQ ID NO: 3415341 - DNA, 25 bp, Homo sapien
tagatcccctggtcacatggaagga

SEQ ID NO: 3415342 - DNA, 25 bp, Homo sapien
ttatgagctatgtagtcttgggcaa

SEQ ID NO: 3415343 - DNA, 25 bp, Homo sapien
ctatgatcttagagcaagcagctgg

SEQ ID NO: 3415344 - DNA, 25 bp, Homo sapien
gggtcatattatggctgctccacct

SEQ ID NO: 3415345 - DNA, 25 bp, Homo sapien
gcagctggcacattactaggaaata

SEQ ID NO: 3415346 - DNA, 25 bp, Homo sapien
gctttctggttctcgatcttcatga

SEQ ID NO: 3415347 - DNA, 25 bp, Homo sapien
ctgctttctggttctcgatcttcat

SEQ ID NO: 3415348 - DNA, 25 bp, Homo sapien
agcaacaccgctcctgaagacaggc

SEQ ID NO: 3415349 - DNA, 25 bp, Homo sapien
acagcaacaccgctcctgaagacag

SEQ ID NO: 3415350 - DNA, 25 bp, Homo sapien
ggaggagctgatcagtacacaggaa

SEQ ID NO: 3415351 - DNA, 25 bp, Homo sapien
tgggaagggacaatccctagtgaaa

SEQ ID NO: 3415352 - DNA, 25 bp, Homo sapien
gaaggagtcagccacaaacctggaa

SEQ ID NO: 3415353 - DNA, 25 bp, Homo sapien
cttggagttaaatatcccactgtac

SEQ ID NO: 3415354 - DNA, 25 bp, Homo sapien
attctcatctgaagacaagggtggc

SEQ ID NO: 3415355 - DNA, 25 bp, Homo sapien
ccacaccagtctggagtgaaatcag

SEQ ID NO: 3415356 - DNA, 25 bp, Homo sapien
ggtggccacaccagtctggagtgaa

SEQ ID NO: 3415357 - DNA, 25 bp, Homo sapien
atctgaagacaagggtggccacacc

SEQ ID NO: 3415358 - DNA, 25 bp, Homo sapien
tgtattccaaactgtaagccccagg

SEQ ID NO: 3415359 - DNA, 25 bp, Homo sapien
tcaggacatacggacaacaaacagg

SEQ ID NO: 3415360 - DNA, 25 bp, Homo sapien
tctgagtgctggattgtgaccggcc

SEQ ID NO: 3415361 - DNA, 25 bp, Homo sapien
gagaactcagggtcgcatcaggtag

SEQ ID NO: 3415362 - DNA, 25 bp, Homo sapien
gaagctaagatgatcgcaaggataa

SEQ ID NO: 3415363 - DNA, 25 bp, Homo sapien
taagatgatcgcaaggataatacag

SEQ ID NO: 3415364 - DNA, 25 bp, Homo sapien
agatgatcgcaaggataatacagca

SEQ ID NO: 3415365 - DNA, 25 bp, Homo sapien
atggtggaagctaagatgatcgcaa

SEQ ID NO: 3415366 - DNA, 25 bp, Homo sapien
tcaaaggtgtgacctagaggagcct

SEQ ID NO: 3415367 - DNA, 25 bp, Homo sapien
gaagagcagaagtgccctgacttga

SEQ ID NO: 3415368 - DNA, 25 bp, Homo sapien
tgagtacctgtaagcagcaggcgct

SEQ ID NO: 3415369 - DNA, 25 bp, Homo sapien
taagactactactggagcctgaaag

SEQ ID NO: 3415370 - DNA, 25 bp, Homo sapien
ttatacatacgttactggccagcag

SEQ ID NO: 3415371 - DNA, 25 bp, Homo sapien
tattgaaccacagtcctggagccag

SEQ ID NO: 3415372 - DNA, 25 bp, Homo sapien
gccagcagtttcagctagcaacaca

SEQ ID NO: 3415373 - DNA, 25 bp, Homo sapien
taagaggctgttgctagaactccac

SEQ ID NO: 3415374 - DNA, 25 bp, Homo sapien
cttactgctagtgaatgagggcccc

SEQ ID NO: 3415375 - DNA, 25 bp, Homo sapien
tctagtacagtgctatgtgccatgc

SEQ ID NO: 3415376 - DNA, 25 bp, Homo sapien
gacaaaagttagaactgcgtggcct

SEQ ID NO: 3415377 - DNA, 25 bp, Homo sapien
taaagctgaacacaactgaaccttg

SEQ ID NO: 3415378 - DNA, 25 bp, Homo sapien
cccatagatgatgtcgaagtccgca

SEQ ID NO: 3415379 - DNA, 25 bp, Homo sapien
ccactttgaaatgatgcgcctgaca

SEQ ID NO: 3415380 - DNA, 25 bp, Homo sapien
cagaacccctggacatttgagcgaa

SEQ ID NO: 3415381 - DNA, 25 bp, Homo sapien
tgagcgaatagccactgccaacatg

SEQ ID NO: 3415382 - DNA, 25 bp, Homo sapien
taacccctagcacttcagaatgtaa

SEQ ID NO: 3415383 - DNA, 25 bp, Homo sapien
caggacctaaaacgtctgattctgt

SEQ ID NO: 3415384 - DNA, 25 bp, Homo sapien
cctgatgtgagctgaataggatccc

SEQ ID NO: 3415385 - DNA, 25 bp, Homo sapien
cactatttacgatgcctctgggatg

SEQ ID NO: 3415386 - DNA, 25 bp, Homo sapien
taatgacagaacctactgggaactt

SEQ ID NO: 3415387 - DNA, 25 bp, Homo sapien
cactgagccaaggtaagggagagac

SEQ ID NO: 3415388 - DNA, 25 bp, Homo sapien
gaacttctgagtggaggcgaaccac

SEQ ID NO: 3415389 - DNA, 25 bp, Homo sapien
cagtttcacaatggaggagcgctca

SEQ ID NO: 3415390 - DNA, 25 bp, Homo sapien
caaactaaagtaactggtcaaggag

SEQ ID NO: 3415391 - DNA, 25 bp, Homo sapien
ttttacagacagcatcttactatgt

SEQ ID NO: 3415392 - DNA, 25 bp, Homo sapien
tcagaaaactcatagatccccaaac

SEQ ID NO: 3415393 - DNA, 25 bp, Homo sapien
tgagggtttcacagataccctgaag

SEQ ID NO: 3415394 - DNA, 25 bp, Homo sapien
tcctggaagaatgcgcggcccagga

SEQ ID NO: 3415395 - DNA, 25 bp, Homo sapien
gccgagcggcagaagctgcaacagc

SEQ ID NO: 3415396 - DNA, 25 bp, Homo sapien
aggtcctggaagaatgcgcggccca

SEQ ID NO: 3415397 - DNA, 25 bp, Homo sapien
cacttgttttcccaaagcggatcag

SEQ ID NO: 3415398 - DNA, 25 bp, Homo sapien
cgcagccacggaaataccagcacta

SEQ ID NO: 3415399 - DNA, 25 bp, Homo sapien
cagcactaagaacgcagacagcgcc

SEQ ID NO: 3415400 - DNA, 25 bp, Homo sapien
ttagaagcactcttcgtaagctgcg

SEQ ID NO: 3415401 - DNA, 25 bp, Homo sapien
aagctgcgcagccacggaaatacca

SEQ ID NO: 3415402 - DNA, 25 bp, Homo sapien
cgatgtgagtcgtgccattggagaa

SEQ ID NO: 3415403 - DNA, 25 bp, Homo sapien
cacagataggccgacaaggacatag

SEQ ID NO: 3415404 - DNA, 25 bp, Homo sapien
taggcattcctgctatccattggca

SEQ ID NO: 3415405 - DNA, 25 bp, Homo sapien
ggaaccaccgcacttgcatcagtag

SEQ ID NO: 3415406 - DNA, 25 bp, Homo sapien
tatgtcaccactattcaccaagttg

SEQ ID NO: 3415407 - DNA, 25 bp, Homo sapien
caggcagggccggattgaagaagac

SEQ ID NO: 3415408 - DNA, 25 bp, Homo sapien
gacatatgtcaccactattcaccaa

SEQ ID NO: 3415409 - DNA, 25 bp, Homo sapien
tgaagaagacatatgtcaccactat

SEQ ID NO: 3415410 - DNA, 25 bp, Homo sapien
gatgggactaatccaggggggcagg

SEQ ID NO: 3415411 - DNA, 25 bp, Homo sapien
ggcaggggatcaatggaagtgcttt

SEQ ID NO: 3415412 - DNA, 25 bp, Homo sapien
ttcccatggatgggactaatccagg

SEQ ID NO: 3415413 - DNA, 25 bp, Homo sapien
atatagataacttcccatggatggg

SEQ ID NO: 3415414 - DNA, 25 bp, Homo sapien
aatagtagggcaaagcaagcaaagc

SEQ ID NO: 3415415 - DNA, 25 bp, Homo sapien
gaatatatcaggcaatagtagggca

SEQ ID NO: 3415416 - DNA, 25 bp, Homo sapien
gcaagcaaagcatgttccacttcta

SEQ ID NO: 3415417 - DNA, 25 bp, Homo sapien
tatcaggcaatagtagggcaaagca

SEQ ID NO: 3415418 - DNA, 25 bp, Homo sapien
cacaaaatattgtgacggccttaga

SEQ ID NO: 3415419 - DNA, 25 bp, Homo sapien
aaaatattgtgacggccttagagga

SEQ ID NO: 3415420 - DNA, 25 bp, Homo sapien
aatattgtgacggccttagaggaac

SEQ ID NO: 3415421 - DNA, 25 bp, Homo sapien
caaaatattgtgacggccttagagg

SEQ ID NO: 3415422 - DNA, 25 bp, Homo sapien
tctctgatgcccaaattcactcttg

SEQ ID NO: 3415423 - DNA, 25 bp, Homo sapien
gcctgagattccatcagtagtaaaa

SEQ ID NO: 3415424 - DNA, 25 bp, Homo sapien
tatgactgggggcatataaaatgcc

SEQ ID NO: 3415425 - DNA, 25 bp, Homo sapien
tcactcttgttccattatgactggg

SEQ ID NO: 3415426 - DNA, 25 bp, Homo sapien
caaatcgtatcttgacaccaatttc

SEQ ID NO: 3415427 - DNA, 25 bp, Homo sapien
aatcgtatcttgacaccaatttcca

SEQ ID NO: 3415428 - DNA, 25 bp, Homo sapien
aaatcgtatcttgacaccaatttcc

SEQ ID NO: 3415429 - DNA, 25 bp, Homo sapien
atcgtatcttgacaccaatttccat

SEQ ID NO: 3415430 - DNA, 25 bp, Homo sapien
ctgatatagcttttaagtcattttc

SEQ ID NO: 3415431 - DNA, 25 bp, Homo sapien
agtcattttctaaaattaaggacat

SEQ ID NO: 3415432 - DNA, 25 bp, Homo sapien
tatagcttttaagtcattttctaaa

SEQ ID NO: 3415433 - DNA, 25 bp, Homo sapien
gatatagcttttaagtcattttcta

SEQ ID NO: 3415434 - DNA, 25 bp, Homo sapien
ctgaccagtccccagcgcaggtcca

SEQ ID NO: 3415435 - DNA, 25 bp, Homo sapien
tgaccagtccccagcgcaggtccat

SEQ ID NO: 3415436 - DNA, 25 bp, Homo sapien
aaccaaaactgggtgcagtgtactt

SEQ ID NO: 3415437 - DNA, 25 bp, Homo sapien
aactgggtgcagtgtacttgaatag

SEQ ID NO: 3415438 - DNA, 25 bp, Homo sapien
ctggcaaagaaccaaaactgggtgc

SEQ ID NO: 3415439 - DNA, 25 bp, Homo sapien
caaaactgggtgcagtgtacttgaa

SEQ ID NO: 3415440 - DNA, 25 bp, Homo sapien
gggttacatggcagccatctcctag

SEQ ID NO: 3415441 - DNA, 25 bp, Homo sapien
ttcatcggggttcacatacaaattg

SEQ ID NO: 3415442 - DNA, 25 bp, Homo sapien
catttggcaaaacatgggttacatg

SEQ ID NO: 3415443 - DNA, 25 bp, Homo sapien
tcctagaaacacttcatcggggttc

SEQ ID NO: 3415444 - DNA, 25 bp, Homo sapien
cagatcggacagtagagtctcttga

SEQ ID NO: 3415445 - DNA, 25 bp, Homo sapien
tttcagatcggacagtagagtctct

SEQ ID NO: 3415446 - DNA, 25 bp, Homo sapien
tcagatcggacagtagagtctcttg

SEQ ID NO: 3415447 - DNA, 25 bp, Homo sapien
gatcggacagtagagtctcttgaga

SEQ ID NO: 3415448 - DNA, 25 bp, Homo sapien
gcaatgtgtatcctcacctctatct

SEQ ID NO: 3415449 - DNA, 25 bp, Homo sapien
tgcccatgtcttcattcgcaatgtg

SEQ ID NO: 3415450 - DNA, 25 bp, Homo sapien
caagattgtgttgcagaagttactg

SEQ ID NO: 3415451 - DNA, 25 bp, Homo sapien
tgttgcagaagttactgcccatgtc

SEQ ID NO: 3415452 - DNA, 25 bp, Homo sapien
caaaaatcataagatgccagttttg

SEQ ID NO: 3415453 - DNA, 25 bp, Homo sapien
taagatgccagttttgaagggttct

SEQ ID NO: 3415454 - DNA, 25 bp, Homo sapien
atcataagatgccagttttgaaggg

SEQ ID NO: 3415455 - DNA, 25 bp, Homo sapien
gatgccagttttgaagggttcttac

SEQ ID NO: 3415456 - DNA, 25 bp, Homo sapien
tcttctcttgcaataaaggtactca

SEQ ID NO: 3415457 - DNA, 25 bp, Homo sapien
aaggtactcatttgatgaacgaggg

SEQ ID NO: 3415458 - DNA, 25 bp, Homo sapien
ccaaattgcctctcaatatcaaagg

SEQ ID NO: 3415459 - DNA, 25 bp, Homo sapien
ctaagcaatcatggcagagattcca

SEQ ID NO: 3415460 - DNA, 25 bp, Homo sapien
tcacagcaacaaggagatgagctaa

SEQ ID NO: 3415461 - DNA, 25 bp, Homo sapien
ggttgcaggtcatttaacagcggcg

SEQ ID NO: 3415462 - DNA, 25 bp, Homo sapien
caaagaaatccacctcgaccatgtt

SEQ ID NO: 3415463 - DNA, 25 bp, Homo sapien
ccatgtttacaggacagccaattcc

SEQ ID NO: 3415464 - DNA, 25 bp, Homo sapien
acagcggcgttcgtctaagtttgac

SEQ ID NO: 3415465 - DNA, 25 bp, Homo sapien
tagcatgatactgggatgtgtaaat

SEQ ID NO: 3415466 - DNA, 25 bp, Homo sapien
caatgagaatacctactccatgttc

SEQ ID NO: 3415467 - DNA, 25 bp, Homo sapien
tcaaaattcgttggttcatatacaa

SEQ ID NO: 3415468 - DNA, 25 bp, Homo sapien
catatacaattaaactttcaatgag

SEQ ID NO: 3415469 - DNA, 25 bp, Homo sapien
caagtcttcaagttcatgtgatagt

SEQ ID NO: 3415470 - DNA, 25 bp, Homo sapien
cataggacactcttggacggatttc

SEQ ID NO: 3415471 - DNA, 25 bp, Homo sapien
cactgaccttctgcattcacgacgg

SEQ ID NO: 3415472 - DNA, 25 bp, Homo sapien
gatagtgagcggtgctgtcccactg

SEQ ID NO: 3415473 - DNA, 25 bp, Homo sapien
tggaaatcttcctggccccaggccc

SEQ ID NO: 3415474 - DNA, 25 bp, Homo sapien
ctggatttttgctgttctggaaatc

SEQ ID NO: 3415475 - DNA, 25 bp, Homo sapien
tacatcttctaaactctgaggcaga

SEQ ID NO: 3415476 - DNA, 25 bp, Homo sapien
gccccaggccctttacatcttctaa

SEQ ID NO: 3415477 - DNA, 25 bp, Homo sapien
tcccaaagtattttgtcatgaatgt

SEQ ID NO: 3415478 - DNA, 25 bp, Homo sapien
tgtggtttcagctttgaaaacccca

SEQ ID NO: 3415479 - DNA, 25 bp, Homo sapien
tcagctttgaaaaccccaatctgct

SEQ ID NO: 3415480 - DNA, 25 bp, Homo sapien
tttgctttcccaaagtattttgtca

SEQ ID NO: 3415481 - DNA, 25 bp, Homo sapien
taggttgcaggttttccacaagagg

SEQ ID NO: 3415482 - DNA, 25 bp, Homo sapien
tagagacagctcattatgcttaggt

SEQ ID NO: 3415483 - DNA, 25 bp, Homo sapien
tatcattcgtcatcctggttacagg

SEQ ID NO: 3415484 - DNA, 25 bp, Homo sapien
gaggtgctcctctaatttcaaccag

SEQ ID NO: 3415485 - DNA, 25 bp, Homo sapien
tactgggatgtaagttctgaaattc

SEQ ID NO: 3415486 - DNA, 25 bp, Homo sapien
tggttgatatttgacgaaactctca

SEQ ID NO: 3415487 - DNA, 25 bp, Homo sapien
ctttcaagggcgcatcttactggga

SEQ ID NO: 3415488 - DNA, 25 bp, Homo sapien
aactctcaacaagaatgccccatgg

SEQ ID NO: 3415489 - DNA, 25 bp, Homo sapien
gacaactgtgccaggttgacactca

SEQ ID NO: 3415490 - DNA, 25 bp, Homo sapien
tactggaaatggatgacaactgtgc

SEQ ID NO: 3415491 - DNA, 25 bp, Homo sapien
tgatcaaagctactggaaatggatg

SEQ ID NO: 3415492 - DNA, 25 bp, Homo sapien
gaaatggatgacaactgtgccaggt

SEQ ID NO: 3415493 - DNA, 25 bp, Homo sapien
agtaacattcctcgataccccaatt

SEQ ID NO: 3415494 - DNA, 25 bp, Homo sapien
ctaagtaacattcctcgatacccca

SEQ ID NO: 3415495 - DNA, 25 bp, Homo sapien
taacattcctcgataccccaatttc

SEQ ID NO: 3415496 - DNA, 25 bp, Homo sapien
tttatcagtattattctgtattaca

SEQ ID NO: 3415497 - DNA, 25 bp, Homo sapien
atttctctgatagagcaaacgtgtg

SEQ ID NO: 3415498 - DNA, 25 bp, Homo sapien
gatagagcaaacgtgtgctgttgac

SEQ ID NO: 3415499 - DNA, 25 bp, Homo sapien
tggccttgctcaatcctcaatgctg

SEQ ID NO: 3415500 - DNA, 25 bp, Homo sapien
ctcaatgctggtccttgtaacctca

SEQ ID NO: 3415501 - DNA, 25 bp, Homo sapien
ttacaccatcaatttctctagttgt

SEQ ID NO: 3415502 - DNA, 25 bp, Homo sapien
aattttacaccatcaatttctctag

SEQ ID NO: 3415503 - DNA, 25 bp, Homo sapien
taattttacaccatcaatttctcta

SEQ ID NO: 3415504 - DNA, 25 bp, Homo sapien
ttttacaccatcaatttctctagtt

SEQ ID NO: 3415505 - DNA, 25 bp, Homo sapien
acaaccaatcatcagagcacattgc

SEQ ID NO: 3415506 - DNA, 25 bp, Homo sapien
gactaacaaccaatcatcagagcac

SEQ ID NO: 3415507 - DNA, 25 bp, Homo sapien
tctgactaacaaccaatcatcagag

SEQ ID NO: 3415508 - DNA, 25 bp, Homo sapien
taacaaccaatcatcagagcacatt

SEQ ID NO: 3415509 - DNA, 25 bp, Homo sapien
gaaaacgcgtagttaaatgacaaca

SEQ ID NO: 3415510 - DNA, 25 bp, Homo sapien
ttacaggacagttatctctcaggtg

SEQ ID NO: 3415511 - DNA, 25 bp, Homo sapien
gaagtgacaggataagaaaacgcgt

SEQ ID NO: 3415512 - DNA, 25 bp, Homo sapien
tgtatgtcgccaattctaatgtctg

SEQ ID NO: 3415513 - DNA, 25 bp, Homo sapien
gtaactgatctctgataatatggcg

SEQ ID NO: 3415514 - DNA, 25 bp, Homo sapien
cactggaaattcataggtagtatgc

SEQ ID NO: 3415515 - DNA, 25 bp, Homo sapien
caaccttggtttgtaactgatctct

SEQ ID NO: 3415516 - DNA, 25 bp, Homo sapien
aatatggcgtcatcatttgtttgga

SEQ ID NO: 3415517 - DNA, 25 bp, Homo sapien
tcaaggtgtgggcatcaaacccact

SEQ ID NO: 3415518 - DNA, 25 bp, Homo sapien
ggtgtgggcatcaaacccactcatt

SEQ ID NO: 3415519 - DNA, 25 bp, Homo sapien
tttcaaggtgtgggcatcaaaccca

SEQ ID NO: 3415520 - DNA, 25 bp, Homo sapien
gtgggcatcaaacccactcattcca

SEQ ID NO: 3415521 - DNA, 25 bp, Homo sapien
gatacagtgacttcttggatagttg

SEQ ID NO: 3415522 - DNA, 25 bp, Homo sapien
tgatacagtgacttcttggatagtt

SEQ ID NO: 3415523 - DNA, 25 bp, Homo sapien
atacagtgacttcttggatagttgc

SEQ ID NO: 3415524 - DNA, 25 bp, Homo sapien
ttgatacagtgacttcttggatagt

SEQ ID NO: 3415525 - DNA, 25 bp, Homo sapien
ttgctactcatctttgtacagacac

SEQ ID NO: 3415526 - DNA, 25 bp, Homo sapien
ccaaaatgtagtgaaactggtaaca

SEQ ID NO: 3415527 - DNA, 25 bp, Homo sapien
aggagagggtgttataacacaggca

SEQ ID NO: 3415528 - DNA, 25 bp, Homo sapien
tggttttcagacaagatgtatcact

SEQ ID NO: 3415529 - DNA, 25 bp, Homo sapien
gaccttcgtctgagcagacctccag

SEQ ID NO: 3415530 - DNA, 25 bp, Homo sapien
tcctccttatttgggtagttcacag

SEQ ID NO: 3415531 - DNA, 25 bp, Homo sapien
ttttatatggcatcccatgctcagc

SEQ ID NO: 3415532 - DNA, 25 bp, Homo sapien
caggatgctcttatcacagtgtcag

SEQ ID NO: 3415533 - DNA, 25 bp, Homo sapien
cggtccaaatcaagacagcgaggag

SEQ ID NO: 3415534 - DNA, 25 bp, Homo sapien
cagcgaggagcatcaagacttctaa

SEQ ID NO: 3415535 - DNA, 25 bp, Homo sapien
catggaggttctcagcaccggtcca

SEQ ID NO: 3415536 - DNA, 25 bp, Homo sapien
ggagcatcaagacttctaacgccat

SEQ ID NO: 3415537 - DNA, 25 bp, Homo sapien
tatgtatccgatttgcagggcagcc

SEQ ID NO: 3415538 - DNA, 25 bp, Homo sapien
tcctgatgccacaatcacgaacaag

SEQ ID NO: 3415539 - DNA, 25 bp, Homo sapien
caaccagtccagagagcaacttatt

SEQ ID NO: 3415540 - DNA, 25 bp, Homo sapien
tctgcaactgggataactgagacca

SEQ ID NO: 3415541 - DNA, 25 bp, Homo sapien
atactaggcataaaagtctgacaaa

SEQ ID NO: 3415542 - DNA, 25 bp, Homo sapien
aaaagtctgacaaaacatgcagtat

SEQ ID NO: 3415543 - DNA, 25 bp, Homo sapien
aaagtctgacaaaacatgcagtatt

SEQ ID NO: 3415544 - DNA, 25 bp, Homo sapien
aatactaggcataaaagtctgacaa

SEQ ID NO: 3415545 - DNA, 25 bp, Homo sapien
tacagctcggtttgaaaaaggagag

SEQ ID NO: 3415546 - DNA, 25 bp, Homo sapien
catgatctatattccttggggtaaa

SEQ ID NO: 3415547 - DNA, 25 bp, Homo sapien
tattccttggggtaaagtacagctc

SEQ ID NO: 3415548 - DNA, 25 bp, Homo sapien
tggggtaaagtacagctcggtttga

SEQ ID NO: 3415549 - DNA, 25 bp, Homo sapien
cgtggactcttggtacaggatttga

SEQ ID NO: 3415550 - DNA, 25 bp, Homo sapien
cattcaggagtatggcatagagcca

SEQ ID NO: 3415551 - DNA, 25 bp, Homo sapien
tactatgccttctagatcctcgtgg

SEQ ID NO: 3415552 - DNA, 25 bp, Homo sapien
caggatttgagcagataggcttaca

SEQ ID NO: 3415553 - DNA, 25 bp, Homo sapien
ggactagaagataataatcctaact

SEQ ID NO: 3415554 - DNA, 25 bp, Homo sapien
tcagagcaagtttggactagaagat

SEQ ID NO: 3415555 - DNA, 25 bp, Homo sapien
gtttggactagaagataataatcct

SEQ ID NO: 3415556 - DNA, 25 bp, Homo sapien
gcaagtttggactagaagataataa

SEQ ID NO: 3415557 - DNA, 25 bp, Homo sapien
gagacttaaggagagatatacacca

SEQ ID NO: 3415558 - DNA, 25 bp, Homo sapien
taatgaatgctcttaggtggcagga

SEQ ID NO: 3415559 - DNA, 25 bp, Homo sapien
tggaagaaccattcggaggaacaag

SEQ ID NO: 3415560 - DNA, 25 bp, Homo sapien
tagccaatggcacagttcaattctc

SEQ ID NO: 3415561 - DNA, 25 bp, Homo sapien
tacagcatcttttcccgataacgga

SEQ ID NO: 3415562 - DNA, 25 bp, Homo sapien
gacttaacgttatctttgccttatg

SEQ ID NO: 3415563 - DNA, 25 bp, Homo sapien
gccttatgcaacactttagaggact

SEQ ID NO: 3415564 - DNA, 25 bp, Homo sapien
ttgtcgcaagtaggagacactcaga

SEQ ID NO: 3415565 - DNA, 25 bp, Homo sapien
tcttgccttggagtagtagacatca

SEQ ID NO: 3415566 - DNA, 25 bp, Homo sapien
aatgggacaccagggcagagtaaca

SEQ ID NO: 3415567 - DNA, 25 bp, Homo sapien
gaagggttcaattctgtccatacat

SEQ ID NO: 3415568 - DNA, 25 bp, Homo sapien
tacaatgactctccacaaatgggac

SEQ ID NO: 3415569 - DNA, 25 bp, Homo sapien
taatctggtgatccatctatgggct

SEQ ID NO: 3415570 - DNA, 25 bp, Homo sapien
cagctctgcattatcaacttcgtgg

SEQ ID NO: 3415571 - DNA, 25 bp, Homo sapien
gctggtagacagaagtattcagctc

SEQ ID NO: 3415572 - DNA, 25 bp, Homo sapien
cattatcaacttcgtgggaggccat

SEQ ID NO: 3415573 - DNA, 25 bp, Homo sapien
cctcatcctcttcacgttgaataga

SEQ ID NO: 3415574 - DNA, 25 bp, Homo sapien
ggtatgggtattgcaaggaacccag

SEQ ID NO: 3415575 - DNA, 25 bp, Homo sapien
gacacccaaagccagaatcattgct

SEQ ID NO: 3415576 - DNA, 25 bp, Homo sapien
gcaaggaacccagaaagacacccaa

SEQ ID NO: 3415577 - DNA, 25 bp, Homo sapien
aagtggtatgggtattgcaaggaac

SEQ ID NO: 3415578 - DNA, 25 bp, Homo sapien
aacatatagccaggggagtacgaat

SEQ ID NO: 3415579 - DNA, 25 bp, Homo sapien
tagccaggggagtacgaatactcac

SEQ ID NO: 3415580 - DNA, 25 bp, Homo sapien
taacatatagccaggggagtacgaa

SEQ ID NO: 3415581 - DNA, 25 bp, Homo sapien
atatagccaggggagtacgaatact

SEQ ID NO: 3415582 - DNA, 25 bp, Homo sapien
cagacaaggttcctgaactacagaa

SEQ ID NO: 3415583 - DNA, 25 bp, Homo sapien
ccctgctacaacagacaaggttcct

SEQ ID NO: 3415584 - DNA, 25 bp, Homo sapien
ttttatccctgctacaacagacaag

SEQ ID NO: 3415585 - DNA, 25 bp, Homo sapien
tatccctgctacaacagacaaggtt

SEQ ID NO: 3415586 - DNA, 25 bp, Homo sapien
agtccccactagtgcaattgtagca

SEQ ID NO: 3415587 - DNA, 25 bp, Homo sapien
taggtccggtgactctgatgaagag

SEQ ID NO: 3415588 - DNA, 25 bp, Homo sapien
gcccatgtaattgcataggtccggt

SEQ ID NO: 3415589 - DNA, 25 bp, Homo sapien
gagtgacaactccttaatgactgga

SEQ ID NO: 3415590 - DNA, 25 bp, Homo sapien
tagatcactgggatgaaatggataa

SEQ ID NO: 3415591 - DNA, 25 bp, Homo sapien
gaagaggtagagtacctgaacacaa

SEQ ID NO: 3415592 - DNA, 25 bp, Homo sapien
tctaagtagagttcagaagaggtag

SEQ ID NO: 3415593 - DNA, 25 bp, Homo sapien
gcttaggagtgagtctgtaattaac

SEQ ID NO: 3415594 - DNA, 25 bp, Homo sapien
catggctatggtagagatggttacg

SEQ ID NO: 3415595 - DNA, 25 bp, Homo sapien
gaattacagcagtttgcattgcacc

SEQ ID NO: 3415596 - DNA, 25 bp, Homo sapien
gatggttacgcataattccagcaag

SEQ ID NO: 3415597 - DNA, 25 bp, Homo sapien
gtttgcattgcaccacatggctatg

SEQ ID NO: 3415598 - DNA, 25 bp, Homo sapien
cacagaattgggaggtgaggaaatt

SEQ ID NO: 3415599 - DNA, 25 bp, Homo sapien
acacagaattgggaggtgaggaaat

SEQ ID NO: 3415600 - DNA, 25 bp, Homo sapien
ttacacagaattgggaggtgaggaa

SEQ ID NO: 3415601 - DNA, 25 bp, Homo sapien
cagaattgggaggtgaggaaatttc

SEQ ID NO: 3415602 - DNA, 25 bp, Homo sapien
cctactgggcggtcagaagttggat

SEQ ID NO: 3415603 - DNA, 25 bp, Homo sapien
gaaggattgagctttacgagcaggc

SEQ ID NO: 3415604 - DNA, 25 bp, Homo sapien
gatagagtcagtcaaacgtccaagg

SEQ ID NO: 3415605 - DNA, 25 bp, Homo sapien
ccctcagagcaaccgacaaagtagt

SEQ ID NO: 3415606 - DNA, 25 bp, Homo sapien
taatgcagccatagtgacctttcaa

SEQ ID NO: 3415607 - DNA, 25 bp, Homo sapien
gccctctcaaagctgttattcataa

SEQ ID NO: 3415608 - DNA, 25 bp, Homo sapien
tctgaaatccattccataacaccca

SEQ ID NO: 3415609 - DNA, 25 bp, Homo sapien
tattagtaatatcaccatcctctga

SEQ ID NO: 3415610 - DNA, 25 bp, Homo sapien
agtttgtccttctgaaccagttcat

SEQ ID NO: 3415611 - DNA, 25 bp, Homo sapien
tcgccagtttgtccttctgaaccag

SEQ ID NO: 3415612 - DNA, 25 bp, Homo sapien
gccagtttgtccttctgaaccagtt

SEQ ID NO: 3415613 - DNA, 25 bp, Homo sapien
tctgaaccagttcatttttatccat

SEQ ID NO: 3415614 - DNA, 25 bp, Homo sapien
cagactgcagtgtcatcatattgct

SEQ ID NO: 3415615 - DNA, 25 bp, Homo sapien
tggataattcgccttctttctcagt

SEQ ID NO: 3415616 - DNA, 25 bp, Homo sapien
ctcattggataattcgccttctttc

SEQ ID NO: 3415617 - DNA, 25 bp, Homo sapien
gaactgaaagacgattcctctcctc

SEQ ID NO: 3415618 - DNA, 25 bp, Homo sapien
taaggaactgaaagacgattcctct

SEQ ID NO: 3415619 - DNA, 25 bp, Homo sapien
catagcacatcattgtagatatctc

SEQ ID NO: 3415620 - DNA, 25 bp, Homo sapien
acatagcacatcattgtagatatct

SEQ ID NO: 3415621 - DNA, 25 bp, Homo sapien
tcaggccaagtaaaaatagtagtct

SEQ ID NO: 3415622 - DNA, 25 bp, Homo sapien
ctcaggccaagtaaaaatagtagtc

SEQ ID NO: 3415623 - DNA, 25 bp, Homo sapien
cttttgtgtcataaccagcagcagc

SEQ ID NO: 3415624 - DNA, 25 bp, Homo sapien
tttagagccatacccaatctgatag

SEQ ID NO: 3415625 - DNA, 25 bp, Homo sapien
cagagaagtttagagccatacccaa

SEQ ID NO: 3415626 - DNA, 25 bp, Homo sapien
gaagtttagagccatacccaatctg

SEQ ID NO: 3415627 - DNA, 25 bp, Homo sapien
agacagagaagtttagagccatacc

SEQ ID NO: 3415628 - DNA, 25 bp, Homo sapien
taactgcattagcaggcgatctttg

SEQ ID NO: 3415629 - DNA, 25 bp, Homo sapien
tgcctttacaagtgaatgagatttc

SEQ ID NO: 3415630 - DNA, 25 bp, Homo sapien
gttgtctctcagtaactgcattagc

SEQ ID NO: 3415631 - DNA, 25 bp, Homo sapien
ttagcaggcgatctttgtatgactc

SEQ ID NO: 3415632 - DNA, 25 bp, Homo sapien
tctgtgactggaacgaattatccct

SEQ ID NO: 3415633 - DNA, 25 bp, Homo sapien
agttactatatctgtgactggaacg

SEQ ID NO: 3415634 - DNA, 25 bp, Homo sapien
tactatatctgtgactggaacgaat

SEQ ID NO: 3415635 - DNA, 25 bp, Homo sapien
tccccatggggacaaatcaatatgt

SEQ ID NO: 3415636 - DNA, 25 bp, Homo sapien
ccacactttggttcccttcagccat

SEQ ID NO: 3415637 - DNA, 25 bp, Homo sapien
gcccacactttggttcccttcagcc

SEQ ID NO: 3415638 - DNA, 25 bp, Homo sapien
cccacactttggttcccttcagcca

SEQ ID NO: 3415639 - DNA, 25 bp, Homo sapien
attatcttctatgcccacactttgg

SEQ ID NO: 3415640 - DNA, 25 bp, Homo sapien
attattatattgagacttggtggat

SEQ ID NO: 3415641 - DNA, 25 bp, Homo sapien
tattgagacttggtggatttcctct

SEQ ID NO: 3415642 - DNA, 25 bp, Homo sapien
tactgcatgctctgaataggcagtt

SEQ ID NO: 3415643 - DNA, 25 bp, Homo sapien
tatattgagacttggtggatttcct

SEQ ID NO: 3415644 - DNA, 25 bp, Homo sapien
gagagcaagatttgctctcctatta

SEQ ID NO: 3415645 - DNA, 25 bp, Homo sapien
gctctcctattactttctgtgtcca

SEQ ID NO: 3415646 - DNA, 25 bp, Homo sapien
ctcctgtgggagagcaagatttgct

SEQ ID NO: 3415647 - DNA, 25 bp, Homo sapien
gaaggctcctgtgggagagcaagat

SEQ ID NO: 3415648 - DNA, 25 bp, Homo sapien
gggatgaggccgacttcaatagtct

SEQ ID NO: 3415649 - DNA, 25 bp, Homo sapien
aaaactgtcagccatgtatgcagtg

SEQ ID NO: 3415650 - DNA, 25 bp, Homo sapien
gggagatatttccaagacttcaaat

SEQ ID NO: 3415651 - DNA, 25 bp, Homo sapien
caatagtctgcctgaagatacttcc

SEQ ID NO: 3415652 - DNA, 25 bp, Homo sapien
tctagtcaaagttggaggaggctca

SEQ ID NO: 3415653 - DNA, 25 bp, Homo sapien
agtcaaagttggaggaggctcactc

SEQ ID NO: 3415654 - DNA, 25 bp, Homo sapien
ctagtcaaagttggaggaggctcac

SEQ ID NO: 3415655 - DNA, 25 bp, Homo sapien
tagtcaaagttggaggaggctcact

SEQ ID NO: 3415656 - DNA, 25 bp, Homo sapien
gtgaaatatcaagtacagagcagac

SEQ ID NO: 3415657 - DNA, 25 bp, Homo sapien
cagagcagacaactgttccaaaaca

SEQ ID NO: 3415658 - DNA, 25 bp, Homo sapien
tctccctcaatgtgtgaaatatcaa

SEQ ID NO: 3415659 - DNA, 25 bp, Homo sapien
aaaggcatatcatagcagtcagaat

SEQ ID NO: 3415660 - DNA, 25 bp, Homo sapien
taattgacaacattccagaaataga

SEQ ID NO: 3415661 - DNA, 25 bp, Homo sapien
gatataattgacaacattccagaaa

SEQ ID NO: 3415662 - DNA, 25 bp, Homo sapien
cagatatgttgcatttctcctttca

SEQ ID NO: 3415663 - DNA, 25 bp, Homo sapien
ttcagatataattgacaacattcca

SEQ ID NO: 3415664 - DNA, 25 bp, Homo sapien
gatgtggatataggccaagctcttc

SEQ ID NO: 3415665 - DNA, 25 bp, Homo sapien
gatcaggatggtaattcccgttccc

SEQ ID NO: 3415666 - DNA, 25 bp, Homo sapien
ttgatgatcaggatggtaattcccg

SEQ ID NO: 3415667 - DNA, 25 bp, Homo sapien
tggatgtggatataggccaagctct

SEQ ID NO: 3415668 - DNA, 25 bp, Homo sapien
tgacacagcactaccaagtcccaga

SEQ ID NO: 3415669 - DNA, 25 bp, Homo sapien
tgtgagtgacacagcactaccaagt

SEQ ID NO: 3415670 - DNA, 25 bp, Homo sapien
tgagtgacacagcactaccaagtcc

SEQ ID NO: 3415671 - DNA, 25 bp, Homo sapien
agattgtgagtgacacagcactacc

SEQ ID NO: 3415672 - DNA, 25 bp, Homo sapien
tgaatatatgtttaattcttcataa

SEQ ID NO: 3415673 - DNA, 25 bp, Homo sapien
aattcttcataaacacgatcctctg

SEQ ID NO: 3415674 - DNA, 25 bp, Homo sapien
gaatatatgtttaattcttcataaa

SEQ ID NO: 3415675 - DNA, 25 bp, Homo sapien
aatcaatgggaggagacatttcccc

SEQ ID NO: 3415676 - DNA, 25 bp, Homo sapien
gagacatttcccctgggtcttccaa

SEQ ID NO: 3415677 - DNA, 25 bp, Homo sapien
ttataaatcaatgggaggagacatt

SEQ ID NO: 3415678 - DNA, 25 bp, Homo sapien
atgggaggagacatttcccctgggt

SEQ ID NO: 3415679 - DNA, 25 bp, Homo sapien
tgtcatcaggccctctatggctgca

SEQ ID NO: 3415680 - DNA, 25 bp, Homo sapien
tacaatactgcatcgtgggatagag

SEQ ID NO: 3415681 - DNA, 25 bp, Homo sapien
cagtagccccttaacaagaccttgg

SEQ ID NO: 3415682 - DNA, 25 bp, Homo sapien
gatccactcctagaggtcctggtaa

SEQ ID NO: 3415683 - DNA, 25 bp, Homo sapien
agaatgcagtgctcatggcagagca

SEQ ID NO: 3415684 - DNA, 25 bp, Homo sapien
tctggcatgtcctcaaaaatgactc

SEQ ID NO: 3415685 - DNA, 25 bp, Homo sapien
cctgcctcacagttacattggtaat

SEQ ID NO: 3415686 - DNA, 25 bp, Homo sapien
tggatatgaagaactattgacttct

SEQ ID NO: 3415687 - DNA, 25 bp, Homo sapien
cagaaagttgattcttatgataata

SEQ ID NO: 3415688 - DNA, 25 bp, Homo sapien
tttgtcagcgaagggaatgagactc

SEQ ID NO: 3415689 - DNA, 25 bp, Homo sapien
ttgcccctggtgatcttaaaattcg

SEQ ID NO: 3415690 - DNA, 25 bp, Homo sapien
tgctggccggcttcacttaaccttg

SEQ ID NO: 3415691 - DNA, 25 bp, Homo sapien
tttgctgaggacactagaacctggc

SEQ ID NO: 3415692 - DNA, 25 bp, Homo sapien
cactgctgtgctgcggtggaaacag

SEQ ID NO: 3415693 - DNA, 25 bp, Homo sapien
gcggtggaaacaggcttactctgac

SEQ ID NO: 3415694 - DNA, 25 bp, Homo sapien
aattctgcctagctgtgctcactgc

SEQ ID NO: 3415695 - DNA, 25 bp, Homo sapien
tgctggaattctgcctagctgtgct

SEQ ID NO: 3415696 - DNA, 25 bp, Homo sapien
ctgctatacagccaaagccagtctg

SEQ ID NO: 3415697 - DNA, 25 bp, Homo sapien
tgctatacagccaaagccagtctgg

SEQ ID NO: 3415698 - DNA, 25 bp, Homo sapien
ccagccctttttgagattgaagaag

SEQ ID NO: 3415699 - DNA, 25 bp, Homo sapien
taccagagacatcgaggctttagcg

SEQ ID NO: 3415700 - DNA, 25 bp, Homo sapien
tactactggctactaggaggcccag

SEQ ID NO: 3415701 - DNA, 25 bp, Homo sapien
tctaggcatcaagaatactactggc

SEQ ID NO: 3415702 - DNA, 25 bp, Homo sapien
catctgggaagtgtacccaatagct

SEQ ID NO: 3415703 - DNA, 25 bp, Homo sapien
ggttgccttgtctgtgtggaaagaa

SEQ ID NO: 3415704 - DNA, 25 bp, Homo sapien
accccatctgggaagtgtacccaat

SEQ ID NO: 3415705 - DNA, 25 bp, Homo sapien
cccatctgggaagtgtacccaatag

SEQ ID NO: 3415706 - DNA, 25 bp, Homo sapien
tcctcaaagttctttggtctagacc

SEQ ID NO: 3415707 - DNA, 25 bp, Homo sapien
cacacctcactcagtttaaatctgc

SEQ ID NO: 3415708 - DNA, 25 bp, Homo sapien
cctcttctagcagatgtttggaacc

SEQ ID NO: 3415709 - DNA, 25 bp, Homo sapien
ttggtctagacccaatcaacttccc

SEQ ID NO: 3415710 - DNA, 25 bp, Homo sapien
tgcaatgtctgctgtaggtctgatg

SEQ ID NO: 3415711 - DNA, 25 bp, Homo sapien
ctgcaatgtctgctgtaggtctgat

SEQ ID NO: 3415712 - DNA, 25 bp, Homo sapien
gcaatgtctgctgtaggtctgatgc

SEQ ID NO: 3415713 - DNA, 25 bp, Homo sapien
attcctatattgagacatctgcata

SEQ ID NO: 3415714 - DNA, 25 bp, Homo sapien
aatgttccacccctcttgtgaccac

SEQ ID NO: 3415715 - DNA, 25 bp, Homo sapien
tattgagacatctgcatatattgaa

SEQ ID NO: 3415716 - DNA, 25 bp, Homo sapien
catatattgaaaccatttgcaggaa

SEQ ID NO: 3415717 - DNA, 25 bp, Homo sapien
tgacttatttaagttgttccaaaga

SEQ ID NO: 3415718 - DNA, 25 bp, Homo sapien
gctccaagtatatttgacttattta

SEQ ID NO: 3415719 - DNA, 25 bp, Homo sapien
tatttgacttatttaagttgttcca

SEQ ID NO: 3415720 - DNA, 25 bp, Homo sapien
aagtatatttgacttatttaagttg

SEQ ID NO: 3415721 - DNA, 25 bp, Homo sapien
ctcgaatctctctccttttaatttt

SEQ ID NO: 3415722 - DNA, 25 bp, Homo sapien
tctgaataagtcctccattggagtc

SEQ ID NO: 3415723 - DNA, 25 bp, Homo sapien
cacatatttagaaggcaatcagtct

SEQ ID NO: 3415724 - DNA, 25 bp, Homo sapien
gaatcatcgaagtcagtagtaaagg

SEQ ID NO: 3415725 - DNA, 25 bp, Homo sapien
cacttccctggaaaagtatagttct

SEQ ID NO: 3415726 - DNA, 25 bp, Homo sapien
agcccctggcatggcctgttccatt

SEQ ID NO: 3415727 - DNA, 25 bp, Homo sapien
ggccagcccctggcatggcctgttc

SEQ ID NO: 3415728 - DNA, 25 bp, Homo sapien
gcatggcctgttccattccttgcat

SEQ ID NO: 3415729 - DNA, 25 bp, Homo sapien
cagcccctggcatggcctgttccat

SEQ ID NO: 3415730 - DNA, 25 bp, Homo sapien
cacagatgtgaatgtatgacagcca

SEQ ID NO: 3415731 - DNA, 25 bp, Homo sapien
ccacagatgtgaatgtatgacagcc

SEQ ID NO: 3415732 - DNA, 25 bp, Homo sapien
acagatgtgaatgtatgacagccat

SEQ ID NO: 3415733 - DNA, 25 bp, Homo sapien
ttccacagatgtgaatgtatgacag

SEQ ID NO: 3415734 - DNA, 25 bp, Homo sapien
ctcgcgacgtctatcattgccaata

SEQ ID NO: 3415735 - DNA, 25 bp, Homo sapien
gatacctacgatgttacttctacca

SEQ ID NO: 3415736 - DNA, 25 bp, Homo sapien
agtatgccagaaccagcccagaggt

SEQ ID NO: 3415737 - DNA, 25 bp, Homo sapien
tttcaaggttaaaaggagtatgcca

SEQ ID NO: 3415738 - DNA, 25 bp, Homo sapien
tattagatgccatacacatcattgt

SEQ ID NO: 3415739 - DNA, 25 bp, Homo sapien
tagggttacttccataagtattaga

SEQ ID NO: 3415740 - DNA, 25 bp, Homo sapien
ccccaaattgtgtacccgatataca

SEQ ID NO: 3415741 - DNA, 25 bp, Homo sapien
cgatatacacggaaatagggttact

SEQ ID NO: 3415742 - DNA, 25 bp, Homo sapien
cttttgtagttctaattcctgctgc

SEQ ID NO: 3415743 - DNA, 25 bp, Homo sapien
ggccttttgtagttctaattcctgc

SEQ ID NO: 3415744 - DNA, 25 bp, Homo sapien
aggccttttgtagttctaattcctg

SEQ ID NO: 3415745 - DNA, 25 bp, Homo sapien
ccttttgtagttctaattcctgctg

SEQ ID NO: 3415746 - DNA, 25 bp, Homo sapien
gatattcattcctagactacctcgg

SEQ ID NO: 3415747 - DNA, 25 bp, Homo sapien
gctaaatgtgttgattaagatccct

SEQ ID NO: 3415748 - DNA, 25 bp, Homo sapien
tggaatgaataaaacgccaagctaa

SEQ ID NO: 3415749 - DNA, 25 bp, Homo sapien
ccatagtagttacagtaagggtgat

SEQ ID NO: 3415750 - DNA, 25 bp, Homo sapien
cattaagatggacatagtcccatga

SEQ ID NO: 3415751 - DNA, 25 bp, Homo sapien
attaagatggacatagtcccatgac

SEQ ID NO: 3415752 - DNA, 25 bp, Homo sapien
agattagaatgcagacctccctggg

SEQ ID NO: 3415753 - DNA, 25 bp, Homo sapien
tgagtaactgcacaggtcccatgcc

SEQ ID NO: 3415754 - DNA, 25 bp, Homo sapien
gcattagatcaagcacagggctctt

SEQ ID NO: 3415755 - DNA, 25 bp, Homo sapien
tagtttagcaaagacacctcaaggg

SEQ ID NO: 3415756 - DNA, 25 bp, Homo sapien
caggggtacaacagagcactttaca

SEQ ID NO: 3415757 - DNA, 25 bp, Homo sapien
ccagcacacttaggaggagcaccat

SEQ ID NO: 3415758 - DNA, 25 bp, Homo sapien
acagagcactttacatccaaaggca

SEQ ID NO: 3415759 - DNA, 25 bp, Homo sapien
cagagagggacacagcaatgcagaa

SEQ ID NO: 3415760 - DNA, 25 bp, Homo sapien
cagaggttatgcacttcgagggaga

SEQ ID NO: 3415761 - DNA, 25 bp, Homo sapien
gaaagagtttgcctccatgtccaaa

SEQ ID NO: 3415762 - DNA, 25 bp, Homo sapien
ggctcagactcttgaaccatggaaa

SEQ ID NO: 3415763 - DNA, 25 bp, Homo sapien
gattaaagcattagcaaccggctga

SEQ ID NO: 3415764 - DNA, 25 bp, Homo sapien
tcaaacctcattaagtggtgtggga

SEQ ID NO: 3415765 - DNA, 25 bp, Homo sapien
ctcattaagtggtgtgggagatgct

SEQ ID NO: 3415766 - DNA, 25 bp, Homo sapien
acctcattaagtggtgtgggagatg

SEQ ID NO: 3415767 - DNA, 25 bp, Homo sapien
aaacctcattaagtggtgtgggaga

SEQ ID NO: 3415768 - DNA, 25 bp, Homo sapien
caagtctatcagtatcgaagttgga

SEQ ID NO: 3415769 - DNA, 25 bp, Homo sapien
cacacacagttcataattggattac

SEQ ID NO: 3415770 - DNA, 25 bp, Homo sapien
cacagtcagcatagatttctggagc

SEQ ID NO: 3415771 - DNA, 25 bp, Homo sapien
tctggagcatttgtctgttgatctt

SEQ ID NO: 3415772 - DNA, 25 bp, Homo sapien
attaatttaacttctagtactctcg

SEQ ID NO: 3415773 - DNA, 25 bp, Homo sapien
tagtactctcgataaagagccagtg

SEQ ID NO: 3415774 - DNA, 25 bp, Homo sapien
taaagagccagtgaaatgagttatt

SEQ ID NO: 3415775 - DNA, 25 bp, Homo sapien
aaatgagttattgagttccagggaa

SEQ ID NO: 3415776 - DNA, 25 bp, Homo sapien
cactttggtccccataggtaggaga

SEQ ID NO: 3415777 - DNA, 25 bp, Homo sapien
gatggccatgcatctccacttcctg

SEQ ID NO: 3415778 - DNA, 25 bp, Homo sapien
tatgtgttttgcatggaggcctcat

SEQ ID NO: 3415779 - DNA, 25 bp, Homo sapien
caaaccttatttgccaatgtaatgc

SEQ ID NO: 3415780 - DNA, 25 bp, Homo sapien
gcacatgcaaggacgggctgtgcta

SEQ ID NO: 3415781 - DNA, 25 bp, Homo sapien
aatgatagctcgtgcacatgcaagg

SEQ ID NO: 3415782 - DNA, 25 bp, Homo sapien
tcaaatgatagctcgtgcacatgca

SEQ ID NO: 3415783 - DNA, 25 bp, Homo sapien
cacatgcaaggacgggctgtgctac

SEQ ID NO: 3415784 - DNA, 25 bp, Homo sapien
agttgaatctgatgcttaatatgat

SEQ ID NO: 3415785 - DNA, 25 bp, Homo sapien
gatgcttaatatgatttttactcca

SEQ ID NO: 3415786 - DNA, 25 bp, Homo sapien
tgatttttactccatgtatactttt

SEQ ID NO: 3415787 - DNA, 25 bp, Homo sapien
gaaaatataagttgaatctgatgct

SEQ ID NO: 3415788 - DNA, 25 bp, Homo sapien
caaataccatatgttgcacatttcc

SEQ ID NO: 3415789 - DNA, 25 bp, Homo sapien
ttcttataatctttgatatttagga

SEQ ID NO: 3415790 - DNA, 25 bp, Homo sapien
tttcttataatctttgatatttagg

SEQ ID NO: 3415791 - DNA, 25 bp, Homo sapien
aatagatttagctcttaaaagtaca

SEQ ID NO: 3415792 - DNA, 25 bp, Homo sapien
gaagaaaaaatagatttagctctta

SEQ ID NO: 3415793 - DNA, 25 bp, Homo sapien
agatttagctcttaaaagtacagag

SEQ ID NO: 3415794 - DNA, 25 bp, Homo sapien
cggaagaaaaaatagatttagctct

SEQ ID NO: 3415795 - DNA, 25 bp, Homo sapien
ctcattggaaataggttgtgatgtc

SEQ ID NO: 3415796 - DNA, 25 bp, Homo sapien
cattggaaataggttgtgatgtcat

SEQ ID NO: 3415797 - DNA, 25 bp, Homo sapien
atggtctcattggaaataggttgtg

SEQ ID NO: 3415798 - DNA, 25 bp, Homo sapien
tatgatggtctcattggaaataggt

SEQ ID NO: 3415799 - DNA, 25 bp, Homo sapien
ctttgacttttgcctgtagacgttt

SEQ ID NO: 3415800 - DNA, 25 bp, Homo sapien
tttgacttttgcctgtagacgtttc

SEQ ID NO: 3415801 - DNA, 25 bp, Homo sapien
tgacttttgcctgtagacgtttctt

SEQ ID NO: 3415802 - DNA, 25 bp, Homo sapien
ttgacttttgcctgtagacgtttct

SEQ ID NO: 3415803 - DNA, 25 bp, Homo sapien
ctctccaacatgttctgaattagat

SEQ ID NO: 3415804 - DNA, 25 bp, Homo sapien
ctccaacatgttctgaattagattt

SEQ ID NO: 3415805 - DNA, 25 bp, Homo sapien
ctaacccctctccaacatgttctga

SEQ ID NO: 3415806 - DNA, 25 bp, Homo sapien
ccaacatgttctgaattagatttac

SEQ ID NO: 3415807 - DNA, 25 bp, Homo sapien
caggatttaatgcagccgggttgac

SEQ ID NO: 3415808 - DNA, 25 bp, Homo sapien
ctgcaatgaggcaggatttaatgca

SEQ ID NO: 3415809 - DNA, 25 bp, Homo sapien
cagccgggttgacagacaggagaat

SEQ ID NO: 3415810 - DNA, 25 bp, Homo sapien
aatgcagccgggttgacagacagga

SEQ ID NO: 3415811 - DNA, 25 bp, Homo sapien
gtatatccttttcgtccaacttaca

SEQ ID NO: 3415812 - DNA, 25 bp, Homo sapien
atggtgtaaggtgaatgataatcat

SEQ ID NO: 3415813 - DNA, 25 bp, Homo sapien
tggtatatccttttcgtccaactta

SEQ ID NO: 3415814 - DNA, 25 bp, Homo sapien
agaagaagtctggttggtatatcct

SEQ ID NO: 3415815 - DNA, 25 bp, Homo sapien
agcagtgagcacagctaggcagaac

SEQ ID NO: 3415816 - DNA, 25 bp, Homo sapien
agacagtctgtttccactgcagcac

SEQ ID NO: 3415817 - DNA, 25 bp, Homo sapien
cagtagaaaccagcatcagagacag

SEQ ID NO: 3415818 - DNA, 25 bp, Homo sapien
ggcagaactccaacacagtagaaac

SEQ ID NO: 3415819 - DNA, 25 bp, Homo sapien
cagcatcatgagtcgtctttgagga

SEQ ID NO: 3415820 - DNA, 25 bp, Homo sapien
cttcatatccagcatcatgagtcgt

SEQ ID NO: 3415821 - DNA, 25 bp, Homo sapien
catatccagcatcatgagtcgtctt

SEQ ID NO: 3415822 - DNA, 25 bp, Homo sapien
tatccagcatcatgagtcgtctttg

SEQ ID NO: 3415823 - DNA, 25 bp, Homo sapien
tacatgggataaatcagtagcacct

SEQ ID NO: 3415824 - DNA, 25 bp, Homo sapien
gctgtatcctttgcctcactgtgat

SEQ ID NO: 3415825 - DNA, 25 bp, Homo sapien
tcagtatcaggcaaaccaagagatc

SEQ ID NO: 3415826 - DNA, 25 bp, Homo sapien
gaagccggctactttcatacactcg

SEQ ID NO: 3415827 - DNA, 25 bp, Homo sapien
tcttgaggattctaggtgtgcctgt

SEQ ID NO: 3415828 - DNA, 25 bp, Homo sapien
tctggctatggaagggtggtctagc

SEQ ID NO: 3415829 - DNA, 25 bp, Homo sapien
ctatcatctagctctggtgtctggc

SEQ ID NO: 3415830 - DNA, 25 bp, Homo sapien
taccaggaagccacttgagtggtct

SEQ ID NO: 3415831 - DNA, 25 bp, Homo sapien
gaacgatcttggtgctctgctctcc

SEQ ID NO: 3415832 - DNA, 25 bp, Homo sapien
cactggctgttcctgccagaacgat

SEQ ID NO: 3415833 - DNA, 25 bp, Homo sapien
ccagaacgatcttggtgctctgctc

SEQ ID NO: 3415834 - DNA, 25 bp, Homo sapien
agcctctgagacttcctgtcccttt

SEQ ID NO: 3415835 - DNA, 25 bp, Homo sapien
tgttctcgcagcctggtcctgtgtg

SEQ ID NO: 3415836 - DNA, 25 bp, Homo sapien
ctgttctcgcagcctggtcctgtgt

SEQ ID NO: 3415837 - DNA, 25 bp, Homo sapien
ggagggacccacagctttcaagaca

SEQ ID NO: 3415838 - DNA, 25 bp, Homo sapien
gacatggaggtcaacagctctgccc

SEQ ID NO: 3415839 - DNA, 25 bp, Homo sapien
tgtaagactgagtgacacaccagga

SEQ ID NO: 3415840 - DNA, 25 bp, Homo sapien
ggatgataatccaattccctggctg

SEQ ID NO: 3415841 - DNA, 25 bp, Homo sapien
tgtgagaaacccccatggtttggga

SEQ ID NO: 3415842 - DNA, 25 bp, Homo sapien
cccccatggtttgggattgtaatag

SEQ ID NO: 3415843 - DNA, 25 bp, Homo sapien
ccatggtttgggattgtaatagcat

SEQ ID NO: 3415844 - DNA, 25 bp, Homo sapien
ctgtgagaaacccccatggtttggg

SEQ ID NO: 3415845 - DNA, 25 bp, Homo sapien
cagcccgttctgcaggtaatcttcg

SEQ ID NO: 3415846 - DNA, 25 bp, Homo sapien
caagaacggtggtttctgttggcag

SEQ ID NO: 3415847 - DNA, 25 bp, Homo sapien
ctctctttgagggatagtgatgccc

SEQ ID NO: 3415848 - DNA, 25 bp, Homo sapien
tcttcgttttggtacatgtgtccag

SEQ ID NO: 3415849 - DNA, 25 bp, Homo sapien
tccccttataatgaggtggacttac

SEQ ID NO: 3415850 - DNA, 25 bp, Homo sapien
gtattccccttataatgaggtggac

SEQ ID NO: 3415851 - DNA, 25 bp, Homo sapien
tattccccttataatgaggtggact

SEQ ID NO: 3415852 - DNA, 25 bp, Homo sapien
ttccccttataatgaggtggactta

SEQ ID NO: 3415853 - DNA, 25 bp, Homo sapien
gttttagtttctagaaactgctgca

SEQ ID NO: 3415854 - DNA, 25 bp, Homo sapien
aagactaacctgttaattgtgaagc

SEQ ID NO: 3415855 - DNA, 25 bp, Homo sapien
ggagtcagccagaaaagagtgaaag

SEQ ID NO: 3415856 - DNA, 25 bp, Homo sapien
gtcctcattagcctggagtcagcca

SEQ ID NO: 3415857 - DNA, 25 bp, Homo sapien
cctaaaaatgggtacccagacatca

SEQ ID NO: 3415858 - DNA, 25 bp, Homo sapien
aaaccaagatggcccccagacttga

SEQ ID NO: 3415859 - DNA, 25 bp, Homo sapien
ccagacatcaaagtggtggaaattg

SEQ ID NO: 3415860 - DNA, 25 bp, Homo sapien
gacatcaaagtggtggaaattgctg

SEQ ID NO: 3415861 - DNA, 25 bp, Homo sapien
caaggtgcagaaacacatggactgg

SEQ ID NO: 3415862 - DNA, 25 bp, Homo sapien
agggtccagtatgagctaacgctag

SEQ ID NO: 3415863 - DNA, 25 bp, Homo sapien
taacgctagcttctctaaggagatg

SEQ ID NO: 3415864 - DNA, 25 bp, Homo sapien
taatcacaggcaaagagggtccagt

SEQ ID NO: 3415865 - DNA, 25 bp, Homo sapien
tatattgactttgaatgacatgcag

SEQ ID NO: 3415866 - DNA, 25 bp, Homo sapien
tcactaggaactgaggaggcctgga

SEQ ID NO: 3415867 - DNA, 25 bp, Homo sapien
ctgatataagaatgtctatattgac

SEQ ID NO: 3415868 - DNA, 25 bp, Homo sapien
tgaatgacatgcagatgcacagagg

SEQ ID NO: 3415869 - DNA, 25 bp, Homo sapien
tcactcaatcaaaaagtgatgttgg

SEQ ID NO: 3415870 - DNA, 25 bp, Homo sapien
caccatgtcactgtcaatcactcaa

SEQ ID NO: 3415871 - DNA, 25 bp, Homo sapien
gatctatattgctagataggcctaa

SEQ ID NO: 3415872 - DNA, 25 bp, Homo sapien
cttgtggatctatattgctagatag

SEQ ID NO: 3415873 - DNA, 25 bp, Homo sapien
ttccagagataattgagagggatcc

SEQ ID NO: 3415874 - DNA, 25 bp, Homo sapien
ttgagagggatccagtaatgccaaa

SEQ ID NO: 3415875 - DNA, 25 bp, Homo sapien
tagttgattgttttccagagataat

SEQ ID NO: 3415876 - DNA, 25 bp, Homo sapien
aagggcttagttgattgttttccag

SEQ ID NO: 3415877 - DNA, 25 bp, Homo sapien
gaaggcaagaaatttgggctctact

SEQ ID NO: 3415878 - DNA, 25 bp, Homo sapien
caattccaaccagctgagatttgat

SEQ ID NO: 3415879 - DNA, 25 bp, Homo sapien
cattgtgtagacgaaagagcactgg

SEQ ID NO: 3415880 - DNA, 25 bp, Homo sapien
tggttctaccaatgggacagccagg

SEQ ID NO: 3415881 - DNA, 25 bp, Homo sapien
cagtgctgacattgcagacatcccc

SEQ ID NO: 3415882 - DNA, 25 bp, Homo sapien
tattctagatgcacttagggcaata

SEQ ID NO: 3415883 - DNA, 25 bp, Homo sapien
tggcatgagtggtattgtctttgag

SEQ ID NO: 3415884 - DNA, 25 bp, Homo sapien
ttgagtttggtgctgcaatcagtgc

SEQ ID NO: 3415885 - DNA, 25 bp, Homo sapien
tctgatctcagaagtggcttcccaa

SEQ ID NO: 3415886 - DNA, 25 bp, Homo sapien
gaagctgcagtctagaacccaggat

SEQ ID NO: 3415887 - DNA, 25 bp, Homo sapien
gggaaatctatgcttggacttgaca

SEQ ID NO: 3415888 - DNA, 25 bp, Homo sapien
tgatccatctgtgtgcttgagcaag

SEQ ID NO: 3415889 - DNA, 25 bp, Homo sapien
tcaagatagagacagtgctgctcag

SEQ ID NO: 3415890 - DNA, 25 bp, Homo sapien
catggataattcctccttagggaga

SEQ ID NO: 3415891 - DNA, 25 bp, Homo sapien
ccttgtgtgggcacaaactgtgttt

SEQ ID NO: 3415892 - DNA, 25 bp, Homo sapien
tcagcacgtgacactattagtcctc

SEQ ID NO: 3415893 - DNA, 25 bp, Homo sapien
cagaactcactgcatttgaggtcaa

SEQ ID NO: 3415894 - DNA, 25 bp, Homo sapien
tgttaaactgacactggtcaggaga

SEQ ID NO: 3415895 - DNA, 25 bp, Homo sapien
catatattggataatagtactccga

SEQ ID NO: 3415896 - DNA, 25 bp, Homo sapien
tactccgaataaggcaatgaggata

SEQ ID NO: 3415897 - DNA, 25 bp, Homo sapien
cctcagggctaccatgctgtcagca

SEQ ID NO: 3415898 - DNA, 25 bp, Homo sapien
agatttcacatgacaggatattcag

SEQ ID NO: 3415899 - DNA, 25 bp, Homo sapien
acagagatttcacatgacaggatat

SEQ ID NO: 3415900 - DNA, 25 bp, Homo sapien
agagatttcacatgacaggatattc

SEQ ID NO: 3415901 - DNA, 25 bp, Homo sapien
atttcacatgacaggatattcagtc

SEQ ID NO: 3415902 - DNA, 25 bp, Homo sapien
caggcattcggaccgaccaaccaga

SEQ ID NO: 3415903 - DNA, 25 bp, Homo sapien
ggcattcggaccgaccaaccagaga

SEQ ID NO: 3415904 - DNA, 25 bp, Homo sapien
ctgtctccaggcattcggaccgacc

SEQ ID NO: 3415905 - DNA, 25 bp, Homo sapien
gtctccaggcattcggaccgaccaa

SEQ ID NO: 3415906 - DNA, 25 bp, Homo sapien
aatgagagatactaccttgggttcc

SEQ ID NO: 3415907 - DNA, 25 bp, Homo sapien
ggttccctgtgctcctactaggagg

SEQ ID NO: 3415908 - DNA, 25 bp, Homo sapien
tccttggtattttggcctcagctct

SEQ ID NO: 3415909 - DNA, 25 bp, Homo sapien
cctttggagtctgcttagtctgcta

SEQ ID NO: 3415910 - DNA, 25 bp, Homo sapien
gcttagtgagctgacggaaggtttt

SEQ ID NO: 3415911 - DNA, 25 bp, Homo sapien
ggttctttgatagggaggcatctta

SEQ ID NO: 3415912 - DNA, 25 bp, Homo sapien
tataagttgggtttacggacatctc

SEQ ID NO: 3415913 - DNA, 25 bp, Homo sapien
ttcaacatttttgcagggtactcca

SEQ ID NO: 3415914 - DNA, 25 bp, Homo sapien
tgcagtggtctcaatgcattccttc

SEQ ID NO: 3415915 - DNA, 25 bp, Homo sapien
tatttgattctgtgtatcctgcagt

SEQ ID NO: 3415916 - DNA, 25 bp, Homo sapien
gatgatatttctaggtgtgtatttg

SEQ ID NO: 3415917 - DNA, 25 bp, Homo sapien
caatgcattccttcaatctgaaatc

SEQ ID NO: 3415918 - DNA, 25 bp, Homo sapien
gtttccaccaaaagacagaactgta

SEQ ID NO: 3415919 - DNA, 25 bp, Homo sapien
aaagacagaactgtatgcagctaat

SEQ ID NO: 3415920 - DNA, 25 bp, Homo sapien
tgtatgcagctaataagagctccag

SEQ ID NO: 3415921 - DNA, 25 bp, Homo sapien
gaactgtatgcagctaataagagct

SEQ ID NO: 3415922 - DNA, 25 bp, Homo sapien
gacacagcaggtatcaggcgacatg

SEQ ID NO: 3415923 - DNA, 25 bp, Homo sapien
tcaggcgacatgtcagcatactcac

SEQ ID NO: 3415924 - DNA, 25 bp, Homo sapien
ctgagacacagcaggtatcaggcga

SEQ ID NO: 3415925 - DNA, 25 bp, Homo sapien
caggtatcaggcgacatgtcagcat

SEQ ID NO: 3415926 - DNA, 25 bp, Homo sapien
ccaagccgtggttctttcatgaggg

SEQ ID NO: 3415927 - DNA, 25 bp, Homo sapien
gcaggtagctgtgttcccgataaaa

SEQ ID NO: 3415928 - DNA, 25 bp, Homo sapien
tgatcccagatgaccagagtgtcct

SEQ ID NO: 3415929 - DNA, 25 bp, Homo sapien
gaaacttggctagggagactctctc

SEQ ID NO: 3415930 - DNA, 25 bp, Homo sapien
tatccaagaccgtgaagaactcttt

SEQ ID NO: 3415931 - DNA, 25 bp, Homo sapien
gtgactgggtcgaggaaaatgaact

SEQ ID NO: 3415932 - DNA, 25 bp, Homo sapien
ctttttgacctgttggatatgatct

SEQ ID NO: 3415933 - DNA, 25 bp, Homo sapien
gatatgatcttgtgactgggtcgag

SEQ ID NO: 3415934 - DNA, 25 bp, Homo sapien
gagaggtaatcctaagcacttgaga

SEQ ID NO: 3415935 - DNA, 25 bp, Homo sapien
gcctgcagagtcacgcaacttacca

SEQ ID NO: 3415936 - DNA, 25 bp, Homo sapien
tttgttcttgtaggccgggctggaa

SEQ ID NO: 3415937 - DNA, 25 bp, Homo sapien
aaagggcccagtagatctgtttctc

SEQ ID NO: 3415938 - DNA, 25 bp, Homo sapien
tggagttgcccctttataacagaga

SEQ ID NO: 3415939 - DNA, 25 bp, Homo sapien
tgctataggaccagatggagttgcc

SEQ ID NO: 3415940 - DNA, 25 bp, Homo sapien
tgtagcgaccatcgatagcagggta

SEQ ID NO: 3415941 - DNA, 25 bp, Homo sapien
tacgcccatgtggtacaaagtgcag

SEQ ID NO: 3415942 - DNA, 25 bp, Homo sapien
ctagtaagggaaagagtgagcaaac

SEQ ID NO: 3415943 - DNA, 25 bp, Homo sapien
tagaattctagagcatgctcagccc

SEQ ID NO: 3415944 - DNA, 25 bp, Homo sapien
gagatgagcccttagtgatgactct

SEQ ID NO: 3415945 - DNA, 25 bp, Homo sapien
ggaacagcaaggttatgtcacccaa

SEQ ID NO: 3415946 - DNA, 25 bp, Homo sapien
gatgacgtgagttgcccttctgtcc

SEQ ID NO: 3415947 - DNA, 25 bp, Homo sapien
gaggtctgtagggaaatgcagtcaa

SEQ ID NO: 3415948 - DNA, 25 bp, Homo sapien
agagctatgaggtctgtagggaaat

SEQ ID NO: 3415949 - DNA, 25 bp, Homo sapien
tgcagtcaatacagtttcgtttggt

SEQ ID NO: 3415950 - DNA, 25 bp, Homo sapien
aaagcccacaatgattagagcaagc

SEQ ID NO: 3415951 - DNA, 25 bp, Homo sapien
ttagagcaagcaggatctgggtagc

SEQ ID NO: 3415952 - DNA, 25 bp, Homo sapien
taagtgcaaatatagttccaaagcc

SEQ ID NO: 3415953 - DNA, 25 bp, Homo sapien
gagaaaccgatgtaattaagtgcaa

SEQ ID NO: 3415954 - DNA, 25 bp, Homo sapien
ataagtgctccccagaatggatatc

SEQ ID NO: 3415955 - DNA, 25 bp, Homo sapien
aataagtgctccccagaatggatat

SEQ ID NO: 3415956 - DNA, 25 bp, Homo sapien
ctgtgaggtatcctgtaagaataaa

SEQ ID NO: 3415957 - DNA, 25 bp, Homo sapien
ggttactgtgaggtatcctgtaaga

SEQ ID NO: 3415958 - DNA, 25 bp, Homo sapien
ttttgatttcttatcggttactgtg

SEQ ID NO: 3415959 - DNA, 25 bp, Homo sapien
tcttatcggttactgtgaggtatcc

SEQ ID NO: 3415960 - DNA, 25 bp, Homo sapien
gatgtctgtagctgagaatggtgaa

SEQ ID NO: 3415961 - DNA, 25 bp, Homo sapien
tcccagttatcgcaaccaaggagct

SEQ ID NO: 3415962 - DNA, 25 bp, Homo sapien
tgaaaagagttctactgaaaacaca

SEQ ID NO: 3415963 - DNA, 25 bp, Homo sapien
tcaaaggatggcatctggcagtact

SEQ ID NO: 3415964 - DNA, 25 bp, Homo sapien
taaaaatcagtgaatcattacatca

SEQ ID NO: 3415965 - DNA, 25 bp, Homo sapien
gacacagttcagagaagattttagg

SEQ ID NO: 3415966 - DNA, 25 bp, Homo sapien
cagagaagattttagggattcttca

SEQ ID NO: 3415967 - DNA, 25 bp, Homo sapien
ttagggattcttcatgcaaaataag

SEQ ID NO: 3415968 - DNA, 25 bp, Homo sapien
catcttggggccgtggatacttgac

SEQ ID NO: 3415969 - DNA, 25 bp, Homo sapien
ctggtgacggttcaaagccggaaga

SEQ ID NO: 3415970 - DNA, 25 bp, Homo sapien
attaagggattataggaagtggctg

SEQ ID NO: 3415971 - DNA, 25 bp, Homo sapien
tgacggttcaaagccggaagaagct

SEQ ID NO: 3415972 - DNA, 25 bp, Homo sapien
cttgcttctaaaggatgcaatagtc

SEQ ID NO: 3415973 - DNA, 25 bp, Homo sapien
aggatgcaatagtcacagagatgct

SEQ ID NO: 3415974 - DNA, 25 bp, Homo sapien
gctatgctgatgatcagtaagatta

SEQ ID NO: 3415975 - DNA, 25 bp, Homo sapien
gctgatgatcagtaagattaacaaa

SEQ ID NO: 3415976 - DNA, 25 bp, Homo sapien
ttttgagtaacatccgaaggcaaga

SEQ ID NO: 3415977 - DNA, 25 bp, Homo sapien
gaaagcatagcctccaaagataaca

SEQ ID NO: 3415978 - DNA, 25 bp, Homo sapien
gactcctagagagtgttaacttgaa

SEQ ID NO: 3415979 - DNA, 25 bp, Homo sapien
ctggttgggagactaaaggactcct

SEQ ID NO: 3415980 - DNA, 25 bp, Homo sapien
ttttgttcatctggcacaaattctc

SEQ ID NO: 3415981 - DNA, 25 bp, Homo sapien
cttttgttcatctggcacaaattct

SEQ ID NO: 3415982 - DNA, 25 bp, Homo sapien
gggagatggaaggatactttgcttt

SEQ ID NO: 3415983 - DNA, 25 bp, Homo sapien
agatggaaggatactttgcttttgt

SEQ ID NO: 3415984 - DNA, 25 bp, Homo sapien
tcttcgagttttagtgcagaatggg

SEQ ID NO: 3415985 - DNA, 25 bp, Homo sapien
tgtagagtctagctgaatggacata

SEQ ID NO: 3415986 - DNA, 25 bp, Homo sapien
ggatggcaagtcttcaggtgatata

SEQ ID NO: 3415987 - DNA, 25 bp, Homo sapien
gagtgacgcagcttggtcctgcaga

SEQ ID NO: 3415988 - DNA, 25 bp, Homo sapien
tatggcatgcgctgatagagcttgg

SEQ ID NO: 3415989 - DNA, 25 bp, Homo sapien
gagcttgggatagcatatcttggga

SEQ ID NO: 3415990 - DNA, 25 bp, Homo sapien
gatggcatggtttgttctgacaggc

SEQ ID NO: 3415991 - DNA, 25 bp, Homo sapien
tgaggcttcaggtaatatggcatgc

SEQ ID NO: 3415992 - DNA, 25 bp, Homo sapien
tctggttgaagatctgggggctgct

SEQ ID NO: 3415993 - DNA, 25 bp, Homo sapien
ctgctgaagtaggtgttgtatttca

SEQ ID NO: 3415994 - DNA, 25 bp, Homo sapien
gggctgctgaagtaggtgttgtatt

SEQ ID NO: 3415995 - DNA, 25 bp, Homo sapien
ctgaagtaggtgttgtatttcaggg

SEQ ID NO: 3415996 - DNA, 25 bp, Homo sapien
tgagcttgcttatctacggagtgcc

SEQ ID NO: 3415997 - DNA, 25 bp, Homo sapien
tgctttggagattgccagcctttgc

SEQ ID NO: 3415998 - DNA, 25 bp, Homo sapien
gctggtttaaggaatgccgtcttga

SEQ ID NO: 3415999 - DNA, 25 bp, Homo sapien
gcttgcacgtctaaagaatgtctcc

SEQ ID NO: 3416000 - DNA, 25 bp, Homo sapien
tggagattgcctttgtggaattgcc

SEQ ID NO: 3416001 - DNA, 25 bp, Homo sapien
tgacagtcctgggttgtccagcctg

SEQ ID NO: 3416002 - DNA, 25 bp, Homo sapien
tgaatcttggcataacagttttggc

SEQ ID NO: 3416003 - DNA, 25 bp, Homo sapien
ttcttggccaaaagattgacagtcc

SEQ ID NO: 3416004 - DNA, 25 bp, Homo sapien
attgccattctcgtgctttataatc

SEQ ID NO: 3416005 - DNA, 25 bp, Homo sapien
ttcaaattgccattctcgtgcttta

SEQ ID NO: 3416006 - DNA, 25 bp, Homo sapien
tgtgtttgccagtgcttcatttcaa

SEQ ID NO: 3416007 - DNA, 25 bp, Homo sapien
gcttcatttcaaattgccattctcg

SEQ ID NO: 3416008 - DNA, 25 bp, Homo sapien
gaggtttgccctatacatttcatgt

SEQ ID NO: 3416009 - DNA, 25 bp, Homo sapien
tgtaactctggattgaaggtcttgt

SEQ ID NO: 3416010 - DNA, 25 bp, Homo sapien
tgtgtcttgtactgagctttggcca

SEQ ID NO: 3416011 - DNA, 25 bp, Homo sapien
gtcttctgattgcaggtcccctgag

SEQ ID NO: 3416012 - DNA, 25 bp, Homo sapien
gtgtggtattgggtagattctgcat

SEQ ID NO: 3416013 - DNA, 25 bp, Homo sapien
cagtgtggtattgggtagattctgc

SEQ ID NO: 3416014 - DNA, 25 bp, Homo sapien
gcagtgtggtattgggtagattctg

SEQ ID NO: 3416015 - DNA, 25 bp, Homo sapien
tgtggtattgggtagattctgcatg

SEQ ID NO: 3416016 - DNA, 25 bp, Homo sapien
tgtttgagtgctcagcatgcccttc

SEQ ID NO: 3416017 - DNA, 25 bp, Homo sapien
aaccacagttgagaacacagattgg

SEQ ID NO: 3416018 - DNA, 25 bp, Homo sapien
ttttttgtaagttaatgaggtggca

SEQ ID NO: 3416019 - DNA, 25 bp, Homo sapien
gaacaaattgtttgagtgctcagca

SEQ ID NO: 3416020 - DNA, 25 bp, Homo sapien
cacatacataaagtgatgatacagt

SEQ ID NO: 3416021 - DNA, 25 bp, Homo sapien
tcttcacatacataaagtgatgata

SEQ ID NO: 3416022 - DNA, 25 bp, Homo sapien
tatttcttcacatacataaagtgat

SEQ ID NO: 3416023 - DNA, 25 bp, Homo sapien
cataaagtgatgatacagtgttaac

SEQ ID NO: 3416024 - DNA, 25 bp, Homo sapien
acagtattaggtgtctcagaaaggg

SEQ ID NO: 3416025 - DNA, 25 bp, Homo sapien
ccctcagtgggatggaaaggcctca

SEQ ID NO: 3416026 - DNA, 25 bp, Homo sapien
tattgtaagtctaacctataggcgt

SEQ ID NO: 3416027 - DNA, 25 bp, Homo sapien
ggagcttctgacttgccccttagca

SEQ ID NO: 3416028 - DNA, 25 bp, Homo sapien
gttggtacttcagtctagaccatgt

SEQ ID NO: 3416029 - DNA, 25 bp, Homo sapien
gtgataatttgaaaggagatgattt

SEQ ID NO: 3416030 - DNA, 25 bp, Homo sapien
tcagtctagaccatgttcttttctt

SEQ ID NO: 3416031 - DNA, 25 bp, Homo sapien
ggtacttcagtctagaccatgttct

SEQ ID NO: 3416032 - DNA, 25 bp, Homo sapien
cagaaacaccggactgtgtgcggtg

SEQ ID NO: 3416033 - DNA, 25 bp, Homo sapien
gaaacaccggactgtgtgcggtgct

SEQ ID NO: 3416034 - DNA, 25 bp, Homo sapien
aacaccggactgtgtgcggtgcttg

SEQ ID NO: 3416035 - DNA, 25 bp, Homo sapien
accggactgtgtgcggtgcttgaat

SEQ ID NO: 3416036 - DNA, 25 bp, Homo sapien
tctgtggactcatattctgaagcag

SEQ ID NO: 3416037 - DNA, 25 bp, Homo sapien
tgaaaaggtcgtggctgaaagttct

SEQ ID NO: 3416038 - DNA, 25 bp, Homo sapien
tttgagttgaaaaggtcgtggctga

SEQ ID NO: 3416039 - DNA, 25 bp, Homo sapien
ggctgaaagttctgtggactcatat

SEQ ID NO: 3416040 - DNA, 25 bp, Homo sapien
tggatatggttttaacaaggtgaaa

SEQ ID NO: 3416041 - DNA, 25 bp, Homo sapien
cttggatatggttttaacaaggtga

SEQ ID NO: 3416042 - DNA, 25 bp, Homo sapien
aaggtcataattccaaacaggatct

SEQ ID NO: 3416043 - DNA, 25 bp, Homo sapien
agaaaaggtcataattccaaacagg

SEQ ID NO: 3416044 - DNA, 25 bp, Homo sapien
aaaacagagccccagaatggatatc

SEQ ID NO: 3416045 - DNA, 25 bp, Homo sapien
caaaacagagccccagaatggatat

SEQ ID NO: 3416046 - DNA, 25 bp, Homo sapien
actgcaattaggaaggctccagaat

SEQ ID NO: 3416047 - DNA, 25 bp, Homo sapien
caaatgtgaggagaatgattccagc

SEQ ID NO: 3416048 - DNA, 25 bp, Homo sapien
gatgaaaccaaatgtgaggagaatg

SEQ ID NO: 3416049 - DNA, 25 bp, Homo sapien
gctattgctcccagggcactaagaa

SEQ ID NO: 3416050 - DNA, 25 bp, Homo sapien
gaaaattcattattcggctcaatat

SEQ ID NO: 3416051 - DNA, 25 bp, Homo sapien
aggacagtaacagccttacactgac

SEQ ID NO: 3416052 - DNA, 25 bp, Homo sapien
acaggacagtaacagccttacactg

SEQ ID NO: 3416053 - DNA, 25 bp, Homo sapien
gacagtaacagccttacactgacta

SEQ ID NO: 3416054 - DNA, 25 bp, Homo sapien
acagtaacagccttacactgactat

SEQ ID NO: 3416055 - DNA, 25 bp, Homo sapien
gaagagcgtagtagcctatcaaaga

SEQ ID NO: 3416056 - DNA, 25 bp, Homo sapien
ctgaagagcgtagtagcctatcaaa

SEQ ID NO: 3416057 - DNA, 25 bp, Homo sapien
aagagcgtagtagcctatcaaagac

SEQ ID NO: 3416058 - DNA, 25 bp, Homo sapien
tgaagagcgtagtagcctatcaaag

SEQ ID NO: 3416059 - DNA, 25 bp, Homo sapien
atcacaatcctctgagtggcacccc

SEQ ID NO: 3416060 - DNA, 25 bp, Homo sapien
gcaccccaaaattgagaaaggcaga

SEQ ID NO: 3416061 - DNA, 25 bp, Homo sapien
acaacattgttcacaatcacaatcc

SEQ ID NO: 3416062 - DNA, 25 bp, Homo sapien
gctgaaagtcatcaatgtaatcaaa

SEQ ID NO: 3416063 - DNA, 25 bp, Homo sapien
attttaacacatctttattctcaca

SEQ ID NO: 3416064 - DNA, 25 bp, Homo sapien
taagggagacatagggctcgtcaga

SEQ ID NO: 3416065 - DNA, 25 bp, Homo sapien
aaagaattggtaagggagacatagg

SEQ ID NO: 3416066 - DNA, 25 bp, Homo sapien
gggctcgtcagaggtgaggctaaag

SEQ ID NO: 3416067 - DNA, 25 bp, Homo sapien
catagggctcgtcagaggtgaggct

SEQ ID NO: 3416068 - DNA, 25 bp, Homo sapien
ctctttttagtctagtctggagctg

SEQ ID NO: 3416069 - DNA, 25 bp, Homo sapien
tctccaaggcctcaaatctcaaggg

SEQ ID NO: 3416070 - DNA, 25 bp, Homo sapien
tttggatgctagctgcggagttcag

SEQ ID NO: 3416071 - DNA, 25 bp, Homo sapien
ctagctgcggagttcagtgggtgca

SEQ ID NO: 3416072 - DNA, 25 bp, Homo sapien
ggagggtgagtggtgtagtccaggc

SEQ ID NO: 3416073 - DNA, 25 bp, Homo sapien
ctcccaatttctggcaatatgtagc

SEQ ID NO: 3416074 - DNA, 25 bp, Homo sapien
tctcccaatttctggcaatatgtag

SEQ ID NO: 3416075 - DNA, 25 bp, Homo sapien
gtctcccaatttctggcaatatgta

SEQ ID NO: 3416076 - DNA, 25 bp, Homo sapien
cccaatttctggcaatatgtagcag

SEQ ID NO: 3416077 - DNA, 25 bp, Homo sapien
ttaattgcttattgtcagtctcttc

SEQ ID NO: 3416078 - DNA, 25 bp, Homo sapien
tgtgtcatgcatctgaatgcttctc

SEQ ID NO: 3416079 - DNA, 25 bp, Homo sapien
tcttccgagtgaccttggatctgag

SEQ ID NO: 3416080 - DNA, 25 bp, Homo sapien
cctccatgagtgtcattgagggtag

SEQ ID NO: 3416081 - DNA, 25 bp, Homo sapien
tgtcattgagggtagacatggcctc

SEQ ID NO: 3416082 - DNA, 25 bp, Homo sapien
agaacaagatttttggcagtcttac

SEQ ID NO: 3416083 - DNA, 25 bp, Homo sapien
aataacaaaatgaggagagcaagaa

SEQ ID NO: 3416084 - DNA, 25 bp, Homo sapien
agagcaagaacaagatttttggcag

SEQ ID NO: 3416085 - DNA, 25 bp, Homo sapien
gcaagaacaagatttttggcagtct

SEQ ID NO: 3416086 - DNA, 25 bp, Homo sapien
catttactgaatttctgggtgttgt

SEQ ID NO: 3416087 - DNA, 25 bp, Homo sapien
cccatttactgaatttctgggtgtt

SEQ ID NO: 3416088 - DNA, 25 bp, Homo sapien
ttactgaatttctgggtgttgtcat

SEQ ID NO: 3416089 - DNA, 25 bp, Homo sapien
ctgccgggaaagtcccatttactga

SEQ ID NO: 3416090 - DNA, 25 bp, Homo sapien
tgaagaagctttgcgtggggcccac

SEQ ID NO: 3416091 - DNA, 25 bp, Homo sapien
ttttggaccagattgcatagcaata

SEQ ID NO: 3416092 - DNA, 25 bp, Homo sapien
gaagacatcctcctgaagagtggtt

SEQ ID NO: 3416093 - DNA, 25 bp, Homo sapien
caaagtcttagattccctcatgaag

SEQ ID NO: 3416094 - DNA, 25 bp, Homo sapien
gaagagcccattcataatctggaca

SEQ ID NO: 3416095 - DNA, 25 bp, Homo sapien
catagatccctgctgggatcatcag

SEQ ID NO: 3416096 - DNA, 25 bp, Homo sapien
ccagggcaatgtggaagagcccatt

SEQ ID NO: 3416097 - DNA, 25 bp, Homo sapien
cacacagatgggtgcatagatccct

SEQ ID NO: 3416098 - DNA, 25 bp, Homo sapien
ttctccgttgctgccaggagtgatc

SEQ ID NO: 3416099 - DNA, 25 bp, Homo sapien
gccaggagtgatccggaaataatat

SEQ ID NO: 3416100 - DNA, 25 bp, Homo sapien
cgttgctgccaggagtgatccggaa

SEQ ID NO: 3416101 - DNA, 25 bp, Homo sapien
agtttttctccgttgctgccaggag

SEQ ID NO: 3416102 - DNA, 25 bp, Homo sapien
tgtgggaaagaaggacatatggtta

SEQ ID NO: 3416103 - DNA, 25 bp, Homo sapien
atgtgggaaagaaggacatatggtt

SEQ ID NO: 3416104 - DNA, 25 bp, Homo sapien
gtgggaaagaaggacatatggttac

SEQ ID NO: 3416105 - DNA, 25 bp, Homo sapien
ttccaaatgcaactgccctgactca

SEQ ID NO: 3416106 - DNA, 25 bp, Homo sapien
tgactcacaaagcaactacaactaa

SEQ ID NO: 3416107 - DNA, 25 bp, Homo sapien
ctgggagggaattccaaatgcaact

SEQ ID NO: 3416108 - DNA, 25 bp, Homo sapien
tgccctgactcacaaagcaactaca

SEQ ID NO: 3416109 - DNA, 25 bp, Homo sapien
tatgctgtaacagtattgggtagat

SEQ ID NO: 3416110 - DNA, 25 bp, Homo sapien
gcaaagaggctcaatgaattcatta

SEQ ID NO: 3416111 - DNA, 25 bp, Homo sapien
tggtgtgtgagctctaataaaattc

SEQ ID NO: 3416112 - DNA, 25 bp, Homo sapien
agtatgtccatgattgaaagaatca

SEQ ID NO: 3416113 - DNA, 25 bp, Homo sapien
agtaatgaatagctgtgagaactgc

SEQ ID NO: 3416114 - DNA, 25 bp, Homo sapien
tattcagccttagttggtgtggcat

SEQ ID NO: 3416115 - DNA, 25 bp, Homo sapien
gacagcatctttataaccctaactc

SEQ ID NO: 3416116 - DNA, 25 bp, Homo sapien
gagaactgctagtacaggagacagc

SEQ ID NO: 3416117 - DNA, 25 bp, Homo sapien
tccattcattctcaacgatgccagc

SEQ ID NO: 3416118 - DNA, 25 bp, Homo sapien
gatgccagctattacaagttcctgg

SEQ ID NO: 3416119 - DNA, 25 bp, Homo sapien
tctcaacgatgccagctattacaag

SEQ ID NO: 3416120 - DNA, 25 bp, Homo sapien
cattctcaacgatgccagctattac

SEQ ID NO: 3416121 - DNA, 25 bp, Homo sapien
tgtcttcttcattctttggttggga

SEQ ID NO: 3416122 - DNA, 25 bp, Homo sapien
tcagttagcccaaccacttcttctt

SEQ ID NO: 3416123 - DNA, 25 bp, Homo sapien
aggattcctgatcttggggaggttc

SEQ ID NO: 3416124 - DNA, 25 bp, Homo sapien
gaagatgtttcagttagcccaacca

SEQ ID NO: 3416125 - DNA, 25 bp, Homo sapien
agggactccaccaaaaacgtagatg

SEQ ID NO: 3416126 - DNA, 25 bp, Homo sapien
ggtgcgtatgtgcagagtacctcaa

SEQ ID NO: 3416127 - DNA, 25 bp, Homo sapien
gaagaagcgtgacaacacaagctgc

SEQ ID NO: 3416128 - DNA, 25 bp, Homo sapien
gtcagccctgtagaaagataaatgg

SEQ ID NO: 3416129 - DNA, 25 bp, Homo sapien
ggctgtaagagcctcccatggtcta

SEQ ID NO: 3416130 - DNA, 25 bp, Homo sapien
tatttcagtcgtctggagttctcag

SEQ ID NO: 3416131 - DNA, 25 bp, Homo sapien
tatttgatgacctgacacctcaccg

SEQ ID NO: 3416132 - DNA, 25 bp, Homo sapien
tataaggagttatgtgaggtcagct

SEQ ID NO: 3416133 - DNA, 25 bp, Homo sapien
tccagccaggtagtaagttctaagg

SEQ ID NO: 3416134 - DNA, 25 bp, Homo sapien
tttagctcagaacacacaaccaagt

SEQ ID NO: 3416135 - DNA, 25 bp, Homo sapien
ggagcttctcctatctttatctgta

SEQ ID NO: 3416136 - DNA, 25 bp, Homo sapien
gatttttgagatcagggagcttctc

SEQ ID NO: 3416137 - DNA, 25 bp, Homo sapien
ttcctttggcacctctatgtttcct

SEQ ID NO: 3416138 - DNA, 25 bp, Homo sapien
ttggcacctctatgtttcctctttc

SEQ ID NO: 3416139 - DNA, 25 bp, Homo sapien
cctttggcacctctatgtttcctct

SEQ ID NO: 3416140 - DNA, 25 bp, Homo sapien
ctttggcacctctatgtttcctctt

SEQ ID NO: 3416141 - DNA, 25 bp, Homo sapien
tttacttcagcatggcttgttggct

SEQ ID NO: 3416142 - DNA, 25 bp, Homo sapien
caggagccataaagctgcttggtgg

SEQ ID NO: 3416143 - DNA, 25 bp, Homo sapien
tccaggagccataaagctgcttggt

SEQ ID NO: 3416144 - DNA, 25 bp, Homo sapien
atttacttcagcatggcttgttggc

SEQ ID NO: 3416145 - DNA, 25 bp, Homo sapien
catttgtatatttccttgacccggt

SEQ ID NO: 3416146 - DNA, 25 bp, Homo sapien
ccgtagggctgagcacgctgagcac

SEQ ID NO: 3416147 - DNA, 25 bp, Homo sapien
tgactgctagcaaagattcccggag

SEQ ID NO: 3416148 - DNA, 25 bp, Homo sapien
agcaccctgagcttggttttctaag

SEQ ID NO: 3416149 - DNA, 25 bp, Homo sapien
tccaaaaccaatgtgcatcaatcca

SEQ ID NO: 3416150 - DNA, 25 bp, Homo sapien
tatccaccaataacagcagtagagg

SEQ ID NO: 3416151 - DNA, 25 bp, Homo sapien
tgtgcatcaatccaaccatgatctg

SEQ ID NO: 3416152 - DNA, 25 bp, Homo sapien
agaatgggtatccaccaataacagc

SEQ ID NO: 3416153 - DNA, 25 bp, Homo sapien
cagacaacgggaaagctccttggat

SEQ ID NO: 3416154 - DNA, 25 bp, Homo sapien
ggaaagctccttggatgctgacaca

SEQ ID NO: 3416155 - DNA, 25 bp, Homo sapien
cagagagagagccagagataataaa

SEQ ID NO: 3416156 - DNA, 25 bp, Homo sapien
ctccttggatgctgacacagagaga

SEQ ID NO: 3416157 - DNA, 25 bp, Homo sapien
ccaatgaaggccaagatagaactaa

SEQ ID NO: 3416158 - DNA, 25 bp, Homo sapien
tagtcttggccagctaccccattga

SEQ ID NO: 3416159 - DNA, 25 bp, Homo sapien
gctaccccattgatgcacatatcca

SEQ ID NO: 3416160 - DNA, 25 bp, Homo sapien
cacggcccagtagtcttggccagct

SEQ ID NO: 3416161 - DNA, 25 bp, Homo sapien
ggagaagatcatcagcgtggctgaa

SEQ ID NO: 3416162 - DNA, 25 bp, Homo sapien
aaaatgggctgtggcacaagctacg

SEQ ID NO: 3416163 - DNA, 25 bp, Homo sapien
cacaagctacgaagaactccaagag

SEQ ID NO: 3416164 - DNA, 25 bp, Homo sapien
gatcatcagcgtggctgaaatgcct

SEQ ID NO: 3416165 - DNA, 25 bp, Homo sapien
ttaggggcattagctgagtagttgt

SEQ ID NO: 3416166 - DNA, 25 bp, Homo sapien
tacatatttggaataaccaggacag

SEQ ID NO: 3416167 - DNA, 25 bp, Homo sapien
ctgagtagttgttgcatctgggagg

SEQ ID NO: 3416168 - DNA, 25 bp, Homo sapien
aagacgctggtgtcacagggttgct

SEQ ID NO: 3416169 - DNA, 25 bp, Homo sapien
cacctttgccagcatgtagtagtgg

SEQ ID NO: 3416170 - DNA, 25 bp, Homo sapien
gagatacagccatcattagcgacca

SEQ ID NO: 3416171 - DNA, 25 bp, Homo sapien
gagattagactgatacccctttttc

SEQ ID NO: 3416172 - DNA, 25 bp, Homo sapien
tagtagtggtaatgtaggaagagac

SEQ ID NO: 3416173 - DNA, 25 bp, Homo sapien
tgctgagctgttgagctttatggtg

SEQ ID NO: 3416174 - DNA, 25 bp, Homo sapien
tagaccatgaaatctttgtcttcac

SEQ ID NO: 3416175 - DNA, 25 bp, Homo sapien
catgaaatctttgtcttcacttttg

SEQ ID NO: 3416176 - DNA, 25 bp, Homo sapien
tcacttttgctgagctgttgagctt

SEQ ID NO: 3416177 - DNA, 25 bp, Homo sapien
aggtagtgcgtgtgcgcagactcac

SEQ ID NO: 3416178 - DNA, 25 bp, Homo sapien
ggcggaggtagtgcgtgtgcgcaga

SEQ ID NO: 3416179 - DNA, 25 bp, Homo sapien
ccactcaggaactgccggggcggag

SEQ ID NO: 3416180 - DNA, 25 bp, Homo sapien
gtgcgtgtgcgcagactcactaggc

SEQ ID NO: 3416181 - DNA, 25 bp, Homo sapien
tccgagttctcacgccagcgcccag

SEQ ID NO: 3416182 - DNA, 25 bp, Homo sapien
gctcgtccaggacccagtccgagtt

SEQ ID NO: 3416183 - DNA, 25 bp, Homo sapien
ggaagatcccggctggcaacgcgct

SEQ ID NO: 3416184 - DNA, 25 bp, Homo sapien
tcagcgccaggtccccagatctcgc

SEQ ID NO: 3416185 - DNA, 25 bp, Homo sapien
taaagaacacatgccatactgccag

SEQ ID NO: 3416186 - DNA, 25 bp, Homo sapien
ttgttaaagaacacatgccatactg

SEQ ID NO: 3416187 - DNA, 25 bp, Homo sapien
agatttgttaaagaacacatgccat

SEQ ID NO: 3416188 - DNA, 25 bp, Homo sapien
aagaacacatgccatactgccagca

SEQ ID NO: 3416189 - DNA, 25 bp, Homo sapien
tccccataaagtacatcctgttttg

SEQ ID NO: 3416190 - DNA, 25 bp, Homo sapien
ctgttttgtaagttacaggttcata

SEQ ID NO: 3416191 - DNA, 25 bp, Homo sapien
tatacaaaaccaatagaaagtacca

SEQ ID NO: 3416192 - DNA, 25 bp, Homo sapien
caggttcatacgttccaaaggctcc

SEQ ID NO: 3416193 - DNA, 25 bp, Homo sapien
tactttgttactcttattaggaaga

SEQ ID NO: 3416194 - DNA, 25 bp, Homo sapien
cagatcgagtcggatactttgttac

SEQ ID NO: 3416195 - DNA, 25 bp, Homo sapien
cttattaggaagactcctgcaatga

SEQ ID NO: 3416196 - DNA, 25 bp, Homo sapien
tccagatcgagtcggatactttgtt

SEQ ID NO: 3416197 - DNA, 25 bp, Homo sapien
gtccataattcctgtatgacacaga

SEQ ID NO: 3416198 - DNA, 25 bp, Homo sapien
tctattattgttagagttactgcag

SEQ ID NO: 3416199 - DNA, 25 bp, Homo sapien
gcagtaattgtagtaattatgcaga

SEQ ID NO: 3416200 - DNA, 25 bp, Homo sapien
gatgtttatgattaaagtacttata

SEQ ID NO: 3416201 - DNA, 25 bp, Homo sapien
gtgtgtaagtgcaatagaaaattcc

SEQ ID NO: 3416202 - DNA, 25 bp, Homo sapien
caaattggaacagctgtatattgag

SEQ ID NO: 3416203 - DNA, 25 bp, Homo sapien
gaacagtaaaatacgtgatacttcc

SEQ ID NO: 3416204 - DNA, 25 bp, Homo sapien
aaatacgtgatacttccctcccaag

SEQ ID NO: 3416205 - DNA, 25 bp, Homo sapien
gaaatcaacatcttttgatttgcca

SEQ ID NO: 3416206 - DNA, 25 bp, Homo sapien
cttttgatttgccagagagtgggta

SEQ ID NO: 3416207 - DNA, 25 bp, Homo sapien
tcaacatcttttgatttgccagaga

SEQ ID NO: 3416208 - DNA, 25 bp, Homo sapien
gatttgccagagagtgggtaaacac

SEQ ID NO: 3416209 - DNA, 25 bp, Homo sapien
gacagctattcagcgtacctagata

SEQ ID NO: 3416210 - DNA, 25 bp, Homo sapien
gagatatcattaggacccacaccag

SEQ ID NO: 3416211 - DNA, 25 bp, Homo sapien
gaattatacgacatcatggcccaag

SEQ ID NO: 3416212 - DNA, 25 bp, Homo sapien
aaaatctgtaggcttcgtaactgct

SEQ ID NO: 3416213 - DNA, 25 bp, Homo sapien
caatgcataggtgcttgtgaagcaa

SEQ ID NO: 3416214 - DNA, 25 bp, Homo sapien
tcactgaagcactggtacttgtgga

SEQ ID NO: 3416215 - DNA, 25 bp, Homo sapien
ggtaacagtatgcaatgcataggtg

SEQ ID NO: 3416216 - DNA, 25 bp, Homo sapien
cttgtggagggtctatgaatcctga

SEQ ID NO: 3416217 - DNA, 25 bp, Homo sapien
ctggcagtcaacttcctcaatttgg

SEQ ID NO: 3416218 - DNA, 25 bp, Homo sapien
cgggagcccggtgggcgcttcctcg

SEQ ID NO: 3416219 - DNA, 25 bp, Homo sapien
tgggccaacagagtgtgatctggca

SEQ ID NO: 3416220 - DNA, 25 bp, Homo sapien
ccggtgggcgcttcctcggtggcgc

SEQ ID NO: 3416221 - DNA, 25 bp, Homo sapien
tgtagacattagaaaggatgaatgg

SEQ ID NO: 3416222 - DNA, 25 bp, Homo sapien
tggtgtagacattagaaaggatgaa

SEQ ID NO: 3416223 - DNA, 25 bp, Homo sapien
atccaaaatatggtgtagacattag

SEQ ID NO: 3416224 - DNA, 25 bp, Homo sapien
aatatggtgtagacattagaaagga

SEQ ID NO: 3416225 - DNA, 25 bp, Homo sapien
tcaacacaatgtgagatgatggcat

SEQ ID NO: 3416226 - DNA, 25 bp, Homo sapien
tcttctttcaacacaatgtgagatg

SEQ ID NO: 3416227 - DNA, 25 bp, Homo sapien
tttcaacacaatgtgagatgatggc

SEQ ID NO: 3416228 - DNA, 25 bp, Homo sapien
tctttcaacacaatgtgagatgatg

SEQ ID NO: 3416229 - DNA, 25 bp, Homo sapien
catctttcgttaaaaagagtataat

SEQ ID NO: 3416230 - DNA, 25 bp, Homo sapien
gtataatttcacatgcaattagaag

SEQ ID NO: 3416231 - DNA, 25 bp, Homo sapien
tattgcaaggccgaaactgtttaaa

SEQ ID NO: 3416232 - DNA, 25 bp, Homo sapien
caattagaagtataccaattattgc

SEQ ID NO: 3416233 - DNA, 25 bp, Homo sapien
tgccgaaatgcgtaggacaagagtg

SEQ ID NO: 3416234 - DNA, 25 bp, Homo sapien
cctagacgcctgtattgtgccgaaa

SEQ ID NO: 3416235 - DNA, 25 bp, Homo sapien
tcgcgaatggtaaccaggccagggc

SEQ ID NO: 3416236 - DNA, 25 bp, Homo sapien
aacccaggacgagggagtcgcgaat

SEQ ID NO: 3416237 - DNA, 25 bp, Homo sapien
caggtagatctaacaagcagctgca

SEQ ID NO: 3416238 - DNA, 25 bp, Homo sapien
agtttctctatggaaccaccaggta

SEQ ID NO: 3416239 - DNA, 25 bp, Homo sapien
ttaggcgaggtaaaggcaggttctc

SEQ ID NO: 3416240 - DNA, 25 bp, Homo sapien
gcaggttctctgagcagtttctcta

SEQ ID NO: 3416241 - DNA, 25 bp, Homo sapien
cttttaggataaatcttctcagcat

SEQ ID NO: 3416242 - DNA, 25 bp, Homo sapien
gccttcttttaggataaatcttctc

SEQ ID NO: 3416243 - DNA, 25 bp, Homo sapien
tatagcagttatagaggatgaatgg

SEQ ID NO: 3416244 - DNA, 25 bp, Homo sapien
cattttaacagagatattgtatagc

SEQ ID NO: 3416245 - DNA, 25 bp, Homo sapien
ctgagctgaatgtaaggggcacatg

SEQ ID NO: 3416246 - DNA, 25 bp, Homo sapien
tgttgacagtacagtgccccagggt

SEQ ID NO: 3416247 - DNA, 25 bp, Homo sapien
tgacagtacagtgccccagggtcta

SEQ ID NO: 3416248 - DNA, 25 bp, Homo sapien
gggcacatgttgacagtacagtgcc

SEQ ID NO: 3416249 - DNA, 25 bp, Homo sapien
tgtagccccagacattaagctaagg

SEQ ID NO: 3416250 - DNA, 25 bp, Homo sapien
taagccttgtagttacccaaatagc

SEQ ID NO: 3416251 - DNA, 25 bp, Homo sapien
tgtattcacacaaaaatgggctcct

SEQ ID NO: 3416252 - DNA, 25 bp, Homo sapien
tcattctgcaaaagataagccttgt

SEQ ID NO: 3416253 - DNA, 25 bp, Homo sapien
tctcgtaacaggcttctgtattaca

SEQ ID NO: 3416254 - DNA, 25 bp, Homo sapien
cgtaacaggcttctgtattacacta

SEQ ID NO: 3416255 - DNA, 25 bp, Homo sapien
tatatctcgtaacaggcttctgtat

SEQ ID NO: 3416256 - DNA, 25 bp, Homo sapien
caggcttctgtattacactactgga

SEQ ID NO: 3416257 - DNA, 25 bp, Homo sapien
taatctttagagttgctccgaatat

SEQ ID NO: 3416258 - DNA, 25 bp, Homo sapien
ttaatctttagagttgctccgaata

SEQ ID NO: 3416259 - DNA, 25 bp, Homo sapien
atctttagagttgctccgaatattc

SEQ ID NO: 3416260 - DNA, 25 bp, Homo sapien
aatctttagagttgctccgaatatt

SEQ ID NO: 3416261 - DNA, 25 bp, Homo sapien
cacaaatagttatgctgttcattac

SEQ ID NO: 3416262 - DNA, 25 bp, Homo sapien
atagaattataccaagtgtagtcac

SEQ ID NO: 3416263 - DNA, 25 bp, Homo sapien
agtgtagtcacacaaatagttatgc

SEQ ID NO: 3416264 - DNA, 25 bp, Homo sapien
taccaagtgtagtcacacaaatagt

SEQ ID NO: 3416265 - DNA, 25 bp, Homo sapien
gtttgaccaattgtatgtggttgca

SEQ ID NO: 3416266 - DNA, 25 bp, Homo sapien
tgaccaattgtatgtggttgcattt

SEQ ID NO: 3416267 - DNA, 25 bp, Homo sapien
tttgaccaattgtatgtggttgcat

SEQ ID NO: 3416268 - DNA, 25 bp, Homo sapien
ttaatgcaaaagttgcaatctccat

SEQ ID NO: 3416269 - DNA, 25 bp, Homo sapien
caacccactggatgattatgattac

SEQ ID NO: 3416270 - DNA, 25 bp, Homo sapien
cttacaacccactggatgattatga

SEQ ID NO: 3416271 - DNA, 25 bp, Homo sapien
ctggatgattatgattacaatggtc

SEQ ID NO: 3416272 - DNA, 25 bp, Homo sapien
acccactggatgattatgattacaa

SEQ ID NO: 3416273 - DNA, 25 bp, Homo sapien
gaagttgtgcgtggtgtgatttcca

SEQ ID NO: 3416274 - DNA, 25 bp, Homo sapien
tagaatgcgttttccatgtggctgc

SEQ ID NO: 3416275 - DNA, 25 bp, Homo sapien
gatttccaaggattccgacagtgag

SEQ ID NO: 3416276 - DNA, 25 bp, Homo sapien
cgacagtgagatttccgagggcaaa

SEQ ID NO: 3416277 - DNA, 25 bp, Homo sapien
caggccaggttacatgctgcttaga

SEQ ID NO: 3416278 - DNA, 25 bp, Homo sapien
tctatttcctggatgcaggccaggt

SEQ ID NO: 3416279 - DNA, 25 bp, Homo sapien
gcagccacgtatctcttgatcctat

SEQ ID NO: 3416280 - DNA, 25 bp, Homo sapien
ggttagaaggatccgaagtcctcta

SEQ ID NO: 3416281 - DNA, 25 bp, Homo sapien
ttcccaggaactaggtggacttgcg

SEQ ID NO: 3416282 - DNA, 25 bp, Homo sapien
gggcacgtgagacataattcctggg

SEQ ID NO: 3416283 - DNA, 25 bp, Homo sapien
aattggccaccggaactgctgaagt

SEQ ID NO: 3416284 - DNA, 25 bp, Homo sapien
acttgcggctggctgtttggataca

SEQ ID NO: 3416285 - DNA, 25 bp, Homo sapien
gggcaaatatttgattcgatcttat

SEQ ID NO: 3416286 - DNA, 25 bp, Homo sapien
tatgttgttggttgcctaacctgct

SEQ ID NO: 3416287 - DNA, 25 bp, Homo sapien
ttgcggtgaccatttatgttgttgg

SEQ ID NO: 3416288 - DNA, 25 bp, Homo sapien
tggcaacaggatcaaccttcaagcg

SEQ ID NO: 3416289 - DNA, 25 bp, Homo sapien
catgagcactatctgagggtggagc

SEQ ID NO: 3416290 - DNA, 25 bp, Homo sapien
tgttatcacaaaccacgctgcaatg

SEQ ID NO: 3416291 - DNA, 25 bp, Homo sapien
gggcctttctttgtccagcgcagga

SEQ ID NO: 3416292 - DNA, 25 bp, Homo sapien
tcagctacacagtgaaatgggcctt

SEQ ID NO: 3416293 - DNA, 25 bp, Homo sapien
ttacacacgtggtagcaaatacaaa

SEQ ID NO: 3416294 - DNA, 25 bp, Homo sapien
tttcttccattaactccatatcttg

SEQ ID NO: 3416295 - DNA, 25 bp, Homo sapien
gtaaatgaaagaacatctgtgtatg

SEQ ID NO: 3416296 - DNA, 25 bp, Homo sapien
tgggtacactgggacataatcccat

SEQ ID NO: 3416297 - DNA, 25 bp, Homo sapien
ccaggccaatgatgatctggatggc

SEQ ID NO: 3416298 - DNA, 25 bp, Homo sapien
gagaaccgtcgccatgatggagccg

SEQ ID NO: 3416299 - DNA, 25 bp, Homo sapien
gccaggccaatgatgatctggatgg

SEQ ID NO: 3416300 - DNA, 25 bp, Homo sapien
agccgaggccgatgtgagccaggcc

SEQ ID NO: 3416301 - DNA, 25 bp, Homo sapien
gaagggaaagcctccgtagaatgaa

SEQ ID NO: 3416302 - DNA, 25 bp, Homo sapien
ccagaagggaaagcctccgtagaat

SEQ ID NO: 3416303 - DNA, 25 bp, Homo sapien
ctccgtagaatgaaatagacaggta

SEQ ID NO: 3416304 - DNA, 25 bp, Homo sapien
aagcctccgtagaatgaaatagaca

SEQ ID NO: 3416305 - DNA, 25 bp, Homo sapien
caggcaataagaatatggctgattt

SEQ ID NO: 3416306 - DNA, 25 bp, Homo sapien
attttctgctgccacggagagagat

SEQ ID NO: 3416307 - DNA, 25 bp, Homo sapien
caataagaatatggctgattttctg

SEQ ID NO: 3416308 - DNA, 25 bp, Homo sapien
ttttctgctgccacggagagagatc

SEQ ID NO: 3416309 - DNA, 25 bp, Homo sapien
ttaactaaggtgactgtattgcccc

SEQ ID NO: 3416310 - DNA, 25 bp, Homo sapien
tactggaagtactcttggctcctgg

SEQ ID NO: 3416311 - DNA, 25 bp, Homo sapien
gattccttaggaaagcgagtgactg

SEQ ID NO: 3416312 - DNA, 25 bp, Homo sapien
tcagagttctgttggctggattcct

SEQ ID NO: 3416313 - DNA, 25 bp, Homo sapien
gatctgtgatgaagagtatgactcc

SEQ ID NO: 3416314 - DNA, 25 bp, Homo sapien
tccaactgcagagcagattgcactg

SEQ ID NO: 3416315 - DNA, 25 bp, Homo sapien
gatgaagagtatgactccaactgca

SEQ ID NO: 3416316 - DNA, 25 bp, Homo sapien
tgcactgacgatgttcaagcccaaa

SEQ ID NO: 3416317 - DNA, 25 bp, Homo sapien
taatagtcggggtaggcatatgggt

SEQ ID NO: 3416318 - DNA, 25 bp, Homo sapien
ccccaggcgtaaggataatagtcgg

SEQ ID NO: 3416319 - DNA, 25 bp, Homo sapien
caccccaggcgtaaggataatagtc

SEQ ID NO: 3416320 - DNA, 25 bp, Homo sapien
cacaccccaggcgtaaggataatag

SEQ ID NO: 3416321 - DNA, 25 bp, Homo sapien
tttccaaaggatccctctggtggcc

SEQ ID NO: 3416322 - DNA, 25 bp, Homo sapien
gaaccaacaggattgcccgagggat

SEQ ID NO: 3416323 - DNA, 25 bp, Homo sapien
cagggtcaatgacgactccaaggtt

SEQ ID NO: 3416324 - DNA, 25 bp, Homo sapien
tccaaggttttgtcccgagcaactg

SEQ ID NO: 3416325 - DNA, 25 bp, Homo sapien
gaaaaggggtccctcaagcagctga

SEQ ID NO: 3416326 - DNA, 25 bp, Homo sapien
ccctccatgttcagatgggatgact

SEQ ID NO: 3416327 - DNA, 25 bp, Homo sapien
gggtcattatttgcaaagctcagat

SEQ ID NO: 3416328 - DNA, 25 bp, Homo sapien
tggaaaccccggagtatctccattc

SEQ ID NO: 3416329 - DNA, 25 bp, Homo sapien
tcctctccatttagcaagtggttat

SEQ ID NO: 3416330 - DNA, 25 bp, Homo sapien
agaagcggctaagaaatgcatcctg

SEQ ID NO: 3416331 - DNA, 25 bp, Homo sapien
cctctccatttagcaagtggttatt

SEQ ID NO: 3416332 - DNA, 25 bp, Homo sapien
atctgcttggtagaagcggctaaga

SEQ ID NO: 3416333 - DNA, 25 bp, Homo sapien
aacagtcagtgaaaggatccccaaa

SEQ ID NO: 3416334 - DNA, 25 bp, Homo sapien
taaccatagcaggaggtaaccggga

SEQ ID NO: 3416335 - DNA, 25 bp, Homo sapien
taaaaggtccatccaggagactccc

SEQ ID NO: 3416336 - DNA, 25 bp, Homo sapien
gctgttacccaagaatacccaggag

SEQ ID NO: 3416337 - DNA, 25 bp, Homo sapien
gggccctgccatggactctttgtgg

SEQ ID NO: 3416338 - DNA, 25 bp, Homo sapien
gatgaccatgtttagggaagcccct

SEQ ID NO: 3416339 - DNA, 25 bp, Homo sapien
aaaagaaggagttgagcgccatggt

SEQ ID NO: 3416340 - DNA, 25 bp, Homo sapien
tctttgtggctttgcggaagtcccc

SEQ ID NO: 3416341 - DNA, 25 bp, Homo sapien
catgcgatgccaaactccaggaggc

SEQ ID NO: 3416342 - DNA, 25 bp, Homo sapien
cttgattgacagcagaccaactggc

SEQ ID NO: 3416343 - DNA, 25 bp, Homo sapien
caaagtgggaagatgcgcatgcgat

SEQ ID NO: 3416344 - DNA, 25 bp, Homo sapien
aagaccagcagcacgccagaaatcg

SEQ ID NO: 3416345 - DNA, 25 bp, Homo sapien
tggatctcactggaataacttggtg

SEQ ID NO: 3416346 - DNA, 25 bp, Homo sapien
agatgtttggatagatgacactcac

SEQ ID NO: 3416347 - DNA, 25 bp, Homo sapien
ggtgatcactgggtttgctgcatag

SEQ ID NO: 3416348 - DNA, 25 bp, Homo sapien
tggaataacttggtggtgaggtcac

SEQ ID NO: 3416349 - DNA, 25 bp, Homo sapien
gaacgacctgggttatggaagccca

SEQ ID NO: 3416350 - DNA, 25 bp, Homo sapien
gatgcatgtgccctagggagtccct

SEQ ID NO: 3416351 - DNA, 25 bp, Homo sapien
tggtcccagtgaaagatgcttccag

SEQ ID NO: 3416352 - DNA, 25 bp, Homo sapien
cagaggctggatgcccacatatgtg

SEQ ID NO: 3416353 - DNA, 25 bp, Homo sapien
ctgaatttggtgagttcaaggtagg

SEQ ID NO: 3416354 - DNA, 25 bp, Homo sapien
aggctggacaactgggatttggaca

SEQ ID NO: 3416355 - DNA, 25 bp, Homo sapien
ggagccattgacagagaggctggac

SEQ ID NO: 3416356 - DNA, 25 bp, Homo sapien
ggctggacaactgggatttggacat

SEQ ID NO: 3416357 - DNA, 25 bp, Homo sapien
gtgcttggcatttgatgaatgagtg

SEQ ID NO: 3416358 - DNA, 25 bp, Homo sapien
tgggtttctgcagcctgatctagaa

SEQ ID NO: 3416359 - DNA, 25 bp, Homo sapien
tttcttcaggctctgtgggtttctg

SEQ ID NO: 3416360 - DNA, 25 bp, Homo sapien
tgggaagtctttggatgctctttct

SEQ ID NO: 3416361 - DNA, 25 bp, Homo sapien
ctcctgggaagtctttggatgctct

SEQ ID NO: 3416362 - DNA, 25 bp, Homo sapien
ctgcaaaacacataagaaggtgcat

SEQ ID NO: 3416363 - DNA, 25 bp, Homo sapien
aacacataagaaggtgcatttccct

SEQ ID NO: 3416364 - DNA, 25 bp, Homo sapien
acataagaaggtgcatttccctctt

SEQ ID NO: 3416365 - DNA, 25 bp, Homo sapien
tgcaaaacacataagaaggtgcatt

SEQ ID NO: 3416366 - DNA, 25 bp, Homo sapien
cattatctggggcaataatgccagg

SEQ ID NO: 3416367 - DNA, 25 bp, Homo sapien
caggtacactgttggctccaatcac

SEQ ID NO: 3416368 - DNA, 25 bp, Homo sapien
gggctggatgacgtgaacattatct

SEQ ID NO: 3416369 - DNA, 25 bp, Homo sapien
tggggcaataatgccaggtacactg

SEQ ID NO: 3416370 - DNA, 25 bp, Homo sapien
tcagcccagggttagcattcagagg

SEQ ID NO: 3416371 - DNA, 25 bp, Homo sapien
gatactgtcgctgatacccaatggg

SEQ ID NO: 3416372 - DNA, 25 bp, Homo sapien
tgatgcaaatgacgtgttccactgg

SEQ ID NO: 3416373 - DNA, 25 bp, Homo sapien
caggcaccgtctgcaaactggctgt

SEQ ID NO: 3416374 - DNA, 25 bp, Homo sapien
gataatcctccccagagcgggtacc

SEQ ID NO: 3416375 - DNA, 25 bp, Homo sapien
gagcgggtaccctgacaaccaggtc

SEQ ID NO: 3416376 - DNA, 25 bp, Homo sapien
aaaatgtgcgtcaggccgatgagga

SEQ ID NO: 3416377 - DNA, 25 bp, Homo sapien
taatacagcacagggttaattgcag

SEQ ID NO: 3416378 - DNA, 25 bp, Homo sapien
gagggtcctctttagcacttgatgc

SEQ ID NO: 3416379 - DNA, 25 bp, Homo sapien
aactcctgtgggtctaggctaacac

SEQ ID NO: 3416380 - DNA, 25 bp, Homo sapien
tactatcccaatggttaggcaccaa

SEQ ID NO: 3416381 - DNA, 25 bp, Homo sapien
gattctccttgagtccactgtctgg

SEQ ID NO: 3416382 - DNA, 25 bp, Homo sapien
ccatactgagagggatccagataca

SEQ ID NO: 3416383 - DNA, 25 bp, Homo sapien
ggcagaagaaagacgacaagccata

SEQ ID NO: 3416384 - DNA, 25 bp, Homo sapien
gaaagacgacaagccatacagagaa

SEQ ID NO: 3416385 - DNA, 25 bp, Homo sapien
aagacgacaagccatacagagaaag

SEQ ID NO: 3416386 - DNA, 25 bp, Homo sapien
gacgacaagccatacagagaaagtg

SEQ ID NO: 3416387 - DNA, 25 bp, Homo sapien
ggatatgaacaggtggtgtgagctt

SEQ ID NO: 3416388 - DNA, 25 bp, Homo sapien
agggagagcatttgacttcccaggg

SEQ ID NO: 3416389 - DNA, 25 bp, Homo sapien
cttggttgatgctggggtgtctgga

SEQ ID NO: 3416390 - DNA, 25 bp, Homo sapien
agtcctgttgggatatgaacaggtg

SEQ ID NO: 3416391 - DNA, 25 bp, Homo sapien
caaaggcgaagagtgcgctgatgat

SEQ ID NO: 3416392 - DNA, 25 bp, Homo sapien
gataatgaagatcccggcaaaggcg

SEQ ID NO: 3416393 - DNA, 25 bp, Homo sapien
aagatcccggcaaaggcgaagagtg

SEQ ID NO: 3416394 - DNA, 25 bp, Homo sapien
gctcagatctgtaatgataatgaag

SEQ ID NO: 3416395 - DNA, 25 bp, Homo sapien
tcaaattgtctgcagcaggtagcct

SEQ ID NO: 3416396 - DNA, 25 bp, Homo sapien
caaaatgtgagaccacacaagtgag

SEQ ID NO: 3416397 - DNA, 25 bp, Homo sapien
caggtagcctggcacccaaaatgtg

SEQ ID NO: 3416398 - DNA, 25 bp, Homo sapien
gcaaaggggagaagaccgccagaaa

SEQ ID NO: 3416399 - DNA, 25 bp, Homo sapien
tggatagcattgacacaactggtgg

SEQ ID NO: 3416400 - DNA, 25 bp, Homo sapien
tcagtctggcaacaaggctagggtc

SEQ ID NO: 3416401 - DNA, 25 bp, Homo sapien
gaatacggttggaatcactgccaca

SEQ ID NO: 3416402 - DNA, 25 bp, Homo sapien
cagctatttcttggtacgagggttc

SEQ ID NO: 3416403 - DNA, 25 bp, Homo sapien
tgagggctcaagatggcacagggaa

SEQ ID NO: 3416404 - DNA, 25 bp, Homo sapien
ggcacagggaatggtctggatgccc

SEQ ID NO: 3416405 - DNA, 25 bp, Homo sapien
gacctgagggctcaagatggcacag

SEQ ID NO: 3416406 - DNA, 25 bp, Homo sapien
ggacctgagggctcaagatggcaca

SEQ ID NO: 3416407 - DNA, 25 bp, Homo sapien
cctgctacacctcggggctgggcgg

SEQ ID NO: 3416408 - DNA, 25 bp, Homo sapien
ccgcaccctcctctgatgagcagct

SEQ ID NO: 3416409 - DNA, 25 bp, Homo sapien
gtgctcctgcgccagttcccctgct

SEQ ID NO: 3416410 - DNA, 25 bp, Homo sapien
gccgcaccctcctctgatgagcagc

SEQ ID NO: 3416411 - DNA, 25 bp, Homo sapien
cccatgggctctaggctggtggttc

SEQ ID NO: 3416412 - DNA, 25 bp, Homo sapien
ccatgggctctaggctggtggttct

SEQ ID NO: 3416413 - DNA, 25 bp, Homo sapien
tgagcatgtttatcacctttataca

SEQ ID NO: 3416414 - DNA, 25 bp, Homo sapien
ccaggacttgtcttgtgagcatgtt

SEQ ID NO: 3416415 - DNA, 25 bp, Homo sapien
agccaggacttgtcttgtgagcatg

SEQ ID NO: 3416416 - DNA, 25 bp, Homo sapien
tttatacacgaagagccaaaagcag

SEQ ID NO: 3416417 - DNA, 25 bp, Homo sapien
ccgaaaattgatgagttttcctcct

SEQ ID NO: 3416418 - DNA, 25 bp, Homo sapien
ttttcctccttcaagcgtaacttca

SEQ ID NO: 3416419 - DNA, 25 bp, Homo sapien
cgggattccccgaaaattgatgagt

SEQ ID NO: 3416420 - DNA, 25 bp, Homo sapien
tgatgagttttcctccttcaagcgt

SEQ ID NO: 3416421 - DNA, 25 bp, Homo sapien
tctatgcctgcaagccggatagttg

SEQ ID NO: 3416422 - DNA, 25 bp, Homo sapien
tgcagttacagaggcttctatgcct

SEQ ID NO: 3416423 - DNA, 25 bp, Homo sapien
cctgcaagccggatagttgcctgtt

SEQ ID NO: 3416424 - DNA, 25 bp, Homo sapien
agaggcttctatgcctgcaagccgg

SEQ ID NO: 3416425 - DNA, 25 bp, Homo sapien
cttagcatcccttttacactgatag

SEQ ID NO: 3416426 - DNA, 25 bp, Homo sapien
gtggtaatagcagaaataaaggtca

SEQ ID NO: 3416427 - DNA, 25 bp, Homo sapien
gacctcagtaagattagtggtaata

SEQ ID NO: 3416428 - DNA, 25 bp, Homo sapien
tcagacggcatataggaagatcagg

SEQ ID NO: 3416429 - DNA, 25 bp, Homo sapien
agacataagataaccatggggactc

SEQ ID NO: 3416430 - DNA, 25 bp, Homo sapien
ccttgacatggcgcaggctgtctgg

SEQ ID NO: 3416431 - DNA, 25 bp, Homo sapien
acataagataaccatggggactcca

SEQ ID NO: 3416432 - DNA, 25 bp, Homo sapien
gacataagataaccatggggactcc

SEQ ID NO: 3416433 - DNA, 25 bp, Homo sapien
tttggcgggatgacaacaaacactc

SEQ ID NO: 3416434 - DNA, 25 bp, Homo sapien
tcctgtcaggaatgtctccacgggc

SEQ ID NO: 3416435 - DNA, 25 bp, Homo sapien
gcataatccctggaggttggcacat

SEQ ID NO: 3416436 - DNA, 25 bp, Homo sapien
tccacgggccgcaagtcaggtggct

SEQ ID NO: 3416437 - DNA, 25 bp, Homo sapien
aagccccgaggctcagtgccgcggg

SEQ ID NO: 3416438 - DNA, 25 bp, Homo sapien
gggaagccccgaggctcagtgccgc

SEQ ID NO: 3416439 - DNA, 25 bp, Homo sapien
gtgccgcgggccctgttccacaccg

SEQ ID NO: 3416440 - DNA, 25 bp, Homo sapien
ctgcgggaagccccgaggctcagtg

SEQ ID NO: 3416441 - DNA, 25 bp, Homo sapien
gatgaggccgatgaggatctgcacc

SEQ ID NO: 3416442 - DNA, 25 bp, Homo sapien
gtggatgaggccgatgaggatctgc

SEQ ID NO: 3416443 - DNA, 25 bp, Homo sapien
ctaggtggatgaggccgatgaggat

SEQ ID NO: 3416444 - DNA, 25 bp, Homo sapien
taggtggatgaggccgatgaggatc

SEQ ID NO: 3416445 - DNA, 25 bp, Homo sapien
gacgccgccctcgatgaagaagatg

SEQ ID NO: 3416446 - DNA, 25 bp, Homo sapien
ggggacgccgccctcgatgaagaag

SEQ ID NO: 3416447 - DNA, 25 bp, Homo sapien
cgccgccctcgatgaagaagatgcc

SEQ ID NO: 3416448 - DNA, 25 bp, Homo sapien
aagaagatgcccacgtggccgcggc

SEQ ID NO: 3416449 - DNA, 25 bp, Homo sapien
ggttcttctcggctgccactgagag

SEQ ID NO: 3416450 - DNA, 25 bp, Homo sapien
caggcaactggtgtggttcttctcg

SEQ ID NO: 3416451 - DNA, 25 bp, Homo sapien
ccactgagagggatccggagatgat

SEQ ID NO: 3416452 - DNA, 25 bp, Homo sapien
tcggctgccactgagagggatccgg

SEQ ID NO: 3416453 - DNA, 25 bp, Homo sapien
ccaccctggcttgtgtattgaaaga

SEQ ID NO: 3416454 - DNA, 25 bp, Homo sapien
ccaggcgtggtttcagtggcgaccc

SEQ ID NO: 3416455 - DNA, 25 bp, Homo sapien
gcccagcaggactcttacaggagat

SEQ ID NO: 3416456 - DNA, 25 bp, Homo sapien
tcctttctcggaatgaccatgagca

SEQ ID NO: 3416457 - DNA, 25 bp, Homo sapien
ttcgctgccgtgttcatgatcttca

SEQ ID NO: 3416458 - DNA, 25 bp, Homo sapien
tgacataaagctcataccctcctgt

SEQ ID NO: 3416459 - DNA, 25 bp, Homo sapien
tcattgccgtgttctctgagcctga

SEQ ID NO: 3416460 - DNA, 25 bp, Homo sapien
ctgctatgttcatgaccttcgctgc

SEQ ID NO: 3416461 - DNA, 25 bp, Homo sapien
gagcagaatggctgtcccagcaaag

SEQ ID NO: 3416462 - DNA, 25 bp, Homo sapien
ggccgccatgacgctgaggatgttg

SEQ ID NO: 3416463 - DNA, 25 bp, Homo sapien
gccatgacgctgaggatgttggtgc

SEQ ID NO: 3416464 - DNA, 25 bp, Homo sapien
tgagcagaatggctgtcccagcaaa

SEQ ID NO: 3416465 - DNA, 25 bp, Homo sapien
gaccgctgtgaagaactccaggaca

SEQ ID NO: 3416466 - DNA, 25 bp, Homo sapien
ggatggcttggcacccgaagtgcat

SEQ ID NO: 3416467 - DNA, 25 bp, Homo sapien
agatagtaagcacggccagatagcc

SEQ ID NO: 3416468 - DNA, 25 bp, Homo sapien
cgaagtgcatggcaatgaccgctgt

SEQ ID NO: 3416469 - DNA, 25 bp, Homo sapien
aagtctgcgctgaaggcgtttggca

SEQ ID NO: 3416470 - DNA, 25 bp, Homo sapien
attgtcataggcagggggcgcagag

SEQ ID NO: 3416471 - DNA, 25 bp, Homo sapien
atgttgaagtctgcgctgaaggcgt

SEQ ID NO: 3416472 - DNA, 25 bp, Homo sapien
gggatgttgaagtctgcgctgaagg

SEQ ID NO: 3416473 - DNA, 25 bp, Homo sapien
tcagacgactccttgggcatatgcc

SEQ ID NO: 3416474 - DNA, 25 bp, Homo sapien
agacgactccttgggcatatgccac

SEQ ID NO: 3416475 - DNA, 25 bp, Homo sapien
cagacgactccttgggcatatgcca

SEQ ID NO: 3416476 - DNA, 25 bp, Homo sapien
cagggcaggcctcgaacctgagtct

SEQ ID NO: 3416477 - DNA, 25 bp, Homo sapien
actgctgtgcccctgtcgatgctga

SEQ ID NO: 3416478 - DNA, 25 bp, Homo sapien
cgatgctgactgtggtggtgcctca

SEQ ID NO: 3416479 - DNA, 25 bp, Homo sapien
gcctggtatcggcacctctgtggaa

SEQ ID NO: 3416480 - DNA, 25 bp, Homo sapien
ctctcagtagtggtagaaaacttaa

SEQ ID NO: 3416481 - DNA, 25 bp, Homo sapien
aattgaggataactcagtcacttcc

SEQ ID NO: 3416482 - DNA, 25 bp, Homo sapien
tttactctcagtagtggtagaaaac

SEQ ID NO: 3416483 - DNA, 25 bp, Homo sapien
acttaattttgccaattgaggataa

SEQ ID NO: 3416484 - DNA, 25 bp, Homo sapien
agagacagcgctgggaaatcagcac

SEQ ID NO: 3416485 - DNA, 25 bp, Homo sapien
tcgactttggatcttctccctcctg

SEQ ID NO: 3416486 - DNA, 25 bp, Homo sapien
gacagcgctgggaaatcagcacatc

SEQ ID NO: 3416487 - DNA, 25 bp, Homo sapien
tcagcacatctttacaacattcgac

SEQ ID NO: 3416488 - DNA, 25 bp, Homo sapien
tagcacaacggctgggaataactgt

SEQ ID NO: 3416489 - DNA, 25 bp, Homo sapien
gactgggctgaggacttgccatgat

SEQ ID NO: 3416490 - DNA, 25 bp, Homo sapien
ggagcttgggctgggtcgtgttctg

SEQ ID NO: 3416491 - DNA, 25 bp, Homo sapien
cttctgggacttctcgtgctggtgt

SEQ ID NO: 3416492 - DNA, 25 bp, Homo sapien
gaccaggtgcagcagagcgatggtg

SEQ ID NO: 3416493 - DNA, 25 bp, Homo sapien
atggataccaagacttcagcaccac

SEQ ID NO: 3416494 - DNA, 25 bp, Homo sapien
tgcagcagagcgatggtgatgtgga

SEQ ID NO: 3416495 - DNA, 25 bp, Homo sapien
ttgactatagaggccaggtagcccc

SEQ ID NO: 3416496 - DNA, 25 bp, Homo sapien
ttgttatcgccaagatccctgaaat

SEQ ID NO: 3416497 - DNA, 25 bp, Homo sapien
cttcattgttatcgccaagatccct

SEQ ID NO: 3416498 - DNA, 25 bp, Homo sapien
cattgttatcgccaagatccctgaa

SEQ ID NO: 3416499 - DNA, 25 bp, Homo sapien
gtcttcattgttatcgccaagatcc

SEQ ID NO: 3416500 - DNA, 25 bp, Homo sapien
gacagcacgcaaaagaggctgatga

SEQ ID NO: 3416501 - DNA, 25 bp, Homo sapien
cagatcggggactcaaatgggctct

SEQ ID NO: 3416502 - DNA, 25 bp, Homo sapien
ggctgatgaggtttgtcatcaggca

SEQ ID NO: 3416503 - DNA, 25 bp, Homo sapien
ccttggagatgacgaagaggccaga

SEQ ID NO: 3416504 - DNA, 25 bp, Homo sapien
gcagatgggcagtcccctctccagg

SEQ ID NO: 3416505 - DNA, 25 bp, Homo sapien
aagagctctaggacagtgaagcaga

SEQ ID NO: 3416506 - DNA, 25 bp, Homo sapien
gcaggaagagctctaggacagtgaa

SEQ ID NO: 3416507 - DNA, 25 bp, Homo sapien
tctaggacagtgaagcagagcaagg

SEQ ID NO: 3416508 - DNA, 25 bp, Homo sapien
caccggcaggcctttgagatgcaat

SEQ ID NO: 3416509 - DNA, 25 bp, Homo sapien
gatgttgcttgtgttgtgcgtcgcc

SEQ ID NO: 3416510 - DNA, 25 bp, Homo sapien
tgcgtcgccttgaatcacactctgg

SEQ ID NO: 3416511 - DNA, 25 bp, Homo sapien
gtgtattcggaacaaggcatgcatc

SEQ ID NO: 3416512 - DNA, 25 bp, Homo sapien
gtccagatcgcagctccgtcagtga

SEQ ID NO: 3416513 - DNA, 25 bp, Homo sapien
tcagtttgcagtctgggtccagatc

SEQ ID NO: 3416514 - DNA, 25 bp, Homo sapien
ccgtcagtgactatccatgtgtccg

SEQ ID NO: 3416515 - DNA, 25 bp, Homo sapien
agtctgggtccagatcgcagctccg

SEQ ID NO: 3416516 - DNA, 25 bp, Homo sapien
tctcggacaacttcaaaacctgggc

SEQ ID NO: 3416517 - DNA, 25 bp, Homo sapien
tactgagagcatcccttcacacagg

SEQ ID NO: 3416518 - DNA, 25 bp, Homo sapien
gcttatctgagaggacagcgttccc

SEQ ID NO: 3416519 - DNA, 25 bp, Homo sapien
tatggccaagctagtgaccacagcc

SEQ ID NO: 3416520 - DNA, 25 bp, Homo sapien
agggtgtgaggggcatacccagggt

SEQ ID NO: 3416521 - DNA, 25 bp, Homo sapien
gggtgtgaggggcatacccagggtg

SEQ ID NO: 3416522 - DNA, 25 bp, Homo sapien
ctcttggaggagtcttgcaggattt

SEQ ID NO: 3416523 - DNA, 25 bp, Homo sapien
cctcttggaggagtcttgcaggatt

SEQ ID NO: 3416524 - DNA, 25 bp, Homo sapien
ggatggctcctctgggctctgccat

SEQ ID NO: 3416525 - DNA, 25 bp, Homo sapien
caggatggctcctctgggctctgcc

SEQ ID NO: 3416526 - DNA, 25 bp, Homo sapien
aggatggctcctctgggctctgcca

SEQ ID NO: 3416527 - DNA, 25 bp, Homo sapien
gccagcagctgataatgatctgcag

SEQ ID NO: 3416528 - DNA, 25 bp, Homo sapien
cagcagctgataatgatctgcaggg

SEQ ID NO: 3416529 - DNA, 25 bp, Homo sapien
ccagcagctgataatgatctgcagg

SEQ ID NO: 3416530 - DNA, 25 bp, Homo sapien
tggagtctccctcttgctctgtcgc

SEQ ID NO: 3416531 - DNA, 25 bp, Homo sapien
tcaccatgcccagctaatttttata

SEQ ID NO: 3416532 - DNA, 25 bp, Homo sapien
gctgagactacaggtctgtgtcacc

SEQ ID NO: 3416533 - DNA, 25 bp, Homo sapien
catgcctggcctgcatttttttttt

SEQ ID NO: 3416534 - DNA, 25 bp, Homo sapien
ctgagatgaccagggtggttgctcc

SEQ ID NO: 3416535 - DNA, 25 bp, Homo sapien
agatgaccagggtggttgctcctga

SEQ ID NO: 3416536 - DNA, 25 bp, Homo sapien
tgaccagggtggttgctcctgaaac

SEQ ID NO: 3416537 - DNA, 25 bp, Homo sapien
gggaactgtgcagtttgctgagatg

SEQ ID NO: 3416538 - DNA, 25 bp, Homo sapien
cagggccgcatcgatagaaaagcta

SEQ ID NO: 3416539 - DNA, 25 bp, Homo sapien
agggccgcatcgatagaaaagctat

SEQ ID NO: 3416540 - DNA, 25 bp, Homo sapien
gggccgcatcgatagaaaagctatt

SEQ ID NO: 3416541 - DNA, 25 bp, Homo sapien
agaaggcgatgcctagtgccaggat

SEQ ID NO: 3416542 - DNA, 25 bp, Homo sapien
gacaagaaggcgatgcctagtgcca

SEQ ID NO: 3416543 - DNA, 25 bp, Homo sapien
cagcagcaccgagagactcttccag

SEQ ID NO: 3416544 - DNA, 25 bp, Homo sapien
gcagcagcaccgagagactcttcca

SEQ ID NO: 3416545 - DNA, 25 bp, Homo sapien
cgtatgttgcaagtctctggagctg

SEQ ID NO: 3416546 - DNA, 25 bp, Homo sapien
ggtggccgtatgttgcaagtctctg

SEQ ID NO: 3416547 - DNA, 25 bp, Homo sapien
agagcaggtgctcaagttcagtgct

SEQ ID NO: 3416548 - DNA, 25 bp, Homo sapien
agttcagtgctcgatgctacgccgc

SEQ ID NO: 3416549 - DNA, 25 bp, Homo sapien
cacattgtggtggtaatttctggag

SEQ ID NO: 3416550 - DNA, 25 bp, Homo sapien
aagttcacattgtggtggtaatttc

SEQ ID NO: 3416551 - DNA, 25 bp, Homo sapien
cattgtggtggtaatttctggagaa

SEQ ID NO: 3416552 - DNA, 25 bp, Homo sapien
aaattactttctggataaggacaag

SEQ ID NO: 3416553 - DNA, 25 bp, Homo sapien
tgccgaatcagcaataccagtttat

SEQ ID NO: 3416554 - DNA, 25 bp, Homo sapien
gcagaatgtgccgaatcagcaatac

SEQ ID NO: 3416555 - DNA, 25 bp, Homo sapien
agatctgctgactgatggaaaccaa

SEQ ID NO: 3416556 - DNA, 25 bp, Homo sapien
catcgtgcagaatgtgccgaatcag

SEQ ID NO: 3416557 - DNA, 25 bp, Homo sapien
ctattcgtcacactgattctggtct

SEQ ID NO: 3416558 - DNA, 25 bp, Homo sapien
aggaggtgggtaccacctggcacac

SEQ ID NO: 3416559 - DNA, 25 bp, Homo sapien
cacactgattctggtctgtgtgctg

SEQ ID NO: 3416560 - DNA, 25 bp, Homo sapien
gaggtgggtaccacctggcacacac

SEQ ID NO: 3416561 - DNA, 25 bp, Homo sapien
cgagcgcagtcaacatgtgattgat

SEQ ID NO: 3416562 - DNA, 25 bp, Homo sapien
gctcagcatgcgcatgcgcaattcg

SEQ ID NO: 3416563 - DNA, 25 bp, Homo sapien
ttcctgggattcgcttttgcctttc

SEQ ID NO: 3416564 - DNA, 25 bp, Homo sapien
gcaattcgcgcgagcgcagtcaaca

SEQ ID NO: 3416565 - DNA, 25 bp, Homo sapien
tgacgtcaggagtcgccgcgtccgt

SEQ ID NO: 3416566 - DNA, 25 bp, Homo sapien
cggcgccttcctatgacgtcaggag

SEQ ID NO: 3416567 - DNA, 25 bp, Homo sapien
ggctcagccggtaagtttccacacc

SEQ ID NO: 3416568 - DNA, 25 bp, Homo sapien
tcctatgacgtcaggagtcgccgcg

SEQ ID NO: 3416569 - DNA, 25 bp, Homo sapien
tctcgtccgcgaaactgaggtgagg

SEQ ID NO: 3416570 - DNA, 25 bp, Homo sapien
tttcttctgggttcgactcgaactc

SEQ ID NO: 3416571 - DNA, 25 bp, Homo sapien
ggattcgggccttaggcctcccagc

SEQ ID NO: 3416572 - DNA, 25 bp, Homo sapien
agggcccgtctcgtccgcgaaactg

SEQ ID NO: 3416573 - DNA, 25 bp, Homo sapien
gctgcagacggggtgatcctgggct

SEQ ID NO: 3416574 - DNA, 25 bp, Homo sapien
tgggcttgtcttcggcggcctttcg

SEQ ID NO: 3416575 - DNA, 25 bp, Homo sapien
cgaggccagtactccctggtcctga

SEQ ID NO: 3416576 - DNA, 25 bp, Homo sapien
ctggtcctgagaacactttggtgcc

SEQ ID NO: 3416577 - DNA, 25 bp, Homo sapien
ctgaccggggtaaggctctggtgat

SEQ ID NO: 3416578 - DNA, 25 bp, Homo sapien
tgaccggggtaaggctctggtgatc

SEQ ID NO: 3416579 - DNA, 25 bp, Homo sapien
ctgggtgtcagctccagtagtggct

SEQ ID NO: 3416580 - DNA, 25 bp, Homo sapien
cttgctcggctcatgctgaccccgg

SEQ ID NO: 3416581 - DNA, 25 bp, Homo sapien
gccctgggtgtcagctccagtagtg

SEQ ID NO: 3416582 - DNA, 25 bp, Homo sapien
ttgctcggctcatgctgaccccggg

SEQ ID NO: 3416583 - DNA, 25 bp, Homo sapien
tcttggagcggtccttccacactcg

SEQ ID NO: 3416584 - DNA, 25 bp, Homo sapien
ggcctgggatgaagaaccttttcgc

SEQ ID NO: 3416585 - DNA, 25 bp, Homo sapien
ctttattcaacttcttggacgctgg

SEQ ID NO: 3416586 - DNA, 25 bp, Homo sapien
cttcgggattacaggaagctcctct

SEQ ID NO: 3416587 - DNA, 25 bp, Homo sapien
ggccatcaacggccctgccattctc

SEQ ID NO: 3416588 - DNA, 25 bp, Homo sapien
catcaacggccctgccattctcctg

SEQ ID NO: 3416589 - DNA, 25 bp, Homo sapien
ccatcaacggccctgccattctcct

SEQ ID NO: 3416590 - DNA, 25 bp, Homo sapien
atggccatcaacggccctgccattc

SEQ ID NO: 3416591 - DNA, 25 bp, Homo sapien
acatggcaaaacctactaagcctac

SEQ ID NO: 3416592 - DNA, 25 bp, Homo sapien
tggcaaaacctactaagcctactaa

SEQ ID NO: 3416593 - DNA, 25 bp, Homo sapien
ccgccaagaccggatgcagtggtca

SEQ ID NO: 3416594 - DNA, 25 bp, Homo sapien
accggatgcagtggtcatgcttgta

SEQ ID NO: 3416595 - DNA, 25 bp, Homo sapien
cgactgcagagtccaggctacgcgg

SEQ ID NO: 3416596 - DNA, 25 bp, Homo sapien
aaagttctgttgcttccgccaagtg

SEQ ID NO: 3416597 - DNA, 25 bp, Homo sapien
atttggcccgggtgtgaatgcctct

SEQ ID NO: 3416598 - DNA, 25 bp, Homo sapien
gacttgaatcctgtcagcgactgca

SEQ ID NO: 3416599 - DNA, 25 bp, Homo sapien
ccaggtgacgggcaaagtccttggc

SEQ ID NO: 3416600 - DNA, 25 bp, Homo sapien
ctccaggtgacgggcaaagtccttg

SEQ ID NO: 3416601 - DNA, 25 bp, Homo sapien
caggtgacgggcaaagtccttggcc

SEQ ID NO: 3416602 - DNA, 25 bp, Homo sapien
aggtgacgggcaaagtccttggcca

SEQ ID NO: 3416603 - DNA, 25 bp, Homo sapien
tccaggcggcgtttcaggttctcag

SEQ ID NO: 3416604 - DNA, 25 bp, Homo sapien
ttccgctcattctccaggcggcgtt

SEQ ID NO: 3416605 - DNA, 25 bp, Homo sapien
gtttcaggttctcagcccggcgctg

SEQ ID NO: 3416606 - DNA, 25 bp, Homo sapien
cacttggacgacctctgccttccgc

SEQ ID NO: 3416607 - DNA, 25 bp, Homo sapien
ctcggtccaaattcccaggggagag

SEQ ID NO: 3416608 - DNA, 25 bp, Homo sapien
gggtacatgaggcaggggtcgaggc

SEQ ID NO: 3416609 - DNA, 25 bp, Homo sapien
aggggaggacattagtgcagctgca

SEQ ID NO: 3416610 - DNA, 25 bp, Homo sapien
cctgagatcgtagcatgagagtggg

SEQ ID NO: 3416611 - DNA, 25 bp, Homo sapien
tcagatcttggctgccggctgctgg

SEQ ID NO: 3416612 - DNA, 25 bp, Homo sapien
cagggtgtcccgcttctcaatggag

SEQ ID NO: 3416613 - DNA, 25 bp, Homo sapien
gcttctcaatggagcgcagctgctt

SEQ ID NO: 3416614 - DNA, 25 bp, Homo sapien
tgcttcttctttgcccgcttgagct

SEQ ID NO: 3416615 - DNA, 25 bp, Homo sapien
tccctgttctggagccatgggtttg

SEQ ID NO: 3416616 - DNA, 25 bp, Homo sapien
gaagccttcaaaggccgaggagccc

SEQ ID NO: 3416617 - DNA, 25 bp, Homo sapien
gatgggagctgaatctcttcccgcc

SEQ ID NO: 3416618 - DNA, 25 bp, Homo sapien
ctgtgtctgacatggttgttggcca

SEQ ID NO: 3416619 - DNA, 25 bp, Homo sapien
aagctggattcccaactgtcagcct

SEQ ID NO: 3416620 - DNA, 25 bp, Homo sapien
tggattcccaactgtcagcctccag

SEQ ID NO: 3416621 - DNA, 25 bp, Homo sapien
caggcctgggatggacctaggatgc

SEQ ID NO: 3416622 - DNA, 25 bp, Homo sapien
ggatggacctaggatgctgagaaag

SEQ ID NO: 3416623 - DNA, 25 bp, Homo sapien
agaggaaccggattcagtctgctgg

SEQ ID NO: 3416624 - DNA, 25 bp, Homo sapien
ccggattcagtctgctggggacaga

SEQ ID NO: 3416625 - DNA, 25 bp, Homo sapien
gaaccggattcagtctgctggggac

SEQ ID NO: 3416626 - DNA, 25 bp, Homo sapien
gagaggaaccggattcagtctgctg

SEQ ID NO: 3416627 - DNA, 25 bp, Homo sapien
cagggactttggtctattgtctgta

SEQ ID NO: 3416628 - DNA, 25 bp, Homo sapien
tatttttgctgtagactggacaggc

SEQ ID NO: 3416629 - DNA, 25 bp, Homo sapien
tcagaatgaaagctcctcgagggca

SEQ ID NO: 3416630 - DNA, 25 bp, Homo sapien
tttgccggtgcctaggattgtgcct

SEQ ID NO: 3416631 - DNA, 25 bp, Homo sapien
ctgcattttaaagcgccccgggaga

SEQ ID NO: 3416632 - DNA, 25 bp, Homo sapien
cagggtgccgcggttcaattcgata

SEQ ID NO: 3416633 - DNA, 25 bp, Homo sapien
tgccgcagtgatcaaagtccgaggg

SEQ ID NO: 3416634 - DNA, 25 bp, Homo sapien
gggcggcactcacacgcgaaagtat

SEQ ID NO: 3416635 - DNA, 25 bp, Homo sapien
taaccccaggtcgtggctgagcctc

SEQ ID NO: 3416636 - DNA, 25 bp, Homo sapien
cacagggtaaccccaggtcgtggct

SEQ ID NO: 3416637 - DNA, 25 bp, Homo sapien
cagggtaaccccaggtcgtggctga

SEQ ID NO: 3416638 - DNA, 25 bp, Homo sapien
ggtaaccccaggtcgtggctgagcc

SEQ ID NO: 3416639 - DNA, 25 bp, Homo sapien
ccagggtcgggctggagccacctac

SEQ ID NO: 3416640 - DNA, 25 bp, Homo sapien
gggaggccagggtcgggctggagcc

SEQ ID NO: 3416641 - DNA, 25 bp, Homo sapien
ctgggaggccagggtcgggctggag

SEQ ID NO: 3416642 - DNA, 25 bp, Homo sapien
ggccagggtcgggctggagccacct

SEQ ID NO: 3416643 - DNA, 25 bp, Homo sapien
caccttgaagcggagagtctggcct

SEQ ID NO: 3416644 - DNA, 25 bp, Homo sapien
caccaccttgaagcggagagtctgg

SEQ ID NO: 3416645 - DNA, 25 bp, Homo sapien
cattcccttgatcccacagtcgtag

SEQ ID NO: 3416646 - DNA, 25 bp, Homo sapien
ccaccaccttgaagcggagagtctg

SEQ ID NO: 3416647 - DNA, 25 bp, Homo sapien
tgttgacatcaaatcggttcccaaa

SEQ ID NO: 3416648 - DNA, 25 bp, Homo sapien
gcagttgttgacatcaaatcggttc

SEQ ID NO: 3416649 - DNA, 25 bp, Homo sapien
tccagcacgtggcagcctctgtaat

SEQ ID NO: 3416650 - DNA, 25 bp, Homo sapien
tgtaatcggccgagaagactgcagg

SEQ ID NO: 3416651 - DNA, 25 bp, Homo sapien
aacaccctcaggtggaaacgcccat

SEQ ID NO: 3416652 - DNA, 25 bp, Homo sapien
ttgtgccacatccacacgaccattg

SEQ ID NO: 3416653 - DNA, 25 bp, Homo sapien
acatccacacgaccattgggcagca

SEQ ID NO: 3416654 - DNA, 25 bp, Homo sapien
gtagcgtcttgtgccacatccacac

SEQ ID NO: 3416655 - DNA, 25 bp, Homo sapien
ggttgggtggacagagctgtgccct

SEQ ID NO: 3416656 - DNA, 25 bp, Homo sapien
tttgtggggttgagacagagaacat

SEQ ID NO: 3416657 - DNA, 25 bp, Homo sapien
gacagagaacatggcgggtggtgcc

SEQ ID NO: 3416658 - DNA, 25 bp, Homo sapien
gtaatctcgtttgttcacatcccag

SEQ ID NO: 3416659 - DNA, 25 bp, Homo sapien
gaagttcttctcacgatgcagggga

SEQ ID NO: 3416660 - DNA, 25 bp, Homo sapien
aagttcttctcacgatgcaggggag

SEQ ID NO: 3416661 - DNA, 25 bp, Homo sapien
tgaagttcttctcacgatgcagggg

SEQ ID NO: 3416662 - DNA, 25 bp, Homo sapien
ttgaagttcttctcacgatgcaggg

SEQ ID NO: 3416663 - DNA, 25 bp, Homo sapien
ctgtgttgccatagtaacagggaac

SEQ ID NO: 3416664 - DNA, 25 bp, Homo sapien
ctctctggtgttgtcatagcagcag

SEQ ID NO: 3416665 - DNA, 25 bp, Homo sapien
gtgttgccatagtaacagggaacct

SEQ ID NO: 3416666 - DNA, 25 bp, Homo sapien
ctctggtgttgtcatagcagcagcc

SEQ ID NO: 3416667 - DNA, 25 bp, Homo sapien
cagttgttataaggccagctgggac

SEQ ID NO: 3416668 - DNA, 25 bp, Homo sapien
tgacagccaggctttaagtgccggt

SEQ ID NO: 3416669 - DNA, 25 bp, Homo sapien
tgtccatccagcacagagacgggat

SEQ ID NO: 3416670 - DNA, 25 bp, Homo sapien
tgccggtctaggagaatggacgctt

SEQ ID NO: 3416671 - DNA, 25 bp, Homo sapien
ttcttgggacactacgaggacgaag

SEQ ID NO: 3416672 - DNA, 25 bp, Homo sapien
tacgaggacgaagtagccatctctg

SEQ ID NO: 3416673 - DNA, 25 bp, Homo sapien
gacactacgaggacgaagtagccat

SEQ ID NO: 3416674 - DNA, 25 bp, Homo sapien
tgggacactacgaggacgaagtagc

SEQ ID NO: 3416675 - DNA, 25 bp, Homo sapien
tgttggccagtgtgatcctgtgtgt

SEQ ID NO: 3416676 - DNA, 25 bp, Homo sapien
gagggaagtagaagaccacgaaagc

SEQ ID NO: 3416677 - DNA, 25 bp, Homo sapien
cagtgtgatcctgtgtgtcaaggcc

SEQ ID NO: 3416678 - DNA, 25 bp, Homo sapien
cgaaagcttccgtgtgctgtgttgg

SEQ ID NO: 3416679 - DNA, 25 bp, Homo sapien
ctcatagatgagctggtcgccagcc

SEQ ID NO: 3416680 - DNA, 25 bp, Homo sapien
gtgctgtcccgcgtgatggaaccct

SEQ ID NO: 3416681 - DNA, 25 bp, Homo sapien
tgtcccgcgtgatggaaccctgtgg

SEQ ID NO: 3416682 - DNA, 25 bp, Homo sapien
catagatgagctggtcgccagccac

SEQ ID NO: 3416683 - DNA, 25 bp, Homo sapien
gctgggtcataggagcaggcgatgg

SEQ ID NO: 3416684 - DNA, 25 bp, Homo sapien
gcaatccgcagctcaagccgcaggg

SEQ ID NO: 3416685 - DNA, 25 bp, Homo sapien
tcactggcgttgaagacacagcgca

SEQ ID NO: 3416686 - DNA, 25 bp, Homo sapien
tttggcaatccgcagctcaagccgc

SEQ ID NO: 3416687 - DNA, 25 bp, Homo sapien
cacatggactggttctcggagcagc

SEQ ID NO: 3416688 - DNA, 25 bp, Homo sapien
aagccggacctccacatggactggt

SEQ ID NO: 3416689 - DNA, 25 bp, Homo sapien
tcggagcagcctcacgatgggatag

SEQ ID NO: 3416690 - DNA, 25 bp, Homo sapien
tccccatagtacgagctgaaggtct

SEQ ID NO: 3416691 - DNA, 25 bp, Homo sapien
tggccccgtccaaggctaccatttg

SEQ ID NO: 3416692 - DNA, 25 bp, Homo sapien
agggcgaaggtagcaacagtgaatc

SEQ ID NO: 3416693 - DNA, 25 bp, Homo sapien
gaatcgctggtagtgcgactggaaa

SEQ ID NO: 3416694 - DNA, 25 bp, Homo sapien
ccatttgggttctgtagctgtcgcc

SEQ ID NO: 3416695 - DNA, 25 bp, Homo sapien
tgccagagggatttggcgaccagct

SEQ ID NO: 3416696 - DNA, 25 bp, Homo sapien
tccatgacacctggtagacgccaag

SEQ ID NO: 3416697 - DNA, 25 bp, Homo sapien
tccatataagttcacagggtgccag

SEQ ID NO: 3416698 - DNA, 25 bp, Homo sapien
ttgctgacccgaagcccgctgcttt

SEQ ID NO: 3416699 - DNA, 25 bp, Homo sapien
gtgccagtgctacatgcagtggagc

SEQ ID NO: 3416700 - DNA, 25 bp, Homo sapien
cagtggagcaagtctccagccctga

SEQ ID NO: 3416701 - DNA, 25 bp, Homo sapien
gcagaggtgctgcagaacaagtaaa

SEQ ID NO: 3416702 - DNA, 25 bp, Homo sapien
cagaggtgctgcagaacaagtaaac

SEQ ID NO: 3416703 - DNA, 25 bp, Homo sapien
aaatcttgggctggtctcctgcccc

SEQ ID NO: 3416704 - DNA, 25 bp, Homo sapien
ggaacaaataccactcgcaacccag

SEQ ID NO: 3416705 - DNA, 25 bp, Homo sapien
ggaagaatgaaatcttgggctggtc

SEQ ID NO: 3416706 - DNA, 25 bp, Homo sapien
caggcacaggcctgaagatgtataa

SEQ ID NO: 3416707 - DNA, 25 bp, Homo sapien
tggcagtgtcattacggtgacctga

SEQ ID NO: 3416708 - DNA, 25 bp, Homo sapien
cggtgacctgaggatcgtcgctgtc

SEQ ID NO: 3416709 - DNA, 25 bp, Homo sapien
ggctcctgcccataagaatcctcaa

SEQ ID NO: 3416710 - DNA, 25 bp, Homo sapien
ctggccccggagagctcacgatgtc

SEQ ID NO: 3416711 - DNA, 25 bp, Homo sapien
gcagcaaaaggaccgcccaaaggag

SEQ ID NO: 3416712 - DNA, 25 bp, Homo sapien
acagctggcagcaaaaggaccgccc

SEQ ID NO: 3416713 - DNA, 25 bp, Homo sapien
tggctcaggcccacaaagacaccaa

SEQ ID NO: 3416714 - DNA, 25 bp, Homo sapien
ccaaggaccagggcaacagctggca

SEQ ID NO: 3416715 - DNA, 25 bp, Homo sapien
tgaaatgattgtttattgggcccat

SEQ ID NO: 3416716 - DNA, 25 bp, Homo sapien
taggtttgaaatgattgtttattgg

SEQ ID NO: 3416717 - DNA, 25 bp, Homo sapien
tttgaaatgattgtttattgggccc

SEQ ID NO: 3416718 - DNA, 25 bp, Homo sapien
ggtttgaaatgattgtttattgggc

SEQ ID NO: 3416719 - DNA, 25 bp, Homo sapien
gcacagacctgtctggtggccatgc

SEQ ID NO: 3416720 - DNA, 25 bp, Homo sapien
tacatgggcaaactgggctcagcgg

SEQ ID NO: 3416721 - DNA, 25 bp, Homo sapien
caaactgggctcagcggcatagcca

SEQ ID NO: 3416722 - DNA, 25 bp, Homo sapien
tgcccaccatcgcagccagtgtcag

SEQ ID NO: 3416723 - DNA, 25 bp, Homo sapien
tggcacagccgcgttttgaagtgga

SEQ ID NO: 3416724 - DNA, 25 bp, Homo sapien
tctggtgtgagcaaaggtactggca

SEQ ID NO: 3416725 - DNA, 25 bp, Homo sapien
ttccttaggtggacataggacagag

SEQ ID NO: 3416726 - DNA, 25 bp, Homo sapien
gaagtggaagttccttaggtggaca

SEQ ID NO: 3416727 - DNA, 25 bp, Homo sapien
cctgtcgttcaatggacgtggtggt

SEQ ID NO: 3416728 - DNA, 25 bp, Homo sapien
caagggaactgtgaaggggatgggc

SEQ ID NO: 3416729 - DNA, 25 bp, Homo sapien
ttttgttgcagttcctgtgagacag

SEQ ID NO: 3416730 - DNA, 25 bp, Homo sapien
ttcctgtcgttcaatggacgtggtg

SEQ ID NO: 3416731 - DNA, 25 bp, Homo sapien
gatgacctgcccttagagaaagagg

SEQ ID NO: 3416732 - DNA, 25 bp, Homo sapien
gaataaaacagacccgatttgggca

SEQ ID NO: 3416733 - DNA, 25 bp, Homo sapien
gatatacgatggagccacatcctga

SEQ ID NO: 3416734 - DNA, 25 bp, Homo sapien
agagaccttggttcaaagccctcag

SEQ ID NO: 3416735 - DNA, 25 bp, Homo sapien
taaccatagcaccaacatcactgtc

SEQ ID NO: 3416736 - DNA, 25 bp, Homo sapien
ctgctatgaagaactgcctgggtaa

SEQ ID NO: 3416737 - DNA, 25 bp, Homo sapien
ccaacatgcataaacctgtcatctc

SEQ ID NO: 3416738 - DNA, 25 bp, Homo sapien
aagtatagtataggcataccttgtc

SEQ ID NO: 3416739 - DNA, 25 bp, Homo sapien
gatgcacctgtgatagccatgattg

SEQ ID NO: 3416740 - DNA, 25 bp, Homo sapien
tctcgcgcacgccaaggtttcaaag

SEQ ID NO: 3416741 - DNA, 25 bp, Homo sapien
ggtagcccgagaaacaactgactta

SEQ ID NO: 3416742 - DNA, 25 bp, Homo sapien
tgtctacgcagacccgaggaatctg

SEQ ID NO: 3416743 - DNA, 25 bp, Homo sapien
tcttggtaccacagggaggaatcat

SEQ ID NO: 3416744 - DNA, 25 bp, Homo sapien
tgggcatgccctactgacatgactt

SEQ ID NO: 3416745 - DNA, 25 bp, Homo sapien
cacccagcaaggagactggaggcat

SEQ ID NO: 3416746 - DNA, 25 bp, Homo sapien
gagttccagcatttaggttccgatc

SEQ ID NO: 3416747 - DNA, 25 bp, Homo sapien
tcagccagaaactctctccctcatt

SEQ ID NO: 3416748 - DNA, 25 bp, Homo sapien
gccagaaactctctccctcattcat

SEQ ID NO: 3416749 - DNA, 25 bp, Homo sapien
ctcagccagaaactctctccctcat

SEQ ID NO: 3416750 - DNA, 25 bp, Homo sapien
gggcaagtttcctcagccagaaact

SEQ ID NO: 3416751 - DNA, 25 bp, Homo sapien
cagtagttgagatgactggcctgtc

SEQ ID NO: 3416752 - DNA, 25 bp, Homo sapien
ggaccatgaaaagggctccagagga

SEQ ID NO: 3416753 - DNA, 25 bp, Homo sapien
ggttcctgccatcatgaagtttaca

SEQ ID NO: 3416754 - DNA, 25 bp, Homo sapien
caggcacaatgtggcactcttacac

SEQ ID NO: 3416755 - DNA, 25 bp, Homo sapien
tcaggtcgtagacaccttttggaaa

SEQ ID NO: 3416756 - DNA, 25 bp, Homo sapien
ccatgtgggtagtagaaacagtctc

SEQ ID NO: 3416757 - DNA, 25 bp, Homo sapien
gaaaatgaatatagggccaaagttg

SEQ ID NO: 3416758 - DNA, 25 bp, Homo sapien
tgtttaagctggcaacttctccctg

SEQ ID NO: 3416759 - DNA, 25 bp, Homo sapien
cacaagcattcccaccgagagaaga

SEQ ID NO: 3416760 - DNA, 25 bp, Homo sapien
gaaatcggagtggaagctaatcctc

SEQ ID NO: 3416761 - DNA, 25 bp, Homo sapien
tcctcacaatcgaagcctgtgccgg

SEQ ID NO: 3416762 - DNA, 25 bp, Homo sapien
tatccttcacgtgcgacttcgctga

SEQ ID NO: 3416763 - DNA, 25 bp, Homo sapien
cctgagctatctgggtcataaccat

SEQ ID NO: 3416764 - DNA, 25 bp, Homo sapien
ggtgagttcctgagctatctgggtc

SEQ ID NO: 3416765 - DNA, 25 bp, Homo sapien
tgaggaaagcacaggtgagttcctg

SEQ ID NO: 3416766 - DNA, 25 bp, Homo sapien
cctgccagtggtcgcagatgaggaa

SEQ ID NO: 3416767 - DNA, 25 bp, Homo sapien
catgctttccccatggtgaactgat

SEQ ID NO: 3416768 - DNA, 25 bp, Homo sapien
tttgaacacatgctttccccatggt

SEQ ID NO: 3416769 - DNA, 25 bp, Homo sapien
ctttgaacacatgctttccccatgg

SEQ ID NO: 3416770 - DNA, 25 bp, Homo sapien
aacacatgctttccccatggtgaac

SEQ ID NO: 3416771 - DNA, 25 bp, Homo sapien
cctatctgggtcaagacatcaactg

SEQ ID NO: 3416772 - DNA, 25 bp, Homo sapien
atccagtgtccctcgcacagatcga

SEQ ID NO: 3416773 - DNA, 25 bp, Homo sapien
taagggccactaggaccatcagaat

SEQ ID NO: 3416774 - DNA, 25 bp, Homo sapien
aagtctcgacgggactgggccaatg

SEQ ID NO: 3416775 - DNA, 25 bp, Homo sapien
ttctagtctacagggatggccaaca

SEQ ID NO: 3416776 - DNA, 25 bp, Homo sapien
cttctagtctacagggatggccaac

SEQ ID NO: 3416777 - DNA, 25 bp, Homo sapien
gcggcgatcccagacagagcaaaga

SEQ ID NO: 3416778 - DNA, 25 bp, Homo sapien
cagctgtgcggcgatcccagacaga

SEQ ID NO: 3416779 - DNA, 25 bp, Homo sapien
tggcccacaacacttgggacgaaga

SEQ ID NO: 3416780 - DNA, 25 bp, Homo sapien
cagctagtcccaaggcattcagcag

SEQ ID NO: 3416781 - DNA, 25 bp, Homo sapien
ctcagcagggcgtagaggatcagca

SEQ ID NO: 3416782 - DNA, 25 bp, Homo sapien
acagcagccagtagacgaccagggc

SEQ ID NO: 3416783 - DNA, 25 bp, Homo sapien
ggaagatgacaagcttcaggcccca

SEQ ID NO: 3416784 - DNA, 25 bp, Homo sapien
agcaaggccaagaccaagccgagga

SEQ ID NO: 3416785 - DNA, 25 bp, Homo sapien
ggttaagagagccaaccccagacag

SEQ ID NO: 3416786 - DNA, 25 bp, Homo sapien
caacggcagtgatgtttgctggcgc

SEQ ID NO: 3416787 - DNA, 25 bp, Homo sapien
agctggagatttggccaaggagcaa

SEQ ID NO: 3416788 - DNA, 25 bp, Homo sapien
taagtcatgagagaccaacggcagt

SEQ ID NO: 3416789 - DNA, 25 bp, Homo sapien
aggaggacaggagcgtgccttaaag

SEQ ID NO: 3416790 - DNA, 25 bp, Homo sapien
gaggacaggagcgtgccttaaagga

SEQ ID NO: 3416791 - DNA, 25 bp, Homo sapien
ggaggacaggagcgtgccttaaagg

SEQ ID NO: 3416792 - DNA, 25 bp, Homo sapien
aggacaggagcgtgccttaaaggac

SEQ ID NO: 3416793 - DNA, 25 bp, Homo sapien
gctggctcggattaaggcacttgaa

SEQ ID NO: 3416794 - DNA, 25 bp, Homo sapien
gcatataatgcccagcaaggtccca

SEQ ID NO: 3416795 - DNA, 25 bp, Homo sapien
cctgaacagtaagaattgggcattt

SEQ ID NO: 3416796 - DNA, 25 bp, Homo sapien
tgggcactggtcagcaactccttct

SEQ ID NO: 3416797 - DNA, 25 bp, Homo sapien
tccctcacggaagcttctgatcagg

SEQ ID NO: 3416798 - DNA, 25 bp, Homo sapien
agggccacgtccctggaagcaacag

SEQ ID NO: 3416799 - DNA, 25 bp, Homo sapien
ccgcggctgcaattcccagacaatg

SEQ ID NO: 3416800 - DNA, 25 bp, Homo sapien
gactcggtgagttctgtgtggctcc

SEQ ID NO: 3416801 - DNA, 25 bp, Homo sapien
ccgcacggcatctcccgcacccgct

SEQ ID NO: 3416802 - DNA, 25 bp, Homo sapien
cttcccacagaaggcggggacgagg

SEQ ID NO: 3416803 - DNA, 25 bp, Homo sapien
ggccccagtcccgcacggcatctcc

SEQ ID NO: 3416804 - DNA, 25 bp, Homo sapien
cccagtcccgcacggcatctcccgc

SEQ ID NO: 3416805 - DNA, 25 bp, Homo sapien
ctctcacgacgtccagggcgagggc

SEQ ID NO: 3416806 - DNA, 25 bp, Homo sapien
tcacgacgtccagggcgagggccac

SEQ ID NO: 3416807 - DNA, 25 bp, Homo sapien
cccgaggggccgctgttgtgcgacc

SEQ ID NO: 3416808 - DNA, 25 bp, Homo sapien
gggccgctgttgtgcgaccggccat

SEQ ID NO: 3416809 - DNA, 25 bp, Homo sapien
ctggagacgccaaggtcagggagcc

SEQ ID NO: 3416810 - DNA, 25 bp, Homo sapien
ccgaagcacagggaagttgctgccc

SEQ ID NO: 3416811 - DNA, 25 bp, Homo sapien
cgcagtgacaggaatcctctcaaag

SEQ ID NO: 3416812 - DNA, 25 bp, Homo sapien
gctgccctttcccgcagtgacagga

SEQ ID NO: 3416813 - DNA, 25 bp, Homo sapien
tctggaaggcaaggatgcggccatc

SEQ ID NO: 3416814 - DNA, 25 bp, Homo sapien
atgctcttagcctgactcccacgga

SEQ ID NO: 3416815 - DNA, 25 bp, Homo sapien
actggcttcaggttcgcctcctact

SEQ ID NO: 3416816 - DNA, 25 bp, Homo sapien
tgcctccataattacaagatgctct

SEQ ID NO: 3416817 - DNA, 25 bp, Homo sapien
cctgccccaagcgtaacaagtgacc

SEQ ID NO: 3416818 - DNA, 25 bp, Homo sapien
aaggagcactaagccatattggttt

SEQ ID NO: 3416819 - DNA, 25 bp, Homo sapien
ggagcactaagccatattggtttgc

SEQ ID NO: 3416820 - DNA, 25 bp, Homo sapien
ccatattggtttgctctaactatga

SEQ ID NO: 3416821 - DNA, 25 bp, Homo sapien
ggtttgctctaactatgagcactaa

SEQ ID NO: 3416822 - DNA, 25 bp, Homo sapien
ttcttccctgaaccgactggtatcg

SEQ ID NO: 3416823 - DNA, 25 bp, Homo sapien
cctgaaccgactggtatcgagtgca

SEQ ID NO: 3416824 - DNA, 25 bp, Homo sapien
ccgactggtatcgagtgcaagtgtg

SEQ ID NO: 3416825 - DNA, 25 bp, Homo sapien
atgggcgggcgcggaaggtgctgaa

SEQ ID NO: 3416826 - DNA, 25 bp, Homo sapien
catctactcgcctctgataccaagg

SEQ ID NO: 3416827 - DNA, 25 bp, Homo sapien
tatggtaatgaagtgagctttctct

SEQ ID NO: 3416828 - DNA, 25 bp, Homo sapien
aaccgtcggcagactgggccagtgt

SEQ ID NO: 3416829 - DNA, 25 bp, Homo sapien
tggccttcttctcgccaacagcctt

SEQ ID NO: 3416830 - DNA, 25 bp, Homo sapien
gagagatgatgacagctccagagct

SEQ ID NO: 3416831 - DNA, 25 bp, Homo sapien
gggctgacccgggtgccatgctggg

SEQ ID NO: 3416832 - DNA, 25 bp, Homo sapien
gctggggcacagtagttgtgggcaa

SEQ ID NO: 3416833 - DNA, 25 bp, Homo sapien
tgaagaggcataagagggagagatg

SEQ ID NO: 3416834 - DNA, 25 bp, Homo sapien
gtccaggggagcctggccacagtcc

SEQ ID NO: 3416835 - DNA, 25 bp, Homo sapien
tccaggggagcctggccacagtcca

SEQ ID NO: 3416836 - DNA, 25 bp, Homo sapien
gggtccaggggagcctggccacagt

SEQ ID NO: 3416837 - DNA, 25 bp, Homo sapien
agggtccaggggagcctggccacag

SEQ ID NO: 3416838 - DNA, 25 bp, Homo sapien
cggaagtgttcaggggcgtctagga

SEQ ID NO: 3416839 - DNA, 25 bp, Homo sapien
tgttcaggggcgtctaggagctcca

SEQ ID NO: 3416840 - DNA, 25 bp, Homo sapien
agtgttcaggggcgtctaggagctc

SEQ ID NO: 3416841 - DNA, 25 bp, Homo sapien
gaagtgttcaggggcgtctaggagc

SEQ ID NO: 3416842 - DNA, 25 bp, Homo sapien
gaaaggtctcagatcgggagctcag

SEQ ID NO: 3416843 - DNA, 25 bp, Homo sapien
cagaaaggtctcagatcgggagctc

SEQ ID NO: 3416844 - DNA, 25 bp, Homo sapien
gtctcagatcgggagctcagagagg

SEQ ID NO: 3416845 - DNA, 25 bp, Homo sapien
aaggtctcagatcgggagctcagag

SEQ ID NO: 3416846 - DNA, 25 bp, Homo sapien
ctgctgagtggcaaaaggtgggtag

SEQ ID NO: 3416847 - DNA, 25 bp, Homo sapien
taggaggcccggagaagtggctggg

SEQ ID NO: 3416848 - DNA, 25 bp, Homo sapien
gtaggaggcccggagaagtggctgg

SEQ ID NO: 3416849 - DNA, 25 bp, Homo sapien
ctgagtggcaaaaggtgggtaggag

SEQ ID NO: 3416850 - DNA, 25 bp, Homo sapien
tgctggagtcacagccgcttccact

SEQ ID NO: 3416851 - DNA, 25 bp, Homo sapien
acgtcccatgggactggccgttggt

SEQ ID NO: 3416852 - DNA, 25 bp, Homo sapien
ggctgccagaccctggtggccaatc

SEQ ID NO: 3416853 - DNA, 25 bp, Homo sapien
aagcggcaggcttggtgagcagtgc

SEQ ID NO: 3416854 - DNA, 25 bp, Homo sapien
agagtcacagcctcgtccagaggta

SEQ ID NO: 3416855 - DNA, 25 bp, Homo sapien
agggtcgttctcctcgccggagcca

SEQ ID NO: 3416856 - DNA, 25 bp, Homo sapien
gctgcaggctcaagcgtgtaggcca

SEQ ID NO: 3416857 - DNA, 25 bp, Homo sapien
gagaaccagtgcgagggaagctcca

SEQ ID NO: 3416858 - DNA, 25 bp, Homo sapien
tggagcccttgaagcggtccagctt

SEQ ID NO: 3416859 - DNA, 25 bp, Homo sapien
ggtccagcttggcagtccagagtgt

SEQ ID NO: 3416860 - DNA, 25 bp, Homo sapien
ggagcccttgaagcggtccagcttg

SEQ ID NO: 3416861 - DNA, 25 bp, Homo sapien
gagcccttgaagcggtccagcttgg

SEQ ID NO: 3416862 - DNA, 25 bp, Homo sapien
caaagtccacccataggaactcaga

SEQ ID NO: 3416863 - DNA, 25 bp, Homo sapien
cataggaactcagacagttcaaggg

SEQ ID NO: 3416864 - DNA, 25 bp, Homo sapien
tgggataagggctctgatgtcccgc

SEQ ID NO: 3416865 - DNA, 25 bp, Homo sapien
gctcagacaccaggatttcccacac

SEQ ID NO: 3416866 - DNA, 25 bp, Homo sapien
gccttcccaggcagagatggaggtc

SEQ ID NO: 3416867 - DNA, 25 bp, Homo sapien
ccagccttcccaggcagagatggag

SEQ ID NO: 3416868 - DNA, 25 bp, Homo sapien
aggcccctcagctcatggggctcct

SEQ ID NO: 3416869 - DNA, 25 bp, Homo sapien
ctgggacttggcctccagccttccc

SEQ ID NO: 3416870 - DNA, 25 bp, Homo sapien
cctgtgtgttggcagactcgcagcc

SEQ ID NO: 3416871 - DNA, 25 bp, Homo sapien
gggcactccagtcagtggtgctgta

SEQ ID NO: 3416872 - DNA, 25 bp, Homo sapien
gactcgcagccgacatgctctgtca

SEQ ID NO: 3416873 - DNA, 25 bp, Homo sapien
tccacagtgacaaggcgcacgggga

SEQ ID NO: 3416874 - DNA, 25 bp, Homo sapien
gtaggacgggctcccactgagttca

SEQ ID NO: 3416875 - DNA, 25 bp, Homo sapien
gtatgtgctctcgactctctcaggc

SEQ ID NO: 3416876 - DNA, 25 bp, Homo sapien
gaggttaagagaccagcccatgatc

SEQ ID NO: 3416877 - DNA, 25 bp, Homo sapien
gctgttagggttacttgactcggga

SEQ ID NO: 3416878 - DNA, 25 bp, Homo sapien
tccagccgcggacctgctcgagggt

SEQ ID NO: 3416879 - DNA, 25 bp, Homo sapien
tcggtgagctcgatacgcagcggta

SEQ ID NO: 3416880 - DNA, 25 bp, Homo sapien
tccttgccagccacgaacacggcat

SEQ ID NO: 3416881 - DNA, 25 bp, Homo sapien
acggtcagccgcagcgaggcgcgga

SEQ ID NO: 3416882 - DNA, 25 bp, Homo sapien
aagctagattccagaggcgtgggcc

SEQ ID NO: 3416883 - DNA, 25 bp, Homo sapien
aaagcgatcattggctgggcggccc

SEQ ID NO: 3416884 - DNA, 25 bp, Homo sapien
gatcaccgctcttgctcccaagtgg

SEQ ID NO: 3416885 - DNA, 25 bp, Homo sapien
gagggtacgaccagcatagacagac

SEQ ID NO: 3416886 - DNA, 25 bp, Homo sapien
aggtgggacacgtctagcagccagt

SEQ ID NO: 3416887 - DNA, 25 bp, Homo sapien
acaccggcccgctggtactgcaggt

SEQ ID NO: 3416888 - DNA, 25 bp, Homo sapien
tcatccgacgcctctgcagcgggtt

SEQ ID NO: 3416889 - DNA, 25 bp, Homo sapien
cctccagagaggctacacgcgagtc

SEQ ID NO: 3416890 - DNA, 25 bp, Homo sapien
ccaggatggagtcagacagtgggga

SEQ ID NO: 3416891 - DNA, 25 bp, Homo sapien
caggatggagtcagacagtggggaa

SEQ ID NO: 3416892 - DNA, 25 bp, Homo sapien
gatggagtcagacagtggggaacgc

SEQ ID NO: 3416893 - DNA, 25 bp, Homo sapien
cccccaggatggagtcagacagtgg

SEQ ID NO: 3416894 - DNA, 25 bp, Homo sapien
tcagctccagcactgagaccttgtc

SEQ ID NO: 3416895 - DNA, 25 bp, Homo sapien
agaccttgtcgtccgtcacagccag

SEQ ID NO: 3416896 - DNA, 25 bp, Homo sapien
aggtcagcgagatgcccatcactgg

SEQ ID NO: 3416897 - DNA, 25 bp, Homo sapien
cccggctcaaggtcagcgagatgcc

SEQ ID NO: 3416898 - DNA, 25 bp, Homo sapien
tgactgtgcccagcacgtagctgtg

SEQ ID NO: 3416899 - DNA, 25 bp, Homo sapien
ctttggggcgggaagggctgactgt

SEQ ID NO: 3416900 - DNA, 25 bp, Homo sapien
aagggctgactgtgcccagcacgta

SEQ ID NO: 3416901 - DNA, 25 bp, Homo sapien
gggcgggaagggctgactgtgccca

SEQ ID NO: 3416902 - DNA, 25 bp, Homo sapien
gagagctcactacctcacagagtca

SEQ ID NO: 3416903 - DNA, 25 bp, Homo sapien
gaggggacgcgtgtcaatcacctgt

SEQ ID NO: 3416904 - DNA, 25 bp, Homo sapien
caggcagatagacaaaacacaggga

SEQ ID NO: 3416905 - DNA, 25 bp, Homo sapien
gagggtcctcagttagagccatcta

SEQ ID NO: 3416906 - DNA, 25 bp, Homo sapien
cagctggcaggatggcaccaggctc

SEQ ID NO: 3416907 - DNA, 25 bp, Homo sapien
gaaggacagccatagggagagggcc

SEQ ID NO: 3416908 - DNA, 25 bp, Homo sapien
ccacagtgtgatcagagaaggacag

SEQ ID NO: 3416909 - DNA, 25 bp, Homo sapien
agtcccaggtcacggcggtcgtaga

SEQ ID NO: 3416910 - DNA, 25 bp, Homo sapien
ggcgggtgcagagccacatgcagcg

SEQ ID NO: 3416911 - DNA, 25 bp, Homo sapien
ctcgggcgggtgcagagccacatgc

SEQ ID NO: 3416912 - DNA, 25 bp, Homo sapien
agagccacatgcagcggcagcccct

SEQ ID NO: 3416913 - DNA, 25 bp, Homo sapien
ggtgcagagccacatgcagcggcag

SEQ ID NO: 3416914 - DNA, 25 bp, Homo sapien
gtgttgcccccgacactgcctgcca

SEQ ID NO: 3416915 - DNA, 25 bp, Homo sapien
ttgcccctcacacctgtgttgcccc

SEQ ID NO: 3416916 - DNA, 25 bp, Homo sapien
ctcctctgcccgctcaaacttgccc

SEQ ID NO: 3416917 - DNA, 25 bp, Homo sapien
tctgcccgctcaaacttgcccctca

SEQ ID NO: 3416918 - DNA, 25 bp, Homo sapien
gatgaagatggccacgcagaagact

SEQ ID NO: 3416919 - DNA, 25 bp, Homo sapien
gaagaccacaccattgaccaagaag

SEQ ID NO: 3416920 - DNA, 25 bp, Homo sapien
actgtcgggaggttctttgcgctga

SEQ ID NO: 3416921 - DNA, 25 bp, Homo sapien
cgctgatagcgcaggacgaagacca

SEQ ID NO: 3416922 - DNA, 25 bp, Homo sapien
gggcccctacaggctcctcaggtga

SEQ ID NO: 3416923 - DNA, 25 bp, Homo sapien
cacaaggatggactgcacagcaggg

SEQ ID NO: 3416924 - DNA, 25 bp, Homo sapien
tcctcgcctgccacaaggatggact

SEQ ID NO: 3416925 - DNA, 25 bp, Homo sapien
tagttgcgaagctcctcagggtcct

SEQ ID NO: 3416926 - DNA, 25 bp, Homo sapien
tccttctcggtttattctgttagaa

SEQ ID NO: 3416927 - DNA, 25 bp, Homo sapien
tagaatgaaatggttcccataaata

SEQ ID NO: 3416928 - DNA, 25 bp, Homo sapien
tcaacaagcaccagacgagtggcgg

SEQ ID NO: 3416929 - DNA, 25 bp, Homo sapien
atgagcccttcctcacgaccatggt

SEQ ID NO: 3416930 - DNA, 25 bp, Homo sapien
ccactggtcatcagtgttgtgactc

SEQ ID NO: 3416931 - DNA, 25 bp, Homo sapien
gttgtgactcgtgccctgggtgaca

SEQ ID NO: 3416932 - DNA, 25 bp, Homo sapien
tcagtgttgtgactcgtgccctggg

SEQ ID NO: 3416933 - DNA, 25 bp, Homo sapien
tggtcatcagtgttgtgactcgtgc

SEQ ID NO: 3416934 - DNA, 25 bp, Homo sapien
tgggctgctgttacaggggctggtg

SEQ ID NO: 3416935 - DNA, 25 bp, Homo sapien
ctgcctgtgctgggagcccacccat

SEQ ID NO: 3416936 - DNA, 25 bp, Homo sapien
aggaagctgggctgctgttacaggg

SEQ ID NO: 3416937 - DNA, 25 bp, Homo sapien
gaagctgggctgctgttacaggggc

SEQ ID NO: 3416938 - DNA, 25 bp, Homo sapien
tcaaacccaacctgtgagtgtctca

SEQ ID NO: 3416939 - DNA, 25 bp, Homo sapien
ccaacctgtgagtgtctcacgcctg

SEQ ID NO: 3416940 - DNA, 25 bp, Homo sapien
gtgtctcacgcctgcttgttctgct

SEQ ID NO: 3416941 - DNA, 25 bp, Homo sapien
gcgatcaaacccaacctgtgagtgt

SEQ ID NO: 3416942 - DNA, 25 bp, Homo sapien
tctctggctgctacgcgtggctgcc

SEQ ID NO: 3416943 - DNA, 25 bp, Homo sapien
gtctctggctgctacgcgtggctgc

SEQ ID NO: 3416944 - DNA, 25 bp, Homo sapien
gtggacacggccgttgtgcgcccct

SEQ ID NO: 3416945 - DNA, 25 bp, Homo sapien
ttgtgcgcccctggcgcaggtctgc

SEQ ID NO: 3416946 - DNA, 25 bp, Homo sapien
caatccagtgatcccgaagaagagc

SEQ ID NO: 3416947 - DNA, 25 bp, Homo sapien
tgccgtcagcaatccagtgatcccg

SEQ ID NO: 3416948 - DNA, 25 bp, Homo sapien
cagtgatcccgaagaagagccacat

SEQ ID NO: 3416949 - DNA, 25 bp, Homo sapien
gagagggctgccgtcagcaatccag

SEQ ID NO: 3416950 - DNA, 25 bp, Homo sapien
tcaggttctgctagcatttgggcct

SEQ ID NO: 3416951 - DNA, 25 bp, Homo sapien
caggttctgctagcatttgggcctg

SEQ ID NO: 3416952 - DNA, 25 bp, Homo sapien
aggttctgctagcatttgggcctgc

SEQ ID NO: 3416953 - DNA, 25 bp, Homo sapien
ccctgtgcttggcgctcattgaatc

SEQ ID NO: 3416954 - DNA, 25 bp, Homo sapien
gtccctgtgcttggcgctcattgaa

SEQ ID NO: 3416955 - DNA, 25 bp, Homo sapien
cctgtgcttggcgctcattgaatcc

SEQ ID NO: 3416956 - DNA, 25 bp, Homo sapien
tgtgcttggcgctcattgaatcctc

SEQ ID NO: 3416957 - DNA, 25 bp, Homo sapien
gttcagactaatgctttgtggccac

SEQ ID NO: 3416958 - DNA, 25 bp, Homo sapien
ggaggcaccagggatgttcagacta

SEQ ID NO: 3416959 - DNA, 25 bp, Homo sapien
ggccaccttgcgtccttaacagctg

SEQ ID NO: 3416960 - DNA, 25 bp, Homo sapien
tttgtggccaccttgcgtccttaac

SEQ ID NO: 3416961 - DNA, 25 bp, Homo sapien
gctgactcgaatgttgtctctctga

SEQ ID NO: 3416962 - DNA, 25 bp, Homo sapien
gccagatgttaagagctgactcgaa

SEQ ID NO: 3416963 - DNA, 25 bp, Homo sapien
tcacctcccgcagcatttcttgagc

SEQ ID NO: 3416964 - DNA, 25 bp, Homo sapien
atgctgcgctctgccgtggaaagta

SEQ ID NO: 3416965 - DNA, 25 bp, Homo sapien
cctttcttgtgaaccttatctgagc

SEQ ID NO: 3416966 - DNA, 25 bp, Homo sapien
tcactcctcgcctttcttgtgaacc

SEQ ID NO: 3416967 - DNA, 25 bp, Homo sapien
tcctcgcctttcttgtgaaccttat

SEQ ID NO: 3416968 - DNA, 25 bp, Homo sapien
tcaacttggctgcacccttccccgg

SEQ ID NO: 3416969 - DNA, 25 bp, Homo sapien
tgactctgacagctccttagccttc

SEQ ID NO: 3416970 - DNA, 25 bp, Homo sapien
atgactctgacagctccttagcctt

SEQ ID NO: 3416971 - DNA, 25 bp, Homo sapien
gactctgacagctccttagccttct

SEQ ID NO: 3416972 - DNA, 25 bp, Homo sapien
ggtgtctcttctcggcaatgtcagc

SEQ ID NO: 3416973 - DNA, 25 bp, Homo sapien
gcaggtcagggtgtctcttctcggc

SEQ ID NO: 3416974 - DNA, 25 bp, Homo sapien
ggaagaattgaagagctcatgtggc

SEQ ID NO: 3416975 - DNA, 25 bp, Homo sapien
tgtggccacgccagctaaagccata

SEQ ID NO: 3416976 - DNA, 25 bp, Homo sapien
catgtgtcacctgctagaagtatag

SEQ ID NO: 3416977 - DNA, 25 bp, Homo sapien
gagagcccgagtacaatctcccatt

SEQ ID NO: 3416978 - DNA, 25 bp, Homo sapien
tctgaaggttttccaggacccacag

SEQ ID NO: 3416979 - DNA, 25 bp, Homo sapien
ggagactaaagtccatgctttggaa

SEQ ID NO: 3416980 - DNA, 25 bp, Homo sapien
gtgctgaggaaaacacggttgcatc

SEQ ID NO: 3416981 - DNA, 25 bp, Homo sapien
tctgtcctccggcactgtcagaggt

SEQ ID NO: 3416982 - DNA, 25 bp, Homo sapien
cctgaatgctcgttgagtggatgat

SEQ ID NO: 3416983 - DNA, 25 bp, Homo sapien
gaaaacacggttgcatcctgaatgc

SEQ ID NO: 3416984 - DNA, 25 bp, Homo sapien
agattccacggacataccccctgag

SEQ ID NO: 3416985 - DNA, 25 bp, Homo sapien
tgagcagattccacggacatacccc

SEQ ID NO: 3416986 - DNA, 25 bp, Homo sapien
tccacggacataccccctgagcctg

SEQ ID NO: 3416987 - DNA, 25 bp, Homo sapien
ctgagcagattccacggacataccc

SEQ ID NO: 3416988 - DNA, 25 bp, Homo sapien
gcatggtgggtgagtgagctcaggc

SEQ ID NO: 3416989 - DNA, 25 bp, Homo sapien
ctgaaatgaaccagcagcagcatgg

SEQ ID NO: 3416990 - DNA, 25 bp, Homo sapien
agcagcatggtgggtgagtgagctc

SEQ ID NO: 3416991 - DNA, 25 bp, Homo sapien
cagcatggtgggtgagtgagctcag

SEQ ID NO: 3416992 - DNA, 25 bp, Homo sapien
tctctgcactgctggtgttgagctg

SEQ ID NO: 3416993 - DNA, 25 bp, Homo sapien
tgcactgctggtgttgagctggtca

SEQ ID NO: 3416994 - DNA, 25 bp, Homo sapien
tctgcactgctggtgttgagctggt

SEQ ID NO: 3416995 - DNA, 25 bp, Homo sapien
cactctctgcactgctggtgttgag

SEQ ID NO: 3416996 - DNA, 25 bp, Homo sapien
ttgtcagacggaccggaagccgctc

SEQ ID NO: 3416997 - DNA, 25 bp, Homo sapien
tcccaggacgcctcgagccgcacct

SEQ ID NO: 3416998 - DNA, 25 bp, Homo sapien
gctcccgtttgtcagacggaccgga

SEQ ID NO: 3416999 - DNA, 25 bp, Homo sapien
ctgctgctcccgtttgtcagacgga

SEQ ID NO: 3417000 - DNA, 25 bp, Homo sapien
agtgctcggcacacggcctcggcgg

SEQ ID NO: 3417001 - DNA, 25 bp, Homo sapien
cccagtgctcggcacacggcctcgg

SEQ ID NO: 3417002 - DNA, 25 bp, Homo sapien
cagcccagtgctcggcacacggcct

SEQ ID NO: 3417003 - DNA, 25 bp, Homo sapien
cgcagcccagtgctcggcacacggc

SEQ ID NO: 3417004 - DNA, 25 bp, Homo sapien
gggcggcagctcaggggtcggcggg

SEQ ID NO: 3417005 - DNA, 25 bp, Homo sapien
ggcggcagctcaggggtcggcgggg

SEQ ID NO: 3417006 - DNA, 25 bp, Homo sapien
gcggcagctcaggggtcggcggggc

SEQ ID NO: 3417007 - DNA, 25 bp, Homo sapien
ggggcggcagctcaggggtcggcgg

SEQ ID NO: 3417008 - DNA, 25 bp, Homo sapien
tcggcgccgctgcacaggagggcgg

SEQ ID NO: 3417009 - DNA, 25 bp, Homo sapien
gcctcccgtcgctgcggcacgcgtg

SEQ ID NO: 3417010 - DNA, 25 bp, Homo sapien
acgcgtgctccaccacctcgcagag

SEQ ID NO: 3417011 - DNA, 25 bp, Homo sapien
gccagagtggcattagctgctacgc

SEQ ID NO: 3417012 - DNA, 25 bp, Homo sapien
gagcagttcacctggtcccggtgga

SEQ ID NO: 3417013 - DNA, 25 bp, Homo sapien
cgcgtcctctttgtggccgcagtag

SEQ ID NO: 3417014 - DNA, 25 bp, Homo sapien
gcggccgggcgtgaagtgcaagccg

SEQ ID NO: 3417015 - DNA, 25 bp, Homo sapien
tccaggtcccaagtgtcatcgcaca

SEQ ID NO: 3417016 - DNA, 25 bp, Homo sapien
tgttgaaccgccaggagcagttgga

SEQ ID NO: 3417017 - DNA, 25 bp, Homo sapien
gagcaccttggcctccgatgggtac

SEQ ID NO: 3417018 - DNA, 25 bp, Homo sapien
catgagtagtacatcctgccggaca

SEQ ID NO: 3417019 - DNA, 25 bp, Homo sapien
cactgtcacacactgtgttccagac

SEQ ID NO: 3417020 - DNA, 25 bp, Homo sapien
tgcctgggcaccgtaaggacaacag

SEQ ID NO: 3417021 - DNA, 25 bp, Homo sapien
gatttggcgagatatggtggaaccc

SEQ ID NO: 3417022 - DNA, 25 bp, Homo sapien
tgaattagcactgtctgcctgggca

SEQ ID NO: 3417023 - DNA, 25 bp, Homo sapien
tcagggacacgtggctaaggaaact

SEQ ID NO: 3417024 - DNA, 25 bp, Homo sapien
gagtggacagattgtgcaaactccg

SEQ ID NO: 3417025 - DNA, 25 bp, Homo sapien
tcgggagtggacagattgtgcaaac

SEQ ID NO: 3417026 - DNA, 25 bp, Homo sapien
gacagattgtgcaaactccgggaag

SEQ ID NO: 3417027 - DNA, 25 bp, Homo sapien
cttcgggagtggacagattgtgcaa

SEQ ID NO: 3417028 - DNA, 25 bp, Homo sapien
ctatagtgactgtctgaacacttgc

SEQ ID NO: 3417029 - DNA, 25 bp, Homo sapien
gtgactgtctgaacacttgcaggga

SEQ ID NO: 3417030 - DNA, 25 bp, Homo sapien
tatagtgactgtctgaacacttgca

SEQ ID NO: 3417031 - DNA, 25 bp, Homo sapien
tagtgactgtctgaacacttgcagg

SEQ ID NO: 3417032 - DNA, 25 bp, Homo sapien
tataaagccctaggcccagtgtctg

SEQ ID NO: 3417033 - DNA, 25 bp, Homo sapien
aactattgagtacccgctgtgtgcc

SEQ ID NO: 3417034 - DNA, 25 bp, Homo sapien
agagaggttccgagttgcccaacag

SEQ ID NO: 3417035 - DNA, 25 bp, Homo sapien
tccagtatgatgaggcacccgctgt

SEQ ID NO: 3417036 - DNA, 25 bp, Homo sapien
aagaggatgaaggctatgaagatga

SEQ ID NO: 3417037 - DNA, 25 bp, Homo sapien
ggatgaggagcattagctcccgaga

SEQ ID NO: 3417038 - DNA, 25 bp, Homo sapien
ggagcattagctcccgagattcctt

SEQ ID NO: 3417039 - DNA, 25 bp, Homo sapien
aggaggagaattcccagaacgatgg

SEQ ID NO: 3417040 - DNA, 25 bp, Homo sapien
tcattgctggaccacgccactgctg

SEQ ID NO: 3417041 - DNA, 25 bp, Homo sapien
acagtctggttctccccgctggtgc

SEQ ID NO: 3417042 - DNA, 25 bp, Homo sapien
ggttccgttctgttctcatcgacac

SEQ ID NO: 3417043 - DNA, 25 bp, Homo sapien
ccgctggtgcgtccatgactgctgg

SEQ ID NO: 3417044 - DNA, 25 bp, Homo sapien
taggtgctggtggttcaccattacg

SEQ ID NO: 3417045 - DNA, 25 bp, Homo sapien
ggtgctggtggttcaccattacggg

SEQ ID NO: 3417046 - DNA, 25 bp, Homo sapien
tgctggtggttcaccattacgggga

SEQ ID NO: 3417047 - DNA, 25 bp, Homo sapien
gtaggtgctggtggttcaccattac

SEQ ID NO: 3417048 - DNA, 25 bp, Homo sapien
tggtgatggggaccggttgatagct

SEQ ID NO: 3417049 - DNA, 25 bp, Homo sapien
ggggaccggttgatagctattgctc

SEQ ID NO: 3417050 - DNA, 25 bp, Homo sapien
tgatggggaccggttgatagctatt

SEQ ID NO: 3417051 - DNA, 25 bp, Homo sapien
gatggtgatggggaccggttgatag

SEQ ID NO: 3417052 - DNA, 25 bp, Homo sapien
gatgatatcacaagcctactagcca

SEQ ID NO: 3417053 - DNA, 25 bp, Homo sapien
cagctgtgtgtacgtcttggaccta

SEQ ID NO: 3417054 - DNA, 25 bp, Homo sapien
ccagggacgacttgagcctgctcaa

SEQ ID NO: 3417055 - DNA, 25 bp, Homo sapien
tagccaactagcagagcaaagcaga

SEQ ID NO: 3417056 - DNA, 25 bp, Homo sapien
agtcatagtgctcatagtctgagtc

SEQ ID NO: 3417057 - DNA, 25 bp, Homo sapien
aggctgggcgctgaagtcatagtgc

SEQ ID NO: 3417058 - DNA, 25 bp, Homo sapien
aagtcatagtgctcatagtctgagt

SEQ ID NO: 3417059 - DNA, 25 bp, Homo sapien
gctgggcgctgaagtcatagtgctc

SEQ ID NO: 3417060 - DNA, 25 bp, Homo sapien
cacaataaggtgtgggacgctctgg

SEQ ID NO: 3417061 - DNA, 25 bp, Homo sapien
cattctggaccatgtagatgaaggc

SEQ ID NO: 3417062 - DNA, 25 bp, Homo sapien
gatatggcatgcgagaacccctgcc

SEQ ID NO: 3417063 - DNA, 25 bp, Homo sapien
tatgaggcacaagctggcaagagcg

SEQ ID NO: 3417064 - DNA, 25 bp, Homo sapien
gagccttcgccttaatctagcctgg

SEQ ID NO: 3417065 - DNA, 25 bp, Homo sapien
tcagctcttttgaaccgggtaccac

SEQ ID NO: 3417066 - DNA, 25 bp, Homo sapien
tcctagagtgaaacccagatggtct

SEQ ID NO: 3417067 - DNA, 25 bp, Homo sapien
gaatcactgcatcacaggctctgtg

SEQ ID NO: 3417068 - DNA, 25 bp, Homo sapien
tcctcatctgtgacccgatgccgct

SEQ ID NO: 3417069 - DNA, 25 bp, Homo sapien
caagggtggcatctggaacctgctt

SEQ ID NO: 3417070 - DNA, 25 bp, Homo sapien
tctgtgacccgatgccgctgggaat

SEQ ID NO: 3417071 - DNA, 25 bp, Homo sapien
ggtggcatctggaacctgctttgct

SEQ ID NO: 3417072 - DNA, 25 bp, Homo sapien
gactcattgagggaggttcctgctg

SEQ ID NO: 3417073 - DNA, 25 bp, Homo sapien
agaaagcacttactgcctataggat

SEQ ID NO: 3417074 - DNA, 25 bp, Homo sapien
ggtgacgaaagaagcagtgcagcaa

SEQ ID NO: 3417075 - DNA, 25 bp, Homo sapien
cctataggatttgtgaaagtcagga

SEQ ID NO: 3417076 - DNA, 25 bp, Homo sapien
cctgaagaggtgctcgactcactgt

SEQ ID NO: 3417077 - DNA, 25 bp, Homo sapien
ctgtaatgcagtgtccagggttggc

SEQ ID NO: 3417078 - DNA, 25 bp, Homo sapien
gactcactgttgctcctcgggtgat

SEQ ID NO: 3417079 - DNA, 25 bp, Homo sapien
tattgcagtaatcctcccctgaaga

SEQ ID NO: 3417080 - DNA, 25 bp, Homo sapien
tctggtaccactccccggatgaggt

SEQ ID NO: 3417081 - DNA, 25 bp, Homo sapien
ttctggtaccactccccggatgagg

SEQ ID NO: 3417082 - DNA, 25 bp, Homo sapien
tggtaccactccccggatgaggtgc

SEQ ID NO: 3417083 - DNA, 25 bp, Homo sapien
taccactccccggatgaggtgctgg

SEQ ID NO: 3417084 - DNA, 25 bp, Homo sapien
tgctcctccgaagggggctggggtg

SEQ ID NO: 3417085 - DNA, 25 bp, Homo sapien
gacagggagctcacttcttatcaaa

SEQ ID NO: 3417086 - DNA, 25 bp, Homo sapien
ggaatagcctcgtctgtctggttca

SEQ ID NO: 3417087 - DNA, 25 bp, Homo sapien
gacgattgaatgttggaagcccctc

SEQ ID NO: 3417088 - DNA, 25 bp, Homo sapien
tataggcacgtgctacccttggcta

SEQ ID NO: 3417089 - DNA, 25 bp, Homo sapien
tcgttgtcggtggagtcaggctgag

SEQ ID NO: 3417090 - DNA, 25 bp, Homo sapien
tgtcatcgtagtcatcgttgtcggt

SEQ ID NO: 3417091 - DNA, 25 bp, Homo sapien
ggctgcgctgatgtcatcgtagtca

SEQ ID NO: 3417092 - DNA, 25 bp, Homo sapien
gctgatgtcatcgtagtcatcgttg

SEQ ID NO: 3417093 - DNA, 25 bp, Homo sapien
aacaaagcctggtctgagcccatgg

SEQ ID NO: 3417094 - DNA, 25 bp, Homo sapien
taatctcaggatactcagagcagga

SEQ ID NO: 3417095 - DNA, 25 bp, Homo sapien
tgttcatccccgagacagagggctc

SEQ ID NO: 3417096 - DNA, 25 bp, Homo sapien
tcatcaattcaaggagacacatggg

SEQ ID NO: 3417097 - DNA, 25 bp, Homo sapien
cagcctcggagcctgagagccacat

SEQ ID NO: 3417098 - DNA, 25 bp, Homo sapien
ctgggagcagcctcggagcctgaga

SEQ ID NO: 3417099 - DNA, 25 bp, Homo sapien
agcctcggagcctgagagccacatc

SEQ ID NO: 3417100 - DNA, 25 bp, Homo sapien
tccctgggagcagcctcggagcctg

SEQ ID NO: 3417101 - DNA, 25 bp, Homo sapien
tgcccacgctgttgagcttctgagg

SEQ ID NO: 3417102 - DNA, 25 bp, Homo sapien
actgcccacgctgttgagcttctga

SEQ ID NO: 3417103 - DNA, 25 bp, Homo sapien
ccacgctgttgagcttctgagggca

SEQ ID NO: 3417104 - DNA, 25 bp, Homo sapien
gactgcccacgctgttgagcttctg

SEQ ID NO: 3417105 - DNA, 25 bp, Homo sapien
cagagaagcgagctcttccatccca

SEQ ID NO: 3417106 - DNA, 25 bp, Homo sapien
tgctggccctgaatcacccctctgg

SEQ ID NO: 3417107 - DNA, 25 bp, Homo sapien
ccaggaactttgggatccagagaag

SEQ ID NO: 3417108 - DNA, 25 bp, Homo sapien
tcacccctctggattcctgggactc

SEQ ID NO: 3417109 - DNA, 25 bp, Homo sapien
ggtgcgtggaacaggcctcacgact

SEQ ID NO: 3417110 - DNA, 25 bp, Homo sapien
cctccagcgagaggatcataggtgg

SEQ ID NO: 3417111 - DNA, 25 bp, Homo sapien
ctcacgactgttgctctttccctgg

SEQ ID NO: 3417112 - DNA, 25 bp, Homo sapien
ctgcctccagcgagaggatcatagg

SEQ ID NO: 3417113 - DNA, 25 bp, Homo sapien
gctcttagggtctgcccacacgaac

SEQ ID NO: 3417114 - DNA, 25 bp, Homo sapien
tgctggccacgtgtcaggccacgca

SEQ ID NO: 3417115 - DNA, 25 bp, Homo sapien
cacgcagtgtttatagccctcaggg

SEQ ID NO: 3417116 - DNA, 25 bp, Homo sapien
cacacgaactgatcggtgctgtcag

SEQ ID NO: 3417117 - DNA, 25 bp, Homo sapien
cacctgcacttgggcttcggcataa

SEQ ID NO: 3417118 - DNA, 25 bp, Homo sapien
cctgcacttgggcttcggcataaat

SEQ ID NO: 3417119 - DNA, 25 bp, Homo sapien
acctgcacttgggcttcggcataaa

SEQ ID NO: 3417120 - DNA, 25 bp, Homo sapien
taagaattaagatcagcaagagctg

SEQ ID NO: 3417121 - DNA, 25 bp, Homo sapien
atcataagagaactgaacgagtggg

SEQ ID NO: 3417122 - DNA, 25 bp, Homo sapien
gcctactccggcacgttttgggatg

SEQ ID NO: 3417123 - DNA, 25 bp, Homo sapien
gcgaaactgaattgaggtgcctgtc

SEQ ID NO: 3417124 - DNA, 25 bp, Homo sapien
tatggtccccatacagtagcgatcc

SEQ ID NO: 3417125 - DNA, 25 bp, Homo sapien
ccaagtggggtttgtggctcagcac

SEQ ID NO: 3417126 - DNA, 25 bp, Homo sapien
gggccttacagtgatgttatggtcc

SEQ ID NO: 3417127 - DNA, 25 bp, Homo sapien
tccggaagatctgtgccctgactaa

SEQ ID NO: 3417128 - DNA, 25 bp, Homo sapien
tcttctggaggcacaacaaggtggg

SEQ ID NO: 3417129 - DNA, 25 bp, Homo sapien
gatgttattgttaccacccaggcca

SEQ ID NO: 3417130 - DNA, 25 bp, Homo sapien
gcataatatctatccctcctcacag

SEQ ID NO: 3417131 - DNA, 25 bp, Homo sapien
ggtctggaagcctgataccacttga

SEQ ID NO: 3417132 - DNA, 25 bp, Homo sapien
cccagaactaagcacgtgaatggca

SEQ ID NO: 3417133 - DNA, 25 bp, Homo sapien
tcagcaggtctgtaactgctgcttc

SEQ ID NO: 3417134 - DNA, 25 bp, Homo sapien
tgaatggcacacgtgaaatagaaac

SEQ ID NO: 3417135 - DNA, 25 bp, Homo sapien
tgcttctctgcagcgtcccagaact

SEQ ID NO: 3417136 - DNA, 25 bp, Homo sapien
cactgaggctggtctacgcaggcca

SEQ ID NO: 3417137 - DNA, 25 bp, Homo sapien
gaaacgggtgcctccgacaggcact

SEQ ID NO: 3417138 - DNA, 25 bp, Homo sapien
gcatgcgaacatgaggcccttggtg

SEQ ID NO: 3417139 - DNA, 25 bp, Homo sapien
cagggtgctttcaatagaaaacgga

SEQ ID NO: 3417140 - DNA, 25 bp, Homo sapien
ccggccctcgtctttgatggtgaaa

SEQ ID NO: 3417141 - DNA, 25 bp, Homo sapien
tgtatcgaaatgaatccatcaaggc

SEQ ID NO: 3417142 - DNA, 25 bp, Homo sapien
catgttgccgattgggccacatccc

SEQ ID NO: 3417143 - DNA, 25 bp, Homo sapien
aatgtgaaatcaggaagcggcgagc

SEQ ID NO: 3417144 - DNA, 25 bp, Homo sapien
ggaaagggatggagacattcctgta

SEQ ID NO: 3417145 - DNA, 25 bp, Homo sapien
gatggagacattcctgtatcgtgta

SEQ ID NO: 3417146 - DNA, 25 bp, Homo sapien
gacattcctgtatcgtgtaacctga

SEQ ID NO: 3417147 - DNA, 25 bp, Homo sapien
tcctgtatcgtgtaacctgaagtca

SEQ ID NO: 3417148 - DNA, 25 bp, Homo sapien
cgtcatttgatcaagcatatgtaag

SEQ ID NO: 3417149 - DNA, 25 bp, Homo sapien
tggctgaagcttttcgtcatttgat

SEQ ID NO: 3417150 - DNA, 25 bp, Homo sapien
tgatcaagcatatgtaaggttagct

SEQ ID NO: 3417151 - DNA, 25 bp, Homo sapien
tgaagcttttcgtcatttgatcaag

SEQ ID NO: 3417152 - DNA, 25 bp, Homo sapien
tcttcttgttgctggtggactcatt

SEQ ID NO: 3417153 - DNA, 25 bp, Homo sapien
atcacgattggcttgcagtgctggc

SEQ ID NO: 3417154 - DNA, 25 bp, Homo sapien
ttttcccctgttgcaagagcctcac

SEQ ID NO: 3417155 - DNA, 25 bp, Homo sapien
atccagcaccgtcgttgtcatcacg

SEQ ID NO: 3417156 - DNA, 25 bp, Homo sapien
catttctttccaaagtagtaacata

SEQ ID NO: 3417157 - DNA, 25 bp, Homo sapien
atttctttccaaagtagtaacatag

SEQ ID NO: 3417158 - DNA, 25 bp, Homo sapien
tctttccaaagtagtaacataggtc

SEQ ID NO: 3417159 - DNA, 25 bp, Homo sapien
tttccaaagtagtaacataggtcat

SEQ ID NO: 3417160 - DNA, 25 bp, Homo sapien
gcttcggatcccggattggattctg

SEQ ID NO: 3417161 - DNA, 25 bp, Homo sapien
cgccaaaactccccgtggtgcaccg

SEQ ID NO: 3417162 - DNA, 25 bp, Homo sapien
ttatcgccaaaactccccgtggtgc

SEQ ID NO: 3417163 - DNA, 25 bp, Homo sapien
atcgccaaaactccccgtggtgcac

SEQ ID NO: 3417164 - DNA, 25 bp, Homo sapien
tatcgccaaaactccccgtggtgca

SEQ ID NO: 3417165 - DNA, 25 bp, Homo sapien
caagtctgcaattcgcacagccacg

SEQ ID NO: 3417166 - DNA, 25 bp, Homo sapien
aagtctgcaattcgcacagccacgc

SEQ ID NO: 3417167 - DNA, 25 bp, Homo sapien
ccaccaagtctgcaattcgcacagc

SEQ ID NO: 3417168 - DNA, 25 bp, Homo sapien
accaagtctgcaattcgcacagcca

SEQ ID NO: 3417169 - DNA, 25 bp, Homo sapien
tccttatggccgtggtcctttttga

SEQ ID NO: 3417170 - DNA, 25 bp, Homo sapien
cttatggccgtggtcctttttgatg

SEQ ID NO: 3417171 - DNA, 25 bp, Homo sapien
atggccgtggtcctttttgatgtta

SEQ ID NO: 3417172 - DNA, 25 bp, Homo sapien
tatggccgtggtcctttttgatgtt

SEQ ID NO: 3417173 - DNA, 25 bp, Homo sapien
tgaggtttatctgaccagtgtgcag

SEQ ID NO: 3417174 - DNA, 25 bp, Homo sapien
tctctgtgcccctgtgaggtttatc

SEQ ID NO: 3417175 - DNA, 25 bp, Homo sapien
tgtgcccctgtgaggtttatctgac

SEQ ID NO: 3417176 - DNA, 25 bp, Homo sapien
gcccctgtgaggtttatctgaccag

SEQ ID NO: 3417177 - DNA, 25 bp, Homo sapien
gtgtgccctcttcactggggcaaag

SEQ ID NO: 3417178 - DNA, 25 bp, Homo sapien
gactcggtgactcctcagtgccccc

SEQ ID NO: 3417179 - DNA, 25 bp, Homo sapien
ccaggtgtgccctcttcactggggc

SEQ ID NO: 3417180 - DNA, 25 bp, Homo sapien
ctcggtgactcctcagtgcccccag

SEQ ID NO: 3417181 - DNA, 25 bp, Homo sapien
gtgagggtgtctggccgggtatctc

SEQ ID NO: 3417182 - DNA, 25 bp, Homo sapien
tgggcaccgcaggtgagggtgtctg

SEQ ID NO: 3417183 - DNA, 25 bp, Homo sapien
gtgtctggccgggtatctcgctctc

SEQ ID NO: 3417184 - DNA, 25 bp, Homo sapien
ccgggtatctcgctctcagagaggg

SEQ ID NO: 3417185 - DNA, 25 bp, Homo sapien
ggccagcggttgcagagaccccatg

SEQ ID NO: 3417186 - DNA, 25 bp, Homo sapien
cagcaggtacaaggtggccagcggt

SEQ ID NO: 3417187 - DNA, 25 bp, Homo sapien
tacaaggtggccagcggttgcagag

SEQ ID NO: 3417188 - DNA, 25 bp, Homo sapien
gtggccagcggttgcagagacccca

SEQ ID NO: 3417189 - DNA, 25 bp, Homo sapien
caggacacgggttcccatactcagc

SEQ ID NO: 3417190 - DNA, 25 bp, Homo sapien
cctagagcaggacacgggttcccat

SEQ ID NO: 3417191 - DNA, 25 bp, Homo sapien
tgatgggattcagttgggagggccc

SEQ ID NO: 3417192 - DNA, 25 bp, Homo sapien
gggagccgccctatctcaatgaagt

SEQ ID NO: 3417193 - DNA, 25 bp, Homo sapien
tgatgctggtcacggtgatagtggt

SEQ ID NO: 3417194 - DNA, 25 bp, Homo sapien
gccttgaaaggtacatgatggtgat

SEQ ID NO: 3417195 - DNA, 25 bp, Homo sapien
tctgtcccccggagaggagtattag

SEQ ID NO: 3417196 - DNA, 25 bp, Homo sapien
caccatgaaagtcaggccttgaaag

SEQ ID NO: 3417197 - DNA, 25 bp, Homo sapien
ctgagccgtccgaggcaggaagcga

SEQ ID NO: 3417198 - DNA, 25 bp, Homo sapien
gctgagccgtccgaggcaggaagcg

SEQ ID NO: 3417199 - DNA, 25 bp, Homo sapien
agctgagccgtccgaggcaggaagc

SEQ ID NO: 3417200 - DNA, 25 bp, Homo sapien
cagctgagccgtccgaggcaggaag

SEQ ID NO: 3417201 - DNA, 25 bp, Homo sapien
cctttctccatgtggctcttcctta

SEQ ID NO: 3417202 - DNA, 25 bp, Homo sapien
ctttctccatgtggctcttccttac

SEQ ID NO: 3417203 - DNA, 25 bp, Homo sapien
gctggccctggcacttcgagttgga

SEQ ID NO: 3417204 - DNA, 25 bp, Homo sapien
cgctggcagacttttgacgcttgac

SEQ ID NO: 3417205 - DNA, 25 bp, Homo sapien
gtccttgaggtagacctccagctgg

SEQ ID NO: 3417206 - DNA, 25 bp, Homo sapien
aaaccatgtgccatccgtccttgag

SEQ ID NO: 3417207 - DNA, 25 bp, Homo sapien
tggagaaggagcccagttgtccgta

SEQ ID NO: 3417208 - DNA, 25 bp, Homo sapien
agagtgacacatgtcatttctgctg

SEQ ID NO: 3417209 - DNA, 25 bp, Homo sapien
gttgtccgtagcagatgattgagct

SEQ ID NO: 3417210 - DNA, 25 bp, Homo sapien
agagagtgacacatgtcatttctgc

SEQ ID NO: 3417211 - DNA, 25 bp, Homo sapien
cttgtcgttggaggtgttgtcttct

SEQ ID NO: 3417212 - DNA, 25 bp, Homo sapien
ccttgtcgttggaggtgttgtcttc

SEQ ID NO: 3417213 - DNA, 25 bp, Homo sapien
gccttgtcgttggaggtgttgtctt

SEQ ID NO: 3417214 - DNA, 25 bp, Homo sapien
gggccttgtcgttggaggtgttgtc

SEQ ID NO: 3417215 - DNA, 25 bp, Homo sapien
ccaggctgccgctgtagaactccac

SEQ ID NO: 3417216 - DNA, 25 bp, Homo sapien
caggtcctgggtcttgtcctgggcc

SEQ ID NO: 3417217 - DNA, 25 bp, Homo sapien
gaggttgttgcagaggaagttctcc

SEQ ID NO: 3417218 - DNA, 25 bp, Homo sapien
tgggcctcatagctgatggtacccc

SEQ ID NO: 3417219 - DNA, 25 bp, Homo sapien
cttccattggattggcaagggctgg

SEQ ID NO: 3417220 - DNA, 25 bp, Homo sapien
tgcctcagtctctggcagatgcttc

SEQ ID NO: 3417221 - DNA, 25 bp, Homo sapien
gtacagcttgagttctggatcttcc

SEQ ID NO: 3417222 - DNA, 25 bp, Homo sapien
gagggcaagaactcggccacttttc

SEQ ID NO: 3417223 - DNA, 25 bp, Homo sapien
gaaacatcttgtcattatcccgctg

SEQ ID NO: 3417224 - DNA, 25 bp, Homo sapien
ggaaacatcttgtcattatcccgct

SEQ ID NO: 3417225 - DNA, 25 bp, Homo sapien
aacatcttgtcattatcccgctgca

SEQ ID NO: 3417226 - DNA, 25 bp, Homo sapien
ttggaaacatcttgtcattatcccg

SEQ ID NO: 3417227 - DNA, 25 bp, Homo sapien
gacacagcagcataggcgctttctg

SEQ ID NO: 3417228 - DNA, 25 bp, Homo sapien
agacacagcagcataggcgctttct

SEQ ID NO: 3417229 - DNA, 25 bp, Homo sapien
gagacacagcagcataggcgctttc

SEQ ID NO: 3417230 - DNA, 25 bp, Homo sapien
tggcgcacctccacggtgccttcac

SEQ ID NO: 3417231 - DNA, 25 bp, Homo sapien
ctgaagagctgtcacacagggctgc

SEQ ID NO: 3417232 - DNA, 25 bp, Homo sapien
acggctctgcaccttgggctggaaa

SEQ ID NO: 3417233 - DNA, 25 bp, Homo sapien
ggtgccttcacagatgctgctgccc

SEQ ID NO: 3417234 - DNA, 25 bp, Homo sapien
caccttcttgcagtaggaatttctc

SEQ ID NO: 3417235 - DNA, 25 bp, Homo sapien
accagcgtccagcactcgataggag

SEQ ID NO: 3417236 - DNA, 25 bp, Homo sapien
cccaaagttcgtggcactgggacag

SEQ ID NO: 3417237 - DNA, 25 bp, Homo sapien
tcgataggagttgacgctgccacac

SEQ ID NO: 3417238 - DNA, 25 bp, Homo sapien
tgagaaattcaccagcatgcacgga

SEQ ID NO: 3417239 - DNA, 25 bp, Homo sapien
catttgccagttattagtgatcacc

SEQ ID NO: 3417240 - DNA, 25 bp, Homo sapien
gatctatttggctatccctccatct

SEQ ID NO: 3417241 - DNA, 25 bp, Homo sapien
gaagagttaggtcagtcccagtcct

SEQ ID NO: 3417242 - DNA, 25 bp, Homo sapien
ggccaggatgatgcttgccaccgtg

SEQ ID NO: 3417243 - DNA, 25 bp, Homo sapien
tcttcactagcttcttgtaggcaag

SEQ ID NO: 3417244 - DNA, 25 bp, Homo sapien
ccaggatgatgcttgccaccgtgcc

SEQ ID NO: 3417245 - DNA, 25 bp, Homo sapien
agggggccgcacacgaccagcagca

SEQ ID NO: 3417246 - DNA, 25 bp, Homo sapien
ctgggctccagagatggacaaatca

SEQ ID NO: 3417247 - DNA, 25 bp, Homo sapien
ttctctctgacctggagtgggtctc

SEQ ID NO: 3417248 - DNA, 25 bp, Homo sapien
tcctccggaggactctagtgcagcc

SEQ ID NO: 3417249 - DNA, 25 bp, Homo sapien
gtctctgcacgtgggaacggagcca

SEQ ID NO: 3417250 - DNA, 25 bp, Homo sapien
gttgggccaatccactggcgctgct

SEQ ID NO: 3417251 - DNA, 25 bp, Homo sapien
tggttcattcccgttgggccaatcc

SEQ ID NO: 3417252 - DNA, 25 bp, Homo sapien
ttcccgttgggccaatccactggcg

SEQ ID NO: 3417253 - DNA, 25 bp, Homo sapien
ggccaatccactggcgctgcttctt

SEQ ID NO: 3417254 - DNA, 25 bp, Homo sapien
tgccgtgtggttgcgatggaaagac

SEQ ID NO: 3417255 - DNA, 25 bp, Homo sapien
ttcgttatccacgtgggaggctgtg

SEQ ID NO: 3417256 - DNA, 25 bp, Homo sapien
ttctcagcatgggatcggacggttg

SEQ ID NO: 3417257 - DNA, 25 bp, Homo sapien
tggctgtattcgttatccacgtggg

SEQ ID NO: 3417258 - DNA, 25 bp, Homo sapien
ctgcctgcgtgcctgggagcacccg

SEQ ID NO: 3417259 - DNA, 25 bp, Homo sapien
gcctgcgtgcctgggagcacccgct

SEQ ID NO: 3417260 - DNA, 25 bp, Homo sapien
tgcctgggagcacccgctggtgctt

SEQ ID NO: 3417261 - DNA, 25 bp, Homo sapien
tgcgtgcctgggagcacccgctggt

SEQ ID NO: 3417262 - DNA, 25 bp, Homo sapien
cctctgagccccatgcagatcatag

SEQ ID NO: 3417263 - DNA, 25 bp, Homo sapien
tcactgtcggaggagttgtcaggct

SEQ ID NO: 3417264 - DNA, 25 bp, Homo sapien
tggaggagcgatgcagagccccttc

SEQ ID NO: 3417265 - DNA, 25 bp, Homo sapien
catagtcactgtcggaggagttgtc

SEQ ID NO: 3417266 - DNA, 25 bp, Homo sapien
aacgtgttagaggaagacaccgcag

SEQ ID NO: 3417267 - DNA, 25 bp, Homo sapien
ggtgagaaggaaacgtgttagagga

SEQ ID NO: 3417268 - DNA, 25 bp, Homo sapien
gaaggaaacgtgttagaggaagaca

SEQ ID NO: 3417269 - DNA, 25 bp, Homo sapien
gaaacgtgttagaggaagacaccgc

SEQ ID NO: 3417270 - DNA, 25 bp, Homo sapien
catcaaatggcgtggagaaaggacc

SEQ ID NO: 3417271 - DNA, 25 bp, Homo sapien
taggtgtacgtccaagatctccaag

SEQ ID NO: 3417272 - DNA, 25 bp, Homo sapien
gaaagccgatttcactgagacgccg

SEQ ID NO: 3417273 - DNA, 25 bp, Homo sapien
tgaactgtgatggactgaaactacc

SEQ ID NO: 3417274 - DNA, 25 bp, Homo sapien
taattggcgtgcttgcgtgggctcc

SEQ ID NO: 3417275 - DNA, 25 bp, Homo sapien
gttgagtcccaaaacgaacatctgg

SEQ ID NO: 3417276 - DNA, 25 bp, Homo sapien
gactcctggcccgttagaagcttga

SEQ ID NO: 3417277 - DNA, 25 bp, Homo sapien
gaagcttgacatcgtggcaggcact

SEQ ID NO: 3417278 - DNA, 25 bp, Homo sapien
gctccagcggtacctcagttctctt

SEQ ID NO: 3417279 - DNA, 25 bp, Homo sapien
ttcccttcgctccagcggtacctca

SEQ ID NO: 3417280 - DNA, 25 bp, Homo sapien
ctctttattggctccaggagtccca

SEQ ID NO: 3417281 - DNA, 25 bp, Homo sapien
gctgcctaaggccttttccaccctc

SEQ ID NO: 3417282 - DNA, 25 bp, Homo sapien
gggaatgtcagtcttcagctccaga

SEQ ID NO: 3417283 - DNA, 25 bp, Homo sapien
cctcagccgatgaggcgatttccca

SEQ ID NO: 3417284 - DNA, 25 bp, Homo sapien
tcctcctcagccgatgaggcgattt

SEQ ID NO: 3417285 - DNA, 25 bp, Homo sapien
atttcctcctcagccgatgaggcga

SEQ ID NO: 3417286 - DNA, 25 bp, Homo sapien
ccattatatgcctggttcctcttca

SEQ ID NO: 3417287 - DNA, 25 bp, Homo sapien
ccctctgggcgcaaagggcactgat

SEQ ID NO: 3417288 - DNA, 25 bp, Homo sapien
cctctgggcgcaaagggcactgatg

SEQ ID NO: 3417289 - DNA, 25 bp, Homo sapien
cgttgcaagggggtcacatccggta

SEQ ID NO: 3417290 - DNA, 25 bp, Homo sapien
atgtcgtggtaactcagaggcgcgc

SEQ ID NO: 3417291 - DNA, 25 bp, Homo sapien
tggcacgatgtcgtggtaactcaga

SEQ ID NO: 3417292 - DNA, 25 bp, Homo sapien
cgcggctgcggtttaacccgcggtg

SEQ ID NO: 3417293 - DNA, 25 bp, Homo sapien
tcatggtgtgtaacttgtggcctcg

SEQ ID NO: 3417294 - DNA, 25 bp, Homo sapien
ttgacgatggtgtgttcaggtgtgg

SEQ ID NO: 3417295 - DNA, 25 bp, Homo sapien
tgtgtaacttgtggcctcgatggcc

SEQ ID NO: 3417296 - DNA, 25 bp, Homo sapien
gatggcctggttgacgatggtgtgt

SEQ ID NO: 3417297 - DNA, 25 bp, Homo sapien
gctgtaattcccctgataggatcca

SEQ ID NO: 3417298 - DNA, 25 bp, Homo sapien
gatgagcacccgctgtaattcccct

SEQ ID NO: 3417299 - DNA, 25 bp, Homo sapien
cacttgatgagcacccgctgtaatt

SEQ ID NO: 3417300 - DNA, 25 bp, Homo sapien
agcacccgctgtaattcccctgata

SEQ ID NO: 3417301 - DNA, 25 bp, Homo sapien
taagagagccgggaatctcaaccac

SEQ ID NO: 3417302 - DNA, 25 bp, Homo sapien
tctatggtccaagctctcaagggag

SEQ ID NO: 3417303 - DNA, 25 bp, Homo sapien
cagaaattcggtactgggcagagca

SEQ ID NO: 3417304 - DNA, 25 bp, Homo sapien
ggttctgacacctgctttgggcaaa

SEQ ID NO: 3417305 - DNA, 25 bp, Homo sapien
cttatatacaagttgggtcccgcct

SEQ ID NO: 3417306 - DNA, 25 bp, Homo sapien
tgtacatgatgcactcagagagtgc

SEQ ID NO: 3417307 - DNA, 25 bp, Homo sapien
ggttcccctgatcccaaacagagaa

SEQ ID NO: 3417308 - DNA, 25 bp, Homo sapien
ccaactcgagggagaaggcaagacg

SEQ ID NO: 3417309 - DNA, 25 bp, Homo sapien
gagacagctgaatagagagggagaa

SEQ ID NO: 3417310 - DNA, 25 bp, Homo sapien
cacttctgccccataatgcaaagaa

SEQ ID NO: 3417311 - DNA, 25 bp, Homo sapien
caggctgggcccgagttttaaccat

SEQ ID NO: 3417312 - DNA, 25 bp, Homo sapien
taaccagctgatctaagagaggaag

SEQ ID NO: 3417313 - DNA, 25 bp, Homo sapien
ttcatctaccagggtgggagccttc

SEQ ID NO: 3417314 - DNA, 25 bp, Homo sapien
tcatctaccagggtgggagccttcc

SEQ ID NO: 3417315 - DNA, 25 bp, Homo sapien
gttcatctaccagggtgggagcctt

SEQ ID NO: 3417316 - DNA, 25 bp, Homo sapien
gatgccgatagtgccgaagtactcc

SEQ ID NO: 3417317 - DNA, 25 bp, Homo sapien
caaagacgacggtgaaatcctgggc

SEQ ID NO: 3417318 - DNA, 25 bp, Homo sapien
ctgggcaggagttccgatgccgata

SEQ ID NO: 3417319 - DNA, 25 bp, Homo sapien
tggagcagtagactgagggcaccca

SEQ ID NO: 3417320 - DNA, 25 bp, Homo sapien
tgccgtaggtgatggagactgtctc

SEQ ID NO: 3417321 - DNA, 25 bp, Homo sapien
catgctgccggtgccgtaggtgatg

SEQ ID NO: 3417322 - DNA, 25 bp, Homo sapien
agactgtctcgctggtggactggta

SEQ ID NO: 3417323 - DNA, 25 bp, Homo sapien
tggacagtgtcgtatccgaggatgc

SEQ ID NO: 3417324 - DNA, 25 bp, Homo sapien
gggaaaccgagatgatgttcaccat

SEQ ID NO: 3417325 - DNA, 25 bp, Homo sapien
ccctggttcatctcatgcaggactt

SEQ ID NO: 3417326 - DNA, 25 bp, Homo sapien
gagccaccctggttcatctcatgca

SEQ ID NO: 3417327 - DNA, 25 bp, Homo sapien
gatgttcaccatcgggtcatgttca

SEQ ID NO: 3417328 - DNA, 25 bp, Homo sapien
tgtggccccggaggaggaaatgctg

SEQ ID NO: 3417329 - DNA, 25 bp, Homo sapien
gttccgtctcgctcaggccgaagat

SEQ ID NO: 3417330 - DNA, 25 bp, Homo sapien
tgccatcgaagggagcataatacag

SEQ ID NO: 3417331 - DNA, 25 bp, Homo sapien
gattggtgtcagagatgcctccaac

SEQ ID NO: 3417332 - DNA, 25 bp, Homo sapien
caccaaagatcaccacgctgccact

SEQ ID NO: 3417333 - DNA, 25 bp, Homo sapien
taagaagagtcaatgccaccaaaga

SEQ ID NO: 3417334 - DNA, 25 bp, Homo sapien
gtagtaagaagagtcaatgccacca

SEQ ID NO: 3417335 - DNA, 25 bp, Homo sapien
cagtaaccctcgacggtaacaggca

SEQ ID NO: 3417336 - DNA, 25 bp, Homo sapien
tccgtgactaggaggacagtggcta

SEQ ID NO: 3417337 - DNA, 25 bp, Homo sapien
aacaagacagcctcacagttccagg

SEQ ID NO: 3417338 - DNA, 25 bp, Homo sapien
aagtgacatgtttcctcgagtggca

SEQ ID NO: 3417339 - DNA, 25 bp, Homo sapien
actaggaggtgagcccagacatttc

SEQ ID NO: 3417340 - DNA, 25 bp, Homo sapien
ccgatgtcgctctggatgttggcaa

SEQ ID NO: 3417341 - DNA, 25 bp, Homo sapien
cggtgtcaacaatggcctggcagcc

SEQ ID NO: 3417342 - DNA, 25 bp, Homo sapien
agcgcaggcgatggcctctccgttc

SEQ ID NO: 3417343 - DNA, 25 bp, Homo sapien
tcagcagagaggtgccggtgtcaac

SEQ ID NO: 3417344 - DNA, 25 bp, Homo sapien
gaacagagcagtcggggctggactc

SEQ ID NO: 3417345 - DNA, 25 bp, Homo sapien
acagagcagtcggggctggactcac

SEQ ID NO: 3417346 - DNA, 25 bp, Homo sapien
tacttgagtgtagaacagagcagtc

SEQ ID NO: 3417347 - DNA, 25 bp, Homo sapien
cttgagtgtagaacagagcagtcgg

SEQ ID NO: 3417348 - DNA, 25 bp, Homo sapien
aaagagtgagggtgagaaaagttag

SEQ ID NO: 3417349 - DNA, 25 bp, Homo sapien
ttagaagggtttctgtcccttctgc

SEQ ID NO: 3417350 - DNA, 25 bp, Homo sapien
agaagggtttctgtcccttctgcct

SEQ ID NO: 3417351 - DNA, 25 bp, Homo sapien
agtgagggtgagaaaagttagaagg

SEQ ID NO: 3417352 - DNA, 25 bp, Homo sapien
tggcacggggtactggactccattg

SEQ ID NO: 3417353 - DNA, 25 bp, Homo sapien
ccattgatggtgaagacgatgtcgg

SEQ ID NO: 3417354 - DNA, 25 bp, Homo sapien
tgaagacgatgtcgggcaggctgct

SEQ ID NO: 3417355 - DNA, 25 bp, Homo sapien
caggatgtaggcactgggtggcacg

SEQ ID NO: 3417356 - DNA, 25 bp, Homo sapien
tgtgtgaacccctctagtggatggt

SEQ ID NO: 3417357 - DNA, 25 bp, Homo sapien
aacccctctagtggatggtccagag

SEQ ID NO: 3417358 - DNA, 25 bp, Homo sapien
tgcagaggggaactctgtgtccaca

SEQ ID NO: 3417359 - DNA, 25 bp, Homo sapien
tgaacccctctagtggatggtccag

SEQ ID NO: 3417360 - DNA, 25 bp, Homo sapien
cagctcgtggaagtgtactttccgt

SEQ ID NO: 3417361 - DNA, 25 bp, Homo sapien
ccttagggggctgtatccgagttct

SEQ ID NO: 3417362 - DNA, 25 bp, Homo sapien
ggctgtctagggcagatgttcgtct

SEQ ID NO: 3417363 - DNA, 25 bp, Homo sapien
gcttcagctcgtggaagtgtacttt

SEQ ID NO: 3417364 - DNA, 25 bp, Homo sapien
tagaagccgtccactgaacgactgg

SEQ ID NO: 3417365 - DNA, 25 bp, Homo sapien
gactggtttctacgcattactggac

SEQ ID NO: 3417366 - DNA, 25 bp, Homo sapien
taagtcactgggctgcgaccttgtc

SEQ ID NO: 3417367 - DNA, 25 bp, Homo sapien
ggagtttgaaaaccctgccgccata

SEQ ID NO: 3417368 - DNA, 25 bp, Homo sapien
tgggtgataaacatccagggcgccc

SEQ ID NO: 3417369 - DNA, 25 bp, Homo sapien
ccgtgataggcgctgggtgataaac

SEQ ID NO: 3417370 - DNA, 25 bp, Homo sapien
gacaccgattcagccgtgataggcg

SEQ ID NO: 3417371 - DNA, 25 bp, Homo sapien
gagaataaaagtggagctgggacac

SEQ ID NO: 3417372 - DNA, 25 bp, Homo sapien
ctccagattcggtggggaggttcat

SEQ ID NO: 3417373 - DNA, 25 bp, Homo sapien
ggtggggaggttcatgccctggaag

SEQ ID NO: 3417374 - DNA, 25 bp, Homo sapien
gattcggtggggaggttcatgccct

SEQ ID NO: 3417375 - DNA, 25 bp, Homo sapien
ctctccagattcggtggggaggttc

SEQ ID NO: 3417376 - DNA, 25 bp, Homo sapien
cggtaaagtactggcggatgaagac

SEQ ID NO: 3417377 - DNA, 25 bp, Homo sapien
tggttgtttgccctgtcgaagacgg

SEQ ID NO: 3417378 - DNA, 25 bp, Homo sapien
tactggcggatgaagacatcaccca

SEQ ID NO: 3417379 - DNA, 25 bp, Homo sapien
ccctgtcgaagacggtaaagtactg

SEQ ID NO: 3417380 - DNA, 25 bp, Homo sapien
aacagtcaggagaattagatacatc

SEQ ID NO: 3417381 - DNA, 25 bp, Homo sapien
tacgttattggtaggacagggaaca

SEQ ID NO: 3417382 - DNA, 25 bp, Homo sapien
tagatacatctaaagtgggcacagg

SEQ ID NO: 3417383 - DNA, 25 bp, Homo sapien
gggaagaacagtcaggagaattaga

SEQ ID NO: 3417384 - DNA, 25 bp, Homo sapien
gagaagacaattagcccagtatttt

SEQ ID NO: 3417385 - DNA, 25 bp, Homo sapien
tatgagaagacaattagcccagtat

SEQ ID NO: 3417386 - DNA, 25 bp, Homo sapien
cttctatgagaagacaattagccca

SEQ ID NO: 3417387 - DNA, 25 bp, Homo sapien
gtcccttctatgagaagacaattag

SEQ ID NO: 3417388 - DNA, 25 bp, Homo sapien
tgtacatgatgcactcagagagcgc

SEQ ID NO: 3417389 - DNA, 25 bp, Homo sapien
ttgtacatgatgcactcagagagcg

SEQ ID NO: 3417390 - DNA, 25 bp, Homo sapien
catgatgcactcagagagcgccacc

SEQ ID NO: 3417391 - DNA, 25 bp, Homo sapien
tacatgatgcactcagagagcgcca

SEQ ID NO: 3417392 - DNA, 25 bp, Homo sapien
aagtccttcagcaggccacgctcgg

SEQ ID NO: 3417393 - DNA, 25 bp, Homo sapien
gttcatctaccagggtgggagcctc

SEQ ID NO: 3417394 - DNA, 25 bp, Homo sapien
ctcggacagggtgcgcctcaaggac

SEQ ID NO: 3417395 - DNA, 25 bp, Homo sapien
gctgggttgaggttgtgcttcttca

SEQ ID NO: 3417396 - DNA, 25 bp, Homo sapien
caggagttccgatgccgatagtgcc

SEQ ID NO: 3417397 - DNA, 25 bp, Homo sapien
gatgccgatagtgccgaagtactcc

SEQ ID NO: 3417398 - DNA, 25 bp, Homo sapien
agttccgatgccgatagtgccgaag

SEQ ID NO: 3417399 - DNA, 25 bp, Homo sapien
ctgggcaggagttccgatgccgata

SEQ ID NO: 3417400 - DNA, 25 bp, Homo sapien
actggagcagtagactgagggcacc

SEQ ID NO: 3417401 - DNA, 25 bp, Homo sapien
cggtgtcaaagacgacggtgaaatc

SEQ ID NO: 3417402 - DNA, 25 bp, Homo sapien
ggagccggtgtcaaagacgacggtg

SEQ ID NO: 3417403 - DNA, 25 bp, Homo sapien
tggagcagtagactgagggcaccca

SEQ ID NO: 3417404 - DNA, 25 bp, Homo sapien
catgctgccggtgccgtaggtgatg

SEQ ID NO: 3417405 - DNA, 25 bp, Homo sapien
agactgtctcgctggtggactggta

SEQ ID NO: 3417406 - DNA, 25 bp, Homo sapien
tggacagtgtcgtatccgaggatgc

SEQ ID NO: 3417407 - DNA, 25 bp, Homo sapien
tgccgtaggtgatggagactgtctc

SEQ ID NO: 3417408 - DNA, 25 bp, Homo sapien
gagccaccctggttcatctcatgca

SEQ ID NO: 3417409 - DNA, 25 bp, Homo sapien
ccctggttcatctcatgcaggactt

SEQ ID NO: 3417410 - DNA, 25 bp, Homo sapien
gatgttcaccatcgggtcatgttca

SEQ ID NO: 3417411 - DNA, 25 bp, Homo sapien
gggaaaccgagatgatgttcaccat

SEQ ID NO: 3417412 - DNA, 25 bp, Homo sapien
tgtggccccggaggaggaaatgctg

SEQ ID NO: 3417413 - DNA, 25 bp, Homo sapien
gttccgtctcgctcaggccgaagat

SEQ ID NO: 3417414 - DNA, 25 bp, Homo sapien
tgccatcgaagggagcataatacag

SEQ ID NO: 3417415 - DNA, 25 bp, Homo sapien
gattggtgtcagagatgcctccaac

SEQ ID NO: 3417416 - DNA, 25 bp, Homo sapien
caccaaagatcaccacgctgccact

SEQ ID NO: 3417417 - DNA, 25 bp, Homo sapien
taagaagagtcaatgccaccaaaga

SEQ ID NO: 3417418 - DNA, 25 bp, Homo sapien
gtagtaagaagagtcaatgccacca

SEQ ID NO: 3417419 - DNA, 25 bp, Homo sapien
cagtaaccctcgacggtaacaggca

SEQ ID NO: 3417420 - DNA, 25 bp, Homo sapien
tctcaggggtacttctctccaagga

SEQ ID NO: 3417421 - DNA, 25 bp, Homo sapien
ctcaggggtacttctctccaaggag

SEQ ID NO: 3417422 - DNA, 25 bp, Homo sapien
gctctcaggggtacttctctccaag

SEQ ID NO: 3417423 - DNA, 25 bp, Homo sapien
tgagctctcaggggtacttctctcc

SEQ ID NO: 3417424 - DNA, 25 bp, Homo sapien
ccgatgtcgctctggatgttggcaa

SEQ ID NO: 3417425 - DNA, 25 bp, Homo sapien
cggtgtcaacaatggcctggcagcc

SEQ ID NO: 3417426 - DNA, 25 bp, Homo sapien
agcgcaggcgatggcctctccgttc

SEQ ID NO: 3417427 - DNA, 25 bp, Homo sapien
tcagcagagaggtgccggtgtcaac

SEQ ID NO: 3417428 - DNA, 25 bp, Homo sapien
gaacagagcagtcggggctggactc

SEQ ID NO: 3417429 - DNA, 25 bp, Homo sapien
cttgagtgtagaacagagcagtcgg

SEQ ID NO: 3417430 - DNA, 25 bp, Homo sapien
acagagcagtcggggctggactcac

SEQ ID NO: 3417431 - DNA, 25 bp, Homo sapien
tacttgagtgtagaacagagcagtc

SEQ ID NO: 3417432 - DNA, 25 bp, Homo sapien
tggcacggggtactggactccattg

SEQ ID NO: 3417433 - DNA, 25 bp, Homo sapien
ccattgatggtgaagacgatgtcgg

SEQ ID NO: 3417434 - DNA, 25 bp, Homo sapien
tgaagacgatgtcgggcaggctgct

SEQ ID NO: 3417435 - DNA, 25 bp, Homo sapien
caggatgtaggcactgggtggcacg

SEQ ID NO: 3417436 - DNA, 25 bp, Homo sapien
cagctcgtggaagtgtactttccgt

SEQ ID NO: 3417437 - DNA, 25 bp, Homo sapien
ggctgtctagggcagatgttcgtct

SEQ ID NO: 3417438 - DNA, 25 bp, Homo sapien
ccttagggggctgtatccgagttct

SEQ ID NO: 3417439 - DNA, 25 bp, Homo sapien
gcttcagctcgtggaagtgtacttt

SEQ ID NO: 3417440 - DNA, 25 bp, Homo sapien
tgggtgataaacatccagggcgccc

SEQ ID NO: 3417441 - DNA, 25 bp, Homo sapien
ccgtgataggcgctgggtgataaac

SEQ ID NO: 3417442 - DNA, 25 bp, Homo sapien
gacaccgattcagccgtgataggcg

SEQ ID NO: 3417443 - DNA, 25 bp, Homo sapien
gagaataaaagtggagctgggacac

SEQ ID NO: 3417444 - DNA, 25 bp, Homo sapien
tctccagattcggtggggaggttca

SEQ ID NO: 3417445 - DNA, 25 bp, Homo sapien
tggttgtttgccctgtcgaagacgg

SEQ ID NO: 3417446 - DNA, 25 bp, Homo sapien
tactggcggatgaagacatcaccca

SEQ ID NO: 3417447 - DNA, 25 bp, Homo sapien
tgtcgaagacggtaaagtactggcg

SEQ ID NO: 3417448 - DNA, 25 bp, Homo sapien
aacagtcaggagaattagatacatc

SEQ ID NO: 3417449 - DNA, 25 bp, Homo sapien
tagatacatctaaagtgggcacagg

SEQ ID NO: 3417450 - DNA, 25 bp, Homo sapien
tacgttattggtaggacagggaaca

SEQ ID NO: 3417451 - DNA, 25 bp, Homo sapien
gggaagaacagtcaggagaattaga

SEQ ID NO: 3417452 - DNA, 25 bp, Homo sapien
tccatcatgaagtgtcagctgctgg

SEQ ID NO: 3417453 - DNA, 25 bp, Homo sapien
aggtctttttatgatgcttccagca

SEQ ID NO: 3417454 - DNA, 25 bp, Homo sapien
gggtcactatgttgggtgccatcca

SEQ ID NO: 3417455 - DNA, 25 bp, Homo sapien
aaatggatgtggtcattttcatccc

SEQ ID NO: 3417456 - DNA, 25 bp, Homo sapien
cccaactcgagggagaaggcaagat

SEQ ID NO: 3417457 - DNA, 25 bp, Homo sapien
tgtacatgatgcactcagagagcgc

SEQ ID NO: 3417458 - DNA, 25 bp, Homo sapien
ttgtacatgatgcactcagagagcg

SEQ ID NO: 3417459 - DNA, 25 bp, Homo sapien
catgatgcactcagagagcgccacc

SEQ ID NO: 3417460 - DNA, 25 bp, Homo sapien
tacatgatgcactcagagagcgcca

SEQ ID NO: 3417461 - DNA, 25 bp, Homo sapien
aagtccttcagcaggccacgctcgg

SEQ ID NO: 3417462 - DNA, 25 bp, Homo sapien
gttcatctaccagggtgggagcctc

SEQ ID NO: 3417463 - DNA, 25 bp, Homo sapien
ctcggacagggtgcgcctcaaggac

SEQ ID NO: 3417464 - DNA, 25 bp, Homo sapien
gctgggttgaggttgtgcttcttca

SEQ ID NO: 3417465 - DNA, 25 bp, Homo sapien
gatgccgatagtgccgaagtactcc

SEQ ID NO: 3417466 - DNA, 25 bp, Homo sapien
caaagacgacggtgaaatcctgggc

SEQ ID NO: 3417467 - DNA, 25 bp, Homo sapien
ctgggcaggagttccgatgccgata

SEQ ID NO: 3417468 - DNA, 25 bp, Homo sapien
tggagcagtagactgagggcaccca

SEQ ID NO: 3417469 - DNA, 25 bp, Homo sapien
tgccgtaggtgatggagactgtctc

SEQ ID NO: 3417470 - DNA, 25 bp, Homo sapien
catgctgccggtgccgtaggtgatg

SEQ ID NO: 3417471 - DNA, 25 bp, Homo sapien
tggacagtgtcgtatccgaggatgc

SEQ ID NO: 3417472 - DNA, 25 bp, Homo sapien
agactgtctcgctggtggactggta

SEQ ID NO: 3417473 - DNA, 25 bp, Homo sapien
gagccaccctggttcatctcatgca

SEQ ID NO: 3417474 - DNA, 25 bp, Homo sapien
ccctggttcatctcatgcaggactt

SEQ ID NO: 3417475 - DNA, 25 bp, Homo sapien
gatgttcaccatcgggtcatgttca

SEQ ID NO: 3417476 - DNA, 25 bp, Homo sapien
gggaaaccgagatgatgttcaccat

SEQ ID NO: 3417477 - DNA, 25 bp, Homo sapien
tgtggccccggaggaggaaatgctg

SEQ ID NO: 3417478 - DNA, 25 bp, Homo sapien
gttccgtctcgctcaggccgaagat

SEQ ID NO: 3417479 - DNA, 25 bp, Homo sapien
tgccatcgaagggagcataatacag

SEQ ID NO: 3417480 - DNA, 25 bp, Homo sapien
gattggtgtcagagatgcctccaac

SEQ ID NO: 3417481 - DNA, 25 bp, Homo sapien
caccaaagatcaccacgctgccact

SEQ ID NO: 3417482 - DNA, 25 bp, Homo sapien
taagaagagtcaatgccaccaaaga

SEQ ID NO: 3417483 - DNA, 25 bp, Homo sapien
gtagtaagaagagtcaatgccacca

SEQ ID NO: 3417484 - DNA, 25 bp, Homo sapien
cagtaaccctcgacggtaacaggca

SEQ ID NO: 3417485 - DNA, 25 bp, Homo sapien
ggtgtcaacaatggcctggcagccc

SEQ ID NO: 3417486 - DNA, 25 bp, Homo sapien
ccgatgtcgctctggatgttggcaa

SEQ ID NO: 3417487 - DNA, 25 bp, Homo sapien
ctggttgggccggtcagcagagagg

SEQ ID NO: 3417488 - DNA, 25 bp, Homo sapien
agttctcgctggctccgatgtcgct

SEQ ID NO: 3417489 - DNA, 25 bp, Homo sapien
tacttgagtgtagaacagggcagtc

SEQ ID NO: 3417490 - DNA, 25 bp, Homo sapien
acagggcagtcggggctggactcac

SEQ ID NO: 3417491 - DNA, 25 bp, Homo sapien
agaacagggcagtcggggctggact

SEQ ID NO: 3417492 - DNA, 25 bp, Homo sapien
acttgagtgtagaacagggcagtcg

SEQ ID NO: 3417493 - DNA, 25 bp, Homo sapien
ttagaagggttttcgtcgcttctgc

SEQ ID NO: 3417494 - DNA, 25 bp, Homo sapien
gaagggttttcgtcgcttctgcctg

SEQ ID NO: 3417495 - DNA, 25 bp, Homo sapien
ggttttcgtcgcttctgcctggcac

SEQ ID NO: 3417496 - DNA, 25 bp, Homo sapien
gggttttcgtcgcttctgcctggca

SEQ ID NO: 3417497 - DNA, 25 bp, Homo sapien
tggcacggggtactggactccattg

SEQ ID NO: 3417498 - DNA, 25 bp, Homo sapien
tgaagacgatgtcgggcaggctgct

SEQ ID NO: 3417499 - DNA, 25 bp, Homo sapien
ccattgatggtgaagacgatgtcgg

SEQ ID NO: 3417500 - DNA, 25 bp, Homo sapien
caggatgtaggcactgggtggcacg

SEQ ID NO: 3417501 - DNA, 25 bp, Homo sapien
ctccagattcggtggggacgttcat

SEQ ID NO: 3417502 - DNA, 25 bp, Homo sapien
tctccagattcggtggggacgttca

SEQ ID NO: 3417503 - DNA, 25 bp, Homo sapien
ctctccagattcggtggggacgttc

SEQ ID NO: 3417504 - DNA, 25 bp, Homo sapien
tccagattcggtggggacgttcatg

SEQ ID NO: 3417505 - DNA, 25 bp, Homo sapien
ggccgacctggttgtttgccctgtc

SEQ ID NO: 3417506 - DNA, 25 bp, Homo sapien
tgtttgccctgtcgaagacggtaaa

SEQ ID NO: 3417507 - DNA, 25 bp, Homo sapien
tgtcgaagacggtaaagtactggcg

SEQ ID NO: 3417508 - DNA, 25 bp, Homo sapien
tactggcggatgaagacatcaccca

SEQ ID NO: 3417509 - DNA, 25 bp, Homo sapien
ttagatacatctaaagtgggcatag

SEQ ID NO: 3417510 - DNA, 25 bp, Homo sapien
aattagatacatctaaagtgggcat

SEQ ID NO: 3417511 - DNA, 25 bp, Homo sapien
gatacatctaaagtgggcataggac

SEQ ID NO: 3417512 - DNA, 25 bp, Homo sapien
tagatacatctaaagtgggcatagg

SEQ ID NO: 3417513 - DNA, 25 bp, Homo sapien
gattgattcccaagaactgacgcca

SEQ ID NO: 3417514 - DNA, 25 bp, Homo sapien
caggtgaagtgctgtgctcaagatc

SEQ ID NO: 3417515 - DNA, 25 bp, Homo sapien
taatatgtgttgagcacccacggtg

SEQ ID NO: 3417516 - DNA, 25 bp, Homo sapien
cctgtctagctgagattgtgtaccc

SEQ ID NO: 3417517 - DNA, 25 bp, Homo sapien
ccaggactccaggttaactattctt

SEQ ID NO: 3417518 - DNA, 25 bp, Homo sapien
cacgtgattgtttgatgggatccca

SEQ ID NO: 3417519 - DNA, 25 bp, Homo sapien
gatcccaaggatgatgggcttagaa

SEQ ID NO: 3417520 - DNA, 25 bp, Homo sapien
tgcgaacttaggcagtatcctccct

SEQ ID NO: 3417521 - DNA, 25 bp, Homo sapien
tgcaaactgccttcttcggaaagaa

SEQ ID NO: 3417522 - DNA, 25 bp, Homo sapien
tctgagagcatcaggcctagaggcc

SEQ ID NO: 3417523 - DNA, 25 bp, Homo sapien
ccaagccatgggtagcctgggtgta

SEQ ID NO: 3417524 - DNA, 25 bp, Homo sapien
caagccttgattggtgttgccagtt

SEQ ID NO: 3417525 - DNA, 25 bp, Homo sapien
ggagaccccgaagcgtgcgctctca

SEQ ID NO: 3417526 - DNA, 25 bp, Homo sapien
gtgcgctctcatccgggtcctgcgg

SEQ ID NO: 3417527 - DNA, 25 bp, Homo sapien
gccgcatccgccacatccgaaggcg

SEQ ID NO: 3417528 - DNA, 25 bp, Homo sapien
gccacatccgaaggcgccgcgactt

SEQ ID NO: 3417529 - DNA, 25 bp, Homo sapien
tgagcaggtggtcgttcaaacgtca

SEQ ID NO: 3417530 - DNA, 25 bp, Homo sapien
ctgaagaatcaacgcgcaaaaggga

SEQ ID NO: 3417531 - DNA, 25 bp, Homo sapien
tcgttcaaacgtcaggcgagggcac

SEQ ID NO: 3417532 - DNA, 25 bp, Homo sapien
cggtgggccctttgaagtctgaaga

SEQ ID NO: 3417533 - DNA, 25 bp, Homo sapien
cactaataacgttgggcaagcagac

SEQ ID NO: 3417534 - DNA, 25 bp, Homo sapien
ttttacacgggcatcacatgcagcg

SEQ ID NO: 3417535 - DNA, 25 bp, Homo sapien
cagagagctctagggacttgtccaa

SEQ ID NO: 3417536 - DNA, 25 bp, Homo sapien
gcattctgcgagtgtgccaagccac

SEQ ID NO: 3417537 - DNA, 25 bp, Homo sapien
aggagtgggtaacgatacaagctgc

SEQ ID NO: 3417538 - DNA, 25 bp, Homo sapien
agtgggtaacgatacaagctgcgga

SEQ ID NO: 3417539 - DNA, 25 bp, Homo sapien
gtgggtaacgatacaagctgcggaa

SEQ ID NO: 3417540 - DNA, 25 bp, Homo sapien
ctgcaggagtgggtaacgatacaag

SEQ ID NO: 3417541 - DNA, 25 bp, Homo sapien
gtgctacctgggtctgagtacagtg

SEQ ID NO: 3417542 - DNA, 25 bp, Homo sapien
tcctgtgctacctgggtctgagtac

SEQ ID NO: 3417543 - DNA, 25 bp, Homo sapien
atggacaatcctgtgctacctgggt

SEQ ID NO: 3417544 - DNA, 25 bp, Homo sapien
gacaatcctgtgctacctgggtctg

SEQ ID NO: 3417545 - DNA, 25 bp, Homo sapien
cacaccgttgcactgagctgctgga

SEQ ID NO: 3417546 - DNA, 25 bp, Homo sapien
ggctgagttcacaccgttgcactga

SEQ ID NO: 3417547 - DNA, 25 bp, Homo sapien
gaaacaggctgagttcacaccgttg

SEQ ID NO: 3417548 - DNA, 25 bp, Homo sapien
gaggctctgaaacaggctgagttca

SEQ ID NO: 3417549 - DNA, 25 bp, Homo sapien
ccagctcctttgtacaaaatttggc

SEQ ID NO: 3417550 - DNA, 25 bp, Homo sapien
ctggcaaggtgaacttccggctgtg

SEQ ID NO: 3417551 - DNA, 25 bp, Homo sapien
cttcctgagcttgctagcaccagct

SEQ ID NO: 3417552 - DNA, 25 bp, Homo sapien
gtgaacttccggctgtggcttcttc

SEQ ID NO: 3417553 - DNA, 25 bp, Homo sapien
gagggccacgcggtggccctgcagg

SEQ ID NO: 3417554 - DNA, 25 bp, Homo sapien
tgtccaggtcagaacggagggccac

SEQ ID NO: 3417555 - DNA, 25 bp, Homo sapien
aggctgtccaggtcagaacggaggg

SEQ ID NO: 3417556 - DNA, 25 bp, Homo sapien
tccaggtcagaacggagggccacgc

SEQ ID NO: 3417557 - DNA, 25 bp, Homo sapien
gaggtgaacacagctcccgcgatga

SEQ ID NO: 3417558 - DNA, 25 bp, Homo sapien
ctcccgcgatgaccccagtcagcat

SEQ ID NO: 3417559 - DNA, 25 bp, Homo sapien
ccactgccggggaggtgaacacagc

SEQ ID NO: 3417560 - DNA, 25 bp, Homo sapien
gcgatgaccccagtcagcatcccct

SEQ ID NO: 3417561 - DNA, 25 bp, Homo sapien
gggatgccttcagcccgggcctgct

SEQ ID NO: 3417562 - DNA, 25 bp, Homo sapien
ttcttcacgataaggagcgtcccca

SEQ ID NO: 3417563 - DNA, 25 bp, Homo sapien
tgtgtataagcaccgtgccgcacag

SEQ ID NO: 3417564 - DNA, 25 bp, Homo sapien
aggccgaagttgagccgatccccag

SEQ ID NO: 3417565 - DNA, 25 bp, Homo sapien
tctccacgtccccggtggaagccca

SEQ ID NO: 3417566 - DNA, 25 bp, Homo sapien
aggcaagggaaggctggaaagggct

SEQ ID NO: 3417567 - DNA, 25 bp, Homo sapien
acctgctttgcgatctcctccagcc

SEQ ID NO: 3417568 - DNA, 25 bp, Homo sapien
gaccacgttcacctgctttgcgatc

SEQ ID NO: 3417569 - DNA, 25 bp, Homo sapien
cttggcgaccacgttcacctgcttt

SEQ ID NO: 3417570 - DNA, 25 bp, Homo sapien
atggccttggcgaccacgttcacct

SEQ ID NO: 3417571 - DNA, 25 bp, Homo sapien
gaaacaaggcatgaagggatgactg

SEQ ID NO: 3417572 - DNA, 25 bp, Homo sapien
gccctgcccacaggtaccctcttct

SEQ ID NO: 3417573 - DNA, 25 bp, Homo sapien
cactcttagcactgggcatcaggaa

SEQ ID NO: 3417574 - DNA, 25 bp, Homo sapien
gggatgactgttccactcttagcac

SEQ ID NO: 3417575 - DNA, 25 bp, Homo sapien
cctcgtcggctgagagctcgaaggt

SEQ ID NO: 3417576 - DNA, 25 bp, Homo sapien
acgctgcaggaggataagctcaccc

SEQ ID NO: 3417577 - DNA, 25 bp, Homo sapien
ggacgctgcaggaggataagctcac

SEQ ID NO: 3417578 - DNA, 25 bp, Homo sapien
agctccacctcgtcggctgagagct

SEQ ID NO: 3417579 - DNA, 25 bp, Homo sapien
tcacacagtgctggactcacacagt

SEQ ID NO: 3417580 - DNA, 25 bp, Homo sapien
gctcatcgtttttatcaaggactca

SEQ ID NO: 3417581 - DNA, 25 bp, Homo sapien
tggtcactgctgacccactcaaggc

SEQ ID NO: 3417582 - DNA, 25 bp, Homo sapien
tcaaggcctggggatttgctcatcg

SEQ ID NO: 3417583 - DNA, 25 bp, Homo sapien
ggcgcacaccagcttccccgtggat

SEQ ID NO: 3417584 - DNA, 25 bp, Homo sapien
cttagggcggcctgtgccagaggga

SEQ ID NO: 3417585 - DNA, 25 bp, Homo sapien
ggccttggccttagggcggcctgtg

SEQ ID NO: 3417586 - DNA, 25 bp, Homo sapien
tgagctgcatctggggggccttggc

SEQ ID NO: 3417587 - DNA, 25 bp, Homo sapien
agggagccaggaatgagctgcatct

SEQ ID NO: 3417588 - DNA, 25 bp, Homo sapien
gctgcacaggcacatgggacgcgtt

SEQ ID NO: 3417589 - DNA, 25 bp, Homo sapien
tcatgtggtcgagcatgagtttcac

SEQ ID NO: 3417590 - DNA, 25 bp, Homo sapien
catgggacgcgttggtggtgtttgt

SEQ ID NO: 3417591 - DNA, 25 bp, Homo sapien
tgagtttcacaatctcatcggcggt

SEQ ID NO: 3417592 - DNA, 25 bp, Homo sapien
gagcggacggtagcgtcggctatga

SEQ ID NO: 3417593 - DNA, 25 bp, Homo sapien
ggtagcgtcggctatgatgcccagt

SEQ ID NO: 3417594 - DNA, 25 bp, Homo sapien
ggaatgacaggccacccaggttgtt

SEQ ID NO: 3417595 - DNA, 25 bp, Homo sapien
ccacccaggttgttgaccatcatca

SEQ ID NO: 3417596 - DNA, 25 bp, Homo sapien
taactcaggcttatctgacgcacag

SEQ ID NO: 3417597 - DNA, 25 bp, Homo sapien
aattaggtggcagagagacgattta

SEQ ID NO: 3417598 - DNA, 25 bp, Homo sapien
gcagagagacgatttaactcaggct

SEQ ID NO: 3417599 - DNA, 25 bp, Homo sapien
ctgccatcacaagaccctccctcag

SEQ ID NO: 3417600 - DNA, 25 bp, Homo sapien
gaaaaatgggcatcagggaaagaaa

SEQ ID NO: 3417601 - DNA, 25 bp, Homo sapien
gagtgtggcagtccaaaagggaaaa

SEQ ID NO: 3417602 - DNA, 25 bp, Homo sapien
ctgcaataccagagtgtggcagtcc

SEQ ID NO: 3417603 - DNA, 25 bp, Homo sapien
aaaagcaaggaccttggaagctggg

SEQ ID NO: 3417604 - DNA, 25 bp, Homo sapien
tgcccaccagggcacgggcaatctt

SEQ ID NO: 3417605 - DNA, 25 bp, Homo sapien
ggcacgggcaatcttcaccccgcgg

SEQ ID NO: 3417606 - DNA, 25 bp, Homo sapien
gcatctccagtgctgacatgaaggt

SEQ ID NO: 3417607 - DNA, 25 bp, Homo sapien
ctatcagtttcaggagaggctcatc

SEQ ID NO: 3417608 - DNA, 25 bp, Homo sapien
attcagcagggcttggaccctccca

SEQ ID NO: 3417609 - DNA, 25 bp, Homo sapien
aggaagggagtccacctcgacaagc

SEQ ID NO: 3417610 - DNA, 25 bp, Homo sapien
cgacaagcatggactgagtgcctac

SEQ ID NO: 3417611 - DNA, 25 bp, Homo sapien
cctactgtatacaggggtatggaga

SEQ ID NO: 3417612 - DNA, 25 bp, Homo sapien
ggcagcaagataactctcttagaca

SEQ ID NO: 3417613 - DNA, 25 bp, Homo sapien
agggcagcaagataactctcttaga

SEQ ID NO: 3417614 - DNA, 25 bp, Homo sapien
cagcaagataactctcttagacacg

SEQ ID NO: 3417615 - DNA, 25 bp, Homo sapien
agcaagataactctcttagacacgg

SEQ ID NO: 3417616 - DNA, 25 bp, Homo sapien
tccgcttccgcccagtaatggagac

SEQ ID NO: 3417617 - DNA, 25 bp, Homo sapien
ctggggctcggcaggggctacccgg

SEQ ID NO: 3417618 - DNA, 25 bp, Homo sapien
gactgcagccacgttaggccaggct

SEQ ID NO: 3417619 - DNA, 25 bp, Homo sapien
ggagactgcagccacgttaggccag

SEQ ID NO: 3417620 - DNA, 25 bp, Homo sapien
agcgccatccgcttcgaggctgagc

SEQ ID NO: 3417621 - DNA, 25 bp, Homo sapien
agagtgctgcacacccgttccagca

SEQ ID NO: 3417622 - DNA, 25 bp, Homo sapien
cagcccggtccagggcattcaggtg

SEQ ID NO: 3417623 - DNA, 25 bp, Homo sapien
tgggtggtgccacagtcgccgtcac

SEQ ID NO: 3417624 - DNA, 25 bp, Homo sapien
caggacagacaacttggagagcagc

SEQ ID NO: 3417625 - DNA, 25 bp, Homo sapien
aggacagacaacttggagagcagct

SEQ ID NO: 3417626 - DNA, 25 bp, Homo sapien
ggacagacaacttggagagcagctg

SEQ ID NO: 3417627 - DNA, 25 bp, Homo sapien
tgacaacgctgagcatgtggtgctg

SEQ ID NO: 3417628 - DNA, 25 bp, Homo sapien
ctggggaagatgacaacgctgagca

SEQ ID NO: 3417629 - DNA, 25 bp, Homo sapien
aagatgacaacgctgagcatgtggt

SEQ ID NO: 3417630 - DNA, 25 bp, Homo sapien
caacgctgagcatgtggtgctggcc

SEQ ID NO: 3417631 - DNA, 25 bp, Homo sapien
ttccaggccggcatccatggcagca

SEQ ID NO: 3417632 - DNA, 25 bp, Homo sapien
gccgcagtcaggaacaggccataga

SEQ ID NO: 3417633 - DNA, 25 bp, Homo sapien
ggctgggaggctggtcttggccttc

SEQ ID NO: 3417634 - DNA, 25 bp, Homo sapien
ttctgcatggcttccaggccggcat

SEQ ID NO: 3417635 - DNA, 25 bp, Homo sapien
atagtcctgtcccctggagcagcct

SEQ ID NO: 3417636 - DNA, 25 bp, Homo sapien
catagtcctgtcccctggagcagcc

SEQ ID NO: 3417637 - DNA, 25 bp, Homo sapien
tagtcctgtcccctggagcagcctt

SEQ ID NO: 3417638 - DNA, 25 bp, Homo sapien
caaaaggagaaaggtctgaggccac

SEQ ID NO: 3417639 - DNA, 25 bp, Homo sapien
gccaaaaggagaaaggtctgaggcc

SEQ ID NO: 3417640 - DNA, 25 bp, Homo sapien
agggccaaaaggagaaaggtctgag

SEQ ID NO: 3417641 - DNA, 25 bp, Homo sapien
aggagaaaggtctgaggccacagcc

SEQ ID NO: 3417642 - DNA, 25 bp, Homo sapien
actgctttggtcaggacttgtaaca

SEQ ID NO: 3417643 - DNA, 25 bp, Homo sapien
tgactgctttggtcaggacttgtaa

SEQ ID NO: 3417644 - DNA, 25 bp, Homo sapien
tgctttggtcaggacttgtaacaga

SEQ ID NO: 3417645 - DNA, 25 bp, Homo sapien
ctttggtcaggacttgtaacagatc

SEQ ID NO: 3417646 - DNA, 25 bp, Homo sapien
gtctgctggctagaagcctgtctcc

SEQ ID NO: 3417647 - DNA, 25 bp, Homo sapien
tgtgcggggctctacatatttcctt

SEQ ID NO: 3417648 - DNA, 25 bp, Homo sapien
cagagaaggaaactgcggtccagga

SEQ ID NO: 3417649 - DNA, 25 bp, Homo sapien
agacaggagtctgctggctagaagc

SEQ ID NO: 3417650 - DNA, 25 bp, Homo sapien
gggcagatcaccaggccgcctcctt

SEQ ID NO: 3417651 - DNA, 25 bp, Homo sapien
gagcaggttcaagggcagatcacca

SEQ ID NO: 3417652 - DNA, 25 bp, Homo sapien
gtgggagcaggttcaagggcagatc

SEQ ID NO: 3417653 - DNA, 25 bp, Homo sapien
gggtgtgggagcaggttcaagggca

SEQ ID NO: 3417654 - DNA, 25 bp, Homo sapien
ctccaagatggcccggaggatggca

SEQ ID NO: 3417655 - DNA, 25 bp, Homo sapien
ccagccgtgctgagctgatataact

SEQ ID NO: 3417656 - DNA, 25 bp, Homo sapien
ccaagatggcccggaggatggcagc

SEQ ID NO: 3417657 - DNA, 25 bp, Homo sapien
gctgatataactggctcttccggct

SEQ ID NO: 3417658 - DNA, 25 bp, Homo sapien
gctcaacttagagggtgggccaatg

SEQ ID NO: 3417659 - DNA, 25 bp, Homo sapien
gaagcttggtggaggatttcctgct

SEQ ID NO: 3417660 - DNA, 25 bp, Homo sapien
accaaattaggattgccaggtaaag

SEQ ID NO: 3417661 - DNA, 25 bp, Homo sapien
tgcggaaagcatttcacagggagtc

SEQ ID NO: 3417662 - DNA, 25 bp, Homo sapien
aaatgcccattcgactcccgaggag

SEQ ID NO: 3417663 - DNA, 25 bp, Homo sapien
cattcttacatgcatcaggtgtgtg

SEQ ID NO: 3417664 - DNA, 25 bp, Homo sapien
tacaactgaaccttagactatgatg

SEQ ID NO: 3417665 - DNA, 25 bp, Homo sapien
tacatgcttgggaaaaggtccctca

SEQ ID NO: 3417666 - DNA, 25 bp, Homo sapien
ccagctagtggtagagcagatgacc

SEQ ID NO: 3417667 - DNA, 25 bp, Homo sapien
aataggccttagctcctgtagccgg

SEQ ID NO: 3417668 - DNA, 25 bp, Homo sapien
tatgagtcgacagccagtgccttta

SEQ ID NO: 3417669 - DNA, 25 bp, Homo sapien
tagacatccaagatgaaggcgctgg

SEQ ID NO: 3417670 - DNA, 25 bp, Homo sapien
tcccagtagcgatgagtaacagagg

SEQ ID NO: 3417671 - DNA, 25 bp, Homo sapien
ggcagaagggctaatattgaccgtc

SEQ ID NO: 3417672 - DNA, 25 bp, Homo sapien
gaagggtcttgctcctaagtgttgc

SEQ ID NO: 3417673 - DNA, 25 bp, Homo sapien
tgagacccacattgcttcacctggc

SEQ ID NO: 3417674 - DNA, 25 bp, Homo sapien
tttaggttgaaattggtaagtcagc

SEQ ID NO: 3417675 - DNA, 25 bp, Homo sapien
tgtgtgtcagaaacagtactaagca

SEQ ID NO: 3417676 - DNA, 25 bp, Homo sapien
taagcaccttacatttaatcctgtc

SEQ ID NO: 3417677 - DNA, 25 bp, Homo sapien
tgtcaaccaccctacatcattggta

SEQ ID NO: 3417678 - DNA, 25 bp, Homo sapien
tttggtcacacatagcacagtcggg

SEQ ID NO: 3417679 - DNA, 25 bp, Homo sapien
tcacaggactcacccaagggaggag

SEQ ID NO: 3417680 - DNA, 25 bp, Homo sapien
tatccacgtcttttttggagccgcc

SEQ ID NO: 3417681 - DNA, 25 bp, Homo sapien
gccacaatgaggaagctagcacggt

SEQ ID NO: 3417682 - DNA, 25 bp, Homo sapien
ttctcacttgatctgacaacctgtg

SEQ ID NO: 3417683 - DNA, 25 bp, Homo sapien
tcgcgcccagcgaagaattctaata

SEQ ID NO: 3417684 - DNA, 25 bp, Homo sapien
tgtggtcaaggaagcagcgtgggcc

SEQ ID NO: 3417685 - DNA, 25 bp, Homo sapien
tacttgacttctacagtgtgctaca

SEQ ID NO: 3417686 - DNA, 25 bp, Homo sapien
gctggtccttcactgcattcttcct

SEQ ID NO: 3417687 - DNA, 25 bp, Homo sapien
tgtattgtgagcagggcaatataac

SEQ ID NO: 3417688 - DNA, 25 bp, Homo sapien
tgtgagcagggcaatataactttgc

SEQ ID NO: 3417689 - DNA, 25 bp, Homo sapien
tgctggtccttcactgcattcttcc

SEQ ID NO: 3417690 - DNA, 25 bp, Homo sapien
gaatattgagcccttcactcctcat

SEQ ID NO: 3417691 - DNA, 25 bp, Homo sapien
tggcaggaatattgagcccttcact

SEQ ID NO: 3417692 - DNA, 25 bp, Homo sapien
ttggcaggaatattgagcccttcac

SEQ ID NO: 3417693 - DNA, 25 bp, Homo sapien
caggaatattgagcccttcactcct

SEQ ID NO: 3417694 - DNA, 25 bp, Homo sapien
agcctataagaaggcgaggcggcac

SEQ ID NO: 3417695 - DNA, 25 bp, Homo sapien
cctcgcgcgcgactggaagtgctgc

SEQ ID NO: 3417696 - DNA, 25 bp, Homo sapien
tcctggaccctgacttcggacttgg

SEQ ID NO: 3417697 - DNA, 25 bp, Homo sapien
ccctgacttcggacttggagaagaa

SEQ ID NO: 3417698 - DNA, 25 bp, Homo sapien
tggatgggggatgagaggcggggct

SEQ ID NO: 3417699 - DNA, 25 bp, Homo sapien
gatgggggatgagaggcggggctga

SEQ ID NO: 3417700 - DNA, 25 bp, Homo sapien
tgggggatgagaggcggggctgatg

SEQ ID NO: 3417701 - DNA, 25 bp, Homo sapien
gggatgagaggcggggctgatgcat

SEQ ID NO: 3417702 - DNA, 25 bp, Homo sapien
catgttggagctttcgctgttcggg

SEQ ID NO: 3417703 - DNA, 25 bp, Homo sapien
agcgtcgccgctagctgacttaggg

SEQ ID NO: 3417704 - DNA, 25 bp, Homo sapien
tcttcccgctctatggccagtctgg

SEQ ID NO: 3417705 - DNA, 25 bp, Homo sapien
gggaggcttcgcgttcacctgaaca

SEQ ID NO: 3417706 - DNA, 25 bp, Homo sapien
gttgtcatgcggacatcgtcccggc

SEQ ID NO: 3417707 - DNA, 25 bp, Homo sapien
ctccaaactccaacgtcggttgtca

SEQ ID NO: 3417708 - DNA, 25 bp, Homo sapien
tccaacgtcggttgtcatgcggaca

SEQ ID NO: 3417709 - DNA, 25 bp, Homo sapien
tgcggacatcgtcccggcttccgga

SEQ ID NO: 3417710 - DNA, 25 bp, Homo sapien
cactgagggagaggcttctagttcc

SEQ ID NO: 3417711 - DNA, 25 bp, Homo sapien
ttcctttgaatgagagctgtttccc

SEQ ID NO: 3417712 - DNA, 25 bp, Homo sapien
tctagttcctttgaatgagagctgt

SEQ ID NO: 3417713 - DNA, 25 bp, Homo sapien
gctgtttcccttgctctaaggcaag

SEQ ID NO: 3417714 - DNA, 25 bp, Homo sapien
cacagttcccagaaaaccgctcctg

SEQ ID NO: 3417715 - DNA, 25 bp, Homo sapien
cccagaaaaccgctcctggctgtct

SEQ ID NO: 3417716 - DNA, 25 bp, Homo sapien
acagttcccagaaaaccgctcctgg

SEQ ID NO: 3417717 - DNA, 25 bp, Homo sapien
gttcccagaaaaccgctcctggctg

SEQ ID NO: 3417718 - DNA, 25 bp, Homo sapien
gcagagagagcaccaggctgtagtt

SEQ ID NO: 3417719 - DNA, 25 bp, Homo sapien
tgcagagagagcaccaggctgtagt

SEQ ID NO: 3417720 - DNA, 25 bp, Homo sapien
accaggctgtagttactggtctgga

SEQ ID NO: 3417721 - DNA, 25 bp, Homo sapien
ctgcagagagagcaccaggctgtag

SEQ ID NO: 3417722 - DNA, 25 bp, Homo sapien
gttctgagaaggaattgacaaagag

SEQ ID NO: 3417723 - DNA, 25 bp, Homo sapien
ctgagaaggaattgacaaagaggtc

SEQ ID NO: 3417724 - DNA, 25 bp, Homo sapien
gaagagcacaagctggatgacagga

SEQ ID NO: 3417725 - DNA, 25 bp, Homo sapien
atgaagagcacaagctggatgacag

SEQ ID NO: 3417726 - DNA, 25 bp, Homo sapien
taactttaagacactaaatcaccac

SEQ ID NO: 3417727 - DNA, 25 bp, Homo sapien
cagcatcctgaatcactgcgattac

SEQ ID NO: 3417728 - DNA, 25 bp, Homo sapien
ctgtcagggcctttgaattgcgtgg

SEQ ID NO: 3417729 - DNA, 25 bp, Homo sapien
ctaataactttaagacactaaatca

SEQ ID NO: 3417730 - DNA, 25 bp, Homo sapien
ttatggaataggaggttgaccaggc

SEQ ID NO: 3417731 - DNA, 25 bp, Homo sapien
ctgtcaggatgatggtccctttgaa

SEQ ID NO: 3417732 - DNA, 25 bp, Homo sapien
agatgctgagggcaaagtacacagc

SEQ ID NO: 3417733 - DNA, 25 bp, Homo sapien
ctgagggcaaagtacacagctgtca

SEQ ID NO: 3417734 - DNA, 25 bp, Homo sapien
aaagaattcagactgccactcttac

SEQ ID NO: 3417735 - DNA, 25 bp, Homo sapien
aaaaaagaattcagactgccactct

SEQ ID NO: 3417736 - DNA, 25 bp, Homo sapien
tcaggaattcagagttcaggccggg

SEQ ID NO: 3417737 - DNA, 25 bp, Homo sapien
tattcctagccctttagcgattcag

SEQ ID NO: 3417738 - DNA, 25 bp, Homo sapien
caaggagcgtttctcgaaggagcct

SEQ ID NO: 3417739 - DNA, 25 bp, Homo sapien
tgtcttgccttgaaaaatcgctggc

SEQ ID NO: 3417740 - DNA, 25 bp, Homo sapien
gaatcacaagcacaacctaacaggg

SEQ ID NO: 3417741 - DNA, 25 bp, Homo sapien
aattgaatgttctggaagagtcccc

SEQ ID NO: 3417742 - DNA, 25 bp, Homo sapien
ctagtctctggaatacaaacagcat

SEQ ID NO: 3417743 - DNA, 25 bp, Homo sapien
gaagtccatctgtccatatgaagct

SEQ ID NO: 3417744 - DNA, 25 bp, Homo sapien
tacaaacagcatttgaagtccatct

SEQ ID NO: 3417745 - DNA, 25 bp, Homo sapien
gcatttgaagtccatctgtccatat

SEQ ID NO: 3417746 - DNA, 25 bp, Homo sapien
gaaagagacacatgtgggacctgag

SEQ ID NO: 3417747 - DNA, 25 bp, Homo sapien
accatcccaagccagctgggacagg

SEQ ID NO: 3417748 - DNA, 25 bp, Homo sapien
aaagaacagaacctaatgaggctgg

SEQ ID NO: 3417749 - DNA, 25 bp, Homo sapien
ggtgtggctgtcacaaccatcccaa

SEQ ID NO: 3417750 - DNA, 25 bp, Homo sapien
gggtgctcctgagtatcatttcagg

SEQ ID NO: 3417751 - DNA, 25 bp, Homo sapien
ggtgctcctgagtatcatttcaggt

SEQ ID NO: 3417752 - DNA, 25 bp, Homo sapien
tcaggggtgctcctgagtatcattt

SEQ ID NO: 3417753 - DNA, 25 bp, Homo sapien
aggggtgctcctgagtatcatttca

SEQ ID NO: 3417754 - DNA, 25 bp, Homo sapien
cttgcgcagccacaaagagtcctgg

SEQ ID NO: 3417755 - DNA, 25 bp, Homo sapien
tgaggatcgcctagtcttacggctg

SEQ ID NO: 3417756 - DNA, 25 bp, Homo sapien
gaacttgcatgaactccttgcgcag

SEQ ID NO: 3417757 - DNA, 25 bp, Homo sapien
tccgtttatagaagtagcagtacaa

SEQ ID NO: 3417758 - DNA, 25 bp, Homo sapien
taaatgtctgcggtgtgatcagtca

SEQ ID NO: 3417759 - DNA, 25 bp, Homo sapien
aagtatccatcagtgtgacaagagg

SEQ ID NO: 3417760 - DNA, 25 bp, Homo sapien
tcagtcaggagcacgtaactatcac

SEQ ID NO: 3417761 - DNA, 25 bp, Homo sapien
gccacagaaccctcggcaagaaagg

SEQ ID NO: 3417762 - DNA, 25 bp, Homo sapien
gccaaagctggctaagggaatattt

SEQ ID NO: 3417763 - DNA, 25 bp, Homo sapien
gtagatgttaagctggaccttggca

SEQ ID NO: 3417764 - DNA, 25 bp, Homo sapien
ccttggcacgcctcttaacatgaag

SEQ ID NO: 3417765 - DNA, 25 bp, Homo sapien
cttctgagggcagttaaggcttctg

SEQ ID NO: 3417766 - DNA, 25 bp, Homo sapien
acttgcaaggcttccccttttgaga

SEQ ID NO: 3417767 - DNA, 25 bp, Homo sapien
aaaatcaatgtacaccttgcgtcta

SEQ ID NO: 3417768 - DNA, 25 bp, Homo sapien
aatctttaaatccacctgacttgca

SEQ ID NO: 3417769 - DNA, 25 bp, Homo sapien
caatgtacaccttgcgtctattgat

SEQ ID NO: 3417770 - DNA, 25 bp, Homo sapien
ccagccccgtgcttcaggaatgaag

SEQ ID NO: 3417771 - DNA, 25 bp, Homo sapien
gctgtccttcttagacccaggaatc

SEQ ID NO: 3417772 - DNA, 25 bp, Homo sapien
atcttctaccgggcgtgaagatggg

SEQ ID NO: 3417773 - DNA, 25 bp, Homo sapien
ttgattttccagccccgtgcttcag

SEQ ID NO: 3417774 - DNA, 25 bp, Homo sapien
aaacattaggcaagacaagaatcta

SEQ ID NO: 3417775 - DNA, 25 bp, Homo sapien
taggcaagacaagaatctaacaaca

SEQ ID NO: 3417776 - DNA, 25 bp, Homo sapien
aaaaacattaggcaagacaagaatc

SEQ ID NO: 3417777 - DNA, 25 bp, Homo sapien
cattaggcaagacaagaatctaaca

SEQ ID NO: 3417778 - DNA, 25 bp, Homo sapien
tgaagtgtcatgtcccataaagaca

SEQ ID NO: 3417779 - DNA, 25 bp, Homo sapien
ggttgtgaagtgtcatgtcccataa

SEQ ID NO: 3417780 - DNA, 25 bp, Homo sapien
ttatttctagacgagtaggtcctga

SEQ ID NO: 3417781 - DNA, 25 bp, Homo sapien
ttctagacgagtaggtcctgagtta

SEQ ID NO: 3417782 - DNA, 25 bp, Homo sapien
atgtcctccctggtgtagaccaaaa

SEQ ID NO: 3417783 - DNA, 25 bp, Homo sapien
cacagggcaatgtatagaaaacagc

SEQ ID NO: 3417784 - DNA, 25 bp, Homo sapien
tggtgtagaccaaaagtaatattct

SEQ ID NO: 3417785 - DNA, 25 bp, Homo sapien
atgcacagggcaatgtatagaaaac

SEQ ID NO: 3417786 - DNA, 25 bp, Homo sapien
ctgcatcccagagggttgattccca

SEQ ID NO: 3417787 - DNA, 25 bp, Homo sapien
tcccagagggttgattcccatcctc

SEQ ID NO: 3417788 - DNA, 25 bp, Homo sapien
gcatcccagagggttgattcccatc

SEQ ID NO: 3417789 - DNA, 25 bp, Homo sapien
catcccagagggttgattcccatcc

SEQ ID NO: 3417790 - DNA, 25 bp, Homo sapien
taaaatgaaacgagtcaccacgcga

SEQ ID NO: 3417791 - DNA, 25 bp, Homo sapien
tagcattggtcttttctgcggccga

SEQ ID NO: 3417792 - DNA, 25 bp, Homo sapien
aggctctcagactaccgggcgttgg

SEQ ID NO: 3417793 - DNA, 25 bp, Homo sapien
tgcggccgatttacctaccaggtag

SEQ ID NO: 3417794 - DNA, 25 bp, Homo sapien
agctggacgagctcgggcctggccg

SEQ ID NO: 3417795 - DNA, 25 bp, Homo sapien
gcaagtggccctcgctcggatgtcc

SEQ ID NO: 3417796 - DNA, 25 bp, Homo sapien
ggcctggccgcaagtggccctcgct

SEQ ID NO: 3417797 - DNA, 25 bp, Homo sapien
tgtggtcacccggagctggacgagc

SEQ ID NO: 3417798 - DNA, 25 bp, Homo sapien
tgccggaaacagggacgaagcggcc

SEQ ID NO: 3417799 - DNA, 25 bp, Homo sapien
ctgccggaaacagggacgaagcggc

SEQ ID NO: 3417800 - DNA, 25 bp, Homo sapien
ggcagcatacgctgccacagcggct

SEQ ID NO: 3417801 - DNA, 25 bp, Homo sapien
agtccccgtggcagcatacgctgcc

SEQ ID NO: 3417802 - DNA, 25 bp, Homo sapien
cgcggcgccatcttcagtccccgtg

SEQ ID NO: 3417803 - DNA, 25 bp, Homo sapien
ctcgcggcgccatcttcagtccccg

SEQ ID NO: 3417804 - DNA, 25 bp, Homo sapien
gaaataggtagcattataccacccg

SEQ ID NO: 3417805 - DNA, 25 bp, Homo sapien
ccgttcagaaagaacaggatttcca

SEQ ID NO: 3417806 - DNA, 25 bp, Homo sapien
tatgaaaagttccagcaggaaatag

SEQ ID NO: 3417807 - DNA, 25 bp, Homo sapien
tataccacccgttcagaaagaacag

SEQ ID NO: 3417808 - DNA, 25 bp, Homo sapien
gctgttggatatggtagcaggacac

SEQ ID NO: 3417809 - DNA, 25 bp, Homo sapien
taggttagctgttggatatggtagc

SEQ ID NO: 3417810 - DNA, 25 bp, Homo sapien
catccagtactaggttagctgttgg

SEQ ID NO: 3417811 - DNA, 25 bp, Homo sapien
accacatccagtactaggttagctg

SEQ ID NO: 3417812 - DNA, 25 bp, Homo sapien
caaaaaacaggcgaattacttcaat

SEQ ID NO: 3417813 - DNA, 25 bp, Homo sapien
cttcaattccaagataaaggaggag

SEQ ID NO: 3417814 - DNA, 25 bp, Homo sapien
caattccaagataaaggaggagcat

SEQ ID NO: 3417815 - DNA, 25 bp, Homo sapien
aaacaggcgaattacttcaattcca

SEQ ID NO: 3417816 - DNA, 25 bp, Homo sapien
tcagggatgacatattctaacaaat

SEQ ID NO: 3417817 - DNA, 25 bp, Homo sapien
tcctaagtttgtgctttaacgttga

SEQ ID NO: 3417818 - DNA, 25 bp, Homo sapien
tgtgctttaacgttgatttcaggga

SEQ ID NO: 3417819 - DNA, 25 bp, Homo sapien
tccttagtgatttatgtgagccttc

SEQ ID NO: 3417820 - DNA, 25 bp, Homo sapien
cagatgtttagtttgtttacagtgt

SEQ ID NO: 3417821 - DNA, 25 bp, Homo sapien
tagctatcttcgcatatctgtggaa

SEQ ID NO: 3417822 - DNA, 25 bp, Homo sapien
gaatcagtgccgtaactgatttaac

SEQ ID NO: 3417823 - DNA, 25 bp, Homo sapien
tgatttaacaatcccgtatggacag

SEQ ID NO: 3417824 - DNA, 25 bp, Homo sapien
agtcatctccaaatggtctgctttt

SEQ ID NO: 3417825 - DNA, 25 bp, Homo sapien
gaaggtcaaggccacgctaatactg

SEQ ID NO: 3417826 - DNA, 25 bp, Homo sapien
tccaggcggagtacgtaggtctgca

SEQ ID NO: 3417827 - DNA, 25 bp, Homo sapien
aatactgagcggcatctttcgctgg

SEQ ID NO: 3417828 - DNA, 25 bp, Homo sapien
cagcagcaggtaataggaggccatc

SEQ ID NO: 3417829 - DNA, 25 bp, Homo sapien
gacaacttgccccaccaattctcac

SEQ ID NO: 3417830 - DNA, 25 bp, Homo sapien
cagcctttctcaggacaacttgccc

SEQ ID NO: 3417831 - DNA, 25 bp, Homo sapien
ctggtttagaagatggtacccactg

SEQ ID NO: 3417832 - DNA, 25 bp, Homo sapien
ggtttagaagatggtacccactggc

SEQ ID NO: 3417833 - DNA, 25 bp, Homo sapien
ccctatactggagtgtagaagagtc

SEQ ID NO: 3417834 - DNA, 25 bp, Homo sapien
cctccctatactggagtgtagaaga

SEQ ID NO: 3417835 - DNA, 25 bp, Homo sapien
ttgcccctccctatactggagtgta

SEQ ID NO: 3417836 - DNA, 25 bp, Homo sapien
tactggagtgtagaagagtctcttg

SEQ ID NO: 3417837 - DNA, 25 bp, Homo sapien
ccacggtgatcaaggaggagaactt

SEQ ID NO: 3417838 - DNA, 25 bp, Homo sapien
cacggtgatcaaggaggagaacttg

SEQ ID NO: 3417839 - DNA, 25 bp, Homo sapien
gccacggtgatcaaggaggagaact

SEQ ID NO: 3417840 - DNA, 25 bp, Homo sapien
ggccacggtgatcaaggaggagaac

SEQ ID NO: 3417841 - DNA, 25 bp, Homo sapien
aaggagcctagatggtccacacgag

SEQ ID NO: 3417842 - DNA, 25 bp, Homo sapien
gaggctctccgtgctcatgtgggac

SEQ ID NO: 3417843 - DNA, 25 bp, Homo sapien
tatagcacagctcgtacagggagca

SEQ ID NO: 3417844 - DNA, 25 bp, Homo sapien
tcaggtcctgcttgaagcccaagga

SEQ ID NO: 3417845 - DNA, 25 bp, Homo sapien
gaaaaataacactatgagctactaa

SEQ ID NO: 3417846 - DNA, 25 bp, Homo sapien
gattggggtgagaggctttcacatc

SEQ ID NO: 3417847 - DNA, 25 bp, Homo sapien
aaagttgtggaactcagtctccgag

SEQ ID NO: 3417848 - DNA, 25 bp, Homo sapien
aaagttagtttcatgaagagagtag

SEQ ID NO: 3417849 - DNA, 25 bp, Homo sapien
ttacattttacttcgagtaagagca

SEQ ID NO: 3417850 - DNA, 25 bp, Homo sapien
acattttacttcgagtaagagcaga

SEQ ID NO: 3417851 - DNA, 25 bp, Homo sapien
tttacttcgagtaagagcagataat

SEQ ID NO: 3417852 - DNA, 25 bp, Homo sapien
taagagcagataatctaggattcat

SEQ ID NO: 3417853 - DNA, 25 bp, Homo sapien
tactctggtttttggatagtcccca

SEQ ID NO: 3417854 - DNA, 25 bp, Homo sapien
ctctggtttttggatagtccccaag

SEQ ID NO: 3417855 - DNA, 25 bp, Homo sapien
gataggttgaaaattgtgtaataaa

SEQ ID NO: 3417856 - DNA, 25 bp, Homo sapien
gtttgtctttctgataggttgaaaa

SEQ ID NO: 3417857 - DNA, 25 bp, Homo sapien
gttgtcggtgatttgtttgtctttc

SEQ ID NO: 3417858 - DNA, 25 bp, Homo sapien
ccgtccccctgttgtcggtgatttg

SEQ ID NO: 3417859 - DNA, 25 bp, Homo sapien
gatgtgcttattgagagcaactccg

SEQ ID NO: 3417860 - DNA, 25 bp, Homo sapien
ttaagtgatgtgcttattgagagca

SEQ ID NO: 3417861 - DNA, 25 bp, Homo sapien
gcttattgagagcaactccgggtgt

SEQ ID NO: 3417862 - DNA, 25 bp, Homo sapien
aagtgatgtgcttattgagagcaac

SEQ ID NO: 3417863 - DNA, 25 bp, Homo sapien
tacttattgtgggataacctggcac

SEQ ID NO: 3417864 - DNA, 25 bp, Homo sapien
tctgacacctaacatgagacgtggc

SEQ ID NO: 3417865 - DNA, 25 bp, Homo sapien
gagagactgaattggactaaacccg

SEQ ID NO: 3417866 - DNA, 25 bp, Homo sapien
ccccgcaggattggagaggcacatt

SEQ ID NO: 3417867 - DNA, 25 bp, Homo sapien
ccagcctgcgtaggtgtttagacag

SEQ ID NO: 3417868 - DNA, 25 bp, Homo sapien
tatagattctgaggacccaagctga

SEQ ID NO: 3417869 - DNA, 25 bp, Homo sapien
cacctatggctgtcatgcgaggaaa

SEQ ID NO: 3417870 - DNA, 25 bp, Homo sapien
tgtgacaggtggcttaatagaccct

SEQ ID NO: 3417871 - DNA, 25 bp, Homo sapien
ccaatgatgagcgttgccgtgtcct

SEQ ID NO: 3417872 - DNA, 25 bp, Homo sapien
catggcatcgaagccaagtcctaca

SEQ ID NO: 3417873 - DNA, 25 bp, Homo sapien
caggtgagttggtgattgtgtcctc

SEQ ID NO: 3417874 - DNA, 25 bp, Homo sapien
aacagtcccgggttgccaatgatga

SEQ ID NO: 3417875 - DNA, 25 bp, Homo sapien
actgtaaggaatcaaccaagaggag

SEQ ID NO: 3417876 - DNA, 25 bp, Homo sapien
tggaaggatactgtaaggaatcaac

SEQ ID NO: 3417877 - DNA, 25 bp, Homo sapien
caagaggagtgttggagaataagac

SEQ ID NO: 3417878 - DNA, 25 bp, Homo sapien
gatactgtaaggaatcaaccaagag

SEQ ID NO: 3417879 - DNA, 25 bp, Homo sapien
tccggactcgcgatcttccttccgg

SEQ ID NO: 3417880 - DNA, 25 bp, Homo sapien
ggactcgcgatcttccttccggagc

SEQ ID NO: 3417881 - DNA, 25 bp, Homo sapien
cggactcgcgatcttccttccggag

SEQ ID NO: 3417882 - DNA, 25 bp, Homo sapien
cctccggactcgcgatcttccttcc

SEQ ID NO: 3417883 - DNA, 25 bp, Homo sapien
ggtcggttgagatgggacggccgga

SEQ ID NO: 3417884 - DNA, 25 bp, Homo sapien
cgccgccgccatattcccggtaacg

SEQ ID NO: 3417885 - DNA, 25 bp, Homo sapien
gggcggagagcggttcgcgcgcttc

SEQ ID NO: 3417886 - DNA, 25 bp, Homo sapien
gcgcttcgggcctagtccggactcg

SEQ ID NO: 3417887 - DNA, 25 bp, Homo sapien
cggttcgcgcgcttcgggcctagtc

SEQ ID NO: 3417888 - DNA, 25 bp, Homo sapien
gcgcgggcacttccgggaactccta

SEQ ID NO: 3417889 - DNA, 25 bp, Homo sapien
ctgcaccggaaaccggctgcgcggg

SEQ ID NO: 3417890 - DNA, 25 bp, Homo sapien
agccgaccacggcagccacggagga

SEQ ID NO: 3417891 - DNA, 25 bp, Homo sapien
agccggaaggtgcgtccctgcgcat

SEQ ID NO: 3417892 - DNA, 25 bp, Homo sapien
gacgaagtcgagaacactgtagaca

SEQ ID NO: 3417893 - DNA, 25 bp, Homo sapien
cagcgacgaagtcgagaacactgta

SEQ ID NO: 3417894 - DNA, 25 bp, Homo sapien
gaagtcgagaacactgtagacaccg

SEQ ID NO: 3417895 - DNA, 25 bp, Homo sapien
tcgagaacactgtagacaccgccat

SEQ ID NO: 3417896 - DNA, 25 bp, Homo sapien
tgccctgcgctatcgggcagacgaa

SEQ ID NO: 3417897 - DNA, 25 bp, Homo sapien
gcagacgaactctccccaagataga

SEQ ID NO: 3417898 - DNA, 25 bp, Homo sapien
tcctgagttgcaggatcggcctctc

SEQ ID NO: 3417899 - DNA, 25 bp, Homo sapien
agacaaagggtaatccccgctgccg

SEQ ID NO: 3417900 - DNA, 25 bp, Homo sapien
tatcttgagacacgccgggaatggt

SEQ ID NO: 3417901 - DNA, 25 bp, Homo sapien
tatcatacgcagacactagagggag

SEQ ID NO: 3417902 - DNA, 25 bp, Homo sapien
tgttaaattatcactggaggccggg

SEQ ID NO: 3417903 - DNA, 25 bp, Homo sapien
gcagatatttccagaccggcacaca

SEQ ID NO: 3417904 - DNA, 25 bp, Homo sapien
agcatgatccctaatcccccaaagg

SEQ ID NO: 3417905 - DNA, 25 bp, Homo sapien
ggctcccaatccagagaagttgaca

SEQ ID NO: 3417906 - DNA, 25 bp, Homo sapien
tatcaagatatgatgtcaaggtggt

SEQ ID NO: 3417907 - DNA, 25 bp, Homo sapien
ttccccgatggagacactgagccaa

SEQ ID NO: 3417908 - DNA, 25 bp, Homo sapien
gagacaataggctgtgccttgacag

SEQ ID NO: 3417909 - DNA, 25 bp, Homo sapien
aatctgttgggctgtcacctctgta

SEQ ID NO: 3417910 - DNA, 25 bp, Homo sapien
gtagaagcgtctgaatgatgtcaca

SEQ ID NO: 3417911 - DNA, 25 bp, Homo sapien
tggaggcaaagggatttcaatcatg

SEQ ID NO: 3417912 - DNA, 25 bp, Homo sapien
gaggcaaagggatttcaatcatgtc

SEQ ID NO: 3417913 - DNA, 25 bp, Homo sapien
ttttccaacattcccctctttctgc

SEQ ID NO: 3417914 - DNA, 25 bp, Homo sapien
catagagcaggcgggctcttttggt

SEQ ID NO: 3417915 - DNA, 25 bp, Homo sapien
ctctcatagagcaggcgggctcttt

SEQ ID NO: 3417916 - DNA, 25 bp, Homo sapien
agagcaggcgggctcttttggtttc

SEQ ID NO: 3417917 - DNA, 25 bp, Homo sapien
ggttgagaaggctgtgtctaataaa

SEQ ID NO: 3417918 - DNA, 25 bp, Homo sapien
aggctgtgtctaataaaagagaagt

SEQ ID NO: 3417919 - DNA, 25 bp, Homo sapien
aagaggttgagaaggctgtgtctaa

SEQ ID NO: 3417920 - DNA, 25 bp, Homo sapien
gagaaggctgtgtctaataaaagag

SEQ ID NO: 3417921 - DNA, 25 bp, Homo sapien
aggctcgttaatcaggcggtcatag

SEQ ID NO: 3417922 - DNA, 25 bp, Homo sapien
gctcgttaatcaggcggtcatagag

SEQ ID NO: 3417923 - DNA, 25 bp, Homo sapien
taggctcgttaatcaggcggtcata

SEQ ID NO: 3417924 - DNA, 25 bp, Homo sapien
ggctcgttaatcaggcggtcataga

SEQ ID NO: 3417925 - DNA, 25 bp, Homo sapien
ctgtggcccagtagtaaatatccca

SEQ ID NO: 3417926 - DNA, 25 bp, Homo sapien
tggcccagtagtaaatatcccagtc

SEQ ID NO: 3417927 - DNA, 25 bp, Homo sapien
ccagtagtaaatatcccagtcatta

SEQ ID NO: 3417928 - DNA, 25 bp, Homo sapien
gcccagtagtaaatatcccagtcat

SEQ ID NO: 3417929 - DNA, 25 bp, Homo sapien
ttatgctgcttatcatacccagtac

SEQ ID NO: 3417930 - DNA, 25 bp, Homo sapien
aaactgtcctattttcacattatgc

SEQ ID NO: 3417931 - DNA, 25 bp, Homo sapien
caattctagactcaaatcagcctaa

SEQ ID NO: 3417932 - DNA, 25 bp, Homo sapien
tctaggatacaattctagactcaaa

SEQ ID NO: 3417933 - DNA, 25 bp, Homo sapien
taagagattctcctgccccagcctc

SEQ ID NO: 3417934 - DNA, 25 bp, Homo sapien
tccgactccctggtttaagagattc

SEQ ID NO: 3417935 - DNA, 25 bp, Homo sapien
cctccgactccctggtttaagagat

SEQ ID NO: 3417936 - DNA, 25 bp, Homo sapien
ccaccacgcccagtatttttagtag

SEQ ID NO: 3417937 - DNA, 25 bp, Homo sapien
cacaggaatttcgacctgtcccatt

SEQ ID NO: 3417938 - DNA, 25 bp, Homo sapien
gctagtcagaggtgcaattccacca

SEQ ID NO: 3417939 - DNA, 25 bp, Homo sapien
gattggtatagagcactgcagccaa

SEQ ID NO: 3417940 - DNA, 25 bp, Homo sapien
tactgttgccaactttacagcagac

SEQ ID NO: 3417941 - DNA, 25 bp, Homo sapien
tcttaaaactcgaaacactggccaa

SEQ ID NO: 3417942 - DNA, 25 bp, Homo sapien
tgaacgggcaacataggcactgagt

SEQ ID NO: 3417943 - DNA, 25 bp, Homo sapien
caaagccgaggcaatgtgctccaga

SEQ ID NO: 3417944 - DNA, 25 bp, Homo sapien
tacacgatgttagcctataccaggg

SEQ ID NO: 3417945 - DNA, 25 bp, Homo sapien
tcaacgtggcttttcaaagaggtac

SEQ ID NO: 3417946 - DNA, 25 bp, Homo sapien
caaagaggtactcaagatctggggc

SEQ ID NO: 3417947 - DNA, 25 bp, Homo sapien
ttagcaaagtctctcagcagggcca

SEQ ID NO: 3417948 - DNA, 25 bp, Homo sapien
tactcaagatctggggcacgcagtc

SEQ ID NO: 3417949 - DNA, 25 bp, Homo sapien
tatgtcctaggagagggttatgtcc

SEQ ID NO: 3417950 - DNA, 25 bp, Homo sapien
taagtagttaccatccacagactga

SEQ ID NO: 3417951 - DNA, 25 bp, Homo sapien
gcaaggctaacgtccatcataagta

SEQ ID NO: 3417952 - DNA, 25 bp, Homo sapien
ggcatctaagaagccggaagcaagg

SEQ ID NO: 3417953 - DNA, 25 bp, Homo sapien
ctttgagtacacttgggctgaggca

SEQ ID NO: 3417954 - DNA, 25 bp, Homo sapien
ggcagacttgcctctagagatagca

SEQ ID NO: 3417955 - DNA, 25 bp, Homo sapien
ttcgcagaaggagccataccaggtt

SEQ ID NO: 3417956 - DNA, 25 bp, Homo sapien
gatgttgactcctaagcagtgtgcc

SEQ ID NO: 3417957 - DNA, 25 bp, Homo sapien
tgtgtaaccagtgcactgcgctgct

SEQ ID NO: 3417958 - DNA, 25 bp, Homo sapien
tagtccctgtgtgcggctcctataa

SEQ ID NO: 3417959 - DNA, 25 bp, Homo sapien
taggaaccctggagctcaacaatgc

SEQ ID NO: 3417960 - DNA, 25 bp, Homo sapien
gatctactcacttggcgaagcacct

SEQ ID NO: 3417961 - DNA, 25 bp, Homo sapien
tgtttacatagcatccctgggcctg

SEQ ID NO: 3417962 - DNA, 25 bp, Homo sapien
tgagcaggtgaacttagcaagatcc

SEQ ID NO: 3417963 - DNA, 25 bp, Homo sapien
ctagaagcatgccattcccaggtga

SEQ ID NO: 3417964 - DNA, 25 bp, Homo sapien
tcccaggtgaaagcggcagcaattg

SEQ ID NO: 3417965 - DNA, 25 bp, Homo sapien
ttgggccttaggaggaaccagcact

SEQ ID NO: 3417966 - DNA, 25 bp, Homo sapien
ggtgcgatagaggttgtgcaactca

SEQ ID NO: 3417967 - DNA, 25 bp, Homo sapien
gaggaaccagcactagtttgtcagc

SEQ ID NO: 3417968 - DNA, 25 bp, Homo sapien
gcatgactccgctgagatgggagcc

SEQ ID NO: 3417969 - DNA, 25 bp, Homo sapien
tgcaaacagtatctaatacaccatc

SEQ ID NO: 3417970 - DNA, 25 bp, Homo sapien
acagtatctaatacaccatctatga

SEQ ID NO: 3417971 - DNA, 25 bp, Homo sapien
aacagtatctaatacaccatctatg

SEQ ID NO: 3417972 - DNA, 25 bp, Homo sapien
caaacagtatctaatacaccatcta

SEQ ID NO: 3417973 - DNA, 25 bp, Homo sapien
gccagatgatgaaggcagatcagat

SEQ ID NO: 3417974 - DNA, 25 bp, Homo sapien
gagtagctttcaccacagtgatggt

SEQ ID NO: 3417975 - DNA, 25 bp, Homo sapien
gttggcgccccaactcctgtgttgt

SEQ ID NO: 3417976 - DNA, 25 bp, Homo sapien
tcaagggttaactgcacactcattt

SEQ ID NO: 3417977 - DNA, 25 bp, Homo sapien
tcatggggcttaaaattctcgtggg

SEQ ID NO: 3417978 - DNA, 25 bp, Homo sapien
ggagaaccaccatatggatttaaaa

SEQ ID NO: 3417979 - DNA, 25 bp, Homo sapien
gagcaccctctatatgccaagggct

SEQ ID NO: 3417980 - DNA, 25 bp, Homo sapien
ggcatgaaccatactcgtttcttaa

SEQ ID NO: 3417981 - DNA, 25 bp, Homo sapien
tgttgggaacaacgcaatctctagg

SEQ ID NO: 3417982 - DNA, 25 bp, Homo sapien
ccttggacaagcctcatgtaggaaa

SEQ ID NO: 3417983 - DNA, 25 bp, Homo sapien
gccctgctgcctcctagcggtgtga

SEQ ID NO: 3417984 - DNA, 25 bp, Homo sapien
aatggtcacagatcccacagtgctc

SEQ ID NO: 3417985 - DNA, 25 bp, Homo sapien
aataactcattgtagttgttttaca

SEQ ID NO: 3417986 - DNA, 25 bp, Homo sapien
ataactcattgtagttgttttacat

SEQ ID NO: 3417987 - DNA, 25 bp, Homo sapien
taataactcattgtagttgttttac

SEQ ID NO: 3417988 - DNA, 25 bp, Homo sapien
ttaataactcattgtagttgtttta

SEQ ID NO: 3417989 - DNA, 25 bp, Homo sapien
ctgttgagctccacttcagaatgtg

SEQ ID NO: 3417990 - DNA, 25 bp, Homo sapien
gctccacttcagaatgtgccatttt

SEQ ID NO: 3417991 - DNA, 25 bp, Homo sapien
ttgagctccacttcagaatgtgcca

SEQ ID NO: 3417992 - DNA, 25 bp, Homo sapien
gagctccacttcagaatgtgccatt

SEQ ID NO: 3417993 - DNA, 25 bp, Homo sapien
tgcctcccaggctaaaatgattctt

SEQ ID NO: 3417994 - DNA, 25 bp, Homo sapien
tatgcgccagcacacctggctaaat

SEQ ID NO: 3417995 - DNA, 25 bp, Homo sapien
tcttgtgcctcagcctcgcgagtag

SEQ ID NO: 3417996 - DNA, 25 bp, Homo sapien
tcccaggctaaaatgattcttgtgc

SEQ ID NO: 3417997 - DNA, 25 bp, Homo sapien
gagggtggaacacacaatccctact

SEQ ID NO: 3417998 - DNA, 25 bp, Homo sapien
aaatccacacaaccctcaaggaggg

SEQ ID NO: 3417999 - DNA, 25 bp, Homo sapien
aatccctacttcagatatgatcgag

SEQ ID NO: 3418000 - DNA, 25 bp, Homo sapien
gccatgggcctggtctttaaaaaga

SEQ ID NO: 3418001 - DNA, 25 bp, Homo sapien
gaattggcccacgtgactatgaagg

SEQ ID NO: 3418002 - DNA, 25 bp, Homo sapien
aagaattgcctttcacttgcgagag

SEQ ID NO: 3418003 - DNA, 25 bp, Homo sapien
tagttccagagtaagtccaaaggct

SEQ ID NO: 3418004 - DNA, 25 bp, Homo sapien
agttggttggcaagctgacgaccca

SEQ ID NO: 3418005 - DNA, 25 bp, Homo sapien
gtattagtcagcattctctagcaaa

SEQ ID NO: 3418006 - DNA, 25 bp, Homo sapien
gtcagcattctctagcaaaacagaa

SEQ ID NO: 3418007 - DNA, 25 bp, Homo sapien
gattctgtattagtcagcattctct

SEQ ID NO: 3418008 - DNA, 25 bp, Homo sapien
ctagcaaaacagaatgtgcacacac

SEQ ID NO: 3418009 - DNA, 25 bp, Homo sapien
caagagcagcgtgacttttggacct

SEQ ID NO: 3418010 - DNA, 25 bp, Homo sapien
tttttgctgtgtggcgacacccagc

SEQ ID NO: 3418011 - DNA, 25 bp, Homo sapien
taactcggaactgcaggagatgccg

SEQ ID NO: 3418012 - DNA, 25 bp, Homo sapien
gagatgccgcagatgaatccctaag

SEQ ID NO: 3418013 - DNA, 25 bp, Homo sapien
aagcaggagaaacaatgtgtagcct

SEQ ID NO: 3418014 - DNA, 25 bp, Homo sapien
gcaactggtgcctagcaacagcgtc

SEQ ID NO: 3418015 - DNA, 25 bp, Homo sapien
aggcttctgagaccttctagggcca

SEQ ID NO: 3418016 - DNA, 25 bp, Homo sapien
gaagagttgctgtctgcgtgacata

SEQ ID NO: 3418017 - DNA, 25 bp, Homo sapien
ctttcctctgcagaggctctgaggt

SEQ ID NO: 3418018 - DNA, 25 bp, Homo sapien
ttcctctgcagaggctctgaggtcg

SEQ ID NO: 3418019 - DNA, 25 bp, Homo sapien
tctgaggtcggggagaggctgcagg

SEQ ID NO: 3418020 - DNA, 25 bp, Homo sapien
cagagctctgcagagaagccagccc

SEQ ID NO: 3418021 - DNA, 25 bp, Homo sapien
acccaagaagtcaggccgaggcgct

SEQ ID NO: 3418022 - DNA, 25 bp, Homo sapien
cttacatacccacctctcggaatga

SEQ ID NO: 3418023 - DNA, 25 bp, Homo sapien
cacctctcggaatgaatgagccgac

SEQ ID NO: 3418024 - DNA, 25 bp, Homo sapien
aatgagccgacaacccactacctgg

SEQ ID NO: 3418025 - DNA, 25 bp, Homo sapien
gatgctgtggggcagggccccaggg

SEQ ID NO: 3418026 - DNA, 25 bp, Homo sapien
gctgtggggcagggccccagggggc

SEQ ID NO: 3418027 - DNA, 25 bp, Homo sapien
atgctgtggggcagggccccagggg

SEQ ID NO: 3418028 - DNA, 25 bp, Homo sapien
tgctgtggggcagggccccaggggg

SEQ ID NO: 3418029 - DNA, 25 bp, Homo sapien
tagaatttcagggggtccgtgtagc

SEQ ID NO: 3418030 - DNA, 25 bp, Homo sapien
cgtaggcggtgcagtagctggtggc

SEQ ID NO: 3418031 - DNA, 25 bp, Homo sapien
tcacataaggggagacgacccccag

SEQ ID NO: 3418032 - DNA, 25 bp, Homo sapien
gtgtagccccccgaactcatcttca

SEQ ID NO: 3418033 - DNA, 25 bp, Homo sapien
tgtagccggtgcctacgtgactgcc

SEQ ID NO: 3418034 - DNA, 25 bp, Homo sapien
ctggcttggcatgagaccacgggct

SEQ ID NO: 3418035 - DNA, 25 bp, Homo sapien
gttgtctaaggcctccagactggct

SEQ ID NO: 3418036 - DNA, 25 bp, Homo sapien
gaaatttgatttgtagccggtgcct

SEQ ID NO: 3418037 - DNA, 25 bp, Homo sapien
ctggaaatggtcctgggcttgttcc

SEQ ID NO: 3418038 - DNA, 25 bp, Homo sapien
cgcactgggcttctcccgcccatag

SEQ ID NO: 3418039 - DNA, 25 bp, Homo sapien
ctgagctggtctggcgcatgctcca

SEQ ID NO: 3418040 - DNA, 25 bp, Homo sapien
gggatgcttgccgtcaggcacctcc

SEQ ID NO: 3418041 - DNA, 25 bp, Homo sapien
ccgcccatagcctgagctggtctgg

SEQ ID NO: 3418042 - DNA, 25 bp, Homo sapien
ctggtggagcagaggcacttccctg

SEQ ID NO: 3418043 - DNA, 25 bp, Homo sapien
tgctcctgggtgtcgaaatggacct

SEQ ID NO: 3418044 - DNA, 25 bp, Homo sapien
cccgtgatggcctgaggcccgtgct

SEQ ID NO: 3418045 - DNA, 25 bp, Homo sapien
ggctccagccccgtgatggcctgag

SEQ ID NO: 3418046 - DNA, 25 bp, Homo sapien
ctggctggtctagagggtccctgag

SEQ ID NO: 3418047 - DNA, 25 bp, Homo sapien
tgtactccgacgtcatgaagcgtgg

SEQ ID NO: 3418048 - DNA, 25 bp, Homo sapien
tagagggtccctgagatacttggaa

SEQ ID NO: 3418049 - DNA, 25 bp, Homo sapien
ttggaattgtactccgacgtcatga

SEQ ID NO: 3418050 - DNA, 25 bp, Homo sapien
cctgtgagggcggttggaagacaat

SEQ ID NO: 3418051 - DNA, 25 bp, Homo sapien
ctctggtgggactgtttggtgaagc

SEQ ID NO: 3418052 - DNA, 25 bp, Homo sapien
gcgccgatcgatttcttctgcaaga

SEQ ID NO: 3418053 - DNA, 25 bp, Homo sapien
ctcctttgcgccgatcgatttcttc

SEQ ID NO: 3418054 - DNA, 25 bp, Homo sapien
aagtctgacttggtgacactctggc

SEQ ID NO: 3418055 - DNA, 25 bp, Homo sapien
taggtgagtcttggggaggaagtct

SEQ ID NO: 3418056 - DNA, 25 bp, Homo sapien
ggaagtctgacttggtgacactctg

SEQ ID NO: 3418057 - DNA, 25 bp, Homo sapien
ggaggaagtctgacttggtgacact

SEQ ID NO: 3418058 - DNA, 25 bp, Homo sapien
tcctttcattccctcggctgaaggc

SEQ ID NO: 3418059 - DNA, 25 bp, Homo sapien
tttcccgcttggagcctctggccaa

SEQ ID NO: 3418060 - DNA, 25 bp, Homo sapien
gctgaaggctgtttcccgcttggag

SEQ ID NO: 3418061 - DNA, 25 bp, Homo sapien
tcattccctcggctgaaggctgttt

SEQ ID NO: 3418062 - DNA, 25 bp, Homo sapien
aaactgctggtgactcacgctgctg

SEQ ID NO: 3418063 - DNA, 25 bp, Homo sapien
tgggttctgggcagggagggggcac

SEQ ID NO: 3418064 - DNA, 25 bp, Homo sapien
ctgaaactgctggtgactcacgctg

SEQ ID NO: 3418065 - DNA, 25 bp, Homo sapien
tggtgactcacgctgctgggttctg

SEQ ID NO: 3418066 - DNA, 25 bp, Homo sapien
ggcaacgtttgtctgttgcatccga

SEQ ID NO: 3418067 - DNA, 25 bp, Homo sapien
acagtctcccggccaagcagggcaa

SEQ ID NO: 3418068 - DNA, 25 bp, Homo sapien
ttgtctgttgcatccgatgaagtgg

SEQ ID NO: 3418069 - DNA, 25 bp, Homo sapien
gccaagcagggcaacgtttgtctgt

SEQ ID NO: 3418070 - DNA, 25 bp, Homo sapien
gctccggacatacatggggttgtta

SEQ ID NO: 3418071 - DNA, 25 bp, Homo sapien
atcacaggggctccggacatacatg

SEQ ID NO: 3418072 - DNA, 25 bp, Homo sapien
gctgatccctgtcaggatcacaggg

SEQ ID NO: 3418073 - DNA, 25 bp, Homo sapien
ccttggttgtaggtggtcaggtatc

SEQ ID NO: 3418074 - DNA, 25 bp, Homo sapien
ttacacttcctttataccactccta

SEQ ID NO: 3418075 - DNA, 25 bp, Homo sapien
tgcccaggacagtcactcctaaccc

SEQ ID NO: 3418076 - DNA, 25 bp, Homo sapien
cactcctaacccagggaatgcacag

SEQ ID NO: 3418077 - DNA, 25 bp, Homo sapien
taccactcctataatgctttcccca

SEQ ID NO: 3418078 - DNA, 25 bp, Homo sapien
ccagtcagggctcagttaaagtcta

SEQ ID NO: 3418079 - DNA, 25 bp, Homo sapien
atttcaaatccgacccgtgcgcact

SEQ ID NO: 3418080 - DNA, 25 bp, Homo sapien
tgatgttgtgaggaaagcttgcgct

SEQ ID NO: 3418081 - DNA, 25 bp, Homo sapien
taacagctctcgctaactggctgca

SEQ ID NO: 3418082 - DNA, 25 bp, Homo sapien
tcttttcagtctcagttcaaacgtc

SEQ ID NO: 3418083 - DNA, 25 bp, Homo sapien
ctcttttcagtctcagttcaaacgt

SEQ ID NO: 3418084 - DNA, 25 bp, Homo sapien
cacctgacgctgaaacactctttgg

SEQ ID NO: 3418085 - DNA, 25 bp, Homo sapien
tccagagggtgcaaagacaagtaag

SEQ ID NO: 3418086 - DNA, 25 bp, Homo sapien
aggaatcagtgatgacaatcccggg

SEQ ID NO: 3418087 - DNA, 25 bp, Homo sapien
aactggagcggccactgtgctgagt

SEQ ID NO: 3418088 - DNA, 25 bp, Homo sapien
gtggggatgcaggtgccgcaggctc

SEQ ID NO: 3418089 - DNA, 25 bp, Homo sapien
gacccttggggatgttctcaaagta

SEQ ID NO: 3418090 - DNA, 25 bp, Homo sapien
gctgagggcgtagcctcctggcatc

SEQ ID NO: 3418091 - DNA, 25 bp, Homo sapien
ggatgccacctcgagtccagccttc

SEQ ID NO: 3418092 - DNA, 25 bp, Homo sapien
ttcatctctggatccgtccccgcat

SEQ ID NO: 3418093 - DNA, 25 bp, Homo sapien
tgaaccaccccagagccccttgctc

SEQ ID NO: 3418094 - DNA, 25 bp, Homo sapien
cccctctggatctgaaccaccccag

SEQ ID NO: 3418095 - DNA, 25 bp, Homo sapien
attcatctctggatccgtccccgca

SEQ ID NO: 3418096 - DNA, 25 bp, Homo sapien
ggcagggcatggaccttgtcttctt

SEQ ID NO: 3418097 - DNA, 25 bp, Homo sapien
cagggcatggaccttgtcttcttgt

SEQ ID NO: 3418098 - DNA, 25 bp, Homo sapien
caggcagggcatggaccttgtcttc

SEQ ID NO: 3418099 - DNA, 25 bp, Homo sapien
gaggagagtgttgggggtgttggca

SEQ ID NO: 3418100 - DNA, 25 bp, Homo sapien
tgctgtgaggtgtgttctggtagaa

SEQ ID NO: 3418101 - DNA, 25 bp, Homo sapien
gctgctgtgaggtgtgttctggtag

SEQ ID NO: 3418102 - DNA, 25 bp, Homo sapien
tggtagaaggggtcagctgaggtca

SEQ ID NO: 3418103 - DNA, 25 bp, Homo sapien
tgtgtgccacgcagcggctgctgtg

SEQ ID NO: 3418104 - DNA, 25 bp, Homo sapien
tggcccataacggttgcccacacaa

SEQ ID NO: 3418105 - DNA, 25 bp, Homo sapien
gcagggctggcccataacggttgcc

SEQ ID NO: 3418106 - DNA, 25 bp, Homo sapien
atctgtcaccccccacttggaaggg

SEQ ID NO: 3418107 - DNA, 25 bp, Homo sapien
aggcaggacttgcttaacccagggc

SEQ ID NO: 3418108 - DNA, 25 bp, Homo sapien
acagacagtagcctggctcctgtcc

SEQ ID NO: 3418109 - DNA, 25 bp, Homo sapien
tggctcctgtcccctaggattgaca

SEQ ID NO: 3418110 - DNA, 25 bp, Homo sapien
tgggggtacagacagtagcctggct

SEQ ID NO: 3418111 - DNA, 25 bp, Homo sapien
ctggctcctgtcccctaggattgac

SEQ ID NO: 3418112 - DNA, 25 bp, Homo sapien
ttcattaggaaagtagctgggcagg

SEQ ID NO: 3418113 - DNA, 25 bp, Homo sapien
tttcattaggaaagtagctgggcag

SEQ ID NO: 3418114 - DNA, 25 bp, Homo sapien
atttcattaggaaagtagctgggca

SEQ ID NO: 3418115 - DNA, 25 bp, Homo sapien
cagccaccctgatagtgatgtcaca

SEQ ID NO: 3418116 - DNA, 25 bp, Homo sapien
gccaccctgatagtgatgtcacact

SEQ ID NO: 3418117 - DNA, 25 bp, Homo sapien
tttccagccaccctgatagtgatgt

SEQ ID NO: 3418118 - DNA, 25 bp, Homo sapien
tccagccaccctgatagtgatgtca

SEQ ID NO: 3418119 - DNA, 25 bp, Homo sapien
tgctcaaggctgtgctgggtacagc

SEQ ID NO: 3418120 - DNA, 25 bp, Homo sapien
gccagcagtgctgctccacagaccc

SEQ ID NO: 3418121 - DNA, 25 bp, Homo sapien
ccaggcctgctgctcaaggctgtgc

SEQ ID NO: 3418122 - DNA, 25 bp, Homo sapien
tgggaccagctggagccacccacag

SEQ ID NO: 3418123 - DNA, 25 bp, Homo sapien
gcaacgcagtggtccataagggcca

SEQ ID NO: 3418124 - DNA, 25 bp, Homo sapien
aaaggtgcatcctgggggcaacgca

SEQ ID NO: 3418125 - DNA, 25 bp, Homo sapien
caggagagcttaatgaggttggtca

SEQ ID NO: 3418126 - DNA, 25 bp, Homo sapien
gcccttaggccacttgcaggagagc

SEQ ID NO: 3418127 - DNA, 25 bp, Homo sapien
ttgacctgcccatcacaaaggtcct

SEQ ID NO: 3418128 - DNA, 25 bp, Homo sapien
ggttgacctgcccatcacaaaggtc

SEQ ID NO: 3418129 - DNA, 25 bp, Homo sapien
gttgacctgcccatcacaaaggtcc

SEQ ID NO: 3418130 - DNA, 25 bp, Homo sapien
agcaggcatccagaagtttccacac

SEQ ID NO: 3418131 - DNA, 25 bp, Homo sapien
gagcaggcatccagaagtttccaca

SEQ ID NO: 3418132 - DNA, 25 bp, Homo sapien
agagcaggcatccagaagtttccac

SEQ ID NO: 3418133 - DNA, 25 bp, Homo sapien
aagagcaggcatccagaagtttcca

SEQ ID NO: 3418134 - DNA, 25 bp, Homo sapien
aacacggatgccagcccaaaaacca

SEQ ID NO: 3418135 - DNA, 25 bp, Homo sapien
aagcagcgcccggaaacacggatgc

SEQ ID NO: 3418136 - DNA, 25 bp, Homo sapien
gcaggtgggagagaacgggcaagca

SEQ ID NO: 3418137 - DNA, 25 bp, Homo sapien
caaaaaccagtcgtcagccccatct

SEQ ID NO: 3418138 - DNA, 25 bp, Homo sapien
aactgagtggctaaggccgggcacg

SEQ ID NO: 3418139 - DNA, 25 bp, Homo sapien
gcaaggacttcaggactaacctggc

SEQ ID NO: 3418140 - DNA, 25 bp, Homo sapien
caaggacttcaggactaacctggcc

SEQ ID NO: 3418141 - DNA, 25 bp, Homo sapien
ctgagtggctaaggccgggcacgat

SEQ ID NO: 3418142 - DNA, 25 bp, Homo sapien
ctactcattcgggaggacttcttgg

SEQ ID NO: 3418143 - DNA, 25 bp, Homo sapien
caagcagtttgagggaacattggct

SEQ ID NO: 3418144 - DNA, 25 bp, Homo sapien
gacctagggtataggagtctcagcc

SEQ ID NO: 3418145 - DNA, 25 bp, Homo sapien
ctcagagaccagaaaggtagggaat

SEQ ID NO: 3418146 - DNA, 25 bp, Homo sapien
ccggccggggccgccgccactgcca

SEQ ID NO: 3418147 - DNA, 25 bp, Homo sapien
cggccggggccgccgccactgccac

SEQ ID NO: 3418148 - DNA, 25 bp, Homo sapien
ggccggggccgccgccactgccacc

SEQ ID NO: 3418149 - DNA, 25 bp, Homo sapien
ccggggccgccgccactgccaccgc

SEQ ID NO: 3418150 - DNA, 25 bp, Homo sapien
gaactcctcgaagcggttgccgtag

SEQ ID NO: 3418151 - DNA, 25 bp, Homo sapien
gaagttgccctcgatccagaggcag

SEQ ID NO: 3418152 - DNA, 25 bp, Homo sapien
aggctctgcaactgcgcgaagtcgg

SEQ ID NO: 3418153 - DNA, 25 bp, Homo sapien
tcgagcttgttgaagtccagcgcca

SEQ ID NO: 3418154 - DNA, 25 bp, Homo sapien
tgggctcgtcgcgctccgccatgcg

SEQ ID NO: 3418155 - DNA, 25 bp, Homo sapien
ggaggccggggcgtgggctcgtcgc

SEQ ID NO: 3418156 - DNA, 25 bp, Homo sapien
gctcgtcgcgctccgccatgcgctc

SEQ ID NO: 3418157 - DNA, 25 bp, Homo sapien
gcgtgggctcgtcgcgctccgccat

SEQ ID NO: 3418158 - DNA, 25 bp, Homo sapien
accagcgccgcctatgagcaggtct

SEQ ID NO: 3418159 - DNA, 25 bp, Homo sapien
gaaccagcgccgcctatgagcaggt

SEQ ID NO: 3418160 - DNA, 25 bp, Homo sapien
gggaaccagcgccgcctatgagcag

SEQ ID NO: 3418161 - DNA, 25 bp, Homo sapien
gggcgcccagagcccgggaaccagc

SEQ ID NO: 3418162 - DNA, 25 bp, Homo sapien
tgtgcccggcaactcgccaaaagta

SEQ ID NO: 3418163 - DNA, 25 bp, Homo sapien
tgaagcccatcagccagaacatagg

SEQ ID NO: 3418164 - DNA, 25 bp, Homo sapien
tgacaattgcccacagatcagccag

SEQ ID NO: 3418165 - DNA, 25 bp, Homo sapien
gatcagccagggtatagtcagtcct

SEQ ID NO: 3418166 - DNA, 25 bp, Homo sapien
acacaggcacgcagtccatcccaga

SEQ ID NO: 3418167 - DNA, 25 bp, Homo sapien
ggccctcctcgcaagggcagtcctg

SEQ ID NO: 3418168 - DNA, 25 bp, Homo sapien
gtatgtacgatcagccctgatggag

SEQ ID NO: 3418169 - DNA, 25 bp, Homo sapien
ttcccacttctgtcccgggcaccag

SEQ ID NO: 3418170 - DNA, 25 bp, Homo sapien
cgtcccgttattgcttggatgagga

SEQ ID NO: 3418171 - DNA, 25 bp, Homo sapien
gctgtgcccatttaagggaaaggag

SEQ ID NO: 3418172 - DNA, 25 bp, Homo sapien
tctcttcccagcaaggttccaggca

SEQ ID NO: 3418173 - DNA, 25 bp, Homo sapien
tggaggcacggtggcttcttttcaa

SEQ ID NO: 3418174 - DNA, 25 bp, Homo sapien
caaactttccagaagggactggctt

SEQ ID NO: 3418175 - DNA, 25 bp, Homo sapien
tagccaaactcaaactttccagaag

SEQ ID NO: 3418176 - DNA, 25 bp, Homo sapien
actcaaactttccagaagggactgg

SEQ ID NO: 3418177 - DNA, 25 bp, Homo sapien
ttagccaaactcaaactttccagaa

SEQ ID NO: 3418178 - DNA, 25 bp, Homo sapien
ccgtgtctgtgtcctgcgtgtatgt

SEQ ID NO: 3418179 - DNA, 25 bp, Homo sapien
cgtgtcttgtgtagattgtgagccc

SEQ ID NO: 3418180 - DNA, 25 bp, Homo sapien
atctgtttcccgtgaagacgccccg

SEQ ID NO: 3418181 - DNA, 25 bp, Homo sapien
gaaggctgtcctgggttacgtcctg

SEQ ID NO: 3418182 - DNA, 25 bp, Homo sapien
cccgtgagcaaagtgtaattaccga

SEQ ID NO: 3418183 - DNA, 25 bp, Homo sapien
tgtgggtgccctagacttagtcctt

SEQ ID NO: 3418184 - DNA, 25 bp, Homo sapien
aggactccgaaggtgctacccgtga

SEQ ID NO: 3418185 - DNA, 25 bp, Homo sapien
taattaccgaatcctgactgcaagg

SEQ ID NO: 3418186 - DNA, 25 bp, Homo sapien
ctaccgtgtcacaagaaggcaggga

SEQ ID NO: 3418187 - DNA, 25 bp, Homo sapien
gcccaggtttgtgtcggtgcctccc

SEQ ID NO: 3418188 - DNA, 25 bp, Homo sapien
aggaaccccagcacgcgccagggaa

SEQ ID NO: 3418189 - DNA, 25 bp, Homo sapien
tccaaagaattgttgcggtaaactc

SEQ ID NO: 3418190 - DNA, 25 bp, Homo sapien
aaaacgctcgcggactctgatggtc

SEQ ID NO: 3418191 - DNA, 25 bp, Homo sapien
gggtaacctcgcaaagaccctggca

SEQ ID NO: 3418192 - DNA, 25 bp, Homo sapien
tttgttctgatgagaggcccaacgc

SEQ ID NO: 3418193 - DNA, 25 bp, Homo sapien
caagttgcccgatggttctctgaga

SEQ ID NO: 3418194 - DNA, 25 bp, Homo sapien
gtcgtgactcccctaacattgccag

SEQ ID NO: 3418195 - DNA, 25 bp, Homo sapien
aaaccactcttagctcgtgggccgt

SEQ ID NO: 3418196 - DNA, 25 bp, Homo sapien
tgcccaaacgctggtggctccagta

SEQ ID NO: 3418197 - DNA, 25 bp, Homo sapien
cagccctctgcttgatggtcgtgac

SEQ ID NO: 3418198 - DNA, 25 bp, Homo sapien
gtccaatttcttgccggaacggctg

SEQ ID NO: 3418199 - DNA, 25 bp, Homo sapien
taggagtgcttgtggatcccgacat

SEQ ID NO: 3418200 - DNA, 25 bp, Homo sapien
tgaggagtaggagtgcttgtggatc

SEQ ID NO: 3418201 - DNA, 25 bp, Homo sapien
tggatcccgacatgtccctgtccaa

SEQ ID NO: 3418202 - DNA, 25 bp, Homo sapien
actgagttctgtttcagcaccaagg

SEQ ID NO: 3418203 - DNA, 25 bp, Homo sapien
gcgtggccgacagctgtttcagcac

SEQ ID NO: 3418204 - DNA, 25 bp, Homo sapien
acaaggagccgcgtggccgacagct

SEQ ID NO: 3418205 - DNA, 25 bp, Homo sapien
tgagttctgtttcagcaccaaggac

SEQ ID NO: 3418206 - DNA, 25 bp, Homo sapien
gagggttgatcagggaggcattggc

SEQ ID NO: 3418207 - DNA, 25 bp, Homo sapien
gaatcactatgcacagtctctcgga

SEQ ID NO: 3418208 - DNA, 25 bp, Homo sapien
cagaggaaggcggaatcactatgca

SEQ ID NO: 3418209 - DNA, 25 bp, Homo sapien
ctgccatagcttcagctgagggttg

SEQ ID NO: 3418210 - DNA, 25 bp, Homo sapien
cctttttgtcctgagtcaggactgg

SEQ ID NO: 3418211 - DNA, 25 bp, Homo sapien
gccctttttgtcctgagtcaggact

SEQ ID NO: 3418212 - DNA, 25 bp, Homo sapien
ccctttttgtcctgagtcaggactg

SEQ ID NO: 3418213 - DNA, 25 bp, Homo sapien
tctgctcggagcagggccttacctg

SEQ ID NO: 3418214 - DNA, 25 bp, Homo sapien
tgaaggcctcgtctgctcggagcag

SEQ ID NO: 3418215 - DNA, 25 bp, Homo sapien
ctggcatggccatgaaggcctcgtc

SEQ ID NO: 3418216 - DNA, 25 bp, Homo sapien
ccttacctggctgtgtggcatacat

SEQ ID NO: 3418217 - DNA, 25 bp, Homo sapien
tggcatcttctaggcaaagggtctg

SEQ ID NO: 3418218 - DNA, 25 bp, Homo sapien
cacggaggccagcttgacgtgcttg

SEQ ID NO: 3418219 - DNA, 25 bp, Homo sapien
tctggagtccagtaccatccctggt

SEQ ID NO: 3418220 - DNA, 25 bp, Homo sapien
gccagcttgacgtgcttggcatctt

SEQ ID NO: 3418221 - DNA, 25 bp, Homo sapien
tgatgctaaaagcacgactccccag

SEQ ID NO: 3418222 - DNA, 25 bp, Homo sapien
gtgctcccaaacgaagagcctccag

SEQ ID NO: 3418223 - DNA, 25 bp, Homo sapien
agcccaggatgtgctcccaaacgaa

SEQ ID NO: 3418224 - DNA, 25 bp, Homo sapien
ctctctgatgctaaaagcacgactc

SEQ ID NO: 3418225 - DNA, 25 bp, Homo sapien
tcaacagcccaaggacaacgtgtgt

SEQ ID NO: 3418226 - DNA, 25 bp, Homo sapien
agcggagtggcatcgcagtgccaac

SEQ ID NO: 3418227 - DNA, 25 bp, Homo sapien
gctcttggccaaggttgcgggcaca

SEQ ID NO: 3418228 - DNA, 25 bp, Homo sapien
gcagtgccctcagaggcacccgagg

SEQ ID NO: 3418229 - DNA, 25 bp, Homo sapien
cagcgtgctccgcgggcgggcggga

SEQ ID NO: 3418230 - DNA, 25 bp, Homo sapien
ccggctccgcggctaggtgcagccc

SEQ ID NO: 3418231 - DNA, 25 bp, Homo sapien
gggaggcggctcggcgctgttcggc

SEQ ID NO: 3418232 - DNA, 25 bp, Homo sapien
cggctaggtgcagcccgctcggccc

SEQ ID NO: 3418233 - DNA, 25 bp, Homo sapien
atcggagccaaagggcacctcggag

SEQ ID NO: 3418234 - DNA, 25 bp, Homo sapien
cccggagtggatctccacgcctttt

SEQ ID NO: 3418235 - DNA, 25 bp, Homo sapien
gtgttgagtccggagctgacgccct

SEQ ID NO: 3418236 - DNA, 25 bp, Homo sapien
ctcgagccgccagcaagcggaaaac

SEQ ID NO: 3418237 - DNA, 25 bp, Homo sapien
gcctcgagcccaggccgggcgtttg

SEQ ID NO: 3418238 - DNA, 25 bp, Homo sapien
gggtgggtccgtccaagttgcagag

SEQ ID NO: 3418239 - DNA, 25 bp, Homo sapien
gacttcaatgttgggggcgcccgtc

SEQ ID NO: 3418240 - DNA, 25 bp, Homo sapien
agttgcagagaaagacttcaatgtt

SEQ ID NO: 3418241 - DNA, 25 bp, Homo sapien
gagagctccgaggactcgaaggcag

SEQ ID NO: 3418242 - DNA, 25 bp, Homo sapien
ctccaggagagctccgaggactcga

SEQ ID NO: 3418243 - DNA, 25 bp, Homo sapien
ggactcgaaggcaggaaagctcagg

SEQ ID NO: 3418244 - DNA, 25 bp, Homo sapien
aggagagctccgaggactcgaaggc

SEQ ID NO: 3418245 - DNA, 25 bp, Homo sapien
caccaccaatgaaatgtgccaggta

SEQ ID NO: 3418246 - DNA, 25 bp, Homo sapien
aggactcaccaccaatgaaatgtgc

SEQ ID NO: 3418247 - DNA, 25 bp, Homo sapien
aagagggaaagtagggacatggcca

SEQ ID NO: 3418248 - DNA, 25 bp, Homo sapien
gaggaggtcgatgcaagttgggagg

SEQ ID NO: 3418249 - DNA, 25 bp, Homo sapien
tatgggacctcactttacttcttag

SEQ ID NO: 3418250 - DNA, 25 bp, Homo sapien
ctgccattcactggctatgggacct

SEQ ID NO: 3418251 - DNA, 25 bp, Homo sapien
actggctatgggacctcactttact

SEQ ID NO: 3418252 - DNA, 25 bp, Homo sapien
ctttacttcttagtcatttatctga

SEQ ID NO: 3418253 - DNA, 25 bp, Homo sapien
ttgttcactcagagccagggcgctg

SEQ ID NO: 3418254 - DNA, 25 bp, Homo sapien
ctgggagctgtggcccacttgtgtt

SEQ ID NO: 3418255 - DNA, 25 bp, Homo sapien
gcagcttgttcactcagagccaggg

SEQ ID NO: 3418256 - DNA, 25 bp, Homo sapien
cctggtttgcgtgcatccccaggga

SEQ ID NO: 3418257 - DNA, 25 bp, Homo sapien
caatccagctaggttggcgctatca

SEQ ID NO: 3418258 - DNA, 25 bp, Homo sapien
taggttggcgctatcatcccacttc

SEQ ID NO: 3418259 - DNA, 25 bp, Homo sapien
cttgaacccttagaaggcattgtgc

SEQ ID NO: 3418260 - DNA, 25 bp, Homo sapien
cagtcacagcaatccagctaggttg

SEQ ID NO: 3418261 - DNA, 25 bp, Homo sapien
tggagattgacgtgtccctggccca

SEQ ID NO: 3418262 - DNA, 25 bp, Homo sapien
tagagggacctcactggttttagac

SEQ ID NO: 3418263 - DNA, 25 bp, Homo sapien
ttttagacccctgctaggtgaccag

SEQ ID NO: 3418264 - DNA, 25 bp, Homo sapien
tatacacctgtttccctagtcaggg

SEQ ID NO: 3418265 - DNA, 25 bp, Homo sapien
gactctctgaggtggcaacaatgtg

SEQ ID NO: 3418266 - DNA, 25 bp, Homo sapien
tgtatgtcatgggtcagctcaggca

SEQ ID NO: 3418267 - DNA, 25 bp, Homo sapien
ggataaaggccctctgccaggactg

SEQ ID NO: 3418268 - DNA, 25 bp, Homo sapien
ttctccctagggacaaggtgctcgg

SEQ ID NO: 3418269 - DNA, 25 bp, Homo sapien
ccacactccttgaggggtgcaccat

SEQ ID NO: 3418270 - DNA, 25 bp, Homo sapien
ggtgctttccctctcgatggcacag

SEQ ID NO: 3418271 - DNA, 25 bp, Homo sapien
gaaggttgaacatgctatatcctcc

SEQ ID NO: 3418272 - DNA, 25 bp, Homo sapien
tctgactctggtggtacccaaagtg

SEQ ID NO: 3418273 - DNA, 25 bp, Homo sapien
gacatccgttatcaaatgcctgcct

SEQ ID NO: 3418274 - DNA, 25 bp, Homo sapien
gtgttcagaattccaccaagtgaag

SEQ ID NO: 3418275 - DNA, 25 bp, Homo sapien
ccatccatcgccttggaacagttgt

SEQ ID NO: 3418276 - DNA, 25 bp, Homo sapien
tgaagtccttgtggacaggtaagtc

SEQ ID NO: 3418277 - DNA, 25 bp, Homo sapien
gacaggtaagtcctcattacattct

SEQ ID NO: 3418278 - DNA, 25 bp, Homo sapien
tgcccatccatcgccttggaacagt

SEQ ID NO: 3418279 - DNA, 25 bp, Homo sapien
tttatgattagcctctcctggccca

SEQ ID NO: 3418280 - DNA, 25 bp, Homo sapien
gaatacacaagaactggcaacaagg

SEQ ID NO: 3418281 - DNA, 25 bp, Homo sapien
gaaatggcctctaggaatactcaga

SEQ ID NO: 3418282 - DNA, 25 bp, Homo sapien
ggccctggtatcttcagtgagttag

SEQ ID NO: 3418283 - DNA, 25 bp, Homo sapien
ccagagcttaggaccagtggagccc

SEQ ID NO: 3418284 - DNA, 25 bp, Homo sapien
cccatggaaccacaccctgggagag

SEQ ID NO: 3418285 - DNA, 25 bp, Homo sapien
tggggggtccaaccctctgttcatc

SEQ ID NO: 3418286 - DNA, 25 bp, Homo sapien
ctgttcatcacccaactccagagaa

SEQ ID NO: 3418287 - DNA, 25 bp, Homo sapien
caagcccaagggatcagggatccag

SEQ ID NO: 3418288 - DNA, 25 bp, Homo sapien
ctgtgggttgcctggagaaggacag

SEQ ID NO: 3418289 - DNA, 25 bp, Homo sapien
gccaagcccaagggatcagggatcc

SEQ ID NO: 3418290 - DNA, 25 bp, Homo sapien
gcccaagggatcagggatccagcgc

SEQ ID NO: 3418291 - DNA, 25 bp, Homo sapien
cccatctctgggctcgccagccagt

SEQ ID NO: 3418292 - DNA, 25 bp, Homo sapien
ctctgggctcgccagccagttgttg

SEQ ID NO: 3418293 - DNA, 25 bp, Homo sapien
catctctgggctcgccagccagttg

SEQ ID NO: 3418294 - DNA, 25 bp, Homo sapien
ttcccccatctctgggctcgccagc

SEQ ID NO: 3418295 - DNA, 25 bp, Homo sapien
cccttgagtagtgggagtcgcctcc

SEQ ID NO: 3418296 - DNA, 25 bp, Homo sapien
ctgggctgaccgagatcagagttca

SEQ ID NO: 3418297 - DNA, 25 bp, Homo sapien
ttatagtctcctgcagcggcctgag

SEQ ID NO: 3418298 - DNA, 25 bp, Homo sapien
tgttgctgggccatttagggcttgc

SEQ ID NO: 3418299 - DNA, 25 bp, Homo sapien
caaggctccagtatccggtggccag

SEQ ID NO: 3418300 - DNA, 25 bp, Homo sapien
aggctccagtatccggtggccagcc

SEQ ID NO: 3418301 - DNA, 25 bp, Homo sapien
gctccagtatccggtggccagcctg

SEQ ID NO: 3418302 - DNA, 25 bp, Homo sapien
aaggctccagtatccggtggccagc

SEQ ID NO: 3418303 - DNA, 25 bp, Homo sapien
cagcggatgctgaatcagggaagag

SEQ ID NO: 3418304 - DNA, 25 bp, Homo sapien
gggcagcggatgctgaatcagggaa

SEQ ID NO: 3418305 - DNA, 25 bp, Homo sapien
tgcgagggggcagcggatgctgaat

SEQ ID NO: 3418306 - DNA, 25 bp, Homo sapien
cggatgctgaatcagggaagagtgg

SEQ ID NO: 3418307 - DNA, 25 bp, Homo sapien
gctgacttgcagtgggggtagaagg

SEQ ID NO: 3418308 - DNA, 25 bp, Homo sapien
ctgacttgcagtgggggtagaaggg

SEQ ID NO: 3418309 - DNA, 25 bp, Homo sapien
caggctgacttgcagtgggggtaga

SEQ ID NO: 3418310 - DNA, 25 bp, Homo sapien
aggctgacttgcagtgggggtagaa

SEQ ID NO: 3418311 - DNA, 25 bp, Homo sapien
gtcttagtgacactgctaatccggg

SEQ ID NO: 3418312 - DNA, 25 bp, Homo sapien
gacagcctgctcagtactgctgcca

SEQ ID NO: 3418313 - DNA, 25 bp, Homo sapien
aatccctagggagatgtcacaggca

SEQ ID NO: 3418314 - DNA, 25 bp, Homo sapien
agcacagacggtgcaatccctaggg

SEQ ID NO: 3418315 - DNA, 25 bp, Homo sapien
tacatggcggtagacaagacaagag

SEQ ID NO: 3418316 - DNA, 25 bp, Homo sapien
gtgccctcgcccggcctttcagcaa

SEQ ID NO: 3418317 - DNA, 25 bp, Homo sapien
cacccccaggatggtgagaagtcgt

SEQ ID NO: 3418318 - DNA, 25 bp, Homo sapien
cccaggatggtgagaagtcgtgcct

SEQ ID NO: 3418319 - DNA, 25 bp, Homo sapien
caggtctgctggctaaatttaggtg

SEQ ID NO: 3418320 - DNA, 25 bp, Homo sapien
gaggtatgctctgattacattccac

SEQ ID NO: 3418321 - DNA, 25 bp, Homo sapien
gggtggaaaaggcatgatacctctt

SEQ ID NO: 3418322 - DNA, 25 bp, Homo sapien
tacattccacatatcgtctctcatg

SEQ ID NO: 3418323 - DNA, 25 bp, Homo sapien
tttaagtattaagaggtatgctctg

SEQ ID NO: 3418324 - DNA, 25 bp, Homo sapien
caggcccagggctggagagaagccc

SEQ ID NO: 3418325 - DNA, 25 bp, Homo sapien
ggcccagggctggagagaagcccat

SEQ ID NO: 3418326 - DNA, 25 bp, Homo sapien
ggagcaggcccagggctggagagaa

SEQ ID NO: 3418327 - DNA, 25 bp, Homo sapien
agcaggcccagggctggagagaagc

SEQ ID NO: 3418328 - DNA, 25 bp, Homo sapien
attccgtcggtcacatggcccacag

SEQ ID NO: 3418329 - DNA, 25 bp, Homo sapien
gagggggttcctacagtcacttgag

SEQ ID NO: 3418330 - DNA, 25 bp, Homo sapien
tggcaaaagggctgagtctcgtaga

SEQ ID NO: 3418331 - DNA, 25 bp, Homo sapien
ggcagatgtggtgggattccgtcgg

SEQ ID NO: 3418332 - DNA, 25 bp, Homo sapien
tactggagcctgactgcatgccaag

SEQ ID NO: 3418333 - DNA, 25 bp, Homo sapien
caagggctaaaatcacagggctgga

SEQ ID NO: 3418334 - DNA, 25 bp, Homo sapien
gctacacggaggagttaataggcct

SEQ ID NO: 3418335 - DNA, 25 bp, Homo sapien
taggtcgtccgaaggaagcctcact

SEQ ID NO: 3418336 - DNA, 25 bp, Homo sapien
aaagtctccctgctgaggaccaacg

SEQ ID NO: 3418337 - DNA, 25 bp, Homo sapien
aacaaggttctacccaggccatggg

SEQ ID NO: 3418338 - DNA, 25 bp, Homo sapien
tggtggaggacccaaagtctccctg

SEQ ID NO: 3418339 - DNA, 25 bp, Homo sapien
ccaacgtccggtggccctagctggg

SEQ ID NO: 3418340 - DNA, 25 bp, Homo sapien
caggcaagggggatagcatctgcaa

SEQ ID NO: 3418341 - DNA, 25 bp, Homo sapien
aagccaaggaggtgttgggggctat

SEQ ID NO: 3418342 - DNA, 25 bp, Homo sapien
gaaggcaaaaggcggtggcagcagg

SEQ ID NO: 3418343 - DNA, 25 bp, Homo sapien
tatgtccccctcagtgcgggcaggg

SEQ ID NO: 3418344 - DNA, 25 bp, Homo sapien
acctcagagctcagtagggatttga

SEQ ID NO: 3418345 - DNA, 25 bp, Homo sapien
cttcaaaccagcttctcatcgaggg

SEQ ID NO: 3418346 - DNA, 25 bp, Homo sapien
aagagcaattgctgtaatccaatcg

SEQ ID NO: 3418347 - DNA, 25 bp, Homo sapien
tctgaatacactttgcattaagggc

SEQ ID NO: 3418348 - DNA, 25 bp, Homo sapien
gcctggcgtctggacaagccgactg

SEQ ID NO: 3418349 - DNA, 25 bp, Homo sapien
tgggcctgaacctcacacacccagt

SEQ ID NO: 3418350 - DNA, 25 bp, Homo sapien
ctcaattctgcctcgtttcaaagcc

SEQ ID NO: 3418351 - DNA, 25 bp, Homo sapien
ctgaagagtgaagagaggtgaggtt

SEQ ID NO: 3418352 - DNA, 25 bp, Homo sapien
ctggcaaaaggcaggcattgttttc

SEQ ID NO: 3418353 - DNA, 25 bp, Homo sapien
cctggcaaaaggcaggcattgtttt

SEQ ID NO: 3418354 - DNA, 25 bp, Homo sapien
attctcccagatgcgaggcagcagt

SEQ ID NO: 3418355 - DNA, 25 bp, Homo sapien
acggccttgccgcagagggacatgc

SEQ ID NO: 3418356 - DNA, 25 bp, Homo sapien
ccttgccgcagagggacatgcggat

SEQ ID NO: 3418357 - DNA, 25 bp, Homo sapien
tcccagatgcgaggcagcagtttct

SEQ ID NO: 3418358 - DNA, 25 bp, Homo sapien
gtcctccttggtgaacacaaagccc

SEQ ID NO: 3418359 - DNA, 25 bp, Homo sapien
cctccttggtgaacacaaagcccac

SEQ ID NO: 3418360 - DNA, 25 bp, Homo sapien
ctcagtgaggtcctccttggtgaac

SEQ ID NO: 3418361 - DNA, 25 bp, Homo sapien
cagtgaggtcctccttggtgaacac

SEQ ID NO: 3418362 - DNA, 25 bp, Homo sapien
ggcaccttattggccagcagcaggt

SEQ ID NO: 3418363 - DNA, 25 bp, Homo sapien
gggtaatggcaccagcacgggtggc

SEQ ID NO: 3418364 - DNA, 25 bp, Homo sapien
cacatggggtaatggcaccagcacg

SEQ ID NO: 3418365 - DNA, 25 bp, Homo sapien
taatggcaccagcacgggtggcagc

SEQ ID NO: 3418366 - DNA, 25 bp, Homo sapien
agtgatgatacctaaagcctggaaa

SEQ ID NO: 3418367 - DNA, 25 bp, Homo sapien
gagattttagtgatgatacctaaag

SEQ ID NO: 3418368 - DNA, 25 bp, Homo sapien
tttagtgatgatacctaaagcctgg

SEQ ID NO: 3418369 - DNA, 25 bp, Homo sapien
ctggagattttagtgatgataccta

SEQ ID NO: 3418370 - DNA, 25 bp, Homo sapien
tgccgttgtcgaacacctgctggat

SEQ ID NO: 3418371 - DNA, 25 bp, Homo sapien
tgagcatggtcagcagcgtggcttc

SEQ ID NO: 3418372 - DNA, 25 bp, Homo sapien
aagggggagatgttgagcatggtca

SEQ ID NO: 3418373 - DNA, 25 bp, Homo sapien
ttgtctcccgtcttgatcagctgcg

SEQ ID NO: 3418374 - DNA, 25 bp, Homo sapien
gggtagtggatctgcggacagacac

SEQ ID NO: 3418375 - DNA, 25 bp, Homo sapien
cagttgggtagtggatctgcggaca

SEQ ID NO: 3418376 - DNA, 25 bp, Homo sapien
ttgggtagtggatctgcggacagac

SEQ ID NO: 3418377 - DNA, 25 bp, Homo sapien
gcaacagttgggtagtggatctgcg

SEQ ID NO: 3418378 - DNA, 25 bp, Homo sapien
ggcagatggatcagccaagaaggcc

SEQ ID NO: 3418379 - DNA, 25 bp, Homo sapien
ccttggcttcatccttagctggggc

SEQ ID NO: 3418380 - DNA, 25 bp, Homo sapien
ttggcttcatccttagctggggctg

SEQ ID NO: 3418381 - DNA, 25 bp, Homo sapien
cacaggggctgcagccacaaaggca

SEQ ID NO: 3418382 - DNA, 25 bp, Homo sapien
atatcctcgtctgactcctccctcc

SEQ ID NO: 3418383 - DNA, 25 bp, Homo sapien
caatcccatatcctcgtctgactcc

SEQ ID NO: 3418384 - DNA, 25 bp, Homo sapien
acccaatcccatatcctcgtctgac

SEQ ID NO: 3418385 - DNA, 25 bp, Homo sapien
gagacccaatcccatatcctcgtct

SEQ ID NO: 3418386 - DNA, 25 bp, Homo sapien
ttttgcaaataaagctggctaagtt

SEQ ID NO: 3418387 - DNA, 25 bp, Homo sapien
aaataaagctggctaagttggttgc

SEQ ID NO: 3418388 - DNA, 25 bp, Homo sapien
tggctaagttggttgctttttggtg

SEQ ID NO: 3418389 - DNA, 25 bp, Homo sapien
aagttggttgctttttggtgattag

SEQ ID NO: 3418390 - DNA, 25 bp, Homo sapien
tgtcacaaccgtgggagcaagtgtt

SEQ ID NO: 3418391 - DNA, 25 bp, Homo sapien
ccactgtcacaaccgtgggagcaag

SEQ ID NO: 3418392 - DNA, 25 bp, Homo sapien
aaccccactgtcacaaccgtgggag

SEQ ID NO: 3418393 - DNA, 25 bp, Homo sapien
caaccgtgggagcaagtgttgtttt

SEQ ID NO: 3418394 - DNA, 25 bp, Homo sapien
ggagggtctctcctaaggctacgcg

SEQ ID NO: 3418395 - DNA, 25 bp, Homo sapien
gcctctgtaactctcccggtggtag

SEQ ID NO: 3418396 - DNA, 25 bp, Homo sapien
taaatcgtggcacctttaaaggagc

SEQ ID NO: 3418397 - DNA, 25 bp, Homo sapien
taggtcccctgattgaaccctgagt

SEQ ID NO: 3418398 - DNA, 25 bp, Homo sapien
gtgtgccgacctagctcatcctgtg

SEQ ID NO: 3418399 - DNA, 25 bp, Homo sapien
gctaatagtacctgctcctcaggga

SEQ ID NO: 3418400 - DNA, 25 bp, Homo sapien
caaacatctctgacgctgctaggca

SEQ ID NO: 3418401 - DNA, 25 bp, Homo sapien
gcaagggagcatgactctgacccaa

SEQ ID NO: 3418402 - DNA, 25 bp, Homo sapien
tgttctggaatctgatggtaatggt

SEQ ID NO: 3418403 - DNA, 25 bp, Homo sapien
aaaaggcaactgagtagacctaggg

SEQ ID NO: 3418404 - DNA, 25 bp, Homo sapien
ggtttgtcacctagcagaataaagt

SEQ ID NO: 3418405 - DNA, 25 bp, Homo sapien
aatctctgtaccatagcctgtgagg

SEQ ID NO: 3418406 - DNA, 25 bp, Homo sapien
tctgcagcaggagaggcctcgtgta

SEQ ID NO: 3418407 - DNA, 25 bp, Homo sapien
gtatctggctcttgggttatcaggg

SEQ ID NO: 3418408 - DNA, 25 bp, Homo sapien
gcctttcagagggacgggccttctc

SEQ ID NO: 3418409 - DNA, 25 bp, Homo sapien
tgcagcaggagaggcctcgtgtatc

SEQ ID NO: 3418410 - DNA, 25 bp, Homo sapien
gcttggccatcaggtaagtcacttc

SEQ ID NO: 3418411 - DNA, 25 bp, Homo sapien
cttggccatcaggtaagtcacttct

SEQ ID NO: 3418412 - DNA, 25 bp, Homo sapien
tcttctccatccaagtttgaaagcg

SEQ ID NO: 3418413 - DNA, 25 bp, Homo sapien
ctactcttctccatccaagtttgaa

SEQ ID NO: 3418414 - DNA, 25 bp, Homo sapien
cttctccatccaagtttgaaagcga

SEQ ID NO: 3418415 - DNA, 25 bp, Homo sapien
actcttctccatccaagtttgaaag

SEQ ID NO: 3418416 - DNA, 25 bp, Homo sapien
aacccctctccgccgccagcggtga

SEQ ID NO: 3418417 - DNA, 25 bp, Homo sapien
ccctctccgccgccagcggtgacca

SEQ ID NO: 3418418 - DNA, 25 bp, Homo sapien
tctccgccgccagcggtgaccatgg

SEQ ID NO: 3418419 - DNA, 25 bp, Homo sapien
aaacccctctccgccgccagcggtg

SEQ ID NO: 3418420 - DNA, 25 bp, Homo sapien
ggctccccaaggccccgattcacta

SEQ ID NO: 3418421 - DNA, 25 bp, Homo sapien
aaggccccgattcactaacgccgct

SEQ ID NO: 3418422 - DNA, 25 bp, Homo sapien
ggcgccggcgcgaaggccgcctccg

SEQ ID NO: 3418423 - DNA, 25 bp, Homo sapien
tcactaacgccgcttccgcagggcg

SEQ ID NO: 3418424 - DNA, 25 bp, Homo sapien
caatgctggacagtgtctgcgtggc

SEQ ID NO: 3418425 - DNA, 25 bp, Homo sapien
atgggaatgaccagggaagcacctg

SEQ ID NO: 3418426 - DNA, 25 bp, Homo sapien
ggaatgaccagggaagcacctgcaa

SEQ ID NO: 3418427 - DNA, 25 bp, Homo sapien
gaccagggaagcacctgcaatgctg

SEQ ID NO: 3418428 - DNA, 25 bp, Homo sapien
ccaatcccctccacggcatctccct

SEQ ID NO: 3418429 - DNA, 25 bp, Homo sapien
acaccaatcccctccacggcatctc

SEQ ID NO: 3418430 - DNA, 25 bp, Homo sapien
agaggtcctcacagataaggcagtt

SEQ ID NO: 3418431 - DNA, 25 bp, Homo sapien
ccgtggtcacaccaatcccctccac

SEQ ID NO: 3418432 - DNA, 25 bp, Homo sapien
tgccggaagcctgctgaatagggtt

SEQ ID NO: 3418433 - DNA, 25 bp, Homo sapien
gctgccggaagcctgctgaataggg

SEQ ID NO: 3418434 - DNA, 25 bp, Homo sapien
ctgccggaagcctgctgaatagggt

SEQ ID NO: 3418435 - DNA, 25 bp, Homo sapien
gccggaagcctgctgaatagggttc

SEQ ID NO: 3418436 - DNA, 25 bp, Homo sapien
gggctgaggatattctttcttcaca

SEQ ID NO: 3418437 - DNA, 25 bp, Homo sapien
tcttcacagccagactcagttttgt

SEQ ID NO: 3418438 - DNA, 25 bp, Homo sapien
aactcgggcggaagaaccaggagct

SEQ ID NO: 3418439 - DNA, 25 bp, Homo sapien
ctgcagacacagttggaggcaggaa

SEQ ID NO: 3418440 - DNA, 25 bp, Homo sapien
tgagaaggcaactccacaataaggc

SEQ ID NO: 3418441 - DNA, 25 bp, Homo sapien
gtaaacataagggtgataagggcag

SEQ ID NO: 3418442 - DNA, 25 bp, Homo sapien
ctgagagcccaactagctgccagaa

SEQ ID NO: 3418443 - DNA, 25 bp, Homo sapien
taagggcagtagtaccagccattgc

SEQ ID NO: 3418444 - DNA, 25 bp, Homo sapien
tgtggcattcgcaggcagtgtgggt

SEQ ID NO: 3418445 - DNA, 25 bp, Homo sapien
gctgccctggcacgccaggcatgcc

SEQ ID NO: 3418446 - DNA, 25 bp, Homo sapien
tgcagggtggtgtggcattcgcagg

SEQ ID NO: 3418447 - DNA, 25 bp, Homo sapien
aagtcacatgctctgcgcgggcgag

SEQ ID NO: 3418448 - DNA, 25 bp, Homo sapien
tcctccaggttcgtacaatccacga

SEQ ID NO: 3418449 - DNA, 25 bp, Homo sapien
gggctcatcgaatcccggctgcttt

SEQ ID NO: 3418450 - DNA, 25 bp, Homo sapien
agcaggtgcctgagacatgcccgag

SEQ ID NO: 3418451 - DNA, 25 bp, Homo sapien
cacgagaccagaggaagacagcagg

SEQ ID NO: 3418452 - DNA, 25 bp, Homo sapien
aaggtgctatcatctttctcaccca

SEQ ID NO: 3418453 - DNA, 25 bp, Homo sapien
gaatataatcccacagaagactcgg

SEQ ID NO: 3418454 - DNA, 25 bp, Homo sapien
cagtttataagggtctgcagcctct

SEQ ID NO: 3418455 - DNA, 25 bp, Homo sapien
cctctggctcaggaatataatccca

SEQ ID NO: 3418456 - DNA, 25 bp, Homo sapien
gccccggtggtcttcttggtcagtc

SEQ ID NO: 3418457 - DNA, 25 bp, Homo sapien
ctgccccggtggtcttcttggtcag

SEQ ID NO: 3418458 - DNA, 25 bp, Homo sapien
gtggtcttcttggtcagtcccctca

SEQ ID NO: 3418459 - DNA, 25 bp, Homo sapien
cggtggtcttcttggtcagtcccct

SEQ ID NO: 3418460 - DNA, 25 bp, Homo sapien
cctgaaagctgtcgcttttcacaca

SEQ ID NO: 3418461 - DNA, 25 bp, Homo sapien
gggcctgaaagctgtcgcttttcac

SEQ ID NO: 3418462 - DNA, 25 bp, Homo sapien
agctgtcgcttttcacacatcagct

SEQ ID NO: 3418463 - DNA, 25 bp, Homo sapien
tgaaagctgtcgcttttcacacatc

SEQ ID NO: 3418464 - DNA, 25 bp, Homo sapien
tcttcccagtggccgagaggctggc

SEQ ID NO: 3418465 - DNA, 25 bp, Homo sapien
cccttcttcccagtggccgagaggc

SEQ ID NO: 3418466 - DNA, 25 bp, Homo sapien
cttcttcccagtggccgagaggctg

SEQ ID NO: 3418467 - DNA, 25 bp, Homo sapien
ttcccagtggccgagaggctggcct

SEQ ID NO: 3418468 - DNA, 25 bp, Homo sapien
cgtggtgagattccagctgttcact

SEQ ID NO: 3418469 - DNA, 25 bp, Homo sapien
ctgcaggactgtggtagcgagttaa

SEQ ID NO: 3418470 - DNA, 25 bp, Homo sapien
actgtggtagcgagttaacctctct

SEQ ID NO: 3418471 - DNA, 25 bp, Homo sapien
ctttagcacaggctttggtcgtggt

SEQ ID NO: 3418472 - DNA, 25 bp, Homo sapien
cgattttgaatgtgccttgttgggc

SEQ ID NO: 3418473 - DNA, 25 bp, Homo sapien
tggtccaaaatagtggagaggaact

SEQ ID NO: 3418474 - DNA, 25 bp, Homo sapien
aatgggattcctatgtgaaagggct

SEQ ID NO: 3418475 - DNA, 25 bp, Homo sapien
tgctatgctctcgtggtccatccga

SEQ ID NO: 3418476 - DNA, 25 bp, Homo sapien
gcctccagcggtggagtccctgttg

SEQ ID NO: 3418477 - DNA, 25 bp, Homo sapien
tccagcggtggagtccctgttgctc

SEQ ID NO: 3418478 - DNA, 25 bp, Homo sapien
cagcggtggagtccctgttgctctg

SEQ ID NO: 3418479 - DNA, 25 bp, Homo sapien
ctccagcggtggagtccctgttgct

SEQ ID NO: 3418480 - DNA, 25 bp, Homo sapien
acctccagcccatgagatttcccat

SEQ ID NO: 3418481 - DNA, 25 bp, Homo sapien
gtccacagggaactggacaatgagc

SEQ ID NO: 3418482 - DNA, 25 bp, Homo sapien
tggacaatgagcttgggaaccccca

SEQ ID NO: 3418483 - DNA, 25 bp, Homo sapien
cacagggaactggacaatgagcttg

SEQ ID NO: 3418484 - DNA, 25 bp, Homo sapien
tccgaggagcccggcatcattcggg

SEQ ID NO: 3418485 - DNA, 25 bp, Homo sapien
cccagtggcggctccagggaaaatg

SEQ ID NO: 3418486 - DNA, 25 bp, Homo sapien
ggaaaatgtgtgtccgaggagcccg

SEQ ID NO: 3418487 - DNA, 25 bp, Homo sapien
cccggcatcattcggggaggaagca

SEQ ID NO: 3418488 - DNA, 25 bp, Homo sapien
gaattcaaatcagccccaagcaagc

SEQ ID NO: 3418489 - DNA, 25 bp, Homo sapien
aggaaagagtgcccaggaactcagg

SEQ ID NO: 3418490 - DNA, 25 bp, Homo sapien
tcaaatcagccccaagcaagctcag

SEQ ID NO: 3418491 - DNA, 25 bp, Homo sapien
ctgaattcaaatcagccccaagcaa

SEQ ID NO: 3418492 - DNA, 25 bp, Homo sapien
aaagaaagcagaggaccttatagct

SEQ ID NO: 3418493 - DNA, 25 bp, Homo sapien
cattccttgggccacgggaccagtc

SEQ ID NO: 3418494 - DNA, 25 bp, Homo sapien
gaccagtccccggtgtggccagaag

SEQ ID NO: 3418495 - DNA, 25 bp, Homo sapien
cactgcattccttgggccacgggac

SEQ ID NO: 3418496 - DNA, 25 bp, Homo sapien
ctgcagaggctcagtgggcctggtg

SEQ ID NO: 3418497 - DNA, 25 bp, Homo sapien
cagaggctcagtgggcctggtgctc

SEQ ID NO: 3418498 - DNA, 25 bp, Homo sapien
tgcagaggctcagtgggcctggtgc

SEQ ID NO: 3418499 - DNA, 25 bp, Homo sapien
gaggctcagtgggcctggtgctcac

SEQ ID NO: 3418500 - DNA, 25 bp, Homo sapien
gcgccgccggaacaccacgatcccg

SEQ ID NO: 3418501 - DNA, 25 bp, Homo sapien
tgcccacagaccagcgccgccggaa

SEQ ID NO: 3418502 - DNA, 25 bp, Homo sapien
tggccggtaggacgaggtcatcact

SEQ ID NO: 3418503 - DNA, 25 bp, Homo sapien
gaaagaggaagatggccggtaggac

SEQ ID NO: 3418504 - DNA, 25 bp, Homo sapien
ccattgtccacctggcatcgaatgc

SEQ ID NO: 3418505 - DNA, 25 bp, Homo sapien
ctcgagatgctactagcaggcaggc

SEQ ID NO: 3418506 - DNA, 25 bp, Homo sapien
tcgagatgctactagcaggcaggcc

SEQ ID NO: 3418507 - DNA, 25 bp, Homo sapien
ctccataagaccattgtccacctgg

SEQ ID NO: 3418508 - DNA, 25 bp, Homo sapien
cagccagatgatggccatctcagcg

SEQ ID NO: 3418509 - DNA, 25 bp, Homo sapien
ggcgcacgtagagcacgtactgcat

SEQ ID NO: 3418510 - DNA, 25 bp, Homo sapien
agcaggcctcgtgcgggttatagac

SEQ ID NO: 3418511 - DNA, 25 bp, Homo sapien
catctcagcgatcatgcagctcagc

SEQ ID NO: 3418512 - DNA, 25 bp, Homo sapien
cagtgaggtcgttgcaggaggtgta

SEQ ID NO: 3418513 - DNA, 25 bp, Homo sapien
tagatgaactcgatcaccaggatgg

SEQ ID NO: 3418514 - DNA, 25 bp, Homo sapien
tactgagtgagccagacgatgccca

SEQ ID NO: 3418515 - DNA, 25 bp, Homo sapien
cgatgcccacgatggcgtagatgaa

SEQ ID NO: 3418516 - DNA, 25 bp, Homo sapien
gacgcagaggacagtgatgcacaca

SEQ ID NO: 3418517 - DNA, 25 bp, Homo sapien
gatgcacacactgaggatgactacc

SEQ ID NO: 3418518 - DNA, 25 bp, Homo sapien
tctcagcttgacaaaggtgcggccc

SEQ ID NO: 3418519 - DNA, 25 bp, Homo sapien
cgcaggttgtaggtccgcaggttac

SEQ ID NO: 3418520 - DNA, 25 bp, Homo sapien
ctgcccacccagcccgctgactgac

SEQ ID NO: 3418521 - DNA, 25 bp, Homo sapien
tgggactgcccacccagcccgctga

SEQ ID NO: 3418522 - DNA, 25 bp, Homo sapien
agacagcaaagcccaccctgggact

SEQ ID NO: 3418523 - DNA, 25 bp, Homo sapien
gacagcaaagcccaccctgggactg

SEQ ID NO: 3418524 - DNA, 25 bp, Homo sapien
tttcccaattccttggatctgatac

SEQ ID NO: 3418525 - DNA, 25 bp, Homo sapien
gcgcgaccagctggtggcttgaccc

SEQ ID NO: 3418526 - DNA, 25 bp, Homo sapien
agcagaggaacactttgagccggcg

SEQ ID NO: 3418527 - DNA, 25 bp, Homo sapien
tggcttgaccctcctctaagcggtg

SEQ ID NO: 3418528 - DNA, 25 bp, Homo sapien
gggagtccttcgtccgcgtgcagca

SEQ ID NO: 3418529 - DNA, 25 bp, Homo sapien
gtccagcacggcgttgcgcttggcc

SEQ ID NO: 3418530 - DNA, 25 bp, Homo sapien
aagaactccgcaaagaggtaggcga

SEQ ID NO: 3418531 - DNA, 25 bp, Homo sapien
ccagcaatgatgtcggatggcacaa

SEQ ID NO: 3418532 - DNA, 25 bp, Homo sapien
tggcacaatgtcaaggtcccggaag

SEQ ID NO: 3418533 - DNA, 25 bp, Homo sapien
cagggggagccagaggtaaaggtga

SEQ ID NO: 3418534 - DNA, 25 bp, Homo sapien
cagaggtaaaggtgacctccagggt

SEQ ID NO: 3418535 - DNA, 25 bp, Homo sapien
cagggtccaagagagtgcgtggtca

SEQ ID NO: 3418536 - DNA, 25 bp, Homo sapien
gtccaagagagtgcgtggtcactgg

SEQ ID NO: 3418537 - DNA, 25 bp, Homo sapien
cccagaaagtccctagagtagtagt

SEQ ID NO: 3418538 - DNA, 25 bp, Homo sapien
tgtggttagaagtcctttgagggcc

SEQ ID NO: 3418539 - DNA, 25 bp, Homo sapien
aggcagccatgcacgacccagaaag

SEQ ID NO: 3418540 - DNA, 25 bp, Homo sapien
ccctagagtagtagtcacggaaagc

SEQ ID NO: 3418541 - DNA, 25 bp, Homo sapien
tgaattcttgaggtcgaggtacttg

SEQ ID NO: 3418542 - DNA, 25 bp, Homo sapien
gaggtcgaggtacttggtgtttctg

SEQ ID NO: 3418543 - DNA, 25 bp, Homo sapien
aattcttgaggtcgaggtacttggt

SEQ ID NO: 3418544 - DNA, 25 bp, Homo sapien
ttgaggtcgaggtacttggtgtttc

SEQ ID NO: 3418545 - DNA, 25 bp, Homo sapien
tgggagtcacttgatgggagtcaca

SEQ ID NO: 3418546 - DNA, 25 bp, Homo sapien
gtcacttgatgggagtcacagctgc

SEQ ID NO: 3418547 - DNA, 25 bp, Homo sapien
ggagtcacttgatgggagtcacagc

SEQ ID NO: 3418548 - DNA, 25 bp, Homo sapien
gatgggagtcacttgatgggagtca

SEQ ID NO: 3418549 - DNA, 25 bp, Homo sapien
gcttccgcatcaggtacatgggcca

SEQ ID NO: 3418550 - DNA, 25 bp, Homo sapien
ccagggcaaagagcatgtagtagca

SEQ ID NO: 3418551 - DNA, 25 bp, Homo sapien
accgagccagttggcagaggccgca

SEQ ID NO: 3418552 - DNA, 25 bp, Homo sapien
gacctctttgtagcggagcatctct

SEQ ID NO: 3418553 - DNA, 25 bp, Homo sapien
gaggtatagacgatgtccaccgcag

SEQ ID NO: 3418554 - DNA, 25 bp, Homo sapien
caccgcagtcatgttctcgtccagg

SEQ ID NO: 3418555 - DNA, 25 bp, Homo sapien
ggcgccggatggcaatggcattaca

SEQ ID NO: 3418556 - DNA, 25 bp, Homo sapien
tgtcttcctcgatggtgactccagg

SEQ ID NO: 3418557 - DNA, 25 bp, Homo sapien
ccgccacgtagaagggcgtttcata

SEQ ID NO: 3418558 - DNA, 25 bp, Homo sapien
tttcttcttgtcatggtccaccgcc

SEQ ID NO: 3418559 - DNA, 25 bp, Homo sapien
agggtcccccggatactgatcacca

SEQ ID NO: 3418560 - DNA, 25 bp, Homo sapien
cccggatactgatcaccactttctt

SEQ ID NO: 3418561 - DNA, 25 bp, Homo sapien
aggtgccgtggtgcccctccacggg

SEQ ID NO: 3418562 - DNA, 25 bp, Homo sapien
tcagcatcacccgtcaggtcagtca

SEQ ID NO: 3418563 - DNA, 25 bp, Homo sapien
aggcgctcagcatcacccgtcaggt

SEQ ID NO: 3418564 - DNA, 25 bp, Homo sapien
cacccgtcaggtcagtcagggcatc

SEQ ID NO: 3418565 - DNA, 25 bp, Homo sapien
ttcttgatgtactcagctgagagga

SEQ ID NO: 3418566 - DNA, 25 bp, Homo sapien
tcttgatgtactcagctgagaggac

SEQ ID NO: 3418567 - DNA, 25 bp, Homo sapien
cttcttgatgtactcagctgagagg

SEQ ID NO: 3418568 - DNA, 25 bp, Homo sapien
cagggagtggcccaccacaatcagg

SEQ ID NO: 3418569 - DNA, 25 bp, Homo sapien
tactgtgggcgcagaaggaaggaga

SEQ ID NO: 3418570 - DNA, 25 bp, Homo sapien
caaagcacttgagggtcggatactg

SEQ ID NO: 3418571 - DNA, 25 bp, Homo sapien
tcaggccgtagtgtttggttccgcg

SEQ ID NO: 3418572 - DNA, 25 bp, Homo sapien
gcagtcacgaactccttggaatact

SEQ ID NO: 3418573 - DNA, 25 bp, Homo sapien
cttggaatactccatcgcatcctca

SEQ ID NO: 3418574 - DNA, 25 bp, Homo sapien
acgaggtctttgcccagaaccacag

SEQ ID NO: 3418575 - DNA, 25 bp, Homo sapien
agaaccacagcagtcacgaactcct

SEQ ID NO: 3418576 - DNA, 25 bp, Homo sapien
tcgctgcaggacatccaggagctgt

SEQ ID NO: 3418577 - DNA, 25 bp, Homo sapien
tctgcggaagccttccagctgagag

SEQ ID NO: 3418578 - DNA, 25 bp, Homo sapien
tccaggagctgtctgcggaagcctt

SEQ ID NO: 3418579 - DNA, 25 bp, Homo sapien
cttggtgcttcgctgcaggacatcc

SEQ ID NO: 3418580 - DNA, 25 bp, Homo sapien
ggaccacgtggatgatgcggccggg

SEQ ID NO: 3418581 - DNA, 25 bp, Homo sapien
ctgagagggctatagttaggtcgct

SEQ ID NO: 3418582 - DNA, 25 bp, Homo sapien
tctgcagggtggttgtggaccacgt

SEQ ID NO: 3418583 - DNA, 25 bp, Homo sapien
gatgcatttggtggcccccacgatg

SEQ ID NO: 3418584 - DNA, 25 bp, Homo sapien
tcacagctgtcttcgaggaattccc

SEQ ID NO: 3418585 - DNA, 25 bp, Homo sapien
cacctacttttaaatggaccaccag

SEQ ID NO: 3418586 - DNA, 25 bp, Homo sapien
tgacaactgaggtgtgagctggcca

SEQ ID NO: 3418587 - DNA, 25 bp, Homo sapien
gagcacagtgggaaaggtctaccca

SEQ ID NO: 3418588 - DNA, 25 bp, Homo sapien
catggctggcgagatgatcacctca

SEQ ID NO: 3418589 - DNA, 25 bp, Homo sapien
acatagggcaggtgctcatgcagca

SEQ ID NO: 3418590 - DNA, 25 bp, Homo sapien
tgaaggccttgttgtcgccccagat

SEQ ID NO: 3418591 - DNA, 25 bp, Homo sapien
gatggcaaagtatgtgggctcctcc

SEQ ID NO: 3418592 - DNA, 25 bp, Homo sapien
caggagtcaggtccacctcggtagg

SEQ ID NO: 3418593 - DNA, 25 bp, Homo sapien
cagagcggtcttccccttgttgtag

SEQ ID NO: 3418594 - DNA, 25 bp, Homo sapien
tcggtagggctcaccatgaccttgg

SEQ ID NO: 3418595 - DNA, 25 bp, Homo sapien
ctgttgcggtggtctgcagtcggca

SEQ ID NO: 3418596 - DNA, 25 bp, Homo sapien
tagaagtccggatcttgtcagccgc

SEQ ID NO: 3418597 - DNA, 25 bp, Homo sapien
tcggcgaattccagcacctgaggac

SEQ ID NO: 3418598 - DNA, 25 bp, Homo sapien
tacagggactcagtgtccgagaggc

SEQ ID NO: 3418599 - DNA, 25 bp, Homo sapien
aagaggctgtcgatgaactcggcga

SEQ ID NO: 3418600 - DNA, 25 bp, Homo sapien
ggtctgtccttaaagctgcccggca

SEQ ID NO: 3418601 - DNA, 25 bp, Homo sapien
cttgcccatggcctgtcctggagca

SEQ ID NO: 3418602 - DNA, 25 bp, Homo sapien
cccatggagggcagtcaggctgagt

SEQ ID NO: 3418603 - DNA, 25 bp, Homo sapien
gctcagcagcgatgcctgtgcctga

SEQ ID NO: 3418604 - DNA, 25 bp, Homo sapien
aatacatgtgtcggggggcactgct

SEQ ID NO: 3418605 - DNA, 25 bp, Homo sapien
ggacgatgccggcctggaccacaga

SEQ ID NO: 3418606 - DNA, 25 bp, Homo sapien
ggccaggacgatgccggcctggacc

SEQ ID NO: 3418607 - DNA, 25 bp, Homo sapien
gagaatacatgtgtcggggggcact

SEQ ID NO: 3418608 - DNA, 25 bp, Homo sapien
agcagcttctgtaaacatgtacagc

SEQ ID NO: 3418609 - DNA, 25 bp, Homo sapien
gtacagcactgcaggccacctcggc

SEQ ID NO: 3418610 - DNA, 25 bp, Homo sapien
tgaacacatgattgggcggggggct

SEQ ID NO: 3418611 - DNA, 25 bp, Homo sapien
ggcttgcaagcccagaacacatcct

SEQ ID NO: 3418612 - DNA, 25 bp, Homo sapien
catgcccacattagaggtcccagga

SEQ ID NO: 3418613 - DNA, 25 bp, Homo sapien
cgcgatgggaacagatggtgcctaa

SEQ ID NO: 3418614 - DNA, 25 bp, Homo sapien
agttttccaaaacgggtcacagcag

SEQ ID NO: 3418615 - DNA, 25 bp, Homo sapien
cttccttaggaacggtgcacactca

SEQ ID NO: 3418616 - DNA, 25 bp, Homo sapien
cgcggcccgcgcgacagtcccggct

SEQ ID NO: 3418617 - DNA, 25 bp, Homo sapien
agcgcctccgtctcgtccaccacct

SEQ ID NO: 3418618 - DNA, 25 bp, Homo sapien
tcgaagaagcgctgcagcgcctccg

SEQ ID NO: 3418619 - DNA, 25 bp, Homo sapien
aagaagcgctgcagcgcctccgtct

SEQ ID NO: 3418620 - DNA, 25 bp, Homo sapien
cttcgaagaagcgctgcagcgcctc

SEQ ID NO: 3418621 - DNA, 25 bp, Homo sapien
agccccgggagcctgtcttggcggg

SEQ ID NO: 3418622 - DNA, 25 bp, Homo sapien
ttcagcggcggtgggtggtaaccgc

SEQ ID NO: 3418623 - DNA, 25 bp, Homo sapien
cagtcccaaggaagctgcgagttga

SEQ ID NO: 3418624 - DNA, 25 bp, Homo sapien
gggagcccaacttcagcggcggtgg

SEQ ID NO: 3418625 - DNA, 25 bp, Homo sapien
caaagtagagggtccccagactcgg

SEQ ID NO: 3418626 - DNA, 25 bp, Homo sapien
ggaagcaaagtagagggtccccaga

SEQ ID NO: 3418627 - DNA, 25 bp, Homo sapien
gcaaagtagagggtccccagactcg

SEQ ID NO: 3418628 - DNA, 25 bp, Homo sapien
aagcaaagtagagggtccccagact

SEQ ID NO: 3418629 - DNA, 25 bp, Homo sapien
tgaatggggttgtatcccgcttggg

SEQ ID NO: 3418630 - DNA, 25 bp, Homo sapien
ttgaatggggttgtatcccgcttgg

SEQ ID NO: 3418631 - DNA, 25 bp, Homo sapien
ggccttgaatggggttgtatcccgc

SEQ ID NO: 3418632 - DNA, 25 bp, Homo sapien
ccttgaatggggttgtatcccgctt

SEQ ID NO: 3418633 - DNA, 25 bp, Homo sapien
caagaggtacggaaggtcctagaag

SEQ ID NO: 3418634 - DNA, 25 bp, Homo sapien
ccctgtgcccgccgatctgggctgc

SEQ ID NO: 3418635 - DNA, 25 bp, Homo sapien
caggccctgtgcccgccgatctggg

SEQ ID NO: 3418636 - DNA, 25 bp, Homo sapien
ggccctgtgcccgccgatctgggct

SEQ ID NO: 3418637 - DNA, 25 bp, Homo sapien
gtgcccgccgatctgggctgccttg

SEQ ID NO: 3418638 - DNA, 25 bp, Homo sapien
gacagagacaggctgacacgggcca

SEQ ID NO: 3418639 - DNA, 25 bp, Homo sapien
atctgtgcctacacaccggcgtggc

SEQ ID NO: 3418640 - DNA, 25 bp, Homo sapien
acacaccggcgtggccccacgcagg

SEQ ID NO: 3418641 - DNA, 25 bp, Homo sapien
ggtccaacagcaccgaggccagcag

SEQ ID NO: 3418642 - DNA, 25 bp, Homo sapien
aagccaggtccaacagcaccgaggc

SEQ ID NO: 3418643 - DNA, 25 bp, Homo sapien
gcctatttccgacaaccccagttgc

SEQ ID NO: 3418644 - DNA, 25 bp, Homo sapien
tgagtgtcctctcagagcatctgaa

SEQ ID NO: 3418645 - DNA, 25 bp, Homo sapien
aacctgaaggatgccctagcttcag

SEQ ID NO: 3418646 - DNA, 25 bp, Homo sapien
gtggtagcagtcaagggacagccca

SEQ ID NO: 3418647 - DNA, 25 bp, Homo sapien
gccggggcccgaggatgctggccag

SEQ ID NO: 3418648 - DNA, 25 bp, Homo sapien
cggaaatcccgtcagccacgtggct

SEQ ID NO: 3418649 - DNA, 25 bp, Homo sapien
atgccccaaacatggcggaaatccc

SEQ ID NO: 3418650 - DNA, 25 bp, Homo sapien
catggcggaaatcccgtcagccacg

SEQ ID NO: 3418651 - DNA, 25 bp, Homo sapien
tccctaagcctgagaaagccaggtc

SEQ ID NO: 3418652 - DNA, 25 bp, Homo sapien
gtccaaggcctgacatggtcccctg

SEQ ID NO: 3418653 - DNA, 25 bp, Homo sapien
ccaggtcctattcaggctttaggtt

SEQ ID NO: 3418654 - DNA, 25 bp, Homo sapien
cctccatcccacatcaaggccttca

SEQ ID NO: 3418655 - DNA, 25 bp, Homo sapien
tgggccatatggctcgttctgatcc

SEQ ID NO: 3418656 - DNA, 25 bp, Homo sapien
gctcgttctgatcctcaagacctct

SEQ ID NO: 3418657 - DNA, 25 bp, Homo sapien
cggaacatgggccatatggctcgtt

SEQ ID NO: 3418658 - DNA, 25 bp, Homo sapien
aggaagcggaacatgggccatatgg

SEQ ID NO: 3418659 - DNA, 25 bp, Homo sapien
atcactggagcccaagcaggggtac

SEQ ID NO: 3418660 - DNA, 25 bp, Homo sapien
tccctgcaccctcattggatatgcc

SEQ ID NO: 3418661 - DNA, 25 bp, Homo sapien
ctcattggatatgcccatcaccctg

SEQ ID NO: 3418662 - DNA, 25 bp, Homo sapien
gctgagtgggaccatatatcctggg

SEQ ID NO: 3418663 - DNA, 25 bp, Homo sapien
aggaacgcaggagcacgaggcctgg

SEQ ID NO: 3418664 - DNA, 25 bp, Homo sapien
tccagggcaccgttgatgtcgtggc

SEQ ID NO: 3418665 - DNA, 25 bp, Homo sapien
tgctggtgtctatgttggagggctc

SEQ ID NO: 3418666 - DNA, 25 bp, Homo sapien
ctggtgtctatgttggagggctcca

SEQ ID NO: 3418667 - DNA, 25 bp, Homo sapien
ggctccagggcaccgttgatgtcgt

SEQ ID NO: 3418668 - DNA, 25 bp, Homo sapien
ctggagccaggcatcgcaggctgcc

SEQ ID NO: 3418669 - DNA, 25 bp, Homo sapien
cttgggctcagccttgatggggggc

SEQ ID NO: 3418670 - DNA, 25 bp, Homo sapien
cagttcagcggggtgccgtagcccg

SEQ ID NO: 3418671 - DNA, 25 bp, Homo sapien
gctgcccgtgggagtaggaggccga

SEQ ID NO: 3418672 - DNA, 25 bp, Homo sapien
tgcaggtgttcccatgaaggtaaac

SEQ ID NO: 3418673 - DNA, 25 bp, Homo sapien
cacagcatcgagatttttctagcac

SEQ ID NO: 3418674 - DNA, 25 bp, Homo sapien
tttctagcacttacgtcagccctca

SEQ ID NO: 3418675 - DNA, 25 bp, Homo sapien
tgtggccacagtacacgtcagctgg

SEQ ID NO: 3418676 - DNA, 25 bp, Homo sapien
taggcacatgatacagcagtgggca

SEQ ID NO: 3418677 - DNA, 25 bp, Homo sapien
aaaatcctgacggtagcagtggcca

SEQ ID NO: 3418678 - DNA, 25 bp, Homo sapien
aactgaggccatgggttaccgaggc

SEQ ID NO: 3418679 - DNA, 25 bp, Homo sapien
gagctcacgcaatcataggcacatg

SEQ ID NO: 3418680 - DNA, 25 bp, Homo sapien
gccccagaccgaaggccaggacttc

SEQ ID NO: 3418681 - DNA, 25 bp, Homo sapien
gggactcaaagactcccgccccaga

SEQ ID NO: 3418682 - DNA, 25 bp, Homo sapien
cttggggggcagttactagtgtcct

SEQ ID NO: 3418683 - DNA, 25 bp, Homo sapien
ttactagtgtccttgatgatggcac

SEQ ID NO: 3418684 - DNA, 25 bp, Homo sapien
gggagtaggcctcggagcccgagtc

SEQ ID NO: 3418685 - DNA, 25 bp, Homo sapien
gagcccgagtctgggggagagtccg

SEQ ID NO: 3418686 - DNA, 25 bp, Homo sapien
gtaggcctcggagcccgagtctggg

SEQ ID NO: 3418687 - DNA, 25 bp, Homo sapien
ccgagtctgggggagagtccggcag

SEQ ID NO: 3418688 - DNA, 25 bp, Homo sapien
tgtggtgaagatcagtgggcaccag

SEQ ID NO: 3418689 - DNA, 25 bp, Homo sapien
tcccacgtggcacagtgtctcaggg

SEQ ID NO: 3418690 - DNA, 25 bp, Homo sapien
ttcatgtacagatcccgctgcagga

SEQ ID NO: 3418691 - DNA, 25 bp, Homo sapien
ccctgccccatggcagcgtagtggg

SEQ ID NO: 3418692 - DNA, 25 bp, Homo sapien
acggtcccaggctcctgtttgatca

SEQ ID NO: 3418693 - DNA, 25 bp, Homo sapien
gcagggctgtcacggtcccaggctc

SEQ ID NO: 3418694 - DNA, 25 bp, Homo sapien
ctggcgggtgccaaggcggtgtctg

SEQ ID NO: 3418695 - DNA, 25 bp, Homo sapien
tgtctggacacgggcaatgctgaga

SEQ ID NO: 3418696 - DNA, 25 bp, Homo sapien
agggtcgcccacttgttctgctgat

SEQ ID NO: 3418697 - DNA, 25 bp, Homo sapien
tgtagttagcatcgtacagggtcgc

SEQ ID NO: 3418698 - DNA, 25 bp, Homo sapien
gccactgaggctgtcactgtcctgc

SEQ ID NO: 3418699 - DNA, 25 bp, Homo sapien
ttctgctgatgaggctgccacttga

SEQ ID NO: 3418700 - DNA, 25 bp, Homo sapien
ttctggcacacaaaggcgtcgtcgc

SEQ ID NO: 3418701 - DNA, 25 bp, Homo sapien
tcgtcgcccaccgaaaagttgaagc

SEQ ID NO: 3418702 - DNA, 25 bp, Homo sapien
aagttgaagcccttgtccgcatcca

SEQ ID NO: 3418703 - DNA, 25 bp, Homo sapien
tgtccgcatccacgcggtaggtgag

SEQ ID NO: 3418704 - DNA, 25 bp, Homo sapien
gcttgaggccctcgggcgtcttgac

SEQ ID NO: 3418705 - DNA, 25 bp, Homo sapien
gtcttgacgtacttgggctcgccca

SEQ ID NO: 3418706 - DNA, 25 bp, Homo sapien
gcccagcatgccgatgtacactgtc

SEQ ID NO: 3418707 - DNA, 25 bp, Homo sapien
gcagcttcagatagaagcagtcgag

SEQ ID NO: 3418708 - DNA, 25 bp, Homo sapien
ttaatggactggttcagggcctcca

SEQ ID NO: 3418709 - DNA, 25 bp, Homo sapien
cttgctccggtctgactgggactgc

SEQ ID NO: 3418710 - DNA, 25 bp, Homo sapien
gttgaagggccgcttgctccggtct

SEQ ID NO: 3418711 - DNA, 25 bp, Homo sapien
tgggactgctcgatgttaatggact

SEQ ID NO: 3418712 - DNA, 25 bp, Homo sapien
cagtcaccttcgtgacctgctcagg

SEQ ID NO: 3418713 - DNA, 25 bp, Homo sapien
ttagcggtggtctcgctgaagtgca

SEQ ID NO: 3418714 - DNA, 25 bp, Homo sapien
ctctggtccgggttgggcttgccct

SEQ ID NO: 3418715 - DNA, 25 bp, Homo sapien
gggcttgcccttcttacgcatgttg

SEQ ID NO: 3418716 - DNA, 25 bp, Homo sapien
agttctggttctgtgcatgagcctg

SEQ ID NO: 3418717 - DNA, 25 bp, Homo sapien
tgggcggccagcgtgtagttctggt

SEQ ID NO: 3418718 - DNA, 25 bp, Homo sapien
ccgcacaatgatgcgctctgagatc

SEQ ID NO: 3418719 - DNA, 25 bp, Homo sapien
acaatgatgcgctctgagatctggg

SEQ ID NO: 3418720 - DNA, 25 bp, Homo sapien
gtgcataagcgagcccatgaccttg

SEQ ID NO: 3418721 - DNA, 25 bp, Homo sapien
catgaccttgacattcccgtgcaca

SEQ ID NO: 3418722 - DNA, 25 bp, Homo sapien
tgtcgctctcgaactggcctgggtt

SEQ ID NO: 3418723 - DNA, 25 bp, Homo sapien
tcatccggccggtctgtgttgatgc

SEQ ID NO: 3418724 - DNA, 25 bp, Homo sapien
agccgcatgcgcgagatcctcttca

SEQ ID NO: 3418725 - DNA, 25 bp, Homo sapien
gtatctgtagtgcaccagccgcatg

SEQ ID NO: 3418726 - DNA, 25 bp, Homo sapien
ctggcggcgaactcgggcttgtatc

SEQ ID NO: 3418727 - DNA, 25 bp, Homo sapien
tcttcaattgctcggtggtgtccac

SEQ ID NO: 3418728 - DNA, 25 bp, Homo sapien
cggtgtctttcacagcctcaggcaa

SEQ ID NO: 3418729 - DNA, 25 bp, Homo sapien
ggcaaagaccatgtctccggtgtct

SEQ ID NO: 3418730 - DNA, 25 bp, Homo sapien
ttttcccattggcaaagaccatgtc

SEQ ID NO: 3418731 - DNA, 25 bp, Homo sapien
ttcaccaccaggaagttctctatgg

SEQ ID NO: 3418732 - DNA, 25 bp, Homo sapien
tcaggacaggtaagtgacaaacgtc

SEQ ID NO: 3418733 - DNA, 25 bp, Homo sapien
ggtaagtgacaaacgtcgtcctcac

SEQ ID NO: 3418734 - DNA, 25 bp, Homo sapien
ccagactcaggacaggtaagtgaca

SEQ ID NO: 3418735 - DNA, 25 bp, Homo sapien
gacaaacgtcgtcctcacaataaac

SEQ ID NO: 3418736 - DNA, 25 bp, Homo sapien
ccggtggacttgaggctgtcgagcc

SEQ ID NO: 3418737 - DNA, 25 bp, Homo sapien
caatgcgcgtctccaggttgtctgt

SEQ ID NO: 3418738 - DNA, 25 bp, Homo sapien
cagctcatcaatgcgcgtctccagg

SEQ ID NO: 3418739 - DNA, 25 bp, Homo sapien
gacttgaggctgtcgagccgccgca

SEQ ID NO: 3418740 - DNA, 25 bp, Homo sapien
ccgactgaactggctccctgcatgg

SEQ ID NO: 3418741 - DNA, 25 bp, Homo sapien
gggacgctgcccgcccgactgaact

SEQ ID NO: 3418742 - DNA, 25 bp, Homo sapien
gctgcccgcccgactgaactggctc

SEQ ID NO: 3418743 - DNA, 25 bp, Homo sapien
cgcccgactgaactggctccctgca

SEQ ID NO: 3418744 - DNA, 25 bp, Homo sapien
ctggctgatgcaggcctggtccgga

SEQ ID NO: 3418745 - DNA, 25 bp, Homo sapien
cctggtccggaaccacggacgatga

SEQ ID NO: 3418746 - DNA, 25 bp, Homo sapien
atgcaggcctggtccggaaccacgg

SEQ ID NO: 3418747 - DNA, 25 bp, Homo sapien
gctgatgcaggcctggtccggaacc

SEQ ID NO: 3418748 - DNA, 25 bp, Homo sapien
ctctctctaggacaaggctgtggtc

SEQ ID NO: 3418749 - DNA, 25 bp, Homo sapien
ggtgaccgttagagctggagccacc

SEQ ID NO: 3418750 - DNA, 25 bp, Homo sapien
ccacagaaaagggtgaccgttagag

SEQ ID NO: 3418751 - DNA, 25 bp, Homo sapien
tgccctctctctaggacaaggctgt

SEQ ID NO: 3418752 - DNA, 25 bp, Homo sapien
cgcaggctcagcacgtacagtgtgg

SEQ ID NO: 3418753 - DNA, 25 bp, Homo sapien
gacaggaagtggacacggcaaaaga

SEQ ID NO: 3418754 - DNA, 25 bp, Homo sapien
agacaggaagtggacacggcaaaag

SEQ ID NO: 3418755 - DNA, 25 bp, Homo sapien
gggcacaaggcctcactccccccag

SEQ ID NO: 3418756 - DNA, 25 bp, Homo sapien
acaggaagtggacacggcaaaagag

SEQ ID NO: 3418757 - DNA, 25 bp, Homo sapien
agggctgtatgcctggtagccccgt

SEQ ID NO: 3418758 - DNA, 25 bp, Homo sapien
aaagagggctgtatgcctggtagcc

SEQ ID NO: 3418759 - DNA, 25 bp, Homo sapien
cagcaaagagggctgtatgcctggt

SEQ ID NO: 3418760 - DNA, 25 bp, Homo sapien
gtatgcctggtagccccgtggtcaa

SEQ ID NO: 3418761 - DNA, 25 bp, Homo sapien
ggtggctggaacacatgtccaaggt

SEQ ID NO: 3418762 - DNA, 25 bp, Homo sapien
gggccaagactaggaccagtggtag

SEQ ID NO: 3418763 - DNA, 25 bp, Homo sapien
cagtggtagggttggtagtgggtga

SEQ ID NO: 3418764 - DNA, 25 bp, Homo sapien
gagaacatggccagggttaaagctg

SEQ ID NO: 3418765 - DNA, 25 bp, Homo sapien
ggagtggccaatgccattgactgaa

SEQ ID NO: 3418766 - DNA, 25 bp, Homo sapien
ctgaaagaccccaggacttggctct

SEQ ID NO: 3418767 - DNA, 25 bp, Homo sapien
tgactggcagaagggccatctggct

SEQ ID NO: 3418768 - DNA, 25 bp, Homo sapien
ggccagaggctccagactcttgtga

SEQ ID NO: 3418769 - DNA, 25 bp, Homo sapien
agccaggctcgggatcaaatacaag

SEQ ID NO: 3418770 - DNA, 25 bp, Homo sapien
gagacccagtatagcaccctcctgg

SEQ ID NO: 3418771 - DNA, 25 bp, Homo sapien
gatgatctatgtaaggctgcaggcc

SEQ ID NO: 3418772 - DNA, 25 bp, Homo sapien
caaatacaagccctgcctcggaggg

SEQ ID NO: 3418773 - DNA, 25 bp, Homo sapien
aggtgatggacatcgaattctccag

SEQ ID NO: 3418774 - DNA, 25 bp, Homo sapien
ggaggtgatggacatcgaattctcc

SEQ ID NO: 3418775 - DNA, 25 bp, Homo sapien
gaggtgatggacatcgaattctcca

SEQ ID NO: 3418776 - DNA, 25 bp, Homo sapien
gtgcagtggggtgccactactgaca

SEQ ID NO: 3418777 - DNA, 25 bp, Homo sapien
ctactgacagggatgtggtaggtga

SEQ ID NO: 3418778 - DNA, 25 bp, Homo sapien
cactactgacagggatgtggtaggt

SEQ ID NO: 3418779 - DNA, 25 bp, Homo sapien
gccactactgacagggatgtggtag

SEQ ID NO: 3418780 - DNA, 25 bp, Homo sapien
cagcaccacagacacgggggaggag

SEQ ID NO: 3418781 - DNA, 25 bp, Homo sapien
gcaccacagacacgggggaggagga

SEQ ID NO: 3418782 - DNA, 25 bp, Homo sapien
cacagcaccacagacacgggggagg

SEQ ID NO: 3418783 - DNA, 25 bp, Homo sapien
ctgcacagcaccacagacacggggg

SEQ ID NO: 3418784 - DNA, 25 bp, Homo sapien
tgggtgtggagactctgtggaaggc

SEQ ID NO: 3418785 - DNA, 25 bp, Homo sapien
ctggtgggtgtggagactctgtgga

SEQ ID NO: 3418786 - DNA, 25 bp, Homo sapien
ggtgggtgtggagactctgtggaag

SEQ ID NO: 3418787 - DNA, 25 bp, Homo sapien
ggtgtggagactctgtggaaggctc

SEQ ID NO: 3418788 - DNA, 25 bp, Homo sapien
gcagtgccacccggaagtggtaggt

SEQ ID NO: 3418789 - DNA, 25 bp, Homo sapien
gaaggacaggatggttattggccac

SEQ ID NO: 3418790 - DNA, 25 bp, Homo sapien
caggatggttattggccaccggtga

SEQ ID NO: 3418791 - DNA, 25 bp, Homo sapien
tggtaggtgaattcacggaaggaca

SEQ ID NO: 3418792 - DNA, 25 bp, Homo sapien
cctctgaactgcagttggcctgacc

SEQ ID NO: 3418793 - DNA, 25 bp, Homo sapien
tcagtcacacaggcggtagaagtgg

SEQ ID NO: 3418794 - DNA, 25 bp, Homo sapien
agaagtggaagtggtagtctgtggc

SEQ ID NO: 3418795 - DNA, 25 bp, Homo sapien
agagcctctgaactgcagttggcct

SEQ ID NO: 3418796 - DNA, 25 bp, Homo sapien
tttcaccagtctcgggtagggccag

SEQ ID NO: 3418797 - DNA, 25 bp, Homo sapien
ccaagtctcttagggctggatccga

SEQ ID NO: 3418798 - DNA, 25 bp, Homo sapien
caaaagggttggctccagtctcaaa

SEQ ID NO: 3418799 - DNA, 25 bp, Homo sapien
taaagcttagaagtccgagtctggc

SEQ ID NO: 3418800 - DNA, 25 bp, Homo sapien
aaagctatttgcatctgcccaccag

SEQ ID NO: 3418801 - DNA, 25 bp, Homo sapien
gctcagagagaatgatgtggtcact

SEQ ID NO: 3418802 - DNA, 25 bp, Homo sapien
tgatcactgtgagctccagacgctc

SEQ ID NO: 3418803 - DNA, 25 bp, Homo sapien
ctgtgagctccagacgctcccagga

SEQ ID NO: 3418804 - DNA, 25 bp, Homo sapien
cctggatgtagcctcggaatgcacc

SEQ ID NO: 3418805 - DNA, 25 bp, Homo sapien
cctatgtcaacggaaccaaattggg

SEQ ID NO: 3418806 - DNA, 25 bp, Homo sapien
gaggtggcagcataccacagggcaa

SEQ ID NO: 3418807 - DNA, 25 bp, Homo sapien
cctatcctgaggacaagtgctttga

SEQ ID NO: 3418808 - DNA, 25 bp, Homo sapien
gaagggagggatgacctgctggacc

SEQ ID NO: 3418809 - DNA, 25 bp, Homo sapien
tgactacaggaacaaacgccaaagg

SEQ ID NO: 3418810 - DNA, 25 bp, Homo sapien
ggaggccctatgtacagcttgaagc

SEQ ID NO: 3418811 - DNA, 25 bp, Homo sapien
cttctaagggtgcacggtatgggca

SEQ ID NO: 3418812 - DNA, 25 bp, Homo sapien
gagaagaactgggagttaactggga

SEQ ID NO: 3418813 - DNA, 25 bp, Homo sapien
agtagggggcgctctatgcacacgc

SEQ ID NO: 3418814 - DNA, 25 bp, Homo sapien
gaagtagggggcgctctatgcacac

SEQ ID NO: 3418815 - DNA, 25 bp, Homo sapien
tagggggcgctctatgcacacgcag

SEQ ID NO: 3418816 - DNA, 25 bp, Homo sapien
tatatgtatatttacttcagaagaa

SEQ ID NO: 3418817 - DNA, 25 bp, Homo sapien
tatatatgtatatttacttcagaag

SEQ ID NO: 3418818 - DNA, 25 bp, Homo sapien
tatgtatatttacttcagaagaaac

SEQ ID NO: 3418819 - DNA, 25 bp, Homo sapien
atgtatatttacttcagaagaaacg

SEQ ID NO: 3418820 - DNA, 25 bp, Homo sapien
aaacttctctgggaacccacatcgg

SEQ ID NO: 3418821 - DNA, 25 bp, Homo sapien
ttctattgtttctaggacaaacttc

SEQ ID NO: 3418822 - DNA, 25 bp, Homo sapien
tctctgggaacccacatcggtccat

SEQ ID NO: 3418823 - DNA, 25 bp, Homo sapien
gtttctaggacaaacttctctggga

SEQ ID NO: 3418824 - DNA, 25 bp, Homo sapien
gggtggcctgacgttcagccgcctt

SEQ ID NO: 3418825 - DNA, 25 bp, Homo sapien
tccctccagggagaacagagtctct

SEQ ID NO: 3418826 - DNA, 25 bp, Homo sapien
gcgcgtagtgcaggctgcgtcccct

SEQ ID NO: 3418827 - DNA, 25 bp, Homo sapien
gagtctctcagcgaccctggcgtac

SEQ ID NO: 3418828 - DNA, 25 bp, Homo sapien
aagagaggctcggagcttacgcgac

SEQ ID NO: 3418829 - DNA, 25 bp, Homo sapien
ttgactgcgaatcccgcgcactcca

SEQ ID NO: 3418830 - DNA, 25 bp, Homo sapien
aaagtggcgggacctcttgactgcg

SEQ ID NO: 3418831 - DNA, 25 bp, Homo sapien
ctggcccaaggctcacagggggaaa

SEQ ID NO: 3418832 - DNA, 25 bp, Homo sapien
tggtgttatctcaccaacttcatgc

SEQ ID NO: 3418833 - DNA, 25 bp, Homo sapien
tgttatctcaccaacttcatgcctt

SEQ ID NO: 3418834 - DNA, 25 bp, Homo sapien
ggtgttatctcaccaacttcatgcc

SEQ ID NO: 3418835 - DNA, 25 bp, Homo sapien
actggtgttatctcaccaacttcat

SEQ ID NO: 3418836 - DNA, 25 bp, Homo sapien
gctcatagaggcatcaatggccacc

SEQ ID NO: 3418837 - DNA, 25 bp, Homo sapien
aatggccaccttacggccaaagtag

SEQ ID NO: 3418838 - DNA, 25 bp, Homo sapien
ggcgaacagcaatcaggaactgata

SEQ ID NO: 3418839 - DNA, 25 bp, Homo sapien
ccaccctggcgaacagcaatcagga

SEQ ID NO: 3418840 - DNA, 25 bp, Homo sapien
gccgctcactgcgtttggccagctc

SEQ ID NO: 3418841 - DNA, 25 bp, Homo sapien
agcccgccgctcactgcgtttggcc

SEQ ID NO: 3418842 - DNA, 25 bp, Homo sapien
ccgccgctcactgcgtttggccagc

SEQ ID NO: 3418843 - DNA, 25 bp, Homo sapien
cgctcactgcgtttggccagctcgc

SEQ ID NO: 3418844 - DNA, 25 bp, Homo sapien
caataccccggatactctcacagta

SEQ ID NO: 3418845 - DNA, 25 bp, Homo sapien
cctcactgggtgcatcaagataagg

SEQ ID NO: 3418846 - DNA, 25 bp, Homo sapien
taccccggatactctcacagtagtc

SEQ ID NO: 3418847 - DNA, 25 bp, Homo sapien
tcactgggtgcatcaagataaggga

SEQ ID NO: 3418848 - DNA, 25 bp, Homo sapien
cttgggttctggctccttgcgctta

SEQ ID NO: 3418849 - DNA, 25 bp, Homo sapien
ttgggttctggctccttgcgcttag

SEQ ID NO: 3418850 - DNA, 25 bp, Homo sapien
gggttctggctccttgcgcttagct

SEQ ID NO: 3418851 - DNA, 25 bp, Homo sapien
tgggttctggctccttgcgcttagc

SEQ ID NO: 3418852 - DNA, 25 bp, Homo sapien
tagctcttaagggtacaagacggca

SEQ ID NO: 3418853 - DNA, 25 bp, Homo sapien
ttggccagccaggaaatcatttctg

SEQ ID NO: 3418854 - DNA, 25 bp, Homo sapien
tgaaaagggtcacgctagaaaagcc

SEQ ID NO: 3418855 - DNA, 25 bp, Homo sapien
gaaaagcacagtctaggtccaccat

SEQ ID NO: 3418856 - DNA, 25 bp, Homo sapien
tagacacaaattacatagcaagttc

SEQ ID NO: 3418857 - DNA, 25 bp, Homo sapien
cacagccagtaatcagtcacaaaca

SEQ ID NO: 3418858 - DNA, 25 bp, Homo sapien
gcaagttcgagtttctgcccaccca

SEQ ID NO: 3418859 - DNA, 25 bp, Homo sapien
caagacacagccagtaatcagtcac

SEQ ID NO: 3418860 - DNA, 25 bp, Homo sapien
acaaaaacagcgcatgaaaaccagt

SEQ ID NO: 3418861 - DNA, 25 bp, Homo sapien
aaagtctcaactcagctgattgcca

SEQ ID NO: 3418862 - DNA, 25 bp, Homo sapien
aaacagcgcatgaaaaccagtgtct

SEQ ID NO: 3418863 - DNA, 25 bp, Homo sapien
ccagtgtcttattccaaagtctcaa

SEQ ID NO: 3418864 - DNA, 25 bp, Homo sapien
taaaacgtcagacattcaaatgggc

SEQ ID NO: 3418865 - DNA, 25 bp, Homo sapien
ggctccctacctgtttaatctgtca

SEQ ID NO: 3418866 - DNA, 25 bp, Homo sapien
ggccctgacaggaatgctaaaacgt

SEQ ID NO: 3418867 - DNA, 25 bp, Homo sapien
gacattgccagcttaaatttcggac

SEQ ID NO: 3418868 - DNA, 25 bp, Homo sapien
gattataagcatacaccaccgcgcc

SEQ ID NO: 3418869 - DNA, 25 bp, Homo sapien
tggcctctctttacttttaaactca

SEQ ID NO: 3418870 - DNA, 25 bp, Homo sapien
catttctagtttccaaatagtctcc

SEQ ID NO: 3418871 - DNA, 25 bp, Homo sapien
actcatttctagtttccaaatagtc

SEQ ID NO: 3418872 - DNA, 25 bp, Homo sapien
gacagagcctccacttagttttggg

SEQ ID NO: 3418873 - DNA, 25 bp, Homo sapien
ggaatatgactcaggagcctcctag

SEQ ID NO: 3418874 - DNA, 25 bp, Homo sapien
gatagggtcagatgcaccacccatg

SEQ ID NO: 3418875 - DNA, 25 bp, Homo sapien
tcaaggagatgagcgtcctaaggca

SEQ ID NO: 3418876 - DNA, 25 bp, Homo sapien
tgaactcttaggcactatcccatgg

SEQ ID NO: 3418877 - DNA, 25 bp, Homo sapien
tgtcaagtgcacagcaatgctcagc

SEQ ID NO: 3418878 - DNA, 25 bp, Homo sapien
aaagagctgacagatgagttccggg

SEQ ID NO: 3418879 - DNA, 25 bp, Homo sapien
ctttgcctaggactgtggacttccc

SEQ ID NO: 3418880 - DNA, 25 bp, Homo sapien
attttacctctagctagctaaagag

SEQ ID NO: 3418881 - DNA, 25 bp, Homo sapien
cggccgctggcgtacataagggatt

SEQ ID NO: 3418882 - DNA, 25 bp, Homo sapien
cagtcctagggactcgaaagtcggg

SEQ ID NO: 3418883 - DNA, 25 bp, Homo sapien
cgaggtcttcagctattccgcggag

SEQ ID NO: 3418884 - DNA, 25 bp, Homo sapien
gaatggcatacacttagcgaggacc

SEQ ID NO: 3418885 - DNA, 25 bp, Homo sapien
ctgcagccccgagcctcaggtctct

SEQ ID NO: 3418886 - DNA, 25 bp, Homo sapien
cccgagcctcaggtctctgggcggg

SEQ ID NO: 3418887 - DNA, 25 bp, Homo sapien
cagccccgagcctcaggtctctggg

SEQ ID NO: 3418888 - DNA, 25 bp, Homo sapien
gccccgagcctcaggtctctgggcg

SEQ ID NO: 3418889 - DNA, 25 bp, Homo sapien
atgaaaaggcgggagagaggcctgg

SEQ ID NO: 3418890 - DNA, 25 bp, Homo sapien
ctgttgcccggtgattgggtgtcct

SEQ ID NO: 3418891 - DNA, 25 bp, Homo sapien
cgcacacacaaacaaagggtcccgc

SEQ ID NO: 3418892 - DNA, 25 bp, Homo sapien
ctgcggatgcgggatgaaaaggcgg

SEQ ID NO: 3418893 - DNA, 25 bp, Homo sapien
gtcatcagccactacgccgggcagg

SEQ ID NO: 3418894 - DNA, 25 bp, Homo sapien
ctcagggtgcgaggagcggtggcta

SEQ ID NO: 3418895 - DNA, 25 bp, Homo sapien
gctagtgatcgaccgtaaggtgtac

SEQ ID NO: 3418896 - DNA, 25 bp, Homo sapien
taaggtgtacaacatcagcgagttc

SEQ ID NO: 3418897 - DNA, 25 bp, Homo sapien
ctacttcgggcagcacaattggcgg

SEQ ID NO: 3418898 - DNA, 25 bp, Homo sapien
gcccaagagaccgtaaatatgctgt

SEQ ID NO: 3418899 - DNA, 25 bp, Homo sapien
aacacctaagggtcaggagacgcta

SEQ ID NO: 3418900 - DNA, 25 bp, Homo sapien
ggagacgctaggatcatcactcaag

SEQ ID NO: 3418901 - DNA, 25 bp, Homo sapien
gaagatctgggacctacctacccag

SEQ ID NO: 3418902 - DNA, 25 bp, Homo sapien
cattccccgggcaatctgaagatct

SEQ ID NO: 3418903 - DNA, 25 bp, Homo sapien
gaaagttacattaaaggcccagcaa

SEQ ID NO: 3418904 - DNA, 25 bp, Homo sapien
aaatgcttacaacaacgcctagagg

SEQ ID NO: 3418905 - DNA, 25 bp, Homo sapien
tgtagaaagataactccagaggctg

SEQ ID NO: 3418906 - DNA, 25 bp, Homo sapien
tgtactgtgatcagatccatggtgt

SEQ ID NO: 3418907 - DNA, 25 bp, Homo sapien
ccgtaaagcaggtgtactgtgatca

SEQ ID NO: 3418908 - DNA, 25 bp, Homo sapien
tggaggaggcttggacatccgtaaa

SEQ ID NO: 3418909 - DNA, 25 bp, Homo sapien
gcagaaccagggagtatctcacaga

SEQ ID NO: 3418910 - DNA, 25 bp, Homo sapien
taaaagggagcacgtatgggtggcc

SEQ ID NO: 3418911 - DNA, 25 bp, Homo sapien
taatgaacatttgtaaagggtgtgg

SEQ ID NO: 3418912 - DNA, 25 bp, Homo sapien
ccagcacagtaccagccagggtagg

SEQ ID NO: 3418913 - DNA, 25 bp, Homo sapien
tgcgctcgggagtgtccctgccttc

SEQ ID NO: 3418914 - DNA, 25 bp, Homo sapien
tcagccctcccgctatggacttttg

SEQ ID NO: 3418915 - DNA, 25 bp, Homo sapien
ttcctggcggaggatccctggcttc

SEQ ID NO: 3418916 - DNA, 25 bp, Homo sapien
agacggctgcctcccagccggtgtg

SEQ ID NO: 3418917 - DNA, 25 bp, Homo sapien
tcggtgcgcaggttatgcttctgaa

SEQ ID NO: 3418918 - DNA, 25 bp, Homo sapien
tgcatcttctccagcgtagtgcccg

SEQ ID NO: 3418919 - DNA, 25 bp, Homo sapien
taaaccttgcggtcaatgaccagcc

SEQ ID NO: 3418920 - DNA, 25 bp, Homo sapien
ccagctgaaggtgggcaccgacacc

SEQ ID NO: 3418921 - DNA, 25 bp, Homo sapien
gagagtaacctcgagtgcagacgga

SEQ ID NO: 3418922 - DNA, 25 bp, Homo sapien
cagagaggcccacaacctttaggag

SEQ ID NO: 3418923 - DNA, 25 bp, Homo sapien
gagccattgagttgaacgcccgaga

SEQ ID NO: 3418924 - DNA, 25 bp, Homo sapien
tctagtgctgctaaatccaccggct

SEQ ID NO: 3418925 - DNA, 25 bp, Homo sapien
aacagttgggcatcctagacctcca

SEQ ID NO: 3418926 - DNA, 25 bp, Homo sapien
agggtcgggcctacacagcttagag

SEQ ID NO: 3418927 - DNA, 25 bp, Homo sapien
aaatagcatcacaaacccactgggc

SEQ ID NO: 3418928 - DNA, 25 bp, Homo sapien
acaacacttagtggatgagcccagt

SEQ ID NO: 3418929 - DNA, 25 bp, Homo sapien
cgtgtatttcatgccccaaaagtct

SEQ ID NO: 3418930 - DNA, 25 bp, Homo sapien
tatccccagttcgtgtatttcatgc

SEQ ID NO: 3418931 - DNA, 25 bp, Homo sapien
tcattcaaatctgtatccccagttc

SEQ ID NO: 3418932 - DNA, 25 bp, Homo sapien
tccaacctggtcctggacagtttaa

SEQ ID NO: 3418933 - DNA, 25 bp, Homo sapien
tccagccttgtgttaggaatgactg

SEQ ID NO: 3418934 - DNA, 25 bp, Homo sapien
cctgggaatgttgcagggaatccaa

SEQ ID NO: 3418935 - DNA, 25 bp, Homo sapien
gctaccttgacttccgacctgtttc

SEQ ID NO: 3418936 - DNA, 25 bp, Homo sapien
aacagcctaggcaagggtctctgga

SEQ ID NO: 3418937 - DNA, 25 bp, Homo sapien
tggaaggaccacgtaacagttgccc

SEQ ID NO: 3418938 - DNA, 25 bp, Homo sapien
tgagggttccttttgcccacagcaa

SEQ ID NO: 3418939 - DNA, 25 bp, Homo sapien
tattgaggcccctgattgtcccgag

SEQ ID NO: 3418940 - DNA, 25 bp, Homo sapien
tgcagaccgggcaggaacagttgct

SEQ ID NO: 3418941 - DNA, 25 bp, Homo sapien
aggacaagaccgaatactaccttgg

SEQ ID NO: 3418942 - DNA, 25 bp, Homo sapien
tgaaaaggacaagaccgaatactac

SEQ ID NO: 3418943 - DNA, 25 bp, Homo sapien
gaccgaatactaccttggcactgga

SEQ ID NO: 3418944 - DNA, 25 bp, Homo sapien
aagaccgaatactaccttggcactg

SEQ ID NO: 3418945 - DNA, 25 bp, Homo sapien
tgcccacgaattccaggtcagggtg

SEQ ID NO: 3418946 - DNA, 25 bp, Homo sapien
tttcaagaacttgcccacgaattcc

SEQ ID NO: 3418947 - DNA, 25 bp, Homo sapien
ggggccagttcaccaatcagcaggg

SEQ ID NO: 3418948 - DNA, 25 bp, Homo sapien
agcaggggtttcaagaacttgccca

SEQ ID NO: 3418949 - DNA, 25 bp, Homo sapien
ccgtgatgagggtaggaatccagcc

SEQ ID NO: 3418950 - DNA, 25 bp, Homo sapien
gaacacgtggttggtcttgaacagg

SEQ ID NO: 3418951 - DNA, 25 bp, Homo sapien
taaaagacagtgaaccatgcaatgc

SEQ ID NO: 3418952 - DNA, 25 bp, Homo sapien
catgcaatgctctccagggcgatga

SEQ ID NO: 3418953 - DNA, 25 bp, Homo sapien
cctcagcaaacaggcaccaggcctc

SEQ ID NO: 3418954 - DNA, 25 bp, Homo sapien
gagagagggtcacacgtgctgtcac

SEQ ID NO: 3418955 - DNA, 25 bp, Homo sapien
acagcctcagcaaacaggcaccagg

SEQ ID NO: 3418956 - DNA, 25 bp, Homo sapien
ggtcacacgtgctgtcacagcctca

SEQ ID NO: 3418957 - DNA, 25 bp, Homo sapien
ggccaatgacgaatttgtggacaag

SEQ ID NO: 3418958 - DNA, 25 bp, Homo sapien
ctttaagtggccaatgacgaatttg

SEQ ID NO: 3418959 - DNA, 25 bp, Homo sapien
ttgtggacaaggtggttccacttgg

SEQ ID NO: 3418960 - DNA, 25 bp, Homo sapien
taatcatgttgcagccatccagctt

SEQ ID NO: 3418961 - DNA, 25 bp, Homo sapien
tttcagtgagttgagatcacgccat

SEQ ID NO: 3418962 - DNA, 25 bp, Homo sapien
gtttcagtgagttgagatcacgcca

SEQ ID NO: 3418963 - DNA, 25 bp, Homo sapien
caactcatagagcagtgttcacagc

SEQ ID NO: 3418964 - DNA, 25 bp, Homo sapien
cagaaatctccctcctgagcgtata

SEQ ID NO: 3418965 - DNA, 25 bp, Homo sapien
gaagtggtccctactatgtggccca

SEQ ID NO: 3418966 - DNA, 25 bp, Homo sapien
tgattccaccgacatgaaacgccca

SEQ ID NO: 3418967 - DNA, 25 bp, Homo sapien
agccccagatggagtgaagtcactt

SEQ ID NO: 3418968 - DNA, 25 bp, Homo sapien
tccctgatcataagacgatggtggc

SEQ ID NO: 3418969 - DNA, 25 bp, Homo sapien
gaaccgagctcgcttgtaacaggcc

SEQ ID NO: 3418970 - DNA, 25 bp, Homo sapien
gtaacaggcccttcttaggagcagt

SEQ ID NO: 3418971 - DNA, 25 bp, Homo sapien
cagaacaaacacgtgcagcatgttc

SEQ ID NO: 3418972 - DNA, 25 bp, Homo sapien
cacatcgggatccttgtggaagatg

SEQ ID NO: 3418973 - DNA, 25 bp, Homo sapien
tgattccaccagttggcagaggcac

SEQ ID NO: 3418974 - DNA, 25 bp, Homo sapien
tggaagtggcgatgattccaccagt

SEQ ID NO: 3418975 - DNA, 25 bp, Homo sapien
ggttggcgaccaagcttgagcccct

SEQ ID NO: 3418976 - DNA, 25 bp, Homo sapien
cccagtgtacaggatgatgattctc

SEQ ID NO: 3418977 - DNA, 25 bp, Homo sapien
cagattggaccaagccacgttgagg

SEQ ID NO: 3418978 - DNA, 25 bp, Homo sapien
caacatgagctagtcggttggcgac

SEQ ID NO: 3418979 - DNA, 25 bp, Homo sapien
tctccctcttctgtccccgctggag

SEQ ID NO: 3418980 - DNA, 25 bp, Homo sapien
ccctcttctgtccccgctggagtgc

SEQ ID NO: 3418981 - DNA, 25 bp, Homo sapien
cctcccctgcacctgggaccacaga

SEQ ID NO: 3418982 - DNA, 25 bp, Homo sapien
tcccctgcacctgggaccacagacg

SEQ ID NO: 3418983 - DNA, 25 bp, Homo sapien
gagctgtcgcaaagcccagtctctg

SEQ ID NO: 3418984 - DNA, 25 bp, Homo sapien
ccaggaggttagcttcagacagtca

SEQ ID NO: 3418985 - DNA, 25 bp, Homo sapien
ttaagcctgttcatgaaggtctgcc

SEQ ID NO: 3418986 - DNA, 25 bp, Homo sapien
ctgaggaatgacaagggccctcctt

SEQ ID NO: 3418987 - DNA, 25 bp, Homo sapien
gattaagtgacgttgtgcacgcaca

SEQ ID NO: 3418988 - DNA, 25 bp, Homo sapien
cctcacgggttaagcaaggattaag

SEQ ID NO: 3418989 - DNA, 25 bp, Homo sapien
caggactccgaagctgtggtttgca

SEQ ID NO: 3418990 - DNA, 25 bp, Homo sapien
aatgggtcgatgacagctcccgcct

SEQ ID NO: 3418991 - DNA, 25 bp, Homo sapien
cagtaggcaccctgttctcatgggt

SEQ ID NO: 3418992 - DNA, 25 bp, Homo sapien
caccctgttctcatgggtgatggtg

SEQ ID NO: 3418993 - DNA, 25 bp, Homo sapien
taggcaccctgttctcatgggtgat

SEQ ID NO: 3418994 - DNA, 25 bp, Homo sapien
gtgcacagtaggcaccctgttctca

SEQ ID NO: 3418995 - DNA, 25 bp, Homo sapien
gatggcatcgatcctctacaaggcc

SEQ ID NO: 3418996 - DNA, 25 bp, Homo sapien
cagagcaactctcggcggagcataa

SEQ ID NO: 3418997 - DNA, 25 bp, Homo sapien
aaagctgactctgagcccatgtgac

SEQ ID NO: 3418998 - DNA, 25 bp, Homo sapien
taagggccccagaattgctgccagt

SEQ ID NO: 3418999 - DNA, 25 bp, Homo sapien
ctggtgattgtagggcaggtatttc

SEQ ID NO: 3419000 - DNA, 25 bp, Homo sapien
attgtagggcaggtatttcagcttc

SEQ ID NO: 3419001 - DNA, 25 bp, Homo sapien
tattcgtgctggtgattgtagggca

SEQ ID NO: 3419002 - DNA, 25 bp, Homo sapien
gtgattgtagggcaggtatttcagc

SEQ ID NO: 3419003 - DNA, 25 bp, Homo sapien
tctggtactggaaatacatggggat

SEQ ID NO: 3419004 - DNA, 25 bp, Homo sapien
gttcttatggacgatcatggtcatg

SEQ ID NO: 3419005 - DNA, 25 bp, Homo sapien
cagttcttatggacgatcatggtca

SEQ ID NO: 3419006 - DNA, 25 bp, Homo sapien
cacccagttcttatggacgatcatg

SEQ ID NO: 3419007 - DNA, 25 bp, Homo sapien
ccccatgccaagccagctgtgtccc

SEQ ID NO: 3419008 - DNA, 25 bp, Homo sapien
ctccccatgccaagccagctgtgtc

SEQ ID NO: 3419009 - DNA, 25 bp, Homo sapien
tcctccccatgccaagccagctgtg

SEQ ID NO: 3419010 - DNA, 25 bp, Homo sapien
ccatgccaagccagctgtgtcccca

SEQ ID NO: 3419011 - DNA, 25 bp, Homo sapien
gaaggtcagaggtaccatcgtccct

SEQ ID NO: 3419012 - DNA, 25 bp, Homo sapien
catgtactgggagggtgacttcacg

SEQ ID NO: 3419013 - DNA, 25 bp, Homo sapien
tcagggactgggcttggacgtcttc

SEQ ID NO: 3419014 - DNA, 25 bp, Homo sapien
tatctcagagctctcacagcagagg

SEQ ID NO: 3419015 - DNA, 25 bp, Homo sapien
aaccggatgtagtagctgacggccc

SEQ ID NO: 3419016 - DNA, 25 bp, Homo sapien
tgtaggtgatgaagaaccggatgta

SEQ ID NO: 3419017 - DNA, 25 bp, Homo sapien
gatgccgtagaaagggatgtaggtg

SEQ ID NO: 3419018 - DNA, 25 bp, Homo sapien
atgtagtagctgacggcccaggcca

SEQ ID NO: 3419019 - DNA, 25 bp, Homo sapien
gtcaatctccatgacgatgtgattc

SEQ ID NO: 3419020 - DNA, 25 bp, Homo sapien
ctggctactgaaccagtcacggtag

SEQ ID NO: 3419021 - DNA, 25 bp, Homo sapien
cgatgtgattcatctgtgtgaccca

SEQ ID NO: 3419022 - DNA, 25 bp, Homo sapien
tcacggtaggcctcctggtcaatct

SEQ ID NO: 3419023 - DNA, 25 bp, Homo sapien
tccactgaaccagtcgttgaagaag

SEQ ID NO: 3419024 - DNA, 25 bp, Homo sapien
gaaccagtcgttgaagaaggactgc

SEQ ID NO: 3419025 - DNA, 25 bp, Homo sapien
cactgaaccagtcgttgaagaagga

SEQ ID NO: 3419026 - DNA, 25 bp, Homo sapien
ccagtcgttgaagaaggactgctcc

SEQ ID NO: 3419027 - DNA, 25 bp, Homo sapien
ggtgcgtgtgcaggctccataacta

SEQ ID NO: 3419028 - DNA, 25 bp, Homo sapien
tgttccaggcaagctacgtagccct

SEQ ID NO: 3419029 - DNA, 25 bp, Homo sapien
gcattctgcccagtgggatagcggc

SEQ ID NO: 3419030 - DNA, 25 bp, Homo sapien
ggagccttgctctatattgggcaga

SEQ ID NO: 3419031 - DNA, 25 bp, Homo sapien
gcactccagcccaggaaacagggtg

SEQ ID NO: 3419032 - DNA, 25 bp, Homo sapien
tccagcccaggaaacagggtgagac

SEQ ID NO: 3419033 - DNA, 25 bp, Homo sapien
actgcactccagcccaggaaacagg

SEQ ID NO: 3419034 - DNA, 25 bp, Homo sapien
cactccagcccaggaaacagggtga

SEQ ID NO: 3419035 - DNA, 25 bp, Homo sapien
tggcacatagagacttcaccagcgg

SEQ ID NO: 3419036 - DNA, 25 bp, Homo sapien
gcagggccctcagtagcggcttctc

SEQ ID NO: 3419037 - DNA, 25 bp, Homo sapien
ccagcggggcgatcttgtgtaagtt

SEQ ID NO: 3419038 - DNA, 25 bp, Homo sapien
cctggtattcaatgccatgcttggc

SEQ ID NO: 3419039 - DNA, 25 bp, Homo sapien
tcatttgtgaaggtaggcgtccagc

SEQ ID NO: 3419040 - DNA, 25 bp, Homo sapien
agggagaaagatccaacatggggtc

SEQ ID NO: 3419041 - DNA, 25 bp, Homo sapien
aacatggggtccgtgagcagtgcat

SEQ ID NO: 3419042 - DNA, 25 bp, Homo sapien
tccgtgagcagtgcatacaccagcc

SEQ ID NO: 3419043 - DNA, 25 bp, Homo sapien
gaaagatccaacatggggtccgtga

SEQ ID NO: 3419044 - DNA, 25 bp, Homo sapien
acccatggaccgctggtctcctccc

SEQ ID NO: 3419045 - DNA, 25 bp, Homo sapien
ccatggaccgctggtctcctcccat

SEQ ID NO: 3419046 - DNA, 25 bp, Homo sapien
aggccagacccatggaccgctggtc

SEQ ID NO: 3419047 - DNA, 25 bp, Homo sapien
aggtaggacagagccacccccggtg

SEQ ID NO: 3419048 - DNA, 25 bp, Homo sapien
caaagcaggcctctctatgaaaggg

SEQ ID NO: 3419049 - DNA, 25 bp, Homo sapien
tctgctgagtcacaagagacgaggg

SEQ ID NO: 3419050 - DNA, 25 bp, Homo sapien
catcttaagagaggcctcgggtact

SEQ ID NO: 3419051 - DNA, 25 bp, Homo sapien
tatgaaagggtggaccaatggcagc

SEQ ID NO: 3419052 - DNA, 25 bp, Homo sapien
aacattacgatcagctccctatggg

SEQ ID NO: 3419053 - DNA, 25 bp, Homo sapien
cattctgagttgttggtgcctgccc

SEQ ID NO: 3419054 - DNA, 25 bp, Homo sapien
ccagatgcttagatgcaggtccctc

SEQ ID NO: 3419055 - DNA, 25 bp, Homo sapien
tagtgggttagactgcaacagcagc

SEQ ID NO: 3419056 - DNA, 25 bp, Homo sapien
gatgttaggaagagtctctgcaagc

SEQ ID NO: 3419057 - DNA, 25 bp, Homo sapien
gatgggagggcagattgcacttggg

SEQ ID NO: 3419058 - DNA, 25 bp, Homo sapien
tctgtttggcctggcgctctgtgga

SEQ ID NO: 3419059 - DNA, 25 bp, Homo sapien
gcagattgcacttggggagacagct

SEQ ID NO: 3419060 - DNA, 25 bp, Homo sapien
ctcagctctctgcaggctctgcccc

SEQ ID NO: 3419061 - DNA, 25 bp, Homo sapien
gctctctgcaggctctgccccgccg

SEQ ID NO: 3419062 - DNA, 25 bp, Homo sapien
gcaggctctgccccgccggggttca

SEQ ID NO: 3419063 - DNA, 25 bp, Homo sapien
tgcaggctctgccccgccggggttc

SEQ ID NO: 3419064 - DNA, 25 bp, Homo sapien
cgctaggctggagtgagcgatcttg

SEQ ID NO: 3419065 - DNA, 25 bp, Homo sapien
ttgtgcgcaagttcctacagcccct

SEQ ID NO: 3419066 - DNA, 25 bp, Homo sapien
ttcctacagcccctgttgattggag

SEQ ID NO: 3419067 - DNA, 25 bp, Homo sapien
catcaagatctcaattttgtgcgca

SEQ ID NO: 3419068 - DNA, 25 bp, Homo sapien
tgccttccgtgccttccatcaagat

SEQ ID NO: 3419069 - DNA, 25 bp, Homo sapien
gtctacgacatcagccgctgggcac

SEQ ID NO: 3419070 - DNA, 25 bp, Homo sapien
cgacaagtggctggtcatcgagcgc

SEQ ID NO: 3419071 - DNA, 25 bp, Homo sapien
ttctgctgggagcagatccgcgcgc

SEQ ID NO: 3419072 - DNA, 25 bp, Homo sapien
gtcgtgggcgtgatgtcccgctcca

SEQ ID NO: 3419073 - DNA, 25 bp, Homo sapien
taataagcgcgtctgctccgttcgc

SEQ ID NO: 3419074 - DNA, 25 bp, Homo sapien
gctgctattacagcagggctagtca

SEQ ID NO: 3419075 - DNA, 25 bp, Homo sapien
tggctccgctttcccccatgtaaga

SEQ ID NO: 3419076 - DNA, 25 bp, Homo sapien
gctgttgttgattactacttgaaag

SEQ ID NO: 3419077 - DNA, 25 bp, Homo sapien
agggtcctagcaccatgtagatgcc

SEQ ID NO: 3419078 - DNA, 25 bp, Homo sapien
tattctgagggtcctagttccgtgt

SEQ ID NO: 3419079 - DNA, 25 bp, Homo sapien
tttggagggtcctagcaccatgtag

SEQ ID NO: 3419080 - DNA, 25 bp, Homo sapien
ttgagggtcctagctctgtgtattc

SEQ ID NO: 3419081 - DNA, 25 bp, Homo sapien
tgtcaaccttgcacaggggccacgc

SEQ ID NO: 3419082 - DNA, 25 bp, Homo sapien
gtcaaccttgcacaggggccacgct

SEQ ID NO: 3419083 - DNA, 25 bp, Homo sapien
caaccttgcacaggggccacgctaa

SEQ ID NO: 3419084 - DNA, 25 bp, Homo sapien
catgtcaaccttgcacaggggccac

SEQ ID NO: 3419085 - DNA, 25 bp, Homo sapien
cagcctatgtatttactttagagac

SEQ ID NO: 3419086 - DNA, 25 bp, Homo sapien
gatggagagaagtggtacgatcata

SEQ ID NO: 3419087 - DNA, 25 bp, Homo sapien
gcctatgtatttactttagagacag

SEQ ID NO: 3419088 - DNA, 25 bp, Homo sapien
cccagcctatgtatttactttagag

SEQ ID NO: 3419089 - DNA, 25 bp, Homo sapien
taatctgctcagaagcaacggctag

SEQ ID NO: 3419090 - DNA, 25 bp, Homo sapien
aataccgggctgcagtcaacagtcc

SEQ ID NO: 3419091 - DNA, 25 bp, Homo sapien
gctatggaaagaatgaataccgggc

SEQ ID NO: 3419092 - DNA, 25 bp, Homo sapien
gtgttctgacccctgaggccttgca

SEQ ID NO: 3419093 - DNA, 25 bp, Homo sapien
ccaggtgggtccgatgatcccacag

SEQ ID NO: 3419094 - DNA, 25 bp, Homo sapien
ttccaggtgggtccgatgatcccac

SEQ ID NO: 3419095 - DNA, 25 bp, Homo sapien
ggttccaggtgggtccgatgatccc

SEQ ID NO: 3419096 - DNA, 25 bp, Homo sapien
aggtgggtccgatgatcccacagaa

SEQ ID NO: 3419097 - DNA, 25 bp, Homo sapien
tgggggtttgtagggatcagaggcc

SEQ ID NO: 3419098 - DNA, 25 bp, Homo sapien
tcaactctcccatagggaccctagg

SEQ ID NO: 3419099 - DNA, 25 bp, Homo sapien
tggatgaagtggtctccaaggccct

SEQ ID NO: 3419100 - DNA, 25 bp, Homo sapien
tggtagagagggacaccgattgggg

SEQ ID NO: 3419101 - DNA, 25 bp, Homo sapien
tgggctgcagcaggtgggcttgggt

SEQ ID NO: 3419102 - DNA, 25 bp, Homo sapien
ggccaggcagtgggctgcagcaggt

SEQ ID NO: 3419103 - DNA, 25 bp, Homo sapien
cagtgggctgcagcaggtgggcttg

SEQ ID NO: 3419104 - DNA, 25 bp, Homo sapien
gggctgcagcaggtgggcttgggtc

SEQ ID NO: 3419105 - DNA, 25 bp, Homo sapien
tagcagcttgtagatgctgccccgc

SEQ ID NO: 3419106 - DNA, 25 bp, Homo sapien
gaaggagcctaagcgggcattagcc

SEQ ID NO: 3419107 - DNA, 25 bp, Homo sapien
taaagcggatgatgtagtagcagag

SEQ ID NO: 3419108 - DNA, 25 bp, Homo sapien
taagaactcgccatatagcagcttg

SEQ ID NO: 3419109 - DNA, 25 bp, Homo sapien
ctgttgttcttccgtgagggccagc

SEQ ID NO: 3419110 - DNA, 25 bp, Homo sapien
ctgtcgcaatacagagtcagtttct

SEQ ID NO: 3419111 - DNA, 25 bp, Homo sapien
ggaaatggggatgagctggatgtag

SEQ ID NO: 3419112 - DNA, 25 bp, Homo sapien
gcacgaaggaaatggggatgagctg

SEQ ID NO: 3419113 - DNA, 25 bp, Homo sapien
ccagcacgaaggaaatggggatgag

SEQ ID NO: 3419114 - DNA, 25 bp, Homo sapien
aaggaaatggggatgagctggatgt

SEQ ID NO: 3419115 - DNA, 25 bp, Homo sapien
gaagcccgacaccaggctcatgagg

SEQ ID NO: 3419116 - DNA, 25 bp, Homo sapien
gcaggttctcgtactggttccacca

SEQ ID NO: 3419117 - DNA, 25 bp, Homo sapien
aagcgcttgtagactgcggtgctga

SEQ ID NO: 3419118 - DNA, 25 bp, Homo sapien
gggtcacgaccagcgtcacgtagaa

SEQ ID NO: 3419119 - DNA, 25 bp, Homo sapien
gaacatgttgtgtggtaggctcagt

SEQ ID NO: 3419120 - DNA, 25 bp, Homo sapien
ttgacaggttggcaaaccacaccca

SEQ ID NO: 3419121 - DNA, 25 bp, Homo sapien
gatagggtcccggattcgacctcca

SEQ ID NO: 3419122 - DNA, 25 bp, Homo sapien
tccaagccacgccttcattgacagg

SEQ ID NO: 3419123 - DNA, 25 bp, Homo sapien
gaaaccttgtttcctgtggaccaca

SEQ ID NO: 3419124 - DNA, 25 bp, Homo sapien
ccagggcctggtacctatggtccat

SEQ ID NO: 3419125 - DNA, 25 bp, Homo sapien
ccatgggaagctcactaaacctctt

SEQ ID NO: 3419126 - DNA, 25 bp, Homo sapien
tctatcaaaagggaaccaggacctc

SEQ ID NO: 3419127 - DNA, 25 bp, Homo sapien
tgggatactaatccagtcgtaggca

SEQ ID NO: 3419128 - DNA, 25 bp, Homo sapien
ctgtgtatacaccagtgggatacta

SEQ ID NO: 3419129 - DNA, 25 bp, Homo sapien
tccagtcgtaggcatacaggtgtcc

SEQ ID NO: 3419130 - DNA, 25 bp, Homo sapien
actgagtacgcaaggtgttcatctc

SEQ ID NO: 3419131 - DNA, 25 bp, Homo sapien
tgcaggaacgtgaagacgggcacaa

SEQ ID NO: 3419132 - DNA, 25 bp, Homo sapien
gaagaagctgtacaccgccacagtc

SEQ ID NO: 3419133 - DNA, 25 bp, Homo sapien
gccgcccaactagacaagtcaggaa

SEQ ID NO: 3419134 - DNA, 25 bp, Homo sapien
cagctcatggccagggtaggccttg

SEQ ID NO: 3419135 - DNA, 25 bp, Homo sapien
tacccgtgagaccttcctttcctga

SEQ ID NO: 3419136 - DNA, 25 bp, Homo sapien
tggctgctttctacccgtgagacct

SEQ ID NO: 3419137 - DNA, 25 bp, Homo sapien
tgctggccatgacccctctggccat

SEQ ID NO: 3419138 - DNA, 25 bp, Homo sapien
ctgctggccatgacccctctggcca

SEQ ID NO: 3419139 - DNA, 25 bp, Homo sapien
catctgttcggagtattggctgtgg

SEQ ID NO: 3419140 - DNA, 25 bp, Homo sapien
cttgaggtgaggaacaagacagccc

SEQ ID NO: 3419141 - DNA, 25 bp, Homo sapien
gaggtggtgccgatctgccttctaa

SEQ ID NO: 3419142 - DNA, 25 bp, Homo sapien
ggaatacctggacaagccacttgag

SEQ ID NO: 3419143 - DNA, 25 bp, Homo sapien
ccccatgacgcccttcctgcctgac

SEQ ID NO: 3419144 - DNA, 25 bp, Homo sapien
gctgctatttccacaccccatgacg

SEQ ID NO: 3419145 - DNA, 25 bp, Homo sapien
tgtaaaccctcaggcagaactcctc

SEQ ID NO: 3419146 - DNA, 25 bp, Homo sapien
tggacacagcccctctaactcttct

SEQ ID NO: 3419147 - DNA, 25 bp, Homo sapien
tcctgtcgacaatccagttggtctc

SEQ ID NO: 3419148 - DNA, 25 bp, Homo sapien
aaattcctgtcgacaatccagttgg

SEQ ID NO: 3419149 - DNA, 25 bp, Homo sapien
ctgcaaattcctgtcgacaatccag

SEQ ID NO: 3419150 - DNA, 25 bp, Homo sapien
gacaatccagttggtctcaaaatca

SEQ ID NO: 3419151 - DNA, 25 bp, Homo sapien
atgtccggctccatccgaggcaggt

SEQ ID NO: 3419152 - DNA, 25 bp, Homo sapien
cataaaggaggctcgacggaactgg

SEQ ID NO: 3419153 - DNA, 25 bp, Homo sapien
ggcttattccagtacatgtccggct

SEQ ID NO: 3419154 - DNA, 25 bp, Homo sapien
ggaactgggcggaagcagctgtgta

SEQ ID NO: 3419155 - DNA, 25 bp, Homo sapien
tgacactgtgaagctttgacggcgc

SEQ ID NO: 3419156 - DNA, 25 bp, Homo sapien
tcctgattgggctggaactccatct

SEQ ID NO: 3419157 - DNA, 25 bp, Homo sapien
gatcatgggactgcaggcctaggaa

SEQ ID NO: 3419158 - DNA, 25 bp, Homo sapien
taggaagcggccaatgatgccagcg

SEQ ID NO: 3419159 - DNA, 25 bp, Homo sapien
tatccgtcaggttaaactccacagt

SEQ ID NO: 3419160 - DNA, 25 bp, Homo sapien
tccaaggcccaataaggatccatgt

SEQ ID NO: 3419161 - DNA, 25 bp, Homo sapien
tacttctgggtgctccatcaaggcc

SEQ ID NO: 3419162 - DNA, 25 bp, Homo sapien
aaggccccatcgctctctgagagca

SEQ ID NO: 3419163 - DNA, 25 bp, Homo sapien
gtcttccgggtgataccagggtgaa

SEQ ID NO: 3419164 - DNA, 25 bp, Homo sapien
tgaaggtggccaagtatatacccca

SEQ ID NO: 3419165 - DNA, 25 bp, Homo sapien
caagccagtgctgggcgtaggtcca

SEQ ID NO: 3419166 - DNA, 25 bp, Homo sapien
gaacacttccctaggatccctgtga

SEQ ID NO: 3419167 - DNA, 25 bp, Homo sapien
taccaaaatgttgcagtaggagggc

SEQ ID NO: 3419168 - DNA, 25 bp, Homo sapien
cacctcatggttttgggtcagccac

SEQ ID NO: 3419169 - DNA, 25 bp, Homo sapien
tctgaccgtgaaagtaactgcttga

SEQ ID NO: 3419170 - DNA, 25 bp, Homo sapien
cagtgagaaaatgacctaagggcgc

SEQ ID NO: 3419171 - DNA, 25 bp, Homo sapien
tagaactaagggttcccgactctga

SEQ ID NO: 3419172 - DNA, 25 bp, Homo sapien
caatggttcagtctagctttcacag

SEQ ID NO: 3419173 - DNA, 25 bp, Homo sapien
tatactaaggtgtggctgtcttgga

SEQ ID NO: 3419174 - DNA, 25 bp, Homo sapien
ggctggcgaagcatccccattagga

SEQ ID NO: 3419175 - DNA, 25 bp, Homo sapien
tggtcaccaaggcagtgcatgcatg

SEQ ID NO: 3419176 - DNA, 25 bp, Homo sapien
gacttcattgagacacattacctga

SEQ ID NO: 3419177 - DNA, 25 bp, Homo sapien
atgcatgttggggtttcctttacct

SEQ ID NO: 3419178 - DNA, 25 bp, Homo sapien
tcaccaaggcagtgcatgcatgttg

SEQ ID NO: 3419179 - DNA, 25 bp, Homo sapien
tgggttcaatccagtagctcatctg

SEQ ID NO: 3419180 - DNA, 25 bp, Homo sapien
acagatccttaagacattgccccag

SEQ ID NO: 3419181 - DNA, 25 bp, Homo sapien
gggatccctagtataacacattcag

SEQ ID NO: 3419182 - DNA, 25 bp, Homo sapien
taagtgcagggtcagtactccagcg

SEQ ID NO: 3419183 - DNA, 25 bp, Homo sapien
ttacctgtccatggtgagcgcgggc

SEQ ID NO: 3419184 - DNA, 25 bp, Homo sapien
agtgtcacctgaccttgcgcctagg

SEQ ID NO: 3419185 - DNA, 25 bp, Homo sapien
gctataagagaccacaagcgacccg

SEQ ID NO: 3419186 - DNA, 25 bp, Homo sapien
gaagcatatctctaggaatcgcccc

SEQ ID NO: 3419187 - DNA, 25 bp, Homo sapien
tcacgtgtcttgcttagggagggct

SEQ ID NO: 3419188 - DNA, 25 bp, Homo sapien
caaggtgtcacaagggcttctccgc

SEQ ID NO: 3419189 - DNA, 25 bp, Homo sapien
gacagaacagtggacctcgaagcca

SEQ ID NO: 3419190 - DNA, 25 bp, Homo sapien
gagaaaatgcgctcgaccacctaag

SEQ ID NO: 3419191 - DNA, 25 bp, Homo sapien
gcctaggtaacacagcaagactgtc

SEQ ID NO: 3419192 - DNA, 25 bp, Homo sapien
ctaggtaacacagcaagactgtcaa

SEQ ID NO: 3419193 - DNA, 25 bp, Homo sapien
tcgagaccagcatgagcaaaatggc

SEQ ID NO: 3419194 - DNA, 25 bp, Homo sapien
caaaatggcaaaaccctgttctact

SEQ ID NO: 3419195 - DNA, 25 bp, Homo sapien
cagaagcctcagcaagtggaatctt

SEQ ID NO: 3419196 - DNA, 25 bp, Homo sapien
tcttcctgcatgcttcgagattaag

SEQ ID NO: 3419197 - DNA, 25 bp, Homo sapien
taagggtaatgtatgtgctgagttt

SEQ ID NO: 3419198 - DNA, 25 bp, Homo sapien
tcagcaagtggaatcttggagctct

SEQ ID NO: 3419199 - DNA, 25 bp, Homo sapien
cctccatgccttgctagggataacc

SEQ ID NO: 3419200 - DNA, 25 bp, Homo sapien
gaatgacaagtggataacaggatgg

SEQ ID NO: 3419201 - DNA, 25 bp, Homo sapien
taacaggatggagccgaatgatctg

SEQ ID NO: 3419202 - DNA, 25 bp, Homo sapien
taagcacccccatttgataagcatt

SEQ ID NO: 3419203 - DNA, 25 bp, Homo sapien
ccttagcaaggaaagggcacttcca

SEQ ID NO: 3419204 - DNA, 25 bp, Homo sapien
aaggaaagggcacttccattggcag

SEQ ID NO: 3419205 - DNA, 25 bp, Homo sapien
cttagcaaggaaagggcacttccat

SEQ ID NO: 3419206 - DNA, 25 bp, Homo sapien
gaaagggcacttccattggcaggct

SEQ ID NO: 3419207 - DNA, 25 bp, Homo sapien
cagctattgatactggtggttgcac

SEQ ID NO: 3419208 - DNA, 25 bp, Homo sapien
tgttcttactcaccttctaaaggcc

SEQ ID NO: 3419209 - DNA, 25 bp, Homo sapien
tcctccgcttggtgtattcagctat

SEQ ID NO: 3419210 - DNA, 25 bp, Homo sapien
tcagctcagcgaagtttgttcttac

SEQ ID NO: 3419211 - DNA, 25 bp, Homo sapien
ttacatttaagattgtgtgaatttg

SEQ ID NO: 3419212 - DNA, 25 bp, Homo sapien
tacatttaagattgtgtgaatttga

SEQ ID NO: 3419213 - DNA, 25 bp, Homo sapien
tgctttctgtttgcttcgtaaattt

SEQ ID NO: 3419214 - DNA, 25 bp, Homo sapien
ctatccacgagcataaaatgatttt

SEQ ID NO: 3419215 - DNA, 25 bp, Homo sapien
atccacgagcataaaatgattttcc

SEQ ID NO: 3419216 - DNA, 25 bp, Homo sapien
tatccacgagcataaaatgattttc

SEQ ID NO: 3419217 - DNA, 25 bp, Homo sapien
cctatccacgagcataaaatgattt

SEQ ID NO: 3419218 - DNA, 25 bp, Homo sapien
tatatacaatttctagtgatcagat

SEQ ID NO: 3419219 - DNA, 25 bp, Homo sapien
ggtgctgcttgtcagcaatcttgcc

SEQ ID NO: 3419220 - DNA, 25 bp, Homo sapien
tgccgcaaggagaaatcagcattca

SEQ ID NO: 3419221 - DNA, 25 bp, Homo sapien
aatcttgccacgagaccacactgaa

SEQ ID NO: 3419222 - DNA, 25 bp, Homo sapien
cccaggtgggcggtccgggagagct

SEQ ID NO: 3419223 - DNA, 25 bp, Homo sapien
gcctggacttggtcaaaccacccag

SEQ ID NO: 3419224 - DNA, 25 bp, Homo sapien
tggacttggtcaaaccacccaggta

SEQ ID NO: 3419225 - DNA, 25 bp, Homo sapien
tcctgcatgtagaggagtcctgggc

SEQ ID NO: 3419226 - DNA, 25 bp, Homo sapien
gccactgcatcaagccccttggttc

SEQ ID NO: 3419227 - DNA, 25 bp, Homo sapien
gctaccccttgcaccttctcggtta

SEQ ID NO: 3419228 - DNA, 25 bp, Homo sapien
cagccttgatggtgttttggagtca

SEQ ID NO: 3419229 - DNA, 25 bp, Homo sapien
tttgtcatacggaacagtcagcctt

SEQ ID NO: 3419230 - DNA, 25 bp, Homo sapien
ctcggttacctgagaagcaagttat

SEQ ID NO: 3419231 - DNA, 25 bp, Homo sapien
ttaattctgaccaaaaggatcaggg

SEQ ID NO: 3419232 - DNA, 25 bp, Homo sapien
gaggaagcatttagggcgtggctgg

SEQ ID NO: 3419233 - DNA, 25 bp, Homo sapien
ctgctatttgctgtgacagcattga

SEQ ID NO: 3419234 - DNA, 25 bp, Homo sapien
ttgctgtgacagcattgaggaagaa

SEQ ID NO: 3419235 - DNA, 25 bp, Homo sapien
taggcctttgctcttgagggatcgc

SEQ ID NO: 3419236 - DNA, 25 bp, Homo sapien
ctgccatcagaaacaggagtgactt

SEQ ID NO: 3419237 - DNA, 25 bp, Homo sapien
ccttggaggaaggaatttggacagc

SEQ ID NO: 3419238 - DNA, 25 bp, Homo sapien
gacagctcagtagggaccaaatccc

SEQ ID NO: 3419239 - DNA, 25 bp, Homo sapien
gatccaagtccggtggtatccctag

SEQ ID NO: 3419240 - DNA, 25 bp, Homo sapien
tatccctaggtaaggccccgcttgc

SEQ ID NO: 3419241 - DNA, 25 bp, Homo sapien
cttcgggactcaccgcacgggagga

SEQ ID NO: 3419242 - DNA, 25 bp, Homo sapien
gcagcgcgggcgaaaactatgattt

SEQ ID NO: 3419243 - DNA, 25 bp, Homo sapien
tctatgactcctgtccttttcaggg

SEQ ID NO: 3419244 - DNA, 25 bp, Homo sapien
cctctgtgcagaaagcgcatagcag

SEQ ID NO: 3419245 - DNA, 25 bp, Homo sapien
tccacaccatacaccagactgaagg

SEQ ID NO: 3419246 - DNA, 25 bp, Homo sapien
ggtgctgtaagttgggcgcctacca

SEQ ID NO: 3419247 - DNA, 25 bp, Homo sapien
gaaaaagaaggaatcagtgtaccaa

SEQ ID NO: 3419248 - DNA, 25 bp, Homo sapien
cagtgtaccaagaatcaggctcctg

SEQ ID NO: 3419249 - DNA, 25 bp, Homo sapien
atcagtgtaccaagaatcaggctcc

SEQ ID NO: 3419250 - DNA, 25 bp, Homo sapien
gaaggaatcagtgtaccaagaatca

SEQ ID NO: 3419251 - DNA, 25 bp, Homo sapien
agcttctggtcacatagctccagca

SEQ ID NO: 3419252 - DNA, 25 bp, Homo sapien
tcctcttggatttcctcaagccaca

SEQ ID NO: 3419253 - DNA, 25 bp, Homo sapien
tccttattatccatgttgcagagaa

SEQ ID NO: 3419254 - DNA, 25 bp, Homo sapien
tgcagagaaactccatgagcttctg

SEQ ID NO: 3419255 - DNA, 25 bp, Homo sapien
agaaatccgtctcttcttccgtcgg

SEQ ID NO: 3419256 - DNA, 25 bp, Homo sapien
taagaaatccgtctcttcttccgtc

SEQ ID NO: 3419257 - DNA, 25 bp, Homo sapien
aagaaatccgtctcttcttccgtcg

SEQ ID NO: 3419258 - DNA, 25 bp, Homo sapien
gcattctggcgctcactgatgccga

SEQ ID NO: 3419259 - DNA, 25 bp, Homo sapien
tagtcagcatcgtgggagactcagg

SEQ ID NO: 3419260 - DNA, 25 bp, Homo sapien
gaagaaggtgcagccaatgccatgg

SEQ ID NO: 3419261 - DNA, 25 bp, Homo sapien
cactgggtgtggttatcctcgggct

SEQ ID NO: 3419262 - DNA, 25 bp, Homo sapien
cgctcccgccatggagaatctggaa

SEQ ID NO: 3419263 - DNA, 25 bp, Homo sapien
gtatcctggccttcgacttcttagg

SEQ ID NO: 3419264 - DNA, 25 bp, Homo sapien
gggagacctgcgcaatcctgagctt

SEQ ID NO: 3419265 - DNA, 25 bp, Homo sapien
aatcctgagcttagacgcagaccgc

SEQ ID NO: 3419266 - DNA, 25 bp, Homo sapien
cccgtgggcgtggagaagttatccg

SEQ ID NO: 3419267 - DNA, 25 bp, Homo sapien
attgagagtccgtgcgagagcccgt

SEQ ID NO: 3419268 - DNA, 25 bp, Homo sapien
gcgatcgggctgtgccgcaccgatt

SEQ ID NO: 3419269 - DNA, 25 bp, Homo sapien
tgtttggccaccagagagtacttct

SEQ ID NO: 3419270 - DNA, 25 bp, Homo sapien
tcttcggcagtcttcttggcaagcc

SEQ ID NO: 3419271 - DNA, 25 bp, Homo sapien
ggcagctggctcttcggcagtcttc

SEQ ID NO: 3419272 - DNA, 25 bp, Homo sapien
tggctcttcggcagtcttcttggca

SEQ ID NO: 3419273 - DNA, 25 bp, Homo sapien
cagtcttcttggcaagccttctgct

SEQ ID NO: 3419274 - DNA, 25 bp, Homo sapien
aagggctgctcgtggggaacaccca

SEQ ID NO: 3419275 - DNA, 25 bp, Homo sapien
ggtcggccttgtcgcacccaaactg

SEQ ID NO: 3419276 - DNA, 25 bp, Homo sapien
ccaaactgagcatcagccattggtg

SEQ ID NO: 3419277 - DNA, 25 bp, Homo sapien
agctcctcactaggggtcggccttg

SEQ ID NO: 3419278 - DNA, 25 bp, Homo sapien
tccaatgcagaggtggctcgaacgc

SEQ ID NO: 3419279 - DNA, 25 bp, Homo sapien
catctgcacgacattcaggcctcag

SEQ ID NO: 3419280 - DNA, 25 bp, Homo sapien
gtttatacccagaagatacatcctc

SEQ ID NO: 3419281 - DNA, 25 bp, Homo sapien
ccctgatgaagacgcccatgtgact

SEQ ID NO: 3419282 - DNA, 25 bp, Homo sapien
gcttcttcctagctgggagcatgcc

SEQ ID NO: 3419283 - DNA, 25 bp, Homo sapien
agaaggtagctgagctggcgcatcc

SEQ ID NO: 3419284 - DNA, 25 bp, Homo sapien
gctagctttatgtccccggcttctt

SEQ ID NO: 3419285 - DNA, 25 bp, Homo sapien
tgaggctgaggcttaatcattaaaa

SEQ ID NO: 3419286 - DNA, 25 bp, Homo sapien
caaaatgtagaataatgccagtgtc

SEQ ID NO: 3419287 - DNA, 25 bp, Homo sapien
caggtgataggcttggtacttgcat

SEQ ID NO: 3419288 - DNA, 25 bp, Homo sapien
cagatcaaacgcagaatgtggctta

SEQ ID NO: 3419289 - DNA, 25 bp, Homo sapien
aaagtcatacaataaagagatttgc

SEQ ID NO: 3419290 - DNA, 25 bp, Homo sapien
ctcactgtaacctccacctcccggt

SEQ ID NO: 3419291 - DNA, 25 bp, Homo sapien
cacctcccggtttcaagcaatcctc

SEQ ID NO: 3419292 - DNA, 25 bp, Homo sapien
gaagtggcgtgaattcagctcactg

SEQ ID NO: 3419293 - DNA, 25 bp, Homo sapien
ctccacctcccggtttcaagcaatc

SEQ ID NO: 3419294 - DNA, 25 bp, Homo sapien
gctgcaaacccaactctctgtgaaa

SEQ ID NO: 3419295 - DNA, 25 bp, Homo sapien
cactgcgcctgcaaaagtcctaatt

SEQ ID NO: 3419296 - DNA, 25 bp, Homo sapien
taaactcaagtacatgccattctac

SEQ ID NO: 3419297 - DNA, 25 bp, Homo sapien
aaaagcgctcgtctctaagctgcca

SEQ ID NO: 3419298 - DNA, 25 bp, Homo sapien
gggcacctcaacattcaggagcctc

SEQ ID NO: 3419299 - DNA, 25 bp, Homo sapien
aactttctggggcacctcaacattc

SEQ ID NO: 3419300 - DNA, 25 bp, Homo sapien
tttctggggcacctcaacattcagg

SEQ ID NO: 3419301 - DNA, 25 bp, Homo sapien
tctggggcacctcaacattcaggag

SEQ ID NO: 3419302 - DNA, 25 bp, Homo sapien
cagcctcctcggggggttccttctg

SEQ ID NO: 3419303 - DNA, 25 bp, Homo sapien
tgcagagggtgtttccgggctgctg

SEQ ID NO: 3419304 - DNA, 25 bp, Homo sapien
tgcaggcttcgggttgggtgtgctg

SEQ ID NO: 3419305 - DNA, 25 bp, Homo sapien
gctgcaggcttcgggttgggtgtgc

SEQ ID NO: 3419306 - DNA, 25 bp, Homo sapien
gccctgcagagggtgtttccgggct

SEQ ID NO: 3419307 - DNA, 25 bp, Homo sapien
acgaagaacagtgtgtggacgcctt

SEQ ID NO: 3419308 - DNA, 25 bp, Homo sapien
gaacagtgtgtggacgccttgtaga

SEQ ID NO: 3419309 - DNA, 25 bp, Homo sapien
gaagaacagtgtgtggacgccttgt

SEQ ID NO: 3419310 - DNA, 25 bp, Homo sapien
acagtgtgtggacgccttgtagaag

SEQ ID NO: 3419311 - DNA, 25 bp, Homo sapien
ctgtgaagacagcaatttcagcaag

SEQ ID NO: 3419312 - DNA, 25 bp, Homo sapien
tgtgaagacagcaatttcagcaagg

SEQ ID NO: 3419313 - DNA, 25 bp, Homo sapien
tggcactctgcggtggctctctggg

SEQ ID NO: 3419314 - DNA, 25 bp, Homo sapien
cactctgcggtggctctctgggtcc

SEQ ID NO: 3419315 - DNA, 25 bp, Homo sapien
ctggcactctgcggtggctctctgg

SEQ ID NO: 3419316 - DNA, 25 bp, Homo sapien
gcactctgcggtggctctctgggtc

SEQ ID NO: 3419317 - DNA, 25 bp, Homo sapien
ctcactcacggcctgcttgtagctg

SEQ ID NO: 3419318 - DNA, 25 bp, Homo sapien
ggcctgcttgtagctgcgcttcctc

SEQ ID NO: 3419319 - DNA, 25 bp, Homo sapien
gtccagctcactcacggcctgcttg

SEQ ID NO: 3419320 - DNA, 25 bp, Homo sapien
cacggcctgcttgtagctgcgcttc

SEQ ID NO: 3419321 - DNA, 25 bp, Homo sapien
gggagtgttgcgcttaataaaggac

SEQ ID NO: 3419322 - DNA, 25 bp, Homo sapien
cactgtgtgcagaaaggtccggagg

SEQ ID NO: 3419323 - DNA, 25 bp, Homo sapien
gtgttgcgcttaataaaggacttca

SEQ ID NO: 3419324 - DNA, 25 bp, Homo sapien
aaaggacttcatgacgctgcgtggg

SEQ ID NO: 3419325 - DNA, 25 bp, Homo sapien
gaactgctgggcgcctccagccagt

SEQ ID NO: 3419326 - DNA, 25 bp, Homo sapien
gctacagcgggtgagtgctaggtgg

SEQ ID NO: 3419327 - DNA, 25 bp, Homo sapien
caggtgctgtcagctacgcagggaa

SEQ ID NO: 3419328 - DNA, 25 bp, Homo sapien
caatgttagtgcatctacaggtgct

SEQ ID NO: 3419329 - DNA, 25 bp, Homo sapien
gtactagttggctgaaaagctgatt

SEQ ID NO: 3419330 - DNA, 25 bp, Homo sapien
aaaagtactagttggctgaaaagct

SEQ ID NO: 3419331 - DNA, 25 bp, Homo sapien
attgatgctggcaccccctcctggg

SEQ ID NO: 3419332 - DNA, 25 bp, Homo sapien
cacacccagctggctatgttcattt

SEQ ID NO: 3419333 - DNA, 25 bp, Homo sapien
tcctccttccgccgcagattctcca

SEQ ID NO: 3419334 - DNA, 25 bp, Homo sapien
ccgccgcagattctccaggcgctgc

SEQ ID NO: 3419335 - DNA, 25 bp, Homo sapien
tccttccgccgcagattctccaggc

SEQ ID NO: 3419336 - DNA, 25 bp, Homo sapien
ttccgccgcagattctccaggcgct

SEQ ID NO: 3419337 - DNA, 25 bp, Homo sapien
tccagccgccgccgcttgtcctcct

SEQ ID NO: 3419338 - DNA, 25 bp, Homo sapien
cctcctccagccgccgccgcttgtc

SEQ ID NO: 3419339 - DNA, 25 bp, Homo sapien
ctccagccgccgccgcttgtcctcc

SEQ ID NO: 3419340 - DNA, 25 bp, Homo sapien
tcctccagccgccgccgcttgtcct

SEQ ID NO: 3419341 - DNA, 25 bp, Homo sapien
cttgcggaggcgttcctcacgcttc

SEQ ID NO: 3419342 - DNA, 25 bp, Homo sapien
ttcatctgctccacccgctcgcggg

SEQ ID NO: 3419343 - DNA, 25 bp, Homo sapien
cctgcagcaccttgcggaggcgttc

SEQ ID NO: 3419344 - DNA, 25 bp, Homo sapien
ctcagtcttctcgtcgatctgagca

SEQ ID NO: 3419345 - DNA, 25 bp, Homo sapien
gcttcctgcgtgcttccacctcctc

SEQ ID NO: 3419346 - DNA, 25 bp, Homo sapien
ctgcttcctgcgtgcttccacctcc

SEQ ID NO: 3419347 - DNA, 25 bp, Homo sapien
gcagctcttggtgccgccgctcttc

SEQ ID NO: 3419348 - DNA, 25 bp, Homo sapien
cttagcctcggccgccttccgcagc

SEQ ID NO: 3419349 - DNA, 25 bp, Homo sapien
agccgcttagcctcggccgccttcc

SEQ ID NO: 3419350 - DNA, 25 bp, Homo sapien
cgcttagcctcggccgccttccgca

SEQ ID NO: 3419351 - DNA, 25 bp, Homo sapien
cctccagttccctctgcagctgctc

SEQ ID NO: 3419352 - DNA, 25 bp, Homo sapien
gcagggccttctcccgctcctgcag

SEQ ID NO: 3419353 - DNA, 25 bp, Homo sapien
tgctccttctgcagccgcagggcct

SEQ ID NO: 3419354 - DNA, 25 bp, Homo sapien
tctcctccagttccctctgcagctg

SEQ ID NO: 3419355 - DNA, 25 bp, Homo sapien
agctgccgctcagccagacgctgct

SEQ ID NO: 3419356 - DNA, 25 bp, Homo sapien
tgcacgtccacagtcacattcaggg

SEQ ID NO: 3419357 - DNA, 25 bp, Homo sapien
ctgcagctgccgctcagccagacgc

SEQ ID NO: 3419358 - DNA, 25 bp, Homo sapien
attcagggccttgctggcccctgct

SEQ ID NO: 3419359 - DNA, 25 bp, Homo sapien
ctgagagcctctccactggggccca

SEQ ID NO: 3419360 - DNA, 25 bp, Homo sapien
cctctccactggggcccaggtggca

SEQ ID NO: 3419361 - DNA, 25 bp, Homo sapien
agagcctctccactggggcccaggt

SEQ ID NO: 3419362 - DNA, 25 bp, Homo sapien
ctctccactggggcccaggtggcac

SEQ ID NO: 3419363 - DNA, 25 bp, Homo sapien
catcccgtagttatctgggttgatc

SEQ ID NO: 3419364 - DNA, 25 bp, Homo sapien
catctgatatgaggtacaagctgga

SEQ ID NO: 3419365 - DNA, 25 bp, Homo sapien
gtcgctattcagatccatcccgtag

SEQ ID NO: 3419366 - DNA, 25 bp, Homo sapien
atgggcctcatcatcggtggagtcg

SEQ ID NO: 3419367 - DNA, 25 bp, Homo sapien
tgatagcggggcttgctcttcttga

SEQ ID NO: 3419368 - DNA, 25 bp, Homo sapien
ctggtgaatgatagcctggctgagc

SEQ ID NO: 3419369 - DNA, 25 bp, Homo sapien
cagcagagctggtgcgcttgtgata

SEQ ID NO: 3419370 - DNA, 25 bp, Homo sapien
gagaatggttccaaagagctccaga

SEQ ID NO: 3419371 - DNA, 25 bp, Homo sapien
agtgcttcttcaggctgtaggccag

SEQ ID NO: 3419372 - DNA, 25 bp, Homo sapien
tcagtgcttcttcaggctgtaggcc

SEQ ID NO: 3419373 - DNA, 25 bp, Homo sapien
cttcttcaggctgtaggccaggctg

SEQ ID NO: 3419374 - DNA, 25 bp, Homo sapien
tgcttcttcaggctgtaggccaggc

SEQ ID NO: 3419375 - DNA, 25 bp, Homo sapien
acagatagacatggacaggaggcga

SEQ ID NO: 3419376 - DNA, 25 bp, Homo sapien
tatactttattaatctacctcccaa

SEQ ID NO: 3419377 - DNA, 25 bp, Homo sapien
tcccaaacgctaaaatgccaaagac

SEQ ID NO: 3419378 - DNA, 25 bp, Homo sapien
cacccagcacagaggacgtttatat

SEQ ID NO: 3419379 - DNA, 25 bp, Homo sapien
cacaccgcaggtgatggaacagtac

SEQ ID NO: 3419380 - DNA, 25 bp, Homo sapien
tgcacctggtgatcctgaggcacac

SEQ ID NO: 3419381 - DNA, 25 bp, Homo sapien
ccaagacacacagctacagggctgg

SEQ ID NO: 3419382 - DNA, 25 bp, Homo sapien
ggaacagtaccttcgtcctgcaggc

SEQ ID NO: 3419383 - DNA, 25 bp, Homo sapien
ctttaaagaaccgactgtggctgga

SEQ ID NO: 3419384 - DNA, 25 bp, Homo sapien
cagtaactgacgtgttcctcaaggg

SEQ ID NO: 3419385 - DNA, 25 bp, Homo sapien
tcctcaagggttatccaggcagtgg

SEQ ID NO: 3419386 - DNA, 25 bp, Homo sapien
ggaaatatctcgctgcttgcaagca

SEQ ID NO: 3419387 - DNA, 25 bp, Homo sapien
cactcgccaattgactcagtacaag

SEQ ID NO: 3419388 - DNA, 25 bp, Homo sapien
gctgataaatatgcagaccaattgg

SEQ ID NO: 3419389 - DNA, 25 bp, Homo sapien
tcagtacaagtgtctagtcagagaa

SEQ ID NO: 3419390 - DNA, 25 bp, Homo sapien
ttagatatcagtacacacctatcag

SEQ ID NO: 3419391 - DNA, 25 bp, Homo sapien
gaaattcagcagagaaaggatagtc

SEQ ID NO: 3419392 - DNA, 25 bp, Homo sapien
tagacaatagtttcttagacatgac

SEQ ID NO: 3419393 - DNA, 25 bp, Homo sapien
gagaattaggacctaggactagaca

SEQ ID NO: 3419394 - DNA, 25 bp, Homo sapien
catcttgacttatgtggtattggca

SEQ ID NO: 3419395 - DNA, 25 bp, Homo sapien
aaggcgatcataaatatgttaattc

SEQ ID NO: 3419396 - DNA, 25 bp, Homo sapien
tgttcacggattaaaaggcgatcat

SEQ ID NO: 3419397 - DNA, 25 bp, Homo sapien
atggagagacacgtcatgttcacgg

SEQ ID NO: 3419398 - DNA, 25 bp, Homo sapien
gcaggacttttgtagctaagctaat

SEQ ID NO: 3419399 - DNA, 25 bp, Homo sapien
taaggaatctgcatgggttcatcta

SEQ ID NO: 3419400 - DNA, 25 bp, Homo sapien
tggcctcagagacagaactgagtat

SEQ ID NO: 3419401 - DNA, 25 bp, Homo sapien
cactaaagctacctatgtctaccgt

SEQ ID NO: 3419402 - DNA, 25 bp, Homo sapien
tgtgataacacatctttcatagagc

SEQ ID NO: 3419403 - DNA, 25 bp, Homo sapien
tgtacttgacttggtagcaggagga

SEQ ID NO: 3419404 - DNA, 25 bp, Homo sapien
tattctacaagttgtctctggcagg

SEQ ID NO: 3419405 - DNA, 25 bp, Homo sapien
tgtgctggccagaactaccataaaa

SEQ ID NO: 3419406 - DNA, 25 bp, Homo sapien
ttgctggagttttgtagaagtgccc

SEQ ID NO: 3419407 - DNA, 25 bp, Homo sapien
ccagatcttctcatatactgagaag

SEQ ID NO: 3419408 - DNA, 25 bp, Homo sapien
gatcaggacaacaagctcgctgtgt

SEQ ID NO: 3419409 - DNA, 25 bp, Homo sapien
ggaggaatcggtggacgtgggacgc

SEQ ID NO: 3419410 - DNA, 25 bp, Homo sapien
atgccagccaaggactcagcaacga

SEQ ID NO: 3419411 - DNA, 25 bp, Homo sapien
tactgggggaaatggcagccattcc

SEQ ID NO: 3419412 - DNA, 25 bp, Homo sapien
tggcagccattcctcccgcagctgt

SEQ ID NO: 3419413 - DNA, 25 bp, Homo sapien
caaatcttgccgtgatcaactggtc

SEQ ID NO: 3419414 - DNA, 25 bp, Homo sapien
tcaccaaatcttgccgtgatcaact

SEQ ID NO: 3419415 - DNA, 25 bp, Homo sapien
aatcttgccgtgatcaactggtcct

SEQ ID NO: 3419416 - DNA, 25 bp, Homo sapien
accaaatcttgccgtgatcaactgg

SEQ ID NO: 3419417 - DNA, 25 bp, Homo sapien
ctgctgtgagctcggctttaaccaa

SEQ ID NO: 3419418 - DNA, 25 bp, Homo sapien
taaccaatgatgagtgatttagact

SEQ ID NO: 3419419 - DNA, 25 bp, Homo sapien
cggctttaaccaatgatgagtgatt

SEQ ID NO: 3419420 - DNA, 25 bp, Homo sapien
tgagctcggctttaaccaatgatga

SEQ ID NO: 3419421 - DNA, 25 bp, Homo sapien
tgagcagcaggagacacaccgacag

SEQ ID NO: 3419422 - DNA, 25 bp, Homo sapien
gtgagcagcaggagacacaccgaca

SEQ ID NO: 3419423 - DNA, 25 bp, Homo sapien
gcgtgagcagcaggagacacaccga

SEQ ID NO: 3419424 - DNA, 25 bp, Homo sapien
agcagcaggagacacaccgacagcc

SEQ ID NO: 3419425 - DNA, 25 bp, Homo sapien
caagttggaacttgaacacaggttt

SEQ ID NO: 3419426 - DNA, 25 bp, Homo sapien
cataggccatcgtatccacgcattt

SEQ ID NO: 3419427 - DNA, 25 bp, Homo sapien
tttggcaagttggaacttgaacaca

SEQ ID NO: 3419428 - DNA, 25 bp, Homo sapien
actcttttctcataggccatcgtat

SEQ ID NO: 3419429 - DNA, 25 bp, Homo sapien
ctctggggacacggcatccaggtag

SEQ ID NO: 3419430 - DNA, 25 bp, Homo sapien
ctggggacacggcatccaggtaggt

SEQ ID NO: 3419431 - DNA, 25 bp, Homo sapien
acactctggggacacggcatccagg

SEQ ID NO: 3419432 - DNA, 25 bp, Homo sapien
cactctggggacacggcatccaggt

SEQ ID NO: 3419433 - DNA, 25 bp, Homo sapien
tcagcgatcacatttctctgctatt

SEQ ID NO: 3419434 - DNA, 25 bp, Homo sapien
agcgatcacatttctctgctatttt

SEQ ID NO: 3419435 - DNA, 25 bp, Homo sapien
cagcgatcacatttctctgctattt

SEQ ID NO: 3419436 - DNA, 25 bp, Homo sapien
gcaagacgttgaaacctttacattc

SEQ ID NO: 3419437 - DNA, 25 bp, Homo sapien
cctttacattctgcagtgaagatca

SEQ ID NO: 3419438 - DNA, 25 bp, Homo sapien
agcaagacgttgaaacctttacatt

SEQ ID NO: 3419439 - DNA, 25 bp, Homo sapien
aacctttacattctgcagtgaagat

SEQ ID NO: 3419440 - DNA, 25 bp, Homo sapien
ttcagtcgtgcgtggcagggatcaa

SEQ ID NO: 3419441 - DNA, 25 bp, Homo sapien
tgtctgtgttcagtcgtgcgtggca

SEQ ID NO: 3419442 - DNA, 25 bp, Homo sapien
gctgctgtctgtgttcagtcgtgcg

SEQ ID NO: 3419443 - DNA, 25 bp, Homo sapien
cagggatcaaggaagttgctgtgga

SEQ ID NO: 3419444 - DNA, 25 bp, Homo sapien
ccagcatgaggaccatcagcagctt

SEQ ID NO: 3419445 - DNA, 25 bp, Homo sapien
ccgccagcatgaggaccatcagcag

SEQ ID NO: 3419446 - DNA, 25 bp, Homo sapien
gccagcatgaggaccatcagcagct

SEQ ID NO: 3419447 - DNA, 25 bp, Homo sapien
cgccagcatgaggaccatcagcagc

SEQ ID NO: 3419448 - DNA, 25 bp, Homo sapien
gagtgccatgatacactgtgtgcag

SEQ ID NO: 3419449 - DNA, 25 bp, Homo sapien
tgcttgattgtcaggaactcatggg

SEQ ID NO: 3419450 - DNA, 25 bp, Homo sapien
gaccatggtgagacgctgagtgcca

SEQ ID NO: 3419451 - DNA, 25 bp, Homo sapien
caggtgacaattcctagcccagaag

SEQ ID NO: 3419452 - DNA, 25 bp, Homo sapien
gaagctctttgtattcaggtataga

SEQ ID NO: 3419453 - DNA, 25 bp, Homo sapien
tctatgtgactggttgaggaaacac

SEQ ID NO: 3419454 - DNA, 25 bp, Homo sapien
gatggtcttttcaaccatgtcctcc

SEQ ID NO: 3419455 - DNA, 25 bp, Homo sapien
atagcctctgcagcggcatcactgt

SEQ ID NO: 3419456 - DNA, 25 bp, Homo sapien
accaaatgctgtcgtacactgtatg

SEQ ID NO: 3419457 - DNA, 25 bp, Homo sapien
acaccaaatgctgtcgtacactgta

SEQ ID NO: 3419458 - DNA, 25 bp, Homo sapien
caccaaatgctgtcgtacactgtat

SEQ ID NO: 3419459 - DNA, 25 bp, Homo sapien
caacagatgagttctggccatagtc

SEQ ID NO: 3419460 - DNA, 25 bp, Homo sapien
tcaacagttgtctagcagtttccac

SEQ ID NO: 3419461 - DNA, 25 bp, Homo sapien
ctctgagccaaacgccttgggtaaa

SEQ ID NO: 3419462 - DNA, 25 bp, Homo sapien
tggccatagtctgtagccctctgag

SEQ ID NO: 3419463 - DNA, 25 bp, Homo sapien
taagcaacaagagctaatactttgt

SEQ ID NO: 3419464 - DNA, 25 bp, Homo sapien
ctaagcaacaagagctaatactttg

SEQ ID NO: 3419465 - DNA, 25 bp, Homo sapien
aagcaacaagagctaatactttgtt

SEQ ID NO: 3419466 - DNA, 25 bp, Homo sapien
tcaagagccccatttcacacataaa

SEQ ID NO: 3419467 - DNA, 25 bp, Homo sapien
gaaatgaactcttaactttggatgg

SEQ ID NO: 3419468 - DNA, 25 bp, Homo sapien
caggcccttgtaagagagtatagct

SEQ ID NO: 3419469 - DNA, 25 bp, Homo sapien
taaagggttgtacagagatctagca

SEQ ID NO: 3419470 - DNA, 25 bp, Homo sapien
ctgtgagctcagctttcacaaacaa

SEQ ID NO: 3419471 - DNA, 25 bp, Homo sapien
gtggcttgttttgctgtgagctcag

SEQ ID NO: 3419472 - DNA, 25 bp, Homo sapien
gtgagctcagctttcacaaacaatg

SEQ ID NO: 3419473 - DNA, 25 bp, Homo sapien
tcacaaacaatgagtgatttggact

SEQ ID NO: 3419474 - DNA, 25 bp, Homo sapien
cagcgtgaccagcaggagacacacc

SEQ ID NO: 3419475 - DNA, 25 bp, Homo sapien
cagcagagggccagcgtgaccagca

SEQ ID NO: 3419476 - DNA, 25 bp, Homo sapien
gcaggagacacaccgacagcttcat

SEQ ID NO: 3419477 - DNA, 25 bp, Homo sapien
ccagcaggagacacaccgacagctt

SEQ ID NO: 3419478 - DNA, 25 bp, Homo sapien
tctgaagggacatctgatccgtgca

SEQ ID NO: 3419479 - DNA, 25 bp, Homo sapien
tcactcctaacttggctgcaacagc

SEQ ID NO: 3419480 - DNA, 25 bp, Homo sapien
caagacttaacttgaacagaggttc

SEQ ID NO: 3419481 - DNA, 25 bp, Homo sapien
caggacttccgcaatgaggcttcgt

SEQ ID NO: 3419482 - DNA, 25 bp, Homo sapien
tcctcatggaagcaagtgacgaggg

SEQ ID NO: 3419483 - DNA, 25 bp, Homo sapien
agaggttattgcctgggctgtccca

SEQ ID NO: 3419484 - DNA, 25 bp, Homo sapien
atccgggaatgaggcccaggatcct

SEQ ID NO: 3419485 - DNA, 25 bp, Homo sapien
ggagcagccttttcttgccaggcca

SEQ ID NO: 3419486 - DNA, 25 bp, Homo sapien
cacactacatttcttcaatattttc

SEQ ID NO: 3419487 - DNA, 25 bp, Homo sapien
tcacacactacatttcttcaatatt

SEQ ID NO: 3419488 - DNA, 25 bp, Homo sapien
cactacatttcttcaatattttcac

SEQ ID NO: 3419489 - DNA, 25 bp, Homo sapien
cacacactacatttcttcaatattt

SEQ ID NO: 3419490 - DNA, 25 bp, Homo sapien
agcaagacgttgaaacctttacatt

SEQ ID NO: 3419491 - DNA, 25 bp, Homo sapien
cctttacattctgcagtgaagatca

SEQ ID NO: 3419492 - DNA, 25 bp, Homo sapien
gcaagacgttgaaacctttacattc

SEQ ID NO: 3419493 - DNA, 25 bp, Homo sapien
aacctttacattctgcagtgaagat

SEQ ID NO: 3419494 - DNA, 25 bp, Homo sapien
tgtcggtgttcagtcgcgggtggca

SEQ ID NO: 3419495 - DNA, 25 bp, Homo sapien
ctgctgctgtcggtgttcagtcgcg

SEQ ID NO: 3419496 - DNA, 25 bp, Homo sapien
tcggtgttcagtcgcgggtggcaag

SEQ ID NO: 3419497 - DNA, 25 bp, Homo sapien
ttcagtcgcgggtggcaaggatcaa

SEQ ID NO: 3419498 - DNA, 25 bp, Homo sapien
ccgccagcatgaggaccatcagcaa

SEQ ID NO: 3419499 - DNA, 25 bp, Homo sapien
cacttgtggattgattgtcttggaa

SEQ ID NO: 3419500 - DNA, 25 bp, Homo sapien
tagtggcattgtcgtctatgaactc

SEQ ID NO: 3419501 - DNA, 25 bp, Homo sapien
gctcagagtttcatccgtttggtta

SEQ ID NO: 3419502 - DNA, 25 bp, Homo sapien
tgtattcagtcttagacacttgtgg

SEQ ID NO: 3419503 - DNA, 25 bp, Homo sapien
gcttgttcactagtggctttggcat

SEQ ID NO: 3419504 - DNA, 25 bp, Homo sapien
gaaaaggcttgttcactagtggctt

SEQ ID NO: 3419505 - DNA, 25 bp, Homo sapien
aagaaaaggcttgttcactagtggc

SEQ ID NO: 3419506 - DNA, 25 bp, Homo sapien
accaatgtaagaaaaggcttgttca

SEQ ID NO: 3419507 - DNA, 25 bp, Homo sapien
gattggtctataggtgcgggtcttc

SEQ ID NO: 3419508 - DNA, 25 bp, Homo sapien
ggtggtttcatacccatgatctaca

SEQ ID NO: 3419509 - DNA, 25 bp, Homo sapien
tctacagttgcctattggatagtcc

SEQ ID NO: 3419510 - DNA, 25 bp, Homo sapien
ccactgaggattctctgggtagagt

SEQ ID NO: 3419511 - DNA, 25 bp, Homo sapien
gctctcgtctaaccctccattgtgg

SEQ ID NO: 3419512 - DNA, 25 bp, Homo sapien
ggttgtgcaacctaactccagaata

SEQ ID NO: 3419513 - DNA, 25 bp, Homo sapien
tactaattattggagctgcagacta

SEQ ID NO: 3419514 - DNA, 25 bp, Homo sapien
cagactatgatctgtctgaggaagc

SEQ ID NO: 3419515 - DNA, 25 bp, Homo sapien
tatctttttccacggtttgcccaca

SEQ ID NO: 3419516 - DNA, 25 bp, Homo sapien
aataaatcacaaagactgctgtcat

SEQ ID NO: 3419517 - DNA, 25 bp, Homo sapien
gaaggtgtggtttgcagcaatccgt

SEQ ID NO: 3419518 - DNA, 25 bp, Homo sapien
gcaatccgtagttggtttctcacca

SEQ ID NO: 3419519 - DNA, 25 bp, Homo sapien
gcagttctgtgagccaaaggtcttg

SEQ ID NO: 3419520 - DNA, 25 bp, Homo sapien
gcaggtttcaacaattgtcttgtag

SEQ ID NO: 3419521 - DNA, 25 bp, Homo sapien
cgcgggccggtcctgttgaatgtct

SEQ ID NO: 3419522 - DNA, 25 bp, Homo sapien
cggcagagagcaccgcgggccggtc

SEQ ID NO: 3419523 - DNA, 25 bp, Homo sapien
tgctgtggcgcagcggcagagagca

SEQ ID NO: 3419524 - DNA, 25 bp, Homo sapien
ggtgctgtggcgcagcggcagagag

SEQ ID NO: 3419525 - DNA, 25 bp, Homo sapien
cttcacctgaaataccaatgcaggt

SEQ ID NO: 3419526 - DNA, 25 bp, Homo sapien
aatggctaagatctgtggaaacagc

SEQ ID NO: 3419527 - DNA, 25 bp, Homo sapien
caggtgtaaccagaatattcaaatt

SEQ ID NO: 3419528 - DNA, 25 bp, Homo sapien
caagggaatggctaagatctgtgga

SEQ ID NO: 3419529 - DNA, 25 bp, Homo sapien
tcctgcatgtctcctgtggacacag

SEQ ID NO: 3419530 - DNA, 25 bp, Homo sapien
ctgtggacacagacttttgttcaga

SEQ ID NO: 3419531 - DNA, 25 bp, Homo sapien
ggacacagacttttgttcagatccc

SEQ ID NO: 3419532 - DNA, 25 bp, Homo sapien
ctcctgtggacacagacttttgttc

SEQ ID NO: 3419533 - DNA, 25 bp, Homo sapien
ccaggttatcctgggctccttctct

SEQ ID NO: 3419534 - DNA, 25 bp, Homo sapien
gcttcaacagtgtgccattcatcct

SEQ ID NO: 3419535 - DNA, 25 bp, Homo sapien
ctctgcttcaacagtgtgccattca

SEQ ID NO: 3419536 - DNA, 25 bp, Homo sapien
aacagtgtgccattcatcctttgca

SEQ ID NO: 3419537 - DNA, 25 bp, Homo sapien
caacagtgtgccattcatcctttgc

SEQ ID NO: 3419538 - DNA, 25 bp, Homo sapien
tttttctttggtttccttatcatca

SEQ ID NO: 3419539 - DNA, 25 bp, Homo sapien
ttcataatcatcatcttcatcggca

SEQ ID NO: 3419540 - DNA, 25 bp, Homo sapien
cttcataatcatcatcttcatcggc

SEQ ID NO: 3419541 - DNA, 25 bp, Homo sapien
ttctttggtttccttatcatcaaaa

SEQ ID NO: 3419542 - DNA, 25 bp, Homo sapien
gatcttgaatagcagtcatccggaa

SEQ ID NO: 3419543 - DNA, 25 bp, Homo sapien
ccttgcttgcatgtttgctttaacg

SEQ ID NO: 3419544 - DNA, 25 bp, Homo sapien
gagatcttgaatagcagtcatccgg

SEQ ID NO: 3419545 - DNA, 25 bp, Homo sapien
tcttgaatagcagtcatccggaagc

SEQ ID NO: 3419546 - DNA, 25 bp, Homo sapien
cgctcagcccgcaaccgctctggtc

SEQ ID NO: 3419547 - DNA, 25 bp, Homo sapien
aagctgggtcgagccagccccgcag

SEQ ID NO: 3419548 - DNA, 25 bp, Homo sapien
gacgcggacgccgagacctcaagct

SEQ ID NO: 3419549 - DNA, 25 bp, Homo sapien
gctcgaaaccgctcagcccgcaacc

SEQ ID NO: 3419550 - DNA, 25 bp, Homo sapien
aagccgcgcgggtacaaggtcctcg

SEQ ID NO: 3419551 - DNA, 25 bp, Homo sapien
ccagcccaaggaagccgcgcgggta

SEQ ID NO: 3419552 - DNA, 25 bp, Homo sapien
ctaggcagcaggaaggcgaaagcgt

SEQ ID NO: 3419553 - DNA, 25 bp, Homo sapien
aaggcgaaagcgtcgtccaaagcca

SEQ ID NO: 3419554 - DNA, 25 bp, Homo sapien
gtggcggctctgaccatgccctggt

SEQ ID NO: 3419555 - DNA, 25 bp, Homo sapien
agggcgacgacagctccctctacgg

SEQ ID NO: 3419556 - DNA, 25 bp, Homo sapien
ctgcgttgaactcgggatcgtcttc

SEQ ID NO: 3419557 - DNA, 25 bp, Homo sapien
gctccttccgatccttggagatggg

SEQ ID NO: 3419558 - DNA, 25 bp, Homo sapien
tatctgcagccacaagtccttatat

SEQ ID NO: 3419559 - DNA, 25 bp, Homo sapien
caccgtgctaaaccgccttctatta

SEQ ID NO: 3419560 - DNA, 25 bp, Homo sapien
agaggtggcttttcacctgttagcc

SEQ ID NO: 3419561 - DNA, 25 bp, Homo sapien
aaccgccttctattaattctatctg

SEQ ID NO: 3419562 - DNA, 25 bp, Homo sapien
aagcacactattaggtctcatttta

SEQ ID NO: 3419563 - DNA, 25 bp, Homo sapien
gctctacaaatggagccatgaaagc

SEQ ID NO: 3419564 - DNA, 25 bp, Homo sapien
cagtgcctatctggtaaattctggc

SEQ ID NO: 3419565 - DNA, 25 bp, Homo sapien
tggcaaagtcagtgcctatctggta

SEQ ID NO: 3419566 - DNA, 25 bp, Homo sapien
tttcttcctcaatatgcggaataga

SEQ ID NO: 3419567 - DNA, 25 bp, Homo sapien
tcttcctcaatatgcggaatagagg

SEQ ID NO: 3419568 - DNA, 25 bp, Homo sapien
agggcagacgttgagaaggaaggcc

SEQ ID NO: 3419569 - DNA, 25 bp, Homo sapien
tcaatatgcggaatagaggacattt

SEQ ID NO: 3419570 - DNA, 25 bp, Homo sapien
caagtgctgtgtaaatatcgctgag

SEQ ID NO: 3419571 - DNA, 25 bp, Homo sapien
tcatgaatgctaattactgccactg

SEQ ID NO: 3419572 - DNA, 25 bp, Homo sapien
ccactgaactcaatacctactggga

SEQ ID NO: 3419573 - DNA, 25 bp, Homo sapien
tatcgctgagctccagtgaaagcaa

SEQ ID NO: 3419574 - DNA, 25 bp, Homo sapien
cgcccagcctgtaagtggaactttc

SEQ ID NO: 3419575 - DNA, 25 bp, Homo sapien
gcgcccagcctgtaagtggaacttt

SEQ ID NO: 3419576 - DNA, 25 bp, Homo sapien
tgggaatgttaaagtttggcagttc

SEQ ID NO: 3419577 - DNA, 25 bp, Homo sapien
ggtggttactatctccctgtgtgct

SEQ ID NO: 3419578 - DNA, 25 bp, Homo sapien
gcccatgagagtgggcaagctctct

SEQ ID NO: 3419579 - DNA, 25 bp, Homo sapien
tggttcaggactccatccttatgac

SEQ ID NO: 3419580 - DNA, 25 bp, Homo sapien
gacactaatcctattggttcaggac

SEQ ID NO: 3419581 - DNA, 25 bp, Homo sapien
ctatacactggactgcggacactgc

SEQ ID NO: 3419582 - DNA, 25 bp, Homo sapien
ttttccatgacaagccgagcaagtt

SEQ ID NO: 3419583 - DNA, 25 bp, Homo sapien
caccatttgtgttcaagacagaccc

SEQ ID NO: 3419584 - DNA, 25 bp, Homo sapien
tccatccatgatactagcatccatt

SEQ ID NO: 3419585 - DNA, 25 bp, Homo sapien
gcaaactgcgctgcgccttggtcag

SEQ ID NO: 3419586 - DNA, 25 bp, Homo sapien
cgctgcgccttggtcagtcagaaag

SEQ ID NO: 3419587 - DNA, 25 bp, Homo sapien
tgcgctgcgccttggtcagtcagaa

SEQ ID NO: 3419588 - DNA, 25 bp, Homo sapien
actgcgctgcgccttggtcagtcag

SEQ ID NO: 3419589 - DNA, 25 bp, Homo sapien
ccaggcgctttttgtttctctctgt

SEQ ID NO: 3419590 - DNA, 25 bp, Homo sapien
tttccaggcgctttttgtttctctc

SEQ ID NO: 3419591 - DNA, 25 bp, Homo sapien
gttttctgagcacctttttcatgct

SEQ ID NO: 3419592 - DNA, 25 bp, Homo sapien
tctgagcacctttttcatgcttctc

SEQ ID NO: 3419593 - DNA, 25 bp, Homo sapien
actcccaaataatgcgagccacagg

SEQ ID NO: 3419594 - DNA, 25 bp, Homo sapien
ccaaataatgcgagccacaggtaag

SEQ ID NO: 3419595 - DNA, 25 bp, Homo sapien
aatgcgagccacaggtaagacttac

SEQ ID NO: 3419596 - DNA, 25 bp, Homo sapien
tttaataactcccaaataatgcgag

SEQ ID NO: 3419597 - DNA, 25 bp, Homo sapien
ctcgggaggctcgcgcttccggctg

SEQ ID NO: 3419598 - DNA, 25 bp, Homo sapien
ctgcggggccgccacgtttcctggg

SEQ ID NO: 3419599 - DNA, 25 bp, Homo sapien
gctgcggggccgccacgtttcctgg

SEQ ID NO: 3419600 - DNA, 25 bp, Homo sapien
gggaggctcgcgcttccggctgcgg

SEQ ID NO: 3419601 - DNA, 25 bp, Homo sapien
ttcggcgaccaccacagccgcaccg

SEQ ID NO: 3419602 - DNA, 25 bp, Homo sapien
tgtgctcgggttcggcgaccaccac

SEQ ID NO: 3419603 - DNA, 25 bp, Homo sapien
acagccgcaccgcccaccttgcctg

SEQ ID NO: 3419604 - DNA, 25 bp, Homo sapien
tcgggttcggcgaccaccacagccg

SEQ ID NO: 3419605 - DNA, 25 bp, Homo sapien
aaacacagcacgtctcaagtttgac

SEQ ID NO: 3419606 - DNA, 25 bp, Homo sapien
cactcctggccttgtttaggcactt

SEQ ID NO: 3419607 - DNA, 25 bp, Homo sapien
gccttgtttaggcacttattttcga

SEQ ID NO: 3419608 - DNA, 25 bp, Homo sapien
cttgagtaaacacagcacgtctcaa

SEQ ID NO: 3419609 - DNA, 25 bp, Homo sapien
cccacaaattctgacggatattgcc

SEQ ID NO: 3419610 - DNA, 25 bp, Homo sapien
cgccaggcacccatacctatggggt

SEQ ID NO: 3419611 - DNA, 25 bp, Homo sapien
cacccatacctatggggtccccaca

SEQ ID NO: 3419612 - DNA, 25 bp, Homo sapien
ccacaaattctgacggatattgccg

SEQ ID NO: 3419613 - DNA, 25 bp, Homo sapien
gctttccttctgtggtgatgaggag

SEQ ID NO: 3419614 - DNA, 25 bp, Homo sapien
ttcgtggctgagaccctcggtgagt

SEQ ID NO: 3419615 - DNA, 25 bp, Homo sapien
ttctcatttcgaccccagctccaca

SEQ ID NO: 3419616 - DNA, 25 bp, Homo sapien
ggctgagaccctcggtgagtctggg

SEQ ID NO: 3419617 - DNA, 25 bp, Homo sapien
gacagcgtctgtctagttgccaagg

SEQ ID NO: 3419618 - DNA, 25 bp, Homo sapien
caggctgttgtacattatctgcaca

SEQ ID NO: 3419619 - DNA, 25 bp, Homo sapien
caaggtgtggttccgcgcacacgct

SEQ ID NO: 3419620 - DNA, 25 bp, Homo sapien
cgtttccgtcaaggccaaggtgtgg

SEQ ID NO: 3419621 - DNA, 25 bp, Homo sapien
caaaggaatagaggtttcctttgca

SEQ ID NO: 3419622 - DNA, 25 bp, Homo sapien
tgaccatattcagggcacccaaagg

SEQ ID NO: 3419623 - DNA, 25 bp, Homo sapien
ctgaccatattcagggcacccaaag

SEQ ID NO: 3419624 - DNA, 25 bp, Homo sapien
aatagaggtttcctttgcagtccat

SEQ ID NO: 3419625 - DNA, 25 bp, Homo sapien
actagtttgcagtcatactctatct

SEQ ID NO: 3419626 - DNA, 25 bp, Homo sapien
aactagtttgcagtcatactctatc

SEQ ID NO: 3419627 - DNA, 25 bp, Homo sapien
ctagtttgcagtcatactctatctg

SEQ ID NO: 3419628 - DNA, 25 bp, Homo sapien
tagtttgcagtcatactctatctgc

SEQ ID NO: 3419629 - DNA, 25 bp, Homo sapien
tgtcttttgtcttctcaatgaagat

SEQ ID NO: 3419630 - DNA, 25 bp, Homo sapien
ttgtcttctcaatgaagatggccac

SEQ ID NO: 3419631 - DNA, 25 bp, Homo sapien
ttttgtcttctcaatgaagatggcc

SEQ ID NO: 3419632 - DNA, 25 bp, Homo sapien
tcttttgtcttctcaatgaagatgg

SEQ ID NO: 3419633 - DNA, 25 bp, Homo sapien
cagcatgtggttagcgccacaggcc

SEQ ID NO: 3419634 - DNA, 25 bp, Homo sapien
ggttagcgccacaggccacgtctcg

SEQ ID NO: 3419635 - DNA, 25 bp, Homo sapien
gcgccacaggccacgtctcgcataa

SEQ ID NO: 3419636 - DNA, 25 bp, Homo sapien
tgtggttagcgccacaggccacgtc

SEQ ID NO: 3419637 - DNA, 25 bp, Homo sapien
gctctgtgtagcccagccagccata

SEQ ID NO: 3419638 - DNA, 25 bp, Homo sapien
ccagttccccaaaggtcggtgatgg

SEQ ID NO: 3419639 - DNA, 25 bp, Homo sapien
gcttgtgatccctgtagcccagttc

SEQ ID NO: 3419640 - DNA, 25 bp, Homo sapien
tgatggtgctctcatcggctgccac

SEQ ID NO: 3419641 - DNA, 25 bp, Homo sapien
catggcgaccggctctgagaaaatg

SEQ ID NO: 3419642 - DNA, 25 bp, Homo sapien
tcagagggtttgggggctgtattct

SEQ ID NO: 3419643 - DNA, 25 bp, Homo sapien
gggctgtattctggcagtttcttga

SEQ ID NO: 3419644 - DNA, 25 bp, Homo sapien
tgggggctgtattctggcagtttct

SEQ ID NO: 3419645 - DNA, 25 bp, Homo sapien
agggtttgggggctgtattctggca

SEQ ID NO: 3419646 - DNA, 25 bp, Homo sapien
gaaaggcagcttacatagggccaaa

SEQ ID NO: 3419647 - DNA, 25 bp, Homo sapien
tagggccaaaagagcaagtaatcaa

SEQ ID NO: 3419648 - DNA, 25 bp, Homo sapien
cccagaggtctatgtcctaatgtgt

SEQ ID NO: 3419649 - DNA, 25 bp, Homo sapien
ttatcaatcggctcaaagagctgag

SEQ ID NO: 3419650 - DNA, 25 bp, Homo sapien
aaccctgtgtcgcagagacgtgctg

SEQ ID NO: 3419651 - DNA, 25 bp, Homo sapien
gagctagagcgtggtcattgagaac

SEQ ID NO: 3419652 - DNA, 25 bp, Homo sapien
gaggtgctagcgacaatactgctct

SEQ ID NO: 3419653 - DNA, 25 bp, Homo sapien
catctggtgcccaacgtgggtgctt

SEQ ID NO: 3419654 - DNA, 25 bp, Homo sapien
cctgtggaggttgcgtaggctacat

SEQ ID NO: 3419655 - DNA, 25 bp, Homo sapien
tagacacggtgagtccccaacgcgg

SEQ ID NO: 3419656 - DNA, 25 bp, Homo sapien
tacattccctttgcagtccaaggca

SEQ ID NO: 3419657 - DNA, 25 bp, Homo sapien
ttattaacgataccgcctgtggagg

SEQ ID NO: 3419658 - DNA, 25 bp, Homo sapien
gagatggcgtgcttccccgttaatg

SEQ ID NO: 3419659 - DNA, 25 bp, Homo sapien
tgcacggagtgaaacatacagcccc

SEQ ID NO: 3419660 - DNA, 25 bp, Homo sapien
tctaggatctaacctggagtggccc

SEQ ID NO: 3419661 - DNA, 25 bp, Homo sapien
aatctagtaaaaacagtggcgccag

SEQ ID NO: 3419662 - DNA, 25 bp, Homo sapien
aaatcgcgaagggtgctcaagtacc

SEQ ID NO: 3419663 - DNA, 25 bp, Homo sapien
catgcacactgtctaatggagggca

SEQ ID NO: 3419664 - DNA, 25 bp, Homo sapien
ttagtagccatgatctgcggaggca

SEQ ID NO: 3419665 - DNA, 25 bp, Homo sapien
gaaagcgtcatgtagatgccccaga

SEQ ID NO: 3419666 - DNA, 25 bp, Homo sapien
catgccctgtggttgagacggctcc

SEQ ID NO: 3419667 - DNA, 25 bp, Homo sapien
cctgtggttgagacggctccgatgt

SEQ ID NO: 3419668 - DNA, 25 bp, Homo sapien
gacggctccgatgtcattgtcggca

SEQ ID NO: 3419669 - DNA, 25 bp, Homo sapien
tttccccatgccctgtggttgagac

SEQ ID NO: 3419670 - DNA, 25 bp, Homo sapien
acagggtgagtctagccaggttcac

SEQ ID NO: 3419671 - DNA, 25 bp, Homo sapien
tgtggaacagggtgagtctagccag

SEQ ID NO: 3419672 - DNA, 25 bp, Homo sapien
tggaacagggtgagtctagccaggt

SEQ ID NO: 3419673 - DNA, 25 bp, Homo sapien
gaacagggtgagtctagccaggttc

SEQ ID NO: 3419674 - DNA, 25 bp, Homo sapien
tcaaaacaaggtgttaacggcctga

SEQ ID NO: 3419675 - DNA, 25 bp, Homo sapien
gaaagcaacatctgtagccaacagg

SEQ ID NO: 3419676 - DNA, 25 bp, Homo sapien
cctgaatgcttaaaaggagggtcct

SEQ ID NO: 3419677 - DNA, 25 bp, Homo sapien
tgctctaccattccagacctaaggg

SEQ ID NO: 3419678 - DNA, 25 bp, Homo sapien
tgacttcatataacccaacgatagg

SEQ ID NO: 3419679 - DNA, 25 bp, Homo sapien
gtggaggtccactttgccacccagt

SEQ ID NO: 3419680 - DNA, 25 bp, Homo sapien
tgttttgctaaccacgatgaggcca

SEQ ID NO: 3419681 - DNA, 25 bp, Homo sapien
acgataggtccgcagcctcttctac

SEQ ID NO: 3419682 - DNA, 25 bp, Homo sapien
tatcgtcaggatcaattccgaagtg

SEQ ID NO: 3419683 - DNA, 25 bp, Homo sapien
gtgatagtagtatcgtcaggatcaa

SEQ ID NO: 3419684 - DNA, 25 bp, Homo sapien
ttccgaagtgcagcttgccgtcctt

SEQ ID NO: 3419685 - DNA, 25 bp, Homo sapien
tcaggatcaattccgaagtgcagct

SEQ ID NO: 3419686 - DNA, 25 bp, Homo sapien
tgagcctgacagactaaaacgttga

SEQ ID NO: 3419687 - DNA, 25 bp, Homo sapien
aagaatctcaaagcactggacaggg

SEQ ID NO: 3419688 - DNA, 25 bp, Homo sapien
gaagctatggattcccagagggtcc

SEQ ID NO: 3419689 - DNA, 25 bp, Homo sapien
ggaatactgcccaccgaggaaatga

SEQ ID NO: 3419690 - DNA, 25 bp, Homo sapien
ccagggtaagggacaccctcagagc

SEQ ID NO: 3419691 - DNA, 25 bp, Homo sapien
tccagggtaagggacaccctcagag

SEQ ID NO: 3419692 - DNA, 25 bp, Homo sapien
ctccagggtaagggacaccctcaga

SEQ ID NO: 3419693 - DNA, 25 bp, Homo sapien
cagggtaagggacaccctcagagca

SEQ ID NO: 3419694 - DNA, 25 bp, Homo sapien
gctgatggtgaaatgatctccaagg

SEQ ID NO: 3419695 - DNA, 25 bp, Homo sapien
gatggtgaaatgatctccaaggcag

SEQ ID NO: 3419696 - DNA, 25 bp, Homo sapien
tctgagctgatggtgaaatgatctc

SEQ ID NO: 3419697 - DNA, 25 bp, Homo sapien
gagctgatggtgaaatgatctccaa

SEQ ID NO: 3419698 - DNA, 25 bp, Homo sapien
gggatgctctggcccgtctctggtt

SEQ ID NO: 3419699 - DNA, 25 bp, Homo sapien
ggagggggatgctctggcccgtctc

SEQ ID NO: 3419700 - DNA, 25 bp, Homo sapien
tgctctggcccgtctctggttccgt

SEQ ID NO: 3419701 - DNA, 25 bp, Homo sapien
tggcccgtctctggttccgtctctg

SEQ ID NO: 3419702 - DNA, 25 bp, Homo sapien
ccagtgtgaccagggtgagggtgac

SEQ ID NO: 3419703 - DNA, 25 bp, Homo sapien
agcagagagccagtgtgaccagggt

SEQ ID NO: 3419704 - DNA, 25 bp, Homo sapien
cagagagccagtgtgaccagggtga

SEQ ID NO: 3419705 - DNA, 25 bp, Homo sapien
gagccagtgtgaccagggtgagggt

SEQ ID NO: 3419706 - DNA, 25 bp, Homo sapien
gagcttaatgatgctttctctgggc

SEQ ID NO: 3419707 - DNA, 25 bp, Homo sapien
ttcgatgacacgctgaaagctcggg

SEQ ID NO: 3419708 - DNA, 25 bp, Homo sapien
tccatggcagcctcataactggagg

SEQ ID NO: 3419709 - DNA, 25 bp, Homo sapien
tgatcagggctgaaaagttccatgg

SEQ ID NO: 3419710 - DNA, 25 bp, Homo sapien
gaagccacttctaaccagtgtgacg

SEQ ID NO: 3419711 - DNA, 25 bp, Homo sapien
aaccagtgtgacgtgaaaggtgctg

SEQ ID NO: 3419712 - DNA, 25 bp, Homo sapien
ctaaccagtgtgacgtgaaaggtgc

SEQ ID NO: 3419713 - DNA, 25 bp, Homo sapien
acttctaaccagtgtgacgtgaaag

SEQ ID NO: 3419714 - DNA, 25 bp, Homo sapien
ggtgcagtcaactctaggaggaact

SEQ ID NO: 3419715 - DNA, 25 bp, Homo sapien
tagttaggcagagatgacgagccac

SEQ ID NO: 3419716 - DNA, 25 bp, Homo sapien
gacgagccacagaaacttcaacatt

SEQ ID NO: 3419717 - DNA, 25 bp, Homo sapien
caacattaaccgagaggtgcagtca

SEQ ID NO: 3419718 - DNA, 25 bp, Homo sapien
aattacacagtgagctttgggctat

SEQ ID NO: 3419719 - DNA, 25 bp, Homo sapien
acacagtgagctttgggctattttt

SEQ ID NO: 3419720 - DNA, 25 bp, Homo sapien
ttacacagtgagctttgggctattt

SEQ ID NO: 3419721 - DNA, 25 bp, Homo sapien
ctaattacacagtgagctttgggct

SEQ ID NO: 3419722 - DNA, 25 bp, Homo sapien
gtttattgaagagagcaaggctggt

SEQ ID NO: 3419723 - DNA, 25 bp, Homo sapien
aggctggtgggcgtggactcaaagc

SEQ ID NO: 3419724 - DNA, 25 bp, Homo sapien
tggactcaaagcatggcagcggcag

SEQ ID NO: 3419725 - DNA, 25 bp, Homo sapien
tttattgaagagagcaaggctggtg

SEQ ID NO: 3419726 - DNA, 25 bp, Homo sapien
tctgttggacaagtggagtctgtga

SEQ ID NO: 3419727 - DNA, 25 bp, Homo sapien
atgttgagtagagtctgtgatgttg

SEQ ID NO: 3419728 - DNA, 25 bp, Homo sapien
ttgagtagatggtctgatataaggg

SEQ ID NO: 3419729 - DNA, 25 bp, Homo sapien
aggatcactggttctgttggacaag

SEQ ID NO: 3419730 - DNA, 25 bp, Homo sapien
ttatccgatgaaacaatactcatcc

SEQ ID NO: 3419731 - DNA, 25 bp, Homo sapien
ggcccaccagcgcaaaggtatgtgc

SEQ ID NO: 3419732 - DNA, 25 bp, Homo sapien
aatactcatccaggcggatggccca

SEQ ID NO: 3419733 - DNA, 25 bp, Homo sapien
gcaaaggtatgtgctttaggatgac

SEQ ID NO: 3419734 - DNA, 25 bp, Homo sapien
tataatcttgaacaccacccattgc

SEQ ID NO: 3419735 - DNA, 25 bp, Homo sapien
gcttgctggccccatattagcatct

SEQ ID NO: 3419736 - DNA, 25 bp, Homo sapien
aatctttctgtatgatggcagctcc

SEQ ID NO: 3419737 - DNA, 25 bp, Homo sapien
gtgatttgcgccgacttgtgacccc

SEQ ID NO: 3419738 - DNA, 25 bp, Homo sapien
tcagcatgggaagtttgacctcctt

SEQ ID NO: 3419739 - DNA, 25 bp, Homo sapien
tggtgtgcagtgactcttcacaggc

SEQ ID NO: 3419740 - DNA, 25 bp, Homo sapien
gtgtgcagtgactcttcacaggcac

SEQ ID NO: 3419741 - DNA, 25 bp, Homo sapien
gcagtgactcttcacaggcacagtc

SEQ ID NO: 3419742 - DNA, 25 bp, Homo sapien
ctgacggtgagaggaaattagaatc

SEQ ID NO: 3419743 - DNA, 25 bp, Homo sapien
tcatgccgccatgttcctgatatta

SEQ ID NO: 3419744 - DNA, 25 bp, Homo sapien
tagaatctgtttgcaaattgtccaa

SEQ ID NO: 3419745 - DNA, 25 bp, Homo sapien
tggccaattaactgagaatgtaaga

SEQ ID NO: 3419746 - DNA, 25 bp, Homo sapien
taaagagttccaagttcgtccagcc

SEQ ID NO: 3419747 - DNA, 25 bp, Homo sapien
tccagatgcgaaactaaagggcccc

SEQ ID NO: 3419748 - DNA, 25 bp, Homo sapien
tcttgacatcaaggcgaaggctccc

SEQ ID NO: 3419749 - DNA, 25 bp, Homo sapien
gatgcccaaggtgaaaatgcccaaa

SEQ ID NO: 3419750 - DNA, 25 bp, Homo sapien
cttgatgtctcaggacccaaggtgg

SEQ ID NO: 3419751 - DNA, 25 bp, Homo sapien
tcaggacccaaggtggacattgatg

SEQ ID NO: 3419752 - DNA, 25 bp, Homo sapien
tgtctcaggacccaaggtggacatt

SEQ ID NO: 3419753 - DNA, 25 bp, Homo sapien
ttgatgtctcaggacccaaggtgga

SEQ ID NO: 3419754 - DNA, 25 bp, Homo sapien
tcctgaagttgacatcaagggcccc

SEQ ID NO: 3419755 - DNA, 25 bp, Homo sapien
tgaagggccccaaagtcaagggcga

SEQ ID NO: 3419756 - DNA, 25 bp, Homo sapien
gacattaatgctccagatgttgatg

SEQ ID NO: 3419757 - DNA, 25 bp, Homo sapien
aatggaaggtgacctcaagggtcct

SEQ ID NO: 3419758 - DNA, 25 bp, Homo sapien
ctgacgtggatattaaaggccccaa

SEQ ID NO: 3419759 - DNA, 25 bp, Homo sapien
catgcctgacattgatcttaacctg

SEQ ID NO: 3419760 - DNA, 25 bp, Homo sapien
cgtggatattaaaggccccaaagtg

SEQ ID NO: 3419761 - DNA, 25 bp, Homo sapien
gaagggtgacatggatgtgtctctg

SEQ ID NO: 3419762 - DNA, 25 bp, Homo sapien
gatgtgaatcttgaagctccagagg

SEQ ID NO: 3419763 - DNA, 25 bp, Homo sapien
cagatgtggaggttcacgacccaga

SEQ ID NO: 3419764 - DNA, 25 bp, Homo sapien
cagatgttgacattaaagggcccaa

SEQ ID NO: 3419765 - DNA, 25 bp, Homo sapien
gccctaagttcaagatgccaagcat

SEQ ID NO: 3419766 - DNA, 25 bp, Homo sapien
aaatcactgggccatcacttgaggg

SEQ ID NO: 3419767 - DNA, 25 bp, Homo sapien
taggcctgaaaggtgccaagccaca

SEQ ID NO: 3419768 - DNA, 25 bp, Homo sapien
tctctggagagtggtgatcatggca

SEQ ID NO: 3419769 - DNA, 25 bp, Homo sapien
cagtgtgccctctgccaatattgag

SEQ ID NO: 3419770 - DNA, 25 bp, Homo sapien
ccagttgtggaggcacgtggctgtg

SEQ ID NO: 3419771 - DNA, 25 bp, Homo sapien
gtggaggcacgtggctgtggtccga

SEQ ID NO: 3419772 - DNA, 25 bp, Homo sapien
gccagttgtggaggcacgtggctgt

SEQ ID NO: 3419773 - DNA, 25 bp, Homo sapien
ttgtggaggcacgtggctgtggtcc

SEQ ID NO: 3419774 - DNA, 25 bp, Homo sapien
tctgagatgtctgcgcacttctgct

SEQ ID NO: 3419775 - DNA, 25 bp, Homo sapien
aaaagttgttaatgccagcttagac

SEQ ID NO: 3419776 - DNA, 25 bp, Homo sapien
tgccagcttagactctgagatgtct

SEQ ID NO: 3419777 - DNA, 25 bp, Homo sapien
tctgctccggttagaatgtggcata

SEQ ID NO: 3419778 - DNA, 25 bp, Homo sapien
ctctggtggtggaggtttcctgcgg

SEQ ID NO: 3419779 - DNA, 25 bp, Homo sapien
gaagtgagtttctcggtcctggaca

SEQ ID NO: 3419780 - DNA, 25 bp, Homo sapien
ggtaaggactgaagtgagtttctcg

SEQ ID NO: 3419781 - DNA, 25 bp, Homo sapien
tgcctgcgttgtcatcgggcttgga

SEQ ID NO: 3419782 - DNA, 25 bp, Homo sapien
ctccgcgcacgggggcccggccact

SEQ ID NO: 3419783 - DNA, 25 bp, Homo sapien
cgccctgccagacccgcccggaacg

SEQ ID NO: 3419784 - DNA, 25 bp, Homo sapien
cgcggggactgcaccgcccgccctg

SEQ ID NO: 3419785 - DNA, 25 bp, Homo sapien
agctgctctgccgcggggactgcac

SEQ ID NO: 3419786 - DNA, 25 bp, Homo sapien
acttcatttgccttctgggatcaga

SEQ ID NO: 3419787 - DNA, 25 bp, Homo sapien
tgagattaccctttgagcagtcaac

SEQ ID NO: 3419788 - DNA, 25 bp, Homo sapien
aaacagaccacacacttcatttgcc

SEQ ID NO: 3419789 - DNA, 25 bp, Homo sapien
ttctaaagagactgcaaacagacca

SEQ ID NO: 3419790 - DNA, 25 bp, Homo sapien
ctggttcgagagtacttttcctggg

SEQ ID NO: 3419791 - DNA, 25 bp, Homo sapien
gacgctggttcgagagtacttttcc

SEQ ID NO: 3419792 - DNA, 25 bp, Homo sapien
aacatctcttgccatcacctagctg

SEQ ID NO: 3419793 - DNA, 25 bp, Homo sapien
tcaagtgaacatctcttgccatcac

SEQ ID NO: 3419794 - DNA, 25 bp, Homo sapien
tcctacagttcgcacagctcgaggg

SEQ ID NO: 3419795 - DNA, 25 bp, Homo sapien
cagatttatgcgcacaaggacggag

SEQ ID NO: 3419796 - DNA, 25 bp, Homo sapien
aagaactcgcggcttttccagcggg

SEQ ID NO: 3419797 - DNA, 25 bp, Homo sapien
ctcactttggcaggcgggttcagac

SEQ ID NO: 3419798 - DNA, 25 bp, Homo sapien
tgaccactggaaagcatggagcccc

SEQ ID NO: 3419799 - DNA, 25 bp, Homo sapien
gtaactacgccctgaccttgctggt

SEQ ID NO: 3419800 - DNA, 25 bp, Homo sapien
caaggttacactggctagcaaggag

SEQ ID NO: 3419801 - DNA, 25 bp, Homo sapien
tattgcttatttacccagggagtgg

SEQ ID NO: 3419802 - DNA, 25 bp, Homo sapien
tatcttgagagatccctgcttaggg

SEQ ID NO: 3419803 - DNA, 25 bp, Homo sapien
tctgaagccctggactttgaaaccc

SEQ ID NO: 3419804 - DNA, 25 bp, Homo sapien
cagaatctccatcgctggactcggc

SEQ ID NO: 3419805 - DNA, 25 bp, Homo sapien
cagccagtcccaaaggctccagaat

SEQ ID NO: 3419806 - DNA, 25 bp, Homo sapien
tttggtgacatcaagcagctaactc

SEQ ID NO: 3419807 - DNA, 25 bp, Homo sapien
cagtgaggcttcataacttgaccaa

SEQ ID NO: 3419808 - DNA, 25 bp, Homo sapien
gaatcacagtgttccctaaacaggg

SEQ ID NO: 3419809 - DNA, 25 bp, Homo sapien
tagatgacctggataagttacctgt

SEQ ID NO: 3419810 - DNA, 25 bp, Homo sapien
ccttttgtacgccagttctcagaaa

SEQ ID NO: 3419811 - DNA, 25 bp, Homo sapien
taaacagataacaggtggtggtacc

SEQ ID NO: 3419812 - DNA, 25 bp, Homo sapien
tgaggcccctaagctggcatcaacc

SEQ ID NO: 3419813 - DNA, 25 bp, Homo sapien
tctgtccggtgtccggactttccta

SEQ ID NO: 3419814 - DNA, 25 bp, Homo sapien
cgagctgcgacggaaatagccgagc

SEQ ID NO: 3419815 - DNA, 25 bp, Homo sapien
tgttctccggatcggccgaaggtgt

SEQ ID NO: 3419816 - DNA, 25 bp, Homo sapien
tcgttccggaagaagccgagcggac

SEQ ID NO: 3419817 - DNA, 25 bp, Homo sapien
aataacctggcgaagcgctaaggcg

SEQ ID NO: 3419818 - DNA, 25 bp, Homo sapien
cctgaaatggtgtagctctgggccg

SEQ ID NO: 3419819 - DNA, 25 bp, Homo sapien
aagtgcatctcttccagtacccgtg

SEQ ID NO: 3419820 - DNA, 25 bp, Homo sapien
tgacttcgagacattcccgatcgcg

SEQ ID NO: 3419821 - DNA, 25 bp, Homo sapien
acactgtttagacccgctggctgag

SEQ ID NO: 3419822 - DNA, 25 bp, Homo sapien
tgttccttccggatggagacattct

SEQ ID NO: 3419823 - DNA, 25 bp, Homo sapien
tcccctcccactagaaatacaagaa

SEQ ID NO: 3419824 - DNA, 25 bp, Homo sapien
tgcccttccctttgacctctactgt

SEQ ID NO: 3419825 - DNA, 25 bp, Homo sapien
tgctttgtgttccttccggatggag

SEQ ID NO: 3419826 - DNA, 25 bp, Homo sapien
tgtggctcccacgttcctcggcagt

SEQ ID NO: 3419827 - DNA, 25 bp, Homo sapien
ttgcggaggctgagacggcagcagg

SEQ ID NO: 3419828 - DNA, 25 bp, Homo sapien
cacgttcctcggcagtactccatat

SEQ ID NO: 3419829 - DNA, 25 bp, Homo sapien
cggtactccatggtactcccagtct

SEQ ID NO: 3419830 - DNA, 25 bp, Homo sapien
ttgagctgggctaatgccaccctga

SEQ ID NO: 3419831 - DNA, 25 bp, Homo sapien
ccatctctgcccaagggaatgcaga

SEQ ID NO: 3419832 - DNA, 25 bp, Homo sapien
cccggcccggcttgagctgggctaa

SEQ ID NO: 3419833 - DNA, 25 bp, Homo sapien
gaccccaataccctgagcatcctcc

SEQ ID NO: 3419834 - DNA, 25 bp, Homo sapien
tgcattcagacttgcccggctggct

SEQ ID NO: 3419835 - DNA, 25 bp, Homo sapien
cagagcccttgtgccaggcggatgc

SEQ ID NO: 3419836 - DNA, 25 bp, Homo sapien
ccttagctggaccaggaggtgccca

SEQ ID NO: 3419837 - DNA, 25 bp, Homo sapien
caccagccttttggcctgacagtgc

SEQ ID NO: 3419838 - DNA, 25 bp, Homo sapien
caaaccaatccttgtacccgtggcg

SEQ ID NO: 3419839 - DNA, 25 bp, Homo sapien
ggatccaggtaacggctgctgaccc

SEQ ID NO: 3419840 - DNA, 25 bp, Homo sapien
acatcccggtcaccgggatccaggt

SEQ ID NO: 3419841 - DNA, 25 bp, Homo sapien
gtcaccgggatccaggtaacggctg

SEQ ID NO: 3419842 - DNA, 25 bp, Homo sapien
tgacagccagcatgctacccagtgt

SEQ ID NO: 3419843 - DNA, 25 bp, Homo sapien
gaaagacggttttgcaggcaaggcc

SEQ ID NO: 3419844 - DNA, 25 bp, Homo sapien
gaaagggaccccatcagtcaggtat

SEQ ID NO: 3419845 - DNA, 25 bp, Homo sapien
ggtataggccttctacattgctctg

SEQ ID NO: 3419846 - DNA, 25 bp, Homo sapien
cagcatatctttcagcccactggga

SEQ ID NO: 3419847 - DNA, 25 bp, Homo sapien
ccagtgctgtttgcaggtaccgcag

SEQ ID NO: 3419848 - DNA, 25 bp, Homo sapien
ggcctcagatagatcctccttggga

SEQ ID NO: 3419849 - DNA, 25 bp, Homo sapien
taccgcaggccaaggagcaccagag

SEQ ID NO: 3419850 - DNA, 25 bp, Homo sapien
ggctaggccctaggacatctggttt

SEQ ID NO: 3419851 - DNA, 25 bp, Homo sapien
ggttctgactacaagggctaggccc

SEQ ID NO: 3419852 - DNA, 25 bp, Homo sapien
taaggagttgtgaggttttcagact

SEQ ID NO: 3419853 - DNA, 25 bp, Homo sapien
agtccagctcgctgactatccttag

SEQ ID NO: 3419854 - DNA, 25 bp, Homo sapien
aactgcactcgggtaagggaatgga

SEQ ID NO: 3419855 - DNA, 25 bp, Homo sapien
tcagccttgctgactctactgaagg

SEQ ID NO: 3419856 - DNA, 25 bp, Homo sapien
tgagccaccttgtggatcccaagga

SEQ ID NO: 3419857 - DNA, 25 bp, Homo sapien
tggagatgggcatagaaacctggct

SEQ ID NO: 3419858 - DNA, 25 bp, Homo sapien
gagtattcacctgcgataacccaag

SEQ ID NO: 3419859 - DNA, 25 bp, Homo sapien
cttaccccggacaggatgaatggat

SEQ ID NO: 3419860 - DNA, 25 bp, Homo sapien
tttttatgccccaccgatacactgg

SEQ ID NO: 3419861 - DNA, 25 bp, Homo sapien
tgtccctcggcagaaagacgtttcc

SEQ ID NO: 3419862 - DNA, 25 bp, Homo sapien
tgccccagtttctcggataaggtta

SEQ ID NO: 3419863 - DNA, 25 bp, Homo sapien
ccatggccaccggtactgtatctgt

SEQ ID NO: 3419864 - DNA, 25 bp, Homo sapien
gaaagtcaggtccttcgggaatgta

SEQ ID NO: 3419865 - DNA, 25 bp, Homo sapien
aaggttaatctcacgcttggtagca

SEQ ID NO: 3419866 - DNA, 25 bp, Homo sapien
ggagtgcgcactctaccaatgagac

SEQ ID NO: 3419867 - DNA, 25 bp, Homo sapien
tcaggtcgaaccaatcataaggccg

SEQ ID NO: 3419868 - DNA, 25 bp, Homo sapien
cggtttagtaaagccacagctgtgc

SEQ ID NO: 3419869 - DNA, 25 bp, Homo sapien
aactaggatacgtggctgagcgcgc

SEQ ID NO: 3419870 - DNA, 25 bp, Homo sapien
ggtgccctttttagatgcgctcaaa

SEQ ID NO: 3419871 - DNA, 25 bp, Homo sapien
ttacgattggaacggaagcgcttcc

SEQ ID NO: 3419872 - DNA, 25 bp, Homo sapien
tgaggcttgtgaccggctaatccag

SEQ ID NO: 3419873 - DNA, 25 bp, Homo sapien
gaagagttgagtttggccacccagt

SEQ ID NO: 3419874 - DNA, 25 bp, Homo sapien
aaacgggtgcccaagattgcctcag

SEQ ID NO: 3419875 - DNA, 25 bp, Homo sapien
tgtaggcatcctaggtcacctggcc

SEQ ID NO: 3419876 - DNA, 25 bp, Homo sapien
gccattcctgcggagaaacgggtgc

SEQ ID NO: 3419877 - DNA, 25 bp, Homo sapien
gacgggagctcctgcgaatgttcca

SEQ ID NO: 3419878 - DNA, 25 bp, Homo sapien
ggctgctgtgcttgaccacttgaga

SEQ ID NO: 3419879 - DNA, 25 bp, Homo sapien
gcttttctgactggcgtagacccca

SEQ ID NO: 3419880 - DNA, 25 bp, Homo sapien
tcagcccgggaacatgctcgctgtg

SEQ ID NO: 3419881 - DNA, 25 bp, Homo sapien
gacctggtctagaggatgtggttca

SEQ ID NO: 3419882 - DNA, 25 bp, Homo sapien
gcaggagaattgcttgaacctggga

SEQ ID NO: 3419883 - DNA, 25 bp, Homo sapien
tcccagctacacgggaggctgaggc

SEQ ID NO: 3419884 - DNA, 25 bp, Homo sapien
caggcgttgtggccggcacctgtag

SEQ ID NO: 3419885 - DNA, 25 bp, Homo sapien
attagccaggcgttgtggccggcac

SEQ ID NO: 3419886 - DNA, 25 bp, Homo sapien
ctgagaccccgcccagagccttcca

SEQ ID NO: 3419887 - DNA, 25 bp, Homo sapien
ccgcccagagccttccacccggcac

SEQ ID NO: 3419888 - DNA, 25 bp, Homo sapien
cccgcccagagccttccacccggca

SEQ ID NO: 3419889 - DNA, 25 bp, Homo sapien
gagaccccgcccagagccttccacc

SEQ ID NO: 3419890 - DNA, 25 bp, Homo sapien
gtacattacggggagcggcaccaca

SEQ ID NO: 3419891 - DNA, 25 bp, Homo sapien
agcaccgaagacatgacgccgaggg

SEQ ID NO: 3419892 - DNA, 25 bp, Homo sapien
tagaaccagcggatgggaagccgcc

SEQ ID NO: 3419893 - DNA, 25 bp, Homo sapien
tgtcccggcgtttgaggatagaacc

SEQ ID NO: 3419894 - DNA, 25 bp, Homo sapien
ggatctcggttgtccttctccgaga

SEQ ID NO: 3419895 - DNA, 25 bp, Homo sapien
agctggatctcggttgtccttctcc

SEQ ID NO: 3419896 - DNA, 25 bp, Homo sapien
tcaaatgagaaagtgtgagcacccc

SEQ ID NO: 3419897 - DNA, 25 bp, Homo sapien
tgagcaccccgatggaggagccagc

SEQ ID NO: 3419898 - DNA, 25 bp, Homo sapien
gtggaggagggtatacagcgtccgc

SEQ ID NO: 3419899 - DNA, 25 bp, Homo sapien
aggagggtatacagcgtccgcagac

SEQ ID NO: 3419900 - DNA, 25 bp, Homo sapien
tggaggagggtatacagcgtccgca

SEQ ID NO: 3419901 - DNA, 25 bp, Homo sapien
gaggagggtatacagcgtccgcaga

SEQ ID NO: 3419902 - DNA, 25 bp, Homo sapien
gaagatctgcaaattccgcgtagcg

SEQ ID NO: 3419903 - DNA, 25 bp, Homo sapien
gaagcttatgtgaagcgtccaccct

SEQ ID NO: 3419904 - DNA, 25 bp, Homo sapien
tcgggtaagttcgaccagagaagct

SEQ ID NO: 3419905 - DNA, 25 bp, Homo sapien
tcggcaagtggagcattcgacgcag

SEQ ID NO: 3419906 - DNA, 25 bp, Homo sapien
cgtcgtatatacacactggcgtctt

SEQ ID NO: 3419907 - DNA, 25 bp, Homo sapien
taggcgccatcgtgcccggttaatt

SEQ ID NO: 3419908 - DNA, 25 bp, Homo sapien
aatcacaatttcagggactacactc

SEQ ID NO: 3419909 - DNA, 25 bp, Homo sapien
tgtgacccagggttgagtacagtag

SEQ ID NO: 3419910 - DNA, 25 bp, Homo sapien
ctgtgggcacggttggagggtgtca

SEQ ID NO: 3419911 - DNA, 25 bp, Homo sapien
tgggcacggttggagggtgtcactt

SEQ ID NO: 3419912 - DNA, 25 bp, Homo sapien
cggttggagggtgtcacttggtcta

SEQ ID NO: 3419913 - DNA, 25 bp, Homo sapien
cacggttggagggtgtcacttggtc

SEQ ID NO: 3419914 - DNA, 25 bp, Homo sapien
tatccaaagaaccagtcgaaggtgg

SEQ ID NO: 3419915 - DNA, 25 bp, Homo sapien
caaagtaggtgatgcccctgaacgg

SEQ ID NO: 3419916 - DNA, 25 bp, Homo sapien
cattctgatagaagctggtaagccc

SEQ ID NO: 3419917 - DNA, 25 bp, Homo sapien
tgtacataggctggaagtcccacag

SEQ ID NO: 3419918 - DNA, 25 bp, Homo sapien
taatttttagctcaagtgcagcagc

SEQ ID NO: 3419919 - DNA, 25 bp, Homo sapien
gattatacaagtcagtcagcgcagg

SEQ ID NO: 3419920 - DNA, 25 bp, Homo sapien
taagaacatttaacgctggactcag

SEQ ID NO: 3419921 - DNA, 25 bp, Homo sapien
tgcagcagcttatcatggcccattg

SEQ ID NO: 3419922 - DNA, 25 bp, Homo sapien
cgggatgtggagtttgcagtaagct

SEQ ID NO: 3419923 - DNA, 25 bp, Homo sapien
gctgagatcccaccactgcactcca

SEQ ID NO: 3419924 - DNA, 25 bp, Homo sapien
cccgggatgtggagtttgcagtaag

SEQ ID NO: 3419925 - DNA, 25 bp, Homo sapien
tgagatcccaccactgcactccagc

SEQ ID NO: 3419926 - DNA, 25 bp, Homo sapien
gccgtctattgtggtggaatccagt

SEQ ID NO: 3419927 - DNA, 25 bp, Homo sapien
ggttatcacaactcttggcccacag

SEQ ID NO: 3419928 - DNA, 25 bp, Homo sapien
tataatcgcttagcacagtcggtgc

SEQ ID NO: 3419929 - DNA, 25 bp, Homo sapien
caagatggaagtcagttacggcccc

SEQ ID NO: 3419930 - DNA, 25 bp, Homo sapien
tgtgccccggtttctgcatcagaaa

SEQ ID NO: 3419931 - DNA, 25 bp, Homo sapien
aattaaaacagctcctgccaaagag

SEQ ID NO: 3419932 - DNA, 25 bp, Homo sapien
tacttgtctcacagttttaggataa

SEQ ID NO: 3419933 - DNA, 25 bp, Homo sapien
ttataggcaagttcttgtgccccgg

SEQ ID NO: 3419934 - DNA, 25 bp, Homo sapien
tagagcgccctatagcagaaaccat

SEQ ID NO: 3419935 - DNA, 25 bp, Homo sapien
gacgtttcccgatcagtagaggccc

SEQ ID NO: 3419936 - DNA, 25 bp, Homo sapien
gaaaccatagataagcggccggcta

SEQ ID NO: 3419937 - DNA, 25 bp, Homo sapien
ttcaacacagcgcatggagggcatc

SEQ ID NO: 3419938 - DNA, 25 bp, Homo sapien
cctgcgcccagcattgcgactgaga

SEQ ID NO: 3419939 - DNA, 25 bp, Homo sapien
tctcccggggtcacgataacgagga

SEQ ID NO: 3419940 - DNA, 25 bp, Homo sapien
tcacgataacgaggagcgcgtagcc

SEQ ID NO: 3419941 - DNA, 25 bp, Homo sapien
gatcagcattttccgcaaggaatcc

SEQ ID NO: 3419942 - DNA, 25 bp, Homo sapien
ggcaggaaggggagttcgcaggagc

SEQ ID NO: 3419943 - DNA, 25 bp, Homo sapien
ggagttcgcaggagctccagtccgg

SEQ ID NO: 3419944 - DNA, 25 bp, Homo sapien
aaggggagttcgcaggagctccagt

SEQ ID NO: 3419945 - DNA, 25 bp, Homo sapien
caggaaggggagttcgcaggagctc

SEQ ID NO: 3419946 - DNA, 25 bp, Homo sapien
ttcgccgccaaccatccagttcttc

SEQ ID NO: 3419947 - DNA, 25 bp, Homo sapien
cgccttcgccgccaaccatccagtt

SEQ ID NO: 3419948 - DNA, 25 bp, Homo sapien
ggccagcaatagctgctgggtcctg

SEQ ID NO: 3419949 - DNA, 25 bp, Homo sapien
tggccagcaatagctgctgggtcct

SEQ ID NO: 3419950 - DNA, 25 bp, Homo sapien
caggaccccggagagtcctggcatg

SEQ ID NO: 3419951 - DNA, 25 bp, Homo sapien
atctcggtccggactctccgctggg

SEQ ID NO: 3419952 - DNA, 25 bp, Homo sapien
taaagcagtcagtccagggtttggg

SEQ ID NO: 3419953 - DNA, 25 bp, Homo sapien
gggaaacgtgctcacccgacggcag

SEQ ID NO: 3419954 - DNA, 25 bp, Homo sapien
aaatgtggtcagatacctatcggga

SEQ ID NO: 3419955 - DNA, 25 bp, Homo sapien
taagcattggtaggtgtcgactgca

SEQ ID NO: 3419956 - DNA, 25 bp, Homo sapien
gatacctatcgggatcagcctcttc

SEQ ID NO: 3419957 - DNA, 25 bp, Homo sapien
accgaccacgcgtctctaagcattg

SEQ ID NO: 3419958 - DNA, 25 bp, Homo sapien
cagtggcagctccaataaatcctga

SEQ ID NO: 3419959 - DNA, 25 bp, Homo sapien
gacctttcatagaacagggctgagg

SEQ ID NO: 3419960 - DNA, 25 bp, Homo sapien
gagtgtccactataggcatccatta

SEQ ID NO: 3419961 - DNA, 25 bp, Homo sapien
aagaatgtcccacggttatccctgg

SEQ ID NO: 3419962 - DNA, 25 bp, Homo sapien
atatgcacaactttgatacagcttt

SEQ ID NO: 3419963 - DNA, 25 bp, Homo sapien
ttgagaacatgagagtgccttttca

SEQ ID NO: 3419964 - DNA, 25 bp, Homo sapien
gatacagctttggggtgctccagac

SEQ ID NO: 3419965 - DNA, 25 bp, Homo sapien
atttattgagaacatgagagtgcct

SEQ ID NO: 3419966 - DNA, 25 bp, Homo sapien
ttatatgatctgtttcacctgagga

SEQ ID NO: 3419967 - DNA, 25 bp, Homo sapien
acctgaggatgggtgagtacctgat

SEQ ID NO: 3419968 - DNA, 25 bp, Homo sapien
tgactgagaagacgccacgggtaat

SEQ ID NO: 3419969 - DNA, 25 bp, Homo sapien
gaaaagatcgagagggacaaagcag

SEQ ID NO: 3419970 - DNA, 25 bp, Homo sapien
cctgctctagttcctgaagaaaagg

SEQ ID NO: 3419971 - DNA, 25 bp, Homo sapien
tcctcacattccagcactttcccac

SEQ ID NO: 3419972 - DNA, 25 bp, Homo sapien
cacctgactcctctcccctcgtttt

SEQ ID NO: 3419973 - DNA, 25 bp, Homo sapien
tgtcctagagactctgggcagctct

SEQ ID NO: 3419974 - DNA, 25 bp, Homo sapien
taaatcacatgggatattcactact

SEQ ID NO: 3419975 - DNA, 25 bp, Homo sapien
tcaataaatcacatgggatattcac

SEQ ID NO: 3419976 - DNA, 25 bp, Homo sapien
cacatgggatattcactactttatt

SEQ ID NO: 3419977 - DNA, 25 bp, Homo sapien
aatcacatgggatattcactacttt

SEQ ID NO: 3419978 - DNA, 25 bp, Homo sapien
ctggtgagtcggcagccctgtggca

SEQ ID NO: 3419979 - DNA, 25 bp, Homo sapien
gctggtgagtcggcagccctgtggc

SEQ ID NO: 3419980 - DNA, 25 bp, Homo sapien
tggaagatccagagtcaacagaggc

SEQ ID NO: 3419981 - DNA, 25 bp, Homo sapien
ggatcgccacttcacgttttagcca

SEQ ID NO: 3419982 - DNA, 25 bp, Homo sapien
tccaggaaaatgtgatgcgccacag

SEQ ID NO: 3419983 - DNA, 25 bp, Homo sapien
caggtatcagcgtctggatcgccac

SEQ ID NO: 3419984 - DNA, 25 bp, Homo sapien
cagtgggggagcctagctgcctgca

SEQ ID NO: 3419985 - DNA, 25 bp, Homo sapien
agtgggggagcctagctgcctgcat

SEQ ID NO: 3419986 - DNA, 25 bp, Homo sapien
cagtggagggtaccaaaaccttctg

SEQ ID NO: 3419987 - DNA, 25 bp, Homo sapien
gtgactatacgaaaggaggcccctg

SEQ ID NO: 3419988 - DNA, 25 bp, Homo sapien
cacccagtagggagttgcagctgaa

SEQ ID NO: 3419989 - DNA, 25 bp, Homo sapien
tgaaggatgctagaaggagctgctc

SEQ ID NO: 3419990 - DNA, 25 bp, Homo sapien
caccatcttgcgtgcttgcccaata

SEQ ID NO: 3419991 - DNA, 25 bp, Homo sapien
ggcttcaatcttaagctgttccacc

SEQ ID NO: 3419992 - DNA, 25 bp, Homo sapien
aatactcatagtgctgttcaccggg

SEQ ID NO: 3419993 - DNA, 25 bp, Homo sapien
ctttatccgacacaagctggcttca

SEQ ID NO: 3419994 - DNA, 25 bp, Homo sapien
ggcatcacagtaagtcatcaggtct

SEQ ID NO: 3419995 - DNA, 25 bp, Homo sapien
cctcacaggcgtgggcatcacagta

SEQ ID NO: 3419996 - DNA, 25 bp, Homo sapien
agtcatcaggtctgctgctgccttg

SEQ ID NO: 3419997 - DNA, 25 bp, Homo sapien
caggcgtgggcatcacagtaagtca

SEQ ID NO: 3419998 - DNA, 25 bp, Homo sapien
cattgtctgagcaggtcaccgaggg

SEQ ID NO: 3419999 - DNA, 25 bp, Homo sapien
gggccttgtgcttcagataacctca

SEQ ID NO: 3420000 - DNA, 25 bp, Homo sapien
gataacctcacatggtcaggcaagg

SEQ ID NO: 3420001 - DNA, 25 bp, Homo sapien
tactgacctaaggaagggcccagga

SEQ ID NO: 3420002 - DNA, 25 bp, Homo sapien
cattttaagagaagccctgtacggt

SEQ ID NO: 3420003 - DNA, 25 bp, Homo sapien
tagtgattcttcgttatggccgccc

SEQ ID NO: 3420004 - DNA, 25 bp, Homo sapien
gaagggaccatattgagaacgccgg

SEQ ID NO: 3420005 - DNA, 25 bp, Homo sapien
tataaaatcggctccagtcgcggta

SEQ ID NO: 3420006 - DNA, 25 bp, Homo sapien
taaaacggacctgacctgattgatc

SEQ ID NO: 3420007 - DNA, 25 bp, Homo sapien
tcaggatacagggattaaaacggac

SEQ ID NO: 3420008 - DNA, 25 bp, Homo sapien
ttttcaccgtgccaagaaggaactg

SEQ ID NO: 3420009 - DNA, 25 bp, Homo sapien
cagtaaaaagttgcttgggacacct

SEQ ID NO: 3420010 - DNA, 25 bp, Homo sapien
gctgtagccacgcagttataatctg

SEQ ID NO: 3420011 - DNA, 25 bp, Homo sapien
tgtgacacggattcagatacccggg

SEQ ID NO: 3420012 - DNA, 25 bp, Homo sapien
tcatgcctggtctctagttactgct

SEQ ID NO: 3420013 - DNA, 25 bp, Homo sapien
ttcctaccctctgtatgtgacacgg

SEQ ID NO: 3420014 - DNA, 25 bp, Homo sapien
aaattgaatttcctgaggcagtggc

SEQ ID NO: 3420015 - DNA, 25 bp, Homo sapien
tgtaaagcattcttggaagtggcca

SEQ ID NO: 3420016 - DNA, 25 bp, Homo sapien
tatggtaaccagaggaatccctagc

SEQ ID NO: 3420017 - DNA, 25 bp, Homo sapien
gcttataatgtcaaggcaaggaggt

SEQ ID NO: 3420018 - DNA, 25 bp, Homo sapien
gcctgttctataccctacagtcaga

SEQ ID NO: 3420019 - DNA, 25 bp, Homo sapien
cagcacttagggctgcctgttctat

SEQ ID NO: 3420020 - DNA, 25 bp, Homo sapien
tggcacccttctgacattctgaggc

SEQ ID NO: 3420021 - DNA, 25 bp, Homo sapien
caaaaaacatttgcgcagaaagcag

SEQ ID NO: 3420022 - DNA, 25 bp, Homo sapien
tttggtatcttgagggtcgcgcgca

SEQ ID NO: 3420023 - DNA, 25 bp, Homo sapien
tcagagatgcgtacagtttggtatc

SEQ ID NO: 3420024 - DNA, 25 bp, Homo sapien
gaaagggtcagagatgcgtacagtt

SEQ ID NO: 3420025 - DNA, 25 bp, Homo sapien
cttcggtttaccagcaggagcaagg

SEQ ID NO: 3420026 - DNA, 25 bp, Homo sapien
tttccgaagaactcaagcaaggccc

SEQ ID NO: 3420027 - DNA, 25 bp, Homo sapien
ggtgaaccaccagcgacactgaggt

SEQ ID NO: 3420028 - DNA, 25 bp, Homo sapien
tgaggtgtccacataagcgtcacag

SEQ ID NO: 3420029 - DNA, 25 bp, Homo sapien
cctactcaggaattgttgcgggcgt

SEQ ID NO: 3420030 - DNA, 25 bp, Homo sapien
aaaataactgacagtagcagccaat

SEQ ID NO: 3420031 - DNA, 25 bp, Homo sapien
agcagccaatttaaggaggcaggaa

SEQ ID NO: 3420032 - DNA, 25 bp, Homo sapien
aataactgacagtagcagccaattt

SEQ ID NO: 3420033 - DNA, 25 bp, Homo sapien
gccaatttaaggaggcaggaaatta

SEQ ID NO: 3420034 - DNA, 25 bp, Homo sapien
actgtcgcccacggttcttgcggaa

SEQ ID NO: 3420035 - DNA, 25 bp, Homo sapien
aactgtcgcccacggttcttgcgga

SEQ ID NO: 3420036 - DNA, 25 bp, Homo sapien
ccttcctccttgtacagctgagcct

SEQ ID NO: 3420037 - DNA, 25 bp, Homo sapien
agcatctcggtacttcccttcccgg

SEQ ID NO: 3420038 - DNA, 25 bp, Homo sapien
tccttgtacagctgagcctcctgca

SEQ ID NO: 3420039 - DNA, 25 bp, Homo sapien
gagcctcctgcagacgcttctccat

SEQ ID NO: 3420040 - DNA, 25 bp, Homo sapien
taacggagagggcagactcggatcc

SEQ ID NO: 3420041 - DNA, 25 bp, Homo sapien
ccctgaggtccgagattaggtaacg

SEQ ID NO: 3420042 - DNA, 25 bp, Homo sapien
tgttttcttgttcaggcgtgagggc

SEQ ID NO: 3420043 - DNA, 25 bp, Homo sapien
gaagcagagctcgatggtacctact

SEQ ID NO: 3420044 - DNA, 25 bp, Homo sapien
taatgctctctagccaccctttagc

SEQ ID NO: 3420045 - DNA, 25 bp, Homo sapien
cagatgttcatgttcctgtcttaat

SEQ ID NO: 3420046 - DNA, 25 bp, Homo sapien
tcctgtcttaatgctctctagccac

SEQ ID NO: 3420047 - DNA, 25 bp, Homo sapien
tgtcttaatgctctctagccaccct

SEQ ID NO: 3420048 - DNA, 25 bp, Homo sapien
gaagggaaacactccctatttcaca

SEQ ID NO: 3420049 - DNA, 25 bp, Homo sapien
ctgcagaggagtcaattcaggcaat

SEQ ID NO: 3420050 - DNA, 25 bp, Homo sapien
tcaggcaattcaggtcaatgttctg

SEQ ID NO: 3420051 - DNA, 25 bp, Homo sapien
aggtcaatgttctgcctttttatga

SEQ ID NO: 3420052 - DNA, 25 bp, Homo sapien
ctcgttcgtagttcacgggctccat

SEQ ID NO: 3420053 - DNA, 25 bp, Homo sapien
gactatattctctcactcgttcgta

SEQ ID NO: 3420054 - DNA, 25 bp, Homo sapien
ggcccgatacaaggccttggcatta

SEQ ID NO: 3420055 - DNA, 25 bp, Homo sapien
gcattatcaggctgtcgttccagga

SEQ ID NO: 3420056 - DNA, 25 bp, Homo sapien
gtatgtctgattaagcatcaacccc

SEQ ID NO: 3420057 - DNA, 25 bp, Homo sapien
ttcagttcgaattctcaaccatgtg

SEQ ID NO: 3420058 - DNA, 25 bp, Homo sapien
ttttccgagacggagccgccctctg

SEQ ID NO: 3420059 - DNA, 25 bp, Homo sapien
ggaaaaaggtctgttcatcgtatac

SEQ ID NO: 3420060 - DNA, 25 bp, Homo sapien
ccattctatgcaatagtaaatctca

SEQ ID NO: 3420061 - DNA, 25 bp, Homo sapien
gttagagtcagttaagaccataatc

SEQ ID NO: 3420062 - DNA, 25 bp, Homo sapien
tctctccaagatctgaatatatcgc

SEQ ID NO: 3420063 - DNA, 25 bp, Homo sapien
taatcataccttgtggcaggagaga

SEQ ID NO: 3420064 - DNA, 25 bp, Homo sapien
ctgtgtcagctggaggtaccgccgg

SEQ ID NO: 3420065 - DNA, 25 bp, Homo sapien
aaacatgcccaggtagagctgcttc

SEQ ID NO: 3420066 - DNA, 25 bp, Homo sapien
tcagctggaggtaccgccggacgtt

SEQ ID NO: 3420067 - DNA, 25 bp, Homo sapien
ttaaccaaacatgcccaggtagagc

SEQ ID NO: 3420068 - DNA, 25 bp, Homo sapien
cacctaagttcaactggaggagcat

SEQ ID NO: 3420069 - DNA, 25 bp, Homo sapien
gatttctccttcatgcatgtttaat

SEQ ID NO: 3420070 - DNA, 25 bp, Homo sapien
taatggtccacctaagttcaactgg

SEQ ID NO: 3420071 - DNA, 25 bp, Homo sapien
ctgggtcagaggtatagggttaatt

SEQ ID NO: 3420072 - DNA, 25 bp, Homo sapien
tgcaacaataacatgtattgaaagg

SEQ ID NO: 3420073 - DNA, 25 bp, Homo sapien
ctgattatatttctcaagccaaata

SEQ ID NO: 3420074 - DNA, 25 bp, Homo sapien
gaagtttgtgcagaactagaaacaa

SEQ ID NO: 3420075 - DNA, 25 bp, Homo sapien
ctcagactgtctaagtagtgaagtt

SEQ ID NO: 3420076 - DNA, 25 bp, Homo sapien
atgagctagagcgcccggccatatt

SEQ ID NO: 3420077 - DNA, 25 bp, Homo sapien
aattgtctagtttccagtacctgag

SEQ ID NO: 3420078 - DNA, 25 bp, Homo sapien
ttataattgtctagtttccagtacc

SEQ ID NO: 3420079 - DNA, 25 bp, Homo sapien
tctagtttccagtacctgagaccac

SEQ ID NO: 3420080 - DNA, 25 bp, Homo sapien
aaatggttacttttggccaggcata

SEQ ID NO: 3420081 - DNA, 25 bp, Homo sapien
cagctgcttgggtggctcagacacg

SEQ ID NO: 3420082 - DNA, 25 bp, Homo sapien
ctgcttgggtggctcagacacgaga

SEQ ID NO: 3420083 - DNA, 25 bp, Homo sapien
gcttgggtggctcagacacgagaat

SEQ ID NO: 3420084 - DNA, 25 bp, Homo sapien
aattaatttaacaggggctgtggcg

SEQ ID NO: 3420085 - DNA, 25 bp, Homo sapien
gtgtatgaatgatctaagtatgaga

SEQ ID NO: 3420086 - DNA, 25 bp, Homo sapien
gaaatagcaaggacaaaatagcaaa

SEQ ID NO: 3420087 - DNA, 25 bp, Homo sapien
caccgaggcacacgtttccctatgt

SEQ ID NO: 3420088 - DNA, 25 bp, Homo sapien
caacccctctagctcccaagcagct

SEQ ID NO: 3420089 - DNA, 25 bp, Homo sapien
tgtatcttttgtggagatgacgttt

SEQ ID NO: 3420090 - DNA, 25 bp, Homo sapien
tgacgtttcgcgctgttgctcaggc

SEQ ID NO: 3420091 - DNA, 25 bp, Homo sapien
tggagatgacgtttcgcgctgttgc

SEQ ID NO: 3420092 - DNA, 25 bp, Homo sapien
tagacgccgcaaccccagttccgcg

SEQ ID NO: 3420093 - DNA, 25 bp, Homo sapien
ttccgcgcttgctgcgactaggagg

SEQ ID NO: 3420094 - DNA, 25 bp, Homo sapien
agttccgcgcttgctgcgactagga

SEQ ID NO: 3420095 - DNA, 25 bp, Homo sapien
ctgggaatccaccggaaacacttag

SEQ ID NO: 3420096 - DNA, 25 bp, Homo sapien
ttcccagaccaggtaggcaggcaga

SEQ ID NO: 3420097 - DNA, 25 bp, Homo sapien
gaccaggtaggcaggcagagtccac

SEQ ID NO: 3420098 - DNA, 25 bp, Homo sapien
cttcccagaccaggtaggcaggcag

SEQ ID NO: 3420099 - DNA, 25 bp, Homo sapien
ccagaccaggtaggcaggcagagtc

SEQ ID NO: 3420100 - DNA, 25 bp, Homo sapien
tgggatggcgaccaggccaggcgct

SEQ ID NO: 3420101 - DNA, 25 bp, Homo sapien
tattggacgacaaggggagtctcgc

SEQ ID NO: 3420102 - DNA, 25 bp, Homo sapien
tgcggagaaaagtgggatggcgacc

SEQ ID NO: 3420103 - DNA, 25 bp, Homo sapien
gcgctggcaggttattggacgacaa

SEQ ID NO: 3420104 - DNA, 25 bp, Homo sapien
gaagtagcgcgggtgcagcaggatt

SEQ ID NO: 3420105 - DNA, 25 bp, Homo sapien
aggtcccctccacctcggtgaagag

SEQ ID NO: 3420106 - DNA, 25 bp, Homo sapien
agagcttctgcttcaccgtgttgag

SEQ ID NO: 3420107 - DNA, 25 bp, Homo sapien
gcaggatttcgtgctctagggagat

SEQ ID NO: 3420108 - DNA, 25 bp, Homo sapien
tgtgcgcatcgaacgatctggcggt

SEQ ID NO: 3420109 - DNA, 25 bp, Homo sapien
ttgttctgagcccaacacgggtcct

SEQ ID NO: 3420110 - DNA, 25 bp, Homo sapien
gaagtcttattgtccagcattgcag

SEQ ID NO: 3420111 - DNA, 25 bp, Homo sapien
aatgaatgacccatctcagctgaga

SEQ ID NO: 3420112 - DNA, 25 bp, Homo sapien
ggctgtcctcattctatcttgttcc

SEQ ID NO: 3420113 - DNA, 25 bp, Homo sapien
taatatcagagaggcccctctgtgc

SEQ ID NO: 3420114 - DNA, 25 bp, Homo sapien
tgggtcccagctcattaatatcaga

SEQ ID NO: 3420115 - DNA, 25 bp, Homo sapien
tatagaggcccatggtgtgtggtcc

SEQ ID NO: 3420116 - DNA, 25 bp, Homo sapien
ggacaagtagatagcacctctgctc

SEQ ID NO: 3420117 - DNA, 25 bp, Homo sapien
tctgcaataaaagtcgctgagctct

SEQ ID NO: 3420118 - DNA, 25 bp, Homo sapien
caatcttcgggatgcctgagaatca

SEQ ID NO: 3420119 - DNA, 25 bp, Homo sapien
cagagatcagtatgtgtaagaccaa

SEQ ID NO: 3420120 - DNA, 25 bp, Homo sapien
tcggcctggctggatcacaccagca

SEQ ID NO: 3420121 - DNA, 25 bp, Homo sapien
ggtggtgacagcaattacaaagcca

SEQ ID NO: 3420122 - DNA, 25 bp, Homo sapien
gataaaggacaaagcctcggcctgg

SEQ ID NO: 3420123 - DNA, 25 bp, Homo sapien
aatggccttgtacttaactggataa

SEQ ID NO: 3420124 - DNA, 25 bp, Homo sapien
catgctaggctaatttttaaaaact

SEQ ID NO: 3420125 - DNA, 25 bp, Homo sapien
ctaatcccagctactcaggagactg

SEQ ID NO: 3420126 - DNA, 25 bp, Homo sapien
cgggcatggtggcgtgcacctctaa

SEQ ID NO: 3420127 - DNA, 25 bp, Homo sapien
aatcccagctactcaggagactgag

SEQ ID NO: 3420128 - DNA, 25 bp, Homo sapien
ctctaatcccagctactcaggagac

SEQ ID NO: 3420129 - DNA, 25 bp, Homo sapien
atgtcgagagatgaagcaagacatg

SEQ ID NO: 3420130 - DNA, 25 bp, Homo sapien
tgtcgagagatgaagcaagacatgg

SEQ ID NO: 3420131 - DNA, 25 bp, Homo sapien
gacatgggcccaatttctgtgaaga

SEQ ID NO: 3420132 - DNA, 25 bp, Homo sapien
gcaagacatgggcccaatttctgtg

SEQ ID NO: 3420133 - DNA, 25 bp, Homo sapien
catccattgtcttgtaacatggtgg

SEQ ID NO: 3420134 - DNA, 25 bp, Homo sapien
tccattgtcttgtaacatggtgggt

SEQ ID NO: 3420135 - DNA, 25 bp, Homo sapien
agttaggatcaaactccatctctga

SEQ ID NO: 3420136 - DNA, 25 bp, Homo sapien
catggtgggttggagttaggatcaa

SEQ ID NO: 3420137 - DNA, 25 bp, Homo sapien
atgaatcaagccatggtaattcggg

SEQ ID NO: 3420138 - DNA, 25 bp, Homo sapien
acaatcacttcactgtaagcccggg

SEQ ID NO: 3420139 - DNA, 25 bp, Homo sapien
tcagtttatgagaagttacatcaca

SEQ ID NO: 3420140 - DNA, 25 bp, Homo sapien
ggatggctgattctctccttgtctc

SEQ ID NO: 3420141 - DNA, 25 bp, Homo sapien
gatctcatcgtcctgctgaatcaca

SEQ ID NO: 3420142 - DNA, 25 bp, Homo sapien
cacacgggtccccacaatctttaag

SEQ ID NO: 3420143 - DNA, 25 bp, Homo sapien
cggatctcatcgtcctgctgaatca

SEQ ID NO: 3420144 - DNA, 25 bp, Homo sapien
cacaatctttaagcggatctcatcg

SEQ ID NO: 3420145 - DNA, 25 bp, Homo sapien
aagtaatcgtccatcagggagccaa

SEQ ID NO: 3420146 - DNA, 25 bp, Homo sapien
ccaagtaatcgtccatcagggagcc

SEQ ID NO: 3420147 - DNA, 25 bp, Homo sapien
aatcgtccatcagggagccaatagc

SEQ ID NO: 3420148 - DNA, 25 bp, Homo sapien
gtaatcgtccatcagggagccaata

SEQ ID NO: 3420149 - DNA, 25 bp, Homo sapien
gactggacctctggacaacatgata

SEQ ID NO: 3420150 - DNA, 25 bp, Homo sapien
gataacacttccatgagaaccaagg

SEQ ID NO: 3420151 - DNA, 25 bp, Homo sapien
gacaatcacacttcctagagtagga

SEQ ID NO: 3420152 - DNA, 25 bp, Homo sapien
taagctacaagaagcaccagatgcc

SEQ ID NO: 3420153 - DNA, 25 bp, Homo sapien
acatcagagccttgacttcagtgag

SEQ ID NO: 3420154 - DNA, 25 bp, Homo sapien
ggaactagatcaggacccagaatgc

SEQ ID NO: 3420155 - DNA, 25 bp, Homo sapien
tagtcagttcccctgggtggctgag

SEQ ID NO: 3420156 - DNA, 25 bp, Homo sapien
tatacccaacttaggaaaggctgtg

SEQ ID NO: 3420157 - DNA, 25 bp, Homo sapien
catcatggaccaggctctatgccag

SEQ ID NO: 3420158 - DNA, 25 bp, Homo sapien
tgccagccacttgaacatatgatgt

SEQ ID NO: 3420159 - DNA, 25 bp, Homo sapien
tatttgagaacttaggaagaactcc

SEQ ID NO: 3420160 - DNA, 25 bp, Homo sapien
taaaagttgagtgcccatcatggac

SEQ ID NO: 3420161 - DNA, 25 bp, Homo sapien
catacagtgaattcctttaagttca

SEQ ID NO: 3420162 - DNA, 25 bp, Homo sapien
gcactgagtgaactgtgggaacatt

SEQ ID NO: 3420163 - DNA, 25 bp, Homo sapien
cccaagatggggtagtttgcactga

SEQ ID NO: 3420164 - DNA, 25 bp, Homo sapien
aggcatacagtgaattcctttaagt

SEQ ID NO: 3420165 - DNA, 25 bp, Homo sapien
taatgtctgtgagagtccctggcag

SEQ ID NO: 3420166 - DNA, 25 bp, Homo sapien
tacctcgccttgcatgaccgttgga

SEQ ID NO: 3420167 - DNA, 25 bp, Homo sapien
tatttggaatcagaccgacctgggt

SEQ ID NO: 3420168 - DNA, 25 bp, Homo sapien
taataatgcgcacttcacagggttg

SEQ ID NO: 3420169 - DNA, 25 bp, Homo sapien
ggcggcggcgcccactcacgagctc

SEQ ID NO: 3420170 - DNA, 25 bp, Homo sapien
cgcccactcacgagctcacactcat

SEQ ID NO: 3420171 - DNA, 25 bp, Homo sapien
cgaaggctgctaccgagacgacggc

SEQ ID NO: 3420172 - DNA, 25 bp, Homo sapien
gaagaccccggcgtggcgaaggctg

SEQ ID NO: 3420173 - DNA, 25 bp, Homo sapien
tgcgtggcctctctcagacgatagc

SEQ ID NO: 3420174 - DNA, 25 bp, Homo sapien
gggatctccacaaaccgccgctctt

SEQ ID NO: 3420175 - DNA, 25 bp, Homo sapien
aggcccgtgctctccgccatgagcc

SEQ ID NO: 3420176 - DNA, 25 bp, Homo sapien
atagcacacgtcctctgcgagcagc

SEQ ID NO: 3420177 - DNA, 25 bp, Homo sapien
ctgttgaagtcctcaaccgtcagct

SEQ ID NO: 3420178 - DNA, 25 bp, Homo sapien
tcaaccgtcagcttccggcgtttgg

SEQ ID NO: 3420179 - DNA, 25 bp, Homo sapien
ccggcgtttggtgtgcttcatgaac

SEQ ID NO: 3420180 - DNA, 25 bp, Homo sapien
tcagcttccggcgtttggtgtgctt

SEQ ID NO: 3420181 - DNA, 25 bp, Homo sapien
gaaagtagagttcaccctccctggc

SEQ ID NO: 3420182 - DNA, 25 bp, Homo sapien
cctctcgatcctcaggaaagtagag

SEQ ID NO: 3420183 - DNA, 25 bp, Homo sapien
ttggggatgttggtagccagggcca

SEQ ID NO: 3420184 - DNA, 25 bp, Homo sapien
caggttcacctctcgatcctcagga

SEQ ID NO: 3420185 - DNA, 25 bp, Homo sapien
gttccctttgccatccaggtaggag

SEQ ID NO: 3420186 - DNA, 25 bp, Homo sapien
ggttccctttgccatccaggtagga

SEQ ID NO: 3420187 - DNA, 25 bp, Homo sapien
tccctttgccatccaggtaggagac

SEQ ID NO: 3420188 - DNA, 25 bp, Homo sapien
ttccctttgccatccaggtaggaga

SEQ ID NO: 3420189 - DNA, 25 bp, Homo sapien
ctgtcttagcatccaacatgctgca

SEQ ID NO: 3420190 - DNA, 25 bp, Homo sapien
accagggcaagagactgctcttaga

SEQ ID NO: 3420191 - DNA, 25 bp, Homo sapien
aacacatgttagacgcagactcggg

SEQ ID NO: 3420192 - DNA, 25 bp, Homo sapien
gccctgaccatctaggctctgcaca

SEQ ID NO: 3420193 - DNA, 25 bp, Homo sapien
agttgcggatcatcccctagcacag

SEQ ID NO: 3420194 - DNA, 25 bp, Homo sapien
gtgatagtacttgagaaggtcatct

SEQ ID NO: 3420195 - DNA, 25 bp, Homo sapien
ctagcacagcacgagtcacctggtg

SEQ ID NO: 3420196 - DNA, 25 bp, Homo sapien
gaaggtcatctgtcagtgaagacac

SEQ ID NO: 3420197 - DNA, 25 bp, Homo sapien
tttaactgagaaaggcaatctataa

SEQ ID NO: 3420198 - DNA, 25 bp, Homo sapien
aaggcaatctataaaaccagatgct

SEQ ID NO: 3420199 - DNA, 25 bp, Homo sapien
gagtaatcatagttgatacagagaa

SEQ ID NO: 3420200 - DNA, 25 bp, Homo sapien
ccggccatccaacatttttaactga

SEQ ID NO: 3420201 - DNA, 25 bp, Homo sapien
aagacagtgtatcaccttattcatg

SEQ ID NO: 3420202 - DNA, 25 bp, Homo sapien
taaaacatgaatgcggtattcttct

SEQ ID NO: 3420203 - DNA, 25 bp, Homo sapien
gcattggatccaccagaaaattgta

SEQ ID NO: 3420204 - DNA, 25 bp, Homo sapien
ggcccagactgcattggatccacca

SEQ ID NO: 3420205 - DNA, 25 bp, Homo sapien
cactgaccacataaacaaagtaagg

SEQ ID NO: 3420206 - DNA, 25 bp, Homo sapien
cttggagttcgtctgcaagtcctgg

SEQ ID NO: 3420207 - DNA, 25 bp, Homo sapien
gcaggagtgccccaatcttggagtt

SEQ ID NO: 3420208 - DNA, 25 bp, Homo sapien
acaaagtaaggcaggagtgccccaa

SEQ ID NO: 3420209 - DNA, 25 bp, Homo sapien
tgcccaccagacagcggacataggg

SEQ ID NO: 3420210 - DNA, 25 bp, Homo sapien
cccaagcacaggtgcggattacgaa

SEQ ID NO: 3420211 - DNA, 25 bp, Homo sapien
tacgaaataggctccgtgccacctg

SEQ ID NO: 3420212 - DNA, 25 bp, Homo sapien
gctccaggtcatggcttacagattt

SEQ ID NO: 3420213 - DNA, 25 bp, Homo sapien
tctgtacagcacactcgggagtgct

SEQ ID NO: 3420214 - DNA, 25 bp, Homo sapien
tgagggctgaagaaccaataccttg

SEQ ID NO: 3420215 - DNA, 25 bp, Homo sapien
cattttcagaatcccagtgtgtcac

SEQ ID NO: 3420216 - DNA, 25 bp, Homo sapien
tgtgggagcaccattcagttaggga

SEQ ID NO: 3420217 - DNA, 25 bp, Homo sapien
agagcggccgcacaggatctgccag

SEQ ID NO: 3420218 - DNA, 25 bp, Homo sapien
gctccatagtggcagcagagcggcc

SEQ ID NO: 3420219 - DNA, 25 bp, Homo sapien
ggccacttacaaggtccccatgagt

SEQ ID NO: 3420220 - DNA, 25 bp, Homo sapien
gctgatagaggccacttacaaggtc

SEQ ID NO: 3420221 - DNA, 25 bp, Homo sapien
gagaaggaatacagttagcatgtct

SEQ ID NO: 3420222 - DNA, 25 bp, Homo sapien
ggaagagaaggaatacagttagcat

SEQ ID NO: 3420223 - DNA, 25 bp, Homo sapien
aaggaatacagttagcatgtctttg

SEQ ID NO: 3420224 - DNA, 25 bp, Homo sapien
agagaaggaatacagttagcatgtc

SEQ ID NO: 3420225 - DNA, 25 bp, Homo sapien
cctgcaagtttgtccagtaggtgga

SEQ ID NO: 3420226 - DNA, 25 bp, Homo sapien
ctttgacctgggcattagatactga

SEQ ID NO: 3420227 - DNA, 25 bp, Homo sapien
gaatggctccatagactttgtgtcc

SEQ ID NO: 3420228 - DNA, 25 bp, Homo sapien
caggtgtgggtacaggactcgttct

SEQ ID NO: 3420229 - DNA, 25 bp, Homo sapien
agagccaaggactaagataggcaaa

SEQ ID NO: 3420230 - DNA, 25 bp, Homo sapien
aaattcgaggaacctgggcccatca

SEQ ID NO: 3420231 - DNA, 25 bp, Homo sapien
acctgggcccatcaaatattccaaa

SEQ ID NO: 3420232 - DNA, 25 bp, Homo sapien
gccaaggactaagataggcaaaaaa

SEQ ID NO: 3420233 - DNA, 25 bp, Homo sapien
tagagctcccggtagatgtcggcca

SEQ ID NO: 3420234 - DNA, 25 bp, Homo sapien
tgaaagagaaggctgtcccatggca

SEQ ID NO: 3420235 - DNA, 25 bp, Homo sapien
caagctgtcaccgaagaaggcgtag

SEQ ID NO: 3420236 - DNA, 25 bp, Homo sapien
tgtcggccagggtcaccgaaagaga

SEQ ID NO: 3420237 - DNA, 25 bp, Homo sapien
tgccgcccggctatgatgaaacgaa

SEQ ID NO: 3420238 - DNA, 25 bp, Homo sapien
cgggctgactatggcgcttgccgtc

SEQ ID NO: 3420239 - DNA, 25 bp, Homo sapien
aaggcagtctggaaaaggcgcccgc

SEQ ID NO: 3420240 - DNA, 25 bp, Homo sapien
tcttctggaaaacgtcgcgggtgcc

SEQ ID NO: 3420241 - DNA, 25 bp, Homo sapien
gggcggctggtacggccgatcatgg

SEQ ID NO: 3420242 - DNA, 25 bp, Homo sapien
tcagagcggcaagtacagcgagtag

SEQ ID NO: 3420243 - DNA, 25 bp, Homo sapien
tacggccgatcatgggcagtttctg

SEQ ID NO: 3420244 - DNA, 25 bp, Homo sapien
agtagtccgagagcgcccaccggcg

SEQ ID NO: 3420245 - DNA, 25 bp, Homo sapien
tacaaggaacgaaggggccactgac

SEQ ID NO: 3420246 - DNA, 25 bp, Homo sapien
ttacaaggaacgaaggggccactga

SEQ ID NO: 3420247 - DNA, 25 bp, Homo sapien
aggcggcagcaaagagcgcaagctc

SEQ ID NO: 3420248 - DNA, 25 bp, Homo sapien
ggtccgagtcatcgccgcggccgcc

SEQ ID NO: 3420249 - DNA, 25 bp, Homo sapien
gaaggcggcagcaaagagcgcaagc

SEQ ID NO: 3420250 - DNA, 25 bp, Homo sapien
cggcagcaaagagcgcaagctcgac

SEQ ID NO: 3420251 - DNA, 25 bp, Homo sapien
cgaggggacaacttcgaagtatgac

SEQ ID NO: 3420252 - DNA, 25 bp, Homo sapien
tggcgaggggacaacttcgaagtat

SEQ ID NO: 3420253 - DNA, 25 bp, Homo sapien
ttggcgaggggacaacttcgaagta

SEQ ID NO: 3420254 - DNA, 25 bp, Homo sapien
gcgaggggacaacttcgaagtatga

SEQ ID NO: 3420255 - DNA, 25 bp, Homo sapien
cgtcagcgttttctccatctctcat

SEQ ID NO: 3420256 - DNA, 25 bp, Homo sapien
acgtcagcgttttctccatctctca

SEQ ID NO: 3420257 - DNA, 25 bp, Homo sapien
tagtgataacttaggaatggtcctg

SEQ ID NO: 3420258 - DNA, 25 bp, Homo sapien
gatacagtctcttggtagggtgtta

SEQ ID NO: 3420259 - DNA, 25 bp, Homo sapien
caggttaatgtctctagatacagtc

SEQ ID NO: 3420260 - DNA, 25 bp, Homo sapien
tgcaccgtcaattcctatttctggg

SEQ ID NO: 3420261 - DNA, 25 bp, Homo sapien
caccatacaggggacatctaccact

SEQ ID NO: 3420262 - DNA, 25 bp, Homo sapien
caggggacatctaccactgaaggag

SEQ ID NO: 3420263 - DNA, 25 bp, Homo sapien
tgagggacgggataaggccagggag

SEQ ID NO: 3420264 - DNA, 25 bp, Homo sapien
gggatggtgctgagggacgggataa

SEQ ID NO: 3420265 - DNA, 25 bp, Homo sapien
ctgtagatccagaagagcaaaagca

SEQ ID NO: 3420266 - DNA, 25 bp, Homo sapien
caaaagcaggaggcagtagagggcc

SEQ ID NO: 3420267 - DNA, 25 bp, Homo sapien
gagcaaaagcaggaggcagtagagg

SEQ ID NO: 3420268 - DNA, 25 bp, Homo sapien
caggaggcagtagagggccaagagg

SEQ ID NO: 3420269 - DNA, 25 bp, Homo sapien
agaacaagccttgtggtggaggtga

SEQ ID NO: 3420270 - DNA, 25 bp, Homo sapien
gagaacaagccttgtggtggaggtg

SEQ ID NO: 3420271 - DNA, 25 bp, Homo sapien
agagaacaagccttgtggtggaggt

SEQ ID NO: 3420272 - DNA, 25 bp, Homo sapien
caccaagaccaggaagacggctata

SEQ ID NO: 3420273 - DNA, 25 bp, Homo sapien
agaccaggaagacggctatagctga

SEQ ID NO: 3420274 - DNA, 25 bp, Homo sapien
caggaagacggctatagctgagatg

SEQ ID NO: 3420275 - DNA, 25 bp, Homo sapien
agacaccaagaccaggaagacggct

SEQ ID NO: 3420276 - DNA, 25 bp, Homo sapien
tgttcaaggagatgatggagttgca

SEQ ID NO: 3420277 - DNA, 25 bp, Homo sapien
ctaattgtagtgttcaaggagatga

SEQ ID NO: 3420278 - DNA, 25 bp, Homo sapien
tagtgttcaaggagatgatggagtt

SEQ ID NO: 3420279 - DNA, 25 bp, Homo sapien
aattgtagtgttcaaggagatgatg

SEQ ID NO: 3420280 - DNA, 25 bp, Homo sapien
ggaaattataggaccccgctgcaga

SEQ ID NO: 3420281 - DNA, 25 bp, Homo sapien
gtttatatccgaggcacacctgtgc

SEQ ID NO: 3420282 - DNA, 25 bp, Homo sapien
ctgcagagggaaggtagtcagcccc

SEQ ID NO: 3420283 - DNA, 25 bp, Homo sapien
ccagtgccctgtgagttgagagcaa

SEQ ID NO: 3420284 - DNA, 25 bp, Homo sapien
cagggggtgtccatggaattttctg

SEQ ID NO: 3420285 - DNA, 25 bp, Homo sapien
agggggtgtccatggaattttctgg

SEQ ID NO: 3420286 - DNA, 25 bp, Homo sapien
tccagggggtgtccatggaattttc

SEQ ID NO: 3420287 - DNA, 25 bp, Homo sapien
ccagggggtgtccatggaattttct

SEQ ID NO: 3420288 - DNA, 25 bp, Homo sapien
taggccaagctcacaatacactggt

SEQ ID NO: 3420289 - DNA, 25 bp, Homo sapien
tttaagctgacaaccccttcagctc

SEQ ID NO: 3420290 - DNA, 25 bp, Homo sapien
caatacactggtgagcacccacaca

SEQ ID NO: 3420291 - DNA, 25 bp, Homo sapien
acaggatcgtcaggagtgggaccat

SEQ ID NO: 3420292 - DNA, 25 bp, Homo sapien
atgggaaaggcgtgacccaacgaga

SEQ ID NO: 3420293 - DNA, 25 bp, Homo sapien
gacccaacgagagcatctgtctcag

SEQ ID NO: 3420294 - DNA, 25 bp, Homo sapien
caataccaaattcacccaagaagag

SEQ ID NO: 3420295 - DNA, 25 bp, Homo sapien
ttcagacttccactgcacgacctgg

SEQ ID NO: 3420296 - DNA, 25 bp, Homo sapien
aagtttcagtccatgtctgcttagc

SEQ ID NO: 3420297 - DNA, 25 bp, Homo sapien
acttgggcatggagtcttcggctgc

SEQ ID NO: 3420298 - DNA, 25 bp, Homo sapien
gactcccaacataaacagggccttg

SEQ ID NO: 3420299 - DNA, 25 bp, Homo sapien
taaaggagcagtcatccctagggca

SEQ ID NO: 3420300 - DNA, 25 bp, Homo sapien
tgacaatactgtgggtgcctaccgg

SEQ ID NO: 3420301 - DNA, 25 bp, Homo sapien
tttgaagcaggtatcttgcatggcc

SEQ ID NO: 3420302 - DNA, 25 bp, Homo sapien
taccggagcttgtgaagaaatgacc

SEQ ID NO: 3420303 - DNA, 25 bp, Homo sapien
gaaaggtcggtacttagatgcccag

SEQ ID NO: 3420304 - DNA, 25 bp, Homo sapien
tctggatgcggaggtcccaaatcgt

SEQ ID NO: 3420305 - DNA, 25 bp, Homo sapien
ggccagggcgtcttctgggcttcca

SEQ ID NO: 3420306 - DNA, 25 bp, Homo sapien
tctgcgtgctggattggttgtctcc

SEQ ID NO: 3420307 - DNA, 25 bp, Homo sapien
aaggcacgacgctgcaacgggatgt

SEQ ID NO: 3420308 - DNA, 25 bp, Homo sapien
tttaatataaagagtgatgttgtat

SEQ ID NO: 3420309 - DNA, 25 bp, Homo sapien
actttttaatataaagagtgatgtt

SEQ ID NO: 3420310 - DNA, 25 bp, Homo sapien
ttttaatataaagagtgatgttgta

SEQ ID NO: 3420311 - DNA, 25 bp, Homo sapien
cttactttttaatataaagagtgat

SEQ ID NO: 3420312 - DNA, 25 bp, Homo sapien
tgctttgtgtacttaaccccaggac

SEQ ID NO: 3420313 - DNA, 25 bp, Homo sapien
ctgacactaaactacccgaaggact

SEQ ID NO: 3420314 - DNA, 25 bp, Homo sapien
tggtgccaggaagccaaagcttact

SEQ ID NO: 3420315 - DNA, 25 bp, Homo sapien
acttcagaagattgagcctcactgg

SEQ ID NO: 3420316 - DNA, 25 bp, Homo sapien
gatacctggtgaggcagcggagccc

SEQ ID NO: 3420317 - DNA, 25 bp, Homo sapien
gcctgggcttggagtactgctcctt

SEQ ID NO: 3420318 - DNA, 25 bp, Homo sapien
tggagtactgctccttgacactcag

SEQ ID NO: 3420319 - DNA, 25 bp, Homo sapien
tggcagaactgatggatacctggtg

SEQ ID NO: 3420320 - DNA, 25 bp, Homo sapien
tgagccccacctgctcatctccctg

SEQ ID NO: 3420321 - DNA, 25 bp, Homo sapien
cctgccccaacatcctgtgccatcc

SEQ ID NO: 3420322 - DNA, 25 bp, Homo sapien
catctccctgccccaacatcctgtg

SEQ ID NO: 3420323 - DNA, 25 bp, Homo sapien
ttcctttcttattcctttgcctctc

SEQ ID NO: 3420324 - DNA, 25 bp, Homo sapien
ggcataggctaccaaggagacagag

SEQ ID NO: 3420325 - DNA, 25 bp, Homo sapien
cagggaaggaacaacctaagacagg

SEQ ID NO: 3420326 - DNA, 25 bp, Homo sapien
cccagttcagatcgggacccaggta

SEQ ID NO: 3420327 - DNA, 25 bp, Homo sapien
tcacaccttctgagggaggtctcct

SEQ ID NO: 3420328 - DNA, 25 bp, Homo sapien
ttcaccatgtgaggcagggagccct

SEQ ID NO: 3420329 - DNA, 25 bp, Homo sapien
gctaagaatgaccactgcccctgat

SEQ ID NO: 3420330 - DNA, 25 bp, Homo sapien
tcaggcctatgaaacacacagggtt

SEQ ID NO: 3420331 - DNA, 25 bp, Homo sapien
tgtccccaggatcgacgagaacgtg

SEQ ID NO: 3420332 - DNA, 25 bp, Homo sapien
gcctggccaaaactagggtccatat

SEQ ID NO: 3420333 - DNA, 25 bp, Homo sapien
cagcctggccaaaactagggtccat

SEQ ID NO: 3420334 - DNA, 25 bp, Homo sapien
tcactgcagcatcaagctcctcaac

SEQ ID NO: 3420335 - DNA, 25 bp, Homo sapien
tggccaaaactagggtccatatacc

SEQ ID NO: 3420336 - DNA, 25 bp, Homo sapien
cagtaggttgccgatatcgtgacac

SEQ ID NO: 3420337 - DNA, 25 bp, Homo sapien
caaagttaatcctagtgctctggga

SEQ ID NO: 3420338 - DNA, 25 bp, Homo sapien
tatgtataccaagccccaagacacg

SEQ ID NO: 3420339 - DNA, 25 bp, Homo sapien
tttaggaggctcagcggagaagatc

SEQ ID NO: 3420340 - DNA, 25 bp, Homo sapien
tgcacgaccactctgggggactggg

SEQ ID NO: 3420341 - DNA, 25 bp, Homo sapien
cacgaccactctgggggactgggcg

SEQ ID NO: 3420342 - DNA, 25 bp, Homo sapien
ctgcacgaccactctgggggactgg

SEQ ID NO: 3420343 - DNA, 25 bp, Homo sapien
gcacgaccactctgggggactgggc

SEQ ID NO: 3420344 - DNA, 25 bp, Homo sapien
tggcggcgactatccacgttcggtc

SEQ ID NO: 3420345 - DNA, 25 bp, Homo sapien
aagatatcgacttgaactccccgga

SEQ ID NO: 3420346 - DNA, 25 bp, Homo sapien
gaccatccgaatcacaagtcgaacg

SEQ ID NO: 3420347 - DNA, 25 bp, Homo sapien
aacgaaagccttctgattaccgtgc

SEQ ID NO: 3420348 - DNA, 25 bp, Homo sapien
gacttgggactatctgtttacctgc

SEQ ID NO: 3420349 - DNA, 25 bp, Homo sapien
agctctcgggtttggagcagcccca

SEQ ID NO: 3420350 - DNA, 25 bp, Homo sapien
tcaagaacccaacaaggtgccccta

SEQ ID NO: 3420351 - DNA, 25 bp, Homo sapien
gatgagccccaagagcctcaagaac

SEQ ID NO: 3420352 - DNA, 25 bp, Homo sapien
gccaagggcatagatgtgaggacct

SEQ ID NO: 3420353 - DNA, 25 bp, Homo sapien
agcataaggtaagttgtctctccca

SEQ ID NO: 3420354 - DNA, 25 bp, Homo sapien
aactcatggtcttgtggaggccccg

SEQ ID NO: 3420355 - DNA, 25 bp, Homo sapien
gcatgcctggctccttaaggtccct

SEQ ID NO: 3420356 - DNA, 25 bp, Homo sapien
gatgaccactttcgtaaactactga

SEQ ID NO: 3420357 - DNA, 25 bp, Homo sapien
tcaaggccatagctttaagagatcc

SEQ ID NO: 3420358 - DNA, 25 bp, Homo sapien
tctgttcccgtcatgagcctttagg

SEQ ID NO: 3420359 - DNA, 25 bp, Homo sapien
tgtgattcatggcacccagactttg

SEQ ID NO: 3420360 - DNA, 25 bp, Homo sapien
taaggtggactatgctaaaaattcc

SEQ ID NO: 3420361 - DNA, 25 bp, Homo sapien
ctgtaaaggtgaacccactgggact

SEQ ID NO: 3420362 - DNA, 25 bp, Homo sapien
gaaagggagtaatcatcacttgttg

SEQ ID NO: 3420363 - DNA, 25 bp, Homo sapien
caggtctgagcaaataaggtgtata

SEQ ID NO: 3420364 - DNA, 25 bp, Homo sapien
gatttacgcgcacgttggaaccgaa

SEQ ID NO: 3420365 - DNA, 25 bp, Homo sapien
tactgtacgcaacaaatgtcagggc

SEQ ID NO: 3420366 - DNA, 25 bp, Homo sapien
tcgaaatgccctgagttgacctaat

SEQ ID NO: 3420367 - DNA, 25 bp, Homo sapien
gataaggtcttgtgcgtggcctcga

SEQ ID NO: 3420368 - DNA, 25 bp, Homo sapien
tgaggcagtgatctcaccgctcctg

SEQ ID NO: 3420369 - DNA, 25 bp, Homo sapien
tgagaaaaccaagccgcaatgcggt

SEQ ID NO: 3420370 - DNA, 25 bp, Homo sapien
tgtagctccatggaggcggatcctg

SEQ ID NO: 3420371 - DNA, 25 bp, Homo sapien
taggcagtcgtgaccgtcagtccag

SEQ ID NO: 3420372 - DNA, 25 bp, Homo sapien
ccgagcttagcccgggatccagtac

SEQ ID NO: 3420373 - DNA, 25 bp, Homo sapien
ctgacatactttcccgaaatggccc

SEQ ID NO: 3420374 - DNA, 25 bp, Homo sapien
cctcctcccgagcttagcccgggat

SEQ ID NO: 3420375 - DNA, 25 bp, Homo sapien
tcccgagcttagcccgggatccagt

SEQ ID NO: 3420376 - DNA, 25 bp, Homo sapien
gaattgtagctacacacttccttct

SEQ ID NO: 3420377 - DNA, 25 bp, Homo sapien
catgaattgtagctacacacttcct

SEQ ID NO: 3420378 - DNA, 25 bp, Homo sapien
tgcttatctggctttccccaggaaa

SEQ ID NO: 3420379 - DNA, 25 bp, Homo sapien
tattctaatactccccttttgccca

SEQ ID NO: 3420380 - DNA, 25 bp, Homo sapien
catggaggtaatgcaatactatatt

SEQ ID NO: 3420381 - DNA, 25 bp, Homo sapien
cagatactattctggctcacagacc

SEQ ID NO: 3420382 - DNA, 25 bp, Homo sapien
tacagaactgatgagatgttagagg

SEQ ID NO: 3420383 - DNA, 25 bp, Homo sapien
taaagtatcctcaagtacagaactg

SEQ ID NO: 3420384 - DNA, 25 bp, Homo sapien
ctatcatctcggcattctgggaagc

SEQ ID NO: 3420385 - DNA, 25 bp, Homo sapien
ggaagctgagggaagaggatcacct

SEQ ID NO: 3420386 - DNA, 25 bp, Homo sapien
tcatctcggcattctgggaagctga

SEQ ID NO: 3420387 - DNA, 25 bp, Homo sapien
aagctgagggaagaggatcacctga

SEQ ID NO: 3420388 - DNA, 25 bp, Homo sapien
taacctcagcattcttggaagctaa

SEQ ID NO: 3420389 - DNA, 25 bp, Homo sapien
gtaacctcagcattcttggaagcta

SEQ ID NO: 3420390 - DNA, 25 bp, Homo sapien
tgtaacctcagcattcttggaagct

SEQ ID NO: 3420391 - DNA, 25 bp, Homo sapien
caggaattcaatatcagcctggcta

SEQ ID NO: 3420392 - DNA, 25 bp, Homo sapien
ggaattcaatatcagcctggctaac

SEQ ID NO: 3420393 - DNA, 25 bp, Homo sapien
cttccggaggccgaggcagtcggat

SEQ ID NO: 3420394 - DNA, 25 bp, Homo sapien
gcacttccggaggccgaggcagtcg

SEQ ID NO: 3420395 - DNA, 25 bp, Homo sapien
atggtggctcaacccctacctggac

SEQ ID NO: 3420396 - DNA, 25 bp, Homo sapien
tgtgcctccgcgcagtttcggctac

SEQ ID NO: 3420397 - DNA, 25 bp, Homo sapien
cagcttgcggtcagatggtggctca

SEQ ID NO: 3420398 - DNA, 25 bp, Homo sapien
agaaccggcgacacgacgcagcttg

SEQ ID NO: 3420399 - DNA, 25 bp, Homo sapien
tatccacctcggtgtcctggctcat

SEQ ID NO: 3420400 - DNA, 25 bp, Homo sapien
catatccacctcggtgtcctggctc

SEQ ID NO: 3420401 - DNA, 25 bp, Homo sapien
atatccacctcggtgtcctggctca

SEQ ID NO: 3420402 - DNA, 25 bp, Homo sapien
ccgcctcgtcttccgccaccttgat

SEQ ID NO: 3420403 - DNA, 25 bp, Homo sapien
cgcgttcatcggctgcttctcgggc

SEQ ID NO: 3420404 - DNA, 25 bp, Homo sapien
tctcgggctctaactcattcagctc

SEQ ID NO: 3420405 - DNA, 25 bp, Homo sapien
cagacgccgcgttcatcggctgctt

SEQ ID NO: 3420406 - DNA, 25 bp, Homo sapien
tggacaggcccgtgaacttagccgc

SEQ ID NO: 3420407 - DNA, 25 bp, Homo sapien
acttctgcgccggtagctcgcgaca

SEQ ID NO: 3420408 - DNA, 25 bp, Homo sapien
acgattatgaccacggcaccagcaa

SEQ ID NO: 3420409 - DNA, 25 bp, Homo sapien
caacgcggcgctcgcacgattatga

SEQ ID NO: 3420410 - DNA, 25 bp, Homo sapien
ttctcccagcgcctaagggtgggac

SEQ ID NO: 3420411 - DNA, 25 bp, Homo sapien
ggctgaatcacgagactcagaggag

SEQ ID NO: 3420412 - DNA, 25 bp, Homo sapien
gctgggttaacaagtgaggcccctc

SEQ ID NO: 3420413 - DNA, 25 bp, Homo sapien
gaatcacgagactcagaggagctga

SEQ ID NO: 3420414 - DNA, 25 bp, Homo sapien
ggttcttgtgaattggacccagcac

SEQ ID NO: 3420415 - DNA, 25 bp, Homo sapien
agtctgagcgacatcatccttctgg

SEQ ID NO: 3420416 - DNA, 25 bp, Homo sapien
ccttcagagagctcaggtaatcgag

SEQ ID NO: 3420417 - DNA, 25 bp, Homo sapien
tttagccgattgcaagagactgtca

SEQ ID NO: 3420418 - DNA, 25 bp, Homo sapien
caagattccacagccaagtagaaag

SEQ ID NO: 3420419 - DNA, 25 bp, Homo sapien
cccagacgactggacaaatccattt

SEQ ID NO: 3420420 - DNA, 25 bp, Homo sapien
ggaaaactcagagccagttagcagg

SEQ ID NO: 3420421 - DNA, 25 bp, Homo sapien
tggccaagtcctttctagctgtttc

SEQ ID NO: 3420422 - DNA, 25 bp, Homo sapien
ttaaacatgtgtctatatcgagtcg

SEQ ID NO: 3420423 - DNA, 25 bp, Homo sapien
accactggtttagtaaatatctata

SEQ ID NO: 3420424 - DNA, 25 bp, Homo sapien
cgagtcgtaaaacaatatttgggat

SEQ ID NO: 3420425 - DNA, 25 bp, Homo sapien
aagtttatagtgcagagaagtggcc

SEQ ID NO: 3420426 - DNA, 25 bp, Homo sapien
agctactcaggaggctgaggcacga

SEQ ID NO: 3420427 - DNA, 25 bp, Homo sapien
tgtggtggcacacggctgtagtacc

SEQ ID NO: 3420428 - DNA, 25 bp, Homo sapien
gaatcgcttgaaccctgggggagga

SEQ ID NO: 3420429 - DNA, 25 bp, Homo sapien
cgcttgaaccctgggggaggaggct

SEQ ID NO: 3420430 - DNA, 25 bp, Homo sapien
ttcaaaaccagaccggtcaacatgt

SEQ ID NO: 3420431 - DNA, 25 bp, Homo sapien
tcattccattgaaacagatgtgagc

SEQ ID NO: 3420432 - DNA, 25 bp, Homo sapien
aaggcaggccaggcgagttcaaaac

SEQ ID NO: 3420433 - DNA, 25 bp, Homo sapien
caaggaagggccttaagatatggga

SEQ ID NO: 3420434 - DNA, 25 bp, Homo sapien
ctaaaacaacggaggaagacgcaat

SEQ ID NO: 3420435 - DNA, 25 bp, Homo sapien
taaaacaacggaggaagacgcaatc

SEQ ID NO: 3420436 - DNA, 25 bp, Homo sapien
aaaacaacggaggaagacgcaatca

SEQ ID NO: 3420437 - DNA, 25 bp, Homo sapien
gccacagtgtcaacctgagtggaga

SEQ ID NO: 3420438 - DNA, 25 bp, Homo sapien
cacgagttctcaccccggtagttgg

SEQ ID NO: 3420439 - DNA, 25 bp, Homo sapien
tggagaaccacgagttctcaccccg

SEQ ID NO: 3420440 - DNA, 25 bp, Homo sapien
cctgagtggagaaccacgagttctc

SEQ ID NO: 3420441 - DNA, 25 bp, Homo sapien
gacatcaggagctaggtgacattca

SEQ ID NO: 3420442 - DNA, 25 bp, Homo sapien
gctgaatggaatcctggcagtcctg

SEQ ID NO: 3420443 - DNA, 25 bp, Homo sapien
caaggcctaaactggatgatcccgg

SEQ ID NO: 3420444 - DNA, 25 bp, Homo sapien
tagagtcccagacacataggagtac

SEQ ID NO: 3420445 - DNA, 25 bp, Homo sapien
aaaatgtcagtcaagatcccccctc

SEQ ID NO: 3420446 - DNA, 25 bp, Homo sapien
agggagacgcgtccacagtcataat

SEQ ID NO: 3420447 - DNA, 25 bp, Homo sapien
taaaatgtcagtcaagatcccccct

SEQ ID NO: 3420448 - DNA, 25 bp, Homo sapien
taaaggacagacatcagttctcagg

SEQ ID NO: 3420449 - DNA, 25 bp, Homo sapien
tgcctctggcaaatcacacagcttc

SEQ ID NO: 3420450 - DNA, 25 bp, Homo sapien
acttcgtttaacacttagcattgga

SEQ ID NO: 3420451 - DNA, 25 bp, Homo sapien
cagaaaattccagcccacactaaac

SEQ ID NO: 3420452 - DNA, 25 bp, Homo sapien
gattctctatgtcccgaacctggaa

SEQ ID NO: 3420453 - DNA, 25 bp, Homo sapien
cttcagattctctatgtcccgaacc

SEQ ID NO: 3420454 - DNA, 25 bp, Homo sapien
cagattctctatgtcccgaacctgg

SEQ ID NO: 3420455 - DNA, 25 bp, Homo sapien
tctatgtcccgaacctggaacccat

SEQ ID NO: 3420456 - DNA, 25 bp, Homo sapien
ggtgatattttgccactcagccaag

SEQ ID NO: 3420457 - DNA, 25 bp, Homo sapien
gtgatattttgccactcagccaaga

SEQ ID NO: 3420458 - DNA, 25 bp, Homo sapien
gatattttgccactcagccaagaat

SEQ ID NO: 3420459 - DNA, 25 bp, Homo sapien
actcagccaagaatgaggatgcatc

SEQ ID NO: 3420460 - DNA, 25 bp, Homo sapien
gctgcaccagcgattgccagtggca

SEQ ID NO: 3420461 - DNA, 25 bp, Homo sapien
tgctccccagtagaaccagaatcag

SEQ ID NO: 3420462 - DNA, 25 bp, Homo sapien
ggaggagttagtccccgcaatcaag

SEQ ID NO: 3420463 - DNA, 25 bp, Homo sapien
tctttgttggattcgagtaggctca

SEQ ID NO: 3420464 - DNA, 25 bp, Homo sapien
actccagtgagccccataacccacc

SEQ ID NO: 3420465 - DNA, 25 bp, Homo sapien
agtgagccccataacccacctctgc

SEQ ID NO: 3420466 - DNA, 25 bp, Homo sapien
tgagccccataacccacctctgcct

SEQ ID NO: 3420467 - DNA, 25 bp, Homo sapien
tccagtgagccccataacccacctc

SEQ ID NO: 3420468 - DNA, 25 bp, Homo sapien
catccccgtagctgaaaacaggggt

SEQ ID NO: 3420469 - DNA, 25 bp, Homo sapien
tccaggccaatctcatccccgtagc

SEQ ID NO: 3420470 - DNA, 25 bp, Homo sapien
gtcggagaagttgagccggcaagaa

SEQ ID NO: 3420471 - DNA, 25 bp, Homo sapien
aagagcatcagctggtagagtcgga

SEQ ID NO: 3420472 - DNA, 25 bp, Homo sapien
gtgggatgatcacttcggcctggga

SEQ ID NO: 3420473 - DNA, 25 bp, Homo sapien
ggatgatcacttcggcctgggaggc

SEQ ID NO: 3420474 - DNA, 25 bp, Homo sapien
ctatctatggtacatatcccagcta

SEQ ID NO: 3420475 - DNA, 25 bp, Homo sapien
tatctatggtacatatcccagctac

SEQ ID NO: 3420476 - DNA, 25 bp, Homo sapien
ctccccaactcatgtctggctaact

SEQ ID NO: 3420477 - DNA, 25 bp, Homo sapien
acctccccaactcatgtctggctaa

SEQ ID NO: 3420478 - DNA, 25 bp, Homo sapien
taacctccccaactcatgtctggct

SEQ ID NO: 3420479 - DNA, 25 bp, Homo sapien
ataacctccccaactcatgtctggc

SEQ ID NO: 3420480 - DNA, 25 bp, Homo sapien
ggtgtagtgttacatccctatagtc

SEQ ID NO: 3420481 - DNA, 25 bp, Homo sapien
gggtgtagtgttacatccctatagt

SEQ ID NO: 3420482 - DNA, 25 bp, Homo sapien
gtgtagtgttacatccctatagtcc

SEQ ID NO: 3420483 - DNA, 25 bp, Homo sapien
tgggtgtagtgttacatccctatag

SEQ ID NO: 3420484 - DNA, 25 bp, Homo sapien
ggaagctggactcatcccacagcat

SEQ ID NO: 3420485 - DNA, 25 bp, Homo sapien
gttggcacttacagcccctgggatg

SEQ ID NO: 3420486 - DNA, 25 bp, Homo sapien
ggatgtcagggaagctggactcatc

SEQ ID NO: 3420487 - DNA, 25 bp, Homo sapien
tgtcagggaagctggactcatccca

SEQ ID NO: 3420488 - DNA, 25 bp, Homo sapien
gaatgataaaaacatagcagaagcg

SEQ ID NO: 3420489 - DNA, 25 bp, Homo sapien
aaaacatagcagaagcgtgtgaggg

SEQ ID NO: 3420490 - DNA, 25 bp, Homo sapien
cccctgggtacagacttctacaagc

SEQ ID NO: 3420491 - DNA, 25 bp, Homo sapien
ccctgggtacagacttctacaagcc

SEQ ID NO: 3420492 - DNA, 25 bp, Homo sapien
ccttactccgctggtcactcagccg

SEQ ID NO: 3420493 - DNA, 25 bp, Homo sapien
agggagcgctccttactccgctggt

SEQ ID NO: 3420494 - DNA, 25 bp, Homo sapien
ctccttactccgctggtcactcagc

SEQ ID NO: 3420495 - DNA, 25 bp, Homo sapien
ggagcgctccttactccgctggtca

SEQ ID NO: 3420496 - DNA, 25 bp, Homo sapien
agaacgcgtggaagtccccatgcag

SEQ ID NO: 3420497 - DNA, 25 bp, Homo sapien
tcccagtggcggatataggagaaga

SEQ ID NO: 3420498 - DNA, 25 bp, Homo sapien
catccccaaagttaagcactaccag

SEQ ID NO: 3420499 - DNA, 25 bp, Homo sapien
agaaaacgctcattctggtcccagt

SEQ ID NO: 3420500 - DNA, 25 bp, Homo sapien
aggcgttccagctcaagaggggagc

SEQ ID NO: 3420501 - DNA, 25 bp, Homo sapien
gcgttccagctcaagaggggagccc

SEQ ID NO: 3420502 - DNA, 25 bp, Homo sapien
gttccagctcaagaggggagccctc

SEQ ID NO: 3420503 - DNA, 25 bp, Homo sapien
cgttccagctcaagaggggagccct

SEQ ID NO: 3420504 - DNA, 25 bp, Homo sapien
tcaggccgcgtaggggaagcggagc

SEQ ID NO: 3420505 - DNA, 25 bp, Homo sapien
ggggaagcggagcagcagcccttcg

SEQ ID NO: 3420506 - DNA, 25 bp, Homo sapien
aagcggagcagcagcccttcgtgag

SEQ ID NO: 3420507 - DNA, 25 bp, Homo sapien
ggaagcggagcagcagcccttcgtg

SEQ ID NO: 3420508 - DNA, 25 bp, Homo sapien
gtagtgggtccatgtcaggctgaag

SEQ ID NO: 3420509 - DNA, 25 bp, Homo sapien
gaagggtagtgggtccatgtcaggc

SEQ ID NO: 3420510 - DNA, 25 bp, Homo sapien
aagggtagtgggtccatgtcaggct

SEQ ID NO: 3420511 - DNA, 25 bp, Homo sapien
gggtagtgggtccatgtcaggctga

SEQ ID NO: 3420512 - DNA, 25 bp, Homo sapien
acaccctatttgggggttcactcat

SEQ ID NO: 3420513 - DNA, 25 bp, Homo sapien
cctatttgggggttcactcataatc

SEQ ID NO: 3420514 - DNA, 25 bp, Homo sapien
ttcactcataatctgcaacagtttg

SEQ ID NO: 3420515 - DNA, 25 bp, Homo sapien
cactcataatctgcaacagtttgtt

SEQ ID NO: 3420516 - DNA, 25 bp, Homo sapien
caggaccctgggtcaccttcctggg

SEQ ID NO: 3420517 - DNA, 25 bp, Homo sapien
caccttcctgggcagcccagagaga

SEQ ID NO: 3420518 - DNA, 25 bp, Homo sapien
ccaggaccctgggtcaccttcctgg

SEQ ID NO: 3420519 - DNA, 25 bp, Homo sapien
cttcctgggcagcccagagagaccc

SEQ ID NO: 3420520 - DNA, 25 bp, Homo sapien
agctctgatgatcggcctggcctgg

SEQ ID NO: 3420521 - DNA, 25 bp, Homo sapien
aatgcctccgtcatgaatctgctgc

SEQ ID NO: 3420522 - DNA, 25 bp, Homo sapien
gctctgggcacgctggcttgtgacc

SEQ ID NO: 3420523 - DNA, 25 bp, Homo sapien
gctttgaccgctacttctccgtgac

SEQ ID NO: 3420524 - DNA, 25 bp, Homo sapien
tcgctgatgagctgtaaggtccttc

SEQ ID NO: 3420525 - DNA, 25 bp, Homo sapien
ccaagccctgggataaagcattgaa

SEQ ID NO: 3420526 - DNA, 25 bp, Homo sapien
cagatatacgacagacactgccgcg

SEQ ID NO: 3420527 - DNA, 25 bp, Homo sapien
gcattgaatgagacagacgcagccc

SEQ ID NO: 3420528 - DNA, 25 bp, Homo sapien
gcggattccactgtacagagttggg

SEQ ID NO: 3420529 - DNA, 25 bp, Homo sapien
gggttgccttgagacctggacctgt

SEQ ID NO: 3420530 - DNA, 25 bp, Homo sapien
gtcacgaccctggacgagcggattc

SEQ ID NO: 3420531 - DNA, 25 bp, Homo sapien
tggacctgttctgaccccaaattcc

SEQ ID NO: 3420532 - DNA, 25 bp, Homo sapien
ctgcagaactgcctggaaccaccct

SEQ ID NO: 3420533 - DNA, 25 bp, Homo sapien
tgcagaactgcctggaaccaccctg

SEQ ID NO: 3420534 - DNA, 25 bp, Homo sapien
gcagaactgcctggaaccaccctgg

SEQ ID NO: 3420535 - DNA, 25 bp, Homo sapien
tgccgaaaagatgaccaggaagact

SEQ ID NO: 3420536 - DNA, 25 bp, Homo sapien
tgtcaacagggctacagaaacgtga

SEQ ID NO: 3420537 - DNA, 25 bp, Homo sapien
gaaacgtgagtaaagatcaacggac

SEQ ID NO: 3420538 - DNA, 25 bp, Homo sapien
aagtcttttggaactgtcaacaggg

SEQ ID NO: 3420539 - DNA, 25 bp, Homo sapien
ggagacccatctcacatacagagac

SEQ ID NO: 3420540 - DNA, 25 bp, Homo sapien
gacccatctcacatacagagacaca

SEQ ID NO: 3420541 - DNA, 25 bp, Homo sapien
ttcaggagacccatctcacatacag

SEQ ID NO: 3420542 - DNA, 25 bp, Homo sapien
caggagacccatctcacatacagag

SEQ ID NO: 3420543 - DNA, 25 bp, Homo sapien
ctggctggggcacatgttttccagc

SEQ ID NO: 3420544 - DNA, 25 bp, Homo sapien
catcctctccaccaatgaccttgtc

SEQ ID NO: 3420545 - DNA, 25 bp, Homo sapien
tctggctggggcacatgttttccag

SEQ ID NO: 3420546 - DNA, 25 bp, Homo sapien
aggtggtgaagaagtcatcctctcc

SEQ ID NO: 3420547 - DNA, 25 bp, Homo sapien
tttcccagtaatgagttgctctggg

SEQ ID NO: 3420548 - DNA, 25 bp, Homo sapien
tagttgttggcagcatcctctttcc

SEQ ID NO: 3420549 - DNA, 25 bp, Homo sapien
cagtaatgagttgctctgggtggaa

SEQ ID NO: 3420550 - DNA, 25 bp, Homo sapien
tcctctttcccagtaatgagttgct

SEQ ID NO: 3420551 - DNA, 25 bp, Homo sapien
gtgatcccctggccaatggtatagt

SEQ ID NO: 3420552 - DNA, 25 bp, Homo sapien
ccaggtcagtgatcccctggccaat

SEQ ID NO: 3420553 - DNA, 25 bp, Homo sapien
cagtgatcccctggccaatggtata

SEQ ID NO: 3420554 - DNA, 25 bp, Homo sapien
agtgatcccctggccaatggtatag

SEQ ID NO: 3420555 - DNA, 25 bp, Homo sapien
gaaagccactccatgcggagtgagg

SEQ ID NO: 3420556 - DNA, 25 bp, Homo sapien
ccactccatgcggagtgaggtgaag

SEQ ID NO: 3420557 - DNA, 25 bp, Homo sapien
actccatgcggagtgaggtgaagtc

SEQ ID NO: 3420558 - DNA, 25 bp, Homo sapien
aagccactccatgcggagtgaggtg

SEQ ID NO: 3420559 - DNA, 25 bp, Homo sapien
gaagatgtgacagaggagatgattt

SEQ ID NO: 3420560 - DNA, 25 bp, Homo sapien
gatgtccaggttgcagcggcaaatg

SEQ ID NO: 3420561 - DNA, 25 bp, Homo sapien
gctgaggttggatgctcgatgtcca

SEQ ID NO: 3420562 - DNA, 25 bp, Homo sapien
gagatgatttggtaatgtggcagtt

SEQ ID NO: 3420563 - DNA, 25 bp, Homo sapien
gatgagtgagtaggtggccggggga

SEQ ID NO: 3420564 - DNA, 25 bp, Homo sapien
agtgagtaggtggccgggggaagtg

SEQ ID NO: 3420565 - DNA, 25 bp, Homo sapien
tgagtgagtaggtggccgggggaag

SEQ ID NO: 3420566 - DNA, 25 bp, Homo sapien
atgatgagtgagtaggtggccgggg

SEQ ID NO: 3420567 - DNA, 25 bp, Homo sapien
catgtacttgctatgccgggggtca

SEQ ID NO: 3420568 - DNA, 25 bp, Homo sapien
ggccaccgacagctgttcatggtat

SEQ ID NO: 3420569 - DNA, 25 bp, Homo sapien
gaagcccatggggaaccagtccaca

SEQ ID NO: 3420570 - DNA, 25 bp, Homo sapien
acacttctccatctggttggtaagc

SEQ ID NO: 3420571 - DNA, 25 bp, Homo sapien
caggtcaccaccaggcaccacagtg

SEQ ID NO: 3420572 - DNA, 25 bp, Homo sapien
ggtcaccaccaggcaccacagtggg

SEQ ID NO: 3420573 - DNA, 25 bp, Homo sapien
gccaggtcaccaccaggcaccacag

SEQ ID NO: 3420574 - DNA, 25 bp, Homo sapien
cttggccaggtcaccaccaggcacc

SEQ ID NO: 3420575 - DNA, 25 bp, Homo sapien
cagcgatagtgatcatgttgctcag

SEQ ID NO: 3420576 - DNA, 25 bp, Homo sapien
ttgcccacatcccagtgcacaaacg

SEQ ID NO: 3420577 - DNA, 25 bp, Homo sapien
ccaggcctcagcgatagtgatcatg

SEQ ID NO: 3420578 - DNA, 25 bp, Homo sapien
tcaggttgaacttgtggcccgggca

SEQ ID NO: 3420579 - DNA, 25 bp, Homo sapien
ttatccttgtcctcatataagttga

SEQ ID NO: 3420580 - DNA, 25 bp, Homo sapien
ctcccttatccttgtcctcatataa

SEQ ID NO: 3420581 - DNA, 25 bp, Homo sapien
tcccttatccttgtcctcatataag

SEQ ID NO: 3420582 - DNA, 25 bp, Homo sapien
ccttgtcctcatataagttgatgct

SEQ ID NO: 3420583 - DNA, 25 bp, Homo sapien
taacacaacagggtgctgtagtcaa

SEQ ID NO: 3420584 - DNA, 25 bp, Homo sapien
ccccatgctgcataatgtgattatt

SEQ ID NO: 3420585 - DNA, 25 bp, Homo sapien
aataaacgcttgagggacagatacc

SEQ ID NO: 3420586 - DNA, 25 bp, Homo sapien
catacctatatcagaacatctcata

SEQ ID NO: 3420587 - DNA, 25 bp, Homo sapien
aagcacttcactctatcagtaccaa

SEQ ID NO: 3420588 - DNA, 25 bp, Homo sapien
aactgttcacaatggccaaggtttg

SEQ ID NO: 3420589 - DNA, 25 bp, Homo sapien
tgagccctccaaatattgccccagt

SEQ ID NO: 3420590 - DNA, 25 bp, Homo sapien
gttgcagaactgttcacaatggcca

SEQ ID NO: 3420591 - DNA, 25 bp, Homo sapien
gcaccaagtcactaaggctgcacac

SEQ ID NO: 3420592 - DNA, 25 bp, Homo sapien
ggcaccaagtcactaaggctgcaca

SEQ ID NO: 3420593 - DNA, 25 bp, Homo sapien
agggctgtcacaaaggtctctgaca

SEQ ID NO: 3420594 - DNA, 25 bp, Homo sapien
ccaagtcactaaggctgcacacagc

SEQ ID NO: 3420595 - DNA, 25 bp, Homo sapien
acatcttcctttcacaccgcccaag

SEQ ID NO: 3420596 - DNA, 25 bp, Homo sapien
ggtctggaggtcgaagaccctcttc

SEQ ID NO: 3420597 - DNA, 25 bp, Homo sapien
tgtatggacttcaaccccacatctt

SEQ ID NO: 3420598 - DNA, 25 bp, Homo sapien
ccactaagcagtctccgatggagac

SEQ ID NO: 3420599 - DNA, 25 bp, Homo sapien
tgttgggtcaaatgttagctttact

SEQ ID NO: 3420600 - DNA, 25 bp, Homo sapien
caaacatgcagggatccaaacacca

SEQ ID NO: 3420601 - DNA, 25 bp, Homo sapien
tgggattgccagtgcttacaggcct

SEQ ID NO: 3420602 - DNA, 25 bp, Homo sapien
gaccaaaattaggtgacctctgccc

SEQ ID NO: 3420603 - DNA, 25 bp, Homo sapien
tacctgttagctgtctgggattgcc

SEQ ID NO: 3420604 - DNA, 25 bp, Homo sapien
ttctctaggacagcaattgatcact

SEQ ID NO: 3420605 - DNA, 25 bp, Homo sapien
gattttgccacacggaagttgctgg

SEQ ID NO: 3420606 - DNA, 25 bp, Homo sapien
gaggtgctgggcctttgtatcccaa

SEQ ID NO: 3420607 - DNA, 25 bp, Homo sapien
caggattccctgatagaaatctggg

SEQ ID NO: 3420608 - DNA, 25 bp, Homo sapien
cagatgcttctcatgttcctactgg

SEQ ID NO: 3420609 - DNA, 25 bp, Homo sapien
gagccgtcgactaagccagatgctt

SEQ ID NO: 3420610 - DNA, 25 bp, Homo sapien
tgcaccttgggcactgaatcacatg

SEQ ID NO: 3420611 - DNA, 25 bp, Homo sapien
ttcctactggcaacctgccttctgg

SEQ ID NO: 3420612 - DNA, 25 bp, Homo sapien
taatctagatttgctacacaagacc

SEQ ID NO: 3420613 - DNA, 25 bp, Homo sapien
gaaatcactcaccttccgcattgct

SEQ ID NO: 3420614 - DNA, 25 bp, Homo sapien
tgccagctgtctctatcgactacct

SEQ ID NO: 3420615 - DNA, 25 bp, Homo sapien
tgaatgccatgaatatacaatctgt

SEQ ID NO: 3420616 - DNA, 25 bp, Homo sapien
agggccctggtagcattggcacaca

SEQ ID NO: 3420617 - DNA, 25 bp, Homo sapien
tccccaaacagccacctagttttgc

SEQ ID NO: 3420618 - DNA, 25 bp, Homo sapien
cttgggtaggtgaggaagttccctg

SEQ ID NO: 3420619 - DNA, 25 bp, Homo sapien
tctgcgtgttgcaaaaactatggga

SEQ ID NO: 3420620 - DNA, 25 bp, Homo sapien
tgccataatttccttacttatccaa

SEQ ID NO: 3420621 - DNA, 25 bp, Homo sapien
gaattttcatgtaattgtatgattt

SEQ ID NO: 3420622 - DNA, 25 bp, Homo sapien
ccttacttatccaaaagtcattcag

SEQ ID NO: 3420623 - DNA, 25 bp, Homo sapien
tgatttctgccataatttccttact

SEQ ID NO: 3420624 - DNA, 25 bp, Homo sapien
tcctgttatgggagttttggatgct

SEQ ID NO: 3420625 - DNA, 25 bp, Homo sapien
gttatgggagttttggatgctgctt

SEQ ID NO: 3420626 - DNA, 25 bp, Homo sapien
gtggcacactttcactcttgggtcc

SEQ ID NO: 3420627 - DNA, 25 bp, Homo sapien
tggcacactttcactcttgggtcca

SEQ ID NO: 3420628 - DNA, 25 bp, Homo sapien
tgcagtccctcgtggctctgaggac

SEQ ID NO: 3420629 - DNA, 25 bp, Homo sapien
cacggtcaacttggagtaggttgca

SEQ ID NO: 3420630 - DNA, 25 bp, Homo sapien
aacttggagtaggttgcagtccctc

SEQ ID NO: 3420631 - DNA, 25 bp, Homo sapien
tgaggaccgggtctacctcacagcc

SEQ ID NO: 3420632 - DNA, 25 bp, Homo sapien
gactttgaagttgggatcctggcga

SEQ ID NO: 3420633 - DNA, 25 bp, Homo sapien
gaaacagtccaggtaaatcgtggcc

SEQ ID NO: 3420634 - DNA, 25 bp, Homo sapien
ctttttggcagtcagtgggctggac

SEQ ID NO: 3420635 - DNA, 25 bp, Homo sapien
cggtataaatgcacagctttttggc

SEQ ID NO: 3420636 - DNA, 25 bp, Homo sapien
gccaggttccacttcaactttccca

SEQ ID NO: 3420637 - DNA, 25 bp, Homo sapien
gctgccaggttccacttcaactttc

SEQ ID NO: 3420638 - DNA, 25 bp, Homo sapien
tccacttcaactttcccaacaccac

SEQ ID NO: 3420639 - DNA, 25 bp, Homo sapien
agctgccaggttccacttcaacttt

SEQ ID NO: 3420640 - DNA, 25 bp, Homo sapien
ggcattgcaagggagtgagctcact

SEQ ID NO: 3420641 - DNA, 25 bp, Homo sapien
gcttgcagattggagacagcttctc

SEQ ID NO: 3420642 - DNA, 25 bp, Homo sapien
cattgatggcgggtacattgcatac

SEQ ID NO: 3420643 - DNA, 25 bp, Homo sapien
cattgcatacagagcattgaagttc

SEQ ID NO: 3420644 - DNA, 25 bp, Homo sapien
aatatgctcccggttggcttttgag

SEQ ID NO: 3420645 - DNA, 25 bp, Homo sapien
tcaatatgctcccggttggcttttg

SEQ ID NO: 3420646 - DNA, 25 bp, Homo sapien
atatgctcccggttggcttttgaga

SEQ ID NO: 3420647 - DNA, 25 bp, Homo sapien
tatgctcccggttggcttttgagac

SEQ ID NO: 3420648 - DNA, 25 bp, Homo sapien
gtctttgcacccgcaataactttac

SEQ ID NO: 3420649 - DNA, 25 bp, Homo sapien
tatgctcctggatcaagtgggtggc

SEQ ID NO: 3420650 - DNA, 25 bp, Homo sapien
tccttacaatctccatcattataca

SEQ ID NO: 3420651 - DNA, 25 bp, Homo sapien
gggagattccaaatctttcatctga

SEQ ID NO: 3420652 - DNA, 25 bp, Homo sapien
ctgttctgtctcgatgggttttgat

SEQ ID NO: 3420653 - DNA, 25 bp, Homo sapien
tttctcatccatgggcccggactca

SEQ ID NO: 3420654 - DNA, 25 bp, Homo sapien
ttaagcttgtattgatcctcgcatc

SEQ ID NO: 3420655 - DNA, 25 bp, Homo sapien
caatacagccgtagtggaaagagct

SEQ ID NO: 3420656 - DNA, 25 bp, Homo sapien
ggcccggactcaccagtgcaataca

SEQ ID NO: 3420657 - DNA, 25 bp, Homo sapien
ccattgattgtgaacacgtgacccc

SEQ ID NO: 3420658 - DNA, 25 bp, Homo sapien
tagcagtatatgagggattaataac

SEQ ID NO: 3420659 - DNA, 25 bp, Homo sapien
tgacccccaagaggaggcacaatgg

SEQ ID NO: 3420660 - DNA, 25 bp, Homo sapien
aaggcctccaacttgactcaagagc

SEQ ID NO: 3420661 - DNA, 25 bp, Homo sapien
gcaacgatgaccaggaatggctgca

SEQ ID NO: 3420662 - DNA, 25 bp, Homo sapien
ccagatccagtattattgtccagca

SEQ ID NO: 3420663 - DNA, 25 bp, Homo sapien
agggcatcttcactgaggattccag

SEQ ID NO: 3420664 - DNA, 25 bp, Homo sapien
gattccagtttcattaccagatcca

SEQ ID NO: 3420665 - DNA, 25 bp, Homo sapien
tgctgtggatagtcccattcaggtg

SEQ ID NO: 3420666 - DNA, 25 bp, Homo sapien
cttgtgctgtggatagtcccattca

SEQ ID NO: 3420667 - DNA, 25 bp, Homo sapien
tgtgctgtggatagtcccattcagg

SEQ ID NO: 3420668 - DNA, 25 bp, Homo sapien
cacttgtgctgtggatagtcccatt

SEQ ID NO: 3420669 - DNA, 25 bp, Homo sapien
atggtcgaagggaagtagctttgat

SEQ ID NO: 3420670 - DNA, 25 bp, Homo sapien
tggtcgaagggaagtagctttgatc

SEQ ID NO: 3420671 - DNA, 25 bp, Homo sapien
aatggtcgaagggaagtagctttga

SEQ ID NO: 3420672 - DNA, 25 bp, Homo sapien
tctcattgttcacttgctgcaatag

SEQ ID NO: 3420673 - DNA, 25 bp, Homo sapien
tgcaatagctttcagtggacacact

SEQ ID NO: 3420674 - DNA, 25 bp, Homo sapien
tacctataccattcaagtcttggct

SEQ ID NO: 3420675 - DNA, 25 bp, Homo sapien
ttttcttacctataccattcaagtc

SEQ ID NO: 3420676 - DNA, 25 bp, Homo sapien
cagtcagaagtaggaattgaaccac

SEQ ID NO: 3420677 - DNA, 25 bp, Homo sapien
tcagtgactgataatcacataccag

SEQ ID NO: 3420678 - DNA, 25 bp, Homo sapien
cagcattccagtcagaagtaggaat

SEQ ID NO: 3420679 - DNA, 25 bp, Homo sapien
ctgtctgagacatggccacctatga

SEQ ID NO: 3420680 - DNA, 25 bp, Homo sapien
gaagcgtagtacacagtaaacaggg

SEQ ID NO: 3420681 - DNA, 25 bp, Homo sapien
gtaatggcaagctggagcaaacacc

SEQ ID NO: 3420682 - DNA, 25 bp, Homo sapien
gcagcgcaggtgtcagtaatggcaa

SEQ ID NO: 3420683 - DNA, 25 bp, Homo sapien
gatataatgatcatggaagaaaaac

SEQ ID NO: 3420684 - DNA, 25 bp, Homo sapien
gagttgggccttatccactcagtaa

SEQ ID NO: 3420685 - DNA, 25 bp, Homo sapien
cagtctcggaagacataagccaagc

SEQ ID NO: 3420686 - DNA, 25 bp, Homo sapien
gattatctgtccaatactaagggca

SEQ ID NO: 3420687 - DNA, 25 bp, Homo sapien
tactaccagggctttagagttgggc

SEQ ID NO: 3420688 - DNA, 25 bp, Homo sapien
ccaccgagcagattccaccagccac

SEQ ID NO: 3420689 - DNA, 25 bp, Homo sapien
tttgtgcgtgcaacttttctaagtg

SEQ ID NO: 3420690 - DNA, 25 bp, Homo sapien
tcatctagtttattggtgattatca

SEQ ID NO: 3420691 - DNA, 25 bp, Homo sapien
attctttattccatttgtgcgtgca

SEQ ID NO: 3420692 - DNA, 25 bp, Homo sapien
taagccctcatctagtttattggtg

SEQ ID NO: 3420693 - DNA, 25 bp, Homo sapien
cctcctgcatggtggatcttacaac

SEQ ID NO: 3420694 - DNA, 25 bp, Homo sapien
agtcacacacagtagttttggtctg

SEQ ID NO: 3420695 - DNA, 25 bp, Homo sapien
caaaaataccaggatacagatcctt

SEQ ID NO: 3420696 - DNA, 25 bp, Homo sapien
tacagatccttttacgcatactggg

SEQ ID NO: 3420697 - DNA, 25 bp, Homo sapien
gaaaatgttgctccccacatgctga

SEQ ID NO: 3420698 - DNA, 25 bp, Homo sapien
catcgaactatgagagcgacagctc

SEQ ID NO: 3420699 - DNA, 25 bp, Homo sapien
agctccataaagtacctgcaacagg

SEQ ID NO: 3420700 - DNA, 25 bp, Homo sapien
tggaaaggcccaccaggaacatgaa

SEQ ID NO: 3420701 - DNA, 25 bp, Homo sapien
gcagaacagccgattcccagacatg

SEQ ID NO: 3420702 - DNA, 25 bp, Homo sapien
agaacagccgattcccagacatgcc

SEQ ID NO: 3420703 - DNA, 25 bp, Homo sapien
gtagcagcagaacagccgattccca

SEQ ID NO: 3420704 - DNA, 25 bp, Homo sapien
agccgattcccagacatgccaaagc

SEQ ID NO: 3420705 - DNA, 25 bp, Homo sapien
tactagccgttaaatctattcctga

SEQ ID NO: 3420706 - DNA, 25 bp, Homo sapien
ctactagccgttaaatctattcctg

SEQ ID NO: 3420707 - DNA, 25 bp, Homo sapien
ggaagacaataaggccaccaatgat

SEQ ID NO: 3420708 - DNA, 25 bp, Homo sapien
aataccgttaaggtcatcaagaggg

SEQ ID NO: 3420709 - DNA, 25 bp, Homo sapien
tggtttctggtaggaggaagacaat

SEQ ID NO: 3420710 - DNA, 25 bp, Homo sapien
cataaatgatccatggcaaagtggt

SEQ ID NO: 3420711 - DNA, 25 bp, Homo sapien
caccaatcagctcatgaaggcttct

SEQ ID NO: 3420712 - DNA, 25 bp, Homo sapien
caaaaatatcagattgctcaagaga

SEQ ID NO: 3420713 - DNA, 25 bp, Homo sapien
tcaagagattacatgtccccacaag

SEQ ID NO: 3420714 - DNA, 25 bp, Homo sapien
tcatcacatggtgcttcatacacca

SEQ ID NO: 3420715 - DNA, 25 bp, Homo sapien
ggaaaggagcttctgtcatacaccc

SEQ ID NO: 3420716 - DNA, 25 bp, Homo sapien
ctcagtcatgttggagaagggaaag

SEQ ID NO: 3420717 - DNA, 25 bp, Homo sapien
tcagtcatgttggagaagggaaagg

SEQ ID NO: 3420718 - DNA, 25 bp, Homo sapien
gggaaaggagcttctgtcatacacc

SEQ ID NO: 3420719 - DNA, 25 bp, Homo sapien
aatttgctcagatactcccagtcgt

SEQ ID NO: 3420720 - DNA, 25 bp, Homo sapien
tgtgttttgatcctgaccccactct

SEQ ID NO: 3420721 - DNA, 25 bp, Homo sapien
cagcaggaccgtggaaacagtttcc

SEQ ID NO: 3420722 - DNA, 25 bp, Homo sapien
taggtagccgttttctctaaagtca

SEQ ID NO: 3420723 - DNA, 25 bp, Homo sapien
aacagttgatcctcaagtagaggca

SEQ ID NO: 3420724 - DNA, 25 bp, Homo sapien
tgaacagttgatcctcaagtagagg

SEQ ID NO: 3420725 - DNA, 25 bp, Homo sapien
cagttgatcctcaagtagaggcaaa

SEQ ID NO: 3420726 - DNA, 25 bp, Homo sapien
ttgatcctcaagtagaggcaaaatg

SEQ ID NO: 3420727 - DNA, 25 bp, Homo sapien
tgtagcaacagcaaagattgagaga

SEQ ID NO: 3420728 - DNA, 25 bp, Homo sapien
gatctggaatctccacaggtcacca

SEQ ID NO: 3420729 - DNA, 25 bp, Homo sapien
ggatctggaatctccacaggtcacc

SEQ ID NO: 3420730 - DNA, 25 bp, Homo sapien
taaaatgaaggtatgtagcaacagc

SEQ ID NO: 3420731 - DNA, 25 bp, Homo sapien
ccatgtctgcgtcacttgtgttggg

SEQ ID NO: 3420732 - DNA, 25 bp, Homo sapien
ggagattctcaagagtgcatcttgg

SEQ ID NO: 3420733 - DNA, 25 bp, Homo sapien
cacagggctccatgtctgcgtcact

SEQ ID NO: 3420734 - DNA, 25 bp, Homo sapien
acccagcagcgatggccaggtatga

SEQ ID NO: 3420735 - DNA, 25 bp, Homo sapien
atgagacgagaacagagcctcttac

SEQ ID NO: 3420736 - DNA, 25 bp, Homo sapien
catgagacgagaacagagcctctta

SEQ ID NO: 3420737 - DNA, 25 bp, Homo sapien
tgaagtcagtgattgagagtcacat

SEQ ID NO: 3420738 - DNA, 25 bp, Homo sapien
ataaatgaccgcctaggatgcctcc

SEQ ID NO: 3420739 - DNA, 25 bp, Homo sapien
ctgtctgataaatgaccgcctagga

SEQ ID NO: 3420740 - DNA, 25 bp, Homo sapien
gtcagtgattgagagtcacatacca

SEQ ID NO: 3420741 - DNA, 25 bp, Homo sapien
tagtatttgttatgaggctcattgc

SEQ ID NO: 3420742 - DNA, 25 bp, Homo sapien
caagaagcgtagtgagcagtaaatg

SEQ ID NO: 3420743 - DNA, 25 bp, Homo sapien
tgcagcaatcccagacaagaagcgt

SEQ ID NO: 3420744 - DNA, 25 bp, Homo sapien
gccaacaatggcaacctggaggtaa

SEQ ID NO: 3420745 - DNA, 25 bp, Homo sapien
caccagctggaggatatgccagtct

SEQ ID NO: 3420746 - DNA, 25 bp, Homo sapien
gtcataaatgcaataccagaagggc

SEQ ID NO: 3420747 - DNA, 25 bp, Homo sapien
gaatctgtgtgttgcccactcggct

SEQ ID NO: 3420748 - DNA, 25 bp, Homo sapien
tcagaaagatcacaaagtatggtac

SEQ ID NO: 3420749 - DNA, 25 bp, Homo sapien
tactggctcctctcttacttggcaa

SEQ ID NO: 3420750 - DNA, 25 bp, Homo sapien
gcagacttggaatcatactggctcc

SEQ ID NO: 3420751 - DNA, 25 bp, Homo sapien
ggcaaatttaccttggagctcctga

SEQ ID NO: 3420752 - DNA, 25 bp, Homo sapien
tgaaggaccgtcacttgtacagata

SEQ ID NO: 3420753 - DNA, 25 bp, Homo sapien
attgttgataatgagccaccgagca

SEQ ID NO: 3420754 - DNA, 25 bp, Homo sapien
taatgagccaccgagcagactctag

SEQ ID NO: 3420755 - DNA, 25 bp, Homo sapien
ttattgttgataatgagccaccgag

SEQ ID NO: 3420756 - DNA, 25 bp, Homo sapien
tgagccaccgagcagactctagcag

SEQ ID NO: 3420757 - DNA, 25 bp, Homo sapien
cagggttagggtgtctctggcattc

SEQ ID NO: 3420758 - DNA, 25 bp, Homo sapien
tccagggttagggtgtctctggcat

SEQ ID NO: 3420759 - DNA, 25 bp, Homo sapien
ccagggttagggtgtctctggcatt

SEQ ID NO: 3420760 - DNA, 25 bp, Homo sapien
ctccagggttagggtgtctctggca

SEQ ID NO: 3420761 - DNA, 25 bp, Homo sapien
atcccatatctagctcccatccagc

SEQ ID NO: 3420762 - DNA, 25 bp, Homo sapien
catatctagctcccatccagctcac

SEQ ID NO: 3420763 - DNA, 25 bp, Homo sapien
ccatatctagctcccatccagctca

SEQ ID NO: 3420764 - DNA, 25 bp, Homo sapien
tcccatatctagctcccatccagct

SEQ ID NO: 3420765 - DNA, 25 bp, Homo sapien
taggcattctcaagtgcccagaaca

SEQ ID NO: 3420766 - DNA, 25 bp, Homo sapien
tctcaaaagagacaatcctggccct

SEQ ID NO: 3420767 - DNA, 25 bp, Homo sapien
tacataccctcagctacccataaag

SEQ ID NO: 3420768 - DNA, 25 bp, Homo sapien
aagagatcatattcaggcctgcttt

SEQ ID NO: 3420769 - DNA, 25 bp, Homo sapien
aggacaggagggagatccttttaca

SEQ ID NO: 3420770 - DNA, 25 bp, Homo sapien
acatatgttgggcatgtggagcatt

SEQ ID NO: 3420771 - DNA, 25 bp, Homo sapien
caggagggagatccttttacatatg

SEQ ID NO: 3420772 - DNA, 25 bp, Homo sapien
tacatatgttgggcatgtggagcat

SEQ ID NO: 3420773 - DNA, 25 bp, Homo sapien
taagccctggttgctggatggcatc

SEQ ID NO: 3420774 - DNA, 25 bp, Homo sapien
tgaccgtgaagggaataacatgaac

SEQ ID NO: 3420775 - DNA, 25 bp, Homo sapien
gacaactgctgactgtagagcccta

SEQ ID NO: 3420776 - DNA, 25 bp, Homo sapien
tagggccttgggcaaacctaggcag

SEQ ID NO: 3420777 - DNA, 25 bp, Homo sapien
aaatccaagcctgggctcttggatg

SEQ ID NO: 3420778 - DNA, 25 bp, Homo sapien
tggggtcttggggtccataaatcca

SEQ ID NO: 3420779 - DNA, 25 bp, Homo sapien
ggatggcagtttgggacctgctctg

SEQ ID NO: 3420780 - DNA, 25 bp, Homo sapien
aaggtaattctcaggcctggaagca

SEQ ID NO: 3420781 - DNA, 25 bp, Homo sapien
taacccattcagctatttcatgtct

SEQ ID NO: 3420782 - DNA, 25 bp, Homo sapien
tacttgtaggaacttagagttgggc

SEQ ID NO: 3420783 - DNA, 25 bp, Homo sapien
tattggatatcaccatagcagctcc

SEQ ID NO: 3420784 - DNA, 25 bp, Homo sapien
atttagtccatgtacattcaatgca

SEQ ID NO: 3420785 - DNA, 25 bp, Homo sapien
gaggaaataccacgctgaacatcag

SEQ ID NO: 3420786 - DNA, 25 bp, Homo sapien
tactggcataagagcagatacatag

SEQ ID NO: 3420787 - DNA, 25 bp, Homo sapien
atgtcacagtggagctcaaatagcc

SEQ ID NO: 3420788 - DNA, 25 bp, Homo sapien
gcaaaggaagctaacaccagagtaa

SEQ ID NO: 3420789 - DNA, 25 bp, Homo sapien
tgctggacatggagattaaggccaa

SEQ ID NO: 3420790 - DNA, 25 bp, Homo sapien
ctggacatggagattaaggccaaaa

SEQ ID NO: 3420791 - DNA, 25 bp, Homo sapien
gctggacatggagattaaggccaaa

SEQ ID NO: 3420792 - DNA, 25 bp, Homo sapien
tggacatggagattaaggccaaaat

SEQ ID NO: 3420793 - DNA, 25 bp, Homo sapien
catctggcttgctcgacggttcatg

SEQ ID NO: 3420794 - DNA, 25 bp, Homo sapien
tctggcttgctcgacggttcatgta

SEQ ID NO: 3420795 - DNA, 25 bp, Homo sapien
gcatctggcttgctcgacggttcat

SEQ ID NO: 3420796 - DNA, 25 bp, Homo sapien
tggcttgctcgacggttcatgtatt

SEQ ID NO: 3420797 - DNA, 25 bp, Homo sapien
caaatccccagattggtgtcaggaa

SEQ ID NO: 3420798 - DNA, 25 bp, Homo sapien
tcagataggtgtgacaagtacaatc

SEQ ID NO: 3420799 - DNA, 25 bp, Homo sapien
taggtgtgacaagtacaatccctga

SEQ ID NO: 3420800 - DNA, 25 bp, Homo sapien
atttctctcttccacctgtgatctt

SEQ ID NO: 3420801 - DNA, 25 bp, Homo sapien
tggagcacaccaatctgagatcctg

SEQ ID NO: 3420802 - DNA, 25 bp, Homo sapien
cacacttggatcattgctggcattc

SEQ ID NO: 3420803 - DNA, 25 bp, Homo sapien
gaagaaatcctgtcatagcctcatg

SEQ ID NO: 3420804 - DNA, 25 bp, Homo sapien
gggagtataagacccatccatgttc

SEQ ID NO: 3420805 - DNA, 25 bp, Homo sapien
ttatggtgggaattacttcatttcc

SEQ ID NO: 3420806 - DNA, 25 bp, Homo sapien
ctaagcccagtgttgccaaaacctc

SEQ ID NO: 3420807 - DNA, 25 bp, Homo sapien
caaaagcaagggtattggcaagagc

SEQ ID NO: 3420808 - DNA, 25 bp, Homo sapien
aagagcagacgctcctaagcccagt

SEQ ID NO: 3420809 - DNA, 25 bp, Homo sapien
catcaaaggacttaatacagtggca

SEQ ID NO: 3420810 - DNA, 25 bp, Homo sapien
gctcagaaggttatgtgggatacta

SEQ ID NO: 3420811 - DNA, 25 bp, Homo sapien
tccttagcaccaacctctcaggtgg

SEQ ID NO: 3420812 - DNA, 25 bp, Homo sapien
cctgacagggcatacttaaggttct

SEQ ID NO: 3420813 - DNA, 25 bp, Homo sapien
ctttgagtggaaacagcaatacaag

SEQ ID NO: 3420814 - DNA, 25 bp, Homo sapien
agtggaaacagcaatacaagaatat

SEQ ID NO: 3420815 - DNA, 25 bp, Homo sapien
tgagtggaaacagcaatacaagaat

SEQ ID NO: 3420816 - DNA, 25 bp, Homo sapien
tttgagtggaaacagcaatacaaga

SEQ ID NO: 3420817 - DNA, 25 bp, Homo sapien
ggctcctgctatattagcaaaggtt

SEQ ID NO: 3420818 - DNA, 25 bp, Homo sapien
gggtggagaatacacacttaggatc

SEQ ID NO: 3420819 - DNA, 25 bp, Homo sapien
tgcattgatccccatagctcttgcc

SEQ ID NO: 3420820 - DNA, 25 bp, Homo sapien
ggagaatacacacttaggatcatca

SEQ ID NO: 3420821 - DNA, 25 bp, Homo sapien
caatctcagacagcttacaggtacc

SEQ ID NO: 3420822 - DNA, 25 bp, Homo sapien
catatcacactagggcagggaggga

SEQ ID NO: 3420823 - DNA, 25 bp, Homo sapien
ggcatgtggctgtacctagacctaa

SEQ ID NO: 3420824 - DNA, 25 bp, Homo sapien
ggtctgtgtgatctggagagcctca

SEQ ID NO: 3420825 - DNA, 25 bp, Homo sapien
tgcgtcacttccactctcggatcct

SEQ ID NO: 3420826 - DNA, 25 bp, Homo sapien
tccactctcggatcctcttgctttg

SEQ ID NO: 3420827 - DNA, 25 bp, Homo sapien
actgcgtcacttccactctcggatc

SEQ ID NO: 3420828 - DNA, 25 bp, Homo sapien
tcacttccactctcggatcctcttg

SEQ ID NO: 3420829 - DNA, 25 bp, Homo sapien
tttctagattttgctagtgtctagg

SEQ ID NO: 3420830 - DNA, 25 bp, Homo sapien
tctaggaatagtcctgattgttccc

SEQ ID NO: 3420831 - DNA, 25 bp, Homo sapien
tcatctggctcattgatcggcagtc

SEQ ID NO: 3420832 - DNA, 25 bp, Homo sapien
tggctcattgatcggcagtcagctc

SEQ ID NO: 3420833 - DNA, 25 bp, Homo sapien
attgtgaagtgaatctactgactca

SEQ ID NO: 3420834 - DNA, 25 bp, Homo sapien
tagtaccacaattgtgaagtgaatc

SEQ ID NO: 3420835 - DNA, 25 bp, Homo sapien
tatgtagatagcttatatttagtta

SEQ ID NO: 3420836 - DNA, 25 bp, Homo sapien
ccacaattgtgaagtgaatctactg

SEQ ID NO: 3420837 - DNA, 25 bp, Homo sapien
aacttcatcctgtgaccgtgtgagt

SEQ ID NO: 3420838 - DNA, 25 bp, Homo sapien
gacttcaggttccttagcttttgaa

SEQ ID NO: 3420839 - DNA, 25 bp, Homo sapien
aattctgtgcatgctaccccactta

SEQ ID NO: 3420840 - DNA, 25 bp, Homo sapien
gccaaggctcctttgaaagcatggt

SEQ ID NO: 3420841 - DNA, 25 bp, Homo sapien
tgggttttcttcacagaaggcttaa

SEQ ID NO: 3420842 - DNA, 25 bp, Homo sapien
tagctttctcccataatttcttggg

SEQ ID NO: 3420843 - DNA, 25 bp, Homo sapien
tatttttatagctttctcccataat

SEQ ID NO: 3420844 - DNA, 25 bp, Homo sapien
ataatttcttgggttttcttcacag

SEQ ID NO: 3420845 - DNA, 25 bp, Homo sapien
attttaagctgttgcatattccttg

SEQ ID NO: 3420846 - DNA, 25 bp, Homo sapien
tccttgcttcaacttagaatacact

SEQ ID NO: 3420847 - DNA, 25 bp, Homo sapien
tttaagctgttgcatattccttgct

SEQ ID NO: 3420848 - DNA, 25 bp, Homo sapien
ttcaacttagaatacacttacaaag

SEQ ID NO: 3420849 - DNA, 25 bp, Homo sapien
tcctacccacttttggaggagattg

SEQ ID NO: 3420850 - DNA, 25 bp, Homo sapien
ctacccacttttggaggagattgtt

SEQ ID NO: 3420851 - DNA, 25 bp, Homo sapien
gatttgtgaatattgtctcctacac

SEQ ID NO: 3420852 - DNA, 25 bp, Homo sapien
tgtgaatattgtctcctacactgtg

SEQ ID NO: 3420853 - DNA, 25 bp, Homo sapien
gaggctgttattgatctattcaggg

SEQ ID NO: 3420854 - DNA, 25 bp, Homo sapien
atctcctttataattttttactgca

SEQ ID NO: 3420855 - DNA, 25 bp, Homo sapien
agaggctgttattgatctattcagg

SEQ ID NO: 3420856 - DNA, 25 bp, Homo sapien
tgatatctcctttataattttttac

SEQ ID NO: 3420857 - DNA, 25 bp, Homo sapien
catctttagcaatcgggccgtggtg

SEQ ID NO: 3420858 - DNA, 25 bp, Homo sapien
ccgtggtgaaatacagtcgtctgga

SEQ ID NO: 3420859 - DNA, 25 bp, Homo sapien
aacaagctagatgggacgtacctgc

SEQ ID NO: 3420860 - DNA, 25 bp, Homo sapien
tcaacaagatcgtgcagtacagcct

SEQ ID NO: 3420861 - DNA, 25 bp, Homo sapien
ttatgtttactaaggcttgagatgc

SEQ ID NO: 3420862 - DNA, 25 bp, Homo sapien
tgtttactaaggcttgagatgcact

SEQ ID NO: 3420863 - DNA, 25 bp, Homo sapien
aggcttgagatgcacttaaaaggct

SEQ ID NO: 3420864 - DNA, 25 bp, Homo sapien
tactaaggcttgagatgcacttaaa

SEQ ID NO: 3420865 - DNA, 25 bp, Homo sapien
tctgcttctccatctcagctcctcc

SEQ ID NO: 3420866 - DNA, 25 bp, Homo sapien
tccttctgcttctccatctcagctc

SEQ ID NO: 3420867 - DNA, 25 bp, Homo sapien
cagaattagaagtccttctgcttct

SEQ ID NO: 3420868 - DNA, 25 bp, Homo sapien
cttctgcttctccatctcagctcct

SEQ ID NO: 3420869 - DNA, 25 bp, Homo sapien
aatcttcctgaaaagttggaggcta

SEQ ID NO: 3420870 - DNA, 25 bp, Homo sapien
ggccagccgtgccacgtggtaaatg

SEQ ID NO: 3420871 - DNA, 25 bp, Homo sapien
ttctgggtccacgactgcttggcgg

SEQ ID NO: 3420872 - DNA, 25 bp, Homo sapien
gagccatcggttgattgtcagaaat

SEQ ID NO: 3420873 - DNA, 25 bp, Homo sapien
tcgagccctcattaggtcagaggaa

SEQ ID NO: 3420874 - DNA, 25 bp, Homo sapien
cacatggccattgcagagagaagcc

SEQ ID NO: 3420875 - DNA, 25 bp, Homo sapien
tcagggtcctaaatgcctggagcag

SEQ ID NO: 3420876 - DNA, 25 bp, Homo sapien
tgtcagcagaactcagtgtccaggg

SEQ ID NO: 3420877 - DNA, 25 bp, Homo sapien
cactcccggtggtatacagcagagc

SEQ ID NO: 3420878 - DNA, 25 bp, Homo sapien
gggcaactccaactgtagatcctcg

SEQ ID NO: 3420879 - DNA, 25 bp, Homo sapien
tccaactgtagatcctcgttccagg

SEQ ID NO: 3420880 - DNA, 25 bp, Homo sapien
gtagatcctcgttccaggagccctg

SEQ ID NO: 3420881 - DNA, 25 bp, Homo sapien
gacagtggggcaactccaactgtag

SEQ ID NO: 3420882 - DNA, 25 bp, Homo sapien
cgggtggaagactggtggttgcaga

SEQ ID NO: 3420883 - DNA, 25 bp, Homo sapien
gaagctgtcaggaattgggtccagt

SEQ ID NO: 3420884 - DNA, 25 bp, Homo sapien
tcaggaattgggtccagtttttctc

SEQ ID NO: 3420885 - DNA, 25 bp, Homo sapien
tggttgcagaatgaagctgtcagga

SEQ ID NO: 3420886 - DNA, 25 bp, Homo sapien
ccctggagaggcacttaacaatggc

SEQ ID NO: 3420887 - DNA, 25 bp, Homo sapien
tagggacctctatgtcaggcgagtg

SEQ ID NO: 3420888 - DNA, 25 bp, Homo sapien
tgtagaagttacctgggctgggctc

SEQ ID NO: 3420889 - DNA, 25 bp, Homo sapien
agctaactctgaaatggacccctgg

SEQ ID NO: 3420890 - DNA, 25 bp, Homo sapien
aggcctccaaaaatcgtcgtgacat

SEQ ID NO: 3420891 - DNA, 25 bp, Homo sapien
aaatcgtcgtgacataaggaaccac

SEQ ID NO: 3420892 - DNA, 25 bp, Homo sapien
gcctccaaaaatcgtcgtgacataa

SEQ ID NO: 3420893 - DNA, 25 bp, Homo sapien
caaaaatcgtcgtgacataaggaac

SEQ ID NO: 3420894 - DNA, 25 bp, Homo sapien
tgcatctagagggaccactccttgc

SEQ ID NO: 3420895 - DNA, 25 bp, Homo sapien
ctagagggaccactccttgcagcat

SEQ ID NO: 3420896 - DNA, 25 bp, Homo sapien
tctagagggaccactccttgcagca

SEQ ID NO: 3420897 - DNA, 25 bp, Homo sapien
catctagagggaccactccttgcag

SEQ ID NO: 3420898 - DNA, 25 bp, Homo sapien
ctgggaggtgaggctctcaaagtgc

SEQ ID NO: 3420899 - DNA, 25 bp, Homo sapien
ggaggtgaggctctcaaagtgcggt

SEQ ID NO: 3420900 - DNA, 25 bp, Homo sapien
gaggtgaggctctcaaagtgcggtt

SEQ ID NO: 3420901 - DNA, 25 bp, Homo sapien
tgggaggtgaggctctcaaagtgcg

SEQ ID NO: 3420902 - DNA, 25 bp, Homo sapien
ttcctcattcccgaagagaaagagg

SEQ ID NO: 3420903 - DNA, 25 bp, Homo sapien
agctggagcctcttcgcagggccag

SEQ ID NO: 3420904 - DNA, 25 bp, Homo sapien
gaagtggaaggcgatatctggccgg

SEQ ID NO: 3420905 - DNA, 25 bp, Homo sapien
ctttgccagcgtccaccatgcaggg

SEQ ID NO: 3420906 - DNA, 25 bp, Homo sapien
ggtaggtacattttacagagccttg

SEQ ID NO: 3420907 - DNA, 25 bp, Homo sapien
catctttgctccatttacgtgagga

SEQ ID NO: 3420908 - DNA, 25 bp, Homo sapien
gtaatcttccaaaggttgcagagct

SEQ ID NO: 3420909 - DNA, 25 bp, Homo sapien
attgagttcataacaatgtcccagg

SEQ ID NO: 3420910 - DNA, 25 bp, Homo sapien
cagcctctaccaggatgtcaccaaa

SEQ ID NO: 3420911 - DNA, 25 bp, Homo sapien
tatacccagcgtgtccacatgagac

SEQ ID NO: 3420912 - DNA, 25 bp, Homo sapien
acatgagacagtgggagccggtagc

SEQ ID NO: 3420913 - DNA, 25 bp, Homo sapien
ccggtagcggaagtggagaaagtgc

SEQ ID NO: 3420914 - DNA, 25 bp, Homo sapien
actctctgctgccctccacaaatgg

SEQ ID NO: 3420915 - DNA, 25 bp, Homo sapien
gtccagctgggtactctctgctgcc

SEQ ID NO: 3420916 - DNA, 25 bp, Homo sapien
gtactctctgctgccctccacaaat

SEQ ID NO: 3420917 - DNA, 25 bp, Homo sapien
atgtccagctgggtactctctgctg

SEQ ID NO: 3420918 - DNA, 25 bp, Homo sapien
gcctggggctcatcagcaggaaagg

SEQ ID NO: 3420919 - DNA, 25 bp, Homo sapien
cagcctggggctcatcagcaggaaa

SEQ ID NO: 3420920 - DNA, 25 bp, Homo sapien
agcctggggctcatcagcaggaaag

SEQ ID NO: 3420921 - DNA, 25 bp, Homo sapien
ctggggaagagcatgtgagcagggc

SEQ ID NO: 3420922 - DNA, 25 bp, Homo sapien
gggaagagcatgtgagcagggcacc

SEQ ID NO: 3420923 - DNA, 25 bp, Homo sapien
tggggaagagcatgtgagcagggca

SEQ ID NO: 3420924 - DNA, 25 bp, Homo sapien
gaagagcatgtgagcagggcacctc

SEQ ID NO: 3420925 - DNA, 25 bp, Homo sapien
cgtactatgatgacctgcccaggcg

SEQ ID NO: 3420926 - DNA, 25 bp, Homo sapien
agtccccgtactatgatgacctgcc

SEQ ID NO: 3420927 - DNA, 25 bp, Homo sapien
gaccagtccccgtactatgatgacc

SEQ ID NO: 3420928 - DNA, 25 bp, Homo sapien
tcttgcaagaccagtccccgtacta

SEQ ID NO: 3420929 - DNA, 25 bp, Homo sapien
aatcttcatgttggtggatctcggc

SEQ ID NO: 3420930 - DNA, 25 bp, Homo sapien
gttgcagcctcgctaaataccaggt

SEQ ID NO: 3420931 - DNA, 25 bp, Homo sapien
cccactcaataacgaggagggaagg

SEQ ID NO: 3420932 - DNA, 25 bp, Homo sapien
gatctcggctgaactggtgtatagg

SEQ ID NO: 3420933 - DNA, 25 bp, Homo sapien
ccaggccagagttctgtctgcgaag

SEQ ID NO: 3420934 - DNA, 25 bp, Homo sapien
ttctgtctgcgaaggaggccctgag

SEQ ID NO: 3420935 - DNA, 25 bp, Homo sapien
gaagggggctgagatcagtttcttc

SEQ ID NO: 3420936 - DNA, 25 bp, Homo sapien
ccctgagtgtcacaggagcatgggc

SEQ ID NO: 3420937 - DNA, 25 bp, Homo sapien
acacttccactgatccggagctccc

SEQ ID NO: 3420938 - DNA, 25 bp, Homo sapien
gcccctgcccattgagcgccagctt

SEQ ID NO: 3420939 - DNA, 25 bp, Homo sapien
cagggcctgctggttcatgctggtg

SEQ ID NO: 3420940 - DNA, 25 bp, Homo sapien
tgctggttcatgctggtggccccca

SEQ ID NO: 3420941 - DNA, 25 bp, Homo sapien
tggcggtatttccctggaaccatcc

SEQ ID NO: 3420942 - DNA, 25 bp, Homo sapien
ttctggcggtatttccctggaacca

SEQ ID NO: 3420943 - DNA, 25 bp, Homo sapien
ctggcggtatttccctggaaccatc

SEQ ID NO: 3420944 - DNA, 25 bp, Homo sapien
tctggcggtatttccctggaaccat

SEQ ID NO: 3420945 - DNA, 25 bp, Homo sapien
caaagctcctgtagactcagtctcg

SEQ ID NO: 3420946 - DNA, 25 bp, Homo sapien
tcagtctcgtgaccccagaggtgaa

SEQ ID NO: 3420947 - DNA, 25 bp, Homo sapien
ggcagatggagccatatcccaggct

SEQ ID NO: 3420948 - DNA, 25 bp, Homo sapien
cagaggtgaaccaggcctgatgtgc

SEQ ID NO: 3420949 - DNA, 25 bp, Homo sapien
tccagtctagtagtccccagagtct

SEQ ID NO: 3420950 - DNA, 25 bp, Homo sapien
aatcctctgttgacaggcacctagg

SEQ ID NO: 3420951 - DNA, 25 bp, Homo sapien
aattaacatacaagtccggctgggc

SEQ ID NO: 3420952 - DNA, 25 bp, Homo sapien
ctttgtccatgaccacccaatgttt

SEQ ID NO: 3420953 - DNA, 25 bp, Homo sapien
tcgaagccaagaggaggtctggtgc

SEQ ID NO: 3420954 - DNA, 25 bp, Homo sapien
tcctcttgtttgtggatcagctttt

SEQ ID NO: 3420955 - DNA, 25 bp, Homo sapien
aagccaagaggaggtctggtgctcc

SEQ ID NO: 3420956 - DNA, 25 bp, Homo sapien
tggtgctcctcttgtttgtggatca

SEQ ID NO: 3420957 - DNA, 25 bp, Homo sapien
cagatggatcacgtagccatctcct

SEQ ID NO: 3420958 - DNA, 25 bp, Homo sapien
tgctcatagccaaggcggaaaatct

SEQ ID NO: 3420959 - DNA, 25 bp, Homo sapien
tcaggtctccaggtttgggctcttg

SEQ ID NO: 3420960 - DNA, 25 bp, Homo sapien
catctcctatatacagggcccagtg

SEQ ID NO: 3420961 - DNA, 25 bp, Homo sapien
gaatgtcatgattgccagtggctgc

SEQ ID NO: 3420962 - DNA, 25 bp, Homo sapien
ccacgccgggctaatagattttgct

SEQ ID NO: 3420963 - DNA, 25 bp, Homo sapien
gaaatctccactaaggaactactgg

SEQ ID NO: 3420964 - DNA, 25 bp, Homo sapien
gatccaattcgtttagtacccactg

SEQ ID NO: 3420965 - DNA, 25 bp, Homo sapien
ccacgggccgtggttggtactcatg

SEQ ID NO: 3420966 - DNA, 25 bp, Homo sapien
gcagaactgatgatcacctccacgg

SEQ ID NO: 3420967 - DNA, 25 bp, Homo sapien
tacagcgggacttgccatatctcag

SEQ ID NO: 3420968 - DNA, 25 bp, Homo sapien
tgttgttgacccgatagcaacagcc

SEQ ID NO: 3420969 - DNA, 25 bp, Homo sapien
caggtctctaagaggctgcatttgc

SEQ ID NO: 3420970 - DNA, 25 bp, Homo sapien
tgagcgtcccttgcctgagtactct

SEQ ID NO: 3420971 - DNA, 25 bp, Homo sapien
ggaactgtccaaagaccctctgtgg

SEQ ID NO: 3420972 - DNA, 25 bp, Homo sapien
tctggcattggagctcagaggtcct

SEQ ID NO: 3420973 - DNA, 25 bp, Homo sapien
tcacggcaagccaggctggcacttt

SEQ ID NO: 3420974 - DNA, 25 bp, Homo sapien
ttttgttgagcgttcacggcaagcc

SEQ ID NO: 3420975 - DNA, 25 bp, Homo sapien
agcgttcacggcaagccaggctggc

SEQ ID NO: 3420976 - DNA, 25 bp, Homo sapien
cagcttttgttgagcgttcacggca

SEQ ID NO: 3420977 - DNA, 25 bp, Homo sapien
ttttttggtatctcctaatcgcaaa

SEQ ID NO: 3420978 - DNA, 25 bp, Homo sapien
aacaaccaggattccaagcgccgtg

SEQ ID NO: 3420979 - DNA, 25 bp, Homo sapien
gtggccacaccaacttcaaccttgg

SEQ ID NO: 3420980 - DNA, 25 bp, Homo sapien
aaaagagcatccagcaacaaccagg

SEQ ID NO: 3420981 - DNA, 25 bp, Homo sapien
ttcaattagatcatacttttgccag

SEQ ID NO: 3420982 - DNA, 25 bp, Homo sapien
acagctgcttctaacacaggatttt

SEQ ID NO: 3420983 - DNA, 25 bp, Homo sapien
cttctaacacaggattttgtggctg

SEQ ID NO: 3420984 - DNA, 25 bp, Homo sapien
ccttcagtcttgtttcaattagatc

SEQ ID NO: 3420985 - DNA, 25 bp, Homo sapien
aagtcacccggctagaaattgctgg

SEQ ID NO: 3420986 - DNA, 25 bp, Homo sapien
tatgcattatcgtaggtgatcctcc

SEQ ID NO: 3420987 - DNA, 25 bp, Homo sapien
tcctgacatcacctgacatggaaga

SEQ ID NO: 3420988 - DNA, 25 bp, Homo sapien
tatgtcgctgttatgtctgtgtaga

SEQ ID NO: 3420989 - DNA, 25 bp, Homo sapien
taggcacacgctgtaagaattaaag

SEQ ID NO: 3420990 - DNA, 25 bp, Homo sapien
tgatgttctgggactgacgttctgg

SEQ ID NO: 3420991 - DNA, 25 bp, Homo sapien
tagggttagaatgtctctcgtcaga

SEQ ID NO: 3420992 - DNA, 25 bp, Homo sapien
tcccagcatagggaaatgccctgat

SEQ ID NO: 3420993 - DNA, 25 bp, Homo sapien
gactctgtgtatatcacgcctatgg

SEQ ID NO: 3420994 - DNA, 25 bp, Homo sapien
cagtcacgacagtaggtgtggcagc

SEQ ID NO: 3420995 - DNA, 25 bp, Homo sapien
ggtgtatgtatcgtggtcccgccct

SEQ ID NO: 3420996 - DNA, 25 bp, Homo sapien
tacccacaggtgcatctggttttcc

SEQ ID NO: 3420997 - DNA, 25 bp, Homo sapien
ttcttcttccttttgcagaaccatt

SEQ ID NO: 3420998 - DNA, 25 bp, Homo sapien
cagtttcttcttccttttgcagaac

SEQ ID NO: 3420999 - DNA, 25 bp, Homo sapien
tcacatctctgtggttttttcagtt

SEQ ID NO: 3421000 - DNA, 25 bp, Homo sapien
cacatctctgtggttttttcagttt

SEQ ID NO: 3421001 - DNA, 25 bp, Homo sapien
tgagacctctatggagaaaatattg

SEQ ID NO: 3421002 - DNA, 25 bp, Homo sapien
tctacaaagaaatggtgtgcctgga

SEQ ID NO: 3421003 - DNA, 25 bp, Homo sapien
tcgtgtaggtgagttttaccaagga

SEQ ID NO: 3421004 - DNA, 25 bp, Homo sapien
tatggtaacaaatgagtgagacctc

SEQ ID NO: 3421005 - DNA, 25 bp, Homo sapien
tgctgctgagcccttacgggtcagg

SEQ ID NO: 3421006 - DNA, 25 bp, Homo sapien
ggctcatggttgacgtccctgctgc

SEQ ID NO: 3421007 - DNA, 25 bp, Homo sapien
tatcgcctatgcctgatggtgggtc

SEQ ID NO: 3421008 - DNA, 25 bp, Homo sapien
tcaggctgggagaaggtaccatgtt

SEQ ID NO: 3421009 - DNA, 25 bp, Homo sapien
gcgcacggcccttgaacatgtcttt

SEQ ID NO: 3421010 - DNA, 25 bp, Homo sapien
tcaccctatcagtagtaaccagagt

SEQ ID NO: 3421011 - DNA, 25 bp, Homo sapien
tcgtattgacatagagacagctgta

SEQ ID NO: 3421012 - DNA, 25 bp, Homo sapien
taattctaactagtggcctcaccct

SEQ ID NO: 3421013 - DNA, 25 bp, Homo sapien
aagttggactggcattggacctggc

SEQ ID NO: 3421014 - DNA, 25 bp, Homo sapien
tggcccctccaagtaagaacacatg

SEQ ID NO: 3421015 - DNA, 25 bp, Homo sapien
gaactgtgggtaacaggtgacccca

SEQ ID NO: 3421016 - DNA, 25 bp, Homo sapien
ttttgcagccagagcctaagcctgg

SEQ ID NO: 3421017 - DNA, 25 bp, Homo sapien
tattttccttagctcatatgtagtg

SEQ ID NO: 3421018 - DNA, 25 bp, Homo sapien
tgaggtttggcaacagacaatatct

SEQ ID NO: 3421019 - DNA, 25 bp, Homo sapien
aaattaataccttcaattgagaggc

SEQ ID NO: 3421020 - DNA, 25 bp, Homo sapien
ttctgaatcccaaccacgcactgtt

SEQ ID NO: 3421021 - DNA, 25 bp, Homo sapien
tagtgacctaagtaccccatatcag

SEQ ID NO: 3421022 - DNA, 25 bp, Homo sapien
catacaggtgaaacattaagccaca

SEQ ID NO: 3421023 - DNA, 25 bp, Homo sapien
tctgctagacccttgcctttgagtg

SEQ ID NO: 3421024 - DNA, 25 bp, Homo sapien
tgcaaaacagatctagggacagaag

SEQ ID NO: 3421025 - DNA, 25 bp, Homo sapien
ttcagattcctagctttgtacccag

SEQ ID NO: 3421026 - DNA, 25 bp, Homo sapien
taccttggagtgcataagacttacc

SEQ ID NO: 3421027 - DNA, 25 bp, Homo sapien
aaattctagtcaagggataagggca

SEQ ID NO: 3421028 - DNA, 25 bp, Homo sapien
tgtacccagggattgcctcaggtgg

SEQ ID NO: 3421029 - DNA, 25 bp, Homo sapien
aaattaagtagattgaatcaagtcc

SEQ ID NO: 3421030 - DNA, 25 bp, Homo sapien
tgtaacttacatggaagtcttcaca

SEQ ID NO: 3421031 - DNA, 25 bp, Homo sapien
tagattgaatcaagtccatgcaaaa

SEQ ID NO: 3421032 - DNA, 25 bp, Homo sapien
tatgtatgtatgagttatagcaaaa

SEQ ID NO: 3421033 - DNA, 25 bp, Homo sapien
cttacatgaagtaaagcgctttggt

SEQ ID NO: 3421034 - DNA, 25 bp, Homo sapien
catgaagtaaagcgctttggtcaaa

SEQ ID NO: 3421035 - DNA, 25 bp, Homo sapien
gaagtaaagcgctttggtcaaacac

SEQ ID NO: 3421036 - DNA, 25 bp, Homo sapien
ttacatgaagtaaagcgctttggtc

SEQ ID NO: 3421037 - DNA, 25 bp, Homo sapien
tttcagtgtatagctgggaacccag

SEQ ID NO: 3421038 - DNA, 25 bp, Homo sapien
tttttcagtgtatagctgggaaccc

SEQ ID NO: 3421039 - DNA, 25 bp, Homo sapien
ttcagtgtatagctgggaacccagg

SEQ ID NO: 3421040 - DNA, 25 bp, Homo sapien
ttttcagtgtatagctgggaaccca

SEQ ID NO: 3421041 - DNA, 25 bp, Homo sapien
caacccataagaagtagtaagtaga

SEQ ID NO: 3421042 - DNA, 25 bp, Homo sapien
ccaggtgcgaggactttagcatatt

SEQ ID NO: 3421043 - DNA, 25 bp, Homo sapien
tgtaattcaccttgtctcacatgac

SEQ ID NO: 3421044 - DNA, 25 bp, Homo sapien
acaaggctgttggtagactcagcaa

SEQ ID NO: 3421045 - DNA, 25 bp, Homo sapien
tgggattcaaatctggagtgaagtt

SEQ ID NO: 3421046 - DNA, 25 bp, Homo sapien
ccgttaacaggattttcctggagag

SEQ ID NO: 3421047 - DNA, 25 bp, Homo sapien
ttacttctgtagaaggaaagtggcc

SEQ ID NO: 3421048 - DNA, 25 bp, Homo sapien
ttcaaattggttgggtgacccagaa

SEQ ID NO: 3421049 - DNA, 25 bp, Homo sapien
catgtctactgctctgacaatgcca

SEQ ID NO: 3421050 - DNA, 25 bp, Homo sapien
gacaatgccacttggatcctttggg

SEQ ID NO: 3421051 - DNA, 25 bp, Homo sapien
tgtagccttcaaccacattatggta

SEQ ID NO: 3421052 - DNA, 25 bp, Homo sapien
catcttgtaaccacgtaactttatc

SEQ ID NO: 3421053 - DNA, 25 bp, Homo sapien
ctggctttgtcagttagaaacctta

SEQ ID NO: 3421054 - DNA, 25 bp, Homo sapien
ctctggctttgtcagttagaaacct

SEQ ID NO: 3421055 - DNA, 25 bp, Homo sapien
tggctttgtcagttagaaaccttaa

SEQ ID NO: 3421056 - DNA, 25 bp, Homo sapien
tctggctttgtcagttagaaacctt

SEQ ID NO: 3421057 - DNA, 25 bp, Homo sapien
cctaacgaccttgaggcactgacca

SEQ ID NO: 3421058 - DNA, 25 bp, Homo sapien
tgcttttggcacagtacgttgttct

SEQ ID NO: 3421059 - DNA, 25 bp, Homo sapien
tcaacccatacttaacgctgtaaag

SEQ ID NO: 3421060 - DNA, 25 bp, Homo sapien
agcgccctctctggtcggagaatcg

SEQ ID NO: 3421061 - DNA, 25 bp, Homo sapien
ccgtgggcggcgtccggagcttcgg

SEQ ID NO: 3421062 - DNA, 25 bp, Homo sapien
ccgccgtcagggctcgggccctggt

SEQ ID NO: 3421063 - DNA, 25 bp, Homo sapien
cgtccggagcttcggccccgccgag

SEQ ID NO: 3421064 - DNA, 25 bp, Homo sapien
cactcggtttccgaatttgtggtgg

SEQ ID NO: 3421065 - DNA, 25 bp, Homo sapien
cgggattctgccgcgtgcgctttcc

SEQ ID NO: 3421066 - DNA, 25 bp, Homo sapien
tggcgggattctgccgcgtgcgctt

SEQ ID NO: 3421067 - DNA, 25 bp, Homo sapien
gcaggcggtggcgggattctgccgc

SEQ ID NO: 3421068 - DNA, 25 bp, Homo sapien
gcggtggcgggattctgccgcgtgc

SEQ ID NO: 3421069 - DNA, 25 bp, Homo sapien
atctccactcaatgcaacctctcct

SEQ ID NO: 3421070 - DNA, 25 bp, Homo sapien
tccactcaatgcaacctctcctgcc

SEQ ID NO: 3421071 - DNA, 25 bp, Homo sapien
tctccactcaatgcaacctctcctg

SEQ ID NO: 3421072 - DNA, 25 bp, Homo sapien
actcaatgcaacctctcctgcctca

SEQ ID NO: 3421073 - DNA, 25 bp, Homo sapien
agcgcagctagagggcgggagcgcg

SEQ ID NO: 3421074 - DNA, 25 bp, Homo sapien
gactgactgactcagccgagcgcag

SEQ ID NO: 3421075 - DNA, 25 bp, Homo sapien
ctgctccgaggacagactccgacag

SEQ ID NO: 3421076 - DNA, 25 bp, Homo sapien
gacagactccgacagactgactgac

SEQ ID NO: 3421077 - DNA, 25 bp, Homo sapien
cgcggacggctcggctccgaaggac

SEQ ID NO: 3421078 - DNA, 25 bp, Homo sapien
gcgcggacggctcggctccgaagga

SEQ ID NO: 3421079 - DNA, 25 bp, Homo sapien
aaacaggctacaatgcttccattaa

SEQ ID NO: 3421080 - DNA, 25 bp, Homo sapien
tcatggagtctagccgaaaacagta

SEQ ID NO: 3421081 - DNA, 25 bp, Homo sapien
gtcaacacctgtctgcaaacctgca

SEQ ID NO: 3421082 - DNA, 25 bp, Homo sapien
tctaatcctcactaaatcacccagg

SEQ ID NO: 3421083 - DNA, 25 bp, Homo sapien
cataccaactccaagatagatacta

SEQ ID NO: 3421084 - DNA, 25 bp, Homo sapien
caactccaagatagatactattatc

SEQ ID NO: 3421085 - DNA, 25 bp, Homo sapien
ttcataccaactccaagatagatac

SEQ ID NO: 3421086 - DNA, 25 bp, Homo sapien
taccaactccaagatagatactatt

SEQ ID NO: 3421087 - DNA, 25 bp, Homo sapien
aaataattaggtcggacgcagtagc

SEQ ID NO: 3421088 - DNA, 25 bp, Homo sapien
ataaaaataattaggtcggacgcag

SEQ ID NO: 3421089 - DNA, 25 bp, Homo sapien
aaaataattaggtcggacgcagtag

SEQ ID NO: 3421090 - DNA, 25 bp, Homo sapien
ataattaggtcggacgcagtagctc

SEQ ID NO: 3421091 - DNA, 25 bp, Homo sapien
gaccaactagttgaagctcaggaat

SEQ ID NO: 3421092 - DNA, 25 bp, Homo sapien
tagtagttactaagacagcagttcc

SEQ ID NO: 3421093 - DNA, 25 bp, Homo sapien
tcagattgaccagcatatagcagaa

SEQ ID NO: 3421094 - DNA, 25 bp, Homo sapien
acagtgctaatttccaagatgccca

SEQ ID NO: 3421095 - DNA, 25 bp, Homo sapien
caggataccatatcacattttgtca

SEQ ID NO: 3421096 - DNA, 25 bp, Homo sapien
tattgacactaagagatgttcatcg

SEQ ID NO: 3421097 - DNA, 25 bp, Homo sapien
tctcttcccaagatcctatccagga

SEQ ID NO: 3421098 - DNA, 25 bp, Homo sapien
caactgggttgtagatgggaattta

SEQ ID NO: 3421099 - DNA, 25 bp, Homo sapien
tttgggtgagaactgacaccactgc

SEQ ID NO: 3421100 - DNA, 25 bp, Homo sapien
ggccaggaatcccttatattattaa

SEQ ID NO: 3421101 - DNA, 25 bp, Homo sapien
gcatatataagtggcaactgttgaa

SEQ ID NO: 3421102 - DNA, 25 bp, Homo sapien
tgcagtgaataccttcatccaggaa

SEQ ID NO: 3421103 - DNA, 25 bp, Homo sapien
aagcagtgtgctcccatttgttaag

SEQ ID NO: 3421104 - DNA, 25 bp, Homo sapien
aaaagcagtgtgctcccatttgtta

SEQ ID NO: 3421105 - DNA, 25 bp, Homo sapien
ttaaaaagcagtgtgctcccatttg

SEQ ID NO: 3421106 - DNA, 25 bp, Homo sapien
aaagtgcagtgtgcttaaaaagcag

SEQ ID NO: 3421107 - DNA, 25 bp, Homo sapien
tgtgaggtcgaaaatagagatacag

SEQ ID NO: 3421108 - DNA, 25 bp, Homo sapien
tgaggtcgaaaatagagatacaggc

SEQ ID NO: 3421109 - DNA, 25 bp, Homo sapien
cttgtgaggtcgaaaatagagatac

SEQ ID NO: 3421110 - DNA, 25 bp, Homo sapien
ggtcgaaaatagagatacaggctga

SEQ ID NO: 3421111 - DNA, 25 bp, Homo sapien
tagactgccaatgacgtagggcccc

SEQ ID NO: 3421112 - DNA, 25 bp, Homo sapien
aatgaaacccattcgaggatagggc

SEQ ID NO: 3421113 - DNA, 25 bp, Homo sapien
caactaatcatctgccaaggtgttc

SEQ ID NO: 3421114 - DNA, 25 bp, Homo sapien
gaacaggctaacctctagactgcca

SEQ ID NO: 3421115 - DNA, 25 bp, Homo sapien
caaaagattcatcccttcacatgca

SEQ ID NO: 3421116 - DNA, 25 bp, Homo sapien
tccagtgaatctgaaggcagttagc

SEQ ID NO: 3421117 - DNA, 25 bp, Homo sapien
catggtgctactctaattattaaca

SEQ ID NO: 3421118 - DNA, 25 bp, Homo sapien
cacatgcactctaagagcctttcaa

SEQ ID NO: 3421119 - DNA, 25 bp, Homo sapien
ggacaagcttagagggcaaacagag

SEQ ID NO: 3421120 - DNA, 25 bp, Homo sapien
ccttttagaacagctccgataagca

SEQ ID NO: 3421121 - DNA, 25 bp, Homo sapien
gagatgcaggcgctaatcattacta

SEQ ID NO: 3421122 - DNA, 25 bp, Homo sapien
tggtcagtatggcacttgtagtcac

SEQ ID NO: 3421123 - DNA, 25 bp, Homo sapien
ggaaaactgtaaaagcttggtggca

SEQ ID NO: 3421124 - DNA, 25 bp, Homo sapien
tacagtatggatattcagcatgact

SEQ ID NO: 3421125 - DNA, 25 bp, Homo sapien
cagcatgactagattagggcataac

SEQ ID NO: 3421126 - DNA, 25 bp, Homo sapien
aatctgagccatgcattgttactga

SEQ ID NO: 3421127 - DNA, 25 bp, Homo sapien
gatacgttgttgctggtcccctgag

SEQ ID NO: 3421128 - DNA, 25 bp, Homo sapien
tccatgtagtattgtaaggccagtg

SEQ ID NO: 3421129 - DNA, 25 bp, Homo sapien
gtcacaatgaactcctgctgcaaga

SEQ ID NO: 3421130 - DNA, 25 bp, Homo sapien
tctttggctaaaataggctggctcc

SEQ ID NO: 3421131 - DNA, 25 bp, Homo sapien
tcagtaggtggtttctgggctgtca

SEQ ID NO: 3421132 - DNA, 25 bp, Homo sapien
gcatccaatgcagttttagcctccc

SEQ ID NO: 3421133 - DNA, 25 bp, Homo sapien
tgccttctaccttagagtactcagt

SEQ ID NO: 3421134 - DNA, 25 bp, Homo sapien
ccacttgaccaattttctttgagag

SEQ ID NO: 3421135 - DNA, 25 bp, Homo sapien
ttgatttagtgatgggagtgctccc

SEQ ID NO: 3421136 - DNA, 25 bp, Homo sapien
tgctcccatcaatagaacatacagg

SEQ ID NO: 3421137 - DNA, 25 bp, Homo sapien
cattgggtaacgtcctgcctcttta

SEQ ID NO: 3421138 - DNA, 25 bp, Homo sapien
aaccagatcccaagtcagtatttcg

SEQ ID NO: 3421139 - DNA, 25 bp, Homo sapien
tgtaaaggctgctatcaggtcctct

SEQ ID NO: 3421140 - DNA, 25 bp, Homo sapien
taaggagacattcgtatcgggtact

SEQ ID NO: 3421141 - DNA, 25 bp, Homo sapien
gaaggcaattctgcgtcacgctgtg

SEQ ID NO: 3421142 - DNA, 25 bp, Homo sapien
catctttcaggtggtcatcaggtaa

SEQ ID NO: 3421143 - DNA, 25 bp, Homo sapien
cgtacccagcgagcatagaaaaaat

SEQ ID NO: 3421144 - DNA, 25 bp, Homo sapien
ggaagattaatgttacaaagtggtc

SEQ ID NO: 3421145 - DNA, 25 bp, Homo sapien
aggaaaccaaatcaagcaatcattt

SEQ ID NO: 3421146 - DNA, 25 bp, Homo sapien
caaagtggtctactgctttgggaaa

SEQ ID NO: 3421147 - DNA, 25 bp, Homo sapien
tcaggtccagtaaaagcctacttgg

SEQ ID NO: 3421148 - DNA, 25 bp, Homo sapien
gcctgtcctctagctaaaagcagta

SEQ ID NO: 3421149 - DNA, 25 bp, Homo sapien
cagttatatgcaggaaggtcaggtc

SEQ ID NO: 3421150 - DNA, 25 bp, Homo sapien
tctgctgggtgctgaacaatgtagt

SEQ ID NO: 3421151 - DNA, 25 bp, Homo sapien
tgaggcaatgggctaacgaactgcc

SEQ ID NO: 3421152 - DNA, 25 bp, Homo sapien
taaagtcctacagggaagtgaccca

SEQ ID NO: 3421153 - DNA, 25 bp, Homo sapien
aagtgacccaagctagttcaaaagg

SEQ ID NO: 3421154 - DNA, 25 bp, Homo sapien
ccactgatacagacagggaatgtcc

SEQ ID NO: 3421155 - DNA, 25 bp, Homo sapien
cactgtgcctggcccctttcccacc

SEQ ID NO: 3421156 - DNA, 25 bp, Homo sapien
agccttcgagtagctgacattacag

SEQ ID NO: 3421157 - DNA, 25 bp, Homo sapien
gtgcctgccaccactcccggctaat

SEQ ID NO: 3421158 - DNA, 25 bp, Homo sapien
tttttgtatgtttattagagacagg

SEQ ID NO: 3421159 - DNA, 25 bp, Homo sapien
ccaggatgaggtaagaaaccacact

SEQ ID NO: 3421160 - DNA, 25 bp, Homo sapien
agagccaggatgaggtaagaaacca

SEQ ID NO: 3421161 - DNA, 25 bp, Homo sapien
tgacttctgtacagcttggatgacg

SEQ ID NO: 3421162 - DNA, 25 bp, Homo sapien
gatgacggacttgtagatcctgaag

SEQ ID NO: 3421163 - DNA, 25 bp, Homo sapien
gaagattttgttagcacagtagtta

SEQ ID NO: 3421164 - DNA, 25 bp, Homo sapien
gaaataacagtcatacatttgacat

SEQ ID NO: 3421165 - DNA, 25 bp, Homo sapien
catacatttgacatggaagaagatt

SEQ ID NO: 3421166 - DNA, 25 bp, Homo sapien
tgacatggaagaagattttgttagc

SEQ ID NO: 3421167 - DNA, 25 bp, Homo sapien
ttcagggccctgttgatgtgcacca

SEQ ID NO: 3421168 - DNA, 25 bp, Homo sapien
tcaaggagtcaaccagatcttctac

SEQ ID NO: 3421169 - DNA, 25 bp, Homo sapien
gaggacagagtaatgtctacgtcca

SEQ ID NO: 3421170 - DNA, 25 bp, Homo sapien
cattcatgtaattatggaaagcttc

SEQ ID NO: 3421171 - DNA, 25 bp, Homo sapien
ctgtgaaggccatatcaaaagttaa

SEQ ID NO: 3421172 - DNA, 25 bp, Homo sapien
gaaggccatatcaaaagttaagcag

SEQ ID NO: 3421173 - DNA, 25 bp, Homo sapien
ggccatatcaaaagttaagcaggaa

SEQ ID NO: 3421174 - DNA, 25 bp, Homo sapien
gtgaaggccatatcaaaagttaagc

SEQ ID NO: 3421175 - DNA, 25 bp, Homo sapien
caagaattagaagggtgattccgtt

SEQ ID NO: 3421176 - DNA, 25 bp, Homo sapien
aaagagcatgggcacattctccttg

SEQ ID NO: 3421177 - DNA, 25 bp, Homo sapien
aagagcatgggcacattctccttgc

SEQ ID NO: 3421178 - DNA, 25 bp, Homo sapien
agcatgggcacattctccttgccac

SEQ ID NO: 3421179 - DNA, 25 bp, Homo sapien
tcaaagagcatgggcacattctcct

SEQ ID NO: 3421180 - DNA, 25 bp, Homo sapien
aacacaggcattcctcaaaatgaga

SEQ ID NO: 3421181 - DNA, 25 bp, Homo sapien
gagaaatcctggttagcactcccaa

SEQ ID NO: 3421182 - DNA, 25 bp, Homo sapien
caagtgtatatgagagacagtcaca

SEQ ID NO: 3421183 - DNA, 25 bp, Homo sapien
aaacctcttcaggtatacaggctac

SEQ ID NO: 3421184 - DNA, 25 bp, Homo sapien
ctcatagacaatcgggacactgaaa

SEQ ID NO: 3421185 - DNA, 25 bp, Homo sapien
gtacttctcatagacaatcgggaca

SEQ ID NO: 3421186 - DNA, 25 bp, Homo sapien
ttctcatagacaatcgggacactga

SEQ ID NO: 3421187 - DNA, 25 bp, Homo sapien
agacaatcgggacactgaaaatgag

SEQ ID NO: 3421188 - DNA, 25 bp, Homo sapien
gaactacaactagtcatacatcaac

SEQ ID NO: 3421189 - DNA, 25 bp, Homo sapien
atacatcaactggcacatttgattt

SEQ ID NO: 3421190 - DNA, 25 bp, Homo sapien
ctacaactagtcatacatcaactgg

SEQ ID NO: 3421191 - DNA, 25 bp, Homo sapien
cagaaatgaactacaactagtcata

SEQ ID NO: 3421192 - DNA, 25 bp, Homo sapien
cgggcgatgccaacatagtgatcaa

SEQ ID NO: 3421193 - DNA, 25 bp, Homo sapien
tcgggcgatgccaacatagtgatca

SEQ ID NO: 3421194 - DNA, 25 bp, Homo sapien
agtcctggacttgcataagcaatgt

SEQ ID NO: 3421195 - DNA, 25 bp, Homo sapien
tgcataagcaatgtgaaatgcattc

SEQ ID NO: 3421196 - DNA, 25 bp, Homo sapien
tattttaactgtgatgctagaggac

SEQ ID NO: 3421197 - DNA, 25 bp, Homo sapien
tgatgctagaggacagtcctggact

SEQ ID NO: 3421198 - DNA, 25 bp, Homo sapien
tttggcgattccagggagttttgct

SEQ ID NO: 3421199 - DNA, 25 bp, Homo sapien
ctgccttttttttggcgattccagg

SEQ ID NO: 3421200 - DNA, 25 bp, Homo sapien
tattctgccttttttttggcgattc

SEQ ID NO: 3421201 - DNA, 25 bp, Homo sapien
ttttggcgattccagggagttttgc

SEQ ID NO: 3421202 - DNA, 25 bp, Homo sapien
aaatggtgttttagtaactgttgca

SEQ ID NO: 3421203 - DNA, 25 bp, Homo sapien
taaatggtgttttagtaactgttgc

SEQ ID NO: 3421204 - DNA, 25 bp, Homo sapien
aatggtgttttagtaactgttgcat

SEQ ID NO: 3421205 - DNA, 25 bp, Homo sapien
gaaccggtgtccagtgacgtagaaa

SEQ ID NO: 3421206 - DNA, 25 bp, Homo sapien
cactttcccaaatggcggagccttt

SEQ ID NO: 3421207 - DNA, 25 bp, Homo sapien
tcaaactaatgctcagaaccggtgt

SEQ ID NO: 3421208 - DNA, 25 bp, Homo sapien
aagcacattcgggaacgagttctca

SEQ ID NO: 3421209 - DNA, 25 bp, Homo sapien
tatgttgcacgcacagacacgtaca

SEQ ID NO: 3421210 - DNA, 25 bp, Homo sapien
ggagaatgcacttcctactaggaca

SEQ ID NO: 3421211 - DNA, 25 bp, Homo sapien
taagatggagtaaggcaagggtacc

SEQ ID NO: 3421212 - DNA, 25 bp, Homo sapien
aagacaatcactgacttcctgggag

SEQ ID NO: 3421213 - DNA, 25 bp, Homo sapien
aatttacaggctgctttgcgttgca

SEQ ID NO: 3421214 - DNA, 25 bp, Homo sapien
gagaagagctaatcacaggtgacca

SEQ ID NO: 3421215 - DNA, 25 bp, Homo sapien
taaaagccagcttaagggtcacagc

SEQ ID NO: 3421216 - DNA, 25 bp, Homo sapien
taaggtcaccacctcttagagggtc

SEQ ID NO: 3421217 - DNA, 25 bp, Homo sapien
tgacatgctgggcaatgcaggccac

SEQ ID NO: 3421218 - DNA, 25 bp, Homo sapien
gatctgtgactcctgaaggtggcaa

SEQ ID NO: 3421219 - DNA, 25 bp, Homo sapien
caggaagatcctgaatgggttgtca

SEQ ID NO: 3421220 - DNA, 25 bp, Homo sapien
taaaatttgtcaggcctgccgaagg

SEQ ID NO: 3421221 - DNA, 25 bp, Homo sapien
gcagggcccacgttttccgagaatc

SEQ ID NO: 3421222 - DNA, 25 bp, Homo sapien
agtggcctccacgtgttagcgccga

SEQ ID NO: 3421223 - DNA, 25 bp, Homo sapien
ctaattgggattctcggcctctcgg

SEQ ID NO: 3421224 - DNA, 25 bp, Homo sapien
ccgtcagtcagtattagggccgaag

SEQ ID NO: 3421225 - DNA, 25 bp, Homo sapien
ccttgctcatggtcttgtcaaagag

SEQ ID NO: 3421226 - DNA, 25 bp, Homo sapien
ggtagggccaagaagactatcctgt

SEQ ID NO: 3421227 - DNA, 25 bp, Homo sapien
tccattggcaccaacaggtagggcc

SEQ ID NO: 3421228 - DNA, 25 bp, Homo sapien
caaagagttggaccattatgggact

SEQ ID NO: 3421229 - DNA, 25 bp, Homo sapien
aaagtttggaggaaaggtgactgct

SEQ ID NO: 3421230 - DNA, 25 bp, Homo sapien
tgggtaggcaactataggcttttgg

SEQ ID NO: 3421231 - DNA, 25 bp, Homo sapien
caactataggcttttgggctggaaa

SEQ ID NO: 3421232 - DNA, 25 bp, Homo sapien
gaaaggtgactgctgtgggccccat

SEQ ID NO: 3421233 - DNA, 25 bp, Homo sapien
tcagcaactcccgtggacagagatt

SEQ ID NO: 3421234 - DNA, 25 bp, Homo sapien
tccagcagatgtccaaaggatgact

SEQ ID NO: 3421235 - DNA, 25 bp, Homo sapien
ttgcaaccccagtagaatgagacag

SEQ ID NO: 3421236 - DNA, 25 bp, Homo sapien
catgggcacatatctgcagctgatc

SEQ ID NO: 3421237 - DNA, 25 bp, Homo sapien
ccatctatacaaaggagaattacca

SEQ ID NO: 3421238 - DNA, 25 bp, Homo sapien
taatcaggactatcttggtggcaag

SEQ ID NO: 3421239 - DNA, 25 bp, Homo sapien
cccaaccgaaactggcttaagccat

SEQ ID NO: 3421240 - DNA, 25 bp, Homo sapien
gtaaaattgaacctgagatcttccc

SEQ ID NO: 3421241 - DNA, 25 bp, Homo sapien
tattacagtggcaagtctgactccc

SEQ ID NO: 3421242 - DNA, 25 bp, Homo sapien
tctagattaggccaatgaaaacccc

SEQ ID NO: 3421243 - DNA, 25 bp, Homo sapien
ggttgactggaacatactgggcccc

SEQ ID NO: 3421244 - DNA, 25 bp, Homo sapien
caatttctagtccaaccctgcaggg

SEQ ID NO: 3421245 - DNA, 25 bp, Homo sapien
tgctcagcgctagcacacgtgcatc

SEQ ID NO: 3421246 - DNA, 25 bp, Homo sapien
gactcttgcctgctcagcgctagca

SEQ ID NO: 3421247 - DNA, 25 bp, Homo sapien
cccacacctggtgcctcttgctttt

SEQ ID NO: 3421248 - DNA, 25 bp, Homo sapien
gtgtgggactcttgcctgctcagcg

SEQ ID NO: 3421249 - DNA, 25 bp, Homo sapien
gaccgaattccttctcatctgccag

SEQ ID NO: 3421250 - DNA, 25 bp, Homo sapien
gaaagggccttggtatggaaacgca

SEQ ID NO: 3421251 - DNA, 25 bp, Homo sapien
agctccgtggccgtgggcacattat

SEQ ID NO: 3421252 - DNA, 25 bp, Homo sapien
gtcgcttttgcctttccgtggacaa

SEQ ID NO: 3421253 - DNA, 25 bp, Homo sapien
tgcgaccggcgcgtccgggcctccc

SEQ ID NO: 3421254 - DNA, 25 bp, Homo sapien
gcctcctggccggaatagcgccggg

SEQ ID NO: 3421255 - DNA, 25 bp, Homo sapien
ccggccgggcctgcgaccggcgcgt

SEQ ID NO: 3421256 - DNA, 25 bp, Homo sapien
tccccgagacctcggcgcgtcggga

SEQ ID NO: 3421257 - DNA, 25 bp, Homo sapien
ggccggaggactggcgcgcaggctt

SEQ ID NO: 3421258 - DNA, 25 bp, Homo sapien
gactggcgcgcaggcttcggcgcgc

SEQ ID NO: 3421259 - DNA, 25 bp, Homo sapien
ggtgcggccgtgggcgatagcagtg

SEQ ID NO: 3421260 - DNA, 25 bp, Homo sapien
ccgtgggcgatagcagtggccggag

SEQ ID NO: 3421261 - DNA, 25 bp, Homo sapien
tcgggccgcggaattacggccacca

SEQ ID NO: 3421262 - DNA, 25 bp, Homo sapien
gaagcagtcgagtgcggcgccctcg

SEQ ID NO: 3421263 - DNA, 25 bp, Homo sapien
tctgagcatcggctcgggccgcgga

SEQ ID NO: 3421264 - DNA, 25 bp, Homo sapien
cctcgcatttcagcgtcacctcgaa

SEQ ID NO: 3421265 - DNA, 25 bp, Homo sapien
tccaagatgtgcgagcgagctgtgt

SEQ ID NO: 3421266 - DNA, 25 bp, Homo sapien
tctcacgtcttgcaagagggccacc

SEQ ID NO: 3421267 - DNA, 25 bp, Homo sapien
tgcctgcctctagcgggctgggtct

SEQ ID NO: 3421268 - DNA, 25 bp, Homo sapien
tccaggatattgctcttctcagaag

SEQ ID NO: 3421269 - DNA, 25 bp, Homo sapien
aatgagcttctagtgccccaacaag

SEQ ID NO: 3421270 - DNA, 25 bp, Homo sapien
tagtgccccaacaagtccgacttct

SEQ ID NO: 3421271 - DNA, 25 bp, Homo sapien
gcacaatgagcttctagtgccccaa

SEQ ID NO: 3421272 - DNA, 25 bp, Homo sapien
cagggagcaagagcacaatgagctt

SEQ ID NO: 3421273 - DNA, 25 bp, Homo sapien
gaacgacgatttcggctggcattct

SEQ ID NO: 3421274 - DNA, 25 bp, Homo sapien
tttagggagggatgggttatcctca

SEQ ID NO: 3421275 - DNA, 25 bp, Homo sapien
tatcctcagagtcaaggagaacgac

SEQ ID NO: 3421276 - DNA, 25 bp, Homo sapien
gtctgggttggcgtctgggtctggg

SEQ ID NO: 3421277 - DNA, 25 bp, Homo sapien
ctcactggcttctctgttgactaac

SEQ ID NO: 3421278 - DNA, 25 bp, Homo sapien
cacctccaccggggctcactggctt

SEQ ID NO: 3421279 - DNA, 25 bp, Homo sapien
gggcctgtatttcaccctgtcccca

SEQ ID NO: 3421280 - DNA, 25 bp, Homo sapien
agaacacagggcctgtatttcaccc

SEQ ID NO: 3421281 - DNA, 25 bp, Homo sapien
ctgggggttccttccatctctgacc

SEQ ID NO: 3421282 - DNA, 25 bp, Homo sapien
ggttccttccatctctgaccacggg

SEQ ID NO: 3421283 - DNA, 25 bp, Homo sapien
tgggggttccttccatctctgacca

SEQ ID NO: 3421284 - DNA, 25 bp, Homo sapien
ggggttccttccatctctgaccacg

SEQ ID NO: 3421285 - DNA, 25 bp, Homo sapien
agaagagctgcaagacgaagccggc

SEQ ID NO: 3421286 - DNA, 25 bp, Homo sapien
cacttccctgtctttgggtgagtcc

SEQ ID NO: 3421287 - DNA, 25 bp, Homo sapien
gtcagtgaagtgtcggacctcggct

SEQ ID NO: 3421288 - DNA, 25 bp, Homo sapien
ctgcgaaagtctccgtgggcgagtc

SEQ ID NO: 3421289 - DNA, 25 bp, Homo sapien
agattatcctggactgagtagccca

SEQ ID NO: 3421290 - DNA, 25 bp, Homo sapien
tgagcgcctgtaaactatgcttggc

SEQ ID NO: 3421291 - DNA, 25 bp, Homo sapien
gaaagactctactagccactgctgg

SEQ ID NO: 3421292 - DNA, 25 bp, Homo sapien
caagttggtacaaggagacgtgcac

SEQ ID NO: 3421293 - DNA, 25 bp, Homo sapien
ctagtcttagtagggactagaggtg

SEQ ID NO: 3421294 - DNA, 25 bp, Homo sapien
gtacaatctgattggagtacaatca

SEQ ID NO: 3421295 - DNA, 25 bp, Homo sapien
caatctgattggagtacaatcagaa

SEQ ID NO: 3421296 - DNA, 25 bp, Homo sapien
agtcttagtagggactagaggtgca

SEQ ID NO: 3421297 - DNA, 25 bp, Homo sapien
aagaggtcagccatttagagcaggg

SEQ ID NO: 3421298 - DNA, 25 bp, Homo sapien
aatcagaagacccattagacagtgg

SEQ ID NO: 3421299 - DNA, 25 bp, Homo sapien
ttaaaactgtgatctacgtgaaggg

SEQ ID NO: 3421300 - DNA, 25 bp, Homo sapien
gggacacgctcaagtccaagcagca

SEQ ID NO: 3421301 - DNA, 25 bp, Homo sapien
tggagtttgcgcacagggtacccca

SEQ ID NO: 3421302 - DNA, 25 bp, Homo sapien
cagggtaccccaggacttgaaatga

SEQ ID NO: 3421303 - DNA, 25 bp, Homo sapien
cactccagatagatggagtttgcgc

SEQ ID NO: 3421304 - DNA, 25 bp, Homo sapien
taccccaggacttgaaatgagggct

SEQ ID NO: 3421305 - DNA, 25 bp, Homo sapien
acacttgtgtaccagtgaggtatcc

SEQ ID NO: 3421306 - DNA, 25 bp, Homo sapien
gaatctcagggattctcttctcatc

SEQ ID NO: 3421307 - DNA, 25 bp, Homo sapien
tgaggtatcctctatggtttcccag

SEQ ID NO: 3421308 - DNA, 25 bp, Homo sapien
gcatctccaacctccacgaaggctg

SEQ ID NO: 3421309 - DNA, 25 bp, Homo sapien
gacattttggtcgaagcctcacagg

SEQ ID NO: 3421310 - DNA, 25 bp, Homo sapien
gaaatctgtccaagctttgggttcg

SEQ ID NO: 3421311 - DNA, 25 bp, Homo sapien
tcgtgagatcgtctgaaaccacagg

SEQ ID NO: 3421312 - DNA, 25 bp, Homo sapien
ttttaaagatttactgcctccagcc

SEQ ID NO: 3421313 - DNA, 25 bp, Homo sapien
ccaaggtgggcattatgagcacaca

SEQ ID NO: 3421314 - DNA, 25 bp, Homo sapien
tttagacacccatgtagagacgcca

SEQ ID NO: 3421315 - DNA, 25 bp, Homo sapien
tgatacgacgtgttccaactctggg

SEQ ID NO: 3421316 - DNA, 25 bp, Homo sapien
tgacccacggctgcggatacttaag

SEQ ID NO: 3421317 - DNA, 25 bp, Homo sapien
tgtattttggcacagggacgcctgg

SEQ ID NO: 3421318 - DNA, 25 bp, Homo sapien
taaggcatagctgtgcccaccaagg

SEQ ID NO: 3421319 - DNA, 25 bp, Homo sapien
tagcctaacgggttctgcctgagtg

SEQ ID NO: 3421320 - DNA, 25 bp, Homo sapien
caaggagctcatgagggactacgtg

SEQ ID NO: 3421321 - DNA, 25 bp, Homo sapien
tggagatccagtgtcccgcggagcc

SEQ ID NO: 3421322 - DNA, 25 bp, Homo sapien
ggagatccagtgtcccgcggagccc

SEQ ID NO: 3421323 - DNA, 25 bp, Homo sapien
ctggagatccagtgtcccgcggagc

SEQ ID NO: 3421324 - DNA, 25 bp, Homo sapien
gagatccagtgtcccgcggagcccc

SEQ ID NO: 3421325 - DNA, 25 bp, Homo sapien
cctggaccagtcttgcaggaggctg

SEQ ID NO: 3421326 - DNA, 25 bp, Homo sapien
cccacacgcttggtgccctgggggt

SEQ ID NO: 3421327 - DNA, 25 bp, Homo sapien
ccagtcttgcaggaggctgaccgct

SEQ ID NO: 3421328 - DNA, 25 bp, Homo sapien
gggctcctccatccgcacgcggata

SEQ ID NO: 3421329 - DNA, 25 bp, Homo sapien
gattctgacagaactgtgggccagt

SEQ ID NO: 3421330 - DNA, 25 bp, Homo sapien
gctggattctgacagaactgtgggc

SEQ ID NO: 3421331 - DNA, 25 bp, Homo sapien
ttctgacagaactgtgggccagtct

SEQ ID NO: 3421332 - DNA, 25 bp, Homo sapien
tggattctgacagaactgtgggcca

SEQ ID NO: 3421333 - DNA, 25 bp, Homo sapien
ttccagtgccccgaaataacagtgg

SEQ ID NO: 3421334 - DNA, 25 bp, Homo sapien
tgaccactcttgtgtaaggcactgt

SEQ ID NO: 3421335 - DNA, 25 bp, Homo sapien
aatggaggcctcctggtttagaagc

SEQ ID NO: 3421336 - DNA, 25 bp, Homo sapien
ccccgaggtagtgggactcagttca

SEQ ID NO: 3421337 - DNA, 25 bp, Homo sapien
cttaggggtgtgcaggattttacag

SEQ ID NO: 3421338 - DNA, 25 bp, Homo sapien
ttacaaagggccccaaatgcagagt

SEQ ID NO: 3421339 - DNA, 25 bp, Homo sapien
agtttacaaagggccccaaatgcag

SEQ ID NO: 3421340 - DNA, 25 bp, Homo sapien
gggtgtgcaggattttacagtttac

SEQ ID NO: 3421341 - DNA, 25 bp, Homo sapien
tgcctggtatcacctctaatgccag

SEQ ID NO: 3421342 - DNA, 25 bp, Homo sapien
ggagacacgttgctgattcctgtgc

SEQ ID NO: 3421343 - DNA, 25 bp, Homo sapien
ccaacccaaattcgatccttgagaa

SEQ ID NO: 3421344 - DNA, 25 bp, Homo sapien
tgagaatcatctgccctctggtggc

SEQ ID NO: 3421345 - DNA, 25 bp, Homo sapien
tgtttacggaaatccacgaagcgac

SEQ ID NO: 3421346 - DNA, 25 bp, Homo sapien
tcctcgattccgaagacgaagcttc

SEQ ID NO: 3421347 - DNA, 25 bp, Homo sapien
gattcgcttcgtgtctttccgtcag

SEQ ID NO: 3421348 - DNA, 25 bp, Homo sapien
ccttgaacaggaagcgtgggtcacc

SEQ ID NO: 3421349 - DNA, 25 bp, Homo sapien
catccgaagcggctagaaacgggag

SEQ ID NO: 3421350 - DNA, 25 bp, Homo sapien
cggctgggctgtgccgcctttcggc

SEQ ID NO: 3421351 - DNA, 25 bp, Homo sapien
ggcagcagccggaaacatccgaagc

SEQ ID NO: 3421352 - DNA, 25 bp, Homo sapien
ggccctcggctcttttcgccggcag

SEQ ID NO: 3421353 - DNA, 25 bp, Homo sapien
gggtccgagcgctggacatggcgcc

SEQ ID NO: 3421354 - DNA, 25 bp, Homo sapien
agcgctggacatggcgccggtatct

SEQ ID NO: 3421355 - DNA, 25 bp, Homo sapien
tccgtgtccctctcgttcagcgtgg

SEQ ID NO: 3421356 - DNA, 25 bp, Homo sapien
tccctctcgttcagcgtgggtaggg

SEQ ID NO: 3421357 - DNA, 25 bp, Homo sapien
taagcgtgggtggaggaagaccaga

SEQ ID NO: 3421358 - DNA, 25 bp, Homo sapien
ttaagcgtgggtggaggaagaccag

SEQ ID NO: 3421359 - DNA, 25 bp, Homo sapien
gtgggtggaggaagaccagaaaggc

SEQ ID NO: 3421360 - DNA, 25 bp, Homo sapien
agcgtgggtggaggaagaccagaaa

SEQ ID NO: 3421361 - DNA, 25 bp, Homo sapien
gaatcagtggatgcacactacggtg

SEQ ID NO: 3421362 - DNA, 25 bp, Homo sapien
gatacagtgactggctaccctgaga

SEQ ID NO: 3421363 - DNA, 25 bp, Homo sapien
tggaataagcaacctcaagagggcc

SEQ ID NO: 3421364 - DNA, 25 bp, Homo sapien
gaatctgtctggaataggtgcatcc

SEQ ID NO: 3421365 - DNA, 25 bp, Homo sapien
cagagtgattaaagggctcctggaa

SEQ ID NO: 3421366 - DNA, 25 bp, Homo sapien
tataagcgaagtggacagcacacag

SEQ ID NO: 3421367 - DNA, 25 bp, Homo sapien
ggcaatctccctgtaacgcaaggtt

SEQ ID NO: 3421368 - DNA, 25 bp, Homo sapien
gagactggagacaaccagtggtgtt

SEQ ID NO: 3421369 - DNA, 25 bp, Homo sapien
tgaagtccctgtaagctgccaaaga

SEQ ID NO: 3421370 - DNA, 25 bp, Homo sapien
aaaggcagccgcacatgggatatca

SEQ ID NO: 3421371 - DNA, 25 bp, Homo sapien
cattgcgtggacgaaaaaaggcctg

SEQ ID NO: 3421372 - DNA, 25 bp, Homo sapien
tgggaaataatcctacctggctggc

SEQ ID NO: 3421373 - DNA, 25 bp, Homo sapien
ctgagctcaagattcaaagtccgca

SEQ ID NO: 3421374 - DNA, 25 bp, Homo sapien
cagagaccaaaatctgagctcaaga

SEQ ID NO: 3421375 - DNA, 25 bp, Homo sapien
tccgcaaattcccaggagcagaaat

SEQ ID NO: 3421376 - DNA, 25 bp, Homo sapien
tcaagattcaaagtccgcaaattcc

SEQ ID NO: 3421377 - DNA, 25 bp, Homo sapien
gagtctgagggtctctagatcacaa

SEQ ID NO: 3421378 - DNA, 25 bp, Homo sapien
gaaaatgttctgtcgcataagacgc

SEQ ID NO: 3421379 - DNA, 25 bp, Homo sapien
gaattttgacttcgtgcatcacctg

SEQ ID NO: 3421380 - DNA, 25 bp, Homo sapien
gaaaatgccactgtatactggtgag

SEQ ID NO: 3421381 - DNA, 25 bp, Homo sapien
catgacaatgaccactagtagagct

SEQ ID NO: 3421382 - DNA, 25 bp, Homo sapien
cacttccttgatccatgttacggcg

SEQ ID NO: 3421383 - DNA, 25 bp, Homo sapien
gttacggcgtcagcagttttctcca

SEQ ID NO: 3421384 - DNA, 25 bp, Homo sapien
tccaggataagtcatgagattcagg

SEQ ID NO: 3421385 - DNA, 25 bp, Homo sapien
gaaaaaattatgatccctgcagctg

SEQ ID NO: 3421386 - DNA, 25 bp, Homo sapien
gttttagcagacacaagttttccaa

SEQ ID NO: 3421387 - DNA, 25 bp, Homo sapien
tcttttacccactagcaatctggaa

SEQ ID NO: 3421388 - DNA, 25 bp, Homo sapien
taccaatctcggaaaagttttagca

SEQ ID NO: 3421389 - DNA, 25 bp, Homo sapien
ctaaagtagtttagaaatggcacat

SEQ ID NO: 3421390 - DNA, 25 bp, Homo sapien
ttaacaaaaagagcacctgtggtcc

SEQ ID NO: 3421391 - DNA, 25 bp, Homo sapien
aatggcacataactacataactggg

SEQ ID NO: 3421392 - DNA, 25 bp, Homo sapien
gctggatacaatggcgactgcctgt

SEQ ID NO: 3421393 - DNA, 25 bp, Homo sapien
aattctctagacagacagaagattc

SEQ ID NO: 3421394 - DNA, 25 bp, Homo sapien
caaacaactgtacccttatccatca

SEQ ID NO: 3421395 - DNA, 25 bp, Homo sapien
gacagaagattctatgccatctaaa

SEQ ID NO: 3421396 - DNA, 25 bp, Homo sapien
tatccatcaggctaccagcaggttc

SEQ ID NO: 3421397 - DNA, 25 bp, Homo sapien
ctttccatgaatgcggatgcctgcc

SEQ ID NO: 3421398 - DNA, 25 bp, Homo sapien
gccactcaagactcttggtaatgga

SEQ ID NO: 3421399 - DNA, 25 bp, Homo sapien
catgagaagcgcttaaaaaacccaa

SEQ ID NO: 3421400 - DNA, 25 bp, Homo sapien
cctctggaaacttgagacaggccca

SEQ ID NO: 3421401 - DNA, 25 bp, Homo sapien
tgccttctgccgttgagggctgcag

SEQ ID NO: 3421402 - DNA, 25 bp, Homo sapien
tggggcctgctacccttccacttgt

SEQ ID NO: 3421403 - DNA, 25 bp, Homo sapien
tccagtgtgcagaattggggcctgc

SEQ ID NO: 3421404 - DNA, 25 bp, Homo sapien
catagtctccggcaggatttcagag

SEQ ID NO: 3421405 - DNA, 25 bp, Homo sapien
cacagtgaatactctttagccacac

SEQ ID NO: 3421406 - DNA, 25 bp, Homo sapien
acacagtgaatactctttagccaca

SEQ ID NO: 3421407 - DNA, 25 bp, Homo sapien
gcacacagtgaatactctttagcca

SEQ ID NO: 3421408 - DNA, 25 bp, Homo sapien
ctgcacacagtgaatactctttagc

SEQ ID NO: 3421409 - DNA, 25 bp, Homo sapien
gcacacggtgaatactcttcagcca

SEQ ID NO: 3421410 - DNA, 25 bp, Homo sapien
tgcacacggtgaatactcttcagcc

SEQ ID NO: 3421411 - DNA, 25 bp, Homo sapien
tcagccacacctgcacacggtgaat

SEQ ID NO: 3421412 - DNA, 25 bp, Homo sapien
tgcacacagtgaatactcttcagcc

SEQ ID NO: 3421413 - DNA, 25 bp, Homo sapien
cacccacacctgcacactgtgaata

SEQ ID NO: 3421414 - DNA, 25 bp, Homo sapien
tgcagacaggatttgagaaagataa

SEQ ID NO: 3421415 - DNA, 25 bp, Homo sapien
gagaaagataaacaagacgccagaa

SEQ ID NO: 3421416 - DNA, 25 bp, Homo sapien
ctgcagacaggatttgagaaagata

SEQ ID NO: 3421417 - DNA, 25 bp, Homo sapien
tttgagaaagataaacaagacgcca

SEQ ID NO: 3421418 - DNA, 25 bp, Homo sapien
tacatctgccccatctcaagggcgg

SEQ ID NO: 3421419 - DNA, 25 bp, Homo sapien
tgccatagaatccagcagcctctct

SEQ ID NO: 3421420 - DNA, 25 bp, Homo sapien
tcaagggcggtttcctgaaacagct

SEQ ID NO: 3421421 - DNA, 25 bp, Homo sapien
caggtcactgtttaggacgatggga

SEQ ID NO: 3421422 - DNA, 25 bp, Homo sapien
tggtcgaagccctcaggaaccagaa

SEQ ID NO: 3421423 - DNA, 25 bp, Homo sapien
gaacctgggaatggcactcttcggt

SEQ ID NO: 3421424 - DNA, 25 bp, Homo sapien
gaacctgggaatggcactcttcagt

SEQ ID NO: 3421425 - DNA, 25 bp, Homo sapien
tcttcggtgcagaagacctgggctt

SEQ ID NO: 3421426 - DNA, 25 bp, Homo sapien
gactcagaatataggcacagccagg

SEQ ID NO: 3421427 - DNA, 25 bp, Homo sapien
tgagggtaatgagccacgagatccc

SEQ ID NO: 3421428 - DNA, 25 bp, Homo sapien
tgggaccaactgataactgatagcc

SEQ ID NO: 3421429 - DNA, 25 bp, Homo sapien
cgagatcccctatcccagtgatgga

SEQ ID NO: 3421430 - DNA, 25 bp, Homo sapien
ttatgcggttcctcccataccagtg

SEQ ID NO: 3421431 - DNA, 25 bp, Homo sapien
ctgccagcctcgcactttatgcggt

SEQ ID NO: 3421432 - DNA, 25 bp, Homo sapien
taaccatggagaccaacaagttcct

SEQ ID NO: 3421433 - DNA, 25 bp, Homo sapien
cataccagtgggttaccgtaaccat

SEQ ID NO: 3421434 - DNA, 25 bp, Homo sapien
ttaactgtgactgttccacttgaga

SEQ ID NO: 3421435 - DNA, 25 bp, Homo sapien
aaaggataaccagaagagcctgcaa

SEQ ID NO: 3421436 - DNA, 25 bp, Homo sapien
gagaaacagccatattcctttactg

SEQ ID NO: 3421437 - DNA, 25 bp, Homo sapien
cagccagggtaagagcctccttcac

SEQ ID NO: 3421438 - DNA, 25 bp, Homo sapien
taggggcagatgactttaacaaagc

SEQ ID NO: 3421439 - DNA, 25 bp, Homo sapien
ggtaggggcagatgactttaacaaa

SEQ ID NO: 3421440 - DNA, 25 bp, Homo sapien
cctgggtaggggcagatgactttaa

SEQ ID NO: 3421441 - DNA, 25 bp, Homo sapien
ggcagatgactttaacaaagcctcc

SEQ ID NO: 3421442 - DNA, 25 bp, Homo sapien
tgtcaggcagcgagggcaaagtaca

SEQ ID NO: 3421443 - DNA, 25 bp, Homo sapien
tcaggaagcgcgtgcaattccagga

SEQ ID NO: 3421444 - DNA, 25 bp, Homo sapien
gaaaagtagctaagcagccaggccg

SEQ ID NO: 3421445 - DNA, 25 bp, Homo sapien
tggacggtgtcgcaaccgaaaccac

SEQ ID NO: 3421446 - DNA, 25 bp, Homo sapien
ggaaaaggactaccagcgacttcca

SEQ ID NO: 3421447 - DNA, 25 bp, Homo sapien
aaaggactaccagcgacttccattc

SEQ ID NO: 3421448 - DNA, 25 bp, Homo sapien
gactaccagcgacttccattcagca

SEQ ID NO: 3421449 - DNA, 25 bp, Homo sapien
aggactaccagcgacttccattcag

SEQ ID NO: 3421450 - DNA, 25 bp, Homo sapien
cagggctggcttcaagtgtcctttg

SEQ ID NO: 3421451 - DNA, 25 bp, Homo sapien
caagtgtcctttggcttcccgaggg

SEQ ID NO: 3421452 - DNA, 25 bp, Homo sapien
tttggggctctgcattcagggctgg

SEQ ID NO: 3421453 - DNA, 25 bp, Homo sapien
caacagttgtcccatggagaagctc

SEQ ID NO: 3421454 - DNA, 25 bp, Homo sapien
gaacccgagtctcccgcgtaggaga

SEQ ID NO: 3421455 - DNA, 25 bp, Homo sapien
tcccgcgtaggagacgaaatttctg

SEQ ID NO: 3421456 - DNA, 25 bp, Homo sapien
tttctgccgctgaactacgaatgcc

SEQ ID NO: 3421457 - DNA, 25 bp, Homo sapien
tgcatggccgaagtcgaacccgagt

SEQ ID NO: 3421458 - DNA, 25 bp, Homo sapien
gcttggagtcaaggtgtcccaaggt

SEQ ID NO: 3421459 - DNA, 25 bp, Homo sapien
cttggagtcaaggtgtcccaaggtg

SEQ ID NO: 3421460 - DNA, 25 bp, Homo sapien
tcccagtcaggatgtgtcgggccaa

SEQ ID NO: 3421461 - DNA, 25 bp, Homo sapien
tgaggagccggtagtttccaatgtg

SEQ ID NO: 3421462 - DNA, 25 bp, Homo sapien
gcagaggtggctgagttgcggcccc

SEQ ID NO: 3421463 - DNA, 25 bp, Homo sapien
cttcaccttggcaaaattacccttg

SEQ ID NO: 3421464 - DNA, 25 bp, Homo sapien
ggctggaggagttcagttgagtctt

SEQ ID NO: 3421465 - DNA, 25 bp, Homo sapien
tatgttgggatgattcaaaaccttc

SEQ ID NO: 3421466 - DNA, 25 bp, Homo sapien
ctatgttgggatgattcaaaacctt

SEQ ID NO: 3421467 - DNA, 25 bp, Homo sapien
tgttgggatgattcaaaaccttcat

SEQ ID NO: 3421468 - DNA, 25 bp, Homo sapien
atgttgggatgattcaaaaccttca

SEQ ID NO: 3421469 - DNA, 25 bp, Homo sapien
gactgcagactccagaaggcagtgc

SEQ ID NO: 3421470 - DNA, 25 bp, Homo sapien
ctggaaagcagtgccttgctgttgg

SEQ ID NO: 3421471 - DNA, 25 bp, Homo sapien
ggagaagatgacatgctggaaagca

SEQ ID NO: 3421472 - DNA, 25 bp, Homo sapien
gaaagaaataacaacttgtgctcac

SEQ ID NO: 3421473 - DNA, 25 bp, Homo sapien
acaaggtagagcgttttctcagtct

SEQ ID NO: 3421474 - DNA, 25 bp, Homo sapien
aaggtagagcgttttctcagtctca

SEQ ID NO: 3421475 - DNA, 25 bp, Homo sapien
catgacaaggtagagcgttttctca

SEQ ID NO: 3421476 - DNA, 25 bp, Homo sapien
tgacaaggtagagcgttttctcagt

SEQ ID NO: 3421477 - DNA, 25 bp, Homo sapien
gaatttggctcgagcctctttttct

SEQ ID NO: 3421478 - DNA, 25 bp, Homo sapien
ctggcggaatttggctcgagcctct

SEQ ID NO: 3421479 - DNA, 25 bp, Homo sapien
catgagccactaggtaatcaaatac

SEQ ID NO: 3421480 - DNA, 25 bp, Homo sapien
gccactaggtaatcaaatacctctc

SEQ ID NO: 3421481 - DNA, 25 bp, Homo sapien
tggacaataaacttctggtgacagt

SEQ ID NO: 3421482 - DNA, 25 bp, Homo sapien
aagtctctatggacaataaacttct

SEQ ID NO: 3421483 - DNA, 25 bp, Homo sapien
taagtctctatggacaataaacttc

SEQ ID NO: 3421484 - DNA, 25 bp, Homo sapien
ctttaagtctctatggacaataaac

SEQ ID NO: 3421485 - DNA, 25 bp, Homo sapien
catcaaaaggcagggatccgctgac

SEQ ID NO: 3421486 - DNA, 25 bp, Homo sapien
gtatagaggataactcctaggctcc

SEQ ID NO: 3421487 - DNA, 25 bp, Homo sapien
acctcgggtccatcatattttttgc

SEQ ID NO: 3421488 - DNA, 25 bp, Homo sapien
catccacctcgggtccatcatattt

SEQ ID NO: 3421489 - DNA, 25 bp, Homo sapien
atggaatacggtattttcccctcag

SEQ ID NO: 3421490 - DNA, 25 bp, Homo sapien
ccctcagtacccgttcccgcagctc

SEQ ID NO: 3421491 - DNA, 25 bp, Homo sapien
cacagtccgtggacatgtagaatgg

SEQ ID NO: 3421492 - DNA, 25 bp, Homo sapien
ggacatgtagaatggaatacggtat

SEQ ID NO: 3421493 - DNA, 25 bp, Homo sapien
tggctccacgtaaggctttagttca

SEQ ID NO: 3421494 - DNA, 25 bp, Homo sapien
tcatcatcttcgtgacccacattca

SEQ ID NO: 3421495 - DNA, 25 bp, Homo sapien
tgtccgccgggggtccttgtagtca

SEQ ID NO: 3421496 - DNA, 25 bp, Homo sapien
cttgtagtcagggagtggctccacg

SEQ ID NO: 3421497 - DNA, 25 bp, Homo sapien
tggcccaccagcgagtcctggatct

SEQ ID NO: 3421498 - DNA, 25 bp, Homo sapien
gatctcttcccgtgtataacccatg

SEQ ID NO: 3421499 - DNA, 25 bp, Homo sapien
taggtggccatcacctcgttgtatc

SEQ ID NO: 3421500 - DNA, 25 bp, Homo sapien
atcacctcgttgtatctctggccca

SEQ ID NO: 3421501 - DNA, 25 bp, Homo sapien
gtttcagggtgatggtgtcgccttc

SEQ ID NO: 3421502 - DNA, 25 bp, Homo sapien
gccgctgcttgggattggccgacac

SEQ ID NO: 3421503 - DNA, 25 bp, Homo sapien
acgctgcgctgtaccttgtgggatg

SEQ ID NO: 3421504 - DNA, 25 bp, Homo sapien
tcagggtgatggtgtcgccttccag

SEQ ID NO: 3421505 - DNA, 25 bp, Homo sapien
gctgctggctttccgccctgactcc

SEQ ID NO: 3421506 - DNA, 25 bp, Homo sapien
ttctgcgttgttactctgagtcttc

SEQ ID NO: 3421507 - DNA, 25 bp, Homo sapien
ttcctctccagaccgggcagggggc

SEQ ID NO: 3421508 - DNA, 25 bp, Homo sapien
ctcctcaggccgcttattttctgcg

SEQ ID NO: 3421509 - DNA, 25 bp, Homo sapien
ctgcttcgatttgtgctggtggaga

SEQ ID NO: 3421510 - DNA, 25 bp, Homo sapien
tccaaaagtggggaattcctgcttc

SEQ ID NO: 3421511 - DNA, 25 bp, Homo sapien
gggaattcctgcttcgatttgtgct

SEQ ID NO: 3421512 - DNA, 25 bp, Homo sapien
gaggctggcccgctccaaaagtggg

SEQ ID NO: 3421513 - DNA, 25 bp, Homo sapien
gacatcaccctgtgagacatggctc

SEQ ID NO: 3421514 - DNA, 25 bp, Homo sapien
gacatggctcctagggagtgaggca

SEQ ID NO: 3421515 - DNA, 25 bp, Homo sapien
aggagacggtgctgctgacagacat

SEQ ID NO: 3421516 - DNA, 25 bp, Homo sapien
tgcaagtagcagtcagaggaagatg

SEQ ID NO: 3421517 - DNA, 25 bp, Homo sapien
ctcacagttactctccgtggggggc

SEQ ID NO: 3421518 - DNA, 25 bp, Homo sapien
ccgacatggatttctggtgctggcg

SEQ ID NO: 3421519 - DNA, 25 bp, Homo sapien
cagaggccttgttggggtgcacgga

SEQ ID NO: 3421520 - DNA, 25 bp, Homo sapien
tgggccgcggcacctcacagttact

SEQ ID NO: 3421521 - DNA, 25 bp, Homo sapien
gctggtcccgcacctgtcggagctg

SEQ ID NO: 3421522 - DNA, 25 bp, Homo sapien
gaagttagttcggtctggggctcca

SEQ ID NO: 3421523 - DNA, 25 bp, Homo sapien
gggtcacaccgtagggcaaattctg

SEQ ID NO: 3421524 - DNA, 25 bp, Homo sapien
caccgtagggcaaattctgctggtc

SEQ ID NO: 3421525 - DNA, 25 bp, Homo sapien
tggcccttggtcttcagcttggtat

SEQ ID NO: 3421526 - DNA, 25 bp, Homo sapien
cttcagcttggtatttggtccccga

SEQ ID NO: 3421527 - DNA, 25 bp, Homo sapien
ctggcccttggtcttcagcttggta

SEQ ID NO: 3421528 - DNA, 25 bp, Homo sapien
cagcttggtatttggtccccgaggc

SEQ ID NO: 3421529 - DNA, 25 bp, Homo sapien
catctgctcatacgcagggaggatg

SEQ ID NO: 3421530 - DNA, 25 bp, Homo sapien
aagatgggtgtctggagctaggaaa

SEQ ID NO: 3421531 - DNA, 25 bp, Homo sapien
gccatctgctcatacgcagggagga

SEQ ID NO: 3421532 - DNA, 25 bp, Homo sapien
tggaagatgggtgtctggagctagg

SEQ ID NO: 3421533 - DNA, 25 bp, Homo sapien
tgagtgcgtttttggagccacacgc

SEQ ID NO: 3421534 - DNA, 25 bp, Homo sapien
tcaggagactcaaagtgccaaggcc

SEQ ID NO: 3421535 - DNA, 25 bp, Homo sapien
gagtggctgtgcacgcacttcactg

SEQ ID NO: 3421536 - DNA, 25 bp, Homo sapien
cacacgctagggtctcaggactgca

SEQ ID NO: 3421537 - DNA, 25 bp, Homo sapien
ttccgccgccacagacccagatgag

SEQ ID NO: 3421538 - DNA, 25 bp, Homo sapien
tggcggctcaaccattcctttccag

SEQ ID NO: 3421539 - DNA, 25 bp, Homo sapien
ggagagtttagtgctgggatctctc

SEQ ID NO: 3421540 - DNA, 25 bp, Homo sapien
gtgctgggatctctcgctccttccg

SEQ ID NO: 3421541 - DNA, 25 bp, Homo sapien
ctgagcgtctccactcggtctttgc

SEQ ID NO: 3421542 - DNA, 25 bp, Homo sapien
tctccactcggtctttgctttcagg

SEQ ID NO: 3421543 - DNA, 25 bp, Homo sapien
gcgtctccactcggtctttgctttc

SEQ ID NO: 3421544 - DNA, 25 bp, Homo sapien
tttgctttcaggttcattcaggttc

SEQ ID NO: 3421545 - DNA, 25 bp, Homo sapien
gaagggcccgtaactcctgcaattg

SEQ ID NO: 3421546 - DNA, 25 bp, Homo sapien
ccagaactccgacttccagaatata

SEQ ID NO: 3421547 - DNA, 25 bp, Homo sapien
cagaatataccagacctgaggagaa

SEQ ID NO: 3421548 - DNA, 25 bp, Homo sapien
gcagaaccacgggaggaagagccaa

SEQ ID NO: 3421549 - DNA, 25 bp, Homo sapien
gcatcatctcgttgggctccatgga

SEQ ID NO: 3421550 - DNA, 25 bp, Homo sapien
tgtacttctcatgcagctcgctctg

SEQ ID NO: 3421551 - DNA, 25 bp, Homo sapien
ttcatactccacgtgaagcggaggg

SEQ ID NO: 3421552 - DNA, 25 bp, Homo sapien
aatcgaaccccgttgagagagagcc

SEQ ID NO: 3421553 - DNA, 25 bp, Homo sapien
gtgccagcaggggagacacaccaat

SEQ ID NO: 3421554 - DNA, 25 bp, Homo sapien
tctcgcccaggtggggcggcgcagc

SEQ ID NO: 3421555 - DNA, 25 bp, Homo sapien
aatccatcgctgcagtctcgcccag

SEQ ID NO: 3421556 - DNA, 25 bp, Homo sapien
gggagacacaccaatccatcgctgc

SEQ ID NO: 3421557 - DNA, 25 bp, Homo sapien
ctcccaccccccacaaacatgtaag

SEQ ID NO: 3421558 - DNA, 25 bp, Homo sapien
gtgctggagaacaatctcccacccc

SEQ ID NO: 3421559 - DNA, 25 bp, Homo sapien
atctcccaccccccacaaacatgta

SEQ ID NO: 3421560 - DNA, 25 bp, Homo sapien
caatctcccaccccccacaaacatg

SEQ ID NO: 3421561 - DNA, 25 bp, Homo sapien
taggcgaaatactctgtgcaaccgc

SEQ ID NO: 3421562 - DNA, 25 bp, Homo sapien
ttcctaggacgcaagggctcggctt

SEQ ID NO: 3421563 - DNA, 25 bp, Homo sapien
gatggcacagactttgagggaacac

SEQ ID NO: 3421564 - DNA, 25 bp, Homo sapien
tcttgcctgagagtgttccagccct

SEQ ID NO: 3421565 - DNA, 25 bp, Homo sapien
cagcttcattgtgtgcgcgaggagc

SEQ ID NO: 3421566 - DNA, 25 bp, Homo sapien
gccagcagcttcattgtgtgcgcga

SEQ ID NO: 3421567 - DNA, 25 bp, Homo sapien
gggagggtgcgaggcggcacccgcg

SEQ ID NO: 3421568 - DNA, 25 bp, Homo sapien
agcgggcgagcaagcggcatcccga

SEQ ID NO: 3421569 - DNA, 25 bp, Homo sapien
tgttgagaggtgtattatttctgag

SEQ ID NO: 3421570 - DNA, 25 bp, Homo sapien
aaatgtattggcctactccttacat

SEQ ID NO: 3421571 - DNA, 25 bp, Homo sapien
cagaaatcaaccaggcttaaacaat

SEQ ID NO: 3421572 - DNA, 25 bp, Homo sapien
gctaaggcatatcgttaagtgggat

SEQ ID NO: 3421573 - DNA, 25 bp, Homo sapien
tttcagtgcacagatgactgccacc

SEQ ID NO: 3421574 - DNA, 25 bp, Homo sapien
tgtttcagtgcacagatgactgcca

SEQ ID NO: 3421575 - DNA, 25 bp, Homo sapien
tcagtgcacagatgactgccaccac

SEQ ID NO: 3421576 - DNA, 25 bp, Homo sapien
agctgtttcagtgcacagatgactg

SEQ ID NO: 3421577 - DNA, 25 bp, Homo sapien
gggccgggtggttggcagcacctcc

SEQ ID NO: 3421578 - DNA, 25 bp, Homo sapien
cgggtggttggcagcacctcccctg

SEQ ID NO: 3421579 - DNA, 25 bp, Homo sapien
gtggttggcagcacctcccctgcgg

SEQ ID NO: 3421580 - DNA, 25 bp, Homo sapien
tgggggccgggtggttggcagcacc

SEQ ID NO: 3421581 - DNA, 25 bp, Homo sapien
cgcccgctaggctggccgagggtct

SEQ ID NO: 3421582 - DNA, 25 bp, Homo sapien
gcgtcgcgccgggaatgacgtgcgg

SEQ ID NO: 3421583 - DNA, 25 bp, Homo sapien
gcgggagcgcggaggagcgtcgcgc

SEQ ID NO: 3421584 - DNA, 25 bp, Homo sapien
gcgccggcgcagaaccggcgcaggg

SEQ ID NO: 3421585 - DNA, 25 bp, Homo sapien
gcggcgacaacgctcagcttcttct

SEQ ID NO: 3421586 - DNA, 25 bp, Homo sapien
gcagcagagcggacggccctgcaac

SEQ ID NO: 3421587 - DNA, 25 bp, Homo sapien
cttcacacacttgccggcagggagg

SEQ ID NO: 3421588 - DNA, 25 bp, Homo sapien
ggcaacggcggtggctgcaacagcg

SEQ ID NO: 3421589 - DNA, 25 bp, Homo sapien
cgtttgaaccctaaagtcatgctcc

SEQ ID NO: 3421590 - DNA, 25 bp, Homo sapien
tgtttacaaagacctccctcagatc

SEQ ID NO: 3421591 - DNA, 25 bp, Homo sapien
ggctcgcaatgtctacaccaacagt

SEQ ID NO: 3421592 - DNA, 25 bp, Homo sapien
cacacacagttctacgactggaagg

SEQ ID NO: 3421593 - DNA, 25 bp, Homo sapien
cagccgggcctctagtagatttgtg

SEQ ID NO: 3421594 - DNA, 25 bp, Homo sapien
gcctctagtagatttgtgggctcat

SEQ ID NO: 3421595 - DNA, 25 bp, Homo sapien
ccgggcctctagtagatttgtgggc

SEQ ID NO: 3421596 - DNA, 25 bp, Homo sapien
ggccagccgggcctctagtagattt

SEQ ID NO: 3421597 - DNA, 25 bp, Homo sapien
gatcatgtttgttccactggccaca

SEQ ID NO: 3421598 - DNA, 25 bp, Homo sapien
caattatcagggcagaaactatcac

SEQ ID NO: 3421599 - DNA, 25 bp, Homo sapien
tatgtcctgcatagtggacttccac

SEQ ID NO: 3421600 - DNA, 25 bp, Homo sapien
gattcttgcaccctgccacgataag

SEQ ID NO: 3421601 - DNA, 25 bp, Homo sapien
ctgttggcagcgtccactttggcac

SEQ ID NO: 3421602 - DNA, 25 bp, Homo sapien
cctgttggcagcgtccactttggca

SEQ ID NO: 3421603 - DNA, 25 bp, Homo sapien
gttggcagcgtccactttggcacaa

SEQ ID NO: 3421604 - DNA, 25 bp, Homo sapien
tgttggcagcgtccactttggcaca

SEQ ID NO: 3421605 - DNA, 25 bp, Homo sapien
taacttcagaaccaggagcagcctc

SEQ ID NO: 3421606 - DNA, 25 bp, Homo sapien
tagcctgtgggcatacaacctgctc

SEQ ID NO: 3421607 - DNA, 25 bp, Homo sapien
taagtttggcatcacctgacagggc

SEQ ID NO: 3421608 - DNA, 25 bp, Homo sapien
gaggtgcagatcctatcccaagagc

SEQ ID NO: 3421609 - DNA, 25 bp, Homo sapien
actgggaaagcctccagagggtctc

SEQ ID NO: 3421610 - DNA, 25 bp, Homo sapien
ctatcatatttcttgaacactggga

SEQ ID NO: 3421611 - DNA, 25 bp, Homo sapien
ccgtttctatcatatttcttgaaca

SEQ ID NO: 3421612 - DNA, 25 bp, Homo sapien
ctgggaaagcctccagagggtctcc

SEQ ID NO: 3421613 - DNA, 25 bp, Homo sapien
cacaatatgggatatctaaagtatg

SEQ ID NO: 3421614 - DNA, 25 bp, Homo sapien
cactatgagatatcacaatatggga

SEQ ID NO: 3421615 - DNA, 25 bp, Homo sapien
cgaaaacactatgagatatcacaat

SEQ ID NO: 3421616 - DNA, 25 bp, Homo sapien
aaacgaaaacactatgagatatcac

SEQ ID NO: 3421617 - DNA, 25 bp, Homo sapien
agacactcgcttacattcaatggag

SEQ ID NO: 3421618 - DNA, 25 bp, Homo sapien
ttgcatattcgttttggtcaggtcg

SEQ ID NO: 3421619 - DNA, 25 bp, Homo sapien
atggtttgcatattcgttttggtca

SEQ ID NO: 3421620 - DNA, 25 bp, Homo sapien
tccagtccagacactcgcttacatt

SEQ ID NO: 3421621 - DNA, 25 bp, Homo sapien
gaatttgggagcagtcagacgggaa

SEQ ID NO: 3421622 - DNA, 25 bp, Homo sapien
aaggcaacagggacggagctgtttt

SEQ ID NO: 3421623 - DNA, 25 bp, Homo sapien
caggctcggtcatctgtcatttcct

SEQ ID NO: 3421624 - DNA, 25 bp, Homo sapien
gagctgttttcccacgcgatgaggt

SEQ ID NO: 3421625 - DNA, 25 bp, Homo sapien
cacgtcaaaccggaagtgagaaaag

SEQ ID NO: 3421626 - DNA, 25 bp, Homo sapien
catgaagaggctgtaaggtctggca

SEQ ID NO: 3421627 - DNA, 25 bp, Homo sapien
ctcatagacctaggtaggtccaggg

SEQ ID NO: 3421628 - DNA, 25 bp, Homo sapien
tgcctggaacatcgccagggtctct

SEQ ID NO: 3421629 - DNA, 25 bp, Homo sapien
cgtgcaggatgggacatgaagaggc

SEQ ID NO: 3421630 - DNA, 25 bp, Homo sapien
tccgccgcaccttgctttccaactg

SEQ ID NO: 3421631 - DNA, 25 bp, Homo sapien
gagctgcaggatctgtatgaggaac

SEQ ID NO: 3421632 - DNA, 25 bp, Homo sapien
cttgctttccaactgcacttcatag

SEQ ID NO: 3421633 - DNA, 25 bp, Homo sapien
agctgcaggatctgtatgaggaact

SEQ ID NO: 3421634 - DNA, 25 bp, Homo sapien
gaagaactggtaggcaccatgattg

SEQ ID NO: 3421635 - DNA, 25 bp, Homo sapien
tgaagaactggtaggcaccatgatt

SEQ ID NO: 3421636 - DNA, 25 bp, Homo sapien
aagaactggtaggcaccatgattgt

SEQ ID NO: 3421637 - DNA, 25 bp, Homo sapien
ccgcgtgggagtgatggctgtcccc

SEQ ID NO: 3421638 - DNA, 25 bp, Homo sapien
ccggctcaggatctcataggagcaa

SEQ ID NO: 3421639 - DNA, 25 bp, Homo sapien
tggcagcagccaccacagtgcccac

SEQ ID NO: 3421640 - DNA, 25 bp, Homo sapien
cagtggcagcagccaccacagtgcc

SEQ ID NO: 3421641 - DNA, 25 bp, Homo sapien
gtggcagcagccaccacagtgccca

SEQ ID NO: 3421642 - DNA, 25 bp, Homo sapien
agtggcagcagccaccacagtgccc

SEQ ID NO: 3421643 - DNA, 25 bp, Homo sapien
gcaattccaactgcgcaagcgtgag

SEQ ID NO: 3421644 - DNA, 25 bp, Homo sapien
tgtggaggatgagcttcactgcccg

SEQ ID NO: 3421645 - DNA, 25 bp, Homo sapien
tagcactctggtctcctaggagagg

SEQ ID NO: 3421646 - DNA, 25 bp, Homo sapien
gacacccggtgaacagtgagaccag

SEQ ID NO: 3421647 - DNA, 25 bp, Homo sapien
tgcagcaacatccaggagcctagag

SEQ ID NO: 3421648 - DNA, 25 bp, Homo sapien
agaagcaatcatccccatggcgggt

SEQ ID NO: 3421649 - DNA, 25 bp, Homo sapien
taactacatgaggaacgagaagtcc

SEQ ID NO: 3421650 - DNA, 25 bp, Homo sapien
ccatgagaccaggaggttaagctta

SEQ ID NO: 3421651 - DNA, 25 bp, Homo sapien
ccaaagggagctgttaggtgctttt

SEQ ID NO: 3421652 - DNA, 25 bp, Homo sapien
cagagctcagggatatccaaaggga

SEQ ID NO: 3421653 - DNA, 25 bp, Homo sapien
tccacgagaacaacttcacgaaggc

SEQ ID NO: 3421654 - DNA, 25 bp, Homo sapien
ctttatgatactccccacagcagag

SEQ ID NO: 3421655 - DNA, 25 bp, Homo sapien
gaggcagaggcagacttattccagt

SEQ ID NO: 3421656 - DNA, 25 bp, Homo sapien
gctgcaaggccctctctaaggagtt

SEQ ID NO: 3421657 - DNA, 25 bp, Homo sapien
caatgtcaactctgcctgggatgaa

SEQ ID NO: 3421658 - DNA, 25 bp, Homo sapien
tgcccatcaagagcagcgcaaagtg

SEQ ID NO: 3421659 - DNA, 25 bp, Homo sapien
cttgagtgagaggtatcaggaatcc

SEQ ID NO: 3421660 - DNA, 25 bp, Homo sapien
gtgagaggtatcaggaatccatgat

SEQ ID NO: 3421661 - DNA, 25 bp, Homo sapien
ccccttgagtgagaggtatcaggaa

SEQ ID NO: 3421662 - DNA, 25 bp, Homo sapien
tcccttttggtccccttgagtgaga

SEQ ID NO: 3421663 - DNA, 25 bp, Homo sapien
acatggcctgcagagactagggtga

SEQ ID NO: 3421664 - DNA, 25 bp, Homo sapien
tggaaagagacaacgtagactgaac

SEQ ID NO: 3421665 - DNA, 25 bp, Homo sapien
tggtgccacgtatccagtgactgga

SEQ ID NO: 3421666 - DNA, 25 bp, Homo sapien
gcctggtaaaaaaggcctgctatgt

SEQ ID NO: 3421667 - DNA, 25 bp, Homo sapien
tccctttgattccagtgataacaag

SEQ ID NO: 3421668 - DNA, 25 bp, Homo sapien
ttccctttgattccagtgataacaa

SEQ ID NO: 3421669 - DNA, 25 bp, Homo sapien
atacaaccaatgcaagaagagatca

SEQ ID NO: 3421670 - DNA, 25 bp, Homo sapien
tatttgtgacatacaaatacaacca

SEQ ID NO: 3421671 - DNA, 25 bp, Homo sapien
ctccccttccttggagccttgtctt

SEQ ID NO: 3421672 - DNA, 25 bp, Homo sapien
cctccaccagctcataactctcctg

SEQ ID NO: 3421673 - DNA, 25 bp, Homo sapien
ctgtcctcaggggtatagaacaacc

SEQ ID NO: 3421674 - DNA, 25 bp, Homo sapien
gagccatggcgctggcaatttatcc

SEQ ID NO: 3421675 - DNA, 25 bp, Homo sapien
tatccttagattgggagtaacacca

SEQ ID NO: 3421676 - DNA, 25 bp, Homo sapien
ggagggagtattctagccaaaacta

SEQ ID NO: 3421677 - DNA, 25 bp, Homo sapien
catcatggctggctagtttttttcg

SEQ ID NO: 3421678 - DNA, 25 bp, Homo sapien
tcatggctggctagtttttttcgta

SEQ ID NO: 3421679 - DNA, 25 bp, Homo sapien
gcacatgccatcatggctggctagt

SEQ ID NO: 3421680 - DNA, 25 bp, Homo sapien
tatttttaatagacacaaggtttca

SEQ ID NO: 3421681 - DNA, 25 bp, Homo sapien
ttagatgcatactatgatggttaat

SEQ ID NO: 3421682 - DNA, 25 bp, Homo sapien
taattagatgcatactatgatggtt

SEQ ID NO: 3421683 - DNA, 25 bp, Homo sapien
cacccttaacctgggtgggtgccat

SEQ ID NO: 3421684 - DNA, 25 bp, Homo sapien
aatcagctgctagtggggctagaag

SEQ ID NO: 3421685 - DNA, 25 bp, Homo sapien
tacatgtgctgccaaagcgagcact

SEQ ID NO: 3421686 - DNA, 25 bp, Homo sapien
tggagtgaagtgtcacgaccacacc

SEQ ID NO: 3421687 - DNA, 25 bp, Homo sapien
aaaagccatgcttttagccaccaca

SEQ ID NO: 3421688 - DNA, 25 bp, Homo sapien
agttctgttgcctccaaaagccatg

SEQ ID NO: 3421689 - DNA, 25 bp, Homo sapien
aagatcatgaagctacaaggctgcc

SEQ ID NO: 3421690 - DNA, 25 bp, Homo sapien
gatggcacggagtacaccacaaaaa

SEQ ID NO: 3421691 - DNA, 25 bp, Homo sapien
cggtcagccgtagcccaaggtcagg

SEQ ID NO: 3421692 - DNA, 25 bp, Homo sapien
tgcgctggccggaagttctggagct

SEQ ID NO: 3421693 - DNA, 25 bp, Homo sapien
caccacaaaaaacggtcagccgtag

SEQ ID NO: 3421694 - DNA, 25 bp, Homo sapien
cgaatggatcttggcgcgcggcact

SEQ ID NO: 3421695 - DNA, 25 bp, Homo sapien
agccgccgggccgagcctgtcaagc

SEQ ID NO: 3421696 - DNA, 25 bp, Homo sapien
cctccggcggcaacgaatggatctt

SEQ ID NO: 3421697 - DNA, 25 bp, Homo sapien
cggcaacgaatggatcttggcgcgc

SEQ ID NO: 3421698 - DNA, 25 bp, Homo sapien
cacctgaggtcagctaggcagaagg

SEQ ID NO: 3421699 - DNA, 25 bp, Homo sapien
tcagagcggctaaagaagtcggcag

SEQ ID NO: 3421700 - DNA, 25 bp, Homo sapien
gacaggaccagacccgagatcctgg

SEQ ID NO: 3421701 - DNA, 25 bp, Homo sapien
aacaaccattttcgtcgctgacagc

SEQ ID NO: 3421702 - DNA, 25 bp, Homo sapien
cagagcacaagaaagaaggcacctc

SEQ ID NO: 3421703 - DNA, 25 bp, Homo sapien
tcagtattcccctaggctctctaag

SEQ ID NO: 3421704 - DNA, 25 bp, Homo sapien
gaaggcacctcggagtcagtattcc

SEQ ID NO: 3421705 - DNA, 25 bp, Homo sapien
taggctctctaagtccttgcagttc

SEQ ID NO: 3421706 - DNA, 25 bp, Homo sapien
gaaggtcacgaagcaggaggtaagc

SEQ ID NO: 3421707 - DNA, 25 bp, Homo sapien
tgtgacaggatccagcccgctggca

SEQ ID NO: 3421708 - DNA, 25 bp, Homo sapien
ggtctccaggtgtgacaggatccag

SEQ ID NO: 3421709 - DNA, 25 bp, Homo sapien
tccaggtgtgacaggatccagcccg

SEQ ID NO: 3421710 - DNA, 25 bp, Homo sapien
cagtgtgagggacagaacggacccc

SEQ ID NO: 3421711 - DNA, 25 bp, Homo sapien
acagtgtgagggacagaacggaccc

SEQ ID NO: 3421712 - DNA, 25 bp, Homo sapien
agtgtgagggacagaacggacccct

SEQ ID NO: 3421713 - DNA, 25 bp, Homo sapien
ggaggccggccacaaatgcagtaac

SEQ ID NO: 3421714 - DNA, 25 bp, Homo sapien
actggaattgaatgacatgatccag

SEQ ID NO: 3421715 - DNA, 25 bp, Homo sapien
tgaatgacatgatccaggggaggcc

SEQ ID NO: 3421716 - DNA, 25 bp, Homo sapien
gaggccggccacaaatgcagtaaca

SEQ ID NO: 3421717 - DNA, 25 bp, Homo sapien
aagaggtcatgattgcagaagaggt

SEQ ID NO: 3421718 - DNA, 25 bp, Homo sapien
agaggtcatgattgcagaagaggtg

SEQ ID NO: 3421719 - DNA, 25 bp, Homo sapien
gaccccaccaagcagggtcagtgac

SEQ ID NO: 3421720 - DNA, 25 bp, Homo sapien
ccccaccaagcagggtcagtgaccc

SEQ ID NO: 3421721 - DNA, 25 bp, Homo sapien
ggaccccaccaagcagggtcagtga

SEQ ID NO: 3421722 - DNA, 25 bp, Homo sapien
gggaccccaccaagcagggtcagtg

SEQ ID NO: 3421723 - DNA, 25 bp, Homo sapien
tcctaaggccgaaagcaagcagagg

SEQ ID NO: 3421724 - DNA, 25 bp, Homo sapien
cattgtacccacgagagtctccagg

SEQ ID NO: 3421725 - DNA, 25 bp, Homo sapien
gaccattctcggtgcaggcttggga

SEQ ID NO: 3421726 - DNA, 25 bp, Homo sapien
cataagttgggctgtgagtcacctg

SEQ ID NO: 3421727 - DNA, 25 bp, Homo sapien
agcatcccttggtgtcaaggccaaa

SEQ ID NO: 3421728 - DNA, 25 bp, Homo sapien
catcgtggccccacggaacctgggt

SEQ ID NO: 3421729 - DNA, 25 bp, Homo sapien
gaacctgggttctctgccggctttg

SEQ ID NO: 3421730 - DNA, 25 bp, Homo sapien
tttggtgagctgcttccggcaagga

SEQ ID NO: 3421731 - DNA, 25 bp, Homo sapien
caaagttcccggtggtgattgcaga

SEQ ID NO: 3421732 - DNA, 25 bp, Homo sapien
cctggagtttgaaacgcggattttg

SEQ ID NO: 3421733 - DNA, 25 bp, Homo sapien
gaaattaaaatcaccgaaggcagca

SEQ ID NO: 3421734 - DNA, 25 bp, Homo sapien
gctgcagtgcggagcagcatctgac

SEQ ID NO: 3421735 - DNA, 25 bp, Homo sapien
ggcaggtgctggcacgccaggcctg

SEQ ID NO: 3421736 - DNA, 25 bp, Homo sapien
gcttccagtcccgtggcaggtgctg

SEQ ID NO: 3421737 - DNA, 25 bp, Homo sapien
ttgtcaaggaatgggcttccagtcc

SEQ ID NO: 3421738 - DNA, 25 bp, Homo sapien
ctagcaacgggatccccttaggcgt

SEQ ID NO: 3421739 - DNA, 25 bp, Homo sapien
gaccgcttccgggttgccaattgcc

SEQ ID NO: 3421740 - DNA, 25 bp, Homo sapien
tcgttgccccgccttggcaacagcc

SEQ ID NO: 3421741 - DNA, 25 bp, Homo sapien
aattgccgtcctcccggaagcgagc

SEQ ID NO: 3421742 - DNA, 25 bp, Homo sapien
ggaagcgagcccctcctcgttgccc

SEQ ID NO: 3421743 - DNA, 25 bp, Homo sapien
ttctgctgctgaggttcctccgccg

SEQ ID NO: 3421744 - DNA, 25 bp, Homo sapien
tctgctgctgaggttcctccgccgc

SEQ ID NO: 3421745 - DNA, 25 bp, Homo sapien
gctgctgaggttcctccgccgccat

SEQ ID NO: 3421746 - DNA, 25 bp, Homo sapien
cttcggagtcgctgcccagcggctc

SEQ ID NO: 3421747 - DNA, 25 bp, Homo sapien
ctccgtagcccagcgaaactcgagg

SEQ ID NO: 3421748 - DNA, 25 bp, Homo sapien
cagcgaaactcgaggccctcacggc

SEQ ID NO: 3421749 - DNA, 25 bp, Homo sapien
aaactcgaggccctcacggcgcggg

SEQ ID NO: 3421750 - DNA, 25 bp, Homo sapien
gtagcccagcgaaactcgaggccct

SEQ ID NO: 3421751 - DNA, 25 bp, Homo sapien
cagaaaaagtcgcaggcctcaggga

SEQ ID NO: 3421752 - DNA, 25 bp, Homo sapien
agaaaaagtcgcaggcctcagggac

SEQ ID NO: 3421753 - DNA, 25 bp, Homo sapien
ttgctgaattcggtcctgctgagcc

SEQ ID NO: 3421754 - DNA, 25 bp, Homo sapien
ctcttgctgaattcggtcctgctga

SEQ ID NO: 3421755 - DNA, 25 bp, Homo sapien
tcatcataggccagacagttaacac

SEQ ID NO: 3421756 - DNA, 25 bp, Homo sapien
atgatggcttcatcataggccagac

SEQ ID NO: 3421757 - DNA, 25 bp, Homo sapien
gaataactacaaaagagctgggctg

SEQ ID NO: 3421758 - DNA, 25 bp, Homo sapien
gtgacccatgcctaacagacagaat

SEQ ID NO: 3421759 - DNA, 25 bp, Homo sapien
cagtacctagcatagcctagggagg

SEQ ID NO: 3421760 - DNA, 25 bp, Homo sapien
tagagacagacaataggcctcatgc

SEQ ID NO: 3421761 - DNA, 25 bp, Homo sapien
ctggaggaggcagggatctgtcatg

SEQ ID NO: 3421762 - DNA, 25 bp, Homo sapien
tggaggaggcagggatctgtcatgt

SEQ ID NO: 3421763 - DNA, 25 bp, Homo sapien
ggaggaggcagggatctgtcatgtc

SEQ ID NO: 3421764 - DNA, 25 bp, Homo sapien
ttgtataggaccgagagctccagcc

SEQ ID NO: 3421765 - DNA, 25 bp, Homo sapien
catcttcagcatactccttgtatag

SEQ ID NO: 3421766 - DNA, 25 bp, Homo sapien
tccagccgctctgacaccagagggt

SEQ ID NO: 3421767 - DNA, 25 bp, Homo sapien
gccgctctgacaccagagggttctg

SEQ ID NO: 3421768 - DNA, 25 bp, Homo sapien
ggaagcaagtctgaagcaggcaccc

SEQ ID NO: 3421769 - DNA, 25 bp, Homo sapien
cgtatgggcaccgagatcatcagct

SEQ ID NO: 3421770 - DNA, 25 bp, Homo sapien
gaaccagcaacgaaaagtgtcctcc

SEQ ID NO: 3421771 - DNA, 25 bp, Homo sapien
tcaatctcacaatcgccctatggga

SEQ ID NO: 3421772 - DNA, 25 bp, Homo sapien
atgcctggccccatttcacatgtca

SEQ ID NO: 3421773 - DNA, 25 bp, Homo sapien
cagtaattttttgatttggagagac

SEQ ID NO: 3421774 - DNA, 25 bp, Homo sapien
acaatcatggctcaacttcttgggc

SEQ ID NO: 3421775 - DNA, 25 bp, Homo sapien
catttcacatgtcatcctcccagct

SEQ ID NO: 3421776 - DNA, 25 bp, Homo sapien
tccaagtgggagaatccgaaagccc

SEQ ID NO: 3421777 - DNA, 25 bp, Homo sapien
acagttgccgtcaggcctggtcttg

SEQ ID NO: 3421778 - DNA, 25 bp, Homo sapien
gtcatccagcagtgcctccaagtgg

SEQ ID NO: 3421779 - DNA, 25 bp, Homo sapien
gaaagcccgatagaaacagttgccg

SEQ ID NO: 3421780 - DNA, 25 bp, Homo sapien
agtccagcccatcgcccgggaagga

SEQ ID NO: 3421781 - DNA, 25 bp, Homo sapien
aggaggtagacacccacctgcctcg

SEQ ID NO: 3421782 - DNA, 25 bp, Homo sapien
gggagacaccctactcgagacacat

SEQ ID NO: 3421783 - DNA, 25 bp, Homo sapien
atgggctcctcgaccagcccagacg

SEQ ID NO: 3421784 - DNA, 25 bp, Homo sapien
caggtcttccttgctcttggcagac

SEQ ID NO: 3421785 - DNA, 25 bp, Homo sapien
caccaggtcttccttgctcttggca

SEQ ID NO: 3421786 - DNA, 25 bp, Homo sapien
ctgggacaccaggtcttccttgctc

SEQ ID NO: 3421787 - DNA, 25 bp, Homo sapien
tgggacaccaggtcttccttgctct

SEQ ID NO: 3421788 - DNA, 25 bp, Homo sapien
cgtgttgtggaaatcctcaattgtg

SEQ ID NO: 3421789 - DNA, 25 bp, Homo sapien
tgttgtggaaatcctcaattgtgaa

SEQ ID NO: 3421790 - DNA, 25 bp, Homo sapien
gtgttgtggaaatcctcaattgtga

SEQ ID NO: 3421791 - DNA, 25 bp, Homo sapien
ttgtggaaatcctcaattgtgaatt

SEQ ID NO: 3421792 - DNA, 25 bp, Homo sapien
tggtcctcaccaggtgaacccctcc

SEQ ID NO: 3421793 - DNA, 25 bp, Homo sapien
caccaggtgaacccctcccccatgg

SEQ ID NO: 3421794 - DNA, 25 bp, Homo sapien
gtggtcctcaccaggtgaacccctc

SEQ ID NO: 3421795 - DNA, 25 bp, Homo sapien
tcaccaggtgaacccctcccccatg

SEQ ID NO: 3421796 - DNA, 25 bp, Homo sapien
caggtcggcgacagaggtctgcttc

SEQ ID NO: 3421797 - DNA, 25 bp, Homo sapien
tggcagaactccttgacagtccgtc

SEQ ID NO: 3421798 - DNA, 25 bp, Homo sapien
agtgctcgaagaacttgctctcgcg

SEQ ID NO: 3421799 - DNA, 25 bp, Homo sapien
accacaaggtagtcggaggtgctct

SEQ ID NO: 3421800 - DNA, 25 bp, Homo sapien
cctgtgggcccactgcactcccccg

SEQ ID NO: 3421801 - DNA, 25 bp, Homo sapien
ctgcactcccccggccgagagtaaa

SEQ ID NO: 3421802 - DNA, 25 bp, Homo sapien
tgcactcccccggccgagagtaaag

SEQ ID NO: 3421803 - DNA, 25 bp, Homo sapien
ctgtgggcccactgcactcccccgg

SEQ ID NO: 3421804 - DNA, 25 bp, Homo sapien
gtgccggtcaggccctggtctccgc

SEQ ID NO: 3421805 - DNA, 25 bp, Homo sapien
acaggtgccggtcaggccctggtct

SEQ ID NO: 3421806 - DNA, 25 bp, Homo sapien
caggtgccggtcaggccctggtctc

SEQ ID NO: 3421807 - DNA, 25 bp, Homo sapien
aggtgccggtcaggccctggtctcc

SEQ ID NO: 3421808 - DNA, 25 bp, Homo sapien
tggatggacacgctgagggcctggg

SEQ ID NO: 3421809 - DNA, 25 bp, Homo sapien
cacctggatggacacgctgagggcc

SEQ ID NO: 3421810 - DNA, 25 bp, Homo sapien
cctggatggacacgctgagggcctg

SEQ ID NO: 3421811 - DNA, 25 bp, Homo sapien
gatgtggtcgctctccttgcacatg

SEQ ID NO: 3421812 - DNA, 25 bp, Homo sapien
cggattggtggtgccgccctcgccg

SEQ ID NO: 3421813 - DNA, 25 bp, Homo sapien
aagatgtgcggattggtggtgccgc

SEQ ID NO: 3421814 - DNA, 25 bp, Homo sapien
agccctcagggaagatgtgcggatt

SEQ ID NO: 3421815 - DNA, 25 bp, Homo sapien
tgtgcggattggtggtgccgccctc

SEQ ID NO: 3421816 - DNA, 25 bp, Homo sapien
tcgtagtgtccaggccggtagagaa

SEQ ID NO: 3421817 - DNA, 25 bp, Homo sapien
gatatcgtagtgtccaggccggtag

SEQ ID NO: 3421818 - DNA, 25 bp, Homo sapien
tagaggatatcgtagtgtccaggcc

SEQ ID NO: 3421819 - DNA, 25 bp, Homo sapien
tatttgtagaggatatcgtagtgtc

SEQ ID NO: 3421820 - DNA, 25 bp, Homo sapien
acctctgtacatgtctagcgcctgg

SEQ ID NO: 3421821 - DNA, 25 bp, Homo sapien
ctctgtacatgtctagcgcctggca

SEQ ID NO: 3421822 - DNA, 25 bp, Homo sapien
tgtacatgtctagcgcctggcagag

SEQ ID NO: 3421823 - DNA, 25 bp, Homo sapien
aaaaacctctgtacatgtctagcgc

SEQ ID NO: 3421824 - DNA, 25 bp, Homo sapien
gcaagtccctaaggaacttccagga

SEQ ID NO: 3421825 - DNA, 25 bp, Homo sapien
tagaccccacacgtttgaaggctgc

SEQ ID NO: 3421826 - DNA, 25 bp, Homo sapien
caggatcccatagaagcccctgagc

SEQ ID NO: 3421827 - DNA, 25 bp, Homo sapien
aaccatgcagactcccggtggaggg

SEQ ID NO: 3421828 - DNA, 25 bp, Homo sapien
aagagctctcggtgagccaggcggg

SEQ ID NO: 3421829 - DNA, 25 bp, Homo sapien
cagctctgagaggtcgccaaagcct

SEQ ID NO: 3421830 - DNA, 25 bp, Homo sapien
caccctgaccgggactggtaagcag

SEQ ID NO: 3421831 - DNA, 25 bp, Homo sapien
ccccgaggagcctaataaagatctc

SEQ ID NO: 3421832 - DNA, 25 bp, Homo sapien
taaagatctcgttgtggcagctcct

SEQ ID NO: 3421833 - DNA, 25 bp, Homo sapien
aatgatggtcctctcttgatgcccg

SEQ ID NO: 3421834 - DNA, 25 bp, Homo sapien
gagctgccaaagatgggccctgtcc

SEQ ID NO: 3421835 - DNA, 25 bp, Homo sapien
gagggtcgctgtcccggtattccag

SEQ ID NO: 3421836 - DNA, 25 bp, Homo sapien
tattccagataagagggtggacgcc

SEQ ID NO: 3421837 - DNA, 25 bp, Homo sapien
tcgccctgggctacagctgcctttc

SEQ ID NO: 3421838 - DNA, 25 bp, Homo sapien
agcctcgccctgggctacagctgcc

SEQ ID NO: 3421839 - DNA, 25 bp, Homo sapien
ccctgggctacagctgcctttctcc

SEQ ID NO: 3421840 - DNA, 25 bp, Homo sapien
cctcgccctgggctacagctgcctt

SEQ ID NO: 3421841 - DNA, 25 bp, Homo sapien
gcatcattagcgtctccattttgca

SEQ ID NO: 3421842 - DNA, 25 bp, Homo sapien
cccgccctatgggaggcatcattag

SEQ ID NO: 3421843 - DNA, 25 bp, Homo sapien
gaggcactaagtccctggagctgaa

SEQ ID NO: 3421844 - DNA, 25 bp, Homo sapien
tggccacaactttgaccaggcaggg

SEQ ID NO: 3421845 - DNA, 25 bp, Homo sapien
gcgagcagataaacgtgacctccgt

SEQ ID NO: 3421846 - DNA, 25 bp, Homo sapien
ccttgctctgcgagcagataaacgt

SEQ ID NO: 3421847 - DNA, 25 bp, Homo sapien
cagtctggtgggtgttgtgtgtgca

SEQ ID NO: 3421848 - DNA, 25 bp, Homo sapien
cctgtgccagtctggtgggtgttgt

SEQ ID NO: 3421849 - DNA, 25 bp, Homo sapien
gaggctataacctataaccccagag

SEQ ID NO: 3421850 - DNA, 25 bp, Homo sapien
gaggatcctcccacggaaattgtag

SEQ ID NO: 3421851 - DNA, 25 bp, Homo sapien
ggaacctaggtcaagggctccttgc

SEQ ID NO: 3421852 - DNA, 25 bp, Homo sapien
taggccgagtgtagtgcttacaggc

SEQ ID NO: 3421853 - DNA, 25 bp, Homo sapien
cctggcaggttctgagctaggagca

SEQ ID NO: 3421854 - DNA, 25 bp, Homo sapien
tggcaggttctgagctaggagcacc

SEQ ID NO: 3421855 - DNA, 25 bp, Homo sapien
ctaggagcaccagcgccgctgaggc

SEQ ID NO: 3421856 - DNA, 25 bp, Homo sapien
gcaggttctgagctaggagcaccag

SEQ ID NO: 3421857 - DNA, 25 bp, Homo sapien
tattctctcaaaactgcccaccctg

SEQ ID NO: 3421858 - DNA, 25 bp, Homo sapien
cctggtgtccctgttccacaacttt

SEQ ID NO: 3421859 - DNA, 25 bp, Homo sapien
tctgatcaaccacggttccctgcag

SEQ ID NO: 3421860 - DNA, 25 bp, Homo sapien
cctccacagtggcatcgtgggtccc

SEQ ID NO: 3421861 - DNA, 25 bp, Homo sapien
ggtagagtgcggatgcacagaccca

SEQ ID NO: 3421862 - DNA, 25 bp, Homo sapien
tcagccagatatgtgacagccctca

SEQ ID NO: 3421863 - DNA, 25 bp, Homo sapien
aaagaacatgggactgggtgcgcac

SEQ ID NO: 3421864 - DNA, 25 bp, Homo sapien
ccaggtctaggtgaagtccagcagg

SEQ ID NO: 3421865 - DNA, 25 bp, Homo sapien
tgctgtccttttcccgtctcctccc

SEQ ID NO: 3421866 - DNA, 25 bp, Homo sapien
ctaccacccgacctcaaacacactt

SEQ ID NO: 3421867 - DNA, 25 bp, Homo sapien
acacacttggaaggcagtacaccgg

SEQ ID NO: 3421868 - DNA, 25 bp, Homo sapien
ccagccagagcctgaactttgtctc

SEQ ID NO: 3421869 - DNA, 25 bp, Homo sapien
ctgctgtgccctgcctgccaaaagc

SEQ ID NO: 3421870 - DNA, 25 bp, Homo sapien
tgctgtgccctgcctgccaaaagcc

SEQ ID NO: 3421871 - DNA, 25 bp, Homo sapien
cctgggtacccagggtcagcctgtg

SEQ ID NO: 3421872 - DNA, 25 bp, Homo sapien
tgttccccagatgagggtggaagta

SEQ ID NO: 3421873 - DNA, 25 bp, Homo sapien
cagatgagggtggaagtaccctgca

SEQ ID NO: 3421874 - DNA, 25 bp, Homo sapien
ccccagatgagggtggaagtaccct

SEQ ID NO: 3421875 - DNA, 25 bp, Homo sapien
catccttcaagaaaagcacaattcg

SEQ ID NO: 3421876 - DNA, 25 bp, Homo sapien
cacaattcgccacccctggaagtcc

SEQ ID NO: 3421877 - DNA, 25 bp, Homo sapien
aaagcacaattcgccacccctggaa

SEQ ID NO: 3421878 - DNA, 25 bp, Homo sapien
atccttcaagaaaagcacaattcgc

SEQ ID NO: 3421879 - DNA, 25 bp, Homo sapien
cagccacaggctgctacagttctgg

SEQ ID NO: 3421880 - DNA, 25 bp, Homo sapien
gcttccacggcctctgccagaggca

SEQ ID NO: 3421881 - DNA, 25 bp, Homo sapien
gggccggcatcacccctgtacccat

SEQ ID NO: 3421882 - DNA, 25 bp, Homo sapien
ttctgggattcctgcattgctggct

SEQ ID NO: 3421883 - DNA, 25 bp, Homo sapien
gctgtaagggcacagccccccttgg

SEQ ID NO: 3421884 - DNA, 25 bp, Homo sapien
gggtcccactacttggacatgctgt

SEQ ID NO: 3421885 - DNA, 25 bp, Homo sapien
gcagtttggtggtatctagctcctg

SEQ ID NO: 3421886 - DNA, 25 bp, Homo sapien
gacccacagggcagtttggtggtat

SEQ ID NO: 3421887 - DNA, 25 bp, Homo sapien
ggcaaggctgatgggtctttaaaaa

SEQ ID NO: 3421888 - DNA, 25 bp, Homo sapien
cctgaggcaaggctgatgggtcttt

SEQ ID NO: 3421889 - DNA, 25 bp, Homo sapien
ggtcctgaggcaaggctgatgggtc

SEQ ID NO: 3421890 - DNA, 25 bp, Homo sapien
gaggcaaggctgatgggtctttaaa

SEQ ID NO: 3421891 - DNA, 25 bp, Homo sapien
gcacggggagagcgtctgggacccc

SEQ ID NO: 3421892 - DNA, 25 bp, Homo sapien
gggcacggggagagcgtctgggacc

SEQ ID NO: 3421893 - DNA, 25 bp, Homo sapien
ggcacggggagagcgtctgggaccc

SEQ ID NO: 3421894 - DNA, 25 bp, Homo sapien
ccttctggagggcacgtcctactgg

SEQ ID NO: 3421895 - DNA, 25 bp, Homo sapien
ctggagggcacgtcctactgggcat

SEQ ID NO: 3421896 - DNA, 25 bp, Homo sapien
tttctgcatctctggggcgggcaca

SEQ ID NO: 3421897 - DNA, 25 bp, Homo sapien
gcacgtcctactgggcatgggcatg

SEQ ID NO: 3421898 - DNA, 25 bp, Homo sapien
ggaaccacggcctcagtcttcatgt

SEQ ID NO: 3421899 - DNA, 25 bp, Homo sapien
gcatgtccatttagaacacagcagg

SEQ ID NO: 3421900 - DNA, 25 bp, Homo sapien
ttttcaacctgtcacgggatccggc

SEQ ID NO: 3421901 - DNA, 25 bp, Homo sapien
tccggcgcccgctctgtaaatggct

SEQ ID NO: 3421902 - DNA, 25 bp, Homo sapien
tgccctgtgggtcgtggtgatgtct

SEQ ID NO: 3421903 - DNA, 25 bp, Homo sapien
ggtgccctgtgggtcgtggtgatgt

SEQ ID NO: 3421904 - DNA, 25 bp, Homo sapien
tcggtgtctggtgccctgtgggtcg

SEQ ID NO: 3421905 - DNA, 25 bp, Homo sapien
ccctgtgggtcgtggtgatgtctga

SEQ ID NO: 3421906 - DNA, 25 bp, Homo sapien
tgggttgttaatgggatatgagaaa

SEQ ID NO: 3421907 - DNA, 25 bp, Homo sapien
gatatgagaaaacgccaggggagac

SEQ ID NO: 3421908 - DNA, 25 bp, Homo sapien
atgatgatacccactgggtgggttg

SEQ ID NO: 3421909 - DNA, 25 bp, Homo sapien
caggggagactaagccagcacttgg

SEQ ID NO: 3421910 - DNA, 25 bp, Homo sapien
ttgctgtgggaggacaaacacatcc

SEQ ID NO: 3421911 - DNA, 25 bp, Homo sapien
tctccctgcgtcaaaaggcttctct

SEQ ID NO: 3421912 - DNA, 25 bp, Homo sapien
cccgccatcaaggagagaggcagtg

SEQ ID NO: 3421913 - DNA, 25 bp, Homo sapien
ccatatcatttaccagtggggatgt

SEQ ID NO: 3421914 - DNA, 25 bp, Homo sapien
ctgggacccctcctgcggcgatggc

SEQ ID NO: 3421915 - DNA, 25 bp, Homo sapien
gggctgcgcagtgctccagctggga

SEQ ID NO: 3421916 - DNA, 25 bp, Homo sapien
cctgcctcatcccggagcctcctgg

SEQ ID NO: 3421917 - DNA, 25 bp, Homo sapien
tgggacccctcctgcggcgatggct

SEQ ID NO: 3421918 - DNA, 25 bp, Homo sapien
cttttgtcggcagaacagtggctgt

SEQ ID NO: 3421919 - DNA, 25 bp, Homo sapien
cacgctggagctctcaagtggcagt

SEQ ID NO: 3421920 - DNA, 25 bp, Homo sapien
gacatatcctgcaggctcatgggcc

SEQ ID NO: 3421921 - DNA, 25 bp, Homo sapien
tgtgctggctgcagcgcgacatatc

SEQ ID NO: 3421922 - DNA, 25 bp, Homo sapien
cttgcaccactagggacgcagacct

SEQ ID NO: 3421923 - DNA, 25 bp, Homo sapien
gatccggtgcctcggtatcctggtc

SEQ ID NO: 3421924 - DNA, 25 bp, Homo sapien
ctgccaaagtcacgaagccgcgact

SEQ ID NO: 3421925 - DNA, 25 bp, Homo sapien
tctcctggcgttcagatgaggctgt

SEQ ID NO: 3421926 - DNA, 25 bp, Homo sapien
gatggctgggggcgtccggccccac

SEQ ID NO: 3421927 - DNA, 25 bp, Homo sapien
gtggatggctgggggcgtccggccc

SEQ ID NO: 3421928 - DNA, 25 bp, Homo sapien
tggatggctgggggcgtccggcccc

SEQ ID NO: 3421929 - DNA, 25 bp, Homo sapien
ggtggatggctgggggcgtccggcc

SEQ ID NO: 3421930 - DNA, 25 bp, Homo sapien
atgagcccgtagcagaggaacagcc

SEQ ID NO: 3421931 - DNA, 25 bp, Homo sapien
tcatcacaacggtggccgtgacagt

SEQ ID NO: 3421932 - DNA, 25 bp, Homo sapien
ctccgtcaggaaggcgatgagcccg

SEQ ID NO: 3421933 - DNA, 25 bp, Homo sapien
caggtccatggtggccgtggtcatc

SEQ ID NO: 3421934 - DNA, 25 bp, Homo sapien
aaccaagggttgttcctgagcagca

SEQ ID NO: 3421935 - DNA, 25 bp, Homo sapien
cctcaatgctgacggtggacacgga

SEQ ID NO: 3421936 - DNA, 25 bp, Homo sapien
gggtgtctcatcagctacgtaggca

SEQ ID NO: 3421937 - DNA, 25 bp, Homo sapien
tagatgacctgcacgttgaccttgg

SEQ ID NO: 3421938 - DNA, 25 bp, Homo sapien
tcctttgtgaggagcctgaaaacct

SEQ ID NO: 3421939 - DNA, 25 bp, Homo sapien
ccaaactttgctttctgcggaggaa

SEQ ID NO: 3421940 - DNA, 25 bp, Homo sapien
ccttgaacagagcatgaggtgtcca

SEQ ID NO: 3421941 - DNA, 25 bp, Homo sapien
tgaaaaccttccatcgggtcgccag

SEQ ID NO: 3421942 - DNA, 25 bp, Homo sapien
accgcgacagggatagacaggcaga

SEQ ID NO: 3421943 - DNA, 25 bp, Homo sapien
taaggaccgtgcatgtggctctatc

SEQ ID NO: 3421944 - DNA, 25 bp, Homo sapien
tggtaagaactgacccaagaagaac

SEQ ID NO: 3421945 - DNA, 25 bp, Homo sapien
catctgtacttagagacaccgcgac

SEQ ID NO: 3421946 - DNA, 25 bp, Homo sapien
tcctcccagacatcccaggtgggcc

SEQ ID NO: 3421947 - DNA, 25 bp, Homo sapien
tcgggcacgctctcctcccagacat

SEQ ID NO: 3421948 - DNA, 25 bp, Homo sapien
cgctctcctcccagacatcccaggt

SEQ ID NO: 3421949 - DNA, 25 bp, Homo sapien
agacatcccaggtgggcccttctgc

SEQ ID NO: 3421950 - DNA, 25 bp, Homo sapien
tcctatcttgtggtatgagaccagc

SEQ ID NO: 3421951 - DNA, 25 bp, Homo sapien
acaaaacgtactcatcagtgctggg

SEQ ID NO: 3421952 - DNA, 25 bp, Homo sapien
cagaaaggaccctgggaaggtgtca

SEQ ID NO: 3421953 - DNA, 25 bp, Homo sapien
cacttaaccaaagaagcgtcatggg

SEQ ID NO: 3421954 - DNA, 25 bp, Homo sapien
ttttcaggggacaccagtgacttta

SEQ ID NO: 3421955 - DNA, 25 bp, Homo sapien
tatctgctccctttcagtgtcctgg

SEQ ID NO: 3421956 - DNA, 25 bp, Homo sapien
caggggacaccagtgactttaaaca

SEQ ID NO: 3421957 - DNA, 25 bp, Homo sapien
ctcttgatatctgctccctttcagt

SEQ ID NO: 3421958 - DNA, 25 bp, Homo sapien
tggcgagccataggtgctgagttta

SEQ ID NO: 3421959 - DNA, 25 bp, Homo sapien
gcttaagagacaggtccaggacgca

SEQ ID NO: 3421960 - DNA, 25 bp, Homo sapien
cagcatgagcgtgttggactgcacg

SEQ ID NO: 3421961 - DNA, 25 bp, Homo sapien
tggatggatagatacagtggcagca

SEQ ID NO: 3421962 - DNA, 25 bp, Homo sapien
tatgggtatttcaggcacctacttg

SEQ ID NO: 3421963 - DNA, 25 bp, Homo sapien
agtgaaaagtgccccaggcgccatc

SEQ ID NO: 3421964 - DNA, 25 bp, Homo sapien
tgaaaagtgccccaggcgccatcca

SEQ ID NO: 3421965 - DNA, 25 bp, Homo sapien
cagagtgaaaagtgccccaggcgcc

SEQ ID NO: 3421966 - DNA, 25 bp, Homo sapien
gaggctgggagttcaataccagtct

SEQ ID NO: 3421967 - DNA, 25 bp, Homo sapien
gctgggagttcaataccagtctgag

SEQ ID NO: 3421968 - DNA, 25 bp, Homo sapien
ggctgggagttcaataccagtctga

SEQ ID NO: 3421969 - DNA, 25 bp, Homo sapien
ctgaggctgggagttcaataccagt

SEQ ID NO: 3421970 - DNA, 25 bp, Homo sapien
aaaatgggactagcccgaggacagg

SEQ ID NO: 3421971 - DNA, 25 bp, Homo sapien
tcagaacattgcaagcctgcgttcc

SEQ ID NO: 3421972 - DNA, 25 bp, Homo sapien
agatgaactggtggcggccccgcat

SEQ ID NO: 3421973 - DNA, 25 bp, Homo sapien
tctacagaggaagcccgatgagttc

SEQ ID NO: 3421974 - DNA, 25 bp, Homo sapien
aaaggagatagtgctgcacctgggc

SEQ ID NO: 3421975 - DNA, 25 bp, Homo sapien
ttcaaggcacctacaagaaggaggc

SEQ ID NO: 3421976 - DNA, 25 bp, Homo sapien
aggcccctgagacggcttccaagaa

SEQ ID NO: 3421977 - DNA, 25 bp, Homo sapien
ccaaagggcggttcgcagtgcactt

SEQ ID NO: 3421978 - DNA, 25 bp, Homo sapien
tgggatggcgagagtcattctgtcc

SEQ ID NO: 3421979 - DNA, 25 bp, Homo sapien
tgtcctctgcgatgcccgggtatgc

SEQ ID NO: 3421980 - DNA, 25 bp, Homo sapien
agctggctcccctcaggtgccatct

SEQ ID NO: 3421981 - DNA, 25 bp, Homo sapien
gtagacttctcagtgtaagtgaaaa

SEQ ID NO: 3421982 - DNA, 25 bp, Homo sapien
agagctaccttgctgaggacgttga

SEQ ID NO: 3421983 - DNA, 25 bp, Homo sapien
taattgcggtaaaaaccagagccga

SEQ ID NO: 3421984 - DNA, 25 bp, Homo sapien
gggcccgcggctgttttattattgc

SEQ ID NO: 3421985 - DNA, 25 bp, Homo sapien
cctggcggcaacaagtggcccttga

SEQ ID NO: 3421986 - DNA, 25 bp, Homo sapien
ctggacagggctcctctgcggtggg

SEQ ID NO: 3421987 - DNA, 25 bp, Homo sapien
gctccatggactctgggtctccgtc

SEQ ID NO: 3421988 - DNA, 25 bp, Homo sapien
gactccgagcccctcgagggcaggg

SEQ ID NO: 3421989 - DNA, 25 bp, Homo sapien
tgggggcagcccgagcatgcctgcc

SEQ ID NO: 3421990 - DNA, 25 bp, Homo sapien
gaatcagtgacaccctctaagtccc

SEQ ID NO: 3421991 - DNA, 25 bp, Homo sapien
taggtccttatgaggttcctggctc

SEQ ID NO: 3421992 - DNA, 25 bp, Homo sapien
gaataagtgactccatgcccttgag

SEQ ID NO: 3421993 - DNA, 25 bp, Homo sapien
ccatgtctgacctgatgtttgttga

SEQ ID NO: 3421994 - DNA, 25 bp, Homo sapien
tgttagcagggaccttcactatctt

SEQ ID NO: 3421995 - DNA, 25 bp, Homo sapien
gaaacagtagcgctggtacacagta

SEQ ID NO: 3421996 - DNA, 25 bp, Homo sapien
gagctgaatcccagcaaaaagaaac

SEQ ID NO: 3421997 - DNA, 25 bp, Homo sapien
tagaccacggagagctgttagcagg

SEQ ID NO: 3421998 - DNA, 25 bp, Homo sapien
ggataaagtgcccttgacttcccaa

SEQ ID NO: 3421999 - DNA, 25 bp, Homo sapien
caatataatcctcccgggttggcct

SEQ ID NO: 3422000 - DNA, 25 bp, Homo sapien
ggaaggcttttttgtgctctaagtg

SEQ ID NO: 3422001 - DNA, 25 bp, Homo sapien
gacttcccaaggttactatgcagat

SEQ ID NO: 3422002 - DNA, 25 bp, Homo sapien
gcaagcaccattacgcctagctaat

SEQ ID NO: 3422003 - DNA, 25 bp, Homo sapien
acaggcaagcaccattacgcctagc

SEQ ID NO: 3422004 - DNA, 25 bp, Homo sapien
ttttgtatagatggatttcgccatg

SEQ ID NO: 3422005 - DNA, 25 bp, Homo sapien
ctggtcttaaactctcgctctgtct

SEQ ID NO: 3422006 - DNA, 25 bp, Homo sapien
agtggaaccgcacaccctttctcag

SEQ ID NO: 3422007 - DNA, 25 bp, Homo sapien
gctgtcccgcttgggcgtcctcagt

SEQ ID NO: 3422008 - DNA, 25 bp, Homo sapien
gaatgttccggaaatgccacgtgac

SEQ ID NO: 3422009 - DNA, 25 bp, Homo sapien
tgcctcctggctgttaggttctgaa

SEQ ID NO: 3422010 - DNA, 25 bp, Homo sapien
aatcgctgcccttcaaaaggccggg

SEQ ID NO: 3422011 - DNA, 25 bp, Homo sapien
gagggttgccaactctttgcgctga

SEQ ID NO: 3422012 - DNA, 25 bp, Homo sapien
aatgagagcgattccaattgggcgg

SEQ ID NO: 3422013 - DNA, 25 bp, Homo sapien
cctgatatatgggagtaccggctgc

SEQ ID NO: 3422014 - DNA, 25 bp, Homo sapien
gggctgccggactccatgtcggaac

SEQ ID NO: 3422015 - DNA, 25 bp, Homo sapien
ttttgcactgccaatcgtagccgcg

SEQ ID NO: 3422016 - DNA, 25 bp, Homo sapien
aacttctgcgacacggattggtctt

SEQ ID NO: 3422017 - DNA, 25 bp, Homo sapien
gctggccgcgcccattggttctgat

SEQ ID NO: 3422018 - DNA, 25 bp, Homo sapien
tggaacctactagaagctaccggga

SEQ ID NO: 3422019 - DNA, 25 bp, Homo sapien
cgccgccttctggaacctactagaa

SEQ ID NO: 3422020 - DNA, 25 bp, Homo sapien
cgttgaatcgaatccgtccgctccg

SEQ ID NO: 3422021 - DNA, 25 bp, Homo sapien
gcagcgcggtccggaaccccgttga

SEQ ID NO: 3422022 - DNA, 25 bp, Homo sapien
ctgcggcccgcaccctccccaacat

SEQ ID NO: 3422023 - DNA, 25 bp, Homo sapien
cctgcggcccgcaccctccccaaca

SEQ ID NO: 3422024 - DNA, 25 bp, Homo sapien
tccaccccgccccctgcggcccgca

SEQ ID NO: 3422025 - DNA, 25 bp, Homo sapien
ccaagtcactgaaaggaagcagcaa

SEQ ID NO: 3422026 - DNA, 25 bp, Homo sapien
gacagcttcaaatcgaacaaaacct

SEQ ID NO: 3422027 - DNA, 25 bp, Homo sapien
ttcataaccgcaagctactgaggac

SEQ ID NO: 3422028 - DNA, 25 bp, Homo sapien
aagcagcaaccgcttcaaactcggc

SEQ ID NO: 3422029 - DNA, 25 bp, Homo sapien
ggcccaggctggagggagacggagt

SEQ ID NO: 3422030 - DNA, 25 bp, Homo sapien
ccaggctggagggagacggagtctc

SEQ ID NO: 3422031 - DNA, 25 bp, Homo sapien
caggctggagggagacggagtctcg

SEQ ID NO: 3422032 - DNA, 25 bp, Homo sapien
gcccaggctggagggagacggagtc

SEQ ID NO: 3422033 - DNA, 25 bp, Homo sapien
gccatgccagtttgctgtcctaagt

SEQ ID NO: 3422034 - DNA, 25 bp, Homo sapien
gatggtgggctcaaacacacctggg

SEQ ID NO: 3422035 - DNA, 25 bp, Homo sapien
tgcacccggcccaacttgagtattt

SEQ ID NO: 3422036 - DNA, 25 bp, Homo sapien
taatcctagtgctaatgaagtggga

SEQ ID NO: 3422037 - DNA, 25 bp, Homo sapien
tcatcgatgttacccacgctcaggg

SEQ ID NO: 3422038 - DNA, 25 bp, Homo sapien
gccatcctcataagccttctggtag

SEQ ID NO: 3422039 - DNA, 25 bp, Homo sapien
tcaggctttaggtcgacagtcttgc

SEQ ID NO: 3422040 - DNA, 25 bp, Homo sapien
tcttggcataggcagcagaacggtt

SEQ ID NO: 3422041 - DNA, 25 bp, Homo sapien
tctggaagggtctgaagggcctctc

SEQ ID NO: 3422042 - DNA, 25 bp, Homo sapien
aactatcagtgtatcaggacaggta

SEQ ID NO: 3422043 - DNA, 25 bp, Homo sapien
ggacaggtaaacctcaggccaccaa

SEQ ID NO: 3422044 - DNA, 25 bp, Homo sapien
cagggaggtgggtaggtaactatca

SEQ ID NO: 3422045 - DNA, 25 bp, Homo sapien
tgagccactgtaccgggcctcttcc

SEQ ID NO: 3422046 - DNA, 25 bp, Homo sapien
cctccgcttgccaggctcaggtgat

SEQ ID NO: 3422047 - DNA, 25 bp, Homo sapien
caaacctttgggctccagtaatcct

SEQ ID NO: 3422048 - DNA, 25 bp, Homo sapien
agggtcttgccgtgtcacctgggct

SEQ ID NO: 3422049 - DNA, 25 bp, Homo sapien
cctcctcataggttcgcttggcttc

SEQ ID NO: 3422050 - DNA, 25 bp, Homo sapien
caggtcagaaggcttgtttcgtagc

SEQ ID NO: 3422051 - DNA, 25 bp, Homo sapien
tgtttcgtagctgctctatcagctc

SEQ ID NO: 3422052 - DNA, 25 bp, Homo sapien
cagaaggcttgtttcgtagctgctc

SEQ ID NO: 3422053 - DNA, 25 bp, Homo sapien
gcttgtttcgtagctgctctatcag

SEQ ID NO: 3422054 - DNA, 25 bp, Homo sapien
gcccagatcgaccccaaggaggacg

SEQ ID NO: 3422055 - DNA, 25 bp, Homo sapien
ccagatcgaccccaaggaggacgct

SEQ ID NO: 3422056 - DNA, 25 bp, Homo sapien
cagatcgaccccaaggaggacgctg

SEQ ID NO: 3422057 - DNA, 25 bp, Homo sapien
catgatccggggatcttgtagtttc

SEQ ID NO: 3422058 - DNA, 25 bp, Homo sapien
taaaagagtgctgcttagcggacac

SEQ ID NO: 3422059 - DNA, 25 bp, Homo sapien
aaatgaaatcgttgaggcacatgcc

SEQ ID NO: 3422060 - DNA, 25 bp, Homo sapien
cattcttcggatcacgacaaggacg

SEQ ID NO: 3422061 - DNA, 25 bp, Homo sapien
caaaggcctagggattgatgtggac

SEQ ID NO: 3422062 - DNA, 25 bp, Homo sapien
tgcttcaaggctgtgtcaaagtctt

SEQ ID NO: 3422063 - DNA, 25 bp, Homo sapien
ttcaaggctgtgtcaaagtctttct

SEQ ID NO: 3422064 - DNA, 25 bp, Homo sapien
tattgtagtcgcccttttcaaagta

SEQ ID NO: 3422065 - DNA, 25 bp, Homo sapien
cacttattgtagtcgcccttttcaa

SEQ ID NO: 3422066 - DNA, 25 bp, Homo sapien
cttattgtagtcgcccttttcaaag

SEQ ID NO: 3422067 - DNA, 25 bp, Homo sapien
attgtagtcgcccttttcaaagtat

SEQ ID NO: 3422068 - DNA, 25 bp, Homo sapien
tgttatagaaatggatggcatcctt

SEQ ID NO: 3422069 - DNA, 25 bp, Homo sapien
gtgctctgccagagacttgttatag

SEQ ID NO: 3422070 - DNA, 25 bp, Homo sapien
gaagtaggagttgccaattcgagca

SEQ ID NO: 3422071 - DNA, 25 bp, Homo sapien
tctttgaagtaggagttgccaattc

SEQ ID NO: 3422072 - DNA, 25 bp, Homo sapien
tttctgaaaacactcgttgcctttg

SEQ ID NO: 3422073 - DNA, 25 bp, Homo sapien
tgaaaacactcgttgcctttgttct

SEQ ID NO: 3422074 - DNA, 25 bp, Homo sapien
caggtcggggtttatgtaggccagc

SEQ ID NO: 3422075 - DNA, 25 bp, Homo sapien
tctgaaaacactcgttgcctttgtt

SEQ ID NO: 3422076 - DNA, 25 bp, Homo sapien
ttggcatctttcgggttccttttga

SEQ ID NO: 3422077 - DNA, 25 bp, Homo sapien
aggcagctcgattgctgtataattt

SEQ ID NO: 3422078 - DNA, 25 bp, Homo sapien
ggcatctttcgggttccttttgatg

SEQ ID NO: 3422079 - DNA, 25 bp, Homo sapien
caggcagctcgattgctgtataatt

SEQ ID NO: 3422080 - DNA, 25 bp, Homo sapien
gacaactagacaaaatgcgtgggcc

SEQ ID NO: 3422081 - DNA, 25 bp, Homo sapien
cagtacaggcaactcaagcatgtgg

SEQ ID NO: 3422082 - DNA, 25 bp, Homo sapien
tcccttggacaagctcagtacaggc

SEQ ID NO: 3422083 - DNA, 25 bp, Homo sapien
gcctggactctgcaagaggctgatg

SEQ ID NO: 3422084 - DNA, 25 bp, Homo sapien
ggtcggctccagctggatacattcc

SEQ ID NO: 3422085 - DNA, 25 bp, Homo sapien
ggctccagctggatacattcctcac

SEQ ID NO: 3422086 - DNA, 25 bp, Homo sapien
gctccagctggatacattcctcaca

SEQ ID NO: 3422087 - DNA, 25 bp, Homo sapien
tcggctccagctggatacattcctc

SEQ ID NO: 3422088 - DNA, 25 bp, Homo sapien
ccagcgcagcggctttccgtgtata

SEQ ID NO: 3422089 - DNA, 25 bp, Homo sapien
gcggctttccgtgtataacccttga

SEQ ID NO: 3422090 - DNA, 25 bp, Homo sapien
cttcatcgcttccagcgcagcggct

SEQ ID NO: 3422091 - DNA, 25 bp, Homo sapien
cgcagcggctttccgtgtataaccc

SEQ ID NO: 3422092 - DNA, 25 bp, Homo sapien
ctggagtccaggtctagcgccttct

SEQ ID NO: 3422093 - DNA, 25 bp, Homo sapien
agtccaggtctagcgccttctggta

SEQ ID NO: 3422094 - DNA, 25 bp, Homo sapien
caggtctagcgccttctggtacaca

SEQ ID NO: 3422095 - DNA, 25 bp, Homo sapien
tctggtacacatccatggctttggt

SEQ ID NO: 3422096 - DNA, 25 bp, Homo sapien
gcgtgttaggaccacccagctcact

SEQ ID NO: 3422097 - DNA, 25 bp, Homo sapien
agacaaaggtgaagcgtgttaggac

SEQ ID NO: 3422098 - DNA, 25 bp, Homo sapien
aggtgaagcgtgttaggaccaccca

SEQ ID NO: 3422099 - DNA, 25 bp, Homo sapien
aagagacaaaggtgaagcgtgttag

SEQ ID NO: 3422100 - DNA, 25 bp, Homo sapien
ggtcggccatggctcgtcgcttcac

SEQ ID NO: 3422101 - DNA, 25 bp, Homo sapien
tgcgccatcatacagcgctggtagc

SEQ ID NO: 3422102 - DNA, 25 bp, Homo sapien
atggctcgtcgcttcacatcttcgg

SEQ ID NO: 3422103 - DNA, 25 bp, Homo sapien
atacagcgctggtagccgtctgccg

SEQ ID NO: 3422104 - DNA, 25 bp, Homo sapien
gactgcttaagctatcacgactaac

SEQ ID NO: 3422105 - DNA, 25 bp, Homo sapien
gctctcagagcaagccccaattcaa

SEQ ID NO: 3422106 - DNA, 25 bp, Homo sapien
gaacttgccagtcctactcttgagc

SEQ ID NO: 3422107 - DNA, 25 bp, Homo sapien
ctacagaggaagacgcagttacttg

SEQ ID NO: 3422108 - DNA, 25 bp, Homo sapien
tgtgctattacaggattctttaagt

SEQ ID NO: 3422109 - DNA, 25 bp, Homo sapien
tctggatcttctgtgctattacagg

SEQ ID NO: 3422110 - DNA, 25 bp, Homo sapien
tggatcttctgtgctattacaggat

SEQ ID NO: 3422111 - DNA, 25 bp, Homo sapien
tcttctgtgctattacaggattctt

SEQ ID NO: 3422112 - DNA, 25 bp, Homo sapien
caacgtgagacagctgggacctgag

SEQ ID NO: 3422113 - DNA, 25 bp, Homo sapien
agcggcggcacaaacagcgcaggta

SEQ ID NO: 3422114 - DNA, 25 bp, Homo sapien
agagcagccgagacagcaactaggg

SEQ ID NO: 3422115 - DNA, 25 bp, Homo sapien
aaaaccaactatgggagagcagccg

SEQ ID NO: 3422116 - DNA, 25 bp, Homo sapien
agctctgcgcaggacagcggccttt

SEQ ID NO: 3422117 - DNA, 25 bp, Homo sapien
agtagagcaaggcacgtccgccacc

SEQ ID NO: 3422118 - DNA, 25 bp, Homo sapien
ctgccctaggatgtggacttcagta

SEQ ID NO: 3422119 - DNA, 25 bp, Homo sapien
gacagcggcctttccagtgaacaca

SEQ ID NO: 3422120 - DNA, 25 bp, Homo sapien
ctctttggagcttccttcagggcag

SEQ ID NO: 3422121 - DNA, 25 bp, Homo sapien
cttgcttgtgccttatcacgagcag

SEQ ID NO: 3422122 - DNA, 25 bp, Homo sapien
ccttatcacgagcagggcgggttca

SEQ ID NO: 3422123 - DNA, 25 bp, Homo sapien
ggtctcgggctacacccctgtgggc

SEQ ID NO: 3422124 - DNA, 25 bp, Homo sapien
ctggtaggcctccgggtttgggcag

SEQ ID NO: 3422125 - DNA, 25 bp, Homo sapien
tggtaggcctccgggtttgggcaga

SEQ ID NO: 3422126 - DNA, 25 bp, Homo sapien
aggagcaccccgccgatgtgcgact

SEQ ID NO: 3422127 - DNA, 25 bp, Homo sapien
gactccccagtgacccgcagggtga

SEQ ID NO: 3422128 - DNA, 25 bp, Homo sapien
cgcagggtgaccgactcggcctctg

SEQ ID NO: 3422129 - DNA, 25 bp, Homo sapien
cgcagctcccatgacgagtcgatgt

SEQ ID NO: 3422130 - DNA, 25 bp, Homo sapien
gttcccaccaaatagcatggtctga

SEQ ID NO: 3422131 - DNA, 25 bp, Homo sapien
catggtctgaccagtcctgcttgcg

SEQ ID NO: 3422132 - DNA, 25 bp, Homo sapien
cgtcggccaggatcccgtacttgtc

SEQ ID NO: 3422133 - DNA, 25 bp, Homo sapien
tgtccagtgtccagtgggtctgcag

SEQ ID NO: 3422134 - DNA, 25 bp, Homo sapien
ccccagccaagacaaccttgctcaa

SEQ ID NO: 3422135 - DNA, 25 bp, Homo sapien
aaccttgctcaagtcatagagctct

SEQ ID NO: 3422136 - DNA, 25 bp, Homo sapien
aggagcccggagcagggacagctcc

SEQ ID NO: 3422137 - DNA, 25 bp, Homo sapien
gacagctcctcggggtgccggatgc

SEQ ID NO: 3422138 - DNA, 25 bp, Homo sapien
ggcgctgtccgagaagtgagctggc

SEQ ID NO: 3422139 - DNA, 25 bp, Homo sapien
ctgggccgtggcagacgctggagca

SEQ ID NO: 3422140 - DNA, 25 bp, Homo sapien
tcttgtctgacagggagctgggccg

SEQ ID NO: 3422141 - DNA, 25 bp, Homo sapien
catgtggtagcaggcctcagtctgg

SEQ ID NO: 3422142 - DNA, 25 bp, Homo sapien
tgtagtacttgaagcgcagccagag

SEQ ID NO: 3422143 - DNA, 25 bp, Homo sapien
cttgggatccaaatcgaagaagctg

SEQ ID NO: 3422144 - DNA, 25 bp, Homo sapien
tgatgccctgctgcatgagacaccg

SEQ ID NO: 3422145 - DNA, 25 bp, Homo sapien
agagtgcgtccccggccttgatgcc

SEQ ID NO: 3422146 - DNA, 25 bp, Homo sapien
tcggtgcagtcaatctcctccagca

SEQ ID NO: 3422147 - DNA, 25 bp, Homo sapien
cctcctcggtgcagtcaatctcctc

SEQ ID NO: 3422148 - DNA, 25 bp, Homo sapien
tgcagggcggcaaacaccatcatct

SEQ ID NO: 3422149 - DNA, 25 bp, Homo sapien
tgctcatacagctgtgtcagccgca

SEQ ID NO: 3422150 - DNA, 25 bp, Homo sapien
tccaggttgctcagggccacatcca

SEQ ID NO: 3422151 - DNA, 25 bp, Homo sapien
tccccgctctgggacagcttgttga

SEQ ID NO: 3422152 - DNA, 25 bp, Homo sapien
tccaggtcgtccagccctgggtctg

SEQ ID NO: 3422153 - DNA, 25 bp, Homo sapien
atctgtgggcgccgacccctccagc

SEQ ID NO: 3422154 - DNA, 25 bp, Homo sapien
gatggtccttgagctctgggatggt

SEQ ID NO: 3422155 - DNA, 25 bp, Homo sapien
tggtccttgagctctgggatggtgg

SEQ ID NO: 3422156 - DNA, 25 bp, Homo sapien
gagatggtccttgagctctgggatg

SEQ ID NO: 3422157 - DNA, 25 bp, Homo sapien
ggtccttgagctctgggatggtggt

SEQ ID NO: 3422158 - DNA, 25 bp, Homo sapien
cctcgtcctggctcttgtagtagga

SEQ ID NO: 3422159 - DNA, 25 bp, Homo sapien
ttgaacaccacccagtgttggcggt

SEQ ID NO: 3422160 - DNA, 25 bp, Homo sapien
gttgagctgctgaatggggtcccca

SEQ ID NO: 3422161 - DNA, 25 bp, Homo sapien
gtagtaggacagtgtggtctccttg

SEQ ID NO: 3422162 - DNA, 25 bp, Homo sapien
gggcactaggagtttaatgcagaac

SEQ ID NO: 3422163 - DNA, 25 bp, Homo sapien
aacttctggccggagacgttaacat

SEQ ID NO: 3422164 - DNA, 25 bp, Homo sapien
gtagatctcactcatgccctcaggg

SEQ ID NO: 3422165 - DNA, 25 bp, Homo sapien
gttaacatcgggaaccacctcacag

SEQ ID NO: 3422166 - DNA, 25 bp, Homo sapien
cagtgctaaccaagcttgatgctcc

SEQ ID NO: 3422167 - DNA, 25 bp, Homo sapien
gctaaccaagcttgatgctcctcag

SEQ ID NO: 3422168 - DNA, 25 bp, Homo sapien
taaccaagcttgatgctcctcagcc

SEQ ID NO: 3422169 - DNA, 25 bp, Homo sapien
gggacagtgctaaccaagcttgatg

SEQ ID NO: 3422170 - DNA, 25 bp, Homo sapien
cagccatccagcgggcatactgctg

SEQ ID NO: 3422171 - DNA, 25 bp, Homo sapien
tggccttgaactttcgctggaaacg

SEQ ID NO: 3422172 - DNA, 25 bp, Homo sapien
gcccgtgcgctgcaggctgaggaag

SEQ ID NO: 3422173 - DNA, 25 bp, Homo sapien
tgctgtcggccatggtgcggccttt

SEQ ID NO: 3422174 - DNA, 25 bp, Homo sapien
ctgcactgcgccaggctgcaaggtg

SEQ ID NO: 3422175 - DNA, 25 bp, Homo sapien
gggtgacagcatgtgagcctgggaa

SEQ ID NO: 3422176 - DNA, 25 bp, Homo sapien
gcagatctgcactgcgccaggctgc

SEQ ID NO: 3422177 - DNA, 25 bp, Homo sapien
gggaccatactggtgacgggctgcc

SEQ ID NO: 3422178 - DNA, 25 bp, Homo sapien
ccagcgacaactgggccacattctg

SEQ ID NO: 3422179 - DNA, 25 bp, Homo sapien
atgaagcgcagctgggcctctgcca

SEQ ID NO: 3422180 - DNA, 25 bp, Homo sapien
agatgccgaagtcgggcagggactg

SEQ ID NO: 3422181 - DNA, 25 bp, Homo sapien
ctgaccatgacataggagatgccga

SEQ ID NO: 3422182 - DNA, 25 bp, Homo sapien
gttgacattccactggcgcatgttg

SEQ ID NO: 3422183 - DNA, 25 bp, Homo sapien
gctgaaacgccaggtcttgaccacg

SEQ ID NO: 3422184 - DNA, 25 bp, Homo sapien
cccacggccaagtcgatgcggatca

SEQ ID NO: 3422185 - DNA, 25 bp, Homo sapien
gatcagtcggttgttggcgatgccc

SEQ ID NO: 3422186 - DNA, 25 bp, Homo sapien
aatgtagcccccgatatactcgtgt

SEQ ID NO: 3422187 - DNA, 25 bp, Homo sapien
agctgaaggccacattgatgtgttc

SEQ ID NO: 3422188 - DNA, 25 bp, Homo sapien
tcccgcgtcgacaggaaaatgtagc

SEQ ID NO: 3422189 - DNA, 25 bp, Homo sapien
tgtacaattcggcagctggcagaca

SEQ ID NO: 3422190 - DNA, 25 bp, Homo sapien
ctcagccactcagacaaggaaaggg

SEQ ID NO: 3422191 - DNA, 25 bp, Homo sapien
ttcatcatcctgtagctacatctgg

SEQ ID NO: 3422192 - DNA, 25 bp, Homo sapien
aaagggggcaccacatgagctcagg

SEQ ID NO: 3422193 - DNA, 25 bp, Homo sapien
gtgatggtacagcgtctggccctgc

SEQ ID NO: 3422194 - DNA, 25 bp, Homo sapien
gctcctggctgaccgtgtgaccttg

SEQ ID NO: 3422195 - DNA, 25 bp, Homo sapien
gggtggtgaacttaatgagccgtat

SEQ ID NO: 3422196 - DNA, 25 bp, Homo sapien
ttgggcaagtctggcctgctgggcc

SEQ ID NO: 3422197 - DNA, 25 bp, Homo sapien
ttccacgcggcttttcattggcggg

SEQ ID NO: 3422198 - DNA, 25 bp, Homo sapien
gttcaggcgccccaaatgcccatgt

SEQ ID NO: 3422199 - DNA, 25 bp, Homo sapien
gtctgcctccgacccggggcgcgcg

SEQ ID NO: 3422200 - DNA, 25 bp, Homo sapien
tccagaggtcttgggttcaggcgcc

SEQ ID NO: 3422201 - DNA, 25 bp, Homo sapien
ggtctgcctccgacccggggcgcgc

SEQ ID NO: 3422202 - DNA, 25 bp, Homo sapien
agtaaaacgtgccatcttccccgca

SEQ ID NO: 3422203 - DNA, 25 bp, Homo sapien
tcctgagggtatccgcagcgcttct

SEQ ID NO: 3422204 - DNA, 25 bp, Homo sapien
agggtatccaggacgcccgggcatc

SEQ ID NO: 3422205 - DNA, 25 bp, Homo sapien
ggagccccgagtcccgcagggtatc

SEQ ID NO: 3422206 - DNA, 25 bp, Homo sapien
agtctcggtaggaagtaaggcccag

SEQ ID NO: 3422207 - DNA, 25 bp, Homo sapien
gaagacaaggaagtcatcggctgtg

SEQ ID NO: 3422208 - DNA, 25 bp, Homo sapien
agataggcctgcgtgtcaccccagt

SEQ ID NO: 3422209 - DNA, 25 bp, Homo sapien
cagctgagctggaccagttggtgcc

SEQ ID NO: 3422210 - DNA, 25 bp, Homo sapien
ttccagagaaataccaggccaattt

SEQ ID NO: 3422211 - DNA, 25 bp, Homo sapien
ctgggaggattgggagggtggagag

SEQ ID NO: 3422212 - DNA, 25 bp, Homo sapien
gtggactgccctgagcaaacttcca

SEQ ID NO: 3422213 - DNA, 25 bp, Homo sapien
gcaggtggactgccctgagcaaact

SEQ ID NO: 3422214 - DNA, 25 bp, Homo sapien
ctcccgtgttttctagtttctcaca

SEQ ID NO: 3422215 - DNA, 25 bp, Homo sapien
ccgtgttttctagtttctcacagga

SEQ ID NO: 3422216 - DNA, 25 bp, Homo sapien
tcctcccgtgttttctagtttctca

SEQ ID NO: 3422217 - DNA, 25 bp, Homo sapien
caaaggagatacacagggggcaggg

SEQ ID NO: 3422218 - DNA, 25 bp, Homo sapien
tagtgatcctgagtctggtgtcctt

SEQ ID NO: 3422219 - DNA, 25 bp, Homo sapien
tggcacagtgtaagagagttagtga

SEQ ID NO: 3422220 - DNA, 25 bp, Homo sapien
ccttgagggtctgatgtggcacagt

SEQ ID NO: 3422221 - DNA, 25 bp, Homo sapien
gtgtaagagagttagtgatcctgag

SEQ ID NO: 3422222 - DNA, 25 bp, Homo sapien
ccccatctcaggaccagcaagccta

SEQ ID NO: 3422223 - DNA, 25 bp, Homo sapien
catctcaggaccagcaagcctatac

SEQ ID NO: 3422224 - DNA, 25 bp, Homo sapien
tgccccatctcaggaccagcaagcc

SEQ ID NO: 3422225 - DNA, 25 bp, Homo sapien
ctgtgagaggtcaggctcagcccct

SEQ ID NO: 3422226 - DNA, 25 bp, Homo sapien
cactggaaaagagttcatgtaccac

SEQ ID NO: 3422227 - DNA, 25 bp, Homo sapien
aagagttcatgtaccaccagctgcc

SEQ ID NO: 3422228 - DNA, 25 bp, Homo sapien
gaaaagagttcatgtaccaccagct

SEQ ID NO: 3422229 - DNA, 25 bp, Homo sapien
tggaaaagagttcatgtaccaccag

SEQ ID NO: 3422230 - DNA, 25 bp, Homo sapien
aagaatccaaggcagagggtactga

SEQ ID NO: 3422231 - DNA, 25 bp, Homo sapien
gaattccactccaagtatgtatagc

SEQ ID NO: 3422232 - DNA, 25 bp, Homo sapien
tactgagggctagaattccactcca

SEQ ID NO: 3422233 - DNA, 25 bp, Homo sapien
tatgtatagctgcaaagccaacttc

SEQ ID NO: 3422234 - DNA, 25 bp, Homo sapien
caccctgccacacttactccttttt

SEQ ID NO: 3422235 - DNA, 25 bp, Homo sapien
ccctgccacacttactcctttttct

SEQ ID NO: 3422236 - DNA, 25 bp, Homo sapien
accacaccctgccacacttactcct

SEQ ID NO: 3422237 - DNA, 25 bp, Homo sapien
cacaccctgccacacttactccttt

SEQ ID NO: 3422238 - DNA, 25 bp, Homo sapien
tgaaaaaccgcctgttacctgtgta

SEQ ID NO: 3422239 - DNA, 25 bp, Homo sapien
acatccctgcccgtctcaatgaaaa

SEQ ID NO: 3422240 - DNA, 25 bp, Homo sapien
gaggtcccacctatcaatgccactg

SEQ ID NO: 3422241 - DNA, 25 bp, Homo sapien
gggaggtcccacctatcaatgccac

SEQ ID NO: 3422242 - DNA, 25 bp, Homo sapien
ggctcagggtgagcagcggcaggtt

SEQ ID NO: 3422243 - DNA, 25 bp, Homo sapien
tcagggtgagcagcggcaggttcac

SEQ ID NO: 3422244 - DNA, 25 bp, Homo sapien
ctggctcagggtgagcagcggcagg

SEQ ID NO: 3422245 - DNA, 25 bp, Homo sapien
ctcagggtgagcagcggcaggttca

SEQ ID NO: 3422246 - DNA, 25 bp, Homo sapien
tggacatagaactcggcactggctc

SEQ ID NO: 3422247 - DNA, 25 bp, Homo sapien
actggctcggccagcactggtctca

SEQ ID NO: 3422248 - DNA, 25 bp, Homo sapien
cactggtctcatttcgggcgatgcc

SEQ ID NO: 3422249 - DNA, 25 bp, Homo sapien
atttcgggcgatgcccaacagcagg

SEQ ID NO: 3422250 - DNA, 25 bp, Homo sapien
ttcccaagacccaggatcatgtacc

SEQ ID NO: 3422251 - DNA, 25 bp, Homo sapien
acaagaacacaagggtggcttagtg

SEQ ID NO: 3422252 - DNA, 25 bp, Homo sapien
cttagtgggtgaccagcccctgcgg

SEQ ID NO: 3422253 - DNA, 25 bp, Homo sapien
caggatcatgtacccgagcctactc

SEQ ID NO: 3422254 - DNA, 25 bp, Homo sapien
tcgggtcccccactcaggtagtgct

SEQ ID NO: 3422255 - DNA, 25 bp, Homo sapien
aagaagattcctgtagactcgtggg

SEQ ID NO: 3422256 - DNA, 25 bp, Homo sapien
ccccactcaggtagtgcttcctcac

SEQ ID NO: 3422257 - DNA, 25 bp, Homo sapien
ctgtagactcgtgggcctcgggtcc

SEQ ID NO: 3422258 - DNA, 25 bp, Homo sapien
gatatgcattgccaggcctctgcag

SEQ ID NO: 3422259 - DNA, 25 bp, Homo sapien
aacacctcccctacaagatatgcat

SEQ ID NO: 3422260 - DNA, 25 bp, Homo sapien
ggcctccaagcaagatggtttgtca

SEQ ID NO: 3422261 - DNA, 25 bp, Homo sapien
acaacgagacccaggcattcaagct

SEQ ID NO: 3422262 - DNA, 25 bp, Homo sapien
gccgaggggcagagttcagcccaca

SEQ ID NO: 3422263 - DNA, 25 bp, Homo sapien
tgatggcgcctttggccgaggggca

SEQ ID NO: 3422264 - DNA, 25 bp, Homo sapien
ccacatctccgtctcgagcaatctc

SEQ ID NO: 3422265 - DNA, 25 bp, Homo sapien
gttcagcccacatctccgtctcgag

SEQ ID NO: 3422266 - DNA, 25 bp, Homo sapien
cagagcggcgggagtagggctgggg

SEQ ID NO: 3422267 - DNA, 25 bp, Homo sapien
tcagagcggcgggagtagggctggg

SEQ ID NO: 3422268 - DNA, 25 bp, Homo sapien
agagcggcgggagtagggctgggga

SEQ ID NO: 3422269 - DNA, 25 bp, Homo sapien
gagcggcgggagtagggctggggac

SEQ ID NO: 3422270 - DNA, 25 bp, Homo sapien
ttacagaaatagcagatgccaacgg

SEQ ID NO: 3422271 - DNA, 25 bp, Homo sapien
acagaaatagcagatgccaacggaa

SEQ ID NO: 3422272 - DNA, 25 bp, Homo sapien
tctgttacagaaatagcagatgcca

SEQ ID NO: 3422273 - DNA, 25 bp, Homo sapien
tctctgttacagaaatagcagatgc

SEQ ID NO: 3422274 - DNA, 25 bp, Homo sapien
tctgcggctttgtgacgttttcggc

SEQ ID NO: 3422275 - DNA, 25 bp, Homo sapien
accgtgtctccgttccgctgttgct

SEQ ID NO: 3422276 - DNA, 25 bp, Homo sapien
tatatcttacggagctgcttccgcc

SEQ ID NO: 3422277 - DNA, 25 bp, Homo sapien
ggacagagcccgctctctgcggctt

SEQ ID NO: 3422278 - DNA, 25 bp, Homo sapien
cgcccctacatgtctattggccttt

SEQ ID NO: 3422279 - DNA, 25 bp, Homo sapien
tacatgtctattggcctttggtgcc

SEQ ID NO: 3422280 - DNA, 25 bp, Homo sapien
gagaccccgcccctacatgtctatt

SEQ ID NO: 3422281 - DNA, 25 bp, Homo sapien
gtcccccagcctgcggactcgctgg

SEQ ID NO: 3422282 - DNA, 25 bp, Homo sapien
tctcattggcgtggatgccaagacc

SEQ ID NO: 3422283 - DNA, 25 bp, Homo sapien
cattggcgtggatgccaagaccacg

SEQ ID NO: 3422284 - DNA, 25 bp, Homo sapien
attctcattggcgtggatgccaaga

SEQ ID NO: 3422285 - DNA, 25 bp, Homo sapien
ggcgtggatgccaagaccacgtcca

SEQ ID NO: 3422286 - DNA, 25 bp, Homo sapien
ggaccagacccgcgtgtccttggac

SEQ ID NO: 3422287 - DNA, 25 bp, Homo sapien
gaaaggaggctaccaagagcgcatt

SEQ ID NO: 3422288 - DNA, 25 bp, Homo sapien
tagacttcaagcacccgggggcaga

SEQ ID NO: 3422289 - DNA, 25 bp, Homo sapien
cgttgttctgcaaaggaagactgaa

SEQ ID NO: 3422290 - DNA, 25 bp, Homo sapien
aggcgcaggggcagtaagggcggca

SEQ ID NO: 3422291 - DNA, 25 bp, Homo sapien
caggcgcaggggcagtaagggcggc

SEQ ID NO: 3422292 - DNA, 25 bp, Homo sapien
ggttgcggggccacagccggcacag

SEQ ID NO: 3422293 - DNA, 25 bp, Homo sapien
ggcgcaggggcagtaagggcggcat

SEQ ID NO: 3422294 - DNA, 25 bp, Homo sapien
gaaggcgagggttacctgagacaaa

SEQ ID NO: 3422295 - DNA, 25 bp, Homo sapien
cgagggttacctgagacaaacctgg

SEQ ID NO: 3422296 - DNA, 25 bp, Homo sapien
cgcttaaatcggtgtatgaccttgg

SEQ ID NO: 3422297 - DNA, 25 bp, Homo sapien
cctcctctgccgcttaaatcggtgt

SEQ ID NO: 3422298 - DNA, 25 bp, Homo sapien
tcaggcatagtgcaggtcaggattt

SEQ ID NO: 3422299 - DNA, 25 bp, Homo sapien
tgggccacacccttcaactcagcca

SEQ ID NO: 3422300 - DNA, 25 bp, Homo sapien
ggcatagtgcaggtcaggatttctc

SEQ ID NO: 3422301 - DNA, 25 bp, Homo sapien
tggacagagtcccaaaccttgcagg

SEQ ID NO: 3422302 - DNA, 25 bp, Homo sapien
acagttcataataagtactgggtct

SEQ ID NO: 3422303 - DNA, 25 bp, Homo sapien
tggcaccaggatgcacccccaacag

SEQ ID NO: 3422304 - DNA, 25 bp, Homo sapien
gatgcacccccaacagttcataata

SEQ ID NO: 3422305 - DNA, 25 bp, Homo sapien
caggatgcacccccaacagttcata

SEQ ID NO: 3422306 - DNA, 25 bp, Homo sapien
tgccactccctatgagggctgaaaa

SEQ ID NO: 3422307 - DNA, 25 bp, Homo sapien
gaaaaaatgtggcacccgccagaga

SEQ ID NO: 3422308 - DNA, 25 bp, Homo sapien
gcaggcaggcaggtcaagaaaacca

SEQ ID NO: 3422309 - DNA, 25 bp, Homo sapien
cattcaccatatgccctggtccagg

SEQ ID NO: 3422310 - DNA, 25 bp, Homo sapien
ggtggggcaggactccccttatctc

SEQ ID NO: 3422311 - DNA, 25 bp, Homo sapien
tcagctccacaaagcggctgtgcag

SEQ ID NO: 3422312 - DNA, 25 bp, Homo sapien
agcacacggtatgcctcgctcagct

SEQ ID NO: 3422313 - DNA, 25 bp, Homo sapien
ctgagcacacggtatgcctcgctca

SEQ ID NO: 3422314 - DNA, 25 bp, Homo sapien
cagctccacaaagcggctgtgcagg

SEQ ID NO: 3422315 - DNA, 25 bp, Homo sapien
atagctgcggcggctctgctcacgg

SEQ ID NO: 3422316 - DNA, 25 bp, Homo sapien
gggactacctgagcggagctggtca

SEQ ID NO: 3422317 - DNA, 25 bp, Homo sapien
agcggagctggtcatcatagctgcg

SEQ ID NO: 3422318 - DNA, 25 bp, Homo sapien
cctgagcggagctggtcatcatagc

SEQ ID NO: 3422319 - DNA, 25 bp, Homo sapien
tgtcatggactgtggttcgtggaga

SEQ ID NO: 3422320 - DNA, 25 bp, Homo sapien
tgtggcctcacgctgtgaaactggg

SEQ ID NO: 3422321 - DNA, 25 bp, Homo sapien
ggcaatgtagtgcaggcccatgccc

SEQ ID NO: 3422322 - DNA, 25 bp, Homo sapien
gcccatgcccgccagcatgaggagg

SEQ ID NO: 3422323 - DNA, 25 bp, Homo sapien
ctgaaggcaatgtagtgcaggccca

SEQ ID NO: 3422324 - DNA, 25 bp, Homo sapien
gcagctcttagcttgagagacacaa

SEQ ID NO: 3422325 - DNA, 25 bp, Homo sapien
gacacaagagtacgggccacgaggt

SEQ ID NO: 3422326 - DNA, 25 bp, Homo sapien
gtggaggactggctgaccacactgg

SEQ ID NO: 3422327 - DNA, 25 bp, Homo sapien
gagaggctccagagaccaacttcaa

SEQ ID NO: 3422328 - DNA, 25 bp, Homo sapien
tcctgtgatagatagggagggctca

SEQ ID NO: 3422329 - DNA, 25 bp, Homo sapien
ccttacacagggttaggaacctcag

SEQ ID NO: 3422330 - DNA, 25 bp, Homo sapien
gaaagggtatgcgtctaactccatc

SEQ ID NO: 3422331 - DNA, 25 bp, Homo sapien
ggtccaatggcatccgaagtccctg

SEQ ID NO: 3422332 - DNA, 25 bp, Homo sapien
tagaaggctgtgatgatccgatcct

SEQ ID NO: 3422333 - DNA, 25 bp, Homo sapien
ggctgtgatgatccgatccttttca

SEQ ID NO: 3422334 - DNA, 25 bp, Homo sapien
tgcccgggcttcgttgtagaaggct

SEQ ID NO: 3422335 - DNA, 25 bp, Homo sapien
gcttcgttgtagaaggctgtgatga

SEQ ID NO: 3422336 - DNA, 25 bp, Homo sapien
agggcacctgggtggttgggatagg

SEQ ID NO: 3422337 - DNA, 25 bp, Homo sapien
tagggatcccgaagtgtggttcctg

SEQ ID NO: 3422338 - DNA, 25 bp, Homo sapien
cacctgggtggttgggatagggatc

SEQ ID NO: 3422339 - DNA, 25 bp, Homo sapien
tgggatagggatcccgaagtgtggt

SEQ ID NO: 3422340 - DNA, 25 bp, Homo sapien
ggttggctcggatggtggcggctgc

SEQ ID NO: 3422341 - DNA, 25 bp, Homo sapien
gttgtcgctcctgctgaaggatgcc

SEQ ID NO: 3422342 - DNA, 25 bp, Homo sapien
ccttgggttggctcggatggtggcg

SEQ ID NO: 3422343 - DNA, 25 bp, Homo sapien
gccgctgccctagccgttgtcgctc

SEQ ID NO: 3422344 - DNA, 25 bp, Homo sapien
gaacgcactgcaggccccatccagg

SEQ ID NO: 3422345 - DNA, 25 bp, Homo sapien
gcgggaacgcactgcaggccccatc

SEQ ID NO: 3422346 - DNA, 25 bp, Homo sapien
gggaacgcactgcaggccccatcca

SEQ ID NO: 3422347 - DNA, 25 bp, Homo sapien
aaggaagcaaagcgggaacgcactg

SEQ ID NO: 3422348 - DNA, 25 bp, Homo sapien
ttattgcgcgcgtttcggggagcgg

SEQ ID NO: 3422349 - DNA, 25 bp, Homo sapien
ctttattgcgcgcgtttcggggagc

SEQ ID NO: 3422350 - DNA, 25 bp, Homo sapien
tttattgcgcgcgtttcggggagcg

SEQ ID NO: 3422351 - DNA, 25 bp, Homo sapien
agagccccatggcgcgggcccgggc

SEQ ID NO: 3422352 - DNA, 25 bp, Homo sapien
cgggggcgcccgcatcgccctagcc

SEQ ID NO: 3422353 - DNA, 25 bp, Homo sapien
cgcatcgccctagcccggcggcgcg

SEQ ID NO: 3422354 - DNA, 25 bp, Homo sapien
gggcgcccgcatcgccctagcccgg

SEQ ID NO: 3422355 - DNA, 25 bp, Homo sapien
ggccagctgcaggagtgcggcgagc

SEQ ID NO: 3422356 - DNA, 25 bp, Homo sapien
tggccaggggcatcaggctgggaga

SEQ ID NO: 3422357 - DNA, 25 bp, Homo sapien
ggtggccaggggcatcaggctggga

SEQ ID NO: 3422358 - DNA, 25 bp, Homo sapien
ctttcctctggtggccaggggcatc

SEQ ID NO: 3422359 - DNA, 25 bp, Homo sapien
gccaggggcatcaggctgggagaca

SEQ ID NO: 3422360 - DNA, 25 bp, Homo sapien
caggtagcgcgagtatacacatcta

SEQ ID NO: 3422361 - DNA, 25 bp, Homo sapien
ctggcaggtagcgcgagtatacaca

SEQ ID NO: 3422362 - DNA, 25 bp, Homo sapien
cgcgagtatacacatctatccatga

SEQ ID NO: 3422363 - DNA, 25 bp, Homo sapien
tagcgcgagtatacacatctatcca

SEQ ID NO: 3422364 - DNA, 25 bp, Homo sapien
acagcgctgcacagtcacgcagctg

SEQ ID NO: 3422365 - DNA, 25 bp, Homo sapien
caccacagcgctgcacagtcacgca

SEQ ID NO: 3422366 - DNA, 25 bp, Homo sapien
gcgctgcacagtcacgcagctgggc

SEQ ID NO: 3422367 - DNA, 25 bp, Homo sapien
accacagcgctgcacagtcacgcag

SEQ ID NO: 3422368 - DNA, 25 bp, Homo sapien
ccagctgactgctcgggtaccggat

SEQ ID NO: 3422369 - DNA, 25 bp, Homo sapien
cagctgactgctcgggtaccggatc

SEQ ID NO: 3422370 - DNA, 25 bp, Homo sapien
ctgactgctcgggtaccggatcatg

SEQ ID NO: 3422371 - DNA, 25 bp, Homo sapien
actgctcgggtaccggatcatgagg

SEQ ID NO: 3422372 - DNA, 25 bp, Homo sapien
cacagacaaacaagaggaagatcag

SEQ ID NO: 3422373 - DNA, 25 bp, Homo sapien
ctgaaaagtaagatagacagacaca

SEQ ID NO: 3422374 - DNA, 25 bp, Homo sapien
aagaggaagatcaggaaatcccagc

SEQ ID NO: 3422375 - DNA, 25 bp, Homo sapien
atcaggaaatcccagcatcctactc

SEQ ID NO: 3422376 - DNA, 25 bp, Homo sapien
tggcttcacagcactgtcctttttt

SEQ ID NO: 3422377 - DNA, 25 bp, Homo sapien
ctgtctggcttcacagcactgtcct

SEQ ID NO: 3422378 - DNA, 25 bp, Homo sapien
cacagcactgtccttttttttaggt

SEQ ID NO: 3422379 - DNA, 25 bp, Homo sapien
ttcacagcactgtccttttttttag

SEQ ID NO: 3422380 - DNA, 25 bp, Homo sapien
gaggagcaacagcttctggactcac

SEQ ID NO: 3422381 - DNA, 25 bp, Homo sapien
tacccctactcagctggagtccaaa

SEQ ID NO: 3422382 - DNA, 25 bp, Homo sapien
agcttctggactcacttgtactccc

SEQ ID NO: 3422383 - DNA, 25 bp, Homo sapien
cccatacccctactcagctggagtc

SEQ ID NO: 3422384 - DNA, 25 bp, Homo sapien
cagcccggaacagaacggggctggg

SEQ ID NO: 3422385 - DNA, 25 bp, Homo sapien
cccagcccggaacagaacggggctg

SEQ ID NO: 3422386 - DNA, 25 bp, Homo sapien
agagtcccagcccggaacagaacgg

SEQ ID NO: 3422387 - DNA, 25 bp, Homo sapien
ccagcccggaacagaacggggctgg

SEQ ID NO: 3422388 - DNA, 25 bp, Homo sapien
ctaagccccgcccttggcaacggag

SEQ ID NO: 3422389 - DNA, 25 bp, Homo sapien
tgtccctcctgtatctgactcctga

SEQ ID NO: 3422390 - DNA, 25 bp, Homo sapien
gttggacttgcttatacagctccag

SEQ ID NO: 3422391 - DNA, 25 bp, Homo sapien
ctctgctggcattgtccctcctgta

SEQ ID NO: 3422392 - DNA, 25 bp, Homo sapien
tagaatgttggacttgcttatacag

SEQ ID NO: 3422393 - DNA, 25 bp, Homo sapien
tctgaggcaagtcaccctgctgagt

SEQ ID NO: 3422394 - DNA, 25 bp, Homo sapien
tattgactgggctatccctgactcc

SEQ ID NO: 3422395 - DNA, 25 bp, Homo sapien
gactcccatgcgtggcaataacttg

SEQ ID NO: 3422396 - DNA, 25 bp, Homo sapien
ccactgggatatagcctctgaggca

SEQ ID NO: 3422397 - DNA, 25 bp, Homo sapien
gcgtcctcgtcgctaccaggccggg

SEQ ID NO: 3422398 - DNA, 25 bp, Homo sapien
gccctcccttattggaccgtgcgaa

SEQ ID NO: 3422399 - DNA, 25 bp, Homo sapien
gctggcacgggtctttcccgagccc

SEQ ID NO: 3422400 - DNA, 25 bp, Homo sapien
gagtcaaccccggtggtgctgccgc

SEQ ID NO: 3422401 - DNA, 25 bp, Homo sapien
ttgacactcggagcccggtccgctt

SEQ ID NO: 3422402 - DNA, 25 bp, Homo sapien
ctagctctcgttgacactcggagcc

SEQ ID NO: 3422403 - DNA, 25 bp, Homo sapien
gcctgatccagcctgccctcttgca

SEQ ID NO: 3422404 - DNA, 25 bp, Homo sapien
cggtccgcttctgcccggcctgatc

SEQ ID NO: 3422405 - DNA, 25 bp, Homo sapien
gactccgccccgtgcggcgtgagaa

SEQ ID NO: 3422406 - DNA, 25 bp, Homo sapien
gtagccacgccactcaccggctgaa

SEQ ID NO: 3422407 - DNA, 25 bp, Homo sapien
cctgcggcatctccggacagctccg

SEQ ID NO: 3422408 - DNA, 25 bp, Homo sapien
cgccttcgacagaactagacccctt

SEQ ID NO: 3422409 - DNA, 25 bp, Homo sapien
cgcccggggccattactcgggccag

SEQ ID NO: 3422410 - DNA, 25 bp, Homo sapien
caccacggagaccacccccgcgagg

SEQ ID NO: 3422411 - DNA, 25 bp, Homo sapien
cggggccattactcgggccaggctc

SEQ ID NO: 3422412 - DNA, 25 bp, Homo sapien
cacggagaccacccccgcgaggacg

SEQ ID NO: 3422413 - DNA, 25 bp, Homo sapien
ccggccccgaggcacccacacatcc

SEQ ID NO: 3422414 - DNA, 25 bp, Homo sapien
tctcccggtggagttctcggcctac

SEQ ID NO: 3422415 - DNA, 25 bp, Homo sapien
gtccagcacaccaacacctctgcgg

SEQ ID NO: 3422416 - DNA, 25 bp, Homo sapien
tcctcgggagataccccccagcctg

SEQ ID NO: 3422417 - DNA, 25 bp, Homo sapien
tgcactgcagttgccccgactgggc

SEQ ID NO: 3422418 - DNA, 25 bp, Homo sapien
tcagttcccgcctgtccctttacgc

SEQ ID NO: 3422419 - DNA, 25 bp, Homo sapien
tggctgcactgcagttgccccgact

SEQ ID NO: 3422420 - DNA, 25 bp, Homo sapien
aaagtccagaccctatctggctgca

SEQ ID NO: 3422421 - DNA, 25 bp, Homo sapien
tgtatcttccttgccccgggggatc

SEQ ID NO: 3422422 - DNA, 25 bp, Homo sapien
tatggaacacgggtaggtaacagga

SEQ ID NO: 3422423 - DNA, 25 bp, Homo sapien
aggagggttccaccgccactgtatc

SEQ ID NO: 3422424 - DNA, 25 bp, Homo sapien
gcagggagagtatggaacacgggta

SEQ ID NO: 3422425 - DNA, 25 bp, Homo sapien
cggcgctcaggcagatggacagtac

SEQ ID NO: 3422426 - DNA, 25 bp, Homo sapien
cgtgtagtgcatgtgcaggacatcc

SEQ ID NO: 3422427 - DNA, 25 bp, Homo sapien
cctttgcgcgatttgatgggacagt

SEQ ID NO: 3422428 - DNA, 25 bp, Homo sapien
gtactgtcaggacccggaaccagct

SEQ ID NO: 3422429 - DNA, 25 bp, Homo sapien
cagcccttgatgacctggcctgtgc

SEQ ID NO: 3422430 - DNA, 25 bp, Homo sapien
ccagcccttgatgacctggcctgtg

SEQ ID NO: 3422431 - DNA, 25 bp, Homo sapien
cccttgatgacctggcctgtgccaa

SEQ ID NO: 3422432 - DNA, 25 bp, Homo sapien
agggagaagacaaagggctggttct

SEQ ID NO: 3422433 - DNA, 25 bp, Homo sapien
cctcccacagcttacctcctgggcg

SEQ ID NO: 3422434 - DNA, 25 bp, Homo sapien
acagcttacctcctgggcggtggcc

SEQ ID NO: 3422435 - DNA, 25 bp, Homo sapien
ccacagcttacctcctgggcggtgg

SEQ ID NO: 3422436 - DNA, 25 bp, Homo sapien
ctcccaagcccattcccccatgact

SEQ ID NO: 3422437 - DNA, 25 bp, Homo sapien
tcaccagcttgcgcttttccccctc

SEQ ID NO: 3422438 - DNA, 25 bp, Homo sapien
gctcggatgggatcaccagcttgcg

SEQ ID NO: 3422439 - DNA, 25 bp, Homo sapien
ctagctcggatgggatcaccagctt

SEQ ID NO: 3422440 - DNA, 25 bp, Homo sapien
ctcggatgggatcaccagcttgcgc

SEQ ID NO: 3422441 - DNA, 25 bp, Homo sapien
gcaaagggagagtgttccgcccctc

SEQ ID NO: 3422442 - DNA, 25 bp, Homo sapien
gttgaagatgcacaaagaaacagtc

SEQ ID NO: 3422443 - DNA, 25 bp, Homo sapien
aaacagtcagtgatggccaagctcc

SEQ ID NO: 3422444 - DNA, 25 bp, Homo sapien
tgagtgcttcaatgatcttgccctg

SEQ ID NO: 3422445 - DNA, 25 bp, Homo sapien
tttgggggagctccccgctctccat

SEQ ID NO: 3422446 - DNA, 25 bp, Homo sapien
gaatctttgggggagctccccgctc

SEQ ID NO: 3422447 - DNA, 25 bp, Homo sapien
ctggaatctttgggggagctccccg

SEQ ID NO: 3422448 - DNA, 25 bp, Homo sapien
aatctttgggggagctccccgctct

SEQ ID NO: 3422449 - DNA, 25 bp, Homo sapien
gagaaggggagtcaaaatgccaacc

SEQ ID NO: 3422450 - DNA, 25 bp, Homo sapien
ggagaaggggagtcaaaatgccaac

SEQ ID NO: 3422451 - DNA, 25 bp, Homo sapien
agaaggggagtcaaaatgccaacca

SEQ ID NO: 3422452 - DNA, 25 bp, Homo sapien
gcaggtgatgggaggtatcaaaagg

SEQ ID NO: 3422453 - DNA, 25 bp, Homo sapien
acctcgaacaccagggttgcaccac

SEQ ID NO: 3422454 - DNA, 25 bp, Homo sapien
cagttcgtcgctctattttgagcag

SEQ ID NO: 3422455 - DNA, 25 bp, Homo sapien
tcgctctattttgagcagctccacc

SEQ ID NO: 3422456 - DNA, 25 bp, Homo sapien
ttacagctcagttcgtcgctctatt

SEQ ID NO: 3422457 - DNA, 25 bp, Homo sapien
tggggtatgctggagctgaggtctc

SEQ ID NO: 3422458 - DNA, 25 bp, Homo sapien
tgaggtctctgagtctctcagggcc

SEQ ID NO: 3422459 - DNA, 25 bp, Homo sapien
cacacacaggcttactccttgggct

SEQ ID NO: 3422460 - DNA, 25 bp, Homo sapien
ttggaacagtctggtccctgatggg

SEQ ID NO: 3422461 - DNA, 25 bp, Homo sapien
tttatattgactctgcggcgcgggc

SEQ ID NO: 3422462 - DNA, 25 bp, Homo sapien
caggagaacggtggctcccacagga

SEQ ID NO: 3422463 - DNA, 25 bp, Homo sapien
tgagcagggctcctcgtgcccctgg

SEQ ID NO: 3422464 - DNA, 25 bp, Homo sapien
acctcgtagcaacagcaataccggg

SEQ ID NO: 3422465 - DNA, 25 bp, Homo sapien
gctggttgactgttacaaacccaca

SEQ ID NO: 3422466 - DNA, 25 bp, Homo sapien
gctgctggttgactgttacaaaccc

SEQ ID NO: 3422467 - DNA, 25 bp, Homo sapien
ggagctgctggttgactgttacaaa

SEQ ID NO: 3422468 - DNA, 25 bp, Homo sapien
ctaggagctgctggttgactgttac

SEQ ID NO: 3422469 - DNA, 25 bp, Homo sapien
aactggagattgacgtggatgagct

SEQ ID NO: 3422470 - DNA, 25 bp, Homo sapien
cagaactggagattgacgtggatga

SEQ ID NO: 3422471 - DNA, 25 bp, Homo sapien
ctggacatggagagtgacgatgccc

SEQ ID NO: 3422472 - DNA, 25 bp, Homo sapien
agatcccagaactggagattgacgt

SEQ ID NO: 3422473 - DNA, 25 bp, Homo sapien
gactgtggttacaaggtgctggtct

SEQ ID NO: 3422474 - DNA, 25 bp, Homo sapien
tgcccgctgggttagactgtggtta

SEQ ID NO: 3422475 - DNA, 25 bp, Homo sapien
ccgctgggttagactgtggttacaa

SEQ ID NO: 3422476 - DNA, 25 bp, Homo sapien
cctggtgcccgctgggttagactgt

SEQ ID NO: 3422477 - DNA, 25 bp, Homo sapien
tctgccttctccgttgcctcggacc

SEQ ID NO: 3422478 - DNA, 25 bp, Homo sapien
gcgccgacaccccaaaatcggtctc

SEQ ID NO: 3422479 - DNA, 25 bp, Homo sapien
tgtcactggagtcaaagggcgcttt

SEQ ID NO: 3422480 - DNA, 25 bp, Homo sapien
tgcctgacctaagtcacttctgcct

SEQ ID NO: 3422481 - DNA, 25 bp, Homo sapien
gagggcccagtgaggcgccaaggga

SEQ ID NO: 3422482 - DNA, 25 bp, Homo sapien
ggagcagctcacgcgcctctacgac

SEQ ID NO: 3422483 - DNA, 25 bp, Homo sapien
cagtgaggcgccaagggaaggtcac

SEQ ID NO: 3422484 - DNA, 25 bp, Homo sapien
agctcacgcgcctctacgactgcca

SEQ ID NO: 3422485 - DNA, 25 bp, Homo sapien
cagatagcccctattctcagatggc

SEQ ID NO: 3422486 - DNA, 25 bp, Homo sapien
tccaatgaagactagggtcctggcg

SEQ ID NO: 3422487 - DNA, 25 bp, Homo sapien
ggtcctggcgtgagcgcaaatcgtc

SEQ ID NO: 3422488 - DNA, 25 bp, Homo sapien
gcaaatcgtcgtcctgagcgcttag

SEQ ID NO: 3422489 - DNA, 25 bp, Homo sapien
cctctgtgcgcactcgggtcgcgag

SEQ ID NO: 3422490 - DNA, 25 bp, Homo sapien
tgcccagctctttgcgccttagttt

SEQ ID NO: 3422491 - DNA, 25 bp, Homo sapien
agaggacgccccaaacaactttgcg

SEQ ID NO: 3422492 - DNA, 25 bp, Homo sapien
tattattataagtcgcggcccccgc

SEQ ID NO: 3422493 - DNA, 25 bp, Homo sapien
aatgaatgagaccatttaaagatgc

SEQ ID NO: 3422494 - DNA, 25 bp, Homo sapien
agggaatgggatgcgccgtcggctt

SEQ ID NO: 3422495 - DNA, 25 bp, Homo sapien
ccgtcggcttattggaggtgggcca

SEQ ID NO: 3422496 - DNA, 25 bp, Homo sapien
tgggagacagacaatacacgaatga

SEQ ID NO: 3422497 - DNA, 25 bp, Homo sapien
caggtcggcgcaggcctcagccccg

SEQ ID NO: 3422498 - DNA, 25 bp, Homo sapien
gcctcagccccgtggcactcacaat

SEQ ID NO: 3422499 - DNA, 25 bp, Homo sapien
aggcctcagccccgtggcactcaca

SEQ ID NO: 3422500 - DNA, 25 bp, Homo sapien
cagaccaggtcggcgcaggcctcag

SEQ ID NO: 3422501 - DNA, 25 bp, Homo sapien
tttgttcaaccaatgcagcggccta

SEQ ID NO: 3422502 - DNA, 25 bp, Homo sapien
agttcagcgggagccaggtaatttg

SEQ ID NO: 3422503 - DNA, 25 bp, Homo sapien
ttgcctaatagcagtggatttgaag

SEQ ID NO: 3422504 - DNA, 25 bp, Homo sapien
cgagtgtgacatagttctaggtgct

SEQ ID NO: 3422505 - DNA, 25 bp, Homo sapien
ctgtggacacggacatggctggaga

SEQ ID NO: 3422506 - DNA, 25 bp, Homo sapien
tggacacggacatggctggagacct

SEQ ID NO: 3422507 - DNA, 25 bp, Homo sapien
tgtggacacggacatggctggagac

SEQ ID NO: 3422508 - DNA, 25 bp, Homo sapien
ggacacggacatggctggagacctt

SEQ ID NO: 3422509 - DNA, 25 bp, Homo sapien
ctcagcagaacctgattcttcaggc

SEQ ID NO: 3422510 - DNA, 25 bp, Homo sapien
ggctcagcagaacctgattcttcag

SEQ ID NO: 3422511 - DNA, 25 bp, Homo sapien
gctcagcagaacctgattcttcagg

SEQ ID NO: 3422512 - DNA, 25 bp, Homo sapien
cgctccggccccgcggcgtcagtgc

SEQ ID NO: 3422513 - DNA, 25 bp, Homo sapien
tccggccccgcggcgtcagtgcccg

SEQ ID NO: 3422514 - DNA, 25 bp, Homo sapien
cccgcggcgtcagtgcccgcccgcc

SEQ ID NO: 3422515 - DNA, 25 bp, Homo sapien
cggccccgcggcgtcagtgcccgcc

SEQ ID NO: 3422516 - DNA, 25 bp, Homo sapien
cacggagccctgacggggaccgacg

SEQ ID NO: 3422517 - DNA, 25 bp, Homo sapien
gagccctgacggggaccgacggcgc

SEQ ID NO: 3422518 - DNA, 25 bp, Homo sapien
accacggtgggcggctccaactgca

SEQ ID NO: 3422519 - DNA, 25 bp, Homo sapien
catttgatgaacttactcccgcgcc

SEQ ID NO: 3422520 - DNA, 25 bp, Homo sapien
cccatttgatgaacttactcccgcg

SEQ ID NO: 3422521 - DNA, 25 bp, Homo sapien
tgggcggctccaactgcagcgcgtg

SEQ ID NO: 3422522 - DNA, 25 bp, Homo sapien
gcagggtcaccaggttccgactgga

SEQ ID NO: 3422523 - DNA, 25 bp, Homo sapien
tgttggggcccgtccagtacaagaa

SEQ ID NO: 3422524 - DNA, 25 bp, Homo sapien
cacacgcagggtcaccaggttccga

SEQ ID NO: 3422525 - DNA, 25 bp, Homo sapien
tccagtacaagaagaagccattggg

SEQ ID NO: 3422526 - DNA, 25 bp, Homo sapien
caggcgggcgtaccggcctgtccgt

SEQ ID NO: 3422527 - DNA, 25 bp, Homo sapien
ctgtccgtgtgtccctgatggaact

SEQ ID NO: 3422528 - DNA, 25 bp, Homo sapien
accggcctgtccgtgtgtccctgat

SEQ ID NO: 3422529 - DNA, 25 bp, Homo sapien
gcctgtccgtgtgtccctgatggaa

SEQ ID NO: 3422530 - DNA, 25 bp, Homo sapien
ctcccgcacagcctcgctgtggtct

SEQ ID NO: 3422531 - DNA, 25 bp, Homo sapien
ggctcccgcacagcctcgctgtggt

SEQ ID NO: 3422532 - DNA, 25 bp, Homo sapien
gggctcccgcacagcctcgctgtgg

SEQ ID NO: 3422533 - DNA, 25 bp, Homo sapien
agtaggtgacagcgaagggtgaaga

SEQ ID NO: 3422534 - DNA, 25 bp, Homo sapien
cagccgggcatcgggacccccaaag

SEQ ID NO: 3422535 - DNA, 25 bp, Homo sapien
agcccagaacttcccggatcttggg

SEQ ID NO: 3422536 - DNA, 25 bp, Homo sapien
ccaaagcccagaacttcccggatct

SEQ ID NO: 3422537 - DNA, 25 bp, Homo sapien
aaagcccagaacttcccggatcttg

SEQ ID NO: 3422538 - DNA, 25 bp, Homo sapien
catcctgcacggccatgaagttcaa

SEQ ID NO: 3422539 - DNA, 25 bp, Homo sapien
gtctggcccagacaccaccgtcatc

SEQ ID NO: 3422540 - DNA, 25 bp, Homo sapien
cagacaccaccgtcatcagcttctc

SEQ ID NO: 3422541 - DNA, 25 bp, Homo sapien
ttggctgtgtcatcctgcacggcca

SEQ ID NO: 3422542 - DNA, 25 bp, Homo sapien
gcttgaatagctcctcagaccagac

SEQ ID NO: 3422543 - DNA, 25 bp, Homo sapien
tgcgcaggaaggtgttccgggaggc

SEQ ID NO: 3422544 - DNA, 25 bp, Homo sapien
gatgttcatagccagcttgaatagc

SEQ ID NO: 3422545 - DNA, 25 bp, Homo sapien
ttcatagccagcttgaatagctcct

SEQ ID NO: 3422546 - DNA, 25 bp, Homo sapien
ttcttgacggggatccgaccatcct

SEQ ID NO: 3422547 - DNA, 25 bp, Homo sapien
tgacggggatccgaccatcctggtt

SEQ ID NO: 3422548 - DNA, 25 bp, Homo sapien
gacggggatccgaccatcctggttc

SEQ ID NO: 3422549 - DNA, 25 bp, Homo sapien
cttgacggggatccgaccatcctgg

SEQ ID NO: 3422550 - DNA, 25 bp, Homo sapien
tccagcgcagtctccacccgcttct

SEQ ID NO: 3422551 - DNA, 25 bp, Homo sapien
aatttgaggccacaggattccagcg

SEQ ID NO: 3422552 - DNA, 25 bp, Homo sapien
ttgaggccacaggattccagcgcag

SEQ ID NO: 3422553 - DNA, 25 bp, Homo sapien
aggccacaggattccagcgcagtct

SEQ ID NO: 3422554 - DNA, 25 bp, Homo sapien
ccaaggaaaactcatcaggccggat

SEQ ID NO: 3422555 - DNA, 25 bp, Homo sapien
gaaccgctcaaagatttccaaggaa

SEQ ID NO: 3422556 - DNA, 25 bp, Homo sapien
ccagcaggatcttgtcaatgtccgg

SEQ ID NO: 3422557 - DNA, 25 bp, Homo sapien
tcaatgtccggccgcagacacagct

SEQ ID NO: 3422558 - DNA, 25 bp, Homo sapien
ggtacagcacttcgttgagtctcgg

SEQ ID NO: 3422559 - DNA, 25 bp, Homo sapien
tcaggtatggcttgcccttggcgcc

SEQ ID NO: 3422560 - DNA, 25 bp, Homo sapien
atacttttcgatgagcagccgggcc

SEQ ID NO: 3422561 - DNA, 25 bp, Homo sapien
ctcgggtcgcgttgcttctggttga

SEQ ID NO: 3422562 - DNA, 25 bp, Homo sapien
taggtgttatgcgaggagttgatga

SEQ ID NO: 3422563 - DNA, 25 bp, Homo sapien
gtgagataggtgttatgcgaggagt

SEQ ID NO: 3422564 - DNA, 25 bp, Homo sapien
ctcccaggtagcggctaaagccctc

SEQ ID NO: 3422565 - DNA, 25 bp, Homo sapien
tgggtcatgtccgtgctcagatcca

SEQ ID NO: 3422566 - DNA, 25 bp, Homo sapien
tccacatggttctcgaaggagagga

SEQ ID NO: 3422567 - DNA, 25 bp, Homo sapien
gcacgtcgcgcagaggcacctctgt

SEQ ID NO: 3422568 - DNA, 25 bp, Homo sapien
cagcggcagccccatagtagtgcct

SEQ ID NO: 3422569 - DNA, 25 bp, Homo sapien
gtagggcgaggtcttgaaggcagtc

SEQ ID NO: 3422570 - DNA, 25 bp, Homo sapien
tgagtagcgcgtctccaaagatgga

SEQ ID NO: 3422571 - DNA, 25 bp, Homo sapien
gtacttgtccagaggctcgatgagt

SEQ ID NO: 3422572 - DNA, 25 bp, Homo sapien
tccagaggctcgatgagtagcgcgt

SEQ ID NO: 3422573 - DNA, 25 bp, Homo sapien
aagatggagcggcagtactcagcca

SEQ ID NO: 3422574 - DNA, 25 bp, Homo sapien
ttcaccaggatacggcccatcaggt

SEQ ID NO: 3422575 - DNA, 25 bp, Homo sapien
gtggccgcggagctctcgctcaggg

SEQ ID NO: 3422576 - DNA, 25 bp, Homo sapien
cgctgggtcggtgccgcttcttgtt

SEQ ID NO: 3422577 - DNA, 25 bp, Homo sapien
agggcagaattgctctgctccaggg

SEQ ID NO: 3422578 - DNA, 25 bp, Homo sapien
gggcagctgtcagagctgggagacc

SEQ ID NO: 3422579 - DNA, 25 bp, Homo sapien
ctcctccccattgctcaggcctggg

SEQ ID NO: 3422580 - DNA, 25 bp, Homo sapien
tcaggcctgggcagctgtcagagct

SEQ ID NO: 3422581 - DNA, 25 bp, Homo sapien
ctccccattgctcaggcctgggcag

SEQ ID NO: 3422582 - DNA, 25 bp, Homo sapien
gccctcgtcacccagagacttctga

SEQ ID NO: 3422583 - DNA, 25 bp, Homo sapien
gaacataggggcctcggttcaggcc

SEQ ID NO: 3422584 - DNA, 25 bp, Homo sapien
tagttggctttttggggtctgtctg

SEQ ID NO: 3422585 - DNA, 25 bp, Homo sapien
tgtagttggctttttggggtctgtc

SEQ ID NO: 3422586 - DNA, 25 bp, Homo sapien
tcgatgtagttgacaagcgtggaca

SEQ ID NO: 3422587 - DNA, 25 bp, Homo sapien
tcagtggcattcacctcgctgctgg

SEQ ID NO: 3422588 - DNA, 25 bp, Homo sapien
ggacttgaacttgacaggttcgatg

SEQ ID NO: 3422589 - DNA, 25 bp, Homo sapien
ttcgagcagcctcaaaggacttgaa

SEQ ID NO: 3422590 - DNA, 25 bp, Homo sapien
catggggctcttggtcagttgctcc

SEQ ID NO: 3422591 - DNA, 25 bp, Homo sapien
cacaaaggacgacatctcgaagcat

SEQ ID NO: 3422592 - DNA, 25 bp, Homo sapien
cgacatctcgaagcatttgttcctc

SEQ ID NO: 3422593 - DNA, 25 bp, Homo sapien
ttggtctccacaaaggacgacatct

SEQ ID NO: 3422594 - DNA, 25 bp, Homo sapien
agttgagcgcaacaagctggcaccc

SEQ ID NO: 3422595 - DNA, 25 bp, Homo sapien
ggaagttgagcgcaacaagctggca

SEQ ID NO: 3422596 - DNA, 25 bp, Homo sapien
aacaagctggcaccctacgttccag

SEQ ID NO: 3422597 - DNA, 25 bp, Homo sapien
ggcaccctacgttccagaagagctg

SEQ ID NO: 3422598 - DNA, 25 bp, Homo sapien
tgacccgcaaggcattggccacgat

SEQ ID NO: 3422599 - DNA, 25 bp, Homo sapien
ggccgccgcatgaactccggcttga

SEQ ID NO: 3422600 - DNA, 25 bp, Homo sapien
ttgtactcaaaaacgcccgcgttga

SEQ ID NO: 3422601 - DNA, 25 bp, Homo sapien
catccacgatgacctcagtgaaggg

SEQ ID NO: 3422602 - DNA, 25 bp, Homo sapien
tcgaagggctcttcgtcccacacgg

SEQ ID NO: 3422603 - DNA, 25 bp, Homo sapien
agatgcccaccttcctgtcggacag

SEQ ID NO: 3422604 - DNA, 25 bp, Homo sapien
gttgaacgagttcccctgagaggtc

SEQ ID NO: 3422605 - DNA, 25 bp, Homo sapien
tatcaacagggaggccaaacatgtc

SEQ ID NO: 3422606 - DNA, 25 bp, Homo sapien
ctgtgggccagactggagctgagcc

SEQ ID NO: 3422607 - DNA, 25 bp, Homo sapien
ccacagccatcaaagcttaacaaag

SEQ ID NO: 3422608 - DNA, 25 bp, Homo sapien
tgtgggccagactggagctgagcca

SEQ ID NO: 3422609 - DNA, 25 bp, Homo sapien
tgggccagactggagctgagccaca

SEQ ID NO: 3422610 - DNA, 25 bp, Homo sapien
tgcaatgcgaagtgaagccagcgtg

SEQ ID NO: 3422611 - DNA, 25 bp, Homo sapien
caaaggctgcaatgcgaagtgaagc

SEQ ID NO: 3422612 - DNA, 25 bp, Homo sapien
gcaggatccggtgccctacgaattt

SEQ ID NO: 3422613 - DNA, 25 bp, Homo sapien
cagagacaggcaggatccggtgccc

SEQ ID NO: 3422614 - DNA, 25 bp, Homo sapien
tggtcaggaaggcaacgttgggttg

SEQ ID NO: 3422615 - DNA, 25 bp, Homo sapien
gggccctacccactgcccgctgtgc

SEQ ID NO: 3422616 - DNA, 25 bp, Homo sapien
ggccctacccactgcccgctgtgct

SEQ ID NO: 3422617 - DNA, 25 bp, Homo sapien
ggaaggcaacgttgggttgctgggc

SEQ ID NO: 3422618 - DNA, 25 bp, Homo sapien
gcacagcggttggttggcctcgttc

SEQ ID NO: 3422619 - DNA, 25 bp, Homo sapien
ctggtggtcgtcaggaatgtagtcc

SEQ ID NO: 3422620 - DNA, 25 bp, Homo sapien
ttccgcaggcagacgtagtggtatc

SEQ ID NO: 3422621 - DNA, 25 bp, Homo sapien
tccgaggcttcggtgtagatgagca

SEQ ID NO: 3422622 - DNA, 25 bp, Homo sapien
gggttgatcagggcctccgcatagt

SEQ ID NO: 3422623 - DNA, 25 bp, Homo sapien
ccatcaggctgacgtgcttaatggg

SEQ ID NO: 3422624 - DNA, 25 bp, Homo sapien
ggccctctggtccatcaggctgacg

SEQ ID NO: 3422625 - DNA, 25 bp, Homo sapien
cttaatggggttgatcagggcctcc

SEQ ID NO: 3422626 - DNA, 25 bp, Homo sapien
ctgagactgggtgtcctggcacgtc

SEQ ID NO: 3422627 - DNA, 25 bp, Homo sapien
gcggggggaggcatccagtgggctg

SEQ ID NO: 3422628 - DNA, 25 bp, Homo sapien
tttgaggacggctgagaccccagct

SEQ ID NO: 3422629 - DNA, 25 bp, Homo sapien
tggcacgtctcttggccagcctgag

SEQ ID NO: 3422630 - DNA, 25 bp, Homo sapien
gctggcgatgagatcatcacgctgc

SEQ ID NO: 3422631 - DNA, 25 bp, Homo sapien
atgctggcgatgagatcatcacgct

SEQ ID NO: 3422632 - DNA, 25 bp, Homo sapien
tgctggcgatgagatcatcacgctg

SEQ ID NO: 3422633 - DNA, 25 bp, Homo sapien
ctggcgatgagatcatcacgctgcc

SEQ ID NO: 3422634 - DNA, 25 bp, Homo sapien
gtgagggtgactgccttccgctgat

SEQ ID NO: 3422635 - DNA, 25 bp, Homo sapien
cgctcttgccggctccggagcttga

SEQ ID NO: 3422636 - DNA, 25 bp, Homo sapien
ttgtgacctcggagctcatccagcg

SEQ ID NO: 3422637 - DNA, 25 bp, Homo sapien
tccggagcttgaccagagccttgtg

SEQ ID NO: 3422638 - DNA, 25 bp, Homo sapien
ccccctccttcgtgtcctccacatc

SEQ ID NO: 3422639 - DNA, 25 bp, Homo sapien
ctggaactcctgataccgctttgcc

SEQ ID NO: 3422640 - DNA, 25 bp, Homo sapien
ccttcgtgtcctccacatcagcggc

SEQ ID NO: 3422641 - DNA, 25 bp, Homo sapien
gaactcctgataccgctttgcctcg

SEQ ID NO: 3422642 - DNA, 25 bp, Homo sapien
gtctcaggtgttccagcctccgctg

SEQ ID NO: 3422643 - DNA, 25 bp, Homo sapien
tgtctcaggtgttccagcctccgct

SEQ ID NO: 3422644 - DNA, 25 bp, Homo sapien
ctttcagcctcttgaactgagttgt

SEQ ID NO: 3422645 - DNA, 25 bp, Homo sapien
ttgcatcaaggacgacctccctgag

SEQ ID NO: 3422646 - DNA, 25 bp, Homo sapien
tgtgtttgcatcaaggacgacctcc

SEQ ID NO: 3422647 - DNA, 25 bp, Homo sapien
gaactgagttgtgtttgcatcaagg

SEQ ID NO: 3422648 - DNA, 25 bp, Homo sapien
gctgttatggcgctttctgtccagg

SEQ ID NO: 3422649 - DNA, 25 bp, Homo sapien
ctcatcttggcctccgagatgctgt

SEQ ID NO: 3422650 - DNA, 25 bp, Homo sapien
tgttatggcgctttctgtccaggat

SEQ ID NO: 3422651 - DNA, 25 bp, Homo sapien
cctccgagatgctgttatggcgctt

SEQ ID NO: 3422652 - DNA, 25 bp, Homo sapien
tgccgacggttaatctccgtcagtt

SEQ ID NO: 3422653 - DNA, 25 bp, Homo sapien
gactcagtgatgtgccgacggttaa

SEQ ID NO: 3422654 - DNA, 25 bp, Homo sapien
ccgacggatggagttgactgactca

SEQ ID NO: 3422655 - DNA, 25 bp, Homo sapien
gagttgactgactcagtgatgtgcc

SEQ ID NO: 3422656 - DNA, 25 bp, Homo sapien
caagacggtcatgccgctgcttctg

SEQ ID NO: 3422657 - DNA, 25 bp, Homo sapien
tgctgcccagccacaagacggtcat

SEQ ID NO: 3422658 - DNA, 25 bp, Homo sapien
ggctcctcttctgccagctgttgca

SEQ ID NO: 3422659 - DNA, 25 bp, Homo sapien
ccacaagacggtcatgccgctgctt

SEQ ID NO: 3422660 - DNA, 25 bp, Homo sapien
gcgtgaccgttgctggcacaggcca

SEQ ID NO: 3422661 - DNA, 25 bp, Homo sapien
ccctccggcatctcgcccagcaggc

SEQ ID NO: 3422662 - DNA, 25 bp, Homo sapien
gtcagcgcccgacaggtgcccgctg

SEQ ID NO: 3422663 - DNA, 25 bp, Homo sapien
cgctgctcccgggtgcgtgaccgtt

SEQ ID NO: 3422664 - DNA, 25 bp, Homo sapien
gccctccacccagcgcccgccctgg

SEQ ID NO: 3422665 - DNA, 25 bp, Homo sapien
agcgcccgccctggccctgtggcca

SEQ ID NO: 3422666 - DNA, 25 bp, Homo sapien
gccctgtggccacctcgctcagcca

SEQ ID NO: 3422667 - DNA, 25 bp, Homo sapien
cctgtggccacctcgctcagccagt

SEQ ID NO: 3422668 - DNA, 25 bp, Homo sapien
ctagctcgagggtgtgggtgtcaca

SEQ ID NO: 3422669 - DNA, 25 bp, Homo sapien
agttagctgaggtacttgccccggg

SEQ ID NO: 3422670 - DNA, 25 bp, Homo sapien
atgtgactcctacttcccggagctc

SEQ ID NO: 3422671 - DNA, 25 bp, Homo sapien
ccaaggccctaacctaagactgagg

SEQ ID NO: 3422672 - DNA, 25 bp, Homo sapien
cagtggacaccagctagagtcagga

SEQ ID NO: 3422673 - DNA, 25 bp, Homo sapien
ctgaagacagtccaccacggagggt

SEQ ID NO: 3422674 - DNA, 25 bp, Homo sapien
tgtggcctagcacacgacagatggc

SEQ ID NO: 3422675 - DNA, 25 bp, Homo sapien
gaactgacttggagtgtgtccctca

SEQ ID NO: 3422676 - DNA, 25 bp, Homo sapien
gctaagtcgcgagccaggtttaacc

SEQ ID NO: 3422677 - DNA, 25 bp, Homo sapien
caaaaagaggatccgtgctgtctcc

SEQ ID NO: 3422678 - DNA, 25 bp, Homo sapien
aattgcggtctcatcttctgggtgc

SEQ ID NO: 3422679 - DNA, 25 bp, Homo sapien
ggccgtgctcactaccaaatgttaa

SEQ ID NO: 3422680 - DNA, 25 bp, Homo sapien
tcaaaggatcctcccgcttcaacct

SEQ ID NO: 3422681 - DNA, 25 bp, Homo sapien
ctcaaaggatcctcccgcttcaacc

SEQ ID NO: 3422682 - DNA, 25 bp, Homo sapien
ctcgattcacatacaagggactggg

SEQ ID NO: 3422683 - DNA, 25 bp, Homo sapien
gactcctttaaggtgagcgccagtc

SEQ ID NO: 3422684 - DNA, 25 bp, Homo sapien
tgccaggacctgaagtaccaggccg

SEQ ID NO: 3422685 - DNA, 25 bp, Homo sapien
gaggagctgagattaacgtcgcccc

SEQ ID NO: 3422686 - DNA, 25 bp, Homo sapien
agtagctggaactaaggcgccagcc

SEQ ID NO: 3422687 - DNA, 25 bp, Homo sapien
tttttctcgaggtagagtttcactc

SEQ ID NO: 3422688 - DNA, 25 bp, Homo sapien
gctggaactaaggcgccagccacca

SEQ ID NO: 3422689 - DNA, 25 bp, Homo sapien
ccactgcgcctacttgctttttttt

SEQ ID NO: 3422690 - DNA, 25 bp, Homo sapien
gcaagcgtagtggtcctgtggcccc

SEQ ID NO: 3422691 - DNA, 25 bp, Homo sapien
tgtgtccggcaagcgtagtggtcct

SEQ ID NO: 3422692 - DNA, 25 bp, Homo sapien
tgtccggcaagcgtagtggtcctgt

SEQ ID NO: 3422693 - DNA, 25 bp, Homo sapien
ccttgtgtccggcaagcgtagtggt

SEQ ID NO: 3422694 - DNA, 25 bp, Homo sapien
ggtagcagaggtggtcagcactcac

SEQ ID NO: 3422695 - DNA, 25 bp, Homo sapien
tcattctaaggactctggcattgcc

SEQ ID NO: 3422696 - DNA, 25 bp, Homo sapien
gagttaagagaatccggagtcacag

SEQ ID NO: 3422697 - DNA, 25 bp, Homo sapien
gacctaaagttgaaggtcattctaa

SEQ ID NO: 3422698 - DNA, 25 bp, Homo sapien
gctgaaggacttgttggcagaagtg

SEQ ID NO: 3422699 - DNA, 25 bp, Homo sapien
cttatctccagtgcccccgagatgg

SEQ ID NO: 3422700 - DNA, 25 bp, Homo sapien
aacaataatcacatccgacggctga

SEQ ID NO: 3422701 - DNA, 25 bp, Homo sapien
ccaggcggagcggtaacaatagcaa

SEQ ID NO: 3422702 - DNA, 25 bp, Homo sapien
ctatacccaaatcggggtcgtgccg

SEQ ID NO: 3422703 - DNA, 25 bp, Homo sapien
gctcctctctcctatacccaaatcg

SEQ ID NO: 3422704 - DNA, 25 bp, Homo sapien
ttgtatgggggtccgccagttccca

SEQ ID NO: 3422705 - DNA, 25 bp, Homo sapien
cgccagttcccacgctcctctctcc

SEQ ID NO: 3422706 - DNA, 25 bp, Homo sapien
tctctcctccaataatgcggatggg

SEQ ID NO: 3422707 - DNA, 25 bp, Homo sapien
gcctcctgtcctcgtaattctcgaa

SEQ ID NO: 3422708 - DNA, 25 bp, Homo sapien
ccgtacgagaattggcgcgagctgc

SEQ ID NO: 3422709 - DNA, 25 bp, Homo sapien
gggcgccgttcgctacgcaaattgc

SEQ ID NO: 3422710 - DNA, 25 bp, Homo sapien
tcggtcgttcatgtcgtcctgggtg

SEQ ID NO: 3422711 - DNA, 25 bp, Homo sapien
agccggctgatacccgtcgggtcag

SEQ ID NO: 3422712 - DNA, 25 bp, Homo sapien
tctccaggacagaccggataggggt

SEQ ID NO: 3422713 - DNA, 25 bp, Homo sapien
cagagagacccttgcccttggggaa

SEQ ID NO: 3422714 - DNA, 25 bp, Homo sapien
gacagacaaggagggactgtcggcg

SEQ ID NO: 3422715 - DNA, 25 bp, Homo sapien
aaatacggaggggtgggaattgcag

SEQ ID NO: 3422716 - DNA, 25 bp, Homo sapien
aggagggactgtcggcgggaccagg

SEQ ID NO: 3422717 - DNA, 25 bp, Homo sapien
gacaaggagggactgtcggcgggac

SEQ ID NO: 3422718 - DNA, 25 bp, Homo sapien
atagacggagaagaagagcagggca

SEQ ID NO: 3422719 - DNA, 25 bp, Homo sapien
aagagcagggcatacagggtggtgt

SEQ ID NO: 3422720 - DNA, 25 bp, Homo sapien
agggtggtgtaggcagctgtcagcc

SEQ ID NO: 3422721 - DNA, 25 bp, Homo sapien
tgggcatagacggagaagaagagca

SEQ ID NO: 3422722 - DNA, 25 bp, Homo sapien
tctgatagctgagacgcttgtgccc

SEQ ID NO: 3422723 - DNA, 25 bp, Homo sapien
gtagaggttcataagcgtcaaggtg

SEQ ID NO: 3422724 - DNA, 25 bp, Homo sapien
agaagagggtggtacgcaaggcggc

SEQ ID NO: 3422725 - DNA, 25 bp, Homo sapien
gccaggaacaccgtctgatagctga

SEQ ID NO: 3422726 - DNA, 25 bp, Homo sapien
tcatctccggccgacgcttcacctt

SEQ ID NO: 3422727 - DNA, 25 bp, Homo sapien
aagcctcggctcatctccggccgac

SEQ ID NO: 3422728 - DNA, 25 bp, Homo sapien
ctccggccgacgcttcaccttggcc

SEQ ID NO: 3422729 - DNA, 25 bp, Homo sapien
ctcggctcatctccggccgacgctt

SEQ ID NO: 3422730 - DNA, 25 bp, Homo sapien
tacttcggaaggtgcaccaactgga

SEQ ID NO: 3422731 - DNA, 25 bp, Homo sapien
tacaaatgacgagggcattgcggcc

SEQ ID NO: 3422732 - DNA, 25 bp, Homo sapien
catctctcaagggaggatagtagcc

SEQ ID NO: 3422733 - DNA, 25 bp, Homo sapien
gactgacagccatggtacttcggaa

SEQ ID NO: 3422734 - DNA, 25 bp, Homo sapien
acagcacacagcacgttcaccagca

SEQ ID NO: 3422735 - DNA, 25 bp, Homo sapien
cagatgacgaacagggagtcgctca

SEQ ID NO: 3422736 - DNA, 25 bp, Homo sapien
gtgcccggcgccgatgggagagcac

SEQ ID NO: 3422737 - DNA, 25 bp, Homo sapien
gagtcgctcaccaggacgcggacaa

SEQ ID NO: 3422738 - DNA, 25 bp, Homo sapien
caggtagatgctagtggagggcgcc

SEQ ID NO: 3422739 - DNA, 25 bp, Homo sapien
gtagatgctagtggagggcgcccgc

SEQ ID NO: 3422740 - DNA, 25 bp, Homo sapien
tccaggtagatgctagtggagggcg

SEQ ID NO: 3422741 - DNA, 25 bp, Homo sapien
gcctccaggtagatgctagtggagg

SEQ ID NO: 3422742 - DNA, 25 bp, Homo sapien
tgccgagagacccaaaagacacctg

SEQ ID NO: 3422743 - DNA, 25 bp, Homo sapien
gccgagagacccaaaagacacctgg

SEQ ID NO: 3422744 - DNA, 25 bp, Homo sapien
ctgccgagagacccaaaagacacct

SEQ ID NO: 3422745 - DNA, 25 bp, Homo sapien
aacagaggaccctcagggagagaag

SEQ ID NO: 3422746 - DNA, 25 bp, Homo sapien
caacagaggaccctcagggagagaa

SEQ ID NO: 3422747 - DNA, 25 bp, Homo sapien
aggtaacaacagaggaccctcaggg

SEQ ID NO: 3422748 - DNA, 25 bp, Homo sapien
taacaacagaggaccctcagggaga

SEQ ID NO: 3422749 - DNA, 25 bp, Homo sapien
atcgaaggtgtccagccggctctgg

SEQ ID NO: 3422750 - DNA, 25 bp, Homo sapien
gccaaggccagtgctgtcaggttgt

SEQ ID NO: 3422751 - DNA, 25 bp, Homo sapien
taccagtcgtaatcgaaggtgtcca

SEQ ID NO: 3422752 - DNA, 25 bp, Homo sapien
tggtcagacacattgtaccagtcgt

SEQ ID NO: 3422753 - DNA, 25 bp, Homo sapien
gccagtctgcagtcacgccaaaggg

SEQ ID NO: 3422754 - DNA, 25 bp, Homo sapien
gaggtggcagacatgcgtatgccca

SEQ ID NO: 3422755 - DNA, 25 bp, Homo sapien
aaggtgccacggctactaaggaggt

SEQ ID NO: 3422756 - DNA, 25 bp, Homo sapien
gggccaaggtgccacggctactaag

SEQ ID NO: 3422757 - DNA, 25 bp, Homo sapien
agggtggtgggcagtagctcccaca

SEQ ID NO: 3422758 - DNA, 25 bp, Homo sapien
gaggccaaataccaggtagcctttg

SEQ ID NO: 3422759 - DNA, 25 bp, Homo sapien
tgggcagtagctcccacacgaagag

SEQ ID NO: 3422760 - DNA, 25 bp, Homo sapien
ggtgcacccggaagaagcccaccag

SEQ ID NO: 3422761 - DNA, 25 bp, Homo sapien
tcaaagaagtaggaccgagaggcaa

SEQ ID NO: 3422762 - DNA, 25 bp, Homo sapien
gaccgagaggcaaagacctgcccat

SEQ ID NO: 3422763 - DNA, 25 bp, Homo sapien
gtgcccagcccggtcaaagaagtag

SEQ ID NO: 3422764 - DNA, 25 bp, Homo sapien
gcagccctcatcttcacagtgccca

SEQ ID NO: 3422765 - DNA, 25 bp, Homo sapien
ccaggacaaagtacatctctaggca

SEQ ID NO: 3422766 - DNA, 25 bp, Homo sapien
gaggctttagcaataggaacccagg

SEQ ID NO: 3422767 - DNA, 25 bp, Homo sapien
tctctaggcaagaggtggaggcttt

SEQ ID NO: 3422768 - DNA, 25 bp, Homo sapien
ggaagacaggcttagaacagaaccc

SEQ ID NO: 3422769 - DNA, 25 bp, Homo sapien
tgcagcagagaaacagggtcagtct

SEQ ID NO: 3422770 - DNA, 25 bp, Homo sapien
gggtcagtctcaggacagtgaccag

SEQ ID NO: 3422771 - DNA, 25 bp, Homo sapien
agaaacagggtcagtctcaggacag

SEQ ID NO: 3422772 - DNA, 25 bp, Homo sapien
acagggtcagtctcaggacagtgac

SEQ ID NO: 3422773 - DNA, 25 bp, Homo sapien
tcccagagcctagactgcccgacat

SEQ ID NO: 3422774 - DNA, 25 bp, Homo sapien
ctcccagagcctagactgcccgaca

SEQ ID NO: 3422775 - DNA, 25 bp, Homo sapien
cagctcccagagcctagactgcccg

SEQ ID NO: 3422776 - DNA, 25 bp, Homo sapien
agctcccagagcctagactgcccga

SEQ ID NO: 3422777 - DNA, 25 bp, Homo sapien
cggctcacgcccgatggcaccatac

SEQ ID NO: 3422778 - DNA, 25 bp, Homo sapien
tggctgcccccataccagcccggct

SEQ ID NO: 3422779 - DNA, 25 bp, Homo sapien
agaggagtggtcttcgtctggctgc

SEQ ID NO: 3422780 - DNA, 25 bp, Homo sapien
ggagtggtcttcgtctggctgcccc

SEQ ID NO: 3422781 - DNA, 25 bp, Homo sapien
gtctgtggggtggagtagagactgt

SEQ ID NO: 3422782 - DNA, 25 bp, Homo sapien
ggtggtggccgcctggtcctggcac

SEQ ID NO: 3422783 - DNA, 25 bp, Homo sapien
gagtagagactgtggtggtggccgc

SEQ ID NO: 3422784 - DNA, 25 bp, Homo sapien
tggagtagagactgtggtggtggcc

SEQ ID NO: 3422785 - DNA, 25 bp, Homo sapien
ggcaagaagcggcagacaaacttgg

SEQ ID NO: 3422786 - DNA, 25 bp, Homo sapien
agcggcagacaaacttggcacaggg

SEQ ID NO: 3422787 - DNA, 25 bp, Homo sapien
gagcagcaaggagccggccagagga

SEQ ID NO: 3422788 - DNA, 25 bp, Homo sapien
aagaagcggcagacaaacttggcac

SEQ ID NO: 3422789 - DNA, 25 bp, Homo sapien
ggtggcaggtcatgccagggtgctg

SEQ ID NO: 3422790 - DNA, 25 bp, Homo sapien
aggtggcaggtcatgccagggtgct

SEQ ID NO: 3422791 - DNA, 25 bp, Homo sapien
aggagaggtagctggctccggtgtg

SEQ ID NO: 3422792 - DNA, 25 bp, Homo sapien
ggagaggtagctggctccggtgtgg

SEQ ID NO: 3422793 - DNA, 25 bp, Homo sapien
ttctagccttggaccggagcccagt

SEQ ID NO: 3422794 - DNA, 25 bp, Homo sapien
gccacctggaattggccgacgtgga

SEQ ID NO: 3422795 - DNA, 25 bp, Homo sapien
ggacaggcaccacgctaatctggca

SEQ ID NO: 3422796 - DNA, 25 bp, Homo sapien
ccaggcccattaccggatcgggaag

SEQ ID NO: 3422797 - DNA, 25 bp, Homo sapien
acggcctcgccggtgccgactgggc

SEQ ID NO: 3422798 - DNA, 25 bp, Homo sapien
ccagcacggcctcgccggtgccgac

SEQ ID NO: 3422799 - DNA, 25 bp, Homo sapien
ttccagcacggcctcgccggtgccg

SEQ ID NO: 3422800 - DNA, 25 bp, Homo sapien
ccgggttccagcacggcctcgccgg

SEQ ID NO: 3422801 - DNA, 25 bp, Homo sapien
acgtgtgtggacactagcgtgcaca

SEQ ID NO: 3422802 - DNA, 25 bp, Homo sapien
ctagcgtgcacacgccagacagcag

SEQ ID NO: 3422803 - DNA, 25 bp, Homo sapien
acagcgacgcctcggagcgtggcgg

SEQ ID NO: 3422804 - DNA, 25 bp, Homo sapien
cggaggcgcccacgcgcgagaggtg

SEQ ID NO: 3422805 - DNA, 25 bp, Homo sapien
gcactgtccacagacatccctctgg

SEQ ID NO: 3422806 - DNA, 25 bp, Homo sapien
aaagatccataaagcccccagctgc

SEQ ID NO: 3422807 - DNA, 25 bp, Homo sapien
gcccctgtctgggactaccgggtga

SEQ ID NO: 3422808 - DNA, 25 bp, Homo sapien
ctgcgggcaaaaccagggatgctgg

SEQ ID NO: 3422809 - DNA, 25 bp, Homo sapien
ggcggggggctcctggggagctgtc

SEQ ID NO: 3422810 - DNA, 25 bp, Homo sapien
gggggctcctggggagctgtcgtca

SEQ ID NO: 3422811 - DNA, 25 bp, Homo sapien
ggggggctcctggggagctgtcgtc

SEQ ID NO: 3422812 - DNA, 25 bp, Homo sapien
cggggggctcctggggagctgtcgt

SEQ ID NO: 3422813 - DNA, 25 bp, Homo sapien
ggcgcgcccaggcgccgggccagct

SEQ ID NO: 3422814 - DNA, 25 bp, Homo sapien
gcgcgcccaggcgccgggccagctc

SEQ ID NO: 3422815 - DNA, 25 bp, Homo sapien
ccaggcgccgggccagctccactgc

SEQ ID NO: 3422816 - DNA, 25 bp, Homo sapien
ggcgccgggccagctccactgcccg

SEQ ID NO: 3422817 - DNA, 25 bp, Homo sapien
gggccaggagcgtggtgctgcgcat

SEQ ID NO: 3422818 - DNA, 25 bp, Homo sapien
agtaaagcaagaccagcgccagcag

SEQ ID NO: 3422819 - DNA, 25 bp, Homo sapien
caccaagtaaagcaagaccagcgcc

SEQ ID NO: 3422820 - DNA, 25 bp, Homo sapien
caagtaaagcaagaccagcgccagc

SEQ ID NO: 3422821 - DNA, 25 bp, Homo sapien
aggaggcccagctcctggtcgctca

SEQ ID NO: 3422822 - DNA, 25 bp, Homo sapien
atgaggaggcccagctcctggtcgc

SEQ ID NO: 3422823 - DNA, 25 bp, Homo sapien
tgatgaggaggcccagctcctggtc

SEQ ID NO: 3422824 - DNA, 25 bp, Homo sapien
cttgatgaggaggcccagctcctgg

SEQ ID NO: 3422825 - DNA, 25 bp, Homo sapien
ttagttgtaaacactactgtattcg

SEQ ID NO: 3422826 - DNA, 25 bp, Homo sapien
tagttgtaaacactactgtattcgg

SEQ ID NO: 3422827 - DNA, 25 bp, Homo sapien
gttgtaaacactactgtattcggac

SEQ ID NO: 3422828 - DNA, 25 bp, Homo sapien
tgtaaacactactgtattcggacca

SEQ ID NO: 3422829 - DNA, 25 bp, Homo sapien
ctgttgctggtcgagttggtttctg

SEQ ID NO: 3422830 - DNA, 25 bp, Homo sapien
ctgctgttgctggtcgagttggttt

SEQ ID NO: 3422831 - DNA, 25 bp, Homo sapien
tcgagttggtttctgggtccgcacc

SEQ ID NO: 3422832 - DNA, 25 bp, Homo sapien
gtcgagttggtttctgggtccgcac

SEQ ID NO: 3422833 - DNA, 25 bp, Homo sapien
ttgccgccccccacatgccaatccc

SEQ ID NO: 3422834 - DNA, 25 bp, Homo sapien
gatgcaggaagtctaggggccacct

SEQ ID NO: 3422835 - DNA, 25 bp, Homo sapien
ccatgaggaagctccttgccgcccc

SEQ ID NO: 3422836 - DNA, 25 bp, Homo sapien
ggcagaggggcgatgcaggaagtct

SEQ ID NO: 3422837 - DNA, 25 bp, Homo sapien
caccagcgcataaaagatgcagaag

SEQ ID NO: 3422838 - DNA, 25 bp, Homo sapien
ggaatccccaccagcgcataaaaga

SEQ ID NO: 3422839 - DNA, 25 bp, Homo sapien
tcaatgtgaccgatgccatggcgca

SEQ ID NO: 3422840 - DNA, 25 bp, Homo sapien
tgccagtaggatcccaaacagcgga

SEQ ID NO: 3422841 - DNA, 25 bp, Homo sapien
accaacaatccccactcccatactc

SEQ ID NO: 3422842 - DNA, 25 bp, Homo sapien
ctgtgggagaggcttatggtctttg

SEQ ID NO: 3422843 - DNA, 25 bp, Homo sapien
ccaggagacaccaacaatccccact

SEQ ID NO: 3422844 - DNA, 25 bp, Homo sapien
cttatggtctttgggggcgcgctca

SEQ ID NO: 3422845 - DNA, 25 bp, Homo sapien
catatagcagaacacgaacgtgggc

SEQ ID NO: 3422846 - DNA, 25 bp, Homo sapien
ctcttactagctccggtggcacgtg

SEQ ID NO: 3422847 - DNA, 25 bp, Homo sapien
agcaggcagccgatcagcaggaaaa

SEQ ID NO: 3422848 - DNA, 25 bp, Homo sapien
gcatcgccgacagcactcttactag

SEQ ID NO: 3422849 - DNA, 25 bp, Homo sapien
cggccacatagtcgccaaagcccac

SEQ ID NO: 3422850 - DNA, 25 bp, Homo sapien
agtcgccaaagcccacggtggtaag

SEQ ID NO: 3422851 - DNA, 25 bp, Homo sapien
tcgccaaagcccacggtggtaagcg

SEQ ID NO: 3422852 - DNA, 25 bp, Homo sapien
acatagtcgccaaagcccacggtgg

SEQ ID NO: 3422853 - DNA, 25 bp, Homo sapien
ccacaccagcggctgataggccggg

SEQ ID NO: 3422854 - DNA, 25 bp, Homo sapien
agaaccacaccagcggctgataggc

SEQ ID NO: 3422855 - DNA, 25 bp, Homo sapien
gaggcgaagtaagccaggccgagca

SEQ ID NO: 3422856 - DNA, 25 bp, Homo sapien
ctgaggcgaagtaagccaggccgag

SEQ ID NO: 3422857 - DNA, 25 bp, Homo sapien
tgcggcgggacactactcgcagcca

SEQ ID NO: 3422858 - DNA, 25 bp, Homo sapien
cggcgggacactactcgcagccagt

SEQ ID NO: 3422859 - DNA, 25 bp, Homo sapien
gcgggacactactcgcagccagttc

SEQ ID NO: 3422860 - DNA, 25 bp, Homo sapien
gtgcggcgggacactactcgcagcc

SEQ ID NO: 3422861 - DNA, 25 bp, Homo sapien
catgaaggaagaggtggtgaaggta

SEQ ID NO: 3422862 - DNA, 25 bp, Homo sapien
gaagaggtggtgaaggtacccacaa

SEQ ID NO: 3422863 - DNA, 25 bp, Homo sapien
tgaaggaagaggtggtgaaggtacc

SEQ ID NO: 3422864 - DNA, 25 bp, Homo sapien
tggtgaaggtacccacaaacttata

SEQ ID NO: 3422865 - DNA, 25 bp, Homo sapien
ttgtttgagaccagggcttactctg

SEQ ID NO: 3422866 - DNA, 25 bp, Homo sapien
tgtttgtttgagaccagggcttact

SEQ ID NO: 3422867 - DNA, 25 bp, Homo sapien
ttgtttgtttgagaccagggcttac

SEQ ID NO: 3422868 - DNA, 25 bp, Homo sapien
cactgccccccgccataataaaatt

SEQ ID NO: 3422869 - DNA, 25 bp, Homo sapien
gctcgctgggtcacgcgcgctgtca

SEQ ID NO: 3422870 - DNA, 25 bp, Homo sapien
gggcccggctcgctgggtcacgcgc

SEQ ID NO: 3422871 - DNA, 25 bp, Homo sapien
cgcgcgctgtcaccgtgccagtcca

SEQ ID NO: 3422872 - DNA, 25 bp, Homo sapien
tgggtcacgcgcgctgtcaccgtgc

SEQ ID NO: 3422873 - DNA, 25 bp, Homo sapien
cgcgctcgctctgcgtatccgagga

SEQ ID NO: 3422874 - DNA, 25 bp, Homo sapien
tctcgctgggataatccagggccga

SEQ ID NO: 3422875 - DNA, 25 bp, Homo sapien
ggttctcgctgggataatccagggc

SEQ ID NO: 3422876 - DNA, 25 bp, Homo sapien
tccgaggactcgtcgatgaaggcca

SEQ ID NO: 3422877 - DNA, 25 bp, Homo sapien
gcacgcctttgtctcggggacgccc

SEQ ID NO: 3422878 - DNA, 25 bp, Homo sapien
cggcacgcctttgtctcggggacgc

SEQ ID NO: 3422879 - DNA, 25 bp, Homo sapien
ggcacgcctttgtctcggggacgcc

SEQ ID NO: 3422880 - DNA, 25 bp, Homo sapien
ggagagcagaaacgaagcccttgag

SEQ ID NO: 3422881 - DNA, 25 bp, Homo sapien
tcagtctcgtggaaagagggctctt

SEQ ID NO: 3422882 - DNA, 25 bp, Homo sapien
cccttgagaggcccggccagggatc

SEQ ID NO: 3422883 - DNA, 25 bp, Homo sapien
gggcagcgacacagaaagccttggg

SEQ ID NO: 3422884 - DNA, 25 bp, Homo sapien
ttattgatgcaggctttgaggcaca

SEQ ID NO: 3422885 - DNA, 25 bp, Homo sapien
gcagaccgttttcatttattgatgc

SEQ ID NO: 3422886 - DNA, 25 bp, Homo sapien
tgcagaccgttttcatttattgatg

SEQ ID NO: 3422887 - DNA, 25 bp, Homo sapien
tgggggtcacgggaggccagaggtg

SEQ ID NO: 3422888 - DNA, 25 bp, Homo sapien
ccacggtggcccgaggaaagcaatt

SEQ ID NO: 3422889 - DNA, 25 bp, Homo sapien
acacccactcgcgtccgggagcgtc

SEQ ID NO: 3422890 - DNA, 25 bp, Homo sapien
tcgcgtccgggagcgtcacgcccgc

SEQ ID NO: 3422891 - DNA, 25 bp, Homo sapien
agaagggagtcaacgctccaggaag

SEQ ID NO: 3422892 - DNA, 25 bp, Homo sapien
tgggagagttcaaacgacagccctc

SEQ ID NO: 3422893 - DNA, 25 bp, Homo sapien
cccacccgccaatgtgtgtgcagag

SEQ ID NO: 3422894 - DNA, 25 bp, Homo sapien
ccacaggcctcgagacgagaaggga

SEQ ID NO: 3422895 - DNA, 25 bp, Homo sapien
taagaaatagcgccaggggcccgag

SEQ ID NO: 3422896 - DNA, 25 bp, Homo sapien
ctgagtaagaaatagcgccaggggc

SEQ ID NO: 3422897 - DNA, 25 bp, Homo sapien
gagtaagaaatagcgccaggggccc

SEQ ID NO: 3422898 - DNA, 25 bp, Homo sapien
agaaatagcgccaggggcccgagtc

SEQ ID NO: 3422899 - DNA, 25 bp, Homo sapien
aagggtcgcggatggctggagcggg

SEQ ID NO: 3422900 - DNA, 25 bp, Homo sapien
aggagggagccaagggtcgcggatg

SEQ ID NO: 3422901 - DNA, 25 bp, Homo sapien
ggagggagccaagggtcgcggatgg

SEQ ID NO: 3422902 - DNA, 25 bp, Homo sapien
gccaagggtcgcggatggctggagc

SEQ ID NO: 3422903 - DNA, 25 bp, Homo sapien
agacctcggacagcggcatgttcag

SEQ ID NO: 3422904 - DNA, 25 bp, Homo sapien
cagcgtggtcgtggtccacaggtcc

SEQ ID NO: 3422905 - DNA, 25 bp, Homo sapien
cacaggtcccgagtgtcgctatgca

SEQ ID NO: 3422906 - DNA, 25 bp, Homo sapien
gcctcgatctgggatgcagtgtcct

SEQ ID NO: 3422907 - DNA, 25 bp, Homo sapien
ttgagtgatgacattgaggaagact

SEQ ID NO: 3422908 - DNA, 25 bp, Homo sapien
gggcatgtgcttcgcaatattgagt

SEQ ID NO: 3422909 - DNA, 25 bp, Homo sapien
gctcgatggggcatgtgcttcgcaa

SEQ ID NO: 3422910 - DNA, 25 bp, Homo sapien
gcttcgcaatattgagtgatgacat

SEQ ID NO: 3422911 - DNA, 25 bp, Homo sapien
gcaagaggcttaggcgtccaggtac

SEQ ID NO: 3422912 - DNA, 25 bp, Homo sapien
taggcgtccaggtacttcatctctg

SEQ ID NO: 3422913 - DNA, 25 bp, Homo sapien
gaggcttaggcgtccaggtacttca

SEQ ID NO: 3422914 - DNA, 25 bp, Homo sapien
gaagcagcaagaggcttaggcgtcc

SEQ ID NO: 3422915 - DNA, 25 bp, Homo sapien
ggctttggtgaggatttccagagct

SEQ ID NO: 3422916 - DNA, 25 bp, Homo sapien
ggcagtgagcaaccgaaaggtctcc

SEQ ID NO: 3422917 - DNA, 25 bp, Homo sapien
gatgattcgaggtagcagtagcgca

SEQ ID NO: 3422918 - DNA, 25 bp, Homo sapien
cgcatgtgtgattcgaggaaccgca

SEQ ID NO: 3422919 - DNA, 25 bp, Homo sapien
gaactttgcatctctaagggtgctg

SEQ ID NO: 3422920 - DNA, 25 bp, Homo sapien
cagctccttagtcaggaagtggtcc

SEQ ID NO: 3422921 - DNA, 25 bp, Homo sapien
agcctcttgctccggcgcttcttga

SEQ ID NO: 3422922 - DNA, 25 bp, Homo sapien
ggcgcttcttgagcccttcgatgta

SEQ ID NO: 3422923 - DNA, 25 bp, Homo sapien
ccttcgatgtatcgctgcagctcct

SEQ ID NO: 3422924 - DNA, 25 bp, Homo sapien
tctttaggactcaaattccactcgg

SEQ ID NO: 3422925 - DNA, 25 bp, Homo sapien
taggactcaaattccactcggatgg

SEQ ID NO: 3422926 - DNA, 25 bp, Homo sapien
tggttcgggtcgctgctcgagccca

SEQ ID NO: 3422927 - DNA, 25 bp, Homo sapien
gctcgagcccaaggtggcgttttta

SEQ ID NO: 3422928 - DNA, 25 bp, Homo sapien
actgcggcgcacatgcgtacgcggc

SEQ ID NO: 3422929 - DNA, 25 bp, Homo sapien
agccactgcggcgcacatgcgtacg

SEQ ID NO: 3422930 - DNA, 25 bp, Homo sapien
ggccttcgtgcaggtcccgccccgc

SEQ ID NO: 3422931 - DNA, 25 bp, Homo sapien
ccgccgagccactgcggcgcacatg

SEQ ID NO: 3422932 - DNA, 25 bp, Homo sapien
gccgccggctgcttgtaggacacaa

SEQ ID NO: 3422933 - DNA, 25 bp, Homo sapien
acacaaaaggacatcgcggccgctt

SEQ ID NO: 3422934 - DNA, 25 bp, Homo sapien
ggccgcttcctactccgcttcctcc

SEQ ID NO: 3422935 - DNA, 25 bp, Homo sapien
gcgccgccggctgcttgtaggacac

SEQ ID NO: 3422936 - DNA, 25 bp, Homo sapien
ccgagcggcccggagtgccggagtg

SEQ ID NO: 3422937 - DNA, 25 bp, Homo sapien
gcatgggggccgagcggcccggagt

SEQ ID NO: 3422938 - DNA, 25 bp, Homo sapien
gagcggcccggagtgccggagtgag

SEQ ID NO: 3422939 - DNA, 25 bp, Homo sapien
gcggcccggagtgccggagtgagcc

SEQ ID NO: 3422940 - DNA, 25 bp, Homo sapien
cctctaccaggttatcaggaagtaa

SEQ ID NO: 3422941 - DNA, 25 bp, Homo sapien
gttgcctaaagttgctacgcctccc

SEQ ID NO: 3422942 - DNA, 25 bp, Homo sapien
cccgcccgcgggagacctctaccag

SEQ ID NO: 3422943 - DNA, 25 bp, Homo sapien
cttatactcccgctgtcgcagaggc

SEQ ID NO: 3422944 - DNA, 25 bp, Homo sapien
gacgtgctcacaccgagttcacaca

SEQ ID NO: 3422945 - DNA, 25 bp, Homo sapien
gctgagggctttcacacttgcaccg

SEQ ID NO: 3422946 - DNA, 25 bp, Homo sapien
tccctagccaggagcaggatacttc

SEQ ID NO: 3422947 - DNA, 25 bp, Homo sapien
gcacaggcacggactcatgaaaaca

SEQ ID NO: 3422948 - DNA, 25 bp, Homo sapien
ctgcacggagagacccataggttcg

SEQ ID NO: 3422949 - DNA, 25 bp, Homo sapien
cacggagagacccataggttcgcag

SEQ ID NO: 3422950 - DNA, 25 bp, Homo sapien
cggagagacccataggttcgcagga

SEQ ID NO: 3422951 - DNA, 25 bp, Homo sapien
agacccataggttcgcaggaaagca

SEQ ID NO: 3422952 - DNA, 25 bp, Homo sapien
gtggtagccggaggccacgtcccca

SEQ ID NO: 3422953 - DNA, 25 bp, Homo sapien
taaaatctgccttgtgttggtgctg

SEQ ID NO: 3422954 - DNA, 25 bp, Homo sapien
aaaattaaaatctgccttgtgttgg

SEQ ID NO: 3422955 - DNA, 25 bp, Homo sapien
attaaaatctgccttgtgttggtgc

SEQ ID NO: 3422956 - DNA, 25 bp, Homo sapien
aaatctgccttgtgttggtgctgct

SEQ ID NO: 3422957 - DNA, 25 bp, Homo sapien
ctctcaagtagcaagtagctgagat

SEQ ID NO: 3422958 - DNA, 25 bp, Homo sapien
cctctcaagtagcaagtagctgaga

SEQ ID NO: 3422959 - DNA, 25 bp, Homo sapien
gcctctcaagtagcaagtagctgag

SEQ ID NO: 3422960 - DNA, 25 bp, Homo sapien
agcctctcaagtagcaagtagctga

SEQ ID NO: 3422961 - DNA, 25 bp, Homo sapien
gccaccctgtgataatgccaaatcc

SEQ ID NO: 3422962 - DNA, 25 bp, Homo sapien
tgtcaccttgaagatcttccctggc

SEQ ID NO: 3422963 - DNA, 25 bp, Homo sapien
gcctggagctctagtcctgaagtcc

SEQ ID NO: 3422964 - DNA, 25 bp, Homo sapien
caaatccctttgcagagtcctcctg

SEQ ID NO: 3422965 - DNA, 25 bp, Homo sapien
gaggccggacagctgtactcgatgc

SEQ ID NO: 3422966 - DNA, 25 bp, Homo sapien
gatctcacactcgttggaggccgga

SEQ ID NO: 3422967 - DNA, 25 bp, Homo sapien
ttgcgtctccgcttggtgatctcac

SEQ ID NO: 3422968 - DNA, 25 bp, Homo sapien
tgcccacccgcaggcacttggtgaa

SEQ ID NO: 3422969 - DNA, 25 bp, Homo sapien
cacctccggccgccgcttgtacttc

SEQ ID NO: 3422970 - DNA, 25 bp, Homo sapien
ggcagtgggtccacctccggccgcc

SEQ ID NO: 3422971 - DNA, 25 bp, Homo sapien
agggcagtgggtccacctccggccg

SEQ ID NO: 3422972 - DNA, 25 bp, Homo sapien
ctccggccgccgcttgtacttctgc

SEQ ID NO: 3422973 - DNA, 25 bp, Homo sapien
catagagcttctcaggctcaaccac

SEQ ID NO: 3422974 - DNA, 25 bp, Homo sapien
tagagcttctcaggctcaaccacca

SEQ ID NO: 3422975 - DNA, 25 bp, Homo sapien
aagaggtcacagagggtagccacgg

SEQ ID NO: 3422976 - DNA, 25 bp, Homo sapien
ggcatagagcttctcaggctcaacc

SEQ ID NO: 3422977 - DNA, 25 bp, Homo sapien
gggccaaggcctttagtagaacata

SEQ ID NO: 3422978 - DNA, 25 bp, Homo sapien
tagtagaacatactcctctcgctcc

SEQ ID NO: 3422979 - DNA, 25 bp, Homo sapien
caaggcctttagtagaacatactcc

SEQ ID NO: 3422980 - DNA, 25 bp, Homo sapien
ggcctttagtagaacatactcctct

SEQ ID NO: 3422981 - DNA, 25 bp, Homo sapien
tggcctcgagcatctccaagaacag

SEQ ID NO: 3422982 - DNA, 25 bp, Homo sapien
tgggccagcactttgcccgctgtct

SEQ ID NO: 3422983 - DNA, 25 bp, Homo sapien
ttcaccccatagaaatgggccagca

SEQ ID NO: 3422984 - DNA, 25 bp, Homo sapien
tgcatgggcaccttgccctccagct

SEQ ID NO: 3422985 - DNA, 25 bp, Homo sapien
tatagtgttattgctctgcagggca

SEQ ID NO: 3422986 - DNA, 25 bp, Homo sapien
gggctgaccccatgctaggcaggtc

SEQ ID NO: 3422987 - DNA, 25 bp, Homo sapien
gagtctgcttggagttattgcttca

SEQ ID NO: 3422988 - DNA, 25 bp, Homo sapien
tccctgagataggtttctgcctccc

SEQ ID NO: 3422989 - DNA, 25 bp, Homo sapien
gacagccgacgcaactacaaatggg

SEQ ID NO: 3422990 - DNA, 25 bp, Homo sapien
ttttgcattcaacgagagctcctgc

SEQ ID NO: 3422991 - DNA, 25 bp, Homo sapien
gagctttcggcactggagcagctaa

SEQ ID NO: 3422992 - DNA, 25 bp, Homo sapien
gcggctcggcttccatgggcctaat

SEQ ID NO: 3422993 - DNA, 25 bp, Homo sapien
gccggccccaccgacgagtatatag

SEQ ID NO: 3422994 - DNA, 25 bp, Homo sapien
ttcactgtaccgtcttgctgccgct

SEQ ID NO: 3422995 - DNA, 25 bp, Homo sapien
tatatagcccgctgagcgtctcagg

SEQ ID NO: 3422996 - DNA, 25 bp, Homo sapien
tctcagggcgcacacgccagctagt

SEQ ID NO: 3422997 - DNA, 25 bp, Homo sapien
gaccaatctgaacaacggggtgaaa

SEQ ID NO: 3422998 - DNA, 25 bp, Homo sapien
ttcgagaccaatctgaacaacgggg

SEQ ID NO: 3422999 - DNA, 25 bp, Homo sapien
gagaccaatctgaacaacggggtga

SEQ ID NO: 3423000 - DNA, 25 bp, Homo sapien
caatctgaacaacggggtgaaatcc

SEQ ID NO: 3423001 - DNA, 25 bp, Homo sapien
tttccccatgtgtcgcaaagggttg

SEQ ID NO: 3423002 - DNA, 25 bp, Homo sapien
tactccagccctgtcagtttccaag

SEQ ID NO: 3423003 - DNA, 25 bp, Homo sapien
ctagaaggaaggactccagggtaag

SEQ ID NO: 3423004 - DNA, 25 bp, Homo sapien
aagggttgcataacatgctgtctag

SEQ ID NO: 3423005 - DNA, 25 bp, Homo sapien
ggaacatccaggggtgaaggcccca

SEQ ID NO: 3423006 - DNA, 25 bp, Homo sapien
ccaggaactccaaacagcacaccct

SEQ ID NO: 3423007 - DNA, 25 bp, Homo sapien
gaacatccaggggtgaaggccccag

SEQ ID NO: 3423008 - DNA, 25 bp, Homo sapien
gccccaggaactccaaacagcacac

SEQ ID NO: 3423009 - DNA, 25 bp, Homo sapien
ctatcaggactatgtggaggactta

SEQ ID NO: 3423010 - DNA, 25 bp, Homo sapien
cttaagagcaacacaaaagatccca

SEQ ID NO: 3423011 - DNA, 25 bp, Homo sapien
ctttttaggagtcctatcaggacta

SEQ ID NO: 3423012 - DNA, 25 bp, Homo sapien
gctctacccagctctacttgttttg

SEQ ID NO: 3423013 - DNA, 25 bp, Homo sapien
gtcttatttatctgagtcccaagca

SEQ ID NO: 3423014 - DNA, 25 bp, Homo sapien
caaagggtcggcaaagggataactg

SEQ ID NO: 3423015 - DNA, 25 bp, Homo sapien
cctttgatcagacaatgagagctgt

SEQ ID NO: 3423016 - DNA, 25 bp, Homo sapien
cagacgtgaactttccatgggcaga

SEQ ID NO: 3423017 - DNA, 25 bp, Homo sapien
acctggactcccttggccttcagag

SEQ ID NO: 3423018 - DNA, 25 bp, Homo sapien
tcattaacactcagacaggccacca

SEQ ID NO: 3423019 - DNA, 25 bp, Homo sapien
ttgccttccgccttgtgggctcggc

SEQ ID NO: 3423020 - DNA, 25 bp, Homo sapien
cactcgccagtcacaaaggcatcat

SEQ ID NO: 3423021 - DNA, 25 bp, Homo sapien
gaagaatatcctacctggtcctgac

SEQ ID NO: 3423022 - DNA, 25 bp, Homo sapien
aggtcacaagaagaatatcctacct

SEQ ID NO: 3423023 - DNA, 25 bp, Homo sapien
gaatatcctacctggtcctgactcc

SEQ ID NO: 3423024 - DNA, 25 bp, Homo sapien
acaagaagaatatcctacctggtcc

SEQ ID NO: 3423025 - DNA, 25 bp, Homo sapien
aaggccccagtgggatcagccagga

SEQ ID NO: 3423026 - DNA, 25 bp, Homo sapien
tgagacgtcgattcccaaagatgga

SEQ ID NO: 3423027 - DNA, 25 bp, Homo sapien
ctcttgagacgtcgattcccaaaga

SEQ ID NO: 3423028 - DNA, 25 bp, Homo sapien
cttgagacgtcgattcccaaagatg

SEQ ID NO: 3423029 - DNA, 25 bp, Homo sapien
gagacgtcgattcccaaagatggac

SEQ ID NO: 3423030 - DNA, 25 bp, Homo sapien
aggactctctccacagaggactctc

SEQ ID NO: 3423031 - DNA, 25 bp, Homo sapien
gaggactctctccacagaggactct

SEQ ID NO: 3423032 - DNA, 25 bp, Homo sapien
actctctcccacagaggactctctc

SEQ ID NO: 3423033 - DNA, 25 bp, Homo sapien
gactctctcccacagaggactctct

SEQ ID NO: 3423034 - DNA, 25 bp, Homo sapien
ctggttccacattcagggccttcac

SEQ ID NO: 3423035 - DNA, 25 bp, Homo sapien
agctgtgagatgatattgggtgcca

SEQ ID NO: 3423036 - DNA, 25 bp, Homo sapien
ctatgccatcctgtaccaccatgga

SEQ ID NO: 3423037 - DNA, 25 bp, Homo sapien
cattcagggccttcactatgccatc

SEQ ID NO: 3423038 - DNA, 25 bp, Homo sapien
tggccaacattccaattgcagggcc

SEQ ID NO: 3423039 - DNA, 25 bp, Homo sapien
caacattccaattgcagggccccag

SEQ ID NO: 3423040 - DNA, 25 bp, Homo sapien
acattccaattgcagggccccagca

SEQ ID NO: 3423041 - DNA, 25 bp, Homo sapien
aaatctggccaacattccaattgca

SEQ ID NO: 3423042 - DNA, 25 bp, Homo sapien
tgtgccttcgcatagatgttacctg

SEQ ID NO: 3423043 - DNA, 25 bp, Homo sapien
ccaggagtgcgagttgatgatacaa

SEQ ID NO: 3423044 - DNA, 25 bp, Homo sapien
tatgcatgctcgttaacaccaagaa

SEQ ID NO: 3423045 - DNA, 25 bp, Homo sapien
acgcccagtagagtgtgtccctttg

SEQ ID NO: 3423046 - DNA, 25 bp, Homo sapien
ggtgcccgtctcactgtggcagctg

SEQ ID NO: 3423047 - DNA, 25 bp, Homo sapien
ccgggtcggggtgcccgtctcactg

SEQ ID NO: 3423048 - DNA, 25 bp, Homo sapien
cggggtgcccgtctcactgtggcag

SEQ ID NO: 3423049 - DNA, 25 bp, Homo sapien
tgcccgtctcactgtggcagctgca

SEQ ID NO: 3423050 - DNA, 25 bp, Homo sapien
ggtagccagactcccactcaggaag

SEQ ID NO: 3423051 - DNA, 25 bp, Homo sapien
actcaggaagtctctgagcctgggc

SEQ ID NO: 3423052 - DNA, 25 bp, Homo sapien
ccaggtagccagactcccactcagg

SEQ ID NO: 3423053 - DNA, 25 bp, Homo sapien
ggaagtctctgagcctgggcccctt

SEQ ID NO: 3423054 - DNA, 25 bp, Homo sapien
tccccgaccagcccggccagtccca

SEQ ID NO: 3423055 - DNA, 25 bp, Homo sapien
tccgagtcctccgcctccccgacca

SEQ ID NO: 3423056 - DNA, 25 bp, Homo sapien
ccaaaggggcggctcttcctcctct

SEQ ID NO: 3423057 - DNA, 25 bp, Homo sapien
cgaccagcccggccagtcccagcgc

SEQ ID NO: 3423058 - DNA, 25 bp, Homo sapien
gccccatcgctgaggcgcaggaatc

SEQ ID NO: 3423059 - DNA, 25 bp, Homo sapien
catcgctgaggcgcaggaatctctt

SEQ ID NO: 3423060 - DNA, 25 bp, Homo sapien
ccccatcgctgaggcgcaggaatct

SEQ ID NO: 3423061 - DNA, 25 bp, Homo sapien
ccatcgctgaggcgcaggaatctct

SEQ ID NO: 3423062 - DNA, 25 bp, Homo sapien
ccaggcagcaggtccgtcaaggcct

SEQ ID NO: 3423063 - DNA, 25 bp, Homo sapien
caggtccgtcaaggcctctgagcat

SEQ ID NO: 3423064 - DNA, 25 bp, Homo sapien
ggcagcaggtccgtcaaggcctctg

SEQ ID NO: 3423065 - DNA, 25 bp, Homo sapien
tggtagaagtccctcagtcggcccc

SEQ ID NO: 3423066 - DNA, 25 bp, Homo sapien
aggtctgggggtggcgacaggatca

SEQ ID NO: 3423067 - DNA, 25 bp, Homo sapien
ctgagagagggtcaaatcccaatgt

SEQ ID NO: 3423068 - DNA, 25 bp, Homo sapien
gagagagggtcaaatcccaatgtct

SEQ ID NO: 3423069 - DNA, 25 bp, Homo sapien
tctgggggtggcgacaggatcagca

SEQ ID NO: 3423070 - DNA, 25 bp, Homo sapien
ctgcaaggcacatgccacaaggggt

SEQ ID NO: 3423071 - DNA, 25 bp, Homo sapien
gcaaggcacatgccacaaggggtta

SEQ ID NO: 3423072 - DNA, 25 bp, Homo sapien
caaggcacatgccacaaggggttaa

SEQ ID NO: 3423073 - DNA, 25 bp, Homo sapien
tgcaaggcacatgccacaaggggtt

SEQ ID NO: 3423074 - DNA, 25 bp, Homo sapien
ctgtactgacgctcccaacagtagc

SEQ ID NO: 3423075 - DNA, 25 bp, Homo sapien
gacgctcccaacagtagccgaagaa

SEQ ID NO: 3423076 - DNA, 25 bp, Homo sapien
gtagccgaagaacgccttccagctg

SEQ ID NO: 3423077 - DNA, 25 bp, Homo sapien
caacagtagccgaagaacgccttcc

SEQ ID NO: 3423078 - DNA, 25 bp, Homo sapien
tctggacctcgagactgaggccctg

SEQ ID NO: 3423079 - DNA, 25 bp, Homo sapien
ggatgtggcggatgaagagttcccg

SEQ ID NO: 3423080 - DNA, 25 bp, Homo sapien
gactgaggccctggatgtggcggat

SEQ ID NO: 3423081 - DNA, 25 bp, Homo sapien
ctctggacctcgagactgaggccct

SEQ ID NO: 3423082 - DNA, 25 bp, Homo sapien
caggatctggcccagacagtgccag

SEQ ID NO: 3423083 - DNA, 25 bp, Homo sapien
gggcccccaggtcacgctcccgtgc

SEQ ID NO: 3423084 - DNA, 25 bp, Homo sapien
ccaggtcacgctcccgtgccagctt

SEQ ID NO: 3423085 - DNA, 25 bp, Homo sapien
gtgccagcttcgacagtgtccccat

SEQ ID NO: 3423086 - DNA, 25 bp, Homo sapien
gccagatggtgcgaggggccctcgg

SEQ ID NO: 3423087 - DNA, 25 bp, Homo sapien
gcagaggggttctcgctccagcagc

SEQ ID NO: 3423088 - DNA, 25 bp, Homo sapien
cctcaggcctcaagcagaggggttc

SEQ ID NO: 3423089 - DNA, 25 bp, Homo sapien
gggagccctagagggagcctcaggc

SEQ ID NO: 3423090 - DNA, 25 bp, Homo sapien
cgcagacgccgcagctgagccttgg

SEQ ID NO: 3423091 - DNA, 25 bp, Homo sapien
gccgcagacgccgcagctgagcctt

SEQ ID NO: 3423092 - DNA, 25 bp, Homo sapien
gctcctgccgcagacgccgcagctg

SEQ ID NO: 3423093 - DNA, 25 bp, Homo sapien
tcctgccgcagacgccgcagctgag

SEQ ID NO: 3423094 - DNA, 25 bp, Homo sapien
tcctggcggagccttcttatttcgg

SEQ ID NO: 3423095 - DNA, 25 bp, Homo sapien
gagccttcttatttcggcctccaaa

SEQ ID NO: 3423096 - DNA, 25 bp, Homo sapien
ggcggagccttcttatttcggcctc

SEQ ID NO: 3423097 - DNA, 25 bp, Homo sapien
acctcggcctgggagtctagcagca

SEQ ID NO: 3423098 - DNA, 25 bp, Homo sapien
gcctctgcctcctcgcggtacagct

SEQ ID NO: 3423099 - DNA, 25 bp, Homo sapien
gcccgcttggcctgtcccgacagcg

SEQ ID NO: 3423100 - DNA, 25 bp, Homo sapien
ctccagctgactcttgtaggcctca

SEQ ID NO: 3423101 - DNA, 25 bp, Homo sapien
cggtacagctcggcccgcttggcct

SEQ ID NO: 3423102 - DNA, 25 bp, Homo sapien
ctctgccctcgggacccaatctcgc

SEQ ID NO: 3423103 - DNA, 25 bp, Homo sapien
tctctgccctcgggacccaatctcg

SEQ ID NO: 3423104 - DNA, 25 bp, Homo sapien
ctctctgccctcgggacccaatctc

SEQ ID NO: 3423105 - DNA, 25 bp, Homo sapien
caggttctcgcgctgggtctcgtgc

SEQ ID NO: 3423106 - DNA, 25 bp, Homo sapien
agccgggttcgcagcagcaggttct

SEQ ID NO: 3423107 - DNA, 25 bp, Homo sapien
tgcagccgggcgcagcgctctcggg

SEQ ID NO: 3423108 - DNA, 25 bp, Homo sapien
tgctcttccagcagcgccttggacg

SEQ ID NO: 3423109 - DNA, 25 bp, Homo sapien
tccaagctccgctgaagctccagct

SEQ ID NO: 3423110 - DNA, 25 bp, Homo sapien
ttctccctctcaagggtccgaagcc

SEQ ID NO: 3423111 - DNA, 25 bp, Homo sapien
tcacctcatcttgcagcgagggggc

SEQ ID NO: 3423112 - DNA, 25 bp, Homo sapien
atcttgcagcgagggggccgctcct

SEQ ID NO: 3423113 - DNA, 25 bp, Homo sapien
ctccctcacctcatcttgcagcgag

SEQ ID NO: 3423114 - DNA, 25 bp, Homo sapien
ctctcggtgcctccagcagggggtg

SEQ ID NO: 3423115 - DNA, 25 bp, Homo sapien
ctctctcggtgcctccagcaggggg

SEQ ID NO: 3423116 - DNA, 25 bp, Homo sapien
ctggaagaacagggtcctctctcgg

SEQ ID NO: 3423117 - DNA, 25 bp, Homo sapien
ggaagaacagggtcctctctcggtg

SEQ ID NO: 3423118 - DNA, 25 bp, Homo sapien
tgccttctgaaccaagccctgaggg

SEQ ID NO: 3423119 - DNA, 25 bp, Homo sapien
cctgagggctgtggtcgaaggccac

SEQ ID NO: 3423120 - DNA, 25 bp, Homo sapien
ggagagaggatctacggccagcctt

SEQ ID NO: 3423121 - DNA, 25 bp, Homo sapien
gctgatgcctcgagcactgagtcta

SEQ ID NO: 3423122 - DNA, 25 bp, Homo sapien
tcggcctctgcccttcgcgcttggg

SEQ ID NO: 3423123 - DNA, 25 bp, Homo sapien
gttcctgggacgcagactccagctc

SEQ ID NO: 3423124 - DNA, 25 bp, Homo sapien
cagcacctgcatccgttcctcggcg

SEQ ID NO: 3423125 - DNA, 25 bp, Homo sapien
gggcagcctccgtgttttgggcctc

SEQ ID NO: 3423126 - DNA, 25 bp, Homo sapien
tgaaaggtggatgcgcccggtgggc

SEQ ID NO: 3423127 - DNA, 25 bp, Homo sapien
tgacagcgagacagctagagaggct

SEQ ID NO: 3423128 - DNA, 25 bp, Homo sapien
gtgagagaccttggctacagggaaa

SEQ ID NO: 3423129 - DNA, 25 bp, Homo sapien
agcccacggttcttcatgtgcgcag

SEQ ID NO: 3423130 - DNA, 25 bp, Homo sapien
tccttgccccgcaccacagctttct

SEQ ID NO: 3423131 - DNA, 25 bp, Homo sapien
ccagctcacgctgcaaatgctccag

SEQ ID NO: 3423132 - DNA, 25 bp, Homo sapien
gcagaaattcctggcgctcgagagc

SEQ ID NO: 3423133 - DNA, 25 bp, Homo sapien
attcctggcgctcgagagccgcctg

SEQ ID NO: 3423134 - DNA, 25 bp, Homo sapien
ccagccgctgctccaagccctggta

SEQ ID NO: 3423135 - DNA, 25 bp, Homo sapien
atcagcgcctcctccttgctggtcg

SEQ ID NO: 3423136 - DNA, 25 bp, Homo sapien
ctggtcttgagctccatcagcgcct

SEQ ID NO: 3423137 - DNA, 25 bp, Homo sapien
gctgcagggccctggtcttgagctc

SEQ ID NO: 3423138 - DNA, 25 bp, Homo sapien
tgatagactcgcatgcacctgctgg

SEQ ID NO: 3423139 - DNA, 25 bp, Homo sapien
tgggtatcagaaaccatcgctggct

SEQ ID NO: 3423140 - DNA, 25 bp, Homo sapien
aagtagctagccaagaatccagagg

SEQ ID NO: 3423141 - DNA, 25 bp, Homo sapien
tgagaccccagataagtcaacacgg

SEQ ID NO: 3423142 - DNA, 25 bp, Homo sapien
caatcccatgccttcccttggatcc

SEQ ID NO: 3423143 - DNA, 25 bp, Homo sapien
tgccagcagcatttagcctagtcca

SEQ ID NO: 3423144 - DNA, 25 bp, Homo sapien
tcatgcgggacagccgcagtgcctt

SEQ ID NO: 3423145 - DNA, 25 bp, Homo sapien
aaggacctgcgcttatggacctgcc

SEQ ID NO: 3423146 - DNA, 25 bp, Homo sapien
tgaggctccgcacgctttttgggcc

SEQ ID NO: 3423147 - DNA, 25 bp, Homo sapien
taagccgcacattctgggtctccac

SEQ ID NO: 3423148 - DNA, 25 bp, Homo sapien
actgcgctccacctcaataagccgc

SEQ ID NO: 3423149 - DNA, 25 bp, Homo sapien
accagctgaggctccgcacgctttt

SEQ ID NO: 3423150 - DNA, 25 bp, Homo sapien
agggtccaccgtggacccacactca

SEQ ID NO: 3423151 - DNA, 25 bp, Homo sapien
actgcacgggataccccccagccca

SEQ ID NO: 3423152 - DNA, 25 bp, Homo sapien
actcacactgcacggggcacctccc

SEQ ID NO: 3423153 - DNA, 25 bp, Homo sapien
ggtccaccgtggacccacactcaca

SEQ ID NO: 3423154 - DNA, 25 bp, Homo sapien
cagaagtgggggttagcaatagcca

SEQ ID NO: 3423155 - DNA, 25 bp, Homo sapien
cccagaagtgggggttagcaatagc

SEQ ID NO: 3423156 - DNA, 25 bp, Homo sapien
agtgggggttagcaatagccaggtg

SEQ ID NO: 3423157 - DNA, 25 bp, Homo sapien
tgcccagaagtgggggttagcaata

SEQ ID NO: 3423158 - DNA, 25 bp, Homo sapien
ctgctgtgctcctgcgcccgctggc

SEQ ID NO: 3423159 - DNA, 25 bp, Homo sapien
ccttctctgccaccagcatcgcatt

SEQ ID NO: 3423160 - DNA, 25 bp, Homo sapien
gcagctcctgggcacggccctgcag

SEQ ID NO: 3423161 - DNA, 25 bp, Homo sapien
tcctgcgcccgctggctctgcagca

SEQ ID NO: 3423162 - DNA, 25 bp, Homo sapien
ttgaggtctcggtgccgcaccagca

SEQ ID NO: 3423163 - DNA, 25 bp, Homo sapien
accagcagtccctctagctcggcct

SEQ ID NO: 3423164 - DNA, 25 bp, Homo sapien
ttgtggtcccgaagcagggcctgct

SEQ ID NO: 3423165 - DNA, 25 bp, Homo sapien
tccagtgcccgcatgttggccttga

SEQ ID NO: 3423166 - DNA, 25 bp, Homo sapien
tgtgcctccacgctggcccgctggg

SEQ ID NO: 3423167 - DNA, 25 bp, Homo sapien
tcacgctctgccagcagggccacct

SEQ ID NO: 3423168 - DNA, 25 bp, Homo sapien
acgctggcccgctgggcctgcagct

SEQ ID NO: 3423169 - DNA, 25 bp, Homo sapien
gccagcagggccacctcctgtgcct

SEQ ID NO: 3423170 - DNA, 25 bp, Homo sapien
tgtcgtgctcgctctgaagcctccg

SEQ ID NO: 3423171 - DNA, 25 bp, Homo sapien
gtgctcgctctgaagcctccgcagc

SEQ ID NO: 3423172 - DNA, 25 bp, Homo sapien
tcgctctgaagcctccgcagctcct

SEQ ID NO: 3423173 - DNA, 25 bp, Homo sapien
ctgtcgtgctcgctctgaagcctcc

SEQ ID NO: 3423174 - DNA, 25 bp, Homo sapien
ccactgagagctgctagaggctgtg

SEQ ID NO: 3423175 - DNA, 25 bp, Homo sapien
ctggccagagaagttatgccgggga

SEQ ID NO: 3423176 - DNA, 25 bp, Homo sapien
gtccccagtccgagtgctggccaga

SEQ ID NO: 3423177 - DNA, 25 bp, Homo sapien
ctgggtccccagtccgagtgctggc

SEQ ID NO: 3423178 - DNA, 25 bp, Homo sapien
tcagccggcaggcgctcaggtccag

SEQ ID NO: 3423179 - DNA, 25 bp, Homo sapien
cagctgctggttggactcgcgcagc

SEQ ID NO: 3423180 - DNA, 25 bp, Homo sapien
cccgctcccgagacaactctgccag

SEQ ID NO: 3423181 - DNA, 25 bp, Homo sapien
ccgtagctccccgcgttcaccctgc

SEQ ID NO: 3423182 - DNA, 25 bp, Homo sapien
ggaccacctgggtctaggctttctg

SEQ ID NO: 3423183 - DNA, 25 bp, Homo sapien
caccatggctcggagggtgggaccc

SEQ ID NO: 3423184 - DNA, 25 bp, Homo sapien
gggcaccatggctcggagggtggga

SEQ ID NO: 3423185 - DNA, 25 bp, Homo sapien
agctcaggaccacctgggtctaggc

SEQ ID NO: 3423186 - DNA, 25 bp, Homo sapien
cgctgttcgcggtgcaggtggtccc

SEQ ID NO: 3423187 - DNA, 25 bp, Homo sapien
tactcccgctgttcgcggtgcaggt

SEQ ID NO: 3423188 - DNA, 25 bp, Homo sapien
tgggcacttcgcagctgtgtcaata

SEQ ID NO: 3423189 - DNA, 25 bp, Homo sapien
aggtactcccgctgttcgcggtgca

SEQ ID NO: 3423190 - DNA, 25 bp, Homo sapien
ccagcacgcggtattggtccatgat

SEQ ID NO: 3423191 - DNA, 25 bp, Homo sapien
ttggtccatgatcttctccacgagc

SEQ ID NO: 3423192 - DNA, 25 bp, Homo sapien
acaggctccagcacgcggtattggt

SEQ ID NO: 3423193 - DNA, 25 bp, Homo sapien
gcttctgcttctcgcggcgcagggc

SEQ ID NO: 3423194 - DNA, 25 bp, Homo sapien
ggcagaggttagcaggatgtccagc

SEQ ID NO: 3423195 - DNA, 25 bp, Homo sapien
ggggcagaggttagcaggatgtcca

SEQ ID NO: 3423196 - DNA, 25 bp, Homo sapien
gggcagaggttagcaggatgtccag

SEQ ID NO: 3423197 - DNA, 25 bp, Homo sapien
caggggcagaggttagcaggatgtc

SEQ ID NO: 3423198 - DNA, 25 bp, Homo sapien
tcatggggcctggacctgagctggg

SEQ ID NO: 3423199 - DNA, 25 bp, Homo sapien
ttcatggggcctggacctgagctgg

SEQ ID NO: 3423200 - DNA, 25 bp, Homo sapien
cttcatggggcctggacctgagctg

SEQ ID NO: 3423201 - DNA, 25 bp, Homo sapien
catggggcctggacctgagctgggc

SEQ ID NO: 3423202 - DNA, 25 bp, Homo sapien
tggggatgtcaaaggccaggttgac

SEQ ID NO: 3423203 - DNA, 25 bp, Homo sapien
cttgtctgccagccagctgcccttc

SEQ ID NO: 3423204 - DNA, 25 bp, Homo sapien
gccggggccgcatcagcctcttcac

SEQ ID NO: 3423205 - DNA, 25 bp, Homo sapien
cccgccggggccgcatcagcctctt

SEQ ID NO: 3423206 - DNA, 25 bp, Homo sapien
tgccagccccatcggcccccaggcg

SEQ ID NO: 3423207 - DNA, 25 bp, Homo sapien
cccatcggcccccaggcgcagcccc

SEQ ID NO: 3423208 - DNA, 25 bp, Homo sapien
ccctcaggaagctccgtctccgggg

SEQ ID NO: 3423209 - DNA, 25 bp, Homo sapien
tcaggaagctccgtctccggggggc

SEQ ID NO: 3423210 - DNA, 25 bp, Homo sapien
cctcaggaagctccgtctccggggg

SEQ ID NO: 3423211 - DNA, 25 bp, Homo sapien
ctcaggaagctccgtctccgggggg

SEQ ID NO: 3423212 - DNA, 25 bp, Homo sapien
agggagctctgggcccggcgcatgg

SEQ ID NO: 3423213 - DNA, 25 bp, Homo sapien
agctctgggcccggcgcatgggtgc

SEQ ID NO: 3423214 - DNA, 25 bp, Homo sapien
ctgggcccggcgcatgggtgccggg

SEQ ID NO: 3423215 - DNA, 25 bp, Homo sapien
ctctgggcccggcgcatgggtgccg

SEQ ID NO: 3423216 - DNA, 25 bp, Homo sapien
tgaatgactcagagcttcgccccac

SEQ ID NO: 3423217 - DNA, 25 bp, Homo sapien
cttgagctgagtttccgccgctgcc

SEQ ID NO: 3423218 - DNA, 25 bp, Homo sapien
cctggatggcgctgtcggaatcgtt

SEQ ID NO: 3423219 - DNA, 25 bp, Homo sapien
cccaccgggaaccttgagctgagtt

SEQ ID NO: 3423220 - DNA, 25 bp, Homo sapien
tggtacagtgacccttgtccctcac

SEQ ID NO: 3423221 - DNA, 25 bp, Homo sapien
gctggtacagtgacccttgtccctc

SEQ ID NO: 3423222 - DNA, 25 bp, Homo sapien
ctggtacagtgacccttgtccctca

SEQ ID NO: 3423223 - DNA, 25 bp, Homo sapien
gggtctcagcggagttctcccatcc

SEQ ID NO: 3423224 - DNA, 25 bp, Homo sapien
ggttggcatctgtttcgtgttcctg

SEQ ID NO: 3423225 - DNA, 25 bp, Homo sapien
cctctcggttggcatctgtttcgtg

SEQ ID NO: 3423226 - DNA, 25 bp, Homo sapien
ttcctgcagggtctcagcggagttc

SEQ ID NO: 3423227 - DNA, 25 bp, Homo sapien
gctgttctcaggtatgtccacacga

SEQ ID NO: 3423228 - DNA, 25 bp, Homo sapien
aaaaatcacgtctggctgggtggct

SEQ ID NO: 3423229 - DNA, 25 bp, Homo sapien
gcagtgagccaaagagtgaaattcc

SEQ ID NO: 3423230 - DNA, 25 bp, Homo sapien
gcctgtgacgtgcttcaaagaccta

SEQ ID NO: 3423231 - DNA, 25 bp, Homo sapien
cgtttctccggttcctgtacctcag

SEQ ID NO: 3423232 - DNA, 25 bp, Homo sapien
ttctccggttcctgtacctcagggc

SEQ ID NO: 3423233 - DNA, 25 bp, Homo sapien
ggagctgctcgtgggggccagccat

SEQ ID NO: 3423234 - DNA, 25 bp, Homo sapien
tccgctgacactccagtgccgagaa

SEQ ID NO: 3423235 - DNA, 25 bp, Homo sapien
ctccagtgccgagaaggctgcactc

SEQ ID NO: 3423236 - DNA, 25 bp, Homo sapien
ctgacactccagtgccgagaaggct

SEQ ID NO: 3423237 - DNA, 25 bp, Homo sapien
agttcagctttattctcatgcccct

SEQ ID NO: 3423238 - DNA, 25 bp, Homo sapien
tgcagttcagctttattctcatgcc

SEQ ID NO: 3423239 - DNA, 25 bp, Homo sapien
cagttcagctttattctcatgcccc

SEQ ID NO: 3423240 - DNA, 25 bp, Homo sapien
ttcagctttattctcatgcccctca

SEQ ID NO: 3423241 - DNA, 25 bp, Homo sapien
gcggcgccggttacatggcggctcc

SEQ ID NO: 3423242 - DNA, 25 bp, Homo sapien
cgggcggcgccggttacatggcggc

SEQ ID NO: 3423243 - DNA, 25 bp, Homo sapien
ggcgccggttacatggcggctccgg

SEQ ID NO: 3423244 - DNA, 25 bp, Homo sapien
ggctccgggcggcgccggttacatg

SEQ ID NO: 3423245 - DNA, 25 bp, Homo sapien
acggcgcagctctcatcgtcgtcct

SEQ ID NO: 3423246 - DNA, 25 bp, Homo sapien
gcgcagctctcatcgtcgtcctcgt

SEQ ID NO: 3423247 - DNA, 25 bp, Homo sapien
ctccacggcgcagctctcatcgtcg

SEQ ID NO: 3423248 - DNA, 25 bp, Homo sapien
tccacggcgcagctctcatcgtcgt

SEQ ID NO: 3423249 - DNA, 25 bp, Homo sapien
agcaccttgagcagctcgaagttct

SEQ ID NO: 3423250 - DNA, 25 bp, Homo sapien
tgagcagctcgaagttctccacgct

SEQ ID NO: 3423251 - DNA, 25 bp, Homo sapien
ccttgagcagctcgaagttctccac

SEQ ID NO: 3423252 - DNA, 25 bp, Homo sapien
ttctcctcgtgcccggtcaggttgg

SEQ ID NO: 3423253 - DNA, 25 bp, Homo sapien
tgctcttgcgtcttggcgcgctgca

SEQ ID NO: 3423254 - DNA, 25 bp, Homo sapien
tcggtgcgcgtgtgctcttgcgtct

SEQ ID NO: 3423255 - DNA, 25 bp, Homo sapien
aagcgtagtgcagcgtgaccaggaa

SEQ ID NO: 3423256 - DNA, 25 bp, Homo sapien
gatgaggtgcagcttggcatccgtc

SEQ ID NO: 3423257 - DNA, 25 bp, Homo sapien
agcacgatctcacccccatacacgc

SEQ ID NO: 3423258 - DNA, 25 bp, Homo sapien
agaggtgggtgaacatctccccgcc

SEQ ID NO: 3423259 - DNA, 25 bp, Homo sapien
gtagaggtgggtgaacatctccccg

SEQ ID NO: 3423260 - DNA, 25 bp, Homo sapien
tccttgaagtactggcgctggtaga

SEQ ID NO: 3423261 - DNA, 25 bp, Homo sapien
tgctgaggcttcctccccgaaaccc

SEQ ID NO: 3423262 - DNA, 25 bp, Homo sapien
caagaggggtgctgaggcttcctcc

SEQ ID NO: 3423263 - DNA, 25 bp, Homo sapien
ggagcaagaggggtgctgaggcttc

SEQ ID NO: 3423264 - DNA, 25 bp, Homo sapien
gggtgctgaggcttcctccccgaaa

SEQ ID NO: 3423265 - DNA, 25 bp, Homo sapien
gtccgtgaggacaatgtggccctcg

SEQ ID NO: 3423266 - DNA, 25 bp, Homo sapien
aggaactccttgctcagcccgaagt

SEQ ID NO: 3423267 - DNA, 25 bp, Homo sapien
tcagcccgaagtccgtgaggacaat

SEQ ID NO: 3423268 - DNA, 25 bp, Homo sapien
tttcaggtctcggtaaatgatgccg

SEQ ID NO: 3423269 - DNA, 25 bp, Homo sapien
cccgtcttgctacggatgatttcgg

SEQ ID NO: 3423270 - DNA, 25 bp, Homo sapien
gatttcgggggccatgtactcgatg

SEQ ID NO: 3423271 - DNA, 25 bp, Homo sapien
gccacagaaggagaaggtccgctct

SEQ ID NO: 3423272 - DNA, 25 bp, Homo sapien
ttgccatgccccgtcttgctacgga

SEQ ID NO: 3423273 - DNA, 25 bp, Homo sapien
ggtgaagggcgaggcccccgtcagc

SEQ ID NO: 3423274 - DNA, 25 bp, Homo sapien
agcctgcgtgttcctctcgccctcc

SEQ ID NO: 3423275 - DNA, 25 bp, Homo sapien
ccccgtcagcagctcgaagagcaag

SEQ ID NO: 3423276 - DNA, 25 bp, Homo sapien
cagcagctcgaagagcaagatgccc

SEQ ID NO: 3423277 - DNA, 25 bp, Homo sapien
gcagcaggtcctgcgccacgggccc

SEQ ID NO: 3423278 - DNA, 25 bp, Homo sapien
gcgcccaatcgcttcttaggatcct

SEQ ID NO: 3423279 - DNA, 25 bp, Homo sapien
caatcgcttcttaggatccttacaa

SEQ ID NO: 3423280 - DNA, 25 bp, Homo sapien
agaagggatggttccggacttcttg

SEQ ID NO: 3423281 - DNA, 25 bp, Homo sapien
cagccgagtgaattcctccgcaaag

SEQ ID NO: 3423282 - DNA, 25 bp, Homo sapien
gccggaatggggctggaatcttcct

SEQ ID NO: 3423283 - DNA, 25 bp, Homo sapien
gaattcctccgcaaagttgcccaca

SEQ ID NO: 3423284 - DNA, 25 bp, Homo sapien
cagctctgagcggatttggggccgg

SEQ ID NO: 3423285 - DNA, 25 bp, Homo sapien
tggggggctgccagggggtgagtag

SEQ ID NO: 3423286 - DNA, 25 bp, Homo sapien
gggggctgccagggggtgagtagac

SEQ ID NO: 3423287 - DNA, 25 bp, Homo sapien
ggggggctgccagggggtgagtaga

SEQ ID NO: 3423288 - DNA, 25 bp, Homo sapien
gtggtcaaagagaatggagggtgcc

SEQ ID NO: 3423289 - DNA, 25 bp, Homo sapien
tgtggtcaaagagaatggagggtgc

SEQ ID NO: 3423290 - DNA, 25 bp, Homo sapien
aggcgcttccagcccatcggtcatc

SEQ ID NO: 3423291 - DNA, 25 bp, Homo sapien
accaggcgcttccagcccatcggtc

SEQ ID NO: 3423292 - DNA, 25 bp, Homo sapien
gcgcttccagcccatcggtcatcac

SEQ ID NO: 3423293 - DNA, 25 bp, Homo sapien
caggcgcttccagcccatcggtcat

SEQ ID NO: 3423294 - DNA, 25 bp, Homo sapien
ggcagcggcgacacacagaaaagct

SEQ ID NO: 3423295 - DNA, 25 bp, Homo sapien
cagcggcgacacacagaaaagctgc

SEQ ID NO: 3423296 - DNA, 25 bp, Homo sapien
cggcgacacacagaaaagctgccct

SEQ ID NO: 3423297 - DNA, 25 bp, Homo sapien
agcggcgacacacagaaaagctgcc

SEQ ID NO: 3423298 - DNA, 25 bp, Homo sapien
accacgttggggtgtgactggcaca

SEQ ID NO: 3423299 - DNA, 25 bp, Homo sapien
ctggtcgtgatgcacctcgtgcaga

SEQ ID NO: 3423300 - DNA, 25 bp, Homo sapien
cacctcgtgcagattcaccacgttg

SEQ ID NO: 3423301 - DNA, 25 bp, Homo sapien
cagccacttcgcgctgcgtgttcgc

SEQ ID NO: 3423302 - DNA, 25 bp, Homo sapien
cgcctcctcgtgcatgaagctcacg

SEQ ID NO: 3423303 - DNA, 25 bp, Homo sapien
gcttgcttccgactcgctgaagtgc

SEQ ID NO: 3423304 - DNA, 25 bp, Homo sapien
cacgaggctgcgcaggatctggctt

SEQ ID NO: 3423305 - DNA, 25 bp, Homo sapien
aagtgccgcttcttgcggatgtgct

SEQ ID NO: 3423306 - DNA, 25 bp, Homo sapien
gcggggtagtggtcagaggcagccc

SEQ ID NO: 3423307 - DNA, 25 bp, Homo sapien
ccgcgcgaacccgaagtcgatgatt

SEQ ID NO: 3423308 - DNA, 25 bp, Homo sapien
tctgcatgggcaccccgggactctg

SEQ ID NO: 3423309 - DNA, 25 bp, Homo sapien
tccagaggtcgcaggactcgtcgta

SEQ ID NO: 3423310 - DNA, 25 bp, Homo sapien
cgggcgtgtcgtcggcgtacaggat

SEQ ID NO: 3423311 - DNA, 25 bp, Homo sapien
ggaaggggacctgccccgacagcat

SEQ ID NO: 3423312 - DNA, 25 bp, Homo sapien
gggacctgccccgacagcatcatgt

SEQ ID NO: 3423313 - DNA, 25 bp, Homo sapien
ggggacctgccccgacagcatcatg

SEQ ID NO: 3423314 - DNA, 25 bp, Homo sapien
cctggaaggggacctgccccgacag

SEQ ID NO: 3423315 - DNA, 25 bp, Homo sapien
ccaggcctccccgtcaagggagaag

SEQ ID NO: 3423316 - DNA, 25 bp, Homo sapien
cgtcaagggagaagcgcccctcgcg

SEQ ID NO: 3423317 - DNA, 25 bp, Homo sapien
ccttggcttcctcggatacaccctg

SEQ ID NO: 3423318 - DNA, 25 bp, Homo sapien
ggattttgcacatgatctcggccgc

SEQ ID NO: 3423319 - DNA, 25 bp, Homo sapien
tggtctatgacctccagctccgcac

SEQ ID NO: 3423320 - DNA, 25 bp, Homo sapien
catggtctatgacctccagctccgc

SEQ ID NO: 3423321 - DNA, 25 bp, Homo sapien
atggtctatgacctccagctccgca

SEQ ID NO: 3423322 - DNA, 25 bp, Homo sapien
agcgcactgcgggcccagaggactc

SEQ ID NO: 3423323 - DNA, 25 bp, Homo sapien
agctgccccgcagtccctcgagctt

SEQ ID NO: 3423324 - DNA, 25 bp, Homo sapien
agcttcagccgcttggcggggtcca

SEQ ID NO: 3423325 - DNA, 25 bp, Homo sapien
catgaaggtggcgttgagacccgag

SEQ ID NO: 3423326 - DNA, 25 bp, Homo sapien
gctcggcccgggttggctggtgcag

SEQ ID NO: 3423327 - DNA, 25 bp, Homo sapien
aggggtgcattctccacgctcttca

SEQ ID NO: 3423328 - DNA, 25 bp, Homo sapien
cctcccgcttgccccggttgaatgc

SEQ ID NO: 3423329 - DNA, 25 bp, Homo sapien
aggcggtggcgctccgcagcttctg

SEQ ID NO: 3423330 - DNA, 25 bp, Homo sapien
ggtggacgtaattgcacagacagtc

SEQ ID NO: 3423331 - DNA, 25 bp, Homo sapien
aggtcacagcccctatgagggaagg

SEQ ID NO: 3423332 - DNA, 25 bp, Homo sapien
ggtcccagtttaggagttagcactc

SEQ ID NO: 3423333 - DNA, 25 bp, Homo sapien
ccaggagtagctgtgccaaagagga

SEQ ID NO: 3423334 - DNA, 25 bp, Homo sapien
acatgatggagtctgatcagcccag

SEQ ID NO: 3423335 - DNA, 25 bp, Homo sapien
tggcataacccagcaaaagctgact

SEQ ID NO: 3423336 - DNA, 25 bp, Homo sapien
ggtgggatgacttttttatctgagt

SEQ ID NO: 3423337 - DNA, 25 bp, Homo sapien
gcttcctggttcctaattgtttctc

SEQ ID NO: 3423338 - DNA, 25 bp, Homo sapien
ttataattattataagccactgagt

SEQ ID NO: 3423339 - DNA, 25 bp, Homo sapien
catagaacaggctcacacctactgc

SEQ ID NO: 3423340 - DNA, 25 bp, Homo sapien
aacatagaacaggctcacacctact

SEQ ID NO: 3423341 - DNA, 25 bp, Homo sapien
ataattattataagccactgagttt

SEQ ID NO: 3423342 - DNA, 25 bp, Homo sapien
tatttaaatccttccaggatcagag

SEQ ID NO: 3423343 - DNA, 25 bp, Homo sapien
tgttggtatctactctgtgctggcc

SEQ ID NO: 3423344 - DNA, 25 bp, Homo sapien
ggagcatggtatctccctaagccca

SEQ ID NO: 3423345 - DNA, 25 bp, Homo sapien
gaacagagggatataagccacttct

SEQ ID NO: 3423346 - DNA, 25 bp, Homo sapien
tggtcacagaatagtgtcactcctt

SEQ ID NO: 3423347 - DNA, 25 bp, Homo sapien
ggtggtcacagaatagtgtcactcc

SEQ ID NO: 3423348 - DNA, 25 bp, Homo sapien
tggtggtcacagaatagtgtcactc

SEQ ID NO: 3423349 - DNA, 25 bp, Homo sapien
catggtggtcacagaatagtgtcac

SEQ ID NO: 3423350 - DNA, 25 bp, Homo sapien
ctgggactgcggtgatttgaaaact

SEQ ID NO: 3423351 - DNA, 25 bp, Homo sapien
ggatacccaggatgtcttcagcagt

SEQ ID NO: 3423352 - DNA, 25 bp, Homo sapien
tgaatatgagctgacagggctcagc

SEQ ID NO: 3423353 - DNA, 25 bp, Homo sapien
catacagttggagtcaaatggcagc

SEQ ID NO: 3423354 - DNA, 25 bp, Homo sapien
gggagctgagtggccgggagcgcca

SEQ ID NO: 3423355 - DNA, 25 bp, Homo sapien
caccccaagcgaggcagggggagct

SEQ ID NO: 3423356 - DNA, 25 bp, Homo sapien
gagcagaggccagcgctcccgacgt

SEQ ID NO: 3423357 - DNA, 25 bp, Homo sapien
agcaccaccccaagcgaggcagggg

SEQ ID NO: 3423358 - DNA, 25 bp, Homo sapien
ccagagtctgaggttaacactccgt

SEQ ID NO: 3423359 - DNA, 25 bp, Homo sapien
gtcagtcaccatcaacgacgtgtcc

SEQ ID NO: 3423360 - DNA, 25 bp, Homo sapien
caagctgcagaggacgcaaatccag

SEQ ID NO: 3423361 - DNA, 25 bp, Homo sapien
tttggcaaggctccttgggacgccg

SEQ ID NO: 3423362 - DNA, 25 bp, Homo sapien
caggtattgtggctccattggctga

SEQ ID NO: 3423363 - DNA, 25 bp, Homo sapien
cattggctgaggatgcttctccagc

SEQ ID NO: 3423364 - DNA, 25 bp, Homo sapien
gctgaggatgcttctccagcgaagg

SEQ ID NO: 3423365 - DNA, 25 bp, Homo sapien
ctccattggctgaggatgcttctcc

SEQ ID NO: 3423366 - DNA, 25 bp, Homo sapien
caggtgaccacaggcggaggcctga

SEQ ID NO: 3423367 - DNA, 25 bp, Homo sapien
aggggcctccgcaacgggctccagt

SEQ ID NO: 3423368 - DNA, 25 bp, Homo sapien
tgcagcatcccgtccttggggccag

SEQ ID NO: 3423369 - DNA, 25 bp, Homo sapien
tgatattaaacgagccgggcatccc

SEQ ID NO: 3423370 - DNA, 25 bp, Homo sapien
taggaacattctctagacccggctg

SEQ ID NO: 3423371 - DNA, 25 bp, Homo sapien
tgtcttccaacagaggcaatgggtc

SEQ ID NO: 3423372 - DNA, 25 bp, Homo sapien
tctgacccctggctatagaagagaa

SEQ ID NO: 3423373 - DNA, 25 bp, Homo sapien
gctttaaattggtgatgcgtggccc

SEQ ID NO: 3423374 - DNA, 25 bp, Homo sapien
tcaatgttgaaggtccgctggggtc

SEQ ID NO: 3423375 - DNA, 25 bp, Homo sapien
tccgctggggtcgtgaacacaaaag

SEQ ID NO: 3423376 - DNA, 25 bp, Homo sapien
tcccatccatagggatgggctctgg

SEQ ID NO: 3423377 - DNA, 25 bp, Homo sapien
tggccctctcgaccttgcaggatca

SEQ ID NO: 3423378 - DNA, 25 bp, Homo sapien
cccgtgtctgtgtgggactctctat

SEQ ID NO: 3423379 - DNA, 25 bp, Homo sapien
ttcatctcgtgcctgtgtgggaccc

SEQ ID NO: 3423380 - DNA, 25 bp, Homo sapien
tcgtgcctgtgtgggaccctcttca

SEQ ID NO: 3423381 - DNA, 25 bp, Homo sapien
ccgtgtctgtgtgggactctctatt

SEQ ID NO: 3423382 - DNA, 25 bp, Homo sapien
gaactgatggcctaacatcaacaaa

SEQ ID NO: 3423383 - DNA, 25 bp, Homo sapien
cgtggtcctgttcttgaactgatgg

SEQ ID NO: 3423384 - DNA, 25 bp, Homo sapien
tgcggacatcgtgggaaacaaagcc

SEQ ID NO: 3423385 - DNA, 25 bp, Homo sapien
tgacacagaggacgatgcggacatc

SEQ ID NO: 3423386 - DNA, 25 bp, Homo sapien
gcaggagacgagcggctggggagct

SEQ ID NO: 3423387 - DNA, 25 bp, Homo sapien
acacagcaggagacgagcggctggg

SEQ ID NO: 3423388 - DNA, 25 bp, Homo sapien
cacacagcaggagacgagcggctgg

SEQ ID NO: 3423389 - DNA, 25 bp, Homo sapien
ggagacgagcggctggggagctagt

SEQ ID NO: 3423390 - DNA, 25 bp, Homo sapien
gtacactctgtgtcttctactgtcc

SEQ ID NO: 3423391 - DNA, 25 bp, Homo sapien
tcaggtcttcaaagggctcacaatc

SEQ ID NO: 3423392 - DNA, 25 bp, Homo sapien
tgtcttctactgtccaatagcttcc

SEQ ID NO: 3423393 - DNA, 25 bp, Homo sapien
ttcacattggagagggtcaagaaaa

SEQ ID NO: 3423394 - DNA, 25 bp, Homo sapien
acaaggctcaggcaagctggccagg

SEQ ID NO: 3423395 - DNA, 25 bp, Homo sapien
ggtgggtagagtccatctgcacatg

SEQ ID NO: 3423396 - DNA, 25 bp, Homo sapien
gacgccaaaagatgctccactctag

SEQ ID NO: 3423397 - DNA, 25 bp, Homo sapien
catcttgttctaggagggacaggga

SEQ ID NO: 3423398 - DNA, 25 bp, Homo sapien
caactttattattcgcggatcggca

SEQ ID NO: 3423399 - DNA, 25 bp, Homo sapien
aaagcaactttattattcgcggatc

SEQ ID NO: 3423400 - DNA, 25 bp, Homo sapien
aactttattattcgcggatcggcat

SEQ ID NO: 3423401 - DNA, 25 bp, Homo sapien
agcaactttattattcgcggatcgg

SEQ ID NO: 3423402 - DNA, 25 bp, Homo sapien
gtggtcaactgaatagggtggggtc

SEQ ID NO: 3423403 - DNA, 25 bp, Homo sapien
ccacagtggtcaactgaatagggtg

SEQ ID NO: 3423404 - DNA, 25 bp, Homo sapien
gtcaactgaatagggtggggtcctg

SEQ ID NO: 3423405 - DNA, 25 bp, Homo sapien
cagggaggcgacgggcaagtcagcc

SEQ ID NO: 3423406 - DNA, 25 bp, Homo sapien
tgggcctcatctaggcaggtgacag

SEQ ID NO: 3423407 - DNA, 25 bp, Homo sapien
tgacagctggatccaccttattcca

SEQ ID NO: 3423408 - DNA, 25 bp, Homo sapien
tattccagcgtccttctggtccaac

SEQ ID NO: 3423409 - DNA, 25 bp, Homo sapien
tctggtccaactccagcgatttttt

SEQ ID NO: 3423410 - DNA, 25 bp, Homo sapien
cactgtggatttgggaataaccagc

SEQ ID NO: 3423411 - DNA, 25 bp, Homo sapien
ccgccccatgcttgtgtagaaactg

SEQ ID NO: 3423412 - DNA, 25 bp, Homo sapien
cctcagtggcaatggtggagaaaaa

SEQ ID NO: 3423413 - DNA, 25 bp, Homo sapien
aaggtttctgtcatgcactgccgga

SEQ ID NO: 3423414 - DNA, 25 bp, Homo sapien
gacatggatcttctgtggagggagc

SEQ ID NO: 3423415 - DNA, 25 bp, Homo sapien
tcgagtcctgggaatcacacaccag

SEQ ID NO: 3423416 - DNA, 25 bp, Homo sapien
caactgcttcgagtcctgggaatca

SEQ ID NO: 3423417 - DNA, 25 bp, Homo sapien
ggcctgtggcaactgcttcgagtcc

SEQ ID NO: 3423418 - DNA, 25 bp, Homo sapien
aaaagcacatccaattgtcgttgca

SEQ ID NO: 3423419 - DNA, 25 bp, Homo sapien
tccaattgtcgttgcaaaacctctg

SEQ ID NO: 3423420 - DNA, 25 bp, Homo sapien
ttgtcgttgcaaaacctctgtccct

SEQ ID NO: 3423421 - DNA, 25 bp, Homo sapien
gcacatccaattgtcgttgcaaaac

SEQ ID NO: 3423422 - DNA, 25 bp, Homo sapien
caggtagaggctgccgcagtgacat

SEQ ID NO: 3423423 - DNA, 25 bp, Homo sapien
cgcagtgacatagggcaggcatgcc

SEQ ID NO: 3423424 - DNA, 25 bp, Homo sapien
gtgggtgccaggtggtgacaagcac

SEQ ID NO: 3423425 - DNA, 25 bp, Homo sapien
tggccatttcgccacacagcctgca

SEQ ID NO: 3423426 - DNA, 25 bp, Homo sapien
tcctgtccgggtaatgctgacaagg

SEQ ID NO: 3423427 - DNA, 25 bp, Homo sapien
tcgtgctgtaaggagcttccagacc

SEQ ID NO: 3423428 - DNA, 25 bp, Homo sapien
gggccctcggcttgtcgattcctgt

SEQ ID NO: 3423429 - DNA, 25 bp, Homo sapien
tccagacccgggttcacttgagcgg

SEQ ID NO: 3423430 - DNA, 25 bp, Homo sapien
tgaaggggactaagctcactgtgcc

SEQ ID NO: 3423431 - DNA, 25 bp, Homo sapien
agtcagtccctcagtcccgggaagc

SEQ ID NO: 3423432 - DNA, 25 bp, Homo sapien
tccaggagtgactgtgcggatgccc

SEQ ID NO: 3423433 - DNA, 25 bp, Homo sapien
gggcatccgagctgcccaccaagtg

SEQ ID NO: 3423434 - DNA, 25 bp, Homo sapien
tgacctaactgctgtttggaaccga

SEQ ID NO: 3423435 - DNA, 25 bp, Homo sapien
accgattgcagccacaagatccagg

SEQ ID NO: 3423436 - DNA, 25 bp, Homo sapien
aacagagctgcctcggctgagcgga

SEQ ID NO: 3423437 - DNA, 25 bp, Homo sapien
ggctgagcggactgctgacctaact

SEQ ID NO: 3423438 - DNA, 25 bp, Homo sapien
ggaagaggcccacgcctccggcttg

SEQ ID NO: 3423439 - DNA, 25 bp, Homo sapien
acgcctccggcttgctccaagagct

SEQ ID NO: 3423440 - DNA, 25 bp, Homo sapien
cacgcctccggcttgctccaagagc

SEQ ID NO: 3423441 - DNA, 25 bp, Homo sapien
agggtctggaagaggcccacgcctc

SEQ ID NO: 3423442 - DNA, 25 bp, Homo sapien
tcggtggcctgggatggcggctgag

SEQ ID NO: 3423443 - DNA, 25 bp, Homo sapien
aaccgcagagccattgtccagcatg

SEQ ID NO: 3423444 - DNA, 25 bp, Homo sapien
catgtgtgtccagcatcggtggcct

SEQ ID NO: 3423445 - DNA, 25 bp, Homo sapien
aggagcatctgggaaggtatcatga

SEQ ID NO: 3423446 - DNA, 25 bp, Homo sapien
tggagtcacggctaatgggtcagta

SEQ ID NO: 3423447 - DNA, 25 bp, Homo sapien
accaggcgaggctggcgaatgtcca

SEQ ID NO: 3423448 - DNA, 25 bp, Homo sapien
tgtccagatgccagcattcagaggt

SEQ ID NO: 3423449 - DNA, 25 bp, Homo sapien
tccccctgcagctgagttgtctgga

SEQ ID NO: 3423450 - DNA, 25 bp, Homo sapien
agaggaggccccagataaaggagcc

SEQ ID NO: 3423451 - DNA, 25 bp, Homo sapien
gcccaccaggatcccggacatgaag

SEQ ID NO: 3423452 - DNA, 25 bp, Homo sapien
ccagataaaggagcccaccaggatc

SEQ ID NO: 3423453 - DNA, 25 bp, Homo sapien
ttaggggcttcaagccctgggagct

SEQ ID NO: 3423454 - DNA, 25 bp, Homo sapien
gctgttcaacagaatgagcctctgt

SEQ ID NO: 3423455 - DNA, 25 bp, Homo sapien
ctctgcactgcaggctgttcaacag

SEQ ID NO: 3423456 - DNA, 25 bp, Homo sapien
tgcaggctgttcaacagaatgagcc

SEQ ID NO: 3423457 - DNA, 25 bp, Homo sapien
gaacacaggtttgggcatcagatgc

SEQ ID NO: 3423458 - DNA, 25 bp, Homo sapien
gccacgaaccgcaggccgcagtaga

SEQ ID NO: 3423459 - DNA, 25 bp, Homo sapien
caggccgcagtagatgacgaatgtt

SEQ ID NO: 3423460 - DNA, 25 bp, Homo sapien
agatgccggccatcccaaaagcggc

SEQ ID NO: 3423461 - DNA, 25 bp, Homo sapien
agtgaactcagaaagatgccggcca

SEQ ID NO: 3423462 - DNA, 25 bp, Homo sapien
gagtcctccagtcccgcagggcaaa

SEQ ID NO: 3423463 - DNA, 25 bp, Homo sapien
gccctcctgctggtcgtggtccact

SEQ ID NO: 3423464 - DNA, 25 bp, Homo sapien
tggcctgcgctgaaggcacatccca

SEQ ID NO: 3423465 - DNA, 25 bp, Homo sapien
cccaccaccgtcatggtgaccgccc

SEQ ID NO: 3423466 - DNA, 25 bp, Homo sapien
aggaaaaggtcccacatcatactga

SEQ ID NO: 3423467 - DNA, 25 bp, Homo sapien
gctgcaacacttagcccaggactgc

SEQ ID NO: 3423468 - DNA, 25 bp, Homo sapien
tggcccttctgtggcactccaggtc

SEQ ID NO: 3423469 - DNA, 25 bp, Homo sapien
tctggacctactgccagccagagag

SEQ ID NO: 3423470 - DNA, 25 bp, Homo sapien
tattgtaattatgggatggccttcc

SEQ ID NO: 3423471 - DNA, 25 bp, Homo sapien
cgtagtggtgaagagttagcctgcc

SEQ ID NO: 3423472 - DNA, 25 bp, Homo sapien
tgtgtatgaaacgtaagctccacgg

SEQ ID NO: 3423473 - DNA, 25 bp, Homo sapien
gacttctggaggcagtctgacgtag

SEQ ID NO: 3423474 - DNA, 25 bp, Homo sapien
ggccatttatcctggccacctttct

SEQ ID NO: 3423475 - DNA, 25 bp, Homo sapien
gtggccatttatcctggccaccttt

SEQ ID NO: 3423476 - DNA, 25 bp, Homo sapien
gccaccgggcggattctggcagcca

SEQ ID NO: 3423477 - DNA, 25 bp, Homo sapien
gtctggtttgcccttaataatcagc

SEQ ID NO: 3423478 - DNA, 25 bp, Homo sapien
tccagcggagcacgggcacgcagaa

SEQ ID NO: 3423479 - DNA, 25 bp, Homo sapien
ggcacgcagaacaggtccagcaccg

SEQ ID NO: 3423480 - DNA, 25 bp, Homo sapien
agaacaggtccagcaccgaccgcgg

SEQ ID NO: 3423481 - DNA, 25 bp, Homo sapien
gctcctccagcggagcacgggcacg

SEQ ID NO: 3423482 - DNA, 25 bp, Homo sapien
gaatgcaggttcaccctctaggagc

SEQ ID NO: 3423483 - DNA, 25 bp, Homo sapien
gagccttggacagataacaactggg

SEQ ID NO: 3423484 - DNA, 25 bp, Homo sapien
aataacaaaggttgcagagccggcc

SEQ ID NO: 3423485 - DNA, 25 bp, Homo sapien
taagccaagtgttagctcagcccgg

SEQ ID NO: 3423486 - DNA, 25 bp, Homo sapien
ctgcgggcaaggctggaagtcaggt

SEQ ID NO: 3423487 - DNA, 25 bp, Homo sapien
caaggctggaagtcaggtccctgcc

SEQ ID NO: 3423488 - DNA, 25 bp, Homo sapien
ggcaaggctggaagtcaggtccctg

SEQ ID NO: 3423489 - DNA, 25 bp, Homo sapien
cgggcaaggctggaagtcaggtccc

SEQ ID NO: 3423490 - DNA, 25 bp, Homo sapien
caggctctgcaggtcgaagaccagc

SEQ ID NO: 3423491 - DNA, 25 bp, Homo sapien
ccagcccatagtaggagatcaatag

SEQ ID NO: 3423492 - DNA, 25 bp, Homo sapien
ctagaatggcgaggccggccatggc

SEQ ID NO: 3423493 - DNA, 25 bp, Homo sapien
tgttggctagaatggcgaggccggc

SEQ ID NO: 3423494 - DNA, 25 bp, Homo sapien
caggttaggcttatcccaaaacatc

SEQ ID NO: 3423495 - DNA, 25 bp, Homo sapien
cgttggaaagagttcagccttgtag

SEQ ID NO: 3423496 - DNA, 25 bp, Homo sapien
cgcactggcgttggaaagagttcag

SEQ ID NO: 3423497 - DNA, 25 bp, Homo sapien
tggtgaggcaggttaggcttatccc

SEQ ID NO: 3423498 - DNA, 25 bp, Homo sapien
ccccagccggcccactgtatgcaga

SEQ ID NO: 3423499 - DNA, 25 bp, Homo sapien
agcaatggagataacgccatagagg

SEQ ID NO: 3423500 - DNA, 25 bp, Homo sapien
agggcttggcggctcatcaggatca

SEQ ID NO: 3423501 - DNA, 25 bp, Homo sapien
ataacgccatagaggagaggaggca

SEQ ID NO: 3423502 - DNA, 25 bp, Homo sapien
tggatagtgtcagggagcggaagtc

SEQ ID NO: 3423503 - DNA, 25 bp, Homo sapien
tcctggatagtgtcagggagcggaa

SEQ ID NO: 3423504 - DNA, 25 bp, Homo sapien
ctccaggtcctggatagtgtcaggg

SEQ ID NO: 3423505 - DNA, 25 bp, Homo sapien
tccaggtcctggatagtgtcaggga

SEQ ID NO: 3423506 - DNA, 25 bp, Homo sapien
ctcttgccggttgccctgggctgct

SEQ ID NO: 3423507 - DNA, 25 bp, Homo sapien
agtgacggcctcttgccggttgccc

SEQ ID NO: 3423508 - DNA, 25 bp, Homo sapien
ggcctcttgccggttgccctgggct

SEQ ID NO: 3423509 - DNA, 25 bp, Homo sapien
tttccacagtgacggcctcttgccg

SEQ ID NO: 3423510 - DNA, 25 bp, Homo sapien
tttggccggtgctaagatcagttca

SEQ ID NO: 3423511 - DNA, 25 bp, Homo sapien
gagaagaggcaactcctttccagga

SEQ ID NO: 3423512 - DNA, 25 bp, Homo sapien
tattggttgggcatggccatctgca

SEQ ID NO: 3423513 - DNA, 25 bp, Homo sapien
cccagtctctggttggcgtggctga

SEQ ID NO: 3423514 - DNA, 25 bp, Homo sapien
cgggttcggccgtgtttctgcaagc

SEQ ID NO: 3423515 - DNA, 25 bp, Homo sapien
taaggttcagtattaggtgctgccc

SEQ ID NO: 3423516 - DNA, 25 bp, Homo sapien
ctcgaccatcccagagttttcatgg

SEQ ID NO: 3423517 - DNA, 25 bp, Homo sapien
ggaggtctgggcatgaatcaagaaa

SEQ ID NO: 3423518 - DNA, 25 bp, Homo sapien
gaccagtttggagctacaaccgtgg

SEQ ID NO: 3423519 - DNA, 25 bp, Homo sapien
tgattgacccagtgtacacagggtg

SEQ ID NO: 3423520 - DNA, 25 bp, Homo sapien
gatccttattgtgagccactggagg

SEQ ID NO: 3423521 - DNA, 25 bp, Homo sapien
tgcagagtgcaatgtagacatcagg

SEQ ID NO: 3423522 - DNA, 25 bp, Homo sapien
ccccataatcattactttagcttca

SEQ ID NO: 3423523 - DNA, 25 bp, Homo sapien
ctgaggtatttgatttggaacgttc

SEQ ID NO: 3423524 - DNA, 25 bp, Homo sapien
ttcctttgagattccctctttgacc

SEQ ID NO: 3423525 - DNA, 25 bp, Homo sapien
tttgctactttccaggtgaaagctg

SEQ ID NO: 3423526 - DNA, 25 bp, Homo sapien
agttccaacccaggatcatcctgtt

SEQ ID NO: 3423527 - DNA, 25 bp, Homo sapien
tagttccaacccaggatcatcctgt

SEQ ID NO: 3423528 - DNA, 25 bp, Homo sapien
ttagttccaacccaggatcatcctg

SEQ ID NO: 3423529 - DNA, 25 bp, Homo sapien
gttccaacccaggatcatcctgttc

SEQ ID NO: 3423530 - DNA, 25 bp, Homo sapien
cagacctcccgggaaagctgaattt

SEQ ID NO: 3423531 - DNA, 25 bp, Homo sapien
gtttaacccgcgttgaggcaggcac

SEQ ID NO: 3423532 - DNA, 25 bp, Homo sapien
ccctgaggccgcgtgaggtgattcc

SEQ ID NO: 3423533 - DNA, 25 bp, Homo sapien
gaccggtgacacttatggaatcgag

SEQ ID NO: 3423534 - DNA, 25 bp, Homo sapien
aggccacccacgaggtccaggagtt

SEQ ID NO: 3423535 - DNA, 25 bp, Homo sapien
ctgcccaggccacccacgaggtcca

SEQ ID NO: 3423536 - DNA, 25 bp, Homo sapien
ccacccacgaggtccaggagttcag

SEQ ID NO: 3423537 - DNA, 25 bp, Homo sapien
gcccaggccacccacgaggtccagg

SEQ ID NO: 3423538 - DNA, 25 bp, Homo sapien
agagccatcgtctggagaacctgga

SEQ ID NO: 3423539 - DNA, 25 bp, Homo sapien
tcagagccatcgtctggagaacctg

SEQ ID NO: 3423540 - DNA, 25 bp, Homo sapien
agccatcgtctggagaacctggaac

SEQ ID NO: 3423541 - DNA, 25 bp, Homo sapien
atcagagccatcgtctggagaacct

SEQ ID NO: 3423542 - DNA, 25 bp, Homo sapien
gcacggcggccgagaagttctccag

SEQ ID NO: 3423543 - DNA, 25 bp, Homo sapien
tggcctgagccgtgctgttgtccag

SEQ ID NO: 3423544 - DNA, 25 bp, Homo sapien
gctgcggtcatagacccagccatcc

SEQ ID NO: 3423545 - DNA, 25 bp, Homo sapien
tcaggactcaagctccctaggatgc

SEQ ID NO: 3423546 - DNA, 25 bp, Homo sapien
ggtggtgggactcgagtggctctgg

SEQ ID NO: 3423547 - DNA, 25 bp, Homo sapien
catgactgacctccaaggtggtggg

SEQ ID NO: 3423548 - DNA, 25 bp, Homo sapien
ccaaggtggtgggactcgagtggct

SEQ ID NO: 3423549 - DNA, 25 bp, Homo sapien
ccatgactgacctccaaggtggtgg

SEQ ID NO: 3423550 - DNA, 25 bp, Homo sapien
tcccagccaggtagatggactgggc

SEQ ID NO: 3423551 - DNA, 25 bp, Homo sapien
agaatcccagccaggtagatggact

SEQ ID NO: 3423552 - DNA, 25 bp, Homo sapien
cagcagctcccaccagaatcccagc

SEQ ID NO: 3423553 - DNA, 25 bp, Homo sapien
catgagagtcacacacgaggttcca

SEQ ID NO: 3423554 - DNA, 25 bp, Homo sapien
aggaagcggaacaggcagtacacgg

SEQ ID NO: 3423555 - DNA, 25 bp, Homo sapien
aggttagcaccagcctgcgcccaaa

SEQ ID NO: 3423556 - DNA, 25 bp, Homo sapien
ggagagtgcccgtgttcatcatgac

SEQ ID NO: 3423557 - DNA, 25 bp, Homo sapien
cagccatctgaaggtagctccaggt

SEQ ID NO: 3423558 - DNA, 25 bp, Homo sapien
cctgcatggcgccaggtcagagacc

SEQ ID NO: 3423559 - DNA, 25 bp, Homo sapien
cccctgcatggcgccaggtcagaga

SEQ ID NO: 3423560 - DNA, 25 bp, Homo sapien
gcatggcgccaggtcagagacctac

SEQ ID NO: 3423561 - DNA, 25 bp, Homo sapien
agcccccctgcatggcgccaggtca

SEQ ID NO: 3423562 - DNA, 25 bp, Homo sapien
aggtcatcaccaagggtcgggcccg

SEQ ID NO: 3423563 - DNA, 25 bp, Homo sapien
acaccgtaggccactgcagctgtca

SEQ ID NO: 3423564 - DNA, 25 bp, Homo sapien
gctgcagcagtgtccagtcccgcac

SEQ ID NO: 3423565 - DNA, 25 bp, Homo sapien
agtgtccagtcccgcacaccgtagg

SEQ ID NO: 3423566 - DNA, 25 bp, Homo sapien
tgcactgccccctttccgttgatgg

SEQ ID NO: 3423567 - DNA, 25 bp, Homo sapien
gggtcagggtgtcctgcactgcccc

SEQ ID NO: 3423568 - DNA, 25 bp, Homo sapien
tcaggggtcagggtgtcctgcactg

SEQ ID NO: 3423569 - DNA, 25 bp, Homo sapien
ctttccgttgatggcagccaccctc

SEQ ID NO: 3423570 - DNA, 25 bp, Homo sapien
cagcacaacgtggagatacaggtcc

SEQ ID NO: 3423571 - DNA, 25 bp, Homo sapien
aacgtggagatacaggtccggaagc

SEQ ID NO: 3423572 - DNA, 25 bp, Homo sapien
atacaggtccggaagcgcagtccgg

SEQ ID NO: 3423573 - DNA, 25 bp, Homo sapien
gcagtccgggcatgcggagcagggt

SEQ ID NO: 3423574 - DNA, 25 bp, Homo sapien
ccgaagaaggtgaagccaaaggcga

SEQ ID NO: 3423575 - DNA, 25 bp, Homo sapien
ccaggccgaagaaggtgaagccaaa

SEQ ID NO: 3423576 - DNA, 25 bp, Homo sapien
ggccgaagaaggtgaagccaaaggc

SEQ ID NO: 3423577 - DNA, 25 bp, Homo sapien
cgaagaaggtgaagccaaaggcgaa

SEQ ID NO: 3423578 - DNA, 25 bp, Homo sapien
ggcgcccatcttggctgggatgtcc

SEQ ID NO: 3423579 - DNA, 25 bp, Homo sapien
tgttggccagaatgcagagccctgc

SEQ ID NO: 3423580 - DNA, 25 bp, Homo sapien
tgtccacgacaccaatgaacatttg

SEQ ID NO: 3423581 - DNA, 25 bp, Homo sapien
agagccctgccagcaacagggatgc

SEQ ID NO: 3423582 - DNA, 25 bp, Homo sapien
aaggctgagcgcagagcccccattt

SEQ ID NO: 3423583 - DNA, 25 bp, Homo sapien
cagcacggccaaggctgagcgcaga

SEQ ID NO: 3423584 - DNA, 25 bp, Homo sapien
gagctcgctgctgtagatggtgatg

SEQ ID NO: 3423585 - DNA, 25 bp, Homo sapien
aagagctcgctgctgtagatggtga

SEQ ID NO: 3423586 - DNA, 25 bp, Homo sapien
agcggcaagctctgggtctcgggca

SEQ ID NO: 3423587 - DNA, 25 bp, Homo sapien
accgtcccatacaccagcaagggca

SEQ ID NO: 3423588 - DNA, 25 bp, Homo sapien
aagcagtgcggccaggccactcagc

SEQ ID NO: 3423589 - DNA, 25 bp, Homo sapien
acatcttggatggtgtcgggcagcg

SEQ ID NO: 3423590 - DNA, 25 bp, Homo sapien
tgtgtggattttaggacagagttcc

SEQ ID NO: 3423591 - DNA, 25 bp, Homo sapien
agttccccagcgtgccatgtgttgc

SEQ ID NO: 3423592 - DNA, 25 bp, Homo sapien
taaaactgtgtggattttaggacag

SEQ ID NO: 3423593 - DNA, 25 bp, Homo sapien
gtgccatgtgttgccttctttactg

SEQ ID NO: 3423594 - DNA, 25 bp, Homo sapien
acaagtggcagtgcggagtcaagca

SEQ ID NO: 3423595 - DNA, 25 bp, Homo sapien
gggtcacctcctgccaatcaaactg

SEQ ID NO: 3423596 - DNA, 25 bp, Homo sapien
catggatggtggttagctctgagct

SEQ ID NO: 3423597 - DNA, 25 bp, Homo sapien
gagtttcacgggcatctcaggctgg

SEQ ID NO: 3423598 - DNA, 25 bp, Homo sapien
cctctgggaactcataggctggcag

SEQ ID NO: 3423599 - DNA, 25 bp, Homo sapien
tttattcaatccctcgcaccaatgc

SEQ ID NO: 3423600 - DNA, 25 bp, Homo sapien
atgggactgccccaaccctctggga

SEQ ID NO: 3423601 - DNA, 25 bp, Homo sapien
atggggtcatgggactgccccaacc

SEQ ID NO: 3423602 - DNA, 25 bp, Homo sapien
tggtagggcactgccctcggccaag

SEQ ID NO: 3423603 - DNA, 25 bp, Homo sapien
cagctgacaagaccaggccaagcag

SEQ ID NO: 3423604 - DNA, 25 bp, Homo sapien
tctgttttcccatcccatatgtgtg

SEQ ID NO: 3423605 - DNA, 25 bp, Homo sapien
tctgtgtgcgctgcactgcgtttcc

SEQ ID NO: 3423606 - DNA, 25 bp, Homo sapien
catcattgaggtcagctctaagcac

SEQ ID NO: 3423607 - DNA, 25 bp, Homo sapien
cagtcttggagccacggtcagcatc

SEQ ID NO: 3423608 - DNA, 25 bp, Homo sapien
ccaactgctcagtcttggagccacg

SEQ ID NO: 3423609 - DNA, 25 bp, Homo sapien
cagcatcattgaggtcagctctaag

SEQ ID NO: 3423610 - DNA, 25 bp, Homo sapien
tactctagattccacgagcagcagc

SEQ ID NO: 3423611 - DNA, 25 bp, Homo sapien
gtgccgccgggcgacgtgcattgat

SEQ ID NO: 3423612 - DNA, 25 bp, Homo sapien
tcaggcctgacggaaggcctgttct

SEQ ID NO: 3423613 - DNA, 25 bp, Homo sapien
ttgttaacaaatgtgtctgagtctt

SEQ ID NO: 3423614 - DNA, 25 bp, Homo sapien
cactgctcgtcctgttaattttcct

SEQ ID NO: 3423615 - DNA, 25 bp, Homo sapien
gctcgtcctgttaattttcctcaat

SEQ ID NO: 3423616 - DNA, 25 bp, Homo sapien
gggttttgtaaagtgtccactgctc

SEQ ID NO: 3423617 - DNA, 25 bp, Homo sapien
tgtaaagtgtccactgctcgtcctg

SEQ ID NO: 3423618 - DNA, 25 bp, Homo sapien
taagtaccgcaatcgtgatgagggc

SEQ ID NO: 3423619 - DNA, 25 bp, Homo sapien
tacatcagtaactcggcccagagca

SEQ ID NO: 3423620 - DNA, 25 bp, Homo sapien
tgatgagggctcctaccaggtggac

SEQ ID NO: 3423621 - DNA, 25 bp, Homo sapien
aatattgcccattatcacggaggac

SEQ ID NO: 3423622 - DNA, 25 bp, Homo sapien
cccaagtcatagagtgtcgatggta

SEQ ID NO: 3423623 - DNA, 25 bp, Homo sapien
ctggggtggaagaaatcaggatcac

SEQ ID NO: 3423624 - DNA, 25 bp, Homo sapien
ccctgctgctcatttagtcctcggg

SEQ ID NO: 3423625 - DNA, 25 bp, Homo sapien
gctggaacttaggtgcacctgactg

SEQ ID NO: 3423626 - DNA, 25 bp, Homo sapien
gagccacaaggtcactccctactgt

SEQ ID NO: 3423627 - DNA, 25 bp, Homo sapien
caacttgcattctgtttgaggcccc

SEQ ID NO: 3423628 - DNA, 25 bp, Homo sapien
gcagctcccagtccctagtggttgg

SEQ ID NO: 3423629 - DNA, 25 bp, Homo sapien
ctaggctggacatctgattgccaac

SEQ ID NO: 3423630 - DNA, 25 bp, Homo sapien
tggagttccacaacattgagacggg

SEQ ID NO: 3423631 - DNA, 25 bp, Homo sapien
catcatgacggagcggcggtttatc

SEQ ID NO: 3423632 - DNA, 25 bp, Homo sapien
gtcaccttcaagagtcgcagcagct

SEQ ID NO: 3423633 - DNA, 25 bp, Homo sapien
aacttcatcgggcatctgagtgggc

SEQ ID NO: 3423634 - DNA, 25 bp, Homo sapien
gctatgacagagtgcatgctgccac

SEQ ID NO: 3423635 - DNA, 25 bp, Homo sapien
gggtacattgcctttccacctgagg

SEQ ID NO: 3423636 - DNA, 25 bp, Homo sapien
ggcacaggtcactagttaacaggtt

SEQ ID NO: 3423637 - DNA, 25 bp, Homo sapien
gtgttcatactacgaccctgctctc

SEQ ID NO: 3423638 - DNA, 25 bp, Homo sapien
cccagggttgagagcaggccttgac

SEQ ID NO: 3423639 - DNA, 25 bp, Homo sapien
gagcctgttaggttcttctcacggg

SEQ ID NO: 3423640 - DNA, 25 bp, Homo sapien
ccattgcctcggacagggctgctga

SEQ ID NO: 3423641 - DNA, 25 bp, Homo sapien
aaattcagtgcttttcccattgcct

SEQ ID NO: 3423642 - DNA, 25 bp, Homo sapien
gcagatgagggtgtcccaacactag

SEQ ID NO: 3423643 - DNA, 25 bp, Homo sapien
ggcagcaaggcacgaaggcaagcct

SEQ ID NO: 3423644 - DNA, 25 bp, Homo sapien
caagcctgagttaatgtgtgcgggc

SEQ ID NO: 3423645 - DNA, 25 bp, Homo sapien
agccagtgcctgaatgggtgctcct

SEQ ID NO: 3423646 - DNA, 25 bp, Homo sapien
gggactagtacatgtggcaaaacca

SEQ ID NO: 3423647 - DNA, 25 bp, Homo sapien
tgaggagtcgagaaatggcctcgtt

SEQ ID NO: 3423648 - DNA, 25 bp, Homo sapien
gctgacccaggtctccggtggtaaa

SEQ ID NO: 3423649 - DNA, 25 bp, Homo sapien
gcctcgtttctccacttggccttgg

SEQ ID NO: 3423650 - DNA, 25 bp, Homo sapien
taattgcccgggtgttagatgcatg

SEQ ID NO: 3423651 - DNA, 25 bp, Homo sapien
ggaatcctgacatgttaggcaagac

SEQ ID NO: 3423652 - DNA, 25 bp, Homo sapien
cagtgtgtgtagagtagccagaaaa

SEQ ID NO: 3423653 - DNA, 25 bp, Homo sapien
catgactcctatagagcaaggctac

SEQ ID NO: 3423654 - DNA, 25 bp, Homo sapien
taaagttgccgagggtaggttcatc

SEQ ID NO: 3423655 - DNA, 25 bp, Homo sapien
tagattcaacactgcgctaaagcgg

SEQ ID NO: 3423656 - DNA, 25 bp, Homo sapien
gatggttcggcaaagcagcctgagt

SEQ ID NO: 3423657 - DNA, 25 bp, Homo sapien
ttttgtggacggaatcggaacacgc

SEQ ID NO: 3423658 - DNA, 25 bp, Homo sapien
tctggacttgtaaactctggtggag

SEQ ID NO: 3423659 - DNA, 25 bp, Homo sapien
tatacaaatgctagaaacggaggtg

SEQ ID NO: 3423660 - DNA, 25 bp, Homo sapien
gctgtttgcaggttcagaccctaga

SEQ ID NO: 3423661 - DNA, 25 bp, Homo sapien
tgggagcagccgagttcagtccttg

SEQ ID NO: 3423662 - DNA, 25 bp, Homo sapien
tggagaacaccgcaggtactgtaaa

SEQ ID NO: 3423663 - DNA, 25 bp, Homo sapien
gagccgctggaaccaagacacaatg

SEQ ID NO: 3423664 - DNA, 25 bp, Homo sapien
tcacttaggagtaagaacagtcccc

SEQ ID NO: 3423665 - DNA, 25 bp, Homo sapien
tcgtaactgcagtgttctccatgag

SEQ ID NO: 3423666 - DNA, 25 bp, Homo sapien
cgtaaatctcgttccggctgggcct

SEQ ID NO: 3423667 - DNA, 25 bp, Homo sapien
tagggcttccttgctggacccaagg

SEQ ID NO: 3423668 - DNA, 25 bp, Homo sapien
caaaggttgacgtcacttagggctt

SEQ ID NO: 3423669 - DNA, 25 bp, Homo sapien
agcgtcaactgagccggttttccgg

SEQ ID NO: 3423670 - DNA, 25 bp, Homo sapien
caagctcctgctccgtcttgtaaag

SEQ ID NO: 3423671 - DNA, 25 bp, Homo sapien
gattctacgccatttatcaacgaaa

SEQ ID NO: 3423672 - DNA, 25 bp, Homo sapien
ggtatttccggattctgttgcacta

SEQ ID NO: 3423673 - DNA, 25 bp, Homo sapien
gcactaatgtgtctttcctaccaac

SEQ ID NO: 3423674 - DNA, 25 bp, Homo sapien
gacttttgacatacgtgtacacccg

SEQ ID NO: 3423675 - DNA, 25 bp, Homo sapien
tggaaagtttcccatgcccttggta

SEQ ID NO: 3423676 - DNA, 25 bp, Homo sapien
tgtacacccgtgaagctatttccac

SEQ ID NO: 3423677 - DNA, 25 bp, Homo sapien
taatcaccgaaaaaatagaactcgc

SEQ ID NO: 3423678 - DNA, 25 bp, Homo sapien
cctgcagtgagatccctattggtgg

SEQ ID NO: 3423679 - DNA, 25 bp, Homo sapien
accatgatgtgtgcttcgggacggc

SEQ ID NO: 3423680 - DNA, 25 bp, Homo sapien
ggagtccctgcaatctgcccttgga

SEQ ID NO: 3423681 - DNA, 25 bp, Homo sapien
agaaacctgtgggagggtcagacca

SEQ ID NO: 3423682 - DNA, 25 bp, Homo sapien
ccctacacgggtgccaccttcctgc

SEQ ID NO: 3423683 - DNA, 25 bp, Homo sapien
tgctggccgccctgcccaccagcct

SEQ ID NO: 3423684 - DNA, 25 bp, Homo sapien
ctcctgctgcagtggtatgagccgc

SEQ ID NO: 3423685 - DNA, 25 bp, Homo sapien
gtatgagccgctgcagaagtttctg

SEQ ID NO: 3423686 - DNA, 25 bp, Homo sapien
gagtacagtctgtatcaaacccacg

SEQ ID NO: 3423687 - DNA, 25 bp, Homo sapien
tagagccagaccaacgttactcagg

SEQ ID NO: 3423688 - DNA, 25 bp, Homo sapien
gcatcccggaggaaatctgcagagg

SEQ ID NO: 3423689 - DNA, 25 bp, Homo sapien
gggctctgccccagtcgttagaata

SEQ ID NO: 3423690 - DNA, 25 bp, Homo sapien
gaaagtctttggtgatgtgtagaag

SEQ ID NO: 3423691 - DNA, 25 bp, Homo sapien
cagggaggagaccaggtagaagggc

SEQ ID NO: 3423692 - DNA, 25 bp, Homo sapien
ccttcctggagtataacagaggtca

SEQ ID NO: 3423693 - DNA, 25 bp, Homo sapien
gtcaaatgtggcaggagcactgatg

SEQ ID NO: 3423694 - DNA, 25 bp, Homo sapien
taggtgggaatcttatccatgaccc

SEQ ID NO: 3423695 - DNA, 25 bp, Homo sapien
tcctacttcaaggatcgggcccaca

SEQ ID NO: 3423696 - DNA, 25 bp, Homo sapien
tcatcacaggttggagcccagtagg

SEQ ID NO: 3423697 - DNA, 25 bp, Homo sapien
tgtcatatggaacagcctcagccgc

SEQ ID NO: 3423698 - DNA, 25 bp, Homo sapien
gcctggagctggtaggcgctccaaa

SEQ ID NO: 3423699 - DNA, 25 bp, Homo sapien
cagacctgtgtcacggctctcatcg

SEQ ID NO: 3423700 - DNA, 25 bp, Homo sapien
gcctccacttcatgactggcttggt

SEQ ID NO: 3423701 - DNA, 25 bp, Homo sapien
taaccgctgcgattgctgtggtcac

SEQ ID NO: 3423702 - DNA, 25 bp, Homo sapien
caggcgttagccaacgcgtccagcc

SEQ ID NO: 3423703 - DNA, 25 bp, Homo sapien
ggcgttagccaacgcgtccagccta

SEQ ID NO: 3423704 - DNA, 25 bp, Homo sapien
gttagccaacgcgtccagcctaatt

SEQ ID NO: 3423705 - DNA, 25 bp, Homo sapien
gcgttagccaacgcgtccagcctaa

SEQ ID NO: 3423706 - DNA, 25 bp, Homo sapien
cagggacagcgggattattgccacc

SEQ ID NO: 3423707 - DNA, 25 bp, Homo sapien
gaggaagtaccatcgttgtccccag

SEQ ID NO: 3423708 - DNA, 25 bp, Homo sapien
tctccgtgtcattgagtgggactgc

SEQ ID NO: 3423709 - DNA, 25 bp, Homo sapien
aggtggactgcccaatctccgtgtc

SEQ ID NO: 3423710 - DNA, 25 bp, Homo sapien
ggctggagctcagcagtgcaatctc

SEQ ID NO: 3423711 - DNA, 25 bp, Homo sapien
ctggagctcagcagtgcaatctcag

SEQ ID NO: 3423712 - DNA, 25 bp, Homo sapien
caggctggagctcagcagtgcaatc

SEQ ID NO: 3423713 - DNA, 25 bp, Homo sapien
catgcaccacctcgcctggctattt

SEQ ID NO: 3423714 - DNA, 25 bp, Homo sapien
cagcgctgctcggagtctgcaggaa

SEQ ID NO: 3423715 - DNA, 25 bp, Homo sapien
gccacagacggatgagtgggcacct

SEQ ID NO: 3423716 - DNA, 25 bp, Homo sapien
gcccgtcactccatacagtattagg

SEQ ID NO: 3423717 - DNA, 25 bp, Homo sapien
agtctgaactgtgcgaaagcttcgg

SEQ ID NO: 3423718 - DNA, 25 bp, Homo sapien
tccaagcgcagacatgagtgatggc

SEQ ID NO: 3423719 - DNA, 25 bp, Homo sapien
tgagctgaggttgcttcacgggacc

SEQ ID NO: 3423720 - DNA, 25 bp, Homo sapien
gcggatgtttcctcgcctctcgaaa

SEQ ID NO: 3423721 - DNA, 25 bp, Homo sapien
caaggtccataaagactgagcggat

SEQ ID NO: 3423722 - DNA, 25 bp, Homo sapien
tgttcctgagcgagcaccttggagt

SEQ ID NO: 3423723 - DNA, 25 bp, Homo sapien
tgtgtctgctcctaggactgtggga

SEQ ID NO: 3423724 - DNA, 25 bp, Homo sapien
ggtagcggccttgagcttgacccat

SEQ ID NO: 3423725 - DNA, 25 bp, Homo sapien
acaatgatccgtgcaaggccaaggc

SEQ ID NO: 3423726 - DNA, 25 bp, Homo sapien
gaaagtccatacgatttgccggcca

SEQ ID NO: 3423727 - DNA, 25 bp, Homo sapien
ctccgaactgaatggtgacctaggc

SEQ ID NO: 3423728 - DNA, 25 bp, Homo sapien
gaaggatccctgctctcaactgaga

SEQ ID NO: 3423729 - DNA, 25 bp, Homo sapien
gagagccctttgttgtgtccggagc

SEQ ID NO: 3423730 - DNA, 25 bp, Homo sapien
ccttgtgagggcacaccttttttga

SEQ ID NO: 3423731 - DNA, 25 bp, Homo sapien
catggcacaggaccagttttctgaa

SEQ ID NO: 3423732 - DNA, 25 bp, Homo sapien
taattctgcaccagcgaagagcctc

SEQ ID NO: 3423733 - DNA, 25 bp, Homo sapien
ggcgacataccaaagtacttcacag

SEQ ID NO: 3423734 - DNA, 25 bp, Homo sapien
tcagctactgacagggtccagtcat

SEQ ID NO: 3423735 - DNA, 25 bp, Homo sapien
ccagtcatgctggatgaggatgcct

SEQ ID NO: 3423736 - DNA, 25 bp, Homo sapien
gcagcaacgggggtcagctactgac

SEQ ID NO: 3423737 - DNA, 25 bp, Homo sapien
caacgtttttggatttgcagcaacg

SEQ ID NO: 3423738 - DNA, 25 bp, Homo sapien
cagctgagaccgtgtatgacatcct

SEQ ID NO: 3423739 - DNA, 25 bp, Homo sapien
gaccgtgtatgacatcctgtccccg

SEQ ID NO: 3423740 - DNA, 25 bp, Homo sapien
gtgtatgacatcctgtccccggcag

SEQ ID NO: 3423741 - DNA, 25 bp, Homo sapien
gctgagaccgtgtatgacatcctgt

SEQ ID NO: 3423742 - DNA, 25 bp, Homo sapien
catacgcttcgctaggccagaagga

SEQ ID NO: 3423743 - DNA, 25 bp, Homo sapien
tctcgtgggcagttgtcagatgaat

SEQ ID NO: 3423744 - DNA, 25 bp, Homo sapien
gctgccctggttcattcaggccata

SEQ ID NO: 3423745 - DNA, 25 bp, Homo sapien
cagactaagaatctgaggcgcagag

SEQ ID NO: 3423746 - DNA, 25 bp, Homo sapien
tagaagaagcccctaaatgcagtgc

SEQ ID NO: 3423747 - DNA, 25 bp, Homo sapien
cccagggccagtgtatttgttagaa

SEQ ID NO: 3423748 - DNA, 25 bp, Homo sapien
ttgttagaactgctggacctaggcc

SEQ ID NO: 3423749 - DNA, 25 bp, Homo sapien
ctaatctaaggtgggaaggatgccc

SEQ ID NO: 3423750 - DNA, 25 bp, Homo sapien
aggccttgcccatccggcccttggt

SEQ ID NO: 3423751 - DNA, 25 bp, Homo sapien
ttgctcaggaacctccggcaggcct

SEQ ID NO: 3423752 - DNA, 25 bp, Homo sapien
ggtccaggactccggcactggagac

SEQ ID NO: 3423753 - DNA, 25 bp, Homo sapien
accgagggccgcagttcaccaggct

SEQ ID NO: 3423754 - DNA, 25 bp, Homo sapien
gcggatctccgctgaagtcctggga

SEQ ID NO: 3423755 - DNA, 25 bp, Homo sapien
accggccgtcgcagcgcgcggatct

SEQ ID NO: 3423756 - DNA, 25 bp, Homo sapien
gggactccgacccaacgcggtgcag

SEQ ID NO: 3423757 - DNA, 25 bp, Homo sapien
gggcggctagagcatgcccccaact

SEQ ID NO: 3423758 - DNA, 25 bp, Homo sapien
tctcgaaaacctagacttcggtcgc

SEQ ID NO: 3423759 - DNA, 25 bp, Homo sapien
agggccccttcgcagcggttccgct

SEQ ID NO: 3423760 - DNA, 25 bp, Homo sapien
tgggcggcggcgctcctgggttctc

SEQ ID NO: 3423761 - DNA, 25 bp, Homo sapien
gctgcccgtagggagggcgacggcc

SEQ ID NO: 3423762 - DNA, 25 bp, Homo sapien
gagccgggaggctgcgtggagtgcc

SEQ ID NO: 3423763 - DNA, 25 bp, Homo sapien
catcagttcctcaggagagccggga

SEQ ID NO: 3423764 - DNA, 25 bp, Homo sapien
gagaaagcccatcagttcctcagga

SEQ ID NO: 3423765 - DNA, 25 bp, Homo sapien
gtcttttccctcctatccttgccca

SEQ ID NO: 3423766 - DNA, 25 bp, Homo sapien
ttgaaaacgaagtcaggcagaaaga

SEQ ID NO: 3423767 - DNA, 25 bp, Homo sapien
tttgaaaacgaagtcaggcagaaag

SEQ ID NO: 3423768 - DNA, 25 bp, Homo sapien
cttttgaaaacgaagtcaggcagaa

SEQ ID NO: 3423769 - DNA, 25 bp, Homo sapien
tgaaaacgaagtcaggcagaaagat

SEQ ID NO: 3423770 - DNA, 25 bp, Homo sapien
gggtgagactggacagactaacttg

SEQ ID NO: 3423771 - DNA, 25 bp, Homo sapien
tggtcccatcctgtccggcctttgg

SEQ ID NO: 3423772 - DNA, 25 bp, Homo sapien
gcggcagggcaagctttcagagccc

SEQ ID NO: 3423773 - DNA, 25 bp, Homo sapien
gactggacagactaacttggtccca

SEQ ID NO: 3423774 - DNA, 25 bp, Homo sapien
gcacaggcgacagcccgggggagga

SEQ ID NO: 3423775 - DNA, 25 bp, Homo sapien
gggcacaggcgacagcccgggggag

SEQ ID NO: 3423776 - DNA, 25 bp, Homo sapien
ggggcacaggcgacagcccggggga

SEQ ID NO: 3423777 - DNA, 25 bp, Homo sapien
caggcgacagcccgggggaggaggg

SEQ ID NO: 3423778 - DNA, 25 bp, Homo sapien
ctgcggagggaacggcgggagaagc

SEQ ID NO: 3423779 - DNA, 25 bp, Homo sapien
tgcggagggaacggcgggagaagcc

SEQ ID NO: 3423780 - DNA, 25 bp, Homo sapien
tctgatagcggaactgagaggagct

SEQ ID NO: 3423781 - DNA, 25 bp, Homo sapien
ggttgctctgatagcggaactgaga

SEQ ID NO: 3423782 - DNA, 25 bp, Homo sapien
gctcttgctggttgctctgatagcg

SEQ ID NO: 3423783 - DNA, 25 bp, Homo sapien
gcagcggtgtgagctcttgctggtt

SEQ ID NO: 3423784 - DNA, 25 bp, Homo sapien
gggaggagagggcatcctgggcctg

SEQ ID NO: 3423785 - DNA, 25 bp, Homo sapien
ctggggaggagagggcatcctgggc

SEQ ID NO: 3423786 - DNA, 25 bp, Homo sapien
ctgggcctgggccccagctccccca

SEQ ID NO: 3423787 - DNA, 25 bp, Homo sapien
ggcctgggccccagctcccccagct

SEQ ID NO: 3423788 - DNA, 25 bp, Homo sapien
aagtcaaacatcaccccacactggg

SEQ ID NO: 3423789 - DNA, 25 bp, Homo sapien
tcgatgaggacaccccgggtgctcc

SEQ ID NO: 3423790 - DNA, 25 bp, Homo sapien
tcgtgcagctcggaagccggcacat

SEQ ID NO: 3423791 - DNA, 25 bp, Homo sapien
gccacacagtccaagaagtcaaaca

SEQ ID NO: 3423792 - DNA, 25 bp, Homo sapien
gactgaggccaagccgatgagtaca

SEQ ID NO: 3423793 - DNA, 25 bp, Homo sapien
ccgatgagtacagggttattctcca

SEQ ID NO: 3423794 - DNA, 25 bp, Homo sapien
agacgtggactgaggccaagccgat

SEQ ID NO: 3423795 - DNA, 25 bp, Homo sapien
ggccaagccgatgagtacagggtta

SEQ ID NO: 3423796 - DNA, 25 bp, Homo sapien
ccagcaagcagttcattccttgggc

SEQ ID NO: 3423797 - DNA, 25 bp, Homo sapien
cctgaacgcctagttcgtgcaagcc

SEQ ID NO: 3423798 - DNA, 25 bp, Homo sapien
ttccttgggcaatcatcacctgaac

SEQ ID NO: 3423799 - DNA, 25 bp, Homo sapien
tcatcacctgaacgcctagttcgtg

SEQ ID NO: 3423800 - DNA, 25 bp, Homo sapien
ggtgtggccacgaaggctcaagatt

SEQ ID NO: 3423801 - DNA, 25 bp, Homo sapien
cggcagagtccggaagatattcact

SEQ ID NO: 3423802 - DNA, 25 bp, Homo sapien
ggctcatcctcttcagggtcaaatt

SEQ ID NO: 3423803 - DNA, 25 bp, Homo sapien
aattcagggttctcactgggcggca

SEQ ID NO: 3423804 - DNA, 25 bp, Homo sapien
atccacatatctcttggccacggag

SEQ ID NO: 3423805 - DNA, 25 bp, Homo sapien
aggacaaacttttgatccacatatc

SEQ ID NO: 3423806 - DNA, 25 bp, Homo sapien
ccacatatctcttggccacggaggg

SEQ ID NO: 3423807 - DNA, 25 bp, Homo sapien
catcaggacaaacttttgatccaca

SEQ ID NO: 3423808 - DNA, 25 bp, Homo sapien
ccacccagcctgggctccccacttc

SEQ ID NO: 3423809 - DNA, 25 bp, Homo sapien
cacccagcctgggctccccacttca

SEQ ID NO: 3423810 - DNA, 25 bp, Homo sapien
acccagcctgggctccccacttcac

SEQ ID NO: 3423811 - DNA, 25 bp, Homo sapien
gtcttgaggtactcacgctcccggg

SEQ ID NO: 3423812 - DNA, 25 bp, Homo sapien
ggaacttgccatagacccggtgcag

SEQ ID NO: 3423813 - DNA, 25 bp, Homo sapien
cactgtttgcggatgtaggcccgga

SEQ ID NO: 3423814 - DNA, 25 bp, Homo sapien
aagatgtggttgcactgtttgcgga

SEQ ID NO: 3423815 - DNA, 25 bp, Homo sapien
ccattgaagtgctcgaattcataga

SEQ ID NO: 3423816 - DNA, 25 bp, Homo sapien
cagccacaccattgaagtgctcgaa

SEQ ID NO: 3423817 - DNA, 25 bp, Homo sapien
cacaccattgaagtgctcgaattca

SEQ ID NO: 3423818 - DNA, 25 bp, Homo sapien
gctcagccacaccattgaagtgctc

SEQ ID NO: 3423819 - DNA, 25 bp, Homo sapien
gatcaggacgcgaaccaggaactgc

SEQ ID NO: 3423820 - DNA, 25 bp, Homo sapien
cagacagcgacttgacagagtgcag

SEQ ID NO: 3423821 - DNA, 25 bp, Homo sapien
ccaggaactgcttgtgctccgtctt

SEQ ID NO: 3423822 - DNA, 25 bp, Homo sapien
ctgggcatggaagacagacagcgac

SEQ ID NO: 3423823 - DNA, 25 bp, Homo sapien
gtgctctgtcagagtggcatccttc

SEQ ID NO: 3423824 - DNA, 25 bp, Homo sapien
ctgtcagagtggcatccttctccag

SEQ ID NO: 3423825 - DNA, 25 bp, Homo sapien
tccaggaactgcaccacacagtatg

SEQ ID NO: 3423826 - DNA, 25 bp, Homo sapien
ggaactgcaccacacagtatgccag

SEQ ID NO: 3423827 - DNA, 25 bp, Homo sapien
tggccagtatttgagcagcccccgg

SEQ ID NO: 3423828 - DNA, 25 bp, Homo sapien
gccagtatttgagcagcccccggat

SEQ ID NO: 3423829 - DNA, 25 bp, Homo sapien
agtatttgagcagcccccggatcac

SEQ ID NO: 3423830 - DNA, 25 bp, Homo sapien
cagtatttgagcagcccccggatca

SEQ ID NO: 3423831 - DNA, 25 bp, Homo sapien
cacctgcttaaaaaggggctcctgg

SEQ ID NO: 3423832 - DNA, 25 bp, Homo sapien
aactgggagggctcgatgacatcaa

SEQ ID NO: 3423833 - DNA, 25 bp, Homo sapien
gctggaaacacagcgagccacctgc

SEQ ID NO: 3423834 - DNA, 25 bp, Homo sapien
aaactgggagggctcgatgacatca

SEQ ID NO: 3423835 - DNA, 25 bp, Homo sapien
tgttccagaaatacagagcccgctc

SEQ ID NO: 3423836 - DNA, 25 bp, Homo sapien
cacagtgtggcagttgtcctcaatg

SEQ ID NO: 3423837 - DNA, 25 bp, Homo sapien
ggtagagggtcccaaacacagcagg

SEQ ID NO: 3423838 - DNA, 25 bp, Homo sapien
aggcttaggatatactcattgttcc

SEQ ID NO: 3423839 - DNA, 25 bp, Homo sapien
ttgagcacattgtagatcagtgata

SEQ ID NO: 3423840 - DNA, 25 bp, Homo sapien
atctccatgaaggtcttgagcacat

SEQ ID NO: 3423841 - DNA, 25 bp, Homo sapien
tccatgaaggtcttgagcacattgt

SEQ ID NO: 3423842 - DNA, 25 bp, Homo sapien
cttttccagcttgtaggaggctgtg

SEQ ID NO: 3423843 - DNA, 25 bp, Homo sapien
cacagagaagatgacgggtggggcc

SEQ ID NO: 3423844 - DNA, 25 bp, Homo sapien
ggagtcagaacaagtctgagctact

SEQ ID NO: 3423845 - DNA, 25 bp, Homo sapien
tctggcttctgtaggaagctacagg

SEQ ID NO: 3423846 - DNA, 25 bp, Homo sapien
agtccagactccctcactaccaccc

SEQ ID NO: 3423847 - DNA, 25 bp, Homo sapien
tgccataactcctgacgctcctggg

SEQ ID NO: 3423848 - DNA, 25 bp, Homo sapien
ctggcggccacctggggtgtaagcc

SEQ ID NO: 3423849 - DNA, 25 bp, Homo sapien
tgtagccggcgtagccgcagctcct

SEQ ID NO: 3423850 - DNA, 25 bp, Homo sapien
cacctggggtgtaagccgctggagg

SEQ ID NO: 3423851 - DNA, 25 bp, Homo sapien
ttcctggtcaagcttgcccttgtca

SEQ ID NO: 3423852 - DNA, 25 bp, Homo sapien
atagagggactgacagctctgggtt

SEQ ID NO: 3423853 - DNA, 25 bp, Homo sapien
tcgtctccccccagtgaaagctggg

SEQ ID NO: 3423854 - DNA, 25 bp, Homo sapien
ctggtcaagcttgcccttgtcaagt

SEQ ID NO: 3423855 - DNA, 25 bp, Homo sapien
tgagctgggcgagaataaatagacc

SEQ ID NO: 3423856 - DNA, 25 bp, Homo sapien
taaggaaggacctcgcattggccaa

SEQ ID NO: 3423857 - DNA, 25 bp, Homo sapien
taaatagaccatggaccccatggtg

SEQ ID NO: 3423858 - DNA, 25 bp, Homo sapien
ggagtagaccatgattactgtgaac

SEQ ID NO: 3423859 - DNA, 25 bp, Homo sapien
tattaagtctacccccagccacgga

SEQ ID NO: 3423860 - DNA, 25 bp, Homo sapien
tctctttattaagtctacccccagc

SEQ ID NO: 3423861 - DNA, 25 bp, Homo sapien
tctctctttattaagtctaccccca

SEQ ID NO: 3423862 - DNA, 25 bp, Homo sapien
tctttattaagtctacccccagcca

SEQ ID NO: 3423863 - DNA, 25 bp, Homo sapien
tactttgccctcagttgctgcccag

SEQ ID NO: 3423864 - DNA, 25 bp, Homo sapien
caaagctggtgttaaaagttgcctt

SEQ ID NO: 3423865 - DNA, 25 bp, Homo sapien
tgtgccttcatgaactgtgagcaac

SEQ ID NO: 3423866 - DNA, 25 bp, Homo sapien
taagtgacagtcctcttgggttggt

SEQ ID NO: 3423867 - DNA, 25 bp, Homo sapien
ctttccaggctgttcccaaatagct

SEQ ID NO: 3423868 - DNA, 25 bp, Homo sapien
cccctagtagtgttttcagtgccaa

SEQ ID NO: 3423869 - DNA, 25 bp, Homo sapien
gactttcttggagcccgaaacacca

SEQ ID NO: 3423870 - DNA, 25 bp, Homo sapien
tgggtagaggccaagcagaagccct

SEQ ID NO: 3423871 - DNA, 25 bp, Homo sapien
ccgctcccggttcctgttggctatc

SEQ ID NO: 3423872 - DNA, 25 bp, Homo sapien
cgctcccggttcctgttggctatca

SEQ ID NO: 3423873 - DNA, 25 bp, Homo sapien
tcttcttcagaatggtcaggagccc

SEQ ID NO: 3423874 - DNA, 25 bp, Homo sapien
agcatgagcagtcgcagctcccgct

SEQ ID NO: 3423875 - DNA, 25 bp, Homo sapien
tcatcttcttcagaatggtcaggag

SEQ ID NO: 3423876 - DNA, 25 bp, Homo sapien
tcttcagaatggtcaggagccccat

SEQ ID NO: 3423877 - DNA, 25 bp, Homo sapien
gactgttggatccacgctcgaaagg

SEQ ID NO: 3423878 - DNA, 25 bp, Homo sapien
tcatcctggagcagtataaggccct

SEQ ID NO: 3423879 - DNA, 25 bp, Homo sapien
gcgtaacaccaaagagacggactgt

SEQ ID NO: 3423880 - DNA, 25 bp, Homo sapien
tattaccctgggcactaggacagtg

SEQ ID NO: 3423881 - DNA, 25 bp, Homo sapien
tgggcgggtcctggactcgaccacc

SEQ ID NO: 3423882 - DNA, 25 bp, Homo sapien
gctcatcggagctggggcaaatgac

SEQ ID NO: 3423883 - DNA, 25 bp, Homo sapien
aacactgcagctcagttgggcatgg

SEQ ID NO: 3423884 - DNA, 25 bp, Homo sapien
acctttccctgctcatcggagctgg

SEQ ID NO: 3423885 - DNA, 25 bp, Homo sapien
cgcagcaggttaaggagaagtccct

SEQ ID NO: 3423886 - DNA, 25 bp, Homo sapien
gcgcagcaggttaaggagaagtccc

SEQ ID NO: 3423887 - DNA, 25 bp, Homo sapien
agcaggttaaggagaagtccctgtt

SEQ ID NO: 3423888 - DNA, 25 bp, Homo sapien
gggcgcagcaggttaaggagaagtc

SEQ ID NO: 3423889 - DNA, 25 bp, Homo sapien
ttcttcaggatggttgtctttccag

SEQ ID NO: 3423890 - DNA, 25 bp, Homo sapien
cccagcgttggggagatggtgtcga

SEQ ID NO: 3423891 - DNA, 25 bp, Homo sapien
caggatggttgtctttccagcattg

SEQ ID NO: 3423892 - DNA, 25 bp, Homo sapien
cttcaggatggttgtctttccagca

SEQ ID NO: 3423893 - DNA, 25 bp, Homo sapien
gaggccatcggtgctctcaaagtag

SEQ ID NO: 3423894 - DNA, 25 bp, Homo sapien
tctgcgctgtccactacccagatga

SEQ ID NO: 3423895 - DNA, 25 bp, Homo sapien
cctgcatgcgctggcggtctgcgct

SEQ ID NO: 3423896 - DNA, 25 bp, Homo sapien
tccgccagtaggaccgcagggactt

SEQ ID NO: 3423897 - DNA, 25 bp, Homo sapien
cacagggacgttaactcaatctcag

SEQ ID NO: 3423898 - DNA, 25 bp, Homo sapien
tccctaaagcccagtgatgtgggtg

SEQ ID NO: 3423899 - DNA, 25 bp, Homo sapien
catgtacacaaagggtaggagctgc

SEQ ID NO: 3423900 - DNA, 25 bp, Homo sapien
tagtgacgtagtaacaccacaggga

SEQ ID NO: 3423901 - DNA, 25 bp, Homo sapien
cggatggcgttagaggacagtgctc

SEQ ID NO: 3423902 - DNA, 25 bp, Homo sapien
ctcgcggatggcgttagaggacagt

SEQ ID NO: 3423903 - DNA, 25 bp, Homo sapien
aagatgaggagggttgctccggcca

SEQ ID NO: 3423904 - DNA, 25 bp, Homo sapien
gatgaggagggttgctccggccagg

SEQ ID NO: 3423905 - DNA, 25 bp, Homo sapien
gaaaatgcggctggaaatgtcatcc

SEQ ID NO: 3423906 - DNA, 25 bp, Homo sapien
aggagccagtcgatgcccggcagca

SEQ ID NO: 3423907 - DNA, 25 bp, Homo sapien
gcagcaggttctccccggtgacggc

SEQ ID NO: 3423908 - DNA, 25 bp, Homo sapien
tcagtcagctgtgaaaatgcggctg

SEQ ID NO: 3423909 - DNA, 25 bp, Homo sapien
ctggactgctaggtggggggcatct

SEQ ID NO: 3423910 - DNA, 25 bp, Homo sapien
tggactgctaggtggggggcatctg

SEQ ID NO: 3423911 - DNA, 25 bp, Homo sapien
gtgttagtttggccggctgactccc

SEQ ID NO: 3423912 - DNA, 25 bp, Homo sapien
gttagtttggccggctgactcccaa

SEQ ID NO: 3423913 - DNA, 25 bp, Homo sapien
tagtttggccggctgactcccaacc

SEQ ID NO: 3423914 - DNA, 25 bp, Homo sapien
gagtgttagtttggccggctgactc

SEQ ID NO: 3423915 - DNA, 25 bp, Homo sapien
cggtttatttcacaactgagtgaag

SEQ ID NO: 3423916 - DNA, 25 bp, Homo sapien
agccctcccgccatgggagccgggt

SEQ ID NO: 3423917 - DNA, 25 bp, Homo sapien
gcaaggagcggtttatttcacaact

SEQ ID NO: 3423918 - DNA, 25 bp, Homo sapien
tgagtgaaggatgaggcccacagcc

SEQ ID NO: 3423919 - DNA, 25 bp, Homo sapien
cgtaaacccttgtcacagacttcca

SEQ ID NO: 3423920 - DNA, 25 bp, Homo sapien
ggtgatcaagcccaccctatccaag

SEQ ID NO: 3423921 - DNA, 25 bp, Homo sapien
cccaactcttattgtgtccagtatg

SEQ ID NO: 3423922 - DNA, 25 bp, Homo sapien
ggatcactcgtctcatttctgccgg

SEQ ID NO: 3423923 - DNA, 25 bp, Homo sapien
tggcctagggattttgtcgcaagtg

SEQ ID NO: 3423924 - DNA, 25 bp, Homo sapien
tgtggtgaagcgtaaacccaggtca

SEQ ID NO: 3423925 - DNA, 25 bp, Homo sapien
agcgctgttccgatcccgggtgcgc

SEQ ID NO: 3423926 - DNA, 25 bp, Homo sapien
gccaagggagcgtctgaaaagttcc

SEQ ID NO: 3423927 - DNA, 25 bp, Homo sapien
ggaagtcatccttcgcctggcggga

SEQ ID NO: 3423928 - DNA, 25 bp, Homo sapien
gggtccgacactgtgtagtgccgca

SEQ ID NO: 3423929 - DNA, 25 bp, Homo sapien
cgcggttactttgtactcggtgtag

SEQ ID NO: 3423930 - DNA, 25 bp, Homo sapien
ctgcgcggttactttgtactcggtg

SEQ ID NO: 3423931 - DNA, 25 bp, Homo sapien
cctctgggtccttctttgagatgaa

SEQ ID NO: 3423932 - DNA, 25 bp, Homo sapien
ctctttgacatcctctgggtccttc

SEQ ID NO: 3423933 - DNA, 25 bp, Homo sapien
tcctctgggtccttctttgagatga

SEQ ID NO: 3423934 - DNA, 25 bp, Homo sapien
acatcctctgggtccttctttgaga

SEQ ID NO: 3423935 - DNA, 25 bp, Homo sapien
tctggaactgcagaacagtccctct

SEQ ID NO: 3423936 - DNA, 25 bp, Homo sapien
tccagatctggaactgcagaacagt

SEQ ID NO: 3423937 - DNA, 25 bp, Homo sapien
gtttccagatctggaactgcagaac

SEQ ID NO: 3423938 - DNA, 25 bp, Homo sapien
ctggaactgcagaacagtccctctt

SEQ ID NO: 3423939 - DNA, 25 bp, Homo sapien
gcttgcggaagtcgctgtaccgctt

SEQ ID NO: 3423940 - DNA, 25 bp, Homo sapien
gaagtcgctgtaccgcttccagacc

SEQ ID NO: 3423941 - DNA, 25 bp, Homo sapien
tgcagcttgcggaagtcgctgtacc

SEQ ID NO: 3423942 - DNA, 25 bp, Homo sapien
ttgcggtgggtgtaggccaggtctc

SEQ ID NO: 3423943 - DNA, 25 bp, Homo sapien
gcaggtatgtgcacagtgaagcgaa

SEQ ID NO: 3423944 - DNA, 25 bp, Homo sapien
gggctgttgttgagcgcaggtatgt

SEQ ID NO: 3423945 - DNA, 25 bp, Homo sapien
ctcgatcactgaggcttcaaaccgg

SEQ ID NO: 3423946 - DNA, 25 bp, Homo sapien
tttcgccgctcctcgatcactgagg

SEQ ID NO: 3423947 - DNA, 25 bp, Homo sapien
ctggacacctccaagggtcgggtca

SEQ ID NO: 3423948 - DNA, 25 bp, Homo sapien
ctccaattcctcgaggcccctcctt

SEQ ID NO: 3423949 - DNA, 25 bp, Homo sapien
caggatgtgtaggtccctggacacc

SEQ ID NO: 3423950 - DNA, 25 bp, Homo sapien
gggtggcaggatgtgtaggtccctg

SEQ ID NO: 3423951 - DNA, 25 bp, Homo sapien
gcaggggaaccagatgcctcctcgg

SEQ ID NO: 3423952 - DNA, 25 bp, Homo sapien
gaaccagatgcctcctcggtgctct

SEQ ID NO: 3423953 - DNA, 25 bp, Homo sapien
agaaggggtcgaagagggcaagctc

SEQ ID NO: 3423954 - DNA, 25 bp, Homo sapien
tcctcggtgctctcacagttaaaga

SEQ ID NO: 3423955 - DNA, 25 bp, Homo sapien
aagatcctggctggacacagtcact

SEQ ID NO: 3423956 - DNA, 25 bp, Homo sapien
ctgtctgtgaagggtcttgaaaaga

SEQ ID NO: 3423957 - DNA, 25 bp, Homo sapien
ggtcttgaaaagatcctggctggac

SEQ ID NO: 3423958 - DNA, 25 bp, Homo sapien
aatagaaaagctcctgcccaggcag

SEQ ID NO: 3423959 - DNA, 25 bp, Homo sapien
ggactccctgaagcaagacgtgcac

SEQ ID NO: 3423960 - DNA, 25 bp, Homo sapien
agtgcagcagcgtaagcgcctgcct

SEQ ID NO: 3423961 - DNA, 25 bp, Homo sapien
gccgtctcgatagccctggagtgca

SEQ ID NO: 3423962 - DNA, 25 bp, Homo sapien
tgtggcctggcttaggtaggcaggg

SEQ ID NO: 3423963 - DNA, 25 bp, Homo sapien
tcctggcgggcaggcaacgggtcac

SEQ ID NO: 3423964 - DNA, 25 bp, Homo sapien
ttcctggcgggcaggcaacgggtca

SEQ ID NO: 3423965 - DNA, 25 bp, Homo sapien
cttcctggcgggcaggcaacgggtc

SEQ ID NO: 3423966 - DNA, 25 bp, Homo sapien
gtgcaggcgcaggatctcctctgcc

SEQ ID NO: 3423967 - DNA, 25 bp, Homo sapien
aggtgcaggcgcaggatctcctctg

SEQ ID NO: 3423968 - DNA, 25 bp, Homo sapien
ggtgcaggcgcaggatctcctctgc

SEQ ID NO: 3423969 - DNA, 25 bp, Homo sapien
taattacaagaccaggaggtagggc

SEQ ID NO: 3423970 - DNA, 25 bp, Homo sapien
gctgctcacacatcaagacagacag

SEQ ID NO: 3423971 - DNA, 25 bp, Homo sapien
ttccaaggtggcaggtgtaatcagg

SEQ ID NO: 3423972 - DNA, 25 bp, Homo sapien
tgggagtttgcagaccccagttcta

SEQ ID NO: 3423973 - DNA, 25 bp, Homo sapien
tctcacagcccttacattaaaaagg

SEQ ID NO: 3423974 - DNA, 25 bp, Homo sapien
acttgtcacatataaatttcacctg

SEQ ID NO: 3423975 - DNA, 25 bp, Homo sapien
cttgtcacatataaatttcacctgt

SEQ ID NO: 3423976 - DNA, 25 bp, Homo sapien
cactctcacagcccttacattaaaa

SEQ ID NO: 3423977 - DNA, 25 bp, Homo sapien
gccgctcccatgatacaccggtgta

SEQ ID NO: 3423978 - DNA, 25 bp, Homo sapien
gagatgcactgcgttgtagtccagc

SEQ ID NO: 3423979 - DNA, 25 bp, Homo sapien
catcgagcgccaagttcagcttcgc

SEQ ID NO: 3423980 - DNA, 25 bp, Homo sapien
agtcgagttggcctcccgagatgca

SEQ ID NO: 3423981 - DNA, 25 bp, Homo sapien
cttcgggccgcccatcgagccacct

SEQ ID NO: 3423982 - DNA, 25 bp, Homo sapien
gggccgcccatcgagccacctctgt

SEQ ID NO: 3423983 - DNA, 25 bp, Homo sapien
cccggccttcgggccgcccatcgag

SEQ ID NO: 3423984 - DNA, 25 bp, Homo sapien
ggccttcgggccgcccatcgagcca

SEQ ID NO: 3423985 - DNA, 25 bp, Homo sapien
ctgtctgggcccgccttcccgccat

SEQ ID NO: 3423986 - DNA, 25 bp, Homo sapien
tgcgggaaggcacgcgaggccggcc

SEQ ID NO: 3423987 - DNA, 25 bp, Homo sapien
gctgcgggaaggcacgcgaggccgg

SEQ ID NO: 3423988 - DNA, 25 bp, Homo sapien
gacggtgggcgctcagcatcccggg

SEQ ID NO: 3423989 - DNA, 25 bp, Homo sapien
ggagacggtgggcgctcagcatccc

SEQ ID NO: 3423990 - DNA, 25 bp, Homo sapien
gcggcgggtcggctgtactccttca

SEQ ID NO: 3423991 - DNA, 25 bp, Homo sapien
caggagcacagctcgcaagcggtct

SEQ ID NO: 3423992 - DNA, 25 bp, Homo sapien
aagcggtctgccacgaagctggcca

SEQ ID NO: 3423993 - DNA, 25 bp, Homo sapien
tgcaggcggtgctccctttcgcgct

SEQ ID NO: 3423994 - DNA, 25 bp, Homo sapien
cgtagcagcgccgcagcgagccgaa

SEQ ID NO: 3423995 - DNA, 25 bp, Homo sapien
cccgcgcgtagcagcgccgcagcga

SEQ ID NO: 3423996 - DNA, 25 bp, Homo sapien
tagcagcgccgcagcgagccgaagc

SEQ ID NO: 3423997 - DNA, 25 bp, Homo sapien
cgcgtagcagcgccgcagcgagccg

SEQ ID NO: 3423998 - DNA, 25 bp, Homo sapien
ccaggttatagagcagaaagaggcc

SEQ ID NO: 3423999 - DNA, 25 bp, Homo sapien
cccagccgccaggatcccgactcac

SEQ ID NO: 3424000 - DNA, 25 bp, Homo sapien
aaaataaaccattcactgggcatga

SEQ ID NO: 3424001 - DNA, 25 bp, Homo sapien
actgggcatgatggccacacccggc

SEQ ID NO: 3424002 - DNA, 25 bp, Homo sapien
tcgagtggcaacatgcgagatccca

SEQ ID NO: 3424003 - DNA, 25 bp, Homo sapien
cccaggaattcgagtggcaacatgc

SEQ ID NO: 3424004 - DNA, 25 bp, Homo sapien
ccttacttacaacactgaagtgggc

SEQ ID NO: 3424005 - DNA, 25 bp, Homo sapien
tatttgaatgagtggcctcaggctc

SEQ ID NO: 3424006 - DNA, 25 bp, Homo sapien
aagccagaatgaggacgcctggtcc

SEQ ID NO: 3424007 - DNA, 25 bp, Homo sapien
ggtccttacaggatcaggctcatct

SEQ ID NO: 3424008 - DNA, 25 bp, Homo sapien
agctgtagaacctcatgcagggctt

SEQ ID NO: 3424009 - DNA, 25 bp, Homo sapien
ctaccgccaaggccttgcggagggg

SEQ ID NO: 3424010 - DNA, 25 bp, Homo sapien
aggttgaccatgaagcccagaggca

SEQ ID NO: 3424011 - DNA, 25 bp, Homo sapien
tccagggtacgtcctcgaagtttgc

SEQ ID NO: 3424012 - DNA, 25 bp, Homo sapien
taacaccttgcacgtactggcaggc

SEQ ID NO: 3424013 - DNA, 25 bp, Homo sapien
acagcgcaacttggcaggtagggca

SEQ ID NO: 3424014 - DNA, 25 bp, Homo sapien
aggtctgtccgtgccctcatcttcc

SEQ ID NO: 3424015 - DNA, 25 bp, Homo sapien
ggtctgtccgtgccctcatcttcct

SEQ ID NO: 3424016 - DNA, 25 bp, Homo sapien
gaaaaagaaacctaagtgctctggc

SEQ ID NO: 3424017 - DNA, 25 bp, Homo sapien
tgcagaatcaggagtcaccagatga

SEQ ID NO: 3424018 - DNA, 25 bp, Homo sapien
tgtccttgagctgaaccgcactgaa

SEQ ID NO: 3424019 - DNA, 25 bp, Homo sapien
tacttggatgaaacggtgcaggcca

SEQ ID NO: 3424020 - DNA, 25 bp, Homo sapien
ctgtggtttgtcagacctgcaagca

SEQ ID NO: 3424021 - DNA, 25 bp, Homo sapien
gggtctcagaccataagtgtgtact

SEQ ID NO: 3424022 - DNA, 25 bp, Homo sapien
ttcgtgggctgagggcaattctgtc

SEQ ID NO: 3424023 - DNA, 25 bp, Homo sapien
taaatgccaggttgatagggcgctg

SEQ ID NO: 3424024 - DNA, 25 bp, Homo sapien
taaatagtcccagagagaattcgtg

SEQ ID NO: 3424025 - DNA, 25 bp, Homo sapien
cactggttccgaagggcggtagcga

SEQ ID NO: 3424026 - DNA, 25 bp, Homo sapien
tgcggcgcgcgctgatgacgccatc

SEQ ID NO: 3424027 - DNA, 25 bp, Homo sapien
attatccctccgctgccacgtctct

SEQ ID NO: 3424028 - DNA, 25 bp, Homo sapien
tcgaggcgcggaagggcagggacca

SEQ ID NO: 3424029 - DNA, 25 bp, Homo sapien
ggtcacctttctcttggggcactta

SEQ ID NO: 3424030 - DNA, 25 bp, Homo sapien
cgcagacgttgacccgatgttcgaa

SEQ ID NO: 3424031 - DNA, 25 bp, Homo sapien
tgacccgatgttcgaagcagaacag

SEQ ID NO: 3424032 - DNA, 25 bp, Homo sapien
aggcagtgctcgcagacgttgaccc

SEQ ID NO: 3424033 - DNA, 25 bp, Homo sapien
tgagcacatactgtgcaccagactc

SEQ ID NO: 3424034 - DNA, 25 bp, Homo sapien
cagactctctcttgggaacggggga

SEQ ID NO: 3424035 - DNA, 25 bp, Homo sapien
gcttacattctagcgcggggcccct

SEQ ID NO: 3424036 - DNA, 25 bp, Homo sapien
cagtgccctgctcagtcgctcccct

SEQ ID NO: 3424037 - DNA, 25 bp, Homo sapien
ggtatgttgcacaggcggcaattgg

SEQ ID NO: 3424038 - DNA, 25 bp, Homo sapien
cgggtcgtctctcggctggccaggg

SEQ ID NO: 3424039 - DNA, 25 bp, Homo sapien
catagcagacaaggcgggtcgtctc

SEQ ID NO: 3424040 - DNA, 25 bp, Homo sapien
cgctatcttggagccattgcaggta

SEQ ID NO: 3424041 - DNA, 25 bp, Homo sapien
aggctggcctgatccccccgaggtg

SEQ ID NO: 3424042 - DNA, 25 bp, Homo sapien
ctgaacttacacagcaggtaaggaa

SEQ ID NO: 3424043 - DNA, 25 bp, Homo sapien
tacacagcaggtaaggaactttaac

SEQ ID NO: 3424044 - DNA, 25 bp, Homo sapien
ggagggcctggaaaccagtcaccaa

SEQ ID NO: 3424045 - DNA, 25 bp, Homo sapien
gccggtctggctagctaatagtcac

SEQ ID NO: 3424046 - DNA, 25 bp, Homo sapien
gctaaggctcttaccccagattcag

SEQ ID NO: 3424047 - DNA, 25 bp, Homo sapien
taagtgcctgcaagtacacacatgc

SEQ ID NO: 3424048 - DNA, 25 bp, Homo sapien
tgaatatctgaaagcaacatgccgg

SEQ ID NO: 3424049 - DNA, 25 bp, Homo sapien
ccctttcagtcctttcaatgagtcc

SEQ ID NO: 3424050 - DNA, 25 bp, Homo sapien
acctcccctttcagtcctttcaatg

SEQ ID NO: 3424051 - DNA, 25 bp, Homo sapien
tcccctttcagtcctttcaatgagt

SEQ ID NO: 3424052 - DNA, 25 bp, Homo sapien
gccacctcccctttcagtcctttca

SEQ ID NO: 3424053 - DNA, 25 bp, Homo sapien
gggcccagttgactgtggccagctt

SEQ ID NO: 3424054 - DNA, 25 bp, Homo sapien
ggccattgcagctggggcactgata

SEQ ID NO: 3424055 - DNA, 25 bp, Homo sapien
cctgcccgggcccagttgactgtgg

SEQ ID NO: 3424056 - DNA, 25 bp, Homo sapien
actgatagccggcaggtgccgtgtt

SEQ ID NO: 3424057 - DNA, 25 bp, Homo sapien
cattaaaactagaccagtcagagaa

SEQ ID NO: 3424058 - DNA, 25 bp, Homo sapien
tcagacgtgttgaggggctcgggct

SEQ ID NO: 3424059 - DNA, 25 bp, Homo sapien
gctctgggctcaccacctcatcgat

SEQ ID NO: 3424060 - DNA, 25 bp, Homo sapien
accagtcagagaagtcagacgtgtt

SEQ ID NO: 3424061 - DNA, 25 bp, Homo sapien
gattgcccatgtggatcactgtgtg

SEQ ID NO: 3424062 - DNA, 25 bp, Homo sapien
atcactgtgtgctgctcgggccggc

SEQ ID NO: 3424063 - DNA, 25 bp, Homo sapien
atgtggatcactgtgtgctgctcgg

SEQ ID NO: 3424064 - DNA, 25 bp, Homo sapien
cgtgagtcaagggctcaggattgcc

SEQ ID NO: 3424065 - DNA, 25 bp, Homo sapien
tccggtcatcatcccgcgtatcata

SEQ ID NO: 3424066 - DNA, 25 bp, Homo sapien
ggccgacgtcggtacttgtcatcgt

SEQ ID NO: 3424067 - DNA, 25 bp, Homo sapien
gtcatcgtcacagtctccatggagg

SEQ ID NO: 3424068 - DNA, 25 bp, Homo sapien
tccatggaggcctggtgtccggtca

SEQ ID NO: 3424069 - DNA, 25 bp, Homo sapien
tcctggcattccgccctgcctgacc

SEQ ID NO: 3424070 - DNA, 25 bp, Homo sapien
cccttcctggcattccgccctgcct

SEQ ID NO: 3424071 - DNA, 25 bp, Homo sapien
cttcctggcattccgccctgcctga

SEQ ID NO: 3424072 - DNA, 25 bp, Homo sapien
ccttcctggcattccgccctgcctg

SEQ ID NO: 3424073 - DNA, 25 bp, Homo sapien
tcgtctgtgcctcagggatgatcac

SEQ ID NO: 3424074 - DNA, 25 bp, Homo sapien
tagggcgttattgtgcagctcaaac

SEQ ID NO: 3424075 - DNA, 25 bp, Homo sapien
ggaaaatcaggtcaggccccagtcc

SEQ ID NO: 3424076 - DNA, 25 bp, Homo sapien
gaggcgcacgactgtattctggaaa

SEQ ID NO: 3424077 - DNA, 25 bp, Homo sapien
ctgcggcccggcctaggcgagacat

SEQ ID NO: 3424078 - DNA, 25 bp, Homo sapien
cccagcagtcccaagagtagcagca

SEQ ID NO: 3424079 - DNA, 25 bp, Homo sapien
gctggagcagggtcagcggccgctt

SEQ ID NO: 3424080 - DNA, 25 bp, Homo sapien
cccacgcggatgtgagggttcatga

SEQ ID NO: 3424081 - DNA, 25 bp, Homo sapien
gaacccacatcctaggctggcctag

SEQ ID NO: 3424082 - DNA, 25 bp, Homo sapien
tcttagtgtcttaggcttgagggag

SEQ ID NO: 3424083 - DNA, 25 bp, Homo sapien
tcaagacaaatgcttgacccacggg

SEQ ID NO: 3424084 - DNA, 25 bp, Homo sapien
gcagtgaagaggtgccctcagcctc

SEQ ID NO: 3424085 - DNA, 25 bp, Homo sapien
gacttgctgtaaatctagaccacgc

SEQ ID NO: 3424086 - DNA, 25 bp, Homo sapien
tcatctctcatctgcctaagacttg

SEQ ID NO: 3424087 - DNA, 25 bp, Homo sapien
tgtaaatctagaccacgcccctcaa

SEQ ID NO: 3424088 - DNA, 25 bp, Homo sapien
ctcatctgcctaagacttgctgtaa

SEQ ID NO: 3424089 - DNA, 25 bp, Homo sapien
agtgaaactacatctcaaaaaagag

SEQ ID NO: 3424090 - DNA, 25 bp, Homo sapien
tgaaactacatctcaaaaaagagag

SEQ ID NO: 3424091 - DNA, 25 bp, Homo sapien
agagtgaaactacatctcaaaaaag

SEQ ID NO: 3424092 - DNA, 25 bp, Homo sapien
aagagtgaaactacatctcaaaaaa

SEQ ID NO: 3424093 - DNA, 25 bp, Homo sapien
ctgggactcctggggtccagcaatc

SEQ ID NO: 3424094 - DNA, 25 bp, Homo sapien
gcagcctgggactcctggggtccag

SEQ ID NO: 3424095 - DNA, 25 bp, Homo sapien
agcctgggactcctggggtccagca

SEQ ID NO: 3424096 - DNA, 25 bp, Homo sapien
cctgggactcctggggtccagcaat

SEQ ID NO: 3424097 - DNA, 25 bp, Homo sapien
aaagatgccaagtcaccaaactggg

SEQ ID NO: 3424098 - DNA, 25 bp, Homo sapien
tacatctagatgtatgaagttaccg

SEQ ID NO: 3424099 - DNA, 25 bp, Homo sapien
gcatgcttgtgtattatgcaaatat

SEQ ID NO: 3424100 - DNA, 25 bp, Homo sapien
atgaagttaccgttacataaagaag

SEQ ID NO: 3424101 - DNA, 25 bp, Homo sapien
gaaacgaggcagtccttcaggtgaa

SEQ ID NO: 3424102 - DNA, 25 bp, Homo sapien
aagttgttgttgaaacgaggcagtc

SEQ ID NO: 3424103 - DNA, 25 bp, Homo sapien
cttccgggagccataaagttgttgt

SEQ ID NO: 3424104 - DNA, 25 bp, Homo sapien
aggcacttccgggagccataaagtt

SEQ ID NO: 3424105 - DNA, 25 bp, Homo sapien
ccaactgcagcccacgggcgtgagg

SEQ ID NO: 3424106 - DNA, 25 bp, Homo sapien
ttccaactgcagcccacgggcgtga

SEQ ID NO: 3424107 - DNA, 25 bp, Homo sapien
gttccaactgcagcccacgggcgtg

SEQ ID NO: 3424108 - DNA, 25 bp, Homo sapien
cgttccaactgcagcccacgggcgt

SEQ ID NO: 3424109 - DNA, 25 bp, Homo sapien
ccccgggctaggcccggcggcagct

SEQ ID NO: 3424110 - DNA, 25 bp, Homo sapien
ggccgtagtaaagcttcagcatccc

SEQ ID NO: 3424111 - DNA, 25 bp, Homo sapien
gtagtaaagcttcagcatcccgtgc

SEQ ID NO: 3424112 - DNA, 25 bp, Homo sapien
agtaaagcttcagcatcccgtgcgc

SEQ ID NO: 3424113 - DNA, 25 bp, Homo sapien
agctgctcgtactccctggccgagg

SEQ ID NO: 3424114 - DNA, 25 bp, Homo sapien
agcaatatagcaggggcctggttcc

SEQ ID NO: 3424115 - DNA, 25 bp, Homo sapien
gccgaggttcgtcctcttatgaaca

SEQ ID NO: 3424116 - DNA, 25 bp, Homo sapien
cacaaaaagtcggaggcatgatctg

SEQ ID NO: 3424117 - DNA, 25 bp, Homo sapien
gtgtttggtgtttgtcagcatttga

SEQ ID NO: 3424118 - DNA, 25 bp, Homo sapien
gtcagcatttgaaatcctggggctc

SEQ ID NO: 3424119 - DNA, 25 bp, Homo sapien
cgtgtttggtgtttgtcagcatttg

SEQ ID NO: 3424120 - DNA, 25 bp, Homo sapien
ttgtcagcatttgaaatcctggggc

SEQ ID NO: 3424121 - DNA, 25 bp, Homo sapien
ctgtggctgagatgaacttgttgta

SEQ ID NO: 3424122 - DNA, 25 bp, Homo sapien
gctgagatgaacttgttgtagttct

SEQ ID NO: 3424123 - DNA, 25 bp, Homo sapien
tgtggctgagatgaacttgttgtag

SEQ ID NO: 3424124 - DNA, 25 bp, Homo sapien
gagatgaacttgttgtagttctcat

SEQ ID NO: 3424125 - DNA, 25 bp, Homo sapien
gaaatctgagcacatcactcatttg

SEQ ID NO: 3424126 - DNA, 25 bp, Homo sapien
gcagctggaggaatctattcaaacc

SEQ ID NO: 3424127 - DNA, 25 bp, Homo sapien
taaactgcacatctactatctgcct

SEQ ID NO: 3424128 - DNA, 25 bp, Homo sapien
caaatccctaatacattctggaagg

SEQ ID NO: 3424129 - DNA, 25 bp, Homo sapien
gactgctttgtctttgcctagagaa

SEQ ID NO: 3424130 - DNA, 25 bp, Homo sapien
caatgtctaggtgagaggttggcaa

SEQ ID NO: 3424131 - DNA, 25 bp, Homo sapien
gacaggtataacctgttggccagga

SEQ ID NO: 3424132 - DNA, 25 bp, Homo sapien
ccacctgggctctgttaattttcag

SEQ ID NO: 3424133 - DNA, 25 bp, Homo sapien
caataaaagcagagccgaggctgag

SEQ ID NO: 3424134 - DNA, 25 bp, Homo sapien
ggttcgtaaagggatcatgggctac

SEQ ID NO: 3424135 - DNA, 25 bp, Homo sapien
gcaaaggcagcgctatgcagtgaaa

SEQ ID NO: 3424136 - DNA, 25 bp, Homo sapien
catgggctactgatctaagggagac

SEQ ID NO: 3424137 - DNA, 25 bp, Homo sapien
catgtttaccgaggcagtgctagaa

SEQ ID NO: 3424138 - DNA, 25 bp, Homo sapien
cccagcagagaaacgagaacagctc

SEQ ID NO: 3424139 - DNA, 25 bp, Homo sapien
tgttgtgaaagaaaggtcctactcc

SEQ ID NO: 3424140 - DNA, 25 bp, Homo sapien
caattaaagtcaaaacatggcaagg

SEQ ID NO: 3424141 - DNA, 25 bp, Homo sapien
caccgcacccgacgaggtctgatgg

SEQ ID NO: 3424142 - DNA, 25 bp, Homo sapien
cgcacccgacgaggtctgatggttt

SEQ ID NO: 3424143 - DNA, 25 bp, Homo sapien
tgaagaagatgccttgcttctcttt

SEQ ID NO: 3424144 - DNA, 25 bp, Homo sapien
gggctctccctgcttcgcttaacac

SEQ ID NO: 3424145 - DNA, 25 bp, Homo sapien
gcagccaaggcagggaccgctggct

SEQ ID NO: 3424146 - DNA, 25 bp, Homo sapien
aattagtccagatccgaagcaggcc

SEQ ID NO: 3424147 - DNA, 25 bp, Homo sapien
gccgcaggtgcttagccagctgcca

SEQ ID NO: 3424148 - DNA, 25 bp, Homo sapien
aagcgcatctgcgtgtccagcgcac

SEQ ID NO: 3424149 - DNA, 25 bp, Homo sapien
tgttcccaaagcaggcgttactcac

SEQ ID NO: 3424150 - DNA, 25 bp, Homo sapien
gaaaggactgcgagggcgtgggtca

SEQ ID NO: 3424151 - DNA, 25 bp, Homo sapien
tccaggggcgcatggatgattccag

SEQ ID NO: 3424152 - DNA, 25 bp, Homo sapien
tgactgcagggcgggcgcaacctca

SEQ ID NO: 3424153 - DNA, 25 bp, Homo sapien
ctgccagcttggtgatgcgctcgtg

SEQ ID NO: 3424154 - DNA, 25 bp, Homo sapien
gtgatcactgccatgttggtggcca

SEQ ID NO: 3424155 - DNA, 25 bp, Homo sapien
gaaatcgttcttcatcttccggatg

SEQ ID NO: 3424156 - DNA, 25 bp, Homo sapien
tgcgagcgctgaagtcggtgatcac

SEQ ID NO: 3424157 - DNA, 25 bp, Homo sapien
gagggtgacgttagccccagagccc

SEQ ID NO: 3424158 - DNA, 25 bp, Homo sapien
cggagggtgacgttagccccagagc

SEQ ID NO: 3424159 - DNA, 25 bp, Homo sapien
gacggagggtgacgttagccccaga

SEQ ID NO: 3424160 - DNA, 25 bp, Homo sapien
gagccccaggaaaggcccactgcag

SEQ ID NO: 3424161 - DNA, 25 bp, Homo sapien
ttccacgcacttggtgaggcgcgag

SEQ ID NO: 3424162 - DNA, 25 bp, Homo sapien
tgcagcttccgcagcagcgcgtgga

SEQ ID NO: 3424163 - DNA, 25 bp, Homo sapien
cggaacgagggcaggtgttggtact

SEQ ID NO: 3424164 - DNA, 25 bp, Homo sapien
acctggcagtcgtcctggatggcgc

SEQ ID NO: 3424165 - DNA, 25 bp, Homo sapien
tgaactctaacacgtcgggagccgg

SEQ ID NO: 3424166 - DNA, 25 bp, Homo sapien
tgcctccatggtcggtgaactctaa

SEQ ID NO: 3424167 - DNA, 25 bp, Homo sapien
ggtgaaaaggtgcactgctgccaga

SEQ ID NO: 3424168 - DNA, 25 bp, Homo sapien
gctccaccagcgcaaaatagcggct

SEQ ID NO: 3424169 - DNA, 25 bp, Homo sapien
gacgaagcccacgatgaggccctca

SEQ ID NO: 3424170 - DNA, 25 bp, Homo sapien
agagtggacgaagcccacgatgagg

SEQ ID NO: 3424171 - DNA, 25 bp, Homo sapien
aagcccacgatgaggccctcacgga

SEQ ID NO: 3424172 - DNA, 25 bp, Homo sapien
tcacggacaccctgactgcagaact

SEQ ID NO: 3424173 - DNA, 25 bp, Homo sapien
cagaagctctgagccgtctggcaca

SEQ ID NO: 3424174 - DNA, 25 bp, Homo sapien
gccgtctcgtagtccaggcagaggc

SEQ ID NO: 3424175 - DNA, 25 bp, Homo sapien
caccagaaactgttcatcagtgaga

SEQ ID NO: 3424176 - DNA, 25 bp, Homo sapien
tccccagggctgtcgcagaagctct

SEQ ID NO: 3424177 - DNA, 25 bp, Homo sapien
ggtctggccatgagggcactgtcca

SEQ ID NO: 3424178 - DNA, 25 bp, Homo sapien
gccatgagggcactgtccagccatc

SEQ ID NO: 3424179 - DNA, 25 bp, Homo sapien
gcccggctaggagctagtgcttcac

SEQ ID NO: 3424180 - DNA, 25 bp, Homo sapien
ttccctgcccggctaggagctagtg

SEQ ID NO: 3424181 - DNA, 25 bp, Homo sapien
ccttcacgtagtgggtcagcagccg

SEQ ID NO: 3424182 - DNA, 25 bp, Homo sapien
acgtcgatggcggtggtatcctcca

SEQ ID NO: 3424183 - DNA, 25 bp, Homo sapien
gagtctccacgctcttgcgcagcat

SEQ ID NO: 3424184 - DNA, 25 bp, Homo sapien
tcacgggcgtcactgggaactgatc

SEQ ID NO: 3424185 - DNA, 25 bp, Homo sapien
caaaggcaggatacaagagttggtc

SEQ ID NO: 3424186 - DNA, 25 bp, Homo sapien
aaaagaggtactgcaaggaggcccg

SEQ ID NO: 3424187 - DNA, 25 bp, Homo sapien
ggatgccctaagtcagctactcaag

SEQ ID NO: 3424188 - DNA, 25 bp, Homo sapien
tcctgggtaaccctgagcctctgct

SEQ ID NO: 3424189 - DNA, 25 bp, Homo sapien
tgcgaacaccctcttcgtacaggag

SEQ ID NO: 3424190 - DNA, 25 bp, Homo sapien
tgccgagagctgctgtacacggaga

SEQ ID NO: 3424191 - DNA, 25 bp, Homo sapien
tacacggagaaagtcctcttgctgg

SEQ ID NO: 3424192 - DNA, 25 bp, Homo sapien
tcttgctggagtcgctgctctgggc

SEQ ID NO: 3424193 - DNA, 25 bp, Homo sapien
tgcaccctcgccctcttttgtccct

SEQ ID NO: 3424194 - DNA, 25 bp, Homo sapien
gacaaggaatcagagcccgccctgc

SEQ ID NO: 3424195 - DNA, 25 bp, Homo sapien
tgctcaagaggttggtgtccatcgg

SEQ ID NO: 3424196 - DNA, 25 bp, Homo sapien
gggctgaacacatcaatacgttcag

SEQ ID NO: 3424197 - DNA, 25 bp, Homo sapien
tgaacacatcaatacgttcagagaa

SEQ ID NO: 3424198 - DNA, 25 bp, Homo sapien
tcagagaatagcttctggatattgc

SEQ ID NO: 3424199 - DNA, 25 bp, Homo sapien
tcaggctgggcatacaccaagactg

SEQ ID NO: 3424200 - DNA, 25 bp, Homo sapien
aagtctgagtcacgttggaagtcgg

SEQ ID NO: 3424201 - DNA, 25 bp, Homo sapien
aatattagcgccgtcatctggaggg

SEQ ID NO: 3424202 - DNA, 25 bp, Homo sapien
gaggcagggcactctgtactaccta

SEQ ID NO: 3424203 - DNA, 25 bp, Homo sapien
gcccgaagcgcccaaaggtgcgcag

SEQ ID NO: 3424204 - DNA, 25 bp, Homo sapien
gcacgagttcttcgtcggccacaaa

SEQ ID NO: 3424205 - DNA, 25 bp, Homo sapien
gatcttgatgatgccggtcagcacc

SEQ ID NO: 3424206 - DNA, 25 bp, Homo sapien
gccacaaaacgccacaggtagagct

SEQ ID NO: 3424207 - DNA, 25 bp, Homo sapien
cgcgctcgcagatgacctcaaccac

SEQ ID NO: 3424208 - DNA, 25 bp, Homo sapien
gcgctcgcagatgacctcaaccaca

SEQ ID NO: 3424209 - DNA, 25 bp, Homo sapien
ccgcgctcgcagatgacctcaacca

SEQ ID NO: 3424210 - DNA, 25 bp, Homo sapien
cgctcgcagatgacctcaaccacac

SEQ ID NO: 3424211 - DNA, 25 bp, Homo sapien
gggtgcagggacagaccggtgcatg

SEQ ID NO: 3424212 - DNA, 25 bp, Homo sapien
cgagaccagatcctgggtgccatgg

SEQ ID NO: 3424213 - DNA, 25 bp, Homo sapien
gaaggaccaccgagaccagatcctg

SEQ ID NO: 3424214 - DNA, 25 bp, Homo sapien
ttattaggccggtcctgacacctgc

SEQ ID NO: 3424215 - DNA, 25 bp, Homo sapien
cacctgcctggacacggaacgcaga

SEQ ID NO: 3424216 - DNA, 25 bp, Homo sapien
gaacgcagacaaggaccgctctcgt

SEQ ID NO: 3424217 - DNA, 25 bp, Homo sapien
gtcaaggaaacactgtccgccccat

SEQ ID NO: 3424218 - DNA, 25 bp, Homo sapien
agcacaccagccaatcggcgctcgg

SEQ ID NO: 3424219 - DNA, 25 bp, Homo sapien
gtctccgctccgccggagagagagg

SEQ ID NO: 3424220 - DNA, 25 bp, Homo sapien
ggtctccgctccgccggagagagag

SEQ ID NO: 3424221 - DNA, 25 bp, Homo sapien
tctccgctccgccggagagagaggg

SEQ ID NO: 3424222 - DNA, 25 bp, Homo sapien
ccaggggccctccgaattccagcgg

SEQ ID NO: 3424223 - DNA, 25 bp, Homo sapien
caggggccctccgaattccagcggg

SEQ ID NO: 3424224 - DNA, 25 bp, Homo sapien
ttcgcttagcctttgccccaggtcc

SEQ ID NO: 3424225 - DNA, 25 bp, Homo sapien
gctcttagttcacccgctccagctc

SEQ ID NO: 3424226 - DNA, 25 bp, Homo sapien
ccagctctccttcgcttagcctttg

SEQ ID NO: 3424227 - DNA, 25 bp, Homo sapien
atctcgcccccgctcttagttcacc

SEQ ID NO: 3424228 - DNA, 25 bp, Homo sapien
gtcgacaccataaatccccgttctg

SEQ ID NO: 3424229 - DNA, 25 bp, Homo sapien
cgggcgccctgacgtctctgcggga

SEQ ID NO: 3424230 - DNA, 25 bp, Homo sapien
aagggccatcacgtcgggcgtccgc

SEQ ID NO: 3424231 - DNA, 25 bp, Homo sapien
ggaccctctcggcattcccagagtg

SEQ ID NO: 3424232 - DNA, 25 bp, Homo sapien
cttgcgcgccggcagtaggtagagc

SEQ ID NO: 3424233 - DNA, 25 bp, Homo sapien
aggccgagccaggcgagccacagca

SEQ ID NO: 3424234 - DNA, 25 bp, Homo sapien
gcagggacgcgggtggacccagcag

SEQ ID NO: 3424235 - DNA, 25 bp, Homo sapien
gggcccgaacgggccgccaggagca

SEQ ID NO: 3424236 - DNA, 25 bp, Homo sapien
ggcgtcctttccctcgccgagccca

SEQ ID NO: 3424237 - DNA, 25 bp, Homo sapien
tcgccgagcccattcgcttccctcc

SEQ ID NO: 3424238 - DNA, 25 bp, Homo sapien
cctcccccgagcgtccgcgagcggg

SEQ ID NO: 3424239 - DNA, 25 bp, Homo sapien
tccaagggggctctgataaggcccg

SEQ ID NO: 3424240 - DNA, 25 bp, Homo sapien
cgttaataggatagcgcaggcgact

SEQ ID NO: 3424241 - DNA, 25 bp, Homo sapien
gttaataggatagcgcaggcgactc

SEQ ID NO: 3424242 - DNA, 25 bp, Homo sapien
aataggatagcgcaggcgactcttg

SEQ ID NO: 3424243 - DNA, 25 bp, Homo sapien
taggatagcgcaggcgactcttgtc

SEQ ID NO: 3424244 - DNA, 25 bp, Homo sapien
gtggacctccccgctaggcctggag

SEQ ID NO: 3424245 - DNA, 25 bp, Homo sapien
ggccgcttaactccagcgcgagggc

SEQ ID NO: 3424246 - DNA, 25 bp, Homo sapien
tgtcctgggcgtaacagaggcacac

SEQ ID NO: 3424247 - DNA, 25 bp, Homo sapien
gtgggggccaatctccgtggacctc

SEQ ID NO: 3424248 - DNA, 25 bp, Homo sapien
ggtgcacggagtagcagtaaatggg

SEQ ID NO: 3424249 - DNA, 25 bp, Homo sapien
tgctgtggtgcacggagtagcagta

SEQ ID NO: 3424250 - DNA, 25 bp, Homo sapien
cacggagtagcagtaaatggggtaa

SEQ ID NO: 3424251 - DNA, 25 bp, Homo sapien
tgtggtgcacggagtagcagtaaat

SEQ ID NO: 3424252 - DNA, 25 bp, Homo sapien
ggggctgcgcgcctccacatcccca

SEQ ID NO: 3424253 - DNA, 25 bp, Homo sapien
ccccaagcattaggctgccaccctg

SEQ ID NO: 3424254 - DNA, 25 bp, Homo sapien
cacacgcagagcccaaaactcaggg

SEQ ID NO: 3424255 - DNA, 25 bp, Homo sapien
agaccctgccccaagcattaggctg

SEQ ID NO: 3424256 - DNA, 25 bp, Homo sapien
ggcgacaaacgccaagggcaggagc

SEQ ID NO: 3424257 - DNA, 25 bp, Homo sapien
aagatgaaagcggtgagggtggcga

SEQ ID NO: 3424258 - DNA, 25 bp, Homo sapien
agcggtgagggtggcgacaaacgcc

SEQ ID NO: 3424259 - DNA, 25 bp, Homo sapien
gcaggagcatttccgggagcgcccc

SEQ ID NO: 3424260 - DNA, 25 bp, Homo sapien
caggtgccagggccgaaactggggc

SEQ ID NO: 3424261 - DNA, 25 bp, Homo sapien
ggtgccagggccgaaactggggcta

SEQ ID NO: 3424262 - DNA, 25 bp, Homo sapien
tgccagggccgaaactggggctacc

SEQ ID NO: 3424263 - DNA, 25 bp, Homo sapien
cagggccgaaactggggctacctgc

SEQ ID NO: 3424264 - DNA, 25 bp, Homo sapien
gagagtgaatgtacaggcagacgcc

SEQ ID NO: 3424265 - DNA, 25 bp, Homo sapien
tgaatgtacaggcagacgccccaat

SEQ ID NO: 3424266 - DNA, 25 bp, Homo sapien
tgtacaggcagacgccccaatctgc

SEQ ID NO: 3424267 - DNA, 25 bp, Homo sapien
aatattggagagtgaatgtacaggc

SEQ ID NO: 3424268 - DNA, 25 bp, Homo sapien
cagaaaaaagtcgtaaatcggattg

SEQ ID NO: 3424269 - DNA, 25 bp, Homo sapien
ccgggtcgcagttcacagaaatatt

SEQ ID NO: 3424270 - DNA, 25 bp, Homo sapien
cgatgaggccgggtcgcagttcaca

SEQ ID NO: 3424271 - DNA, 25 bp, Homo sapien
gaagaaacagatacgagggttgagc

SEQ ID NO: 3424272 - DNA, 25 bp, Homo sapien
tatttgaagtcgaagaaacagatac

SEQ ID NO: 3424273 - DNA, 25 bp, Homo sapien
caaatgtttgtggaatatgaatggt

SEQ ID NO: 3424274 - DNA, 25 bp, Homo sapien
gccagctcagtcaagcccaacatac

SEQ ID NO: 3424275 - DNA, 25 bp, Homo sapien
tatgaatggttaatgactcgcatct

SEQ ID NO: 3424276 - DNA, 25 bp, Homo sapien
cagtacctaggcacaggtggattga

SEQ ID NO: 3424277 - DNA, 25 bp, Homo sapien
atcacccacgtagagcaactggaag

SEQ ID NO: 3424278 - DNA, 25 bp, Homo sapien
tccttcatcaacagggccaggttga

SEQ ID NO: 3424279 - DNA, 25 bp, Homo sapien
gggcatcacccacgtagagcaactg

SEQ ID NO: 3424280 - DNA, 25 bp, Homo sapien
acccacgtagagcaactggaagcca

SEQ ID NO: 3424281 - DNA, 25 bp, Homo sapien
gcttagtccctatgcggccctcaga

SEQ ID NO: 3424282 - DNA, 25 bp, Homo sapien
cagacacactggcttagtccctatg

SEQ ID NO: 3424283 - DNA, 25 bp, Homo sapien
acactggcttagtccctatgcggcc

SEQ ID NO: 3424284 - DNA, 25 bp, Homo sapien
tggcttagtccctatgcggccctca

SEQ ID NO: 3424285 - DNA, 25 bp, Homo sapien
tgcaggctgtaggtgaagggcaccc

SEQ ID NO: 3424286 - DNA, 25 bp, Homo sapien
tcatgtgtgatatccatggtggtga

SEQ ID NO: 3424287 - DNA, 25 bp, Homo sapien
gcatgaagccaaacccgtcatgtgt

SEQ ID NO: 3424288 - DNA, 25 bp, Homo sapien
catgtccccaaacgccagcatgaag

SEQ ID NO: 3424289 - DNA, 25 bp, Homo sapien
tggtcaaggtcaagggttgcagcct

SEQ ID NO: 3424290 - DNA, 25 bp, Homo sapien
tgagagagtgtgaaccggtggtcaa

SEQ ID NO: 3424291 - DNA, 25 bp, Homo sapien
gcacctatgtggtggtgcgtgtaaa

SEQ ID NO: 3424292 - DNA, 25 bp, Homo sapien
gaacatctgcccaacttgtctgcag

SEQ ID NO: 3424293 - DNA, 25 bp, Homo sapien
tcgccccacggaagatgtagtaacc

SEQ ID NO: 3424294 - DNA, 25 bp, Homo sapien
ttctgggaattcgccccacggaaga

SEQ ID NO: 3424295 - DNA, 25 bp, Homo sapien
tctggggtcagaaggattctttcgg

SEQ ID NO: 3424296 - DNA, 25 bp, Homo sapien
gaattcgccccacggaagatgtagt

SEQ ID NO: 3424297 - DNA, 25 bp, Homo sapien
ccacctcacccatggccctagagaa

SEQ ID NO: 3424298 - DNA, 25 bp, Homo sapien
cacctcacccatggccctagagaac

SEQ ID NO: 3424299 - DNA, 25 bp, Homo sapien
cccacctcacccatggccctagaga

SEQ ID NO: 3424300 - DNA, 25 bp, Homo sapien
cctcacccatggccctagagaacca

SEQ ID NO: 3424301 - DNA, 25 bp, Homo sapien
gttgggatggcggaccataccccac

SEQ ID NO: 3424302 - DNA, 25 bp, Homo sapien
acaccagcagtttccgccctgtggc

SEQ ID NO: 3424303 - DNA, 25 bp, Homo sapien
caagccagagccatgatgaggtctc

SEQ ID NO: 3424304 - DNA, 25 bp, Homo sapien
aggtctccaagatagttgggatggc

SEQ ID NO: 3424305 - DNA, 25 bp, Homo sapien
atgtgggcatcggggctcagcagca

SEQ ID NO: 3424306 - DNA, 25 bp, Homo sapien
gctcatgtgggcatcggggctcagc

SEQ ID NO: 3424307 - DNA, 25 bp, Homo sapien
ctcatgtgggcatcggggctcagca

SEQ ID NO: 3424308 - DNA, 25 bp, Homo sapien
tgggcatcggggctcagcagcaaaa

SEQ ID NO: 3424309 - DNA, 25 bp, Homo sapien
gagaaggaggctctgtgaccaccct

SEQ ID NO: 3424310 - DNA, 25 bp, Homo sapien
tagagaaggaggctctgtgaccacc

SEQ ID NO: 3424311 - DNA, 25 bp, Homo sapien
ctgtagagaaggaggctctgtgacc

SEQ ID NO: 3424312 - DNA, 25 bp, Homo sapien
gaaggaggctctgtgaccaccctgc

SEQ ID NO: 3424313 - DNA, 25 bp, Homo sapien
ccagcagcgcggtgaagtagaggag

SEQ ID NO: 3424314 - DNA, 25 bp, Homo sapien
ggcatgatgcggtaaggcacacgcc

SEQ ID NO: 3424315 - DNA, 25 bp, Homo sapien
gccaggccgtacttctgcaggcact

SEQ ID NO: 3424316 - DNA, 25 bp, Homo sapien
gccggcagtactcctgccaggccag

SEQ ID NO: 3424317 - DNA, 25 bp, Homo sapien
ggggtgcaagcccttgagtcccaag

SEQ ID NO: 3424318 - DNA, 25 bp, Homo sapien
tgggtgtgctggtggatgagtgggc

SEQ ID NO: 3424319 - DNA, 25 bp, Homo sapien
caagtgtgtcgaggctcctggtcct

SEQ ID NO: 3424320 - DNA, 25 bp, Homo sapien
tgagtcccaagtgtgtcgaggctcc

SEQ ID NO: 3424321 - DNA, 25 bp, Homo sapien
gaagtgcaccaagggttcccagtgt

SEQ ID NO: 3424322 - DNA, 25 bp, Homo sapien
taaaccacctcttctctgaggttgt

SEQ ID NO: 3424323 - DNA, 25 bp, Homo sapien
tctccgattttggtcactggtttca

SEQ ID NO: 3424324 - DNA, 25 bp, Homo sapien
ccagtcctaggggagagaagtgcac

SEQ ID NO: 3424325 - DNA, 25 bp, Homo sapien
aagcccatgctgtggtagccgagga

SEQ ID NO: 3424326 - DNA, 25 bp, Homo sapien
ggaccccgccggattctgtgaaaga

SEQ ID NO: 3424327 - DNA, 25 bp, Homo sapien
tctggaggagctggataatgccccg

SEQ ID NO: 3424328 - DNA, 25 bp, Homo sapien
tggaccaacgaaaatgaggcggccc

SEQ ID NO: 3424329 - DNA, 25 bp, Homo sapien
ctatcgggactctgggagcggctgg

SEQ ID NO: 3424330 - DNA, 25 bp, Homo sapien
gtggtggtggaaccgcggagccgga

SEQ ID NO: 3424331 - DNA, 25 bp, Homo sapien
tgctgcctccatggcggccgtggtg

SEQ ID NO: 3424332 - DNA, 25 bp, Homo sapien
aaagctgccttcgagcggctgctga

SEQ ID NO: 3424333 - DNA, 25 bp, Homo sapien
ggctgcgtcagcaacgcgagaccga

SEQ ID NO: 3424334 - DNA, 25 bp, Homo sapien
tacgccggctgcgtcagcaacgcga

SEQ ID NO: 3424335 - DNA, 25 bp, Homo sapien
caacgcgagaccgaggacgagcctg

SEQ ID NO: 3424336 - DNA, 25 bp, Homo sapien
tagcaagcgccctacgccggctgcg

SEQ ID NO: 3424337 - DNA, 25 bp, Homo sapien
tgcagccgccaactcctgggcccag

SEQ ID NO: 3424338 - DNA, 25 bp, Homo sapien
tcctgggcccaggtgatcctactca

SEQ ID NO: 3424339 - DNA, 25 bp, Homo sapien
cagccgccaactcctgggcccaggt

SEQ ID NO: 3424340 - DNA, 25 bp, Homo sapien
tgggcccaggtgatcctactcagcc

SEQ ID NO: 3424341 - DNA, 25 bp, Homo sapien
gccagccttctgtgcgcgcaactgt

SEQ ID NO: 3424342 - DNA, 25 bp, Homo sapien
tgtgcgcgcaactgtctggtcccgc

SEQ ID NO: 3424343 - DNA, 25 bp, Homo sapien
cttctgtgcgcgcaactgtctggtc

SEQ ID NO: 3424344 - DNA, 25 bp, Homo sapien
tacgccagccttctgtgcgcgcaac

SEQ ID NO: 3424345 - DNA, 25 bp, Homo sapien
ccgcagcgtagcccggaacatggta

SEQ ID NO: 3424346 - DNA, 25 bp, Homo sapien
gcgtagcccggaacatggtagctgc

SEQ ID NO: 3424347 - DNA, 25 bp, Homo sapien
atccccgcagcgtagcccggaacat

SEQ ID NO: 3424348 - DNA, 25 bp, Homo sapien
gctggacaccggttctccatccccg

SEQ ID NO: 3424349 - DNA, 25 bp, Homo sapien
ccacgcgatgccctcagctcctcgc

SEQ ID NO: 3424350 - DNA, 25 bp, Homo sapien
ctcagctcctcgctcagcgctctca

SEQ ID NO: 3424351 - DNA, 25 bp, Homo sapien
cctcagctcctcgctcagcgctctc

SEQ ID NO: 3424352 - DNA, 25 bp, Homo sapien
tcagctcctcgctcagcgctctcac

SEQ ID NO: 3424353 - DNA, 25 bp, Homo sapien
gcctgtccaatcttgaactggcacc

SEQ ID NO: 3424354 - DNA, 25 bp, Homo sapien
tgcatggccatctgtccaacaactg

SEQ ID NO: 3424355 - DNA, 25 bp, Homo sapien
tcttgaactggcaccacccatgtta

SEQ ID NO: 3424356 - DNA, 25 bp, Homo sapien
gttattcatccttgtagccaaggat

SEQ ID NO: 3424357 - DNA, 25 bp, Homo sapien
gatctgggatcctggtagccggtaa

SEQ ID NO: 3424358 - DNA, 25 bp, Homo sapien
ggtaacaggcgctccacaaactgat

SEQ ID NO: 3424359 - DNA, 25 bp, Homo sapien
gatattcatccacagactccacaaa

SEQ ID NO: 3424360 - DNA, 25 bp, Homo sapien
taatgttcatgctttgggggatctg

SEQ ID NO: 3424361 - DNA, 25 bp, Homo sapien
tcagggaggccgaaatcaatctctg

SEQ ID NO: 3424362 - DNA, 25 bp, Homo sapien
ccttgggcatgagacagatgtaacc

SEQ ID NO: 3424363 - DNA, 25 bp, Homo sapien
aatgagtcctgaacccactggagag

SEQ ID NO: 3424364 - DNA, 25 bp, Homo sapien
tgagtaccagtgaacaacagaaggc

SEQ ID NO: 3424365 - DNA, 25 bp, Homo sapien
catgcgtgatgtccttgtagacggg

SEQ ID NO: 3424366 - DNA, 25 bp, Homo sapien
cactttccggatcacagtcatctgc

SEQ ID NO: 3424367 - DNA, 25 bp, Homo sapien
agtcatctgccggttgccatgcgtg

SEQ ID NO: 3424368 - DNA, 25 bp, Homo sapien
gatgttgtgcatccgagagcgtcgt

SEQ ID NO: 3424369 - DNA, 25 bp, Homo sapien
ccttgatccgtagggtacctgtcac

SEQ ID NO: 3424370 - DNA, 25 bp, Homo sapien
caagagccaggctttaagctcctgg

SEQ ID NO: 3424371 - DNA, 25 bp, Homo sapien
caaagtagcccttgatccgtagggt

SEQ ID NO: 3424372 - DNA, 25 bp, Homo sapien
agaaaatcttccacgtctttctgca

SEQ ID NO: 3424373 - DNA, 25 bp, Homo sapien
cctagacttgatccacagggcatgc

SEQ ID NO: 3424374 - DNA, 25 bp, Homo sapien
tgctgacaagcaggctgctcggctg

SEQ ID NO: 3424375 - DNA, 25 bp, Homo sapien
tgatccacagggcatgctgacaagc

SEQ ID NO: 3424376 - DNA, 25 bp, Homo sapien
tgaggccccctagacttgatccaca

SEQ ID NO: 3424377 - DNA, 25 bp, Homo sapien
ctttatgcaagcaaggcctgacccc

SEQ ID NO: 3424378 - DNA, 25 bp, Homo sapien
ttttctcctttatgcaagcaaggcc

SEQ ID NO: 3424379 - DNA, 25 bp, Homo sapien
ccccagcatgtacatagagttgttt

SEQ ID NO: 3424380 - DNA, 25 bp, Homo sapien
tctcctttatgcaagcaaggcctga

SEQ ID NO: 3424381 - DNA, 25 bp, Homo sapien
ttgcaacagtgagcttcggagggcc

SEQ ID NO: 3424382 - DNA, 25 bp, Homo sapien
tagaatttgaattgctgagcccaag

SEQ ID NO: 3424383 - DNA, 25 bp, Homo sapien
gatcaaatcagtgtcgggctccttg

SEQ ID NO: 3424384 - DNA, 25 bp, Homo sapien
ggaacagtgaccaagaacgtgcctc

SEQ ID NO: 3424385 - DNA, 25 bp, Homo sapien
agctatgaacttgctcgctggccca

SEQ ID NO: 3424386 - DNA, 25 bp, Homo sapien
caagccctacttgtatgtgcggagt

SEQ ID NO: 3424387 - DNA, 25 bp, Homo sapien
tactggcaaccacacaactcaggga

SEQ ID NO: 3424388 - DNA, 25 bp, Homo sapien
gtattagctcccgttcccaagtgtg

SEQ ID NO: 3424389 - DNA, 25 bp, Homo sapien
agtgtgatcacttaaccccttcgag

SEQ ID NO: 3424390 - DNA, 25 bp, Homo sapien
tccaggccttgcgtcagtgtgatca

SEQ ID NO: 3424391 - DNA, 25 bp, Homo sapien
taacacagctgtcaccggcgctgtc

SEQ ID NO: 3424392 - DNA, 25 bp, Homo sapien
caggcagcgtggaaagagccctaga

SEQ ID NO: 3424393 - DNA, 25 bp, Homo sapien
tcgcgcggattgagcgggctcgcgg

SEQ ID NO: 3424394 - DNA, 25 bp, Homo sapien
gagtgttgttaaccggaggggcagc

SEQ ID NO: 3424395 - DNA, 25 bp, Homo sapien
gggcagccgcagtcgcgcggattga

SEQ ID NO: 3424396 - DNA, 25 bp, Homo sapien
aagtgaggtgtctgacccccgaagt

SEQ ID NO: 3424397 - DNA, 25 bp, Homo sapien
tagacatcaccccagatacggtggt

SEQ ID NO: 3424398 - DNA, 25 bp, Homo sapien
ggagccataccatctgtgactaata

SEQ ID NO: 3424399 - DNA, 25 bp, Homo sapien
tcagagagcaccgtatttgtcaaac

SEQ ID NO: 3424400 - DNA, 25 bp, Homo sapien
gacaccattgctatgggcccacgta

SEQ ID NO: 3424401 - DNA, 25 bp, Homo sapien
tatttaatatagattgtgtcctcga

SEQ ID NO: 3424402 - DNA, 25 bp, Homo sapien
gcaatgctaggtaaatgtgtggagt

SEQ ID NO: 3424403 - DNA, 25 bp, Homo sapien
tagattgtgtcctcgaatagaggac

SEQ ID NO: 3424404 - DNA, 25 bp, Homo sapien
gaggtactgcaatgctaggtaaatg

SEQ ID NO: 3424405 - DNA, 25 bp, Homo sapien
ccacccattctagctggaaggaaaa

SEQ ID NO: 3424406 - DNA, 25 bp, Homo sapien
gattgcccaatctgtaccttagtgc

SEQ ID NO: 3424407 - DNA, 25 bp, Homo sapien
catgttgcccatggatctgtcccca

SEQ ID NO: 3424408 - DNA, 25 bp, Homo sapien
tgagtcctaatgtggcctcactgcc

SEQ ID NO: 3424409 - DNA, 25 bp, Homo sapien
ctgagggctgaaccaggtgacgtca

SEQ ID NO: 3424410 - DNA, 25 bp, Homo sapien
tgacgtcaggcagataaaactcttg

SEQ ID NO: 3424411 - DNA, 25 bp, Homo sapien
ttttgtaaactcgagaaacttctca

SEQ ID NO: 3424412 - DNA, 25 bp, Homo sapien
gctgaaccaggtgacgtcaggcaga

SEQ ID NO: 3424413 - DNA, 25 bp, Homo sapien
aaagcagcccgtccaccaatcaggg

SEQ ID NO: 3424414 - DNA, 25 bp, Homo sapien
aacgccgccgcgagtgcgcttatat

SEQ ID NO: 3424415 - DNA, 25 bp, Homo sapien
gcttatatagcctgagggcggccct

SEQ ID NO: 3424416 - DNA, 25 bp, Homo sapien
tgccagtgagtccagtcggcaccca

SEQ ID NO: 3424417 - DNA, 25 bp, Homo sapien
tggcgaaaacggaggaacccattgc

SEQ ID NO: 3424418 - DNA, 25 bp, Homo sapien
tgggagtcactcatctcataggaga

SEQ ID NO: 3424419 - DNA, 25 bp, Homo sapien
cctcctggtgctggcgaaaacggag

SEQ ID NO: 3424420 - DNA, 25 bp, Homo sapien
gctctacctgggtggtaactacagg

SEQ ID NO: 3424421 - DNA, 25 bp, Homo sapien
gagaggaattcctggacaaaactgt

SEQ ID NO: 3424422 - DNA, 25 bp, Homo sapien
tctgaaatctggaagcaggggtctt

SEQ ID NO: 3424423 - DNA, 25 bp, Homo sapien
gaagcaggggtctttggagaggaat

SEQ ID NO: 3424424 - DNA, 25 bp, Homo sapien
aggaattcctggacaaaactgtcct

SEQ ID NO: 3424425 - DNA, 25 bp, Homo sapien
gctgctgtgggtatactcgctgagc

SEQ ID NO: 3424426 - DNA, 25 bp, Homo sapien
gggccaagaacaggctgctgtgggt

SEQ ID NO: 3424427 - DNA, 25 bp, Homo sapien
tgggcgcgctggaagtagaccagca

SEQ ID NO: 3424428 - DNA, 25 bp, Homo sapien
gggtatactcgctgagcttcaggtg

SEQ ID NO: 3424429 - DNA, 25 bp, Homo sapien
atccgtgcccaaagcttatccctct

SEQ ID NO: 3424430 - DNA, 25 bp, Homo sapien
cctctggtgcaggaatttccccact

SEQ ID NO: 3424431 - DNA, 25 bp, Homo sapien
ggcggctcacaacagcccggaaacc

SEQ ID NO: 3424432 - DNA, 25 bp, Homo sapien
acaacagcccggaaacccatccgtg

SEQ ID NO: 3424433 - DNA, 25 bp, Homo sapien
ctgctgcagtgctggggcaaaccac

SEQ ID NO: 3424434 - DNA, 25 bp, Homo sapien
cccaggcgtttttgacccttgagag

SEQ ID NO: 3424435 - DNA, 25 bp, Homo sapien
attttgggagggagggcgatgacat

SEQ ID NO: 3424436 - DNA, 25 bp, Homo sapien
aaggcgaacagggacctgtggacag

SEQ ID NO: 3424437 - DNA, 25 bp, Homo sapien
caggcgtgctgttcttcaccctgca

SEQ ID NO: 3424438 - DNA, 25 bp, Homo sapien
cagggcgtgccggaggctttgggaa

SEQ ID NO: 3424439 - DNA, 25 bp, Homo sapien
cagtgggccagcaggcgtgctgttc

SEQ ID NO: 3424440 - DNA, 25 bp, Homo sapien
cttcagtgcccagggcgtgccggag

SEQ ID NO: 3424441 - DNA, 25 bp, Homo sapien
ctggcagcgagcagacccctgccgg

SEQ ID NO: 3424442 - DNA, 25 bp, Homo sapien
tggcagcgagcagacccctgccgga

SEQ ID NO: 3424443 - DNA, 25 bp, Homo sapien
agcgagcagacccctgccggacact

SEQ ID NO: 3424444 - DNA, 25 bp, Homo sapien
gagcagacccctgccggacactcag

SEQ ID NO: 3424445 - DNA, 25 bp, Homo sapien
caggggcagcagctcgagttgcagg

SEQ ID NO: 3424446 - DNA, 25 bp, Homo sapien
cattccggggcgattgtgcggcggc

SEQ ID NO: 3424447 - DNA, 25 bp, Homo sapien
gccggacggccgcaccccacgcgcg

SEQ ID NO: 3424448 - DNA, 25 bp, Homo sapien
agctcgagttgcagggccggacggc

SEQ ID NO: 3424449 - DNA, 25 bp, Homo sapien
gtgtctccccgcccctccctccgca

SEQ ID NO: 3424450 - DNA, 25 bp, Homo sapien
tgtctccccgcccctccctccgcag

SEQ ID NO: 3424451 - DNA, 25 bp, Homo sapien
ctccctccgcaggccgggggccaat

SEQ ID NO: 3424452 - DNA, 25 bp, Homo sapien
tctccccgcccctccctccgcaggc

SEQ ID NO: 3424453 - DNA, 25 bp, Homo sapien
ggcacggtctctgactatctcttac

SEQ ID NO: 3424454 - DNA, 25 bp, Homo sapien
tctcccttatctctccggcacggtc

SEQ ID NO: 3424455 - DNA, 25 bp, Homo sapien
cggtctctgactatctcttactcac

SEQ ID NO: 3424456 - DNA, 25 bp, Homo sapien
tccggcacggtctctgactatctct

SEQ ID NO: 3424457 - DNA, 25 bp, Homo sapien
gggtgtttgggggtcgctgcagtcc

SEQ ID NO: 3424458 - DNA, 25 bp, Homo sapien
gtgtttgggggtcgctgcagtccct

SEQ ID NO: 3424459 - DNA, 25 bp, Homo sapien
gtttgggggtcgctgcagtccctga

SEQ ID NO: 3424460 - DNA, 25 bp, Homo sapien
ttgggggtcgctgcagtccctgagg

SEQ ID NO: 3424461 - DNA, 25 bp, Homo sapien
cagcaggctcgatatcagagctggt

SEQ ID NO: 3424462 - DNA, 25 bp, Homo sapien
gtgcaccggccccttgccgtgggct

SEQ ID NO: 3424463 - DNA, 25 bp, Homo sapien
ccgcagcaggctcgatatcagagct

SEQ ID NO: 3424464 - DNA, 25 bp, Homo sapien
ttgccgtgggctgaaaaccccagac

SEQ ID NO: 3424465 - DNA, 25 bp, Homo sapien
gtgaatccaggaaagggatttccca

SEQ ID NO: 3424466 - DNA, 25 bp, Homo sapien
tcccggtgctcccagtgaatccagg

SEQ ID NO: 3424467 - DNA, 25 bp, Homo sapien
cctttcccggatcccattgtcaggg

SEQ ID NO: 3424468 - DNA, 25 bp, Homo sapien
tcccagttcccaggcgtgccggcca

SEQ ID NO: 3424469 - DNA, 25 bp, Homo sapien
tgatggcattctcatggcggcccag

SEQ ID NO: 3424470 - DNA, 25 bp, Homo sapien
caggtccttgtaacccaggctctgg

SEQ ID NO: 3424471 - DNA, 25 bp, Homo sapien
tgggacgcttccacttgatgccata

SEQ ID NO: 3424472 - DNA, 25 bp, Homo sapien
ccagtgcagtacaccggcgtgatga

SEQ ID NO: 3424473 - DNA, 25 bp, Homo sapien
ccacaatgaactgggggtttgacag

SEQ ID NO: 3424474 - DNA, 25 bp, Homo sapien
ctgtgcgggtagctccatccacaat

SEQ ID NO: 3424475 - DNA, 25 bp, Homo sapien
atgtctgtgcgggtagctccatcca

SEQ ID NO: 3424476 - DNA, 25 bp, Homo sapien
gtctgtgcgggtagctccatccaca

SEQ ID NO: 3424477 - DNA, 25 bp, Homo sapien
gagggatgcacattagcctgctcta

SEQ ID NO: 3424478 - DNA, 25 bp, Homo sapien
gaagcgggtgctagggagaatctgg

SEQ ID NO: 3424479 - DNA, 25 bp, Homo sapien
aggagggatgcacattagcctgctc

SEQ ID NO: 3424480 - DNA, 25 bp, Homo sapien
ggatgcacattagcctgctctacca

SEQ ID NO: 3424481 - DNA, 25 bp, Homo sapien
gcgatggccgccaagagccagcagt

SEQ ID NO: 3424482 - DNA, 25 bp, Homo sapien
gaagatgccggcatagccattctgg

SEQ ID NO: 3424483 - DNA, 25 bp, Homo sapien
tgcaggagggtgtcgttgagagtga

SEQ ID NO: 3424484 - DNA, 25 bp, Homo sapien
ccgtgcggaaccactcggtgcagga

SEQ ID NO: 3424485 - DNA, 25 bp, Homo sapien
ggctctctaaccaggcagaaggagg

SEQ ID NO: 3424486 - DNA, 25 bp, Homo sapien
tggatccgcactgtgggttccgcac

SEQ ID NO: 3424487 - DNA, 25 bp, Homo sapien
ggaacacccaagagtccttcgggca

SEQ ID NO: 3424488 - DNA, 25 bp, Homo sapien
gagtctcatccagggttgctgggca

SEQ ID NO: 3424489 - DNA, 25 bp, Homo sapien
agaactcgttgccttcggcagagtg

SEQ ID NO: 3424490 - DNA, 25 bp, Homo sapien
gagtgcacgaacactagcttcccgt

SEQ ID NO: 3424491 - DNA, 25 bp, Homo sapien
cgttgccttcggcagagtgcacgaa

SEQ ID NO: 3424492 - DNA, 25 bp, Homo sapien
agcaggtcatccacgaccacgtcca

SEQ ID NO: 3424493 - DNA, 25 bp, Homo sapien
tggagttgccccctcagccgctact

SEQ ID NO: 3424494 - DNA, 25 bp, Homo sapien
ctctgagaagacagtcatgagcccc

SEQ ID NO: 3424495 - DNA, 25 bp, Homo sapien
gcactctggcatcaagcaggaccct

SEQ ID NO: 3424496 - DNA, 25 bp, Homo sapien
cagctccaggtcagcactctggcat

SEQ ID NO: 3424497 - DNA, 25 bp, Homo sapien
actgggagccttgcgcaactcgtac

SEQ ID NO: 3424498 - DNA, 25 bp, Homo sapien
gaggatgatctggtagaggtcactg

SEQ ID NO: 3424499 - DNA, 25 bp, Homo sapien
ccctgacagggcctcgtagctgcca

SEQ ID NO: 3424500 - DNA, 25 bp, Homo sapien
cactcggtaaccccgcctgtgaagt

SEQ ID NO: 3424501 - DNA, 25 bp, Homo sapien
gccccggtcacagagtaggcatggc

SEQ ID NO: 3424502 - DNA, 25 bp, Homo sapien
gtcacagagtaggcatggcccttca

SEQ ID NO: 3424503 - DNA, 25 bp, Homo sapien
tcagatgggtgtccccagaagagag

SEQ ID NO: 3424504 - DNA, 25 bp, Homo sapien
acacatgaactacagtcagtcaggg

SEQ ID NO: 3424505 - DNA, 25 bp, Homo sapien
cagggcaggacatgataggcatctc

SEQ ID NO: 3424506 - DNA, 25 bp, Homo sapien
tgctcagcacccagatgaagcctgt

SEQ ID NO: 3424507 - DNA, 25 bp, Homo sapien
tcccgtccactccacctcgccccag

SEQ ID NO: 3424508 - DNA, 25 bp, Homo sapien
caggggttccgcatccggatcaggc

SEQ ID NO: 3424509 - DNA, 25 bp, Homo sapien
cacctcgccccaggggttccgcatc

SEQ ID NO: 3424510 - DNA, 25 bp, Homo sapien
gccccaggggttccgcatccggatc

SEQ ID NO: 3424511 - DNA, 25 bp, Homo sapien
ctcaaggtcaagcgccaaggttccg

SEQ ID NO: 3424512 - DNA, 25 bp, Homo sapien
aagcgccaaggttccgcttctaggg

SEQ ID NO: 3424513 - DNA, 25 bp, Homo sapien
aaggtcaagcgccaaggttccgctt

SEQ ID NO: 3424514 - DNA, 25 bp, Homo sapien
tcaagcgccaaggttccgcttctag

SEQ ID NO: 3424515 - DNA, 25 bp, Homo sapien
tatgggtccacgttgttccactctg

SEQ ID NO: 3424516 - DNA, 25 bp, Homo sapien
gagctggtcccgttcatatgggtcc

SEQ ID NO: 3424517 - DNA, 25 bp, Homo sapien
gtcctccatcttgacccggagctgg

SEQ ID NO: 3424518 - DNA, 25 bp, Homo sapien
tcttgacccggagctggtcccgttc

SEQ ID NO: 3424519 - DNA, 25 bp, Homo sapien
cccgcatgaagtctcggaatgacat

SEQ ID NO: 3424520 - DNA, 25 bp, Homo sapien
tggtgttccatttgcggatggtccg

SEQ ID NO: 3424521 - DNA, 25 bp, Homo sapien
tctccaggcgggtgaactcccgcat

SEQ ID NO: 3424522 - DNA, 25 bp, Homo sapien
gccgccaggtgccttcgtagagtgt

SEQ ID NO: 3424523 - DNA, 25 bp, Homo sapien
tgttatcggcagagggatagaccca

SEQ ID NO: 3424524 - DNA, 25 bp, Homo sapien
tcaggactacttgagggcgctagtg

SEQ ID NO: 3424525 - DNA, 25 bp, Homo sapien
gacagaatggtgagtccagaaacag

SEQ ID NO: 3424526 - DNA, 25 bp, Homo sapien
gaatgcttcaaaacagagggcaggg

SEQ ID NO: 3424527 - DNA, 25 bp, Homo sapien
ccatatccttggataagacttaaaa

SEQ ID NO: 3424528 - DNA, 25 bp, Homo sapien
aatgaagagatacaccatatccttg

SEQ ID NO: 3424529 - DNA, 25 bp, Homo sapien
tgaaagacattaaaggccaaaataa

SEQ ID NO: 3424530 - DNA, 25 bp, Homo sapien
tccccaaattggtctataggtttca

SEQ ID NO: 3424531 - DNA, 25 bp, Homo sapien
cagttttaattcacactgcctgtga

SEQ ID NO: 3424532 - DNA, 25 bp, Homo sapien
tcagttttaattcacactgcctgtg

SEQ ID NO: 3424533 - DNA, 25 bp, Homo sapien
ttttaattcacactgcctgtgaaac

SEQ ID NO: 3424534 - DNA, 25 bp, Homo sapien
agttttaattcacactgcctgtgaa

SEQ ID NO: 3424535 - DNA, 25 bp, Homo sapien
gaagccaatagtctccatgtcgcgg

SEQ ID NO: 3424536 - DNA, 25 bp, Homo sapien
ccgtctcatccagccggatcttgaa

SEQ ID NO: 3424537 - DNA, 25 bp, Homo sapien
gagcacgaagctgcagcctgactcg

SEQ ID NO: 3424538 - DNA, 25 bp, Homo sapien
gcttctgcataagggcgagcacgaa

SEQ ID NO: 3424539 - DNA, 25 bp, Homo sapien
gctggaccgccctagttggcactta

SEQ ID NO: 3424540 - DNA, 25 bp, Homo sapien
cttacttggtgtagatggcaaggca

SEQ ID NO: 3424541 - DNA, 25 bp, Homo sapien
aacaaggtgacttcttagctctcca

SEQ ID NO: 3424542 - DNA, 25 bp, Homo sapien
gaccctcaggagagcaatgtttgct

SEQ ID NO: 3424543 - DNA, 25 bp, Homo sapien
agcctgtgtgaccctaacaagacat

SEQ ID NO: 3424544 - DNA, 25 bp, Homo sapien
gcctgtgtgaccctaacaagacatt

SEQ ID NO: 3424545 - DNA, 25 bp, Homo sapien
tgtgtgaccctaacaagacattttg

SEQ ID NO: 3424546 - DNA, 25 bp, Homo sapien
cctgtgtgaccctaacaagacattt

SEQ ID NO: 3424547 - DNA, 25 bp, Homo sapien
tgaactgctctgagcgcgcccgaga

SEQ ID NO: 3424548 - DNA, 25 bp, Homo sapien
cgcccgagacgcattggccaggaag

SEQ ID NO: 3424549 - DNA, 25 bp, Homo sapien
acgcttcaagtgtacggccggctgg

SEQ ID NO: 3424550 - DNA, 25 bp, Homo sapien
cgggtgctgacctctcgcaggttga

SEQ ID NO: 3424551 - DNA, 25 bp, Homo sapien
aagaagcgcagcacgaagtcgccct

SEQ ID NO: 3424552 - DNA, 25 bp, Homo sapien
aagtcgccctccttgttgggctcga

SEQ ID NO: 3424553 - DNA, 25 bp, Homo sapien
acagtcccagcactcttctctgaga

SEQ ID NO: 3424554 - DNA, 25 bp, Homo sapien
aaggtggagggcaccaccacatact

SEQ ID NO: 3424555 - DNA, 25 bp, Homo sapien
agattggcctggatctggtcatcca

SEQ ID NO: 3424556 - DNA, 25 bp, Homo sapien
tcatcggggagattggcctggatct

SEQ ID NO: 3424557 - DNA, 25 bp, Homo sapien
gggagattggcctggatctggtcat

SEQ ID NO: 3424558 - DNA, 25 bp, Homo sapien
ctcatcggggagattggcctggatc

SEQ ID NO: 3424559 - DNA, 25 bp, Homo sapien
ttgaagttctcgtcaatctcctctt

SEQ ID NO: 3424560 - DNA, 25 bp, Homo sapien
cttgaagttctcgtcaatctcctct

SEQ ID NO: 3424561 - DNA, 25 bp, Homo sapien
gtttgctgatgatcctattgaggat

SEQ ID NO: 3424562 - DNA, 25 bp, Homo sapien
attgtccgcaactccttcacgctga

SEQ ID NO: 3424563 - DNA, 25 bp, Homo sapien
cctattgaggattgtccgcaactcc

SEQ ID NO: 3424564 - DNA, 25 bp, Homo sapien
aactccttcacgctgatctccatgt

SEQ ID NO: 3424565 - DNA, 25 bp, Homo sapien
agccagtcacgtggtgttccccaag

SEQ ID NO: 3424566 - DNA, 25 bp, Homo sapien
gctctgcttaaggaaaccgtgtgga

SEQ ID NO: 3424567 - DNA, 25 bp, Homo sapien
taagcagtgcttcactagcagagaa

SEQ ID NO: 3424568 - DNA, 25 bp, Homo sapien
cacaaatcctgacgagtgggtgcaa

SEQ ID NO: 3424569 - DNA, 25 bp, Homo sapien
catgctgcggcacgactctaggctg

SEQ ID NO: 3424570 - DNA, 25 bp, Homo sapien
caaaaccccactcaggagacaaaag

SEQ ID NO: 3424571 - DNA, 25 bp, Homo sapien
aaccccactcaggagacaaaagcaa

SEQ ID NO: 3424572 - DNA, 25 bp, Homo sapien
gagacaaaagcaaacggaaggatac

SEQ ID NO: 3424573 - DNA, 25 bp, Homo sapien
ctccacccaaaaccccactcaggag

SEQ ID NO: 3424574 - DNA, 25 bp, Homo sapien
aaagccatgtacagtcagcccacag

SEQ ID NO: 3424575 - DNA, 25 bp, Homo sapien
gtgtgtccacactccgcatggctct

SEQ ID NO: 3424576 - DNA, 25 bp, Homo sapien
tcccaaccaacaggaagacgtccag

SEQ ID NO: 3424577 - DNA, 25 bp, Homo sapien
cctttcacttgacacaggtctgtgc

SEQ ID NO: 3424578 - DNA, 25 bp, Homo sapien
ccgccgagccggcaagtcgacttgg

SEQ ID NO: 3424579 - DNA, 25 bp, Homo sapien
gagatggccgccgagccggcaagtc

SEQ ID NO: 3424580 - DNA, 25 bp, Homo sapien
acttagaccagtcatgggagagtgg

SEQ ID NO: 3424581 - DNA, 25 bp, Homo sapien
ggaaattccatcacttagaccagtc

SEQ ID NO: 3424582 - DNA, 25 bp, Homo sapien
tccacaggatgttgaactccaccag

SEQ ID NO: 3424583 - DNA, 25 bp, Homo sapien
aggatgttgaactccaccaggccca

SEQ ID NO: 3424584 - DNA, 25 bp, Homo sapien
tccggatgcggttccacaggatgtt

SEQ ID NO: 3424585 - DNA, 25 bp, Homo sapien
caggtaattccggatgcggttccac

SEQ ID NO: 3424586 - DNA, 25 bp, Homo sapien
gccaggctgagtcacccggcccttc

SEQ ID NO: 3424587 - DNA, 25 bp, Homo sapien
ccaggctgagtcacccggcccttcc

SEQ ID NO: 3424588 - DNA, 25 bp, Homo sapien
caggctgagtcacccggcccttccc

SEQ ID NO: 3424589 - DNA, 25 bp, Homo sapien
actcaatggccatccgcatctcgta

SEQ ID NO: 3424590 - DNA, 25 bp, Homo sapien
ccaggtcaaacttccggaagatgga

SEQ ID NO: 3424591 - DNA, 25 bp, Homo sapien
catgctgcccgacttgtccaggtca

SEQ ID NO: 3424592 - DNA, 25 bp, Homo sapien
catccgcatctcgtaggcactcatg

SEQ ID NO: 3424593 - DNA, 25 bp, Homo sapien
gaaattgtcaaagtcgaccgccagg

SEQ ID NO: 3424594 - DNA, 25 bp, Homo sapien
tgagctcgtacagcttcttgttgag

SEQ ID NO: 3424595 - DNA, 25 bp, Homo sapien
cgcaccaggcagcaaacgaaattgt

SEQ ID NO: 3424596 - DNA, 25 bp, Homo sapien
gaacatggtctctagccgcaccagg

SEQ ID NO: 3424597 - DNA, 25 bp, Homo sapien
tcacaactccatccagatctgtgtc

SEQ ID NO: 3424598 - DNA, 25 bp, Homo sapien
tctgtgtccagagttttgaaaaatc

SEQ ID NO: 3424599 - DNA, 25 bp, Homo sapien
cttaaacaagtcaaaggtcacaact

SEQ ID NO: 3424600 - DNA, 25 bp, Homo sapien
agtcaaaggtcacaactccatccag

SEQ ID NO: 3424601 - DNA, 25 bp, Homo sapien
aaaccagagtgctgctcccataggg

SEQ ID NO: 3424602 - DNA, 25 bp, Homo sapien
gtctcaggagccacctcaggaacct

SEQ ID NO: 3424603 - DNA, 25 bp, Homo sapien
tccacccctgggaaaccagagtgct

SEQ ID NO: 3424604 - DNA, 25 bp, Homo sapien
ccagataagaaaattcgatcgcctg

SEQ ID NO: 3424605 - DNA, 25 bp, Homo sapien
catgcaaacatggtcagctgcaacc

SEQ ID NO: 3424606 - DNA, 25 bp, Homo sapien
atgcaaacatggtcagctgcaacca

SEQ ID NO: 3424607 - DNA, 25 bp, Homo sapien
tcatgcaaacatggtcagctgcaac

SEQ ID NO: 3424608 - DNA, 25 bp, Homo sapien
cacggcaagggggaccgagtccctg

SEQ ID NO: 3424609 - DNA, 25 bp, Homo sapien
ctgcccggagcagatgaacgatggt

SEQ ID NO: 3424610 - DNA, 25 bp, Homo sapien
gccacacagttctgcccggagcaga

SEQ ID NO: 3424611 - DNA, 25 bp, Homo sapien
caggggccacacagttctgcccgga

SEQ ID NO: 3424612 - DNA, 25 bp, Homo sapien
ggaggcggctccacacgcctggact

SEQ ID NO: 3424613 - DNA, 25 bp, Homo sapien
cagactgtgtcgagctagtggttat

SEQ ID NO: 3424614 - DNA, 25 bp, Homo sapien
acgcctggactgcagactgtgtcga

SEQ ID NO: 3424615 - DNA, 25 bp, Homo sapien
tcgagctagtggttatagtttatag

SEQ ID NO: 3424616 - DNA, 25 bp, Homo sapien
gaaggcacaggcgttcccagccccg

SEQ ID NO: 3424617 - DNA, 25 bp, Homo sapien
agggggcgttggcttcggcgcagga

SEQ ID NO: 3424618 - DNA, 25 bp, Homo sapien
ggaaggcacaggcgttcccagcccc

SEQ ID NO: 3424619 - DNA, 25 bp, Homo sapien
gggcgttggcttcggcgcaggaagg

SEQ ID NO: 3424620 - DNA, 25 bp, Homo sapien
ctgggcagctcctggtcggcagcag

SEQ ID NO: 3424621 - DNA, 25 bp, Homo sapien
ccgaccgcccacaggctgggcagct

SEQ ID NO: 3424622 - DNA, 25 bp, Homo sapien
gcagctcctggtcggcagcagggcc

SEQ ID NO: 3424623 - DNA, 25 bp, Homo sapien
gggcagctcctggtcggcagcaggg

SEQ ID NO: 3424624 - DNA, 25 bp, Homo sapien
ctctatatggaacacgggacctccc

SEQ ID NO: 3424625 - DNA, 25 bp, Homo sapien
cagtacacaagtccctgaagagtcc

SEQ ID NO: 3424626 - DNA, 25 bp, Homo sapien
gggttcctctatatggaacacggga

SEQ ID NO: 3424627 - DNA, 25 bp, Homo sapien
ccataaccagtacacaagtccctga

SEQ ID NO: 3424628 - DNA, 25 bp, Homo sapien
tcatccagacgtggtgttcccatcc

SEQ ID NO: 3424629 - DNA, 25 bp, Homo sapien
ttatgagaggttagggtcccaggtc

SEQ ID NO: 3424630 - DNA, 25 bp, Homo sapien
gcaagaaagcccaaatagggcagtc

SEQ ID NO: 3424631 - DNA, 25 bp, Homo sapien
tcagtgactcagagtttatgagagg

SEQ ID NO: 3424632 - DNA, 25 bp, Homo sapien
caggccaggggtgaggactgcagac

SEQ ID NO: 3424633 - DNA, 25 bp, Homo sapien
aacaggccaggggtgaggactgcag

SEQ ID NO: 3424634 - DNA, 25 bp, Homo sapien
ggccaggggtgaggactgcagacat

SEQ ID NO: 3424635 - DNA, 25 bp, Homo sapien
gaacaggccaggggtgaggactgca

SEQ ID NO: 3424636 - DNA, 25 bp, Homo sapien
ttatgtagagaggccgggaggggcc

SEQ ID NO: 3424637 - DNA, 25 bp, Homo sapien
tttatgtagagaggccgggaggggc

SEQ ID NO: 3424638 - DNA, 25 bp, Homo sapien
ctttatgtagagaggccgggagggg

SEQ ID NO: 3424639 - DNA, 25 bp, Homo sapien
ccccgagtcgttggtggaggcctca

SEQ ID NO: 3424640 - DNA, 25 bp, Homo sapien
ccatcacgatggtggacgggaaaac

SEQ ID NO: 3424641 - DNA, 25 bp, Homo sapien
cccactgaggcttggtgaagcgccg

SEQ ID NO: 3424642 - DNA, 25 bp, Homo sapien
aacactgcggttatagacccagccg

SEQ ID NO: 3424643 - DNA, 25 bp, Homo sapien
catgggcgcttcagactgggcctcg

SEQ ID NO: 3424644 - DNA, 25 bp, Homo sapien
cagggaagacatgggcgcttcagac

SEQ ID NO: 3424645 - DNA, 25 bp, Homo sapien
gcgcttcagactgggcctcggcagc

SEQ ID NO: 3424646 - DNA, 25 bp, Homo sapien
aagacatgggcgcttcagactgggc

SEQ ID NO: 3424647 - DNA, 25 bp, Homo sapien
ccaggtctcggagagtgcgggcctc

SEQ ID NO: 3424648 - DNA, 25 bp, Homo sapien
ccggccatgtagacggactgcgcca

SEQ ID NO: 3424649 - DNA, 25 bp, Homo sapien
agcaccccggccatgtagacggact

SEQ ID NO: 3424650 - DNA, 25 bp, Homo sapien
agagtgcgggcctcacacaccagat

SEQ ID NO: 3424651 - DNA, 25 bp, Homo sapien
agctgaaatacgctgtggcggcccc

SEQ ID NO: 3424652 - DNA, 25 bp, Homo sapien
catcaggaaccggaagacgcaatag

SEQ ID NO: 3424653 - DNA, 25 bp, Homo sapien
tgccagagaaggtcatgcccatcag

SEQ ID NO: 3424654 - DNA, 25 bp, Homo sapien
agacgcaataggcactgaaggagct

SEQ ID NO: 3424655 - DNA, 25 bp, Homo sapien
gcagggccaccactacccgggagcc

SEQ ID NO: 3424656 - DNA, 25 bp, Homo sapien
cagcagggccaccactacccgggag

SEQ ID NO: 3424657 - DNA, 25 bp, Homo sapien
cacttaaactcattccagagaccct

SEQ ID NO: 3424658 - DNA, 25 bp, Homo sapien
cccagcaaaatacccgccacagtcc

SEQ ID NO: 3424659 - DNA, 25 bp, Homo sapien
gtccggccccgtgtgggcatccact

SEQ ID NO: 3424660 - DNA, 25 bp, Homo sapien
ggtgaaggaataccccagcaaaata

SEQ ID NO: 3424661 - DNA, 25 bp, Homo sapien
ccaggggcgaatcaggtaggctacc

SEQ ID NO: 3424662 - DNA, 25 bp, Homo sapien
gcagattctgtacagctaactggga

SEQ ID NO: 3424663 - DNA, 25 bp, Homo sapien
ggagccagcgggatgactctggaag

SEQ ID NO: 3424664 - DNA, 25 bp, Homo sapien
gctaactgggacttgccatgcagga

SEQ ID NO: 3424665 - DNA, 25 bp, Homo sapien
tctgtacagctaactgggacttgcc

SEQ ID NO: 3424666 - DNA, 25 bp, Homo sapien
atgagacagcatgtgaccttgcgga

SEQ ID NO: 3424667 - DNA, 25 bp, Homo sapien
ttgcaaactcgctttggatgtagga

SEQ ID NO: 3424668 - DNA, 25 bp, Homo sapien
tgcagacacttgcaaactcgctttg

SEQ ID NO: 3424669 - DNA, 25 bp, Homo sapien
cagcatgtgaccttgcggatggccg

SEQ ID NO: 3424670 - DNA, 25 bp, Homo sapien
aagagattgagttcacacggctcac

SEQ ID NO: 3424671 - DNA, 25 bp, Homo sapien
cagcagaggccgagtgctggaaaaa

SEQ ID NO: 3424672 - DNA, 25 bp, Homo sapien
ggctcacctgctcattgcattaaga

SEQ ID NO: 3424673 - DNA, 25 bp, Homo sapien
tcttgggcatgagcctgtcacctac

SEQ ID NO: 3424674 - DNA, 25 bp, Homo sapien
catggccccgatttttcgggtgcgg

SEQ ID NO: 3424675 - DNA, 25 bp, Homo sapien
gcgtgcgcgaaccaaacctgcggtt

SEQ ID NO: 3424676 - DNA, 25 bp, Homo sapien
tgccggcagcgaagcgaaacatttg

SEQ ID NO: 3424677 - DNA, 25 bp, Homo sapien
gggtcgggtcggctccataggagaa

SEQ ID NO: 3424678 - DNA, 25 bp, Homo sapien
gtggaatggtccttgttcaccccat

SEQ ID NO: 3424679 - DNA, 25 bp, Homo sapien
cagtggaatggtccttgttcacccc

SEQ ID NO: 3424680 - DNA, 25 bp, Homo sapien
agtggaatggtccttgttcacccca

SEQ ID NO: 3424681 - DNA, 25 bp, Homo sapien
gcaccaggtataggctgagcccaaa

SEQ ID NO: 3424682 - DNA, 25 bp, Homo sapien
cacggcggcccacgtaaatcatggt

SEQ ID NO: 3424683 - DNA, 25 bp, Homo sapien
ccatagtaagccacagagttggaga

SEQ ID NO: 3424684 - DNA, 25 bp, Homo sapien
atgttggcgatcaccatgagcccgg

SEQ ID NO: 3424685 - DNA, 25 bp, Homo sapien
tcgccggtaaacaggtacacacaga

SEQ ID NO: 3424686 - DNA, 25 bp, Homo sapien
tacagctcgccggtaaacaggtaca

SEQ ID NO: 3424687 - DNA, 25 bp, Homo sapien
gatctccgtggggtacagctcgccg

SEQ ID NO: 3424688 - DNA, 25 bp, Homo sapien
tggggtacagctcgccggtaaacag

SEQ ID NO: 3424689 - DNA, 25 bp, Homo sapien
tgtattccccaagtgtggtaaccag

SEQ ID NO: 3424690 - DNA, 25 bp, Homo sapien
ccaggattgcggtggccccaaagct

SEQ ID NO: 3424691 - DNA, 25 bp, Homo sapien
gtcaggacgcagacggccagcccag

SEQ ID NO: 3424692 - DNA, 25 bp, Homo sapien
ccccaaagctcacgggtggcaggat

SEQ ID NO: 3424693 - DNA, 25 bp, Homo sapien
tgaagcctgcacagcaaccatggga

SEQ ID NO: 3424694 - DNA, 25 bp, Homo sapien
cacagcaaccatgggagcctgtctt

SEQ ID NO: 3424695 - DNA, 25 bp, Homo sapien
gcaaccatgggagcctgtctttgct

SEQ ID NO: 3424696 - DNA, 25 bp, Homo sapien
tgggagcctgtctttgcttcacttt

SEQ ID NO: 3424697 - DNA, 25 bp, Homo sapien
gtgtggcagcgcgtgcctgcaatcg

SEQ ID NO: 3424698 - DNA, 25 bp, Homo sapien
cgtctccaccaaaaccagtcaggtg

SEQ ID NO: 3424699 - DNA, 25 bp, Homo sapien
cagtcaggtgtggcagcgcgtgcct

SEQ ID NO: 3424700 - DNA, 25 bp, Homo sapien
ccgtctccaccaaaaccagtcaggt

SEQ ID NO: 3424701 - DNA, 25 bp, Homo sapien
gagatatcaccctaaccctgcaaag

SEQ ID NO: 3424702 - DNA, 25 bp, Homo sapien
gacatcggctcaggtgctgctagca

SEQ ID NO: 3424703 - DNA, 25 bp, Homo sapien
tattccagggacaaccctttggcag

SEQ ID NO: 3424704 - DNA, 25 bp, Homo sapien
caggttccaggcagcttagatggtc

SEQ ID NO: 3424705 - DNA, 25 bp, Homo sapien
atgcctgctatggagacattttcct

SEQ ID NO: 3424706 - DNA, 25 bp, Homo sapien
gctacaaaggtaggcaagaatgcct

SEQ ID NO: 3424707 - DNA, 25 bp, Homo sapien
gctgctggagctacaaaggtaggca

SEQ ID NO: 3424708 - DNA, 25 bp, Homo sapien
ctgcaaggccactatgaggggctgc

SEQ ID NO: 3424709 - DNA, 25 bp, Homo sapien
gtggctcccaaacgccctgaatgga

SEQ ID NO: 3424710 - DNA, 25 bp, Homo sapien
accgtgacaggaggtgactggccca

SEQ ID NO: 3424711 - DNA, 25 bp, Homo sapien
gaaatctcgagaggacgctctcctg

SEQ ID NO: 3424712 - DNA, 25 bp, Homo sapien
tctcctggtgagaacgtcctgcttc

SEQ ID NO: 3424713 - DNA, 25 bp, Homo sapien
atttctcaattagagcctcctcgca

SEQ ID NO: 3424714 - DNA, 25 bp, Homo sapien
ttctcaattagagcctcctcgcagt

SEQ ID NO: 3424715 - DNA, 25 bp, Homo sapien
agcctcctcgcagtctaggccgaag

SEQ ID NO: 3424716 - DNA, 25 bp, Homo sapien
cctcgcagtctaggccgaagatctg

SEQ ID NO: 3424717 - DNA, 25 bp, Homo sapien
ggatctctgaggtaaggccaacttt

SEQ ID NO: 3424718 - DNA, 25 bp, Homo sapien
gaaggctataagctcgcctaccatt

SEQ ID NO: 3424719 - DNA, 25 bp, Homo sapien
caactttatgtgtgctggtgcagaa

SEQ ID NO: 3424720 - DNA, 25 bp, Homo sapien
tctgtccatactgaacacaaagctc

SEQ ID NO: 3424721 - DNA, 25 bp, Homo sapien
agctcttgaatggaaacaatgtctc

SEQ ID NO: 3424722 - DNA, 25 bp, Homo sapien
ggctttcgataatcttttgctcaga

SEQ ID NO: 3424723 - DNA, 25 bp, Homo sapien
tactatgcctggctttcgataatct

SEQ ID NO: 3424724 - DNA, 25 bp, Homo sapien
tctctagctcctgcatggccactgt

SEQ ID NO: 3424725 - DNA, 25 bp, Homo sapien
ggtgtaagagttcaagaggatttcc

SEQ ID NO: 3424726 - DNA, 25 bp, Homo sapien
tggtgtaagagttcaagaggatttc

SEQ ID NO: 3424727 - DNA, 25 bp, Homo sapien
gtgtaagagttcaagaggatttcct

SEQ ID NO: 3424728 - DNA, 25 bp, Homo sapien
tgtaagagttcaagaggatttcctc

SEQ ID NO: 3424729 - DNA, 25 bp, Homo sapien
gtagagatagctcgcttctgagaac

SEQ ID NO: 3424730 - DNA, 25 bp, Homo sapien
gggctacgagttgacacactccttt

SEQ ID NO: 3424731 - DNA, 25 bp, Homo sapien
aacttgacggtgagagtagctgatg

SEQ ID NO: 3424732 - DNA, 25 bp, Homo sapien
cttggagagaaacttgacggtgaga

SEQ ID NO: 3424733 - DNA, 25 bp, Homo sapien
agaccaagatactccctgtgctaag

SEQ ID NO: 3424734 - DNA, 25 bp, Homo sapien
tgctaagccgaaggaggtaaccact

SEQ ID NO: 3424735 - DNA, 25 bp, Homo sapien
gaaacatggatttgtagctcccagt

SEQ ID NO: 3424736 - DNA, 25 bp, Homo sapien
agctcccagttagtgcctctggaca

SEQ ID NO: 3424737 - DNA, 25 bp, Homo sapien
gagtgaaagcttcaatcttgtaatg

SEQ ID NO: 3424738 - DNA, 25 bp, Homo sapien
gggctagcaaaggagtgaaagcttc

SEQ ID NO: 3424739 - DNA, 25 bp, Homo sapien
cttgtaatgttccttgagttcgctg

SEQ ID NO: 3424740 - DNA, 25 bp, Homo sapien
ccttgagttcgctgccaagttcttc

SEQ ID NO: 3424741 - DNA, 25 bp, Homo sapien
tttgaccctgaggtgactaccgcgt

SEQ ID NO: 3424742 - DNA, 25 bp, Homo sapien
tccttgcaacaaccatcgggtggat

SEQ ID NO: 3424743 - DNA, 25 bp, Homo sapien
tgagcttactaaataccatgcactg

SEQ ID NO: 3424744 - DNA, 25 bp, Homo sapien
cactgactctcaggatggaagaact

SEQ ID NO: 3424745 - DNA, 25 bp, Homo sapien
gacttgttgttcagcttcccgttgc

SEQ ID NO: 3424746 - DNA, 25 bp, Homo sapien
aggaaacagagaatattccttaagc

SEQ ID NO: 3424747 - DNA, 25 bp, Homo sapien
cctcgagaatcactgacttgttgtt

SEQ ID NO: 3424748 - DNA, 25 bp, Homo sapien
actggaatttgagcacccgaggaat

SEQ ID NO: 3424749 - DNA, 25 bp, Homo sapien
caagtttcctaccagtggtgttgat

SEQ ID NO: 3424750 - DNA, 25 bp, Homo sapien
gagtttggtggcaacaagtttccta

SEQ ID NO: 3424751 - DNA, 25 bp, Homo sapien
ctcgtagagtttggtggcaacaagt

SEQ ID NO: 3424752 - DNA, 25 bp, Homo sapien
ggtggcaacaagtttcctaccagtg

SEQ ID NO: 3424753 - DNA, 25 bp, Homo sapien
tgcatcctcttcagtgggctgataa

SEQ ID NO: 3424754 - DNA, 25 bp, Homo sapien
gcatcctcttcagtgggctgataaa

SEQ ID NO: 3424755 - DNA, 25 bp, Homo sapien
tccacaggcaaccaggaccatgctt

SEQ ID NO: 3424756 - DNA, 25 bp, Homo sapien
gacatctggccggtcatggttgatg

SEQ ID NO: 3424757 - DNA, 25 bp, Homo sapien
caatcaggtcaagcagggggtcata

SEQ ID NO: 3424758 - DNA, 25 bp, Homo sapien
tgctgtcagatgtggtgtatggtcc

SEQ ID NO: 3424759 - DNA, 25 bp, Homo sapien
gcttagcatccaggaaagggccaaa

SEQ ID NO: 3424760 - DNA, 25 bp, Homo sapien
gttcatgcttagcatccaggaaagg

SEQ ID NO: 3424761 - DNA, 25 bp, Homo sapien
tcatgcttagcatccaggaaagggc

SEQ ID NO: 3424762 - DNA, 25 bp, Homo sapien
acctgttcatgcttagcatccagga

SEQ ID NO: 3424763 - DNA, 25 bp, Homo sapien
cttcaaatggacttgtcagtagaca

SEQ ID NO: 3424764 - DNA, 25 bp, Homo sapien
gtagacactgcttgaaaatgtcttc

SEQ ID NO: 3424765 - DNA, 25 bp, Homo sapien
ccttcaataattgttcgtagacact

SEQ ID NO: 3424766 - DNA, 25 bp, Homo sapien
tcaaatggacttgtcagtagacaat

SEQ ID NO: 3424767 - DNA, 25 bp, Homo sapien
aagaagcttaaggttctgtccagta

SEQ ID NO: 3424768 - DNA, 25 bp, Homo sapien
taagaagcttaaggttctgtccagt

SEQ ID NO: 3424769 - DNA, 25 bp, Homo sapien
gaagcttaaggttctgtccagtatt

SEQ ID NO: 3424770 - DNA, 25 bp, Homo sapien
cctaagaagcttaaggttctgtcca

SEQ ID NO: 3424771 - DNA, 25 bp, Homo sapien
caagggttctagctgatctcggtag

SEQ ID NO: 3424772 - DNA, 25 bp, Homo sapien
aaaccatcctgggaagattcccgtg

SEQ ID NO: 3424773 - DNA, 25 bp, Homo sapien
gagagccgatgcagccttgtcaagt

SEQ ID NO: 3424774 - DNA, 25 bp, Homo sapien
gagcaaccaaagagtgagagccgat

SEQ ID NO: 3424775 - DNA, 25 bp, Homo sapien
aaccctctgactgactgaacactgg

SEQ ID NO: 3424776 - DNA, 25 bp, Homo sapien
ctggcctggcttcgtatttagaaga

SEQ ID NO: 3424777 - DNA, 25 bp, Homo sapien
gaacactgggccataattactggac

SEQ ID NO: 3424778 - DNA, 25 bp, Homo sapien
tggacaaccgagacacagacatttc

SEQ ID NO: 3424779 - DNA, 25 bp, Homo sapien
cagaactgcactctgttatgaacag

SEQ ID NO: 3424780 - DNA, 25 bp, Homo sapien
cagagacgctgtttcccatgggaca

SEQ ID NO: 3424781 - DNA, 25 bp, Homo sapien
cagttgagttagaacagctgcgcaa

SEQ ID NO: 3424782 - DNA, 25 bp, Homo sapien
ccatgggacactgggagtaaaggac

SEQ ID NO: 3424783 - DNA, 25 bp, Homo sapien
ggtgcacatctctcaatgacgggac

SEQ ID NO: 3424784 - DNA, 25 bp, Homo sapien
agacagatcggagtagctgaaaggc

SEQ ID NO: 3424785 - DNA, 25 bp, Homo sapien
ttttgtcctctcgagacagatcgga

SEQ ID NO: 3424786 - DNA, 25 bp, Homo sapien
gggtacacaggctcatggtgcacat

SEQ ID NO: 3424787 - DNA, 25 bp, Homo sapien
tgtggatgtcaagccgaagatcact

SEQ ID NO: 3424788 - DNA, 25 bp, Homo sapien
cactccgtttatggagaggctgcag

SEQ ID NO: 3424789 - DNA, 25 bp, Homo sapien
aagccgaagatcactccgtttatgg

SEQ ID NO: 3424790 - DNA, 25 bp, Homo sapien
gcagatctgtggatgtcaagccgaa

SEQ ID NO: 3424791 - DNA, 25 bp, Homo sapien
tgtgcttgagtattcggctgaatct

SEQ ID NO: 3424792 - DNA, 25 bp, Homo sapien
gaatctgtctgaagttccggaagaa

SEQ ID NO: 3424793 - DNA, 25 bp, Homo sapien
tcggctgaatctgtctgaagttccg

SEQ ID NO: 3424794 - DNA, 25 bp, Homo sapien
tcctctgggtcaagatgtgcttgag

SEQ ID NO: 3424795 - DNA, 25 bp, Homo sapien
ctgtgcgtaaacatagaacgactca

SEQ ID NO: 3424796 - DNA, 25 bp, Homo sapien
catagaacgactcatagtcaatggc

SEQ ID NO: 3424797 - DNA, 25 bp, Homo sapien
gaacgactcatagtcaatggccatg

SEQ ID NO: 3424798 - DNA, 25 bp, Homo sapien
gtaaacatagaacgactcatagtca

SEQ ID NO: 3424799 - DNA, 25 bp, Homo sapien
tcacgaagtacctcagctctgacgg

SEQ ID NO: 3424800 - DNA, 25 bp, Homo sapien
tctgacgggatgatgaggacatctg

SEQ ID NO: 3424801 - DNA, 25 bp, Homo sapien
cttcacgaagtacctcagctctgac

SEQ ID NO: 3424802 - DNA, 25 bp, Homo sapien
gctctgacgggatgatgaggacatc

SEQ ID NO: 3424803 - DNA, 25 bp, Homo sapien
tctatgtggcctggtgaaagccctc

SEQ ID NO: 3424804 - DNA, 25 bp, Homo sapien
gcccacttggaggtcatatcagaat

SEQ ID NO: 3424805 - DNA, 25 bp, Homo sapien
aggtattcccagctgagcccacttg

SEQ ID NO: 3424806 - DNA, 25 bp, Homo sapien
taagggacctaactccaaggcaggc

SEQ ID NO: 3424807 - DNA, 25 bp, Homo sapien
aatgaggtgacttggcagaatgaca

SEQ ID NO: 3424808 - DNA, 25 bp, Homo sapien
gacaatcagctcctaaacttggaga

SEQ ID NO: 3424809 - DNA, 25 bp, Homo sapien
tatgttaacttgtcactagaaagct

SEQ ID NO: 3424810 - DNA, 25 bp, Homo sapien
aacttggagacaaacctgatctagc

SEQ ID NO: 3424811 - DNA, 25 bp, Homo sapien
ggattacaattgtcaaccactgcgc

SEQ ID NO: 3424812 - DNA, 25 bp, Homo sapien
ctgggattacaattgtcaaccactg

SEQ ID NO: 3424813 - DNA, 25 bp, Homo sapien
gggattacaattgtcaaccactgcg

SEQ ID NO: 3424814 - DNA, 25 bp, Homo sapien
gattacaattgtcaaccactgcgcc

SEQ ID NO: 3424815 - DNA, 25 bp, Homo sapien
ggcaaccaaatcaccagacacattt

SEQ ID NO: 3424816 - DNA, 25 bp, Homo sapien
aaggcaaccaaatcaccagacacat

SEQ ID NO: 3424817 - DNA, 25 bp, Homo sapien
caggtttggagagcctcaactaact

SEQ ID NO: 3424818 - DNA, 25 bp, Homo sapien
taactgggaaccaatgtgaaaaaga

SEQ ID NO: 3424819 - DNA, 25 bp, Homo sapien
tttggtaaggcgcccagggttcaca

SEQ ID NO: 3424820 - DNA, 25 bp, Homo sapien
tggtaaggcgcccagggttcacaca

SEQ ID NO: 3424821 - DNA, 25 bp, Homo sapien
ggtaaggcgcccagggttcacacag

SEQ ID NO: 3424822 - DNA, 25 bp, Homo sapien
ctgccctttggtaaggcgcccaggg

SEQ ID NO: 3424823 - DNA, 25 bp, Homo sapien
tagagtcgggcgaaggtgcctccca

SEQ ID NO: 3424824 - DNA, 25 bp, Homo sapien
tccgctgccggcctcctaaggtaga

SEQ ID NO: 3424825 - DNA, 25 bp, Homo sapien
tcctgacgacctgcacagcaatgca

SEQ ID NO: 3424826 - DNA, 25 bp, Homo sapien
cctcctaaggtagagtcgggcgaag

SEQ ID NO: 3424827 - DNA, 25 bp, Homo sapien
gctcttggctaagactttaagggcc

SEQ ID NO: 3424828 - DNA, 25 bp, Homo sapien
tacttctggacacggagcatggact

SEQ ID NO: 3424829 - DNA, 25 bp, Homo sapien
cacagctggcttacttctggacacg

SEQ ID NO: 3424830 - DNA, 25 bp, Homo sapien
caccttgtcacagggctatgtcttg

SEQ ID NO: 3424831 - DNA, 25 bp, Homo sapien
aatttctccaaaagttgtttctgtg

SEQ ID NO: 3424832 - DNA, 25 bp, Homo sapien
atttctccaaaagttgtttctgtgt

SEQ ID NO: 3424833 - DNA, 25 bp, Homo sapien
gacagatcgagactccgtctaaaaa

SEQ ID NO: 3424834 - DNA, 25 bp, Homo sapien
acagatcgagactccgtctaaaaac

SEQ ID NO: 3424835 - DNA, 25 bp, Homo sapien
tatctcggagtcaaggcatagacac

SEQ ID NO: 3424836 - DNA, 25 bp, Homo sapien
ggctcgattccatttcaccgtcaga

SEQ ID NO: 3424837 - DNA, 25 bp, Homo sapien
tactgcgcgacttggcaaagcagct

SEQ ID NO: 3424838 - DNA, 25 bp, Homo sapien
tgagagttacccactggacaggact

SEQ ID NO: 3424839 - DNA, 25 bp, Homo sapien
ccttcttggagactgtgccaggtac

SEQ ID NO: 3424840 - DNA, 25 bp, Homo sapien
tttcacacatgcacgagcgctgctg

SEQ ID NO: 3424841 - DNA, 25 bp, Homo sapien
tacagatgcacttcttggcagaggg

SEQ ID NO: 3424842 - DNA, 25 bp, Homo sapien
tgagattaggtgataggttagcccc

SEQ ID NO: 3424843 - DNA, 25 bp, Homo sapien
ttccttcctcccctggactcctgcc

SEQ ID NO: 3424844 - DNA, 25 bp, Homo sapien
ttcttgcttccttcctcccctggac

SEQ ID NO: 3424845 - DNA, 25 bp, Homo sapien
gcttccttcctcccctggactcctg

SEQ ID NO: 3424846 - DNA, 25 bp, Homo sapien
ccttcctcccctggactcctgccaa

SEQ ID NO: 3424847 - DNA, 25 bp, Homo sapien
cacagctggggaccaaccccggagc

SEQ ID NO: 3424848 - DNA, 25 bp, Homo sapien
gaccaaccccggagctctttgaaga

SEQ ID NO: 3424849 - DNA, 25 bp, Homo sapien
agctggggaccaaccccggagctct

SEQ ID NO: 3424850 - DNA, 25 bp, Homo sapien
caaccccggagctctttgaagaagt

SEQ ID NO: 3424851 - DNA, 25 bp, Homo sapien
cccgcggagccaatgccggggccgc

SEQ ID NO: 3424852 - DNA, 25 bp, Homo sapien
cgccccggcccgcggagccaatgcc

SEQ ID NO: 3424853 - DNA, 25 bp, Homo sapien
cgcggagccaatgccggggccgcgc

SEQ ID NO: 3424854 - DNA, 25 bp, Homo sapien
ccccggcccgcggagccaatgccgg

SEQ ID NO: 3424855 - DNA, 25 bp, Homo sapien
cgtgaggcgcgcagacggcagaccg

SEQ ID NO: 3424856 - DNA, 25 bp, Homo sapien
gaggcgcgcagacggcagaccggcg

SEQ ID NO: 3424857 - DNA, 25 bp, Homo sapien
cagacggcagaccggcggacagcaa

SEQ ID NO: 3424858 - DNA, 25 bp, Homo sapien
gcgcagacggcagaccggcggacag

SEQ ID NO: 3424859 - DNA, 25 bp, Homo sapien
gctgcgggaacccagatgcgggtgg

SEQ ID NO: 3424860 - DNA, 25 bp, Homo sapien
ccgcgaagctgcgaaaatcccagcc

SEQ ID NO: 3424861 - DNA, 25 bp, Homo sapien
taggagccctcgaaaggaactgagt

SEQ ID NO: 3424862 - DNA, 25 bp, Homo sapien
accgtggcgggcacgggcgaggctg

SEQ ID NO: 3424863 - DNA, 25 bp, Homo sapien
tcccgtggcggaaatccagctcagc

SEQ ID NO: 3424864 - DNA, 25 bp, Homo sapien
tgactctcccgtggcggaaatccag

SEQ ID NO: 3424865 - DNA, 25 bp, Homo sapien
gagcacctggagcttaacaggaaac

SEQ ID NO: 3424866 - DNA, 25 bp, Homo sapien
aggaaacaaaggaatgactctcccg

SEQ ID NO: 3424867 - DNA, 25 bp, Homo sapien
caggaccggacacccgggtcagtcg

SEQ ID NO: 3424868 - DNA, 25 bp, Homo sapien
aggagaagcagagtccaactgcccc

SEQ ID NO: 3424869 - DNA, 25 bp, Homo sapien
ggacacccgggtcagtcgtactgag

SEQ ID NO: 3424870 - DNA, 25 bp, Homo sapien
tcagtcgtactgagccacagaggcc

SEQ ID NO: 3424871 - DNA, 25 bp, Homo sapien
tcagtgggctgagataacaaaaatc

SEQ ID NO: 3424872 - DNA, 25 bp, Homo sapien
gcacgaacaaagttggcccaaggaa

SEQ ID NO: 3424873 - DNA, 25 bp, Homo sapien
tcttgtcaccgagggttacttgtcc

SEQ ID NO: 3424874 - DNA, 25 bp, Homo sapien
caaaggacggcaaactcttctgaag

SEQ ID NO: 3424875 - DNA, 25 bp, Homo sapien
ggctgtgaggctacgggccgcctgc

SEQ ID NO: 3424876 - DNA, 25 bp, Homo sapien
ggtgccagagctcgccaacgggctt

SEQ ID NO: 3424877 - DNA, 25 bp, Homo sapien
cacggggtggtttgcaggtgccaga

SEQ ID NO: 3424878 - DNA, 25 bp, Homo sapien
aggctacgggccgcctgctgagacc

SEQ ID NO: 3424879 - DNA, 25 bp, Homo sapien
gccgccactgccaatatgaatggtg

SEQ ID NO: 3424880 - DNA, 25 bp, Homo sapien
ccagcggtgggctgatcatgtccga

SEQ ID NO: 3424881 - DNA, 25 bp, Homo sapien
gagatgtcgccaaacatgtcactgc

SEQ ID NO: 3424882 - DNA, 25 bp, Homo sapien
cacgcttcagatagatgggcacctt

SEQ ID NO: 3424883 - DNA, 25 bp, Homo sapien
ccatgtggttatcagaggaaagcga

SEQ ID NO: 3424884 - DNA, 25 bp, Homo sapien
tgacaggacactccccgtccaggat

SEQ ID NO: 3424885 - DNA, 25 bp, Homo sapien
agaaggagaatcactggccagcgac

SEQ ID NO: 3424886 - DNA, 25 bp, Homo sapien
tgttttattgcaaccagaatccccg

SEQ ID NO: 3424887 - DNA, 25 bp, Homo sapien
aatgtcacagcaacacttggtttgc

SEQ ID NO: 3424888 - DNA, 25 bp, Homo sapien
ttattcttgggtgtcccccaccaga

SEQ ID NO: 3424889 - DNA, 25 bp, Homo sapien
agggcaaggcctgtcctccacaaag

SEQ ID NO: 3424890 - DNA, 25 bp, Homo sapien
caggtacgacgttcttgagggcaag

SEQ ID NO: 3424891 - DNA, 25 bp, Homo sapien
gatctgaccacctatctcttctgct

SEQ ID NO: 3424892 - DNA, 25 bp, Homo sapien
catccccgacctggcgtgggtgatg

SEQ ID NO: 3424893 - DNA, 25 bp, Homo sapien
tcagcgtcagcctggccagcgaaac

SEQ ID NO: 3424894 - DNA, 25 bp, Homo sapien
tgggtgatgtcgttcctcaggtcta

SEQ ID NO: 3424895 - DNA, 25 bp, Homo sapien
tggagacacagcttccgtttggaaa

SEQ ID NO: 3424896 - DNA, 25 bp, Homo sapien
ctaaacggtacatccagcctgagtg

SEQ ID NO: 3424897 - DNA, 25 bp, Homo sapien
ggccattgggacatatgttacaaca

SEQ ID NO: 3424898 - DNA, 25 bp, Homo sapien
gacatgatgctaacaatgaggtact

SEQ ID NO: 3424899 - DNA, 25 bp, Homo sapien
cagaaacgctagacttgggagtgga

SEQ ID NO: 3424900 - DNA, 25 bp, Homo sapien
tacgatacagttcataggttgcaaa

SEQ ID NO: 3424901 - DNA, 25 bp, Homo sapien
cctctgctcctgtacatagggtgta

SEQ ID NO: 3424902 - DNA, 25 bp, Homo sapien
ggaatggacatcatccagaaacgct

SEQ ID NO: 3424903 - DNA, 25 bp, Homo sapien
caggcgcaaccggagattggcatgc

SEQ ID NO: 3424904 - DNA, 25 bp, Homo sapien
taggaaatgcgtggaccccacggga

SEQ ID NO: 3424905 - DNA, 25 bp, Homo sapien
gaaagagctttacgcctgttcgcgg

SEQ ID NO: 3424906 - DNA, 25 bp, Homo sapien
gcgcactagagcgagcactgaagaa

SEQ ID NO: 3424907 - DNA, 25 bp, Homo sapien
ttcactacattctccaccacagccg

SEQ ID NO: 3424908 - DNA, 25 bp, Homo sapien
tcactacattctccaccacagccgc

SEQ ID NO: 3424909 - DNA, 25 bp, Homo sapien
ctacattctccaccacagccgccat

SEQ ID NO: 3424910 - DNA, 25 bp, Homo sapien
agcttcactacattctccaccacag

SEQ ID NO: 3424911 - DNA, 25 bp, Homo sapien
gcatctttaactcacaggaagcagt

SEQ ID NO: 3424912 - DNA, 25 bp, Homo sapien
ggacagctagacaccactcaatttt

SEQ ID NO: 3424913 - DNA, 25 bp, Homo sapien
cttctgtaggaataaatcaagtccc

SEQ ID NO: 3424914 - DNA, 25 bp, Homo sapien
aaagaagctctattcgcccaccatg

SEQ ID NO: 3424915 - DNA, 25 bp, Homo sapien
gactaggcacactataatcaagaga

SEQ ID NO: 3424916 - DNA, 25 bp, Homo sapien
ggtcctgacctcaatgtactcaatg

SEQ ID NO: 3424917 - DNA, 25 bp, Homo sapien
gccatatctccaaatgaactggaag

SEQ ID NO: 3424918 - DNA, 25 bp, Homo sapien
aaaagatgagctagtggtcctgacc

SEQ ID NO: 3424919 - DNA, 25 bp, Homo sapien
ctgcagcttctgcctactgcagctt

SEQ ID NO: 3424920 - DNA, 25 bp, Homo sapien
gaagatagaaatcaggcgtgtatgt

SEQ ID NO: 3424921 - DNA, 25 bp, Homo sapien
agatagaaatcaggcgtgtatgttg

SEQ ID NO: 3424922 - DNA, 25 bp, Homo sapien
atagaaatcaggcgtgtatgttgga

SEQ ID NO: 3424923 - DNA, 25 bp, Homo sapien
agaaatcaggcgtgtatgttggagc

SEQ ID NO: 3424924 - DNA, 25 bp, Homo sapien
taacaattgctctgggctactccgg

SEQ ID NO: 3424925 - DNA, 25 bp, Homo sapien
tccatccagatgtaacaattgctct

SEQ ID NO: 3424926 - DNA, 25 bp, Homo sapien
gcgcacgctgcgctcagcacagagg

SEQ ID NO: 3424927 - DNA, 25 bp, Homo sapien
tggaccccggtgtcgcttttccatc

SEQ ID NO: 3424928 - DNA, 25 bp, Homo sapien
gagtacagctgtccggaggccaatc

SEQ ID NO: 3424929 - DNA, 25 bp, Homo sapien
atgggaaggaaagtcgtggatcctc

SEQ ID NO: 3424930 - DNA, 25 bp, Homo sapien
gccgggcagggtaggagtacagctg

SEQ ID NO: 3424931 - DNA, 25 bp, Homo sapien
tgggaaggaaagtcgtggatcctca

SEQ ID NO: 3424932 - DNA, 25 bp, Homo sapien
cgactgttggtcacaggaaactcgc

SEQ ID NO: 3424933 - DNA, 25 bp, Homo sapien
ggggatccggggcacctcgcttctc

SEQ ID NO: 3424934 - DNA, 25 bp, Homo sapien
taaactactgccatcctgagagatc

SEQ ID NO: 3424935 - DNA, 25 bp, Homo sapien
ctttcgcgctcgactgttggtcaca

SEQ ID NO: 3424936 - DNA, 25 bp, Homo sapien
tcagtacctgacaataatcagggac

SEQ ID NO: 3424937 - DNA, 25 bp, Homo sapien
caacagagaagccagtcagtacctg

SEQ ID NO: 3424938 - DNA, 25 bp, Homo sapien
taaccttctgtgataaaagtgaatg

SEQ ID NO: 3424939 - DNA, 25 bp, Homo sapien
tcagttctagaaactaggtggcccc

SEQ ID NO: 3424940 - DNA, 25 bp, Homo sapien
caacaggcgcatgctgctatgcctg

SEQ ID NO: 3424941 - DNA, 25 bp, Homo sapien
acaacaggcgcatgctgctatgcct

SEQ ID NO: 3424942 - DNA, 25 bp, Homo sapien
aaaggcacttaacccaatgctggca

SEQ ID NO: 3424943 - DNA, 25 bp, Homo sapien
ggagaaagggcatgaaaaggcactt

SEQ ID NO: 3424944 - DNA, 25 bp, Homo sapien
ccccataaggttgtacagactaaag

SEQ ID NO: 3424945 - DNA, 25 bp, Homo sapien
cagagactaagtgtgcttcactgtg

SEQ ID NO: 3424946 - DNA, 25 bp, Homo sapien
gtagaaatatgtgcatccaaaagct

SEQ ID NO: 3424947 - DNA, 25 bp, Homo sapien
ctatgatgagactggccaaggccac

SEQ ID NO: 3424948 - DNA, 25 bp, Homo sapien
caccaacgcctttcaagcatgctat

SEQ ID NO: 3424949 - DNA, 25 bp, Homo sapien
gaacctcctctgtgacgtggtccca

SEQ ID NO: 3424950 - DNA, 25 bp, Homo sapien
gggagtatcttcttcatagtcttca

SEQ ID NO: 3424951 - DNA, 25 bp, Homo sapien
tcttcatcatcgaggtcatccagga

SEQ ID NO: 3424952 - DNA, 25 bp, Homo sapien
ttcatagtcttcatcatcgaggtca

SEQ ID NO: 3424953 - DNA, 25 bp, Homo sapien
ctttccccgacgcttgggagtatct

SEQ ID NO: 3424954 - DNA, 25 bp, Homo sapien
gcatccagcttcttacgggcactgc

SEQ ID NO: 3424955 - DNA, 25 bp, Homo sapien
catagggcttatcccggtcctccag

SEQ ID NO: 3424956 - DNA, 25 bp, Homo sapien
tgtcacaggcatagggcttatcccg

SEQ ID NO: 3424957 - DNA, 25 bp, Homo sapien
atggaagcatccagcttcttacggg

SEQ ID NO: 3424958 - DNA, 25 bp, Homo sapien
caggaaagcagagcaaacgagagag

SEQ ID NO: 3424959 - DNA, 25 bp, Homo sapien
agagagaaaccccagcggcgatggt

SEQ ID NO: 3424960 - DNA, 25 bp, Homo sapien
tgatacacttgagacaggagcagca

SEQ ID NO: 3424961 - DNA, 25 bp, Homo sapien
gccatctgttgagaggccaaccctg

SEQ ID NO: 3424962 - DNA, 25 bp, Homo sapien
gctttcgaggtatgcttttgtttga

SEQ ID NO: 3424963 - DNA, 25 bp, Homo sapien
tctggggcgctttcgaggtatgctt

SEQ ID NO: 3424964 - DNA, 25 bp, Homo sapien
tctctggggcgctttcgaggtatgc

SEQ ID NO: 3424965 - DNA, 25 bp, Homo sapien
gggcgctttcgaggtatgcttttgt

SEQ ID NO: 3424966 - DNA, 25 bp, Homo sapien
taggatacaagagtgccatgtcccc

SEQ ID NO: 3424967 - DNA, 25 bp, Homo sapien
tagcctatcaatgaagccagttggg

SEQ ID NO: 3424968 - DNA, 25 bp, Homo sapien
gaaacaagcagtggtaaaggcagcc

SEQ ID NO: 3424969 - DNA, 25 bp, Homo sapien
tatactaacagtctgggacgctcca

SEQ ID NO: 3424970 - DNA, 25 bp, Homo sapien
tgggcatagtggtaactgaggcctg

SEQ ID NO: 3424971 - DNA, 25 bp, Homo sapien
gagtgggcatagtggtaactgaggc

SEQ ID NO: 3424972 - DNA, 25 bp, Homo sapien
ctgaggcctggtcggttcttgtaac

SEQ ID NO: 3424973 - DNA, 25 bp, Homo sapien
gtaactgaggcctggtcggttcttg

SEQ ID NO: 3424974 - DNA, 25 bp, Homo sapien
caaggagtggttttcataaccaggc

SEQ ID NO: 3424975 - DNA, 25 bp, Homo sapien
cccatgcaaggagtggttttcataa

SEQ ID NO: 3424976 - DNA, 25 bp, Homo sapien
gggggtccctgagccactcaacacc

SEQ ID NO: 3424977 - DNA, 25 bp, Homo sapien
gagtggttttcataaccaggccaac

SEQ ID NO: 3424978 - DNA, 25 bp, Homo sapien
tgggcaaggccaatccatcaggacc

SEQ ID NO: 3424979 - DNA, 25 bp, Homo sapien
cagaagtcacagtagttgttgggca

SEQ ID NO: 3424980 - DNA, 25 bp, Homo sapien
ctgagcggccacagtcagaacagga

SEQ ID NO: 3424981 - DNA, 25 bp, Homo sapien
agctcctcgggttgtcccgtcttct

SEQ ID NO: 3424982 - DNA, 25 bp, Homo sapien
gcaaagcagcagccttcacgggaag

SEQ ID NO: 3424983 - DNA, 25 bp, Homo sapien
tctcttggttaggaaaagcgaggtg

SEQ ID NO: 3424984 - DNA, 25 bp, Homo sapien
aagcgaggtgggctggttatgacag

SEQ ID NO: 3424985 - DNA, 25 bp, Homo sapien
ggctacatcttctcttggttaggaa

SEQ ID NO: 3424986 - DNA, 25 bp, Homo sapien
gtcattctcggaggtgccgcagata

SEQ ID NO: 3424987 - DNA, 25 bp, Homo sapien
tcatcacgggggtaaattggaggca

SEQ ID NO: 3424988 - DNA, 25 bp, Homo sapien
gcactgccagcggtatgtcttcact

SEQ ID NO: 3424989 - DNA, 25 bp, Homo sapien
tgcaacatttgcactcgatgcactg

SEQ ID NO: 3424990 - DNA, 25 bp, Homo sapien
gacgccgtgcccagtgactatttct

SEQ ID NO: 3424991 - DNA, 25 bp, Homo sapien
taaataaccatgtcacttcccgagt

SEQ ID NO: 3424992 - DNA, 25 bp, Homo sapien
aacataaggccttggcgctggctgc

SEQ ID NO: 3424993 - DNA, 25 bp, Homo sapien
tcactttagagggaactgtgcaaac

SEQ ID NO: 3424994 - DNA, 25 bp, Homo sapien
gagacagtacatgtggtagccacga

SEQ ID NO: 3424995 - DNA, 25 bp, Homo sapien
catgtggtagccacgatcgcagtca

SEQ ID NO: 3424996 - DNA, 25 bp, Homo sapien
ccacgatcgcagtcatcacagaaga

SEQ ID NO: 3424997 - DNA, 25 bp, Homo sapien
tggacggggtgagacagtacatgtg

SEQ ID NO: 3424998 - DNA, 25 bp, Homo sapien
caaggcaaggtgctttactccctaa

SEQ ID NO: 3424999 - DNA, 25 bp, Homo sapien
atgtgcaaacactaaaccctttaag

SEQ ID NO: 3425000 - DNA, 25 bp, Homo sapien
taattgttctgagtaaaagatctgg

SEQ ID NO: 3425001 - DNA, 25 bp, Homo sapien
tactccctaatttggaagaatatgt

SEQ ID NO: 3425002 - DNA, 25 bp, Homo sapien
gagatgcaaccaattcttggtgcca

SEQ ID NO: 3425003 - DNA, 25 bp, Homo sapien
gggacttgtggagatgcaaccaatt

SEQ ID NO: 3425004 - DNA, 25 bp, Homo sapien
caatttctgtacaggaggtgtttat

SEQ ID NO: 3425005 - DNA, 25 bp, Homo sapien
gcccagctgctactcaatttctgta

SEQ ID NO: 3425006 - DNA, 25 bp, Homo sapien
tttctctttcaacaggtccagacac

SEQ ID NO: 3425007 - DNA, 25 bp, Homo sapien
tggttctggtagatggaagctttct

SEQ ID NO: 3425008 - DNA, 25 bp, Homo sapien
agttctggttctggtagatggaagc

SEQ ID NO: 3425009 - DNA, 25 bp, Homo sapien
tctctttcaacaggtccagacacag

SEQ ID NO: 3425010 - DNA, 25 bp, Homo sapien
tccaaagcgacagtgagttagggcc

SEQ ID NO: 3425011 - DNA, 25 bp, Homo sapien
gaaaagctccttgtggacgtggcct

SEQ ID NO: 3425012 - DNA, 25 bp, Homo sapien
tgaagaccttaccagctgctagcga

SEQ ID NO: 3425013 - DNA, 25 bp, Homo sapien
gcttcagtcactggagaccgaccgt

SEQ ID NO: 3425014 - DNA, 25 bp, Homo sapien
gcaggagataaaccatccagcagag

SEQ ID NO: 3425015 - DNA, 25 bp, Homo sapien
tgaaatggccttcttaatggagaaa

SEQ ID NO: 3425016 - DNA, 25 bp, Homo sapien
aatcttaggatgaaatggccttctt

SEQ ID NO: 3425017 - DNA, 25 bp, Homo sapien
aggagataaaccatccagcagaggg

SEQ ID NO: 3425018 - DNA, 25 bp, Homo sapien
accaattttatattcgctttacata

SEQ ID NO: 3425019 - DNA, 25 bp, Homo sapien
ttaaacgcagacgtcttgacccgca

SEQ ID NO: 3425020 - DNA, 25 bp, Homo sapien
tattgaacataacagtgcaggccgg

SEQ ID NO: 3425021 - DNA, 25 bp, Homo sapien
taaactcaagatctggcatcgttcc

SEQ ID NO: 3425022 - DNA, 25 bp, Homo sapien
tgtgcacatcaacgtgccctgggaa

SEQ ID NO: 3425023 - DNA, 25 bp, Homo sapien
gtctgtcggccacggaaacactgca

SEQ ID NO: 3425024 - DNA, 25 bp, Homo sapien
atggacagcgctggctcgagtctgt

SEQ ID NO: 3425025 - DNA, 25 bp, Homo sapien
tggctcgagtctgtcggccacggaa

SEQ ID NO: 3425026 - DNA, 25 bp, Homo sapien
catggacagcgctggctcgagtctg

SEQ ID NO: 3425027 - DNA, 25 bp, Homo sapien
gggcgcgcgcacagcagagtcccgt

SEQ ID NO: 3425028 - DNA, 25 bp, Homo sapien
gggcggcgacagcagaacaggggag

SEQ ID NO: 3425029 - DNA, 25 bp, Homo sapien
gcacagcagagtcccgtgcgcgccg

SEQ ID NO: 3425030 - DNA, 25 bp, Homo sapien
agggatgggcgccacgaccccgagg

SEQ ID NO: 3425031 - DNA, 25 bp, Homo sapien
tgcccccagcccggctcccgagccc

SEQ ID NO: 3425032 - DNA, 25 bp, Homo sapien
tcaggcgctggtcccgcggctccag

SEQ ID NO: 3425033 - DNA, 25 bp, Homo sapien
ccctgcccccagcccggctcccgag

SEQ ID NO: 3425034 - DNA, 25 bp, Homo sapien
ctcaggcgctggtcccgcggctcca

SEQ ID NO: 3425035 - DNA, 25 bp, Homo sapien
caacagccggtgtcggtaatgggcc

SEQ ID NO: 3425036 - DNA, 25 bp, Homo sapien
caagagcttcacgtggtagagccca

SEQ ID NO: 3425037 - DNA, 25 bp, Homo sapien
tgtttcggcgtttccagcggaccag

SEQ ID NO: 3425038 - DNA, 25 bp, Homo sapien
tgcggatcccaaagaagcatctcgg

SEQ ID NO: 3425039 - DNA, 25 bp, Homo sapien
tcataggcagcaaagccgctccacc

SEQ ID NO: 3425040 - DNA, 25 bp, Homo sapien
gaagcagtctgtccaaaaagcccaa

SEQ ID NO: 3425041 - DNA, 25 bp, Homo sapien
gacagcccgatctgccttctgaaga

SEQ ID NO: 3425042 - DNA, 25 bp, Homo sapien
tctgaagaggccgtttccatgggaa

SEQ ID NO: 3425043 - DNA, 25 bp, Homo sapien
gggtctagaaactaagcatcctgga

SEQ ID NO: 3425044 - DNA, 25 bp, Homo sapien
aagttgtgctctcattggccgggcc

SEQ ID NO: 3425045 - DNA, 25 bp, Homo sapien
tcacctcttaaggagctctgagact

SEQ ID NO: 3425046 - DNA, 25 bp, Homo sapien
gccttgatcatagcacttgcctgcg

SEQ ID NO: 3425047 - DNA, 25 bp, Homo sapien
tcctggaccctgaacaagttgtgct

SEQ ID NO: 3425048 - DNA, 25 bp, Homo sapien
tgaccgggaagcgacgcggaagcca

SEQ ID NO: 3425049 - DNA, 25 bp, Homo sapien
ctaaggacgcagctgaccgggaagc

SEQ ID NO: 3425050 - DNA, 25 bp, Homo sapien
gacgcggaagccacggcgggaggaa

SEQ ID NO: 3425051 - DNA, 25 bp, Homo sapien
tcgggctcccgctaaggacgcagct

SEQ ID NO: 3425052 - DNA, 25 bp, Homo sapien
ctcgggctcccacggaggacacgct

SEQ ID NO: 3425053 - DNA, 25 bp, Homo sapien
acggaggacacgctgcttcggtggg

SEQ ID NO: 3425054 - DNA, 25 bp, Homo sapien
cggaggacacgctgcttcggtggga

SEQ ID NO: 3425055 - DNA, 25 bp, Homo sapien
ggaagaggagatgcgggtgggaccc

SEQ ID NO: 3425056 - DNA, 25 bp, Homo sapien
aaaagaagacaagccagagctactt

SEQ ID NO: 3425057 - DNA, 25 bp, Homo sapien
gccagagctacttctccagggctgg

SEQ ID NO: 3425058 - DNA, 25 bp, Homo sapien
aagaggagatgcgggtgggacccac

SEQ ID NO: 3425059 - DNA, 25 bp, Homo sapien
cagccagagcgcgaagacatccagg

SEQ ID NO: 3425060 - DNA, 25 bp, Homo sapien
gagaccagccagagcgcgaagacat

SEQ ID NO: 3425061 - DNA, 25 bp, Homo sapien
agcgcgaagacatccagggcgatgt

SEQ ID NO: 3425062 - DNA, 25 bp, Homo sapien
agcgagggcaggttctccacagcca

SEQ ID NO: 3425063 - DNA, 25 bp, Homo sapien
cggccactggcgtcccagcttgtag

SEQ ID NO: 3425064 - DNA, 25 bp, Homo sapien
actggcgtcccagcttgtagggctg

SEQ ID NO: 3425065 - DNA, 25 bp, Homo sapien
ccactggcgtcccagcttgtagggc

SEQ ID NO: 3425066 - DNA, 25 bp, Homo sapien
agctccggccactggcgtcccagct

SEQ ID NO: 3425067 - DNA, 25 bp, Homo sapien
gaagaacacgttccttcggaactgc

SEQ ID NO: 3425068 - DNA, 25 bp, Homo sapien
aacacgttccttcggaactgcagga

SEQ ID NO: 3425069 - DNA, 25 bp, Homo sapien
agaacacgttccttcggaactgcag

SEQ ID NO: 3425070 - DNA, 25 bp, Homo sapien
acgttccttcggaactgcaggaaag

SEQ ID NO: 3425071 - DNA, 25 bp, Homo sapien
gccgggctggtagggcccaagctgc

SEQ ID NO: 3425072 - DNA, 25 bp, Homo sapien
cggccgggctggtagggcccaagct

SEQ ID NO: 3425073 - DNA, 25 bp, Homo sapien
gtagggcccaagctgcacgcggcac

SEQ ID NO: 3425074 - DNA, 25 bp, Homo sapien
gctggtagggcccaagctgcacgcg

SEQ ID NO: 3425075 - DNA, 25 bp, Homo sapien
ccataaaacggcagctcgtggcact

SEQ ID NO: 3425076 - DNA, 25 bp, Homo sapien
gatgacgtgcacgccttccagactg

SEQ ID NO: 3425077 - DNA, 25 bp, Homo sapien
tgacgtgcacgccttccagactgat

SEQ ID NO: 3425078 - DNA, 25 bp, Homo sapien
cgatgacgtgcacgccttccagact

SEQ ID NO: 3425079 - DNA, 25 bp, Homo sapien
atgacgtgcacgccttccagactga

SEQ ID NO: 3425080 - DNA, 25 bp, Homo sapien
aggtgtggtcccacgacagctcctg

SEQ ID NO: 3425081 - DNA, 25 bp, Homo sapien
tgcttggagtagatcttgaggagct

SEQ ID NO: 3425082 - DNA, 25 bp, Homo sapien
gggaggtgtggtcccacgacagctc

SEQ ID NO: 3425083 - DNA, 25 bp, Homo sapien
tggagtagatcttgaggagcttgtt

SEQ ID NO: 3425084 - DNA, 25 bp, Homo sapien
gggtccgagggcgagccagtcgcac

SEQ ID NO: 3425085 - DNA, 25 bp, Homo sapien
cagttcgatgcagtactcaatgaga

SEQ ID NO: 3425086 - DNA, 25 bp, Homo sapien
tccacgtagtcgatggtggagagat

SEQ ID NO: 3425087 - DNA, 25 bp, Homo sapien
caatgagactgctcatcagttcggc

SEQ ID NO: 3425088 - DNA, 25 bp, Homo sapien
tatatatagggtctcatcgttgtca

SEQ ID NO: 3425089 - DNA, 25 bp, Homo sapien
atatatatagggtctcatcgttgtc

SEQ ID NO: 3425090 - DNA, 25 bp, Homo sapien
atatatagggtctcatcgttgtcac

SEQ ID NO: 3425091 - DNA, 25 bp, Homo sapien
tatatagggtctcatcgttgtcacc

SEQ ID NO: 3425092 - DNA, 25 bp, Homo sapien
tgtaatgcccacaagcagaggactg

SEQ ID NO: 3425093 - DNA, 25 bp, Homo sapien
gagctgaacgctgaaaactgtaatg

SEQ ID NO: 3425094 - DNA, 25 bp, Homo sapien
tagtgagacgctgccttgacaaaga

SEQ ID NO: 3425095 - DNA, 25 bp, Homo sapien
gagcgtgctaaaaccatgccaagga

SEQ ID NO: 3425096 - DNA, 25 bp, Homo sapien
atcctaactcactgaagccgtaacc

SEQ ID NO: 3425097 - DNA, 25 bp, Homo sapien
gaagccgtaaccctctgggctcagg

SEQ ID NO: 3425098 - DNA, 25 bp, Homo sapien
tgatcctaactcactgaagccgtaa

SEQ ID NO: 3425099 - DNA, 25 bp, Homo sapien
tgtgatcctaactcactgaagccgt

SEQ ID NO: 3425100 - DNA, 25 bp, Homo sapien
tgtggtgcgcttcggcttcactcgc

SEQ ID NO: 3425101 - DNA, 25 bp, Homo sapien
aaggatgtggtgcgcttcggcttca

SEQ ID NO: 3425102 - DNA, 25 bp, Homo sapien
gatgtggtgcgcttcggcttcactc

SEQ ID NO: 3425103 - DNA, 25 bp, Homo sapien
agaaggatgtggtgcgcttcggctt

SEQ ID NO: 3425104 - DNA, 25 bp, Homo sapien
atgagactgttgcagccggcgcctg

SEQ ID NO: 3425105 - DNA, 25 bp, Homo sapien
tgcagaggagccctacaggaggccc

SEQ ID NO: 3425106 - DNA, 25 bp, Homo sapien
acccatgagactgttgcagccggcg

SEQ ID NO: 3425107 - DNA, 25 bp, Homo sapien
gcagaggagccctacaggaggccct

SEQ ID NO: 3425108 - DNA, 25 bp, Homo sapien
aagaagagagtgtcccgtgtggccc

SEQ ID NO: 3425109 - DNA, 25 bp, Homo sapien
aggaagacggagactggtcacccaa

SEQ ID NO: 3425110 - DNA, 25 bp, Homo sapien
tccaagtgtcctcgataaagaagag

SEQ ID NO: 3425111 - DNA, 25 bp, Homo sapien
atccatggcgccacctgggaaggag

SEQ ID NO: 3425112 - DNA, 25 bp, Homo sapien
ttcaaagaatgagtaaaatactgct

SEQ ID NO: 3425113 - DNA, 25 bp, Homo sapien
agaaaatgttaaggcacaatggatg

SEQ ID NO: 3425114 - DNA, 25 bp, Homo sapien
cagaaaacgtaagaagctgaaggga

SEQ ID NO: 3425115 - DNA, 25 bp, Homo sapien
caatggatgctcagaaaacgtaaga

SEQ ID NO: 3425116 - DNA, 25 bp, Homo sapien
aaactgattttaataagtcacatga

SEQ ID NO: 3425117 - DNA, 25 bp, Homo sapien
gttagaaactgattttaataagtca

SEQ ID NO: 3425118 - DNA, 25 bp, Homo sapien
gaaactgattttaataagtcacatg

SEQ ID NO: 3425119 - DNA, 25 bp, Homo sapien
tagaaactgattttaataagtcaca

SEQ ID NO: 3425120 - DNA, 25 bp, Homo sapien
atttcatatcatgagctgccccaga

SEQ ID NO: 3425121 - DNA, 25 bp, Homo sapien
tatttcatatcatgagctgccccag

SEQ ID NO: 3425122 - DNA, 25 bp, Homo sapien
tttcatatcatgagctgccccagag

SEQ ID NO: 3425123 - DNA, 25 bp, Homo sapien
ttatttcatatcatgagctgcccca

SEQ ID NO: 3425124 - DNA, 25 bp, Homo sapien
cttaccctgtgttcttgaaagttgg

SEQ ID NO: 3425125 - DNA, 25 bp, Homo sapien
ggaaaactcaggacccatcacgaag

SEQ ID NO: 3425126 - DNA, 25 bp, Homo sapien
gcagaatccgtttccaggacatgga

SEQ ID NO: 3425127 - DNA, 25 bp, Homo sapien
caggactcccactctgagagcgggt

SEQ ID NO: 3425128 - DNA, 25 bp, Homo sapien
ggtctgactgagtgccctctgtgag

SEQ ID NO: 3425129 - DNA, 25 bp, Homo sapien
tcaggcttataccaagggcaggaca

SEQ ID NO: 3425130 - DNA, 25 bp, Homo sapien
tcttgcggctattgccaatcagggt

SEQ ID NO: 3425131 - DNA, 25 bp, Homo sapien
cattctccacgggtctagttctgga

SEQ ID NO: 3425132 - DNA, 25 bp, Homo sapien
tatagacagaccagtcccaggaagt

SEQ ID NO: 3425133 - DNA, 25 bp, Homo sapien
cctgcgtctgtgaggtggtatcagc

SEQ ID NO: 3425134 - DNA, 25 bp, Homo sapien
ggtgaagacatttcgcctgcgtctg

SEQ ID NO: 3425135 - DNA, 25 bp, Homo sapien
tcttctggaagcaaacctggtgaac

SEQ ID NO: 3425136 - DNA, 25 bp, Homo sapien
gactttggaccgtgtagcgggcacc

SEQ ID NO: 3425137 - DNA, 25 bp, Homo sapien
cgaggcccgaaagaagggccggcag

SEQ ID NO: 3425138 - DNA, 25 bp, Homo sapien
cccgaaagaagggccggcaggacat

SEQ ID NO: 3425139 - DNA, 25 bp, Homo sapien
aagggccggcaggacatctggaaaa

SEQ ID NO: 3425140 - DNA, 25 bp, Homo sapien
cagccgaggcccgaaagaagggccg

SEQ ID NO: 3425141 - DNA, 25 bp, Homo sapien
caggcgggttcacagcccttggtct

SEQ ID NO: 3425142 - DNA, 25 bp, Homo sapien
gacaagttgaagattagccctcccg

SEQ ID NO: 3425143 - DNA, 25 bp, Homo sapien
tcgagctaagttcagttccacaaga

SEQ ID NO: 3425144 - DNA, 25 bp, Homo sapien
ggaccctgcggatattttccatgca

SEQ ID NO: 3425145 - DNA, 25 bp, Homo sapien
taaagcgttggtcaatgttgtcccc

SEQ ID NO: 3425146 - DNA, 25 bp, Homo sapien
gtcccaggccgagcgaaaattacat

SEQ ID NO: 3425147 - DNA, 25 bp, Homo sapien
caccggtgaggatggcgccttaact

SEQ ID NO: 3425148 - DNA, 25 bp, Homo sapien
agtccccgcctgtcaaacatgctag

SEQ ID NO: 3425149 - DNA, 25 bp, Homo sapien
agaaaagtccaaaaggagcactgcc

SEQ ID NO: 3425150 - DNA, 25 bp, Homo sapien
agagaaaagtccaaaaggagcactg

SEQ ID NO: 3425151 - DNA, 25 bp, Homo sapien
aaaagtccaaaaggagcactgccac

SEQ ID NO: 3425152 - DNA, 25 bp, Homo sapien
ctagagaaaagtccaaaaggagcac

SEQ ID NO: 3425153 - DNA, 25 bp, Homo sapien
tactgtcccgggcttaccagatgac

SEQ ID NO: 3425154 - DNA, 25 bp, Homo sapien
tcacaagaagagtttagcgccaaac

SEQ ID NO: 3425155 - DNA, 25 bp, Homo sapien
ttaccaacaataccgactccaacag

SEQ ID NO: 3425156 - DNA, 25 bp, Homo sapien
tgaatggataagttaaagggaggaa

SEQ ID NO: 3425157 - DNA, 25 bp, Homo sapien
cacggtccatgaagcatttttgtaa

SEQ ID NO: 3425158 - DNA, 25 bp, Homo sapien
ctctctgcaggcaagcaacaccgat

SEQ ID NO: 3425159 - DNA, 25 bp, Homo sapien
gcccacccaagggtgcacattcact

SEQ ID NO: 3425160 - DNA, 25 bp, Homo sapien
ctatagtaacaaaccacggtccatg

SEQ ID NO: 3425161 - DNA, 25 bp, Homo sapien
aaatggtagcctcctgaatacaggg

SEQ ID NO: 3425162 - DNA, 25 bp, Homo sapien
tccgagaaacgcacaagaaggcagg

SEQ ID NO: 3425163 - DNA, 25 bp, Homo sapien
tctgcaggcatcaattgaggcgggc

SEQ ID NO: 3425164 - DNA, 25 bp, Homo sapien
caaaactagtatgaccggaggctca

SEQ ID NO: 3425165 - DNA, 25 bp, Homo sapien
cactgcaacgcccacgggaccggtg

SEQ ID NO: 3425166 - DNA, 25 bp, Homo sapien
ctgtatctctaaccaaccctctccc

SEQ ID NO: 3425167 - DNA, 25 bp, Homo sapien
cgggaccggtgccaagctgtcccct

SEQ ID NO: 3425168 - DNA, 25 bp, Homo sapien
ctcagggtcctcttactagaatgcc

SEQ ID NO: 3425169 - DNA, 25 bp, Homo sapien
gatctgctgcgtatgcaagtctgac

SEQ ID NO: 3425170 - DNA, 25 bp, Homo sapien
aaccctctgaaacaggctgtcttgg

SEQ ID NO: 3425171 - DNA, 25 bp, Homo sapien
aagtctgacgcccatctttcaagtg

SEQ ID NO: 3425172 - DNA, 25 bp, Homo sapien
tcccctgcctgtgagatggcatcac

SEQ ID NO: 3425173 - DNA, 25 bp, Homo sapien
ttctaaccttagcaaaggtacatgg

SEQ ID NO: 3425174 - DNA, 25 bp, Homo sapien
taatatcgaccaaacacagaaaaga

SEQ ID NO: 3425175 - DNA, 25 bp, Homo sapien
cccctctagtcttggctcatttaaa

SEQ ID NO: 3425176 - DNA, 25 bp, Homo sapien
ctgattttaggtgatagtttcccct

SEQ ID NO: 3425177 - DNA, 25 bp, Homo sapien
taccaattcaatagacgcagctcag

SEQ ID NO: 3425178 - DNA, 25 bp, Homo sapien
agactacttccccatacatgcgtga

SEQ ID NO: 3425179 - DNA, 25 bp, Homo sapien
cagatcacacatgtagtaaaggcac

SEQ ID NO: 3425180 - DNA, 25 bp, Homo sapien
gacagtaattgtttgcatcatcccc

SEQ ID NO: 3425181 - DNA, 25 bp, Homo sapien
tgcttactgtagcacgcacacaggg

SEQ ID NO: 3425182 - DNA, 25 bp, Homo sapien
aataagacacagttgcaaggacggc

SEQ ID NO: 3425183 - DNA, 25 bp, Homo sapien
gggtcaccaagatataacggcacag

SEQ ID NO: 3425184 - DNA, 25 bp, Homo sapien
caaacaggcccaggtgagtagaaca

SEQ ID NO: 3425185 - DNA, 25 bp, Homo sapien
caatgtgataaagccggttctgagg

SEQ ID NO: 3425186 - DNA, 25 bp, Homo sapien
tcactgcacatggagaggttagccc

SEQ ID NO: 3425187 - DNA, 25 bp, Homo sapien
tagagatgttcagtcaccagcagac

SEQ ID NO: 3425188 - DNA, 25 bp, Homo sapien
tagtcagtcagatgcaccaagggca

SEQ ID NO: 3425189 - DNA, 25 bp, Homo sapien
taagtgctcactgccgaggcaatgc

SEQ ID NO: 3425190 - DNA, 25 bp, Homo sapien
aaagttgccaagtagtccagtcagg

SEQ ID NO: 3425191 - DNA, 25 bp, Homo sapien
gacttctagaaacccatccatggga

SEQ ID NO: 3425192 - DNA, 25 bp, Homo sapien
cgttacatgaaaggtccagcgccag

SEQ ID NO: 3425193 - DNA, 25 bp, Homo sapien
ggttgtacaacaatggcgacatact

SEQ ID NO: 3425194 - DNA, 25 bp, Homo sapien
aaaatgattcagatagtcaacttct

SEQ ID NO: 3425195 - DNA, 25 bp, Homo sapien
acttctattatatgtatttcaccac

SEQ ID NO: 3425196 - DNA, 25 bp, Homo sapien
acaacaatggcgacatacttaacac

SEQ ID NO: 3425197 - DNA, 25 bp, Homo sapien
caactagatgccgaggtagacagac

SEQ ID NO: 3425198 - DNA, 25 bp, Homo sapien
catgtggcggccctttagaagacag

SEQ ID NO: 3425199 - DNA, 25 bp, Homo sapien
taacaagacagtgtgtacgggagca

SEQ ID NO: 3425200 - DNA, 25 bp, Homo sapien
tactcgattccggtatggacaggca

SEQ ID NO: 3425201 - DNA, 25 bp, Homo sapien
tgaaccagacacacaatgcgagcct

SEQ ID NO: 3425202 - DNA, 25 bp, Homo sapien
actgcacgccccagcaattgaggaa

SEQ ID NO: 3425203 - DNA, 25 bp, Homo sapien
gcaagcgtgatcataagtgaaccag

SEQ ID NO: 3425204 - DNA, 25 bp, Homo sapien
ccattcttaaaagtaggcaagcgtg

SEQ ID NO: 3425205 - DNA, 25 bp, Homo sapien
gccaccatactcgtctgataaagtc

SEQ ID NO: 3425206 - DNA, 25 bp, Homo sapien
gggtcacgtcctgaatcctcatggt

SEQ ID NO: 3425207 - DNA, 25 bp, Homo sapien
acgtcctgaatcctcatggtggccc

SEQ ID NO: 3425208 - DNA, 25 bp, Homo sapien
cagccccagcttgcatgacttcagg

SEQ ID NO: 3425209 - DNA, 25 bp, Homo sapien
ccccaggagtgacggtgagaatgca

SEQ ID NO: 3425210 - DNA, 25 bp, Homo sapien
tagtgtcgggaataccaatgggtca

SEQ ID NO: 3425211 - DNA, 25 bp, Homo sapien
ggtcaccctgcatcaaaacacatgg

SEQ ID NO: 3425212 - DNA, 25 bp, Homo sapien
cattacacaggatatggcagatcgg

SEQ ID NO: 3425213 - DNA, 25 bp, Homo sapien
gaggaccccaaccacaacaggtgga

SEQ ID NO: 3425214 - DNA, 25 bp, Homo sapien
cgtgttagcaacagaacccttgggt

SEQ ID NO: 3425215 - DNA, 25 bp, Homo sapien
gcaacaaagctctggccttacaagg

SEQ ID NO: 3425216 - DNA, 25 bp, Homo sapien
taaccacaaaatgctggtgccggcc

SEQ ID NO: 3425217 - DNA, 25 bp, Homo sapien
tgaacacgaggcacagtcctgcatg

SEQ ID NO: 3425218 - DNA, 25 bp, Homo sapien
catgctctgggaccgagcactgagg

SEQ ID NO: 3425219 - DNA, 25 bp, Homo sapien
catgtctcctagcatggcacatgca

SEQ ID NO: 3425220 - DNA, 25 bp, Homo sapien
ccaaggagcatgaagtcagaccagc

SEQ ID NO: 3425221 - DNA, 25 bp, Homo sapien
agtctctttgacttcaggtcccctt

SEQ ID NO: 3425222 - DNA, 25 bp, Homo sapien
tagcaccctggagtggtttcccagg

SEQ ID NO: 3425223 - DNA, 25 bp, Homo sapien
gccctgacatagcaccctggagtgg

SEQ ID NO: 3425224 - DNA, 25 bp, Homo sapien
ctctgccctgacatagcaccctgga

SEQ ID NO: 3425225 - DNA, 25 bp, Homo sapien
taccacaggcctgcatatgcttgtg

SEQ ID NO: 3425226 - DNA, 25 bp, Homo sapien
cctacttccggcgtctaccacaggc

SEQ ID NO: 3425227 - DNA, 25 bp, Homo sapien
tgcttccaccagtcggacgcagcgg

SEQ ID NO: 3425228 - DNA, 25 bp, Homo sapien
tctcaccacagatcctgcttccacc

SEQ ID NO: 3425229 - DNA, 25 bp, Homo sapien
gtgctctagtcggtcctcgtcgtac

SEQ ID NO: 3425230 - DNA, 25 bp, Homo sapien
tactctagtcggtcccgcggagttg

SEQ ID NO: 3425231 - DNA, 25 bp, Homo sapien
acagagagcgggcttcctgctagac

SEQ ID NO: 3425232 - DNA, 25 bp, Homo sapien
tcctgctagacggtgggatacggta

SEQ ID NO: 3425233 - DNA, 25 bp, Homo sapien
agctcccgggcgcgcacgtaggcga

SEQ ID NO: 3425234 - DNA, 25 bp, Homo sapien
tcaagagtgtgcagctcccgggcgc

SEQ ID NO: 3425235 - DNA, 25 bp, Homo sapien
aggccggtcacttcaagagtgtgca

SEQ ID NO: 3425236 - DNA, 25 bp, Homo sapien
ggcaaccgtctccaggccggtcact

SEQ ID NO: 3425237 - DNA, 25 bp, Homo sapien
tgcggccaaccacttccagggttgt

SEQ ID NO: 3425238 - DNA, 25 bp, Homo sapien
gcggccaaccacttccagggttgtc

SEQ ID NO: 3425239 - DNA, 25 bp, Homo sapien
cgtgcagggcaaaccaagtaagtct

SEQ ID NO: 3425240 - DNA, 25 bp, Homo sapien
taagtgtcgtgaattgcccctggac

SEQ ID NO: 3425241 - DNA, 25 bp, Homo sapien
aaaaagtaacacaccgtgcagggca

SEQ ID NO: 3425242 - DNA, 25 bp, Homo sapien
taagtctaagtgtcgtgaattgccc

SEQ ID NO: 3425243 - DNA, 25 bp, Homo sapien
gatttccgctgcactcaatagacag

SEQ ID NO: 3425244 - DNA, 25 bp, Homo sapien
aacacgcggcgctatcaatccatct

SEQ ID NO: 3425245 - DNA, 25 bp, Homo sapien
caccactcagctagggcagattgct

SEQ ID NO: 3425246 - DNA, 25 bp, Homo sapien
tctttaagagaaacaacagcgcaag

SEQ ID NO: 3425247 - DNA, 25 bp, Homo sapien
ttgagggccagtaaggccaacagat

SEQ ID NO: 3425248 - DNA, 25 bp, Homo sapien
cagatcaggagatgaccactggaga

SEQ ID NO: 3425249 - DNA, 25 bp, Homo sapien
tgcatgaataggaaatttgagggcc

SEQ ID NO: 3425250 - DNA, 25 bp, Homo sapien
agatcaggagatgaccactggagag

SEQ ID NO: 3425251 - DNA, 25 bp, Homo sapien
cagtgtttcattgacagtatataga

SEQ ID NO: 3425252 - DNA, 25 bp, Homo sapien
ccagtgtttcattgacagtatatag

SEQ ID NO: 3425253 - DNA, 25 bp, Homo sapien
attgatcttacaacttgcaacattg

SEQ ID NO: 3425254 - DNA, 25 bp, Homo sapien
tcttacaacttgcaacattgctaaa

SEQ ID NO: 3425255 - DNA, 25 bp, Homo sapien
gagtttggtatatctcagctcaata

SEQ ID NO: 3425256 - DNA, 25 bp, Homo sapien
agctcaatattgagatggtaaatct

SEQ ID NO: 3425257 - DNA, 25 bp, Homo sapien
ggtaatctctcagtaatgctttgta

SEQ ID NO: 3425258 - DNA, 25 bp, Homo sapien
tcagagaacaggtcaactgcttttc

SEQ ID NO: 3425259 - DNA, 25 bp, Homo sapien
agtcttggttatataagtcacgtag

SEQ ID NO: 3425260 - DNA, 25 bp, Homo sapien
attaagtcttggttatataagtcac

SEQ ID NO: 3425261 - DNA, 25 bp, Homo sapien
ggtcctttgcattaccacaagaatt

SEQ ID NO: 3425262 - DNA, 25 bp, Homo sapien
tggttatataagtcacgtagtttaa

SEQ ID NO: 3425263 - DNA, 25 bp, Homo sapien
tattggtatagagtccactgctggc

SEQ ID NO: 3425264 - DNA, 25 bp, Homo sapien
ggtcaaggtcatttcacagggccca

SEQ ID NO: 3425265 - DNA, 25 bp, Homo sapien
aacagctgggatataagctaagccc

SEQ ID NO: 3425266 - DNA, 25 bp, Homo sapien
tcctccagggtttgaaggaacagct

SEQ ID NO: 3425267 - DNA, 25 bp, Homo sapien
tgttttgagctgtgaagtgttgtcc

SEQ ID NO: 3425268 - DNA, 25 bp, Homo sapien
ttgtccacaaatatctggctggttg

SEQ ID NO: 3425269 - DNA, 25 bp, Homo sapien
tggttgtacagggttgacttgcagt

SEQ ID NO: 3425270 - DNA, 25 bp, Homo sapien
gtttgctgaggagttaggttcacct

SEQ ID NO: 3425271 - DNA, 25 bp, Homo sapien
agaccagaggttttccagcccatcc

SEQ ID NO: 3425272 - DNA, 25 bp, Homo sapien
tagtaggtgataatgaccccttggc

SEQ ID NO: 3425273 - DNA, 25 bp, Homo sapien
gcccggctggtcattgagtttttaa

SEQ ID NO: 3425274 - DNA, 25 bp, Homo sapien
taccatcccgtgtgagacactcaag

SEQ ID NO: 3425275 - DNA, 25 bp, Homo sapien
ggttgcaatgagtggagatcacgcc

SEQ ID NO: 3425276 - DNA, 25 bp, Homo sapien
ttgcaatgagtggagatcacgccat

SEQ ID NO: 3425277 - DNA, 25 bp, Homo sapien
gttgcaatgagtggagatcacgcca

SEQ ID NO: 3425278 - DNA, 25 bp, Homo sapien
agttgactttgcagttgaagtactt

SEQ ID NO: 3425279 - DNA, 25 bp, Homo sapien
ttgactttgcagttgaagtactttt

SEQ ID NO: 3425280 - DNA, 25 bp, Homo sapien
gtagttgactttgcagttgaagtac

SEQ ID NO: 3425281 - DNA, 25 bp, Homo sapien
ttagtagttgactttgcagttgaag

SEQ ID NO: 3425282 - DNA, 25 bp, Homo sapien
gggcagggacaacatagggatgtca

SEQ ID NO: 3425283 - DNA, 25 bp, Homo sapien
aagggcagggacaacatagggatgt

SEQ ID NO: 3425284 - DNA, 25 bp, Homo sapien
ggacaaagggcagggacaacatagg

SEQ ID NO: 3425285 - DNA, 25 bp, Homo sapien
caaagggcagggacaacatagggat

SEQ ID NO: 3425286 - DNA, 25 bp, Homo sapien
gcttccggaggcattgtctggctgc

SEQ ID NO: 3425287 - DNA, 25 bp, Homo sapien
aggccctggcttccggaggcattgt

SEQ ID NO: 3425288 - DNA, 25 bp, Homo sapien
ctggcttccggaggcattgtctggc

SEQ ID NO: 3425289 - DNA, 25 bp, Homo sapien
tccggaggcattgtctggctgctct

SEQ ID NO: 3425290 - DNA, 25 bp, Homo sapien
taaaatggcgctgcgcttaagaggg

SEQ ID NO: 3425291 - DNA, 25 bp, Homo sapien
ttcaggcgagctgaggcttcccggc

SEQ ID NO: 3425292 - DNA, 25 bp, Homo sapien
gtcctttacagaagtctcgggctgc

SEQ ID NO: 3425293 - DNA, 25 bp, Homo sapien
cgccgggcttctgcgttgctaaaat

SEQ ID NO: 3425294 - DNA, 25 bp, Homo sapien
agtgtttacactgctctgggtctgc

SEQ ID NO: 3425295 - DNA, 25 bp, Homo sapien
gaatggccagcctataaggacagct

SEQ ID NO: 3425296 - DNA, 25 bp, Homo sapien
taagatagcagcacaactcgtcgct

SEQ ID NO: 3425297 - DNA, 25 bp, Homo sapien
taagcgaatggctttgtctccgaag

SEQ ID NO: 3425298 - DNA, 25 bp, Homo sapien
tgttcgagaaatcggagcagcacgg

SEQ ID NO: 3425299 - DNA, 25 bp, Homo sapien
gcagtcctgcgacttgctcccaaga

SEQ ID NO: 3425300 - DNA, 25 bp, Homo sapien
tactttccattacgcaactgagccc

SEQ ID NO: 3425301 - DNA, 25 bp, Homo sapien
ttgagaagtggcaaaatggcggact

SEQ ID NO: 3425302 - DNA, 25 bp, Homo sapien
gtgttctcttgagggacagtaggta

SEQ ID NO: 3425303 - DNA, 25 bp, Homo sapien
gagggacagtaggtatagtttacca

SEQ ID NO: 3425304 - DNA, 25 bp, Homo sapien
tcttgagggacagtaggtatagttt

SEQ ID NO: 3425305 - DNA, 25 bp, Homo sapien
tctcttgagggacagtaggtatagt

SEQ ID NO: 3425306 - DNA, 25 bp, Homo sapien
gaagcttcatctcaacctccgtcat

SEQ ID NO: 3425307 - DNA, 25 bp, Homo sapien
ttatctgcggtttcctcaagctccg

SEQ ID NO: 3425308 - DNA, 25 bp, Homo sapien
tatttatagacggagaacaactcgc

SEQ ID NO: 3425309 - DNA, 25 bp, Homo sapien
cagctcgggcgaggcgtatttatag

SEQ ID NO: 3425310 - DNA, 25 bp, Homo sapien
tagtaaatgcgttaactaggcttta

SEQ ID NO: 3425311 - DNA, 25 bp, Homo sapien
tgtttcatcctaccactcccaatta

SEQ ID NO: 3425312 - DNA, 25 bp, Homo sapien
taggctttaaatgacgcaattctcc

SEQ ID NO: 3425313 - DNA, 25 bp, Homo sapien
tccattttcgtctgcgtttagtaaa

SEQ ID NO: 3425314 - DNA, 25 bp, Homo sapien
tctgcttcctacttttcaggtttaa

SEQ ID NO: 3425315 - DNA, 25 bp, Homo sapien
tctaatttccctatcttctctattc

SEQ ID NO: 3425316 - DNA, 25 bp, Homo sapien
ttatcttctaatttccctatcttct

SEQ ID NO: 3425317 - DNA, 25 bp, Homo sapien
cttctaatttccctatcttctctat

SEQ ID NO: 3425318 - DNA, 25 bp, Homo sapien
ccttagctttttgtttcctagcttg

SEQ ID NO: 3425319 - DNA, 25 bp, Homo sapien
tgcccttagctttttgtttcctagc

SEQ ID NO: 3425320 - DNA, 25 bp, Homo sapien
ttagctttttgtttcctagcttgtc

SEQ ID NO: 3425321 - DNA, 25 bp, Homo sapien
cttagctttttgtttcctagcttgt

SEQ ID NO: 3425322 - DNA, 25 bp, Homo sapien
tgggtcagctgtcaattaatgctag

SEQ ID NO: 3425323 - DNA, 25 bp, Homo sapien
aattacaccagtccttttagtagct

SEQ ID NO: 3425324 - DNA, 25 bp, Homo sapien
gttctggtctacgtaaacaccctca

SEQ ID NO: 3425325 - DNA, 25 bp, Homo sapien
cttccgttacgaaagtccttcacat

SEQ ID NO: 3425326 - DNA, 25 bp, Homo sapien
atcaaacactggttcctggaatcct

SEQ ID NO: 3425327 - DNA, 25 bp, Homo sapien
ttcaccacgaactgctgcttgctcg

SEQ ID NO: 3425328 - DNA, 25 bp, Homo sapien
cttcaccacgaactgctgcttgctc

SEQ ID NO: 3425329 - DNA, 25 bp, Homo sapien
cagtcctagcttcatcaaacactgg

SEQ ID NO: 3425330 - DNA, 25 bp, Homo sapien
ggcatgctggtctaggatcctctac

SEQ ID NO: 3425331 - DNA, 25 bp, Homo sapien
tcctccgtgtggttgccaagccaag

SEQ ID NO: 3425332 - DNA, 25 bp, Homo sapien
aaacaacatattgccgacctcacgg

SEQ ID NO: 3425333 - DNA, 25 bp, Homo sapien
gaaatcggcctacgtccccatataa

SEQ ID NO: 3425334 - DNA, 25 bp, Homo sapien
agacaagattcatgagtataagcct

SEQ ID NO: 3425335 - DNA, 25 bp, Homo sapien
cagacaagattcatgagtataagcc

SEQ ID NO: 3425336 - DNA, 25 bp, Homo sapien
tcagacaagattcatgagtataagc

SEQ ID NO: 3425337 - DNA, 25 bp, Homo sapien
caaactgcttacagatttgctgaaa

SEQ ID NO: 3425338 - DNA, 25 bp, Homo sapien
catttacaaaacgaattcagggtga

SEQ ID NO: 3425339 - DNA, 25 bp, Homo sapien
ttgcctttaggattctagacagacc

SEQ ID NO: 3425340 - DNA, 25 bp, Homo sapien
taaaaacaggtcatctattcacaaa

SEQ ID NO: 3425341 - DNA, 25 bp, Homo sapien
gaactgctctagtttctataaactg

SEQ ID NO: 3425342 - DNA, 25 bp, Homo sapien
tccacagacctcaacgtgagaactg

SEQ ID NO: 3425343 - DNA, 25 bp, Homo sapien
tgttttctgttacaccttgagtcat

SEQ ID NO: 3425344 - DNA, 25 bp, Homo sapien
taaacctgtggtggtctgattatcc

SEQ ID NO: 3425345 - DNA, 25 bp, Homo sapien
caatagtactatagcatctgtggaa

SEQ ID NO: 3425346 - DNA, 25 bp, Homo sapien
tgtagttaatgtcagcccagtaggc

SEQ ID NO: 3425347 - DNA, 25 bp, Homo sapien
tgttcgtgccaacagcacagcggta

SEQ ID NO: 3425348 - DNA, 25 bp, Homo sapien
tccagtccctgaaggtgttcgtgcc

SEQ ID NO: 3425349 - DNA, 25 bp, Homo sapien
tggaaaagtatttctcctacactaa

SEQ ID NO: 3425350 - DNA, 25 bp, Homo sapien
aaaaacttgcttacacacaactgaa

SEQ ID NO: 3425351 - DNA, 25 bp, Homo sapien
ttttgaagcataccttaacatcttg

SEQ ID NO: 3425352 - DNA, 25 bp, Homo sapien
cctctaagagacattcaagctgaac

SEQ ID NO: 3425353 - DNA, 25 bp, Homo sapien
ggttatgcttattccccaatggagg

SEQ ID NO: 3425354 - DNA, 25 bp, Homo sapien
gcatctaggccatcatactgccagg

SEQ ID NO: 3425355 - DNA, 25 bp, Homo sapien
tacttatcaattcaccaaggagctg

SEQ ID NO: 3425356 - DNA, 25 bp, Homo sapien
tgccaggctggttatgactcagaag

SEQ ID NO: 3425357 - DNA, 25 bp, Homo sapien
tgtctgaggcaaacgaaacattggc

SEQ ID NO: 3425358 - DNA, 25 bp, Homo sapien
tccttagttggcatcaaggcactga

SEQ ID NO: 3425359 - DNA, 25 bp, Homo sapien
ttatccctaacatgcaatactgcag

SEQ ID NO: 3425360 - DNA, 25 bp, Homo sapien
taacgaagagatacctgtctgaggc

SEQ ID NO: 3425361 - DNA, 25 bp, Homo sapien
tttaaataaggagacagctttctaa

SEQ ID NO: 3425362 - DNA, 25 bp, Homo sapien
aaataaggagacagctttctaaaag

SEQ ID NO: 3425363 - DNA, 25 bp, Homo sapien
ttatttaaataaggagacagctttc

SEQ ID NO: 3425364 - DNA, 25 bp, Homo sapien
taaataaggagacagctttctaaaa

SEQ ID NO: 3425365 - DNA, 25 bp, Homo sapien
tgaaagattagagaagaatcccccc

SEQ ID NO: 3425366 - DNA, 25 bp, Homo sapien
taaagttacattcgttcttccgctc

SEQ ID NO: 3425367 - DNA, 25 bp, Homo sapien
aagagtgttcgcagacaaagtttct

SEQ ID NO: 3425368 - DNA, 25 bp, Homo sapien
cctgatctggtccattaaagagtgt

SEQ ID NO: 3425369 - DNA, 25 bp, Homo sapien
tcactgtcaatttatagacccctga

SEQ ID NO: 3425370 - DNA, 25 bp, Homo sapien
ccatgtgcctggaattattatatgc

SEQ ID NO: 3425371 - DNA, 25 bp, Homo sapien
tagagggcctctattgccatgtgcc

SEQ ID NO: 3425372 - DNA, 25 bp, Homo sapien
taaaacattgcctaccactctaaga

SEQ ID NO: 3425373 - DNA, 25 bp, Homo sapien
gaagagccaagcactcatatgcaat

SEQ ID NO: 3425374 - DNA, 25 bp, Homo sapien
gcaattcaaaatcctgaatggcttc

SEQ ID NO: 3425375 - DNA, 25 bp, Homo sapien
gagccaagcactcatatgcaattca

SEQ ID NO: 3425376 - DNA, 25 bp, Homo sapien
agaaggaagagccaagcactcatat

SEQ ID NO: 3425377 - DNA, 25 bp, Homo sapien
tcactgcaaggtctcatacactcac

SEQ ID NO: 3425378 - DNA, 25 bp, Homo sapien
ctcactgcaaggtctcatacactca

SEQ ID NO: 3425379 - DNA, 25 bp, Homo sapien
ctgaagtcaagacaactgcattctc

SEQ ID NO: 3425380 - DNA, 25 bp, Homo sapien
aagtcaagacaactgcattctctgt

SEQ ID NO: 3425381 - DNA, 25 bp, Homo sapien
caagacaactgcattctctgtgaag

SEQ ID NO: 3425382 - DNA, 25 bp, Homo sapien
tcaagacaactgcattctctgtgaa

SEQ ID NO: 3425383 - DNA, 25 bp, Homo sapien
agaacagtactgcatttacttgcca

SEQ ID NO: 3425384 - DNA, 25 bp, Homo sapien
caacttttaatcatactccagtcgt

SEQ ID NO: 3425385 - DNA, 25 bp, Homo sapien
gcattctaatagcagcgggatcaga

SEQ ID NO: 3425386 - DNA, 25 bp, Homo sapien
tactccagtcgtttcacaatgcatt

SEQ ID NO: 3425387 - DNA, 25 bp, Homo sapien
cagcaaaatgtactcagcttcaatc

SEQ ID NO: 3425388 - DNA, 25 bp, Homo sapien
tcagcctttatcactcagctggatt

SEQ ID NO: 3425389 - DNA, 25 bp, Homo sapien
gcttcaatcacaaatacgactgctt

SEQ ID NO: 3425390 - DNA, 25 bp, Homo sapien
cctcccaccaccagaaatgaacaaa

SEQ ID NO: 3425391 - DNA, 25 bp, Homo sapien
gctgagtgttcctgcatgtaagaat

SEQ ID NO: 3425392 - DNA, 25 bp, Homo sapien
tgaaagaactagtggttcccaatcc

SEQ ID NO: 3425393 - DNA, 25 bp, Homo sapien
tccactggtgaattcaactggaagc

SEQ ID NO: 3425394 - DNA, 25 bp, Homo sapien
tctctggcccttcgcatacgtgtgt

SEQ ID NO: 3425395 - DNA, 25 bp, Homo sapien
ggataatagcgctttgttgtctctc

SEQ ID NO: 3425396 - DNA, 25 bp, Homo sapien
tgctcacatgccagttactccagca

SEQ ID NO: 3425397 - DNA, 25 bp, Homo sapien
ggaaggctccatggttgtcctactt

SEQ ID NO: 3425398 - DNA, 25 bp, Homo sapien
tgtcctactttaagccttcggtgcc

SEQ ID NO: 3425399 - DNA, 25 bp, Homo sapien
taaaaatcaggtgaggctgacactt

SEQ ID NO: 3425400 - DNA, 25 bp, Homo sapien
tcaagcaccgcttgagatttgggct

SEQ ID NO: 3425401 - DNA, 25 bp, Homo sapien
ggtacttcaagcattccttcggatg

SEQ ID NO: 3425402 - DNA, 25 bp, Homo sapien
gcttaaatgttaagagaagcccagg

SEQ ID NO: 3425403 - DNA, 25 bp, Homo sapien
tgctagatcaaaaggcacggggtgg

SEQ ID NO: 3425404 - DNA, 25 bp, Homo sapien
tgtgctagatcaaaaggcacggggt

SEQ ID NO: 3425405 - DNA, 25 bp, Homo sapien
gctagatcaaaaggcacggggtggc

SEQ ID NO: 3425406 - DNA, 25 bp, Homo sapien
ctagatcaaaaggcacggggtggcg

SEQ ID NO: 3425407 - DNA, 25 bp, Homo sapien
cttgaaaccgattatggatcatgcc

SEQ ID NO: 3425408 - DNA, 25 bp, Homo sapien
aagctactggctgcatcgaggtgag

SEQ ID NO: 3425409 - DNA, 25 bp, Homo sapien
cgattatggatcatgcccacaagga

SEQ ID NO: 3425410 - DNA, 25 bp, Homo sapien
tgcccacaaggatccaagctactgg

SEQ ID NO: 3425411 - DNA, 25 bp, Homo sapien
tggagatcagcttccgctaagatgc

SEQ ID NO: 3425412 - DNA, 25 bp, Homo sapien
ttagtagtcaaagcaaagacgccgc

SEQ ID NO: 3425413 - DNA, 25 bp, Homo sapien
ggccaagtctgttatgttcacctga

SEQ ID NO: 3425414 - DNA, 25 bp, Homo sapien
tgaccctactgaagagcattggaga

SEQ ID NO: 3425415 - DNA, 25 bp, Homo sapien
tccccaaaactccaagaactagcac

SEQ ID NO: 3425416 - DNA, 25 bp, Homo sapien
ctccccaaaactccaagaactagca

SEQ ID NO: 3425417 - DNA, 25 bp, Homo sapien
tcaaggatgtatatagttcaaagat

SEQ ID NO: 3425418 - DNA, 25 bp, Homo sapien
tgtatatagttcaaagatattgtgc

SEQ ID NO: 3425419 - DNA, 25 bp, Homo sapien
caaggatgtatatagttcaaagata

SEQ ID NO: 3425420 - DNA, 25 bp, Homo sapien
tagttcaaagatattgtgctgttac

SEQ ID NO: 3425421 - DNA, 25 bp, Homo sapien
aaaaagacaaggcagttatattagg

SEQ ID NO: 3425422 - DNA, 25 bp, Homo sapien
taggttctcgtgtaaatatgaatat

SEQ ID NO: 3425423 - DNA, 25 bp, Homo sapien
atatacaatcaagtcaagctcctga

SEQ ID NO: 3425424 - DNA, 25 bp, Homo sapien
aagtcaagctcctgacaaattatac

SEQ ID NO: 3425425 - DNA, 25 bp, Homo sapien
gttaagttttcagcagtagggcttc

SEQ ID NO: 3425426 - DNA, 25 bp, Homo sapien
taagttttcagcagtagggcttctc

SEQ ID NO: 3425427 - DNA, 25 bp, Homo sapien
ttttcagcagtagggcttctcaaaa

SEQ ID NO: 3425428 - DNA, 25 bp, Homo sapien
agttttcagcagtagggcttctcaa

SEQ ID NO: 3425429 - DNA, 25 bp, Homo sapien
cccaatcaagatttttttattcaca

SEQ ID NO: 3425430 - DNA, 25 bp, Homo sapien
ttttattcacaaaagaaccacaaca

SEQ ID NO: 3425431 - DNA, 25 bp, Homo sapien
caatcaagatttttttattcacaaa

SEQ ID NO: 3425432 - DNA, 25 bp, Homo sapien
tttattcacaaaagaaccacaacaa

SEQ ID NO: 3425433 - DNA, 25 bp, Homo sapien
cctgccactgaactgcggcctgagc

SEQ ID NO: 3425434 - DNA, 25 bp, Homo sapien
atcctgccactgaactgcggcctga

SEQ ID NO: 3425435 - DNA, 25 bp, Homo sapien
cctgagcaacagcgacaaagtgaga

SEQ ID NO: 3425436 - DNA, 25 bp, Homo sapien
tcctgccactgaactgcggcctgag

SEQ ID NO: 3425437 - DNA, 25 bp, Homo sapien
agcaggacgtgaattggggcggggt

SEQ ID NO: 3425438 - DNA, 25 bp, Homo sapien
gtcggggcggagcaggacgtgaatt

SEQ ID NO: 3425439 - DNA, 25 bp, Homo sapien
tcgggcgccttagctccgggtcctc

SEQ ID NO: 3425440 - DNA, 25 bp, Homo sapien
gcggggcctgcgtcagacgggggcg

SEQ ID NO: 3425441 - DNA, 25 bp, Homo sapien
gatgagctcgaacggaaagtcccgg

SEQ ID NO: 3425442 - DNA, 25 bp, Homo sapien
gctccgggatgagctcgaacggaaa

SEQ ID NO: 3425443 - DNA, 25 bp, Homo sapien
cgggatgagctcgaacggaaagtcc

SEQ ID NO: 3425444 - DNA, 25 bp, Homo sapien
tgagctcgaacggaaagtcccggac

SEQ ID NO: 3425445 - DNA, 25 bp, Homo sapien
cgtgaccccggccctgtccgcctgt

SEQ ID NO: 3425446 - DNA, 25 bp, Homo sapien
cccagagctgttgtgtggccggaag

SEQ ID NO: 3425447 - DNA, 25 bp, Homo sapien
aagacaagggcccgcagccaggtct

SEQ ID NO: 3425448 - DNA, 25 bp, Homo sapien
gggacacttcgccgggcccacgtga

SEQ ID NO: 3425449 - DNA, 25 bp, Homo sapien
gtagagttttgaagcgcttgaaggc

SEQ ID NO: 3425450 - DNA, 25 bp, Homo sapien
gaagcgcttgaaggcagctttggcc

SEQ ID NO: 3425451 - DNA, 25 bp, Homo sapien
ctccagtccatcgatgtaagccagg

SEQ ID NO: 3425452 - DNA, 25 bp, Homo sapien
ccaggcttcacatcatagacgaaga

SEQ ID NO: 3425453 - DNA, 25 bp, Homo sapien
ctgtcacgacgtggaggcatttttc

SEQ ID NO: 3425454 - DNA, 25 bp, Homo sapien
actctcgccttgaggtatattccca

SEQ ID NO: 3425455 - DNA, 25 bp, Homo sapien
cgccttgaggtatattcccaacggg

SEQ ID NO: 3425456 - DNA, 25 bp, Homo sapien
cctctgtcacgacgtggaggcattt

SEQ ID NO: 3425457 - DNA, 25 bp, Homo sapien
caccgttgccctgggccgaatacat

SEQ ID NO: 3425458 - DNA, 25 bp, Homo sapien
tgaggctgcagtcgttgaccaggaa

SEQ ID NO: 3425459 - DNA, 25 bp, Homo sapien
gccgaatacatgtagtccaggcccc

SEQ ID NO: 3425460 - DNA, 25 bp, Homo sapien
aacacggcggccatgcagacattgt

SEQ ID NO: 3425461 - DNA, 25 bp, Homo sapien
ggaacaggggagtgccaactagtct

SEQ ID NO: 3425462 - DNA, 25 bp, Homo sapien
gggagtgccaactagtctaggagtc

SEQ ID NO: 3425463 - DNA, 25 bp, Homo sapien
caactagtctaggagtcctgaggct

SEQ ID NO: 3425464 - DNA, 25 bp, Homo sapien
tgccaactagtctaggagtcctgag

SEQ ID NO: 3425465 - DNA, 25 bp, Homo sapien
ctgctgcccgaggtaggggcccatt

SEQ ID NO: 3425466 - DNA, 25 bp, Homo sapien
cttcccagggttgcgtagggctgct

SEQ ID NO: 3425467 - DNA, 25 bp, Homo sapien
atgaggcagcccaagcgccacatgt

SEQ ID NO: 3425468 - DNA, 25 bp, Homo sapien
ccaaatgaggcagcccaagcgccac

SEQ ID NO: 3425469 - DNA, 25 bp, Homo sapien
tgaagccaccaggtgcccggcagtt

SEQ ID NO: 3425470 - DNA, 25 bp, Homo sapien
cagtaatggggcaccagcgttttgg

SEQ ID NO: 3425471 - DNA, 25 bp, Homo sapien
accttggggtttgctcccaccagct

SEQ ID NO: 3425472 - DNA, 25 bp, Homo sapien
caggaagaggttggtttctacaaag

SEQ ID NO: 3425473 - DNA, 25 bp, Homo sapien
gtgatctaggtccgcctcaccttcc

SEQ ID NO: 3425474 - DNA, 25 bp, Homo sapien
tctccatgtcgtcagctggtatcga

SEQ ID NO: 3425475 - DNA, 25 bp, Homo sapien
atctaggtccgcctcaccttcctcc

SEQ ID NO: 3425476 - DNA, 25 bp, Homo sapien
aggttggggatctggtctgtttact

SEQ ID NO: 3425477 - DNA, 25 bp, Homo sapien
cgccccacagcatctgagtcaagat

SEQ ID NO: 3425478 - DNA, 25 bp, Homo sapien
cattgcatagagcagagccttcctc

SEQ ID NO: 3425479 - DNA, 25 bp, Homo sapien
tccatgacctctgctgggtcagggt

SEQ ID NO: 3425480 - DNA, 25 bp, Homo sapien
tgattctgattctcagcccccgctg

SEQ ID NO: 3425481 - DNA, 25 bp, Homo sapien
aatttttgcttctcggctggctctt

SEQ ID NO: 3425482 - DNA, 25 bp, Homo sapien
gaatttttgcttctcggctggctct

SEQ ID NO: 3425483 - DNA, 25 bp, Homo sapien
atttttgcttctcggctggctcttt

SEQ ID NO: 3425484 - DNA, 25 bp, Homo sapien
ggcagcaccttgtgccgacagaaat

SEQ ID NO: 3425485 - DNA, 25 bp, Homo sapien
gaggggcgtgaggacaacggcccca

SEQ ID NO: 3425486 - DNA, 25 bp, Homo sapien
ggacaacggccccagcattgccgaa

SEQ ID NO: 3425487 - DNA, 25 bp, Homo sapien
gcgtgaggacaacggccccagcatt

SEQ ID NO: 3425488 - DNA, 25 bp, Homo sapien
tgaagaggggcgtgaggacaacggc

SEQ ID NO: 3425489 - DNA, 25 bp, Homo sapien
tctgctgatactcctcagcgctcag

SEQ ID NO: 3425490 - DNA, 25 bp, Homo sapien
ctgctgatactcctcagcgctcagg

SEQ ID NO: 3425491 - DNA, 25 bp, Homo sapien
tgctgatactcctcagcgctcagga

SEQ ID NO: 3425492 - DNA, 25 bp, Homo sapien
ttctgctgatactcctcagcgctca

SEQ ID NO: 3425493 - DNA, 25 bp, Homo sapien
gcgcatggcccggtcagtggatgag

SEQ ID NO: 3425494 - DNA, 25 bp, Homo sapien
ctgcaggaggcggatgcgcatggcc

SEQ ID NO: 3425495 - DNA, 25 bp, Homo sapien
gcggatgcgcatggcccggtcagtg

SEQ ID NO: 3425496 - DNA, 25 bp, Homo sapien
atggcccggtcagtggatgagaaca

SEQ ID NO: 3425497 - DNA, 25 bp, Homo sapien
tgggtgttgactgttggctcgtcaa

SEQ ID NO: 3425498 - DNA, 25 bp, Homo sapien
tggctcgtcaaggtactggatgaac

SEQ ID NO: 3425499 - DNA, 25 bp, Homo sapien
tgactgttggctcgtcaaggtactg

SEQ ID NO: 3425500 - DNA, 25 bp, Homo sapien
cgtcaaggtactggatgaactgctc

SEQ ID NO: 3425501 - DNA, 25 bp, Homo sapien
gttgtattgtctggcaagcccaccc

SEQ ID NO: 3425502 - DNA, 25 bp, Homo sapien
ccaggaacaggcagatgctcgttgt

SEQ ID NO: 3425503 - DNA, 25 bp, Homo sapien
agatgctcgttgtctgctgaatgga

SEQ ID NO: 3425504 - DNA, 25 bp, Homo sapien
tgccgagctgcacccacggcctgaa

SEQ ID NO: 3425505 - DNA, 25 bp, Homo sapien
gtggcgggcaaagggccttgtgcag

SEQ ID NO: 3425506 - DNA, 25 bp, Homo sapien
ggctgtggcgggcaaagggccttgt

SEQ ID NO: 3425507 - DNA, 25 bp, Homo sapien
ctgtggcgggcaaagggccttgtgc

SEQ ID NO: 3425508 - DNA, 25 bp, Homo sapien
gtgggctgtggcgggcaaagggcct

SEQ ID NO: 3425509 - DNA, 25 bp, Homo sapien
gctagcactgaggtaggagccgatt

SEQ ID NO: 3425510 - DNA, 25 bp, Homo sapien
tggcctgtagccgtgcaaagtgctt

SEQ ID NO: 3425511 - DNA, 25 bp, Homo sapien
gaggttggcctcgttcagctttggg

SEQ ID NO: 3425512 - DNA, 25 bp, Homo sapien
actgaggtaggagccgattttgccc

SEQ ID NO: 3425513 - DNA, 25 bp, Homo sapien
aacagcgtgcagggtctaagtctct

SEQ ID NO: 3425514 - DNA, 25 bp, Homo sapien
caagcacgcctggattcagatccca

SEQ ID NO: 3425515 - DNA, 25 bp, Homo sapien
gctccagcagttgtgcaggacactc

SEQ ID NO: 3425516 - DNA, 25 bp, Homo sapien
tcctgcgacagggaccgggctccag

SEQ ID NO: 3425517 - DNA, 25 bp, Homo sapien
cccataggtccccagaatctgaaaa

SEQ ID NO: 3425518 - DNA, 25 bp, Homo sapien
cattcctgttaactgtctgggcacg

SEQ ID NO: 3425519 - DNA, 25 bp, Homo sapien
tgggttccacactgcctcagggcat

SEQ ID NO: 3425520 - DNA, 25 bp, Homo sapien
tgggcacggcaagcaactgaactta

SEQ ID NO: 3425521 - DNA, 25 bp, Homo sapien
gtccctagtggctcggctgaaggca

SEQ ID NO: 3425522 - DNA, 25 bp, Homo sapien
ggatctacagtgagaccgcagagca

SEQ ID NO: 3425523 - DNA, 25 bp, Homo sapien
tggtctcgcacggatttctcaggat

SEQ ID NO: 3425524 - DNA, 25 bp, Homo sapien
cacaggcaggatcttctgggcacag

SEQ ID NO: 3425525 - DNA, 25 bp, Homo sapien
gggtcctccgacacagactccaatt

SEQ ID NO: 3425526 - DNA, 25 bp, Homo sapien
tccaatttggacaggaagctccgaa

SEQ ID NO: 3425527 - DNA, 25 bp, Homo sapien
cagctgggtcgggtcctccgacaca

SEQ ID NO: 3425528 - DNA, 25 bp, Homo sapien
agactccaatttggacaggaagctc

SEQ ID NO: 3425529 - DNA, 25 bp, Homo sapien
gagggaacacgagtgtaagccactc

SEQ ID NO: 3425530 - DNA, 25 bp, Homo sapien
gaaagagggaacacgagtgtaagcc

SEQ ID NO: 3425531 - DNA, 25 bp, Homo sapien
ggaaagagggaacacgagtgtaagc

SEQ ID NO: 3425532 - DNA, 25 bp, Homo sapien
aagagggaacacgagtgtaagccac

SEQ ID NO: 3425533 - DNA, 25 bp, Homo sapien
gccctgcagccacccctcctttctc

SEQ ID NO: 3425534 - DNA, 25 bp, Homo sapien
cagtgccctgcagccacccctcctt

SEQ ID NO: 3425535 - DNA, 25 bp, Homo sapien
cctgcagccacccctcctttctcca

SEQ ID NO: 3425536 - DNA, 25 bp, Homo sapien
tgacagtgccctgcagccacccctc

SEQ ID NO: 3425537 - DNA, 25 bp, Homo sapien
tgcgaacggatcagcttggaggtga

SEQ ID NO: 3425538 - DNA, 25 bp, Homo sapien
gtgaggagaccccggtcacggccca

SEQ ID NO: 3425539 - DNA, 25 bp, Homo sapien
gcagtggttgggtgcgaacggatca

SEQ ID NO: 3425540 - DNA, 25 bp, Homo sapien
gcctgcccagctagctgcggctcct

SEQ ID NO: 3425541 - DNA, 25 bp, Homo sapien
catccccgggggagtcagacagtaa

SEQ ID NO: 3425542 - DNA, 25 bp, Homo sapien
agggtgactggagcctacccagctc

SEQ ID NO: 3425543 - DNA, 25 bp, Homo sapien
cagctcctatatccccttcaccatc

SEQ ID NO: 3425544 - DNA, 25 bp, Homo sapien
gacagtaagagttcctgggtgcctg

SEQ ID NO: 3425545 - DNA, 25 bp, Homo sapien
aggttgtaggggtggcaggaacagg

SEQ ID NO: 3425546 - DNA, 25 bp, Homo sapien
ctgaggttgtaggggtggcaggaac

SEQ ID NO: 3425547 - DNA, 25 bp, Homo sapien
gaggttgtaggggtggcaggaacag

SEQ ID NO: 3425548 - DNA, 25 bp, Homo sapien
tgtaggggtggcaggaacaggggtg

SEQ ID NO: 3425549 - DNA, 25 bp, Homo sapien
cagtgctgctgtcctctgctgtgtc

SEQ ID NO: 3425550 - DNA, 25 bp, Homo sapien
tgtcctctgctgtgtccttgtcctc

SEQ ID NO: 3425551 - DNA, 25 bp, Homo sapien
gctgctgtcctctgctgtgtccttg

SEQ ID NO: 3425552 - DNA, 25 bp, Homo sapien
tcagcagtgctgctgtcctctgctg

SEQ ID NO: 3425553 - DNA, 25 bp, Homo sapien
gctgccccagtcttcgtcgtcccat

SEQ ID NO: 3425554 - DNA, 25 bp, Homo sapien
ggctgccccagtcttcgtcgtccca

SEQ ID NO: 3425555 - DNA, 25 bp, Homo sapien
gccccagtcttcgtcgtcccatctg

SEQ ID NO: 3425556 - DNA, 25 bp, Homo sapien
tgccccagtcttcgtcgtcccatct

SEQ ID NO: 3425557 - DNA, 25 bp, Homo sapien
ctgatgaggacaggccaactccagc

SEQ ID NO: 3425558 - DNA, 25 bp, Homo sapien
agtgtgggaagggaccactgactcc

SEQ ID NO: 3425559 - DNA, 25 bp, Homo sapien
cagtgtgggaagggaccactgactc

SEQ ID NO: 3425560 - DNA, 25 bp, Homo sapien
agggaccactgactcccaccccatg

SEQ ID NO: 3425561 - DNA, 25 bp, Homo sapien
ctgcagtgtgggaagggaccactga

SEQ ID NO: 3425562 - DNA, 25 bp, Homo sapien
ctgactagcacggctcacttggccc

SEQ ID NO: 3425563 - DNA, 25 bp, Homo sapien
ggcccccggtgctccagtcgtcctg

SEQ ID NO: 3425564 - DNA, 25 bp, Homo sapien
tgactagcacggctcacttggcccc

SEQ ID NO: 3425565 - DNA, 25 bp, Homo sapien
acttggcccccggtgctccagtcgt

SEQ ID NO: 3425566 - DNA, 25 bp, Homo sapien
ggatttggaggatttgtggtcggag

SEQ ID NO: 3425567 - DNA, 25 bp, Homo sapien
ttggaggatttgtggtcggagttgc

SEQ ID NO: 3425568 - DNA, 25 bp, Homo sapien
gaggatttgtggtcggagttgctga

SEQ ID NO: 3425569 - DNA, 25 bp, Homo sapien
aggatttgtggtcggagttgctgac

SEQ ID NO: 3425570 - DNA, 25 bp, Homo sapien
tcctgccagccctgttcccaggagc

SEQ ID NO: 3425571 - DNA, 25 bp, Homo sapien
ctgccagccctgttcccaggagccc

SEQ ID NO: 3425572 - DNA, 25 bp, Homo sapien
cagccctgttcccaggagccctcag

SEQ ID NO: 3425573 - DNA, 25 bp, Homo sapien
ctgggagcttggctcctgccagccc

SEQ ID NO: 3425574 - DNA, 25 bp, Homo sapien
tgggacgtgcagacagggtagcgaa

SEQ ID NO: 3425575 - DNA, 25 bp, Homo sapien
ctggccagccgtgtaccgtcaggag

SEQ ID NO: 3425576 - DNA, 25 bp, Homo sapien
gggtcgcccttgtcgctggactctg

SEQ ID NO: 3425577 - DNA, 25 bp, Homo sapien
tgggccaccccagttatactcgctg

SEQ ID NO: 3425578 - DNA, 25 bp, Homo sapien
tgtaaagagaagtgtgggctgcagt

SEQ ID NO: 3425579 - DNA, 25 bp, Homo sapien
acttctggctgaggtccaccatctc

SEQ ID NO: 3425580 - DNA, 25 bp, Homo sapien
ccaccatctctaccctctcgccaga

SEQ ID NO: 3425581 - DNA, 25 bp, Homo sapien
taaagagaagtgtgggctgcagtgg

SEQ ID NO: 3425582 - DNA, 25 bp, Homo sapien
gtctcgaggccctcccagttgtcct

SEQ ID NO: 3425583 - DNA, 25 bp, Homo sapien
agtctcgaggccctcccagttgtcc

SEQ ID NO: 3425584 - DNA, 25 bp, Homo sapien
tgtcagtctcgaggccctcccagtt

SEQ ID NO: 3425585 - DNA, 25 bp, Homo sapien
gactgtcagtctcgaggccctccca

SEQ ID NO: 3425586 - DNA, 25 bp, Homo sapien
agtcggggagccctagtcttcagcc

SEQ ID NO: 3425587 - DNA, 25 bp, Homo sapien
tcggggagccctagtcttcagccca

SEQ ID NO: 3425588 - DNA, 25 bp, Homo sapien
tgtaggggcgggctagtcggggagc

SEQ ID NO: 3425589 - DNA, 25 bp, Homo sapien
ggctagtcggggagccctagtcttc

SEQ ID NO: 3425590 - DNA, 25 bp, Homo sapien
gaaggggagccccggtctcagctct

SEQ ID NO: 3425591 - DNA, 25 bp, Homo sapien
ggaaggggagccccggtctcagctc

SEQ ID NO: 3425592 - DNA, 25 bp, Homo sapien
aaggggagccccggtctcagctctc

SEQ ID NO: 3425593 - DNA, 25 bp, Homo sapien
tctcggcgcgtttggcctccatctc

SEQ ID NO: 3425594 - DNA, 25 bp, Homo sapien
ttcctctcggcgcgtttggcctcca

SEQ ID NO: 3425595 - DNA, 25 bp, Homo sapien
ctcctcgcgcttcttccgggccagc

SEQ ID NO: 3425596 - DNA, 25 bp, Homo sapien
tcctcgcgcttcttccgggccagct

SEQ ID NO: 3425597 - DNA, 25 bp, Homo sapien
tcagtccagcttccgggctcccagc

SEQ ID NO: 3425598 - DNA, 25 bp, Homo sapien
cagtccagcttccgggctcccagct

SEQ ID NO: 3425599 - DNA, 25 bp, Homo sapien
gtggggcgggctctccgcagccggg

SEQ ID NO: 3425600 - DNA, 25 bp, Homo sapien
ggggcgggctctccgcagccgggaa

SEQ ID NO: 3425601 - DNA, 25 bp, Homo sapien
tggggcgggctctccgcagccggga

SEQ ID NO: 3425602 - DNA, 25 bp, Homo sapien
tatgtacacgtgagatggcctggct

SEQ ID NO: 3425603 - DNA, 25 bp, Homo sapien
ttatgtacacgtgagatggcctggc

SEQ ID NO: 3425604 - DNA, 25 bp, Homo sapien
gtacacgtgagatggcctggctggg

SEQ ID NO: 3425605 - DNA, 25 bp, Homo sapien
atgtacacgtgagatggcctggctg

SEQ ID NO: 3425606 - DNA, 25 bp, Homo sapien
gaaatagaatttattgtggctctga

SEQ ID NO: 3425607 - DNA, 25 bp, Homo sapien
gtccagtgcactgagccttgtcaag

SEQ ID NO: 3425608 - DNA, 25 bp, Homo sapien
aaatgccagagacatgaggaaggga

SEQ ID NO: 3425609 - DNA, 25 bp, Homo sapien
catggaagcatgaaacactggtgga

SEQ ID NO: 3425610 - DNA, 25 bp, Homo sapien
tgggaaaaggatatcacaagggaag

SEQ ID NO: 3425611 - DNA, 25 bp, Homo sapien
tatcgtctctgaccagagtgcactg

SEQ ID NO: 3425612 - DNA, 25 bp, Homo sapien
tcaagggctaaatcactgggtgggc

SEQ ID NO: 3425613 - DNA, 25 bp, Homo sapien
ctgggcactgtagggatgagtcctc

SEQ ID NO: 3425614 - DNA, 25 bp, Homo sapien
tgctgtcacccgcagccggtgagtg

SEQ ID NO: 3425615 - DNA, 25 bp, Homo sapien
gggaggtcactctcaccgctatgag

SEQ ID NO: 3425616 - DNA, 25 bp, Homo sapien
tgagtgtacgtgtgtccatctccca

SEQ ID NO: 3425617 - DNA, 25 bp, Homo sapien
gatgtgcttagcctgaccctgaggg

SEQ ID NO: 3425618 - DNA, 25 bp, Homo sapien
tatgagtgactcactggcagaaagg

SEQ ID NO: 3425619 - DNA, 25 bp, Homo sapien
gccggctactggcaaggtctgagta

SEQ ID NO: 3425620 - DNA, 25 bp, Homo sapien
caggcctgaaggtagggactagttc

SEQ ID NO: 3425621 - DNA, 25 bp, Homo sapien
cctaaaagtagggtgcaggcctgaa

SEQ ID NO: 3425622 - DNA, 25 bp, Homo sapien
gactagttcggggttctcagcctct

SEQ ID NO: 3425623 - DNA, 25 bp, Homo sapien
tttcctggatgtgccctagccgtcc

SEQ ID NO: 3425624 - DNA, 25 bp, Homo sapien
gccgccctgacttggcagcgctttt

SEQ ID NO: 3425625 - DNA, 25 bp, Homo sapien
gcagcgcttttcctggatgtgccct

SEQ ID NO: 3425626 - DNA, 25 bp, Homo sapien
agagggtctggtgccgccctgactt

SEQ ID NO: 3425627 - DNA, 25 bp, Homo sapien
agtgtgctggcagattctaggcaaa

SEQ ID NO: 3425628 - DNA, 25 bp, Homo sapien
aaagtgtgctggcagattctaggca

SEQ ID NO: 3425629 - DNA, 25 bp, Homo sapien
gtgctggcagattctaggcaaatga

SEQ ID NO: 3425630 - DNA, 25 bp, Homo sapien
aaaaaagtgtgctggcagattctag

SEQ ID NO: 3425631 - DNA, 25 bp, Homo sapien
tttccgcgtatttcaagaccactcc

SEQ ID NO: 3425632 - DNA, 25 bp, Homo sapien
ccttctgcatgctcggtgtcccagt

SEQ ID NO: 3425633 - DNA, 25 bp, Homo sapien
ctcccgaggcctggaactgaagcaa

SEQ ID NO: 3425634 - DNA, 25 bp, Homo sapien
agtaatcacagcgagcggccctttg

SEQ ID NO: 3425635 - DNA, 25 bp, Homo sapien
cgttgtcaccgccgggctcacagga

SEQ ID NO: 3425636 - DNA, 25 bp, Homo sapien
aagcggagcgccctccgctgcggct

SEQ ID NO: 3425637 - DNA, 25 bp, Homo sapien
tgccgttgtcaccgccgggctcaca

SEQ ID NO: 3425638 - DNA, 25 bp, Homo sapien
gtcaccgccgggctcacaggaagtg

SEQ ID NO: 3425639 - DNA, 25 bp, Homo sapien
ggtcttgccggagtgggctgcctcc

SEQ ID NO: 3425640 - DNA, 25 bp, Homo sapien
agggactgggggtcttgccggagtg

SEQ ID NO: 3425641 - DNA, 25 bp, Homo sapien
agccacaaacccctgccgcccaggt

SEQ ID NO: 3425642 - DNA, 25 bp, Homo sapien
agtgggctgcctcccgtacctcaca

SEQ ID NO: 3425643 - DNA, 25 bp, Homo sapien
acacgtctcgcccagcatgcggtaa

SEQ ID NO: 3425644 - DNA, 25 bp, Homo sapien
gatagtcgcccatgagccgggagat

SEQ ID NO: 3425645 - DNA, 25 bp, Homo sapien
ggagatgcgatcttgccgctcccgt

SEQ ID NO: 3425646 - DNA, 25 bp, Homo sapien
ggtaaccgcgcagcagatagtcgcc

SEQ ID NO: 3425647 - DNA, 25 bp, Homo sapien
gccggaatgagacgccggcaatggg

SEQ ID NO: 3425648 - DNA, 25 bp, Homo sapien
cacggggccggaatgagacgccggc

SEQ ID NO: 3425649 - DNA, 25 bp, Homo sapien
aaagcacacggggccggaatgagac

SEQ ID NO: 3425650 - DNA, 25 bp, Homo sapien
gggccggaatgagacgccggcaatg

SEQ ID NO: 3425651 - DNA, 25 bp, Homo sapien
gtagattttccgctgtttgtcttgg

SEQ ID NO: 3425652 - DNA, 25 bp, Homo sapien
tcctgacaagccacgcagtagattt

SEQ ID NO: 3425653 - DNA, 25 bp, Homo sapien
gtctgagtcgagttcctgacaagcc

SEQ ID NO: 3425654 - DNA, 25 bp, Homo sapien
gccacgcagtagattttccgctgtt

SEQ ID NO: 3425655 - DNA, 25 bp, Homo sapien
catctgtatttggaggcacagcagg

SEQ ID NO: 3425656 - DNA, 25 bp, Homo sapien
cacagtgctccggacgaggtactgg

SEQ ID NO: 3425657 - DNA, 25 bp, Homo sapien
ccagctggtgctcccgagcttggga

SEQ ID NO: 3425658 - DNA, 25 bp, Homo sapien
tccctcacagtgctccggacgaggt

SEQ ID NO: 3425659 - DNA, 25 bp, Homo sapien
ctgctgcaggctgcgcagggcctcc

SEQ ID NO: 3425660 - DNA, 25 bp, Homo sapien
ttagtgctgtagctgctgcaggctg

SEQ ID NO: 3425661 - DNA, 25 bp, Homo sapien
gtagctgctgcaggctgcgcagggc

SEQ ID NO: 3425662 - DNA, 25 bp, Homo sapien
ctgtagctgctgcaggctgcgcagg

SEQ ID NO: 3425663 - DNA, 25 bp, Homo sapien
aggaacagctgtttttctagagggt

SEQ ID NO: 3425664 - DNA, 25 bp, Homo sapien
agaggaacagctgtttttctagagg

SEQ ID NO: 3425665 - DNA, 25 bp, Homo sapien
gaggaacagctgtttttctagaggg

SEQ ID NO: 3425666 - DNA, 25 bp, Homo sapien
tgctgccagagacaaggctagggtc

SEQ ID NO: 3425667 - DNA, 25 bp, Homo sapien
gggctggcatgcacacttggaacca

SEQ ID NO: 3425668 - DNA, 25 bp, Homo sapien
tcaactcatctcagggcgtcaagga

SEQ ID NO: 3425669 - DNA, 25 bp, Homo sapien
ggatcggaacacaaaacctcacttc

SEQ ID NO: 3425670 - DNA, 25 bp, Homo sapien
gcgcggacggcgatgccacctcctt

SEQ ID NO: 3425671 - DNA, 25 bp, Homo sapien
acggttgtgggaccacgtcgcgcaa

SEQ ID NO: 3425672 - DNA, 25 bp, Homo sapien
cctctggatgggccgggcctctctt

SEQ ID NO: 3425673 - DNA, 25 bp, Homo sapien
gcccgcaggcctcgctttgttcctt

SEQ ID NO: 3425674 - DNA, 25 bp, Homo sapien
cgagcccccgctcgcattaaggagg

SEQ ID NO: 3425675 - DNA, 25 bp, Homo sapien
cgctcgcattaaggaggccgctgag

SEQ ID NO: 3425676 - DNA, 25 bp, Homo sapien
tgcgctggctgtagacgcgctccag

SEQ ID NO: 3425677 - DNA, 25 bp, Homo sapien
tgggagcccggccaaagcgcagccc

SEQ ID NO: 3425678 - DNA, 25 bp, Homo sapien
cgggcggcgcggctcagctcgtcgt

SEQ ID NO: 3425679 - DNA, 25 bp, Homo sapien
tgcgggtcccgcgttggcggcgccg

SEQ ID NO: 3425680 - DNA, 25 bp, Homo sapien
gcgcggctcagctcgtcgtggatgc

SEQ ID NO: 3425681 - DNA, 25 bp, Homo sapien
ggccggctgcgggtcccgcgttggc

SEQ ID NO: 3425682 - DNA, 25 bp, Homo sapien
ctgagtcgaggttgacaggacgacg

SEQ ID NO: 3425683 - DNA, 25 bp, Homo sapien
tgagtcgaggttgacaggacgacgc

SEQ ID NO: 3425684 - DNA, 25 bp, Homo sapien
atctccttgcgcagcgcggccagcg

SEQ ID NO: 3425685 - DNA, 25 bp, Homo sapien
catctccttgcgcagcgcggccagc

SEQ ID NO: 3425686 - DNA, 25 bp, Homo sapien
ccacctgcaagctatgcaactttag

SEQ ID NO: 3425687 - DNA, 25 bp, Homo sapien
tagtcatgaccctcacccaaaaaat

SEQ ID NO: 3425688 - DNA, 25 bp, Homo sapien
gggttatccatttagccggatgaaa

SEQ ID NO: 3425689 - DNA, 25 bp, Homo sapien
tgaagtaacgtcagcaaaacatttg

SEQ ID NO: 3425690 - DNA, 25 bp, Homo sapien
ggcacaacaaggacatgtccaactg

SEQ ID NO: 3425691 - DNA, 25 bp, Homo sapien
ctggcacaacaaggacatgtccaac

SEQ ID NO: 3425692 - DNA, 25 bp, Homo sapien
aaggacatgtccaactgccgcagcc

SEQ ID NO: 3425693 - DNA, 25 bp, Homo sapien
caacaaggacatgtccaactgccgc

SEQ ID NO: 3425694 - DNA, 25 bp, Homo sapien
tggcacaggtgtttgtagtcctgga

SEQ ID NO: 3425695 - DNA, 25 bp, Homo sapien
actggtcacgggcattgtgcgtctg

SEQ ID NO: 3425696 - DNA, 25 bp, Homo sapien
cagaagctcaggtcttggcacaggt

SEQ ID NO: 3425697 - DNA, 25 bp, Homo sapien
tcgggaggctcctcgtcgtcagaca

SEQ ID NO: 3425698 - DNA, 25 bp, Homo sapien
gaggctgatgtggaaggcatcctgc

SEQ ID NO: 3425699 - DNA, 25 bp, Homo sapien
cagaggctgatgtggaaggcatcct

SEQ ID NO: 3425700 - DNA, 25 bp, Homo sapien
ggctgatgtggaaggcatcctgcag

SEQ ID NO: 3425701 - DNA, 25 bp, Homo sapien
tcagaggctgatgtggaaggcatcc

SEQ ID NO: 3425702 - DNA, 25 bp, Homo sapien
gcagctgccgatagcaacaaaaggt

SEQ ID NO: 3425703 - DNA, 25 bp, Homo sapien
gagccttttgcatgggtgcatgccc

SEQ ID NO: 3425704 - DNA, 25 bp, Homo sapien
agggaagatgcttcgggccccaccg

SEQ ID NO: 3425705 - DNA, 25 bp, Homo sapien
ctctgaggaatacatgcctggccct

SEQ ID NO: 3425706 - DNA, 25 bp, Homo sapien
gtatttatttatctacgcgccctgg

SEQ ID NO: 3425707 - DNA, 25 bp, Homo sapien
tatttatttatctacgcgccctgga

SEQ ID NO: 3425708 - DNA, 25 bp, Homo sapien
atttatttatctacgcgccctggag

SEQ ID NO: 3425709 - DNA, 25 bp, Homo sapien
gtccccatggcctgtccgcgccgcc

SEQ ID NO: 3425710 - DNA, 25 bp, Homo sapien
agggtggtctggctgagtctgcggg

SEQ ID NO: 3425711 - DNA, 25 bp, Homo sapien
cccgggaccgcgctctccgctgccg

SEQ ID NO: 3425712 - DNA, 25 bp, Homo sapien
tgcggggtcgcctggggcgcgtcgg

SEQ ID NO: 3425713 - DNA, 25 bp, Homo sapien
ctgcaggcgcttccacaccgaggtc

SEQ ID NO: 3425714 - DNA, 25 bp, Homo sapien
ttcttggtgcactccaacactagct

SEQ ID NO: 3425715 - DNA, 25 bp, Homo sapien
ggtgcactccaacactagctcgtgg

SEQ ID NO: 3425716 - DNA, 25 bp, Homo sapien
tccaacactagctcgtggtaacagg

SEQ ID NO: 3425717 - DNA, 25 bp, Homo sapien
cactagctcgtggtaacaggccacg

SEQ ID NO: 3425718 - DNA, 25 bp, Homo sapien
tgcgtcggttccgacgggtccatac

SEQ ID NO: 3425719 - DNA, 25 bp, Homo sapien
acgggtccataccaccaccagctta

SEQ ID NO: 3425720 - DNA, 25 bp, Homo sapien
cagatgcgtcggttccgacgggtcc

SEQ ID NO: 3425721 - DNA, 25 bp, Homo sapien
tggagcagatgcgtcggttccgacg

SEQ ID NO: 3425722 - DNA, 25 bp, Homo sapien
cacaccacggtgccccggtatgggt

SEQ ID NO: 3425723 - DNA, 25 bp, Homo sapien
atgggttctggatgcccggctgcca

SEQ ID NO: 3425724 - DNA, 25 bp, Homo sapien
cacggtgccccggtatgggttctgg

SEQ ID NO: 3425725 - DNA, 25 bp, Homo sapien
tctcaggtaccatccacaccacggt

SEQ ID NO: 3425726 - DNA, 25 bp, Homo sapien
ggagacctgtgttgcaattgttgca

SEQ ID NO: 3425727 - DNA, 25 bp, Homo sapien
gagacctgtgttgcaattgttgcaa

SEQ ID NO: 3425728 - DNA, 25 bp, Homo sapien
agacctgtgttgcaattgttgcaac

SEQ ID NO: 3425729 - DNA, 25 bp, Homo sapien
caattgttgcaactgcctgtgttgc

SEQ ID NO: 3425730 - DNA, 25 bp, Homo sapien
gaagaagggtgctggtgagtacagg

SEQ ID NO: 3425731 - DNA, 25 bp, Homo sapien
aagaagggtgctggtgagtacagga

SEQ ID NO: 3425732 - DNA, 25 bp, Homo sapien
gggaagaagggtgctggtgagtaca

SEQ ID NO: 3425733 - DNA, 25 bp, Homo sapien
ctgggaagaagggtgctggtgagta

SEQ ID NO: 3425734 - DNA, 25 bp, Homo sapien
ttttcaataataaatgtccactctt

SEQ ID NO: 3425735 - DNA, 25 bp, Homo sapien
cactctttggcctcatactggtcca

SEQ ID NO: 3425736 - DNA, 25 bp, Homo sapien
ttggcctcatactggtccacgtggg

SEQ ID NO: 3425737 - DNA, 25 bp, Homo sapien
tctttggcctcatactggtccacgt

SEQ ID NO: 3425738 - DNA, 25 bp, Homo sapien
cttggacaggcacgggccctgcatg

SEQ ID NO: 3425739 - DNA, 25 bp, Homo sapien
tgcatggcgggccaggtccacctcg

SEQ ID NO: 3425740 - DNA, 25 bp, Homo sapien
cactgactttggcttcagccgcagc

SEQ ID NO: 3425741 - DNA, 25 bp, Homo sapien
ctcactgggacttggacaggcacgg

SEQ ID NO: 3425742 - DNA, 25 bp, Homo sapien
aaagtcatccaagttgcccacatca

SEQ ID NO: 3425743 - DNA, 25 bp, Homo sapien
tcacactcatgaggcttgcgagact

SEQ ID NO: 3425744 - DNA, 25 bp, Homo sapien
tgcgagactctgcatgtcatcgtcc

SEQ ID NO: 3425745 - DNA, 25 bp, Homo sapien
cacatcactaggcttcacactcatg

SEQ ID NO: 3425746 - DNA, 25 bp, Homo sapien
cgccctggcctcagggcaccgcccc

SEQ ID NO: 3425747 - DNA, 25 bp, Homo sapien
cctggcctcagggcaccgccccggc

SEQ ID NO: 3425748 - DNA, 25 bp, Homo sapien
tgggaaacgccctggcctcagggca

SEQ ID NO: 3425749 - DNA, 25 bp, Homo sapien
ctgggaaacgccctggcctcagggc

SEQ ID NO: 3425750 - DNA, 25 bp, Homo sapien
tcctcctcacaaagcgtcttcagct

SEQ ID NO: 3425751 - DNA, 25 bp, Homo sapien
gctgggctggtatcctcagcattag

SEQ ID NO: 3425752 - DNA, 25 bp, Homo sapien
ggctgggctggtatcctcagcatta

SEQ ID NO: 3425753 - DNA, 25 bp, Homo sapien
ctggccccccgcttcattagctcgt

SEQ ID NO: 3425754 - DNA, 25 bp, Homo sapien
ctcatctctggtgaggtttccgggg

SEQ ID NO: 3425755 - DNA, 25 bp, Homo sapien
tcattagctcgttctgacccctggc

SEQ ID NO: 3425756 - DNA, 25 bp, Homo sapien
ccctggcctcgggaggttctggctg

SEQ ID NO: 3425757 - DNA, 25 bp, Homo sapien
tttatcctcaatgctcgggcccagc

SEQ ID NO: 3425758 - DNA, 25 bp, Homo sapien
ccttcctgagggcatgcctgggcct

SEQ ID NO: 3425759 - DNA, 25 bp, Homo sapien
gagggcatcagagcctttccggagc

SEQ ID NO: 3425760 - DNA, 25 bp, Homo sapien
tgggtctccctagcagagcccaatc

SEQ ID NO: 3425761 - DNA, 25 bp, Homo sapien
tcctgacctcttagtgtttgcctct

SEQ ID NO: 3425762 - DNA, 25 bp, Homo sapien
acttgacaaactgctgaactctctt

SEQ ID NO: 3425763 - DNA, 25 bp, Homo sapien
catccacttgacaaactgctgaact

SEQ ID NO: 3425764 - DNA, 25 bp, Homo sapien
ctcctgacctcttagtgtttgcctc

SEQ ID NO: 3425765 - DNA, 25 bp, Homo sapien
tgcttattgctccaacagaagggcc

SEQ ID NO: 3425766 - DNA, 25 bp, Homo sapien
tgggtccccagcatctcagactgta

SEQ ID NO: 3425767 - DNA, 25 bp, Homo sapien
tgggctaccaatatgtcagactctg

SEQ ID NO: 3425768 - DNA, 25 bp, Homo sapien
tcttacgggtcatcagtactcgggc

SEQ ID NO: 3425769 - DNA, 25 bp, Homo sapien
tctttccccttctcatttcccaaga

SEQ ID NO: 3425770 - DNA, 25 bp, Homo sapien
cttctcatttcccaagaccccagcc

SEQ ID NO: 3425771 - DNA, 25 bp, Homo sapien
ggcaggctggcctctgtgaggcttc

SEQ ID NO: 3425772 - DNA, 25 bp, Homo sapien
gcctctgtgaggcttccctcagctt

SEQ ID NO: 3425773 - DNA, 25 bp, Homo sapien
agggggctccttcaagctgagcccc

SEQ ID NO: 3425774 - DNA, 25 bp, Homo sapien
gtgggtccatgcagagccgccgttc

SEQ ID NO: 3425775 - DNA, 25 bp, Homo sapien
agcagcagactgggccctcggcggc

SEQ ID NO: 3425776 - DNA, 25 bp, Homo sapien
ccgccgttcgctcagccccaggtta

SEQ ID NO: 3425777 - DNA, 25 bp, Homo sapien
cagggaagatggggtaagagagcca

SEQ ID NO: 3425778 - DNA, 25 bp, Homo sapien
aaatcagcttagaggtgtccagctc

SEQ ID NO: 3425779 - DNA, 25 bp, Homo sapien
agaaaatcagcttagaggtgtccag

SEQ ID NO: 3425780 - DNA, 25 bp, Homo sapien
gggaagatggggtaagagagccagg

SEQ ID NO: 3425781 - DNA, 25 bp, Homo sapien
caggtaaaagggtttctagatccag

SEQ ID NO: 3425782 - DNA, 25 bp, Homo sapien
tcacctaaaaggtcagtggccccca

SEQ ID NO: 3425783 - DNA, 25 bp, Homo sapien
cagagaccactggctagagccttgg

SEQ ID NO: 3425784 - DNA, 25 bp, Homo sapien
aatgggatgtatgccctctgcctct

SEQ ID NO: 3425785 - DNA, 25 bp, Homo sapien
ccacggtagccagtggtgacttcct

SEQ ID NO: 3425786 - DNA, 25 bp, Homo sapien
tgatgcggacgccacggtagccagt

SEQ ID NO: 3425787 - DNA, 25 bp, Homo sapien
tcttgtctgggtagaatcggtgcag

SEQ ID NO: 3425788 - DNA, 25 bp, Homo sapien
aggccaagccgttgcgccaggatgt

SEQ ID NO: 3425789 - DNA, 25 bp, Homo sapien
gatggctcccccattcgttcccacc

SEQ ID NO: 3425790 - DNA, 25 bp, Homo sapien
tgatggctcccccattcgttcccac

SEQ ID NO: 3425791 - DNA, 25 bp, Homo sapien
ctgatggctcccccattcgttccca

SEQ ID NO: 3425792 - DNA, 25 bp, Homo sapien
tggtcagaggctgggtccacactgc

SEQ ID NO: 3425793 - DNA, 25 bp, Homo sapien
tgcttgatgttgagtgggtctagcg

SEQ ID NO: 3425794 - DNA, 25 bp, Homo sapien
tgttgagtgggtctagcgaggcata

SEQ ID NO: 3425795 - DNA, 25 bp, Homo sapien
gatgttgagtgggtctagcgaggca

SEQ ID NO: 3425796 - DNA, 25 bp, Homo sapien
tgagtgggtctagcgaggcatagtc

SEQ ID NO: 3425797 - DNA, 25 bp, Homo sapien
tgagagcctggctctccagaccctc

SEQ ID NO: 3425798 - DNA, 25 bp, Homo sapien
ctccaaatctgacactgagagcctg

SEQ ID NO: 3425799 - DNA, 25 bp, Homo sapien
tgctgggcccggcagtccactttct

SEQ ID NO: 3425800 - DNA, 25 bp, Homo sapien
tttctccaaatctgacactgagagc

SEQ ID NO: 3425801 - DNA, 25 bp, Homo sapien
gcagtgccgccccacggagggggtc

SEQ ID NO: 3425802 - DNA, 25 bp, Homo sapien
acccggcaacgctgcagtgccgccc

SEQ ID NO: 3425803 - DNA, 25 bp, Homo sapien
gcaccccgggttttgcctagcaaca

SEQ ID NO: 3425804 - DNA, 25 bp, Homo sapien
cgcgccacccggcaacgctgcagtg

SEQ ID NO: 3425805 - DNA, 25 bp, Homo sapien
ccagagccgcgaagccatcgaaggc

SEQ ID NO: 3425806 - DNA, 25 bp, Homo sapien
tctggcacaggtacgtcatgacgat

SEQ ID NO: 3425807 - DNA, 25 bp, Homo sapien
catgacgatgagcttgtcgggcacc

SEQ ID NO: 3425808 - DNA, 25 bp, Homo sapien
cgccctccagttgtaccagctgcag

SEQ ID NO: 3425809 - DNA, 25 bp, Homo sapien
ccgcgaccgcgttcctggaggccac

SEQ ID NO: 3425810 - DNA, 25 bp, Homo sapien
acctccgcgggtcgcgactctcggg

SEQ ID NO: 3425811 - DNA, 25 bp, Homo sapien
cgccgtccttggaggcgcggcccgc

SEQ ID NO: 3425812 - DNA, 25 bp, Homo sapien
cgggacctccgcgggtcgcgactct

SEQ ID NO: 3425813 - DNA, 25 bp, Homo sapien
ttgaccgagggccgtcgcagcctca

SEQ ID NO: 3425814 - DNA, 25 bp, Homo sapien
cccgttgaccgagggccgtcgcagc

SEQ ID NO: 3425815 - DNA, 25 bp, Homo sapien
cgttgaccgagggccgtcgcagcct

SEQ ID NO: 3425816 - DNA, 25 bp, Homo sapien
tccccgttgaccgagggccgtcgca

SEQ ID NO: 3425817 - DNA, 25 bp, Homo sapien
tcttcttgagcaggtccgcgtcgcg

SEQ ID NO: 3425818 - DNA, 25 bp, Homo sapien
ccgcgtccggatcgtccatcgagaa

SEQ ID NO: 3425819 - DNA, 25 bp, Homo sapien
agaacgagctgctgttccgcagccg

SEQ ID NO: 3425820 - DNA, 25 bp, Homo sapien
agccgcgagcgcctcttcttgagca

SEQ ID NO: 3425821 - DNA, 25 bp, Homo sapien
gacacgacactctaggagatgacct

SEQ ID NO: 3425822 - DNA, 25 bp, Homo sapien
gccacttatggaccttccgggagat

SEQ ID NO: 3425823 - DNA, 25 bp, Homo sapien
cagagctgccccttggttgacaggc

SEQ ID NO: 3425824 - DNA, 25 bp, Homo sapien
tggcagttccctaaacgaggcctaa

SEQ ID NO: 3425825 - DNA, 25 bp, Homo sapien
tgtcacctagtgctggcttctccgt

SEQ ID NO: 3425826 - DNA, 25 bp, Homo sapien
tttcgactcagctgatagcctggcc

SEQ ID NO: 3425827 - DNA, 25 bp, Homo sapien
gacttgttgggactgtcagccctgg

SEQ ID NO: 3425828 - DNA, 25 bp, Homo sapien
gacagtggttgacctgcccgtgtcc

SEQ ID NO: 3425829 - DNA, 25 bp, Homo sapien
cagggggctgttgagagtctgcagc

SEQ ID NO: 3425830 - DNA, 25 bp, Homo sapien
gggctgttgagagtctgcagctgtg

SEQ ID NO: 3425831 - DNA, 25 bp, Homo sapien
gctgttgagagtctgcagctgtggg

SEQ ID NO: 3425832 - DNA, 25 bp, Homo sapien
gggggctgttgagagtctgcagctg

SEQ ID NO: 3425833 - DNA, 25 bp, Homo sapien
cagcccagcctcctcccctgggctt

SEQ ID NO: 3425834 - DNA, 25 bp, Homo sapien
cccagcctcctcccctgggcttggg

SEQ ID NO: 3425835 - DNA, 25 bp, Homo sapien
cagcctcctcccctgggcttggggg

SEQ ID NO: 3425836 - DNA, 25 bp, Homo sapien
gcccagcctcctcccctgggcttgg

SEQ ID NO: 3425837 - DNA, 25 bp, Homo sapien
cacacgtactgacttgtgtcctgga

SEQ ID NO: 3425838 - DNA, 25 bp, Homo sapien
actgacttgtgtcctggaaccgttg

SEQ ID NO: 3425839 - DNA, 25 bp, Homo sapien
gctctgcacacacgtactgacttgt

SEQ ID NO: 3425840 - DNA, 25 bp, Homo sapien
gcagctctgcacacacgtactgact

SEQ ID NO: 3425841 - DNA, 25 bp, Homo sapien
gggtgaaccactcctggatcagcac

SEQ ID NO: 3425842 - DNA, 25 bp, Homo sapien
gtgaaccactcctggatcagcacct

SEQ ID NO: 3425843 - DNA, 25 bp, Homo sapien
ctgcctccggatgagagcgttcttc

SEQ ID NO: 3425844 - DNA, 25 bp, Homo sapien
gatgagagcgttcttcttgttgacc

SEQ ID NO: 3425845 - DNA, 25 bp, Homo sapien
taggacaaaaacagtaagatggaag

SEQ ID NO: 3425846 - DNA, 25 bp, Homo sapien
tctaaccaaagtagctaagagtccc

SEQ ID NO: 3425847 - DNA, 25 bp, Homo sapien
gaaagtagtgaagaactctaaccaa

SEQ ID NO: 3425848 - DNA, 25 bp, Homo sapien
cgtttgtcaaaaagatctctgtagg

SEQ ID NO: 3425849 - DNA, 25 bp, Homo sapien
ctcttttgcccagactagagtgtaa

SEQ ID NO: 3425850 - DNA, 25 bp, Homo sapien
tcttttgcccagactagagtgtaat

SEQ ID NO: 3425851 - DNA, 25 bp, Homo sapien
cttttgcccagactagagtgtaatg

SEQ ID NO: 3425852 - DNA, 25 bp, Homo sapien
cactcttttgcccagactagagtgt

SEQ ID NO: 3425853 - DNA, 25 bp, Homo sapien
caatggccgcagagtggcttcggac

SEQ ID NO: 3425854 - DNA, 25 bp, Homo sapien
ccccgaaggattatttggatgaaca

SEQ ID NO: 3425855 - DNA, 25 bp, Homo sapien
tgcaatctctcaaccccaggagggt

SEQ ID NO: 3425856 - DNA, 25 bp, Homo sapien
aattgctgggtgtttgtgttgctcc

SEQ ID NO: 3425857 - DNA, 25 bp, Homo sapien
cagggctgaccgcagagctatcctc

SEQ ID NO: 3425858 - DNA, 25 bp, Homo sapien
tgaccgcagagctatcctctagtct

SEQ ID NO: 3425859 - DNA, 25 bp, Homo sapien
gagctatcctctagtctccagacca

SEQ ID NO: 3425860 - DNA, 25 bp, Homo sapien
ctctagtctccagaccacattatcg

SEQ ID NO: 3425861 - DNA, 25 bp, Homo sapien
ttcgctccaagtcctgctcctccat

SEQ ID NO: 3425862 - DNA, 25 bp, Homo sapien
cttcgctccaagtcctgctcctcca

SEQ ID NO: 3425863 - DNA, 25 bp, Homo sapien
tcgctccaagtcctgctcctccatg

SEQ ID NO: 3425864 - DNA, 25 bp, Homo sapien
ggccagcatggcccgcagctcgcgg

SEQ ID NO: 3425865 - DNA, 25 bp, Homo sapien
ccagcatggcccgcagctcgcggct

SEQ ID NO: 3425866 - DNA, 25 bp, Homo sapien
agcatggcccgcagctcgcggctca

SEQ ID NO: 3425867 - DNA, 25 bp, Homo sapien
cttcgatggccagcatggcccgcag

SEQ ID NO: 3425868 - DNA, 25 bp, Homo sapien
taagcgtcaggaggcgcgggcccag

SEQ ID NO: 3425869 - DNA, 25 bp, Homo sapien
ctaagcgtcaggaggcgcgggccca

SEQ ID NO: 3425870 - DNA, 25 bp, Homo sapien
ctgctgagcggacgttttctgccag

SEQ ID NO: 3425871 - DNA, 25 bp, Homo sapien
tcatcgcgctggttcaccagcgaca

SEQ ID NO: 3425872 - DNA, 25 bp, Homo sapien
cctccagtaggagctgctctcggtg

SEQ ID NO: 3425873 - DNA, 25 bp, Homo sapien
gtcccggactagctcatcgcgctgg

SEQ ID NO: 3425874 - DNA, 25 bp, Homo sapien
cggactagctcatcgcgctggttca

SEQ ID NO: 3425875 - DNA, 25 bp, Homo sapien
cagcttgcggcgccgctgttccagg

SEQ ID NO: 3425876 - DNA, 25 bp, Homo sapien
ggccgcgctccaggcgctcgtcctc

SEQ ID NO: 3425877 - DNA, 25 bp, Homo sapien
gctcccgccggctcaactgccggct

SEQ ID NO: 3425878 - DNA, 25 bp, Homo sapien
ccggctcagcttgcggcgccgctgt

SEQ ID NO: 3425879 - DNA, 25 bp, Homo sapien
gggacggccgggtcgtccgcagcgc

SEQ ID NO: 3425880 - DNA, 25 bp, Homo sapien
cctcggtgacaaataaatacggcgg

SEQ ID NO: 3425881 - DNA, 25 bp, Homo sapien
atccgccctgccctgtacggggaag

SEQ ID NO: 3425882 - DNA, 25 bp, Homo sapien
ggacgcgagaagttatgggccaccc

SEQ ID NO: 3425883 - DNA, 25 bp, Homo sapien
tagtctcgtccaactttattgctct

SEQ ID NO: 3425884 - DNA, 25 bp, Homo sapien
actttattgctctggagaacaggag

SEQ ID NO: 3425885 - DNA, 25 bp, Homo sapien
gagggcaagccagcgcggggcggta

SEQ ID NO: 3425886 - DNA, 25 bp, Homo sapien
tattgctctggagaacaggagggca

SEQ ID NO: 3425887 - DNA, 25 bp, Homo sapien
aaaccgcaccttccggcttaggatg

SEQ ID NO: 3425888 - DNA, 25 bp, Homo sapien
tccggcttaggatggcagagccgcc

SEQ ID NO: 3425889 - DNA, 25 bp, Homo sapien
agagcccaggtggagcggagaaaag

SEQ ID NO: 3425890 - DNA, 25 bp, Homo sapien
ggcgcactcccctccgcctattgag

SEQ ID NO: 3425891 - DNA, 25 bp, Homo sapien
cccaggttacttgcttctaggactc

SEQ ID NO: 3425892 - DNA, 25 bp, Homo sapien
ggaagttcttcagacccagtggtcc

SEQ ID NO: 3425893 - DNA, 25 bp, Homo sapien
gagcctggactaggactcccataaa

SEQ ID NO: 3425894 - DNA, 25 bp, Homo sapien
accaaggtggcatcctagggcagga

SEQ ID NO: 3425895 - DNA, 25 bp, Homo sapien
caccggggacatcacgctctgctcc

SEQ ID NO: 3425896 - DNA, 25 bp, Homo sapien
accggggacatcacgctctgctcct

SEQ ID NO: 3425897 - DNA, 25 bp, Homo sapien
ccccaccggggacatcacgctctgc

SEQ ID NO: 3425898 - DNA, 25 bp, Homo sapien
ccaccggggacatcacgctctgctc

SEQ ID NO: 3425899 - DNA, 25 bp, Homo sapien
tggtgcgggtcgaagaaccaaccgc

SEQ ID NO: 3425900 - DNA, 25 bp, Homo sapien
gatgagcaggaagatccacacatag

SEQ ID NO: 3425901 - DNA, 25 bp, Homo sapien
catagaggtggaagcagttggagaa

SEQ ID NO: 3425902 - DNA, 25 bp, Homo sapien
tcgaagaaccaaccgccggtgagcg

SEQ ID NO: 3425903 - DNA, 25 bp, Homo sapien
gaagccgataattgacagtcttgat

SEQ ID NO: 3425904 - DNA, 25 bp, Homo sapien
ccaccatcaagctgggaggcaggac

SEQ ID NO: 3425905 - DNA, 25 bp, Homo sapien
aagatgacagccaccacgaggcagt

SEQ ID NO: 3425906 - DNA, 25 bp, Homo sapien
acgatctcgccctggtcaaacatgg

SEQ ID NO: 3425907 - DNA, 25 bp, Homo sapien
ctggttgaagccaaacacagagtgc

SEQ ID NO: 3425908 - DNA, 25 bp, Homo sapien
ggtgtggaactgactttccggaaca

SEQ ID NO: 3425909 - DNA, 25 bp, Homo sapien
cctggttgaagccaaacacagagtg

SEQ ID NO: 3425910 - DNA, 25 bp, Homo sapien
ctgactttccggaacactgtcatct

SEQ ID NO: 3425911 - DNA, 25 bp, Homo sapien
agtcctccattcggggcagcagctc

SEQ ID NO: 3425912 - DNA, 25 bp, Homo sapien
agagtcctccattcggggcagcagc

SEQ ID NO: 3425913 - DNA, 25 bp, Homo sapien
cagagtcctccattcggggcagcag

SEQ ID NO: 3425914 - DNA, 25 bp, Homo sapien
gagtcctccattcggggcagcagct

SEQ ID NO: 3425915 - DNA, 25 bp, Homo sapien
ctgcaaccatggccccagaggtgtc

SEQ ID NO: 3425916 - DNA, 25 bp, Homo sapien
caaccatggccccagaggtgtcagc

SEQ ID NO: 3425917 - DNA, 25 bp, Homo sapien
gcacagcacgccagcccctgttcca

SEQ ID NO: 3425918 - DNA, 25 bp, Homo sapien
ctggcacagcacgccagcccctgtt

SEQ ID NO: 3425919 - DNA, 25 bp, Homo sapien
gatcacattgttgctgccctgctcc

SEQ ID NO: 3425920 - DNA, 25 bp, Homo sapien
tgagcttcagcatctctcggtcggc

SEQ ID NO: 3425921 - DNA, 25 bp, Homo sapien
gtttctcctgcgagctgagcttcag

SEQ ID NO: 3425922 - DNA, 25 bp, Homo sapien
tctcggtcggcagaagtcacgatca

SEQ ID NO: 3425923 - DNA, 25 bp, Homo sapien
gcctcggccccataaggcccacgca

SEQ ID NO: 3425924 - DNA, 25 bp, Homo sapien
agcctcggccccataaggcccacgc

SEQ ID NO: 3425925 - DNA, 25 bp, Homo sapien
cctcggccccataaggcccacgcac

SEQ ID NO: 3425926 - DNA, 25 bp, Homo sapien
aagcctcggccccataaggcccacg

SEQ ID NO: 3425927 - DNA, 25 bp, Homo sapien
tgggacagcccctggaggcgtctgg

SEQ ID NO: 3425928 - DNA, 25 bp, Homo sapien
gggacagcccctggaggcgtctggg

SEQ ID NO: 3425929 - DNA, 25 bp, Homo sapien
gggtctgggacagcccctggaggcg

SEQ ID NO: 3425930 - DNA, 25 bp, Homo sapien
tctgggacagcccctggaggcgtct

SEQ ID NO: 3425931 - DNA, 25 bp, Homo sapien
cactccagggcgctccatctccagc

SEQ ID NO: 3425932 - DNA, 25 bp, Homo sapien
tgcgttgttcccgtcgactgctggt

SEQ ID NO: 3425933 - DNA, 25 bp, Homo sapien
caggagtctgaggagccggctttct

SEQ ID NO: 3425934 - DNA, 25 bp, Homo sapien
accagggcccggtcaggctgggtca

SEQ ID NO: 3425935 - DNA, 25 bp, Homo sapien
ttgctaggccgtagcagggccaagt

SEQ ID NO: 3425936 - DNA, 25 bp, Homo sapien
aatgaccgtgtcaaaggaacgcagc

SEQ ID NO: 3425937 - DNA, 25 bp, Homo sapien
agggccaagtccttgggccgcacga

SEQ ID NO: 3425938 - DNA, 25 bp, Homo sapien
tggcgtccctgctccaatgaccgtg

SEQ ID NO: 3425939 - DNA, 25 bp, Homo sapien
cacgggcatgtgttttagcgctggc

SEQ ID NO: 3425940 - DNA, 25 bp, Homo sapien
tgtcagtactgtagcggcgctgcga

SEQ ID NO: 3425941 - DNA, 25 bp, Homo sapien
taggcgtccgctgggtcccatatgg

SEQ ID NO: 3425942 - DNA, 25 bp, Homo sapien
ggcagcacaacaggctcactagcag

SEQ ID NO: 3425943 - DNA, 25 bp, Homo sapien
aacaaggatgacactgatcggccct

SEQ ID NO: 3425944 - DNA, 25 bp, Homo sapien
taagtgacagatgctcagacaaggc

SEQ ID NO: 3425945 - DNA, 25 bp, Homo sapien
tgttccgccagggagctaaaggcct

SEQ ID NO: 3425946 - DNA, 25 bp, Homo sapien
gagctaaaggcctagtacaaccacg

SEQ ID NO: 3425947 - DNA, 25 bp, Homo sapien
gtccgcctcacactgcttgagcggt

SEQ ID NO: 3425948 - DNA, 25 bp, Homo sapien
tgcttgagcggtcccgcctgccagt

SEQ ID NO: 3425949 - DNA, 25 bp, Homo sapien
tgcctgcattgtggcgtctccgaat

SEQ ID NO: 3425950 - DNA, 25 bp, Homo sapien
tggcgtctccgaatggcctgggtcc

SEQ ID NO: 3425951 - DNA, 25 bp, Homo sapien
gcgccagctagagcttgcgggccct

SEQ ID NO: 3425952 - DNA, 25 bp, Homo sapien
aggtcagcgccagctagagcttgcg

SEQ ID NO: 3425953 - DNA, 25 bp, Homo sapien
tcagcgccagctagagcttgcgggc

SEQ ID NO: 3425954 - DNA, 25 bp, Homo sapien
caggtcagcgccagctagagcttgc

SEQ ID NO: 3425955 - DNA, 25 bp, Homo sapien
caacagtgaagaggcgaaatgcagc

SEQ ID NO: 3425956 - DNA, 25 bp, Homo sapien
atgcacattggcaccggcccgggtg

SEQ ID NO: 3425957 - DNA, 25 bp, Homo sapien
tcatcaaaggtgcaggcctcatgca

SEQ ID NO: 3425958 - DNA, 25 bp, Homo sapien
tcgtagaaatagtgcacagcaccct

SEQ ID NO: 3425959 - DNA, 25 bp, Homo sapien
gcagcattagcagtgtacctgccac

SEQ ID NO: 3425960 - DNA, 25 bp, Homo sapien
gccaccgggcttgggaaaggctcac

SEQ ID NO: 3425961 - DNA, 25 bp, Homo sapien
agggccgagcgagcaccactgctag

SEQ ID NO: 3425962 - DNA, 25 bp, Homo sapien
ccactgctaggaggactcaggctgt

SEQ ID NO: 3425963 - DNA, 25 bp, Homo sapien
caggctccattagctgtctgctccc

SEQ ID NO: 3425964 - DNA, 25 bp, Homo sapien
tgctgccctacagggttctcgtagc

SEQ ID NO: 3425965 - DNA, 25 bp, Homo sapien
aggctccattagctgtctgctcccc

SEQ ID NO: 3425966 - DNA, 25 bp, Homo sapien
caggttcaggccgcctgtagcctca

SEQ ID NO: 3425967 - DNA, 25 bp, Homo sapien
agctggaggaatgcgagtgtcggtc

SEQ ID NO: 3425968 - DNA, 25 bp, Homo sapien
ggcgcacctgcatgccctgcagaac

SEQ ID NO: 3425969 - DNA, 25 bp, Homo sapien
agcctcagggacatcagccgagtgg

SEQ ID NO: 3425970 - DNA, 25 bp, Homo sapien
gcaagctctctatgcaggccggact

SEQ ID NO: 3425971 - DNA, 25 bp, Homo sapien
taagctctaagatggcgtttcacgc

SEQ ID NO: 3425972 - DNA, 25 bp, Homo sapien
catcaaagatcaggacagacacagt

SEQ ID NO: 3425973 - DNA, 25 bp, Homo sapien
tgcacagtgtatgcagggcagcaca

SEQ ID NO: 3425974 - DNA, 25 bp, Homo sapien
catcagcacataaaggcccctgtct

SEQ ID NO: 3425975 - DNA, 25 bp, Homo sapien
cccttcagcacaccggtctggttga

SEQ ID NO: 3425976 - DNA, 25 bp, Homo sapien
cttcatctgaaagggctcctcctct

SEQ ID NO: 3425977 - DNA, 25 bp, Homo sapien
aggttcccaggacgtcgcccagtgg

SEQ ID NO: 3425978 - DNA, 25 bp, Homo sapien
cccggggtggcgcttcttccatcag

SEQ ID NO: 3425979 - DNA, 25 bp, Homo sapien
tgggcccggggtggcgcttcttcca

SEQ ID NO: 3425980 - DNA, 25 bp, Homo sapien
cggggtggcgcttcttccatcagtg

SEQ ID NO: 3425981 - DNA, 25 bp, Homo sapien
ggcccggggtggcgcttcttccatc

SEQ ID NO: 3425982 - DNA, 25 bp, Homo sapien
ccagcagggcaagccgctcatagcg

SEQ ID NO: 3425983 - DNA, 25 bp, Homo sapien
ccgctcatagcgcacagaggtccag

SEQ ID NO: 3425984 - DNA, 25 bp, Homo sapien
atagcgcacagaggtccagcggcca

SEQ ID NO: 3425985 - DNA, 25 bp, Homo sapien
agggcaagccgctcatagcgcacag

SEQ ID NO: 3425986 - DNA, 25 bp, Homo sapien
aatgaaccatagaaaccaccactgc

SEQ ID NO: 3425987 - DNA, 25 bp, Homo sapien
ggccacccctttacaccacaaatga

SEQ ID NO: 3425988 - DNA, 25 bp, Homo sapien
gatttaatacagcaccacccacttg

SEQ ID NO: 3425989 - DNA, 25 bp, Homo sapien
cagccaacgacaggccctcagcttc

SEQ ID NO: 3425990 - DNA, 25 bp, Homo sapien
aggcgatgaccaggcagaactggaa

SEQ ID NO: 3425991 - DNA, 25 bp, Homo sapien
tgctcaggcccacgccgaagatgtt

SEQ ID NO: 3425992 - DNA, 25 bp, Homo sapien
gctgctcaggcccacgccgaagatg

SEQ ID NO: 3425993 - DNA, 25 bp, Homo sapien
ggcccacgccgaagatgttctccag

SEQ ID NO: 3425994 - DNA, 25 bp, Homo sapien
gggacgccgcatcaggctgcacgct

SEQ ID NO: 3425995 - DNA, 25 bp, Homo sapien
gtgcatgggggacgccgcatcaggc

SEQ ID NO: 3425996 - DNA, 25 bp, Homo sapien
gggggacgccgcatcaggctgcacg

SEQ ID NO: 3425997 - DNA, 25 bp, Homo sapien
tgcatgggggacgccgcatcaggct

SEQ ID NO: 3425998 - DNA, 25 bp, Homo sapien
tgtacgcgatcacccagttgtggcc

SEQ ID NO: 3425999 - DNA, 25 bp, Homo sapien
tgcagaagtagacaggacggctgta

SEQ ID NO: 3426000 - DNA, 25 bp, Homo sapien
acggctgtacgcgatcacccagttg

SEQ ID NO: 3426001 - DNA, 25 bp, Homo sapien
tagacaggacggctgtacgcgatca

SEQ ID NO: 3426002 - DNA, 25 bp, Homo sapien
cagtggccacgtctcgggcacagaa

SEQ ID NO: 3426003 - DNA, 25 bp, Homo sapien
gtggccacgtctcgggcacagaaga

SEQ ID NO: 3426004 - DNA, 25 bp, Homo sapien
cgtgaggccgtagagggagacaggt

SEQ ID NO: 3426005 - DNA, 25 bp, Homo sapien
aggcagagaagagcgtgaggccgta

SEQ ID NO: 3426006 - DNA, 25 bp, Homo sapien
acgaaggggaagcacagggtgaaca

SEQ ID NO: 3426007 - DNA, 25 bp, Homo sapien
gacgaaggggaagcacagggtgaac

SEQ ID NO: 3426008 - DNA, 25 bp, Homo sapien
gaggaagacgaaggggaagcacagg

SEQ ID NO: 3426009 - DNA, 25 bp, Homo sapien
gaagacgaaggggaagcacagggtg

SEQ ID NO: 3426010 - DNA, 25 bp, Homo sapien
gaagccgtgcatatctatttgctcc

SEQ ID NO: 3426011 - DNA, 25 bp, Homo sapien
ccccgaagccgtgcatatctatttg

SEQ ID NO: 3426012 - DNA, 25 bp, Homo sapien
agccgtgcatatctatttgctccag

SEQ ID NO: 3426013 - DNA, 25 bp, Homo sapien
tgtgcccccgaagccgtgcatatct

SEQ ID NO: 3426014 - DNA, 25 bp, Homo sapien
aggctgaagactgccgtgagcgggc

SEQ ID NO: 3426015 - DNA, 25 bp, Homo sapien
tgatggccccaaggcagaaaccgta

SEQ ID NO: 3426016 - DNA, 25 bp, Homo sapien
aaggcagaaaccgtagagcagggca

SEQ ID NO: 3426017 - DNA, 25 bp, Homo sapien
tgaagactgccgtgagcgggctggt

SEQ ID NO: 3426018 - DNA, 25 bp, Homo sapien
gaggacagggacgtgctgctctggc

SEQ ID NO: 3426019 - DNA, 25 bp, Homo sapien
gaagaggacagggacgtgctgctct

SEQ ID NO: 3426020 - DNA, 25 bp, Homo sapien
ggacagggacgtgctgctctggcca

SEQ ID NO: 3426021 - DNA, 25 bp, Homo sapien
aagaggacagggacgtgctgctctg

SEQ ID NO: 3426022 - DNA, 25 bp, Homo sapien
cagggaacagcttgctccggatcag

SEQ ID NO: 3426023 - DNA, 25 bp, Homo sapien
gaacagcttgctccggatcagagac

SEQ ID NO: 3426024 - DNA, 25 bp, Homo sapien
actggcgcatcttgtccggcaaggg

SEQ ID NO: 3426025 - DNA, 25 bp, Homo sapien
accgactggcgcatcttgtccggca

SEQ ID NO: 3426026 - DNA, 25 bp, Homo sapien
ccacacacatcaccaggtcggagtg

SEQ ID NO: 3426027 - DNA, 25 bp, Homo sapien
cagggcaataaagacggtgctggcg

SEQ ID NO: 3426028 - DNA, 25 bp, Homo sapien
aataaagacggtgctggcgctgatg

SEQ ID NO: 3426029 - DNA, 25 bp, Homo sapien
cacacacatcaccaggtcggagtgc

SEQ ID NO: 3426030 - DNA, 25 bp, Homo sapien
cagggcagctgtttgcggagttgtg

SEQ ID NO: 3426031 - DNA, 25 bp, Homo sapien
tttgcggagttgtggcagcaggtaa

SEQ ID NO: 3426032 - DNA, 25 bp, Homo sapien
agtgcgtacaacacgaaacccagca

SEQ ID NO: 3426033 - DNA, 25 bp, Homo sapien
agcggcttcagcacgggctgtgaca

SEQ ID NO: 3426034 - DNA, 25 bp, Homo sapien
cagctcaaatgggagcagcgagccc

SEQ ID NO: 3426035 - DNA, 25 bp, Homo sapien
tgagtgcacagtgagcccgtgagct

SEQ ID NO: 3426036 - DNA, 25 bp, Homo sapien
aaacacctacgtacagcaggctggc

SEQ ID NO: 3426037 - DNA, 25 bp, Homo sapien
gaagtccttccctaggagggcaggc

SEQ ID NO: 3426038 - DNA, 25 bp, Homo sapien
actgcaggccagcatacagcttctc

SEQ ID NO: 3426039 - DNA, 25 bp, Homo sapien
cgtccaccgtgagggcgttgagcac

SEQ ID NO: 3426040 - DNA, 25 bp, Homo sapien
tacttgtccgggtggctgacgactg

SEQ ID NO: 3426041 - DNA, 25 bp, Homo sapien
tgacgactgtgtgggcgtccaccgt

SEQ ID NO: 3426042 - DNA, 25 bp, Homo sapien
gtgggcaaggggcaggcatcgggtg

SEQ ID NO: 3426043 - DNA, 25 bp, Homo sapien
tgtgggcaaggggcaggcatcgggt

SEQ ID NO: 3426044 - DNA, 25 bp, Homo sapien
ctgtgggcaaggggcaggcatcggg

SEQ ID NO: 3426045 - DNA, 25 bp, Homo sapien
gtgaaggccaacgtcaggtactgct

SEQ ID NO: 3426046 - DNA, 25 bp, Homo sapien
cgcgggtagtcaaagtggaagagca

SEQ ID NO: 3426047 - DNA, 25 bp, Homo sapien
ttcagcccagccacggtcatcagca

SEQ ID NO: 3426048 - DNA, 25 bp, Homo sapien
gaggaagtagtcaagcagaaagccc

SEQ ID NO: 3426049 - DNA, 25 bp, Homo sapien
acaggccctcaggaaattctcttcc

SEQ ID NO: 3426050 - DNA, 25 bp, Homo sapien
tctggaagcctgaggcaagtccctc

SEQ ID NO: 3426051 - DNA, 25 bp, Homo sapien
tctctgtagagggtggaagtaaccc

SEQ ID NO: 3426052 - DNA, 25 bp, Homo sapien
gctgcaaaggcccacggggctgata

SEQ ID NO: 3426053 - DNA, 25 bp, Homo sapien
ggcaaaagcgtggaaagccgagccc

SEQ ID NO: 3426054 - DNA, 25 bp, Homo sapien
aggtgatctgccagggcgcgatgta

SEQ ID NO: 3426055 - DNA, 25 bp, Homo sapien
ggcgcgatgtaggtcagcacgaaac

SEQ ID NO: 3426056 - DNA, 25 bp, Homo sapien
aacgcagcttgtacagcaagtccca

SEQ ID NO: 3426057 - DNA, 25 bp, Homo sapien
acggcactgcctagcagtgggttga

SEQ ID NO: 3426058 - DNA, 25 bp, Homo sapien
ttgtagtcgcgctcccagaacttga

SEQ ID NO: 3426059 - DNA, 25 bp, Homo sapien
cgtaggacatgatgaagacggcact

SEQ ID NO: 3426060 - DNA, 25 bp, Homo sapien
gcctggacgaacagcatggccgagt

SEQ ID NO: 3426061 - DNA, 25 bp, Homo sapien
agagtgcaacaaggcggttggccaa

SEQ ID NO: 3426062 - DNA, 25 bp, Homo sapien
tgcaacaaggcggttggccaagaag

SEQ ID NO: 3426063 - DNA, 25 bp, Homo sapien
gagagagtgcaacaaggcggttggc

SEQ ID NO: 3426064 - DNA, 25 bp, Homo sapien
caacaaggcggttggccaagaaggt

SEQ ID NO: 3426065 - DNA, 25 bp, Homo sapien
gctgtgtgaccaggcgggtgttgga

SEQ ID NO: 3426066 - DNA, 25 bp, Homo sapien
tgaccaggcgggtgttggaatgatc

SEQ ID NO: 3426067 - DNA, 25 bp, Homo sapien
agctgtgtgaccaggcgggtgttgg

SEQ ID NO: 3426068 - DNA, 25 bp, Homo sapien
caggcgggtgttggaatgatccaca

SEQ ID NO: 3426069 - DNA, 25 bp, Homo sapien
caccagggcgttgaggtagtcagag

SEQ ID NO: 3426070 - DNA, 25 bp, Homo sapien
gaagcagtcaccagggccatagttg

SEQ ID NO: 3426071 - DNA, 25 bp, Homo sapien
tgtgctgcagcgaacgtgtcaagtg

SEQ ID NO: 3426072 - DNA, 25 bp, Homo sapien
ggccattgccaacctcgatgaggtg

SEQ ID NO: 3426073 - DNA, 25 bp, Homo sapien
gaggtcgaaaacctgcagcatggag

SEQ ID NO: 3426074 - DNA, 25 bp, Homo sapien
tatagccctccagcacgtacttgct

SEQ ID NO: 3426075 - DNA, 25 bp, Homo sapien
catagtaggtgatgaggatcttgcg

SEQ ID NO: 3426076 - DNA, 25 bp, Homo sapien
tattgtcactaatgctatagccctc

SEQ ID NO: 3426077 - DNA, 25 bp, Homo sapien
ctgctgcccggccacacctgcccac

SEQ ID NO: 3426078 - DNA, 25 bp, Homo sapien
ccgcaagggccctgctgcccggcca

SEQ ID NO: 3426079 - DNA, 25 bp, Homo sapien
gcccggccacacctgcccaccgtac

SEQ ID NO: 3426080 - DNA, 25 bp, Homo sapien
gctgcccggccacacctgcccaccg

SEQ ID NO: 3426081 - DNA, 25 bp, Homo sapien
ggccaggtagcagcaggagctggtg

SEQ ID NO: 3426082 - DNA, 25 bp, Homo sapien
gtgggccaggtagcagcaggagctg

SEQ ID NO: 3426083 - DNA, 25 bp, Homo sapien
caggtagcagcaggagctggtgttc

SEQ ID NO: 3426084 - DNA, 25 bp, Homo sapien
ccaggtagcagcaggagctggtgtt

SEQ ID NO: 3426085 - DNA, 25 bp, Homo sapien
cagtactggatccactcgaggtgca

SEQ ID NO: 3426086 - DNA, 25 bp, Homo sapien
cactcagcgagaaggtgggatccga

SEQ ID NO: 3426087 - DNA, 25 bp, Homo sapien
cctccagctttggtgagcggctcac

SEQ ID NO: 3426088 - DNA, 25 bp, Homo sapien
gacaggcggaggtcatagtcctcat

SEQ ID NO: 3426089 - DNA, 25 bp, Homo sapien
gtgaccagcggggagttccaatcct

SEQ ID NO: 3426090 - DNA, 25 bp, Homo sapien
cttgcagacatgctgtgagaggctg

SEQ ID NO: 3426091 - DNA, 25 bp, Homo sapien
cacagcgtgaccagcggggagttcc

SEQ ID NO: 3426092 - DNA, 25 bp, Homo sapien
gaccagcggggagttccaatcctgg

SEQ ID NO: 3426093 - DNA, 25 bp, Homo sapien
acaacgcggtgaagcaggtccatgt

SEQ ID NO: 3426094 - DNA, 25 bp, Homo sapien
cgtgcaggccgtagaggaagggctc

SEQ ID NO: 3426095 - DNA, 25 bp, Homo sapien
tgagggccatgcgaaccccaggcgc

SEQ ID NO: 3426096 - DNA, 25 bp, Homo sapien
gaggtgatgcgaaaatcccccttga

SEQ ID NO: 3426097 - DNA, 25 bp, Homo sapien
ctgcccatgctgctgggcacacccc

SEQ ID NO: 3426098 - DNA, 25 bp, Homo sapien
tgctgctgggcacacccctccccaa

SEQ ID NO: 3426099 - DNA, 25 bp, Homo sapien
gcccatgctgctgggcacacccctc

SEQ ID NO: 3426100 - DNA, 25 bp, Homo sapien
catgctgctgggcacacccctcccc

SEQ ID NO: 3426101 - DNA, 25 bp, Homo sapien
tcatgtgagatgaccagccgctcct

SEQ ID NO: 3426102 - DNA, 25 bp, Homo sapien
cctcgttggccgcaatggcatcgta

SEQ ID NO: 3426103 - DNA, 25 bp, Homo sapien
aatggcatcgtatagggctgctggc

SEQ ID NO: 3426104 - DNA, 25 bp, Homo sapien
tgtactcgtcggaggcatcatccag

SEQ ID NO: 3426105 - DNA, 25 bp, Homo sapien
cacacgccagggtcagggggccggc

SEQ ID NO: 3426106 - DNA, 25 bp, Homo sapien
agagccacacgccagggtcaggggg

SEQ ID NO: 3426107 - DNA, 25 bp, Homo sapien
agccacacgccagggtcagggggcc

SEQ ID NO: 3426108 - DNA, 25 bp, Homo sapien
gagagccacacgccagggtcagggg

SEQ ID NO: 3426109 - DNA, 25 bp, Homo sapien
ttgcggttgcgcaggaacaccagct

SEQ ID NO: 3426110 - DNA, 25 bp, Homo sapien
gcctgcttggcgttctggatgctgc

SEQ ID NO: 3426111 - DNA, 25 bp, Homo sapien
gagttgatcatgttgcgaagcgcct

SEQ ID NO: 3426112 - DNA, 25 bp, Homo sapien
gctggtcacaggaggagttgatcat

SEQ ID NO: 3426113 - DNA, 25 bp, Homo sapien
cagtctgaatcatccacgttcccgc

SEQ ID NO: 3426114 - DNA, 25 bp, Homo sapien
acgttcccgccactattgcagccgg

SEQ ID NO: 3426115 - DNA, 25 bp, Homo sapien
ggttattgctgagggaggtcaggcc

SEQ ID NO: 3426116 - DNA, 25 bp, Homo sapien
cgtgttctcaggtgtggggtgtgcc

SEQ ID NO: 3426117 - DNA, 25 bp, Homo sapien
ggggccgcccatcaccagagccact

SEQ ID NO: 3426118 - DNA, 25 bp, Homo sapien
tgtggggataggcgatgcagggggt

SEQ ID NO: 3426119 - DNA, 25 bp, Homo sapien
ggtgggggccgcccatcaccagagc

SEQ ID NO: 3426120 - DNA, 25 bp, Homo sapien
agccactcagggaggaccgcggccc

SEQ ID NO: 3426121 - DNA, 25 bp, Homo sapien
ctccactttccactggggccctcag

SEQ ID NO: 3426122 - DNA, 25 bp, Homo sapien
tcagtgctgacatcggggctgaggc

SEQ ID NO: 3426123 - DNA, 25 bp, Homo sapien
cagtgctgacatcggggctgaggct

SEQ ID NO: 3426124 - DNA, 25 bp, Homo sapien
cacgctcctcaataggggcaggcca

SEQ ID NO: 3426125 - DNA, 25 bp, Homo sapien
gggcactgctgtccaagcaaggaat

SEQ ID NO: 3426126 - DNA, 25 bp, Homo sapien
ggctgggctgccgggctctcacgct

SEQ ID NO: 3426127 - DNA, 25 bp, Homo sapien
aggccagtcgcccagggcacccata

SEQ ID NO: 3426128 - DNA, 25 bp, Homo sapien
tactgaatcctaggaggtggtccag

SEQ ID NO: 3426129 - DNA, 25 bp, Homo sapien
gttttggtactctggccaaggcagc

SEQ ID NO: 3426130 - DNA, 25 bp, Homo sapien
ggttcagacatgtaggccaaagcca

SEQ ID NO: 3426131 - DNA, 25 bp, Homo sapien
cagcagagcaggtccgttactgaat

SEQ ID NO: 3426132 - DNA, 25 bp, Homo sapien
cccgcgctggggtcccgctgccgct

SEQ ID NO: 3426133 - DNA, 25 bp, Homo sapien
cgcgctggggtcccgctgccgctct

SEQ ID NO: 3426134 - DNA, 25 bp, Homo sapien
ccgcgctggggtcccgctgccgctc

SEQ ID NO: 3426135 - DNA, 25 bp, Homo sapien
gcgctggggtcccgctgccgctctc

SEQ ID NO: 3426136 - DNA, 25 bp, Homo sapien
ctcatctctaaaatggggttaactg

SEQ ID NO: 3426137 - DNA, 25 bp, Homo sapien
ccgggtgcggtggctgtggcctgta

SEQ ID NO: 3426138 - DNA, 25 bp, Homo sapien
catctctaaaatggggttaactggc

SEQ ID NO: 3426139 - DNA, 25 bp, Homo sapien
ttctcatctctaaaatggggttaac

SEQ ID NO: 3426140 - DNA, 25 bp, Homo sapien
caagaggagtcacaatgacagggac

SEQ ID NO: 3426141 - DNA, 25 bp, Homo sapien
tgacagggacccatagggacctctg

SEQ ID NO: 3426142 - DNA, 25 bp, Homo sapien
tgacagatggtcagatgaggtccag

SEQ ID NO: 3426143 - DNA, 25 bp, Homo sapien
gaagcaattccgtgtcagagctagg

SEQ ID NO: 3426144 - DNA, 25 bp, Homo sapien
cttcttgcaggctactgtgcccagg

SEQ ID NO: 3426145 - DNA, 25 bp, Homo sapien
acaggaagtagccccaactgtgggc

SEQ ID NO: 3426146 - DNA, 25 bp, Homo sapien
cccagcttagctgggcaaggctaga

SEQ ID NO: 3426147 - DNA, 25 bp, Homo sapien
tggtcctccaccacccgtgttggct

SEQ ID NO: 3426148 - DNA, 25 bp, Homo sapien
gagaccatcaaagctgcttccgctt

SEQ ID NO: 3426149 - DNA, 25 bp, Homo sapien
tctgcctagggctaaagtttccagc

SEQ ID NO: 3426150 - DNA, 25 bp, Homo sapien
ctgaaggaggagggggctgctcaga

SEQ ID NO: 3426151 - DNA, 25 bp, Homo sapien
gaaggaggagggggctgctcagagg

SEQ ID NO: 3426152 - DNA, 25 bp, Homo sapien
aaggaggagggggctgctcagaggg

SEQ ID NO: 3426153 - DNA, 25 bp, Homo sapien
tgaaggaggagggggctgctcagag

SEQ ID NO: 3426154 - DNA, 25 bp, Homo sapien
cgggtgtttggtgcccagcctgagg

SEQ ID NO: 3426155 - DNA, 25 bp, Homo sapien
cgcattggcgggcacgggtgtttgg

SEQ ID NO: 3426156 - DNA, 25 bp, Homo sapien
gggcacgggtgtttggtgcccagcc

SEQ ID NO: 3426157 - DNA, 25 bp, Homo sapien
tctgtgggcctgactctccgggggc

SEQ ID NO: 3426158 - DNA, 25 bp, Homo sapien
ccccacaccgccggcccacatgggc

SEQ ID NO: 3426159 - DNA, 25 bp, Homo sapien
cccacaccgccggcccacatgggca

SEQ ID NO: 3426160 - DNA, 25 bp, Homo sapien
ccacaccgccggcccacatgggcat

SEQ ID NO: 3426161 - DNA, 25 bp, Homo sapien
tgagacctcggagcccaatcaaaga

SEQ ID NO: 3426162 - DNA, 25 bp, Homo sapien
caggctttgcacgtcatagtgggca

SEQ ID NO: 3426163 - DNA, 25 bp, Homo sapien
tagtgggcaaaccatcgaggctcaa

SEQ ID NO: 3426164 - DNA, 25 bp, Homo sapien
gaagtatttgcggtagtagccagca

SEQ ID NO: 3426165 - DNA, 25 bp, Homo sapien
cgccctaggcttcatctcaccacca

SEQ ID NO: 3426166 - DNA, 25 bp, Homo sapien
gcgcatcactaagccccgccctagg

SEQ ID NO: 3426167 - DNA, 25 bp, Homo sapien
cccgctcgaccacgcgcatcactaa

SEQ ID NO: 3426168 - DNA, 25 bp, Homo sapien
agaaaacgattggtcccgccctctg

SEQ ID NO: 3426169 - DNA, 25 bp, Homo sapien
ctgcgtggtccgcacgatgacgcgg

SEQ ID NO: 3426170 - DNA, 25 bp, Homo sapien
cgtccatcccgaagaagttctgatg

SEQ ID NO: 3426171 - DNA, 25 bp, Homo sapien
cagcgactcgtccatcccgaagaag

SEQ ID NO: 3426172 - DNA, 25 bp, Homo sapien
tccgcacgatgacgcggtagctgtg

SEQ ID NO: 3426173 - DNA, 25 bp, Homo sapien
cagcgcgtcctccgagatggtgcca

SEQ ID NO: 3426174 - DNA, 25 bp, Homo sapien
gagatggtgccacggagtgtccgga

SEQ ID NO: 3426175 - DNA, 25 bp, Homo sapien
tccgtggtaccttgggtgaagctga

SEQ ID NO: 3426176 - DNA, 25 bp, Homo sapien
tccagtgtgagcagcgtccgtggta

SEQ ID NO: 3426177 - DNA, 25 bp, Homo sapien
tggcccgcccggcagtacaggatgc

SEQ ID NO: 3426178 - DNA, 25 bp, Homo sapien
ttttggtgtctagctgggcccggta

SEQ ID NO: 3426179 - DNA, 25 bp, Homo sapien
ggtcccgcctcctggttgttgtaca

SEQ ID NO: 3426180 - DNA, 25 bp, Homo sapien
tcaaagcctttgagccgcaccacat

SEQ ID NO: 3426181 - DNA, 25 bp, Homo sapien
gggtgtaaggcagcatcgtggacac

SEQ ID NO: 3426182 - DNA, 25 bp, Homo sapien
ctgctgctggttattaggggtgtaa

SEQ ID NO: 3426183 - DNA, 25 bp, Homo sapien
gagggagtgcgtgcctgtggaatcc

SEQ ID NO: 3426184 - DNA, 25 bp, Homo sapien
catgatctcgtggtcctggtatgtg

SEQ ID NO: 3426185 - DNA, 25 bp, Homo sapien
tgtaggtggtgtgtggcgtgcaggg

SEQ ID NO: 3426186 - DNA, 25 bp, Homo sapien
tcacaatgtcgttgccaatgtggcg

SEQ ID NO: 3426187 - DNA, 25 bp, Homo sapien
gtgtgtgcccgcaccactaggaaca

SEQ ID NO: 3426188 - DNA, 25 bp, Homo sapien
ggctcctggaacacgatggtcacaa

SEQ ID NO: 3426189 - DNA, 25 bp, Homo sapien
aggccgaagcgtgaagccgagtcca

SEQ ID NO: 3426190 - DNA, 25 bp, Homo sapien
tccagcgacgtagtggtcacctcgt

SEQ ID NO: 3426191 - DNA, 25 bp, Homo sapien
gctcaccattcagcgctttggccag

SEQ ID NO: 3426192 - DNA, 25 bp, Homo sapien
tgcgcgtggccatggcgtggaactg

SEQ ID NO: 3426193 - DNA, 25 bp, Homo sapien
cgcgccccgggcgccgcgcgcactc

SEQ ID NO: 3426194 - DNA, 25 bp, Homo sapien
ccccgggcgccgcgcgcactcccca

SEQ ID NO: 3426195 - DNA, 25 bp, Homo sapien
tgagccccggcggcgacccgcgccc

SEQ ID NO: 3426196 - DNA, 25 bp, Homo sapien
cgggcgccgcgcgcactccccacac

SEQ ID NO: 3426197 - DNA, 25 bp, Homo sapien
aattgaacactacgcggccgtcgcg

SEQ ID NO: 3426198 - DNA, 25 bp, Homo sapien
gcacgtcgcgacaggcgcaattgaa

SEQ ID NO: 3426199 - DNA, 25 bp, Homo sapien
ccgtcgaagcgcagcgtgatcgcct

SEQ ID NO: 3426200 - DNA, 25 bp, Homo sapien
ctgctgctcggagaaggtccaggcc

SEQ ID NO: 3426201 - DNA, 25 bp, Homo sapien
tgaagcgctccacgtgcgtgacgaa

SEQ ID NO: 3426202 - DNA, 25 bp, Homo sapien
cttgggcgccgagcgcaggagctgg

SEQ ID NO: 3426203 - DNA, 25 bp, Homo sapien
gacggtgacgcagaccttgggcgcc

SEQ ID NO: 3426204 - DNA, 25 bp, Homo sapien
ccgtctcggcgaatgtgaagcgctc

SEQ ID NO: 3426205 - DNA, 25 bp, Homo sapien
tcttttaagcagtgggagcaacgcg

SEQ ID NO: 3426206 - DNA, 25 bp, Homo sapien
tatgaagatagaggttcagggcgcg

SEQ ID NO: 3426207 - DNA, 25 bp, Homo sapien
ctacccctggcttagcacaggaagt

SEQ ID NO: 3426208 - DNA, 25 bp, Homo sapien
gcgcttaactggtcccattctacat

SEQ ID NO: 3426209 - DNA, 25 bp, Homo sapien
tcctgcagcgacagcgtgtacagct

SEQ ID NO: 3426210 - DNA, 25 bp, Homo sapien
cagcgtgtacagctccgaaaaactc

SEQ ID NO: 3426211 - DNA, 25 bp, Homo sapien
tgcgtggtgacagcgagttctggct

SEQ ID NO: 3426212 - DNA, 25 bp, Homo sapien
ctggctgtgcaggaactcagtcctc

SEQ ID NO: 3426213 - DNA, 25 bp, Homo sapien
gggtggctcagaaagggaagccgct

SEQ ID NO: 3426214 - DNA, 25 bp, Homo sapien
tcagaaagggaagccgctttcccag

SEQ ID NO: 3426215 - DNA, 25 bp, Homo sapien
ggctcagaaagggaagccgctttcc

SEQ ID NO: 3426216 - DNA, 25 bp, Homo sapien
gtggctcagaaagggaagccgcttt

SEQ ID NO: 3426217 - DNA, 25 bp, Homo sapien
gactggggcctcatccgacagagag

SEQ ID NO: 3426218 - DNA, 25 bp, Homo sapien
agcactgggtactgatggcttggct

SEQ ID NO: 3426219 - DNA, 25 bp, Homo sapien
caggactggggcctcatccgacaga

SEQ ID NO: 3426220 - DNA, 25 bp, Homo sapien
cactgggtactgatggcttggctgt

SEQ ID NO: 3426221 - DNA, 25 bp, Homo sapien
tggatacagattcagtgatgcccac

SEQ ID NO: 3426222 - DNA, 25 bp, Homo sapien
acagattcagtgatgcccactgtca

SEQ ID NO: 3426223 - DNA, 25 bp, Homo sapien
cagaagtggatacagattcagtgat

SEQ ID NO: 3426224 - DNA, 25 bp, Homo sapien
aagtggatacagattcagtgatgcc

SEQ ID NO: 3426225 - DNA, 25 bp, Homo sapien
ttccgcagagacaaggtacgtggca

SEQ ID NO: 3426226 - DNA, 25 bp, Homo sapien
tccgcagagacaaggtacgtggcag

SEQ ID NO: 3426227 - DNA, 25 bp, Homo sapien
cgcagagacaaggtacgtggcagaa

SEQ ID NO: 3426228 - DNA, 25 bp, Homo sapien
cagagacaaggtacgtggcagaaag

SEQ ID NO: 3426229 - DNA, 25 bp, Homo sapien
tgttgcaagtagaggcaatctccga

SEQ ID NO: 3426230 - DNA, 25 bp, Homo sapien
tccagaatggtgttgcaagtagagg

SEQ ID NO: 3426231 - DNA, 25 bp, Homo sapien
tagaggcaatctccgagatggcctg

SEQ ID NO: 3426232 - DNA, 25 bp, Homo sapien
cagaatggtgttgcaagtagaggca

SEQ ID NO: 3426233 - DNA, 25 bp, Homo sapien
tggagttcccttagggtctccactc

SEQ ID NO: 3426234 - DNA, 25 bp, Homo sapien
gagttcccttagggtctccactctc

SEQ ID NO: 3426235 - DNA, 25 bp, Homo sapien
agttcccttagggtctccactctct

SEQ ID NO: 3426236 - DNA, 25 bp, Homo sapien
gcagtgcaccagctgactcccagcc

SEQ ID NO: 3426237 - DNA, 25 bp, Homo sapien
gggggcagtgcaccagctgactccc

SEQ ID NO: 3426238 - DNA, 25 bp, Homo sapien
ctaatgagaggggccccgctggtct

SEQ ID NO: 3426239 - DNA, 25 bp, Homo sapien
gctaatgagaggggccccgctggtc

SEQ ID NO: 3426240 - DNA, 25 bp, Homo sapien
ttcctgagcatggactccaagtgag

SEQ ID NO: 3426241 - DNA, 25 bp, Homo sapien
catggactccaagtgagagaccttc

SEQ ID NO: 3426242 - DNA, 25 bp, Homo sapien
tgagagaccttctctgagaggttcc

SEQ ID NO: 3426243 - DNA, 25 bp, Homo sapien
gagaccttctctgagaggttcccag

SEQ ID NO: 3426244 - DNA, 25 bp, Homo sapien
gcagccgccggttgttgtgtctcag

SEQ ID NO: 3426245 - DNA, 25 bp, Homo sapien
ttgttgtgtctcaggctccgcacct

SEQ ID NO: 3426246 - DNA, 25 bp, Homo sapien
tggctgcactctcagactccgcctg

SEQ ID NO: 3426247 - DNA, 25 bp, Homo sapien
caggaggaggcgtgtggctgcactc

SEQ ID NO: 3426248 - DNA, 25 bp, Homo sapien
ggcagtgctaagacacgcctctgcg

SEQ ID NO: 3426249 - DNA, 25 bp, Homo sapien
catcagtggcttttttactccctga

SEQ ID NO: 3426250 - DNA, 25 bp, Homo sapien
cctctgcgcagggagagttcctgag

SEQ ID NO: 3426251 - DNA, 25 bp, Homo sapien
ggtggaggccacttccgccaccaaa

SEQ ID NO: 3426252 - DNA, 25 bp, Homo sapien
tcagcgagtctcctaggaacagaaa

SEQ ID NO: 3426253 - DNA, 25 bp, Homo sapien
gaaaaggagttatcgtcagcgggac

SEQ ID NO: 3426254 - DNA, 25 bp, Homo sapien
tccgtcgaggaagtggcgttttcca

SEQ ID NO: 3426255 - DNA, 25 bp, Homo sapien
gggacgcgtcccaaaattcagcgag

SEQ ID NO: 3426256 - DNA, 25 bp, Homo sapien
gtcacatcaggccagacattggtgg

SEQ ID NO: 3426257 - DNA, 25 bp, Homo sapien
ttgccaagctggctagagatccgct

SEQ ID NO: 3426258 - DNA, 25 bp, Homo sapien
tgtgcctaacaccagcgtttgaggg

SEQ ID NO: 3426259 - DNA, 25 bp, Homo sapien
gataccagcccctgtatggcactgg

SEQ ID NO: 3426260 - DNA, 25 bp, Homo sapien
ccaaggtgggtatggactggcctta

SEQ ID NO: 3426261 - DNA, 25 bp, Homo sapien
tacaaaggtgtaggtggcaagctct

SEQ ID NO: 3426262 - DNA, 25 bp, Homo sapien
gattggcacccactggactataagc

SEQ ID NO: 3426263 - DNA, 25 bp, Homo sapien
aataaaacgaatctggagccccaag

SEQ ID NO: 3426264 - DNA, 25 bp, Homo sapien
tcctctaggacttgtgtttcacaca

SEQ ID NO: 3426265 - DNA, 25 bp, Homo sapien
cacagtggagtcagtgctgggttct

SEQ ID NO: 3426266 - DNA, 25 bp, Homo sapien
cagtaaagctggaatcttggtgccc

SEQ ID NO: 3426267 - DNA, 25 bp, Homo sapien
tggcagttcctatagaagagcagcg

SEQ ID NO: 3426268 - DNA, 25 bp, Homo sapien
acccgggagctagccgagccaccgg

SEQ ID NO: 3426269 - DNA, 25 bp, Homo sapien
ggcacgccagcctcttcgtcctcgg

SEQ ID NO: 3426270 - DNA, 25 bp, Homo sapien
ttcgtcctcggcgaggcgcgcactt

SEQ ID NO: 3426271 - DNA, 25 bp, Homo sapien
cgggacccgggagctagccgagcca

SEQ ID NO: 3426272 - DNA, 25 bp, Homo sapien
tgtaggctccgcaaagctcttgatg

SEQ ID NO: 3426273 - DNA, 25 bp, Homo sapien
gcttcagagacgaggctccgggatt

SEQ ID NO: 3426274 - DNA, 25 bp, Homo sapien
ctttagctggagagggacgagccct

SEQ ID NO: 3426275 - DNA, 25 bp, Homo sapien
tctgagacacaagcgccaggcttca

SEQ ID NO: 3426276 - DNA, 25 bp, Homo sapien
ctatcttcaggatgaataaacaaac

SEQ ID NO: 3426277 - DNA, 25 bp, Homo sapien
gcctatcttcaggatgaataaacaa

SEQ ID NO: 3426278 - DNA, 25 bp, Homo sapien
aaatgcctatcttcaggatgaataa

SEQ ID NO: 3426279 - DNA, 25 bp, Homo sapien
tgcctatcttcaggatgaataaaca

SEQ ID NO: 3426280 - DNA, 25 bp, Homo sapien
agcctgggccacaagagaggaactc

SEQ ID NO: 3426281 - DNA, 25 bp, Homo sapien
ctgggccacaagagaggaactccat

SEQ ID NO: 3426282 - DNA, 25 bp, Homo sapien
gcctgggccacaagagaggaactcc

SEQ ID NO: 3426283 - DNA, 25 bp, Homo sapien
cctgggccacaagagaggaactcca

SEQ ID NO: 3426284 - DNA, 25 bp, Homo sapien
cttggtccagtcacaatgctcctat

SEQ ID NO: 3426285 - DNA, 25 bp, Homo sapien
tggtccagtcacaatgctcctataa

SEQ ID NO: 3426286 - DNA, 25 bp, Homo sapien
ttggtccagtcacaatgctcctata

SEQ ID NO: 3426287 - DNA, 25 bp, Homo sapien
gagcaacgagtcatgccacagcatt

SEQ ID NO: 3426288 - DNA, 25 bp, Homo sapien
gcaacgagtcatgccacagcattcc

SEQ ID NO: 3426289 - DNA, 25 bp, Homo sapien
agtgagcaacgagtcatgccacagc

SEQ ID NO: 3426290 - DNA, 25 bp, Homo sapien
gcagtgagcaacgagtcatgccaca

SEQ ID NO: 3426291 - DNA, 25 bp, Homo sapien
aatagacatagggatcttgccatgt

SEQ ID NO: 3426292 - DNA, 25 bp, Homo sapien
gctatccgggtattccctgggctgg

SEQ ID NO: 3426293 - DNA, 25 bp, Homo sapien
tatcacactggtcatgcgtcaatgg

SEQ ID NO: 3426294 - DNA, 25 bp, Homo sapien
gatagggtggatccttttactcagt

SEQ ID NO: 3426295 - DNA, 25 bp, Homo sapien
caccagcaattcacaagtgtgccaa

SEQ ID NO: 3426296 - DNA, 25 bp, Homo sapien
tgtaatgtctcggagtctgaaggcc

SEQ ID NO: 3426297 - DNA, 25 bp, Homo sapien
tctatttgcgccctcagtggattcg

SEQ ID NO: 3426298 - DNA, 25 bp, Homo sapien
caggtgagccaatggtgtaatgtct

SEQ ID NO: 3426299 - DNA, 25 bp, Homo sapien
ccctcagtggattcgatgatggcca

SEQ ID NO: 3426300 - DNA, 25 bp, Homo sapien
acatcatggaacttcccggcagctg

SEQ ID NO: 3426301 - DNA, 25 bp, Homo sapien
gaacttcccggcagctgccaaaaat

SEQ ID NO: 3426302 - DNA, 25 bp, Homo sapien
ctgtgagtgccagccgctcatagct

SEQ ID NO: 3426303 - DNA, 25 bp, Homo sapien
atagctagcgacaggaacatcatgg

SEQ ID NO: 3426304 - DNA, 25 bp, Homo sapien
caggctggagtactgcggctgctca

SEQ ID NO: 3426305 - DNA, 25 bp, Homo sapien
gacttggacaggttcacccctctta

SEQ ID NO: 3426306 - DNA, 25 bp, Homo sapien
tggacccactcctttccgacttgga

SEQ ID NO: 3426307 - DNA, 25 bp, Homo sapien
ctagaactgtagacgtttgccacca

SEQ ID NO: 3426308 - DNA, 25 bp, Homo sapien
tcctcgggcgtctccttgtggcggc

SEQ ID NO: 3426309 - DNA, 25 bp, Homo sapien
ggtcacgtgtatgcggagcgggtca

SEQ ID NO: 3426310 - DNA, 25 bp, Homo sapien
gagcgggtcacgtggcaataccgtt

SEQ ID NO: 3426311 - DNA, 25 bp, Homo sapien
tgttgccgggagtcaactgggcgcg

SEQ ID NO: 3426312 - DNA, 25 bp, Homo sapien
aacggagtgttacaagcctcaggcc

SEQ ID NO: 3426313 - DNA, 25 bp, Homo sapien
cagtggcggtctactgagtccgtca

SEQ ID NO: 3426314 - DNA, 25 bp, Homo sapien
tcaggccgagccctaggtggaaacc

SEQ ID NO: 3426315 - DNA, 25 bp, Homo sapien
ggtggaaaccccataacgtgcacag

SEQ ID NO: 3426316 - DNA, 25 bp, Homo sapien
tccctccctccactgccacttccgg

SEQ ID NO: 3426317 - DNA, 25 bp, Homo sapien
tccctccactgccacttccggcccc

SEQ ID NO: 3426318 - DNA, 25 bp, Homo sapien
ttccctccctccactgccacttccg

SEQ ID NO: 3426319 - DNA, 25 bp, Homo sapien
cctccctccactgccacttccggcc

SEQ ID NO: 3426320 - DNA, 25 bp, Homo sapien
cagcgcgacgccagggtcggctact

SEQ ID NO: 3426321 - DNA, 25 bp, Homo sapien
ctggggagacagcgcgacgccaggg

SEQ ID NO: 3426322 - DNA, 25 bp, Homo sapien
gagacagcgcgacgccagggtcggc

SEQ ID NO: 3426323 - DNA, 25 bp, Homo sapien
gggagacagcgcgacgccagggtcg

SEQ ID NO: 3426324 - DNA, 25 bp, Homo sapien
ttcgttgtcctggttccgccgcagc

SEQ ID NO: 3426325 - DNA, 25 bp, Homo sapien
taggcggcagccctcgattatctcc

SEQ ID NO: 3426326 - DNA, 25 bp, Homo sapien
tccgccgcagcacgggtaggcggca

SEQ ID NO: 3426327 - DNA, 25 bp, Homo sapien
cactcatcttcgttgtcctggttcc

SEQ ID NO: 3426328 - DNA, 25 bp, Homo sapien
taagcctccttcagtcacaagtgcc

SEQ ID NO: 3426329 - DNA, 25 bp, Homo sapien
taagctccagcacttaggtctctcc

SEQ ID NO: 3426330 - DNA, 25 bp, Homo sapien
ccttagacaggccaggctatgagac

SEQ ID NO: 3426331 - DNA, 25 bp, Homo sapien
gctatgagactccacccttccacga

SEQ ID NO: 3426332 - DNA, 25 bp, Homo sapien
tcaatgtaatggacgtagaaaagct

SEQ ID NO: 3426333 - DNA, 25 bp, Homo sapien
aaagcttccggccactgatgtcctt

SEQ ID NO: 3426334 - DNA, 25 bp, Homo sapien
taatggacgtagaaaagcttccggc

SEQ ID NO: 3426335 - DNA, 25 bp, Homo sapien
gacgtagaaaagcttccggccactg

SEQ ID NO: 3426336 - DNA, 25 bp, Homo sapien
acccattcatccagacgtttgttga

SEQ ID NO: 3426337 - DNA, 25 bp, Homo sapien
aactggatcttctttaggtccagcc

SEQ ID NO: 3426338 - DNA, 25 bp, Homo sapien
tgcgtcacccattcatccagacgtt

SEQ ID NO: 3426339 - DNA, 25 bp, Homo sapien
tctttaggtccagccgctcatgcgt

SEQ ID NO: 3426340 - DNA, 25 bp, Homo sapien
gcggggatggcagtgggatggggaa

SEQ ID NO: 3426341 - DNA, 25 bp, Homo sapien
tggggcggggatggcagtgggatgg

SEQ ID NO: 3426342 - DNA, 25 bp, Homo sapien
ggggcggggatggcagtgggatggg

SEQ ID NO: 3426343 - DNA, 25 bp, Homo sapien
ctttggggcggggatggcagtggga

SEQ ID NO: 3426344 - DNA, 25 bp, Homo sapien
ctgtagagataggtccagggtcttc

SEQ ID NO: 3426345 - DNA, 25 bp, Homo sapien
tcaggctcgccaccgggaatggcct

SEQ ID NO: 3426346 - DNA, 25 bp, Homo sapien
gttgaagcggagtgtgatctggacc

SEQ ID NO: 3426347 - DNA, 25 bp, Homo sapien
tggaccgggattggcaaggtcttcc

SEQ ID NO: 3426348 - DNA, 25 bp, Homo sapien
agagcggctggtcaggctcgccacc

SEQ ID NO: 3426349 - DNA, 25 bp, Homo sapien
gaagaaagcaaggtccctggaattg

SEQ ID NO: 3426350 - DNA, 25 bp, Homo sapien
tgagaagaaagcaaggtccctggaa

SEQ ID NO: 3426351 - DNA, 25 bp, Homo sapien
gagaagaaagcaaggtccctggaat

SEQ ID NO: 3426352 - DNA, 25 bp, Homo sapien
agaaagcaaggtccctggaattgct

SEQ ID NO: 3426353 - DNA, 25 bp, Homo sapien
aaaggtgggtcagaaggtagagaag

SEQ ID NO: 3426354 - DNA, 25 bp, Homo sapien
ggtcagaaggtagagaaggtgggac

SEQ ID NO: 3426355 - DNA, 25 bp, Homo sapien
aggtgggtcagaaggtagagaaggt

SEQ ID NO: 3426356 - DNA, 25 bp, Homo sapien
caacaaaggtgggtcagaaggtaga

SEQ ID NO: 3426357 - DNA, 25 bp, Homo sapien
tggagttgctggtgaaaccacctcc

SEQ ID NO: 3426358 - DNA, 25 bp, Homo sapien
gggcactggagttgctggtgaaacc

SEQ ID NO: 3426359 - DNA, 25 bp, Homo sapien
cactggagttgctggtgaaaccacc

SEQ ID NO: 3426360 - DNA, 25 bp, Homo sapien
gcactggagttgctggtgaaaccac

SEQ ID NO: 3426361 - DNA, 25 bp, Homo sapien
catcagtgcccaaacaattcgattt

SEQ ID NO: 3426362 - DNA, 25 bp, Homo sapien
tcatcagtgcccaaacaattcgatt

SEQ ID NO: 3426363 - DNA, 25 bp, Homo sapien
acaattcgattttcgcttccgtcct

SEQ ID NO: 3426364 - DNA, 25 bp, Homo sapien
ttcgattttcgcttccgtcctggct

SEQ ID NO: 3426365 - DNA, 25 bp, Homo sapien
aagtaccacggcttgaggcggtgcc

SEQ ID NO: 3426366 - DNA, 25 bp, Homo sapien
tcaatgttcttcatccgggtgacga

SEQ ID NO: 3426367 - DNA, 25 bp, Homo sapien
ttcgatcagacaccaggctgccagt

SEQ ID NO: 3426368 - DNA, 25 bp, Homo sapien
tgacggtattccatcagagctgtcc

SEQ ID NO: 3426369 - DNA, 25 bp, Homo sapien
aaatgacgctgaagacacttgagac

SEQ ID NO: 3426370 - DNA, 25 bp, Homo sapien
tacttgaggcagaactcgcacaggt

SEQ ID NO: 3426371 - DNA, 25 bp, Homo sapien
gaactcgcacaggtagaggacaggc

SEQ ID NO: 3426372 - DNA, 25 bp, Homo sapien
cacttgagactacggccgtacttga

SEQ ID NO: 3426373 - DNA, 25 bp, Homo sapien
atcaggaacaagggcaacgtggagg

SEQ ID NO: 3426374 - DNA, 25 bp, Homo sapien
tctcaaagaaggagatggtgccctt

SEQ ID NO: 3426375 - DNA, 25 bp, Homo sapien
tgttcttacgtccatcaatctcaaa

SEQ ID NO: 3426376 - DNA, 25 bp, Homo sapien
ggtgcccttgcggtaaatctcattg

SEQ ID NO: 3426377 - DNA, 25 bp, Homo sapien
tcattgcctggaggatgtcgtaggt

SEQ ID NO: 3426378 - DNA, 25 bp, Homo sapien
tttacctgagcaagaagaagctgtc

SEQ ID NO: 3426379 - DNA, 25 bp, Homo sapien
ggtactgccacttggatgcccaggt

SEQ ID NO: 3426380 - DNA, 25 bp, Homo sapien
ggaattgctttttaaccgcctgctg

SEQ ID NO: 3426381 - DNA, 25 bp, Homo sapien
ggtaaccctctatgaagctctgctg

SEQ ID NO: 3426382 - DNA, 25 bp, Homo sapien
gaaaaggcttgtcaccactctgggt

SEQ ID NO: 3426383 - DNA, 25 bp, Homo sapien
cctggccagtggttcagggtcaacc

SEQ ID NO: 3426384 - DNA, 25 bp, Homo sapien
gctgctaggtgatgagtgttcttcc

SEQ ID NO: 3426385 - DNA, 25 bp, Homo sapien
ttcactgttcgtgctatgccccagg

SEQ ID NO: 3426386 - DNA, 25 bp, Homo sapien
gaaacacttggccaaaagacacagg

SEQ ID NO: 3426387 - DNA, 25 bp, Homo sapien
cagtgtcttatggtcaaggaaacac

SEQ ID NO: 3426388 - DNA, 25 bp, Homo sapien
gagaagtagcccacgatgtggaagc

SEQ ID NO: 3426389 - DNA, 25 bp, Homo sapien
tgtggaagcccttacagtcatactc

SEQ ID NO: 3426390 - DNA, 25 bp, Homo sapien
tgtagtcttccgttgattctttctc

SEQ ID NO: 3426391 - DNA, 25 bp, Homo sapien
gatcagcagcttgccgtagccccgg

SEQ ID NO: 3426392 - DNA, 25 bp, Homo sapien
cacattgtagtcttccgttgattct

SEQ ID NO: 3426393 - DNA, 25 bp, Homo sapien
tgcaggccacattgtagtcttccgt

SEQ ID NO: 3426394 - DNA, 25 bp, Homo sapien
gggttgagaatcacagtagcctggc

SEQ ID NO: 3426395 - DNA, 25 bp, Homo sapien
gagaatcacagtagcctggcccatc

SEQ ID NO: 3426396 - DNA, 25 bp, Homo sapien
ggcagtcagcctgaacggagagaac

SEQ ID NO: 3426397 - DNA, 25 bp, Homo sapien
tgaggcaccgatagtgggtccacta

SEQ ID NO: 3426398 - DNA, 25 bp, Homo sapien
agcatccacttgtgctaccaggctg

SEQ ID NO: 3426399 - DNA, 25 bp, Homo sapien
caagcatccacttgtgctaccaggc

SEQ ID NO: 3426400 - DNA, 25 bp, Homo sapien
ttcaagcatccacttgtgctaccag

SEQ ID NO: 3426401 - DNA, 25 bp, Homo sapien
gcatccacttgtgctaccaggctga

SEQ ID NO: 3426402 - DNA, 25 bp, Homo sapien
caactcgtgctgatagctggccgct

SEQ ID NO: 3426403 - DNA, 25 bp, Homo sapien
tgctgtaagacttgagtggcctgac

SEQ ID NO: 3426404 - DNA, 25 bp, Homo sapien
gagtattcactctttccgtgcgctg

SEQ ID NO: 3426405 - DNA, 25 bp, Homo sapien
tcaaccatgagggtgatcagaggcc

SEQ ID NO: 3426406 - DNA, 25 bp, Homo sapien
gaccagtagcttcgataggatagga

SEQ ID NO: 3426407 - DNA, 25 bp, Homo sapien
tagcttcgataggataggaggccaa

SEQ ID NO: 3426408 - DNA, 25 bp, Homo sapien
tttcccttccactttggagagttca

SEQ ID NO: 3426409 - DNA, 25 bp, Homo sapien
ctgggaccagtagcttcgataggat

SEQ ID NO: 3426410 - DNA, 25 bp, Homo sapien
cccaggtagacagcgccaggctcac

SEQ ID NO: 3426411 - DNA, 25 bp, Homo sapien
ccccaggtagacagcgccaggctca

SEQ ID NO: 3426412 - DNA, 25 bp, Homo sapien
ggttccctgaggacctttatctgtc

SEQ ID NO: 3426413 - DNA, 25 bp, Homo sapien
gttccctgaggacctttatctgtcc

SEQ ID NO: 3426414 - DNA, 25 bp, Homo sapien
cctgaggacctttatctgtccccag

SEQ ID NO: 3426415 - DNA, 25 bp, Homo sapien
tccctgaggacctttatctgtcccc

SEQ ID NO: 3426416 - DNA, 25 bp, Homo sapien
tagtagttgatgagattgaggtact

SEQ ID NO: 3426417 - DNA, 25 bp, Homo sapien
tggagatgacatcctccttcttgat

SEQ ID NO: 3426418 - DNA, 25 bp, Homo sapien
gttgatgagattgaggtactgcaga

SEQ ID NO: 3426419 - DNA, 25 bp, Homo sapien
ttgtagtagttgatgagattgaggt

SEQ ID NO: 3426420 - DNA, 25 bp, Homo sapien
agaggactgcactctgcatcccaca

SEQ ID NO: 3426421 - DNA, 25 bp, Homo sapien
gaggagatgggttcagcaggtggtc

SEQ ID NO: 3426422 - DNA, 25 bp, Homo sapien
gagatgggttcagcaggtggtcagc

SEQ ID NO: 3426423 - DNA, 25 bp, Homo sapien
agcccacagaggactgcactctgca

SEQ ID NO: 3426424 - DNA, 25 bp, Homo sapien
agtcgatccgcaggagccgcttgag

SEQ ID NO: 3426425 - DNA, 25 bp, Homo sapien
catccacgatgtcctctgacagtgt

SEQ ID NO: 3426426 - DNA, 25 bp, Homo sapien
agtgcagacacttggagtcgatccg

SEQ ID NO: 3426427 - DNA, 25 bp, Homo sapien
gccgcttgagcatggcccgctcatg

SEQ ID NO: 3426428 - DNA, 25 bp, Homo sapien
cttggagttggtctgagcccggagc

SEQ ID NO: 3426429 - DNA, 25 bp, Homo sapien
tgagcccggagctcgccttggtgct

SEQ ID NO: 3426430 - DNA, 25 bp, Homo sapien
tgctgccgtcttggcactgcagtgg

SEQ ID NO: 3426431 - DNA, 25 bp, Homo sapien
ggggtgggctatcagccccagtcct

SEQ ID NO: 3426432 - DNA, 25 bp, Homo sapien
agccctctgtacagagctcccccat

SEQ ID NO: 3426433 - DNA, 25 bp, Homo sapien
tagaaacaatttattgccgggggca

SEQ ID NO: 3426434 - DNA, 25 bp, Homo sapien
gatcccttctcactgtacacagctg

SEQ ID NO: 3426435 - DNA, 25 bp, Homo sapien
ggcaataggggtaagagaagccaga

SEQ ID NO: 3426436 - DNA, 25 bp, Homo sapien
tctgggtcaccgtgatggacacgat

SEQ ID NO: 3426437 - DNA, 25 bp, Homo sapien
taggcaggccgaaccagatgtagat

SEQ ID NO: 3426438 - DNA, 25 bp, Homo sapien
tggtgcctaggccactccagaagct

SEQ ID NO: 3426439 - DNA, 25 bp, Homo sapien
agagatggatgccttgtagggcttc

SEQ ID NO: 3426440 - DNA, 25 bp, Homo sapien
agcagactctggttcaccatgatgg

SEQ ID NO: 3426441 - DNA, 25 bp, Homo sapien
gggctcagcagactctggttcacca

SEQ ID NO: 3426442 - DNA, 25 bp, Homo sapien
gctcagcagactctggttcaccatg

SEQ ID NO: 3426443 - DNA, 25 bp, Homo sapien
tcagcagactctggttcaccatgat

SEQ ID NO: 3426444 - DNA, 25 bp, Homo sapien
acagcctggatattggggtccaggt

SEQ ID NO: 3426445 - DNA, 25 bp, Homo sapien
tgggtatgcacagcctggatattgg

SEQ ID NO: 3426446 - DNA, 25 bp, Homo sapien
agcctggatattggggtccaggtcc

SEQ ID NO: 3426447 - DNA, 25 bp, Homo sapien
cctgggtatgcacagcctggatatt

SEQ ID NO: 3426448 - DNA, 25 bp, Homo sapien
ggatgtggctctcaaacacgctgtc

SEQ ID NO: 3426449 - DNA, 25 bp, Homo sapien
tggatgtggctctcaaacacgctgt

SEQ ID NO: 3426450 - DNA, 25 bp, Homo sapien
cagctctctggggaagttgatcttg

SEQ ID NO: 3426451 - DNA, 25 bp, Homo sapien
catctctgtccgctcgttgatctca

SEQ ID NO: 3426452 - DNA, 25 bp, Homo sapien
tgtccgctcgttgatctcatcctgg

SEQ ID NO: 3426453 - DNA, 25 bp, Homo sapien
ctcatcctggtacttatcgttgaag

SEQ ID NO: 3426454 - DNA, 25 bp, Homo sapien
ctgttgtccatggacagcacacaga

SEQ ID NO: 3426455 - DNA, 25 bp, Homo sapien
tgttgtccatggacagcacacagac

SEQ ID NO: 3426456 - DNA, 25 bp, Homo sapien
cgcgatgatgccatccacgtccagg

SEQ ID NO: 3426457 - DNA, 25 bp, Homo sapien
gttgacctccgcgatgatgccatcc

SEQ ID NO: 3426458 - DNA, 25 bp, Homo sapien
gggcgttgacctccgcgatgatgcc

SEQ ID NO: 3426459 - DNA, 25 bp, Homo sapien
tgatgccatccacgtccagggagtg

SEQ ID NO: 3426460 - DNA, 25 bp, Homo sapien
gccgcagtgggcgatctcctcgtac

SEQ ID NO: 3426461 - DNA, 25 bp, Homo sapien
tggccgcagtgggcgatctcctcgt

SEQ ID NO: 3426462 - DNA, 25 bp, Homo sapien
ggccgcagtgggcgatctcctcgta

SEQ ID NO: 3426463 - DNA, 25 bp, Homo sapien
ctggccgcagtgggcgatctcctcg

SEQ ID NO: 3426464 - DNA, 25 bp, Homo sapien
tcagcatccgcgatggcctctgagg

SEQ ID NO: 3426465 - DNA, 25 bp, Homo sapien
cgagctcagctgtctacttaagcag

SEQ ID NO: 3426466 - DNA, 25 bp, Homo sapien
catggaccccgctgatgttgcggat

SEQ ID NO: 3426467 - DNA, 25 bp, Homo sapien
tgttgcggatcatctcagagttctc

SEQ ID NO: 3426468 - DNA, 25 bp, Homo sapien
aaccatggtcctggaggagctggtg

SEQ ID NO: 3426469 - DNA, 25 bp, Homo sapien
catggtcctggaggagctggtgcgg

SEQ ID NO: 3426470 - DNA, 25 bp, Homo sapien
cagcttcccaaccatggtcctggag

SEQ ID NO: 3426471 - DNA, 25 bp, Homo sapien
agcttcccaaccatggtcctggagg

SEQ ID NO: 3426472 - DNA, 25 bp, Homo sapien
tagttgttcgcttgggcaggacatc

SEQ ID NO: 3426473 - DNA, 25 bp, Homo sapien
gggactgccatagttgttcgcttgg

SEQ ID NO: 3426474 - DNA, 25 bp, Homo sapien
actgccatagttgttcgcttgggca

SEQ ID NO: 3426475 - DNA, 25 bp, Homo sapien
tgttccctgcgctttcctgcacagc

SEQ ID NO: 3426476 - DNA, 25 bp, Homo sapien
aaaaacacaacagccaagtgtggtg

SEQ ID NO: 3426477 - DNA, 25 bp, Homo sapien
aggtcaaggtaggaagatagcttga

SEQ ID NO: 3426478 - DNA, 25 bp, Homo sapien
ggaggtcaaggtaggaagatagctt

SEQ ID NO: 3426479 - DNA, 25 bp, Homo sapien
gaaaaaacacaacagccaagtgtgg

SEQ ID NO: 3426480 - DNA, 25 bp, Homo sapien
gataggttcatacagctattgcaaa

SEQ ID NO: 3426481 - DNA, 25 bp, Homo sapien
ggatcttgtaaaacacccaatacca

SEQ ID NO: 3426482 - DNA, 25 bp, Homo sapien
tgttgccagaagagggcgtgttatc

SEQ ID NO: 3426483 - DNA, 25 bp, Homo sapien
cacaaacctctgaaacaatagccat

SEQ ID NO: 3426484 - DNA, 25 bp, Homo sapien
cacccgccaataggggagcagacag

SEQ ID NO: 3426485 - DNA, 25 bp, Homo sapien
ggtgacagtctgagctcagctccat

SEQ ID NO: 3426486 - DNA, 25 bp, Homo sapien
tcccgggtgagtccggtgacagtct

SEQ ID NO: 3426487 - DNA, 25 bp, Homo sapien
ctgggccctcgactgggatgttgct

SEQ ID NO: 3426488 - DNA, 25 bp, Homo sapien
gtgcgagccggacggacgggttcac

SEQ ID NO: 3426489 - DNA, 25 bp, Homo sapien
agtgcgagccggacggacgggttca

SEQ ID NO: 3426490 - DNA, 25 bp, Homo sapien
cgagccggacggacgggttcacgct

SEQ ID NO: 3426491 - DNA, 25 bp, Homo sapien
gcgagccggacggacgggttcacgc

SEQ ID NO: 3426492 - DNA, 25 bp, Homo sapien
ggaatgtcgccgtcttccctgagaa

SEQ ID NO: 3426493 - DNA, 25 bp, Homo sapien
acaacagggaaggagtcgctaaggc

SEQ ID NO: 3426494 - DNA, 25 bp, Homo sapien
tccctgagaacgaggtcccttgcgg

SEQ ID NO: 3426495 - DNA, 25 bp, Homo sapien
cttccgtaactgaagccgggagccg

SEQ ID NO: 3426496 - DNA, 25 bp, Homo sapien
acggcttcttcaccaggaacgcgcg

SEQ ID NO: 3426497 - DNA, 25 bp, Homo sapien
tcctcttgcacgtggagacgcacgg

SEQ ID NO: 3426498 - DNA, 25 bp, Homo sapien
tcgtcggggagctcgctccagttcc

SEQ ID NO: 3426499 - DNA, 25 bp, Homo sapien
cacgtggagacgcacggcttcttca

SEQ ID NO: 3426500 - DNA, 25 bp, Homo sapien
cgcccgcccgcagcctcgacgccgc

SEQ ID NO: 3426501 - DNA, 25 bp, Homo sapien
cgcccgcccgcccgcagcctcgacg

SEQ ID NO: 3426502 - DNA, 25 bp, Homo sapien
ccgcccgcccgcagcctcgacgccg

SEQ ID NO: 3426503 - DNA, 25 bp, Homo sapien
cccgcccgcccgcagcctcgacgcc

SEQ ID NO: 3426504 - DNA, 25 bp, Homo sapien
gcctcatgcgagtcccggttttctg

SEQ ID NO: 3426505 - DNA, 25 bp, Homo sapien
ccaaagtggcatcgctccagtgcct

SEQ ID NO: 3426506 - DNA, 25 bp, Homo sapien
taacacaaatctcggccgaaactcc

SEQ ID NO: 3426507 - DNA, 25 bp, Homo sapien
tctggatttacgacgtcggagccga

SEQ ID NO: 3426508 - DNA, 25 bp, Homo sapien
caacagcttattcaggagggaaact

SEQ ID NO: 3426509 - DNA, 25 bp, Homo sapien
tccaacagcttattcaggagggaaa

SEQ ID NO: 3426510 - DNA, 25 bp, Homo sapien
tgtctccaacagcttattcaggagg

SEQ ID NO: 3426511 - DNA, 25 bp, Homo sapien
gagcaagagccctcacggggcccct

SEQ ID NO: 3426512 - DNA, 25 bp, Homo sapien
cagtttatcagatcccaaggagcag

SEQ ID NO: 3426513 - DNA, 25 bp, Homo sapien
ccaagttcagtttatcagatcccaa

SEQ ID NO: 3426514 - DNA, 25 bp, Homo sapien
taccacggtccaagttcagtttatc

SEQ ID NO: 3426515 - DNA, 25 bp, Homo sapien
cacggtccaagttcagtttatcaga

SEQ ID NO: 3426516 - DNA, 25 bp, Homo sapien
cactggaagtgtggcagagaaaata

SEQ ID NO: 3426517 - DNA, 25 bp, Homo sapien
ctgcacctgacaggaagcccctggg

SEQ ID NO: 3426518 - DNA, 25 bp, Homo sapien
cagcgggtggcctggaccacccaga

SEQ ID NO: 3426519 - DNA, 25 bp, Homo sapien
gggcatacgtctcccctgccacttc

SEQ ID NO: 3426520 - DNA, 25 bp, Homo sapien
aggcacggacaccgagggactgtgt

SEQ ID NO: 3426521 - DNA, 25 bp, Homo sapien
ggcagctgcccatcgaggcctgtct

SEQ ID NO: 3426522 - DNA, 25 bp, Homo sapien
agaggcacggacaccgagggactgt

SEQ ID NO: 3426523 - DNA, 25 bp, Homo sapien
gggcagctgcccatcgaggcctgtc

SEQ ID NO: 3426524 - DNA, 25 bp, Homo sapien
cccgaggcagacacctcacaccgaa

SEQ ID NO: 3426525 - DNA, 25 bp, Homo sapien
aggcagacacctcacaccgaacggg

SEQ ID NO: 3426526 - DNA, 25 bp, Homo sapien
cagccacgccccgaggcagacacct

SEQ ID NO: 3426527 - DNA, 25 bp, Homo sapien
acgccccgaggcagacacctcacac

SEQ ID NO: 3426528 - DNA, 25 bp, Homo sapien
ggaaacttccctagccatgagacgg

SEQ ID NO: 3426529 - DNA, 25 bp, Homo sapien
gtaatttgtgtcttagcggaactgg

SEQ ID NO: 3426530 - DNA, 25 bp, Homo sapien
cgccactgcccgctgagtaatttgt

SEQ ID NO: 3426531 - DNA, 25 bp, Homo sapien
tatccctccggagttttctgcctgc

SEQ ID NO: 3426532 - DNA, 25 bp, Homo sapien
gctagagtctcgaaggctcatgttc

SEQ ID NO: 3426533 - DNA, 25 bp, Homo sapien
ggggccatgctgtagctagagtctc

SEQ ID NO: 3426534 - DNA, 25 bp, Homo sapien
catgttcaaagccagcgggcaggaa

SEQ ID NO: 3426535 - DNA, 25 bp, Homo sapien
gttcggccacagagggttccggctc

SEQ ID NO: 3426536 - DNA, 25 bp, Homo sapien
atcttggtgcgcaggaagccatggt

SEQ ID NO: 3426537 - DNA, 25 bp, Homo sapien
cttggtgcgcaggaagccatggtct

SEQ ID NO: 3426538 - DNA, 25 bp, Homo sapien
cttcatcttggtgcgcaggaagcca

SEQ ID NO: 3426539 - DNA, 25 bp, Homo sapien
tggtgcgcaggaagccatggtctct

SEQ ID NO: 3426540 - DNA, 25 bp, Homo sapien
cagaggtgcctcttgacgtcgttgt

SEQ ID NO: 3426541 - DNA, 25 bp, Homo sapien
ggtgaacaggtctccactgggactg

SEQ ID NO: 3426542 - DNA, 25 bp, Homo sapien
gacacttcatgtggcggttcagcat

SEQ ID NO: 3426543 - DNA, 25 bp, Homo sapien
ccttcccgcagtacgtgcagaggtg

SEQ ID NO: 3426544 - DNA, 25 bp, Homo sapien
agacctggcagggacttcagaggct

SEQ ID NO: 3426545 - DNA, 25 bp, Homo sapien
gcatcagagacctggcagggacttc

SEQ ID NO: 3426546 - DNA, 25 bp, Homo sapien
cagagacctggcagggacttcagag

SEQ ID NO: 3426547 - DNA, 25 bp, Homo sapien
gacaggggccagcatcagagacctg

SEQ ID NO: 3426548 - DNA, 25 bp, Homo sapien
gtacgcgtacttctgctgcacacca

SEQ ID NO: 3426549 - DNA, 25 bp, Homo sapien
ttcttggaggtcttgcgcagcagcg

SEQ ID NO: 3426550 - DNA, 25 bp, Homo sapien
gatcttcttgaggtgagactccaga

SEQ ID NO: 3426551 - DNA, 25 bp, Homo sapien
acagtgttctgtagtgccacggcca

SEQ ID NO: 3426552 - DNA, 25 bp, Homo sapien
gaaaggcttcctgtgcgtgcacaca

SEQ ID NO: 3426553 - DNA, 25 bp, Homo sapien
cagaaccctgagcattagaagccct

SEQ ID NO: 3426554 - DNA, 25 bp, Homo sapien
ggcagtgggatcctagctcgaacct

SEQ ID NO: 3426555 - DNA, 25 bp, Homo sapien
catgtgtgcctctccttgccggaag

SEQ ID NO: 3426556 - DNA, 25 bp, Homo sapien
cttggctcaacaggatgtgcagggc

SEQ ID NO: 3426557 - DNA, 25 bp, Homo sapien
caagagtgtcctagtgcttcaggta

SEQ ID NO: 3426558 - DNA, 25 bp, Homo sapien
agatcttctagtggctgtctcagca

SEQ ID NO: 3426559 - DNA, 25 bp, Homo sapien
tgtccaggataaatagaagcgcacg

SEQ ID NO: 3426560 - DNA, 25 bp, Homo sapien
tggcccacaagacgcacacctcttt

SEQ ID NO: 3426561 - DNA, 25 bp, Homo sapien
tttggcccacaagacgcacacctct

SEQ ID NO: 3426562 - DNA, 25 bp, Homo sapien
agacgcacacctctttacacccaga

SEQ ID NO: 3426563 - DNA, 25 bp, Homo sapien
cacaagacgcacacctctttacacc

SEQ ID NO: 3426564 - DNA, 25 bp, Homo sapien
tacacatttcagagggcagtccagg

SEQ ID NO: 3426565 - DNA, 25 bp, Homo sapien
ttcatgacggcctcggattggcagt

SEQ ID NO: 3426566 - DNA, 25 bp, Homo sapien
tagacactacccattttgggcaggg

SEQ ID NO: 3426567 - DNA, 25 bp, Homo sapien
gattggcagtcaacccagggataca

SEQ ID NO: 3426568 - DNA, 25 bp, Homo sapien
taagacaaaaacatcggaaacacag

SEQ ID NO: 3426569 - DNA, 25 bp, Homo sapien
aagacaaaaacatcggaaacacaga

SEQ ID NO: 3426570 - DNA, 25 bp, Homo sapien
tctgcagtgttcacccctgtgagag

SEQ ID NO: 3426571 - DNA, 25 bp, Homo sapien
tgatcgccaccattcagttgaaggg

SEQ ID NO: 3426572 - DNA, 25 bp, Homo sapien
tctctgggaattggatgcggaaccg

SEQ ID NO: 3426573 - DNA, 25 bp, Homo sapien
gagaagctcagttccagtctgcagt

SEQ ID NO: 3426574 - DNA, 25 bp, Homo sapien
atggggccctcctgtgccacaacat

SEQ ID NO: 3426575 - DNA, 25 bp, Homo sapien
ttctgtctggacacttgccctgcct

SEQ ID NO: 3426576 - DNA, 25 bp, Homo sapien
cacaacatggctctcatccttctgt

SEQ ID NO: 3426577 - DNA, 25 bp, Homo sapien
gccctggcgggcatgtgagtgtgca

SEQ ID NO: 3426578 - DNA, 25 bp, Homo sapien
aggggctgacgtctgatacttgctt

SEQ ID NO: 3426579 - DNA, 25 bp, Homo sapien
cggtcaaagcgtttgtccgataggg

SEQ ID NO: 3426580 - DNA, 25 bp, Homo sapien
ctttagccaacggtcaaagcgtttg

SEQ ID NO: 3426581 - DNA, 25 bp, Homo sapien
acttgctttagccaacggtcaaagc

SEQ ID NO: 3426582 - DNA, 25 bp, Homo sapien
tctgaattgtaggcaatataagata

SEQ ID NO: 3426583 - DNA, 25 bp, Homo sapien
ttctgaattgtaggcaatataagat

SEQ ID NO: 3426584 - DNA, 25 bp, Homo sapien
ctgaattgtaggcaatataagataa

SEQ ID NO: 3426585 - DNA, 25 bp, Homo sapien
gcaccgcgcgtgacgccattggctg

SEQ ID NO: 3426586 - DNA, 25 bp, Homo sapien
ccacgcctttcgattgggtagcggg

SEQ ID NO: 3426587 - DNA, 25 bp, Homo sapien
cccggccaaggagtcgcctggagtc

SEQ ID NO: 3426588 - DNA, 25 bp, Homo sapien
gttcccaccgcgtttccctcagcca

SEQ ID NO: 3426589 - DNA, 25 bp, Homo sapien
gtgctcccgcaggtcgtccccgtaa

SEQ ID NO: 3426590 - DNA, 25 bp, Homo sapien
cgtaactcgcccgaggaactgaccg

SEQ ID NO: 3426591 - DNA, 25 bp, Homo sapien
gggcttcagcgtccggccactgccc

SEQ ID NO: 3426592 - DNA, 25 bp, Homo sapien
cccgaggaactgaccgagtgaggat

SEQ ID NO: 3426593 - DNA, 25 bp, Homo sapien
agccacggcccactatgcatatgcc

SEQ ID NO: 3426594 - DNA, 25 bp, Homo sapien
tccttggcacaacgtggatgctcga

SEQ ID NO: 3426595 - DNA, 25 bp, Homo sapien
gagatgggcctcaaaggtggaccac

SEQ ID NO: 3426596 - DNA, 25 bp, Homo sapien
tccatctcccaaaagggtgcacctc

SEQ ID NO: 3426597 - DNA, 25 bp, Homo sapien
catttatgtcaacccttctgtgtcc

SEQ ID NO: 3426598 - DNA, 25 bp, Homo sapien
taattactgatgtagcaggctacca

SEQ ID NO: 3426599 - DNA, 25 bp, Homo sapien
caggctaccaacttgtcatcttgct

SEQ ID NO: 3426600 - DNA, 25 bp, Homo sapien
taatcattgtaattactgatgtagc

SEQ ID NO: 3426601 - DNA, 25 bp, Homo sapien
gcctggcctaattttaatttcttga

SEQ ID NO: 3426602 - DNA, 25 bp, Homo sapien
caggcgatccacccccccttgttct

SEQ ID NO: 3426603 - DNA, 25 bp, Homo sapien
tggcctaattttaatttcttgagat

SEQ ID NO: 3426604 - DNA, 25 bp, Homo sapien
tcaggcgatccacccccccttgttc

SEQ ID NO: 3426605 - DNA, 25 bp, Homo sapien
gcagatccaccgatgcacaggaagg

SEQ ID NO: 3426606 - DNA, 25 bp, Homo sapien
tcactcactgcgtcagaaatctcca

SEQ ID NO: 3426607 - DNA, 25 bp, Homo sapien
agtgaatttcaccttgtcccgctca

SEQ ID NO: 3426608 - DNA, 25 bp, Homo sapien
tccacctgtaaggagctgtctccct

SEQ ID NO: 3426609 - DNA, 25 bp, Homo sapien
gagaactcggtctgggcgaagtgag

SEQ ID NO: 3426610 - DNA, 25 bp, Homo sapien
cagatgaactcctcgtgctgccgca

SEQ ID NO: 3426611 - DNA, 25 bp, Homo sapien
cggtctgggcgaagtgagggaggca

SEQ ID NO: 3426612 - DNA, 25 bp, Homo sapien
gctgccgcacgactgagaactcggt

SEQ ID NO: 3426613 - DNA, 25 bp, Homo sapien
ggccggcgtactcctcattctccac

SEQ ID NO: 3426614 - DNA, 25 bp, Homo sapien
gatgaggccggcgtactcctcattc

SEQ ID NO: 3426615 - DNA, 25 bp, Homo sapien
gaggcctctcactgccgagacggcc

SEQ ID NO: 3426616 - DNA, 25 bp, Homo sapien
ctttggtcctcacccaagtgctctg

SEQ ID NO: 3426617 - DNA, 25 bp, Homo sapien
catcacagcctttggtcctcaccca

SEQ ID NO: 3426618 - DNA, 25 bp, Homo sapien
ctctcactgccgagacggccatcac

SEQ ID NO: 3426619 - DNA, 25 bp, Homo sapien
agagctgtccccctcgcccaatttc

SEQ ID NO: 3426620 - DNA, 25 bp, Homo sapien
gtccccctcgcccaatttctgtagc

SEQ ID NO: 3426621 - DNA, 25 bp, Homo sapien
ctcttcccgagtgacagagctgtcc

SEQ ID NO: 3426622 - DNA, 25 bp, Homo sapien
aaactcttcccgagtgacagagctg

SEQ ID NO: 3426623 - DNA, 25 bp, Homo sapien
agatagctggggaagacatctggac

SEQ ID NO: 3426624 - DNA, 25 bp, Homo sapien
atagctggggaagacatctggactc

SEQ ID NO: 3426625 - DNA, 25 bp, Homo sapien
agctggggaagacatctggactctg

SEQ ID NO: 3426626 - DNA, 25 bp, Homo sapien
aacattcatggggagatagctgggg

SEQ ID NO: 3426627 - DNA, 25 bp, Homo sapien
tcctgtccatattccaaaaacacaa

SEQ ID NO: 3426628 - DNA, 25 bp, Homo sapien
caaagaagttgtggtctcgacgcag

SEQ ID NO: 3426629 - DNA, 25 bp, Homo sapien
cttcttaaagatggccaggtactcc

SEQ ID NO: 3426630 - DNA, 25 bp, Homo sapien
gaaagacttcgtgcatcgcaactgt

SEQ ID NO: 3426631 - DNA, 25 bp, Homo sapien
cgcggacttcacaatattcctcaga

SEQ ID NO: 3426632 - DNA, 25 bp, Homo sapien
gcttcatccgcggacttcacaatat

SEQ ID NO: 3426633 - DNA, 25 bp, Homo sapien
tcctcagaaaccctccgaggagctc

SEQ ID NO: 3426634 - DNA, 25 bp, Homo sapien
catccgcggacttcacaatattcct

SEQ ID NO: 3426635 - DNA, 25 bp, Homo sapien
gcggtcggcccgcaggcaggcatct

SEQ ID NO: 3426636 - DNA, 25 bp, Homo sapien
ttgtgggcgcgcatgacgcggtcgg

SEQ ID NO: 3426637 - DNA, 25 bp, Homo sapien
caggcatctcggatacgggtgtgat

SEQ ID NO: 3426638 - DNA, 25 bp, Homo sapien
gatacgggtgtgatactccaacagg

SEQ ID NO: 3426639 - DNA, 25 bp, Homo sapien
tctctcccccaaggagttgaaccgc

SEQ ID NO: 3426640 - DNA, 25 bp, Homo sapien
ctcccccaaggagttgaaccgctgg

SEQ ID NO: 3426641 - DNA, 25 bp, Homo sapien
gtggccacagacaaacaacaaggca

SEQ ID NO: 3426642 - DNA, 25 bp, Homo sapien
aacaacaaggcacgccctgctctct

SEQ ID NO: 3426643 - DNA, 25 bp, Homo sapien
ccccatcagagcccctacatctgca

SEQ ID NO: 3426644 - DNA, 25 bp, Homo sapien
cccatcagagcccctacatctgcat

SEQ ID NO: 3426645 - DNA, 25 bp, Homo sapien
atagggatataatcgtctgccaggc

SEQ ID NO: 3426646 - DNA, 25 bp, Homo sapien
gatagggatataatcgtctgccagg

SEQ ID NO: 3426647 - DNA, 25 bp, Homo sapien
cagcgcagctgagatagggatataa

SEQ ID NO: 3426648 - DNA, 25 bp, Homo sapien
ctgctcagcgcagctgagataggga

SEQ ID NO: 3426649 - DNA, 25 bp, Homo sapien
ggaacagctcaaagcctctctgtct

SEQ ID NO: 3426650 - DNA, 25 bp, Homo sapien
ccacctagagctgacagtagacatc

SEQ ID NO: 3426651 - DNA, 25 bp, Homo sapien
cagtagacatctacagagtgacccc

SEQ ID NO: 3426652 - DNA, 25 bp, Homo sapien
gtgacccctcatgggaagacatggt

SEQ ID NO: 3426653 - DNA, 25 bp, Homo sapien
ttcaaagagctctgccaatttgagg

SEQ ID NO: 3426654 - DNA, 25 bp, Homo sapien
aaagagctctgccaatttgaggaag

SEQ ID NO: 3426655 - DNA, 25 bp, Homo sapien
ccgttcaaagagctctgccaatttg

SEQ ID NO: 3426656 - DNA, 25 bp, Homo sapien
tcaaagagctctgccaatttgagga

SEQ ID NO: 3426657 - DNA, 25 bp, Homo sapien
aagcctttgagcacagaaggcagta

SEQ ID NO: 3426658 - DNA, 25 bp, Homo sapien
tttgagcacagaaggcagtactcac

SEQ ID NO: 3426659 - DNA, 25 bp, Homo sapien
ggaaagcctttgagcacagaaggca

SEQ ID NO: 3426660 - DNA, 25 bp, Homo sapien
cctttgagcacagaaggcagtactc

SEQ ID NO: 3426661 - DNA, 25 bp, Homo sapien
caccttttgttaaactagtctggag

SEQ ID NO: 3426662 - DNA, 25 bp, Homo sapien
taaactagtctggagtgtaagccca

SEQ ID NO: 3426663 - DNA, 25 bp, Homo sapien
tagtctggagtgtaagcccaacttg

SEQ ID NO: 3426664 - DNA, 25 bp, Homo sapien
tgttaaactagtctggagtgtaagc

SEQ ID NO: 3426665 - DNA, 25 bp, Homo sapien
tgcaagcccggctatgtgttcaggg

SEQ ID NO: 3426666 - DNA, 25 bp, Homo sapien
ggaagagatgcggtccaatagacat

SEQ ID NO: 3426667 - DNA, 25 bp, Homo sapien
tcaggactttaggagcttccagaag

SEQ ID NO: 3426668 - DNA, 25 bp, Homo sapien
aactttagttcagggagggcacttg

SEQ ID NO: 3426669 - DNA, 25 bp, Homo sapien
ttccaggtcaggtctggtgttgagg

SEQ ID NO: 3426670 - DNA, 25 bp, Homo sapien
gcaaagaagccttaggtaactgttc

SEQ ID NO: 3426671 - DNA, 25 bp, Homo sapien
gggaggcacctcttcatctaaatat

SEQ ID NO: 3426672 - DNA, 25 bp, Homo sapien
taaatatccagcaaagaagccttag

SEQ ID NO: 3426673 - DNA, 25 bp, Homo sapien
tgcatcagaaaggtgggcactggga

SEQ ID NO: 3426674 - DNA, 25 bp, Homo sapien
tacctcagcatgtctgacagcttca

SEQ ID NO: 3426675 - DNA, 25 bp, Homo sapien
ctgtgagtcacgcatgtagtacctc

SEQ ID NO: 3426676 - DNA, 25 bp, Homo sapien
cacgcatgtagtacctcagcatgtc

SEQ ID NO: 3426677 - DNA, 25 bp, Homo sapien
gcttcaggtcctcatcggaagccac

SEQ ID NO: 3426678 - DNA, 25 bp, Homo sapien
tcgaagcgttggcagcacagctgct

SEQ ID NO: 3426679 - DNA, 25 bp, Homo sapien
tcccggttcctggtgcgcgccttgt

SEQ ID NO: 3426680 - DNA, 25 bp, Homo sapien
gcattctcgtagtcggccagtgccc

SEQ ID NO: 3426681 - DNA, 25 bp, Homo sapien
gcttggcggagtcggagaggcgctc

SEQ ID NO: 3426682 - DNA, 25 bp, Homo sapien
cagctctgccagctcaatgagattc

SEQ ID NO: 3426683 - DNA, 25 bp, Homo sapien
agaggagacccggcgggacttgaag

SEQ ID NO: 3426684 - DNA, 25 bp, Homo sapien
gccagctcaatgagattctttcgaa

SEQ ID NO: 3426685 - DNA, 25 bp, Homo sapien
cttggcgtgtttgagctccagctct

SEQ ID NO: 3426686 - DNA, 25 bp, Homo sapien
gcatacatgcgtgcacaccctcaca

SEQ ID NO: 3426687 - DNA, 25 bp, Homo sapien
catacatgcgtgcacaccctcacat

SEQ ID NO: 3426688 - DNA, 25 bp, Homo sapien
gcttcacaagggcccagtgaggtgg

SEQ ID NO: 3426689 - DNA, 25 bp, Homo sapien
cagaaggcacgggtcctgagccagg

SEQ ID NO: 3426690 - DNA, 25 bp, Homo sapien
agggaagcatggccccaagccttag

SEQ ID NO: 3426691 - DNA, 25 bp, Homo sapien
tgagccagggaagcatggccccaag

SEQ ID NO: 3426692 - DNA, 25 bp, Homo sapien
aagcatggccccaagccttagctgg

SEQ ID NO: 3426693 - DNA, 25 bp, Homo sapien
ctgagtcaggctgccattctttctg

SEQ ID NO: 3426694 - DNA, 25 bp, Homo sapien
tgagtcaggctgccattctttctgc

SEQ ID NO: 3426695 - DNA, 25 bp, Homo sapien
tagggcaacaagggtgttccggaga

SEQ ID NO: 3426696 - DNA, 25 bp, Homo sapien
agggtgttccggagaatcagggtgc

SEQ ID NO: 3426697 - DNA, 25 bp, Homo sapien
ggcaacaagggtgttccggagaatc

SEQ ID NO: 3426698 - DNA, 25 bp, Homo sapien
aacaagggtgttccggagaatcagg

SEQ ID NO: 3426699 - DNA, 25 bp, Homo sapien
ggagatcccagattagggtctggct

SEQ ID NO: 3426700 - DNA, 25 bp, Homo sapien
aaggagacatcttgccggagagagg

SEQ ID NO: 3426701 - DNA, 25 bp, Homo sapien
gggaaggagacatcttgccggagag

SEQ ID NO: 3426702 - DNA, 25 bp, Homo sapien
ggctagtggcactgctagggaagga

SEQ ID NO: 3426703 - DNA, 25 bp, Homo sapien
tatgattccttcagggctatgggtg

SEQ ID NO: 3426704 - DNA, 25 bp, Homo sapien
tgtggccagttatgatgcccatgct

SEQ ID NO: 3426705 - DNA, 25 bp, Homo sapien
ttatttgcgaaggagaacaggccgg

SEQ ID NO: 3426706 - DNA, 25 bp, Homo sapien
tatgggtgagggtagaggctgttcc

SEQ ID NO: 3426707 - DNA, 25 bp, Homo sapien
agggtgttgccggtaccctgagcct

SEQ ID NO: 3426708 - DNA, 25 bp, Homo sapien
gttgccggtaccctgagccttttgc

SEQ ID NO: 3426709 - DNA, 25 bp, Homo sapien
tgccggtaccctgagccttttgcca

SEQ ID NO: 3426710 - DNA, 25 bp, Homo sapien
tgttgccggtaccctgagccttttg

SEQ ID NO: 3426711 - DNA, 25 bp, Homo sapien
ctattgcggttagaagttggcagca

SEQ ID NO: 3426712 - DNA, 25 bp, Homo sapien
gcacagagtcactattgcggttaga

SEQ ID NO: 3426713 - DNA, 25 bp, Homo sapien
aatcgaaggtcccttactggtcctg

SEQ ID NO: 3426714 - DNA, 25 bp, Homo sapien
cttccatgagtagccgtgaccaggg

SEQ ID NO: 3426715 - DNA, 25 bp, Homo sapien
tatacacagaactaaacagacaagc

SEQ ID NO: 3426716 - DNA, 25 bp, Homo sapien
tactggtcctgcttccatgagtagc

SEQ ID NO: 3426717 - DNA, 25 bp, Homo sapien
gcaagcctttgtgagccccttctgg

SEQ ID NO: 3426718 - DNA, 25 bp, Homo sapien
tgctgccaacttctaaccgcaatag

SEQ ID NO: 3426719 - DNA, 25 bp, Homo sapien
tggtcacggctactcatggaagcag

SEQ ID NO: 3426720 - DNA, 25 bp, Homo sapien
tctaaccgcaatagtgactctgtgc

SEQ ID NO: 3426721 - DNA, 25 bp, Homo sapien
tggaagcaggaccagtaagggacct

SEQ ID NO: 3426722 - DNA, 25 bp, Homo sapien
gagggcaatcccttcaccccagttg

SEQ ID NO: 3426723 - DNA, 25 bp, Homo sapien
cagcatcttgacaaaggtggcgtag

SEQ ID NO: 3426724 - DNA, 25 bp, Homo sapien
tagcggcagtccttatctggcagca

SEQ ID NO: 3426725 - DNA, 25 bp, Homo sapien
gggtcgtcgacagtctggcccacat

SEQ ID NO: 3426726 - DNA, 25 bp, Homo sapien
acatcgcccaccaggatctccttgc

SEQ ID NO: 3426727 - DNA, 25 bp, Homo sapien
tcatagagggcatagcggcagtcct

SEQ ID NO: 3426728 - DNA, 25 bp, Homo sapien
tatctggcagcatcttgacaaaggt

SEQ ID NO: 3426729 - DNA, 25 bp, Homo sapien
tacgccacctttgtcaagatgctgc

SEQ ID NO: 3426730 - DNA, 25 bp, Homo sapien
gatgctgccagataaggactgccgc

SEQ ID NO: 3426731 - DNA, 25 bp, Homo sapien
cgatgtgggccagactgtcgacgac

SEQ ID NO: 3426732 - DNA, 25 bp, Homo sapien
cctttgtcaagatgctgccagataa

SEQ ID NO: 3426733 - DNA, 25 bp, Homo sapien
caaggagatcctggtgggcgatgtg

SEQ ID NO: 3426734 - DNA, 25 bp, Homo sapien
ggactgccgctatgccctctatgat

SEQ ID NO: 3426735 - DNA, 25 bp, Homo sapien
gacttacgcaccttcatgtcgttga

SEQ ID NO: 3426736 - DNA, 25 bp, Homo sapien
cctctggcgttgaagacttacgcac

SEQ ID NO: 3426737 - DNA, 25 bp, Homo sapien
cgcaccttcatgtcgttgaacacct

SEQ ID NO: 3426738 - DNA, 25 bp, Homo sapien
gaagacttacgcaccttcatgtcgt

SEQ ID NO: 3426739 - DNA, 25 bp, Homo sapien
ggcgttgaagacttacgcaccttca

SEQ ID NO: 3426740 - DNA, 25 bp, Homo sapien
gagcaccgccttcttgcgcttcttc

SEQ ID NO: 3426741 - DNA, 25 bp, Homo sapien
gaagaagcgcaagaaggcggtgctc

SEQ ID NO: 3426742 - DNA, 25 bp, Homo sapien
tcaacgacatgaaggtgcgtaagtc

SEQ ID NO: 3426743 - DNA, 25 bp, Homo sapien
gaaggtgcgtaagtcttcaacgcca

SEQ ID NO: 3426744 - DNA, 25 bp, Homo sapien
aggtgttcaacgacatgaaggtgcg

SEQ ID NO: 3426745 - DNA, 25 bp, Homo sapien
gtgcgtaagtcttcaacgccagagg

SEQ ID NO: 3426746 - DNA, 25 bp, Homo sapien
catgaaggtgcgtaagtcttcaacg

SEQ ID NO: 3426747 - DNA, 25 bp, Homo sapien
aggattctagggaactgccccttgt

SEQ ID NO: 3426748 - DNA, 25 bp, Homo sapien
gccacgtatacgtcaagaaaaggat

SEQ ID NO: 3426749 - DNA, 25 bp, Homo sapien
gatctcagtccacgtcccgagtggt

SEQ ID NO: 3426750 - DNA, 25 bp, Homo sapien
gagtggtcactagtgcccttcccaa

SEQ ID NO: 3426751 - DNA, 25 bp, Homo sapien
caagaaaaggattctagggaactgc

SEQ ID NO: 3426752 - DNA, 25 bp, Homo sapien
ttttttcagaagatctcagtccacg

SEQ ID NO: 3426753 - DNA, 25 bp, Homo sapien
ctgagatcttctgaaaaaacaaggg

SEQ ID NO: 3426754 - DNA, 25 bp, Homo sapien
cactcgggacgtggactgagatctt

SEQ ID NO: 3426755 - DNA, 25 bp, Homo sapien
cactagtgaccactcgggacgtgga

SEQ ID NO: 3426756 - DNA, 25 bp, Homo sapien
ccttttcttgacgtatacgtggcat

SEQ ID NO: 3426757 - DNA, 25 bp, Homo sapien
cttgggaagggcactagtgaccact

SEQ ID NO: 3426758 - DNA, 25 bp, Homo sapien
gcagttccctagaatccttttcttg

SEQ ID NO: 3426759 - DNA, 25 bp, Homo sapien
caacctcagaatggcagccatggcc

SEQ ID NO: 3426760 - DNA, 25 bp, Homo sapien
cagccatggcctctgatcacctagt

SEQ ID NO: 3426761 - DNA, 25 bp, Homo sapien
cagatgggacacaacctcagaatgg

SEQ ID NO: 3426762 - DNA, 25 bp, Homo sapien
caagtcactagttttcccacccaag

SEQ ID NO: 3426763 - DNA, 25 bp, Homo sapien
cactgtcaaagaaccagatgggaca

SEQ ID NO: 3426764 - DNA, 25 bp, Homo sapien
tgatcacctagttcaacaacccctt

SEQ ID NO: 3426765 - DNA, 25 bp, Homo sapien
ttgggtgggaaaactagtgacttgc

SEQ ID NO: 3426766 - DNA, 25 bp, Homo sapien
gaggccatggctgccattctgaggt

SEQ ID NO: 3426767 - DNA, 25 bp, Homo sapien
aactaggtgatcagaggccatggct

SEQ ID NO: 3426768 - DNA, 25 bp, Homo sapien
ttgttgaactaggtgatcagaggcc

SEQ ID NO: 3426769 - DNA, 25 bp, Homo sapien
tgtcccatctggttctttgacagtg

SEQ ID NO: 3426770 - DNA, 25 bp, Homo sapien
cattctgaggttgtgtcccatctgg

SEQ ID NO: 3426771 - DNA, 25 bp, Homo sapien
gcaaaactcgtgaaaagcagaacct

SEQ ID NO: 3426772 - DNA, 25 bp, Homo sapien
aattaaaagatccaccggctactga

SEQ ID NO: 3426773 - DNA, 25 bp, Homo sapien
aatgcaaaactcgtgaaaagcagaa

SEQ ID NO: 3426774 - DNA, 25 bp, Homo sapien
tgcaaaactcgtgaaaagcagaacc

SEQ ID NO: 3426775 - DNA, 25 bp, Homo sapien
caaaactcgtgaaaagcagaacctt

SEQ ID NO: 3426776 - DNA, 25 bp, Homo sapien
aaagcagaaccttgaccaaaatgtg

SEQ ID NO: 3426777 - DNA, 25 bp, Homo sapien
ggttctgcttttcacgagttttgca

SEQ ID NO: 3426778 - DNA, 25 bp, Homo sapien
gttctgcttttcacgagttttgcat

SEQ ID NO: 3426779 - DNA, 25 bp, Homo sapien
aaggttctgcttttcacgagttttg

SEQ ID NO: 3426780 - DNA, 25 bp, Homo sapien
aggttctgcttttcacgagttttgc

SEQ ID NO: 3426781 - DNA, 25 bp, Homo sapien
tcagtagccggtggatcttttaatt

SEQ ID NO: 3426782 - DNA, 25 bp, Homo sapien
cacattttggtcaaggttctgcttt

SEQ ID NO: 3426783 - DNA, 25 bp, Homo sapien
cagttactacacaaacgacccctgt

SEQ ID NO: 3426784 - DNA, 25 bp, Homo sapien
cacaatgctagatgggaccccaagg

SEQ ID NO: 3426785 - DNA, 25 bp, Homo sapien
tgctctcagcctttggataaaactg

SEQ ID NO: 3426786 - DNA, 25 bp, Homo sapien
tagaacttcggatatggaggaccca

SEQ ID NO: 3426787 - DNA, 25 bp, Homo sapien
taggctctttcccaaccaagacaag

SEQ ID NO: 3426788 - DNA, 25 bp, Homo sapien
ggaatggtgctaggccccagaagtc

SEQ ID NO: 3426789 - DNA, 25 bp, Homo sapien
ctgagagcaagtactgtgagtagca

SEQ ID NO: 3426790 - DNA, 25 bp, Homo sapien
cagttttatccaaaggctgagagca

SEQ ID NO: 3426791 - DNA, 25 bp, Homo sapien
tctgaagaggagtcttggctcaggt

SEQ ID NO: 3426792 - DNA, 25 bp, Homo sapien
cattcccggaagaagggagttgtcg

SEQ ID NO: 3426793 - DNA, 25 bp, Homo sapien
tcttggttgggaaagagcctagctg

SEQ ID NO: 3426794 - DNA, 25 bp, Homo sapien
tgggtcctccatatccgaagttcta

SEQ ID NO: 3426795 - DNA, 25 bp, Homo sapien
tcgccctaaaacaacgggtgtatca

SEQ ID NO: 3426796 - DNA, 25 bp, Homo sapien
cataaccttcggttttctcagccct

SEQ ID NO: 3426797 - DNA, 25 bp, Homo sapien
tgggtcacttccctaaactcggctc

SEQ ID NO: 3426798 - DNA, 25 bp, Homo sapien
gcctgggcaagctacataaccttcg

SEQ ID NO: 3426799 - DNA, 25 bp, Homo sapien
caacgggtgtatcagacccatctcc

SEQ ID NO: 3426800 - DNA, 25 bp, Homo sapien
tgggcaagctacataaccttcggtt

SEQ ID NO: 3426801 - DNA, 25 bp, Homo sapien
cgaaggttatgtagcttgcccaggc

SEQ ID NO: 3426802 - DNA, 25 bp, Homo sapien
agggctgagaaaaccgaaggttatg

SEQ ID NO: 3426803 - DNA, 25 bp, Homo sapien
tgatacacccgttgttttagggcga

SEQ ID NO: 3426804 - DNA, 25 bp, Homo sapien
gccttcccggatgggcctgagtgag

SEQ ID NO: 3426805 - DNA, 25 bp, Homo sapien
gagccgagtttagggaagtgaccca

SEQ ID NO: 3426806 - DNA, 25 bp, Homo sapien
ggagatgggtctgatacacccgttg

SEQ ID NO: 3426807 - DNA, 25 bp, Homo sapien
gagagccgcagaagacgagagcgct

SEQ ID NO: 3426808 - DNA, 25 bp, Homo sapien
gagccgcagaagacgagagcgctgc

SEQ ID NO: 3426809 - DNA, 25 bp, Homo sapien
agccgcagaagacgagagcgctgca

SEQ ID NO: 3426810 - DNA, 25 bp, Homo sapien
ccgcagaagacgagagcgctgcagc

SEQ ID NO: 3426811 - DNA, 25 bp, Homo sapien
agagccgcagaagacgagagcgctg

SEQ ID NO: 3426812 - DNA, 25 bp, Homo sapien
gccgcagaagacgagagcgctgcag

SEQ ID NO: 3426813 - DNA, 25 bp, Homo sapien
cagcgctctcgtcttctgcggctct

SEQ ID NO: 3426814 - DNA, 25 bp, Homo sapien
gctgcagcgctctcgtcttctgcgg

SEQ ID NO: 3426815 - DNA, 25 bp, Homo sapien
tgcagcgctctcgtcttctgcggct

SEQ ID NO: 3426816 - DNA, 25 bp, Homo sapien
ctgcagcgctctcgtcttctgcggc

SEQ ID NO: 3426817 - DNA, 25 bp, Homo sapien
agcgctctcgtcttctgcggctctc

SEQ ID NO: 3426818 - DNA, 25 bp, Homo sapien
gcagcgctctcgtcttctgcggctc

SEQ ID NO: 3426819 - DNA, 25 bp, Homo sapien
caccgagagccgcagaagacgagag

SEQ ID NO: 3426820 - DNA, 25 bp, Homo sapien
acgaaaaggagagggcaccgagagc

SEQ ID NO: 3426821 - DNA, 25 bp, Homo sapien
agccgcagaagacgagagcgctgca

SEQ ID NO: 3426822 - DNA, 25 bp, Homo sapien
ccgcagaagacgagagcgctgcagc

SEQ ID NO: 3426823 - DNA, 25 bp, Homo sapien
accgagagccgcagaagacgagagc

SEQ ID NO: 3426824 - DNA, 25 bp, Homo sapien
aacgaaaaggagagggcaccgagag

SEQ ID NO: 3426825 - DNA, 25 bp, Homo sapien
gctctcgtcttctgcggctctcggt

SEQ ID NO: 3426826 - DNA, 25 bp, Homo sapien
gctgcagcgctctcgtcttctgcgg

SEQ ID NO: 3426827 - DNA, 25 bp, Homo sapien
tgcagcgctctcgtcttctgcggct

SEQ ID NO: 3426828 - DNA, 25 bp, Homo sapien
ctctcgtcttctgcggctctcggtg

SEQ ID NO: 3426829 - DNA, 25 bp, Homo sapien
gctctcggtgccctctccttttcgt

SEQ ID NO: 3426830 - DNA, 25 bp, Homo sapien
gcggctctcggtgccctctcctttt

SEQ ID NO: 3426831 - DNA, 25 bp, Homo sapien
tagtgtttatccgactgacgacgcc

SEQ ID NO: 3426832 - DNA, 25 bp, Homo sapien
gttttactgacgttggacatggcct

SEQ ID NO: 3426833 - DNA, 25 bp, Homo sapien
taaagaagccttgaattgaatgcac

SEQ ID NO: 3426834 - DNA, 25 bp, Homo sapien
tcaggagacgagagtggctttacac

SEQ ID NO: 3426835 - DNA, 25 bp, Homo sapien
tataaggagcctcaagccggctgtc

SEQ ID NO: 3426836 - DNA, 25 bp, Homo sapien
taaggagcctcaagccggctgtcgg

SEQ ID NO: 3426837 - DNA, 25 bp, Homo sapien
cccctcgagtctcttgtcctaataa

SEQ ID NO: 3426838 - DNA, 25 bp, Homo sapien
ctcgagtctcttgtcctaataagga

SEQ ID NO: 3426839 - DNA, 25 bp, Homo sapien
ccagtcccgcccctcaggactgtgc

SEQ ID NO: 3426840 - DNA, 25 bp, Homo sapien
gggcgccagagctccagtcccgccc

SEQ ID NO: 3426841 - DNA, 25 bp, Homo sapien
gagctccagtcccgcccctcaggac

SEQ ID NO: 3426842 - DNA, 25 bp, Homo sapien
ctccagtcccgcccctcaggactgt

SEQ ID NO: 3426843 - DNA, 25 bp, Homo sapien
gacccgccagggtttgaagcagcac

SEQ ID NO: 3426844 - DNA, 25 bp, Homo sapien
ggctaatcggaagtgggagaccctc

SEQ ID NO: 3426845 - DNA, 25 bp, Homo sapien
tctagctgctatgccggaagtcgca

SEQ ID NO: 3426846 - DNA, 25 bp, Homo sapien
tatagctgagttggacacaggcgac

SEQ ID NO: 3426847 - DNA, 25 bp, Homo sapien
cacgcggttgggtttgggagcggag

SEQ ID NO: 3426848 - DNA, 25 bp, Homo sapien
catcctggcagttggggaggcctga

SEQ ID NO: 3426849 - DNA, 25 bp, Homo sapien
ggactgtaagtaagaggtgcttggg

SEQ ID NO: 3426850 - DNA, 25 bp, Homo sapien
cctgagatgggcacgcggttgggtt

SEQ ID NO: 3426851 - DNA, 25 bp, Homo sapien
tgagcttggcggctctaaggtctct

SEQ ID NO: 3426852 - DNA, 25 bp, Homo sapien
agcttggcggctctaaggtctctta

SEQ ID NO: 3426853 - DNA, 25 bp, Homo sapien
aaggtctcttaagattgtcagcttc

SEQ ID NO: 3426854 - DNA, 25 bp, Homo sapien
gctctaaggtctcttaagattgtca

SEQ ID NO: 3426855 - DNA, 25 bp, Homo sapien
accgagggcaggaccgttgagatca

SEQ ID NO: 3426856 - DNA, 25 bp, Homo sapien
gggcgctgtctctaacgatcttttc

SEQ ID NO: 3426857 - DNA, 25 bp, Homo sapien
cctgcgctgctctaagtggttggtc

SEQ ID NO: 3426858 - DNA, 25 bp, Homo sapien
cactaacgagaggagagcctgcggc

SEQ ID NO: 3426859 - DNA, 25 bp, Homo sapien
ctgggacgccgccagttctggagtc

SEQ ID NO: 3426860 - DNA, 25 bp, Homo sapien
gacgccgccagttctggagtcggga

SEQ ID NO: 3426861 - DNA, 25 bp, Homo sapien
gggacgccgccagttctggagtcgg

SEQ ID NO: 3426862 - DNA, 25 bp, Homo sapien
tgggacgccgccagttctggagtcg

SEQ ID NO: 3426863 - DNA, 25 bp, Homo sapien
tcctccggcgctccacgcccgcggg

SEQ ID NO: 3426864 - DNA, 25 bp, Homo sapien
gtcctccggcgctccacgcccgcgg

SEQ ID NO: 3426865 - DNA, 25 bp, Homo sapien
cctccggcgctccacgcccgcggga

SEQ ID NO: 3426866 - DNA, 25 bp, Homo sapien
aacgaagagcgggttgggacaggca

SEQ ID NO: 3426867 - DNA, 25 bp, Homo sapien
cttctgaaatacgaagcgcgtgcgg

SEQ ID NO: 3426868 - DNA, 25 bp, Homo sapien
atacgaagcgcgtgcggcgcctgct

SEQ ID NO: 3426869 - DNA, 25 bp, Homo sapien
actcggtcagccagcgaacgaagag

SEQ ID NO: 3426870 - DNA, 25 bp, Homo sapien
gcagcttttcccatcgggccacgcc

SEQ ID NO: 3426871 - DNA, 25 bp, Homo sapien
ttcccatcgggccacgccaggaccc

SEQ ID NO: 3426872 - DNA, 25 bp, Homo sapien
agcttttcccatcgggccacgccag

SEQ ID NO: 3426873 - DNA, 25 bp, Homo sapien
cagcagcttttcccatcgggccacg

SEQ ID NO: 3426874 - DNA, 25 bp, Homo sapien
cggcagagcccgtctccgaagtgct

SEQ ID NO: 3426875 - DNA, 25 bp, Homo sapien
tgtaggatcttagcttccttcccgc

SEQ ID NO: 3426876 - DNA, 25 bp, Homo sapien
tgcgcagcggcagtgggtaccgtcg

SEQ ID NO: 3426877 - DNA, 25 bp, Homo sapien
gcccgatgttcggtgccgctgcagc

SEQ ID NO: 3426878 - DNA, 25 bp, Homo sapien
tgttctctccagatggtgagtccgg

SEQ ID NO: 3426879 - DNA, 25 bp, Homo sapien
gagtcctggacttccgcaagtcgcc

SEQ ID NO: 3426880 - DNA, 25 bp, Homo sapien
catggaagagtcctggacttccgca

SEQ ID NO: 3426881 - DNA, 25 bp, Homo sapien
gcccctgcggggctggactgttctc

SEQ ID NO: 3426882 - DNA, 25 bp, Homo sapien
taccatgcgctgcaggacaggtgta

SEQ ID NO: 3426883 - DNA, 25 bp, Homo sapien
tggtgaccccgtaactaactgagct

SEQ ID NO: 3426884 - DNA, 25 bp, Homo sapien
taactgagctgggatccttaagtag

SEQ ID NO: 3426885 - DNA, 25 bp, Homo sapien
gggatgatccgctgcaaatctggga

SEQ ID NO: 3426886 - DNA, 25 bp, Homo sapien
agtgccgagctggccagtagctgcc

SEQ ID NO: 3426887 - DNA, 25 bp, Homo sapien
agagcctcccgctttgggctgggca

SEQ ID NO: 3426888 - DNA, 25 bp, Homo sapien
ctgagtgccgagctggccagtagct

SEQ ID NO: 3426889 - DNA, 25 bp, Homo sapien
gccgagctggccagtagctgccaga

SEQ ID NO: 3426890 - DNA, 25 bp, Homo sapien
tgctcccggtagagcaccagcagta

SEQ ID NO: 3426891 - DNA, 25 bp, Homo sapien
ggtgctcccggtagagcaccagcag

SEQ ID NO: 3426892 - DNA, 25 bp, Homo sapien
ctcccggtagagcaccagcagtatc

SEQ ID NO: 3426893 - DNA, 25 bp, Homo sapien
caggtgctcccggtagagcaccagc

SEQ ID NO: 3426894 - DNA, 25 bp, Homo sapien
tccttggttaagaagtggtgaccat

SEQ ID NO: 3426895 - DNA, 25 bp, Homo sapien
cagctcctccttggttaagaagtgg

SEQ ID NO: 3426896 - DNA, 25 bp, Homo sapien
tcctccttggttaagaagtggtgac

SEQ ID NO: 3426897 - DNA, 25 bp, Homo sapien
ttaagaagtggtgaccattaggatt

SEQ ID NO: 3426898 - DNA, 25 bp, Homo sapien
agggtcgagcactcccaggggctac

SEQ ID NO: 3426899 - DNA, 25 bp, Homo sapien
cagggtcgagcactcccaggggcta

SEQ ID NO: 3426900 - DNA, 25 bp, Homo sapien
gccagggtcgagcactcccaggggc

SEQ ID NO: 3426901 - DNA, 25 bp, Homo sapien
ccagggtcgagcactcccaggggct

SEQ ID NO: 3426902 - DNA, 25 bp, Homo sapien
ctggctggctggtgtgtcctgagga

SEQ ID NO: 3426903 - DNA, 25 bp, Homo sapien
gctggtgtgtcctgaggaccaggtt

SEQ ID NO: 3426904 - DNA, 25 bp, Homo sapien
tggctggtgtgtcctgaggaccagg

SEQ ID NO: 3426905 - DNA, 25 bp, Homo sapien
ggctggctggtgtgtcctgaggacc

SEQ ID NO: 3426906 - DNA, 25 bp, Homo sapien
cctccaggtattccaacagtggggg

SEQ ID NO: 3426907 - DNA, 25 bp, Homo sapien
taaggccctactaagaagttcactc

SEQ ID NO: 3426908 - DNA, 25 bp, Homo sapien
cactcatgctctcctgtatctcctg

SEQ ID NO: 3426909 - DNA, 25 bp, Homo sapien
ctgctgcggtttcacaccctccagg

SEQ ID NO: 3426910 - DNA, 25 bp, Homo sapien
tcctgcatctctacccgccaaatcc

SEQ ID NO: 3426911 - DNA, 25 bp, Homo sapien
cctgcatctctacccgccaaatcct

SEQ ID NO: 3426912 - DNA, 25 bp, Homo sapien
ctcaggtctgcaagaagtgtgtctc

SEQ ID NO: 3426913 - DNA, 25 bp, Homo sapien
caggtctgcaagaagtgtgtctcag

SEQ ID NO: 3426914 - DNA, 25 bp, Homo sapien
tcaggtctgcaagaagtgtgtctca

SEQ ID NO: 3426915 - DNA, 25 bp, Homo sapien
ggtctgcaagaagtgtgtctcagac

SEQ ID NO: 3426916 - DNA, 25 bp, Homo sapien
tgcacaaatgaccccagtggctcct

SEQ ID NO: 3426917 - DNA, 25 bp, Homo sapien
ctgcacaaatgaccccagtggctcc

SEQ ID NO: 3426918 - DNA, 25 bp, Homo sapien
gggacaacacagctctaccttcttc

SEQ ID NO: 3426919 - DNA, 25 bp, Homo sapien
aacacagctctaccttcttcactca

SEQ ID NO: 3426920 - DNA, 25 bp, Homo sapien
tcactcattcctggcaggctttcct

SEQ ID NO: 3426921 - DNA, 25 bp, Homo sapien
gaggcagaggggacaacacagctct

SEQ ID NO: 3426922 - DNA, 25 bp, Homo sapien
tctgactcggccaacttctgggcca

SEQ ID NO: 3426923 - DNA, 25 bp, Homo sapien
caggccttctgactcggccaacttc

SEQ ID NO: 3426924 - DNA, 25 bp, Homo sapien
gccttctgactcggccaacttctgg

SEQ ID NO: 3426925 - DNA, 25 bp, Homo sapien
ggccttctgactcggccaacttctg

SEQ ID NO: 3426926 - DNA, 25 bp, Homo sapien
ctgctggacccctgcttcactggca

SEQ ID NO: 3426927 - DNA, 25 bp, Homo sapien
cccgggtctcgccaatgtccacaca

SEQ ID NO: 3426928 - DNA, 25 bp, Homo sapien
cacaacagcaccctgtactctccag

SEQ ID NO: 3426929 - DNA, 25 bp, Homo sapien
aatgtccacacacaacagcaccctg

SEQ ID NO: 3426930 - DNA, 25 bp, Homo sapien
tctccaggcctcagctccagtggct

SEQ ID NO: 3426931 - DNA, 25 bp, Homo sapien
cagcctcctctgatcatctccctcg

SEQ ID NO: 3426932 - DNA, 25 bp, Homo sapien
ctagatcagagcagggcagtgccta

SEQ ID NO: 3426933 - DNA, 25 bp, Homo sapien
ctgatcatctccctcgtttctcccc

SEQ ID NO: 3426934 - DNA, 25 bp, Homo sapien
atcagagcagggcagtgcctacccc

SEQ ID NO: 3426935 - DNA, 25 bp, Homo sapien
ctcggagcagctccggcctgtgccc

SEQ ID NO: 3426936 - DNA, 25 bp, Homo sapien
gggtcacgtgcagccgctgtagctc

SEQ ID NO: 3426937 - DNA, 25 bp, Homo sapien
cgtgcagccgctgtagctctcggag

SEQ ID NO: 3426938 - DNA, 25 bp, Homo sapien
cagccgctgtagctctcggagcagc

SEQ ID NO: 3426939 - DNA, 25 bp, Homo sapien
gtctctaggattggtctcctgggcc

SEQ ID NO: 3426940 - DNA, 25 bp, Homo sapien
ctgggccacccacacaaaatctcca

SEQ ID NO: 3426941 - DNA, 25 bp, Homo sapien
aaatctccaacgtgcagcttgcgca

SEQ ID NO: 3426942 - DNA, 25 bp, Homo sapien
ctgggtctctaggattggtctcctg

SEQ ID NO: 3426943 - DNA, 25 bp, Homo sapien
cctgcccctggtgccagcctgtcca

SEQ ID NO: 3426944 - DNA, 25 bp, Homo sapien
tggtgccagcctgtccacggccctt

SEQ ID NO: 3426945 - DNA, 25 bp, Homo sapien
ctggtgccagcctgtccacggccct

SEQ ID NO: 3426946 - DNA, 25 bp, Homo sapien
tgccagcctgtccacggcccttcac

SEQ ID NO: 3426947 - DNA, 25 bp, Homo sapien
caagccagccgttagcttgcgatcc

SEQ ID NO: 3426948 - DNA, 25 bp, Homo sapien
gacaagccagccgttagcttgcgat

SEQ ID NO: 3426949 - DNA, 25 bp, Homo sapien
ctgacaagccagccgttagcttgcg

SEQ ID NO: 3426950 - DNA, 25 bp, Homo sapien
aagccagccgttagcttgcgatccc

SEQ ID NO: 3426951 - DNA, 25 bp, Homo sapien
cagtcgcttgcgctccacaatgtga

SEQ ID NO: 3426952 - DNA, 25 bp, Homo sapien
ctgctcccggaagcggccgtcgatg

SEQ ID NO: 3426953 - DNA, 25 bp, Homo sapien
ttctgctcccggaagcggccgtcga

SEQ ID NO: 3426954 - DNA, 25 bp, Homo sapien
caaaggtcatccagtcgcttgcgct

SEQ ID NO: 3426955 - DNA, 25 bp, Homo sapien
gctctgggctgaaaacggggcttcg

SEQ ID NO: 3426956 - DNA, 25 bp, Homo sapien
cctactgtgcgcctggatgggcctg

SEQ ID NO: 3426957 - DNA, 25 bp, Homo sapien
ggcttcctactgtgcgcctggatgg

SEQ ID NO: 3426958 - DNA, 25 bp, Homo sapien
agggaagcctggcaaagccagcaaa

SEQ ID NO: 3426959 - DNA, 25 bp, Homo sapien
cggcacatggcctctgtgactaggg

SEQ ID NO: 3426960 - DNA, 25 bp, Homo sapien
actcaaaatggtgccgggaccctgt

SEQ ID NO: 3426961 - DNA, 25 bp, Homo sapien
tgctgacactcttgtctagaaagcc

SEQ ID NO: 3426962 - DNA, 25 bp, Homo sapien
tgacctcagcccaagaatgcaggta

SEQ ID NO: 3426963 - DNA, 25 bp, Homo sapien
tcttccaccaggtatacccggcgct

SEQ ID NO: 3426964 - DNA, 25 bp, Homo sapien
tgtggacggaaccatgctcttccac

SEQ ID NO: 3426965 - DNA, 25 bp, Homo sapien
ctgagtgttggtgacagcctgcagc

SEQ ID NO: 3426966 - DNA, 25 bp, Homo sapien
ggaaggctgaggttgtggacggaac

SEQ ID NO: 3426967 - DNA, 25 bp, Homo sapien
tgcaggccccgcgtcaagagggcca

SEQ ID NO: 3426968 - DNA, 25 bp, Homo sapien
cgcttcacaaaaaagccatcaatga

SEQ ID NO: 3426969 - DNA, 25 bp, Homo sapien
ggctgactccttaatgtctgctgtg

SEQ ID NO: 3426970 - DNA, 25 bp, Homo sapien
aggtaggcggctgactccttaatgt

SEQ ID NO: 3426971 - DNA, 25 bp, Homo sapien
aatggggatctcacccaccttgctt

SEQ ID NO: 3426972 - DNA, 25 bp, Homo sapien
tcttttggggatgcacagggcccag

SEQ ID NO: 3426973 - DNA, 25 bp, Homo sapien
ccaggcaaggtgaattccttgtggg

SEQ ID NO: 3426974 - DNA, 25 bp, Homo sapien
caggctggagctcgaaggaacaact

SEQ ID NO: 3426975 - DNA, 25 bp, Homo sapien
agagagggtttggagaggtcatggc

SEQ ID NO: 3426976 - DNA, 25 bp, Homo sapien
agcagagagggtttggagaggtcat

SEQ ID NO: 3426977 - DNA, 25 bp, Homo sapien
aggggcggctgcgtagggtgtggcc

SEQ ID NO: 3426978 - DNA, 25 bp, Homo sapien
ccaggggcggctgcgtagggtgtgg

SEQ ID NO: 3426979 - DNA, 25 bp, Homo sapien
tcttgatggctcctgcgttgaagtc

SEQ ID NO: 3426980 - DNA, 25 bp, Homo sapien
cttgatggctcctgcgttgaagtca

SEQ ID NO: 3426981 - DNA, 25 bp, Homo sapien
tattcttgatggctcctgcgttgaa

SEQ ID NO: 3426982 - DNA, 25 bp, Homo sapien
cttattcttgatggctcctgcgttg

SEQ ID NO: 3426983 - DNA, 25 bp, Homo sapien
ctgggttcgggaaagggctggatca

SEQ ID NO: 3426984 - DNA, 25 bp, Homo sapien
caggccatgtctgagaagctaggca

SEQ ID NO: 3426985 - DNA, 25 bp, Homo sapien
ctgggccaggccatgtctgagaagc

SEQ ID NO: 3426986 - DNA, 25 bp, Homo sapien
gccatgtctgagaagctaggcagag

SEQ ID NO: 3426987 - DNA, 25 bp, Homo sapien
gcaaacacttctcgcaccgactggg

SEQ ID NO: 3426988 - DNA, 25 bp, Homo sapien
tgcatcagctgccgggcaaacactt

SEQ ID NO: 3426989 - DNA, 25 bp, Homo sapien
gggtgctgtatcgatccaccagggc

SEQ ID NO: 3426990 - DNA, 25 bp, Homo sapien
ctcactccgcgcacctgcatcagct

SEQ ID NO: 3426991 - DNA, 25 bp, Homo sapien
ggtggcacaggcatcataggcggcc

SEQ ID NO: 3426992 - DNA, 25 bp, Homo sapien
cacaggcatcataggcggccaggag

SEQ ID NO: 3426993 - DNA, 25 bp, Homo sapien
tggcacaggcatcataggcggccag

SEQ ID NO: 3426994 - DNA, 25 bp, Homo sapien
tctgtagacgcccacacttaatggt

SEQ ID NO: 3426995 - DNA, 25 bp, Homo sapien
cactccctccaggttccgtctcttg

SEQ ID NO: 3426996 - DNA, 25 bp, Homo sapien
cctccaggttccgtctcttgccctc

SEQ ID NO: 3426997 - DNA, 25 bp, Homo sapien
agggtcacgccctgggcctagggca

SEQ ID NO: 3426998 - DNA, 25 bp, Homo sapien
cgtagctgcagtagagctgggataa

SEQ ID NO: 3426999 - DNA, 25 bp, Homo sapien
ctgcagtagagctgggataaggtcc

SEQ ID NO: 3427000 - DNA, 25 bp, Homo sapien
gggccgtagctgcagtagagctggg

SEQ ID NO: 3427001 - DNA, 25 bp, Homo sapien
ggtcaaggggccgtagctgcagtag

SEQ ID NO: 3427002 - DNA, 25 bp, Homo sapien
aatagattccaagctgcaatgcccc

SEQ ID NO: 3427003 - DNA, 25 bp, Homo sapien
gatggtatccctggttcctgcgtat

SEQ ID NO: 3427004 - DNA, 25 bp, Homo sapien
tgagccctctgcactcctaaggaaa

SEQ ID NO: 3427005 - DNA, 25 bp, Homo sapien
tgcgtatttcacaaggtccccaggg

SEQ ID NO: 3427006 - DNA, 25 bp, Homo sapien
tgaattccctcatgagctaccgggc

SEQ ID NO: 3427007 - DNA, 25 bp, Homo sapien
tactgaggctcaccgtctttgtagg

SEQ ID NO: 3427008 - DNA, 25 bp, Homo sapien
taccgggccagctctgtactgaggc

SEQ ID NO: 3427009 - DNA, 25 bp, Homo sapien
ggacctggagatggtcaccatgaat

SEQ ID NO: 3427010 - DNA, 25 bp, Homo sapien
tcagatccgtgctggaaactcgcag

SEQ ID NO: 3427011 - DNA, 25 bp, Homo sapien
gaatcgtcagttagcctgggtcaga

SEQ ID NO: 3427012 - DNA, 25 bp, Homo sapien
tctaacgaagcactcggacacggga

SEQ ID NO: 3427013 - DNA, 25 bp, Homo sapien
catctattcagaccagcgagtgccc

SEQ ID NO: 3427014 - DNA, 25 bp, Homo sapien
gtggcatggaggcaggaagccgcgc

SEQ ID NO: 3427015 - DNA, 25 bp, Homo sapien
ggtgcagtctggagtggcatggagg

SEQ ID NO: 3427016 - DNA, 25 bp, Homo sapien
tggcatggaggcaggaagccgcgca

SEQ ID NO: 3427017 - DNA, 25 bp, Homo sapien
gccggtgcagtctggagtggcatgg

SEQ ID NO: 3427018 - DNA, 25 bp, Homo sapien
gcctctgatgccttgggctaggcct

SEQ ID NO: 3427019 - DNA, 25 bp, Homo sapien
cttgggctaggcctgccaccaacag

SEQ ID NO: 3427020 - DNA, 25 bp, Homo sapien
tgatgccttgggctaggcctgccac

SEQ ID NO: 3427021 - DNA, 25 bp, Homo sapien
tgggctaggcctgccaccaacaggg

SEQ ID NO: 3427022 - DNA, 25 bp, Homo sapien
tccggttgaactggatctggaacaa

SEQ ID NO: 3427023 - DNA, 25 bp, Homo sapien
tggatctggaacaacttgaaggcct

SEQ ID NO: 3427024 - DNA, 25 bp, Homo sapien
tctggaacaacttgaaggcctcttt

SEQ ID NO: 3427025 - DNA, 25 bp, Homo sapien
ggaacaacttgaaggcctctttcag

SEQ ID NO: 3427026 - DNA, 25 bp, Homo sapien
accaaaagggagttgtcctaggctg

SEQ ID NO: 3427027 - DNA, 25 bp, Homo sapien
gtgaggtcactgaatggagtcaccc

SEQ ID NO: 3427028 - DNA, 25 bp, Homo sapien
tgaatggagtcaccccaaactcagc

SEQ ID NO: 3427029 - DNA, 25 bp, Homo sapien
gcaaagatgtccaggcggtgagcat

SEQ ID NO: 3427030 - DNA, 25 bp, Homo sapien
caaagatgtccaggcggtgagcatg

SEQ ID NO: 3427031 - DNA, 25 bp, Homo sapien
gaaaggtactgactcctctggctct

SEQ ID NO: 3427032 - DNA, 25 bp, Homo sapien
cttgatgggtgagatggcgctggcc

SEQ ID NO: 3427033 - DNA, 25 bp, Homo sapien
cgatagccatagagctggccaaact

SEQ ID NO: 3427034 - DNA, 25 bp, Homo sapien
cagctgccctccgatagccatagag

SEQ ID NO: 3427035 - DNA, 25 bp, Homo sapien
cacggagacatccacaaaatcccag

SEQ ID NO: 3427036 - DNA, 25 bp, Homo sapien
tgcacggagacatccacaaaatccc

SEQ ID NO: 3427037 - DNA, 25 bp, Homo sapien
cccagaaactgatgcgccacagggt

SEQ ID NO: 3427038 - DNA, 25 bp, Homo sapien
ggagacatccacaaaatcccagaaa

SEQ ID NO: 3427039 - DNA, 25 bp, Homo sapien
tccctcccctgtcacacgcgcaccc

SEQ ID NO: 3427040 - DNA, 25 bp, Homo sapien
acagtgtgggtgaccaggcccctag

SEQ ID NO: 3427041 - DNA, 25 bp, Homo sapien
gggacagtgtgggtgaccaggcccc

SEQ ID NO: 3427042 - DNA, 25 bp, Homo sapien
tgtgggtgaccaggcccctaggcct

SEQ ID NO: 3427043 - DNA, 25 bp, Homo sapien
ttatgaacgcgtcccagacgaagcc

SEQ ID NO: 3427044 - DNA, 25 bp, Homo sapien
gtcccagacgaagccaccgtggcag

SEQ ID NO: 3427045 - DNA, 25 bp, Homo sapien
cagacgaagccaccgtggcagccat

SEQ ID NO: 3427046 - DNA, 25 bp, Homo sapien
aggacagttatgaacgcgtcccaga

SEQ ID NO: 3427047 - DNA, 25 bp, Homo sapien
ctggaacgggtagtccttttcactg

SEQ ID NO: 3427048 - DNA, 25 bp, Homo sapien
tggggtggcacctgtgggctctgac

SEQ ID NO: 3427049 - DNA, 25 bp, Homo sapien
cttggggtggcacctgtgggctctg

SEQ ID NO: 3427050 - DNA, 25 bp, Homo sapien
ttggggtggcacctgtgggctctga

SEQ ID NO: 3427051 - DNA, 25 bp, Homo sapien
tctgcagcatgatgaagtcctggat

SEQ ID NO: 3427052 - DNA, 25 bp, Homo sapien
ctgcagcatgatgaagtcctggatc

SEQ ID NO: 3427053 - DNA, 25 bp, Homo sapien
tgcagcatgatgaagtcctggatcc

SEQ ID NO: 3427054 - DNA, 25 bp, Homo sapien
tctgtccctgccatccgcccgtgtc

SEQ ID NO: 3427055 - DNA, 25 bp, Homo sapien
gccatccgcccgtgtccctgccctg

SEQ ID NO: 3427056 - DNA, 25 bp, Homo sapien
cctgccatccgcccgtgtccctgcc

SEQ ID NO: 3427057 - DNA, 25 bp, Homo sapien
tgtccctgccatccgcccgtgtccc

SEQ ID NO: 3427058 - DNA, 25 bp, Homo sapien
ccataagtggccaggtactgcgcaa

SEQ ID NO: 3427059 - DNA, 25 bp, Homo sapien
ttgatggtcacggtgatggggccat

SEQ ID NO: 3427060 - DNA, 25 bp, Homo sapien
taagtggccaggtactgcgcaattc

SEQ ID NO: 3427061 - DNA, 25 bp, Homo sapien
catgttgatggtcacggtgatgggg

SEQ ID NO: 3427062 - DNA, 25 bp, Homo sapien
ggtgggtgtggccttgatcacacct

SEQ ID NO: 3427063 - DNA, 25 bp, Homo sapien
ctgacttgacgctgccaaaacccac

SEQ ID NO: 3427064 - DNA, 25 bp, Homo sapien
ggctgagactgcgatgagactgtct

SEQ ID NO: 3427065 - DNA, 25 bp, Homo sapien
aggacagagtggtccacaagctggg

SEQ ID NO: 3427066 - DNA, 25 bp, Homo sapien
tgccccctcccccaatagatcacac

SEQ ID NO: 3427067 - DNA, 25 bp, Homo sapien
ccccctcccccaatagatcacactc

SEQ ID NO: 3427068 - DNA, 25 bp, Homo sapien
aggtgggaagaggcctgttctgcct

SEQ ID NO: 3427069 - DNA, 25 bp, Homo sapien
gaaggtgggaagaggcctgttctgc

SEQ ID NO: 3427070 - DNA, 25 bp, Homo sapien
aggtattgctccctcggtgcagccg

SEQ ID NO: 3427071 - DNA, 25 bp, Homo sapien
gcttcatatccggtttctgcacacg

SEQ ID NO: 3427072 - DNA, 25 bp, Homo sapien
tgagcgggaacttggtgatgccaca

SEQ ID NO: 3427073 - DNA, 25 bp, Homo sapien
cggtttctgcacacgggcagtgagc

SEQ ID NO: 3427074 - DNA, 25 bp, Homo sapien
aggcagttggcctaacaggacagag

SEQ ID NO: 3427075 - DNA, 25 bp, Homo sapien
gtttattcaggctgtattgagattg

SEQ ID NO: 3427076 - DNA, 25 bp, Homo sapien
tgtattgagattgggaggatgggca

SEQ ID NO: 3427077 - DNA, 25 bp, Homo sapien
gaggcagttggcctaacaggacaga

SEQ ID NO: 3427078 - DNA, 25 bp, Homo sapien
gagcacctggtgtccgtgtacaagg

SEQ ID NO: 3427079 - DNA, 25 bp, Homo sapien
tccaccagaagagtctgctcacaag

SEQ ID NO: 3427080 - DNA, 25 bp, Homo sapien
gatggatgtgtacagtggctccttg

SEQ ID NO: 3427081 - DNA, 25 bp, Homo sapien
tatctcagggaatggtgtctgtgct

SEQ ID NO: 3427082 - DNA, 25 bp, Homo sapien
tttacccagccatcagaaagttgag

SEQ ID NO: 3427083 - DNA, 25 bp, Homo sapien
tggtggagacatcaaccagtctgac

SEQ ID NO: 3427084 - DNA, 25 bp, Homo sapien
cattttgccggctgaaacaggccca

SEQ ID NO: 3427085 - DNA, 25 bp, Homo sapien
tgggcaagaagctgtccaaaggcac

SEQ ID NO: 3427086 - DNA, 25 bp, Homo sapien
cggtctcaacccgaaactaggagct

SEQ ID NO: 3427087 - DNA, 25 bp, Homo sapien
ttatggaaggacagccaatccggtg

SEQ ID NO: 3427088 - DNA, 25 bp, Homo sapien
gatcctcgatgtcaaggaacccgcg

SEQ ID NO: 3427089 - DNA, 25 bp, Homo sapien
cactccgggtgttactgatcctcga

SEQ ID NO: 3427090 - DNA, 25 bp, Homo sapien
cagacgccggttgagctgcttgagc

SEQ ID NO: 3427091 - DNA, 25 bp, Homo sapien
tgcagctgccgattcacctcctgca

SEQ ID NO: 3427092 - DNA, 25 bp, Homo sapien
tgagctcgcggatctcgcccaggtg

SEQ ID NO: 3427093 - DNA, 25 bp, Homo sapien
ctagctcttccttgcctagcgccgc

SEQ ID NO: 3427094 - DNA, 25 bp, Homo sapien
cgcgctggcgctccgagtccaggaa

SEQ ID NO: 3427095 - DNA, 25 bp, Homo sapien
ctggcgctccgagtccaggaagcag

SEQ ID NO: 3427096 - DNA, 25 bp, Homo sapien
ggcgctccgagtccaggaagcagca

SEQ ID NO: 3427097 - DNA, 25 bp, Homo sapien
agagctgccactggcgtgcggcgcg

SEQ ID NO: 3427098 - DNA, 25 bp, Homo sapien
gggcaactgatccggactgcccacg

SEQ ID NO: 3427099 - DNA, 25 bp, Homo sapien
gggcaaggcaagctcgggtgctggc

SEQ ID NO: 3427100 - DNA, 25 bp, Homo sapien
caggcagagctccttaagcgctagg

SEQ ID NO: 3427101 - DNA, 25 bp, Homo sapien
tggagcttccatcgcctaggtcgcg

SEQ ID NO: 3427102 - DNA, 25 bp, Homo sapien
ggcgggcgtcggcgtggaggaagca

SEQ ID NO: 3427103 - DNA, 25 bp, Homo sapien
gggcgggcgtcggcgtggaggaagc

SEQ ID NO: 3427104 - DNA, 25 bp, Homo sapien
tccgggcgggcgtcggcgtggagga

SEQ ID NO: 3427105 - DNA, 25 bp, Homo sapien
caatccgggcgggcgtcggcgtgga

SEQ ID NO: 3427106 - DNA, 25 bp, Homo sapien
tccaggtcccgaggtccacagcggt

SEQ ID NO: 3427107 - DNA, 25 bp, Homo sapien
ctgccagcaagagcgaggggccctt

SEQ ID NO: 3427108 - DNA, 25 bp, Homo sapien
agccaggacggcgtccaggtcccga

SEQ ID NO: 3427109 - DNA, 25 bp, Homo sapien
caggatttcttagtccatgccagcg

SEQ ID NO: 3427110 - DNA, 25 bp, Homo sapien
ccaatccaacccccagcaagtccct

SEQ ID NO: 3427111 - DNA, 25 bp, Homo sapien
ccagcaagtccctccgctccagcct

SEQ ID NO: 3427112 - DNA, 25 bp, Homo sapien
gccccattgtcttggacaggaagga

SEQ ID NO: 3427113 - DNA, 25 bp, Homo sapien
caggctcgaagtaatgggggaatca

SEQ ID NO: 3427114 - DNA, 25 bp, Homo sapien
cacttcaggggctggattaaggccg

SEQ ID NO: 3427115 - DNA, 25 bp, Homo sapien
cagtccttctggatgggaattgtac

SEQ ID NO: 3427116 - DNA, 25 bp, Homo sapien
ttagaggtcctctggagccctaacc

SEQ ID NO: 3427117 - DNA, 25 bp, Homo sapien
gagactgaccatattgtgcttcaca

SEQ ID NO: 3427118 - DNA, 25 bp, Homo sapien
tcagctcatcgcaagagtagcagca

SEQ ID NO: 3427119 - DNA, 25 bp, Homo sapien
tggcagcccagagactttgtagatc

SEQ ID NO: 3427120 - DNA, 25 bp, Homo sapien
tgtgtctgcggacaactgttctccc

SEQ ID NO: 3427121 - DNA, 25 bp, Homo sapien
gctctgtgtctgcggacaactgttc

SEQ ID NO: 3427122 - DNA, 25 bp, Homo sapien
acaactgttctcccgtctgaaaatg

SEQ ID NO: 3427123 - DNA, 25 bp, Homo sapien
caactgttctcccgtctgaaaatga

SEQ ID NO: 3427124 - DNA, 25 bp, Homo sapien
tggcctgagcatgccattttgaggg

SEQ ID NO: 3427125 - DNA, 25 bp, Homo sapien
cactgcccagcaccatgagttgggt

SEQ ID NO: 3427126 - DNA, 25 bp, Homo sapien
gactcctaggtcacttgggaactac

SEQ ID NO: 3427127 - DNA, 25 bp, Homo sapien
gaaggagagacttcttggaacgctc

SEQ ID NO: 3427128 - DNA, 25 bp, Homo sapien
gcgcctgtctataaagttgttgttg

SEQ ID NO: 3427129 - DNA, 25 bp, Homo sapien
cgccctgtggctgcgcctgtctata

SEQ ID NO: 3427130 - DNA, 25 bp, Homo sapien
ttgttgttgaggtggcgcggcgcta

SEQ ID NO: 3427131 - DNA, 25 bp, Homo sapien
tgtggctgcgcctgtctataaagtt

SEQ ID NO: 3427132 - DNA, 25 bp, Homo sapien
cgcggagtcctagcgccgccggtta

SEQ ID NO: 3427133 - DNA, 25 bp, Homo sapien
ctctctcgccgcgtcgggtccagcg

SEQ ID NO: 3427134 - DNA, 25 bp, Homo sapien
agacgccgctcgcagggccctagtg

SEQ ID NO: 3427135 - DNA, 25 bp, Homo sapien
cggtgcgcgtccctccccagtctgg

SEQ ID NO: 3427136 - DNA, 25 bp, Homo sapien
gaaccgcgcgttgtacttcttcttc

SEQ ID NO: 3427137 - DNA, 25 bp, Homo sapien
gggagcagagttcagaccccgtcgc

SEQ ID NO: 3427138 - DNA, 25 bp, Homo sapien
tgggggagcagagttcagaccccgt

SEQ ID NO: 3427139 - DNA, 25 bp, Homo sapien
ggtgggggagcagagttcagacccc

SEQ ID NO: 3427140 - DNA, 25 bp, Homo sapien
tgcgggtgggggagcagagttcaga

SEQ ID NO: 3427141 - DNA, 25 bp, Homo sapien
ccttcccaatctcttcgtccgtctg

SEQ ID NO: 3427142 - DNA, 25 bp, Homo sapien
cttcccaatctcttcgtccgtctgc

SEQ ID NO: 3427143 - DNA, 25 bp, Homo sapien
agcgtcaaggagaactccggggcag

SEQ ID NO: 3427144 - DNA, 25 bp, Homo sapien
ctgaggagcgtcaaggagaactccg

SEQ ID NO: 3427145 - DNA, 25 bp, Homo sapien
cgtcaaggagaactccggggcagga

SEQ ID NO: 3427146 - DNA, 25 bp, Homo sapien
tcaaggagaactccggggcaggaga

SEQ ID NO: 3427147 - DNA, 25 bp, Homo sapien
gactctaggaagagctcgagcgccc

SEQ ID NO: 3427148 - DNA, 25 bp, Homo sapien
ccttcttcaacagcgactctaggaa

SEQ ID NO: 3427149 - DNA, 25 bp, Homo sapien
cgttccgcgactgggtcacctggca

SEQ ID NO: 3427150 - DNA, 25 bp, Homo sapien
tggtcatggtcttcgcgttccgcga

SEQ ID NO: 3427151 - DNA, 25 bp, Homo sapien
tgctgctccagctcgatgcactgct

SEQ ID NO: 3427152 - DNA, 25 bp, Homo sapien
tgcatgtcgggaacagatgccacca

SEQ ID NO: 3427153 - DNA, 25 bp, Homo sapien
gctgctccagctcgatgcactgctt

SEQ ID NO: 3427154 - DNA, 25 bp, Homo sapien
cgtccccctgcatgtcgggaacaga

SEQ ID NO: 3427155 - DNA, 25 bp, Homo sapien
cttgtccttgcttttcgttcccatc

SEQ ID NO: 3427156 - DNA, 25 bp, Homo sapien
gctccgagtctgtcccggacagctt

SEQ ID NO: 3427157 - DNA, 25 bp, Homo sapien
ttgtccttgcttttcgttcccatcc

SEQ ID NO: 3427158 - DNA, 25 bp, Homo sapien
ctcctgctccgagtctgtcccggac

SEQ ID NO: 3427159 - DNA, 25 bp, Homo sapien
ggggttgtgatgtctcctcttcccc

SEQ ID NO: 3427160 - DNA, 25 bp, Homo sapien
tccccatcagtatctgtgtcctcag

SEQ ID NO: 3427161 - DNA, 25 bp, Homo sapien
tcctcttccccatcagtatctgtgt

SEQ ID NO: 3427162 - DNA, 25 bp, Homo sapien
cagtatctgtgtcctcagattcatc

SEQ ID NO: 3427163 - DNA, 25 bp, Homo sapien
tcctcagttattctccttccacccc

SEQ ID NO: 3427164 - DNA, 25 bp, Homo sapien
accctccagatccatgcggccaagg

SEQ ID NO: 3427165 - DNA, 25 bp, Homo sapien
ggcagggtggagcaggatctttcgg

SEQ ID NO: 3427166 - DNA, 25 bp, Homo sapien
gagaacagtctcctgccttcaagcc

SEQ ID NO: 3427167 - DNA, 25 bp, Homo sapien
aggcagagtagaggcgaagggcagg

SEQ ID NO: 3427168 - DNA, 25 bp, Homo sapien
gagtagaggcgaagggcaggaaggg

SEQ ID NO: 3427169 - DNA, 25 bp, Homo sapien
ggcagagtagaggcgaagggcagga

SEQ ID NO: 3427170 - DNA, 25 bp, Homo sapien
agagtagaggcgaagggcaggaagg

SEQ ID NO: 3427171 - DNA, 25 bp, Homo sapien
aaaggggctatggtctggggggcag

SEQ ID NO: 3427172 - DNA, 25 bp, Homo sapien
caactaaaaggggctatggtctggg

SEQ ID NO: 3427173 - DNA, 25 bp, Homo sapien
ctggccatcttcataggccatgagg

SEQ ID NO: 3427174 - DNA, 25 bp, Homo sapien
ggccatcttcataggccatgaggtt

SEQ ID NO: 3427175 - DNA, 25 bp, Homo sapien
tggccatcttcataggccatgaggt

SEQ ID NO: 3427176 - DNA, 25 bp, Homo sapien
gccccatcccccatccgcaccgtag

SEQ ID NO: 3427177 - DNA, 25 bp, Homo sapien
cccatcccccatccgcaccgtagaa

SEQ ID NO: 3427178 - DNA, 25 bp, Homo sapien
catcccccatccgcaccgtagaact

SEQ ID NO: 3427179 - DNA, 25 bp, Homo sapien
ccccatcccccatccgcaccgtaga

SEQ ID NO: 3427180 - DNA, 25 bp, Homo sapien
caactgttggtaggtatttagcata

SEQ ID NO: 3427181 - DNA, 25 bp, Homo sapien
ttagcatatcggtgtcctgccccat

SEQ ID NO: 3427182 - DNA, 25 bp, Homo sapien
tatttagcatatcggtgtcctgccc

SEQ ID NO: 3427183 - DNA, 25 bp, Homo sapien
ttggtaggtatttagcatatcggtg

SEQ ID NO: 3427184 - DNA, 25 bp, Homo sapien
tgccctggtcacaccgacggggtcc

SEQ ID NO: 3427185 - DNA, 25 bp, Homo sapien
tcctgagagacggtcgacagcagct

SEQ ID NO: 3427186 - DNA, 25 bp, Homo sapien
tgagagacggtcgacagcagcttga

SEQ ID NO: 3427187 - DNA, 25 bp, Homo sapien
gagacggtcgacagcagcttgagca

SEQ ID NO: 3427188 - DNA, 25 bp, Homo sapien
gcagccccgttctggttcctggagc

SEQ ID NO: 3427189 - DNA, 25 bp, Homo sapien
cagctggaagtgtcctcactgggcc

SEQ ID NO: 3427190 - DNA, 25 bp, Homo sapien
tctaggcagctggaagtgtcctcac

SEQ ID NO: 3427191 - DNA, 25 bp, Homo sapien
ctggctctaggcagctggaagtgtc

SEQ ID NO: 3427192 - DNA, 25 bp, Homo sapien
taggcagctggaagtgtcctcactg

SEQ ID NO: 3427193 - DNA, 25 bp, Homo sapien
caggtcttgatttggcacaccatca

SEQ ID NO: 3427194 - DNA, 25 bp, Homo sapien
agagccctgtcctttcttgctctgg

SEQ ID NO: 3427195 - DNA, 25 bp, Homo sapien
tggcccctgggcttgcggtccttct

SEQ ID NO: 3427196 - DNA, 25 bp, Homo sapien
tgggcttgcggtccttctttgctgt

SEQ ID NO: 3427197 - DNA, 25 bp, Homo sapien
tcttcagactcttcagagccctgtc

SEQ ID NO: 3427198 - DNA, 25 bp, Homo sapien
agagggccctgacccccaacagcct

SEQ ID NO: 3427199 - DNA, 25 bp, Homo sapien
aacagcctcctgacccatcccactg

SEQ ID NO: 3427200 - DNA, 25 bp, Homo sapien
gtgggggtcagggtcggcgccagcc

SEQ ID NO: 3427201 - DNA, 25 bp, Homo sapien
agcctcctgacccatcccactgctg

SEQ ID NO: 3427202 - DNA, 25 bp, Homo sapien
tttccgaggaagaagcgggaagtga

SEQ ID NO: 3427203 - DNA, 25 bp, Homo sapien
gacatctgtggcgatgctctcccag

SEQ ID NO: 3427204 - DNA, 25 bp, Homo sapien
acatctgtggcgatgctctcccagg

SEQ ID NO: 3427205 - DNA, 25 bp, Homo sapien
agcacagcccggacatctgtggcga

SEQ ID NO: 3427206 - DNA, 25 bp, Homo sapien
tctgtggcgatgctctcccaggccc

SEQ ID NO: 3427207 - DNA, 25 bp, Homo sapien
ttggccgtggacttgcgcctggact

SEQ ID NO: 3427208 - DNA, 25 bp, Homo sapien
ttgccagtagggatggagacaccgc

SEQ ID NO: 3427209 - DNA, 25 bp, Homo sapien
cccaggctttgcagctggacctgct

SEQ ID NO: 3427210 - DNA, 25 bp, Homo sapien
tgtcggacgccgatcctgatcctgg

SEQ ID NO: 3427211 - DNA, 25 bp, Homo sapien
ccctttctctgacaaccagccctcc

SEQ ID NO: 3427212 - DNA, 25 bp, Homo sapien
tgcacttctccctcatcggaggctt

SEQ ID NO: 3427213 - DNA, 25 bp, Homo sapien
tcttcctccattgtcgccttcggag

SEQ ID NO: 3427214 - DNA, 25 bp, Homo sapien
tcgccttcggaggttgttgaagctg

SEQ ID NO: 3427215 - DNA, 25 bp, Homo sapien
caggtctctctgtagctgcctgtgc

SEQ ID NO: 3427216 - DNA, 25 bp, Homo sapien
ggtctctctgtagctgcctgtgcag

SEQ ID NO: 3427217 - DNA, 25 bp, Homo sapien
ctctgtagctgcctgtgcagcttct

SEQ ID NO: 3427218 - DNA, 25 bp, Homo sapien
gtccaggtctctctgtagctgcctg

SEQ ID NO: 3427219 - DNA, 25 bp, Homo sapien
cctgtcgtttgtggaaggtgcgatt

SEQ ID NO: 3427220 - DNA, 25 bp, Homo sapien
gacacgaaagtttcatcgtatcccg

SEQ ID NO: 3427221 - DNA, 25 bp, Homo sapien
gtatcccgaggcataggcctttcca

SEQ ID NO: 3427222 - DNA, 25 bp, Homo sapien
taggcctttccattccgcttggagg

SEQ ID NO: 3427223 - DNA, 25 bp, Homo sapien
aaatcaagtaagaccgggagtggtg

SEQ ID NO: 3427224 - DNA, 25 bp, Homo sapien
cgctgccgctcccaggcctgcagca

SEQ ID NO: 3427225 - DNA, 25 bp, Homo sapien
gccgctgccgctcccaggcctgcag

SEQ ID NO: 3427226 - DNA, 25 bp, Homo sapien
ggcctgctgccgctcctcctgccgc

SEQ ID NO: 3427227 - DNA, 25 bp, Homo sapien
cctgccgctgccgctcccaggcctg

SEQ ID NO: 3427228 - DNA, 25 bp, Homo sapien
tgtacatgctgtgtccgggcccgcc

SEQ ID NO: 3427229 - DNA, 25 bp, Homo sapien
ccgctgtacatgctgtgtccgggcc

SEQ ID NO: 3427230 - DNA, 25 bp, Homo sapien
gctgtacatgctgtgtccgggcccg

SEQ ID NO: 3427231 - DNA, 25 bp, Homo sapien
ctgccgctgtacatgctgtgtccgg

SEQ ID NO: 3427232 - DNA, 25 bp, Homo sapien
ggctccctctgggtgcgtaggctgc

SEQ ID NO: 3427233 - DNA, 25 bp, Homo sapien
tctgggtgcgtaggctgccaggcag

SEQ ID NO: 3427234 - DNA, 25 bp, Homo sapien
ctgggtgcgtaggctgccaggcagt

SEQ ID NO: 3427235 - DNA, 25 bp, Homo sapien
ctccctctgggtgcgtaggctgcca

SEQ ID NO: 3427236 - DNA, 25 bp, Homo sapien
gcagctccgcctggtactcagcaaa

SEQ ID NO: 3427237 - DNA, 25 bp, Homo sapien
agcctgctggaacaggaagggccgg

SEQ ID NO: 3427238 - DNA, 25 bp, Homo sapien
tcagcaaagcgctgtcgctcctggc

SEQ ID NO: 3427239 - DNA, 25 bp, Homo sapien
gatgccttgcagctccgcctggtac

SEQ ID NO: 3427240 - DNA, 25 bp, Homo sapien
aggagagagaagacggcttcctgct

SEQ ID NO: 3427241 - DNA, 25 bp, Homo sapien
ggagagagaagacggcttcctgctc

SEQ ID NO: 3427242 - DNA, 25 bp, Homo sapien
gagagagaagacggcttcctgctct

SEQ ID NO: 3427243 - DNA, 25 bp, Homo sapien
gagagaagacggcttcctgctctgc

SEQ ID NO: 3427244 - DNA, 25 bp, Homo sapien
ctgggagaagcgccgagtgacggtg

SEQ ID NO: 3427245 - DNA, 25 bp, Homo sapien
ggagaagcgccgagtgacggtgagc

SEQ ID NO: 3427246 - DNA, 25 bp, Homo sapien
gggagaagcgccgagtgacggtgag

SEQ ID NO: 3427247 - DNA, 25 bp, Homo sapien
gagaagcgccgagtgacggtgagcc

SEQ ID NO: 3427248 - DNA, 25 bp, Homo sapien
ttctcacccccattgacctgtggct

SEQ ID NO: 3427249 - DNA, 25 bp, Homo sapien
caggctggggttgtagtgcctgtca

SEQ ID NO: 3427250 - DNA, 25 bp, Homo sapien
agggactgcactccgggtccaggct

SEQ ID NO: 3427251 - DNA, 25 bp, Homo sapien
tggggttgtagtgcctgtcaggctg

SEQ ID NO: 3427252 - DNA, 25 bp, Homo sapien
aagcagccgctcttagtttccggca

SEQ ID NO: 3427253 - DNA, 25 bp, Homo sapien
tccaaggcgagcgacggaagcagcc

SEQ ID NO: 3427254 - DNA, 25 bp, Homo sapien
agtttccggcaacacgacagcggct

SEQ ID NO: 3427255 - DNA, 25 bp, Homo sapien
cattttgcgttgtctgggctcggcg

SEQ ID NO: 3427256 - DNA, 25 bp, Homo sapien
gctgccgagcgacccggaagtattc

SEQ ID NO: 3427257 - DNA, 25 bp, Homo sapien
agtattcccattttgcgttgtctgg

SEQ ID NO: 3427258 - DNA, 25 bp, Homo sapien
gaatacttccgggtcgctcggcagc

SEQ ID NO: 3427259 - DNA, 25 bp, Homo sapien
ggctgcttccgtcgctcgccttgga

SEQ ID NO: 3427260 - DNA, 25 bp, Homo sapien
ccagacaacgcaaaatgggaatact

SEQ ID NO: 3427261 - DNA, 25 bp, Homo sapien
gccgagcccagacaacgcaaaatgg

SEQ ID NO: 3427262 - DNA, 25 bp, Homo sapien
cagccgctgtcgtgttgccggaaac

SEQ ID NO: 3427263 - DNA, 25 bp, Homo sapien
tgccggaaactaagagcggctgctt

SEQ ID NO: 3427264 - DNA, 25 bp, Homo sapien
gggtcgtccaagaagcatcgcggag

SEQ ID NO: 3427265 - DNA, 25 bp, Homo sapien
ggtagcggtggcgaacgacggaagc

SEQ ID NO: 3427266 - DNA, 25 bp, Homo sapien
gaacacaaaaaacacaagcaccgga

SEQ ID NO: 3427267 - DNA, 25 bp, Homo sapien
acacaagcaccggagtggcggcagt

SEQ ID NO: 3427268 - DNA, 25 bp, Homo sapien
aaaaaacacaagcaccggagtggcg

SEQ ID NO: 3427269 - DNA, 25 bp, Homo sapien
tggcgaacgacggaagcggagccgg

SEQ ID NO: 3427270 - DNA, 25 bp, Homo sapien
tttgtgttcccggtgccgcggcggc

SEQ ID NO: 3427271 - DNA, 25 bp, Homo sapien
ccggctccgcttccgtcgttcgcca

SEQ ID NO: 3427272 - DNA, 25 bp, Homo sapien
gccactccggtgcttgtgttttttg

SEQ ID NO: 3427273 - DNA, 25 bp, Homo sapien
tccggtgcttgtgttttttgtgttc

SEQ ID NO: 3427274 - DNA, 25 bp, Homo sapien
actgccgccactccggtgcttgtgt

SEQ ID NO: 3427275 - DNA, 25 bp, Homo sapien
cgcgatgcttcttggacgaccccat

SEQ ID NO: 3427276 - DNA, 25 bp, Homo sapien
gcgtgaagcgggagaagcgcgatga

SEQ ID NO: 3427277 - DNA, 25 bp, Homo sapien
cgggagaagcgcgatgacggctacg

SEQ ID NO: 3427278 - DNA, 25 bp, Homo sapien
cgtgaagcgggagaagcgcgatgac

SEQ ID NO: 3427279 - DNA, 25 bp, Homo sapien
gagaagcgcgatgacggctacgagg

SEQ ID NO: 3427280 - DNA, 25 bp, Homo sapien
gaagcgcgatgacggctacgaggcc

SEQ ID NO: 3427281 - DNA, 25 bp, Homo sapien
gaagcgggagaagcgcgatgacggc

SEQ ID NO: 3427282 - DNA, 25 bp, Homo sapien
gtcatcgcgcttctcccgcttcacg

SEQ ID NO: 3427283 - DNA, 25 bp, Homo sapien
catcgcgcttctcccgcttcacgcg

SEQ ID NO: 3427284 - DNA, 25 bp, Homo sapien
gccgtcatcgcgcttctcccgcttc

SEQ ID NO: 3427285 - DNA, 25 bp, Homo sapien
ggcctcgtagccgtcatcgcgcttc

SEQ ID NO: 3427286 - DNA, 25 bp, Homo sapien
gcctcgtagccgtcatcgcgcttct

SEQ ID NO: 3427287 - DNA, 25 bp, Homo sapien
cgtagccgtcatcgcgcttctcccg

SEQ ID NO: 3427288 - DNA, 25 bp, Homo sapien
cagagccctccgagcggcgcgtgaa

SEQ ID NO: 3427289 - DNA, 25 bp, Homo sapien
gcgtgaagcgggagaagcgcgatga

SEQ ID NO: 3427290 - DNA, 25 bp, Homo sapien
cgggagaagcgcgatgacggctacg

SEQ ID NO: 3427291 - DNA, 25 bp, Homo sapien
tgaagcgggagaagcgcgatgacgg

SEQ ID NO: 3427292 - DNA, 25 bp, Homo sapien
gagaagcgcgatgacggctacgagg

SEQ ID NO: 3427293 - DNA, 25 bp, Homo sapien
gaagcgcgatgacggctacgaggcc

SEQ ID NO: 3427294 - DNA, 25 bp, Homo sapien
ttcacgcgccgctcggagggctctg

SEQ ID NO: 3427295 - DNA, 25 bp, Homo sapien
gccgtcatcgcgcttctcccgcttc

SEQ ID NO: 3427296 - DNA, 25 bp, Homo sapien
ggcctcgtagccgtcatcgcgcttc

SEQ ID NO: 3427297 - DNA, 25 bp, Homo sapien
gcctcgtagccgtcatcgcgcttct

SEQ ID NO: 3427298 - DNA, 25 bp, Homo sapien
cgtagccgtcatcgcgcttctcccg

SEQ ID NO: 3427299 - DNA, 25 bp, Homo sapien
gtcatcgcgcttctcccgcttcacg

SEQ ID NO: 3427300 - DNA, 25 bp, Homo sapien
agctcaggcgatgcctcctcactca

SEQ ID NO: 3427301 - DNA, 25 bp, Homo sapien
aaaactagctcaggcgatgcctcct

SEQ ID NO: 3427302 - DNA, 25 bp, Homo sapien
tgccagctccaaaactagctcaggc

SEQ ID NO: 3427303 - DNA, 25 bp, Homo sapien
cagctccaaaactagctcaggcgat

SEQ ID NO: 3427304 - DNA, 25 bp, Homo sapien
tccaaaactagctcaggcgatgcct

SEQ ID NO: 3427305 - DNA, 25 bp, Homo sapien
cctcactcagcatcgaggagactaa

SEQ ID NO: 3427306 - DNA, 25 bp, Homo sapien
aggaggcatcgcctgagctagtttt

SEQ ID NO: 3427307 - DNA, 25 bp, Homo sapien
tagtctcctcgatgctgagtgagga

SEQ ID NO: 3427308 - DNA, 25 bp, Homo sapien
cctgagctagttttggagctggcag

SEQ ID NO: 3427309 - DNA, 25 bp, Homo sapien
catcgcctgagctagttttggagct

SEQ ID NO: 3427310 - DNA, 25 bp, Homo sapien
gaggcatcgcctgagctagttttgg

SEQ ID NO: 3427311 - DNA, 25 bp, Homo sapien
tgagtgaggaggcatcgcctgagct

SEQ ID NO: 3427312 - DNA, 25 bp, Homo sapien
ctgaaacccttggaggttaatgcca

SEQ ID NO: 3427313 - DNA, 25 bp, Homo sapien
gctgaaacccttggaggttaatgcc

SEQ ID NO: 3427314 - DNA, 25 bp, Homo sapien
ggctgaaacccttggaggttaatgc

SEQ ID NO: 3427315 - DNA, 25 bp, Homo sapien
tggcattaacctccaagggtttcag

SEQ ID NO: 3427316 - DNA, 25 bp, Homo sapien
gcattaacctccaagggtttcagcc

SEQ ID NO: 3427317 - DNA, 25 bp, Homo sapien
ggcattaacctccaagggtttcagc

SEQ ID NO: 3427318 - DNA, 25 bp, Homo sapien
cctcacgtctgggccccccttccag

SEQ ID NO: 3427319 - DNA, 25 bp, Homo sapien
ctggaaggggggcccagacgtgagg

SEQ ID NO: 3427320 - DNA, 25 bp, Homo sapien
agcgcctgctgaaccaaaagctggg

SEQ ID NO: 3427321 - DNA, 25 bp, Homo sapien
gagaagcgcctgctgaaccaaaagc

SEQ ID NO: 3427322 - DNA, 25 bp, Homo sapien
aagcgcctgctgaaccaaaagctgg

SEQ ID NO: 3427323 - DNA, 25 bp, Homo sapien
gaagcgcctgctgaaccaaaagctg

SEQ ID NO: 3427324 - DNA, 25 bp, Homo sapien
aaggagaagcgcctgctgaaccaaa

SEQ ID NO: 3427325 - DNA, 25 bp, Homo sapien
ggagaagcgcctgctgaaccaaaag

SEQ ID NO: 3427326 - DNA, 25 bp, Homo sapien
ccctatggccttgcgacagcgagag

SEQ ID NO: 3427327 - DNA, 25 bp, Homo sapien
acagctgatgtcatcaaccctatgg

SEQ ID NO: 3427328 - DNA, 25 bp, Homo sapien
ctatggccttgcgacagcgagagga

SEQ ID NO: 3427329 - DNA, 25 bp, Homo sapien
aaccctatggccttgcgacagcgag

SEQ ID NO: 3427330 - DNA, 25 bp, Homo sapien
cagctgatgtcatcaaccctatggc

SEQ ID NO: 3427331 - DNA, 25 bp, Homo sapien
atggccttgcgacagcgagaggagc

SEQ ID NO: 3427332 - DNA, 25 bp, Homo sapien
ccatagggttgatgacatcagctgt

SEQ ID NO: 3427333 - DNA, 25 bp, Homo sapien
tcgctgtcgcaaggccatagggttg

SEQ ID NO: 3427334 - DNA, 25 bp, Homo sapien
ctctcgctgtcgcaaggccataggg

SEQ ID NO: 3427335 - DNA, 25 bp, Homo sapien
tctcgctgtcgcaaggccatagggt

SEQ ID NO: 3427336 - DNA, 25 bp, Homo sapien
gccatagggttgatgacatcagctg

SEQ ID NO: 3427337 - DNA, 25 bp, Homo sapien
tcctctcgctgtcgcaaggccatag

SEQ ID NO: 3427338 - DNA, 25 bp, Homo sapien
ccagcttttggttcagcaggcgctt

SEQ ID NO: 3427339 - DNA, 25 bp, Homo sapien
cagcttttggttcagcaggcgcttc

SEQ ID NO: 3427340 - DNA, 25 bp, Homo sapien
gcttttggttcagcaggcgcttctc

SEQ ID NO: 3427341 - DNA, 25 bp, Homo sapien
tttggttcagcaggcgcttctcctt

SEQ ID NO: 3427342 - DNA, 25 bp, Homo sapien
cccagcttttggttcagcaggcgct

SEQ ID NO: 3427343 - DNA, 25 bp, Homo sapien
ttttggttcagcaggcgcttctcct

SEQ ID NO: 3427344 - DNA, 25 bp, Homo sapien
tggctggacgacactgcagcctgga

SEQ ID NO: 3427345 - DNA, 25 bp, Homo sapien
taaagaccctaggagaggatgaccc

SEQ ID NO: 3427346 - DNA, 25 bp, Homo sapien
aagataaagaccctaggagaggatg

SEQ ID NO: 3427347 - DNA, 25 bp, Homo sapien
ccctaggagaggatgacccctggct

SEQ ID NO: 3427348 - DNA, 25 bp, Homo sapien
agaccctaggagaggatgacccctg

SEQ ID NO: 3427349 - DNA, 25 bp, Homo sapien
aagaccctaggagaggatgacccct

SEQ ID NO: 3427350 - DNA, 25 bp, Homo sapien
gggtcatcctctcctagggtcttta

SEQ ID NO: 3427351 - DNA, 25 bp, Homo sapien
caggggtcatcctctcctagggtct

SEQ ID NO: 3427352 - DNA, 25 bp, Homo sapien
ccaggctgcagtgtcgtccagccag

SEQ ID NO: 3427353 - DNA, 25 bp, Homo sapien
catcctctcctagggtctttatctt

SEQ ID NO: 3427354 - DNA, 25 bp, Homo sapien
tccaggctgcagtgtcgtccagcca

SEQ ID NO: 3427355 - DNA, 25 bp, Homo sapien
agccaggggtcatcctctcctaggg

SEQ ID NO: 3427356 - DNA, 25 bp, Homo sapien
ggagatggaccaagagtttggtgtc

SEQ ID NO: 3427357 - DNA, 25 bp, Homo sapien
aggagatggaccaagagtttggtgt

SEQ ID NO: 3427358 - DNA, 25 bp, Homo sapien
gaggagatggaccaagagtttggtg

SEQ ID NO: 3427359 - DNA, 25 bp, Homo sapien
acaccaaactcttggtccatctcct

SEQ ID NO: 3427360 - DNA, 25 bp, Homo sapien
gacaccaaactcttggtccatctcc

SEQ ID NO: 3427361 - DNA, 25 bp, Homo sapien
caccaaactcttggtccatctcctc

SEQ ID NO: 3427362 - DNA, 25 bp, Homo sapien
tactggaggagatggaccaagagtt

SEQ ID NO: 3427363 - DNA, 25 bp, Homo sapien
tggaggaggagttcgggcagaggcg

SEQ ID NO: 3427364 - DNA, 25 bp, Homo sapien
tgtcagcactctggtggaggaggag

SEQ ID NO: 3427365 - DNA, 25 bp, Homo sapien
ccaagttactggaggagatggacca

SEQ ID NO: 3427366 - DNA, 25 bp, Homo sapien
ttggtgtcagcactctggtggagga

SEQ ID NO: 3427367 - DNA, 25 bp, Homo sapien
accaagagtttggtgtcagcactct

SEQ ID NO: 3427368 - DNA, 25 bp, Homo sapien
tggtccatctcctccagtaacttgg

SEQ ID NO: 3427369 - DNA, 25 bp, Homo sapien
tcctccaccagagtgctgacaccaa

SEQ ID NO: 3427370 - DNA, 25 bp, Homo sapien
cgcctctgcccgaactcctcctcca

SEQ ID NO: 3427371 - DNA, 25 bp, Homo sapien
actcctcctccaccagagtgctgac

SEQ ID NO: 3427372 - DNA, 25 bp, Homo sapien
aaactcttggtccatctcctccagt

SEQ ID NO: 3427373 - DNA, 25 bp, Homo sapien
agagtgctgacaccaaactcttggt

SEQ ID NO: 3427374 - DNA, 25 bp, Homo sapien
tgccattgattccttccgagaaggg

SEQ ID NO: 3427375 - DNA, 25 bp, Homo sapien
gattccttccgagaaggggagacaa

SEQ ID NO: 3427376 - DNA, 25 bp, Homo sapien
gggagacaatgattcttaccctcaa

SEQ ID NO: 3427377 - DNA, 25 bp, Homo sapien
gcatgccattgattccttccgagaa

SEQ ID NO: 3427378 - DNA, 25 bp, Homo sapien
gagcatgccattgattccttccgag

SEQ ID NO: 3427379 - DNA, 25 bp, Homo sapien
gagacaatgattcttaccctcaagg

SEQ ID NO: 3427380 - DNA, 25 bp, Homo sapien
cattgtctccccttctcggaaggaa

SEQ ID NO: 3427381 - DNA, 25 bp, Homo sapien
ccttgagggtaagaatcattgtctc

SEQ ID NO: 3427382 - DNA, 25 bp, Homo sapien
tcggaaggaatcaatggcatgctcc

SEQ ID NO: 3427383 - DNA, 25 bp, Homo sapien
tctcggaaggaatcaatggcatgct

SEQ ID NO: 3427384 - DNA, 25 bp, Homo sapien
cccttctcggaaggaatcaatggca

SEQ ID NO: 3427385 - DNA, 25 bp, Homo sapien
tgagggtaagaatcattgtctcccc

SEQ ID NO: 3427386 - DNA, 25 bp, Homo sapien
cctggtggataaggagcgggcagag

SEQ ID NO: 3427387 - DNA, 25 bp, Homo sapien
ggtgaacgtgaacctggtggataag

SEQ ID NO: 3427388 - DNA, 25 bp, Homo sapien
ctctgcccgctccttatccaccagg

SEQ ID NO: 3427389 - DNA, 25 bp, Homo sapien
cttatccaccaggttcacgttcacc

SEQ ID NO: 3427390 - DNA, 25 bp, Homo sapien
aacgtgaacctggtggataaggagc

SEQ ID NO: 3427391 - DNA, 25 bp, Homo sapien
cctggtggataaggagcgggcagag

SEQ ID NO: 3427392 - DNA, 25 bp, Homo sapien
acgtgctggtgaacgtgaacctggt

SEQ ID NO: 3427393 - DNA, 25 bp, Homo sapien
ctggtgaacgtgaacctggtggata

SEQ ID NO: 3427394 - DNA, 25 bp, Homo sapien
aggacgtgctggtgaacgtgaacct

SEQ ID NO: 3427395 - DNA, 25 bp, Homo sapien
ataaggagcgggcagagaaaaatgt

SEQ ID NO: 3427396 - DNA, 25 bp, Homo sapien
accaggttcacgttcaccagcacgt

SEQ ID NO: 3427397 - DNA, 25 bp, Homo sapien
ttatccaccaggttcacgttcacca

SEQ ID NO: 3427398 - DNA, 25 bp, Homo sapien
acatttttctctgcccgctccttat

SEQ ID NO: 3427399 - DNA, 25 bp, Homo sapien
tatccaccaggttcacgttcaccag

SEQ ID NO: 3427400 - DNA, 25 bp, Homo sapien
gctccttatccaccaggttcacgtt

SEQ ID NO: 3427401 - DNA, 25 bp, Homo sapien
aggttcacgttcaccagcacgtcct

SEQ ID NO: 3427402 - DNA, 25 bp, Homo sapien
actacctgccctatgccgaggacga

SEQ ID NO: 3427403 - DNA, 25 bp, Homo sapien
aagaagaagcctgactacctgccct

SEQ ID NO: 3427404 - DNA, 25 bp, Homo sapien
gaagaagaagcctgactacctgccc

SEQ ID NO: 3427405 - DNA, 25 bp, Homo sapien
agaagaagcctgactacctgcccta

SEQ ID NO: 3427406 - DNA, 25 bp, Homo sapien
tcgtcctcggcatagggcaggtagt

SEQ ID NO: 3427407 - DNA, 25 bp, Homo sapien
agggcaggtagtcaggcttcttctt

SEQ ID NO: 3427408 - DNA, 25 bp, Homo sapien
tagggcaggtagtcaggcttcttct

SEQ ID NO: 3427409 - DNA, 25 bp, Homo sapien
gggcaggtagtcaggcttcttcttc

SEQ ID NO: 3427410 - DNA, 25 bp, Homo sapien
gtggagaatgtcgggaatgggggct

SEQ ID NO: 3427411 - DNA, 25 bp, Homo sapien
agcccccattcccgacattctccac

SEQ ID NO: 3427412 - DNA, 25 bp, Homo sapien
aggtggtggctcagtggcttttcag

SEQ ID NO: 3427413 - DNA, 25 bp, Homo sapien
aatgtcgggaatgggggctctgagg

SEQ ID NO: 3427414 - DNA, 25 bp, Homo sapien
ggagaatgtcgggaatgggggctct

SEQ ID NO: 3427415 - DNA, 25 bp, Homo sapien
gaatgtcgggaatgggggctctgag

SEQ ID NO: 3427416 - DNA, 25 bp, Homo sapien
gaggtggtggctcagtggcttttca

SEQ ID NO: 3427417 - DNA, 25 bp, Homo sapien
ggctctgaggaggtggtggctcagt

SEQ ID NO: 3427418 - DNA, 25 bp, Homo sapien
tgaaaagccactgagccaccacctc

SEQ ID NO: 3427419 - DNA, 25 bp, Homo sapien
tcagagcccccattcccgacattct

SEQ ID NO: 3427420 - DNA, 25 bp, Homo sapien
agagcccccattcccgacattctcc

SEQ ID NO: 3427421 - DNA, 25 bp, Homo sapien
ctgaaaagccactgagccaccacct

SEQ ID NO: 3427422 - DNA, 25 bp, Homo sapien
cctcagagcccccattcccgacatt

SEQ ID NO: 3427423 - DNA, 25 bp, Homo sapien
actgagccaccacctcctcagagcc

SEQ ID NO: 3427424 - DNA, 25 bp, Homo sapien
cctgggtcccaacctgtacctcttg

SEQ ID NO: 3427425 - DNA, 25 bp, Homo sapien
agcctgggtcccaacctgtacctct

SEQ ID NO: 3427426 - DNA, 25 bp, Homo sapien
ccaacctgtacctcttgccttgcag

SEQ ID NO: 3427427 - DNA, 25 bp, Homo sapien
gagccagcctgggtcccaacctgta

SEQ ID NO: 3427428 - DNA, 25 bp, Homo sapien
tgggtcccaacctgtacctcttgcc

SEQ ID NO: 3427429 - DNA, 25 bp, Homo sapien
gtcccaacctgtacctcttgccttg

SEQ ID NO: 3427430 - DNA, 25 bp, Homo sapien
caaggcaagaggtacaggttgggac

SEQ ID NO: 3427431 - DNA, 25 bp, Homo sapien
agaggtacaggttgggacccaggct

SEQ ID NO: 3427432 - DNA, 25 bp, Homo sapien
ggcaagaggtacaggttgggaccca

SEQ ID NO: 3427433 - DNA, 25 bp, Homo sapien
ctgcaaggcaagaggtacaggttgg

SEQ ID NO: 3427434 - DNA, 25 bp, Homo sapien
caagaggtacaggttgggacccagg

SEQ ID NO: 3427435 - DNA, 25 bp, Homo sapien
tacaggttgggacccaggctggctc

SEQ ID NO: 3427436 - DNA, 25 bp, Homo sapien
agcagggcggcacggctgatggcct

SEQ ID NO: 3427437 - DNA, 25 bp, Homo sapien
caagtatgacgaagagcttgaaggg

SEQ ID NO: 3427438 - DNA, 25 bp, Homo sapien
gagcggccacattccttccgcttgg

SEQ ID NO: 3427439 - DNA, 25 bp, Homo sapien
tccgaatacctcacgcctgaggaga

SEQ ID NO: 3427440 - DNA, 25 bp, Homo sapien
tatcctgtccaagtatgacgaagag

SEQ ID NO: 3427441 - DNA, 25 bp, Homo sapien
aaaacctcgctctatcctgtccaag

SEQ ID NO: 3427442 - DNA, 25 bp, Homo sapien
gaatgtggccgctccccttcaagct

SEQ ID NO: 3427443 - DNA, 25 bp, Homo sapien
aagctcttcgtcatacttggacagg

SEQ ID NO: 3427444 - DNA, 25 bp, Homo sapien
cttggacaggatagagcgaggtttt

SEQ ID NO: 3427445 - DNA, 25 bp, Homo sapien
ccttcaagctcttcgtcatacttgg

SEQ ID NO: 3427446 - DNA, 25 bp, Homo sapien
tctcctcaggcgtgaggtattcgga

SEQ ID NO: 3427447 - DNA, 25 bp, Homo sapien
tccaagcggaaggaatgtggccgct

SEQ ID NO: 3427448 - DNA, 25 bp, Homo sapien
ctggctagcacagaggaacaccaaa

SEQ ID NO: 3427449 - DNA, 25 bp, Homo sapien
tttggtgttcctctgtgctagccag

SEQ ID NO: 3427450 - DNA, 25 bp, Homo sapien
gaggtagtagtgcgggcagatgact

SEQ ID NO: 3427451 - DNA, 25 bp, Homo sapien
ggaggtagtagtgcgggcagatgac

SEQ ID NO: 3427452 - DNA, 25 bp, Homo sapien
aggtagtagtgcgggcagatgactt

SEQ ID NO: 3427453 - DNA, 25 bp, Homo sapien
aggaggtagtagtgcgggcagatga

SEQ ID NO: 3427454 - DNA, 25 bp, Homo sapien
cctctcggggaccagactcaggatg

SEQ ID NO: 3427455 - DNA, 25 bp, Homo sapien
agtcatctgcccgcactactacctc

SEQ ID NO: 3427456 - DNA, 25 bp, Homo sapien
tcatctgcccgcactactacctcct

SEQ ID NO: 3427457 - DNA, 25 bp, Homo sapien
gtcatctgcccgcactactacctcc

SEQ ID NO: 3427458 - DNA, 25 bp, Homo sapien
catcctgagtctggtccccgagagg

SEQ ID NO: 3427459 - DNA, 25 bp, Homo sapien
aagtcatctgcccgcactactacct

SEQ ID NO: 3427460 - DNA, 25 bp, Homo sapien
gaagaaaatccgcaagaaggagaag

SEQ ID NO: 3427461 - DNA, 25 bp, Homo sapien
ggcagatgacttgctgcctctcggg

SEQ ID NO: 3427462 - DNA, 25 bp, Homo sapien
actcaggatggggactttggttcca

SEQ ID NO: 3427463 - DNA, 25 bp, Homo sapien
tagtagtgcgggcagatgacttgct

SEQ ID NO: 3427464 - DNA, 25 bp, Homo sapien
cctctcggggaccagactcaggatg

SEQ ID NO: 3427465 - DNA, 25 bp, Homo sapien
ggagaaggaggtagtagtgcgggca

SEQ ID NO: 3427466 - DNA, 25 bp, Homo sapien
caaagtccccatcctgagtctggtc

SEQ ID NO: 3427467 - DNA, 25 bp, Homo sapien
tggaaccaaagtccccatcctgagt

SEQ ID NO: 3427468 - DNA, 25 bp, Homo sapien
gtccccgagaggcagcaagtcatct

SEQ ID NO: 3427469 - DNA, 25 bp, Homo sapien
ccttcttgcggattttcttcaccct

SEQ ID NO: 3427470 - DNA, 25 bp, Homo sapien
agcaagtcatctgcccgcactacta

SEQ ID NO: 3427471 - DNA, 25 bp, Homo sapien
catcctgagtctggtccccgagagg

SEQ ID NO: 3427472 - DNA, 25 bp, Homo sapien
ggacgacacccgagtggagaacatg

SEQ ID NO: 3427473 - DNA, 25 bp, Homo sapien
cggacgacacccgagtggagaacat

SEQ ID NO: 3427474 - DNA, 25 bp, Homo sapien
cgtcggacgacacccgagtggagaa

SEQ ID NO: 3427475 - DNA, 25 bp, Homo sapien
gggtcgccgccgagtgtccgaagtg

SEQ ID NO: 3427476 - DNA, 25 bp, Homo sapien
ctgccgtcggacgacacccgagtgg

SEQ ID NO: 3427477 - DNA, 25 bp, Homo sapien
cgccgagtgtccgaagtggaggagg

SEQ ID NO: 3427478 - DNA, 25 bp, Homo sapien
ccactcgggtgtcgtccgacggcag

SEQ ID NO: 3427479 - DNA, 25 bp, Homo sapien
ttctccactcgggtgtcgtccgacg

SEQ ID NO: 3427480 - DNA, 25 bp, Homo sapien
atgttctccactcgggtgtcgtccg

SEQ ID NO: 3427481 - DNA, 25 bp, Homo sapien
ctccacttcggacactcggcggcga

SEQ ID NO: 3427482 - DNA, 25 bp, Homo sapien
tctccactcgggtgtcgtccgacgg

SEQ ID NO: 3427483 - DNA, 25 bp, Homo sapien
catgttctccactcgggtgtcgtcc

SEQ ID NO: 3427484 - DNA, 25 bp, Homo sapien
gctacagcagctgcgagacagtggc

SEQ ID NO: 3427485 - DNA, 25 bp, Homo sapien
agggacgccggctgcgacagttaca

SEQ ID NO: 3427486 - DNA, 25 bp, Homo sapien
tacagcagctgcgagacagtggcga

SEQ ID NO: 3427487 - DNA, 25 bp, Homo sapien
aagggacgccggctgcgacagttac

SEQ ID NO: 3427488 - DNA, 25 bp, Homo sapien
gacgccggctgcgacagttacagca

SEQ ID NO: 3427489 - DNA, 25 bp, Homo sapien
gcagctgcgagacagtggcgagaag

SEQ ID NO: 3427490 - DNA, 25 bp, Homo sapien
tgctgtaactgtcgcagccggcgtc

SEQ ID NO: 3427491 - DNA, 25 bp, Homo sapien
tcgccactgtctcgcagctgctgta

SEQ ID NO: 3427492 - DNA, 25 bp, Homo sapien
tgtaactgtcgcagccggcgtccct

SEQ ID NO: 3427493 - DNA, 25 bp, Homo sapien
gccactgtctcgcagctgctgtagc

SEQ ID NO: 3427494 - DNA, 25 bp, Homo sapien
gtaactgtcgcagccggcgtccctt

SEQ ID NO: 3427495 - DNA, 25 bp, Homo sapien
ttctcgccactgtctcgcagctgct

SEQ ID NO: 3427496 - DNA, 25 bp, Homo sapien
gaggttatagtcagctatgatagac

SEQ ID NO: 3427497 - DNA, 25 bp, Homo sapien
tctgaagcctcagctacgccggagg

SEQ ID NO: 3427498 - DNA, 25 bp, Homo sapien
tatagctgactatatcacagatagc

SEQ ID NO: 3427499 - DNA, 25 bp, Homo sapien
gctatgatagactatagctgactat

SEQ ID NO: 3427500 - DNA, 25 bp, Homo sapien
agctgactatatcacagatagctat

SEQ ID NO: 3427501 - DNA, 25 bp, Homo sapien
tgtctgaagcctcagctacgccgga

SEQ ID NO: 3427502 - DNA, 25 bp, Homo sapien
atagctatctgtgatatagtcagct

SEQ ID NO: 3427503 - DNA, 25 bp, Homo sapien
cctccggcgtagctgaggcttcaga

SEQ ID NO: 3427504 - DNA, 25 bp, Homo sapien
gctatctgtgatatagtcagctata

SEQ ID NO: 3427505 - DNA, 25 bp, Homo sapien
gtctatcatagctgactataacctc

SEQ ID NO: 3427506 - DNA, 25 bp, Homo sapien
ccggcgtagctgaggcttcagacac

SEQ ID NO: 3427507 - DNA, 25 bp, Homo sapien
tatagtcagctatagtctatcatag

SEQ ID NO: 3427508 - DNA, 25 bp, Homo sapien
gaggatgaggatcccgagcggaagg

SEQ ID NO: 3427509 - DNA, 25 bp, Homo sapien
gctggctggcaatcgcgaggagcag

SEQ ID NO: 3427510 - DNA, 25 bp, Homo sapien
ggagatccccacctacgggctggct

SEQ ID NO: 3427511 - DNA, 25 bp, Homo sapien
agttctgccgcaccttgggggagat

SEQ ID NO: 3427512 - DNA, 25 bp, Homo sapien
tgttcaacgccacgtccgagttctg

SEQ ID NO: 3427513 - DNA, 25 bp, Homo sapien
gggccatcgtgttcaacgccacgtc

SEQ ID NO: 3427514 - DNA, 25 bp, Homo sapien
agccccgctggcgagactccagctt

SEQ ID NO: 3427515 - DNA, 25 bp, Homo sapien
ttccgctcgggatcctcatcctcct

SEQ ID NO: 3427516 - DNA, 25 bp, Homo sapien
cagaactcggacgtggcgttgaaca

SEQ ID NO: 3427517 - DNA, 25 bp, Homo sapien
acgtggcgttgaacacgatggcccc

SEQ ID NO: 3427518 - DNA, 25 bp, Homo sapien
agccagcccgtaggtggggatctcc

SEQ ID NO: 3427519 - DNA, 25 bp, Homo sapien
atctcccccaaggtgcggcagaact

SEQ ID NO: 3427520 - DNA, 25 bp, Homo sapien
actttgaacgggatgaggagcgctc

SEQ ID NO: 3427521 - DNA, 25 bp, Homo sapien
ccaacggtggctccgaatctgacgg

SEQ ID NO: 3427522 - DNA, 25 bp, Homo sapien
gccaacggtggctccgaatctgacg

SEQ ID NO: 3427523 - DNA, 25 bp, Homo sapien
ctccgaatctgacggggaggagaac

SEQ ID NO: 3427524 - DNA, 25 bp, Homo sapien
agccaacggtggctccgaatctgac

SEQ ID NO: 3427525 - DNA, 25 bp, Homo sapien
tcagccaacggtggctccgaatctg

SEQ ID NO: 3427526 - DNA, 25 bp, Homo sapien
ccgtcagattcggagccaccgttgg

SEQ ID NO: 3427527 - DNA, 25 bp, Homo sapien
agattcggagccaccgttggctgag

SEQ ID NO: 3427528 - DNA, 25 bp, Homo sapien
cagattcggagccaccgttggctga

SEQ ID NO: 3427529 - DNA, 25 bp, Homo sapien
gagcgctcctcatcccgttcaaagt

SEQ ID NO: 3427530 - DNA, 25 bp, Homo sapien
gtcagattcggagccaccgttggct

SEQ ID NO: 3427531 - DNA, 25 bp, Homo sapien
gttctcctccccgtcagattcggag

SEQ ID NO: 3427532 - DNA, 25 bp, Homo sapien
accaccatcctggacgaggaaccga

SEQ ID NO: 3427533 - DNA, 25 bp, Homo sapien
accatcctggacgaggaaccgatcg

SEQ ID NO: 3427534 - DNA, 25 bp, Homo sapien
tcctggacgaggaaccgatcgtgaa

SEQ ID NO: 3427535 - DNA, 25 bp, Homo sapien
catcctggacgaggaaccgatcgtg

SEQ ID NO: 3427536 - DNA, 25 bp, Homo sapien
gacgaggaaccgatcgtgaataggg

SEQ ID NO: 3427537 - DNA, 25 bp, Homo sapien
ctggacgaggaaccgatcgtgaata

SEQ ID NO: 3427538 - DNA, 25 bp, Homo sapien
acgatcggttcctcgtccaggatgg

SEQ ID NO: 3427539 - DNA, 25 bp, Homo sapien
tattcacgatcggttcctcgtccag

SEQ ID NO: 3427540 - DNA, 25 bp, Homo sapien
gatcggttcctcgtccaggatggtg

SEQ ID NO: 3427541 - DNA, 25 bp, Homo sapien
tcggttcctcgtccaggatggtggt

SEQ ID NO: 3427542 - DNA, 25 bp, Homo sapien
tcacgatcggttcctcgtccaggat

SEQ ID NO: 3427543 - DNA, 25 bp, Homo sapien
gccagccccctattcacgatcggtt

SEQ ID NO: 3427544 - DNA, 25 bp, Homo sapien
ccgtgtactgcatcgaggataagat

SEQ ID NO: 3427545 - DNA, 25 bp, Homo sapien
tcagccgtgtactgcatcgaggata

SEQ ID NO: 3427546 - DNA, 25 bp, Homo sapien
ggtgaaggcccccaacaagtcgctg

SEQ ID NO: 3427547 - DNA, 25 bp, Homo sapien
agccgtgtactgcatcgaggataag

SEQ ID NO: 3427548 - DNA, 25 bp, Homo sapien
tgccctcagccgtgtactgcatcga

SEQ ID NO: 3427549 - DNA, 25 bp, Homo sapien
cctcagccgtgtactgcatcgagga

SEQ ID NO: 3427550 - DNA, 25 bp, Homo sapien
atcttatcctcgatgcagtacacgg

SEQ ID NO: 3427551 - DNA, 25 bp, Homo sapien
tcctcgatgcagtacacggctgagg

SEQ ID NO: 3427552 - DNA, 25 bp, Homo sapien
cttatcctcgatgcagtacacggct

SEQ ID NO: 3427553 - DNA, 25 bp, Homo sapien
tcgatgcagtacacggctgagggca

SEQ ID NO: 3427554 - DNA, 25 bp, Homo sapien
cagcgacttgttgggggccttcacc

SEQ ID NO: 3427555 - DNA, 25 bp, Homo sapien
tatcctcgatgcagtacacggctga

SEQ ID NO: 3427556 - DNA, 25 bp, Homo sapien
gaggaataccgaggcttcacacagg

SEQ ID NO: 3427557 - DNA, 25 bp, Homo sapien
gctacaaacccgacgttaagatcga

SEQ ID NO: 3427558 - DNA, 25 bp, Homo sapien
tgagacgggccggaaactcacaccc

SEQ ID NO: 3427559 - DNA, 25 bp, Homo sapien
gggaggaataccgaggcttcacaca

SEQ ID NO: 3427560 - DNA, 25 bp, Homo sapien
ccgacgttaagatcgaatacgtgga

SEQ ID NO: 3427561 - DNA, 25 bp, Homo sapien
atcgaatacgtggatgagacgggcc

SEQ ID NO: 3427562 - DNA, 25 bp, Homo sapien
gatgacaagtacagccggagggagg

SEQ ID NO: 3427563 - DNA, 25 bp, Homo sapien
tcgatgacaagtacagccggaggga

SEQ ID NO: 3427564 - DNA, 25 bp, Homo sapien
atgacaagtacagccggagggagga

SEQ ID NO: 3427565 - DNA, 25 bp, Homo sapien
cgatgacaagtacagccggagggag

SEQ ID NO: 3427566 - DNA, 25 bp, Homo sapien
tccctccggctgtacttgtcatcga

SEQ ID NO: 3427567 - DNA, 25 bp, Homo sapien
ctccctccggctgtacttgtcatcg

SEQ ID NO: 3427568 - DNA, 25 bp, Homo sapien
cctccctccggctgtacttgtcatc

SEQ ID NO: 3427569 - DNA, 25 bp, Homo sapien
tcctccctccggctgtacttgtcat

SEQ ID NO: 3427570 - DNA, 25 bp, Homo sapien
ggcccgtctcatccacgtattcgat

SEQ ID NO: 3427571 - DNA, 25 bp, Homo sapien
tcgatcttaacgtcgggtttgtagc

SEQ ID NO: 3427572 - DNA, 25 bp, Homo sapien
cacgtattcgatcttaacgtcgggt

SEQ ID NO: 3427573 - DNA, 25 bp, Homo sapien
tgggtgtgagtttccggcccgtctc

SEQ ID NO: 3427574 - DNA, 25 bp, Homo sapien
tgtgtgaagcctcggtattcctccc

SEQ ID NO: 3427575 - DNA, 25 bp, Homo sapien
cctgtgtgaagcctcggtattcctc

SEQ ID NO: 3427576 - DNA, 25 bp, Homo sapien
caacacccgccctgttattatacac

SEQ ID NO: 3427577 - DNA, 25 bp, Homo sapien
acacccgccctgttattatacacct

SEQ ID NO: 3427578 - DNA, 25 bp, Homo sapien
aggtgtataataacagggcgggtgt

SEQ ID NO: 3427579 - DNA, 25 bp, Homo sapien
gtgtataataacagggcgggtgttg

SEQ ID NO: 3427580 - DNA, 25 bp, Homo sapien
ctgcatctcctctcatgccccgcgt

SEQ ID NO: 3427581 - DNA, 25 bp, Homo sapien
caccttgtgggcacaggtggctccg

SEQ ID NO: 3427582 - DNA, 25 bp, Homo sapien
ttattatacaccttgtgggcacagg

SEQ ID NO: 3427583 - DNA, 25 bp, Homo sapien
gcatctcctctcatgccccgcgtcc

SEQ ID NO: 3427584 - DNA, 25 bp, Homo sapien
tatacaccttgtgggcacaggtggc

SEQ ID NO: 3427585 - DNA, 25 bp, Homo sapien
acccgccctgttattatacaccttg

SEQ ID NO: 3427586 - DNA, 25 bp, Homo sapien
ggagccacctgtgcccacaaggtgt

SEQ ID NO: 3427587 - DNA, 25 bp, Homo sapien
gacgcggggcatgagaggagatgca

SEQ ID NO: 3427588 - DNA, 25 bp, Homo sapien
caaggtgtataataacagggcgggt

SEQ ID NO: 3427589 - DNA, 25 bp, Homo sapien
ccacaaggtgtataataacagggcg

SEQ ID NO: 3427590 - DNA, 25 bp, Homo sapien
cctgtgcccacaaggtgtataataa

SEQ ID NO: 3427591 - DNA, 25 bp, Homo sapien
gggcatgagaggagatgcagggccc

SEQ ID NO: 3427592 - DNA, 25 bp, Homo sapien
agacagagcggcggatgaagaagct

SEQ ID NO: 3427593 - DNA, 25 bp, Homo sapien
gctttccggcagctgtcgcaccgct

SEQ ID NO: 3427594 - DNA, 25 bp, Homo sapien
ctttccggcagctgtcgcaccgctt

SEQ ID NO: 3427595 - DNA, 25 bp, Homo sapien
tttccggcagctgtcgcaccgcttc

SEQ ID NO: 3427596 - DNA, 25 bp, Homo sapien
caagatgaagacagagcggcggatg

SEQ ID NO: 3427597 - DNA, 25 bp, Homo sapien
agcttcttcatccgccgctctgtct

SEQ ID NO: 3427598 - DNA, 25 bp, Homo sapien
agcggtgcgacagctgccggaaagc

SEQ ID NO: 3427599 - DNA, 25 bp, Homo sapien
catccgccgctctgtcttcatcttg

SEQ ID NO: 3427600 - DNA, 25 bp, Homo sapien
aagcggtgcgacagctgccggaaag

SEQ ID NO: 3427601 - DNA, 25 bp, Homo sapien
gaagcggtgcgacagctgccggaaa

SEQ ID NO: 3427602 - DNA, 25 bp, Homo sapien
gctttccggcagctgtcgcaccgct

SEQ ID NO: 3427603 - DNA, 25 bp, Homo sapien
gatgaagaagctggacgaggaggcg

SEQ ID NO: 3427604 - DNA, 25 bp, Homo sapien
tgtcgcaccgcttccatggcaaggg

SEQ ID NO: 3427605 - DNA, 25 bp, Homo sapien
catggcaagggctcaggcaagatga

SEQ ID NO: 3427606 - DNA, 25 bp, Homo sapien
tcaggcaagatgaagacagagcggc

SEQ ID NO: 3427607 - DNA, 25 bp, Homo sapien
caagatgaagacagagcggcggatg

SEQ ID NO: 3427608 - DNA, 25 bp, Homo sapien
agcggtgcgacagctgccggaaagc

SEQ ID NO: 3427609 - DNA, 25 bp, Homo sapien
ttcatcttgcctgagcccttgccat

SEQ ID NO: 3427610 - DNA, 25 bp, Homo sapien
catccgccgctctgtcttcatcttg

SEQ ID NO: 3427611 - DNA, 25 bp, Homo sapien
ttgcctgagcccttgccatggaagc

SEQ ID NO: 3427612 - DNA, 25 bp, Homo sapien
gccgctctgtcttcatcttgcctga

SEQ ID NO: 3427613 - DNA, 25 bp, Homo sapien
agcccttgccatggaagcggtgcga

SEQ ID NO: 3427614 - DNA, 25 bp, Homo sapien
tgagctccagcgacacgcccctggg

SEQ ID NO: 3427615 - DNA, 25 bp, Homo sapien
aggctcagaagaccccctacatcgt

SEQ ID NO: 3427616 - DNA, 25 bp, Homo sapien
gaagatgagctccagcgacacgccc

SEQ ID NO: 3427617 - DNA, 25 bp, Homo sapien
agaagatgagctccagcgacacgcc

SEQ ID NO: 3427618 - DNA, 25 bp, Homo sapien
cccctacatcgtgctcagcggcagc

SEQ ID NO: 3427619 - DNA, 25 bp, Homo sapien
agaagaccccctacatcgtgctcag

SEQ ID NO: 3427620 - DNA, 25 bp, Homo sapien
acgatgtagggggtcttctgagcct

SEQ ID NO: 3427621 - DNA, 25 bp, Homo sapien
gctgccgctgagcacgatgtagggg

SEQ ID NO: 3427622 - DNA, 25 bp, Homo sapien
ctgagcacgatgtagggggtcttct

SEQ ID NO: 3427623 - DNA, 25 bp, Homo sapien
ggcgtgtcgctggagctcatcttct

SEQ ID NO: 3427624 - DNA, 25 bp, Homo sapien
gcccaggggcgtgtcgctggagctc

SEQ ID NO: 3427625 - DNA, 25 bp, Homo sapien
gggcgtgtcgctggagctcatcttc

SEQ ID NO: 3427626 - DNA, 25 bp, Homo sapien
ctgcctcaaccttcatattaaataa

SEQ ID NO: 3427627 - DNA, 25 bp, Homo sapien
tcatattaaataaagctccctcctt

SEQ ID NO: 3427628 - DNA, 25 bp, Homo sapien
ttcatattaaataaagctccctcct

SEQ ID NO: 3427629 - DNA, 25 bp, Homo sapien
gccctgcctcaaccttcatattaaa

SEQ ID NO: 3427630 - DNA, 25 bp, Homo sapien
gcctcaaccttcatattaaataaag

SEQ ID NO: 3427631 - DNA, 25 bp, Homo sapien
ggccctgcctcaaccttcatattaa

SEQ ID NO: 3427632 - DNA, 25 bp, Homo sapien
ctttatttaatatgaaggttgaggc

SEQ ID NO: 3427633 - DNA, 25 bp, Homo sapien
aggagggagctttatttaatatgaa

SEQ ID NO: 3427634 - DNA, 25 bp, Homo sapien
ttaatatgaaggttgaggcagggcc

SEQ ID NO: 3427635 - DNA, 25 bp, Homo sapien
aaggagggagctttatttaatatga

SEQ ID NO: 3427636 - DNA, 25 bp, Homo sapien
tttaatatgaaggttgaggcagggc

SEQ ID NO: 3427637 - DNA, 25 bp, Homo sapien
ttatttaatatgaaggttgaggcag

SEQ ID NO: 3427638 - DNA, 25 bp, Homo sapien
taaacgatggaagagagagcgagcc

SEQ ID NO: 3427639 - DNA, 25 bp, Homo sapien
gctcctgctaggtgagacctggcca

SEQ ID NO: 3427640 - DNA, 25 bp, Homo sapien
tccatagaaagacaaacggccacct

SEQ ID NO: 3427641 - DNA, 25 bp, Homo sapien
gccaccctggtctgtgtctagagga

SEQ ID NO: 3427642 - DNA, 25 bp, Homo sapien
gacttgtcccgtgtacagtgaccca

SEQ ID NO: 3427643 - DNA, 25 bp, Homo sapien
cagggccggctctctgatagaaagt

SEQ ID NO: 3427644 - DNA, 25 bp, Homo sapien
tcacagagttcaggccaaggaatct

SEQ ID NO: 3427645 - DNA, 25 bp, Homo sapien
gatggccaggtctcacctagcagga

SEQ ID NO: 3427646 - DNA, 25 bp, Homo sapien
tcctctagacacagaccagggtggc

SEQ ID NO: 3427647 - DNA, 25 bp, Homo sapien
cactttctatcagagagccggccct

SEQ ID NO: 3427648 - DNA, 25 bp, Homo sapien
tgaccgggagacattacaggacagt

SEQ ID NO: 3427649 - DNA, 25 bp, Homo sapien
tctgggtcactgtacacgggacaag

SEQ ID NO: 3427650 - DNA, 25 bp, Homo sapien
cctcagggcagcttttgagccatcg

SEQ ID NO: 3427651 - DNA, 25 bp, Homo sapien
ggcagcttttgagccatcgctgccc

SEQ ID NO: 3427652 - DNA, 25 bp, Homo sapien
cctggttgagggctcactgaccctc

SEQ ID NO: 3427653 - DNA, 25 bp, Homo sapien
tgagccatcgctgcccctcaggtac

SEQ ID NO: 3427654 - DNA, 25 bp, Homo sapien
agcccatgctggcagggcctgcctg

SEQ ID NO: 3427655 - DNA, 25 bp, Homo sapien
tgaggcctgcgtccactgcccagaa

SEQ ID NO: 3427656 - DNA, 25 bp, Homo sapien
tgcccagaagggcaccttttcccag

SEQ ID NO: 3427657 - DNA, 25 bp, Homo sapien
gctgtgctcctgaggcctgcgtcca

SEQ ID NO: 3427658 - DNA, 25 bp, Homo sapien
ctgcccaatgtacacctgggctgag

SEQ ID NO: 3427659 - DNA, 25 bp, Homo sapien
tgccaagggacaatgacaggaccag

SEQ ID NO: 3427660 - DNA, 25 bp, Homo sapien
gatgccaagggacaatgacaggacc

SEQ ID NO: 3427661 - DNA, 25 bp, Homo sapien
cttcagtccactgcccaatgtacac

SEQ ID NO: 3427662 - DNA, 25 bp, Homo sapien
tctttagctgaacatatgtatgctt

SEQ ID NO: 3427663 - DNA, 25 bp, Homo sapien
ggcactaagaaccatgcccggctat

SEQ ID NO: 3427664 - DNA, 25 bp, Homo sapien
ttggggctgttataaatagtgctgt

SEQ ID NO: 3427665 - DNA, 25 bp, Homo sapien
attcttgttcatgtctttagctgaa

SEQ ID NO: 3427666 - DNA, 25 bp, Homo sapien
ttgagcagtcactgtggccagggcc

SEQ ID NO: 3427667 - DNA, 25 bp, Homo sapien
tcaggtcacttgctgtgcttgagca

SEQ ID NO: 3427668 - DNA, 25 bp, Homo sapien
ggtcacttgctgtgcttgagcagtc

SEQ ID NO: 3427669 - DNA, 25 bp, Homo sapien
cactgtggccagggccggggggtgg

SEQ ID NO: 3427670 - DNA, 25 bp, Homo sapien
taggagaagtaagcaaggctcattg

SEQ ID NO: 3427671 - DNA, 25 bp, Homo sapien
gcatgaattcctcaggctctctcat

SEQ ID NO: 3427672 - DNA, 25 bp, Homo sapien
catcgggcagggatgaaccaatgcc

SEQ ID NO: 3427673 - DNA, 25 bp, Homo sapien
caccatcctggcgtatgcgggactt

SEQ ID NO: 3427674 - DNA, 25 bp, Homo sapien
tgtacgggagtgctcacctccagct

SEQ ID NO: 3427675 - DNA, 25 bp, Homo sapien
gttcataccaatttaagcattcagg

SEQ ID NO: 3427676 - DNA, 25 bp, Homo sapien
tgatgaagtgaaaaactgctcccta

SEQ ID NO: 3427677 - DNA, 25 bp, Homo sapien
tttctagtcaccctgtgtacgggag

SEQ ID NO: 3427678 - DNA, 25 bp, Homo sapien
tgagccacagttatcaggagaggag

SEQ ID NO: 3427679 - DNA, 25 bp, Homo sapien
ggagtccagctcagaagatgattct

SEQ ID NO: 3427680 - DNA, 25 bp, Homo sapien
aggacccaattctccacttgctcag

SEQ ID NO: 3427681 - DNA, 25 bp, Homo sapien
tgtttgttaacacaaaccgcagaca

SEQ ID NO: 3427682 - DNA, 25 bp, Homo sapien
gggtctacgtgaaaaagtcataata

SEQ ID NO: 3427683 - DNA, 25 bp, Homo sapien
atagatcaagtaagcgtgagaaacg

SEQ ID NO: 3427684 - DNA, 25 bp, Homo sapien
aagtaagcgtgagaaacgtgactgg

SEQ ID NO: 3427685 - DNA, 25 bp, Homo sapien
ttattattttagccaccagggccag

SEQ ID NO: 3427686 - DNA, 25 bp, Homo sapien
tagagctatagagttgaggcgcccc

SEQ ID NO: 3427687 - DNA, 25 bp, Homo sapien
tacggttttcggagggatcagactc

SEQ ID NO: 3427688 - DNA, 25 bp, Homo sapien
gacttaggcttgacggacctggcgt

SEQ ID NO: 3427689 - DNA, 25 bp, Homo sapien
cagttctgagggagataggcctcca

SEQ ID NO: 3427690 - DNA, 25 bp, Homo sapien
ccgccacccggccgctcctgcggat

SEQ ID NO: 3427691 - DNA, 25 bp, Homo sapien
ctcccgccacccggccgctcctgcg

SEQ ID NO: 3427692 - DNA, 25 bp, Homo sapien
tcccgccacccggccgctcctgcgg

SEQ ID NO: 3427693 - DNA, 25 bp, Homo sapien
gccacccggccgctcctgcggatac

SEQ ID NO: 3427694 - DNA, 25 bp, Homo sapien
gccacttggcgtggaaagctaacca

SEQ ID NO: 3427695 - DNA, 25 bp, Homo sapien
agatgcccagagtccgtagccaggg

SEQ ID NO: 3427696 - DNA, 25 bp, Homo sapien
gatcctgcctaacaggtggcgcaag

SEQ ID NO: 3427697 - DNA, 25 bp, Homo sapien
gggtctctctacctacagggcgaag

SEQ ID NO: 3427698 - DNA, 25 bp, Homo sapien
ctggaacttctaagggcccacgagc

SEQ ID NO: 3427699 - DNA, 25 bp, Homo sapien
gggttacagtggcttgctcgatccc

SEQ ID NO: 3427700 - DNA, 25 bp, Homo sapien
cacgagcaatctcatagtaagagga

SEQ ID NO: 3427701 - DNA, 25 bp, Homo sapien
ggttacagtggcttgctcgatcccc

SEQ ID NO: 3427702 - DNA, 25 bp, Homo sapien
gctctgccacgaagtctcggtgctt

SEQ ID NO: 3427703 - DNA, 25 bp, Homo sapien
cacgaagtctcggtgcttttgggag

SEQ ID NO: 3427704 - DNA, 25 bp, Homo sapien
catgggctctgccacgaagtctcgg

SEQ ID NO: 3427705 - DNA, 25 bp, Homo sapien
caggacttcaccaatcccagccagg

SEQ ID NO: 3427706 - DNA, 25 bp, Homo sapien
aggcgtcgcaccactctcgaaggca

SEQ ID NO: 3427707 - DNA, 25 bp, Homo sapien
gaaggcgtcgcaccactctcgaagg

SEQ ID NO: 3427708 - DNA, 25 bp, Homo sapien
aaggcgtcgcaccactctcgaaggc

SEQ ID NO: 3427709 - DNA, 25 bp, Homo sapien
agaaggcgtcgcaccactctcgaag

SEQ ID NO: 3427710 - DNA, 25 bp, Homo sapien
aaaggacgggggaggcatgcaagag

SEQ ID NO: 3427711 - DNA, 25 bp, Homo sapien
ggggaggagtccctactcggctgca

SEQ ID NO: 3427712 - DNA, 25 bp, Homo sapien
acgggggaggcatgcaagagcgaga

SEQ ID NO: 3427713 - DNA, 25 bp, Homo sapien
aggagtccctactcggctgcaaact

SEQ ID NO: 3427714 - DNA, 25 bp, Homo sapien
aatggtatcaaacggattgaaagtg

SEQ ID NO: 3427715 - DNA, 25 bp, Homo sapien
ggtatcaaacggattgaaagtgagg

SEQ ID NO: 3427716 - DNA, 25 bp, Homo sapien
tggtatcaaacggattgaaagtgag

SEQ ID NO: 3427717 - DNA, 25 bp, Homo sapien
ccaaatggtatcaaacggattgaaa

SEQ ID NO: 3427718 - DNA, 25 bp, Homo sapien
gaatgaactaccaaccgcagctctt

SEQ ID NO: 3427719 - DNA, 25 bp, Homo sapien
agtgccagtacagggacggttcacg

SEQ ID NO: 3427720 - DNA, 25 bp, Homo sapien
taaacagcaggtgagtaggacacat

SEQ ID NO: 3427721 - DNA, 25 bp, Homo sapien
tcctagctgtgtaacctcggagaag

SEQ ID NO: 3427722 - DNA, 25 bp, Homo sapien
ggagttctccgaccatgcgctcctg

SEQ ID NO: 3427723 - DNA, 25 bp, Homo sapien
tcgggcgacaggtcccggagttctc

SEQ ID NO: 3427724 - DNA, 25 bp, Homo sapien
tgatgtgcgtgtctcggaagtagta

SEQ ID NO: 3427725 - DNA, 25 bp, Homo sapien
tggctctgcgccttgatgatgtgcg

SEQ ID NO: 3427726 - DNA, 25 bp, Homo sapien
gaggtcgacgtggtctccagtgacc

SEQ ID NO: 3427727 - DNA, 25 bp, Homo sapien
tcaggaagtacttgatgccggccac

SEQ ID NO: 3427728 - DNA, 25 bp, Homo sapien
tccccatctccatcgtcaggaagta

SEQ ID NO: 3427729 - DNA, 25 bp, Homo sapien
ctggtcttgcggcagtctgtgctcc

SEQ ID NO: 3427730 - DNA, 25 bp, Homo sapien
cacagttgtgctttaggagctgaga

SEQ ID NO: 3427731 - DNA, 25 bp, Homo sapien
ggagttctgccagggaaccacaagg

SEQ ID NO: 3427732 - DNA, 25 bp, Homo sapien
acatctgcacacagttgtgctttag

SEQ ID NO: 3427733 - DNA, 25 bp, Homo sapien
ggacctcaaagtcacagcgcagctt

SEQ ID NO: 3427734 - DNA, 25 bp, Homo sapien
atacggcccacggacctgaagtgcc

SEQ ID NO: 3427735 - DNA, 25 bp, Homo sapien
atttattgtgacagatacggcccac

SEQ ID NO: 3427736 - DNA, 25 bp, Homo sapien
tattgtgacagatacggcccacgga

SEQ ID NO: 3427737 - DNA, 25 bp, Homo sapien
agatacggcccacggacctgaagtg

SEQ ID NO: 3427738 - DNA, 25 bp, Homo sapien
tatgagggagtcaggcagtcttcac

SEQ ID NO: 3427739 - DNA, 25 bp, Homo sapien
ggtcacacacctacttatgagggag

SEQ ID NO: 3427740 - DNA, 25 bp, Homo sapien
gagccagctgatctctagatgggac

SEQ ID NO: 3427741 - DNA, 25 bp, Homo sapien
gactgaagactggaccacttggacc

SEQ ID NO: 3427742 - DNA, 25 bp, Homo sapien
gacctttccatgagtgcagcccagg

SEQ ID NO: 3427743 - DNA, 25 bp, Homo sapien
taagtccagcctaactcaggtgagg

SEQ ID NO: 3427744 - DNA, 25 bp, Homo sapien
catgatcgccgagtacttcgacgag

SEQ ID NO: 3427745 - DNA, 25 bp, Homo sapien
gaaagacaccaagatactagccagc

SEQ ID NO: 3427746 - DNA, 25 bp, Homo sapien
caggccaccaagatgatgagccgcc

SEQ ID NO: 3427747 - DNA, 25 bp, Homo sapien
catgagtgcctgtgaagggagtcct

SEQ ID NO: 3427748 - DNA, 25 bp, Homo sapien
tgagccgccggaaaatcctgctgct

SEQ ID NO: 3427749 - DNA, 25 bp, Homo sapien
ggagtcctggatagtgaggccctgg

SEQ ID NO: 3427750 - DNA, 25 bp, Homo sapien
ggcgctctacccctggaaagtggga

SEQ ID NO: 3427751 - DNA, 25 bp, Homo sapien
gaccccgtgcggatttcgagacaag

SEQ ID NO: 3427752 - DNA, 25 bp, Homo sapien
ggccaatctggcctatcccctatgg

SEQ ID NO: 3427753 - DNA, 25 bp, Homo sapien
ctgatcccatccaggcgctgagagg

SEQ ID NO: 3427754 - DNA, 25 bp, Homo sapien
cagaatacccagcaatgcaggagta

SEQ ID NO: 3427755 - DNA, 25 bp, Homo sapien
agcaatgcaggagtatccagacacc

SEQ ID NO: 3427756 - DNA, 25 bp, Homo sapien
ccagaagcccacgtatgaccggcgg

SEQ ID NO: 3427757 - DNA, 25 bp, Homo sapien
agaagcccacgtatgaccggcggtg

SEQ ID NO: 3427758 - DNA, 25 bp, Homo sapien
gttgtagtgcgcaggtctcggtctc

SEQ ID NO: 3427759 - DNA, 25 bp, Homo sapien
gctggcacttccccgagggagtgtt

SEQ ID NO: 3427760 - DNA, 25 bp, Homo sapien
ggcggtctggtcgcgaggcctcctg

SEQ ID NO: 3427761 - DNA, 25 bp, Homo sapien
tgcgcgccgctacggccccgaaggc

SEQ ID NO: 3427762 - DNA, 25 bp, Homo sapien
cttagccgcaggaaggcgcgcgacc

SEQ ID NO: 3427763 - DNA, 25 bp, Homo sapien
ctcagggcccacttgccggaacttc

SEQ ID NO: 3427764 - DNA, 25 bp, Homo sapien
ggtggcgccgtatgccacgtcctct

SEQ ID NO: 3427765 - DNA, 25 bp, Homo sapien
aggcgcgcgaccaacccggaagctg

SEQ ID NO: 3427766 - DNA, 25 bp, Homo sapien
ctttgggaggctcgggatgctccgt

SEQ ID NO: 3427767 - DNA, 25 bp, Homo sapien
cggcggcagctgcaattctgctttg

SEQ ID NO: 3427768 - DNA, 25 bp, Homo sapien
gaggctcgggatgctccgtcgccat

SEQ ID NO: 3427769 - DNA, 25 bp, Homo sapien
tgggaggctcgggatgctccgtcgc

SEQ ID NO: 3427770 - DNA, 25 bp, Homo sapien
tcggagctccgatctctgccaactt

SEQ ID NO: 3427771 - DNA, 25 bp, Homo sapien
ctggatcggagctccgatctctgcc

SEQ ID NO: 3427772 - DNA, 25 bp, Homo sapien
gatcggagctccgatctctgccaac

SEQ ID NO: 3427773 - DNA, 25 bp, Homo sapien
gagctccgatctctgccaacttggc

SEQ ID NO: 3427774 - DNA, 25 bp, Homo sapien
cagggcaaagtacacgatcaatggg

SEQ ID NO: 3427775 - DNA, 25 bp, Homo sapien
cgcttctccgcaggcccgtaaaggc

SEQ ID NO: 3427776 - DNA, 25 bp, Homo sapien
cccctcgacttcctgtgttcctcac

SEQ ID NO: 3427777 - DNA, 25 bp, Homo sapien
ctgcagggcaaagtacacgatcaat

SEQ ID NO: 3427778 - DNA, 25 bp, Homo sapien
tggcgggtgtagctctgcagccgct

SEQ ID NO: 3427779 - DNA, 25 bp, Homo sapien
ctggcgggtgtagctctgcagccgc

SEQ ID NO: 3427780 - DNA, 25 bp, Homo sapien
caactaagctggcaaaggcaagaac

SEQ ID NO: 3427781 - DNA, 25 bp, Homo sapien
ttcaacaaaacgtacccagtgcctg

SEQ ID NO: 3427782 - DNA, 25 bp, Homo sapien
cctggagaagctcggcctatcctga

SEQ ID NO: 3427783 - DNA, 25 bp, Homo sapien
gaaagaatgaagaccgagccgtgat

SEQ ID NO: 3427784 - DNA, 25 bp, Homo sapien
ccggccgattcagcacgatgccagt

SEQ ID NO: 3427785 - DNA, 25 bp, Homo sapien
gaggtggagcggctttgtccccatc

SEQ ID NO: 3427786 - DNA, 25 bp, Homo sapien
ggtggagcggctttgtccccatctt

SEQ ID NO: 3427787 - DNA, 25 bp, Homo sapien
tcccctctcaaaaccggccgattca

SEQ ID NO: 3427788 - DNA, 25 bp, Homo sapien
cagatggaatcttaaaaaacagaag

SEQ ID NO: 3427789 - DNA, 25 bp, Homo sapien
gcagatggaatcttaaaaaacagaa

SEQ ID NO: 3427790 - DNA, 25 bp, Homo sapien
gaatcttaaaaaacagaagaatctc

SEQ ID NO: 3427791 - DNA, 25 bp, Homo sapien
aatgtgcaagggtgtcacatctcac

SEQ ID NO: 3427792 - DNA, 25 bp, Homo sapien
catgctcatgaactacaaaaggatc

SEQ ID NO: 3427793 - DNA, 25 bp, Homo sapien
atcatgctcatgaactacaaaagga

SEQ ID NO: 3427794 - DNA, 25 bp, Homo sapien
acacatgcacgtgaacacccaatca

SEQ ID NO: 3427795 - DNA, 25 bp, Homo sapien
ggaagggctaccctgaacatatgga

SEQ ID NO: 3427796 - DNA, 25 bp, Homo sapien
gcctaagtattaagcctggcatgca

SEQ ID NO: 3427797 - DNA, 25 bp, Homo sapien
tatagggactttataggcgcgtgcc

SEQ ID NO: 3427798 - DNA, 25 bp, Homo sapien
gaagagctcacaattctgtcatggc

SEQ ID NO: 3427799 - DNA, 25 bp, Homo sapien
ctgcagaggggggagtcccaaaggt

SEQ ID NO: 3427800 - DNA, 25 bp, Homo sapien
tgcagaggggggagtcccaaaggtg

SEQ ID NO: 3427801 - DNA, 25 bp, Homo sapien
tggctcacccacacggagaggaggc

SEQ ID NO: 3427802 - DNA, 25 bp, Homo sapien
actggctcacccacacggagaggag

SEQ ID NO: 3427803 - DNA, 25 bp, Homo sapien
gctgagccaacttcagccgctcctc

SEQ ID NO: 3427804 - DNA, 25 bp, Homo sapien
ctgctgagccaacttcagccgctcc

SEQ ID NO: 3427805 - DNA, 25 bp, Homo sapien
agggacctaatgagtccaaggccag

SEQ ID NO: 3427806 - DNA, 25 bp, Homo sapien
cactgccccttcagggacctaatga

SEQ ID NO: 3427807 - DNA, 25 bp, Homo sapien
gaagccttagttctaggacccagct

SEQ ID NO: 3427808 - DNA, 25 bp, Homo sapien
ccttcagggacctaatgagtccaag

SEQ ID NO: 3427809 - DNA, 25 bp, Homo sapien
tgctccaagagctcatgttccttca

SEQ ID NO: 3427810 - DNA, 25 bp, Homo sapien
gctcatgttccttcagcgaatgatc

SEQ ID NO: 3427811 - DNA, 25 bp, Homo sapien
agagctcatgttccttcagcgaatg

SEQ ID NO: 3427812 - DNA, 25 bp, Homo sapien
tccaagagctcatgttccttcagcg

SEQ ID NO: 3427813 - DNA, 25 bp, Homo sapien
cacatgcaggccacaggtcatagtt

SEQ ID NO: 3427814 - DNA, 25 bp, Homo sapien
tgaaagctttggaagatactagaac

SEQ ID NO: 3427815 - DNA, 25 bp, Homo sapien
agttatttttagctcataggccata

SEQ ID NO: 3427816 - DNA, 25 bp, Homo sapien
aagcactataaatgacagccaactg

SEQ ID NO: 3427817 - DNA, 25 bp, Homo sapien
gtcgttcctgctccagtaacacagc

SEQ ID NO: 3427818 - DNA, 25 bp, Homo sapien
tgtcgttcctgctccagtaacacag

SEQ ID NO: 3427819 - DNA, 25 bp, Homo sapien
tcgttcctgctccagtaacacagct

SEQ ID NO: 3427820 - DNA, 25 bp, Homo sapien
cgttcctgctccagtaacacagctg

SEQ ID NO: 3427821 - DNA, 25 bp, Homo sapien
agaggagtgcgcacaccaatctggc

SEQ ID NO: 3427822 - DNA, 25 bp, Homo sapien
caccaatctggcccatgtcttgtgg

SEQ ID NO: 3427823 - DNA, 25 bp, Homo sapien
gacccagaggagtgcgcacaccaat

SEQ ID NO: 3427824 - DNA, 25 bp, Homo sapien
ctcgaggacccagaggagtgcgcac

SEQ ID NO: 3427825 - DNA, 25 bp, Homo sapien
caaaactgtaggagtggggcccact

SEQ ID NO: 3427826 - DNA, 25 bp, Homo sapien
ttcatctcttcctggcggctctcct

SEQ ID NO: 3427827 - DNA, 25 bp, Homo sapien
tggggcccacagaggggtcatccat

SEQ ID NO: 3427828 - DNA, 25 bp, Homo sapien
agcctgggggatcttggggcccaca

SEQ ID NO: 3427829 - DNA, 25 bp, Homo sapien
gctgagaattcatctcttcctggcg

SEQ ID NO: 3427830 - DNA, 25 bp, Homo sapien
ctcctttttagatacggacactgtg

SEQ ID NO: 3427831 - DNA, 25 bp, Homo sapien
gcccagggacgagcgagcatctgtt

SEQ ID NO: 3427832 - DNA, 25 bp, Homo sapien
tttttagatacggacactgtgtcct

SEQ ID NO: 3427833 - DNA, 25 bp, Homo sapien
actggcccagggacgagcgagcatc

SEQ ID NO: 3427834 - DNA, 25 bp, Homo sapien
gaaattggcacaaaatagaagctat

SEQ ID NO: 3427835 - DNA, 25 bp, Homo sapien
tatctataagatgctgagggcggaa

SEQ ID NO: 3427836 - DNA, 25 bp, Homo sapien
taggcacgtatagtacttggaactc

SEQ ID NO: 3427837 - DNA, 25 bp, Homo sapien
tggaactcaaagcaattaaatgaaa

SEQ ID NO: 3427838 - DNA, 25 bp, Homo sapien
ggtcagggaatccaagcactgtgcc

SEQ ID NO: 3427839 - DNA, 25 bp, Homo sapien
ccagctgggtcagggaatccaagca

SEQ ID NO: 3427840 - DNA, 25 bp, Homo sapien
gctgggtcagggaatccaagcactg

SEQ ID NO: 3427841 - DNA, 25 bp, Homo sapien
ctgtcaagaggaggaaaaccagctg

SEQ ID NO: 3427842 - DNA, 25 bp, Homo sapien
aatcagagccacgggaccgggttga

SEQ ID NO: 3427843 - DNA, 25 bp, Homo sapien
atttcaggttcttcagtcacatact

SEQ ID NO: 3427844 - DNA, 25 bp, Homo sapien
ggttcttcagtcacatactcaatct

SEQ ID NO: 3427845 - DNA, 25 bp, Homo sapien
gataaagttgggctcgtaaatttca

SEQ ID NO: 3427846 - DNA, 25 bp, Homo sapien
gagttctccagtttgtcaagtttct

SEQ ID NO: 3427847 - DNA, 25 bp, Homo sapien
ggctgcagagttctccagtttgtca

SEQ ID NO: 3427848 - DNA, 25 bp, Homo sapien
ttgggggctgcagagttctccagtt

SEQ ID NO: 3427849 - DNA, 25 bp, Homo sapien
cagagttctccagtttgtcaagttt

SEQ ID NO: 3427850 - DNA, 25 bp, Homo sapien
gcaacttcttcttggacagcttggg

SEQ ID NO: 3427851 - DNA, 25 bp, Homo sapien
cattcggcgcaacttcttcttggac

SEQ ID NO: 3427852 - DNA, 25 bp, Homo sapien
cagccacagtgaagcggttcattcg

SEQ ID NO: 3427853 - DNA, 25 bp, Homo sapien
aagcggttcattcggcgcaacttct

SEQ ID NO: 3427854 - DNA, 25 bp, Homo sapien
gggtcctgcgctgtcacatcgtgca

SEQ ID NO: 3427855 - DNA, 25 bp, Homo sapien
cacaggcacagagttccgagtggcc

SEQ ID NO: 3427856 - DNA, 25 bp, Homo sapien
cctggatgcctgtgcgtttgatgaa

SEQ ID NO: 3427857 - DNA, 25 bp, Homo sapien
tgaaccaagagcttagggtcctgcg

SEQ ID NO: 3427858 - DNA, 25 bp, Homo sapien
ccccatggatggtcagctttggctt

SEQ ID NO: 3427859 - DNA, 25 bp, Homo sapien
ttaggccgaactttctctcgcattt

SEQ ID NO: 3427860 - DNA, 25 bp, Homo sapien
tctggtagtcgatgtcaattttgcc

SEQ ID NO: 3427861 - DNA, 25 bp, Homo sapien
caattttgcccatcttaggccgaac

SEQ ID NO: 3427862 - DNA, 25 bp, Homo sapien
catggtgactacgatttcaaggatc

SEQ ID NO: 3427863 - DNA, 25 bp, Homo sapien
taaaatgagggcactcgacaggaag

SEQ ID NO: 3427864 - DNA, 25 bp, Homo sapien
tgagaacacggccaacgttaggacc

SEQ ID NO: 3427865 - DNA, 25 bp, Homo sapien
catttctaagacaggatacgaagag

SEQ ID NO: 3427866 - DNA, 25 bp, Homo sapien
gacactcagtgggagcacaatccta

SEQ ID NO: 3427867 - DNA, 25 bp, Homo sapien
ggagcacaatcctaacgcacatcag

SEQ ID NO: 3427868 - DNA, 25 bp, Homo sapien
tgctacattgtagacccagacactc

SEQ ID NO: 3427869 - DNA, 25 bp, Homo sapien
aaatcccagtgagggctacctggct

SEQ ID NO: 3427870 - DNA, 25 bp, Homo sapien
ttctccttcagtcgtgtctcgaact

SEQ ID NO: 3427871 - DNA, 25 bp, Homo sapien
ccccaaggaaatccttagctcatca

SEQ ID NO: 3427872 - DNA, 25 bp, Homo sapien
ttcttctccttcagtcgtgtctcga

SEQ ID NO: 3427873 - DNA, 25 bp, Homo sapien
tactggcatccccaaggaaatcctt

SEQ ID NO: 3427874 - DNA, 25 bp, Homo sapien
atacgatgggggtggtccatatcgc

SEQ ID NO: 3427875 - DNA, 25 bp, Homo sapien
gtccatatcgctgcatggcaatcag

SEQ ID NO: 3427876 - DNA, 25 bp, Homo sapien
gattttcaggttgggatacgatggg

SEQ ID NO: 3427877 - DNA, 25 bp, Homo sapien
tgggcgagttcagcccagggatttt

SEQ ID NO: 3427878 - DNA, 25 bp, Homo sapien
cagcatggtacccaaaggaacagct

SEQ ID NO: 3427879 - DNA, 25 bp, Homo sapien
accagcatggtacccaaaggaacag

SEQ ID NO: 3427880 - DNA, 25 bp, Homo sapien
agccaccagcatggtacccaaagga

SEQ ID NO: 3427881 - DNA, 25 bp, Homo sapien
ggaggtttgccccagccaccagcat

SEQ ID NO: 3427882 - DNA, 25 bp, Homo sapien
caaacacgtccccatagagcggttt

SEQ ID NO: 3427883 - DNA, 25 bp, Homo sapien
tggttccaaacacgtccccatagag

SEQ ID NO: 3427884 - DNA, 25 bp, Homo sapien
cccatagagcggtttcccagtctca

SEQ ID NO: 3427885 - DNA, 25 bp, Homo sapien
gcagcattggttccaaacacgtccc

SEQ ID NO: 3427886 - DNA, 25 bp, Homo sapien
ggattcttcatcagatggttccagt

SEQ ID NO: 3427887 - DNA, 25 bp, Homo sapien
agcctgtctcatctggtttgtcttc

SEQ ID NO: 3427888 - DNA, 25 bp, Homo sapien
gattcttcatcagatggttccagtt

SEQ ID NO: 3427889 - DNA, 25 bp, Homo sapien
cctcagctcaatgagttcaggggtc

SEQ ID NO: 3427890 - DNA, 25 bp, Homo sapien
tcaatgagttcaggggtctccattc

SEQ ID NO: 3427891 - DNA, 25 bp, Homo sapien
ttcctcagctcaatgagttcagggg

SEQ ID NO: 3427892 - DNA, 25 bp, Homo sapien
cagctcaatgagttcaggggtctcc

SEQ ID NO: 3427893 - DNA, 25 bp, Homo sapien
tgagagtttgcaggccacagaacag

SEQ ID NO: 3427894 - DNA, 25 bp, Homo sapien
tgcgaaggacaatgggatcaggccc

SEQ ID NO: 3427895 - DNA, 25 bp, Homo sapien
tcccgctggaagaggtgacaatcta

SEQ ID NO: 3427896 - DNA, 25 bp, Homo sapien
caaggcagctagagttcacaggata

SEQ ID NO: 3427897 - DNA, 25 bp, Homo sapien
atgtcataaatgtgggttgatccca

SEQ ID NO: 3427898 - DNA, 25 bp, Homo sapien
aatgtgggttgatcccatcatggcc

SEQ ID NO: 3427899 - DNA, 25 bp, Homo sapien
tcataaatgtgggttgatcccatca

SEQ ID NO: 3427900 - DNA, 25 bp, Homo sapien
tgggttgatcccatcatggcccctc

SEQ ID NO: 3427901 - DNA, 25 bp, Homo sapien
tggccataggatccagctccaactc

SEQ ID NO: 3427902 - DNA, 25 bp, Homo sapien
cttctgtttggcagcgtgctcagcc

SEQ ID NO: 3427903 - DNA, 25 bp, Homo sapien
gcacatgctcctcatacttctgggt

SEQ ID NO: 3427904 - DNA, 25 bp, Homo sapien
acttccacaccttgcagctcaggag

SEQ ID NO: 3427905 - DNA, 25 bp, Homo sapien
cactagagggcaccatgccactgaa

SEQ ID NO: 3427906 - DNA, 25 bp, Homo sapien
gaaaggcgctgaatctgaattctct

SEQ ID NO: 3427907 - DNA, 25 bp, Homo sapien
tcatcgtccttaaagagggcagccc

SEQ ID NO: 3427908 - DNA, 25 bp, Homo sapien
tgccactgaaaacggcaggccaggg

SEQ ID NO: 3427909 - DNA, 25 bp, Homo sapien
cttgctgcccccacggctgtcctgg

SEQ ID NO: 3427910 - DNA, 25 bp, Homo sapien
tcttgctgcccccacggctgtcctg

SEQ ID NO: 3427911 - DNA, 25 bp, Homo sapien
agaggtggttcttgtgtgaagccca

SEQ ID NO: 3427912 - DNA, 25 bp, Homo sapien
gtggttcttgtgtgaagcccaggca

SEQ ID NO: 3427913 - DNA, 25 bp, Homo sapien
tgaaatgacaagtccttgggaactg

SEQ ID NO: 3427914 - DNA, 25 bp, Homo sapien
ccaggcatccagacgtagggccaaa

SEQ ID NO: 3427915 - DNA, 25 bp, Homo sapien
cacaaggtcagttgggaaggcctgc

SEQ ID NO: 3427916 - DNA, 25 bp, Homo sapien
cagcccagtgattgtagaaagagac

SEQ ID NO: 3427917 - DNA, 25 bp, Homo sapien
gtcaaatgcgccgtctaatcccagt

SEQ ID NO: 3427918 - DNA, 25 bp, Homo sapien
ggttggcgtcaccaccagtcaaatg

SEQ ID NO: 3427919 - DNA, 25 bp, Homo sapien
gctcgaccgccgctgcctgttgcgg

SEQ ID NO: 3427920 - DNA, 25 bp, Homo sapien
agccagcgagctgcacgcacgcgcg

SEQ ID NO: 3427921 - DNA, 25 bp, Homo sapien
cctgttgcggctcgcgaggccgaca

SEQ ID NO: 3427922 - DNA, 25 bp, Homo sapien
aggcgacgccgatctggctcccagg

SEQ ID NO: 3427923 - DNA, 25 bp, Homo sapien
tgaggggactgggcgaccccggatc

SEQ ID NO: 3427924 - DNA, 25 bp, Homo sapien
tgggcgaccccggatccccgctggc

SEQ ID NO: 3427925 - DNA, 25 bp, Homo sapien
cttggggggcgtcggctgctgcggc

SEQ ID NO: 3427926 - DNA, 25 bp, Homo sapien
tgctgaggggactgggcgaccccgg

SEQ ID NO: 3427927 - DNA, 25 bp, Homo sapien
caccgccacggccatggaggtggag

SEQ ID NO: 3427928 - DNA, 25 bp, Homo sapien
ggcgtacaggttcatctgcaccggg

SEQ ID NO: 3427929 - DNA, 25 bp, Homo sapien
ccgccgaggtggacgaggacgacga

SEQ ID NO: 3427930 - DNA, 25 bp, Homo sapien
cagctggacgagctccggtccacct

SEQ ID NO: 3427931 - DNA, 25 bp, Homo sapien
gtctgttctactgcgattcccaagg

SEQ ID NO: 3427932 - DNA, 25 bp, Homo sapien
tgcaggtctgcctaagtggcgatcc

SEQ ID NO: 3427933 - DNA, 25 bp, Homo sapien
cgattcccaaggtcaagaggcaggg

SEQ ID NO: 3427934 - DNA, 25 bp, Homo sapien
ttcattggttagctgtctgttctac

SEQ ID NO: 3427935 - DNA, 25 bp, Homo sapien
ccaaggtagcaggtcagtgaagagc

SEQ ID NO: 3427936 - DNA, 25 bp, Homo sapien
tgcttgcggcacatatcagctggtc

SEQ ID NO: 3427937 - DNA, 25 bp, Homo sapien
ggaaaagctgctccctaaaccctga

SEQ ID NO: 3427938 - DNA, 25 bp, Homo sapien
tccaaggatccagggaaagggtatc

SEQ ID NO: 3427939 - DNA, 25 bp, Homo sapien
cagcctctcgctgtctatgatggaa

SEQ ID NO: 3427940 - DNA, 25 bp, Homo sapien
tctggtgtctggcaatcatgagtca

SEQ ID NO: 3427941 - DNA, 25 bp, Homo sapien
cagctatgagaaccagacagggctt

SEQ ID NO: 3427942 - DNA, 25 bp, Homo sapien
ttccagctggcaaagaataaggcat

SEQ ID NO: 3427943 - DNA, 25 bp, Homo sapien
gagttgctcagttttcaccggtgac

SEQ ID NO: 3427944 - DNA, 25 bp, Homo sapien
aaccggttcagttgctcttctgctg

SEQ ID NO: 3427945 - DNA, 25 bp, Homo sapien
caaatggcaagctgtaaaccggttc

SEQ ID NO: 3427946 - DNA, 25 bp, Homo sapien
tcattttcctaggagttgctcagtt

SEQ ID NO: 3427947 - DNA, 25 bp, Homo sapien
cagaggaccttggtttccagagttg

SEQ ID NO: 3427948 - DNA, 25 bp, Homo sapien
cactgacactcctcaaagatgtgaa

SEQ ID NO: 3427949 - DNA, 25 bp, Homo sapien
cactaacggcaagggcataaacaat

SEQ ID NO: 3427950 - DNA, 25 bp, Homo sapien
aaaaggtggctgatatgagagctgc

SEQ ID NO: 3427951 - DNA, 25 bp, Homo sapien
tcgagtcctgcacaattaagaaatg

SEQ ID NO: 3427952 - DNA, 25 bp, Homo sapien
ttgagtctcaaaagaatgatggtgg

SEQ ID NO: 3427953 - DNA, 25 bp, Homo sapien
taagaaatgactagcttcccacatg

SEQ ID NO: 3427954 - DNA, 25 bp, Homo sapien
cacagttgtgggaaccttcgagtcc

SEQ ID NO: 3427955 - DNA, 25 bp, Homo sapien
tcttgactctttatacctaggaatc

SEQ ID NO: 3427956 - DNA, 25 bp, Homo sapien
ttgactctttatacctaggaatcca

SEQ ID NO: 3427957 - DNA, 25 bp, Homo sapien
cttgactctttatacctaggaatcc

SEQ ID NO: 3427958 - DNA, 25 bp, Homo sapien
gtcttgactctttatacctaggaat

SEQ ID NO: 3427959 - DNA, 25 bp, Homo sapien
gaaaatgctgcctctttacatgaca

SEQ ID NO: 3427960 - DNA, 25 bp, Homo sapien
gacttgcatcttctagaaaatgctg

SEQ ID NO: 3427961 - DNA, 25 bp, Homo sapien
gactacttcaaatgacttgcatctt

SEQ ID NO: 3427962 - DNA, 25 bp, Homo sapien
acagcggtgggcctcagctacattt

SEQ ID NO: 3427963 - DNA, 25 bp, Homo sapien
ataagatcttaatactcaggctgcc

SEQ ID NO: 3427964 - DNA, 25 bp, Homo sapien
agataagatcttaatactcaggctg

SEQ ID NO: 3427965 - DNA, 25 bp, Homo sapien
gtacataccaccctgtctggttaat

SEQ ID NO: 3427966 - DNA, 25 bp, Homo sapien
caggtacataccaccctgtctggtt

SEQ ID NO: 3427967 - DNA, 25 bp, Homo sapien
taaaaagtgaacgaaggccatagtg

SEQ ID NO: 3427968 - DNA, 25 bp, Homo sapien
gagggtacgggatatcccctgcagc

SEQ ID NO: 3427969 - DNA, 25 bp, Homo sapien
gaggtatcacttgctatggactgag

SEQ ID NO: 3427970 - DNA, 25 bp, Homo sapien
gagatattgcacctgaagcataagg

SEQ ID NO: 3427971 - DNA, 25 bp, Homo sapien
tatcaaagggtcatgaagcaatcag

SEQ ID NO: 3427972 - DNA, 25 bp, Homo sapien
caagaggcatttagctagacgcagg

SEQ ID NO: 3427973 - DNA, 25 bp, Homo sapien
ggaacagctttcacttaacaccagg

SEQ ID NO: 3427974 - DNA, 25 bp, Homo sapien
cagtaggctctaacaggaacagctt

SEQ ID NO: 3427975 - DNA, 25 bp, Homo sapien
aagtatgagataggcctgtaagtac

SEQ ID NO: 3427976 - DNA, 25 bp, Homo sapien
cacatgtcctatgtcaatgcttagg

SEQ ID NO: 3427977 - DNA, 25 bp, Homo sapien
taacattacagtatcagtgaggcac

SEQ ID NO: 3427978 - DNA, 25 bp, Homo sapien
caagctgaacaactcatagtgattc

SEQ ID NO: 3427979 - DNA, 25 bp, Homo sapien
ctggtctctgactcctgggtgcaaa

SEQ ID NO: 3427980 - DNA, 25 bp, Homo sapien
tctctgactcctgggtgcaaatgat

SEQ ID NO: 3427981 - DNA, 25 bp, Homo sapien
ggtctctgactcctgggtgcaaatg

SEQ ID NO: 3427982 - DNA, 25 bp, Homo sapien
ctctgactcctgggtgcaaatgatc

SEQ ID NO: 3427983 - DNA, 25 bp, Homo sapien
taatatctaacgactgagggcaaag

SEQ ID NO: 3427984 - DNA, 25 bp, Homo sapien
gagaacaaaatagatgacccaggcc

SEQ ID NO: 3427985 - DNA, 25 bp, Homo sapien
gaaggtttcactggacccaaccaga

SEQ ID NO: 3427986 - DNA, 25 bp, Homo sapien
taaaaccctcagatatgacagctgc

SEQ ID NO: 3427987 - DNA, 25 bp, Homo sapien
catgtgccaaaaaggcttcagggta

SEQ ID NO: 3427988 - DNA, 25 bp, Homo sapien
taatcacatgttgagggctggtctt

SEQ ID NO: 3427989 - DNA, 25 bp, Homo sapien
gctggtcttgtaactctaatgaggg

SEQ ID NO: 3427990 - DNA, 25 bp, Homo sapien
gatatgtggaaagtctaccgcatca

SEQ ID NO: 3427991 - DNA, 25 bp, Homo sapien
cactaagaactcaaaattcaccggg

SEQ ID NO: 3427992 - DNA, 25 bp, Homo sapien
gaggaccaggcggttctctgctaag

SEQ ID NO: 3427993 - DNA, 25 bp, Homo sapien
tcttgatgcagtcgggcccactggt

SEQ ID NO: 3427994 - DNA, 25 bp, Homo sapien
tgcacacagacagcacgtatgagtg

SEQ ID NO: 3427995 - DNA, 25 bp, Homo sapien
gatatctgttagatatttaggtggg

SEQ ID NO: 3427996 - DNA, 25 bp, Homo sapien
tttaggtggggctatcaggtagaca

SEQ ID NO: 3427997 - DNA, 25 bp, Homo sapien
tgtaaatttgagacacatataaacc

SEQ ID NO: 3427998 - DNA, 25 bp, Homo sapien
tacaaatttagagatcagagaaaaa

SEQ ID NO: 3427999 - DNA, 25 bp, Homo sapien
ccacacagaaaatcgctctgtaata

SEQ ID NO: 3428000 - DNA, 25 bp, Homo sapien
tgctgaacctgtgcacagtgtgtct

SEQ ID NO: 3428001 - DNA, 25 bp, Homo sapien
aggcagccatggtacatgctgaacc

SEQ ID NO: 3428002 - DNA, 25 bp, Homo sapien
cgctctgtaatactagtaatttatc

SEQ ID NO: 3428003 - DNA, 25 bp, Homo sapien
tgtgatcccagcactttgggaggcc

SEQ ID NO: 3428004 - DNA, 25 bp, Homo sapien
cgtgatggctcacatctgtgatccc

SEQ ID NO: 3428005 - DNA, 25 bp, Homo sapien
aaagtgggtggatcacctgaggtca

SEQ ID NO: 3428006 - DNA, 25 bp, Homo sapien
ggagttcgagaccagcctggccaac

SEQ ID NO: 3428007 - DNA, 25 bp, Homo sapien
tacgttcatgcagattcccagccaa

SEQ ID NO: 3428008 - DNA, 25 bp, Homo sapien
cagaattaccacaccaatggcagga

SEQ ID NO: 3428009 - DNA, 25 bp, Homo sapien
tactttcactgtcaatgccaccgga

SEQ ID NO: 3428010 - DNA, 25 bp, Homo sapien
caagctgttagttttcacggcctgc

SEQ ID NO: 3428011 - DNA, 25 bp, Homo sapien
atgtttacctacatacttactattt

SEQ ID NO: 3428012 - DNA, 25 bp, Homo sapien
atgttctttactactttaagcctca

SEQ ID NO: 3428013 - DNA, 25 bp, Homo sapien
ttttactgtcaattaccatttagaa

SEQ ID NO: 3428014 - DNA, 25 bp, Homo sapien
catgttttaactccataatacattg

SEQ ID NO: 3428015 - DNA, 25 bp, Homo sapien
taatagtcaaccaggaatttgggca

SEQ ID NO: 3428016 - DNA, 25 bp, Homo sapien
cgctgctcacagtttagggatatac

SEQ ID NO: 3428017 - DNA, 25 bp, Homo sapien
cctggattcaaactgcgaactgtct

SEQ ID NO: 3428018 - DNA, 25 bp, Homo sapien
gaactgtctctcctgtcgtatgaag

SEQ ID NO: 3428019 - DNA, 25 bp, Homo sapien
ccaatcgtcacactcatgagctgca

SEQ ID NO: 3428020 - DNA, 25 bp, Homo sapien
atcgtcacactcatgagctgcaaaa

SEQ ID NO: 3428021 - DNA, 25 bp, Homo sapien
gttcagagacgtaatgtgctgatgt

SEQ ID NO: 3428022 - DNA, 25 bp, Homo sapien
cgtcacactcatgagctgcaaaagg

SEQ ID NO: 3428023 - DNA, 25 bp, Homo sapien
tacaactattaaagacagtggtcag

SEQ ID NO: 3428024 - DNA, 25 bp, Homo sapien
ggaagctagagaatacctgaaagtt

SEQ ID NO: 3428025 - DNA, 25 bp, Homo sapien
tgagaacaccaagtccagattatct

SEQ ID NO: 3428026 - DNA, 25 bp, Homo sapien
cataacctcagtacccaagaaagaa

SEQ ID NO: 3428027 - DNA, 25 bp, Homo sapien
tcagtaatatgagaactactttttc

SEQ ID NO: 3428028 - DNA, 25 bp, Homo sapien
caggatctcttgtgaggttgccatc

SEQ ID NO: 3428029 - DNA, 25 bp, Homo sapien
tgcaacgttccaatgcttacacagg

SEQ ID NO: 3428030 - DNA, 25 bp, Homo sapien
tgtgtgtcagagattcagaagcagc

SEQ ID NO: 3428031 - DNA, 25 bp, Homo sapien
acaggtcagccctcttcggtgtggg

SEQ ID NO: 3428032 - DNA, 25 bp, Homo sapien
ggcagaccagttgcaccaatacaat

SEQ ID NO: 3428033 - DNA, 25 bp, Homo sapien
gcccaggcagaccagttgcaccaat

SEQ ID NO: 3428034 - DNA, 25 bp, Homo sapien
gaccagttgcaccaatacaatggtg

SEQ ID NO: 3428035 - DNA, 25 bp, Homo sapien
aaatttgttagatagtgcaaccatc

SEQ ID NO: 3428036 - DNA, 25 bp, Homo sapien
gctacagtgcgctggaagtcaggtt

SEQ ID NO: 3428037 - DNA, 25 bp, Homo sapien
ctctctgctacagtgcgctggaagt

SEQ ID NO: 3428038 - DNA, 25 bp, Homo sapien
ctctgctacagtgcgctggaagtca

SEQ ID NO: 3428039 - DNA, 25 bp, Homo sapien
ctgctacagtgcgctggaagtcagg

SEQ ID NO: 3428040 - DNA, 25 bp, Homo sapien
agactacaggtgcattctaccgcac

SEQ ID NO: 3428041 - DNA, 25 bp, Homo sapien
caggtgcattctaccgcacccagct

SEQ ID NO: 3428042 - DNA, 25 bp, Homo sapien
ccactgctgccagctgattttttca

SEQ ID NO: 3428043 - DNA, 25 bp, Homo sapien
actgctgccagctgattttttcatt

SEQ ID NO: 3428044 - DNA, 25 bp, Homo sapien
ggtgggcgcttctcatgcagtgaaa

SEQ ID NO: 3428045 - DNA, 25 bp, Homo sapien
tgaaaatgtaggatacaaggcctga

SEQ ID NO: 3428046 - DNA, 25 bp, Homo sapien
gaagctgggttagttagctgcccac

SEQ ID NO: 3428047 - DNA, 25 bp, Homo sapien
accctgtgtttcactggtgggcgct
